United States Patent Application Publication US 2007/0150978 A1 - sequence listing, part 8

SEQ ID NO: 46847 - DNA, 477 bp, Oryza sativa
  unsure (1)..(477): unsure at all n locations
agctntctgagtcatttaccgtctaagcacaatgttgtctcatttgtgtgtaccattaaatcactgatgacttaaaactagaaggtcacgagcttggtagttgaagcgtggcacagccaaactaaattaaactaacaaccataagaaaattatgtttgtgagtaaagcaataagctctcacatcgacccatcagagaggggtggttgcaaaagtactttccttgtctttttcttatttaaaaaagtgtcaagtttgatattatattatataggtagtctatgtatatgaaatactccatagtgttacctttgtccattgcagaacatgatatcaaaaacaaacacacaaatgtctacctgcagagtagtcaaaatatagtcagataaaaaagacacagttacaaaaaaaaaagatggattagtaagcatattatgcattcctaataggtactgccactaactatttgtctatccaca

SEQ ID NO: 46848 - DNA, 484 bp, Oryza sativa
  unsure (1)..(484): unsure at all n locations
ntgtttcgatatagggggttgttgaaacgatagaggatggttgatcacttctctctgatggctggtcggctgctcacggagtcgacgctgcagtcagccgtgcaggaggctctcgctgtcgcctccgtgaagatagttcatgatcagcctgatcttcccgttcatgaagatgttcaggatggaaaggcgaagagcggtgtcatggtggaatgcagaatctgccaggaggaaggtgacgagtcctacatggagaccccttgctgctgcaagggcagcctcaaggcaaggttttctctgttcccattctgaattctctgcatcattacatgattaggtgttgccattttgataacctttatgtatggaagagcttgctgaattgattagtgatcgggatataaattatttcaatctctagccctcttttntttttggaaacgtattttctagccctcgttaacccccaggacaaccaccagttcag

SEQ ID NO: 46849 - DNA, 440 bp, Oryza sativa
  unsure (1)..(440): unsure at all n locations
agcttagacgagtgtgtgaaagtttgactcttagtcaaggaatggttaactatntgcgccactctcacgagtggtgataaaagatttaccactaaaaccatatatcatagacacatgagggcttatatgtcataaacaataagtgacaaatccttaattgtcacgtattaaaagtggcaaatagttaaatgtgtccccctagtcaaacacgtacctattcacattttctttattattattattaatattatcttacatatatgagctcttgaaataggagtagggtatgtactatagacaagcaaggtgtattatccatggcccctttaactntagcccggcccncttntcattgttctccattcagncggctttttttaatatttatttcaattggtggntggaagaaatattccattgctgctttatttctaaacaat

SEQ ID NO: 46850 - DNA, 343 bp, Oryza sativa
taaagcatatcacactgtgaggaatgtgattagttctcccgcagtagccaatattaaaagaataccattgatcacgataatgcttaaaaagaaaacagtcacagctgtcaactatgacatgaatccgagagaatatcaataccaactaaactaatactaccattgtatcattatcatctgaggcgctgcatccactcctcacccgctcaccctaatccaaagtcagaaacggctgaacgtgtaacccacaggggcaaggcttggacaagaggccgacatccactcgggaccaggctaaatcgccaagcgacggtcgcgaagcctccacgccgcaccatcggac

SEQ ID NO: 46851 - DNA, 458 bp, Oryza sativa
  unsure (1)..(458): unsure at all n locations
agctttaggaccatntatatattaatttgagttaatagtatcgccgatgatttttacagaacacgttaatttgaaaaagaaataagtctttaggattaacttgcttatactcttatagacatatagttgtttcttaagtttaattgtttttcgaaggttatagtttaattaaccgtttgaccaagcacatacggacaccatcttggcatcttttgactaacctaacacatgctcaaagaatgtgaactttggtcgttggtattatgccctcacaactccaccgccgtacagttcgatgctttactatttacctcaatcatcatctcatggtggtagtaaataaattatgataaggtcttgaattttgaacaatgttctgcttcttccttggagtagaaagattattngtgataagaatctctcactagacaaaaattgtcacaagaacaatgattaat

SEQ ID NO: 46852 - DNA, 418 bp, Oryza sativa
tctactggtaatcatggatctatcactgtcagtgttatctacaagctagctagcgagagctaattaagctaaaacctgtccttgcaagagcagatagatctagccatctagggcctaggtctactgcctaaaccaatcgatcaacacacattattcacagttgataaaaaaaatatactagcactaaatattaattacttaagggattgatctgatgataagtactcctagcacactactcaattgctcataggatgccacacgcacagtacggtttgtacatgttaatagatcaggatgcacatggagatcgatggatgagcattgacagattaatcaagaaaagattaattaattagaagaggatgacgaccactcatagattaattagaagaagatgataaatgggcagagactg

SEQ ID NO: 46853 - DNA, 315 bp, Oryza sativa
acctgccgcatgctagcttattcaagctattggtaacagagcttatagtatggggctcctttcaaagcttcttccttcagatattgatcccaatttccccattgtccaatatgctgatgacactctcctctatttgaaagctagtgatagagaactttttattctgaaggctttattacaaacttttcagctggggactggtctgaagttcaatttcaataaatcttgtctcattccaataaatgttgatgaggggaaagctcagaacttagctgcagtttttggatgtaaattggggtatttgccttttactta

SEQ ID NO: 46854 - DNA, 436 bp, Oryza sativa
  unsure (1)..(436): unsure at all n locations
tgctgagcacgatctcgatgtctcctaagcttatactctctccgtttcagaaagttttgacaccgttgactttntagcatatgtttgactgttcatcttatttaaattttttttatgaaatatgtaaaactatatgtgtacatgaaagtatatttaacaatgaatcaaatgatatgaaaagaataaataattacttataattttttgaataagacgaatggtcaaacacgtacttaaaaagtcaacggtgtcaaatattttgaaacggagggagtaatagatagagtaggctgtgttgaccatgtctaagctagtcctagctcttgccatacttcttcctactaatatctttccatttcaattgaaaaattaatctcattaacttattaacacacagattctcctataattgtagtctcctcttttaccaatggtc

SEQ ID NO: 46855 - DNA, 445 bp, Oryza sativa
  unsure (1)..(445): unsure at all n locations
agcttagcccacaatgtcttccaaaagtttctgagatattttgtatcccggtctgaaacaatagtctttggaactccatgtaaacgaacgatctccctgaaaaacaaatcagcaacgtgtgaagcatcatcgctcttatgacatgggataaaatgtgccattttagaaaagcgatctacaacaacaaaaatagaatccctccccctctgagaccgaggtaaccccagaacaaagtccatagatatatcttcccaaggtacatgtggaataggtaatggagtatataaaccatggggattgaggcgggacttagctntcaagcaaacgatgcagcacccaacgtgccgctggacatcacgtcgcatatgtggccaaaagaaatgatcagagggcatgtccaatgtctttntgacaccaaaatgaccagccagtccaccggcatgtg

SEQ ID NO: 46856 - DNA, 363 bp, Oryza sativa
  unsure (1)..(363): unsure at all n locations
tcgccagagatcacaacatggcaacggttcggccttcactgtgacggcgacttccggcggngttcggcgcanaagaacgggtggccggagtagagttcttcactgcgaagccgagggaggtgccggctcttaccggcgaatgccggggcgacngcgaatggcggctggagctgctgccggaggtggagagagagggagagcactgggagagcgtttccggcgaccgcggaagactggacttgaggtgatgagcagaggacgactatggtggtctttatatagccatgggaggcctggatcgagcccacaacgactggataaactcgggaaagtttacatcttctccggataaacgtacggttg

SEQ ID NO: 46857 - DNA, 464 bp, Oryza sativa
  unsure (1)..(464): unsure at all n locations
agcttccgatatatgcagcccttgataatactgtgccacaacctcagatgcaattctttgtccagaatggagctgaaattgatcaacaagatttagccttgtgaaggcagaaaaatatgcatgaagagtaaaataatactgaagcagaaaatgagactcgcatgtctaaaataagtctccgtggaaatcgttttgacactttacatgttatatcagaaaaaaaaataatagggcttgccgaataaaatggtactcgtgtgtccaaattcaccaactgtagtcatatggaacaagagataacaaatattgatccttcagatantttttttgtaaaanaatgtcacatactgaaaacaacatgaatgctccataatctccataatttaaggaatcaganaatggcatcaatcgaaggtagcgccaacagaaaacaaaattatagactcagcttttgtatggacaac

SEQ ID NO: 46858 - DNA, 502 bp, Oryza sativa
  unsure (1)..(502): unsure at all n locations
tcttcgctgcacctcgttgcccgcgtgccctcttctgttcacggagggttgactaccactagcctcctnctcctggttccactccacatacctttccacgtgcccctgctggttcccctccgcatacctctccacgttcccttcctcgttcaagtactggtttggatcctcgttcccctcttcttcattccagtactggctgcttccctccgcgaatgtatcgtacaatatctgttcctcatcgcggtcagccatctgttgatacaagaaacatctgctaagtcacgagacatntatgttttaacaatctaagtcatgtatgctaagtgtaaatgtcgtacattagaaccctacacaaacttacgtgctaagtctaattacaaatcgtgatataagctaagtctaggtgacgtatattatacaaccctagctagtanataattatatactaagtctaagtacaaataaagtaatcttatattanaactcanataatattaca

SEQ ID NO: 46859 - DNA, 363 bp, Oryza sativa
  unsure (1)..(363): unsure at all n locations
agcttggtctanaattcccgataaattagtcttttatgattatattggtaataatccggcaaaggggggattattcagagcaggctcaatggacaatggggatggaatagctgttggatggttaggacatcctatctttagagataaagaagggcgcgaactttntgtacgccgtatgcctactntntttgaaacatttccggttgttttggtagatgaagagggaattgtgagagcggacgttccttttagaagagcagaatccaaatatagtgttgaacaagtaggcgtaacggtggagttctatggtggcgaacttaatggagtaagttattctgatcctgctactgtannaaaatatgc

SEQ ID NO: 46860 - DNA, 435 bp, Oryza sativa
  unsure (1)..(435): unsure at all n locations
tctgataaactgagattntcggctaacccatcactaactcttcgatatatttcttgctgaaagtatccctgatcccactgataacgagtaggcccaaacaattcaattggggtagttgctgacccataccacatagttccggcaactacgaaagctgcaaaaaaaacagcagcgatactactggaaagtacagtttcaatattgcccatacgtaatcctttgtatagacgttgaggtggacggacactaagatggaataggcccgctaatatgcccaatgtacccgcagcaatatgatgagaagctattccccccggaacaaaaggatcaaaaccttctgcaccccacgccggatttacagcttgtacttttccagttagtccataaggatcagacacccatatcccaggaccatacanacccgttacatgaaat

SEQ ID NO: 46861 - DNA, 449 bp, Oryza sativa
agctttcgttcgccctaggatattgagttatactgagaaggctgacgtcttctttttgttggtgaaggcctatattgctgagctcgagtcgctggtcacgcaactcgaggaggagaacgccaagatgttcaaagaacaggtacttctccgagaccccgacatttctcgtgtgcttgtttgatgttggaaacttgaatgtggggattcgtgtgttgagaattgaaccgtgtctccattgtttattgagcttaaacttgcagaaatgtttctgttaaatctctaggtgagtaggcatgtgaccatgaacatgttagaactgcaacagagttgggctgtggagccaaaatgaattgcaagtagtattcgtttttgttagccatctgcttaggatgccatttggcgtggaaatattttaaaggaaaatgcttcgcatacaacaatcatatact

SEQ ID NO: 46862 - DNA, 483 bp, Oryza sativa
ttaaaactcagctttgagagaacccatcctgaatgtttttattctgtctctgcgaagacgggattcctggataggcatgtagaggttgctcgcggcgttgcctgaacttttacttgggataactctgggaatatgttggggagctattgtgaagtggcgcagtatagaccatgcagctcaacttctgttttattttttctcactgcctttttgggatgtttgtcctgcctgcctgcgacttcattcgtggtgaatctgctgtccccatcagaagacacaccacagtgagaggccactgtactttcctagctagtatatatgaccgatcactgaagcagttcaaaattcaccttttctattgccgctacttcatttttattctcttctgtgtggaccatagaaataactgacatctattcggtgctcatatacgtgcagctatattttctgattagcatattgtatcataagatgttttgtttg

SEQ ID NO: 46863 - DNA, 397 bp, Oryza sativa
  unsure (1)..(397): unsure at all n locations
agctntcagcacttcacgtcgacggactatattctagtaatgggctaggccgagcacggtaccagccaagctgatcatatggtgaaaaccacggtagggcagtttcatatgtgtattatatgttttaaatagaaaggattagttattttcattttcttgttaggtgtcttatctattgtccgatcaagacttgtatcaacccaagcgtataaatacgtacacttgtggtctttgtaaatcatctattcatctccacttgtaataccaccactttttattccgacgagttcttagtatcaagtgaggctacatcgtttcgatctccaacaaggaagtagtttcgtcaacttcgcttatatcggtatggctagaactctttcgagctgggctacattat

SEQ ID NO: 46864 - DNA, 505 bp, Oryza sativa
  unsure (1)..(505): unsure at all n locations
actcagcttaggcagttntcaatacgaatntagacaacagattactcttgaatacttgttaaaaacatgttgctttgaatgcagtgcttttttcctcagaatgaggtgaaacagattcagacacctttgttcattctcaacgcagcgtatgattcctggcaggttatcatctgatccacgttctgcaatacttctatgattatgatccttttagtgttgcccttagataaatatgctttgtagtggcatatgttttggcattgtggctgtgtacatccgatttggatgtagaggccagactttaatccattttctaaaaatatgttttggcattaatttaggtctcgtgtgttacaggtaaggaacatcttggtgccaggatttgcagaccctcatggtaaatggcatagctgtaagcatgatatagatcaatgtcctgcatcgcaacttcaaatcttgcaagggaggtactagatagtgtattggatgtaatactgcattttct

SEQ ID NO: 46865 - DNA, 401 bp, Oryza sativa
  unsure (1)..(401): unsure at all n locations
agctnatattagctgttctgtgcctcgtattatatattcattttataggtcagtgttatcttgactgttattttaaatatgatgcgagatttccaatcacgagaatacatggaccaataatatcccttctctcaaagttcttatgaatcaacaacaccatcatttgctttttagcttatcagcatatttaatatttgaatattaaatttagagctgattctaaagtattttttgttgtagttaattcttcaacgttagttctcaaatcaacaagataccatatatttctttaatgtgttatgggtgatcaaattatgccgagtgctcctataaccacatattctgaggtgcctatatgttgtaagccgacatgtgtttataaacatgagtgtccgtcctat

SEQ ID NO: 46866 - DNA, 462 bp, Oryza sativa
  unsure (1)..(462): unsure at all n locations
tgcacagctaactcctgctggtgccaaggacatgatgatttctgaacctatgcactggagtagagctcgtgttangatagggtccaattgtgatagtgtagacaacaatatgtgtgagagcttcaataattggataaatgacatcaaggcacatccaatcatatctatgtttgagggcataaggaccaaggtttatgtcaggatacaacagaacaggagcaaagcacaatgatggctatgtaggatatgtccaaatatcttgaagaagttgaacaagtacattgacttatctggaaactgtgaagccatttggaatggaacagatggatttgaggtcactgatcaggataagagatacacagttgaccatgagaagagaacatcgtcctgtatggattgcaattggcaggtatttcttgtgacatgctattactgcattatttgtgagctcaaagcaacctg

SEQ ID NO: 46867 - DNA, 371 bp, Oryza sativa
cgcccgtggccccgtgcgagcgcatgacttttgtttgtttctgaccgctgggtttgtcgtgattcgggaagcgcgccgcctccggtctggcacgaactgtccacatacgctgacgcagttacgtatagagcgtctcacggcgagccggtgtgggatcagatgagtcaacacatcttctgagatgggtctggtatactttcagtgcgtgaggactccgagcggcttcagaatgggtggcggaagacctacagaactcgggggcacacccttcacaggacacgctagatctctactgacgatttgtgcattcgaacccgtctttgtcttcgctcactgactaagggtgtataatgaagggcctttgtattgtc

SEQ ID NO: 46868 - DNA, 498 bp, Oryza sativa
  unsure (1)..(498): unsure at all n locations
ctcccgaccaatgtccgaccggtggcgtgtgacccacatatgccttcatgtatatcaaggaggaggtgtctaccgtcgtcggacgagacacatttgagaagtaccccgtttggcgctttcttgtatagattgttgggccactgtatcgtcctcgggcaactcctcgctgttgatgaatttgattagtgggatgcgccagtcgtctgtggtctcgatatcggcaacggcgtgttctgcctttgtggcctccgagctaatgtcgggggtgaccgggctaacttcaccgctaacctcttttactgatggcttcgttaggatgtccagaaaggtgccgggctcgagcggttctcgtctagacgcatgtcgtgctaggtcatctggctcgatgttgtctttgcnggagacgtgtcggacttctatcccatcgaaccttttctctagcttcctgacttctgcgagatacttggataactcacgggtagagcatttataatcttt

SEQ ID NO: 46869 - DNA, 375 bp, Oryza sativa
tatatgatgtctagaggagcacaccacaatatgctttggctaactttcatcattccaggtggagaatgattgaacattgcatgttaatttgacaagcttcaaaaaaggcactgagataactacagaataattgattattacaattcaaagaaataccaagtgaataggatatcaaaattaaaacttttgcagcgattctggttcctagagctaaacttttttaaaaaataaatgaatgtgcaaaacggagtaatgcagaactttgagaaccaaatcaatgcctagtcataatatttatcacagcagatgcacatcctgataaccgggtctgagaggagttgtccacttgcagtcagccactgactatgaatcttg

SEQ ID NO: 46870 - DNA, 480 bp, Oryza sativa
  unsure (1)..(480): unsure at all n locations
taccattattatccatcttgttttccaaaaatataattcattcttgtctntaaggatggatggattgaaatcattaaaatataattgtgtacatggataataggtgcgtcagggttaagaatgctagataatttaatgcattagtattgtaaagtagttctttggatgaatcttttttcattcaatttgttgacaatagtgtgaatcatttggtaatgaagcttaatgatattattctcctattgcttcctgagaaactatgtgagcaccgcaacatttataccgtgcacccttcttcaggtagggcttcaaatgccacatccattggataagacaacttgtcccacaccttaagagacacgccagcgtaaaggcccatcctcgataacctactgacacctgctctgcttcattgcaatcatcgtgtgcatgggctatcatcgatattcgcgctgaactctattggcgtccgaattgtgt

SEQ ID NO: 46871 - DNA, 468 bp, Oryza sativa
agcttgtgacttgatcgaagatcgtggcttgttctatatgttcaaagacatcaactctaaggcccacttcgcaatccgtccatttgcttcgcgattgtgaagtatatctccgagtggaaatgatgtgatcaccgtgaccgagttactttgaaagtagtgagataatttcctacgttaattaagacaccatataataacttttgaacctgaggatatcttgtcttggagtcggctaaaacttcgctaacaaaataaattggacgttggactttttgaatatggccttcctctttacgttcgacaaccaggaccgtactcacaacctggtaggtcgccgtcacatataacagtagcggctcttgtggatgtggcgaggccaaaactggtggagtggtgagaagattcttgaagtcttcaaaggctttctgtgcttcgggtccccactggaaattgtcagtcttcttcagc

SEQ ID NO: 46872 - DNA, 452 bp, Oryza sativa
cagattggcaggacaacgatcagacaataacaagttcttcttgttagttatttatgaagacgtcaaagcatgtcaagtgggataagttggctctgttgagaaacataattcaaaggcgaagttatcgaccctcgcatcgaatagcagaagcagctagcacccggagaccaggaaaactaatatgaggcacgttgtggcaggatagaagtaaatgacaagcatgatattcttatgatgacgaacatggtatcctagtaatgaccagctagtggtgacgcatgacatgaagtggtaacttgtatgacgctgacgccaaagatatgaactatgagaaggtctggatctgaagccccatcatcaagtgccacaacccagtcgaagtcacctaaagggtccaccatggacaagtcgtgtgacgagaagatcctattctgcacaggagatcgagacag

SEQ ID NO: 46873 - DNA, 443 bp, Oryza sativa
  unsure (1)..(443): unsure at all n locations
ttagagaggccgtgactgatacaaccaacaaccttgtgttcatttatgcggcatcactgaccaccaaagaagaggaatgactgaaacaagatttgctgcccactgtcttgtcggaaacgggcacagttccgaagcgctttctcgtgccaaaagatgctgggctaggatggcaacactgcgaggtcgctcanctgcgagtggcggcagtgtccgaatggatccacagccctgtcggtgctaccaataaaggctcgttgtcatcccctcctagggggaaattggcccgaatcggaatcggtctcgtgtcctgttttctcggtaaaaaagacacaatgcaactaaaattatggctgagttctaaagaaaaaaaagaacgttaacacgctgtaaaactgctcacagtacgttttatacattcaaaacctttatatatataagtttat

SEQ ID NO: 46874 - DNA, 410 bp, Oryza sativa
  unsure (1)..(410): unsure at all n locations
agcttggggattgatcctatagattttagccttgtgccactaggatgtataatttgcagaattaaatgtatcattacaatcatacgggaattcaaaaaggagatagtactaaatataaagagaggattgcacaataatctcttgtttgtaacagaagtatgcaaaaaggatattagagtttcattttaaaaaatcattgtcctccgaacacagttcaacatataacaataaaatgaccatgcaaacatgaaaaagattctaataactgaaagcagatatacatggaacgctctaagagatacagaaaatatggtatatcaccgccttataaantatttgcggccgtggaaacattccccatgatctaactgtcggttttactcgtcttcatcctcttctggctcataaca

SEQ ID NO: 46875 - DNA, 474 bp, Oryza sativa
  unsure (1)..(474): unsure at all n locations
ctgcacagctaactcctgctggtgccaaggacatgttgagctctgaacctatgcactggagtagagcttggtttaggatagggtccaattgtgatagtgtatacaacaatatgtgtgagagcttcaataattggataattgacatcagggcacatccaatcatatctatgtttgagggcataaggaccaaggtttatgtcaggatacaacagaacaggagcaaagcataaggatggctaggtaggatatgtccaaatatcttgaagaagttgaacaagtacattgacttatctggaaacttgaagccatttggaatggaaaagatggatttgaggtcactgataatgataagagatacacagttgaccttgagaagagaacatgtncctgtaggtattggcaattggcacgtattccttgtgcacatgctattactgcattatntgtgagctcaaagcaccctgaagattacat

SEQ ID NO: 46876 - DNA, 390 bp, Oryza sativa
  unsure (1)..(390): unsure at all n locations
gccgctgcagcttctttcatgatnatacaactcttctttgtcctttgcctacccttacatacagtgtcataattaattgtgcattcgtcatattcttgcaacctagtctataagcttttagggcccatacctggattattcttcataattttaactgcctttgaagctacccatttactagttgcagtagtggtcctcctcatgctactagatgtacaggtatgataatccctcaacaaagtcacctgcatcaattgaaagaaagcaatacattataagtaatgcaagaagtttacatatcacagtgtgcaatcaaagtatttatatcaaccttaattatcttcatgtcagcctgcctacttccaacaatatgccaaacacaacctttca

SEQ ID NO: 46877 - DNA, 396 bp, Oryza sativa
ctttagtgaactggataaattttctatttatcggcaacgctctgcagctccggattttcaaacgatacttttccttcatccgcgatctttggagttctagctcttacccagttccttgatctctgtgtctactcctccattggtaccggttgccccttcttcctcatttcctcctcctcttttgtccactgctccaccagtggcaggccaataccaatacaactaagtttaggagtggatttcatttcgtacctagttttggtgggctaaacaatgaacattatatccgtaaggacattcttgaagaatcaaagcttctaaaccattccactcaccacgcgtattccgcggagcctaagcgatgaggaagattgttcttcttggccaactctgcat

SEQ ID NO: 46878 - DNA, 450 bp, Oryza sativa
agcttgccgtcgccttagaacgacctctgtgttcttcagccactccggatggatgacctcgcggatgaatctggcctccagaagtcgcgccacctcctcgcggatgaaggcttgacgttccggggcctgccgccgtactttctgccggaccggccttgcgcccgaccgcacggcgagacggtgctcaatcacctccctggggaccccgggcatatccgccggtctccatgcgaagacgtcagcgtttgcccgcaggaaagagacgagcgcgtcttcctatttgccgtccagaagaccaccgatccgtgtggtcttggacgggccgtcgcccagggcaacctccttgaccgggacctcgtcgcatgtgactatccgctgcctcggggcggcgggggcggaggtgccaagcctctcgtcgccttccttcggcttggacgcggcggtgaggtg

SEQ ID NO: 46879 - DNA, 499 bp, Oryza sativa
  unsure (1)..(499): unsure at all n locations
taatgttaggcctctgctgagattagcttgtcgctcaattttcgggacttctactggctttactgacatgctagtgaaacacataccctctgtcaaggatgctgctccaaggaagatagaacacatatacactggtccacaagattccactattgtggatgctatgaaaaaatgtgatccacatgcgccccttatggttaatgttacaaagttgtatcctaagtctgactgtagtgtctttgatgcctttggacgagtttatagtggcacaatacagactgggcaaactgtgcgtgttcttggagaaggctattctcctgatgatgaagaagatatgactgtgaaagaggttactaagttgtgggtgtatcangcacggtaccgtgttccaattagtaaagcccctgctggttcttgngttcttattgaaggtgtagatgcatcaattatgaaaactgcaactatatgtcctatgaagatggatgaagatgtctacata

SEQ ID NO: 46880 - DNA, 429 bp, Oryza sativa
  unsure (1)..(429): unsure at all n locations
agcttatttggcaatgcaagatcctcctgttagtattcgacaacggaaggatcatggtgactagcagtggcagaacatgccacaaagcctatcaacaagaagagcatggagagcttggagtccatggcaagaaggctattgtttcctgccatggcatgcctagaattcatgaacactctttataatgaccagccatgtttcttgcaagtaattcactacacctgaaatctgaatacctgacaagggcccttctggctcaagctgtgaaggagtggtactagtaccttgctttatgaagaagctgcagttgcaggtatacttttgctctatagtttattcagaaaattgcttgatgtattactntattgttctattgatgacctcttatcatgtttaaattttgattatgctaaaatagaagtttttatg

SEQ ID NO: 46881 - DNA, 449 bp, Oryza sativa
  unsure (1)..(449): unsure at all n locations
ctctgggctanaagtagtatatctatgctcctttatattatagtagtggtggtggcaatgaatctgtcaccccacctactcccattgtaaatcttgcaagttaatccctgaacttcttaatattaaaaaatatcaaatctaaatggatagccacattaaattagagtaagatgaatattccctatagcaaaaaagatgggtaacacattaatacgttttcttttatccgtagcagagcacatgcatttagctagtttcaatgaacattntgtaaacaacttacacgttctaatggaaggaaaaacgcagaagcactggaagatttacttccagcattcagggcgacagctcttgcttgacaatcaacaacaggggaaccactagagccacctttggtaccagatgcagcctatagaaacatatgattacattataatgacagagagagt

SEQ ID NO: 46882 - DNA, 440 bp, Oryza sativa
  unsure (1)..(440): unsure at all n locations
agcttgtggtgacgttcaagactcgcacatgctagcgcttggtgtcgnggaagggccccgacgacccgtcgccggggagcttctcgttcggcggcgacccggacacgttcctgcaggtgttcatctggaacgggacgcgcccggtttcgagggacgggccatggacgggctacatggtgtcgagccagtatcaggcgaactccagcgacatcttctacttctccatcgtcaacaacgaggaaaagagatacataacgttcagcgtctccgagggctcgccgtacaccaggtatgtgattacctacgccggcaagtaccagttccagcgctggaacatcagctcgtcggcgtgggatgtcgcggagtggcctatatgggactgctactattacaactactgcggcccgaacggctactgcgacaacacagcgagggcgcct

SEQ ID NO: 46883 - DNA, 463 bp, Oryza sativa
  unsure (1)..(463): unsure at all n locations
acacatagaaactcagcttctcatctgttgagagcttttattcttggnttctctatgcctggactactgatatcgtgggctcatgttgcgagtaatctgggcagtgtaagtgtggacttaataagtagctgattggacgtgtaagtgtggatggacaccaagggaacacatgnttttgtgttagaatgtagatcangagacatttgtactgtcgaactcttgctaaggtagttctatgattttgctcttaaccttttttgtgttgagttcgtttatagagagaacggaatttggctctgcctgagatgcctcgctatatggatttattacctttcaccagcttctacagcttgtgttcctggctaatagatgatctggaacaatacaagctgttgtttgtcactactttatcgatgaactcagtgcatcggtcagttgattatcatgtggaataggatgttga

SEQ ID NO: 46884 - DNA, 453 bp, Oryza sativa
  unsure (1)..(453): unsure at all n locations
ngcttgcctccatctcctccttctcgtgtttctcgacgctataaccgcctgaccacaagtgtgagatggtacttcttcttggcggcattatctttcgttctttccatcatcgcctgcccttagtgacctgtcttgtaagcaacaaactcgtcacagtgatcccttagctgttggaatacgtcaaaactccgtgtctgccccttcaggatgtatttccggaacagatctcccttgcaggtctggaactgttctgccattatcttatgagtccactgtttcactatgttctctgtacccgcagggagtgtgaacagcttgagcatcgtggccacagcatctctttctctgatttctggacgaagctgttatcaccctctcgtgcccttgttctgcgccagacaccttgctgaatgcatcgtattcttacaacccaccactgtggcgtacaaattc

SEQ ID NO: 46885 - DNA, 456 bp, Oryza sativa
  unsure (1)..(456): unsure at all n locations
tcagacatctatatttccaaacctctaatatgggtgacattcctggctaccttaccataatttagaactaagaatgaggttatgcccaggtgttacagttctcaacatgaggcttgtgaactgctgcatgtgttgttgacattctgctaccaaaaacgattagttctcttaacaaaataaaagaaaaaaaagggtaccatggttgcttatgttggatttttttaatatactgagacaaatgagtgttatttctttcattacacaacttacctggacatgcgcaggagacattagatcttcattagcaggtggcactacatcttcctcagatggtggntccactcctgtcttttcataaagaaactaanatgggacagggattagacaaggctagaatgcagaatcacatattattgtacagttatattagaaggggtaccctgatcagcccgtcat

SEQ ID NO: 46886 - DNA, 400 bp, Oryza sativa
agcttgagcagatcattgccactgtatctactactaccaatttgccaaatcccaatctctgcattcaaaccagcacttgccatatgaaagtacttttcagtaacagttttttccttaaaaaaaaaatccaggatgtcacaagctattgaatgaagtcataaatcaaggtatctgtctaaatgatacgaatgacagctacttgatttgtgcaggccaggacattggaagatttgtatttaagccaggtccaacaaaggaaagaaacagaggaatctctttcaagggtacaacaagagtttgaacaacttaaaatacagcaagatgaggtcaccgtggaacttcagagagtcaatgagcagaatgagaatctactacgtcaactcttagactccagagagca

SEQ ID NO: 46887 - DNA, 472 bp, Oryza sativa
  unsure (1)..(472): unsure at all n locations
tcgatcggcgataggcgggagacggcgcgacatgccgttgttttatagcgggagagaggaaggagatgggagatcgtggtgttgggctggaaatgtaattttcttttttcttttcttttcttttttccctttttctgagagaaattgagacggcattgcaacgattttgttttcttttaatgagagaacatgagacagcattgcaacgatttcgttatgggggagagaaggagatggggatggattgtggtgtttgttcttgttcatgctcgttgttgctgtccagtgatgcaaagctcatcctcagcagaaaaaagatagcgtggtgaacagtgatcctcgattctagatcaaacgataaggtcttcaatgacatntaggcccttattgtgtggatggaacagtcaccggccgacacatattctggacttgtctgcacaccacagtcatatgcttgttcatctgatctgcc

SEQ ID NO: 46888 - DNA, 353 bp, Oryza sativa
  unsure (1)..(353): unsure at all n locations
tcttaagtcacctgcggcatgcaagctnggaaaagtacctgaggatcttatctagatatatatggtattaaaggacttcggtggcaacgcatacgaggcgaagggggtcctgaacgtggagctcaccgtgggcagcaaaacaattcccaccaccttcttcgtcttcgatggaaagggttcctacagcttgttgttgggacgagattggatccatgcatattgctgtgtcccttcaacaatgcaccaatgcctcatgcaatggcaaggggaccaagtcgagatcgtgcatgccgatcggtcagtacatgtcgccaatgccgatctcgcagtttgggagatggagggaatctact

SEQ ID NO: 46889 - DNA, 480 bp, Oryza sativa
  unsure (1)..(480): unsure at all n locations
tgtccttaacatgtctcctaccaaagactcatatttntcaatcttgttgtatgtcatnttggaggtgtttagatccgggacttaactttagtccctgtctttaaacactaatttagagtattaaatatagactacttacaaaactaattacataaataaaagctaattcacgagacaaattgtttaagcctaattaatctataattagagaatgtttactgtagcatcacataggctaatcatggattaattaggctcattagattcgtctcgcaaattagtccaagattatggatgggttttattaatagtctacgtttaatatttataattaattttcaaacatccgatgtgatagggacttaaaaggtttagtcacatctaacaccatagtacagaagaactagtagtagtaacaagtagtactagcaatgacagaatacactggacattatctctctaatttctctctttcattaa

SEQ ID NO: 46890 - DNA, 469 bp, Oryza sativa
  unsure (1)..(469): unsure at all n locations
agcttcccgtntttttggttccatacactaaatttgctcgtttcatttatttatttattctgaaaaaaatggtttcattagattagtaaggtttcttaaatgtcccaaaaaaattaaagcgaactctaatactatttgaagtttgtaaggttattttgaacactatttctgtccaactctcgccgtgtttagttctaaagtttttctttaaacttctaactttttcatcacatcaaaactttcctacacacaaacctccaacttttccatcacatccttttaatttaaaccaaactttcaattttagtgtgaagtaaacacaacctctattactaactatgaccaaaatactctgattccaagaacatgttcgacggtagcaatgtaaagcaaccatattcattctcactagacgttagcagttgatctcaataatccaacaccacatgtcgattagtcgaacctacta

SEQ ID NO: 46891 - DNA, 504 bp, Oryza sativa
  unsure (1)..(504): unsure at all n locations
taaaactgtctggtacgtagatgaacataataacaatacttacttatttgggagtcttgggactgcaccaaaaccatagagatgggaatgtgcaaccgaatgtacttcttaacataacaggccatatcacaatgaatctgtgtttgctgctcacataaatatttcattacctatttattgcccatttcgccttgtattgtatctaaaccagttttctgcccttttcattatatagctagactatgatgcttccaaacttcgttcctatcatggaagcatttcttgctcaaatgatggtgtcatgcttctgaggaccaggtttttgctgctactagtttatcatttttacgcccccaatttacatcttcagctctcccaccctcttcaatattttgttcactcgcttctattaattatntatgtgaacaggggcatagntctgtatttttaatatgtacttctatactcntttgattgagccaatnttatcttncatatatgtgg

SEQ ID NO: 46892 - DNA, 449 bp, Oryza sativa
agcttcaaagaagctggatgaaggaaatgacattattgcagaagagagttcatatgaagaattttttgtaccataaggacaaaagaaggtaatgatgtgctaatacagaattgaaggagaagttatcctgcactttgactgcaatacacactactcatggcatttatagttaagatacatacaggacaggatatgattttacccttcctttgctgtataggctaacattgtatattcccttatctatggtcaaaggaactgaaattagctaggtgcattgttaggtttcagatcatctttgttctttcttgtactacctccatttcaggttataagactttctagcgttgcccacattcacatagatgttaatgaatctaggcacatatatatgtctagattattaacatatatatgaatgcgtgcaatgctagaaagttttataatat

SEQ ID NO: 46893 - DNA, 436 bp, Oryza sativa
  unsure (1)..(436): unsure at all n locations
nggtgttcactacagtccacctgcaactgtcgacgtgtctatcatgccaccaatctgcaagtggatactctcagcactaaacaaggctaccggcaaaactgttacctctttagaagcatacaaattctctgatgcaacatctgctatatactcttggtggcaataccagctatgtgatgtatttatagaagctataaaaccttacttcttcaacgaacctcaagagtttgaatctgcaagagtcgcctccagagatactctatgggtttgcctggagactggtttgcgcttgctccacccattcatgccttacataacagaagagctatggcagcatcttccacaacccanatattcttgtaggcaagattcaattatgatttcggaatatccatctctcgttgaggtaatacctgtttcctaaataggagtgtta

SEQ ID NO: 46894 - DNA, 460 bp, Oryza sativa
  unsure (1)..(460): unsure at all n locations
tgcagcttaatgcgagtgcaggcataatattattcctcttcaaatcttgccaaaatcattactttatgctctacggttgatccaaatggctatgattttaaagcacttgtctttcagtatatgccaaatggaagtctagaaatgtggctacatccagaggaccatggccttggtaagcagagattcctaactttgggtgaaaggattagcttagccttggacattgcatacgctatagattatcttcacaaccagtgtgtatccccactaatacattgtgacatcaaaccaagcaatgttcttttggatcttgaaatgactgcatatgtcagtgactttgggttggcaagatttatgtgtgctaattcaacagcagagcctagtaactctacnaagttggctgacttanaaggatccatangatatattgcaccangtgagagaaattggaacttatact

SEQ ID NO: 46895 - DNA, 494 bp, Oryza sativa
  unsure (1)..(494): unsure at all n locations
nttactgaactgtattctgcaatttcatcttctacattgtattcgctnggtcgtatnttggaaattgattgtctgttccttcagaaagatacttgttgaactatatggcatatgcactccttggcaaaacacacacacaacttgcatatgtccaagactcgtatgataactttatttatttatactccaactattctgtcctggtcttaagcttgagtaagaatgataagtttgggaggcaataaaagcataaatcgccatcactggtcattaagtaagggtcaatgaaattggggggctttcgttgaagatctcagttctttcgcgcctcaggcaagtgagttatggaagtctttcttcctcatctggtgaagctagctgctggtggttgattccttggttctatttggttctcaagaggctcaaggtcttgctctacctaaattactttanggttagaagctagacatctagcatcaaattaagtaataagt

SEQ ID NO: 46896 - DNA, 459 bp, Oryza sativa
  unsure (1)..(459): unsure at all n locations
agcttaatatatttaattacagcgatatcttattataaagggcagatntagtatatcaagtaaacataaagtaaacaaaataaccaaattaggtaagatcggctgaaaccccgatgctatctctaataacaaaaacaaactagatattatgattctaagtattacttaataggtcggacccaaccgatgcagcattaagcataaatagaagcataagatctaaacaagttgatgaaagtattttgagatggtagatgcactatataatctaagtcaacgttgatatctaactctatcggctgttacctggtagtagatgctagccgatctagggttacatagcaatattgatctagattatatagcacatatgataactctgcaactcacatagacaagattagagtgtcatatagatggaagcactaatcctgagaacgcaagccgccataacaagct

SEQ ID NO: 46897 - DNA, 494 bp, Oryza sativa
  unsure (1)..(494): unsure at all n locations
ntgctgttagctcanacaccctgcagaacagcatttgtttctgtctgcaatctccagagctaaaatttctcggaaatcaagagagaattcacagaagagtttactttgcgcgtcttgaggttctttgcaagtagtattcagaacagggtgtgaactttgagaagctgctacgtaactgcaaagagaagaggacagcttgtctgtctctgtttttccttttgctcagtttattcccctaaatcattttgggctttttttttgagcttctaacttctccagtaatggtttagaatttacatttatttctttaagacaacctttatttcaatagtaacatacttttcatatttaaggacaaccttttagacagtttaaggtcttttggaccaccccatatttgtacaggcaatccattacagtgtaactatagaaatccggttaggtttagtgaccgctgcaagactcatacagtcaggtgactgatcacatgtttt

SEQ ID NO: 46898 - DNA, 341 bp, Oryza sativa
acctgcggcatcaagcttggattgatgggaaagctctctttggagatgatgggagtaggttccttggtgaggttagacaagagaagaagcttgtgaaggtgaagacagaaacctctgatgttgaatcagcacgtcaccgaggaaagaagcatttctatggtgatgacctgcatgcggaggaagggaggtgcaccaagcattccgcgcaagggattgacactgaccaccttgtgagggatttgatggacaaggtcttgctatgcaatggtgagacatgctcaaaaggtgttaaggagttgcgtgaggctctgcagcatgatgtggcgaaacattcacgcgga

SEQ ID NO: 46899 - DNA, 451 bp, Oryza sativa
  unsure (1)..(451): unsure at all n locations
ntaccaccggcagcaacaagttttctacccgggcaactatgtgcttctcatatgtatatttcttcagtgcacttaaatgaacctttactcgtgacaggatcaactcacgctgctgatcatcacaagtctccagtactttctgtacaacatagttaccaaactgatccttcatcatggcctgcaagtgttatttttcaaaaaaaaaacacaaaaacaaaacaaaaacaaaaacaaaaaaacagagagatcagaatgttgaatgcaacttttccggggggaaaagaaaagctcagcaaaggcaagtctatgatttagtaaatatgaaatctgactaaaatctgcaaaacgctaaaccatcggataaataacaccacacagaaagtaattcacatcttatatgaggtcagttacaccaacacagttcttcagcaattcagcttaatacttcagt

SEQ ID NO: 46900 - DNA, 466 bp, Oryza sativa
  unsure (1)..(466): unsure at all n locations
agctntcccgaccacttcaaccagtgtgttgtgatcggcgcgtccgtctccggccggcgtaagcggaggtgggggctatgctaggcatgggcagcaagttgcggctaaactataggacaattggtgaatccctctcattgtattcaaataagcatcttaaaattttaattttttatctaacataagttnttcttttctgatggtatctacgagcaggtacaatagaaggctataagccagctataaccacatatcaagaagaaaagtgaagagagagaagacagcgggttacatatttatagctagctgcaacacggactctaaaatattatttgtgtatgagagggataaccggatattaatgatgtaatatatttctatagntaactattgtatgaatgtgctattataataaatatatatgatttggagttagtagttggctatctataaacttgctctatat

SEQ ID NO: 46901 - DNA, 450 bp, Oryza sativa
  unsure (1)..(450): unsure at all n locations
agctntgaggtcaccctggctggtctatctgggcttaccggccaccatagaggcaagtctcagagtacggttcacgagctctgtgatgcagatctcataatccaggagagtcgttgggctagcctccctcctgagctcctccgcgatgtgatccggaggctggaggctagtgagagcacctggccgtcacgcaaggatgtcgtgtcctgtgctgccgtctgtaaggcatggagggagatgtgtaaagagattgtgctgagcccggagttttgcgggaagcttaccttcccgctctctctaaagcaggtaaaatttcacatcctgttatgaaagcagaacttaaactgactgttgtaagaattatattttcgtaccttagtgatagcaacctgcaagtgggggtggtgcttattcatttgtcctctcaaatcatatccttggtttgacttc

SEQ ID NO: 46902 - DNA, 390 bp, Oryza sativa
tggttcagtattcaaccagatgaagagccaacctctcctttagcccttgcgtaatcgaccgggcttcgaccggagatgatttccattatcaagatcccgaagctgtacacatcgcttctgtcattcagcatcccggtgctcgcgtactccggtgctacataactgcaaatgcagaatcgatggccagagagaccttagtgttcagtgctcacatcttacatttcaccgggctcgacacaattgagaacctcacatccatcttacccaaatgttcccatgactctcgtggtaacatagatgttgtctgaaccgaggagcttggcgaggccaaagtccgagaccttggagttgcatctcttgtccagcagtatgttgctcgacttgatgtcc

SEQ ID NO: 46903 - DNA, 419 bp, Oryza sativa
  unsure (1)..(419): unsure at all n locations
agcttatctcccagtttaagaaatttcaattcttctataatgcacatccttctattttagagaaaattccttatatgccactgaatnttcactgttttccttaaatgccataaaaatgagctattcctttctatgccatcgaaataaatttcagtgtcatcttctggcatccacgtcaccatggcactattaagaagagaaataatgccagtattgtcaaaagaatgacaaaatttgcccttggctccctcgtctctatccccactactgtcttccctaaatccacaatatttcccattggtattctccctttgcccaagcaccagcgtcttcccagcccgtcattggcacgtatcttcacatgctaacagcatcatcctccctgcaccagcaccacctgctccagtcagcggcagagc

SEQ ID NO: 46904 - DNA, 472 bp, Oryza sativa
  unsure (1)..(472): unsure at all n locations
tctcgagtgttacagcgtcgacatgctcaatttccactgtctaaaccttgcacctaacagcaaccaaaggaatnttttacaacagtttgtaaaccataagagcttgaaagtaaacaagtgttctccgaatgaagcttgataagagctttgcaactaggggccaccacctctttgcgaactcgctaaccgtggcgccatcattgaagctcccgacgacatgctcgtggcaaaccgagctcgccgggcagtcctcgaggggatcaagtatggccatcctgacccccatctggctggccgcctggcacagcatcttccccagctggcctccccccagcacgccgacgaccgtgttggtgacgccatgcacaggctggtcgctatgcctacaagcaccacacaccaaaaataaaaaatccaatcatgtgaanatcctgcggcggcgccaacgaatgatacagaaatcgcaacgaac

SEQ ID NO: 46905 - DNA, 427 bp, Oryza sativa
agcttggatcaaggtgaagaatgcgagcttatgccaccctcaccgatcaatctagctcgcccaagaatccaccaaagtatccaacgagatcaccccactgacaacatcttaggagacatcaacaagggagtatccactcgttctcgtattgcaaatttttgtgagcattactcgtttgtgtcttctcttgagcctctaagggtggaagaagctcttaatgatccggattgggtgatggcgatgcaagaggagttgaacaatttcacccgaaatgaagtgtggactttggtggagcgacctcgacaaaatgtgattggcacgaagtggatcttccacaacaagcaagatgaagctggggtcgtaataatgaacaaggcgaggttagtggcgcaagggttcaccctaatcgaaagataaatttcggtga

SEQ ID NO: 46906 - DNA, 314 bp, Oryza sativa
ggggacaaggcaatctagcctacattcgaatcaagtatttatatcttacaatgtacatgtcaaagatttgaagttatcaaagagaagtaacaaagttgttatgatataatttacataacaggaataaagccaacatgtccacaagtaaaatacttaagatctaaactagaaacaaacacttcaggcatataagaataatactatagataagcaaaatttatgcgaactagcttgtcctgaatcactgaaaaaatgaaaattgtaggattgaaacatggcgatcaaccctaccggaggaaagaggggagggaggg

SEQ ID NO: 46907 - DNA, 423 bp, Oryza sativa
  unsure (1)..(423): unsure at all n locations
agcatgagcttagcttttatatatatactctcagagacagagagagggagaaaaatgtgaaagtgactgtagcccggtggttataagatcagtagtagtacttttgggagtgaatnttccataatttaacggctttgtgcttttagtgataagcgacgtacgtaccacgtgacagcgaagcgtctggggtgatttcatcaatctccaggatttgctagcccgttcttcgaaggttctcaatanggtaaggtttgcgtgcgtgcgtttatagaggtgagtgtgcgtgtcttgtaagggtctgtgttgtactgtgtaattaaaaaaaacagggagaatgcccaggcaagcatgtgtgtgtatgcacatatagcctagaactgactagctggatcgtcataattgtctaacagtggtatacatatt

SEQ ID NO: 46908 - DNA, 214 bp, Oryza sativa
atcacacaaccaacgccgtacgaattgtgtttcatcccatgatgcagcttagacttcaccgcgcagtgattatccccatagtcttgcacggatgcctgcatgcgcacgtctttgagcatctaccatgggttatcatgtaggttcacagtcactacaccctacctcacggccgagataaacacagaacgatccgaagctgcgctcggagagggga

SEQ ID NO: 46909 - DNA, 495 bp, Oryza sativa
  unsure (1)..(495): unsure at all n locations
ctcagcttcagctggcantgcaggcaaatacacctgacatgaatcctgacaggtactttgatcgtgaaaagacatgcgaatggatgaaccgatgcagtgaaattctctctgctatactccagagtccagaatgtgatatgctgaactgatcagaatcagacctaggcctggtttatgtcgtgtttgggaaaagtttgggaagaagttgatagtttggaaaaaaaaagttaggagttatatgtgcgtaggaaagttntggatgtgatgtgatgtaatggaaagttgggatttggagggaagtttggtgtccttaggctgtgtttagatcctaactttggattcaaacttccaactttntatatcacatcaacctgtcatacacacacaaattntcagtcacatcgtaccaatttcaacccanacttctaactttggaaggactaaacacaggctaagttcccaactttcttcaacttctacttttcatacataaac

SEQ ID NO: 46910 - DNA, 469 bp, Oryza sativa
  unsure (1)..(469): unsure at all n locations
agcttcgcctgacgctaattagagcgggtactatatcggactataaattagctataaatatatttcgagaagataaaatatgagagagaagagtaacgagctataagataaatatgtgtatgacaagtaggatcaggtattaattgtatactactcgttccgtttctaaatatttgacatcgctgaatttttagcacatctttaaccagtcgtattattcaaaaacttttgtgaaatatataaaactatatatgtacataaaagtatatttaacaatgaatcaaatgataggaaaataattaataattacttgattnttnttaataaaatgaatgatcaaacatgtttaaaaaagtcaacgacgtcaaatatntagaaatggagggagtatatgttatacgtaactattgtatgaattggatattaaattgactatagatgattnggagctaatagttgactatactat

SEQ ID NO: 46911 - DNA, 485 bp, Oryza sativa
  unsure (1)..(485): unsure at all n locations
tactcagctgggcctagaaacccctagaacccaggaaattaaaatagtacttataagttggaagaaaaccaaaagttcgataaggtattaagtgaggaagagcaatgggaagtaaatgagagattattactagagagttatgaagaagaaaacaacctgatagaggaaatagagaatatagaagaagaagataatgcagaacaatataatgattntatagactcattggatgaggtaggtttgcataatctagataatgcaatggaagccatggaagtagatttgggaacaggaaaaaggaaaagatacggagatggttttgtaaaaaatgaaggagaaagagaaagaccagccagggcagcaggaagatggcctccagaanaagaagaatattcatataattatatcccaggacagtataggcacatgggcactaaaagaagagatnttgagaaaccaataaaatttcaaaatcaaaaaagtga

SEQ ID NO: 46912 - DNA, 478 bp, Oryza sativa
agcttgattcagatgatggcgcacagtttgttgtttaatgtatggactcaaagaaagacaaggaaaataattaatcagacaagaaggacgatgaacatgacgatgaggatgatgagggaaagaagaaagataaggagatgaaagaaaagaagattgacaagagtgataataaggaagaaggcaagatgaaaaaggatggtgatgaggaggaaggtaagaagaaagaaaagaagaaagacaaggatggcgatgagaaagaaggcaagaaagagaagaagaatgacaaggactgtgatgaggaggaagaaggttataagaaagagaagaagaagatagacatgggtgacaaggagaagacgaatgatcccgcgaagcttatggcgaaactggagaagattgacaccaagatacatgaccttcaagcttagaaggaagacatcctgatgcagcttaaggagcagctgaaagaggagctgga

SEQ ID NO: 46913 - DNA, 418 bp, Oryza sativa
  unsure (1)..(418): unsure at all n locations
taatgacaaggtaaacaagctctctgaatatgaacatttatttatcttagcttttccagncaagcaaatacatgaacaaactatgcaccaagcttattttctggaacctgctgtgcctgtccagaacaaaaaatatttttggagatacttaagatgtaggcagaaccattcttataagcatgaatcaagcaagctaagcaatggacgagctcaagttaattatgctggatatcaaaaaacaccagacgagttgtcgagtacaacagctatcatgacacacgatgaaacatgctattcaagtccctaactctnaacatctacgtacagtcccctcgcatagaaacaagagtgctccactgataataaaaggatttatatctcttctctgagctgataccgcaagaaaactacttgtaac

SEQ ID NO: 46914 - DNA, 500 bp, Oryza sativa
  unsure (1)..(500): unsure at all n locations
nttcgccgatcagtgcaatgggttccgtcaccggcatcttctttctcgtcttcccacccgggcagacgtttcggttcggcagcctcgatttcgtcaccaacaacttcggcaagatttctctccttgactcggaatcagaccagtcgggagagaatcgacttctagttccgtttggattcccaaacgcggcaganagttgcttcaagaccatctcgatcgagtcagcttcaaaccactcggccgagatcgcatctactccaacaacgccagatcaagacgatgagccttacccatcaatcttgatgcagctccctgacgattcggcagccgtctccaccgccacgccgtctccatcccgtaggcctaggcggaagtcggtcttaacaccgatttcgcctagcttcatggaagtctgcgtcatccttcaaccactcggcacgggttcaacggaccaactggatggctactacagctcttccaccgtcgactcacgtccaccg

SEQ ID NO: 46915 - DNA, 444 bp, Oryza sativa
agcttaccttaactaatagaacatatagtatattttttttacaggattaaaagtcgcgcatcgcgcgactatgtggctagtcttccagaatgaaactcgcctccaaacaggttgtgctataaaagcccaaaaccatacctccctcccgtaaggtcggcctggacaaaattctggcatgggccctaagctctgaataattccaaactataataataaccagattattgaatcttcccatggctgacaagcgggcccttatacagagagactctgacgccaccatgacgctgcggtgacgcccataatttctgggaatgggaccatatggcacgcatacgcagcagcaggtgataggcgacatgcatgcgccggccggttctcacctctctcatttcagcaacagctggaataagcgccaagaaacaaacaccttattatcaagcc

SEQ ID NO: 46916 - DNA, 482 bp, Oryza sativa
ggccgtatgctgagttctcttacaacaacagttaccaatcttgtctgcagatgtgcaccgttgaagcactgtatggacggaggtgtcgtactccgctcttctgggatcagacaggggaacgccagttgtttggtacagaagttttaaatgaggcagaagagaaagtcagagctgttagggaaagattgagaatcgcgcaatctcggcagaaaagctatgcagacaaccgccgaagggagctcgttttccaagtaggggattatgtgtatctccgtgtcactccgctcacgggagtacaccgcttccaaaccaaaggaaagttggcaccacgctttgtgggaccatatcggattatggaacgcaggggtgaagttgcttaccagcttgagcttcccttcaacatgcttggcattcataatgtgttcctacgtctccagctgaagaaatgtctgatagttcctgtgaacatgaagtccggatca

SEQ ID NO: 46917 - DNA, 441 bp, Oryza sativa
  unsure (1)..(441): unsure at all n locations
agcttatcacactctcctgcggnctgtctttaaattatgtgatgnacaaaaactttacacaaaatggggggggccaggaaggtaggggcgctactatggttatgatcctcccgttttctgccgctgcttcatgctagctctccgcgctacgtcccacggcttgtgcggcacaccgacaccttgctgcgatgcatagaacgactcgtatcccggggagtcgaaggcgaacccggtgtgcttcgagctctctcggggaagcatggagatcgcatagctccttgcttcttctgggcttagatggctngtctctggaagttgtatcctgctgtactcgtggggttcatccctgtgcatcttctggattacttggtagtcataagggaagaaccaccttngaattctgagacaaataatgcacatcaggatgcgttatattcagtt

SEQ ID NO: 46918 - DNA, 491 bp, Oryza sativa
  unsure (1)..(491): unsure at all n locations
tcgttntgcgtgccgggaaggaggggttcccaactctttcttccgaactcaccctangatcctaaccaacaactaagaattattgtaactaaattttgaacatatgatttctgcacggattntatagaacttaatctatttttataaatactatataatattcctaaatagaatagtaaactaacgttatacaatagctataatttggtgggcgcaccactaacgtgtatatttagtgagtgacaagaataggggctaatgaatgggtgcgtcaacagacatatagattttcaatgttaattcgtaaaacataataacaatggctaggctaacttgtggttgacaatatttgataggttgtccaatggtatcgattattatgtatgattttttacatcgcacaaatcagataaaacacaagttggtagtaacatttgaatattcataaaattctgctgataaaaatcaggattcgaaatttacatatatac

SEQ ID NO: 46919 - DNA, 471 bp, Oryza sativa
  unsure (1)..(471): unsure at all n locations
agcntgactatatagtattaactttattgtttattcatctngntagnctgataaaccaatagataaatatacatttgtatctgtctatacaataagttagaacatgttagcagcatatacatatcgtagtctttttttttcttttactctttcattagtgtgattaaccagaaaaatagttttagttactaggatattatcaataaagtatatgttatactactatgtctgagctaaaacttagttgagctcaaattgagcttgcttaaaagttcgtaggaggaataagcttggtttggcttgcgcttgccaagcttgagctaggaaaggggaggtctctcgagctcatcttattgacaaccctacatatatactattactaaaccaacaatgatcaataacataattttaaatcctactaccctataatatcgcgtacacatgagtacgtgagtgtaggcattcttcttt

SEQ ID NO: 46920 - DNA, 424 bp, Oryza sativa
  unsure (1)..(424): unsure at all n locations
tgccagattaccgatcganggtggtggagtttgatttgttataaactaaaatggcctatatttatgtgaggatttgatccttctatgtggcatgaggtaaccctgngtcggcttgggaaaggctttgttgcgaacctccgataccgacgggtgttcagaataagttcgtatcttgtgggtaaagtgtactcctctgtagaggttaactaactgttcgaacagccgtgcccacggtcatgggcggatgtgaggtggttcccgttgcgtagagttgtttgcctgtgctttgtgaaaagatgntgtggtgtgggtatcgtaaccagaatcagcctatgtggcagatggatgacctgagtggtcacaaacgaatctgtgtgattcgggatgtctgcgggcatcatagactatgcttcccgagtggaag

SEQ ID NO: 46921 - DNA, 461 bp, Oryza sativa
  unsure (1)..(461): unsure at all n locations
agctntacattatatataataaaanaagtattttatgtataaagcagnaggcgactaagccgaccatccatgatccatctatggttaagcagtaggccaaggtttaataatcatacgctttatcaccccaagaattcacttaacccaaaatatcacatttttgccttccaaatgtgagcattattattttttctccttttgacatggagacagaattggagcagctcatttaacaaaagggaattttgagccaacctttactgcacttgctgattcactccaacataacactactagttatntaaccaagattaaaccttccagaaaggcctaatcactcaatgctaataactgagggatccagaattacaagcgaacctctacacgtgctgcgactaaattaattgcagttccaccaatcatttacccgatctaaactctactgaaaatccggatgaaac

SEQ ID NO: 46922 - DNA, 494 bp, Oryza sativa
  unsure (1)..(494): unsure at all n locations
ntccagacaattcanatgatnggttttgctgcaaatctctaatgaaattattaaaatactagtgtatgacaaatgaagagaaaggttaaataaaaagaaagctgacatggcaagtattttgtatctgcgaaaacagcaagcatcatataaataaactgtacacaacaaaaggaagattgttattattttaaatttcatcatggagtatgccctaccttttcttttgcttccagagcttctgcagtagcattcatcttcaccaaagaatcaggatcaacactcctggccaaaatagtatcaaatataatattttcagttctaaaatttcaggtacaaaaacattgcgctcatgtagctggtcaaatatacantttgttggtttaagtactactgctacagttgcttaacggatatgctgatatgcatcanaaagtcaaaaccattccagcaagaaggtatgacacccataacacgcgtagccccattgatacaac

SEQ ID NO: 46923 - DNA, 346 bp, Oryza sativa
agcttctcctgtggcggatccggttgtgttgtgtttttctccgggtggatccggcagaggccaattgattgttgttgttgttgttgttgctgtgatgatgttgttcttgttgttgtgatgatgactatgatcgatagttcgttgtggattgattttgggggtgaagagggatggatgcgctatgtgcatcgagccctttttttttcccaacccgggaaccataaaggtgtcagttcctaagcaacaccttttaggagactcaaaggtgctgcttgcttgggaaatccagcaactaacatgttttttgtagtagtaatatttttgtttcatttgcggaatttatgtt

SEQ ID NO: 46924 - DNA, 470 bp, Oryza sativa
  unsure (1)..(470): unsure at all n locations
tgccggcatccttcccatctggcatgtggctggctactccgccgatgcatgcctcctttgctcccggtggctggcaaggtacagcggctgcacctggtggctggcaaggtatggcgccaccgcagccgccgcaggctccattatttgcatacggcgccaatacttctgctccccatctggcccagatgaagcaagggtcagatcgtagttccatggacgattccttgtcagatctgcaagaaaggtaagctttcgattttgtttgatgttgcattgatttgttcgacaagcaaagagcacctctgcgcttactgttnttttnttttgttggtgcttcgatcttgattagcaaattaaacatgttgactaattaagcttgattcttgccgcgttgagttttncccttaggatctgaccatctgtgaacaacttaataaaaaatattcctgctaatgtgtcaatggactcat

SEQ ID NO: 46925 - DNA, 183 bp, Oryza sativa
accgcgcggttaccgcggttaccgcgcttaccgcggcggtacggtaaggggtaaaccgcggtaaccgcgtcaaattcaaataaatataaaaaataatttgaatttttgataaatattgtacggtttgtcgcggtttgtcacggttaccgcggttactgtgcggtaaccgtgcttaccgccggg

SEQ ID NO: 46926 - DNA, 351 bp, Oryza sativa
  unsure (1)..(351): unsure at all n locations
tatctttcgctcanggtccctggtagggattgaacccttttaagcgaaggtacgcttgaagatcagcctgctgttgttgcatcagattgttgatgttaacgaactgagcattagcattttcctaccattcttgcgtctgaacgatgtgtccatcgaggtagtactggatctctcctgtctgcatatcaagggtgtctagcctcctcgtgatttcacccaagtcctgggaggaacttgagcgccaacagttggaggcgggaggcatcccgcttgatccagaggaacaggtgtgcgcgttcccccagtgtacttcacgcggtgcttgccagcggttctcactggcactgtgct

SEQ ID NO: 46927 - DNA, 362 bp, Oryza sativa
  unsure (1)..(362): unsure at all n locations
agctngtcactggccatcttccgtcgccttctgtcgtcgcgtaagtgttggtaaggaccgtcgccttgcgctctttttcccggtgtcctcccttttatcgtcgctccgtagttcgccggtgatcgtcgttcctgtgtccgttatccgatgatctcgcttggctgtcttatcattgccacgtctacctaaaccctagatcaaattcaatctaatccgttgtttgtctagcatcgtcgtcgtctccgtgtgttgccgccgggtcgccgtcgtcatctctccctctccaatcgtttggttcggagagacttctatctctgctcccttgggttagggtttaatctctcgtttgtgtcatcgagtag

SEQ ID NO: 46928 - DNA, 431 bp, Oryza sativa
tagtggccttgtctcgctggcgttaaaggtggttgatttctataataaagaggagaggggatagggggtcacccttccgaagccctttcttgcttgattgcctcccccggcatttcattcaggatgatctttgaggtggatgaaagaagacctgttatccattatcatgagaccattgtgaatcttcgtgttcaacatgtctgttgaccaataaggatatttctgttacaccctagagagaaaaaataagcatgtgttgtgctgcagcaaggatagattaataaactcaccatcagcagtaattctcttaaaaggagttaaacaagatatggaactcacagatgacaatggaacatgacggatagaaggatgcttccaatcatgcatgaaaaaattgacacagatgtcacaggacacagctttgttgactg

SEQ ID NO: 46929 - DNA, 464 bp, Oryza sativa
  unsure (1)..(464): unsure at all n locations
agcttgttcacttttgctggggcgtccttgttatcatgataatgatgctacacaccatggtaggagtaataaatacacttttgtgcataatgggaagaaaattactttgctacctttgacccctcctgaaattatagaagctgataaagaacgagctgctagtttgaaacttgatgaatctgaaaatcagcaagtggctaaatctgtttttccacctaaaaaggataagctttcacctagttctaaggttgaggggattaagttgaagggtggtgttatgcttgcaacgaaatgtgacattgctgatatttcaaatgatgatatgtgctattttttgatatgcaaacaagcctggtttctttagatgatattgctagttcgatacctcctgttgttactaacctcttgcaggagtatgaggatgtctttccagctgagatacccncaggattgccacccatgag

SEQ ID NO: 46930 - DNA, 497 bp, Oryza sativa
  unsure (1)..(497): unsure at all n locations
tgtaccatggattattaatgttaccatcattttttctttttttacttttatttgggaacacgcaggagatccgtgcatcattttattaagcaatttctctttttatttgttgtcatttagtatgaataagatgtgcaacatatatagttatgtttatttttgttcatctgttactcagcttacaccaatgccttttatgacaaatccacaaatgctatttctccgcaacgaagtattatgttgcaaagcgtaattaaaggagtgcacttagaacatcagttntgaaaagatgtggctatacattaagctccaacatcatacatgaatatgtgtacatgaagatcataggaccagacactttctctagaagaattgaatctatatctcacatcacacaacctgtacgcaacctgcacagctagctagcccccatctcgctctcttcccttctnttgggtctttctcatttatctcattctatttatcttaagtttctt

SEQ ID NO: 46931 - DNA, 398 bp, Oryza sativa
  unsure (1)..(398): unsure at all n locations
agctngcccccaggaagcgaagggttcctgctttgtctgactccgacgccgatgacgaggatgatgccgaagaacgtgacggcaaggaggaaggagaggaagaggaggaggtggaggctgtggctgataacgccgcgaacgaggcgaccgaagaccgtgtcgacaccccctgctacactcctaccccaagtccagatcacaacgagactggggtggagtcgaacagctcccctcttcgccgaaaggatttggaaggggcgaaggccttagttgcgttctcgtcgggcaaggcggcgaaaggaggtctgtgtcataagatcttaaaaaagaagggattcctcgacatcgcttcgcgtttcagcgacgacgagtcttctgacgagactccgacctcacct

SEQ ID NO: 46932 - DNA, 424 bp, Oryza sativa
  unsure (1)..(424): unsure at all n locations
gccttaaactcactgccggctgtgccataaccatcgggttttttcccagactctatctctctatttttttgtattatccccacattctacacacatttaagtgtttctccaattctttttacatttttttttcattttgatcttctttcgtccaaacatctcacggttaccacgaaaataccacggtgatcgctccaaaccatgcggtaaccgtgccaaaaccgtgctaccacagatattgaattcaaatttttgaaaccgaaatttacgcggttttttcacggttaccgcgggaggggggtgatgaggatataactaactcggatataaccatgactaccttatgtattaatcaaataaaggcgcatatgtcctacattagaattacttgttatatatttgaacanacgtngctacacaatga

SEQ ID NO: 46933 - DNA, 69 bp, Oryza sativa
aagacaccacgccaaggcaacgaacgccaggaaaggaaagagcgcgccaaacaaggaaaaagaccaaaa

SEQ ID NO: 46934 - DNA, 256 bp, Oryza sativa
gctctatacgaccaagcatacgggagatatgcccatggagagctggagacttatcgcatcgcacgacgcacccgtcaacaaggaaatgatataccccacccgcggaactagagttcatagcattccatacacactcggaagcttccgcagtcacgcgcccaacactggcctagccagacaggacaacccacgagccaccaggggctatgaaaatgcaatgcccagcattttacctgcagccaaagccagggaatac

SEQ ID NO: 46935 - DNA, 449 bp, Oryza sativa
  unsure (1)..(449): unsure at all n locations
agctntgcgagggtccagacaccagccactgatgtcaagtactgaagtgcagncaggaggccagggtagctgaacttggtcatggcatacttgttgatgatcgccagcaagctcgagcacagagaggcagccgaaccacggagccctagcagctacaaacgcctctcaccaatcggccgagatgcagatcccgcaggtgagattcggattccgatcgcattcgtgaggaaaggggaaatgcagagcagtcaccgctccgacgaggggtcttaccaagaaagctcaagacagtatatatctcgggtggacggattcccgcgggaggtggagggagagctccgccgctggcggacggccggcagctgtcgcgacccgcgcgtgggcgaggttgatcggatcgggagaagagggaggggcatgtttgaggcgtaatttggcttctattattt

SEQ ID NO: 46936 - DNA, 479 bp, Oryza sativa
  unsure (1)..(479): unsure at all n locations
tctcttactgaagaggggaaggattgagcaagaatgagactaccactgtactcagcaagccacaccggcagatgcatgattaatgcaaggggggtacaacgggataataataggggttatgttttgcagtaaacagcatttaaaagtcacttagttgcccaaagttattttataaagacgatcctagagctacacaatattattaaacaaggccgtgaaccctcacgaacctgccttaacccaaggcctacgatgattcagaccaaactggcaacccgacctgtgttccagctcgtcccaagccaacccaggccaaccattccatattatagttgttgagcaaattntaagaattaaaacactgactcgggtacattgctcggcttgcccatatccgacggctcggctattcgaatagatttactctgatcagaggtgtacatctttacccacaagacacatctttactncgcattcca

SEQ ID NO: 46937 - DNA, 458 bp, Oryza sativa
ttaagtgacctgagctgcactttaccctattaaaaaacaacatttcttttggcgacgatgaggaggacgctctgtctcatcttgtccactcctcgatgctgctgagcacggagaggtgtacagtacagattttctacacgtgcatttgggttgtgttggatttacaccgtcatgtatggcctgatcagtcgatggcacggtccgacgtcgtctctgctccatacatgcaacatcgacttcttgtttaccatggagcacacccaaaaccccaatcggctagtcgccggtgaatcgaatcggctagtcgtcagacggcaccagaaccatacaaggaggatacaagaaattcatttttatgccgagtttagttcaaactttttcttaaactttaactttttatacatcaaactttctacacgacagcttcaactttcatcaatattccatttcaccaattt

SEQ ID NO: 46938 - DNA, 496 bp, Oryza sativa
  unsure (1)..(496): unsure at all n locations
tactcagctcttttgacccccttgccccacaggttacactcatttggtgctctgtcacctcccaagtcccgttagcgataatggaatccatttcactacggacagcctccttccagtagtctgcatcaggagatgcatatgcttctgaaattgacttaggagtgtcatccacgaggtacacagtgaaatcatcaccaaaagacttagccgtcctttgtctcttactccttcgaggagcttcactgacatcctcctcagagacaagttcatgtgtatgttcagtttgttctggtggtgtgattgaactgggaattatttcagagggttggttcgaaccactatgtgtatccttcattgtgaaaaagctctcaaagaaggtagcatcacgagactncataatngtaccaacatgcatgtncggtacctcgganttaactattaaaaatctatatgcaatgctatgatgagcatattccagaanaacacagtctacagt

SEQ ID NO: 46939 - DNA, 448 bp, Oryza sativa
  unsure (1)..(448): unsure at all n locations
agctcttggcttcctcacagntacttttttttatctactcttcaaaaagtcacaggccacagctgctttnttaaaagccacggtccaaccaaacacaccctaattctgatgtttctaacagggggagtaaaaggggcaaagttattagagtttgtaagccgatctattgtattccgacattccgtgtatatctcctcttcttgaggatctgattgtaaacttccgggattccagttatatatatcaaggtccaatttggaacctctgcagtgatgaagagactgcagaggaagctacagtgcagtgcattagggtatgctgtttgttgttagatccacatccaatggtccanaacaaagtgcgacagtagatctaaacagcaaatgcgaagattaatagtttgaacaggtaaataattatttgttacacagtactccaattaatatgc

SEQ ID NO: 46940 - DNA, 410 bp, Oryza sativa
  unsure (1)..(410): unsure at all n locations
actaactatacagagcagtatcttggagcttctatctttgtcatgttccacagtcaaggtgttaggtgtgttttgagccatgacatgccctagctaggtttaggctcctgtagcttccttctcagttcctgcaagattgaaagggaaaagaagagagaggagaagaacaagaatgttaggttcttcttcttgattgatttcatgcatttgacatgtgaaattgtgaatgcatgtcatggggtctgaatctgatcagtcatgagtcgtgagtcatgttctttttggaatttgcatgtaaaattgtgaatgggttctcagacaaatgtgaagtngtgactgcatgtcatgatctgatcagttatgacttgcaaaagtagaagtaggacttgacgtttggtgaagcatgaaca

SEQ ID NO: 46941 - DNA, 471 bp, Oryza sativa
  unsure (1)..(471): unsure at all n locations
agcttgctgttgcttcttctcaagaatctttcttcagtgcttttgatcgagcatcattgtcatgtcttgccagctgatataaataagtcaatgggcaggaaatatgtcaaccaacttgaattgcacaatgaatcaactgagtgatatgagcacatatggatgcacaatggccaggtttccatagattaacatatgactggcatgatcacatgggaaaaaacaaaaacaactgttccaaaaagtatgctaaaataatcaactggtgaatatatatgatactaaattaagatgctcaacaatgtaaaacatgaaaaataatagcattctagttcataatccatggccacacgtgcattttcagcctaaaatgtgtgaggtttcatagaatacttatgccttataacccanacctgaacagactcaagtaatgctttatactccatccgttccataatataaggcacaaccacc

SEQ ID NO: 46942 - DNA, 463 bp, Oryza sativa
  unsure (1)..(463): unsure at all n locations
ntgctcattagctgtgactacccatgcacaagcttatttatccctctgtcccacaattactcaaaccctatatttccaaggtggatttaaagagagatatgaatgatcaagatatctctaattaattgtgaagttatatcgatgaataggtaggtaaagggtatgaaagaaataaaatttttagatttgcaaactaatggtaggtaaaagagtaaaagttgatttattttgattctaaattttagaagctgatttattttgggacggagtgagtatatagcatataggaccaccgaaccgcgagacaggcacgtcacgtctccatcgatcgatcgcgcgtcggcgatttgatttatctgcgccttttacatggaaaaggtngcgcatagtgcaagcttagcaatagagatcataacagtgtggctcctgatntagctgctgcctttatatgttcttcgtctcg

SEQ ID NO: 46943 - DNA, 463 bp, Oryza sativa
  unsure (1)..(463): unsure at all n locations
agcttaaacaggttacaggtgcaatacatctaatcagcataccagcgacaaatctctgcattcaccgctacaaataaacaatctaaattgatcaaaatcgttttctatgccctagacctgagtcgagctgatgagatgccacgagcacactttcgcggacgctgacaccccacccagcccaccgtcaatcgggctccccaaatgccagggaggagcagaagaatccatcatggtagctggagacggagccccatgatggccagcagcggtgagagctgagagcaaatagtggccctcaaagaaccaccttgatggatgaaaaggtaattcanggtaattctagttcctttnttctgcaaatgctccgctcaaatcaatctgtaccattcgatgtttgatcggaaggtcctcaacagaggagctcacctcttccagaatgtacagacacccaagaaccaacgag

SEQ ID NO: 46944 - DNA, 446 bp, Oryza sativa
  unsure (1)..(446): unsure at all n locations
tataaaactaagctgcccgcggtacaccgaacacacacttatcggtgtttattttatgcgggcggagcggagactctcaaaagtttccgctagatctgagagtaatatttcctggttgcgcgtctttacaaccaagtcatcaacataagcctcaacattacgtcctaattggctacccaaagaaattcgagtagtacgttgaaaagtaggacctgcattctttaacccgaagggcattgtcgtataacaataggttcctatgggggtaatgaacgcagttntttcctcatcctccctagccatgcgaatctgatggtaaccagagtatgcatctagaaaacacaaaaggtcgcaccccgcagtggagtcgacaatctgatctatgcgaggcanggggtaaggatccttangacatgccttgttaaggtcggtgtagtcgatgcaca

SEQ ID NO: 46945 - DNA, 451 bp, Oryza sativa
agcttgccagaacttgtttcacttcacttgttttgtgtgtcgcccggagacctcgctggcattaatattagaaaccacacaaatctccaggaagttgctcttgagtcagctatcagtatggaaaccataattacttgggaaaatgaagctcggaagcacccaaaaagacccaaggttttggtcttcaaaagggttggcacacccaacactgggtgtacggtaaagtatactgcgaccgagaggcctataacacctgagagcacggggcccggtgaatcgatggaaatagataattaaggtcctctccgtctctgactgatcgagctgctaatgctcgccatgttcttaaggtcatattattactcttatcatcggtattattattctgaatatagtgcgctctacatcatcgagtaattgtattacatgctatgacatgtaagcgaattat

SEQ ID NO: 46946 - DNA, 475 bp, Oryza sativa
  unsure (1)..(475): unsure at all n locations
cgcttggcatacaattgatgttcccgcaactntcccatctctctacggagatggtgctgatggtcttcctctgattgtgagtatatcagaatgtcatcgatgaaaaccaccacaaacttatccaagtattccatgaacactttgttcattaagttcatgaagaaggcaggtgcattggttaaaccgaacgacatcaccgtgaattcatacagcccgtatcgcgtggtgaatgcggtcttcggaatatcttcttcacgaatacgtaattggtgatatccggaacgaagatcaatcttggagaatacagtggcacctttaagctgatcgaacagatcatcgatccggggaagagggtactntgttttgatggtaacttcattgagagctctgtagtcgacgcacatcctcttcgtcttgtcttcttctctacgacaatacaggagcaccccatggngaaagtactcgacgtatatac

SEQ ID NO: 46947 - DNA, 475 bp, Oryza sativa
  unsure (1)..(475): unsure at all n locations
agctntgcaaattatcaagaatagatcatgcaagataaaatcatggaaaaattcttgcaagtgctaatcaatatatccaactcactataattntggtacaacttaataactaaatttgatacctcaaataaatcagtcaatgcagtcaactaataggctaattataaaccttaatcagctaaaatcctaacccatcaaaatatgcaccaaactgcatagaagtatataggtaaaataagttattaaaatgctagattatttaaaatgaataaatatatttttttccagaatttttatcctctgtttagacctcctaaaaattcaaactagtttctacatagcctcttttctctatttttctgtgagcaaactacacataattnttgtgtgcaaccaaagaanatagaaactaggtacatacatctacctncagaanaatccactctaatttatctactccacacattaaactatg

SEQ ID NO: 46948 - DNA, 478 bp, Oryza sativa
  unsure (1)..(478): unsure at all n locations
ntatatagctgtcccgctgacttttatatatatgttttgtgctgtttgggtttttaagcaattgattggatacaatatcattgcttttcgccacgtaagtgtgcatttttattgaccaatattatggcttaggctgattatatattgtggtcattttctaggcggctggtaaatcctttatgagtttattcactcggattttacaccacatatgccatatatttccagctgtggtgaaaccatgtgtcttttatggactaaagcacgtctgttaaagcagtgtgcgcatagcgtatgcccaatactttggaaatttatttattcacaacatacaagcttctttatagctgttttgcttatgtgaatttcaatgatgtaaccaactntaggttacacttcatcatatttacaaagcggtcggtatatcactcggatcatngtattcanggattcacaccgcatatgctacatattaata

SEQ ID NO: 46949 - DNA, 412 bp, Oryza sativa
agctcggagacaagctcattcttaagatgtggttcacatggaaaccacaaacacatatatatacaaacaatctagaaagcgatcttgtaatggcgattaaattagtagcagtgtgttaagcattaaattaatggagagctctagataaagaagggcccccatcaaaaaccttaggaggggaatcacatgaatacacatgaggctagccggcccatcctcggcgagtgggcccccaccctgttcacatgtctccatctcaccccactaaacaactctaagaaaaatcatattccattccacactaatccttaacataatatgttaccaaactttagaaataagataaaaaacttttagatcacttgcttttataatacagaaggaatatataagaaatttgttaaacaacttg

SEQ ID NO: 46950 - DNA, 426 bp, Oryza sativa
  unsure (1)..(426): unsure at all n locations
tccacttacctgatnttgcagcaagcagatgtatatttttaccattcaatgatgtttngaggtgggccatcatctgaagtatcaaataataaataggaaaagcttaattttcagaatgtccaaactactgggtactaattcagaaataacgaaataaacatgaatntttcatgaatgctcataatcacgaggctgaaaattagtgaattaaaaattgagtaaactgtaaataaaggaagaacaatttggatggaaccaacctgcaatcacactttcagaggtggaaacttcagtgcaattatcaaatatatatccatagttgagtatggcactctttataacaaagtagcttggaaagtgtccaatgtcaactgagagnttgtcagctgaacgaatanaattacatgccaatcttcaagttaacac

SEQ ID NO: 46951 - DNA, 422 bp, Oryza sativa
agcttacaagtagaacttcttgtcaagttgtttgttactagtacgtacagatttgcggtatagagccttgaagaaaccaaaaaaagcgaaagaaagaaaagataaagggagaaaagaagaagcgaaagcgaaagagagacgttgatcaggtccaggcgtccagcccagcaccgaaggctctccgcagctagatctgggcccatttgctacggcgaaaaaagacagggatgtgatcttgctagctttcgccaaagaaagctaccacgtgcattgctgcccattttactcgccgctttggacgctttcaccgtgcttctctgcaggctgcgatgattggctgcagcggtgcgatctgcctgcatgtataatctcgccttgaccagatcccaatcctccctgctgatgttgccggagcaagcgat

SEQ ID NO: 46952 - DNA, 449 bp, Oryza sativa
  unsure (1)..(449): unsure at all n locations
tggaccaatcattcaacttccttcatgatctcttgaactttcaacaagaaaattacaatgcaagttgattttttttcttcatccaccttattgaaccattgataatactgagcataaacaattaaacatgaacttataatggttntactgaaacagataagtcacaagataaacaagctttcctttggggtagaattccctggtgttgtcaatcctcttgatgggtatgtttggaatttagagaagctatatcacatctctctttggtccttattttccatgttcctgatttcctgtgtatttcagtgtagagtggatacaggagcacacaaatggattaacaggaatgtaccaatactttgtcaaggtaatatttntagtatctagtcancgttttctcttgtggngaactagtcatgctatnntaatatggtgcacaatgtcatgct

SEQ ID NO: 46953 - DNA, 454 bp, Oryza sativa
  unsure (1)..(454): unsure at all n locations
ccggtcatgtgttttctttgagccttcagatgtatggatgcagagtaattcagaaggtagtcttgacttctttatgggaagtataactttatttctgcttaatgttttggataccatatcatgaaaaccttttcagtggcacactatagcatgtattgtctgaggcggtctgagcaaaatttcttcacactgttatgctatccatagacttatttattctcaatatcagttggcaaagtattatctgagtaaaatttcttcagactgttattctatccatagaattgtttattctgaacatcagttggtaagttttaaagtggttagcctgtgggacatcatttctcatattatgcatggtaatcagcatacattcttttaataagttgcaatcccactgtagccagctattcatggattagcatgtgttggaaatgaanaataatgtgactta

SEQ ID NO: 46954 - DNA, 436 bp, Oryza sativa
  unsure (1)..(436): unsure at all n locations
tcgcgttcttgccttaccaggaacaccgggtggctcctatttatctcgcccctgcgttccccaactattggcatgcgaggtttccctgaaccgactagttacttatctagggtgtcccattccaccttgtgggtgcactctgttatgcttgatgaatttcccacaggaatcggtccttatatgcgaatactggacagtgccacgcaagcacaacccctgcatcgcgagttttcacaatacattttatttttaaacacaccgacaccacaggtcgggttntcaaggcttctcacacccatttcccaatttttcgacaatcaacagtgtatgtgggatattnggtatacgcgctcaaagagcacagataccgaagtaccaaagggtggagcgacaacgaatcatggtagtacaacctatatgaactagtgcgactact

SEQ ID NO: 46955 - DNA, 473 bp, Oryza sativa
  unsure (1)..(473): unsure at all n locations
agctntaaattcaaattcaatttcctacattgtatattgaataaaaggattgcacaaaactgcgagaaagtctgtaaggtatgaatgtagtgttatgacttatgtaaatcagcagtaagctgcatcttttcatcgtcttaaatttatggaaacataaacaacctcgcagaaagatactgcaacatactagagattttgtccaggtcaagaagcatacctgaccaatccactgccttagactgttgatgtgttcatgtatttgttctggagtaaacaattccatgagtgaaacaccttttaccttntggtttcccagtttggagatcgtgacatccacagagcctcgttttttcttaacatcaacaacagtcacactctctttatcagccacaacagtttcttgctggacatgacaatgtatcnttgttaaagcaccaggaataacagtattntgcgcagcaccaattttctca

SEQ ID NO: 46956 - DNA, 359 bp, Oryza sativa
  unsure (1)..(359): unsure at all n locations
catgacgaggcattctccaagccgacacacgatcaccatatgccgacgagaggaggcccacaccaactacatgntatgtcccagaccatactgtgccaggaagcctcatggtcctcctcgacaccaccccggagaatccacatgactctcggcatcaacgctcccctgataaacaatatactcaaccacgggtgggccattccacccatgtggacacacccgtcatatgtgtggatgacaatacaaagaatcagnccttaagtgcgagagcgggaaaccgtacacccggtacatatcccgcgccgcggctatggaaattcatttacttcgcaagcacccaaccacgagtcgggtcttcc

SEQ ID NO: 46957 - DNA, 431 bp, Oryza sativa
  unsure (1)..(431): unsure at all n locations
tgcttcttttaagctctcggctggagattatcttttattgtttaaccattntattgtgaagctccacgtcatcgtgatggcaaatataatgtcacaatgttgcaacaatgttcaaataggatagtactaagtagacaatctctagatttagaatagctttgttaattcaacattgtgatataagctgccctgaagggctcgcatcgggacaagaactgtgaactggtgatatggaaaattcattgctcacctataaagtgtgggttttaactttacatttgctgccgttatgatgttggcttagtggatagtttattattattcacttcacagaatgcgatggtggcaccagctaaatatgttagtgttagtggacagcaaattatatggtgcaacaagctcatatatgtatacacaatcagtagcactgg

SEQ ID NO: 46958 - DNA, 225 bp, Oryza sativa
accgccaatttagatctcccacgaatatgaatcaacaagacattctatggcttatctggtctataatgtagacccccccccccccccacacacacacacacacaaaaaaaataagcaccatatatcaccactcgatttttcacaatgcaatgtccctatctttaatctacatatttcacaagagataccttagctccgcacatcgacctgctgcgtaatatcgtt

SEQ ID NO: 46959 - DNA, 411 bp, Oryza sativa
  unsure (1)..(411): unsure at all n locations
agcttgtatgcatagacattaatcttttgtagtactnggaaaggaccatcagctctaggtggcaacttagattttctcaaattagggaacctatcctttctcaaatgcaaccaaaccaaatcaccaggttcaaaagcaacatgtttctttcctttgctcccagcaagtttatacttaatattcatgcgctctatgttctccttagtggtctcatgcagttttaacatcaattcagcgcgatattttgcatcaaagttcactctctctaaagatgggaggggcaaaagatcaattggagcacggcggagaagggcataaacaaatctcaaagggcacttctagtagtagaatgttgtgaacgatataagcaactcaacatgaggcaacattcttccacatttaatatctttt

SEQ ID NO: 46960 - DNA, 451 bp, Oryza sativa
  unsure (1)..(451): unsure at all n locations
ctgggggtgttgttgacggtcgctatcgatcagcttcttttttattattactaacatagagaagaactagtgatacttgcaatgcatatatctgttagaataataatattccactagtattaggtatactaaccttttgcagagaatgacaatagagtggaggagaattgtcacgtcctgataaattcatcccgaaataaaaatcattccctaaaaggaataatagaatcaattaaaattcataaagatattggcgaacactaatatacgtacaagaaaaattcgaatatggcccggagaattnttgttaaattcttcttggtctaaaaggagccctcacatttacttgaatttcacagcaccggaaataattattaagcaacaacaacatgtatcacagtttactactaagaagaagcttaagataagccctccttcctcctttgngctg

SEQ ID NO: 46961 - DNA, 448 bp, Oryza sativa
  unsure (1)..(448): unsure at all n locations
agcttcctcaattaattgctgatcctaatgcatagtttcaggtgctattaaccgtctttgcttgttttgaatgatctaatacttcggacatcaacattttgttggcattgttatgttgtttgagaattatcacttcagtaccatcactttgttcatttccttactcaaaccagccgagttcatttttcacggagcaattgacagcatttgaagtttggcttgatcatggctctgaagacaagaaacccncagaacagctacctattgttcttcaggcaagacattttttccatccagctattcaagatgctagtgttttatttttgttatttgagtggtaagttggtaaccgactctccaaatgatggcaaaataaacttgggtggacatctatgacgcttttttgtgacaccaatcttggttctatttatatcattgcataatcata

SEQ ID NO: 46962 - DNA, 491 bp, Oryza sativa
  unsure (1)..(491): unsure at all n locations
ctttacttctgctntcaactgaaactactctgaacattttatataacgttgtagtctgaacatttgcaaattctggaagtgctaacactgattcagctgaaatcaagtagatttgatacatctgaaaattttgtacagtgctgagtaccttttttatttagcataacaatgagcatcccatgccaatttagagattgagcattacacgccttctgaaaattntggacagcgctacatgtcttcatggtcaatgcaaaaagttcagtaaaagagtgtcttgttcagttaaacaagttaacatattccctatgtagttntgaggctaatatgtggactattggtgaactaaatgacaggcttttgttntagtagcactggtntatcaacattattcagctttctggctctgaaatttcatcctgatgaaactgaaatctgcataactctgacacggtgacacttaacattcgtcctgatggcataacgtgaat

SEQ ID NO: 46963 - DNA, 499 bp, Oryza sativa
  unsure (1)..(499): unsure at all n locations
ggatccttaagtcacctgctgcatgcaagcttaaaaatatgatcaatatagcttctgtgctaccaanattagaggattttttgtagattcaatgtaactgcatgacataactgaggactcctatttctagagttgacaagttattgatgcaattagaatcagagatttgcacaactaagaactattgataattagtcccccacctttattagaggaacaagaggaagttgaatagatgtgggataacatcccggatttgcaacaagccgtgcattccttatttcattgcgaagaacttcagtcaagccatacacagcttcttgctaaataaacagaaaaataaaccatataggaaataagttcatataaacaaacataatgacacacaataaataactgatattatgatatgaatacaggtgttcagatcaaaacaccatagaattgtcatacaaataggggattgagcatgtcagtataattataatccatgctgaga

SEQ ID NO: 46964 - DNA, 453 bp, Oryza sativa
  unsure (1)..(453): unsure at all n locations
agcttgcgcgcggaatacgggggagatgggttgggaactttggattccaaacacagcccaagtctatccaaaatgtttagacaagaaaatacgtaacaagttggtttacagaaatacgaattagatcaatcctgcactacaagtagagtaaagtggtgatttctcttaaatctctcgaatggtgatttaagaattcagtgcaaaccaaatccttgctataatcaaatgttcggtaccgcatcaacggaacaataaaaagcgcctggcgtaccataantttgtcattcttgttgaaatttgtaatttaagatgcatgaggccacacgaccttaatgttcaacgtgtcatgcattagtgaaataatagctcacaaaacgcaacaaatatagctagataacggttgcaatccttaccanactaacgtataaagtgagcgatgagtcatatcattat

SEQ ID NO: 46965 - DNA, 350 bp, Oryza sativa
  unsure (1)..(350): unsure at all n locations
agcttcattgtagatctcaatcgcctaatatntgtataggaatntcttcaccattatcggtactgactgacactaatctgaaaatcaaaatgggaaatagttattcatatccccatcaggggcatacattgtcactataagtgtaagagctatcttggacttgtaccaaagcatgagaaaaacaatttatcccttctttctatatattatactcaagacccaaagctggttgagccacgtcacctgttaaatcacagccattcgatgtaatctggacgctcgcagctgccgccgctagatgcagtcgcttccccaccatccggaggctggagtcatgctctcagcgcagc

SEQ ID NO: 46966 - DNA, 485 bp, Oryza sativa
  unsure (1)..(485): unsure at all n locations
nggctaaataggcatatacctcgtacctccatctttgatatgaaaagaaacttacacaatgtcgagcattaatatcatttntgaatatatttcttcgatggtaccattgtagtttcatctattttacgaatatatttatattgaaattagtggtcaacaaatcaagatgttttcctgaccaacgaaaatgacaggctatttagaaaatgttgaatttattacatagttctggacatcaaatgttatctattgacaccagcaatcttaaattttattcctgttatatattatttacctggctaatttccaactgtttaaacaaatttacccaacatgttgtcactctctttgcaccaactgcgtacagatntaacttgctcttataccaaaataatgaaactctccttcaatgatgtaaaatgattgaaggcagaaagtaatgctacacgggagctagctagctactactactccagaagatactg

SEQ ID NO: 46967 - DNA, 461 bp, Oryza sativa
  unsure (1)..(461): unsure at all n locations
agcttctgcttcttctaggcgcagcttctggtaatcgttagcatgcattatgtcctcatgattgattgcactctgagaaaagtagaaaaaaggtattcttttcagaaacaaaaattgacccaaattattcgtgttagagatcataatttattttcttacatgaatgccctgagcacaaaaaagactcttcaaaatgttggatacttcatccatgcctagaagagctcagctcagtctcagaggttgtcggcgcagccaaagctgcacatggctgatcttattgcttcatttggaatcccgatattgacatcttcagacaattggctgaaaatatntgatgtttcagttcaatcattattgtcatcgtcttgcagntcgaacaaatccttcacatctttggctntaaaaaaaatatcacctctgctaaattttaagttagtgagtagttgtgtaactaccca

SEQ ID NO: 46968 - DNA, 462 bp, Oryza sativa
  unsure (1)..(462): unsure at all n locations
ggctcactgcctcanatcctgcgggggcgccaacatcttctatccttactgcgttggggccggctgtttccgccccggcttcgagctcacttgcgaccattccaccaaacccccaaagctcctcttattgggtgttgccaccaacactaacaccaccaccaccaagatcgtggatcaatatagagatgggtatgttcaagcctatgtttctttcaacatagccaccacaccgggtgtgctcggcacctacaacaggacatgggagtccccagggagaatccttagcatcgggccggattattatgctttggtggctgtcggttgcggaattgaggtctacttggtcgaccctgatacggaagatatgctgggctattgcttcagcatgtgtactgacatggcgatgatgcacaaggaagcagaggggaaagcttgcagtggcatgggctgctgcgtcgtcac

SEQ ID NO: 46969 - DNA, 452 bp, Oryza sativa
  unsure (1)..(452): unsure at all n locations
agcttgttcgacgttntaatcttggcaactgcatgcattgaagataaacaatatattagtatcataaatatgtgaagctgtctagtacatagtacagggacttacatcctctgcgttaaccctgtacctcttattaaccctaaggaattcgcacgggtaatacccgcaaaggaccgttcctcgcggttgcttgtgacacttcaggacatatcatagaaaaaaatagttaaaatttgcaattagtgaaacaattggaatacattaagtgagtggagtattaccggccaataggtacgtactagtagcttctcccttgttcgggtctgttctccacccttgaacttgtagtattggtacgcactgtacggatgtcgtacgtttcacattaagaaggatatttatttataatacattcatataaaaatgcangagtcataatcacttactacttg

SEQ ID NO: 46970 - DNA, 507 bp, Oryza sativa
  unsure (1)..(507): unsure at all n locations
ggacctataaaactcagctgctgtaagagaaagggtttgtcagatggcctccactatcgctagagggaggcgacagcgtcatcgcttcctcattcgcttgcacacgtgcacgggtgaagacggagagaaagaaatggataagatatatatagagagaggagatacgatggagtggttggtggccatgggccgtgggagcgtgcgtgacatgcgtggccctcttcttctcttccctttactgtgaataaacaggtcaataggttgagaaggggaaaaatggttaattagatccatgccactttaagtatgctgattcagaanaataccaccattattcgtgatatctggtgcgtgccactggaattttgtaagaatgaaacatgccattgccgtcacgttttctttcattggctcgttagatccgtcaacctacttggcttctnncgtctcgacatcgacaccaatcaccaccagtagcagcaacaaccgtctcttggcacgcgcgca

SEQ ID NO: 46971 - DNA, 451 bp, Oryza sativa
  unsure (1)..(451): unsure at all n locations
agcttccagtataatgtcataaatatgcttcatattcaaactatgttnttcttttaaattntaatagtctctggaaggtcacccatctgtctcggaatcataatcaacaggacatacacatgctgcagctgttagatgtctaaagtcaccacttaaatggtgcatgtgagctaaacttgcagcgaaagataacatattttagaaagaaccacatactaatttaagccagaaccactgatattttctgtctggtaatgcaaatcaagaacaacaaattgtttcataaattaagtttagtccaacaagctgcaagataaatgagtctgacctgagacataaccatacgatagctaaatgactgagatggagcaccgtgaataaacacgacagtcccacgtcgtgcaccagcggaacctacaattgtatcaccatatntatgaagcaattacat

SEQ ID NO: 46972 - DNA, 401 bp, Oryza sativa
tgctcctcagcgaatagtcatccatgcatcccgaagctgttctatagcccccgttgcaacagctccaactccagcgagtgcattaccacaaggtgtcaatgctcaacttcagccccagccaccagttgacaacacagaggccagtatcggcattgtacctttggatgttccagcacagcagccaagaaatcaagtacaagataaagaacccaagccaatgggaatgagaaaagcatcaacgaaacctcaccagagctaatccaaattgtggttaaccaaaccaacatgttggcaacagcctttcaactattacagaattggaacaacccagcaggggcaaccaacgttcaagtacctacagtccagcaacagtgcaagttatcagaatttctaataactga

SEQ ID NO: 46973 - DNA, 470 bp, Oryza sativa
taagataccaatgcgagtgcatactcctggaggtggcattatttcttctcactactgcccatctgtgacagttgaaattcaaaggttgatttttccagccaacctcattcttctcgaatccaaggacctagatgtcatacttggaatggattggttaacaaagcacataggagtgattgattgcgccagccgcaccatcaagttaaccaatgcaaaaggagaggtggtaaccttccagtctctattgccgcggaagccagggatcaatttaaaccatgttgctggtgaagaacaacaggtatcagtggagacaaccactaagaagctggaggatattcccatagtcagagagtatccacaggtttttcctgacgatctgacaacaatgccaccaaacagggatatcgagttcccgattgacttggtacctggaactgcaccgatccacaagaggtcttactgaatgggag

SEQ ID NO: 46974 - DNA, 471 bp, Oryza sativa
  unsure (1)..(471): unsure at all n locations
agcttctcatagtcctcatagactccggttattatctggttagtcaattcatcatcgagcccaaacaaaaacttctcctgcttctcggtatcggagcgcacgtcctcaggagcgtagcgcgcgaggcggttgaactcgtgcaggtactctgtaaccgttctggttccttgttgtaatgcacggaactctctcttctgttgtgccataatcccttcaggaatctgtgccttcctaaagttttgacaaaactctacccaagtaaccttcgttgcatctggacgggtcaccacgtagttatcccaccaggcagaagcgggaccttgcaactggtgtgtagcaaaagcaactttctcttggtcgttgcattgcagtatgttcagcttcttctcaataacacggagccagtcgttggcctccattgngttggtggtgcttgagaaagtgggtggctggatacgaagaaagtctaac

SEQ ID NO: 46975 - DNA, 393 bp, Oryza sativa
  unsure (1)..(393): unsure at all n locations
cgggatcctacntattagaacatattatttatatcgctatatcactattccctgcgcgtattttaaacaaaaacgcttctgagcatgtatccacaaggtagttctttttaaaaaaaaaatcataggaccactaccattcatttgaacaattaacataaccaactaatattgcatatgacaattatagacttcatgaggtgtacaaatcgaacactttactaattgcaccaattcatgagcattacgcgccgcacatgcttcaaatgcaagctaacatacttgacgggtcgcacgcaagaataccatggaattatttataattcactctgaattcatgatgaataatcacatatcagccgataactttcttatgaagctgattacatgctcact

SEQ ID NO: 46976 - DNA, 433 bp, Oryza sativa
actcagcttaacaatgtgaagcagcggttgaatgaaatagatcgttattcttgtgacaatgttaacaagctcctcgttgggaacaagagcgacctaactgccaacaaagttgtgtcatctgaaacagctaaggtaagctcttcagaatcatttgatgtactgtgtattggttggctttctcacgatcatcatgcactgtccttattgatacacatttcacatatctacaattgttaaaaatcctgcaagcgtttgctgatgagatgggcatcccattcatggagacaagtgccaagaacgccactaatgtggagcacgcctttatggctatggctgcatccatcaaggacaggtacagcattaataatctatccctgagcacatgagcagtgtagctctcgtattaccctgatatccgggtaaatttactcct

SEQ ID NO: 46977 - DNA, 419 bp, Oryza sativa
agcttcttcgcggcacctcgttgcccgcgtgctttcttctgtccaacgaagggctgacttccactagccttctcctcctggttcccctccacatccctttccacgtgccccttctggttcccctccgcatacctctccacgttcccttcctcgtttaaatactgagttggattctcgttcccctcttcttcgttccagtactggctgcttccctccgcgattgtatcgtacaatatctattcctcatcgcgatcagccatctgttcatacaggaaacatctgctaagtcatgagacatttatgctttaacaatcatatatgccaacaatcatatgctcagtctaggtgacgtatattatacgaccctagctagtcaataattatatacttacgccaatcacaaatataataatcttata

SEQ ID NO: 46978 - DNA, 501 bp, Oryza sativa
  unsure (1)..(501): unsure at all n locations
actcagcttctcgagaatcggcaagtctggacatctgctgattatgttcagcattcacatgccttatcgaagacaatccaattgcaaacatgagggcactcgattctctccttggtgagtttcagtattcaaaatgctactagtaattcttttttttccccataacacgaaaatgctattctgtaaagtataagtgataggcagtaaacaaaatatgcaggtgtaaccgcgtaagtataattgatgataattatggtaactgtggattatggacatgtacaaccagttcctctaaatgttgtggcagctgctctttcagatgactgcgctacctatganaatgaagtgattccctgacaaactttggaactaatatggacataagagtcatcatcttcttcttattttaatttttactgaagaaagactaccaaagtgatatcataccatctgagatcactcacttngatgaatcttcattctgtgttctaaggtcatata

SEQ ID NO: 46979 - DNA, 455 bp, Oryza sativa
agcttagctatatcccccaccctcccctctttcctccctccctctccagcaaagaattcattctcatattctaacgttactatcgaagtttgatgaattttttatttttaggaactagccttggaaggtactaacgatttgcatttgcattgcagccatacgccaagagaatgaaactactgttgcccaagaaaattcggatcaacctgatgaaggggagggtgactggttgaagaaacttcaagattttgcagggtaaatattagctgtttcttattacaatgcaattgagttctgggagggtttacctcatacattcatgcatcatattgcaaattttgggaacttgatcatttgtaaaaaaaatgcaaggaagtatatgttatagtgagaaagaaagagagctgtatattacacttaaaaaagttagtggtataaccaacctttatacattt

SEQ ID NO: 46980 - DNA, 472 bp, Oryza sativa
tatggatgaactctgacaggttcctttattaaatttgtagatgtaacccgccacccacgtttcgcagccatcgcccattatggacttgccaagtttctggtggtgcccattgtggatgaaattactgattgcctcaagtactcaagtttcatgagtataacaaagattacagcttgggtatctgtaaagtggttatgttgagataaaggacaataatgtgagatttctgtttacatctcaaatgttccctttaatttttttacgctactttctaacttggcctttcagtttaaatctcataatatgcattgtttcttttatccaggattgaatcttctagcctctacaaaactgaattcatatttctctcctcttcattgttagtgtagacaatactctattcaatatatgtcgacgtgtctggcacgtgcacgttaactagtgaaatagtgtgtactagtcgatggtacta

SEQ ID NO: 46981 - DNA, 471 bp, Oryza sativa
agcttggtagaacggcgggtgattattcttatgatacgataagcggcagacggcacgccgtacttattttagcaaggaggaggacggcgcatggtactatttgtggcacagaagatgtcactgtattagtcaatcgtgctcaactaagtattttcggatgaaaccccaaatgcatatgatcaattaacatcccattgctttctccattttaattcgcagctatacaaatatatctacacaaatctatcgagaaattagtatggtatacttacatcatatttgacattggcaacttaattttggcattcagtgcttgagctagctttccttgccagtacatatttacgctaaatgctaattaattagagtcattagtcgctaattagaggaagggaatcatgcagatggtgcttgcgcaccaacaagccccaacaatagatccaccactgtaccgagctgtgttttacagta

SEQ ID NO: 46982 - DNA, 403 bp, Oryza sativa
  unsure (1)..(403): unsure at all n locations
actcnctctataacattngaaacaatcatcaattattttctccaatgaaaccccactctcctaagcaaccaatttatcttacgggccgattgatgaaatttacaaatcccttcatgtactactctcctagcaactttagattgatcattatctaagtaatactccatctgtttttcggcgatataatatttgagcgcttgccgccgaatctttcgatcaaccttaagtgtaggatcattcaaatatctaatcaaatgaattctccaagctacctctaactcatgggcacaaatgtccgaattcacaattaagtcggccttttaatcaattgtaacgtgcccnccagcctcctgtctgggatcggtcagaccggccacgcaatgccggtcagactgccctgtct

SEQ ID NO: 46983 - DNA, 464 bp, Oryza sativa
  unsure (1)..(464): unsure at all n locations
agctntgtccatcgacatttcttgttattctttgataatcaaattatcgaatttctaatgtctaattgatttgtatatgccctcaaataatttttcatattagagccggttatattttaggatatataaatgctataaagttattataatatataaaccatttcatttatatctataacgcgcgttggagctgtatataattgttcatttcacagggagagatctactattccatcacaaaacttttttttctaactgtttagtaaatatttctcatgcatggtatggattttctggcaatcttatgaccaaaatgtattggtcacctacctatgcgtctctaatcacatttaacaagaaaatgactnttcgtcataaatgcttaagacaatgttgtaccgtcattaattntataacaacaaaggaatccatttgttcatctgcattntcttgacatgctcaat

SEQ ID NO: 46984 - DNA, 431 bp, Oryza sativa
  unsure (1)..(431): unsure at all n locations
tncatgtcctcgccctccgataacccactgatattctattatattatgcgcttgggctcatgacaaaatgtaatataaccgagcttgaataagatatatttaagattgatgaanaatgaacgatatcgataccaatgctntgcctaaagaaggcttgaacctatcgatgccatgcgacatcaaattgcatgctgctatgcaacaccttaaaattttcgaatctataacagaaaaacaaaatctgaaataattaaaaaaacttctctaatatatcatcttaccggtattttattgggttttccttttcttcttctcaaaaggccagtgctgaaatctattcgaaagttaatttaagggcaattaaattcacattctcaagtcaaacatgagattcaaaggctaaaggtgtactgttgttttgataataaaga

SEQ ID NO: 46985 - DNA, 441 bp, Oryza sativa
agcttcacgaatcttcgagaaaacccgttgttgacggaaatctggtaaccgcaactatacgcaaacaatcgaaaacctagacaaaagacaaagaataataccctatttagactaaataatagtgccattaaatagatctcaattttacggaattactagaagtggaacggggtcaatcggatgaacggctgagaagatatggattttctaaggaataaggaatttctgtctaaaggaaaaaggatttaataatttattaaaccctttttggaaagaaattgaaggagggatatgatttagacttcctcgggcggcttgggtacggcccgagaggagaggcacggcttggccgaactaatgggccggccggcccggagaggcggcccaaggtggcgcggtgagagtgagggagagagaaggctggtgggccgagtccacctt

SEQ ID NO: 46986 - DNA, 446 bp, Oryza sativa
  unsure (1)..(446): unsure at all n locations
tatacctcgtgtctttattttcctagtgccaccatcttttctgacattgattntctcatgaagatatagattttacctcggcttccgttagcatgtttttcaaactactaaatggtacgttctgtgcgaaaactttctatataaaagttgattaaaaatattaaatatatccatttgtcaagtttgtaataattaaaacttaatcaatcatgtgttaactagctttttattttacttgcactaacttaattctcatcttcatgagtttccaacaccaccatagcataacatccgttattcatattcatagagaaggaaattatgagataatcaacatccaagagagtttgaacatagggcgatgtgttgctcctggtagctacctactaactaggctatgccatgttntntaagattaaantgcacccacggtacaccaacttagc

SEQ ID NO: 46987 - DNA, 306 bp, Oryza sativa
  unsure (1)..(306): unsure at all n locations
agcttgagaaggctttctcgggcttgngatgctgttccagattatctgccagcattctattgtgtatgtgaaagcctcacatcacttaatctgagttatgctactgtgcgaggtcctgagctcatcaaattcattagtagatgcagaaatttgcaacaattatgggtatgcaactcttgtcaattcttttttactactatgtattcatcccaatccaaattgtaacttttgaaaaactggtgcatatactttttggatacaagcacttggattcctacaagtgggattttgcaaattttttttttt

SEQ ID NO: 46988 - DNA, 319 bp, Oryza sativa
  unsure (1)..(319): unsure at all n locations
actcagctacctgcgagaagagaatattctgatattctgctttatttcctatattctcataaaangtgctctgggcctgtttggtatatctccaactcctaaatataactccaggagttgatgctggagtggagtttaatattttttcttcttcttcccctttatcaaacctttattttatcttcctctacactctcaactatattactttacacttatctactcaacatctctttctttcttattttttaacctcaaattactattatttctcttcttcttctccttatacataatatctctatcatttcttctccct

SEQ ID NO: 46989 - DNA, 453 bp, Oryza sativa
  unsure (1)..(453): unsure at all n locations
agctntagatgtgtaaactttatatgtattttcttactaaaagagaaaaatataaaatatttgaattcaaatttgaatttgaatctggtatataaactnttgacttataaacatttgctttataaactttaagtggataaactttagatgtgtaaactttaggtgtataaatttactanaagaggaaaagaaaaaaaaacgatcgctggcagcgatctatcgtccgttagccttctcgtttctctagtcatcatccagcagctacaaaattgacctatatatatgcagctccatcctataagcgtagggatgggaacatagagaactaaaattacggaggagagaagctgttcgtagatacagtttcttcataccactacttggttggatcctgcattgatctttcctttccatttagccatgcaacttagctaatgagaagtaaatacttga

SEQ ID NO: 46990 - DNA, 426 bp, Oryza sativa
  unsure (1)..(426): unsure at all n locations
ctacacgaacaacaaaataaggcgtaaactcttaacaacgaaacgataacagcacataaaaacaacatatgatggttcttttaagttataacatcaacttgtagctcatagaaccgatatatgactattcgaaatttaactgcatttcaaatagagattttttaattgtttaatgcaacatcgctcgagaagagaaatgatcgagcgactggcagctgagaccccacaggacaaacggctatttcaccgtggaccgggttcaccgagacagtctaccggaaaagtaaagcgagacccacttgtaagtcttggagaagagaccgacaagtggatcccatangacaccacgcaagcagccacatacgccaacagacagctacccgtgggaaggataagacaatcgtcactggccgaacacanggagga

SEQ ID NO: 46991 - DNA, 469 bp, Oryza sativa
  unsure (1)..(469): unsure at all n locations
agcttaatcacatggcatcttctgccttactagcatctatagctagtagtactggcctcgtagctaggtggctgttaaaaattntactaaaaaaaatgtcgctactacacattaggctaacctatgggtatagctgtttacaacacccaaattttagaatcgcatgtatccaatcgataatagtactgctgccagttaatgttgtatactagcagtgattatttcacacactagcaaatttaagtcgatggccacttgacagcaacaacacacgtggaggacatatcaaaagataacggcactaagctgttgtgaaaaaagatacatatacatcagcacaaatctaacgataccgatggagttcatcatcactttctgtcactggagctatgtccttaccaacatatattattgccttctcttgcctcctctctctagatatgtgtagaatcatgtgatgatttaatcg

SEQ ID NO: 46992 - DNA, 356 bp, Oryza sativa
gctatatagggactctttatgaatgttttacttagacttaaaccatctaactaatctagacttgagaactatgttgaaatgagactaacttatatgattgaactcccagcttcggcaagaacatcaaattgactctgaaaaggaggggttgaagcaagagttgtactcagcaagctattatattgagtaatgaatgcatgaaataatagtaattgagtagggctatattaagttgtagaaagcagagaatgtataagaagaaagcctgtgatgtttgaagtgtgtcagtatttaataaaatcttgaattaggtttctaaccaagatgccatagtgaagtccgatgcccgataacaa

SEQ ID NO: 46993 - DNA, 406 bp, Oryza sativa
  unsure (1)..(406): unsure at all n locations
agcttgccggccgtgagtggtgaggtgtggatatntaaaaaaaatctcctcctatcctaagtctatttatatccaagtctattttcgcaggcggaccgtaagcgccgcttaagtggtctgcctgcgggcattaaatttcacttcgatttatatttttgtaggcggttatttggctctaagggtcatgtccgcctgcgaaaataagatccccacgttgggaaaaatactttttctagtagcgtatgttgtacagttcatatgttgtcaagttaattagtctataatctatacttaaaaatgaatcatgcatgcacgcgcaggatgatgctcgttgatctgcatgatatatatatcccattcatcctttgaatacttatcttgtctcagctagagatacctcaatctt

SEQ ID NO: 46994 - DNA, 479 bp, Oryza sativa
  unsure (1)..(479): unsure at all n locations
ggccttgctctggctgtgatatttgtcattggtttgctatacttggagttgcatatggcttcttcgctgcaaccgtagccgtccagaggatcttgcagagacactatcacatacttaccaaaagggagctcacaaaggtaaacactgcttgaagtcatcacttgtcatttcctctgaaccagtgaaatagtagtatttgttaatcagctcgtttaatactctgtacttccactgtttgatgatgtgcaggaatatgtggtggaggaccttcgcgggtgttatacaccaccaaagatggatccagagcaagagcagcgtctgaggactttgcagctcatgtatgcttcactttctgcgaataggatgcaacanacctcttgatgcgtgccgaggattgccatgctacatatgatctgctgatacaaacaattttcaagtatcatagtcgagactcgagaccccagattagttatacaatg

SEQ ID NO: 46995 - DNA, 371 bp, Oryza sativa
  unsure (1)..(371): unsure at all n locations
atatgcttaanaatggatgaaccatacgagctaaactatactgcgcctaacaatgaatgacaagaatggcacaaaagttggatgcaacacatgaatcatgcgatcagcacctaaacgtgacgcctgttcatctccaataaagcgtgaaaaatcaaagagttataaatacctctttgccgatgccggcggcggtcgacgtctataagcgccgagagcaccttcatctcggcctcttagcgcccatctgcacgcgaccctgccgcagcatgtcgtcccccgttcgcacgtacccgatgtacatcctccccatccggagtctgagacgcacgccggccgggcacgcgacatatacagcggatagtggctggaga

SEQ ID NO: 46996 - DNA, 199 bp, Oryza sativa
atgcttaatgccacccaactatagtggatcactaaataaagagaatgccgcacaacaatttaatctcctggaataaaccaaactagctcgtgatgccattaactaatacatggccgcgttagacgactaacctgatggctgagaaccagtcgcgtgggtgcatacttagaactgacgacgacggcaagctcgatacctt

SEQ ID NO: 46997 - DNA, 380 bp, Oryza sativa
  unsure (1)..(380): unsure at all n locations
tagcagtnaatgatgttgacagaataagagagatgacctttatgtgataaatttattcatggcatgaaccagaacttgaaccatccagctattcctgaatagagaataatcagaggccatccaattgccatgaacgctagcacagatgctaagcttattttcacccttgggagctcatttgggctgaattttattagaacaaagtgcccaaaaaacctgacaagcaatcgtggtgaacagcaatgatattgcttggagaagttgaacgaaaataatacctaaagaagatgtccatgtgatatgaaaaggtgatcgaataagaaataccagtgagcaatagacattcatggtctgataggaccataagcatatattattgc

SEQ ID NO: 46998 - DNA, 424 bp, Oryza sativa
ttggggatataatgtgtcgattatttatgctggcttcttaaggggccggatgaattatcacattattaccttttttacttctctcatgttaattaaatgatattatattcttaagattttttttcactcttttttcattattaccattcttactcctatccaattaaataaatgcatgcactgcctttacttttcaattggtcattaataaaactaacactatgatcattgaacaatgaagacgtttcaaaaatgtattgattgcatgcacaatgtaattatgaaaaacaatactgtgatgaggattagcttccatttgaaatatggtgccacgataataaaaacatagtgttatgagaaccatacccattgatctacattgcccctacatgtataacagatattccgtggatgcgtgctaaaa

SEQ ID NO: 46999 - DNA, 505 bp, Oryza sativa
ttgaaactaagctgtgcacgaaattactacttcctcggcccaggcggcaatcttttttctaccgagttcattattggcgagaccaactggattccttttagattggccaacccagatctaagtcactagaaaaacaccttcaaatcctggccatccctcgagaaaactccacccgaagaaagttggatcacatggttcaagcgcatctcggctagcaaaagagttcattgggatgaaattggaatcagccaagcacttgatcttacaatagccaactcagctaacgatgagcccttaatggcagctgcttcctatttctagtccaacgccatcaatgcctttttgttcaaccaggggccaatgaccccaactctcatagacatcatcgtgatcacgggtctggatgtcacctcatcggctgaccctatgagcttgaacacaaagaaccaatatgtattcaaaaccaaaagtatacgtggctggtcaggctatgtggcaacatata

SEQ ID NO: 47000 - DNA, 486 bp, Oryza sativa
  unsure (1)..(486): unsure at all n locations
gggctcgttgacagccctatacatgcggactgaacacccaatttatttacttcaattaggttatttgatatttcctttgaaaaccaccatcttacagcattctacttgcaagctacttgcacatatactaattaggtgagattgagaagataagtatatctcagctntgctgccaataaatatcgtcggctgcatgccccattacactggacaccactccggctagtcaattaaccatcctgcagctgcaggcacaccaaacacacgcatgcacaataatccacacaagatggccaccggcgtagcctcgatctcctacggctgccgtcgccgtcgccgccatggcctgcgtcgtgctggttgtactctactcctccgacgtcgcgccggcggcggcgaagatgttctgctggcagctgcgacgagacatgcgcccattcgtgcgagtacaccgacaccgtcgccacggcgtgcgcaccgcagtgc

SEQ ID NO: 47001 - DNA, 448 bp, Oryza sativa
agcttgtcagtttcatagcaaacacacaaattttccatcccaagcactgcaaaccatccctctcacttggccgttctcgtgctgggggctcgacatactcggaccattcccacgaggacagggtggctacaaattcctgttcgtggcgatcgacaagttcaccaaatggatcgaaacaacactcacaggggaaatcaaggccgacaacgccatcaaattcattaaagggatattttgcagatatggattgcctcaccgcatcataacggacaacggcacccagttcatcagtgccgacttccaggattactgcattggactgggagtcaagatctgcttcgcttctgtctctcaccctcaaagcaatggacaggtcgagagggcaaacggcatattactacaatgaatcaagacccgtgtctacgacagactcatgtcacatgacaag

SEQ ID NO: 47002 - DNA, 506 bp, Oryza sativa
  unsure (1)..(506): unsure at all n locations
aactatgaaactcagcttttactgggtgagtcaaacaatccctcttgttgattgttttccgacgcggacagagggatgtttacaggtatgcatgtactcatatttgctctttgtaagatttcagaagtgtgaccttccttgagtcaatagcaaaccttccctggtcttcttgactactattcccaagaagtaatgaagatccctcaagtccttaagtgcaaactcctcttctagatcctctaacanacactcaatgcctgtgtggagcttgcaacaataatatcatcaacaaatactaatacttgttatagaaaaacggtgatgtgtcagctttcgaacaagtgaagccaagctcctacaatatcttacttaggcgagagtaccaagctcgcggtgcttgtttcaagccacgtgccttgtctaacttatacagcgagtgcagagacatcttgtcattcgctcatatatacctnctcttctaaataaccatgcaagagtgcattctg

SEQ ID NO: 47003 - DNA, 435 bp, Oryza sativa
  unsure (1)..(435): unsure at all n locations
gcttaaacacaagcacagagaactataatgtcgggactatatgtacttgttgggtctaataatacatagagatctgaaagttcaaccaaaacaggttcccaaagacgacaaattgaacaataaaccctatccccacaaaccctacgggaaaaaaataattntcctcaatacatgcgacaagtcatagagactactacaaaatcaaaagaaaaaaactatagtatctgacaaaatcccaaccgcgaaacagtcaaatcctcactctcaatagtaatcaatcccactggcctcaaacactacaacatgaaatttaccgaatcgtgctaccgaaatccccaataacgaaaccctcgaccgcacagtaaaaatccaccaaaccctgaccgctgatcgaaacggaaggagagagagagggagagagaatgtgccacctgc

SEQ ID NO: 47004 - DNA, 373 bp, Oryza sativa
tagctatgacgaataccgtgtgtgctgcgaagtgatagttatattaactggtaatatattcttcgtagatttgatataggtgtcgcttttacggctaattattttttggaattgtctatatatcatttgccagaaaacccttttaaaaatattacaaattctggactatccgattgctttaagattcgtgcagagaaacacatcctaaaaatctccttctctcccttcctcccaacaccacgccgccactcctagcgctcgtgcgatccgtgctatgccaccgcctccaccgccgtcaccccagcgtgctgccgcccagcctcgacggctggtcggaatgcgttaacggcgctggctaggctcatactactat

SEQ ID NO: 47005 - DNA, 441 bp, Oryza sativa
  unsure (1)..(441): unsure at all n locations
ctcaagctntactacacctctggagttanggacgagtccgaaccatattatcgtttatctttnacacgcgcgagggagattagtgcaaactgaagtaactttgatcccaattctgactcttgtttattcgtcaacctgcaaattggctgccaagacatcatctaaccaagttcctgaggtatcattttcctcacttatagattattaagtaaatgtttaaatcttgatactgtcctttgtgtcgtgggagtgtttaccatagtaatctcttgattgatgcagtggaagatgtgataaattcttcatttgtgttgaccttgctgcccttagcattgtaaccaattatatatacgactataccactcattccaaagtacttaccaatatatggtgatttgcgacatctagatctctactactgtcttatgcctaagcattaat

SEQ ID NO: 47006 - DNA, 447 bp, Oryza sativa
taagtttaatcctaatgtaatacttcaggcactggcaatcttctgttcccagatgtcgctctactacgtacccggacagggaggtcttaagtgctcttgagggctgtcaccacctctacacccacctcatacgtactgtgggatacacaacaattactggataataattacctaaacaccacgtctaagcaattaatatctactttagtgtatataactcaccaaagcaatcactatattttagttgaatatagtgaacaataatcccatatgctatttatgaactaacccaaaaataattctcacaagataaatctaaattactcacgaagataattctattaatatcagagtaataaacagaataaaagaagtgtgagaagattaccgacagctccggaattctttcgacttcttctgctctactctcttcctaaatatagtata

SEQ ID NO: 47007 - DNA, 403 bp, Oryza sativa
cagcaaagcacatggtcttttcttttaatatgcaagttctccttcactaatatgaattgtttatgcttgcaaagaatctaatatgcattctagtcgaccagcaaatgcacatgcattgtatgatgaggttcacgtttttgatgactcggcaagatagttaactaaaaaatccacttgatcataacatgcagatgcacttgatcatattttgcaagttgagttaataaaatagtattacagttacattcatctttactcaaattattaagatttgatcccagaagtgtaagtaatcattgtaatatgaaaacggtgctagaaagcattatctcatgattgaattcaaacataagctcttgatataattttatatagcttaacaatggtgttattgtcatgaacc

SEQ ID NO: 47008 - DNA, 411 bp, Oryza sativa
  unsure (1)..(411): unsure at all n locations
ttgagatacaaatatgctcaatgttctatttttcnttctgcgacgtactttggtaattttctcgtagagacctataatcctccatatcaattaccttgctacttaaaataattctgaattctgttgttaactgcagctcaataagcatatattgttaagctgatctgaatactttttatataaacaacatggaaccacaatttgtgtatatgtaaaattttcagcattactaaatgctgctacagatcttggcttttatagattgctggtgctgaatgtatctgccttttatcaaataaagctcctgtttcttaagttactaatggcaactattaaatttatttttcttggtacgagctcctgcaagcatttccatatttcacgtggtgtttatggaaaccaaaatatttt

SEQ ID NO: 47009 - DNA, 496 bp, Oryza sativa
tcaccgcactggagcgggctaaccatggaggaggtcgtttggtatctcgcctgccggagcgcgccgaggatcgccggagctgccgccgactgccaagacttctatcagttctcatgccggaggtcaagcatcacgcatggcgtcaaaaccagcggatgatgatggaggcaagtatggctgcagtacaaaggaacgacgactggaggacggcgagccagtgctgttggatggcaacaagctaggtaatgcatgttgattaagttaattattgtggcaacgtggccaaccaatcggaggacgacatgtcatcgctgctacagtgccatgcacaaaccaatgcgtgggctgaagaagtcctgttggtttttcttatttgtcccaaacgagatgccgagctttgattaaatacggccgccgtctacatcaaccatcttcaataattcctccctcgatcttctctaatctaatctcgacgcaacagctgtgacgtaagtcg

SEQ ID NO: 47010 - DNA, 337 bp, Oryza sativa
agcttgtatcctttgggcactcaaaactgtattacattacacactttttattcgcaaattatcatttgacttgttccccttaaacaacactcagacatcactgtagcaattgggttgtgtttggagaagatgtccaaaagagaattagaaacaactcaagatgtgttgaacaatattcttgaagtgtaagctgcgagtatccctcccccaccccccctgcattagcttatcatattattattatggggatactgaatgctcttttgctgtaggtaggttagagagtccaattgatataatccggaagatggccagtgctattgcattgacattttct

SEQ ID NO: 47011 - DNA, 501 bp, Oryza sativa
  unsure (1)..(501): unsure at all n locations
gctggcattggctccctccgatccctctcctaccaatcgcgacgatttatcgttgttgatacagcgcgcgtcgacatgccgccgtcgcgatccgcggcacagcgcgtagcatgtactgtagcagtatgccaccccatactctgcacggccgcacgcggagcctagctatagcagctaacgcaaacagtgccggcgcggacaaacgccaagcttgcattggccgcctttaatcgatctgcaggtcgtcgaaattatgtatgcatgcagactgcgtctcgtactctcgtctccctggtgaattggtactacggcaagtactatcattggcgcatgggtcgtcgtccgtcgatcgatcgactgagctntcgctgaccaacgtcacacgcggtaggtacactgtgcaaatcgtgacaaactcgcttcacttacccctatctcccctccatccatgtagctgacacggacatgtagacggacacgtagatcatattaacaatggag

SEQ ID NO: 47012 - DNA, 442 bp, Oryza sativa
gcttggcgaattgggatccgttggttcctcgcgcgcgctctctcggtggctaacgatcgagagtgagagtgagggaaggagaagaaaacacggagcatatactaccgttcatgggcgggcggggcgctgccgcgcgggagatggcgggtgccgactgccgagccgagaaaatcgcgtggaatggtggaaggatttgccaagagagctggaagccgcacacactgtcacacagtcaagagtgtcagaccattggacgttgtatagtaaaaaaggcacatttcttttttctccgattagatggaagacctatacaactcgcaaaccacacacaccccccttaagtacgaccactaacacgttgcgaaagagattagaagcaacgggcaatctctacggcactacttcatcccgcctattttctagtgcatcaatgggttttcgc

SEQ ID NO: 47013 - DNA, 460 bp, Oryza sativa
  unsure (1)..(460): unsure at all n locations
tcctccttgacgcangcaatacaggtttacttgacatttcaccatatgttttcatcattgacctggaatataatttcagataaacataaacagatagagtgaataggaaaacggtcaaccaactatgaatacctaatgcaggtgcacatagtcacagagtgagcgccgtgcaaaagacaaatactactaacagaacatgagaaaatgtggacgctgcttgatggtgagttaactaacacgaatgttctcgcacatcgaattttcccctaaaaattcatcaactactactctactagatatcaaacggaacacaactggaataatcaataatctcccgctagaagcaaccgagattcagcaagcgaaaggtacccaaattgggccatcctacactaactacgcaatacagttatccagaaccaccagattgtaccgatgaaaaccaccctgttagaacaaa

SEQ ID NO: 47014 - DNA, 427 bp, Oryza sativa
agcttggaccagttgaggaaaccattgcttatgcaagactattgactgggttcttgtatgctcatactagggtgttggatttgatgagaaagtttcttaacagagacttggttcgctctggggttacacgatttgccacagcttatttgaatctaaaaagcttgttagacaacaaaaaagagttagtaagactatttaaatcaaatgagatggagcaattgggttacttgaagcaggccaaggggaagaaagccagcaaagtgatcatatctgaaaccttttggaaaaatgttgacattgcagttaattactttgagccattggctaacgtgttgagaagaatggacagcgatgtaccatcaatgggattcttccatggtttaatgcttgaggcgaagaaagaaatttctcagagattcgataatga

SEQ ID NO: 47015 - DNA, 469 bp, Oryza sativa
  unsure (1)..(469): unsure at all n locations
tgagggtcggcacatcataacggaagtggactaagactgtcgatctagtgccctggcagaagccaccaagaactatgtacgtcacagcggttgggttgtgggggataacgtgcctgtcagtacggtgtactggcgcagaacaagggcacgcggagatcatgagagctttgtcctagattcggagaaagagatgccgtggaccacaatgctcgagacattcacccttcccgcgggtacagaggacaaagtaaaaaggtggactctgaagaaaatggcagaacagtttcagagcttcaagggagatctgtaccagaaatatatcctgaaggggcagacaccgaacttcgacacattcctaaagctaagggatcactgtgactagttcgttgcatataagacaggtgaacaagggcaggcgatgatggaaagaaacaaagaanatgccgccaagaagaagtaccatcaccac

SEQ ID NO: 47016 - DNA, 503 bp, Oryza sativa
agcgacctatgacactcagcttacaagctctgctactcactctcgtgtttgtgtgtgtctccgatcttggtcatttccaacatttggtatcagagcgagtttagagaggggagatgatgacgccgccgaagacgcttcgcatcgaggactcgagctccagcggcaccggtgatggcagcgcaccgcgtcaggccgtggtggagcgcgtcgtgcccaattccagcgtcgtggagctgccgatgctaaccagggctaactatcatcagtgggcctcggttatgcgggtgagcttggaggcgttggagttgtgggacgtggtggaggcggtcaccaacgaccgcgctaaggatcggcgggcgttggccgccatcttgcgtgcggtgccatcggagatgaatgccgggctcgccgtgaagacgtctgcgaacgatgcgtgggactcggtgaagaagatgcgagccggcgacgaccgcgtgaaatctgcgtgcatgcaacgcctcatg

SEQ ID NO: 47017 - DNA, 467 bp, Oryza sativa
  unsure (1)..(467): unsure at all n locations
tctcgaagaattctcgatcgaggtggagtggnggttgtttctcgatggggctggatgtggcggagatcggcgtcggcgcggcggacctgagcctggatctcaagatgttcgccgccaagagcttcggccgcgtcaggggcaaggacaccaccaccaccgccatgggtgactgcatccggaggctcgaggaggagatgggcaagatcgaggtcttccgccgcgagctccccctctgcgtccgcctcctcgccgacggtaataactattaaacaaaaaaaaaagcctctttcttttttggtttgttatggggcggcgagatgttgatatgggcatggcttgcgtgcagtgattgatgtgatgaaggaggaggtggagaagaagggtggtgatcgtaaggaggatgaggaggacgccgtcggcgacaagagcaactggatgagcaccgcgcagctctggactgggaattc

SEQ ID NO: 47018 - DNA, 381 bp, Oryza sativa
  unsure (1)..(381): unsure at all n locations
agcttacgatgaactataactctgtctgacagcaactnttcaaattgctcagctccaaacttccaatcagctgcactgcacagatgaagaaagaaagatcaatgcatggaacagacaaccaaaacgatatacagaagggtaaaaaaaaccagttagcaacggcgctcagtgatgcactaatatatggctgaaatgtgcataagcatcgtgctatactgcaaccaggtagttaagcactctcgattctcaagcgattggtatggatctaattttgcgtgccttgattggaaacgccgacctgcccaatatgaaagaatgccatagcatctaagggatatctcaaattcagtttgttaactaagtgcccaaatctccatattt

SEQ ID NO: 47019 - DNA, 487 bp, Oryza sativa
  unsure (1)..(487): unsure at all n locations
tagaaggtagcgacctgctgctgctgctgctggccttgttgtgattcttctattccagtgctcgtgatgtctgaagggccatctcagaatgaagccgcaggcaggtcatagccatcttgaagacaaacatgccaatgggaggagttagatgacagtgtgaaaagttactgagtttccagcttatactgaattggtttctcttttaagtaaaaactggtttccagcttataagtaaaaatatgtcctgtttttcgttacaaattgctgaaaagagctgggtcactgaatttgtatactgaaggaatgagagaaatgagtacgttacagaaaactaaagcatataagggtaggttactgaaatgattaggcgatgcagacaaactttgatacataaccagcataactgtactcctttgttcgtcaaaaaatgacctattattatcgtgtgtggttntaagaaacanatgtcatcctattataccataat

SEQ ID NO: 47020 - DNA, 290 bp, Oryza sativa
aacttttgagccacggaacaattaatattacagaacaaactgatcttgtcacattggagaattcatgaaaaagcaaacgaagtagattcctggaagtaaagagagataataaccaagttgaagaaagttgattcccgggctgaaatgatgccaacagctcataaaagctgctcggatagattctaccgccagagataaaggctggattgtttctgcctacgtatatagaagaaaacttttgctatccaactgcatttgtctttgctatgatttcttccttttctcacttt

SEQ ID NO: 47021 - DNA, 493 bp, Oryza sativa
  unsure (1)..(493): unsure at all n locations
ctttcctagacactgtttctcaccagtaaatcctctccattctgtcatatcctttgcttggtgtccttggatgaaccggaggaagatctgaccacacacgttccctttgattcgatacccttggaatactccgtgggggaagtgctacatcggtatatccgtgcgcttgcagatttttcctgtgatcgtaagaattaccaacagtgggtacgggtgggtaaagaatggacccaataggtaagagtttttacccgttagtagacccatgggtataagatttaggacatgattagctcttaatagggtaaaaacccatcgggtatcgggtcgtgggtcctcattgccatcttgcaagggagaggaggatctcgcccattccatccattatacaaggactctccttctcggatcttctcctcagggagacaaagctagggctctctctgatagatggnggagcccctgctatgctcgttggggctattggaatttg

SEQ ID NO: 47022 - DNA, 401 bp, Oryza sativa
agcttaggtttgcatgccggtgacaaaactttcttctctcgaacacgggttgagaatccctagagttggcatctactccacctaatggatttgggcaaatccaaatctcattcatcgttttatttctacgggtgagatcataaatgactcccttaattgatgcatatttggatatttcttttaactgtcctatttccaacgtaatcaagaaaattaacgtaattaatcttcttcctacgattaatagaccaacatagaagatcttttcagtgtagagaagagtgatatcgtagatggtgaacatgggcagccttgcgatgtgcataaacttactcagcgcaagcaagtagcaacattgtaagtacatcacgtcaagctccttgatgctgctgcacaactcg

SEQ ID NO: 47023 - DNA, 491 bp, Oryza sativa
  unsure (1)..(491): unsure at all n locations
tcggcaannacatcttcaattttataatagtagagatatttatatactgctctggttaaaaaaaactatttgacagttttagtaaatttgtttgaagatatttcattctaattttgaagttaattttagatcagtcggaaacattaataggaaaataattagcccacggaaaaggatgaagacatattcatcgtgaaaacgttcacaatgttnttcgtcccaaaatgtaaatatatataagcatgccgatactggctaacgattcaatgattcattggttcaaccaaaattgtgtcaatctgaatcgctttatcaattcatatgtaagtatgtaagaaattgtgtcaatgtgaatcgattaggagaagagttagggtttantttgggagctttaagattctaagaagctggtgattggattctacaactacaacttttcgaatccgaacgaanagttgaactatgagagcttcttgatatgggaaaagctg

SEQ ID NO: 47024 - DNA, 430 bp, Oryza sativa
agcttaacagcagataactacacgccaggattactgacgtgcgcacacgatgggaactcgtatgagagctctggcatcgaagctaagctgaaactctccgatggaggattgcggatgaactgtggacagacatgtcatcttcaggctctttattttcaagctctggaatcagtgattatgtggtgatggccatggtggccattgaatgcgaggaggaggaggaggtcttctgggatcaacagagaggtcgccgtcgtgcatctatggcggcacatgcggtcagtggacggcgatctctgctcgatcgccgacgtcagttactctcagttttcgtcgctatggggaggtgtgattaacgtgtgtaagtgagcactgtaatgctgcgtgatctcgaagagggtcttcgtggcactgttgccgatttgtgact

SEQ ID NO: 47025 - DNA, 473 bp, Oryza sativa
cgaaacgacggttatacaactggttgccaattatgaatgtgttatttaccaatagactggaataatgttattatgtctagtttggatggtgtgtttgcttctatttggacttcactcctacagagtgctagtttgtgataattggctgtagctcttttgagtaaaggtcgggatgctatttcattctattatctaaaaattggtgttataaggtgtaactaatacacacacatgtttatatctcttaggatagcaaaatttaattagttatttatacacgatattaatttatgacgaagagagaggagtagcagctactagcctttaatctgaaactcccacttcagccaaaaccgataccatgcatctcgcactaattaataaaaaaggcagactaattggtaagtgtatgtactagtagcaaattataatgaaccaaaccatgggctagtactgatgggattccccaagag

SEQ ID NO: 47026 - DNA, 356 bp, Oryza sativa
agcttataaacacattctcctaattgttttttttatgtgcacgtttgtgaggtattggtcattgcatcattgattcatcgtgttgaacttgttgagaagatggtatgtgcatatctacaggagtgttgcacttgtcatcttaagcactccttcgcaggcaccttttcctttgtcatctccatcatccatcgggttccctaagcacttccttctaagccacctttttcttcacctcatctccatccctactggctgtccaagtactcatgtaatatattttaaggtgaaatcaaatcattaattttgagtaacacaaatttgaatgggatgaggtgcacaaagcgcccttgtttaac

SEQ ID NO: 47027 - DNA, 404 bp, Oryza sativa
gcacaagcgtaacttgagacggctcacctggcaaacaccagtctctaatcatacacacattcccctcaaaaataaacacaactcactccataaaaacacataggttagcattccaacaacccaccttctgccgatgtattaccagattttctattcttatgtgcagacgaatccttgagaaatcaaatttcaaccacacaatgccatcagcatagatattactagaaagcaaagcccaattttaaactgtccttctcgttaaaccaggatgttttggaccttgtggtcagtgcatcatctctagtatagacgactctcgctgcactgtaaccctggcacgcacaaaactcaaacgttaattctacataacgagaatatagagacaaaatctcttgtgaattgat

SEQ ID NO: 47028 - DNA, 357 bp, Oryza sativa
agcttatcaaacatagggtgtatagaacctctgatgaatcttcttttgcttataggaaacaaatattttcagcttttggagtttggacatagattggttaaatctgagctgatccatttaaaggtgtattacttctttggctatattttcggatcagtaattattttcttttttggtccttcacctcaacatatttttctttaattaagagtcacctgaagaattaaggattgtttagcatctgaccgcaagtttatgaaacaaaattaggtatagcccttcttcagtttaggtatcaaacctcagatctgaacaagatccatgtgtgaattgacgatgtaaatttataattctaca

SEQ ID NO: 47029 - DNA, 481 bp, Oryza sativa
  unsure (1)..(481): unsure at all n locations
atgaatgcataatactgatgagaaaaatgttgtgttttcatactatagacgtgctctccttgagaaatgggaacatctaaaacaaggtgacaaaactgttagggagtactttcatgattntaaaatttgtatcacttatagtggtttacaagaatctaatgagaacacaatgactagatttttcagagggcttaatttcaatattcaggctgggcttgttaatgtgacatataatcatataggccaattgttcatgcttgcttgcattgttgagcgcaaaantttggagaatccaacggagcaacaagatatgcttgtgcctcctatcactgatgttttgcaggaagttcagaanagtctccacaatgagaagaacgatatgtttgagatgtcacttccatcactcgcgaatgaggagaaggctgatgcagctacattgtctgaagaaagttcgcaggtaaattaaatggtgctgagagaa

SEQ ID NO: 47030 - DNA, 270 bp, Oryza sativa
tctcttctcaacttgtgctcaagccggcataccctgtgtctgcatctattcgtggcgtcccataactggagtccccaccacctactaactttgtttaacatttaccaccaacccaccgggccactatacacttcgaccctgttttttggcataccgcggcgccttgctgtcacccgaactgtggcctctaggtattctctaaactaacgaactttctaacctaagatctatacgctgttctctataaagtttgaatgttcctagttggaa

SEQ ID NO: 47031 - DNA, 444 bp, Oryza sativa
ggacattacggaccactgtgtctagtaccagggggtactcgctcttgatggaccactcggtcaggatgatccgagcggtcaaacttgattgcaatttctgaccatcgaagatactggggcgtgtcgggctgaacagcattgatctcccgttcagtcaacttttgcttccttttagactcataagccagggggccgccgaagatatggttgagctccttgcggtggtcttgaaatcctgccggggtgtcgccgtcgtccttcttcctcgacgtgctttgttcttcgtcagagtttttccgtgtagtcttggtgtattgctccgcaaactgcttgtagacgaaacaatctttggccacgtggttggagttaggatggtgcgggcattgtgagttcatgatcttgtcgaacgtgttgacgcgcgaacgctgtcgagaagagtgagtg

SEQ ID NO: 47032 - DNA, 429 bp, Oryza sativa
  unsure (1)..(429): unsure at all n locations
agctttggtcttatgaattcccgtacgtatcttgacaattactctctccattttcaagncatgttttgaaaatgtcgaacatggatgtgatatattataaaattattgaagaagccaataacatatagaatagttattatctagaaaaaaaacatatagaatagttagatgaatgtataggtataagtttgtctcccaaaaaaacttataattattacttttatctagttttcaaataattcgggcaacagaaattagttgtacatgttgtgtgtgtcaatgttcaaaacgatatgttttcgtgaccgtagagagcgtatgattacgagagttgatctagtttacgagcccaccaaacaagaaatagctagcttagtggaagaggtactttgccggtacagcttgataacttgcagcataatacccacg

SEQ ID NO: 47033 - DNA, 495 bp, Oryza sativa
  unsure (1)..(495): unsure at all n locations
tacccanatgacaggtgctattccccgcanaatgaggactaacaataagagatgcactcattgtaggaagcacttcctccttgattgcaggaacctgaggcaaacccatctcactagagttactccagcaaaaggaaaccaattttcctcttgcccacactttgttcctattcagattttaccatgatccatttcagcctcttattttcagcaacaaagtctctagcaattgttccagtaataatcagctaaactatgatgacacaagaaggctaaaactacaatgtggcttctgaatcgaaccccatcagcactaatgatttcaccatcccaccaccaatcatgttccaatagttactgcaacaattggagatgaagcacaatttggagcctgaacaagcaacaaggaacctgtgatgaaccattccaatagatcagatcagagtcctgcangcacaaatcggaggatgtcaccgcacactggtaaataagctt

SEQ ID NO: 47034 - DNA, 444 bp, Oryza sativa
  unsure (1)..(444): unsure at all n locations
agcttaacatatttaattacgacaagatctttatataaatggttgatttaacaggttaatcaatcatgtaacgtaaaagtagntaaatcaggtaagatcggctgaaaccccaatactactctaatcggcaactagaaagcaggctagagattaatattctaagcacgatttagtagatcaaacttaactgatgcagcactaaatatgaaaaaaaaaacaatatctagacaatcaagccgctggatgtttcatagagtggtggatatcctatataatctaagccaacattgctatttaacctaatcggctgccttctaacaatagatgttagccgggtgtaggttaaataacaatatcgtcgtggattatatagaatatatgataactcggcgaattacatagataagattagagtatcatanagatggaagcactaatcctgag

SEQ ID NO: 47035 - DNA, 491 bp, Oryza sativa
ctaagcttgtcaggaccttggctaccctgaggaggttagttgcactgaaacacatgcatacttgtttggtgtgtaaagataaaactgtattagttggtttagatgttttgaattactgtgccaagttcttctctgtataaactgagatatttctccccttcgagtaggcagcaatttgtttgtgccgtagcatcctcgtgcgtccgctgtagtggctggtgcctggttgccaataaggtaccggcgcagcgacggcagcctgttgtggtttgttcttgtagctgttgtaaatactgtagcttggaacttcttctttccaaatctcaataaacttcagccggcttctacaccggcccggcaataaactgagatatttcatggcacagagggacttttcttcttttgttgtaagaatgtattattgactgcagaaaagtaaactgtgatgggacttcctttgtacacgttagcactatcataatgcaattctt

SEQ ID NO: 47036 - DNA, 182 bp, Oryza sativa
cttgtgagggtttcccattacctaagacctttctatgtggcggcaaagctgttggaacttattcttaatcaccctggcgttttcttcatcttacccaaaggaagcacacggactgtcctccttagatagagatacagtaagggatgcttgggtgatcctaaccctgtctacaatgtaagaag

SEQ ID NO: 47037 - DNA, 487 bp, Oryza sativa
tgcatgctgctatggtgctgactagctagcaaccatcattgatgcacatagaagcaacttcatggatccatggctatataatatcactggatgtgtgtcttgcctacccatccggtctctgaacatcgatcgagttgaccactgtcgttttagtttcaatcggtatctgaactttattgtgtgctctgagtgtagtgcatagctgtatacttaacctgactatcacaactaatctgcttgacttttcaggtcagctagctactgcaaatagtcaatgagtgaggaggcgccgccatcatcgccggtgatgagggcggtgttctatgatggctgccccggctgcgccatggaacggaagctggagagcagccaaggcatcctctacaaggagttcttctttgttgggatcaccaccattgcctcttgtatgttcttcttaattaactaatgaactaactacggttatgatgtcttgaaattttactat

SEQ ID NO: 47038 - DNA, 438 bp, Oryza sativa
  unsure (1)..(438): unsure at all n locations
agcttgtcaagtctactttaaanggacctattttcatgtttatatgagtncnggagggccataatcttcgttatactatcgagtccttttctgtccacggtgccacgtgacctctttgggccgaataggccgtgtatcaagttgggtccattatggatgtgtcctacggttggagaacaaccccaccactggcctgtggacattctccttctcttcttatagctttctccgccgccaagaataatcgggttttgtttagatcaaagtataacatcgttgctttgctgagttcatcctgtgatcggttagatcgccagattgcttgttactgaaccccacttgctacttctgttgattcaatccaatatctttgattcggaaaataagttgctcgatcatcttgttcttgctcggtctcgaatgcttgtaggaacaaat

SEQ ID NO: 47039 - DNA, 440 bp, Oryza sativa
  unsure (1)..(440): unsure at all n locations
tcagctatctcattagtccttcacaaacatttcattttttttatatcataangtcttggagaattctactgctaataaaaatgaacttactccccttgtcttctattagtgtacacttgtgggtcttgacaatgtatatgttgttgcttgcaagctatcttttctgatgattcagatgatgatatggctgaacctcttgctaatcaaccagtggatccagtaaagaccagtgaagatgccaatatggttctcaatcgtcttgttgctgaggatttcctagaatcattgggtaaagaactggggttggatgttccaccagaaaagcccacaccacccaatgtcttatttagatcagaaacaccttcaacagctaatgcaattggcatatctagaaacagaaaggcaattacttgtcaggaaataaaggagaacgagagtgc

SEQ ID NO: 47040 - DNA, 129 bp, Oryza sativa
atgcaagctgggccattgggccaaagactggcgactgccacgactcggtcatgtccacgtcgcacgggtggaggaactaccttctcctctaaacactacgtcaaacatgatgaatcacatgacggcatc

SEQ ID NO: 47041 - DNA, 458 bp, Oryza sativa
  unsure (1)..(458): unsure at all n locations
tgtacctatcccaataatttgatgcttagactctgcaacttgcttcccattggatggaactttgcttgcctgataaagttataggagtgtggagtatttcttaggttatataagttgcacccaattattcagaatttgctgttagaaagctacatttctttttggtactcttcagatgtgaccataattgcacgatcattgattttggaacattctgaggctacccgacatggcaataatgttcacgtactgatccatagctaacaccaaatgttatgttgatatgattacatcatgatgtccatattaagcactttcaggctcttaacccagacctcagagcatgcatgggttggccccatgttgcccagacgtaacccctccanaaacctcaattgattggtatgtgtcgacatctncatagaatgtgaccataattaatgtccttgatgtgtaag

SEQ ID NO: 47042 - DNA, 491 bp, Oryza sativa
  unsure (1)..(491): unsure at all n locations
tatcacaacaatctcctttactgtgggttctgaaacatattatgatgataaaacctatctatgtcacgagagaaagagtataagaccaccattttctgcagagcgtatatttggtggagtattgctggctatgtgtacaaatgattttatttgcttccatgactgggcagagggcaggatgatacgcacaattgatgtcaatgtgaaagtgagtaattatgctcctggatttaaatttttttttgcgtgtcatttggaatattatgatgctaaataggatctgctttcttatttgtagaatctctattgggccgatagtggtgatttagtgacaattgcaagtgacacctcattctacattntgaagtacaatggtaagttttctgcattttgttggctctgtagttcaatgatgtaacatctacttgatgtaactataacacaacaattataccttccagagggatgtagtttcttctcatctggatggg

SEQ ID NO: 47043 - DNA, 380 bp, Oryza sativa
agcttgcacagaaagagagggatgttagtctttttatctttccagcacatctaagttcaaagtttttgcacatagttgctgaaaaaaaatacctaattcagcaagtgcttcgtttatgtccttgggcatgaatcctcgtacagcagcaggtataatcctttgaagaagaatatgaccatcatgagttttcaatccttggagggtgcatccatctgcagtaacacatgttgctaagttggaagcatatccatctggaaatgttacactcttcaaaaaatcataaaaatcagccttctgtgtttagtcattgcgtaggggcatgacgagaactatatgaatctccatcacggatcaagtgtaaatgcgttctaatacccata

SEQ ID NO: 47044 - DNA, 476 bp, Oryza sativa
  unsure (1)..(476): unsure at all n locations
ggtgagagcataacttgattattattatttttcataactatgcctttccctctntctctttntttcttttttttttggaaaaaacttttctttttacgagaagaaagcacatgaaagcatggagaatttattttggtggcaatatggaaatggaatggaatattgcttaactcccagtgtaggagtttagcaagtgcataaatacgggtgtatgattttgatcatagagcatgagaagtatctacacaagtctcaagagtttgacaaagtccaatggaatggcaagcaaccaaaatgtatatggtttaatcatgatggcacatttttggctttggtaggaatttttatcaaatgagaaactctcaantttatcattntgaagagcagaacatccggaattcaagccaaactagtatcaggatcatagcaactcttatttaccatctcatatcttacaacaacttagactcagatca

SEQ ID NO: 47045 - DNA, 411 bp, Oryza sativa
  unsure (1)..(411): unsure at all n locations
agcttggtactggcagaggcttccctacttctttgcttatgatattaatgaaccgcatccaatccataatgttgagcagctcgagaaacatattgttggcattcttcacgaacttttaagcttgacagtggaaaagatgataccacttgagaggttctcccatttcagaagaccttttgatatggaggtaaacctgagggaacttattcttaagcaccctggcattntctacatctcaaccaaaggaagcacacaaactgtcctccttagagagagatacagtaagggatgcttggttgatcctaaccctgtctacaatgtaagaaggaaaatgctagatcttattttgtcacgatgccattggatttgatgaaacggatggtccaattcagttagttgaggagcacaatc

SEQ ID NO: 47046 - DNA, 365 bp, Oryza sativa
  unsure (1)..(365): unsure at all n locations
tgctcggacagctggaggaggaagaagacatatatatgtgtgtgggactttagacccggctggtagcaccaaccggtgctaaagatcaccgggatcattagtcccggttggtattaccaaccgggactaaagttaagatctttagtcccggttggtagcaccaatcggggctaaagatcaccgggatctttagtccccggtgggagatatttatggccccnnntgtcccnactggttagagacactttattgcctcctcatttttcttattctcttattttaatctcctctttctttttaagctaattattgtccacatatgctctttcattttctactcagcgttctttttctaatatatgttt

SEQ ID NO: 47047 - DNA, 274 bp, Oryza sativa
tgttttgaattttttttgaaaactgggactgctttgcaatgatcatccaaaaccttttttcatccagacatccatgaagaacactgagccttcaaaaaacctgtgacaatccattttttttctacgaaaaaactttttgggccataaggacttctctcaaatgataaaatggcaaacatgctggtaaggcacattatattcttattaattgacttcgtgttgaacgaaaaaagaatcacgtttgttgatagtcatcaaaaacgtgtcatttacg

SEQ ID NO: 47048 - DNA, 323 bp, Oryza sativa
aaacctactacctccggtccaaaatatattcattattagctatgaatctgaacaactgagtggtcagattcatatctaaaagttggtatatttatgggacggaaggagcttgtttgacaaataattatgagcaaacatagccgcaacacatgtaattatatttctacttggagctacacatggatcagattttctttttgtacgaatagatcggcaaactgtcaatttcattgaataaagaatgaatgaactctacaagatatataaacaaggctcatgaccttccgtatcactgagcttagataaacagttagcacgctacc

SEQ ID NO: 47049 - DNA, 443 bp, Oryza sativa
ggatcttaagtcacctgcggcatgcaagcttccagctcagtctcttaacctttctttattataacctcggacgcaacttctcacactgcattgaaaaaatttagtttacttcgcacacatgttggtagttgaataaaaaaacttccgttggttcatcaagatttacctgttcagacattttcaccaactcctctgccagagaattccgaatagattctaatgaggcctgtaatatagagtagcattagttcagtgatgggcatgtgcatgttgtgctaacaccaccaagctcaactaatagcatatacgacgaaaattaacaagaacacatgcgagggtacttaaataagaaatatccaaaatgagagatagtacttttaggaaatctccaaaggacataccaaacgcgatgtgtaagaagctagctctctatctttctgacg

SEQ ID NO: 47050 - DNA, 471 bp, Oryza sativa
  unsure (1)..(471): unsure at all n locations
cagatatacttacgtatgtttntcctttatacataaatacgtaacagagtaagggaattagattgttaaaaataaattacatannncctaatagcctaaaatatcgggtccactgacagtggcggatctaggatttagaatataggtannncnacctaattttttcctaaacatactaaatctaacgatggtaatatataccatgcaagtatagataatagaatagaccaaaagtgtatcatgctatattaataaagcatcttaaaacatataaaattagtaattacctaaatttttgaagaaaattaccatactnaattttcttcttatcgggtctacgccttctaatggccatgaaagtggtcgttatatcttcttccttcacttttaagaaaacantccgcttaatgaatgtgactatacaatcatncaanagctcatcacctatcttttttctcaaccatcattagt

SEQ ID NO: 47051 - DNA, 353 bp, Oryza sativa
atattattgcaccctcttttgtaaccattctaaattagccttcttactcattatacaaatttatatggcttacacggtctacactagccggctttacagagataaggacaaaattgccatcacagatactaataagatcatagctagaaagatccctccccgataagcattggatattcccataacgccactcaaaagtaacattggccattgcaacctcggccgatgtatccgcttgaacaattacaacatcatcgcccgcccattgaattaatcattgatgcaaggtagaaggcacacaacaattggcatgaatccaacaccgacccacaataacattgtagttaccctgc

SEQ ID NO: 47052 - DNA, 488 bp, Oryza sativa
tatcataagggcttcgacaaggggttttattcgttctttgagtaaaaagataaagatcggatagattcgaaccgcaattgcaaaggtaatcactactatgccagcccaaatcatgatcttcaccaacttggatttggttctctcgcgaaaatcgcgagttgcagagatgagaaccatgaaaagcaagatcccgaataagaaaacagaaaccgaggaaaccacaagagtgaagactagtagagtctcgtcttttgtcattctttgctcctttttcactcaatgattcattcgaatttcccgaccaaaaattctatatgtctattcatagggcctcgctgctaagtgctacaagatctagtgcactggaactcgtggttatggacccgaatcctttagtatggaacattgtcttttccaagtaaaaacctccagtatatgaaagaatgaaaggtgctttcgtcttttcttgtggataagaaccctctacc

SEQ ID NO: 47053 - DNA, 349 bp, Oryza sativa
agggggggcaccggccgggcggaaccccctgaaaaccgaacgtgcgggtcttctttttggggattaaaaaaaaagagacgtcgttcccaatgaatacagtttcctaactacatttgtcttgggttaaacaaattactatttttccttgaaaataggcaaacctaaagtatgttgactttgaccaagtctgaacgtcttataacctgacacgggggaggtaatatgaattactacctagctggcgatagaaattactaattacataactgtgattgaccattggtggcgatatatgtcttgtcacttccgctagtcttaatttggcgtttaatgcaaaacactttattca

SEQ ID NO: 47054 - DNA, 385 bp, Oryza sativa
  unsure (1)..(385): unsure at all n locations
cggatcaggtatggatcggagctgatgagcagtgatatggccttcttctagtcngngatgaagtcattcatggtgctgatcgtgacngcgctggccatgggggagacgctggcgatggcgccggacatcatcaaggtgaaccagatggtgtcgtccgtgttcgagatcctggacaggaagaccgacgtcctgatcgacgccggcaacgacgtcaagagagtcgagggcgtgatccagcttgagggcgtccagatccggtacccggcgcggcccgacgtggtggtgttcaagggcctcgaccatctcatgaaggccggcaagagcatggcgctcgtcggcatgagcggctccggcaagagcaccgtgctctcgctcatcctccgct

SEQ ID NO: 47055 - DNA, 443 bp, Oryza sativa
  unsure (1)..(443): unsure at all n locations
agcttggcaatagatntatatccatgcatttcttatgagtattattatagnganacatatgccaatgacatgcttacgcatatgatgcatatgttatgctatgatgtgggatcctagaatattttccccttttatagctatgatcataaggatatcacaaatattctcttcctttaagatcaaatgtgggatcctcaaatattctaccccttttggcattaatcacccaaaaatgaaaaagggttagaaaataggccattacaaaagcccaaaaatgaattaagacccaccaggccaaataaaatttttatggaagcacaaagcaacaaattntataaactgcccatttaagaaaactcccccttacttatagatatttgtctgtggatatggaattcggaatacatatcatatgtagaacgggttagtgttgacacttgaac

SEQ ID NO: 47056 - DNA, 481 bp, Oryza sativa
  unsure (1)..(481): unsure at all n locations
ntctagacatattggagtgtatggtgtgcgtacgcggcatattctcactatgtgattcgcgcgggtactttngtcaattaataccaatattggcatatgttgagaccccacgggtgcgatgtatttgaccggaatgaaaaagctcaaaaagcaccaaaacatgaatattggacatattggagagtatagggtgcgtacgtggcacaaactcacttcgagaatcgcgcgggtacttatgtcaaataataccaatattgccatatgttgagaccccacgggtgcgatgattttgaccggattgaataagttcaaaaagcatccaaacatgaatattggacatattggagtgtatcgtgtgcgttcgtgcaaaaactcacttcgtgactcgcgcgggtacttttgtcaattaataccaatattgtgcatatgttgagaacccacgggtgcgatatttatgaccggattgaataagtcctaaagc

SEQ ID NO: 47057 - DNA, 399 bp, Oryza sativa
  unsure (1)..(399): unsure at all n locations
agctttatttctgtttattgaagatggtgtttatttgatatgttcaactgacatatctaccaattcgtcaggctgttgaaaatgggggcactataaaccagtaaaggtaccaatgaccatgaaggctggcgcctcattacatgcattnggttgcacgctggtgttgtccacatacttgctaatatgttgagtctcctattgattggaatcagacttgagaaggaatttggtttcagtaagtattgaaataatttaacattgaacttcttgtgattcttcacaaatattacatgttttacttctgcagtctgtataatttcttcaacagctacttggcatataactaagaccatagaatttaattattgtctattgcagtgaggatcggcacgctatatg

SEQ ID NO: 47058 - DNA, 484 bp, Oryza sativa
  unsure (1)..(484): unsure at all n locations
ntgataaaagatgcagcagtgtagtgcatacctcatgcttgctatttagcttacaagctaatcaagaacaaagagagagccttccttagaccttcggaacataaggccccctttgattcaaaggaaatttataggaaacaggctagtgtagcagcatcctgaaatagcaagcaaaatacttacggtgtttcagttactatttccaattaaacttctttgaaagttgaaacagtacagtactaaggtaaagcaaaacttacttcagatgtcaaagttatcagctaaaatagaacggtgatggccaagctgtcatactatatagtactaactaattcacacaactcttcttttgtttcanacgcaaagatcaaaaaccaaaattgccatcaggctaaaaaaatattggactccatccagaaagtgcccttagatgaaacctactcgtacttataaattacatgggccaataagcacagtatcacac

SEQ ID NO: 47059 - DNA, 326 bp, Oryza sativa
cgctcaagtagatgtgtcaccgcgtctacctcaaaaaggcgacaaacaattcacatgaggccgcagagagggaccacctcgccaaaaaaaagttgcggatttgtatataaaatatgtgttgagactgacacatcttggggcaagaagaaatatgagtaatcctctgatgaattcagaggaagagagagagatctatatcatatatattgtgagagacaaagaagacgctgagaaagatccaccatatgtatggggctggggaattggaatatcttcctacaagtggagagcaactacatgaggagacctcgcattttgcctgcaaa

SEQ ID NO: 47060 - DNA, 463 bp, Oryza sativa
  unsure (1)..(463): unsure at all n locations
gcttctatgattctattaantggctggttggcatggtgcacactgttaaacacatgctcacacaacagcaactaccttgcatgtcttgcccatgtttttnttttctgaacataataactaatttatatcagttttccttatgatgcagtcctaaaaaaccaattgctntaagtgcaactatattgggcttggttatggttggaagagcagcatttgtattccctttgtctttcttatccaatctaagtaaaaaagagacacgcccaaagatctccttcaagcagcaagttagtattggacctttttattcttatgtagttgtatcactatctttccctcctgnaaacagagggagctaagcagctaactgtgatgggtntattctctaggtaatcatatggtgggcaggtctcatgagaggagcagtatcaatagcacttgcctatcacaacggtgatgttga

SEQ ID NO: 47061 - DNA, 302 bp, Oryza sativa
  unsure (1)..(302): unsure at all n locations
ttanggggaaggcgagaaaggccccctttcgggggggcccctaccatcagtgagataccactcttgaagagctcggaatataaccttgtgtcagacccgccggccaagggacagtctcaagtataccagttttatggggcgtaagccttccataaagtaacggaggcgtgcaaaggtttccttgggccagaccgacattggtcctcgagtgcaaaggcagaagggagcttgactgcaatactcacccgtcgagcagagacaaaagtcggtcttactgatccgacggtgccgagtggaagggc

SEQ ID NO: 47062 - DNA, 464 bp, Oryza sativa
tatctcgaatataaacttgctgtgtgttctgaaactcgtttgctatcactgtagaagattatctcggaacagaggcctacatgcatatggtcttagaatcaaataaaatgacagaaataaaagacatgctaacaagaatcagagataaaaaaaatatccgaatcggtacaaaagagtactaccttcaaactaccatcttgatcagcacaacgaactttagatgcttttgaaccatcaataagaaaatgatacatttcagtagcacaaagattggccatcatcatcatgaaaatgcaacctttccacataaagttaaacctcattcttaaacaatgaactgataaggtagcaaaatgagatagcattagcactgctccctgttgtccgtccccaggcttaccaatggtatcaaataagtcatttctctgaagctcattaggttcatagtgcccaagtaagctgat

SEQ ID NO: 47063 - DNA, 385 bp, Oryza sativa
tcccaggggccctaccataaatttgcttggtcatttaagcggtgttcttttctactaaagatgaagtgtagggcacactacaaattaagacaagcccaataagtgcattgattaaattgaggtttaattattaaaaacttgaaaaatggatttacatgatattttaaaacaatttcatatagaaagcttaagcacaaaatgcaccgtttagctttttaaaaagcgtgctaacagaaccgaggtaaaatctatgtcttaatcagaaacaaacggggccttagtgtacaatgcagcagagtatcactgcacaaatttttatatgtttgcacgactaggggaaacaaaataatgggatcaccagtatttcacagtcacaacattcata

SEQ ID NO: 47064 - DNA, 448 bp, Oryza sativa
  unsure (1)..(448): unsure at all n locations
tctccanaccataggcatcttgaggctggacagtagttaaaacagtatgaaatcaacttctggttttactaaaacataacactaaagcctaaaattattttgatggacaaacctcagcaggccaggcatcagattccttcatgctaacgttagtttcaagctgcttgaattcagggtaaatgcatgcacttgaggcatataagaacctgtaggaccattagttgtaacaaatgaattgatatggataaaacaagctcaggctaagctgagatataacagtaaaaatatgtaaaaaaaaaagagagagccggacctcttcacaccattgatacgtgcagcctcgagcatgttgaaactgatcatggtgtatgtgtacatgatcacagagtggttggactgaatgaaccccataccacccatatcagcggcaaggttgaacacatggtcg

SEQ ID NO: 47065 - DNA, 427 bp, Oryza sativa
agctttcaatacaagagcatttttgattattgtttgcctcaccccaataattttagttttaatctcaactgcaatgtgcatttacaactacggggagtggagagaacggaccggggaaataatatgggacgcttgctcccaaagataaaccgagccgtgcccgggcaagctgcaaattgtcttaacttgatggaatataatgccagtggttcctcttgttgctgcaaagtttgcaactgaatgcaacatcatagttaggaaccatgtgcctattctcccgcattggaagctatacaaggaaaaacctgcctctgcgtacgttatctgttcttaagaaactaaaggacatgcattctctggtcctttccacaattatctcaatagaagatccttgtttggtttttaagccctaaattactgattgata

SEQ ID NO: 47066 - DNA, 481 bp, Oryza sativa
  unsure (1)..(481): unsure at all n locations
taactcgatttccagggttcagaaactgaccgctatatgtttaaatagctgtgtagcgatgccgatggcttcatggttgcacgggagcatcttgactaatgccgtatcagtccatctgaatcgcagtacatgaccctgttaatgattaagacaatgaatgaaccggtagcctggtgagttttgcaatggattaaggagcataaatggttaaaaagatgtatcctctttgaactagcagttgctatcgatttaaattctggccgtcagaaagcattcactcgattcagtgatacatttaccatgtctatactcaagacacgatgggcctatntcattaaaacaaatgtnttacaaacaatgcaaagtgaaaaataagttatctgctcatctcttcaactccgaanattgttgtcataaagcactaccgctgatgggatttgcatatgcaattcgactccgatttccgtctaaaaattgatct

SEQ ID NO: 47067 - DNA, 435 bp, Oryza sativa
  unsure (1)..(435): unsure at all n locations
gctgcagcttgtcactgaaatgtgtctgtctagtcttgtgaaaatattttacgaaagaagtttcgcttaatatgactgggatatttccttcgatcacttgtcttgactatattctacctcctcaaatatccttgcaattcagggtgctgatctgaaagaactccctcatggatgcagcgccttcttcgcgaagactactggagaccttgctgatgtcacttgaaccacttacatttcacatccaaatgggtttgagttctatattatcagcaattaagcacatacaatctcctgatgcttccgattnccacattcatcatgagcaaaagaatagttcttggtttaattatgagcatggtggatgtgaaaatcttgaaccccacaaccaagtggtgaggcacacgttctaagcatggtcacatacatctctaattg

SEQ ID NO: 47068 - DNA, 462 bp, Oryza sativa
  unsure (1)..(462): unsure at all n locations
tataacaataaccaatgtctntatattgctatggacaattatgctatagtcgacgcgttagacacttttaggttgtatttatgctctaattttggctaacgtgcttacattctcatttctaatatcctgccgaatctgaatgtatttatcaccacattttctgtactacttgttttgggctattgttgtggaacaatgataacgactgtgtttagttcctgaaattggggagaagtttggggaaagttggtagtttgaaaaaaaagttaggagtttatgtgtgtagaaagttttggatgtgatgtgatggaaagttgggagttggggggaagtttgatgtgaactaaacagggccaacatctacccgtcaatcataatatctctctcttttattatctccatggnttggntcccacattgaaactagctgtaatatgtaaatatccattgcanaagtgcatg

SEQ ID NO: 47069 - DNA, 252 bp, Oryza sativa
  unsure (1)..(252): unsure at all n locations
gtcgccggcaaggaacttctatatatcctgtgtggcggtggatctgctggcgaggtccangcgaagcgcggggaggtataggccaagatggcgcaccccaccgcatctaatacaatggctaagaagaggggtcctgcgatctggtgggtaagcgcggtgaagcttacgcctcttaccatgttgtcgccgtcgccaatgttgtgcatgcgacgcggcctcttgcttcaccctacttcgtgttgcatcgcttgt

SEQ ID NO: 47070 - DNA, 489 bp, Oryza sativa
tgtagaaaaacaaatgggattaagaaatgagaaatatttatttcagagaaaatggtaccaaatagactaattagcagtcctaatgacatattatagagggcatgggaattaggtggtaaatactctaaattctctagatttaggtcatgtttagttcgtgaacaaaaatttttggcatgtcacatcggatatacggacacacatttaaagtattaagcgtagaataacaaaacaaattacaaattccgcctagaaactacgagacgaatttattaaacctaattagtccgtcattagcaaatgtttactgtagcaacacatgcatcacattgtcaaattatagcgcaattaggcttaaaagatttgtttcgtaatttccgttagaactatataattggttttttttccacatttaatacttcatgcatttatccaaatattcgatgcgatgggtgaaaagtttttttaagaactaaacaatgcctgatg

SEQ ID NO: 47071 - DNA, 373 bp, Oryza sativa
atagcaggaatccgactattggcgacatgataactcccatcggctgattccgagatgctgcagccgataatgattctaagctgatgacgtctttgccgattaccaaatttcactggtaacagtaccccgagtgctacgggcgggccaccgccaccaacttactgctctcggctggcggcgggattgacattgatgagatatcatcaccaccactgtgcatcggcagtaataaggccgtgtttaaggccaatttggattgctaccctaccaaaatttgccctaccaaaattttgggtgggttaaaacccaacacctctactaaaactctatctatgtcataaatttggctttgcctataaacttatctcttata

SEQ ID NO: 47072 - DNA, 477 bp, Oryza sativa
  unsure (1)..(477): unsure at all n locations
gggattctcaccgtccatcgtggagcgattcctatggttgttgctagccggatattctttgacccagcgctcgacacgttgtctcgcctcttcgagctcgtgttcaagcgcctcgccctcggggacaatgagctaccgaggccggcatcggcgccatcacgtcgcagctcgcggaccaactgccagcggactccgtacgcctcaactcctgcaccgcggccataggccagtccagcgtgacgctcgacacaggtgatgttagtgtgcgccacccggcccaccaactgtgggccacccaggtcacattgggcctgctccaccatagacccaaccggagccacaaatttaggtcctgagcctacacaacccanaagactagtctgatgggtgaggaccgcccccaccttntaagccgtgctcccncatcatcaattaccgatgtgggactaaacccaacaatctcccccgtcacatatc

SEQ ID NO: 47073 - DNA, 405 bp, Oryza sativa
  unsure (1)..(405): unsure at all n locations
gcagctacagactttattggngatacttttgctctactatgcatgcacaatctaaaagaagccagggctcacaaaatagaacaatggctcagttaatagagctgtcacacaagtctcaactgtcacttacaacccagagggaaaaaactaagacctgctctggctaaacttggcatgttgganaaatggtagcactagcgctagtgctgagctactgatcatttggtttattgccattaaaaaagatggcattgataaattctggaaacccactaaaagtctaaaacagtaaaaatgggccacacttttgaaaaacccaacggacctcttgaaaatcttttggcattgcagagttggattgtgataaccaacaacctagcatgaacctccactttataattgaac

SEQ ID NO: 47074 - DNA, 483 bp, Oryza sativa
  unsure (1)..(483): unsure at all n locations
tgcttgtacatacaatgctggacttcaacttggaaaatgttatccatgtatatatgtgtatgttttatcggaaaagcgaacgcgcgcgtgcgcgttggcggcgagagtttccgatagtttagcttaattaactaagtgattagtagataatgacggtaattaagatatgattttcttttgtccggaagatttttttactaaccgattgaaaacttttgaagcaaattttaaaaactttcaaaactcaatttgaaaatttttaactcgaaatttaaatgtgtaagagtaaatttgaaaactttcaacccagatttgaaaactttcatctcaagatttgaaaactttcaagtacagatttgaaaattttttaagttaagatttgaaaaaatatgaaaactttcgactctgattcanaaactttcgactcagattcgaaaacttttgactcanattcgaaaacttttgactcggattcgaaaactt

SEQ ID NO: 47075 - DNA, 284 bp, Oryza sativa
  unsure (1)..(284): unsure at all n locations
aagggactggagctgcaacttcaaccgcgcaatatttcggctttatcttctcttggggggacgggggacaaccttcacgcctctaatcctgtcaacctattgggagagggaactcacctccgaggacggggggggttgtantgctgagtaaccataggagcacatctgcacatgcgatcactccccttgaatagaggtgaaaacgcgtcgaatctgtatcatatttttgggaaccactgtcaaactaccggtaattaaccatattaacttttcaaacgctatcg

SEQ ID NO: 47076 - DNA, 445 bp, Oryza sativa
  unsure (1)..(445): unsure at all n locations
tggcgcacacnaaagaggacgagggcttagaaagacactattctttttctatctggcgcgccagatgactgagcgtgtggcttctcaccgggagaccgcgcatgcccacccttgccggttcggccggtggcgctaagagaggttcttcgccctctatcgatctggagaatgttcacgagagagcaagtgcactatacacgggcgatgtagacaggttcgggccgctgagaagcgtaataccctactcctgtgttctggtggatctgtgtgtgaaggagttacagagagccggagagccagatagttcaggctccagaacctctctagcctccttttttctttattttttggtgggcaaggtacttcttttatatctcaaggggataccacatgcaccacttctacctacttttcttctgggtggtgacctaccctatcttgacca

SEQ ID NO: 47077 - DNA, 438 bp, Oryza sativa
gctgcaaaagaccctgatgaatggagaaataccatctttacatgtttcatgcctaacacctattacatggacatgtatttcccaagccatcagctaaagatggtgttagtaaaagtaggttctatataccatcccatcccatttaaacaaacaaaggtgttcaggttttatttaattgaatgatccaggacagctaatcctaaagccaaatgcaagctctgcttgattcttgattcttgtgttgaataggttaaaaattcacccagctaagatttctcggcatgccaattaccaattttgggaaaagaacttcatccacagtctctggatttgtttttaatacttcatgaaaaagaaagcgaatagtaaattttccacctcagctgatgctagaactagaacagatgtgcggctggtttatcatgtaagcataaacgt

SEQ ID NO: 47078 - DNA, 443 bp, Oryza sativa
catgaagcttcgcagaaccctcatcgacggggctgtgactctatattctcttcgccaagaccttggacgatatgcagattcctcgctccgagctaaaaccaagcaatgcgccttttcacggagtaattccaggattatccgcaactccactcggccagatcaccctcccggacacttttggcactcgggaaaacttccgcacagagaatatcagctttgaagtcgccgatttcgagacagcgtaccatgccatactcgggcgcccggcgttagccaagtttatggccgtcccgcactacacttacatgatgatgaagatgcctggtccccgaggagtcctatccctaccgagcgacatcaagcaagccgtcacatgcgacaaggagagttgcgacatggcctcaacccgctagatggcgtctgcccgagaggatatcccactg

SEQ ID NO: 47079 - DNA, 493 bp, Oryza sativa
  unsure (1)..(493): unsure at all n locations
aagcttgcagttgtgcttgctggactngtggataggataccattacttttttttctcataagttgtccttgtcggctcggagttcttgtcggaaggacaaggatctgccacactaagaaccttctcgggctcgtatgacgtcgatgttacattctctgctacggcgggaggatccttatacgcgggatcgatcggggttatagccacggcgttctcgtttccgataattgatggaccaaccgagattggctccgtggtgtaaaccgggaagatgaatttcccaacttgagttcacaccagcattgttcaagtagggactccatgaatggtgccggtgctgacgccgttgtcgacgaatcttgatgtcatagtagtagaaccttgagcaccatagctccctacgtggcgcgccactgtcgacgatgggtacccatagacccgatatagagggtatttgtgtacactggtacgatgattgactttgttcgacatg

SEQ ID NO: 47080 - DNA, 381 bp, Oryza sativa
agctgtattaacatataggagcatatatatatatatattattattaaagtctacgctagctaattcgtctacggtctaccagtggcgggatgataccaaaatgagtatgcacttgagtatgtatataaaggagtagtatatatgcacttactgactgtggccgtccaaagcatcatgtcggtcttggtcttattattttctatggggcaagaacggcttccaataatcacggttttgccgatgccctctccccaaagcacaacatttggtctggaaaatttaccgtttcctcagaaacccctgctttacaaagatgccgaacctgtctctctgaggcgctgcgcccaaagcttgtgtgatcgtcatgaaattggtcgtgcc

SEQ ID NO: 47081 - DNA, 364 bp, Oryza sativa
ttcagctgggtgctgatgttgtttttataatagtagaacgacaaatcaagaacctctagctcatgaaaaccggtcaaattgccaagatgactggatagcctattgtagctgagagcgagcacttgctattctgccttcatggggcaaggagagaattggcttggcaagtcagtgaaggagtttctagatagattaagggagtgtaatgtatcaagaacgcatatatatgcaaggatggtggcattggagaggccataaccggggagggagagcctggtacaaattaataggatgcatcagaagtgcagtgaaccccctccatttcacggttttagctggtgtccagctcttggtggagatgaat

SEQ ID NO: 47082 - DNA, 454 bp, Oryza sativa
  unsure (1)..(454): unsure at all n locations
tcccagcacctgagctgcagctgaaacatcattagattattttttcttttttattgaaaactttcaattccagttgaaaacttttacctcggattaaaaaaattttcaaatcaaaatttgaaaactttcaactcggatttaaaaactttcaactcggatttgaaaactttcaactgaagatttaaaattttcaactcaaatttaaaaactttcatcttaaaattcgaaactttcaacttaaatttgaaaatgttcatgttaataatagagctaattacctgaaaaaataaaaaaaattatgagatcatagcgctacgtactcatgttaatcacgttagatatggcgttaatcacacactaatcgtatgagttggcacctgcacatgctntaacagtgggcctgcgaacgtccgaaacgcgcgcgagttgacccgtctgcgcgtatgggcgcaac

SEQ ID NO: 47083 - DNA, 298 bp, Oryza sativa
  unsure (1)..(298): unsure at all n locations
tcagtatgaccagttcactacaatcggcataaaactctactatttacatcggaaggccatgctccaacgtgtgccccatgacataaagcaaaacaggctgatattgagcaaatcttcactattgcacccatcgttttcagttgatagatcgatgtgggggtacctgaattctgttagctgttgcctgttcggttgccaatgagatgataaaaatcctttnttagttctcaacctcatcacgtaaactcctagtcctacaaacataacgcacacgagctataaacgaaattaagggggt

SEQ ID NO: 47084 - DNA, 400 bp, Oryza sativa
  unsure (1)..(400): unsure at all n locations
ngtgtaaaccggagagtntcatagcaactgagtactgttgtacttgataatgaaataaatatgcatgggcatgggttntgaatcgctagagttctcgtcatgttacactaacacgatctttggaaggcgaaggcatttgttatggaaaaagtacgaattacaactcccgatttattgcggtcgaccgaattacccataaacccaaaaactagtcatcgttcactctcaactttcaataccctctcgacccaatctataacagtttggccaacatggacgacgcgtggcaatagagtcagcattttatctaatagaaaatatggaacccacctatcatactcttcttcccctcttctctctttctctatctctctctcgtgcagcacgcatggcgaggatg

SEQ ID NO: 47085 - DNA, 359 bp, Oryza sativa
tgaactagatttggaaaaagaactttttatcttttttcacacgacgcagaaaacacagcagtttaagaaatattcaagcgcaccgtcaccaaccggtccggcggccgacaaatttagccctagccgggggcgcaaccggcggtcggcaccaagaccggacggaccggccggcgctggagacaagagtgcgaactcctgcggccgaccctgacacctcctcctctacaacccagcaggtcgaccatcacaacgccccccgggggggcgctgtaaggggccggagaaacccctgcgacgccctgaccctatggtgcagaccaacagctcgatgcttggcggatcctggaagaaagcaaggt

SEQ ID NO: 47086 - DNA, 369 bp, Oryza sativa
  unsure (1)..(369): unsure at all n locations
gactggcattgccatcttagatggnctgcacatctttattttcatcttagccacctccacagtcttccttttcagcattacatgtatgtaactcctcgattgtgaagcatcgacatcatctttgtacccatgtagatgaggtggtatagtatcccgagcatccttcgtccatcttttcagtatatacctctctggaattcttgacaaaccatactgaacaagtacctaaagggacanaccaatgcattacttcaaatagccaaacactaccgaacatatagtacgacccaatgaanataaatggttagacagtagaagaaacaaatacccttaagatgtggctgcacagaattcccttatgcttaaaca

SEQ ID NO: 47087 - DNA, 243 bp, Oryza sativa
ctccggagggcgattgccctttacttggcctggaaaaagtagtgagagacacaacttctttcatcgacgacaatattttgctggggctgagagtgagcactgaccccctgtggtgatgcactccctggatttggagctggtgcaacgcgggccttacggctggtctgggatgcatggatgactattctctgaggagccagcttttgatttgaaggagctgcgtggaccgacgtgctggcagct

SEQ ID NO: 47088 - DNA, 471 bp, Oryza sativa
  unsure (1)..(471): unsure at all n locations
gatcttcgacccttatgcggtgggcgggcggttgtggtttatgacgaggagatgggtgtcggcggtgagaagatccagctggggacggtgggggcgctgagcctctccgtggtgtcatccgtctccattgtcatctgcaacaaggcgctcatgagctccctcggcttcaactttggtgggtgttgggagatctgggctcttttttttcctttgcttccccccaagcttcttgattggtcgcttgtgattcgcgtagatctgtgatgctctgcgaatatcgtangggttgttttcagcgaggattgcttattgatttatgtgcttagatcaattgttagatatttatttgtagtgtttgattcttgtgaatctggccgtggtatttaatttagagatggcgagagcatcattgtagagatagcggtaggataaaatgtatctcgaactcatgcatttctggtgaagcttatg

SEQ ID NO: 47089 - DNA, 404 bp, Oryza sativa
  unsure (1)..(404): unsure at all n locations
agctngcattaaacacctatatttccgtgttttgtttagtacgaaagtactcacccttgctctatataaatatatttagctcctctgccttgaaatgaagatgaagcgaagtgaatattatggtttcgttctggttcccaaccgtcgcctgtgggggtgggtgttaattcgttgtgtccgctgccgctgttgctggtggagtttccttncccgcgtcgtctgttgcattctctggccggtctaagctgcaacctaagttaagggaaataagtcctctattattttaaggattgcaatgattcatatttgttaccatgggtaccagcactatgtcctgggactggtactgagatcacggttatctatgaagcggttcactgtcgttttactacgacccgctcctg

SEQ ID NO: 47090 - DNA, 433 bp, Oryza sativa
  unsure (1)..(433): unsure at all n locations
ctcagcaagaaattatatgtatcttggttttcaaggatcaaaaggggatacatctttattcttttataacaaaggaggactaatcatatttgttcttatctatgttgatgatataatagtcactagctccagacaggaggcagtgtcagctcttctgcaggatttgaaaaaggagtttgccctgaaagatttgggagatcttcattacttcctgtgtatagaagtaaacaaggtaacagatgaaataattcttacacaggataaatatgcttgtgatctcctgagaagggtaaatatgtttgattgtaaaccagtaagtacaccgttgtctactagtgagaaattatctgctcatgagggtgacttactagggcctctggatgcaacanattatagaagtgtagttggtgctcttcagtatctaaccctgact

SEQ ID NO: 47091 - DNA, 252 bp, Oryza sativa
cgtcacagattcttacacatatgaggagtttttgcgctcccgggaagggaagactcacacacatgcattaaggtataattatgttgaaattatcacatggtatccttcccatggcgatccactgaaagcccctgcctacacattaagaaaccactatgcacggataccgtctccgcttagctatttactccgctaggtctattcccatacaagaagtgctgttgtccggcgtctttttatgcttaaattcat

SEQ ID NO: 47092 - DNA, 468 bp, Oryza sativa
  unsure (1)..(468): unsure at all n locations
tggctgtcatttggtttgaagccaacgaatatggtgatgtttacatttttaaaatctaagaaaatctaacaccatgtttgagcaatccatgggaggccaaatgctcaccccagctcccaaacttcaattatccacaaataggtacagccatgagacaatgtaccttacgggcgttggatctggctgtgcccagatcttgccattaccaaaagattggttttggttggctggagacattacaaacctctccacagttaacaaaatttggtaaagttcacatgtacaacttcagcaaggaccatgataccgtagcccattgatgctacagtaggaccattataaactagtacaaggctaacacaagcaataaaagataaaaacaagaatcttntgagaatgtcaacagacagcatcacatgtcatttcaaaagctgcatgtggaacatgtagaaagtaataatacttatg

SEQ ID NO: 47093 - DNA, 426 bp, Oryza sativa
  unsure (1)..(426): unsure at all n locations
cagcttatagaaagacatatcccnctattttgttcttactccacaattgggacaaggtggctccactgctgtaacccaattcttttgaatggcaagaagttgtgggtcgtcaatgttggcgatttcccagctgttcttttgaaaggagggaggcccaatacatatgtcgacttgacatgacccgaatgtcgagcgctaagctattgaaaatagggggggctttgttcaaacatgccaggtgtgtcattaaatctgcaaaatttctatacaagaaatcttgattgaaatgcttattgcaccatgctatttgttgaaatttaattgactcactctgctgtaaagtatacacaccccttatacataatttccgcgataagaaatgtgcctaaagaaccgaatgttcctcacattgttcctcctctgtat

SEQ ID NO: 47094 - DNA, 478 bp, Oryza sativa
  unsure (1)..(478): unsure at all n locations
ctgctactgggttcgccttcttccttaggacgagatgaccaggtatgagctccgtgggtcgaactattttgttgtaagttgccgaagtgcttgtggcgtacttgtgcatgtgctcgagcgcttcgactcttactccttccaaaagttcgagcgatacttcgcgtccttcttcgcccccggaaaacatcacccttggtgagttagcccctagctctgctggggtcattgcctcatcgccataaagaagcataaacgggccaaacttggttggtcttgtgggggtcgtccgaagagcccagagaaccgatagcaattcctctggccatttgcctttcgccacccnctcaagtcttttcttcagtgcttctataatcttgccatttgtacgttcggccgccccattagactgcgggtgtgcgactgacgcgaacttgatttccaggttaagcccttcgcacatttctctgaacttatcaga

SEQ ID NO: 47095 - DNA, 179 bp, Oryza sativa
tcgtgtatactccatgcacacaagttatgacctgtccactgtgtattatctcccctgcagctagatcacacgacagcggtaacgtggtggttgacaaaccaggccatataaagtactagtagtccatgaatacgtacggtctctactactacctccgtcccaaaataagtgcagaatta

SEQ ID NO: 47096 - DNA, 358 bp, Oryza sativa
tgagcatgcaagctggacttgcttaatgggataaagtcatgttttttttatcttaagctgcaaatcacacacacaaaataagtggcatgcgacatgcccatatgcatatgatccttacagcttaaaacattacagcgaagtgatgctagctgacgcttacactaacctaccctaatatagtagcattaataataactactacctgaggctttgggtgtacatcaaaaaagcatttgcagcacaacatgcttgcatgctttcaaaagaaattactacttactttatactcactactattataatagttgctagggcaccacataatgcaatactcgcgcgcgcgcgctttttttatgtc

SEQ ID NO: 47097 - DNA, 468 bp, Oryza sativa
  unsure (1)..(468): unsure at all n locations
tattctattacattatgcagccgcgacaagcactacgaatggttgccaagtgccaacttttactttgttgcttgaaagcatgcatgtagatgacctccatctctatgaaacttttgcggcaacatatcctatgcacaccggtcctcacgtgtacacacgtgcacaccaactaaaaaatgtcaccaaaaaatctagaaaaaatcatacacatactttcaattgtattacacctagggttaaaatcttaacgtcaaattcattatattntagccgtaacaaaaaaaacaaaaaatttgacagttttaaggttacaattttgtcagaattntatcttttttgttattctctatgtagaatgaatttgaatatgcgactntgcacgtagatgtaatactattgaaagtacatgtattaattntcctagaatttttgtgataattttagttggtgacacggtgtgacacgtga

SEQ ID NO: 47098 - DNA, 378 bp, Oryza sativa
  unsure (1)..(378): unsure at all n locations
cttgtcgtcgaaacacattgcaatcattagtagagtgagaatgagaatcatgccacttacaatatgctcgacgtttcaactcttcttgagaaggtatgacatggcctttaagtaatctaattnggttcttttgcaaaagataatcaaaaatcttatcacacttggccacatcaaaactatatttaacctcactttgccgatctttgcgaggagtcgacattaggttggaacaaacaaaaagtttatttttgntagtccatgaccattcagcaacataaatatcatgatcaccctcctcctcactatcactagcctcagggtaatcaattacattgtacattatggcttttgtcaaatggtctagcaaattttttatta

SEQ ID NO: 47099 - DNA, 470 bp, Oryza sativa
tccattggtgttcgagagatgattctactcgctcgctggttctctaaccagtgcgtagcaatctcccccaccgcaagcttccattgatgttcgagagatgattctactcactcgctggtcctcgaaccagtacgcagcaatctctcgcaccgcaacctcaaatggaggaggtacgactacagcaataacacagcggtcctcgcaccacgacttcaaatgatcgagataaacttactcactggttctcaaccagtcaatcgtagcaatctctcgtacatttacttctagtggttgagttacgactactacctggctcttgaccagaggtgtagcgattctcccattacctctacttcaacaaagttgatatcacgtacacgatatcgccaagtgttttacccagagatcccttaccacaaaagacacctagcgttgaaacctatcctaatgttcctttacgccgtcttgac

SEQ ID NO: 47100 - DNA, 372 bp, Oryza sativa
agcttgtcgggtggaggatactaaatgcatcttttcatgcatccaaaaaatgttgtcggtcaagcactgaagaagcatatgcccaaacattttgcaaaggacaagtgactgttgagctcatgataaaattatcccactatttcactgacacccaaaataatctcaagatgattagttatatagggtactggtaggccatggcgagtattcagacattcaggcattgcttcagatagattttacagggcaataggaagaaccattgcttttaaacaaaaactgaaagcatactatatctagtttttggcggcatcttgcacacaggtgggcagatggggagcaacactcgtaattaatctaactctcttgggt

SEQ ID NO: 47101 - DNA, 460 bp, Oryza sativa
  unsure (1)..(460): unsure at all n locations
tataaacaaggacgtctgccgcgcttgcttgaccgactttttaaaaagggaggaagacttgcaaaaaagggaggaagtcagggcctgactgtttcctgtccctccctgctccctccgtctaaaaaaagacaaaccctagtttccgtatccaacgtttgacagtctgtcttatttgaaaaaattataaaaaaaaattaaaaagataagtcacgcataaaatattaattatgttttatcatctaacaacaatgaaaatactaattataaaaatttttcatataagacggataatcaaaacgttggcacggaaacccacggtttgcctttttttgggatggagggagtactacgtaaatacgacatttatgataaaatttggttaaaattntaaatctatgactattatctttctaaagaacaatcttataaaatactacctccatcccanattagatgtcat

SEQ ID NO: 47102 - DNA, 113 bp, Oryza sativa
aaaaaaatgtggggcgaagccgggaaattttaaccttttttttcccaccggcaaacaaaggggcgttttagatagccttatggcccttattatccccccctaggtgtaaaacc

SEQ ID NO: 47103 - DNA, 380 bp, Oryza sativa
  unsure (1)..(380): unsure at all n locations
atgcaagcttgtccgtgtacgtacgcagcaaagactatttgttatgcatatgtccacacagatcggggatcgttgcacggaatttaatgggagccacgtgtacaaagattcattccatagtctgatagtcgtcgttaaaatatgcctacatgtggaagatgcattgcgtgtacgtgccacagcacataattaattactagtactttcggaactttgcatgatctcaaatcagctactccgcggattagtacgtgcattaattaagtagatggtcgaatgattctctaattttgtggactgattntgcgaattaatgccgcagctcaactcctgggctttgacaacttcatcccgccgtacgccgccaccagcggtgatca

SEQ ID NO: 47104 - DNA, 491 bp, Oryza sativa
tcactcgtatgtgtggcttctgataagtctgtaatatttttcatcacaattattatagttgtcttctaggtgatcgatctcctaaatacttgcaccactattattgtagttgtcttttatgtgatcgatctcctaagtacctttctgtctgtaatagtttagcaacaccattattatagtactagttatcgtctaggtgatcgatctctcctaagtgcttgcactattgttactgaagttgtcttctagcactattggtactgcagttgttttttcgctgatcgaacttctaagtgcggtattattgttaagagtaaattgcaacttgtgccaccttttcttaccactagtaatcatgcacgtgcaatgcacgttttccatgtcacatctaacatcaaccttacattttatggtctccatacgtatacaggatattcattttcatttagtggtgaattaaagttatccagcttcatttatttccattctag

SEQ ID NO: 47105 - DNA, 413 bp, Oryza sativa
  unsure (1)..(413): unsure at all n locations
tgcaagcttggaaccctgtgcccatatcatctttttctcggaaacccaacgttggccgccaccgtgctccttaagtgcacctttgatggtcgtcaatgcgctgctttccgtcagcgacgatgattcccatggcacccacagaggggagggggataaagaggatatagatgggggagctaacacgtgggtccaaggaaattattaatttaatgagtgcagtatccgctggcaaattattacgtttatagaatatatttcctcaaaaatcacttcatgtggtgttctataaacacgaattcacgattttccgttggaaaatttgtcataatttatgatccataccgnggatcagcttatgcccatcaaacaagctcctacatccagagcccgttcacgccagctcacctcgccac

SEQ ID NO: 47106 - DNA, 476 bp, Oryza sativa
  unsure (1)..(476): unsure at all n locations
tacttgtcttatagttaggcgctatatctgtctttggttatatcgcttgatgatatgtctggttcaataatacagcttatccgagtgagttttatggacctactgggccagaagcttctcaagctcaagcatttacttttctagttagagatcagcgtcttggagctaatgtgggatctgcccaaggacccacaggtttaggtaaatatctaatgcgttccccaacgggagaggttatttttggaggggaaactatgcgtatttgggaccttcgtgctccatggttagaacctctaaggggccccaacggtttggacttgagtaggttgaaaaaagacatacaaccttggcaagaacgacattcagcagaatatatgacccatgctcctttaggctctatanattctgtgggtggcgtaggtaccgagatcaatccagtatatatgtttctctagaagtggttagcgattcccatt

SEQ ID NO: 47107 - DNA, 241 bp, Oryza sativa
actatgaatctcaagctctcgtatcaaaacacaggcatgcatgcgtaatatgtgttgttataatcacgccgaacgcaacaaagccgggtcggtatagccggtgagaatctgatgtaacttctttctgaagataattgatgatatatttattgctgaattccagtacggtttgcaaagttacccctggtttaagaaaatgaaactcttatgacgttcattttttatatagaattagtaaaat

SEQ ID NO: 47108 - DNA, 442 bp, Oryza sativa
  unsure (1)..(442): unsure at all n locations
tgatctgtccgcnggcagtctgttcttccatttatctctctttggtatggttgcgggtgagttaagttcatcctgaggccgacgaggttggaaaaaaaaatttaaccatgtcttttcttcactgtacataattggttacccagaaggccagaacacggatgcatagtccatattgacatcagaccttccagtcttctaagacctggattagttcctaactttttcttcaaacctccaacttttccatcacatcaaaactttcttacacacacaaacttctaacctggtttagttcctaactttttcttcaaacctctaactnttccatcacatcaaaactttcctacacacacaaactttcaacttttctatcacattgttccaatttcaaccaaacttccaattatgacttgaactaaacgcaccctaagataactaatgg

SEQ ID NO: 47109 - DNA, 270 bp, Oryza sativa
agagacagagtaactatttgcctgcgacaatggaaactggcattaaacacgcagcaaaaaaaacaatcaagggctcatattcaaaaaatatcggagaaaaatactggtacttcaccaccaatactgaatattgaactcgtcatgtggttaactgaccggctgtacaccacatcgaaaaattggaaacaactctgataatcatcatccatttaaaactgattctacacttacaaagctcatgaaaacgcagcgcactatgggtgctacctc

SEQ ID NO: 47110 - DNA, 489 bp, Oryza sativa
  unsure (1)..(489): unsure at all n locations
tctanaccgccacgtgacgctctaataatttctgagataaaatttatctaaccgtctatttntaagttaaaacagttgacccggtaatactaaccattacattaaatccaccgatccgatcacccttttctcttggagctacaggtacgtataaaacgtacgaaccaccacatctgctcctcccactcagtattctctttctttgttattttttattaaggttatgcaccataatttgttactataaaaattattagatctatttttacgtggaactttaatttacatatgaatgatcttggtgacataaataaataattacttttttaagccaatctacacattcaatttatgacacgcttaagcgaagccatccatgacaaatcatttatgatagctctcatactaacgaacggatcaaaacttagaatggttgagatatgtctgtagggataatccatcaaagaagtaagatcatctatgacaagt

SEQ ID NO: 47111 - DNA, 190 bp, Oryza sativa
atggccttacgagattctttcttttcatcaaaacccccgggaaaccttcaatggggcttaacataaaactcgcctgacggtgcccaaaaagaaccggggggtcatgccaaccagcccaaaagaagttccgaacgtcccaaaacccggagatgcacctcccaaaacaccaccgacaccatccctatagcag

SEQ ID NO: 47112 - DNA, 437 bp, Oryza sativa
  unsure (1)..(437): unsure at all n locations
gcttcctgatcaacacggccatgatcttttacttccctttctncgctcttcttcctganctccttctgtcttttctactcgctgtcactaagaaaaagctaagaaacntactgaactntacaatgttcttctcacaattctgatatgttcatcactgaattggagcaagcctatatatagatattatagtggcaggcggcggttgcttgctcggtacggtggccacttgaatcggcgttagtaattggaattaatttaagggattgacgccgtcagtgggaaattcagactgataatgaagaactaggtaccaagtctaagctctctgaatttcaactcatcagatgcaatgtctcatgttangctgctggtacgtactggggaaatctgaaattcgcgctaccgcgttttcctctgtcacgcgtaacagaaaccta

SEQ ID NO: 47113 - DNA, 420 bp, Oryza sativa
gcagcagctcagtagctgtcttaaggtgatgtttaatttttctccagaaatccaattccatctttgcaggtactactaatcttgtaaccgagtatattgcaatacacaattggctacgactgacgattatgttgttgcatggtccatcacattcagatttcaatagttcagatgccatttgcattcagactgggctattggcgtataataacaagctgtgcaagttcataaatccatattcgcaagtaaggaggcaaacataggctgctttctatactttactttcccgacttctaatactcggtttctccacatatgcttctcaaattacttagcgatgtattttcttaaacatttttaactaaagtgcttttaaaatcatattaatcaattctcaaatttttaaatagatttaattaa

SEQ ID NO: 47114 - DNA, 470 bp, Oryza sativa
  unsure (1)..(470): unsure at all n locations
ngtataatttactctncatagaattgattcagggattaatttattatatttttcgtcacttttgttttccgggtttttttttacgtctaagaagataactaaatgtacctaaaatatttttaattaaaattttgaatggaaaatccacttttattgtagtttacatgctcaaatcaagaacagaagggcttgattgtatgtaaggatggactcgaaataggtgaagaaacaagataactttaagaactattgaagggcgcaggcaaatcaagtttaacagtctaaatctatcaatggcatggagtaacccaatcatatacaattgatgagacttttggttttcgatcagcatgagtttggacagtgcttacttttcatcctttacagttttttgaactttntgtggatgcaacggacacagtgtttgtgcgtacaaattacagtaatcgcaccgaanaattgttcgatgt

SEQ ID NO: 47115 - DNA, 468 bp, Oryza sativa
  unsure (1)..(468): unsure at all n locations
tctagctgttatacgtgtggttatataatgcaagaactatttatgangttttatgtggcctaacaaagaattcaggacatgcttgattgtcaaagatatacatctctttcttcatttgtacaacttgcttgcaatgcttgaaagtaaatagaggaggatatgaaaaagaaacacgctatgtctttacctccaattactaactatttgcaggaagtgcgtaatcacgaanaggaggagagagacatgaaagagccaccaattccattgttcacactcaagttcgagacacctncatcatctaaagaggacatccaaggtaaagtaaatggtacttaaattaatcaaggtgagtgcattgttaacgaagtaaatttgtccacttttcatgcaaaagtagagcaaccgttagtggaaccaaatgctggaattcctttgtcacaangttgatttactcgctgtccttgtgat

SEQ ID NO: 47116 - DNA, 404 bp, Oryza sativa
  unsure (1)..(404): unsure at all n locations
ttatgattttatacgatttataatgcaacatcttaacaagcacataagttgaagaataaacactcaaaacatatacctattgcatttatcactctttctcaaataacctttagcacaaaataacaaagaaaattttaactttttcttgagcctttttggtcatattnttctcttttattccgggtacatccctgtcgtcaagactgtttccagggattcggcacccattatttttctcacatcgaatgcgtccttgtcgtcaagactgttttcaaggattcggnattcattttttcatattttttattctctctctcacaatgagcaattaaaactatttgaggaataacaaatcaataaagcatatatatatagagagagcatttataaatcaaaccatatgc

SEQ ID NO: 47117 - DNA, 490 bp, Oryza sativa
  unsure (1)..(490): unsure at all n locations
ncctttaattggatgggttaataaagaactggtgtacaatgtttatgaatatcccccattatattaaagccctttttgtttaggtttataacccaacttataagccgaanagtctaagcctaaacaaataagcggctntttcgtttggcttttctaaaactataagccactctaacactattaagccaaaagctaagtttgagaagctnttttttggcttatgtgaggtagatgcataactccaccattaaacttaggacattaaatctaccggcttataaatcatataagccaataagctgacttaaaagtctaagccaataaacctatgcctaatcaaagagggcctaagtaggtgcagggctactctcgttgagatagcatagaccattaagggtagaagaggaagttttgtgcaaaaattcatctctttagggtggtggatttgtgacaaatttaaatatattttgaacatagggaatacttatat

SEQ ID NO: 47118 - DNA, 447 bp, Oryza sativa
agctctccgcaaatattttgaggccaactatatttcatttgttagttgtggactagaactcttctacgagcacggcttttggagctttactatctgagagccacccatctgtaaagcttttaagaaaatataggtaactccattctggcctaccttcattcaaggccggttccgctgatttaacggccctaaggcgttttatactcgacgctatgctactatattttctttacttgaaaacatactttataaaccattcatcctctaaagtgacacaaataaacattactaacatggcaaatcaagtactaactagtaagacctcacttgcaatatgtttttattctcgataaataatgttgatattacaatcagaaaacttgaattaagaaccacaaagaataaaacgaacacgcctactagtggaaaaaatgaactattcattat

SEQ ID NO: 47119 - DNA, 487 bp, Oryza sativa
  unsure (1)..(487): unsure at all n locations
tcctattacaagtggtcagtgatctcattgaagtatggttattacagttcagttactttctgagattgtaactgtcctttttgcattggtttagatgtccctgaaggttgtgtcatcatcagagagcacattcccatcacgaatctcttcacatgcctttggttcaatgaagttgaccgtttcacctccagggatcaaattagtttcagcaccgtccgggacaaaataagggctagagttggctggatgcctgaaatgttcctggactgcgaaagacgcaacttcgttattcaggtttctcatcctactacataatttttgttttcacatactttctaggacacaagcacacactacctaacctgcagaactaaactaccagtgccctgtatttcctgtgtcctattggcagcacatgttgaacctcataagcttactagtgtatctggttttgctgtntgacatcacaccagtgataccacaggga

SEQ ID NO: 47120 - DNA, 348 bp, Oryza sativa
tcatctggtgtttaagcaaaacagagcaggcactggcagatgcttactgaaatgcatgaagcgtgtgatcggccttcacccccgcactatgacttatgccgacatttctcatgagccgcagaagctcgtcctttatcaactactacacgttggcagcatactgcattcagatgaggggaggtgacattagcacatcttccggccaatgagccaagccgatctcatgaggagcaaactgcacattgcaagatagtcaaagctccgctgcattgctgatcaacgatagcattcatcgtgccggttacatgtatgctgtccttgctcaggacagtgctacagacatatact

SEQ ID NO: 47121 - DNA, 490 bp, Oryza sativa
ctattacggacctataaaactcagctttatataggccttcttcttcctgggtctacggcgaccattacgaaaagcacaccaattccgtctcctcctcctccaccaccttctctctactcctcctaccttctcgccgtagcgtagctagctagagcctagagcggaggagcatatcctccgagatcaccggagaagaggcagcagcagcagggcgccgcgccggcgatgaggtggacggcgttcatgtgggagggcgcgtcgagggcgttcaaccaccgccccaccttcaccaacctcgtcctcgtcctcggcgccgccaggtacgtacttccccccattccgaccaacgagttcgccggccgctctctccgttgcctccacctccgctgcctcctcctccatcaacctgaaccttcgcctctcgcgtgtattcagatgggatttcgtagtttctacggagatcgacgagttcctttcctaaatcatccat

SEQ ID NO: 47122 - DNA, 336 bp, Oryza sativa
tttaagaacttcgtcgtgatattttcaaaaaggagtatattaaatttgagatgaaacctggagaagctttggattactatctttctaggtgtaataaaattttgagagatcttaaatctgttgattcttcttatgatactaattatccacaatctgatatttctcgtcactttttgaatggtcttgacatgtctatttgggagatgaaaggtacatctattcaggagtctgttaatatgtctactttgactttggattcactttacacaaaaatggaaacacatgagatgaatgttctttctcgcgaagtgattctagtcgacgctttggttcttc

SEQ ID NO: 47123 - DNA, 490 bp, Oryza sativa
  unsure (1)..(490): unsure at all n locations
taacatgcaaagataccacatcatcatccactaacaatatgtcacatcatcatccactaattaacaagataccacatcatcatccactaacaatcatcacatttaaacatcatgcaatcatgctatatctttatagtttttataatttaagagcttttcaaatacaaacatgtgaaattatcatccaacataattcatataatgtttcaatgtatatctttattatgttttatgatatcctatatacttatatagttcatcctcacttagttagtgcttaaatgattaatctatggtccaaattatctttctctttttttcctctaattaagttatatcatatcaattgtttttagcctttagatgattaatctacggtccaaactatctccctacttttcttcttccataaagtcataccatcttactttttacgtttgaatcaccattntacatactatnntaaattaaattatcatagaccacatta

SEQ ID NO: 47124 - DNA, 348 bp, Oryza sativa
atatgggccgaaaatggggcacaacatctgtgactctaaccaaactctaacggcccaaactttactgggccaacgggacacatttactctgtattaggcctgtgctattggggtccctgaagtgggcctcgatcaattaacatgggccgcatttattcgacgaagcgccacggcgatgcgagacaaattagccacgtagacgccacctgagctaaaaccgggtcaaatactggcgagcgaccttacttgttttgcgttcaagggacgaaaatcagactagacgacaaatagaaggacccaaagtgaacttattccgactcggattggccaaacgctattcctcttgta

SEQ ID NO: 47125 - DNA, 331 bp, Oryza sativa
tgctggagtacacgacaagattccacgccctgcgaatggcagctctcagtgagttgcagaacagtgttaagagctgataccctattcattttccaaacaaggtgagaactatgatccatgtggatgtgcttctatcacgagcagctgacagtattgcatgcagtgatcttgctaatgaagttggagatgggaaacatcgtgtgatggccagccttgatgtaagaatgcaaatcagtcttactccgtaccatatctgtgtggagtgtgcacaccggaagcatagtcatattttgaatggtcgattgcttcttccacagtaaagtctataata

SEQ ID NO: 47126 - DNA, 481 bp, Oryza sativa
tatctgcaacacatgcaccaatctctacatttctatgctttctgcatgcatttagaagagcaccccagccagtcttatcagcttccatcggcataccccttgcaacttcaaatgcctcttccagaagcccaactttacccaaaagatcaatcatgcatgcataatgttctaccctgcgttcaatcctataaaacattgccatttctttaaaatatcgtcgtccttccgaaactaacccactgtgactgcatgaagcaagcaatcccaggagagtgatctgatcaggcacaatattctctcctttcaactgctcatagagacgaatagcttcttcagactgaccatgcacggcatgggccatgatcatagtgttccaactcactacgttcctctctgccatctcatcaaataattttgatgcttcacctacatcctcacattctgcaaacatatcaatgagcgcattacctacattaacagt

SEQ ID NO: 47127 - DNA, 442 bp, Oryza sativa
  unsure (1)..(442): unsure at all n locations
tgaggcatgcaagcttgtggcgnanagaactcccttctcgtttcttcctgaccttctatcttaaaaatttctctcacgaactctgtattttagattcgtagccatcaaacgagtagggctccgccctctctcattttctctccacataacgaagattatgaaagtcttttaatcgcttgcttaattagatgcctttgacactctatgagacaatagctttttaggaacggagggagtagggtgctatagaaaattgggtgctctagttttcacgtagtggccccttcacttttgaataatgacatgatacccatttcgtccttcctaaccttcgctaagatgtttggtctcaaaatcaataactcattgttcccatatggcataaacgaaggaaaacagatgagaatcacttttttatttgaatgataagaaagtagttgat

SEQ ID NO: 47128 - DNA, 493 bp, Oryza sativa
  unsure (1)..(493): unsure at all n locations
tatgcgatctcattactacattggtttcctctcttattgtgcttatcatacagttcccaacttacctcgtgtttccgattntctccctgatcagatgcaccagtcatgcagcccgttacagagctcacattntccactagagacctcaggtgcgccgctgccctacattaaccagcctcagcaagggaaccctctcggttgtggcctgacgaacggcatggacaaccagggttctatgcacccattggacccggcattttgccggccaatgggctcgcaccatcctttcctcaatggggttagcgatgcggcttctcaggtaaaaatgcacaccaatgtctcgatctcacaaaatgttcgaatgaatcgatgctgaatatgaggaatgaatgctttacaggttggtgctttctggcaagatgatctccaaagtgttggtcagatggatatggtgcanagtcaggagatcgccacctcttccaatagctacaat

SEQ ID NO: 47129 - DNA, 296 bp, Oryza sativa
tttttctttcttatgtcaacacccttgtcaagaataggcttcaacccctgctgaaagatttgtttggatcttatagaacttatggaattcttatgaatgtgggttgaaatgtgctgattgtaacatctaacaaatagcacagcaatttcactacctttatatcagctcctttcgcaagactctgaagctcttcaacaaatgctggagaagcttctgtagctcgattcaaggatagcgcatcttcagagtaatttttttatcagcttggttaccaatggatacttcaccattttctg

SEQ ID NO: 47130 - DNA, 472 bp, Oryza sativa
tgctctacgacctccttgaaaccgggtaactataggcttacgtgggcaggatgggtcggtgagcaacaacgggcagtgatcggagggtcctgttgaaagagcgtgtatgatgtggcggtcaaaagataggtcccattcctcattgcaaaaaaacctatcaagtcttacaagggttggacgtcgtctctcattgctccttgtgaatttcctgttttggaggtggatctcctttagctcgcatcggttgagtgcagctctgaagcgactcattcggcctaaatttaggttgttgttgtttttatctcgtgcccgataaatcaagttgaaatctcctaggataagccatttgtttcccggcggcggttataaactccttatgtgacggaggaaggagtctatttctctgtgacgcgttgggccgtataccgtggtgagcatgaagcttgttccgcagcgtatgacagttatattc

SEQ ID NO: 47131 - DNA, 376 bp, Oryza sativa
  unsure (1)..(376): unsure at all n locations
caccattgcctttgggataagtccacacctgaagctggaatattcgacagattgatcgaaccttgttaggccatttgtgaatgggggaagctctttgtccaccattactgacctgatntttctgcaactgactgaaattgatgagcactgggaccgaaaaactcaattatggagcacttggattatcattggccaccctgctggactcactgactgataaaacagctctggtttaaagagttgtttcctttgaggaccttctttggattatgggacctctttggtcatgcttgcaagctgattattagcgatcaccatgggcatcttgctttaccggcgatagggggatgcatgcgcctcagatgccttactcaac

SEQ ID NO: 47132 - DNA, 324 bp, Oryza sativa
atcaggcgctcatacctatcgctcgccatgaccgtctttttctcctttcgacaccataacctaggatggccttcttgagctcagggcaatcgagctgctcggacaacgccagcgactatcttcgtcgtgcctactatatgtgctgacatactgtttcctcaccttcttagcctctcatgtcgtacctgtccccgacaccagcggtgctggccattcacccgcgctgcgccgtcagctcggcagcttgtttgtgatataagcgctcataactgtaaactgaggcgtcatgtcttacgcgatggactctcgcgtgctcctcatggg

SEQ ID NO: 47133 - DNA, 475 bp, Oryza sativa
  unsure (1)..(475): unsure at all n locations
taggacaatgcgagcgaatatgatcaagtgctccatactcatttcaacgattcggttctcctcttttcctgttcctaacattattcatagctcgagaaaatttgttagatagcaaaaccaagtcctcctcctcgaactgttcaagttgatcatcggacatggcattaaataaattgatgaagaagcaccaagatccaaagaagttgaagacgaaaccaaagcactagacttagaatcacctttacgagaaggaatattcatctcatgagttttcagtttagtgtaaagcgaatccaaagtcaaagtagacatgttaacagactcctgaatagatgtaactttcatctcccanatagacatgtcaagaccattcaaaaagtgacgagaaatctcagattgtggataattagcaccataagaagaatcaacagatctaagatcactcanaattttattaaacctagaaagatagtca

SEQ ID NO: 47134 - DNA, 329 bp, Oryza sativa
cattcacttggaaggccacacatattactaccaaaattaccaagaatgtgtggctctctgtcgcatatttggatgccccgatctttacatcacttacacctgtaatgctgcttgggcagagataacaaaagctttatcatttataccaagacaacaaccttctgatcggcccgatattggtgatcgagcttttgaaatgaagctcaagctgcttggtgatgatataaaaaaaatatgagttctttggtcccatactcggaagttagcctcgcttaatactatgtttaattcttatggtttaatatgaagtcctatggtttaattactat

SEQ ID NO: 47135 - DNA, 504 bp, Oryza sativa
acactatgaatactaagcttctcgcgtttctgttgataaatagtattatatttctctttataatatagcttcagataacaatgctgattgtcacatattcacagacgaggaggatgcaatcatgtaaacattccctccgtaccgaaatgtatgacgccgctgactttttttatagtatctgaccattcgtcttatttaaaaattatgtattaatatgtaaaagtataagctgagattatattttctttgatgatgaaacaaatcacatcaaagtaaataatatttatattttttaataagacaaatggtgaaacgttatgcaagaaagctagcggttctatatattatgtgacggacagggtactttgctttagttatactacttcaagtgataaatatttgacgcttagtatgagaatggatccatttcactttaaacaaactttgaccacatattacttctgatatgcttagttaacttatattaacagatcggtatgtata

SEQ ID NO: 47136 - DNA, 491 bp, Oryza sativa
actaagcttgtatagattactttcacaagagtggtcttgccctattcttcatatccgaaaacggagacgatcttcaacttgctctgatcccccatggacagcatctctatgacctcatcccttggtccgtcaatgccaacaagctttgttgacattgcctttgtgtatggatcatgggtaggatgaccaacagcagtgtaattgcctgcgccatgcttggtagccacatatcgaagtcgctgcttcgcgacggcgtcggagaacatctgaccgtactccacgctcccattgaacagctgatcattcatcttcgccacgaggcgcatcagcatctcaaggtcggcttgctcggtgtcagagccgacacgcaaggagatgaggacggtgtcgacgacgtcctccaggtcgtatgacagcatgcgcacatcgtgagcccagagcctgacctgctcgtcaagctgatgatcccgtggaatgttggcaccaagcgt

SEQ ID NO: 47137 - DNA, 440 bp, Oryza sativa
tgcaagcttaacgttttggcttggttcccattgtttctgtccatttgttgatatgccatctaagaggctattaagctctaaattctgtggcagagggggcaatgcctcttgtttgtttggccagcttctggttgtgagtcgatccgagaaccatacgctattttgatagaatttgcttattgcagggtccatgctctccagatcattaaagtattgaaattggtgcctataattcccagacattgcgtcttttatgccgataaagtcaaatatttctcatggttcggtagcttccaaacaatttggtcaacctcgattgttctacgtggatgccctgtgttgcgttccacagggatacgatttggttgatcacactcactgcgaggtgggattagcatttatatcttttcatcattcaccagagattttcctctttttta

SEQ ID NO: 47138 - DNA, 372 bp, Oryza sativa
  unsure (1)..(372): unsure at all n locations
tcaggccgagctggtgctgcagccgctccgcctcgccttcgttatcaatcacgtcaagctcgtcgagcccgcgctcgactgcctccatgtaactcatcttctccttgctagtacttgtttacccggcccgatgctcatgtagcagaaagtgtgttacattatcgcttagcgccgatcattgttgagatgcgtggggagatctctcaccttagcaccaaagctcctgtgaacggcattggtccatcgcgtgaggcaaccactttgtaccgtctaggattatagttcgttcataccggactggatcagtcctcatttcacatttaaagatgtgttgcacaatttctcgagntttttatatactccgtaattgtt

SEQ ID NO: 47139 - DNA, 130 bp, Oryza sativa
tgaacaaaaaggctacctaatacatgggaacataaacatgtttgaaaaatcgtttcaggtctttccaaattgtgggaatttgttattcctacaaaatgtttcccatctttataagcttgttaatttaaac

SEQ ID NO: 47140 - DNA, 406 bp, Oryza sativa
cattctggccggactccgggaattggtaaccatgtgcccttgaagcatggacttccttaataccgcttccaatacctgaaaccgaaacgtctccaaggaagaagaggacccctcgtttgaaggccgaacttaaggttgaggtccttcaagaactagaagctagcatgaatgccagggtggaagaaagggttaataaggtccttcccgacatgaatataccctgagtcaccacacctgctgtgcattcaaacttctcgtgcacaacacgacgcgagtccgtcacagcataagagtaggtgtgcattcacagaggtgcctgaccctggtctccgatccaccactagctacagggaccacatcaggtattgttgtatccgacctatctataaaaaccttacccttcata

SEQ ID NO: 47141 - DNA, 382 bp, Oryza sativa
  unsure (1)..(382): unsure at all n locations
gcagcttatgtcacatgaacatcacctgtctcagtttcttgggaggatatcttctcttcctgcgagccgcatgtaattcagcgacttccattttacaccagcatgttggcttcttacgccgcccaatctattcaaattttcaagtggagatttaattacatgtctgggagttggagtcttaaccactaactcagatcagattcatgagctgaagatagatatactttctctaagtggncatctgcgcaactataacaccnagtctactgacgttttataatcaggggattgatcatcttgtttgccacactcgagtaggaactactcacttaatatcttcacagttgaggatatgtactgacatatcccacacctatttgtc

SEQ ID NO: 47142 - DNA, 488 bp, Oryza sativa
  unsure (1)..(488): unsure at all n locations
tgccattaatgggcgtntccattggtcgtgagacgctgtacttccttggttatgaagaggacctgggaaagtgggagccatacacgcaaaagacaaattgttcctttttcatttggagcgtggagaactggaaatacaaacgttctggataagggcactgggattattttccttgtttttgctaaagcctaaaagtctactataattttgccttgaatgtatgggtctatatgccatgttagaagtactataccataataacaagaactcctcgattatttctattgaggtcccctttgttttttattatatatcatatgtgtacttttcaaaccggaaaacaatgcatcttttataagatcttcggtttcttcaatactccttctatccacaagagcttgatagcctcttcaatttcttagtactctctctacatgtaagatttagacatatttcatattnntagttttccaaataagttgttcgta

SEQ ID NO: 47143 - DNA, 368 bp, Oryza sativa
  unsure (1)..(368): unsure at all n locations
aaaacacttgccggatatatgaatatctactctatattatgttcatgttatactgaatatacagctaacttatctgggagatgctttggtgcgggtataatgtttacttatgcaattactctgtcatgacaatgatattagagtagtatctggtagtttaggcgtggtgtctagattaccggatattattatttggggttatatattgcggatgagaggtgggccgctgatggtgacagctcactacgggtattcctccgcgccggtatataatcctaagttaatttcgtgnggagggtattcctccgtatttaagcccggttgtatggtcatgacggactgtcgtaacgaactcggcagtcagtgat

SEQ ID NO: 47144 - DNA, 487 bp, Oryza sativa
  unsure (1)..(487): unsure at all n locations
taggctagaaacgtcccttctgctctcaccttctttgattcgatttcactcatgccaccacgtatacatcagtaggactgcagttaactgggaatcgtattccaattccattatactcttcagtacctcccatgcagatttttgctctgacaatttgagacgagttccttccatattcacttccctccacggcttctttacttaattgcatttgaaaaaaaaaagatgcccccatcctcatcaaaacgttggcatatcacacatgtcaatttccatcccctttctactcaacctcattcgcaatgctaagctattgtgtgcgagcagccataagaagtgcttcatcttatttggacatttgagattccatagtttcttccattctttctgaccaccctcattgctacttgtcgttgaagccagagcagtcctgcaattcctcctttcataattataggctggattgaccgtganaacaccattgact

SEQ ID NO: 47145 - DNA, 426 bp, Oryza sativa
tttgttctattcaaaccctatgatgattagggatgaaaatggttcggaaagataccggattctggacatgttatcggaaacggaaagtgccggtcggaattttttctgaaactttcagaaacgggaacgaattcggatttttttttgaaacggaaacgaatatgataaggttgctatcatcagaaactttctggaaatgaattcaaattttctctcggaatcgggaacagagtatttctcatgtacaactaattagcttcagctatctcctcttaatatttagatttatactatgtatggaggtgcttaattaaatagaaatatgtattgttgtctagtactttagatttcttttggctaatggtgtttttttagtttctattacgtcatgtcatacttcttatagttatagatgaatatagtttc

SEQ ID NO: 47146 - DNA, 425 bp, Oryza sativa
  unsure (1)..(425): unsure at all n locations
agcttatggnatatgaatgtggcgaatcttgtctatgttcaatcaactgtcgtaatagggtagcccaaaaaggagtaaggatccaccttgaggtcttcacgacaacaaatcgaggctggggtcttcgttcatgggatcctatacgggctgggtcatttatttgtgagtatgttgcggaggttgttgatgatactaaagctaatttggatggtgaagatgattatctttttcgaactgtctgttctggcgagaagacattaaaatggaattatgggcctgaattgataggggaacacagcataaatatttcagctgatacttctgagccgctgcccatcaagataagtgcaatgaaaatgggaaatgttgcacgtttcatgaaccatagttgcaaccctaacaccttctggcaaccaggtcaattt

SEQ ID NO: 47147 - DNA, 378 bp, Oryza sativa
cacaagcaggaggagggctgttagcgatgtgtcttcaggaatttggatgatttccactgacatttggctgacctaatgtcgtggcttgaggttatgacacacgagaattcgctccatgaccgttgctctgatccttttggagtgaccaaatgtacagcggggaattacagtgtgggaccatatgtagcacttacaatatgatacttacacatgcagcctgtgttagactgttcatagaaaaatatacagtacgtcataatgtgcttataatatctgtagtgggtatttctaatcgtcactatatactcctcatacataccatgttacatgcattcttaactccaacctaacttctcgtttacatagcggctttcaatt

SEQ ID NO: 47148 - DNA, 414 bp, Oryza sativa
tgcttatacctcaatgtcatgaaacctcttttgttatttttctttcagctgctcagtaccctgcagtgtgcatcaaaagaacaaattattaacacgaatagtgaagtatgttactgaactaactgaacttctgaagcgtttagctctaaagaccaattgcaataatgacaagacaaactaacacaggaacactataatgctgggtgcgtacctcaaggtgccaaccagtgacaacaaatacatccaatgagtaaccatcacttgttgaaaatgcatgcgcttcttggatgtcaagaccaagctcactaagcaagcaagtcagctgcaagtgtatgaaaggcaaagcgtaagaatcaaaacaattgctgacatatgttctgattaaaattgccttgaagtcacattaaacaaatt

SEQ ID NO: 47149 - DNA, 421 bp, Oryza sativa
atgtcagaagacatcatctccacagatgccttatttcttcaacagtcctcgttgagaggtgaggatggtatttctgtatgtaacaagtgtgcggaaaccttctgaagcaaagtcctctcactgtctctgctttcatttcaactctagttggttgggcgttgaaacaagtgatcaatgttatccacgtattgctgaacacaactctaaaatttcttgctgttgcacgcgcttgactattggatgtctgcgagtattgagtcgtattatgacactaataataggtctgatctagaggttaagataaagtgtcaatgcagtgggtagctcatatattcttacattatgtagctatgatcaactgctaatacattgtattcttcatattaagtgtctcattatatgactctagccatattatagt

SEQ ID NO: 47150 - DNA, 430 bp, Oryza sativa
  unsure (1)..(430): unsure at all n locations
ctgacgcattgcagcttgtgcatagatcgatagataatttattcttatattctctataacagnttgaaattcaatactattatcatgcattgtgaatatgtgatgatacaatgacatataaaacttggattagaaaaaatacccgtgcgttgtaatgggtgaagactattttnagtttactattattggtatacggcttaactagggtaaaaatcactatgagaattcgcttcgattctttttttttagaaaatcatgagctacaattaggagtccaactctcatctcaagttaccatgcaagtttttgttaaagagatttcttatacgactccttctgcattctttgcttttcttggtatggcggtatttgctattcttggtatgtcgntcaattctgcttcgcttagcttgaactgaccatttcactt

SEQ ID NO: 47151 - DNA, 417 bp, Oryza sativa
  unsure (1)..(417): unsure at all n locations
gatttgttatcccactatggatcgaagatgttgcttgagagtatgacaaggagaaggcccttgaagaattgagacaagattgactgtgcaacgcagcagtctgcactgcagttataacacttgctttgaaaggagatacgcanggtgcttcggatcttgttcgcaacaatggttggtggaggactggaggcacctaaatattctcagctataattattattattctactttgatcaagactaaacttccagtgctaactgttgtcagcacacctactacaaatactggcgagcctgctgagttntcttgaagcagaggagtgtaggtaattggtgcatgttgctatctagaatggtatgagattgggaaaaagtcaagaaaagcgactgcaaccgaaatatgaaaacagatgtaatc

SEQ ID NO: 47152 - DNA, 409 bp, Oryza sativa
agcttcgtgggttatgcgggacacatgctctttgttttttttgggcgcaacgactttgagagcgttagctaaagctcttcttctatctcctaatcaatttcaaatcctaattgtcggatgctcacgccgagtcggttcacgagaaccctaacctgcaacgccgggcactctcactttccggctcagatatgccacacagatgatttgacagtctcgccaattcgccggacgtgtttcgctctcgagctagccgcgtcgtctggttcatgcaccgccccacgcatcgaccgatcgatcgatcggtcgcgtaccgacggggacacggggtccatccacgtagatcgtagacgcatccccacacaccgcggggcacgtgcaccacggcacgttctacgcgcgaccaatcgat

SEQ ID NO: 47153 - DNA, 280 bp, Oryza sativa
tacaaattgcagttaaatttgagaactcacatactgcgaagatgttagaaggagcgagaatacacaattttggcgttggttcaagttcgaggcgaaggaaaattattgttgtacttaagtctagtgaagtgatcgtctgtagttttaccctttcttttccgtcttggtttaatgtaccaatactaaggcacttctcggacatgagttatgggagtatgtgattgacttcgtcatgttgcctggtaagtactatgctggccgatggaacagtatgatgttc

SEQ ID NO: 47154 - DNA, 417 bp, Oryza sativa
  unsure (1)..(417): unsure at all n locations
agcttagtgctcttgcatagatcttccgcacatccaccgcaccaatctcctcttcactcgctgccgtcctcgccccaaatctcatcatccatctcgcacccatggctgaggagagagaaagcttcgaaagtcaatgggctccctccgatgtaacagaggagaatttgaaggagatggtagcacatggcgttcttccggctaaggagattatcgggtggcgtctggcatatggcgaagcatttccgacccctgacacacacgaggtcgtggtattttctcatttcttctatggnnggttttctctaccaacctcaagattcttccgggggatcctggagttttacgggattagtttgcatcacctaaactccaattccatagttcacatcgccaatttcatccatgtttgcgaagctt

SEQ ID NO: 47155 - DNA, 417 bp, Oryza sativa
  unsure (1)..(417): unsure at all n locations
ctcatcttcttattatgggctcaactcgactcgtaaaattaattaaacgagtcggtatcttcttaacaagccgagatctagctagctcatgagctctcagaagctctnttgggctcaaagcccatagctctatctaataagaagctcataaggctcaaagcctgtaaatctatcgaggatgcaatattaggttcgtttgttgggcgcctgngattatgagcacctcaaaagtagtttcatggttgaatatagtatattgttgtttggcaacaatcttatgtgtttctcatatccagcgctcgtgtccggcggcgcggctacgcggcagggacatgcgagcagcaagcggcgaggcagcaggcagcaggcatgaagcaacangcggaaggcaagcagcaacagcagcaacaagcaagt

SEQ ID NO: 47156 - DNA, 419 bp, Oryza sativa
agcttctccaccatctcgctgctagccaagttgttgtatctacctacatcaatgatcatgcggcaacaacgctctttgacgacacactttgtttggaacaacgtgtgtcgctgattttgctccgccttctccatttgtgcgctaaggacacgctgcacaatgaggctctcatagtgatccgcaaatgcagccccaatgtgctctttcggcggctcattatctgcatggtcagccgcaagcaaagcaagtgtatcatcatcgaaatcactagcagaggagtactcaccatcgtttttgactaccaaaactcgcttgctagggcagtcacgctgcacatgcccaaagcccttgcaacggtggcactgaacatctctcattcggcctgtggatgccattgaagaagcactcggtgctggctg

SEQ ID NO: 47157 - DNA, 476 bp, Oryza sativa
  unsure (1)..(476): unsure at all n locations
tctttcagcattngaattgcatcactaaggatagttgccttatcattcctgcgtcgatctggatctgtatatttgaacacattaatggcaatatggtatcagttaatgagaacactatagaactaagtctaatgattatgatatcgcatagatgcagctagtaaagagaacaaacaattttaagtgcaattaatcttagttatgcagaaactagcaatatgttaattgaatcaagaatctttgcagatntcaaatatgtttacacgctagtttccactgaccaacctttgtccattgtaggtgcaaccagtaaagcagctgactgtaaactggccagtttgtgggtgctgtgctgtgttgtgctgtgggaatctagttagagggatcttgactaatgcacgtaaattattctgtacagctctattcaatgatctgacttccatccaaaataataacaataatgataatagagttga

SEQ ID NO: 47158 - DNA, 375 bp, Oryza sativa
  unsure (1)..(375): unsure at all n locations
actaatatattattccatacaaggacattngtgtaataacaccagataacttttatttgtagcttaactagttcttataggaatttattatacttcacttaagttgctctcttctaataaattttagatgcatgagatcactttttatagtagtcaccactagatgagcttttaaacaggagtctaactgtcctgcttttgttgcagctgatgaggttcttattataaaaagtttgacgcacaaagaaatcaatgcggtgataaaggtaaaaggttatatgatcacatttttctttcgtccagctgagcatgttgtacaattcactatctgtctcttcttgaatcatactaatgtgaagcatgaatttcatgctg

SEQ ID NO: 47159 - DNA, 431 bp, Oryza sativa
  unsure (1)..(431): unsure at all n locations
ctgaatctgctctcaacttggtttcagaagctcatctaatactgtgtgatcatatgaagagatctttgtagtatgacagcaaaagggagtatgcttccatgaaagcagcacacaaatctgaacatctctcaaacaaaagggagtaagaactntgcattcaagctgcatgaacaggctgtgccgncgagattccttttagcttcagcagcaattaccgaacttcgtcagaagcgttttcgcgccgatatcacagcagacccagtatattaagctntcttcaaccganggaacacatggatacagaaacaagttcanatggtgagcagatcatggtgccttcaccagctgcagcttgagctcctagtggctggtctaantatgtgcanatattgggatgataatcagctgtgagtctatctactgaacatcat

SEQ ID NO: 47160 - DNA, 418 bp, Oryza sativa
  unsure (1)..(418): unsure at all n locations
agcttagcaaggacagagaaaataatgttttatattctaaacaccagctagcacagcagagagcggatataagctatggattaacgatgcatcacctctagagcctacttattgcatgggttagcttttaaatcaactctagatgacctggaaacaattgtagcttgctacgggtgatactattaaacttgctctaatgccgcatgtggggagagagataaagaagatgaaaagaaaattacatagcagcatccacgcttcagactcatgtgaaaaagatgatagctggaaacgtccaacctaccacagtaaagtaacttgcagattatccttatccaactatttttattaccctccgaaaaaatatgctccacagtccactcatctatttcatttggntattcgtatttttcatcta

SEQ ID NO: 47161 - DNA, 362 bp, Oryza sativa
  unsure (1)..(362): unsure at all n locations
tgcgcgacactgatatgccttcagcgatgtctggagaggcgcatccgccatcgccgggctcaggagtgccggatccactatcgctgagctcggtaggggtgtatccatcatcatcggactcaagagctangcggtgatggcggctgacgatggtggagtagccgtgcaccttagcctcggctatcaggatgagaggtggattcngccttcagcagaaatgacgtcgatgggcagtgaacggcaatggcttctgcgacaacgacggtgggtagtagacgacaattcttatgcgacaatgatgactnttataatttgggattggggatttgggtttttttttttgcaggaatgtggatttggga

SEQ ID NO: 47162 - DNA, 414 bp, Oryza sativa
agcttcactaaagagtacccatgcgcacctttataacgcttggaaatgaaggaatgagttgcaccataatcaaacaatattactgccggtgtcgagttgacaggaaatgtgcccaatatgacctctggtgctgactgtgcctcctctgcagacgcatgattgacatgggcctgcacaaacttgggtccagcatgtcttggctttgggcactttccaaccgtgtgtcccggtttgttacaattgaagcagagttcgggctttccttcgaactccttgggctgttttgactgagcaggcagagctggctgaactgactgagctagaaacattagtggacttggagtcaagttgaggctgtgcttctcgctgttgccgtgactgccactatggtagatcctgccgaagctacccggg

SEQ ID NO: 47163 - DNA, 412 bp, Oryza sativa
  unsure (1)..(412): unsure at all n locations
tgtacgatgagtcgaatggctgtgacagngagttcacaacactacggtcagttcttgaacttatgaggttaaaggcgagacatggatggtctaataccagtttcgacagtctgttagaacttctgcagaaaatgctcccgaggtctaactcactaccatccattcacttggtgtggaaaagattcatgcgtgcgtaaatcactgcatagtgtacaggaaagagtacgcttctttagatgaatgtccaacatgcggtgctagccggtacaaatcgaatagcaatactggcctagaaccgtctgacacaactgagggaagacaaagaanaatctcgcagcttgtgatgtagtaccttcctgtcaaagaccgtattaaacgggtatactctaacccatgagatgcggaactaatg

SEQ ID NO: 47164 - DNA, 410 bp, Oryza sativa
  unsure (1)..(410): unsure at all n locations
agctnggacatcatcctagggatggattgtttgttttatcacaaaggacagatagattgggccgaaaaatccatcaccttgcaaggacctggaggaaagcaagtccgctttacctctaacacccctaccgcaagtcggtctattctaacctgcttacaagtcaccaccttggagtcggtgcctatagtctgtgaatatcccgacgtatttccggaagaattaacgggtatgccaccagacagagaggttgagtttgccatagaactggcgccaggcaccgcaccaatcgcaaaaagaccctaccgaatggcagctaatgagttagcagaagttaaaagacaaaccgaagaattggagagtaagggttatgtgtgacctatctcatccncttgtggagccccaatgcttct

SEQ ID NO: 47165 - DNA, 415 bp, Oryza sativa
  unsure (1)..(415): unsure at all n locations
taagcttgacttggngcgaagaggctggtttagcgatgtctgcactcgttaaccaagggaaggagcttctntggcatatacccatggacaattcatggcatagtgtccttgctctctacaatcgtgacaaaaggggacatcctcttctggtattggaagctcatcgacctgngtggcaaatgctcgatcaaacacatactgattttggtcttgacttccaaccaatggtagctgtggactaagcagcatgcttggaatggaccaagggtgtgcccttgttaactctctcgacgctagtggtggatagagttgacaacttgagtactggaggcatacccgctgacattctntcctttntctctgtaaacatctgtacacggattgaggtgagagaggaaacaagccacgaaagaat

SEQ ID NO: 47166 - DNA, 385 bp, Oryza sativa
  unsure (1)..(385): unsure at all n locations
gatccatactcatcagaatagactgggcactgatacatgcaacatgctactaattgggcagcaggcatgcccaatcaaaagcagcgaaacattctagaatcttatggacattcctcacgatgactaacaagctaacaactaacaaatccagagcagcaacaagccggattgagatcctaagccagagggcacacagtcactatctaccttcggtatctgctcgggctcaaatcgctaacaatgagtaaaaataaaaaaaaactactcggcaagatcccgatacaattagccaaagctaatcaatgagagcgaannaaaaatctcctgaatcaaatcccacgaacgcatacaattcagatcaatcgaatccggcatcgatccaacg

SEQ ID NO: 47167 - DNA, 331 bp, Oryza sativa
cttacagcaatttcctttgacaagagattcactcaccatgaatggatgagtcttaagtaaaatctaatataggatggtgctggccacatcttccaacccaccatagttcaactaaaactaaaataaactaaatctcacttttaagggtacccgcagatcagcctgcacccatctgtactcggtgctcatgaattgctaacaccgactacagccttcacaaagaattttgcactatattttctatgaatggttgctatactggattcaacaaccaaatgaaaaaagcttacatgttgcagcagccaaaattgatctacagaaaaatggaaac

SEQ ID NO: 47168 - DNA, 413 bp, Oryza sativa
agcttcactcctatgacgatcaagcatgatcttctttagggcttcttctcgtggcatagttttcaaatggctacgcacaaagtatgaaatttcagtaaggtggggaactagataaaaaaccctggctttaatccgccgttcccgatacttcttcaaagcatttcgaatagcagcaatcgacacttcgatatttggtttatgttcattatattcttcccaatcgtacatcccttgttcatgtaagattttcatctcattatcaattcttcttccagcaaagcgtagcttcagttcacggaacaaatatgtttgtttgatcataacttgcctagtcatgtcggtaataccatactcatcacggcggcaaaaggtcaatatttttgttcccacgaagaatttatttttctttattg

SEQ ID NO: 47169 - DNA, 268 bp, Oryza sativa
  unsure (1)..(268): unsure at all n locations
tgggaatgcaaccatgctaaatactccctccgtcccataatataaaggattttaggtggatgtgacacatcctattacaaatagattgcacatcaatatattagaaaaaagcagagtttcaagtacacaacgcaacaaccaaaaaggtcatcgccggnggacatgaaaaataagtgaaaaactaanagactactgagattaaactacaagagagaagctgctcccatatagagggagattgtggtggagggaaccccactaagctcct

SEQ ID NO: 47170 - DNA, 409 bp, Oryza sativa
agcttggtaaagatatccgccaattgtttgtctgttctcacatgttggatgtctatgtcgtctcttgttgaatgggttctcaagaaatgatggcgaatatctatgtgtttggttcgggaatgttggacggggttattggctatcttaatggcgctctcattgtcacataggagtgtgattttggacacatttaggccatagtctctcaaggtttgcttcatccaaagaagttgaacacaacaactccccgccgaaatgtattccgcttcggcggtggatagggcgacagatttttgcttcttggaagaccaagaaacaagagacctacccaagaattggcaagtacccgatgtgcttttcctatccactttgcacccggcataatccgcatcggcatagccaatgagat

SEQ ID NO: 47171 - DNA, 413 bp, Oryza sativa
ttcttcgacgtacaagctgaaatccgtgcctgcatagagcgtggaattcaatgtacttctccaactcgtgatgtctattgtcccattcacaaggcaaagactcacgacctctcaagctgcaaggtgcttctcagcgccatgaggacgtcacctcctaaggtccagcagtcacgaatctcttctatagatgcggacaaggaacaaggagcggcgactatttcagatcgactcatcggggcaatcgatatcgatcccctcgagccatatgttctacatctgctcgaagaccaagcctcatcatcaacaagtacaccacgcgacgtgtacgctatcgatgggaccagcacatctagaggcggcgcagaaacggaagatcaatttgatacaccagcccaacacatcataacccctca

SEQ ID NO: 47172 - DNA, 425 bp, Oryza sativa
  unsure (1)..(425): unsure at all n locations
aagatgcattgtaccaacttctaataagttaagtaactgcggtataaaagggatttaaggtattgggcacttgatcacgcgcactctggcctaagcaaaaagtgcctaagtccctataagaacgtgacaggccacacctgagaatatgggctgcagacatattaggcctaggccaaaaaatatgccttcgacaccctttagaggatgacgcatgtaacatgctcccgagtaataaatcttctgggtaatatagaccaagtgtagctcatatgaatagcttctgatctgaatgattatcccttatgggatactccaaaatacatataagaactgaatcccgactggcgcaagcattcggttgacagcccttacngngaataataattggtccaggctttgagcatagaanatagactcatgactat

SEQ ID NO: 47173 - DNA, 422 bp, Oryza sativa
  unsure (1)..(422): unsure at all n locations
agcttcaaggagccatanatgcagaggctgagctgttattaagctaaggaagaagagagatggaatccaaaagtaagtgtgcttatcttttcttgtccttaaattttgtggtaatctggacatatttctctgttatttccaagcatcggtagcatggtctcatcatacaatgcaagctacaccatgctgtgacacacatgatggatgcttctggttatcgcgagaaggcacctcaaagagtccaggaaggggatatgagaaagcacactgctttgttgcgggaactggagggcataagtgaagctgagaagaaactagatgccaaaaccgataatatttgactctctgatgatcattgcacgaaatagcggtgttaatgataattctggagtaaattaagcactactttataatttataatt

SEQ ID NO: 47174 - DNA, 444 bp, Oryza sativa
  unsure (1)..(444): unsure at all n locations
gaagctggatgaaggagatgacagtagtgcagattatagttcagatgattaatnnnttgtaccagaaggacaaaagaaagtaatgatgtgctaatacagaattgaaggagaagttatcctgcactttgactgcaatacacactactcatggcatttatagttaagatacatacaggacaggatatgattttacccttcctttgctgtataggctaacattgtatattcccttatctatggtcaaaggaactgaaattagctaggtgcattgttaggtttcagatcatctttgttctttcttgtactacctncatttcaggttataagactttctagcgttgcccacattcacatagatgttaatgaatctangcacatatatatgtctagattcattaacatatatatgaatgtgggcaatgctagaaagtcttataatatgaa

SEQ ID NO: 47175 - DNA, 418 bp, Oryza sativa
  unsure (1)..(418): unsure at all n locations
gcttccccccaacctcccccgctccgcataggtattctctactcgccgccggccatggcgatggctagctcacatgtcgcgtcgntcctctttctcttttattgaatactagtatatggttgcgtgcgcgcaagaggaatgggcggtttgccgggtgttcaacaaagacttggcggcaaagattgcccaaatgccgccgcctcccttcccgcgcaacgactccttcgacctcgacctcgacgacttcctccacctcgacgccgacctgccgccgctcatcgacgaccccttcgcctccacctccacgctcaagacggagccacctccgccggccaacctgatgcacaaccactacggctacttctccctcccggcgtcagcgaccaattataaccacagctccggcgccatggcggac

SEQ ID NO: 47176 - DNA, 493 bp, Oryza sativa
  unsure (1)..(493): unsure at all n locations
tgagctcgctcatcgactttcccaactccatcctatgttttacgcacgcacatgctttcgaaactacgagggtacattcttattaaaaaataatctatacgaaagttgttgtaaaaaatcatatcaatatattgaaaaaatactcaagctaatatttaattaattactccctccgtgccacaatataatggattttgagtttttgcttgtaacgtttgaccattcgtcttattcaaatntattttgcaaatataaaaaacgaatagttgggcttaaagtaacatagataataaagtaagtcacaaataaaataaataataattgcaaaatcttttgaataagacgagtggtcagacgttataagataaaactcagaatctcttatattatgggacggtgggagtatatgctaataaatcgctctgcattatatatgcatgcgaggaggtagtntccaacttcaacgaacacgggtacactgggcttaaaatga

SEQ ID NO: 47177 - DNA, 420 bp, Oryza sativa
agcttcccctttatatctgggactggcaattcaatccggtgcttgagagaccagaattctgtcttgtaatcctgcagtacccaaatatctacgatcgtcgcatcatcattacagaagtagatgccaagtgtaccatcaatctcaaacagatcattcccattcatcttgtcagcctgacgcatcgaccagaacgactcggatgcggtgttgaaaatcaaaatcttgtctgttttgtaattataccaatgcaggctaccatggagcagcacaacagctgtgcaggttgcaacctcctccatccacccaatgcacctcggcatttcgctggagcccaatgtgtagacgtagcaggcatatctatcctcagaaccttccggccgaaactggtagtagagtagaagccggtattcaccggtgggg

SEQ ID NO: 47178 - DNA, 418 bp, Oryza sativa
  unsure (1)..(418): unsure at all n locations
cggtgtgcatcgactacaccgactntacaaggcatgttctaaggatccttacccnctgcctcgcatagatcagattgtcgactccacagcggggtgcgaccttttgtgttttctagatgcatactctggttaccatcagattcgcatggctaaggaggatgaggaaaaaactgcgttcattacccccataggaacttattgttatacaacaatgcccttcgggttaaaaaatgcaggtcctacttttcaacgtactactcgaatttctttgggtagccaaataggacgtaatgttgaggcttatgtcgatgacttggttgtaaagacgcgcaaccaagaaaccttactctcggatctagcggaaacttttgaaagtctccgctccgcccgcataanactgaaccccgataagtgcgtg

SEQ ID NO: 47179 - DNA, 423 bp, Oryza sativa
  unsure (1)..(423): unsure at all n locations
agctntatatcatcgntttctggtaattttgtacaaacttgtgaaacaaaaaaaacatcaactaacttaatcatcactccccctaccattcttctacctacacagaaggagaaaaaaaaacaaacgaacgaacaaccaatcactcactaaaatatgtagtcctatctctcaccattaatctgtatataattgtacacttaatctgagctcgctcagaggatgaaagaactcaattatccgccggagaggcagctgacgacgatgaatccgatgatctagaaattctccttgtggaagacgaatttggtggtggtcttgtgggagaagtcctgngcgaggcggcggagctccggcgtgagcgcctggtcgccgcagaagaagacgccgacgcgctgcccctggtggttcacggcgacgcgcttg

SEQ ID NO: 47180 - DNA, 491 bp, Oryza sativa
  unsure (1)..(491): unsure at all n locations
gttatatttgcaagggtgagtaccaaccgtactcatcaagccaccacaacaacaatgcatatgatggaggtatttcaaggaatggcttcaggttcctttgcgcaaagcaagttttgcaaatcttttcacaagcttaagacctagcatagactgatcaagttntaatagcagtgttcacattaaacaacgacgattctgtccaccatccattatgatcccaacgatagcttcccgccattgagtcgtcatggttttctgaggacgtccaccttccctcctctcangaagtgactccatcagcataaaattcatcatgcaatatctcatcccacacacagtaagaatttagagtctagccaagtgtaatacacgtcccagtgctcaataaccgcgagcacggctattcgaatagattggtttactcacactgcagtggatgtacactntacccgcactccgcgactgcccacacatgagcctcgttccacaca

SEQ ID NO: 47181 - DNA, 420 bp, Oryza sativa
  unsure (1)..(420): unsure at all n locations
tgcggcatgaagcttggtgagcctaaacccaatattttatttaaactttcagncctcgcagactaagtagaaaaatcgaacaaggcaatgataaaccaagtaagcaaattgaattggtaaaaaatcacactccattattatgatgatagcccccgactgacaacttcaagaagaaaacttgatgttgacagttaagataaggaagtacaatgataagcttaagcatagaaacgacgaagatgttcaatgttccaagagttgtcgacgagagtaccgtcttcgcgcttgagtcgataggaacctggccgggtgacttcagagatgataaacggcccctcccatagaggagataacttgtgccgatcccgtgtagtttgaattttcctcaaaaccaggtcgccgactagaaaggcacgggat

SEQ ID NO: 47182 - DNA, 334 bp, Oryza sativa
  unsure (1)..(334): unsure at all n locations
gactggcggtgggtatgcagatgcnatggggtgttcgttcaaaccgatggagttggatttccgcggcacgcgaaaaccagagtcattagcatataattaaccatataactattacacacttgaaataaatatttttaaataactttcatgtagaatttttaagaaacacactgattagcagtttgggaagcgtactcatggataacgagaaagttgcacgtcaaaaaatcaatttataaagactaagaacatctctgaaagaagtgttatttgactcttaagccaaaaaatgacaantttagtgaaaatatgggttacaacaaacttaccgatc

SEQ ID NO: 47183 - DNA, 413 bp, Oryza sativa
agcttgctgttctgttgcttcccatatacttacttaccgactctgattagtctgaccttgaccagaactgctagtgctcgtagaacttctattttttttggactgaattgctaatgctggcaattagataaactgaggattcactttgctgaccggggatcggtgtagtttttccaaaaccttgaaactgacttccgtaacccacagacaatgactttgcttgacttgctcttgattcaaaccacaagtattttcaggaaattggcttggtctgtccttgtctggattgcggctgttcctgatgctacttctttaagccaaacggttgacctggcctcaccggcgtaccttcgaattcaattagacaacttgggatcagtgttactctgctgacgccttgcagctggctcttt

SEQ ID NO: 47184 - DNA, 417 bp, Oryza sativa
  unsure (1)..(417): unsure at all n locations
tacctttattgtgttggggtcatgcagttctgcacgctgctgaccttgtccaactacgaccaactgcatatcatgaaacttccccaatgcacttagtacgtgggaatcctccaagtatttcccatttgcgtaagttcggttgtgttgtatacataccgatctcaccaccacagcgtactgctatgggcccacacagganagtggggatctatgtgggattncaaatctccgtgatcataaagtatttagaacccttaacaggtgatctatttactgcccggttcgctgactctatcttngatgaggaacatttcccggcattagggggagacttcaagtaccacaaagaatgccacgaaattaattgggatgcccatggtatttcagccacaaactcacgtactactgaaactgatc

SEQ ID NO: 47185 - DNA, 413 bp, Oryza sativa
agcttcttaatggtgatggcctatggcaaaaccttttgcgcaacaagtacttaaaaggtaaacccctctctcacatgtcacacaaaccaggaacatcccaattttggactggcctaatgaaagtaaaagatcaattttttcagtatggatcttttaaacctggtaatgggatagaaataagattttgggaagacacatggttaggcttgcaaccactcaaatatcaatatccttctctgtacaatgtggttcgaaagagacattctactttggcagaggttatgagcacaacaccgttgaatgttttattccgacgatcaattgtaggaccaaagttagttgagtggaatgatttgatttctcgactagctaacataaccctgtcaaatgaaaatgattgctttatttggtcg

SEQ ID NO: 47186 - DNA, 508 bp, Oryza sativa
  unsure (1)..(508): unsure at all n locations
tagccacaactctacaaaatgcgggtcatgaaagaatcatataccatcggtgagataaaaagcgtcgcatggaactaagtatgtgatgatcggagcaacacagcatcccagttctcaccccttgtgggagtcacatccctggggactatctcaattaggcaggtgtctctgaatgacgtcagcaaacaaattttggcaccaaactgtgtacaattggagatataaaagggtgttagatgatctagaaacatgatatataatggtaggatgtccaaggtgacagactatgcgttcatcttgaatgacagttcagatgggggtatatgaatatcaatacaaattaaaacctgactggtcacttcttctttatatggntcaaccaaacagtatgaaacaatgacatgttatcaaacagggtaactgcaggtgtcttcctaaggacattataatggatggtagccagcaataagccaataataaatatatgcattttatcagttcatttgat

SEQ ID NO: 47187 - DNA, 415 bp, Oryza sativa
  unsure (1)..(415): unsure at all n locations
agctntggcaaagtcttcaagggcaatctatacgatgagcagatcgtcgcgataaaagtcctcaacatggacatggaaagagctaccatgagttttgaagtcgagtgccgtgcacttcgcatggctcggcaccgaaacttggtgaggatactcaccacctgttcgaatctggacttcaaggcgttggtgctgcagtacatgcccaatgggagcctggacgaatggttgctgtacagtgacaggcattgccttggattgatgcagagggtgagcatcatgttggatgcggcgctcgctatggcttacctacaccatgagcactttgaggtagtcctccactgtgatctgaagccaagcaacgtgctgcttgacgcagacatgacggctngcatcgcagactttggaattgcaaggg

SEQ ID NO: 47188 - DNA, 388 bp, Oryza sativa
  unsure (1)..(388): unsure at all n locations
agcttcttgattggtcgcttgtgattcttgtatatctgngacgctctgcgaatttcgtaggggttgttttcaacgaggattgcttattgatttatgtgcttaaatcaattgttagatttttttttgtaccggttgatttttgtgaatttggccgtggtatttaatttagagatggggagagcatcattgtagagatagtggtaggataaaatgtttctcgaactcatgcagttctggtgaagcttttgaacaaaaaaaatttgctaagaggagtagtgaatatgaaactttgatggttttgatggtgtggattaaattcacttgtttatactattgcagcgaacaagctttagtagcacatctaccacagtgcttgacgcacgggagt

SEQ ID NO: 47189 - DNA, 400 bp, Oryza sativa
  unsure (1)..(400): unsure at all n locations
ccattgctctgagggagcattgtcactctttttggttgtnggcaatgtacacgagtatggcatggaatacgtctgtcaacttgtcatgttccacaattcaactgagtgtttctcatgcatcctgccgtcgatcatcataagctccaatctgaaggacttcaagagaagcttcatcaatcacaaaatgggcgtgaataccgtgcaattggaaagccacggaccaatgcgggcaggataacagctggctatactttgcaaatgtggagtgcacaaattatttactgtcaactgttacaaacttatgatatatatcacaaggatgatagactctttatgttaacagttgataatcgacttagatgggtatgttatagtgttatataaaaactaactattgcat

SEQ ID NO: 47190 - DNA, 408 bp, Oryza sativa
agcttgaatttactcagagaatgcttgattctgtgtagacaatatggacaaaaaaaaaagagaaagagaaaaaagggggaagcagaaaacaggcacatatacgtatatggaggacaaaaaataataataatattaaatttgtgccagttaagcactagtactcataatattttgggcgcatctaaggatacccagactattacaataagatgacaaagacatggaaccacagctaaggacacaacttccattctataaatatatataaagagtaaagactaactgatattgatatgactcttagggaataactcggataactgtaagacgactcaattgaactattactggggaggtgctggaagaccaaaatatgggttgcacggataggacaagatgcgaaggatg

SEQ ID NO: 47191 - DNA, 212 bp, Oryza sativa
ttacgaaatcaaatgttcaagaccattctgctgtgctattaaaatatccaatacgggatatcggtacacccttatccactactctttttatctgcctactatacctaccacaaaagatgggaagatcctgctacctaaagtatacttgcatcactaatactgctgactaaccaacttacacccgttcacatcctatgtcgctctcacacttc

SEQ ID NO: 47192 - DNA, 412 bp, Oryza sativa
  unsure (1)..(412): unsure at all n locations
agcttcaaagatataccataatcaatgagttattcattttatttcctttttcagagctagccaagtggcaaaacaagcacttgatgaggctactgctgagattaactctgctggtgtggagggttacaaggacagcatgcttatgatgcaactcctgaaggagaacctggcattgtggacatcagaactaactggaggtaaatgaactacaataaaaaatattntcaacaatcaacttctgttgcatttctgctttttgataaagagaatattctgtgttatatcttctatatatatggtaccattttgaaaggtttagagcaagtagcaaaaattctgcttttaccatatgttgtggtcactggtcataacttaatattcatcaagtgaagctgctcataggcagaacaaa

SEQ ID NO: 47193 - DNA, 242 bp, Oryza sativa
  unsure (1)..(242): unsure at all n locations
tctgagcctttctctctcattntttcacttgatgcaccaaatggtatttcaaatattctcaaaactgtgcagaagaatacattggagtcaagtggtaaaatctttgtgccggatggggggtttacaaagttgagggtgctccgttttacggcaccagtgctaccacctctgagctttctagaaggggcaatgccaaagcttcagaggcttgagctgaggttcagaatcattgagtttgtata

SEQ ID NO: 47194 - DNA, 335 bp, Oryza sativa
agcttgcacgaagccatcaccagagcgttttctttcttctccatttcaatgtatcttatcttcgctccttgcaatgcttcggagatgaaaaagactagtttctagcctgactctatctcttagacgagggctgcactgaccgccaccggcgaagctgctaggtaaagtaccaattcgcttccaggtgctgggctgatcacacctggtgagccttggagacagcgcccttgccccccccctcggctctgtctccctccgcaacccttgtttctcaccgtcgcacccttgcccctccctgattcttacgcctcccttcgtcaacttccgtccctcct

SEQ ID NO: 47195 - DNA, 423 bp, Oryza sativa
  unsure (1)..(423): unsure at all n locations
acacatggcaagtgcggaatntagtanattcgtataattatcattgacattcatttattgatgtgtcaaagcgaaatatggcttatatgtagagaagcataacaaataaaaaagaataaaatatcgttaggacataaaatgagttttttcctctatagccaagggagtagattgattcaatactacctttgcggattaagtgcttcactaaaatagttctctctataaaagtttcaatgctatcttgtgggttaagtactccactatatagttgtgtaaaaacattacaaaagttggttctaaaggtggcccatgagtctgagccaagctcgtgacatacgagggtgcacatttgaagaacatgtgaaaagaatgcccgtggagatcatttgtttatgagtgcgatgaacacaattggtcatt

SEQ ID NO: 47196 - DNA, 394 bp, Oryza sativa
agcttccgggttcattgtgatggttcctaatatgattcgagaatttcaatttgatatttgttttaaaccatccgggaaacttgtttatacatgatactggtagaattctactacataactgtccgcttaaattaattatagagaaacaaaccccttgacctatgctgcacgggcaagcaacacgagaaacagtcagtcatcgcctgctcctgctgggcgtgttctttgtgatggttggaacaacttggaagcgctctctcccaacacgcacaacgaaatgatggactagtacactaattaagcattagtttaaaaaaacctaaaaaaataatatattcctttaaacaaatttcttttatttttttttagaagatatataatatgttaaaaaaca

SEQ ID NO: 47197 - DNA, 499 bp, Oryza sativa
  unsure (1)..(499): unsure at all n locations
tacaatgcagtatatctgtgttaaaacaagcaacagcacatattgtngtgttgttatcctccccaacagaaatgtgaagtagtaatgcatgcccttgcagtgggaactccacaaagtttattacagtgctccagattaggatttgccaaacaattgcaatttgtcccagcaaaataaataaataaataaaacttgacccagcaaaaaacaaccgcaatgcctcaagcaacatggaatccgtaaccatcttgactctagagctccaaaatagaaattctcctttagaccaatttaatttttcttctcggctaacacaagaagatagaacatcaaagtccttattgtggctagctcttatcgagttgaacttatgttcggttaatccctctcacaaggggatngagtggatttccctccaaatcctcactccttggngattaaaggaagaagcctaatggtatagactggtattgagcgaaaggagctatatcgcacataa

SEQ ID NO: 47198 - DNA, 418 bp, Oryza sativa
  unsure (1)..(418): unsure at all n locations
agctcggccttctgattgatatggatgtctgtcacgttcgttgcangctacctgttcgacggaatgcaacaaggagacagcttttaacctggatcgtgttagctatcattggacggggctgccgacagagtacaactcggctgcaggactcaaggaggaacaaccacgacttgcagcagatgcccaaatcccaatttcgcgtgctgcctctttcttgtgattcagtttgcatttgcaaatgccatttacaggtacagctgttctgaatgctatttatactaatatccctttcatttcagagtaagttgacaaccctatgttgccttgacagatctggatataaaaaaaattctaaatatgccagcttacttttattgctttgcacaatagcagtattatgcctaccaaatagtagttt

SEQ ID NO: 47199 - DNA, 474 bp, Oryza sativa
  unsure (1)..(474): unsure at all n locations
tatgtacatgtccacatttggtgcanagatgtttataccagagcttttgtttctaccagaatcatgtcataatccacctccaaataaacagaacaatctctttttcttgccaactagacaacaagggcttcattgtttgccggatacttataatgagtcgtaacaaccgatggggacacaaaaccagttacgagacagcatcaaacaaacaaatgtaaaatccatcttcccacccgttatttcctgatgtcacactgtcaccgagggatataaaagtaagcacacacgcggtggtaatcctgatcatatccacgcactgtcccactaaatttccttttcatttcaaaagatgagcttgttacaattcatgcaaggaccacataaatactatatacagagtagtataataaaatataacacttcatatgagcacccaagcttaacatatggtgacgacagaactgaacatttaac

SEQ ID NO: 47200 - DNA, 393 bp, Oryza sativa
tatctcttacgctccaggaatggatcagtcagaacatcaccaccggctcgtctcgaccgccgccgactggtgtttccgcctgcacggctggcctattatgccgccgttgttgggcgtctacgtcttcaccgaccggcttgccttcgccgccgccgactggtgtttccgcctgcacggctggcctattatgccgccgttgttgggcgtctgcgtcttcaccgaccggcttgccttcgccgccgccgactggtgtttccgcctgcacggctggcctttatgccgccgctgttgggcgtctacgtcttcaccgaccggccgcctcgaccaccgccgactggtgtttccgcctgcacggctggcctattatgctgccgatgttgggcgtctacatct

SEQ ID NO: 47201 - DNA, 411 bp, Oryza sativa
  unsure (1)..(411): unsure at all n locations
agcttcggttccctttaagttctgggatgtatcatttcttactgctacgtatcacatcaataggctacctagttcagttatctcctttaaaactccctatgagcaacttttttctgaaaatcctgagttcagtcatcttcgtatcttcgggtgtgcctgctggctgaacctgagaccatacaacgcccgcaagctatctttccgatccatccattgcgccttccttggctatagcccccttcacaaaggatataaatgtcttgagatctctacaggccgtgtgtacatctctcgcaacgttgtctttgatgaaacaattttcccttntgctgccttgcatcccaacgcgggtgcccgcctgcgacgggaaatctccttgcttcccactcgactgcttcccgtcactgatca

SEQ ID NO: 47202 - DNA, 450 bp, Oryza sativa
  unsure (1)..(450): unsure at all n locations
ggatcactccatcatcagcaacagctagtactgaaccatcgttactggaatcatcaaacaccacatcgtcgtcgtaaccatcggtcctcgcgacaattcttccgcaaaaaccgcttgatccttgaacaactctaacctcgatcgccgcctccaccgcccccgcgagattggcgaaggtgacctctaccgagcaacgcttgcctggccttgccttcgacctaacctgcccaaccatgcaattcggccccattgtttcatacacaatgtatctggcactcaacaccttatccctatcagattgcgttttccccctaaccttgagatcgacttcgaattcgatacgctgggaagcagtgattgcacggataggtcctgtcaagacgaaagacgggtcctgcanattaaacatccaggttatttggttaaaactactagtagcaaacatatatt

SEQ ID NO: 47203 - DNA, 409 bp, Oryza sativa
agcttatccctggccaggtgtagatgacttattgtgcctttgataaacttgaccgtagcatcggtccacgggacctgtaacagtcccatggggtttttataatttcctgcattgcggtttttttaattacatttgaatcttgtatcacatgtaaatttgtctctgaccagagataacacatcgttgtgttgatttatattaatttatcttgaaggaaaaccactattaaagttaatcaagtataccagtaactatgaacttattgtattgtaatagtaaactcttgtattactaatcttatcaggtataggtgctgtggtaaatataaggatttttttctctcttttgcaggttgaaacaaaagatggattccttttatctcttcagcatatcccacatggcaaaaata

SEQ ID NO: 47204 - DNA, 145 bp, Oryza sativa
gaccttggatgacatgcagattcctccgtccgagctaaaaccaagcaatgcgccttttcaccgagtgattccaggattatccgcaactgcactcgcgcagatcaccctcccggtcacctttggcactcgggagaacttcccacag

SEQ ID NO: 47205 - DNA, 340 bp, Oryza sativa
  unsure (1)..(340): unsure at all n locations
agcttctangctatgtacacgtcaggcgtggatgccagctacccctcgcgctgtggatggcgacttcggctccccatacagagtaccgttgacacctatgccttcttgacatgcgaagcggccgttggctctcccgacgcccattaatgatgatggagncgacgacaacactagtcaccacactatttcatgctttgatctggccttttgggacacagagatggaagggcctgacgtgggagagaacagaaaggggctcacaggtggagcccaaattctttaatatataccggctgactacaccgtcatgcgagatcaaaaaaacactcagattgggcta

SEQ ID NO: 47206 - DNA, 419 bp, Oryza sativa
  unsure (1)..(419): unsure at all n locations
tgatctttaatgactatggcatggngccatcgngtactttatttctaatagtcaattagaacagatatttatgctgagttataatatgatgacatatgctcctggattttcaattgaaatactcccatcactcatagaaccaatgcctatcgtcaattacctcaattccattattagcatctgagtcattagctcgttcaaccatatgctcgattaatgatgaanatctcttcaaagggaaaaccagaattagatatctcacatgcagaataatcaggattcagaaggccacatacgttgatatgtatgatcaataagactggatatacttaaatatagtaacttacaataaaaatacgctcagaaggcaactgtaattcccagctcttgacatatacagtaccatgtaccaacataat

SEQ ID NO: 47207 - DNA, 416 bp, Oryza sativa
agcttgcataataaaaacaaaaattatgattatgatgccaggtagttcgtactatcaaattgggatcaagcccgtcgcgcgtgtaaagctaaagccctggaataactgatgaaaaagtagaagaaaacagagaagagaagggccagcttgctgattttcctttcggctttgtcattgggctgtaagctagcttagcgggcagcagcaggcttggcccaggcgagcagtgcgtacagtaagatggaggccctaacacaagttttttgagcctagaaccgcttcgactcggctcaggtaacatatgaaattctttaagtttgtttatcttttggtaaagtattagaaattattcatcgcgttgcatcatatatatccaaaaagaacgttataagccgtgtgtataacactatgacagt

SEQ ID NO: 47208 - DNA, 478 bp, Oryza sativa
  unsure (1)..(478): unsure at all n locations
actcaagcttgaacaagtaggacacagagaagaattgcgttaactgtatctccattgcagaataatttgatggaatattactgtgtaaggaattatgcactcctaccctaaacccttgctactttaccttccagctaccaacagtattttgatatctgactgtagtacttttctaatggcttttgattttctggttaacagatggttgattttgttagggaaggttatcttggaagtagccatgagttccgtaacaggtaaattgatgctctgatctcttttactgtggcaaattaatattctggacatttgaatgatatgctctgcattatcangttccagaaccccattgaaaatgggcagcacacgaattctacatcagatgatgtcaagatcatgaaccaacggtcacatattctgtatgaacaactgaannggattgccagcgaatggacatgaacgtggtgaagaatgatct

SEQ ID NO: 47209 - DNA, 410 bp, Oryza sativa
  unsure (1)..(410): unsure at all n locations
agcttagcctattctacaatgtctcaattgtgttatatgatgttagctctaggtataggttcttatcaagctgctttattccatttgatcactcatgcttattcgaaagctttattattcttgggatccggatctgttattcattcaatggaacctcttgttggatattcaccagataaaagtcagaatatggttcttatgggtggtttaagaaaatacattccaattacaagaacttgttttttatggggtaccctttctctttgtggtattccacctcttgcttgcttctggtccaaagatgaaatccttagtaatagttggttatattcacccttttttggaataatagcttcttttactgcaggattaactgcggtntatatgtttcggatatatntacttacttt

SEQ ID NO: 47210 - DNA, 342 bp, Oryza sativa
agctttcgagttcagagagaaaggttttttattggcttccaattgaggcccatacacaacagtgatggaccactgcagaccctcctctcgcatggtcacagttgcagagacagagaattggcccaggacaacatcagagatacagaaaaagttttcattgcatgcaagaagcacaccgcccctgttggcaaaactcaggatcaaactacacacgaatccctggaaattgacaatgcttgatgttgaacagtggaagaaaaaacacacgcgagaagtttttgtgccgccaaacttacgcagcttttctgtgtatttcatcaccatttataccaagggaaaacg

SEQ ID NO: 47211 - DNA, 368 bp, Oryza sativa
agtagtatctagctggtggaatatgaatatagtatatatcggagtccggaagccttcggaagagttcacgtatggctctagcagctttcctttcctcttttgtaagctatgtacttttattagaatactcttctaaatgcatctatggtattgaaatactttccgagtatatgagtacctattttacattatgtgcttgttatactgaatatacggccagcttatctgggagatgctttggtgcgggtataatggttgtttatgcaattactctatgtcatcacgatgatattagagtagtatctagtaagttagacgtggtgtctagattacgggatatcattatttgggggtatatattacggatg

SEQ ID NO: 47212 - DNA, 397 bp, Oryza sativa
agctttagaataaacaagattcattttattattattggcatgaaagcaggctgcacaacctccaactttttatgaggatcaagtaccaaagcataacaatataggtgcggaatagcagtgaagtatttgagaaatttttcttccatgggttgaacaacataagctaaaactctgtcatgtcggttttcttgaaacacaaaggacaatttccaaatacattcaagcaccttacaaagaagtaggatagtaaattctagatagtaggactgtagttttataaaaaggctttagaaatatatgcagacgtgttgctatgtcccattctcccttagtaagaaacaaaatctcaccatcaccatcctcatcagtatcattacttctaaagtgcaatgaatcg

SEQ ID NO: 47213 - DNA, 340 bp, Oryza sativa
  unsure (1)..(340): unsure at all n locations
aatttctgtttaaacacttcatgttttcttttagctctcagagaattcatgagacttccatctataatcctaccaaacttctggctggttcgctagttctatgtgatctggatttggnttgtgtaacactaacatccattgatattctgaaattttcaggcttctatgcatctacaggtttctgtaattgataggttaacaagctnttctaatttatttattttttggtgaatggctgctttgctggatcaagcatcatgagtgaatagtcctgatagccacgttntcttttttttttttttgcaacgcatgaagaaccatatgctctcatttaatttca

SEQ ID NO: 47214 - DNA, 407 bp, Oryza sativa
agcttaacagaatgattaaagcaagtggtctaacattgggggaaaacaagtgctttgaggaaacagtaatttaaaagcatggagcaaataatctgaaaagtaactaaacaaaggagacattcatgcaacctatgtacgacccatggtacaaagagatcccctcagttatcacgaatggacccaaaagagtagcagaaccgttgaacatatcacaatatagtttttccacgggtagataacgatatatcaaatccttgccgacacaaaattagagatgtcataaagaaagtgatatgcccatacacagacagaccagaacaatacgattgcatgattacaatgacacattaagaaaatgagtgcaattaaaattaactgcgacaaagtttccatgagtccttaccacc

SEQ ID NO: 47215 - DNA, 264 bp, Oryza sativa
tactggggtcattagctataaaataatgaacaattcacttgatagatcgaatgccatccgggtctaatgaccccaatgatagtactgcagcttcgcccctgatctcttgcagaatgaaattccatcttgatcagtcatcttgtctagtattcaacactgctacaatatatgcacttacaaccaacctgtgatttgtacaccaattcacccaaagaatctaaaatatgcatatgtgaaaaaggttctgtgatcaaatatatgtgc

SEQ ID NO: 47216 - DNA, 428 bp, Oryza sativa
  unsure (1)..(428): unsure at all n locations
gacctcaagcaccgcggctgcagctatccaaagagaccgagtcaatttttgcgtttggcaagttatctattaattaggaatagctcgttagtttccttttatctttaggaaagtgtgtttagtgtcctataaagactttatcttttccttttatctttatgaaagattctttttggtccaacaaggacttgtatcaacccatgggtataaatatgtacacccggngtctatgtaatctatcttcacaatcaatacaattcggcgcatcgccaccttttaccttttctactttatttttatcgtccggcgggacttggcacctgacgcggggctgcatcggtgttcgatctctggctaaggggtaagtccaatgttccactggcctangtagatgtatcgnttatgtcggcgtcggtcaaggctgcatc

SEQ ID NO: 47217 - DNA, 431 bp, Oryza sativa
  unsure (1)..(431): unsure at all n locations
atggacgtgaagaagctgtccaaggaggcgtgcatccttgctgcgcagttctattcgcctcccgctccgcgtcgtcatgcaggtggtcttcttcgagcagctgcgcgcggcagcgggggccagcccggcggcggcgaccggcggcattgcgcggcgtctggtggaggaggaagacgaggacgacgatgtcagtagaggcggtggggattggagcaagtcccgcgcgctgccgacgccgacctcctcaacccgcgagcgctcgccgtggccgccgagctcgcangaagaaagaagagggagatggtgtgagatgacgccacatctgacggnggaaacgagacagcgtgagatatgagatggaaaaagggaccgccgcggcatggtttcaatcttagaacatttcagtgcatatagctgatatggtgaatagt

SEQ ID NO: 47218 - DNA, 414 bp, Oryza sativa
agcttctcttactgaagggggggaaagattgttttttaatgagtacaaccacagtactcatcaagccacaccggcagatgcatgattaatgcaagggggtacaaggggtaataatatacgggttaaattttgcagtgaacagcttataaaagtcacttagttgcccaaagccattttataaagacgatcctagagctacacagtgttattaatcaaggtcgtgaaccctcacgaacctgccttaacccaaggcctacgatgattcaaaccgaactggcaacccgaccctgggtcccagctcgtcccaagccaacccaggccaaccattccacattttagttgttaagcaagttttaagaattaaaacgcttacttgggtacattgctatgcatgcccataaccgagggcgcggc

SEQ ID NO: 47219 - DNA, 506 bp, Oryza sativa
  unsure (1)..(506): unsure at all n locations
tcagcttactgttggtacctttaaatgcatggaccaacttctttaagttgtgttagagcggtataaaaggagttttaaagtattgggcacttgatcacgcgcacttttgcctaaccaaaaaatttctaagtccctaaaagaacgtgacaggccacgcctgaaaatatgggctgcagacatattaggcctagacccaaaatatgcctactgatacccttagaatacgatgtgtgtaacgccccgattttcgttcgggattaaaaatcatttaataatccattttctagaaattaaataaaagttaaatcaattcaatcaagtgaaattaatggnggaattaaaattntcccttataaatcattggccgagaaatatttgtaatattctntgtgccctaaaatactctccggattnttccgcgaatgttcggagctcaagaagaatcttaaagcacaanattcnctaatcaattaataaaaagaaaaccaataaaaatcctctcctcc

SEQ ID NO: 47220 - DNA, 419 bp, Oryza sativa
agcttaccggcagggttttttctggcctactgcattgttcgacgccgacaaaattgtgcgcacatgtgaaggttgccaattttttgccagacaaattcatctaccagctcaagagttgcaaactatcccgctgtcttggccgtttgcggtttgggggctcgacatggttggcccgtttaaaaaggcaatcggcggttacacgcatctctttgtggccattgataaattttccaagtggatcgaagctaagcctgttatcacgattacagcagataacgctcgcgatttcttcatcaacattgtgcacagattcggagtacccaatcggatcatcactgataatggcacacaattcaccggcggagttttcaaggacttttgtgaagactttggaattaagatttgctacgcctcagtac

SEQ ID NO: 47221 - DNA, 472 bp, Oryza sativa
  unsure (1)..(472): unsure at all n locations
gtatatggtaaactgtgtaatttaatgacaagagaagggaagtcatcttgaaatggcaaaacctcttcataactcttttcattcactgcgttcttagtgatgctaaatccctagatttgatagatttaagatgagggctgggtagtgatgcatgtagtttgtcggttactttcaagagtttgttggatgaaatatagtatgtctagctggattaataatatgataggagggatgtgagttgggatttatgtttgttaaggatttagcacatgattaaagataaatcctagtagctactgtcaaggaattaaaatgctcttttgtggaccatcaatcgattgaagttattttgcaggttcgatgttacatgtgattatttacgtgaacttacgccttgtgcttctctgctntctatcatntttgtcattggcttanacatggagtaacagcttacatngtcannactatgtgt

SEQ ID NO: 47222 - DNA, 419 bp, Oryza sativa
agcttctaggcttcaagcgagtaataactattgatctccaatggcacaacctttttctgataagacaccattagtctatgtttacattcctaatatgattggtgggcttatgcttaatacattacgtgattactaaatgtattggaaaaagttatttgtaataatagcaacctgagagaactagaaaaaaaatatttgggtttttttttttgtaataagagtaacctgagagatctagaaacaaaatactctaatagttttattcacctagtaggtccatcctcttccgcaaggtattaaagggagcagaataaatgtatcacctattatcctattgttcaggaagaagaatgctttgtttcatgatgcatttttctttttttgttcatagacaagtgttatgctctatatttttgtga

SEQ ID NO: 47223 - DNA, 477 bp, Oryza sativa
  unsure (1)..(477): unsure at all n locations
tctgtntaaaaagataagggtaaaatcataaaanaagatatatggaagtaatatcatgtttatagttgaaaacagggttaagaatgcaaatgcccttagtataattttagaaataaaattttatttgatgaaagttaatatcattagtttgacatttgaatgtacttcacatggctataactaattntgttgctacaaacactgtatgagaaaaaggacaccctctcaagctcgatcacctcttatattttgggataagggagtatatattacctctcacatttatttatacacttctcatccagttggaacagtaagatcaaattccaaagctctggggaaagcatcatttctttgctgggataaacagtactgtattgtaaactactagtgcagagtcacgagcagtgcccanattaagatgagtagtttattgtaaactagtgtagaggtcgagaagtatacttacttttgtaa

SEQ ID NO: 47224 - DNA, 333 bp, Oryza sativa
  unsure (1)..(333): unsure at all n locations
agctttctcttccttgaanaaaattaaatgttatggagcttactgtgggctgggctgggctgggtgcctgnggcggcctanggctttagcattgtgcattgttaatgtttgacttgtacattgagttacctctagaaaaacttgaacattgaactgtangtattgacaggactacctttaaaatatacattgatagcgagacttcttttatatagattgggaaagttgacaatcaacacaattaatttcacacgatgtggagtgaatgtgatatatcacctaatttaaagggcatggttttaaaaacaccatttccaccctaaaagatggata

SEQ ID NO: 47225 - DNA, 372 bp, Oryza sativa
  unsure (1)..(372): unsure at all n locations
cgctcgcacactcggatgggccgctgtttatgccgaatcaaattaacaaggcccacagaattatatctgtgtattaggcccaacgaattangccttgaggaatngaggtttctacttaaggccattggaccattatcctccaacttgcctaacctggaagtcgagtagcagccatgtcaaggttgattattatttctttctcgaatgcgcaaaagaattgcatgttaatatattagaagaaaaaaatatttgttacacaacgcattaagctagaccgacttataccaagagaggagggaaacaaaagaccaacggaaaataaactcgatactacgactccaaacagtgtgaaggggacatagttcactactc

SEQ ID NO: 47226 - DNA, 397 bp, Oryza sativa
agcttcggaggatccctacgctttctattttctggcgatgaagacgatggcgctcagtaggtcttagttacggtcgttgcctgtggcaatggcgtgccgctgccttaactccgctgtcttatctacttttgcttttgggatgtattccggaccgttcggtcctatgttctaagactatgcctgcgggcctatgatgtaataattcgcactagactctcgtgtatgtgcacttggtatttcagctccgaactcgtgtgtaccagactaattgatccagggaaatagtaccgtttacatgcttgattcctgttataaaaacgggggtccatatgccgcgaagccaacctagcctctggacacctttcgccacacccacacccttcgccacagtaccaat

SEQ ID NO: 47227 - DNA, 356 bp, Oryza sativa
  unsure (1)..(356): unsure at all n locations
ttataggttatagactgccctcacattattacacaagtcttttctgcacactntgtcctcagtagtgcgcacccgggaagaatntcccggtcggtcacacatcccaaattgctccaggccaaacacgcttaaccctggagttctttggagatcggctttcggaaaagaagttgcaacaagacctatgccgggatgttacagctaggctcctcaagccctcgagggacacctccactggtcgacctcctcctcccaagcccattggcgactgccaccgacaccttcatttgggagcttgctagcaacactggctcctcgagcttcaagcatcttgcttttacatgcttgttggtatt

SEQ ID NO: 47228 - DNA, 93 bp, Oryza sativa
cccgggcactttagagtaacttacattccgaccatccagcaaattatgcattccgcgaccattactgctcccgccaattactgatccccatca

SEQ ID NO: 47229 - DNA, 409 bp, Oryza sativa
agcttagcttgatgctcttcagaagttgtttcctctttttacggtcatcactctgattctctgaatatctttgatcatctagtagttgttcattagcatttactatccggctaccttttcatgtctttgtttttgtcgtattttttgcaccttgtttcttaggtagtactactactcttagcaaattaagaaattgaagttagtaaacgaattttcagagaacttatccagggttggcaaggacatgatggttgaaatggatcagtgtttggtggttggtgcatgcagcggtttgtctcgtgctagtatgtagaacagtagaaggttgtatctagcaagttggactagattattttctttatagactatcaactaccaataccattgttccattccttgttcgttgttt

SEQ ID NO: 47230 - DNA, 358 bp, Oryza sativa
  unsure (1)..(358): unsure at all n locations
agaacgagaggaaacctcaaggctgggtgggcatgttcgtcggctccaaacttgatcggacgatccacctgcttcgtcgttcgggcccagaagcttccgaaccagaagagcccctcttgctcgatcagcgccttccacacgccgccgtcgtcgtcgtcgacagcgaagcacctctctttccaccaccccttctcgtcgtcgccggcgccttcggtgatcccgccgccgaatgcgccttggaatagatcgtcgtcgtcaaatagcttctccagctgtttcttcacgcctgcagccgggtcgaccgtgctgcagnctctctttgccnngcgcgncccgcgcgatgatgatgatcttctcc

SEQ ID NO: 47231 - DNA, 414 bp, Oryza sativa
agcttaaggaattagtgggggataactttatagtaagataggatatgcttcgtgcttgtgcgcttcttactgcacaacaaacttaatttttctccatctgcagcttaagcttgttttctcctaaagataggacagagcaaacaattctgtcccaaaaattaaaggaatattttgttgaaccaggttgaggcaataagagatgccaacctttttttttatttgccattaggttgaggtgagaagagatgccaaccttttttcttatttgccattatgttaaaaatagttatattttgagacagaaggagtaatagtagtatgtagttaacgcctagcacgtggaatacactggaacggacattaacttagttaacgcctagcgtcacggtgttctctcctctatcgaaatctacc

SEQ ID NO: 47232 - DNA, 363 bp, Oryza sativa
  unsure (1)..(363): unsure at all n locations
cactaacttgacaattaccgccatttggaacagcggtattcatcagtatatggactttatcttaattcctgatataactattagatcgaaatgcaggggattcaacgaattgaacccttgccaaattgatccatttaatatcgacgatntcccttcagttggttgataactctaggctatgttctactgattgcatttttaaatcaatggatgctcattttcctcattgcctacatctttagtgttcttagttcttaccacctgtggttgcaccctattttctatgctctatttaagaaaatgtgatgcctgataccttggttttattcttctgacatgctctctccattgatatagagacac

SEQ ID NO: 47233 - DNA, 411 bp, Oryza sativa
  unsure (1)..(411): unsure at all n locations
agctntgtttcgattatggctaaagagtttagtttgaggtttagccacccagaatgttacagacatggatcaaaacatgggtgagttgctaacaccaaagtttacatgcatttaattattaataacacattcaaaattttgtgtctccatgatatgtgctggttctagaaccgacaccaagaaggaacaccgatgagagatggtcactagtgccagttctaaaacaaaaccaacacttacagtgctgtctgcgattttgattttgcttacatgtcatgttgaagatccattaaactgagcaattaatcttagcatgtggcagctatgataaattcattcttgcgccaagaagcatgcataccataactggaagttattaaaccatggtaaaattggaaagacgccatttcg

SEQ ID NO: 47234 - DNA, 407 bp, Oryza sativa
agcttgtagtacgtccacacggaggcattttggccaacagcttatgcagctataaaatttaaatttaaaattttaattgtagagttgatttagggcttttcttcgtagtttttttagcattgatttttaatcgctaaatatacatataaaaaattatctatgaattttcttttatgataagtcattttcagcgttaagccaagcgatgtgtttgcaactctctctctctctcttttggtacagacgcgttgagctcaagttgccgcatttgattctgtaccaacagagaacttccaaggaaagcaagttgaagccttcagagttcagacaaaatgaagcaaattgtttagtttttctcctcgtgtattatgcagttaagcaggcgctatgttgcgcgtaaagaacct

SEQ ID NO: 47235 - DNA, 352 bp, Oryza sativa
  unsure (1)..(352): unsure at all n locations
atatgaaagaatgggaagcttctgaatcaaacagttctatcgcgggtacggagntgacagagaacatacccatcacaacgtctggagcatcctgagcggtttcagcttgaatgtggttcacccggcctcgaccaaagttgttggaagcacgtgaaccttgtccacttgcctgagagctaggacgaaactgagctgccgctggagtaggagttctggcagtgctgccattagcatgccctgagttggtgttggtaggattctgagggcactgtctggcatagtggcccatctggtcgcaccggaaacactgaactgttgttggtccctgcggtgacttgatagaagtaacact

SEQ ID NO: 47236 - DNA, 405 bp, Oryza sativa
  unsure (1)..(405): unsure at all n locations
agctntgagaacaatatcataacatntagtatattatatgaaaaatagtagaaatgattgtgcaagatatttttatcaataagatcaattatttagacctcctatacatgttactactttgggaacaatcatgagtatatttattggttcactactcacgagaacgtgtttacactcatggggtagtatgaccctacgaagtttcatattaatgtagtagggaaaaatataagattatcgctcttgggaggctacaatcaagaaaaagaaaaacacaccaccacgtgctagtgactacttagacaccccaggagaagcactagcacctagccagtcgctgctatacaagaccgaacactgctagtcctacacaaggttgcaaacgcccctcccagcaaggcaaca

SEQ ID NO: 47237 - DNA, 467 bp, Oryza sativa
  unsure (1)..(467): unsure at all n locations
taacatactntacgagtgcaaaactatgtctctatctatctatcttctattatatactaaaagtccattaaacatcctataaacgctctcaagccaccacataggattcctaataacgctcatatgccgccacgtggcgttctagtatattagaaacatctagcccttaattntcatttaaaccggtgggtccattattttagaccattagattagatcacactataataaatagatggacccagtatttntaactattagatttatctttaaaaaaattaaaaaacatgtaatccatctcgctcttcttccccgttagcccatatatatggtacgtatatcctccacttctcatgccgatggcccaagagaaaaaggcagagaaagaanaaacatgtatgtacgctaaattgtacacaatattcacggaanaaaaanagaagaaaaagtatgtacgtacatacccc

SEQ ID NO: 47238 - DNA, 415 bp, Oryza sativa
  unsure (1)..(415): unsure at all n locations
agctggcaggtgcaaagaagcaagtgttatcttcttgggttggcaacggattgggggatgagattggagagcttanggagtgcaaacagaagcttaatgagcaatgcagcaggcagaattggccaaaacctatctttaagtaagatacctcctttaaccatttcatgtagttctgtttaccagtattttacatgaattttgttcatatagcactactcttgccatgcttgcacaatgtagggtgatagtaagccttccaaaatagaagtgctatttgaatttcaaactttacattgctgattgattgtagataataaactttcaacttaaatcaatgtttttgtcactgaaataggcccactttttaactctgtaatttctgcaaatagtccatcttatgccttgaattttaaaa

SEQ ID NO: 47239 - DNA, 384 bp, Oryza sativa
  unsure (1)..(384): unsure at all n locations
atcagagaggtactccatccagagtggctagccaatctagtcatggtgcggaaggtcaacgggaaatggagaatgtgtgtctattntaccgacctcaacaaggcgtgtcccaagaatcacttccctcttcctcgaatagaccaactggtggactgaacagccggttgtgagttgctgagctttctcgacgcttactccggctaccaccaaatcagcatggcgaaagaggacgaggagaagacggcactcattacgccgttcggggtattctgctacgttaagatgccgttcggactaataaccgcaggaaacactntccagtgcacggtccagggcgcacttagcgaccaactcggaaacaatgtcgaggccaacgtcgatgac

SEQ ID NO: 47240 - DNA, 416 bp, Oryza sativa
  unsure (1)..(416): unsure at all n locations
agcttctcaaataggaccaaggcaaaaagctctatatctacttattntgagacagttttgaatgccacaaatcaaactttttcctcatgtaagtcacataaaacaactttctatgtgctcatttggcaacagccaaataaatttctcttcatattacttacacactcaaccagcatcttcattttccattctccaaatcttctagatcccatatgtcaatgtctcctcccctgttcttctctccgtcatgtgtctacctctatttctctcttgtgtgatccatgacatcatgggctatgacggaggtaggcggacactactacagaaaagcccaaaggcgccagttctaaaggtcctatcttataaaccgatttcagggttacaaccctgactcctcattgggccacgtagcacca

SEQ ID NO: 47241 - DNA, 474 bp, Oryza sativa
  unsure (1)..(474): unsure at all n locations
gcagatccctatattcggaggacatcaaagatgactaaatatgcacattcatcgtgttttcaaacattccattccattcgcaaatagtgtattggttntgaaaactgtttggaaaccgcgttactcaccacacagttttcanaacctgctttgacggcctaatgcggttcaacttcatagtgtattgttgttttatttntactttattaacatctgaaacaaaattatgggcatctcaatatggtggaatgctaatgctccaccatgaaacttggagcctcctccagctattgcatggatgtactactcaatcttaactgataactctgattaataaagaacacgagcgtacatctgccgtggcatttgcctatggatcacacaaccaatacatcatgtggatgcaacaacgacacatagaaatactctaagattgaccctcatagatactaaatgcctcattggtagtactct

SEQ ID NO: 47242 - DNA, 408 bp, Oryza sativa
agcttctcttactgaaggggggagaaagatattgttcttccacagtactcagcaagccacaccggcagatgcatgattaatgcaagggggtacaaggggtaataatataagggttaagctttgcagaaaacagcatttaaaagtcacttagttgcccaaagccatttataaagacgatcctagagctgcacaatattattaatcaaggccgtgaatcctcacgaacctgccttaacccaaggcctacgatgattcagaccgaactggcaacccgaccctgggtcccagctcgtcccaagccaacccaggccaaccattccacattttagttgttaagcaaattttaagaattaaaacactgacttgggtacattgctcggcttgcccataaccgagggcgcggctatt

SEQ ID NO: 47243 - DNA, 215 bp, Oryza sativa
  unsure (1)..(215): unsure at all n locations
ctaagacgtacgtccccaagagccaaccttttgattgcttcactcgggtcctcctcttcacctaacacatgtgagtcaatttgctctacttgagagccattagtttcgtcaaatgtcacatcacgcgcgatctcaacaataccggaggttntgttgaaaacgcggnatgcgcattcatttgacccatacccaaacaagaatccctcatccacttg

SEQ ID NO: 47244 - DNA, 426 bp, Oryza sativa
  unsure (1)..(426): unsure at all n locations
agcttgtacagatagaagaaaatggcatgcacaataataatgttgnttctcatatgaactgaaaagagaacttaaattccagctctctaaatgctttctggcaaagtcatgtcagggagaacctaaaaaaaaatgtctcttaaatttcggatttgtctacatgttcttgagttggtcatgaacaaacaagagatcgtgaatctacaaacgttctcagcaaaaaacaaacgcactaaaataaggcatgtgttacacgttcccgcatcaaaaatatacccatatcctaaacggttgaaccatagccatccaactacgtactaccaattattctacaaatggtctcaaaatctcacaagatatcaaacaagatcacggccattccacgctactactgtttgtacacatacaaaaatcagggggcggatc

SEQ ID NO: 47245 - DNA, 363 bp, Oryza sativa
  unsure (1)..(363): unsure at all n locations
accacaccactctacaatggaggcttctatctgttntttctattatggctcctaggttattatatattagctggtgttaaatattttattcttagatcaagaactttcatagattggaccttgtaacaaccaaaaaaacacatatatactctaatctcctggtgatcccactatcaacttcacactctcattnttcaacccccggggcgaatctacatgataaggggccggtgtcaggcgacaccgacgactttcagtaaaacctatagcacaactacttatccatatattacaacaccatgatctaaacataagtaacatactatgacgctgatagacatgctatgacactaatgaatcgat

SEQ ID NO: 47246 - DNA, 409 bp, Oryza sativa
agcttgtcacatgaataccactactttctttgtccagtcggcaaccctgaccccactgagttcatcatcggtgaaaccaataagattcctttcagactatccaatccagatctaggtcattggaagaacacctttaaatcttggccgtctctaaaaaaaacttcacccgagaaaagttggattacatggttcaagcgtatgtcagctagcaaacgagttcactggaacgaaatcggaatcggccaagcacttgacctaaccatagcaaactcagccaaagaagaacctctaatggctgctgcttcttacttttggtccaacactatcaatgccttcttattcaaccaagggccgatgaccctaactctcatagtcatcattatgatcacgggtctagatgtcacttcat

SEQ ID NO: 47247 - DNA, 316 bp, Oryza sativa
  unsure (1)..(316): unsure at all n locations
atagagcagagaacaataaaatgagatttcgcttgtgtataacaattccttcattaattggnttattccttccctaccagattatgttcttctgcagaatatctatttctttctaatcaagtgattactttagtcaactcccttcaaaaattcatttcatcatgtaaaataaagcatatacatatcgcaatgtaccacctagaatctcaggctgtagacgacattcatttcctaatatattagaaattaagacagagtactgaagntgaatcaatcatcatattcaagtacttctttatgaagggcatacacatgt

SEQ ID NO: 47248 - DNA, 413 bp, Oryza sativa
  unsure (1)..(413): unsure at all n locations
agcttaagggtacgaataanaacttaactttagtctgtatgtacacgttgtaattctattaccaatctctctgttcagtgagttcacaataaaaacgattgctttgggtggccttcggttgtaacgagctgggttttggattctacagtcaggcgtgtcaatccgtgttcggttctgctactttntgttgtgccatgcatggtggccatggaccaacatcgtgcacgtagtgtcgaacgacgatggatctcgctgcttcgtccgtgtgcgaatcggacacatgcgactgacgtaccaagccacggtaaaaacatcttccccatttttataatagtagagatagagatgtataaaaaatataatacttatatgaactttntatatatacacaaacattatatggggagtggatt

SEQ ID NO: 47249 - DNA, 358 bp, Oryza sativa
  unsure (1)..(358): unsure at all n locations
atattacgtctgtattcgtatataaaagttgatttactatatattaaagttgatttattntaagaaccgaggaattatatttaaattgtatatagtatttgtatgtatacttagaataccatgtcaggcagcctagcccaaaaacttccaaaatatatatgtgtttaaattcattaatttctatatgaatgtaggtaatgctagaaagtcttataatataaaacggagggagtactaatttttaattgagtaaatttcataaaactacagatattatgaccaaactatcacaaaactacagatttaaagaagtgtatcataaaactacatatttatcaccaaatttattacanaacta

SEQ ID NO: 47250 - DNA, 416 bp, Oryza sativa
agctttctttggagcatcttttgtatttgtgatagcttcccaccacgtcgacactgtcgaaaaaacctcgtgttatacgatgaaagttgtagaaaaagataggtattacaagggtggcacataaccatagattttatggtctaaatatttcaaaaaaaacccactcttctatattttgagcacaattttacttaaaattttaaaacataaaatgtatatgaagaaaaattatttattaagttcttaactaaggttgatagtttacttttttccctgcttaaaaaatagctctaaatatgctgcaattaatcaatattcaaatatatatagggttttgtgaaacttgataactatatgtagccttacgtgccataagtgataatatatttggttttcactcattgcaatgcacatgg

SEQ ID NO: 47251 - DNA, 470 bp, Oryza sativa
  unsure (1)..(470): unsure at all n locations
attctgactcttaatctttagatcgatgcttattcttctcagcagacttgtctccaaattcaggaatgttgattattggtacaaccttaaagggaagaacccattcatctttgacaccatacttctgtctcaaagctggctttgcgactaaatcctgtagtgccatgaaatcatctggagaatcacttgggacactagtcacaatgccagtacctttatctgttaagatagtaagcatgggaagtgcatatatgatctcattgaaggcaagaggggatttcagtggtaaaccaatcagatcacaaccagataactccattaagcaaagtggtnttctgggaccctcgatagattctgatatgcaagattaagagcagcccttgatgtaacaatgaagacatcagtgtcattgatctcaaaggccccatattntccatcangcaataccccaacagttgtctgcccataca

SEQ ID NO: 47252 - DNA, 389 bp, Oryza sativa
agcttgcgccggggcacgcccttcttctgtttttaacggcatcatcctgatctccgcgccaccgcaggagacggcgtccaccatggcgccctccccgccttccatgaaccgctccggcacgaactcgttcgggtccgtccacgccgttgcgtcacggtcgatctccgctaccgcgtagttgacaatggctcccttggggatcacgtagccaccggcgccgagcgggacgtcgcggtccaccgtgtgcgccagcatgtattgcgccggcgggtggaggcgaaaggatttcttgcccaccgccttcaagtacggcgatggcgagacgcccacgccgccgctgttggtggtcttggcgatgtcgtggcggagcttccgctggatgttcgctg

SEQ ID NO: 47253 - DNA, 176 bp, Oryza sativa
agcttgtaatcggtacagttcagacgagaattatcttgcctgaagtcctttgcgattcagctgtttaacagcaatctcggtgcgctcaggtggttcatcggaattcttgatgacacccctatacacacattcaaacccaccctcaccaaccataagagaccgggctaaaatgcgag

SEQ ID NO: 47254 - DNA, 407 bp, Oryza sativa
agcttgaactggagccatgctctactctctttgagctcatcggcaagccgcatcatctttctctccttgtcgagctcctcctacgcaatcttagcctcccgtatcatcttcaccgcctcgccacccctgccatccatgccgccggtggcaacgaagccgctcctcacaagctcgtcggacagttgctgcgaccctactagttcgccatgaccgttgcccctctcctcgtggggttaggtcacttaggagtatgtctctctccctgtccggcttgcagcatacacgtatccgcgctttgctcgcctgcgtgcactcgccaagcgatgactcgccctccctcgttgaggccacgggtgctaaagcatatggtgacgccttcttcgcacacctatgtcaccaccattttc

SEQ ID NO: 47255 - DNA, 410 bp, Oryza sativa
  unsure (1)..(410): unsure at all n locations
aagccttcatattaatatgatntagatgatggaaacaccctctactagtacatattaaacaatgaacatccttcttaaatatcgacaagcctaggttgatagggctctcggacttcgtctcaggtggcaaatcacgatagggcctacgcggtccaagccttcctctcggtgcccctcctttgattccgcatcctcgctgatggcaaaagggaaggaaacatgtctcttatcactatagtgatgtctatgacagtagaaatggtatagaattatttgctattctacctatgtgacaactactatatccgcggaatttcaatgaagattagaaagactatatgtcgcgtgacaagatcaatcacggagtgtcttggggcgattacaacttgtcggatgcagtcgcaattgta

SEQ ID NO: 47256 - DNA, 409 bp, Oryza sativa
  unsure (1)..(409): unsure at all n locations
agctntatcgntctatgattggtagcttgttttaccttaccgcatctaggccggatatcatgtttagtgtttgcatgtgtgcaaggtttcaaaccgctcctaaggagtgtcacttagtggccgtgaaaagaattctaagatatttaaagcattcctctactattggcttgtggtacccaaaaggtgctaagtttaagcttgttggctattccgattcgaattatgccattgcaaagtggatagaaagagcacatccggtagttgccaaatgcttggtagatcctttgtgtcatggtcatccaagaaacaaaactccgtagccctctctaccgccgaggcggaatatgtttcggcgggtagttgttgtgcccaattgctttggatgaaacaaatattgttggactatggc

SEQ ID NO: 47257 - DNA, 333 bp, Oryza sativa
  unsure (1)..(333): unsure at all n locations
acacacttatgcgcatgcttactacagtaattaattctaattaacaaagaaattagcaacaacaaccaanaaacaaaacaagaagaagagcaaaatctgagaggaaagctagctagctgccgccgccgccgtacgcaactcaccttcttgctgcggcagcctctgagtctgcgcggccgcggcggcgcaccggcggccatctctgcagccggcgcccagcagcagcagcagcaaaggtaggaggaggaggaggaacagacngctgccttccaccattgcccttcggcccctcccaatactgggcagcaagcaagctacagagagcttttggta

SEQ ID NO: 47258 - DNA, 414 bp, Oryza sativa
agcttaaatgcaaagatccaatataaataatatgtgaacaacatggatctacaacatgcacaataaatgtataggatttgctccccctaaatatatgcatacaaataaatatacaagagatgcaagtgtatgcataattagagaatgatcaatgggggtttatcctatacacatagagaaggcatatgtagtaatgatgtagaccagcataaaacacatacattcatgatttccatgttcttaatgtaaatgagattaaataagatacaactcgaataaacgttagtctcacacttatataacaataacatggaaatcatatatatgaacctatcaaaaagtaggagataagaagtggtacataacgttttatctccatgcatttcatcaccaaagaatgcatatctaccacat

SEQ ID NO: 47259 - DNA, 470 bp, Oryza sativa
  unsure (1)..(470): unsure at all n locations
accgcacccacatccatactacatccaatggctgaacaacagtggtaaggcgaaggtaacaaaactggtgcacattaattntgcaattggaaattaccatgatgttgttgaatgtgatgttgtgcccatgcaagcatgtaatattctgctaggtagaccatggcaatttgatagggattctatgcatcatggtaggtccaaccagtactcttttctgtaccatgataagaaaattgtgttgcattccatgtctcctgaagatattttgcgtgatgatgttgctaaagctgccaaatccaaatgtgagagtgataaaaaagcccaatctgatggcaagaaacctgagacaatcaatttgaaacccaaatgcttacttgctactaaatctgatattaatgaagtgattgcatcaccttcagttgcctatgctttggtatgcanagatgctntgatttcacttcacgatatgc

SEQ ID NO: 47260 - DNA, 419 bp, Oryza sativa
agcttgtagcatccagcacaaaaaatgattggcttacacagatcttgactcaaaatggatccaaatcaccatttagtggtaagaaatttatgcaccagacattccctcagccacagtttgaaatgcacaatctgaatgttgccccattccactgcaagcccaacaacaagaagagtggtcaaaagagaaagctaaactctgatgagatcacgagtactagcaactctaagaccaaggttcaaaagacagggcccgctaaggatgcagagtgcttcttttgcaaggagacaggtcattggaagagaaactgtaagaaatacctagagcagctcaagcagaagcagcaggatggaaagagttccacctcaggtattaatgttatagaaattaatcttgctacttcctctactgattcttgg

SEQ ID NO: 47261 - DNA, 338 bp, Oryza sativa
gcgcctcatcaagatccgaagttggcgccagaacattccgcatcttgacttgccacagcgagaatcttgtcttgtagtctagcagcggtagaacatacttcatcgacgccatcgcgaaaccctaatgtgggaacaagctctgataccacttgttaggaaacgataagcgaacaaacgataaagaacaatagatcaatcacagaagacacgagatttaacatggaaaatcctcccaaaacaggagagaaaaaaccacgggcaccagccagcaaaatatcttcactatatctggggtgagggtacattgccgcatggtggcttacaaaagatatatatat

SEQ ID NO: 47262 - DNA, 303 bp, Oryza sativa
  unsure (1)..(303): unsure at all n locations
ancttgaaatgaaggcaacngtnacngcattttctttatctctccacccccaccagcagaggctccccgatgttcatcgccactccatcgagcttgagctccacgcccacgggccaccaccaccccgtcaagttcaagcaacccatcctttgaagcacggtagagaggaagacagaaagaccaatggcgcaagttagccccggtgagagtgatgacaagatcccctggccatgctggtgttgggagaaggtggtcgtatctatatggagctgtaccggaggatcaaactgtgtgccatcatct

SEQ ID NO: 47263 - DNA, 209 bp, Oryza sativa
  unsure (1)..(209): unsure at all n locations
atttgtatttgccttatattcctccaangggaatgtactatcattggtacacgtaaatnttgggttttccaaccatttcttttcacaaaagcttgtgatatgaaagaatgggaagctcctgaatcaaatagaactattgcgggtacggagttgacagataacatactcatcacgacatctggagtgtcctgagctggctcagcttgaat

SEQ ID NO: 47264 - DNA, 392 bp, Oryza sativa
agctttgctggtgtgatttgctcggcgttgattcctatctaagtccgatcttgaggaacgcaggttggccaatggatggaccgagatcgatcgagcgccaagctgaacgcgaggagattaagctcctacccgaggatggatcgacggttgtacgtgccttcaccagtcaagctcgaggggcgcccgcactcgtcttccagtggcaacgccaatgacagagcccattccatcttgcacatcgcgtcagccggtggagcggtcgtcgacggtggcgccatttcatcccacgcagcgggcacagccaatggaacggacgagcggtcatcttcaagagagagggatgcggggaagagctgcagaggacatgccggcggccactcaatgttcgtgca

SEQ ID NO: 47265 - DNA, 402 bp, Oryza sativa
  unsure (1)..(402): unsure at all n locations
tgttgaagcagatatcaactatctatccattgaaataataataaactaatgagttttcacataaaacagntatacacaaattaatacaaacatattgaagattttgttcagaggaagaagatntattgttattatcattctacaacttcctttttggtatactggacttgtgaaaaaaagttntgtggtgccgacaagattggaatctatctcagcctccactacctccctcacgacaacaatggacctctctaataacaccccatctggcaattttccacagctntcctggcaagtgaccaccatatgcacaacaggactntgtggaacaagatattggtgatgatacaactatacaactggcacgatcagggcagcanggcacacactgtggtgaaaaca

SEQ ID NO: 47266 - DNA, 439 bp, Oryza sativa
  unsure (1)..(439): unsure at all n locations
ttaagtcacctgacgcatgcagcttatgcagcaaagagcgggaaggtcctcctatattcttcatcccgcgaaggtcaaggagagttttcctggagtttacctaaacccaatccttcctggaagagtagtttcgttagctgctanggcgtgtgttggttgcttgtgtgtaagggtatggtttgcatcattggtggggatgcgaccatactaagttgtttgcttaagcaacttgaacaataaaagtctactcacaacagatcagtaggcaagtggtttagtacctcatctctagtaatccctctcattccctccccctctctctcgtgcctgcagcagatggtcagtgtgaggtgcaatttcaacggatcaggatcccgtcagtttcatggatcaactcatctcaattctataagcttcccaccgtaacctctcaaagatc

SEQ ID NO: 47267 - DNA, 403 bp, Oryza sativa
  unsure (1)..(403): unsure at all n locations
tttcgngccatttgatggcctgtgcacatttggcagccatacgtatatgtaagcagattcatgcttatgtgcttcgtcatcaccgatatgaatcatctgcatactttgtggcgaactgcctcattgatatgtactccaagtgtggggatgttgatacagctaggcatgtattcgatagcatgtctcanaagagtgctatttcttggacatcaatgatgacagggtatggaatgcaccgtcgtggtagtgaggccctggacatatttgacaagatgcggaaagcangctttgntcctgacgatataaccttcctcggtgttctttatgcttcgtagcattgtggaatgagtgatcaaagtctatcgtacttngacagcatgagtgcagaatatgggttgacacc

SEQ ID NO: 47268 - DNA, 402 bp, Oryza sativa
agcttgccgcacttaagtctactgtctgattctatctcctataccagaggctattgtagaggaaagaaagaattatgggaaatcaaaagctggcgatgctgacagcgacgaagaaggtgatacttcacgcgaagatgaatctaatgatgatgaggtttataacacagtaacacttttaatatgagcagccatgacaatttaatgtatattagttttctgtctggtgattgtagagtgcttgctatgaaatcagttaatgaactcaatgaacaatctagaatatagatctcctaattaaattacttttttcaagtaccccttattaaaattctaaaacatgtcatgcatgttatttggactcatttatgtgtttaccacattactccttttttttagcctttg

SEQ ID NO: 47269 - DNA, 275 bp, Oryza sativa
aaactgacgcgaaggaagtcggattgcccgaccaaaggcaagtggagcatccgggagcaatcgaagctgagcccacccattgctagctgcttgggggaaaggtactaatggatgttgcaagtaatacatacatgactacatgcagcgaatgggagtatctattgactaacacccgtctatgtgcgatattattagttatgctttcacttatatcgaatgaatggcttaagtctctgaggcactttctgaatacgcattttctatatattaactct

SEQ ID NO: 47270 - DNA, 390 bp, Oryza sativa
agcttggtgcggagtgggaggtggtagattatctctagatccgcacgccggaaacgccgccgccaccacctctgtcggatctgccaacaggagcgacgatgccaccgccgcggcctctagagaagcttgggtgcagagggtgagggggagggggtaaaggaccgccggaaaaaccttcgctttcgcctcaactggatctgtcagcgggagccgcaaacgccactgccatagtccgatccgcgggagaaccttgggggtggatggggtgagggaggctattttttatctattattaatctacagtcttatccccttccattcctctctctttcttacccatctatataatattctcttactctttatacgccttagtatatatttcttctt

SEQ ID NO: 47271 - DNA, 444 bp, Oryza sativa
  unsure (1)..(444): unsure at all n locations
ctttctaaaaaaagaaatttgttttgactaaagaaatatagcaattcatnttttaaagaanaagagagtgttttaatggttcttagatagacacggaaagatacacttaatttatggtgtgccgccaattataccttaagctcgggaaacaataagtagtcaaaaaatcataccgtaaatttagttcatgaaaacccataaaaactctctgaaaaatattgctccctcggtttcttttttatggcgtttattcaacatcgtacattntatgatgaagggagtatatttaattccataacctctactagcaaatgtatttttccaaacacctaggttntatttntttcgtggtgaacaaaanatcatgcttttacttgcttgtaaaatagcgagacaccttataagtcttaagtctagtctattcatgtgaaatcgattttacat

SEQ ID NO: 47272 - DNA, 416 bp, Oryza sativa
  unsure (1)..(416): unsure at all n locations
agcttgtaacgagcctgcaagcattattttttcatgacgtaagtaatgtcatcataataaagtctataaacagcaaaagaagtgcctcacctttggctgccagcgctcatattgtgagtgtaatgttttcccaatagtttcaagggcttttggagctgccatagaaaatggatctgaagataaataaatgaaagagctatgagaaaaactcaaagcaactgtacaaatgcattaggagcacaaagatgaatcaccatgtttattttagataagctttctcactctagaacaatcaacaaataataaattttattgatcaagtccctatcctccacaacttanaggtacagcatcttataaagcagacccaaaaattttaatcctcaaccaatcctcaagctttcacagatcaacgg

SEQ ID NO: 47273 - DNA, 352 bp, Oryza sativa
actcctgatttctactatattcctattccactagtgtcacgaccggaaattcactagtaatttccgaactaatttatgcataaaatcctcgtccaggaatcagccgagatacacaaactgacaatttaatatataaatccatcataataataacgttacatacttacaaaagaaaagaaaaacagcagcggaattaacggtctagcgatggcttcagctccactcccacaggcagctcaactggggtataagccaaacgtcttctccttctggatcctttctcttcaactgagggttgatgattattgcaaggtgagcatatgacatacttaacaaaccacacagcaaatat

SEQ ID NO: 47274 - DNA, 412 bp, Oryza sativa
agcttgggaatcggtccaatggagttgttctttcttgccaaacccttcacataagaggagatacgcaaagctattaagcaaattacctatagataagatgctagggctaggcggtttcatgatcaacttctacaagagttcctaggacataatcaaggacatagtggcggctttcaactccatgtatgaactgcgggcacctcaacctcctcaactcggcgaatgtagttctcatcccaaaaaagtgggggtcgacaagattatgaattctagaccgataagccagatacatagcttcgccaagatccacttgaagctattagcactgcatctccgatgccttacgcatttgttaatctcggggaataagagttgctttataagcggaaggagcatccaagataatatcctc

SEQ ID NO: 47275 - DNA, 370 bp, Oryza sativa
tgcaacctttccgcatcgatgccctctcacgcttactgggagcctcgccggacgtcgatggctgcttcttcttgtgcgccccttccctcgagcaaacgaacctcttcatgattacaacctcctccatgcccttcgatcgccgggaccggccgacgcggaaggggaacccgagccacctggcgtactcattgtagaacatctttgccgcctcgtcggactcgaacgtcatgccgagcaccggctccttgggatcattctcagcatcagcatcaccatcaccatcaccaggagcaaaatctctcatcacattcttgctccgcgccgcgggcagcgccgcagcggcgtcgtcgtctacatcatctgggagctc

SEQ ID NO: 47276 - DNA, 418 bp, Oryza sativa
atcctctgagtcacctgcggcagcaagcttaagataaaatgccccatgtttgattaaccatcctagaaaccaccataactgccacaaccgtcataagaacccacttgtcagtgaccttgctatgtctggaggcctgctgggccaacccaggttcggacagttcggctgaaccctggtagcatcggttcagcctggccttacacgtggacgtccatgattgcttgttgatagcggttgcggggcatttcctacatttcgcatactctacaaccgtcatacttgcttatttaaggtggagctcaattcattctcaacacacactgaagcaagacttgatctctctctctctctcaattttagtttagcgctctagtgctaagtggagtagtatagaataagttttggagtcctcaagtct

SEQ ID NO: 47277 - DNA, 433 bp, Oryza sativa
  unsure (1)..(433): unsure at all n locations
cagcgcacagagcattatgtactgaacatattcttcctgctactgctaacagcccctctccttcatgatttcgcacgacgaatccccagccacctgtccgtacaacccgaggctcgtatgaagaatatgaaagagaaaaatattgatacatgatactatctagttcgaattcgaatccgtaaaaaaaaatatatgttaagatacagaaagacttatatccgtccatatgtcccataatataaaacatataaaatctattataaagtcacctatgaatatgataaaagaatagttaatcactatgttacgagttcatatgtaatactggagtaattttttctcgatgtatctctttaacactctaattgcctgctatatntaatatatatgaactagagatgcacatagatatccattactggatctgattcat

SEQ ID NO: 47278 - DNA, 405 bp, Oryza sativa
  unsure (1)..(405): unsure at all n locations
ccggganncttagagtcacctgccgcatgcaagctgcggggaatgaggactattgttattttatngncgatttctctactacttgaaagaggaatcattatcctccattttcatgtaaaaacctctttcctctagtatagaaaccgcccaacgaaaaaactaatttctcaaaaacattccaccatttggaaaaagtgaagaacccactataccaaaatcctccccatgatctggaaaaaaaaacaattaaaatccgtttggaaagctccaacttctaaatataactttatagttaaatctaaagcggagtagtagggttgcctaagacagactcacctctggtgtttattttatgagagcattttagcagcttcactctttttttacgagactaaaccggttggg

SEQ ID NO: 47279 - DNA, 352 bp, Oryza sativa
  unsure (1)..(352): unsure at all n locations
agaacatgacataattggtggttatgtttcatgaaaacaatatatatagtatatatacaatcgtatccataaatctacacatttataatctctgtaccatccacaattaaacaggtcatacttttctcctcttcaattttacctattacggagtactatgtttggaatacatgtcactaaataaaatagtaaagaataactataatccttgtgcaatttttaggactgaagattacttttacaggagtgccattggtgcctacgattatcgttatgaagtgaccggaaagttcggcattgaagggagatggattctaataactcgagtggatgtncacccgcttattacatg

SEQ ID NO: 47280 - DNA, 379 bp, Oryza sativa
  unsure (1)..(379): unsure at all n locations
gcatgcaagctggccnctagaacaagagcgcgccatttgattatatcctgcaaacaacaagaaaggagagcacagaaaccggggttaaatccataaacgatagcccgaccggcaattgctgatgaaataacattcacccttgagccgacgtcatacgtgaaccgaacgacaaccatgaaaaaggcgagaaggaactaaatacactcgatcggccgtagatattaacaacatagaatccccatggcgaaaatacataaaacaagagaatgggaaagataggacgccatgccgagacaatataaatcactgagagcgaagtatatactaacaacaagactatacatatgtgcacagcaaggccgaacaagaagatctagca

SEQ ID NO: 47281 - DNA, 260 bp, Oryza sativa
  unsure (1)..(260): unsure at all n locations
tatatatgcaaccaacatagctcaatttgcatcttaccatcaatcattattttgtacctagttaacttgcagtgagatacgatcatacgagtaatacttgcgactacttntcgataatgcgaagagtgagtgaaattctctcgtatacgatggaaatatgccacccattgtgccactgaatattagtgacggagcaaacaacatcgtcaagtttaaacggctaattgtgtgtctcggcgagttactatttcttatacatc

SEQ ID NO: 47282 - DNA, 411 bp, Oryza sativa
  unsure (1)..(411): unsure at all n locations
agctngcaacaccggctgacatatgacatgcgtttactaaaatttctgaaccaccgatcaacttataattatctactaatctggccgatttgaacagaactgaagggtatgccaatggaattcctggtgaagcttatccccgaacatgctcgaaagcaatgcgcgtttgtaagatggtgatttctgaggtcagcatgaaaactagttcagaatttcttcaccgtcctccattagaaagcagagatgaaccctgtgtgcagccatttgggaaagctggtgcatatggaagtggaactacatttttttgtccgagattctgacgccgcgtattcttttcccccctcccactatgctgctgccggtgtaaaccaaaaatcatccacggttctgtaaagttgatgaagaagagtg

SEQ ID NO: 47283 - DNA, 317 bp, Oryza sativa
gggataaggatagggtgttgtgacactatgttgaggagtagagctgaatgcaacctttccattctttttttcctatggaagaattttcaatcaagtttggaattggtatatgctatatatagctgcgaccatcgcatattgcaacaaaagaattgggaaaaatttatatatggtttacggctaaagatagcgaaagtaacttcataaaaaacctaaacactctaattaagtgaaatcaatttggtatagctagctaccaaaataacctctcttgcaaaaaaaaatcacttactgacccatcatcagacatgtttttt

SEQ ID NO: 47284 - DNA, 401 bp, Oryza sativa
  unsure (1)..(401): unsure at all n locations
agcttgctggggggcgcatccgctctatattctttatcttctctgggntggcctcgatgcctcgggcagagaccaaaaacccgagaagcttgcccgcatgcacactgaacacgcacttgtcggggttcagttttatgcgggcggagcggagactnttgaaagttttcgctagatccgaaagtaaggtctcttggttgcgcgtcttcacaaccaagtcatcaacataggcctcaacattacgtcctatttggctacccaaagaaattcgagtagtacgcagaaaagtaggacctgcattctttaacccgaaaggcattgtcgtataacaataagatcctatgggggtaatgaaagcagttttttctcatccttcctagccatgcgaatctgatgataaccag

SEQ ID NO: 47285 - DNA, 390 bp, Oryza sativa
atatcctttaatcccattcctccaaaagttttcgggctggttagcttctcccaagaaatccggtgaactttcctctctcctttatcatgtccccactagaaattccggaccagttgtgaatattcctcgcaaaacttatcagacatgttaaacatacccattgtatatgtgggcagagcttgagctacgcttttaattaacacatccttagctcctgccgacatatatttctcattccaattcgtcattcttttttataatctttggccgagtggttgaaactgtgtagctttcattcgtccatctggggttgggagtcccacatatttctcctcaaagcttgccctttgcacctgtagaacacccttgatctccttctgtgtagcaaca

SEQ ID NO: 47286 - DNA, 417 bp, Oryza sativa
  unsure (1)..(417): unsure at all n locations
agctntacctataccaaggtttcgaccctgcttatgccgaagttaagaacaagctatcatgggaaggcccaaaggctgcagtcaaccaaagagatgcagatcttcttttcctctggagaagggtatttcctagtctattcttttgcagacttttagtttgttgtttgttatgttccttccaaaaatacttaccagtactagctattatctaatcccctttctatacaaccatatggttggagtgcacttgcatttgttttgatgtcacaaattattccagcctacagagatttttctaaactgaagttcattatgacgtgttgaaattacttggtagtgtacatcagctaaatatctttgtttctagtaaactgtgctgctgtctgctgctcgcaagttcttttcattggagtatta

SEQ ID NO: 47287 - DNA, 467 bp, Oryza sativa
  unsure (1)..(467): unsure at all n locations
cgccgcccatggagatggctgtgagctcgccgatttttaatgtgttgatggtgggagcatcgagctagcaaggatttgttccatgctagtttctttatgttgcacacaagtgtttcttgatgttgcattttggtattccttgatgttgcaattcatatttctggatgttgcatttggtacttgatgttgcaggtgatttctttagatgttgcatatgtttttgctcttgaagtctgtgttttttagtgtttcatccgactgaaacattntcagtaaaataatgaaacattctttcataaaggatggaacatcaaagaaacaactcacgttggaacatttnttctggaacggngaaacatttgcaacaacttatggtgaaacattntatttggaacaatgaaacattgcaacatctcttttaacatctagtgaaacattgcaacatctctctaatatatatgtggaca

SEQ ID NO: 47288 - DNA, 421 bp, Oryza sativa
agcttcttgactacctgaaggtacataagctcattattgacgaaatcaagaaaaacgccaccctacatccttatcacgatcaactactctattattcatctgatgaagtattaagaaatgtccataattatcaagtggtgttacctctgtcctagctaactcagaggcaccaacaaactcttgaagcgttggggaaatgctacataatttggtgaagccaccaccttttctcttgccatcagtattggctccatctgatctattgtcattgataaaaataaataaactctttgagtatagtgcgaccattcagaaaggaaaacatattacttaaaactctttaatagctaagacatgcatcaagaacattgcataaatatatctacaacgatgataagacactttgccactcaatctcatg

SEQ ID NO: 47289 - DNA, 187 bp, Oryza sativa
  unsure (1)..(187): unsure at all n locations
aactgtncacagcaatccatgctgcatactatggttcctatgttcggnccgcggatctccttcctgattgctttgaagctgacgagaggtctgtatatgagacccctgagctattgcaccttgtatctggtcgtgaacctgttggtattgttagtctatctgatagagttcaacagctgccagatgc

SEQ ID NO: 47290 - DNA, 401 bp, Oryza sativa
  unsure (1)..(401): unsure at all n locations
agcttcanagttatttagccctcttgtctttcccatcagcacctcgggttctgcatgacgtaacatttcctctaggtcgattttgtcctcaacagaaccatcatcatgcaccatgtcttcaacttgtgtcggaactacattttcaggcccgtccacttgttcttcgccatgacgtatccatatttcatacttgtccataaatccacgagttactaagtgctccttcactttaaaagcatcgtcaaagtcccaggctatttcattcttacagtcagtacatggacaaattatcttcctcatattgttcttctcagcgtgaaccttggcaataccaataaatttagccacttcgtttctatatggagacaaaaacctcggccaatgatacatccattcccgac

SEQ ID NO: 47291 - DNA, 309 bp, Oryza sativa
  unsure (1)..(309): unsure at all n locations
atattatgatcttcaccccaggaattgcacaacccaaggtcatatgcaaatgctgctatgattggatcttcaccatgatttttactgtaaagttttgggacaataaacggtactcccttccgttcatattgtaagactttctagcattatccatattcatatagatgttaatgaatctangcatatatctatttgaatgtgggcaatgctagaaagtcttacattgtgaaacggaggaagtangtttttaatatgatttggaaatattctatactttcacacttggtatataatttataaatatatgta

SEQ ID NO: 47292 - DNA, 175 bp, Oryza sativa
  unsure (1)..(175): unsure at all n locations
agcttagtttttgccccatacctctgtgctgtctattctaaacttttgaattttgaattttgaaccttgaaggcgagtagagttcaaattccaacgtagtactactagtagtatccgccgcggtacacagcacgaggacgaggggggggggggttcaanctcatttataattatc

SEQ ID NO: 47293 - DNA, 414 bp, Oryza sativa
  unsure (1)..(414): unsure at all n locations
tacctgcttacactgggatcaaatccaatgacatagtatgttatgaaaacataaacaccaacttcgagaaatgtgataggaatctgaagaatccatgatggtatggtgtacgcccatgcacgaaagaagagaaatccctttgcttgaaaanacaggtaagttcatgacagtcatggcaagctctgcgaaaccattaaacatgactgtgtcaagagcaaagtacaatgcccccagatagatcattccataatctctatcatgtcgcatgctggtacgganaaatgtggtcatcacgatcaatgccattagaagtagctgcaatgaaagaaagttcagataatagatcgatcgatcgaatctgaataaaatagtgcccagaatataactacataacagcttaaaatgtcataatgc

SEQ ID NO: 47294 - DNA, 413 bp, Oryza sativa
  unsure (1)..(413): unsure at all n locations
agctngngtcacctcagcaaatttctcctctgctgggtttgtatcaacgaacgacgagcaatgtcactctgatttctgtaagctgccggtcctgagtccctacgataaattccttgcgggctctggctgctaagatgaatgttacttggggaatcgaagaacacagcccggcaaaaagaatcgaagaacacattgttggcccaatgtctatcgactaacaaagaaaggatacctcaaaaccttggatattcggtggtttcttgattcatgccttcatgtatccttgttatgcaagataagataattgtttgtatctgggctccccgttttgtgtcacgtgttgattcgtacatggcagtaagttcatctgctcaatcgggcaacccttcttactcatgagaaggaatatcaat

SEQ ID NO: 47295 - DNA, 399 bp, Oryza sativa
  unsure (1)..(399): unsure at all n locations
ctatgataacagaacaataggggtggtgtgatcactgttctaagagttgaaaagggatgcaatggtatacataactgccaatctatagaagttttccattctatatttacacattagaacattggacgtataacagtatatttagatatgcatactgaattaatacaattctttatacaatctatacaatagcacaaatagtatgctgccctatctatacaatagcacaaataatggtctaaacagagtcttcaatgagctaagggtccttttatttaggctctctaagccattattaaaaaagcttaagtccaaataaaccatcactctttttggttgactnttttaaaaccacaggtcacccttacactggtaaagctaanaactaagtttgagtag

SEQ ID NO: 47296 - DNA, 301 bp, Oryza sativa
aagtcacctgcggcatgcaagcttggacgtcacccgacgcggctgatttcttttttctgggacgacctgattagtaatgtggtgtgggtaaagtgtaccccctctgcagaggctaacaaactattctaacaaccatgcccacagcactggccgatgtgaggtgaatcctatccgagctttgtttgactaccgcttgtgaaaatgctgttcagaaaatgtggtcaaaatatgacaaatcaacaattgacggtatccactctgcccatttggccccttgaaatgttgttggcccgccctggcg

SEQ ID NO: 47297 - DNA, 406 bp, Oryza sativa
  unsure (1)..(406): unsure at all n locations
attccgctatctagttgcatcaaagcatttttgacatatatatggaggcagcagtctatatgagcaacatatctaaatgctatttccaatgtactgcacgtatattttgttcttgggtgaaccaaagtccattatctccttatttgatgactatttgaagggttgggtatggtctttnttttctatagtgatggtacttcctaatatttgtgaaatctttcacctcttatgccttataactaggacttacnaatttccattttcaattaacattcgcagaacaagattcaaccaggagtacccaaaccgcgcttgttactgtgggtcgtctgatgtgctacaagggttgatataatacaatgaccgaattcattgattcataataaactcggatcatatttgacat

SEQ ID NO: 47298 - DNA, 338 bp, Oryza sativa
  unsure (1)..(338): unsure at all n locations
agcttcctgaccaacacgctgtgtttttagtataccatatgactatgcaggacggtgactgccggtgaggactccgacttcgacgcgccgatgccggtaacgnagacacccatcgctacggtcgagtgcttggaggagagaacaaccagcttctccttcacggacgagacctaccgggggggccaacgccgatcagcaaacgcgcatgtggagcgtgatcagtgatcactctatagcattgagctaaaaaaccaccggtggaagttttttttccactctacaacacatgttatgctcatgtaccggcttagcaaaatcgagagacgtcacgttttagt

SEQ ID NO: 47299 - DNA, 403 bp, Oryza sativa
  unsure (1)..(403): unsure at all n locations
ttctagagagaatttatagtccttgagaaggtactatattttctaatgtaaaatttaggaagaaattcacaattcttgagagataccgagaggtactaaatntggtaccttctagtaccaaaggtaccaagagatactataatttacactagaaaatatagtagcctccagtaccgactcanaaactgtaaaatcactcaaagtttagtacctttcggtactccaggtactaggagggtaacagttgcactaaaaactttgttaccacttggtatctctcaagaactgtnaaattctttattttctatgtgtggagcanatagaggatattaccctatatatgaaaantcactatatgctaaactatgtttcacatttaatgtaccatatctatatatttata

SEQ ID NO: 47300 - DNA, 409 bp, Oryza sativa
agcttcaactgttcttctttgataatgttttttgggcgactagttatttgttaacttgatcaggctttgctactattttacacgtcgtgctcgtggttctctcataacactaatgcaggaacacaaggccttggggctttgaagctgttcactgctgggtgaaccttgattggcaaacgaggtctccatggagtcatggagagaagaaaacggtcagacaatagcggctgcgcagcctgtgcattcgtgaccgtggctgatagctgcggcgcactggtgttggcctccctgtttcgcgcttaaggtgttgtttcttcactagatgagctgaattcgctaggatacgtagcagccaaactagtaggcctatatgggccttaacatttatttcacaagaaaagcttcaact

SEQ ID NO: 47301 - DNA, 249 bp, Oryza sativa
tttcacctttttccatggtaccactaacactggtttggtccatgagtaagccatagaacaaatgacacccattatgtaaaaaagcataatagtacaggataagccatctcagtagcagcatggtatacacattacatgcctctcgcatgttggaagagatgtgcccacatgtcagcagtcagcacatgcgacaggttaataacactatcatattaacttggctaatagcttctaaatcatgaagttaca

SEQ ID NO: 47302 - DNA, 415 bp, Oryza sativa
  unsure (1)..(415): unsure at all n locations
agctntaccaaccaaggtgcgcgaggcggtatgttctcctcattcgccttcatggatatcggcaagaagcacaacgccttgttcccgaggaatgcacttcaggaggattccattagccgcgcgccgatagagggtcccttctaccagcacgtagcgtttggagatgcgatggacgcgttcactcccttcgcggtcctcgggtagagtcttatctgtgaggtatgcttggatctcggcgatccaagcaatcaatctaagggagttgggagcactcccctcgggtcccgaggcctggactccgacaggcctcggtggccggtcatgcgcatccgtctcccctaaggggtcgggtcgcgccgacggctgggcaagcctttctttaaaggcgcccggtggggtctgggctcgcgaggac

SEQ ID NO: 47303 - DNA, 413 bp, Oryza sativa
agctttttgaggacattccaacggtgcctatcttgttttttgtagcatttttttaaactcctaaataatactatgtttcgtacaaaactttaaaatataaaagatactaaatgtgtttcaagtttataataattgaaaaatcttattaatcatgcgccggtgactttcttgtctgttttttatacctaattttaatctttatctatctcaaatggcacgttctgatggtactgcaatgcaatgcggtaagatacagcacggtaccggtacgtacgtacatacgtacgcgttgccgcgttgaacgctcaaacctactggaatagaagaagccaattctgaaaattttcaaacgaattctgtacaaaaacatgacgtttattaccggagtagcagtacattgcatgtacaacacg

SEQ ID NO: 47304 - DNA, 358 bp, Oryza sativa
  unsure (1)..(358): unsure at all n locations
gatgagctgcaagtttgaaatgctcaatagaccagcggctccagtactcattctcctgtacaagagatgatcacaccttctatgacctacttgtggggaatgacggagttagtgagcgaccacatgcttacttgcatgccaagtgccacaatgaccaaggattcaagatttgaagttacaaggcatttccataggaatttactgggtggacagctgtgggtattgataacaacttttgagagcttctttttcgccaggccaacttttgagagcttcacaactatatatatgtttcaagcactgcagtttaaacgaagggcaatggctntgagccacactcgtgactntactccttttt

SEQ ID NO: 47305 - DNA, 320 bp, Oryza sativa
  unsure (1)..(320): unsure at all n locations
atttctcttcatgagtcatccttcgaggaggtcaaaaatattgttggtacaactttgaaccatgcataccacctatatggcattttggccctaatggcaagaaagctcttttgcgaaataaaatcaaaatggcgtttaaaaaaaaaaattcgattacaaaagtttttagttgccatgtagccttttggtaaacatatgcatgattataccaaaactcgcttgaaaaacctatttcaaactatatttggggagaaactgcatctctngaatatttacatgttttgcaaacatcacttcccaaagatatttctgccaaaaca

SEQ ID NO: 47306 - DNA, 347 bp, Oryza sativa
  unsure (1)..(347): unsure at all n locations
tacctgcttggtgcttcagtttttctttggaggttatataaattcgaagagcaagaataatctgaagatgagaagtgttagctttnttggccttatgtaccctatgaatgctctttacaagttcaagaacaggagtgtacagctaatcaagtattatagtttacggttaggtttattggcttagactcttaagtcagcttattgacttattgacttataagctggtggatttaatgtcctaaggttagtgctggagtcatacataaaaagttcttcaacctagctcttggattaatagtattagagtggcttatggcttctaaaaagccacacgaataagttggtcg

SEQ ID NO: 47307 - DNA, 413 bp, Oryza sativa
agcttgaccctccgcgggtgtcttgtttgttctcgatagcttgcagaagttgagtttgggtggccataattccggccagagtgtttaagaccggtgtctgagtttcggcattgctggctgttgcccgacctcagcttgccatctgtgtatgttgatggagtaagcatcctaattttctaactagctcctatggctttatcccattaagggagttgtgtcgatatgaactttgtttcgcaagcatggtggaataaactcatttacaacacaacaaccatagatatcataaataacatcacagagtttcacaaatggtacataaatcatgatgcaattgactgcatacatacgcagtccaaataaggttcattcaaacgatacatccaaccaatcatcaaactactcgtcaatct

SEQ ID NO: 47308 - DNA, 313 bp, Oryza sativa
tatcggagaaaaaatgaatatatgtgtctggcttgtagttctattaacaacaattcacaaatatgacttacttgtcatttgtcaaccccaccaatcatgttaaaaaatccaaactaatgaattgcatgagcctattagttggtatcctatctctagttattagccacacagcaaaccctcatgtaggttacatggatttgtttttctaaattggtcggtattgccaatttgtttagtcagtgcacatttaaacaatcttataagggttctagatctcttgtgcaaagaaatgataatgcacatgcttgaatga

SEQ ID NO: 47309 - DNA, 408 bp, Oryza sativa
agctttatgccattttagtgaaatactgtcttctattcgtagccgggattggttttgttgtcaaggttcatgcattgctaattcacacttaactctcttcacaggaaggaaggaaaaaaaacagagatcatacttctgtgtgccaaatgtcctgtgtttgttacatggcgacataagttacccatcttcttatcgccataatcagagaacggtgcaaggtctttgtcagttttccattgctcaaattatcattccatcagtcagctagctgtgatggtgattctcttaagtaaattatctgcagctaatcatggatctgaatatctgatgagatgacttgcaagttgcccaccacattctccgtattttctctttcttgaaaaagtggtaaattgtgcatggcagcta

SEQ ID NO: 47310 - DNA, 331 bp, Oryza sativa
  unsure (1)..(331): unsure at all n locations
tctctaagcgtaagatgcagttaaggatatattacatgcaaactcaagctgcttggctcatatagtgtcctaacatgggcagaacgaagaggtctctctgccttctccataacaaacagaanaacaaccaaataaaaggccagccggcccaagaatttcgtaacagattatgaatgatctgtgtatgttaaaagagntcctcaacactaaaaacttcttaagaatcttcaattatatgggttggactcttcgaagagaaacaccacgcctagccagccaaagaataaaacccagacgaagtangaaatgccaaagtagcagatgataataa

SEQ ID NO: 47311 - DNA, 403 bp, Oryza sativa
agcttgtggagttgttcatcatcataccttgtgttggggccagccaaagccctgtgagagacaacacaggccaggcttctgcccggaacaaagccggcctgaaaagagcggcgcacgacaacttcccaaccttgccaactccccgccccccgtaagagctggggatacaggcccgcaccaccaggctcggcgatgcgatcacctccacgccctattttatccagctctcggccgtagcaaattttccgtgtgggactaaaaattggtttacgagggggctcatcgtatacggtataccgtatacgcaggtaatgtacgtcccctgcgtcttacgcaacacaagcgtgcataatagtgtggatcacgcagaaaccaagcccatgttattattctagttgagata

SEQ ID NO: 47312 - DNA, 289 bp, Oryza sativa
agtctccataagcataatatgtttgtttctaatactcttcgcacaacgtggaacattagttcatagttccaaactaccaatttaaatttaacatgtgttctaaatttatccatactaacaattcttacacagctagattatttttgctggtaagcaaacatcatgtattccagaaatcggattgttgtgttaagaactaaacgaagcaccgaagcagcaagatttcctaaaattcatcaataccattttagaaatgttgagaaaatgaaatagtcatcatcatacaaca

SEQ ID NO: 47313 - DNA, 380 bp, Oryza sativa
  unsure (1)..(380): unsure at all n locations
agcttaagaataacatacaataactttatatcaacaataattgattagcgttaacaatcagaaataaggtgcaagaaattaccagatcatatatttttgctgcagcggcgtaattcttctgcttgaataccaaatctgcctgtgccttcaaaacgacttttctactctccttctgatgttgatcctaaacaacgtaaacaatagtatcttgatgcaaatctgaagttaacttttgaaattttgaatatcagaacatttatttaggattacaaagctaaaccagtactattaaccagtactgttaagacatgatccttctatctagtactattaaatngccgtgatatgtaagctaaaccagttttacagcctaacaagca

SEQ ID NO: 47314 - DNA, 403 bp, Oryza sativa
  unsure (1)..(403): unsure at all n locations
agcttacaaaagagaagagaagagctacttgagccatacccgaactcttccgaaggcttccggactccgatttctactctattcctattccactagctggagaacactaaactaacttgaaagaatatgagagagctcttgcttgaggtgtgtgagtggaagtgaggatgaaatctccttttatagcttgagaatgacggntatgacagttggaaaggtcggtaatactcaccaaccgtcattggggagccatctcagccatccagggaaaacctagatcgaatggcgttgtaaggggttcggccgaaccatgggtcgggccgctctggcccaaaatcgacaggtggcctcctctgttgctctctttcgcagacttgtgaattntggcccaatccattatgtc

SEQ ID NO: 47315 - DNA, 409 bp, Oryza sativa
  unsure (1)..(409): unsure at all n locations
agcttggctctgacgcctcacgagtcactatatcgagtgagaatttcgtgggttcgttggatccaacggaaacggatgcaaccactgtcttcatgaagccaaacgcccagactacgagatcgctagctagggagaacggtgaaagactgaaagaagtttagcatggtaatgcttcaccttgaagccagatagtcgcagatgaatcaaccggccgtttgcgtcgcaactaaattggctgtaatactttttttttgtcacatcgccaaccaacagctaaatcttgctgatttacgtgcagatggtggtgcaaatcaaccgctatttttatttccctgaattgcctacctggntaagctgatcctttaacaccaagcgtatatcttaatcttggactaaactggactaaaca

SEQ ID NO: 47316 - DNA, 221 bp, Oryza sativa
tctcaaactccacatcgctatcttagtctcgtcgaatcccatgttatcgcaatcctctcttctcattgagcttagccagattaatgttgtcgggggtggctctgctactttcatcgtaataaggaggaggcggttgggtacgaagggcatcaataaccatactctatcaacaaatcaaccgttgtggtggagagaggtcaagcttcggctcccttacatct

SEQ ID NO: 47317 - DNA, 439 bp, Oryza sativa
agcttgagctgcttgaacctcagaccattcttattcaccaatctcatccctttactgtgctctgaagcaaacccctgttctttttcaggactgaattgtgctcacaagacatcaactgcagataaaatagaggttctctgaattctgttggtcaggcaatcaggcagctgcatcatacaagaagaatgtagacaataagtaaaaaaaggtgagttcagattaatgctaccacacctaacattaacaaaaaaaaataggtgcttgtttttcaagaagaatgcatgtggtaagtttggtacagagtagagatcaaagcagtaaacagcagttgtgatcggttcggttgggaaggcataaacatcttcctaattagaattaaagagttgcacgtgaggctgaagctggatggtggcaagttcagctctgcagactcacagct

SEQ ID NO: 47318 - DNA, 431 bp, Oryza sativa
  unsure (1)..(431): unsure at all n locations
agcttgacgccttgagcctgaaccctagtttgttgtatggtttccacaggtctggtcgaagggtctcgtgacatactgccaacaagcccctcacgggcaagggtgagataggagcttcggccgagaccgtgcaaaccatgtggtatggtatgaggcgccctctntcgaccgatgctcctgccgaaactaacattggaatcctgcaaagaacgcgtgcagtgcatgtatctgtatttctgttgttagtaatgctttgcagctttcgccttctgtgaacggcggagctgttcttattctttcactgggccgaaatgagcagtgatgggcttttcttcgtgggctcgtcactgtgcggctcggtcaatgggaatttaccgcttcgcctacccttatgatacgtggcgggttgtgattgggtgggaaggcgaact

SEQ ID NO: 47319 - DNA, 420 bp, Oryza sativa
agcttgcattaaacacctaagttcccgtgtcttgttgagtacgaaagtactcacccttgctctatataaatatatatatatagctcctccgccctgaagagaagataaagtaaagtgaagattagggtttcgtcctggttcccagccgtcgcctgtggtgttgggtgttacaccgtcggttccgctgctgctgctgctggtggtgtttcctcgtccgcgtcgtcggttgtattctcgggctgtctgagcttgtcacgcccggaatttctatccaaaatgccaaacgcttacatgtgtgtgaaccctcgtacaggagacagccgaggcacacaacgacaaattgataatagagtacaattattactgtaattaatcagcgaataaaatgtccttacagaggtagatagatcctctcaataa

SEQ ID NO: 47320 - DNA, 387 bp, Oryza sativa
catcactactcaccctgacattgcactaaccatgtgtgcagctatagcggaatgtattatttagagcataacagtatttacaactacatgatgggtacaaatagaaaatggagctattcacattgtgacatgagtacaattcagtagtccattacccttgtttacaaccctacaggacctgatgtctatgcccccatgccttattatatgtggtcatgaatcatgacattgtgcacagcatcatgaacaatgtttgaggtatttccatatgacattaataacattatatgatctcgacaacatgatatttcaagtgcatgccgatcacatattcaatcgttcacggtacatacaataataactgttcacggataaaatattcacact

SEQ ID NO: 47321 - DNA, 446 bp, Oryza sativa
  unsure (1)..(446): unsure at all n locations
agcttagaatataggacttgaattaggatgtgtctaattntatcacaagtaaactaactagtttagctaacctcacttcgcaaacttaacatattttaatgtaaattccatatctaaatataacaacttttaacccttacgatttgtccctaaatataacaacttctccaccaacattctctttccaaccaatcacagccctccaccattcacttttcccacatacctccattagtcatccaatcacaaccctctaccattcactctacttacttttttaataactgtgtccaactctaaaacttattatattttgggatggagggagtacaaacgatagttaaacaatcacatggtgaaaaacaaattaactgaaacagaaagaatataatgctgtacttttagcaaaacttttgtttctctcacatgtactccaacttaagagt

SEQ ID NO: 47322 - DNA, 466 bp, Oryza sativa
tgctctctccttcctgtggatgatcgatctttataccaaagaagtttgtgtctgggaagccaattatgggcaatggtggtatttcaataaccaggaaatgttcatcagtagtctacacatgtgcagacatgtacgtatggatcaatctaatttagttccctgttgaaatggaaaggaggataaaagaaaataaacgagttgccagcacatgatgctgagttagccccgggggttggggtggggtgtgttcaattgaagtgattggttgattggtgaattggagtcgtggaacacggggtaatctgagaattaagattatgtctgcaataatttgaataggggcaggtctgatggcctccttacctggatgcagtcccatcatgctgaattcctagagagaagatgagagaacttggtgcatatacacctgcattctcaggtctggactgtaacgtagttgtgatcg

SEQ ID NO: 47323 - DNA, 449 bp, Oryza sativa
agcttagaggcgtcggctcgagcacatcgatgatgcgcgcgcaaggggcttccatctccctccgccggcatcggcgccacctctcgcatcccccttaggcggcgcatgtccaggcggagcaggccgcgtagatcgagccgccatcacccctcatcctcatcgcccgaagcaggcaccggcgatgtggatcgagggctcgaggcagggcggcgacacgatgggtaggagatttttattgcgattttttttttgatttttttctccaataacccagattcttcaagattagatcacacattttttaaaaaaaccctctcaaacctgcaatttacatttaggtccgccagatgattttttaccgttgatatatcatctaacggctattagaggggtgcaaacacgtggtgcgttcaccagccgagaatccccgagtgagcgcaacacgcgat

SEQ ID NO: 47324 - DNA, 335 bp, Oryza sativa
agctcaagttcttattgaaccttgcaaaagaatatatatatatatatatatatatatatatatatatactaagacatatatatgcagggacgtgtgataatatatatgtacctgtacacgatatgtatcagtgtgtccatatatgattacataatctggcattcgagctcaccctctagcgtgtgcgctgtgaaccgtacttgtagatttcccaagatctacgcatagcgatatctagagatactcatacagagacagagatatacatagagacagaccgaatgagcccttaggacgcgactgatctgtcctgcgtcacacagtcggtgagggag

SEQ ID NO: 47325 - DNA, 438 bp, Oryza sativa
  unsure (1)..(438): unsure at all n locations
agcttggncattgtgccaaagactgtcttctgtttcgacgcggtcaggcccacgtcgcgcgggtggaggaggaagagccggctctgctcctggctcacgcaagcatcgagctacctccagcggcaccggccgcagcggctttcctccaccttgatgagacgcaagcactcgtctccctctgcaacggctccagcaacgacaaggctgatgggtggtacctcgacaccggcgccacccatcacatgaccggccgacgggagttcttcaccgagatcgactccatcgttcgaggctccgtcaagttcggggacgcctccggcgtggagatcaagggtgctggcttcgtcaccttcaccgccaagtccggtgagcacaggctgctcaccggagtctactacatccccgcggtgaggaagtctatcatcagcgtgggacagc

SEQ ID NO: 47326 - DNA, 404 bp, Oryza sativa
  unsure (1)..(404): unsure at all n locations
cacaattcatttaactggcatagggcctcaaggctctggggcatgcaaaaacctgcaagagttcattctattcagcaatggcttcaccggtggcataccaccgnggctggcttctatgcctcaattggtgaatgtctccttgggtggcaatgacctttctggtgaaatccctgccagcttgggcaaccttacaggtctcacccatctggatttcaccaggagtaatctgcatgggaagataccaccggagctgggacagctgacacagctgcggtggctgaaccttgagatgaataacctgaccggtagcatnccagcctctatcagaaacatgtctatgatctctatacttgacatatcctttaactcattgactggatctgtgccaacgccaatatatggtc

SEQ ID NO: 47327 - DNA, 428 bp, Oryza sativa
  unsure (1)..(428): unsure at all n locations
agcttagccagccgaatatcccgcgccgcntgtttcctctgctcatgcgttccgtcgtgatccccccgggcacaagacagcaccaacagtctgtcacaagcgaccaagagggtaggcactgtcgcgaaaaggcgctagcgtccagtgaaccaccagtactgatggcgctggtgcacgactgacttaagcaaccgggtggacgggcaggcacgccggcaggagcgcctgtttacgtttccaggtctcgtacgtacgctacgcatgacacacaggcacacacacacgaacaacctgtttgtttgccccagccatgaaccatctagggatcgcagacaagccggcaacagcagcgttaacaaccattcggaaactacccacccgctctgatctgctgctggtgtgttgtgcagctgcatacaagtagctac

SEQ ID NO: 47328 - DNA, 437 bp, Oryza sativa
  unsure (1)..(437): unsure at all n locations
taccttttagcacattgtggntagcagtgtacagcttgattgggaatgtcgcaaagcacgcctgctttacaggcacagactctgaccgagactgtagctctgaggtagtatgtacagtactctgagctccaaacagctaaacatctttgccatcactcgcccgaatcagattctctcgttgcgattgcacactgcttgattagattaccagaccagatcattaggctattattgcgtgtaccgcttgattgggatgtaacaaagcgaacctgatttccaggcacaacatctgaccaaaactgtacatatgaaacgaaatctgatgtttgaagtactctgaacatgaggccattcctgttaaaaaatcaagtcatcctgttcgacaaatgtttgatgctgcttcactcaaggaacaccaataatgtagaaacacccga

SEQ ID NO: 47329 - DNA, 442 bp, Oryza sativa
agcgtatacagggtgaggacaaggagagagttctcacatctccactgtcaggttcttggacaggagcagaggcatggagaaacgcctgtttcaagagtcataaatatatatacaggtgagtttgattcgatcagcattatgcttatctttatccccaatatgaagttgcaagttagtgaaatttgaaaaaagaaaaaagaaaaaagaaaatgaattctgcttgtgccagattatatcttctgcatgtgttagttcttgcatatatattagatttccttgagaatcatacaggtttttattcatctgcaaacttaagatatttaaaggtgacaaagaggaacacttctataaccaaaaggttaactgattaattgcactcttatctcctttcttggttggaacttgaaaacttaatatgtgaatgtcgttacctttctttcat

SEQ ID NO: 47330 - DNA, 432 bp, Oryza sativa
  unsure (1)..(432): unsure at all n locations
tactcgactgcgacaaagcagattacaatcaaaatgcagctactgcgtgatggtttctacaagctaaatctatgttcatcttaaagagttcttttcacagagagagagagagagagaacataccattctttgtcgtcgttccaacctcagcttctccgcgtttgccttctcatattcaccgttctctagatgccgctggtctggccttagccgtgaatcagtaggagggagtttgtcctttgaacatgaccaatcaattcaattaggatcattgagtcttgatatcaagtaaacaattcaaagcttgtggagtattcatgactacacacatacctgaagatcaagagacagttcgttcaatgtgatagcgaacgacgatagattgtatcgcgctggattaggagaaggtntgttcttttcccacagaagtac

SEQ ID NO: 47331 - DNA, 369 bp, Oryza sativa
  unsure (1)..(369): unsure at all n locations
agctcggtatgttagagtcaaatctagctgttctgtttcttactagcgatatagaagagcagcctgcggtgcctcctctgatctattggcaatagaacccctgtaggcgtgatggactgatgagactgatgcagagttggagatgaatgttatgtcaggcaatgtggcatcaggctccagaactggttgcattgcttgctgcatggtaggccgactctgagtgtcagagacataccacgatagcgccttaatgatgacactctccatctatctcctttcagagccaccaacacttttgacgctttggttcgtgaccanctcgacataaccttctgcttagtacaaggtgcagatctgctccctgtatat

SEQ ID NO: 47332 - DNA, 268 bp, Oryza sativa
gggagttttttttcctcccccgtgtagaattcaagctctcacattctggtcgcccgagccaacagcccttgctctctattggcgggagccccacgtctttgacagcgtaggtgagtacgctagataacattctagttcgcgctcccctaccgggaggagcaggatgagagccccttaccaacggtggcctggtccctcagaccgggtgctcttagttcttgtcaacgagcttgaccccctaacacagaaggccctagccatgtggaag

SEQ ID NO: 47333 - DNA, 453 bp, Oryza sativa
  unsure (1)..(453): unsure at all n locations
agcttaatctctctacataatatacggacttggtccccacctcctatctctagtctacgagtaaccaatctctacatgtaaactaccatggttaggactaaaaaaatagggagaatagctcctgtagtccctaaagtttttatgtaggatcagtttagtccataaccttttaaatagttcaaagaaatccttaaactttatcataaggcctagaataatccttgagtccaccaaaatcgtcatatagatatgacatgtcatcattcatggaaaatctatgataaattgttcagtttacccttacgtatatcatagaaaaataaatgtaaaggtgaattagacataaccataggaaaaaaaatacttttcctttnttcacccttttgacgtatatttttgctcttacatataccatattttntaactttttccttttgttntttattgtactat

SEQ ID NO: 47334 - DNA, 449 bp, Oryza sativa
tctctagtcgactctcatggctttcatatgacaatccccgaatccatttcccatcctctcatcttctttactcatcttccgccatttttctgatttcaagcttttctttcctcttttctgttttttcatctagaatctgagagataggattatcatcgctttggaagatagacctggcctagtatgtttaggaccgatgggcgatctagaccccacagatccgattaatctagaaataggtcgtctgcccttcaaacatgcaaatttggatctatcacggtggtcaaatgccttcagatcttggccaagccccattcctggatggaggaactggtacctccgcgtctctgaagctaagagtaccatatgggaagtttatgatataaaccagtgcattaacttttccctcttcaacatggccaaaaatgaatcaatgttaatagttgctg

SEQ ID NO: 47335 - DNA, 440 bp, Oryza sativa
agcttgtctggacgaagtttcactccaattgtttcttgataagggttatggagctaggcatgatactcaagctctagttcgcccatgcctgatcctgaccctaatggtgtgcacggtggacgcaccataccgtaatatcgtatcatacgagtgttggaattatagtatagtgtgaaagtattacataatacggtacgattgatgtgcaatctaactcacggagttgatattctagacatgtgttttgatcccggagatcacgcatgcgaagtacctatgtttgattatagagacagctctataagagcaagtttagatatgataggcaattactagctccaaatcatctatagttaatctaatagccgattcatatgatcagtaacttgatatatatgctactcattaataattgtgaccacatgtgatgcacacataac

SEQ ID NO: 47336 - DNA, 289 bp, Oryza sativa
tgggtctataacattgtactcaaatgggagatcaccagacgatgtgattttgctattttcgagcttatagtagtcatgtcaagtaactctctacagaaggcctgtgtcgagctatatgtctaccaaagacggcattcttgctacttgtgatgcagctcgcttatgcaagctaactagacaggaacgatggtgtgcatacaatccttaatgttagacacgatggctgctcatgcagccatgcaagccatttatcaaacccatactgtagctatagacagtatatactata

SEQ ID NO: 47337 - DNA, 298 bp, Oryza sativa
agcttgtactggtatgactctatatcacatctttctatcccatggcgaggcatccacaccgaacatgtagagactgatattgacaccggagcttgccgatactgaattacacgcaggagattagtgcaatactaatcatatctattctaactatagacttctatctctcatattcataccacatattgacactagtatcaaaacacttgacagctctttgcttttgtcccaccatacttgtgatagcacggttacatattcggcgtactaatcgtgagaatagaggccgcacaccatc

SEQ ID NO: 47338 - DNA, 427 bp, Oryza sativa
  unsure (1)..(427): unsure at all n locations
tgcatattacactngtgctggtatcgtggtataggtttgtctcggaggccanctgatgtcngatgggttctgtgcatgcgctatgctataaccgagcgtaatctcattcttggagtatgttgatatatggagcgattaatattgcctcgataccgacaccgagctatcctattatgtcgatctaagcatgccccgtctaacggatcacgcgtggctgatacctacactcaatcgagtacaccgaacaatctacaatattttactaacctacagcgattctgcttgatatgcatatgagtggatcccaatgtcatgtcatccgcaatgccgacaatcaactatcgccgatcgatataaatctgatgctcattgttttctatcttgttggatgcatgattaaaccatctggcactctcagaacccgaag

SEQ ID NO: 47339 - DNA, 442 bp, Oryza sativa
agcttgtcatccatgctaactgcaaagatgtttttatcatcggtgaaaagcttggatcagctcctccttaccggtgactatgttggatatcaaaatggatcatttgttggctcactcctgaaaaaacgagggttcatgccatccaggttaaggtcttatggaacacaaaaggagtatgctgaagctctgagaaaggggtccatgaatggaggagtgtcggcgatcgtcgacgagatcccttatttaacttcttttttatccaacccccaatatcagaaagaatttcagatggttaatcggttctacaagacccccggatttggatttgtaagcttctcaatcttgttcactttggtagattcagaattcttcaattttcttttctttttgcaattagtatatcgcgaaaagtttttgcgtgttctcggaaaacattcagatg

SEQ ID NO: 47340 - DNA, 442 bp, Oryza sativa
  unsure (1)..(442): unsure at all n locations
cactgtagaaaatgcctcctggcaattttttgtgaacactgaatataagagggtggggtggggcggggggcacatcgagattggaagctcagcaagtaataaactgaaatggaattaagctaagaaacatactccctccatcccaaaataaaccaatctcataccagatgtgtgtccagattcatcgtactaggatgtgtcacatcccgtacggggtgtggttattttatgacggagggagtagtctcctacgaggagatgatgctgaaacttcttctgtagatagctggcttaaggctgaagagctatcttaaagtttatgtngactttctttctcgtagctgtgagccttaaatatttcttatgacctctttacctccagaaagaaatcagagtttcctcagtaaatctactaatagaaaaggcaccataaaagtaatct

SEQ ID NO: 47341 - DNA, 437 bp, Oryza sativa
agcttggtaaaacattatatatcccgaattttattcctgcaaaagttttcgggctggttagcttctcccaagaaatccggtgaactttcctctctcctttatcatgtccccactagaaattccggaccagatgtgaatattcctcgcaaaacttatcagacatgttaaacatacccattgtatatgtgggcagagcttgagctacgcttttaattaacacatccttagctcctgccgacatatatttctcattccaattcgtcattcttttttataatctttggccgagtggttgaaactgtgtagctttcattcgtccatctggggttgggagtcccacatatttctcctcaaagcttgccctttgcacctgtagaacacccttgatctcctcctgtgtagcaacagggcaaaaaccgctaaataacaaagagcac

SEQ ID NO: 47342 - DNA, 435 bp, Oryza sativa
  unsure (1)..(435): unsure at all n locations
gcccgcangcacactgaacacgcacttgtcggggttcatttttatgcgggcttatcggagacttttgaaagtttccgctagatccgagagtaatgtctcttggttgcgcgtcttcacaaccaagtcatcaacatatgcctcaacattacgtcctatttggctacccaaagaaattcgagtagtacgcagaaaagtaggacctgcattctttaacccgaaaggcattgtcgtataacaataagttcctatgggggtaatgaaagcagttttttcctcatcctccctagccatgcgaatctgatgataaccagagtatgcatctagaaaacacaaaaggtcgcaccccgcggtggagtcgacaatctgatctatgcgtggcaaggggtaagggtccttatgacatgcctctgtaaagtcggtgtagtcgatgcacat

SEQ ID NO: 47343 - DNA, 428 bp, Oryza sativa
  unsure (1)..(428): unsure at all n locations
agcnttggctgcagtgcaagttgcattgctttctatcatccatcccaatttgatagatcatactattatatgatgccactaggaaaatattactccctcagattatgaatgttgttttcaccttctcaattcttttgctaaatgcaagttattttgggacttccagtcttccaggcacttttgcaactattatttcatactatttgacattgntaaataaatgctacctctctcacgaataaatgacactttatttttaatgcgatatatataaaagaaaatccgactctattatttcatatttgaccttgctaaataaatgctacccctcacaaataaatggtgcgtcgaaaagatatgatataataaatgaagcatatttgagtcatttgagtgggttccttaatttacgcgcacaagtctaaaac

SEQ ID NO: 47344 - DNA, 452 bp, Oryza sativa
  unsure (1)..(452): unsure at all n locations
cccggaagtcaccgaattcagcaattgatggggcatgttcagtattatcatatcttacagtcaaaaatgattgcaggtctttctcagcacattggtgaagacgctccagaccagactcagcttcacctataaaagatataatatacataccacatgatttttggcaagcacgtggtagaacttangattntattttggaatgcaacaaacaactaccttgcaggtactcgaaaaattcgctcttgaccttgtcgtccagataatagccataagcatatgtccatttgagtacccgcctgcattcaataatctgaaatagacatagtggaatggtgcatgcatcatacgcangtgaattgtatagtatggagtgtcatttgggtcatgacatatntatgatatcaaacctgtgaccaagcttcaattatgaacttcagttgggtctccggtat

SEQ ID NO: 47345 - DNA, 430 bp, Oryza sativa
  unsure (1)..(430): unsure at all n locations
agcttatatgcagagaacgaaaagaaatgtttctctntatgcatggctcanacgcagaatactagtactagaactcatatactccactctctctgctgcttttgcttggtcccttatccagtcgtgtcagcatatatagtgacatggcagtgcgtgtcagcatcacgtttttcacgctagccgggtgtagtgtcatcgcaagatctggtcccttcaattccatcaccgccacgtggcgatctaggatcgagtcgatgatcagtggattagagcaagttttttagtatagcccactgctaactttaaatcatctatagtcaatgtaatagccaattcatacaatagttgcttactatactattaatacctggtcccacatatcatacacacattacgtcttgaagtccgtgctgcagctggctatagatct

SEQ ID NO: 47346 - DNA, 458 bp, Oryza sativa
  unsure (1)..(458): unsure at all n locations
tcttctgtccactctcttgtagagtagcagaagctgatttgctganaatacgcttactggaaatccaaggtccttcatcttattgaagacttgttctgcttttttcacattggctatagccacacagttagccaaaagagtcctgtatacaatctcacccctatgagatgcaggaacattctcaatgtacttttcagctttgtaaatactgtgggttttagctaccaaatccacgcgtgaagcataatcacgttctccaagatcaattagtttggattcttcaacatactccagaagctgcagaaaatgaagtaaatatcttctgagttagaaaacacanagaccgaggtaaataattacagtgaaaaaagcttaagtgtttagatatgagggtgttcacatganaaaagtttacgtaacaagttccatcaaagtaaacaccgtgtatagctacaaat

SEQ ID NO: 47347 - DNA, 433 bp, Oryza sativa
  unsure (1)..(433): unsure at all n locations
agctntatgtcgagtttgtataacatccctatttcttaatactagaaattntcactcctaaactatataaaaccgtgcaatttatatcttatagcagtactgatctctagtttcacttacgtggcatcctagtaacaaaaaaaaaaattataggacccatatgtaagagagaagaagaaaatgtagggtccacatctcttattttttctcttttctcttttcttttctactctctcttatcttcttcagcgagcctgggaggccgtcggtggcaaaggggggagaggtggttcaacggttctgggagagagggggaggtgtccggtgagcccgtccgagctctgccaccgccttgagctccatgcgaagggaggagggaacggngtagatgtagagattgacgaaaatcttggcatggtagacgctggacagg

SEQ ID NO: 47348 - DNA, 453 bp, Oryza sativa
  unsure (1)..(453): unsure at all n locations
tcgcaagcaatgaatnntgttggctgacaaacgctcagtctgcagatagaaaactattccatcgcgcgcttatagcaaaggtactgagttactactacatgagtagtaccatttagtacctattaattcttgcgctctgaatggcaatatctatgaattaagaatttgtattatattcttctcccttttcatatgtatataatctcccgttcacgcgatattgccacatcgtctctcgattactctttttttttttggttttaattatgtatgacgacgatggtgctgcatgctgatctacctacttcacagagtgcatctattaaggtacaatttcatgcgtcatactatgaaatactgcatgcgtatagctactctctccatagcaaaataacgtcattttaaaatatatgtagccaatataagtttactactccctccgtcacataatat

SEQ ID NO: 47349 - DNA, 427 bp, Oryza sativa
agcttctcgatattgtttttaggagcttgtttattgaatgaaacctttagaatggtatcgaccaactatgggcttctcatattttgtataactgctagacagctcactcatgccagagtcttttattctagatgcacagcatgaaactattagaatgagcgcttaatattgcactccaaaaaggtccggtacagaaatccaaaatccagatatagtcagagctgatgttcggaactgaggtgatcggataagttcatatacttcaccgctaaaggttacacaacttcatatggtacattatccagaaatgttacagcacagagaaatcgtctatcacctcgtggggaagaagctgccgatggtgctgcataaagccaaaagccaaaacattacatgttatctttggcaatcattggtggtatctttg

SEQ ID NO: 47350 - DNA, 392 bp, Oryza sativa
  unsure (1)..(392): unsure at all n locations
cgaattgtagctcagtttataccagttctctctgatgtttgacataccagctttgctgtctagtttcttgtaagggagtttgtcgtctagtttagttactgcatagaatgaaagtaatggaactcaccttaccttttgttttttaacatggctctgagttttgtaacgttacatttatatattccttgcacggngatagcctttctctttcatatttgacatgctagctttgtagccactacaatgaatctctgctgactcaagaattttataagtttgttagtcttaacttctgttctatatnttccatggggaaaggtatgaggtttctgaagtttcttttgacaacttgaacgtatcttcaagaacattgcatatagcatgggatgatg

SEQ ID NO: 47351 - DNA, 439 bp, Oryza sativa
agcttcattctatgactatgtctcgacgcttctggacatgtccaacccggacggaatagtcaacaccagccacaccatttattcatgctggggtcgtcattggcggggagcatgttacggggtaagaggcgaggaaaaggggatcgacgatgaaggtcatctgtgccttgggaatcatgtttggtacgacgattctcacaactattgatacctggtacttaaaaagcatcagactcggtacttggtaggtactccctccgttttacaatataagtcattttagcatttctcacattcatattgatgctaatgaatctaaacatatatacctatctagattcattagtatcaatatgaatatgtgaaatgatagaatgacttacattgtgaaacggagaaagtagtagcgaatatcaatcctaatatatatctggtattc

SEQ ID NO: 47352 - DNA, 385 bp, Oryza sativa
taatgcaggtaaagcatttgtaacctcatatgttcagactctgaatgaccatgcactacatacagaaaaatcaagcagaggctgccgggtttgatatgaaagagagcagtgagacagaggactgttaaacagaagtgagcaatcaatttgaggattcgtatcagcaggaggagatttagctactgccacacccacgtcgagcttcaccttctgattaccgcgtgcttgtgggggctcgatgcgggcacagatcttgcaagaaccaaagtctgcgtgggatggggaaggagacggaaatgactcgcaagaagtcgatgggaagacagcgacggtaaccactggctccgcacggcggcggcgacggctggctccgcgagcttgagaa

SEQ ID NO: 47353 - DNA, 443 bp, Oryza sativa
agcttgactgagaaatcaaaggcgcataacttattgcactattaagactgcaaagtcatagaagaaacagacagagctctttgtatatgaccccatttttctaacatgtgaattgcatgtatcagagtaaaatcaaaatcttttatttttctgatgtggtatctaccaaaagtgcatccttactaatcatcccatgataccaatatgtgaattccattatatcattataaatcataaaagaggtgaatatctattatttttctcatgtagggactatcaaaggtgcatccactaatcataatttatatgtatatcaccaacataccatcataattctaaagaatcatgtgaactatactatgaaatagttccatactgagcttaactaagtacatggtatgcggagtacctgagggaggggtagaacagcaaagacatcgatc

SEQ ID NO: 47354 - DNA, 446 bp, Oryza sativa
  unsure (1)..(446): unsure at all n locations
nngtggtattgatggcacaaggaatgacatcataaagatcctttccctggagggtgacaacttgcccttggggaagatgataaaagtttccattgttggatccgggggaatgggcaaaaccactctctccagagcagtgtacgacagtgttaaggggaaattccaatgctcggcatttgtgccagttggccagaatcaagacttgaagagggtcttcatggacgttctaaatgatcttgacaaggaaaagttcgacaatatccatagcacaaaaaaggatgtaaggttactcatgaacgaggtctacgacttccttgaaaacaagaggtgcgctcatgattcttattctaattaccctcgcatattatactttcataccatggtactataaatcaagcacgagcaaattntagagtgccaaaatgatgcctctatatgaataaata

SEQ ID NO: 47355 - DNA, 445 bp, Oryza sativa
  unsure (1)..(445): unsure at all n locations
agctntaagacagaagaactcacctctctttcttctaattcagtaaagaagtgatcgagcagtgagcgctttgcctcccgcacttgacagtagacaatagatttcggaatagagttcctcaaggttgaacataccatgttaatatatgccagaaccgttgttcctgttgagtatgaattgtagcaaggttcagcagaaaatacaggtaaaataagttaaaaggcagccaagcaaagccttgatggcatgtatattcatcattaaactaaattagtgggcaatattacacaaggttgcaacaatatgataaaccacttctcaacttcaacaaatggccatcattgcaaagcagtaacagtatacattgaatatatacaaggaagaatggttgatgacttaccaattcgtctaagataagaatcattatatctatcaaaaatagagt

SEQ ID NO: 47356 - DNA, 443 bp, Oryza sativa
  unsure (1)..(443): unsure at all n locations
tcggactaagaaatctaggttaatttatgaattagtccattggatgtaccaacttatgttatatgcaataaataaagtggttacatgtgttgataattttggattatccggcaaacggcttatcggataatccgcatccaccggattttagagatattatatcatcatctgtatttgcatcatactatccacatccacatccatatctgccgtatttctaaaaacccataccatatactcgtttcgaacggattcggagcggatcggatcggatattatccgatccgttttcaccccacatcgattctttgtgcatgaattttcttctcaatggcatagactttgcaaggcaataaacatgatgcaaccagcattagcaacaagcaatgctntgttaatctcaaccatgtatctaattgctcatctgctgttcagtaatcttg

SEQ ID NO: 47357 - DNA, 449 bp, Oryza sativa
agctctacttagtaaatgctgatggtttattttctgtatatgtgccgcttcaggggtcttggatagtaaagcaaagtgtgggaaagaaagcctgtttggttggtcaagcactagagatcaattatttccgtggaagcaattatttggaggtaaaccctcagcatgacatgtatctccattagtttctcatttcattccgtcatcagaattcagatgcttggtgtggcaatgccatacttactggcttcaataagcagtttatccaaagcattatgtctcacttacaaatagcgcagaataacaatggattgaattttggctactgttgccacttacttgcgcttacggttgacttcatttaccacaatctacgactagcgttacaaagattgtctgaaataaatcgtggcgtaatgaatctgccattctgtttggtacatccagctctg

SEQ ID NO: 47358 - DNA, 452 bp, Oryza sativa
  unsure (1)..(452): unsure at all n locations
ntagcagtgaggagaaaaaggatcacttgaattgaatcacatatgtgattcaacgcggaaaagagaacccttggctactaattctaaaactatagcaccatcacgtatagtatcctgctcctttcatggcaacatcagaacccaactggtagacctgaaaattatctacataggattaggcaatctatctattatattattaaaggaatagaaaaagaagcctccacgttcgctctcatggtctagaaattcttacattaatcggagaaaaagaaaaagtagagtccatatagaaatacaatttagaaatagctgaaattcggaattaaaaaataaggaatattagaatagtagactagagtccatatagaaatacaatttagaaatagttgaaattcggaattaataaataaggaatattagaagaggagactagaatccatatagaaata

SEQ ID NO: 47359 - DNA, 425 bp, Oryza sativa
  unsure (1)..(425): unsure at all n locations
agcttgaatcaagagcaccttgctctgattttctttgatcgcgctgatgaagcctagagggggggtgaaaattcaatcagacccggaacttcctggtaaggaactccggaacttccggcctcccaggcccggaacttccggtgttctaagacaggaacttccaggtaaaagaacagagataaaatttaaatttcgaaacaagagactaagccaatcttcacaagatggtgcacaggtattctaagcagaggatagatcacagaatcatccacagaaacatcacagaaagagacaagagcgattntttcccgaagttcggatcttgtgatcctactctccgntgaggagctccaagagctgggtctcgattaaccccttgcctcacttgtgcaaaaccccagaggaaatccacaggcttcaacccc

SEQ ID NO: 47360 - DNA, 430 bp, Oryza sativa
  unsure (1)..(430): unsure at all n locations
tcctgtagtaatcagtttttaacccattgtctcacgattagttgatctgcatgctccattcaaatgttttcaaatgctaagggcgcgcgcggctgcttgaaaatggcagggatcctcctctataaatagatggagtggggccagcagggagaagaagagttcgctggggggagtggtgtgagggctggccaatgcgaaaggctactgcgctgcatcgctgctagttcgctactgcaaagcaattgccaccgtgctggtttctcgctctgctatgccggaagaatcagaggtgttccaaggtgggaatcatgctccttcttcgttcttaagctcggccattgtgtacgagtcgaanaatctcttagttcatcgtcctctactcatgttaatggattctttngctgtgtccttcngttcggccaatgagtat

SEQ ID NO: 47361 - DNA, 440 bp, Oryza sativa
  unsure (1)..(440): unsure at all n locations
agcttaaagaggatgccaacgctcatctgttcttttcctggagatatgtagcacgtacaccataaagggtgttagtccagacaccgtcaggctatggctcttcccgttttcccttcttgggaaagcgaagcagtggttctatgccaaccgtgctgctgtcaacacctgngacaaatgctctacgacatttctctcgaagttctttccgatgggcaaaaccaatgctctccaaggaaggatttccagtttccagcagacaagggacgagtcctttcctgaagcatgggaacgatttcaggaatatgtggcctcgtatcctcatcatgggatggacgactggctaatcctgcagaacttctacaatggactcactcctatgtcccgccatcaccttgatgcggcggctggaggagcattcttctataagacagttcgtggag

SEQ ID NO: 47362 - DNA, 403 bp, Oryza sativa
  unsure (1)..(403): unsure at all n locations
tggcagtcaaccgcttacatgggcgccaccgtcgccttcttggaagccttcangcgaatgcttttgcagcctcccttctccaccaattctgcaattgtcttcagggacgctggagacagaggcttcttgtagcgctgcaaataaatctttttgatgttatgatcaaaggaagatctttcgtccattataccaaaatttttagataggatttcctgagcaaaagattcaagctttgcccctgctcgtcgcttgcgaagcaagcgttcgctgtgacgctgagctgaagaaagcgccgggattgtcacctttgctcttcccggacggcgagcttgtgtttccggagcangcatgagaggcggctgcactggtgttgacagagcagcaatgaactcctggacagggc

SEQ ID NO: 47363 - DNA, 437 bp, Oryza sativa
agcttgggttaggttgtgttctgatgcatgttgttaaggtggttgcctatgcatctcgtcagttacgtccgcatgagaagaactaccctactcatgatcttgagttagctgcagtggttcatgcgttgaagatttggcgtcattatcttttcggtactcgtacaaaggtatacactgatcacaagagtttaaagtacatctttactcagccagatctgaacatgagacaacggagatggttggaattaattaaggattatgacgtgggaattcattatcacccgggaaaggctaatgttgtagcagatgctcttagcaggaaaggctattgcaatgctacggaaggacgacagctgccattggagttatgcaaggaatttgaaagattaaatttgggaattgtcagtagaggtttcgttgtagccttagaagcaaag

SEQ ID NO: 47364 - DNA, 394 bp, Oryza sativa
tcaagcttatgtcatacatgagaccgagctgtcaagaaaagtctattatgaattctgctacgttgtgtctctttggaggagggaaggcaattgctcacagatatacactcgggcatcagcgacaatcacgctgccgcacgaaccattgtaacatccttaaaatttgacaacttgttaaaaccgatttagttggctttgattctctaaaaatataaccgtcgagctagacattgatttaaaatattattttccaagtttgtttccggtgtgtcttttctcgtttaattttttgtcgcaaagtgcatatcatccctcaaataattgctttgaatccgcattaaatctatcccaaagatcgcaccatctaaatatcacatcagttcaaattctatct

SEQ ID NO: 47365 - DNA, 432 bp, Oryza sativa
agcttggctccaataaagaccacaagaattgtctatttctcccaccacttgtcaagggccagaagcgtgaacgcggcaaggggaacgtccatgagttggcgccggagccaaaaaggggcaaggctgcgacgtctatgccggtgagcaaatcggggaaggtcgtgagggcgccagcccaatttgagctaagcatgccattggtggaggacaatgtgttagctgtgatgggtattgcttgccgagagctacataagcaatacatggagctaagcaatgccaagcggaatatgagggagtcatccatagttggacatcacgaccaccagccgttcctatcgtcgcctgcctatataactataggctttgatgacctcttcgaccttttcaggatccggaagttggacactggtcttctaaaatgctactccttgt

SEQ ID NO: 47366 - DNA, 449 bp, Oryza sativa
  unsure (1)..(449): unsure at all n locations
tgcttaacagctcctgtccggtgacgactatcttggccatatacataatggctattacctgaagcatgacaatgttacaaatgttgattccgtgtaagctaaatgccacattatcacatatgcaagctgctaaggcattaagcctgtgtaagtttaatggatccatccaatgttaatccatggacagtggcatgtagtggcgcacgctgcangaattgcatgctagcaaacaatgcaacacgatgcaggagtggcaagctagccaataacgcaacatgtgtttttggtgtatgcacggatattttttttctgcagatgacctgccacattctgcagccacgaacacgcacgtacgcatccacttacttgtgagagttgaagacggcaaatgagtggtgctgatgcgtgccatcacgcgcgcgcgggtggttgcatggatgaatggatga

SEQ ID NO: 47367 - DNA, 347 bp, Oryza sativa
  unsure (1)..(347): unsure at all n locations
agcttgcagagangacaacaacttctattttttgttttcacagaaaaataagccccagcgacctataagttgcgataatcgacacgcggccagaggtagagagtgttactcttggtgacatgtatgacctactatatataatttctattttcagtgcgccagacctacatgatattatgggtacagcatggataccagattgattttcattaattgtctgctggtttgacacaatagacaacttgagtcatgagtcatgactacattataaatggtagtaatgagcatttaactgcagcacatcactgtccattatcaatcattatacgaactgcaatcacaactga

SEQ ID NO: 47368 - DNA, 461 bp, Oryza sativa
tatggagaaagggaatccacgcataataatatgatgctgtctatctcttactttgtttttctttgtaaaatgtcaatgctcgcatgtacatggtattgcatttacatcttggcatgatgccacataagctgaatgcatatgataacggagggtagggggatgtgcaaagaagaacatcaaacagctacgcagtactatcttttgcttttcatttgcaacgaacgaagtacaagctcttgatactacctaggcaagaatacagattcctttatgctgaaatacttacagtgagcggattaaccgagcaacgctgctcttttgttccgaatacgaaaaacagaaaacgaacagggctctaacattcgtcagatcaccctatctagctatgtgagtggagcacggagttcaaaaaaacaacggacatgcactctcttgacactcacatgtacgtctagacacac

SEQ ID NO: 47369 - DNA, 452 bp, Oryza sativa
agcttcttattgccaaagataccaatcattttattcttgatatattggaggctgtaaggacgaatgatgtgagggcagcatatcgcattcttgtgttggctgatgtgagccctaacatgatatatgatgagttaaacaatgatgttcatcatgatccttcagtaacagatgggaagttatttgatccagcatcttgtgatgtaaaggatgattctgggaaaccagaaggttgtctacaaggctgttccctgttgcacattgcttgccaatatggccattctataatggcagagcttctgcttctttttggtgcggatattaataagcaagacttccatggacggacaccgttgcaccattgtgtccgaaggaaaaatgatgcacttaccaagcatctgctaaagaggtaggattgaatttctagcagtatggaatatagataattacagcta

SEQ ID NO: 47370 - DNA, 457 bp, Oryza sativa
gttaaggtgagcctcgtcgacgtcacggagatccttctatcggtgtcaccgctgcacccagtgaaactcattgtcagctcaattcaaacgccatgcatctattgctgtgtacacgttgttcagacatgctgaagtatactacaaggatgtttttttcacctgaaaacccagaccctgatgccgccggcgacgagcttacggatgatggggagagtcgagaagggagcatctctccacttgccgatcacgtcgctgcaacaaacacaccgtcacaaaacgattctgtcaactcaaagcttcaaagactcaaaagagaacagaggttgcaaacgcttattgtttgcacctgcagtgcgtccagttgtagccgatattggtcacgttggcgtgcagcgccttcttgcacgtcagcccggtgaagtacacctcggcgtgatccgacgtgcacggatcgtac

SEQ ID NO: 47371 - DNA, 433 bp, Oryza sativa
  unsure (1)..(433): unsure at all n locations
agcttgctnttggaatatattggcagcttattttatccaataaatggtgagctcattcctagcaaaatgtagcacaatatgggtgtgaaaacacaatataaggatctaaggtcggatcataataatattccttggtttaagaattatgatggtctgtgtgaccaaactactgagattatattacaacttaccaaggtagtgtacttaatttacgagaatatgattgataatgaggatacaatgcaatggtagagtagtactcaaggatcactatgcactgttgtgagttagttgatgacaagccttggggcttcttgctgtagttgggaagcaaaatggagttgggagctgtcacgcccagaaattcccgaatagaattccaagcagaatgtgcattaaaatccccgtacaggaccagccggngtacacaaac

SEQ ID NO: 47372 - DNA, 446 bp, Oryza sativa
gtctcttactgaaggagggaaagacttatcatgaatgagttctaccacagtactcagcaagccacaccggcagatgcatgattaatgcaagggggtacaaggggtaataatataaggcttaagctttgcagtaaacagcatttaaaagttacttagttgcccaaagctattttataaagacgatcctagagctacacagcattattaatcaaggccgtgaacccacacgaacctgccttaacccaaggcctacgatgattcagaccgaactggcaacccgaccctgtgtcccaacacgtgccaagccaacccaggctaaccattccacattttatttgttaagcaaattgtaagaattaaaatactaacttggatacattgctcggctttgccataaccgaaggcgcttctatttgaatagattatactctgatcagaggtgtaca

SEQ ID NO: 47373 - DNA, 320 bp, Oryza sativa
agcttgaggtcagccactcagccaccattcttatctctctcctgcttttcggcctcgcttcacccttttctaacattttttgatgacacccttattaccaacagaggacacgcaaacctggcaaggtatggtctccacacccctttctcttccacgtaagcaatctatctacgtggatggataataccacacgtcatatgtatgtattgtgaatggcttaacgggacaatttaccctgctgaaacgtgcagctacgtgtttctgtaccaactacagatttactccctccgtcccaaaataagtgcagttttgcactattt

SEQ ID NO: 47374 - DNA, 424 bp, Oryza sativa
tctgtgacaatatatagccttctctctaaacaatgtgacatgttaacccatcaaacatctatgtccaagacggcaagaccccagccagcccatgtgaagataagatgaatgaaaattgtagctagatggcccatcaacaccagtatttgcattgagcggccggtccaccatgttgaattaacaagctatatgcaatgtactttcataatacatcaccaaacactaaatagaaaaactaacttttcttttttactacatataggaactgcctcgcagatttagttaacaccatagatctttcaccagctttgtttcgtaatatgtttttaggccaacttggttaatttggcaatcccatccaccgcgggcgagttaaatgtgggctcatctcatcatctgacctcaaggtagaattttcacatgt

SEQ ID NO: 47375 - DNA, 432 bp, Oryza sativa
agcttaattatcatcattacattgtagaattatgatgttaagggagagatcaagacagtccttggtgaagatctcgtaaatgacgggcgatttctgcccgcagtgagctataaacaaacatgaataccaactctatggaacaaattaagagtttttggttctctcaactggcatcgtttaattccattgtactgatcagctacacttaacagaaaaaatatagaggcctgtttagatgggactaaaacttttaagtccctatcacatcggatgtttgaaaattaattataaatattaaacgtagactattaataaaactcatccatgatcttggactaatttgcgagacgaatctaatgagcctaattaatccatgattagcctatgtgatgctacagtaaacattctctaattatagattaattaggctta

SEQ ID NO: 47376 - DNA, 440 bp, Oryza sativa
  unsure (1)..(440): unsure at all n locations
nttggtcatcctttccagacatgctctgtccagtgtaaaccagcacatctgggtcatcttcggtattctcatacacaccagctgacacgatactgatagccacaggatcctcctcattaccaaacttagcagacatgtaatcaatcccagacatgctctgactattcagtccaaccagacacatctctattctgaagtagaacatatcaccaacctcgacacctggaacctctccaatcctcttgttcttatttgcacgaagttcagcactcatcatgatactcccggcctttaagttatgttgctgctttgctccttgcttcacctcatccaactgcatgagcctccgccgcagtgcatcaaacatcatgagtacattatcaacagattccctaggatcatctganaacaaagatggcagattcagaagattgacatca

SEQ ID NO: 47377 - DNA, 393 bp, Oryza sativa
  unsure (1)..(393): unsure at all n locations
agctngctgacatgaggaccccactctctttctatgtgccaggcgcattaacgaatgggccggtcttgttgggctagcaaacagaggtacactaccggattgggcccaaattacgaagcggattcttaaaaaaaaacaatggctttaatgccatttctaaccttaccatctttgttatcaaaattgtgtaaaaacgccaaaattgtggctacattgccaaaatttggcaacaaagtgaattttggtagcatatatgtggccaacatagtgaacacatccaaaatatctatattgccaaaatttagcaacattgccaatcgtaccataaatttagcaataccaaaatttggtattgtttatttctacatcaaagtgaaaaggcgccaatttctt

SEQ ID NO: 47378 - DNA, 424 bp, Oryza sativa
  unsure (1)..(424): unsure at all n locations
ntagctgacttcctcgccgagtggaccgagtgtcaagattacatgccagaggaaaagatggaatattggactatgcattttgatgggtcgaagaggcttacaggcactggagctggggttgttttaatttccctgactggagaaagattgagctacgtattgtggatacatttttctgcgtcccataacgtggtggaatacgaggcgttgctccatggattaaggattgccgtctctttatgcattctccgactaatcgtccgaggagattctcagttggtcgttaatcaagtcatgaaagaatggtcctgtctagatgacaatatgaccgcttatcgacaagaggtacgcaagttggaagataaattcgacggactcaagctcacccatgtcctccgacataataatgaggcagcagacaggc

SEQ ID NO: 47379 - DNA, 386 bp, Oryza sativa
ttgtcatatcgaacgcgctccagattatcaatctggagcaagattaaattgacttatatctttgaatcaaggattaccttgacccatgcttcgaccgctcaaatagagacagatataccccataacagcggcagtagcgctgatgtggcaacatataactctcatacatgagatctatttctacactgcatggacatataacacgcttttgcaaaaagaaacaggcccctttactgaataacactatatgtgaaaagaggactgcgatctatctctggggcgatacgtgtactacaggagagacatgcaggacctacgccacaaagtggtgtgttcctatcacctccatacacatgatgacatcgacgcgagctaacgatattttc

SEQ ID NO: 47380 - DNA, 439 bp, Oryza sativa
  unsure (1)..(439): unsure at all n locations
tgngctnttctctctgtgagtgatgattgttgnggttgtttgtggtgccatccatctatccctttgtgtgtgttactgcttccatccccatcattgcagccttttccttcttatttgccatgttgctttaaagctggttgttttgtggtgtgctgctgtggtgtgtggcaacaaaaagaggacgatgggctgtgttcttgaggttgatgtggatggtgaagaggtcttcctcgttgataaagttcttcctcctttccttttccttcttgcagatcttcttccttcttggtagcaacaaatcttcttcttgcagttcttcctaaggtctcttcttttcttgctctgttctgctgcttctcatcctaagatgatgaattggtgacgatggcgatgttccttgttgtggtttttcctttcttaagttgacagcttgcctctg

SEQ ID NO: 47381 - DNA, 443 bp, Oryza sativa
agcttcaatgtctaagcgacgacacccttgtctatgtcattcccctaatagccaaactgttgatgtgaaggggatcgacgttaaagatttattattattatttaaaaaaggattaaaatgtaaaaaaaatcttacaaaactttaacgtcgatgacatgtttgtaataaaaaattagattgtagtcttttttttaaaaaaaattacaaataggtcctaagcgctaatttcttaggagctaacccttctgtatctcggcttatggggatgagagtgtcgtcactaatatcgttgatgctcagacgttagatctcggtgccaggatcactggcggcaagaaaaatatctattcctaaaataagttttttatgaatacatttgtaaaataattttttaaagagagcaaaatatattttaaaaaaatccagcatttccatttctcccg

SEQ ID NO: 47382 - DNA, 445 bp, Oryza sativa
  unsure (1)..(445): unsure at all n locations
tccatatcctgatcgatccatcggcttctctgtgctatcttttctggccatttgttcctatcttttcgatgggacgtcgctgtaaaggaagactcggatctggttcgaagtttactacagtaaccagcttcaagcaggcatggggattggggagagctagtagatgtatggccgccatcccatccaggtgacgtgtctgcaactgcatctatgagtaggcctcatcttctttaagccctgcgctgcatgcatttcgtgtcattatatttatgaccgcacaccatgccacaaaaggtgccagtatgagactactctagctaanggtaggtacaatagctgactataatccaactataaacatattttataaagataaaagatgagagagaagagcagcgggctacagatttgtagcccagctgcagcacagactacaagacacagt

SEQ ID NO: 47383 - DNA, 346 bp, Oryza sativa
gcctggatgaaaaaatgctatcaatgataaactatcctctctgtttacgggtaagcaatatcttatattaattcgtttgcactccctgaatcgattaatataacttttatagaacctgctgtgcttagagtacctaacactcctcccacgaaactaattgtctttttgccggttcatcgaccgacaaatgcaacgttttggcacacactattacggctttccaccttaccttgggattataacacacaacatgattgttgtttttttcttattacaccataacgtatagtcatgctatgaattttatttaaattacagcactaattataaatcactaatagaatcc

SEQ ID NO: 47384 - DNA, 444 bp, Oryza sativa
  unsure (1)..(444): unsure at all n locations
ntccaacaagtactcatgggccctaagattccttctatatcagtggctaggtccgcttgaaagtaatgctgtcatgagaccccaatccgaatccaaaacgtgtagaactttatctcttatcttctatgaaccaaaagtgacgtggtgagatgaaaaaagacttggagaatgtcttggtttggtccccaatcaacttcttcaatcatccatgcattccttacgctcgatctcttttctttcgcccaagcaagtacctctgcaaacaaaaacacacgaaactcattgtgtagcaagtttgttcaaatatataacaagtaaatcaaatatagaacatatgcacctttggttgattaatacgtaagggtagtcatggtatatncgagctagttgtgtcctcatcataatggccgtaccctacctataatcatttaatagatttagtag

SEQ ID NO: 47385 - DNA, 432 bp, Oryza sativa
  unsure (1)..(432): unsure at all n locations
agcttatagtgaanaatattgtcattgaactatattgttcattatggcggacagatgcacaccgttccaacacagccaattagacaccctgattattggcttttatcaactgcaaaggatgttcagcaggaccaaaggaattacagaattcatgaacccctatttcgcctagcaatagtagtacatctaatatatctgagatcagctagatcatcgttgagaaggaacatttttcagtgagcaataacaaattctccagtctcagagagcatgctgctcgcaattaagcccaactaggctactactgcacttaacacaaaccactctcatgtgaaaatatcaagctgtcctatataattccccaaaaatcatttaatgtccctaacaaacagtagaacttgcagtacagatagcacatcttacacaaaaagc

SEQ ID NO: 47386 - DNA, 451 bp, Oryza sativa
  unsure (1)..(451): unsure at all n locations
tagcactagaaaccncacttaaaattcgcagctcagctcaaccgcttaaacagccaaagctaagctaccaaaaaacgagcgtgcgtgcaagcgagctggagccagcaatcgcgggggcgcataccgaatagaccgcgcggcggcgatgatgcaccgcgccggcgctgctccgacctccccggcttccccctccgcgccgcggctagctcaaggagttagggttttggagctcgcgagccatagagcgagagagagagagagagaggagtgggcgacaaaaaaaagaagcagcagaggggacggacgaagcagtgtgaaactggaggaagccgactcgtgcgccgctttgacttttcagtgctcggaccgaagcggtgggccctagccgtgggccggtgggcccggcccaatccaattaactactcttctttntttttcctcctcatcttct

SEQ ID NO: 47387 - DNA, 433 bp, Oryza sativa
  unsure (1)..(433): unsure at all n locations
agctngaaacgatggttatgcaactgtttgtctatcatgaatggaaatacaccaatagactggaataatgttattatgtatagcttggtttccttctaattctggtcggtgtgcttgcttttatttggactacactctcttatagagtgctactccctccatcccaaaatgtaagtatttttagctatgaatctggacatctgtatccagattcatagctaaaaattgctatattttgggacggaggtggtagattataataattggctgtagctcttttgtgcacatgccgggatgttattttattccattatctaaaaaatcaagctattaaggagttgcgagttgcaacctcccccctcctactctctcttccttggttgtacctgtttcatacatgtcttcccattaactctcagttcaaatgaaccac

SEQ ID NO: 47388 - DNA, 459 bp, Oryza sativa
  unsure (1)..(459): unsure at all n locations
ctattctgtgggttgtcatgttgtctntgcagntaatatcttccaaaggacttattcccaaattaacaggagaaacatggccacattaacttattcctccacacaatattggagcagacgaggccatgttccatctcaggcaaaagttctggacaggtgaattcagtagccccacgcagaatcagacatcccatctattttggtaccacaacaaaagaacctgagagggttggtcaccatgtgtttgctaagaaatgcgctgccagtagatgacaaataactcacaggattgtggtgaggtcgaactgaacaattggaggaggggcagcactcagattgaaggaggggacatgtacctataacagataagttngttaatagcgctctagaagattcagaagacaattatttacgtcaactcaatagaaccaacttaatttagagagaatagagctaact

SEQ ID NO: 47389 - DNA, 435 bp, Oryza sativa
  unsure (1)..(435): unsure at all n locations
agcttggatcaaggtgaagaaggcgagcatgtgttcccctctccgataaatctagctcacccaagaatccaccaaagtatccaacgagatcaccccaccgacaacatcttatgagacatcaacaagggagtatccactcgttctcgtattgcaaattnttgtaagcattacttgtttgtgtcttctcttgaacctctaagggtggaagaagctcttaatgatccggattgggtgatggcgatgcaagaggagttgaacaatttcacccggaatgaagtgtggactttggtggagcgacctcagcaaaatgtgattgacacaaagtggatctttctcaacaagcaagacaaggccggtgttgtgataatgaacaaggagaggttagtggctcaagggttcacccaaatcgaaagattatatttcggtgaaactatt

SEQ ID NO: 47390 - DNA, 464 bp, Oryza sativa
  unsure (1)..(464): unsure at all n locations
ctcagctaccacctccaggtggaggagaagcgaagcgcagagattaccagcgagtatgtcatgtcatttgcctgatcggccggcgtggtgttgccggtggcgaacctgaaatcaaggtgagagaggttgttcttcatcccaggtaacttgagccagtcctcgaaggtcgtgttgcagcactcgaggcagtcggagatgatgaccaggcgatgaacaggaccccggtgagcagcaaggatacttccagcgatgtcgattcgcttgtgttcgtgcacggagagcgcgttcatgtcaaggttgagtgaggtggagccccagagcgggagccattggcgggagatggcctgcgtgcgagccgcatctcgggtgtaaaggagggagacgatggtaccaacgatttcttctgggaggctgatgttgtcagtcctagaggcttcttctttcttgggttccnctaatccaac

SEQ ID NO: 47391 - DNA, 446 bp, Oryza sativa
  unsure (1)..(446): unsure at all n locations
agcttataatanaacanaaagggttntcatatgagatcaaaanaaaaaactcccttcttaatctcatttgattaaattgatagatgatatgcgtactatgtctatctgagtagtatttctgggaacattgcgatctgtctgctatccgttggaaggcactagtatcttatacatctaaaaaaattattgaactagttttttctttatttaatgctgtataccttagttgtttataactctaagagtgcgttcggttatggatgatggtatatgcaaactgttatggatgatggtatatatatatggtcattgaaattttgtttgatatggtgttcttttttctttttttttggcttgtattaaatatcggatgaatattgtccatgttttctaaactcctaaatatgtgaattttattgataaaaattctataaataaatttctta

SEQ ID NO: 47392 - DNA, 462 bp, Oryza sativa
  unsure (1)..(462): unsure at all n locations
aatagattgatttttcactattcatgtgttcaaatggtagagttctcatctttcaaaggttgaccccttattataaatattggtgaaaaaccactaaggttagaattcatgggtttttctagtataagtttgcattcatatgttatgttttcaataatgcataactccgtctaggtatttttagagttcaaaacaacacacacatgctgtatattnttcaagttagtaacttgagcttaatgaatattgatcccacatttaagctgctcatgcagctaaaattcagggattttttgagaggttattcaacggttatagctctcatttccctgcttcaattcctgatggtggtgacagagccaaattaaaattctccacgcctaatgctcaactgacatattctgcctaatcatcctactattgtgtttaaaaaaaagaaatatgtgattcttctaagaatat

SEQ ID NO: 47393 - DNA, 292 bp, Oryza sativa
agcttggctatcgctcgcggcgcttgattgtgtttgtatccctgagaccgaaagtgtgccggactgtgatgatgctgatgctgcattatgcagaggatggtggcaaactcatcctctccaggagcgcgccattctacgcgcacagctatgagtcccgtgatgtcatgctggatctacaccggttgaacatcatacgttgtgcattctactaacgagttcactctagaaccaacgagaggttctgagccgccatacacatgtcgactgaaggataccacatgaatatgacgat

SEQ ID NO: 47394 - DNA, 423 bp, Oryza sativa
  unsure (1)..(423): unsure at all n locations
tctaactactcttacactaacacactgagctgatatatttgctctattgnactattttctatactagaattaggaagagagtctagtaaaagaagtcggagggattccggagttgtccgtaatcctctcatgtttcttttattatgttaattactctgttttcaatagaaatatctttccgagtaatttagatttgcttgtgagaattacctcttcggtagttcctaatcatcatactggattattgttcactaaaatatagtgattactctagtgagttataatgcttagacgaggagtttatgtaatatatatccagcaattgttgcgtgtcccacagtacgattgaggtgggtgtataggtggtgatagccctcaagagcacttaagtcctccctgtctaagtacatagtagagcgacat

SEQ ID NO: 47395 - DNA, 401 bp, Oryza sativa
  unsure (1)..(401): unsure at all n locations
agcttanggatcactangatgcgtttgtgtgtatacaagactggagcgcaagtgcaagcacagatagaaaagaacaaagccaatgcagctaagaagaaataccatcaccggcttgggtcaggtggatatggaaaggcaatccccaagtgggacaagttggaagctgacttgatagcaaggggtatcgagccggccatggctaattggcctgagcgatcgaggaactggttctatgcacagggtggatcgctcaatccacgtgatggctccctcatattcagcgatgagattcgagatgtagcacgccgacttgcggatgcaattgaagcctctacgcacgggactttacggcccgacagagagaaagatgagctcaccctcgcactacaaaatcttgagca

SEQ ID NO: 47396 - DNA, 361 bp, Oryza sativa
tatagtaatggcacatgcaatgaaccatgcaatttcttctgtccttgaaccatacaatcactgagagttggcttgtctggatcttgtgccgcacgataaaatgaagaattcaaatcaaggctggggcacatatatcatcctctctgttttttttgaaacaaagccatccctagctttgaattaatttgagatagttcttatttcgtctttacaacatgaaataccaatgactttaacaccaagatgcataaaaaaatagtgacactactaggaaaagcattatcgcaagcggccgaaaagggtctttgcatgcggggcggccgttcgcctgtaagccaacaactgtgaagatcgccgatct

SEQ ID NO: 47397 - DNA, 437 bp, Oryza sativa
  unsure (1)..(437): unsure at all n locations
agctttanaatttggttatacccttattttttactactaatattatcagtccggagggagtaactacggtgaagaaggtacaggcaacagataggattgttggaccatgaagaaaaagatgtaagagctaaagtaaacttgcgaccaggtcgaaattggtttacttttgtggctcctactccagtacttttcaagatgatatctttcttttttatgttttggatatgacatagttgtttaatttacttctctctattgaagcagtgggaaaaaatatttctgcagttaattatagttaccctgtcaattgaattgggccacgtccatagtagggtggagaagtcgccttgtttatctcctctttgaagcagtaaccccactggaactggtcagaactacccctctgtccacctgaattaatttaccacggttaatac

SEQ ID NO: 47398 - DNA, 376 bp, Oryza sativa
  unsure (1)..(376): unsure at all n locations
tcgagacagacaaccaanatatccacacgcaattntcctctccaaatccaaagcacgtactctcacaaaaagagaaaaagaaataagcacccaaaaaaaaagggaagaggaggcaatgccaccggtggggcccacatgtcggcgggatggtggggcccacaggtcaaggaggtggggcccacggtggggcgcgcgcgagaggcacatccagccgtgcacagctgcggcagatgggatcacacgaacctgcacgaccaactcctcctccacagcctctctctctctctcatcaaatccacgagctttctctctctctctctctctctctctctctctcctcctcctcctctccttctccttcccatcgccaccagct

SEQ ID NO: 47399 - DNA, 442 bp, Oryza sativa
agcttggccgccgctgtagccgagcccttttatatggtcagcgccattctatatggtgccgaggcttgccgactcagcacctcatgatcaccaaacgcaggagctatgtttgggtgggacgggcgggcgcgcctaatttccaaaggtcagcgccaaagattgacgttgagggattcaatgtcagtgccaatttttggcgctgaggcttgccagctcaacgcctcatggccacccaacataagagttttgtttggatgggcgggtcgcgcgctggtaagacccaaaattcagtgccaaatatgctaccgctgagctttggactggtaacgcgattctttctggcactgagatcctcttacacataaactaagatttttggtctggtttttttgcccaattccgcggagggaagcaactttatagattttcacaatgaaatcaa

SEQ ID NO: 47400 - DNA, 445 bp, Oryza sativa
tatccagaagagaccgatttcacagagaatgcggcatggcaagttatctattaattaagaatagtttgttagttaccttttatctttaggaaagtgcgtctagtgtcatataaggactttatcttttccttttatctttaggaatgcttctttcttgtccgacaaggactcgtatcaacctatgggtataaatatgtacaccccgtgtctatgtaatctatcgctacgagcaatacaattctgcgcatcgccaccctttttacttctactttagtttttacgatccggcggaactaagcacccgacgcggggctgcatcgtcttcgatctccggcgaagggataagtccaatgttccgccggcccacgcaattgtatcgtctacttcggcgtcgatcaaagctgcatcaagacattcgagatcttggattactctgcgttggata

SEQ ID NO: 47401 - DNA, 449 bp, Oryza sativa
  unsure (1)..(449): unsure at all n locations
agcctttcattcataagaaggcacgaaactttatcttgtcacataatagagntggagagccatgaccatataaactttctatagtacttgccttctaaatatgtaggtaccttgcatctacatcctaaaattggtgaaagctccaactaaccttgctgtcaattgacctctctctgtaatttcccacagctttattgaactgcacactcgtgcaagcaaaatccacacatagggatgctaatctctctcaaagatgcagttcaagaaagctgtggaagaccacaaagaggaccatcttcttttgcaggtgcacagctaataacatgcaataattcatgtcaagaagctggcaagaaactgtggctagctaagctagttgttcacttctttgtatagttcaagtgctcatgtagctgaagaagagttgaaatgaaggaagaaggcacaag

SEQ ID NO: 47402 - DNA, 445 bp, Oryza sativa
  unsure (1)..(445): unsure at all n locations
ctttacaaagagttctggccacaactgataaaccagntgttataaatgactgaccttttgtttgagggtaaattagatctgtggcgtttgaattatggagtgatcactctcattcccaagattaaggatgctaataacataaaagcctttagacctatctgcctcttgaatgtatgctttaagtttctaacaaaaatcctgactaagaggttgacagaagtagctgccaaagtgatagggcaaagtcagactgcttttatacccggtcgacatatcctggatggtgtcgttattttacacgaagttctgcatactctaaagaagggtcaccattctggtatcatctttaaacttgactntgagaaggcgtatgacagagtacaatggagttttttgttgaagntctgcagaggaaaggactaatgaaaagtgggttcagtggatt

SEQ ID NO: 47403 - DNA, 454 bp, Oryza sativa
  unsure (1)..(454): unsure at all n locations
agcttcggatgtgcatcgactacaccgatcttatcttgaatgcaggtcctacttttcaacgtactactcgaatttctttgggtagccaaataggacgtaatgttgaggcctatgttgatgacttggttgtgaagacgcgcaaccaagagaccttactctcggatctagcggaaactttcgaaagtctccgctccgcccgcataaagctgaaccccgacaagtgcgtgttcggcgtgcctgcgggcaagcttctcgggttcttggtctctgcccgaggcatcgaggccaaccccgagaagatacgagctatagagcggatgcgcccccccagcaagcttagggatgtgcaatacgtcaccggctacatggctaccctaagtcggttcatatcgaggctgggagagaaggcgctacctctatttaagctcctcanacgctccgggccgtttacctg

SEQ ID NO: 47404 - DNA, 452 bp, Oryza sativa
actcagctcatggcattgtgcttgcgatttttaaacctgtctttggctgttaatagatagccagactgatcgggttcacctgcttaaactacaagcaatctactagtcatggtcatggtcatggtcatggaatcagagccaggttaagattactagaagccactgcgggtcaaagattctttcttaaataacagcattacccaaagagtcattaacctatggcattaactgttgctggtcttgtacactacattctactactactatatttctagattttgaagaaaaaatagcatgcagataaatacttgaagtaggaatcactcgcctggagcaatgtatccataagaacccgcgatgcgtgacatatcatgatgatagttgggggagttcatcagcttggccagccaaagtcagccaagtatgcctcatacttcgtatcaagcagtata

SEQ ID NO: 47405 - DNA, 443 bp, Oryza sativa
  unsure (1)..(443): unsure at all n locations
agcttatctggggcaacttgtgactngtatattatacaacatatagntcaaactctgatgtcttacattttatgaactgggacaaaacaaaagggaatatgaacttaagaaatggcacactaaaacccaggttttatatgccacctaacacacagacataaacaatggaattgcttgaccatgatttgaagtacagaaagttgcttgcttgcatatgttgattctacattatgttcatgtctccaaagtgtgttccacaatcaaacgcgaaactgcatacttgcagaacaaaaaaaaaagaactagggcaaaatgatgattgacagacaaattcgtaatgaatagcaaatcttatgaataacatgtcaagtttatcagaactgtctttattagaaatctggagtcatgagcgcacaccatgatgaccaattcacttcctactt

SEQ ID NO: 47406 - DNA, 409 bp, Oryza sativa
tggaacgcgccatggtgtgatatatactgggttctatctattgaataacgggattggatctttgcatggtccgcgacgtgtatttatagcgccagagtttgagaaatttaagagaacgcgacattggatcgtgcatgagaggttttctcatctttttggaggaattttatccgaactcaaatactgatcgaaatccacgcggcacaaaaacgcatagcttaagcgctttggggagaatagctaatatggaccctaaagtttcgctcctgagttattttagtccttaatctttcatattgtccaaacaagtcctttaaatttgtcatgtgggctaatatagtccttggtcccaccaaaatcgctacatggacatgccatgtcacctttctatgtaaaatctttatgattt

SEQ ID NO: 47407 - DNA, 444 bp, Oryza sativa
  unsure (1)..(444): unsure at all n locations
agctntgngaatgacatgagcattgcatcgtggttgcgcgctanaaattatctaaactatatatgtatagtagctctgataaggtatttcattttcatatctattgaaccaagtggtagctcaaaaatagtgagagagagcaaatatttgtggtgagcaaagagtagctctgtatctgtctgaatggcatcttggcctgattggctctgatatgttcattgactcattgtattgtatctgtaccccaagtgctcatatcaagaaagcttatgcgaaacctttctctgtcaggaaattgcaatctgaagttaacggtttcagtgatgaaatcatcagcactttgacaagaataagtgatgcgcatgcgaatggtgttgaagtatatatattttttgtccatgaaactgtttgtttcatggatggttgccagcaagattgcctaat

SEQ ID NO: 47408 - DNA, 444 bp, Oryza sativa
tcttcgctgcacctcattgttcgcgtgccctcttctgttcttcggagggttgactaccactagcctccttcttctgagtcccctctgcatccctctccacgttttcttcctcgttcaaggactggtttggatcctcgttcccctcttcttcataccagtactggctgcttccctccgcgattgtatcgtacaatatctgttcctcatcgcggtcagccatctgttgatacaagaaacatctgcttagtcacgagacatttatgttttaacaatctaagtcatgtatgctaagcgtaaatgtcgtacattataaccctacacaaccttacgtgctaagtctaattacaaatcgcgatataagctaagtctatgtgacgtatattatacaaccctagctagtgaataattatatactcagtctaattacgcataacataatcttat

SEQ ID NO: 47409 - DNA, 405 bp, Oryza sativa
  unsure (1)..(405): unsure at all n locations
agcttcttacctattaatgcataagangattttattattacattacgaggatgctgttagagatgactatcatagacgataccctatatgagttgatctatttgttcactttcatgttcatgacacgtcttccgatggatgaaccaattaggattgtggggcttgacaaaggccttgatgatatattttaacgtgtattatggcttctatgtattagtttccattacgctgcactaaactctaatagtataggtgcttgtctagagtgtaattatattcatgagacctattatgaaatgcacatcataaatcccaatgcatatgaaggactcgagactaaacatcgcctatgagggtatgcatgcttacacataaggatacgattttgtcctatgttggagatgc

SEQ ID NO: 47410 - DNA, 445 bp, Oryza sativa
cttcatgaacaagctgcagataggcctggatagtggcttcaatatctctgtgctcctgacattcggctaatctcagcttggccttctccagcttgaattgatgctgctcaagataagcagctggagtaaggacgtccactagttcttccgggatcagagcttgaacctcatgtatccgagtactaattgagccatagtctaccaccaagctgtctacagatgatgcttctagccgatgagagacatcttcaagagtcttcctcacatcatcggataaaggagctaaagctgtgcttgtggtgtcttcttctatctcatcaaagtagtccttgatgtcaaaagagaacatatcggcttagacctgtccaaataattcaatgaaagctaaaataattctcagaaagttagatgtcaaatagacatagtcgatctacagtcttgtatc

SEQ ID NO: 47411 - DNA, 454 bp, Oryza sativa
  unsure (1)..(454): unsure at all n locations
aagcacctgggctgcaagctttgtttgacatgaaagagagactgtttgttaccacttccacacattgctgttatagagtactgcagttcgactgctgcatatgcagtatgtataataagatttcaattataatcatctctggctggatgcaaatacatctgttcttgcatttagtttgttgtaaaaggcaccttccctttattcagacagtcggttagccttaaaaacaaaattcttggtggcacatgattcaagaatttattggaatgcctcagaagcattacattactttctctcaaaatgtacgagaaaaattatctcttcaaggctgtttggtattgagcaatataaccaaaccttctggcgcgatgtcatgtgaccataattntttagcacataggcaagagagttgcacatttttagtgaacacattatgaccataattgcgtggcat

SEQ ID NO: 47412 - DNA, 453 bp, Oryza sativa
  unsure (1)..(453): unsure at all n locations
tgttngattgctaaatcctccatgagttggctatggcattgtagactagcccatgttggaatgcggaatttggcaactcttctaaagggggaacaatcctcgggctcattaatgtcacatttgagaaagatcgtgtgtgtagtgcttgccaagccaggaaacaagttgggaatccacatcctatcaagaacatcatgactacaacacgccctcttgagcttctacatatggatttattcgggcccgtggcctacataagtattggaggtaacaactatggctctgtcattattgatgatttttcccgcttcacttgggtgtattttctccatgacaagagtaaggcttaagatgtcttcaagcacttcgtcaagcaagcccataacctctatgatctcaccatctagagggtgcgaagcgacaatggacgagaattcatgaacactcaagtga

SEQ ID NO: 47413 - DNA, 466 bp, Oryza sativa
  unsure (1)..(466): unsure at all n locations
gcccgctcacgccacatcaattcagtcatatatatcgnaagttatctgtatatcctcatggttcagaaaattggcagagccatttattttattctgtcaccactaaaatatttcttttacagcacttcgaataattattccagtttgctcggaaaattgaggaactaatgtacaacatgagccctgatgaggtaacccatcacatttggttgtgcatttcagtttcaaaggcgatatcattgagttattatcttcttctggacagtgcacccacaatattgatcctttttcggactatggtccatttctcgaagtttgaagcagatacctgttctggcagaggattcaagataattagatgagatgaccaaatactttagccgtcttttgttgaaataataccaccgaaatattgatggtgatgaacatatgaatttcttattttatctgttcaagatctataata

SEQ ID NO: 47414 - DNA, 445 bp, Oryza sativa
  unsure (1)..(445): unsure at all n locations
agctntgccgacaatggtgcgtgcggcgtttggtttccgcatatgccagaatgtatgtctttcagcagttgtctccctttctctagagatacacagcgctgtagaattcctgaagggcttttcttgtatagctcggcttcatgaataatataaagcctgctacgccttgaaatccgcttggctttatctttatcttgagggagctcttgggaggttaaaaatcgtatgaggggctctctccagtcggcttcaatcatggctatgtcttgagtgtccgcaacttgagtcgtttctttctgaggtacagtcggctcataaaggtgttcgacgaatacatcggagggggccacctcgcgcttggatccaaagttggctagtctgttggcagcttcattggtgtgtcggagaacgtgactaagctcgagtccgtcgaacttgtttccag

SEQ ID NO: 47415 - DNA, 468 bp, Oryza sativa
  unsure (1)..(468): unsure at all n locations
gctaactntgggtgacactaatcacggtgaatctggtcgatctttcataaccgctgtcacggctattcgaatagttttactctgatcagaggtgtacaactgtacccacaagacacagccccacgacacgttcccgtgcgccgacatgccaccacgacataccggaaagaggccgtgacaggacccttcgcataaccccctctaaccgatcgcaccacaccttatggttcgcccccgtccccagcaggcaacgggcagcccccctttcgtgccgcggtgaatccggaagccgatcaaccggacaccccggccgacccaactccatcacgcccaccctcgcctgtgtacgtcggctagagaaaagctacactacaagcccagccgttgcccacgctggcttgtggtaagtacgataagttcttccagagcatcccgcgaaccggtccttaatcgccatgggcacgtcta

SEQ ID NO: 47416 - DNA, 451 bp, Oryza sativa
  unsure (1)..(451): unsure at all n locations
agcttaaatactctggagaatgaatgaattatttatctaacaccatatcatttgtctttaggagtagaaaatatctagaaccctagaatagtcttgcggcatccaccttcaggggaaaaattgtgctctggtgatcttgttttctgaatttgttctactcctaggatctgacatttcaccaaccggagcctccagcagcatcatgaaaaccaagctagaattgcgcttagagcaaggctaataatatagccaactgcttattgtatagatctttatagcctatctctcaactcactcatatagngggtagctcttcactataaatatatggtccacctgtctgtcttacagactttcttggcacatatgtctaagccggctataagcttacagcccgcttctcgtccctgccctctccttcgtcatccacctcagcattcaggcttcttat

SEQ ID NO: 47417 - DNA, 465 bp, Oryza sativa
  unsure (1)..(465): unsure at all n locations
tcttcttgaacacccacttgcaccccacaggtntacacctatatggtcgctctgtctcctcccaagtcccgttagcgataatggaatccatttcactacggacagcctccttccagtagtctgcatcaggagatgcatatgcttctgaaattgacttaagagtgtcatccacgaggtacacagtgaaatcatcaccaaaagacttagccgccctttgtctcttactccttcgaggagcttcactgacatcctcctcagagacaagttcatgtgtatgttcagtttgttctggtggagtgattgaactgggaattatttcagagggttggttcgaaccactatgtgtatccttcattgngaaaaagctctcatagaacgtagcatcacgagactccataattgtaccaacatgcatgtccgcgacctccgatttaactattaaaaatctatatgcaatgctatgat

SEQ ID NO: 47418 - DNA, 386 bp, Oryza sativa
gggacctctaagcaccgcggctgcagcttcatacttgccgaagagaaagttttctgtggttggttctagtgcgctccgggttgcgaactgcaaatatcaaacgaaaaaatactcaaaaatgttgtgtctctctcctcagcactagagagagcgagcacaaaagaaaaaaaggatccagcgagcacaccccaccattgcccctttgggaccaacttccaccaccggttcttgttatcgatgctgtttgggtttgcgatttgtggcgaccttagtggctaggctcgcgtctctacttgaactagcctatgaccagcactgaacactatacccttgagcgactaatcaatttgctttggctaacgcggcttctaattctctcttgagca

SEQ ID NO: 47419 - DNA, 431 bp, Oryza sativa
  unsure (1)..(431): unsure at all n locations
ntgcacacaggaatgcttagttgtgtattggtagaatatgatgatgctggcatggctatactcatgggtgggctgaaccgacaaattcaagacattctagcctacacagaatataattcaagtaatcgttagtctcatcttgcttgtaaagctgacatggaagtacagggaccaatagctagctacatgactaacatctttgcaggatgtgctagctcttggacatctcccaacgctgctaggccgtcaactctagcagcagcaccattgacctcaagcaacaagctgcgtccctctaaacaaactctacaccatgcccgagtgaaccaacaagatgggttgctgctacaccttccaagagctcatcatcaggagcttgatcaggaaggacaagagatattcagtgcctactctgcaatggctatggtcac

SEQ ID NO: 47420 - DNA, 418 bp, Oryza sativa
  unsure (1)..(418): unsure at all n locations
agctttgatgttgagtgccaggttctactctagtttcttcatcgcaacttgataaggatactaagcatatgctccaacttatatctcaaagcactgctgcttcagtatatgcccaatggcagcttggagacgtacttgcacaaggaaggccaccctccactaggattcctcaagagactggatattatgcttgacgtgtcaatggcaatggagcaccttcactatcatcattctgaggttgttttgcactgtgacctcaagcctaacaatgtgttgttcgatgaggagatgacggcgcatgtggcagactttggcattgcaaaattactgttatgtgatgacaactctgcagtttcagccagcatgccatggacaatangatacatggctccaggtacttgcacttactattcatgag

SEQ ID NO: 47421 - DNA, 401 bp, Oryza sativa
accgcgtgcgctcttacgtttaacggtgggttgactaccactaacatcctccttctggttcctctccacatacctttacacgtgcccctgcgtggtgcccttcggatacctctacacgttcccttcctagatcaagcactggcttggatcctcgttccacttttctttattccagcactggctgctgacctccgtatgtgatcgtacaaacttgttcctcatcaagacagccatctgttgatacaagattcatctgctcagcacgagaatttatgtttaacaatctaagtcatgtatgctagagtaatagcgccattagaaccctcacaaacttagtgctgagctaattacaaatcgggaataagctaagtctatgtgacgcatattatacaaccctcact

SEQ ID NO: 47422 - DNA, 447 bp, Oryza sativa
  unsure (1)..(447): unsure at all n locations
agcttgcaagtgcacgtgaaccggcgcttgtcatggcacgtcatacgtatggagtgcgacagtgcgccgtatcctttcttcttcttccccttttgtgcgtgacggcatctgtaaagtaaaaacagacgcagtgagtggcggtaaggggtaaattgatccggatccaccttatgacgtgtattaccgtatgatgtgtgtatgtactcgtgtgtcggtgtgtgcgcgtgaattgaagttgcactgtgtgtactagtcgtgctttaacaatttttgccggtggaagaactgaagaaggccttgcagcccatggatcgtgaggagtagttggaagttcaggcccatctcgaaacanagcatgacttgcataagctagagcttangctgattaaggctttttttttaagtttataagccagtcatagcaaataagtctaaggctctctttta

SEQ ID NO: 47423 - DNA, 452 bp, Oryza sativa
tgtgttcaacaagatcaaccttatttacaaccaattccctggtcctcctctccttgttattattaacatagtgataatacctccatacttgaagaagatcacctgattctgacagaacaatgtacttggcacaattgatgagtgagttcttggcgtctaagacaacccttaatattggagagggtccatttgtattgatagcatgaacatcaccattgcctcggattgcatagaacaatctatcatcatcgttgtacaaaacatcatgatagttccaacatagctcattaacattgatccaggtccaatgagtggcacccacccttgcaaaggaaaggagattatgtagcaaatgcaggatcattacagtgcagtttccactggatggatctgctgacaggacaaccctcatgtagaagtaaaagcggccttcttcccaggaaagatcaatg

SEQ ID NO: 47424 - DNA, 445 bp, Oryza sativa
  unsure (1)..(445): unsure at all n locations
agcttgctgcagacaggctgatggagcttttttacttagactccgcgagctacgtgctgatgtcgaacatctacgccatgcacggagaatgggaggacgccaggaaggtgaggaggaggatggacgagaccggcgtcaagaaggacgccggctgcagctggattgagatcaacaacgaggtgcatacgtttgcttcaagagacatgtctcacccgaactctgattccatatatcagatgctatgagagcttgttgccgtgatgcaagattttgacgaacttgaaccgtttgatgtacatatatgctgatttagatgccactccagatagtatcaaagaaagtaaagtttctttcttttcggatcaagaaagttttatgtgctgtgtttgctaaataaaagatgtataccaatcttatttangtaaggcgagggcgtatgatcaaa

SEQ ID NO: 47425 - DNA, 448 bp, Oryza sativa
gacctataaaactcagcttattacctattgatgcatacctaactgataagaaagatctctcttcatatttttcccctttcaaacttactatgttgtcaaccaaatcatgttcttgcagaatcatgtggttaattaaggtaaaaaaaggggttctgtactctatgattgccgcaccatatcatttgtatatgcgttcgctgatgtttcattcagtacatgctgtaaattatatatgacaacctttcctagaatgtgttgctatttatttcaaatataacttcatgcttctttgtcctcttttgtgggtacagtttctcgtatcgaagctcgcagtgaccagttcgatatgtacatgcagttatatgttgccacagatgtctatcctatgcatccaggtgacagaattaccatggtcttggttcctactttgaacttacatggtacccca

SEQ ID NO: 47426 - DNA, 438 bp, Oryza sativa
  unsure (1)..(438): unsure at all n locations
agcttaccgccagggttgtttctggccttcttattgtccgacgccgacaaaattgtgcgcacatgtgaaggttgccaattttttgccagacaaattcacttaccagctcaagagttgcaaactatcccgctgtcttggccgtttgcggtttgggggctcgacatggttggcccgtttaaaaaggcagtcggcggttacacgcatctctttgtggcctttgataaattttccaagtggattgaagctaaaccggttgtcacaatcacagcagataatgctcgcgacttcttcatccacattgtgcatagatttggagtgcccaatcggataatcactgataatggcacacaattcactggcgggagttttaaagactnttgtgaggactttggaatcaagaattgctatgcctccgtggcacaccccatgagcaatgga

SEQ ID NO: 47427 - DNA, 441 bp, Oryza sativa
  unsure (1)..(441): unsure at all n locations
tcatccgtcgacgagagataccaaacatcttctgcattgtgttctcttcaaatccaatttacccaaaacaggaatgactaaactaaaccctactagcacaatctcttctctcctgcaaacacagaagtggggaaaaaagtttaaacaaatagggttagtggagcagttgggattgggctcaacaaatcatgtcgatgaaaaggggggaaaagacaaatctttcagttaaaaaaaagatgctggcctttggaacttgagcaagaacaggaaggcatcaaacatttcgaagattttcaggccaagaaacgacaganatgttgcgctcagggaaccaacaaatctcaataaacaacgcanaataataacctggaaaaaagaaatcaagaaacaccaccttccactagtcagactcagaccaagaacaagaacacgggtacattt

SEQ ID NO: 47428 - DNA, 274 bp, Oryza sativa
  unsure (1)..(274): unsure at all n locations
agcttgcatacatggaaaagccatggaagtttaaaatcaagaacatccatcatatttcactcaaaaaagaatcaagaatattcatcacattgcaaacaatgtttggttctgcctagaacataaactcctgcatattccctttccccccaaatccaagaagacccaacacaaaatcaagaaaaccaccaccccgacgccacggtcctcgccatccttcttgccaacgtggtagtcccgagctttgggctgccngatctgngccccaccacccacc

SEQ ID NO: 47429 - DNA, 431 bp, Oryza sativa
tggagaaggcatcacgacacccatcgtgtggcttggtgttccattgttgaggaaccaagcatgatcaaatggatccccccttccccgcaaaaaaaaaaggatccccttccctgctgagggatacttgcacgttgatcattcaaatgaaccaggcatgtgccaccatatctcattctatccttctagtgcgaggatacatgactatatcattaggagcatgcatatgcatgcctcgatgttggcttgtagttgacttgtctgtagtaggttacctagtacaatatggccatgcagcagtcctaggcccaatggtctagtttgccaaaatagtgacactttacttggacgcgtcaaggcctacaatctagattggcctaactcacacccatatagatattataaacccaactgttatgatctacttcagatat

SEQ ID NO: 47430 - DNA, 438 bp, Oryza sativa
agcttctattacaaaaacattagtgtaactatgttatctttcaagatacacattaatttatatcttgtcatgggcaagccacagccatggaggatgcaaggggctcagacaggggacgctaccagcagcacctaattaggatttaagatttgtgcagttatctctagctcgttacatagtcatcattccatcagggagtcaagtagactaacccctgtagttctgggcgtaaactagacctataggaatacaatatattactagagccacttattctgacaaatatcatattattcagaatgaggataagtaaatgaaactatactgcaaatttaaatcatgatgactatttgatataaatacatttaccaaaatgttatacgaaatgtgagtttcaagtagcaaataggcaactaaagaagtcctaaactacaccaa

SEQ ID NO: 47431 - DNA, 423 bp, Oryza sativa
tattggctgcttggtgaacaacgtgttgtatgcatgatcagttttcacccccctacagaatggtgtccttgcaatcaatcttgtgtggacgtctaggcggtttatctccatccatccacttctttagtaaggctgagttgttttggacaacttctcggtttttcatgaggtactacctaaacggttaaataaattgtttgtaggaaagttttttatataagtttcttaatatattttataagtttctaataattaatacctaattaatcatatgctgccgttagaaatatacttccaatcgctgaatcgaatgcaacctaagaattacataattgaatcatgcaagagagagttaaacacaatttatgtactccctccgtttcacaatgtaagacattctagcattcccacattcatattgat

SEQ ID NO: 47432 - DNA, 166 bp, Oryza sativa
ttcctgttccacgatctcgctactggccattcgagctgggtgttgaactcgtaattcgattggacagtgagccatttaccgcgtggtaactgaatcgtctgaaacgttctaaacaaaacaggtattttgctgtgatgaatccctacgagttataatctaaaaaaat

SEQ ID NO: 47433 - DNA, 412 bp, Oryza sativa
  unsure (1)..(412): unsure at all n locations
tcataacaataaccaatgtctttntattgctatggacaattatgctattgtcttctcgttagacactattatgttgtatttatgctctaattttggctaacgtgcttacattctcatttctaatatcctgccgaatctgaatgtatttatcaccacattttctgtactacttgttttgggctattgttgtggaacaatgataacgactgtgtttagttcctgaaattggggagaagtttggggaaagttggtgtttgaaaaaaaagttatgagtttatgtgtgtagaaagccttggatgtgatgtgatggaaagttgggagttggggggaagtttgatgtgaactaaacagggccaacatctacccgtcaatcataatatctctctcttttctttatctccatgagttggtt

SEQ ID NO: 47434 - DNA, 403 bp, Oryza sativa
  unsure (1)..(403): unsure at all n locations
agctntctaaatcctatgaaatacctagtttatttacattgcatgtggattttggaggaaatttagcaagagctccaacctcttggaaaatcacccttgagtctatctctctcatctgattcctgcgtctttcctgcgcttcaatcaaatgatcatatcagtgttcctcctgtgttttacaatcctctcgtttacactccaatttctgacacaatcctgtgatgttactattcctacgctttttctaccctgcgattcaaacgggccctaagcatattggtctgaactaattcctgcagcactattaacctaccgcttattaaagcccactattgataaaatgccttggttcgttatttaccctcttagagggaggtatacttgctaatattttaaaacagca

SEQ ID NO: 47435 - DNA, 280 bp, Oryza sativa
  unsure (1)..(280): unsure at all n locations
acatgaggcacctgaacgaactgccggacatcctccccggcacccttgcgatcttgatcatgtcgctgcgctctatccacaacagacacacagatagcattggagctcaacaaaatagaaataaacctcctagcatataacatgtgcagtnttatctcaacaccgaactccagtgctcgtctctctctctcttcaaacaatcaatcccttattctttcctgtgaaatcatgtaaaatcaaaccgaaattctatacattgtgagagtaaacgagagaggca

SEQ ID NO: 47436 - DNA, 443 bp, Oryza sativa
  unsure (1)..(443): unsure at all n locations
agcttgcanaataagttgaaacagttggatttttagttacaattcttgtacttttgaacaacaggtttcaaaagaaataaaagaaagttataaaatcatcatgctaaatttattttattgcagcaagattaaataaaacaatattgtaaaacttttgctggtaaaatgagccattagtacagtaatggatgtacagtactaataacactggaataaattttgaatgagaaccattaaaagagattatgaagtgcatgtgccattagttcggtttaattaaaagagaaggggaggagaacagttctacttttccaatatttttagagggcttctatggataaccatttggcataacctaaggtcaagggggctctgataccaacttgtcacgcccggaatttctatccaaaattccaaacgcttacatgtgcgtgaaccctcgt

SEQ ID NO: 47437 - DNA, 440 bp, Oryza sativa
cgcatccgacctcatataccacttcaaacgcatctatttatttatgcttaatcacctattcacattatttagattgcattttatattgttcttgcaatgttctcttgtttgctttacagggatcatcaaccgcgtgtcacagttggcacgacatcgtttgtggtgtagcgattgcacggcgttttggacttgttctggttggtagccacatcgcaaacgtcgtacttgatcaaagcgatagttatcccctcaccagaagatcgggccacaggagagcgcatcatcacttatcatgttcttttcagtgagagtcagacaatgataagggagtcatcagaatcaaacaatgatagtgagaggccatttgtttctggcgtcacaaaacttccgtttacgtcggtcaaccggatggaaattttgtgtttcatgtagtttatagt

SEQ ID NO: 47438 - DNA, 451 bp, Oryza sativa
  unsure (1)..(451): unsure at all n locations
agcttctacactggaaggtggctntccactttatttccattcaaataaactcctacattagattatgctttcttctcctagaaaaaaaagggggggtcttggcaaaaagaaaatgagaaaaggagggaaaggcgtggctatggaaaagaaaaaaaaaagagaggaaataaagcgtgctctcaaaacattgagcatgatgaaaagaaatatagccatgccccttccatattcatgccaagaaaacaaaaaggaggagaaagtataggaaaaaagggagaatcatttctttattccaccattccacaaaaaaatgtacttttccattttctaccacaaataaatacccttgatctaggagtatgactgatgatcttcttgagtccgcatttttggctttgtaatatatatgatgcaggtatgtcacaatttgtccctaccgagctccacatat

SEQ ID NO: 47439 - DNA, 439 bp, Oryza sativa
  unsure (1)..(439): unsure at all n locations
cgatagctccctaccacttgtcaatgtctcttaagcgtgaacacggcaaggggaaggtcggtgagttggcgccggagccaaaaaggggcaaggctgcgacgtcgatgctggtgagcaaatcggggaaggtcgtgagggcgccatcccaatttgagctaggcatgccattggtggaggacaatgtgttagctgtgatgggtattgcttgccgagagctacataagcaatacatggagctaagcaatgccaagcggaaaatgcgggagtcatccatagttggacatcacgaccaccagccgttcctatcgtcgcctgcctatataactatatgctgtgatgacctcttcgaccttttcaggatccggaagttggacactggtcttctanaatgctactccttgtgagtgcataccttctatacttgtgatatgactggact

SEQ ID NO: 47440 - DNA, 436 bp, Oryza sativa
agctttgggttaaactggtcgatgcatgtttcttaatatagtatcaaagctaaatgtctcgagttctaattctggctggcgtgcaattaaataaaaatttcagcatacttttattccacgctagagacttgatggggcctctcgtgagggagacgtacggtgcatgcaactcaatatttcatgatctaatagtaaaattacttgcgtgattgagttacaagatgattgtcacaagcacttgacaatgacgacatttactaatgtgaatgaaataaactttacatgcggataagtatttggcacttattcgaatactaaaataagtaaagcttaattaatttaaactccggttagagtaatgcgtgagacttctgttcttctatctcacgtattaaactgggaatatgaatgaatgaaggattagcaacaaacacct

SEQ ID NO: 47441 - DNA, 448 bp, Oryza sativa
tgccagtcaagctgaagctagtgattattatgggacgtgtcactaaggaagatagcatctccagtgatgagatagagatgtttccttgtgcgtcgaagatgtcaatggagagtgatcgcacagagccactcagcatattcaacaactccataaagggcttccagtttacctctataccataaaagagaacactgagcttccgtagattttgcagcaaggcgatctcctggaacactgatggatgttcttttatctctacatggacaagtgattgcagctttgccatgtttctgatcactccatggctcatctttagacctgaggatggcctcaaaaacttcacactgcatgtccttgtaagctgctctttgtgccctgctaacaaatgctttaggcaagtcatgatagctgcactactaggcagcttcttgataagtgtctctcttat

SEQ ID NO: 47442 - DNA, 449 bp, Oryza sativa
  unsure (1)..(449): unsure at all n locations
ntntccctgacttgctgcatcaaaaactaaatcacaagcttctgataaaaaacgggtggttctagcgagatttgtaatatgagtacctttacgctttgccgagatgtaaggggccattttaggattccatttcttaataccatgaccaaaatgaactcccgcttctatcatctctttcaaattgatgttccaatatcttcttgtcattttttccacacttccttttgattttttcttttttttcatcctacctttccattacgaaatttctttcttttcgaagattaagaaagagccgaaatagcttgaaataaataataattgttccgatggaaccttctacatggtataagcataaccttaatgaattaactaaacttctttttaaattaaaataaaaatagaaaatctaacctcttagcgttctaaggtcaaaaatctagtttaaa

SEQ ID NO: 47443 - DNA, 442 bp, Oryza sativa
  unsure (1)..(442): unsure at all n locations
agcttganactttcgctgctaaactcatttgttataataaatactaattccttagggtgtaatttgtaaattgtcttgagtctttacgaacaaatcctgtccccatcctgcatacacacagcaccaaaccgccctcgtctctttctcgtcgtcgccggcgacgcctnccgccgccgccgagggtgccggtgagggtggtcgacactgcaaccccttcctcccagcccacctcaggttcgtccacctccttcccccttccttctctatgctatgcaccccacccctaatttgctgtgtaatccaagttttagatctgatagagtctaatctagattggtctgagttgtactgatgggttgatatagtgcgattttaagggttaatctacattggtctgagttgtactgagggtatgtgtgttgatccttttggaatatactca

SEQ ID NO: 47444 - DNA, 452 bp, Oryza sativa
tcggatgtgcatcgactacaccgactcttaacaaggcatgttctatagacccttaccccctgcctcgcatagatcagattgtcgactccaccgcggggtgcgaccttttgtgttttctagatgcatactctggttaccatcagattcgcatggctagggaggatgaggaaaaaactgcgttcattacccccgtaggaacctattgttatacatcaatgcccttcgggttaaagaatgcaggtcctacttttcaacgaactactcgaatttctttgggtagccaaataggacgtaatgttgaggcttatgtcgatgacttggttgtaaaaacgcgcaaccaagagactttactctcagatctagcggaaacttttgaaaatctccgctctgcccgcataaaactgaaccccgactaagtgcgtgttggtgtacctgcgggcaagcttctcggg

SEQ ID NO: 47445 - DNA, 228 bp, Oryza sativa
  unsure (1)..(228): unsure at all n locations
agcttgngagatgctgcttaattgcaagttttattcttatcccattccatgttggattaatacatgatgagtgatgcagaatgcttctactgcagaaaagtagtaggagtaattaatataatctgcagtaagacacgctgttcctgataagaccgatggagtgaagtgcttaatttgttgattaatttccacaacgtgagagtgacgcatgatattatatggagatat

SEQ ID NO: 47446 - DNA, 401 bp, Oryza sativa
atatctccttgtcagtacattggtaacaaatgcttttattgtaatgccaacggtatcatcctaacattggtatatatttctagccttctgtatggaatgcagacatggtcttctttgcaaccacagcaacagcttgccctacactctgtgctgtcgtcatagctaaccaaataacctgctagtactgatatatatggtcttctttgcaaccacagcaacagcttgccctacatggtcttctgtatgcttgactaaacttgttacttgacatatatgcttgactgaacttgttgcttgactgaattattccttacacatactgtagtacttgcttgactgaactatgtcaggatcttattaataaaaatctatgtcagcactgctactatgtcaggatcatc

SEQ ID NO: 47447 - DNA, 443 bp, Oryza sativa
  unsure (1)..(443): unsure at all n locations
agctntaaataactgcccgctgactttttatatttcaggcggctgttntgttttatcaagcaattgataggatacaatattgttgctttttgccatgtaagtgtgcatttttattgaccaatattatggcttangctgattatatatttggtcattttccaagcagtagatatatcacttggatcatgttattcgtggattcacaccgcatatgctattaatattaagttacttggttgactataattataaaaaccgctcggttggttggattatttactccttgactatatgtttagtttgttcaactaatcacatagtcgtgggctacacctattaggtgcatctagtcgatgcacctaagtctatattcaatttttttcagccctccacagtcttcagatttggtaaaagtactcgggagaccattgcaaagatgattg

SEQ ID NO: 47448 - DNA, 429 bp, Oryza sativa
tagcggaagatcagtctggctcatcattgatcgcaccatgttcaacaatgtacgattcctccgttcagacaccccattccattgaggtgttcctggcggagtgagttgtggaacaattccacactcctttagatgattggcaaattcaaggctcaagtactctccaccatgattagatcgtagatacttgattgtcttgcccaaatgattttgtacctcattctaaaattccttgaacttttcaaacgattcagacttatgcctcattaagtagacataaccatatctactaaagtcatcggtaaaggtaataaagtacccaaaaccacctctggcggttgagctcattggtccacatacatcagtatatactagtcccaatagttcacttgccctttcactttgacccgtgaaaggtgcctttgtcat

SEQ ID NO: 47449 - DNA, 442 bp, Oryza sativa
agcttgtcaaacactattcacatgacatctttcttcacaggagcgagtgagagttaggagctaggagttggaatttggagccctcccaaacaggccttcctgcataactagctttgtcctgtttttgtacgttgctagcacattgtgatttaaactatacaagacaaaggtgagaaaaataagtgaaaattcctttataataattaataggacgttcccgtcattaacttaaccctacaaacattgcttcattgcttgaaacatctaactaaataattttaaattctatcaaaattttatataataaatcatacgaacatcttatataaacagtaccgtggacgtgttctcagccatacttaaaatgtgttcttgctggctttcccaaactcaccctccttgttttttgcaaaaatattctatacacaagttgttttagaaa

SEQ ID NO: 47450 - DNA, 213 bp, Oryza sativa
ttagttgggatatcatactcgtcttgatatctttatatttagaaatatcggagaattagccgatacatgctagatctatctgatcggctatgctataaacatatataatcctgttattaatatatatttcgggctaagtgatttatactgtctcggcatggtggccgatctatcccaattacttgagttaagtatatattaatataagaacta

SEQ ID NO: 47451 - DNA, 390 bp, Oryza sativa
agcttatagctgccgacatgtgagtttcattctttatgaatccacacgataatgccagtagcaacagtcattatggcccactctccaacccctcattcgatgaggggaattagtctttttccctttattcttcttaacttccacagcaatacgcgacgagcactttacttcttgtttagatccatttggaatggcaaatggcaaatgacaaaagttttggtattgcaaaagtactagttggtgtttagatgcatcctaaacttttgccattctagtactaaagtgagagagagaaagagagaaggagtggtcccaaagcactttttggcacaatttgctactatgaactagcaaatgccaaatgccaaattgctaagtttgctactagtg

SEQ ID NO: 47452 - DNA, 447 bp, Oryza sativa
  unsure (1)..(447): unsure at all n locations
tgagttntataatgtaacgatggagattatntgtggtatacgagtgcagtgaaagctaagccttaactgctagatagtatatgagaagtaagcatgttagtacagcttggacaccttaactgctagcgcttcaacaagttagttgaccgacaaataatcagtacggtatcaccgggggcattgcacgcatggatatacttggttgccaaaattcttcagtactacagatatttgatttgctgggagcctagagggccagaggagagaactaatgtcaganagagccccatcaataattgagaaggtgtttangccatggaagagtacaagaataaaatgattgccgtccagatatacattccattggaggcatgggattggaaggatatgaagctgataaaattcccacccaaaaataaaagaaagatagggaaaggtccagatata

SEQ ID NO: 47453 - DNA, 422 bp, Oryza sativa
agcttgaagttagctgtctaagacgaaagtttttatctaaatgcctaagcataaaatcgacgaaggtgttcaatattccaagaattgttgatgagagtaccatcttcgcgcttgagtcgataagaacctggccgagtgacttcggcaattatgaacggtccttcccataagggagataatttacgccgatcctgtgtggtttgaattttcctcagaaccaggtcgtcgactaaaaaggctcacgatcgaacattccgattatgataacggcgcaacccttgcaaatatcgagtcgactgaattaaagctacttctcgggcttcttctagtcgattgatgtcgtcaactcggccctcttcatagtcctgctcgttgaagttccgaaatcgtagtgattcaaattccacttcactcggcaacat

SEQ ID NO: 47454 - DNA, 334 bp, Oryza sativa
  unsure (1)..(334): unsure at all n locations
agcttacaagtgcgagtgctgcgccacttttttttttcttacggcacaagagagccgcgaaaggagttgctgtggacccccaaacaangaccaccgtcactgactgcaagcaacccaagacagtcactcaagtccgcagtctcttgggtttggcaggataccaccgaagaatcatcgaaaactatccctaaatagctacgacccatgacacagaagctgaacaaggaggaaaaaaatgtgtggagcctgccaagcgagaaagcagtccgaactctctcagaaaaacagcgttcctcgacagagttaaacttaccagacactccaaaggactgtc

SEQ ID NO: 47455 - DNA, 458 bp, Oryza sativa
  unsure (1)..(458): unsure at all n locations
tcagtnctatgtttctgcatacgaaaagatagttaccaatgcaggtgttgcattgagaatatggggcttgaaatatctggaagcagaagaatagtttcatttttgacccaaaaaatcccctctttggtgtcttggaggcagctgatctccttctgctgtttcgttttactgagagagacaacgatggaggcagctatntaagggtgatcttcttcttttgctgagacaaagatgcagctatcaattggattgctgcgttgtaactttgttttttacctctcttcttatgaataaaatttattaacagtggggcccccctgttgtatntctttctataaaataaggagaggaaattatagcgttgttatactttaattatgcaatgtctaaactttgtaccgtgcatcatgtaatacgtaagaaatgcttgattgatgctaatctagtggtaatcatct

SEQ ID NO: 47456 - DNA, 428 bp, Oryza sativa
  unsure (1)..(428): unsure at all n locations
acaccagcagattgcttatctattttaatattatttgtgctatatgtgagaaagtgaaaattttgaaactccaacttcatgctgaaaaagagtgagtatcttttaaaaaaaactgaatttctaagatacaaaaaggggatagcagcggcttggaatctattaacttactaaagttttagataaagtaggcaacatgttcactctcacaacctagttatttgcacattaattaaaaaatagaaccagagtcgacatactatgtaatatatcttaaattctgtatgaaaataacaataatagaacagtccacctataaatgcgattcacaaaaaaaaacccatattacgataaaaataccaacatatttcatatgntaaaaaagacatatagaaataagacgcatggaacattacaactctattttgcta

SEQ ID NO: 47457 - DNA, 406 bp, Oryza sativa
agcttcttcagacgccgtctcttcaccaactctcttgatcttgaagacatcatcctgcttgccagcgttcgccagcgcactcgagagcaggaggcagctcgccgcattgtctggctcgactgcaagcaggcgcgacgccgcaagctccgcgagctcgatgtttccatggcttcggcacgctcccagcagcgcgccccagacgaagcggtcgggctccaggggcatcgccctgatgaaaccgtacgcctcgtcgagcctcccggcgcggccaagcaagtggaccatgcaggcgtagtgctccagcctcggctcgacgccgtactccacctgcatggctcggtacaggatcttcccgacctcgaccatgccgccgtagctgcaagctgtcaggacggcggtgaacgtc

SEQ ID NO: 47458 - DNA, 440 bp, Oryza sativa
  unsure (1)..(440): unsure at all n locations
ttcctgttcagcctcatggctgagcaagcaaaggcgcacgacctctctccgagtgtgagtggcgacgacggngagccgaacccacgccgtcgagctcgtactccaccgccccctccacaccaaagtcctaagcggggggaggcgctcgagagggccgaatgatccgcgacttcgacatccacaggaggtggaaaagggcggcgagatggggagcgtcgcctcctcgtctacggcgacggcagcacgccccagggcgcgctccaagctgcgggcgcgctcctgcgtcacccgcctgtcgtccctgacccggagtctccagcccaacgatggctggacgacgtggccaacttggtcatgacggcatatcggcgcctaagtgctggtggtcggtcctccgccaccaagacctctggcgctgctaccaccggctccgtgtcgtc

SEQ ID NO: 47459 - DNA, 442 bp, Oryza sativa
agctttaatttctaaaaggctggtttttttgctcctcggatgtctgtgatccattggcgacctgatagtgccttatccaccgtccgacaccggcgcacgcgtggtggaattttatcatagatgttcggagcaaaggaccgaatgcaaccctcttgcaaccagctatcttcccagaagaggatagtttgtccgtctcttaattgacagatggtagaggctgcaacgaagttcctttccttttgcgaccccggaatggctagcccctgccaaggtttgcttgaggaggtccgttgcaaccatgtccacctggaacgaagagctatacccataagctccagattcggtacacccaaaccgccgtagttacacatgccagcatcgatcacctttgttggatttagagtttacacggacaaagataagatgatacataaaatatgat

SEQ ID NO: 47460 - DNA, 467 bp, Oryza sativa
  unsure (1)..(467): unsure at all n locations
gcttatcataacacanactggtggactattgtcctaattcttggctgtgtgaaaatgtttgtttcaatcctgcttatgtattttgcttgtaggttcaaagttactcttaattagcaggggaaccttgttgttatctatactgttgctgtcagcagaggagttaagaaatttttcaagcccgggcaaactcaaatatacctaatatttgctacaatatttctaactttaatcctttgaaaaaaaaataaaaattcaatggtgtatttgacagcgagcctgcgcggctgcctgtgcacgccatgtggtggctccgtcactggatgctgtgtatagcatggaggctatggttggtaataatagagctatctaatgttcacatgcttntccatattattaaaagaattatcttgactatctgtgtactacaactatagctctcttgtgttaaagacttaaaatacataatc

SEQ ID NO: 47461 - DNA, 442 bp, Oryza sativa
  unsure (1)..(442): unsure at all n locations
agctngtaattattattatctctctcttttttagttgtatctttcattgattggatgctttaccattttaccaactattcttttatcgagtataccatgtccactgcttctctcaactatgtttaaaattacagagtttgttgatttacatccttgaacactttttagtgtattataggaaagctgttcttatttcagatacaacacttttttatcgaaagatacaacatatttcatctggttaaaatgttctgctctgcagtggtctataaagaagcgatttgagcttgctggattgctatcatccatattgagaactcatttacaagcttatgatcctattctatcaatgacattacggtacttgataaggtagcttgcgcactacaccattttgacatttaacagtagtttcttaggctactttctctgcaatattctg

SEQ ID NO: 47462 - DNA, 425 bp, Oryza sativa
  unsure (1)..(425): unsure at all n locations
ggaccttaaatctaagcnttttatagctggtttgctatgtgaattctcaacgatgtattcaactctagggtgctcgcatctatgtttacaaagcagtcggcatatcactcggatcatgttatttggtggattcacaccatatatgctatatattgatatccagtcacttgggtgactataattatcgagaaccactcagttggttcgattatttattccttgactatatgcttggtttgtttaactaaccacatagtcggaggctacacctattaggtgcatctagtcaatgcacctaagtttacatttcattattttcagccctccacagtcttcaaatttgataaaagtactcggaagaccatggcaaagatgattgaagcactcggctntatagtaatctggttcgagagaagattatcttt

SEQ ID NO: 47463 - DNA, 442 bp, Oryza sativa
agcttgctatgtacagacgtacaaccagaatggttttccacgtttctatgaacggtgagtgtgttcttttctcttctttatcaacttctactctttcattcttagcaaacatgttttccaaactgttaaaaaatatatttttaataaaaaaatcacaaaaaatacttttaaaaatcgtattaatttatttttttaagtttatttagctaatagttaattattatgtgttaatcgataattccattatacgtacgaccggtagaagtgtttgtaaaccctcaaaacaacacatccttaagagttagtaagactgagacttgggtcagttgggtgtagtactgtagtgaacgaataaacgctcactctcttctcaagatgcactacaaaattggaaaaaaaatttcttttttgaaaggatggcaaaagctctgccacttcaaaa

SEQ ID NO: 47464 - DNA, 277 bp, Oryza sativa
  unsure (1)..(277): unsure at all n locations
ntactccaccaatcatctaanaagacggcttttgttcaacttatattgaaaggtgaaatattaatgtgttgcagttgagtagccatgaatattactggagcaatttttctcaataagatgattacttaagcagttccactgatgttagactgcaaaactgcaagttatatatataaaaaatctcgattgcaatcggtggagaaagtttaatctcacaattagataacagagtaagtttaatctcgagtaaagtgcataggcgttccttaaacttgta

SEQ ID NO: 47465 - DNA, 442 bp, Oryza sativa
ctgcaagctgccctgcaaaaagctgctttttgtctggtgctgctccagtaagggggttgcgctagcctggcttttcttttgttatttatttccgaactcttttgtactcgtcgtttcatttctagtaatggaaatggggggctttcagccctagttaaaaaactgcccgtacatgagattgaatattgtcctacctatatatacctagaaataatataatatacccgctaattataacggagaaaaaattgtatgaacgaattgaggaagagagtgtggttgcccatgagtgccgagtgatgcaatggcatggaaggaggaatatacgagcaagttgaggaagagagaaaaaaaatctgaattccttctcaagaaattctctggaatagtgtcgaggtagaccaacgaagtggcaccacaatcgaagctagacgggtggaac

SEQ ID NO: 47466 - DNA, 193 bp, Oryza sativa
gacactatgaaactcaagctgtgtatgccttctgcacaaccgatttttctaattattattcttcttgagcaaatcaagcactgctggagaaattcattcaacaagtgagttagtctaaaccttttgatccgcataaattctctatgaacttgttatatctactaacatagccaggaggcggggggataggaat

SEQ ID NO: 47467 - DNA, 238 bp, Oryza sativa
agcttcaacaaacacatcacatatccttacttttgaaattcagagaccacaatggatgggcattacatggatgtacaaactcccaatttcagaagcatcacagcgaagagaacgggtataggagccaataaactgctctgcagttcacataatgttcacagcaacattttcaggaacatagcaacatagaatactctggctgaataatactacctctttccctgaatgtttgacgccg

SEQ ID NO: 47468 - DNA, 296 bp, Oryza sativa
gacggctgacatgacatctattatgattcatcagtcctgacgcctggatggcgagaagactattgggtggagtcaacgaagccctgtaactgtctcggacctgaatattatctttggtttgggggaccctttgaatcggctctgaagatgcagtgcataatgatatgaggagatggttcgagcagcttggagcttctctactataatagcgaaacactagctgtcgatcttcttattatattgcgaaccttgctaacaaatttttactacatgcctgccccttacataaaagactg

SEQ ID NO: 47469 - DNA, 451 bp, Oryza sativa
  unsure (1)..(451): unsure at all n locations
agctttntttctcatgtctatttgagatctcttattatatgtgttcaataagggattgtttttttactcttagccatcctccctaacaacgtgttctcaaatgccatccttccaaacaactttaattatttaccatccgggcccactaggctattgctattttgccacttttgattggtagctcagcaaaccgggtgacaaaagacttcctagccccttatctcctttttcataccttcttccttggcagtccttcccctttcctcatgtcagcgagttggcctaattctagcaaggtcctgcaagctggcgatggaggtgagctcggagacatagtcggtcgggcttcgcggacccaccgggatagggaggatgttgctgctgctggtggttcaccacccacccngtcccaaacaagctcttgttgatggaggcgacgataaccgacgac

SEQ ID NO: 47470 - DNA, 443 bp, Oryza sativa
ctctgaagctacaggcgcagaggtgacgcctgctgagcagcttctcatgaggacagtacggtgacttgcgagtgcttcatacttccacgtcatatttgacctgccagctcaacaaggggtacatgtggcctatgagcactcaatcaaagtgactctcgggagcttaaaattcgaagaaataacttccgagaagattttactcggcatatgcacagagaatttggaaaagctgggtttcccagcttctggcttctagcttattttctatattctacaactacagtttctcagaatctggatcaaaagctgaattgtttggaggagcttctaatcctaggagaagctacagcagctagaagcttcccctatacatacccagagagtagttttcacgcgggatatttgctttatgagcgctcgtagtaggatattattagagttat

SEQ ID NO: 47471 - DNA, 421 bp, Oryza sativa
  unsure (1)..(421): unsure at all n locations
agcttggctatgtcaactgtgatgaacaattttttgtttttcgttctgtgcaggagctgtaccatattctgaacgtaaaggaaattgtcgtgtatagcccttttacggataaaagcactttgattttgggagacaagctcatttagcctgtgcgctaatctgtttgccataagtttggaaattatcttggagaagctatggatcaagcttatagggcggtagtgctctgctataagtagcatcttctttcttgggcaggaggcagatataagccgagtttagatcatgtaattgagaagtgtttaggtcgaagaaagactttactgtcgctagaaggtcagccttgatcacatcccatgctgctctgaagaanaactctatgaacccgtgcggccacgacgcctttttagctggcatggag

SEQ ID NO: 47472 - DNA, 404 bp, Oryza sativa
  unsure (1)..(404): unsure at all n locations
aggaatgagaaaatacctggaggtcgttcagtctatggacaagattntcaccggcataacggtcgaacacttgncccgatgccataatgaagaagctgatgcgttagcaaaattggctacctacagaggaccgcattcgccaggagtctttttcgaagtcttgtacacaccaagtgtgccagaagacagccaagacatcatgggaattgaccaagttgaactgngcgaaaaaccagatgactggcgaacacctttcgtcaaacacctcaaggagggatggctgccagatgacgaagcaatggcgaaacagttacagatcaaggctgtcaagtacaagttaatctccgagcaattgtaccgaaccangatgctgtagcccatgcttcactgtgtctttttcaccg

SEQ ID NO: 47473 - DNA, 450 bp, Oryza sativa
agcttcctgatgacttggccgccgtcttcttcgccaagacatctcctactcgaagatctaggcgagctccggcttcggccctgatccaatctagatctagagaggttggcgttatactccaacctcttgggacagtctcgacggaagagttggatggttaccttagctcccccggcgtcaattctcgaccaaccgagatcctcgactacgacgacttcggctaccactacgaccacggtgacctcgacaacttcgacgacagctatgaggataactacacgcccctcttcttcggcgtattcatggctgacaacgaaacggaggagcagcgccaagcccgagaagcggaggaagagcgcatacgacaagaaaccgaacatcgtcgactggaggaagagcgacagcgacaggagcgagaatgactacagcgcgagcaacaagatcgtgaac

SEQ ID NO: 47474 - DNA, 446 bp, Oryza sativa
  unsure (1)..(446): unsure at all n locations
tgtatcggcagccttaccctgagtgctntgagagagttcctcttcccaatcgggtcaaagttccagatttctccaaatcttcaggacaagatggtgtgtcaacttatgagcacattagccgacttttagctcagtgttgtaaagcatcggttgtggacgctctgagggttaggttgttccggttatctttgtctggatcggctttgtcttggttttcctctttgccgtatgggtcgatcaatagttgggccgatttggagaagcaattccacagctatttctatagtggggttcatgagatgaaattatctgacttgacggtgattaagcagcggcatgatgaacctatgcacgagtatattcagagattcatggagatgaggaacaaatgcttcagcttgagtttaactgacgcccagntagccaatctggcctttcagggtatg

SEQ ID NO: 47475 - DNA, 456 bp, Oryza sativa
  unsure (1)..(456): unsure at all n locations
ttctggcatngcgctcttntgccgcaggacctcccctacagtatcgtcaccgcagtagagtgtaaccaccaaattcgggatggattggtgtggttcctctacgcctaggacaccagaatatctaaccatgaacgaggaaaggcatgagagaaatattggctagtaattgtgaagccccaattcttgactggaagggacaccaaaggcctctgccctccctctctatctatccaagagatggaagggcagagcttttttttggttttttcatcttttcatcaaagagttgaacaatgaagatagatggcaagtgcctgatcgatttgatcaggtcgtgtaggaacaaggttcatatcgttcgttcgttatgatgcctcagctgcatacatcactgcacttccacttgacacctatttaaacggctcgtctcgccgctaccttatgctatttccatgc

SEQ ID NO: 47476 - DNA, 439 bp, Oryza sativa
  unsure (1)..(439): unsure at all n locations
agcttgaattcttcanaaaattagtatgatgttgttaaaaatcaaactcaccaaactagttaagacaacggtgaaaggatcaccataatcttgcttcaggaaacaagtatgaaagagtaatttgttttgccattacccattagtatcatctgaataacctagtttattatcttgaattatgattcatgacaagacaaaacagtagcaaatattggttatattataactgagtgtgtattactaccacggctccatcacatcgacaactgcacttcatgcctagatctatgcagccacatgcactgtgtattgtaaaagatttgtgttcattgacaataccataaagaaattaaattaaagcatacaaggttcagatgatttaacaactagcacatactgatgaatcaaataacaagtattgtgagttcacaatatgtat

SEQ ID NO: 47477 - DNA, 315 bp, Oryza sativa
  unsure (1)..(315): unsure at all n locations
taacacgaggttcttctagcaacaacggtgaattaagctggattactgaaactctaaaaaatagtgagctggcataactgtataactagggggccatttggtacaacctctactctaagaacaaagtaaagtttaggagcggcggaatgccactccctcctcgtagtgcatttttcctgagagatctgcccgcttcgtattatctagatcttaaaaatgtttggtacaactccagctntatagggattctgagctgtaacaaacatgcggggtccagacagacagaggtgagtcccagacagacggtgtccagag

SEQ ID NO: 47478 - DNA, 465 bp, Oryza sativa
  unsure (1)..(465): unsure at all n locations
gatccttaagcgacgcggctgcagcttgggttctattggtgatgggctattttaatgtaagattatgaagctaaatatgcgttntacaagatcactgagctaaatgacatcacagtgtaaccgagacggctaatacgcgactagtcgcgctcaccctcccgcgcgcgactggacacgcgacgtggagaggaggcggcaacggcgcgcgcgaggtctgttctctttcggcgtacggtttccttatttttctgatttttttctctcttccgtacctttttacggcttctttgttattctttcttcttcttctagcatattattctgtgtttcctttctaatacgtatgtatgcaaactctgtatacatacgaatacaaactttatatacacgtatataaattgtgatacacatatgcaaactgtgatacataccaatacaaactctatatacatgtatataacattt

SEQ ID NO: 47479 - DNA, 448 bp, Oryza sativa
aagtttgccttggtgctcactgtcaggttccatctgcgcatctttgtctgtcatgcactcactgaatactattgagcttcaccgcaatcacttgtcaggttcaataccagagttcttcgctagcttctccaacctctctgttcttcagctatccaaaaacgactttcaaggatggtttcctcccatcatcttccagcacaagaagttgagaatgattgatctttctaagaatcctggcatatctggtaatctgccgaatttctcacaggaaagtagcttggagaatctgtttgtcagtagcacaaacttcacaggtacgattacaagatccatcagcaatctcaaatctttgaagaagttagaccttggtgcaagtggcttctctggaacgcttccttcttctgtaggtagcctcaaatatttggatttgctacaagtgtctggatac

SEQ ID NO: 47480 - DNA, 451 bp, Oryza sativa
  unsure (1)..(451): unsure at all n locations
agcttagcacaactcatcaggagacaaaaatataacaaattaagcgcataaaatgattcataaacaagtatcagtatgttcactaaagatttgtatgcgttcatgcatgtgctatgcactaagcatgatcataatttatgaactcctgacacgacgccagccagatcagcagaaaatgaaacaaattaaggggattgcagctacaccattaaacacaacttgaaaaaaaaccttcaagtagaaaatatacaagaaaaggtttggcagtgctgaatcggtgaagcctacgtaatgaatttgcacatttcttacacagataagaaaccaacaactagtgcacacgatcgaatcacacacatttctcactgaatttttttgtaccagtatgaacttaacaggttatctgcaggttgcacatttgcctagtgccaatgcttgcanaccactcggc

SEQ ID NO: 47481 - DNA, 459 bp, Oryza sativa
aaaactcaactatgtttgatagttgatgcgtaattaaaggtgggcatatactctaatgcacattcctccttgacaaccggttggaaaaaaagaaaagaattatagtggcaatcatatatatgttcaaaaatattgccaattatttaaacacctcaaaatatacataataatagctgatacacctcaaaatatatatacggaatcaccgaaatataatatatggagaagtcgggtggatcaacatgtaccgaatcaaatggaaccagttagtgatactaattaaatcacaaattaactttgagcgtgcgtacgtgtcagaccatgttatctgcagcattatcggcggtggcggcggcagagaaaacatcggctctgcagagcgggcaggttttatgggtgtgaagccaattggtgacgcaatccttgtggaacacgtgcacacatcccggcagcagctat

SEQ ID NO: 47482 - DNA, 448 bp, Oryza sativa
agcttgttcatgttctggacgacaagctacttctatatgagtcttctatccaagacctgaatcaccttcttttgccaatatttgaggttggcttgctctgctcaagtgacttgcctgaccacaggatgtcaatggccggtgttgtggtgacactgaagaagattagaaaggattatgaagaaaaaaattgacattagattagctgccgtgcagagttgtagccaatgatctggtggtgttattgatattatggttttgattgcttatgctatagaagaatagcgtcagcggcagaggatttatacagcatttttgcctactcttctttaaatctcatcgactttttatgcatgttagttgttgaattcagtgcgttcagctgctttggaagcacatatttcaaccacatgaagttacagaatcgcttgtacaaacattcagagataca

SEQ ID NO: 47483 - DNA, 448 bp, Oryza sativa
  unsure (1)..(448): unsure at all n locations
tgaaccaagaaatgcagttacaaaaagagaattattattgtttaagtcatgtgatacgccagcaagcaaactactcatttaggtaccagaacaactggatactttgtgcataatcatcaaaacaggactcagcaacaagataattaatatggcagtaataaaagtaaaagtattgagacaactaaggaggttctaataggcagcaagtttcaaacaataggacatgcagaaccaaacggatgtgatctcaaggatcgggaagagatgttagctagaactccaggtaaaactatatttgtttgaattactaccagatatatggcccaaaactaccagatatatggcccanaatttgaaattacatcaagtgagaaatgcatatggaacggttcagaacatgggcacaggaagtgaggaactcacagcatcagacatggacttgcacttg

SEQ ID NO: 47484 - DNA, 441 bp, Oryza sativa
agcttgattctcgtctgcacgaattggaatttctgaatggtgcttctgacttaggcatccaacacctctctgctctatgcaaggttgaggtcgaaattaattgcaattgcttcaagcacacgtccaatttcttcgatgactttgaattgaaatgtttgaactatgatctgatggaagaaacgagtgattgcatcgtcagatgtgttgcaataaccattaaatctgccgttgatacactccccaaccatccaactatcagtttccaaataaacatttcgaattggtaagttctccatcagaatggccggcattaatattgctcactttatcgcttatgcttgatcatcgaaatgaacaatttctaacttattctgatgcgcacttttatacacattttcttttccacttctctgttctattttatctagaaaatgaagacat

SEQ ID NO: 47485 - DNA, 442 bp, Oryza sativa
  unsure (1)..(442): unsure at all n locations
agctgtcccagatctgcaatctattattaattatatatgtatatatatggaaattattcagttgcattttatcggatgtacacacaggcacacacagctagctagttaactagtcgtatgcaagagcggtacacacgttattactagctaaagcttttcaaataatgcataacaatgtgttacacatctctgaccttttgtaccatttatactatacagtttttttaaaaaaaactactcatattatattgcatgtacacacaaaattagagcgccattgttttgcttacccgatagcttattagcaaataaaagatcatttatgagtaaaacttttatatacatgtccttaacgacttaaaaccaaatattgtagaataaactacaatgaaaaaatcaaattcanaactaagctctaaaaattaaaatattagtntataag

SEQ ID NO: 47486 - DNA, 373 bp, Oryza sativa
agcttaggatcactatctcaggcactctgttctatatgcagcgatcgaatatatcggcgaccagattaactgagccggagagaacaactcttctactataggattagcactacctattggggctcaattctgttacccacatttagcatgagtcgaggagcgcatacccaagcatgcgagcagttcactgctgatcaatcaacgaatcgaacgaaacattgaaccaatgcaggcgatccggatcggtgttctcgaatccgctcgtccgccttgaccagcacgcacgcgttgtggaggaagaagcggcggcggctgtgaccggaggaggaggaggagggccatgggaatataagtgcgcataccttgattccag

SEQ ID NO: 47487 - DNA, 445 bp, Oryza sativa
agctttactgaactgtattctgcaattttatcttctacattgtattcgcttggtcgtatgttggaaatagactgtctgctccttcagaaagatacttgttgaactatatggcatatgcactccttggcaaaacacacacacaacttgcatatgtccaagactcgtatgataactttatttatttatactccaactattctgtcctggtcttaagcttgagtaagaatgataagtttgggaggcaataaaagcataaatcgccatcactggtcattaagtaagggtcaatgaaattggggggctttcgttgaagatctcagttctttcgcgcctcacgcaagtgagttatggaagtctctcttcctcatctggtgaagctagctgctgttgtttgattccttgtttctattggtttctcaagaggctcaagggcttgctctaccta

SEQ ID NO: 47488 - DNA, 449 bp, Oryza sativa
  unsure (1)..(449): unsure at all n locations
ngaaggcagtatacgcactggatatgcgactcttgctcatctgtaaactttggatctctctaacaacgccctcagatgtgacataccaccattgttgggcagcagcccatcttttgtatatgttaatcctgggggcaatcagctcacaagaggaatcccacagttcttggcaaatagctcatcccttcaagtgcttaggctcacacaaaatagtcttacaggggagatccctccagccctcttcaacagcttcacattgagaaccatttacctggaccgtaacaacttacttggttccataccacctgtcacagcaattgctgcacctattcaataccttactttagagcagaataaactcacaggagggataccagcctcactgtgcaacctttcttccttggttcatgtntccttacaagcacataacttgttgggagcatccctga

SEQ ID NO: 47489 - DNA, 451 bp, Oryza sativa
  unsure (1)..(451): unsure at all n locations
agcttatatataaacagattaacacnatacttattttacgtacaaggctattgctagaggcgaaccacagtgataatcactacttgcgaattaatatacacaaacgtacatagaagtcagatgactgctactactagttctcaaatctgcagagcctgtcgtcggcgagccggcccttgcagccgctgcccttgtactccttccaggtgaactccctgtaccggctccggccgccgtcccctaataacgccggcagcggcgccagcctctcgccgggcggcgggccgccgaagaagaccatggacaccctcgacttctcgctgttcaccaccaccctgtgcttcacgctcctgaacctcccgttcgttagcacctgggtgggttgcaaagcgcacacacacgagcagcacaaagaaatttaacctcagggatacagagaaatgtaaataat

SEQ ID NO: 47490 - DNA, 447 bp, Oryza sativa
  unsure (1)..(447): unsure at all n locations
tcgtgaagaccttgagcaaggcaagtcaccctttgatctattgcccctataattgaaaagtcattattattntgtttgcaacttgcattattagaatcacacacttaacttgcttggcctcggtttgcgtgccaaaccgacggacctacccagtagtcgcactaatttccgtaggttgtactaccctgtttccttgtcgctccacccttgtggtacctcggtattcgtgctctctgagcgcgtataccaaatatcccacatacaccgttgtttgtcgaaaacttgggaaatgggtttgtgaagccttcaaaacccgacatgtggtgtcggtgtgtttgaaaataaaaatgaattgtgaaaactcgcgatgcggnggttgtgcctatgtggcactgtcccgtattcgcatataaggaccgattcctgtgggaaactcatcgaacataa

SEQ ID NO: 47491 - DNA, 448 bp, Oryza sativa
agcttgtatgcgtaggatatgttccccattatgttatgtcagagcatcactcaactcttggaacaactcaagagtctaactacaccaaaggatcctcccaaatttaatttatagtatcggttggtatttgtattaaacaccatgtagtaaattagttcttgtcaagaattaccatgctattttccaagagaaaattaatgcaatatgtttcgtacatatgatcaaatgctttttttttccgaaaaacatgtgggcaatacctcctctcctcacaaaaggaaattccacactctctatctgtatctagctaattattcatgatcatcttattaaatgacactcgcacacctgttgatataagtagtgttgactgttcatatgctctggtaagcattcatttaaaaaaaaaatctgtaaagaggagacacctccactgtatccacgcttg

SEQ ID NO: 47492 - DNA, 442 bp, Oryza sativa
  unsure (1)..(442): unsure at all n locations
tgcccgcaggtacaccgaacacacacttatcngggttcagctttatgcgggcggagcggagactcccgaaagtttccgccagatccgaaagtaaagtttcttggttgcgcgtcttcacaaccaagtcatcgacataagcctcaatattacgtcctatttggctacccaaagaaattcgagtagtacgttgaaaagtaggacctgcattctttaacccgaagggcattgtcgtataacaataagttcctatgggggtaatgaatgcagttttttcctcatcctccctagccatgcgaatctgatggtaaccagagtatgcatctagaaaacacaaaaggtcgcaccccgctgtggagtcgacaatctgatctatgcgaggcanggggtaagggtccttatgacatgccttgntaaggtcggtgtagtcgatgcacatccgaag

SEQ ID NO: 47493 - DNA, 434 bp, Oryza sativa
agcttagattcctggcataatactaacatattgttatgctcttatatgttcattggcgcgtggccccctcgtatgaatttagacatacctcggttcagattcattgtactattatatgtgtctcatttaggttgcgctcttttcagcttataggattaaattctactcgttttctgttagcatgtttttcaaactgctaaatggtatatttcgtgcgaaaactttctataaagaagttgtttaaaaaaatccaacaaatttattcataaaaaatatatattaatacttaattaatcatatgctaatctcatttctcgctttacgtgtggctaatcagtccaccacacctactgaaacgagcgcacccttagttttagggtactatattttgagacagcagcatcaatgatcaatggctccagaactcaagcctg

SEQ ID NO: 47494 - DNA, 451 bp, Oryza sativa
gacacttgaaactcagcttgtgaatggcggatctgatgaaagagccaacgatcttgtgtctcccagcgctgaagtggttcgagaagctgtgccattataataaacccaagtacacttttccaccactctttttccatcactctttcttctctggtgtttatttctgccctttcaccttgttaactatactaagttcttggatattggtgatgacttctcgcagggtcaatctggataaatacacacatgactacaggccaccttggtggatgcaaacacatttctttgttctttctagttcttgcagattaattcctactccttacagattgtggagaagtattttttaacacattatagatgcaaaccatcttgttgatagtggaggagtatcttgtctgactatttcttttttcacactagacgttcttaattgcttgttaacatattc

SEQ ID NO: 47495 - DNA, 374 bp, Oryza sativa
  unsure (1)..(374): unsure at all n locations
agcttactatttgtaataaaaacgntagctatgtcttggtgaatngaaacaaagcacctggacaatcgggttgctcggatgtggctgtgtaacatcgctaacatttccgatgactcctattcctatgggtaatcaccacctgaatgattgttactgatgtgctatgcttgcaaagacaaaattgtggctatgtgaaattctgaggtctgatgtccaatctataagagattatgatccggtacactaaaaggaacctcgagataccagtacaacacgcttacatatcattttcgattgtaaatctagctggatggatgtgcatcgtagatcaaccatcgtgtagagctgtgtcaatatgttgagttgtgcgatat

SEQ ID NO: 47496 - DNA, 152 bp, Oryza sativa
acgacaagaaaacgacaacaggccaaatacgaacgcaaggcgggcgcaggggcacgagcacagaaccaaacccgcggctcaaaaaaagcgcaagcgacaaacgcacaagaagcaacagaaaaccatgaaaaggaaaaaaaaagcaaagaaaa

SEQ ID NO: 47497 - DNA, 410 bp, Oryza sativa
  unsure (1)..(410): unsure at all n locations
gctgacataaactcctcanacatgctctatcccataaaatgtcatgctctgctctagggagtgctggggtgcagatgggtttctcacttcttgacgatttaatattctcaatttatagcatttcaaaataaagctatataccacatgttagttcagaaactctctagaattcatatcatttcccttggtactggtatctggtagagagttacatcattggtgcctcggtggcatgacccagtagtagcattgccgcatagctctccatttccctaatttataacttaatgttactggagaaacacaatggtttgacaatttcaaaatctctttggcagttcaaagagcaaaccatctagtcgtcggcctatgttgcttggctgggtaagtcgtcagctcaaccattatat

SEQ ID NO: 47498 - DNA, 283 bp, Oryza sativa
  unsure (1)..(283): unsure at all n locations
aaaaacnaactacgaagaaaaaacttgctacaatagatttttattttgagaaggagaacaaatgacactcaacagccatattgaaccagagaatatgaacaaaagtggatgggtgctttataatgtttaagaccttaaaacaaattatgaactatggtgctgtgttgaaatgtactgcggtcaaattgacattcacagcactaaaagtgcaagcaatcattcacatgtctgtctaacaatatatctgactgaggggctactgtaaaaccacacattttccttc

SEQ ID NO: 47499 - DNA, 397 bp, Oryza sativa
gcttagagtaaccatctaaggcctttcaatcttgttaactttcatgattcacagaatcgaattaattttttgtcataatagtgtgaacttactgagtttctatgatttcttgaactgatcaaacttgtccacgtaatgatgtgagtgaaaattatgctgttgtctgccgaattatttcatatgtatcctgtgtatctaagtctttagagtaagcttatcatttatcctgaactctttgcacatattttctgtattttttcctctttacttacattgagcacatcttctcagttgccagggcgcactgataatgaaataaagaattactggaatactcgaataaagagatgccagcgagctggcctacccatctatcctaccagcgtatgcaatcaat

SEQ ID NO: 47500 - DNA, 470 bp, Oryza sativa
tccatcaaagaatgccctatctgaaggccttcgtgcaagtgtgttcacttgtttaccatatcgtctatcttcatattgaaaatcgtaaggtgggctttgggaatacgaatggtaggagctaggtcttctagtaagattttcgctgctctttacactctattcaaatattttgaaatctatagtcagcaaatgaatgtggaaaataatgaaaagtttgaaaataatgaaaaggttgcagcataaatagtttaaggacaataaaatatttggatatcaaatatcagcagccattgagatttataaactcattacctcactatcattgactggtttgtccgtggacttcccaccagcatacttcttgtctacataaacagctctgatgaattcccttatcctgtctggagtggctaaaacaaacatagcggaataattataaagaaatgtactagaagtttccacggcacatg

SEQ ID NO: 47501 - DNA, 451 bp, Oryza sativa
tccggaccacgtcttgaacgagtcgtagcgcctgtgcctggtctttatcctgccgccgcggatcgatgtcgcgcggcgtgccggcttggcgccagggatctgctgctaccggaacccggcttgtccggctgcacgaacctgacgttattgtttcttcccttgccctgcgccgccgtacgtcgccggttgctctgccaccgccgctgcgggcttgcctgctgccacgcaccatcatctgaaggggaagaagaaggggagagaaagagagagaggagagagagagggaggagaaagaaggaatgagacaggagggcccaacgtcagtgggtccgcattttctattgtgtgaatgattaatgcgtcccacgcatattttcttaatactaatgtcacttaagcaccacgtgttaagaagacccgcgtaatactcgcacgtatacgccacgtcagc

SEQ ID NO: 47502 - DNA, 455 bp, Oryza sativa
  unsure (1)..(455): unsure at all n locations
acctgaggcatgcaagcttagaagtgcagcgtaacagccaggatgactttatgtattatctcgaagattggtatctgctcggtctagtacgttactanctttgcaacgctattagtcaatctcctccttgacgctatgaagcgggtgtgtgtcaccaccagcatcatcttcattaccatcagttttgctatttatcgattgtgtgtgaaccggtgaaagtgccaattttggagagggtataagagcaattggcggacgagtggataatggaacgctggatggagttcttccatcagccacaatcttctccacctgcatgatgcctaaactataatagcccatcagataaatacaccaaaactagcttaaacacctgcaggatngaaatagcacacctgagctagcccatctctgatataggttctaaatgcttcactcgcattctgaagctgagc

SEQ ID NO: 47503 - DNA, 464 bp, Oryza sativa
  unsure (1)..(464): unsure at all n locations
atcttaagcactgcagctgcagctttcaatatgacctaaatactattatatagagattatgccaaatatcattcacaactgaattcaatctaaaagattaggtttctaagctctttatttattggtattttctgaactctatggctatataattaaaatatagntgagagttcaaattatttgatgagctaaaaattttgaaagaaatcgtagcctagggtgtgtttttctctcccttttaactactatcatcngtttccgcgtacacgcttccctaattgataaacggtgtgttttttgcaaaaagaagaatttctatagtaaagttgtttttagaanataaacatattgatttcttatttaagtgtattntaagctaatacttcattcatcatgtgctagtccatcactccgttctatgtacccgaagaaaaaaggtgccagcccatacaatacaacacaac

SEQ ID NO: 47504 - DNA, 408 bp, Oryza sativa
acctataaaactcagcttggcactgatgactgcatttgggctccataattgttatcttgagtgggctgtaacgctgagatgttgtacgtgctgtgaatttgttcgagccacaaccgcagtatttatttttggggagcttggcaatactttctcggcacgatgctttttctttatcgtaacgccgctgagattttattcctgcttattaaacatataattggcagccactggctgccgatttagcttcagaaaaaaaaaagactctagcaatttgctgccgatcgatctcgatagcatcaactgtacttccgtatatacgatatagccacaaaattgaacgaagagggtgatttatctagctagctgggaatagtatgcagctggacggaacatgtgaacagggctact

SEQ ID NO: 47505 - DNA, 429 bp, Oryza sativa
  unsure (1)..(429): unsure at all n locations
ctgcagcttgacaaaactctgcccaagaaccttcgtttttttgacggggcaccacatagntatcccaccacgcagaagcgggacctttcagctggtgccgaacaaaaacaactttctcttggtncgtgcattgcagtaagttcaacttcttttcaatagcatggagccagtcgctggcctccattgggttggtggtgcttgagaaaagacgtggcttgatacagaggaagtctaacagattggacaggtgtgatggtggaggaccagactgctggttctgctgcgcctgctacaacatctgatgagaatgttgctgcatctcgtgcatcatcattgtncgtatctgagcgaccgttgggtctcgggcgcggagatggatgctgcttatacaccactgcatgtgctcatcgatctgtctcgctgcactgc

SEQ ID NO: 47506 - DNA, 400 bp, Oryza sativa
  unsure (1)..(400): unsure at all n locations
tgctctttcattaagaaaagcatgtcagncttcctaatttcttccctttcttcagatgatatacctttgagaatgtaagtagaacatcatcttctttgacaaaaaataataatggaaaatagaacctcataggagaggaatacagctttgcttgctacaaggatcagacttttcattccaaagaataagacacatgtttgagaacatatgggccctgctgggctagaaaattatcctgggcctacttgtcagttgtcaatgcctgttcataacactcttagaagttagaacattcttagtttattatcggaagagaatttgtgatgaaggaacatccttccatttatgctgtaagaaatgcaaagccagaggaatacctccttgacatctgaatcgatga

SEQ ID NO: 47507 - DNA, 225 bp, Oryza sativa
attcatcgctttgatcacaccacgaacaaacaagggagaccacccacgcacctatatcatatatgtattccacgggcacttcttcggatagacctcaatgacacaccgcggtgcccatttctttacaatattgtagtccctgaagcctactctcatgaagagaactgccaatcattctcttcccgccgtcggcttttggtgaccaacatcacggccacatccata

SEQ ID NO: 47508 - DNA, 455 bp, Oryza sativa
  unsure (1)..(455): unsure at all n locations
ttgccgtgacacgtctcatgtgttgggatgaggctcatgtgttgggcagtcgcggagtgcgggtaaagtgtacatccactgcagtgtgagtaaaccaaatctattcgaatagccgtgctcgcggttattgagcactgggacatgtattacacttggctagactctaaattcttaacttgtgtgggatgggatattgcatgatgatttctatgctgatggagccacttcctgaggggcgggaatgtggacgtcctcagaaaaccatgacgactcaatagcgggaagctatccttgggatcacaatggatggtggacagaaccgtcattggttaatatgaacactggtactaaaatttgatcagtctgtgctaggtctcaggtttgtgaaaagaattacaaaacttgctttgcgcanaagaaccatagccatcctttgaatacccntgtcatgtgca

SEQ ID NO: 47509 - DNA, 348 bp, Oryza sativa
  unsure (1)..(348): unsure at all n locations
ggatgcgccctcccagcaaacttatggatgtgccatgggtcaccggttgcatggcccgcctaagttcggtcatatcgaggctgggagagaaggcgctaccctttgttaagctttttaaacgctccggaccgtttacctggacggaagaagccgaanatgccctcacccagttgaaggcgtatctaagctcttccccagttctggtcgccccggagccagacgagcccttgttactctacttagcggcgaccccgcacgtagttagtgcggcaatggttgtggagcgcgatgagaacaattctcatttcacgcttcctcaccctgtgccaacttggcccgggagagagc

SEQ ID NO: 47510 - DNA, 475 bp, Oryza sativa
  unsure (1)..(475): unsure at all n locations
tcgtccttagttgctataaagaaaacccaagaatatctgttatttatcgtcaacaataaccaacacataccactttcctccaacagattgcactctagctggaccaacagtgtccatatgttagtgcatccgtcatcacagaaacaatatgagcatgtgaagaagcaaccatcttagcatgacaaaatggtgtacaaaccaaatcaagatctttcttcagtttaggcaaaccacgaacaaaatccaaaccacttaacctagtgagatgatcaaaactaacatgtccaagtctacgatgccaaaacatcacatctttatcaaacttagtaaccaaacatgttatcaccgatgaaacaagattttcaaaatcagctntaaacactcttccatagcgagagatattcaacacagaatcaacacaagaagtaaaaacttttacttccagtttcttaaagtgaacttcanaatcttcatc

SEQ ID NO: 47511 - DNA, 287 bp, Oryza sativa
gacctaatccaaatgcatatacctgttaatattattcacgaagtgagttatttcaaggcaatcatcagtatgtaagcttattttttcttgggatgtatgataaaagtggttatgaagaactttggaacataaaaggggtaaagaaagttgtgcagactcgtatgaaaaaaaagacagatttttcaagaaccttttctctgaacatactttgttggctgtatctccatgctcagatacttgagcaacctactaacctcgtcagcatgcagagatccagagtttatatg

SEQ ID NO: 47512 - DNA, 426 bp, Oryza sativa
taagatgctgcttctgcatgaaaaatgagactattctacatctgtttatggattgtcattttgcgaaatttgtttggagggcggtacggcttgcttttggtttatacctccctaataccatatcccatatgtttgatgattttcttttgggggttgacaaaaagaagagcaaactaatacttgtaggagcatctgctatatgttgggctctgtggttgagtacgaatgattttgtttttgacaaatcaccatctttctcatatatgcaggcaattttcagggcaacatattggctccgatcttgggcacaactacaaatgtgtgatgaagatggagagcttctgaaggttgcatgtcgtaagcttgagacgaatggtcatgcaactttttgccactatgaatggagatcttaaatagacttgaaaa

SEQ ID NO: 47513 - DNA, 231 bp, Oryza sativa
cagcgtccaactgctctatattaaagatgacagatacgaaaagcattagtaccacattacttcactgataacattgatagggcaaagcacattggaagatggagttcagacctgagtcaaactaaagccaccctctgcaaaatattgttgataaagtgcaatatttgcaccatcaactatagcttcatatgctccatgttcttccaaccactcctataaagtcatagcact

SEQ ID NO: 47514 - DNA, 257 bp, Oryza sativa
ctgcttactctccttagaatggttcatgctgtaccgtgatttcaatctgatcctaccattgctgggtggatgtacaccggttctggaaagacacttgcctatctaatgtcggtgttctcggccatagatttatggagatcctctgtgcaagcgctgggtgtgggcccaaccaaggagctcggcatgcaagtgataagctgcttggctgcttgctatgcaaataattttcacctgccttgtgcgtgcctttctactca

SEQ ID NO: 47515 - DNA, 462 bp, Oryza sativa
  unsure (1)..(462): unsure at all n locations
ggtgagaagaggcatggntggactgatctatgtgttggctactactacttaccttaagctgatgggggtggaagagtggctggaaccaactttcaattctagctaagcaataacaatctaaacctttaggtcaaccagagctcactttctttcacaaaaaagaagaaaaaacacagagctccctgtctcactctcacctaactcaccagaggtagagaggtgcacttcatctaatcctaaccggtcctttccctgaagtgggctcatggcatagaccaaggtaagattagtacttcgtgtttggtagatgaaaggaacacattccttactggtttttgcttagccatctgaggaagcaagccaagcagtgtcaacaaccttgtgatccacagatgggagctgctcctttgctttcttcagaactatttctctgccttntctcataaacataaccgaattcaa

SEQ ID NO: 47516 - DNA, 378 bp, Oryza sativa
  unsure (1)..(378): unsure at all n locations
gcttgcccgcangtacaccgaacacgcacttattttgtgttcatttttatgcgggcggagcggagactctcaaaagtttccgctagatccgagagtaacgtctcttggttgcgcgtctttacaaccaagtcatcgacataagccttaacattacgtcctatttggctacccaaagaaattccagtagtacgttgaaaaataagacctgcattctttaaccccgaaggcattgtcgtataacaataagttcctatgggggtaatgaatgcagttttttcctcatcctccctagccatgcgaatctgatggtaaccagaatatgcatctagaacacacaaaagatcgcaccccgctgtggagtcgacaatctgatctatg

SEQ ID NO: 47517 - DNA, 405 bp, Oryza sativa
ataaaactaagctctgatgatctgatctactagcaagctagtctcttctttcgcctggatcgatgacagaacacaaggagacctggacttatagctgaacaggaatgcaatgatatcatatatattaaccagggtcgatgccattttaaccttacgaatttggtaaagtacccaaaaaaatggctacattaattgctgtcaattttggtactatatagaaatctaccaaattttacaagtcccaaaatttggtacacaccaaatttgatataccaaaatatgtacggtaaaatggcataagtgaacatccccgatcttgagctacggttgttggacatggaagtgaactgtgtgctacaatctctgacctctgatcctgaagcggtcgactctctgactctattg

SEQ ID NO: 47518 - DNA, 464 bp, Oryza sativa
  unsure (1)..(464): unsure at all n locations
ggatcttaagtcacctgcggcatgcaagcttaatagtcgaggccgaaatatttatcataattgcatttttccctttccggtgcgaagtccttgccaagctataaagctcaaacagatgattattacgtgagtgcaacctaagtaaaattggtattattcaatatgcttatttagcaagattaatagaagatggattccaaacgaataaaccacaagaccgaacttgtttttttttgtcttgattcttgatggtaaggttggagatacacctcaatggcttttggctaaaaaaaaaaggattttggttcgtagtataatttgggacacaaggacttttatataaattccattgaanataagcttaatagtcgaggccganatatttatcataagggcattttccctttcctttacgaagtccttgctaagctataaagctcaaacagatgattatacttggtgca

SEQ ID NO: 47519 - DNA, 391 bp, Oryza sativa
  unsure (1)..(391): unsure at all n locations
tgctactattataactgatcaagacttggcaatgaatgctgctattgccatagtttttccagacactgttcataggaattgcctgttccatatgttatcaaatgcaaaggacaaaacaggaaggacattcaattcagaggatgaagaagtttacaaggatttccatgatattgttacaaaatcacagacagaggctgaatttgaatattngtggaaagatttcataagaaggaataatctgtataatgttaggtattttcagcttatatgggtcactagaaagagatgggcactagtttacttcanaagcaattggtgcccttngattcagacaacagcaaggagtgaggggacaaattcaaggtacaaagctgacattngttcatctcat

SEQ ID NO: 47520 - DNA, 477 bp, Oryza sativa
  unsure (1)..(477): unsure at all n locations
agcttcctagaagattcacccacaatctttatggtctgcgaccaacagtcaagctcacaaaggtgagttccttcaagaatgctctgcaggacaacatctttgctaattaaagccaacagaactcattaaggcatagccaacctgccttgcagctcacgagagtatatgcatcttcacttagagagggtatatatattggtactctcctctagtttattaatggtttgttcttcccaggatctaattcacgggatctccgatcacatagactgggttaccaccatagtataactcacatgggtctcanacccatctccttcgatgcattgtctatcacanttcgtgatagtcccttcgtgaagggatctgccacgcttctcgctcgttggatgtaatccaaccgtataactccggagtttcttaatttcctgacagacttcaatcgtnctttcacatgtctagacgaattcatattat

SEQ ID NO: 47521 - DNA, 443 bp, Oryza sativa
  unsure (1)..(443): unsure at all n locations
tcatgtatgtgcttatatatttgacgtgaggcacatctgagatgccaaatatatgtatgtactatgcaccagtacaatttacagcagtattaatgcttacaaaatctgacatctgacatgttaattaagcttgtgttagtagtcacattaaaacatagaaactaacaagcgactagatttaaccttctagttaaatgttttaagactaaattgcattggctctacataaacttgtcaggttggtgcaatttaatatataaacttgtataatggtcttatggtgcacggacatgtataatacatgcaaaccaactacaaaatgatgtattgtgactaatatgcangttacagtttgattactatgtcacctatacacatataatttgcattctatatggtccttcattantttntattcattagatagtccatttatattatat

SEQ ID NO: 47522 - DNA, 360 bp, Oryza sativa
  unsure (1)..(360): unsure at all n locations
atcccaacatctaccctattatacttcctctagtcacaactcaaaaatatttgcggctcccagtaccacataaatttaactggacggggtactaatgtatgcaattctaattgtaaacacttcctaattttatagaattgtattattattgaactgcattatctctgactctgagtatactggtgcactactcatgtccctcctgaccatcgttttgaggagcttccttgacaaaaatgagaaagacagtcctgtcaattattacaccattatnngtttgtcctaatctctacattgcatcaccaagttgatgacatgcatgctattttcttcttttttttccccaatagcacatgaatc

SEQ ID NO: 47523 - DNA, 451 bp, Oryza sativa
ctcaaaccgcagctctaatctatacctatactaattgtgttctttctacgagctcttacattaaccagagaaatctaaccattaattagacagatgatataatcatgatcgtcgatctaacatgcttttaatcaggtggaacaaagcccatctaatgtcaagtccttgtatttttttttacgcaccggagtacatgcagattaatggacttcaaccagcattcgatgaaaacaaaataacggactagatttatttttatccgaaaaagtggattagttttaatcacaagtagaaacagttagagttagttttcaatacgcttaactcaatccaaattagttagtccctaaattaaatccctagccgtcgacgcgatatcatcaatgagctataatcatcgaaatttcactcagcgaccatgtgttgccggtagccaacaacagcgcgtgct

SEQ ID NO: 47524 - DNA, 316 bp, Oryza sativa
  unsure (1)..(316): unsure at all n locations
ggatacttgttcatatcggagctcacagtcatcaattagtttctccacatctgaggtccacacagaagattcagttattttaagcagactcaatctgaatatttccaaatattaaatggttaatccagcattgaacattccaagtgaaactctcaacttataattttgaaacacaaacaagaactttaaaagttttgattcaaacttttaactaaactntactatcagtttagtgctctgaaagntcattgattagagggcaataaacatttcatagcatgttgagccttcagctggatgattgaaaagttagact

SEQ ID NO: 47525 - DNA, 453 bp, Oryza sativa
  unsure (1)..(453): unsure at all n locations
gggcgccgcactcttncactatgcctcggtggccagcgctgagcttacccttcccctagcctcacctgcccaccggcactccgggcccaccccaccgctgctgccgctctagttctccctgcaaacggccgaagagggagagatgagagagagaaggaggaggagcaagggaatgagaaagagatgatgacatatcggtcccacaatattcgtgtttgtgaatgacgaatggatcccgcatttaaaatttataatactttatgagtaccacatcaacgccacgtatgacaaagactgggtcaataccgtcacatagtcatcacatcagcgaaactgctgtccaatataaagtcgatatatccgatattgtggtttagagatatgaatcaaattcgccactagtttagagagtcaaagttaacttactctcaccccctaaacattgcatgtact

SEQ ID NO: 47526 - DNA, 357 bp, Oryza sativa
  unsure (1)..(357): unsure at all n locations
agcttaccttgcagtcagactcccctctttattactagccaatatcggcatttttagctntcaaaatgtggctatgntaaatattgtctggtactcctttcagtgcatttttggacctccaatcatccacatatttttacttcaaaagaaaaaaaaatgaaatggatgctttgacataaacttgttttttgggttcctgcatgatttttttttcaacgctaatggcttttttgaagcagcattntccgacacctttattaccaaaagagctgacattccattntattcctccacagctgtcattcctgatatggaagagatctgctgttgttgcacgcttgcagcactttgcgtatt

SEQ ID NO: 47527 - DNA, 423 bp, Oryza sativa
gtatatccgataaaagccgaaaatggtagaccggttctgtggcacaactccagcaaaccaactgcaggctgcaatgcaacgaagccgttgggccaccattccactaaccgaccaacgcacccaactgccaaaggaataagttcactttgctcccttctcctgacgtccttgaaccataataccagatctaacatgttcttcaacatgcaatatcggagtaccttatgtccagaggtagcattgtacctagtttcgactgacataacgagttgactacgaccaacccagacaagttagtgtggaacccatgcaggacccacatgtcaaggcccttcactctctctcttacgtgacccgacggagacaccatgagctccctcgtgtgcatctgcattaccatgtccacgacacatcgcggtgagt

SEQ ID NO: 47528 - DNA, 360 bp, Oryza sativa
attgtgaattattcttattcttctcttttacaaacatgcatctttggtttatcttttgattattctcgattgccataattgaatctacaaactgtatctgttttcctgttgttatgaaaatgaaatggttccatcagatggttcagtgaagaaatatcagtatataaaatgaaatggatcaatccgatggtttgatgaaaaaatatcagcacctgtaatctaatacggacaccatatacatagtatggtcttattcatggaaagtctagcttggtcctgatttgatctatccatgtatttgctgtgattgtggtaacaatgtgcctttttaccattgaacatcactggtcttgcctctgg

SEQ ID NO: 47529 - DNA, 398 bp, Oryza sativa
ttctactaaactcctacaaacgaacatttcaactgcttgatttaactagatgtgagttacaggagaactagatttactcacagcatgccacatcattgtttggaagagttttggtagataaaatttggatgtatagccttttccttttttattttgtgctgctaataatccttttttgtgttttatatgctacaggcacatgctcatttatctagactgtatcttggttataaccccttcctcaaagcatttatccaggacttccctaagcttatcaagactgatctaatttgtcctacagaggaggtacatttgcagctatcatttgtatggataagacaactacttctgattttgtatggacacgacacattggagtaatgctgtctgacacgagc

SEQ ID NO: 47530 - DNA, 437 bp, Oryza sativa
  unsure (1)..(437): unsure at all n locations
agcttcatgctccaatattggagtaagctctgttaaaactgaatcatgttcagtcaaaccaagaatggagaaatctgaanaacaaaaattaaggagaggtgctgatgttgtcaccccccaaatgagggtaaaaaaatggatcagctgtacaatgagaacggcaaacagtcgaggtgggggtggttggctgcttgtgaaaaattccttttgcatgctctagctggcctgactcactgcagaatttttgcagatctcactcaaggcacagtagaggcgcctctgtagagtttgaaaaatgtttggtctcttcaacctagctaagctagcttgggtatcaaagaatccaccggcctcctgcanagacaggcaaagccactgtatgttcatagcatttctgatgcagctaagctatggttctcatcgattacccatattct

SEQ ID NO: 47531 - DNA, 416 bp, Oryza sativa
ctgccgatatgtgagacccctgcaccggtgtaccccgtcggtcagccttcgtgcgccgaagaccgtcacgcccaccggcagctcctcctcacacctaggtcgccttctacaccgccggccgcgcctctctgcgccaagccgaccttctccaccggacgcgcctctcgcgccaatccggcctccctccatcggctgcgcctctcgcgccaagccggcctacatctccgccgcccgtgcctctcgcgccgagccggcctacgctgccatcggctgcgcttctctgcgccaagccggtctccgacccttccaccaaacgatgccgcgcagaccagaagcaggcgtctcccacgccctcggctaggcgttcgaggccgccatgccttcagtgaccgcagacacggtcaccaccaccgcag

SEQ ID NO: 47532 - DNA, 357 bp, Oryza sativa
cagcttgctgcctcggttaatttactatttttgtactaaacattcccagtatttggggccctgtgttcacgtgggcatatgcacacatatacataggtgttaattatttgtgtacctacaaagaaagcaaacaccctactattttttttagacaaacaaacacctaactattcaaaagcacaaaggaagaataagttgtccccacaatgatgagaaccatattcccgaaacaatgatgagaaccaagaaaccgagaacgtaaacttagattttgagtactcctacatataatttggatataagtagattagatctgtcatgctctaattaatgcatctaactttaggtctgttgtct

SEQ ID NO: 47533 - DNA, 433 bp, Oryza sativa
catcccattgcacaaaaagtcaggaatctgttgtgtttatgatacccgatgacacccttgtgaggagggcattaatcagtgatagtgctaatggctgcgaatctgttggaccaactgttgaatcgcattgccattctctcctttcgcagaattttgactctgaagggcatgcttctcattgtagatcaatgtttggaaactctggagcaagactacattctagtgcaccatgtatgacaactgaagcccaggtgtttgttgcaccaagtagagcatatgagaactcatcatctctgaatgctgaaggcagcgatgctgtgatatcagcatagcccctcaagtccacgcaccaagtattccccctcataattgtccacgaacgagtgtggcacctcacctctgtttaccaagaagtatggcgccccacctccgt

SEQ ID NO: 47534 - DNA, 450 bp, Oryza sativa
  unsure (1)..(450): unsure at all n locations
gctgcagcctagtgtacaaaggagagagcccattggatataatccattgaatcccgggaaatgctttcctcctagcctttcgtaccacgtggggtcacgtactaagcaagccaaaggcaagaagagtaagaatcagaagagaaaagcaccgatgcgaactgaagaagaagtacgtaagatgactattaccagcaccgaatggcctccagctgggataactattcctagacgtcaaagaggaaatactttccgaggtgcacgacagttgacccagcacctcctaagccatggtggcagagtatctgatagtgaagggtcagatcaagtctcctcggattatgaagatgagtctccccgacatctcggcgaggaagagatggaatcaaaagcatgccccctgtggtggagaaatggacatgtngctagcatgtgtttcacactctggcctca

SEQ ID NO: 47535 - DNA, 394 bp, Oryza sativa
actaagctggacaccaggtgtattgtagtattgacaatgaaattgttttgattattaacatcttggcttgattgcttatcaaattcgcctttttgcatgatcatatgtactcatgtctctgtatgccatgagttactatttgttagctaagtggtattccgatagaggggcctattttatttttaccggaatttattcactatttttattgtcttgtatttaataggaacactataagatgtgatataatattggattaatgtttgaacacaacatacacccagatatctaacatattgtcttggggtttgaatcaaaatatatttttttcattgaaccagggccccactatacttaacaaagaaaacttatatgacataaaagaatcttatga

SEQ ID NO: 47536 - DNA, 477 bp, Oryza sativa
  unsure (1)..(477): unsure at all n locations
atgcagctttcacccaaacagcagatccgacttcttcttatcatacaaactcatggacgcggtgagggagccttatgcaccacctctccaccaaaaccaaacgcctaactagttgtcataagaaccttcaaagcctaatggccactcattctccacaaagtaaaacccatccaatcgaaccaacatcttaccccttgtaatggaactccctgcgaccggagtctggaaatagatccgacaaaagagggggaggagctctatgcaacgagagaagaaccagccggtcggaggggatccctcaccgtcgaccagagaacaccatccacaccattgtccgctttccggcgaacaatctgcatcggcgcttacccctcttcagcagtctatcctgcttaattgggcactanattcatnccaatgtctggtctctccatgcgtcaaccncactgggaacaactgcacttatactaactacct

SEQ ID NO: 47537 - DNA, 438 bp, Oryza sativa
ggccccatttcttcaaggtgttatgttacatattactatctatgtgccggcttattcatctggcatgaaggacttgatgcctttcgtgctgcctgcgcaccaaaaccaaatgttatcggtcaccctttcaatgatttgttgcagcggcatctctttgttcatgaatacttgattgttcctctcctttcatatttcctataagactagaacaagaatcgacttatacgcatacctttttttttccatggttgtcactttgacgacactgttgggtccatcattccttgaggcatattctgtagaactaattgtgcggatttagttgagggtggcgaatccgtattgccactgcattctacattccactactagaaaaatcatttgttgccacgaaataaattgtggcaacaatactaaaattgtggcaataaatacatg

SEQ ID NO: 47538 - DNA, 411 bp, Oryza sativa
  unsure (1)..(411): unsure at all n locations
actcagcttgacagttgggaaggggttttgagagaaaagaaaatctacttattctatatgcccttggcacgccatacataacatagaaatcacacgtggaggggtgggcaattagctgaacagcggtgctgttcgaaactgattgcaaagaaggaaatcggcactttagataccatctggggaggtccgttggtatcccaaaactgctttcaacagtcggcaagtgggtaatgttggggtgaaccaaaaatttgggtgagccgggtctaatgtggctangaaacccccgtagtaagagggtagtatgaaccctgggaccacccatggggcgggaagaaacccccttggtaaaaaaccccacccttgggtatctgcctggaaagaatagaaaagaaaatatggatagttatt

SEQ ID NO: 47539 - DNA, 456 bp, Oryza sativa
  unsure (1)..(456): unsure at all n locations
atcttaagcaccgcggctgcagcttatttcaaatgaagaagcctgtttctgttctctntaatgtatcaggcaatactatgggttggcgaagttctgcagttttatgacaatgataggcgattcccggcatggggttttggagcgaagacaccacagggctacatatcccactgttttaatctgaatgcaactaccaatgattgcgaggtgaggttcatggttgatgagttatttttttacacgttagcgctttgccctccccctttcctacaatatgacataagacattcgttaccattgaacctcttagattcatgcttggtttgtttcactattttccaatagtagtctctagtaaagcctctcatgcaacaagtgcttttaagccatcttttgttccactaaaaatccctccagcctttgtaatttctttaactcattcttgtgtgtggatat

SEQ ID NO: 47540 - DNA, 414 bp, Oryza sativa
  unsure (1)..(414): unsure at all n locations
tattagatgctgctttgntagttagctagctagcttccccttttgtcacatcgaccttacgtggactatccaacggtcatgctgctgacgttggaccaaaccattacatctccatctctctctctctctctctctctgtcaatttctctatctcattttttctctctcaattactctatgtttcttgggtagtatattccttgtccatctccgaaattagctgacaagtggcgtgcaagtacatgctatttgttgtaggataaacacttgatagctttccaaagtcaaaaaaaaaaattgcatcaagagctatagctagatgccgtgatcaggggagagtatcaactattagacctacatttcacggttaggtagtagagtgagattgctagctagtaagagattaatccactt

SEQ ID NO: 47541 - DNA, 201 bp, Oryza sativa
gggcaaccgcgcgccggccccgcgcggcaggcgaccgcccacccggcggctcaaaacggcaacgcccccctctctccaaacgaggaactcgaaccactggtgttcaaccacacacccagcgggggcgaccacaacgaccagccagaacaacggccccaacgcggcaaacagcagcccctaacccgatgcgcgacaggcgcg

SEQ ID NO: 47542 - DNA, 420 bp, Oryza sativa
  unsure (1)..(420): unsure at all n locations
atgaagccgtcgtctggagtagaagatgccttcggctaaggtcccgagaggcctactggcccatggaggcccttcaccacctaacggccagcccaagaagatcatctcggggcccataaagataaaagacacagtatacccattgtaatatccctatcataagggtaacaatataaaatcccctgtactaaccaaaccatagtgggtatgagcctgtactagaattataaatagccccatagggccatgtaatgggggacctcaacacatctaaccaattaatatatggttttactattctaaccacccaacgggttatcacgtccttcgacatgacgcggttatcantcgacaacattaactatgaatggacatactctatcttagaaagaagagctaaataaacaagcctcccagctt

SEQ ID NO: 47543 - DNA, 440 bp, Oryza sativa
  unsure (1)..(440): unsure at all n locations
gctttgagcagctcaaagaaaagctgactctctgtttctattttagctcttcccgacatcaggaaagactttgttatatattgtgatgcatcgaggcaaggactaagaggagtactgatgcacgacggaaaggttgtggcctatgcgtcacgacaattgcgaccacatgaggaaaactaccctacccatgacctagaactcgtagctggggttcatgcactaaagatttggagacattatctgattggaaatcattgcgatatctacactgaccacaagagtctgaagtatatttttacccagtcagatctcaacttaaggcaaaggcgatggctggaattaatcaaggattatgacttatagattcactatcaccctggcaaggcaaacgttgtggctgacgctntgagtcggaagagccattgcaatcatctgacgac

SEQ ID NO: 47544 - DNA, 445 bp, Oryza sativa
  unsure (1)..(445): unsure at all n locations
gcttgcaggtgtgtttcctggttntgtggataggacactcataccttgtctcctcggaagttatccttgtcggctcgtgattcttgtcggaaggacaagatttggccatactatgatcttgctcgggctcagatgtcgtcgatgttccgttctccacttctatgggaggatccttcgacatggagtcngcctagggtttaaccatgacgttctcgctttcggtcattggtggaccagtcgagatcagcaccctggtgtaaatcgagaaaacaatttcgccgacttgggtccacaccagcattgttgaagtagaaactccttggttgatgccggtgttgacgctgttgtcgatgaagcttgacgacatagtagtagaaccttgagtaccaaaagcccctacctggcgtgccactgtcgacgggggatacccatagnaccgatatgg

SEQ ID NO: 47545 - DNA, 417 bp, Oryza sativa
  unsure (1)..(417): unsure at all n locations
agcttgctggactctcccttgttgcttgattcctggctgatccagagtccttttgtgctgactgccggtatcctccatggacgtatcaccaaacgaagcgggttgattgagattcaccatcgctggaatcatcacatcttgagggttttggggggcagctgcatcatcctttctccctcctgtcagtccagcctgcatctcatctctcttttgcacagatacctgaacattgctgatctcatctgcgagctgttggtctatcttcccatcaccatctttctcatttacctcanagttatcatgagcatctaccctttgtggaatagcctcatcccattgttctccctgcctatgccgagatgaagacgaattatcactgcccgcacctctgaaaactaacttgcgtgctgcccctct

SEQ ID NO: 47546 - DNA, 450 bp, Oryza sativa
  unsure (1)..(450): unsure at all n locations
gcttgtgcacaannaatagagaggtgagttagcatgacactctttatattcgtaaattaacagacgttcatcaagggctcctttagaaatcgagaacttgtttaggtaaagtgctactgtaacagtagtaaaagtaaataccaaaatccgtatgttcagaatccacaaatttatacagccattttgactcccctattattggacaacttcatcatgctgacttcttgccaccgaaaaggagattccaaccgtacgcattgcctttctttgctgctacatccagccgctttgcaccaacctgtatataaatttaaataataaatagtggagaaaactgtaagatgagaaatatttcaagataataatagaatgcaaaaaaaaaggcacagggcgcctctatactagtgatcagataccacaaataattgactcaacagttcagaatataaa

SEQ ID NO: 47547 - DNA, 428 bp, Oryza sativa
agcttcctacggtgatgaattgtctgaatattgctgtttagaggacaggagggaacctcaaacacagggtgcaacaaagaagtcatggagagtcatgccagctctgctggaatatcaacacatggtggaagaaagcagcaaatctgtgtttgaatcgggcgtttcttcaccggcactgaagagagccaggaagactgaaggggtagtaaccgggaaggagaaggaggcaaccagccctgtggccgctggtcaactgacgggaccgatggtcgggtcccgtcaggagcaatgaattgcatggcttggaactgtcgcggtatcgggaacgctgcgtcagttcatgacctttgcgccttggttaaggaggcgggttcccatatcgtgtttctcagtgagacaagacaaaaggtcgatagagttaaacgtct

SEQ ID NO: 47548 - DNA, 224 bp, Oryza sativa
agctgcattggactgaaggctttgctgcgccttttatttgaatagtacaggctcactgcaatgaatggtataatcaaccttttggtaaagatgaaagcatgcgacgaaataaaccttttgcacttctgctattttactccatctctgtgatgacccaccgcgagctacacgaagtaaaaaaaatcttctcagttttatgcacgaatatggcttttaaaacgtgg

SEQ ID NO: 47549 - DNA, 285 bp, Oryza sativa
  unsure (1)..(285): unsure at all n locations
agcttaaggctattaatggctggtcggactatagttntacagaactccttgagctgttaaagtatctgttgccagaggggaacaatttacctcagacgacatatgaagcgaagcaagtattatgtccgttgggccttgaggtcagaagaattcatgcatgtccgaacgactgcattttgtattacaaggaatacgctgacttggatgtctgccctatctgtggnggatcaagatacaaacgagcaaagagtgaaggtgaaggaagtaagtcaaagaggggaggcc

SEQ ID NO: 47550 - DNA, 380 bp, Oryza sativa
  unsure (1)..(380): unsure at all n locations
agaactcagtcggntgtgttcgcctcctgttatcngtatacaaagcacacgattagagtgagattaattaagtattaacctacaataatgaaaaatagattaatatgattttttttaaataaactttcctatataaacttttttgaaaaaaaacacactgtttagcaattttaaaagcgtgtgcatggaaaacgagagagatgatttgagaaagaagggcgaagaacacaacctaagagtgtcccatagagaactccccacctagcacctctcctattcagccatccccatcccatgcgctctatgtgccatgctcgccatccaacgtggtcacttcattgtgaccaaagaccgagaatgaaatatcgtntacctagttt

SEQ ID NO: 47551 - DNA, 386 bp, Oryza sativa
  unsure (1)..(386): unsure at all n locations
agcttagagtcagcangccatttctactccnttattatggagccctagaagaagagagnatttatctctactcggactcacattgacccataagaagcttatcttctacagatttgctttacatcgtatacattccaaccgagacagccacacagtgattaatctaagccaacagacagtacaggttggagacagcatacaaataattttgaccatcgtatacatacanaacatctcaattctaatacgccaatgatctagacacaatacatatgcataaaattcgcatgatatggatcacaatatattaccaatactcctgcgagagataagagagaatgagatagccggcttggataatcttgaagataaccgagatacctgat

SEQ ID NO: 47552 - DNA, 349 bp, Oryza sativa
  unsure (1)..(349): unsure at all n locations
ccgctagtccgctgctgcttatttttgcttgtcaggcctgaagtgcctttgtaataatgtaaatattatcgatataataaagatgcgtcttttatatcatgtttgtgtggcgtaccccggcttttcctgggacggggattaatacactatcgttcgggaaaaggcaattntcctcgtcgcgacaagctggtatcagagccatctcgactgtaggataagccaaatggataaaacctaatgacatattntataaataagattatttgcgaaagttcctctttttctccctctcctaatgctattcgcacaaggattactctcttctttcttcggatctcaactaagtact

SEQ ID NO: 47553 - DNA, 412 bp, Oryza sativa
  unsure (1)..(412): unsure at all n locations
agctttataatgcaanntctgagaatccttttgagatagannctgcaaatattgatacacatcatacctccaatcatcggctgttatctgggcaacttctactttgatatccctcatcatcggcttgtaccctgatgccccttgagccaaattattagcttcaacattttgctcccgagatacatgctttaaaatcaccagccgaaatccatccatcaactctcggcacttctcattgtataccattaatgtatncattttgcattcatattctcctgccaattgactgatcactaataacgaatcacccataatttcgacagcatcggcctcaactttcttaagcaactgcaaccccttgagaactgcttcatactcagcctgattgtagttgcatatggcataatagtat

SEQ ID NO: 47554 - DNA, 427 bp, Oryza sativa
  unsure (1)..(427): unsure at all n locations
acctataaaactcaagctttanaagttcaagagctcacttcttcccttctagatatctagctaattaatgaaaatgatgtttggtcttacatttggggaaatatgaaatattcttcacagaaatcctatgcactgaatttcagagttattaagccaccagttcattttctatggttatggaagtgcaaagcagtttcaaaagtaaaggttttcgggtggctactcatgatgaatagattaaatactaagttcatgctagatcataagaattgtgctcctccggattgtgatctttcttgtgttctttgtcaatcggcagctgttgaagacctcatgcatctgttctttttatgcccatntgcccaaaatngttggagtcttctaggcattacatgggatactaatctatctttggaagcaatgttta

SEQ ID NO: 47555 - DNA, 466 bp, Oryza sativa
  unsure (1)..(466): unsure at all n locations
tcagttcggattcaagcccgagtagtgaagagcaaatttctacaccggaattagctccaagatgtgtaagaagtatggttaaattattataatctacttctcaacaaagagggacaaaacaatatgaattttccaattattctgttgttgagtcactgttttcaagaagcaaaaaaaacataaaaattgggttaaagccatggaagatgagattcgtatgattgagaagaataatacctaggagttggttgatcgatctaaagatggagaagttattggagttgaaatgggtttataagacagctaaatccagatggctcaattcagaaatataaagcaagacttgtggcaaaaggctttatgcaaaagcctgatattgactactatgagaaatatgctcctgttgcaaggctagagacaattcgtacaataattactctagcagctcanaacaagtggaagatat

SEQ ID NO: 47556 - DNA, 362 bp, Oryza sativa
  unsure (1)..(362): unsure at all n locations
gcttggcgatgaccgaaggagcagcaaggtctttttttatatcaaaacccgatggcgaacttcgagntgactgcaacgacaggcttcncggggtcttcgacgcaagggaacccgctgccgggcttgctcttgaccttgcggagccgaaagaggtggcggcacaggagggcgactgccgacgcgaccgcgagatgcggctggaccanccgccgccggcggcgaagcttggattcacgttggcgaggtacttctagaggtcttctgcgacggcgaagtggaggccacatttgggaggagaggcggcggcaactgtgcacgagcaccgctggctcgggctcttgctgagctggaagatgaacagt

SEQ ID NO: 47557 - DNA, 472 bp, Oryza sativa
  unsure (1)..(472): unsure at all n locations
tactaagactgtcaactgaagactatgagacacataaggaataatgcataattattataacagctgatgttgctacatatgcaggatagatgatatcactgcataaaaaggatgcatggacatgaactaatataaaggatactgataaagccagtaacgaattcaacatttggaatattttgttagactaataaggctatgagacatacttggacaaaattattctgtatttactcataaaataaggatttcatctttcaaaaagttcaatatgaaaaaaacatcagctctctgtcgaactattaaacacacaacattntacacaccaacggttgtaagtgtgaaaacatatatatcaataaaatgaacattacacaaagtagcttgtgggctgagtagttcaacgtaatataaagagagtgtgtcaaggcccatgacgtccatatgcctatatacttgtatatgtaccatg

SEQ ID NO: 47558 - DNA, 154 bp, Oryza sativa
  unsure (1)..(154): unsure at all n locations
gcttatntccagaaatacaagcttcagattgtctgtttgtgcagaacaaaattgtgtaatccccacaacttttgagattacttagtctgttgccaccatataattaactaaaatccatatatattccctccattttttaatagatgacaccgcc

SEQ ID NO: 47559 - DNA, 466 bp, Oryza sativa
gcttgacgggcggatgaacaaccaccaagcgctgagggcgtcgtctattatttgttgaaaaatgcgtccgagaatttgaatacaaacatcgagacagaggcatcggtcaaaatggattccagatgcctctcatgatcatatgccccacagcacatgattaaccctcgcttggtttcaaactttctgtagatagtgtagtaaccaaccatcctcatgtgtatctctgctaataactagtactagcagtaaacaaccatgttaatttgtgatatctaatgtctccaaataaactgccaaagcacaatgcctgaatatgttgttgtgtgatggttacttcacgtctcatggcttctcttatatatgactctatgtatgcagagcacatggattgacgtattgctcttcatgaaccaaattatcaccgtacagagtggtagttagtacattcagtgcgagttatgatctg

SEQ ID NO: 47560 - DNA, 324 bp, Oryza sativa
  unsure (1)..(324): unsure at all n locations
agcttctccagttgcttgatgtaatagtgtgcattgctgataataggtcatgtggtaacatcgcatttctaatttttcgatctttagttctttactttcacataagtatactattatctacggaacgccgccacaggtacaagttgctcataagaaagagtgaaatgtacaaccacctcttatcatgatcctcatttgttcaaagcagaccattgcgacatgcaccggtaattagagatagaatgtgatctgcagactgtangtggnggttgttggtgtgtatgtgtaatgtgttttttttntaatttggnggatggggggggg

SEQ ID NO: 47561 - DNA, 468 bp, Oryza sativa
  unsure (1)..(468): unsure at all n locations
tagcaaccgatatagaatggtcctcttattccagtgaagcattacttcttcaagagggttatgttatgttatgttgtatttatattatattattttattggttctaaatgcggatatagctgtgttttgaatgtgttcggaatagcttgttcattgtttgcagaataaaagaaagggcacagctttgcaaacaaaaacatacattaccaatgtagtaaaaccaagttactgttagattacgcgacacattgttgaacctggcatatcataaaaataaagtactgatcgnntgtgctgatgtctcttcttttcttggcttagttccttaaatgattatttttctctgtactatgttaccgttgtcctcatcttctcttctgtgtgtctaatggctttataatagtaccagttagctcaatcaaggaacaagggactcggattatatattcaatctatgggagaatgaac

SEQ ID NO: 47562 - DNA, 481 bp, Oryza sativa
  unsure (1)..(481): unsure at all n locations
agcttaccagctcaagcacgtggatcatactcttaatctggacttgttttggataaacgcaagtaatcaatcgagaagccttcgcatcgaagattgaagcactcagtagtcagtataggttatgaatcacggagaagactgcaactcgattatcaaggtctcaggggctactgtggaggagaagactgcaactcgattatcaaggtctcacgggctactgtggagaatatggatactangtactcatacaacctccatattcgattagagataggtgataggccagatccatgtattatatagagtaggactcggntgcaatgttaccatgtgttctatggcaggacctacagtaccgagtgaggattatcatataatagaatagcanactaataccaaatccgattaggtttttcgattctctttgtaaccctatcccctacctatataaggtggatagggagcccctccagaacatata

SEQ ID NO: 47563 - DNA, 477 bp, Oryza sativa
  unsure (1)..(477): unsure at all n locations
attcctacttaaaactatagagaatataaagcgaagagttaattgcttcatgaggcgtgngntgcatgtgagggagagaagctctatatatagccttgtaatgacggttgtatggcagttaggggccgctaactgcgcataaccgtcattggggagcgctgaggagtctccacgtggaagatgggtgtcacgtgcaccaagattggttcggccgaacccattcaaccactctgctcaccaactttggtgagggactgacatgtgggcccctatgaaggtacccgggtgttnggtcccactttgagtcggtttgagctgacttgagggcccctaaatccgtgtggttgcacgtgattcactggagggtgttttctttgcatgccggcttaatttcttcttcactatggcggataattcatgcatccacattaagtttccaattctaatacaactacattatttattattggtatgcgc

SEQ ID NO: 47564 - DNA, 380 bp, Oryza sativa
tgtgaatgatttctttacgcggattattcttaactctctttgatgacgacccacagaagtggcggatgtatgccgatttcattggaagtgctggaaggttccttgatctactctcttaaataataaaagcatatatgtaagttatgttgacatggtgactcgaaaatgcgaaaattcacttgtaatattatccgtacatatgcagcatcttcgagctcatcactccgctctatcctggatacttcctcccacttgcgtccttggggaatctaacacaggtacattgaaaagaatatatgtattcgatgtactttcacaggtgacttaagtctattttgatagcctgcatttttgatagaaatcattgattctgactctta

SEQ ID NO: 47565 - DNA, 354 bp, Oryza sativa
  unsure (1)..(354): unsure at all n locations
acacaagaaactaagcttcggccacccgctcttcttctcagatgctttattctttatttccgcnggcgtgggccgacgctcacttggggacccattcaccggcttttttttttttttgcgggggcatttcacggctttgtgtagttggagcaaattaaccccaaataatgaacttatttagagggatgcctagcaaaaagacaaaacagtactaaaaaaaaaattattataggtaaatttactgcttatttaaaaatgatagctgcagtaccggtccatgttgacatcgtttattgaaaaaatgagatatatttatgtattaagataaacagatatattatatggacaatttta

SEQ ID NO: 47566 - DNA, 418 bp, Oryza sativa
  unsure (1)..(418): unsure at all n locations
tctcgatacanaagaaaaggtactgcagntaattaaaagctattgacgatttccatccccgtctctttacctacgtctacatgtttaaggaactctgctgtataaccaggtggggtcgttagagacggtttgattaacagtagcaagtaaattctctctagctgtttgttttgttatctatatctatctatctatctatatgtatgcatgtatgtatctatctatatcctatgtccagacaaggtcatgttagaggttagcaatactaccttggttgcctctgcctcaagagattattagagtcacgtacacattaggtcagccccagccacttgcacctcttgcaaagtcaacaaggtaggaagatatgacgcctncnctgctcctcgcaatacgtctccatgtcatgggactagtg

SEQ ID NO: 47567 - DNA, 430 bp, Oryza sativa
  unsure (1)..(430): unsure at all n locations
gacactatannaaacccaagccccgagggccggaatggccacttcggcccttgccgaggcgtatctatcatggcgaaaccgcccttcttcgagccggatgccatggcgaactggccatggcgaagacctccctctactgcaggtactcacgcgacccttcgccttgcgtcatccctggttcatagccttcgccacaggtttcggcagaattggacgaagggcctcatgccattccgcaacaagcccactcaaggcaacggtgagagtggagcttctgccgataccctgcaaaccatgcggtatgggatgtggggccccctatctaccgaagctcctgacgaaacctacactgttcctgcaaataaaataatcttacttttacccggccaaagggaacaagatcgcgctatcttatgatgggcctctcact

SEQ ID NO: 47568 - DNA, 485 bp, Oryza sativa
actcagcttatactgcgaatcaacttgattcactgattattgacagctacctgtgagaacctatccttttccagattatgtgtcaagatgtatcctccactgctcaaacatgctttttctgtcaaccagcttaggttcaagctagttgttatcaccgaaaagtatttttagcattttcttttaccctaaaattgctcttgactcagtgctaatcagttgtgaggcaacacgttatccagaaaaagaggatccctgagttcctccacctcccaaccaaccccattcaacacagacaaggacagaggagtacaaaacctagttatcgagaaaagacattttgagaataggggtgctttgaaaaactccgatgagctctctgttactatgcattttctttctcctttctatggacaaacttatggtagcatgtccgtccgaattaaactagtgtcatttgaagtcacagtaaaattgtttatcttacg

SEQ ID NO: 47569 - DNA, 464 bp, Oryza sativa
  unsure (1)..(464): unsure at all n locations
agcttcttcattctgtgagcctcgtcaacttaagtgaaagtggggaaatgctcaagtgttacaagaaaagaacagagacaatacactaatgccggcaagtgaacaccaaataatgggggacttcatctaagaaaaaacttactgacaattgtagaccacttgaatttctgtagaactgccttgtcaatttggacaaactcataactcgtcactagagcatcaaataaaggtttcccatcagaagagtacatttcatggacttggatacactttcgagagtctctgtctccttgataaacaataacattaagatcactagcccactggcaaaattcctagagcacaaaacatgcatccaaaaaataggattaatgcaacatattttgatgtaactgagatgcaatatcaaaaaaaggattcanggtcaaaatttaaaatcatctatataatatacagtataatat

SEQ ID NO: 47570 - DNA, 434 bp, Oryza sativa
  unsure (1)..(434): unsure at all n locations
ttggagaagatggcatcatacacagaaggaacaaagagctattaccacccanaaggtaagacaaggccgattgaagaatgagatttaatcttgaagaaagtgctcaatgaggtagctgttggaaaactcgagtcaaagtgggaaggaccattcatagtccaaaagaagacagaaacgggagcattcaagttagcatatcttgatggtgaggagttaaagcatacttggaatgctgtttctttgaagaaattttatgcctaaaaaatagaaaaaaaaagggagagagagaaagagaaaaaggagaacaccggagctcgagtttgtagtatactcactcagatgtaaatacgaatgatatccaagttaatgaatataaacaggacgtangggtgtttatccataatggagggccgaacctgtatataaaacatgcc

SEQ ID NO: 47571 - DNA, 317 bp, Oryza sativa
  unsure (1)..(317): unsure at all n locations
agcttncgcctccaaccagcagatgatgaatttatttctatcagnggctgcaccccgacctgctgctatctnncccctccttactcccgcctcgaacgacataggctgtgaacacgcttcccctgctgccgcggncgatccgcatacaggacgcccctggagtagctcgcatcggcgtgcacgtcccggacacggccgagcgcactgacggcgtcgacgacagccgcgcggcacgcgtcgcggatctcgagcacggcgaagtcggtggggaaccccgcggcggctgttcgccgntccacccaccgccacgacgcggc

SEQ ID NO: 47572 - DNA, 437 bp, Oryza sativa
  unsure (1)..(437): unsure at all n locations
ttacttattntagtattcaaataagtgccaaatacttatttttatgtaaagnttatttcattcacattagtaaatgtcgtcattgtcaagtgcttgtgacaatcatcttgtaactcaatcacgcaagtaattttactattagatcatgaactattgagttgcatgcaccgtacgtctccctcacgcgaggccgcctcaagtctctagcgtggaataaaagtatgctgaaatttttatttaattgcacgccagccagaattcgaactcgagacatttagctctgatactatattaagttgcatgcatcgaccagtttaacccaaaagcttaagctgatgagtaaagacgggcaatttactttatattccaacatggaccgtacgtttaattgatatatcgagcacgatcaataatcaacaatgccacatttcggtctt

SEQ ID NO: 47573 - DNA, 460 bp, Oryza sativa
  unsure (1)..(460): unsure at all n locations
gcttttaatattcatttataatatcatgttttgtttttataaaaatacttgaggtgctatntattctgctcatatgtatctagtataaagtatatagattgtgttttttcaggatagtaacttcagnttagcactatgcgatcactggatgtttaattactggatatttgaattattatgcaagctcatctacattattatgtctatattactgttaaacggngtgtttcgtacgagaactttacagcaacttcagtttagcactatttcgatccgcccctgctggtttcatgctgaattatataatacatctgcactgcccatctgtcagtaaaataaaataaaggtctcgtttccaccacaaagagtggataaagtattgaatattcgtggcacgcttttcacactgttaaacgatgttgttcgtgcgaaaactntctatgcgaaagttgttctaaat

SEQ ID NO: 47574 - DNA, 451 bp, Oryza sativa
tatgttgtgtgtttactgctgggtggaccatatggacctggcatcccttctttactatggatactccacgagggctgcctagctttcgtgtaagtaatgtttgacacgatggctcattctatatatccaaagatctgttgagaacaatgcatttttgttgtttgtccttggatgggcaaagattagtactaccatctagttgatgtttatctgccataacagtatctaacttcttttttactgagaaacagcgtgtcttgtgtttatagcattgatttccatgtccatatgttgctggtggttatgtaattattgtggcaactataacgcagatgccaacttcgacttcgtataaaatgcctatatttatcctgattaatatcattggtcaatgtgagttgtactcaacgcagctgtagattggtgtaatagctgcaacaattaagccatg

SEQ ID NO: 47575 - DNA, 400 bp, Oryza sativa
  unsure (1)..(400): unsure at all n locations
agctttccatagagcccaaaatcatcgaaatcagtctcttgagtaaaaaagntcttgcctttntatttgagcagcatcagactaatcgaaatacatcacactatgcgatgatccagagaatccgaaatatcaccaaacttgggtctttgcttaaggacgagaaacatgtgcttagacacatcagactatcctatgttaaatcaaattgttcgatgtcttagagagtccaaaatattattgaacttcactctctatctctcgntcttatttgtctttggagggcgataaaattggactatctgatgtgtgctgaaatattccccccaacggtcatattttgnggatctatttaaacccccaatcaaaccctttgtcaggttagcccttntcattctcgatc

SEQ ID NO: 47576 - DNA, 392 bp, Oryza sativa
actcagctgccacggtatcggttcgcttcttcttagacagatttttgcacagctccgcggtcgactttttgttatagttgccgaaggcctgtggcatacttgcgcatgtgctcaagtgcttcgactcttaccccctccagagttgggcgacaccttcgcccctttcgccccaaaaacgtcacccttgggagttagcccctactctgtagggcattgctatcgcataaaaacataactggctgaactggtggcttggggggtcgtccaaggctcagaaacagatgcatttctctggcatttcccttcctgcccctaagcctttctttatgctttaagacttccatttgataactgccgcccattgactgggtgcgcaccgcacaacatgattc

SEQ ID NO: 47577 - DNA, 324 bp, Oryza sativa
gcaactgccgtatctcatcgtggcggattatttttattttatggagctgctggcttgggtgccgacgtacttgcaatgctacttattgctagtgctcaataaaaatcacaatcacaacggaaacaatcatcaagaaaatgattaaaatatcacaacaaaaaattatgggcttagaacctcaatcgagcagaaaaactcacattgtacaacaattgaggtttgatgatcaatgagcacaccacgccttgatgtgaaaattgaaaaacaaaatcaccaattgcaacgatgaactgatagtttccaccacaatagagaggggagagg

SEQ ID NO: 47578 - DNA, 474 bp, Oryza sativa
  unsure (1)..(474): unsure at all n locations
gcttgacttcttcttgtaacatggcgatgttcttgcttggtgactatatattcatggtgtcataccgtagcctcatcacggagggacctatttcttcgcacatttcaaaggagaacattagtcccaacaaatcgattgtcattctccacttgatgaacaataggttgcatatgaaagatatgaatatgtttgttgagtattcattaacaccacaagtgtcatatactcgtacgcaagctcaagtacaaagatccgatataaataataggtgaacaacatggatctagaacatgcacaataaatgtataggattttctcccnctaaatatatgcatacaaagaaatatactagagaggcaagtgtatgcataagtaaagaagaaccaatggcgtttatcctatacacatggacaatgcatgtagcaatgataaagacaaacaaaaatacataccttcatgatcttcatgttctca

SEQ ID NO: 47579 - DNA, 339 bp, Oryza sativa
gagctgcaagctgtcaataaccttagtacaatcttttctatttatgagtgggcctattcagctgcaaggtgtagacactaaaacacagttttgttgccacggctgcttacacggagcattgtttccagaccgctgtatctgaaccgaaccagcccattcatcctctttggtgcttttgtttgccttttctctctctgcccatggcgagttaacaagctccattcccttggtttccttcttagcactaaactccacaactactgtcatttcaattttccttcaatggtccaaacgatcatatgtgaaagcgtgtatggatagaagaatgtgtgtaatatt

SEQ ID NO: 47580 - DNA, 311 bp, Oryza sativa
  unsure (1)..(311): unsure at all n locations
gcttcagctgacatatactcctcaaacatgccctattctctataatgtcatgctctgctctagggagtgctggggtgcacatgggtttctcacttcttgacgatttaatattctcaatttatagcatttcaaaatanagctatataccacatgttagttcagaaactctctagaattcatatcatttcccttggtactggtatctggtagagagttacatcattggtgcctcggtggcatgacccagtagtagcattgccgcatagctctccatttccctaanttataacttaatgttactggagaaacac

SEQ ID NO: 47581 - DNA, 324 bp, Oryza sativa
  unsure (1)..(324): unsure at all n locations
atcatgaaccaaaggttggatggtagtgctgatatgagtgntttaaggaccttgaagaccaaaaatagtgaaacttatggttgctgctgcttgaaagttgtaactcgcggttccaaacttgaccatccaacaagcactaacaaagtgcgagaggcaaatccattcacatgtactgttcttaacgaaaacattatctggactgtagggggctagctggctataaagccaacaccatgtcgtcgctttcttacacttctgttgcagtatatatacctcggcctcgcgtattgcattgtgtcatctggcccgcagctgatgagacta

SEQ ID NO: 47582 - DNA, 256 bp, Oryza sativa
agcaactattgaatataagtccaagcatctttattcagtgtcatccagcctcctatagcctctagtactactccctctccatcacgcttacgaacttgcttctctattgcccaatttacagatggttcccaactgacacaaggcggtgcacaccaagggtataacatgcggacaggactttttgaatttgcccctttctactaaaaacattcatcgaatcttttttctttcccgaacatatgttttacacacttct

SEQ ID NO: 47583 - DNA, 400 bp, Oryza sativa
tgaggctaggactttcaacattatgattgatgcattgcttatagatggcagaaatgatgaagccaaggatttgtttgttgctttctcgtctaacgggttagtgccgaattattggacgtacagattgatggctgaaaatattataggacaggggttgctagaagaattggatcaactctttctttcaatggaggacaatggctgtactgttgactctggcatgctaaatttcattgttagggaactgttgcagagaggtgagataaccaaggctggcacttacctttccatgattgattgagaagcactttccctcgaagcatccactgcttccttggttatagatcttttgtctggcggaaaatatcaagaatatcatatatttctccctgtaaaatac

SEQ ID NO: 47584 - DNA, 275 bp, Oryza sativa
gatgtccaaagagaatagatcagctaagacctacaagaacaatttcaatgaagttgagagctaaatagacatagccgatctaagttcttgtatcaaacagaaacttactgggatagcaggggcagttggttgcactactttcttgacatggtgacttcctgcagccgatggagtttggtcactcgatgattgttgtacaggagaagaatgatgaggaggctgttaaaagagacaaatgttatataacatccgctgagatcaattaatgaaagaat

SEQ ID NO: 47585 - DNA, 439 bp, Oryza sativa
  unsure (1)..(439): unsure at all n locations
tgcangaatttttcacatgctttgctggctttggatgttcttattcattctcgagcactttctctagaaagtgcagctccttcaggccctggactcacctacggtgcacctgaaaaggcaattttcggtactgaaaaatataggttgtcactgtctggaaaccaatctcacgctttggaggatgacgacccttatgatgattgggtgacatccaccaacgtcagtgaaccaacaggttctccagcgaaagatagccctgtaggaaaagagaaagcaattgagaagtcgcaaggtgaaaagcaaatcacccctgtggaagaacatcaacanatagaattagctgtagttcctgcggccatacaagacgttccaacgtctgggaagactgatattgaaatggcggatgccgccactacagaaacggtcaatctaaaagcaa

SEQ ID NO: 47586 - DNA, 399 bp, Oryza sativa
  unsure (1)..(399): unsure at all n locations
agctngacgcanatttaattggcatatgattactttagctccacgccttgagaaaaatattttctttttttaaaaaaaaatttctgcaacatcatcaagatcactgtttatttcttaaaatatttaatttgtaaataatctataacaataatttgttcaataatctaaatcaaattattgcctaaaaagtatgagtaagcacgatcatggaattcaatcatgcagacacggaaatacatttacatataacatgagacgtggccatattaggcatcaaaccaaacatcctcttatttttggcagccagggaagagacaaggtcatattaacgattaacaaacaatcttggtttgtggattcataatgtacattgatatttgatgagtagcaacgattatg

SEQ ID NO: 47587 - DNA, 388 bp, Oryza sativa
aatatggtctcttttatgagcccactggcgtttcgatcttgggggtaaaaatattggtatcactgggtaagaaacaactcaccacaaagtgtcaaaacagttactataataaagggtgattaataaaggtagtagtttgagcttgggtagagtagtagagtgtggccggcgagcgacgatgcatgcgtacatgcattacgcggggcggggctgtgtggtccgatgaggcaactacttttccctgcttatctcatctcatctgacacaacaaagcgaaatgccaatcaatcagccaaatgaaaaggtggttaccgtgcgatgcggacaatgacatgtggtgccccggcgttacttcccgtgaccatcgctgtcaaatctcgctgaatta

SEQ ID NO: 47588 - DNA, 344 bp, Oryza sativa
  unsure (1)..(344): unsure at all n locations
tatcaagctgtattttgtgtggagtctcaattataacatctttataatgtgattttaaaattcgtaactaaaaatattatactcggcttgaaatcttatttttttttatcatgatttaaaaattggtccaaattttcgaatcaatagtagttctttcatgatttacaagtatcaaaatttgaaagtaactaatatatatcgctacacttgatcagaagtatcaggtatttctataatntacatatctatgaattangaattaactggtacctgcttgtccttgtgttggtctcctaatttggtataatacgctagatgcatgaattttagtggcacttttacat

SEQ ID NO: 47589 - DNA, 467 bp, Oryza sativa
  unsure (1)..(467): unsure at all n locations
tctcttactgaagggggaaaagatagagcaaaaatgagttcttnttctgtactcagcaagccacaccaggagatgcatgaataatgcgagggggtacaaagggataacaatatgggttaggttttgcagtaaacaacatttaaaagtcacttagttgcccaaagctattttgtaaacacgatcctatagctacacaatattattaatcaaggccgtgaacccacatgaacctgccttaacccaaagcctaccatgattcataccgaactggaaaccaaacccaggtcccagctcgacccaagccaacctaggccaaccattctacattatagttgttagcatgtttaaaaattaaaccactaacttgngtacattgctaggctgtgccatatccgaggacgcggctattcgaatagattatactctgatcagaggtgtacatctttacccacaagacacatctttac

SEQ ID NO: 47590 - DNA, 438 bp, Oryza sativa
  unsure (1)..(438): unsure at all n locations
agcttgggccccgagatgagaaagctgtcttctttggagcaggaattcctcttccagtagttgtttgacttggagaaacctttaccagcgggctctgagttgtgctgtcaagaaaatggagaactatgtaaaaccaattgatttagcaaacatgcatgtatatgccaaggaaaagctctttggctggtattttgaagagtgggttacaaattgcatgtcttgtttatatgtataatttattacagtatcgccaatgaaatgtaatattatacaactttatttatatgctcttatattctggaataaacgttatctccatttgtctcttaattctttcactatgggactatgctttttctcaataaaactggttccatttatcntaattagatatccaacaagaacattcaaaatgaaatgaaactacccangaacatg

SEQ ID NO: 47591 - DNA, 469 bp, Oryza sativa
  unsure (1)..(469): unsure at all n locations
tcgccgcctccggccgccgctccagcagccgtgcgccgttttctatgccgtcgccctcctgtcccgccatctccatcggctccgcaaggtcgagctctaccccgtccaccggttccccaccgccgagtctcgttggaagtcgctgtcaccgtgaaggccgagttcgccgcctcggtttgatctccggccgagcgtcctcgccgtgaaccagtgggttgccgccgtcttttgatctacagccgccgttcgccgtcgtcccggctgtccctggtctgagctgctccctccttcggcatcgcagcaccaagacgaaggccggccacccctccgttgtcgccgaaggtcgctgganagccgtcgccaccgtggacagtacatcgccaccgtcgtccgatctcatcgctggccatcttcttcgccgntcatcgctgcgtaagtgtnggtagcatcgccgttgccttctctttct

SEQ ID NO: 47592 - DNA, 448 bp, Oryza sativa
  unsure (1)..(448): unsure at all n locations
agctntagctactgggatcttaattgtgtgttgtgagtcctgnaccggatcatgttgaaggaaggcatcacaagtgttcttctttctcttgcggccatcttaagggtgtatcggctccattccgtcgggcagctgatccacctgggtgcggcagcaaatcttacgagctggtctgcagtgataccaatgctacaattctcattgacaatgcaacataccatgtgaatgaaatcaactacgactacagacgcttttgggtcgtcgacgccaacatagccggtagcacttgccctcttccgcagtggaatcatcttcttgatcagtacaagcgcanagtctcaggccacaggattgagatcgagttggctcctggtgcatataatcatgcttacttctgtagatgctcacgggaggtgaaggacaatggtatatacangcctgtcacttg

SEQ ID NO: 47593 - DNA, 431 bp, Oryza sativa
  unsure (1)..(431): unsure at all n locations
ngagtatactagctgntcttggggggcttggtactaatttttgttctgcngaanntcaagaacaaccagcttgcgttcctttctcctgtggacatcttgaaggtatcaagtaccctttccgtttacaaggtgatccacttggctgtggtgatgaagcttatgagctagtctgtagagatggcagagctataattcacatcaacacaggaaaatattttgtgaaagacatctcctataacgagtctagattntgggttgttgatgctaatttagacaacagcagttgccctcttccactgtggaataatcttccctactttaatgacatgggcactaagctgtacacttctgcagttcggtgggctacatttctaaaatgctcacgggcgataaacaatggcatgtacatgcctgttgctttgttgagtggg

SEQ ID NO: 47594 - DNA, 453 bp, Oryza sativa
  unsure (1)..(453): unsure at all n locations
agctngttaatatcatggcaaacacaccattctaatagcctgagcactacaaattattcctttatcctggtcgntctcgtgctgggggcttgacatccttggatcgtttcttggaggacaaggcggctacatgttctcgtttgtggctatcgacaaattcacaaattaagtgaaattaaggcagagcaaacaagagaaataagagtggagcatgccatcaagttcatcaaagggatattctgtctcttcggactgccaaaccagagattgacggacaatgactctcccaattcacaagtggcgccttctaggactactacttggaatttggagttaagatctgtttcgcgtcagtgtccaggaacgggcaagtctaacaggttaacagaatcgtgctccaggggttcanaacacgtgtatacgataggatcatggcctacaattcacgatgag

SEQ ID NO: 47595 - DNA, 454 bp, Oryza sativa
  unsure (1)..(454): unsure at all n locations
ttgctcactacagatttcatttttgcacaaggcccatggttgattgcatacgctcaaaaaatcaggattgtgcatgcgttcagcccaaccacatgcgaaaaaaaaaaattttcatgcgcgcgcttaagccaaccgcatgaaaatcaaaatattgtgaaaaaaataaaattctcaacaagaagaaacctagccccgccgctgacggtctgccacagctggtcgcctaatcccaaaccctagcccgcccattggcctgccacctgtcgccgctcctgtcacgaccggaaataacccaacaggcattccatgcgtgcgtatattattccttgtcctaggaggcaaggtacaccanaagttgatacaattcagagtttaacaagcggaagcgtaaatagttaatttattacatgggtgacgaaggccagcacactcgaagatatataaaaacagcgga

SEQ ID NO: 47596 - DNA, 452 bp, Oryza sativa
  unsure (1)..(452): unsure at all n locations
agtgtgtgcgaattttgagctgccactatctattatttaataggaacgcgcatatttttgtgtatgtttcttgttntctactaacaatggcagggatatgcaagataattggggatagctgtgctcaacatcgacatcttcgtcgagacatgaggagggatcaacatgaccattatgagataagtgatgatgttctatgtaagatcaaatctgcactgccttatttcgagggaaactatgatcctcgtgcttacattaattgggagctagcggttgatagtgaatttcaaaagcatgtcttgtcggagaaacaaaagggtatgtgtgcctctagctggttaattaaacatgcttctaatgattggaaacatctntgtangcataacaaaataccacaatcttggaaagacctgaaacgactattcagagatatttatgttcccatgtattat

SEQ ID NO: 47597 - DNA, 390 bp, Oryza sativa
tgacttggtgcgaggaggctggtttagcgatgtctgccctgctattatcttgtgaagggcttctttggcatatacccatggacaattcacggcatagtgtccttgttctctacaatcatgacaaaaggggacatgctctattggcattggaagctcattgacctgcgtggcaaatgctcgatcaaacacacactgattttggtcttgacttccaaccaatggtagctgtgaactaagcagcatgcttggaatggaccaagggtgtgcccttgttaactctcttgagctagcggtggattgagttgaaaacttgagttactggaggcataccctctgacattctattctttttctctgttaaacatctgttacaccggatgacgtgagaga

SEQ ID NO: 47598 - DNA, 414 bp, Oryza sativa
  unsure (1)..(414): unsure at all n locations
ttgnggtaatatacaaagttgaggtcttcaaaaggttagtaacttcatcctattctntgttntgcttagcatctacatttggagctatttttttacatatttttccctctataaaatgtgatggaagatgatgagagagaaagtgtgtgtacggaataaagaagattataaatacttgtctgaataattaaatataattttgtatgagattataaaactaagctaatttaatattaaaataagacaaacatattaaatatttgtttataatgtaattaacacatgaaaaatatgtacaatgaattcaatagtaatgattaatcgtatgaataattatattcacatattgtattattatgtaattaccttgtacatcttggatcttgataattaccaattatatgtacttcatat

SEQ ID NO: 47599 - DNA, 463 bp, Oryza sativa
  unsure (1)..(463): unsure at all n locations
ttggtttctgctaaaccaaaggatgtttcagtaactaaatatgttttgcgtntactctgcgagcactggagtacacctgaatttatgaagaacattttaaatgggaagagaaacaggttatctggaggtgatattgtataccaatgcggcgggtctcggggcttggtctctacaaagcagtacctagtacttgttaatatgtagcaatccatagagcttgttcctatataaaatcgttgcatatactaacttatttgttatgcagcaacatacaaaaggtgggcagcaaggacttgctgctgcttggcagcacacacacaggatgctacaaggaaaaaatgagcagctatgcaaccagatggcacaagaagctcgcgtaagctctgtaatttactcttaaagactgctgttaattatgaaaccaaaacctcactatgtgaacctctatgaacaatactagctt

SEQ ID NO: 47600 - DNA, 343 bp, Oryza sativa
agcatggcagcttcgcagatacctcatcgatggtggcgtgtttctcattatccttttcgccaagactctgaacggaattaaagccgagtaatgcgccctttcacggagtcatccccggactatctgctacaccactcggacagatcactcttccagttactttcggcactccggagaacttccgcacaaagaacatttgtcttcaagtcactgatttcgagatagcatattatgctatactcggacctccgacgttagccaagttcatggcagtccccactataccttcatgatgatgatgatgcctggtcctcgacgagtcatatccctgcggagtgacatc

SEQ ID NO: 47601 - DNA, 455 bp, Oryza sativa
  unsure (1)..(455): unsure at all n locations
agccctccatgaagtccaagatcacccaaatcggagggggcatgaatgttctatgttctgttgaagncaacggtggcttcggaggccgaactggacttggacttggaattataaatggaaagtgtgaagttatgtgcgtattcgatgaaatgaagtcctcatcatcctccccttcttgaattggagtcgctctcaactcaatcccatcttcttgaccgtggtcactctgtcgtccaggggtcatccttggaggtatctcatcgtgaaaaacaccctcatattcctgtaaaaaggtagtaatagcgggtagcaaagaatattaagtactaggagtagtaaccaatgtgggtatatgatctttgcaaaaaagagcatagtaacaagaatctggctcaattagagcgaaaatattatatttagaagctagcagaacacccttcaacttaatttcattc

SEQ ID NO: 47602 - DNA, 459 bp, Oryza sativa
taccagataagacatagtgtaaggtagcaaaatgaccactatactatcaaaatataagcctgcgataggatcatcatattcaaagaccaggttgaatccgactgatatgcctgaaagctgaaataaccaagtattaaaagtttgaaagctggcaaaaacctgaattctctggtagtgaatgctcctataggtcaactatgcataacattggtgaattaactctagaacaaagaattaacaaaaaaaaaaaagagagaggagagcttgtctaaagtgtatgaacataccatggttagttccgcggttagcaaggacaatcctgcctgaataccaaggatgacacatattgatggactgtactcctcgcggcaaatcttccgttcatgtaatattgttacaaaagttaacagctctcgaagaaatgatagatgaaaatatgaaatataaccaccctcctaa

SEQ ID NO: 47603 - DNA, 457 bp, Oryza sativa
caacttgccttcttttcaatgcacttgaaagatatattcacatttttatttggttcacttcaagcacaacgcatattcttgctgaactcaatttcattttactacatgcctaatgagctgctaagtaaactgaaacttgtctaacattgctatcttcgtcgaattacattctgccactgtttattcaacatccctgtcgttatatatgtcattcttagtgacttaatggacttatttattaatcatgatgatgttacttatgtattagagacttatgtctggcatgcaatataaatgttagatatcctgtgtctatcattctatactaaatactgtctcctgctacatgagtcttctactacagaacagacacatgctcactctatgtgttgtagatcgtcaatgatctactgcatcattatgatggtaatcgtatcacaatgttttatgctgacca

SEQ ID NO: 47604 - DNA, 345 bp, Oryza sativa
acaatttgttccattgctttgtagtgagattcttcatgatgtgttccaatgattcttgaatatgccccaattgggtgttttagtatgtgcattgtgcttctttggcaagccaatattcccatctaataggtctgagtaagtttattagctcgttttgaattgttggctactaaactttcttatgctagttaattattacctaccatacctagacgcaagcagtgttgtgaatataagagatgtcctccaagttgcttgagagtactaactactctatatgtatgttctgtggattcctttcatttatactggttctcaagctctacagtgggcgaattctattga

SEQ ID NO: 47605 - DNA, 431 bp, Oryza sativa
  unsure (1)..(431): unsure at all n locations
ttgccgtgacgcgtctcatgtgttgggacgaggctcatgtttttggcagtcgcggagtgcgggtaaagtgtacattcactgcagtgtgagtaaaccaaacctattcgaatagccgtgctcgcggctattgagcaccgggacatgtattacacttggctagactctaaattcttaacttgtgtgggatgggatattgcatgatgaattatatgctgttggagccacttcctgagaggcgggaaggtggacgtcctcagaaaaccatgacgaatcaatggcgggaagctatccttgggatcacaatggatggtggacagaaccgtcgttgtttaaatacaaactctggtactaaaaaattgatcagtcaatgctaggtcttaggcttgtgaaaagaattacaaaacttgctttgcgcanaagaactatgggca

SEQ ID NO: 47606 - DNA, 371 bp, Oryza sativa
  unsure (1)..(371): unsure at all n locations
nagcttatgaccaaattaagtggaccacgaataaatatatataatgtgaccctgngtcaaggcaactttgctgtggctattggccacatatcttgaattcttgatgactagggctcgttaaagattggccgctgttaaaagggaatagactactgtcggatgcctgctttgctatcatttgcgtgcagccttgcagtcttaatttgtattttcgatcagatttgtaaatctcggcctttgcctgcatgattaactgttaagctaatcggtcgattgtcgtccttctggttattctcagtnttctttggcaaaaggcaaaggtaatttaggacctanttggttctctccctacaaattaattgagacaaaat

SEQ ID NO: 47607 - DNA, 88 bp, Oryza sativa
tcacgccatccgacacccccacatcacctcagtatgggaacccacgccgcaccaagcagagacacaagagagccaagaaagggcgcga

SEQ ID NO: 47608 - DNA, 388 bp, Oryza sativa
ctggatgtccctcccctgcctacttgaaaaatggacaagggaagtgtattctgcctctttttgcataagacatctgcacgagagactttgatcccaacttgataacatgtacaaccatttgtcaaaacagctgcatctatgttctgacaggcaaacaggtgaagattaaacactttgacctctatgccacagcggctattaataatatggtcgattttactgatggcatagctattcatgtcattcactttaaacgctggctcatacaatggcacatctttcgcatacaaactatagtttctcttaaccagacctattgctttgctatttaatacaaggattggatagcggcttccgcaacgtagatattcatgctacacacaagcat

SEQ ID NO: 47609 - DNA, 336 bp, Oryza sativa
cttacctggcggggatggaggggccatgcccctgcctggtgtgtgcaacactcctgaggatgctacgcttttccctcgaacgggagggcgacactcactatcccggcgctctgaagaaccctcaagatcactaacgcgccccctacctggcgcgtcaaatgtctgagaatgaactactctcccaaggaacccgtgaggccccactcttgtgagtttggccgggggcagcgggtgaaatactatggcttgaagagccgagctgtgtgatcttgaaggtgttaggccccttccagaccaagagacaaaagagatttattcaggttcaggccgcgatga

SEQ ID NO: 47610 - DNA, 372 bp, Oryza sativa
agcttggggtttggcttccttcccttgtttgtctatgcaccacaactgggagattatccaaaatcctgagaaaaaaaggttattaagacggaaaaaagttcacctgctgtattttgaatgtatctgctgaacatatagtacaatatatcagctggctagatagctgattagaaataacaaggtgaaaatttatagcatacatgttcactcgatactcatcgtcaatcttttctttgaaattctttgcagcttctggagaaagctttgatcgacaaacaaccttgcaggtctcatccctcctcatcttgaactacaagagttgaaaaagttaaactatagctaatgaacaaacaagtttgcatagtaagtggc

SEQ ID NO: 47611 - DNA, 408 bp, Oryza sativa
  unsure (1)..(408): unsure at all n locations
agtacgtacatgcttctgaagnagntggcctgagctttatcatattgtttgaactttgaataataacacaccagcaggaccggtggctatgaccaattaatgaactaatctgtggtgcgggtcatttggactccaaaccgtgctgcagttatcgccattgactatcagagtgcagggttggtttttactatttttgttcgtgtatggatagtaccgaaatttcagaaattacggtagttttgttcttaaatattntttttaaaaaaaaatagtttaaaattgaatattttttaccaaataaatccaaaattttgggtaaaataatttcttatcagggatctgatagacccaaaattctccacatttcgctctgtagnttcaaaccatgctcatgatattggtaaaaaa

SEQ ID NO: 47612 - DNA, 426 bp, Oryza sativa
  unsure (1)..(426): unsure at all n locations
agcttaattatatattagcgacatgcttattactactgntatctcttacacctaaatggatcttattgtctacgagtgatgcatcatatttaagcatgcacttgccctaatatatttacatatcctcacaccacaattaatacacatatatttgttctgtcatgactcatgatatgattattgctagtagctattatatgcacacatgcttataaaattaatactgatcacaatgcctcctgccttgcttaaaatcaacctagatggatgatggttccatggaccaagaaggcactaccaccaacaccaaagatcataatcatagcccacaggaagaagatgaataacaaaaggcaagaanaagagatcaattcaaattaatcaaaccaatcctgataggttacatgctgcattattggtttattt

SEQ ID NO: 47613 - DNA, 212 bp, Oryza sativa
gccatcatcggcgggggccttgttcttggcctactctcaccggtcgccggtcgaggtcgcgggggctttgccctcccgtcgaccctgccgcttcttctcatcaacctttcgaaaccactcggccaaattcctgaccgagcggcagtcggcgagactgtggcggtaggtgttgtgtaccgaacaccactttgtccgcaaccggccctcgccat

SEQ ID NO: 47614 - DNA, 437 bp, Oryza sativa
gctatgaatggtggattcgctgccggagtgctctatagtggttgatccgccctcgcacatgtggagaggatgccgtatggtggcgcaacaccaggagtggtgaccactaccacgacagttatgtgattgcttggaagaaggcggatccgttctctcgtgctgcacggaggaggcggaacggcggcacgacatcacgagcggtaccacaacaccaagcagcggtggcaagggctgtagcgcggcacacaacggtggcgaccaagggtttgggatttggattttcttttctttacttatattctaaatcattgcaatcaagcatccttatttgctccgctgctaaaattcgggcatttgcgagcggctttcttatgtcatctgttcgcgaaaatgagtttatgcatgcaatatgtgtgcccgcatgcaacatgccgatt

SEQ ID NO: 47615 - DNA, 390 bp, Oryza sativa
  unsure (1)..(390): unsure at all n locations
tttaatatattacttcctccatctacttttgagagncatatttcatcttgtcacacagatcaaagataagtaattctacttatcatatatttaaacatgctactagtcattcctcgtaaataaacgattcattaatatttacatttctcgatgctcatttagccaatcttgcgtggaagttattaagataggttgttggattgaaatatgcctatcaaaaataaatttttcagatttagaaatatgtctatcaaaaatagatggagagaatacattattataaaagagtttgaanagaaaccacaatatctgttctaggagcccaaaaataccatattaattagagaaaagaaaacatannaatntgcattgatagatcttagcggacat

SEQ ID NO: 47616 - DNA, 429 bp, Oryza sativa
  unsure (1)..(429): unsure at all n locations
ccttaaaactcagcttaggctagaatggggcgacgatatcatttgcttgctggacctagtttgacgcttgacgacaagcttacaaattcttgcctttttaatttagctttttgcagntggtgatagcttgcagtaggtgatttttgaacttctcaaaataagtgtttttgtcatatttgtattttgtttttgtcacttttttgaacttataaactaaatgggtttttgtcatatntgtattttttttgtttttatcaaaaaaacatattttgtcaagttctggtatgcaacgtactggttttatttttgtgtgtacaatgaaggtgctgctataaacttggtgctgatccatcttctgntagttcatttagtggtcacctctgaatgcatagtttagtgtctatgaaagaaaggaagttttggatatga

SEQ ID NO: 47617 - DNA, 386 bp, Oryza sativa
  unsure (1)..(386): unsure at all n locations
agcttcttctccgacgaggtgatcttctctttctctagccccgacgcgaggtgagaaccccgctgttcgtttctgcgcagcaagttactatctcccccaattcctgattgcctcggttgtgccctccgattcgctgctactgactcgtncggaatccgttcttcggtgcacggccttggattggcctgcgttttatcgttggatttgaggaagaaccaagacttcatcgcgttgatctaccgcgctgttgatttactggaatggcatttcagaatggggaaataacttcatagctcttgcagcgctctggatactgcgatcttgcaggtagtgtagaaacatgttaaggcttaagagtaaatctcgctgtgttgaggagacctatc

SEQ ID NO: 47618 - DNA, 456 bp, Oryza sativa
  unsure (1)..(456): unsure at all n locations
cttgattgacatctttctcactgccttgctgcttttctgatctctttattttcccgtttggatatgctcactaacaaagatcaagatctttatactcaaataatataaaatcaagatatgtacactaattgaattccatgcatttatgagcatatattagttggagtttatttagcgtttattcaattccgcattggataaaaaaagactagtcagttgttgccgatgacagcgcaagactnttctgagatacgaccacagagtcgttgagtcaagcaccccgtgagcattttgatctacatgctgtgaatgtttcataatacataccttgttatcagtattcctttctacatgctgtgaatgtttcataaggatatggattagatactgccacgtatattcaacctaatgttatttagccacgttgaataacacttatatatgagtaacacgtac

SEQ ID NO: 47619 - DNA, 299 bp, Oryza sativa
cgcctcatacttggggcaatgaaccacacaagctgggagaaacctggagcccgggtacctcttgacttcacaaccggcgtggtctgggtcacagaagaaatgctactggagtgggggccttttctccaccacaatttatctagtattatcttctaacaacacaagaatctcgtcgtcgcttgttccaccgtcgatggcacactgtaatgccggcctgccatcttggtccgcaacttgtggatagcccccctgcatataacttgccgagcgaagacagtgagacacctttatgtaggtga

SEQ ID NO: 47620 - DNA, 447 bp, Oryza sativa
tcggaagctacaatatctccacgctggtaaaatcggaattgttggtcatcatagtatagcagagagaagtctagagctttgtactggagcatgctgcgcatgctacgtacctcgtctcgtgggagacttcaacaggcgtgatgcttgcaactacaattgctgcatccagccccgtgttctcatgatggacttagataatgaattccctatgctaccacgagggagcaggaaactaaaaagcctgcatacactccgacacgtgcacttggcgtggggaaacactgttatacaagagatagagagactcacccagctgcgtaagttatgcgtggtgggcatcaacaagaagaatggtccatccttctattcagccatctccaagctcagccagctagagtcattgtcggtgtgtgcacgttggtgtaaggcctacatggcacgtcgtcg

SEQ ID NO: 47621 - DNA, 377 bp, Oryza sativa
ctagaatgcccgctcttccttcagaataacgaaactattattgtataggctcaggtaaaggactggattgatcattacaagctattcatcctccctatctacgcgaccataacttcactaattggtggtgcttgaaccaccgccggaccatattcgctactgcatgaccgccatcctccacttatataattcatttatgcttcgagattagcaaatttaatttaattctacagacttaatatatgtttagagaacatagtattcgggaagaaatctatgtatggacacataatctatttcgaactatgataaataaaaactatcgtgataataattaattactctgactatgtaaacctcaaaattatcttaaaaat

SEQ ID NO: 47622 - DNA, 388 bp, Oryza sativa
agctttatatgagctcggattgaagagatttgtttttatgggaggaatcgaatcgggaagaaaacgaactcggtttttagagataaaacaaaacgagttcgattctgatccaaaccgtcacgaatttctttgattcttgggggaaaagaaagaggagaccgagaggaacaaaacccctcaatcaatcgaaggaatcgggctcggatttgggcggaatcgatggtgcaaaacggcgctagggttcggctcggcggcggccggaggtaggggatggacctgacaggtgggccccacctgtcagcctccacaaaagagaggggcgcgggcgcgagcagcggctgcttgtgccggcgtgggcgctcgcgggaaagagagaaaagggagagat

SEQ ID NO: 47623 - DNA, 188 bp, Oryza sativa
  unsure (1)..(188): unsure at all n locations
cttctacctcccccaggcgggcnnatgtgctcttgacacggccttaaaaccagcttgcggatgcgctatggttggacgaccctatgttttgggccctccgcataatgctgcgtaaagtggaccattcacctgcagcgtgagtaaaccccatctatttcgaatatccgcgcttccgggtattgagcacc

SEQ ID NO: 47624 - DNA, 443 bp, Oryza sativa
  unsure (1)..(443): unsure at all n locations
agcttgaatcaacagtcacaattcatgatttcttatctattataatgcaacatcntaacaagcacatatgttgaagaataaacactaaacacatatacctatggcatttattactctttctacacatatacctattgcatttattactctttctcaaattagcttttgcacaaaacaaccaagagaagttgttaactttttggtttctttagcctttntgctcatatttttctcttttattctgggtacgtccctgtcgtcaacactgtttccagggattcggcacccattattttgctcacatcgaatacatccttgtcgtcaagactggttccaacgattcggtattcattcttcttcatattattaatctctttctcacaatgagcaataaagatctttgagcactacaaatcaatacagcatatatatagagcatttat

SEQ ID NO: 47625 - DNA, 409 bp, Oryza sativa
gaaaatgaatatatatcttttcagcagccgctgaaccatatctaggaactgcaagaattgtgtcttcgcatgtttgaattcagatgtaacagaaggtgtaaagaacacaaggactgggcttgagggtggcaactgccaatgtatgtttcaagttacccttaatattcaaaccgtgccatattcttcgcgataataaatgcatcctgaactgtgactaaaatctgatctgaagatgcaaccgcgtgtgatctgaagatgcgaccctgcgtgggtgacaactgtgcccatgacaggcttttgcttctctggcttgatctgaagatgcattctgccttgtcgtgaatctgatggttcatgtctgattgcatcccggagtaatattactgtttgcgaatcaacaaatgggact

SEQ ID NO: 47626 - DNA, 357 bp, Oryza sativa
  unsure (1)..(357): unsure at all n locations
agcttcagaccttccttggtggcagagattatcttcttgccttcaaactccttaagctgaccaacagcgtactcatcaatggcatcaaccatgtacaggacctcataacccttcttcttcagcttctcgaggaagggggagttctcaacagccttcttgctctcaccagtgatgtaatagatctcactctggccctccttcattcgggttacgtagtccttgaggctggtcaactcatcaccactcttggtggagtgatacctcangagctcaccaatcttggtcctgttggtggaatcctcatggatgccaagcttgagattcttggagaaagcctcgtagaacttcgtgtagtct

SEQ ID NO: 47627 - DNA, 383 bp, Oryza sativa
  unsure (1)..(383): unsure at all n locations
cgttcccaactattggcatgcgaggtttccctgaaccgactagttacttagccagggtgtcccattccaccttgtgaatgcactttgattatgctcgatgagtttcccataggaatcggtccttatatgcgaatacgggacagcgccacgtaagcacggcttccgcatcgcgagttttcacaattcattttattttcaaacacaccgacaccacatgtcgggttttgaaggcttcacaaacccatttcctaagttttcgacaatcaacggtgtatgtgggatatttggtacacgcgctcagagagcacggataccgaagtaccacaagggtggagcgacaaggaatcatggtagtacaacctacangagttagtgcgactact

SEQ ID NO: 47628 - DNA, 457 bp, Oryza sativa
  unsure (1)..(457): unsure at all n locations
tttcaagaatggatacccacagctcattttgctttctactagtagcaaatgccgggttccccggagactcacaggggatccaatcatcaaccaccactgccacccattcaccctagtaatttacagaacattgaaatataagctcagatcaaactggtcaaagatagttcttcacacgacaatctcaagtcttttttgtgttggtgggaaatactccctccttcccaaaatgatcatcatatatgtttgtgcaccaagaccaaggataatntaaatcacatcaatcaagacaccatacacacattctcccacaatgcatgcatcgatcaaaacaccatgccaattacacctagcatgcacacattctcccatgctgcattaattggattctgataaaatccgcgtctatgcgggtatatgatgatcaaattgagagagtntgaatcccatacatgat

SEQ ID NO: 47629 - DNA, 357 bp, Oryza sativa
agcttggatagagcccgagccagccgttctgtatctgtgcagccgccgctttctccaccaaatacgccgcatcccgtgctccgtttgcaaaattagttgaggggaaatattcctcttatcctcctctatccttacccccaagaattggactttatcccgaagaaatcaacgcggaatcgaattcgttttcgagtttatctctccaactaaccctcggtttttccggctcaaatcctctcgtttggagtccgatctctctctcccatgcctataaatagaacccccaggctctcctctttcgtttccaacctctagctcgagctcccgtgccctagccgtctctccccacgctagcca

SEQ ID NO: 47630 - DNA, 394 bp, Oryza sativa
tgccgttcgccttgcgaacgacgaccgggttcgccagccacttctgatggatgacctcacggatgaatccggcctccagaagtcgcgccacctcctcacggatgaaggcttgacgtttctgggcctgccgccgcactttctgccggaccggccttgcgcccggccgcacggcgagacggtgctcaatcacctccctggggaccccgggcatgtccgccggtctccaggcgaagacatcggcgtttgcccgcaggaaggagacgagcgcgtcttcctatttgtcgtctagaagaccaccgattcgtgtggtcttggacgggccgtcgcccagggcaacctccttgaccgggacctcgtcacacgtgatcatacgctgcctcggggcggcagggac

SEQ ID NO: 47631 - DNA, 330 bp, Oryza sativa
  unsure (1)..(330): unsure at all n locations
atgttctataccaaagttgcttctaaaattcatatggacccatttttgaaaaaaaaagctaatacttaattaatcacgctctaatggagcgctccgttttctgtgcgcaattcgcatgttgggaacagctgattctaaacacagcgttgattcgtcttcgagatggaaaaggactaccacagatttgtagtgtgtcaagaaccagttacctttgggtacatcatgcgtgagttcctgtagttctgttgaaacatcaagtttattatccattntgtttgcagcaaactatcgacttggtatgttataataaacatctcatagaaacgaggg

SEQ ID NO: 47632 - DNA, 434 bp, Oryza sativa
tattgacctgtgtggcaaatgctcgatcaaacacatactgattatggtctcgacttccaaccaatggtagctgtgaaccaagcagcatgctccgaatggaccaacggtgtgcccttgttaactctcttgaggacagtggtggattgagttgaaaactcgagtcacttgaggcatacctgccgacaatctttcctttttctctgttaaacatctgttacagggattgacgtgagagaggaaacatgccccgaaagaattgaccataactagagacaggaccttaaaggaactaactcttctcgttgatgtgtcgtttgtatagcttattctgcaagacgaataagcaaacaacctagcatggttacatcacaccccactgatgcaaaccacgcgctacacacacaagcaagggaaacacacgactaacgactcta

SEQ ID NO: 47633 - DNA, 326 bp, Oryza sativa
ctgaaagcaaccaatggctgctccttttcttatccaaaatccttctcttttcagagcacgccacgagtatttaacaagccacaatctttgtctacatgattatgataatcacttcattatttcacatcgtcctgcgccattcctcttcttcttgttgttctgcagtagtgccgcccactacgtatgggaagctcgctattcaacaaagctgcaccacttagcagaaagagagcgtagttaactgcagagcgaaatcttcctaactagatttgactgcactgagtactaggcttctggtacatacacttgtggtatgctgagctgta

SEQ ID NO: 47634 - DNA, 364 bp, Oryza sativa
  unsure (1)..(364): unsure at all n locations
cctatcaaacgcagctttatgtatcgcggatctagtctgatacacaatgaaacattgtattatgttacgtactgaagtataactgaccctcatgaactgagacacattccttcatactagatttttccgtgaagtcttatgagctgaggtcaatggatgatatagcttctttccaccctcttggatgacctgcgagtacatatacattttcactgaccttatcacctaaggaaaatgagccattgacacctgaacgggaacaatgattaaactgacgcataactatgcaccatacctgatgatcggcgaaagatatattggaaaggtctacagagcacagctagagagatggccacancgtggc

SEQ ID NO: 47635 - DNA, 400 bp, Oryza sativa
agcttgtcaattcgacagtaaacacacaaagctgtcagcgcaagcactccagactatccctctcacttggccggtcttgtgctgggggctaaatatactccggcctttcccacgaggacagggcggctacaggttcctattcgtggcgatcgacaaattcaccaagtggattgaagcgatacccacagcggaaatcaaggccgacaacgccatcaaattcatcaaagggatattctgcagattcggattgccccaccgtatcataacagacaacggctcccagttcatcagtgccgatttccaagattactgcatcatgctgggagtcaagatctgcttcccacgggttctcaccctcagagcaatggacaagtcgagcggggaaacaacatagtactac

SEQ ID NO: 47636 - DNA, 474 bp, Oryza sativa
  unsure (1)..(474): unsure at all n locations
tgccaagtgacttcagtaagttaatcaacctacagacatatgtattttgggatttgcatactatcgaatgaagaacctactgcctgttgcaggtaacgatcgaaatgttagattgatgaagaatttgaaccaattctgtggggatttggacatatatcctaggggatttagtaaggatcttgcaattgaaattgatcttaaaaacaagaaagatctcagaagactgaccctgaattggttgttcagttcatgtaaggacaatgaaatagtgcttcaagtcctgcaacctcccaccaatctgaaatgtctagaagtcgctggttatggaggtgaatctcttccatgctggagcaataacggcagcatttctgttttcccatccctgaccgacctagcaatttctttctgtganaagttatcaagcctcgaccactttctacaggcagaatacatgccggtccttgagagaataag

SEQ ID NO: 47637 - DNA, 415 bp, Oryza sativa
  unsure (1)..(415): unsure at all n locations
agcttcagacgcttatgacatactatgactgattaagntacggctaagtcgtagaaatacgaacaagagaaaaaatagtttatgataaaaaaatatcttacggtgttattattagagcaggtataataatatgcttttagccagctataaacatattttaatgagataaacgataagagagaagagcagcacgctacagatttgtaaccagcttgagcacagactccaatacacaatatgtgtatgacaggtgataccatatgttaatattatagtaaacaactattgtatgaattgactattanaatggctatagataaattggagctagtagtggactatattattaaacttgctcttagcgacttagaaaacacaatatgattaaaagaanactgctcaacgctaatcttta

SEQ ID NO: 47638 - DNA, 205 bp, Oryza sativa
  unsure (1)..(205): unsure at all n locations
ntaggagtggcgtcacgcccgaccgcttttctgttaatgttgatcgccctggcataacgccggnggctactgtcggtgatatgggaccgggagtatcgtgaccagaggcttgaggcagacacaatcgcccacgtggcctggcaccttctgggacgtcgggcccgaaggtgaggagtccgccctcctcctgatttccccgaggggg

SEQ ID NO: 47639 - DNA, 87 bp, Oryza sativa
ttttttaaccacttcctagcggttaactttatcttaactcttgcatggtttttttttcctatcaccggataattggaagggaaattg

SEQ ID NO: 47640 - DNA, 452 bp, Oryza sativa
  unsure (1)..(452): unsure at all n locations
tncttcgctccttggttggcagcaagtttgcatcatcatatgctcagcagtaagctctcatactcaattaggttctagatgatattttggtaacactgaacttgcaaccattgtgattgtgggatgttattttggtgctgttgtgcttctggccgatgtgctgttgctgctgtgcttttggccattgtgctgctgctgctgctgtgaagctattgcaaatatgctgttgttgctctcaatgtagcaggaagatgaaatttgatactttggatatgtattgaattagtggatagatgtactgatattgacatttaagacttgtggaatgtgaaatgcatgtgacattgcaatcatttgtggaatgttaattcatttgaatctgattttgtatgtgctgaaatattgtatctgggctgaatngtatgggctaaaaaaaattagttgagttatgt

SEQ ID NO: 47641 - DNA, 245 bp, Oryza sativa
tttctccacattaagccgatgcttctcactgaaggcgaaagggagacaataagcatgcatcagcaaggcgtccatttcacctgacctaaatgaaagtatacctttctgtcactgcaactgtattctgctgctcacagaatgtcaaaaaacggcatgctttgggacatgtgcccagttattttaactaattaggatttgcccagttgctttcttcatcatcaccctgtccttttttttaaaaaaaa

SEQ ID NO: 47642 - DNA, 420 bp, Oryza sativa
tgatcttggaggggcttgccggcattgcacgcggcagtctttatgtgctcctcggcatcctcctccttgtggcgcggaacgcgggacttggagctctcggcctcgcgcccaatactcctccttggcgctcttcaggcagtcccgacatctctcggcctccacaatatagtgacgctcgcgggttgccttggcatgggagttgacgaccatcttcttcggcatcgcggctatctgtggtggcggtggctggtggcgcggcaggcccacccacagtcgcctttgtctccaccttctcgcggaggccgaggccgcttccacctccgcaccatccaagacggtctctcgcataggctcccaatgtcaccgaggttgagcttggcacaccgcgtgaggaatgcgagctcgatgaccccttacccg

SEQ ID NO: 47643 - DNA, 445 bp, Oryza sativa
  unsure (1)..(445): unsure at all n locations
agcttgtacttagctggtggtctggttgtttaccagttatgtatctgctgtactgtctaaaggagagctatgatgttgtatctcataaagacatagaaagccctggtgagaggtctctttctagcagtaagttgtcgattcctcatagaaactntttcttttgatatccataaccaggactccaatatccttatgatcttaccatttacagcttcagcaacctccagtcttagcacagcaggagcttcaaagggcaagaatagttggaagttaaagtaagacttaattattgcaatctttgtcatcaaatagcatacttgtgaaaatcaattgatttattagtaatgcgttgtggcaggtccattgttacacttgcattgacattactaacaacgtctcaggcaatactaattgtgtggtcgaaaagagctcgaaaatatgaata

SEQ ID NO: 47644 - DNA, 411 bp, Oryza sativa
gttgggtataactaaatttatagtcccattatttctccaatagctatccgtgccctaaatatgaaatacccaatacatgtatactaacttcggtggagtccaccatataccaagttttatacgaaatcaagccttaaacatatgggaaaagtcctggatagacaatataaacttatgtaagttgatgtgggttatgataatttaaatttaaataataatgattcacatgtaaaaagttgtgtgggtttatgtaaaagtttggatcatagaataatcatctaacgggctaaacaattgaggtgatatgacttaataagagaagaaattatggagataatttgaccatgaataatcatctacggacaaaataatcgatgtgatatggattaatgagagaagagagagagagag

SEQ ID NO: 47645 - DNA, 322 bp, Oryza sativa
  unsure (1)..(322): unsure at all n locations
catgcaagcttncaaatatacttattcctctcaacataacctttataccattattaattaaaactagatacattgaccttactgagaacctaccattctgatgataatttcatctaaaacaatcagaagaaggattcaactgaatatgcacaatagaaacgcacaattcatggcaatataaaaaattgggatataaacatgatacattntattggtgattacatgttttttttaaaaagaaagactcatgtgagttgttttttattttttaaaaataatttattttgtcggtaaaaaaattaattttgttggtgattacatg

SEQ ID NO: 47646 - DNA, 448 bp, Oryza sativa
  unsure (1)..(448): unsure at all n locations
tctcaaagctgaggaggcctactgggattacaccagatattctgttattcctcacattgagattctcaagggtggtgcagttcgtaagtagaggcggcaaacgaccagatagttggttgttttcaacgctcaggtgagtcaactgccctaggctccaatggaagggtggcatangcccagttaggtcattgtgtgagagcagaagggatgtcaaaatggatgcattccctattaattccggcgatatctccccattgagcatgttaaatgacaagtcaagaaactgcaacgatgacgcggcttctgctagtgatggaactccgccattcagcatgttggaagacatgtcaaggtactttagatatggaaatagacttccaaagttgtatggcattttcattgatatcctgttgtcagacagatcaagcacctncattgatgacgtaac

SEQ ID NO: 47647 - DNA, 331 bp, Oryza sativa
cggacacaagaaactcagcttagcgcgatcatggaaccacagcccgcgcactgttctctcttgaagccgcggcctcatctctgcgcgactcaacggcccgggaggctggcgtgttggggtggcctggcccatccgtgcgcccggagcaccaacgcggcaccggccgaaaaagcggctgtccacgcatctgcacgcagaatattccagaggaataagtttactacaagtgcctcacctaacggcaagagtactgagatcccctatctatataccagaaatgttggctctatacctattttactctctattcgaggtccctagaagatttttg

SEQ ID NO: 47648 - DNA, 419 bp, Oryza sativa
agcttcgaccgactctcatcgatggtggcttcgcgctcaacatccttttcgctaagaccctggacgatatgcagattcctcacgtggaattaaagccgagtattcactggcggagcatttaaagacttttgtgaagacttcggcattaaaatttgttacgcctccgtggcacaccctatgagtaacggacaagtcgagcgcgctaacggcataataccgcaagggatcaaagcacgagtttttgaccgactacgcccctatgttggcaagtgggtagatcagctgccatccgtactttggtctttacgcactactcctagtcgggctaccggccagtcgccgttctttttggtttatggtgcagaagcaatgttgccgagtgaagtggaatttgaatcactacgatttcggaacttcaa

SEQ ID NO: 47649 - DNA, 462 bp, Oryza sativa
tttgaaattgacttatgagtgtcatccacaatgtacacagtgtaattatcaccaaaggacttagccgtcctttgtctcttactccttcgaggagcttcactgacatcctccttagtgacatgttcatgtgtatgttcagtttgttctggtggtgtgattgaactgcgaattatttcagagggttggctcgaactactgtgtgtatcctacattgggaaaaagcacttaaagaaggtagcatcacgagactccataattgtaccaacatgcatgtcaggtacctcagatttaactattaaaaatctatatgcaatgctgtgatgagcatattccagaaagacacagtccataagtttaggtctcagcttgcgcttcttcgttattggtacattgactatcgccaatcaccctcatgtgcgcaaataagaaagtgatggtgtctcccaatccatatctcatatg

SEQ ID NO: 47650 - DNA, 429 bp, Oryza sativa
  unsure (1)..(429): unsure at all n locations
ctcctactatttnttatattctcaattgngaatcatgaaaggagtactcctatcatttgattcccaatcaaaagcacttcactatatccattcggttagcattttgcttacctttcatggtcgaaatttgatccatagctctcaatcaaatacatttacacaacaattacgaccaaaacttgaattttaaaacttaatgttaaaactgattctgagatccctgcattagcttctaaaatgaaaataatacatatataaagctttattcataaattattatntaaattaaacttcttggtaaaaattatncaatataaaatntacctttgtcattntttttaccaaccaataaacactacacatcnctagctgttggaagacgtactaacggacgcgaaaaaaaggaaaaaaaggtgctggcatacatat

SEQ ID NO: 47651 - DNA, 449 bp, Oryza sativa
  unsure (1)..(449): unsure at all n locations
tcatagaaaatcatagtatccaagccacgaacactttgctatatttatatacnnacccaatttaggtatttgtaaaagcctatataagtagcaaggcagcaatcacaatatatttaaggtaaaatatgccaagcattatccaatcttttgcatgtgtatttaaaggacagaacacgcaagggcaataatgcatatcttgattctatcagtcttaaagtttacatctcgttaaaattttacgaatttacttttacttcctttgtgtacttttgcatcgtacttgtagaatctctacatagtacatacatatgagacctagttagaatntacaacagaaggaataccatcactctgtaaataagtatatatagtgtgaagtatctcataccaagtctaacacacagtttccagagcgagcaagccaacatctctttatcaccaccttcttc

SEQ ID NO: 47652 - DNA, 367 bp, Oryza sativa
  unsure (1)..(367): unsure at all n locations
agcttattaagttagcattccaacgcattctatcccatgtcaataaggagtaatgacatgtttactgtttgctgctcagaaggcaaacaggcgcgcgagtcttctcgggaattcacttgtggagacctttgggctagcctatgtcctttaaaattccaagacttttcatacctatctagaatggntgttcctagtataaatatcccctatgtgcttccagaaaacaacttttgatgatttgataacctanatggtttttgcaaccgagctgcttgagtgtcttacaccctcttgttcttgcgagttcttcttggacttgtcaggaagatctctctgaggtcccctagttcatgctctacggcttcta

SEQ ID NO: 47653 - DNA, 429 bp, Oryza sativa
ccttgcttggaactaatgatcggtgtgttaagatgatgagattgatgcccccctgctgattgttctatacagcttcaacagattggcactgatgtctgtgggatgagcacggagatggtatctgctgaagacttgactgcccatgctggaaatgggagtcactgtgctgctgctccctaaattctgccccaatgaacagtcctatttttgttatttgttgccctatgttgggtctctccaagatatgtaataatgaatttgcctttaaaagctgtgctattatgatgaatgggacttctgcctggatcgtttaatctggtactcttcgctcctatgttatgcataagactctatcttatagctcgttgtttgacaatgaattcacacaatataaactggaatatcttgtgttggaatgtcatgggtctc

SEQ ID NO: 47654 - DNA, 252 bp, Oryza sativa
ctcttaaaaaccattcattgacatttgaataattgatgtattaaaggggcatgacttttgaattgacttaataataaaccgacataacttattatcatttgtaccatccgtacacataatgtgtaatatggctataagcaaaacttgtgagaccaaggaaatcaaagttctttggattgaatcatctcatgaaggcacatgatatagtgacaaccaaattaaggatagattaaatgttgatattttttactc

SEQ ID NO: 47655 - DNA, 396 bp, Oryza sativa
ttaacaggtactggtgaagtacagatcagaacgatccataagaagttcatgtgtttaaacatctcactttgtgccctgaagcaaccgccagaagctccccctttgcatgaaatgcaattgatgcaatttgcttatctgccaacataatgtaaaaaataattacaattgttgctttagaaatgctcacgaatagagaagaaaaacaatgagtccattaagagatattacagaagaagtgtgatccaatgcaacgggaggttttagcatcccatatacaaacttcattatccatacttccgctagcaacgatatcaggatgtaatggatgatatctaacctacattgcaacaataatgtcttatggcaagtaataaaaaagtgaaacataattcaaca

SEQ ID NO: 47656 - DNA, 312 bp, Oryza sativa
gtctggagaaccaaaacaagcagaaaatttgtttcttgaaatggagagatcgatcaaacccacaaaggaactattcatggatgtaatcctggcatttgctcagcgtggcatgatagatggagccgaaagggtgaaaacatcgatgttacttgctggattccagctcacgccagagttatacacatcacttatagaagcatatggacggggtgagcacgttggccaagcatataccctgtttgagcagatgaagagttctggacatgaaccagatgatcgatgcgttgctggtatgatggttgcctacatgat

SEQ ID NO: 47657 - DNA, 452 bp, Oryza sativa
  unsure (1)..(452): unsure at all n locations
catgtaattactgtgaatgatctcagagcatggcctatgaatcttgtcaggtcaataacatgctacttactgagacatgctcttatatgactaattngggtcatcttggagagctctaagcatgagcttaaatcttttaacagtgccttaagattatatgattacaacagagatggttttggaacagattgttagtatataattaaactccttatttgagaaacttaacccacttgatcgcttattagatagattagtttcttccttgtatagttcttgaatgttatggctgtntgtcatgttaactatactgttgaactagatattcatgccttttatatatacaagtctttcaaacctgacatctctcagtttcaagagcagcgatggtattactgctgaagcaatggaagcacttgctaattaattaatttggaaatcttgactcaacg

SEQ ID NO: 47658 - DNA, 186 bp, Oryza sativa
agaaaacatgagggatgattttttctattttctccaaaattccttacaatagccattccttacaaatttagagaaatggtaaaatcaatacttatttaaaggattattcccataggataaatcctttaaaatcatgttttcccttgtttaaaaggacccactcccccgaagaggggatgggagttg

SEQ ID NO: 47659 - DNA, 434 bp, Oryza sativa
ttctttctcctgtgatgccgcctctgtctgcacctcccattgtaattaagaagtctggtgcgaaacctggcctgccaaatgcatcgcatgccccgaccgcagctattggtgctcccatggctcaagacactcctatggttcaaggcaccccaatggtgcatggcactcccatggctgaatgcactactggagctcatgcagctcctactgctcaaggtgctccagctcaaacacagaacccggaagaagcataaccatcatagagtacagcagctcctgacaatgcagagaaaacagcaacgcctgacaatgccgaacggatggcagcccctggcaacgtggaagctactacagaaccagcatcagtcccttgttatgtggtaggtacagcatcggcggcaactgacgcaacaagtaatgctgatgctacttct

SEQ ID NO: 47660 - DNA, 398 bp, Oryza sativa
  unsure (1)..(398): unsure at all n locations
agcttttcaccgatcagtgcaatgggtttcttctccggcatcgacgacctcgtctttcaacccgggcagggcgttcgggtctgcagtctcgacttcgtcaccaataacttcgggcaagatctctcttctcgactcggaatcggaccagtcgggagagagccggatctcagtccccgttggagttccaaacgcggctganatctactccaagtccatctcaatcgagtcggcttcaaaccactcgggcgagattgcatcttctccaacgtcatcagatcgagatgatggngcttacccaccgatcctaatgaagctccccgacgaattggcgggcgtcttcaccaccacagcgtccccatcccgtatgcctaggcggaaatcggcttcacaccgatctc

SEQ ID NO: 47661 - DNA, 444 bp, Oryza sativa
  unsure (1)..(444): unsure at all n locations
taacagaattaaaaaatattgtatttgaagatttaaaactttgtaattggaaactttacatttcaaattcaaaaactttatactagcagatgtaaaaattttacattttaagatttaaaacttcataatttcaaactttacatctgaaattcagaaactgtattttagcacatctaaaactctatatttcaaaaaaaagatttaaaactttgtaattgtgaagtatacattataaatttaggaactttagaatgtagtaacattatactgataattaaaaacattgtatttcaagatttaaaactgtgtagtttcaaacttcacccctaaaattcaggaactgtataatggcacatttgaaaacttgtgtaatgaanactgtacactccanattgtggaactgtgtactatcacaggtgaaactgtgtacaaatacgcactaaa

SEQ ID NO: 47662 - DNA, 349 bp, Oryza sativa
  unsure (1)..(349): unsure at all n locations
acccgtccggcacgccaagtcgcggatcgatcgctcgccggcggacaccctccctccctgcctcccggagtccacggatccgcacgatgaaccgcgtgttntgaccgagaaacacacgcacggtctgagatgtgatcatcangggtgtgcgcgtgtgtggacacttcggctgtcgcgttcgccttccacgcgtggagcgcggatggcgctgccatgcgacgcaatgcgcgcagtggtcgtcctgcctgcagagatgtaaaacagcatgtgacgaccgtgcgtgtggtgggtgccggccggccgaatacgccgattgatgcgcgaaagccgaacgcgtggtggaagggga

SEQ ID NO: 47663 - DNA, 402 bp, Oryza sativa
  unsure (1)..(402): unsure at all n locations
agctngccattgctttttctactntactttctgttcttcactatgtttcagagataccatttcacccagtccaatctcaagttttacgacttgtttgtattagcataattaattgttctggcattttgtcgctgtcccaagaagaacagatagcctgtactttgtcagcaattttgagaagacatggaaatggtgaacttggcatgagttctgaaacctttgctctggtttgctcaatgcttgtagagattctgaagttaccatctgctgatgacatccaaaaactgccatcattcattgtagaagcatcaaaacatgcaatctctttgacattctctcacgagtatgattggttgttcctcataccacatttccttctccttctaaaagaagcacttatct

SEQ ID NO: 47664 - DNA, 468 bp, Oryza sativa
  unsure (1)..(468): unsure at all n locations
taagctaggccataagaattaaataatatatatatcatggtattgtaacatgcttgcaccttatagtcaagaagctatcatatttacattatagcatgtactatagataaaacaacataagaatgtgggtctcatcttatgactcatttgatcttaaacattgaggttgcccttagttctccaagttcccaagattaatttcatctctcttgttatgtcgttgatacaaaccataccaaggaaactcggtttccgctttgctttttttttaattacatatgttttggtaggcacaactaataaaccgaacttttgttataccgaataaaccgatacgcccacccctatatgggaatatgggatggatggagtatataacaaaagattatgcaaacacagcanatgtgctaaacgttttacttgcatgttgtcgacgtttgagatcgcgactacngtatttggatggta

SEQ ID NO: 47665 - DNA, 430 bp, Oryza sativa
  unsure (1)..(430): unsure at all n locations
tgactactaaaatctatgatattattataacaactttgatatgagacaccacataagaagtttcaacataagaacccaatacgagaataatctttattctaaataaaaataaaataaaatctaaaatttaaaaaagaaaaggatagtccaaataggaatacaatttttaaataagtgaaattcggaattaataataaggaatattaaaagaagagtccatataagaacccaatacgagattaattaaaattgaggataaaaataanaataaaacccgaaattatgaaaaaaaagaagagttcaagtaggaatacacattataaatagctaannattgaaattaaaaataagcaatattaaaagaagaatccatataagaacccaatacgagattaattaanattcagaatannaaaatataataatatct

SEQ ID NO: 47666 - DNA, 452 bp, Oryza sativa
tgactgttcactagtattgtggatatcctcctgacggtatcttgccgattagacttttcatttgcacctagtatggttgatagaatgctgaattaccgctgatgtatttacaactaatgagcattctctctacacaatatttgttcctgtaccatgtatattatcatttgtttgacgaataataagctatttgggtaatccttgccctttcggaatatgagagaaacattgtacatttgtactgggtaccaccaacccctgtcctcttgtacctgtttcttctatttgtggcaattaattatgctaatggactaaaaaacttcctccagctccgtcagataatgcatcggcttttgctatatgcatcgggtagccatgattctctctaggccactacctgctgctgagtccaaattagatggcaacaatagcgaaagaaacatgtatttgga

SEQ ID NO: 47667 - DNA, 474 bp, Oryza sativa
  unsure (1)..(474): unsure at all n locations
agcttatatgctcacacctcatgccgatgctcagtacaaaggcctatgaccttggtggttgtgtaaaatggacttataaattattcctgtttctatagtttatagagaaagtagctgcagacaccaagtctacatgtgatggcagtactgcagtaatagtaaaggcgtcttgcataaaaaaaaaacatatagctaacaaactagcaagacaacatggatagaattgctttagaagagcaccggaaaacttgagcattagcgactgcacagaaatggtgaattcggtaattccagtggttaaaagcaaatgagtttgttcagtgaacagctntgaagaagagaagcatgttagtacctgagaaggttgttgacttgacctctgagatggtgattgcgaagcaacatacttcanaacgtcaaagaatgtattctgtcctacagtagcagccttttgaatataaaggacaactacat

SEQ ID NO: 47668 - DNA, 464 bp, Oryza sativa
  unsure (1)..(464): unsure at all n locations
gtntttaaacttagttaataacattacatcaagagaatattatctaactgagtgatccccgacctctgcatataatgcacaatgccaaaaaaatatatgaaagaaacgactagaaatatctcccaagtataaaagtttgatagaaatatatatcttagtggctagattagaccgccacctatgctctggataaaaaaaaactcatgcaccacctggtccaattgtcgtgacagatatttgtagaactatttatatcattgtataatatctacatacatcactgaaaaccaaataagtaacatatgttcttcgcagtcttcttatatattcacttaaaaagcgtctcggattaaattaaattgacaaatgatgtattaattgcgctattttaggctatatatcgtctntcataagtgaccaccaaataacatatataaatngtgctacttcggtttatttcggtc

SEQ ID NO: 47669 - DNA, 468 bp, Oryza sativa
  unsure (1)..(468): unsure at all n locations
acctgcgctgcaactttacttatcacgaagtgcttcttataagaaatatcttgaagaaattggcacgaatatatgacgaatggtatcagggtgggtgaacaataacaaaggccacatagacgtcagtcgttagcagcctagctatcatggcgcaaacaagcccaaaatttagtaggacgtcacttctcactacctggcaaactcccaatgaccaagtgacgagagcaaacgcaaatccaaatccaaattaaaaagcacacaataaattcactgcaaacattgcatccatttctacttcgatatactaagagcttccaaaatcaccgttgccagttgaaaacttgaaatactactgtcatttagctgcaaggtagtcaaagctagtacaagatgcgaaatgtcgtcagattcagagaatttatcttcangaaatgatcctctgaaaggggaaaaaatgctccttttaca

SEQ ID NO: 47670 - DNA, 436 bp, Oryza sativa
  unsure (1)..(436): unsure at all n locations
tcagtcgccacattgaaacaatttctaggctcagacaccgtaacttggtcagcgctctcgggcactgcttcgagtatgatcttgatgattctactgtcactcagctgtacctcgtgttcgaatacgtgcaaaacgggaacctacggagcaggatttcgcgtatgttaaattgtcagctgttctccttcattgtttttcttttcagttgtttgcagtattcagtcactgactgttgctttgcactgcatcctgtactgattntcaccagaaggaactgaaggaaggaagcttacatgggcacagagaatatcagctgccatcggcatcgccaacggcattcagttcttgcatgctgggatgatgcctggcctgtntggaaacaatctgaagatcaacaacattcttctcgatcagaatcatgtcgcgaagatcaaca

SEQ ID NO: 47671 - DNA, 191 bp, Oryza sativa
aaacattcctactcaaaagcatgatagactatctgacaagatgaaaggtcctactaaaataatcaagacctttcaaccaaactaaagataagctactcagaatcatgaaaccttcatatgaacattggaaagtttttacctaaaaaaatcagataccttcaacctaaaatagaaaggcgctaagctcatat

SEQ ID NO: 47672 - DNA, 309 bp, Oryza sativa
ttataactcaaacataacattaatgctagatattttatccccaatgtctatagttttgtgataatgttataataaaaaatgcgggtttgcaatacttagccttaaaactgaagtgttgagataaatttattgttaaatctgcaggtctgtgatacatcaccttacatctgtagatttgtgataatttggccaaaagatatgtaatcttgtgaaaattactctaaatatatatctattcatttgggtgcctatattcccccaactgtctcaatgtgcctctgtattttggttgaataggctatgcttgtt

SEQ ID NO: 47673 - DNA, 415 bp, Oryza sativa
  unsure (1)..(415): unsure at all n locations
gcttcatctcttattaatttttcaccattcctattctacaattcgcggggtgttcggtatatttcttatttcaaaactcatacaatgtttggttaagcttttaaaaattctgagatcgataacttttgaaacttctcaaaatgcttagattaaaaaaaataagaaaaaaagatagtacatatccatagatttgtcttgaaaggtgtggtggccaggccagagaagcaaagcatgcatgcatatgtggaggagaactagcttccagatcgacttgcagatatgcaaaatgcatgatgcaatacaaacagaaaggctagacattattcccggccggcggcagaaaagctaaacacaacanaataaaggaatatttatatatattattatatatgtaaagtataagttgagaatatat

SEQ ID NO: 47674 - DNA, 367 bp, Oryza sativa
attgcatttgcttgtgcattctcagctgtagccgatcaacagcagatgtattgagaaacttctatcaccgctacttgccacacgtcaagatgtgacattctcagcatgtcatacagatcttttacagatgatctgagcataaacgggagtggttcctcatgcgctatgtctgatgaaccatcgagcaacataatgcaccaaacaatggatggtatggagtattctaatgagcggtggtcatagatggccgatgccagtagcagctttaccggctctgatcttacaacagatgctggagctgccaattcaagtggatccgacactggtgctggcagtattcctgattagttctaagaacagatgatgc

SEQ ID NO: 47675 - DNA, 438 bp, Oryza sativa
  unsure (1)..(438): unsure at all n locations
gcttctactgtactatttgcagcagctttctatagtgcagtggttacattcgtccacaagaactagtattctttntttttatcattgtttggttctgtgatgttgtcgacgatacatcagcacatcctgaagtttgtcatgtgtttataagaggaatagttagccaaattttcagatctattgttgtactacaaaaaagtactatgtaaaatggagaatcagtttgtatgaattgagtgtttcctgttaataatagaatggtattattttctacaattgattgttcttttctttcaaattgaggcaaaagcaggtagtgaanaagcaaaaaaatataaaaaaggtaaatttcgataaatgccagtattttccccatatatggatgagaacaaagaaaagctactttccacgtcagatgaaagtgccacctatacattt

SEQ ID NO: 47676 - DNA, 422 bp, Oryza sativa
tatgatctgcatgtagatctatgtgtgtcgatggatgagttggccgattgtcaaccccaaatgacttacgcataaccatcaccatatatatccggtctgtgttttccgaagttaaatcgtgccttgtttacagcaacaagcaagttgatgcagcttctaccagcgggatgcctatatacctactgtctctaaactttaaagagaataaaatattttctttgtctcaatataagtaaaatctagtacaaatataacatatattaaaactatgaatctaaacaattttatagttctataatatattacatctgtattggattacacttatattatgacggagggagtagctacgttagataccatgcatgtacaatggatccactaattaattagttcttgctaccagcacattacccatgttc

SEQ ID NO: 47677 - DNA, 363 bp, Oryza sativa
  unsure (1)..(363): unsure at all n locations
acttatatctagtgcctccaggaatggtaggttcttattgtcaagttcaaggcacacaagtttttgcgtgaaacacacttttaatatttggagcattggaaaatccaaactattgtgtatttcttcgctaagattgcccatcacaagtaagattgttaggttgggaatagttggcagtcttgtcagcttttcacatttctcgatgaccaattttttcaaagaggatgataattgatgtggaagggttctcaattcaccgctgtccttgattttcagctcacgaagtgaagggaagtcaccatcaaaaactccagtccactccacccatttcggcatgttctcaaactccaattcctncaatac

SEQ ID NO: 47678 - DNA, 451 bp, Oryza sativa
  unsure (1)..(451): unsure at all n locations
agcttcttggcatgggagccctttgatgttggagttctagttattgtgatagngattttaagacatgagctggctaagttgttattgtggcctccaccaaaccaaaccaatatcagaaatattatggtccagcttcagcgatgcaagtatcggaaaattagagtggaaatgagtttagatgcttggaaggagctgtggaatttggcaagtcatgaaagctgcacattcaatggaacttctagcttgcagaactatatcagttggctgaaacaaaatgtatgtgggcctttgaatcgaggtgactacaaggacttgcttgacataattttgcttatacaactaccaattggagcatactgttggtcttatntatcctagagcttttggtaatttggttactgtcaacatgaataagtttggacggaatgatattgngtgcattgaacaaaat

SEQ ID NO: 47679 - DNA, 483 bp, Oryza sativa
  unsure (1)..(483): unsure at all n locations
taatcaacttatctttgtccaactagcaaagttatctatttgacttaatgcatccatacaaaggagcaaatctgttgttacctcatcataccgttcattaagctcttgtagttgtctatcaatgacacttagaaacatgtcaacatggaagcgatgcatattcttgattttaataaagaacctcctatctcttccaaccggncgatagatagagtccatatcatggatcttgatcttatgcttcacacaaaaagattgcacttcttgaagaaaatcatcccatccaggatcctcgcgtaattgctgcaattgaaactgtgtcaataaaatcagtcctactgcattaacaatgtcttgatccctcttctgcaaagcatgattcaagtcagatgtgaacacaagtactgtttgcatcaagtgtgccataaatacaaactcaaatgattggaatatngtcaacactgtttgtgcatttgcacattc

SEQ ID NO: 47680 - DNA, 374 bp, Oryza sativa
ccttctaagtgagtgaacaatcaattgacaccaagcaaacatgactgtgttttttacataggtctaatttctcttctgaaactaaatgaacagaagagtttatctttttaccccgtggtggtgtgctgccctgcaagctaatttcctgctgttcttggatgatctcaagtatggaccgctcaaagtctggttacattgcaatgttttattattatttttttgcaaaacagcacaggaacaattaattctcagctcaagccaaagattaattcacaggtagatgtgcattgttacatacctcaacttggtcctgaagaaatttgatgtaaccgatggccctcatgagtaccgatgcggtatcaagctgcatctca

SEQ ID NO: 47681 - DNA, 452 bp, Oryza sativa
  unsure (1)..(452): unsure at all n locations
gacaaactttgatgtgaaatggccctccaaaacttgattaaatttagaaaggtttgacttatgacgttcatctattgccttttatcaataactctcaacacatgattcctatatcttgagactcatgtgacttgatctcatttgaacatcaacaccattttcatttctggagatctacttctttcattctcaataacattgctagtccccgtgatctgattatcagtctccacttgttgaccaaccgatcgtatataaaatgatacgaataaattgatgaatattaaccgacaacacaaatattatatattcacatcaaaataatatatagaaccacattattatgtatatataaagatagagtggtgcttatagcttgatctctgtacattntatgcttgttaaagattaaatatcacaatcattgaatattntctatctcagctcatatg

SEQ ID NO: 47682 - DNA, 400 bp, Oryza sativa
  unsure (1)..(400): unsure at all n locations
agcttatgccccgtgtaagttgggttgatcggtatgaagggagcgacttttgtcaacctatcaaccactacccaaatagaatcatgtcctgccgacgttctgggtagaccggttataaaatccattcctatttcttcccacttccactctggaatcttcaacggttgtaatagaccggctggcttctgatgttctgccttgacccgctgacatacatcacatagtgccacatattctgctatctcacgtcgcatactggcccaccagaattgttgctttaagtcttgatacatcttagtgcttccagggtgaatggaatgcaaagnttcatgagcttctttcatgatagtatccttcaactccttattttctgggacgctaattctttctcctaccacac

SEQ ID NO: 47683 - DNA, 341 bp, Oryza sativa
cctttatattcctctaagtggggcagtttttttagagtttcacttagtacactatcaatttacaagcagcgatatactcgtcatgtatcaagatccaccgatatgctaatattgattaatcctggtgatacatatcaaacaccggtggtggatatattctgaatagctggttgtaattaaccaattgcgggtcacctattaggcttatcgtcactgattatttcccctcacagcttaattgtaagactggagacagacaaatatgacactggttgagaatctgtcgaaaaatatcttcacgcaagctagggcacgggtatatgtaccaacctacgatgtat

SEQ ID NO: 47684 - DNA, 392 bp, Oryza sativa
  unsure (1)..(392): unsure at all n locations
agcttgctactatatcttgctatatgcagagcaattcttggttaattttctgggtgtctgaactttggatgaggagcatggcatgcagtgtgataggtgctctgtatatataggcctctggatgacagtgtgtctaacgggtaaagaccgaagatataactcattttattattattaaaaaaggcgtacaggcatctccaatacagcctgattttcacatgcgtgttaaattgtatatatttgatttgaaaccagtggactaatttgcagcagcgaaggtgatggcgctgaagctgctaccacctatcgaattaaacataattattntatctnaattttagataatatatgtatattnttatnggattttganaagcggaaacgggatgatg

SEQ ID NO: 47685 - DNA, 434 bp, Oryza sativa
tcatataacttaacaactcacaatcggctgttgagtccaccaattggtctatccgaggaagaggaaagtgatccttatgacacgccttggtgatgtcggtgaaatcgacacacattcttcacttcccgttggtcttgcgcaccatgactgggctggctagccactctggatggaggacttctctgatgaaatcagctttgagaagcttgtcgagctcttctcgtatggcttgtttctgatctggtgcaaatctccgtaatttttgttgtactatcttatcatcgggtcgcaccatgagtttatgctcgatcacctccctggggactccttgcatgtcggacggctgccaaacatacacgtctgcattgtcgcggaggaatgtgatgagcacgagttactaattctcatctattgatgccccgatcttgacagtc

SEQ ID NO: 47686 - DNA, 453 bp, Oryza sativa
  unsure (1)..(453): unsure at all n locations
gcttatgatctgtgtaaggtaaactggttctcaaacatatcattatcatctcaggttaagaagagtccaaatataacttatataaatatttgcatgtatttataaaagggaaacacatataagagataagccttgcggattatctaagatattttgtgcaagataaaatcatggaaaaatttatgtagaatattattagcacaagctattcactgtaattttggtcaaacattaactaaatttgataccttaaataaacaagtcaaactagtcgaataatagactaaatatagttcttaatcagctaaaaccatacataactaanatgtgcatgtaactgcatggaagtgtataggcgaaataatttattcaaatactacgttaattataatgaataaatataatctttccagaatttatcttctctgtttaagtctcttaaanatccaaact

SEQ ID NO: 47687 - DNA, 411 bp, Oryza sativa
tgcaccaatgacaaggtcctataatacataaatgtcaagttatatggctttgcattcgcttatcaaaatcagctgagctttaacaaaatgatagaaacccagctagctcatttggcattcttattccctgcaaatgaaactgggaggatttcggggcaacccgactcctccattgagaatgtcaaggcgatcatgacgaggggaggtaagtccactcgtgattcgccgtatcctaaccctgtatgaactaatgggatatcaaaagaagcgccatctaatggctcgactgacaaggaagttcagccaaataagacagtgccgcaagagtactgcgacacatgattgctgctgttcctctacggaataagaaaccgtcagtggacgaacaattcactcgtcttgttgagtaat

SEQ ID NO: 47688 - DNA, 441 bp, Oryza sativa
actaagcttgcatggtcgctatggccactctcgccctcgcgttggcgctcatggtcatgggagctcatcgccgcggcggcgagaagggagcaaccaccggagccaagaaccttcctccggggccatggaacctccccgtcatctgcagcctccaccacctcctctgcgcgtcgccgccacaccgcgcgctgctccgactgtcgcggcggcacggcccgctgatgctggtgaggctcggcgaggtgcccaccgtgatcgtctctgggtcggacgccgccatggatgtgctcaatgcgcgcgacccggcgttcgccgaccgcgcccggagcacgacggtcgacgccgtcagcttctgcgggaatggcgtcatcttcgcgccctacggcgagcactggcgccatgcgcgcatggtctgcctcgcggagctcctcatcgcgcgcc

SEQ ID NO: 47689 - DNA, 490 bp, Oryza sativa
  unsure (1)..(490): unsure at all n locations
taagcacctgcagctgcaagcttatanggataatctatntattggtttctataattttcatattcataaacgagggattaaaacactgtcttgaacatcaacaaggataaacttgatctgttttcgcgcataccgaaaaatggaagaagagatagatatacacaccttaaggaatatagggagagggccatctttggttggccacacatgatcctcctccatgtcaacctcaacactgccaccattgagatgatgagaggaaggaggcagctgctcaacaatggccatctccatcatctcctcattgctgctgatctccatcatctcctccaagagacacagaaaaaaagagtgacaggttcagagagagagcgccaagcagactgcccttctctccttttaatcaggtagcaagaaatgcatggatgagcatgagaaacagaaccactagtaaccaaccaagagcatgcctactttgttatatatatat

SEQ ID NO: 47690 - DNA, 368 bp, Oryza sativa
ataattgcaagggttagtaccaaccgtactcatcatgccaccacagcaacaatgcatatgataggggtatttcatatgatggctatggctcttttgcgtaaagccagttttgtaattcttttcacaagcctcagacctagcattgactgatcaaattttagtaccagtgtttgtattcaaacaatgacggttctgtccaccatccattgtgatcccaaagatagcttcccgccattgaatcgttatggttttctgaggacgcccactttcccccttctcatgaagtggctccaacagcatataaattcatcatgcaactacccatcccacacatgttaataacttagagactagccaagtgtaataca

SEQ ID NO: 47691 - DNA, 365 bp, Oryza sativa
  unsure (1)..(365): unsure at all n locations
atcttgccgatgcgttagctctttatttcgacttaatttggagttttgngtcttcttcttcgtcgcagcatctcgcggcttgcaaagggttccaagatgacgtccagatcctcctccacgaaggcgtcgacatcgatcttttccggtatgatcgatcaattcgtcgcaatcttgcaaccaattcagtattttttcggaagcagcagcaactaattcagttctctgaacttcttttgatcaaacaaattaggcaacacgccattgctggaggcggtgaagcatgggcacgaccgggtggcgacgctgctgctcatcaagggggcgaaactgagcctggagaacgccgggagccacctgtgcacggc

SEQ ID NO: 47692 - DNA, 421 bp, Oryza sativa
  unsure (1)..(421): unsure at all n locations
actgctggtcggcttatgaaatggatacttttgcataatgcctacaaaaaatagtgatttgatcaggaccaactttctgccattntgttggaaatgaattatacagaagacgtatacgcaaacactcgtgaatatccatcttaacacatggtcaaagtgacaacgtcaacaataaatttctaatatcactaaaattctattaaaactgccacaaatattttcatagcatagttctgtactactccaatatcataaaagtcaccatcattctatactaccatcataaaaatttctaanatgcatgatagagctcgaccgtgagaaaaatatatgccaaaactatatttgcacattagaactcattggtttcgatcatgagcattctaaaactcagtttaacttggctttgtcctcaattttc

SEQ ID NO: 47693 - DNA, 365 bp, Oryza sativa
  unsure (1)..(365): unsure at all n locations
gcttatcaccaaaagttgcaagtaccctatggctattcaataattgcctgaagctttgaggtcaatgcttatggagtataaaatntaattttccaaatttacctgagatcaccacccaaccaaaacttgcaataaccagatgcgcaaggaataccaagggcagctntatttctctagatttttcacaggtatggccacatgataaaaattaatgggagtccaaatttcatggcattgtcaagacaggtacaaatagctgcttcctaatcatcattcacttagcctcccacacaaacgtttcaaacccagagctataatctatcacatgagagcgaaatcacaagttcatcacagatttctaccac

SEQ ID NO: 47694 - DNA, 377 bp, Oryza sativa
  unsure (1)..(377): unsure at all n locations
gcggagtgtgcntacgcatttcttcttcatggatatcggcaagaagcacaacgccttgntcccgatgagtgcacttcatgatgattccattatccgcgcgccgatagatggtcccttctaccatcacgtatcgtttggagatgcgatggacgcgttcactcccttcgcggtcctcgggtagagtcttatctgtgaggtatgcttggatctcggcgatccaagcaatcaatctaatggagctgggagcactcccctctggtcccgatgcctggactccgactggcctctgtggccggttatgcgcatccgtctcccctaatgggtctggtcgcgccgactgctgggcaagcctttcttaaatgcgcccggtggggtct

SEQ ID NO: 47695 - DNA, 400 bp, Oryza sativa
  unsure (1)..(400): unsure at all n locations
gatgcactttgggtccagagtgaagttctcatgttggtcatggntaagctcaaaaacacaatcccttgctttccatcctctaaggtacagatttcttccctgtatcaagaatcttatagaccgacccatgtacacgaattccacttccattgagcctccagctcttgtagtgaatacctcatggcactgtccacaaatatctgagatatccaccttaattccatcttcatatgaccaattaattacctcttcaatgccactaagatagcttgctaacgcttccttgtcagttccatcaaggcaaattgtggtcacatgctttgaggtgagccccctattcctgatctngctaacaaaatacaggtgtgtacattcatatatgggaagtaaatgagtaaac

SEQ ID NO: 47696 - DNA, 375 bp, Oryza sativa
ctttacccctgggtgttcccttccgccatgggagtcagatattgtggatgtcgccatgcctcaagcatgatacagatgagaatgccatggaccgtcgtattccactgccctcgtcaccgacgtatacttgtgtcagatccggcatcaaggaggcctatacctccatatccggcgtttgtcgatggcccataatgcctccatacctaaccatagattggtggaggaaggagaagagggggagcacgggaggggaacgataggaagagagtggaggagaaaaaagaggccaaggaagatgatatggcaacgcaccgtggtggtgggcgttaagtatccgcacccggatggaacatcgttctatagattatctaaagt

SEQ ID NO: 47697 - DNA, 293 bp, Oryza sativa
gagtctacgacagatacccaaatcacgactcgcttgcgcgcatcttgacatccatgtcatcggcatcagcctgatcattgattcttccttgtggatgagaaactactgtgcgtcgagactgggacccgtctatctacccataggcattgtctggatccttcatatactatatgcgggatgaactgacaatttaccatattgtggattgccgtgctaacctgatgataactatatggcgcgtcgacaaaacacaggatgaagatgcctacggcggtgatgaccatctgtgatat

SEQ ID NO: 47698 - DNA, 324 bp, Oryza sativa
  unsure (1)..(324): unsure at all n locations
agcttgcanagaagctacgatgcctatttctattagtaanaacttatctgacagtgccttatgaagataagcgcaataattatctactaatgcttaatgcaacagcactataatgtatcactaaagaaagagaatgccgcacaacgattcactctccaatgaaaaaaccaaaagagctcatcatgcaattaactaatacatggccgtgtaagacgactaacctgatggctgagagccaatcgcgtgggtgcatacttagaactgacgacgacggcaagctcgataccttaaggctcgatcaagagaaataacgggatgggtacc

SEQ ID NO: 47699 - DNA, 401 bp, Oryza sativa
tcactggacagaatatgcaaaagaatatgttcttgttatcatcatagtactgcttgattgacaagtgattatcagccataagcatctcatagttaatatactcggaacaaaaactcatggtagaaaatgggacaacagcattgtatttttgacaactgaacatcaaaacaatgcatcatattgaaactgttacacacaggttaagtatgttcttatgggacaaaggaagctgtatgcctactacatatcatattaccattttcacaccaaacaaatcgaataaatgtgaggttcttctttcatgaacagacaaaccatcaaccaacttatccggctcataagaaggagcgatgaacccaaaccatctgagagtaagtcgtactatgcatcgattgaatctg

SEQ ID NO: 47700 - DNA, 418 bp, Oryza sativa
  unsure (1)..(418): unsure at all n locations
agcttttccagattcacagaagctggctatcaaacagctgcttctcagaatctaaagctccccaaacagagcctaaatcctattgggtgcggtcattcgtccatgattccatcatcgcaccagtgttgcttcccccaatcctttccccaagttaattgccccttccagcatgcaagtagccaaaaaattgtaaaatggtctgaagagagtatagcgtaattttcatattttttttagcatgaacactgctagggcagtggttttcatattaatagtagacaaagaagcagacttatccaacatcggttgcaaaagaaagaaacaatccattgcttgtgaaagaaatagtgccagcattagtgtcattgaaatatctataaaagttntctgagttgaaagttctaaagtatgagctaaa

SEQ ID NO: 47701 - DNA, 443 bp, Oryza sativa
gcgacggtggcgtttgttggatgtgactcatatgtgacggtgaaggcaaggagggggagatgttggagaacgcgaatgcgatatggagatgtggcgtcattgtcggtggcggatgtgacgatgagatgctgtgtcaccagtggcggtggatgcgacggtgagatgcgacgtctgtggcggcgaatgcgacgaggagatgtggagtccgcggcggcggcggagacaacgagtggatgcaactccattggcggcggatgcaacgagcggatgtggcttcgtcggcggcggaggcttgtatgtggttgtttgatgcatggcttgcggtagtaaaggcaaacaatgccgcatttctttttttctctgggttcttgctatcgctagtaatagtagacagtagttcttacaagtgaatccagagcatttcttttctcaattggagatat

SEQ ID NO: 47702 - DNA, 438 bp, Oryza sativa
  unsure (1)..(438): unsure at all n locations
agcttgcccatcttttgtaatgccttcctctagagcctatcctttgcttcggctggaaatgtgaaccatttctccattgccgtccaagctcgctctttctcggcttctgtgaccttcccgatatctttatggaggatcccgaagttctcacgtgccgctatcccgcagcagttagaccatcttccaatgacagtcctgggcgccgtgggcctaccactagcgtcaacctctcttataacttgcactgtggtcggccatatattttgtgaccgcggatttctactagacctacttgcacttgtctcgcccgacatcgacgtatgttgttcctgcggcaattctgcagcacanacagaaggcaatatttgctaaggggtgctagctaaaatttatgtggtcatgtggtgaaaatntatcctaataaataccatgaatttc

SEQ ID NO: 47703 - DNA, 362 bp, Oryza sativa
gctgtctatacaacgcctccaaggagataaatgacgaaagcaccgccgccgctgtctgtcaaggtctcaaagagaaccgagactggtttttcacccggcagcctcactaaagggcatgggatggcacgacaatgcccaaaaaaaggagtgatgctctgaaagccatcgttgccggcctggctaatgccgggctatgtttttacctgccgttcgcagcctgcttatccatcgctaacgcaccaatgctccaaccgccgtctaacctccgccggcggatgggcacccgcgcctcctcgcacacaccacaccgtgcttcgccgtcgccccgcacttcctcgcgtgccgttctctgcctcggcagt

SEQ ID NO: 47704 - DNA, 452 bp, Oryza sativa
  unsure (1)..(452): unsure at all n locations
agcttctcttttttttttcaacgngtgtatgacatgtanggcccgcttgtcagcgggattagttatttcaaaagccacagctgttgaaccaaacgagctttttcaaaaaccacaacccatattccacagctacttttcaaagagccacaacccacagctactttttcaaaagccatagcccaaccaaacacaccctataaaagaagtactaggttatctcatcctattccaggtcatgtgatgtggtcgacacgatcactatggcgtctgcatgccatacaataattggtgtttgaccttacgatgataaatatgtacaatggaaccgccatcacaatagcaagtttggaatgcacccacaatatgaccaactgctccaccagtgaatcaaatccatcatatttggtntaattacaaaaagggataatttaatacaatatggcacatataga

SEQ ID NO: 47705 - DNA, 408 bp, Oryza sativa
  unsure (1)..(408): unsure at all n locations
ctctccaccctttggtctacatttatcttgtgtccttagatgaacctaaagaagaccaaatacacatgttccctgtggaaattcaataccttcgaatactacaaggtgaagtactacatcggtatatccgtacgcttgcggattttatctgtgaacgtaagaaataccaacagtacgtcccatgaaatttcattacgaagacatcccgcaactgctcccatgagtaaatgttgcttgggtgaatgttgaaataccacgatcgggcgaagctgtctatgacaagatgtgcgaccttcaccttggtgttctcgtccccgtggactgtttggatcgttgacttgtggaacggcaagatctcgcttggttctgatntgcccgaatatcatgttatnagttaatactcgaaat

SEQ ID NO: 47706 - DNA, 385 bp, Oryza sativa
gattcctgcctgatgtcctcaccatgtcaggaatttgaaggtgtgactgaattactgtaaatggagatactaatattttcccttcctcctgatatttgcatgaagtatatgggggctgaaaaatgaaaaaaaatgaagctaattttgaactgaactctgcagtcctgcatcaaagttgcactggactttgtttcccccgagaatgttggtgagtgtgttaagctgaccaatgaatttatacgacttccatcttcccacagggctaaagaagataagctagaggttagcttggtgtcagttgaaatttctggtgtttgatgtggtgactgacttgaatttgatttgtgcagtttacagatcaagaagatggctctccatgctctga

SEQ ID NO: 47707 - DNA, 414 bp, Oryza sativa
  unsure (1)..(414): unsure at all n locations
cagtataaaattgcgtagaattcaaatccagatgaatttttatactgactcgtaatacgggaataagataatttgtgagtagacatcaggaaaatgctatacgatgaaagtagttcaaagttgcaacaagtcagcactaaatgaaagtaggaagtgattcagtataaaattgcgtaaaattcaaatccaaatgaatttcaaagactggctcgtaagataatttgtgagtagacatcaggattcatgaaaattctacatgatgaaagttcaaagttgcaacaaagtcagcactaaatgaaattatganaaagaaagtataataggggcgttgcgagaatcgaactcgcgacctctcgcacccaaagcgagaatcataccactagaccaaacgcgctcggatgatatattttctca

SEQ ID NO: 47708 - DNA, 449 bp, Oryza sativa
tcattatctagaaatatatacttctttataatcaacttctatatgatgcctttgacaaactcatgatctcctaattctgtagtcatctacctttttttcctgtggctcttactctacgtaacattgacaatagtcatggtagccacatagcttgatatggtatctgtaagatcaccccgtatgagtatgaagtataatgcatcttgttcatatggagataatcaatattgttgaaacttggcactttgcaatttggcattgtaaaatccagcgctttcttagcaatattatatctagtagtacagtcgttactaatggtaagatgtctgtatctatgtcatgagatattatgttatccttttgcaggcgaacacaacatggaattgtacctgatattcattacattgaagtttttggatcgaaataatctatcttcatgctgcattcac

SEQ ID NO: 47709 - DNA, 467 bp, Oryza sativa
  unsure (1)..(467): unsure at all n locations
gcaagctggnggcgaacccatagatcttcatctccaggctttgccctattcttagcgacgaaccccttggtcttcgccctacggcttcgcccggaggtttcttccaaaagacttgaccgatatttttgatggcttacgtggtttcggcaggttagtcgaaggtcctcatgacatacctccaaaacagttaatttaatatatcataaggaaacttttggttgagttcatcttataatatagttcttccagtttttataatgtttgatgttgatgacttgtggacatacatttggcaatttgtcttattaaaaatctgtgtaattattacttattttattgcgatttgtgttgttattacacatattataaacatgacatattgtttttcatatgcgcactagttttctgaataagaccaatggtgcatggatgttcaaaagtgaatggtgttaaatattacaaactag

SEQ ID NO: 47710 - DNA, 401 bp, Oryza sativa
tacggaacttagatactatagctgcaacacgttgtgacgtccactgtctcaatttcctgtatctctaccgtgtgctatcgttctttaatagattaaaagtgtacttcagccgacgcgaccttacgtagtttcctctataaatatccgaatgatcattatgcacaatgtggagtaacaaaaattatatgatacttcctctgataatccgacaagatccgtttccgtttcactggattgctatacctccaccgcccctagggccgccgcctctgctggagtactctaccatcgctgacggtatctgcctcccccctcaacgagaaccttgcaccagcgctcaagccaccgccgatcctatggccacagtccccgccgacgaggaagtcttcttcccgaactac

SEQ ID NO: 47711 - DNA, 440 bp, Oryza sativa
  unsure (1)..(440): unsure at all n locations
taagtcacctgcagctgcaagcttgngagtggctagaaaaccctatatcatgaaagaactgatgtggaatggccaaagggtgacctgnggacgaaatccatatatataacggctaggtgacgtcatatagccgctactcacaagtttgaactggaaacttgctaggaggttccgggcaaaagtgccaggaacttccaggcagcacttaagaaaatttttgcaatgaaacggcgcccggaagtttcggccagaacctccgggtagccctctctgtcccgaggagaaaatcatttttcaaaaatgattccaaaaatcttttgactcatggatatgactaagagcactttgtataccctagaaccacacttgaaacccctcttaatagtacgggttttcctaaactcaatttcgaaagtgaaaattctagtctaatcaccttc

SEQ ID NO: 47712 - DNA, 457 bp, Oryza sativa
  unsure (1)..(457): unsure at all n locations
tgccactgaggttgtgaccaaattactttcaaagaactattctgggaggaaagcaaatctttctctttctcaaacctgcattcaaaaggcgaatcatacacttcatatctagcaatgtaactgtatgtcatgtcagtttcacgtaccatgaataggttgctgcagaaagaaatgcttcagagataatggtatgctcagcaagcagctgatgaaaataacccccaccagtaacctgtgtaatgaacagaacaccttcaaaataggagatatgcataaaaaaatatgactaatcaaagtctcccaaacaaaaagattccagatactaaaatttattggattgtacactangttattaagtttgcacgatgttctgtntggtttatgaacttgataactcaacatgagcatncataaacttgcacaagtgcatgctggaaaagttgatctggttcatatt

SEQ ID NO: 47713 - DNA, 461 bp, Oryza sativa
  unsure (1)..(461): unsure at all n locations
caatcctagttggggagtntagatatgagtgctttagatgcatnttgtaaatttatattgatgcaacaaagttgatatactttcaagagtttcgtcgatacgtattttctggatcccaacggtttgaccgacagcaaggcggcagtctaaccggtgggagtacgacggtctaactgaagggagtgcagcggtctgaccggataggctacgaaggtcagaccagcggcttatgagcgttgtgaccgacggcgatcggacaacatcaagatttccatcgatttgagggtaagttttatttccgctaaaagtttttgggtttttggttttccctaccattcacctcccttatggtaggcttggttacttgtgttcgatccaacaataaccctcatctttcagtcgagtttatattatatcctataccaaaataggaaatctttaccctcaacttacaaaacatg

SEQ ID NO: 47714 - DNA, 456 bp, Oryza sativa
  unsure (1)..(456): unsure at all n locations
tcttgagatcgaatattcagattntgtttttcttttanggacaaactaatgattgtttggttcggagtcgtatattgcaaaaaaagaaaaaagtccctttttcagtgaatcaaaggaagcatcgaccatggtgaatactatcaggtggtagtggaataaggattacaaccattaagattagtccatccctaattataaagaagcatcttgtgtgaagtgtctatgatggtagagggagagatggggatctggctgtattccataatgcaatgttatatctggatctaattattctatctgcagcacttctgtgacataacatgatatatggttcaagaatctaattagtcgcaacttaaaatgttgtttcctgatttcattacttntttcaagtgagcttcatccagatgtgtattcttatgtctgtccacgactatgtggtaagtgatgtatgta

SEQ ID NO: 47715 - DNA, 428 bp, Oryza sativa
  unsure (1)..(428): unsure at all n locations
agctttcattntatcgcatatttgggtatccggaaatccatggactacgtgatgatacacataacacatggatttccacatcatgcattcgggttgcaacggaattgggttggatatcatctgaactgcatttaatttcatgatcggattcaattcaaattggatatatatccgcccattcctagcttcatcttaataataagcagtttcagtgtgatcgagtctgtgtgtactgtaatgctgtgttctgcatgtctgtgtagtcgagttgagtccatcatgtttgcttcattctgtaattctgcatgatcttcagacgctctgcatgagcgagtagtaataataataaagtttgaatgaagttatatgctcccgatcgatattatcagacgaattatatttctgtttacttgatgtttctggatcat

SEQ ID NO: 47716 - DNA, 412 bp, Oryza sativa
  unsure (1)..(412): unsure at all n locations
tcgatcgggttntctacttcatcgggctatctatctagtatgtctactgtatggtcgctcaatataatatcgtttcagttccagtaaattaatgcacaaattaaatccctataaaatgtgaccgcctatcccgcatgtgcctgcaaacttcggttttatcagtcgatcctgtgtgcattagatatacatctaacgggcagagtgtacaaagcgttaaaggtttgcaaaaaccagaaaggctgataatgggttggtggtgcgtgggctgcttgtcataatgggctacgacgagattccccgcgagctgtgcagtgcgagagaaagaagcccacacacagttaacgggctatgggagcaaacccgttaccaaacatgcatcccatctggcccaacaacgcgcggaaaggctaat

SEQ ID NO: 47717 - DNA, 434 bp, Oryza sativa
  unsure (1)..(434): unsure at all n locations
atatatggaaaatagtaatttatttatccacagttgattagtttgggtacgtgattgataagagtacagatatatatcacatcaccaggagaaaaaccgaagaatgcattcatgctacacgtttgtactcatggtcgattggtcctcagctgctgctgcttacaagttggtcagtatgctctctccgtgctagtaaaaaaagtcgtttatgacaatatttaagtcaaaccttgaaaatataaattataaataattttgaagttattgagtttaaaaatataaaaattatatgaatagatttgtcttanaaaatactttcataaaagtatacatatatcactttntaataaatattntttatagaaataaagtgtattttggagaccgtgtcgctgtccaaaacgaacttctttacaagtacggagagagtatac

SEQ ID NO: 47718 - DNA, 452 bp, Oryza sativa
  unsure (1)..(452): unsure at all n locations
cttacagcttcattcagccttcatattctttcanaanatggaaaatgaanagtttcaagttttgttctgaattagatgacgctaatgcagctaaagttgttgcccacaagcatcattttgtgcaaattgtgcccacataccacattggcaacattcatcaagaagaagaagagtatgcttctcgccaatatcctgattgctgacttgttgtgaccagaactctctcaagtggacaacaattcagccgtagttgaacgtagcttaactgtttagatttcttgtggtggaactagctcatccgagttcaaatcctagatttaacacgagtgctcgcatttacagctaattattcttttagtggtaggaggaactcatatagatatcatatatatatggtgtgtctgcgcgcggcgttgtgaatgcctatgtttctataacggatttgctataca

SEQ ID NO: 47719 - DNA, 467 bp, Oryza sativa
aacttataactcttaattactatcaatcatagttttattgaattgtagaacagtcatttcattttgccaatagcaactattgcacatataacataaacaaatggttccctcgtagtatctatagttgatcatcattacggtatggtcaaatttatacaaaggctaaaacacatgaaagtgaactatagctagttgtgtttcatgcagatagcatgataaaacattctttggttcttccattctttgctagaagttccaggccaatgttttagcctataacatgcaccacaattacttctcgtcaccccctcaaagaagataagggtgtcatgaaagaacattaccttctgtaacaagtcccatgcatagttctgcaatataaatttgttcaggatgtgcactccaactttatgaatctccaaacatgcttgactaagaaaggatataatgtacagtgaatgcattga

SEQ ID NO: 47720 - DNA, 449 bp, Oryza sativa
  unsure (1)..(449): unsure at all n locations
agctngagtatcagaacaaggcattttatacgcatggggatcacatgatgatattaaactacttgaccgacacagcgttcattcgtgaaattatcgcccaaaacgcaatgcctcgtccagccagtagtacatcggctctgggtttcttcattatagttcagttggatcgtcggtttcatctagacaagtatccgaagtaataatctgtcgcatcggtcaatgactatctgctactggctgatgcagggagcagagcatactctgctctcgcaacgtaccgattgacgtacatggcactcacagcaatgcagcatcgtgcagtggtcgatcgacatggtgaattggcgatcgggttggctcggctcggccgtgaagcaagcaagcgtacgtgagcacgaacagtgacagccaaccaccgaacacgatccgctatataagacgctgcatag

SEQ ID NO: 47721 - DNA, 464 bp, Oryza sativa
cgttcttgctgctggcggtgattgtggcatatcttccaatgtgtacgtctcaaattatttcaggaaagaagcaatctttcatacatggagtgaagagatatatgggttcgggatctcaggatcttacacaacgctgagtgcccaagttttttacattccagatccatctaagttaagggtgaaaaagggtcgacgccaaactagacgcatcagaaatgatatggatgagtcagaagcaggtgggaggactttacgctgcagcaagtgtgatctgcgcggccatacttacaagatatgcccgaagaatgcagaagttccaagcggcgcatatgctagtccatctggacaggcaagtgatggtaggcgaccacctggtgaatgaacaacaagcatgcgcgcaatgccaatgcgtcgtcgcgcatcatgcgattccatggtgtaacaatgctatcgatttaggaaat

SEQ ID NO: 47722 - DNA, 440 bp, Oryza sativa
  unsure (1)..(440): unsure at all n locations
agcttcttctttctcttcagcacctgtttggacgagattctagcagctacaacttctcctagaatcagaatcttcccaaattgctatctcttgtccagaatctaaaaagttgtagtcgtaaaatctaaaaaatgaactagaaaccgaaaatttgaaaacctagtttctccagattctcagaggatagctacaaccagctttcttggaatcataaggtccttcanataggctctcaatctctcaaatttttacctgattcctaatgcatcttagtgaaagcctccttctgctatagtgctataagcctagcacttgctctgcataggactcgttttgggtgtcagggcataacattttacagtctataagagaacagtgcagcttcagtagaaatgtcaccacctcaaaagccaaaanagcataggaaagatgataaatct

SEQ ID NO: 47723 - DNA, 410 bp, Oryza sativa
ataaattattccccgttgttcaactgctggcttaattagaagccttattattccgacactatacacttataacgtagttacaaacaccaacacatacatatttgcaccatgtctccagttacatggcaactatcaagttactgcagtttgttcattgatcagaataaaaccagcattatattgcagttactgttaccaccagtggaaattatattctccactgtccattctatgatcagcttccttccatcttgcttctattcactcggtgatgacaccattggcgacggcggcgatggcgaaagcagggtggaagaagtggacattggctcatggagtacactgttggtcgaaaccgatattggattgccatctatctgcagcatcactgccccaaggatctcagtgag

SEQ ID NO: 47724 - DNA, 438 bp, Oryza sativa
  unsure (1)..(438): unsure at all n locations
agcttgcattaatcacttatttcctatgtgtttgctgagtactcttgttctcacccttgctctatataaataatcccccccagttgctgaagaagatgaagcggatcccgctacgatgagttttagggtttcggcctagttcccaagtcgcgcctgtgttgtttggtccgagtcttggcttccgcttcccttttgaaatgcagttgtgagctcgggatctgtccgcagcccaacatgactgtacctctactctataataaagagacctctgttgctgtgatattctgtcttcctgtgataccagcactgtttcctangactggtatagattaacaggttatattggagcgtcacgggctagttccggtcgggactagttaggggcgtgacaagagatggtatcagagcacatgctttgccctatggcgaaacccgacg

SEQ ID NO: 47725 - DNA, 461 bp, Oryza sativa
  unsure (1)..(461): unsure at all n locations
tgtggcgtgtaacgcccatagcctcttacttcaatctattgggaaacatcttatttctgctcttgtaatctacatttatattcttgttaatggaaatacgaatgagaaaagaacggcaccaggtacagcgtatcacaattcacaactgcacaagcgaagaagcatcctgtagttattaatgttttgtaataaataccttttgttntataaatcttcttttgcacgtctagaagcctggtaagctcttttccttgaggctccagacttcaacaaaagggggtgtttagatctagtggtgtaaaattttggcgtgtcacgtcggatattatatatgtgtcacatgaggttttcgggtatttatgaaaaaaaactaattacaaaatccgtcagtataccgcaagacgaatgtattaagtctaattaatccgccattagcatatggttactgtagcaccacatta

SEQ ID NO: 47726 - DNA, 272 bp, Oryza sativa
  unsure (1)..(272): unsure at all n locations
agcttggactatttacgaagcgagcacttttaatggcgtgcggtgggagggaggggtgtgttngcgatttttnanttctttttcttaatttttntntagaattttgatttataagctaaattttatttaccctagcctgtgaattttgaactaccatccacgggtataaatcgaggtatcataaccaccccaaatattgcattctacaatgccagacatggagtggtgccacgcacacagaaaatgagtccacgtctggagaatctgcagct

SEQ ID NO: 47727 - DNA, 460 bp, Oryza sativa
  unsure (1)..(460): unsure at all n locations
cttatgctgtgtaaagatcatgagatacaactaaattacgccatgacaaattcagattcatctgtaatgatatcaagaaaaagacagattcatttcagattcatttgtagttatatccttcgctatttcttagattatggagtacttgattttttagcacatgtttaaccgttcgtcttattaaaaaatcttttgtaaaatatgtaatattatatgtatacatataagtatatttaacaatgaatcanatgatagaaaagaattaattacttaaatatttcaaataagacgaatgatcaaacatatttaaaaaagtcaatggagtgagtagttggttatactttttttggcattttgctgtgatgatgagaagagtaacgagataactgggatagcagacagacggttttcttaatgcaagttntctttcgatgtcaaaatctggatacaactaaataat

SEQ ID NO: 47728 - DNA, 407 bp, Oryza sativa
  unsure (1)..(407): unsure at all n locations
tatatgaatggaaggaatgaggcatatangaaaaaaatcctaatgtttgaattcctacaataatcctataaaaatcctttaaaccgaatgagcccgaaagagagagagatgatgaagaagatgaggtgacatgaaagtcgctgacacgtggatcccatctactgacttatcaagttaaaccgtggtcaaactgtcatgtcagtagaaaccacttccaaaacgatcgaaggagttgattttcactactttccgaagacaaaaaaagccttccgggagcggcgctatatccggttttgcagttgagggagaacgattacaggagcaagagatgagggagacganacagacttatttgcctctactataacagcagcttatgcccaaacagcggagcgagaccagtcatg

SEQ ID NO: 47729 - DNA, 417 bp, Oryza sativa
tgcttaaagataattactaactcttttcttaaaaatatcataggtaatgtgcaaaagttgtgcagccatgtatgattaaaacgccaaatgcatattttacaaactatcgaatgatagttttaattttactctagataaagggaggtagagttagaatctagaagcatgcagagctagaagcatgacaaaacgatgcatcaatagcaaacatatttagatggaaagaggaagttgtacaataatagctccaaagcaagaaaagatgacatctggaagaacaaagcatatacctagctgactttgatagaaaacatgatgcagaggaaagcaacattcttatgggcagcaagggacaaaatattatgaaagagagtatgcaagaagtgtatgcactgtgcaacggctacaaaatgtact

SEQ ID NO: 47730 - DNA, 463 bp, Oryza sativa
  unsure (1)..(463): unsure at all n locations
cttaccatgagacttccatntgtctatggtgttgagactttagatggaaatacagctcccctgaaataccttgaggaacaaccagaactctctttnttggcttgttggaggcacagctttgcagattgtatcagtagggcatactaatgagaaagaagcaccactgtgaagtgcgaaacgtgggctcttaagatttattcgttttggtgtatcctatttttgcattcagtgatgggcaattggtaagatgatgcactgatattgtactttggtcattacccatctttagtcaacttatatggatattatctacttcattcatttttcaggttccagcattgaatttcatgattccggcangtgtaatggctcatgatgtttacatggaggtctcgcctctcctgctggatttacgatgctatgctattgatacaactctagcttccttttgcattgagaaaca

SEQ ID NO: 47731 - DNA, 463 bp, Oryza sativa
  unsure (1)..(463): unsure at all n locations
tcatgtgggccccaccccattggtatgcaagaagaacatcaatcaaacatgtgctgatatattggtacagtagagcaataagagtagcagtagcagtagagcagccggccatgccatttgctacatcaccaatacactgaaagtgcactatagattggtggcatcatatatatatattcttgtactatacagctcccaatttccaactccaactgccgtccttgcatatctagctgcaattgtctatggctntcacattctttcaatttcctcctctaaaatcacatgcaagatttctggcatcatccaagaaatatgtatacatgtatcaattaatttgtacttatatttccttcttttatatactctggtttgattctctctcacacacaaattttccaacaagtcttctgaaactcttcagagagaagatcatacctaattacactattttaaatgcata

SEQ ID NO: 47732 - DNA, 460 bp, Oryza sativa
gcagcttgtatagtaacgtttgaccagcctcttctcccaagtagaatccacatcgtcttcctcagaaagtatgaacctttatatggataaataattatttaaaaggatttaggagtatttcataaagcatggacacacattccaccataaataaataacaaagggtattggacttgtttcttacctatatccttctcgcagagtatctttatcagtcttgatgggtgcacgattatccacattcttgtcatggccataaaactgaactgttcacagcacattgttttttcagtgggaacttataatatcaagaaaagagggagataccaataaaatgccagagccaatcaatgaaacaatatatttgtaaacatgaacatgatctccaatccacaattatttatacatccacgataaaggatgctgtggtgaggctacattctggttcttcatttatcat

SEQ ID NO: 47733 - DNA, 463 bp, Oryza sativa
attacgtgacactatgatactaagcttcaacaaccgaattaataactgatactcaaatagctttgtagctagctagtaaaatttatacagacttctcctccggcctatctgtaccaggatgatcttcaatgtgctataatggagaatcatgatcaggagtacaacagtgccttcttggaactggaatatacgcacgaggagagatgataacctcataaaatgactagaattcccaatagcgagcgtactcgcttgttcgtcgtctccagcatgctctgaccctcccattttacttacagtgagaggataacttcatggctagggttgctgccgcgaccggtagttcggaaattcaagtggtcaccagctcgctgcaagaattacacaagtataagctggttcatttcctttaattgagaaacacaatactagaggggcctaataagcaaaatatcactctcta

SEQ ID NO: 47734 - DNA, 461 bp, Oryza sativa
  unsure (1)..(461): unsure at all n locations
gcttcgttgtgctgaccccatcgatcttctttgctgatgagcatacaatgcggcggcccggtcgggttccggagacccgcctgaggcggnggtggcggtagatttcgccccgaactcttggtctgggtctanggctgnacgaacacatatacggcttgctgctgctgcttgctaatctcactgacgcgtgagccgtttccatgacttgggctactagatgcctaatttctcgcaagcagtagggatgactccgatcatatcgatccggcgactctatgatccagcacctcaaacaatcggtggctggtgcgtgacatgtagatcgatctacatagctctgataccacttgttatgaaaatacatgcacaacggagacactaattttacgtataatacccttgcggtaaagaaccaccggcgccgaccggcaatgatcactatataagagatgattacaaac

SEQ ID NO: 47735 - DNA, 450 bp, Oryza sativa
  unsure (1)..(450): unsure at all n locations
tatgcccacttcattatttctatgtactatgtcctaattgtttctatntcatgaaatctcttcaccataatacactacagatcatgcactacattgcttttcttttgatttttttcgaactgttgaatttgctcaaaattcggcaaaccctactgccggtaagggttaccgaacccccatggtaagcctggtaaccgcggttaccggcggttttgcaaaccctggttacaccaagcatttcttatctttaccaccacctgctcttattcaaatactatggactcctttggcaaatatgatactgaaatgatattccactctccaaacggtaaacattttatgggcaattgcaaatctaccactactttgaattgttattgcacaactgccactagaatatngcatatatgacactagaactgtcattcgagtggcattcttacaatattg

SEQ ID NO: 47736 - DNA, 458 bp, Oryza sativa
  unsure (1)..(458): unsure at all n locations
atctaanaagagccttagtttgtctaanaacagattataaaatattgtactaacctcaagtgcgctgggcagatagatgatgccgaaagcaaaagcattgtcttgactcttgatttagatgcaaaatttcctttaccagagcatgtgaatcgtgaactacaagcagcggagaaagaaaggagttatcagagccagccaaaatattgcattttacaatgcaagaaatgagttggtgcaacgtacacagaaaatgagtccacgtctggagaatctgcagcttcaggtataaagattctgtacaatctttccctccacacagatatggaacgtgacaaatgttgggccagtcctttcccaatgtctcactgtggaatttgcgctcctcttncttcaancattcttctctctctttcatcagactagacggatcatctttgnttctgtccaattctttcttc

SEQ ID NO: 47737 - DNA, 461 bp, Oryza sativa
  unsure (1)..(461): unsure at all n locations
tcagtaacatgcatgccaacatatatggcccaaatctacttgtgcaatgtactattcttaaggcttgtttggcaaacctcaaacctctagattttggagtttataggttaaaatataatgatttaagcatctattcttcgtgatctaaaatatgaacaagatggtgcggtgcaaagaattcttgcagctggagctccaccaaaaggcttctatcaaaataaactggtagcacacatgaaagggtatcaactaattgtaactttgaagtactgtcatctaaaaatactaattgtaagttctgaagctaattaatatatttcctgttcatatataagaactcataagatgaaaaatgcagaagaacatttagattaagatgctaattaatctgatctcttcatatatctttatggggcaacaggttcagttaanaacatacaaatttagttatggctgataac

SEQ ID NO: 47738 - DNA, 438 bp, Oryza sativa
aagcttgcactatcttcagggccgaccctatggtcagcccgtgcggccgcctgtggctcccaaattgtatggcccccatgggtgatgggccatggcccatgggacatccatcgccaggcctgaggagcaaaggaggagaagcgatctgactcctcccgtcgcgcgtcgcctcgatctctgggtgtctacgttgtcgtctagggctagaggccatcaggattcagccattcagattcatgccaatcacccggtggccacgggcaggcgtctgttgctcctcaactcctgttgcagtgttgctcatcgcctcatcggccgatcggcgccaccgcgccaggcgcctgctactcgcctgcttctgctgctcggcgctcgcagtcgcggctcaccacgctcgtcgggtcgtgtccctcgttcgaggtaaatttcatctggtaa

SEQ ID NO: 47739 - DNA, 219 bp, Oryza sativa
tattttttgaagctgccaaacactgggtgacataagtttcattgttactatttctaatttacacttaccatggcatatgtgcactcttgcctatcatttatcctatctggagcattcttaacatccgacttattttctcctaacctattagtttaacgaattacttgaagggataacaatatcttctagatcataagtgagtgataataatcatgaaat

SEQ ID NO: 47740 - DNA, 439 bp, Oryza sativa
  unsure (1)..(439): unsure at all n locations
agcttgatcccccacttncnctttccatatccaccctcctccaccccagtcccgaaaacctaaccctaacccgacacttgttataacgtagttgggagcacgtgcgtgaattcatctgctagtgtgtatgcgcaaattagtagtcctggagaagaagtctcaactcgctccacgtcatgtttcttgacccaacttgtttggtacgctcgctgttgtgcgattgagtggcttgtctcgactcgcgacgcaagtcctcacctccggtatgcagtcttcaaatagtattggcttcgtacttgctatcatcttctacttaaaccgtagtcagaatttaaattttgatacttagttntaaatntagttntaataattttattcagagtacttttagatcggctaagactacacatgcataaagttntacctataattattactt

SEQ ID NO: 47741 - DNA, 381 bp, Oryza sativa
  unsure (1)..(381): unsure at all n locations
caatggaggatctctanttctcatactcattcaccattctatctagccgctagctttgcaaacacagccttatatgttatcaatagaggatgtatcattgattgatgataatggtaggactaatatgttgataatttgcagatgcatatgtgggggcacgggtcgcagtacatgaatgggccggagtctctgctgtggacgcatccgactgcgatgctgctgctgccgtgctactgctgcgcggcggtgtgccggaacaacatctaccacccgctgtcgcggtcgttcaatgatcttcggacgctgcatacgcactacaagcggaagcacgggatcaatcccttcatgtgccgcaagtgcggcaaggcgttcgccgtccgc

SEQ ID NO: 47742 - DNA, 453 bp, Oryza sativa
  unsure (1)..(453): unsure at all n locations
agctntggagactttatgacaatttcctttatgcaaaatactcctcatctacttgtaccaaatgctgaataatgcatcggctaatctaattgtcagctcaatagtcggagcgggtggaccatggtggctgctgcaatcctggctaaacttggtagtcatgaggttcgtcaatcggccatctataacagaaactgaattcccaagattagagccgactgtcaacgatgacggagaagaactcactcatcggagatgcacatcatatggagagtacgcctctacaccaactgatgcaggagcaaaactatcggctgagctgctcaaagactgggtntgcaactnttatgaggngttccaaaaagatgctcgagnttggcttctctatggagactcaacacttcttgaaaaatcatgggacttcagatttgaagacatcaacaatgacagatatca

SEQ ID NO: 47743 - DNA, 484 bp, Oryza sativa
ctcctcttactctcttttctctcgatccatcctctgtcttctctcaccggtgctggaggagttggagctcaaccttgccgatgcatgcagcatgaggcactcggtgaggtggagggctgctagagctcgagctcgccggtccatgcaatggatgtggacggcagccagatgtcgagctcgccggcaacatgggctccatcgtcgcctgctcctccactatctacacctttgcctcatgcttgggctccgtcaccgtccccatcgccgctcccgcctcctcttacgctgccactgacaaagataagagaggagagagacaggcagagagaaagggtccctcgacgcggcggcggcctcactgagttcaccttgcagctacggcggcagagcctatatggagcatggataggagcccgagctgcgtgcttggctccagcgatctccacgttgccgacacctcaacccttatatctataccacgtct

SEQ ID NO: 47744 - DNA, 444 bp, Oryza sativa
  unsure (1)..(444): unsure at all n locations
agctntgtttggtgcggttgccacttgctctttagtatcatcctaccagtgagtgactggttatgatcgtacgggttgtagtattattattggtgagctgctggtgctctcttgagtcttgactagtggtcattgaggattgggatcaggtgtagtcccaactataactgcacgttaggaactgcacaagattttatccattcgattnttcaatggaaggtctaaattaaatgctacaatagccttgatataatattttttgttggattatttgaatgaacagtgtcctatcaaatttgggcctttggatttgcatcctacagttatggtataactgcctaagttgcagtcatagtaagggactgcacaggtaccatatccggtcattgaatgtngcctggaagagaaattgagttggcaatgattacaactgttctcgatcat

SEQ ID NO: 47745 - DNA, 430 bp, Oryza sativa
  unsure (1)..(430): unsure at all n locations
gtatactcctggaagtggcatgttcactactcactactgcccatctgtgacagttgaaattcaaggggttgattttccagcgaacctcattcttctcgaatccaaggacctagatgtcatacttggaatggattggttgacaagacacagaggagtgattgattgcgccagccgcaccatcaagttgaccaatgcaaaaggagaggtggtaaccttccagtctccagtgccgcataatccaatgatcagtttaaaccatgctgctggtgaagaacaagatgtagcagtggagaaaaccactatgaagctggaggatattcccatagtcagagagtatccagaggttnttccggacgatctgacaacaatgccaccaaaaagggatatcgagttccggattgacttggtacctggaactgcaccgatccac

SEQ ID NO: 47746 - DNA, 454 bp, Oryza sativa
  unsure (1)..(454): unsure at all n locations
agctnggaattaatccggcgtgcgtgcgttcgtgcgtgcgtacgtgcacatcagccgctggaacctggaataatccgggtgttcctctgtgccccaccccgctntgccgcgagccacaagaacgctggaaatgtggccacttcttttcccgaaagctttcacgacgatgtggaatccggcaaagccggcatgattggtcggcgcgacaaaattaaaagcgagggcgcaacgaaggcgagacgcactcaccgtgtcctctctcgccggcagcggcatggcgatcgacctcatcgcgtttcaacggaggtcatcacgatcatgatcacagcttctcgatccttcggcgacgcgaggataattgacctagctaggcttgggagcaacattccggtgatattatggcttcgggataccttgtttagggtggctaaatggatctggatgggggaagaat

SEQ ID NO: 47747 - DNA, 483 bp, Oryza sativa
aaacttgatgtagaactccacagttataggatacatcatgtggtgaatattaactaagaggattcggttgggttctgactcctgaggcccagcatctaacaagcaccaagacaagagagaggagagagaagaataaatagagaggaatacgcagatctagttgtaacaataagatacagtagatacggtatgcaatttaactcaactatctgaaagatgaggagaaatggaatagctaatcaccctcccagttctgacacaataagtgtgtaatataaaatattcaaagtcaaatattgccacacttctattatgagcagtgattcaagtttccggttttcgcagattaatattgttttctggctctagaatacacctatattgcattactaactgtatgcatcttataccatgccatttgagaagaattaaaccattagcacttaagtgctgcgatgggagggaattaaagattccactgag

SEQ ID NO: 47748 - DNA, 455 bp, Oryza sativa
  unsure (1)..(455): unsure at all n locations
agcttcagcccatgatctccatcanatctgtgattaccccccagatgcctagccatgagaaggaatgaacctactacaagcgacggtgttgacttcaaggcccattattaaacacggcataagtgtgttctggtttatgttagcaattgatatcggtgccaagttactcacggattggatgaacacaacaatgtctttggacacacatgccttgttttataacaaaaccacgacttcacacacatgccttgttttataacaaaaccacgacttcatcggtaccacccttgacgtcgaggcccaacatcaaacacttggcatccgtctccttggaacaatcaagggtttcaaggtcagggttagtgtcgaggctggtgcatttcatcgaacacttccaaggtatgactttgggaaggtgcttggtgacaatgtangtaacgtgatccttgtcctta

SEQ ID NO: 47749 - DNA, 455 bp, Oryza sativa
tacaggccatggtgccaattgatgatattattaatcattaactcaagttctgtaccatatgttcaagtaatatggttgtcatgtggtacagggacctaagttttaacaatatcacagggaaagtttctcaatccatcctgaatttgggaaatctacagttcttgtaagaaattctttttacattaatttgttgatagaagctcctattaagcagatgaacatgttcgatcatcttgaattgtgcccaattcacgtttcttgtgaacaataacctcgcacgaaggttgcctgatggtataagctcttccttataagcgatgtatgtcaaatacaatcgacatggcattatagcacaatttactttcataatggaatatattaactcctggataatctaattctggaatggttacagagaattttcgtacaatcaactcactgggagcattccttct

SEQ ID NO: 47750 - DNA, 457 bp, Oryza sativa
  unsure (1)..(457): unsure at all n locations
agctgtgcctgtttggagagatcgtcataaattattaaagtacgtcgttcacggtaaataaaatactcagccagggctgcccccgtataaggagcgaggtattataatatagcaagggaatccgccatttcagctactacaatagtgtattccatggccctctcttcatggaaagtagttaccacttgagctatgaaggatgcctacgagagcgacacggtagtatgtttgcaaagttcttctatttgcaaagaagatctagaactcgtagtcattgagatgggaaacaaaagaaagagcacaaagaanaaaaggttcacatatttacatatttatntttaatggcatatcgatgtgcaaagttntgttctgaaataagacaattcatatagctgacgtctcacttcagaacatattcatatatatatatatatatatatatatatatatatatata

SEQ ID NO: 47751 - DNA, 414 bp, Oryza sativa
ctttggaaaagaaatgggtggaaaacccaaaatttacgtgtaccaatgatagtacattcccctgtgaggaatataatggcaactcatatatgcccggaagttaaccttagaattgaggaagttgacttcctagccaaaccgatagtcctagactcacaaagcttggacatcatcctagggatggattggttggctaagcacaaaggacagatacattgtgccgaaaggtccatcaccttgcaaggacctggaggaaagcaagtctgcttcaccactaacacccctaccgcaagtcggtctatcctaacctatttataagtcacctccttggagtcggtgcccatagtctgtgaatatcccgatgtatttcccgaagaattaacaagtatgccaccataccgagagattgagttc

SEQ ID NO: 47752 - DNA, 406 bp, Oryza sativa
  unsure (1)..(406): unsure at all n locations
taagtacaagaaccggcggatctctggtgagagccccgaaaatttatttttctctaaaaaggaagcccgacaagaacaaantaccaaaggggtatattttcctttatcaagaaaactacttgggtcgctgattgcgatctttgctggaaaatccatcggtttcgctccagccaaacatgccaccaagtggttaacagggttcctatgatattcttcttttcacttttaagcccaatatgttccatctccactaaaaatagaatcccaaaaattagttagtaaccacgtatgattggatgggcccatgtgtggtaccgatcttttttttagaagcgcgtggtcagatcagatagatcactcccctgctgtgctgcatttctaatgccgcgagctctgcactgcacat

SEQ ID NO: 47753 - DNA, 482 bp, Oryza sativa
acactttatactcagcttgaagcattgggaattcacatgtctcttgaaatttgtggtgaggatgcgctgctccagtttccgttcctgttgcgcacacttggttaagtggagcattgaccatcgcggcgatccttcttcatctctttgttctactaatcagttggccgtgtaagaatgcatatatattacaggtatggagctagctatccaatacaccggaagtgcagcttattgcatgtcaattgaccaaacgagataattagaatgtgtatcttgccctcctccctttgcttttacttggttcatgtttttttttctgaatttaaatatctctcttctagaaaagagtacattgatatgagaactatgtcttacagggactgatacaaacctttccagcccaattatcctaataacagaatctttgctgtgcgcagctcacttggatgatcttagcctagatgatcacctatatcacatgt

SEQ ID NO: 47754 - DNA, 426 bp, Oryza sativa
  unsure (1)..(426): unsure at all n locations
gctcactggatcacagattcactgtctctatgtcagnctgatctcgtccttgcagtatttgctacagtgatagttacggcaactgataactgtttttctgcgcactatagtctctgaaactctgaattatcgatgtgaattcttctgaattttgcagcaagtcgacaagggtgatgccgtatatatagtggctcgtttagtgcagggttaagactaaatggaattaagtgtttctcaaggtttatcgtggtgatgactgatgaccaagagacagtgtcacatgatggttctctgatgtgttcctttctcactagaatgagactggatttctatgaggacttttaatgattataatcccttgtatcagcatgcccacatatgctgctaaaatggactctcgttgagctttcatgtcataccttgtga

SEQ ID NO: 47755 - DNA, 470 bp, Oryza sativa
gaacagtggtttaaatatgagagactaaagcatcgttattgtcttataataacaaaatgcacgaagaacacggaatcaggacctgtaattcttctggaaatcttagcaagctcaatagctttaagtttagccaattttccatctaactctctcttatccagagaatctgaactccactggaaaagaaacagccattactgggtcaacatgtcatatcattacaagtaaattgaacaaagtatgacaagattcaataacatgcctcatagtcctcccgtggacatgcacagataaacacgtcttctatggcaataattatggcaccccacccaagtgttttccatggaatcctgacgcttagtttgccaatccgtcctgtcaggtagtataacagaataattagaattcacaactacacagggcacaacaatctatcataaagtaaaggcgatggaatccatataaacagc

SEQ ID NO: 47756 - DNA, 453 bp, Oryza sativa
  unsure (1)..(453): unsure at all n locations
ttcttcataaaagaggggttgtcatgccaaaatttctattgaatttattttggtgattacatacaaatcggaggtgcctaaaatgttttcaacttcatcctccaatgtttttttttgtcatactacatatgcacctatgttttgcacaatttttttgtctccaaaatttaattgtaagttgatgagagagaaaatgtgtgtggggaagaaagaatatatagaaatttagttcatttgctaaacaaggttttataaaatagttgagaaggaaaactctagtgaaagttaatcttacataatagaaaacaaactaaaatgaacattaaaagaagtaaaacacattaaaattagtttaaaactttacaaatagttnttaagaattattcggtgtaatatcttatgaattttgtatgaataaagatatcttataantattggatgactgtcattatt

SEQ ID NO: 47757 - DNA, 396 bp, Oryza sativa
  unsure (1)..(396): unsure at all n locations
tccggggtagcggttagtatttatagcaccgtgtatctgtctgaaaacggcaagtgcgatgttctctcggaaatagatatggaaaattcgaaacattaccaaatattctggacttgtgaggcatgtgttaacaaccaaatttggtaatctcagtatcgaagaagaagattagatcgatacagaatcaaagacaaagatcgtttcggaaacagagcaagatttggctgaagtccaaatcgggtacgatcaaagacaaccgagttctagtcggacaatgtagccgattaagctgaatctgacaatataacatgatacacgtcatcgggatgagttaatatgcttcatatggattgccacacacggattgagtcttgagaanggcaatggatttattaa

SEQ ID NO: 47758 - DNA, 420 bp, Oryza sativa
  unsure (1)..(420): unsure at all n locations
aacaaccacctggttcgccagcctctccggatggatgacctcacggatgaatccggcttccagaagtcgcgccacctcctcgcggatgaaggcttgacgttccggggcctgccgccgcactttctgccggaccggccttgcgcccggccgcacggcgagacggtgctcaatcacctccctgtggaccccgggcatatccgtcggtctccatgcgaagacgtcagcgtttgcccgcaggaaggagacgagcgcgtcttcctatttgccgtccagaagaccaccgatccatgtggtcttggacgggccgtcgcccaaggcaacctccttgaccgggacctcgtcgcctgtgatcatccgttgcctcggggtggcggnggcggaagcgccaagcctctcttcgccaccctcgggcttggatgt

SEQ ID NO: 47759 - DNA, 458 bp, Oryza sativa
  unsure (1)..(458): unsure at all n locations
ngtagtattgcagatgctcgatgtaagctcaacccaagttagattgctgccagaaagtgttattcagctaaagagactgatgcgccttgttggcaatgaactcatactgtcagatgggtttgctaacatggaatctcttcaggagttgggggttcttgatgcttgcaactgctccataaattttgggaaagatcttgaacttctgagcaatctgagggtgcttcgaataatgtttaggtgtgaagaaattactagtgatccagatgctagaaagaaatctttgatgtcatccctctgcaaacttgggggtaacagccttcggtctctgtattatcagagctctaccaccggtgtcgattgttcagcagattcatggtgccctcctcctattctcctccaaaagtttgagtacagaggtgttcgctacttcttcagctntccaaaatggatcatacact

SEQ ID NO: 47760 - DNA, 461 bp, Oryza sativa
  unsure (1)..(461): unsure at all n locations
ttctaacactgatggcttgccaaaacctatcatgacttcaaaatgttctagttcagttgttatgcttgctaggccagcaatcagatctgatggtactttcagcaagaagctgcattcctctgtagaaggtcagatacgtttcttgctaaagaagtgtcggacacttgtgggtctagagccagggcatattgtttcgaggggtgtcagtaatgtgagccacctacctctgttctcacttgatacatcaagggtcgttgcactgttggatcggtcaattagtaagaaacgtgagccattggatatcattgcaggactgtttgaagactctttgacatccaaatcatcattggatgtttcttcgctggagaacaattgccatccagcaacccatgaagatgttcagttcatcaaggattntatatttcgacaatcagatgggctgagaggaagagggggacact

SEQ ID NO: 47761 - DNA, 442 bp, Oryza sativa
  unsure (1)..(442): unsure at all n locations
ngctatacaatattaatatattcgaatgctccgaatattcctgcttactctgattcttgctgcaatgaaatattctcccttatcctttgccctactacaagagagcttgccatccacatcagagctaacgtgatggcgtcacctcatataattcacttccggtcttaattcctgtgatttgctgagtagcaatagtatatgctcgaatgttctgaatatttttgtttattctctctattggctatgaactaccccagtttcaaatgtttcaaggcatgcattataactctcttgtttcctgcatcttacttttatgccaatagcatggactggacatatgtaatgtaagcatgtgctatacaatactaatatattttgaatgttctgagtactctggtataccttgtttttaatgaaatattgtcccttattcttaatctta

SEQ ID NO: 47762 - DNA, 358 bp, Oryza sativa
tccccaatggaagaccacccctttctttttcaactcattcaatggtgtagcaaaggtactgaaatctttgatgaaacggcgatagaatcctgcaagaccaagaaaactcctcacctctgtgatggtttggggaactggccaactttttatgggcttcaattttgtctcatccacctcaattccctgtggagtaacaacatatccaagaaaagaaactcgttccgtgcaaaatatgcacttttcaaggttagcaaacaaacgtgcatcgcgtagagcattaaaaatagcacgtaaatgatccatgtgttcatccaaagacttgttgtaatcaatatgcatcaaagaaactacacaaatc

SEQ ID NO: 47763 - DNA, 440 bp, Oryza sativa
  unsure (1)..(440): unsure at all n locations
agcttatgaatcaatgtttattggnatgtacaggnatattactatntaactgaaaattcacataatgttagcacaaatgtttcaagaaaagttgaccaccgaaaagactgcaaaatctatttcagaaaggagttcacanagtttttttctgttcaaacttattatgatccaaacattatctatatatttcagccccactgttgtcgaaattaaaaacttgaaaccaaaaggcaatctctctatccatggatgcacattgccaattcgccttcttttcagaggagcagagtggtatggcaagcagctgggagactgaagaaatggacagccaaaaaatgcagagacgatgggactgcaggggcacgcctgcctgaccaaagtggcctttggagacaacaagcacacactcccctactactgaaattcagataatctnttta

SEQ ID NO: 47764 - DNA, 456 bp, Oryza sativa
ggatgccctcttctggaatcggtatgcctaactggcagttctattcattcatatttgaagtgagcatggatctttgtattaatcgcggcagccagccccgacaacgtgaccccgcactgcctcccctccctcctcgacctcagcagatgctgccggatcgtgggagctggccccttataacgcaaccccgcgccaagcagcagccgatcaccccgccgcggcagaaggttgcctcgaagctctgacattgaaaaggtcattattgtattaaatacttctgcgtttgatgatttttttaaaacccaaaaaatagcaagaagtgacctgatatggcagccttacggcataataagtatatagttttgtttgtggttttgaattatcaacattgataactgatatttatttcatgcaatactaaaacttgagaaaaaatgtgtatgctgcactactaat

SEQ ID NO: 47765 - DNA, 386 bp, Oryza sativa
ttatctctctaccttctcgaggaactgcatgagaaatttaattctgcacagtacacattgaaccttctcttgtcattcagattccacagatcacaatttacttctatggattgattcatggactggttgtgaagagatagtatcaatgcatcgttgtgaagtatagtacttcacaagtagaacctgaatatatatctttttcacattaataatactaatgtttaagccatatttacctgaacttgtttgtaacaacatgcaagttgaatgtgagggccggagttgctcatatgctgcttatatgccaccttactcattgcaatttgaccataatacgagttaagatttaaacactactcctactattccatcgtgtttgtcttcat

SEQ ID NO: 47766 - DNA, 438 bp, Oryza sativa
  unsure (1)..(438): unsure at all n locations
agcttgctgtggacttgagaacagcagtctatgttgtcctattttcgccgagaccctcctttctcaactcgtaaaagagggttttatcctcatcatgtcgccctccatgagaacaacctgatatcagtgcattacacagaatcaaatccctatggaacatccaatcaaacaccttccttgcatcgtccaaaaaatggttctttgcatacatatccacaagaccaacacctatataatcatctgaatctgcattggctntgatcatgaacccgtggatttgccgacccaaatcaaatgccccagcaccagaacaagccttcaggatgctagacaacgtatacacattgggaaccagtcctgaatatttcatctgcagtaacaactctatcgcacggtgatcatgaccattaagtacacacccagaaattaaagcattcc

SEQ ID NO: 47767 - DNA, 421 bp, Oryza sativa
actccgatttctactctattcctattccaatagcttaagactactaaactaacttgagagaatatgatagagctcttgcttgacgtgtgtgttgaagtgaacagagtgaactccttttatatgtaggtaatgacggctgtgacggtctaaatggtcggtaataccctccaaccttcattatggatcaatcccagccgtgcatcaaaaccttgcatgcatcggcgctgcgggaggttcgtgcaaaccccctagttttggcgaactatgggctgtgccaaccagcccaagtttcggctggtggcctcctccattgcttcacatcgtatacttgtgaatattggaccaattcatcgtgtcaattctgaggtcttgacccatttatacataagtctgattctgaacatcgtctgattgatcgatc

SEQ ID NO: 47768 - DNA, 357 bp, Oryza sativa
ttccttcttttttgtggtcgaaagagacctgcggctcgatttgacttaagagatgcctttcaataactcaattggtgatggaccgacctcccgggtcagatcattacttctcggctccaagagccatttcacttgattaatcggctcccagagcccttttcattttctccgactcccagagtccagctgcccagcagcaaagcaatccgctttctcttcggaagcctagtctataatgcccgcagacatccggaatcacacagattcgtttctgaccactcaagtcatccatctggcacataggctgatctggtacgattccatccacaacacttttacgaacacagggaacaatct

SEQ ID NO: 47769 - DNA, 400 bp, Oryza sativa
cttattacaatctctcatatatacatctatggtattgtaatacttttcgtgtatatgagtacctatttacattatgttcatgttatactgaatggacgattagcttatctgggagatgacttggtgcgggtatatcgtatgcttatgcaattactctatgtcatgacgatgatattagagtagtatctggtagtttagacgtggtgtctagattacgggatatcattatctgtggttatatattgcggatgagaggtgggctgctgatggtgacagctcattacgggtattcctccacgcctatatgtaatcctaagttaatttcctgaggagggtattcctccgtatttatccctgtgtggatagtcatgacgggctgtcgtaaggaactcggcaatca

SEQ ID NO: 47770 - DNA, 458 bp, Oryza sativa
  unsure (1)..(458): unsure at all n locations
acctgctgcatgcaagctntgcaactataaaacatgtgtaagctctagcctggaaattacttgaagctgcgccgttgacatgcggaccccacatgtcatcctaaaggaccgcggtatactgagtacacagagacggtccacgggtcgacggatgcagatcccgtgtgtcaaccgaggcgagtggccgacaaacggactccactagacaccacacgggctgcacgcgtggaaaccacgcggctaccgagcgggcacactaacacggtcaccacacgcacaagcgaacgactaccgacaccggtacacaggtaccggggtcgacaaccgcacgacagacacgggcgacaccgataggacgaggacggggcatcgagggagagggatccttaccaccacgcgacgaggcgtgggaacgacaacgacgaacgggcgcggcggagacggtcgggaacgacaga

SEQ ID NO: 47771 - DNA, 402 bp, Oryza sativa
tcttcactcttcatgagctcgtcttacctgatgagtattatcttgcccagtaaagtatatcatgacaccaagatgagcgaagacacactatagaatgtattgcgagttcatgctgacaagagagttcatgaaacccatgaaagatgggccactgactttcttctttgttgttcttcctgctctatatccctcaaggaattggcttatttgagaagcttgatcaccttcctctaacttctctgagccttccacctttggcagaaaacatttttggttaattacagggtgtaacatgttctctattattgctaaccagccaagcagaataagatgtgtcagaaaagattattagttgacaggaaaaaacttaaaactaaacataatacttctatgaatatgaca

SEQ ID NO: 47772 - DNA, 436 bp, Oryza sativa
  unsure (1)..(436): unsure at all n locations
agcttgntattccaaagnttactttggcttgagtctagntctgtccaaattaatacagtgaagtactgcatatatatgcttgttgtaatagcttggaatttctagtcttgttaacttaacatgtttcattttctaggtgctggagaagataaacaacccgcattatctctaccgcatgaccatcctgcaagctatttcattgctggcccctgtcatgggtgccgaaatcacttgtcaacagctgctccctgttgtgattaattcctcaaaggacaggtgaaaaatttgtaatttgtaaatgtatagtttacccatctgatcaaggccttattaacaaatatttttctaaatttcagagtgccaaacatcaaattcaatgttgcgaaggttctgcaggcacttataccgatccttgatcaatctgtgaagtgcagta

SEQ ID NO: 47773 - DNA, 78 bp, Oryza sativa
  unsure (1)..(78): unsure at all n locations
acacccnctaatacattcttgtgttatcttaagtaactgctactaccttcgtttcaggttataagactttctagcatt

SEQ ID NO: 47774 - DNA, 364 bp, Oryza sativa
agcttgacccatcttttggaatgcctttctctagagcctatcctttgcttcagccggaaatgtgaaccatttctccattgccgtccaagcttgctctttctctgcttctgagaccttgccgatatctttatggaggatcccgaagttctcacatgccgccagcccgcagcagttaaaccatcttccaatgagtcctgggcgccgtgggcctaccactagcgtcaatctctcttataactggcactgtggtcggccatatattttgtgaccggggatttctactcgacctacttgcacttgtcttgcccgacattgatgtatgttgttcttgcggcaattctgcagcacaaacagaaagcaacat

SEQ ID NO: 47775 - DNA, 460 bp, Oryza sativa
ctctagcttatggttctacatctacatatttatctatatcctatttgatcaatcattaataatttacatctattatattgataaaagaaagttctataaacctattccatatcacagttcacttcataactgcatgcattatcaatggatgaaccatcatacttgacatttcatctatgttattttccaaccaattgcatatgaaccaaatcaacttgctagcctttttgcaaattaagcagttgatagatataactttctttttatcatgtaacatgatcataacccagtttaattccatagcacacaacacatgatgatattgaatatgaacagacacacctttgcgcatataagaagctcattttttttaataaatatcgaaatgtgaaacgaatcaagtcaattgtatcttgccacttgtagaatattacaaattatattaagatgttaacaaagc

SEQ ID NO: 47776 - DNA, 457 bp, Oryza sativa
catcacaatacacccgattactcttctttggatcttgttatatcacaataggagctgatagtaagcgattcttcaactctagaaaattatgatcacattcttctgaccacttgtactttacatccttttgaagcagtcgtgtcatgggcttagcaatcttggaaaaattctctataaaccttcgataataacctgcgaggcctaggatactgcgaatctctgaaactgtcttcggttgtttccagttgggtacggattccacattactaggatcgacggcgactcctccggctgagatgacgtgaccaaggaacttcacttcagacaaccaaaattcacacttgctaaacttagcatacagatgatggtctcgtagcttctctagtgcaaggcgaagatgttcttcatgctcttctttggttcgagaggagataagaatgtcatcaataaagaccac

SEQ ID NO: 47777 - DNA, 487 bp, Oryza sativa
tacgtgacctataaatactcagctttatgcttggcactcctttattaaacatacatatcagtttgttgcatgatatattggaagtgcaaaaggagtcatggtcttctactggatgttctattatcgcaaatgcttggacagatcggcgtggaagaagcttaatgaatttggttgctcactgtgctagaggtatgtgtttcattgatgccattgatgcttccttggaggttcacgatgggaagtacatctacagcttggtaagctcttgtattgatgaaattggtcctaaaaaggttgtgcaggtggtcactgacaatgcttcaaataatatgtctgcatcaaagatgcttcaagtgaaacatcctcacatattctggacctcatgtgctgtccactatattgatctcatgctagaggatattggtaagataactatggtacataacaatattcgagatggaaaggctatcacaaatttactctatgc

SEQ ID NO: 47778 - DNA, 456 bp, Oryza sativa
  unsure (1)..(456): unsure at all n locations
ccgagcgtgcgcgagtacagttcttggaaatggaagtcgctgtgacacagtggctacaagtacgtgtactttctattctattcggtttatggccatgcatgaacagtgcccagccgcttcgcggtgtagcttagcttagcttccatatcgacgagtacgtacgtaccaggtatatatttccttctatatatattggctctgcttgcaacaataggctatatagctactcctaccttccgggcctctggaagattaagtgtgtgtttagttcacgttaaaattagaagtttggttgaaattggaaagatatgatagaaaagttgaaagtttatgtgtgtaagaaagtttagatgtgataaaaaaattaaaagtttgaagaanaagtttggaactaaactcggtcttaacacgtaccagctatctactgtactgtagcattctagcctgcaacgagtc

SEQ ID NO: 47779 - DNA, 456 bp, Oryza sativa
  unsure (1)..(456): unsure at all n locations
attgtactagataaactaatgttatttttttgttgccctctttaagtatgcaccacttgatagttgcctcttgttacctgctgtgtcaagttcatgtgaatgaaacagctggcccatttcctgtccagaaaggcttaacatcaaatactcaactatatctgacaacgcttctactcagttttctcaagaaaaatttgattctgacacaaagcactggaaggaccttgtttcagaagtatatttcaatgagtttgcagttaattggtctaccgttcgcaatgtcatggatatgaatgctggttttggagggtgagaaaactttgattcttaattttcttcaatgggcttgttgatatttcacaagttatgaccatgtctttcaatgtttgaatgctnntgtttgatcccatgaaaatttctgtcctttgttntcctgaatagatagactgttcattt

SEQ ID NO: 47780 - DNA, 467 bp, Oryza sativa
  unsure (1)..(467): unsure at all n locations
acctgagctgcaacttcttttttgtcttaaccatgtttattcctggctcttgttgaactctgatagntgcaactttcaaattaagaattattttcagagtcttttattttagtattatcttcagagtctccctgagtgaattgcctaattaatgaatatagagaggttttgaaatcaattaccgaatgcattattggtacaagcctaagtagattctaaaagatgcagcattctgaagtgcaagactaaaaccaacagtggtcttaactgctgctggcaacagtaacaacctataaccacgtatattgatgccatggctactaacctcattatcaacatgccttgaagtactgctgactggacactacccctcttcttaagtgttgaagaattataattcaagctctggcatagataaaactagggtcagatttaaatcataatggttaattgacagtcatcttcat

SEQ ID NO: 47781 - DNA, 446 bp, Oryza sativa
tgcaaaaccagatcatctctccatcgaatatgcaggtgctatatatgactggtttgaagtacaagcattatcaaaaatcattagatctacacatggggaaccaggataaaatcaaatccaacatgaacagggggcaaatatataagacatgcaatcagtagtgacatgtactatatgggatcaagatgcagagctcccttcaatccaaagagtggtcagcaaggagttgattcggctccttggtcatgcaaaccacaagcctatctcttttcctatgagatagaatagtgggaaccatgaacaagcagctgtatcacccttcagataaacctttcattggaacgaaaggagctccacttcataaccaatacgcatccacatattctagaaacaaccatcatagaaacataaccacataccaagagagatctgaaacatatagtata

SEQ ID NO: 47782 - DNA, 405 bp, Oryza sativa
gctgtgcaacagcagcattattatgtacagcagaatttatcaaatatccatttgaccctccaaaaacagctccaacagcagccccatttattatgcttggtgcatatagcccacccacaaggccagatcccttgcaaagggcagttgcaactacctttgcagctgcaagctgagttaacaaccatataccaggagcagaagcacttttcccagtatgtagtatttcttcaacatttgtgaaaccccagtatagaatgccacgatatttgagagctatgaggccagctcccagtccacccaaagcagggtatactacaatatgagaatcgtatctttcttttaagtatccacaaaaattcgaaaaccatacaaccaaccgcgcaataccacactgagcgctccaca

SEQ ID NO: 47783 - DNA, 365 bp, Oryza sativa
tttcggccttaatctcagcttagcgccactaagattaaattcatgtggtccttttaaggcgtgtgtactaagatattggcacgcgtcctggaatgcagcttagatgtctttttgttgaagaatgagtctttcaacatctctcatggattgacattttgcgaagtttctataacagcagtcagttctctttggttcaatcctcagcttcatatctcatattctaatggcggctgttgggagttgttataaatgataaactgatacttgtggagcttctgcctttgtgggcatattgctgatcagaccaatggtttgacattaccacttttcttatgcagtatttcaggcactcttggccggtttgg

SEQ ID NO: 47784 - DNA, 412 bp, Oryza sativa
acttgatcgaagttcatggcttgtaagatatgtccaaagacatcaattctcaggcccactttgtaatccgtccatttgcgtcgcgggtatgaagtatatccccgagtggaaacgatgtgaccaccgtgaccgagtgactttgaaaatagtgagataatttcctgacggtaattaagacaccatataataacttttgaacctgaggatatcttgtcttggagtcagccaaaacctcgctaacgaaataaattggtcgttgaacttttcgaatatggccttcctcttcacgctcgacaaccaggaccgtgctcacaacctgtgaggtccccgacacatataatagtagcggctcttgcgaatgtggtgaggccaaaactggtggaatagtgagaaagttcttgaagtcttcaaa

SEQ ID NO: 47785 - DNA, 396 bp, Oryza sativa
acactgatagcacacactctcgagtctgcgaacgcagtgcatccttacttgttgtgggagctatggattagtaggtagctaatttgctaaaaaccaatgagtacaatgtttatatccactttcaacaagaagccatacaaaaagctaaaagttttgagaactgacgagtgacgaatcgcgcatgtgaccgtacctttttttgcatccgagagtattgtcagtagtaaattttgggatcaggcgattcggtagttaagtacggttccaaaccatgtgcttcctttccttgccggatgattgtagtgataagtgataagctgtctgctttttgcgtcagcgccacgttctccttgctgttgcgcttccaccgttgtctcgtagaataaagggaaatct

SEQ ID NO: 47786 - DNA, 341 bp, Oryza sativa
  unsure (1)..(341): unsure at all n locations
aatgctaaattacctcacttcagtttgccttctgaattctgctgttcagaattcttctacttactttggagcgctcgtcggacgggtagccaacagaaatgccaaggcgcggttcgtgctcgatggaaaagcttatcatctgtatccaaatgatggcaaaaacacacttcacggtattcttgagaaatttcccgaggtgcaagaaattcatggtgcatggttcatctctacgaacagtaagctaattntatctcatttttctgaaggtgccacacgggtttcagcatgtacatggacagngaaggacatgttggggaggtgagcaccatacatacactgac

SEQ ID NO: 47787 - DNA, 409 bp, Oryza sativa
tactatttacggaaagggtacaaatctgtcgacagattttttttttatggatatctttcgatttctggtccattgatttcgtgattagatccgtgctggttgccagagattaaataacacagcaaactgcaagatcggggattcgatcgtatgaccaactggtcgcacgcatcacgccttatccaagtgagcagttattcaaatttgaactgaaataaaaattacacattagttaaacagtaattacatataacttacactgattacatttgaaagattgttctaaaaaatctggtgctagaatcttagatagtccctaatatttatgactagagaaagtagctcatccattatacgaccggactttgttcaaaggtcgatcttatcttcgaatgcttatacaattctc

SEQ ID NO: 47788 - DNA, 369 bp, Oryza sativa
  unsure (1)..(369): unsure at all n locations
agcttattgagtttatatatacacaaaatctctcgtccatagaatttcccactaaagaggtatgcccagattagtggacacttttctctaatgccgacagtctgacaagacactcaactgtccatgcaaaactgtatcaagctacaagcacttcgtagcgcattacgcacatggtgtgaaaagctattaagttagccttccaaactgaccccatgtcattcggaatttccaacaaggagtaatgacatttntactggaggctgctcagaagccgggtagacgcgtgagtcttcccgggaagtcactttgtgagagctctgggctgacctatgggcttcaaacttgcaggactctgcatacctaactagg

SEQ ID NO: 47789 - DNA, 237 bp, Oryza sativa
  unsure (1)..(237): unsure at all n locations
gctgcattanagttccctttgattaattatcatataaaacttgtataagactgtaggaaantattttaatcgcattaattatgcattaatgaaagcatgaagtctctgttccaaatagagactggtccactttctaaatagtgtctggtacacttcctacttcattcattaacttctaacgaaatccaattggaagtggaccacatactatctggaacagagacttcctgcagtggg

SEQ ID NO: 47790 - DNA, 475 bp, Oryza sativa
catgttctaatactttgttgttcatgctagtgttgtctcatgggcataatgctcatcatttttcaggaactatcaccagtgctatttactctgatgaagagcactgaaccgtttctggatgaatactacatgctggatttggaggagacgatgatgcaagcaggctttgttaatgttcattctatactgacagatcccatgcatatgacagtcactgctaccgtgcctttctgaaacatctgatctcccactgaaattttgttccatctcaattgtgattgtggatgtatactggtaaacaaaagagttgaaaaactgtacccttgttcataaaatatgacgactgctgtaccaaccacaataattacattgagtcgtgagctatttgttcgagatatttaattaactatgtgccacatttagatgtgccgtttaacaatgtgccactagactcagatgatgtcatatacatgag

SEQ ID NO: 47791 - DNA, 446 bp, Oryza sativa
  unsure (1)..(446): unsure at all n locations
agcttctcgaatcagtntagtacattctcatcttatgaataggtacgccaattgctttattgactgtttatatcgtttaatgcatcaacagctttgacagggccatctagtagcaaggtatttggtacttcctccatcctagtaaaatatagcaatctatagtatttgattagacagctagtattagtacttgttgtatctaattcagaatgggacacttcctattacaatgaatctggacatgttggttatttctgtgacggagggagtactttggaatggaggatgatttacatcacatcagaataatatattcctccgactgagatgtggtccaattagggcttttgaggcccctttcttttgtttgctagtcggagtgatcatgcctatttcccatatctgnttgccctcgggacatatatgtgatgatctgaaatgttctt

SEQ ID NO: 47792 - DNA, 419 bp, Oryza sativa
acccaagaagctattaaaaactttcagtcctcgcagacttagtatgaaaaccaaacaatgctatgatagaccaagtaagcaaattaaattgataaaatatcacactccattattatgatgatagcccccgactgacaacgtcaagaagaaaacttgatgttgacagtcaagataaggaagtacaatgataagcttaagcgtataaacgacgaagatgttcaatgttccaagagttgtcaacgagtgtaccgtcttcgcgcttgagtcgataggaacctggtcgggtgacttcagagatgataaatggcccttcccatagaggagataatttgtgccgatctcgtgtagtttgaattttcctcaaaaccaggtcgccgactagaaaggcacgggatcgaacattgcgattatgataacgt

SEQ ID NO: 47793 - DNA, 429 bp, Oryza sativa
  unsure (1)..(429): unsure at all n locations
agcttgatggatntgngcatgcatntctggtcaacaatctcagtgtgccgttttggtgtgtagatagctcttggctctatgttctggaagagcaatgctccaatgctctctaatactatcaatattatcagagataaattaatttactaatacaatgattaagatctactttgtcatttatgttttttatctattatcatccattgcgctggcatcgctcatatttcatcgaaaaagcaaaaaaagaggagtacaaggtttagtcactactaaatgacgattataccctctgaacctattttttctgacaataatgtttctccacatttttactaccgctaactgtggtggtagtataaatagatattaacccttcaattaaatgagatcaatggttcaaacggacttctagtatcagtagagagtacc

SEQ ID NO: 47794 - DNA, 408 bp, Oryza sativa
tacatggtaccagtgctgccatagttacttaatgttacaccaccaagaagaacagactttggatagcaatcaccagttccttcccagtaggcgaaacccttacacctgcagtctttcaagcatatgttcttgcagaatccaagaggaacaaaacgataaacactcagatcataccccaagaaatcagtattgcggagtgcaacatatttcaccttctgtccatcacaactgatgttgacctttgtgctgcaacctttgctccggtcacttgggtcgatgatctcgtaaccaggggcacaagcacatgcaggaacaggtgtatacacacatattccattctgaccgcacaaaccgcgtactttgcagagctgatgaaatgccatccatgtcactgaccatgttctgtct

SEQ ID NO: 47795 - DNA, 455 bp, Oryza sativa
  unsure (1)..(455): unsure at all n locations
agcttactttctttgagatntgagcaagcgaagaagaagaanaatcacaacgagtgcacaggtgaagagattcaatcccgttttctctgcttcacggaaataacatattacctcaggttgtttaaaaattatgtacagatgtatttacatgtaaggttttgaaagttacatacaactaacattgtatttacatgcaagtaattacactgtatttacttgtgataaatttttaggagaagttttatcaatagatatataaactaatgccaaatctcgatgttgtgatactaaggctatgctcaacattaacatggccagggatcaatacaatctcattgtcactaatatctagataaactacccnctccctcacccacccttctcttataatcatgttgatgtgatatgacgttggattntgtgaaacaattaanaacataatatatcttgtttca

SEQ ID NO: 47796 - DNA, 380 bp, Oryza sativa
  unsure (1)..(380): unsure at all n locations
tttagaattttctagattgttattaaagatggtccgcatgtcagtctctgccaatatgtaaaaaggcccctatatttccacataatatatcccgcagtccctaagcacgtgttaattgaagatttgctaggagttctttaagatttangttattacgattaagtctttggtctcacatgtcattgagagtntttgttactaacaagtctttcatgttttaaactatttgctaagtgaagtcctcagcgcctaatgatgtggggcctgctcgtcagtgggacggtgaccggtggacagagcagcggcggctcagtgagtttctcgccggcaccggcggcgaacggcagcttgtctgatgtggcgactaaaagagaaaatga

SEQ ID NO: 47797 - DNA, 379 bp, Oryza sativa
  unsure (1)..(379): unsure at all n locations
tacactatacccatactaataatttattaagcacagaatttaccatacacaattttaccccccactaaagaataaagagtagtaacaaatccttatccaatctgcacacttaaaaagtaaaactactgaactaaaaatcccaatcaaaacaatgccacgtgttgccctggaacgaaaagctcagctggattcacatactcacactcatacatagtattgctccaatccaagattggcgccccaaaaagaagaaagaaaaagaaaaagaagaagaagaaaagggttggataaattacgagatccttgaggtcgtcgccgtggaggccatggaggacgtcnaggaatcggtcgaggaggagcgcgtcgtactcgatgagct

SEQ ID NO: 47798 - DNA, 428 bp, Oryza sativa
  unsure (1)..(428): unsure at all n locations
acttatactgtccgtacttttattatagtcatgtgcttgttgtgtgtttaagcaattgattggatacaatatcgatgctttttgccacgtaagtgtgcattgttattgaccaatattatggcttaagctgattatatattgtggtcatctttcacgcgggtggtaaatcctttatgagtttatttactcggattttataccacatatgccatatatttccaggtgtggtggaaccatgtgtcttctatggacttaagcacatctgttaaagcagtgtgcgcatggcgtatgcccaatactttggaaatttctttattcacaacatacaagcttttntatagctggtttgctatgtgaaatttcaataatgaagccaactctatgatacactcatcatattttacaatgggtcggtatatcactcggat

SEQ ID NO: 47799 - DNA, 163 bp, Oryza sativa
gcgcagccccaccgactggccgaagacgaatcacaccctcctctcaatggtctagagctacgccaacagaaacagaaattactaccccaagagcagaaacacagaacgaaacaaacagcacctggatcacaacaaagactaggcgtgggaacgaaagccgaat

SEQ ID NO: 47800 - DNA, 447 bp, Oryza sativa
actatgcttatcacatgctatagatgatatggatcattgggatcctgttcgacgtttaaaacgaggcggcgctcggctccatgcgatgccatactgagcaaagtggcgtgggcgcaaatctcggcgtggttcgggccgcatgatatccagcggagaacttgtcggatcttgaatggtggctgaacgacgcccaatgatcgtgttccgtcgggtcttgacagcaagattggctttggattgctggcggagtggatgcacgttaggtgcttgatcgacgctccgccatggctccaggatggagggagcgaagcaaggcatcaaggtgcggctgtggatgtgggtagtggcatgaaacagcggcggcggagtgccgtggttgaggcccggctggtatacgatggatcgaaattgggctatggtgaaaggttatgagattggtgcgtgcat

SEQ ID NO: 47801 - DNA, 464 bp, Oryza sativa
gagcgacgggagacgacgccatggtatcctatgcaaggtctgacactcatcgagcgtatccaagggagagggaaaggttgcgcctcgtctattatctgtggtggcaacaactgtgggaagagaggggaagaacgaggcaccaccggccgcatcatgagagggagaggggagaagggaaaggagcgctgtcggccgcatttggaggtggtgcgcactactcgctctcaattaggttcctccatagatggcgttaactcccaacgcccccctcctagtctaggtggcagcaatggggttgttctgaatcggcgccgtagtggaagacggcgaagaaacgacggctaatgaggcgactaccaatggatgggtgacatgaagtcaaaccgcagcaatcctataataactgagaattgttggagttaacttatttctagaacataccagcctactctctaactctctct

SEQ ID NO: 47802 - DNA, 441 bp, Oryza sativa
  unsure (1)..(441): unsure at all n locations
cgacaagagctcatcgtgtttttctgcatagcataattcttctactaacaaatagaaaagtacattatcgcagccgcctccgctcggccttcgccgcgacgctgccgttcgccgtccgtccccgtgcgccgcctttcgccgtccgccgcccgctcctccgtgtctcccgttgccgccgtgtcttcccgaagcagtgaagagtgagatagagtgagagagagaagagaggaagagtgagagagagggatagtgaagactatgacatgcgggtcccacaattntttaattagaaaacgctgactgggatgccacgtgtacgccacgtagaccataaccaccgcggattatatcgaggggggtaattcgtccgggttgcataatttgggatgaanaatattcagttttatgggtcaggggtaattcggacgaccgcgatagttc

SEQ ID NO: 47803 - DNA, 441 bp, Oryza sativa
  unsure (1)..(441): unsure at all n locations
gcattggactgtgtgtctctaaccaatccatgcccagaatgacctcataacagcccaacggtaacaccttaagattagtgtttatggactccccttgtacccaccaatgacaattaggaaactcctgacaacattgcaagataccaccatccgcgattttcaccttcagaggagtcagcgagctgcgcacaccctgcagtttattagctaacttctcactgataaagctgtgagagcttcctgaattaaccaacatcaagacctcatgtcggtggatcaatccttacaaacgcaccatacgagaagactcaataccaagtacagcttctcgagaaatggccaataactcaccatcatctgattcagcaaggggctagtagatgactccacttnctcaagaacctcatcagaaaaaagctgtagcactttttcaatcacatg

SEQ ID NO: 47804 - DNA, 469 bp, Oryza sativa
  unsure (1)..(469): unsure at all n locations
acttggaagaatgactgactntgttaactttctttttcaatgatggaacttttgtagcaccagttatacttccgttntgatgaagcatatgcgagttcggcatccagagctcgataaacccaccataatatccaatggtgccatccaaactacgacgatgatatcaaaactttagcaaaaatatctttccaacaaccacaaccagattatagaaaatagcacgatacacttcctgcaaaagacatgataggagtgatattagtgccattgctcctacacgaaactaaagtatttagaggagtccacaacattggtagtattagtaatcattgaaactgatacgatctcaaaaaacattgaaactgactccaataaaaagatctttcatatattaaattntcaaaaagaaccatatcacatttgctggttactagcctgaagagtaccatccaagtatcaaatgaatggg

SEQ ID NO: 47805 - DNA, 438 bp, Oryza sativa
catcaaagaggtactccatccagagtggctagccaacccagtcatggtgcggaaggccaacgggaaatggagaatgtgtgtttatatcaccgacctcaacaaggcgtgtcccaagaatcacttccctcttcctcggatagaccaactggtggactcaacagccggttgcgagttggtgagcttcctcaacgcttactccggctaccaccaaatcagcatggcgaaagaggacgaggagaagacaacattcatcacgccgttcgggggattctgctacgttaagatgccgctcggactaataaccgcaggaaacactttccagcgcacgggccagggcgcacttagcgaccaactcggaaacaatgtcgaggcctacgtcgacaacattggtgtcaagaccaagacaagcgactcattaattgacgatctgcgggaaac

SEQ ID NO: 47806 - DNA, 447 bp, Oryza sativa
tatatcaagaacagatggacccaatgctctttccagattttatggatatttaccctcaggtcatccttctgtgtcttgataagtggttttggattaacattaattgaaaagaaaccaatgagcgcaagactcatgctctccttcggaagtcacctgctgaagcatttaccttcctctggaagtttttgatggacctttacctgcagttatactctttgcctttttttacatgtactatgtggagtggctggaaatcggaaagtgtgtaacaatgaactcatataagaaccatattatagcttggaactctaatcttttcaagcaaaccataaattcaaaatggagaaccaaaaatactatgaaccatattatagcttggaactctaatcttgtcaagcaaaccatatattcaaaatggagaaccaaatatacatacattcgatcctt

SEQ ID NO: 47807 - DNA, 343 bp, Oryza sativa
gatcttaagcaccgagctgcagcttctcctgacccaatttatctggacctacaggtctgtcaaattgtttttcagttggaggagttgccatcagaagagcaaaaagagtatgctggggaggtggatgacctccggagagaagtccaaattctgttccaagacaagctcaaagaggtaaacaaatcacctcgcgcagttgctactgtaattgaggtggtgcgattacctgagctaacgtagcttctcttctgttataacctgcagggcacaaagactgcattgtgatgatattaggacgaattaacgacggatgtagtatgcaatggaggcattaaatttttca

SEQ ID NO: 47808 - DNA, 372 bp, Oryza sativa
ctgctaaatgtgttattaaacatgttctcttaactaatgaaatatgtgcttgaatgacatatattgccaagatcacaacctgatggtgcgaccatttatcccgcatacatattgtagacttactggggctttgctgtctatgaaaatccgtgccacggtgctgtatgatcttggttgatttatttttgctgctgatgctgtattgtatgccttgaaccacgatgataaaacaagctctgttgctgatatgcctcttgatatgtttatctgaacatcaatgtaacttcatatcttctttgtgtgacattctgatcgtcaacttataattttaccttagtgtcgtatacctggacttatatatttgttaaagtt

SEQ ID NO: 47809 - DNA, 387 bp, Oryza sativa
  unsure (1)..(387): unsure at all n locations
tcacagagtcataccgcgattattcttccatgtttaagctgcagatgaaattcaagcatgacaattaaatagtcttccatgatgtagcttctcgtatcttgattcttgagtatactttttgctcctccttctcaaagagaggaataatacgatggcagtacatcttctggttttttttctgtagacgattgttgcatatcatgtgtgtactgttgattagtcataaaatatgagatgaccgtttgtcctacgttgaaccaacgacaattaatgtcaatttgtgatacttgatatatggacgaaaataagttntgccagttgagttagaaattaaagccgctaccataattacgagtttctcggggacaacttgaataagtcttatct

SEQ ID NO: 47810 - DNA, 415 bp, Oryza sativa
  unsure (1)..(415): unsure at all n locations
tttattgaatcttatntatctacagagacaatggccttacttatctcctggctccaaacccaaatactagctatatgcatttaaacagctattttctaaatagtatttacatgctacctatggttacaactatatctccacaagtagctatgtcatacactttccccaaatacccctagtatacaaatactctgtctgattcacaaaataatcaacactgtcaggctactaacttcgtgttcagttcataagcagcagagaggatgaaggcaaaaaataacaaatcttgcatgatgggcttcaagatacctcctggaatgtcacggatcatgtaaacgcgactgcgttggtgtgcaatatcagcaatctcgtgatcgccggattgttttccgtcttgctgtacctctttggctcg

SEQ ID NO: 47811 - DNA, 446 bp, Oryza sativa
agcttagattgttgtgtctggtgaagatgagtattctcctaatgctgaagtatgttgagaaatattgatgttctttcatgaagttggagaaaatacaactaaaaggacacgacctaatcatactattcctaaagcaaaagaattgttatttatcgacaatttacaattaacgacgtgcatggcatgaccagctacaatagtgcgttatacaattagtacacacttcttattcacattattcatctatcacctttctacacccagctataaatcccttcttgcaagcatcaaagcatataaattctttcacaaacaggtgtgttgtactctggattcaagcatactgcaacagtgctaccgggattactcctaagtatctctagttggttataaaaaagcctaagatattcttcctttgcagcttcatacactctcttcataactat

SEQ ID NO: 47812 - DNA, 459 bp, Oryza sativa
ctcggatcttaaatccagtcgacttaaaagcctgtgtcttctctcttctatgtgtatgtgcatctgctcccgctacattctgtgtggtacgtttaaacaataactccttgctccccgtataacatttaaattcagaatggcctagtatcccatcatctgtgaatgatataattctgaaggaatactgtgtgcatggggcaaggttaaaaacaagtacttttctttgatctttggacaaaactacaggctcttccatgcttggctcctctctgctcttccagtaccatagtttataacccctgatagtgtcagaagatggtaatggagtttcttttagaataataacaatggaagaagatgttatctctacaaatctgaatctacaggcagcaggtaatgaatctgcatgataagaagtccattagcttcttttgtactatcatcaccacgattatatta

SEQ ID NO: 47813 - DNA, 446 bp, Oryza sativa
  unsure (1)..(446): unsure at all n locations
gcttgggagttgtttgccagacttaataatcaaacatagcatgcttagaagcagattgacctaggctaaattctacttctattctgcagtaagaatagtaccttccaaaaatcattgctgtaagcgctgtcgttccaaaagaaagtgcattctgatgagagcacctctctgcaaattgactatcagtttgcacaaatgacctcctgacaactttctctagctcaagaggaaaatcagcatcttccacgataacccgtggcaagttatcacgcacataatgagctgcatcttttccaccatgcccatcanagacctgcgnaaaatttaaggacaagatgatcttagaaaaagacaagcatgtacaaattcatgatccatgtatttgatttgtagatgcatctctctaactgtgctgtatgagtcactgcactaagataacatttttt

SEQ ID NO: 47814 - DNA, 377 bp, Oryza sativa
cgtgatcggcacatgcaatgagtgtcctaattataaatgagcacggcttggaaaaattagtgctcacatcattgtatatttgtaccaacagattgtgttaatacaaagcgtacaatatcataaaagccacatgaaaataaaagagatgatctagatatacgaaattgattgttcctttccccccaaaaaaaaaaagaaattgattgttccttaccaagggtatttgttagagataaaactttatagtggagtataatcttgtagcaactcatatggaccattaagatcaaaatatggagactcagattatatgacagtccttataactgcatttgatgtaaatcgagagatgtactgtggtagttcctgttatttat

SEQ ID NO: 47815 - DNA, 334 bp, Oryza sativa
  unsure (1)..(334): unsure at all n locations
agcttaatgtttcatacgcagtagcagtatgttttaacatgagtttttattatgtttcataganaagttaaatgtttcagtatctgaattttttggttcaccacgtataactcaacgcttcactctggaaaagtatgagacgtatgtgcctctactctctctcataccattttattagctttcttcccacaccatgcatgcatgcatgcaactatntagtgatcttaagaatctttttttcttccacaccgttgaaatcgttataaataaatctttgcaataagatatcacatgattatattctgatgaaagaaaaacttatgttcaaaccata

SEQ ID NO: 47816 - DNA, 441 bp, Oryza sativa
  unsure (1)..(441): unsure at all n locations
tatgatangtgatgtatgtttnggtttacatacttggaatggaattgaagaaagcgttttgtatgtgctgctgatccatgtgtttccttatgtatgctgcttgcccaatgtatgtgcataacactgatgggagcaagacaaaggtagagcttaactgaaacatagaaaagattgatcagtttcaaaatgtttaattatatatgatatatgtacaactacctatatatatgtactcctatatcggataaatattggcaaaacaccagcacttgaaaagttgcattagtaagttatcctttgtttggtgagaccatcacgtcaaagcaatggcacataattaatggtggtgtactatgttaacgtgtgctttaccaacacaacacatgcactggctgtatttcatctttcaaccctattcactccagaccagtcaacataaca

SEQ ID NO: 47817 - DNA, 422 bp, Oryza sativa
  unsure (1)..(422): unsure at all n locations
catgcaagcttgcaaataatctagttcttgacaattttaccatngattattaaatatcgaacaaaagaccgaccgctccgatgaataatacatctaaaacaaccactctattgtgtcaactgatgcacaattaaagcacacaattcacgccaacttactatattctaaccaactaaagctctcctaaaagaaacattcagtggaacagttctcacaacagtagcaataaaagaagttctccttcgaactatagcatataaagatgggtacttatctctaaaagccaagttagctaaccaattatcctctcataatctaacttgggccccattattcacaatctaagaacacacgttaaaaaataatcttactttcatgagaccgccaaaaatgaaaatccctgttctatcacttgcataaaa

SEQ ID NO: 47818 - DNA, 420 bp, Oryza sativa
  unsure (1)..(420): unsure at all n locations
tgtgaacaatctttaaagttgtgtagataatgcactttttattctcacatttcctcttgaaaacactatgcttttgataattttatggacagctttacgtccaggaaacacattgctttgatatgatatattgcttaaataatccattatgcatgctgtgtataaatcatgaacacaaacttatgcnttttgtcttcaaatgtttctattaggatcccaaacttggttttgttgttggtgtggcacatggaaaggggaaaaagtttgtagtcgttgtatgaaatccagttactgttcaaagaagcatcatgtatcaactaaccaggcaattatattgtattttcagtttaatcagtntgtttgcgctgctagagttttcagatatcactgttgtggattaatcactcngtaatatccttc

SEQ ID NO: 47819 - DNA, 456 bp, Oryza sativa
  unsure (1)..(456): unsure at all n locations
agcttcggcgatctctgcccagagcggctatgatgtggcaactagcgggactgccgttgtcgcctctcctcgcgggaagtctgttctctgctgccgcagagntctccgagcccgcggcggcgaccacgattgcggtgccttcgtcggggccacaagactggtccgagatgatggccgagtgccgccgcctttttgagaacacttctcgggatgtcggggcccagatggaccgcctaacgacccgcgcgatgtcattggatgggagggtggcgcagctggagacggagctcgaagtcgcttgggacgacctccagaagatgaaggagatcgtggctggcaatgagatgcaacgcctgcgagtggagaataagatgaacgaccttcaagaccacatcttctccatccgcgaccagctccggaagagcttcaccagctggcaccagctagccccggagt

SEQ ID NO: 47820 - DNA, 450 bp, Oryza sativa
  unsure (1)..(450): unsure at all n locations
ttcagcgaatccaatattatgtcaatccgatacattcatgataagttttgccctttgaaacttgattattctgtgaatgggcggagatgctgattcgtttttcagtgggtaataaaggtctgcggatggcagttttatccctgtcacccaactaaacttangtggaaatttctgtgtagttagtcatggagtatttctttgttcaattcggttggttgtgaggaaatgggcagatggagcgatgtaaaacatttctgaattangtgtttacagcangggatcattcangtactcgattcaatgaataatttgctttcctgtgatctgtaatctgtgacaagagatggttcattatccttcttgagcatgtgtattgcaatgggcacataccactgggaattagttggattcccctttctgtgtatcgcaattggagaaattctcttgttg

SEQ ID NO: 47821 - DNA, 476 bp, Oryza sativa
  unsure (1)..(476): unsure at all n locations
ctatgcaagctttcctttggtgagtgtatcctgtggtataatcaagagaaaattggaaccatgccattatatatttgcaaaatttaagatatgtcatcctgacctacatgtcattgactcatgtgtgtcctacatgtcactgagataccgatggcatatctcanactttacaaaattataatggcatggttccaatttaccctataatcaaagggctcttctctttatttcctgtgttttcaattcctataggactggaaaaacatacaacttcaattcctacatttttcctattcctgtgtttttcctatccattgtttcaaaggggcccttagaaccataatatgtagagttatgtgtcatgtgtcacaatccctgtgatttaaccgtaatagatggatgtttatgagatttactcatatgaaactatacgtgtacctatatctatatctatctactcaattaaaaaatgcgta

SEQ ID NO: 47822 - DNA, 410 bp, Oryza sativa
cagagtctttagcccatgtcgtttttcagatggtggcagtgtaacaagccacgactgtcataagcggcattgcaatgcatgcgttgtacagtttgtaccgtgaccgtcaacattgtggaatagctttatgaaacataacatccaaatgaaataagacgacaaaattatgtcagaagtgggatttgaacccacgccctctgtatatgaccagaacatgagtctggcgccttagaccactcggccattctgaccacgttgatatgatcatgagaacaaataacctaacctattgaactgttcttacaccctaatataattcgccatgatgttccgttgtacgacatgactgcagaaacattgatagactgcttacaaaacagcatcttgggggtttgcttgcatttgtgaat

SEQ ID NO: 47823 - DNA, 377 bp, Oryza sativa
tgaagtccctcttcttgaaccattgaagccaacagactgcgtcgagaggtaaaaaaaaaattacttacgatcatataccagttaccctctgatatcagagcagtgaaaaactgaaaatccatgcctgaaattacatgtctgtctgatttttcacccttgcaggatttacattcctgagcttatggtcgcgttctacctcctggtatgcgcgtcttacgatttggtgctcggtgccaagcactactacctgtacatctacctccaggcatttgctttcattgctctgggattcggtttcgctgggacatctaccccctgttcatagcacagcaatacatcatcttcactgtcaaacgatcacattcttcccaattcat

SEQ ID NO: 47824 - DNA, 477 bp, Oryza sativa
  unsure (1)..(477): unsure at all n locations
gcatgcaagcttccatgagcgaaatttacctacatgcccacatgacaagtgctttaatgtcaaaaattccgcttcagaacttgtacccatttcccctaatttaatgatgaacgagagaacaacatatcagtcacatttggaagtaaagtggttattgaatcccctcctcaccgtaaaatttaggcagcgcttgattaaatcattcactttaacatgaaggaccaacaagggccttccaaaatggctcacactacatcaatccatgagtacaagaatcaccagaccattcggcgcggactatcaaactagttcagctttgcgcggcatcacttaactacgaaaaaaccctcatcttccccaaagcagcccttcaatgagtaataagtgaaatccaantttataagaacggtgttaacgagttccacggaattattccaacctacctagcaacagattcaacaaaaacctcagcgaagc

SEQ ID NO: 47825 - DNA, 323 bp, Oryza sativa
tggatgatcatattactagtcacaataaaattaatcactttaccgaacatctcaattatcttggttgtgaacacaaacaaatagggatagggatttttttcgcaaacgcgcaaaagaattgcacatcaatatattaaaagaatagagttttgatacacgatgcactcagtcagaccggcctacgccaagaaaggaagaaaacaaagataaaataaacaaagaatggaaaggaaaaaaaactcgaaacgacggtaactcaactccaaacagcgggagggggtagagccactctacgctcccaacaattcctcaaaggaagcgac

SEQ ID NO: 47826 - DNA, 399 bp, Oryza sativa
  unsure (1)..(399): unsure at all n locations
ccaacaagaatattctattcaaatgatatacaagagcatagacagtagcacgcacgcatncattgcccttcgatctctaatatttctgagttgctgggacgcatgcattcacatatccgacgaggacacaactaaagctgggctcaatccgaccgatgtgcagcgccggctgcttgccatcttcctttgccgaagacgatcttctactttcattgccggtcgtactccgcatcggtaattagcgccctagccttcacggctgacctattccatacccaatatagatgggtgtgcacgacttcaccattggcccgccttcgacgacgccgactggtgaattgactatacagtcggtggactccgccgccgctgatgggcgtcatcatcatcttcaccgac

SEQ ID NO: 47827 - DNA, 459 bp, Oryza sativa
  unsure (1)..(459): unsure at all n locations
gtgactcggagtggctagaagctgatttacatgtccgccctgtcgtacggcaaactcaccatctttgtgtcatgctgcgacaaaatagagaacaccacacatttgcacagcttgcatagaaaaaactgaccatttggagaatatttgcattgcaaggtggcaaaaatacgtactttggggacctgtgcaatgtcctgcatgaacttcttgataggatggccatgatctctntccaatctgggctcggagttgtgatgcagctaacatgctacgaaaatgcatcaatgaatgaccatgcatttattaatatgaaagtcacgtgtaatgccactttaatctttaatatctgcaattgcttgcctctgcagctcactgaatcaagttatggaaaagttcttcgcaacataactaaaatgttctatccatttaatgaactctacgaccatggattctatatta

SEQ ID NO: 47828 - DNA, 399 bp, Oryza sativa
  unsure (1)..(399): unsure at all n locations
agctntggagaagaagtcttaagtggagttctgtcttataccccagttgtgcgcctgtgaagatggagccgtaagcccgctagcccgctgctgtttatttttgattgtcaggccttaagtgcctttgtaataatgtaaatattatcgatataataaagatgtgccttttgtatcatgtttgtgtggagtaccctggcttttcctgggacggggattaatacactagcgttcgggaaaatgcaaattttctcggtcgcgacacatcaccttagttttctttagcattttgatctcgagtactttttttttgtaccttgtagagatgttgatgacgagagtgtccagcagtgtgggcagcctgagtcgccggcgatcatttcggcccttgcggttgagcca

SEQ ID NO: 47829 - DNA, 402 bp, Oryza sativa
  unsure (1)..(402): unsure at all n locations
agcttgccagcgatgtgcgcgccaccgtgtttattggcgaagacgacngcatcaccctcgccgccgtcgagcggatgccgctggtgaagtctgtggtgtgggaggcgctgcgcatgaacccgccggtggagttccagtacggccacgcgcggcgcgacatggtggtcgagagccacgacgcggcgtacgaggtgcgcaagggggagatgctgttcggctaccagccgctcgccacccgcgacgagaaggtgttcgaccgcgccggcgagttcgtcgccgaccggttcgtcgccggcggcgccgccggcgaccggccgctgctggagcacgtggtgtggtctaacgggccggagacgaaggcgccatcggaggggaacaagcagtgccccgggaaggacatgg

SEQ ID NO: 47830 - DNA, 404 bp, Oryza sativa
  unsure (1)..(404): unsure at all n locations
agctnggatcatcaaaccgcgggtactgttctgttctttacattcacatcaataataaagtcagaaaacacaggtactctgctcaatttggttgcatctcaaggaagatctcaaatgtcaacttttaccgagtaccccggccaaaactttcagagaaacaaatgatagatccgaggacacgcaacggtcctgatgaagtatgacagcaaaactagtcctgcgattcaaggcatgttcttctataagcggagacacattctttttgtacattcatgaaagttcgcggttatacagccgcaatataagaagtcaatatgtgtaccctcgccggtttgcaaaatccacaggctaatttttacaggttttacaggagaaacttatcggcctctgcaagcaaggagtga

SEQ ID NO: 47831 - DNA, 403 bp, Oryza sativa
  unsure (1)..(403): unsure at all n locations
agctagacacagntgcggcaggcgtcgtctcttgccggcttgtggttgccagtggcaacgccctgagcgcctctgcaggcgccaccctcggcacgtcttcgcgcccaccgtagctggacacctccccgcgccttgcgcggcttacggccgcctgtcggggaagatgactcccccttcctcccgtcaccctgagaggcctcccactgctcccgagtgagatggagcttcccgccgatggtgatgggccccgagagaggctgtggctcatcaccatcgacgaccttgaggcgacctaacgcctcctcgatcgacatcgtggagaggtccagcagagattcaatcgagcgagcgatctgcctgtacttctcaaggacgcagcggaagagcttctcgacagctctct

SEQ ID NO: 47832 - DNA, 396 bp, Oryza sativa
agcttcaacagctgcaactccacaagattcatggcctccgactcctcgcgcttcctatccatctactcccgctccttctcggcctcctccatcatcttcaacaagagatcgagtttcccatcttgagccatgatttgagccgcttgcttagtggtataccgaggtcgctccaggatgatcgctggttcctaccccgaatctagccaaccagatcaagggagccccaaaaggcttttgcggaatatcactgtaaacagcggatccccacctatctcatggaattttacggctcgaccaagggaattcaagaaaccaagaagatctgagggctctgataccaaattgatagctgcctaaactaggattcagaactggagacacacaaggtatatcgac

SEQ ID NO: 47833 - DNA, 397 bp, Oryza sativa
  unsure (1)..(397): unsure at all n locations
agcttgcgttaggttgtgttctgttgtttatgggaaggnggntgcgtatgcatctcgtcagttacatccgcatgagaagaactaccctagtcatgaccttgagttagccgcagtggttcatgcgttgaagatttggcgtcactacctctttggtactcgtacggaggtgtacacgaatcacaagggtttaaagtatatctttactcagccggatctgaacatgagacagcggagatggttggaactgattaaggattatgacatgggaattcattatcacccgggaaaggctaatgttgtagcagatgctctcagcaggaaaggctattgcaatgctacngaaggacggcggttgccgtgggaattatgcaaggaatttgaaagattgaatttggga

SEQ ID NO: 47834 - DNA, 398 bp, Oryza sativa
agcttgtcgccgcgttctaagagatcttgtattgctcattgggttttttaaagccggtgcgaactatcttcgtgattaaatttagttgaagggactgaactatcaaaaatcagtcgacatcttatagccatcccgttaaatttatgttcattttggaactttttcaaatgtcagcccttgcaacaattttaattacttcctccgtttcatattataagactttttagtactgcccatctagattcattaacatctatatgaatatggacaatgtctagattcattaatatctatatgaatatggataatgctagaaagtcttataataaaaaacggatggagtacatgacaactttattgttggtataaacgttttacgtgatacaaataaactttac

SEQ ID NO: 47835 - DNA, 398 bp, Oryza sativa
agcttggcttcggacaagtttgtggttattaaggcaagaacccatgggaataccatgaagcggcctttgcctcctgtgggaaccaggacatggcacgccccggccgaccccttccggcgcccatacgagatgccaggcgacagggctttccttcccaggaagctcgttagctgaagactacgatgaaacggaagctgccgccacactcctctttgctaccctttcaccaatcctcctactatcctgaaaaataagaagccaacagagccgatctccctcgaagagtttttagtgctgtttcctagtagtgtcgtattggttgtgaatctcataccccaataaaaatggagatgtgccagcctgctggtactcctatcttgccttgcattggcatccat

SEQ ID NO: 47836 - DNA, 400 bp, Oryza sativa
agcttcggtctgcggcgagcggcccgcctctctctatccgtgttgtgcgctagatcccgcgtcaccgaagccgaaggagggtcattaagcagtggagacatgcgccgtcaagtcccgtctcctctttctcttcttcccctcttcccctactctctttatctatctcgggcatcgtcggccgctggcacaggtcgagcggcggttggtgcggcggcgcgggacgtggaggcgggagcggtgaactccaggaggaagccaaagtggtgggcggcgcggtgttgcagcgtattgccgccgcttgccatcttcagcctccgccggtaggcgcctcatcctctgcctcccgccgcctgcctcggtgcgccagatacagggtgagaggtgaaggggcgaagaggag

SEQ ID NO: 47837 - DNA, 400 bp, Oryza sativa
agcttcactgcttggcaccttttattatgtattgtaccaattcctaaaaagttaagtaacagcggtataaaaggattttgaaggtatagggcacttgatcacgcgcacttttgcctaagaaaaaaagcctaagtccctaaaagaacgtgataggccaaatatggggtacaaacatattaggcctaggcccaaaatatgcccaccgatacccttaaaatatgacgtgcataacatgcttgtcaatatgctcccgagtgataatttcccgggagatgtacagctaatgcatctcatctgagtagattccgatctgagcagctatccttcatggagaatacgaaagcagatatgataatcaaatcccgactgatgcaagtactcggctgatagcccttatggg

SEQ ID NO: 47838 - DNA, 396 bp, Oryza sativa
agcttcaagggaaggctgggttatttatttctcacttttgctgtcaagattttcaacaatttaagtgtgtgctttccacaactagagcgagacaagtctcagctcggtcggggtgagaagtaacaaatttatttatcaagatctttcaaatctggtttattttttccaaaccaaaccaacttttgcaaactttccgataatagtggtacccaaacgaccaatcacttccagggactcccggtcccgctgtcttccggacagctaattgcttgccaagcattacgtttccctaaccttaacaccttttcataaaacagggtaaaacaaaaactacgctgaggaatcacctcacatacgtccatgagcaggggcacgggtgttcgaatagtttgttaa

SEQ ID NO: 47839 - DNA, 400 bp, Oryza sativa
  unsure (1)..(400): unsure at all n locations
agcaagcttgttgagcctaaaacccaaagaagttattaaaaactttcagtcctcgcagactgagtagaanaaatcaaacaaggcaatgattgaccaagtaagcaaattaaattgataaaaaatcacactccattattatgataatagcccccgactgacaacggcaagaagaaaacttgatgttgacagtcaagatagggaagtacaatgataaacttaagcgtagaaacgccgaagatgttcaatgttccaagagttgtcgacaagagtaccgtcttcgcgcttgagtcgataagaacctggccgggtgacttcagagataataaatggcccttcccatagaggagataacttgtgccgatctcgtgtagtttgaattttcctcaaaaccaggtcaccg

SEQ ID NO: 47840 - DNA, 401 bp, Oryza sativa
agcttcatacgaaagctcaagatgccaccttttttgatgaagcttactcttgtgatagttttaacatgatattgagaagattgacagaacaggaccgatcgttcaccacttctggggaagcttaatcttgtgaatggtttttacatgatattgaagagttgaagacagaaatgaggactgaccgttcacttacacgctggatatgctaccccatgcacactatagtagtacaaataatgaaaagtggccatggaaatcaacaaatcactagtattcttcttgctcatattagggaacaatggaattttggaagtaactagtgaaaatactaatgccaatataaaatttactgtaagaggaagaaatctgatggcactgaatccaacaatagtggtacctct

SEQ ID NO: 47841 - DNA, 405 bp, Oryza sativa
  unsure (1)..(405): unsure at all n locations
agcaagctttccatttcaatgtaccttgtcttcgctccttgcagtgcttcngagaccaagtataccggtttctgtccagacaatgattcttagacgagtgcancactgactgccactggcgaagctgccaagtataatagcagttcgcttcctaggggtgggcttttcagagctggtgggctttgcaagtattgctttagctcctgcaagcttttgtacttcatgtacgcttgacggaggcttcattttgacgaaagcttcaaaatgtgccgaatagagtgatgaaagacattttggggatgtcgagcgagttcatgtggatctggtggtaaccggaatatgcatccaggaaactcatgagctcacatccagctgttgaatccacgagctggtcgattcgcggca

SEQ ID NO: 47842 - DNA, 402 bp, Oryza sativa
agcttgtatcggcagccttaccctgagtggtttgagagagttcctcttcccaatcggttcaaaggtgcggacttctacaaatttttgggacaagatggtgtgtcaacttatgagcacattagccgattcttagctcagtgtggtgaagcatcggctgtagacactctgaaggttaggttattccgattatctttgtctgaatcgacttttacttggttttcctctttgccgtatggatcgatcaatagttgggccgatttggagaagcaattccacagctatttttacagtggggttcatgagatgaaattatctgacttgacagcgtttaagcagcggcatgatgaacctgtgcacgagtatattcagagattcaaggagatgaggaacaaatacttcagc

SEQ ID NO: 47843 - DNA, 427 bp, Oryza sativa
  unsure (1)..(427): unsure at all n locations
ccctcccccccaaggccnttgtgctgcgacctcgcgacccaagcaccgacgccgcagcagcctcatgcgggacatcactatattgttactgcgcggcacaaacatggtaagggaagagtccccaaacacaaactccgtccgctacgtagagagagcgtgctcccggcagagcaacacattcttatcattgaaaacaacagccttcacaagaaaaaaaacatccgatctagcggcaacgagacaacggtccctagaccagcaaaaaccatattctatggccgatgaaacacaatagatacattagcgggggacgaaaagaatcatgccatttgcaaaaaaaacgactcttgaactcctggaaaaaccggaagacatggcctctgggtaatcgaaaaagctctttgatgtgccgaagacaatcaaaaat

SEQ ID NO: 47844 - DNA, 417 bp, Oryza sativa
cccggatccttaagtcacctgcggcatgaagcttttacttgaaagctgcactttgtttgtatatgctcactctccctaattgtgtgcggattctatatcagcacacaaaaacacgctgctcatgacggctacgtgtgatgtgaaccacaggcccatggaactggatgctcccacatgcacgggatcgctctacgtcctgcatacctcctgagtataccccaccattgtgaagagtacctatcgtgacctgagcatctgtcttcccaccagattgatccaccgttacagctacaacttcccccaatgctaccaaatagccatgagagtaactactactatcacataattgacacattcgtaatgtgctcctgtcacaaaaggggggtctcatatatatcggttgcgctcaaaatggaa

SEQ ID NO: 47845 - DNA, 397 bp, Oryza sativa
agcttcctacaatacataagcataataatctttcaaatatttttcatgtagtacaaattttactactaattcggttgtccctaatatccacctaaccgaattagctcaacttatggtagttcttggaccaaaacattttaagaagagtaaatgacactagcggtccttaaacttatcttaaagtttcatccaggtccataaactatctaaactgtagttaacctcgttaaacttgttttattgtatcaatccggtccggagctcggtttgactggtttggtgcatacgtggacagccaggtgtcgcgacgcgtgtgacggccccatcctcgtggcctttttcacccaggaccctccccttcgtcaaatttcacaaaccctagcctcactctgttcgt

SEQ ID NO: 47846 - DNA, 399 bp, Oryza sativa
agcttcccctgagacgtaaaatggaacgtattattaatatgtgattaattaatttattagcgggggaattataaaaagagattaaacatgatttttaagtaactattctataatgtttttatagaaagtatattttagtagctagtctgaaaactatggtaagaaatacaaaagagaaagagtaaaagttgagaaaatgtaactgggaacgcatctcaaacggagtaacgtactatgagagcattcatagtacgccgtgaattttgttcggtctcggctgccaaacaagactcaagattgaactccaagagacacaaggttagcaatgcgttttagcctccaaaagaagcctgcgacgctttccccagtctcgattcagtcgaagcatgagtagcaaac

SEQ ID NO: 47847 - DNA, 392 bp, Oryza sativa
  unsure (1)..(392): unsure at all n locations
agcttctccaccatctcgctgctagcctatttgttgcagctacctccatcnntggtcgtgcggcngcnncgcaaaggagacgacacactttgtttggaacgtgtgtcgctgattttgctccgccttctccatttgtgcgctaaggacaccctgcacaatgaggctctcatagtgatccgcaaatgcagccccaatgtgctcttccggtggctcattatctgcatggtcagccgcaagcaaagcaagtgtatcatcatcgaaatcactagcagaggagtactcaccatcgttttttactaccaaaactcgcttgctagggcagtcacgctgcacatgcccaaagcccttgcgacggtggcactgaacatctctcattcggcctgtggatgcca

SEQ ID NO: 47848 - DNA, 311 bp, Oryza sativa
agcttccggcggcaggtgcacgtattattttcttatctgggcgctggctatcagctcgttggagagggcgaatagtttgacgctggatcctctctgagctcacaagatctatatatttggtctctcacagtatgatgttgatagaatagctacacaagggtcccaccccgcgggatgctacgactcacatgcagatctgcgacaggagctgccgcacatcgacgatccgggatgcaaacaaggagaatctgctcacttgtccgacctggtctattattttaacaactataagcgagcactgctaactacat

SEQ ID NO: 47849 - DNA, 424 bp, Oryza sativa
cccggatcttaagtcacctgcggcatgcaagcttacacatcctctagagtgatttcttttattagtgtgatatataattatgatatgagaagtttaatgttgtgtccaactttttatagctggtataagttaggcttgtccatcttttcctataagtgatcaaagtcagatggagaagatggacttatctatatttgccctaaagatcttactcttatatttttttataattatgaattaggcatgtctcttagtgcacagattattttatagctcatatatactaatttatatagtcttttgttttggttttttatatagaatagtaagggataaaatatttatggattttttagtatcgaattgtttaatagtataatagtattgaatattaaaagaaaatcttacaatgacattcaaatga

SEQ ID NO: 47850 - DNA, 426 bp, Oryza sativa
  unsure (1)..(426): unsure at all n locations
gtgctggaccttccgacccgggatcttaagcaccgcggctgcagcttgtttttattctcttggcagggttgcatgaagcttgaggttcgggggattccgcaaggagaaataaaattgggatccntgtgcaccnaggacatgggatgcatgggagggagtcacttgcctcctcaaggacaaagggcttgtgatcacccaactgtaagtaccatttcgttgctccagtgcaattggtatccaccaactgtttttgtggggatgtttctacttagatgtgcagtactgatttgataagtttgccatgaagtagctttggcaagtacagccacctttttattttcttcagataattgatagcgttttcctagaaaacaacgatgatagttttttatgatgaccagaaaagaaatgatacatatgtacctc

SEQ ID NO: 47851 - DNA, 402 bp, Oryza sativa
  unsure (1)..(402): unsure at all n locations
agcttgcgcgcgagcggcccangcgccatatcttcgtgcgtgactgcgtggacacagcaatctccggcacgagtgccggacgtgcaagcgcctgaccgcggtgcctcgcgcggcggcgcaagcggtaaatcagcaagccgacggcggacatgcaaaacaatagatcaatctgtggttagatacgagatcatatagttgtaccgatacatatgcatatgcattagtgaattgaatttggataggtccatatgcgtgggcatgcatgttttgtgcttggcatatggctgctgcaactgcgatctgcgcatgtgtcagatggcttgggggctccagtgccgacgaccggcggggctgctgctccgggctgcctcggtgcgcggctacgtacagaggccatcgtct

SEQ ID NO: 47852 - DNA, 404 bp, Oryza sativa
agcttctcttactgaaggggggaaagatttatttttaatgagtacaaccaccgtacttagcaagtcacaccgggagatgcatgattaatgaaagggggtacaaggggtaataatataggggttaagtttggcagtaaactgcatttaaaagtcacttagttgcccaaagctattttataaagacgatcctagagttacacagtattactaatcaaggccgtggacccacacgaacctgccttaacccaaggcctacgatgattcagactgaactggcaacccgacctgtgtcccagctcgtcccaagccaacccaggccaaccattccatattttagttgttaagcaaattttaagaattaaaccactaactagggtacattgctaggcttgcccatatccgag

SEQ ID NO: 47853 - DNA, 397 bp, Oryza sativa
  unsure (1)..(397): unsure at all n locations
agccttgctgatgtatttgacaaagttatttgtcctaagagatttctcctcctncccgcngaggtggtgtttaagagagaaaataaatttagttatccatggcctccaaaaaaaaaggctaatagtgattatgatcctccctgttacttttcatttaaaaagtagcattggttgactgtcaccacaagatgagcccggcatcatcatgggacctctatttggaaggaaaaatggttttctttgcatgctagttcatcgggcagtttgtacagttgcgaagtactgctcatcttatgtctttacgtcacttgaatttcttaagccaattatgttttgcgacccacttgtattatttcaatccagcttatatggctcaccataatgcagtgggtatctc

SEQ ID NO: 47854 - DNA, 400 bp, Oryza sativa
  unsure (1)..(400): unsure at all n locations
agcttagccgctaaaccctaaggcttggttgtcacaggtacttaacgtcctactgagcttttgagggcncgcaccaaggagtataaatattctttttctagcttatcttcatcgataggttttgcttagtaactgtcacgcaatgcacancanagcgtgagctacgaattgatgggtcaattgacactactactcctactaacacggctcaacaagtcaagattatcgtacacaaggcattgtagtagtcttaaggggaaaaaaaatgaaagcagagaataagaaaagagcagctaaagagagctaccaataattaatcaatcaagtatagtgaatgttgcatggaagcagagcaggacgccggccggccgctggcaattaaaaaccaacatcatatatt

SEQ ID NO: 47855 - DNA, 404 bp, Oryza sativa
  unsure (1)..(404): unsure at all n locations
agctttacaagacactgngtagaaaagtatctatatttatttcaatgcaacancaaaatttgaagtgcccaatcagctagacatgaacaggtcaaataaatatgcacaccatgagctataatgttcacaaaggacttactcttcactggccaatgaaaattgaaacaattcagatttagtctaatgttttgcatactgggcagatatttctgcgcgggattgctgatccggtaagtcaaaacaaatgattgaatcaacacggctgcaaattaacaacacacaaaggggataaattaaaaaaagatgatatttacttcagaaacccatacacaggataatatcatatgcttctctgggaaatgaattcttgcaagggaacatgtacaaactctccatgtgaaaat

SEQ ID NO: 47856 - DNA, 398 bp, Oryza sativa
agcttgcatatatgttgtcagctgtttgtttcatatgggcctacaaaggtgaacaaagaaaaactgctgcagctaactatgcacctatgcttactgttcctcgttgcatttccttctcactgcttactattcctcattgcacttccaaggtctgtaatattaactgagaagatctggatcctcccggtgacttgaacaatactactactagaataggtatggcacatctgacaatttgaaaaactaaaatatagacaaactagacaaatataataaaatatataaaattcggattgtggtcaaaaggaaaaaaaggaccaagactttttttaaggcttcagagcatgtataaataaaaataaataaatacataccatacctaaaactattttaaaaac

SEQ ID NO: 47857 - DNA, 399 bp, Oryza sativa
agcttcttttcggagctgtggcccattagtacagatccttccatctgtggcagcctctaacatgtctaaaaatagcgggccgtcacaaggaagtcatctcaatcgggccgaaaatgtgtccgattgagatatggtcgcacagacatgttagatgggcataaaactcaagcctgtcacagatgacacctatcacacctatcagtgacgggtcgtagtttaagcccgattgagataacattccatatctcaaacggatctcaagttagagcccgacactgatgaccatcatccgtgaagggcatcaacttgaggcccgattgagataacaattaggcccatcacagatgactcatcagtgacggactcgtactaatgcccgattgagatgacttaatctct

SEQ ID NO: 47858 - DNA, 398 bp, Oryza sativa
  unsure (1)..(398): unsure at all n locations
agctcgtattaactgccctctgatttcttttgtttcccccacatatcttcttcgttttggaggntnncaccaaagagaaacaaaatatctctctttggctcccctgctgtgccaattaaactcancaacttatgagctcgaacatcctcttcataacagcgtttaatatccaggatccactcatgcaccaccacagcaatagctgcacaaagttcagtcacttcttccttgtttttcgggctcctagatagggcatctgctactaagttctccctaccagccttgtactcaatagtgtaattatattccatcagtttaagcaataacttgtgttgtatcccttccaccagtctttggttcatcatgtacttaagactctgctgatctgttttgatgac

SEQ ID NO: 47859 - DNA, 393 bp, Oryza sativa
  unsure (1)..(393): unsure at all n locations
agcttccctttctcgaagctctcctactttatacattaacaanttctcctccgttctaaggggttcagcaaagaaagaaaaaaatncttttntttttggccttcccccnttaaaactcttgtcactacnccccctggtatccttccagaactagcaggaaaatgatgttgaacatgtaacacccgctaattttcccgtgctagatgcaatggaaatcattgattgtccaaaactgacagctatgcctaatgctccggttctcaagaccctaagtgtgataagaaacacaatattgattggcttatcgtcaagtgttagtaatctgtcgcatctatatcttggtgcaagtcaagggagtttaaagaggaaaaaaacactaatctatcactataa

SEQ ID NO: 47860 - DNA, 393 bp, Oryza sativa
ctgcaagcttaccgcacctcactagtctgttttatcatacccgcatgcgaaatttgtcaacagaggaacccgtagcctaatggaatagcaaatgactatcagagtatgaaaaattttgctgttaccatcataccatggaatcttatatagtaccttacaatactaacctgttgtggttctgtccttacaagtcgtttttggtcattgctaatagttaagtcttatgttagtttctgtagttctgtcatatttctgctcttatctttatcagtccttttcttacctgtggccatctccccttatctctgaagttggggcacttgatccttttgtttatatctctatatgttaaggatctgaagcccaacactacaatgcaagatgtgtttgttg

SEQ ID NO: 47861 - DNA, 387 bp, Oryza sativa
agcttcaaatagccaatggatgctggctattctagatcataacaacaggtaagatccaagatccgcagatgattcaatcttaagaatgcatctgcaagaagacagtttttgaatgatattgccctggccccggtgagaacatctttctgaagggttgagtgtcctgtgtgatttatcagcacagcgtaagtggaagagaccttttcagctgaagggccccttgatagctctctaccatcagaaattacaatgtcactaccagcaacatattttgcaaaagcatgcaccaagctattcacctggagtaatgtacgacgattggtaggactgattccagtggcctaaaaaacaaacatatcaatctcacaatttgctccaaaacaacat

SEQ ID NO: 47862 - DNA, 287 bp, Oryza sativa
cccatctccatcaggatctaccatagctgtataaccaattggtgctgaaattggcttgcaattctccatcttgaaccgtcttaaaagatcctccgtatacttcgtttgatgcacaaaagtaccttgaggtgtttgcttaatttgcaatcccaaaaagtacgataactcacccatcatgctcatctcaaaatctacaaccaaagcgtgagtcgaacaacaaaagatgatatcatccacataaatctgaacaaaaagttgattatcaccatgcttaagaacaaaaagcg

SEQ ID NO: 47863 - DNA, 402 bp, Oryza sativa
agcttgtgatctatgattgtcgatgttattatttttaaaccatgtgcacagcattcttcctttattatattagtagtttgctactatggggtatcttacaaatgtttgaaaaaaatttagagtgaattccactttgggctaggtttagttatctatattgcaaattagaccaggcattagtaagccttttcacctagaactaggtattgttacaaattttgcaccttgtaccggtggcccacatgtcagaggatctttctccttcttcctcctcaaaactccctgagcccaactctatccacaccggtgagcttgtctcttcagccagtagcagcaaatagcggctggccagctagccctctcaggcccactccaactcctgttacacgaccggctgcagca

SEQ ID NO: 47864 - DNA, 402 bp, Oryza sativa
  unsure (1)..(402): unsure at all n locations
agcttcatacatttcttaagtttagtatattctgtatagtatagtggaatagaaatagaaatagaatcttcagtcctcggagtcttatgaagaattcgggtatggctctagtagcttttacttcttttgtaagacttgtacttttattacaatattcttttttatactattgcggtattatattactttccgagtatatgaataccaactttattatatgtccaagttatatttattacgatgctagcttatctgggagatgcaatggtgtgggtataatgatcgtatttacgatgactctatgtcatgacgatgatattagagtagtatttggtaatttaagcgtggtgtttagattactggatatcattatttanggttatatgctatggaagcgaggtg

SEQ ID NO: 47865 - DNA, 400 bp, Oryza sativa
  unsure (1)..(400): unsure at all n locations
agcttgcgaattgcgantgtgcgagcgctctctgcggtattaattnttgctttccctggggcgagggnnacgtaacaggcactacaataattaccttggtganagacgagacgagacgagaatatgagatgagatccccattcaatctgcctctctaccccacgaaagaaaagattcttctcttcgtcgacgacccggcctctcgctctcgttgcctttctttcgcgctcagtctctctcggccaattaagctgtagatcggccaccaccaccaccaccaccaccaccatccacagggcgctgcaagctgggccaggcctctctctatctctctctcttgagaggagagattaagtagggcatagagagaaaaaagctactcctaattaagccacagctt

SEQ ID NO: 47866 - DNA, 399 bp, Oryza sativa
  unsure (1)..(399): unsure at all n locations
agctnttaaaatcaaatcacttagaagctttttacaaacagagacatatccctacttttntaagagttgnngatgaagggagcacaatattatttagtcatccgtatttgaatcggttttatctatatatttacctattataaaactgaaaatgattccgtactcataggtagtttcgtccatcctggtcatgctggttctgtccgattgagttcctattgatcattccttttttttccaacatgagcgttgaatctgcatcggcggcgagcaaactagagcccatatagcttccggtatttttttatccttttttcgctgtttctttatcacactttcgggttttttttctttcgtttttctcgcatctcgccctttttttatctcgtccgatccatc

SEQ ID NO: 47867 - DNA, 388 bp, Oryza sativa
  unsure (1)..(388): unsure at all n locations
agcttaattgacattatataattccgtgttctttattgtactatatatatnnaaaagatcgacgaatgtatcttatgcacacaaacttctcatacacaccaattataaaatggcacggaaaaatatataaaaagttgaaacacatactttcagattttttttgtcatgcacctttcattatatactagtcgtaaaaaaataaaattctgacattttttacttttaagcatgtcagatttttttatttttttgttactgttaaaatataaagaatttgaatatgaaactttgcatatttgtgtagtactattgttcaagtttgctagatttttttctaaaatttcttagctaatatacaccgagtaaatacgacaagtttgtatgcata

SEQ ID NO: 47868 - DNA, 401 bp, Oryza sativa
  unsure (1)..(401): unsure at all n locations
agctntgatcctgctgaagccatcttatattattggctgagccacgaacagttttccgagcacgttctacaagactgacagaaagatatcaagaaggataccaaagattagtcctcccaacaccggaacatcttataaaagaacacctcatccacgaaagctaaattttatattgcaatttattcttaatggacatcaaaatgacacgtgttttcatgcacaagttcttttagatgcacacctattgaattgattatttggcacagtgcataaaatagaagtgtgtgcactaaaaaaagagccagttccaatagatggcaattgcataacaagtgcacttaacacttcataaagttcaagcatgcgtagtttattcatgataagtgatgatatgttatttg

SEQ ID NO: 47869 - DNA, 401 bp, Oryza sativa
agcttgatttgtagctagactctgggtataaatgccaccttgctgatccaatcctggattaaatataaccacattacaagcattaggtagtgaagagaaaagccctacaagagcacgggtcgttgccactagctttttttttttcaaaacaagtacgtaagaccgtcgtatccacatgtgcaaatgaaattgtgaaaacttttgtctaggcaaaattgattccatgacatcgaaatatcctaagaaatgttttactaccaaattattcagatatacttaaataccatccaaagttataaacatttagaactgtggtgctagtggggaggaaaataaaaaatatttgtaaattatttttgtgtggatccatatcattaacaatatttccttgtgaacgtaac

SEQ ID NO: 47870 - DNA, 287 bp, Oryza sativa
  unsure (1)..(287): unsure at all n locations
ccgcgctgcataaaaactgttctccncccttccttcatttcccgccctaaaagggaagagaactgactgcccctttctcttactctcttcctgcgcaccccatgcttcctcatgatctttgcgaggtacaaaaagagaggaaggttttcccgtataagcgcgatgtcctggtataaatcgcccccccttggtgagtcgatccacgactacccacattgaatcctgacccgatgatagccggagcatgcctgttataaaatccattccaatctcctcccatttccatt

SEQ ID NO: 47871 - DNA, 392 bp, Oryza sativa
agcttgatgtgtgctttgtgtaagtttgttattactgaattatttttgcttgcttgtgatgtgcatgcacgatgtgcatttccaggggatggatctcaaagatacgcctgccctgctcgattatcactgatgattaattttcaaaagaagattatcactgatgaaatcttgcggcggcttgtgtcctgctcagctctgcagttgttaccaggaaacacgagttgctgttgatctgttgtatcctccctcggcctccccaccaggcggacgcgcgacgggtgcagcatctctgcgacaaggttgcgccggaagatttgtcacacgggcccgcatctgcagcgcgtgatggtgtagtcgttctcgccgaggagcgagcgcgccacctccaggcg

SEQ ID NO: 47872 - DNA, 384 bp, Oryza sativa
agcttgctgtgtgaaacaacttatgcttatacagttaaatagaagacactggcgtaaacaatgaacaagcattgagcaataccttccagctgttgagtattatattgcacccctacacgttgtgcaccagatagtccaagatctgtgaataaccaaaaaagaatgtttatgccatattgaaatactttttcgcggcgattttataattctgagcctattaccattcattaaagaaacggtgtacattttttttatatattaagtatttgcttcctcaatacattgaacgatataaaccttctcaaagagcctaccttcagccgatgacctcatactttcacgcgaagcatctttccccaactttgaatcgttttcatcagctaa

SEQ ID NO: 47873 - DNA, 397 bp, Oryza sativa
  unsure (1)..(397): unsure at all n locations
agcttgtgttgggtgttccatctatggctgccaagccannttccttcgtggcttggggcgttgatattaagagagaccaaaaaatctacttttgcgttgccgcggagttaagaggaggggcccggcagaaacattntaaaantaatgtacccttgtgctaaatttctcgtggttcatctgaaattttgatcttctactactcgtggactcctgccaagatatcttcccgtaaaagcaaattatgtgaatttagaaaaaaaatgtttaaattccaaaatgtttttatttcaaaatttcattatgtcatagccaaaaatgtttttttatatctccatgcaataactagaatttggcaaaaagttatacaaattatattctttgtcaaccataagtattt

SEQ ID NO: 47874 - DNA, 405 bp, Oryza sativa
agcttaagtgaaatatagaggtacaaactatctagttgcagcgattcccagattacgaatgaaaataatatttatatatcataacaagacacaataacactttcaaaaaaggcttgaattataccataataacatagggtatgtataaaactacattatatatacataaaagttacatctaaccatttaaacatttgattttgttggatgacaaaataaaaattcccgtggcaaggcacgggggttccaactggtttaatctacatcagtgaaccaaacaataagcactggacaagagttgcaaatcatcaatacaataagactaaatataaattctagttctgaaagaaaactaaatataaataccactcggttaaaatcaggaagatgttttgattattcaca

SEQ ID NO: 47875 - DNA, 403 bp, Oryza sativa
agctagcatctttgaaataatcatgaaatttatgctccatttgtgaccatgtagaaattaaattgcaagcaagtaaactataccatgttgatgcaaagtttgacaaagaaagaggaaacaactttaacttaagcaaatcttagggataagtccattttacaccccccaaactattacttttgtctaaactacacccccaaactaaaaaaccgggtattcaacaccctccaactgtcaaaaccgctgaattaacccccccagtttcagatctgatggttttagcctacgtggcaaatgacatggcattcagattgatgaaaaaatatttaaaactttttgggcacaatcaacaaatcaaagtcttctcctgtgctcccctcctctctcgatcctgttcttcgca

SEQ ID NO: 47876 - DNA, 392 bp, Oryza sativa
  unsure (1)..(392): unsure at all n locations
ctgcagcttccatggcgatggattctgttgttggtatggaactgatacacctgtggccgttggcgcgcgtnaaaaagagacaaaaaattacttttttacttttcattcagaaataacttaggattcattctgcacaatccgatggtgttggtgcttataacattgtgttgaagtaaattgtgcctctgccatttctttcataacgtgtggcatactatgataataacagttcatttttaactaaattgcgcctatgttgtttggcttggttgaatgcaacttggacaatgaatcagtttctccaccccctctacatcttgaaggagcacctctgcccagggaggctttgtgcacatcgccttgtgttcggagtgtgctgagggttttctcaa

SEQ ID NO: 47877 - DNA, 281 bp, Oryza sativa
agattatttgtggtgaactattctcctatcactgacgcctatgctgatcgctcccagccgcgaatctgagctgcctcttctccagcatctgcttccacacgtacaacacccagagaatccatcctaacatcgacgctatttcttctggtccactcctatatgcataattgtggaaaacacactggctgtcacaaatctgcccacttctggtcttttttaagatatcagaaattatcattctgatccactagcgttgacactgacaaaaaatttccatattc

SEQ ID NO: 47878 - DNA, 404 bp, Oryza sativa
  unsure (1)..(404): unsure at all n locations
agctntagacaatgtcaaaacatggttggttattatcaggattttcaaaacctggtggttgtttgacataaacttcctcctgtataaaaccatttagaaaagcaattttcacatccatttgatacaatttaaaaccttttgaagcagcaaaagccaacaaaagtctaattgcctcaattctagcaacaggagcaaaagtttcatcaaaatccaaaccctcattttgagtaaaaccttgagcaataagtctagctttatttctcacaatcaaaccatcctcattttgtttatttttgaaaacccacttggttccaataatattatgtccagaaggtggttcaactaaagtccaaactttgtttctctcaaaattttcaagttcttcatgcatggcgttaatccac

SEQ ID NO: 47879 - DNA, 424 bp, Oryza sativa
  unsure (1)..(424): unsure at all n locations
cggatccttaagtcacctgcngcatgcaagcttacttgcggagtggagaagtcatangattattggtccaaatccaccggacgaatccgtcaaccagatgacctcgagccgcacgcgtcccctcccaaaaggcagcagcggtgagcgaggctgaggccgacgacggaacggaagagacgatgaaccgaccgcgtcgcgaagaaatctccgaaatctcgtggattcggtggggggaaggaatcgatcaatctggagagaaattttttctttttttttctggaatccgatggagaaatcagggggaggaaatcatggatgagccgtatatatatatatatatatagagagagagagaggggtcaattaactggtgctacatggagtatgggctccaagattcaaattgagtatatatccaatttga

SEQ ID NO: 47880 - DNA, 398 bp, Oryza sativa
  unsure (1)..(398): unsure at all n locations
agctntgacgacgcccagagagagatatagcattgtttagtctgacctttgcttggctttaggactttaatctcgttcgggttaggaaagccatggcataactaacgcaaaagcttggcaaaagctacgctgataacgtgagttacgccgtgcatcgtcgtcgtcagcattagcagcgaatccgaggaggcctagcgtgcatctaatgtgggggccatggccatgatgcccaatggaaaaaaaattgtctctaatcttatattctgcgaaaggaggcttcttttgttcttggctggcctttgtactgatgacaaaactgcatccccctctctgcagaaacttgcgggtgcaatgatgaaacgcgatgtgcaggatttcgcggatcttgactgcttgga

SEQ ID NO: 47881 - DNA, 395 bp, Oryza sativa
  unsure (1)..(395): unsure at all n locations
agcttctctaatattgttctttccctgttttctgcaagcgaaanaaccttattctgttaggagtcttagtagagaggaaagatattcattcttacgtcacgtggagaaattttaatgtgagtcatattctttgacatttctaatcatgtgcttgtacttgttaataaaggttaatttgtcaactatactagtgaccagtcatggtcaaacgcatacgcgtattctagtactcaggtgtatcacgccctcggttaatttacactgcttggtttatctccattcttaaatcgcagataacgaaaaaaatgctgatttaatggattacagataaaagcgatgaactcttaatcagactattacaaaaacgaacggaaatgagttttttctttactttg

SEQ ID NO: 47882 - DNA, 394 bp, Oryza sativa
  unsure (1)..(394): unsure at all n locations
agcttgtacatgtgcgcnctttntagtgttggaatgctgcgtctaggccttggtcggtggggggggccttgaagaggattaaaagatattgtatgggaataattctccaccataatagttgtgaataaatcttctccattccctctctcattgggattaaacgaatgatgccttaattgggcacacacaccatcatacgcagcatagcaaacatatacacatatagatgttctcgatgtaaccacgcttacaaaggcctggtttagttcaccaaaaaatttccaaaaaacatcccattgaatctttatatacatgcatagagcattaaatatagatgtaaaacaactaattgcatagttaggggggaaatcacgagatgaatattttgagtcta

SEQ ID NO: 47883 - DNA, 393 bp, Oryza sativa
agcttggcgcacacgaaagagagcgagatttcattattatccctcgcagagccccctacctggcgcgccagatgacagagcgtggggctcctcaccgggagaccgcgcaggcccccctttgccggttcggccggggactcagggtgagattctaagctctctgtatgtggaaggttctcgagacaggaaacacacaagacacgggcgatgtatacaggttcgggccgctgagaagcggaataccctactcctgtgttttgggagatctgtgtatgaaggagctacaaagtatgagccagcctttcccttggtctgggttcccaatctggaaaagtccagtcctttcatctaagtgggcaaagtccttcttttatattgtcgcgaccgggaaaa

SEQ ID NO: 47884 - DNA, 390 bp, Oryza sativa
  unsure (1)..(390): unsure at all n locations
agcttagcgaattcgtcggcgactatgtatttgcagctcccgcactnagaggaagggggcgactcgagaaggagataacatttacttgtcgatagaaactcgacgcacccctacctagcgcgccaactgtcgaaacatgaattctgcaataataaaagggggtagcgcacgagacctacaagtggatggatgcggagacaaggatttaaacaggtttaggccctctcaatgagaggtaataccctactcctgtttagggatttaaatccgccgggtgtagtatagatctgacgatcatatgtgctcatgccccctagagggcctcctgtccaccttatataggatgggagccaggattacaagatagaaaccttaaccaatacggtatcg

SEQ ID NO: 47885 - DNA, 401 bp, Oryza sativa
  unsure (1)..(401): unsure at all n locations
agctntntaatcactactagtttggtcatgattattttttcctgtgatgattatagaacgatctgctaactacttcctccaatgtgagcctatggcagtagtaaggctttgcaatcatacaaacttgtgagcagtgataagtttggatttataggcttactttatggtgtgtcaacatcttggttttatttattttttctgtcacatcaacttttcagattgaagtaatagtactgtcatgttcctaaatatccaagattacatgatcagagtgtccacatgttgtatgaactatgaatgcctcagaaaagtgaagtgctccactaaggcctcgaacctagttgtcagttccaaaacttcagacgaattaaattttaaaaaaatcaccgacaattcttgaa

SEQ ID NO: 47886 - DNA, 401 bp, Oryza sativa
agcttgttcagcaaccaagcccaactagataatatatagtcgtttatacgaacttctactttatacgaacggaaattagttaggttaagtagtgaactcaccagttcctgatagacgacggcatcacttttgttctcaaatgtgacagagccgtctgggttgaccttaccccttcccgcgcacagttgcgagctctttgttcaaggatgtctgaaaacggggtagggacatttgctgctgcagcggctgcatcttcttgggcccatattgccttcttgccgatgtaccctgcggtgcccagccgatgcgggtgctcattccgctgctgcagtaagcgatgtgcctcgcttgattccctaaactcttgggtgttcttgagagagcagaattcctcccacact

SEQ ID NO: 47887 - DNA, 400 bp, Oryza sativa
  unsure (1)..(400): unsure at all n locations
agcttattcttctccggagcctttaggttcttgacgaggcactancctctctgaacgcagagtgccgaactaacaacgaggaacacatacgctctatcatacagattatcaaagagacggaaataagcaatcctccatgtcttcttgaataacacagcacaaaatactaaccacaagccaagcagaaaccccacgattattcctagagtgaaagacatctctgttgaccaatcattgtttttttgaaaccttagccagcttagctggttttatatttcagaagataagcaccgtacaaatgccaccaatggtgacaaggggaaagacagggggagcatagcacaaaaaaaggaaaattatgatgagaggttaaggcgctattctcgcaagattttttgcc

SEQ ID NO: 47888 - DNA, 394 bp, Oryza sativa
agcttcttcccgtcggctcgtcgtgatgtttattatatgatatctgcagtgacagtatccatactgaccaaattccatattgtttggaggagctgaactctccatgcagtcttttggaaatgcatgtggggcaagcagtgggaataggcaatagctgcactttgacaagtttttttgtagaatatgaatgtgtcatatttcgcatcatattgtaagaagcattttgttttggcacttttgctggttcagttgtgtagcacgatttcaaggttggtgtttgtattggaattcggtgacgagaaaattatgtggattaatgaacagaagcataaaaatatctccttttatcccctttccccttgcacttgattttgttatgttcattgagtagtgg

SEQ ID NO: 47889 - DNA, 397 bp, Oryza sativa
agcttgaattaattactccctccatcccataatattttacctgtctaggtcaagaactagaaaactagaaaggtagctattatctctgcattctgtttacacaatttcttttgtgtaaagttattctgatgttatagtgctttttagttactacattcagatctaaccagctttagtatttcaaatggtgtcaattgcaactttgtacgagcgcccatcgaaatatcaatacagaaccagactccaatataagcacacaaaaccaaaatgtctaacaagggaaggcaaaagaaaaaaggagcgcacctgtcttggtttggtaataagatctactgcatcctctacatcggtatcaccattttcttcatcgacatgatcattacaaaaatcatcacca

SEQ ID NO: 47890 - DNA, 233 bp, Oryza sativa
agcttagaatgagaaaagaggctcatcaactgcattaagagaatattgtaaaaaagtttatatataagcaaaggcctaatcaaagtgcaaaattagcccatttggaaatgggctgaacaaataacttgtactatataaaataaagagtaaagtccatcaccgcggccgtgtcttgtacgggtatgttatacttgttcttaaatctcatatttaccggtcaaggccctatactg

SEQ ID NO: 47891 - DNA, 392 bp, Oryza sativa
agcttgtgttgggcaaccacctgattgatcttaactgatcatttagcgagttgttctttaagctttttcagcctggctgttttaccagcgactgtctgaaaggcaccagcttcttttgctgcaagacgctcgctctgtcggtgcttcacaatttcctgggtagctctcttctttccacctctcgctttcctgacggagaaagtctgatctggctcgttgtccactgatgagggatcctaagtatacgcagtgtcaggttcatcatgcagctcagtgatcctaaccgaagttccagacgttttggtcccaacagccagctgtcccataagttgaagttgttggcattgttgttgttccccccaccctgattctgttgtatgttgatgttgagc

SEQ ID NO: 47892 - DNA, 387 bp, Oryza sativa
agcttcacatttcttgtagatattgttatcactcttttctctgaacagaaagatgctacagttctgatgctgactacagcgtcagccgcaacttggtttgcatcctcatacatctcctgtataatgagatcccattataatggcaatcaatttaattctagatcacttgtctagatcattctcaataaaacagcaagcaatttttacagttgtaagctgtaatgtgtcaccttagattcttcactgaaccccttcaagaacttaacttgagcatagccctgtgcacccactaaaggaattacacaagtgatgatcagtgcaagcctccaatctgccgcaaaagctatggcaaagccagtgattagtgtagctacagcctgtactata

SEQ ID NO: 47893 - DNA, 392 bp, Oryza sativa
agcttgcagagttatatatggcaagagttttttgtttacatggtgttcccaagaaaatagtgtctgacagaggaagtcagcttactctttagttttggccgaagctataagaagagatgggtactcgttaaaatttcagtactgcttatcaccctcgaactgatggccagacagaaagagtaaatcatattttagaagacatgttgagagcctgtgctctagatttcggtggaagttgggataagaatctgccgtacactgaattctcttataacaacagatatcaagctagtcttcaaatggctccatatgaagcattgtatggtcggaagtgtcgtacaccgctccttttggatcaaactattgagcgtcaggtttttgggacagatgta

SEQ ID NO: 47894 - DNA, 379 bp, Oryza sativa
agcttaacatagtactgtagtcttgttacttgtgagcgctctcatcttaatttacatcatatgttatgcagctctgcaagctctcttctactttcagatgcactctgaaactgagaactgagtttgagctgacatttctgccagcttcatgtgcgtcagccgcactgacaacagcgaaaccgttggcgccgtggtatcatcgtcgcgatggacccccgaagaacctgaggctatcgatcctcgccgtcgccggaaaacaagaccgtcactgccacaattcggctgtcgtcatcctctaagccggtgacaagaactccttgaagtttcccagccagtggtagcccgaactctttcttgccatggaacttgtcgtcgacga

SEQ ID NO: 47895 - DNA, 403 bp, Oryza sativa
agcttcgcctaaatcggtttggaaatcgtttgattctagttcgaatcggatcggttgtcctctctccaagccgagctttccttcgccgtctccgccgccgtgggccttcgccgccgcctccttgcacctatttaaggacccccgagctctcctctacccgtcgccaccctcgccttcgcctctcgtcgtcggaagagctctagcgccgtgtgccctagcttcgccgtcgccgccgccgctccagccgtgcgccgccgtcgtttcagccgtcgccgtcgctcgggaagaccgccgtcgggttcgcaaggtcgtcgccgtcctcgtccgccccttcgccgtcgccggagaccgccggagcttcatcgccgtcgtcaacccgaaggtttccgccgcttcctcctcg

SEQ ID NO: 47896 - DNA, 400 bp, Oryza sativa
agcttctcaaagtcctcatagactccggtgattattctggtggtcaattcatcgtcgagcccaaacaaaaacttctcctgcttctcaacatcggggcgcacgttctcatgagcgtagcgcgcaaggcggttgaactcatgcaagtactctgtaactgacatggttccttgctggagcgcacggaactctctcttctattgtgccataatcccttcaggaatctgtgccttcctgaagctttgacaaaactctgtccaagtaacctccgttgcatctagacgggtcgccacgtagttatcccaccaggcagaagcgggaccttgcaactggtgtgtagcaaaagcaactttctcttggtcgttgcattgcaataagttcagcttcttctcaatagcacgga

SEQ ID NO: 47897 - DNA, 397 bp, Oryza sativa
agcttgaccggagaagaaagctgcggctttttttctatctagaccatgggtgagtcaccgtcgtttggttctgttagacttgaccaacttgaggcccacaaggcccatacagcaaattgggcctagaaacttcatgggccaaaggcccaacgagggtcaaaacccagaagcggcagctcgctttttccccaacccggaggaggccgaggaacacacagatccagccgcagaagcaaaacccaggagcagtcatggatcccctcgccgtgctccgggactacaccgcccgcggcgacctcgacaagatcatcttctccggcgacgaggtgctcttcgggtcggagtacaccttcccggtcaacgcccccaccgtcttcaccaacaagcagtcgggccg

SEQ ID NO: 47898 - DNA, 411 bp, Oryza sativa
  unsure (1)..(411): unsure at all n locations
ttaagtcaccgccgctgcagctgngcgcacgtcccacaccgctttttttgacggtgatcgccgtcgacggtgggctctacgagcactacaccatcttcgccgaatgcgtggagagcaccctgagggacatgcttggggaggatgtgtcctccaccattggcatcaagctcgccaaggacgggtcaagcattggcgctgctctccttgctgcggctcattctcaataccgtgaggctgaagagctctagtggatctcttctcttggcagctgttatgctttagttgtttggattttcctgagattctgaacccccaggagcaattgcattctatagagttgcaccagcaccgtgctggtgtttagaactttagatggaggcaccaacctttagtagcttgcaagtcctgtaa

SEQ ID NO: 47899 - DNA, 396 bp, Oryza sativa
cctgctgcatgctaactctacatacgtggactgaactattttttttcttcaacgggagttttaagccagaatgctgaaagagaacagacgtcgaattgcatgtggaatatgaccgactctatgctgttccccctgaggacacgcgcaccgtagttgattatttgacatgcataggatgggatttaaattcgacacattggaacaaccctcaagcgaaactaagaaatctctacattatgaaaatatcatagccatgaaagagtaattaacaccttcaaaaagtagggaactacagcctcgatattgtcttaatactctgacaggaagatgtcctgatgaccaattgtgtatcgatgtgcataccgaaaagatcttatatatacgttcttgcaccct

SEQ ID NO: 47900 - DNA, 394 bp, Oryza sativa
agcttgtgctatcccatactaacatatgttttgaactgtatacgaaatgatctggcattgagcgtaaaccttaggtcggattgtgctcactctccccctatcgatatacaactaatcagcatatgtacaccacttgaggcccaaacctaaaaaccatgggttccactattgtatttattcaaaatcacaactcttaaaggtctggtcatagtaattaaaaatcaattttcatgtttgaaatgaccccattatgacaatgaagaccattctaagcatggctaagctttatagttacctagtgtcaccaaaactcatatataaagtgggatagacatattgttcctaaagttatgaatgaagaatatggatataaggggaattcaagtgataatgc

SEQ ID NO: 47901 - DNA, 397 bp, Oryza sativa
agcttcatgagttccaacacgcatgacatcttgctgtgcttcgacttgcatccatcatacaacggcatctggcaatcttccaccaacttactaaacttctcataatctctgtcgttgtcctctgcgtcttcaatgtcatgcaacattgtagatagacattgagtgtctaaatctatggtctctccacctaaaggagaaggtacgaacatgccttctcgagctgcggcggtgttctctacatcctgatccaacacttcttcagctgcgacatcaggcgcctcttgctctccatgcttggtccagcaggtatatttcttcatgaatccattcattatcaaatgagcatgcacttcatccttgtcttcgatcatctgttcattcttacagtccctacatg

SEQ ID NO: 47902 - DNA, 385 bp, Oryza sativa
agcttgtcctagcatggagctggctttttctctaataaaccttgtggttggtgctcatgttactgatggagtatattgtagaagcagatttatgttcattatgaaatatatatcgcttgtttgggataattctaccgtttgtgctgctctcacaattttctcacaagctacttatgaagctacttttcagcgattggacattttttggtgcattcaaaacaagaaaaatcagtaaaacatgattaatctgaatcaagtattagttattataaaattaaaaattgatttatttgattattttaagaacttctctatatatagttttttatgaatcatattgtttagctattctaacagctaatacataatgagaaaatagatgttt

SEQ ID NO: 47903 - DNA, 398 bp, Oryza sativa
agcttgcggccgcactccttctccgcagttttttgatggagcttgatggcgtctgcagcagctgccttggagtcgtgcaagaccacccacatgtagcgttacacgtcgtcgacgagcagcaggaagaagcgccggcctccaggtgtggccggagtcacagggccgcagaggtcaccgtgcacgagctccagcttctcctcggcgcggaaacttgcttggcggggaaaggggagtcgccgctgcttggtgaggacgcacgtgtcgcaaaactgctccacgtgctcgactcgcggcatgccctgcaccatctccttgttgccgagctgcttcaaggctccgaagttgaggtgcccaaagcgctcgtgccaccgccatgcatcatcgtcgcggcgggctgg

SEQ ID NO: 47904 - DNA, 395 bp, Oryza sativa
agcttgctggtgctctaggctggattgcttatgtacgcatgctgatatggcccaagaactgaaactgaaatacgaactgaaactgaaaccttaggagatggtcttcctgttaggatcaggctgaaatacgaattcacgatgcgtcccattcccatcgatctccttaccgttaaagcgggaatgaacatggcttcctttgccatcaaatattagatgtagtccctcatttttgttcagaattaattatctgagggctccgatttaaaaaaaacaaatagtatggccatctagtcatggggctaggattaaccacactagtgaccaggttattgtttgccacacctcttcgatgttctgtaattatttctttttcacttgcagcaacctatacgcat

SEQ ID NO: 47905 - DNA, 395 bp, Oryza sativa
agcttggagtgtttaattcttgcatgtgtatatgatgagaactactctgctaagtttgtgaagactcttgagcgagtacgttatgtccggatgctccagttaacagcaatgccattcaattctgacattctactatccagtataaagaagttaatccatcttcgctacttagaactgaggtgtacgtcggataagcccaaatctttgcctgaggctatatgtaagctctaccacctacaagtactagatgttcaacattggagtggtctaaatgatttgccaaaggatatgagtaatcttgtgaacctacgccatctgtttgttccggggtcaggatcattgcactccaagatatccagagttggggaacttaagtttctacaagaactgaaaga

SEQ ID NO: 47906 - DNA, 394 bp, Oryza sativa
agcttaattcgtgtcacaatggctttgttgtttgcaggatttaaacagctgcaaagataaatgtgttatgcagaaaaggaaaataatatcttgggatttgtattcttagcaacagcactgtgtttcgcatatttatacgaacttaatttactatcttgtagctcggatcaaagatattacgaatacgaagtgacatgaatgtactagatttacctaataatagttctttcttagcgaagcatttgtgtaactgtactgactcgtgattgatatattattagcaaacaacatgtactccttacttttcatcaaaatctcagcacaaagcatatagaaatatactactattttcttctgtttataccctcaagataaatgaatggaatttcatctc

SEQ ID NO: 47907 - DNA, 401 bp, Oryza sativa
agctaggaattaagccggcgtgcgtgcgtgcgtgcgtgcgtacgtgcacatcagccgctggaacctggaataatccgggtgcccctctgtgccccaccccgctttgccgcgagccacaagaacgctggaaatgtggccacttcttttcccgaaagctttcacgacgatgtggaatccggcaaagccggcatgattggtcggcgcgacaaaattaaaagcgagggcgcaacgaaggcgagacgcactcaccgtgtcctctctcgccggcagcggcatggcgatcgacctcatcgcgtttcaacggaggtcatcacgatcatgatcacagcttctcgatccttcggcgacgcgaggataattgacctagctaggcttgggagcaacattccggtgatattatg

SEQ ID NO: 47908 - DNA, 397 bp, Oryza sativa
  unsure (1)..(397): unsure at all n locations
agcttgatttgatggacaagggaacaaatgctttttatgtatgtttctctttactactttactctgtatgcaatttgggttatgtaaattttaatcctcccaatatttgttcttctcattaaggttctcgaaggaagatcgtacagactgcagcatccatgggtcgggattgttaatcgttcacaagcagatatcaataagaatattgatatgattattgccaggcgaaaagaacaggagttctttgcttctagtcctgaatattctcatttatcaagcaggatgggttcagaatatcttgccaaacttctttcacaggttctggaaaacccatttggtgttctctctcttttttaattattntgaagctattaatgttaacggatgcattgctgtt

SEQ ID NO: 47909 - DNA, 399 bp, Oryza sativa
  unsure (1)..(399): unsure at all n locations
agcttganttgatggacaagggaacaaatgctcttgatgtatgtttctctttactactttactttgtatgcaatttgggttatgtaaattttaatcctcccaatatttgttcttctcattaaggttctcgaaggaagatcgtacagactgcagcatccatgggtcgggattgttaatcgttcacaagcagatatcaataagaatattgatatgattattgccaggcgaaaagaacaggagttctttgcttctagtcctgaatattctcatttatcaagcaggatgggttcagaatatcttgccaaacttctttcacaggttctggaaaacccatttggtgttctctctcttttttaattattttgaagttattaatgttaacggatgcattgctgtttc

SEQ ID NO: 47910 - DNA, 399 bp, Oryza sativa
  unsure (1)..(399): unsure at all n locations
agctttgngtcaaactttgtgaaatttgtattatttatttcatatccattatgcattaattaatggagggcaaaaaagttagaaaaatatttgtttgatcacactagtgactcatggttcccacgataagctagttactgcaacagtggaaacgactgtcccctgcataactgttatcataaatgtgcaaggactgttagaaattctaagtacaagtacgacccaacttctgaacacaggattttagctacacattatcagttgcaatcaagccttgaggtcagtatctaagcaaataatagtatgttacagttgttcaacatgtttaaatgctcttcaagccacaacagtggaacgtaatgttctcattttgaaaagaaaaactgcattaaagtttga

SEQ ID NO: 47911 - DNA, 399 bp, Oryza sativa
  unsure (1)..(399): unsure at all n locations
agctngggatccagagcggcagatgcgtttactgcctcctccatgatttcaacggacggctggccgatcgatctttcggtaattaatccttcgtaagagacggccggtcaatctgtgctatgctttataaacgaggagagtttgtggcagcccgatttaagtgttgtctcgtgatttctgttcgaaatcatccgagaggctttgagaactagtatatatatatattggcatataggaaagagaaacgaagaaatctgcacgcctaaatctgcagcgcccatgtaagtaaatcaggaaaaggaaacatgaattcctacacgtacggcatcaaaattcaaaccaattataatctgcaccgccggtaaatcagttttttggcacggcatagagacggatcct

SEQ ID NO: 47912 - DNA, 399 bp, Oryza sativa
agcttgctgctatcgccatagccgatatttatcagcagattgctcttcagcgtgctgcccgtaaaaaaggcgtcgtccacgtgttgacggtcaaagcccgacatcgggccggtatccagtcccagcgcccggcaggcgacgatcagataggccgcctgcatggaactgttgcgaaacgctgtttcttcggcaagttgtgggctggaggtaaaccaactgcgggcatcaccgtggggaaacagtagtggtaaccgttcataaaattcactgtcccaggcgacgatagcggtgacgggcgcggtcagggttttttgcagattgccgctggaaagtgccgggcgcagacgttctttttcttctgccgtgcgggtaaacacgatccgtgccggagaacagttt

SEQ ID NO: 47913 - DNA, 398 bp, Oryza sativa
agcttcatcagggagctcttgaatgatttgcgggacagggtgaattcgttgaggagggagaacgaagtgatgcgaaaggaggtcgaacagagtcgggataaggtggaagtacagagtaaagcgatagatgatgctcgtggtgtggttgctgtgaagaatgcagaaattatgtgcttgaaggccaggaatcataagttagagaaggaaagaaaagtctttgtaatatgtgtggtgtcatgtatgtttgtgctatttgtggtgttctttggcaagaagtgagacagtgtgatgtgtggccaatatgatgtaatgaggtcctttattatgtgttagctatgctctggaaagacaatgtgtttgatgagatatatgtatcagttgtgctatcaatttggaat

SEQ ID NO: 47914 - DNA, 395 bp, Oryza sativa
agcttgattaacaagtactcatgggtcgttggagctgcagcaagatcagaccaaagctactactgtggcgatatggtgctgcttgagttgaggtagcccatcttttgagacagcaagttcatatcatctatagcggggttcctggtatcctcatcgagcccaccctcgtgcagcaagtcctcccagaaatcctcatttaactctccgttagatggcttgattttcccgtgttcagagctactggaagcaacatcttgttgcgccttgcctccattggcctcaacagatgaactttcaagatctgatggaacaccattgaaaagtgaatccactggatcatgtggttcaaacattacctgtgacacttgctcggggctagaaccggtacccatgct

SEQ ID NO: 47915 - DNA, 395 bp, Oryza sativa
agcttctaaaacaactttgagacagtcctctagcttatcttttaaatgctcacaacatccctctgagacaacacctaatgatgttacagcagcctcacgatacttgggattaatatgacgaaagctcacagaagcaaactcaagaactggtgggaaaacatgtctcggtaaattgatagccattgtatcaatgacttctgcagcagaacgatctgctgctagatcagaatctccatcttcatcagctgtttctgtaagcaaggggcacataacttgtagaataggtattaccagcttatgttttttcaagaaagatgctttaaattttacaagccatgagattatctgtatagcctgaaaaaatgagtgcacatttgaaatattagcagtttgta

SEQ ID NO: 47916 - DNA, 350 bp, Oryza sativa
acacctcggcatgcagcttggcgatcctgattcacctttttttttctgacctttgtgccgcacgaggaagaagcttacttctgggagcttgattaacgggcttattctgtctggtgggggtgacgcgacccctgcggagggagatcaggtcagaccattgtgtctcttgatattcgtagctaggctgtggctgtgcgattgccaattgtgcttactaggtgccaaccgaacaaagattggttcatctcacacaattatgatcgttcatcagtgaaataacggaggcagtatatgttgtgcacatcgatgctatggcattgcctggcattggacatatcttatgttattgg

SEQ ID NO: 47917 - DNA, 413 bp, Oryza sativa
atgcaagcttgccattcgtcttgggaacgacgactgtttttcgcagtctctccggatggatgacctcacggatgaatccggccttcagaagtcgcgccacctcctcacggatgaaggcttgatgttccggggcctgccgccgcactttctgccggaccggccttgcgctcggccgcacggcgagacggtgctcaatcaccttcctagggaccccgggcatgtccgccggtctccaagcgaacacggcagcgtttgcccgcacgaaggagacgagcgcgtctttctatttgtcgtccagaagaccaccgactcgtgtggtcttggacgggacgtctaccacggcatacttcttgacgcggacctccttacacgtgatcatacgctgtcttgaggcggccgggacagatgtgctg

SEQ ID NO: 47918 - DNA, 470 bp, Oryza sativa
ctaagctgcaaattggatggcaacatgaagtctcctgttcctctaagtttttgaaaacgactccgacgagagaactctatttatcttgacgttccatatctgcatctatgcctcatatcatagtcacaactgtctgaatcatatcgagctcttcagaaaatatatagcagtatctatatcaacttgatcttgtagctcctgtcactggttaatgcattgattgagtactgctgttaagggtgcttgaaaccttgctagccccctcactcctgataagttacaaaatgccttttgtataatgtggaagtattttactcattaatacgtattaaatgtgtctttatgcagatcaatgggcagcagtgtcctttctcctttaagggtagtccatattggatggctccagaagtatcactcgaaaatctttactttgtaattctctgtttcatgcatatcttattgccatttct

SEQ ID NO: 47919 - DNA, 412 bp, Oryza sativa
  unsure (1)..(412): unsure at all n locations
gcttttgctcaatttcacagtactatgtgtatatgctgatgccagtgctctttcataaaacagntgaaactgagccagccaaatgcggatgaattaagatatgcagactctgcttcgctggaagatattggaggtgttcgagtacatttcatgcctctgctctttttccaatagacatgacctcattcttcttaccatgtttagatctttgtgggtaactgttctcaagaatgaagaaggtcgaaactcggtggctattgctgtcttaagaggcagcactgatagtatactggatgatctcggaagagctgttgatgacggtgtcaacacttacaaggtatgtgtgtaaatcagcttcctgtcatttgtttggaacacacctgctgttttaatgtttaatttgctgagatat

SEQ ID NO: 47920 - DNA, 456 bp, Oryza sativa
  unsure (1)..(456): unsure at all n locations
tactaagcctttggatgcaatggtttgcagaccaatatgccttngcttctttttttttttatgtaatgaagcaacctatttctatccaacaggtcaacgaggatattgttagggctgcagctaccttgtttcattgtgatattattgagaagaaatgtngtagggcattgcttgatgttggtcactacctcaagcgtgagtctggcatcgactatgagaattgggacactttaaaactcgcgacagcttttaaaatcatatgcagccgtaaaattggtgattctgatgaggtaaagtcatactccctccgtcccataataatataagagattttgagtatttactcgcgctgtttgaccactcgtcttattcaaaaaaaatatggaattattatttatnttttggtgtcttactttattatccnagatactntaagcataactnnttcatttttat

SEQ ID NO: 47921 - DNA, 408 bp, Oryza sativa
  unsure (1)..(408): unsure at all n locations
acatgtgtnagttacatatcaacattatttcaggtttagaagagtccaaatataatttttataaatatttacatgcctttaggaaagggaaacacatataagagataagtcttactaattatctaaaataatctgtgcaagataaaatcacgggaaaattcttgtaggctattctcactacattcaactcactgtaattttggtataatttaataactacatttgatacctcaaataaatcagacaaaccagtcaaaaactagattaactatagttcttaataggctaaaacaatagctaactaaaatatgcattaaactgcatagaagtatatagagggaaatagttattcaaatactatgacatttatgatgaagtaaatataaatttctataatttatcttctct

SEQ ID NO: 47922 - DNA, 499 bp, Oryza sativa
  unsure (1)..(499): unsure at all n locations
acgcactctatataacactcaagctngtctgcagaaatgaaaggtatggttggatgtgcagaaattgaggatattattggatacagcaaattgtacctattaaaatataacagatataataacttcatgcttaattgcttaccctttccaacaatagcctcaagagactcaagggtagtgagagatgcagcgagatcatcagcccagatgttgcgtccatccacaacaccggcaaagaggtactttccagaggggaaaccagcactcttgataaggtcaagagtcttggctccacggataaggtcaaaaccataagcagtcacgctgttcatggatgtgagggtcctgcagtgaaaaggcagtatcagtgttctgccactaaaaagaaaaagcatgctaaaggaaaggcgggtttggtaatgatacgatagtacatgaaataaacatacttgtatgattcagcaggaatgtcagcgaagtatgtctcaataagcacatt

SEQ ID NO: 47923 - DNA, 377 bp, Oryza sativa
  unsure (1)..(377): unsure at all n locations
agctntgtggcatgttctgtaacatacatcacacacatcttttgttactttttgttatgcaaagcaacaggaatgctctttgatcttcagtttgggcagcggttggctgttgtgggagaggatctgcacgacctcggcccgccggcgccgactcctcctgctgcgccgcggacggtggtgatggctggctggatcctctccttctcgtcatccccctcgtccccatccctgcgccaccgccgcttccgtgggctctgggtgcagtgacagaggacaccgcggaaaaggagaagaggcaacggcgacacgcgtcgcggaggaccaagcgggccactccctcctctcccaaatcgccaagaatgagaggagttggcggt

SEQ ID NO: 47924 - DNA, 474 bp, Oryza sativa
  unsure (1)..(474): unsure at all n locations
ctcaagcttaacctgccattacaagcatgtaaatccagnacagattgatcctaacaatccaatacgtaatctaccattacagcaggcatgaactatactgtaatgtatatttccacacttccaaataaataatctatgaccaaatgcagtttcgaagctgatgaatcgcactggggaaacgaaaattccattctctgcaatttacaagtacattgataacagcctcaaaatccatctttatctgcaccatccaaagcacgagcacttctgcaaattaaaaaaaaatgtagagctcaaatgagatcaaaaatgtaaaagaaatcaagaacctagcggagccatcgtttcgcttattcgccgaataagtgaaacactatatttacaaacaaaaaataatttgttaataaaacctttatatacgtgttctagcgatttaaagcaaacgctaaaaaatacattctgataaaacacctt

SEQ ID NO: 47925 - DNA, 409 bp, Oryza sativa
agcttcatgggcctatattatactatataataatataagatttgagcatagtttacatataaatagtgcaagccattgaataaaaaattcgaaggaacacacgccattagtcttttacatgtcaactgaattacaattaaaacatgttgcactagcatacattgttttgcaaacatgcatagctaaataaaaaaaaaaaagctaactcatatataaatcgtataaaccacgggataaaaatacagtaccttcataattttattgaaattagtatgctcaaataagctgagcaacacaaataatcttttgtgtaagtgctctaaactatattatattaccatgtaatcaaccttagatagtatttaatgcacttttaatataccatggatagatattcaagcgcgcattc

SEQ ID NO: 47926 - DNA, 103 bp, Oryza sativa
  unsure (1)..(103): unsure at all n locations
ntgcagtttacgattcttacacctatctctatctaggattgtgatttcatcccccgaggggatatctcctcgttatttgcatgtcacttaaatggttataaaa

SEQ ID NO: 47927 - DNA, 446 bp, Oryza sativa
  unsure (1)..(446): unsure at all n locations
tccatctgaagaacagaactgnnactttgtaaatttgtgtaatgtatatgcccgattttgcaagtctgatggaatctgcctgtgccctgtaaagcttacctgtctactgatgttttggattcgtaaatcttcttgtagtgttgttacttcatgattacgcaatggtctaatgacctacgatttgaacttgaaaatgcaaattcaaaggattgaggaaggtacattgagtgataaggtttggttatgctgtttggttgttgaccgtgcatataaaattgtgtagtagtctaaggtactacctaggcagtaaaaatccatttgttgggagtcttgtactggtctgagtactgcatgtcgtatcatttntaatgatataagggcttggactaagaacactctgaaagtaatcatatatctatgtaaataaatataagcggcctttctac

SEQ ID NO: 47928 - DNA, 393 bp, Oryza sativa
agcttgtgttgggcaagttaattacccccggtatctgcaaaaatgcttgaccttatgcttgctgagctgtgtgaagtatgtggtggaagcgtttcagtttgcaatgtgcatttactgtttattagtacatagagtagcatgctaccaagtaggttatatttaacaagagagatgcctgattgtttagggcatttggtggtcctgctgattcgattgtatcttggtgtaaattgatcgatggttggtttgcgattaggattgcgtttgctagtttgtaattgtgtgaagattgctaggcttgtacatctgtgctaatttgacaaatgtagtgtttggctggctatcaactatcgcctgatcactgcccgatttgccgtatgtgttattaccact

SEQ ID NO: 47929 - DNA, 462 bp, Oryza sativa
ttcgccaaggtttctataggccgacatctcttaatgatgcggtcgacctggtccggcgatgtagagcgtgtcaattccacgccaagcaaatccatcagccggcccaagccctgcagaccataccactttcgtggccatttgctgtctggggactcgatatcctgtgaccgtttaggcgggccccgggcgggtttgagtatctgtacgtcgcgatcgacaggttcactaagtggcccgaggcttatccggtcgtcaagatcgataagcactccgcacttaaattcattaagggcatcacggcccggtttggagtgcctaaccgtattattacggataatggcacccaattcactagtgaactcttcggcgactactgcgaagacatgggcatcaagctctgcttcgcctcaccttgccaccccataagcaatggccaagtggagcgcgccaatgcggaaatcc

SEQ ID NO: 47930 - DNA, 397 bp, Oryza sativa
  unsure (1)..(397): unsure at all n locations
agcttgcaaatttctaattcatcttaatgtatctgtcaaaccttgtcaacttctgtgttgatgtangtcccaggatatggtctatccttcaattgatacaatggagttctgtagtgaaaatcttctagcatgtggaagtgattgtgaatatggaggttcagctgtggtacaattgtgggatattgagtctccagaatcgtacctatctttctctgccagtgattctgtatgtacttttattattatttttgctgaatgttctagagactagagctgaacacagcattaacacattgtgtttgcagtatattactttccttanaaccaaccctgctggcaacaccattatcacaggttggtatttcttttctgctgtattcagtatacatctatcact

SEQ ID NO: 47931 - DNA, 459 bp, Oryza sativa
  unsure (1)..(459): unsure at all n locations
tagcattntcgcattagtgctacagagacagggagtgatcgaatctaagtcgggaggttggtaatagttaacctgggaaacgtgaacgacagagacgcacgcacggacgcattgatgttcagaactgcgatgttgatttcattgtagcatttgagagaatgttggctgcttgggaacatgggaaaaaatggagggattttggaggattgaaatccattggaaataatttctacatgcccctttaaaacgaagaaatgacctccacaaaatattttgaaatttctatgggatagctaatttcataagtattttaaaggaaaattagaaagagacgtcagacgtgagattnttgggcccaattttccctaaaaactagacaaaacattgtattcttgaataaaaacatgtgctctctgtgctctntcgaggcttatnctttaaaaaagaatagaaagagac

SEQ ID NO: 47932 - DNA, 403 bp, Oryza sativa
  unsure (1)..(403): unsure at all n locations
agccttggcgatagatgaagtctgtcagggttagtacgtactatactgctcatcatgtcaaatttatccttttctctctctcttttttttctctctcgatatgccgattgggtttggactttcaattctgttactagatattatatgtctgttgtatctagatattatgaaataaatttagagattttaatattaatttggttcacacagaaccatgcgagagcacatctgcacatgcccttatatacataaaagatattaagacgtgaaaatgtaatcagaaaaaaaagaagaaaatatatgtccagtataaaaaaagaccaacgtaccatgcatggccgtttgcactntatgaagatgatgaattacagatttaataatttatgacgntcataattcatac

SEQ ID NO: 47933 - DNA, 462 bp, Oryza sativa
tcaacagttcaacagtaattatcttgtcgaaatgcaaggttaagagtaaatcagaaaagagatgattaatcatgcatgaagccaaacattaagagctattccagagaaagtacaaaaggcgatcggaaacattaagttaagaaataaatgtaccatatgtgaaaaagaatgaaagcaaaaaggcaatatgcactactatagaaacattatgaagttgaacagccctcactgaagtaccatttcatctgctgaacagctagcatcatctacaggataatgtttgattgtggcatcagataaatttccataacaagcaacatcacgataccgcacaccaccatcgcatggcgaggagcacttcatccatggtccagcaacccaatgatagatttctgcatatattagtatactaccaatcacttattctccaagtgatgtatcaacaattgacaactgaatcgg

SEQ ID NO: 47934 - DNA, 400 bp, Oryza sativa
  unsure (1)..(400): unsure at all n locations
agcttgatgaaatagcatatgcctacacttgtgaacaaccacataacttatagttttcatccaactgaaacctgcaataaagacatgacaactttggtgtgtttagttccacgctaaaattgatagtttgaaaaaattagaacaatgtgacgaaaaagttaaaaatttgtgtatgtgtagaaaagttcgatgtgacgaaaaagttagaagtttgaataaaaaagttggaatctaaacagggcctttggcagataacactagtccttagtaggatggcttcatttaaattatctggaagcctactattttcggatgcgcgcgcgtcttctgctcattgcgctaatcttctagctnttttggttggaattcctatttcacacgtcttgtgcgacatggacgg

SEQ ID NO: 47935 - DNA, 380 bp, Oryza sativa
  unsure (1)..(380): unsure at all n locations
agctttgtggcatgttctgtaacatacatcttacacatcttttgttactttttgttatgcaaagcaacatgaatgctctttgatcttcaatttgggcagcggttggctgttgtgggagaggatctgcacgacctcggcccgccggcgccgactcctcctgctgcgccgcggacggtggtgatggctggctggatcctctccttctcgtcatccccctcgtccccatccctgcgccaccgccgcttccgtgggctctgggtgcagtgacagaggacaccgcggaaaaggagaagaggcaacggcgacacgcgtcgcggaggaccaagcgggccactccctcctctcccnatcgccaagaaggagaggagttggcggtggtg

SEQ ID NO: 47936 - DNA, 401 bp, Oryza sativa
aacaatccaatacgtaatcttccattacagcaggcatgaactatactgcaatgtatatttccccactttctaatcaatcatctatgaccatatgcagattccaagcttgtgaatcgcactggggaaacgatcatgtcatactatgcaatttacaagtacattgctaacagactcaatgatcatctgtatttgcaccatccattagctggagcactttctgcaaattaaaaaataatgtagagcttatatgagatcataaatgttaaagatatcaatatacctgccgagccttcgttcacttatactcggtgttagtgaaacactatattacaaacaaataatatttgtatataaactgtatatactgctctaacagttatagcaacggtttaaataatttc

SEQ ID NO: 47937 - DNA, 420 bp, Oryza sativa
  unsure (1)..(420): unsure at all n locations
actgtaagcatgcaaccttaaccataganggtaactctgtgtttatgctgcagctttatataattttcttataatgaatcgagttgtgatttatgtaattttcaatcattcgacctataacctctataataattgggtgtaactttntaaacaaaagccaaaatgaattccattatctaaaaaaatatgaatgaattgtttttttttcaaatccaaacaaaatacaacttgtattccaaataaaatgcatatgaaatcccaacattcgaaacaagataattaaaggcccatactttggagcacatgaattctgtaaaattcaatagtaaaatattccattatcaccttatttgagtaaacatttgccacattccaaagggcctgggccaaagaacaagagaagacaataatagaacattt

SEQ ID NO: 47938 - DNA, 433 bp, Oryza sativa
  unsure (1)..(433): unsure at all n locations
cctatcatggatactnanaagnngtaacaacttttctgttgctacatggactggatcattggacgagctggtgcagtggtgctgtgggaacaccgttctgttttcagatgggtgctctaaatggcaaagcaactgtcccctgctgaactgttntaagaactactaggaagatacttgttcatcctgaagtcctgatctgccaatctacaccttcatacaactgcatggtggttcagtcagctcaatgagcgtaactgaacatttgaagagctctttgtttttttaacaagaaccacaatctatccataatccatggatatgctgctgttngagaacctgctgtcatattggctgaaaaccgttccggattaagtaaagggggtgattcgtccggatttacaaagtcagaatatcaaatgtctggtattagagt

SEQ ID NO: 47939 - DNA, 424 bp, Oryza sativa
  unsure (1)..(424): unsure at all n locations
ctgcaagcatgcaagcttgactgccagtgcctgatacatcaacctgtctctgnacttctggactctgctgttgccttttcttttgctcaaagtactgcctctgcctacggagcattgttcaagagtaacacaaattgttctatcaacataaggatgttaactagcagaacaacataacttgatggcgccatcgaaactaagttacctgctctgcgttgatttcctggactgctcccaattcaggaacaaacatgcataacacagacgcccaaacatgaccgaatgttagtttgtcaccacaaatagtgctaaatgcagcgattgctctgatgatttacacgccaaccgtttcactgtttcagtaaaaaatgatggaaaccaagcccaaactaattgcgaggaagcacaacacagagagatggag

SEQ ID NO: 47940 - DNA, 475 bp, Oryza sativa
  unsure (1)..(475): unsure at all n locations
ctaagcttagcacaatgctgctatgggagttccatatggttccatatcatcgcccttgctgtgagcatgcaatttctgatgcaaatgatgcctatttgtgtattctgttattttgatgacaaggtgctaacttgaaataatcatattctgaaatagatattgttttgaatatatatagtcaagattcanaaaaattgggtactagaatgcggaaaagagcattaacatttcatttgacattagtacatttattataaaaaagatactttcatatcatgatatttttacttctttttctgaacacgtgattagaaaaggtaatgatcagaggcatattgnggaatgtttgatgttgcaaatgacaagtaaaaacttgtgcttgagatttctatattaaaattctctggcataggcagaatatctgattgtgcatgatatttggtccttctagggtgatatgttctcttcttgctat

SEQ ID NO: 47941 - DNA, 407 bp, Oryza sativa
  unsure (1)..(407): unsure at all n locations
agcttgactgccagtgcctgatacatcaacctggctctgnacttttggactctgctgntgccttttcttttgctcaaagtactgcctctgcctacggagcattgttcaagagtagcacaaattgttctatcaacataaggatgttaactagcagaacaacataacttgatggcgccatcgaaactaagttacctgctctgcgttgatttcctggactgctcccaattcaggaacaaacatgcataacacagacgcccaaacatgaccgaatgttagtttgtcacgacaaatagtgctaaatgcagcgattgctctgatgatttacacgccaaccgtttcactgtttcagtaaaaaatgatggaaaccaagcccacactaattgcgaggaagcacaacagagagagat

SEQ ID NO: 47942 - DNA, 475 bp, Oryza sativa
actaagcttagcacaatgctgctatgggagttccatatggttccatatcagcgcccttgctgtgagcatgcaatttctgatgcaaatgatgcctatttgtgtattctgttattttgatgacaaggtgctaacttgaaataatcatattctgaaatagatattggtttgaatatatatagtcaagattcaaaataattgggtactagaatgcggaaaagagcattaacatttcatttgacattagtacatttattataaaaaagatactttcatatcatgatatttttacttctttttctgaacacgtgattagaaaaggtaatgatcagaggcatattggggaatgtttgatgttgcaaatgacaagtaaaaacttgtgcttgagatttctatattaaaattctctggcataggcagaatatctgattgtgcatgactattggtccttttagggtgatatgttctcttcttgcta

SEQ ID NO: 47943 - DNA, 410 bp, Oryza sativa
gcttgtgagcattgccttctcaatctttgccacttgttttgaagctcttggcgctcctcctcggtcaatatttagtcatccatggtgagcatgtccttctcgtcttcacttgtcatagtcggagaaaacctcccttgattaatttcagccgtattaacctcagcccagaaacatttctttggtacacttgatgtttgtatgtagccaatttgatcaaaaattaactttgctgatttcctattgtcctcggtaagaacacacgcatacactaacagattgatattgcctgctgcctgtcggtcatcccggtcggactggtattatggtgtaggttagaccggcttccgcgaaagcggtcggatagatcagcggcaagaaccaaacgatcttgccgatctgattaatatatg

SEQ ID NO: 47944 - DNA, 461 bp, Oryza sativa
ctcacttaccgatcaaggtggttggagtttgatttgtgcacgcctaatttggcctatgtttatgtgaggatttgatccttctatgtggcatgaggtaaccctgagtcggctgggaaaaggctttgttgcgaacctccgataccgacgggtgttcggaataagttcgtatcttgtgggtaaagtgtacccctctgcagagggtaactaactgttcgaacagccgtgcccacggtcatgggcggatgtgaggtggttcccgttgcgtagaattgtttgcctgtgccttgtgaaaagttgttgtggtgtgggaatcgtaaccagaatcagcctatgtggcagatggacgacctgagtggtcagaaacgaatctgtgtgattcgggatgtctgcgggcatcatagactacgctttccgagtggaatcggattgttgtgctgctgggcaactggactctgggagtc

SEQ ID NO: 47945 - DNA, 401 bp, Oryza sativa
gcttactcaactggtttacatctatgcattgtggatttctgtcgactattctgatttatgaattttggtcattcttacagtggggttaatttattggacttgccacagtaaagattgattacaaaagcatcatcaaacttcaaggtgaactggttgtctggtactatcgaatcaactgtattccttccatattatggtggtagccgaaactgtatattctaattccactttcacctaatgaaaatatgatgaacctctaggtgccatatatccagataaaaattatagtcaactttgagggcactgaagtagaaactgagaagacaaaaacgctttagcatcattgagctagtgatgatccccttgtcattccaataccaattagattattctcctatgct

SEQ ID NO: 47946 - DNA, 465 bp, Oryza sativa
  unsure (1)..(465): unsure at all n locations
tanactcaatctaaagtagagtaaatttaacaaatggctccaccttccatttcgttctagctctgcctctggcaattgcagcaatgcctctgtgtgccttccaacatcgtcactagcttctcacgcttcatatgcatcgttacatgatgccatccaccgcccagacagcaccaccgccaggtaacttatgccagtgtgtgcaggtttgaggatgataaaaccctatcaatatttttttttctcttttaatggtattaattgatactgcgtcacatttaataggttatgtggtagtacgtagttaacctcaagatataagcaggttatatttcagttatatgatactccctccatttcatgaggtaagtcattctagcattttccacattcatatagatgttagtgaatctatacgaatgtggaaaatgctaaaatgatntatattatgaaacggagggagtagta

SEQ ID NO: 47947 - DNA, 378 bp, Oryza sativa
agcttgggctatcccatactagcacatgtggttgtactgtatacgaaatgaactgacattgagtgaagtccttaagtcggtttgggcgcactctccccctatcggtatacaactaatcaccatatgtacaccacttgaggcccaaacctaaaatccatgttttccactattttatttatcaaaatcacaagttttaaagttctgtccagattaattaaaaatcaattttcatgtttgaaatgagcccataatgacaaggaagaccattctaagcatggctaagctttatagtaacctagtgtcaccaaaactcatatataaagtggtatagccatattggtcctaagggtaggaatgaggaatatggatatatgtgga

SEQ ID NO: 47948 - DNA, 400 bp, Oryza sativa
  unsure (1)..(400): unsure at all n locations
gcatcccatatagtatttgaaacaatcttcaatcattctcgaccaatagaaccccgctctcctaagcaaccaattcatcttatgtgccgattgatgagttccacaaattccttcatccacctctcccatagccactttagattgatcatcatccaaacacttcaatagaactcccatagccactttagattcatcatcatctaaacacttcaatagaactccatctatattttagtgatataaatctccatcaagcaatgtatatttgaacgcttgccgccgaattcttcaatcaaccttaagtgcagtgtctttcaaatatctaatcaaaggaatcctccaatcttcttctgtttcttgggcacaaatgtccgaatntacaattaatttagcctctgaa

SEQ ID NO: 47949 - DNA, 395 bp, Oryza sativa
  unsure (1)..(395): unsure at all n locations
agcttcanagactcanaagagaacagaggttgttaacgcttattgtttgcacctgcagtgcgtccagttgtagccgatattggtcacgttggcgtgcagcgcctcctgcacgtcagcccggttgaagtacacctcggcgtgatccgacgtgcacggatcgtaccccgccggcctcatgtaccacccatgctgttacaaaatgacaccaaaaaaaaatcatgttgtttcttctctctgaaaaaatgtgatcgttctgtgtgccgatgagttgcctacgcacgtatttggagaagatttttggggcggcgccgtggacggcgacctggcgctggccgaacgccgccgacgacgagacctcggtgcagacggtggtgtagaggctgtacatgtcgatg

SEQ ID NO: 47950 - DNA, 462 bp, Oryza sativa
  unsure (1)..(462): unsure at all n locations
ntgttgctntctttcactaatatatttttctggcaggttcaaataatcaaacaaggttatctctttaagcgttctgaaaattcacgagaatggaagagaaggttctttgttctcgacagtcacgggactcttttctactacgggaataaaggacaatcggtatgcaataaaagttagcgatttgtgggctgtcatggattgtttaaaatgtattatttgggaatttataccttaattgtgttacataatatacctgaaatattgaacaattgcatgttgtttggtctgtattttatatttatctctttgttcatgtgggaagcaaggagcggcatcacagcaaacagctggtgaagggactggtgtttttagtcgtttcagattcttgaaccaaaaggctccaactcatggtgacaatgcactttcgtgccacanaatngatctaagaactttcacaataag

SEQ ID NO: 47951 - DNA, 401 bp, Oryza sativa
agcttagacctcatataatagggagttttttattgcagaccctatgatcagcttattcttgtgatgttccaatggtagagaacgccatagatgccatttgccagagcaagggattgccagatgagaatgtcacagtaaccaaaggttaaacatctttgcggcctaataatcttgtgacttaatattgttactctctagttagtttttaactaacagattggataatctttttcttgcagcgattgtaaatgcctctaatggatccaatcctccactctatgggggtatcatggctcttgtcatgagcattgcaacaatgctccgtgttagcccgaacatgccaaagaaggtacttggtgctaccctttgggcacaaagtacatccaaaatccaagcacaac

SEQ ID NO: 47952 - DNA, 434 bp, Oryza sativa
  unsure (1)..(434): unsure at all n locations
tgaatgatcttgagagcaaactttggagagggaatgaatatgtgttgaaatggggtgaagtcccttctcctggccggttggcttaagtagtgcacccacaacggtcaaaatcgacgtatggggaccactagccgttaccctaccaaaagtggcagggagccgttgcctggccggttcagccgaaccagggtgttcggccgaacccctggtgggcccaattggccccactttcggccgttggattccaacggtcggtgtggtcgtggcacagtaaatttttgttgaaaattttaattttgtttgctcttaaaatttcatttgaagaatttcctcaaaattcaaaaatcctaaatgcaatgttgaaattcaaatatgtgatgatgcaaaaattcaaattgttgaaagcatatatgcggatacataccaatntacct

SEQ ID NO: 47953 - DNA, 404 bp, Oryza sativa
  unsure (1)..(404): unsure at all n locations
agcttaaagccatgaatcccttttatgcatatctggatctggatcctgcagaacaaacatataggatgagtagtatctgatataaatataatactcgagaaaaaatcaagtattttaaaatatttataaatatgtatttctcctcttgtcaattttgatttccccgagcagatgactcattacgtttaaacgctctgcccaactagtcatagccaccaagcactgggagtcggcctaagcacttcccaaacatgcatatgagtgacatgagttcgtcattaatggaacaaagtttcacggatcggagtttactactcgggtacttttgcaattattaagagcagaanataaatttatctcatctctatgcttttgatttattccgaataatacttagcaccttg

SEQ ID NO: 47954 - DNA, 460 bp, Oryza sativa
cgtcagattcacctttgattagttcaatatactgattgttctcgtcaactgtgcatgcatatatggccttcttaagatgctcaaccatgacatctcttgcttcttcggtccatgcatcatccaattgtgtcttaaattcttcaataagatagtccacacagtatccgtggtgactgtcagggaaaaccaaaggcacttcatcccatagtccattttctccattcgatatgaatgttatggcacgggaagctgacacagaagatttaagttgctcaagaaaccaatgccagtgttcactgctctcatcatccactacagcaaatgcaactgggaacacatcaccttcactatcaacagaagtggcagtaagtagcttccactgcttatttggttttgcagatattacatcaagaaaaagtaatggtctgcacccatgctcaaaaccatgaagcgatgcatg

SEQ ID NO: 47955 - DNA, 362 bp, Oryza sativa
  unsure (1)..(362): unsure at all n locations
agcttacaaaagattgataataattntgttttgaatggttagaggggaatgaaactcccccttagtgtatgcatatggaaaatatgagtgaagctcatatgcatatatataacggagcaaccgaggagagnttccttcatccctactcattcgtgggatgcaaaaagcagtaagaataaatatgatatgcaaaagatacgacatggtgagcactcaaaaggataaaatcaacatcacatcacaaacaacaaataagacactcatagcataaatgaagagcaatataaataaagagcagcttagagcatctaactgtcattacatccacacaaatagagaagtattacatgttcataagatct

SEQ ID NO: 47956 - DNA, 423 bp, Oryza sativa
gatcatatctagtctatcagtaaagtcatttgcggagacgtcaaagcatgtcaagtgggataaggtggttctttctagaaacataattcacacgcaaagataccgacccttgcatcgaattgcataagtaactggcacccggagagcatgaacgctaatatgaggcagttggtgacaagttataagtaaatgacaagcatggtaccctggtaatgacgagctgatctcgacacatgacatgaagtgggtaacttgtatgaggttgactccaaagatttgaactatgcgaagttctggaactgaagccccatcctcaagtgccgcaacccagtcgaagtcagctaaagggtcaaccagagacaagtcatgtgaagagaagatttcatctgcaacaagggatcgagacatgcagcctagagtgga

SEQ ID NO: 47957 - DNA, 393 bp, Oryza sativa
  unsure (1)..(393): unsure at all n locations
agctntgttgagcctaaaacccaaagaagctattaaaaactttcagtcctcgcaaactaagtagaaaaaccaaacaaggcaatgataaaccaagtaagcaaactgaattgataaaaaatcacactccattattatgatgatagcccccgactgacaacggcaagaagaaaacttgatgttgacagtcaaaacagggaagtacaatgataaagttaagcgtagaaacgacgaagatgttcaatgttccaagagttgtcgacgagagtgccgtcttcgcgcttgagtcgatatgaacctggccgggtaacttcagagataataaatggcccttcccatagaggggataacttgtgccgatctcgtgtggtttgaattttcctcaaaaccaggtcg

SEQ ID NO: 47958 - DNA, 459 bp, Oryza sativa
  unsure (1)..(459): unsure at all n locations
gtgacactatgaaactaagctttctactgaangggataagatggcaataatgatacaaccacagttctcagcaagccacaccggagatgcataattaatgcaaggtgggtacaaggggataataatatatggtttaagttttgcagtatacagcatttaaaagtcacttatttgccaaagctattntataaagtcgatcctagagctacacagtattattaatcaaggtcgtgaacccacacgaacctgccttaacccaaggcctacgatgattcagaccgaactggcaacccgaccctgtgtcccagctcgtcccaagccaacccatgccaaccattccacattttagttgttgagcaaattttaagaattataacactgacttgtgtacattgctcggcttgccataaccgaggcgcggtattcaatagatatactctgatcagagtgacatcttac

SEQ ID NO: 47959 - DNA, 392 bp, Oryza sativa
  unsure (1)..(392): unsure at all n locations
gcttggtggaaaacttttcacatcacttgataaatctttgtcccgcatgatgggtacacaaccttcagcgttgtcaccagtgccacagggctccttaaccgaaagagaatcctattcggctcctgcagctacaaattttgtgaataatcagccagtgatggctatgtcttctttgatgtcttctgtttcagagcaatctatgagtgaaatgtcaggaaatactggccctgacagaaaagtcacacataacagaagtgtctctgaaccagactttggcagaacccccaaccaggtgcttcttagactggaatgttntcttgatgtgtttcatttctcttttctgaaattggaactctcacagggtgcacgattagataatgcacaaagcacat

SEQ ID NO: 47960 - DNA, 476 bp, Oryza sativa
gcttcggatgtgcatcgactacaccgaccttaacaaggcatgttctatgacccttaccctctgccacgcatagatcagattgtcgactccaccgcgtggtgcgaccttttgtgttatctagatgcatactctggttatcatcagattcgcatggctagggaggatgaggaaaaaactgctttcattacccccatacgaacttattgttatacgacaatgcctttcaggttaaagaatgcgggtcctacttttcaacgtactactcgaatttctttgggtagccagataggacgcaatgttgaggcctatgttgatgacttggttgtgaagacgcgcaaccaagagaccttactctctgatctagcggaaactatcgatagtcttcgctccgcccgcataaagctgaaccccgataagtgcgtgttcggcgtgcctgctggcaagcttctcgggttcttggtctctgcccgatgcat

SEQ ID NO: 47961 - DNA, 296 bp, Oryza sativa
tcttgactttgcgcacaaacacaatctgaaacgggaagatgcttgatgtggccctttcgatttccttcccaatcacctcaggaatgaattttgacaccagctccttgagatcacaggatgatgcctgggtcaccatgatctccaccatcttgcgacggatctgcacagattacaatctaacacgataaacaagcatgctagcaatagcagaacaactatacatcaattgaatttgataagaaaaaataactatacatcaattgaaattacctgccgaatatggcttgcttgagcat

SEQ ID NO: 47962 - DNA, 446 bp, Oryza sativa
  unsure (1)..(446): unsure at all n locations
ctcaagctnggagtgtgtgtgagaagtgaaggagtgaagtccttaatatgcagatatgacggtggaactatgcanaatgtcggatatgccccgcaaccgccatcaagagagcatctggagcatccataccaaaacctagatccaacggtgatcaccaaggttcgcaaccagcgctatgccagatggcccccagattcggtctgggcctcctcctcactctgccttatccatttctccggtagttgggtccatttactggtgttttgatggaggttaggagcccaactcttgtatggatagaattcttcttcactttagtataaaattcctcccaacttcagtggtntattgcctgtatccaaatatacactaatactcgtggaatatattagaattgaatcctatcactatgttggatgttgtattatctataatttatgtaggta

SEQ ID NO: 47963 - DNA, 56 bp, Oryza sativa
actaaaaacgaggcgagcacgagttaatggcgtgcggggggagggaagtggtgtgt

SEQ ID NO: 47964 - DNA, 370 bp, Oryza sativa
  unsure (1)..(370): unsure at all n locations
gcttcacttcgctctcgcctctcgctctccgcttcgcgcgagttgngactngataagaaagcgagagagagggcggtggactatttgcggctcgcgggtgaccccgagcggcgagtcgttcaacgcgacgtcccattgtcacggagttgtccgggcccacatgtcagtgtaacccatccttgctggcgctcgcctgtgccattgtgttcgtcgcaccgtcattcacagaagtatgcgatccacttggaagttggaacaagggatgcattgtcagagcaagtacaataatttgactcagcgggctctaaaataatgccacatcatcaatttcctatgtggatgagagagaataaagcggacgactaaattg

SEQ ID NO: 47965 - DNA, 401 bp, Oryza sativa
tcattatactaaatggaaaattagctcacatgtctcaaaatcatgacatctggacaatacaggaaatttttattttgcaaactacacccgtttatgcactcaagtagttcactgcaaaagcttaaaccgtaaagaaaaggaagaaccctacacattacaaatatttcaacgcagtccaaccagacaactcctactttcaagttgcatgcttgcatgtacacggcacatcacagacaatgccaagcaagttgtgatatccacgaacatacgagacattttaacacacataagagaaattttagattttatcagcaccactagcttaaagtagacagatccgtgccgggaaaagacaaaccggcccattaatggagacagtttaactcacaagctggcctatt

SEQ ID NO: 47966 - DNA, 481 bp, Oryza sativa
  unsure (1)..(481): unsure at all n locations
tataacactaagcttaagatacttctgtntcacgtcgtttcatattacatatatgcagcacgattgcaaatggacatgttcgaaggaatacggttctatactccttangagtagataattttaccattctttaaaaattaccatgaggtactacgtacactntatactataaaattggtacctccaaatactaattatcttgagatataaaaaatttagaataaaacttagaaaccttgaggtacttttttaaagactataaaatttctcctaggagtaggtacacccgtacacctgatctcatccaacatccatcaaacccaagcccgatcaaacggtgtttatatttacccgtttagattntgtacaggaaaaacctgaccgcatgtaccggccgagtgcatgcatgcagaaatttgaaaataaaggaatgtcattttcttcctgtcctttcagtccaaactatttattagtatcaact

SEQ ID NO: 47967 - DNA, 411 bp, Oryza sativa
  unsure (1)..(411): unsure at all n locations
agctntgtggctcacctcctccatctncacctccacctccacctccatcgntggcaatggcagcggatgctctcctccgagctcccacccccccgattttttgactgctctgctttctttcttgggggaggagaggagcatatgctgcggagtcgtctggaccgcccgatgcgggatcaacggcgcgataaaagtgagggagttgcgaaacgacgtatttagagggaatacgttttcagaatcgtatggcggattttcctgagaaagcagttgacggcgttttcacagtctgaaggcggagtttttgggacgatgagcaaacagaaaatgaacaaaagaaaacgttttatattggaggtgcggngaatcgaaccccgtgcctctcgcatgcgaagcgagcgctctaccata

SEQ ID NO: 47968 - DNA, 478 bp, Oryza sativa
  unsure (1)..(478): unsure at all n locations
actaagcttctactacatggagctcgtaggcgaaggaatccgctacttgtaggctagccagaaagatcaagaaaggcgcgccatggctttcctcctccccaagctcaccacgccgtcctgcaagtcgccgccgagcccgctcaagtcgcagctcggccttcccggcggcgggaagctccagccggcgcaggccgtggcaccgagccacctcaacctcctgctcctgctcggcgcctcgcagcaagaggccgccgccgtcccgacgcccaagagccggagcaagaacggtggcggccggagcggcggcggcggcggtgaggacccgcggaggtcggattattacctcaaccttgggacggcggtgcgcacgctgcgggacgacctgccggcggtgttcgtncgggaacccaactacgacatctaccggtnaaaattaatcttcgctaattactttcttcggattatcgttattgctata

SEQ ID NO: 47969 - DNA, 406 bp, Oryza sativa
  unsure (1)..(406): unsure at all n locations
agctngnatagnntcattatactaaatggaaaattagctcacatgtctcagaatcatgacatctggacaatacaagaaatttttattttgcaaactacacccgtttatgcactcaagtagttcactgcaaaagcttaaaccgtaaagaaaaggaagaaccctacacattacaaatatttcaacgcagtccaaccagacaactcctactttcaagttgcatgcttgcatgtacacggcacatcacagacaatgccaagcaagttgtgatatccacgaacatacgagacattttaacacacataagagaaattntagattttatcagcaccactagcttaaagtagacagatccgtgccgggaaaagacaaaccggcccattaatggagacagtttaactcacaagct

SEQ ID NO: 47970 - DNA, 466 bp, Oryza sativa
tcaagatacttctgtttcacgtcgtttcatattacatatatgcagcacgattgcaaatggacatgttcgaaggaatacggttctatactccttaggagtagaataatttaccattctttaaaaattaccatgaggtactacgtacactttatactataaaattggtacctccaaatactaattatcttgagatataaaaaatttagaataaaatttagaaaccttgaggtacttttttaaagactataaaatttctcctaggagtaggtacacccgtacacctgatctcatccaacatccatcaaacccaagcccgatcaaacggtgtttatatttacccgtttagaatttgtacaggaaaaacctgaccgcatgtaccggccgagtgcatgcatgcagaaatttgaaaataaaggaatgtcattttcttcctgtcctttcagtccaaactatttattagtatcaa

SEQ ID NO: 47971 - DNA, 342 bp, Oryza sativa
  unsure (1)..(342): unsure at all n locations
agctnggatagtttcattatactaaatggataattagctcacatgtctcaaaatcatgacatctggacaatacaggaaatttttattttgcaaactacacccgtttatgcactcaagtagttcactgcaaaagcttaaaccgtaaagaaaaggaagaaccctacacattacaaatatttcaacgcagtccaaccagacaactcctactttcaagttgcatgcttgcatgtacacggcacatcacagacaatgccaagcaagttgtgatatccacgaacatacgagacattttaacacacataagagaaattttagattttatcagcaccactagcttaaagt

SEQ ID NO: 47972 - DNA, 474 bp, Oryza sativa
  unsure (1)..(474): unsure at all n locations
actaagcttaagatacttctgtntcacgtcgtctcatattacatatatgcagcacgattgcaaatggacatgttcgaaggaatacggttctatactccttaggagtagataattttaccattctttaaaaattaccatgaggtactacgtacactttatactataaaattggtacctccaaatactaattatcttgagatataaaaaatttagaataaaatttagaaaccttgaggtacttttttaaagactataaaatttctcctaggagtaggtacacccgtacacctgatctcatccaacatccatcaaacccaagcccgatcaaacggtgtttatatttacccgtttagattttgtacaggaaaaacctgaccgcatgtaccggccgagtgcatgcatgcagaaatttgaatataaaggaatgtcattttcttcctgtcctttcagtccaaactatttattagtatcaac

SEQ ID NO: 47973 - DNA, 403 bp, Oryza sativa
agcttgcatttcagcatttcgacaatttatgtttctcttgaagctaattattccatgataaattatagcttcagtaagaaatttattgcatccttttatcagccctctgtaacaacagacgaaattgataaagcagtgcacaagatgatcattgatgctggagcctatccatcccctctcggatacggagggtttccaaaaagcgtgtgcacatctgtgaatgaatgcatctgccatggaattcctgattctcgtgaacttcaggttctgggagaagcctacatagtcatttttttccctcatgttcaggcttatcaccccccttgctccactgacgatgtcattatcatttctttttttctgttttgcaggatggagacataattaatatcgacgtcactgg

SEQ ID NO: 47974 - DNA, 432 bp, Oryza sativa
  unsure (1)..(432): unsure at all n locations
nggtttactntatntactntaccttttactctgattntctaactntattcaaattaatcaaaaaacttgtgctattaattggataaaggtcttaactccctcctttcacttgtctttagatgccgcgttacaagcctgagtacctgtttggtgttgagggttttgtccaggagttgcgttcgatgtcctttgtcattggatttgggactgcccctttttatgcccagattcctcatgatcgtcatgaagagaagtgccgagtcaaagtcaccttgaacagtaatagtgaagatatccccttagtgatgtttgaagctggaggaagaaactacatccatgcatgtcaggaggtggcaaggatcgccatatgagagctccgtgatcgctacagtgatcaattggccgacactgagtatcgctaccatcctcgtc

SEQ ID NO: 47975 - DNA, 399 bp, Oryza sativa
  unsure (1)..(399): unsure at all n locations
gcttctaattatttatttaccttccatgtatgttctgatgtgaaaaagaaacatcctaatgcaatactggcatctttgacatgtgtatagtttctgtgaacatgattctgccaatttcttttgtcaaccagtcttggtatcaaaatcagtagtttaatacgatgaattatactactacagttgtcaatcttgatgattattatcaaccattgacaagtctacagtgtagacaacccgagagcttccatttttgaccacacaggtttcaaggcaagccagtgactgaacttctgaagcaatcatgtgtaaagcatcangcatcacagatgcgtttcatactggtaatccgtactttcttttgatgctgttagtgataatatactatccaaagcatacgtc

SEQ ID NO: 47976 - DNA, 461 bp, Oryza sativa
  unsure (1)..(461): unsure at all n locations
ggcctagaagaacaattctagcgagctagatgttatgatacactataaaatctagatatcagtcaaatatgttgtaagatacgtttcttactttcggaagtaaaataaaataggactatactgacaagtggaaggttcatcgtgtttttgacaaaatcacattaaatgttgtccagaaaattcagtcatatttacaacgacaaaatcaattttactttgcaattataattgtccaaatcaactatatcaactcaaaccaaaatacatgattaaattaagaaatgcgaaatttggaatgcacattgaataaattagatgattaaattaagtgctgcaattgaatagtttgaggtagctggttatgataatccgctgccactntagaatagtattcttcanattaacatagcaaaattcaaatagctcaatctgaaatntctagagcacattggagattacat

SEQ ID NO: 47977 - DNA, 401 bp, Oryza sativa
agcttgaaaaacgatttataattttatttgattgcacagtatgtgcattttatgtaaataatgagactaaataaattttgacataatatttgaaaataaaacaaatgtaagattaaattttctatttgaaatttaaaatggcaatagattttatttatccggagcattcttaagaacaatgttgtgaacattggtagtcctatctttatatgtgtgctcctcgtttttataactttttaaaacattaaaaaatacatagtattttattttattatctaaaataattttttcgtaaataatgtatagcacaacaaactcattattattaatagtcattattattaatagtcttatgtgaaaaacttttatatttttaataatataactcataattttctatg

SEQ ID NO: 47978 - DNA, 441 bp, Oryza sativa
  unsure (1)..(441): unsure at all n locations
ttggaatattcttatgtaattctgttatatttatgaatattaatttatctcatgttttgtttaattgttctaattttaaatatgtgcttcaaccttgtatatacgaaataaaacatttcagttaaaattatttcagccaactgaaatctagacactcccaatcttagttaaaattattttcaatttgtgtagtcacttttcttcggctttgtctagaccagcaaaagatggttaaaaaaattaaagcgaaaacaaatacatgttttttttttgaacaaacatcaccatatatgttgcgagatatagaggccaaatgtgtcttttccccttacatactntgtacggcgtgaacctaaatgtcataggcttataacatatttccaactttgccactagccttgatttttctgaacaaatcgatataccgaccaccacctactc

SEQ ID NO: 47979 - DNA, 393 bp, Oryza sativa
  unsure (1)..(393): unsure at all n locations
agctttcgggttggggattcctctgccggtggagacgagacgacggaggcggtggttgcaggcangaagaggcgaggatttgggccttttcctccccacgcttcgcttctcctgccgttcggtggcgaacacaactgccaagtcaagattggattatctagcccggtcacttgcacacttgcaagatttgtttcctttcctctaattggcggttagtgcacaggcggcctcggttcggcgacagggtttatctccaacgaccgcggtaaccattgcggttatcgtgatgaaccgtgaaaaaactggagagagtttacatttaagtttctttgaacttggtagaattatccggcacttatcgtttccgcacacgtgataagcctaattaccatg

SEQ ID NO: 47980 - DNA, 449 bp, Oryza sativa
  unsure (1)..(449): unsure at all n locations
gggcgattgatgcttcgttcatgcaaaacaagcaacctccccatgtgatgaanaactgcaccggctcatcccaagtacataggtttttctttttttttttttagcctgcagatcatcttgctgcttatactttattttaccgccccactccccagcaagtacatccatgtaatacccatcaggccatcatactcttaaatggcctataattaaacccaaaaataagctgacaaaccagaagcatcctaagtaacgtgatttcatctgctaaatccaagaaaaacacagacaaaaatttccttctccagaaggcaccaaggaggcaagaagaaagaaagaaagaaagaaccaagggcatctagctcccctgaatcccaggaacccatttcaagcactcacaattccctccctgccacccattntcaccacccacanttacacccccccct

SEQ ID NO: 47981 - DNA, 392 bp, Oryza sativa
  unsure (1)..(392): unsure at all n locations
agcttaagcaacanatntggactgaactatatattgaaattcaatggaatttttaatcaggaatactggaagagaaaaaaagaggaattgaatgtggaatttgaccgactctatgtttttccccctgaggataggggtacgggatttaattatttgagatgcaaaggatgggatttaaattcagataattggaacaattctcaagcgaagctaagaaattttaaaattatgaaaatatcataacaataaaagagtaattaacaccttaaaaaagtagggaattacagcatcgatattgtcttaatactctgacaggaagatgtcctgttgcccaattgtatatcgatgtaaatacggaaaagattttatatataggttcttgcaccctaaat

SEQ ID NO: 47982 - DNA, 57 bp, Oryza sativa
ttgaaactaagcttggagagaatacaggtggagcctggttatctttttttacgccta

SEQ ID NO: 47983 - DNA, 348 bp, Oryza sativa
atacggctttctagatgtatatgacgatctctaaacagatggatcttatatgaatcgtatgatgaagtaccacatgagtggatatataggaaaggaatccaaatctgccgaatcgctcatgttatgatcttctacatcctaggtctccgcgttacgtcatctggcttatgttcttcatgtagcattcagatcgaatgactctatgaaattacgtcgatacttctacatattatgggtaacgtaggagacatccctattttcccccgggggtcttaattaccactgcttagctttcaattcgcctctgaccatcaaattaaatgtgaataacccgttctactctctttg

SEQ ID NO: 47984 - DNA, 477 bp, Oryza sativa
  unsure (1)..(477): unsure at all n locations
ntatgttcggcgcagtactaatactggaacttatgagctatattngctctatcaatcaccatctactttagacatatcttctgaaacttttttcaaatccaaaagtccagtatcttcctacaaattagtgaattatgaggagctctttgtgccgaaaaagaaagagcagggcaatatttcaaacttgcattcgaactgcgaaatatttatacaaaggaggagagatcaagataatgcagcagggttggttatctaattggctagtcaaacatgaggtggttcatagatctttgggcttcgatcatcgaggaatagagactttgcagataaaagcagaggattgggattccattgctgtcattttatatgtatatggttacaattatttacgtccccaatgtgcttatgacgttgcaccccgtggatctctagctagcgtgtatcatcttacgagaatacagtatggtatatataacc

SEQ ID NO: 47985 - DNA, 395 bp, Oryza sativa
  unsure (1)..(395): unsure at all n locations
cacacatcatgttatgcaagtttaatttagttaatgttaatgatatgctctaaagataatcatagagatgattataccgcatactatatctacatattatcatgtgttggtactcgaaatagataactcattattggctaatgaatatgtgattcgttcgtaagactatntatgttgtatgttattatttctacaggatccttgatcaaatatcatatatgaaacaaataaagttcaataatcagcacatagattgattaattatcgtgtctcatggatcatgattgtaacatcccacgtcttaactatagtcttagttatgctaatgacttgatcacaccagctgagagcggtgttgattgagccacgatgttggctagtacctataaatatat

SEQ ID NO: 47986 - DNA, 476 bp, Oryza sativa
ctcaagcttggtacccataatccagacttgccgcgccacctagtgtattatagttggtgcctatgcacctggtctgatcggtaccgacaagtaccatgttcagtacagggtatcaaggtaggggaggggggacgcaccgtctttccatgggcggatggcaagccacatgccgctagtgcttcatctcgtcaatgcctccctccctttcttgttgttgctacaatcattggggtaaggagttgagtgagtaatgttgctttacacgtaggagatagaccaagtcggatgtaagagctcgatcattaaagtatcctggtcttgtgacaggatcttgtcccatagttgctctctttatgcccccatatgacttggattaatacaaaaattttactgtgcacgtataacaagacaaaccatccacgcatgattattcgagtttaattattactaacttaaacatatatttatttgatatt

SEQ ID NO: 47987 - DNA, 406 bp, Oryza sativa
  unsure (1)..(406): unsure at all n locations
gcagctttggagaagaagtcctaggtggagtccttgcttataccccaattgaacgcctgtgaagatggaaccatatgcccgctaatccgctactgtttatttttgattgttaggcctgaagtgcctttgtaataatgtaaatattatcgatataataaagatgtgtcttttgtatcatgtttgtgtggtgtaccccggcttttcctgggacggggaataatacactagcgttctggaaaaagacaatttttccgggtgcgacaagtaaacatttgctaatgacggattaattaggcttataacatttgctaatgatttgacaatgtggtgctaaagcctcgtacctagaaactatgacaagaacttccactgctctgaggatntaatacacagntaacaagttgct

SEQ ID NO: 47988 - DNA, 457 bp, Oryza sativa
  unsure (1)..(457): unsure at all n locations
tcacgaatcttcgagagaacctgcgatcaacgaanatcctgtnaccgcaactatacgcaaacaatcaaaaacctaaacaaaagaccaagaaaatatcctatttagactaaataatagtgccattagatagatctcaattttacggaattactggaaatggaacggagtcaatcggaggaacggatgaagagatatgaattttggaaggtcaatggatttttctggacaaggaaatgatttatcggaattttctggaatacgacaaatgatttatggagtttatagaaataatattctcaagaatattattgacagtcactgacgtgcaggaccaagggaaatgatttatggaattttgggaataaggaattgatttatggaacaaaggaaaaaggatttattaaatcccttggaaaagaataagaaagaaggatgtcatttagacttcctttgggcg

SEQ ID NO: 47989 - DNA, 352 bp, Oryza sativa
agatcggcgggaaaagagcttacgtccatgaactaaggcttcttatgggagcggagaatacgaagagcgcttgcaggcgggatgttttctgcacggcgggcggacttcaaaatggatcctctgaattcctttaaacagatgcactaccgacggtgtgaattccaatgaacagagagagatgcccgccataaatttctgggtccgttacgcgcggcagttatttggacttcagtttaaatttgctcgtgaccgttgggcttcaaatggtgctctcgactacgttttgtctctacggtcctcgcaccgggaacgacaacagtctcgacgccagaagtcacgaatggttacatga

SEQ ID NO: 47990 - DNA, 470 bp, Oryza sativa
acgcactcttgacactcagcttgcacacgagaccagcccaccctggtgcagcacgccgactgcgatgagcttcaccatgccacggtccagactcaccccatccacggaggagaaggtgaacgtgaaaaggtcgacttatctgctctgttctcgcagctgcagccgccgatcatcctgcatgcgccgctctagcttgcgccgcccggcgcggccaagactaatgggtgcggacgcaaggcggtgcagatgccgacgcggcggagcggccgtaaagcgcgcttctcgtctgtgccggtgtctaagcgcgcataagtgcgcctcatggatgagatggggctgctcaccccatgtgaaccggtcgtggatgccgtggtggacgcttatgcaaagaccttctacacaccgctttccgtgcatgtcattcgcggtctgcgggcgctcacatctctggatggagtgcacgacatgcc

SEQ ID NO: 47991 - DNA, 357 bp, Oryza sativa
  unsure (1)..(357): unsure at all n locations
aagcttgaggatactgtttcgcttcaaacaaaatgagactattggcacaacagattgaatgagataagtcatttctagctatgaaccccagtagataaactgttctatataggcaatagttagtcattaataagtcaagtacttttacaaggaaataacatgattagtagaaatgtaatagactaaaaaactaccttcaccctgaagcaccttggccggagttctttccgaatttcaaccatcttgcgttcctcactgtttaatctcattgacattatatatggatgcaataagccaggagtgtcatacattntagcctttgctggcaaaacacctgttattctcaagaatcctaat

SEQ ID NO: 47992 - DNA, 440 bp, Oryza sativa
  unsure (1)..(440): unsure at all n locations
gacttatgagaatatgtgcttagccattttgttgggtatggaccattggagatattatcttcaatatgcagagtttactatccttactgatcacaaaagtttgatgaaccttacggaccaacgtttacatactagttggtagtagaaagcttacaccaaagttgtgggtttaaaattaaaattttgttaaaaaaaaggatccataatggtttgcggatgctttgtccaggtgtgatcatggagacaccattgacacttggttggaagaggttgctcanggttattttctttgcttcctgtgacatatagaagaatgaaagcattgtttggttggcctggaatgaannggattatcaaacagcaggttaagaactactccattttgtcagcagctaaacctgactgatataaatatcctggactgtttcagcctttacttg

SEQ ID NO: 47993 - DNA, 367 bp, Oryza sativa
  unsure (1)..(367): unsure at all n locations
agcttncttgtttagggccaagtataagtgtattgcacacatttaggccttccatgtctacaaattatcctaatataagttgtgtctgccaccatattttagtttttcaaacaagcacaacccatccattaagaaataaatgcagataaatatgtctatatacctgcactattcataataaaatttgtatcccccttatcattgatcaagtttacctttgatttaaaccaacttctactagctcgccatattaattcatgtgttaatgcgcgcattagttacttccttcttttcattagttagtcataaaagaatttcaggatgacaattatcctggatataacattcaacctgacgctgctgacag

SEQ ID NO: 47994 - DNA, 448 bp, Oryza sativa
  unsure (1)..(448): unsure at all n locations
ctgngtttctcttaagctngtgtcactttgatcaccgagacatacataaacacatcgacgttgcatccctcttaatagtacggcattcctaaactcaaatgtaaataggaagagaattataccaatangaatgccttctttccatctatctttcattgtctttagggacgccaatgccataccgtttcaccatatattcttcaaatgattaatgtggttacttcaaatggtccatcatgacaaagccgtcactcgtccttcaccaccggatgtggttcttctgcgccaagccccttgcttgcccttcaccgctgcatggtccatcgcgaccgagcatcgcttacccttcaccgtcttgccatagtagccactttgtatcccacatcttcaatatcttcactttgtcattctggtatcgttaggtgtatgatatcacttgagcataaca

SEQ ID NO: 47995 - DNA, 396 bp, Oryza sativa
  unsure (1)..(396): unsure at all n locations
gcttgagcagtgaccacaaagctaataaatgactaacaaaagcttgaggatactgtttcgcttcaaacaaaatgagactattggcacaacagattgaatgagataagtcatttctagctatgaaccccagtagataaactgttctatataggcaatagttagtcattaataggtcaagtacttttacaaggaaataacatgattagtagaaatgtaatagactaaaaaactaccttcaccctgaagcaccttggccggagttctttccgaatttcaaccatcttgcgttcctcactgtttaatctcattgacattatatatggatgcaataagccaggagtgtcatacattntagcctttgctggcaaaacacctgttattctcaagattcctaat

SEQ ID NO: 47996 - DNA, 443 bp, Oryza sativa
  unsure (1)..(443): unsure at all n locations
nntgggcctatgacctganggttgtctacttatgagattatgtgtcttagccatttgttgggtatggaccattggagatattatcttcaatatgcagagtttactatccttactgatcacaaaagtttgatgaaccttacggaccaacgtttacatactagttggtagtagaaagcttacaccaagttgttgggtttaaaattaaaattttgttaaaaaaaaggatccataatggtttgcggatgctttgtccaggtgtgatcatggagacaccattgacacttggttggaagaggttgctcanggttattttctttgcttcctgtgacatatagaagaatgaaagcattgtttggttggcctggaatgaanggatttatcaaacagcagggtaagaactactccatttgtcagcaagctatacctgactgatataaatatcc

SEQ ID NO: 47997 - DNA, 375 bp, Oryza sativa
ggatccttaagtcacctgcggctgcagcttacaaaagggaaatgttgctgctatatcctacccgaactcttccgaaggcttgcggactcctgattcctattctaattctattccaccagctagatactactaaactaaacttgagagaaatgagagagctattgcttgaggtgtgtgagtgaagtgagaacgtgagaggtttatatagcatcccaatgacggttgtgatgggtggaatggtcggaaataccgtccaaccctcattgggagctaatccacaccgttcataaaaaccctgcatccagcggcgttgagggaggttcggctgaaccccttggttctggcgaacctgtggtcatgcccaacatcccatgg

SEQ ID NO: 47998 - DNA, 449 bp, Oryza sativa
  unsure (1)..(449): unsure at all n locations
ctcagcttctcactgcacctcgatgcccgcgtgccctcttctgtctctgctgangtgtgacttccactagcctgctcctacaggatcccctccacatacctttccacgtgcccctcctggttcccctacgcatccctctccacgttcccttcctcgttcaaggacatggtttggatcctctgtcccctcttcttcggtccagaactggctgcttccctccgcgattgtatcgtacaatattctggtgctcatcgcgatcagccatctgatcatacaagaaatatccgctaagtctataggtcattattgctttaacaatcttatatgctaacaatcatatatgctaagtcatatatgctaagtctaactggcgtatatgctaagtctatgtacaaactcaatgatcctatattaaaactatcatagacttatgctgagactcaaataat

SEQ ID NO: 47999 - DNA, 372 bp, Oryza sativa
agcttacaaaagaggaaatgaaagctgcttgatccatacccgaactcttccgaaagcttccggactcctgattcctattctaattctattccaccagctagatactactaaactaaacttgagagaaatgagagagctattgcttgaggtgtgtgagtgaagtgagaaggtgagaggtttatatagcatcccaatgacggttgtgatggttggaatggtcggaaataccgtccaaccctcattgggagctaatccacaccgtccagaaaaaccctgcatccagcggcgttgagggaggttctgctgaaccccttggttcggccgaacctgtggccagcccataccacccatggtgtggcttgtggcctcctc

SEQ ID NO: 48000 - DNA, 435 bp, Oryza sativa
tcttacggcacctcgttgcccgcgtgccctcttctgttctgctgatggttgacttccactagcctcctcctccaggttcccctccacatccctctccacgtgcccctcctggttcccctccgcatccctctccacgttcccttactcgttcaagtactggtttggatcctcggtcccctcttcttcgttccagtactggctgcttccctccgcgattgtatcgtacaatatctgttcctcatcgcgatcagccatctgttcatacaagaaatagttgctaagtctataggtcatttctgctttaacaatcttattatgctaacaatcatatatgctaagtcatatatgctaagtctaactgtcgtatatgcttaatcttattacaaatctaatagtcaatattaagactataataatcctatactaaaactcaaa

SEQ ID NO: 48001 - DNA, 362 bp, Oryza sativa
agcttacaaaagaggaaaggaaagctgctattaccatacccgaactcttccgaaggcttccggactcctgattcctattctaattctattccaccagctagatactactaaactaaacttgagagaaatgagagagctattgcttgaggtgtgtgagtgaagtgagaaggtgagaggtttatatagcatcccaatgacggttgtgatggttggaatggtcggaaataccgtccaaccctcattgggagctaatccacaccgtccagaaaaaccctgcatccagcggcgttgaaggaggttcggctaaaccctttggtccgcgatcctgggcctgccctaccagccatggatcggctcgtgac

SEQ ID NO: 48002 - DNA, 232 bp, Oryza sativa
ggacacaagaaactaagcttcttacggcacctcgttgcccgcgtgccctctactgttctgctgatgggagacttccactagcctgctactgcaggttctccgacacatttctgtccactggcccctcctggatacacatcgcatacctattacaggggccgtgctctggaaagtactgagatagatccttgtacccctctactccgtatcaaaactggcagcttccatccgc

SEQ ID NO: 48003 - DNA, 308 bp, Oryza sativa
agcttacaaaagaagaatagaaagctgctatatccatacccgaactcttccgaatgcttccggactcctgattcctattctaattctattccaccagctagatactactaaactaaacttgagagaaatgagagagctattgcttgaggtgtgtgagtgaagtgagaaagtgagaggtttatatagcatcccaatgacggttgtgatggttggaatggtccgaaataccgtccaaccctcattgggagctaatccacaccgtccagaaaaaccctgcatccagcggcgttgagggaggttcagctgaa

SEQ ID NO: 48004 - DNA, 401 bp, Oryza sativa
tcttcacggcacctcgttgcccgcgtgccctcttctgttctgcggagggttgactaccactagcctccttctccaggttcccctccacatccctctccacgtgcccctcctggttccccttcgcatacctctccacgttccctttctcgttcaaggactggattggatcctcgttcccctctccttcgttccagtactagctgcttgcctccgcgatagtatcgtacaatatctgttcctcatcgcgatcagccatctgttcatacaagaaataggtgctaagtctataggtcatatttgtctgaacaatcttatatgctaacaaacatatatgcttagtcatatatgctaagtcaaccggcgcgtatgctaagtgtagtggcaatctaataatgttatat

SEQ ID NO: 48005 - DNA, 386 bp, Oryza sativa
  unsure (1)..(386): unsure at all n locations
agcttacataagaagaaatgaaagctgctatatccatacccgaactcttccgaaggcttncggactcctgattcctattctaattctattccaccagctagatactactaaactaaacttgagagaaatgagagagctattgcttgaggtgtgtgagtgaagtgagaatgtgagaggtttatatagcatcccaatgacggttgtgatggttggaatggtcggaaataccgtccaaccctcattgggagctaatccacaccgtccagaaaaaccctgcatccagcggcgttgagggaggttcggctgaaccccttggttcggccgaacctgaggccggcccaaccagcccatggtttggcttgtggcctcctctgttgtcttcttcc

SEQ ID NO: 48006 - DNA, 344 bp, Oryza sativa
tcttcacagcacctcagtgcccgcgtgccctcttctgttctgcggagggttgacttccactagcctcctcctccaggatcccctccacatccctctacacgtgcccctcctggttccccttcgcatacctctccacgttcccttcctcgatcaagtactggttgggaacctacatcccctctctcacattccagtactggctgcttccctctcgcagattgtaggcgacaatatctggtccttatcacgatcagacatatgtcatacaagaaatattcctgaatgtataggtagtttggctatacaatcttattgctgacaatatatatctacgtcataatgct

SEQ ID NO: 48007 - DNA, 323 bp, Oryza sativa
aactatttacgtcacaacggttgggttgtgcgggataacgtgcctgtcagtacggtgtactggcgaaaaacaagggcacgaggagatcatgagagctttgtcccagattcggagaaagagatgctgtggaccacaatgctcgagacattcaccattcctgcgggtacagaggacaaagtgaaaaggtggactctgaagaaaatggcagaacagtttcagagcttcaagggagatctgtacaagaagtatatactgaaggggcagacaccgaacttctacacattcccaaagctaaaggatcactgggacgagttcgttgcata

SEQ ID NO: 48008 - DNA, 351 bp, Oryza sativa
  unsure (1)..(351): unsure at all n locations
acgcaagaaggattaccatttcaccggattttggaggatgatcagtangtggacgctgtgagggaaagcgcaaatgagctcatatcataactcgtggtcggtcgctcgtcggagctaacccctccgtccgtcgtcgccggtctccgggcggnggatgcggtggtgggtgcaaaagcggnggagtggagagggaggagcggatgtgtataatgcagtggagggcggagagggggcgggagtacgtggagcggccatggcaggccctcccttcgatctctgcggggcgccatggaatccgcccccgtctctctcgctagctcctgttaatagccaaaattagggtataatcga

SEQ ID NO: 48009 - DNA, 426 bp, Oryza sativa
  unsure (1)..(426): unsure at all n locations
gacactttctctctctatctggcgcgccagatgactgagcgtggggctcctcaccgggagaccgcgcaggcccccctttgccggttcggccgggggcgctaagtgaggttcttcaccctcgatctgtggaatgttcgcgagagagcaaatgcacaagacacgggcgatgtagacaggttcgggccgctgagaagcgtaataccctactcctgtgttctggtggatctgtgtgtgaaggagttacagagagccggagagcaagagagttcaggctctataacccctcttcccctttctctcctctacgagctcaggtattcccagagtcgtctgagagtccccctctctcagagttcccgtgggcaaggtcctncttttatatctcaaggtgataccacatgcaccacttctacctactcttctttt

SEQ ID NO: 48010 - DNA, 395 bp, Oryza sativa
  unsure (1)..(395): unsure at all n locations
gcttnacggatcaattcatatcactcagaattcttttgtgatcagtaagagtagaagacaaactgtgcagcatgctttcggatttttctaagtagtacctagcaccttgcgttatacaatatatccgattagcccccaactgctaagaattggctcgaaaaaatgttcatatgcacacgtagaaatcggtactcatggataaacagagctttactatctgacaccttttctactcggatcaattcgcaagcaataagaataaacattaattataaaaagtttgcataaacatgacataacatgtgtagcccatgactcagagaaaaagagaatattactcaagataacaatatcatataaagtcaccttaaaaaagtcacttagctggttgatat

SEQ ID NO: 48011 - DNA, 464 bp, Oryza sativa
  unsure (1)..(464): unsure at all n locations
ctgagcctggtcttggcatccgcgcatntatgtgcgtctttcgcgtatgtggaacttcaatgaccctaaagatgatatatctcttctgcatgtagcacttgtattggttgatgagacggtaagataattactgctatacacacacttctatatacagtaaaatatatcttactaaaccggcactaaattagtatggatattaattacaggaaggcagcattgcagctcagatattcccaccagatggtaaactctttaagcccctgttgtcggaaggaaagatttactacctgacacactatattgtgaggaattgtagcagatcctacaagccagtgagcaactctcttgctattgcattcacaggatggactattgttgaggagtatgtgaatgcacccaccagctttccattctacacctactccctgaaatctttcaaccagctcactgcgcttcttgac

SEQ ID NO: 48012 - DNA, 350 bp, Oryza sativa
aaaacagatattggttggtgcttttgtgaggttacctttgcttgataacaacaggtatgatggggagacatttcaatactttaaacaaaagctggtggataaagaaaaaggaataattttgtaaattgtgatttggatttgcaaactcatcgagacctcgtgtatgaatgattcttgtcatgttatagtagatatttttttatgaatctttgttttaatagtttgcagccttattgatgtgtcagcctcacaagaaaacagcattaagtttgcccatatttgtggagtaagggagaaaagaagaagcattggtattaattactcacttttcatttgcatatctttttcat

SEQ ID NO: 48013 - DNA, 401 bp, Oryza sativa
tatcatgctaaggaaagggcttaccatccgtttcgactccagattcccctactacacattctcacatagctcattccaccaatgtactgaacgaactatgacaggcatgcgtgaggagcataccttgcacgtggctacatgctacgtaacatactacgccgcacctcctcctgcacataactacaactggcttgatctagtacctgccctccgtgaacgcacctatcttcatatcaacgcagatataatagtgatgacttgatgcactcaactgtcagcaacacgaatgggttccttggacggcggccgccgccactgatcataccatctagcatcgatctgtaactccgctccaggcttatattgctcgctccgaacacactgaagacttcctgctgatc

SEQ ID NO: 48014 - DNA, 474 bp, Oryza sativa
  unsure (1)..(474): unsure at all n locations
cactcaagctanacaatattgacgcgaataaacgcttcctcatgagggaataagcaatgttaagaataaatttcttagacactaatcatgcatgactcaatggaaaatataaatatatgattatagcctataggatccatagttaaatggtaagtgctagagggttttagacactgtaaacaatcggataaacataatgtcatgcaagtccaaacagagttcaaagttactgaaacattggccccccataaagtgaggttactgatgacttaacttcaatgccataattaaagttaacaaactgagcattacgctatgcaattaagatgatcaatgtacatttgccagtgactccgagtacaagggaacatagggaagataatgccgtgtcaaaatatctccaagctcacatatataatgcacttccctgctatccattttataggaaatgaatattccatcattcagtgaaac

SEQ ID NO: 48015 - DNA, 345 bp, Oryza sativa
ctacggtaatattagccaggaacttatggggataggggtttacacccgtggccttgagtgaatcaagtgccttgaggcgattctcataatattgctgcagcaagaaacacatgtctgaattttcctaaacaaaagaattcaatacaacaaatagcacagcagcaccaaaggggcatcaatatcacatacagtgggatccatttcctcatcgtcggcggcagattccttcgggggctctccactagcagctgctgttgcagcggcctacaaaattttttttaaaaaagggtgtatatatatttagagcttatcaatcatgatatggaaaactctttctcacaccct

SEQ ID NO: 48016 - DNA, 465 bp, Oryza sativa
  unsure (1)..(465): unsure at all n locations
ntagtcagtatcggctagattcccgcttcttcatacctgatttctgtntgatatgtgtatatggatcaatctggttatataggtttgtactaaagtattagctagtacgttatctttcctgctataaatactgtcacatcggctactttcataatattgtcttaaactaatctattaaactcgataaacagtattacagccgattaggcgtgtttagggtttattattctttgatatatccagtccatagccggtttggttgaagcatctangcccccgttgataattttggtaattaatgacaagcactaattgtggactaaccattctattgagttatatattttaagttaggttcacataatgtgtgctcatggatgattatcatgagctaaaattgatggcgcacagcaaaaggaaaagaagacggttaactagtgctttaatgtaanattgatcgagaag

SEQ ID NO: 48017 - DNA, 342 bp, Oryza sativa
  unsure (1)..(342): unsure at all n locations
agctgtactgggaatcatctcatatcccatacggggaaaaaaaacctcctactgactactgtcattagagactcggtaaggttttccgtagtactacaattatatttcgcccgatctttcagacttcagatcaaggagcaaaacaaggaaaccagtacgttntactcagatatttctctctgtcatgaacggaaaaccttttgtagaactgtcatgaactgaaaacctttctttcatgaacttgctgtagtcctgattaacgtgctagctgagggttactccctccgtccccaaaaaagacaaactttaaattttcgtgccaacgtttgactatcgtcttat

SEQ ID NO: 48018 - DNA, 416 bp, Oryza sativa
  unsure (1)..(416): unsure at all n locations
atatatgtgtcatgtgaacccactctacctaagtatttacagctagatatatagcttgatctggctaaattggctcagtggccaattaattaagtgtgtactctttattgtctcgtccgaacacaactacttgtatgtccagttgaaaacagtacgtggccatcgtgccttgcaccaaggtatatattgttgggtatttggttttctctccacgcttgtatatattggagttatatcacaagctagtgtgtatctcaccttgcaaatttgatgttatctgaagccacagatattgaaataacaacaatgcaactatatgaggcatttcataagaaaaagctgctcttattaaaaattattcattccccatagaataatccacanatattacatatatacagcttgtgctttgatat

SEQ ID NO: 48019 - DNA, 364 bp, Oryza sativa
  unsure (1)..(364): unsure at all n locations
gatggatggtgcaaggtgttggaaaacaacttcgttacggtggttccataagcgccagcagctcaagaggaagaaggtgctgtttaatcgttccggaaggtctccaaaccagtggatggtgtgaatctcactcagggaggttagcatgggtagcacctgaatcatgccccaaaaagcatatgccagggggtaggcaaggaagatgtggtcagtgtcttccaggcaggtattgcatagttgacatgttggggaggggatgattgacttcttgtgcaggttgacagcagtangtagtctgttcatagtcattaactgtcacgccccgaactagtcccgaccggaactagcccgtgacgctccaaat

SEQ ID NO: 48020 - DNA, 398 bp, Oryza sativa
  unsure (1)..(398): unsure at all n locations
ntagccatatctatatataaagaagcacttcatgcacatcggcagtacacatatccaaatctacgttgtgttcgatcgatcactgcaacatccattataatacaacatagatcgtatcatggggagcaaacggcgagtaatcttgctgccaactttgggcgtcgtcgtcctggccatcgcggcagccgtcctcttgcacgccggcgaggcggccgacgtcgccaacgggcaattcgcgagggcgagcgggacgcggttcacggtgggtggccggccgttctactcgaacggcttcaacgcgtactggctcatgtacatggcgtccgaccccggcgaccggagcaaggcggtcggcgttctccagcatgcggtgagcctccgctcgacgctggtgagga

SEQ ID NO: 48021 - DNA, 398 bp, Oryza sativa
agctggttttagacatatactacaagtcactctattttcttgactagggtaatatatgcaaaaagcacatttgatattatagtcaccctttcctctaatccaatcatgttcacaatttaattgatccatcatttcaacctttagacctgctaattcgtcaattaaatctaactcttcatcggatgattcatattcttcgttgatagtttcaacttcgtctgtttctatgatagaatatattgattcgtcatcttttatttcatcatcacatactaatatgttttcgtttacgctatctataattagaaccctcccttgttcttcatatttactagaatatctcttttgatctttatttgggcatgttctacttaaatgatctggcgagttgcatataa

SEQ ID NO: 48022 - DNA, 423 bp, Oryza sativa
  unsure (1)..(423): unsure at all n locations
taagataganacaaatatcatgcattgtacatatgaattcaaccatggaccaccaccctcgtccaaatgtagccacataataaatcaataccaaatttcaggtgacctccctatgcatttcacttttatttttggattttcttatgctagtattaatgccatcatttttttttcattctaacccttcaatttttctacatattcttttatgaagtactcttacttttctaactacacctctcattttgtctaatggaatataagttctatgtgacctcattcaacaattctatagtcaaaatatttataatcaaattaccccaacgcttttattgattatatcctaagataaaaaataatcgaggcccaatatatgttaagacatggtaggacactaaagtatgatacaatcaacaaaatcga

SEQ ID NO: 48023 - DNA, 398 bp, Oryza sativa
agcttgatttctctgtccttttttttccttgtttatttatctatctgtcaactctcatccccctttcggaaagatgattttcacatgaacacgaatttgtgtgttcaacgctatagatggataatatatataccattgtggttttattcgtggtcgtgtgtgttttatcgtgtactgatcgaagcacggtaatatagcgtacgtgtaaagtgtaatgtaaagtgtaatgtgtgtgttagctttcgctctactgtatgaagaagtattctatgccattgatgtttttttcacacgcagaaatattttcttccaagtggaggggttctcttcagttttattatttatttttgtgaatgaaaattctgacttcaacaaaatccttttatttatataaatct

SEQ ID NO: 48024 - DNA, 460 bp, Oryza sativa
  unsure (1)..(460): unsure at all n locations
tctggtcatcattagcatgcattatggcatcgtgattaattgcactctgagaaaaatggaaaaaaaatatcattttcagaaacaaaagccgagacaaattatttgtgttagggataagaaataattgcttacatgaatccctgagcatcaaaaagactcttcaaaatgtgagattcttcattcatgccgagatgagctatggtctattttttttccgcattccatgcctggatgagtttggttcagtctcggaggtcgtctgcacatacctgatcttgccgctagtcatttggaaccttggtattcacatcttcagacaactcgctgaaaatattggatgtttcagtcaaacatctactgaaattattggatgatcagtctatatactatcacatctcctctcctaccctatcttaataatgttngaagacattaagcttctctctctgcttatgaaacg

SEQ ID NO: 48025 - DNA, 393 bp, Oryza sativa
agcttgctagtgccaacacgccatgacgcgcggcaggcaaccgtatcgtggtggtggccggccggtcggtgaggtcgatctcggtggcagcggcagcgcaggttggccggccggccgggctctccgccgatgttggggccggccgtgccggccaggccggggttcagcttgcttggcgtcttgcccgtcaaaggctcaaagctttagctagctttgaataggtccatgtactatgtagtagtacgatgcagcagagatgactttgttgtcctttgctagtgaccgagatgctcgagctcgaccggccattggtgcaggaccaaccaacggtgtggcagcatcgcagctagccaagctcaaccgcgggaaaggagcagagcagtgcaagataaa

SEQ ID NO: 48026 - DNA, 448 bp, Oryza sativa
  unsure (1)..(448): unsure at all n locations
ngtccattctgttccattttgggcacgccttctgttattcaaggcaaattggtgggccgctattgatggtttctttgggccgacattgaagtttcctttgggctttcaaatgggccgcaatttatggtttctttgggccgacatgacgttctctttgggctttagaatggcctcagttgatggtttaattgggccaaagttgacgtttattcgggctttcaaatgggccgctcttgaccgttttctttgggcttcgtgataggccgcgttttttcaccggaagcccgtaaagatggcttcaggcccagttcgtcaaacacacaggccccagttgtactggccatcatggcctttcactgcacagcacatatagcccattaaagtacagtagtacagtgcattagcatgcggatcatcatattgtcatcagcagatagtccattcacct

SEQ ID NO: 48027 - DNA, 390 bp, Oryza sativa
agcttggatcctatcttgtgatgtcgcaattccaggtaattaagtgataaaatttctcatactcgcatgggatctgttcatatagatcgattgcaaccaggattttctgatcatagcaaccaaattttggttttagcaagggacgattgctacttgcattgactattactgtgtcctgccgttgggctctgcacaagtggagtgggagtgagaactgggtggcacattggtacaatcaagcagaacatccttacctagtaattttgggttgaaatcaggcaaccagctaggccattgtcagatcaacctagtgttttgttagcctgcttacagggtaaattacaatttgatgtattttttaatcataatgccaccattgatgcatgaatg

SEQ ID NO: 48028 - DNA, 451 bp, Oryza sativa
  unsure (1)..(451): unsure at all n locations
tatcatttagaggcattntaataagcacaccatgttaatttacaaacatggaatcggccggggactaggggggaaaagaattcccgaaaactgtcgcatggccaataccgtcgtttatctagaatttcacttggcaagtgtattctttgtttttctcccagccacatgcaaaatgtacatactctatccgctgtatattataagccgcttaattttttttcttagtcaaactactttaaatttaaccaaatntatagaaaaatattttaacatttttaatacaaaacagaaatattatcaaaatatattcaatgttaaatttaatgaaactaatttggtgttatatgttataaatgctgctaatttctttaaaaaacttgatcaaatctaaataactttaactttagaaaaagtcgaacgacttataatactaaatggagggagtacttat

SEQ ID NO: 48029 - DNA, 469 bp, Oryza sativa
  unsure (1)..(469): unsure at all n locations
tatgtaatgttgtctacanagtggtatccaaatgcctggtttacagaatgttaccgatcctagatgatcttgtttctgtggaacaaagtgcctttgtgcatggaagaatgattactgacaacgctctcttagcctttgaatgttttcatgctatgcaaaagaacaagaaggctaaccacgcagcttgtgcatataaactagatctatcaaaagcctacgacagggtggattggcgtttcttggagatggcaatgaataagttgggttttgctcgccgatgggttaactggattatgaagtgtgttacctcggtgagatacatggtaaaattcaatggaaccctacttcaatcattcgctccaactagaggtttaaagcaaggagatcctctcttgcccttcctatttttgntcgtggcagatggactgtcattgctgttgaatgaaaaggtgtcccataattctttgac

SEQ ID NO: 48030 - DNA, 199 bp, Oryza sativa
  unsure (1)..(199): unsure at all n locations
aaaaagggaaatcgtagtcactttttcctgtcgcggaaaaaaaaggctttacgcgagagcaatagaaggtgggatacatctatttttctgacaacctctttggattttaaaccacccttgcagtangatacccgctgctttgggntctttattatattatctncctcgagggatttttaagatcgctcacgctatattt

SEQ ID NO: 48031 - DNA, 471 bp, Oryza sativa
  unsure (1)..(471): unsure at all n locations
atgttcggcgcagtactaatactggaacttatgagcatgaatngctctatcaatcaccatctactntagacatatcttctgaaactttgttcaaatccaaaagtccagtatcttcctacaaattagtgaattatgaggagctctttgtgccgaanaagaaagagcagggcaatatttcaaacttgcattcgaactgcgaaatatttatacaaaggaggagagatcaagataatgcagcagggttggttatctaattggctagtcaaacatgaggtggttcatagatctttgggcttcgatcatcgaggaatagagactttgcaaataaaagcagaggattgggattccattgctgtcattntatatgtatatggttacaattatttacgttcccaatgtgcttatgacgttgcacccggtggatctttagctagcgtgtatcatcttacgagaatacagtatggtatagat

SEQ ID NO: 48032 - DNA, 411 bp, Oryza sativa
  unsure (1)..(411): unsure at all n locations
gcagctttactaaattcatacaaactataaatattttgataatnttgggcgaaataatttagtcgttttacttttttgggggggttccaaaattttgaaaatttaaaacctacgctgtgtttagttcgtgtgccaaaaattttttaagtatatgggcacatatttgaagtattaaacgtagactaataacaaaacaaattacagattcctcctgttaactgcgagacgaatctattaagcataattaatctgtcattagtaaatgtttactgtagcatcacattgtcaaatcatgacgtaattaggctcgaaagattcgtctcacgatttacatgcaaactgtgtaattggtttttttcgtccacatttaatgctccatacatgtattcaaacatttaatgtgacagaaaa

SEQ ID NO: 48033 - DNA, 407 bp, Oryza sativa
  unsure (1)..(407): unsure at all n locations
tacatcanacaaaccgcttgtaggtttcttgcagaatacttgtctacttaaggtcaaagtggtagtacaaatgctcgtattcatcggtaatatgggcgctcatatttagaactatatacggtcgagtgtatgtgatcataacaaaaaaaacacatatagcatactttatcaatcacaaaatatacgaatcttgaataggatttgatataacctgtccgcattcgttgtcatagcttatatcaaattcttatctagattggtatatttattttggaacggaatgactagtactaaccaaacaaccccagtaccaatctgagcacatacaagatacaacaattcttgtggaaaacattaaaataaatagaatataaagggggcataactgcccatccgtgaactgggcc

SEQ ID NO: 48034 - DNA, 394 bp, Oryza sativa
  unsure (1)..(394): unsure at all n locations
acacctaagttcccgngacttgctgagtactgaagtactcacccttgctctatataaatatatatatagnttctccgccctgaagttgaagatgaaatgaagtgaagattaaggtttcgtcctggtccccagccgtcgcctgtggtgttgggtgttagaccgttggttccgctgctgctgctgctgttggtgttttctcgtccgcgtcgtcggttgtattctcgggctgtccgagctgcaacctaagttaaggtaaataagtcctctatatattttaaggattgctatgattcatatttgtcaccgtgggtaccagcactatgtcctgggactggtaccgagatcgcggtttcataggaagcggttcacgccgttttccctacgacacgctcct

SEQ ID NO: 48035 - DNA, 476 bp, Oryza sativa
actcaagcttgcctacctaggaagcaggcttcaggccaatgaaaacgtcagtcaggacagtcttggattgcagggaagccttaagaatcgccagaccctgcagagaatcaacaaatacatgcataccgcctaaaaccaactgatattaagttccaacaatcaagtagagtcatgtgtacggttacgaatgtaatcacctcagtgtagccgagctgcacggtcttctccttgagcgcgcccaagtccttgaccgcgaacctgttgagcagcgtgatgctggagatggacgacatgggcgccacggtgagatcgtccatcaccgtgtacgtcacgatgccctgcacgaaccctcctcctttcgccccttcggcggcggcgttctgcgtgttctgatcttggccgccggcaacatatgtgcatgccgttgccatctggttgccgcagttaggacacttcgtgccgctcgcgttcgtcac

SEQ ID NO: 48036 - DNA, 377 bp, Oryza sativa
  unsure (1)..(377): unsure at all n locations
ctgcatgaccatcatttcggagagaaagcgtcgaaacagatgaacgcaaccgaaaatatgggggaagagagatttccctcgcgcgcttgtcgttcgccttcttcccctttgcggatttgaatccgctcgggggcgctattacctattggcgccgcggcggcggcggcggcgatttgagtcgggatcccgctcgatggcggagggcttctggcggtgggaggcggatccgctcttccccgccgccgagtgcgtgcaggactccgccgacaggtccgngtgcttttcctttccttaacagtctttctctgtttctcgatctgtggctctctgctagaattgtgcgcgtactttggtttacaaatctcggggggaatatg

SEQ ID NO: 48037 - DNA, 473 bp, Oryza sativa
  unsure (1)..(473): unsure at all n locations
actactcaagccttaaatgccacttaagattaagaattttatgtggtacttgcttaaaggggttgtgctaaccaaggataatttggcaagacgaaattggaatgacagtttaagatgttgtttttttatgaanaatgagactattcaacatctttttatagagtgtcattatgcaaaatttgtttggagagcagttcagttctctcttggtttataccttcctactaccatatctaatatgtttgatggttggctcttgggggtagacaagaagaagagtaaactcatacttgtaggagcttctgccatatgttaggctctgtggttgactaggaatgatatgttttnttggagaaatattatggaaggtattgttattctggatgaaactatgcatgaattacatcgcaaaaataaaagtgatgtgatttttaagatncgatttgaaaaagcctatgacaatgttaaatggt

SEQ ID NO: 48038 - DNA, 361 bp, Oryza sativa
  unsure (1)..(361): unsure at all n locations
agcttcactcaatctaagctagctattagctaactaccaaccgctactactacgtgtatacgttgccatcactctgattattgccgngatgaccggccttgttgctaagctacagccatatccgcgcgaattagtggccaatgacccatgattcgtgcgtgaccacgctcaaatcatttgcaatggatcagccccactgttactgatgagagaaagaaaccaatggatggatgcatgaatttcagttatgtgcttggcatcagtggcagctagctacagtactagttaattaattagccaatgcaagcaagcaatggtccgtggttgatttctccgtcaacattccaattggtttctatat

SEQ ID NO: 48039 - DNA, 421 bp, Oryza sativa
  unsure (1)..(421): unsure at all n locations
gacaatgcggagattgatgaagtaattctcgtgaggaaattgtatgcattggtccttgcatactacctgagtgctgtaaaaggtggctggcatcagcttgaagatacagttaactattttcttttaaaatttggccaggttggataatagttcgtttgtttgctttctctctttctctntctctatatgaccaacttggaagtatgtttccttttattctgatgacattactgagattcatgaatctgcagggacaactatcaagttcctatttactgcgggacatacttgatgacattgttgggagcctgctacagacatcttcagaagataatattatcctttcacagccatgctgtgataatgtcttgtatcttttgaagcttatccaggagttgctnttcaatcaaataggaatcaa

SEQ ID NO: 48040 - DNA, 465 bp, Oryza sativa
  unsure (1)..(465): unsure at all n locations
tagcatatgctcatcgtaaaaaaattcaagcaattaatccaacatcatcacttgctatatnttttaaattcgattaacaatatacaaaagaatttctgaacttcgcatatttgtacatataagaaatataaatgaattctatgataaaatcccatagaaaatttgatattatgacatgaacattcagaatataaagaattcaagtgcttataacaactttcaggtattttgaaaccggacagtacttaattttattttaacacccagaatttgatattttaaagtacaaattcgttttgatgcatttcagtttctttccgtactactagttnttgtagaacttttattggtagcgaattcaaataacggactgctacagaacggtatcccgtccggactagatacttgataatgtcgtatcaacaccaatgttaatgtcactatatacgtacagttcggtaccat

SEQ ID NO: 48041 - DNA, 391 bp, Oryza sativa
agcttcttcgcggcacctctgtttccacgtgctttcttctgtccaacggagggttgacttccactatcctcctcctcctggttcccctccacatacctttccacgtgcccctcctggttcccctgcgcatccctctccacgttcccttcctcgttcaaatactggtttggatcctcgttcccctcttcttcgttccaatactggctgcttccctctgcgattgtatcgtataatatctgttcctcatcgcgatcagccatctgttcatacaggaaacatcagctaagtcatgagacatttatgtcttaacaatcttatattaaaactcaaataatcttatatgctaagactaaacgaacagtcatgtatgctaagtgtaactgtcgtatat

SEQ ID NO: 48042 - DNA, 452 bp, Oryza sativa
  unsure (1)..(452): unsure at all n locations
tcgtcgaaatccgaacagagaaaatctgcacctctcgattttatcttgattggtcctgtagttactgttcgtcgtgtttctactgtttctttcgcggactgataagtttgctgtgccgctcgtgacctccctgatttgatgctctgcttctagattctcctttaattaatcgaggtttgcgagcaagattaagtgactgtttcttctattgtattgtgtaattaagtagataataacccgctggataatctggcctaagcttgcaagctgcgtcgtgtggtgctgttgcattctgcagtatgtgattaagtacatgtcgacgtgctcgtgtttgtaaggtatcgacgctgtcaattatcagtggggcccacctcgctagatgtttccaagctggtacctttaatatgttagngtgtgtggctagttaattgctaggtgtgcagttctgtcat

SEQ ID NO: 48043 - DNA, 357 bp, Oryza sativa
atcttggacaacctgaacagcttatgtgctaaagttctaaaagctaagtatttccccaacggttcgattatagatacaagttttggggggaactcttccccaggatggaaagggatagaatatggtctcgaacttttgaagaaaggtataatctggagagtgggtaatggtcattccatccgcatttggcgtgatccttggcttcctagggatttctccaggagacccatcaccaggaagggtaactgccgcattaaatgggttcccgatcttctgaacgataatggtgagtgggatcttgaaagaatccagcaacattttaaccagattgacactgatattatactgaagattcgt

SEQ ID NO: 48044 - DNA, 447 bp, Oryza sativa
tcatctccggcctctgattaagtttatattagcaaaggttagtactaactgtgctcagcaagccaccacagctacaatgcatatgacaggggtattcaaaggatggctatggttcttttgcgcaaagcaagtgttgtaattctttccacaaacctaagacctatcacatactgatcaactgttagtaccagtgttcatatcaaacaatgacggttttgtccaccatccattgtgatcccaaagatagcttcccgccattgagtcatcatggctttctgaggacgttcacattcccgcctctcatgaagtggctccatcagtatagaaatcatcatgcaatatcccatcccacacatgttaagaatttagagtctatccaagtgtaatacatgttccggtgctcaataactacgggcaccgctattcgaataaatatggttactcaca

SEQ ID NO: 48045 - DNA, 352 bp, Oryza sativa
agcttcactccatccatgatcagagatgcaatgatctaaaccttctcaactcggctaatactgttctattaccaaaaaaggaaggcgtggagagtagcaccgacaataggccaataagcctcatacacagcattgtgaaaattctcttcaaggtgctagccctgcgacttcacctggtcatgcaatccctaatctcggtcaaccaaagcgctttcaaccgtggcaggagcatccacgataacttccattatgtacagaacatggtgagaagatgccatcgcaacaagagcccaactctattcttcaagctagacatttccaaggcattcgactctgtgtgttaggcttatct

SEQ ID NO: 48046 - DNA, 456 bp, Oryza sativa
actcagctgtttaggagcagagaatcaatacgaatgagagcggaacttcggttagtttgttagcagaaaattagttctaaaaagagcagaacatcaacaaccgaccgcttatatattgaacaccagggaagagctgatgttctgctacctttcaaacagaaattctgctcaatgttctgctccttttaaaatgggtcttcagaaatgatcttctgctccttttccagatctattcttctactaattagacgagcagaagatcttctgaaaattcatacgagccatctaacttgtttagcgcttaccaccgtaaatgtagtagccggttgatctcatcctaactgataaatggattggccggtattctgttcccggaggagcagaatatggacgcaggcagaagctcatatgagaaaatatattttcccgtgatgttctgccatttttaatatacat

SEQ ID NO: 48047 - DNA, 363 bp, Oryza sativa
  unsure (1)..(363): unsure at all n locations
agcttattgcctccgggagtgactgctgttgtatgcttatcagctgcaagagttgctggtgtagcactagccctcctcagcaaataactagcttcatccaatgcaggcatacgctcaagcaaagatggcctgcactttcaccatatttctctaacattaatacctatattaagtgccacagtattgaagaaagtttccgcgatagcatccaaaagttctataacacacctgatagactgatgtctttgtatgatggaactgaattcaattgatctttgctgtagttcaagcacaatattctttntattctgggaaactatntgctttatccttctggtaatacccagtaagaatgattattta

SEQ ID NO: 48048 - DNA, 449 bp, Oryza sativa
  unsure (1)..(449): unsure at all n locations
nggaggtctcccgacgtggtcgatccccacgggctgggtgatccgggttagtaatgtcgagtgggtaaagtgtaccccctctgcagaggttaacaaactgttcgaacagccgtgcccacggtcatgggcggatgtgaagtgattcctagcgtagttttgtttgactactgcttgtgaaattgctgttgtggaaaggggttcgatgtttgaaaaatctgcagctgatgggatcagctaggcccgggtggccgtttgaaagttgttggcccgggtggccgtttgaaaagctgttggccgggtgccaaccttgtttcaattctaaagactgatacattgcacatactccgaccggacgagacgcactgtctcacccgtgtcgtttgagaagcactcacttagttgtttttagaaaagagttcaaataagatcaattgcatatacaacagcct

SEQ ID NO: 48049 - DNA, 385 bp, Oryza sativa
  unsure (1)..(385): unsure at all n locations
agcttcacggatcaattcatatcactcagatactnttgtgatcagtaagagtagaagacaaactgtgcagcatgctttcggatttttctaagtagtacctagcaccttgcgttatacaatatatccgattagcccccaactgctaggaattggctcgaaaaaatgttcatatgcacacgtagaaatcggtactcatggataaacagagctttactatctgacaccttttctactcggatcaattcgcaagcaataagaataaacattaattataaaaagtgtgcataaacatgacataacatgtgtagcccatgactcagagaaaaagagaatattactcaagataacaatatcatataaagtcaccttataaaagtcacttagc

SEQ ID NO: 48050 - DNA, 454 bp, Oryza sativa
tgagcctggtcttggcaatccgcgcatttatgtgcgtctttcgcgtatgtggaacttcaatgaccctaaggatgatatatctcttctgcatgtagcacttgtattggttgatgagacggtaagataattactgctatacacacacttctatatacagtaaaatatatcttactaaaccggcactaaattagtatggatattaattacaggaaggcagcattgcagctcagatattcccaccagatggtaaactctttaagcccctgttgtcggaaggaaagatttactacctgacacactatattgtgaggaattgtagcagatcctacaagccagtgagcaactctcttgctattgcattcacaggatggactattgttgaggagtatgtgaatgcacccaccagctttccattctacacctactccctgaaatcatttaaccagctcactgg

SEQ ID NO: 48051 - DNA, 364 bp, Oryza sativa
tacctgcttcttaaattggtattgacactacaacaaaaaccttatgtagaaactcttttgtagagagacaacttttaaaatgcctctaaagtttgaagctctatagtctagagacactttttagaggcactttcaaaatcgcctaaaatatttttactctagagacactttagagacatttttagcatactttgttaaatttatctcgtagagacatcttttcggcactttaaaatttgcctcatatgtaaaggcattttctaaaggcatttaaaatgttgtaaaggcgttttttcaaatattaatatatatcaagtaactagatataagtaacacaaatcacatatttacatgtaattatatg

SEQ ID NO: 48052 - DNA, 407 bp, Oryza sativa
  unsure (1)..(407): unsure at all n locations
tctactacatacccggacagggaggacttangtgctcttgatggttgtcaccatttctacacccacctcaaacgtactgtggaatacgcagcaaccactggaaattaattacccagacaccgcgtctacgcaattaataactactatagtatcgattaaacactaaagcaatcactataaataaatgaactatagcgaacaatgatcccgtatgctaattaggaactaaccaagaagtaattatcactaagaaaatcttaattactcagaatgatatttctattaaagcagagtaattaacaagatacaaaagtaggaggagattaccgacaactccgggattcctccgattccttctaccttactctctccctattctaatatacaataaagtacattagagactc

SEQ ID NO: 48053 - DNA, 316 bp, Oryza sativa
  unsure (1)..(316): unsure at all n locations
ctactaacaaatattagaaaactgcctatatttgccaagggggggccgaacctatgtgcatgaatagttcaccggcctgaccaaactgttctccagagagtatataaggctcatccatgttccacccagactcagtgcgaacaaagtagcacatgacaggtgaagngcatttgcttttgtcgtctatcttctcttgcttcaaattctcctctttgcctccatccttgtaaactgaaaggtacatcgatcaatgtaaatccaacaaaaaagcaaccacgaaacatgatgggagcacttggtaactangatacaactt

SEQ ID NO: 48054 - DNA, 398 bp, Oryza sativa
  unsure (1)..(398): unsure at all n locations
tagctctgttcagctgttcacattttaaatgatactgtagtcaaacgctgcattgaacaaagaatgaaataggaaccaaccaccttngtttaatacttcaaagtgtagctgatcagctacccttgacgctgcttggcaaattgacaaccctacagctgaaaccttttgaagagtattgttctgttgaagcctcttttgcagcaaagtggaattcttcattagcctgaaccatctatttacgagggtagcatgtgtttcaatgctaatgttaagaacagtttatttttactttgcagtgacactgttgtacaattgcttccactttcaatntatactgatcatttcctctctttactttangggtattttggtcatcatacatgggcttaatgagcaca

SEQ ID NO: 48055 - DNA, 390 bp, Oryza sativa
tcttctccgggcagtctgtatgtggctggctctcactgccgcggcggcggccgtggcagtggcggtggtcgtggcggcccggccggcggcggcgactgacccctacgcgttcttcgactgagacgtcggctacgtcaccgcggcgccgttcggcgtcaagcagcaggcaaaactcgccttaattattctcctcggtgttcttggctagctcttcgttctcgttgcaagtaaatgtgtaatgtgcactgactatggtttggttggtcgccggcaggtgataggcatcaacggcaagttcccgggaccaaccgtgaacatcagcaccaactggaacgtcgtcgtcaacgtgcttaacgacctcgacgagcccctcctcatcacctggtacgt

SEQ ID NO: 48056 - DNA, 464 bp, Oryza sativa
tgaacgctacagcttcagtctattgaattgaccctgtgttcctgttgacatgaactcaagacttggtttgttttgggcagagtgaactcaagaccagtattttcagagaaaactggaacagggcttaacgaattaagcaaccgaaagtctttcagagacagaattgagttaaactataacgagctctcagggtaaccacaaaaacgccatcaagagttcatctactttcagaggctgtgtttagaactaaacttcagtccttttccatcacatcaacctgtcatacacacaacttttcagtcacatcatttccaatttcaatcaaaatccaaactttacactgaactaaacacagccagagtagtaaataaaaagagcactgataataatcagacaacgacatgaaaccaatatagtagtactacatctctcccttcataatggatgtttttagaagtagggga

SEQ ID NO: 48057 - DNA, 409 bp, Oryza sativa
agcttatggtctttattagcacggttcatatctttataaactatggaagctctagcctatgctagcaatatattatatcaacctagaaattattatatgagctaagttcttctaagttttggtggatggggatggaactatggctccactggtcctaacaaggtttatttggatttatttggagctaccatgcatatatatatatatatatatatatatatatatatatacacttattcatatgcattgtttaaccactactatgtgtttagtacctattctaccaaattaaggtttagagctatagtgatgaaccctgagttcctctcaacactcaaggctgttgttggcccgatctttcggtgagttgtgataactacgatttgggagaaacgttgacgatccgact

SEQ ID NO: 48058 - DNA, 459 bp, Oryza sativa
  unsure (1)..(459): unsure at all n locations
ggtggttgggatgcaccctgtgtatacaggctgacggatctcgtggctcctcaccgggagaccgcgcaggcccccctttgccggttcggccggnggcttanggtgagatctcaagctctctctgtgtgtggaaagatcgcgtgctangaagaaacgcgagacacaagcgatgtatacaggttcgggccgctgagaagcgtaataccctactcctgtgttttggtggatctgtgtatgaaggggctacaaagtgtgagccaacctctccctcgttctaagctctgaatctggcaagaatcaatccccccctctatgggcaaggtcctccttttatacttcaaggggataccacatgcacccttctctttccaaactggactgttctttntctcttgaatgggcggagatcagcacggttgctgttcgaacgacgctccgatgggacaagccacacctacc

SEQ ID NO: 48059 - DNA, 411 bp, Oryza sativa
  unsure (1)..(411): unsure at all n locations
agcttgattggcctcgccgctggcgagcttcgtcggcggcgatgtgaatgagaaggcggngttgcancggcgcgggcggctagggttttgccccccgagccacccgtgcgagagcgacacgggaggaaggggtctcttcgagcactagtccttttcttgaatatctcaccaaagcattaaatactgcatctctacccttgcttccacacgacagagcattaaataatttattttactaatgtaaaagtgtagtcgtcctccttctctcccctcctcccatgtgcgcaacgcgtctgtacgctntgcgtgagtaaccatcatatccattgtcttatcggcaatcacccttttagcccatcctattactacttaataataaaattaaaccgagatatcaaaacatggttctac

SEQ ID NO: 48060 - DNA, 466 bp, Oryza sativa
  unsure (1)..(466): unsure at all n locations
tcttcacacgtacctgtcgctggcagaagaagcaagaagtcttatcggccctctaccatagtgatagctctaccaatagtctcagtggtgcttgtaattgcttgtgctgctggtgtttttctactgatcaagaggaagtttcagagatatgtcgaattgcgtgaagattgcgagcttgagtttggagcacataaactgtcatacaaggatttgcttcaggcaacagaacggttcaataacaagaacttgcttggaattggagggttcgggagggtgtacaaaggagtgctccctacttctagttcggaggttgcagtgaagagggtatcacacgactcaaggcaagggataaaggagtttgttgctgaggttgcaagcattggtcgcctccggcaccgtaatctcgtacaactgtttggttactgtcggctcanaaaagaacttcttttggtctacgactatatgc

SEQ ID NO: 48061 - DNA, 386 bp, Oryza sativa
  unsure (1)..(386): unsure at all n locations
agcttatccagaagagacttagnttcaagataatgcggcatggcaagttatctattaattaggaatagtttgttagtttccttctatctttaagaaagtgtgtttactgtcctataaagactttatcttttccttntatatttagnttctttcttgtccgacaaggattagtatctccctatgggtataaatatgtacacccgaggtcattgtaatctatcaatctctcgatcaatacaattactctcggcgcatcgccaccctctcttctgaggttntacttatcaaccaatggaatttagcaactgacgcggtgctgcatcggttcagtttgatctccggcaaaggggtaagtcctacgttccgctggccctggtgaatctatc

SEQ ID NO: 48062 - DNA, 456 bp, Oryza sativa
  unsure (1)..(456): unsure at all n locations
tgggactttcttcatgcactaactgctgtttgattggattgagcctcaatatccttgcgctcccgacgatcggctaatctttgcttggctttctctagcttgaataggtgttgctcgagataaacggatggagtaacgacatcggctagctcatccggaatttgagattggatctcatgtagccaagtcctgattgacccgcagtcaaccactagattgtctagtgatgatgcctctagccgatgagagatgtcttgaagtgttctattcacatcatcagaaagaggggccaaagccttgctggtggtatcttcttctgtttcatcaaagtaatccttgatatcaaaagaaaacagatcggctaaggcctgcaagagagaaattcgaagacagttaaatatcaaacagatatagccgatctaagactttgtgttaaagaagagacnttgtgggata

SEQ ID NO: 48063 - DNA, 402 bp, Oryza sativa
agctttctagtacatagtatagatacttacatcctctgcgttaaccctgtacctctcattaaccctaaggaattcgcacgcataatacccgcaaaggacagttcctctaagttgcttgtggacacatcatagaaaaaatagttaaattttgcaattagtgaaacaattggaatacattaagtgagtggagtattactggccaataggtatgtactagcagcttctcccttgtttgggtctgttctccacccttgaacttgtagtattggtacgcactgtatggatgtcgtaccgtttcacattaaggaggatatttaattataatattcatataaaaatgtaagagtcacaatcacttactactgtaagaatgttagaaattctttgtatgactggtgtctg

SEQ ID NO: 48064 - DNA, 457 bp, Oryza sativa
  unsure (1)..(457): unsure at all n locations
ggctgtgatggttaanagaacatgcacttatgggtgggtgttctaccgtacggtggttntttttgtttgttgatccttgtaacaattgtatgattgtgaggtaccgggagagttccgctcaccatatttacacgccaacgttataaatgggcatttgggtgcaagctgctcaacagattccattcatgtgtataaattcagcagtagaaacttcatggcatattggtattaccaagcgaatgagcatatgcaaacgtttcacaccgataccacacaaatcgggtgcatgagcaaacgggaaagcatcaatggaagcaagaaaattactatgatttgagggaccaagaaggatcttcaggcccaatactgctaactcacaaggcaagaactcctgcgcaatctgcaccacanatcatcgatcggatggcggatggtgatctgtccattcacttgaaca

SEQ ID NO: 48065 - DNA, 321 bp, Oryza sativa
  unsure (1)..(321): unsure at all n locations
agctntataggggcttgttatgtgcggacactgtcgggaaacccctctgatttggctcgcgacgtgggggagtggggagagagttangagggattcaaatcgaatcccgccctttgtgggcgcgcggcgcgggcgggaaggcaagggcggcgtcacggcgacgtgggcgcgggaaaggcgggtggcggagtgggcgcgggatggcaaagtggaggaggtggggcgccggcggcgtgggcagttggggctccggctccaacggccggaggtaggagacgaccgtcatgtgggccccacctatcggcgaccctatggaggaaa

SEQ ID NO: 48066 - DNA, 303 bp, Oryza sativa
  unsure (1)..(303): unsure at all n locations
tctgcatagaaaggacgagtcgatttctgaagcatggtaaatgctacacgagtacgtggccgcctatcctcatcatgggatggacgactggctgatcctgcnagaattttataacggactcactcccttggtccgggatcacctggacgctgctactggatggtgcgtcttcttcaatacggtcagaggtgtcgccgatctgataaagaagatggtttcaaacatgggctagagcgaagaacgactccaaacccgccagtgtggcatgcatactgtcaaggagatagaaatgctggctgctag

SEQ ID NO: 48067 - DNA, 368 bp, Oryza sativa
  unsure (1)..(368): unsure at all n locations
agctttatatcatcgttttctgggtaatttgtacaaacttgttaaacaaaaaaaacatcaactaacttaatcatcactccccctaccattcttctacctacacagaaggagaaaaaaaaacaaacgaacgaacaaccaatcactcactaaaatatgtagtcctatctctcaccattaatctgtatataattgtacacttaatctgagctcgctcagaggatgaaagaactcaattatccgccggagaggcagctgacgacgatgaatccgatgatctagaaattctccttgtggaagacgaatttggtggtggtcttgtgggagaagtcctgngcgaagcggcggagctccggcgtgagcgcctggtc

SEQ ID NO: 48068 - DNA, 456 bp, Oryza sativa
  unsure (1)..(456): unsure at all n locations
ngctcgtgttttctcgacgtacaagctgagatccgtgcctgcaaagagcgtggaattcaacgtacttctccaacccgtgatgtccattgtcctattcataagacaaagaatcacgacctctcaagctgcaaggttcttctcagcaccatgaggacgtcacctcctaaggttcaacagtcacaaatctctcttagagatgcggacaaggaacgaggagtgacggttatctcagatcgattcgttggggtaatcgacatcgatcctcacgagctgtctgttctacacttgttcgaagaccagacctcatcatcaacgagtacaccacgtgatgtattcgccatcgatgggaccaacacatctgcgcacgctaacgcagaacggaggatcaagtggttacaccggcccagcacatcatggccatcaacgcattgctgagggaaactccttatgacccca

SEQ ID NO: 48069 - DNA, 373 bp, Oryza sativa
  unsure (1)..(373): unsure at all n locations
agctntatatcatcgttttctggtaattttgtacaaacttgtgaaacaaaaaaaacatcaactaacttaatcatcactccccctaccattcttctacctacacagaaggagaaaaaaaaacaaacgaacgaacaaccaatcactcactaaaatatgtagtcctatctctcaccattaatctgtatataattgtacacttaatctgagctcgctcagaggatgaaagaactcaattatccgccggagaggcagctgacgacgatgaatccgatgatctagaaattctccttgtggaagacgaatttggtggtggtcttgtgggagaagtcctgagcgaagcggcggagctccggcgtgagcgcctggtcgccgc

SEQ ID NO: 48070 - DNA, 447 bp, Oryza sativa
tgctgggtttttctcgacgtacaagctgagatccgtgcctgcaaagagcgtggaattcaacgtacttctccaacccgtgatgtccattgtcctattcataagacaaagaatcacgacctctcaagctgcaagggtcttctcagcaccatgaggacgtcacctcctaaggttcaacagtcacaaatctctcttatagatgcggacaatgaacgaggagtgacggttatctcagatcgattcgttggggtaatcgacatcgatcctcacgagctgtctgttctacacttgttcgaagaccatacctcatcatcaacgagtacaccacgtgatgtattcgccatcgatgggaccaacacatctgcgcacgcttacgcagaacggaagatcaagtggtacaccggcccagcacataatggccatcaacgcattggtgatggaaacttctta

SEQ ID NO: 48071 - DNA, 393 bp, Oryza sativa
  unsure (1)..(393): unsure at all n locations
agctntcctcttactttgaaaatatttgtgttataaccattgagttgaaatacattacacatggcgcctgactgaacattagcaaaagaaacctagacttatcacaaggatatactggtagatatcctagtaacagtctctgtaaatgagtgtatgacaaacactcaggcacgcacacatattgcacataaaaaaaaatccactttaaccagactgaataagctaaagaccgtgaatcaaagcacggaaaatcgcaagatgatgtggcaaaatgggttacgtggatcactggtaagcctgattcaccaaaatacttaaatgggctatgcaatagtcctaagtggacgggtactctgctgatattttattcaaatgaaaaagctaggggggtaa

SEQ ID NO: 48072 - DNA, 435 bp, Oryza sativa
  unsure (1)..(435): unsure at all n locations
tgcccgcaggtacaccaaacacacacttatcggggttcagctntatgcgggcggagcggaggttctcaaaagtttccgccagatctgaaagtaaagtttcttggttgcgcgtttttacaaccaaatcatcaacataagcctcaacattacgtcctatttggctacccaaagaaattcgagtagtacgttgaaaagtaggacctgcattctttaacccgaagggcattgatgtataacaataggttcctacggnggtaatgaacgcagttttttcctcatcctccctagccacgcgaatctgatggtaaccagagtatgcgtctagaaaacacaaaaggtcgcaccccgcagtggagtcgacgatctgatctatgcgaggcaaggggtaaggatccttaggacatgccttgttaaggtcggtgtagtcgatgcaca

SEQ ID NO: 48073 - DNA, 388 bp, Oryza sativa
  unsure (1)..(388): unsure at all n locations
agcttgaatccacagattatgttggattgttggtggagttagaaaaaatcatccctgaaatagatgtggaggactgtcatttaaactaccttttcattgacacatgcactctcaccgaagtctaaccaccaactacaatctaacttggaaattccgagattactcacaacatagaagaacatatagctagtcagtcagataacattagcactacatagagggcacagcacctccaggagcccaggacctaatcaaactagaaccgaacttgtgcaccatggaatcgtatgcccgttctcacaacaatttcgcagctcatagctgggcactaccacgcggatcagatttaactatggagagaaccacggngggagagattcgaagcatg

SEQ ID NO: 48074 - DNA, 410 bp, Oryza sativa
tgtccactgaatcacctctctggttacaagttgcttcagcagtaacctattcccatccaaacagcataagtaggaattagaaagaacattaaaaaccatgataatttgtaatcctgaaagcaacataacgtaccggaaatttggtatctcggagagatttttgtcttcgagtgtggcattgagaaagcttgattgcatcggatcatgaggcgccaacaccaaataccaacagatctttctaagaacctaaagcgaattcaggcagtcagataaccattatagcgtgagtgagtatgcgcacacaccacaccaagttagacttgcgaatgagagagctttaccggtatccactttgatggatccttctttattgatggaatttcatatatcgacttgtagcaacggccgat

SEQ ID NO: 48075 - DNA, 415 bp, Oryza sativa
  unsure (1)..(415): unsure at all n locations
tgccaacctgggctattccatactagcacatgtggttgtactgtataccaaatgaactgacattgagtgaaatccttaaggccggttgggcccactctccccctatcggtatacaactaatcaccatatgtacaccacttgaggcccaaacctaaaatccatgttttccactattttatttatcaaaatcacaagttttaaagttctgtccaaattaattaaaaatcaattttcatgtttgaaatgagcccataatgacaaggaagaccattctaagcatggctaagctttatagtaacctagtgtcaccaaaactcatatataaagtggtatagccatattgttcctaaggttaggaatgaggaatatggatatatgtggagttaaggtgataatgcanataataggagtttat

SEQ ID NO: 48076 - DNA, 388 bp, Oryza sativa
  unsure (1)..(388): unsure at all n locations
gcattccatatagtatntgaaacaatcttcaatcattctctaccaatataaccccgctctcctaagcaaccaattcatcttatgtgccgattgatgagttccacatattccttcatccacctctcccatagccactttatattgatcatcatccaaacacttcaatagaactcccatagccactttagattcatcatcatctaaacacttcaatagaactccatctatattttagtgatataaatctccatcaagcaatgtatatttgaacgcttgccgccgaattcttcaatcaaccttaagtgcagtgtctttcaaatatctaatcaaaggaatcctccaatcttcttctgtttcttgggcacaaatgtccgaatttatcaataat

SEQ ID NO: 48077 - DNA, 375 bp, Oryza sativa
  unsure (1)..(375): unsure at all n locations
ttttcttttcttatcttcgntctctctggtccctgtgcctatcaatacgtgagcttggagccttggagcatgtctaagaatactaggatttcgcttttgtctcccgtctcccgtggacaagatcgcttgaccaacgcctgatgatgataattaagacctgcctaagcaacacctgggacatccgtattatgatattatctgcactgcgggttacttctaaatgatcaccgcaccccctcgtcgttaccaggctgcctcgtgcatgctcatcacaaaaaggcgtgctttgacgtccctcgcgagacacatcgcatgcagctgcggccagtctcagtctgccatgtgcccatgttcttcctcgaatgcgtctgtctc

SEQ ID NO: 48078 - DNA, 433 bp, Oryza sativa
ccttggaagccgtctctgacaacctacatcgacacatatcctatgctctacttatggatagtccacatcctctgcgcaactacaggaggaagtaccacaaagtgcagcgtctacatcaactggttagttcgcgcatcgtccatagttatgtcccggaggaagattggtctcttgacacatacatcctcattggcaaggtgtgcaatattcgagcatcttggaaccaccctatgacttgttccctgatgaatgggcacatgagccaaccaagatcatggagaaagtcaggcgcgccatcatgaaggagtattggaagcggcggtatggggagcacattctccttgccggaccaacgatctacttctactacaacacatacgccccttgccagcaagctcatgggatccactcctccacttgtcctcagtaggag

SEQ ID NO: 48079 - DNA, 412 bp, Oryza sativa
  unsure (1)..(412): unsure at all n locations
gcaagctttagatacatggggtagataattaggagaaattttttagatatcttaaacttactataatacaacattagtgatgttggtgataaatgtactcccggctccaaaaccaaggtgaccattatgtttttgcaaatttttaaaatttaaatctctagaagtttgtctgaaatttcagatctacggcatgcattataactttatcaagattaaattttctacgggacataattgggagcattttggcaattgcagttaaaaagcattggttctaaagcatcatctcccagaattgtacaaccggcaatagatgtgtagagtgaagactaagatttatgtatagaanatccttcaaatgcataacagtgagttcctaaatttgtgaacatgagcatgatcaggattatga

SEQ ID NO: 48080 - DNA, 466 bp, Oryza sativa
  unsure (1)..(466): unsure at all n locations
tcccnccgcgccattaattaacggggcaagtaattaattattaccatctctcacagcctanatcgggggccgcgtcctcttcgggatcccgaaatagtaatttactttcccccncccccccccttcccgatccatcgcacgctacagcaagataacccccccaccgggccttcgctgtcgtcgatgaccagtgggcccgcgagacaatctagccgttcttcatttgtttcgctttcctgccacgtaaaccgacccgtgggatatctcgcccctttttctaggatttttttttcttttcgggactccacgctcgttctttcgcttttcatccgcttcgcgtccgtttcttccctttctccccccattattctacctgccttctccatagctcacgctccttcacgcacacgcctcgctcgcgcgcgcacacaggggggaggaggaggcacgtcggcggcatggcggt

SEQ ID NO: 48081 - DNA, 377 bp, Oryza sativa
agcttgcagtccctattcaaacagcatgggatcccacattcaagcatgaaaagttcgaagagcatggatttacccggccacgcagtcaagcgaacaaagaaaaagctgttccgtgcttccatgctgccagcctgccactggccaccgctatgcccggtgtcagaggaaatggctcacgcggcaatggtcctggcctatgaggttggcggcgaaggaggtacgcctctgctcagtagcggctctgccttctcgcggaggggacattgtggccccgcgcacggcagcaacacgcgcggctactaccagcgtctggcggcaacgccggtgtcgaggagtgatcctctcaagcgggaggtcgcgaggccctttgtgagttc

SEQ ID NO: 48082 - DNA, 475 bp, Oryza sativa
  unsure (1)..(475): unsure at all n locations
ctcaagcctaactntaatcctaatgcaatacttcaggcactggcatcctgctgctcctatgatgtcgctctactatgtacccggactgggaggacttaagtgatctcgagggctgtcaccacctctacacctacctcaacgtactgtggaatatgcagcaattactggataataattacctaaataccacatctaagtaattaatatctactttagtgtttataactcaccaaagcaatcactatattttagttgattataatgaacaataatctccgatgctatttatgaactaaccaagagataatgctcacaagataaatctaaattactcatgaagaatattacattgaattcagagtaataaacagaatataaaaataggagaagattactgacaactccaggattcttccgacttcttctactctactctctttctattctaatataccatatagtacaatatgagcct

SEQ ID NO: 48083 - DNA, 380 bp, Oryza sativa
  unsure (1)..(380): unsure at all n locations
agcttctctttccagaggacagattgatgtctgcctaatacccgaggtgtgtaaacactatgctgacagaacttctttttttccccttttttttggcttcccatctactgacagaagcgtactatctgaatgcaggtatcttttacactaaatggagaacatggtgtcatgcgacaccttgaacatttactggaaaaaaagggattttgcgtggtttgtgttgctgaaggtgcacggcacgtaataagcagtgcgtggtgtcttaaggttntgcacagatgagtgctacaaatactcatacaactcattgaattaaatggatggagaattgattggattcttggatntgttcttgcacgatttactgcanaaatcaaatg

SEQ ID NO: 48084 - DNA, 435 bp, Oryza sativa
gtattgaaactcaatcaattaactaagatgattaaacctaactgagcctactcccggtctatgtatgtaatgcacacagtctaagaaccaaaacactcatccttatcactaacattaaacagttacataaaaaatagtggatatcaatcttgatatactagatccccacccaccatgctgggcaaaacaacttcgtgccacatgatccaaccgtcgaaataccatctgaatagataaccggtcccttaaatgtaaagaacagtacgacttgtttggttaaatgggattgaagatgattggcgtggaataaattccctactatcccttccctctctcagagggattaaccgaacaaagtcttaagtagataattctttcggataatccattaaattatctgttgttaaccggggcaatgtgtgtgagagttattac

SEQ ID NO: 48085 - DNA, 400 bp, Oryza sativa
  unsure (1)..(400): unsure at all n locations
agcttatgacgatagcttaattaactaggttctttagttaacagtaacgctgtgctcacgttaaggcagttgatataatactcaggatttcccgccccattgtataagtcctaaaccccaagttttatatgcaattctcatattactgtagttattaaaccagcccaaacatggaacaattgggccttggtgggggaagggggtgatacagttgaccacaagtaaaaagtaactaaactccttaggtgaaaacttgtaagaagttggacactggcgaaagaaacccataactgggcatcaagtaaattgcttggatgagctcttgagagcctctcattgactgaagatgctntgtcactagagaattangaatttgatattatagggtttgtgaaaaaag

SEQ ID NO: 48086 - DNA, 452 bp, Oryza sativa
  unsure (1)..(452): unsure at all n locations
tgtccaactgcgctagtgtgtactttgtacttgcctatgtgctcctaaaacgtttccataataattcaagattcatctgctactccagatcttntgagttttgacaatacattgtgtacttcttatttgttattagattttgcgatattaccaattaactatgaagacaacaaaaaaaaagcatcgtatgagagatgagcaacaaattgacttccatcatgcaaaagtagtccgtatatatttttctttggacaatggtaattacatctcaagttaccgcccctctatatttgttagggtaaaagtattcattgagttctgaatattttctcttgattgctccgattcatcacttctgtatgcaaagtaggcggggcgacttggggctggaagtgcataactactcctattctccagaatgaacacagtgtgatgacataagtggcctgtca

SEQ ID NO: 48087 - DNA, 392 bp, Oryza sativa
  unsure (1)..(392): unsure at all n locations
gcttggatctaagattntgtagaatagaatatacatgttgtatgaatatgaatgttgtcaaattttttgagaatttttcagactatttagatggttaaaatgaggtaacatctccttgagaatccaaaagagtttccacttgtaacggaatatatccacttgctttgtagtcgttcctttgcttaagcactgttgaccattttcagcttggatcatcaataactgtgaaacaattcatttgtgattaatagaagttgtatagcatatttatgacctttgatatatcatactacctttgattttttttttgtcaaacttcttttataatcaagtttgtaaaaaaaatagtaatattatgaataaaaaacatattatcaaaatatattcaatat

SEQ ID NO: 48088 - DNA, 335 bp, Oryza sativa
  unsure (1)..(335): unsure at all n locations
tgtgcagtgtcatcatgtngggacacttctggacgatcatatttctgagtgtnttcaggcggcacaatttgacacgcaaatagttccagctgcagtctgtaactgacagtgtatgcttgcaagtgaataattcaccaatctttgtgggatcactcgatcccttgctactccagaacataagattctgcaatgccgggcgatcttgatcctgttcctagtcgcaaccgtctcctgtcaaccagcttgggtatatcacaccaccgtaatacctgatgcaaagtactgttatctccgtacagggactgagcccttaagaacctccgcctaatttctgg

SEQ ID NO: 48089 - DNA, 390 bp, Oryza sativa
  unsure (1)..(390): unsure at all n locations
agcttctcgttaggtggagggcacnaagtgttggtgatctttggccaccgagccataaaggagagcattgggctcagcccaccaaggctcacacgctccttgactttgaagagtgagactcatgcacgagtgacaactcatgtactctaaaccattcccaaaaccatcagactaatgatcttaagacgtgctggaggggagcgaaggtcgaattcctattgccaccgccgcaccagggcgaattccgtcgccactgccgctcggtgatctccatcaccaacgccctactaccagtacactgacgtgactcatggcttcatcaagatccggtcagtaaaacacccaaattcacataaaaaattaggtaatcatgcatatcctaagtacatg

SEQ ID NO: 48090 - DNA, 196 bp, Oryza sativa
  unsure (1)..(196): unsure at all n locations
tgctgaattaccgatcgacgtgagtgtagttttatntttatacgnccaaaacggccgacgcgtatgtgaggagttgatcctgctatgatgcatgaggcatccctgggtttgctcgggaaaagctttgtcaagaacctcatacacctgcctttgtgtggagtaagtttgagtcttaggagtataagtgtcccctctg

SEQ ID NO: 48091 - DNA, 387 bp, Oryza sativa
agcttagggtgttcactgaactctgagaaatttttcagcaccgtatttctatatttttttaagacatggagccataagtgaacattttgattctttctgaaaatatctgcgaacacgtttgctgtgatgaatgagccaccgagcaatactgttagctcatttgctatagataccaattgaggatgctcctctgggttagtgcttccaaatgcgagtaccttgaagaggtaactatactcctcatgtgacaaactatttagatgaattggccgtactgttccaaaccttgatatcttctcaatcctacttacaattataatcttgcttcctctgcccatatttgtgcacgatgcataaaatttcttccaattgtcatcatccgtatct

SEQ ID NO: 48092 - DNA, 475 bp, Oryza sativa
  unsure (1)..(475): unsure at all n locations
tacggaccttagaaactcagcttacanagcgaggttgagtccgcgccgaagaggcgcgatgatgacatcctcacaaaggcgctcggaaccaaagaacatcctggccggactaggggaattggtagcgatgtgccctggaagcatggactcccgaagtacagctcccaatacatgaaacggaaagtctccaaggaagagagggacgctcgtttgaaggccgaacttaaggttgagatcattcaagaactagaagctagcatgaacgctagggtggaagaaagggttaacaaggtcctcgccgacatgaatataccccaaggcacaactcctgctgtgcatccaactcctcgtgcacaacacgacgcgagtccgtcacagcataggagtagttgtgcatccacaaaggtgccggcccctggtctctcggtcgcactcttagctgcagtggaccacatagaggtaattcatgttatcc

SEQ ID NO: 48093 - DNA, 390 bp, Oryza sativa
agcttgtacatgtgcgctctttttagtgtgggaatgctgcgtttaggccttgttcggtttggagggcattgaagatgattgaaggagattgaaggggaataattctacaccataatagttgtgaataaatctcctccattccctctctcattgggattaaacgaatgatgccttaattgggcacacacaccatcatacgcagcatagcaaacatatacacatatagatgttctcgatgtaaccacgcttacaaaggcctggtttagttcaccaaaaaatttccaaaaaacatcccattgaatctttatatacatgcatagagcattaaatatagatgtaaaaaaactaattgcatagttaggggggaaatcacgagatgaatattttgag

SEQ ID NO: 48094 - DNA, 472 bp, Oryza sativa
  unsure (1)..(472): unsure at all n locations
ggacactatgaaactaagcttataggcgttgnttaaagttgaacttacctcacttatcatagtccaagttataccaaactatatgaattttagcatgtgacacattaccccagatattatagttttaaagttttgcaaaaccacgtcgttaaccattttgatatactcctatataaaaatttaaaaggctatacttacataatgtaacatttatatgacggataaagaactcataaattatttgagatatgagtgaagaactcaaaagtgttgtagattaaaatcaaaatgatcaacattgaaccaattatggtttaatgaaactttgggaccgtaatacgtgggtttatgtgccatgtgacgaaattcatgtggttttagtaactttgaccataatacttgtgaagattacttttgtttgtaatttactcgctccgattcataattcttgacgtttnaacaggattgagat

SEQ ID NO: 48095 - DNA, 358 bp, Oryza sativa
tcaacttgatctgctgcttgatcctgatggttgtcctttctttcatattcctgacgctcgtttccttgaaaggatttatctgcaagttctctcaataaatgatggcgcgagaatcctgtgtggtacactccataaggttaaattgtggcgcaagaatctttgacctagcatggcatgcccaatggggtgggaaggaacccgaattcacttctattttcgtctggcgatctggtgccactatttgggttctttattacggagttaaatctataagattcattattcataattgtatttaataatactaatacccctccatttctattttttcgaacactggtgtgtgtatacttgactg

SEQ ID NO: 48096 - DNA, 381 bp, Oryza sativa
agcttatggctgataggctgcaacaagttatcattagactgattcttcaaaacccattttgattaaggatagaactattcaagactgtttgacttggaattttgaataccttcatcaatgtcatcattttaaaaggagaaaatcccctgtatacccttgaaattttagctaatcccttcaatgccttgaatttttcttacttccttgtatacccccaaaatttgattttgatcccttctatacccctcccgtcagttgaccgttagttaaccatctaatttttataaaaatgaccattttaccctttggatgaacatagaaatttatgaattacattattaaaaatataaaagcttctcgcatgaaaactattatagtatg

SEQ ID NO: 48097 - DNA, 437 bp, Oryza sativa
  unsure (1)..(437): unsure at all n locations
tcgcagaaccctcatcgactgcggcagtgcactcaatatcctcttcgccaagaccttggatgatatgcagattcctcgctccgagctaaaaccaagcaatgcgccttttcacggagtaattccaggattatccgcaactccactcggccagatcaccctcccggtcacttttggcactcgggaaaacttccgcacagagaatatcagctttgaagtcgccgatttcgagacagcataccatgccatactcggacgcccggcgttagccaagtttatggccgtcccgcactacacttacatgatgatgaagatgcctggtccccgaggagtcctatccctacggagcgacatcaagcaagccgtcacatgcgacaaggagagttgcgacatgtgccanacccgcgagatggcgtcagcccgagaggatattcgactgg

SEQ ID NO: 48098 - DNA, 269 bp, Oryza sativa
  unsure (1)..(269): unsure at all n locations
atcgttcttgatggggactttgtgaaaaaacacctctatatatgtaccgagatattatataatttcaccaggttaagatcataattaaaatactgaaaaaaaagctccatctgcttaacagcccatatgagtgctacccagctcgatgagttgcattcttcttaaatctgatcggtgacaaattaaccaatggatgcatatgatattattngccactttctttcaataattcaggaccaagaaagaatatgaatcaacttaatcagtaa

SEQ ID NO: 48099 - DNA, 363 bp, Oryza sativa
ggcaatgttttcttttgtggatgtgaacggaattggagcacattcgctttcgtacataccaaggttcgtaatagacttacccacaagaagctcaacaagctagtttatgtgaactacaaccttcgccttcgaattcggcgagcaaatgcccaagttatgacggaggacgacgatccccttcaaagattagcggacctctcattctacgaaactaacaatcagatcaagaaatggatggacactgctcggtcgaatgcttgtcctgaactagatgaagattcaaatgagagtgacgcccccttgcctagtccacttgtaaccgacctaatggacttggatgacctgcacaggaccacgggagct

SEQ ID NO: 48100 - DNA, 313 bp, Oryza sativa
ccgcagatgtcggcaccgatcatggggatgccgaagaggccgaagctaaacatattgttgatggagtagcggaggtcgtcccacgtcgcgaagttgtcgccggaccagtgcgcggtgtacctgccggagccgacgaacgtggagcggctgatcacgaacgggcggcggccggtgtcacggagcaacgcgtcttgcgtgtgccgcgcctcgaggaagccgaagaggttgtgcgcgtcgtactcggtcacgccgccgtattgcacggctgaggccggcaccgttttgtggtgatggggcggcgcacgccggagtt

SEQ ID NO: 48101 - DNA, 258 bp, Oryza sativa
ggcattctgatgcactctgcaaggcaagagtcagatgcatttcatattgctcgaagacgccgctgacattttgatcgcaagcaagttgcaaacagatatcgcgcaagacgttcgacaaaatgcattgtcgaaaatcctagctgccatagtaatccttatgcaggatggaaagagggagagagagctgcttacggataggcgacgagggtctgaagggatgtggcatcaacgctgaaggggcagatggcgaagtggagc

SEQ ID NO: 48102 - DNA, 455 bp, Oryza sativa
  unsure (1)..(455): unsure at all n locations
agctgcggtttggctgtgtgtcaacatttttttntcactgtccaaaactatgccactgtaacattggcccatggtattcaccttaatttgaatgggagccatatggaaagatcgggcctaaaaaattggaaggaaaatatccgagttacccctgaattgttgtggcagtacaatttaatcccgtagtttaaataccaacattttacatcctaaactttttataggggatgaacaaacacctcaagcactattctaggcgttttgacacagttttgactcaagctggaagacatggcaccgacgtgacatctaatcagcaaataagtttttaaaagaaacatagggcatacccatttctatctcattgcacctctctctctcccgagcttcccagtggcaaggaatacccaggcattcagcgacaacaatggtagagaggagtctncaacagcagc

SEQ ID NO: 48103 - DNA, 333 bp, Oryza sativa
  unsure (1)..(333): unsure at all n locations
tctaataattccttctaaacaacaatatattatttattgattntaaacaagaaaagcacttaacaattattattagatcattattgatcaaataattactgaactgttctttgtatcatttaggaattgagctctgaaaaatccgagaaaaattcagagagtatacttaatcatggagaatttaataaaaattaaattcatccatgccttagatttaggagaaattattntccacgtttaacttcacttgtaagataaagattatttaatataaattctattattaatttattaaataatttataaatcctgaaacaaaaatcatgatgtgac

SEQ ID NO: 48104 - DNA, 431 bp, Oryza sativa
  unsure (1)..(431): unsure at all n locations
gaatgcacttatgtgaataaccaaaatatataactagcaatgtgaactaaagcaggcgaggaattcagttatggaatattttcttcagtttatcaagagcatatctgttacacatgcccatgttttatgaataaaacatcaggaaatatttcacatatgcctgctgtatatcaaaggggatgcctcanaactgcattcctaattgcatgttttcccaaattccaaaataatatgtgtctacaaaaaaggttatatgcattggctggcaacagttaatgattccagtcaaaaacagttaatgaatgattttattttgaataaaaattatctaatggtcatgaacaaactacctggtccatgacataagccattgctaaagttcgagaaatcataagtgcactattttttcattcagtaactaactgagcata

SEQ ID NO: 48105 - DNA, 462 bp, Oryza sativa
  unsure (1)..(462): unsure at all n locations
taggtatgcagctggtgaagggaattcagaatcattttgtggttaaatctcacgttctagcagngggaagatggatgcaactcatggattgcagattattggtatgagtgctactatgcccaatgttgcagctgtagctgattggcttcaagtaagagaacttctgtaattcttgttcatactattatctgtttttttaagaaatgctgttatctaccataaacatgcttgcagtgtaatatcttacggtcattcaccatcattttgacaagaataatgtattatttaaccaaactgtctaatgaaatacagtagtaagtagtaacaagttatgtatgctgatttgctgaacttcaaagattcacatgtatattttttgtgagttgattttccttttaatgataacaccaccatactnttgattattatgctgaaatgaaataatgtactgcgctgaatgta

SEQ ID NO: 48106 - DNA, 319 bp, Oryza sativa
tcctgtggcatgggcttggcacatcaaagctttttaccatattaaagaggaatttgctctgcgtgtgcatgtgttcagagcctaaaacaaaagaagaagaaataccacttagacatcatagctaggacttttagcataaccagtgttgtacattctacattctccttgcaattatctttccctcaaaaattatcttatgcctgatgtacataactttctctttataatggaaaactacagctggaggctctccatgctgcgtttgggtaacaagaaaagaagaataagcttccgacacattacttaattgttccttaaa

SEQ ID NO: 48107 - DNA, 252 bp, Oryza sativa
gttgaagaacacaatatcttaaagtttccctttcagacaaaggttattatttgtagcatggacttgctcacttcctccaatgacaacagaggggataaggtgtcattctggtgccatctctaatcagacattttaatttataatccatctcttctaacatatgtagatcggatataaaatgtatagatatgtcttggccatgatagctgatttaacacaccgtggaatgatatttacggtctaaggtatata

SEQ ID NO: 48108 - DNA, 450 bp, Oryza sativa
gcttcactgaaatgtgaattccactcattatcatgtagacaaatacagagtattctaaagcttatttaatattttcacattttttttccttttgttctggaattatgggacaattctgaaaatgtaccatcagatggctcggatgacagtaagtttgcaacgtgtgcagctgaagcatcaagcccttcaatatcatcacggccatccacggaagtgtcctccacatcaaaccctgtttcaatttcagtaaaaaggagaacggcaatatcagaatctgtagccaggttgcagcaaaagaaatggcctataaaattaggaaagcaaagctgcatgcttctttttttcttttttttttcttttttattctttttggccaagtcataaatggttcagaaacccacatgctgtgcaagggaatccaccgaaagcagcaacagggcgtgttggtgc

SEQ ID NO: 48109 - DNA, 438 bp, Oryza sativa
cttctaattatttatttacctttcttgttgttctgatgtgaaaaagaaacatcctaatgcaatactggcatctttgacatgtgtatagattctgtgagcatgattctgccaatttcttttgtcaaccagtcttggtatcaaaatcagcagtttaatacgatgaattatactactacaggtgtcaatcttgatgattattatcaaccattgacaagtctacagtgtagacaacccgagagcttccatttttgaccacacaggtttcaaggcaagccagtgactgaacttctgaagcaatcatgtgtaaagcatcaggcatcacagatgcgtttcatactggtaatccgtactttcttttgatgctcgtagtgataatatactatccaaagcatacgtcatctgcttacatatcacaataatcctgatgcgtacaaaata

SEQ ID NO: 48110 - DNA, 464 bp, Oryza sativa
tgcctagaagaacaattctagcgagctagatgatattaatcactaaaaaatctagatatcagccaaatatgttgtaagatacgcttcttactttcggaagtaaaataaaataggactatactgaccagtggaaggttcatcgcgtttttgacaaaatcacattaaatgtgtgccagaaaattcagtcatatttacaacgactaaatcaattttactttgcaattataattggccaaatcaactatatcaactcataccaaaatacatgattaaattaagaaatgcgaaacttggaatgcacatctgataaattacatgattaaattaagagctgcaattgaatagtttgaggtagctggttatgataatccgctgccactttataatagtatccttcatattaacatagccaaattcagatagctcaatctgaaatatctagagcacattggagaatacatgac

SEQ ID NO: 48111 - DNA, 426 bp, Oryza sativa
atgcaagcttcgggcaatttggcgaattaaaaactattcggataaataacagaattaaaacatatacaggttaaactaagtatattaggcataacaagcgtttcgttcttgtagagtagataattggattttgattgagttatttttctaagggaaaaaggaaaaggaggattcaaaatccttttttcttcggactttcccaaacacaaaatacctccttgtattcgcactctcaaatgagagtggaagaaattcgactttcatataatatcttaatagaattccatgtaatgatcaatgcattttttggattctatattattcgcatgtctagaatcctaccaagagaataccccccatttttatgtaattgaagtaggattgacgaataagaaataaacataatactggttattagtgtcgcat

SEQ ID NO: 48112 - DNA, 123 bp, Oryza sativa
actacaatagtgtattcccatggccccctcttcatggaaaagaggtactacttgagctaccgaggatgctctttgaccgatagctacataaacacatattacatcttgccccttttgattgag

SEQ ID NO: 48113 - DNA, 449 bp, Oryza sativa
cttgtgctatatgcactagatttttagcttacatcttcaacggttggagggaaaacatatactttctccaggtattcaactgcaacatactccccttgtgacaacttgaatatatttttctttcggtcaattaccttcaggattccatctgagttcatctctccaatgtcacctgagaaaaagaatgtgccaggatgttaaacctatctcaatcctctatttttgacaaaaaaaaaagactctcacctgtgtgaaaccatccatcagccatgacctcattcgtgagctcaggatttttatagtatccggtgaagaagtttcctcggacgcatatttcaccacgggaaggagtaccaagtggattgtaacccatctcaggcacttcttccaatcgcaattccgtataggtagcaaccacgccaacagttccaaccagggacatgtcatca

SEQ ID NO: 48114 - DNA, 448 bp, Oryza sativa
aactcagctaattatataatccgcaaatctccatataacagcattaatacttctgatgatcatatcttggtcatacgagctttgaatcggcccgctcaagtctcttaatgtttgttataacctatagaactgtgtgctttctttttatgtgttggtattgcttctttataggcttgtagctatgcttgtgtgcttcgcgtaactttcgtcgttccagaggttcccgaagcgtggttcgtggtcgtcaccgaagggtctgaaggccgttctctctgagcaaggcaattcacatcattcttgagcatattgaatcccagtttatataattattttaattaaattaatgcattaccgctttatataattcccgcgttattactgcttatttagcctgcctattacctatgttagacatattattagtattgttatattaccttgtcaccct

SEQ ID NO: 48115 - DNA, 324 bp, Oryza sativa
ttcccattatcagaatcagtctctttttcttctctcttgtcagatacagccactggttcttccctctttccagatacagaagctatttctggcctctcagattcactctctgtttcttccctggtttcagagtcaagaactggttcttccctcttttcagatgcggtctctttactcttcaaacctgaactaccttcttgtgccatgtccttgttcaccatcacatatggctctgaagcaagagcagaattatcaggactccagaacaatggcatcttgatggcatcttctctcattctttgcggataatcatttatgttaaaa

SEQ ID NO: 48116 - DNA, 419 bp, Oryza sativa
  unsure (1)..(419): unsure at all n locations
gttgaacagttggatttatgttacaaattntgtactttcgaataacaggtttaaaaagaaatgaaagaaagttataaaatcaacatgctaaatttattttattgcagcaagattaaataaaacaatattgtaaaacttttgctggtaaaataagccattagtacagtaatagatgtacagtactaataacactgaaataaattttgaatgagaaccattaaaagggattatgaagtgcatgtgccattagtttggtttaattaaaagagaaagagaggagaacagttctacttttccaatatttttttagagggcttctatgggtaaccatttggcataacctacggtcaaggaggctctgataccaacttgtcatgcccggaanttctatccaaaattccaaacgcttacatgtgtgt

SEQ ID NO: 48117 - DNA, 139 bp, Oryza sativa
atgcgggcatccgatcatctcttctctcgtcgcgataaccgaacacctggagaaagataaatagcatgtcaaccgaattaatcgtctgtgccaactttatgcaagtctacaccgacccaacggaccgtaacggatgcct

SEQ ID NO: 48118 - DNA, 442 bp, Oryza sativa
  unsure (1)..(442): unsure at all n locations
agcttgagagcagaaaggggactncactctctccctccaagagctctttatctgttggagctttttcctaaccctgcatattggatagattggtggattacttctctacccaagaagctgacagcttaattaagataaattctcccgacaaagcttctgcgccaaatggttataaaggggtttttcttaataaatgttgggccatcatttcttaggatttgtatagggtgcagcacactctcatgcgtgccatactgaactgcaaccgctcaatagctcatttataagctcagtacccaacaagccctctccagaaactggtaatgatttcaagcctatctctntgatgggtatcacgctgaaagtgctaaaccaattaatggcagatcatctgcagggtgtaatgctcaacgttggtctaaaaaatcaatatggatttatc

SEQ ID NO: 48119 - DNA, 338 bp, Oryza sativa
tttgcacaatttatttcatttgtcatgtaattcattcaaaccatttataatttaaatatctttacttttgtgctactggttgtacctttaaacatgtcattgccactatgttgctatgctattatttatactttaaattttgccagcccaatttttttgagttctgtaagattttttttcaactttgaataccctttgctgaaatcctggctccgccactgaagcacgcggtcggcggagcagagcggcagcagcgggcaagcagcggccgcgagccagccgccgggccttcttctctcctcaatcgcctgccgacctcctctcgatcccagatcgac

SEQ ID NO: 48120 - DNA, 323 bp, Oryza sativa
gcctcaaatacacacaatatgctgcatttaatatagacacatgtcatatacaaatatgctctagtacggtgcaagggtaatcggcgggtatttgcttaacccccgcccgagtaaacttgtattcttgctctctgttgtagctatgaagaaacaactttctggcatattcaagagacaatcaagctcaccgacaaaccgacatgtgaagccgagtacaccttcttccacggatgcatccatggaggaagcgcacattccaccaaagctgttcgaatacatcgatctctaccttctgggcgactgtgaaatgcaagtctatcata

SEQ ID NO: 48121 - DNA, 487 bp, Oryza sativa
  unsure (1)..(487): unsure at all n locations
ttaagtcacctgcggcntgnnncgtgccaagagactcactacttctatgatttacttaagaaatgggggtgaggaacataaatatcaaagctgtgaaacttcttttagtactctagtctgctaacaatataacaaacataattggaaatcgccttcagggcatacctttacttgcttgacataaggaaccggaacaatgaattgacccacatcctggtctccaattgaccttgatagacacaaaccaccaggccagcatctaagagggccaatctgggggtagaaaagaaagcacaaataaaaaaaaatgaagcaagcagaanaaggaaaggaacacatttaagcagtaaactaacaaagaacaacagtacgcctccttcctacgcttccacctgcatcagtcactatacccatcctctttctcttgaccaacatggcatatcctcccctgctacacttgttgatgcaggctagcatatgcaactat

SEQ ID NO: 48122 - DNA, 460 bp, Oryza sativa
  unsure (1)..(460): unsure at all n locations
tggacanggttacatcggccgatccattagaggaagttttctttgtgatggaactaaactaaggccgacttttgtaaacaaaaacatgaaagccgactataaggctaatgtaatcgagctacttaaagagcatgtcgattgctttgcatgggagtaccatgagatgccgggtcttatccgtgagcttgttgagtatcggcttccaattaaaccggattntatgccttataagcaaccacctcgccgttttaaatctttattatatgaccgagctacaaaggagattgattggctattgaacgcggngtttattacgccatgtctgtatgcagagtgggtttctagcatagncccggtggagaagaaggcgagtggtaagattacagtttgcatagaatttacagatttaaataaagctacttctatagatgagtatctgtcacgcccggaatttctatcc

SEQ ID NO: 48123 - DNA, 205 bp, Oryza sativa
acccctggcgtgcagctctccggaccatgcgtgcaggacgaccaggcgacgacagctgcaaatatgcaatgttggggctttctgcgcattccattcgcttaatgacctctcacgactgataacacaaaaatgctcctcgcgaactctgatatccgggccgaacagtacagatacttcatacaagctgcttgttaaagcggcgaac

SEQ ID NO: 48124 - DNA, 342 bp, Oryza sativa
cttcgagcgctatcggtgacgtcggggaacagaacccgcgccgtcgagctcgtactccaccgcccccctcttgccgaagtcttgggtgggaggaggcgctcgacggggtcgaaagatccgcgacttcgccacccaccggcgatggaaaatgacggcgagacagagagcgtcacctcctcgtctactgcgatggcagcacgctccagggcgcgctccaggctgcgggcgcgctcctgcgtcacccgcccgtctgtcccgatccagagactctagcccgacgttggctggatgacgtggccgacttggtcatgacagcgcagcatcgtctatgcgccggcgggc

SEQ ID NO: 48125 - DNA, 447 bp, Oryza sativa
  unsure (1)..(447): unsure at all n locations
tcattatactaaatggaatattatctcacatgtctcaaaatcatgacatctggacaatacaggaaatttttattttgcaaactacacccgtttatgcactcaagtagttcactgcaaaagcttaaaccgtaaagaaaaggaagaaccctacacattacaaatatttcaacgcagtccaaccagacaactcctactttcaagttgcatgcttgcatgtacacggcacatcacagacaatgccaagcaagttgtgatatccacgaacatacgagacattntaacacacataagagaaattttagattttatcagcaccactagcttaaagtagacagatccgtgccgggaaaagacaaaccggcccattaatggagacagtttaactcacaagctggcctattaatggagacagtttaactccccactcattatgtcagtagaagaaac

SEQ ID NO: 48126 - DNA, 489 bp, Oryza sativa
  unsure (1)..(489): unsure at all n locations
ctaagcttaagatactttgttcacgtcgnttcatattacatatatgcatcacgattgcaaatggacatgttcgaaggaatacggttctatactccttaggagtagataattttaccattctttaaaaattaccatgaggtactacgtacactttatactataaaattggtacctccaaatactaattatcttgagatataaaaaatttagaataaaatttagaaaccttgaggtacttttttaaagactataaaatttctcctaggagtaggtacacccgtacacctgatctcatccaacatccatcaaacccaagcccgatcaaacggtgtntatatttacccgtttagattttgtacaggataaacctgaccgcatgtaccggtcgagtgcatgcatgcagacaattgaaaataaaggaatgtcattatcttcctgtcctttcagtccaaactatttattagtatcaactaacggatatccaataag

SEQ ID NO: 48127 - DNA, 389 bp, Oryza sativa
gctctttgatcttcagtttgggcagaggttggctgttgtgggagaggatctgcacgacctctgcccgccggcgccgacttctcctgctgcgccgcggacagtggtgatggctggctggatcctcttcttttcgtcatccccctcgtccccatccctgcgccaccgccggttccgtgggctctgggtgcagtgacagacgacaccgcggaaaatgagaagaggcaacggcgacacgcgtcgcggaggaccaagcgggccactccctcctctcccaaatcgccaagaaggagaggagttggcggcggtggggccgaggttgtgcatctacatatctgccagccgccgcgcgccgatggctcctcgttgagcctggagtgaggagaggggag

SEQ ID NO: 48128 - DNA, 436 bp, Oryza sativa
  unsure (1)..(436): unsure at all n locations
gcttctacttcaagcctcgcatgcgttctttatgataagaaggcctccttgctagctagcccgagggggcaccaagaccctctgtcataatccctctctaagagatctagtgccatcgcgaaatctctctcttcaaaacccaaatcaaagtgttgatcattcaaaacggcgacgagccaaccccatacccatcctccttactccataactctcccctattgtttccgccactagaactatgacgcattcacgatgggtgatggagctctaggcaatatgactgggttgcgggcgaagcgtggcttgaggcaacgtgagcggatgcggagcaccacacgacgtctatctctctntcttcgtccacagcatcctcgatgagctctccacaaacgatacagagctaggtgagcttcgccttgactcgagctaggctttg

SEQ ID NO: 48129 - DNA, 462 bp, Oryza sativa
  unsure (1)..(462): unsure at all n locations
ccgagcttcaattgagtagcagaatggtttattatcttgttctaacagtctctcttctcttatgcaagctatggcacgacaacaagggatgcctgtaaggtcccatcttctacaatcacaatgtttgctgactacatcgacaataaaggtggactgtctttcttggacttggaatattccctttctagcaagcaagacataacaaatgtttgcctggtcaggaaacttcaatagcttcttcttgattntaggacataatggcccttcccatttctctgcttctttctgcttggtgaaaacctagtcatcaactaacttgcccttgatcttctccatcatgctcangattggaagctctctagcctttangatgtatttgttgaagacttcacnaacagttgtaagcagtatgtcacacttatgaaattcactaagaaatgctctaacccaagtatttggtga

SEQ ID NO: 48130 - DNA, 462 bp, Oryza sativa
tgcatctgtagtagccttttctgcatgtcttctgcctggaaacaatcttcgaagctttacagtggtggaatggaagggcctcttcagatggcctacttatgggttcctatattctgttgacaggtcttgcttgcataccaatagtcgctctccacttccctcatgctcaggtatttgacgcttacccctctgttgtaaaaatatcgatcttctcataatcatatttgttattatctgttcgtgatctgctctgtacttttgcactaaaattcttcaagtttgccttctcaacaaattccctagtgagggtttgcttcccagtggttatagatggaccactgacctacaacactctgaggttgaggttctgtggaattttaaatgatgacatcaattgtcagctccagcttatttaccttcttgagggtatcatgttgggtgacattgctttgggacactact

SEQ ID NO: 48131 - DNA, 373 bp, Oryza sativa
  unsure (1)..(373): unsure at all n locations
tccagctgatttagcgtgacaaaagatattataaatatatcttgagtatacatctacatcagaaaagaaaatgaatccgaccgcattttctgcgtagaatctaacatcgttcttgatggggactttgtgaaaaaacacatctatagatgtaccgagatatatataatttcaccagtttaagatcataattaaaatactgaaaaaaaagctccatctgcttagcagcccatatgagtgttacccagctcgatgagttgcattcttcttagatctgatcggtgacaaattaaccaatggatgcatatgatnattattgccacttccttcanataattaggacaaagaaggaatatgaatcaactaaatcagtaac

SEQ ID NO: 48132 - DNA, 295 bp, Oryza sativa
tgaaccacctttcgctcaagtccctcatgctgatacacttagctgcacactgtgaagtacgctccccacatggctatagtatactggaatgaactgaaagatgcatacccttttggtgatactagtaaaatcttaattcttatatcccatgtgagagggcttacgggaccaacatcaccatggtgccattgctctacatctccattattgacatactcgtacacaagcatcctgataaggtattcgaccgaatatattatacattgctagctactcaatcatagaatccatctga

SEQ ID NO: 48133 - DNA, 401 bp, Oryza sativa
  unsure (1)..(401): unsure at all n locations
agaaactccaaaatatttttatatcaccaagctgatttagcgtgacaaaagatattaaaaatatatcttgagtatacatctacatcagaaaagaaaatgaatccgaccgcattttctgcgtagaatctaacatcgttcttgatggggactttgtgaaaaaacacatctatagatgtaccgagatatatataatttcaccagtttaagatcataattaanatactgaaaaaaaagctccatctgcttagcagcccatatgagtgttacccagctcgatgagttgcattcttcttagatctgatcggtgacaaattaaccaatggatgcatatgatattatttgccacttccttcaaataattcaggacaaagaaggaatatgaatcaactanatcagtaact

SEQ ID NO: 48134 - DNA, 314 bp, Oryza sativa
tacgcataaatgcaacctcagaaggaacaaggaacacatagaggagctaagcacaccacctcctggcactactgaactcaacttccctacacagtactctagagcgatcattacacagtgcctagcttgcttgaggaaacagaattggccatatcggaagaagccatcctacactgcagtgagaaaactcatcactatcgtcatcgccctaatgcatggaacaatgtactggaaccttggaaccagaacgtaccgctctaacataagaacttaataatccaaccagattgacaaacaactgctaaacctaaact

SEQ ID NO: 48135 - DNA, 385 bp, Oryza sativa
ttgccctcatgcttactcggaaatataagggagagaggactacttactgcatactttaattctgaggcactcaagagtagaagacgcttcataaagaaatcctgagagcacctaagcgttgtaatagcttacagaatctaaaggacatgtgccaatatatcatttcatatttaagaaacagaagatgtatgtctagaagagagaggcataagcatctattccatgaaacttgatatattagaatcactgtatccaatttcacttgttagttgactagctaacgataatgactcaatccgatacatcaaagtcggaaacatatagaatgagctcaaaaattccacacgtatatttccgggcaccagaaactcaagacgcatgtgga

SEQ ID NO: 48136 - DNA, 456 bp, Oryza sativa
  unsure (1)..(456): unsure at all n locations
taataaattcgtctcgtagtttacaggcgaaatctgttatttatttttttattacacaacgtttaatacttcaaattatgtgtccctatatctgatgtgacacaccagaacttttcacccctgatctaaacattgaccttaggctgtgttctctttgagtaatttctcaacgtaatgagcattcacctttttcttttgaaatatgtaaaactattacttattatggtgtatactccatatattttactagtactagtattttctttactccgtcagccttacgttcatttatttactagtttagttgttgggtgtacgattttgctactggaactggtgtattctgccttttacttaactntattagtagcaatatttttattcgacagggcatagagccgctttcagtgactttgccatgacaaagtactggtacatggtagtaccatatttttg

SEQ ID NO: 48137 - DNA, 332 bp, Oryza sativa
  unsure (1)..(332): unsure at all n locations
tcaagcnttgtgggtgtggtggcggatacgtcgngaatacacttgctttcttttactctgatgtgcggataggaggggtgtgcaccatactaggagaaaaactgtgtgtggtgtgtggagagtctttgtgggatggctgttaatgagataggtagctgtgtggagggctttcacccaaaaaggcggtgggaggctagtctgaaacaagagggagcgaactatgttattgagggaacatagcatgcgctcaaccataccgttttggggggaggtgtgggggcagaactaactgagagagacaacgttggtgagaaaaaatactttgtgcgcta

SEQ ID NO: 48138 - DNA, 408 bp, Oryza sativa
  unsure (1)..(408): unsure at all n locations
ctttgcctctacgctgattgatatcatctctgagtcatcatcctctgagtcatactctgaatcatcatcttcaccatctaaatatcgtgtggccccaatgtcagtacccactattcagcagcatatctaaatgtcttgcaaaagggaataaaatatcaaatcataacctgagtttccaggagataatgggatgagaacagtgccatcatcagcgccactgtcatcatcatcagtatccagaaaagcatcatcatctgagccttgcagagagtcactaccagtatcactgtcatctatctccctcccatacacatcactgactaataccntaatgagaaaaaaacaaaatgcagcacaacaattccaaacagcgactaacaccctacggacgatcaactagaatcaata

SEQ ID NO: 48139 - DNA, 354 bp, Oryza sativa
tcttaatggtgatggcctatagctaaacctattgcgcaacatgttcttatagggtgaacccctatcacacatgttacacaaaccaagaacatcccaattttgggcgggcctaatgaaaagaaaagatcaattttttcaatatggaactcttaaacctggtcatgggatggaaataagatattgggaagacacatggttgggcttgcaacctctcaaataacaaaatccttctctgtacaatgtgggcccaacaaaacattctactttggcagatggtatgagcacaacaaccgtgaatgtttattccgcgatcaaatgaggaccaaagttatttgaatgaacgatctgatctct

SEQ ID NO: 48140 - DNA, 439 bp, Oryza sativa
  unsure (1)..(439): unsure at all n locations
gctcccgttgataagggagaacccgcgctttctcatataaaaagaactaanaatatattttcttctctctgttttttaattntatttttctatgtaactgacacgtgggttccactaatatatagatgccaccatggcatgccacgacatgttaaaaaactaaatatgtgttttgagagcttaaggaaatagatgacatatctacacaagcctatagaccacccgtgcacttccctctgaaatttatatgtagtacgcttagtgtgtaattatattgtaatttctataagataaaactatagtactaactttcaaaacccagtaataacgcattatttccgtcaagtgaaggtcgtggggccaaacccattcatcccgatggcgtgcgctgtaattttttcatttccctgctgcattaatcttgaagcacatataacga

SEQ ID NO: 48141 - DNA, 467 bp, Oryza sativa
  unsure (1)..(467): unsure at all n locations
ctggagcacaacatagtattgcaactccataccatccctaaacaagtgggtcaagtaaaacatccaacaaacagatcaagaacactctgcagaacaccatacatgagatggggaaggcatcgaagaacaagctacctgatgcactctaggaatttagaatggcatacaagacggccataggcatgttaccctacccgcacgtatatggaaaaacatgccatgtacatgtcgagctggagcatatggcgcactangccaaccggacatggaatatggacatataggacaagccgaatgacacatgcaattgcaattggaggaattggaggaatggagggacaaagccaatcacaatgacataatgtataaggaaataacaaagcgatggcatgatagacgaatcaaggtgaagtagttcgaggtaggagacaaggtactgctcttcaactctcatgtgaagctcttca

SEQ ID NO: 48142 - DNA, 270 bp, Oryza sativa
ttattgagctcggcggcggaggtcgtggccgactgggtggcaactgtcggcgacgtgggggaagagagagggggggccgccgatttgaaaacctaatccgcgccgattcactggtgcagcgctgtgcttgctgattggattaattgtgctggtatatctgtggctctccccatatatgcaattaagcccgccggccgttttgcatttttgatgatgcatcactggtcgttgtttgccatgtggcttgatgaaagggaaatggtattcttg

SEQ ID NO: 48143 - DNA, 385 bp, Oryza sativa
tgagatgacgagggtgccgatccgccagataatgctttttttttgggttggattccccctataggcgaagtcgttgagtagctcgttattggagaatccatcttttgaacccatctcgtcgaaatcttgaagcaccaaaatttccctacctggcacgccattgtcgacgtttgatatcgcgactacagtgtttggatggtatggggatccgtggtaccagagtatatgcgagattgaggtaaaagagatggaaacagtgatttttatacaggttcggaccccttatctaataggtaatagccctacatcctgttgaccgaagccggtgttgctctttattcatctggatcacacaaatacaatatttgggataacatatctggtc

SEQ ID NO: 48144 - DNA, 458 bp, Oryza sativa
  unsure (1)..(458): unsure at all n locations
agcttgaacctttgctcgtcccgagttaatatacaaaggaaacaaagacttggttggtgatcagaagatgctactatgctgcatatctcacagatataagtgcaaggtatatgtactctctctccgattaaataatctttggcacgggggcttacccttacccctgatcccacgagacactgcttcttcttgccttgggcgggtgaaagacagaaccagtattagagcaccaatcacccaatatttattcaactcttattccagaagttttcaaatgatttttgccaaagaaacccaagttcctcaaatgattcactcggtctctccaagtctatcaaattaattcctcacctgttgtgcctttttgattcctactctaagattgatatgtggagctctgtagggatcanacatggcatacttgcattcacattttttactaagttaaaacttagact

SEQ ID NO: 48145 - DNA, 413 bp, Oryza sativa
ccttgagccgatacccattgtgctccttccagctgcatctactcatgtgggagaagcctattcatcctgccgagagaagcattcatcgcccaaaaatgcctttatttttttgaaagaagaaatgccttattcattgatactcgatccagaacctcatcaaattatacctagagtagatgctgaagagggcagagtggcgcacctgaaacacaggatgtcatcatcacttgttacaacttctccagaaatgaaagaaacataaaacaagatgctgcagaagtagatgtatttcaaaatttcagtttgcgtctgttgtttgtttttaagagtctaattaagttagatgcttcgctgatctataagcattgtggccctagtttagactctttcgccgtgatgcatgcccgttgggg

SEQ ID NO: 48146 - DNA, 371 bp, Oryza sativa
tattctggacagaacagacctcaagctcctggatgtgcctcagttctagaagtcccttgcaaccatcagatactgtgagctcctggcataaagaaagcgaaatgctcctgacgcttcgtgccacgccattaaaactgcctcttctactgtacaacaaccagttgttcatcgacaagcttagcttctggagatgcttcagctccatgcacagtgcttcaaactttgggcagtgaatgagtggtagttcacaaagacgaggaaacatgtcctttctctcactgtgatgcacgatttcacggttgtgcatgtgggataatatgagcttttcagccgagggacgtgccattataccatataagcatcatcatgat

SEQ ID NO: 48147 - DNA, 432 bp, Oryza sativa
  unsure (1)..(432): unsure at all n locations
tgatacattattgtctttgtactccnggactctgctggtgccttttcttttgctcaaagtactgcctctgcctacagagcattgttcaagagtagcacaaattgttctatcaacattaggatgttaactatcagaacaacataacttgatggcgccatcgaaactaaattacctgctctgcgttgatttcctggactgctcccaattcaggaacaaacatgcctaacacagacgcccaaacatgaccgaatgttagtttgtcacgacaaatagtgctaaatgcagcgattgctctgatgatttacacgccaaccgtttcactgtttcagtaaataatgatggaaaccacgcccaaactatttgcgaggaagcacaacatagagagatggagggagggagatctcgggactcacgcatacacctttcttcgcg

SEQ ID NO: 48148 - DNA, 398 bp, Oryza sativa
  unsure (1)..(398): unsure at all n locations
ntgcntcgagcttgcaatacctggcgtcacatattatattactaatattaagaaatgacctaatatcaaataattagaagagaagaggtttgaacccaggtcgtctagctccataaactatctcgaaaaattgtggttaacatcatacatcatacaccccgctaccaaaactgttcgtggctaaggaacttcaacatgtattaacctgcgcatcatgaattcatgatcttatccatgctctttttattttcactattcacaaaattggtaacaacaaatctgtcatcccagatctcacaacaattccctcgcctttaaacttcagcaaccaacgtatagtcgaaacacaaacattacaacatatttttagactgaccactggatgatcatccatccct

SEQ ID NO: 48149 - DNA, 420 bp, Oryza sativa
  unsure (1)..(420): unsure at all n locations
acacataaatactcaagcttctgctctgtatctagtggtgttgaagcagacctcatatttatttagtgcatgggnttcatgaacatatacatacatgaaggagcagatttctctccagtgaccagagacaagcagatcagattagcttgcagatttagcaagcaccaacccacacacatttacactaacattaacttaataacagaagatggcaaccgaatcacctcgagcttatcgcctttctctacgatatcgatcttgagcatccagtctgcctcctgcttctttatgttgcacacattcttcgcgatctcgatgatctcgatcttcggcacctacgcacactcccacgctaacccattcacacaaaccaccacaatcaccggcaaattcaccgaacgccgaacgaaaattcagtac

SEQ ID NO: 48150 - DNA, 227 bp, Oryza sativa
  unsure (1)..(227): unsure at all n locations
aagcctatgaccttatccaanaatgcagatgagggaagtgcttttctatgaagtagtaaagaactggattactaaaacgcttgatagatgcaaaagtctattggctatatacctaanattcgctgttcccaatatcacacaagtttttccctttttttctgacaaatgcagatttagccacatgacataagcatctagtatatcttaatcatgatgcataaaaaaac

SEQ ID NO: 48151 - DNA, 397 bp, Oryza sativa
  unsure (1)..(397): unsure at all n locations
tgtacccgatacttgtcagtgggctcggtgatcctttgtattttgttgttagtgaatgcaaacaattatgcacttttagagttcctacttttaatcatntttttcttgatagaagacacatatatactacacacgcatcgtaattgtgccctatttaacacacgaccagtagatatcagaggctgcgacaagcctaaggcagctaagacttgagccctagttntttttttaatttctattagattctataaaaaaaagtgagaatttttaagatacaagatgtgtaaacaagttgaaccggagtctcaagaagcataaaattcctatgctgatttagtactgctactgttgtattgcacatttatatgcttaaaagatgatatgaaattgacacatg

SEQ ID NO: 48152 - DNA, 439 bp, Oryza sativa
  unsure (1)..(439): unsure at all n locations
gcttaattggaagcctccatccattgccattgatgcggtcctgctggaaggcaggagatgccaacaaggagtgagccaaagctcagttcaggcaacaatccaaagggagcaggaagcacacgctcagccgacagcggacaaggacgtagctgtctctggcagggcagccctaaaggcggcagatccagcagcagcttggtcgacttcaaatcaaaacattgcatgaataacaacgtgccttggatagtgcaaacaacttgacaagactgttggacttttaagacgtccacgccgctccaactagttaaccttagttgccaaatacctaattgtctaagcttgagttcatctcactntcttataagaaaatgactcttaagaaagatatctgacaattggaattgtagttgtacaaatcaaacatctcatcccacgttaa

SEQ ID NO: 48153 - DNA, 410 bp, Oryza sativa
tattcactctctcaacacactcaagcaggctcaagatatctattgtacactttagtttagtattctagtgctaagtgaagtagaatagagtagctctcggagtcctcggagtcttcggaggaatttcagtatgactttagtagttctccttctttcttttgtaagactttcagaattaataaaatgctattctttatatactctgatactttagtatgtctaagtattgtctttactttatacctgtatcgatacaggtgtatagctagcctaccagagaggtgcagtggtggtgggtttagtgtccgattattcgattgctctatgtcatctcaggggatggagagtagtatttaataatgtagacgtggtgtctagattattaagtatcaattattgggtatatatgc

SEQ ID NO: 48154 - DNA, 218 bp, Oryza sativa
  unsure (1)..(218): unsure at all n locations
aaccatcaaaaacctaaacaaggaccaaaagaaaaatcctatttaggctaattaatagtgccattaaatagatctcaactttaaaaaattactgggaatggaacggagtccatcggagttacggaatcggagatatgaanttttggaagttaagtggaaattctgggcgaaggaagatatttgtggaacaacggggaaattgatttattaaatccctt

SEQ ID NO: 48155 - DNA, 441 bp, Oryza sativa
  unsure (1)..(441): unsure at all n locations
tactaagcttgatgagtggagcgattgaaagcggacctataaggtttgtttatgtggatcttggcacgcttaattatatcacatggaatagcaaagatcaaacagatttgcgaaattgaataatagtccaaagtactaggcgaaattgctggcctagcctagattcaatcctagctcaagcaagcagatgatcaaacactcggactacaaacaactcgattttatcacaccgctctcttcaagaaaaccaattgtcgaaactagatgtcggcaataattaaagggggtggctatggagcaggataagtgtatgggtgtggagacaaaggattnatacaggttcaggccttcttattcaagaagttataccctactcctgtccggtgatgaatccggcgagtgtactatagattgtatgaattatagacaatcaacatctgt

SEQ ID NO: 48156 - DNA, 366 bp, Oryza sativa
taagtatattatgcctaacaagcgtttcgttcttgtagagtagataattggatcttgattgagttatttctctaagggaaaaaggaaaaggaggattcaaaatcctcttttcttcggactttcccaaacacaaaatacctccttgtattcgcactctcaaatgagagtggaagaaattcgaacttcatataatatcttaatagaattccatgtaatgatcaatgcattctttggattctatattattcgcatgtctagaatcctaccaagagaataccccccatttttatgtacttgaagtacgattgacgaataatagataaacataatcctgtttattagtgtcgcttaaaactcgaaatgggg

SEQ ID NO: 48157 - DNA, 418 bp, Oryza sativa
tgttcttttcgtccattatgtgaaactccatttatgatatttctatctgattgttggtgctctgtgcttaccaaatattcttccaccatgaagcacacagacgtagcaataattggctgccacctgcatggactgttttgcttctcgcaattttaggttacaacgaatttatattccttctaaggtaatcatctcaatgaagtagctttcttatccttataaacgcataaactgagaaatccgaacttgacggttaacatatgtaaccactaaccagcatcttctctctgtttatgaactcttggacaggaaccctttatatatgctggggctcttcgtcgccttcgtagtatcctatgctgcatggttgcaatatgacatcacagtctatattcgccatggcacggtaatattctac

SEQ ID NO: 48158 - DNA, 326 bp, Oryza sativa
tattcatgtggaaaggcttttgaggagcttattttttatatatgctctactctggtctggcgatttaaaatgttccctttttataaatcaaaaggcttgcttaatttgctaagcaggtacttacatctacagatatttggcaactaaattatagattaattaaattctctacgtctatttactaagacaatttaaaaccctcgtgcattattaaaatgtcgatattattaacttagaatgaatatcatttgaagtccttactaattcatcatgaaaaacttcattgacatgtttaacttgtcataaaacattaaacaaaactctat

SEQ ID NO: 48159 - DNA, 410 bp, Oryza sativa
  unsure (1)..(410): unsure at all n locations
ttcaagttgcgtatgtagagacgcgtttgtcttcaatgcatcggtacaggcaccgaanaatctcatgagttgcttcccattgtggcggagatcataagtagagtaatgttccggcttcttctctggcagaataatgaactccacgctgtcgaggaggttgttggtggccatggctcgggcgacagctntgccaatggtgagacaatcatagtatttcaagtagaaacaaacgctgagatggcgaagggggatatcctgtcttctgaaattgagaatgttgtctgttgcatcggcgacagcagcgttcatcgggattgtatccttcaaggtggcataaccgcagtcgggcacgaatgaatcaacgctaatttggaatcgcgagagcatgtggcggaggtggatcgtcctct

SEQ ID NO: 48160 - DNA, 402 bp, Oryza sativa
tacccggttcaaaatgacttgctttttggtgctttacatggtacagagctgcgcgggctaagctgtaaagaactcgagccaagcataactgacatttaaataactagttcgtatgttataagcgaactatcaatgagacgtcacatatatagctgatactgcagtataagatataatgacttattagaccgatagagttcgtaacgactatttatggccatggactagagtatactttcgctactcctaatgatagaaatctcaacattgtgcttcttctaatgacagagctcttaacatcaactattagggtcagagtatgttctgtaatactaatgagagtactcaacatctagagagaatggacatcttactactactaatgacagatgtcttaacatt

SEQ ID NO: 48161 - DNA, 459 bp, Oryza sativa
  unsure (1)..(459): unsure at all n locations
cntgcnactgtgctagcattgtcaggcccctcggtgagaacccttgaacctctagcactcacatgcatgcacgcatttagcgagtacatggccgtagacacacatgcaccgtcacccaaagataccttccgctcggactcgccgctagcgcaactccggtcaccaacgaccgagaaaagtagaggaatggaatcgcagtaacattctcttcattntgtcttttggtcgcacccccaaccaagtcaccgtttgtcgccggcgccggcgagcagaggtgccgctcatggcggctctactgctggatcgatagagaaggaatcangacttcactttgaaaatttaacaaattatagggtctgtaatgcaaagatacaatacacacaacactgtagcaggacctactcgtaattatataagaatatgaagtactcttaacgaaaactgaattaaacatgtgct

SEQ ID NO: 48162 - DNA, 420 bp, Oryza sativa
tcttctcgtgcttcacatcgtcaagcggtcaagcgaataatgaggtatttgaatcatacacttgagtttggaatttggtattctacttcatcttctatatgcttgagtggatattccgatgctgattttggtggttgtagaattgataggaaaagtactagtggaacatgtcattttcttggtacatcattgattgcatggtcttctatgaaacaatctagtgttgctcaatcaactgctgaatctgaatatgttgctgctgctagttgttgtcacagattctttggcttttatctactttgaaagattatggtcttacttttgagaaagtacatctcttttgtgataatactagtgctatcaatattgctaagaatcctgtacacactcacgcacaaagcacaattgatattcgtttca

SEQ ID NO: 48163 - DNA, 328 bp, Oryza sativa
tgttgagagagagagatttttatatttctcacaaatactagtccatatagttagcttggttagttcatggcgaacgcattctcatgcaacgcagttgagggccaagcaacccatccacaaactactcatggccctcttctgaaaaatggttgcaagaaaaaacaattattgtacgtatattaaaaaacaaatgtacttttagttgaaagagcagttgattagggaaaaaaagagttgatattaattatttttgctgctgtgaaaacgcatctgattacaaacccgtcttgggcggcaggagacaaactccagccggggcacctggtac

SEQ ID NO: 48164 - DNA, 412 bp, Oryza sativa
  unsure (1)..(412): unsure at all n locations
actcagctggattccatcggcgaggtacttccagaggtcttctgttctatgaagtggaggccggtcttcttctcctccttgcgaacccaacggcggcagcgacgaccaaaggcgacgaccacagcgactacatggggctgctggagcggcggccggaggtagagagagaaggagctcgcggggagaaggtttctggcggcggcagaagaaggaggaggtggcggcctaaagaggagagggaggggctctatatatagccatgggaggccggaatcgagcccacatcgacgggaaaaactcgggaaagtctatggttctcgccggataaaggaaagattgaaccgcgaaattggaaagaatttccatagaaactnttggggatttcttggggaaaaggaagaggagattgaga

SEQ ID NO: 48165 - DNA, 400 bp, Oryza sativa
actcgaacctgatgatatactcgataacttgtgatcgactcctcaatcacctttggcatggccatgcactttcataatctacaatgtcgaggggcccagagatatctctccataggatgggccaatgccatcttcattattcatatctcactacatgttgcatagcatacacaaccactacttttataactacccaattacggagtagcgtttagcacgccctaagtaagctactacacatgttgggaaccattataatctcatgtctaaggattcaacacagacaagcaatgagatcactgatgacaccacacatatggctcttgaacgtctcatgttgggtctatacaataacatgttcacaaacatatgttcacattattaatatgatatctctata

SEQ ID NO: 48166 - DNA, 438 bp, Oryza sativa
tagatatatctctgtaacaaaaacacaatttctattttttatgccggtcaactcagctccacacttttatgtgaagtgatcgtcattaatactactcctaataaccaaacacaatttaagccctgtttatttccacaaacacaaattatcacgctgtcacatctaatgttaggacacatgtatagaatattaaatgtgagaacaacccattacacagattgggtgtaaattgcgagacgaatcttttaagcttaattgccccatgatatgacattgcggtgctacattaaacatatcctaatgacggattaactacgcttaataattacgctcgcagttttacctgaactataatttgttctgtataaaactacgttaatacttgaatcgtctgccatatatccgatatgaaactaaacccaaacttttccccaacta

SEQ ID NO: 48167 - DNA, 444 bp, Oryza sativa
cacagcccttggttgttcctgccttctgctgtaagatattttcatttcaattgttttcttcagcaatgagcagaatagcagattgatgtagcattttcccaccattttgcattccagtgcttacctatcaccattgatgtgggaacaaacaatgaggatttactgaaggacgagttctacattggattaagacaaaaacgagccactggccaggtttcatgcttatttcttggatatgctcattcagttttcatgaatgatatgtaacaatatggttgtgatttcagtcatgaaagttggtttttatttctttaattatgaatatagtgatcttctggatgaattcatggctgctattaagcagaactatggacagaaggtgctactccatgtatggaaatgtttaaagaaagaggataactttggtctgtatatgagctgctc

SEQ ID NO: 48168 - DNA, 470 bp, Oryza sativa
  unsure (1)..(470): unsure at all n locations
acgcctggcttccttttgctctacttcgcattctcataaccaaatagaacagaaaaccagcttggacttgccctttctattcttgttcaacattttgtgcagctcccagaaacggtttccaactactgaacttacaagatcactcttcagtttctctatgatctacaattgcttattagtccagaacgtctaggattagtcaccataaagagttattcaccccaaaagagatagaggaagaaacaaggaatacaatattgtgcccattctaaaatacatttactagcatttctttgtacataagtaacatctaaggtatcacttaagctaaaaatacaatgttcggtacatatacatgcatgacacaatngctcattcatgaaggaacacanagtcaacctctgctcattcagagtgaacactagatcaacctcttcccaaggaacatacagttactggtaatcaactga

SEQ ID NO: 48169 - DNA, 377 bp, Oryza sativa
  unsure (1)..(377): unsure at all n locations
gcttctanaccatcaggaagtctgtttttaaattggaggatgctccatatctgattttggggttaaaggatgcaaatcaaactcgggctatacctgagggacgtaaattatactttgttccaggagtatttcggctctctacgtaaaaatctggcccggcccanaagcacaagcgatccaatcgagcggactcgtggggctacagcccgagaaacacgccgccgggcaagtcgactctcttgcttctcaaccttaaaccctagcgccgcttgaaacccctcctcctgccttcttcctccacactgcgcggcggtggcccaaggccggcgaatccccaccttctgctcccccctctcgcctacgccgcgcggggggcg

SEQ ID NO: 48170 - DNA, 329 bp, Oryza sativa
ataagcttactgcttagcatattaccaagtgagaaccaacagatgttgcatatgcatatctagctaagctgagtgacacagtgaggtgtctaaattaccaagctcttcgtctccatggatcaataaatggtagctctagggctcttcaagcctctcctcctcttcgtcgccggcctgatatgtctctacgcgctccgacgacgacgccttcaacggtggagcagaagtctgcgccttccgccgagaccgttcgggctgtctcattctgagccacctacacctgatcgcgcctgtggcgcaccatgcgcttcaccgactcgccgcgcgcc

SEQ ID NO: 48171 - DNA, 469 bp, Oryza sativa
  unsure (1)..(469): unsure at all n locations
nnnnnnccaagcttcgcagaaccctcatcgacggcggcagtgcactcaatatcctcttcgccaagaccttggatgatatgcagattcctcgctccgagctaaaaccaagcaatgcgccttttcacggagtaattccaggattatccgcaactccactcggccagatcaccctcccggtcacttttggcactcgggaaaacttccgcacagagaatatcagctttgaagtcgccgatttcgagacaacataccatgccatactcggacgcccggcgttagccaagtttatggccgtcccgcactacacttacatgatgacgaagatgcctggtccccgaggagtcctatccctacggagcgacatcaagcaagccgtcacatgcgacaaggagagttgcgacatggcccatacccgcgagatggcgtcagcccgagaggatatccgactggctgcagccacggcgagcga

SEQ ID NO: 48172 - DNA, 461 bp, Oryza sativa
ctcaagccttactgtttgacaccttttaagatgcattgtaccaatcttcttataagatgagtaactgcggggtaaaaggattttaaagtattgggcacttgatcacgcgcactttggcctaagcaaaaagtgcctaagtccctaaaagaacgtgacaggccacacctgataatatgggctgcagacatactaagcctaggccaaaaaatatgccttcgacaccctttaaaggatgacgcatgttacattgctcccgagtaataaatcttccgggtaatatagaccaagtgtagctcatatgaatagcttctgatctgaatggatatcccttatgggatactccataataaatataataacttgaatcctgactggcgcaagtattcggttgatagcccttaccgggaataataattggtccatctttgagcattaaaatatactcatgattataatccatg

SEQ ID NO: 48173 - DNA, 402 bp, Oryza sativa
  unsure (1)..(402): unsure at all n locations
actcaaaatgagccatctacttccgcttcaccaagtcaagctcaagttgaagtggaggaggagaaggcacaagatccacctatgcctccaaggatacacaccgctctttccaaggatcacccaattgaccaagtgttgggtgacattattaagggtgttcaaactcgatctcgtgtcgcttcgatttgtgaacattactcatttgtttcttgtcttgagccaaaacatgtagatgaagctctntgtgatccggattggatgaatgctatgcatgaagagctcaacaactttgcaagaaacaaggtgtggactttggttgaaagacctatagaccacaatgtcatatggacaaagtgggtctttatgaacaaacaagatgagaacggattggtggtgagaaac

SEQ ID NO: 48174 - DNA, 468 bp, Oryza sativa
actcaagcttcgagaaaaagtcaaagatcatcccaagcagagttatctttaatgtgctatgtccatttgaaatcagtgttgtagtgttgtatctagaggacgaactggacttgaaactgtcattagaactcgtggaggtgcgagcgtatctaataatgtcctcgtcactaccccccacagcatccactccgtggaagaaaagccctgatgccaacattggagctctagaatggctagcagcgtagagtcccgagcttcggctcctccaaatcatcctatgtatagatggccatatgggcggcacggacgtgctcatgccagaatctatcgggccggcacggcccgaccaacataccaggccgtgccgtgtcggcccgaaggcacgacagtccatcatgcttcttcataagaaaagtctaatatccatccttggccatgtctaaatgactgtaataagtttattttgca

SEQ ID NO: 48175 - DNA, 459 bp, Oryza sativa
tgcaagcttcagttcctttagctttattaaagtctggccttgaacaaacttggctgattctgagattccaggacttccatgagatgagcattcaagctcattattggtagctccactagcctttttggtacagttgatggcattttctgtttctggtatgccagcatgagcaacattcatgtctgcaggaaaaataactggtacacgaggagtacgtttccctgaaggatgtcttggaatgttcttgacaagttctggaaaagcatacaaattagtaaaacaatgcaggccagtagagtaagttattatccaatagagatgttctcttgcattcaactagctcttgcttctttctttggtaatttcattctgaggaggccaagagaagattaatggataaataaatatatatatatatttgctgttacatacttacctccatagtatcttttcttgaaa

SEQ ID NO: 48176 - DNA, 443 bp, Oryza sativa
  unsure (1)..(443): unsure at all n locations
tgagcatacacgttgtcacgtaactacacatgcgcagcttggatcggaaacaacacgtagagtagtacggctactgcttttttcttgtcttgccataacaacagtgatgataaagaatcatgtctctcctcgaattgaggagagtggaagagattgttctagcctctgtacacgccggagggatcagcgttttgaactatccaanggtgctccaggagcttgtggaagggcagactatgcgcctaattctttacgagcatctgcagatcaaaatgctttcttgagggttacactctggtggatgttctacttgtgtacaagtgacgatntactttgtcacagtttacaggtatgtaaatcatcatgacaggagcatgcttcttacctgtgaaaataggtgcttcgcagcccgggacacgaatggcttcagtgggaacttcaag

SEQ ID NO: 48177 - DNA, 405 bp, Oryza sativa
  unsure (1)..(405): unsure at all n locations
aatgtttgccatttttctcatgcacttttctattttttaaatatctcaagctgactatctacgctgcttcagttacgcataatgtattgtttgtagaaaactagaagatcaattggtcattgattactaatgtagaaactgtctgcatcataggttgtgtttgatccagcactgagagagagacacatcggagatctgcagggcttaaagtatgaagatgctggcaaagaaaagccagaggcttacagagcatttttgtcgcacaagaggaaccgacaaattcctgtaagcactccattgtcttactttttataacacatcagtattgattcagcanacagaatatgcttctgataccatacatanggtttaggggtcacccgggaaggagcagtgggggatcta

SEQ ID NO: 48178 - DNA, 174 bp, Oryza sativa
tgtgtgctgcttcattagcacggtgggtggactctatgaggttcgagggcgggcattgtaccatggtgcggggcctccaccacagcagctggactcatgagtatctgctgatggagggacgactggttttttttacttttgacaccctaatgcactatttatcattcctgtcat

SEQ ID NO: 48179 - DNA, 353 bp, Oryza sativa
agagctactttcgaaatagaggatttctacagctacatatgaacattctcctatactcttgcagattgatttcaaccgtttctagaaacaaattgccgcaatcgaaccattttagtcaatttggtttcctcaaagtcaaaacaaaaaggcaccttagttaaacagcgtggtagcctatgggctactccataccataactatacatgtaaatatcacttgcaagatagtcaagattatgttaatattttacagttagttgtcaatccatcacaatcgagtgcacgcgaaagtaacagaagttccatttcggtggtggtctttggttaagaaactttcagcctcatctatggatg

SEQ ID NO: 48180 - DNA, 406 bp, Oryza sativa
tcgtcaaatccctcattgccaacggtggcaccgacatcaaggccggccttgacttggggctggctgtcctcgccgaccgcgtgttcacggaatcccgcaccgccaacatctttctcatgttcgacggcaagctcgagggtaagacctccggtgacccgacgcaagtcaaccccggcgaggtctccgtctacacctttggtttcggccatggcacagaccaccaggtatgtatgtacaattgctagttgctacttgctactccagttgctagctattgctaaccatccttctgccttgtaattggacgaatggtattgccattggtagctgctcacggacatcgccaagaattcccccggcggaacgtacagcacggtgcccgacgggacgaacctgagcgcgccct

SEQ ID NO: 48181 - DNA, 455 bp, Oryza sativa
  unsure (1)..(455): unsure at all n locations
ccttaaaactcagctntaactgacctactgtctgatacacacctcaaggcactggtcttttggactggtcatggtggggggaaaaagggggttctggagctgattaactcggtcgctgatattatagcatatccctctgttgcagtgcagagatctccaaacatgccatcaacatctgcgtgcatcaatagtggtgtccttcttagcaatgcatcacctggtggaagaatccgtactgagaataaagaaatgctgaaaactattgataagaacatggctcagtacattcaacgtttactagaggactgaccactcgactcttatcttgttgttactagtgatgatcataatttattttatttattcgtcagctagtgttccggtgttacttactgcttgacatgtaacatggagactataaggcctcgcctaaggccaaatggtggttcttcact

SEQ ID NO: 48182 - DNA, 455 bp, Oryza sativa
  unsure (1)..(455): unsure at all n locations
atgcctaaagcacaagataaagatgctctgcatgagcttaaccatgtttnttatattgaacttaatctaaactataatgtaactcgtgtattgtaaaatactatctcaaaagaacgaatgcaagattactgtcatgactattcgtctccccctgagttgaacatcaaattcaaatacaccaaattcctttccttccacaaattatgagtatgcatgttcttcatgaacatattaatagcataagtcatatatgtgcgtgcaaatgcacatgttgatagtaatacaacttcttgtgtatcaattctaacaactaaacatgttgcatctacgccaaaattgcttcatatgcaaatgaccaatttactcaaaataatttacatacatccataaaaacaatacttcctttgtaaagtcatttatacgtggaagatggacataacattatcaatcaaatg

SEQ ID NO: 48183 - DNA, 486 bp, Oryza sativa
  unsure (1)..(486): unsure at all n locations
ctaagctatatctggggttaatgaaccattttaccctcaaaatctatgtgtttcatgaaacaaagtaaaaattgaggttgtgagttacggacgcctacaaacctagggttttatgaaatatgctaaaacaagccatagtcaccaactcacccttgtcattcccctcaggcaacaacaggggaattagcctaaatagaaattgagagattaataggtaaatatgttatataagacaaaagcatatcgacaatctataacaatgttaaaagcaattatcataggccgttctaaaatgggcaacttattaaacttgatggaggtacctntgaaatcgagatgggtttataacgaatgggctagacataatctagaggcacgtggctaattctatggcactttcacatcacctttctactccatcggtgcttctcactcctagttgacaactgtcgtcaccacggccgagccacactgtcatcgacgtca

SEQ ID NO: 48184 - DNA, 357 bp, Oryza sativa
aaaaaaatataggccatgttaaagaaagcaaaaaaatcttgagaggagaataaaaaaactcttattatcactatgcaggctgagcacattctatacttctattatatattttcctcctatatttatgatatatttttaacaaacatgtaagtttggaccgcaatatataaaatcatctatatgttcttgataaaacaagatgtttgtctcaaatattggaagagagtagtctctaagtgatactccctctacgtttataattcttgacgttttagataatgacttgatcttcaaaatatatctttaactatgttttactattatataacacacacatacattattgctgttattata

SEQ ID NO: 48185 - DNA, 350 bp, Oryza sativa
aatcaaatcagaacggaatcagtgaccatcgaaattcgaaaatccatctcaataaaagatctcatcaacacctaccagatgagcatgatcacctgatcacatcaggctccagcgtggcggcacgggcaggcatgtgggcgaagaagaaatcgacgccatcagagggcgcggccgcggcggcgccgcctagaatcgccatctacgacaccggcctcctcctggaaaccaccccgcacgccagcgccctcgccggaggagaactacccggccggcgccggcatctgatcgagagcgcgcccaagaacagcaagcaaactcagaccccgagataagaacacatccaggagaac

SEQ ID NO: 48186 - DNA, 403 bp, Oryza sativa
  unsure (1)..(403): unsure at all n locations
ctgcaaatagtgatacaaactcttactatctttgtcccacaaaaataaacttagaattagatctgccatattccagtacaatgaatatagacaaaggtatgcatatattcatactagaatactccatccgccccaaaatatagcaatctggacacatatgtgtccagattctatatgcttacattttgggacggaggtaggatgttacatatagttataggtttttttttttgagagtagctatatttatggcgccatatntttcatgaaaaaatagtcggtatgtgtttacattataagtcccctaaattgcatatgaaattttagtgtatttacaatgtaagtctcaaaattacatattgtaagtcctaaaattacatatgtaaattctaaaattatatat

SEQ ID NO: 48187 - DNA, 473 bp, Oryza sativa
  unsure (1)..(473): unsure at all n locations
ctagacattctnttaccacttcaaccgtgacctcagtgattttatactcaaagggtatcactaaagctagctcatagctcaattcatgcttaggggtctcgcacccgggacatcttttgcagcaatcttcatttgaattccatatcaaaggaagcaatacaaagttcagtaaacaagtcacgatagtcacaatgcagtaaatacacagctgaattttctgaaggtgttcatttgaagttgtgttgtgtcaaatcacacgaacttcagcaaaaagatacagacattctattccaggttgctaccatgccgaggtagtgctgttatgaagagcagaatanatacaaaccacagtgctctaagtcaataaaccaacaataatgccctaccttcttttgaataatcagcacngctatcacaattgctaaatccagctaatggttgaagcaataacatgatattctggactacatatg

SEQ ID NO: 48188 - DNA, 423 bp, Oryza sativa
cgagcttgttcatagatgatccaggttgttatatcatcagccgacttatcagtcggtttagttttcttgaatttggcctttttctttggagctaaaaccaaggtactcatggccgatgatctggttttccttttcttgcgtgcatcggctagttccctggttaggccgcgaagaagagttgaagtcttgggggcatggtagctgataacagggggagatagtccacctccattcggaattagaccttgagcatattcaatgtccttgccactattactttgatgaggaggggaggactctgttgtctgcaaaataggagaaaaagattagtcaagtaatgaatcggctaactgattatgcaatttagtaatgacaaagcttacctggggtatgacgtcagggaatagatctgtcatatacatt

SEQ ID NO: 48189 - DNA, 401 bp, Oryza sativa
aaactcataccaaggaaaaagagtatcatatcacgaacataggttattttccagaggaagatactccccttgaatcctgcacgattttaagtcgtctcataccaattccttcgacatatttaaagaatgtggagtatggtagagattttgtgaataaatcagcaagaatatcacatgacttagtttgcaagatatttatctctccatgttgctgaagctcatgaggataaaataatttaggagcaatatgcttagtgatgttgctcttaatataaccagttttcatctgaacaacacaagcggcattatcttcatagataatggtaggtgattccaatgaaccaataccacaagatgttaatatgtggttaaccattctgcgaagcatacaattcacgtga

SEQ ID NO: 48190 - DNA, 463 bp, Oryza sativa
  unsure (1)..(463): unsure at all n locations
cnnncntcaagcttatagattgtgcaaatgcacaaagattctataagaacatctatcgacatttcaacaacgggacaaacacaatttaccttccaaagctagcggataacataaattcatgctctaagctatagcaatttgaagatattaaattagcaatgccattgatatcaacacccatagtttgatgcagatcaacgtaactttcacataagggtgtttctatctcatggttgctttcggaactagcgctgcctgaactcaaaactttgtttcttatagactgtaatgatatctccacttgcttcattgttggcctttcttcacctcggagcctcaagcatgcctgtgcaattgaggcaaaaatattaatctcatcctctattgcttccttaataacttcaggggcaactatctctgtaataggctntccttttatctcagaaagagnatatattgatag

SEQ ID NO: 48191 - DNA, 448 bp, Oryza sativa
actcagcttacctttgctcatgaaaaatctgatatgattaattgactcggttaattagtaccatgagacgcgttactacttagtactcatagaccctcgttaaaagaaacagataagcaaaaaagtgaatactatgttaaactttgtatattttcttaatgtataggcgggatatattcacacagccactgtaactattgagaaagaaaaaaaagttttctaataaaggtagaactcgttaatcagtagcttacataagttgtactaataataatattggtgttactgttctatcgacggagatcactataaaaccactctgctatctgcaagagcaatgtgagctaacataaaagagagtcacctaagggtggacctaggcctcggtgtcacccagaatcaacatccactacgaggtatatttctccactatgtacttaatgttcac

SEQ ID NO: 48192 - DNA, 376 bp, Oryza sativa
  unsure (1)..(376): unsure at all n locations
tacacattgcatttgagtgggggtgttaaaaggaatatgtgtcttttcatctcttgtatacattatatgtaggccttgaccctaagtcaatagtacacagtaaattccccaaatttatctatcactgtaagagttatgtggtttttgcctttgacaaggccttcttccgctgggcgatcatatggtgaaacaagtatggaaccactgcattcatgagatgaaacagcaaggcagtgtgccgtcaaatcctagtttttntttaaaaaaaaaagatacttgattatatcatcaattactaaatgaagtacaatggcaggaaataaaatactacctgtgacatataaagccatcgaaaagacattggcatagaagtagt

SEQ ID NO: 48193 - DNA, 442 bp, Oryza sativa
tccactacatcatagatgtactctcagagtaagaagttttgtatgcagatagcagcattagattgttgcctctggttcctagccaagatgctatatcgtagctagtcataaggcataacctattttcttctctatcactattttgcaggaagaaactccagcacgaatatcttgatcatggagtcttaatcttctaaaaaattggcttgaacctttgcctgacggtagcttgccaaatatgaatattcgaacagctgtgctgagattattaactgatgtaggctatcttgctcttgattcgtcttatagcccataaagcccactagcttagctatcacacaccttagtcataggcttaattcaatctaggatactatttcaggacggttgtgactattaccagctccaatggttggagcatacatgaagggcacttaaaaag

SEQ ID NO: 48194 - DNA, 473 bp, Oryza sativa
tattcagaagttgctcaaacggatgaactcactgggtattgttccaaattaaaagatcttcttggatgctttggaggcatttggcaacactgacaagaaaccccggacggtacccagcaaaaactctgcaagcaagccagatgtggagtccgcaaacaattctggaactgacacttcaagcaagccaaatttaagcgcttggcaagttgctgcgtgatggggcggtcagttagttcttacaagctcatactctgcgttgcctgacagcacggagaatgcaattaatatatctctaaaactgtctatagcagtatctttggagatacgagcgattgattggctcataacgcagttttctttatgtgaatgctgagatcatttgtgcgtcggctaatgctgcatggagtcttggagatttcataagtgtggtgaaaatcagcatacgggtttcttttattccctcttttttgtca

SEQ ID NO: 48195 - DNA, 374 bp, Oryza sativa
  unsure (1)..(374): unsure at all n locations
tcttgaactatctcggttatgttctatctgttgggattgatacctggttagtattattaactgaaacttgatatttctggataaagctatattagaantatagctgatacaccttatcttcaatcatctaaattacttcagcggctacgatataaatccatataattattaattgtctttttcttgagcataagcagttaatgctgtctcggttagggccaatctattgtgattgcttatatttaagaaaaggatcgaattaataattgcatgtcatttgcttctacagcctattgcaagtattttaggtctaatacacaaatatctgtccatcggctagttatatttaggtcatataattatctaatgattga

SEQ ID NO: 48196 - DNA, 398 bp, Oryza sativa
tgggaatgagctctctttgaatggaaacaagatttctggtgtggtcccactaaaatttgcatgaattccatgagtgaatctatgtattaaactgcttgaatgaatcagtgatctgtctgctctgttttgttgcagatctgttctgttgcaatgccctgatccgcattctctttcatttttatttggggtgtttttctttcaacttcaatttttcacaaaagctgtgacccttgcctagagttatgttctcttatgaaatttgaccaccctcattctcaacagacatttgttcttgatgtgcatccattcaacccccgtatagctattagtgctgggtatgatggaagacaatcatatgggatgtaagtttcttgccagatattctctattcttatcac

SEQ ID NO: 48197 - DNA, 382 bp, Oryza sativa
tgcttaagcataaaaacgacgaagatgttcgatattccaggagttgtcgataggagtaccgtcttcacgcttgagtcagtaggaacttggccgagtgacttcggagattatgaatggcccttcccataagggggataacttgtgccgatctcgtgtagtttgaatttttctcagaaccaggtcgccgactaagaaggctcgtgatcgaacgttgcgattatgataacggcgcaaccctttgcaaatatcgagccgactgaattaaggctgcttcgcgggcctcttccagtcggttcagatcatctactcggtcttctccgtagcgctcctcgcgaaagttgcgaaaacgtaaagattcatattccacctcactaggcaacat

SEQ ID NO: 48198 - DNA, 334 bp, Oryza sativa
aatatatggtagatccttgatgaaaatttctcacagcaatccaaatctcattggcgggttggagatgtgaaatatgatcaaaacccgaataagaaatctcactcacaagaatattgcgagatatgaaattatcttcaaattcaatttttaaagcaccggcattagtttgatcacgaatcacataaggattagaaactcttctccaaatatcaagatcctcagccatcatggaagattgcatcttactacaccaacaaggaaaattcgtttaatacaaaacatggggcttaattgtaagcttattagccatggcaacaactctagatcggttaaa

SEQ ID NO: 48199 - DNA, 440 bp, Oryza sativa
  unsure (1)..(440): unsure at all n locations
tgatccttttcggtgattctaaatttttcttgataagaaggtgttgattcggccggagcaagccgaatctactatgggaaaggaagtggtcattggtgaaccaagatccaagatgatagtgcccaagaagcctgcatgtggcgtttggtaggagaataagagtggagcttcaacttctaaagcccctaggaagaccaaggtgacttttgatatgctattggagaaatatgagaagcatggtagtgggaaaattcacaacatagggaagagaccacgatcacctcctatggagcgatttggtcattcaccaagacggtccgattcaccttcatatcattatccacaagacatgtcatggggttcctattcaatgctgccgtccggttatccctatccttacttcttgccatggngggcgacgccgccaatgttcaatcata

SEQ ID NO: 48200 - DNA, 375 bp, Oryza sativa
  unsure (1)..(375): unsure at all n locations
tactcagctnttgatgtgttcaaagagtggaaaactatggctgatagacttactgttttgaaggtgatcaatcttcgtactgacaatgggatggagttctgttctaagataattaaatcataatgcaagtctgaaggcattgtgcatcaatacaccgttcctcacacaccctaacaaaacggcgtaactgagcgtattaataagacaattatatctaaggccccgtggatgctgtctaatgcacggttacctaaacaggtttgggcggaagccgcttctactgcttgttatcttatcaatcgatcacccagttatgccattgagaagaagacttccattgaggaatggtctggttcctcagccaattattcacac

SEQ ID NO: 48201 - DNA, 252 bp, Oryza sativa
  unsure (1)..(252): unsure at all n locations
gaccaacgggacatcgttctgcattattattgccacaaacaaatacgagatttgcagtatttatgataaatataagcatccacaaccatccttctaaacatgttagaaatgaggaccggaaggtggttgtggtcctcgcacagggaagtggtactaatcgaacaggactctggggattccttctgtgagcatgaatcctgngggattntgaaagagaaactttcatgctcataagtggaatgctttctctcg

SEQ ID NO: 48202 - DNA, 418 bp, Oryza sativa
  unsure (1)..(418): unsure at all n locations
actaagcttgcaaaccttagatagaactttaanaaaattacattcttatattntgtccgtctgagctaagaatttatgtggttggttccaatgtgctcctaactgtgaaaaaatatcaaacaaataaaaataaaagttccatctctctcctcagcaccttccgccattttctgttgtcaccactgtcatcgttcctgtttaggtttgtgtcttgtgatgatctttgtggttaggctcacgtctctacttcggctagcctaagaccagtcaagcccggcccgggggggtcgagctgggcctccacacagggcccacgaagtgaaggggcccaaccccatatatgctgtacataatagcccataggaactaagaagcccactatctcacgagaggaagaagcaaatgtacaggaaaaaaa

SEQ ID NO: 48203 - DNA, 459 bp, Oryza sativa
  unsure (1)..(459): unsure at all n locations
gcttggaagaattggaagtcgaagctcttcaccgagtttgcaacccgcccggcaatcatacgtcgntcgatgaataccctcaaataaccgaagcggtgtgggaggaattctgctctctaaagaccacccaagagtttatggaattaagcgaggcacatcgcgtactgcaacagcggaatgagcacccgcatcggctgggcaccgcagggtacatcggcaaggaggcaatatgggcccaagaagatgcagccgctgcagcagcgaatgtccctgccccgttttcagacatccctgaacaaagagctcgtaactgggcgcgggcaaggggtaaggtcaacccggacggctctgtcacatttgagaacaaaagtgatgccatcgtctatcaggaactggtgagttcactacttaacctaactaatttccgttcgtataaagtacaagttcgtataaacgact

SEQ ID NO: 48204 - DNA, 470 bp, Oryza sativa
  unsure (1)..(470): unsure at all n locations
cttgtgaatgaatattngctaacagctgtttattttatttgttgtgatatactgtgtctgaggctcaatagaatgaaattggttctagtaaataatattgtcacatacatgtagtgtaggattgaagaactacatgtatgaaaaaaaaaaagaagaaagaaatgttacagaatactaccagtagtctttttctcgaacacccaccagaagtcttcgatatccattcttttcagtcttctcttttgactagttatgtgaggcagactcaccaccacccccactaggaacatttaaaggaggtaagaaatataaaaataagataattgagattcttgccatgaatccttatcatcttatgttaactatatcattcgactcacctactctctcttgtattatataacattatttngatcccgtctgtaggtttatgctgagaaggtgaatagtctcgagaccttcattgctag

SEQ ID NO: 48205 - DNA, 345 bp, Oryza sativa
  unsure (1)..(345): unsure at all n locations
cctgaacttaatggtggatttggtggtgacaacaatgatatcctttgagggtgttcaccaccgcttgcctctagctggcaacattacctatggcccacacaccatggagaacgtgaggactgactgattgaaaatgggagggaaggccaagatcgtctgtccaccagcatgcatgggggcaccgactgatctacaatgaggctagatgcgatccaccacaccatcggagggagagtgttcataattntctttgagggtaaagatggctcaacaaaaaacaccaatttcttcatgttacaaattcaattccagattaccacacaaatgaaaaggtaatcgcataat

SEQ ID NO: 48206 - DNA, 181 bp, Oryza sativa
  unsure (1)..(181): unsure at all n locations
taagaatcaccatcaaattctccatgtccgggtgtaacacttgttgtcagcataattagcgntgaacattacttctgataagaacactaagcaaggtaaatattaatataaatataaatatatgaatatatataggacatgtctattctacacatgctccttataacaactattctacacc

SEQ ID NO: 48207 - DNA, 366 bp, Oryza sativa
  unsure (1)..(366): unsure at all n locations
tcatggtattacaaccagaggtcttgagttcgaattctgactaccacgcaattaaataatgattatagtccattntgattccaaactagaggactattcgatgcatacgactcaatattgatggaangtgatttctttgtttttcttttttttttttacagaaccgcacgtgaaggagaagaagactctgccgcttccggcgccggcggcggcgccaccaccccaatcatcgtagcacctgttcacctgacgccgatgcgatcaagaattcatgatcaatgaaaacagtcgcctttgctgctgctgctgttgagaattacggcgaatggtacactactcattatggttctaagtttggttcttgga

SEQ ID NO: 48208 - DNA, 329 bp, Oryza sativa
  unsure (1)..(329): unsure at all n locations
gcaacgcaaggcaagngactcagaacccatacatttctttgagcatgctgccctatatttataggccctatgtttactaagagcactcctttaatggcatccggtagtgaacctacttcctcgatatggacctttttgctattgataacctaacctttgtaaataggtcaacaataaggttagccaggacataatccctccaactatttttgatagtcataatgctaaatctgcaaaatatattgttgataggtatattacaatccaacaacctatcatcttaatgatattctcggatttaacgcatgacatctcattcctccacataa

SEQ ID NO: 48209 - DNA, 458 bp, Oryza sativa
  unsure (1)..(458): unsure at all n locations
nncatcaagcttgttggacctgtgttgtcacttatcttttntattntatttttctgggtaatgagctctctttgaatggaaacaagatttctggtgtggtcccactaaaatttgcatgaattccatgagtgaatctatgtattaaactgcttgaatgaatcagtgatctgtctgctctgttttgttgcagttctgttctgttgcaatgccatgatctgcattctctntcatttttatttgtgttttttttctttcaacttcaatttttcacaaaagctgtgacccttgcctagagttatgttctcttatgaaatttgaccaccctcattctcaacagacatttgttcttgatgtgcatccattcaacccccgtatagctatgagtgctgggtatgatggaaagacaatcatatgggatgtaagtttctcgccagattntttctattcttatcacaatc

SEQ ID NO: 48210 - DNA, 451 bp, Oryza sativa
  unsure (1)..(451): unsure at all n locations
cgganaaattggtggtgccattgtatctgcagcttactctgttgcttctaggggaattgtagaaagctcatgcaacatttacaaagtaagttctgatcaaaattctgtgaagaccgatggaatgagagatgtatctggattattttcgagtgatacttctgtgatagacaggtcagaaaatcatgataactctaagttgagatgcagcaaaagaaataaatctctctctttacaccatgaaaaggagaatatgccagacaatggtactcctaggtctaaatccaatggtagaactgctattatgaattccaacttagatgcatattcgatgaagcacggtgcacatatgttcaatgagccccatagaataaaaggaaacagacctggcaccttgatcacacctgagcctacatgttttattttaagtggacatctgccacagagaaaggac

SEQ ID NO: 48211 - DNA, 110 bp, Oryza sativa
ggccggccgcaaacgagcggggagggcatgggtccggcgggggatgtgcggggcccacgcgcgaaggtggggcgggggggcggggagggttgtgtttttggcaacccccg

SEQ ID NO: 48212 - DNA, 308 bp, Oryza sativa
catatgcggaaaacgctactcttattttatcacgctagattacattcatacctatcaactgactaatggaatataataatgatatacctattgaccattactaacggaagtctcaaggttaaacactgtacaaaccgataaacataatgcatgcaatccaacagagtcaaagtactgaacattggcccccaaaaggagggtactgatgacttatctcctgccatataaagtaaaaactgagcatacgcttgcactaagagaacatgtcattgccatgactccacacacggacgtaggagataagccgg

SEQ ID NO: 48213 - DNA, 413 bp, Oryza sativa
tgaggagagaacaccagagacacatgagaagttgaggggtttgcaagccacttataatcacatggagatgatcatatgctttataaaagtaacactgtttaagacttgagaagtagtaatacacgttgtttaagtgatcaagtcttcaggtacgatttgacaaccgaggtgatccttcttattggtcaatccagaatattgcaaccaagctggaaaatatcaaagaccataaaggttataattgcaggacgaaagaattgtgatgttacaaaaatgcaagttgagtcaatatttgggtaaagatccacttgaccaacccacagacgctgtgagatgatcacggcttcaccgttacagatgtgttggcttcgcttgttattgacgccgtttcagaaaactgcgttggtctgaat

SEQ ID NO: 48214 - DNA, 446 bp, Oryza sativa
  unsure (1)..(446): unsure at all n locations
tcagaaatagccatatactctacttcagtagtagattatgctacatgtgcttgcanacttgccttccaactaacagcacatccttcaatagtgaaaacataacctgtgagcgatcttctcctatccaaatctccagcaaaatctgaatccacataaccaacaagtccatctctagatctcccaaactgcaaacaagcactagatgtaccacgtaggtatttgaaaatccattgaacaactttccaatgctctntgccaggattagccatgtatctactgacaacactcaatgcatgtgataagtcaagacgagaacataccatagcatacnnnnnngaagcaggtacacttaaatgaggaactctagacatgtactcaatatcatattctgactgtggacataatctgagataatctgaagttgcagctagaggagactcactggt

SEQ ID NO: 48215 - DNA, 371 bp, Oryza sativa
  unsure (1)..(371): unsure at all n locations
tcttcacaacaagagatccttgattcactgcctaaagctattaaatctagcatttctcaatatctgttcttccatctggttcaaaatgtttacctgtttcaaggagtctcacatgatctgatttttccactggtaaggatagagttctttctgtagctgtgtttttgtagatgcgtactgttacagaatatgcttatctggttcttttacttgatttcggttctgaggtttcggagatgaaagctgaatattttccacctagggaggatgtgatnttgcagaatgaaacaccccctgacttctacatcttattttctggtagtgtggtaagaatactctttaataactactctgttatttccaagttgata

SEQ ID NO: 48216 - DNA, 394 bp, Oryza sativa
  unsure (1)..(394): unsure at all n locations
gatttctcagaaagcgccatgctgtggaaactttctgggcaatctcaatagcagccaacccaaccattcggtactacaagaaanaatatactagtattagatcactaatcagtaaaatgtacttataaagcanaattatcggaatcgggatcattttgttattcatgattcatgaaatgcgtttagaaactatatgaccagattaatcagctgaatcatgaattaaaaaatgaggcacgacgcttcgacttaaactggagaagggacaaattatgacataacaaggcacaaacaaggagaactgaagtgcatacctacccaacatcaagacaggatttctcactagcatgtacagaaaggcaaaaaggaaatgaccattcatcanaacaatttt

SEQ ID NO: 48217 - DNA, 354 bp, Oryza sativa
ggagacattttttgtttgacactccctggcggaaccgcgtagaatgtcatcccaactcacaggagccgacctgttgaagcagaaaccttccagttggagactagaggcgccgggcttataacgtaactgaagctaaaagtcagcgctcgacaaaccacacagaaacgagcaatgtatcatccgagccgatttaaatataccgcgaaccgaaaatcttgaaacaacagaaaaataacatcttgggagcgtggtgggcatgcgcccgtaaccctggaaaggatccctgtagcagcgccccggtctgcgccgccgaaggagaaaacgctgctctcaaacttcgcgcggatatattac

SEQ ID NO: 48218 - DNA, 444 bp, Oryza sativa
  unsure (1)..(444): unsure at all n locations
tgcatgtcattctgttacttatgtggnttggatttcttactaccataaagcaccttaatcaccctttactgtctgtagcactaaggtgcattgatatttactaaatgctaatgctaatgctaatgacaatagaagggaccaaacttgtttaattaactattgtgttatagtgagaattcagtacccttttcttaaagctatagttttcatacattttcaacaattctgtgctaaagataataagttcagcttaatttggtcttgttgaaaaaatcatatgctatcttgagccacaaaggcatagctcattntactggacattttaactatcttactaacagaaaaagagcactttcacagaagagatcctgtctgtagtttcattctgttaactgacaaagtatcgcatgatccattctttttattcaaccatctttcttaatc

SEQ ID NO: 48219 - DNA, 329 bp, Oryza sativa
aactaagcttacatttgtccaagaacaatggaagaaatttctttttgatcaattctcaaacttcttcaattgttccaaaagccttactatacgattgacattagactaaggcctacacttcggtataaatgtctctgaagatttacatgacattttacttggaagatccagaatggacttggtgtatatatacacaagattaaggagaatgcattctgactgtctccacccatatctgacacctcataatataggtgagttccatggtgtggatttcagagtacatgagaatgattacgaaataatgaggaaccttaaaacacagttaa

SEQ ID NO: 48220 - DNA, 421 bp, Oryza sativa
  unsure (1)..(421): unsure at all n locations
ataccaatgagcaaaagaaccatcccttgatccagtaacaatgagctctgcgaggaataacttcttgaatacaagttcctggcaaattttacaggcacaaatatacgaagaattgattttttgtttcccaacataacaccaacctgtgtttgaagaatggcatgacagcgacttcacactcccggtgtgccctgacagaacaccaaggcatttcttgttttccacagaccatattttcacctgatacagaacaaacaatcctcatgatcaaaaggcagtccaccatcacattaatatgaattgtaatgcagaacaaacaaacaattctattctacttctgaaanatgatcttattgcgatacttacagtctgatcgcctgatgcagtcagtaattgggaaccgtcctatataacaacgcca

SEQ ID NO: 48221 - DNA, 388 bp, Oryza sativa
aatatcacagaaacttatggtttatctatacaagacctgtcttgaatcattcagcgattccagcatgcttgcacatatttgtgtgtcaggttcctgcataaacgttcaaactttcaataacatgcttaaacagaacaacagggattcacaaaacaagtactaatgaaaagatacgaagttcagataacatgctatgcttactttatgtatagcctcaacaagagctggaactatgtaatcagacagttgcttaagataagaaatatcccgaccttgcgattgcccttctctattgcaactgtactgaacgagaacctacgcattgttcggagataaacaacgtcattttataaaatgctataataatgagaatacactgataagggag

SEQ ID NO: 48222 - DNA, 446 bp, Oryza sativa
  unsure (1)..(446): unsure at all n locations
tactatattagtcatcttattgtgttaaatttaaattntgatttgcttggtttccctcgattatatcaccttgcatattggaattaatgtcttatgtgttagaaaatgctattatgtggtaataaagtttaaatcctgaaaatgttcatattggcctttgaaacggagtgagtacctcgatcatgcactctgcactactgcatgcatgtatgcacgctatcaccgcggcagctagcgcctcgatcgatcacacatgcatgcatctcgtctatgcatgcttgctgtcagcaacgtgctgccatcgatcgatcactcagctcgtcaggcatgcatgcatgcatatattcaggctacggtacacagtactggcatgatggctcgctagatattcatcacatgcacgtctaacgttgttcagcgaggtcgtacgtgtagtactgtgacag

SEQ ID NO: 48223 - DNA, 470 bp, Oryza sativa
  unsure (1)..(470): unsure at all n locations
tattgaactgccaccttatgacctcaccaaatcgtgaatattcattgataaactccatgtcacggactgaattgtctatgttccgcacaaaaagttcatgaccagaagtattcttgtcctgtgaacagacatctggatgaagctggcgcctaatatgggctntcgcagcagctgcatcagttgctgtctcaaattcaagaagcaaagcattttcactggaaatatctgtaaagctacatggcctcttcaaccctgcggcctttaattcatcaaacacctcatctttatcttatttgtcttaactgtagcaacataaatatgacgactttcaccaacagctataccactagcaaatcccttgctgcctataagtctatctaaatacctctattggagaccaccacctctaacagaggaaccctgcatacatccatatgcatgaacagcatgcattatgtttccgtactcaa

SEQ ID NO: 48224 - DNA, 368 bp, Oryza sativa
tatttagaatacttttcatatactattatgatattggaatactttccgagtatatgaatgccaactttacattattatgtttatgttatactgattatactgctagcttatctgggagatgcataggtacgggtataatgtttgcttatacaattactctatgtcatgacgatgatattagagtagtatctggtagtttaggcgtggtgtctagattatgggatatcgttatttggggttatatgctgcggatgagaggtgggccgctgatggtgatagctcagtacagatatttctccgcgcgtgtatatagtcctaagttaatttcctggggagggtactcctccgtatttagcccctgttgtatg

SEQ ID NO: 48225 - DNA, 390 bp, Oryza sativa
acacataaaaactcaagctttgccgcgacgcgtctcatgtgtcgggacgaggctcatgtgtttggtagtcacggagtgcgggtaaattatacatccactgcagtgtgagtcaactatatctattcgaataaccgtgctcgcggttattgagcaccgggacgtgtattacacttggctagactctgaattcttaacttgtatgggaggggttattgcattatgatatttatgttggtggagccacttcctgagaggcgggaaggtggacgccctcagaaaaccatgacgactcaatggcgggaatctatccttgagatcacaatggatggtggacagaacccgcgctattcaaatgtgaacactggtactaagatttgatcagtcaatgct

SEQ ID NO: 48226 - DNA, 419 bp, Oryza sativa
gactacaacgatacccatattgcacatgaaaataatattcatatattataacaatacactctgataaataaattattgtaataacatagagtgtatataaagccacacttacatgtattttatatatacatatagttgcatctaaccatttaaaacttcgattttgtttaacaatagaattacaaaacccacgacaatgcgtggggtgccaactagtacaataaaaggatcgatccagattcaattatgcacacaacatgcaaagaccaatttgttaaacaccaaacttcattggttaggccagaagtcccatccagtacttatatgttattccgtatgcatgtatatataatggccacagtatgggcaatcatcatacagatatagcatcatttcagagtcttatctcacgacacaaa

SEQ ID NO: 48227 - DNA, 404 bp, Oryza sativa
aagcttgccacttgtcaaagccttgaagacaaaagttttattaaagcatctgcaagcacttgaccgacctgtccaaatctctgaaggggatctcaagcactgatgcaaccgatgcccaaataatagatgaagtagatctgattaggcaaaaggcaatatcggctatcaaaaatatgtgtctggacgagctaaatcttgttacttcaattttaaatttgcaaacttttgggatgtaatgcattccaagtttagaacttttgccttttggttttgtttttgaaatacatgtttcatatatatatgcctccctaattttgcaagttgaaacattgataaagtataattagactaaggcgaatatcaatattgccatatacatcgcaagcacagcgatatacaaaaaa

SEQ ID NO: 48228 - DNA, 388 bp, Oryza sativa
gagcttcactgcggtgtacgagaattctattttttcttcacgcattcacactaattataagctggaactatatggctcaactggtagttgcataataagttggtgaaatcataatttgcaatgcttcacgtgatggagatgggagacctttatgtgagtacgggtggagaagccccccggaaacgcccgatgcgccaccgccgatgccgctctcgtcgtaaatgtcgacgcgcacgcgggaacccttggggctatactggaatcaatcataaattttcgaaggcgtccgctcatgaggtgattccagtggcaggtaactcttctgaagcacatgatgacgataggagaacggaggaggaccttgaggaggtgccaagcgacggagagc

SEQ ID NO: 48229 - DNA, 434 bp, Oryza sativa
  unsure (1)..(434): unsure at all n locations
ncatcatgtctgtacacaaagaaggcagagcactatattatctttaatgatactatgggcccactggaacttataacactactaacacgctattgaactgttcgggcatgttggttgacatgtaacctcaccggctggcatttctatcgtatgcacgagagcactaatctttatccaacaactcatcttcaagccattaacgaagacctttgggaatacgctgccttatagcctcaacatacatctcaaaaattcacttttcgtcaatctgacatatccttaggagctctttagtctggtgcttgctcgcaccagccgtgatgaaaataacactgaagtgcctcatgcaccatcagtggcgaaacggtggcaatactggaacaagagtagtcaaggcattcattatactagcatgtcgatctgagataatacaa

SEQ ID NO: 48230 - DNA, 463 bp, Oryza sativa
catgcaagcttgctgggtttctcttgacgtacaatccaagatccatgcctgcaaagagcgtggaattcaacgtacttctccaacccgcgatgtctattgtcctatccataagacgaagaatcacgacctttcaagctgcaaggttcttctcagcaccatgaggacgccacctcctatggtccagcagtcacaaatctcttctagagatgcggacagggaacgaggagcgacagctacctcagatcgattcgttggactaatcgacatcgatcctcacgagccgtttgttctacacttgctcgaagaccaggcctcatcgtcaacgagtacaccacacgatgtattcgctatcgatgggaccagcacatctgcgtgcgctaacgcagaagcggaggagcaagtggttacaccggcccagcacatcagggccatgaacgcaatactgatggaaaccccttatgac

SEQ ID NO: 48231 - DNA, 462 bp, Oryza sativa
  unsure (1)..(462): unsure at all n locations
tgcacctcctanggtttagggtagaagagattttcatggttgcccttatgaaagggacatttatatgggtatgcagtgtcatttgcacatattggcatgggctgataggctgggcctggtctatggcatacaggcctaacaggctgggggcggcctgttgggcctccttgatgccgaactcgtcatggcgaagtctttgtagttcgcccgagatgcctttactttcataataccaacgcggctttccagccttcgccatcttcgcttatggcttccgccatatggcttcgcctgaatggccttgacgtcattggcttgaatccttgctagtactataaattctgcaggttcggccgaaaggcttatgggatgcctccaacagtataatactaagtgcagcgacatcaaattatttaactgcactttaattacaataccaaataattaccaactgtctttaat

SEQ ID NO: 48232 - DNA, 432 bp, Oryza sativa
gcttattatgaacagtatctcaataatttgtatttaagggagttaccatggtaaccgtaaaaaccgtgtaaaatccgtcttcaaatatttgaattcaaaaatcaacggtttcagcgtggtttctcgcggtaaccgcaatatttgcgcagttatcgtcaagtgtctagcaaaaaattgaaaaatcacttaaatgtgtctagaaattgggtataaataaaagaatatataggatatttgtaaacctaacttttatgtgtaaaatacaaaaattcagcataacattttctatattatggatttcgaagcaattcaacaacaatctaatgtactttcggtttcgctctcaaatttgaacttatcttactccttttcaaaacatttcttcaccatctaccactacaaatcaagaactatatccataattgttttcgg

SEQ ID NO: 48233 - DNA, 475 bp, Oryza sativa
tcacagttatttaaacctctagccgaccccatcagcacctcttgttctgcatgacataacatatcctctaggtcgattttatcctcaacagaaccatcgtcatgcaccatgtcttcaacttgtgtcggtactacatattcaagcccgtcgacttgttctttgccatgatgtgtccatatttcgtatttgtccataaatccacgagttactaagtgctccttcactttaaaagcatcatcgaagtcccaggctatatcattcttacagtcagcacatggacaaattatcttcctcatattgttcttgtcagcgtgtgccttggcaataccaataaatttagacacttcgtttctatatggggacaaaaacctctgcaaatgatacatccattcccgactttccatatctcaaaaaaatgaacataaattattcgcacaactaataccacatttgtagggtctattgaaaaaactta

SEQ ID NO: 48234 - DNA, 327 bp, Oryza sativa
  unsure (1)..(327): unsure at all n locations
ggtgggattatgttccggatggtcactactanaaaaagcatttttgccgatgttgggtatttattttcgcagtcaaacatgatcctcggagccaaatagccacctacaaaaatgcagaccggggtgaaactcgttgtccacatgcaaaaatacccttcatttctgcaggcagacctcttatatggtccgcttgcgagaatagacttggaacataaatagaactgacctacgccagattttttctaagtgcttaatctccctcacctctcctctcccgtgtccctccccttcccccttccctcatctctcctcctctccccggccacc

SEQ ID NO: 48235 - DNA, 396 bp, Oryza sativa
  unsure (1)..(396): unsure at all n locations
tgagctcctcgaggtaggcggcgtcgtcgtctactacttnnncntgcagcctcccgaagaatcctcccgccgggagctagcagccgggaggcactccgccgttgttcttctccattgtctgcctcaccgatcgacagacagacagtgatcgatcctagcttggcgaaccgcttgaagtgaccgccgatcgagagaatgttcttgatgggtcataccatggcggacagtgaccggaactgcagagatatggcttctatctcacctggtcatgcggctagttatactacttctaactacaaacattaaggcacccccacctggcactcttcctcgcataatgatcagtaatagtcagcgggaacacgacgaaagtaagagtgatcagctacacgctca

SEQ ID NO: 48236 - DNA, 253 bp, Oryza sativa
aatgcaccgacctccccggtcagatcaatactttctcgctcccagagacctttcacttgattaatcggctcccacagcccttttcattttctcggactcccagaatccagctgcccagcagcacatacaatccgcttacactcgggaagcctaatctatgatgcccgctaactatcacaattacactaaatacatttctgaccacacaagtcgctcatcctggcacacatgtctcattcatgttctcattcct

SEQ ID NO: 48237 - DNA, 443 bp, Oryza sativa
gtccttgtcattgcaacaatcttctgtatccctgctaatggcaacttgctcaggatcattattgagttcttgaccaagatcgattacaaaactgccggatagaccatcttcttggaaatagtggacaacattgctattatgaacataattgtaaacttgatcattgggtacttgtagtctaccaattggctgcaccttatacacaaccccccaattagagaggtcttgcacgatttacatgggtacggcatgtaatacacctgtgtcgcttgacgagacaaaacaaatggttcgaattttggaaggattgacgcatgagcaacctcaaccagaccatatcttggtgtatacctcactttgcttgggtcaaaccactggcaattgaagagcacatgtgtgacaggttttctgccatcaaagctgatttctactttttctctgat

SEQ ID NO: 48238 - DNA, 344 bp, Oryza sativa
gacagaagcccgtcctgccgtcctgtgttttgtgttgtgcgaacggcacagtcacgatttccctctttagcatgtccgggcggtacttccgggcatgacaacatgtgtggaatactgggttgtgggtacagaggtacatctgtggccatagttaactattctaatatccgtgcccgcggttatgggcgggttgagtaatgatttgtcgaaatagtctcacacctcttacaaataattgatgatgcgagaactggtcctaatatattttgctcccgctttggagttacatctgtacagacgggtatgggtgctcacgataggtgggccacatcaacatgggtgtg

SEQ ID NO: 48239 - DNA, 445 bp, Oryza sativa
  unsure (1)..(445): unsure at all n locations
tgcaagcttgaggggagacatctctcctttctttttgtaatntgnatcacattgcatatgtttctttccaaaagcatatttgctttccaattgcatcttataaaacttgacaataacataaaaattggcaacatagagaataccataaatataggatatgcttgagtcatgctaggtaagacaagctagttctctttgttgaaaagatgaatagctgctctattttatatctcttctatattgagtcatagcaagcgctctctcaaaggttaaatataagtatccaacaattatttgggaacctgaggtaaatgagctgcactcgctgatcagagtctactttgttgtaagatatgagatggcaaataagagttgctatgatcctgatagtacntcgacttgaatactggatgatttgcttttcacaatgagaaaattgagagtt

SEQ ID NO: 48240 - DNA, 302 bp, Oryza sativa
taacttacctctgcattgaccttgatgtaacttgtgttttattaactattaacacagtactcttctatcatatcattccctgggataaaataaataccatgccttggaatactccccggtgaaatgctacaatggtatatccgcgcgcttgcagatcacatctggtaccataatatacctaggtgtattctagtgctattgctgtgaaatatatttccagcagtgtcgctgataaataccaatgagtatttgcagcgccgttgctctggaagataaaagagtatgagtttactacatgttaa

SEQ ID NO: 48241 - DNA, 402 bp, Oryza sativa
ctttatagcattacaggcaacttgcaacacaaaccaagttttcataataatgattattcttaaaataaagtacatcactcacacgtcctaagaaaaattatttcacagctatatgtgttgtcattatttatttatggagtttacaagttaaaaacataggaatgctaaataaactcctaaacatgatttaagaggtagttttgccaaaaacaacacacaacagcaaagagtactaaaatataagctcaacaaaattagtttcacaattttagctgttaccaataatttcttacgaatttattaagagctagaccacataagggatacatatagctatttataattttagtgggaaaaccagtacaaaagttggtcatttttattataccacattgaagatca

SEQ ID NO: 48242 - DNA, 441 bp, Oryza sativa
  unsure (1)..(441): unsure at all n locations
gcttatcattgtatttccctatcttgactgtcacatcaagttttcttcttgccggtgtcagtcggnggctatcatcataataatggagtgtgattttttatcaatttaatttgcttacttggtctatcattgccttgtttgattttttctacttagtctgcgaggactgaaagtttttaatagcttctttgggttttaggctcaacaaagcttgataaaagcttttaagaaatcaaagacttggctagaactatcaagcacagcataaatacaccagtattgtacaaattgagcctccatttgctacatttacactcagtcagaatcagtcctttcatcatcagagttattattgctcggctgaagggtcgttgtgcggaatngctctacaacatcacttgcaatcttgtcagccgcactttgagcattactgataagatc

SEQ ID NO: 48243 - DNA, 423 bp, Oryza sativa
ctcagctcactgtctttggagaaagaagaaattgggattttaactatcgcacatgacttagctcaaagagcctataatatgtcaagagaagataaatgtcttaatacccctcaaactcttaacacccccactcaaaagcaatgtgtatgcaataacattgcatttgataagggaactaaacactagaacacaatcccaatattaacctatctccaaaaccttgatgaagtcgcgaaatgtgccaattctaggatgatgaagaagaaaagatgtatccccttctcaatgaactggaccttggagccttcacaaactggtcttctgctcttcattgattctgagatgttgatgatgatgatgatgacaatggaccttcacatactggtcttcagtccttcgactgatgatgagacattgatgttg

SEQ ID NO: 48244 - DNA, 455 bp, Oryza sativa
gcttgtctgcgatggaacaatcatatgctatctatttggcaaacagacaatatcaggtggcatataaagtagtctagaccctcctatgcacagtgtctgcaaatactgcaacatcccaattcgtctaggtaagagtgtaatgtatgctgaaaccttcaagtatcttagttggaacaatgcttgaattcctgtgaggtcaatttcctgcaaaaggccactgtcaaaagattgtaaaattaatactcgaagaaacctgtactcggaaacatccataaccgaagctccaaaaaacagaagagatcgaacttgtgacaaatcaaagcttgctggtattctgaaagcacttgattcattatcatgaaggcagagccgtcggatattgtctgggcgtcctcttgtgctcctaactgatcgactactggaagaaaattctcttctgcagattatacctgata

SEQ ID NO: 48245 - DNA, 379 bp, Oryza sativa
ctgccgactattggctggcgaggatcactgaaaacttcttgtcttactgctgaaagtggccatggggtcaaatgatcagtacatagctccagagtacaagatacacagcgagctcgtattaatatccagcaccgacgtctacagcttcggactcgttctcctagagatcgcttgtaccacgaaagacaaggagcagatctggaacgatctgtacatgaaccacgccggcgtggatgacgtctccgaatccaacaagctgaatggcgagttctacaagaagcatatggagcgtgtgatcatcctgaggcactggtgctctatgtaagacccaataaagcggcctaccatgagtgaagctatggatgtcctgcaccatact

SEQ ID NO: 48246 - DNA, 444 bp, Oryza sativa
  unsure (1)..(444): unsure at all n locations
gcttcataaccatacgcatgtggtgcggcgcgagacgaacgaaatgggagataacgcgcgattntcgccggcccgtccacgtggcagccgcccccacgtaacacgagacggtgtctcggtctatatggctacacgcacccttgtcttggtgacgtggattccatcgagccaacgcactggtgcgactagcgggggctgggcgccaacgcgctggagggggcagaaaatacacagagcggacaatgagaccacatgacagaacagtgaaagcaactcaacttggtactaataattttgtagttttgtgtgatttttcttgaaagagaaatttagcacggctcacctaaaagtggtctgttctggttcccttctcgaacgatgaattcgttactttaccaaccaaaattatgtccttgacttagcacaattattcgtatttatatt

SEQ ID NO: 48247 - DNA, 458 bp, Oryza sativa
  unsure (1)..(458): unsure at all n locations
ctggatttgctatctccctaatagaaagggaagaatggttcttaaatataccactcacagttataggttcactntaataccattcgaagatacaaacatatatgttctctaccatatccatcaagtgatgggcttcagataactcttgtaccgaaataccctctgtgtggatgacaaactgctcgttcgctggcaaactccacaaagcctgcacttggagcgaactctaagtactgccagcctgccgctgcagatgatcccctgccgtcggcaacgtagtcgacttccctgccccataacttctttccatctgctgcagttgactccaccatcctcgcatacaattacatgctgctgctgtagtccctgatcgcactatgcagtggcgggcaaatgattcctacaacagggcagctctagaaaccatcattggcgctgcacagtacatgaccacacta

SEQ ID NO: 48248 - DNA, 406 bp, Oryza sativa
  unsure (1)..(406): unsure at all n locations
atcctctgagtcncctgccgcgtgcaagctggaagctatgaaaggattcttctgtgttgcggngggactccacctggatgcgagattgcttactatcacaccatgccgcgccatacaatgcaaaactcccaattagggagagggactttatgccacgctgaataccgcgtcgtacttgggcagacgtctatgtcatgtagaccacacggggaactcattagcagcggaaatgggccatcatctgatcgggcagactgaaaccatggaacaagccctctgtgtttaagaagaattcactgactttgacatacaatgtgctttgtcaagacctgctgaaatacacctcaatgaggaacttgtatctaatttattggcgaacttggaaaagagatatttaacttggatt

SEQ ID NO: 48249 - DNA, 209 bp, Oryza sativa
acacataaatactaagctgtctaggtgcctccctattaacaggtatattggtttctctatataccactcacagatatcggtggaccctatactctacgacgctactaacattgaatctctctaccagatcgcatcgaggtgatgggcttcatataactcttgtaccgacataccctctgtgtggatgacaaactgctcgctcgctggca

SEQ ID NO: 48250 - DNA, 435 bp, Oryza sativa
gcttagccagctgtatggcacatgttataatttcaggcacaacatgatttgagtcttcgccatcgtgatgttcggtgatagtaggttctaaaatatcattgatcttatgtggaaatgctgattccactaagctacgaaggttcatgccatccttaaacatctcatcggttgggcactttcctgtgatcatctctagaacaataattccataactgtatacatcaccctcagttgagaccttgcaccccaagccatactctgcaataaagattgagcaagttagtaaagcatttgttggtcgaaaaatggtactcgattccatggaatggtatacttgccatcacctccgtgatagataatgtggaggtagtagaaacgaacaaataagaatgaagtaagtccgtacctggagcaatatatccaattgatcctctc

SEQ ID NO: 48251 - DNA, 391 bp, Oryza sativa
agccggcattaagcagagcaaacagcgtgataatgtttatcaagcacaaaagaatgtgagaggagatgcattaatagcagataataatccaattatgctaccctgaactagcacaaagcgcacgaccgacagaagtgacgaatgctgaccaataaatttagaggcaagcacggaagcataatatttatgccaaacataagatagcgacaaagacaaaatagacactatatgcgaggacgtttatcgcagatggaaaagcaaaaaaatactacgcgtgcaggagaaaaaaacaaccacgcatgagcaatacagggaatagatatgaaaaccacgaataagggaaaccggacacaaagccgaggaaaaaggagagtacgggctcgactagaat

SEQ ID NO: 48252 - DNA, 392 bp, Oryza sativa
  unsure (1)..(392): unsure at all n locations
gcttatgcaccggtgaagtcttgaagaacttaccatcttcgcgcgcgtgctcgccgtcggcctcctctcctacagtcgcgggtgcggaggaggtcctgggctgatgaccggcgacgcgggagcaagcgagccgtcggtgtcggcagtatgggcgcggtggatggatgatgacggcgaggactgccatctgtggcgtcggagctacgacagctgtgggggatggcggcgcaaatcatggcactcaactgcgtcgtctacctgcggccgcnaganagagaggaagaaaagagaaaagctagaaaggattatgaccggtgggcggcggncngaccggactgatgtggcttgcgtctacgaccacaaggcgtgcgagctaatgagcagcactgacc

SEQ ID NO: 48253 - DNA, 454 bp, Oryza sativa
  unsure (1)..(454): unsure at all n locations
ntanatctaccggnttacctccctcatcaatgtcgagatgtccattggntgccataggtgtcttgatgggctttgcatcctccaagccaaacctcttgagtagatccttgatgtacttggtttggctcacgaacgtcctatccttgagttgcttgatttgaaatccaaggaagaagctcaactctccaatcatggacatcttaaattccctagacatcatatcaccaaattctttgcagaatacctcattagtagaaccgaatatgatgtcatcaacataaatttgacacacaaagaaatcatcaccaatgaattttgtgaaaatggtggtgtcaacttttccaattttgaaatcctttgacaaaagagaatttcttaatctttcataccaagccctaggagcttgtttataccatatagagcttttgagagttataaacatggttaggatttt

SEQ ID NO: 48254 - DNA, 425 bp, Oryza sativa
  unsure (1)..(425): unsure at all n locations
agcttatgcctcggcgggcgaatgtgctccatgtttcttggctcaacaaatctcattcacgccagatagatgcggagggagtgctgttcctacatcaagaccctctggtaatctccgccgaagtagctggcttcgaagtccggtggattttggttgacggaggaagttcagccgatgtcattctcgccgaagcttatgccagaatgaggttggcaaccctagccctcacacaagcaccaacctcgtttcatggnttcggcagcgaagcagctcaagtcctatgccaagtacaaactggcggtggctatcggcacaaacaataacaggcgcgaagagcatatactattcgacgtcgtcacatcccatacactacaacagcatttttggtttgcaaccttgaacaagttcgagccatctccaccata

SEQ ID NO: 48255 - DNA, 387 bp, Oryza sativa
ttggatgtctgatttaaagatcaaggtgctagacggacttccatctaaagtttactggggtgtttggacttattcttatttaaacatgatctagccactgttccttgtatggtggcggccaactgatgactacaacgggtctcaaaacttaaaaagtcactaaatagcatatttgttactcctccaattcaaataatatccatcgtcgatcattcattctataaaagacatataaaaattatctattttcgaacctatttatcattaaagaaacttcatgtatgacatattattatacacattaacactattatttttataataataaagtcaacttttctcaaagcactcatgtcaatcataaaaaataatacactatatactatc

SEQ ID NO: 48256 - DNA, 430 bp, Oryza sativa
  unsure (1)..(430): unsure at all n locations
gctggttcatcaaccaagcccaactagaaattttatatgtcgttatacgaacttctactttatacgaatggaaatttgtagggtaagtagtgaactcaccagttcctgatagacgacggcatcacttttgttctcaaatgtgacagagccgtccgggttgaccttaccccttgcccgcgcccagttgcgagctctttgttcagggatgtctgaaaacggngcggagacattcgctgctgcagcggctgcatcttcttgggcccatattgcctccttgccgatgtaccctgcggtgcccagccgatgtgggtgctcattccgctattgcagtaggtgatgtgcctcgcttgattccctaaactcttgggtgttcttgagagagcagaattcctcccacaccgcttcggntattngagggtattcatcgaac

SEQ ID NO: 48257 - DNA, 474 bp, Oryza sativa
gcttctcttctcaccaaaaataaaaggagtatgaaagaactttttatctgccgctaagtagtagtactactaaagagcctaacgtattattgtcaagtcaaaatgcaaacgaatatacctgcctgacttcaagtgttgcaactgagaaaaatattttctacatctataggtgccataccacctagttcatgtgatttaaatggttatataaaagatttgtccttgcaactgcccttgctgcatgaacgcgagcccgggcttgatgccagcgatggcagttcacaggccgagagagagagaaaaagaaaaactgaaacggatactaagaattgcgccgggcggccggtgggcgaaacaatcccgcgatcgatgacaggagcacagcgcgcggccatgcatccactgatccacatgctccaaaccatatgatcgcgccgggctttgcctccccgccccgtctcgctcgggttcgct

SEQ ID NO: 48258 - DNA, 452 bp, Oryza sativa
  unsure (1)..(452): unsure at all n locations
actgtttgacaccttttaagatgcattgtttctactcctaaaaagttaagtaactgcggtataaaaggaatttaaggtattgtgtacttgatcacgcgcactttggcctaagcaaaaagtgcctaagtccctaaaagaacgtgacaggccacacctgagaatatgggctgcagacatattaggcctatgccaaaaaatatgccttcgacaccctttaaaggatgacgcatgtaacatgctcctgagtaataaatcttccgggtaatatagaccaagtgtagctcatatgaatagcttctgatctgaatgattatcccttatgggatactccaaaaataaatataataattgaatcccgactggcgcaagtattcggttgatagcccttacggggaataataatagtgccagtctttgagcatagaanatagactcatgactatgaatccatg

SEQ ID NO: 48259 - DNA, 459 bp, Oryza sativa
atcgatcagtttcgaccatctatattaccaaaatagaggagaactattatcaggtatactgatcttttgcagagaatgagcgtaaagtggaggagaatcgacatcaacacaaacgataaatcaatcgggcgatgtcgagaatcagacttatgtatgaatgggccaagaaatcagaattgacacaacaaactgggccaaaattcacaagtctacataaaggagcaatagaggaggctaccagccgaaaggtgggctggttgggccggcccctggtttggccgaactagggggttcggccgaacctcccgtggcaccgatggatgcagggtttggatggacggctgggattgatccccaatgatggttggagggtattaccgaccattccaaccatcacaaccgtcattacctgcctataaaaggagctcctcttctcactttacacacacacctcaagcg

SEQ ID NO: 48260 - DNA, 443 bp, Oryza sativa
  unsure (1)..(443): unsure at all n locations
cgttatgtttatgatctcaacgcaacactcatctgcacatagaactcgaagagctgggtgcaagattcgtcaagaagccttcggctattctgcttgccatgggttatgccaccaactctgccatcattcctgccttgattgggaaggtaattagctntgttgtaaatattttttttctagataaagattttgttgtaaatatatatggagtctgtatttggttatttctggtttttgtttcgtgcatcctggagctgattaatgtactgtaattatttcagggtggactcgataatcagcgattcactgaaccataactctatagtcagtggagctagagcttcaggagctacgattcgggtgttcgaacacaacagtaagctcacanacaactgtcaattgcatttgcaagtaattagttattagctgaacaattcatctca

SEQ ID NO: 48261 - DNA, 473 bp, Oryza sativa
  unsure (1)..(473): unsure at all n locations
tgcagcttggtcgctgcaccattcttggatgcatctgattctcttgtnatcctcttgcatcggcttgctctgtcatcttcttcccctccattctccatgcttggcttcaattctcttggggtggagaagagtggagcttctctcttgtctgaatgggagttgagaaaagcttcgctttttatacttgtcctgatgagaggagagagaaagagcagcaacacgttatggtgattaagagaccccactaagtactaactgatgggaaaatattgtaatatgtacctgaatataagattaggtgcataagatggaaggtgaactccatcaatcgcacaagtgacacaatcagattagtggcagcatgacaatgggaatctactgttccaaggtcctccattttcatttggttgaatggcaatatataatgtcagctgtcatggagactggtggcaatttccactagtaagtggccc

SEQ ID NO: 48262 - DNA, 470 bp, Oryza sativa
  unsure (1)..(470): unsure at all n locations
gcttcacaacagattatccaccaacaactccttgtttgctctggtgcactcccctcttcatcgacctcaacaaaagaagctgaatcaggttcatatccagagagtttcatttcaccaatcaagtcattcagcatctcatatagctcacccgatcttggatgggccttatctcctacaaggaaaccatgcatctcgctgtgcacctcaatccagctacaaccaggctccttcttcagacgcccctgcttcagcagccttcttgtcctagaaacatcagcccatttccctgattccgcatatacatttgagagaaggatataaactgaagaatcatcaggatccaatagtagaacattgctggcagcaagttcagcaatctcaacatcctgacggatcttgcaaatgctgaggagagtcttncatatgactgcatcagcttganaaggcatgctgttgataaacttcacagc

SEQ ID NO: 48263 - DNA, 372 bp, Oryza sativa
tatgaatcaacaacttcacgatatatttttgttgcatttatcacagcatgcctagctgtgatgaatttctggttatgaaagacatggttaatgaattatatttgtcccaagataatgaccaatgtagttatatacgcggaggcatgaaatacacttctcagaaattctatgccctcaatttcagaacagtacgcggaggcatgaaatacacttctcataaattctatgccctcaatttcagaacagtcaaccaccacaacaccttatatggataaggaagagtaagtgtaacttaaaattgaagggtgttttatgactccttttgatggatagactgaaccccaccccatgtcatagtggatcataagaact

SEQ ID NO: 48264 - DNA, 456 bp, Oryza sativa
  unsure (1)..(456): unsure at all n locations
agctggcacttagctctgaaaataaaaatcctgttcttgtgttctngagcttcatgttggacagctatagtgtacttgctattgttagacagctcatctgaaacacatatatatcacaaatcatcccttgattttcatgtttttacgtatggtgtgatctcaatcatatctatttcaattacattgttattttgatcacgtatatgtaggctccgttttgaatatctgaatttgctggcatgaattgcacgcgaccttgattcaaatctgaagtagaaacaaacttccttgaccaatgttacattgatgaaccagacaagcaacacccttatcgtgggaaacacaattgtcagttatctctgaaatgatgcgaaaacataagacatatgcataatcctgacgcatcccagtccaaggaaggttcaattagcatatgttgtgttgcatgatacttat

SEQ ID NO: 48265 - DNA, 482 bp, Oryza sativa
  unsure (1)..(482): unsure at all n locations
agcttgcaagataagttgaaacaaggtcactttttttgtatctttgaacaacaggttccaaaagagaataaaagaaagttataaaatcaacatgctaaatttatttcattgcagcaaaataaaacaatgttgtaaaacatttgctgttaaatgagccattagtacagtaatagatgtacagtactaacaacactagaataaattntgaatgagaaccactaaaagagattatgaagtgcatgtgctattagtttgcgttaattaaaagagaaagggaggagagcagttctacttttccaatatttttagagggcttctatgggtaaccatttggcataacctaaggtcaaggaggctctgataccaacttgtcacgcccggaatntctatccaaaattccaaacgcttacatgtgtgtgaaccctcgtccaggaatcagctgaggacacaataacacattgataatagaagacaaatggtac

SEQ ID NO: 48266 - DNA, 361 bp, Oryza sativa
aaacgcgcgaagacgagtgggccctgctttcttctcttatggcgtctgcgatgagctcgatgcctcgctgccgagagatacacctggagaggacttcgctggcaccgcacctgtagagggtcccttatactagcacatagcgcttggagatgcgcacgagctttttggctttcgcgtgatccttatgaagagtgcgattgtccaggtatgcccagatgtctggcatttacgcgacctgacgtggggggtctgggtagaccacctcgggcccccgaggaccattgcttgcgaggcgtccggtggagatttctgcatcaggcactcttctgggaatctcaacgcgccgactgctgtgtgagcc

SEQ ID NO: 48267 - DNA, 439 bp, Oryza sativa
agcttgctataaaaagaagtgcccaactgttattatttagcttgattatgcacaggcatttgacttggtcaagtctcttccaaatacttgctgtcacaggattcccagaaatctggattcaatggattcagagtttactctgctcctcaaaatcttgtcttgatcaatggagtgcctgtgagatggatctcatgtaaaaaggggctccggtaaggagatcctttgtcgccatacctgttttttggttgccgatgtgctacaaagaatgctcgagcataaccaggcaatcagacacgccgtctaccaggatcgcccttgcgccactatacggtacacggatgatacttaatcatctgtgtaccgagtggaagaggaagatgtacaagcactttgtggatattttgtaatcttgagcatttatatctctgtttgcatgaac

SEQ ID NO: 48268 - DNA, 459 bp, Oryza sativa
  unsure (1)..(459): unsure at all n locations
tctggagggacttccagcccaggatgcactntggctctgtacaactatcaacacatttgtctattggtagttctgtgatgtttagaagctcgaggtgcggaatgctcttccatctttcggaagatagaccactggtgttcttgatttccatcctggatgttgatccacggattgatgtccccatgacttgcttgaacgatgggaacaggaacgaacccaatattctacggtaattaaatttatcgaaatatatttcccctgatatgatgtaatgggtgctcctcgggatggatggttggaatcttaaattctcacataattccatttccaaatgctgaagacccgggaataaatttttgtcaccctctcctccttgcacggatatttgtaaccctttgnttattattttggtcatgaacaatctttggagcttcctaagtggttggctacactcgatgc

SEQ ID NO: 48269 - DNA, 446 bp, Oryza sativa
  unsure (1)..(446): unsure at all n locations
agcttgtgattccttgtcttttgcagatacgttattatgatatgtgtattgcaaagaatgaggaggctcttgctattgatccacactttgcagagtgctatggtaacatggccaatgcatggaaggtagtttggcgatataaatcatgaaaaataataatcttatttgccaatgagtatattgttctgaaagtcaatacttatcattctaaaatagatgcgatatattntgctattcaggagaagggtgatgttgatcttgcaatccgctactatctaaccgccattcaagtttgcttctgctgtgcattacatttccttgttttggttttgtcacttatttcgntcttcaacctaagttaatctttggaattatgctcattgaatttggctcaagattatcgataaattgcttttggttccctcaatgcttggcacatttttgtc

SEQ ID NO: 48270 - DNA, 476 bp, Oryza sativa
  unsure (1)..(476): unsure at all n locations
acttagctattnccacgtggaggtgaattggcttccnctatcatatactatttcttatgaacgccatggagacttacgatgcgtagcgaagtagagttcggctagtttgttccctccataggtggtcttcacaggaatgaatcgacctaccttggttaatcgatccacaactacccatatagaatcatatccaccttgggtctttggaagtccggtgatgaaatccatcccaatttcatcccatttccattcaggtacttggagaggttggagaagtccggccggtctgtggtgctctgccttgacacgctggcacacatcacaaagggccacgaactctgcaatttcccgcttcatactaacccaccagtatttctccttcaagtctaggtacatcttcgtactgtcagggtggatggaataatgaccttcgtgagcttcctgaagtatcaacttggtaagttctctggtatctg

SEQ ID NO: 48271 - DNA, 465 bp, Oryza sativa
  unsure (1)..(465): unsure at all n locations
agcttcacggatcttagagccaccctgcacgattatttgattgttaataagctcgatagattaaatgttgaataagcacatttgtccagcagttgtcaatgcaatgctgaattttcggtactccacaaagttggactgtcaaagtacttacaacagcaatgtccagccatgcgtttgcaagttgtgtcagtgtatggtcctcatcaatctgttgcatgatctttaattgcttctcggcatagtctgaacggtgcatcttaatgaagatctggacattcaatgcatgcctgtaaccgaaaagcaacagatagtaaacaagatcatcaacaaacagtattccacaaatgaagggggcaccaaacagaagattctgaccaccaaggttntgcagtaactaaatgatcagcaacatcaaatcgaaatcagcanagatcagcaattaccagtgttgaacaatagaaaata

SEQ ID NO: 48272 - DNA, 471 bp, Oryza sativa
cttattcccatttgttgcccaatctctctcaattccttattgtggttgattggttgttgtcacgaacgtcagacatgtgattcatgaatctgatcacgggcggactatgattgttccacgcacgtaatcgtcgttgtcgaatgaagtactgctgctgcaagtcatgctctccaaattgagttggccgaagtggaggataatcttatctgactgaggattgctggctgaataaatcataaaaaaagataatgaaatagctattataaaattaaaataatggatttaaaaccatattataataaattctcactttcaaaagatcgcaggttaattacaacatcatcttttcgtctatacttatactttatgctaaaattgaaatttttaaagttaatttatgaagtttatttatcatctgctttgaatcgctaacaacacgtgtaaaattattcttatcacaaagttttagtt

SEQ ID NO: 48273 - DNA, 438 bp, Oryza sativa
  unsure (1)..(438): unsure at all n locations
agcttcttctatgaatgatagcaatatgcttttctatcacatcatcacagaaccaatcaaggatgatgtagtcactagaacaatgccagctatatctctccagaatcagaatgagtagccatgtttgtgattntcagttcgctacttatcactgtaatcgggagtttgcagcaatcatgtaataaataaatatattcatgattataaataatgagcttggtatgtttatggaagattcatgttgaggatgcaatgtaccgatgttaagcaccttccctttttgttaaggcagggccttgtattcgtgaataagggagacatgtgtataaaaacaagtctatgaggactctnttgaagatgtgatatgcgatatgtgtataatgttactggcaaggagactagggtctcattcagaagactatgtctacctcgagtaat

SEQ ID NO: 48274 - DNA, 382 bp, Oryza sativa
agctttgtactgctgcactctaaagcaaggttgtattcagtgaagatcactatattggagatcacaccatggatgaaagaccatttatatagccacatgtgcttatttttctcagtaacatatcttgttgtaagcaatccagactgttgtaaacctgcatggcaatatcaattgctgcttcagtcatatgctcatagataccacaattggatgtaaggattgggaatcatcagaaaattatccctcgtaacattgtgggagaagctgcgaaaaaatttctatgcaacacggactaatccctcatctctggaggcctcttctggtattgtgacaggtagctgacgaggatcttaaagcaatctccttcccaccactcatactc

SEQ ID NO: 48275 - DNA, 376 bp, Oryza sativa
aacgaaaacgcacaccggagttgtttctctgtaagtggcgaggggagagacccaccagtgaacgcgacgagccccctcgccgacgccgttgacaccgaacagcagctcaccgcagtcgacgccgcggcaggcggcgctccctcctcgccgagcggcgcgcgcgccaccaaccgaggcgaggcaggcaagccctagcgctcgctcagcgcgtggtacgagcgggagcggaggcgttggcgtgggaagaggaggaggaggtggccattatagcgagaccaacgcgagctccgctgtcgctaattaaacctccattgctgctattcgctaccacctctcttctctcgccgatcgacggcgacgggtgcagtttcaatct

SEQ ID NO: 48276 - DNA, 446 bp, Oryza sativa
tcaatactgtctccgagtgtacacacataaaacctatcttttctactggatgcacaaaaccatgggagcatgggtcactcatgtggcacgcggccaactcccaggaaaccgacacccccaccatatgcatatgcagggtgataaatggcgggatcgctaactagactctattgcggctgagcatatatggttcctgttcatggccacattctgcaatggagaagatcaggacgaatggaatacagacacgggggcacctgatcatgtggggatattggatgatcacaaaagttcagactgtgagacattcatgctcatacccggctcgtgcagctccctgcctcatagaccctcggcgcactctacggctcgctaacaagctctgtcgccagatacaggtacagctctgatgcctgagcttaacccgctccagcccaatattactc

SEQ ID NO: 48277 - DNA, 477 bp, Oryza sativa
  unsure (1)..(477): unsure at all n locations
agcttcttactctgagcttcttttaccttggaaatttgcatatatccttcatcctctggtctgtattaatttattaatgctctatatattttaacaatacctctgacttttacatatccaggcttttcgcgcacagaacattgaaagtgcaaagtcaaggctcagtatgtgtgcacaagacatcatggaagagttgaaatctaaagaagacaaccaagaactgtgttctcaacttggagctgtgttaagaatgcttgcggactgctggtacggcaatattctcttgaggacttgaggatatgtgaacctgctattgatacgtttattgcctactccctccgtgtctaaataattgacacgtttgactttcccatttaaactttgaccattatntgctcttaagttgttagacctaatggaacanaagtttgattcttaatatttaggacataacacactttaataacatggcatcat

SEQ ID NO: 48278 - DNA, 426 bp, Oryza sativa
atatgacgctgtctcaaagtctggtggtgggagcaacatttcatcagaagtgcgcttgccgttgattggttccaaaggctcaaacagcgccttcctcttctcagataagttagcttttggatctggatgaacatcgtcgtcagtacttactgcatttgcatcatctattttcatggcctcttcatgagcctgattgttcagttgttcatcagcagcctctttgttaagttcttgttgcaagctccggccattggctggaacatacatattgttagtcagattcaagagtcagtgcacttctctagctaaaatctaatgcatacaggtgaacattataactacatgattatatggaagttctttaatttcagagtgtgttctgctatcatgacagcctgataaccttgtagcatacatcagctcaag

SEQ ID NO: 48279 - DNA, 371 bp, Oryza sativa
  unsure (1)..(371): unsure at all n locations
atcatacaacggcatttggccatctttcacccacttactaaacttctcataatctcttgtcgtggcctctgcgtcttcaatgtcatgcaacattgtaaatagacattgagtgtccacatctatggtctctccacctaaaggagaaggtacgaacatgccttctcgagctgcggcggtgttctctacaccctgatccaacactttttcagctgcgacatcaggcgcctcttgctctccatgcttggtccatcangtatatttcttcatgaatccattcattatcacatgagcatgcacttcatccttgtcttcgatcatccgttcattcttacagtccctacatgggcacaacatgtgcatgctcatcctac

SEQ ID NO: 48280 - DNA, 474 bp, Oryza sativa
tctaggttggactgattggtgcatgccactcaatatggtatctatttacaggcttcctatcccacacaagggagtgttggtatataaaccacttctattccacacaagaggcttgagggggtatcacgtgagagagagtgttggtatataaagtgaattgtgtcatatctatactactttaaaagagaatagtggttttgtcaatcctcacctgctcagctgcaagaaaaaaaaagaaataggtctatagtaatcacatttcaaccatccccaaccaactctacttttttttaagaaaaaaacaatgtttggtcaaagagtctacatgttacaacctcattggtcaccaataagtcattttggtttatttgggaacaaacaaaatatttgaaacagcagacggtatgagttctacccgatatattagaagaagagagttgaccttgtttataacgaaaaccatacaactacata

SEQ ID NO: 48281 - DNA, 436 bp, Oryza sativa
  unsure (1)..(436): unsure at all n locations
gcttatatggatgttagtgttattncacaggcctctttatggtgcataaagaaagcctcttcagagtcaaatacctttacaggaaaggtcaagattaccagctcctggagatgcgaatgagctctctgtcattgaaggacagctcacatggctagtccacataattgcagccattctcaagattatgcacaccattggttgtaggtgagaaattaacattccttgcttccttccttatattctgttagagttccttttcttttcacttacaatgttcattttgctatgcagccaagaatcacaggagttaattgacgcacaacttgcagcccgtgtgttacagttgataaacgttactgacacaggggtgcacgcacaggttagatgaaaatgaattggtcatctaacatgatagctgagtgctgagctagtgtac

SEQ ID NO: 48282 - DNA, 483 bp, Oryza sativa
  unsure (1)..(483): unsure at all n locations
tactaagcttctaagganaagtgttaactctagggagtattgaaaattgtgtttcatgtactctggaaatgtttgggaaaggatccaaaggaaatatgctccagaacaaaagttagaggctagggaaaaataaatggaggggtttttataaagttcgaaagaaataaaaagagaataaaagaaggattttataaaattaaaagagagcatttaactttgcaaataaaatttaggttcaagataaaagaaaagattaaaagcaagattgctccaatggaaaagtcgagaagagcacaactaaaacttttcgcaaatttttttcttcaaaatttcagtatgttacactggattacccatagggccaagaaagtgttgggtgtcgacatgaagtacatgaatcaagatttggcttctaaggtgtngaaacaacaaaagccgaaagagcgggaaaccctaaggcctaagaaagaactgtacacgaaa

SEQ ID NO: 48283 - DNA, 342 bp, Oryza sativa
  unsure (1)..(342): unsure at all n locations
ttcccgaacgcgaactgatctattgcaccgtgcgcctcctgcagccgcccaggccgaatctgaccgattggtgatctttatggtctttcttatcccgaattttacgcttaatatggggaaaacagaaagggcatactaccctatggctaaataagaaggaagaaatgggctttcggtgcataatcaagaaaaaaatttcatcaacttttacattatagtgtatagcaatctcaatattaaaattctcattaacccatttaatcgacaatcgtaatgtgtagcgagagataagcctatcttaccaagcaactgatattnttnttataaaactacaattatagt

SEQ ID NO: 48284 - DNA, 473 bp, Oryza sativa
  unsure (1)..(473): unsure at all n locations
ntgctgctctactgcccctacctattcgcagggttcaatctttcgtttgtgttagatatggcaatatttctgaaattttgaacaaaatttagtcaaatttgaaaaaatattgccgaatttcatgaaagtttttaaaaaattcggccaaaataatatcgtataaggggcgggggttccataggattgaaattccgaaattttgaaccctacctaatcttagtgttatattatattcctcatggtttgttggcttataagccagacccaaaattttaattttcaggcttaattttagattattttagacttatttatttatttttttaccttaacttttaaactgctaaagggaaagatacacgaggccaagccggctatcaacatccttaggtcatatccggtttcacctaaactggaacctattaagctntcaaaagtatagtttctttaaaacaattttttatcatccttac

SEQ ID NO: 48285 - DNA, 465 bp, Oryza sativa
  unsure (1)..(465): unsure at all n locations
agcttcgcagcggcagcaagccaagccgatgtgttatgagctctgccgcatccacctcaatctctctcaccgaataactgatcaagccgccgccaacagcaaaagagacggccgcctccgcccaagagccgcacaacacttcgcctcctccaccgccgtcgcccgggcgcaaacgcggcgaataccctagctttcaccggctccaccaaatcccgagaattcgcccgcacccgagttccttggtccgaaattgaggtgaccatcgtcttctacccgcgataaatctcctttaccctctctttntactggcaagatcaccgtagctcgccggagcgactcccgcccacccgttcccccgccggcgggaagggaacgnggtggaattcacagttaagatgcataaatgcattggtagatagaataactccanggggcacagctaggatagtactctattactttaac

SEQ ID NO: 48286 - DNA, 454 bp, Oryza sativa
  unsure (1)..(454): unsure at all n locations
acccaacgttcggactccatccaaacattttgaactttatggtcggntcacggtgcgttatcagtccgccacttgaagtaactctgactgtgtcaatccattgtacgaaatgacatttccttacatcctcctatgtacatccattatgggatagttaagttaatgatagtactgaggagtgatgaaaagaatagttgttattaccacgaaatcatcgtcgacaatgtctggacacacgaaacacctttgtcctcgagttcggtgccttacggaccttatgacctgacaacggtcaccacaacgacactccggacgctcacgccacgtggggagtcctatgggatttacgtgccattctaaagcctcagcagcaattcgacgttcaagctcatacttccaccttatgtagtccgatcttgttcactacgtgtgtaagcacgggttctgacgtttg

SEQ ID NO: 48287 - DNA, 455 bp, Oryza sativa
gtcacctgccgcgtgcaagctttggattgctctgaatttaacctgacttgtggtctgatactcacatgagaattgtgttaagatgcatatgtttgtgaatttgtacaaaattttgcattctttgtcattgcagatgtcttgggatgtctgtcttatgtttatacttacacaatcaactccgctagaccaccatcgacttcttagtattggcgctcttagaattactcatttttgtcagaatgacgcgctgcattttattgtattattggtgcatggcgtttttagcattatggactctggatcattctaaatgatatataccttgtctcttgttatcagaactgttctaactcatttgcattcataattatctgcaccggaatttgctttagttggaggaatcctttctaagtattattacctttcctttgttcagctagcggactgcagtcctg

SEQ ID NO: 48288 - DNA, 460 bp, Oryza sativa
gtggtgttaattagcatcttataccatgcgtgcacttgtcttgtatagtttccttttagctcttccgaacaatgaaggtttctcatgcaagcaagtaatgctactgatggggattttttttgttgtctcctacagtagatttcagctgcattgtcaagcaagagtactcctttctgttgcttctacctcgcacattcaatccgtattaacatctataaccaatctgttggtagttaacacagcagatgtactccattcttatcagaagaaccctcttatcacaatcaatgatgttttttctttaacttggccatgttctttcaatatttatccttccagatatttctacagattatttgctccacgtttctaaaaatacaatttttataaaaaaaaaactttttctaccatattgcttctattctaagctatttgcaacttttttaaaaaataataattg

SEQ ID NO: 48289 - DNA, 385 bp, Oryza sativa
  unsure (1)..(385): unsure at all n locations
gcttactattccactttcttggacgatcgtcttatatagatagtggcaatggtggacgcggaccgtccaatggccggcttgtccttggcagagcttctgcggttgtccatgcatgtcatggcggcgcccttgttgatgtcggcctcaccgcaccatgggctccactcgttccacgcgctggcgagcataatgctgtcgcatggctgtgctcccggngctatctgacacagagcaactgtgcaccgataccgagatgggattcacgttcccacccgatctatgatctacgggcggngttctccatggggctcccgtccatgcctgcgttccatgactagcagacatgcgtcacgctgcgtttgggtcacgctgcccatcaatgtcg

SEQ ID NO: 48290 - DNA, 459 bp, Oryza sativa
  unsure (1)..(459): unsure at all n locations
tctgcaatgtaataccagctaattgcgagtttcagtttctttttattcttctgtntccttgaaaaaacaatttgccccttatcagataccattagctagaaatctactgggctgattgaggaaaatgaactacggggattcgcttctagcatatagcgagttgtaaaatttccatgcaatagttccagcataactattccaaggatctcaatgttttagataacttgagttaatgtccatgagtttgtcaaacatgcaagcactactacattgatcgcacctaacattcagtatcccaatatgaagtacaagagtacaacagctggaaaaaatgaacaaattcaaatacagcagagaaaaaacgagagaaaaaagttctctctctttatgaaaaaaaacaacaactacgtccaagctttacaatggtttagacttcagacaccttaaacaacaactaca

SEQ ID NO: 48291 - DNA, 475 bp, Oryza sativa
  unsure (1)..(475): unsure at all n locations
agcttctacatatatatgtttcactatttcttttatgtattttntttctgaaaacttttttattacatatatatgagagaggaatcactcacacaaaagataatagcacaaaaataatttatgcagcatgtgaaaaatgatcataaaaagaacaacacaagaagtttcatattttttttgaattttctagaggggtcaatccattgtcaacatttacatgtatctaagggtattttaggtattttcaaagtatttggttaaatggtatattatattgtagaaacaactgataaactcattggcatactacagaaaagggccaaaggctatgttaaatattttagattctctctaacattaatagaagagttccgctagaagaattgagaggattacagtctctacatgctctctagaacanaagatttgaactcaccaaaatccccacagattaagctcatatgtaaagtactta

SEQ ID NO: 48292 - DNA, 471 bp, Oryza sativa
  unsure (1)..(471): unsure at all n locations
cgcttggctngcctggagggcgttcggttggcgacgatctgtaatcttatgccaataatacttgaatctgacaatgccgatgtcgttgctggactgaatataacacaagcgtcaagagcagaatggggaggcataattgccgagataagagtggcaatgcaatgcttgttgcaggtgcaagtgcacaaagtgaagagagattcaaatagaggatagctcttatgttagctcagatggttatgacctcaggagttgaagcggagtggaggttatgcgctccgactgaaattctagagctgttaaatcaggaatgtaatcctatgttttatcattaataaaatctctctttacggtcaaaaattctttttaacttatacaagtgttttaaaaaaactaaactatagctagttaacgtatattcacagttaaattcgtttttcattgaacacgtagacttaaaacataccttga

SEQ ID NO: 48293 - DNA, 470 bp, Oryza sativa
  unsure (1)..(470): unsure at all n locations
agcttgctgaagcaaatatgctttctgttttttatgcacttatgngaataaccaaaatatataactagcaatgtagactagagcaggcgaggaattcagttatggaatattctcttcagtttatcaagagcatatctgttacacatgcccatgttttatgaataaaacatcaggaaatatttcacatatgcctgctgtatatcaaaggggatgcctcanaactgcattcctaattgcatgttttcccaaattccaaaataatatgtgtctacaagaaaggttatatgcattggctggcaacagttaatgattccagtcaaaaacaggtaatgaatgagtttattctgaataacaattatctaatggtcatgaacaaactacctggtccatgacataagccattgctaaagtcgagaatcataagtgcctattttccatcagtactaactgacatactatagcttgtctca

SEQ ID NO: 48294 - DNA, 464 bp, Oryza sativa
  unsure (1)..(464): unsure at all n locations
taggtatgcagctggtgaagggaattcagaatcatcaattggttaaatctcaggttctagcagtgggaagatggatgcaactcatggattgcagattattggtatgagtgctactatgcccaatgttgcagctgtagctgattggcttcaagtaagagaacttctgtaatttttgttcatactattatctgtttttttaagaaatgctgttatctaccataaacatgcttgcagtgtaatatcttacggtcattcaccatcattttgacaagaataatgtattatttaaccaaactgtctaatgaaatacagtagtaagtagtaacaagttatgtatgctgatttgctgaacttcaaagtttcacatgtatattttttgtgagttngatttccttttaatgataacaccaccatacntttgattattatgctgaaatgaaatagtgtactgtgctgaatgtaca

SEQ ID NO: 48295 - DNA, 461 bp, Oryza sativa
  unsure (1)..(461): unsure at all n locations
taaacgatactgattccatctagtatcttaatttttatagtatctcgancctactatntagtactacacgatcctatgaaatcttaggtggtatcccgattctacgatccctacgatattataaaatattatttaaaataatatggtttgaaaataatgtaaataaataggctcaagtttatataaaaatcagttaaatatatcaaaaccaacatggtttctcttgataaatgtctctatttgcatgtcatatgttattactacatttttttaatataggatggctatatataattaatataaatattaactaaactaaaaaaaagaaaatctcatagtatcctgatcctacgatacaatactactttgagcaaaacaatactacctatgatcccgatcctgacaaccttgctccatggttgaagaggctttaattataaagcttataattgctctatttt

SEQ ID NO: 48296 - DNA, 451 bp, Oryza sativa
  unsure (1)..(451): unsure at all n locations
gcttgtatatattactccctccatcccacaatatatctatctgtctagttcaagaactagaagactagaaaggtagctattatctctgcattctgtttacacaatttcttttgtgtaaagttattctgatgatatagtgctttttaattactacattcagatctaaccagctttagtatttcaaatggtgtcaatcgcaactntgtacgagcgcccatcgaaatatcaatacagaaccatactccaatataagcacacaaaaccaaaatgtctaacaagggaaggctaaagacaataggagcgcacctgtcttggtttggtaataagatctactgcatactctacatcggtatcaccattttcttcatcgacatgatcattacataaatcatcaccatcccaaggttcagatgggatgaagtcatcaatattctcccttgaaccacctact

SEQ ID NO: 48297 - DNA, 408 bp, Oryza sativa
  unsure (1)..(408): unsure at all n locations
gccttctgtttgtcggaagagtcaatagagataaaagccatatgatttagtgcattttcatcttaaaagaaaatatgcatatgaagttaaattaggagttcttaacccattgatcattttctaagaaatggtatgctctttccccaaaaaggctatttgcagcataggtaccacaaatcaactataattttcacaacaatttagctggatacatgagattttatatgtgtaagttgaagctggaaaaacaaatttcactgtacaatttaatttttttatttcagatttcttctccgaggaatctattactttctctcaatatcaagtttagacttggttgattttagataagcatgatcttaattatnttctgtggtaaaaagatgataaanaatatctcacaaacct

SEQ ID NO: 48298 - DNA, 425 bp, Oryza sativa
  unsure (1)..(425): unsure at all n locations
cactcaaatctagattctatcttgtgagnatgagagattagatgagagtgtatgagtgttttggagatggcttgaagattatgtttgattgagcactttggataccttgtgggctgtcacttgggcttattactcttggagatcttctcctataaggttacgcgtcgcccgtaagcttctaaagatcttgtggatgtcccgggaaagtttgtgaaggttttcctcacctccgcaaggaaacgaggtaagtgagtaaagtttcttgtgctgagttntcagaggttgtcctatgtagagcaacttgcacttgtggtcttttctagaaagaattgtgactcggatcttggtggcactcaattctagaaaacgacctacaagtgttgagttgaagactgtggacctcttctgggatctttgcataagtg

SEQ ID NO: 48299 - DNA, 478 bp, Oryza sativa
  unsure (1)..(478): unsure at all n locations
aaaactaagctctgttgattacaccacacccatgatgcttataataattctaatnttatgcaagctaagtctttgaaattgatgccaaacctcagcggacatgattccatggtggcactggatactatctggtgactggctgaaaccactgctggcttctatgaacgccccgccgtcggttattccaacagtctgaatcagtgattgcttangggcatccttggtaggtataaagatggaattcattggattatctgacatccctntacccacatgttcgttgcgaaggactacagaaatgttatgctttttaagttcctttctgggtccaattccactaagcaacaatagctggngactgccaattgcaccagcagagatgataatctcgctgtctctgtttctggtaaggaaggcatgctgctgccccccattctcatcctngaattcaacaccaatggtcctaggcttcctgtgc

SEQ ID NO: 48300 - DNA, 427 bp, Oryza sativa
acctgcggcatgcaagctctgatatatacattggtcgatcaactgattgtttcatggaatcagacaacttgtcgacgacatcgctggccaaccacagcattgtacgtacgtcaagccttgcatcacccggtgtccgggcctacgactacgctttgttcttcttccaactttgccaatctctttctctttttttcgaatatgtgtcacaagctactaaatagtaagttcttttaaatttttctattgaaaagctgcttttaaaaaaatattaatcaaatttctaaaaaaataaactaatacctaattaataattaattatatactaattctttggtgcgttttccgtgtcgaaaccttgactcccgaactcagcccggaggtcgacaagaccagccgggcatacagtctttctccccttggtgtgtac

SEQ ID NO: 48301 - DNA, 292 bp, Oryza sativa
tacaaaagactcacacatagttattctttgcattaagatgcatgtatcatcttgatataattagctgaatcaataaattagagctgaactttgattaactaatgatattaaaggattgcgacaatagtcttattactcacacaaatacacaatgctgaggtcagaggtattgataggtagtaatacactgctcttgctgatatatagctctgtcttgtttttttttattgagaacatctgagcgcttgtttatagcttcggtgtatattcgcctatttgatgggtccacaca

SEQ ID NO: 48302 - DNA, 322 bp, Oryza sativa
  unsure (1)..(322): unsure at all n locations
ctcgtcaactgtgcatgcatatatggtcttcttaagatgctcaaccatgacatctcttgcttcttcgggccatgcatcatccaattgtgtcttaaattcttcaataagatagtccacacagtatccgtggtgactgtcatggaaaaccaaaggcacttcatcccatactccattttctccattcgatatgaatgttatggcacgggaagctgacacagaagatttaagttgctcaagacaccaatgccagtgttcactgctctcatcattcactacagcaaatgcgactgggaacacatcacctncactatctacagaagtg

SEQ ID NO: 48303 - DNA, 365 bp, Oryza sativa
actgttacaactggttcctgagatatctttccttctcttgatctggaagatatatcttctctgaatcacgatatgtgcctggtggtggatgattaccgcgcatacatgcagcttggaaataatctgcaattactcgcgtttctgattcatgtagtggcatatgaatccccctcggatcttgacagattcctgaacaataccgaaaacgaaaggaactgcattattgcttcaagatatcacccccccccccctcctgtgaaatcttgatcacgacatgcatatatacaacctatatctatcgtattttgtgacatccattatgaaacacaccctatagaaaaatgcctagaatactcagaacacaa

SEQ ID NO: 48304 - DNA, 319 bp, Oryza sativa
  unsure (1)..(319): unsure at all n locations
ctgcagcttgcattatcttctggtggtctagctgtctattatattaattcccctatgataggttatcactatgatttctggtattgcttctgcacacgatgtttcctaagtcaacacatgagactntntcccagaagctgtaccagacatntcataagcacacacggtttgtcaaaccanagctatctctcacagagtttacaatctgtcactacgctggagagggtagattttctcatcgaattcaattctcatgatcgtatcagttcttggtttaaactggagctatgctttccgtatccaggtgttgtatcaatct

SEQ ID NO: 48305 - DNA, 393 bp, Oryza sativa
  unsure (1)..(393): unsure at all n locations
ctggccatggcttgcaggttctccttctcaagagatgcatctattttataatgatgntgntncttgacaactgtctataacagcatcttaatggccagagggacaaggttcacgctcgataggaggttgtgatggtggttctttggagagaaattcacgagtctcgccagaatcttttttaatgaattgaagatcatcctgttctagaatagactcaggggaatcatgaatcagaaccgccattacttcctctatcagcatattattatggaggatgcctgtctaggttttctcataatcagtatgaggatcatccctgaatatggagcgcaaccctgagcttgaatttctttggaatccggcgatggctccacagaggactctctattcaga

SEQ ID NO: 48306 - DNA, 276 bp, Oryza sativa
  unsure (1)..(276): unsure at all n locations
acacaaacatgatgggcatacaatcataaaaccntcaatagtgatggggcagcaaaatcaagacgagttaaaaaacaacattgacaaccatgggccgctggtatggcagggaaacatttcaaccactagggtggataccgggtgaatatctaccgcccttattacaagccacttaaatggttatagaaaaatgtctcagaaaaataacacgatagataaaatgaaaataacacttcaaaatataccagttcacgtcagattcgataagactagtta

SEQ ID NO: 48307 - DNA, 474 bp, Oryza sativa
  unsure (1)..(474): unsure at all n locations
tgtntctttntgaagtataaaaggagtcgtataatatatctttataataactcacatgctaacttgagatgcaatatggacttctaattgcagctcatgattttctaaaaaatttatccaagcgaattttaccctactaaaccgtaaaacaataataaaattaaaatagcatttaccgttgcaacgctcgagcatttttttctagtcaaaataaatatgtgggatgtgggattcgaactcaagatctctcacctcagtcctcacgcgtgttaccatcctacacagtacacacatctgacttggatacatatattttctttttgaactaaccggtactaaaagtatcctccaacattagtctcggttggttttaccaaccagtactaaagatgtatttttagtatcggttggtgacaccaaccgggacaaaaaaatgtntctagggactttggactttanagcccgtactaaaag

SEQ ID NO: 48308 - DNA, 455 bp, Oryza sativa
  unsure (1)..(455): unsure at all n locations
agcttataatattctcatagaaagaggggattgtttgctctaaatacttgtgaaaattttctagtgattatatacaaatcggaggtgtctaaaaagtaataacttcctccttcaatgtttttttgttggtatattacttatggagctatgtttcacacatttttctttctccaaaactttgttgtaagttgatgaaagagaaaatttgtgtggggaagaagaatatatagaagatttattctcatagtttaaaatatgatgaaaattaatcttaaacaacagaaaacacactaaattgaaaatctagagaagtcaacattaatattagtctagaactccaaaaatngttaataagaatcgcttgtcgaaagaagttttaattattttatcattactgtttgactgtcattattgtacgaaaatttatttatgtacgaattttttttccttcatgt

SEQ ID NO: 48309 - DNA, 387 bp, Oryza sativa
  unsure (1)..(387): unsure at all n locations
gggangccaagcttcgcagtatatctattgataagcaacatcacttaggggtttaactctttgatcgtcctagtgacttggtagatttggaaacactaaaaaaaggttgcgtctttaaagggacctctcatattaccaatgttcttatgcaagatactctcttcgtccccatattcttgacgttctgagatttgttaaccaaattatcttcttattgttatgactaaattacccctatttatttaattgagttgtcatatcaataagtcatcatacactcaacacgttaccaataatccctaattctattaattaatgacatctttgaacactcattggcatatgacttagatataatggacagatgcctttcctttctaatcagtt

SEQ ID NO: 48310 - DNA, 212 bp, Oryza sativa
agcttaatcgccgcgatatttattaacttatttgattaatttatttaatttatggagtccaatggcgtctgcggcggcgcggcgcggtcgctcacggcgtctaagcggctgctggcgcggagcgcgagcaccactgcgtcgcgcgccggcggataatatatatattattttaattacgattttaacgtaaagtgattataatcataattaca

SEQ ID NO: 48311 - DNA, 301 bp, Oryza sativa
  unsure (1)..(301): unsure at all n locations
gcgaattccatcgagtggtggagtangatttgtatctcttacaggccatgttatgtgaggattgatccttctatgtggcatgaggtatccctgggtcagcttgggaaaggctttgtcacgaacctctgacaccggccagtgtctggagtaagtttgtgtcttgtgggtaaagtgtacccctctgtcaaggttaacttactgatcgaacatccgtgcccacagtcatgggctgatgtgaggtggatccctttgcttagatctcgttgcctgtgctttgcgataagacgtagtggtgtgcgaa

SEQ ID NO: 48312 - DNA, 468 bp, Oryza sativa
  unsure (1)..(468): unsure at all n locations
tgcacgcatgcaagcttcagattatttatcctaaacttcagcgttattcttatgggtttctggccgttgaacaccgcatctggtctgacaaatatgaggtcttttccactgtggactttccaagatgttacgcaggctccaaatagataaatttcagcctcacttcatgcataaaatgagcacataattaacaaattgaaaaaaagtacaaaacctgataacacacctttgttgtgtcaattgaaagaaaccgatagtaacttgaaactttgaagggtaagttaggaggtacccaagatcccaaattatacaaatctggaccattcaatattatttcaagattatccaactctagcaattcatggctcgtagtgttattntgtactatctgactaatcacacagcacaatggagaagattggacttgaatggcaagttgcacaatacatcattgagacatctgtgtgt

SEQ ID NO: 48313 - DNA, 471 bp, Oryza sativa
  unsure (1)..(471): unsure at all n locations
tgtcattgtaccatgaaccagccatggtgattgacctgttatgcanttcttgagaatattataagaatttggtatatgcttgagtgttgagtgccttcaaaagctctacatatctatagattattacgaactaacactttcttgtgagtttcttttgcttgctaaccatgtcaggtacaagttccgatgaaccaacactggagaatctagcgcataaactgaagggcatggaaaattggtatgaagagttgatgcgtaatagtaaatcatacaaggaaagcacagataaacatttaaaaaccttaagtgaaaacctagtgaaagtagtggatcaaattgagcaaatgaatcaatcgcataaacaattaactgaaaacatccagaatatgaatattggacatgaaaatattgtgcgatgcatnggtttacttgagactgcacgtgaagaaggtgcacgtgccactgctcatc

SEQ ID NO: 48314 - DNA, 456 bp, Oryza sativa
  unsure (1)..(456): unsure at all n locations
gacacatgaaactaagctatggcttatagtacaacatttaaatagtatttgtggttctcctcttgtcttggaatgaccctagcaactgatggtggcaacctagaaatcaaattatcctctggatatttctcagccaaatatgatactataaaactaatgaaaccatntacattactggagctactcccttcactgcttcctgatatattcgaaaatcttccaccataatagtttgttagagtaatggttggacccatgcctctaactctacccctatgatcctttccaaacacttctaacatagcttgttcaaaatcagcttcactgagttcttggccatccactcttttctcagccaatttcatatatacttcattctacgttggaaaaaatngtagactcttaatgtagtgtattctgtttacaaagagttatataagaaaagcaatatggata

SEQ ID NO: 48315 - DNA, 442 bp, Oryza sativa
  unsure (1)..(442): unsure at all n locations
agctagaaacttttgctacgtaccgagtgtattgtttatatgaaacaaagacctggttgtggttcaggagttgctactatgctgcatatctcaaagatatacgtgcaaggtatatgtactctctctcggattaaataatatttggcaatgcaaggtatatgtactctctctcggattaaataatatttggcacggcggcttacccttacccctgatttccacgagacactgcttcttcttgccttgggcggttgaaagacataacaaccattagagcaccaatcacccgatctgtttcaacttcttattccggaagttttcaaatgatattgtaaaagaaagccaagcttctcaaatgattcacttagtctctctaaatgtatcaaccctgaattcctaccacatgttgccttgtgattcctactctanggttatgtgtgga

SEQ ID NO: 48316 - DNA, 392 bp, Oryza sativa
  unsure (1)..(392): unsure at all n locations
atactaagctcgaacctttgctcggccggngaaagactttagttattattcnggcngcngncaggagttgctactatgctacatatctcaaagatacacgtgcaagatatatgtactctctcttatgttaaataatgtttggcatgggggcttacccttacccctgattcccacgatacactgcttatccttgccttggcggttgacagacattacatctatttaagcacccatcatccgatctttttcaactcttgtacctgaagttttcaaatgactttgtataataaaaccaagttccttaattgatatactcattctctcttagtgttatataaataaattcctaccagatgttaacttaactgttcctactctaaagttttagatat

SEQ ID NO: 48317 - DNA, 385 bp, Oryza sativa
agcttgtaagcatggtcaactttgttaccaggtgggtatttttgttgtgctacctaatcttggaggctcagaggttacaaaagccaaaaatatcttgatgtttatagttatatgccaatatgtgcctcggctgatccgaataaggccactgtatctccaaatcacaaggtctgctggggtaattacagagacaccatgggctggtgctgttttgaaccttttaatttacttgctcgccagtcatgtaagtattctattcaataactctggatagtcaacaatgccaaatcaactgtcctttgctagagcaatatttaactgcaatagtggaaagctgaaaacatgatcaatttcctgtaaagaatacatgaatctattattgatc

SEQ ID NO: 48318 - DNA, 329 bp, Oryza sativa
  unsure (1)..(329): unsure at all n locations
tatgctcgcattggcatgggccagtgaagtaggaattcgtactacgcttcngcaacaaacttatggccgcgaatcatagactcatctattggagaatcaagtcgccaatatgatgactgctgctatatgcagatgatgaaatgcaactatgccatgaagcatatccctacgtgaccccgcctacgaccgtgcttgcctggccatcattgtattcaccaggcacgccgactatctctcctttctcctctacgacaccgagtccactgtcccctacggactgtctgtcccgccgtacatctgattggctgcgccaccgacgatgcacacag

SEQ ID NO: 48319 - DNA, 417 bp, Oryza sativa
  unsure (1)..(417): unsure at all n locations
gcttaagctgcagctggttttcttcatgaatttatgtacagagcagccggcggtaacacggcggcagctgctgctgctgcttctnctcctcctcctcctcctcacctcctctactctctgcagccgcgtgtccgcgagtgcgggtgcgagagcgagaagcaatggcggcggcagcagcacgagagtggtgaggcatctcccggggttcgacgggccgctcccgttcgagctggagaccgggtacgtggaggtggaccacatcgccggcgtccgcctcttctactacttcatccgctcggagcgccgccccgccgccgacgacgaccccctcctgctctggctcaccggcggccgcgggtgctccgccttctccggcctcgtctacgaggtcggacccctcaccttcgacctcaccat

SEQ ID NO: 48320 - DNA, 472 bp, Oryza sativa
tcggacactaacaaatgttaattaaccatacaatatgcattcttgccaatcagggatcttttcatgttggatcatccctgttggaaataatcagttccgttccagtccttcaatatatacaaacagagcatataatatgtgtatataacatagcactcaatggttcatcacaatcaattaacctgcgggataatgtcgcggctattattacatgaaaccacatctggtggtccaaattaatcacacacacacaaatccgaatcctcgatgaattgagcaccacccatatgctcaaagctagcacacacactgatcaactcaatgcatgcccacacatgcatgcaggtgattgatcgagatgaaattatgctgctcaactcgagcaaacccaacttgatctcgaccgatatcctcacaggaccaaagctgcattggccacagctggtattatgctcaagaaacaagcaagaag

SEQ ID NO: 48321 - DNA, 420 bp, Oryza sativa
  unsure (1)..(420): unsure at all n locations
tcacctgccgcatgcaagcttcgcgaggagcacgtcgttcgagctatctttcttttacgacgcgcgcattgcatcaaaatttcacctagaacaaggcagatcacataaagagagtgacagagagatacacttagcacgagagaagagagatcgttacggccaccttgagaaaggcgagcgggtccgggccgaagagctccttgatctggggatgcttggccaggatctccctgcgccgcgtcgcgtgcggctcgtccgtgtacgaccagaagaagtccgtcgccatcaccccttcctcctcccgtacatccnccgccgcggcgcccattgtcacccctaacccccgcccgcaaccgcaagcaaaagcaaggatccgatcgacaaacggcggcgcgtctacctccacttctctgagacagc

SEQ ID NO: 48322 - DNA, 459 bp, Oryza sativa
  unsure (1)..(459): unsure at all n locations
cactcatagttcctggctgatctntaacctttgtttacattccaatgggcagaaagattaaccaacgaagccgtgacggtatgcactacgattaaaggtacatgtaggaatttgaagacatctgaaagtctaaatcatcaggttgaactttaaaggaatacaagtcaactacgcaagaagcttacacagaatcaacacatggtcacggtcgtgaacaatccatccattggccaagatcagggttcgatccccactaccagttcactgaagaagccttttattcagaaactggtggctcaatttcagttcagagctaagcaatcattttttggggcaatattctaatatgtaaccaagtatataattcccaataactcatataaagctatatactactactagctagagattggcactntcaagataaagtgaccaacttatcaatcagcaaccagttgt

SEQ ID NO: 48323 - DNA, 448 bp, Oryza sativa
  unsure (1)..(448): unsure at all n locations
ctgcagcttctgtctatagtacatcacataatatttgttgtgttagattcaacggtgcaaattaagttttggcgtgtcacatcggatattatatagggtgtcgcatgtgggcactaataaaaaaactaattacagaatccgtcagcaaactgcgagacgaatttattaagcctaattaatccgtcattaacaaatgtttactgtaacaccatattgtcaagtcatgtagcaattatgcttaaaaaattcatcttacatattagtcgcagactgtgcaattagttattttgttagcctatatttaatacttcatacagatgtttaaacattcgatgtgacaaggtgtaaaattttggggtgtgatgtaaacaccccctatatatataccgtttgtanggctggtcccctctccaaaaagtataanggacagtgctactacaatgatgct

SEQ ID NO: 48324 - DNA, 462 bp, Oryza sativa
  unsure (1)..(462): unsure at all n locations
ccctttaaaaaagctatataccgngatattttattttatcaactatataatngcaatttattttgttatgacgacttatttcatcattaattntatttgacccacgacttatattcttcatatttacatatttttattaagattaatgatcaaatgttatgttcataagtcaacagcaccattcatttaaaaatagaatgaataacaatccactgtagtactctagaggattgtatctcttaatgaacttaacattacgnnngnnnggattgtatctcttaattaacttaacattattaaattgtctcactactgttgatgcgaaaaacacacactggcctgtgagatctatttaactccagtgcaggtcctaaatcttgctcttgggttcaaacaganagggcagacaacatatgtcaaacagaaagcctaatatactttaatgtgataacatcttaatat

SEQ ID NO: 48325 - DNA, 413 bp, Oryza sativa
  unsure (1)..(413): unsure at all n locations
agcttggattggtttttttggtgttactgtagtagtgttgtacacttgttctataggaaagtatcattggtaagatttttgagtaactgtaatttttgtgagattgtaatataaagaaggtatatatcgagttgagttctgtttatcgagtaagcatctccactccatctgtattttaatgttgtgtttaccatacttccagcttatgtaggccttaaagtatgaaataagaaatcatatgatgtggaatcacccctgatataatccaaggaatgcagagtcgtaaacatactatagtacctcattgataatcancgtgctcttatgttttagtggtggattcagcgatactatcgagcccgaacgcatttttcaatgattaacccgattttacgaacatcgacgtggtccgt

SEQ ID NO: 48326 - DNA, 439 bp, Oryza sativa
  unsure (1)..(439): unsure at all n locations
aaagaanagaagaagaaaatattgggttggtggtgcatgccagcactcttacagatcatcatggcttgctatttagaaatacctagctattgactagttcgttgttgattaatttgttaatccgttcctggacaggcctgcagctacaacaccggaagatactttgtttacacccaagagagattaaccttttgtgtattgggttggtggttcatgcatgctagcagccctaagcaagagaacgtgcaaaccggtatatagaaatgaagatgctcttatgggtgaatcatgagcacgtaggagatttaatatgatcaagtcaaccaaaagttgagcggagttgcagcaatattaccagttagtgcatcaatatattcggtcgattactgctgcttgacggcaatattttcttcaattactagatgatttcacatgtttt

SEQ ID NO: 48327 - DNA, 448 bp, Oryza sativa
  unsure (1)..(448): unsure at all n locations
tattcttcgtaaaaaaaattgtcatgtatagaacaatgacgtgactacacagctagtgatagctggtttgtctaaatcacctaccactcnccatctatgagagaccctatctacctatactttaaataaaantttctattaaactggttatccaatctacgatccgattacaccgttgtgttcgtaacaattaaatctttataagaagatctcacatgattatattttgatgaaaaattataaattacttttataatatatgtaaattacttctagattctactaaattacttcttcgacatataaaagtaaattcaataaagcttaaaagtaatttacatatattatagaagtgatttataacaaaaagaaagtaactttaatgcatgaacttttttcattggacgtgactacacaactagtggtagctgttttgtactccatctag

SEQ ID NO: 48328 - DNA, 470 bp, Oryza sativa
  unsure (1)..(470): unsure at all n locations
tggcaccctcagcacagaccttgtctctaaaatgggtctattataaatcatacataaagcatacacaaacttataaaatgcatataaagtacatctcaactcattttggagcaaactcagtttctacagatccaccaacttatgttctcctataaaacaaaatgaaatagtatacatactatacatcaaatgcctctaaaactattacctttaaatgactagttttagataagctgaattttagaagttcatataaaattcatcttagatcctttntgagtaaacccaagttttgtagaatcaccaaaacatatactaagttctaaaataaaattatatacttactgtatgataaaagcctctaaatacttatgtaagtaataaccaacatagagcaaccttaaattgtaaaatttgtagaaaattcatctttagtctaaatgaagtgaaccatatatctatagaaccag

SEQ ID NO: 48329 - DNA, 351 bp, Oryza sativa
  unsure (1)..(351): unsure at all n locations
atcttaagncaccgcagctgcagcttctaaanactatagtcctatttttatttgttggtccacgcatcatcacgaccagacataaacgtttcctgcttcttcgcatcggtacgcacgtcctcatgggcgtaacgcgcgaggcggttgaactcatgcaaatactctataactgttttggttccttgttgcaaggaacggaactctctctatttttgtgccacaattccctcgggaacctgtgctttattgaaactatgacgaaactctgtccaagtaacctctgccccagttggacgggtcaccatgtagttgatccaccaaatagaagcgggaccttgtaactggtgtgta

SEQ ID NO: 48330 - DNA, 429 bp, Oryza sativa
acacctgcacgcgtgccagcttgaatggtcgatcatcaatgatatgcttctttgtgaggaatgggcctctattgaagaagatgatatatcacttgcagcaatgaaccaaagaggaggggatggaactgctgtggccgaagaggatgagatatcacttgcagcaatgaatgaacgaggagaggatggaaccactgtgacggaaaagggggaagcctcatttccaacgttgtgtgtgctgccctctttgaagagggtggacattgataactgccccaagctgagggctctcccacaacagcttggacacgaggccaccagtttgaaagagctctcccttgtagcagcaagctgcttgaagtcggagaaagaccttccatccctatatggcttcctttctgtatgtagatgtgaaggcctgtagagggttac

SEQ ID NO: 48331 - DNA, 472 bp, Oryza sativa
  unsure (1)..(472): unsure at all n locations
actcagctagcatatgctcatcgataaaattcagaattttctctctcatcacttgctatattttntaaattcgattaacaatatacaaaagaatttctgaacttcgcatatttgtacatataagaaatttaaattaattttatgataaaatcccatagaaaatttgatattaggacatgaacattcagaatataaagaattcaagtgcttataacaactttcaggtattttgaaaccggacagtacttaattttattttaacacccagaatttgatattttaaagtacaaattcgttttgatgcatttcagtttctttccgtactactagtttttgtagaacttttattggtagcgaattcaaataacggactgctacagaacggtatcccgtccggactagatacttgataatgtcgtatcaacaccaatgttaatgtcactatatacgtacagttcggtaccatgcatat

SEQ ID NO: 48332 - DNA, 402 bp, Oryza sativa
atccttgacagcagcgacagaaccaacctctctgagacagctccaactgagaagaactgtcactctggtgcgggggaaaagagcatgactgagtattacccactatactcatcaagtcataccggaagaggaggtatgatgcacgatatatcctagggggctaaaggttcttttgcataaagctagcatttataagcataagttgacagccgtataacagttgtagcaatatagcagtattaaccaatcactgtccaatgctacaccacgttgcagcaggcccaaccaaccacctgaactacaccagttcattaagctaaactaggggtgagactaatcacggagaatgtggtcgaccgctcattaccgcgggcacggctattagaatagattactctgatc

SEQ ID NO: 48333 - DNA, 469 bp, Oryza sativa
  unsure (1)..(469): unsure at all n locations
tganaagacccatggtgctacatgtcaactctccctttttcttttctctttctcacaatatcttctgcaagccacagaggaaagcgatgcatctgctctttctgctccgtcaggatcttggttcgaaagcgcttcttgctttgcctcggcggcgcagaaggcccaggatgccaacgctgatggccacctatgcatgggagtgacaagagggcagtgatagtgggcaaacgcttctccatgtgcagagggcccaggaggagtggcacacgctaggaggagtcggcgcatgtggggcgccgcagagaattggtggtggtgctttggacactagtacagatccttccatctgtgacggcccataacaagactggaatntgcgggccgtcacatagaagtaatcttaatcgggccgatatggtcgcacagccatggtatatcggcataaaactaaagcccgtcacagatgaca

SEQ ID NO: 48334 - DNA, 441 bp, Oryza sativa
  unsure (1)..(441): unsure at all n locations
gagcttaaggtgttcactgaactctgagatatttttcttcaccgtatttctatatntttttaagacatggagccataagtgaacattttgattctttctgaanatatctgcgaacacgtttgctgtgatgaatgagccaccgagcaatactgttagctcatttgctatagataccaattgaggatgctcctctgggttagtgcttccaaatgcgagtaccttgaagaggtaactatactcctcatgtgacaaactatttagatgaattggccgtactgttccaaaccttgatatcttctcaatcctacttacaattataatcctgcttcctctgcccatatttgtgcacgatgcataaaatttcttccaattgtcatcatncgtatctgctgtgaactcaaccacaaccaaatcccttctttcagtgaaagttcacactcc

SEQ ID NO: 48335 - DNA, 476 bp, Oryza sativa
actaagcttacaaagcgaggttgagtccgcgccgaagaggcgcgattatgacattctcacaaaggcgctcggaaccaaagaacatcctggccggactaggggaattggtagcgatgtgccctggaagcatggactcccgaagtacagctcccaatacaggaaacggaaagtctccaaggaagagagggacgctcgtttgaaggccgaacttaaggttgagatcattcaagaactagaagctagcatgaacgctagggtggaagaaagggttaacaaggtcctcgccgacatgaatataccccaaggcacaactcctgctgtgcatccaactcctcgtgcacaacacgacgcgagtccgtcacagcataggagtagttgtgcatccacaaaggtgccggcccctggtctctcggtcgcacccttagctgcagtggaccacatagaggtaattcatgttatccaatccatatctaata

SEQ ID NO: 48336 - DNA, 368 bp, Oryza sativa
catgcaagcttatttcccaacttaattattgatcatatttcatatgccaagagtgcagacataacatatacctgaattatatcatcctaatatgcaagtcacaccagagccaataagaattttatccaaatatcattgaacatccaagaatttacacatgaactgaggtggcataatactattgcattgcaactaagtcagatatttttttatgcatgagtatgcgtatcatttcattaagaaggaagaaatgacaggggagtggctaaagcgccttccaccccccaacaacaacagcagattgctacacaaacacaactcacttgaactgaccttacccaactggagtaagcgactatctaaagaac

SEQ ID NO: 48337 - DNA, 401 bp, Oryza sativa
tgagcacgactaattgcaatgcaatttgaaaataatctgttagagtggatagtataagggatgtaccctggtcgtcatccttggaggggttgccatcgcagcggtgcgcctttccccactgcatgcggaagcatgtgttcatctccagcacggggcggtggctccagtcgccgcgcagccgctggttgaggtggaggatcctgggcggctcctcctcctcgacagctcggaagccgcggacctcgatagtaaactgtcctaccatcacctctccgttcccttctccgcgccgcttctgcgcactcaaatactcacgctcgcgcctcccgcgacgttccctccaccgttaccgtgtaattacggctagcctccctggaaggaacgacattacttcacttata

SEQ ID NO: 48338 - DNA, 391 bp, Oryza sativa
ctttacttgttcaagaaaaagatatttgctgctgcagatttattacacattctcttatcacacagtagatccggtacttcacaacattggggctgcaaatatcattttccctagtatttttattgattctaaacagtgcctctctgattttatttatttgtttttttgagggaacattctatttattggtttaataaatttatatactatagacctcatcttttcgcttattcttatactccctcattccaaagagatatttaactatttgatgaatagttaaagtcctatgttattctttgatacttctaaaagtctaagtcatatgtgtaattattatgtgttatattaaatttttgatcggatcccaagaaatcatttagtacttatt

SEQ ID NO: 48339 - DNA, 462 bp, Oryza sativa
  unsure (1)..(462): unsure at all n locations
taacccctatattattaccccttgtacctcctttgcttttatcatgcatctgccggtgtggctcgctgagtactgtggatgtactcattcttgctcaatcttttccctcttcagtaagagaagctttggagaagaagtcttaggtggagtcctggcttataccccagttgagcgcctgtgaagatggagccgtatgcccgctagtccgctgctgtttatttntgattgtcaggccttaagtgcctttgtaataatgtaaatattatcgatataataaagatgtgccttttgtatcatgtttgttcggtgtaccccggcttttcctgtgacggcgattaatacactatcgttcgggataaggtaatattctcggtcgcgacaatgtggataccccaagacaacgcacatgccccgcagctccaaagcgaagcctgtcaagttcagttcacgaccggtgatgct

SEQ ID NO: 48340 - DNA, 335 bp, Oryza sativa
atgtatagggacgttatgtgtactttatgggataaggaggctgctggtgggcttcataccgaaagttataaggaccttaaatagacttctatagaaagttttcacgtcaatggggtccacggagaggagtgaaggggatggaccccactggcgggccccacaatctctttcttttcttttctgacccttatcatcttgcttctcttctctcttctctgtttccccgatccccttctctttctcatgcgcgtgcctgagcggagtataacgaggcgcggcgaggggcgcgggacagcggtcggcgcaacgactgcggctggtgcggcgatggaaga

SEQ ID NO: 48341 - DNA, 391 bp, Oryza sativa
  unsure (1)..(391): unsure at all n locations
tcacaatgggcccgaccgcatccgtgaaccaacgactcttcgttactttcttgaacatttcatcccgatgctacatattgtatgcgtaatccatctaatccttccaatggcaagagtagaatccgtgtctgtcgctgttgcgtatcctcngtaatgacaccacgaaagtctcaagcttgtatcgatattgtgtgcttggtgtaccaccagaatgcattttgtttcagcttgcaaatcatgatatccgaatgatcaatttgaatatattgacgaaggtatctcctcaatgttactcattcctacgagtcagccgtttgcacgaaatgcacgtacgtcacgtgcacattgagatcgtcgcttccgatcacatggttgatcagtacgatgtatg

SEQ ID NO: 48342 - DNA, 476 bp, Oryza sativa
  unsure (1)..(476): unsure at all n locations
gcttcaagagcagtagccttcttcatcgcatctatctgctactcttcatcaagcagnngggttttgcatgttgtaccaaagaagctttaacctctacacaacagaggccctgtttgggtatgtgttcttggtttgttctactgcaactgcttgtggtttctttgtttccgccgtcagagtgatcgatttggctgcttcacatggaggatttgcaacaacgttgactttccttgttgatttttacagtgttattttgcggtggagctgaacttttctttgattgccaaggccctaacctcctatgtgaggcccttgttggatcatgctaaggctagatctgctgcagctctctgtggacaccccgagtattataccattcagtgtccaacgcgaccaccacatactattggagaagtgggatccatacacgcataaatagccactcgtcctcaatgtgtccatgatcgtggntgaca

SEQ ID NO: 48343 - DNA, 476 bp, Oryza sativa
  unsure (1)..(476): unsure at all n locations
gctaacctcttgcctacctttactaccagcaattctatacttttttgtcttcttttcaatgctgaggatagttgactcatgcatcttcagaataaattcagcgtgtgccttaagatcattatgaaccctctcactagtaggtaaaggcaaaatatcaattctagcacgagggttgaaaccatacactatctgaaaaggacttaccttggtagtagaatgtngtgcccgattgtatgcaaactccacatgaggcaaacattcttcccacatcttcaaattgttcttcaaaatagccctcaatatggtacccaaagtatggttgactacctctgtttgtccatctgtttgtgggtgacatgatgtagaaaacaatagctctgtacccaagttgttccatagcgtgcgccaaaaatgacttaagagtattgcatctcgatctataacaatagtagaaggcataccatgcatgcgaacaa

SEQ ID NO: 48344 - DNA, 474 bp, Oryza sativa
  unsure (1)..(474): unsure at all n locations
tgcaagctnttattattctggcatcgagctatttttgtctgttgatcctccctacaagtatcgcaccgcagttgagtttaaccaccaaattcgggatggattggtgtgggtcctctacgcctaggacaccagaatatcgaaccatgaacgaggaaaggcatgagagaaatattggctagtaattgtgaagccccaattcttgactggaagggacaccaaaggcctctgccctccctctctatctatccaagagatggaagggcagaagctttttttggatttttcatcttttcatcaaagagttgaacaatgaagatagatggcaagtgcctgatcgatttgatcaagtcgtgtaagaacaacgttcaaatcgttcgttcgttatgatgcctcagctgcatacatcactgcactttcacttgacacctatttaaacggctcgtctcgccgctacctttatcctattccatgctt

SEQ ID NO: 48345 - DNA, 456 bp, Oryza sativa
  unsure (1)..(456): unsure at all n locations
agcttgatgtgtgctttgtgtanggttgtgatgactgtattatttntgcttgcttgtgatgtgcatgcatgatgtgcatttccaggggatggatctcaaggatacgcctgccctgctcgattatcactgatgattaattntcaaaagaagattatcactgatgaaatcttgcggcggcttgtgtcctgctcagctctgcagttgttaccaggaaacacgagttgctgttgatctgttgtatcctccctcggcctccccaccaggcggacgcgcgacgggtgcagcatctcggcgacaaggttgcgccggaggatatgccacacgggcccgcatctgcagcgcgtgatggtgtagtcgttctcgccgaggagcgagcgcgccacctccaggcggttggctagagcggcgccgcgctccacaatggtggcgtgcgcgacgcagcagtcggtcatgaaa

SEQ ID NO: 48346 - DNA, 467 bp, Oryza sativa
  unsure (1)..(467): unsure at all n locations
tcgtcgccgcagagaatcaacaatattcgctgtattcggaatcgatttgatatgagcctgttctggatcgggatcaatcagtgctccatcttccttcgtgcagagttgctgatcaagttctccgcccacgacatcggctggtatggctggtgcaaaagcatcagcagcccaggccgaacacgacgccgtgtccgagccgagcacagtgcaatgctacatactgcacggngactcgttcgagtacctatgcctttgtattactgtgttctaatcggagatgatcaacagagggtatttccctaatcacgtcacgtgcatatgcacacgcgtgcgagcatatgacgggtcatcatgctccacaagaccaacaaacaatcaagtctaagtttactgcatacatgtgtcttctgcagtgtgtagtagacactaacaaggtaattagtagaatagattaatctaattaatct

SEQ ID NO: 48347 - DNA, 87 bp, Oryza sativa
caaaacccgatgcgagcagcaactgcatccgaccaacaagataactgacgccagactacaaacaggtcaatgcattataaaacgcac

SEQ ID NO: 48348 - DNA, 465 bp, Oryza sativa
  unsure (1)..(465): unsure at all n locations
cttctgctngagtgtgcgagtgaagtgaaatgaagaactcctttttatgtatgtatgacgggtgtagagcatgtgaaatgtcggaaatgctccgcaaccgccattagcaagcaatcctatacgtccacgtgtaagcccgagctgaacggccactgccagggttcggctgaacctgagctgacccagcaggcctccaattttggcagagatgttgacaggtgggcctgacatgtgggtttcaagacggttacacctgacatgtgggtcccctctttccttgagcttgcttaggagtgatgttttcttcatgtattcttcatatatgtgctaatctatgcaaacaaataatactccatactccaagtacaagtgaaaatatattattctaaaatagatatgcattgccagcatagctagttctcctccattctagttatgttgatgggcgaaaatggtctataatga

SEQ ID NO: 48349 - DNA, 472 bp, Oryza sativa
tgtccaactgcgctagtgtgtactatgacttgcctatgtttctcttaaacgtttccataataattcaagattcatctgctactccagatcttttgagttttgacaatacattttgtacttcttatttgttattagattttgcgatattaccaattaactaggaagacaacaaaaaaaaagcaacgtaggagagatgagcaacaaattgacttccatcatgcaaaagtagtccgtagatatttttctttggacaatggtaattacatctcaagttaccgcccctctatatttgttatggtaaaagtattcattgagttctgaatattttctcttgattgctccgattcatcacttctgtatgcaaagtaagcggcgcgacttgtggctggaagtgcagaactactctcattctccagaatgaacacagtagatgacataagtggcctggtatttgggttggtctgaacacaca

SEQ ID NO: 48350 - DNA, 458 bp, Oryza sativa
  unsure (1)..(458): unsure at all n locations
agcttagctcattagggaagggagacatgattattcttatatatatggagctctcaacgtgccgcacggaagctacacaatacatatacagatagggtcaaacatagagaaatttgatagttcgacactttcttcggtatcaatttattttgattggcacttataaaaataacatagtgtactatcagaaatatcaaacatagcttaatttattttgattgacgagagtaaatgaaagtggatcagaaatatcaaataatcgaaacccactttaaaaaagaaccaaattatcaaacctctcgtcaaacgtatggccctgctagaagccactgcacgaagttatatcactatcgtgatatcatctaattactatttctctctattttanaatatacgagtcatgctcanaatatatntaataataacataactttcggtgggtgggtatttgatgctac

SEQ ID NO: 48351 - DNA, 384 bp, Oryza sativa
gcttgtgtatgttaccaatattagcaggtttatgtttaagagagcaattggatagaattagagtttgcatattctgaaacatatgcaaatatttatgaagtgctgctattggcaagcctgagacatcaagataagctagcagcatcagttgacgaatggaggatggcaacgccatactaacagggatagattgcccttcagacgaacatccgctcaggtccaagatccgtatatactttgacccagagaatgcctttcggggaagttgcgatccaatgcactccctataatgaatggttctaaccttgcttggtagatctttgaaaaacttgtgttgcttctggtagttgaccaactgtgcatgtcggcaataacgcttattat

SEQ ID NO: 48352 - DNA, 427 bp, Oryza sativa
tgtgcatcgcaggcagctgccctgccatcgaagcatggttctatctatacagtctacctggctcaactagctaactagctaggcttgtgcattgcaaggccacaccagtcacacagccacagtcacaccaagcagcaggatgcgaggaagagaaaatcgcctgcatcacactcacacggatcgtttcgcgcccggagatcttgacgcgatctaccaccgttgcgtccgaaagcgacggtggatggacagtcactgaggcatctgcagtttctgcacagacacaattcattgcactcgatcggaacagctactcgacctgagcttgatgggtgggaaaaaacgatgatttttcctggagtgatgtgtgatccctgattcacagatagggaaagaaaataaagatgtttcctcttcaacattttcttct

SEQ ID NO: 48353 - DNA, 473 bp, Oryza sativa
  unsure (1)..(473): unsure at all n locations
tgctagcttgagagcntgacttccttcctcccattttatctttctctactacacactatgatccgtacctggaaatcgcctatccgaggccatctgggaaattatctagactagaggggtttctttttcttttcttaaactcagaacttccggtgtatttatttgagaaccatcacaatgcattggcattgttcatatgacataaaatatctcagagaaagcttgctgactggtgagctttgtgaatgcgtgaaaaggcaacaccagaattggggctcaagacacgttctaaatgatccaacaaccctacaccagaattctgcatcagctgggagcaaagctctaaaatcggtaagcggtgtgttgccgtcactacaacctgtagtgcttaagcggcaagcgacctagtcagtggtcttaatgcgtgttctaattctaaatgtgaagttatacacacacatatttcgaacata

SEQ ID NO: 48354 - DNA, 457 bp, Oryza sativa
tcactaatgcatagccaccatatggcaggaaatagaattactagatcatcatctgtagttcttttgttgtgcttttcatttaggtgagatgacactgtcagaaagagatcgtcaggaaacaacccaaccacagagtcgacgcctgcctcgatcgaaggacggctaaccgcgttgctcacttgctctgcagctcacaggtcatggcaaactaattaaatttctcaacacctaattttcccaacgaatgcgatggattagaaaaattaaaccctccaatcgaatgctgaaaaatggattaacgaagccatcatccgtaccacgcgaaaggcaaaaaaattcaaatcagtgggccaagaacaacactaataggtcatgtccatttccatcccatttccattgaagccaacataattatcaatgctctccatcatcaactaactcctaattattcattgat

SEQ ID NO: 48355 - DNA, 475 bp, Oryza sativa
  unsure (1)..(475): unsure at all n locations
agctntanatgaatttttctactaaaccgtttactattttatggtttgattacaccattatatttgttacaattaaatctttacaacaagatctcgaatgattatattatgattaaaatatatatacgacaaatggatcccactaacttatggcttctcccatccatactatatccatctaaacaaacaagagattagatcgccatatccatacaaatctaacaaaaaattagatcgccatatccaacaaaatatggatggccatattccatcatgcatgaccgcgaaccaaacacatacttagttaatacatactatatntctgcaatagctaagacaataaaagctctaaaccattaatgcccatgaatatttttattaacttttttttcttttatccaccccatgcaagtaattttttctttaataaatgctataagtcaccactgagccatattcatgcgtagcaaccata

SEQ ID NO: 48356 - DNA, 441 bp, Oryza sativa
  unsure (1)..(441): unsure at all n locations
agtcgcccattntcagatatgatataaaattagctgtttctgtcacctcgcaacaacataaatgtgcgaaagagcaaacaaaatctcagttaactgaaacactctctacaccaaaccaatacgaacattacaggagcagacacagctaatcatcataatggtcagacatttgtgccacattgcaactgaaatacacacacacagcagtaaacctgcaaaggaggagccactgaccgcgtcggtggagttgtcggcgtccatgtcggcgcggaggcgcgcgtacagctgcgggctgcggtacaccgacccgggcgccgggcgcgcgacgatccgcggcacgacgtcgagcgggatggaccccatgtacagcagcatggccgcgacgtacagcagcggcgcgaacaggaacaccgcctgcctccggtgcagcgccgtgagcac

SEQ ID NO: 48357 - DNA, 371 bp, Oryza sativa
agcttctgaagcggcgcggcgcggctctttttgtggatataaccacagcggcgaggaaggaggcggcgcccaccggtgagagcgagcggctcgacgccgacggccatggcgctgctgatggatcccggggcgggaggccccctgacggagagcgagaaggccgacctggacgccatcgccgccatcaaggagtcggcggcggcagagtacaaggagaagggcaaccggctcgtcaagatgggccggagccactacgccgacgccgtcgactgctacaccaaggccattgcccagatggagccgctgtcgtcgccgccggtgccatcccccgacgccttcgttctcttcgccaaccgcgcccacgtcaacct

SEQ ID NO: 48358 - DNA, 438 bp, Oryza sativa
  unsure (1)..(438): unsure at all n locations
tgagcaaggtcttgaaatgctcaagaatttcttttacctcttcatcaagacatcaatcttggatgattntggtttttacgagaaccggcaaaagctgatgcacgagaagagagctaagcagcaactgcttcaaggacaggcaagcattctattcacacatagagccttgtgtggttaaaaaacctgttcagaatgttagcaccactcagagctattggtggtgataggttctgatgcctctgtttttatgcactttgtacagggctctcttgacaatgcttcacatgaaaaggagaagaatgcaattgatgggaaatccacagctcagaagcaggcattgagcaaggagggcacccctattgtcggcgaaatgctgaacgcctcanaatctgcagttgaaagcagtgtaacaaatggcaattagcgcgatatattttc

SEQ ID NO: 48359 - DNA, 405 bp, Oryza sativa
  unsure (1)..(405): unsure at all n locations
tttccctattttgactgtttacaccacagtttcttcttgccgttgtcagtgcggggctatcatcataataatggagtgcgaatttttatcaatttaattngcttactttggctatcattgccttgtttgattttntctacatagtctgcgaggactgaaagnttttaatagcttctttgggttttatgctcaacacagcttgataaaagcttttaagaaatcaaagacttggttagaactatcaagcacagcataaatacaccagtattgtacaaattgagcctccatttgctacatttatactcagtcagaatcagtcctttcatcatcagagttattattgctcggctgaaaggtcgtgtgtggaatgctctcaacatcacttgcatcttgtcagccactttg

SEQ ID NO: 48360 - DNA, 449 bp, Oryza sativa
  unsure (1)..(449): unsure at all n locations
tgatcgatgcagtaggattcgtcagggtgctgttaatgatggcatttgaagtaggctacaacattgtccccgagtatcgccaaattccccatgaccccaatgaggagaatagtcgtgttcgcatgacgttgactagtgatcgtgaagaccttccatcaatgatgtttgaagctggaggaagagattatattcatgcttgtcaggaggcagctttggtggccattggagagcttcgtcatcgctttgatgaggagttagagtcatcagatttccagtatcatccacacaagcttcatgatcaggagtatggagtttacaattgcccggaagatgaagatagcaccactctgaagcatggcgtgtatatgctntgcgccatggatgcagttggcgtggagcggcggaaagcagctcatgagagggagaattggaccgtcgcaagatttgca

SEQ ID NO: 48361 - DNA, 470 bp, Oryza sativa
  unsure (1)..(470): unsure at all n locations
gaccttaagtcacctgccgcatgcaagcttgtcattttcacccgacgttcgtactccatcctatcatgaatgaactgtatggtcggttcaagatgcgttatcggcccgccacttgaagtaactctgactgtgtcaatccattgtacgaattgacatttccttacatcctcctatgtacatccattttgggatagttaagttaatgatagtactgaggagtgatgaaaagaatagttgtaattaccacgaaatcatcgtcgacaatgtttggacacacgaaacacctttgtcctcgagttcggtgccttacggaccttatgacctgacaacggtcaccacaacgacactccggacgctcacgccacgtggggagttctaggggatttacgtgccattctaaagcctcagcagcaattcgacgttcatgctcatccttncgccttaggtagtccgatcttgtttcactacgt

SEQ ID NO: 48362 - DNA, 467 bp, Oryza sativa
  unsure (1)..(467): unsure at all n locations
tcttttgacaccacttgccccataggttacacctctttgtagctctatcacctcccaagttccgttagcgataatggaatccatttcactacggacagcctccttccagtagtctgcatcaggagatgcatatgcttctgaaattgacttangagtgtcatccacgaggaacacagtgaaatcatcaccaaaagacttagccgtcctttgtctcttactccttcgaggagcttcactgacatcctcctcagagacaagttcatgtgtatgttcagtttgttttggtggtgtgattgaactgggaattatttcaaagggttggttcgaaccactatgtgtatccttcattgggaaaaagctctcaaagaagatagaatcacgagactccataattgtaccaacatgcatgtctggtacctcggatttaactattaaaaatctatatgcaatgctatgatgagcatatc

SEQ ID NO: 48363 - DNA, 367 bp, Oryza sativa
  unsure (1)..(367): unsure at all n locations
agcttctgcgctcgctcgtcggccttgacccgtttcttcttcacgacgcngtgagccgccgccggcgaagctcgaacttccccctcgcgagctctttcatcttcaactagcgctccagccgccgcgcgttattctcgctgactcgatccaacaagagacagtgcccccgcacgtgcggcggcgtgggcagaccgagctcgccggcagcggcgagcgcctccaccgtctcgacgagcagcgggtacctggcgcgcgtctcctcgtacgtactcccgctcgcgcccttattcctcttcctcttcctgtcgttgcggagcggcttcttctccgcggcgacgccgtccacgtcggcgttggcgccggtgac

SEQ ID NO: 48364 - DNA, 397 bp, Oryza sativa
  unsure (1)..(397): unsure at all n locations
gtgtctttagccgctgcggcatctcttacaatcaatntaatcataaagaaattaaaatccaggagattcactataagtcagaagatgttgtttttccacattttctagatttctaccatctgaattcccattagttgattctcataatctagaattacttaaacagtccctagtcccatcaaccataacatgctaaggccttatttgtaacgaagtaaaatatttgcggagaaaataaatggctccaataaaagtgttgttaccacatttgaaaaggtggcacttttaactttatgctcaattcacacttaattaccaatatttggcggggggacaaatgttgatttcacgaacatcagccaatgatagcgatcgatcgcttagttcatttataagc

SEQ ID NO: 48365 - DNA, 431 bp, Oryza sativa
  unsure (1)..(431): unsure at all n locations
tgcaagcttntctnttatgtctctcacaatttccctctctgcatttgttgtaaaggaataacctctttctgtgaggatcttcattatgcagtcagtcagatcacgaccagcaagatccaaccgaagaatagcatgaggaagtgcatatccttcatagattggcactgtgtgagtcacaccatcaccagaatcaagcacaatacctgcacaagccacaacgcactggggtcatatcaccaatgaagagatgtaagtgtacaaagactcattttgaatagtagaaaatggacacatgcctgttgtacgaccactggcatatagtgaaagaacagcttgaatagccacatacattgctggtgcattgaatgtctcanacatgagttgggtcattttctctctgttagcctctgggttcagaggagcttctgtca

SEQ ID NO: 48366 - DNA, 256 bp, Oryza sativa
tctaaaaaagaatgctgtgctgaaagacatcaattccatccaatgcaccataagctggccatattagcgagatgcttactggctcatactgcatgctggtctttgatcatgacattcgatcttaaacaatcggcacgagacaaacattctgaccaatgtactcgtcagcctcgtgcgtgataaagaccgctggcagcgtacacatcgtaggccttgtgcagcaaccccatcgagtggtcgatgtacatggctacac

SEQ ID NO: 48367 - DNA, 341 bp, Oryza sativa
agcttcaaggccatgaagcgagagctcttggcctttgttcccacgcatgaagcgagccaaaagcgcgctggtcggaggtgaagctcacgttcgaccagagcgaccatccgacagtgctcgctcgggggggggggaggatggccctaatgttctcccccaccatccacaacgtaatgatcaaacgcgcgctgtttgatgcgggcgccaaccataacctcattccccccgctgactttgactctctcaagtccccgtgataaccttccgacgactctctcaatagtggcgctctcagtgctcaccctgcctttggtacttattttccatgcccttcttactca

SEQ ID NO: 48368 - DNA, 471 bp, Oryza sativa
  unsure (1)..(471): unsure at all n locations
acatgtgaagtgatagaagggcacccacacatatcctatgatcatnntacctggtgngtgggctgctacttgacacctgagaagtgtgataggttgcaaaacctagatgctgaaaaagtgtcaatcacgttagtactatttccaatactcaaaggctagaatgggttcaatcaaaagttcttaataccgtcgtgaaagtcggatctaagccagagggcatttcatcatagctaattgggcccatcggacttgaaagatcaatcccctagattaaaaaggaaataaacaactatctcaatcccctggattaataggaaataaacaacttccaatacaacaccactaaaagaacatcatatgtagggaagcaatttgtatgtaacttcataccctgtagggtttatatgtcggagtttgggtacccagtggggaccatgtatgaggaccctcgaaagcctgcatgttgaaaaa

SEQ ID NO: 48369 - DNA, 462 bp, Oryza sativa
  unsure (1)..(462): unsure at all n locations
ttattccttggccccaatgttgtataaccaaactgttgtttattttattcccatgacctgctggtttagctctgttcagctgttcacattttaaatgatactgtagtcaaacgctgcattgaacaaagattgaaataggaaccaaccacctttgtttaatacttcaaagtgtagctgatcagctacccttgacgctgctggcaaatttgacaaccctacagctgaaaccttttgaagagtattgttctgttgaagcctcttttgcagcaaagtggaattcttcattagcctgaaccatctatttacgagggtagcatgtgtttcaatgctaatgttaagaacagttntattttactttgcagtgacactgttgtacaattgcttccactttcaatntatactgatcatttcctctctttactttatgggtattttggtcatcatacatgggcttaatgagca

SEQ ID NO: 48370 - DNA, 450 bp, Oryza sativa
  unsure (1)..(450): unsure at all n locations
tgcaagctttggagaagaaatcctacgtggagttcttgtttattacccagntgagcgcctatgaagagggagccatatgcccgctactccgctgctgcttattcttgtttgtcacgcctgaactgcctttcgtataatgcaaatattatcgatataataaagggtggcctcttgtatcatgcttgtgtggagtaccccggcttttcctgcgatggggattaatacactaacgttcaggaaaaggcaattttctcggtcgcgacaattcacaaagctagggagagtgtatggctcatgtgactggctgaagtcggatagtgagaaaacactcgntcacagcgtacccacagtaagagaactcagatagactccatttatattctacaagtatttcttacaagtcacaaatactgtcaagcatattacatgccttcttgagatattttctat

SEQ ID NO: 48371 - DNA, 471 bp, Oryza sativa
  unsure (1)..(471): unsure at all n locations
tccatctgcntttggtatgccaacattatcttggatatttattatcataacatcatctcttcaagctcttaacaatttgatcaataggttataacttctatatagaatttacatttatcttttatttttgaattatattatattactctaagttgtatatgccaactaatataatattgatatccaattgcaggttatattattaattagaactatccgatttacctcatttctttattttgatttaggagtaactggtggtcttttctgagcacgactgaacccaccatttgataattttgaaatcttccctatacatccgtttgtggaagcaaatgctgaggactccagtgttggtgctggatcaaaggaatatgtgcacacgctcattcagtgtggcacaacggaagaaaaagactgattattgttcaaggcttgaagagagaatacagccagaacataatattctac

SEQ ID NO: 48372 - DNA, 474 bp, Oryza sativa
agcttagccatgaaaataacataggcagtatctattttttctacttttggacatgtttgctccagcgctacaaagttcctaaaaagaaagctggtgctttcatccacaagcaaaaatggaatttccaagacagcatctctgagctttatatccaggagagaatggcgattggactcgctatatgctctcctcctaaattcaatgccagcttcatgatactgcgatgcccggcgccaccgatatggaaaatgaccattctgtgacgaacctaaattagctgcctcctgcttgtaagtaagatgtagataatcccatcctagctgaagaaaatgacgaatgtggtgccccgtatgaccatgatgctcatcctggtttggactgggtctgacgtacatatgacataagtgtaacaaatgaatcacaatctttggacgattggattctcttatggcttttggataacatggtacaaac

SEQ ID NO: 48373 - DNA, 465 bp, Oryza sativa
  unsure (1)..(465): unsure at all n locations
gtagctgagtactggtccaactatagctgaatctgcctttataaactgtcaggaacatcaaatgcagaagaccttcactgctttattcttcagtgaataagtggaactggaaactgggacattgcattgctggccaatgatcatccacatggacatatatgatgcactaatgatctggaaagtatgtatgaggggagctcattcaaaaccaggggttcatgcaatgaaattgcaagccttctcccaacaagacagagcagcagacaggatataataaactttgttggtaataccatggttaaaaatctgaaacctgcggtgattgattcttatttatctgtcccaaaactattccgagatgtacatctntgtgctgctgactgctgactacaaaaaccaaatgaacaaagaaccaccctgaacacatccnccactacagatttccctcttttctgtcttactgat

SEQ ID NO: 48374 - DNA, 64 bp, Oryza sativa
tgcaagcttgctcgggcagttggagaaagaagatatcatatatataggggggggactttagtcc

SEQ ID NO: 48375 - DNA, 443 bp, Oryza sativa
  unsure (1)..(443): unsure at all n locations
tgccgcatcgtgctccttgctagctcctcgctgctcgtctccattgtttacaggtacgtcatcctcagctaattatcaggtaccagacttgataggtatcaagcctgatacccaccggtattagacttggtacccaagtatcagccgatacccatagttatcaggtgccaagtaccaggtatcaagtatcatgtgccaagtactaggtattaggtatcaggtgccaagtactaggtatcagttatcatgtcgcgaggaggaagcgcangttgtcactttctagccggctagttagccatttaccaccgatttctcctctcctcttctccctcctctcctattctccctttctctcctcgacacactccctcctttccctactgttgatgcggctcacgaggggaggagccaactagcggagctgtgcatcacccgtgtatgaa

SEQ ID NO: 48376 - DNA, 463 bp, Oryza sativa
  unsure (1)..(463): unsure at all n locations
agctntataatacaccaagctactccacattgctgtagctatgcgctttgcaacgagcctatctcgctgcatacaagttccatgcaatgcaagttcccatgcagccacatgcacgttcatctacaggcaaagttcattgcatcggtagtgggctgtccccgtgaaaccctcaggcaacactacagctgggtttgtccctagactctacccttattatttttatctttccaaactttgattagctagagtagctctctactccttgccgacaacttcttcgaaatggtggcgatgcaatcacctgagcctgacatccgggacctttctttggacgatgcatggtccttgcaactatcggctactgtatgaccggattaagattttcatgcgtgtatatggctgcattttgacagagcccgccactgctttccgagagatgatctacggcgttcacgtggaatat

SEQ ID NO: 48377 - DNA, 458 bp, Oryza sativa
  unsure (1)..(458): unsure at all n locations
ntgcgaaataaattaannacattggaaacgaggtcacaaattntgtatatttgaataactggtttcaaaagaaagttataaaatcaacatactataattattttattgcagcaagattaaataaaacagtattgtaaaacttttgctagtaaatgagccattagtacagtaatagatgtacagtactaataacactggaataaatnttgaatgagaaccattaaaggagattatgaagtgcatgtgccattagtttggtttaattaaaagagaaagggaggagaacagttctacttttccaatatttttcagagggcttctatgggtaaccatctggcataacctanggtcaaagaggctctgataccaacttgtcacgcccggaatttctatccaaaattccaaacgcttacatgtgtgtgaaccctcgttcaggaatcagccgatgcacacaataa

SEQ ID NO: 48378 - DNA, 479 bp, Oryza sativa
  unsure (1)..(479): unsure at all n locations
gtcacctgcggcagcaagcttggcccgactcttcacttgccttttggtcatcgctgagcagacccttccccttgcctcaccttcccaccgacactccgggcccaccccaccgctggtgccgctctagttctccctgcaaacggccgaagagggagagatgagagagagaaggaggaggagcaagggaatgagaaagagatgatgacatatcggccccacaatattcgcgtttgtgaatgacgaatggatcccgcatttaaaatttataatactttatgagtaccacatcaacgccacgtaggacaaagactgggtcaatacccgcacatagtcatcacatcagcgaaactgctgtccaatataaggtcgatatatccgatattgtggtttagagatatgaatcaaatntgcccactagtaagagagcaaaagtaacttattcaaccccctaaacatcatgaactgatcggaggtctgtt

SEQ ID NO: 48379 - DNA, 465 bp, Oryza sativa
  unsure (1)..(465): unsure at all n locations
nntgttttgcacaaagcagtaaacctaggatacaacacatagattgtgagatagaaagtcatcaaaaggtaaagtgaaaaatccataaactcctgataagtcacctgctgtttcattttgtctcacttatctcattttctatttaagcaaaatttgctacaggttaagtatgcagtttccacctcatgacacatgttcatgctatttcttaattatgttgttattcagtgcatgtttcattgatacgaatacttttttcaattatttcagtgactgcagtgcttaaactacatgatttgagcctgaaacatcaaactggaaagatatgcaaacgagggagtggggattatggattntacccaaagctagaacgaaacgaagaanaaaaaggaaatcatacgagcttgtgcagttgtgctgattctcagtagtgaacaaacatctttctgcaattcacatttcact

SEQ ID NO: 48380 - DNA, 451 bp, Oryza sativa
  unsure (1)..(451): unsure at all n locations
agcttaagcaatatgaaacaaccactatcttatttgtctaaagaagttcaaatggcatccattaaagcgaactattctatgttgcatggtacaaacatgggtatggtacgcaacaggctactacatatatgtaggattgataatagtatgagaattcttgtttctggattgacttatataaatggtgttctattcaacactatcaggaaaagttgtaattttttaacagttttgtccctccaccaaaaactacaggtgtttataataaaatgaaaattgcactcgtctacttttgttggtgttgttatagtgtttccttcctttgaaaagaatggttacgaattgaacaaaaagatccacttctggcatcttctctaagctcttctggtttatagcttcgcatgttggtggctgtgtcagtgtctgacactantacctagcttacactact

SEQ ID NO: 48381 - DNA, 468 bp, Oryza sativa
  unsure (1)..(468): unsure at all n locations
ntcattgcaagtgacagtgagtgagcctccttgtacccatattgtgtcttgtgtggatgaagttgacacggtggtttcactgagtatggttttacccacacaagcaagtcaggctgagaatgttcctacctgagatgctacctaaaaaaaggttccaaccaaaaaaagtagcaagtccagggacaaagctactgatcaattagtgccaaatccagatccatggggtgagtttgatgaggttgagtatataggagttagtgatgagagggagaattacaatgagctggtgtcagatgatgaggctaatgatccagattacactcctgaggatgatgatgctgatgaagagaatgatgatcctaaggtgtatgagacaatatgttgtcctgaaagaggtngaacttgcagttccctactctgaggccacaagatacagaacttattgcaaggcaaagaagtgcaaatggg

SEQ ID NO: 48382 - DNA, 375 bp, Oryza sativa
  unsure (1)..(375): unsure at all n locations
agctctctcctcatgtgcaaagatgacagttacatttgaacctattaaagaaggaataaaatttcttctaaaaagattcagtagccatggcatgaaaaatacattgtattgtcacctccaaatttagcccatctaattgtacatgttttctgccaataagactgcttgtatttcaaataagctaaaagcttagtcctaattaagatactaaatctccattccaacaaagtgagatctctatacttctcaatagagtccaggaattgaatcatagcattacagttttgaattagattctgcaacttagaaaggttgttactccanattctcaaaccctgtctcatagctttcaatttagcagaaatatttctagct

SEQ ID NO: 48383 - DNA, 458 bp, Oryza sativa
tgtttgtggacatgaggcagcttaccatgggaaactacaatcggctcaaggagaatagatctacaagataacttaacagccgatgagtattacaatcttatggttgatgaaacagaagatctagttcagtccagattgagagcccttgcaaaggtgactaaagataaagaacaagttgcttggcattacaacaaaaaggtggtgcccaaatccttttctaaaggggagctagtttggaaattgatcttgtcaatatgaactcgcgataataaattctgcaagtggttacctaattgggaaggaccgtttcaaatatacaaagttgtgtacaaaggggcttatatgttgcaagaacttgatggtgaagtttttggacgagctcgtaatggaaaatacttaaagaaatattatccaagtggtcggatcaattcatgatcgcttagtgttgccgatcatgt

SEQ ID NO: 48384 - DNA, 482 bp, Oryza sativa
  unsure (1)..(482): unsure at all n locations
cgctgcaactttttcgtaggaaatggattttacattgtttttatangattttagcataaatcagtgcaaatccaatgaaagtgcgaagggaaaaaaaccagcgtgccaaagcatgcctggagtacaagccttgtcagtgaaatttaacatcttgtgtgtcgcaaaaagaaaaaaaaaaccaaacaccatgctaaagaaaatgtgagggtaaaatcaattattgaccggatcattacctctggattatttacttcattgtaggggtgaatcaaatattttaaataaataaagtgaacaaataatactcaccttgtttcatattataatttaatttaagtttatagaagagttactaacatcgacaacaccaaattaattcactataatctaatttatttggtgttggtaatgttattataattttctagaaagtttggtaaaatcgaaaaggtntgacttacaacacttgtagtatgaaacag

SEQ ID NO: 48385 - DNA, 464 bp, Oryza sativa
actggcgccatatccatctactgctcgtgtctttattatctcctatctggcgcaattgttgtaagtctacttgtacttctacctagatgcccatccatcaatgaactgagaaatgaaacatgcatgtcaacatcctagaaatatgggatgatgtacctgacagaggacgttggagttgctcttttagtaattaaacatattcatgcaagagttgcaatcatttgcgatgttttagcacatgcactttatatatatgtagaaacactcccgtcttcaccggactatatgctgtacaacgtattgcagaaaccaacatgtatttcttttttggataatgaaatctttattaaaacttattcaaatacatcaagataatacgttcctactaatatcaccgccggtcactgcatataatattgcttcagtctcacatgaaaaagaacctatttataactttatcacga

SEQ ID NO: 48386 - DNA, 460 bp, Oryza sativa
  unsure (1)..(460): unsure at all n locations
acgcacttaaagactccgctgcagctaaagggagcaaacctgagcactgttgttctgtctatatgaaatcgaggatctaaagatgacaatatgcctgaangactaaataagactcaactgaaatgaatgactgccttatgcatatatgagttgcacactaacaataaaaaaagaagcaaaagccaataccaggggatataattgatctacactgaatgataaatattttatttataaagcacgaacccaatggaataaaaaagacgactgtgaaagagtaaaggagatcctttccacaactcatgcatggtatgaagcacgtgagcaaaccaggagttggcaaaacaaacctctgagaagtgtaggtgataatcattcacattcttgtccacccatttctgaacgggagatacgaaagactggaacatgtgaagtcttgaaagtatcctcagcataacag

SEQ ID NO: 48387 - DNA, 354 bp, Oryza sativa
tgcttgatcatcagatgttagagccctggaagtttttgcttggcaatatcgctgcagcgagcacagggtcgaggtggacttggacctttgaccagaccgattgtatctattgcttggacacaaaattggatgttacttgttgcgtgatgtcaaagagagttgggaatgcatgtcacatgatgactcaagaaactgatgactgaatgaaatgtatggcagttttcaggctgaaaggggtcaaagtctatgagtgattctgattaattagatctttcgagtcttaaatcttttgtctttaccaaatgttgcagaaatggttaccaaaaagagtatgatctatattttgacttggct

SEQ ID NO: 48388 - DNA, 339 bp, Oryza sativa
  unsure (1)..(339): unsure at all n locations
agcttatgcaccggtgaagtcgtgaagaacattctatctttgcgcgcgtgctcgccgtctgcctcctcgtctacggtcgcgggtgcggaggacgtcctgggctgatgactggcgacgcgggagcaagcgagccgtccgtgtctgcagtatgggcgcggtggatggatgatgacggngaggactgccatcggtggcgtcggagctactacagctgtgggggatggcggcgcaaatcatggcactcaactgcgtcgtctacctgcggccgcgtgatagagaggaaganaagagaaaagcatgataggattatgaccggtgggcggcggtgcgaccggactg

SEQ ID NO: 48389 - DNA, 407 bp, Oryza sativa
  unsure (1)..(407): unsure at all n locations
atatgcaaaaccaccatgaaaaatataacccattttaaggggttatatagatggacttgtatgtggccatctttntcctttttctcttgtatgtggccatccgatgctaaggtttgcctaaaaaacacatcgatttcccatcaattgcttccttgtcgctgctaattgtaactccgtcttgtctgatcccactgcaatgcatgcttctggaggcaaggaagtacgatcctaacaagataatgcaagtgtgggcaaagatgctgagatggaaaggaaagagtttggagctaacatgatctgtgaggtgttagagatttagagaaccatttagatgataggttacaacttacaacgtctaattaattnttggttgttcttgatcactattgngttgtgtggcagaagtt

SEQ ID NO: 48390 - DNA, 431 bp, Oryza sativa
  unsure (1)..(431): unsure at all n locations
gcgaagcttagctatatagtgagctaagctaggtgtttatttttttatgtggtgtactggtcgcagtggagcacaagtgaagctagctaggtagacgacgatcgatgataatgctctangcagagtggccggtgatgaaatggataactgctgccatggtggtggtggtggatttgtataaatcgatcgatcgtgcattggtgccaagtggttggatgaactgtgtgtggccggcgaggaagaaaggcatatgcacgtgacgtggtttaatcttggccgttggatgaggcaaccgactgtgcagatggaagccacctcgtcgtcgttgtcgatatgatgcatggtcctctggcgtaaagggcaaagtggtgtatatgttcgtggtgtgatcatcgattcgatccgggcatgacgtgatgttgatttgaaac

SEQ ID NO: 48391 - DNA, 488 bp, Oryza sativa
  unsure (1)..(488): unsure at all n locations
gcaagcttcacgaatcttcaagaaaacccgcgatctcgatgatctctgtaccgcaactatacgcgaacgactgaaaacctaagcaaaagaccaaaagagggatcctatttatactaattagtagtgccattaaatagatctcaatnttacggaattactggaagtggaacggaagcaatcggacgaacggatagagggatatgaattttggacgtttaaaggaaattttctggacaaagagacgatctgtctgaatcttctggaatacgagagatacgttatggacattatagaaataatattctcaagaatattattgacatccactgacatacgggctcgaggggacgaattattggaatcttcggattaagaggatgggtttatggaatctggaatataggaaatgatttattgaatctctagacaagagaaatatgtgtggagtattgaaaagatattcccacaatatctttgactcattgcac

SEQ ID NO: 48392 - DNA, 412 bp, Oryza sativa
atctagtgtattcttatctacggctcccatgcatgctagcttggcatcagtgtccactactgacagaggcttcagacactgttgactgtaatttctgggccccaaattacgatcttaaataaatctattggtgacgcgttacagtcgccgacacaaatcaagttagctactctgtgcaatatatatatataataataatccggcatattttgggacgcggcgctctactaaacaagttcgttgctggctacgtagccagatggcactagatattgtgtgtggtttaagcaagggagtcaaatttaataataaagcctagcttaaatctgcatctatggctcacaatatatattataatctacgaagaagctagctttagcttaattgatggactaccaactgattaatgtac

SEQ ID NO: 48393 - DNA, 422 bp, Oryza sativa
gacgaatgttttattcctctctaactgattcgcaccagtcgcaagaacaaatacatgcaagaatcgatttgaaaaccaaaaagaagttgaagttcttaccccatcagtagctcatgccaagtgcgctttgtcgataccatcctgcgcctaagctagcaccatttggtagtgacggttttgtgcgccaagtgctaagttgccactcgacatggtggcctctacgctagcggcagtggcggtggcggtgatggcgatgacaggagcggtggtggtggtggcggctgcagcgatgatgggagcgcctggatctggatcccctttcctctgctccacgagtggccaagctaaaagaagcagcttgtatgggtattttcgtcagccctggtgcgaaatttggtggaaatggagagaattagcgaata

SEQ ID NO: 48394 - DNA, 390 bp, Oryza sativa
tgctgaacaaatctttgagcagtagatcatcaggaatgtttacatccttcttgcttgataaaatgatcttcccatctgtacaaacagggaccttgatacaaccagagagaagtttattcatgttctgcccccagtttgtggcgacgaacttccagaaagcagagcagtcagctttagataactcactgaccgagctctcccatgtgctccacagcttgcagtagtcttcagaactagggccatgcctcacaccaagaaaaactgaaaagtagtcaagcaatttcttgtcataatatttgtccaaaacatgcaggtgcgacgtgaaaagattgtccctgtcatgaagaacacaacttggtgcgctcacccattctccactaccacttccat

SEQ ID NO: 48395 - DNA, 477 bp, Oryza sativa
gcaagctttaaagaaatacttcaggatgtcaaacatgttcgtgtcctccgccttttccaaacaacgcttgaatttctaccatccaaacttatccaccttcgttacttaagaatccaagcatctaaaaaaacaatgaacacacagctaaaattgaatagatctgtcacacgaaaatgggataaattccgacttatgatgggtgaaattcaaactcctgccactaatgatcatctgacatccttaccctctagcctccctgaatattatcacttgagattcttagacctgcaggattggacgggcatgactacagtgcctaaacacatgcaaatcagtcatctcatatatttgcgccagtttcttgctagcaaagaactccaatccagtgttgccaagataggaatggctaaattattacaggaagttgagcaagttcaagttaatatggaagagcgtgctgggattgagcttcaacag

SEQ ID NO: 48396 - DNA, 464 bp, Oryza sativa
tcatgctgacagctcactcgacaagtacaaggcacgttgtttgtgttctcgggtttaaccagcgcccgggcgtcgactttggcgagacattctcgcccgtcgtcaaaccagcgaccattcgcaccgtgctgacgctgatttcctccaagcaatggccggcgcatcaactggatgtttcaaacgcgttcctgcacggccatcttcaggaacgtgtcctgtgccagcagcccacaggctttgaggatgctgctcgcccggcggacgtgtgcctcctctcccgttcgctgtacggtcttcgtcaagccccgcgcgcttggttcaagcgcttcgccgatcatgcaaccagcctcggctttgtccagtcccgcgccgacccctccctgttcgtgctgcgccgtggctccgacacggactacctcctcctctacgtcgacgacatgatcctcttcgcgtcctcgtcgagc

SEQ ID NO: 48397 - DNA, 448 bp, Oryza sativa
  unsure (1)..(448): unsure at all n locations
gtagttggatgactgttatgtgctggcaatattgggaataagttcattgttatgctcggatgcacaaatgaagattgccctgcagcactccaataatttggaacttgacattggcccaaaggatgctgctgtaatgacgcataactntcatagtgtgacgcatcaatgatcttcttggctgcagaagaataatattcagatcagccagaccagtattaagtatcaatgcatcaaaaattactatcttaaagttgtggcaagacttacaagttggactaaagatctccaaattacagtgtgtttgctccttgggagagaagacaaccgaattggtattcatctccagctgtacaaatagcatcaagatgatcaagcatggatgggaaatacacatacatttaaacagaagataaaacacgggggaaaacgtagatggtcttacagcatc

SEQ ID NO: 48398 - DNA, 436 bp, Oryza sativa
tcgttgatcctactgaaaacaagtcggagcgggatgctctcgattgtaggcccactaatcttgccaactacgggcttcctgcttgcaccatctctacgactgctggcgaaagatgagagcctacgcattttcctcggtgaagttgctgatttctttgtgtgtggccgccgtgacttgtccgtatcatgctctgagatctttttcttaccgctgggctttggtcttgatgcaggtctcgatgaatgtgacgatcttgcttgccttggttccgcaggttcgctcctctttagcaagttgttaagactgctagttgctgggcgcagatcatttcggctcgccgcagaactactatcttttaaaacctccacagttatagggtaaccgacaatgggcttaccattccatttactcatgagagaaacaagaggcacacgat

SEQ ID NO: 48399 - DNA, 266 bp, Oryza sativa
  unsure (1)..(266): unsure at all n locations
tatcctgtggcatggcattgccacatcaaagctttctcccatttcaaagaggatnttgctctgcgtgtgcatgtgttcacagcaacaaaaaaaaaaagaaaaaaaaccacttagacatcatagctaggactnttagcataaccaatgttgtacattcttcattctgcttgtaattatttttacctcaacaattatattctgcctcgttgacataactttctctgtataataggagaatacagtangaggctctccatgctgtgttt

SEQ ID NO: 48400 - DNA, 486 bp, Oryza sativa
  unsure (1)..(486): unsure at all n locations
acacttaganactcaagcttgcctanagcatagtgcaagaagataagcacccaatattatgtcttttcaacctctgttcctggccaaaagcaccgtggaagaacacagtatctcaaagttaccctttcatacaaaggttattttttgtagcttggtcttgctcactccctccagtgcaaaaagaggggtaaaggtgtcattttggtgccatctctaatcaaacatttaaatttataatcaatctcttctaaaatatttagattggatataatatgtatagatatgtcttgtccatgatagttgatttaacacacgttgaattgaaattaacggtcaaagttatatattttagagactgtcagtgttcaaaacagcatggttctgctgctcgacagagtagtaagatatatttgatcaaaacaaagtaaccaacctactatcagcttatgactaagtnctgctatccatatttgttttgtttctttt

SEQ ID NO: 48401 - DNA, 343 bp, Oryza sativa
  unsure (1)..(343): unsure at all n locations
agcttgtgcctgtgtggagagatcatcatatattattaaagtatgccgttcgcggtacataaaatactcatccagggctgctcccgtataaagagcgaggtattgtaatgtagcangggaatacgccatttcaactactacaatagtgtattccatggccccctcttcatggaaagtagttactacttgagctacggaggatgctatttgaccgatagctacataaacacatattacatcttgccctttctgattgagaaatgtatctgtagctactgctgttttgccggtttgtctgtccccaataatgtactctcactgaccgcgcccaatatgaatcatc

SEQ ID NO: 48402 - DNA, 118 bp, Oryza sativa
tattcttacaccaataaatcaacaaaggctagatgaaacgatatcccaagaatgtaaacgtctctaatgctcttccttaggtttagacactctatccgattacgatgggctaaggggt

SEQ ID NO: 48403 - DNA, 434 bp, Oryza sativa
  unsure (1)..(434): unsure at all n locations
agctngtcacatgataaccactactttctctgtccagtcggcaaccctgaccccactgagttcatcatcggtgaaaccaataggattcctttcagactatccaatccagatctaggtcattggaagaacacctttaaatcttggccgtctctagaaaaaacttcacccgagaaaagttggattacatggttcaagcgtatgtcagctagcaaacgagttcactggaacgaaatcggaatcggccaagcacttgacctaaccatagcaaactcagccaaagaagaacctctaatggcagctgcttcttactcttggtccaacactatcaatgccttcttattcaaccaagggccgatgaccctaactctcatagtcatcattatgatcacgggtctagatgtcacttcatcggctaaccccatgagtctgaacac

SEQ ID NO: 48404 - DNA, 340 bp, Oryza sativa
  unsure (1)..(340): unsure at all n locations
atactgaagcccatatctgaagagactactattccacttgatattgatgaaagactcgcatctttgtcaagcatggtatcagtgctttgtgaacaagcacgcggcctaccattggttaaaagcttttgaaatgattcntgcctttcgtgctcgccttctccacttcattcgatctctacaggatggtctatattcattctttgaaagactggcttatcaatgtncataatcatgtgcactttcttttagttacaatatcgttgtgcctcttctaataacagaactttgcctatctttaagcatttgtaaagctctgcccagctctgacattgcatatttc

SEQ ID NO: 48405 - DNA, 424 bp, Oryza sativa
  unsure (1)..(424): unsure at all n locations
tattatgttaccaactttacggtacactcatcatatattacaaagcagactgtatatcactccgaacatgttattcacggattcacacccgcatatgctacatattaatatcaagtcgcttggttgactataattttaaaaccactcggatggttggattatttattccttgactatatgcttggtttgttcaattaaccacatagtcggtggctacacctattatgtgcatccagtcgatgcacctgactttattnttcagccctccacagtcttcgtatttggtaaaagtacttctgagaccatggcgaagatgattgaagcactcagctctggagtaatctagttcgagagaaaatatctctcgactgtgagggctcacggctactgggagatatgggaccccaacctacatggctagtat

SEQ ID NO: 48406 - DNA, 442 bp, Oryza sativa
catatgaacagcctcagcatggaactgagagttttttttacatatattagagttctgcactgcagctcctttaagctttctgtctaatcatgtctcctggaaagaagcacaaagttttgattccatcagcttggataaatggctaaatgctccatacaagaatttaaaaagcataaagggaaacatactcattgattgtgtggataaaccgccacacattcatgctttgccgttgatctagaaactacatgaatcatgagaacagagattaaagttaaactcataaatttataaacaaccacaataattgataaggggcaatgaaatgttttctatagtacgcacacttctagacgcctgcacaatgtctgattctggtacagcagagcatccctgcactccctgagtgttggaaaattacagcaagaaaatgttctaagga

SEQ ID NO: 48407 - DNA, 387 bp, Oryza sativa
catgcgagggtgcaagtattggaacagttcagatcaagatgtttgatggctgtatcacaacattgtcagatgtgcggcatattccaaatttgaggagaagtctcatctctttatgtactcttgatcgcaagagggtacatatattccggaggagacggaattttgaaggtaactaaaggctctcttgttgtgatgaaagctgatattaaatttgccaacatgtaccatctgcgaggtacaactatattaggtaatgttgcagcagtttctaattcattatctaattccgatgctactaatctttggcatatgcgtcttgggcatatgagtgaaattggcttgggagaattgagcaagcgaggattgctagatggacaaagcatcgag

SEQ ID NO: 48408 - DNA, 481 bp, Oryza sativa
  unsure (1)..(481): unsure at all n locations
gcttntgctactgttgtcattagctagaaaataatgaacaattcacttgatagatcgaatgccatcggggtctaatgaccccaatgatagtactgcagctccgcccctgatctcttgcagaatgaaattccatcttgatcagtcatcttgtctagtattcaacactgctacaatatatgcacttacaaccaacctgtgatttgtacaccaattcaccaaaagaatctaaaataggcatatgtgaaaaaggttctgtgatcaaatatatgtgcatcgcacaaaaaggacaagttgtagatgcatcttttgtgatataactttctttgttttgcagagcacataggatctttttctctcttatgattatttacaggtgcacatgttcaaacatactggggcatcattttttaataatactgacaacataataataggtgttcatcaagtgttatctacttgtagaaactttgacaattatgct

SEQ ID NO: 48409 - DNA, 210 bp, Oryza sativa
agcttgtattactacatgcatgcatttatgatgtacgtgtgtgcgggcacaagccgcgcctggcaataggcgccccacctgttcacatccatgcatgctgtgcgtgcatacacatgtctgtataaccattgtctgctacatctctacaggaagtacactcacatcgattgataacgatgcacgcccatacgattcgcgcacgatcgtgct

SEQ ID NO: 48410 - DNA, 375 bp, Oryza sativa
cgctcgatttttggcaaatgcgacttttttttttgttttcatctggatgggtgggtattgacttttttgttccaagacatgaatttacttttctacagaatctaatcatgccccgacttgaacggttgaccttacgcattttaaaggagcatgctgcttggctccttcctttttttctgagtgtgcgagagattgaatttgtacaattttagtttaagctattagccaaaggatttaagttatcaattcactgtctattgataaatgcgctttcgcgacatgatttgtctttattataaaattaacaaattagggatgggatttattctgacggagtctctctgctactccactgttgtgttaaaaactgtaaat

SEQ ID NO: 48411 - DNA, 426 bp, Oryza sativa
  unsure (1)..(426): unsure at all n locations
agcttgttggattctatgatttacactaacatatttttaatggtcgaaattcggccgaaatattgtccggatcattaaatactntacaattggagagactaattttgctcccccttgaatatatgtaagatgcacatatatcgtagtacctccggtttcattttgttctaatgcgcgcgcgcatatatatatatatatatatgtgngtgtatgtatatgtatgtatgtatgtaagattatgagttccactaacataagtctcgctcggagccaagagaggcctaaaactctatccctgaaactctgtttttgggatatgtaaatcggctttgaggtgttgaatatattgatctcttcgagagatcacctaaatcaagttcctccaattaaaaagtggggtcacatgtgtatacacccacacatatc

SEQ ID NO: 48412 - DNA, 422 bp, Oryza sativa
taccatctatgaagatatcatcactttttttattaacatgatactacatggaagacaggaactcatgaatgcaaatggggtaattaactaacacgcttaatttctctctctatctcacacattttgtattcataactaactataatatgtatgcaacttttattctaacatttttatcatgggcgattgtcagatgcacatttctgccacataatagagcaactctttccatggctcatgagtgtggcctacgcactttcaaaggctacaaggagtgacttgaataagttgccgggaagggcttgactaataaagtagctcgatccatacaccacttctctccattgatcattgctggtatagaatacgaaactaactttctttcaactgcagttatagtctgacaccaataatgttgtgct

SEQ ID NO: 48413 - DNA, 454 bp, Oryza sativa
  unsure (1)..(454): unsure at all n locations
agcttgacctggtcgagctttaccatggacctctctgttagcaaccaaaacattcttcttacataattatatcaagaaaatgtacaccaatcattcatgggagattgggctgcctgaattagtccggtcagttcgatttgcataatacgatgaccgaactcaccgtgccgatgtccgnctttccaatcctctaaccaaactaatgaccgaacactgtgtcttttggcttttgggattctcggtccttgtatctcttcgagtgcggtattcaggatgtgcttagattcaaagtttggatccaaacttcagttcttttctatcacatcaatctgtcatacacgcataacattttaatcatattattgttaattttaaccaacatccacacttaagatccaactatacacagcctcagtttttacgcccacccctagccgatcaactaccaactgca

SEQ ID NO: 48414 - DNA, 355 bp, Oryza sativa
  unsure (1)..(355): unsure at all n locations
tgcaagctntgcttcgcctcacctgcccacactattatctatggccaagtggagcgcgccaatgcagaaatcctcaaaagccctaaaaccaagaccttcaatattctcaagaagcatggcgattcatggatcgaggagttgccagcggtgctctgggcgaaccgaaccacaccaagccgagcgaccggggaaacgcctttctttctcgtctacggcgcaaaagcggttctcccatccgagctcaccctgaggtgtcctcgggccaccatgtactgcgaggctgatcaagatcagcttcgtagagatgacctcgactacttggaagagcgaaggcggcgcgccttctcgatccttt

SEQ ID NO: 48415 - DNA, 463 bp, Oryza sativa
gcttatacgttaagggagtagcaaagacttttttagtatatctaatctaatggtgtaaaataatggggctaccaatctaagtgaaactcgacggttatattgaaaatatccatgtggcgatttaggagcgtttgttagaacgtcacatgatggcttacgagcgttcgtaaggagattaatggacttttattatataatagatagatatgctcttatgtatacatatagttttgtatattttaaaaaaaatcgaataagacgaacggttaaacgtgtttaaaaaagtcaacaacgtctgatatttatggacagagagagtacctcgcagatgtcgcgaccaacaccatcctctagttctccaagtagcatcactgataagctcattccagactattgcggccattgtgatgctgtacaagtgcggtttattgaagcgggttgttgttggttgctgctatatact

SEQ ID NO: 48416 - DNA, 341 bp, Oryza sativa
  unsure (1)..(341): unsure at all n locations
agctcaacagaagaagtattccttctgctccaaacttacatgccttctgagatgtattacccaacctataacaacacatcatagaagaacatttctttcctttgttacagatatccatctaaactttgaaacaaaatatgatattcttacaatggcatctgcagtctgctacacacacacacacacccacatgatgtgtntgggctgctggtgatatttaagctgaattacacaatgttaatgaacataaatcttgatgccatatgtttacactatgttaaatgtgtcattttgttggtttgctaaatcatcaatactgttgaacttggacagcatatctt

SEQ ID NO: 48417 - DNA, 291 bp, Oryza sativa
cctgccgcatgcctgcttatggcatcgatgctggtgtctgctaggttgtctacacattctcatgagacgctcttggtagtatcgagatcaccctcggatgtaaaactctctaccatggatgtccacatggatgaattgcctgccaatatgccaaacttctctacagtcatgcagcgagcagtttcttgtggtcagcttcttcctcggacacaacctgcacaagatctcagaggtggcggtgtacaacatggatttctcggggccatcagagtggtgctacgtggacgggat

SEQ ID NO: 48418 - DNA, 346 bp, Oryza sativa
  unsure (1)..(346): unsure at all n locations
agcttgaataggcagcgagagggcttttatgttgtatggaggattacntccacatcctccgatgtttgcaatgacgagggaaaacttggagctagtctcctagtcattttcatttcgtgtttttactttgtatctcaatcttaacatgttgagtggatgcactcgtgttacttttgcctgtgtgtatccaattatggaatggatataaaggccggatgtctatacattatttaaaaagtgatcgaatatcaatctttcaatagaaaaagggaaatacaaatactcaaccaatatgtttaatagagtcggcagaaaatatgtaaagaatattcatcctatgccttac

SEQ ID NO: 48419 - DNA, 429 bp, Oryza sativa
  unsure (1)..(429): unsure at all n locations
agctcagatctaaagaaagaatgggattctgtactcgctaaatcataanttttttatttttttttttttctaacatagatttcatgcttgttaataagaactgaatgaataataccttattgatgcgctattgtctactatggatctccgttgttttgtaaatgtaggcgacactcgtagagctgggataccttttattgggcatcatgataagatgcgaatttattcgccattatttcaaggtgattaaaatcattaaatttcgcaagttgtctattttctcaagattataccttgtcagttagaacgataatgtctttgagcatgaaagattaccacgtagattttgtgtttccccaaaactttttgaacatgaagattgacgttccgaaaaattttgattattaaagcagagtgcgtcctagtttc

SEQ ID NO: 48420 - DNA, 595 bp, Oryza sativa
agctctattaaatagtttaaattaagagtaatgctccggtgcaatctacttgcattattctactccaagtagaattaatcttgaccgtttattttgaagggcaggtaagtaatctcctaatatcgtttaggggtaattttggcatgggatgttttctttggttcgcatcgcattaggtccggactccatcacacgcagtcacctcgctattcctcccccggcctcgccgccttgtccgcccccaccgtcgccgtccgtatctcccaccgtcgccgccttgtccgcctcctcagtcgcattgtccatatgggagcggacgagtgtggcggcgtccgagcgaggatcttgagcaggagttctggcggtagtaaaaattccgacgtgggcttcggcggcggcggcgttacgcacgcacgcaacgtcatttgcgtggcggcatcggctcggctcattcctcttcttgccgttccgatcactgcgttggttcatggattatatggatcaattaatatcttgccctaccaaactccgaccacgataacatggtgctccatcttttttttatcaaatttatatcccccctacctcgaatcta

SEQ ID NO: 48421 - DNA, 118 bp, Oryza sativa
  unsure (1)..(118): unsure at all n locations
ttatgctgctncagctggctggggtgtattgggcaatgtgttatgacctatgcaactgtgctattgtatgctcattgagggttatgaacattatacttttgtaacggaccacgaaaac

SEQ ID NO: 48422 - DNA, 85 bp, Oryza sativa
  unsure (1)..(85): unsure at all n locations
ggggggggggggtattttgtttattnggaaggagggtgtgttgtggggggggggggggttatnnnnnaccccccccccccccccc

SEQ ID NO: 48423 - DNA, 583 bp, Oryza sativa
agcttttcctattcagcccaatggccgaacaagcaaaggcgcacaacctctcttctagcgttagcggtgacgacggggagccgaacccacgccgtcgagctcgtactccaccgccccctccacgccaaagtcctaagcgggaggaggcgctcgaaagggtcgaaggatccgcgacttcgacatccacgggtgatggagaagggcgccgagatggggagcgtcgcctcctcgtctacggcgacggcagcacgccccagggcgcgctccaagctgcgggcgcgctcctgcgtcacccgcccgtcgtccctgacccggagtctccagcccaacgatggctggacaacgtggccaacttggtcatgacggcacggcagcgcctaggtgctggtgggcggtcctccaccaccaagacctctggcgctgctaccaccggctccgtgtcgtcaaagcggagggcgcggctagcggcggctgttgcttcccattcggctgccactcccttgtcagcgccttcgaccccggaagatctgctggggggccatatgcccctccggtattaagacgccgggtaagggttgacggg

SEQ ID NO: 48424 - DNA, 221 bp, Oryza sativa
  unsure (1)..(221): unsure at all n locations
agaggtggcaaaagatgacaggtgacatattnttatctctatgctcgacaatgtccatgctggttggtcaagttctgcgagacctccagttgaaacatgtccgcttggtgtaagttgcagccgaggagaaggagccatacgtcgagcagttctaagttgacgagaagcgctacgcggaggagtcagccgtctaccgcggggcggatgacatggatgtggac

SEQ ID NO: 48425 - DNA, 649 bp, Oryza sativa
agcttatagaatttgtatttttttatcgatcattggaaaaaggctataaaccatttttttgatgtggtttatgataatttaaatggtatatagattgataatccaaaaaaaagtaaggtggtgtgacttcatgaaagaagaaaatgggggaaatgatttagacaatagattaatcatttaaaggctagaaacaataatatggtttaatgggagaatatagatactgtagaaattgatggggatatatatgttgaaatattatgtaaattatgtgggatgatgatttaacatgcttgaatttgaaagcttcaaaatataattaaatatagatgatataacatgtttgcatgaggtttaagatttaataattgctaatgaatgataatgtggtatctttgcatatcgagttttaggatgtaatgagttgtaactttatagatagtatagataaacttatagaaaacacataagatgccatggcccaaacctatgcatcttgtaaacagcattgaagtatacccttttaagaatataaagtgttggaaatgaatttgtccaacataatttaacttgaagtgccatattccaaacttttttttttttttgtatttttagaaccggcacaagaataattggacttatttaaata

SEQ ID NO: 48426 - DNA, 577 bp, Oryza sativa
  unsure (1)..(577): unsure at all n locations
agcttatacatgcttctcctggcatcttttgtacaaccgttccaaatgtacttctcaagaancgtgtccacattttgcaagctgaaggctttcagagcatgtgaacaaagaagacccatcctttcaaactttctgcaaccacaagagatttccatcgtggaagtatcaagaagaacggtccacacttttgatcccctcccctgcatagtaatttcaaacctcaacaagttcccaccacaagaactttcatggcatgaagttgctccgcacccatccagaaattctgcctcaaataatttgtatatcttatgcgtgtaggattctgcggcctgcttcagaactgcactgtgtttaattgcacgaactggagcagtttggctacagcgaaaatcctcttcagattcatttctacgtagacccttgaaaaccttttctagtaaaagggcaaatcgtgtaagaggggtagattcatcacatattccacgaaatgtattgtttgagacctccccccactgagatgaattgatcccccctcgaaagtatccttattaaatgctgcacaccaattattgcggga

SEQ ID NO: 48427 - DNA, 663 bp, Oryza sativa
agcttctcagccgctgctgatatctctgaactctgcataatctcaaatttttttattaagttctgacgaacgtattatgtgtggatgagaatggtgaaaaaagcataccagatacctatatgattgatatgcatatgattactggaaattataggagcaacagagaaacttactgatgctaaatgcttttcctctttctctgccagggtttcagcacttggatgatcatgggggctgcatttaaaaaaacggcatgatgggacacaatttctcagtagcagtaaaattggtactctaacttaattgcagtaacttaatttctcagtaatttaaagggtaacacaatttttcaccattctcatctaacttaattgcacatgaacagattattattaaatgtgttcagtgttagttacctttctatctcacaagatgctgagttctcctgactgattttctcgtcctggtctagtataactcttgtgagttcttcatcaagttgactctcttcttgggtaaccaaaatatgatctgtttttccgccttctaccgactgaattgattcttccagtgctctcatttggatgtctggaccataagatgatttcggactttttatgtcacattcaccattcatgttaccaaaagattcctttccctcca

SEQ ID NO: 48428 - DNA, 305 bp, Oryza sativa
  unsure (1)..(305): unsure at all n locations
ctctcagncngacgggggtggtgtagaatgaggtatactgcgtgatctgaaaagccggcatactgacaaagttgaacctatctaattattatttattcatcattgagtaggacacatatttcccattaaaccatgaactaaaattaagcacgtgttagaggtcatttgcatatattcctgtgaagcacagcattacaaacacactatttccttaagaacacactcacagccaaaggccattttattctccactggtactgaaggcaaattcatactataactatacattgttgttctctgataca

SEQ ID NO: 48429 - DNA, 573 bp, Oryza sativa
  unsure (1)..(573): unsure at all n locations
agcttaaaagaacttttttggctttctgatgaaaaggtgttcaccaccncactatcttttcaattttgagnagnccggaacgctacctaacaggggcaaggttaaaaaacctctgaaaaaaaactaaattattcccaaggatctcggtgccgaacgattcatggagaaaaaaattggtcacaggggaaataacttaatatatatatcaggcgatgaaaaatcctgaatttccaccgcccaggagagccataaaaaaaaaccaggatatctcaaaggactggttctaaccactgaagccctggatcgagtgaccccctaattgcgtaaagccacctcatcgatgggtggggtaaacaaccctaatcctaaaaaaggggcgcaagaatttatttaaaaaaaacactcccttttggcactccctaaaaatcttctatctttttttttatcaatacccctacagaaagacccgaaagggggtgaatgacaaacaattggcgcctgtgttaaacaataagggggaacccccccccaccccttgggggagaagagcgaacccagggggggggtttttcc

SEQ ID NO: 48430 - DNA, 461 bp, Oryza sativa
  unsure (1)..(461): unsure at all n locations
gatgctcagtgagtagttcagtatgtgtaaatttcatatgattnttctcagaacaatatttgagcatacattgtggattttgcacatgcaggagacctatgcactactgtactgtcataatttcttaaaaaaatagaacctgtagcttatactgtttntcaaactatgcacatccatagttcatgttacgatgcatttttgtcgcanaaagtgtgataaaatgacaagctttggttggtttagtgattcagtccagtatgtgtgaatttcacatgtaatttgccaggttatattatatttgagcatacattgtggtctttgctcatgttggagacctatgcatcgagtactggtttagtctcttaaaaaaaatggtgcctgcagcttatacttccttcacctatccgttnctgcagcggatactagtttttaaactatgcacatccatagttcatattatg

SEQ ID NO: 48431 - DNA, 680 bp, Oryza sativa
  unsure (1)..(680): unsure at all n locations
agcttaggataaaatttgataaacacttaaacaaactgctaattatttagcatgctaccgatttaatatggatattattattattgcttatgaaaacatgcttatggaactatttagggctatatgctaagaattgttgacaccgcttgtgagcgggtggtacacatgatagagttcatgtgtttggttttatcgacttgtttatggtcgtaatggatatatggatatatttatggttatttcttatttaaaattgatataataattgtcacgcctggaatttctatccaaaactccaaacgcttacatatgtgtaaaccctcgtccgggaatcagccgtggcatacaataacaaattgataatagagtgcaattattaatctaattaataggcgaatataaagtcattacagaggtagatagtttctctcaaacaataaagatctaagtagcggaaaataaaatagatagcgtaggcgacttcatcccacaagcagcttgaccaggactacgcctaatccttcacacctttcagcatcacttgtagaactncttctctgatgaatgattgccaggtgagtatatgacatacttaacaggccattcagcaaatattgcagtgccggtgattataaaagatggcataatataatctcatttgcataaatggcatttaataa

SEQ ID NO: 48432 - DNA, 334 bp, Oryza sativa
gtcaccattgcacacaggctaaaacgcccctgtattcctgtacagaaaacatgcacaaactgtattttatttcttcagcatgtgctctgcttctgtattttcgtcaaggagaaatgtctgacctttggagagaggctcaatggttggagactgtcatttgcactgttttattcaatttggaaatagtggtatgctactgtctactaccattggtagtagtactgtactgttttagagtcttggaccataaatatcctacgagtttataagtcttccagaaatcttttgcccttactcttcactgtagtgtccagattgtcactccactattgca

SEQ ID NO: 48433 - DNA, 558 bp, Oryza sativa
ggcttgctgaaataattataagaaaaatcaaagatatgcaccatcataagcattcttttttttagctcagaagaagggaataatagaaaagctgaatagtttttccgtcaaagagtattagtactagttaagtttagttgcttgttgattttcgatctatatgtttgccctatgtcttacaacaagaaaaaaatatttgcacgttaagaatgcataaattccaccaattttgtgggaaacatccactcttgctgaatttttgagatttatgggttccaaatgaagcctacaaatgtaagcaacttccaatatattggcaccatttgaccatttgaaagacaaatttacaagagtggaaattttctattgttatcaaattgagacattaacatgtaaggtttctagaaaacataacatgacaatcaaactacatttcatgtgatcctaaaaattttccccgttgtatctggactagcaaggtaatgcattaattatcaaaactttcacaaagaattacctaacaacttttgtaccatgggtaaccccaacccccccccc

SEQ ID NO: 48434 - DNA, 684 bp, Oryza sativa
agctatgcatcatttctaaagaatgcactgagatgaattcccaacgaacacactatcttgatctatttgcattataaagtaggtaaaagctgtgatgaggacatgcttcttgatcttgggccgttgacttcagatgcattctaactactggagctctgagctgttgcaagttgtagtgtggcagagaactccgttccctcggtcaaggctgaaacgccatcgccccacccaaccaaataaaggattgggaaagttttccctagcttccgtggaaaatacatactccctccatattttaatgtatgatgccattgacttttcgactaacgtttgatcattcattttattcaaaatttttgtacaaatataaaaatatttatgtcatgcttaaagaacattggatgacgaatcaagtcacaataaaataaatgataattacataaatttctttaaataagacgaatggtcaaacgttggacaaaaaatcaacggcgtcatacattaaaatacggaggtagtactttgtgaactattgaatgacctctgtttggaaagagtaatactctccccgtccatatcaaaatatagtaatataggataggattagacgtgccactgtctatattcgtagaatatcaagtcctaagttattatattttataacagagctagtacttaattgga

SEQ ID NO: 48435 - DNA, 356 bp, Oryza sativa
  unsure (1)..(356): unsure at all n locations
aaaatataacggaacctttattgatcattgttggagatagatcgtagccagtagcccaccctttggctgtgttctttccccaattttcccaacccacctgtctcgttttccgcgcgcacgcttttcagttgcttaaaaaatcatattaatctactntttaaaaaatagttaatacaacattaatcatgtaataaaacgagcttcgttttgcgtgccggacggaggggttgccaaccactcctcccaaacgcagcctttatattgggacgaatcatgaacagagtggatggcataacaagaaaatactagtgatgccaagatggcaaagcacgccgaatgcgatgggaccactccta

SEQ ID NO: 48436 - DNA, 613 bp, Oryza sativa
agcttcaaaatttcttcaaaaaagaggggaggtcatgccaaaatttctttgaatttattttggtgattacatacaaatcggaggtgcctaaaaggtttgcatcttcatcctccaatgtttttttttgtcatattacatttgcagctatgtttggcatacttttttgtctccaaaatttagttgtaagttgatgagggagaaaatttgtgtggggaagaaagaatatatagaaatttagttgatttgctaaagaaggttttataaaatagttgagaaggaaaactatagtgagagttaatcttgaatactagaaaacaaactaaaatgaaaattaaaagaagtaaaacacattaaaattagtttaaaactttataaatagtaaataagaattatttggtgtaatattttatgatttttgtatgaataaagatatgtcattattatatgactgttgaaacagtttgtaattatcttataattattgtatgactgtcattattgtaagaataattatttttgtacgattttttctcgactcatgtagatggatcggcaatggatgtacgctgaccggtggtccaaagaagttattgaccgcgtgcactattttttg

SEQ ID NO: 48437 - DNA, 452 bp, Oryza sativa
  unsure (1)..(452): unsure at all n locations
tgaactcgtcgagtcgtcgtcatanttcgtatatgagcctggattgctggacacagaaggccagcccaatcccagcagcctaaccagtcccgttagtttgttggattattgggcctttggctatcattaaaggaaatgttggattgcgtcaagcccaacagacatgaattgaacaagacgacaacctcttgatcgccaccggataattgaccctaaaacaaaaaaagaaagggacaattgcatctatcccctcactttcaaatctaattattattttatccttattttttagggtttgcagttttacctgggtgtgctaacgggcgatcgatccccacgccccctgtacacacctctccttccttcctcctcttcttctcttcctactacactataaatntaaaaaattaaaaaaataaagttaaaataaatntatgtatatatatatatat

SEQ ID NO: 48438 - DNA, 621 bp, Oryza sativa
agcttcttcttgaacacccacttgcaccccacaggtttacacccatatggtttctctgtcacctcccaaggcccgttagcgataatggaatccatttcactacggacagcctcctttcagtagtctgcatcaggagatgcatatgcttctgaaattgacttaggagtgtcatccacgaggtacacagtgaaatcatcaccaaaagacttagccgtcctttgtctcttactccttcgaggagcttcactgacatcctcctcagagacaagttcatgtgtatgttcagtttgttctggtggtgtgattgaactgggaattatttcacagggttggttcgaaccactatgtgtatccttcattgggaaaaagctctcaaagaaggtagcatcacgagactccataattgtaccaacatgcatgtcccgtacctcagatttaactattgaaaatctataggcaatgctatgatgagcatatcccagaaaaacacagtccacagtcttaggtccaagtttcccttcttcgttagtggtacattgactttccccaacacccccatgtgcgcaaaaagaaaatggtgggtttctaccaattcctattctatatggtggtttggcctta

SEQ ID NO: 48439 - DNA, 369 bp, Oryza sativa
agggccataacttaccataattgtctttgttttaggaaatgtgcatctgtggggaggagggcattctcatcagagcaaacttctggatactaaaattaatgtgaaaaacaaagaaaaatttttagccacatgaaccttacaaaagatatctacggttcaagccaaaggaagttgctatctcacttggatatcatcaacagggtgaaaagttctctcacaaacttgcacctgtagaaagtaaaaactttgggatgggatacttttgctcaaaaccagaacatgaagacaagtgccgattcaatattctgtgaaccacagagctggataaaattgatgaaatgctctcatatgcctactgggttaactctg

SEQ ID NO: 48440 - DNA, 523 bp, Oryza sativa
agcttggctagtggatcatagcttagcttgtgcttgcggcgttctgggacttggtcacgaaagtgaccgagtgaagcatcgttttcccggcacagtagccctaccttggtagctagctagctactccctaaataaaaaaaaaactcaatttaggtggtgttcttttctcctgaagatgaaattaagttttttacgtaaaatgagatggtattaacgtacgattaattgatttttaattattataaacttgaaaaaatagattaatatgatattttagaacaactttcatatggaaagttttcgcacgaaacacaccgtttagcagtttgaaaagcatgtcacgaaaaatcttaatcttcatccaacttttgttggagaaacaaatgggaccttatagagtttaaattttatcccgcggaaaaccaacttctatcaccctacataccttcaggtttcaacacataaaatgagaagttttatcccttaaatatcctttacttacctatcatcattactatatttt

SEQ ID NO: 48441 - DNA, 387 bp, Oryza sativa
agcttcacctgccttggtggctcctccacctccttgacaggctccaccaccttcgcctcctcctcctcctccacagccgccgccgccgccttggcggccgccttccgccccttcttcttgcgcggcttctgcttcggcgcggcggccaccacctcctgcggcgatggcatggcctccttgtcgtccatcacgatccccttctcgtccatggccttcttgacacggtcacccacgtcgatcccggtgagggtgtagggctcgacggcgagcaccttggccacgtcgctgtgagcgaggtctagcctgcccagcgcctttaagcatggcgcccgcttgatccccgccgtgttgtacctggggcgaaggtccaagggccaggtttgtact

SEQ ID NO: 48442 - DNA, 427 bp, Oryza sativa
agcttgtgtcgtcatgctgtcggagacactggagctggagttcttccatgaatttgtgaatgaagggtatgttcctgtagttctcattctgtgactcttgttaagggtagcatttgattaatcataggtgctaattttactatctaacactaattaacaaagaaatgagtttatgcttctgacccaaaacctgaaatgatttgattggtatcatatagaatccaggattactatttagtgtttgatgtatcacatactactaatattggactcattagtaatgaaactagcaaaaatgtttctggagtcttgtcttattgacacatggagtgaaatctgatcaagtagaggggcctggtatatattccagtttgacttaatttaacaatttttaaatcttacaaaatacaaatgatgctcatagaag

SEQ ID NO: 48443 - DNA, 414 bp, Oryza sativa
tttctcattgcttgcctgctgcttttttgttgtccatcgcgatcttgaccggttgagatagtactaaatcgccgtcttgccgaaaggagaaacgagccatccagcgaatcttcagagaaaagcggtgtgttaaatcgcaaaagaacaatttgtaagtgtacattggatgttaactggatgttggaatggttttccacatgaatgaaaaactaatttcatactcgtatggaaccgcgagacaaatttattagctaatttatctatcattgcacacgtgtttactgtacactcatggtattatggactattgactcaaagattctctcgtgatttcatgcaactggtaataagtttctttattatattatgccttccattgctacaactcatggaggttctggaaaaatttgaaat

SEQ ID NO: 48444 - DNA, 527 bp, Oryza sativa
  unsure (1)..(527): unsure at all n locations
agcttcggatgtgcatcgactacaccgaccttaacaaggtatgtcctaaggatccttaccccctgccacgcatatatcagattgtcgactccaccgcggggtgcgaccttttgtgttttctagatgcatactctagttatcatcaaattcncatggctagggaggatgaggaaaaaactgcattcattacccctataggaacttattgttatacgacaatgcctttcgggttaaagaatgcaggtcctacttttcaacgtactactcgaatttctttgggtagccagataggacgcaatgttgaggcctatgttgatgacttggttgtgaagacgcgcaaccaagagaccttactctcggatctagcggaaactttcaaaagtctccgctccgcccgcataaagctgaaccccgataagtgcgtgttcggcgtgcctgccggcaagcttctcgggttctnggtctctgcccgacgcatcgaggccaaccccgagaagatccgagctatagagccgatgcaccccccc

SEQ ID NO: 48445 - DNA, 471 bp, Oryza sativa
  unsure (1)..(471): unsure at all n locations
atatcacgtagacttacactcaggaatcatttttctttctcatacctcttgacaggatggcaatttccctctccctttattgactacttttatttaccattatgatctccagcattaattatgaggatgctctctcttttcttctgcagatacttgatagccttgcacacgacagattatcaacatcctatgctcttcctcaacaccattgcagttgttgtgctggttgttgcaaaactaccgaacatgcacaaggtccggatctttggaatcaatgctggcaactaggcggcagcatcccacggtttgttatcactaccatgcttcatttgagtggcaggaaacagtatacctagttctgaatggataaccagagtgagtagttnttaagagcttgtagtagatgacatgtaatcatcgtacagaagctaaggcatggaaatgatgttgtcatcatctaatgaacacact

SEQ ID NO: 48446 - DNA, 544 bp, Oryza sativa
agcttgattgaagaagactcaatgcgggtggcctttggacgcaaccttcagtggccctccctcctcttgggctttctttccccaaaggacgtcggtgggctctcatccaaacagcaacaagaccaagttagcttcttgatggcttcatatgggtggccttggattttcacagcctttcgttggccattcatctaattcggcatgcttgtggctgtgtgacgagtggttgttgataagttggggtgttagctttaggttgttttggttgttggctgggtaattttgcaggtgtagttcgtcaatcgttatattttgggatgttttcctttgtattccctgtgtattttctttttctatcttccagggcccctgcgcttgcgcgggaaaagcctgccctgtgtaagatcattttgaaaagctactaaacttcactcccatctttttcattaacaacaaagaaaactttatttatcgggcctttgatgagtaagcctaactataccgcttaagatgcaaacaacaagcttatattccccgggatttt

SEQ ID NO: 48447 - DNA, 348 bp, Oryza sativa
ggccgcgctattatggaccatacaatgtatctggaaattatcaacaaggtggcttatcgcctcgctctgccggctggggcgcgcctgcatgatgtgttccatgtcggtcttctcaagccgttcgtcggcacgccgccgacgtctccaccggcgctgccctcgacactacacggagcggcgttgcctcagccagcacaagtactcaagtctcgtatggctcgtggggtgcatcagctgctcgttcgatgggaccgtctgccggcatctgcaacgtcgtgggaagacttggacgatttccgtactcgctattccgcatttcagctcgcggacgagctatttgtcgaggag

SEQ ID NO: 48448 - DNA, 658 bp, Oryza sativa
agcttttttatagagatttcttatatgacttcttttgtatttctaaaagcaaacgaacttaaaatcggactcaaacatggatctctattttcaaaagtgaacgaacttaaaaaatgcccaaatacggataacgtaccaaaataccgacaaaaacattttaatttttcgggaaggctaaatggttgtcgaatgatttttgataactaaatcattcatgttttaatatattcagaactgttgtttaatacgttatagcaaaatgttttatgagatgatttggttgtgtttcgattttttaaaagattgaaaccttctcaatttacttggtgaaacattttcaatatgggttagtatatgaaacgccgtgattcgtctgaacccgtccattttacccctacccctgatccaccgctccggcgagtccactagagaggacgaaaaggcattaatcctgaaaaagcagcatcgttctccgacacacacttgaacctagccgattcctattgacctctggtgaaaaggaagagaaaacacgtccaagttcgttttgacaatacgctcctttcagaaaatcgaacaaaatccatcccctgaagcagatatgctacacgaatactacacgatggacgagcacaccggacaaggacagtgagcccca

SEQ ID NO: 48449 - DNA, 449 bp, Oryza sativa
  unsure (1)..(449): unsure at all n locations
actcaacttcgatctatggtgtattacatttggctagcccaaaaaaaagacagtcttttcgcggcacaaaagcaccacacctcaaacccaggccattgcaacaaatgtactacagcacaatccctaattccgatctcccaaaacaagaaggagatggcactgaaataatctccgcctgaagagatccatctgataacacagtggatagctaacgggataaccatcgaaaccatcctggttcagaatcggacgagaaccagagaggcctctcgaatttcaagttgtactcttactattaaattcagtgtagcattcagggcgatgcttaccccttgcttgccggggattgtgcaatgccagatcatgaagttgaccgtnccgtcngccaacgtctccggcttggcgacgaaaccctacngaaccaaatcagaacacatatcagggggatc

SEQ ID NO: 48450 - DNA, 660 bp, Oryza sativa
  unsure (1)..(660): unsure at all n locations
agcttgagggtcggcacatcataacggaagtggaagaagatggacgtcctatttccctggtctaagccgccaaaaacnangnacgnnacagcggnngggttgggcgggataacgtgcctgtcagtacgatgtactggcgaagaacaagggcacgcggagatcatgagagctttgtcccatattccgagaaagagatgctgtggaccacaatgctcgagacattcacccttcctgcgggtacagaggacaaagtgaaaaggtggactctaaagaaaatggcagaacagtttcagagcttgaagggagatctgtaccaggaagtatatactgaaggggcagacaccgaacttcgacacattcccaaagctaagggatcactgggacgagtttgttgcatataagacaggtgaacaaaggcagacgatgatggaaagaaacaaagaaaatgctgccaagaagaagtaccatcaccacttggggtcaggaggctatagtgtcgcgatgccgaaatgggagcagatggaggctatcttgattgagaggggtatttaacccgcaacagccaattgggcggaaccatcgaagttctgggactatgctcactgtggaacgctcaacccacctgatgggtcactgggccttccggtttcatatatgaga

SEQ ID NO: 48451 - DNA, 510 bp, Oryza sativa
agcttagatcaaataatttgttttaataatccagtgaataagcttaaaagaacgtagagttagtggttgatttaaggctaatttttttattggaaatatgactatcaaaaatagatggagagagagtggatttatgaaatcagtttacagctacgtattgaagaaaagttaagtcaattttttcgttaaagaaagtttaaaccccattatattgcatattgtcagtgctatcaattctgtaattaattttcacgttgaaatcggaatctggccgtcgcatcacgtcagtgtaaaaaagataatagacggccaaatgagaccaagaaaaacatttggcaggcaaatgtcgccatcacctttacctgcataggagggtcatgtagaattaggcatggttaggtgaagtaattaattaattacataatgccctgttgagttaattattcagttagttgccattcgttccagatcaagaattcaaagattgaagatgatatatttaatttgcat

SEQ ID NO: 48452 - DNA, 498 bp, Oryza sativa
  unsure (1)..(498): unsure at all n locations
tcttcatcaccatataatcctgtctctcctttttactcttctgccagtccaatatcatgcccacttaccagtccgtcatatgtgcctaccagtctaccacactcaccaacatcttcaatatacagcgctacatcttctatctacaggccttcatcttctatctacaggcctacatcactaaggtacaggcccacatcaccagttatagtccgacttctcctgtatattacccaacttcttctgcaacaggcccacatcaccatcttattaccctacatcggccgcttacaggtacaggcccacatcaccatcttatagccccacaatcgcggcttacaggtacagccccacatcaccatcttatagccccacatcgccggcttacaattaccagcccacatcaccgtcatatagcccaacatcggcgtcttacaagcccacatcaccatcatacagcccaacatnncgcgtctacagtncgacgtcaccctcatatag

SEQ ID NO: 48453 - DNA, 440 bp, Oryza sativa
agcttgcagttcttaggacgaatatcgcacaagttaaaataaggtgcgaaacattgattttaccaaagataaattatatcacaattctttggagaataatcggatttcaacttcttttttcactccagaaatctggattgttctatcgattttgaacaagttttgtcacagccgaatctgagaaagtctgtacaggcagacatcacacaagttcatgacaggaggaacatgggaatcctacaacgatgcagagcaagcaaaaagaaaaagtgtgaaaaaaaaaaagaaaactaataatgatggtttcctctggtcttgtttcacttctggcacgaaaccaaaactgtctactatcagctaaaaaaaagctcgcggctcgcgacgccgcttctcacgctggcagctcgagccgcaggccgatgcgactcgactccgcgctc

SEQ ID NO: 48454 - DNA, 435 bp, Oryza sativa
agctctgggaagcccacctgatcgagccatggagaagcagaagccaaccctcgacggtccctcctttctctaagctgctccaaggtcgagctctgcttgccccacgcgccgccaggaaggagccgtcaacctcacggcttgagctcttgctggggtgagatcgagggagaagtcgatgctcgctactgctagctccctactccacccaccatcgtgatggtgggacctgctccgcgcgagctgctgctccttgctgctcgggatgtttctggtgctaccactccttgcccgtggtggctacttctgcttctccttgacatgccagatcaagggcgccatctggagctcgagaacttcacccagagagtaacgcgaggagcggaccggggagataacggcgatgatcggcgagggtggaaagaaagaaagaatgga

SEQ ID NO: 48455 - DNA, 338 bp, Oryza sativa
  unsure (1)..(338): unsure at all n locations
ngcacgcaatcggattagacaggttcgggctgctatagagcgtaacaccctactcctgtgtttgggattatggatgagttttacaaagatttcttcactctagaaagcgcactcgcttcctccctcctggagtttaggttttttctccctctctcccctttttctttcttttttttcttgtctcagngggcagggtcctccttttatagctcaaggggataccacatgcgccgcctctacctaccctctatcggagggggatcccaattcacttttcctgggctttaaaccgtgccttctccccgaagctaagcaacaaccgcgtcttgagtggaacc

SEQ ID NO: 48456 - DNA, 211 bp, Oryza sativa
  unsure (1)..(211): unsure at all n locations
agaaactaaattcgagccagtagtagctttagcttgtcccaaaatttttgatgaaattttccgctttttggatgaatgttttttgaggtgaaagcattttggcanggtttggtttcacacatttttcctcatataaggtgggggtgcatgtttgttgtggccaaattctcgagaaaggtgggcaaaaagcctctactgctttactccctaa

SEQ ID NO: 48457 - DNA, 489 bp, Oryza sativa
ctggaatttagtatactactaatgttctatgtacagaatatatatactacaatacccatgcagaataaccaggttaatgatcccacaacccaaaagaaaagagaggcacgctgatggaagaatacagaacatacaaaatgtagttaaagtaaccagttggcttccctctagttttttatgccaattattcagaagcacgtactgcgagtttgtgctattcatatgaacatcaaaatcaaaagaacaggaggaaacagtgacaataatagactgaaatatacaagacaaccaccacaaagatggcttaatgttgacgttctgtgcaagagaaaataatgttataaaatgaaggtctaagctcgtaaatttctacaccagttgcaatcctagagggtatagaaagaactaatcaaacacatgatggaataattcatacagacccaacatataacctaataaatgaataaggaagcagcattatcatccaca

SEQ ID NO: 48458 - DNA, 590 bp, Oryza sativa
agcttgggttggtctcctctaaaaatattaaataataggttaatactgcacttaacagggccaagtttcctttaaaaaaaagaacaacaacaacaagaagaagagagcgcaagaacagtaagtgtctctcctaaccactaatcggactttgtcggatggtgtgtaattgttctttcctaacaaatcccaactaacaaccataactacatagaattttcaacgttactaggttctgactgacatatcacagatgcttcgacgccttctgattgagtgcaaccaaaaaactcaactgatgcaagcaagcaaaatgatataagcccccagaccacctctgccactttgcttcagatgctggcaaaaaccgcgcggcttaattcagatcccgatgaggatgtgaattgtgccggaagatcagcttatcgccgggaaacggacacccgcgaggccccattggctgcgtggatctccctttgttcccggagcaagctagctgctagcctggctcgtgttgaccatgccaagcaggattggctatccctctggttgctaccagccaccagtccaaatgcagaaattcagcagcattt

SEQ ID NO: 48459 - DNA, 366 bp, Oryza sativa
  unsure (1)..(366): unsure at all n locations
gatgagccattgccctatccaaagtttgttctcactactagaaaagcctattttgcaggcggccaaaacacattttcgcatgtggccaaatactctgcctatagcaagatgtgaaaatcgtcgaattttgcagacagtcatgggtctgcctgcaaaagtcaatttttgcagaaggacccattaagaggaactcttgccaaaagaattgtgtgcaaaaagaaaaataaatagcaatatattattcatggcatgcaaattcacattgaaagacacatccgtggtggaatgtctcacaanatatgtggaagttcacgttcaatatcacattcaaatccacacccgtattttcatagcaagttggaagtt

SEQ ID NO: 48460 - DNA, 576 bp, Oryza sativa
  unsure (1)..(576): unsure at all n locations
agcttgagatgaatgttcagagaaaaagaaaatggcaagacggntataaagtgtgccttttgaaaagtttatctataaatccatttttgggtgaggggcagttgctaaagacggatctttgttggattctttttttaaccagctgacttgatttccactgagcattttgtcctcctatgagcacctcatgcatcaatattgcatgtttgcaccgttgcgattttttatttctctttattttgtttgcttaagccgatgcatgaaggatgcaatttgtcagtgaaaatcaggtaagaagaatttgacaatcgtatggccagaatttttcaaaagaagaagaagaagaagaagaagaagaagatttttatttcattatatccacagtgtatctattgttgttttgttgtcttcttccaattcaatcagtatcacataaaaccaaaaaaaaaagactgaaagtggcaggtttttagattttcgtttggtgcattcgtcgatagtatatatgggtatcatttcttcataaaaagatggaaacaagttattgtctgcaagtgatatgtgcttggcaacctt

SEQ ID NO: 48461 - DNA, 297 bp, Oryza sativa
  unsure (1)..(297): unsure at all n locations
tccgagcgcacggcgacttgatggctccatggcataagctgagatctgacatatgcgggcggcgctacaagccactgtcctgcaaacacaaagtttnagcaaaattccggtctttccatcagcgaacaacccaaaataaacccaatcaaaatcaaatcggatcaattgagctcatctgctcatgttttcaagtacccccagccttactcgctcccatctaggagggcatatagaatagaagcagatagataagaggaaagggggtgctgacctcgaatggaaccacacttcaaccgg

SEQ ID NO: 48462 - DNA, 605 bp, Oryza sativa
  unsure (1)..(605): unsure at all n locations
agcttagatcaaataatttgttttaataatccagtgaataagcttaattagatcttattgttagtggttgatttagggctaatttttttattggaaatatgactatcaaaaatagatggagagagagtggatttatgaaatcagtttacagctacgtatggaagaaagtttaggtcaattttttcgttaaagaaagtttagacccaattatattgcatattgtcagtgctatcaattctgtaattaattttcacgttgaaatcggaatctggccgtcgcatcacgtcagtgtaaaaaagataatagacggccaaatgagaccaagaaaaacatttggcaggcaaatgtcgccatcacctttacctgcataggagggtcatgtagaattangcatggttaggtgaagtaattaattaattacataatgccttgttgagttaattatttagttagttgccattcgttccagatcaaaaattcaaagattgaggatgatatatttaatttgcatgttgcaacatgtatatgtaagaaaagataagagtttatattcccattgcatcaggggggttgcaatttgcattccagaaaacaaaatatatttt

SEQ ID NO: 48463 - DNA, 499 bp, Oryza sativa
tcacctcttcatcaccatataatcctgtctctcctttttactcgcctgccagtccattatcatgcccacttaccagtccgtcatatgtgcctaccagtctaccacactcaccaacatctccaatatacagcgctacatctcctatctacagcccttcatctcctatctacagccctacatcactaagttacagtcccacatcaccagtttatagtccgacttctcctgtatataacccaacttcttctgcatacagccccacatcaccatcttataaccctacatcgccgtcttacagttacagccccacatcaccatcttatagccccacatcgccgtcttacagttacagccccacatcaccatcttatagccccacatcgccgtcttacaattacagccccacatcaccgtcatatagcccaacatctgcgtcttacagcctcacatcaccatcatacagcccaacatcgtcgtcttacagtccgacgtcaccctc

SEQ ID NO: 48464 - DNA, 533 bp, Oryza sativa
  unsure (1)..(533): unsure at all n locations
agcttatagctcctttttctgcaccttttctctgcatgcttacatttttttttattcattcataataaataccctgaaagtaagccgaaactatgattataaactgacgtgtgttttggatagtgcaacagaaactttctttaatgtcagttgcttctctgtcagttagcttgaatactaccaatactaattaacattagaagaaatttcttttttttttttttgcttaggtcaagttgaatcattctgaaaggactgaaaatggaagccacacccacacatgcttatcggcaagcaagccaaaaactttctttttgacatgaacagtgttcttccacttcaccctatcttctacttcctcccgtggtgccttgtccctcactctccgccttctcctgcccaacaaaatccttcgtcgagatgtgctctgccgatctgtaaaaatgctagctntaatcttcatcatcagtagcagcaaaaaaaaaggcccttttttttcttagtaatcagacacggttgtaaaaactaaaaaa

SEQ ID NO: 48465 - DNA, 285 bp, Oryza sativa
atagataacgcagccaggcgcccatgtggcatgagctgccacatacttttctttgctctccagtgtgggtagcgtcgaactaccattttctactttctgaatctatagtatacgctatacgtgcttgtgttggaacgagatcctctgtaatactgagactgacatgtggccccagttacccataggccacatgtcagcttgttctattacaaggaaactaatctgatcctcgagaaatgtcaactcgtatttcatgccctaaaagggtaccaagaatctgaaaat

SEQ ID NO: 48466 - DNA, 373 bp, Oryza sativa
agcttgtacagcacagcagcagtagtctagcagcaactagtagctttgcaataaaagagaaaaagataatactactaagttagcactattactttattaggctgtattcttttacgtggggtgggaactaaaaccatatttagaagggactaaaactttttatccttatcacataaaatgtttggaccctaattataaaatattaatgtagactattaataaaacccatccatgatcttgaactaattcgcgagacgaatctattgagcctaattaattcataattagcctatgtgatgttacaagtaatattctttaattatggatttaatttggcttaaataaattgtctcccgaattaactttcatatat

SEQ ID NO: 48467 - DNA, 327 bp, Oryza sativa
ctacggtgatgccccccctttcacctatgtttctgtgtattccacacaatgaatcggtctgaaacacgattatagagatgctgcagtgacattatattgggagatggttgcactaatatttaaaatcagtatatctgtatgtgataggctattagagaattaaagataggagtggcaaaaggttcccttgtagtccttcctcaacactgctagagtgaaagagaaggtgcgaatgggaagtgtgaggaggttccttacggttgtcttaacttgtgagtctctgcgctagaaccattttgaacaaggagattcctattggtctgatac

SEQ ID NO: 48468 - DNA, 403 bp, Oryza sativa
  unsure (1)..(403): unsure at all n locations
agcttccccgcatctccctctcccttttccccttttcgccgcgctctcccgtgcctcctaccggtcacgcgccgctcgccactagcgccgccgcatgccgccacctccggtcgtgcgccgcagccgctagagccgccgccgccattagcattgccgccgcgtgagccacctcggccgccgctcggtttccgctaaaccccaccggagcccggttctcctcgcacaccggtgagctatccattctccttcgtctccggccaacaatgctggccgccggggtcactctctctactcctaatccttctcaactccctccgtaggtgccgccgccacccgtccgcccctcctcatcgctaggtcgncgccgccaccttcatcctccgctccggccgccatactcgtc

SEQ ID NO: 48469 - DNA, 187 bp, Oryza sativa
agcttcactccctctatagcatttaaaacaatcatcaattattttcggccaatgaatttccactctcctaagcaaccaatttatcttatgggccgactgatgaattccacaaatccctacatgaacttctcccatagcaactctagattgaccattatccaatcactttaataccactccatttata

SEQ ID NO: 48470 - DNA, 424 bp, Oryza sativa
  unsure (1)..(424): unsure at all n locations
tgatagtatgaagtaacagttctggtatcttggtttaaacattgcagnttggtgaacaaaatgtcagcataatacatgggaacataaacatctcttgaatatcggttcaggtctttccaagattgtggtattttgttatgcctacaaagatgtttccaatcattagaagcatgtttaattaaaacactagaggcacacataaccttttgtttctccgacaagacatgcttttgaaattcactatcaaccgctagctcccaattaatgtaagcacgaggatcatagtctccctcgaaataaggcagtgcagatttgatcttacctagaacatcatcacttaccttataatggtcatgttgatccctcctcatgtctcaacgaagatgtcgatgttgagcgcagctatccncaattatcttgcgta

SEQ ID NO: 48471 - DNA, 591 bp, Oryza sativa
agcttgtgatttcaccatggcgatgtgatgggatcagagcacaaccagagtttcccattccgccgggactagagttaccgcgccccggcggtaaggacggtaacagcacgaaaccgtgtaaaatttatcattaattattttttaaatttatttgaatttaagaaggttactacggtttttcttttaccttttaccgtacttaacccatgataagcacggtaaccatgctgttatcgggggttttacaaaccctgtgcacaactcccagtagatttcaatactactgcagctggttgtagtaggagtactacgcaggaacaaccggtacggtgagctagttattgtgagccggaacaccagagagtacgacataaactgcctgtgtttacagcagctcgtgcagcgttcagtgccatctgtttcgatgattcgtcagggttgttgtataagctttgctgcttgcatgccattgaagtgcatggagaaggttgatgaatgtgttgcgatgtgttctacttgctactgctactctgctagtgggaggtggtgcagtggaaaaactgaaaaattattgatattgttgccggaata

SEQ ID NO: 48472 - DNA, 492 bp, Oryza sativa
  unsure (1)..(492): unsure at all n locations
taagcttctccactccgctgccttctcatctgcatttcaggcgccatctgtttggccgcggctgctgccggacacccaggctgccagacgaggtgcggggacgtcgacatcccgttccccttcggcatcggcgatcactgcgcgattcacgagggttttcggctcgagtgcgacaacgccacgaaaggcaccagcaatcagaagcctttctggggggacttcgaggtgatcaagatctccatggaagactgcaaggtctgggtgaaggcgtacatgtccaggcagtgctactaccaatccacgggcggtatgcatacagcgacgcattggcgaatttgagtggttcatctttcttgttatcggacacggactacataattaccgngatcggatgctagactttcgcctacatgaccaccgtatctgtacgtactatttaacataacttagtaaactgtattcacaaagtcgataaatcagccccttatatta

SEQ ID NO: 48473 - DNA, 479 bp, Oryza sativa
  unsure (1)..(479): unsure at all n locations
agcttctcctcgtgcttcacatcgtcaagcggtcaagcgaataatgaggtatttgaatcatacacttgagtttggaatttggtattctacttcatcttctatatgtttaagtggatattccgatgctgattttagtggttgtagaattaataggaaaagtactagtagaacatgttattttcttggtacatcattgattgcatggtcttctaggaaacaatctagtgttgcttaatcaaatgctgaatctgaatatgtngctgctgctagttgttgttcacagattctttggcttttatctactttgaaagattatggtcttacttttgagaaagtacctctcttttgtgataatactagtgctatcaatattgctaagaatcatgttcaacactcacgcacaaagcacattgatattcgttttcacatggacaccaagttgcaaattgctgatattttcactaaacctttggattcta

SEQ ID NO: 48474 - DNA, 475 bp, Oryza sativa
  unsure (1)..(475): unsure at all n locations
gcttacacatcactaaatgatagttcagtggagcatgtttatcttatcaagtgtttactttaaaagtaatataattaacattcctaatcgactattttaataaacttaaaagattattaccaaaagaagaccaaaaaaaaaacctcnaatagtttctgggaaaggaatcagtaaaactttctcatcatatatatctgtcgatagttcttacgtgtagagagcatcttcatccttggcttcatgctcgtctcccggagaaaaggctgttgcaagagcaccaaaccgctcttcaggatcttcaatattcaataggtacttcagaagcttcatctctggaggtgagaatgctctgagggcttcttnnagtgtgatagatatgatacatatatcttaacctatgacaaaatgataatatgcataacagacatngttacagtctgagaccatatattcattaactatcaaagctcaacac

SEQ ID NO: 48475 - DNA, 665 bp, Oryza sativa
agcttaacaaagtttgactaggtaaaaagtcaaaacgacttataatatgaattttatgtattttttactgtttttttttgaggaaaaggaagtattattgttacattttggttactactaagtattgagtattgacacatgcaacatatttatatctttatatgtacaggtagcagctcttgttccaaaaactgaactggatggtgagatgggagatgcccatgttgcacttcaagcaaggcttatgagtcaagcacttcgcaagttgagccattctctttctcgctccaggacaatgttggtgtttattaatcaggtttgccttttgtataattcattgggtaatgctggccatccaacaatatttgtagtgaaattttaagtccttacgcaaagtataaatagtcacttcctcccattaatttatttcaatatttaaataaatacccagctgttggacatgtgacctataccttcaaaaagttgatggctgggtcagccttgataactctaattccagcactcctaaaacaccaccctattttattatttaaaaaccagagtttgcttttttttttaaaaattttcccatattcaacgtggcttttgacttttttaggtgacagttgtcccaaaatttgttttatttggtaaaccccctccgg

SEQ ID NO: 48476 - DNA, 599 bp, Oryza sativa
  unsure (1)..(599): unsure at all n locations
agctttcattattttaaaaaaacctctaaagaccaaccattggtagctagtggaaccaatccatgttgtcagcacagatcgatggagcaacctacagtatatagctgctgtcaagtacaggtagtagtgacaacggcattgtgtaatactcatgaaaagcaagcaacggcagcaggagaagtctctttcagctgtcaatagttttgccgtggatcacgagtagagagtcatcaaatcagatgtttattagacggagcgtatcagcgtatcgtgtactcctgctagtgttgctagtgtgtttgtgctgcctgcaagcgcaatgcagcancaagcaactgcagtgagatgatcgaatcgaatcctgcaaggggaaaaaggaatcatcagtgaatgaaatccaatccctttcgggtttggttttggttttcctggctgcctggttgcttgctttgcagtttgccttgtggtcgtggaccgagctgctatgctattgctaactttccttctttcttttcgcgtatctcgatgactcgacaggcttcactgctgcactcttacagcaacaagataaacatacgttggccccacaccagacgcac

SEQ ID NO: 48477 - DNA, 367 bp, Oryza sativa
  unsure (1)..(367): unsure at all n locations
tgattactgcagagatngnggaacagtgtgctaaaatcagtgaacccccacttgattgggttcctgctttcttgcccagaaaattggaagggtgtactaatcaaaagtgagtttttttttaatgatttttgctccggtgccttaacggagacatcacggtttttcgctgaacaaccggngaggtggatacatctcctacctaataacaaatatgagagcataagggaaaaaagatgctacggattggtctnttcctggtcgaagaacactattagaagagtctggacatctaggaaaacgattgcttaacattcactcaatagaacattgtattaaaaataatttatacactctagaacaacagact

SEQ ID NO: 48478 - DNA, 628 bp, Oryza sativa
agcttaaggagttagtgggggataactttatagtaagacaggatgcctatttatccatcgcgaacctgagcggcctacctctatgctcgggtcaccgacatgtgggacccacttgtcagctccatctccttccgacctgtccgtcccatctatctactctactagcttgccatcattcatggcggacatgcgccggtttcttctcgctggtagcgcattgaagcctctccgcaggtaacaaagatgctactagatggatttcttgattgccgatcgaatctctatccttcccgatcgattcgagtcgggttcaaaatatgataaaccctatcccttgttaagttgttgttacactctgtccaggtttctcccttccccgtctctcctctactgctactgctaacctgcgtctccctcgctccccctgcagcgtatggaatggagtatccgacgaccaccaaggtgaggaggttggagcaccaccgcagtgtcagcgactcactcaggccgccgccatctttccagatacaagacctccctgaggtaaaactctaaattggggcgccgggggagacgatctggcacaggcgtggtgtccgttcaggggatcctatctcccctatgatct

SEQ ID NO: 48479 - DNA, 488 bp, Oryza sativa
  unsure (1)..(488): unsure at all n locations
tcggtaagtctcggatttctatgtagtgccagcttgtttatcaattntcagatttgaggttaaatattttcttttctttacaagtcaggaaaaaagacggcgacacactaactaagctgtttcccgctgagtcttcatatagttcgagatgataggatgataggtcaagtcagaatagcttgactagactatgattctgcgtataacaagttcaaattttcaaaccttcaactgcaagtttgatgtacatgttgtgcagaaagcatgaaacaagattaattatagacaggccacccattcgaagtctgaagacttggagattagttagtctcgccctaattttattatattatattattagctnttccaattagtcaaaccttaattaaggagcacagttaagagcctaacctatatattaacaccacagacaaagccaggagattgagaatgctgtgacagtgactagctagcaacaatgcaacata

SEQ ID NO: 48480 - DNA, 564 bp, Oryza sativa
agcttatattattgtatgattaattaagcattaacttttttaaaaaaattggattaatatgtctttctaaaacaactttcatatataaactttttgtataaatcacgccgtttagaaattagaaaagcgtgcgcacgaaaaacgagagagatgggttagtcatctccgttaggagcgagctcgagcgtcccggcgccgctggcgtcaaccacgacagccgcgcgtgctggctgccatatggccggatccgtacgcacgaactacgtacggcaaatccaccatgaaagaaaaagagtcaaagtctaacatgaatcgcgcatctcatggacttctgctgaacctgaactacgaggtgatcccgaatcctacctatttctgatcgacccggtgcttccataaaaattaagagcctatatccaagggaacatgtgaaatacaatggcgagcacatccaatggaacatgtgatcaaagccaaattccatcgacaacgatggatccttccgatgaagctccctcggggaaaaaaagtgacggacaaattcccgcgcccgcgcccgttacc

SEQ ID NO: 48481 - DNA, 256 bp, Oryza sativa
  unsure (1)..(256): unsure at all n locations
acccactggctctcttcatacagctgcttcaattctggcacctactccctccgtcctaaataaaaatccaatcttaaggatgtacctgtatatacatgtcatccagggacaccttctgaatgaggggtttttatgacatggagtancangcagcaggcaggtcgctatagtgttgtgacaacctgtgttcatgatgcttacagtgcttctgttgctctgcgccgcgttctctacaatgcacctttctgtgaattct

SEQ ID NO: 48482 - DNA, 594 bp, Oryza sativa
agcttattacattcttattgcattatagtggtatttccacactacacaaagtttcatacccaacagagctcacctgctggttctctgttgattcaacactgtattatgctaactacctgcagatattatcacagcaatagcctcaactctacgcttccttcgcttcatgtgacgcttccttcggctcatccactgccatcttgattgctgcttgtattgttcccatccacatctggtgcttcctttggttctccagcaacttcatggccgcttgtatccttcacatcaatgtatgccgtttcctttggcttctcaattgcgtcttccagactgcacgtgttcctgtcatcttcatcaggtgctccctttccctcacctgcaacttcagtgctgatcgttttctgaacatctgcatcttctgtttcttcctttggcttccccactgcatcttcatgggtgcttctaatatccacacctgattccagcagctcatccgacttctctacaacattctcgtggttgggtgtgctcacatcaacatctggatttttcacttgatctgcatgaattggagcctcattttcctttgggtct

SEQ ID NO: 48483 - DNA, 415 bp, Oryza sativa
  unsure (1)..(415): unsure at all n locations
ttttttataaatattccaggtgttaatgaaagaatattnttacaaaataaattaacttttataaaggtgataaatatattaaaataatactatatgaaattcatatatagaatatttttacaaacattccatcggttagaaactcgccgacatgtatatccatccaattatcccgtaatccaaattcctgctggaagggttgggctggaattataccatgcctggaagttagaatgcgactcaaattccaaatttaactaatgagataattgaaagaaaatggttttctttatttntaatctttgctaaaatagcctagatatgcctgggagggcatacctgatatatatagagtgtttttttcagatagaaaaagaaaaaccaaccgtgaatacccgcgcgccacttattcact

SEQ ID NO: 48484 - DNA, 556 bp, Oryza sativa
gccagcttgatatatggggacctaccttccttgatcatcatcaacaagcttttgttgttcttggtgaaccctaagaacggagctgcaccgttttacatggtcgaatatttcatgtggttaatattggattatgctcctgagcttttacttagcttgtcttccaaggacttcaatatttttggtattggtttgaaaacgcatttggttacctaatatctcccatcgcttatcaattcccaatctattttggttcaaatgcagatccgataaccaaacctaccttactgaaccggcattgccggcgctcttgattggcaaacgacacatttctgaagcagcatggaagcacattaacttccccttttgttgtggaagaacaagaaatatgccagcttattaatcttcctccaaagctagtgcatcctagagcccctttatccaggtgataatgctttttgcaaaatactacatgctaaatggtgacaaattgaatgctggggttatgcattcacaaacctgtgggggccggatatgtaataaaacttttttgttcttc

SEQ ID NO: 48485 - DNA, 486 bp, Oryza sativa
  unsure (1)..(486): unsure at all n locations
ntntntggcttatgtgaggtagatgtatggctcaaccacttaacttatgacattaaatccactggcttataaatcatagaagccaataagatgacttaaaagtctatgccaataagcttaagcctaaacaaagagggccgtagtcttgtgaaatttactctacctgttatactaaaaatataaaagggttaaggtaaagttacgaaagtattgagttgcatgcaccgatcaaccaaaagattaagttaacgagatgcaccaaacataatttaaactctaaaacttctggctctgataccatatattgaaggaaaaagtacgaattacccccgaactatcacagttgaccgaattccccccctatactaaaaaccagacatcngtcatcctgaactttcaatgccggacaaattaccttcctcgatccaatccagagcnggtttatcctacatggtgtatgcgtggcaattaatcatcattacttta

SEQ ID NO: 48486 - DNA, 534 bp, Oryza sativa
agctttcgagcgtaggatggaatggtttacgcccgcgttccacgggtaggctgtgaactcatgtagacaccacctgaatctcgatccacccagtacgcgtaggccgtgcacggtttacgcgtacgtgagcgcaggatggactggtgaatgggttacgcaccaccaattacgcctacgtcaggaaaccacacccattctatgctcactgctcataatgtcgttgcacgcgagacgtacgttaagccgtggagggtttacgtgcacgtgaacgtaggagccattgttttttttcagcaagggcatgtttacgtcagaaagtattcagtatccatcatgattgaatttgcaaagtttcaataatttgaaaatatttaaccagtagctctgttgattgaaataaaaaacaaaggtcttacccaatggatgctgggcaaagtacaccacgtttctcaaatttggtgtacacctaacgagctcaaaccacaaatttcagtatgaatttggtttcaaaatatatataaatttcttggaata

SEQ ID NO: 48487 - DNA, 214 bp, Oryza sativa
  unsure (1)..(214): unsure at all n locations
atggacagagcggtggaggctctatatgttgtcgatcgatgatgacatcaacgtggaaactgtgagcttaagactgcagtacaacccaatttgggttttgaaggaaagcacaccggagattgaggagagggatggtgtccgntaccataaaaactaaatgatacaccgcgcgttgctgttgtgataatgtttttacacaaattttttgatctac

SEQ ID NO: 48488 - DNA, 365 bp, Oryza sativa
agcttgccattgatgaactcccatgcttcatgtgtaaccagaccttcctgtggcagaggctcggcctacgaccaaggacctccgccgagctttccgcttcccccaacggccaaggagtccaccgcctccgtagctgatctgctgatggttgcaccgccgccggccccttattcgatgggctcgtccccgcagatggagtccccaccggctttaccgatggggccactgctgccgggcgctcttcacatgaaccggccagctccgacggaaaccgtgggcgccgtcggagcaaaacgcggctgcgcctaccgtggggcaggcagtccgaaggagacggaactccacgtgatccctaatactaccta

SEQ ID NO: 48489 - DNA, 432 bp, Oryza sativa
  unsure (1)..(432): unsure at all n locations
gcaaaaagaataataaagactaactnggctttatgcagatcccccacttnccgatctagaagacaatctcttgcatcatcgattcagaaaatagatgaataaattccacgaatcagatcggtggatggcagaccatggaaacagatcaaatngctgggtgggaaagcagatgggagatggcggaagggtgggggccgactcactttntgaacatggtcgccggcggccggcggtgcgaataaagcggaggagagtctggagaggaggtaaaacctaaagctacggcagaggaggatgcggcggaaccgaatgacccttagcgaaccaagagtcacgtgcgggttcagcacataccacgggataccattcccaccagatgggcctaaaccgtctagtggtgggcccaaaagaatatatcagaatcagtttgtc

SEQ ID NO: 48490 - DNA, 426 bp, Oryza sativa
agcttgtgagttgtgatagccatggaacccgacgccgaccagttggtgttctacagctcatacctccgcatctacaagaacggcaaggtagaccgacttcaccggccccctctactcgccgcgggcgtcgacgatgccaccggcgtcgtctccaaggacgtcgtcctcgacgccgggacaggactgttcgtgcgcgtcttcctgcccaaggtgcaagaccaagaactcggcaaaaagcttcctgtcctcgggtacttccacggcggcggcttcatcattgagtccgcggactcagccacgtaccacaactacctcaactccgcctgcgccgccgtcggcgtccttgtggtgtccgtcgactaccgcttaaacccggagaacccgctccctgcaagatatgatgattcttgtgcggcgctccagtgg

SEQ ID NO: 48491 - DNA, 472 bp, Oryza sativa
cggtgaatgacaggtggctaattcccgttgatattatgccggcagatttgaggtgagctttattagcaagttcaggttgaccaatccttcttatggcttggttagttcccacacaaattttacaccctatcacaattaaatatagggttaaaaataattaattcagagattgcgacctaattacgagacgaatggtttaagcctaattgctccatgaattgacaatgtggtgctccagtaatatttactaatgacgaattaaataggcttaataaattcgtctcgcgggttactgacggattctggtattaggtttttatttgagctcggacacctcatgcgacaccctatataatacccgatgtgacacgcgtcaaatttacgcgcgggatcaaaacacttctaaagcattgatacttgtttacaagtcttgaaatgagcagggaagtgaccacctggacagtagctacac

SEQ ID NO: 48492 - DNA, 474 bp, Oryza sativa
agcttaacctttctttccgtacccatatatcgaacggaagaaaattgcttatagaaataagtattagcgtgttttaagcttatgtgtttgtattttttttctttaagaaaagctttgtaacatgcatgtttatccaaattaaatcaacttttactgtatggtgcaaattttataaattcttaaccaaaatctaacatgtgtggtaaactataccactatatatatgacatttccaaaaataaaaagaagtggaattaatcttcttaattggtttaatatgagttgtttgagttattcaattgctattttaatcatattcatttgatttaaaatttatcaattttggttgatttggactcatcatcacgttctctatttctatttagcacggtaactgcaattactaaaagaagtactccctctatcttaaaatattgcgacctttcgaggtcaaattaatgcagggagtacatg

SEQ ID NO: 48493 - DNA, 266 bp, Oryza sativa
tatatggcttaaaaagtttaaagaagattaccatacttcttcttactattgggtctacaccttataatgacctgaaagtgttcatcatatcatcttcatccacttcaacgaaaaatatcccgctcaatgaaactataccatcatcaaaagatcatcacacatctttcttcatgtttcaataatcaaacaattacaatatattactacaattttatatctgaatacacaagaagtaaaaccttaaattgataatttaaaaagcctcg

SEQ ID NO: 48494 - DNA, 490 bp, Oryza sativa
agcttgccgtatgctgagttctcttacaacaacagttactaagctagtctgcatattgcaccgtttgaagcactgtatagacgaaggtgtcgtactccgctcttctgggatcagacaggggaacgccagttgtttggtacagaagttttaaatgaggcagaagagaaagtcagagctgtcagggaaagattgagaatcgcgcaatctcggcagaaaagctatgcagacaaccgccgaagggagctcgctttcgaaacaggggattatgtgtatctccgtgtcactccgctcaggggagtacatcacttccaaaccaaaggaaagttggcaccacgctttgtgggaccatacaggatcttggaacgtagaggtgaagctgcttaccagcttgagcttccctccaacatgcttggcatccacaacgtgttccacgtctctaagttgaagaaatgtttgagagttcctgaggaacaagcaagtccagatcaca

SEQ ID NO: 48495 - DNA, 238 bp, Oryza sativa
  unsure (1)..(238): unsure at all n locations
actaacccttctattntgtgctatacttgagttgattaatgaattgctatctcaaacacagcttgcattgaccttgttaatttgctgcaaagtgtttttcttccaaatatccttgtcgatggtaggattcatgacgaaacaaatgagaaaggtgcatccagtgacaataattacagatgacagaatggttctttgaatagtggtcaacattctcccgtctgtctactgcatcttcaat

SEQ ID NO: 48496 - DNA, 657 bp, Oryza sativa
  unsure (1)..(657): unsure at all n locations
agcttatggcgcagtacacggtggaatatgacatggtgaagcggggtagcggttacctttatcttctcgagatatcggcaaagtctggcacatctgctgataaggtttcagcattcacatgccttatcgaagacaatccaattgcaaacatgaaggcactccattctctccttggggagtttcaatattcaaaatgctactaataattcttttttttccccataacacgaaaatgctattctgtaaatgttaaatgataggcagtaaacaaaatatgcaggtgtaaccgtgtaagtataattgatgataattatggtaactgtggattagggacatgtacaaccagttcctctaaatgttgtggcagctgctctttcagatgactgcgctacctangaaaatgaagtgattccctgacaaacttgggaactaatatggacataagattcatcatcttctttttattttattttttactgaagaaagactaccaaagtgatatcataccatctgagatcactcactttgatgattcttcattctgtgttctaaaggtcatataaccctctttgtttgtcgagtttaactatagatagaatagtgcaatgttaggtaaaaattatcatcattgaaaagcttgaaattctttcctgaatc

SEQ ID NO: 48497 - DNA, 201 bp, Oryza sativa
ttctacacgttcgctggtcctttaatcatacgtaacaatctctcgcaccgcgacctccattggtgttgagagatgattctgcgtgttcgctggtcctcgaaccaatacgtaacaatctctcgcaccgcaaccttagatggtcgaggtacgactacagcaatagcgcaacggttctagcaccatgaatttaaatgattgaga

SEQ ID NO: 48498 - DNA, 639 bp, Oryza sativa
agcttgcaatcctcagatgcaaggacgatttgaggcgcattatacttagtactagattactagtacgacgtgagattaacttgagataatccagcatatgcacgtgaagaaattaaatgaatcagatgcattgagtacctcttccagtcaagaagcttgtacgattgtaccaactattttatactcctaaaatataggagtaataagttttagttctaattctagaaaaaaaaacttattttattttgagacataggtagtactagattattttatctttggaattgaccaatccattttatctcaaaatatagtttttttttgtttttcaacgaaattaaagaaaagataaaaagtaaatagtcggttggaagtcactgaggttgtggagatatggagtattttgaatattttatgactatatatagaccacccttgatactatagaaatagggatattttgcaataaaatgtgaatagtataagtagctatgttttagatggagggagtataatccaaagcttctctaaaatttaaaagggtatttcaagaattaacaatttttgggggggaaaactgatgatgttctcaagcttgatcagcaacaacatgaacagagagttgggagaaatgattgt

SEQ ID NO: 48499 - DNA, 498 bp, Oryza sativa
tctaagattgtagcacgaggcacgatgacataaacagtatcaagagatactctctatcgtaatacctcaaacaaaagatgcagcaaaacaaatgacttcattcacattctacctagaacgttaggggtcaaaatggaacaaacacataaaggcttatcaattgtagtgtaatgacatagcggtcacaagagtattctaaacaactgaagcaatagaagcaacaaagcaatccagcattctctgcgtgctgcccgcatttgttcagtaactcggctcaatgtcttctaaaagtcttatcatagatgacgaaacaactctctgtaataaagcaatgccaagcaggcaaagcatccttcctaaataaaccaagagctttgttaattatcccctctgaacagatccagcaccatctaagcaagtaactatcacatacgccacactttatcaattcatccattagaatcaaaattacaccgagtcactggctgagctctctgc

SEQ ID NO: 48500 - DNA, 574 bp, Oryza sativa
agcttatatggctttagtccccatttgctaaatatattagtaactattaatttggctttaaaaaaggaatcaaataaagacttgatgattcgaaagtgttggtgtgttttgattggaataaagcgaacaatgttcaaaggcaaattgttccatccgaatttcatgcaagattaatattcatgacatcccatccctatatagtatttttctctttccttgtgcttttagttcattatcgagctagaatcatattgttctccgttaacctcacatgtacatctcaactccaaatatgttgctcaatcttgcattaatctcatcttctattgagtttatgtagctggctatatgtgagctcataccagtattaccactacagtcactctaaagttgaattccactgtccttccaagtcgatgagttaaaagagtcaaagtatcgcgtaacacaaattatgtgaattgtagccttgccactgacatttcacttttgaccatacttttcctaatctggtttaacttagactaactaactttacatttattgtagtttagaccatcttacctttctttta

SEQ ID NO: 48501 - DNA, 227 bp, Oryza sativa
  unsure (1)..(227): unsure at all n locations
atactactctttattaacttcactatgagagaaggttntatgttgtgctccgcaatgtaaaaatagagctattattctggctgactcataacacaagaataaatctcttatatatatgcgggggcagaggcaaacctacggaaatttgggcttgagcttggctttaggcttattattagtagctctattaaaatattatgaaaatccacagatataaatttgttgac

SEQ ID NO: 48502 - DNA, 673 bp, Oryza sativa
agcttgtgattccttgtcttttgcagatacgtaattatgatatgtgtattgtttataatgaggaggctcttgctattgatccaaactttgcagagtgctatggtaacatggccaatgcatggaaggtagtttggcgatataaatcatgaaaaataataatcttatttgccaatgagtatattgttttgaaaggcaatacttatcattctaaaatagatgcgatatattttgctattcaggagaagggtgatgttgatcttgcaatccgttactatctaaccgccattcaggtttgcttctgctgtgcattacatttccttgttttgtttttgtcacttatttcgtttttcaacctaagttaatttttggaattttgttcattgaatttggttcaagtttattgtataaattgcttttggttccctcaatgcttgtcacatttttgtcaaattgttgggctcttgggcatggtcttacaatgtcatacattaaaaattgagttggcaccttctatcgatatgattccagtgtccattgcattgtttagaacttacatttttgaaatcaaactttaccaatttttgtttgaaacaccaacttcaaatatttcaaactttatcaaatttttttgaaccacaaccaactcttgtttttgctcatataatttaaggtt

SEQ ID NO: 48503 - DNA, 227 bp, Oryza sativa
gtgagaggtgaattggcgtcccctatcatatactactttcttaagaacgccatggagacttacgatcctagcgaagtagagttcggctagtttgttccctccatatgtggtcttcacaggaatgaatcgacctaccttggttaatcgatccacaactacccatatagaatcatattcaccttgggtctttggaagtccggtgatgatattcatccccgtcttatcta

SEQ ID NO: 48504 - DNA, 462 bp, Oryza sativa
  unsure (1)..(462): unsure at all n locations
agcttattaaggacctaggagtatgacttatacgctccacccgaggggtagtctacagacggtctagtaccagataagactctgagtaaaacttgcttgcacaagacttgcaattcaaggcgtggtccattgttcaagttgtgagtaagtgtagcttggagttctaggtggatattcaaccttaatcggtcttcatcgaaccgctagtatataaatagtacattggaaaaggcaaatctcagtgggattttgagatttggtgagggattgttggaattaatagatgggctaaggcccattcgaagattagttctttggaaaattacaaaagcccacctcatgggatggcatgcatgtggagtttagtaccaccttgcttattctangagagggggacctctttaaaagggaggatgccctcctagccacttgaagcatgtgtggtgggagaagaagggaaac

SEQ ID NO: 48505 - DNA, 390 bp, Oryza sativa
ctgtcgattggtgctctacgtggtaagcaaccttcatggtgtaatttatgaatgattagtactttctctgctacatattttgtccaaatatatgtcattagaatggtgtctggtgaatctattaggttgtgtgatcagtgtagataaatttgaagtgtccactcttttctgaagtgaacaagccatgttgcagccttcactgatccaaacttctgaatctgtgagtttcaactctcttttacttctgagcatgatgaaaggtagtttggatgcttaacaagtgatttgctctgtccacatcatgtaaattttatgtctttgggtttcaaccacctctccaacatcttataaatgttggtagaaatcagatgatcttcaaatcacctttct

SEQ ID NO: 48506 - DNA, 622 bp, Oryza sativa
agcttgttaattgcttggtggccaacgcgatagagggagatcaaacctacatgtccatgatgtatgcggaagtgttccttcatggaatattcgggatagaaaattttattaacgcaggtcaaactacggttacgcgaattgaatagcgccgcaacttctagaagggtaggcaatataactactgatccagtacagcatgtcgtacgtactgacgatagcaactgaccaaattaaccgtatatgaaggtactctccgtataaattaaccgtatctagagtatatagcatttcgtatatatacaacggtagaaattgattgtgcctaagtatataactgtagctgtacgataactgcacatgttttgaaaaaaaaaagtaaaataaaagagtgtatgggaatctgtctatgatagcccaagctccaatagcgagtagcagataaatccttttagttgattcggccagggaatagatgtacagacgcaagttatggtcgcgtgagacaaagagaggcaagcagtttatacatgtccgagtccactcaaaacgtaatatcctattcatgttatgtttttctctcgatctccttttatgactctcttacagggtatgaaactttttc

SEQ ID NO: 48507 - DNA, 385 bp, Oryza sativa
  unsure (1)..(385): unsure at all n locations
attcgctttattagacgggagatgattgagagtccttggcggacttaggtgctctctgatgcgtttggccatttgcacaacgcacacactcacggagtcatggttctgttgcctgctggtaatcgaatcgcatacttagattagaacaactaattaaactgcaaagttacatctattgatgaccccgagttcttctctgcatttcgtgtaaaatttgatgatattttaggagtatgtaattcgggatgcatacttggatattgnggtattatgcttgtgtatccttcagatgccaaaacggcattaatggtttgttcttggatttgtaattttttgtacttatgttacaattgctgtcgcggagcaaacctcattctcatggctg

SEQ ID NO: 48508 - DNA, 643 bp, Oryza sativa
agcttatactctgacatactccctccgtcccaatatgtagcatcctatgatgggattagacacatcttaagactacgaatctggacatagattactacatattaggacggagggagtatgtttttaattgccaaaatcttgttacgcaaatactcttgcaacattagctaacataaaatgaaaaataaaggatagcttggacattgttataaggagaccaatttactgctgaagtttgtggccgccttgttataactgctgtcgcctccagaattcttcaaatgcaaaataggttttctgaatcaagagggatagatcagaggtataatttgcgaccgagatatatttacttaggcatttaaggtgatacactgtgaaatgacatgctacaagaatgttctttaatggagaaaggcttctgtagcctgacatcaagtattatgtacagtaaccagagcagaattgtatgtaggatggctgaacgcttcgtcaacaatttttctccagtcatctttgcatgcttccatatctgacctgcaaaagaagaggaaactaatggttataacaggggagtgaagaaaagaaaatctaattatttgtaatgtcaaattcccaaaccatcaacttacaaatcaacagggac

SEQ ID NO: 48509 - DNA, 189 bp, Oryza sativa
tcggctggctacatcttctgtgtgctgctgctgcttattggaggtactcttactttcttcatcctaacttctgcaaacaatacaccctttcttgtactacctcttatctgcaactaatttcccattctctttttcatcctttgacggcccggtcgcttcagctggaacttgggagttgctgatcgactc

SEQ ID NO: 48510 - DNA, 481 bp, Oryza sativa
  unsure (1)..(481): unsure at all n locations
agcttgctaccacagaagtagactatgatcatgtcccaccatgtaacaagattatactttttttttcattagcatcnaagggaatacattcttcaggacatctcctgtaaactctgcaacttacattttcagaagaagatgcataccgggaaaaaaggcacaatctaacaacaaacacttgaggtcatcaatattgatgaccaaacaagatactatagtatcacctatcagaaatatacttcttattgatactctcacaattatgacgcaaaacctaactaacatagccgaaactgatataccgatgatagaactcaagcaaggtttggtgaaatacctccgtgtcacatgcatgaataaagcctttgtactttgtaataagcaatttaacaacactcctagctgactcaacattgtctacaaccaaaactttgtcatagatggtagcaagcaacttccttgcattttttgctcagaggac

SEQ ID NO: 48511 - DNA, 333 bp, Oryza sativa
tacaaaacttcatttagacgaattgacaattatgatgaggtaaaaaccaaatgcccctatttattgaaaatttgctgtgagtatatgtagaagaaatagattatgaaagataaacttttgattagggactgagtgattaagataaaataagttttggggcagagtgggcctttaaataagttttcttaacgatgggtcattgtgtgccaaattgcactactaccaccattatcctgtcatcaagatcagaatgagagtaagtgagcaaataccctgcactgaatgctgtgttagttgcgtaatgtgttcttgccatatgctggagggacaagt

SEQ ID NO: 48512 - DNA, 619 bp, Oryza sativa
agcttaagggaaggagtcgcatcggctgagaagtagaagctgctttaaagggatactattcctgcgtttatacaaaccacacgtaacacgttgagcgagacattggtgaattcaatcatcccgaaggcacggtacaaggacatcgatgaatcgtcaagcacgccggcgcggtacatcacagaatcgagaaatttatgcgctctgctaagcaccaactggcattgacaaagctttagctggaagcctggaaaagtacttttgcccctgatgttcactaatttttgaagaaaattgataatatggtctatgtgtaatatatgtcatacgcaaatatataggtttaaatttagagattttttaccggccatcgtaccttccggtaccgtccggtacatatgatctggtccgtccgttttgttagatccaagggctcaaaatgcaatgtaccttccggtactcttctcaacaacaagtaaaacgtgggagggacatccatttgaagggtagaatagaagtcgacattctcttgttttccccttaattgcatctactcttctgttcccaaatggggtaacaccactcccccgaaaattaaagggaaggtctcaatcccaacggg

SEQ ID NO: 48513 - DNA, 461 bp, Oryza sativa
  unsure (1)..(461): unsure at all n locations
taagcttagtccctgtcacatcagattttngacactaatttagagtattatcatagactacttacaaaacttattgcataaatgagagctaatctgcgagacaaattttntaagcctaattaatctgtaattagagaatgtttactgtagcatcacatatgctaatcgtggattagttaggctcaatagattcatctcatgaattaatccacggttatgaaatgggttctgtctttagtctacgtttaatacttctaatagtgtccaaacatccgatgtgacatgtactataaatttttagccccatctaaactccccttatgatggtctgtttgattgtccgacctagccaatagtccaggagaattttgttgatcgactgaacttgctaattngaaaaaaaaaggatcgggtaagacatttacaatatcatgtcatggcgaccgacctcgcgtgtcaca

SEQ ID NO: 48514 - DNA, 535 bp, Oryza sativa
  unsure (1)..(535): unsure at all n locations
accttttaaaatcatttctaataattccttttaaccaccaattaataattaaaggtttttaaacagaaaaggctcttaacaaaatataaattagaatcatcaaatgatcaaataattactggactggtctttggattatttaaaaattgaacccttgaaaaatccaaaaaatttcagaagagtgacttaaccctgggaaatttaataaaaattaaatccctccatgctttatatttaggaaattttatttcccacatttaacttcacttgttacttaaagaacatttaatataaattctattaataatgtattaaataatttataaatcctgaaacaaaaaatcaggatgtgacaaggagagcagctatgttccaccaagctacattgcccactatggaagaggccatttcagcaatggtgcaggaagagatgagattgaggttgatgagaggtacanattctataagatcagcatacattgcaactgataataggggatgctacaattgtggggcaagtgggtcatgtgagcct

SEQ ID NO: 48515 - DNA, 218 bp, Oryza sativa
tctcgaaccatcctacatcatctattattaaagattgcgaacatactttactcttagatgtatatacaaaaatcgagacatttttttgcaacatggttggcctatgaggggtcacacaccgacactattttggtatctcacaaaatatgaagctctagtttgaattctttagaagaataaaaactccattcgagccaactgtatctatttaaaaaacc

SEQ ID NO: 48516 - DNA, 669 bp, Oryza sativa
agcttgaacctttgctcgtcccgagtgaaggactcacaaaaaataaacttggttgttgatcatgagttgctactatgttatatatctagaatgtacaggtgcaaagtttgagtactctctcgtattaagcaagtaggcacggtggcttatccatacacccaattataacacatgcttctctttgccttgggcggttggaagacacaacagatcatagagtaacattatctcttcctttgtctaattcttattccggaggttttcaaatggttttgcaaataaaaatcaagtttctcaaatgattctctcgatcactcaatgtgtataaatattattcctcaccaaaattattcatttgtgactcctacactaaagccgaatatgtgtagtttggaaggatcaagaatgagcatacttacaatcacatttatcactaagtcaaaaatctagactaaaacagataacaaatcatccttaagatcaatcacatttatcttcgtgtgcggttggatagctcgcacgtgaagatggtgatcttcacaagcacatggggttagatgggtccgccaaccataccttaaaaccctcttcggtccgttaaaaaaaccttttctattgaaatcttagagctttttgggtgattcccttaagaaaaattgttgggcctta

SEQ ID NO: 48517 - DNA, 480 bp, Oryza sativa
agcttatctttctcaaacgtcacatctttcaagcccacaactagatcacgttttgaatgtttgttcaagtgaggcatgccaacatgagctagcctcctatgccaaagccaacccaatgaagtttttgcaactaaacaagttttcaaatttgcttcactagaattaaaatcaaccaaataaagatttccatatctaaaacctttgaacacacaagacttgtcaagaaggttagaaacaataacttcttgtgggaagaaggcacataacaagccaagatcacaaatttgagcaaccgaaagcaaattgaaatttagagatttaataagagagacattttcaattgacaaatcattggagatagcaattttacctaacccaattacctttcctttgctattgtctccaaatgtcactttctcttgttcattccctcctacttaaaatgtggtgaacatagccctatcaccggtcatgtgttga

SEQ ID NO: 48518 - DNA, 197 bp, Oryza sativa
tctattgcacaagtatttcttacaatcttataaaaatccaaaactatattacacttttgccctaagacatttgtcacacgacacggagactactaagaaggccaatgccggtccatcgactggaaaactttctccgccagcggcgccatcgacttcaccaggccgtctatctacgtatgaattctccaaaaccataa

SEQ ID NO: 48519 - DNA, 606 bp, Oryza sativa
agcttcagtttttggctttgctttttctcccttcccttgtaacaattattctttttcttctaatatatagacgtgtaatccttttgcgcgttcgcgaaaaaactgagctggtaatatattactctgacactagtctacttaaggaggtaacctatcctatgcaaataagtttcgggtgcatcctcaaaaattcttgaaaaaattatacatgtatttccaatagtattgtaattgtgtgtgaagtctctttaaaaaattcattatatatagagagagaccaaattctaacttacttatattcttaaaactattagttttataaaaaaaaacggatgaaataaaaataactttgaagcggagactttacatgtatgtgtagtactattggaagcacatgtacagttttttctagaattttaagtggaatttgttagatggtgtgcacgttgtgcatccaaaacttatgctgtgtttgagggagagaaggatgggaagatacccaaaacgagaagagtcattagcgcatgattaattgagtattaattattttaaacttcaaaaatggattaatatggattttttaaataacttttttatagaaaattt

SEQ ID NO: 48520 - DNA, 482 bp, Oryza sativa
  unsure (1)..(482): unsure at all n locations
tgcgagtcactctcatcaactgctgcctcttgcataatattctctcctttactatcctctttttttacacacttatcatcgtgcattagctccagaggataaggtagagagaaatttttgctatttttaaccttttaaatttttatttttcaaatataatatatatttatttaaaaaaaatctagagcttctaaccacaccaccttcagccactcgtacttaccaatgttgttttcacattagtccaactggtgtgcatgggcggcactagaacaaaatgaagagaataagagatgtaccactcgcttaatntactctactttcgattaagtntacgctaataggaatgctatattntgaattgaggcggtgcatatatgggtgaaaatacatgaactatatacttaaaaaattcttaccgtgttcctaagccccctccctatgtagctcgccctactggtgtttgtagggtgttcaaaata

SEQ ID NO: 48521 - DNA, 618 bp, Oryza sativa
agcttgagatattacaaatttgtcccaagatttcttgaaacttcattcaattctatagacatcgattttattcacatcaggaccttgggaattctcccttatacaagaccattaattctactgtgaatcatctttctttattgtttgcaatccattaatttcagcaagtacatctcactaattctccattgcaacatatatattttcagcgatcaggctcttgtcgtcgtcactggcgatgccggcatcgccgacggcggatcatcaggcggactctcccctccacacgctttggtgcacatgcatttgtgtctaacagttgtgcagtagcctcctgtgtagccctcgttggtgcagcaggcgatgcagttggtggggtggccgcacaagcctctgaaggtttggcttggatcatgacacatcttggcagccgccacaccatctgctcatcacaaaatcacaaatgaatcaatgttttaactacaaatttaaaagataattagcattaccatatatgacgttgggaagaattccaggaatcaatggtgatacccaacttttattatgaaccggtaatgattcagcccttttgagtggtgaatgaacttaccaaggtga

SEQ ID NO: 48522 - DNA, 490 bp, Oryza sativa
  unsure (1)..(490): unsure at all n locations
tgtccaacaattcatatatgaaaaaatgtggcctaaatatcctattcagatagcttaactgctaatatgcaaaatcatttgattgatgatgcccagtagattcatagcatcattcagacttagagaactcacatcatccttgtgctttcgcttgctcttctccttctccttggaatgcttctcctttgaatccctctctgtcaaaatcacacacacacacacactgaattactgacatacatcaaagctaatatagcaggtacgagtgtatcctcagcataatttgcacacttccagaatagttgagcatgatttcaagtaagaacaatataactgttttagaacaagaaatcaacaagtgccactgccaagccgtgaaggcaaaagatgaaccctagttccctacctttgtctttgcccctgtcgccatgcttcttcttcttcctcctgcgcctctcctcctnctcctcctnctcggcttgttcgtctc

SEQ ID NO: 48523 - DNA, 253 bp, Oryza sativa
actcagcttaaggcgttagcaatggaggaaagcgtaattatgtgggagaaagcgtatttatgtaataaaggagttggtgtgtgtgtcacatggtgtgtgggccctgcgtggtcagatccggaggggaatataacctcaatgagctgtcccaaaacaactatgatgaaaaatagaaaaaccatccctcctaccaactctgtcttgtctttcgtactcctgcgctttacttttgtcttcccatctttccagccat

SEQ ID NO: 48524 - DNA, 364 bp, Oryza sativa
agcctcttcgctgcacctcattgcccgcgtgccctcttctgtccaactgaggtttgattatcactagccgcctcctcctgggggccctccacatacctttccacgtgcccccgccggctcccctgcgaatgcctctccacgtgtccgtcctcggtcaaatacaggttaggatcctcattcccctcttcttcataccaatactggctgcttccctcccgaaatgtatcgcacaatatctggtccacatcgcgggcagccatctggggatacaagaaacatctggggaggcacaagacacttatggcgaaacaatctaagtaatgtgtgccgaatgcaaaggtcgcaccttagaacactacacaac

SEQ ID NO: 48525 - DNA, 472 bp, Oryza sativa
agatatacatgtccgaatctgaatttgatgaataaactaaactaattaaacgatcacatcaatgagtattatgggacgagggattaattgttccgtccagcgtatcttgcggggctgtggcgaacgccacaaacgagccgggcgatcgtgtatatatatactaatataacatatgatagtcataagaacatttggaagtttaaaatacccctgaagaataaaatctttctctggctcatgcctaaaggtaaaatcttgactaaggacaacctgtttaagagaggatggaggaatagtgacacttagtgtcaattctgtgatcaacaaaaatccattcagcatctgctttttattgtgttatggcacggctgatcttgaacatattttctgtgtttggatttgaaccttgttctgatatcaccagctgttatttcctgattctgctttgagaaaactttaaaactgttgtcct

SEQ ID NO: 48526 - DNA, 385 bp, Oryza sativa
  unsure (1)..(385): unsure at all n locations
agcttgccaatggctatcgggttcgcctttttccttaggacaagatgaccattcttctgctctgtcggtcgaacttttttgttgtaagttgccgaagtgcttgtggcatacttttgcatgtgctcgagtgcttcgactcttaccccctccaagagtttgagcgacaactcgcgcccctcttcgcccccaaagaacgtcacccttggtgagttagcccctagcactgttggggtcattgcctcatcgtcatagagaagcatgaacgggctgaacttggttggtcttgtgggggtcnnccnnaagggccccaaaacanatancttttcctctggctattagcctttgctgccccgtcgaccttatcttaaggcttttggatttacca

SEQ ID NO: 48527 - DNA, 482 bp, Oryza sativa
tagactggaggaacaatccattatggttacctaaatggttcgatcgtccaaagtgtgggtgcagagatcgctggcaggtggctatatcctttgctgaacaaacatttcgaaggagatattttgtctgccccaatgtagacaacgatttcgttgtatgtctaaccatttacaaaatccgctatgatttgcacaaaattactacccaaactaaataacattactatttttacagggcaatccaaggatgggtggatttacttgatggatcgacaatgtcactccatcatatcatggccagaagataacagagtcagaaacacaagtagagtatcaacgattgaaggaccacgagaatgcaatgcattctgaccgacctagaaggtgccgataggttaccgcatgcttgattcgtccagatcgacaaatttgtaccgtgtatcgatggcaccttctatctatctatcattacatggctaatatgg

SEQ ID NO: 48528 - DNA, 581 bp, Oryza sativa
  unsure (1)..(581): unsure at all n locations
agcttgcatctttgtcagctcctgagaaggtgctctccttcattttctctttccttgctgctgaacaagcaaggaatagtggttcgacttctggagatctttctgcaagacctccaggctttgagagcaataagaagcctaggcttgacaaccccattcatgctaatgacatgagtgctcccccattctttgggcaactgccgcaggtgcaaccacagattggagcaacagctgctcttggaggcacacagccaccaacccaagcaaaccaagcagctggttcatttccaccacctccacctccattaccacttatgccacaatntgttcaaaatactggaggaatgtttggaatgggaccttttgggatggtgagtgggtctgngccacctccacccccattgcccaacattatgtcagcaggttttccaagactaagtgtgcctccaactctgcctctgcctacacaattttagaaaccgaaccagccccagcatcagcagtcttcacaggcaccacagcgatctcccaccttcactggatttttcaaccaccaggtgctgggttcttccaccagtgca

SEQ ID NO: 48529 - DNA, 482 bp, Oryza sativa
  unsure (1)..(482): unsure at all n locations
atgatccagtggatacagataagttatgccaacctcatgctcttaccaaattctgctttttcctaatggacgcactgagagagcgaggagcaaggatgaagccacttatctgcgcttgcttagcaagggagcctgagaaagtgctttgtgtgggggtatgtgggaagccaatgctgggggctgttaangggaatgcatttggtaatgcatttaggtcagctgccgaggagattggtgcagactatttccatgacatgtttgagtcatcatggattgttctcgatgttgttgctgtcagctctttcatgattcggttaacagagaagctatgatgacatgtgcttgtctagcgctaatgattctttcagttcccatgaagatgggagcttgaggcttgattccttgattaaacactctaaaatataggagctcganggctcgtggagtggtagatcgatctggtggtcatggcatgtactatt

SEQ ID NO: 48530 - DNA, 650 bp, Oryza sativa
agcttgagataaaacaaagaggtgcagactaccctaattatgacgatatccatattgtgcatggaaataacttttgtatatcataacaaaacacaatgacgtttaaaaaaaataaaacatgaattgtattgtataagcagaggctatatatgaagacacgttatcatttattttgtatatatactgagttacatctaatcatttaaaacattgattttatttgacgataaaactagcaaatcccgtggtttgccgcgcaggtgccaacgaatattatgactcacaatagtacactgctactagatggttatatagatcgcctctgcactccacaccttccccccttccgacttccggcgttccggctgctcgctgccgtgccgccgccgcaagcttttgctcgttgatggcttgatcagccacgaatgagcctagtaggccaagtgatgagtaaaggacgaggacagagatgggccgtagtgggtttctagcatgacgaattggaccgtagtggtaccgcttcaggctgcttctctctctcccatcgctattgttcgtcttccccaaagcttcaaccgcgccagtatggaaattcttttggaaaaattggaaggtaggctagaacataaccaaactaccttgctggattc

SEQ ID NO: 48531 - DNA, 490 bp, Oryza sativa
  unsure (1)..(490): unsure at all n locations
tattgctanggatatgattgaagctgtgcacgtgaaacgtagttgtagcgtcagtgaatgttagttgcacccttggattcgccgtatgttgattactgttgcaagaaaagcacaattttttgaatttgattcggaaggcaatgcaacatgggacttttcatgaactcaccgtgcttgtctagttgaagaatataagccagaaatagaaatatcaccggtcaaaaaccaacccaatacagactgcctgctcacaatatttaatgtgaatgagcgatacctccagtttgacaagagttggttcttggatttgaggaagattgcggtgctccaactatgtcgatggcataactcgtatcgacaccatatcgaggttgacagtactgaatctctggaaggactgcagtngtccaaacaaataaaatatctctgcctaccgcgtatctccagaataactgcgctttctgctctattgggaactctcaaatctatg

SEQ ID NO: 48532 - DNA, 538 bp, Oryza sativa
agcttctttccaaatttataactaaaatttaaagtaggcctcaattattggttattcttgatattagaaaaagaaagtaattaccactactgcattcagagttaaaaaggggtaaaatttccatctctgctttcaaagttcaaagcacaccctaaattgacatgggcaagcaattcattggtgatggagaagaactgcatgcggcgctgcctacactgactcaccttaatgaaaatgacaattcgatttattatatggtggttgcagaattatcacctcacttacatggtcaggttgtgacaaaatatcttaaatgcatatggtcaatataacactattgcctaccatttatcccttgttctgcattttcattgtagatggaccatttctgtccaattaactacaggcactcaacttttgtactatgatctctgaacaaagaaattttttgaagggggaccatgtttctgaaattgaccatctggaaaaaagttctgacattgctttctaggatcaatagtcaattgctactaaattg

SEQ ID NO: 48533 - DNA, 436 bp, Oryza sativa
  unsure (1)..(436): unsure at all n locations
actaagcttctgctncactccacaggcagctcaactgggatctaagctcaaatgtcttctccttctggaaccctttcttcaacttagggttgatgaatattgcaaagtgagtacattgaatactctgcaagccacacagcaaatatggcagtgcacatggatacccaaggatggcgtaatatatggttcatttgccaaagcagcatttagcaaagagttgagaaatttgtaaacagtagagtaattaatcatcaatattcatcaacactgaacagcacacccgtgctgcacaggcccaaccaaacctgaacaaccaaccccggtcgtacagatcaaacctncaaaccaggaattatccattctcaaccaggagtcaaattaattatcacatttatatcattaatgagtagtatgggactaatcacgaaaaacattg

SEQ ID NO: 48534 - DNA, 555 bp, Oryza sativa
agcttgcggccgcactccttctccgcagcaacttgatggtgcttgatggcgtctgcattagctgccttggagtcgtgcaggaccacccacatgtagcgggacacgtcgtcgacgagcagcaggaagaagcgccggcctccaggtgtggccggagtcacagggccgcagaggtcaccgtgcacgagctccagcttctcctcggcgcggaaacttgcttggcggggaaaggggagtcgccgctgcttggtgaggacgcaggtgtcgcaaaactgctccacgtgctcgactcgcggcatgccctgcaccatctccttgttgccgagctgcttcaaggctccgaagttgaggtgcccaaagcgctcgtgccaccgccatgcatcatcgtcgcggcgggctgcaaggcacacaggctgcgctacctgtacatggagaacatagaggcgattggcgcccctgttcaccttgacgagaaggcgacgatggcgatcccaaactcccaagaccccgtcctctatcttcacgcgcgagccgttctcatccagttggcccaaactg

SEQ ID NO: 48535 - DNA, 504 bp, Oryza sativa
  unsure (1)..(504): unsure at all n locations
aagcttctaactagtacttgtagcaaggtttccatttgtcttcctttctataataaaaaaaacttatcttggtacccttgtaataaactggtcctgttggctataagctgataatggaagattacagtaaagaaatttgctaacatctgaatatatgtcatcaatggactcttgtacttgagagaaataccctatacatgaacaatgccataaatttgcccttcccggtgtattgaaatttccaaatccgcatgcccctaacaacatatacggattcgcattccccttccgcacacacacagaaacacaatcccaaaaaatcattcattacaaagaataattaaaattaagttagtgctttcctttnttaaaaaanagggtaatctgagccatagtagcccttagcgacattgagtagcccgacctattattgccatgttatagaagcaaggcaacaggacatcattgtattaccaaatacaagaattaatacccatagtttta

SEQ ID NO: 48536 - DNA, 478 bp, Oryza sativa
agcttgctctaacgtgctagcatgtaaaaaccatctattcattgctcaggatgtggtaatcattatgaataaaggcatgtacctggtaccgcaaagctagtgtttgttggaagtttaaatgcctacactaagtgcttaaccatataatagataattaattgggcagtcctaacaggaaatcatcattattggatagatcccctccctgtctttgtacacacaatttttttagctttcgaaaaatgttactccctttatttcatattataaaagtaagacactatcaatggagagaacacatgtcagcaaatccactccgttttctataagaggcgaaatgaagtatgttattttagctgaaggtagaaatgtttagagaggttcaaatgatgggcatcatatctctgatcaatttaattatgaaagaaataacctggatgagataaatgtggcattgctaaacatgatccaaaatatg

SEQ ID NO: 48537 - DNA, 523 bp, Oryza sativa
  unsure (1)..(523): unsure at all n locations
ggctgaacatacatgcattgagcccatatcacttcaaaaaaataatagncattatccttatctcatactctactcgatgaaaaccatccatgtgttatatacgcaaagttgtagtagtttcacatcaactggtaggactcaaaataggcattatgagttcatgatttaatttcgacatgtttctatcgaacttcttttaaaaatatttttaaatttcttgctgcaacgagtgggggtattcccttggtgattccaaaccaataaccctggcaaaggaaaacgacgacttaattttaccaaagcaaatggtgcgctgcggcggagcctcgagcttttcgccgtgtttagttgcaaaatttttcttcaaactttcgacatttccatcacatcaaaacttttctacacacacaaattttcaacttttccgtcacatcgttgtaatttcaaccaaacttacaattttgatgcgaactagacacaccctttgtaatcattcttccgcgcgcccacccttttgcagcac

SEQ ID NO: 48538 - DNA, 210 bp, Oryza sativa
  unsure (1)..(210): unsure at all n locations
agatagggctgttattntccaatcgggtgtatttgcaagttttctacaatctaagtgtgtgcttgtccacaaccatagcaagactagtctcagctcggccggggtgagaagttacaaattgatttgcaagatttgaacaactcccagagttggcctcaaggcttagttcccaaaccaaaccaattttccaatctttcacagcttggttgt

SEQ ID NO: 48539 - DNA, 569 bp, Oryza sativa
tctacctgcaagcatgcaagctcaacgataagatgggcctacatgtcaggtgtaaccgtcctggaaaccactcatatttgtcacaaccgcattaaggacccacctaccagtgccccagagaagtttggaggcctgctgggccggcccaagttcgactgaaccaggggttcggccaaaccctggcaagctcctctcatcctggccttccacgtggacgctcctgatcgctcctcaatgacggttgcagggtagtttggacaattcgcatagtgtatccgtcatttacctgcctataaaaggaggagacctcattcactccaaagacacacttaagcaagctcaagatctctctatactttagtttagtattctagtgctaagtggagtagaatagaatagctctcggagttctcggagtcttcggaggaattcacgtatggctctagtagcttttcttttttcttttgtaagacttccagaattaatgaaatattattctttatatactctcgggacttttatttggctgagtatcgggcttactttatatctggatcattattaggggg

SEQ ID NO: 48540 - DNA, 274 bp, Oryza sativa
  unsure (1)..(274): unsure at all n locations
ctggactgcttaaagtcaactactttcttggctgttagaaatccagattttgccaagaaatctatcgcattacacttcacaaggccagatgaaatcatgtagtgcgcaacaactaatgttccattgccgcaaagttcactctgcacaacacaaaacgtttaaatttgagttatatgaaccaaataacagaaaaagataggataatattntgtcaacagaacttcatgaaggttttttttataaagaaaagcttgctgcagtgtttatttttaaa

SEQ ID NO: 48541 - DNA, 497 bp, Oryza sativa
agcttagctctactttgtcactttagttcattctttgttattagaatagtatcttttttacagcttatagggagatcaacagcttaactagctagtctaatatgtcactagtacagaaagtgctattggtgccggttaggaaacccctgtaggtgctggttttctcaatcggcaccatgaaagcggcatagatgagtccaagtaattggtcttggatccacaaccggcatatttgaggcgcacgcgagccaaaaaatatcggctcaatgcatcgcctcaattcgtgccaatgcatcgagttgctcccattcccccaaatgtaaattgaaatccccgaatcaaaactagatcgccgccaagatcgattgacatcacagaatgaacatattcaacaacaaaaacatgcacaaaaacaaccacaaagaacgcgtacaggcatgggctctcgcgccgcggaggtcgtcgacaacaaagaacgtgctaccggcagggaggga

SEQ ID NO: 48542 - DNA, 355 bp, Oryza sativa
  unsure (1)..(355): unsure at all n locations
gggagctcgtccaccagcagcaagaagaaggagatctttcttntcgtaccacctcgccgcgtcggctgcttcgaatggtggtcggtctccgccggcgcgtctgctgaccgaccgacccggcctgcccgcctgtctgctcggcgtacgttctccgagatcccaccggcggcgggatctttccccaaggaatgcccgccgcgcggagcttcggcggacggattacggaagaggtgcacttctttcttcttttctttctttggcccactcttctctttgatgggtgcagtctttgctctactctgagaacctcttgatcacattcttgctaactatatatgatttcttctctctatgg

SEQ ID NO: 48543 - DNA, 574 bp, Oryza sativa
  unsure (1)..(574): unsure at all n locations
agcttagtgcaaattggtgaatcctaaacttaattctaaatttctgatctcttactaccaggctaccgcagcctgttggatgaaaaccgcatttagtctttgtcacagcctgaattttcgtttcaggatttataaattatttaataaattattaatagaatttatattaaatgttcattaatttacaagtgaagttaaatatgggaaataaaatttcctaaatataaagtatggatggatttaatttgtattaagtcctccatgattaattatgctctctgaaattttctcggatttttcagagcttaattattaattntaataatagaaagaatatttcagtaattattcacatgttaaattaataattaaatgagctggtttcaattggaagtatttttaacaattgaaacatcatctcattggttaatttatttggaaaagtaataaaagtttccttcctagtcttgggccgaattcagcccattctctccctccctctcagcccagccaaagtctagttttcgtccctctcgctacagtatcatcttccacctccagccgactgtcttcc

SEQ ID NO: 48544 - DNA, 409 bp, Oryza sativa
tgcacactcaaatcattcaatcgatggctctacctgtgctttgctagtgtgcgacgcgttagcagcggttgcctgctcatttggtgagtcataatataagcaccattctggtaattaatgccaatatagttaattagtccaataatgcctgctagtaaagaaaaggaaattatgctcatggtacataatggtgggtggggtgtgtaaggttgtattcttctcccagttttcccaactcatctctcttgttttccacgcgcacacttttcaaactgctaaacggtgcgttttttaaaatgtttatgtacaaaagttgcttaaaaaatcatattgatccattttctaaaaaaagataatacttaattaatcacgcgttaatgaattatttcgttttcatgtgaaagggagt

SEQ ID NO: 48545 - DNA, 459 bp, Oryza sativa
agcttgtccaaagaaaaaacgtggcgagaagggcaggaacctcttgccgatatagacgtactacattgctgctctcgacgatgacggcaaacccgtcgagccggaacatgtaagggcgaagtttagcaccgcatgtggcgcgctggcaaggcttcatgggcctctcaacgtggacgaatggaagcacgttagcattcacatcaagaacttaatgtgggaaggtctgcaggagcaccttatttatccgcctgggtcggagtcaattggccggaaatttgcactgcaaacaattgcccatcggtggcgacagtggaagtcggacatggacaccaattatattcagaagaataagactccatttgaagaatgtggcaacatttcagcagctgagtgggacaagttcgtggccaagatgacaacgcctcaagctctaaaaaggaggaagaagttggtggacct

SEQ ID NO: 48546 - DNA, 376 bp, Oryza sativa
ttacggacactatgaaactcagcttggagaaaagtctaggtggagtcctggcttatgccctatttgagcgcctgtgaagatagagccgtatgcccgctattccgctgctggttatttttgattgtcaggccttaagtgcctctgtaataatgtatatactatcgatataataaagatgtgtcttttatatcatgtatgtgaggtggacccacgctctttctgtgatgggattaatacactatcattctggaataggctattctcttggttttacatccaaatacttctccttattttatgctttattaaaacatactatgctatacaatttaattatattactttgtgtttattcaggtttttctagtatatattt

SEQ ID NO: 48547 - DNA, 568 bp, Oryza sativa
  unsure (1)..(568): unsure at all n locations
agcttccaaaatatacaaaaccatcatccaaaaccaccttagggggtgatangtantttatggcaaagttcggggggttggataactgattttaaagtttagggtgctagacggatttccgtctaaagtttatggatgtatttggactttttcctattatttatttattgtgtgtgttgattcgatcgatagtacatgaagatccattcgttgacacgtctcacctctattattactcttcctatcgttttttcataaaaagagagtatggtttgaatactattcgtaacagtgagttaacgtcgaaaaatacctgtcctttgtacggcttgtaggttgcaactcacctacgtgagagaaaattgtaaaatataccaataagctagctgtgtagaccagacaattttagataattagttatttggaggatttttttaaaaaaaaataattggtttgagactactgaagaagcaccccaacatgatattaatatatgatgatatttcaaaaacatgcatgaatggttaatatgccaacttcacctcttacaactcttgatattaaattt

SEQ ID NO: 48548 - DNA, 460 bp, Oryza sativa
  unsure (1)..(460): unsure at all n locations
tagaatcgaatngaatgcaacaaagtttcgcatttgttctgtttggttccctgagcatctattgttcctaagaccaaggagtgaggtattggtgttgaagttatcgtacactgctccttaattgtcattttatttcttacaaaaggttagtggataacaaatatccgagggactacaaagaattgaaaagattttatcatagcctcaaaattatttgttcacattcatgttaaagagaaattgggttcaaaatttgataagcatcgatcccacacaattgccgtctttttttagagatacttctgaaaaccccctttntaatttttgttattgttcaccaaattttcgtttaggcaaaactcatacatggctgaggtaaaattgcacgaacataacaaatgagcatntgacagtatactcaccgtgcaccttgaaagatgatgtgttacttctttgcatg

SEQ ID NO: 48549 - DNA, 582 bp, Oryza sativa
agcttgccactgccacctgatcgtcgggcaaagcgtggccgacctatgtccttttgctgaagtccccagtagatggtggagtccgaaaaaagcgcatttgttcgaactgtcatctgaaggggcactatagaactggatgccccacaaatccggagaacacatcgaagaacaaagtgatcaaggtgtgcacgaaatgcaagttagctggtcactatgcatcaacgtgtggtgttggtgtatagaagcaagtctatcgttgtttttaaatacaatcttgtaaaaatattcccatatcttgcgtgttgcacttggacaagtttttaattaaattcggatatgttttctatttcataattatgtcattcatcttgtgggatatacatgtatacgtgttcgctctgtcactcataaacctatgtgtacatgtacacctgtaaaagtacagattatgtcattaatcttgtggtattcagacgtgcattttttcactctctctctatcccgttgactatgggcaattagtacccaaatcactcgttgggtactaaattaatcaattgataccccattcttactggatcc

SEQ ID NO: 48550 - DNA, 421 bp, Oryza sativa
  unsure (1)..(421): unsure at all n locations
tggcgatggaattagcagttcgtagacttgctgaattctctcaatctcngtggtctgataataagttttatcatgacctccgattgtgcaaccgagccacaattctcgaagatgaagacagttcttgagtacaaatgaaccccctggtgctgctttttctagcttcacaatccggagacgttggatattggagagacattggagttcatctagtctgaatccagttccactggtcaaaactcctcttaagttgtagagatggctgaacctttggacaccttctggaacacggactaatgcagactgttttacgcttaggaacttacgttcgaatgctcattaactatccggcaggtatccaatgtatgctcccatgcaagaatgttctaaggttgtaggtttcttggatctggagttttga

SEQ ID NO: 48551 - DNA, 141 bp, Oryza sativa
  unsure (1)..(141): unsure at all n locations
agctttgaagagtattaggtggcgttttnctccancncctttactttattcttctctaccgacaccagggggaaaaataccgtatttactatttaccacacccataatatccatttccaggttttataaatcatatattca

SEQ ID NO: 48552 - DNA, 468 bp, Oryza sativa
  unsure (1)..(468): unsure at all n locations
ggctccttgtctggttctgaacaagcaaagcctaatctgctcataaccactgtactactctcccggtattttagcgggatggaacatattttaatacactatgaatccagatttatactccctccgtcccataataggtgatgtttttgactttntatttacaacgtttgaccattcattttatttgaaaaattaatgcaaatataaaaaaagataagtcatatgtaaagtacttttgataataaagcaaatgacaaacaaaataaataataattctaaaantttttgaataagaagaatgatcaaacattgataaacaaaaactcaaaaagacaagtaatatgggacgaagatagtactactaaaatatgtcatagccaccccaaaattccttgatattggaacggagggacgactactactatggatactttctggtagaatattaataattctattcatttttat

SEQ ID NO: 48553 - DNA, 425 bp, Oryza sativa
  unsure (1)..(425): unsure at all n locations
agcttaagcttattacagcacgaaaatgtagtggatgattaaagcangttttattactaagtattaaccattgtaaacttattttttaaaaaaaaaatctatatattttttttcatgaaacatacaaatgtgaatcattaaattaagcatcagtggacagtgtatgcgaggccgtactaaacttatactctaccacgttgaaccaaattagggcggttcaattcaattcctgacgtttttccgactctacttctattttgaaagcgtggagcaacaacaggtacaagagcgtggagcacagggtgatgacgaacgcgacgacggagagatactccgtcgcctacttcctctgcccgtcgtacgactcgcccatcggcacgtgcagggagccttccccttacaaggcgttcaccttcggggagtac

SEQ ID NO: 48554 - DNA, 365 bp, Oryza sativa
  unsure (1)..(365): unsure at all n locations
cggccctanggcgaaacccgacgtttaagacgatccttatgatactaagttcaaaactacttgcgagaagctaaagcttcttttggtttccttattttcaatagtttgcttctaaaatggttactgatcttttctccctctttcaaaattgtagatggcagtgaacgccatcttcagctcccaccgttttggtgagggtcaccacatcgctcagctccgtgacctctcccgtatccttggcttctcgtgtnccgagcacacgggatactccgtggaccgtgttccccctcgctgtgagctctatgtgtacctttacccttttggaggtatacacggagctggccttcgcacacatcacttcaccg

SEQ ID NO: 48555 - DNA, 618 bp, Oryza sativa
  unsure (1)..(618): unsure at all n locations
agctttcatgacaaggcatttccaaagccgacacaggtttaccatatgccgacgagaggggtcccagaccaacaacaggttaggtcccagaccatattgtgccaggaagcccaggggtcctccccgacaccaccccggcgaatccacatgtctctcggcatcaaagctcccctgataagttagttactcagccaggggtgtcccattccacccatgtggtcgtacttgtcttatgtttggatgaaattacaaggaatcggtccttaagtgcgagagcgggaaaccgtacacccggtacgtttcccggtccgcggttttggaaattcatttagttcgcaagcaccgacccaggtgtcgggttttccaagtcttttgtaaaactccagttttacccaagttgttactcagattttaagtttgaaggcgaccgtcgatactggcacagggtgcacgaatatcgaggcgcaactggatggttacaangggacatggtatagcaattaacaatggaaggatcaaatgcaacaagttaggtaggtctgcccatctgccttgcagacngaacaacagattaagtgcaatcctatcaatgcataatattttgccagccatataatt

SEQ ID NO: 48556 - DNA, 460 bp, Oryza sativa
  unsure (1)..(460): unsure at all n locations
cctacactacctagtagtttatatggattcacatattnntgngtatggttcttattttctacttacaatggcacggatacgcaacataattggggatagctgtgctcaacatcgacatcttcgtcgagacattagggaggatccacatgaccattatgaggtaagtgatgatgttctangtaagatcaaatctgcactgccttatttcgagggaaactatgatcctcgtgcttacattaattgggagctagccgttgatagtgaatttcaaaagcatgtcttgtctgagaaacaaaaagttatgtgtgcctctagntgtttagttaaacatgcttctaatgattagaaacatctttgtangcataacaaaataccacaatcttggaagatctgaacgatatttagagatgtttatgtcccatgtttatgctatattctgctcaacaactgaatgttaaac

SEQ ID NO: 48557 - DNA, 576 bp, Oryza sativa
  unsure (1)..(576): unsure at all n locations
agcttttcgccagggtttctattggccgacagctctcaatgatgcggtcgacctggtcttgcgatgtagagcgtgtcaattccacgccaagcaaatccatcagccggcccaggccctgcagaccataccactttcgtggccatttgctgtctgggggctcgatatcctgggaccgtttaagcgggccccgggcgggtttgagtatctgtatgtcgcgatcgacaagttcactaagtggcccgaggcttatccggtcgtcaagatcgataagcactccgcacttaaattcattaagggcatcacggcccggtgtggagtgcctaaccgtattattaccgataatgacacccaatntactaatgaactttttcgccactactgcgaagacatggtcattaatctctgcttcgcctcacctgcccaccccagaaacaatggccaagtggaacgcgccaattccgaaatgctcatagggcttaaaaccacgaccttcgacatacttgatgaagcccgagcgagtcatggatgcaggaatttggcatcgggggctttgggcccggcctaactccgctaagg

SEQ ID NO: 48558 - DNA, 517 bp, Oryza sativa
agcttaatcaatcatgtacctgcttgttgctcctgctggagttcgtgtacggttcacttattttctgcacacatagtataagaaaaggaagatgagaggaaggataatcagcacggcttgagagctcaaaggggtcgttttgcgaaatgattgcaacatgcatgctgatgctgtatacacgtactgtccttttctcatgttttcgtggctgttgagaggcagtacaagttgagaaacattctctactttgctcttgggtgtgactaggaagcccactgacgaaagggagcactaccgggtcaatttttcatatatggaaccagctaaacagtcactgcaaatgatccattgcatctctgaagataccacacgcgaggatttgtgtgtgtatgtacgctgctcacctgtagtacacttccgttttactactaatgtcacggtggtcacaaaaatcatgtgcttttctggaagatttatagctaggtcaaaatataggagctagtacctaaccttttta

SEQ ID NO: 48559 - DNA, 448 bp, Oryza sativa
  unsure (1)..(448): unsure at all n locations
tactaagcttattctgtaacacaacaagcaatcttatcttgtgttgaaagtgtacagaatagatgcttgaaaaaagaaagcactgatggtccaccattttacttcttttntttaccaggaacttagcacgcacatgcatgatagtataccaccgccattgtaacaatgtatcaaaactagaagcacccataactattcaatcatctgggttcctaataaatatgtgccagacatcccctaatgaacatttccattctcatgatgacttttaacaacgaaatacatatgagtagccaagttcttgaaaggactttggacaaaactggtgctatttgggatttatcataagctaagaagtatattaattaatatgctttaaccaacactgcttggctgtgaagaaaatagagcctttattttaagatattattcatctctcttttttttt

SEQ ID NO: 48560 - DNA, 589 bp, Oryza sativa
agctttatctattcacgtggcacggaaaattacttctcatattggatgaacggaaaagtattcattattaacctgtggatacacttctgaacgaaactctgttcatactcgcaaggatcaaacggagtttgacaggatatatagtgattatctcaccgtttgatttgtcaccatcaaactttcaagccccaggtggctaaacaccacacatcaagatagattttttcttttctactttctaactgatgtctcaaaagtattggcttcagtgtatgaacaaaaatttacagctgggatgtcaagctctctgaacatctgtcaccctttgtttgattgatttcttggaggataaaattagataagctaattgtagttgttaagcaaaagcgattagatggtcacacatgtcggcatgtcaaggctacacagcctttttaatggcggcaaaaaatgcaattatgcaaacatcacaatgctttgctatcccactgtacttaacctccataatatataattaaggagaccttaagacagccacacgtcaactaatctccaacagtattctactagtatacattattcttaaagg

SEQ ID NO: 48561 - DNA, 414 bp, Oryza sativa
tgttcatgtatcctgccatggaggagggcagcagctacctgcgtccgttgcatttcttctccatcttcgttgcattcgcttccttctcacaatgtggtatgctcctaattccccatgcttcttgcatcccaattcttgtctgtattttgtggtgatttaaatttggatcatgttcattgttaagcacaaccaaggcttaactacgtcgtgttcagatactctgaccgtcaaaagaatatatatccttcaataagctagtctagtgccacaaattgttttcttctttgacaggtttttttctcaagcatcaaattcgtttgacccctataagctgacaatcaaatgatatgttggttgaacacgagcaagagtgtaatgccagatgactactactcgatcactactactaccact

SEQ ID NO: 48562 - DNA, 530 bp, Oryza sativa
ggcgagcttgcagcctgcaagcttggcgactatttttggctagctgtgtgcaagaagtggctcctttttattttttgccaatgtcctttgtgggttgtcaaacttgattgtttgtcttggcgttagggcatcttcccaacgaagtcggaactattatgtctcttgtggaaagcttggttacgataacacatgtgagcggctgtgtcactactatggcaaacttggtgctaatgtctcacgatgggctccgtcgtggtatcttaagatagattacttggtgtgttgatggagtaggcttttcgcttagtttccctatctactgagaaatgtaatatattgtccctttttaaaaaaaaatcgggcaccatcttttttatataactatcaaatatgagcattcgttgcacccgggcgaatatcaaacaaatatggatgggtaaaattgcttgggtacttataacacatgtgcacaagaaacttgaatttggagccgtcagatgaaaaaaatttcctatttgtagaatacaatc

SEQ ID NO: 48563 - DNA, 494 bp, Oryza sativa
gcacagcctctggatcaagacgggtgcgaaatgtgttcttcatctcggccaccagcactaaatgccgactcagaagcaacagttgacacttgaatacataagaaatcacgagcaagtttgcataggatatgaaattctgcttgtttgagcttccaccaagacaaaatatcaaatggatctttggaagtccatagtaacagtggttgttccatgtaaacttgtaactcggttttatcactacaaactggctgacttctctcaagcaaaaatctttgaaaatgttgctcatgatcatggctactgtcattctcattaaagatatcatcacactcatcagtattatgaacaggatcagattgaatgtgaagttgatgcacatgcatttcagcacctctcttctttgatgttcacacgcactagtagcataaacatcaaacactcgtctgataacctcattgaactcatcaaactttgttgagcttctaaccataaat

SEQ ID NO: 48564 - DNA, 561 bp, Oryza sativa
agcttaacatacatgcattgagcccatatcacttcaaaaaaataatagtcattatccctatctcatactctactcgatgaaaaccatccatgtgttatatacgcaaagttgtagtagtttcacatcaactgttaggactcagaataggcattatgagttcatgatttaatttcgacatgtttctatcgaacttcttttagaaatatttttaaatttcttgctgcaacgagtgggggtattcccttgttgattccaaaccaataaccctggcaaaggaagacgacgacttaattttaccaaagcaaatggtgcgctgcggcggagcctcgagcttttcgccgtgtttagttgcaaaatttttcttcaaactttcgacatttccatcacatcaaaacttttctacacacacaaattttcaacttttccgtcacatcgttgtaatttcaaccaaacttacaattttgatgcgaactagacacaccctttgtagtcattcttccgcgcgcgcaccctctggcagcactcgatttcctctgcctgcatccgatccgtaacgcgtcg

SEQ ID NO: 48565 - DNA, 328 bp, Oryza sativa
  unsure (1)..(328): unsure at all n locations
tttcaacaatctaagtgtgtgcttgtccacaaccagagcaagactagtctcacctcggccggtgtgagaagtaacaaattgatttgccatattcgaacaactcccagagatggcctcacggctcagttccccaaccatacccattttgcaatctctcacagcttggntgtctccaaacaaccactcattgccagtgactccctgtcagccacttgctttttcaaacatcacgtctcccaaactttaacacctttttacgaagcatggtaaaacgaatactacgctaatgaatcacctcacatctgcccatgacagtgggcacagctgt

SEQ ID NO: 48566 - DNA, 538 bp, Oryza sativa
agcttggcaggcttcaggcggttgtggaagtagcgcttgcatttcttatttttttacagaaaaacctgcagaagagaacacttgaaattgtatgcaaaagaccccctaacttaatcatagattggactttcaaacttcaatggacaaagagggttacctgggaatcagcacgaatgaacctgatacccttgcctgggtatatcttctgcccactaaaacggcaaagttcagtcctgtaaaaccaagaaaacaacacgttaaagaccatcatggtgagatcttattttgaaaaagatcaaaaggcatcaactaaacataacaaaatcgttaggtacaggaacttacttcagaaccatcttttcagacttgggaaactttcacaatgtcctgcctggattccacaagcaaaaaaacgaaggaattagcacatgcagcacgataaaatgaaacatggaagcataatcaacaatataagcacataaaattaatggagaacatgtagaaaccaactcatggcacaatatggggcacgaataaa

SEQ ID NO: 48567 - DNA, 519 bp, Oryza sativa
  unsure (1)..(519): unsure at all n locations
agcttgagggtcggcacatcataacggaagtggaagaagatggacttctcnattgttttcgtngccgaagccgccaagtaactatgtactgtcacagcggttggggttgtcgcgggaataacgtgcctgttagtacgggtgtactgggcgaaagaacaaggggcacgcggtagatcatgagaagctctgtcccaaattcggagaaagagatgctgtggaccacaacgcttcgagacattcacccttcctgcgggtacagaggaacaagtgaaaaggtggactctgaagaaaatggcggaacagtttcagaactttaatggagatctgtgccagaagtatatactgaaggggcagacaccgaacttccacacattcgccaaactaatggatcactgggacgagttcgttgcgtgtaggacaagtgaacgacgccaggcgatgatggaaagaaacaaagaaaatgccgccaagaagaaataccgtcgccactttggggtgaggaaggtattgccttctcta

SEQ ID NO: 48568 - DNA, 445 bp, Oryza sativa
agctttgtgccggtccgctccacgcctggcggaggttgcgtgagactttttttcgacgagaaggggagactactatccgcatcagactctttgctgcccaggccacccaacgccgccgattatactggatgtgtgactgccggcaagaccagtacatttattaccaacaatgaaatgagactatttcggggtaaacaacagcaataagtatggagaacttctatctttttttttattagtcaggagacagagcaaacttcaataaatggcaaatatttgattaccttgccaactgatttcagtaaatgatggcattcatttgatgtgcagtctattagataaatagctggaaaacccttcatggtagattcttcttctttctctgcaaccaaaaagatgattcatcagtgccccaggtaaattccgtttgaagggccgtaccata

SEQ ID NO: 48569 - DNA, 598 bp, Oryza sativa
  unsure (1)..(598): unsure at all n locations
agctttccaatggtatataactcactacttaataaaacatatttactattattaaataattaatatcaaatgattagattatggtcaacaaatatgctaataaataaaattggtattattcagtagagtggatgtaataatatttgtttctagcatgttttgtcacagtagcaaccatgtaaattaagtacagtaatgtctcaaatgaacggatgtataggaagaaactagcactatttaatgttcaataaaatccatgacttataaattacttacataaagtttagcctcatattttgtaactaaaatataaacacacatagatgaatctttaacttgtttaggagaataagaacagagctagatgtggatgaatcaccaaataatttaatcaatgcaatgccatatagaaactagctaatgtataatttaactacaatatattcaggagtcacttggagcatttngtaatacactttctaaatggctcatgtactgtangcgaccataaccttatacaatcgtgcacacacgtatattggacatcccatttatactatacaattggattaccccttttcatatttttcaactgggg

SEQ ID NO: 48570 - DNA, 383 bp, Oryza sativa
  unsure (1)..(383): unsure at all n locations
gcacgcattaaagcgaagatgggatgtatggaatntatcacatcattcaatccacatatgggtgctctagaaaacgtgattactagacgagagtttatgtattcattacttgttttttcggttgaacgtttttatttgagcttacatcatcatcccatcatatgtcttaaagacaaactatntatgttggctacataaaacaagtgttcttaaagattggttctgatgatgacacgattagctcggatataaccatgactaccttatgtattaatcaatcataagtgcatataatctatattagatgtacttgttatatattcgaatacacgttgctacataatgagatgtgtgtgttgtcgtttgaaaggtacttggttggg

SEQ ID NO: 48571 - DNA, 510 bp, Oryza sativa
agcttgatcatgtggacgccttcatggaggtagagcaacattcacttctggttattcgagaccttgacagcaacttcactgtcaccgcctttaaagccagccacttccccagcaccgtaatgttcctcttctagggagactccttcggtcatgtcctccacactagcgactgtcacttgcccctcttccacctcctcactgactacgtcttcctcaaccgcaccttcatcgccacctactctctccactttcccaccaagcaaggggaaaggaccggtagcagcaaagagaagaggaagggtccggccgccacccgtgagcatctatctgctgaccgccacccttctcccgtcagtaccgctcactgccatcgagcttatgcgcactgatccccctgaaggcatagattgacatacgaagagagggaatatatgtggaagaaaaatgggcccctgacctgtgggaacccacgtgggtctgatgctaacttaacccgcatgtcaaccaaaa

SEQ ID NO: 48572 - DNA, 558 bp, Oryza sativa
agcttcaatttcctaactgttcagtgaaaaaagggggaaatcgacaaggcatcctacatctgatagctttggactttgcttctagttgcaagtacttgaacattggcaaaacttgtactaccatgatctgagcagcaatggtcaccatctacaacatgtactacctgtcagtttggctgtgtttagttcagcgcaaagtttagattttgattgaaattgaagatgatgtgactgaaaagttgtgtgtgtatgacaagttgatgtgatggaaaaaaactgaaatttggatccaaactttggatctaaactcagcctttgttactatggtctggtcatcacctgaatttttcttgatctgcaattgaacttgagatagccggcagacaacggcattgcctttggcgttcgggtgatggaaaaaaggcccttggaatggaagcaagtctcaatgaccatcatgtctgtcggtgagaattttacgacagtcggtgtcatgaggtcaaaaaataggttcgtttttgctttggcaggcttcatgggtcaacttgggagctggat

SEQ ID NO: 48573 - DNA, 488 bp, Oryza sativa
  unsure (1)..(488): unsure at all n locations
gttacagagcataatcaaatatgttacatccagaaacaatatggtattactagtacattggaccaatgaagtgaacttatacatgtaaaaggagtattagcttctagtagtactaatcgatgtggtcatgggcactgcttaattgaagaatgcactatgccgcaagcacaagtcctataggaatagatcctgaaatcaaaatntcaggatgctcagaaagattaaatcagaaagaaaagcaagctctagaacatgaaccatcgaaagatttctagtgataatgttgaatgcaaggaaagcgatcccaatttcccaaatccactaccaatcatgaagaacactacccatttgatcnggatgttaatcgaacagtaccccctcaacattatctggaatgctgaatgaaatatcaactgcaacaaatacatggcaatgctaaattctgaatcatcgcacacaccaccaatcaccacanagaactgaaaact

SEQ ID NO: 48574 - DNA, 238 bp, Oryza sativa
atcatgaaatgccggaatgcccatctgcgtgtaaaaagagagcccttcctctttattccaagcccatggccaacaatcacgggccccgcgcatgggcctagaggccaaacctattttccaggggtgaacctccacctaaataacgaaccgccccagcgcaacacaccagcgactgccagggtcatttgggggccgggaacaaaaaccaacctcgtgcaactaaagcaactgggggcat

SEQ ID NO: 48575 - DNA, 216 bp, Oryza sativa
  unsure (1)..(216): unsure at all n locations
catgcaagctctcgggatanggataggctggaatggataatactaaaggacgcnnctccccngttctatgcggccnccaagaaaaagagtagcgacgctacaacaggcctcagctacacaccacccgctgctaaacctggacctgcccgcaacctcaggctggacaacggagctggtcaaataactaatcaatgtctataagggcgagcacaatgt

SEQ ID NO: 48576 - DNA, 311 bp, Oryza sativa
  unsure (1)..(311): unsure at all n locations
ctcaagctggttacgccgaaagggctccgtgattaatgcttatttctttattgatgtatggatntgataccaacaattccttataggaaaattaagattcctagatattgagttgcaaaacatgatcaatcagggttatgagacactaacctggagtcatcgaggtaaatgttcaaaaatcctgaatggactacataatggtccttttttcttgcctttatttttctgaattacctgacttcttcataccccttcctcactttatagaaaattagcagatcttctggttttctacaaacatacatattttt

SEQ ID NO: 48577 - DNA, 389 bp, Oryza sativa
agctttagctgttctttcagttccttctccgttttcgcaatatgaccaggataccttttattggtagcaaaaaaaatggagaaaaaagtgagagcatatattaaacattagagctagtacaagattccgcacatatgcttgttaaattccactaaagcacaccttatatatacctgcactgggcgcagggatctggtccagtagcgcaaatccgcatccaaagtgtcccagaacatctctttgtcgtaatcttcgttagcatatagcgagtggcttaacctctctttctcatacaatcccagcagcgtgtcaccagaaatctaatcatacaagcataagacgatcaaagcagcgaaatgtcaggatggtactactcacaaatgagcttt

SEQ ID NO: 48578 - DNA, 91 bp, Oryza sativa
ttgatactcagcttcttccggcgtctgcctcttacgggggcggcttgccgtcgtttgatggccacagtggacgagcgagtgcgggggagag

SEQ ID NO: 48579 - DNA, 540 bp, Oryza sativa
agcttctcctcgtgcttcacatcgtcaagcggtcaagcgaataatgaggtatttgttttattctcttgagtttgtaatttggtattctacttcatcttctatatgcttaagtggatattctgatgctgattttggaggatgtaaaattgataggaaaactactaacgggacatgtcattttcttggtacatcattgattgcatggtcttctaggaaacaatctaatgttgctcaatcaaatgctgaatctgaatatgttgctgctgctaattgttgctcccagattctttggcttttatctactttgaaagattatggtcttacttttgagaaagtacatctcttttgtgataatactactgctatcaatattgctaagaatactgtttaacactcatgcacaaagcacattgacatttcttttcactttttgtgggatcatgttgaacaacgagatgtttagttgcagtttttggacacaaaagtgcaaattgctggatttttcactaaaccctttggattctaatcgctgtgcttttc

SEQ ID NO: 48580 - DNA, 447 bp, Oryza sativa
  unsure (1)..(447): unsure at all n locations
ntccgagtaagtcgggtgtatgtatgatcacctttgtaattgctctcgtcancacctccaaacacaatctcacccccgttgatatacgttgcatttcgatttaaccaaaaggaaaataccttgtcagtcacaaggctttgttgaatcatattgtacctggtagactactgaaaatgtttaatgccacaaaaaaacaggacagtcaagtgataagtcacaaaaatattattgcatactttgatcaggttcccattaatgaacccaagaggtcacaagatacccaacacttgtgatatgatgtgtaccgtggtaatgatacatatatatcagcagattgtgctgcntgtattagattggtcataaattgctgacatataaaaagaacgccatgaattgcatgaaaaaggatactcctcacatcgatcaatgtttaaagagatttttaat

SEQ ID NO: 48581 - DNA, 561 bp, Oryza sativa
  unsure (1)..(561): unsure at all n locations
atcttaacancaaggtgtatatatatgatcaatcgaatcaatcaactatctttttctcttggccataatctcatttctcaaacctgatcaatggcaagagatcatagcccttctttccgggggtgttgccgccgtgcaatggacgcgctgccggtgccggagacgaaggactggtcttttttttttttttttttgaaacttaaacatatatattagagcaacagatcaagggggcaagccccgtacatcgcccacagaaagaaccaacaagatgcacatcagagaaaactctactaagagtacaaacaacctcctgaaactaggcagcgtagaaggcgcgaatcgacaggagctgcggcgaagccacgacgattagaaccttgggtctcctttgacatgcagaccgcttgacgaaccggtaatcctcttcggacgccttcacagaatctgcacaaattggagatttgctgatgagccgcaaattttggtgtaagctttacccgacttaacccaacttcaccaccggagtcgcctttgaatctgaggagcatgagctcaacc

SEQ ID NO: 48582 - DNA, 405 bp, Oryza sativa
agcttttattgccggaatgcctatctgtatataaaaagagagcctttgctcaatattactatttgtggattccacccgttcagtatgcagtgatctgttcacagcagctattcgccaccaccagatctgcacccacgtttctgatctcgcacaaaagaatttgcaaccaagttgtgtgtatagcatagtaatgtttaccaaatcccacatacaaactcactggaccgtaagaatgccaaagcttattccaccaaccgcagtcccaagatacaaaaacatgctttagcaatgttaacaaatggaggaccaaaattcgaccgaaaaaaaagaagagaaggaacacatatctcgactgtcgtattgataatccaccaacaaattgccaatcatatacactcttcattt

SEQ ID NO: 48583 - DNA, 397 bp, Oryza sativa
  unsure (1)..(397): unsure at all n locations
cgaatgaacttgagcgcaaactntggagagggaatgattatgtgtngaaatggggtggatttgcctctctcggccggttggctcttatagggtacccacaacggtcagaaataacatgtgagacccactagccattaccttgccaaaagtggcanggtaccgttgcctggccgggtcggncgaacctctggtgggccaacacggccccactttctgccgttgggatctatatgtcagtgtgatcgtggcacaagaaaatcttggtgaaaaatttattttggtttgctctgaaaaaattcattgaagaattccttaaattcaaaattctaatgcaatttgaatcatacatgtgtgatgcaaaattcaaatgttgacataaaatgcgatcataccatta

SEQ ID NO: 48584 - DNA, 513 bp, Oryza sativa
  unsure (1)..(513): unsure at all n locations
taagttgagctgcagcacgcaagcttcaggaagagatggggtctaagctgaactttagtaccgcttatcatccgtanattgaggacaaactgaaagggtgaatcagattttggaagacatgttaagagcttgcgctttaaatttcggtggaagttgggataagaatctaccttatgcggaattctcgtacaacaacagttatcaagctagtcttcagatggctccttacgaagcactgtatggtcggaagtgccgcactccgcttttatgggatcaaacgggagaacgtcaggttttcgggacggatatcctgagggaagcagaagaaaaggtgaaaatcattcaagaaagattgtgtgtggcccagtctcgtcataagagttatgccgacaatcgccgcagagatttgagtttcgacgaaggagattatgtgtatcttcgtgtcacgccttttcgaggagttcatcggtttcacaccaaaagaaaattggcaccgcgttttgtgggacctta

SEQ ID NO: 48585 - DNA, 294 bp, Oryza sativa
  unsure (1)..(294): unsure at all n locations
ntccttctgatnttataaatgaccatgactntatgtcttcaaagtatttctcacctatatcttgcattgtctgtccattgctaggcttgataaacaccttcaccatccacagcttaaccaatgcattgcgtttgaaccggtagttccgtggaaacatactacagtaagcaaagcatcgccggacctgttctgtaagtttctggtagcttcgccactgttcttgtatgatgtcagtacacgggacctcattatctctaatcttttgccaagagctggcctctaaatacttgcata

SEQ ID NO: 48586 - DNA, 439 bp, Oryza sativa
agcttatattattgtatgattaattaagcattaacttttttaaaaaaattggttgtatatgtttttctaaaacaactttcatatataaactttttgtataaatcacgccgtttagaaatttgaaaagcgtgcgcacgaaaaacgagagagatgggttagtcatctccgttaggagcgagctcgagcgtcccggcgccgctggcgtcaaccacgacggccgcgcgtgctggctgccatagggccggatccgtacgcacgaactacgtacggcaaatccaccatgaaagaagaagagtcagagtcgaacatgagtcgcgcatctcatggactcctggtgaacctgaactacgaggggatcccgaatcctacctatttctgatcgacccggtgcttccataaaaattaagagcctatattcaaggggacatgtgaaattcaa

SEQ ID NO: 48587 - DNA, 414 bp, Oryza sativa
cgctaattccacccactgtctctctttcatacggctgctttatctctggcacctactccctccgtcctaaataaaaatccaatcttaaggatgtacctgtatatacatgtcatccacgtacaccttctgaatgaggtttctttatgacatggagtagcatgcagcacgcaggtcgctattgtgttgtgacagcctgtgtccatgatgctagcattgctccttgtgctctgcgccgcgttcctctacaatgcacctttctgtgagttctcacggcgacagaaagctcgcgacacaatctgttgccgctgcttgagacatattggagagatatgctccggttcaacagaaagtaccttgaggtccaatacttcacaaaccaatactttcgtatgttaatctaactgctcacatgat

SEQ ID NO: 48588 - DNA, 578 bp, Oryza sativa
agcttcactttataccaccatttaacacattttttcactttgggctatgtttttttacctttattttactttggaccaccccataaactttttaggaatacataaatgacttttccaactttaaacacatcagcagcccgtaacccggtaatattttccaacttacacaggcaattgtttacaatattatagagtagatgcagctaaagaaaatgacttgggcggtccaaagtgcaccaaagataatcttacctagtctaaagtaaaaatatgagctagaggatagcctaaagtgaaactttggcaataaaaggtggaccagagtgcaattaactcttgtttttttcctacatttaatacttcatatatatgtccaaacattcgatgtgacagcgtgaacaattttgttttgtgactaagggtgtgttcggacccaagggttcccaacacctctccatcgttttccgcgtgcacgcttttcaaactgctaaacggtgtgttttttgtaaaaagtttctatacaaaaaattgctttaaaaaatcatattgattcatttttgaaaaaaaaaacttaattc

SEQ ID NO: 48589 - DNA, 519 bp, Oryza sativa
agcttctcccgtgaatgatagcaatatgcagtcctatcacatcatcacagattcaatcaaggatgatgcagtcactagaacaatgccagctatatctctccagaatcaaaatgagcagccacgtttgtggatttcagttcgctacttatcattgtgtaatcgaaagtttgcagcaatcatgtaataaataaatatattcatgtctataagcagtgagtttactatgtttatggatgattcatgttgaagatacaatgtaccaatgttaagcaccttccctttttggtttaaggcaatgccttgtgttcatgtaataagggagaaatgtgtaatacagacaagttctatgaagattcttttggaagatgcggatatgtgatcatgtgtataattggttacttgataagaaagacctaggtctcatttcagaggaactatgttctaacctcgagttaataaccaacctgatgatgaaaaagaaaatcaagcgattaacccaaaagacatttgtttggacta

SEQ ID NO: 48590 - DNA, 232 bp, Oryza sativa
  unsure (1)..(232): unsure at all n locations
ggacacataaaactcagctacatgcgatcttccgctgagtgctgtatattttctaggttgatggactagaggaggcccaggagatatggggtactntgcaaatggctcatgacggatcacccgctcgtcgtgatgtcaccattgaattattgaaacgaacgcttggaagattttgtgatggatgacaacgagataccactaggagatgtctgagttgattatgattcttgtc

SEQ ID NO: 48591 - DNA, 424 bp, Oryza sativa
  unsure (1)..(424): unsure at all n locations
agcttccacacttgtatgaatactttggctaatataattcaantcaatttggtatatggatttttcatttttattttttttgcattataagtatgtatggaagtataacaaccagtgaagctaaaaaatcccttttaagcaccaattcaatggatttccttttggtgcagagaagaccaaagtacacactagctgggatgaaaaacaataactgagactgcttataatttggtaaccgaataagccacaaatttgaattacgatgctcattanggttgatgtaagggtgctctttttgaaatgtataaggatgctcttgataccatgtccctgtttctaaatngtaatgatgcatttcaaatgtgccatgtctaattcagtttatgtttttcacatgtttaattatttcagaccttaattgaac

SEQ ID NO: 48592 - DNA, 643 bp, Oryza sativa
agcttctgtctcgctgatcggttcggttgattccatgcatgatcattttattttattttgtctcaaaagtgatgtattggttaagagaaccaccgtaagacttttaacaaagcagtttcaatataaaatccctcaaatcaaaatagttaacccacccaccgaataggggtgagaaaattggaattgaaattatacctataatatattataattgtagttagtttgcacacgtctggtccatcgtttttttctcatttttgcaaagggtttagatatgaagttataagcctaatctaaatggaggtgagcaggcttggcctctcccatggctttaaatctcgcactgaatttactgtagatttagtaaatttcatagaaactaacactattggccccttcaacttaaaaacttatagtggttctagctccacttttggttatttttggtagaccaagttttaggtaattatattcttggatttatattgagcaacattgaccaccgtaaaggaatggaaacctatgtgattattaccttgttgggaaccgatgggtctttgtaaattcctaccaaacttttcggccccctaatcggagggatgggtcgctatcttatttacatattgttttcctatttgaacac

SEQ ID NO: 48593 - DNA, 377 bp, Oryza sativa
  unsure (1)..(377): unsure at all n locations
tagcacaatgcaatcgaaggtgatcaatagcaccacattctaagttactgtttggaccacctcttttcctgaacctgacattgttcatagctcgagcaattatgttagataccaaagccaaatcctcctcctcgaactgttcgagttgatcttcggacgtggcattaattaaagcaagaattgaagactttgatgtagaagcaccaacatccaaagaggtcgaagaagaaacaaaagcactagacttagaatcaactttacgagcaagaatattcatctcatgtgttntaaagtttgtggtaagcgaatccaaagtcaaagtagtcatatcaacagacacctgaatagatgtaattttcatctcccaaatagacatg

SEQ ID NO: 48594 - DNA, 671 bp, Oryza sativa
agcttaggtgtaatgataagaaaaatcgagaaggattggtacaagttaacatctttttttattgattgtgcatatcgcaaacaagtctatataataacacaaagagaaagaaagaagacccattttagttgatagtggtattattacccaaaaattaaaaatacgttcaatttagacctacttttataagcatcatgccagctacagctacagtcacagcctctttcatccctttttctttcttccaaaaaacgctcacctgtagtgatggatctatgtgaaagttgtgaggtctaatgtcaaatgaccctacagcttcttcacatttattcttgagtactaaatttttcatggaaatccattcgaatctacacaaataatcccactgaaatatttaataataataatcgatctcacaaagtaactttatctaataatttattgactccgccactgaatttaagtgtagtgataaaaaatcgagaagaaggtttggtgcaaattaacaactttaacatgaaattaaattgtacatgtagcaaacaacctttattataacacaaaacaaaccattttaagtgaaagtggttttgctaaaagagttaaaagtttttcatttagaacaacatgccagcttacggttcagtcacaacccccttatactttttctt

SEQ ID NO: 48595 - DNA, 151 bp, Oryza sativa
  unsure (1)..(151): unsure at all n locations
gatgattttacaggatcgggctgttcgattaacaaatgatttcttctgccattctggtatatataaatatttccattgatctatgtaagccacacttgtgagcttgctttctttntcatgactggatttatgataagaatttgccaacgat

SEQ ID NO: 48596 - DNA, 704 bp, Oryza sativa
agcttcaatttcctaactgttcagtgaaaaaagggggaaatcgacaaggcattttttttcttatagctttggactttgcttctagttgcaagtacttgaacattggcaaaacttgtactaccatgatctgagcagcaatggtcaccatctacaacatgtactacctgtcagtttggctgtgtttagttcagcgcaaagtttagattttgattgaaattgaagatgatgtgactgaaaagttgtgtgtgtatgacaggttgatgtgatggaaaaagactgaagtttggatccaaacttttgatctaaactccacctttgttactatggtctgggcatcacctgaatttttcttgatctgcaattgaacttgagataacccgcagacaactggcttgccttttgcggtcgggtgatggaaaaaatgcccttggaatggaaacaagtctcaatgaccatcttgtctttcgtgaagaaattttccaccggtcggtgtcatgaaggccaaagatagttttcgttttgcctttgcaggctttcattggatcaactcgggaactgggtctcttcctaaattttgttaaaaaaaacgacgtttcgaacctcttgcttttattttgaatacgcgtatataacccatgaaaaggggtcccattaatttttttttcaggaatttttttttcattttttgattattaacctttccc

SEQ ID NO: 48597 - DNA, 406 bp, Oryza sativa
  unsure (1)..(406): unsure at all n locations
taacanagcataatcaaatatgttacatccagaaacaatatgtgtttactagtacattggaccaatgaagtgaacttatacatggtaaaggagtattagattctagtagtactaatcgatgtggtcatgggcactgcttaattgaagaatgcactatgcagcaagcacaagtcctataggaatagatcctgaaatcaaaatttcaggatgcccgaaaagattaaatcagaaagaaaagcaagctctagaacatgaaccatcgaaagaattctagtgataatgttgaatgcaaagagagcgatcccaatatcccaaatccacttcccatcatgaagaacactacccatttgatcgggatgttaatgaacagtcccccaacattatctggatgctggtgaatatcact

SEQ ID NO: 48598 - DNA, 572 bp, Oryza sativa
agcttttacttgttcaggaaaaagatatttgcagctgcagatttattacagattcttttatcacacagtaaatccggtacttcacaacattggggctgcaaatatcattttccctagtatttttattgattctaaacagggcgctctctgattttatttatttgtttttttgagggaacattttatttattgggttaataaatttatatactatagacctcatcttttcgcttattcttatactccctcattccaaaaagatatttaactatttgatgaatagttaaagtcttattttattctttgatttttctaaaagtctaaatcatatttggaattattatggggtatattaaatttttgatcggatcccaagaaatcattttagtacttattaagtgcatgttcggtggttttgtcacatgatgaatgaggtaactacaccttgggtttgggtaaaaaaaaatacttgaacttataatttttgaaaggaagaggtcttatcacacaaaattgatttttaacattaaattggaaccggttttggaatttttttattgaagttattttta

SEQ ID NO: 48599 - DNA, 240 bp, Oryza sativa
taacctctatattattaccccttgtacccgctttgcatttatcatgcatctgccggtgtggctcgctgagtactgtggatgtactcattgttgctcaaaattttccctcttcagtaagagaagctctggagaagaagtcttatgtggagtcctggcttataccccagttgagcgcctgtgaagatggagccttaggctcgctagtccgctgctggttatatttgattgtcaggcgcttag

SEQ ID NO: 48600 - DNA, 501 bp, Oryza sativa
agcttggaccttataaggagagaggaactttaatctacatggaaatttaatgttctttttttcgtcataaaaaacgaggatgggagccccaacacgtatgctttgcgctaattcacgaacacatcgaagcttcctgacagctcagagatgcttaaattagatcgagctgtccaaaacgcgaccttttcttccctgcacctgcatccgataactacgaacgagcctatatctcattgccgaagacgagtacgtcgcctagtccggggaacctctttcttatccaactccaaccatagtggcgtcagcgtcactgctgaaaccgtcgaacacaactaggacggcatcgagttgcaagccagagacagcacggggaactcacgttttcaccatacaccgatacagcctgcaagcagtctatggtgccagcagcaacaaagccagcttcatccgctccgcgggtttagacaatcgtggattccacagggtgtctcggtactacca

SEQ ID NO: 48601 - DNA, 286 bp, Oryza sativa
tctaagctggcttccatacagccgtgggtgactgatttatattatgatctgataaatcttaatcggttggcacctctcctctatcgccacaactaaacaccgtagtgtccacagaagacaaaccaaaatccatatttttcacatttatttacaaatatacatttatcatttaatccagatcataaagagtcatttatatatgtattgagccccaaggaagtaactatcactagctggctacattttatgcttggactcaacatattctatataccaaggatgtcct

SEQ ID NO: 48602 - DNA, 644 bp, Oryza sativa
agcttctaaaagaagtgcattgaccactgaaccggagcaataatatcttgattatccttgaatgctgctttgaaacattgaaatagacaataaccaatgcttcacagctacccaacctagccaaaacatgcacaaggtattccaaaaggcttcgtttccccagacggaaaagctttgtttgcaggtcttacaggatgtgaacagaatcacgggcggctgccctgagtcctaatgttacaagagcagataatatagtatgacaagggttggtgggctgcctcatgttatttacagatgtttcagaataagtgctctcgtaaaccacacacatcacctagatgaagcaattaaataatgtcaacgatccaattggaagctgagaaatcttcacctcttttgtcttacttcccaattctgaacatctctaatagaccagttatgtcggagaaccaaaaaaatttagaagacctggtttctacttgtatgaaaaagtatgatacttagcaagaggtcatgtcaacgaattcacaaagacgtatacatgtaccttcattcaatttctgatcatgccgcattgcaaacttgttacacctcaagtgatctaatctttctaggagggcgaacaaacatattcgcatcacaca

SEQ ID NO: 48603 - DNA, 87 bp, Oryza sativa
aacaagtcacactggggggtaaaaataaaggccaaaacccaatgatgatacgacacatacgaactcgcctgtgtcctatgaggagtg

SEQ ID NO: 48604 - DNA, 653 bp, Oryza sativa
agcttaagagcattgtttcttggctcattgataaggatgccgtttctctcatttttctgtacatcatgtacaagttcatcatgagccgggtcaggccagtaaaaccttctgtgatatccatgtgcggctcctgcgggattggacagttgagttctgcgcacctcaaggaactgcttgatttgcttaagtggcttccacatacccatacagactataaacaagagaaccagaaggattcgcttggtttggctacatggatggaagagtcaggcaccttgttttttgattatcggaagaatgcttcaagaaaaactgatgattctagccagccagatgaattttttgactggctattctgcgaatctttgcttgaggatcgctgtgaatcatggcttggcatgcgggaaaaatgtgttaatcttggacctgccatctttaaaaagataactgaagaattggataaactgaaactgaaatgcagctcatgtgaagaactaaaacaaaaaggaggtgtatatttccttcctaagggcatccttgaaagtgatattgacatcgagccctatttttatgatggggtatcgccctcctttttactgcattccggtggtcttcaattttgtaaacagcatcttgaacttggtgatcaatgc

SEQ ID NO: 48605 - DNA, 500 bp, Oryza sativa
agctctaaagtagaggtctcctacttaaaaccctttttccggataagttttttttttacactctttctgccaaaatcctctctgtccccggcgatcttttcggtaattcagtctctcgttggcgagtgcaagctccatcagctcaaccaaacttgcgtcaatggcaaccatatctgacatccccgagtgtggagtttatggataccccatacccccacggcatggatatccatctggttataggggatgccatgtatagatagaatatatttagtaaaggactcggtagatatgtaaacttgtatatcaaggaaacacctcgtagttctagtcggttacgattgtagtttatctcatacacctattccgttaggaatatggactgtattttgtaaataccgactcctccccctatataaagaggggatcgggtgccctcttgggcaggaacttttcccacagatcatacgatctataacacacctcgggggaggaatccc

SEQ ID NO: 48606 - DNA, 428 bp, Oryza sativa
  unsure (1)..(428): unsure at all n locations
tctacactagaagatagcatccatatcatccaccatatctatgttatcattatccacaaataagctcttcatccatgcttcctttccaaagaaaaattctttgcaaaaaaaataaaatttaaaaaaaaagagggaaaggtatggctattagaaaaataataaattcttgctctcccaaaattggagcatgaaagaaaaatatagagagaaaaaacaagagaataagtagccataccctctctatgaaaattaaaggatattttggaggaaaagcattagctcanagaagaagcattntctgtatccacatatctatttctatcatgttctccaccatattattcgcacacactttgcacgatcttgatcttgagtatgagtagtcatctatttaatcccaagttttgatctagcaaaaatgtaataca

SEQ ID NO: 48607 - DNA, 308 bp, Oryza sativa
agcttccacgagtcaagcgtacgtgtcaaatccggcgcatgacagtgtctctttttactacagtggacttgctcggccacatgtataaatcgaagaccaagaccaggaacagcggagcaggttcgagctaggtggtgtgatccattcagacaagtaactaacaaaaacggtggtgtccgttcgtgacatttgctatagctagctagctccagctcccatggcgacggcggcggagaacaagaacgagccggcgcgggcattcgcggtgccatccccgtcggtccacccggcggcgaccggcgtggggg

SEQ ID NO: 48608 - DNA, 174 bp, Oryza sativa
actcagcttatcccggtgacaagcgtgaatgcttcacttagttatttatagccccaataccggttgaaggactcgttgggtggcagttcaaagagagcatactgtggatggaagaaagtatttggatcatacccctgaggaggagggggtgcttagcttgagctagcttcaaga

SEQ ID NO: 48609 - DNA, 554 bp, Oryza sativa
agcttttgtcccaagctccaccaaaatcaagagcgcaagctctcaacatatctttcaagatttgattgactcgctcggtctgaccatcagtttgcgggtgataggccgtgctgaaatttaaacgggtccccatttcttcctgcaacttctgccagaattttgaggtgaactgactccctcggtcaaatacaatctttttgggtactccatgtaggcacatgattctcgaaaggtaaagctccgccaaacttttgcccgtatatgtggtatgtactggtatgaagtgagcaaccttagtgagtcgatccacgactacccagatcgaatcgtgacccgacgatgtccggggcagtcccgttataaagtccattccaatctcctcccatttccattccgggatttgaagaggttggagtaaacctgctggtctttggtgctctgccttcactcgttggccaacatcgcagagtgcgacgaattcagctatttctctcctcatgctgacccaccaaaacttttctttgagggcttgatacattttagtgctgcctgga

SEQ ID NO: 48610 - DNA, 371 bp, Oryza sativa
  unsure (1)..(371): unsure at all n locations
attgagaggggtatcgaaccggccaccgcttaatgttcggatcgatcgaagttctggtactatgctcacngtggaacgcttaacccagttaatggctccctggtgttcagcgatcagatacgcgaggcggctagtcaactaacggacgcaatggaagcctcttcttaggggacgttccgacccgacagagagaaggacgagctgtcactcgccctgcagactcccgagcatccaggacgaacacgagggaaaggcgtggttccttggaagaatggattcaacgaggacattcacaagtatatgagtccgatgaggagcaagagagataccgacgcgaagatcgcagaacttgagtacagggtatatagcta

SEQ ID NO: 48611 - DNA, 430 bp, Oryza sativa
agcttcatcgatccaagcaagctaagccatggtgctccaacacagtgatcgtatggacagcctcttctccccacagacgagctgggtgagcggcccgatcatcgtgggcgccgggccgtcggggctcgccgtggcggcgagcctgcgggagcagggcgtgccgttcaccatgctggagcgcgccgactgcatcgcgtcgctgtggcagaagcgcacctacgaccgcctcaagctccacctccccaagcagttctgcgagctcccgcgcatggcgttcccggcgcactacccggagtacccgacgcgccgccagttcatcgactacctcgaggactacgccggcgcgttcgacatcaaccccctcttcggccacaccgtgctctccgcgccctacgactagacgttcggcctgtggcgcgtgcgcccctcc

SEQ ID NO: 48612 - DNA, 309 bp, Oryza sativa
tcaaagatgatggtctaggtcctttgccttccaattggtttggcaaatgtctagccggccaagcatttggttctaaccaatgcaaccgaaagataattggggctcgatggtatgacaaacatttgaatccagacaatcttaaaggtcagtacaagtcagctagggatgctgatggacatgggacacacgtcgcgtccacagcggctggtgttctggtgccaaacgttatcctccatgggctagctgttgggtatgccagaggtgctgcaccacgtgcacttctttgcagtttacaatgcgtgctgggga

SEQ ID NO: 48613 - DNA, 475 bp, Oryza sativa
agcttggaattaagccggcgtgcgtgcgtgcgtgcgtgcgtacgtgcacatttttcgctggaacctggaataatccgggtgcccctctgtgccccaccccgctttgccgcgagccacaagaacgctggaaatgtggccacttcttttcccgaaagctttcacgacgatgtggaatccggcaaagccggcatgattggtcggcgcgacaaaattaaaagcgagggcgcaacgaaggcgagacgcactcaccgtgtcctctctcgccggcagcggcatggcgatcgacctcatcgcgtttcaacggaggtcatcacgatcatgatcacagcttctcgatccttcggcgacgcgaggataattgacctagctaggcttgggagcaacattccggtgatattatggcttcgggatacccttgttagggtgctaaattggatctggatgggggaagaattctccgccttttggggaaaag

SEQ ID NO: 48614 - DNA, 659 bp, Oryza sativa
  unsure (1)..(659): unsure at all n locations
agcttgaagatgaacagtatacgggacgcaattagactttcgtcttgggctgttttgttttacaaaggaaagaaagaaagagaaggggagctcggctgggccgacttgggctgcacagcacgcgcgcgaagagaaagatgttgggctgaaatcagcccaacggcttaagagaagatttaacaactttccaattaaaataatcactgaaatgatctttgaattgttaaaaatacttccaatgctcaaatagtttcaagaaaaatcctgaaaatacttggacactcaaagtacttaaaaaaattataagcagaccatttaatgattaatttaatatgtgaataattactgaaatgttctttgtatggttaaaattaagagttgagcttcgaaaaatccgaaaaaattccagagaatataattaaccatggagaatttaatagaaattaaatccagccatgctttttatttagaaaattttatttcccacatttaacttctcttgtaaattaatgaacatttaatataacttctaataataatttattaaataatttataaatcctgaaacgaaaatcacgatgtgacaggangggagtgagaatgacatgttgggcccacgcggaccccttcatttaaattatntttggttgaactgacat

SEQ ID NO: 48615 - DNA, 447 bp, Oryza sativa
tgcccaagtggagggcggccaccttctcgtcgaggtgcttgttaagaactgtacaccttcttctcgtacttgccagtgctcttctccttccacagctcaagctgagcaatgacctgcaacaagcacagaattgattcaatcatgtaacttacagctatactcagcatgtttagtgagacaatagatactggtcatcatattttacctggttagtgaatgagcaggacatgacaaaactggggtggccagtagcgcacccaaggttcatgagacgaccctcagcaaggacaatgatgccagtgttggtctcacggaagacccagcggtcggtctgaggcttgatggtgatgcgctcgacaccagggtatgtctcaaggccgagcatgtcaatctcattggtcaaagtgacaattgttgcaacgatggcattggtcttcaatcttctca

SEQ ID NO: 48616 - DNA, 593 bp, Oryza sativa
tacagtagacctgaacgcatgccatcttagcgatctcctcctcaaagaagtcatgatttttttttttgactaaatttcctgtgggagagcttccccacctgaattttgtcattacaagaaaggagtgaaaaggttcattacatcaagtttagagatcttaagggggaggtgaaaatgtttttccaaacacaaattacatgtctatcctctatttttaaattttctgcccagagggctgcttcattgatgccatctttgtaggcagcatcgaatcgatggagtttgccccctgaagacaacatcatgccgatgattccaaatcgcccacatacagagcaagaagaagacatgatgatggagcttccggacattgggagaagggttaggctggtgtagtagccacccatcctgaattgtcggattcaccctaatcccgtcccaaaaactctgcccaaaaagacatgtaaaacacatatgatctgccgtttcatcccctttgtgacagacatcgcaaaccccattttgaactatcttttctttcacaattttggtttgtgacagacggccttgacaaaaaccaacaacaatttact

SEQ ID NO: 48617 - DNA, 253 bp, Oryza sativa
tctgtatcatgtgctgtaaggtatgctatgtatgaatgtatcttgtgaatggctggcacacaatataaatcactctatgttaaccaaatccgtaatgggagtgctgatcttcgtggttgaacttgtgttaactctcttataagaaacaaaaatattacgttggcattttggagggatctcagctcattatgcatctatgctcttttctgaccagattgctcatggagtgctgatgaatccagcttttccattc

SEQ ID NO: 48618 - DNA, 526 bp, Oryza sativa
agcttaatgctagatatgtgccatcctctaatagctcaatcattcactcgaatctgttttattattgtataacttgtgattgactcctcaatcacctttggcatggccatgcactttcataatctacaatgtcgaggggcccagagatatctctccataggaggggccaatcccatcttcattattcatatcttactacatgtttcatagcatacccgaaaactacttttataactacccaattacggagtagcgtttaccacgccctaagaaagctactacacatgttgggaaccatgataatctcaggtctaaggattccacacacacagcaaatgagatcactgatgacaccacacatatggctcttgtaatgtctcatgttgggtctatccaataacatgttcacaaaaatatgtgcacattattaatttgatatctctataccctgaaccatgagacatgatgatcaaattatacatgtgctgatcatttaatcatatttgtttacatatgatttttgatc

SEQ ID NO: 48619 - DNA, 524 bp, Oryza sativa
  unsure (1)..(524): unsure at all n locations
agcttcanaagctcgagatgttgttcctctccggaaacaatttcattggtgagattgtttctgacatctcagctctcaaattgcaggagcttgatttgtccatcaacaagctcaccggatcaataccagaagatattgtgaacttgaagaacttgaaaattctatacttgtactacaacaacctcgttggacaaatcccaagtggtgttggaatgctgccgaatcttaccgaccttcggctattcacgtgccatggagtgtttccggtgagcctcggggactgcgacaccatccacattatcaaggcatccaacaaccactttgttggggactttccacagaaaatatggtcgtgtgcgatgcttaccatagttatgattggaggaaacaacttcaccggtactctgccaagttagatatcatccaacatctcgtagatttagataggaaacaatatgttctctggtgcaattccaacatcttttgcaactgggactcataaatttttaacgaaaaaaatttgt

SEQ ID NO: 48620 - DNA, 346 bp, Oryza sativa
taagctatggcttatagtacaacattaaaattagaattttgggtcttacctcttgtcttggaatgaccctcgcaactgatggtggcgggctacaaataagaatatcctctggatatttctcagccaaatatgatactataaaactaatgaaaccatctacattactggagctactcccttcactgcttcctgatatattcgaaaatcctccaccataatagtttgttagagtaatggttggacccatgcctctaactctacccctatgatcctttccaaacacttctaacatagcctggtcaaaatcagcttcactgagttcttggccattcactcttttctcagc

SEQ ID NO: 48621 - DNA, 537 bp, Oryza sativa
  unsure (1)..(537): unsure at all n locations
atcttcacattgggaacgagatactggagatacctgagaaagaaacctcagttttttttttgataccttcgntctctctggtaaaaaaaaaaggtttgaagttcagtgacttctatgagctcgaccctgcttcagatcctgacgtttttctacaagaggaatggaggaattccacccaaatttcaactgttcaacacctgatttatctaaatttacccaaacatagattcgtctggccatgttaactttctgtgcgaatccttattcatgtttacacacaaaaaattatacaattcatttacgggacattgtattgcaagtatatcctagcagtatatagaagggtatgtttggtatttggtaaaaatctggaaagggctttttaaccatttgaagatcacaattgtttctatcgggagtaccctgtcgatctcgtcgtgtggtcatgggagcgctctttcagaatacgaagacgatgcacgtggaggcgggccgattcctttcccactcggcttctcccgcgtccccggcgccatg

SEQ ID NO: 48622 - DNA, 239 bp, Oryza sativa
taagcttgcccgccgtacaccgaacacgcactgatcagtgtttatttttttgctgtgcggagcggagactctcaaaagtttccgcttgattcgagagtaaagactcttggttgctcctctttacagccaagtcatttactatagcctccacattacgtcgcatttggctacccacagaaattccatgtgttccctcgaaagtatgacctgcattcttaaccccaaggcattgccgctta

SEQ ID NO: 48623 - DNA, 667 bp, Oryza sativa
agcttatgaaattgtgatgatttttttttctagaatctgattccttgtttttcctttcataatgatcgaagatgcagaagagaaagggctgattactcctggtgtcacaactctagtcgagccgacgagtggcaatctgggtttaggattggtgcttgttgctcttcgcaaaggttacaggttcgttgcagttatgccgggccagtattcgtttgataagcagatcttgctgaaatacatgggagctgaattgtttctatcaggtaaaaaaataagaagcaggaagttgtagcatcaatttgtttgcttccttgtttcatggagaaaaaaaaacaactctcttgctttcttcaacataatgtcagtgaaatgaaaaattcagtggaactgttctgtttaccttctttctttggtgtaaccatatggcagatccaacactcgggtttcaaggcttattccacaaggtcgaacagcttaagatagaattacccaatgtgcacgttcttaatcaattctcaaatccagcaattaggaggcccacatgagattgactggtactgtcttaagatgacttgacaacagggggtctaatttcagtgtaaaaaatatgatctctttccgtaagttttaaaaattaggcgtccccttaacctttttgttgcaactt

SEQ ID NO: 48624 - DNA, 484 bp, Oryza sativa
agcttcgcgcacccaagccctctcttcctcccacttggcaggcatcccacccttcagcctccacgcgacaacgccctctctctctctctctctctctctctctctatttctccccatctccccgatccacccgtctctctccaaaccctagccgagctagatctccacctccgccgccggcgccgccggctccggcgaggccccaccgccacagatccccccgcgatggcgttccgccgcctcctctccgccgcagtgcgccgtcgctccgccgccgcggcggcggcggcggggcccgggaatgcgcgcgaggcatccaccgcgggcgccgccgcggggcccggcgtcatcgcccccgaagcggcccctgtccgcccctcaggatggggtcgagcgcgtccgcgatgcctttcatgctatgggtcggtgggggggagcgccggacgggggttgattcttgacgtgatgctaattgccggggatg

SEQ ID NO: 48625 - DNA, 489 bp, Oryza sativa
  unsure (1)..(489): unsure at all n locations
cttcaccgataatttgcatctagcaacctgtcagcttggttatctcctcgagcatgtacttggcttcagctgcgtggtctaccggagcttcactcctcacagtgatcctctgcctcttctcattcatgtactcattctgagttacgctgacgcggaacaggtgaggaacccaagtagcttccttcagcttgagaaggtaactgtcatcaccctcctgaaacaattgagaccaacaatcttatgcacagcttagatagcaatcttaggcatgtagaaaactaaagcctagaatctgcacaaagttgaactgaagcctagaattcgcacaagcttgaactacagcctggaattccacaaagttaaactaaagcctagaatttacacgaaggtgaatcanagttactgtgggagtggcaaattaccttcttcctaatccgatcaagctcatctagacttgcaggcaacaatcctctctgcctgatcattgac

SEQ ID NO: 48626 - DNA, 476 bp, Oryza sativa
agcttgcaaatttctaattcatcttaatgtagctgtcaaaccttgtcttcttttgtgttgatgtaaggcccaagatatggtctatccttcaattgatacaatggagttctgtaatgaaaatcttctagcatgtggaaatgattgtgaatatggaggttcaactgtggtacaattgggggatattgaatctccaaaatcgtacctatctttctctggcagtgattcttgatgtacttttattattatttctgctgaatgttctagagactagagctgaacacagcattaacacattgtgtttgcagtatattactttcctttaaaaaccaaccctgctggcaacaccaattatcacagggttgaattttctttttctgctgtattcaggatacatctatcactgtcttcatatatactattatatatattgttagctccaatttgcaggttctggggatgggactattgggcttttt

SEQ ID NO: 48627 - DNA, 415 bp, Oryza sativa
  unsure (1)..(415): unsure at all n locations
gacactatgaaactcagcttgcatttcgcttagtgctcagagacgggtgtgatctttcgaagtcnggaggttggttatagttaacctgtgaaacgtgaacgacagagactcacgcacggacgcattgatgttcanaactgcgatgttgatttcattgtagcatttgagagaatgttggctgcttgggaacatgggaaaaaatggagggattctggaggatcgaaatccatttgacataatttctacatgcccctttaaaacgaagaaatgacctccacaaaatattttgaagattctatgggatagctaattgcataagtattcttaaggaaaattacaaagagacgtcatacctgaaaattttggcccaattcttcctaaaaccttacacaacattttattcttgagtaaacat

SEQ ID NO: 48628 - DNA, 695 bp, Oryza sativa
  unsure (1)..(695): unsure at all n locations
agcttgtttcaagaagcaaatagctgtcatactaagtagttggttcacttanctantctctgtcgcattggttctggttcagtaagtgcccataatatatgttatgacactctgcaatctctttcaaacgaatatgcagaacaattattcttataatgcagagtatgattgggagattcaagatgccttatggacatggttggcacacatgcatttcatcaagttcttgtacctggagaacatttgggagattttgtacagagttttatcccatcgtgatataagcaaatgcttgctaccatgtactacctagaaggggtttctttagcctggaaactcacccccttttttttgattactcatgattctttcttggacaaaacatttttaccctttattaaaaatattatttgcatgttgggattgcctggatgccattgatactactgcaactttttttgatatattatttccttataaagctcactgataatcttagatgtttgcatagaataatttttatgttctctgatccttggaaaagggtccctctatttaaacagagacttagttttgtcctataattctggtggaaaattttcttttagtttttgtaacaacctcacaattttcttggagggtttattgcactttattctaaatctccccttttaataattttctccgaatttcac

SEQ ID NO: 48629 - DNA, 523 bp, Oryza sativa
agctttagtaccttcactgcgacatgatcttggatattaagctttcctttgttttctgagccaaatgatccagaacccaacaaattagtcggcgcgaaaccatctgttgcttttaccaactgcgaataagagaccaatgggtggcctttcatggaagttcttgaaggggctccctttttagttctcttgtgccaggttataagcaagtagagtgatgagaggatggccagtgctgcgaccagagaaacagaaataggtagaactgggaaatgttttctattctctagtaatggacaacatcgaggcagatgtagatcaggtattccaccacagagtttggcattgccttggattgagatcccggatgcatctgcgaaagcaccaatggttggcacttcccccataaagctgttgaaagaaaggttcaaggaatgaagcatagtaatatctgctaaggatgtgggtatctggcctgacaaattgttgcttgagagatcaagagtttcgagaccttttaactgac

SEQ ID NO: 48630 - DNA, 471 bp, Oryza sativa
tcaacctccaggcacggggttaaaataatagaaatgactatatgacatggagaaagtggtgaaatgactgagtactgtggttacattaaagaaataatagaaatcagctttgatggcaccaaacctctcacacttgtgctcttcaattgccattggtttgacccaagccaagtctggtactcgccaagatatggccttgtcgaagttgctcatgcatcaatccttctcaagtttgagccatttgttatagctcatcaagcgacacaagtgtattacatgccatacccatgcaaatctgtgcaagatctcactaattggtgggttgtatataacgtgcagcccattggtagattagaagtacccactgatcacaatatgatttcgtcccaacactggatgtgccactattccaagaaatggtctgctcggcagttgtattgacctggctgacttgatataatctgagaggtg

SEQ ID NO: 48631 - DNA, 606 bp, Oryza sativa
agcttgctgcggtagaactagaagccctcacaaactactcaatcataaatttatgtgggctgcatgtgagattttaactcaagatctctcacttcaacttcacgcgcgataccatcttacctaacacatacatttgacttggataaagtctttttaaaataaaccctggaggtatctttagtccaggttagtattaccaacccagattaaagatgcatcattagtcctggttagcgttatgaaccttgactgatgatgtttatagtactttggacttttacagcatgtactaaagcatttttaggtaccaattcttaaacctgctgagatatttgtgttttagatacctgatgaaagatagtttctctagcagtggtgtcttagtttctctagcagtggtgtctcctgtctttaacaaagaaatccgattggagcagtggagagttccacagattgagattgtgtttgcaggtaagtctctgattttcaatgcactgtagaacagcctaaattgcggtatatatccaaagataatgttttaaccacaactttatcaaatactggtccaaaagccataccgggagtttggcttttcttctcgacatt

SEQ ID NO: 48632 - DNA, 415 bp, Oryza sativa
  unsure (1)..(415): unsure at all n locations
ggacacttaaatctcagcttggatgacatctttctgattaacaaatattttagtgaccttagatcagntgattcttcttatgacacaaagaaggttctcgtcactttatgaatggtcttgacatgtctatttgggagatgaaagttacatcaattcaggagtctgttgatatgtgtactatgactttggattctctttacacaaaactcaaaacacatgagatgaatattctntctcgtanagctgattctaaatctantgctttggtttctttctcgactactttgaatggtggtgcttcttcatctaattctactcttattgctntaattaatgccatctccgatgagcaacttgaacatttctaggaggaggactttgctatcgtttctaccaacgttgcttgagctattaa

SEQ ID NO: 48633 - DNA, 393 bp, Oryza sativa
agcttgtgaatgcccaaacaaaggatttggatattgatggttagttttctatttagaacttgtattatactatttataatctgagctagttcaactcttttacaacatatgagaagctctagatgtacaaaaggaataagcctcatttctggtattgcaatgctctgctttctgaaataaaacgatagcctaaaaatagactgtacacactactgctagataaatgaagaaaattagataaatctgctccgttgccgccgttggcctcgtgagatcgaggcccgtttcgtccattccgcgcgccccgccgtccgccgcttgccgccgctgtccgccgtcgtcttcacccatgccggtcgaatccctggtgaggactcccttccccctcttttg

SEQ ID NO: 48634 - DNA, 209 bp, Oryza sativa
ggaccatagatactcagcttaggttctactacttgcgatccagtcttgtttctttttgaactgtgaattaaccttgtctctttggttggggcggttagagaaaaatatcatatcttgaagaatgcttgcccccattgatttgtctatatcgtcctgtcgtctctacttagatgcgcccattcagattgcgttggtttgctgcccctgct

SEQ ID NO: 48635 - DNA, 642 bp, Oryza sativa
agcttatttgagccatagcactaatggcggcagttaactaaaacaccctctttattttgttaaaagactaacttataaaacttgtagtctttataaacaccgccagcctcctgcaatagtttcggtgctgtgtgtctttggaaagtaaatatcccactggttggactttggctatggattaagcttactttggttcaaccaaaaaacaattcctaccaagaggtagaaagaaatatttgaactataacacattgaatatattgttgacaaaaaaaatcaatatattgcttagttccaatgatagtcatgttgggttacatgctagttccaatgatagtcatgttgggttacatgccaagaataaagctaataaacttctagaaagtcaacatgaaacttttctttgcaacctgctcaacaagacttggtatgataacaaacaacacaatgcacacatattcctattaaaatgtgagtatcattaacagaactccaaagaagtaccttcccactttcgcttgcaccataggtcaactgggtagtttgcccatcagagaaccccactgtatgcaactcatcatcccgcacatacgcaatcatgctcccattctgagacaaatgtgggtcaatgatgggggatgt

SEQ ID NO: 48636 - DNA, 339 bp, Oryza sativa
  unsure (1)..(339): unsure at all n locations
tgcactgctccaggacgtgctgcaaggcctnctgcatgctggtcttcctgtcctccttggtggtccacagctctgacaccacgtagctgccgctggcattgtactcgttgatctccagcagcgcccgggtcacggccttgtagacctcgtcaccgagctggttcttcaagcccactagcttctcatcatcttcattgatgatttgctacagaaaagaaaacggatatcgttgtcatgttaatgatggaagtgtagatcatatatctgtctggagatccaatgcgaaaaactgtgccagaagaattcattctgttgagcatacctcagtctttcctcctc

SEQ ID NO: 48637 - DNA, 540 bp, Oryza sativa
  unsure (1)..(540): unsure at all n locations
agcttgtattaattctttctttacagagccgacatctagaggttcanntgctttgtttctaacatggcaatgtggcagctctgcacagtcgaaactgtagtgttcaaagaaggcaccaaaaggttaggattttttttttcttttttgaaacattggatttttcaatataaattttcttggaatcagtccattgtggattggtgttttgagtagtaattgagattttatagctttcttcaaatataacttcattggaaatgttttatgttagtcatatactgtttagcaaaatgtgacaggaactatacaaatcttattcgttggctaataattttaactggggcatgcattaatagcaggtagtgaagtattatcggttgaatattacatcttaacttgaatattacaccttttcctacaatgatatatgtattgcagctgtactattttcaacaagaaaaaatgacatattgtgactagtgcaagaccaaaaagaaaacggatgccttgccttaccaaaatctttgggaattatgaaac

SEQ ID NO: 48638 - DNA, 248 bp, Oryza sativa
actaagcttatctggagtgagatctatgagacagtgtgtgagccaaagatgtgttgcatctatgctccttatatcatgaagatgaatgagggccagactgagaattggtatttcaaggacaatcaacacaagcctttccatcctcatgctcccactacttcagctactcctaccaccagaatgactcgtgcttccacctcaactggttcttcttactctgctgcacctcaacgttctgagtcttcttc

SEQ ID NO: 48639 - DNA, 571 bp, Oryza sativa
agcttaggataaaatttgataaacacttaaacaaactgctaattatttagcattctttctatttaatatggatattattattattgcttatgaaaacatgcttatggaactatttagggctatatgctaagaattgttgacaccgcttgtgagcgggtggtacacatgatagagttcatgtgtttggttttatcgacttgtttatggtcgtaatggatatatggatatatttatggttatttcttatttaaaattgatataataattgtcacgcctggaatttctatccaaaactccaaacgcttacatatgtgtaaacccttgtccgggaattaagccgggcatacaataacaaattgataataaaatgcaattattaatctaattaataggcgaatataaagtcttacagaggtagatagtttctctcaaacaataaagatctaagtagcgggaaaataaaatagatagcgtaggcgactccatcccacaagcagcttgaacaggactacgcctaatcctccacacctttcagcattactgtagaacttctcctctgattaatgattgc

SEQ ID NO: 48640 - DNA, 250 bp, Oryza sativa
accatcaaactcagctctctctccgtgagctgatccatggtgtattgcttttttttctctcttgcaccattgacacaggcaaaaccccctgtgtcctgaaagaaaacatgcacaactgtatttatttctcagcatgtgctctgctcctgtttttcggccggagaaatgtctgacctttggagagacgctcatagtttggagactgccatttgcactggtttttccaatctggagatagtggtatgctgct

SEQ ID NO: 48641 - DNA, 569 bp, Oryza sativa
agcttccagttcctttagcttccaggaaagtctggccttgaacaaacttggctgattctgagattccaggacttccatgagatgagcattcaagctcattattggtagctccactagcctttttggtacagttgatggcattttctgtttctggtatgccagcatgagcaacattcatgtctgcaagaaaaataactggtacacgaagagtacgtttccctgaaggatgtcttggaatgttcttgacaagttctggaaaagcatacaaattagtaaaacaatgcaggccagtagagtaagttattatccaatagaaatgttctcttgcattcaactagctcttgcttctttctttggtaatttcattttgaggaggccaagagaagattaagggataaataaatatatatatatatttgctttacaatacttacctccatagtatcttttcttgaaagaagataatccagaagttcttctttcatgataggagcggtgagcatgaggtgctttcttctctttcttgcctgtagcttcacgtttccgtacctttccaaatgctctaactg

SEQ ID NO: 48642 - DNA, 360 bp, Oryza sativa
  unsure (1)..(360): unsure at all n locations
tgagcatacacgttgtcacgtaactacacaggcgcagctgtgattgttacaacaggtagagtagtacggctactgctnttttcttgttgtgccataacaacagtgatgaaaaagaatcatgtctctcctcgaattgaggagagtggaagagattgttctagcctctgtacacgccggagggatcagcgttttgaactatccaagggtgctcgaggagcttgtggaggggcanacgatgcgccgaattcttcacgagcttctgccgatcaaattgctttctagaggttcacactctggtggatgttctacttgtgtgcaagagacgatttacttggcacagttttacacgtatgtccgtca

SEQ ID NO: 48643 - DNA, 524 bp, Oryza sativa
agcttcggcccctccccccctccccaccgacctccctcactccttcttcgacgatctagatccatatctagctcagctctcactggtcatggatttttttttcgtgctcctctatgtgatctccctctttgtgatgaaattgggatttattaatgaattgagagtttaatttgtgaatggggtatgagttttgcgaatgaatatgttggatggattatatgatgtttgtgatgaatttggcaagggatttttgttttgggggcgaacaattttggatctactgaattttttttgtgccaaaaatatttttttttcatggcgggtagattaaatgtcctgcctaagaaagatgatttttactggttgggctctttaagtatttgacagtggatatatattttcgcacgcgattaattcatgcctgtgaaaatactctatctatttttattggcattttggttgttggcggttggtcccggtgtcagccaaaatattattatggccccaatgaaaagcctttttta

SEQ ID NO: 48644 - DNA, 383 bp, Oryza sativa
  unsure (1)..(383): unsure at all n locations
ngagaacaacatcttcagcatttcccaagcctatgagaatatcagactcctgagacttcaaaaccatcttaagatcttccaaagcaaaaagtagcagttccagcatcgtgtctgagtaacctgcaaaggataaaaaggctaatgtcaatgccaactgtcagtgtgattacttgggaatcttgcactgcataatacagattacagtattactttgcacgctgttacttgtatatgaatgttaacatcagattctgatacccactttcacagcatgacttgataaaacacacccttgatctcgtgcattccaatcaaaaccttcatgatctggcacataccagatagtggaggtgcatgtctcctcaagaagttggactgaaagc

SEQ ID NO: 48645 - DNA, 528 bp, Oryza sativa
  unsure (1)..(528): unsure at all n locations
gcttgacagactcttcaggatgtatacaaaaaaaaatacgcccnattatattacttttaggggaaaaaggaaggggggggggagaaaaaaagaggggggaaaaaacccccaacaagaaagaattattaaaaaaaaaagaaggagacaaaaatccgagaaaaaaaaaaagggaggggacaaaagggaagagagaaaaaagacgggaaaaaaaaaaggggaaaaaaaaaggagaggaaaaaaaagggcgagggaaaaccgagagaaaaaaaaaagcgcgcaaaaaagacaggaaaaaaaaaagcgcagagagaagacacgaagaaaaaaaagacggggaaaaaaatcgggcgaaaaaaaaaagtagggaaaaaagaaaggaggaaaaaaagaggggagaaaaaaaacaaagagaaaaaaacaagggggaaaaaaaaaaggggggagaaaaaaacaaaggcgagaaaaaaaaacgggggcagaaaaaaaaagggaaaaagaacaataagggggaaaaaaaaaagggaggaa

SEQ ID NO: 48646 - DNA, 535 bp, Oryza sativa
agcttcctagacggcagggtgccacctcaatatcacgataattacctccaatttcaccccactgcccaatcttggcaatcctcacctgagcatatggtaatgaaaaattaatgtactactacgtcgtaagacaaatgggacagctagcaatgccaccacacactttttagtggcagtactacttaaaaattaacactaaaaagtgtggtataaattaatctatatttttcttcagaagaagttaatgtatattgcgaagcattatcattgtcatggtggaatcctggtgcaggactatccaccaaaatttaaatcatggtccacataattaaatatggttgtgtacttgtgtgcagctagccctagttgttatatataattgctttcttttttttttacctagttgttaaataaagagaacgaaaattatcgcttcactatccaaaatagaaaaaaaacatacatgggggagataatttatactccttcggtctctaaatatttgatgccattgactttttcaaacatgtttgac

SEQ ID NO: 48647 - DNA, 376 bp, Oryza sativa
  unsure (1)..(376): unsure at all n locations
ggctagaggtggcagcaacatgacctaaaaccagtgatattataaggtttaatgtatggccatggatgattaagcttccaagaaccaaagagaaatatccaactgtcaccactaggccctctaatctactaccatccnccacaagccaaaatgccaaatcagaatcagatcacatcaaaatcacaatcactgctgctaacccaagagcctccacatatatagggggcacagccatccatcattccatcagcacaaggagtggagagaaaaaaatcacatttcagaatagaaacagtgggggaggggaagtacacctcacacaccttccattcttagaaggtgaataggggaatcatatgataatccattagctctg

SEQ ID NO: 48648 - DNA, 514 bp, Oryza sativa
agcttgctgatgcatatggcgttttgctcacatgcataatgcatagattcatcttacgacggcgcctttcttgtagaattaagcaaagctatgcacatggtcgacatacatgtggatcgtcaacatcaagtcgcattccataaccaagaccgtcgtctctcgctgggttaatcatcttaattacagatctttttttaatctgttcaatgtggtggtaagatgttgacaaattattagcatgggtcggttagcacaaaggcctttcctctctcttctctctctctctctcagatttcaacacctttccacatcgaattaagaaagataatgtaaagtaagcagcgtgtggcaaatgaagtacgtgtgtttcatacatggagatagctagcaatcgatccccatgtttggtttgtcgttttagtaccatgcaacgtgcgccctcgggtgttgggaacgtcaaaccagtacatatttgccttcgatgggaaagggggagacaaggtgttaacatagc

SEQ ID NO: 48649 - DNA, 373 bp, Oryza sativa
  unsure (1)..(373): unsure at all n locations
tctataatgtggaaataattaacatattatgcattccttattatttacaaatatttataatatagacaagaagccatgtaactggtgggcgatgcatgggttgacngctantacatataaggtaaattttgctctatgacacctcgatttcatggttttagctctgttgttattccttacattcatagataaatccacaagcgcacggataccgctataacattttacccatgaatatatccaagggtatcatattcatatattcgcagagaaggtgacggcataaagatatgtttattatatctccttaattaacttataaataattcaccatagttcatacatgagttaggatcaatattaatatgtagtg

SEQ ID NO: 48650 - DNA, 540 bp, Oryza sativa
agcttgagctatgtctctgctcacataatagctatatagcctctgctttttttttatctttgagctcaagctctaatggaaaaccaggtttgtctctagcagaatttgtatttcttttctcaatttctctttatgttggttcctctttcttttgtctgaaattgtacctcacggcacacctgtgatcaaagatgtatttcaaagatgatagttttctttacgcaaaagatagaaaatctaccttatatccattggattaattaattgtgagtcacattgtagcatagccaaatggcaagaaaaacaacagagaactatctaaaggacagaatttcttatattccactaaaatttcatgtagatttaacacttggtgtactatttcatgtagcagttaatctataagaaatgacccctaaactaaattaaatataagatatcagtaaattttggagcaatctaaaaaagatgggcccccctaaactaaaattttcattcttcctcgggcccaccgggtaccaaaggaatttttttgcagtt

SEQ ID NO: 48651 - DNA, 384 bp, Oryza sativa
tgtatattgtgaataaagaaatatccaaagtatttggcatactctctgcgcacactgctttaacagatgtgcttaagtccctagaagacacatggtttcaccacacctggaaatataccgcatatgtggtgtaaaatccgagtaaataaactcataaaggatttaccaaccgcctagaaaatgaccacaatatataatcagcctaagccataatattggccaataaaaatgcacacttacgtggcgaaaagcaacgatattgtattcaatcaattgcttaataacccaaacagcaccatgactatattaaaaagtcagcggggcagctatataaagctttactgtttgacacctcttaagatgcattgtaccaactcctaaaaa

SEQ ID NO: 48652 - DNA, 645 bp, Oryza sativa
agcttagaacacgggaggtgttagccttgcgagtgcttgagaacaagtgtgttgaagacttgcaagctgaagctcgctagtaccaggcactggatctcccactcgttccaaagttgcagggcacgtgccagtgagctgatcaaagggccaaagatctacattagtttctttgtttagaaactgtacaactgcattaatagaaattccaaatattttcgtgcaattttttttgtctctctaagtatctttatgtccattgaagtatggatcagtctttttatgttccaatctattcaagcagttgttgacaactccaaaaatattctagggcataaggtgtgacacctacccatcatactccctccgtctcaaattatagagcgccttttttttaagaaaaatcaaactcggtagcttttgactaataatcatactagctatatgtatacttagtattatgcatgttatatcactagattcatattttgaagtactttcatatgatgctataatttcatatttgttgggatcatagaatgaaataaaatactagtcaaagtatggtatttgaagaccgtgtaaaaaaatataatccttataatttgggacaaaggggagtacacttgttaatttaagtagaatttg

SEQ ID NO: 48653 - DNA, 232 bp, Oryza sativa
gacacacgaatactcaagctgtcattgaaaacagaactgtaactctgttaatttgtttaatgtatatgcccgattatgcaagtctgatggaatctgactgtgccctgtatagcttacctgtctactgatgttctggattcgataatctccgtgtagcgttgagacttcatgattacgccatggtctattgacccacgatttgaacgttgaaatgctaattctaatgattgat

SEQ ID NO: 48654 - DNA, 703 bp, Oryza sativa
agcttcattgtgaacttttacattgcgaagatcgacccatcgacaactatattacgggactttgaacttcaagtaatctagctccaatatttgctcaactctaccatagtattgataacgacgaccaccgtcactagcagcctcgatgcgtgacccactgttctgcactgtgcatttgctgtcttgcttgaccgtgtgaaaggtgtatccatttatgtcatatccttgccaggtgggggcactccattcaggaccctgtgacaaccactgaagagtttcactaggcaagttctgcaacctggcaattcggttcttcagccactcgttgaaagaagacatgtgcttattcctgacccaactctctgatcggactgggttctcttgtcggataccgcaaggtgttcgtcaacgtacggcaccacctcagtcatatgctggagtaccgtgaaatgagctttatcgtataccctacgatccaaccctaatagttttttttcaacagtaccaacaaccgtcaaggctcccttcgtgatgagatcgtgggaatccaattgaagatgtttctgacattgtagccacataaaattcgatggcctctttggtgggggaactctcgaagaatcttccccttggggggtgaacggggtccgtacataaacccttaagggatccctcaggtccctttcggaaagatacattttgg

SEQ ID NO: 48655 - DNA, 539 bp, Oryza sativa
agcttggtctaaaattcccgaaaaattagccttttatgattatattggtaattattttttaaggggggattattcagagcaggctcaatggacaatggggatggaatagctgttggatggttaggacatcctatctttaaagataaagaagggcgcgaactttttgtacgccgtatgcctactttttttgaaacatttccggttgttttggtagatgaaaagggaattgtgagagcggacgttccttttagaagagcagaatccaaatatagtgttgaacaagtaggcgtaacggtggagttctatggtggcgaacttaatggagtaagttattctgatcctgctactgtaaaaaaatatgcgaggcgttcccaattaggggaaatttttgaattagatcgggctactttgaaatcagatggtgtttttcgcagcagtccaaggggtttggtcacttttggtcatgctacctttgctttgctcttttttttcggacacatttggcatggggctagaaccttgttcccagatgtttttgc

SEQ ID NO: 48656 - DNA, 386 bp, Oryza sativa
  unsure (1)..(386): unsure at all n locations
ttctgataaactgagattntcggctaacccatcactaactcttctatatatttcttgctgaaagtatccctgatcccactgataacgagtaggcccaaacaattcaattggggtagttgctgacccataccacatagttccggcaactacgaaagctgcaaaaaaaacagcagcgatactactggaaagtacagtttcaatattgcccatacgtaatcctttgtataagacgtgaggtggacggacactaagatggaataggcccgctaatatgcccaatgtacccgcagcaatatgatgagaagctattccctccggaacaaaaggatcaaaaccttctgcaccccacgccggatttacagcttgtactttttcagttagtccat

SEQ ID NO: 48657 - DNA, 525 bp, Oryza sativa
agcttgctttgtagctcgccaactgattcttcttgtttgcattgagcgtcgttggttcttattagttgtcccaaaacagaggctggggagtagtcctgagaaacacagatccatgcatgtttgtcgaagctttgttttaatttctcatcattgaatactttctgagcaagtgttgtctttccgattccccctgttccaataatagcaagcttgtaagtcttcttttccttgtgtgtaagaacctggctcaccaattttctagaagcatgtaatatctctttccccacaaggttggattcagcaatttgagaactttttctcaattctgatgttgaatctttatgagatgactgtgtattctcaagtgttacaaatattttatcctttgctatttcttctaggtttctgttcaggcttctaattttattaccaatctcatggtgaaccccaatgttggaaaaacaagagagaagtgaagcccattacatgccattgtttttctcggtgaacaagaatggccattta

SEQ ID NO: 48658 - DNA, 333 bp, Oryza sativa
  unsure (1)..(333): unsure at all n locations
atatncaatgataaacaattagaagggagatttgaccatcgtgcctgggtttgtgtcttcaaggagtattctatgggttcccttttggcaccaagtcttaataatatgaaaattcattattaaaaaaatgaatcagttgggaaccttcaaagcatactcaaagcacgcattgcagacaagaagtttttccttgtgttggatgatgtatggcactattaagcattgggaagattactaagaacctcactaaatgcggcagccacaggaataattctagtaactactcgagatgaaactatcgctcgtgtaattgggtggaccgactcatagagt

SEQ ID NO: 48659 - DNA, 687 bp, Oryza sativa
agctttgacaaactgagctactgcggctttcattccaggccaatagaagagttgtttttgtcgttgatatgttgccctttccccagaatggcctcccatggcagaatcatgaaaggaaaccagtaattgagttcttaaattggtacctgccccaattacaaggcgatctttgtacctgagaatgccagccttcagagtatatggggattgaagttgaggtgctatgtgtaagtggctctccaattcttggcatttaggatcatgactgtaactagcaatcacctcggtgatccattgaggcacaataactatagtagtaagagcattactctgctgaattctggatagtgcatcaacaactttgttttccttgcctttcttatattcaatcttataatcatagctcaaccagttgattaacaatttgtgctgaacaccttctggtatcctttggtcattaatatatttcaagcttgcttggtcagttttgaatatgagagaagtacccaaaaagtagtggttccatttcttaagagcctccaatattaccaaaagccttttgtcataagtggataaagcagtagcttttggtcctatggctttactgagataagcaagggggtcgtcattttgcattaaaacaagctcgatcccatggccacttgcatcaagcttcaacacaaaggg

SEQ ID NO: 48660 - DNA, 307 bp, Oryza sativa
  unsure (1)..(307): unsure at all n locations
tgatgcaatcacaacaatcactanagtttgattgttactagtaagagntaaaggaaatngattcttaagatcaagagtgatatactagtttgatcactctttcatgttcaggtctattttccaaagaaacagtctactgtggcaaaagttatgagcacaatgtatgatcaaattacaataacttagccaaccagaggggggtgaatggttggtatacccgaaaaccgaaaaactttatcggaaataaaagttatcctcgaattctatggatcgcggtctgaccgaagttgtcctgccggtctgaccg

SEQ ID NO: 48661 - DNA, 660 bp, Oryza sativa
agcttttattgtcaaaacatatatttttctttcatcagaatataatcatgtgttattttgttgtaaagatttaattataatgaattcaacggtgtgatcgaatcgttcatcggataagtagtttagaaggaaaaatattttaatatcactaaatacttgcatcatgattcatgcatggtgtgggagaaagccaatagatggcgagagagagagagtagggacatgagttatatattggtgaaacaaaaaatcaattgttgaaacattgagttatatatagtgaaaaaaaatcagttgttgaaatatttaaattttttttatgaaacataacaaaaacacacgttgaaacatattgctaccgcatctgaaacattaaatttaacggattgaaacatatgtttttttttcatcggaatgtaatgatgtgataccttgttataaagatttaattataacaaatataatggtgtgatcatatcgtaaattggataagtagttcatgagaaaaattattttgaagaccattaccacatgtatgttttttgtggagtgaatagggaggtactaatttatcccgccggtttttattggttgccgtcaacatatgatcctaagcattttcggaggtctgaccgttttgctgccggggttcggaactgt

SEQ ID NO: 48662 - DNA, 296 bp, Oryza sativa
tagcactaatgccaccatgagcttcagtcacccagctgttgtgtttttatctctgaaaaaaaatggagcgaaattggatcaattccaaaaagaaatacaccatatatgttctttcctgtcaaccaaatatcaaattgaacaaatgtggagtacagattacataagagcaaacaagtaaagcaaagagccacactaatatccaaactaacgctgatgcactacatggaatggctacagtctgattgaaccaaagatgagaagagacctataagttcaggaactatgaagctaacaaa

SEQ ID NO: 48663 - DNA, 497 bp, Oryza sativa
agctttccgtagatactgtttctcactaggaaatcctatctgccctttgcctttattttttttgtgtccttggatgaacttgaagaggagcttaacacacacattacctgaggaaatcgataccatggaatactcccaagggaagtgctacatcaatattgtcaggggtaccgataaaaaataccctctattcttggatatacgttgtataccgataccggatacctacgcctatacggatggttcctgtatgcattaaggaaatttatcacgaagtaaaaacggagtccacaaacagaagggaacctacttggacaggactgggtcgttactatatcgtgaggggtctgatatctccgagtcctacttggagatcaactgacccgcgatataaaagggacccccccggaggacctaaggcatcgaatctcataaccaagataaccgccacagcttacaaagttcgagcctacaagagccaagtcgccgggtgatct

SEQ ID NO: 48664 - DNA, 416 bp, Oryza sativa
gaccttaaatctaagcttatatctcctgtggttgccgctgtgccaccgcttggcctatctctcatatgctccacgctcctccccttgtgtcgttatctttgccccatctactattgtgcacttgggtcttggtcaaacagctcaacatggaaataatcgacctaagcctagcctattatgcacactggtcctctcccctacaatcaggttggtaccacacttgcataagcagaatgccacctagcttgcacacaatttcttgccttgcagcctcaacatggctcttatccctggtgagcgcgcagatattgctaataaggcgatcacaactgtcatactagccagttgcttgacaaatgattgacttcctatactttgaccatttgtgcatgtactctgctcttctgttggaaaac

SEQ ID NO: 48665 - DNA, 616 bp, Oryza sativa
  unsure (1)..(616): unsure at all n locations
agcttgaggaacagggaacgctttcatgaggtcgagcaagaaattaatttnctgcttatgaaggcaaaaccgaaacaggagtggcgtgttaaaggtcaatcttttggggccgatgatgtcgtagccgatgatgcatagatgttggcaaaagggaaaagtgtggttacagcatcaattaacatggtttttaccttgccagtcgaatttgggatcgatcaggctgatgtcgatgaagtggaagaggaatcggctaagttggttctatcgtcaaaacaggcagtctttgagaaacctaaagggacagagaatcggcaccttaaaccattgtatataaatggttatgtcaatgggaagccaatgtctaagataatggtcgatggtggggctgcgggaaatttgatgccttatactatgtttaggaagttgggtagaaataccgaggatcttatcaagactaacatggtgcttaacgacttttggtggctatttattagaaacaaagggtgttttaactttggaaatgaccatcggcagttaaactttttccttccacattttttggtcatttatggggaaaggttcttacccctttgttgcttgaaaggatttggattca

SEQ ID NO: 48666 - DNA, 195 bp, Oryza sativa
cttgactcaccaagtctttaactcgggttatgtgtatatttgcttgagcagctccaggagatgggagtgagtgatagatcgactcgattggatcatcctcctgctatcaacatccacctccacgattcttctctacggttcccttgaacaaagcattcagcattaacgcgggctgcgacagggagatccactctc

SEQ ID NO: 48667 - DNA, 257 bp, Oryza sativa
agcttgcatgttgttaccattatagtgttgttaacaagtcgacatcaagtattcagcagagtgaataaaaaaaaccaaaatctacatcaatactactactccactcaactacagtaggcatcctaactcctaaggctgtgtttagttggggaaaaagaaatttttgggtgtcacatcagacgtttgaccggatgtcggaaggggttttcggacacgaatgaaaaaactaatttcagaactcgcctggaaaccgcgag

SEQ ID NO: 48668 - DNA, 360 bp, Oryza sativa
  unsure (1)..(360): unsure at all n locations
atagttggcttataacctactagtatacttgctcttattactactactacacctatgcattctgcagccgtgtgtatacgtgtacagactcnaatctggagagcacatctgttcagacttcagagttcagacactgatcaagtggatcatccactacaatccatgcatnccagcatcatcgatcaattcatcatcaccaccgatcattcaaagggagagaccgatcgagtactctctgtactcgtaccacgttactactacgtcagatcagcttcagctagctatatctgctgcagtcactgccactgacggtcgctagctccagcagcctacctacctttacctatggctactctatct

SEQ ID NO: 48669 - DNA, 595 bp, Oryza sativa
agcttgattcaaccacattctcatgattcaggccacatagatccaccctttttttttgctacaaagataaagaacaatcagaaggggaagaatctgagtttatatcatcttctagagtattgaaatcagattcaataattttgctaccaaggataaggattttaatatacctgccaactccttcagttttttagctgactttccccttggttttcctattcccatttgctgatcaaatttgagctcttggttggcattaagaagcctagagctttgtcttctagcaagattatacagaacagtcttcccatccctttttttgacaggagccataagaatctgaagcactgctggggtgacttctggacttgatggctgggcttgcaaaggtacaacatccaaaatctcctgatcagaaagcccatcatcagaggggggaggcaataaagcccaactggaatattgtcgcgaccgagaaaatttgcattttcccgaacgctagtgtattaatccccgtccaagaaaacccggggttcaccccacaaacatgatttaaaagaacatctttttatatcgagtatatttaccctattat

SEQ ID NO: 48670 - DNA, 316 bp, Oryza sativa
  unsure (1)..(316): unsure at all n locations
tgaaccattgctcgtcccgagtgaaggacgaaatatatanttacttggntgcngatcaggagttgctactatgctacatatctcaaagatacacgtgcaagatatatgtactctctcttaggttaaataatgtttggcatggtggcttacccttacccctgattcccactagacactgcttctccttgccttgggcggttgaaagacagaacagccattatagcaccaatcacccgatctttattcaactcttgttcccgaagttttcaaatgatcttggaaagaaaaccaagtaacttaagtgaatcactcagtc

SEQ ID NO: 48671 - DNA, 662 bp, Oryza sativa
agcttctattatctaaaaaaatgatactcatcgcatgctaaattggcattggtttatattccgcaacattttcagagaaaatatcttgtcgagtttcaatttttcgtttgcttgaatggcattttagtaaatgcagtggtacagcaaagaagagactttaaacattcactgaccagttgcgctttgggcatcaaacagaagttgacagagtgcttaagtttccagtactgaactaaacagttaaaagttgcgctaacatagtagattgaccactacgtctttctacctttttttttgtgtggaattcatggggttgtgagggttgttaggttatgtaccacatcagcatacagggttaatactgctagttttcagctctatgaacaagaatttgtttactttaaatttgtttgaggttcaagtatccaataggctaacagttaatgtcttgtctgtgaatgttggcaggattattgtggccatggtaatagcctttgagagcctcatctcatggttagtttcagtctcctctgatttattttttttaaaaaaacttcctgtgttatagatttcttgcttatgcttggggactattatatgcattccaggatgcccatgtttgggaaaaattaagcctaccttttttggtttacctggggttt

SEQ ID NO: 48672 - DNA, 558 bp, Oryza sativa
agcttgtagattgaagtaggggaaaattagaagaggggaacaaaggattaccttttgcttgggcaaacatggcatcggagttggtcctcgggagaattcaggcgatctgccgcctctccggccatcgccagctgcagctgttccatggggaggggctccgtcgtctttctccggcgagctatcaatccttctgcagcagcgcgtgtgggcaagtcgacacgacgatcaaggttcgacctctatccaaaatttgcctttttttttttctacatcgaagttgaatgtttgtggtttggttattccgtttaaataaaaggtttgtgcttagacaagtagatgtgttgttgttcagcttttcatgtacagtgtcaaataaattccaagattgtggtaaactaataatcataatcatcataaaactaaacttgaggtaaatatatatctacaagtttactgaccttctgtttgcacataccctgtgatttaagacgtacttatgtagtatatgatatccccaccatgtatctattggttaaggctggagttcctctgtttttg

SEQ ID NO: 48673 - DNA, 436 bp, Oryza sativa
  unsure (1)..(436): unsure at all n locations
actaagcttttctgaaacccattgcatcctacggcttgccttattggacgctaacgatttcccaagtaccattagacataatcgagtcatttcactgcgtactgcttccttcagtagtcagcgttaggagatgaatatgcctcttctatggctcttggggtgtcatccacgangtatacaatgtagtcatctccaaaggaatttacaacccttcgtctcttactcttgcgagtatctacaatgttgtcctcctcaggattttcctcaagcgtctgatcattatgttctatcagtgtaaagtgctcatggggcatgacagcttctttactagaagtgcttngtgtatatatcatatgagattcattctcaaagaattgtgcatctctggactcatgacttgaccaacatgcatgtccggactccagagttactatta

SEQ ID NO: 48674 - DNA, 672 bp, Oryza sativa
  unsure (1)..(672): unsure at all n locations
agcttgacgttacggaccactgggtctagtaccagggggtaccgtccctgttggaccactcggncgggatgatccgagcggtcaaacttgattgcaatctctgaccatcgaaaatactggggcgtgtcgggctgaacagcgttgatctcccgttcagtcaacttctgcttccgtttggactcataagccagggggccgccaaagatatggttgagctccttgcggtggtcttgaaatcctgccggggtgtcgccgtcgtccttcttccttgacgtgctttgttcttcgtcggagttctttcgtgtagacttggtgtattgctccgcgaactgcttgtagacgaaacaatctttggccacctggttggagttaggataatgcgggcattgggagttcatgatcttgtcgaacgtgttgacgcgcggacgctgtctagatgagtgagtggcggttgcaacaagttcctcaggcttacgcttgcggtccttatgaattgtacttccaccttcttccgtaaccggcgtacccttgttgggctccaaccggaaccccactgttttgatgcgagacagcgtcttcagctttggttactttttgactttttcaaacattagcttgactgtcttggggggttaacgccaaacttgcccgccaaattttttgggcggaatc

SEQ ID NO: 48675 - DNA, 587 bp, Oryza sativa
agcttctcatgagaaatggtgagtctctcatgagaggtctttagcttcttattctatacctccaaagaagcatgatccttctttagggccttgaacttgacaatctcctttttactataagcatggagctcctcaaacatactcacaagctcatcataggaaacatcatcacaatcatcatcactcactatcactaaaagatgttgccttagaggagccctttgccatgagacaaagtggagcaaaaagtgatggagccttcttgatggcaacaacggtcatcttcttcttcttggagcttgcatcatcaccaccttcttcctcggacccgaatgaggcggagctcttctcatttgagtcccattccccgatgaaggcctcaatcttcttgccttccttcttgagcttcttcatgagcttgtagcctccactcttcttcttggatgacttgtcttcatcatcatccttggaagggcacttggaaacaaagtgtcccttctcaccacactcaaagcacctcaagttggagagagtcttgttgggccttctatttcttctcctattggagttagagcccattccttttt

SEQ ID NO: 48676 - DNA, 612 bp, Oryza sativa
  unsure (1)..(612): unsure at all n locations
agcttgaattggcagcgagagggcatggaggcggaagggaggattanttcctcttcctccttagtttgcaatgacgagggaaaacttggagctagtctcctagtcattttcatttcgttttttttctttgtatctcaattttaagatgttgagtgtatgcactcgtgtaacttttgcctgtgtatatccaattatggaatggatataaaggccggatttctatacattatttaaaaagttatcgaatatcaatctttcaataaaaaaagggaaatacaaatactcaaccaagaggttcaaaagaatcggcagaaaatagctaaggaatattcatcctaggccttacggctgtaactgcttaacacatccacaaaattttctgatggcattgtcgattccacacaaccccagaaaatgctcaattagccatctcacggtgatacccggtgttttaattcaatcaagacatctcccctacaaaaaggggggaggaaatagttcagctttggcaatgatttcacgccgacatttgctccagggtccggaaaattatagaatggcttcccaatattttacatatttaggttaacatacctttntttaccctttgca

SEQ ID NO: 48677 - DNA, 134 bp, Oryza sativa
taagcttcaataatcaagaatcataatggatatggagttctttgttctctctctactctctggtctagctctactgatggcaagtcattacttcgattcgtctcaattctgctcagagcacgctgctgcttcta

SEQ ID NO: 48678 - DNA, 642 bp, Oryza sativa
  unsure (1)..(642): unsure at all n locations
agcttaatcaaatttatataaaaatttagcaacatctacaataccatattattttnattttttatgctgatactgaatatatttttattgtatgtctgttttgtgttcaaattaaatctaatattgaatatattttgagtgtatgtttgttttctgttcaaaatgttgctatgcttttttaaaacttggtcaaatttaaaaaagtttgattagaaaaagagccacaacgtattatatataatatgaaacgacagagtatatgcttgtagtataaatcaactgtgtgtatacagccataaaacttggccagattttctcggtgctcttaagcatgaggcatgtcactatgtgtaatatgtcagtatgaaatgctttatagtatagttacatgggccaacgtatcttccgcattggcttagtgggccgccaaacgtttagctccttcatttcctattataaggtattttgagtctttccttagacaattttctgatcaaatttgggtagagaaaaattaacatctacaacacttggaatttgttttaccaaaaactaaccattaattatagtttaacaatattttcgccttggggtaaaaatatttctatatttttcttataaccttattaaaatttaaaaaaa

SEQ ID NO: 48679 - DNA, 367 bp, Oryza sativa
ctaagctgcggagcccactccctgtcaacagattcttcttactcaggagatcaaacttgtcgctctcctctcgcagctttcaacatgtctttctaggtgctatgccgaacaattcatactctatgcgctctaggttatattcttggcatttttttcttaacaagttctggatcatgtaaatcccgccttcttgattcttctggggatattgtaggtctaagtcgctatatgggatgacatcatgcattctttcttatgggccatcttaaatcttcaagttatccctattacctcaatactctcaaaaaacttgtttttcaatcctcctttccttctatccttcatattatatatttatcgaaaaata

SEQ ID NO: 48680 - DNA, 556 bp, Oryza sativa
  unsure (1)..(556): unsure at all n locations
agcttatgatggagatattgcatttgcaagctcactcgaaacatttgggggatgtttttatgaccctataagtgttgcttttggtggttagtcatgttattctcctgcatatcttttatctgatgttttcggtgatatttgttttgtttaaatttttcatatgagtatgcaaggtgttttctttatgtatttcatgtgtgtttagttaattttacaaagaaaaagggtattatctaactaagctatatagattaaagccaacaacagttgagtaaagagtttatccatctactgtattaaaagtttacttttcatcccttaattactgttttcattttactaaaactgtcttgtctttagtatggtcatttcctctaatatgcatactgaacatttctcctctccaggacctgttatgaccaaatttacaattgccttgagagaactangcacatacaaggaagtccttcgctccccagtagtggcacttctcatcatattttcttatatatgtgctgttaccaggaatttcagcaaaattcttatggctttcttt

SEQ ID NO: 48681 - DNA, 200 bp, Oryza sativa
cgtgtgtcctttggtaacaatgtgaaaactacaaaagagtatttctagaataaaaagggaaaaattaaaaaacatgagtacattgacagaaacaactgaaggtttcaaacacagcttaagctggaatgctcttagatcgatgaagctgacatattttttgttctgatttgggtgaacgatctctgcaggggtgcttggct

SEQ ID NO: 48682 - DNA, 679 bp, Oryza sativa
agcttgcagcggcgctgctccgctgctggcggccggaactgaggctggatgcttcataatgttgtggccatatagcaactaaggtagcgggacagggcacgacatatgaggagtggagctgctctaggaaggaggcgtccccggcatggtggacttccggtgggtaaggggcctccctgtgtttgtgttgatgcgtgtgattggggaaacatgaaaatttgggacttctttttcaagattccttcatcttggcgttgatttgatgttgttgcttttgataagcctcttactaacccaatgtagatgttaacatgcacggcgtcccggtgcgcttgtacttttagtatatggcaaccatgggagaaaataaaaaaaagcgcatagaaaagttggaaaatcaacttttagtagttacatatccttcactccatctgacttcggaaaacttagattaaaaaatgaaaagaaaaactgctgcttccttgccctccgaaggtcactcatgctgctgtccatcaactttgttacccttccgtcaaatataagaaatacatggagataaaagcttttaatttctaataccccactaaacaaaccacccttgaatgcctatggccttctcatcaccaatattctcatccgctgcattcccgttcttctttatccccccagaaacccc

SEQ ID NO: 48683 - DNA, 419 bp, Oryza sativa
  unsure (1)..(419): unsure at all n locations
ngcattgctagcattggctcccacctcagtctgtgagttcttcttctgcgaactatttccaaggaagatgatgcttntctagttgtccgacgaccaacatcttcaaggcgactgaagtattctagttttgctgagagggctttaacctcctgtgtggaggcccttttggggatgctccttggtttcttatgcaaatcgcttagttttctttgctcttgtcgctagtatatagatcagcttgtcatctttgaaacactggcttacgttgataccttctccacttaggggcaatctatgtggtgtgctgtttctatactattggcaaactaaacttctgacaggccctctgggatatcttaatccatttactgcactatctggtaatctcatcacgtaaagttctggtttttttagtttat

SEQ ID NO: 48684 - DNA, 672 bp, Oryza sativa
agcttcttccactcttgctcatctgtgtcggctccattgatgaacatgatgtttgctttatacaagatctgcacatctctatgcttttggtcggacagacctgtcccaaccactgtatccatgattatcaccttttctcccttgtctctaggggggagggctttcttacagtttcccagtatcttgacacagtccttgtcaccctaatcgtgcctaatccactcaatatataatgaatttatattaggagaaacagaaggtaaatatataacagtccctccataactatatattattctgtaaatatatgtatctgtatgtacatctaaccttggactaattggacatttctaaaattcccaatgtgaattaaaggtgtaatactgaataacttatcggtggaaccaaagtataatgacttacacaaaatttaagagtctgacatcaattacaaaaatataattagcattgcactgatcacaaccttaatttgcaccgaaagtgacattcaattttgaagataaatgtagtgaatttcagtggaggcatttatatacgaaattcttttttctaaacaggtgtatctaagtttcaatttttgatcaggcattatattattctgataatatatatgcttgccttccaaataactttaattattgacccatttgt

SEQ ID NO: 48685 - DNA, 521 bp, Oryza sativa
agcttaatgatatgaaacattagattcagtttctgtaaccacttacctttgatttcttattctaggggtttcagatacagtgttatgtttcattccatctatcaattgaccactgaagatcagatcaactttttgcagggatcggactctatccttctactgcccccttggaatgctggcaggatttgtagtgcaatgagaagagaattcaatttgccatgtctgaattttcctggttatttttgtttgctcgtttctttatctaggaaaaattctgctcaatacctggtttaatttttgctgcatcgtcaatgctccctgtcatttaagaaaagtaagtgaaaaggtatctatgtgatagattgattgaacatcactacttctccatgatattccaggcctgaacagaagcactgaagcaaaatacttttgaaatgctttcgttgggcctactgttgaactgaatagcaagttctcctttcacagcttgtttcaagtgtctagtctgataattgctttct

SEQ ID NO: 48686 - DNA, 475 bp, Oryza sativa
agcttgcttttcattgtagtgcagacattttagacataaagaaagaatgtatttttagataaggtaacagaagcatccatgttcttccaaggtcacagcacactgaagtatattttttctttcccagatcacatagccttaatgtccagtttctacttatggcagcttattgggatgtgcgattttatttatctcagtatttctcatcagttaaccaacaagctcttgtattatttgtcttgctttattctgtttttttttcagaaagtaatgggtctttaacataatagcataatatttatgttgccttaaattttgcagcgatggttgcttagtggcaaaatatggttggttctcttttccttttgcagttgaacttagattttaattatttgttgacattaaacgaatgaaacgggttcaaatattgcaatctttgttgtaaagtgctacttgttcaatggattatatgtac

SEQ ID NO: 48687 - DNA, 349 bp, Oryza sativa
cttgcaacaggaatgcttcgttgtggattggtagaaaattatgatgctggtatggctagattcatgggtgggctgaaccgagaaattctggacattctagcctacaaagaatataattcaattaatcctttgtttcatcttgcttgtaaagctgaaagggaagtacatggacgaagagctagcttcaagactaacatttctgcaggttgtgctagctcttggacatcttctgatgtgaccatggctactatggatacgaccattgctcacatcatgaatcaacaagaagacatcaagatcaagtccttcatgtgctgcaatctgattctgccacgtgatacattgctga

SEQ ID NO: 48688 - DNA, 667 bp, Oryza sativa
agctttcagctgaagggcagttcggtactgagattaatgactctctacctagtttggaattagatgatataaaggaagagaatatgctactgaaggatgacatacaatttctgaaaacaatgcttattgaggttgctgagacagagaacagtatattcacattagagaaggagcgtgctcttttagatgcttcgcttagggagctggagtctagatttatagatgcccaagcagatatgttgaagtctgatcctaggcagtatgatgcatggtgggagaaagtagaaaatttgggggacttgcttgagactgcaacaaacaaagtagagaatgctgctatggttctgggacgcaatcatgatttggaagataaggtcgacaaactaaaagcatcgttggctgaagcaaatatatcaaagttctcttgttattttggtgatcttttgcacggaaagataaaatcagttgaagagcgcttccagtatgtaatcatgaaatgctttctcaaattgactctatgaaaattcaatagcggaatttcacgatattcttagcaggctagtggaggaaactgataaaccatccctaaagcatttaacaaggtgcgtgccttcaaaattgggggagaggaatatctttctgatagaggttgggtcctccaaaaaaa

SEQ ID NO: 48689 - DNA, 350 bp, Oryza sativa
  unsure (1)..(350): unsure at all n locations
gtgcaactccggatatacgctatgcgtgtctagatcttttctctatatntnnatntcnatgggttgaccaatgtaatcttcgtgtctatatcatatgattgtgctgcattctcttcagtttgaccgaaaggggatttgacgctgttgttctgtcctgaaattgggctgccaataacatgcatggattaaaaaccaagcctgaacttttcctctgcccaattattatctgataatgtggagttgctgtggtgataccgcgatagaggctactgatccatggtcctgccactttctatttaactatcacctcgtgttcaattgattaattaactagctacgcatttcaatat

SEQ ID NO: 48690 - DNA, 452 bp, Oryza sativa
  unsure (1)..(452): unsure at all n locations
agcttgtcacaagaatactgcctggcatgcggtccctacgggtacacattcngtgctagttccgacaagaaatgcatgtgttggaggatcaagtcgggtgcgatctgattcaggtagataaccgggcagtgcaatccttgctgccttacatgagcaagttcatgaaactgttgacttttgctctgaagatcggggcgcatttcattgtctggatgggggagatgatacctgacctgagcagggaggtagtgcacttgctggactcgtcagtcatgtatggtgcaaccacatcagccttatcattgggggcattaagcgcagcggcaatgtttggaaaagcgaggaataacggctgccaaattggtccaaatgacatggaggatgagattaatacgcccacacagtggcttggtgatttctataaagggcaagggattttgaagggggtagga

SEQ ID NO: 48691 - DNA, 258 bp, Oryza sativa
tatctttatccacgcacgccggcctcacgcctattcctgtgctgtgtccgactcacgctgcttctgcgcgcgcgtccgctgatagccgatatcccacataacatctatgtatattgagcggaataagccccaatatagtgaaggctatgtaaacctaacatgcatcagttacatgtgtagtagaggattaaagccttgatggcatgaagttggatgtctgcaatggccgagggactgtgggaggcttacagaaacacc

SEQ ID NO: 48692 - DNA, 387 bp, Oryza sativa
agctttggagaagatgtcttaggtggagtcctgtcttataccccagttttttttttgtgaatatggagccgtaggcccgctagtccgctgctgtttatttttgattgtcaagcctgaaacgcctttgtaataatgtaaatattatcgatataataaagatgtgtcttttatatcatgtttgtatgggggaccccggcttttcctgggacggggattaatacactagcgttcgggaaaaagcaattttcccggtcgcgacaggtcggaacaaaaatccgtcaaaggtgacataacctgtgacggactagcaaataaaagcccgtcagaggtgacctacctgtgacgggcctttacttttggagccgccacaagtagatcacctgtgac

SEQ ID NO: 48693 - DNA, 318 bp, Oryza sativa
actcagcttacaaacttaagaatacaaacttgcagattattatgccacctaataccccgtttggcatattgagcctccatgtttacattcaactcttctgaatcagtctttcatcatcaattcatcatactcggctgaggtcttgttgcaattgctcccaacatactccaattttgcagccgcatttgccactactgtaaatcagggcagatcttcgcttgcccgtctgcaatccatcaatgtgtcattcaatctcaggataaggttttgtatcgcaagccagccgctccatacttcactccttgtatcttaattact

SEQ ID NO: 48694 - DNA, 480 bp, Oryza sativa
agcttgacaagtgattgcactgttgctgctatgaactttacttgataatatttttggactgggtttcacaagtagcatttcaatttctacacgtttcttaaacttacctggcatggagatactgaacttccacttttctctctttttttttttggttgcgaggaacttttagtcttttactgtttgttgcattagtgaatctgtagcggctctagtctattgaacttttctccagttgttagctttcttagcaattctctgggctatgctaatttattcggaaccttgtcaatttatttgcctgcaaatgcaatgttttttgtggacagtcctggtgtcatctggtattggttgtatgtatattggatatctagtgttttatgtaatctaagcagcttcatttctctgtatcagagtattgtattaattatattgcaattttttcctacaataggtaacttggatgaaaacgtaactgaa

SEQ ID NO: 48695 - DNA, 345 bp, Oryza sativa
  unsure (1)..(345): unsure at all n locations
tgctaaagctcagcactaccacctcatgaagcatttttctgtgcctntaatcacgtacaatcccatctgctagtagctttatcttgcccatgatatgacaaattattcaaagtttataactcatgactagattactttaggtttttnttaaggacgaatagagtacattattgatgctcgcgatngagaccgtcatgcatgatctgcttcatgtcccaacttaacttctgttcatcgttgtgactatcacagtcgtacgtaatactattaattatcaccattgtttactattatatgatattagtgtttctgcacattgcaactacccttgttacctacaactgt

SEQ ID NO: 48696 - DNA, 668 bp, Oryza sativa
agcttccagacaaaatgccctttggcagagaactcatatgttcctagacattttatcctactcaaataaaatacatattttttcataaacataatactactacacaatatataaatatagatggagagtaccagcagctcgtctcagtgacccgcaacgatagaactccatccctcgtagtgccaattttattactcccttcatctcaaaatataaataactttaatatataaaatttagcgtactttacatattccttcatctcaaccaactacaaccattttctatttaagaactccatccatcgtagtgccaattttattactcccttcatctcaaaatataaatacctttaatatataaaatttagcgtactttacatattccttcatctcaaccaactactaccattttctatttaatttcttcatatgcttctttatctcaatcaatcataaccttaacattttctatcaaaaacaaaaataaaacacaacccctgccatttaactttattgccctctccttaatccctttaaaataacataaaggaagctactttctatctacaaatataagcattgcaaatgtttaaaatttattaaagaaatataaggatttatagaataacttaccttcaatcttaccttccattcaaatttcttttt

SEQ ID NO: 48697 - DNA, 196 bp, Oryza sativa
  unsure (1)..(196): unsure at all n locations
gccatcttacagcgactccacaagtnatcaagaacccttggaaatgaaatctgaatggctctgagtttgaatttctatctcgcaagaaagcatatttgatacactgcgtttagacaaaatcacaactattagttataaaggcttcatagtaaactggagaactagaggagctgctcttctgtagagagttgtactt

SEQ ID NO: 48698 - DNA, 435 bp, Oryza sativa
agcttggagacggccaaccacttttaattttctggatgctgctctgccttctttatgtatggaaattgaatctgaagaagcaatcgagggtgcatcaaattttcagcttgagctaaagagaagggggatgttctccagcgctctcctctacgcaagaaggagattgccctccgagtcccaattgccttgttcatcaccatcacttatgcaccaagcaagcgtactcaacaaaagctgtttgttttcaagcagcgctcttcaaaagaatttccatttatggattgcacgaggtctcaggttgctacgctgatctgactgcgcgataactttcatatgccgggaattcatgcttaaatagccaattaagcctgatcagaatgtaacaaaattcttgtggcaagttgacaacttgctatcctgctgaacaaatattat

SEQ ID NO: 48699 - DNA, 201 bp, Oryza sativa
  unsure (1)..(201): unsure at all n locations
ctaaaacagattccgatgatatattagaaaccggaacaagcataacatttcctatcttatatggaaagaatatgatacgtgtggntgtgctcatgccccccgttaaggatattgaaggcatcatctcattggttgacagagttactgttaagataggcaaacaactcagatgcactcacagtacttactgatctgatcgaa

SEQ ID NO: 48700 - DNA, 369 bp, Oryza sativa
  unsure (1)..(369): unsure at all n locations
agctttgaatccacatatactatcacaagactatctgttttgagcgactngttttgttctgcccctgcaagcacaaaagtacagacagccttctcatcagcaagacatctcaagtgcgattaaaaaaaacatctgaatttcgaagatacaaccgtccgcgggcaaatgcgagaaatcgcatgccatcatcttgcatggagctctgaataaatcaaagactccgactcacgtatgaccaccctgactccacacgcaacatgtgtatataccccattaagacatgaggatcaacaactactaaccagtattgacataagcggctccaatttgtccatggttgcaaatattggggagatcgctaaatcccta

SEQ ID NO: 48701 - DNA, 130 bp, Oryza sativa
  unsure (1)..(130): unsure at all n locations
gcatgctggcttcaacggaaatcagccaggttgtaaatttcaaagncattctccttcattccttccatttggggtcttaaccatggtaatacctaataagattatttgctatgaaccggggtttttttct

SEQ ID NO: 48702 - DNA, 347 bp, Oryza sativa
  unsure (1)..(347): unsure at all n locations
ttaaatctcagcttctcaaagccgaccacnagctagtaaagtacctgtgcactctccatgccacctcatcgtcgccatcttcgtcgtcgtcgattcagctgcagaatttttttttctacgcaggatgatgaaacgattgttccttcgagagaactgtgaaagtaacagattaacagaagcccctgcggatcagtgaggcaggatcacgagaatggtcacagtacattacacatgattacgagggtaagtatacagtgcttactcctacttgcttggaggcaccgggaagacagagagattcacaagagatgaacatgttgtaaattatgatagtgttggggtaaatg

SEQ ID NO: 48703 - DNA, 351 bp, Oryza sativa
gagcttaagtgggctacaacagttgataatgcgatagatatgcacagacaagtttttttgttatgatctttcagatctaggaaaagtgtaaaacctcaaatacttcccaagcttagtcatcatataaattttcattcttgtggggtaggggctcatatatttcttttctaaatactttctaagcttagtcctcatataaaaggagtttttttaatgcagaccctaagatcagcttattcttgtgatggtccaatggtagagaaggccatagatgccatttgccagagcaagggattgccacatgagaatgtcacaataaccaaaggttaaacattcttgcggcctaataat

SEQ ID NO: 48704 - DNA, 568 bp, Oryza sativa
  unsure (1)..(568): unsure at all n locations
agcttcggccgtggcctcatgcttgtcaccagtggggaggagggcatgtcttttacattgctgccatcatcgccaagctgctgccgctgctgagctcaacagatccggcggccttgatctgtcacatccaacttccccaccggctctggatctagattagagagagagagagagagagggagagcaagaacaaaaaaaaagagttagggaggaaagtctttccccatagagaaaacgatgagcatcatgtgctaaaccatcccaagcctccgggtgatcggatctgccggcagggagatcgtggttgccggatcaggcgggcacgacctcccctccaccagaacctgccttgcggtggcaagaaggaggtgccgtgatgcacctgtgtgctanaaaaatgctggaggcgcggctgccgcaacccattgaggagagtttgcggcgccgcgtaaccggggccggaaggcccaaagaggagatgaaggccgcgctctttgcttaggaaaaccccccagaaaagaaaagaaccgggaacggcggcccgcgggcgataggggtttcccggggg

SEQ ID NO: 48705 - DNA, 177 bp, Oryza sativa
  unsure (1)..(177): unsure at all n locations
ctcacctacaagataaaaaacacaaattagttgttctttttgcagaaaaggtactcctgccagagacctgcacagtgtagcacggaactatttattattcaatgngaaccattacacttgaacttacattcatcttataagagcaggtttcttaggaattcactttaataaaccatg

SEQ ID NO: 48706 - DNA, 363 bp, Oryza sativa
  unsure (1)..(363): unsure at all n locations
agcttgggcctctgttgcaaagcactaccgtacttccacatgtctagtgggtattgcttantttgtggctcagtctagtcataaacaaaagtacacggattggagatggatgaagtcgggggtcgatggacattctccagggcaaatgaaagctacacgagctgcggcccggtagtcgagatgtcatatggcagagggttggtgccctgctgctaggggctcagtcctgcctgcctgtcccgggggttccggccgtaggtgggattgggtcggtactcttgtctatggctaagatgggttggaaactatgtcacgtcttccgtccgtataccggggtggtatgtggcacgtggttacacgtga

SEQ ID NO: 48707 - DNA, 310 bp, Oryza sativa
  unsure (1)..(310): unsure at all n locations
ggacctatgaatctcagcttaacatgcggtcatctggataganaacatctcttattattcgttgataggtcgctcccgtattgttcaatccaaagggcatggtgatgtaatactaggccccataaagcgtaataaatgaggtcttctagcaatccgattcttctagtcggatctgatgatatcctgagtagcattcctaaaaactgagtagctcgtagccggccgttgagtcaactacctggtcaatgcgaggtaacccataaggatctttgggacaagatttgctgatgtccgtgtgatcgacacacat

SEQ ID NO: 48708 - DNA, 582 bp, Oryza sativa
agctttatctgaagttagaaattcatattctaacttgcttctatgagtatgctttattctatagctattaatgataatatctttcatagttcacatatcctttatgacattagataccaatacatattgttatgtttcacaaatttagagtgcagcacatgattgcttacttcagagtgttgatatttgcactccaacctttattgcttgtgtaacaaacattttttaagtatttctttgatctggtattattactgtctgggttgcagattcttgactttggttttgatcgactaggtgccacttcagaggtaaattgcactctgccatcatctgtactatgaatatattctgaatgtagttgacttatgtactgtttccttggtttgacagctttgctttaccttgcactagtaaatgtggggtagtccctctcaaataaaaatgatgaaatttgggggttcttttgtatgccagttctatgtataagtgaagtgtgtgcaatgattgggactatgtagcggttattaaaacttgaatttaccatgtgaattctaaaatgggtcagtggtttccggtttc

SEQ ID NO: 48709 - DNA, 162 bp, Oryza sativa
tcaccttctctgctcacacgttattgccgctgccatttattgtggcatatctcccaatgtgtacgtctcagattattacacgaaagaagctatttttcatacatggagtgaggagatatactggttccggatctcaggatcctacacaacgctgactgccca

SEQ ID NO: 48710 - DNA, 451 bp, Oryza sativa
agcttgttctccttcatagctgagagaaacctcattgacaaacttttctcattttctggagcatcaagggtgaaaacgttcttccttgtgagcagttctagaagaacaactccaaagctgtaaacgtcactcttatctgttaattcacatgtttgcatatactctggatcaagggaaccccaagtcccttggactagcgtgacaagctgtgacttgtctagtggagctaaaatggaagcacccaagtccgagacttttgccatgaagttcacatctaagaggatgttggaagacttgacatcaccatggatgatggggggtgaagcctccgagtggaggtaggcttatgcctcagctgattcatgggcgatcccgagaccaataacttgagaaatgtgttgggcctgggtgccctggatgaaaaatggatacggttcctttgggaaaaaat

SEQ ID NO: 48711 - DNA, 493 bp, Oryza sativa
agcttaggagaggcaagaaggaagatgatgggagagtcaaagaggatgactgttaacaagaagaagaacacaaaggagaagaagaaacattgcatgcagtggttaatccaagaaatcataaaagcttttgatgaatcggaagatgaagatgagagcaaaggtaagcaagttgttgatctagcttttattgctcgtaatgcaagttctgatgttgatgaatctgatgatgataatgaagaaaagcttagttatgatcaattagaatatactgcttacaaatttggtaagaaacttcaaacatgttctattgttcttgatgagaaggatcatactattgagattcttaatgctgaaattgctagattaaaatctttgattcctaatgacgataattgtcaatcttgtgaagttttattttctgaaattaatgctttgcgagatgtcaattctgttaattgcaaaaaattgggatttgaaattaaaaaatcttaaa

SEQ ID NO: 48712 - DNA, 491 bp, Oryza sativa
agcttaccaacgaccattttgtttaaggccaaccctaacttggtttgtgccctaactaactaaacatattatgtttcagactttcagtagctgtagcctgtaagttctaaattttgactccgatcttctaacctttcagttgaacacttgtctatcatcacgatttaattcttccatggcttagtagtatcaacagttcaataatacctagatattagtccattttgctacattgttaactcatttgtcatgataagttcataactaaattgcaggagctaatttgaattcaatacattattttctttggttaagtgggtcttagatcaattttttgtttgcataaatggagtcaggtttacatttatttttgcattccatttacatgtaaactttttttatgctccttctctttgatgaatggaggcatgtttatttctgaatttcatgaaaagttgttcgaggttactggatcacaatccatcctggag

SEQ ID NO: 48713 - DNA, 242 bp, Oryza sativa
cgctttggtcccagctccaccagaatcaagagcgcaatctattatcatatcctccaagagtggattgacacgctccgtctgaccatcaatatgcgggtgatatgactagtctaaggttacaccggttcccatatctgtctgcaactgctggccgaactattgagtgaactgactacctccgacagatactatcttcttagggaccccatgcaaacacatgatcctttcgaggttcaattctg

SEQ ID NO: 48714 - DNA, 648 bp, Oryza sativa
caagcttgaacggttctgaaatctattgctccaaagtgttacctggaactatgtttatttgaacagattggccagaaagaagctctccactgcagctcaccaccatcttcctcagcatgttgtcactgtaaactgcaacgaggaaggcagaggccaccaagtgctgtagtgagttccactcaactacatacagcaaactccctaaaataaattgctgcaagccatgtgaattattactgcattgcttccttcaatcaatttctagctaccttagctataaaaaaaatattcgcagtgttgtgaacttaccttctgaaagcggtggtccctaagtccggcaggatcgaggagtatgtgcaggactgtaggaacgaatcacaagaactaagccaaccagagggggtgattgattagtatacccaaaaaccgaaaacttttagcgaaaataaaagttaccctcaatttcgatgaaatccgcctaaccgaagtagattaaccggtctgaccaaagcgtaaccccccggtctgaccgggtgttgacctgccggtctaaccgcccagatcgcctgccgcttcctggcgctggcacccgtctgaccgccgtgctccccccggttctgacccgcccaatgcttgcggtctgacccc

SEQ ID NO: 48715 - DNA, 561 bp, Oryza sativa
  unsure (1)..(561): unsure at all n locations
agcttggatttgctgctccagctgcattggaaagcaaaataacagatcagttctatttatggttaaggtaaatttgcatcgtcaggtcataagactagtaagatttgacagcccaagaaatcgaaaaatgcagccagaattaaatgaccattttccattcagaaatgagaaagggccaaactggggaggtaaaagatcaggtctacccatattatgagaagaaaaatacaagttggggaccaaacaactctaggcctcttggaattatcccatagatatatccacacgcaaggatgggataaaataaaatagttataagacaaacaaggtttttgagtgcgatatctgtaagtcataattattaccacaccaagtggtaccacgtaaaggcttaagtacaaatgtagcactggaaatgacaaagaanaaaaaccaactttgtaaagaaataaatataccatgttcatcttctgccaactgccattatctcgcatgctatttaatgcttcacagcaactataccactgtactaccttatatatgtgtcatgaaaagactaat

SEQ ID NO: 48716 - DNA, 396 bp, Oryza sativa
  unsure (1)..(396): unsure at all n locations
ggtggttatattcagtaaagcctctgcagcgaactatgtgaaggacctctaccaccttctcttcccatgtcagcttccactcctgtttcttcttatcaaccgtatccctcatctcgcacttgtcctccncattcttgtcactttctgccatagcttgcttgtgttgtgtgctctccgacctggcagccagcaacttgtaaaaaaaatacatggaaggtttggggttctcatgtgtccaatccaacaaacaaaacaaaaaaaaacatggaaaatttgtgattcttatgtgcccaatccaacaaacaaaacacagatatgatggattgatcaattgccaagtatgtgttgtctaactcttacatgactgaatgatagattgctaactgcggagtgtgg

SEQ ID NO: 48717 - DNA, 668 bp, Oryza sativa
agcttgacttcattcttgccaacatgacgatgtccttggcttggtgaccatttttttatggtgtcattcattagcctcatcgcaattagatctattcctttgcacggctcaaaggaaaacattagtcccaacaaatcggttggcatcctccacttggtgaccaaccagttacatatgaaatatatgggtgtgtatgattagtgttccttaacatcataagtgtcatatactcatatgcaagctcaagtgccgagatccgatatatataataggtgaacaacatggatctaaaacatgcacaataaatgtataggatttgcttcccctaagtatatgcataccaagaaatatactagagagacaagtgtatgcataagtaaagaagaaccaatgggggtttatcctatacacatagagaaggcatatgtagtaatgatgaagataaaacaaaaaacacttaccttcatgatcttcatgttctcaatgtaaaggagactaagtaaactttagtcttacacttatataacaatgacatgaaaatcttgtatttgatcctattaaagagtagaaataggagggatacattcgctttattcccctgaatttctcccttggctaattaaggccatcacccaaaaatgcttttttcccccatttattttcgggaa

SEQ ID NO: 48718 - DNA, 592 bp, Oryza sativa
  unsure (1)..(592): unsure at all n locations
tagtcatcagtcctttcactggataacatcnttccttagaaacaatgtattcatgtcttactagaannagctatctattatgttttgttcaaggaagaaanngcattcagcagaaaaaggagcnttccgcaacaagttgaaagaagcaaagcattacattaaatctagcagcattattgatctttgatatttgtgatanttctctttnttctantgaaggacanaagttaatatataagtttaattgggagttcgacccattaagtcttagtttttctcccttctantttctggtggagaaatagtttgtatttttaaggagaataaatctgggtaaccacaaattgaacaagcaaagatgttatggaaattttgaccctatatatttgttctgtagtgttaggttgctagtccagtttacccttttgttttcgattttaatttttcatcttggttctactgacatatccttaacttatcttgtactagtactagtactagcgagcaactctttacgaatcaactgtaatatccgtcatggatcantaccagacttgcaggcttctcaccatgcagaggatcaacctttagc

SEQ ID NO: 48719 - DNA, 273 bp, Oryza sativa
  unsure (1)..(273): unsure at all n locations
tataaattgcatggtctacgttatattttgatcgctagcttcatcccttgtgaccaaagacgcatttgtggctgacacttcaantggaaaaatcacatggtaatgaagttgttgaccaccggcatctgattgtacagaagaaacccccctaaacagtcagccataattacgctatcactagcctggtgacgaatcactgtgctaatattattcggatcaaacagggcttctgaattcaggagatgaagtcaaaaaagattcaggagataacac

SEQ ID NO: 48720 - DNA, 413 bp, Oryza sativa
agcttcacgaccgaagcacatcccacggttttacatggagcacatgcgaaagttttttgacattcatctgccatcggcaaatgccaataatcaacgtacaaaggacttaaatttgggccataacagaagtgcatattcacacgatgcggacgtactctgctgagttttcctaccaatgagctgctgagatggtcaatgtcactctcatacggtcacaggctgacacacataccaaaagggactgcagcaaccaacacttcccttgtccgtgctagagaacggaatggagttgtacaggactggaatgcgatcagctaacatgaactggaccatactcagatcgacgcagtttaccttggatttcccatgaatcccattcttaaactaagggcatgctatcacttttcgtcgtc

SEQ ID NO: 48721 - DNA, 334 bp, Oryza sativa
ctcagctatctgcatgttatttctcttgaagaatgcagagtcgatctcttgttcggtgccgactgcgaagttcacgccatgagagatgcttgagctgttcgccatgaatgcttgaatgaaagggagaccaaactcctctgcttcaaaccaaccgattattcttaccgtgtcattgttattttcacgaaattgaactattcgtattgttctccgaatccaaatattgctgaacttaccgatgaaatcgacgatgactctcccattgcagacacggcccgctgggtggccaaagaatgtcatgcctgtatgaggcttgtcgaccacacggcataac

SEQ ID NO: 48722 - DNA, 673 bp, Oryza sativa
agcttctcgctgatgggggtgcggcgacgcttgggaacgatgacatgtttttttctcttccatggagttctggtgttggccgtgtgaaggaagtggctcctccgtggcttggctgatgtccattgttggatgtcaaatccgcttttcgctttggcgactttcgtcttcagtgtcgcttcggttgtgaagttggcgctgctgggtcgcttaggcggctagctcggcaatgataacacctcttctgcgatgtgggagcaattgtgttgcttttgtgtttagcttggcggcgacgtcctgcgattgggctccgccgctattgttagttatgtaacaaggggtttcaaccggtttttctgtaatttaccgtgcagttggtgggtttcggttctggttttccttataaactggggcaattctcttcttcttaatataaaagtggaaacaaagttcgccttatgttaaaaaagttttaatatggtttataataatagaagtaattaatagcgaggtgggatatttgggtggtccgctttataaccctttgggtccattcgtttgtttatcaggggaaaagccaacacgttttttgccaataaaaataattgtgaaaaaactttttattggggggtcctaaaggcctaaaaacagaggtggaaaaataactccacgaaaa

SEQ ID NO: 48723 - DNA, 432 bp, Oryza sativa
agcttccccatgcccgaaaccactccgccaccaccaacctccctccgtcttctcctgttgccatctccggccggccacctgcgccgccgtagccgtccccgcgccacgccgcttgcgccaccggcctcgccacgcattgtcgcacaccgtccgcaactccggttccccaaaccacaatcaaaacaccgattccatcgctcacccgagcaccgccgccggttcgccgccttcggcagcctcttgccggcgttcccgtgcacctcaagccgcgccgccaccaccactagcttcgctgctccgccggcaagcccagccaccacgccgctcctccattccacccccgagccgcccgctccacggtgaacccgaaccacagccacttttgtgcctccaggcgaacctctgccggcaacctgccaccggcaagccggg

SEQ ID NO: 48724 - DNA, 556 bp, Oryza sativa
agcttgcactagcatttggtttgattaatacagtagaaggagaacctatacttgtgatgaaaaatctaaggacacgtggagactgtcataatgccatcataatcatctctgccataactttcagacagattactgttagagatgcacatcggttccattgtttcagcgatggaagctgttcctgtggagattattggtgagacagaaaagttgactcaaattcataagaaagatgagattctgttttgtttcaatgattacatcggatgaccatcatagttcttcaccacactagactggaatatagtcaatttggtcaaagtagcagcacgtatgtcaaactttcagcttccctaaaaacttgagttgtcccaattgctactaagatcctcagtagaaaagccattgagctatgaatttatctgaagctaatgacttaactagctcacctcacaacccacctttatgggataaatcttgtcatcttatcttgcataatagtttttacatgatgaagcatttgctgctcaataaattttataccactattggtttt

SEQ ID NO: 48725 - DNA, 399 bp, Oryza sativa
taactatatttacactagtgagatcttaatataatgggctgacatagcatataaagtaagtagatggagaacaagatagcatagctaacttaggttagatcggctgaaactccaatactatctctattgataatcatgaagcaagctagagattatggttctagatattacttaatagatcaaacttaactgatgcagcattaagcataaagagaaacataagatctaataaacaaaccaatgaaaaccttttcgagatgatagatatactatataatctaattcgacgaagatatctaattctatcggctgatcttaatgatagaagctagccgacaagactagataggagcattgatccagattatatagcatatatgataacttgacggattacat

SEQ ID NO: 48726 - DNA, 396 bp, Oryza sativa
acttgctagtgccaacacgccatgacgcgcggaggcaaccgtatgttgggtttgccggccggtcggtgaggtcgatctcggtggcaacggcaacgcaagttggccggccggccgggctctccgccgatgttggggccggccgtgccggccaggccggggttcaacttgcttggcgtcttgcccgtcaaaggctcaaagctttagctagctttgaataggtccatgtactatgtagtagtacgatgcaccagagatgactttgttgtcctttgctagtgaccgagatgctcgagctcgaccggccattggtgcatgaccaaccaacggtgtggcagcatcgcagctagccaagctcagccgcgggaaaggagcagagcagtgcaagataaagtaagt

SEQ ID NO: 48727 - DNA, 164 bp, Oryza sativa
  unsure (1)..(164): unsure at all n locations
ccttaaaactaagctgtccattgtcattttgggccgcctctgtttttttgcanatggtgggccctttgatggttctttgggccgacatgaacatcctttgggattcatattggcccaatttatggttctctggccgacatgacgttctctttgggctttagaat

SEQ ID NO: 48728 - DNA, 357 bp, Oryza sativa
agcttggctttactgttacagagtgaaagtcaacacccggctgtagttatctgtttttggattggagacgatggacggcgaagttgtccggcgaaaaagacgatagacggcgaagtcggcggcctgctcggggtcgcgcaacagcggcctagtgaccctgtctacctcgaccacctcgaagccttgctctcgcagcacgtcgatacagtcctgcacgccgtcgcgcgcctcgctcgccgcccaccccaccgtgccgccgccgtcgctgtcgctgtcgccgtctcgccatagcccatgcagcgtgtccgccatcgccggcatgttgtccgggtcgcaaaacacggtggacatgagcac

SEQ ID NO: 48729 - DNA, 369 bp, Oryza sativa
  unsure (1)..(369): unsure at all n locations
aagcttgaggaggaacatangtctangaactgngacctttnttttttttggtatctaaatatgtgttctacagttaggcatgtntgtttgnacttcccttgacacatnatcttataaccggtgaaacttgtttatggtctatggacggcggacccttaaagcttccatattcatcttttatatttctcatgaaattaatcttgtgatgtggacaatccacagagattggtgataaaattgtacctcccaagaatgtgtcagttattcaaccatcaatctctgagccaaagtcttatatgtctatatggctatgtcaatatctgattttattgtccatcattcttatgactaacttccgttctcttttat

SEQ ID NO: 48730 - DNA, 319 bp, Oryza sativa
  unsure (1)..(319): unsure at all n locations
agcttgggcctctgttgcaaagcactaccgtacttccacatgnctattgtgtattgcttaatttggggctcaatctagtcataaacaaaagtacacggattggagatggatgaagtccggggtcgatggacattctccagggcaaatgaaggctacacgagctgcggcccggtagtctagatgtcatattgcagaaggttggtgcccttctgctaagggctcaatcctgcctgcctgttccgggggtttcggccgtaagtgggattgggtccgcactcttgtctatggctaagatgggttggaaactataattacgtct

SEQ ID NO: 48731 - DNA, 253 bp, Oryza sativa
  unsure (1)..(253): unsure at all n locations
ctaaccttaacattgcggtcgatctggattgaaaatcatctctgtttcatgcgtngataagtcgctcccgtatgtttcaatccacagggcatggtgatgtaatagtatgccccaaaaggcgtaattaatgaggtcttcaagcaatcggatgcttttaggcggatctgatgatatcctgagtatcaatccaaaagactgagtttctccgtatccggccgctgagtctaactatctggtcaaagcgaggtcaccc

SEQ ID NO: 48732 - DNA, 409 bp, Oryza sativa
agcttgagttaggccatatacctagatgagcggggcaaatcctatatgttttttcattatccacaatgtcccctgcacacgcatacacattcagaatagcagtcagggagaacgaaagacatatggggcagcatatcacctggtgctcgccatgttcgcaacaacgaaaaggggccaaaccggagcaaagcacaccagcgaaccgaaccagcaacagcctcgagcagaactaacgaaccgggtatgaagaggagaaggaaaggctaagaccatgacgtgggcatcggtgctcgcgcgcacgccggtacggtgtgtatggacgtcgatttgatggtgcctcacgcggtggcgtaacgcgcggcgctcacaaaaaaacatggcatcatacagctataacctcccggatggg

SEQ ID NO: 48733 - DNA, 661 bp, Oryza sativa
agcttcatgatgtttgctttatgcactgctgtgactttctttcggttgtttttgttagcatactcaaaagcatatttggcaatcctctcagagcaaaactttgttatcacctgacaaaagttagtcagtgagactaagatggaaaagaagctcagagaactggaaaaaaaaaagggtgcatttcattccattggcaatcatgtaacacaaaactaatcaatggttcaattgaaagaaaagaaataagcacatatctgatgagtccatgtgccccaaatcaataaatttaaccatcagtctacctattccctctattccattccctacatcccaaatccatgaagctgacctgattacacgtcatataacagtctggccaaataatcacgtcattaaattcttaaagaggccagtgtttgatgcagaataaacaaatcatgaactaaactagcacgttttacaatttaatcaacacgcaaataatgtaaattcatagatggtaccaaacgctttaccaagccaaccggaaacaaacaaccgggagttgaaataagctgggcggtactgaaaaaacgccttgtaatcccacattcaagattggacaaccaaagccgatgccaaacattgggtcaacaaaacaccatttttttttaaaactttc

SEQ ID NO: 48734 - DNA, 639 bp, Oryza sativa
  unsure (1)..(639): unsure at all n locations
agcttanctaggaccaaaaccgtgtgtcctgcgaagtgagagtgtaattcttctgtttatatattcttcgcagatttgatataagtgtcgcttttacggctaattattttttggaattgtctatatatcatttgccagaaaacccttctaaaaatattacaaattctggactatccgattgctttaaaattcgtgcagagaaacaaatcctaaaaatctccttctctcccttcctcccaacaccacgccgccactcctaacgcttgtgcgatccgtgctatgccaccgtcttcaccgtcgtcaccccagcgtgctgccgcccagcctcgccggctgggcggaaggcgttaacggcgctggcgagggcatctccgtcgtttttcaggcgtacagttcttttcctcaagcttcatgtggttcttaccattttttttgttttttccgttcccctttttcgtctcatgcaaaattcatcgacatagcttatatgcttgtcgtcttcgttcgcagtccatttttattatacttcgtttttttcttcgtcccaagtcttgatatcttttatgatatattctcactcaagcattgttggctctctttatatgttcattactggtatcacctgattcatgctcacaa

SEQ ID NO: 48735 - DNA, 480 bp, Oryza sativa
  unsure (1)..(480): unsure at all n locations
tactcagcgtgcttattatagtataatataatttgcgtatttcacaattaatatgaattgatgagatcgtatcctgcttgcaattaataaattacttcctctggatctcctttgcttgatgttttgatcatcgcgacgaacttaaatgtacatatgttccataattaaattttctataactttatgtttataaagttattgaaaatatatagttatatgaaatcatttttcataataaatctactaatattattgttctatattaaactataatatttttacatatattattgatttaaagttttgagttctctgacgagcagacaaccaactnttcttctctttactgcatgcgtngaatgaactggaacaatctatacatcggtgtccgtcgttggctgggacatccacatatgacacatgtcagaagtgtgtcttgtgtgatccattcaattctatcgatcactatatatatacgtc

SEQ ID NO: 48736 - DNA, 645 bp, Oryza sativa
  unsure (1)..(645): unsure at all n locations
gccgcatgcaagcttctcaaccttttacaccaaaaggagtcacagattttgcacgaaagagtgtttatctgggccactgggaagcgaaaaccgcagataatttcggccaaattcctgtccttgtttttgaattggtttccgaaatgaccgaccgtccgggacagcgacatggcgatcgacttggaccggagactgaaaattgatgcanggccctgtgcgtgtaaattgtctgagcatcagatgactgaaggctctacagctgaagttagtaataatcttgactagaatcgagttcgtctagtctttaaaattttagagcagtttggaacaacgcggacaatgtttaaatttgggtcggtgcaggcaaatcgacaaaaacatgcagggtcggtttcgttttcttttggtctgtcaacttgaatcaaaatctatagcgaagtgctcaagtcaagtgaatggcatctacacttggggcgcaacaaaagctttgtttagagaactccagaagtcctctaaaagaatctctaaagccttttgtttccttttcttgcacagggcatttctgtacctttaaaatcattcaggcattcagcacatggagcagtggaggtagtccacacctcccttatatatattcatattgga

SEQ ID NO: 48737 - DNA, 373 bp, Oryza sativa
ggccacagttgcggcaggcgtcgtctcgtgccggcttgttgttgtctgtggcaacaccctgtgcgcctgtgcgggcaccaccctcgggacgtcttcgcgcccaccgtatctagacacctcccctggccttgcgcggcttactggcagctgacggggaagatgaatcctcctttctcccgtcaccctgagaggcctcccactgctctcgagtgagatggagcttcccgccgatggtgatgggcccccagagaggctgtggctcatcaccatttacgaccttgaggcgacctaacgccttctcgatcgacattgtggagagggtcagcagagattcgatctatcgagcgatctcgctgtacttcttatggacgca

SEQ ID NO: 48738 - DNA, 578 bp, Oryza sativa
  unsure (1)..(578): unsure at all n locations
agctttctggnttaactcacttttatctttcccgctgcatttataatcttttatttttttgtaagacgtgggtctgtatgtcaacaattgtcgtttgtgtaccctggctggtcctggacaaagatttaatgcacattcagcttaaaaattctggttcgagaatttctgggtgtgacacaatctcacccattctatctgttatagatgaatattgatcgttggatatgatgaatgaagaatgaggaatgtatcatgtttgtgaagaagaagaagaagaagaagagatagaaaacaatttaactgtttattgcatgccatatagagaggataggctaaagtcactgacaagagggacccccatgtcatagagaggatgcaatgggtctaccatggatctaatccatagaggaagtccactatggtccatagagatggatgcctaaaataaattggccactgttgaccgaaatattctgactattcagatcaattctgatctttaggatgcaaagaggggccccttcggagccctgggtggccacccaccaaaggaccggattaacctgaataaaaaggct

SEQ ID NO: 48739 - DNA, 446 bp, Oryza sativa
  unsure (1)..(446): unsure at all n locations
tgtacgatgagtcgtatggctttgacaatgagctcaccacactacggtgagttcttgaacttatgacgttaaaggcgagacatggatgatcttgtaccagctttgacactctgttagaacttctgcaaaaaatgctcccgagggctaactcactaccatccagcacatatcaagcgaagaaactcttatgtcccctttcacttggcgtggaaaagattcatgcgtgcgttaatcactgcatactgttcaggaaagagtacgcttctttagatgaatgtccaacatgcggtgctatctggtgcaaatcacatagcaatactggcctagaaccgtctgacacaactgagggaagacatagaanaatcccgcagcttgtgacctggtaccttcctgtcatagaccgcattaaaccgatatactcatactcacgagaagcggaactaatg

SEQ ID NO: 48740 - DNA, 505 bp, Oryza sativa
agcttagctaggacgaaaaccgtgtgtcctgcgaagtgagagtgtaattcttttttttatatattcctcgtagatttgatataggtgtcgcttttacggctaattattttttggaattggctatatatcatttgccgagaaaacccttctaaaaatattacaaattctggactatccgattgctttaagattcgcgcagagaaacaaatcctaaaaatctcctcctctccctttctcccaacaccacgccgccactcctaacgctcgtgcgatccgtgctatgccaccgccttcaccgtcggcaccccagcgtgctgccgcccagcctcgccggctggccggaaggcgttaaccgcgctggcgaggccccccccggccgacctcctcccccttcccttttctccttccttatccacttggcggcgaatatttccccgccttctacctgcgagtctccgccatcctttattcccgacagtttggtccctccctggtgatctttttt

SEQ ID NO: 48741 - DNA, 320 bp, Oryza sativa
  unsure (1)..(320): unsure at all n locations
ttgatgagacctatctccttgcattataaaaaccttctctggatctctttgcttgatgttttgatcatcgcgaccaacttaaatggacctatgttccattattaaaatttttataactttatggttataaaggtattggaaatatttagttatatgaaatcatttttcataataaaactactaatattattttcctatattaaatcattatatttttacctatattattgatttaaaattttgagttctctgacgaaccgacaaccaactnttcttctctttactggatgcgtgaatgaactggaacaatctctacatcg

SEQ ID NO: 48742 - DNA, 680 bp, Oryza sativa
agcttaatgagaagcttgtgggtgctttgttaagttaacgagtcgaaaagtatttctttttggcttgacttactgaacaaggataataatgggctataagcaagctatatgcttatgtggaagagagataaagaaaaacggatagtattagctctcatgagccagcttcacacaagctccaagaaatatgcattaaattcagagttagagatagagagagaatggaaaaaataaaggtaaccttatagctaacctattatacaagttagatctaatattgacttatactaataagagtgagctctactattaaacttgctcttatatatgggtctaagttcaaacgaactcttaatatgagtcaaccagcaccacgaacttttagcttttattttttttactgctacatcgaaggaactaatctaactctattgaatctcaaggattttcattatgagataattaatggaagctgtgcatgtacaactcgctcaaaattgattgctttgcgcagtggaacccaatgcaactattgccagggcttggtttatttatttttacacgggtttacaaactgatttgacccgacatcttaagcttttcctaaacacaatggtaactaagtctttgccaacataattacctgccttgaagtgggggagaaatttatgggaaactta

SEQ ID NO: 48743 - DNA, 345 bp, Oryza sativa
  unsure (1)..(345): unsure at all n locations
accacttttaccagctagtgaaagcaagggttggaatgggtcccaccttttaacattcaaaatttaaacctagggggaaggtgattttttatattttttttaaaaaaaatatttaatggctaagtaaaaatgggaaagaacctataggccttgagttattactattcctaaacattactggtacatgaagttatcctactcccttcgttccataatataaaaaattatgaagtgttgctangattgcatgaccactcgtcatatacacaacatcttgttgatatggaccatcccacgttggctaaacaacacaagcgaccctagtttcatttcttttatataacc

SEQ ID NO: 48744 - DNA, 581 bp, Oryza sativa
agctttaattgatcaccacagtaaattttggcacctaacagtttgtttttttattgacaacatcatacaggtttctcatggaaatgcaacaatcctcagtctgcactttgacctcagcaaacaagtatagaacagtttatagtatgaaatgaaacatgtttacataactgcagcaagaaattaagtggatgctccaaaagatcaaacaacagtacaaattttcctaaaataaactacaggatttaccaaatgtaaaatacatcattgaatataaaaataaagcttagttagcactgatctagaaaaaagggaaactaatggaaaattctgtttgatgctaaggggatattgtgtgcatgctataacatattaaatgtatgacaggataaaaagatatgcgctgtgagttggtggaattcttcgcagacaatatcattagtaccttgcccaattctgcagacatgaaaaaaaggccatcaatttggcttctgttctagtgctttaatttctggacccttggtcacaggacaggtattataaaccaatgtatctgtagtgcacccttctctaaaattatcttt

SEQ ID NO: 48745 - DNA, 467 bp, Oryza sativa
  unsure (1)..(467): unsure at all n locations
ctcagcttgttagtgtgagctagctaggcttactgacctttttgcttaagctaataagctgctatagcttatacaagaagagagagaagtgctcgatgatcacgctgatgatacttcgatgtctaagtatgtggtatttataggagacccatagccacatatgtgcatgcattgaccacttcaaaagtatcaaacaaggattcagtttacatggttgtacataaattatgcatagtgtacaacgattccctgttagctgcgatagttttagcgtgttaatagctacatgtttgaacagtagctattttcattttttttatttttatcgtttaccttttagtttggtgttctattgctntccaatgtgaagctgaacgattgggaatttttgttagacacaaaatgttgtcacatgttggtgtatctcttttaggtgaatcagtactcttctttacacgccacacatg

SEQ ID NO: 48746 - DNA, 524 bp, Oryza sativa
ccccaaaggagccaaaaaaaaaaaaaaacccacacatgtttttcaaaagacggggaagaaggggaagggggaggaaaacggaacggaaagagagaaaaaaccaacaggagaggagcacacagaaagcaacagaacaaaaaacaacaagaaaaagagaccgagaagagggaagaccggaacgaaagcacaagaaaaaaaacgaagcggaccagcgagagaaaaagaagaggccaaacagagggaagggagagaacagcaaacaacagcaaggaggaacaaaaaaccaaaagacagaaaacgaaacacgaaaaaaaagagggaaaaaagaacaacaaaagcggggggagagagggcggaagatgacaaaacaaagggggaaagagagaaagagacaacaaaaaggaaaaacaaggaggacaccagcggagaaagaaaccggaaaagaaacaagaaaaagaagcacgcaaaggggagaaagggaagaagaaaacgaaaaggaagaaggagaagaaacgagaaaaaaa

SEQ ID NO: 48747 - DNA, 444 bp, Oryza sativa
  unsure (1)..(444): unsure at all n locations
actgatatggtactatattatttatagatttatggatattctgctatgtgtgtgtgtatatgggtgggctanctggaagtacttccttttgacagcttctcaactcaagcggcacgagcttcaccggagtagatgaaatgctactgtttgtctgagaaagaagaaaaaactatgggggctcgaggagtgtacttgaattgacaacacgcctgccggtacattttctgctggaaaagaggtttatttgacattatctctgagaaaaatggtcagatctgcttacacatactgtgtgaaggacatcaaagatctgtgcctaatttctgctgtcatgcgaattaatgcgcanatgaatcaactgactctcaacttttttgggaatgaatcggttccatgcctnctttaaatatgaaactgtcttttcaagattgtgtcccttgatat

SEQ ID NO: 48748 - DNA, 663 bp, Oryza sativa
agctttaaaaatagattaatatgatttttaaacaaatttcttgtatatttttttttaaaaaacataatgtttagtaatttgggaagcgtgcgcgtgaaaaatgatggagtataggttgggaaaggtgagtgccgaactcgaccttaacccggttataaatatttctaggctatacattatctctattattttaaatacacggtcatcattccctaccgctcgcagcgcgagaaaagctgtgttcagttctacgttaaaattaaaagtttgaagaaattggaacgatatgacagaaaagttagaagtttatatgtgtaggtaaggttgatgttaccaaaaaggtagaagtttgaagaaaaaaaattagaatttcaaaagagcccaaatcatgtaaaaaaccaaaccagcccaccttttctgactacgtggggaaaacccataaaagccaaacagacccaccctccctatttgagaaaatcccaagaaaaaaacaaaccgacccccccttccacccattttacttccaatttttttttttagaatttaccaggtcaacacaccacttacaacgcacgcgcctttattcctataaaaacccgcccgcaaactttacttcaaaactgggccggcaatcctggaaaaatggacaatccctttgggggt

SEQ ID NO: 48749 - DNA, 475 bp, Oryza sativa
  unsure (1)..(475): unsure at all n locations
tactcaagcttcagtgactgaactgtggaaatggactttaatctgtcaagtcatatttgtttttttacttgtagaggttaaattcaaacttgtatgttcgtgaagtgatattagtatgacatatcaatcttatcaattntttttctattttttctataattgcttaaatgacatgtaagaaatgaaggggcatcccctcaaatgtgaactctgtaactgaaaactggtttgtttgtgcacgtgtcagcggatggataagtgggatgaagttgttttctatccatttccttatgccaaatttgatgtgcctccaagtagcaaatgtgaattgcgtgatcgaaatgatgaaagaaactctgtaccgaactgtgtttgttcatgtgcatgttccctgcattatattctgtcgctgctgtttgtngttcgcctacagcgttaacattgactacacggccgagtggcaaactctataaat

SEQ ID NO: 48750 - DNA, 675 bp, Oryza sativa
agctttcagaaggttctaggccaattgatcagagtcaagggagcagcggatggccgccgcggtgctcatcagcctcactgccgatgttctccggtggtggccaccatagaagatccccttcttcctcctaccgcaggtagcgttctccgccgaccaatgccttatgatcgcgttctccaccaaccatgtcgtccgttgttgtggcggatccctccccctcctccggcagcggcgatgctagaatgaagctgccagggctagatctgagttgccctaactacgatgagcacagaggagaaattggagtggctagggaaaagataaagatgggacaaaggggctgacaagttggtcccataatttttttcttcacttacatatgaggcccacttctattttgtgatcgcgctaccacattagtataggtggactaagtcaacatgtcaaatcagcaaaaaccgctctcaaattagggagttaaattacaccagttcaatagttggggggggggggcaagaaattctttattgttgttcaaggatgcacatcacaataaaattattttggggggagttaaggggactatttccttatatggtacatttgggccaaagcttttaggccccccaacctaaggggctatttatttttcccataaaaagtggggcgaaaata

SEQ ID NO: 48751 - DNA, 434 bp, Oryza sativa
taaatgaatctacctaattgaaatgtctcacagatcaatattcatgatattgattataattagaatgagtttactacagggacagcgaatttcataacttgaggctagtagatggtagcttctcttgcactgaaaaatctctggtaaatatctgcaactgctccagctttgtccacatatcagacaagtgtcatatcgcctttcttcgagtgatttttctacatctttttcaagacagatatttgcatgtctgcaatcttcaaaactatgcagaatgaattgaggccgttgaagttcccatcatatctcgtcagcaaagcatacaacttgctgatagggaccatacgacgaatgaagaaattccaaatgctacactgctttcagttacattttcttaatttatatgatgaatgcaattactactactactatct

SEQ ID NO: 48752 - DNA, 645 bp, Oryza sativa
  unsure (1)..(645): unsure at all n locations
agcttaaagccatgaatcccttttatgcatatctggatctggatccttgttttttttacatataggatgagtagtatctgatataaatataatactcgagaaaaaatcatgtattttaaaatattgataaatatgtatttctcctcttgtcaattttgatttccccgagcagatgattcattacgtttaaacgctctgtccgactagtcatagcccccaagcaccgggagtcggcctaagcacttcccagacatgcatatgagtgacatgagttcgccattaatggaacaaagtttcacgaatcagaatatactactcgggtacttttgcaattattaagggcagaaaataaatttatctcatctctatgcttttgatttattccgaataatacttagcaccttgcgttactcggtccattcaacgagcccccgggtgctaggaatccggcccaaaggcaaccattcattggcaaacccaacgggaaagcataggaagatagaacttcataactcgattaggtccttttggactcagattatgtcnccaagcaatccagaataatattatgaaaatttgttaaaaaataccatataacatttttagcccccgaattactagttaacggggaaacaatttatggta

SEQ ID NO: 48753 - DNA, 372 bp, Oryza sativa
gtggtgaagagatacaacagtatggaaatcctcctgtgctctcacctgccaacaaaaacttaaagattgagttgacaaatgatagaatctatggccaaaccactgcttgtgtccaagataagtacaggaacaagagatctaattcagtagcaaaaactggctcatacaaatcccagtgggagatcatgaggagctttggcattgctgatggagagattgtggaatttaaaaacttcatcattggttaagctactttcctccgctggccatggaagatctcgaggattttgggctaaattgtgattggaggcgttcatttataaccactgatatgaatccattttatgatgcttatgtccaatggccaatgat

SEQ ID NO: 48754 - DNA, 666 bp, Oryza sativa
agcttacataagctactctacaataaggtttacataatatggaaatgttgattatgttactaatattgtgcaaatggttattgcttaattcagtaatcggtaacatagagtgcatacctgaattgtattcaggatataatcctgaatatggttggtgggtgggtgttgtctcagtactattcaaaatttcttgccctagtgtttcataggtgtcactgtagctatttctcgtgatcaatgtcaattattggtatgtgttattaccatgtttgtgccatcacttaaaatttgtttcatttatggcatgctaaaatgttcttgttttgttatgagaccaagaatagctaaattctatttgggtatgcaagactgagatagctgatattaatgcctgaaagttttgttgagttcaaatacttcagttagttaacaggaatttctgtttttgtttaggtgaccgtaaaagcaccttctaccagttgagggattttttcttttcttaggaatataatatctagagtgttatgtgacttaaatgtccattgtttgagacggacgatttgtgttaaacttactacatacaactcctgctttaaaatcaatcatcagtgaaccatgtgcatattcaattagatgcaaaatcccccatgactttttcttttactc

SEQ ID NO: 48755 - DNA, 474 bp, Oryza sativa
  unsure (1)..(474): unsure at all n locations
tccgcgatcatcgtcagcgatgcgcccgagggtttaattagtacactgacgacggatcatatatactatatgacagtcttccctgctaagctagctctgacttctgaagaagtttgagcatgtttaatgagtcaatcagttagttaattagtaactaattaactaatcaactagtcattgtaccatcaataaccctctatcatgtcgacccctangaatatgtactatttgtaattaagctgtgcaaattaagctgcagcgtaaccactctttagtcctttactcaagaatgtgtataaatcccctgtatgactagcagggcctgtcactcctgtaaaatgtaagataattaagaatcttaatatagctagtgatcaattcgttaactcaatattaaatgggtgccagcttcttcctgtaacttgtatgcatatatgtgtgcattctgtntagatatattacatgcatatatgt

SEQ ID NO: 48756 - DNA, 661 bp, Oryza sativa
agcttgcacctatcaaatacattagcagcataagcaaacatgcaaagtatttttttttttaagaagtaacatttcacaataaatgatgtaactgcagtttacataccaaacttcacaaaacctacagcatgaactgagagaaggataaaaattccctacatgctacaagtttcaagagcatagcgtaccctcattccaatttctgttgctccaggaataacctcgcttccaaagtcatttgcagcagggaaattttgacggagaagcttaagcatcacatctttgctaaaaacatagattcccatactagcaatgtaaggcaattcctttgccctctcagtatcaaggccaagtatggtagtgtcaacctgcaagatcaaaacatgcagacaatcactgaaatgtatgcttcaacagatcaggttgcatatggtctcaacggatgactcatcaattaccatcattgatttcaacttctctccttttggcttttctgcaaattcaatgatcctcccttcatcatcaatcttcataaggccaaatgctggaacacgttctttatccatgggcagcgcagcaacggttatatcaacatttgtttctctgggggccttaatgaacttttggaagtcattccggacaggggacctccaccaaaatg

SEQ ID NO: 48757 - DNA, 399 bp, Oryza sativa
  unsure (1)..(399): unsure at all n locations
gctacactactacatatgttattattctggacgccggcacctttttgttccaggtgggccataagtggctccgcctggaaccagacgaatgtcaaggtcgggctgtggnaannnntnnnacnanagattaccctttctccnatatcctccatacacttctcttattttccttgggccgttgtaaaacataacaccaattatagcaccacttatcctatgtttttttactctattttcgacgtttatattatttagcatagaaaccccttcctctttattactcctctctctctgttatttcaattcacttatgtctttgttgtcctcttttaatttatttgatctgtatgttatctgctacctcatccttttttctatttatctcttactccatcttac

SEQ ID NO: 48758 - DNA, 610 bp, Oryza sativa
agcttgcacctatcaaatacattagcagcataagcaaacatgcaaagtaaatatttattttttaagtaacatttcacaataaatgatgtaactgcagtttacataccaaacttcacaaaacctacagcatgaactgagagaaggataaaaattccctacatgctacaagtttcaagagcatagcgtaccctcattccaatttctgttgctccaggaataacctcgcttccaaaggcatttgcagcagggaaattttgacggagaagcttaagcatcacatctttgctaaaaacatatattcccatactagcaatgtaaggcaattcctttgccctctcagtatcaaggccaagtatggtagtgtcaacctgcaagatcaaaacatgcagacaatcactgaaatgtatgcttcaacagatcaggttgcatatggtctcaacggatgactcatcaattaccatcattgatttcaacttttctccttttggcttttctgcaaattcaatgatccctccttcatcattaatcttcttaaaggcaaatgctggaccccgttctttatccatgggcagggcaacaaccggtattttaactattgtttttttggggc

SEQ ID NO: 48759 - DNA, 303 bp, Oryza sativa
  unsure (1)..(303): unsure at all n locations
ctcagcttaattaaggaatttacaaagctacactactacatatgttattattctggacgccggcacctttttgttccaggtgggccataaatggcttcgcctggaaccagacgaatgtcatggtccggctgtgggnnnnnntantataanaantatttttttcattttacattaatattcttttcactttcttccacctcaatgtattcttcttctacttttcctcattacagtttttttatctttatactattactcttatatatttttcctcattttcttgtattctttagtatctctatt

SEQ ID NO: 48760 - DNA, 680 bp, Oryza sativa
agctttgacagttttgcaactatttttccaacatatgcattctggaaggtctcttttctggcaatctctctttggatatgtctgagggatcaacatggaagataaggcgtagtggtttctgtggaatgagatcaaagaaggtaaagtgatattgacttggtcattgctcaatatctgtagatgctattatgctgataaacccttatttctttctccgtttcagtttaatggtttcattgatcttgatgcatatgatactatagcgatgaaactcagaggggatggaagatgctacatatctactgtatgtatcctcatcctgagacagtattgaatgtgcgatatcaagttaatacgttgctatataatctgaatcttaattaaacagatatacacagagaactgggtgaattcacctggacaacaggaagataattcgtggcaagcctttgtgtacttaccccaggacagatggcaaatcatgaaggtaatttcaattccaaattgaaagatatggtttttgatgatacgaacacactttgcctttctttcaaatccctcttgattcgtatctacccacatgggaaaggaaatgtgatcaaacaaaaatggaaatgaaccctgctcgtgtgggggaatggctctatccgaaatgctgagggcgggtacctgggccaaaa

SEQ ID NO: 48761 - DNA, 305 bp, Oryza sativa
cccttatttaagctcctcaaacgcttcgggccgtttacttggaccgaggaagctgaacgtgcccttactcagttgaaggcgtatcttaactcttccccagttctggtcgccccggagcccaatgaacccttgttactctacttaacggcgaccccgcaagtggttaatgccgcgttggttgtggaacgcgatgaggacaattcttattccgcgcacccccaccctgtgcttgcttggcccgggagagaacaaggaggagagggcccctagccgaacagtgggccaagggccccgacgaccggaac

SEQ ID NO: 48762 - DNA, 559 bp, Oryza sativa
agcttcgcagaaccctcatcgacggcggcagtgcactcaatatcctctttgtttttattttggatgatatgcagattcctcgctccgagctaaaaccaagcaatgcgccttttcacggagtaattccaggattatccgcaactccactcggccagatcaccctcccggtcacttttggcactcgggaaaacttccgcacagagaatatcagctttgaagtcgccgatttcgagacaacataccatgccatactcggacgcccggcgttagccaagtttatggccgtcccgcactacacttacatgatgacgaagatgcctggtccccgaggagtcctatccctacggagcgacatcaagcaagccgtcacatgcgacaaggagagttgcgacatggcccacacccgcgagatggcgtcagcccgagaggatatccgactggctgcagccacggcgagcgaaggaaaagtgcccgctaccaaaatttcaaaaagtgggaaaaggcgaaccaagactaaaaagattcccttagatacttctgattctactaaaactggtgg

SEQ ID NO: 48763 - DNA, 472 bp, Oryza sativa
  unsure (1)..(472): unsure at all n locations
ntactgtgtgacaccttctaagatgcattgtaccaactcctaattagttgagtaactgcggtataaaaggattttaaggtattgggcacttgatcacgcgcactttggcctaagcaaaaagtgcctaagtccctaaaagaacgtgacaggccacacctgaaaatatgggctgcagacatattaggcctacgccaaaaaatatgccttcgacaccctttaaaggatgacgcatgtaacatgctcccgagtaataaatcttccgggtaatatagaccaagtgtagctcatatgaatagcttctgatctgaatgattatcccttatgggatactccanaataaatataataattgaatcccgactggcgcaagtattcgggtgatagcccttacagggaataataattggtccagtctttgagcatagaatatagactcatgactatgaatacatgtggaatgtatccggaacaa

SEQ ID NO: 48764 - DNA, 534 bp, Oryza sativa
agcttgtttgattgctaaatcctccatgggttggcaatggcatctttttcttttcctgttggaatgcccaatttggcaacttttctaaagggggaacacatcttcgggctcactaatgtcacatttgagaaaaatcgcgtgtgtagtgcttgccaagtcgggaaacaagttgggaatccatatcctatcaagaacatcatgactacaacacaccctcttgagcttctacatatggatttatttgggcccattgcttacataagtattggaggtaacaaatatgggtttgttattgttgatgacttttcccgcttcacttgggtgtattttctccatgataagagtgaggctcaagatgtcttcaagcacttcgccaagcaagcccaaaacctctatgatctcaccatcaagagggtgtgaagtgacaatttaagagaattcaagaacacttcagtggaggatttccttgatcaagagggaatcaagcacgagttcttcaccccctatgatcctccctaaaatgggattcgttga

SEQ ID NO: 48765 - DNA, 398 bp, Oryza sativa
gccatttgggaaaacgttggagcatgtcaagtgggataagttggttctcttgggaaatatagttcaaaggccaagttatcgaccctcgcatcgaatagcagtagtatctagcacccggagaccaagaaagctaatatgatgcagttaatgacaagttgtcaaacatggtatgctggataagcgtgatatcatagtccaaagcattcagtggtaagttagaagtaaatgacaaacatgatattctcatgatgacaagcatggtatcctagtaatgacaagctgatggcgacgcataacgtgaagtgggtaacttgtatgacgttgacgccaaagatatgaattataagaagttctggaactgaaaccccatcctcaactaccgcagcctagtacgagtc

SEQ ID NO: 48766 - DNA, 649 bp, Oryza sativa
  unsure (1)..(649): unsure at all n locations
agcttcttagttgtctaaatcaaccttatcagaaaaagcatattatacacatcntgtaagttggtcccttttgataacacaagctagtctttcaaaaaaaaaaaggggtggcttaactgaagatactggtatacaattttcattgacctggaccaaaccaataacaaatggtctgtgcaactaaatcatcttacgagaattgccattcagcagctaatattctggacttcgacgtaagtcactttacaggctttgtgggcaacaaatgcaaacaagcatgtcacaaacacccaataatgaatgcttgatttgaaaaatgaatgtaattctggtccattatgctcaggcgctacagaaatgactgctcagaacgaaccattttagatttcacaacggaatgctaaatccccgaattccacactcctaacaccatattctatccgataccgcgacacgagacggggagaaataaaagataggattaggttctattttaacactatcaggccaccccggattcaacaaaatttcattaaaatggaaggggacctcccttatctgtattctttatccccacaagcccctatataaccgcgtccattcataataatattcaaagcagtgttggatttccaaaccccctggggtg

SEQ ID NO: 48767 - DNA, 277 bp, Oryza sativa
  unsure (1)..(277): unsure at all n locations
acggggggttacccttaccccgattcccacgagacactgcttntacttgcctttggcgggtgaaagacagaacaccattagagcaccaatcacccaatgttattaactcttattccgaagtttcaaatgatttagaaagaaaccagttcctcattgatcactcagctctctagtgatcatttgaattcctactaatgttgcttgatattctactctaagttatatgtgagctggagggacaacatggatcttcattacatttcactagtaaatctat

SEQ ID NO: 48768 - DNA, 590 bp, Oryza sativa
agcttggtatacatgtataccaagtttgtgtacatacgtataaaacttattttttatacttatacaaactttatatacacgtatgtaaactttgcatatacgtatataaagtttgcatatgcatcgtttgtatatgcgtatacaaagtttgtatttatacatgtataacgtattaaaaaaaactaataatgatacggaaagaaaaacagaaaagcaacaaaacaaaaacagaaaccgtaaactacggaaagaaaaaacagaaaaagaaaataaaatcgcaaactacagatacggaaagaaaaacaggaaaaaaaaaagaaaccactcccaaaaaaaaataacgtgggggagggcgcgcgcgactggtcgcggattaactttctcgctcgcgacggcagcgccgcggctgcgtcggcacttcttggcaggtagggatgcaaatggatagccccgctacccgtataaaaaacccgtagctagtttattttccatataataggacaaaattttagagaaaatataaatagaagtgagataagcggggtaaaaaaaacccgcttacaccaccccggttggattccctaatgggc

SEQ ID NO: 48769 - DNA, 463 bp, Oryza sativa
agctttcttagggtgaggagctttagcaaaggcagatggcccaatggtgttttggttgacaagaagtggtagctttcaagatttacctgtaagagattaaccaagttatctggacacacccaatcaggaaaatcttgttcctggaagaatttgatggtgagttcctgtatgtttgggtgtgggtgcagtccttcaagtgcaaacttgggcactcttttcccttcgatcaccaaggcacccacatgtttcttgtccatcaatctagcttccatcgcttcatccttacttctgatattctcgataccacggatgcacagcctccccgtgaactccctcatgttctttaactctcttatcatgaatccttgtccctttcgtgcaatgaagctctccaactcttgaagttcagtttgctgtccaatactttgaatcttggacaatgctgaaccatttacatacaaat

SEQ ID NO: 48770 - DNA, 465 bp, Oryza sativa
  unsure (1)..(465): unsure at all n locations
tggatcaaacctgggtagaaacacactgctgtcggtctttcatgtcatcatttacttgtttcagtgagcaggaacatcctgtaattcaatcatgccaactccattacgtgctgtccctgtgagtacaaacggagcataatgcagcatgttatttcttgcatattgacatcgatgtaagggagtttgtaacataattttctagaccacatactttcatactttgagatattttttggcccattatgctaactagtcccataggcatgcctggtactacatcctaaacagcttaacataaactccaatagcattgcacaaatggaagcatatatccgtgatgtgctagtagtgagaaggtgaaacaaaactgctgaataatnntgttatataagcagaagtatgaaatcagctagattaatcaatttccacgagctgtcaaagtgaacctcacttcatgttaaatat

SEQ ID NO: 48771 - DNA, 665 bp, Oryza sativa
  unsure (1)..(665): unsure at all n locations
agcttcctttantagattgattttcttaaccgaatatagcatgtttttttttattggcgacttgataactcccatcggctaattccgagatgttgcaaccgataatgattctaagccaatgacgtctttgccgattaccaaatttcactgttaagaatgatatggcttaataagagaagaaaagaagagagataatttgaaccatagattaagcatctaaggagaaaagaaaaataacatgaactaagtgaggatgaactatataggcatataggatattataaaaaatgatggaaatatatattgacatatcatgtgaattatattggatgatttaacatgcttacatttttaaatctttaaaatttaataaattattaaattatagataatatagcatgcttggatgatgcttaaatgttataattgttaatggatgatgatgtggcatctttttatattaagctttaaaattactgggggattataaccttccggtaaaagagaaggaaataaaacggtttatcagagaaaaacaattaatttaagggtaaaattttatattttccgtaataatcatttaaaagcccacgttaaaaaaattcggtggaaaatttttaaaattaatttaaaaataaaaattgggtttttactttacctattag

SEQ ID NO: 48772 - DNA, 640 bp, Oryza sativa
atctcgcgctggtactatcagaggataagttcaggcactcgctttgtcttgttaacagcagcactgcacgcaggactggaagctcacaccagctgtgaccatcagagcgccgcatttgcctctaatgggtgagaccatcccatgaacaagggctttatctaccgctttgttcgaatctaccatagccggcccattctcaccaccctgagtggctgcctctcccaggctaggaaaatgctttcgttcgttaatagcggagcatcgcacaacacagggtgaggaccattctttctatcatgcctgactgttcttacattgcagcgatgtttcacagggaaacaccgcttctgtccggcaacctaaagcggtccattgattaaaccaccggggtgaaattttgtccggtcccttgcgtgctccattgggggagcataagacgttcgcgcaagtctttttttataaaaaaaaagtgtcttggctctatagaacgcgcgccatccaacaaggttgtccctcgggattcatttgaaaaaaaaaaccttaacgttggctcaaaaaaggggatgaaccacacaagggagacccccccgtgtggggattcttgtaggcccacttttgggcaaaagaagaaaaaaaaaag

SEQ ID NO: 48773 - DNA, 495 bp, Oryza sativa
tattacggacacttaaaactcagcttgcattatcgaaaaaaagtatgtaggtgagcatatgcattagtcttgaggcatctgacttgtgaacaagatgcgacataagtattgctcgtaaattctggagcttcacaatgtccttatgcctaaaatttagcagcttattcactgaagcgtcttttcttaaaacaactagagggtcacatttgacaaacattcgcgcaaatgtatcatgtatggcatctgtaacttccaacacacctataaaaactaattttgacaagcaaatgtcagtaagtagatttgaattactccaaagatcttgagctcctccctcatggacacaatatgtactatagtggtgaaccaatgacaggaaaaatgcacaatagtagaatgggaaatccccatagctttcaaaagcaacacagacaaattgtttggcaagtatcacaatgtgcacattgaagcagcataagctgctcactcacacca

SEQ ID NO: 48774 - DNA, 631 bp, Oryza sativa
  unsure (1)..(631): unsure at all n locations
agctttgttgaggattctacaaatagaattgttggtgagagcttaaacattatcgcactgagttttactatatgcaaaagaaaaaattcaagcaaacatgaaaagtattttgcaagtacttagacaagattgactcagctaacttaacatgcggtgactctacatcagtgataacgtgctgattcggttaagcacatacgaagtggggtggtttttcaataaaactaagtatggtaggatatttggaacaaaataacttatggattggaatgtcgaaattcaaacgacttatgtgaaggttttgcaattttccctttaattttggaaaatggaaatttacagggaaaaaaaaccacaagtcaatagaagttttaaattttatcccataagtcattttgttgtaaatgctcacctctatttattcatgttgcaaaaaccatccagtctgcacgtgcttaacaaaattaatatattttcataaatcgtgaaccatcaatttggtatttaccanaattaaatacttctagagtatagttttgagaactttgttttaggttccagaaataaaattgcttatgagagcttaaacgttggtgcactgatatgcccaaataatttaatgaaacatgaa

SEQ ID NO: 48775 - DNA, 477 bp, Oryza sativa
  unsure (1)..(477): unsure at all n locations
ntatctctngtttgttcnggctactgagtgcgtttacgcattagtattaccgaagatagcactgagacagcctgtaatgggaactctaactggaaaacttgattgaggtcagaccgcagtgtttggcacaaccatgacttgctgactgataagatcaagtggaccgtcgtgattgtgctattgtctttaaagaaattaaaaaaacataaaaataaaagttatgagaaaagtttaaaagctcatgttctatgttntgttatcatgttgatactctttatgaactgggcattagcacattatcatgggttcattgctttggttatgtaaatcttgcttgattatgagctggtttgcttccttttaagcttcttctagaaatagctntgcacactaaattactaattcacttgaaagcttnttgcttgctgccgatactatcttgatatccatgacatgtntcatacttcttatgcacat

SEQ ID NO: 48776 - DNA, 607 bp, Oryza sativa
agcttgcttagaaggagattttttatgactaaccacagtccattcagccttttttttttcagaccaaagatcaaactttacaggtaaaagatttaaggttatagatccagagaccaacttgcttagaacaaagcaggaaactgtagcatcttccagaaagatgggaaacatgaaaatcatggggggaacccccaatgcaagcccttaaagccaaagccacagaagaacaacagagccgaaaagaggactgagagaaatcaaccaccaaagcagaaggccgattggagtaaaaacgagagtagtgaaccggggaatggaacctgaaacgtgcttcatctctgatgcgatcaccaggagagaagtcccaacacccggaggagcaggagtcaccatcaccggcgatcaccacaaacacccactcgccgatcgccagctctgcaaaattcagaacctcatttcccccgttccttatagcccattgttattgattactggactttgccacctggttaataattggattagctagaacattatatggggtttagctaaattaattaggatacttaaccatggctaagaaatattagcacatggatgggaaaat

SEQ ID NO: 48777 - DNA, 479 bp, Oryza sativa
  unsure (1)..(479): unsure at all n locations
ntctagcacatagtatagagacttacatcctctgcgttagttctgtacctcccattaaccctaaggaattcgcacgcgtaatagccgcaaaggaccgttcctcacggttgcttgtgacacttcaagacatatcataaaaaaaaatagttaaattttgcaattagtgaaacaattggaatacattaagtgagtggagtattaccggccaataggtacgtattaacagcttctcccttgttcgggtctgttctccacccttgaacttgtagtactcgtacgcgctgtatggatgttgtaccgtttcacattaaggaggatatttatttataatacattcatataaaaatgcaagagtcataatcacttactactataagattngtagaaattctntgtattgcttgtgactgtaatcgagagggtccaagactaccacagatccgtctttatggtggatgagtaaacagatataatgatcg

SEQ ID NO: 48778 - DNA, 246 bp, Oryza sativa
cgcagcaacaacacaccgggacgacgaagaagggacaggcatggctcagacgaaaacacagacggacgggggcggaaggaacacccccacaccaaacacgcccagaaccccaagaaaaaaagaccacagaacaagaccaacccaaccggggacaacgaccagacccgacaaacgacgcggggggagcagcaaacaaaggcacggaaagcgtgagaaaacaagcggacaacgacaaaacaggagagg

SEQ ID NO: 48779 - DNA, 471 bp, Oryza sativa
  unsure (1)..(471): unsure at all n locations
ntacagtgagactgaaataatagctgatgctatataagccttctctgaacactactgactaaaaaatgagaacaatatcgactaaaggcatctaataaaagcaagtcatgatgtagtagcatgcatgcctggcaaaaccttccaatctgaatcattgaagtagggcatataaaatttctcttgaacagaatctggcgaggaagccaaaaggaactttcagtatccacttagagtctggacatatggcaagcccttggaccaaaacgcagcactttccagggcaccacgaaccgcgtcatcattccaaacagcagagtcagaattaagatagttcacattcctccgttcatgccaatacttgagggctcctattgacaagagaaaacaaatcaatccgaaaatcactgtacaaccaaatcttctatctacctacatagtggntctgggttcagtgctgcaatctctaccttc

SEQ ID NO: 48780 - DNA, 671 bp, Oryza sativa
agcttgtatcggcagcgttaccctgagtggtttgagagagttcctttcttttattgttcaaagttccggacttctccaaattttcaggacaagatggggtcaacttatgagcacattagccgatttttagctcagtgtggtgaagcatcggctgtggacgctctgagggttaggttgttccgggtatctttgtctggatcggcttttacttgggtttcttctttgccggatgggtcgatcaatagttgggccgatttggagaagcaattccacaactatttctacagtggggttcatgagatgaagttatctgacttgacggcgattaagcatcgacatgatgaacctgtgcacgagtatattcagagattcagggagattaggaacaagtgctttagcttgaatttaactgacgctcaattagccgatctggcctttcaaggtatggttgctccgattagggagaaattctcgtttgaagactttgatagcttggcacatctgatacaaaaggtaaccttgcatgaacataggtctggcgatgctaggaaaaacttctaaaaagttaaatcatgtttgtccttcctggatggggccgatgaagatgaggatgactctgaaatagctgcaccccaatgggggaggagtaaaagggtatactatggccatag

SEQ ID NO: 48781 - DNA, 350 bp, Oryza sativa
  unsure (1)..(350): unsure at all n locations
gcaaaccatcccgttgtcctggacgtttgcggtctgggggcttgacatggtccgcccatttaaaatgatagtctgcggttacacgcatctctttgtggctatcgacaaattctctcagtggattgaggctgaacaagtcatcacgatcacaacagataaagctagagatttttttcatcaacattgtgcatctggttgnggtacctaatcggatcattactgataatggcactcaattcactggcggagcacttatagacttttgtgaagacttctgcattaaaatttgttacgcctccgtgcacaccccatgntaacggacaagtcgaacgcgctaacggcataatact

SEQ ID NO: 48782 - DNA, 577 bp, Oryza sativa
agcttgaaagcgcgcacacaaacacacaacaaattgtatgtttgggcctatttttaagttagatacaacaaagatccaatcatacttctatactccttttgatcaacagcttcaccatcttcatcaggatccaacacagttgtagaaccaattggtgttgaaattggcttgcaattctccatcttgaaccgtctcaaaagatccttcgtatacttcgtttgatgcacaaaagtaccttgaggtgtttgcttaatttgtaatcccaaaaagtatgataactcacccatcatgctcatctcaaattctctgcgcatagtctcagcaaaatctacaaccaaagcgtgagttgaacaaccaaagataatatcatccacataaatctgaacgaacagttgattatcaccatacttaagaacaaaaagcgttttgtcaacctttcccattgtaaagcgcctgccgccgtcgccggtctgatcgcccgtatgacgccggtctgaccgccagtatattgccggttggaccgccgaaacttgatgaaacacaaatcaaagaactcttaagtggatgacaactttat

SEQ ID NO: 48783 - DNA, 254 bp, Oryza sativa
acttggatagtggagaatgaatcattccctcatttggacgggagaatttctcgagagaacatatgggataaattaaaaccctctctttatggaaaaaaccatataccctctacaaatgacttggggttgtagaacttattttcatacacgaaccccataagtcaatttctctttgaacctcccgccacatcctatgtgtatcgatgcctccctattgtttaagtttattatttcaactcttcatgcatcatatg

SEQ ID NO: 48784 - DNA, 615 bp, Oryza sativa
agctttaaatccatttcatctttcccaaattaaggttgagttcatctgtgctgtacgactgtggctactggtggcttgaaaaaggaacaaatcattcacatatgattaattgagtattaattgctatagatttaaaaaataaatttatttgattttttaaagaaacttttatatgcaatttttttttcacaaattgcgttgtttatagctatttaggaaacatatgctaagggaagatgagggagatgccgtccccaactacccatacgaactcagccatgtcgcttctcagttttgtttgccgtttctttttctttttcttttttttcctttttaactatatgttcaacaatatatagtgcagttctcagtggaatataatacattaagggcccctttgaatcgcagggtagaaaaaacggaggaataggaaaaacacaagattctgacaggaactaaagtggtaaacagaggattgcaaaacacagaaaaaaacacaggaacggtcgtttgattggagcgcaggataaacgcaggaatcggatgagagagacacactcaaaggaaattttccaagaagtgggaccttttgtaaattttcctcaaaaccacatg

SEQ ID NO: 48785 - DNA, 439 bp, Oryza sativa
  unsure (1)..(439): unsure at all n locations
atgaagtcactgccgcttttccattttcagaatcagtctctttttcttctctcttgtcagatacagccactggttcttccctcttccaaatcagagtcatttctgcctctcaaatcactctctgtttcttccctgttttcagattcaagatctggttcttccctcttttcagatgcagtctcttcactcttcaaacctgaactaccttcttgtgccatgtccttggtcaccatcacatatggctctgaagcaagagcagaattttcaggactccagaacaatggcatcttgatgtcatcttctctcatccttgcagcataatcatttatgttaaaagtagcctggtttttgccaccaaatgcagattctaattcttccatgttaaanaggtcttccatgatctatgtagtctcaggcctatctgggtatacaaatatga

SEQ ID NO: 48786 - DNA, 471 bp, Oryza sativa
agcttccttgctctttctagagctgtggtgatacctaagctaagttcattttttttacaaactaaaccataatctattcagcacacatttatgacagggaaatgcttccagcatataaagatgcctatgttatgtttggtctataatatgtcaaacatcatatgataaactctaggggcagtattaaataacagacgttcttgaagaatcacacaagcaacacagtagtgaaagtgtgaaaccgcaaccaaaagaattgtggatatcaaaattttaagtgtttacagagaattaaacggctgcgcttaagggcgtatgatgccaacagaagagtgacttaaaatcctcaatccaccagaaaacaacataacggtcctattgcattaccaaaattggaacgcaaagggtgttttactgcttaaaaaatagcaaatgtctcaagaaaactccacacttggtgagcataaatta

SEQ ID NO: 48787 - DNA, 419 bp, Oryza sativa
  unsure (1)..(419): unsure at all n locations
tactaatccaatttttctagaaaaaaagtcaatactttgttaaatatgtgttaatacactactttggtttcgtgcgtagagaatgagttatcaactactacaaacgaacgcaacctagtcatatatagaaaaattaatcaaaccaaaagcgaatatttacaggtgaaacttttatatttatgtaatttgtggtttaaatacaaaaccttaactgcaaaatttaaatttctactagttgataagcttacggacagacaatgacatgccattaacatctttcaatataaatcctgtaatgctaaataaaaagcanaaaagatattgctaggacaggactcagtatgtcagtcaacttcagccttatactttgtccatanacgactgaagatgttgactaaatgtgttatacatctgatgag

SEQ ID NO: 48788 - DNA, 527 bp, Oryza sativa
agctttgacgatacaggtatcacaaatgtgcagcgtgatctgtgccacttcatccaccatgagtgctgtcatgtcaaaggagatttcttcgacccagagggtgccctagcggcaagtgacgaattcaaggatcttcaggagtggaacactactatgccataatgtaactagatgacgttatttaaagtgacaatgtaaaacaatattgtaatatatatattttggcaacacttttgatttatgcaatataagtagatttctcagtaccaaatgcttgataatcttccaatatatgtacctgcaagaatttctaataaataatttaaaagtaatttacggccaaattatatttaaatttcaatattttctacatatcttcgcaggcggaagttttcttttttgcaagcggacgattcctattttcgcaggcggaccggactagccaatgtccacctgcgaaaattatcttcgcagacggacggccgccccgcctgcgaaaatcgcgatcttcacagtcggtggcttac

SEQ ID NO: 48789 - DNA, 434 bp, Oryza sativa
  unsure (1)..(434): unsure at all n locations
ctgtatactcctacaaatntatatgcagaagcatggcatttttgtgcctcgtatgtttatgtgccattatgttcacataactaagcctcactatattggtgtccatgtctactcttatatctccatcttacccttttcacttaaaattagtcactttttttaactaactgaccctaagtggttctggagaatacgtcaaacttgctcagagttttgccattcactaactgatgatatgcttattttctcttttgctccaatcagataaaaaaaagtaattatcacccagctcctatattttcttgatttgcacaaatgattctgaacattcccctagagtttccctataaaataccttggatagccactacttcttggaaggatgcgcaagacggatattcaaccaatcttcgataagatcgcagcacgggtca

SEQ ID NO: 48790 - DNA, 129 bp, Oryza sativa
tgttgaaatactctaccacgctgaaacccttgcacgcggcaatgtcctctgccggcggcgggatgtaccgcgggcgggaaagcttcgcgagcaaagaccacgcgactccggcgaagaacgggtgggcac

SEQ ID NO: 48791 - DNA, 302 bp, Oryza sativa
  unsure (1)..(302): unsure at all n locations
ctgacctcttattttaccttctcaggaatcaccagtcctaccagccatacatccatcttcacgttgatgcccatgttgtcaaccttgaacaccttgttaatagttagcttcacatacagcggacagtagaacatgggcatacctgttatgatacccttttgcaccaaattccacccgtagtgcgtcacaaacgtgtcngatgtaaggtggcaaaggacatccagctggggcacctgtgtattgatgaaatatccgtatatatcttctcctttagatatagaggtgagattnttattcactat

SEQ ID NO: 48792 - DNA, 666 bp, Oryza sativa
  unsure (1)..(666): unsure at all n locations
agcttgatcatgatccttttccggtgaacacaattaattntaatgtttttaaggtattgattcggccggagcaagccaaatctactaaggggaaaggagtgatcattggagagcctatgccaaagatgatggtaccaaaaaatcccgaggttggtgtttggaaggagaatatgagtggagctttgagttccaaagctcctaaaaaaactaaggtgaccttcgatatgcttttggacaagtatgagaagcaaagtggtgagaaggctcgcaataaaggaaaaagaccaagatttcctcctagggagcaatttggtcattcaccaagacggtcggaatcacattcatatcatcatccttatccaatgccggcgccggtttattcttatccttactacatgcgggggggggcaactattcaaccatatgccttcaatgcaattcaacccagtgtgggggaggaacaaaggaggccaatttattgaacgtttggctttaaccaaataattgccggttttaatgtaaagaaccggacccattgaagaaaaaaaagaaaaaaaagcgcgtcaaaatgggaaactaggttttcggaggtgattaccatcaaagtgaggtctgataatgtgccataccttttggaaagaaattggggagtttttaacaacaaat

SEQ ID NO: 48793 - DNA, 429 bp, Oryza sativa
tcccctgtgaatgatagcaatatgcagtcctatcacattatttcataaccaatcaaggatgatgcagtcaccagaacaatgccagctatatctctccagaatcagaataagtagccatgtttgtgattttcagttcgctacttatcactgtaatcggaagtttgcagcaatcatgtaataaataaatatattcatgattataaacaatgagtttgttatgtttatggaagattcatgttgaggatgcaatgtaccgatgctaagcacctttccttttaggcaaagcttagtattcatgtaatgagggagaaatgtgtaatacagacaagttctatgaggattctcttggaagatgcggataggtgattatgtgtataattgcttactgataaaggagacctacggtctcattccagaggaactatgttc

SEQ ID NO: 48794 - DNA, 659 bp, Oryza sativa
agcttcgcaccattcggctgtttgtggttttatgatgcgatttgcatctattctgatgctgcactgctggttgtagccattattgttgtgcaaacaaaggtgaatcgatagacccccccccccccctcccaaggggccttttcttttctggtcctttccagcctctcaacactgtataggaagcagagttggcgatatcatatcacttgccttcacatgaatcttgctaggcatttttttttttttggaattcatcctggtttttttactgacgcaccaaatcggtcatttcgcacgatgatgaactttcggatcacatgctagcaaagtgacagtttattggcttggctaatctattctgcacacattcgattcactggaaccgaacagatgatgtcgatggattgtcattttggtccatctctgctgctctcatggtctggacgagggttgtacattctgcaagatgcagagaactgagacacgggtggccgcagcgagtgacccgtgcatgcaacccaactaaaatgctggttcggagagtttctaccgggctgtaactttttttaaaaatctttaacttccctttaaggtttaaattcttttctaaagtcttcagttactaggttttaaaaatatatttactggtactagggttt

SEQ ID NO: 48795 - DNA, 354 bp, Oryza sativa
tacaatgatggcactggatctctctcacaaggtgctctaagccattgacaatagggcccgtcgttttttatggaaagggagtgacaatgtctatggaggacactgcttgcgctctttggaacgaaagtggcgacccctgtctttagggggacgtgagaatcttaatctcggaacaccgagagcgctttgctcatgatatagtttcgctgcaacaacagactatctatccttgtgcggttgtacatcaatggccctaaatgtcctctttttgtgctgtgcagaatatcctggaatggaaactctaccttggctacataagtgcacgaaaacatgctactacccataccttcccta

SEQ ID NO: 48796 - DNA, 681 bp, Oryza sativa
  unsure (1)..(681): unsure at all n locations
agcttgaaaaccatccaacttttaaaacaggttttagctttgactgaattctttatttgctttacattttctctggttacgttggtagacctttttaagttaagtgacagtttcatcccaaagtaattaaatctctccctcaacgaaaatttaagaaaatattgtagaaaatgtatgtataagtaagggttatatatgcgtggatagtctctcagttcattatcatctttaccgagacactccacatttaggaactacttgataaaacggctatttattataaaaataaaaaataacaagaattgttcaagttggtacccactcggttaccataatatcgatgatcgaaatatagactgttataagaaattgtttatatcaacggtctcctgtataattttaaacagacctaaagagagtcctaaggtatatcatattgctgactggcagatttatcgctgtcgaagtatcaatcacctactttcctgtgtgtgatctctttactaatgaccacncgccccttcccccccccccccaatttgaacttgtcacccattccacttgctgctggcacacatgcctaaattacacgcttagctaaagctagggaaatctttttggtcgtccttttttggagcccgcacagggaaatttaggactaaatccgaccatgatgatgtg

SEQ ID NO: 48797 - DNA, 486 bp, Oryza sativa
  unsure (1)..(486): unsure at all n locations
tactcaagcttgagtggctattattccttacaagagcacagtttgattccttgtttacagtggccgagtggcggaccgtcttttagctaaccaaacatatttttaatggagcgggtaagtccatatatgttacgccacttaactatcagatttgtgtaaaaaaataactactcacctataaaattggtcattttacacccctcttggctattgaaatcaaaacataattaaccccccgcccccaaagataataatacaaccaaattacgatagcagttttcatcattttgacattgaaatatatacatatatatttacttgaatctaactatnttttacatctcttactaatttggtacaatacaagtaaaagctatattatttggatttcaaagccataaaaccaccattaaaaccaactntgctcgcccttatggnggtatnntgtctgaatntgatagttgggagtgtaaaatatatgggttc

SEQ ID NO: 48798 - DNA, 480 bp, Oryza sativa
agcttctctattgtaggattcagtattgatttgtagttagtgggatttctttttctttcaaacaactaaaagttataatttgtattttcctcaatatttttcttttgaaatgcccttgaacagaaaaaggatgcccctgctggcgagaagccagagccagtgaggacccacctccgcaacatgatcattgtccctgagatgatcggaagcatcgtcggtgtctacaatggcaagacctttaaccaggttgagattaaacctgagatgattggtcactaccttgcggagttctccatctcctacaagccgggtaagcacggtaagcccggtattggtgccacccactcctctcgggtcatccctctcaaatgagtcatgcagcttttagccattcagaatcagaattcagtgttagcgcccatggcttgtcctttcagtatcactttggttttgagcaagttatataccttaaggcatttt

SEQ ID NO: 48799 - DNA, 469 bp, Oryza sativa
  unsure (1)..(469): unsure at all n locations
tagctctctaaatcgcttaatagcaacagcgcgaacaagcttctttctatacccgcaccagaaagggaatagccatccaacaaggcatatgcattgttcatcagcacgattctggaagaatcaggatccaatggcttcttcatcttacgaaacggcgtangaatgaattcaagctcaaatgtagatatctccgctttcgtctgcagcgccatcgggcaccaccaatgccaaaattcagctcaaggtcgagtgccactctccactctctactaatgcaattctcatttcttacctcttcttaagatcgaaccccaaaatgcgcctaanatcctagcatgaatatcaatccttcaattggatagtgctactctacgcggtggtgggacgatngngatatatgctaccaaaacctaatcaaaatggggcaaaatcctcacctccatgcagcgaccaatcctgatcttagaga

SEQ ID NO: 48800 - DNA, 658 bp, Oryza sativa
  unsure (1)..(658): unsure at all n locations
agctttcttctcctggaacatcctaacctgtttcttttggttccccagatttttttttttttttgttncccaaagaacgtccctaagcatggacattgcgtgcctcattttcaaccaaattgatctccatctgaacaaacctaacatttacacttattttattaggggaaaataatttttcccaaaaatcctgattttcaccaatatggacacttcccatatttataaaacactaacctctaataaaggaagggccctcctctacatattctgcaatcctatattaaattgattcgaccaatataagaaggcattgcagatatttctttccttaagggtcacaagtataaaactggattggggcctacccactgttaaccatgtcttactaaaaattgaaactttcatagggggccagggcttctgcctcccgaaaccagaaggtgtgaaaaaaactaggggccatgcttattttgctcttccggtgaagggaaaataaattaaccaaattaacacatggtctgtttggtttgatcaagactatttttcataaccccctaaaaatcggcttattttcttattgaaccagtgtccacaaaaaggtcacccaattctcaactttggatactattactggtctacagagtaaaattcttga

SEQ ID NO: 48801 - DNA, 452 bp, Oryza sativa
  unsure (1)..(452): unsure at all n locations
ctcgaattccaacttcatattatctagaattaaaatctaaccaaccgggttcaactcgttttaatgaaaggtaaaacgatatttagatttcgttactcgatatatattttagagttgaaatcctaaacaatcaggagctccggtttgtttggcaactcaaaggaagggaattgtgagtttatacgagggaattgatggtgagattaaaatggaaatttgatttttaatcccaatatcttgtttggtagacgtggtgaaaattgatagggagtttagttggagattatgtcattaatgaaaacggatggctgagatttgtttagacaaaataaacgaggaatttcctcacaattatcgcccctacccacgtattaaaaagtagggaggttctccctcaattctccattccncatcccaccaaaatttccatgtattctaatcaaataaaacca

SEQ ID NO: 48802 - DNA, 523 bp, Oryza sativa
agcttgcagcacgcaggcatgtgcgtagtgcatacatacatttgttttatttattagctgatgatttttccatgaaatttgatgttttactagtaggagatttaaaagttggcaatatatatccgtcccactctgctgaagggagtagaccggcgaacaggggaagctgcgaaaaccgaaaagtgcacgagcccgagtcgggatttttcggccgcggttgggcctaaaccacggtagcctggctggatgacggcccatcaaccttctggcccaagagagttcgggcccatgttacgatgccacgacggaactggggatgaataagtctattctgtcttcctcatgtcttgccaccggttgaatcgtgcccctaaatcgcaaaggaaaaagtacaccgaaggtccctcaactttgcatcgagttacaaaatcgtcccccaactgcaaaaccagatttataacctccttcaacttacaaaaccgtttactttaagtcttttggtggcactgacccaattttgtct

SEQ ID NO: 48803 - DNA, 470 bp, Oryza sativa
tactactagtactactcatacctgcactgtacttatcgtattcgtaggagtttgtctaaagagaagagaacaaacgtcttgtcagagttggtgattatctaagagcaaggctaatagtgaaagtagcagtcggcggtagtatttatccaggtcatctaaagttaatactatatattgtttatataaaagattggctctagattggctttacggaaacaagaataggtttaattgttgcatgtacaggtgatcaaaactaaactccatctctgtagcccatcctgcttcagcatgaaactaaactatacttggaaccacacactatgcatatgcacataagatcaagtagctgaactatagacccacaaagtgaataaaatatatcatcttggcctaattaccgtgctatcgtccggcgcttgcagaagcgctcgcttcgctctctctcatgctatctctcttctctacgt

SEQ ID NO: 48804 - DNA, 533 bp, Oryza sativa
agcttgagcaaagctcaaacttagtagtgggaactggctttgtcatcatatcttctgggttatcatgagtacttatcttgcataccttgacatcaccttcagcaattacacctcgaataaagtgatatcttacatcaatgtgttttgttctctcatggaacatttgatcctttgtaaggcatattgcactttgactatcacaaaatatattaatgcaagacgtaactccacaaagatcagtgtacaaacctctaagccaaatagcttttttacaaccttcagaaatagccatatactctacttcagtagtagataagacaacagttgcttgcaaacttgccttccaaataacagcatatcctccaatagtgaaaacataacctgtgagcgatcttctcctatccaaatctccagcaaaatctgaatccacataaccaacaagtccatctctagatctcccaaactgtaaacaagcactagatataccacataggtatctgaaaatccattgaacaactttccaatgcttttta

SEQ ID NO: 48805 - DNA, 663 bp, Oryza sativa
agcttgtaacaagttctgactctcctcaggaggtcgaagctggcaattatttcatattcacctatgatgttcactttgaggtactagttttgcatgttttgtttggattctgtttcccccttcatgtgatagttgcctattctcttaatgttaaatttattgcaatgatttccattgaatctttttccctcattgcaggagagtgacatcaagtgggcttcccgttgggacacctatctgttgatgactgatgatcagattcactggttttctattgtcaactctctcatgatcgtgcttttcctgtctggtatggtcgcaatgataatgcttcgcactctatatagagatatctctagatacaaccaacttgaaactcaagaagaagcgcaagaggaaactggctggaagcttgttcatggagatgtgttccgccccccaaccaactctgatttactcttgcgttatgtttgtactggtgtccaattctttggcatgctgctggttacgatgaattttgcagtctgggttcctttctccatcaaatcggggaagattgatgaccgcgatgcttcttgtctggggcttgagggggttgcttgcttggtatgctttttcacgcctttacaaaatgttaaagggttcagaatggaagagaaatac

SEQ ID NO: 48806 - DNA, 392 bp, Oryza sativa
  unsure (1)..(392): unsure at all n locations
atttgggttcccttgaatgaattgggctaagatcatttccttctgaattggttaactttctgaatcttactgtgtaccaattcaaaattttgacaactcccaatttctcattctaatattgattgctccaatttcaaatttgttcatcaactgtatgtggttccttcattcacattcatgtacgtgttctttcagagatcaagtgatgggtggggaatctacaggaaacacgacctccattccccaatgggagaagccactggtcccctcagtatccatgttactctgagctactgagctctctgctaagttggtgcctcagctgtgtatcttgcagcangagtgttctagccttctatgctgccaagatgaagtccaatgcggttacctcc

SEQ ID NO: 48807 - DNA, 556 bp, Oryza sativa
agcttgttactgttttttttttgtcagttcaaaataacgctgatcaatttgtttttgtatacgggcggtagcttaattgggccattgatgtactccctcttgttctgttctatattaattgacgttttggataaaggtgaggttaaacttttataactttgaccaccaataactttaaaaatatttagttttaaaaatatttagtttaaagaaactagaaaaacatatatagatttgtctttcaaaacactataataaaagtaacatgcatttatttattggatatattataatagaaaaataagggtaaaggtatatcttatagagcgtggcattatccaaagccgtaattaaaatgaaatcggagggaacagtaattaacaagcgcgattggttaattaattgcatgagtggggcattcgttaattaaggggtataaaatttggaataattctaagctggaggaagctggtttccccctgtcccttgtttatctcaaaaacagcataattgggtttgaaatggatatttcggaaacgaattttaatgcctccgt

SEQ ID NO: 48808 - DNA, 454 bp, Oryza sativa
tagcttagctatctatatactccatctatctcataatatttctatctattactgaataggatatttcatagtacaacgaatcccgacaggaggatgtctaaattcattgtgctatgaaatatcatatccgatactatattgctatattataagacggacgaagtatgtgagtaaaaaaaggcaggttttcgtgaaaaccatacttcttgaactggttcgatagcacaaacaaacagattttccatcgagtaccaaaaattaaaactgcttttcataattttgataaaatctgaccgggttttatcagcagtcaatggctctcgcgaaaattgaaaaaaaacaccaattcttttttttgaaacagtttggtgaacaccggtactatcaaagatgagagtacgacagattgtggtgatcgttcgtggacgtggatggggatcaccggttgtctctt

SEQ ID NO: 48809 - DNA, 615 bp, Oryza sativa
agcttaatcgattactattgggtgtgtgggattcataacacctgacagtatttttttctttctttaatgtaaatgaacgagttaagggtctcgatcgaagactttggaacaactattgttgtgctcgcttgaccattctcggggtgaacagaaataacgctagattcttcttatcgggctttggaagcaccatattggggttggctaaggcaatcttctatgttgaccgaaaaggtaccgagcatgtgactaagtctcccgtcttgccgtaatcgagaatttggattgaaatcaagaaatctcgtctcggcggggacactatcgcttcattccatattccttggcaagccccattaaccgttctcgagtaatcgagtaagcgtagagtctgcgacaaaacccggaaatctgacttgattggtctgatgcctgattttccctggaaacaatactcaaaacatttggcggactcgcttaatcatgccggggtagaacggaaaaacagggagccttcaataatgttgaataaaactcccccgacgagcgctcaagggtaacatgatttaatatgtatggaaaaattgaaaataaattgatcttggggggacaataaaa

SEQ ID NO: 48810 - DNA, 461 bp, Oryza sativa
  unsure (1)..(461): unsure at all n locations
tgccatagtgtacaacaattcacttgtatgagtgtgaccatattatgtgagttgtggctagatttattnttacggacattgtagcaagttgaccttatgcaagttgcagttttggttatgattattaagctcatgtttgacagtcctgttttaaattcttctatttgatagcatctctggaactaatgtttagcattttatgatgtgtcataatgactttaacctgtcgtgtacaggtaaaagaggaaaaggttaaaatcttggtagaattagcaaaacttaaagaagaatatctgatgttgaaagggtaagccgcttcagtgcttcttttgtcactggtacttaaccccatgatgttgatccataatagtacaaattcttataactgtgatatcctttttgctgatacagaaattcaacaccaaaggatggtcatggnggctgtgataatatganaatca

SEQ ID NO: 48811 - DNA, 521 bp, Oryza sativa
agcttggcatacaattgatgttcccgcaactttcccaacaccatattgtttatgtgctgatgggcttcctctgattgtgagtatatcagaaagtcatcaatgaaaaccacaacaaacttatcccaggattccatgaacactttggtcattaaaatcatgaaaaaagcacgtgcatttgtttaaccgaaccacatcaccgggaatttatacaggccgtatctcgtggtgaacgcggtcttaaggatatctttctcaccgatacctaattggtgatatccggaacgaagaataattttggagaatacaatgggacctttaaactgatcgaacagatcatctatccggggaagaagggacttgctttttatggggactttattgagagctttggtttcaacacacatcctcttccgtttgattttttttctcacaaaaaatacaggagccccctcagggggaaatactccggacgtttatacccttttttttttaaatttttcaaaatggttttttgaatttgg

SEQ ID NO: 48812 - DNA, 349 bp, Oryza sativa
  unsure (1)..(349): unsure at all n locations
gaatacacagagacgggccacgggtcgaccgaagcagatcccgtgtgttaaccgaggcgaatggccgacaaaccgactccactagacaccacacagcctgcacacgtggaaaccacgccgctaccgagcgggcacactaacacggacactacacggtcaccacccgcacgcgtgaacgactaccgacaccggtacatgggtaccagggccgacaaccgcacaacgagcacgggcgacaccgaaaggaccaggactgtgcancgagggagagggatccttaccaccacgcgacgaggcgcgggaacgacaacgacgaacgggcgcggcggagacagacgggcacaacgga

SEQ ID NO: 48813 - DNA, 662 bp, Oryza sativa
acaaatgatgtttccgcaacttttcccacaccttacttttattttgctgagggctctctctgagtgtgagaatattcaaaaagggcgtctaatgagaaacccaccacaaaactttttcccagtattttcttgaacactttgttcattaagttcatgaaaaaaggccgtgcattggttaaaccgaacgacattaccgtgaattcatacaacccgtattgcgtggggaacgccggcttataggatatctttcttacggatacctaattggtgatatacggaacgaaaataaatcttggagaatacaggggcaccttttaactgatccaacaaataatctatcccgggaagaagggacttggttttgatggggacctcattgagagctctggaatcaaagcacatcccttttggtttgtttttctttccaccaaaaatacaagaaccccccaaggggaagtacttggacgcttttaccctttttttttaactttctcaactgtgtcttgacatctgcgcaactaattagctgtcatacagtaaggtgccctttgcaaaagaatgggtttctggacaaaaaattattccggactctaatctcttgttggggaagcccaccaatggacccaaatatagggttaatccttaaaactggttaaaaccac

SEQ ID NO: 48814 - DNA, 412 bp, Oryza sativa
  unsure (1)..(412): unsure at all n locations
tgcaactataaaacatgtggaagcgctagccttttttatattgaaagctgcgctgctgacatgcggacctcacatgtcaacctaaaggaccgcggtagaccgagtacacagagacggtccacgggtcgacggaagcagatcccgtgtgtcaaccgaggcgagtggccgacaaacggactccactagacaccacacagcctgcacacgtggaaaccacgcggctaccgagcgggcacactaacactgacactacacggtcaccacccgcacgcgtgaacgactaccgacaccggtacatgggtaccagggccgacaaccgcacaacgagcactggcgacaccgaaaggacgatgacngtgcatctagggagagggatccttaccaccacgcgacgaggcgcgggaacgacaac

SEQ ID NO: 48815 - DNA, 516 bp, Oryza sativa
agcttggatgaattcagaaacaaagttgtgatctttaggcattctccctctgatgagtaccatcagaatgacaccaaagctgtacacgaaactttcgttctttgcaatcccggtttgcatgtaaaccgggtcattgcagcgagtcatcctcaatacaggaacgatatgatccttgtccttggtaatgcttctcgaggaaagaaagcatgaaaccattggcatgaaattttcatccaacagtacatcgtaaggtgtgagaggtccatgtacgatgcctccaactgttgaagaatggatgtgtgccagtgcttctgaagtctcagatgcaatcttcaggcgtaatggtagcgagaaatatccaggctgatgatgtacaatgtcagagagaactcccttagcagtgtactcatgcactaaaattggaatattagccttcaagcaacagccccaacagttgaccatgttcttgtgggagatgtgagacaagaacatcatttccatgagaaaacaattttt

SEQ ID NO: 48816 - DNA, 635 bp, Oryza sativa
tgcatgcatgcaagcttggataaatttacaacaactctgtgattgtgatggttgtggaacgaatttttattttctagcacgccttgggtgggtttggaaacgccttgtgatggtgtggatagggacctcttcgccggctcaacaaaaataactgtgggcgatgggaatacaacccgcttctgggactccgcatggattaatggccgaagaccaaaagacctaatgccggtggtctatgagatctccaaaaataggaagaaatccctacggcaatggaaaaaagacaactcctgggtgcatgacctgaccctcgatgccggttcatctatcacaatcaacctccttgatcagctagtccgcctgtgggaggcggtacggaatgtgcacttagacagcgaggagccggatcagaatgtttggaaattcacaagcagcgggcactatacagctttctcgggtaatatgcccaatgtttgggggccccaaacacaaacttcaattccctaatctggaaagtttgggccgccaggggaaatgtaaattttcatgcctgggctcataattcaagatagagtcttggacgtcgcgaccgacttccgacaaggggcttgcgggataaccgacaatgcccccct

SEQ ID NO: 48817 - DNA, 450 bp, Oryza sativa
agcttgtttctgcacaccttatttttgtcaagtcaacgacgattttccatatatcttttcttggatgagactagtacttgtgcttgcttgcttttggtgcaaaactgcaatctctaatcttcctctaatgatgttaaactgagaggcaacaacagcagtactaaaagcaggtgcaataggaggcgctacaccggcgctaaaacaaccacgtaaactacaacgatgagcttgcggaaaaaaagtatgagaaagaatatgagtggacgactaaatagtcgctcagctacacacgcgtttcaagatggtgaaaggctcacggacaaatcagaggaaacaagaagaaagagaacccgataaatgaggaataaaatattggttgcattagctaatgttaaagcctgtttattatacaaattaactactctgttagttataaatgatgtggataaa

SEQ ID NO: 48818 - DNA, 463 bp, Oryza sativa
  unsure (1)..(463): unsure at all n locations
tcatttagtagatcaatctccttaaccgaatatagcaagttttttctactgacgacttgacaactctcatcggctaatctcagaacttcaaagccgatgactactccggacttaccaaatttcactgttaacaccgggcgacaaaaaatatatggcacgtaaaaaaatccttaccgcatgcgaaaaaatgcgactaaaaaaacataaacaaagaataaaagtatgaaaaaaaacccagtaaaaaggcctagaaaaaagtaaaaaaactgtggatgaaaaaaagagaaaaaaggtgaagaaaaaaaggcggacgaaaaaaacaatggatggaaaaaaacagataanaaataaaaaaaataaaaaggttcagaaggacggaaataaagaaaaaaaggacggataataaagaatataatagaagcggacagaaagaaaaaaaggactgagatnaaaggaaatgata

SEQ ID NO: 48819 - DNA, 56 bp, Oryza sativa
agcttgaatgctacatatcgatggctggatagggtggggtactcggggttttattt

SEQ ID NO: 48820 - DNA, 562 bp, Oryza sativa
agcttcaaacattcaggccagtttctggcttaaaatagatctgggcgtctttgtttttcgtgaattcatagagagatcaaccaggaaagctgaatccaaccacatgaaatgatgaattcgcctcgtgtctgaactctgaagcttcgcgtttctgaaaccgatcggtggccgacagtttcggcaacagacgaacctgcagctacagcatagcttccaggagggttggctgcttatgctttggtcgtctggaatgcatgatccaggaagcaaccgtgaccgtccgatggagatccaacgacgctggggtggttcgttgggcaatggccatcactggagccaactaaaaactcgtggtttttcttttgctgggctcggggtttacgggtatgaagcatgtgaaaggaattgaataccatttggagtgtaaggtgggtgatgacaagtacgtgaagttcatcacactcaccagattgagagaggggcagaaaatgcaagaacaatcatggggctccatgcacttggcttggatttttcaaattttccagcttggtcattgggagcc

SEQ ID NO: 48821 - DNA, 456 bp, Oryza sativa
  unsure (1)..(456): unsure at all n locations
aacttgatcctatggctccactctggtcttgtattatcatgtcatgtgcctctgtactttcaacacataactgaaagttatgcattattgttcaatctgtttgtcttgcatgatttgagaactcgttttcactcctcattntgactatatgatttcctattatgtgttcttgtctgatgtagttttatctgtgtgccttccatgatattagaaccgcttccgtgcttgattttgtgggggcagcttaaggtgtttctaatctgctataatttttatcatgcttatatagatggaaagtgcattgaagtccacataggaggcacaggacttgctccgcagtcaaactgatagtgcaagaacatcaatgctcaatgatgaagaattaagtcactgcaattccaggtgccattcttgtcgactccctcctcagaatatcgctatttctagtgcttaaat

SEQ ID NO: 48822 - DNA, 664 bp, Oryza sativa
  unsure (1)..(664): unsure at all n locations
agcttgatggagcaaagaccgattgatacttcatcggtcacgtgtgattttatttcggttacacctatgcctaagaccggaattgttagtaattctctccttattagtcctattgatgttgacaaaaagaaagggaaaagtgttattattggggatccttggcccaagaataggatcaataatgcaaaggccggagatcataaagttgcaaaggatgagttatctagtatccaaaggaccaaaaagccgaagctcacttttgagatgcttatggctaaatacaagaaaggattagccggtcaacgatttgataaccaaactagtgattcgaaaagaccaagatcatctcgtaggaagagatttggtcaaacatcaaagcaatcggagccatcaaccataccaactccatataaacctccggttgtgatgccatggtatccatatccaatgtcactatatggntatccttttatgtattacatgccttggatgcatcaaccacctatgcngtattaacaagagtggaaaggaatacctaagttagtgccaaaatattcattcaactcaagacaagaccgttccccaaaaaaatcgggccggtggatcaaaggtgaaaaaagtgaaaatgggtgggtgaagaaaaaacccaaacttcggaggcggt

SEQ ID NO: 48823 - DNA, 572 bp, Oryza sativa
agcttcgacgacgccatcgccggcgacggccgtagtagaggcagcaccttctttcgacgccgccccctcgccggagacgacgacgacgactgcgtcctcgccgccgccgcgcaccggcgccgcttcggccgcttggtcgtcgccgcagactcgggtgtccataccttgcttggcgccggcggcgaagtccgcggcggcggcggcgaaaattcgatcggcgaggagggagaaggggtcgtggcggttagggttttataaagggagagggaggaagttaagtcggttacaaatatatggagatcgacttggatatatagagtttggatatatttggattacttttctatctcttgtaaaaaagaggaattattagttaggagtactaggaacttaagagatatgatgcacatatgggttgcaacttgtagattaccttgggcaaagtgacttaccttttagggcctaaatgattacatatatatatatctctctatatggtgggtttgcaagattggagtggactagctatatctttatttccttttggaagaaaggggattagttaagatatg

SEQ ID NO: 48824 - DNA, 623 bp, Oryza sativa
agctttccatttccccatatgatacttgctcttattctcaacacctttttttttttttttgaactctacaagaggtcatgctcgggtgaataatggtgcggtaacaagtagacacccattggattcataggagatagaaggcagggaagaattcaccaagaatggtttccccccataagaaaggcggccacatttacatgtcgccagtctcttttcttatttataaggggagggtgcaaaaactggccctggcaatcttactgggcctatggggatccccaaatatttcattggaaacttccctctgtcacaaataaagtttctgctaatctttgggctttagcatcatctacttctatcacgaaaaacctccctcttttgggaaataattttcatgcctggcatcggctcgaagcataacagcaagaaacttccatgtagaaaggtttcttctggggtctgcaaaaaaaggaccgggccgcggcttattgcaagggagggagccctccaaggccaagggttggaacccctccctttaagggaacacattttcttggccagggcaaaaatttaaaaagggcggcgggcaaccaggtaaataacaagggggatttaggaacccc

SEQ ID NO: 48825 - DNA, 441 bp, Oryza sativa
gcttgaccgtcaaccggacgccatcgtgcatgcagctgtgttatattaaaacaaaacgtacacacacatgttagtctcttcctcgcagtgattttttactaagtacagtatattaacctacctgtgatcggtgcacgtacacgtttaacttcctcggttacgcgccgagcttaattagatatatatgagtttttttataataatctgggttacgatcggatagtcacaaggtcgtcgcacgggtcccgtcaaagagctgatacaaaattaggctatacaggacgcacctcttacatgcatgcatgcttgtgtacgtgctctcggcgacgaagctactacccaacaaagcgggtgctcgtcggtatgctcctgtatcttgcgcccgcccgtgcgtgtgcatgcggtcagccctcgcgtttcttcactgcacgcgcgcgggtg

SEQ ID NO: 48826 - DNA, 519 bp, Oryza sativa
agcttatggttaggaaacgacgaccggtggaggcggatccgatgattcttttttcttctagacagggaagacagcggggcgagggcactcgccaccgccggtttagggaagaaggccggcaccattgaccccttctggccagctgacgaggccgagtggcggtagcgtgagaggacgttgagagaaggagtaagaaggaaggggccggcttcacggttttggttgcctagcacgaatcttaaaataatcgaatggtatagaatttacaagattttgaggcaggtctttcaatcaaatgttgcgaacacaatcccatagaaaatgcccgagaaattagcgaccaaaggttctacacgttctattgatccaagagcttgagcaccattgggagcccgcacttgggctgaagcgtcaacaaatcgagcggcgcgtgcacgtactcccgtgagaacctcaaagcgaagcgcctgaggatcatgggcagcgtcctctttcgctccatcatcgcgaagtcctgcc

SEQ ID NO: 48827 - DNA, 445 bp, Oryza sativa
  unsure (1)..(445): unsure at all n locations
tatgcctttgatntgnttantattcttatattaatattatagtcttgtagaaaaacaaatgttttcgaaacataaaaagtattctttactactatctcaaattttaattaattattgctttagttctggcttaagtccaaatatgtttatctttgaacatcaactaatttatggaaaatcgtaataatttaccacacatgttgacagagctcggggctcctcaccgggagaccgcgcaggcccccctttgccagttcggccgggggcttanggtgagatctcaagctctcgctgtgtgtggaaagatcgcgtgccaggaagaaacgcgagacacggacgatgtatacaggttcgggccgctgggaagcgtaataccctactcctgtgtntttggtggatctgtgtaagagcaagtttcataaaatcaaccagccctctcctctct

SEQ ID NO: 48828 - DNA, 609 bp, Oryza sativa
agcttttacagcttaatttcctatttgttctgcagtgcactggcgcaacttttttttatcatttggaccaagcacaggccacatattcttttcaggggacgcaaggcaaaaatatgtgtaagctgggccttgacatgggcctggttttggcccaacttgatgggcctatggtggactgcaacatcgtcagggctggtaagttactattgagtacactacactatgttaattaaaggggacaccgaaaaaaaatgtaaggtttaagcttttagcacccaaagcataaatgaacgaaggcaagaagcaccattctacttttatcaattacttcctccgtttcacaatgtaagtcattctaacattttccatatttatattgattctaatagattcattagaatcaatatgaatgtgggaaatgctaaaatgacttacattctaaaacggtgggactacctagtactgtttagtaaacacaaagatttgggactaaagtgtattctgggacacgttcacaaatcaatatgccaacaaaagaaccaaacaaccatttctaagggctgacgtaatttcatctaaccctctccggacaagggggattgttggaaa

SEQ ID NO: 48829 - DNA, 506 bp, Oryza sativa
  unsure (1)..(506): unsure at all n locations
agcttcgaggcagaatgcctcgcctaagaacatctatgtatgcagatgtttcttccattttcgncaatcccacaagaggggatgtccaagcgctcacggaaatcctgcaacgtttcggtacggccactggactcgttaccaactttcaaaaatctcaagtcgcggccatcaaatgcaataacattgatttggacgacgtcctatagggagtcccaacagtgagagcatgcttctcgatcaaacctgggactccccctgatcctcgggcggatgcgaaaggcggacatgcaacacatctctgataagatcacagggcgtataataggatggagaggcaaaaacatgggacttgccgggaggtccacacttttaaaatcagtgcttacggcgcagccaatctacttactgaccgctctgaaaacttcaaaggaagccttggagtgcctagacaagcaacggcgacgttttctctaggctggcacgggggacatcacgggtgggaaaat

SEQ ID NO: 48830 - DNA, 439 bp, Oryza sativa
tgcgactacttcttactgagaataacggtaggtattataatctggattgcacatcttcaataccaaaccactggcactcaagatagagatttcagaatctgtgaccgcactcaatatttgtgaagacacaagtacacaacaggaagtgctcccaaaaggatcataccaacatttaaacgcatccaaaaactgtaccacacatctttactgacagtctaaaactacttctggtgatgagtatcattttcattaatttgaagcctacacaccacagacactgcaatatgtaaccaccaggcatgaacatcaagtggaattatactacactacacacaaacatacacaaacaagcctacacacacaatctgtagttctgtactatcaagcatgaacatagaactgtactactggttaaacacttgaatttcagaatgtcatt

SEQ ID NO: 48831 - DNA, 616 bp, Oryza sativa
agcttggaagaagagcaaggttgttttacaaatcccttatttgttttttatctttttatcacccagagactgatttgctttctaagcttggggccaaaagagacttgcgtatccattcgactttaagaaatgcttttcaacagctcatttagtaatgtgccgacctcccggggcagatcattacttctcggctcccagagccattccacttgattaatcggctcccagagcctttttcattttctcggactcccagagtccagctgcccagcaggcacaacaatccgctttcactcgggaagcctagtctatgatgcccgcagacctcccaaatcacaccgattcgtttctgaccactcatggtgcacatttgccacatacgctgaatcaggttactaattccacacaaccacaacttttcacagaggccaggccaaccaattttccgcaccgggaccccccttacattccgcccataacctggggcacgggttgtttgacacgttagttaaacctttgacgaggggtaccctctaccccccaagataacaactttattccgaacccccgtggttctcgggggttggaacaaagccttttccaagcgaaccagggt

SEQ ID NO: 48832 - DNA, 466 bp, Oryza sativa
actcaacttcgttatggtacgattctagaatggattctgcttggctgtcgaatttaaattcgatagtagatgaataagcattgatctcggcaccaaagtcgatagtgcaacatcctgtgccgttgcaatgctgcatatgagacaccatacccgtgctctcttctttatgacaggttgctgtgcagatgggagttgctttgttgattgatggacgatttaaccaataaacatcaaagtcacagccggagaaacgtagtccccacagcgtcaggtaaaaagcatcaagagaatgttcaagcaattttggagataacgaccagctcacaacggatgcatttctcatggagatggtatgagaaaagcgggtgctaacactgatatctgtgtccataaactctgtagaaacgatgttaatactaccagcaatctgcgtgataccatcgcggaagatgagtctcggagggct

SEQ ID NO: 48833 - DNA, 615 bp, Oryza sativa
agcttgcatgcatgcattttagtgatcttaaaaatgatttttcttctaaactacttatttaatctgtgatccgatcacactgttgtattcgttgtaattaaatttttacaataagatatatcacatgattatatttgatgaaataaaaacatatgtttaaatccgtttgctctagttgattcatagtacgtagtagtgatatgtttcaacgtgtatcttcactgtgttttataaaatgttgtagtgttccaattgctgaatttttttcaccatatataagttaatgtttcacttgtttgtcaactgtaacatttgactgttcgaaaaagtcgggcatccgatgggtagttttctcccaaaaatatacataaaccacaaactaagccatcttgaatgttaaaatattcttgtaattttttttgaacggaatattcttgtgaattgagtggtattaaaatgtgaaaagattgatttttgcataaaaaccaggtacctttttagcgtattttggctttcttcgatctctggcgcgacaagaaaaaaatggcaatgtcctgtagatttttaatgggggttcatttcaatggggttaatcactttgggcgctggcgggct

SEQ ID NO: 48834 - DNA, 416 bp, Oryza sativa
  unsure (1)..(416): unsure at all n locations
tggcctgatggcctccatccatctgcagatcgatcgatcttctctgcangcangccgtcctgacagtgtaggctcgctcgcgcgctctcccggcaagtcgatctcggcctatacaaatgtagtacaaattatcgggataaatggaccggaaaatcgaaccgaaacgtactctcggctcgtcgccaacgatcgagcagccgcgacgcgcccacttncaccgcgcagccgcacgcgagcaaaatcttctctccggcgctagctgtcgcgacgcggcggccggcgaatccgcctcgttgtctggctagcgcgcgccgatcgagacaaggcggccgctttgattcnggggagtgggtgattggaccctgtcgtctgcaatctgcatgcgtgttggtgggcacagccggtggcatacttac

SEQ ID NO: 48835 - DNA, 674 bp, Oryza sativa
agcttcggtggggttgttggaggaaatcaagcccatggtggtggagctatcttttttgaatccaaccataaacaaggcggtggtggagttgcgagaagatattggggacttgcgtcatcaaatgaatcagctctcaaaacagcaagccagtgctatcaagccagcggagcggccgccgctgcttcccacatcgccaggatctcgtccgctgccgaaggaagaagagacttgtccaagtcatggggacatgggtcacgggccgttaggccaccgcgcgggaatttcactccggggaaaagcgattggggagaatacctctccattgtctctcccgggcaagggtacatttactcctcaatttgcttctcgaaatggacgtgattttggggattcagtggggcggaattttgggggatttccttatggtggtgtgaatccgtgagtggactggcctcaatttgatagagagaatcctatagcatggaaaattgaaatgtgaaactttacttcaagtgagtggtattacaataagatgtgtgggtgggaattacccgccttggcgtttattagggggagatttgacttggttgccaactacaaatgctcccttaaatttaaaagttgggggaaattttggagggaatttgggctaaatccggcgcgaggggtttaaa

SEQ ID NO: 48836 - DNA, 418 bp, Oryza sativa
tgccacggagagcacgagtttcgtcaggcatcatgtctcaccacaaggaggcccaacaggccgacacaccctccgaagctttcgccaaaggccgggctgaaacactcaacccattataggcccatataagcaaaagacacaggatacccatggagatgtccctatcataaggctaaccatgtaaattcctctgtaaacccaagaccttaaaacggagagtctgtaataaggctataagtagccccctaggacaatgtaacaagggatcccaacaaaatttactatgcaatataattgtctttacttccaactacagttgagagatccacgcctttcgacgtgatgcagttgtccattcgacaacagctggcgccgtgtcacaccctgaagttctttctccaacctaaattgaatttat

SEQ ID NO: 48837 - DNA, 679 bp, Oryza sativa
agcttgatttcattcttgccaacatggcgatgtccttggcttggtgaccttttattttttgtgtcatccattagcctcatcatagtgggacctattccttttcacatctcaaaggagaacaatagtctcaacaaatcggttgtcatccttcacttgatgaccaaccggttgcatatgaaagatatggatatgtttgttgagttttcattaacatcacaagtgtcatatactcgtatgccaactcaagtgcaaagatccgatataaataataggtgaacaacatggatctggaacatgcacaataaatgtataggatttgctccccctaaatatatgcataccaataaatatacaagagatgtaagtgtatgcataattaaagaatgaccaatgggggtttatcctatacacatagagaaagcatatgtagtaatgatgtagaccaatttaaacatatcccttcatgatcttcatgttctccatgttaatgagacttaataagataagactcaagtaaacattagtctcacactatattttaataacatggaaatcttatttttaacctatcaaaaagtgggagataaaaagggtacctatcatttttatctccatgcatttatccttggcatgattaaggcccatcaaaaaaatgcaagtcttccccatttatttttgg

SEQ ID NO: 48838 - DNA, 472 bp, Oryza sativa
  unsure (1)..(472): unsure at all n locations
tgtgagttcatntccgccaaagcctataaatagagttgctgcatcttcacccgtgaaaactaataatgctccaaaagaacaatctgctaaaggtcaacagcaacgtctacctctatcatccagtccaaagaaaggaacaagtaataatgctgataacgatatttcctcggtcttggataaagccaccaatgctcctgttgtcaaagaaccatcaattgctctgcagggaaacaaaaacaacgctcagaatgggaaggcgctgcccaataatggtggatcacttgctacgatgtggggacgtgcatcagctaaacccaagactccagctaccactaatcctacagttttaccaacgtgttgctggtattgcatacaaacattcatgattcttttctttgttatattttcttgatgctaattcaaatgcatacctaatcatgtaaatcagatatgtcaagtaagcatacttctg

SEQ ID NO: 48839 - DNA, 553 bp, Oryza sativa
agcttaacaatggcgaagaagaagaatgaggtgtcgcgagggatggcggttctttttttgctaaagccgagagactggctgatgaggatgccgaggcccatggagatggccacgagcgaggcagcccatgtcagcttctccgtgatcctgggaaccctctccttgagcgcctccgtacaagagccgatcaggacggtgtagctgcccatggcgaccacggtgccgacgaggaacatgccaaggaacgccgcgccggcgacgcgcgacgggagggcgagcgccggcaggaccatcatgagcgcgtcgggctgcagcccgtgcacgatcccggtggcgaacgtggcgaaggtgatcttcttcctggtggctggtagagcatcgagcgggccacggtgcgcgccgccgccgccgtcgtcgttctccagcgcgacgcacggcgtgggcacctcggtggcctccctgatgccgagggcgccgatgacgagcagcgtgaggcccacgaccgcgggtcccccacgttccggatgacctctatggtggaggctgtcctttg

SEQ ID NO: 48840 - DNA, 403 bp, Oryza sativa
gaccttaaaactcagctgccgagtctcgggacagctcaagctccaagactttgttgtccggtgggaaacaagtctcgaccttgatgagatccattccctattcgggaagaaatcgacactgcctacctggcgcgccaactgtcgaactagttttcggaatatgaattgggggttgcgatagctcgaaagtgcgatgggacgacacaagctttagacggttcagccctcttctgagaggaatacctacgtctgttcgggattgtgtcgcggggtttgatgtggaaaagttatgcccttggggcgtctgcctcttattagcggagactagatacagaaatacctactatacgtcggattgatgctatgtcatagatagactcgctctagtataccttatctagat

SEQ ID NO: 48841 - DNA, 668 bp, Oryza sativa
agcttggaactgagcttgtaaggtcaaagatgcttctatggcggcgtgctgtgtttttacatgcttcgccggttgtacttgtgtcactgccggctgaacgggcatcgtgaaggtgtaaggggccggttgcactgtaacggtcggagcggctttggcaacgtacagcggagcttgatagacttgtccgtacatggccgaagccggcggagcatggggttgtgcaacatggccgaaaccttgggtggtgaccatcgctgtcgaaatcgggtggggggccgatggggctggcttgacttgttttgccgcttcataggcttgatgctgcagttgcatttggcgaagcatgtcttagaactttgtcatgttctgacacatcgtccccatctcggctttggcttgcacttcaaggtcgatgccttctagggtcatggaccccgcttgttgagtcgaagctgttgcttgctttttgatggggctgttcgagctgggccaacacaagtatggccaaaagggtgggagcggaagcagacctatccacctccttgccatgggtcatggagggtccggttgctttggcatggatggccacccccagccaatttgcaccacccaccatggataccttgtcgacccccccagtttaagcttattccatgacgtgcctcgtg

SEQ ID NO: 48842 - DNA, 477 bp, Oryza sativa
attacggacacttaaaactaagcttcgaggatcctatgcttactaccggatgggatgaatatttggcgctcagtaggtcttagttaccgtcgttgcctgtggcaatggcgtgccgctgccttaactccgctgtcttacctacttctgtttttggaatgtattccggaccacttggtccgatgatttaagactatgcctgcgggcttatgatgtaataattcgttctaaacactcgtgtatgtgcacttggtatttcagctatgaattcgtgtgtaccagactactttgatccaggaaatggtactgtttacacgattgatttctgttataaaaacgggggtccacacttacccaatcggtgcccaaccgtatcattacagataacgacacccagttcaccattgaacttttcggcgactattgcgacgacatgggcatcaagctgtgcgtttgctcgcctacccaccccaagagcaa

SEQ ID NO: 48843 - DNA, 669 bp, Oryza sativa
agcttggaactgagcttgtaaagtcaaagatgcttctatggcggcgttcttttcttcgacatgcttcgccggttgtacttgtgtcactgccggctgaacgggcatcgtgaaggtgtaaggggccggttgcactgtaacggtcggagcggctttggcaacgtacagcggagcttgatagacttgtccgtacatggccgaagccggcggagcatggggttgtgcagcatggccgaaaccttgggtggtgaccatcgctgtcgaagtcgggtggggggccgatggggctggcttgacttgttttgccgcttcataggcttgatgctgcagttgcatttggcgaagcatgtcttgtaacttgttcatgttctgacgcatcgtccccatctcggcttcggcttgcacttcaaggtcgatgccttctagggtcatggtcgccgctttgtgaatcgaaactgttgcttgctttttgatgggtcctgtcgtgctgggccagcacaagtatggcccaaaaaggtgggagcgggaacagacctatccacctaccttggcatggcttatggaggttccgttgctttgccatgatgccaacccaaccagctgccccaccaccatggatacctgtcaccccccgagtttagtctactcctgacgggctcgtggtttgctcct

SEQ ID NO: 48844 - DNA, 413 bp, Oryza sativa
tgcttactaccaggatggggattatgactattgcgctcagtacggcttaattaccgtcgttgcctgtggcaatggcgtgccgctgccttaactccgctgccttacctacttctggttgtggaatgtattccggaccacttggtccgatgatttaagactatgcctgcgggcttatgatgtaataattcgttctagacactcgtgtatgtgcacttggtatttcagctatgaattcgtgtgtaccagactacttgatccagggaaatggtactgtttacacgattgatttctgttataaaaacgggggtccacacttacccaatcggtgcccaaccgtatcattacagataacgacacccagttcaccagttgacttttcggcgactattgcgacgacatgggcatcaagctgt

SEQ ID NO: 48845 - DNA, 621 bp, Oryza sativa
agcttggaactgagcttgtaaggtcaaagatgcttctatggcggcgtgctgtgcttcgacatgcttcgccggttgtacttgtgtcactgccggctgaacgggcatcgtgaaggtgtaaggggccggttgcactgtaacggtcggagcggctttggcaacgtacagcggagcttgatagacttgtccgtacatggccgaagccggcggagcatggggttgtgcagcatggccgaaaccttgggtggtgaccatcgctgtcgaagtcgggtggggggccgatggggctggcttgacttgttttgccgcttcataggcttgatgctgcagttgcatttggcgaagcatgtcttgtaacttgttcatgttctgacgcatcgtccccatctcggcttcggcttgcacttcaaggtcgatgccttctagggtcatggtcgccgcttgttgagtcgaagctgttgcttgctttttgatgggtctgttcgtgctgggccagcacaagtatggcccagaagggtgggagcgggagcagacctatccacctaccttgccatggctcatggaggttccgctgtctttgccatggatgccagccccagccagctgccaacaacaccatggata

SEQ ID NO: 48846 - DNA, 471 bp, Oryza sativa
tcggaggatccctatgcttactaccaggatggtgatgaatactatggcgctcactaggtcttagttacggtcgttgcctgtggcaatggcgtgccgctgccttaactccgctgccttacctacttctgtttttggaatgtattccggaccacttggtccgatgatttaagactatgcctgcgggcttatgatgtaataattcgttctagacactcgtgtatgtgcacttggtatttcagctatgaattcgtgtgtaccagactacttgatccacggaaatggtactgtttacacgattgatttctgttataaaaacgggggtccacacttacccaatcggtgcccaaccgtatcattacagataacgacacccagttcaccagtgaacttttcggcgactattgcgacgacatgggcatcaagctgtgctttgcctcgcctactccaccccagagcaacggccaagtcgag

SEQ ID NO: 48847 - DNA, 470 bp, Oryza sativa
agcttcttccaaagcatacggctttctagatgtatatgacgatctctttttttatggatcttatatgaatcgtatgatgaagtaccacatgagtggatatataggaaaggaatccaaatctgccgaatcgctcatgttatgatcttctacatcctaggtctccgcgttccgtcatctggcttatgttcttcatgtagcattcagatcgaatgactctatgaaattacgtcgatacttctacatattatgggtaacgtaggagacatccctattttcccccgggggtcttaattaccactgcttagctttcaattcgcctctgaccatcaaattaaatgtgaataacccgtcctcctctctttgaaacaaggggcgcttccggttctgtgcgtgcttcaaacaattttgtcttctccatattaccatatctctagagtcaataattttctatgaggaactactgaactcaa

SEQ ID NO: 48848 - DNA, 465 bp, Oryza sativa
  unsure (1)..(465): unsure at all n locations
nntatgtcggcgcagtactaatactggaacttatgatcaagaattgctctatcaatcaccatctactttagacatatcttctgaaacttttttcaaatccaaaagtccagtatcttcctacaaattagtgaattaggaggagctctttgtgccgaaaaagaaagagcagggcaatatttcaaacttgcattcgaactgcgaaatatttatacaaaggaggagagatcaagataatgcagcaaggttggttatctaattggctagtcaaacatgaggtggttcatagatcnttgggcttcgatcatcgaggaatagagactttgcaaataaaagcagaggattgngattccattgctgtcattntatatgtatatnggtacaattatttacgttcccaatgtgcttatgacgtngcacccggtggatctttagctagcgtgtatcatcttacgagaatacagtatg

SEQ ID NO: 48849 - DNA, 522 bp, Oryza sativa
agcttgcttattatgttcagaaatttcacctgcatcctccttacctgatgtattaaaatacagctatagtcaagcaaacaaaaaaaaaacatggccttgcgctgtcaaaattttcactggggctcacgtgcctgtatggctggctgcttggagcattcggctacaagccgagactccatgggatcggtgagtctgtcgcacctgccagataaatcgcgaagcaccgtgcgagattgaaggagcggaggccgcggaaattatggcacgcgcgagaagtgaactttggaatttcacgcgcaagccgcaaggtataaatcctcgaaccgcgccgcgccacgtggcagggccgtccggccgagattgctggaggtcgaggtttgtgagagaataaaggagagccggatgacgaagaaaccaatttccaatgagaaaatctcttgtgtacctctgaaagttcacctaatcctttctgtacctctgaattttgctcaatcccttacatacccctgaaatttaagttgg

SEQ ID NO: 48850 - DNA, 456 bp, Oryza sativa
tggactatcccatactagcacatgtggttggactgtatattaaatgaactgacaatgagtgaagtccttaggtcggtttgggcgcactcttcccctatcggtgcacaactaatcaccatatgtacaccacttgaggcccaaacctaaaatctatgctttccaccattttatttatcaaaatcacaagtattaaagttctgtccagattaattaaaaatcaattttcatgtttgaaatgagcccataatgaccaggaagaccattctaagcatggctatgctttatagtaacctagtgtcaccaaaactcatatataaagtggtatagccatattgttcctaacgttacgaatgaggaatatggatatatgtggagttaaggtgataatgcacataatatgagtttatctaacaagtttaacagaactttaatgtattatgtgacaatcgacatgca

SEQ ID NO: 48851 - DNA, 660 bp, Oryza sativa
agcttgtaagcagcctctgacgtttgtgaactgaactgctgtggtttctttttatccggatttgatcattggaacttgcttatacaaatgacgataggatcaagaaatgaaaattttggttctgctttgtagaatatcttgtatgctaaccagaagtttaggctatgacgctagtgtggtggtggagctttggtgcgtcagccgtggattcgtaggtggtgagcggcgggtgaaaacctagtccggcctcggccggaccgacaacgatgatcaccctcctgagggcattgtcgtgctgtctcacctcctgagggcgtttgcctggtgaaagctcagtcttggctcctttgagtcccaacggacggcggcggcggtcttccgtcgcttctcttcttgaagacgtcgttctggcatccccttgggggcaatctcgtctgtgtccctttgtcggtctagtggcggtcggtcacgcttagcggcggccgggccggtgctagccttcttctgggcttgtgtgttggtgatgtccgtgccgtgggtggtggtattttttttcctttttctggcttcgacccttcaagaaccgaaatcttgaatttttttttggtctatcaatagaacttcgcactgtctgtgccaagtcttccaaaaaaaaattta

SEQ ID NO: 48852 - DNA, 419 bp, Oryza sativa
  unsure (1)..(419): unsure at all n locations
atgcagaccgatgccacgcttgtatgcttaccggcctcatctttttcttaagcatcttattagccaaaatttggaatcttaatcttaaattttgagttgattttggggttgttttcatctaaaattattattcaacttttgcttttaaatcactaagaacacgtatataaaagttttatttacaaaatatttttaatttacaaatttatttgttcgaaaccatggagccttgtagatgtatacatgtatgacccacatgagtcaatgacaaatttatgtggcatgggtcaaattttccatatattgtatacagaccccaaaagagctacagtacaaatgctaccgcacataattctgagaacaactatgtgttccaatctcattcaccgctggtaattatatctggtgcnatgatgatg

SEQ ID NO: 48853 - DNA, 685 bp, Oryza sativa
ccccgatcttaagcacctgcagctgcaacttgttggctgaaacagccctaagctgggtgattgttttttactttttgcttgcgaaaggtttttgaatgggaaaaattgacaaattactttttgttcttaaagatggcgataatcaactgttcgtttagatttatgtggatgatatttactttggttgttcaactcacgcttgggttgcagagtttactgagactatgcacagggaatttgagatgaacatgatgggtgagttatcgtaccttttggattgcaaattaagcaaacacctcaagttatatttgtgcatcaaacgaagtatacaaaggatcttttgagatggttcaagatggaaaattgcaagccaatttcaacactaattggttctataactgtgttggattctgatgaagatggtcaagctgttgatcataaggagtatacaagcatgattggatctttattgtatctaactgcttctaggtcaaacatacaaatttgtgtgcgtttgtgtgcacgtttttaagcttctcctcgtgcttcacatcgtcaaacgggcacagcgaataacgaggtatttgaatcatacacttgaatttagaatttggtatcttacttatctctatatgctgagggaataaatgcgataagctaataaactattaggttatttggaaaa

SEQ ID NO: 48854 - DNA, 435 bp, Oryza sativa
ttggatctctttctttttacgcaacatgtgcgagccttgtgtgtatgtgactggcccaagctgctgagactgtgaggacgatgccgtatactcccactgatgggctactgtttcatgcggcttcacacatgggggagggttcagttcggagatcactatgctgatgtctctgtcgatgtaattagtactacaacacactgcattactctaacttgctcaccaaacagaaggcgatcattactttttctattctttggctaggtgatctttatcaccaatgaaatgcttttggttgctgcatggatgaagacccactgggcactgaaagtacgatctttgtcatgtccatattgatgcacatgcccagcacgtgtgccactcacagtgaaaactgaagaacaagtgcataattcttaaagtgcatttctgaacttg

SEQ ID NO: 48855 - DNA, 647 bp, Oryza sativa
agctttacgcataattaaattgcttggatccatcgcgtgtacttttttttttatttcctgcatgatcatttaacaataagaactataagggggaatgattcaattcaaagcatcttgactatttgaatgaactaatgaaaaaagttaaagtccaacagttgcttaagcccagtggtatcacctcagctctttaactcaactaaatgcaagttgcaatactttaccatgctctgaactcgccacctacaggctatggccttgtgggtcataaacattaataagaataagtagctaatttttcttcctcttaaaaagaaaaaattcatttaagtctgcacataatgaatgacatattcatgccagcttgttaaaaacagcccctatattttttcccgacacatctgaaggctacaaatttcattgggtaacaaaagccttttgaaggttaaaatccaacacatttttattgtgaaatattaaaacaaagcatattacctttttcaccaaaccaaaagcgttgcaatgttttaaaaaagtttttttttaaaaggttggaacccccaattcatgttacctgcattaatcctttcaaataaggaaaaaacatttaataccttttcaaggtaaggacccaaggcctttggaaa

SEQ ID NO: 48856 - DNA, 459 bp, Oryza sativa
  unsure (1)..(459): unsure at all n locations
tgagtgtggtaaacaattgtgagtggatgagccgattatggtcactgattagctaggatgtggtatggagacatgtattgtcgttgagagcaacagacgtgacatatgaagatgttgacggtgaaatcaacccataacatgtcccagtgtccagtgacattatagacgtgatgacatatgataaaattactagtaccatgtattatgcttgtgtgtcgcgttggatgacaaatacatactcccccggtcaaaaaaaaaaagacaaacctggttttcgtgcccaacgttngaccgtccgtcttatttaataaaactattaaaaaaattaaaaagacaagtcacgcataaaatattaatcatgntttatcatctaacaacgatgagaatacgaattattaagaaacttcatataaaacggatagtcaagttggacgcacaaacccaggtttgtcttttttg

SEQ ID NO: 48857 - DNA, 658 bp, Oryza sativa
agcttctctgaagaaagacaacaatgttgacattggatcaggaattcgaatgattctgaaatgtgatgatgaaatgcaacagtttaggaacctttgtgattatatgccctttatacttgtgttgtaggccattcgattgtgttcatagagttagattggacctctgtatcctcagctagtttctcttgcttgaagagttattgccgttgttggacgatcaatctatattgcagtgttacacaaggtaactgatgaactgatattactatgctgtcgctcaagctgtattcaagccagacaattttgtcttctttttgagctttatggacttgattgctaactactacaattgtagattgagaatttgagttttgatcaagaagagcggtaccattttactcctgaaagatataagctactcctccgtagcattttttttcctgggaaactaatgcctttgcaaaccaaaacttacttttttgtgccgggcaggagtacacaaatttcggcccctgtgatttagatgaacggattggagttttggcacaaaatatttactttctttaattttaaagttaaattaaaaatttttttaccaagggggttaacaaagggtttaagaattttttttttttaaggggaaagaaaaaatttgttt

SEQ ID NO: 48858 - DNA, 469 bp, Oryza sativa
acacttaaaactaagcttgcgttgggccttctcgtgccatcgttgtcgtcgtctgtcttttatgtttcgccgtactcaagtaatcaatggtgcagatgagttacgttgggtgcctgcttgttcttgccagattaatctgcagtcgtttgcttattgccagtaatgagtgtgtttttgtagcggtttgatatcaaattactgttttatttctgcactgtatatgctggttctgaattaatttacctatcaatttgggattctagtgtacattgatcaaaacagagctactgtattttgtccttgactggcgacaagctcgccggaaaacgccgttgctgcgaagtcgctgaacccggtgtctctcaccacctcatgttctcgtcgttgtttgcgcgcggcggagctcctgcgagctcccgaagtcggggagatgacatctttgtttattatgtgaaccgttggatgtgat

SEQ ID NO: 48859 - DNA, 447 bp, Oryza sativa
agctttcatgacaaggcatttccaaagccgatacaggtttaccatatgccgattttagggtcccaaaccaacaacaggttaggttccagaccatactgtgccaggaagcccaggggtcctccccgacaccaccccggcgaatccacatgtttctcgacatcaaagctcccctgataagctagttactcagccaggggtgtcccattccacccatgtggtcgtacttgtcttatgtttggatgaaattctaaggaatcggtccttaaatgcgagagcgggaaaaccgtacacccggtacgttccccggtccgcggttttggaaattcattttgttggtgacatgggaccgggagtatcatgacttagagacttgaggcagacacgatcacccacgtgacctaaccccctcggggggggcgggcccgagggtgatacggccgcccttct

SEQ ID NO: 48860 - DNA, 460 bp, Oryza sativa
  unsure (1)..(460): unsure at all n locations
cactctggtgntaagtagaaatatgcgctttatttttcanagtataaattagtcaatattatttattactggaggaagtgaaaaatgttaaaaggaaatattacaaatgcaacaatcaacatacaattgctcatgttattgtgatattaagaaactacctaagtgctcaaatgatgttcaaattgcacgaatgatctaatgtgttcttttatgcagttatcctctttttcataacctcacggacttctccaatatgatatcccctcttgattctatcaagtttgtgtttaaaaaaatcatccactcaaactctatctcggcatttgggggttcttgatggattttcattatttatgccgtatgtgcttaaacatgcactatgtattatacaagctattaccatgctttctttgtgcaatcaggcattctatgttatacatatattatctttcgctcatgt

SEQ ID NO: 48861 - DNA, 592 bp, Oryza sativa
agcttcaaggagttggaagttaaagaagcaaattttcaaatggaacacatctttagctccgggacttgatggtttcccagcagagttttaccaagtgttctgggatgtaatcaaggatgatcttatggccctctttcacgatttttatgaaggaactttgccactgcacagattaaattttggaatcattactctccttcccaaacaaaaggacgctagtagaattcaacagtataggcccatttgtctgttgaatgttagttttaaaatttttacgaagataatggccaatcgaatagccctagtggctcagaaggtcattaaaccttcgcagacagctttcctgccaggaaggaacattatggaaggagtggtaattttgcatgaaacacttcatgaattgcacaagaaaaagaagaatgggtgattctaaagcaagactttgagaaagcatatgacaaagttgattggaagtttctacaacagtcattgtgaatgaaaggtttctcttctaagtggtgcgattggattgactcgattgtaagggtgggagtgtggcagtcaaagtaaatgatgagattgggagttattt

SEQ ID NO: 48862 - DNA, 473 bp, Oryza sativa
tgtccacgaaatcaagaaaatcaatacagccacttttcatcataaagtaaaaaatgtcagccaataaaagccaatcttgccagcactgagtctctgcaacagcataaaaaagaaagaatgaatatatgcaacagacagttaccaaagacttgcacatatctgacaataatggtaagcaaatttaatttcttgaggtaaaagtttcacgttctaaaagaaaaaatagtgaaaagggtgcatcaatagaacatctgaaatttatattcccatcagctgtccacttgaaaaaggaactttattatattgacaaggttaatggttaactttcaaattctaacctgagttcgtgagcctcagtagttcaattgtcctgtcagcaactgcctcaccgatcatatcaggtgagaaaacagctcctggcgttgatgattggtgaggatgttgtctataacaatgagcaacacgaagaacac

SEQ ID NO: 48863 - DNA, 654 bp, Oryza sativa
agcttctctcttgacgcttttcttttgagttgttgtcaaaagattgaaaagacttggaagtgcttggggatgaccaacaatacactgtggtagggagaagaaacattaaggaaggataaaacaaaaactaattaatcagtagtagatgtgcataacatgacacaatatacaggcaaggctgctgcagtagtattaacattaatattgtaaactgagcactgcaaatataaacagaaaaatgtggacattatttcctagtaacagacaccgctactatgtgcaagcatatggatggcagggatgcatgtgttgggcaaactaacattaacctctcagtgtactgtacagatttctctactcaaaggactactactttgatcaaacatcagtagtaatggagtaacctagtgagaaggacttaaaagcagatttttcacagcagaattcaaccaaacaccaatgacatcattaccattaataaatgttcttgtatgcacaattgcactaaaatgttcttggatgaaacaaaaaaattatgacattttagaaaagaataaattccccatttaccattgcaatttaagcacttagggtttgcgagtatttatgataagtttgacaaggcaagcattttgaagggaaatatgatttttt

SEQ ID NO: 48864 - DNA, 465 bp, Oryza sativa
  unsure (1)..(465): unsure at all n locations
tggcgcacgcgtctgcaccgccgaggtagcggcccatgacttatatatgcngcggcgctgggcggggaggtccgtggcgagcacagcgaggagatccgtggcgagcacgttgtcgtgcttgaccatgagccggtggaggctgctgcaggatttgttctttgtgctccctccctgagcacgtgcgccgcctgggggaagctcgcgctgccctatgagccgccgtcgctggccgcaccatcctccggcgccgcgcgccgctgtgggcgtcctagcgccagcatccccatgtcctgcgagtgcaagagcaaagagtgagaggaagggaggagagaaacaaagaaacatataggggaaagagagagggtgatgtggacacctgacatgtggagcccacgttggtgtaaagctgactcatccgccacgtagatcaaaatctgggttgaaatcactggatgatctctggtg

SEQ ID NO: 48865 - DNA, 526 bp, Oryza sativa
agcttgtatggtcaatggctgcgtcggctgtgctgggaggctgcaagggtttttttgttcactgagaaagctcaccctccagtggaagatgctcgcaaggctcacatcgcaatcttcaagatgttcacgctgcgaccgcctacggacggatctcccacagcatgctccagatgctcccgatgccggccttcgacatgtggaacctgggccgcccccagaattacagaatcgggcaagtcgaaaatcaatcatcactatcactgtattgaagaattcatttatcttatatggcttgaagactgtctaggcctttttctcaggaataaaacctccccttacttcaataaagttggtggattttcctcgcatgaaaagaactggaatgtacatcaccactccctgacaattgatgccagtattgattgtatggagttaccctttttttggtcagaaatcattcatggggtgataagaaatccatttgcaaaagtaggtggtcactaccttctagttgcgacctaacaaa

SEQ ID NO: 48866 - DNA, 470 bp, Oryza sativa
ctaagctccatgctgacgtaaattctagagccatggcatttttttaactctcatgtatgccgatgtgtcgtcaatgctcttcgaactatcaacccacatggacgatttatgcttatgggataacaagaatacattcaccagaaatacattcacattacaggcaagatgaatatatacaattaatgttggacataccattcacaattatatttccccaaacggtaaagaattactacacggaaaagaaaggctatatatgtaaagcgagatgacctatatcacaaaaaattgtgcaatctaatgaagaaactgctatgcctaaagcaaaagataaagatgctgtacatgagcttaaccatgttctgcataatgaacttaatctaaagctatatataactcgtgtattgcaaaatactatctcaaaaaaacgaatgcaagaatactgtcattactatacgtcgtcccctgag

SEQ ID NO: 48867 - DNA, 635 bp, Oryza sativa
agcttggctttcgctcacggtccttgataagaattgaacccctgatttttttttacgcttgaaggtcatcgcgctggtgctgcatcatgttgttgaagttggcgaattgagcatcagcagtctgttgccattcttgcatttgagccatgtattctgtgaggtcgtactagatctccctcgtctgcatgtcaagggtgttggtatttcttatgaccacagataaatccgcaagcgcacggaataccgctgtagcacttcaccttcgggtgacccgtaaaggatatcgaacttaaggaacgtgtgtaatctacctaaggctaagactatccaaggacaacaactgatgataggtaggctaggttagacaggactttctatgtgtttaaattatctacgctaagcaaatgtaatttcctatctgttgcttcgggcaccgacccctgcaggtctaacagcgtggttcggctatagctctttgatggtatcaaacatggacgaattaatgcgaccgggattagggcctattaccacctgctacctaacttttgacaaatccgggggatacccaacaaacaaaggtaattttttaccctagacacgccgcctaaagtataaaatccctggggggattttct

SEQ ID NO: 48868 - DNA, 469 bp, Oryza sativa
  unsure (1)..(469): unsure at all n locations
tgatgatggatcngctgctcaacatctcaagacctctctttgtcatcattgagaacatagagctagcgagttttatgagtagggcctttgatagatggtggagtgaatggaaactacatctattccatcaaccagcttccatgtatatgacagacctatntccggatgtcatccctcaggtaaatctttactttgtcaattctgctaaaataaccgtcagccgattggtaccttgactaacttcttcttctatcttgcagacaacagaatcttctccttctcgtaaaagcaatagggacaaggacatagaatatgctctatgcctcataccagacagaggtggaccatcaaccccaatcatcggctaccatgctcctcagacctcaagtctactccaagggctaataagagaaccggtcgatgcttggcagaagagaaataccaacgtatcggctactgacccatcagc

SEQ ID NO: 48869 - DNA, 666 bp, Oryza sativa
agcttgtgccataactcgaattaatctaatgcattgtgttggtgtcttattacgtttgaaccaacttggaatagaatgtccaaacatgtaaagatagagaaagaccttatttgatacaatatcattggagagtcgcacaaatatatcaaaagtcttgaaaagggatggataactcaaaatccattcaaatatgtctttggttgctatgtcatccattccaacaaatgaagcagctgctaatgtaaaaccaccactacttctcattgaaacctcaaaatgttcctccaacgtttttggcgtataatcctcgtcacgccattttaactccttggtgtaggcctgaactaaccgttttagctgcatttattgagtatatacacataaagtcattttagaaaacaacagttgatataagaaaaacaaactaaatgttgattaaaaataaatgactaaaacttgtggattctcaggtgtataatatatgttgagctattatatagcttgtaagataccctcccatatgcgaaaaaaccctttaaaagaaaattttgaaagttctttggcacaaaagctgaaaatccatatacttttagccaataacataaattaatgaaattcttgcttgtaaccactagggaaaatcttgcttaccaggaaattttgaat

SEQ ID NO: 48870 - DNA, 437 bp, Oryza sativa
  unsure (1)..(437): unsure at all n locations
nggtggcttgagagagaggggaaggaggtagcaaaatgattgttatagttctgtgaggattccaacggcggcgagccggcgaccatcgaggggagctctatagcggcgttccacagtgataattccgatggctgtgaccctctgggtgtaggtcagcgacagcactccacagcacaggtaaaattcagtggcgccgtggcaacgctcctctacatcgccgtcgagatatgcgagatgaaagatacagagatgatgggagtaagaggataagacttctgactggtagattatgcccactgttttntaaatatttcttcattaatcggaatgccatgtcatttgctatgtagaccaaaaccgtctgatctataatgaggggatcaattgaaacgattttgatagttagagccttatatgatgttgaatacctcggttta

SEQ ID NO: 48871 - DNA, 502 bp, Oryza sativa
agcttgcccgcaggtacaccgaacacgcacttatcggggttcagttttattctggcggagcggagactctcaaaagtttccgctagatctgtgagtaaggtgtctcggttgcgcgtcttcacaaccaagtcatcgacataagcctcaacattacgtcctatttggctacccaaagaaattcgagtagtacgttgaaaagtaggacctgcattctttaacccgaagggcattgtcgtataacaataagttcctatgggggtaatgaatgcagttttttcctcatcctccctagccatgcgaatctgatggtaaccagagtatgcatctagaaaacacaaaaggtcacaccccgcggtggagtcgacaatctgatctatgcgaggcagggggtaagggtccttaggacatgccttgttaaggtcggtgtagtcgatgcacatccgaagcttggcgttcggcttgggaaccaccaccggggtcccccggcactccggatggatga

SEQ ID NO: 48872 - DNA, 432 bp, Oryza sativa
cgcactttggagattgcttgcttggtgcaagactgcttgttatgtatgggtgattagaagaccacgatagtggtggagtgtggcaacatcggcggcccgaggaaaagagttatcatgtgggtacgtgatgggagtgatggacaagaaaccaaccttattacgctttctttcttttttcctcccaaggattagacttgcactgcaaaaacaattccaagatttgggttccgttcctatggattcaatcacaaagaaccagtcacagtcgaatctgcgacggaagaatgggtacgactgcagcgagcttggtttccctgagattgctcgcctacgcttgaggccgccacctgctcgaggccccccgctgcagcttctgcctgctcccactgccgactggcggaggctgcagaggcgcccgttggctggagtctc

SEQ ID NO: 48873 - DNA, 674 bp, Oryza sativa
  unsure (1)..(674): unsure at all n locations
agctttgattaaaaaattttaaaatcccaatcataaaataaggntattatgttttataagttcatgttggcataatagggtttttaggcaaatctacgtatacaagtttttttttaaaaatatgcatttaaaaaattattgattataaatgttaaaacttaaagtcaatcctgcgataaaaattaaataacttttaccacaatagggcccgactacctgtatggctgtattacataggaggccttaacagtttaccttctctggtgaaaatctatgcttggattggctgacgcctgtctcccatttctgtcctttcccctaaactttcctccggttcttaatccttatcctcccatctctttattggtatttaatcacacttttacgcttattaattaatctacccgctgaaaaagcgcagccacccgtggccctcaccaaatctgtcacgacatgacgcgagcctaaataaccactttgtacactggatgaataacccgccccttaatccgtcataaccctcttaatctttaaattaatttttttgggcctcccgaactagccgtggccactaagtttgggcaattggtaacaaattcagctccgcccttcgttgaagggggccccaggattcgttaaaaaagttatcgcctctccggggtaaaataagtttt

SEQ ID NO: 48874 - DNA, 433 bp, Oryza sativa
tctcgccgattagtgcgatgggattcatttccggcatcgtcgacttcgtcttcccttccgggcagatggttcggttcggcagccttgacttcgtcaccgacaacttctgcaagatctctctcttcgactcggattcaaacaagtcggaaagagatgcggtctctgtaccattcggtctcccaaactcggcctgagatctactccaagatcatcccatctgagttggcttcaaaccacacagatgagatcccatctactccaacgcgacctgatcaagatgatgcggcgtatcctccgattctgatgaagctccctgatgatctggctgcagtcttcaccacaagggcgtcctcttcccgtaggtctagaggagatccggctctggccccgatccaatctagctttagggagtcggcatcatacttcagcctct

SEQ ID NO: 48875 - DNA, 550 bp, Oryza sativa
agcttatagtgttatatgggttattcatttttttatggcaaatgtttctattgttgtttgtttggcatacccacaattccaaaacttgccatattttatttagctaattaacatgcctaacatatgaccaacaaaattgaagccacacttcaaccataggagagcaagcttaccacacttttttgtgccaatgacatgtgggacccacatcatgatgaaggaatcttatcataagtgtggcacgaatcaaacagatgcctaactttagtcaaacttggctaacttaagttgtggcaaggtgatgcaaattgtggtagtgaaccaaataaaggacactcaaattccgtagtatttactattggtcacatgaaaaatgtgatgtggtagaacaccgaaaaaactataatttgatagggacaccggatctaatattttatcattttcaagcccgatgaagagagaaacctttggaaaagagatagtttgctcctttcaaccaaaacccagaccacatatttcctttttcaatcccatgcctgaaaattggagg

SEQ ID NO: 48876 - DNA, 467 bp, Oryza sativa
tgggcctcgtctactatgggatgctccaaagataaatattacccctcctgagaatgagatggttgaggaggaaggttcttcaaatgtgtttccagctataaaaatttatgatgatgacatcaacatgaaatttcttctttgtggagttcctagcacaccggtaagctttggtattttatatccaaatttccttacatcttatttcctctattgtacgaattggtttaatggtgttgttaacctcttctcttctgcaggatccttgtttgttaggttcattataagatggcctgaatgcacttctgaatattgaagtatggaataaagcattgcagctctactgtacattgattattttttatggaccatggagtaaattttacactatttcctgaagaaaagatggagtataatgattctatgagcaacctttgttgtagataccttaactcaagtttgaagaaact

SEQ ID NO: 48877 - DNA, 272 bp, Oryza sativa
cccccctttttctaaacaaaaaaaaggctgcctctccctcaaaaaaaaaaaagggggcgcctcacaaaataggggggggacaaaaaaatgtctcggcccagaaaaaaaaaaatcccccaccacccctttaaggggggggggggaaaaaaacccccccaaaaaaaaaaaaatctcggggggtaaaaaaacaaaggggtttaaaaaaaaaaaacctcttttacggaaggaaaatttttttgtggggggggccaccaaaaaaaaaaaaaaaaaaa

SEQ ID NO: 48878 - DNA, 450 bp, Oryza sativa
  unsure (1)..(450): unsure at all n locations
tgcaaaccacattntacatgtagtaccacttgcaaagagagattttccaataaacgtgcagcggtggatcccatccatctttctacctataataaattagaaaaaagagaaagaaatggagaaacaaaaacacgacagaaagaaaagctgatttgagtatggttgtcactgaactgcatgccccgagctaatgcttctccgattagcaacttggcactagtgcaaccatttagttgcttccccatgcatagaatagcgcaacttgtatgtgtatacgttgacctgtgaacgactcaatcagttcttttgatcgataaaaatagtcatgtagggctgcatgaacacaatccatttatatttcttattgttagttatatcaagatgagagctccctggttagaccacgtcttctcctcagcattggcaggccaacaaccgcatgcctgaaat

SEQ ID NO: 48879 - DNA, 475 bp, Oryza sativa
agcttgtcctcgttcttgacagtggtcaagcacagaacagatgcattttttttgtgaacaatctgcatatgatcatttgcgaaggttgagctccgctttctactagcatctatactttcaataagtacattcaatttgagtatggagagtcaggaaatataccgatccaaggcgagctttgcccttaacgatgcagtaagggacctccatcttcctacacagggctggaagccacacaaccagctcaattggatcaacatcatgagcgatgacaaccagctgggccttgctctgcgcgagaagcattcaaattatcagtaaagtgcttgattatatgttcccatgaataagtctccttgatgagtgactaacaaagaaatgaacacattaacaagctcctgtacctgctcaatgaggtaagtcacgtggttaaaaccatactttacaacaattggcttcttggcctcaacggttt

SEQ ID NO: 48880 - DNA, 454 bp, Oryza sativa
  unsure (1)..(454): unsure at all n locations
tctttctggccttctctagacatctaccaacatttctgtattttgttctactccaagtttgcaaggccgacattaccttcctcaaagcacaattcatatcacccaaatgttgtttctccccagcttctagccatgaatcaccaatcacttccgttgatgcaggttcatgttcccaacatatttcataatgcagacacttcttgcgattcgcatgagaagtatccctggtaaacctgacaagaatgggacaatgattcgagcatggagaggtcatatggacaacctgtgaatatgttacatataacacctttattcaattaatggtgtgttctttttctaatgtaaatcatctttcatatgctacacaaaataatttatactattgtctttaagcgtttccctctcacccacacaaaaatatcttgaaaaaaaacttanacatatgcaaactaat

SEQ ID NO: 48881 - DNA, 567 bp, Oryza sativa
  unsure (1)..(567): unsure at all n locations
agcttggaggtctcccgacgtggctgatccccacgggctgggtgatccgttttatttatgtcgtgtangtaaagtgtaccccctctgcagaggttaacaaactgttcgaacagccgtgcccacggtcatgggtggatgtgaagtgattcctagcgtaattttgtttgcctactgtttgtgaaattgctgttgtggaaaggggatcgatgtttggaaaatctgcagctgatgggatcagctaggcccaagtggccgtttgaaagttgttggcccgggtggccgtttgaaagttgttggcccgggtggccgtttgaaagctgttggccgggtgccaatcttgatcaattttaaagactgatacattgcacatactccgaccggacgagacgcactatctcaaccgtgtcgtttgaaaagcactcacttagttgttttcagaaaagagttcaaataaaatcaattgcaaaaacaacagcctttccttgaagcctgcattaaacacttatttcccatggcttgctgagtactcccgtactcacccttgctctatataaataattccccccc

SEQ ID NO: 48882 - DNA, 679 bp, Oryza sativa
agcttcgggccggacgggtggggggccggggggaagggttggagaccacttcttttgtttttgggcacaacacgccaatgcacttgccaaccatatcctccgcacgtgagaagcttcgtataacatggcttgatgaagtgtgtgcatcctctggagggtatgctccccctagtagaggcgtgacagacgcagaagtgacgctactacaccggcatggggagttgggtccactcggcatggccgggcattggtcatgccataaaggccgcttgtatcacaaggttccctctagtagaggcatcacagaagcagatgtgacgttgcgacaccgacgtggtgagttaaatccattcgtcatgtcggtgcattgttcatgccatatgggcgtctttgtaccacaaagtgggcctagtttttatataatagcacttgctgaacgtaccgatggtaaaggagtatgttggatcccactaaataaaaaaatatttctccttattaccccttcccttctgggcactttcttttttaacccccttcaatatattttttttttctttaatagtagccccatgggcaactttttattaccacgggggcttttgggggggctctaccggtggacccccgggaaaccgggacactggttgggaaatttggaaaaacccctttttcataatcc

SEQ ID NO: 48883 - DNA, 471 bp, Oryza sativa
tctagctagcatttttgcttcttcttgtgaattggattctttttacaataggtcattcgcacattgcttgctcatgtttgggatatattctggtctgatcatatctttcaagtgcattcttgggttccaccattccatgcacttcatagcgtagattccgccatcatgccttgatgagacaaaaacaaaaattaatcatttaagaaaaacaaaatcatggataaaaaaatggaggggttgtggacaaaaaagaaaatgatatgtaatttgcggatgattgttgggttgataggtagttccccattgatttggcgagtaattggttagttgggttgataggtaattccccattgttttggcgagtaatcggtgggtattggatatcaaaattactaaaggctgtctccacatctgagaattctttccacattgcaatgaatcctggtatctgtgctaaacaagatgagcatg

SEQ ID NO: 48884 - DNA, 673 bp, Oryza sativa
  unsure (1)..(673): unsure at all n locations
cgcttggtactttatttanaatactcctctttatacatttatggcatagttttattttttttgtatatgaatgcctactttacattatgttcatgttatactgaatatgctgctagcttatctgggagatgctttggtgcgggtacaatatttgcttatgcaattactctatgtcataacgatgatattagagtagtatctagtagtttagacgtggtgtctagattacaggatatcattatttggggttatatgctggggatgaaaagtgggccgctgatggtgacagcttagtacgggtattcctccgcgcgtgtatatagtcctaagttaatttcctggggagggtactcctccgtatttagtcccggttgtatggtcatgacgggctgtcgtaaggaactcggcaggggtggcttctcaaagtaccaggagggcatcggatagagggtattagctagtatatcagatgactggaatgtatgtatactatgtatactagaagtatatgaatatattatctttctcttttctttccacgtagcttagatattttattatgagaatgagtaacttatagcttggggtggattctacccttggattattttaaacccttcttagaacttggttattacaaggaacatttaattattagtccagttttctctac

SEQ ID NO: 48885 - DNA, 593 bp, Oryza sativa
cgcttccgatgataacacacatcgtgttagctttcattaattgtatccgctctttgttcttacaaacaatgatagactagcatgctcaacacgaacgtcttggatctttcgagtttttcgaccccatgtgttcacagtggcaaatttcaatgcaagctatcatgttctagctttgtgtaaccctactgccataagtaaaggtcatcggccacttttcctactgcaaatgaaattcctaatgccccccatattacaacaagctcatgcagcgtgatgtacgctcaaagatgctatagggtgccaacccaagtacgcctttaagctcgtaaatttgtcattgatatcgaatgcatctcaaccaccagccaacgttttgttgtggtcgacctaacatggcatacatataccactttatttatatattcattttgatgttgctagtatgggagcactgcacaacgcgtgttggcacgtacctaaggacatctatagttttttgttttgaccaatccgatcaacaagccaaacaaaatttcagttctgtagatgcaaattaaaatctatttgggggatccacgcaaaggatcacccaa

SEQ ID NO: 48886 - DNA, 469 bp, Oryza sativa
tactaagcttcgcagactctcatcgacggtggcagcgcactcaacattcttttctctaagactctggacgatatgtagattcctcgcacggaattaaagccgagtaatgcacccttccactgtgttatcccaggattggcagctacaccactcggccagatcactcttccagttaccttcggcactcgggagaattttcgcacaaaaaatgttggtttcgaagttggtgatttcgagacagcatatcatgctatactcggacgaccagctctagccaaattcatggccgtcccacactacacctacatgacgatgaagatgcctggtcctcgaggggtcatatcactaccgagcgacatctagcaagccgtcacatgtgataaagaaagttgcgagatggcccaaactcacgagactactctctgccgttgagagattcgactggctgaaacacagcaagcgagggaga

SEQ ID NO: 48887 - DNA, 652 bp, Oryza sativa
agcttgggcatggaagggaggtcatgataggtagagagagatatctttttttcctgaaaaggtagaggcagagggatagagttactgttagacttaatattatcatatgtatatttcaccatatcaagtcgtatttagctagttagtagtttgtgtcgaaattagttttttccgtgtgcatactcagcagggcaatagcatttgtgatttattttgatggggggcgttggggggggcatgatccttgagaagcagcatatcagcttggtagagaaaagaagatgatggcgaacgcacgtgcgggaacaaccaggggaaagttagtggaaagagcatattctggggttgggattgagagattgagggatcatacatgatacctatcatatctatatataccatacataatacccccgtgattccacatatgatacaacttagtagcctggtacgacaccccaagcctgatccctatggatactaaggaacaatgctccacaggtacaaaagaagaccaataatgggtttttagtttggatacttgggaactaactcctcccgcccaataaataagaaaatttggggcgactaagatgtgttaagttcccccaaaattcatttttatttgggaaagagggaggccccacccact

SEQ ID NO: 48888 - DNA, 429 bp, Oryza sativa
  unsure (1)..(429): unsure at all n locations
tcatatcgatgtagttccgtagtgttgcttctctttagacagcatccatgttgcgaatcatggtcagtgttgggtcagtctgtggctcacatctgttgttattgtttaacaagtnttttgttccaccagaaaccgatggtccatctgagctgtcaagctctggaaatgcctgaagaaacataacataccaggttagtggttttaaataagcacctaattggcagaaggatgatatacaaaactgggcatgtatcagtttcatgttcttctcattgcaaaacaatatccatgtactttgcaggagtcgtaaagaagagaagatggtcgaaagtgacactatacttgtttaacatacaagcgagcaatgcagattttggcatactagtttccaacaagtgacactggctcttgtttctattcacaatgagt

SEQ ID NO: 48889 - DNA, 681 bp, Oryza sativa
agcttaagtgaaatatagaggtacaaactatctagttgcagcgattttttttttacgaatgaaaataatatttatatatcataacaagacacaataacactttcaaaaaaggcttgaattataccataataacatagggtatgtataaaactacattatatatacataaaagttacatctaaccatttaaacatttgattttgttggatgacaaaataaaaattcccgtggcaaggcacgggggttccaactggtttaatctacatcagtgaaccaaacaataagcactggacaagagttgcaaatcatcaatacaataagactaaatataaattctagttctgaaagaaaactaaatataaataccactcggttaaaatcaggaagatgttttgattattcacatcttgcatacaactattttaaagcccgtacaacacacgggtaggcatgcaactagttatgactaatctattatgatattaaaacaaggtcgtttaatctccaaacatagcattgccacattaaaccgaagaaaaaaaatttgaaaacttagttaaaaactgctttctattttagaatataagacgtttccactttagtcaaagcaatctatttttagtttgaacaaatttggaaaaaaaagtaataacattttttaccccaaaccaaatttattat

SEQ ID NO: 48890 - DNA, 584 bp, Oryza sativa
agcttgcaagataagttgaaacagttggaaacaagatcacaaattttttttttttgtacaacagggttcaaaagaaataaaattaaagaaagttataaaatcaacatgctaaatttatttcattgcagcaagattaaataaaacaatgttataaaacatttgctggtaaatgagccattagtacagtaatagatgtacagtactaataacactggaataaattttgaacgagaaccactaaaagagattatgaagtgcatgtgccattaatttggcttaattaaaagagaaagggaggagaacagttctacttttataatatttttagagggcttctatgggtaaccatttggtataacctaaggtcaaggggctctgataccaacttgtcacgcccggaatttctattcaaaatttcaaacgcttacatgtgtgtgaaccctcgtccagaaattaaccgaagctcacaataacaaattgataatagagtacaattattactctaattaataaccgaaaaaaaatgtcattacagagggagaaaagttcctctcaatcataaagaactaagcagcggaaaaaat

SEQ ID NO: 48891 - DNA, 430 bp, Oryza sativa
  unsure (1)..(430): unsure at all n locations
ntgacgatacaggtatgacaaatgtccagcgtgatctgtttctctttatccaccatgagtgctgtcatgtgaaaagagaattcttctacccacaaggtgccctatcggcaagtgacgaattcaaggatcttccggagtggaacactgctatgccataatgtaactagatgatgttatttgaagtgacaatgtaaaaaaatattgtaatagatatattttggcaacacttttgagttatgcaatatatgtacatttctcagtaccaaatgcttgataatctttcaatatatgtacataaaaatctacctgccaaaatttctattaaataatttaaaagttatttacgggcaaattataagtaaagttcaatagtttctacctatcttcgcacgcggaattatattttttgcaagcggacgagttctatttt

SEQ ID NO: 48892 - DNA, 453 bp, Oryza sativa
  unsure (1)..(453): unsure at all n locations
agcttanctttctagtttgtttttctttgtctttgttgataagnattcatttatattttagatgggtatatcaatttatacatatagagaccggatttctattcattatttaaaaattgtcaattgaattatctcgtcgatttgttggaacgtgtcgctggcttaaattggtgggtagtcatataagtgaacctccactttgaataagtgaacccccatcttctctctcttccatgtattagcagatgatactaattagaaaatctaagagccttctattaataattattgtacatgcactatgtttaaaacgtaccatatgtataattatatactatatagaatcagtgttcttggagattgtcacgccccgaactagccccgagcggaactagcccctgacgctccaaattaacctgttaatcaataccaggcccaagaaacaatgctggt

SEQ ID NO: 48893 - DNA, 468 bp, Oryza sativa
  unsure (1)..(468): unsure at all n locations
tatccaagtctacagtaactcagatgactatcattatttttttataaacaggtaattacgacttatcttcctcctatgcaacataacgatagaatttatgattgaaaatacaacgccaccgggtggagtttattgaattcactttgtcctgatacaattaagccagtgcccgttcatgcgttaccagacgattgataaagtctctctcggggtggcactctcagcaaattcttcatcatgtcatatgttgtgaaaccaatagcaaccgaagggacgacctgaaaacatgataagttcatattttggatatcactgcatatttaagatcagtttgaaatgagcatctctgttgtccctattcttcaatagatgcacataactganacagaataaaagtgacctagtacacttccttctttattttgccttctctctatangaaactcagttgggattattaccttcaca

SEQ ID NO: 48894 - DNA, 618 bp, Oryza sativa
agcttaactttctagtctgtttttctttgtctttgttgataagcatactaatactttttttatgggtatatcaaattatacatatttagaccggatttctattcattatttaaaaattgccaattgaattatctcgccgatttgttggaacgtgtcgctggcttaaattgtggggtagtcatataagggaacctccactttgaataagtgaacccccatcttctgtctcttccatgtattaacagatgatactaattagaaaatctaagagccttctattaataattattgtgcatgcactatgtttaaaacgtaccatatgtataagtatatactatatagaatcagtgttcttggagattgtcacgccccgaactagccccgagcggaactagcccgtgacgctccaaattaaccctgttatcaataccagtccccagaaacattgctggtatcacaggaagacagtatatcatagcaccagaggtctctttattataaaagaaggagtacaagtctgttcgggctgcggacaaatcccgagcttataactaccttattataggggaagcgggacgccaagacctgggaccaatcattacaatgctccactttggg

SEQ ID NO: 48895 - DNA, 460 bp, Oryza sativa
  unsure (1)..(460): unsure at all n locations
tctacagtaactcaaatgactatcattatttttatttaaacaggtgattacgacttatctccctcctatgcaacatagcgattgaatttatgaatgaaaatacaacgccacccggtggaggttattgaattcactttgtcctgatacaattaagccaatgccggttcatgcgttaccagacgattgataaagtctctctcggggtggcactctcagcaaattcttcatcatgtcatatgttgtgaaaccaatagcaaccgaagggacgacctgaaaacatgataagttcatattntggatatcactgcatatttaagatcagtttgaaatgagcatctctgttgtccctattcttcaatagatgcacataactgagacagaataaaagtgacctagtacacttccttttgtatttgccttctctctataggaaactcagttgggattattaccttcacat

SEQ ID NO: 48896 - DNA, 562 bp, Oryza sativa
agctttactgtttgacaccttttaagatgcattgtaccaacttctattttttttagtaactgcggtataaaaggattttaaggtattgggcacttgatcacgcgcactttggcctaagcaaaaagtgcctaagtcccaaaaagaacgtgacatgccacacctgaaaatatgggttgcagacatattatgcctaggccaaaaaatatgccttcgacaccctttaaaggatgacgcatgtaacatgctcccgagtaataaatcttccgggtaatatagaccaagcgtagctcatatgaatagcttctgatcttagtgattatcccttatgggatactccaaaatagatgtaacaatcgaatcccgactggcgcaagtattcagttgataacccttacggggaataataaataagtcagtctttgagtatataaaatagacccatgatcatgaattcatgttgcatgtatccggagcaagtccaaaattgaagatataatacttgtatttgagctaattaaccccctgaacacgtaatcacaaattgttcattgatggtagctga

SEQ ID NO: 48897 - DNA, 467 bp, Oryza sativa
tgaagccacaagaacctctaagcattaaacatgaagtaccttgagcacatttcctgttccagcatatgctagtgacataagtgttacatcacagtactttcttatcttctcatcaaatgttttagaaacttctgccgtagcctctacactctcctgaaatggaaattgccaaacaatcataaaaggtacatttatctaaaagggctgcataaagccataaacaacagttagaaacaaaggcagctatagtatatgcatacagtacatttaggaatagaaatacaatatataaacaatacggacaacattacaatgcgaaaggtcagacatcatgtgggaaccatgacatggcatttacagcaggtaaggcgcttgacaaaaccaacagaaacaagcacttgcttaaaataaaataaagggaggacacactatgtaaatcctcgaatccacaggtattgaacagtatt

SEQ ID NO: 48898 - DNA, 639 bp, Oryza sativa
agcttgtcgacctgcttctcgttttttatgaagaaaaagggcggtgtttttctgatatcccatgatgagctgaaatcctgcagataatacaagagagttgttaaatcggaagaacattacaacatgcaccctgacctatagatatgctaagtgagaagctactctaatgtcaggacttcagttaactttaggacaatttgcatgcaatcactacatctggttacttaattctagaagtggtgagaagctctttataatgctataatgctaacagtgcacgcgcaacatgtgtttaacctttatatgataatttccaatatataagaagctttaccaaaaaaataccagagacacccaacaaacttattttttttcaaagttctcatggtatggccacaggcattactccataataaggatgaacgtcatgctttgggtataatatcccttaacaaataattaaacacatttggaacttcagacacaatctattcttgattataaaacttaattcgagggcttttagtgaggaagcacaaatcagtttcccggattacagatgaatgaaaccttttggtaaaaagaaccgccattaaaagtataagggggttctttgggtcaatcaaaactggaaattaa

SEQ ID NO: 48899 - DNA, 468 bp, Oryza sativa
tgccagaaatctaaaaaccacaatgaatgagttttgggctgtgttcggcatggagagttgaaaactaaaccaccaccaaccctcacccttcccgccccccggcaacatacacaactaagctactcattagcacataattaattattgaagcattagtaacaaaacataaaaattgattaatatgttgttttagacaactttcctataatcttttaaactgcttaacctcctttgattgaaaggaaatccataggaatgttagaggatattattcctataacaatctgtttctatataggcctttgaatcaaaggaataaatcatatgaaatcctatgatatacctaatgccatgcaaatttctgaggaattctataatgaggttgaacctcatggaaacattcctatgagtcattgtatgaaacatgctacggtgttcctatgaaacattcctatggaaatatgctac

SEQ ID NO: 48900 - DNA, 667 bp, Oryza sativa
  unsure (1)..(667): unsure at all n locations
agcttttaaaggggctaggaggcaacggcgaagtcccacggcgtcctttttttttttaggaaagntcgggctcggagagagagagactgatccgaatcgacctcgaatccacgaacttccaaagcgagatagacgatgtttccaaaggagaaaaggtagaggagatctcggggatcatttcccctcttttgattccgccggagaaggaaaggagcggccggatttggaagggaacggcggcggcggcgcgctagggttcggccgggcgacggcggctcatggaagacgaacctgacaggtggaccccacctggcatcgagcgagggcgcgcgcgcgcggcggcggactgggccgacttgggccgatgaaagagagagcggttttgggccgactttcggcccaaagccaaaagggactttttaaaacctttttcaatttaaattatttcttaaatgcaattccatttattaaaaaatactttcttaagtcaaataaatcccagaaaaaatctaggaattattgaattttagcaagggtttaaataaaattttatcttgcgccccttttatattggaatttatttattaaaattagatctttttttaagacttttaaaagaaattctaaaaattccctttaaacaacaaatcatatatttttgaatttt

SEQ ID NO: 48901 - DNA, 457 bp, Oryza sativa
tcactgtggaggcaccctgttcgacgttttgcctaatagagcctggagagtttcatccactgtttacacatgaatgccatcctgtgatgtggtgacgaacaaagccattcttcatgacagctgaggtcagtggctaaggatggttctttctttctttattctttcggagtacattctccttaaaaactggccttctcatgattttaagtgatgattgttctgatcttacccgtgtgaacttgtgatcatacagctcttatcggcaagaaagttataaaacagggcaaaaactccgagtgcagatcacctaatgctgatattggtatatggtatcatcaccaaagcacacaattggaacaaaggagagatcacattttggtatggtttctactatttttcaatgattattttgtgagtttgcccacttaagtacctgatcacatataccatagacgtg

SEQ ID NO: 48902 - DNA, 303 bp, Oryza sativa
  unsure (1)..(303): unsure at all n locations
ttttttttgtgntgagaaaaaaaaagagggggtgtttgctagttaatatgatagacataacaacaaagtatttttggatactaagaaattatttaaagatgcttgggtggaatagaaacattgtcactgaggtattcgaatggaagaattttaagtatggtgcaccagttttcgaacaagctcttggttcagatgatagaaatgcataatatagatataaaaattcttcaagaaacttggcaaaaaccattctttggatgctcttggtttccatggctgaatattcattgaaattaagctctt

SEQ ID NO: 48903 - DNA, 509 bp, Oryza sativa
  unsure (1)..(509): unsure at all n locations
agcttcgntgttagatgtgattttactctgacctctgtagactatcttctaacttattacttggttcataactgggaatagctcccacgaacaagcaactcagattcactttctttatgttcagtttactttccgctattctcttcatgttgtcatcatttagcattcaacgtattcctgtgcaccttcagccttgatgtgttctttcccatgggatcatctcccaagacatggcggtgcctgttaaccggggcttgcacttttcactccgtgtagcatctgataccgagttgaagatttcactccttggcttcataaaaacacttttacctaagccatcctgcttacttaatgacaaggcgactgctgtggggggggggggcaaatactatcaaggggccttctttgagccatgcacagcgtgtttctgtgaatcaaatacctttcggctatcgctcttcatcctagaagaaaatctgtgcgcaatttttttcaacaaatcctctttt

SEQ ID NO: 48904 - DNA, 365 bp, Oryza sativa
  unsure (1)..(365): unsure at all n locations
tacttatntacttacctttatactctgattttcttatctttattctaattaatccaaaaacttgtgctattaattggataaaggtcttaactccctcctttcacttgtctttagatgctgcgttacaagcctgagtacctgtttggtgttgagggttttgtccaggagttgcgtacgatgtcctttgtcattggatttgggactgccccattttatgcccagattccttatgatangtattttaatttggataaaaaggtaggaaaaagtgttttaaaaaaaaatatagggacgtttatttttgggggttctcccctagtcaaagtttgcttgaacagtatatgtgaagatattccctcactgat

SEQ ID NO: 48905 - DNA, 530 bp, Oryza sativa
agcttcaaaactagggaccaacaaccaaaatgaccacacacctgccaccttttattttaacacctaagctttcaattttcagttatatatgaaatgattccccaatggtctccaccttttttaattatcactaacacagagcaaacgaatatgccttattataacacaaaccttccagacctgataagtaataacataagcaccggttttcaagaaaaaaaaagaatcttaaatctccatagttgatactagtagcatattataacacgtctaagttgggaatcaacaagacatgtccatattcaccaactgaatcatgtgtaaacaacatcaggtcaccgggtgggctagctgagatcaaagagaaaagccactcaccaaccaggacgagaagccccatgactggttcaccggccgccacaaaagcctccgtagaagccttgctgacgactacctccccggctttcttgccctaagaaagggaagagccctcctggcttactggcaaaacaattgcaaattccttcccg

SEQ ID NO: 48906 - DNA, 293 bp, Oryza sativa
  unsure (1)..(293): unsure at all n locations
acgcacatattccgcagacacaaaaacaatgtgttgtatcacctgtaatgggcctatgagntatgtaacttctctgggaccccggcccaagtggggcccatgtgtggtgtgccccaacctggtggagaatgaccctagaacacctctagtcattcttccaccattataaaatgctatgttctccattaaggtttctccggttattgttaaattaaagtttatantatttaatataccatttttttaatatttatttatattgcatcttctttcacttgatcctttttcatata

SEQ ID NO: 48907 - DNA, 519 bp, Oryza sativa
agcttcaaatctggcaggatcacgatcagacaataacaagtccagcagcatagtcattctggaagacgtccaagcatgtcaagcgggataaattggttctcttgggaagcataacttataattagagtggttgaccctggcatcgaatagcagaagtacctatcaccggagaccaggaaagccaatatgaggcagttaatggcaaggtgtcaatcatgggatcataagctaaagcgggatatcatagtctaaagcgtatggtggtaagctggaaggaaacgccaagcatgatattctcatgataacaagcatggtatcctaataatgacaagctgatatcgacgcataacgggaaatgggtaacttgtatgaggttgacgccaaagatatgaattatgagaagttctggaactgaagtcccatcttcaagtgccaccacccaatcgaagtcagctaaaggttcaaccctggctcgagccacgtgaaaagaagataccacctgcaacaggaaatcgaccc

SEQ ID NO: 48908 - DNA, 206 bp, Oryza sativa
  unsure (1)..(206): unsure at all n locations
cttctcttactgaaggnggggaaagaatgagcaccaatgatctctttcctctttctcagctagccacaccggctgatgcatgattaatgcaaggcggtacaaagggcaataatatctgtgttaagttttgcaccatacatcatttaaagttccttatcttcttcaagctacttcttaaacccccttctagaactatacaatttcat

SEQ ID NO: 48909 - DNA, 179 bp, Oryza sativa
  unsure (1)..(179): unsure at all n locations
cctcatgcactctangcgggggtgtttctaacagagagaggagctcttgcgctccccggaaagagaagtctcacacacatatttagtcatggttcaagataagttctctatctcacacactcatggcagttctaccactggcgacaccgatttagggcacgcctctcgggcctacctta

SEQ ID NO: 48910 - DNA, 681 bp, Oryza sativa
gacctgcggcctcaagcttccagaggatacacatgtatgtcaatgtggtagagtctgtttttttttatgttctttgaaatccttctgttcttcatgttaccattagaagttcttagatttcagccccccttctttgtacactgattaatggataaattatacattcagttcttgatacaaacttatggatgttctataccaaagttcatttcttcaagtctctcctttttttttgaaggaaacatgtcttcagttattgactctgtttttttttaaaaaaaatctctgtgagatatataagagagctaattagtggagatcatctgtggacagcactaatgattaataacataatcaagttgtggtgggctggcgacccctcttcgctgtgataattaagctggtttagcaatgaatacattttcagacagacctgtgcccggaatgttaggtgggccggccattgcacggttggggaaccccattaaaggatggacgccctacccaccacatggacgggagaagaattgtccgtgtacgtaccagaccattgttaccaagtaccaaccagctatctatgggtctggttaattccaaagttttttccaaacttttaactttttattacatcgaaccttttattcccacataatttttttaatccaatcctttccaatttca

SEQ ID NO: 48911 - DNA, 358 bp, Oryza sativa
  unsure (1)..(358): unsure at all n locations
tagtgcatatacacattgctgaagtagctactcgttgtatttccaggcgatccaaagggggttacagttcagattttgtcaaggtctctggaaggaaagctaacaatctgccgctgcttgttcatggagaagagcaatgtatgtggttcatctctcaaaaagaactgtttggtttttgttcattttgaccaattgtgaagcactcaaatcctgcattaccagcattntgtggccttaaccttttggaaaatttgggggttttttttttttttttttttatccccaccccccccccaaaaaatttttttgtacttgtgtttcagttggccacaacaggggaagtgtcaacagatcttga

SEQ ID NO: 48912 - DNA, 510 bp, Oryza sativa
  unsure (1)..(510): unsure at all n locations
agcttgtaaacctgacttggccgagctgaaagtgtgttcatcgntcactttaatttagtttacttccaagtgcaatctgcctatctatctagctactactcctagattgttagaccagtgatcaagtagtccatcaaactgttgatctgtttgaaatcctcatacttaaactggcaacttgtgcttgattttgctttccatgcatggacctagtcatgcatcactgatcgctaagtcaaaagatcaaaatctcgataccaagttaggaatattcttggagattgtacatatagaaaaatggagaagatatgaacaggtactgaatagtgatttctttgatcaatgtgcctggcaattaagaaggaaaaaggagtcacgctaacatgttcaatgggcatacatatattcagctcacaattaattaatttattacaagatactttactctgatttttcatgcatggacttcattggccgacctttttttaaaggagccttaattttggtggg

SEQ ID NO: 48913 - DNA, 255 bp, Oryza sativa
  unsure (1)..(255): unsure at all n locations
tatggtgacgaacgggatcagcgtgtcccattaaaattatatgagataaatttccanactacggattcttcgatcgacatacattaaactccacattcaactctgtgtttcacacaactatcactttaataccataacttatcttgaggttatataatctatcatataaatccactacaatcttatttaatcagtctcaaaatgtatatttatactgacgatgtaactaatatatgatatttgaattatatatat

SEQ ID NO: 48914 - DNA, 483 bp, Oryza sativa
cttaagtgactgcagcatgcaagcttgaataaaatgatagcaccatggtacaataggacctgtgttcttaataaaaatgcacaataggattttgtcatatattggggttaaaaggctatatctttcaaacagaacacgcaaccgaaattcactaatttggtcaatttggtaatccttttttgtgggtttgggcttgggctgtgaaacatgatccgaatcccatgtctctgatcactggaatccaatatatgcatcacacaatctttgtttcgtcatggttttgatgggaaatgtgcaagcctgtctcaatttttaaaaaaagggaagatgctggaatccaatatgcagctaaagaatgggagctcatgaccatatcgaaggaatgctaaaatggcttggaaggcataccggaacaggaacaatatgtggggataacagtgtgctgatcattaaaacgaacctgcccagggtttttagcaaata

SEQ ID NO: 48915 - DNA, 371 bp, Oryza sativa
  unsure (1)..(371): unsure at all n locations
tactcaacgctttcaagacctcaagaaggcactctcctctgcacctgttttatccctaccaaattntcaattacccttcactgtggagactgacgccagtgattctggtattggtgcagtgctgactcaaaatgggcatcccatatcttatctaagcaaggcattatgtccaagaactatagggctatcgacttatgagaaggagtgcatggctatactcttagcagtagatcactggagatcctattttttgttcgaaggaaccaaaaatattttgtttggggttggtgggttcggggctcatcaaaaaaaggaggcctttttttgtcattcttattgatcatcataacctgatgcatttatcanatcaa

SEQ ID NO: 48916 - DNA, 577 bp, Oryza sativa
agcttgagctttttggttttgactctcttgtaaatattttgggcctcaagaggtatgatccatgctctgcctctgtttgttaagcacctaaggctgtgtttgagcggcacgcaaaactatatatgcgttaacgcataattaattaagtattagctattttttaaaaaaatagattaatatgatttttaaagcaatttttgtatatacttttttttttgtaaaaaacacaccgtttagtagtttgaaatgcgtgcgcacagaaaatgagagaggtgggttgggaaagtgacaaaagaactcaacctaaatgttttgactaatatgaagcatgcgctctacaaagaaattgttagaactattgatttttctttatgatatcagcatctgattgaaactgaacagcatgacaggagaacagattcaggccccttccagtcctagggacggtgaggatgttgcaattacgattggacgcccaaaggttattctccattttaccattttggaatgaagcccacttgtaacttaaatcctaaggtttcattttgaagagaataactacatattttttggtttt

SEQ ID NO: 48917 - DNA, 360 bp, Oryza sativa
  unsure (1)..(360): unsure at all n locations
cttggcggacacggaagagtatgagagctcagaaaacacactctgagcccnctacctggcgcgccagatgacggagctcgtggctcctcaccgggagaccgcgcaggcccccctttgccggttcggccgggggcttatggtgagatctcaagctctcgctgtgtgtggaaagatcgtccgcccgcaagacacacgagacacggcgatgtatacaggttcgggccgctgcgaagcgtaaaattaancaccccccttttaaaacccttttttttcccccccccccttttttggggggggttttttggggggggtttggtggtctggtataaagactacaaggtgagccnnaccttccttttc

SEQ ID NO: 48918 - DNA, 615 bp, Oryza sativa
agcttgccacagttgcggtaggcgtcgtctcgtgctggcttgttgttgcctgcggcgccgccctgggcgcctctgcgggcgccaccctcggcacgtatttgcgcccaccgcagctggacacctccgcatgccatgcgctacttgcgaccgcccgtcggggaggaggaggactcccccttcctcccatcaccttggctggcctcccactgctcccgagtgagatggagcttcccgccaatggtgataggccccgagagaggctgtggctcatggccgtcgatgaccttgaggcgacctatcgcctccttgatcgacatcgtggagagatccaacagagactcgatcgagcgagcgatctgcccatacttttctgggacgcagcggaacagcttctcgacggctctctcctcattataggttgtcgcccgacctgaccatctttttggaaaagagtgctgcgacggagggcaaagtcatcaacatcctcacctggcttgaaagccaaggtctcccactccttggggagggccggaagggggacttgccagccctcctggcagccgcttttggaaaacaaaaagtggaatctcggcggaatggagcgaaaggggatcc

SEQ ID NO: 48919 - DNA, 361 bp, Oryza sativa
tgccgtcatggcggtggccatcttctacctcctccacattatgaacgagatccatggttatacggccttcaccatctacgtcgtcctcacgtactgcttcctcgacttcctcatgccgtgtgttgccgcggtgggcgccgcgcttggcatggagctggagccgcagttcgacaggccgtacctctctgcctcgctgctggacttctcgggaaggcggtggaaccttatgtgcgtttctggggtgcggaaaattttggagtcccccttttttttccccccccccccgggggggaccccccccccccccccccggcggtgtacgaccgtgttatggcccgcctctgtgcaccgggcggcgtgc

SEQ ID NO: 48920 - DNA, 440 bp, Oryza sativa
ggcatgcacgcttgccaaggtaactctaagtagcacacaactgaaccaagatgatctggatgttctctccaagctacccaagttacagtgtgttaggctccgacacatttcatgcacagagagcatgctcatcttcaagaaagatgatttcaaatgtctcaagtaccttcttattgagggctttaacttgactaatatcacttttgagaatagatcagcctgtgagctcgagaagatggttttatcttccaccagcatagagtctatctctggagttgataggcttccaaaattcaaagagcttgagttgaacaacagccctgtcccgaatgaggtgaaagaagccattgaaaacaataaaaggataaatcttaaatgtaatgaaccatgaactcaagatgaggtaaaacggagatgatcaagaggatgaagacaatgct

SEQ ID NO: 48921 - DNA, 228 bp, Oryza sativa
gcgctatacaagggagtctaaccctagtctcaacttctttattgtcgtcctcttcttcggtgggcgaggtcctccttttatagctcaacgggataccatatgcaccgccttacacaatccatcactggatgggggcccacatgtcctgggtcaagccgccgaacatcccacctatcggcatgcaaattatccatatcttccctattgggtaccatacattttcctcca

SEQ ID NO: 48922 - DNA, 486 bp, Oryza sativa
catgcacgcttgatagttacggtaaacaatttatatttcagcaaaagattgtcatataatttttacccccaaagcatcagcatgctagattgattctaggacttgagcattgcacagttccatcagcatatatcaattggaaggagcaactaggtaagaaattctcattaatcataaacacagataagcttaagtacaggttttcacttaacgaatgacggaaaggttaacatctaaacatctagaataaactaaattataacagaagtctaattgtatcacagtaaaaactcctaattttaaatgcattcactgaacaactaacaattcgacaggtatttgtctgtgtgtgtgagagagtgtgagagagagagtgtgtgcatgtcctgtatcagtactctaatattaatcaaagtatcatgcttaaactctggcttccaaaaaattacttaataagcccgacatactggtggaaacaggaaaaac

SEQ ID NO: 48923 - DNA, 346 bp, Oryza sativa
cggcgttgatcggccagaagaatgccaccgccatcctgtcctacgcgctgtatatcgtcagcacagggaccggcgatttcatccagaactactaccacaacgcctcgttgtcgagccgctacaacgtcaacagttactgcgatctcctcatcagcatcttctccggcttcgccaacgtcagtacgctgccaccgccttcatcgtctcagcttctctacaactgcatgcgttgcaccggggccaattttttctttgtggggggggcccccaaaagggggcacccctccggcggggtaaaaaaagaggggggctgtgtgcatggacttggacgatgcttgtgctgggg

SEQ ID NO: 48924 - DNA, 118 bp, Oryza sativa
atttcttgaagcgcgagctgcatttgaaccttatagccgtgtggcaatatctgctctacttggtgaaaacgggcgctaaaaaaattgccaatatttgcgcgtgttatcacccgattac

SEQ ID NO: 48925 - DNA, 73 bp, Oryza sativa
ttgtatttggccgcggggtttcaaaaattattttttttactttttatttaatgacgcaccccttttttttccc

SEQ ID NO: 48926 - DNA, 650 bp, Oryza sativa
agcttaaacaaacttttcatttggcttttttgaagtcataagccattctaacattcttaagtcgaaagctacggtggagaagctttttttatcttatgtgacggcgatgtatgactccaccactaaacttatgacaataaaacccctgcttaccaaatcattagcccataaactgacttaaaaagctaatcctaagcaaagaggggccaatattactttatttggttcctatcaagtcattggtcccttgttcttaactatcttaaaagctgtggtaagggaacccttgcatgagaggtggcttcatctctcttctttcatatctctcatccaccttgatgtatgagcttacatggcacctagagacaagtgcgtataggcttgtattacttgccttaataaactactcgtattggatatattactatgctagcgataactgctacaaatcctcattgagtatggcacttatactgattaaaaagaactttaccccggctaactaatatatacggaaacccctctttcaacctattttaaccaatttacctattcctatttagcccgatgtattaattaattattcacccaagttaacccctggactggaatctggcctttttggcccccaatattttttggtgctggcc

SEQ ID NO: 48927 - DNA, 378 bp, Oryza sativa
  unsure (1)..(378): unsure at all n locations
ggacctataaaactcagcttatcagattatataagctgggctccagattataataatttacttcaataagttgtctgtttctttcagcttactcccaataatctggagtataataatctcaagctgaaagaaatagggcctaatactagttatactccctcccagctttttaatggatgataacgttaaattttatcagacgtttgactattccttgtaaatatacattataagtaatatacataaagttactttttanaatttgggaagattaaaaatanaaaacccgccccccccctaaaattcgaaaacttaaaaaaatttttttttccccccccaacaatataaaaggatatttacttaattttttaactaaga

SEQ ID NO: 48928 - DNA, 392 bp, Oryza sativa
agcttgccgttcgccttgagaatgaccaccgggttcgccagccactccggatggatgacctcgcggatgaatccggcctccagaagtcgcgccacctcctcgcggatgaaggcttgacgttccggggcctgccgccgcactttctaccggaccggccttgcgcccggccgcacggcgaagacggggctcaatcacctccctggggaccccgggcatatccgccggtctccatgcgaagacgtcagcgtttgcccgcaggaaggagacgagcgcgtcttcctatttgccgtccagaagaccaccgatccgtgtggtcttggacgggccgtcgcccagggcaaccttcttgaccgggacctcgtcccatgtgaacatccgctggctcggggcgc

SEQ ID NO: 48929 - DNA, 383 bp, Oryza sativa
  unsure (1)..(383): unsure at all n locations
gtgacctatcaaactaagcttgacataactgattcaccaactatgtctataagtgaaataaaattgtttcttaagtaaagtatactcatgtccataccttatgagttatactactgtcggtagagaccattatttgtaaaaattaccactataacatgtacatcaatttatgtatatgttcactatccatctgctttcaccttgataccttattatcaaccaggaaatcaatgggcagacatattttccacaaaaatcaagggctttccaataaacccgggacccccgggccttttttctccccccgcggggggaaaaaaaacccccccccccccccgtgctacaagacaataggtcatctgtgatgggcagaacaaanaaaa

SEQ ID NO: 48930 - DNA, 394 bp, Oryza sativa
  unsure (1)..(394): unsure at all n locations
agctttactgtttgacaccttttaagatgcattgtaccaactcctaaaatttttagtaactgcggtataaaaggattttaaggtattgggcacttgatcacgcgcactttggcctaagcaaaaagtgcctaagtccctaaaagaacgtgacaggccacacctgaaaatatgggctgcagacatattangcctaggccaaaaaatatgccttcgacaccctttaaaggatgacgcatataacatgctcccgagtaataaatcttccgggtaatatagaccaagcgtaactcatatgaataacttctgatctgagtgattatcccttatgggatactccaaaatggatggaacaattgaatcccgactggcgcaagtatttaattgataaccctta

SEQ ID NO: 48931 - DNA, 374 bp, Oryza sativa
  unsure (1)..(374): unsure at all n locations
atctagtgtgcacgcattccctgtccacgtatttttcttatttccattaaccttatcttgtgtgcacgcataatgtacatgggtaataacatgttcttggaagtggtccttacctacaccgctatataaagcgacgcctctcattgcgacaccaccaatcttattctacatatttctatcttatatagaacaactagcatagctctcgttgcccagaccaggtgtccagccaggggtttttgggcctccttttgggggggggttttggggggggcccccccacaaaatacccccccaaaaaaataaaaaagagagctggctagggcggactcattctgctgttggtgcccaacgatgctnnctgctctctttct

SEQ ID NO: 48932 - DNA, 507 bp, Oryza sativa
agctttactgtttgacaccttttaagatgcattgtaccaactcctataattttttattaactgcggtataaaaggattttaaggtattgggcacttgatcacgcgcactttggcctaagcaaaaagtgcctaagtccctaaaagaacgtgacaggccacacctgaaaatatgggctgcagacatattaggcctaggccaaaaaatatgccttcgacaccctttaaaggatgacgcatataacatgctcccgagtaataaatcttccgggtaatatagaccaagcgtaactcatatgaatagcttctgatctgagtgattatcccttatgggatactccaaaatggatgtaacaattgaatcccgactggcgcaagtattcaattgataacccttacggggaataataaatagtccagtctttgaacatataaaataaacccatgatcatgaattcatgttgcatgtatccggaacaaagtccaaattgaagaaatatacttggggtt

SEQ ID NO: 48933 - DNA, 372 bp, Oryza sativa
  unsure (1)..(372): unsure at all n locations
aactcaacgctatctagtgtgcacgcattccctttccacgtattttcacttattttcattaaccttatcttgtgtgcacgcataatgtacatgggtaataacatgctcttggaagtggtccttacctacaccgctatataaagcgacgcctctcattgcgacaccaccaatcttattctacatatttctatcttatatagaacaactagcatagctctcgttgcccagccaggttgcccaaccagggtttttgggaaccatttgggggggggttttggggtgggcccccccaaaaatacccccctcacaaaaaaaaaaaaaattgagagctgggtatggcggactcattctgctgttggtgcccnacnatgc

SEQ ID NO: 48934 - DNA, 593 bp, Oryza sativa
agctttccctaaagggtcagcactaccaaagaactacaatgaagctaatattacagtgaaatgcttagggcttggatatgttagtattcatgcatgtaaaaatgattgcatcctttattggaaggatgatgctaatgccaactcttgtccaaaatgtgaaacctcaagatggaagtcagaaaacaagagtctaaatggcaaacgcatacacaaggttcctaataaagttcttcgctattttccaataaagagaaggtttcagaggttgcttgcatgctctagaacagcagctctaacaagatggcatgatgaagagcgcacacaagatggtttggttagacatccagcagattctcctctttggaaggattttgaccataagcacccagaatttgcctctgatcctcgcaatattagatgtgcattagctaccgatgggtttaatccattcagatccatgaatatttcttatagcatttggcctggtattataatttccttacactttccaccctggatctgtatgaaacaaccaaacttcataaattcttttgtaaattccttgtccaatttgctcttggtagtgacattga

SEQ ID NO: 48935 - DNA, 350 bp, Oryza sativa
tgacgttgcgaaccactgtgtctagtaccacggggtactcttctgtgtggaccactccgtctgggagatccgagcggtcaaacttgattgttgtctcccaccatcgaagatattatggcgtatcgggttgaacagcgttgatctcccgttcagtcagctattgctttcttttaaactcgtaagccacagggccaccacagatgtggttgagttccttgcgatgatcttgaataaccttgtttctgtggtggggggcgccaaatttatttctcccctaatattattttttccccaccatcaacattttctccatattttttttttaacgtgcttgttttcatcaaactctt

SEQ ID NO: 48936 - DNA, 472 bp, Oryza sativa
agcttttgcttggtatctactttttcctacttcctctcgcagtagctcataaaatactactactactagtactacctgtctacctactcaaatacaagctgcggtccaggacttttaacaaggaattaaagtcacaagatgtaaagtttcatccttccaaggcaaaaggagattaaaaaggaccattttgactgccttttgatgaatcatgaatgtaaagaaaagatgcatacagcctatcttggacaaaaagaagggaattgggaacacagagctggagtaccgtgcatgatggtagactagtgtagctgaaaaatcaatcaatctgcacttgatcaccttgacagaaacatactgttgctattgattgtagcatctctttcagctttggtggcgagttgaggtgggtggtgagttgcaatgtcttcatttccaacaaggatagactgctcaatcgtttgaacacgtcgtc

SEQ ID NO: 48937 - DNA, 359 bp, Oryza sativa
  unsure (1)..(359): unsure at all n locations
tatcagattataataagctgggctccagattataataagctacttcaataagttgtctgtttctttcagcttactcccaataatctggattataataatctcaagctgaaagaaatagggcctaatactagttatactccctcccagctttttaatggatgataacgttaaattttatcagacgtttgactattccttgtaaatatacattataagtaatatacataaagttactttttaaattggggaatttattaaanaaaaacccctccccccccaactcctaaaatgtaaaaatttttttttttccccccaacaatataaaaggatatttacttaattttttaactaagataatg

SEQ ID NO: 48938 - DNA, 470 bp, Oryza sativa
agcttgtaagcagcctctgacgtttgtgaactgaactgctgtggtttcaacagaaccaggatttgatcattggaacttgcttatacaaatgacgataggatcaagaaatgaaaattttggttctgctttgtagaatatcttgtatgctaaccagaagtttaggctatgacgctagtgtggtggtggagctttggtgcgtcagccgtggattcgtaggtggtgagcggcgggtgaaaacctagtccggcctcggccggaccgacaacgatgatcaccctcctgagggcattgtcgtgctgtctcacctcctgagggcgtttgcctggtgaaagctcagtcttggctcctttgagtcccaacggacggcggcggcggtcttccgtcgcttctcttcttgaagacgtcgttctggcatccccttgggggcaatctcgtctgtgtccctttgtccgtctaatggcgggcgggca

SEQ ID NO: 48939 - DNA, 361 bp, Oryza sativa
  unsure (1)..(361): unsure at all n locations
tcctgctcaattaacggatgcagaccgatgccacgctttactgcttaccggcctcatctttttcttaagcatcttattagccaaaatttgaatttttaatcttaaatttggagttgattttggggtttttttcatctaaatttatttttcagcttttgcttttaaatcactaagaacacgtatataaaagttttatttacaaattatttttagtttacaaatttattgtttncgaaaaaccggaaattggtggnntaaaaggntcccccccccccccctttttttttttttttgggggggttttttttagatgttacatgtggacccacatgatcaatgacaaatttatnnncatggtcaa

SEQ ID NO: 48940 - DNA, 525 bp, Oryza sativa
agcttataaatttctcaaagaaagaggggaggtcatgccaaaatttcttgtgaaatttttttagtgattatatacaaatcggaggtgtctaaaaggttagtaacttcctcctccaatgtttttttgttgttatattacttttggagctatgtttcacacatttttttttctccaaaactttgttgtaagttgatgaaagagaaaatttgtgtggggaagaagaatatatagaaattttattctcatagtttaaaatatgatgaaaattaatcttaaaaaacagaaaacaaactaaattgaaaattaagagaagtacaacattaatattagtttagaacttcaaaaattgttaataaaaattgcttgtcgaaagagtttttaattattttatcattactggttgactgtcattattgtacgaaaatttatttatgtacgatttttttttcgttcatgtagatggatcggcaatggatgtacgctgaccggggtccaaagagtttatcgagggcgtgcattattttt

SEQ ID NO: 48941 - DNA, 360 bp, Oryza sativa
  unsure (1)..(360): unsure at all n locations
cctctgttctagctatggcataggaagnntttttttttcttatttttatttantggngatgccaagctttgcagtatattaattgataagcaacatcactaggggtttaactctttgattgtcctagtgacttggtagatttggaaacataaaaaaaaggttgcgtctttaaagggacctctcatattaccaatgttcttatgcaagatacttcctccgtcccgaaattcttgaaccggtttttccctttggttaaaggggtaaaaanattttttttttttttttttgggggcgggggtttttcttttttttaccaaattagcttcttattgaatgactaaattacccctatttatttaa

SEQ ID NO: 48942 - DNA, 602 bp, Oryza sativa
  unsure (1)..(602): unsure at all n locations
agcttaaagccatgaatccctattatgcatatccggatctgaatcttgcataacaaacatataggatgagtagtacctgatgtaaatataatactcaaggaaaattcaagtattttaaaatgtttataaatatgtattctcctcttgtcaattttgatttccccgagcagatgactccttacgtttaaacactctacctgactaatcatagcccccgcgcaccgggagtcagcataggcacttcccaaacatgcatacaagtgacatgagttcgtcattaatggaacaaagtttcacagatcggagtttactactctggtacttttgcaattattaagagcataaaataaattatcttatctctatgcttttgatttatccgaataatacttaacaccttgtattattcgggccatccaacgagcacccgggtgctangaaatcggccaaaggcaactattcattagcaaaccaaacggaaagcataagaagatggaactccctaactcgataggcacttttgtactcacaatatggcgcgagccatcaagataattttatgaaaattggttaaaaaatatgatattacatctggagccccc

SEQ ID NO: 48943 - DNA, 334 bp, Oryza sativa
cttcttcacttcaaagcccaatgcgaaaatatccccttcttcgggtggtgaaaccaggaatgcgtagttgattcttttcctactgattcttattgttaaaattggactcagtttgtatgaacatccaacatttttttctctaagtgaagaaatgtttttttaagggctcatatcacaaaaattgaacttgattaatggttattattatttttttcccccgggttgttgggccaaaaaaaccccccgccggtctctttgggggggtttttttcttcaaagaagtggggggggggatcgaatcacaagaactaagctaaccagaggggggtgaatg

SEQ ID NO: 48944 - DNA, 85 bp, Oryza sativa
  unsure (1)..(85): unsure at all n locations
tggtgctcctttggtatttggntccccggggggggcataacaaaaaaatttttttctttcttctctttgtttctttccccccacc

SEQ ID NO: 48945 - DNA, 460 bp, Oryza sativa
agcttagaagattggttcagtataatatcaaaggtacaaacactatctgattattaacagaaattcagggtacagtaaaatgaacctttttagtaaaataactttcatgcgtattcatctctattaagccacgttttagctcgattttctctaccaatgcagctgcacttgcaatcaacttttcgaggacacgagctccgttatcaagacaggcttgcctcatgttgttccatgaagtaaccgggtcttgtctccgaggtctagatagccagcgaaagagagcatcttgattgctagaagaaccatcgataatgatccttaacgcatcctcttcgacaactatggaaggaacgaaatcctcacgaacgaccgaaacataatcaaaatgatcattactatcctgcagcttggcatcatcatcaccagcactcaatccaagcatagtcgatcgttcaaaaaa

SEQ ID NO: 48946 - DNA, 221 bp, Oryza sativa
caacagctggccacggagaataaagaatggattattattatcgtcaactagccacgaaataggatgattaatggaattgtgatacctctcaaaatgtgcttaatcaatttgggccaggataccatgttttttttttgtcacaccttaatttcctgccgcgcaaaaccaaggaaatgaaatctacacagaaataataaaagaagggggggggggggtttttc

SEQ ID NO: 48947 - DNA, 532 bp, Oryza sativa
agcttgaacgttttcaagctaatgcctgagtggttcctgagaatgcaccctattttttcgtggaaattctcgccaaacgcatttctcttcaagccaatcgtgtctttattaaagataagattgggatgacacctccaagaacgtagaaaagcacgagatacgcaagcagcacgagcagcttcacgcattgacataaaggaatgtatacgagacaatatgtcctgcattacacaaacatcagataaaagatcaacattgatattgcaaatccatatgattacttcaattggagaaagaaaaaacagaagaatcacacagagtaatgttctgccccaggtagctctccacatgaatgcacagggtgaattgcattacataggttagatagtgcagaggaacataaccgtgctagggaaactcagtactgcatagagagggtttcctaacagtgttattttagtgggtttctaaatgaaaaaagaaacaagtggtaacagctagcaccattaacaactacctgaaatattttact

SEQ ID NO: 48948 - DNA, 336 bp, Oryza sativa
  unsure (1)..(336): unsure at all n locations
gcgcgccacaccgtggtccacgttctttctccctatctccgncgagtgttcgaccgagcataacgactgcgcggcgctatgactgtgctctgtggctcttactcccgacataatctccacgcttcggaacaacaccatctctctctccaccacatccaccgagcgggggcactactccctcttccactaaggttggaccttcttatggttcaccattctgttttatttaaaatgtaaggttggttaaagccgctctttttttttttactctatatatactccatctaacaaccactccccccctgaaattcattttaataaattttatatagttct

SEQ ID NO: 48949 - DNA, 271 bp, Oryza sativa
agcttaaaatgttgcgggggtggtggtggagcattgtgttgccgcggattccgtagttgtggaggaaagcagccctcatgttggcctgctgggcgaagatttgggtgaagatggggttggtggttgggggcccgtcgctgctgcccgctttcttacttacaactatctgcccaaccctcggcaagtctgccgacccctggggtttcccggcatattcttcccttttcccggtatcacctggatttttgctgaccccggcgctaaatggctt

SEQ ID NO: 48950 - DNA, 385 bp, Oryza sativa
  unsure (1)..(385): unsure at all n locations
gcattcggaccttagatctcagctttgaatacaaaaatgagttctggaaaaaaagatgtaccatcatatgggtaaaatttggggatgagaacacaaagttttttcaggcctcagcaactgatagtcatagaaggaataaaatctcgcatctcagtttggatgatggaagtatagttactactcatgctgaaaaaaaacagattttatatatggcctacaaaaacagaatgggaactcggggctcaatggacatgatcttaaaatnttttgggtnctttgggggaaatttttaatttttttttgggggggggggggtttttttttttttttttctcccccccgcggggaaaatggaaggcttggagtgtcttattgaaatcccatc

SEQ ID NO: 48951 - DNA, 490 bp, Oryza sativa
aacttttagttcctttgcctggtggccggccttaaaaaccttttttttttttacccatgtaagggaaaagtcttatgtactcatgtttgtgacttttaggctgccctcacaaggtgtagaagctgggtttaatgtaatccattatctaaaaaaacacacccttagaagtttgagaagtattgcactaaccatatttactctgacttttagggaatgttggaattctattgattaacttgcatcataacagagtgtttcccggatacagtccggaatcacagaacgatcgacagaacccgagaattgctcataacaatgagcccaagtgtgagccgctacattacagcagaggcgtagctagctacgtggcactgtgggtcctggaccacttaaaaatttgatcgagattaaaactatagtatatgtagtactacttaatataatagaaattttatagtggactacccttttaattgacctattatatata

SEQ ID NO: 48952 - DNA, 352 bp, Oryza sativa
  unsure (1)..(352): unsure at all n locations
atgaaagcttcacatatgattattgaggttgatttataatctcaacaacaaaccacgatctaggacggattatggaggttgtcaatacattctaagcttaacaggaaagcattcgccatatgacctttggtgttgattcctaagccctaaattcctgccgggccaaaccaacgctatgatctctacccaaatataatggttgtcagtgctttctaagcttactcacggttaattggaaaaccggtaatttttccaagttaaaaactccccccccccccccccactttttatttttttaactccccctccccccccatgcctatataatttgcctacatgctaaaaaanattt

SEQ ID NO: 48953 - DNA, 80 bp, Oryza sativa
  unsure (1)..(80): unsure at all n locations
tngctctttggaattgggccctgggggggggtttcaaaaaaaactattattttgtcctcttctctcattctgcccccccc

SEQ ID NO: 48954 - DNA, 452 bp, Oryza sativa
agcttgaacctttgctcgtcccgagtgaagaacgaaaggaaacaaagacttggttgttgatcagaagttgctactatgctgcatatctcaaagatataggtgcaaggtatatgtactctctctcggattaaataatctttggcacgggggcttacccttacccctgatcccacgagacactgcttctccttgccttgggcggttgaaagacagaacagtaattagagcaccaatcacccaatatttattcaactcttattccagaagttttcaaatgatttttgcaaaagaaacccaagttcctcaaatgattcactcggtctctccaagtctatcaatttaattcctcacctggtttgcccttttgattcctactctaagggttgatatgtggagctcggtaaggatcaaacatggcctacttgcattcacattttttaactaagtaaaaa

SEQ ID NO: 48955 - DNA, 366 bp, Oryza sativa
  unsure (1)..(366): unsure at all n locations
ntccttgagccgatacccattgtgctccttccagctgcatctactcatgtgggagaagcctattcatcctgccgagagaagcattcatcgcccaaaaatgcctttttttttttgaaagaagaaatgccttattcattgatactcgatccagaacctcatcaaattatacctagagtagatgctgaagagggcagagtggcgcacctgaaacacaggatgtcatcatcactttgttacaaaaacccttntttccttttttccccccccaaaaaggggngtnnaaaaaaaaaaaaaaaaaaaaattttttttgggggtaaagaaacataaaacaagatgctgcagaagtagatgtatttcaaaatttc

SEQ ID NO: 48956 - DNA, 420 bp, Oryza sativa
agcttctcttactgaaggggggagaaagatagagcaagaatgagtacttttttttgtactcagcaagccacactggcagatgcatgattaatgcaagggggtacaaggggtaataatatcggggttaagttttgcagtaaacagcatttaaaagtcacttagttgcccaaagccattttataaagacgatcctagagctacacagtattagtaatcaaggccgtgaacccacacgaacctgccttaacccaaggcctacgatgattcagaccgaactggcaacccgaccttgggtcccagctcgtcccaagccaacccaggccaaccattccacattttagttattaagcaggttttaagaatttaaaaacactaacttgggtacattgctaggcttgcccataaccgaaggcgcggcta

SEQ ID NO: 48957 - DNA, 353 bp, Oryza sativa
  unsure (1)..(353): unsure at all n locations
tttcgataaccttgcattggcagtacccgctccattaacttatatcctcatgcactctangcgtccatgtttctatcagtgtgaggagttctggcgctcccgggaaagagaagtctcacacatattaaattatggttcaagttaaattctctctctcacacactcatggcagtcctaccaatggcgacaccaatgtagggcacgcctttcgggcctaccttaacgggtgtcccattcgttaaantcccggcccaaaacccacccccttttgttgttgtccccgccccccccttttttttttcctcctaaaaaaatcaagggtgaaccatctatgcagggatactgcctccgct

SEQ ID NO: 48958 - DNA, 499 bp, Oryza sativa
agcttctatttatgtgatcaggtcaaaccctgttcaaaagactaattttttttttatttgagcagtctttatgtttttttttctcttttcggtttgttattttttcactttcaggatgtgcttttgactcctccgctgtctttgctagcaggtactccggctgatacagctaagaagtccaacaaatcactggtgattggaattgttgttgggaacttgggactgtgctacttatagtgacgatgctcattgcagcttcactttgccgtttaagtagatggattacgtcgaggcctccacccatgccccttggagaatattgtgcaggcggtctttggccaagttatgggaatgtaggcatgggcactggagaatatggttttgcgtcgccttcacagactccgttttctttcgaagtattatcggaagcgacgaataatttctccgaggaacggttgctccgtgaggaaggtcagtttagtgcattctacaaggggga

SEQ ID NO: 48959 - DNA, 364 bp, Oryza sativa
  unsure (1)..(364): unsure at all n locations
tctccacttcatcaaaattttcaacggcttcacctatatcgttctttgtagaccaatattcttgcaccctctcttgtaaccactctaaattagcctctttactcattatacaaacttatatggcttagccgtgctacactagccggctttacagagataggtacaaatttgccatcggagatactaataaaatcatagctagaaagatccctccccgataagcattggatagttctcccnaatttggtgaaccagggtgccctccccccaaaaacccccctttttttttctcccccccaaaaaaaaaaaaaaaaaaagtagcatcggccattgcaacctcggccgatgtatctcgcttnnccat

SEQ ID NO: 48960 - DNA, 451 bp, Oryza sativa
agcttattacatggtgggcagtttacacataaaaagcagccatttttgattatagtgcttagaaagatgacaaagaaaacttatatgggctaaatatgaactagacatgatgcctgctcagtagctgactataaaactctgcaacctgcaaactccccgcataatcatatatacaactgccgttttccggcgcaagtagtgcctgtacctatacactaaaagtaggagcgcgccacaaagcgctgccctacatacttacacgatcggcgggaggatgcacccgggcttaaccttatatgaactacgcttttgatcgggaagagattatccccttaggggcaaactgccacaagggatagcaacacgtccgaatccccgacctggtgccgaatctcccaggatgatcacgcccttaccgggaactaatacaggggtccaaccctgtgaaccc

SEQ ID NO: 48961 - DNA, 362 bp, Oryza sativa
  unsure (1)..(362): unsure at all n locations
tatggagtctactntcatatgggtttggtttcatgtcattattcctaccgagctgccgggaatctacaaaacaaaacacgtaccttatccagtccaaatctgatttatgttttgggccttataattgtgtcgtgggcttagcccaaggggatgtgcgccctatggcaaccctaagacgtccctaatcatacttaatcagtagccgtcatcatttacagtcaggttttgctttaaagtattatttaaaggnttcccccttttttgtggggttttttttcccccccacaaaaaaaaaaaaaaggggggaaaaaacagtttcgtcgctagatcggtttgtagaaccccaaattccagtgcttaat

SEQ ID NO: 48962 - DNA, 469 bp, Oryza sativa
agcttgttgtgcgtttgttcttatctgggacttgccaaattgaattctttaattgcatgtcttgttgttggatttggggtgtgtttagttcacactaaaattagaagtttggttgaaattaaaacaatgtaacggaaaagttgaaagtttatgtatgtaggaaagttttgatgtgatgaaaaagttgaaagtttgaagaaaaaatttagaactaaacacggtcgtaatgccaccttgcgactgaccataggcagaactgttcaagctctcttaaatgatactaggatgatgctaagaaaccactccagtgtacaagccgtgataatacagcagggaaaaaaacagacttcgacacaacagaaacgccgaagctgatcccaaaatgattttacacatacagatcgcaaacatgctaaatcgtcctcagtttcttaccaaatggggggaagtttataaaccaactgtaaca

SEQ ID NO: 48963 - DNA, 351 bp, Oryza sativa
  unsure (1)..(351): unsure at all n locations
cttagaatctcagctgggagcttgcttcctcttgtctcttttccacttttggagctcngngagcgacgcggccatgcctgggcgggccatggcggcgaacgcctggctgctcanaacgatgcctgtgcggttcgtcctggcgcggtccgtgacgacgacactggcgcccgccttgctgcacagcttcttgttcttgcatctcaccttcagcagcgaatcggtcatgatggggaagtccatggtgaactaattttgtgggcctcccaatttttaaaaaatttttgttgttgtcccccccttacaatgagagtacgcccttactagttgcctattttggtgtgttctccttct

SEQ ID NO: 48964 - DNA, 463 bp, Oryza sativa
agctttactgtttgacaccttttaagatgcattgtaccaactcctaaaaagttgattaactgcggtataaaaagattttaaggtattgggcacttgatcacgcgcactttggcctaagcaaaaagtgcctaagtccctaaaagaacgtgacaggccacacctgaaaatatgggctgcagacatattaggcctaagccaaaaaatatgccttcgacaccctttaaaggatgacgcatataacatgctcccgagtaataaatcttccgggtaatatagaccaagcgtaactcatatgaatagcttctgatctgagtgattatcccttatgggatactccaaaatggatgtaacaattgaatcccgactggcgcaagtattcagttgataacccttacggggaataataaatagtccagtctttgagcatataaaatagacccatgatcatgaattcatgttgcat

SEQ ID NO: 48965 - DNA, 337 bp, Oryza sativa
  unsure (1)..(337): unsure at all n locations
atctantgtgcacgcattccctttccacgtatttccatttattttcatttaccctanctngcgtgcacgcataatgtacatgggtaataacatgttctcggaagtggtccttacctacaccgctatataaagcgacacctctcattgcgacaccaccaatcttattctacatatttctatcttatatagaacaactagcatatctctcgatgcccagccaggttgcccagacatgttggttcttggtggtttgggtcctaaaaccccctaaaaaaaaaattttttggggggtcccaaaaaaagggggtcgaaagctggtagggtggatatattgttt

SEQ ID NO: 48966 - DNA, 76 bp, Oryza sativa
  unsure (1)..(76): unsure at all n locations
ngaattggaaaccgggtttttttttttttttttaaaaagaaaaagggggggtggccccccccaaaaaaaccccccc

SEQ ID NO: 48967 - DNA, 492 bp, Oryza sativa
agcttgaaactgagcgtatgcttcattggttcgtgggacggtggaagcgtttactgcagtctgtttgattcagcatcgggcaacgagacatgatcctttgcagtactgtatttgcagaagccaggctgataggtggacctggtcccacatgtcagcggctgctacagcagctgcagtcctgtaaacaattcccattacggataacggggcaagctactttatcgtattctatggacacattttataagctgttaaatgatacgttttatgaaaaaactccaaaacaattttttttagtttataatagttaataacttatctagttttgcgtgaaacaacttagccaaatgaattcacccattcgaacgcacccaatgatgcatcattcgaatgctaattagcaacttcggtcattgtgtgcgcgcgtgtgctttttcttgggaggggaatgcatatcggtccgtttgtccattccgattcatttttggaaaa

SEQ ID NO: 48968 - DNA, 352 bp, Oryza sativa
  unsure (1)..(352): unsure at all n locations
tatgtaggataaagtcttggttttaatttctttctttagtttgcacaaacggtaattatgtgtactgaataaggaacagtcgtaagctcttatttgaataccgtgttagatatcataaatgctatntcagcttattccctgcatagaaggatacactcgaattatgacattatagaacatgcaagttttatgctaccttgctgatgcttcaaatgcttgtaggatttacgtcaaactgtcgaatttatttccttttccaaaaggggggggttttttttttttggggggaaaaaaaccccccccaaaaaaaaaaaaatgatgtgactgacgctctcttctttaactcctggac

SEQ ID NO: 48969 - DNA, 551 bp, Oryza sativa
  unsure (1)..(551): unsure at all n locations
cacctgcatgcatgcaagcttgtccttaattaggatttaaaccattattgtggtgggaattaattaattagccantttactcatcttgacagagggagaatcgatacttgattagcttagccaaccggccacacgtttttcacaaaccaagaagctagttcccacaatacataaaattatatctcagcatccgcgattacatggcccaatcctctccttaattagcttgtttgcctatataaacccttattctgtccaagccatgctgcaattaacttatcactcatcagcactgcactaaaagcagtgtaaaagctagctagccctagctgctgtaagattaatcagcttaattagcagctataactagctagttaattaattagcttaattagttagctctagctagccatggacgactacttcttcctccagtcgctgctgctctgcgtcgccgccgtggcgctgctgcagctggcgaaggtggccgccaccatgaagcggctgacgatgaccccgccggggccatggaagctgcccgagaacataag

SEQ ID NO: 48970 - DNA, 343 bp, Oryza sativa
  unsure (1)..(343): unsure at all n locations
tgtagcagaaagaataatcagagctgaagatagacgtggtaacataattttatttattacggaaaaggacaaatatgggcagtttttaagcaaattgttcaaacagtaggcaaaattgaacatcaccatgcatatcacagaacgatgtcataacataagcaatttccaacttacaaaagcttgtgttgggttctttctcactaggaaaacatatgtacaagcatgggggaaaagccctatttaagggggttttttttgtgggcccccccccgacaacaaaaagaggggggngtaaaaaatattttttatatacttggctctcaactagagaggcaatcttcta

SEQ ID NO: 48971 - DNA, 614 bp, Oryza sativa
agcttgagctttgtcttgagattcttgtggatttttttgctgctttttttttgttattgcaaccgcaactacaaatcgatcgatggccttcacacgctggtagttgatttttattttactacttcggatttacaactagcaagctctaccaatccccggaaacaagaataataaaaaaatgtttgtttattttgatctggagataaactgccaaagatttcccttttctttaccgctgattttggcgtctcaagatcatctgcaaaattcacccagatcgcccggaagggcactcaggcatttcttctgctctgccgcatcagatccattagtgctgctcacttggggggcaatgcctcaagaactcttacagtcgtacaccggcaaaatggcgaaatgccatttttttttttttttattgcgcctgtgatccttcggtgaactgtgtttcagaaccatgggagttctgccgaattgttgctttttttaagagggttctaaaaaaatttctccttcagctaaggggcaatattttggaattcctgaattatttacggttgaaaagccaattgggttttcttttagggcgtaagaaccaatagcattgccttttt

SEQ ID NO: 48972 - DNA, 339 bp, Oryza sativa
  unsure (1)..(339): unsure at all n locations
aaactcaagcttgtnactgggctaatttccaaacctagctgggttttaatttcttcatatnatntactatgctgggcaaacatgtagaaaggaagacccggagatggttgttgaattatccagtttattatactctgatgaagattgctgaagcaacacgttggatttgctcatgccaggatgatggaacttttagatggtaaaaacacgctaaaaacgacattttagtcttctgatgtccttatgtttccaatttggggggggnaaatttttttttttttttttaaaaataaaaaaaaaccgccccttttttttttcccccgtgataagttgagattt

SEQ ID NO: 48973 - DNA, 366 bp, Oryza sativa
agcttgcaagttgtgcttcctggacttgtggataggacaccaggacttgttgacctgggaagttgtcctcgtcggctcgcagtccttgtcggaaggacaaggctcggccacgctaggaatcttcttgggctcgtatgatgtcgatgttccgttctccgcctcggcggggggatccttcgatatgggaccgtccgggtttataaccacggcgttctcgtttccggttattgatggaccagccgaaattggcaccatggtgtaaaccgggaagatgatttcaccgacttgagtccacactagcattgttgaagcagggattccttggatggcgccagtgttgactctgttgacgacgaaccttgattt

SEQ ID NO: 48974 - DNA, 330 bp, Oryza sativa
  unsure (1)..(330): unsure at all n locations
ngagaggtgccgccgccaatcctcaccaccagccgctctctctctgccttgcaagcacggngagggtcccatcctccttctgtcccagatgccctcttccgcaccaccgccgctcgtcgcttgtggcctcctgggcccggctgccttgagtgcacgcctgttgtcatggttctggataccacatactcaatagtaacgactaagcttggcgggacccaacatatatcaagtctttattatttgggggaagaattttccctaaggttttttatataaatccccccccccccccctttttttttttgggggggatatagaggagttacgata

SEQ ID NO: 48975 - DNA, 469 bp, Oryza sativa
agcttcttcttcaacacccacttgcaccccacagatttgcacccatatgtgtcgctctgtcacctctcaagtcccattagcaataatggaattcatttcactacggacagcctcctttcagtagtctgcatcaagagatgcatatgcttctgaaatcgacttaggagtgtcatccacgaggtacacagtgaaatcatcaccaaaagacttaaccgtcctttgtctcttactcctccgaggagtttcactgtcatcctcctcaatgacatgttcacgcgtatgttcattttgttctggttgtgtgattgaactgggaattatttcagagggttggctagaagtactatatgtatccttcattggaaaaatgctctcaaagaaggtagcgtcacgagactccataattgtaccaacatgcatgctaggtacctcaaatttaactattaaaaactataggcaacgctgtgat

SEQ ID NO: 48976 - DNA, 361 bp, Oryza sativa
  unsure (1)..(361): unsure at all n locations
ngcccagagctcanatgcttcaagctgaacgaactttatactttacaaatggattatgcagcccctgatatcatggatgatgacactgaagcattatggattgcaagcaatatgcccaagctcagagagcttcagctgattggcaacaagctaactaatgatgggctgatgtcaatccttgaccactgccagcaccttgaatccctggacatacgccagtgctacagcattcaaattggggatttggaaattggggcccctttttccccctttttggtggggggnaaaattaaaaacgcaaaactttttttttaaagtgttctanaataagtgatcttaagcttcctcatgactcgatctc

SEQ ID NO: 48977 - DNA, 466 bp, Oryza sativa
agctttgttataagttaaagctgcaggatattgtgatgatcttttatctgaaaagtacatttctttttctgtggctcgcacttgtgacacagattgagctcaccacacattgtagagttttgtagctttcgaaaaaaaaagtgaaaaacagaattcggaaggtccgatggatgtgttgctttctggcttaggccattcccaacctaataactaagatggtgtccatagcattaaataagttgccacctaggataaaaaataatgtggcaaatgtataaatgaagaaagagaaggaaaccatgtcttgcatgaaacatagtttctacacaacatcgaagacatcatgtgagataagtagcattaaatttaagtatggaatagtagtgtttgcattgaaagagtagtgtctagtactagtttcttgatgatgtagagtttatggaaactatgtctagtttcttgggtt

SEQ ID NO: 48978 - DNA, 352 bp, Oryza sativa
  unsure (1)..(352): unsure at all n locations
nggacaagggtttacatcggccgatccattagaggaagtatacatatgtgatggaactaaaccaaggccgacttttgtaaacaaaaacattaaagccgattataaggttaaggtaatcgagctacttaaagagtatgttgattgctttgcatgggaataccatgagatgccgggtctcagccgtgagcttgttgagcatcggcttccaattaaaccgggttttaggccttataaacannaacnccaanccnccctttnccccaaattttttccccccggggggaggaaggtcttttgattttctttttttatcctttattatatgaccagtcaaaggagattgatcgttgtt

SEQ ID NO: 48979 - DNA, 251 bp, Oryza sativa
agctttggaaaaaatgtcttagggggagtcctggctaataccccagttgatcttcttgtgaaaatggacccgtaggcccgctagtccgttgctgttaatttttgatggtaaggccttaagggcctttgtaataaggtaaatattatcgatttaataaaaaggggcctttaatatcatgtggtgggggggaaccccggtttttcttgggacggggataaatacactaaccgtccggaaaaaggcatttttcc

SEQ ID NO: 48980 - DNA, 380 bp, Oryza sativa
  unsure (1)..(380): unsure at all n locations
tacggacctataatactcagcttccaataggctgtgcaggactcgtactcccctatgtttgaaccttacctagatccatcgcagtggccaagttatgatggagagttcttcgtgcccgacttgtcgttaaagaacaacacacgaggaagaagaaggacaagaaggttcaagaacgatatggacaaagcatacaaaggctcagccaaccgacggtcacaaaagccgaacaatacaaattcagagccggtcatgcanaaaattaagnaatttgggccctttttcccggggccccccccttttttttaaaatttttttttaaaaaacccccccacgaacttgccataaaaactatgtgcccaagcgagacnntttnngatcac

SEQ ID NO: 48981 - DNA, 529 bp, Oryza sativa
agcttctttatagctgttttgctatgtgaattttcaatgatgtattcaactttaagttacacttatcatattttacaaagcagtcggtatatcactcggatcatgttattcagggattcacaccgcatatgctacatattaatatcgagtcgcttggttgactataattatcgaagccactcggttggttggattatttattccttgactatatgctttgtttgttcaattaaccacacagtcgagggctacacctattaggtgcatctagtcgatgcacctgactttatttttcagccctccacagtcttctgatttgattaaagtactcgagagatcaaggcgaagatgattgaagcactcggctttggaataatctagttcgagagaagattatcttttcgactgtgaaggtctcaggggctactgtggagattatgggtaccccatacccacatggcatggttatttcactggttatagggataacttatatctatggactatgtaacggatcatgacttgggta

SEQ ID NO: 48982 - DNA, 339 bp, Oryza sativa
  unsure (1)..(339): unsure at all n locations
ntgatcttgcattagtgacatctgcagatcgagccaagttaccaatctgattcatggcccatacaatgaaacaaaccgtttctttttctacttaaaacacataaactccacaattactagtaaccgttttgctctcctttcttctccaccccgttccaaaataaaaaataaacaatcttatatatcaatctaaacatatgtatatcccgatttagagtcgggatttgaacttttttttttaaattgggaaaaaaccccaaaaatttttaaaaaatttttgtggggggaaaaaaaaaaaaaaaatatctgttttaataccgattatataaatttgttttt

SEQ ID NO: 48983 - DNA, 529 bp, Oryza sativa
agcttgcaagcagaacatagctgaaacagatggtttagttttgtatgcggttactaatttgtttatcaaattggttacttgtaaaaaacttgccatgagcacgtatatttgtatgtttgttttgaattgtcaaatgtaccagtgtcgtcaataaaattatgtacatgatttttgctagaataatcactcttgcgtgttcatccaggccatttcgttacatttgttaaaaaaaatgatcatcagtgctgctcattggttaggaatgagcttaggaatattagtaggtgggcacacacccagagtaacataatttaatctataacctctacgacgaattaaacttatcacacataaatagattagggacttggaaaaaagatcttgtttcacaaactttatggggtaatctcaccacccacaataataggtatttacacacaagatatctatccaaccaaacaacatcttctgtatgctaccatttcatcccgcccatgctgcaaccaccaaacaacatctcatcatattc

SEQ ID NO: 48984 - DNA, 586 bp, Oryza sativa
tgcttaaagagataacgaacttggactaaaaaacagcacaagaaaaacttttttttcttttctaaagttactgctgcacatcaatctcctactgcatgttcactttatcatatagattgattttcttgccttatttttttcttattgcgaaaatatatcatatttcctgtagaccttcacactattatgttgcccaggaaccaagaatatgggaacatatcggcacaaactcaattaccagcagagaattcttgtatacaagaagatgggaacatattagcacaaactcaattagctgcagagaattgttgtacaacaaatgaaaacgatttttagggatatgagttcatcagtcgctacacttaactactgatggtagacttctttgtacaattccaattatcttgtattttaagacattttacaaacgatttggtgccctatgctaacttattctcttaccatgcccgggttcagtgtaaaaatttctgatcattacacgacttttgtagacttgctgcttcaacatccaagctattattagaatttcatttattaccatatttttattccttcttccccatat

SEQ ID NO: 48985 - DNA, 240 bp, Oryza sativa
  unsure (1)..(240): unsure at all n locations
ttcaaactcacctntgtacctgatcaaattacatcatatgagtaccctacttttatttgtttcttgatacanagacagagatatgcaatgagtacccacgtttccatcataactgaaactcctaatgacagaaattattcactgcctcatgaagtctgcgtatattccaagggttgctgaccctgttgcatgtacatcatcagctcgtcatttgacaatatgctttcgctgattcgatgc

SEQ ID NO: 48986 - DNA, 135 bp, Oryza sativa
tccggtgtaaatcccggctggtgacgctcactcctcggatcggttgggacgatttcgtgtttttgtggacctcttgggaatatgcgaggttttcggcgtaactcgcgcctttttgtggatatttgtggggaaact

SEQ ID NO: 48987 - DNA, 532 bp, Oryza sativa
agcttgaactaaaaagtccattattattccctcagctataggatgaatcttattcccatatcccttaacttggatatatcgtcttcctcacatattaaaatcagggcaaaataagattttctttttgctttttaaccttttattttaattttttaaatattttttcccaaacatatttttaaatctaaacattttggccatgccacaggactgacgtgagaaacaatgacatcgttatttcaccataccactctggctagcatggtgatataaaagtatcacattcatcacgagtggtgtggtagggttgttttataatgtcaagcaggatggcttattcaaaagttccagattttgaaaataagtattggaagggtttatttttagaattgaaaagggttaaaaaacaacaacaataataatttcataaaatgactccttcgactattttgaacatgattttgaccgacgtggtagccagttatgctaatactttattaaccagattaccagaatcagaactcccaaacta

SEQ ID NO: 48988 - DNA, 353 bp, Oryza sativa
  unsure (1)..(353): unsure at all n locations
ctctangtcagtggtctggcctaagagtttggaagcatctattctctcagatgacatcattggcttgtatttcttcccccctaaaatgacgtaccttacttttgcaattaattgcagtatcactatcccgtgctctatgtgaaatgtaaaattaatgtctcataactttcttctttcatatgtaatacgctagataaagacatcgatcatctatttaacgaaatcttctataatgatattttagaaccccttcttataaaatatcactcttttttgttctccccccctcttttttttggtgaacttctatttttttttgatgaagctcatatctaatgtttcttctacactat

SEQ ID NO: 48989 - DNA, 580 bp, Oryza sativa
agctttaagtttgcctgctaagtaccacgcaagaaaacccagaccattatttagtccctaaagtaatgaagaaagtatcgaaacagatacatcagattatctaccaacacatagggaaggataacatgttatgggtatggccatgaaatagcaatctccaaaccattactttatagagaacaaactgctgatatggggatgcatgatagaacaaaaaaaccaaaatacaaacaatttggaagaaaacaagaatgagattaaaaaaattaatctgctggctcctggcacctgaactcgcaaatacaacctatatgcattaagagatgcattcaaatacaatttcaattgttaaaaaaaaaaaaactaactgctcaatagcatgggatttaaactagtagaaaaacagttcatagttaaaccttcttcccaactttcctacataattcccaagaagccaggagcacatatatacatgaaatattaatattgcaagagcagtatcaaataatgctcaaggataaaacctgaaacaacccctatactaaacaggcatgatgccaaataaacctttggagaaaat

SEQ ID NO: 48990 - DNA, 378 bp, Oryza sativa
  unsure (1)..(378): unsure at all n locations
ggaccatagaaactcagctnngcgaaccctaatgatggcggcagtgcactctttattctcttcgccaagactttggatgatatgcagatccctcgctccgagttaaaaccaagcaatgcgccttttcatggaggaattccaggattatccgcaactccactcggccagattactcttccggtcacttttggcactcgggaaaacttccgcacagagaatatcagctttgaagttgccgatttcgagacagacattttacctccaaaccgggcccctcccccagattgtttttaaaaaacccccccttttttttttccctcggggggggggggacgcccggcgttgccaagtcatggctgcccgcactacacttacatg

SEQ ID NO: 48991 - DNA, 464 bp, Oryza sativa
agcttgtcgcagtgagctctcttgtaggcatcaccagtgcagctacctcttgtttcagctgtccaagcagaacaagtggtcatccatgaatgatcaaatcacaacatttcgaaagtaataatttattatcagaattaattagtgatgtgatcttgaggttcaagttatcatccaccagccagcgaagtggcgaacctatttgtctagctcttcaacgtacacctacattgcacgtttttctcaacacacctcccacagggatatataatcactttcaaaatttatctaaattatgcataggtagaaactaacaactgtattagtgagaaataaattgtccaacgcaaaaaaaaaatccaaatattgacccacaaaagccaatggagctaaaattattcctatttcaaccaatacaaattccacaaaatgaaaccagcataaatcttgaattatcacttgaatca

SEQ ID NO: 48992 - DNA, 379 bp, Oryza sativa
  unsure (1)..(379): unsure at all n locations
ggacctatgaaactcagctatcatctntcaggttcagacttgcaggaaggagaggactctgaagaacacacttagtggagggcacattttcagttatctttgaaattcttgctcatggtaatgcaaaagcatgtgcttgtcactccggtttcaacacagttcacttgtgacgtcagaaagaccattctggtcatagccttcaagctactgcatcataaccaacaatggttggcacactgcacagaaaattggtcncccattttttcctcaaccccaaaaaaaaaaaaaaccccccctctttttttttttgggggggggggttgtttttttttggactttgaagaacatatttaagccatgaaaacctgaaaagggtgag

SEQ ID NO: 48993 - DNA, 540 bp, Oryza sativa
agctttctgattgaaccgccccaatatcccgtcgtcgcaaggccgtttatgtatcaaccttaatatcaccaaaataaaattaaaaaaacacaaaatacataactgcaatgttgcaacgactggcaccctccctcgaacatggacaccaagaacaaacaaaagagctatatatcatgaagatcgagccactcttttgcagaatgcaggaggagatggaagaagtagaaggagaaggaaaagagaagatggatgagcaactggtttgagtgaagcatagctagccttctttaatatagctccttacaattacagagagaggagagggagggaagaaaagagcatggtggaatgcaatggaaatgcaaagggtgatggagtgaatgagccaacaaccgaacaaagagggggttgggatatttattggcgacattcaaagaaaaaggagactggtgttcttgataagagttcagagagagaaatttatagagagagagagaaagagccttgaagaaagaagatgtgatgataataatatgagat

SEQ ID NO: 48994 - DNA, 345 bp, Oryza sativa
tggctcattcatagcacgtgctgccgataaggtgcttgttttgtgcttgggatattgtttggctcagctcggttcactccctgttcatgttaaaaaatcacagtgataacattgtcggtttgtaatatatccctatcattctatggtgggttcagggagagaacccattcaaccaccaatccaacatgaaccgcccagccagctcgagtataaccggtagtgattagccgataggtgaatttttgggccaattttgctgcccccaccccccccccttttttttttttttttctttttcccccccctttttttaatatagtcagtcaacacctaacatggattgtc

SEQ ID NO: 48995 - DNA, 566 bp, Oryza sativa
  unsure (1)..(566): unsure at all n locations
agcttanattatgtgagagaggagtatagagaaaacatggtaagggaatttatgtaccagaaagacaaattgccacttataaacttgtgctcatacaatatctcttccatggatgtgtccaggcgatgggcattgcacgactgtgccagttgttaagaaacgatcggcaaataaatgataaataatgatagatcaatcacagaagaaatgagatttaacgtggaaaaccatcataaagcaggagaggaaaaaccatgtgtgctagccagcaaatatcttcactatatcggcagtggcggacgcaggatttcagtgatggaggtacgaagttaaaagaaaatatcgctcaacataaatgatgaaggcctatgtaaaaaagaactaacatgaacatagttaaaagtaaagtgattttagtgtatagtaaattactaaaattaaacaaaattaaagttataattgatcagaactttttttggaaataggatattatgtctttggtccgaacatataaaaaaggtggttcttaaaaaatgaacccggccattattccaggttttttttat

SEQ ID NO: 48996 - DNA, 361 bp, Oryza sativa
  unsure (1)..(361): unsure at all n locations
ccttctgctaaggttagttcatcacggcttanaagtatggtgtctctaaaatttgcatataaactaggcagttagcataacagtaaaagacctaaatcttcatcatcaaattgtacctccatcgacactaggtcagcaacgatctccttgaagaccgatatgtggttcaacacagaaccactctcctgcaacttgtgcgagaacaacttcatcttgatatgcatcttactggctagatatntttttatggaaaccaaaatttggggtcccccacaaagggggggaaaaaaaattttatttcccccccgcgggcgcgttccagtttgagccaagttctgcagtagtcttttcctgcaacact

SEQ ID NO: 48997 - DNA, 642 bp, Oryza sativa
agcttgacattacggaccactgggtctagtaccagggggtaccgcccctttggaccactcggtcaggatgatccgagcggtcaaacttgattgcgatctctgaccatcgaagatattggggcgtgtcgggctgaacagcattgatctcccgttcagttaacttctgcttccgtttagactcataagccagggggccgccgaagatatggttgagctccttgcggtgatcttgaaaacctgccggggtgtcgtcgtcgtccttcttcctcgacgtgctttgttcttcgtcagaattcttccgtgcagtcttggtgtattgatccgcgaattgcttgtagacgaaacaatctttggccacgtggttggagttaggatggtgcgggcattgggagttcatgatcttgtcgaacgtgttgacgcgcgaacgctgtcgagaagagtgactggcggttgcaacatgttccgcaagcttacccttgcggtccttaatgatggtactttcacctcctccccgagccggcgtacccttggtttgttgcaaatgggacccgactgctcttatgaagtgacggggtcttcacacctggcttactcgttggcttttccaaaattacgctcttcttttttctggatgttctctcc

SEQ ID NO: 48998 - DNA, 365 bp, Oryza sativa
  unsure (1)..(365): unsure at all n locations
taacaagtatcagtttagtctttntcttgtcattctttataaaccacccataaaaaatatgagatatactgattaaaaccaaaagaaaaccgaactgctctccatatgaactttgtataatgacaatacatgaagagatgttgaatagactcatttttcatacaaaagcaacaccttaagctaccattacaattccgtctcgtcaaattatccttggttaacataacccccatataagncccaaaaggttttaataccctcccccaaaaccccccccaaaaaattttttttttaaaancaaaaaannaaaaaatcttaatcttaagcggatcttaagttcaaatatacttgttcctctcccataa

SEQ ID NO: 48999 - DNA, 586 bp, Oryza sativa
agcttatgaacaccaactagcacgctattgaactgttcggccatgttggttgccatgtaaccccaccggcggccatttctatcgtatgcacgagacaacttatctttatccaacaactcatcttcaagccatttacgaggaccttcgggaatacgctatcttagtgtctcaacatccctctcaaatatccacttctcgtcaatctgacatatccttaggagctcttctgtctgatgcttgtccgcaccggccttgtggaaattagcactgaagtgcctcatgcaccatcggtgatgaaccggtggcaatcctggaacaggagtcttcatggcattcattataccagcaagtcgatctgaaataatacaaacctccctgtgcaacccaaccacaacccgtcggacaagattgataaaccagcaccagtctcgggaattctctttctccaacaagggaaaagctaaagggtccaagtggtcctccgcatcagctgataatgcagtcatcaaggcaccaccgtatttcccaattaagaaaggtgcatctatagctagtactggcctgcaaagcttaaaaaccctaatgg

SEQ ID NO: 49000 - DNA, 351 bp, Oryza sativa
  unsure (1)..(351): unsure at all n locations
gttcagaaaaatcttacatttacctttctagctagaacccgattgttctgcaccacaaccaaaatcatgcagcaaccaagcaagcgaaacaatttaatcaggatatggtgaacatttgaaaaaaataaaataaaaattgctgttatattctgcatttctggtcatggacaagtaggagaacacgcacgggtaggctgcttctgaagatgcannggtcctgttgggttncntttaatttggggtttggggggggggnggnaaaaaaaaaaagaatgggggggaaaaaaaaaaaaaaaagggaattcgacgccatctcgtatcggaggaggcagcgaaccccgagaaaccctc

SEQ ID NO: 49001 - DNA, 590 bp, Oryza sativa
agcttgcattaaacacttaattcccatggcttgctgagtacccccgtactcacccttgctctatataaatatccccccccccagttgctgaagaagatgaagcagatcctgctgatgaggagttcttccaggagcaagccggctacgatgagttttagggtttcggcctagttcccaagtcgcgcctgtgattgtttggtccaagtcctggcttccgctttccttttgtaatgcagttgtgagctcgggatctgtccgcagcccaacatgactgtacttctactctataataaagagacttctgttgctgtgatattctgtctccctgtgataccagcactgtttcctgggactggtatcgattaacaagttaatttggagcgtcacgggttagttccggtcgggactagctcggggcgtgacatgtgtgaacacatgatttattgttttcgcgaacgcgcaaaaggattgcacagcaagaaattaaagtttcaattacatgacataaccggcagaatggcccttactatgagacaatggaaaaaaataaaaggaaaacccgaaaaaaggaaagaaacttttacaactaa

SEQ ID NO: 49002 - DNA, 333 bp, Oryza sativa
  unsure (1)..(333): unsure at all n locations
tggaagagaggcaaggttgntttgcaaatcttttgttttttatcattntggaatcactaagtgatgtatttctttctatgtttgggcgaaaagagacttgcgtctctattcaactttaagagatgctcttcaacagctcatttagtaatgtatcgacctcccgggtcaatattactttcgctccaaccttcccttattatcgctcccaacctttttatttttttttcatttctcggggggggaaaacccctcttttttcccctntccccccgccccccccaaaaaagaggagtctagttgtccagcagcacaacaatacgcttccactcngga

SEQ ID NO: 49003 - DNA, 557 bp, Oryza sativa
agcttcgcagaaccctcatcgacggcggcagtgcactcaatatcctcttcgccaagaccttggatgatatgcagattcctcgctccgagctaaaaccaagcaatgcgccttttcacggagtaattccaggattatccgcaactccactcggccagatcaccctcccggtcacttttggcactcgggaaaacttccgcacagagaatatcagctttgaagtcgccgatttcgagacaacataccatgccatactcggacgcccggcgttagccaagtttatggccgtcccgcactacacttacatgatgacgaagatgcctggtccccgaggagtcctatccctacggagcgacatcaagcaagccgtcacatgcgacaaggagagttgcgacatggcccaaacccgcgagatggcgtcagcccgagaggatatccgactggctgcagccacggcgagcgaaagagaagtgcccgctacccagatttcaaaaagtggagaaagcgaagcccagactaaaaagaatcccttagaaccttctggaattactaaaactggt

SEQ ID NO: 49004 - DNA, 356 bp, Oryza sativa
  unsure (1)..(356): unsure at all n locations
gacaccttntaagatgcattgtaccaactctttatagttgagtaactgcggtataaaaggagtgtaaggtattgggcacttgatcacacccactttggcctaagcaaaaagtgcctaagtccctataagaacgtgacaggccacacctgaaaatatgggctgcagacatattagggctaagccaaaaaatatgccttcgacaccctttaaaggatgacgcatgtgacattgggttgtttcacccgataaaggggtttttttagagaaaatttttttttatttgtaaaaaatgaaaagaaaatttttttctttcgggtaatatttaccaagtgtaggttatatgaatagcctctgat

SEQ ID NO: 49005 - DNA, 564 bp, Oryza sativa
agcttatccacgattatccatgcataattcttaactgattggcagaacactacttactttatatgaaccacggtgattatatattaaaagttaaaaccagatcggacactagctctggcggctcgccatgtatgcgtacttctcaagacaaaataagatacgaaaagaaaccaagtcttgtaagccaaattaaattaattagacagcaatgtgtgtttgcacactgacagttgagctgacagacagacctgctgctgtgttctctcgcctagaattctcactgcacatgaaaacagtatgttttgcttcgtcttcctgcaaatcctgcttatatattatcatctcacagctgtagatttccagttatctaacttgatatatctcttcttaactctgtatctggccatgcatgcgtgtctcttatctcatctgagcagtactgcagaataaattttaattttttttatgattggtggtaaataaaataaaattgaaacttgatgatttagcattgcttaattcattcatcaatcatatttaaattcatgtcaaatagaccaaagt

SEQ ID NO: 49006 - DNA, 360 bp, Oryza sativa
  unsure (1)..(360): unsure at all n locations
tatatagctgccccgctgactttnttatatagtcaaggtgctgtttgggtttatcaagcaattgattggatacaatatcattgctttttgccacgtaagtgtgcatttttattgaccaatattatggcttaagctgattatatattatggtcatttttcaggcggttggtaaatcctttatgagtttacttactcggattttacaccacatatgccatatatttccaggtgtggtgaaaaacncaatttgggttggggggtttccccctttatgatttatttttttttttntngaaaaaaaaaggggggggggggggacttaagcacatctgttaaagcattgtgcgcatggcgtntgcc

SEQ ID NO: 49007 - DNA, 662 bp, Oryza sativa
  unsure (1)..(662): unsure at all n locations
agcttcacaaaatgcaccaatgttcagttagaaatgcaaacctccttttagcttatgggaaagacacctttgaattttaaggagaaaagagagtttgttaccctagaaaatcacgatcttaaaacagaaagataacagagaatcacaagaaagcgagatcagcgcaacggcatgtacaatgggtggtaatagcggactcttggcgttggtaattaggaatattcgttgacatgaaagagcgaaagatgagagacaaaacatcggtgctatgggtaacaacagctcaacaacgactcttagcctatataatatggaaacatggttgcatgagggtgaaaaaatggaaagaatagtaataagaagaatatttttgagtaagatcattttcgtctcaactaatgtaaaaacatggtctctaaataatcttgtattttataaaagactagaaaaattgtctatgcgttgcaacgggaagaaaatacgagaaaatttagaanaaatcgataaacatttacattatttaattaattaaaatacattgttttgggaatactgggtatttctaagtaggagggtctagaataaaataatttacaagtaaaagtaagtatgtgtgagaaataaaaattacatgggctggggttaaatttaattaaattatt

SEQ ID NO: 49008 - DNA, 353 bp, Oryza sativa
  unsure (1)..(353): unsure at all n locations
gctactagatgttactgtccatcagctgaagtgtcaaatatagcactaaaagctggattgcagccctcgcaaattaaagtctatggcctcccagtacgtccatcttttgtcaaacctattcgaccagaggtaaacaatttattcaactatcagcaccttactgccttttggatcttttgtcatctgcacaagttcctgagttttctacatgttcttatcttctttgataggatggaactgctnnaataaagggggggaaaagggttttattttttaaaaaagattggggggggggctttttttaaacaatttttttgatgaatatttgcctgctgttctctaatgggtggggg

SEQ ID NO: 49009 - DNA, 662 bp, Oryza sativa
agcttgacattctctctctctctctctctctctctcaccataccaattactcagtaggtcacactagctggctagctagtccgtataccggcatggcagctgccaggtgggccccgatcgccggcttcctgatcgtgctcccggcgctgctgctgccgccgccggcatcctccgccgccatggtgttcccgctccacggcaacgtctacccttctgggtaggcaagagcaagacggccacctcctcctcctcctccaaacgctctgcagcatgcatgcgcaaacatttcacaattttggctgtttaattagttgataatctctgcattttttggattaattattgcatgcaggaggttcttcgtgacgatgaacatcggcgtcccggagaagccctacttcctggacatcgacaccggcagcgacctcacctgggtggagtgcgacgctccctgccagagctgccaccaggcatgcgttgcgttattgctcactccaaaatgcatctttcctttttaatctcaccatatacttcgttcgggttttaatactataccacaggacatttgcaatttgtcttactaaaaaattattagtaataatttattgggacttggattatccatcaatggctttcaagcgtgacttatatttttttatatt

SEQ ID NO: 49010 - DNA, 348 bp, Oryza sativa
  unsure (1)..(348): unsure at all n locations
tagttcttattcattaaactctgtatctgcacatttcctctgttagcaagtaagacgagactcaagatatttcaagttctctaaattgctgtcagcacaccccaaagtgcttctaaatcatgttcacagcttttcactcaaatcttctgtgtttggtcactttatggcttgattttctgttgcaaagctaactgcataatgggtgtctatattctcttaagttttttagcaatgcacttaacaccttnttgtgtttttggggggcccnaaaatttttttttttttttatttnngaaaagcgacaaaatttttttttctcttttaattttctgtattggcttcttttgg

SEQ ID NO: 49011 - DNA, 565 bp, Oryza sativa
agctttctgattgaaccgccccaatatcccgtcgtcgcaaggccgttttatggaccaaccttaatatcaccaaaataaaattaaaaaaacacaaaatacataactgcaatgttgcaacgactggcaccctccctcgaacatggacaccaagaacaaacaaaagagctatatatcatgaaaatcgagccactcttttgcaaaatgcaagaggagatggaagaagtataaggagaaggaaaagagaagatggatgagcaactggtttgagtgaagcataactagccttctttaatataactccttacaattagaaaaagaggagagggagggaacaaaagaacatggtggaatgcaatggaaatgcaaagggtgaaggagtgaatgaaccaacaaccgaacaaagaaggggttgggatatttattggcgaaatttcaggaaaaaagagaatgctgttctttatcacaattccaaaaaagaaaattaaaagaaaaaaaaaaaaaaacctttaacaaagaaaaggggaataaaaataaataacaagcctcaatgaatgaaaaaaaaaaa

SEQ ID NO: 49012 - DNA, 115 bp, Oryza sativa
  unsure (1)..(115): unsure at all n locations
cttgggattntgtttggatgaggggggttnaatnantgttnatgttaaaaaatnanagtgataanattgtnggtttgtaatatatnattatnattttatggtgggttnagggaga

SEQ ID NO: 49013 - DNA, 487 bp, Oryza sativa
agcttgccctttgcacctgtagaacacccttgatctcctcctgtgtagcaacagggcaaaaaccgctaaataacaaagagcactttgatgggtttattagttgcccggtgctattctcatacaaactcaaggcatgcttaatactcctggcctgctccacctccgcttgaaaaaataataagctgtcatctgcaaacaataaatcctactttttcctgacttttctattgtgtgcatgcaaggtagacttataccattttttaagtttgcatgtggtctaaattattttattttaaaaactatattacaaatatacttgaataaatcctactttctactttggcccatttatgtacaatataagctttattaaatatttttttcttggacttattttgtttgttggttaaaattcactcatacttttttgaaaaaaaatctatgttgaaaagttacatgtgtaaagcttatatataaaaacctactg

SEQ ID NO: 49014 - DNA, 213 bp, Oryza sativa
gccgttcgccttgtgaacgacgaccgggttcgccagccttctcttgatggataacctctcggatgaatccggcctccagaagtcgcgccacctcctctcggatgaatgcttgacgttcccgggcctgccgccgcactttctgccggaccggcgttgcgccctgccgcacggcgagacggtgctcaatcacctctcctgggaccccaggcatgt

SEQ ID NO: 49015 - DNA, 656 bp, Oryza sativa
agctttttggctcctttgaaacaaagtcatgaaatattatagaaaatttgcatatatagttctttggattaaaggaatagttaaaaaaatcatacgaaattcctttgtgttgggtcaaaacaggaatatttaaccatttgccacatttagatgtggcaattaactttttgccactggacccatatgtcattaagataggggtgacaaatatttatttaccaaatttaaaagtgacaaatagttaaaacccctgtcaaaacatagtgatcttggaagaattttattcatggaaaaaaaattgtctgtgtttatctttcctctaattgctacgcttccctgcattccatcgaaacagttatttctatctttttagggggggttttaatcaataggacactctaaaccatgtattttccatgttttatgatgaactctttccatcacaaaataattatttttctagagttcaaaaattgtctcaaaatagttcatatcatcctatctatttgtcccatcaatcatctcctattctagcttctctccattttatccccactactcacctacttacctttcaataagagatattgcagtattttctttttaaactttaatttatactaaacagtatagaatgatcagtattataggatggg

SEQ ID NO: 49016 - DNA, 354 bp, Oryza sativa
  unsure (1)..(354): unsure at all n locations
tctcgatctggcgccgttgtcatatctggcgggccatcatgcacgcatgcatggatacgtaccttgctgcagtctttctatgcaatttcggagctatattaaagagtttgagaaatatactcaagccacagctgtcattaattcaacataattctaagttgaaacaacaaaatggattgaattttctgcaacagtaccgtgttatgatactaattcagtaaattgaggtgtgtttttctanaatttaaaaaaaattttggggaaaaaattaaaatgttttctttttattttttgtgggggggcgtttttcttttttcacttcagctcctgaatatttcgttttactgaagatgc

SEQ ID NO: 49017 - DNA, 515 bp, Oryza sativa
agcttgagcatatactatcggctgattactatcactaattgtggattgtcatcggcggcctacaataaaaatggattaacggtagagaagtttatgaattgcaagggctaattgaaggattgactatggttaagtaaaagttagatcccaagacgtaaagatgtttcatccactcaatccaccattaatcaaacaatcggctgcgcatgggatggatatcgatatcggcaggagagcgtaagataggtccttcaaggtttagcagccgatcaaataagagagttgagatcactattcccctagtttgaatttttcttaagaagtatagaccaattgggagttggccatatcctagttgtcgggctgccaccattaaatgatagaattcgtaagagacctcagagtaacggccggtagatataccagtcgaaaggatgcagggtgagacaactgatataaatatatctctggactttgtgtcacttgtgatttcatcccatcttaaatcaattggg

SEQ ID NO: 49018 - DNA, 350 bp, Oryza sativa
cgttgatcttgtcaactaagacatcaaactgtgcttgagacttgatcttgcggtctgcatcaacagattcacattaatgaatcagcatatataagataatggcttttgaggtattgattattggtaccttcaacctcctttaaagctgaatccctctatcttgccagctctgccttgtcattttccatagtttggatcttcttctctagttcagatatcttggcagcttgcatgtacaaatttttaaaaacaatttattttctccccccgcgggggtggttttttttttttttttaacatacaaacattttttttaagattacagagataacagcccaaatcagttgggc

SEQ ID NO: 49019 - DNA, 658 bp, Oryza sativa
  unsure (1)..(658): unsure at all n locations
agcttgattattagtgatgttggttcaggttgggttacttatctcccaccaaaaatanttatagctaacccgngnggatgtgacttcttttgtgttgtcaaaatgggaattgattgcggattaagatgtccggtacttagtgtggaacagtactgaacatgattgattctgctggtttagggctgggaattatggattatgcactctgaaacggagaggaaggtcggtcatttaacgaactacagtgccgcaattactaacctgattggaaagtgtttaattacattttggctgtttggaatgagctggcgatgctacgtttctataatatcttttgaatctttgtgcctttctgtattagactaagtgtcacatttaacgtttttcaaaagtaatccatatcggcttcaaagttgtttaatgcagcggctgatctcctgaaattttcttgggtgggtgcccatatcacgtctcaaaaaaaaaactttaagaagtattcccgcacgcaaataccaattaaggttttaaccctttcttatcaccgtgatccacccttgagttttttttaaaaaaaaaaagaacccgcatgcgcatcaaaaataggaaaaaaattttgttggggaaaaaaaacccccaaaaaaaactcctttcttttttt

SEQ ID NO: 49020 - DNA, 358 bp, Oryza sativa
  unsure (1)..(358): unsure at all n locations
ntgcggtagtcaagtggtccctaatcatgcgcgtgcttgtcgtcttaaggtgatcaaattgggaaaggaagaatcacttctgtgcttatctcggagctggaacagattangacaggatcangatggggtgaaaaaaagatttaaaaaaagattaggactgaagtgcacgttgccatcgattccgctggcatttgcagcatgtttgtgcagtataattaggaagaataatttggattaattcctttaaaattttccctctttggtggggggngggggggcccccccacaaaaaattttttgtgggggtttttcaaacagcttatggattatggatattcgagctaaattgnnttttttt

SEQ ID NO: 49021 - DNA, 460 bp, Oryza sativa
agcttctcttactgaaggggggagaaagatatagcaagaatgattatttatttacagtactcaccaagccacaccggcggatgcaccattaatgcaagggggtacaaggggtaatgatataagggttaagttttgcagaaaacagcatttaaaagtcacttagttgcccaaagccattttaaaaagacgatcctagagctacacagtattattaatcaaggtcgtgaacccgcacgaacctgccttaacccaaggcctacgatgattcaaaccgaactggcaacccgaccctaggtcccaacttgtcccaagccaacccagtccaaccattccacattttagttgttgagccaattttaagaattaaacactaacttgggtacattgctcggtttgccataaccgagggcgcggctatttgaataaaatatactctgatcagaggtggtcatcttttacc

SEQ ID NO: 49022 - DNA, 401 bp, Oryza sativa
  unsure (1)..(401): unsure at all n locations
ntcggcaaacatgttnngtttacaaaattgcacatgtaattctaatgaaggaataattagaataccttgtttgtactcaaatggatctatttatctttntatatatgccaaatactttgccttgcttgacaagcttatcatggatatggatcatacttatccatgttgttttgaacacatttaaacttatttccatagatatgccatggagaattaccatagttggctcaggccaataggggaaaaaaaaccccttttttttggggggcccccccaaaaaaaaaaaaaccccccctttttttttcttgtgcacctattatacacctacaatatgccaccagacacgctaaatgactgcncgcctgatcactganncccccggnnnngattcatcggacttg

SEQ ID NO: 49023 - DNA, 654 bp, Oryza sativa
  unsure (1)..(654): unsure at all n locations
agctttggctgaacgatcaatataaggtgatatcagggaccgataggcattccttccctttngagctgatgataaacagcatggtaaattttgaaagaaaatgttattatatgagagaagctgcataccgaagcactgtgatactttaacactgctagagcgtttcctttactgtagctatacacacgaatcctgcaatgatgtaacaattgcaaacttggatcataatcatcaactagaagacaagattagtagcgaccaaaatcacaaaggagccatcattagtacaatttgtactcgtcactcaggtattactacttaatagattatatatattaaatcatatgtataatgtacctactaacttgagcatgttaattcaggatttaggaagccactaaaaatagcttatgttaacatcctggtcatcaaggaacagaatgggaaaaacaaacctgtgatcccaaccagcggtcgctgcaatcttgttgtctggccgaattgcagtgcctgctatacccggtcgctcaagttttatttctttcctgaaaataaatgcaccctggaattggaacaaaactgcatgccagtaaatcaaaagatggcttaccaagttaaaccagcattcactaatgtaattgcaaaagctacaac

SEQ ID NO: 49024 - DNA, 342 bp, Oryza sativa
  unsure (1)..(342): unsure at all n locations
tgccggttcngtcactgngaggtggttcatacactgctgtttttcagatgcaacgtacagtatactgattatctcctgcacttcagttaattgcaacgattaatcagtaaattagaaattaacttttgtttntactgaaggtgtagagggtggagaacctcagtgggccgactgcactgcacatggctgcggccggcggacatgtcaagagcttcaagctgctggtgtgcggaacttgttaaaatttcttttccctttatggtttcccccattcgttttaaaataacctcccctcttatataaagagtattctaaaagttaatgaatttgttgttgtatatg

SEQ ID NO: 49025 - DNA, 637 bp, Oryza sativa
agcttgactatactactatggcaaccttataccatggtagtatctaaaccatattttttctctgtccgaatattgccgcctgcgttccctatcctccacggtaatataccagaaacatggtgtggataatctggggtgccttgatggagtgagcaaactcacattggctgttttgttgtaactgtccgctgttgatgggcatacgcatgtgcgcccactggacccagactatgtacatccatatacaaaagacatagggggcttgttaattgtctttttatggttaaatccaactaaaaaatggcacatcaaaactttaacatcggtttggttgtttaaaaaattggccatccctaattatttggcctagttcaatacctaaatataaatttgtcaaataaaataaaaagctaaccaaaaaaattgataatgccaaattttgccatagccaaaaaattctgccatgttaacagcgggaaagaactaaacaatccctttgatttcagtgttctaattaaactaacctcctacctagttagccaaggtttatccctttaatacctactacctcacaatacaacttttattaaaggtcacttttaacttttccttttttctcaacacttggtttattaac

SEQ ID NO: 49026 - DNA, 374 bp, Oryza sativa
  unsure (1)..(374): unsure at all n locations
acacttcaaactcaactgcgtcgctcnctccaaatatagaatctcacattttatctttgtctgtcctacagcgaaaccatatatcatccagtgatcaactcctaaccccgcaaggaatcgaaaacatactgaacaagccagtccaacacccagcgcaactatgcttgactcaaacccttgcatagtgaacaaagacaatcagaactgttccacctatcataacaacattcacctctcaaaggttaatatttaattattggaaaaaaacgcgaagaagatttttggaaaaaaaaaaattttttgggggaaaattttttcacaacacccctcttcttatacatgtgagacgtatttcataacctgtatcaagcact

SEQ ID NO: 49027 - DNA, 597 bp, Oryza sativa
  unsure (1)..(597): unsure at all n locations
agcttcagctcaggcgaatttgcttcagggcagcaaccaaacagaccctaaatttctcaggtacccactagaaacaatgcattccacgttctgcttgtgaggcaaggattgagtcctagcacagggaccacatgcactgccaaattgactctgtcttgcatatgactgcgccacaacacagtgaaagcaagacaaaccaacaccaacacatttatcaaaagctcttcagaatgtgagaaaatcaatataattgctcgtttcatgacactgtcaaaaatatggggacaatgataatagcctgaaaaaatgatgattgggggggtaaacctgatgcttcaatccattcttttttcgaatgggaaaaaggttcagttccattgttcatttgatggcatttagccaaacaaaaaaaagagaagaggataaattgtaatggcaacagaaaaaaaatggccagagcagctgctctgaggctctgagaaaaccacacaacaacaatttccattcaaaaacagcanggtgaatgaatggaaaacaaaaagcataaccatactactgctgctactgctacttcttaatgccatagtgcgcatattc

SEQ ID NO: 49028 - DNA, 425 bp, Oryza sativa
  unsure (1)..(425): unsure at all n locations
ntaatatcattntaattccagtctgaacatcaattctctcctgatctgtcagatctcctgaacactttccatacgccctaagtaatatgatccaccatagacctgaaaccatcaatcacatatccagttaagagttagtagaagcagagtagcaaaaaagaggatgtgctagctatctccattagtagctctacctgaatcaacaggtgccacacggcctattgctgcctccccaaaatcaagggtaattctccaaaaaagggggaaaaaacccccccgccccctttttttttcttcctccccccccactttcagttgcatcttcatctccatcgagtggaattgttcgcaccttgaagctancaggcattaanccctgtcctggactatngcaggccattgtcttctcccanctctacataaca

SEQ ID NO: 49029 - DNA, 162 bp, Oryza sativa
  unsure (1)..(162): unsure at all n locations
ccccagcctccaacaacgccaccgccggcgacggccgaagaaaaggcacccccaaataccgacgccgcccccncgccggagacgaggacgacgactgcgggctcgccgccgcgcgcaccgggccgtttcggccgttgggccgccgccggagaatccgggggc

SEQ ID NO: 49030 - DNA, 380 bp, Oryza sativa
  unsure (1)..(380): unsure at all n locations
cggaccttaaatctaagcttcacatactgcttccagtacttcgcctgcacatacacatatagtatgtgaagccaagtgaaatggcatcactagatgaaccagacgaacctatatatagatatacgatgcaaccccaaagcaagcaaaacatcgagtcgaaatcgaactggactcacggcagtggggaaagttgacagcagcttctcgtatatgggagcggcctcgccgattgggagcagctggagacaatgaaggaagcgggngaggncccggtgggtaaaaagtgaccccccggggtcccccctcaaaaaattaaaaaaggggcgcccccccccgcaacaccgtggtgagctcgtagtgcaacccanctcaannnaact

SEQ ID NO: 49031 - DNA, 610 bp, Oryza sativa
agcttatggtttattatttgatttgttttaaatcagtacatcaactttattttttttaatccattcatttaagctctgaaataattgttatacaccagtttcatctatagtccatcatctatcgaaacttaatgctgcaggagcatcgtcaatcgaaacttaaatactgcaggagattaagctaataggatgatatgcaaaatagaatatttgatgaaaatcgagataactcttaaaaaatcctgtaaaattttcatattctaaacacaccttgaaaaatttacacgtgttatctagcgcgccatactaaaggtgtgctctacgacgtttgacgtgacttttaaaaattataaaaaagaaacctaatgagaccataaactataaaaactacaggatccaatttttaaatgtttcaaggagaataaatataagcatgtagatcggggaagcatataaagaaggtgtgacaaaaaaagtaaggggtagcatctgacgtgatttttaagaatcataaaattaaaacatgaggatgataaggtttggtctttcaaaatcgtaagacaatgaaatagcgatttaacaaattttaagttaaaatatattaaaaaat

SEQ ID NO: 49032 - DNA, 348 bp, Oryza sativa
  unsure (1)..(348): unsure at all n locations
ctcagcttaagtngttcttgtcccctggatatgagatgagagatctctcttactggagcagaggttgtcgtccactattcatcaaaaactgcagcaaaatagaagaatatgagttcttcaagctcgctcaaaccgacttttatggcttcgatctaatcatcaaccaatccatctcacttaaagaatgtaaaaagacttgcttggacatctgctcctgctcagcaatcacgtataagacatgagtctgggaaaaaccttttttgtttttttttttaatacccccacaaaattttttttttctcccaaaaaaaaacacaaaaatagtactcttaatgctacactccacaa

SEQ ID NO: 49033 - DNA, 519 bp, Oryza sativa
agcttgcaagataaggtgaaacagttggaaacaaggtcaccagttttgaacttttgtttaacaggtttcaaaagagataaaagaaagttataaaatcaacatgctaaatttattttattgcagcaagattaaataaaacaatattgtaaaacttttgctgataaatgagccattagtacagtaatagatgtacagtactaataacactggaataaattttgaatgagaaccattaaaagagattatgaagtgcatgtgccattagtttggtttaattaaaagagaaagggaggagaacagttctacttttccaatatttttagaggacttctatggataaccatttggcataacctagggtcaaggggctctgataccaacttgtcacgcccggaatttctatccaaaattccaaacgcttacatgtgtgtgaaccctcgtccaggaatcagccgaggcacacaataacaaattgataataaagtacaattattactctaattaataagcgaataaaat

SEQ ID NO: 49034 - DNA, 351 bp, Oryza sativa
  unsure (1)..(351): unsure at all n locations
tgttggcccgttaagagcccatatatgtaaaggacacagtatgtcctcaataatgtccctatcataagggcaaccatgtaaaatcccctataatcataaaccctataagaacagagcctattatatggttataaatagccccctaacgccatgttatggggggatccccaaaaaatttctaatcaaccaatacagtcgtctttatttccaacctgttgagagagccacgttgttcgaaggntgggaaaccgacccaaacggggttttctctttaaaaatttttttttttccccccggcgccgctttttttgtttgacacaaaaactaagcaggaaatagaaagtggtactc

SEQ ID NO: 49035 - DNA, 506 bp, Oryza sativa
agcttcctagcctctctgaccccctcatcctccccgtctcctcctatccctagctgctgcctagctgaccaccccgcctctccctctcagccattcggtgaagagattatgagataaggtagagagggtgaggtggaagaagtgggaaaagtggggcctactatttttttactgacatgtgggtcccgcatgtattgtttaatttttttgttttcaattttgcttctttatttttttctagagcaaactatgaaatgtcacatcaataccacgtgaaacgaagattaaaggagccacattagccaaaagggggggacaatactaccgagggacctcatttgcactggttttgtaagttgtaagacgggttgtatctagttttctggttcaatgaagaaaatcagattggatgaaaaattgagggaccaaaaaatgacttattcctttttccacatagtttaagtgctatttaaaaaaagaattaggtcatctatgggcccttaacc

SEQ ID NO: 49036 - DNA, 436 bp, Oryza sativa
  unsure (1)..(436): unsure at all n locations
tactaaagacctangagtatgacttatacgctccacccgtggggtagtctacagacggtctagtaccagataagactttgagtgaaacttgcttgcacaagacttgcaattcaaggcgtagtccattgttcaagttgtgagtaagtgtagcttggagttctaggtggatgttcaaccttaattggtctccatcgaaccgctggtatataaacagtacattggaaaaggcaaatcttcaagattgggggggnaaaattttttnttttttttttttggggggnnnaaaaaaaagggggnaaaaaaaatttttttggtgggggattgttggaattaatgaatgggccttagcccactcgaagattaattctttggaaaatcacaaaagcccacctgatgggatggcatgcatgtggagtttagtaccacggagcttatt

SEQ ID NO: 49037 - DNA, 536 bp, Oryza sativa
agctttgcaatgacatttaacttatagttctctttccattaatcaaattaacctaagttgaacaagtttctggtcacattcaccatatgcggttgcacacaacaccgggatcagacatcagaatatgaactgaagtaaaaactgataaaagtgctggcaaatgtggcagacttctgctcaactagttgctcacagagcatgtacaaacagatggcatagctactcaccggggtaccctttataacagttgacacatgaccaggagcaatcccctctgattctggctctggggcaagccgagagagaccaaaatcagcaacttttgcgacaaactttgagtccagtaaaatattgcttgctttgatgtcacggtgaaatattggagggtctgcttctgtgtgtaaatagaggatgcctcgcgacgaccccagcgcaattcgtaacctcgtgggaaaatttaggggctcttttgatcgagctgctacatgagacaatttgtaaggcaactatgtacacagaaattacagccacctaac

SEQ ID NO: 49038 - DNA, 441 bp, Oryza sativa
  unsure (1)..(441): unsure at all n locations
taataatcccaattcccaatccctaagtcaattatagactgacaaaacatcgtcctcctaggtcgagcactgtatgaatatttatggcacactacttattctatactcaaccagatagatattcttgtacagatgctggaatccacaatcactcaccacatgacatcgcacaataataatggagcaatataatataatgcagcaggcaaatcacacctttagctatcggaaacgccgggcnccnccaaggntttaaaaattttcctccaaaaaacccccccgggggggggggggggtacccccctccccccccacccaataggaacagccgaccactacgcggggcccgcgaaggtcgattgtaatgggccatctattcttcnccctgtggggattagtttgggccaataaaccaccacgcggcccgtggtggagagtggg

SEQ ID NO: 49039 - DNA, 647 bp, Oryza sativa
  unsure (1)..(647): unsure at all n locations
agcttcatgttcgcatgaacatgcctgtgggccgtgtaaaggtacnaatccctgggttggcacctagngagatgctcaaggcagaggtttctcttgactcccaaccgatcacatggtgtctttctccacctccaattaagaggttggtggggagtttgagagcaacggagaaaaatctccacgagagtccacgatggccttttggcctctaccgttgctcagctgcgcactgagaacaggaggctaaaggacaccttgcccaaggacaaggtcgagctcgatgagcttagagttgaccttgcgtccctccgtcgtggcttttgtgccaagcattttcacttgtacaaggccgtaggaaaggaagacctctactgtgctcctatcctgataaggacacaaatagctggaatataaccatgactaccttatgtattaatcaaccaaaggttgctacacaatgagttttgtgtgtttttgtttgcagaggtacttgcttgggcaaaagaaaagagactgagtgtaaggaatgcatggatgattgaagaagttgaatggggaccaagccaagaccttctccaagtcttgtttcatctcaacatgtcacttttggtccatagaagaacaagagataaagttctacacgtttt

SEQ ID NO: 49040 - DNA, 196 bp, Oryza sativa
ttctttcttttctcaatttaccgaacaaatcctctccccctctctgtgaaggcgattcttataaaacaccatcccctaatgcgtcgtaaattacatgtcataacttttgtaattttatttatgttttttttatttattcgctcaaacaatatttttatttcattctctaccttccacaaaaatatttttatttttt

SEQ ID NO: 49041 - DNA, 551 bp, Oryza sativa
agcttctagctagtatttttgcttcttcttgtgaattgtattctgatatcttttgtcatttgcaatttgcttcctcatgtttgggatatattctggtctgatcatatctttcaagtgcatccttgggttccaccattccatacacttcatagcgtagattccgcaatcatgccttgatgagacaaaaacaaaaataaatcatttaagaaaaacaaaatcatgggaaaaaaagggaggagttttggacaaaaaagaaaatgatatgtaatttggggatgtttgttggggttgataggtagttacccattgttttggcgagtaatttgtgggtattggatatcaaatttactaaagtctttctccacatctgagaattcttcccacattgcaatgaatcctggtatctgtgtataaacaagaggagcatgaaaaaaaaaccagaaaaaaaatcagtggatgcgtctataaataaattgtatggaaaaaaaagaacaaaatttgtatagctcaccaatagcccttgaattttcttatgatatttgctggtttca

SEQ ID NO: 49042 - DNA, 347 bp, Oryza sativa
  unsure (1)..(347): unsure at all n locations
tctgtaactnttgaaccaaagtttggagctgtatatttttagctcttgaggtatgaaccagacatttacatgatattccaatgttataaaaccttgcagataacaaattgtgctatacaggcctaaatgttcaaggtcaaatttgaaaatgtatgactgcaagcattggaagaggttgaatatgcgatccttttgtctccgatgttgagtcttgtggaaggaccaaggagatatttggtnggtaacccaagggccccaaaatttttttttttttccccaaaaaaattttttttcccccaccccccccccggcgttgccgtctcttgcagcgtgtggttgcgcgggct

SEQ ID NO: 49043 - DNA, 504 bp, Oryza sativa
agcttcctagaagattcacccaaaatcttcatggactgcgaccaacagtcaagctcacaaaggtgagttccttcaagaatgctctgcaggacaacatctttgctaattaaagccaacagaactcattaaggcatagccaacctgccttgcagctcacgagagtatatgcatcttcacttagagagggtatatatattggtactctcctctagtttattaatggtttgttcttcccaggatctaattcacgggatctccgatcacatagactgggttaccaccatagtataactcacatgggtctcaaacccatctccttcgatgcattgtctatcacatttcgtgatagtcccttcgtgaagggatctgccaggtttctcgctgtttggatgtaatccaacgttataactccggagtttcttaatttcctgacagacttcaatcgtcttttcacatgtctagacgatttcatattatccttagaactattcactttgaccatta

SEQ ID NO: 49044 - DNA, 370 bp, Oryza sativa
  unsure (1)..(370): unsure at all n locations
tctccaggtgccacggcgtggtcgtctctggcgacgactgataggatgacctcgtctctcgcagcacctcgccagagccgtacgagctagtaatttctctctccactggttttagatggggatcgagtggagattgagcaaacaggggcaatcttgtcaaatttaaatttctctctccactcttttctcaagtataataaaataatgtctcgagtgtccagtagctaaattaacnccaacccaaattttttttnnttttttttaaaaatttttttttaaaagagggggggttttttttttaaaaatttttttcacaagaagatacacgttttttggatgtctcacggcnnaatgccncanactttaaatg

SEQ ID NO: 49045 - DNA, 402 bp, Oryza sativa
  unsure (1)..(402): unsure at all n locations
agcttctanctagnatttttgcttcttcttgcgaattgtatttttttatttatacgaccattgcaatatgcttcctcatgattgggatatattctggactgatcatatctttcaagtgcatccttgggcttcaccattccatacacttgatagcgaagattccgcaaatctgccttgatgacacacacacaaacgttgatcatttaagaaaaaccatatcatgggaaaaaaagggaggaattttggacaaaaaacaagatgatatgcaatttgaggatgtctgttggggttgataggtaattacccattggtttggcgaataaactgtgggtattgtatatcaaatttactcagctctttttccacatctgagaattcttcccacaattgcaatgaatccct

SEQ ID NO: 49046 - DNA, 367 bp, Oryza sativa
ctttcgaacttatgatcaagctactcgacctgaattttattactatgatcggactgatatactctattacatgagccttatacgcacataacactttgcagcatacaaatgcttctgtatattatctccgggcactagatcgaaatccattcttaccactagctatcaataataaggccgagaactcgcattatgtgccactatctcctctatctagagaaagatcaaagaggaattttataggaatttttatatcttttaacccatttcttcaaaaaaagactttctttgtttttaaacaccctttttaattattactacaacagggtgctttatacatatggattgctcagacaaccactatccc

SEQ ID NO: 49047 - DNA, 469 bp, Oryza sativa
agcttcgtaggtcgcgcatacgccgccgcgtcgatggaatcgatttatgaggggcggcggggagaaacgcgagagagatctaggaggcgataaggctcgtgtggtgtgaaaaggagtcgccgtccatctatgacccacacacgaacgatagagagagggagtttctcgtttggtgtacaggaatcggtattttgtgggacaaagccctcccctagaaatcgtcttttctttttttttacggagggagtatttgaatgtgagtattgctagaaagtcttttaacctgaaacggatgtagtaacatataacaaggtccctaagagggtagggaaaattgctttcctaaaaaaggaataagtttacctggggtctctcaattttacatcgaggttgtttgatatcccttatcttcaagactagaaatctcgggttagttgacgtggcatcctagtcagaaaaaaaaaagaag

SEQ ID NO: 49048 - DNA, 338 bp, Oryza sativa
  unsure (1)..(338): unsure at all n locations
ntactgtttgacaccttntaagatgcattgtaccaacttctataaagtcgagtaactgcggtataaaaggattttaaggtattgggcacttgatcacgcgcactttggcctaagcaaaaagtgcctaagtccctaaaagaacgtgacaggccacacctgaaaatatgggctgcagacatattatgcctataccaaaaaatatgccttcgacaccctttaaaggatgacgcatgggttataaaccaatttgggggcccgttttttcccctttttttcacccctgggggcgcaaaaaaagggttgttataaatcttctggtgattaaccangtgtgctca

SEQ ID NO: 49049 - DNA, 661 bp, Oryza sativa
agctttgaaagcaaccaatctccgcagtggggcgaaaggtacagcggtaattattaatataccgaatcgagcttccactcccatcagatagaagtgagcaaggaaagtcataatatgactttcccttggacatcgagaggctgagctcttcgatccttggagtaacagcaatttgaagccatctttcgaggtaactgcgtgctttggtactgaagagaccattgaactcaatcgtaagagccttcacaccaatgcctgagtgttttttcataacgcgatcaatttttctgatgaaatccgttgtaccttcaacgatacccattgtttcagtactaaaggaaagtttgggacggtttctccaagagtatagaaaggcagaagacaagcaggccacacgggcagcgtctttcattggcataagggaatgtatatgctgccacatttccttgctgcacaagcatgagagagcccttacattggaaaaaggaacgctaaaacaactggaatggaactgccggatttaaatgaacattggtgaaaaaaggggtattaattattactaacctggacaccttttactgctttgatgggattgcagaaaaagcctctgaaacccttaaaacattatggtggaaaggggcaaaagggtaaatttttcaaa

SEQ ID NO: 49050 - DNA, 370 bp, Oryza sativa
  unsure (1)..(370): unsure at all n locations
tattatttctctcaatataaccattattaattaaagctagatacattgatctaacagaaaatattatattctgatgaaaattccatctaaagctatcagagaattgatatatgtacaatataagcacacaattcataccaatatgcaagattcttaccaactaatgatctcctgaaggaaacattaagtggaacggatcttataacattaagtggaaacattgatctactaaaaatccaattgtgggtcctaccccccccaaaaaattttttttcccctaaaaaaataccccccccccccccaccaaaaatattattgttggagngagaaccaaaacgaaccaactccaaatcccaccacgctctncctg

SEQ ID NO: 49051 - DNA, 489 bp, Oryza sativa
aaacacacaaagcttacagcccaaaccctcaaaactattcctctcacttggctgttctcgtgctggggccttgacatactcggaccattcccacgaagacagggcggtcacacaaatccttggtctggcgatcgacaagttcaccaagtggatcgaaacgacaccaacgggggaaatcaaggctgaacacgccattaaattcgtccaagggatattctggaaatatggattggcccaccgcatcataatgaacaacggcttccaattcatcagtgccgacttccaagaatacttgcttaagctgggagtcaaaatcttgttcgcctctcgttctcacccttaaaaaaatggaccggtcgagagggcaaacgacatagtactacaaggaattcagactcgtgtctacgacaggctcatgtcacatgacaagaaaatgggttgaagaaactccctgggtattatgggccgtgcgtaccacaccgacaacgt

SEQ ID NO: 49052 - DNA, 368 bp, Oryza sativa
tgcattcttgtagctaattaagtattctcgtggctgcattatactcctatatgctctcagctctgttatatcacaagacacaggtctacaaattggccatgcatggagtgtaaccgtcaatttcatccagcatttcttaacctctctttttgcatttacaatcactatcaaacaaatggaatatccttacccaccacactaccaaaggtctcatcaaccattgattgtagtaagcataatttaaagtgggcacaattgggttttattttagggtgccccccaaaaaaaatttttttttcttctctcccctcccacctcccattataattttcttacgatcattctgatttattgcaagcaaattaagt

SEQ ID NO: 49053 - DNA, 351 bp, Oryza sativa
  unsure (1)..(351): unsure at all n locations
tattgctanggatatgattgaagctgtgcacgtgaaactcatttgtatcttcagtgaatgtaagttgcacccttggattctccgtatgttgattactgttgcaagaaaagcacaattttttgaatttgattcngaaggcaatgcaacatgggacttttcaggaactcaccgtgcttgtctagttgaagaatataagcaagaaatagaaatatcaccggtcaaaaaccaacccaatatcattaaccgggggggacccttttgtgggccctttttttttcccataaaaaaccccccaaaaaataaaaaataattttttttttaatgtgaatgacgatacctccgtttgacaag

SEQ ID NO: 49054 - DNA, 547 bp, Oryza sativa
  unsure (1)..(547): unsure at all n locations
tgccgcatgcaagcttggaagagaggcaaggatgttttgccaatcctttgattgaaatcatttatgttatcactaagggatttacttcttgttaggtttgggtccaaaagagacttgcgtctcaaatcgacttaagaggggcttttctacaactcaataggtaatgtaccgacctccccggtcagatcattacttctcggcttcctagagccattccacttgattaatcggctcccagagcctttttcattttcagcagcacaacaatccgctttcactcgggaagcctagactatgatgcccatagacatcccgaatcacacagattcgtttcttgaccactcangtcatccatctgccacataggctgattctggttacgattcccacaccacaacaacttttcacaaagcacaggcaaacaaatctacgcaacgggaaccacctcacatccgcccatgaccgtgggcacggcttttcgaacagttagttaacctctgcagaggggtacactntacccacaagacacgaacttactccagacact

SEQ ID NO: 49055 - DNA, 354 bp, Oryza sativa
  unsure (1)..(354): unsure at all n locations
tcagaggtaaagatatgatcattgtcctaccgtcctactgaaattctgctgcattcataacaatattcaagttcaagatccttcataagattgaagtgatctaatatatctagcgtcatatataggagcataagaatcataagtcttgaatcaagcttctgacggcatagtttggcagctgatggaactactgcatcttagttgtttcaaccagaggagaatcanggattgttttccttcttgggttanaaatttccctttaaaaattttttccccccttttttctttttttaaaaaattttttcggtggccgcttatgagtcgttcagttattcactgatgctgatagctttg

SEQ ID NO: 49056 - DNA, 356 bp, Oryza sativa
  unsure (1)..(356): unsure at all n locations
tgtcagcagaaagaatcaatcaaagctgaagatagacgtggtaacataattttatttattacggaagaggacaaatatggtcagtttttaagcaaattgttcaaacagtagggcaaaaattgcaacatcaccatgcaaatcacagaacgatgtcntaacataagcaatttccaacttacaaaagcttgtgttgtgttctttctcagtaggaaaacatatgtacaaagcatgggggaaaaaaccctttttaagagggttttttttttgcgccgccccccccccgcacaaaaaggggggggggggtaaaaaaatttttatttatatacttggctctgcaactaagaggcaatcttcta

SEQ ID NO: 49057 - DNA, 451 bp, Oryza sativa
agcttgatcatgatccttttccggtgaatacaattgatttcaatgacatgtatgtgttgattcggccggagcaagccgaatctaccaaggggaaaggagtgatcattggagagcctaggcctaagatgatggtgccaaaaaattcggaggttagtgtttggaaggagaatatgagtgaagcttcaaattacaaaactccaagaaagactaaggtgacctttgatatgctcttgaacaagtatgagaagtaaggtggcgagaagactcgcaataaaggtaaaaggccaagatcacctcctagggagcgatttggtcattcaccaagacaatcgaaaccacttttccttcatcatcctcaagtcattgccatggggggtttgtccaatgcccgcgcccggttatcctttttcctacttcatgctatggggggccactgcccccaatgtttgat

SEQ ID NO: 49058 - DNA, 362 bp, Oryza sativa
  unsure (1)..(362): unsure at all n locations
cctcganaaatatatccttgacaatacactggtaacatatgctttnantgtaaatgccacaggtatcatcctaacattgtatatattcttaacctactgtatggaatgctgacattgtcttcatttcaaccacagtaacaacctagacctacactttgtgctttcctcataactaaccaaataacctgtttgtactgatatatatgggtttatttgtaatcacaataacatgttgtctctaaataaatttgtgggaatttctactattttttttaactcttattataagagcattctcttcaataaaaatatttttaatagctcgactaaacttgttacttgatatatttgcttgactgaac

SEQ ID NO: 49059 - DNA, 420 bp, Oryza sativa
agcttgttgtgcgtttgttcttatctgggacttgccagattgaattcttgaattgcatgtcttgttgttggatttggggtgtgtttagttcacactaaaattaaaagtttggttgaaattagaacaatgtaacggaaaagttgaaagtttatgtatgtaagaaagttttgatgtgatgaaaaagttgaaagtttgaagaaaaaatttagaactaaacacggtcgtaatgccaccttgcgactgaccataagcagaactgttcaagctctcttaaatgatactaggatgatgctaagaaaccactccagtgtacaagccgtgataatacagcagggaaaaaaacagacttcgacacaacagaaacgccgaagctgatcccaaaatgattttacacatacagatcgcaaacatgctaaatcg

SEQ ID NO: 49060 - DNA, 237 bp, Oryza sativa
  unsure (1)..(237): unsure at all n locations
tggtgagctttgcttacctcttgtactcgacgtccactgttgctagctcggtgagcgacgcggccatgccggggcgggccatggcggcgaacgccgggctgctcanaacgaggccggtgcggttcgtcctggcgcggtccgtgaccacaacacaggcgcccgcgttgctgcacagcttcttgtccttgcatctcacctgcagcaacgaatcggtcaggatggggaagccattggaca

SEQ ID NO: 49061 - DNA, 613 bp, Oryza sativa
  unsure (1)..(613): unsure at all n locations
agcttggagcttgtgaacttcacaccatccttacgagtttctatgattatgntattgctagtgagtttcttcctaaccttctgttcatctttctttgagattctgaacacatggccaagctgccctttttctagcttcaattgcttatcaatagtaagatccagatcagcagctgtatgcttgtgcaaattgttgatgtgattttcaacttcagaaagctcatccttcagcacagccaaatcagaagaatatcggggagatatcctatactcaccattctcaagttgatcaaggtcaatagctgtctcaacaagagaagcaaacctaccaaacctatcctctgtcagccactcatctaaagaattaagaaactttgtccttatcagcgcagaaaaactgccatcatattgttgaagaacattcttgatgtatgagactctaatgcaggactgcaaaatcataggttaacaaagtgaaattttgtttaagcgaaatggatttatgcaaacaacacccatctagacaagaagtactaggacatctttcaacaacaaatgatcgaacaggtgtgtgtttactaaaagcaccaaccatagaagggaaaatttgtttg

SEQ ID NO: 49062 - DNA, 233 bp, Oryza sativa
  unsure (1)..(233): unsure at all n locations
tgtcgagttcttctcgtatggcttgttttcgatctggtgcaaatctcacgcagtttttgctttactggcttggcgtccggtcgcaccatgagtttgtgctcaatcacctccctggatacccccagcatgtctgacggctgccaagcgaacacatcancattgtctcggaggaaggtgatgatcgcgagttcctatttctcgcctagtgatgccccgatcttgacggtcttgtc

SEQ ID NO: 49063 - DNA, 510 bp, Oryza sativa
agctttcattttcgtgcttatcctagttgttggtttagtttatgcatggttaataggagccttggaatggtcttaactgaatattcagacaaaaaaaaaaaagaaggaaaagattccattaagacagttatgagtttgattgagtttcccctacttgaccaaacaagttccaattccgttatttcaactacactaaaagatctttcgaattggtcaagactctctagtttatggccccttctatatggtaccagttgttgtttcattgaatttgcttcattaataggctcacgattcgactttgatcgttatggattggtaccaagatcaagtcctaggcaagcggacctaattttaacagccggtacagtaacaatgaaaatggctccctctttagtgagattatatgagcaaatgcctgaaccaaaatacgtcattgctatgggagcttgtactattactggtggaatgttcagtacggattcctatagtactgttcggggagttgat

SEQ ID NO: 49064 - DNA, 353 bp, Oryza sativa
  unsure (1)..(353): unsure at all n locations
ntactgttccctgggattggctntgggcctttcctgcgcttcttatgtggaaggcgaagaaagcccccttccgggggggcccgagccatcattgagataccactctggaagagctcggattctaaccttgtgtcagacccgccggccaagggacagactcaggtagacagtttctatggggcgtangcctcccaaaaagtaacggatgcgtgcaaaggttttctcgggccagaatggggaaacaaatttttttgggggggttttttnnnnngccccttttttttttcttccccgtttgtccataaaaaggggccggcaaaggcagaatggagcttgactgctagactcacccg

SEQ ID NO: 49065 - DNA, 620 bp, Oryza sativa
agcttgacaggaacaccaagaaattataaactaatcatacgctttgttcatcactagtgagactagtaacaacaatgttacgaccaacctagaaagtgcagaaacctgaccaaattcagccaaagtagatagcaaacagtctgtacctatagccctacagaacaatttccctgtaacactacaacacagcagcccactgatttctgtaataataaattgtctctgttgtatttcatcaagaaagtatccaatagaaatccaatccatgcgttattctgtatcaatacacagactatgtacgatacgacatgagaaatcaccactttgctatatagccatattaccatgttttttttaaaaaaaaatgattcagcgtgtcatctttctctaactataacagaacacggtataaaccttaaataagaatgccctagattttgagtgtgagaacttcctagtctgtgcttgccaatagaaaggaagatcatgattgcttacttcctgtgtgattgatcatgaatgcttacttcctgtgtgattggatatgaatttattcaaagcattataactctagagatgatgaaacctctctcgaagcattatcactagagatgatgaaa

SEQ ID NO: 49066 - DNA, 345 bp, Oryza sativa
tccgcgaccgtaacaacccaaaaagctgctcgatccatctcctgcgcacaacatcatcccaaaacctaaacgcaatttcactagaaaccctaggtgaagaatccacctaccgacccagacgatcgcccaagaaaccctatgaacaactaacgctagcggatcgaaacccccaagaggcgaatcgagcagccagcatgaaagaacaatcccccgaaaaaaggaaccaccaaaggaaatttctcctccggcccccccgggggggggggggggggttaaaaaaaagggtatttccctccttcccccccccccatcaagtcgaggcgctgaatcggtggtctcccgagc

SEQ ID NO: 49067 - DNA, 385 bp, Oryza sativa
agcttggatcttctgttgctaggaaacggctgtttttagctgtgttgtgatatttggtctcataagtagtgatcattgagcttgtgaattcatgttttgtcatcttacaaaagggaattcatgctatgtcagcaatgcctgttactgaacttgctgttacctaggtggctaggtagagaggccttttacatgtgtattcatttactaactatctactccagtatcagacttttacatgtgctccttagagcgataaaaacaaaacaaagggggaagaacaaatcagtacaatatacactacaagtagaatacaataacgcattcttgccgtcttctctaaaaattaaccaatttgattactcttaacctcaaagcccgttctttt

SEQ ID NO: 49068 - DNA, 390 bp, Oryza sativa
  unsure (1)..(390): unsure at all n locations
tgctatggtgttctaaaagttccaagaggacaatggttctgtaagccctgcaagatcaatacccacgacacagtaagaaaattcaatttcagagtagtttcatttaaggcatttaatanggcatgatgtagccatgtaagccagaacagccatctttgtgcttgcagattactgtgtgcaagcactatagaatttttcactgattcttttaaggctatttgtagaatgtaagctttttnttaattttttggtgagaaaaaaaaaaaattttttttctccccccaaaaanaaaaaaaagaggggttgaaaaaaaatattacatcaaggtgatacaaccatttagggatacactgctggtataaatgtatggacgctgcactancntggaaa

SEQ ID NO: 49069 - DNA, 596 bp, Oryza sativa
agcttgtctagccctagcttgtacaccagggattcagagacttttttatctcagaagaatcatcatacacacaggagtagagtgttacgcttcatagcagctcgaacctgtataatccctctctcccttcctctctgatctacatctcgtgggcctagctcccgcaaattcaccgcggttgcgtcgaaagagactcctcaggatttcatccgctcccccggccgaactcacaaaggggggcctcacagcctcccgctagagagcatcacccctcgacatcagtggacccactattttcgaccattagatttgctaacaaaaagtaaaagcccctaaggcccataggggctgtccatatcgtttacgcgtatggggcatgtacatacgctacatcctcccctcttattcaagctccccttcactgtatagaaaatatatgttgtgataatctaaatcataaagctaatgattttacgtacgtcattagaatatttattaccaaatttattattcaagacccaaaccattggatttatcttcaagggaaacagacactggtggagaaaccctttgtaatccccgttcgtaacccccct

SEQ ID NO: 49070 - DNA, 345 bp, Oryza sativa
  unsure (1)..(345): unsure at all n locations
tcgacaggccatcggcctcctcgtcccggtccacctctatttgcaatgactgngagaggaggaagatctgaagcacccataactcctctaccaagtcacgacagctaaggcggaggcagactttgcgtaagatggagaaacgggcctccatgatgccagcaaccttcggtttcctgatcggcgcgatcgctttgcgccgtcatcggagagctttctttgcgtctgacctgtggnccttattgttaataaagtgggggggggggggggataaaaatattttttgtgtggggggggggcgaaaaaaaaaactggttaacattttgacatttatggcgatcccacttg

SEQ ID NO: 49071 - DNA, 679 bp, Oryza sativa
cctgagctgcaacttattatatagatttcttctctatttcacaagtacttcttacattcctatcatttatccaaaattatattacactttttgcctaagacatttgtcacaggacacggagactaccaggaaggccaacgccagtgattgactggaagaccttctccgccagcagcgccatcgacttcgctagaccatctatctccgtaggagttctccgagaacgagaaaacccttcgcggaggaactcgaggtgcagctgcggacgatgatctcgtatgcaagccaacacatgccccccggcatattggcttgaccgacgacactcctgcttcaaagcttcgtcgatacgttgaccgatgccttcgagctgggtgcaggcgccattcaaccacgagatatatccggccgccgattcctcaggatccccacggggtactcggaggtctctacagactctggacatggacgtgcaacaactttttagatatgagttgaaccacacctcacgaccccggagtgtctttacggcctgaaccttcttaacttccaccatagtcctttcgagttcccggacctcacacttcatccttcaatactggatgcaaccatcccggtctgcgcagcatgaaaacaataagtcaagcttgttttctctccgaaaatacaacaaataagt

SEQ ID NO: 49072 - DNA, 658 bp, Oryza sativa
agcttatgatcaataatattcgggtctccatatgctgcagaggccgaagggtattctttctgtattacatcaaagatgaatattaaatggatgtactccaagtctccaatatgcttgagatgaactggtcaaaataatttgttgatttttagagagcataccgcagacagactagcaaatgttgcttccctccaacagcattcacgcagaacaatgggttttgcttcgtcactaccaaaagagcaatacacccgggtatccctcaatctcataagtacaccattcaaccctaagctggtaacacaaaggagggaaaacgcctgtatgatagtgccattgcagtctttcaaaccaaagttacagctgcatgaagggtgtcttttgaacctaaatactagctttggaatttccagcccttccaaaagggtctcctaaattcagaggaaaaaaagttctgtcacgacaggaagagtaaagtagttcgtaactactactaacctgaggaccaaactttgttggaaaaattctttctaaaaaactggaccaataaaaaaacactgctaaaaaattgttaacatggccctaaagaataaatccccactaaacaagccaagtattaatacaggcaggaatctaccccaaaaccagaccggaacca

SEQ ID NO: 49073 - DNA, 371 bp, Oryza sativa
  unsure (1)..(371): unsure at all n locations
aacctagctgcggatatacaagtcgtcgatctgcttgctgtntttgtgaattgcggcggaagcatgtcgagcgcgtctttcatggaagcgctcctctcctccgtgctcaaggaggagcancatcatcacgatgtggatgaagcgactgtctttactagcatcattgcctatagcggtgaggatggcggatacctgtcgcaagggtttgtcaaactgtatcggcttctccttctcttttggagtagggacattcaatttgtctcttattcttgtcatggttataataattcctatgatctgtttcctatttttatatttttcatttctttctccttctcagccttctctatctctttcactattcttttgtt

SEQ ID NO: 49074 - DNA, 496 bp, Oryza sativa
agcttcatatctctgcttatgttgaaactcgtctgaaaacggggcaagggcatcctttctacaggtaagaaccaggatgccccctgcgtcgcagttgagcttcattacgaccgatatctcgatgtacaactattgcgaaatgctttatatgatccttgctttcatagtgcacactgcagtagtaactatatacaaattatcatacacctgagagagctacagagagagagataaactttgccaatgtccagttccaacatatagcttacttttctcacacaagcaccagattaataccctatttacgagagcctgtatcttcctttttatagaatctccaacactcctagactgttcagattatcaactaaaatccgacattccataggtacataattatggctaataattaagaatatactattatataatggcaataacacttctaatactaacaattctaataatactacaagccatattatgagaaccccca

SEQ ID NO: 49075 - DNA, 574 bp, Oryza sativa
  unsure (1)..(574): unsure at all n locations
agcttctaataattgatgaaattcatctacttcatgacaacagagggcctgttctggttagcattgnttaaatcagtcaggcagactgaaacaaccaaggaacatatccgtctagttggtctctcagcaactcttccaaactatcaagatgttgcagttttcttgcgtgttcactctggtggtctcttccattttgataacagctaccgaccttgccctcttgctcaacaatacattgggatcactgtgaagaagcccttccagaggtttcagttgatgaatcagatttgctatgagaaagttatggctgctgctggaaagcattaagtgcttatatttgtgccctcgaggaaagagacagccaaaactgctcgtgccatcaaagatattgcattatctaataacaaactgacctgctttccaaaagttgagagcgcgagcctagagattcttggcgatcatgcaaatcatgtgaaaagcaatgatctttaagatcttttgccgtatggggttggtattcataatgcttggttgacaaagggtaaaccgggagcttattgaaggggttttttgc

SEQ ID NO: 49076 - DNA, 245 bp, Oryza sativa
  unsure (1)..(245): unsure at all n locations
ctaccaatcggatgctcctgaanatggttatgagggataggaacacgatgatgacatctatgtgtagcacgacagctgcccatacatactctttttaggagaacctcgtgatgaggttatccctgtcgtacactatgtagccgcataacacgagcgcgggcgggccatcgtgtatcatttactagactctcctgagcgtgaagaatacctgtatgagcgctaacaccatgaggatcatgactgcg

SEQ ID NO: 49077 - DNA, 676 bp, Oryza sativa
  unsure (1)..(676): unsure at all n locations
agcttctgtggtggttgctgtgacagcaagggggtgtggaagggcgggctatctccgcatctactttaagnnngaaaaagattagagctagtcttctagtttttttttcttttcggttgctcttttccatgtttctcgattatgagttttagagtgtatgcactcgtgtaaaccttgggctatatatattcactttgaatatagagaccggattttatccattatcaaaaaaatgtaggagcagtagtgcagtaccggctgaaccgttcattggtcggtatggggaatatatatatatagtatatggagtagtctttttgttcatgtgcagctcacatcacatgctttggatgacaaaataatgcttgcttaggataggaagaaggaccgatcaccaacatgacttcttgaaatcctttggaaactgcacaacattatacccccaccatggcgcactctcagaattccagggaccacaatggatttgactagtgatgaaaacggtcgaaaaccacattattgctagtacattactgctagtacattactcctttttatagaaacaggttcgggattattagggaatttttatactatttataaatttaacctattatttagcgtggacttagccctggtactggaaaaaacattttttttaaaaaaaaggggcttt

SEQ ID NO: 49078 - DNA, 442 bp, Oryza sativa
gacctttgaactcattgatcctacgtccgcttgaactggttctgactcgagtgacacctaatgacaggagacctgcttgacctgtctttcgtcttaaccgcaactgtccttactgttgcttctctaagctaaactgttgacctggcctcaccggtgtccctcagaattccatcaagtgacctaggaccggcgtaatactgcatgacaccttgcaattggctccttcaactgaaacagcgacgaggtgagccagaactcatctctgcgacctaccccccttacaggagtagtcattcatttcgcctgactgggaacaattgaactgctggcataactgtcccgcttctagcctgacttcggagtcgtatgcctaaatagatcgcatacccactgatcacttaacatatcatactcacaagtcctctcttgcatgacatacact

SEQ ID NO: 49079 - DNA, 332 bp, Oryza sativa
agcttctcaatccacttcactaatcactaaccttgcaaatgttcacaattcctttatatcaaaactaaattgtacgaggtagcaaaacaacccaatccttcagcaaaaaatgatcctaacttgcccaatggacacttgacaagtgtctcggatcgcacccatcggatgcaatttgattggctcttgatcagcctccggatcgtgtagcgcaacggtggctaccacctacgtagcaacaaagccatggacatggagcatgagctcaagggcggcggcctcagggcggctgcgcatgggcatggatccatctgcttctccggcggacccggtgc

SEQ ID NO: 49080 - DNA, 613 bp, Oryza sativa
  unsure (1)..(613): unsure at all n locations
agcttgtgttaaggattggtatctgtgatgcatgtggtatgtaaggacttggttacggaattctagntgaagtgtagcaaacatgataaagaacatcttttttttagtgccatgatcatgcaatattgtgaagttggttaaggctccgtgatattagctgtcaagtcgtgtctctacacagtgaaacttgtgttaggaataggaatgtgataatttgtaaatgaagcccagcgaacagaaagttatggaatttataaaagtgtaaagctagttaaatgttgttttgaccaaaaaaaaaaactacacaagcatcattcggacaaatttcaagtaatattggagtgtatatggggaatgccatgagctatccatagattccattcacaactggattggggtgtatatgggaattttattgaaatatgcaaagaggtgcgcccaactaaacaatactccaattcactttcaccatgtacatcactttcctgccaaatttagaaagatatgaggatttccaaatacagattaaaataatgttccaaaggtaccaactgatccggctcattattttttaaagcataccatataccggcaattatagaagatgcgaacc

SEQ ID NO: 49081 - DNA, 610 bp, Oryza sativa
agcttaaatgaattttctggttgaaatcaatatccacttgacacaggttctatttgtcactctagatgagaggactgatgatgagattaactccatgctagaagtcggtggaaactcttacgccaatgcaatctatgaggcatttcttccaggaggctatcacaagccacatcccgattctagccaggaagagagagcagatttcatcaggtgcatttatgaaatacacatcagccatttttgttgattgtacccatgagttgctaggtttagatttcaacaacatatatctagctagtcattcaatttgaaatgtgcgaagcttttttttttcctaatcacttgaagtaattttatcactcatacttttttttgatggtttataaaatttaattactggggcaagccagtagtgtttccctttaaaataagtaattttatctgaataaggctgactcatacaattaaatttaaatagcttaagttgatgacttccatagcggagtaaacattgaacaaaagctagtttgtaatatctcaggtcaaagtatgagttggaagaatttttgaagccaaacctgaagatagtttttaacaagaactctttaca

SEQ ID NO: 49082 - DNA, 620 bp, Oryza sativa
agcttctttcttgaccgacaaggacttgtatcaacccatgggtataaatatgttcacccatggtctaagcaatctatctccacgatcaatacaatgcggcgcatcgccaccttttaccttttctactttattttattgtccggcaggacttggcacctgacgcggggctgcatcggtgttcgatctccggctaaggggtaagtccaatgttccgccagcccaggcaattgtatcgtctacatcggcgtcagtcaaggctgaatcagtacattcgacctcttggattgctctggattggatgatatacttgcctacctatttatcatatgactctggtaatctagtcttagcatatcaatttagctgtatcgactacttatcgttttagggtttctgccggtatcgggtaaatcccgctgctagattaaattagcttatacatctaccaccctgaaaactcagtcaacggcttgattggctaaatattatggttcttttcatacttagtgctgtatcaaataaggttgatctacctatgtcgcgcttaaaaccataatatctaacctgctttttgaatgccaataacgtttcatcagggcttcacccggtgaggtatctgg

SEQ ID NO: 49083 - DNA, 330 bp, Oryza sativa
gtgccacccttacctatctacttatctcgcccaagaatccaccaaagtatccacagagatcatcctaccgacaacatcttatgagacatctacaagggagtatccactcgttctcgttttgccaattttgtgagcactactcgtttgtgacttctcttgaacctttaaaggtggaagaagctcttaatgatcccgattgggtgatagtaatccaagaggagttgaaccaattcacccggaatgaagggtggacttcggtggaccaacctcggcaaaatgtgatgggctcaaaatggttcttttcaccaagcaaaacaaggccggggtctt

SEQ ID NO: 49084 - DNA, 700 bp, Oryza sativa
atgcaagcttgggattaatcaaaccggccggtggtcagctaagtgatgacgatttcccacagcctcgccggcgccggccgggagagagggagcaccactagggaattgaaccctagctctgcagctagctgatggggaggaataataaggaaagaaagggatacgctagagaactcctggggctcaaaatgtgggcactggaatgagaagaccgggagcgagagcgctcctatttctggacctggggggctcctttacaccccactaacatgatctaggtcgctttcggggacctgtcctttttaccttgggaggatctcctagctcgagctgctaattagaatacatatgctcaactcctaacgggggatacctgtagcaaggctgggtcgcacgatccctcttcggaatcctgaacccttgaaacttcagtacacgagggctctatataagagcaccctcatggatagctatggacgcggatttacctgacagagactaaaactgaaaagggaagtgattaacgtttactcaaaaaagcaattccaggagcaagttgttataaaaaaaggcctttggccagtaccaaccccctggggaggaaagaaaaaaaaataaccctttgacttggtggccaccacccccaccttcaaaatatttttccaaaaaaaaaccactttttcacggggggggaaaaaaa

SEQ ID NO: 49085 - DNA, 322 bp, Oryza sativa
tccagatgcagaatgttgaggtcgtctacgatatgtaggcttggaggattgggtttcaacccaaggattgtgcccttcactcctagtgacgacgtccttggagaaatctattcgtgatacttttcattctatccctttagcgcacgatcgaacggggtttcaagtgttcttggccattcttatttcagtcgagctgctttgtgtgtgttaatggtacgagtggccgtactaagtcactagcaaagagaaattgttagcggggagttgatgacgagaaagcaaatggatcacactcatgttatgcgaaactgccacttcttgt

SEQ ID NO: 49086 - DNA, 568 bp, Oryza sativa
  unsure (1)..(568): unsure at all n locations
agcttgttgaacttaaggattttgaaggccatgcattgnttattggtttcaatagctccttcttcctacgagaagaagattttcccatgttgactccaaatagtgtctactgtacagatgatacagttacttatatttgtcattcaaagtttggctttcgagaggttagtgccttccatttggaagatagtagtttcaccgatctactacctattggctcacggttgaattggccacctcctgtttggtttaggccatcattttctaaaggtaaatagaaccattgcttcgagtgttacatatttctgtttatttacatctctatctattcatattctcttgtgataggttatataactattttgcaagttatattggcaatagggaacttttgattgaaacagtgagctttggctatacatcacttagatccatcaacatttggagttttttcatgttttgttagagcaatcttttgatttagtaccacgttcagtttctcagatctttctgtttgttttttacgtccactatgacataattctgccgatggattgatctgatcaat

SEQ ID NO: 49087 - DNA, 445 bp, Oryza sativa
  unsure (1)..(445): unsure at all n locations
gtatggctngaaacaatctcctagggcatggtatgatatgcttaagaactttntgcttgtgaaaggatttacaatgggaaaggttgacaaaacgctttntgttcttaagcatggtgataattaactttttgttcagatctatgtggatgatatcatctttggttgttcgactcacgttttggttgtagatcttgctgagactatgcgcacggaatttgagatcagtatgatgggtgagttatcgtactttttgggattgcaaattaagcaaacacctcaaggtacttttgtgcatcaaacaaagtatacgaaggatcttttgagacggttcaagatggagaattgcaagccaatntcaacaccaattggttctacagctgtgttggatcctgatgaagatggtgaagcttgtgatctaaacgaatatataagtatgattggatct

SEQ ID NO: 49088 - DNA, 502 bp, Oryza sativa
cagcttgacttcaccagccaggcgactccattccacaggccaatcttgtcgggggcgacgggaccaacctatctgagacggctccaactgagaagaacttcaactctcttgtgagggaaaagagcaaatccccccccgcttgcgggcgcccgaactaacgggaggtgtggggaaagtgagcggccacatgggcgtgcggcaccggccgaatgggcgccggaagccgggaaacccgccgcggtatgcggcggtttctacagcgggaggtggaaaaaagggctgacaagtgggccccacctgtctgggaccccgaggggttaaggaggaaggacgagttcccttgggcccgcccaccccaaggaaggcccgcgccggaagcgaatggactgggcccaccggccaagaagagagaaaaaggagggaaaagaacaagaaaaagaagaaagggttttttccgggatttaatattgccctttgctcatttaaatgggtaaaattattt

SEQ ID NO: 49089 - DNA, 359 bp, Oryza sativa
gttagcccatgagacagagcccacaaagcgctatttctgcttctgcttcaaagatgaagggccaaaatcttttcccaccttctgaaagaacaacttctaattctaaccctccattcttagtagggcaaaatatgctacacgacaccccaaaatcgtgttattggctgttggatactcgcaaatcttggctttggccacggacactacgaaagttgtgaaattggctgtgatacacctgaggcaataatatataatttccgacgcaaaagaggtctgaaaatattttatatgaccgatctacccctgcgcgccactacctctaagcctgactgggtctggactaacggaacccattcggc

SEQ ID NO: 49090 - DNA, 621 bp, Oryza sativa
agcttaccatttgtaaatactgctgcaatactatctggattgacaaaggtattttttgatcggcaacgaccgactgttacatctacaagtcatacagcatgggtaaactgcagggagagagagaagctataatgtagtataatcagattttaaaaaaaacttgaacataatattaattcattaaacgaatgggaatttaatcattgggacgcaaaggggcattgtcttcctcctcgagagatgcactacttctcatgtgaaatcgatcaaaacaaacacaaaacttgaagcatccatccatggccgagggtaaaatctgtcactcatccttcccggctgggggctcgcggctcctcctctcggcgagcatcgacttggtcttctccaacacgccgaaaaaaatggacccgccgatgccaatccacagcacccgcggctcgatcccctgccatcaccagccaccaagttcaatcacaaccccagtgcacccaccaccatcagcaggcgaaaggaaaaattttgcttactttaagaatgccccaaggtcctttcttccttaaggaatggctgggccccaacttacaatttccggaaaactgggatcgctgaaaccctgcgaat

SEQ ID NO: 49091 - DNA, 610 bp, Oryza sativa
agcttcacatatgcatggttggttttactgtaaaaaaatagtgattacattcttgctattttaaaaaaagaacacttgagtgacatatagcttgccccatgcagcttagtacttagggtgcattcgaatatgcttatgaactgagctttttagcctcacgcaaaacataacaagttattaccgtataattaattaattaattaagtattaactattataaatttaaaaataaaattatttgatttcttttattaaaatatgtatatataatacttacaaaatgtagtttaggaaatcgtactcagggaaacgagtaagtaattaattaaccagaaatgggagccttaattaccagtgagtacaaccaggtcggtggggctgagccctttcccggcgaagctagtgacgaagttacccaggtcggtggtcggtggatggaggttggtgttcgccatggtttggttcgtcgtcatcccgtccctacttcccagcttcaccgggaacgaagggacctactaactgcatccatgtcgtacaaagttgaaggctgctttcttcgactaaaaaaaataaatttactaatcttatttccaaatccgagtattaaaat

SEQ ID NO: 49092 - DNA, 404 bp, Oryza sativa
ctcctgcagcgggatcgagctcttatgtgggcgaatgatcttcgacgatgcagatggagctcggtggcagtgggatcaagcagcgggacgacgaacaagctcaacggtggggctgtgaaccaagctccaattcggagcccacatacgtggcatatcggggcgatgaccttgatggcgacgcgcgtgggcggttgtatggatctatagtggcgaggtgagttttcatcttcctcttcctcaatgatctggagcttcttctctggccactagaggtcagcgagacgccgtggtgtgatatgggcatcgcgagggcacaacctcctcaacgtggcttcaagccatctgcccgcacgtcacatacttcaccctaacacgccctggcgaggctcatgcatcttcttggg

SEQ ID NO: 49093 - DNA, 682 bp, Oryza sativa
agcttgtcaagccaatattcccaacagtacgtctttaaaaatataattcccatttttattttgttccccttgctgggaaaagtacattgatgcataagtttgtttttgttgacttactacaggctacttggtacgttgactcatgcccttgaaagctcaggtgttgatctgtcccaatccagcatatctgtgcagatcaaccttggcaagcgagctgttaagagacctggtgctgatggatcctccagttctaaggtacatcaaaaatattcatatgcccggctagagattcattttaaggatacaccatcagcaaaacttgaatagtcacaatcattcctgttgccagtttgtgatgaactgcgaacaaaatgaattgtttgacattatcctagtgcatgcgcattgcttattagacatatttgcatgaacttaactcaaagtcttaaccggtaacccataacacacccccacacccgcaaacccccataaagagcacggaggtgattctcacaaatatatctaagtatctaacatctgggattttgcattgaacaacgccattcttaccagacagaaattggaactgaagccactttacatctatgtaggaagctccccgtacattcacgaaaccacaaaaacagggtcaccaacttacaaggtaaggggggggatggaa

SEQ ID NO: 49094 - DNA, 365 bp, Oryza sativa
aagcttaccttgaactaatacatcgtacaatctctattagagtgttgctcttcaattaagcttactttgatgggctgggtaaaatcactgtcgggttcaccaatcttgagagctagcaataaagctatatccgacaaattgtgattatatctgctgcaatcgaaggctttgtgcttaagacacatgtatcattaacaagggcatgagaaataaactataaaaaacaatttcatgagcaaactctatgtacacatggataattactgtgtgattactgaaaagagctgttaaactcatgctttatgggtcatctttttttgctagaacgagacagtgatattttttcttgaaactgttggtggaac

SEQ ID NO: 49095 - DNA, 540 bp, Oryza sativa
agcttgcaattcagaaatgtgaattacgttcgaataaatctgcccttttccattaataaaagaaatagtcactcggttttctgcataaatcttacatctgaatcaaggatagctctattcaaatccaacatgtttacctatcatcagaagatgaagtccatttaggcagaatacatgaagtgtggcagatttgaattcatggaccatacacagtcaacccccttttctatttgcaaatggtttcaccacacttgcttgcatgatgaccaggttaaaataatcagaaaagtgtttgtcagtatgtataactaacatttcattaccgtactatccataccttcctacaccagttatacccaccattagtaatagaaattactccactaagaacacatatccccgatttgtgcctagttcttgcacgtgcatcgctctttacaaacagggaagaaaattcccccacagttttttttaagaaatagagatttcatatggtccagttgttgacataaaacatggagacaaaaacaagcatttatc

SEQ ID NO: 49096 - DNA, 396 bp, Oryza sativa
ccaccagggtcaggcgagccaactctgcgcgcaaagaaatcaatgccttctccacggaagctgtttgcgtggccggtcatcgaaaaaagacacaggggtacgatgaatgcatgctcaaggacaaaagaaacgaagcagtggaggactcaaattaaataagcgaataagagcggaatgatatgcatagagcatttttttgcatgagagctaataaataacatatacgtacatagcgatagaacaatgagaaattatagacttactaatgatagcaataagagcataaagaccttgcaacccatattcgtgagttaggacctaatgcatacctgccatcaaaacccgactgactgccaaataaatcggaaataattttactaaaaccctagactgact

SEQ ID NO: 49097 - DNA, 444 bp, Oryza sativa
aacttttgtgtaactaatagacttgatatagtatagtggcatcaggttatttttccctctggcacgccaataacacaggaatagtttatggttacctcttcgtcaaatatccgtgcaaagctcttcgatcctgtacagctgatataagctgattttgctcgagaagctttgcatctagcacttgcagcctgtatttggggaaaaagaaaagggtgtaccaatcgtccaacatgatgcaaaatcaaaatatgactatattgttacaacatatgaaagagaaatgtgcaaccttacctgtgcctcttcggattcccaaatgcaacaaggaatcgccactgttcttttacgacacgaggatcacaatccggaggacgttcctcttcaactatatgagaatcatagcggttttgctttaagctacaccttccattcctccactttggt

SEQ ID NO: 49098 - DNA, 428 bp, Oryza sativa
tcattttgaaatcactaagtgatttatttctttctaagtttgggccgaaaagagacttgcgtctcgattcgactttaagagatgtttttcaacagctcaattggtaatgtaccgacctcccgggtcagatcattacttctcggctcccagagccattccacttgattaatcggctcccagagcctttttcattttctcggactcccagagtccagctgcccagcagcacaacaatccgctttcactcgggaagcctattctatgatgcccgtagacatcccgaatcacacagattcgtttcttgaccactcaggtcatccatctgccacataggctgattctggtaacgattcccacaccacaacaacttttcacaaagcacaggagaacaaatctacgctacaggaaacacctcacatccgcccatg

SEQ ID NO: 49099 - DNA, 447 bp, Oryza sativa
agcttcggatgtgcatcgactacaccgaccttaacaaggcatgtcctaaggatccttaccccctgcctcgcatagatcggattgtcgactccaccgcggggtgcgaccttttgtgttttctagatgcatactctggttaccatcagattcgcatggctagggaggatgaggaaaaaactgcgttcattacccccataggaacctattgttatacgacgatgcccttcgggttaaagaatgcaggtcctacttttcagcgtactactcgaatttctttgggtagccaaataggacgtaatgttgaagcttatgtcgatgacttggttgtaaagacgcgcaaccaaaagactttactctcagatctagccgaaacttttgaaagtcttcgctccgcccgcataaaactgaaccccgataagtgcgtattcggtgtacctgcgggcaaac

SEQ ID NO: 49100 - DNA, 428 bp, Oryza sativa
taattaacagatattcacggtacagtgaaatgaacctttatagtaaaataactttcatgcgtattcatctctattaagccacgttttagctcgattttctctaccaatgcagctgcacttgcaatcaacttatcgaggacacgagctacgttatcaagacaggcttgcctcatgttgttccatgaagtaaccgggtcttgtcttcgaggtctagatagccagcgaaagagagcatcttgattgctagaagaaccatcgataatgatccttaacgcattctcttcgacaactatggaaggaacgagattctcacgaacgaccgagacataatcaagatgatcattactatcctgcagctgggcatcattatcaccagcactcaatgcaggcatagtcgatctgttcaaatatccaggcacaatcatatc

SEQ ID NO: 49101 - DNA, 645 bp, Oryza sativa
agcttgctccttaggtctgttgaccaagtcaattaatgaacttgatgatatgtggtttcccaataatacagtatgctgatgacacttcaattcttctcaaagcattgcacagaaaggtgttctgtttaaggcattgttgaattcttttgcacattctactggcctcaaagtgaattaccataagtcctgtctctacccaatcaatttatctcatgagaatgcagtgctttttgctggtctgcttgggtgcaccataggcacaatgccttttacttatttgggtttgcccatggggacaactaagccaaaggtagtggacttttgttgacagaaaacacgaggcctgggagatctgcttaactccagtgcaggtccaaaactcgccttctgatgtgtgagcgtgccaattgatttgatcctgcaatcaacaataaataaagacaaagaaaccgcgattaatcttataaatgatagccgatcggctaagtgccgatgacatatcatttattttaagcccatgtcatgtgtaaatcgatcggccgtcatgaataattaaaaaagaactaattttactcgatcggctggagacattaacaatatataactgctatgtcgatatatacttaaatcaagtgaatgggaaaa

SEQ ID NO: 49102 - DNA, 393 bp, Oryza sativa
caacaatattgtggcccgttgtgagaaattcatgccgctttgctgccaattattggcggagccataaatttttttgggaccgcctatgcatcgctcgggtgaatattgagaaaaaatcacccacattttttctttccttggatttgcatcccaccgattaccaaataaaataactaattaaaatttacttacacaacattttttataaaattacagtgcacttatatgttatatcaactaaattttcatatgtaattttagttatataggactgtaattgtatatttgaaataagataactaatgccgatttacttacacaatatttttaataatatttgtataaaaatacagagcacttacatgtcatatcaactaaatttacatattgtat

SEQ ID NO: 49103 - DNA, 672 bp, Oryza sativa
agcttatatgtgcttaaggagggatcttttttcatatatgcataaaaactgattatgcttgaggtccgatgtgtgacatgaagagtttcatcaaatgctccatcactcatgtgacctttctttaccaacggaaacatttttttgtagatgatcaccaaaaacaactttactcgcgccagtcggcctacgctgacatgtaaaaacgggatatttcctatggacaatagcaaattattgatgcggattacctacttgatgatcatttggatgaaccaaatagtttagtttagaaagtggtctaagcaatgtaatactccctccatcccatattaagttcttttttgactcatcctatttattctaaaataacttcatttctgaataattattgcatcagagttagtgagagtaaagaaatatttacattgggaatagataaagtgagtaatagttggattaggattagattaagtatggggtattttagtattctggtgtttgcattggaatgtgtggggaatgaaaaatgaacttatttttgggacggagcagtatacacttcaataaaagctcttttttacaacatggaacaaattatcccaagccataatccgattaaaaaagcttaaaaaaaaacatgggccaaaattaaggtttgtttaatttggggga

SEQ ID NO: 49104 - DNA, 452 bp, Oryza sativa
ctcagcttcgtgacaagcgttttcaagccgacacacgtttactatatctctactagaggggtcccaaaccaacaacaggttatgtcccaaaccatactgtgccaggaagcccaagggtccttcccgacaccaccccggtgaatacacatgtctctccgcatcaaggctcccctgataagctagttactcagccaggggtgtcccattccacccatgtggtcgtacttgtcttatgtgtggatgaaattccaaggaatcggtccttaagtgcgagagcgggaaaccgcacacccgttacgttccacggtccgcgattctggaaattcatttagttcgcaagcaccgacccacgtgtcgggttttccaagtcttttgtaagactccagttttaccccagttggtactcaagatttaagattgaaggcgaccgtcgatactggcacatggtgcac

SEQ ID NO: 49105 - DNA, 372 bp, Oryza sativa
agctttattcttaaaaaggtgggagactcatgaggtgataatcatgttatccactcacagtcatcatatgaaatgatggccttcataactttgtcaccaaatattttgtgtgccccaacatatgcttgaaatataaagcggtcaaaaaactcgcctttgttgcgcaaatatgaagcatataatggaaaagtggccataaatggtggttacacaatccatgataaaactgctgtttgaggacaacttggatgaaagtaagtatccatttgtattctatgtaaagtttctgtgaaagatgaacttgctcaccacgatcaactttagcgttccatctacccacattaaccactttgctctacattgggaattcat

SEQ ID NO: 49106 - DNA, 460 bp, Oryza sativa
  unsure (1)..(460): unsure at all n locations
tgcttcggatgcacgctcatcacggccactatttataattcactggaggtacatggagagcttaatctgctgagacactgatattacagtttggtgtatcgcacctgactcatgaggcccgactttctcccacaactctgtgaatgagtgcaaacnaacaaactactgatcttagctagtgagttgaacttgagcgcctgaacgcgttcacttctaatactctctagttgatgtcatataataccgcatgatgaataccctctttatatgagatacatttacacaatcgattgacacatccacgtgtcacggatgcttcaaaatgccgaatccacgtgctacgtgtcctgaatcgtatacccgtatcagggtaacgtatctcggcatacgcaccgaatggtcatttatctcactctgggtgggccaactgcacatgaatcgtgcgactatcatatcgcat

SEQ ID NO: 49107 - DNA, 560 bp, Oryza sativa
  unsure (1)..(560): unsure at all n locations
agcttctttataagccatgtagccatgtcctggccgcgtgtgctataattaagctggantcaacatcatacgtgtagacgttctccctaaaggatagagttctgaatgcatggagtgctgacatcctcgggtggaggtcccttcaacacctattctaaactgggggtgataaatagatctatgtgctcgacttggatttggtgaaggctggtaagggtataatacaaacacgacgcttaagaagcgatatggatgcattcaaaacgggagggcctgtgaggcgatgtgaggactgtcttcattacgggcaccgcactaaagattgcaagaataacaaggagggtacatcttcaagcatggaacctaagaaacaacgtgcgaggaggaatagaacgggctcttacggtgctcacgatagggacgaaggaaacctgcagtagttataacctacactgtccggttatttatgctcggtcatgatatgtttgctgcatgacgttatattccaataagtttttaatatgtttggcaataagtatggggaatatttattttattat

SEQ ID NO: 49108 - DNA, 453 bp, Oryza sativa
  unsure (1)..(453): unsure at all n locations
tctatggaanattctggacaacacgttgcttgcataanataaggtcaatggacttgccggatactctcttgatggttctacttcgcatggtcctcaaggtacattttggaccaccattgaaccttcattgtttttgttttggtcttgttttgttttaagttgcaatgcccttcaaggttcatatgatatatttgccatagatcctgcagaaaagaaccaaaaagctgacattgtgattaaagctattgagaatgtcttaccgaatctgccaaaaaggtcctttttttccctccaccccttcattgcatataaacacactaatactatatgtttgtgcagctgcatggacaaagtgaggaggatgttgcatgatgataaacaatgagtatggtctgcaaaaataatgtatgggctctatttcttaagttccatattatagttattgactctgta

SEQ ID NO: 49109 - DNA, 391 bp, Oryza sativa
tcagctgagaaatctggtgtttctccacctgtttgttttgtttatcccaccaagtctggaaagtcttgattggtaaatattcacaccattgtatatggaatcatatctcatcactgaaagagaagctgagcccccagttttattttcagttctgttgctggtgatgagactgatagtgcagctgaaaacaagctgctatgattgttccaagataatgactttctgtctcaactactactaccacagcagcaattaagtcatgagagggacatttttcaaaagaaatacggcacgaatgtgcattcacatagatattattataccctttgatcatgatcaatgacctgtgagcaagaatcacaagccattcttcaacagagactgtggatgt

SEQ ID NO: 49110 - DNA, 623 bp, Oryza sativa
  unsure (1)..(623): unsure at all n locations
agcttgacattacggaccactgggtctagtaccagggggtaccgccccgggtggaccactcggtcaagatgatccgagcggtcaaacttaattgcaatctctgaccatcgaagatactggggcgtgtcgggctgaacagcattgatctcccgttcagtcaacttctgcttccgtttagactcataagccagggggccgccgaagatatggttgagctccttgcggtgatcttgaaaacctgccggggtgtcgccgtcgtccttcttccttgacgtgctttgttcttcgtcagagttcttccgtgcagtcttggtgtattgatccgcgaattgcttgtagacgaaacaatctttggccacgtggttggagttaggatggtgcgggcattgggagttcatgatcttgtcgaacgtgttgacgcgcgaacgctgtcgagaagagtgactggcggttgcaacaagttccgcaggcttacgcttgcggtccttatgattgttacttncacctcctcccgtaaccggcgtacccttggtttgcttccaactgggacccgaatgctttgatgcggtgacggcgtcttcagctttggcggactcggtggctttttaaaacatgaacttgac

SEQ ID NO: 49111 - DNA, 374 bp, Oryza sativa
  unsure (1)..(374): unsure at all n locations
acataccgaaggtaaaaccacttatagtctaacggagtacttaataccagtttaccgganatcgcctctctcaccattagccgtttcttatcagtcactaatatttcacattcaagaaccagcgaccagtggttatctgccacaaaattctggcatgattattatacaatgttttctacaaatccagacaaatacatcgctcatatattgcccatatgttaaacgatgaaaatgccatcataggaatgagaaaggcaaaggaaaaggaaagaacaattattgctcagaatgatagaacaaagaaaatagctgtcaatggagatagttgaattactcgggtagagattttattttttggttgtctgaagagtgac

SEQ ID NO: 49112 - DNA, 322 bp, Oryza sativa
agcttgtgctgaattataagaggctctattgtactttatagagagagtcattttattaagtccgagaaaacccggagttgtcggtaatcctctccttattttactctattaacactcttcttataaaaaatcaatctgattaattaagacttaatcagggacaattatctcttgggtaccatccaaataaacgagcgggaccattgatcgataaaacccactaaaatatagcggccgctttagtgtttacctagcgctaaattaggtattaattgcatagacgtggagtctgggtagttaattttcccgatgaattgcctcc

SEQ ID NO: 49113 - DNA, 426 bp, Oryza sativa
  unsure (1)..(426): unsure at all n locations
agggccagaagcgtgaacgcggcaaggggaaggtcngggagttggcgcccgagccaaaaaggggcaatgttgcgacgtcgatgccggtgagcaaatcttggaaggtcgtgagggcgccagcccaatttgagctacgcatgccattggtggaggacaatgtgttatccgtgatgggtattgcttgccgagagctacataagcaatacatggagctaagcaatgccaagcggaaaatgagggagtcatctatagttagacatcacgaccaccagccattcctatcgtcgcctgcctatataactataggctttgatgacctcttcgaccttttcacgatccggaagttnacactggtcttctatgatgctactccttgtaagtgcataccttctatacttgtgatatgattggactatatcttctaat

SEQ ID NO: 49114 - DNA, 551 bp, Oryza sativa
agcttcagtggtaacagttgatcctaagacatctgatgccagcaattctaattgttattgtcagcttggatcacaaaaatctgctgaaaggaacggtatcccttatctggagagaaaaaaaaacaggtcatattgatggatcatcaacacctgaaaactaatggtaaatacaatttatttttctcgatagcctagcaacataatttcattaagataaaacctttattcgtacctgatatgtttccctcttgttaagatttaactcaaggtgctcttcattcaatagccttgccagattcatgcgacatgttaatatgacttgggttgtgctgttgctccgtggaaaagatcgttaagtatctcctgtcatgcatgccgctgccgtcgacattctttcttgatggccgtgagctggttatattctatccggtgttatccccactgatgagcatcccggtcaatttttttcttttgtttacattggttaaacttgatacatttttcaggtttacattggatcagtttggtccaggtatcttgttgcaatgcaa

SEQ ID NO: 49115 - DNA, 371 bp, Oryza sativa
agcagcgacctgactgtatagcataatctttggttttgtgagaaaataactatgtgcccaacagtatggtatcagggggacatcagttccatttcctactcatgatacaaaacgcacattcctgcaaaaatgtttgcactatggagacaagtgcatatgtgacacgtctggtttctcgaagaggcaaacaatcagcaattcctttcttttattgatacaagaactaacaagtactgcacttcagccattgtgacatcagacaactgggtgtatctaatgaaaactgaaactactactgccatagatcagcaaacgtcttacgctaaacagattccgaagattgctccgatatctaccattcatacatcgtt

SEQ ID NO: 49116 - DNA, 560 bp, Oryza sativa
agcttaattacacattgttgttgtaaatatgtgttgtctacttcttttaaaattaatgctgataataaaattccatcctggagaatgaattggccaacaccaccaaatactttaggacgagggagtactagtcgactgcaaaatttctccagttcgcccctgtcatatatagtgtcattcatctctgaatctcccatacgatgcctgtgaagaacagccgtactcccatggcattcctccttccacctcttccaattaatatgcagcagtcagcagctatacttcttctctctttcctgcttaggccctgttttcccgcacaaaaattttacaccctatcatatcgaacgtttaaacacatgcataaaatattaaatatatgctaaaaaactaattaaacagattacaattaatttgtgagacgaatattttaaacctaattgctccatgatttgacaatgtgatgctatagtaaacatttgctaatgacgaattaattaatcttaataaattcttctcccggtttactgacggaatcttgaaattagatttttttgtta

SEQ ID NO: 49117 - DNA, 478 bp, Oryza sativa
agtctagatataaaatctacttttgatcttttaacctgctctaatatatcaagttgcagaacagaactattacaacattcatgctgtcattatgcttcacgaatctggactgattattgttacacccagcgaatccaaatactcaagttcccgcaatcataatagcatatgtgtttggacaccataaaccatgctctagtcaagtcacaactaataacatctctttgttgaactgcatagacattgttcatatggtcattctccaggatttaaaactgtacgttatgtataataatatctcatatggacacatcctgatctatcaaaaccttcaagttgacaagtggatatcagactctattgtcgctgcctcaggacataacagtacagaatatgtatacagtaaaactatttacaacatgacatgccttctaacaagaaaattatgactgcgcagcatggccgacatatcaatatg

SEQ ID NO: 49118 - DNA, 408 bp, Oryza sativa
agcttatctcttacgctccaggaatggatcagtcagaacatcaccaccggcttttcgtcgtctccgccgactggagtcttcgcctatacggttggttggtcacaccaccgatgttgggcgtctacgtcttcaccgaccggcttgccttcgtcgccgccgactggtgtctccgcctgcacggctggcctttatgccgccgttgttgggcgtatacgtcttcaccgaccggccgccttgtccgccgccgactggagtttccgcctgcacggctggcctttatgccgccgttgttgggcatctacgttttcaccgaccggacgccttgtccgccgccgactggtgattacacctgcacggatggcctttatgtcgccgtaggtgggtcgggacttcatcaccacacggcaa

SEQ ID NO: 49119 - DNA, 476 bp, Oryza sativa
  unsure (1)..(476): unsure at all n locations
taagctntatacatttatggtattggaatactttccgagtatattaatgctaactttacattatgcncatgttatactgattatactgctagcttatctgggagatgcattggtaccggtataatgtttgcttatgcaattactctatgtcatgacaatgatattggagtagtatctggtagtataagcatggtatctagattatgggatatcattatttggggttatatgctgtggatgagaggtgggccactaatggtgacagctcagtacgggtattcctccacacgtgtatatagtcctaagttaattttctggggacggtactcctccgtatttagccccagttgtatggtcatgacgtgctgtcgtaaggaactcggcagtcatgggtggcttctcatagtaccaggagggcatcggatagaaggtattagctagtatgtcagataagtacgatgtatgtatactatgta

SEQ ID NO: 49120 - DNA, 500 bp, Oryza sativa
agcttgacgatgaacggggacatgttttctgatcctctgctgcgagatttgcttcttgaccatgaaagacgacagggcctgaaggaaagacactcgatactgctactgcccattcattatcatgtggttgaatttacactcaaaacaaatgttgtcgatataaaaaaaaaaacaccctactacatccgtcacaagagagttcacttttcaacacgaatctgacaggcacttgtccagattcgtgtataaaagtgaattaattcttttgagaacaggggtaatacattatatcttatcccacccgattagtcgaatgaagccttggcatgttcaagtcaagctatgcataccaaaattttgcttatctcccgccaacaggtagttaatccaaggcaccttcttgctgctgtcactactaagccccccttatcttcggtgaagcagcgaacttttgaatccttctgccatgctacctatttaacttttcgttgaggcagcga

SEQ ID NO: 49121 - DNA, 252 bp, Oryza sativa
  unsure (1)..(252): unsure at all n locations
ccggacgcataaataaaggtgggcgcactgactaaatgcgaaattgcgaagatgctatttctttatataaaatggacatcgagtgcggaatattgagagaatagacacgtgatgtagggcanaactatggagtatcgggagcagccaacaagtgctctgttatgggaaaaagagagggaagaatgtgggtgctggtcttattttgacccacggatacggatttgcgcctgccgactgtattcctcctgagtt

SEQ ID NO: 49122 - DNA, 271 bp, Oryza sativa
agcttatgtcgttgacattaatgggaatagcattcaaacagatgatttcttttcacatctgaacaagacccttggtagcattcgagccatcaggaagaacacctatccttcctaacagcattttaacagtaccatcacggaagctgctcggcttcatcgtgtaccatttgggcttacgcgtcatgccggacaacattcctgtcctgctcaacatgaaaccgactttgattcaacacagatggacaagagctaactggatggctggcggcac

SEQ ID NO: 49123 - DNA, 214 bp, Oryza sativa
aagctcctgacgggagcggaccactcatcagcagagatgctattgttatacagcaaggaggtgcttcaggctgcacgagcacaagggcaaggtagccgccaaaccaagggacgaataagatggataggcaacaagcccggcgaagctgggctgagccggcacgctaggggaacaagagagcggaccttcccggcggcaacgcagtcgttagcgg

SEQ ID NO: 49124 - DNA, 609 bp, Oryza sativa
agcttcaaacactttccattctttacacccttacgttgctgctcaatcttgttccatgacatgagaaaatctttaggaagctgcatttgagatttccatttgcttactaatgccgtcttccttttttccacccaagttgtgacatgagaaatcgctaggaagcctcatttgagatttcgatttgctgactaatgcagtatagttttccacccaagttatgacatgacaaattgtcaagaagctgcatttgagaatttgattagctgactaatcagtttagtattaggcaacctggatgaaggtcatttatggtctgcatggatttccttctctttttttgtgtgcgtgtgtgttgggggggggggggtaatttatgcctataaccactttaaccaattaccattcatttttgaagacgaatattttaagcctcattgctctctgatttgaccatgggaatctatcgtatacttccgtgtacgacccattcattacgcttttcaaactcctccccggttttactgaccgttctcgcacctatacttgctggtaggggctccatatcctcttcttccctcttcgttattctctcctttcccacccttcacc

SEQ ID NO: 49125 - DNA, 479 bp, Oryza sativa
  unsure (1)..(479): unsure at all n locations
gcttcttgttgctngattgcttaaatgactatgggcatatacgtgacactaatctaacttgacgggtatgtcaaagtcaaataaggggggaaaatgaggttaaattcgctcaagtgcactataaacctgattttcctagatcagcaatgaaattgttgatatatgttaacgtgtgatcaattttattaccacaaaaggcaagagccaagaaatgccagcaccactttgccgagcagcaattgttgtagggcctcccaaagatggaatccagaaaaatccttctgtcagtaatcccttcagagaaatataagccacttagaacaaaatcctcttaatgaagcaaatattatgaagcacgatttgagttttacctcgtttgctacatttgaaagggcttggtagaggccaatccagacaggtattgtngccaaagttggaaaacattctggaagagaaaccattatatcaaaacactatat

SEQ ID NO: 49126 - DNA, 368 bp, Oryza sativa
agcttgcccacaagaacctaagggcgactgcttcattccactaaggctttgtctttgaggaccacctccaacatcctgactgttatgaagaaagaccaggaccataaataatccgaggcgcgggcctaaaacgtctcaaactaagccgacgcagaccgagatcacaccccgggcttcactactacttctagtgcaggttacctcaaaagcggcgagggaaatgacagatatcccactgtgcgacacgatctctagggggccagcactcttcttgcaattttgtcaagcatggaggagaacggaggttcgggcacaagcatcactccaacgatatgacttctggatgccggtcccgattgcctatacga

SEQ ID NO: 49127 - DNA, 366 bp, Oryza sativa
gacgcccgagtaatgtgtcgcacagaacatcacccacgctttttcacttattcactgcgacatgcagtatatcttgaatactctgagcgaggcacacaacacatgcttttacggatactggctgacctaccacctggccaacttcaccggcgaaactgtgattcactgctttgcctagtcaacatgcagaagacgaagggcgacaactaattcatcgaccggtcgaaaagaccgccggctcatacctactaaacctgctacgaaggtctcaacgcccctcgcagaatccatctatcacaaagagggatcagaacacttgatctccttgctctgacagttattcatgaacggcagatcttttataac

SEQ ID NO: 49128 - DNA, 347 bp, Oryza sativa
  unsure (1)..(347): unsure at all n locations
actaagctgcgggagtcggacagcgtttatgtagagctgtatgttatctgtctgcngcccgcgtgggaagcggcaccgcggacggtgatcatccttggcgagaggaggagggggacatttgcttctattggaggatcacgtggtggtatctcactagctttggccgaatggaattgacatggacactcttgctcttctttttaaagctgacatactatacttttataccttcaatatacacgcgagctcttcttgtgtggcatgatacctcttctaaccgacagatcatgaatcaaatgctgagatcccttcctttgagcagtgatatacctctgcttatatctgct

SEQ ID NO: 49129 - DNA, 622 bp, Oryza sativa
agcttttatttgtggaaatgatttttcttttgcttatacctttaaaaatgcatgtttggcagttcaggcaaatacagccagccgaggagatagcaatattatttggaaaatttgacacttagtagaatcttcctaattaaccagcatgatctgtcaaaaatccttgttacaaacaagtttggaaatcatgtgttccaatgagataatagtttctttgatttgcttggttatatgcttgcataattgatctcggaccgctcaaaaaaattacttgcttggtttaggccggctgcagcgaaatggcctgccaaatcagtttgtcatctttgttcaaagctaaaccacaatgatcagtaatcacgtataattaatccaattaagtttgagacagatccctgcttgttagcatattgagctcaaacgaattttgatcacttcacttttcgtaaaccttgatcaattaaggaacactatttgatgacgagcgtagttgcatggctccgtttcttggttccaaatgacaaatagaacacttgcaagtcccaggaaacctagaaaatttgggggaggccttttgatcgactttttttaaaattctgggcagtatgggttttccaaaagc

SEQ ID NO: 49130 - DNA, 467 bp, Oryza sativa
  unsure (1)..(467): unsure at all n locations
acactatgaaactcagcttgcagggggactgttttatgggtgatgatacaccatgcgaagttgcagacattggaacagttcagatcaagatgtttgatggctgtatcaaaacattgtcagatgtgtggcatattccaaatttgaagagaagtctcatctctttatgtactcttgatcgcaaagggtacaaatattccggtggagacagatatttgaaggtaactaaaagctctcttgttgagatgaaagctgatattaaatctgccaacctgtaccatctgtgaggtacaactatattaggtaatgttgctgcagtttttgattcattatctaattccgatgctactaatctttggcatatgcgtcttgngcatatgagtgaaattggtttggcagaattgagcaagcgaggattgctatatggacaaagcatcnggaagctcanattttgtgagcattgcatattt

SEQ ID NO: 49131 - DNA, 621 bp, Oryza sativa
atgacctgcagcatgccaactttgtacaggatttactacatgctctcgaacaactggattttgtttgacttttgccaccaagcgggtaagctaagtaattaagcgatacctttcttccaaaatatggcgactcccaaaaagagaactaccgggacctttagctgacaaaaatgcaaattgactgctgggaatagagaccatgtatgggatgcacaaagggccgcttgcttcttctacggtttgaaactactggaaatccttctggatccttctcactcttaaggaccacggtggccttctgctgtttggcaagctctttgcgacctgacggactcttggttatggtggtgctgctctgtgcattaccaaaattcgctggtccacttggttttctggccgattcagctccagtggaacctaagctatcatgtactgacttgacgatgaaactgaacaaaatctgccttgccagctctgttttgcatgaatttctcaaggcatctttcgctctgttttcctttcctttgcatgggctggggctctcaacctgaattgcctgttctggtgcaaggataccaaccccttaattcatctgaaggctggggggccaacagttgatct

SEQ ID NO: 49132 - DNA, 318 bp, Oryza sativa
atccactaattaatataatgccacatcatcatccactaacgatcatcacatttaaacatcatgcaaacatgctatacttttatagctcttataaattaagaaatattcacataccaacatgttaaattatcatccaacataattcacataatgtctaatgtataactctattatgatttatgatatcatatatacttatatactctctccgttccacaatgatagccattttagcatttcccacattcatatgtgatgataccactcaacgactcactaaatatagactcatctccaatctatccatcactcaaccct

SEQ ID NO: 49133 - DNA, 534 bp, Oryza sativa
  unsure (1)..(534): unsure at all n locations
agctttggaggagaggtcttacgtggagtcctggctataccccattgagctcttgttttatggagccgnaggcccgctagtccgctgctgtttatttttgattgtcaggccttaagtgcctttgtaataatgtaaatattatcgatataataaagatgtgtcttttatatcatgtttgtatggcgtaccccggcttttcctgggacggggattaatacactaacgttcgggaaaaggcaattttcccggtcgcgacaagctggtatcagaaccatctcgactgtaggaaaagccaagtggataaaacctaaggacatattttataaataaaaattatttgcgaaagttcctcttttctccttcccccaatgctttttgcaaaaggtttactccgttcttccttcttcggattttcaactagtactagatggtcaggtcagcgaagaagaggacatcgtcagttgtttgccgaaattccagaagactgcaagaactgcgagtgaagtggaggaaacagtgaaaccggctgggaag

SEQ ID NO: 49134 - DNA, 335 bp, Oryza sativa
agcttgaccatcccacagaaagctgcgacggatcttggcaaaccccttgacttcctttttttgggcatggacggccatgagtacgcaaaccggattagagctcactacagtgatcaccatggtagcccggccaaaaggccgcatgaagtgggacgtgcaaaaaggcaaacggcgcgcgataaaaccaaccaagggctgctagaattacctcaacaagaggacgatggacacaggcgggcctaaagatggccatggaaggaaacgacgtgacaaggcactgcatcaaggagagttgggaaatccgggtcattgcactggaatggaagcggggaaca

SEQ ID NO: 49135 - DNA, 416 bp, Oryza sativa
  unsure (1)..(416): unsure at all n locations
aacatactactcagttcatgtctaaataagtgtacttctagtaagaatagatgttgctatcatttttacaataattggctgttagtcccataaccaatattgtggaagaaacaaaagaaactctgtatattagacagaaaggaaatcctatcttcatacctaaatacgaagggcattaatgaatcgcaacgacgacaagaccttgaattgacagaacgagacaacatttctcagggtgggtccttaacttataggactgctgattattgaagacagagcatntcattggccactacaaatcactgcatttgcacaatgctaatcgctactaggaacctactactacagagcaagtcattagctgtggagctattgagctaagcatgtcatgtaccagtgcacacaccagtaaacaa

SEQ ID NO: 49136 - DNA, 510 bp, Oryza sativa
agcttgaggaacaaagggtagcagattctgatgcaactacacaagcgatggattttatataccccgaaccaacctaggcaactccgacagaaaaggctccagcgtaaggagatccactaaaggcgatccttaatagcaactacatgaaactagcgacagacatatacaaactatacggattccataactatgcgtcgaagattcttcgttaccctctgaataagagcacatataagccaacaccatctactgagaattgctctctcaaacctgggataagcatgatcgcgagagacacccaactgcttatacttagtaagaaaactgacctgggatactaaggctaaaattataacacctgacacatgccgactgcagtaaagcgaaacattgatcgaaagaatgtcctaaaaaatctgtgaacacttttatggttaaaaaaaaacaatgctatagtgggattaagcatacaacattgttgtccatactagcattctaaccattgggaac

SEQ ID NO: 49137 - DNA, 378 bp, Oryza sativa
  unsure (1)..(378): unsure at all n locations
atctgtaccaacatggcccccctgcacgctcgttccgggtctcgatctttcgagatcggctatgcctctcactctacctgctccgattctgctgccgagaaaaatatggctacggaaacggccgaggctgttttcgatcgtatgcgaacgatgttcatccctaactacgaacacgttgcattcctgcacttttgcagaggcataaagagaaaccatgagaaaactaaacccacgcatccgatactatgaattctccaattccatagccacacctacagttgttattttagcaaatgattttgcctctcaaatcttaatgccaaatgaggcatagcacanagcagtctttattaacatctctgaagagtatgcaaaaat

SEQ ID NO: 49138 - DNA, 498 bp, Oryza sativa
  unsure (1)..(498): unsure at all n locations
agcttggaggaggcanaacaatgacaaagataaaatggttagcttaatgacttactatgaatgggtagnaaggcaagccaccctggctttagaatgtgataatatgattatcgaaggttgcaatattgacataaatattaactatttttgttgaattttgtgaatggctaatgttttcgagcttcgatgcatagtgtagtctttcctagatcattttcctcttttcaaaaagctctgggtatgtcatgttgaaagagagcatcgaccattaaggcgcagactagcagccaacccttcaaggagatgtcccttcgtgtacttttttttaattcaacgcaaatagttataaattattttgaaaaacattgacaatataaagtgcagcgatatctatcactccaccgaaaatcgtgttcaattttgacctatatattgagagaaaaaaagataaattccgggataatagtatcactactattcatatgccaaaattatcat

SEQ ID NO: 49139 - DNA, 336 bp, Oryza sativa
tgactgatgaccgtgttacttctttacctacacccgcccacccgcgcggcacgccaagtcgcggatcgatcgctcgccggcggccaccctgcctccctgcctgccggagtccaccgatccgcacgatgaaccgcgtgttttgaccgagaaacacacgcacggtctgagatgtgatcatcacgggtgtgcgcgtgtgtggccacttcagctgacgcgttcgccttccacgcatggagcgcggatggcgctgccatgctacgcactggcgtcagcggtcttactgcctgctcagacggagcacatcatgtgacaaccgtatgtgaggtgggtgccagt

SEQ ID NO: 49140 - DNA, 594 bp, Oryza sativa
agcttatcaagactactttcaaacaaatctagcctcacatcagcatctatttttaaaggccatattcgccgattcactacagacaccatgctctgtccatggagtagtgccacctcatttgggcccaatgtgccatgtatccaatagagaccgcctgggacgcgtctaggcctaaaggatgacccgaacccgaccctccacctatatatctgccgtagccaccatagaacaatgtgagtattggacaaatctacttcactgtacattaattgccgaataaacccgggaaccaactagaccaccattccgcctgttatggaaccccacctatgaaacgtttggacgaatcaaacctacaaataaatctgcaaattggcctactagctcatcttgcccttgcaacaacctcaatgctggcaggaccatataccctccgggtatggctaaccgtccatcccgccaacaatcaccaccgcctctagagttatgccaccaatgaataacccgccacatttctggatagtccgaacaacatctccaaccgcgcgtacaagaatcaacctaatactctcatccgaaagaaccgggacaccc

SEQ ID NO: 49141 - DNA, 474 bp, Oryza sativa
  unsure (1)..(474): unsure at all n locations
actcaagcttngatggctccgactcggtgagttcttggagcttctgctccttgttatggtaaatcacttgctgatggtagtagatttctattttttgttcaattgatggatgattgcaaagttaacgtctcattgatctgtacgatggctgcattattttggtctttcacttgaatatcctgttatttgntattacaatgcaatgaagtgatataatggtactagccacgagattggttgtactgtaattattggtgtttcctgtagctgtatacgatataagagtaacattggcaatgataaattcttgctatatgtattttgtacccctatcagcagcatataattagttcaataatctgcaaataatcttagtgtattattttccttatgcgggtataacacatcaccaattatttcatattgcaggccatgaggaggaagaatcacacatgaactgatcatggcgggttt

SEQ ID NO: 49142 - DNA, 600 bp, Oryza sativa
agcttttccagtaacttataattgccactattatgtttgaaaatggcgaaactcttcttcttcttcttcttagggtgcttggtcgaaccatagctggcattccttgtgctttgcttgtatttttcaaacaaatcttgtgttaccgagaaggatcgccaaagggttgtattatcatgtcctccattgcgatattctctaagcttccgaaggtgttcagccacaatgttcatctttggacgtttcttcatgtccattgctaggcactttgttgctaattttcctatttgattgataatcttcatgttactgacggatgctatatttgcatcaaaaagatccttcatccgttttccttctgaatcatgttcggtgaaacttgtaatgaggctaacttttccttcctcttttatcctctttctagtaattaattctagtaaaactgctccaaaactataaacatcgttcttcgacgattgtgtcccgtctctaaatagtataggatccatgtaatctatgctcccttttacaattttagtgtgccgagttttaccttcggaaaaaaacccttgatattccaaaattcgaatttttgcacccaaa

SEQ ID NO: 49143 - DNA, 413 bp, Oryza sativa
tcgcgttcttgccttaccaggaacccgggttggctcctaatattggcatgtgtgggttccctgaaccgactagttacttagccagggtgtcccattccaccttgtggttgcactttgattatgctcgatgagtttcccacaggaatcggtccttatatgcgaatatgagacaacgccacgtaggcacggcacccgcatcgcgagttttcacaaactattttattttcaaacacgccgacaccacgtgtcgggttttcaaggcttgtcaaacccatttcccaagttttcgacaatcaacggtgtatgtgtgatatttggtatacgcgctcagagagcacggataccgaagtaccacaagggtggagcgacaaggaattagggtagtacaacctataggaattagtgtgactact

SEQ ID NO: 49144 - DNA, 643 bp, Oryza sativa
agcttctccatgcgtttctcatttatatgacccaagcgacaatgccaattatttagtgggattcaaatcattgggacgttgccttttcgcattaatgttatagactgaacatctatcaagattcacaatgtataagctattcatcatgggtgcatagaaatagaaaatgtcattataatagactgaataaccattgtccacagatctaaaccataaccctatgcttgcaaacaggaagcagagataacgttcttacacaaagctggaatgcaataacaattatttaactccaaaactaatcttgacggtaaagataatggcatagtgccgaccgcaacagtagcaactcttgctccattgcccacgcgaatgtccacttcgcttcttgctaagcttctacttcttttcagcccctgcaacgatttgcatatgtgagcaactgacccggtatcaaatacccaagaatcagtagaggaagtagcaagattaatttctataacattaatacctgaggtggaacattctttcaatgacctgtctccttgccaaagaaacactttgcatccttagcgggccctgtcttttgaaacttggttttagaattgctaagactcgagatctcatcaaaatttagctttctttt

SEQ ID NO: 49145 - DNA, 644 bp, Oryza sativa
agcttgctgggggggcgcatcctctctatcgcgtgtattttcttgggattagcttctatgcctcgggaggagactagaaaaccaaggagtttgcccgccggcacaccgaacacacttgtcggcgttcagtttcacgcgtgtggatctaagactgtcgaaagtctcggccaaatcctgcaacaacgtgtcctagtggcgcgtctttaccaccaggtcatcgacatacgcctctatattgcgccctatctgattactcaaagtaatacgagtcatacgctgaaaactagggcctgcattctttaacccaaaaggcatagttgtataacaaaaggtgcccacaggagtaataaaggcagtttttcctcatcttccctagccatgcagatctggtgatacccagagtaggcatctagaaaacacaaaaggtcgcaccccacagtggagtcgactatctgatctatgcgtggtaaagggcagggatctttagggcatgccttgttgagatccgtatagtcgatgcacatccggagcttgtcggtggccttcgggacgaccaccgggttcgccaaccactctggatggataacctcgcggatgaagtcaacctccacgacccgcgccactttcttttggaatgaagggct

SEQ ID NO: 49146 - DNA, 471 bp, Oryza sativa
  unsure (1)..(471): unsure at all n locations
tattacggaccttagaaactcagcttaggaagganggctccgacgcgtcgcggatgctggaccatgagatgtccacgaggctgctccacctcgcctgcaagcacgacgccgtgcaatgcgccaggctcctcctcgagggcggtcacggtatcaccgcgtcacccgtggatgccagggaccagctcacgcggacgccgcttcaagtggccgccgaggcgcactctgccaagtgcatcgagctgctgctctccaagaacgcgcgcaccgacctcaagctggtcgatggccggcctcttctcgcgctcgagatcgctctcttgagcagaaggtatgcacgctagctagtgtcgtccattgcttgtgatggtgatcactgagctcacttctcaaattctctccctgcaatnggctgttccctgtacttgactgatgttcttatccagagctcaagttaaatggtcactggacaac

SEQ ID NO: 49147 - DNA, 666 bp, Oryza sativa
agcttggaagtgtgtgtgtgaagtgagggagtgatgtctttatatatttgtatgtatgacggttagagaaggggaaatgtccaaagtgccccgcaaccgccatcagggaatgatctggagcgtccacgccaaaccccagtatcaacggtgatcaggggggttcggccgaacctgggctgggcccatctggcctggcctttggcccatgtcctcccctagccctcctctatccattcttcggtattttgggctgattctctggtgtttcgatgaagttcacaacccatccttgtatggatacataattctcctcgctttagtctagatttcctcccaacctcggggtttattacctgcatacaaatagagatgagctcatcccactatacaattaaaatatgccttattaaaatagttttaaaatgatatttaagttataaaaaatcatttataattaacttatacccgatttaaaattgctattacatttgatttatcacatataattaacaaatacctcatttacatagtttaaaattcctattaacttttaaaaatcatataattaacaaatgccttatttacatagtttaaaattgctattaatttttaaaaatcataatattaaaaaatgtcttttttaaaaagtgtaaaaatgctattaaa

SEQ ID NO: 49148 - DNA, 471 bp, Oryza sativa
  unsure (1)..(471): unsure at all n locations
nttgtcccaagctccaccaaaatcaagagcgcaagctctctacatattctccaaaatatgattgacacgctcggtctgaccatcagtttgcgggtgataggccgtgctgaaatttaaccgggtccccaattcttcctgcagcttctgccagaactttgaggtgaactgactacctcggtcggatactatcttcttgggtaccccatgcaaacacatgatccttgcaaggtacaattctgccaatctctttcccgtataggtggtatgtactggtataaagtgagccaccttggtgagtcgatccacgactacccaaattgaatcatgtcccgatgatgtccggggcagtcccgttataaagtccattccaatctccttccatttccattccgggatttgaagaggttggagtaaacctgctggtctttggtgctctgctttcactcnctggcaaacatcgcagagtgcgac

SEQ ID NO: 49149 - DNA, 415 bp, Oryza sativa
agctttacacatcatccgtacagcttgcatgaaagggcggaattggcatgcgttcggacactggcccaagaggcgccctatgaccacgcataccgaaaactaccaccgtgacgctacatggtactgatgcctacagaaaataagcgccattgcaaacacggtgcaggtcacgccctcactgtgaagtgagcatgcgactacgttgagaaccagatgtaggccggcagaatgaaatgcggttgtccagacatgaaaaaggcgggcatgcaaaacacgcacggacaaaggaagatcatgactgtgttaacaaagccggacttcgaaggtacactatgagcacgcttactgatggtctgagtagataggatatgggcataactttatgaattgatagaatagatcctaacgccaaatt

SEQ ID NO: 49150 - DNA, 661 bp, Oryza sativa
agcttcaatcgaaatcaaacacaagtactattcaaattaccaaaatattggtttggcatgtttttggtagcaatccaaataggcccttagtcttacgcatacaaaaaatcaccaccataattaaacattgtaatgataagatagataagaagtgccatcgatacacggtacaaatttgtcgatcccgacgaatcaagcatgcggtaacctatcggcatcttctaggtcggtcagaatgcattgcattctcgtggtccttcaatcgttgatactctacttgtgtttctgactctgttatcttctggccatgatatgatagagtgacattgtcgatccatcgagtaaatccacccatccttggattgccctgtaaaaatagtaatgttattcagtttgggtagtaattttgtgcaaatcatagcggattttgtaaatggttagacatacaacgaaatcgttgtctacattggggcagacaaaatatctccttcgaaatgtttgttcaacaaaagatgtagccacctgccagcgatctctgcacccaaactttggacgcttggaccaattaaggaaccctaatgggatggtcctccagtctaaacttgcaattttcaccccaacgtacttcattcaaacatgaatgaaatggttggccggttaa

SEQ ID NO: 49151 - DNA, 555 bp, Oryza sativa
agcttcctcaccgccgtcgcgacggctcggcctataaaaagctccccatttcttctattgttcaccacctacggaacataaaaaaaggctggggtagagatgggacgggcagggaaggaagcagatggatagggttgggggtaggaggggaggggatagattcggttggttttcggaaaagcccttgtgtttttcatatttacaacactacccctaagagcagaatgttctcttcttcgtgtcacatttctgtaaaaattaagggtgttttctataaaacggaacatgatgttagtcggtgggaggacgtgcgcgctattccgtccaaacacgaggactttttttttgcataaacaccaccaccccggcatttactacgagaaaggttgtgcgtggcgtacatacaggacgaaaacggcccaaccggtggaggaaacaacgcaaaaaaaaatcatgccaccccactggagaccttctgccccggcaaacatgtggggacaacctcgaaggagcccaaaaaaattccaaaaaaaggaaaaaaaacatagctaaggg

SEQ ID NO: 49152 - DNA, 66 bp, Oryza sativa
  unsure (1)..(66): unsure at all n locations
aaaaccaccnctcattttgacacagcgggctatttttttccgaaacaaagcagcgggttttcccat

SEQ ID NO: 49153 - DNA, 270 bp, Oryza sativa
cacgcaagctttgctccgaaaatactacttccacaaggggtaggagactaacaccctagtgtgttattaacggcgggacccggacaggacggccctgaaaccacgaacaggtgaatcctcatagggtcaaaatatgggcctaaaaaactacagcgtcggtgaggaggagggtccggccctaactgactaggacagctacagggagaacgggggaccaggaagggaacaaaaccatgctagggacacctgccgtagcttgctaacaccaga

SEQ ID NO: 49154 - DNA, 458 bp, Oryza sativa
ggaccagctcatcgacctgctccgatggcacatcgccgatcttgctgaggacagcgtgcacgacatcgagctcccgtgagagacttgatcttctccctcacgcccgtttgcaggccgtactctttctcgagcagctgaagcagcttgggcagcaggctcctcatcgcccccgtcgtcagctccatgcttgcaaactgggggtcgggaacaagcctgtcgtaaacagcaaggaaggcccgcccgccccagatccgccgcctactcttggcctgaagcaggagggacgcgcagctctgctgtccctgccgctcgccggccagattcaaccccttgaaagaggtggttgacttttgtgagaccggaatggaagtcacttcggatggctaacgcaaagcagtaagggagtgagcgagtactgactagtgactactgactactgagtactacttctgtccaat

SEQ ID NO: 49155 - DNA, 75 bp, Oryza sativa
  unsure (1)..(75): unsure at all n locations
cccacgngaacacgagagcgggccggggaagagaagggacgggcacggaacgaagcacatgcggaaggggtgggg

SEQ ID NO: 49156 - DNA, 510 bp, Oryza sativa
agctttctccatctcctctaattggtattggattcgatcagctcgaacctattacagtggaacagtgcacagtgttattcaagagagataggtgacaacacctaagtacctaacaaagttagaacatacctgaagcaaaccatcaacacttccaccttgtaccattttaactaatgcatcatgcagttcaactttcctctcctgaacaaaaaccaaccaactttgattcaacacagagagacaagagataagaagattgcagcaaaaaattcaagtggtaattttatgcggtgcagcgcagagcaacctgaacatcacggaaggcatgttcttcaactgccagtttggaagctaactctgccacttgcttgtatttctcttcatacttcttagctaatgattccacctgaattaaaataaaaatcggccatcagtgtgttacaaattaatgatttctaacacctgcatgcttccaaatatttaaaagccagatcaaaccggccccaaagg

SEQ ID NO: 49157 - DNA, 601 bp, Oryza sativa
agcttgctatcaacatggccatatgaaatatcaactaaaaatccagtctttttatcttgtgagcttcaaatgtgcatcgcaactcgcaaaccacctttaaataaaaaattgccacgttaaagacaagattagataagacagattaacagatccaaattgtgttgtcagattcagaataagattagcacctttattgtgtttgtagaagcgaaacttctatctcttgcaaagtctttccctttgtttcaaccacatggcgccgcacaaatattgctgctaccacacaagctgaggaaaacattgtgtacagaacttgtggaccaagttgctccagaagccgcaagaacaacaaactgacaaaaaaatttaccacctgcagcatttaagcatagcatgtcaagacgtcgatacgaatcatggtagaactacaatgaaccatggcaagtaaatagtgcgccctaccaaattattgttgcaaccctacacttatcatttaccattacataatcaaccatatcgaaatgtctaagttttttattatcctaattaaaaatctggccccattattcatttattattaacagcctaccagaccttttat

SEQ ID NO: 49158 - DNA, 465 bp, Oryza sativa
taccaatcatcatttgagccagtaggggttgcatatatatcattagaaagcttccacttttccaccaacttacgattagaaggcttttgcatgcgctctccactgagatgtcggttatgcacaactatcaaagggagctttcttgattgaaatctttgccgtataacatcagcaacaatattaatctgtccagttaaaaaaagatagaggcctagtattttagatatatgttatacaagaagaagaaaatatttatcacaatatacatgccttactcaaggaaatatgcttatggctaaaaaggccaacgttggcaccatccacaactgcatcaaaagggccatgcttttccaaccatttctgaatatagaagaatacagcgaagaagtcaagctaaatggttaattaagagaaaggatatggactacacacaccactggaaagctctattgatcatgattcaca

SEQ ID NO: 49159 - DNA, 337 bp, Oryza sativa
tatggatcactcttctccaggaccaaatagctcatgccaataaagataatgtctcaaccgaagggaggcacccgatcccctaggattccgataccggccacacctgccaaatcaacgactggcccgggcccttcctgttgagcccactaaccaaccgtcatcgcaatgttctcaacaacctctccaaatttccgcaaatgccggagattcagcattactcccaggttctgtaacactgtgatgattccactaacggtatctcctgtgcttaatctggaaaccgcacagggccttccactggcgaccgacattgggtaattcaatgtgttaccttgtg

SEQ ID NO: 49160 - DNA, 472 bp, Oryza sativa
  unsure (1)..(472): unsure at all n locations
tgcgtcagtgtaaccatntacaacgagctcttcctgttcttcgttactangaacatatccttagttcttctcaagtacttcaggatattatttacagctatccagtgactctcacctggatctgattggtatcggcttgttgcattaagtgcatatgaaacatctagacgtgtatatagcatagcatacataatggatcagaatgccgaggcatatggaatcacactcattttgtttcgctcatcagtcgtttgaggacactgattcttgccaagattaatggcatgtgacatcggtaagaaacctttcttagaatcttgcatgttgaacctcttcaacaccttgtcaatgtatgtactctggcttaatccaattagcctctttgatctatctctatagatccttatgcccagaatatatgctgcttccnctaagtccttcattgaagaactatttttcaacgatgtcttat

SEQ ID NO: 49161 - DNA, 577 bp, Oryza sativa
agcttttttaagaacggagctatcattgcattgacgatcgaatgattgatctaacttcatatgaaagccaagaaacataatactggaatagcctgcttaaaaagatcagccatcctacatatcagacgcgttttggacgatcccatgtactacatcaagtaactagtttttgatgcattatgtcatttttcggtttagtgcgagatcattgtcattcttggatggatatactccgctagtaccattcatagcatccggggcaggcaacagttggctagctatcaacgaaacttctgcacggacccaacacatatcttcctcggcttgcttctatctgaaagaagctgtgtcgtaagagtaggctgtgcttcttgcgctgccgcacgcacgtggaagtggaacacgggagctggtgatacgagttgattcaaggctttcctttgcggctctcttagattgattcgatcaggtacgcgccgtacgtagggttctgaacagactgaaaaccctgatactggacctgaattattgggaccttttcttttgaaagaacctccctcgatccgcctcttaaaaa

SEQ ID NO: 49162 - DNA, 422 bp, Oryza sativa
  unsure (1)..(422): unsure at all n locations
ataaaatcaaacgttgtggttgactgattagaattcatacatgcatgctcttcaacaataaacggacacatatacacacacaaaccttaaacgtgacacggtagataatttgttatagatgtataattactagctcatgtgggtgcacagattctgactagttcatttaatcggttaccaagaaataaaataagtgttcctaatattgcaggacacatattgccaaatctgaaggatgcatccataaaccattaggattgacaaatcaatgctgcattccaagagtccaacatcattntggtcgtctggtatcctaattcattatatcagtgtggaacagtgtcacaagtcgaacaagcgaactcacggaagagagaagagggggttcactctgctagcaaatacaagatgaaatgtgctaa

SEQ ID NO: 49163 - DNA, 565 bp, Oryza sativa
agcttttacatctatcatttaaaagtcaaggctagaaaaaatagactataattttttttctttgaaatcaacttaaaattaagttttggaattcaaattataaaccttttgtattacagttttgcattgcatatataaatctagcttggatatgatatgggtggtaaatttgttgagaaaattaaactttggaaccgaactgcatcaagtaagatgaatctaaaaatcatttggcttaccaggtgaatagtcaaaattaataccctgttaagcccaaattaataatgggaagtgctagatcacatgatctcgtgctagaccatccgaatggtacttggcacttggtgctgaaccggtactggatcttaccactgtccgtatcaggtctggtacctcattagtattagatctggtatttattgcaaacagactaatacctatctggaaaaggctgaaactgctcaatactaatcccacaatacctaggcaccagcctgaaatataactagaagcaagttcaattttacagacgactctcatccttcccattattatattgtaacct

SEQ ID NO: 49164 - DNA, 384 bp, Oryza sativa
  unsure (1)..(384): unsure at all n locations
tttgataatctgacatgaactgaaatctgaaggtccatatctgaagattttacgtctggtatctgaagattntgcttcttgattagttaattacagcatcttcatggcatgtatgacttcagtaggtgtttcatctgatttctgatcacttaagctactactggttactggtaagcagtataaagtgaacaaaatgctcaaaaataatttatgaataaaattttagagtaaattttattttttatcaccttctattaccaaaggtttgctttggtcactctttactaaacactttcactttgactagttaatttaccattattgcactttggaccacccgactctcttcttaagctagtgagaattgtctgcagtactgcgaat

SEQ ID NO: 49165 - DNA, 429 bp, Oryza sativa
  unsure (1)..(429): unsure at all n locations
agcttcaggatctgctactaaaatttaatgttggtgtgcttaggagctggttgtattttttgtaagtaantggtacggaaagcagaggcctctctgctgatacacttgcttcattaccttcaataacttatcgagcacaagataagcaagacggcaacatggaacagtatgttaatatctccccccttttttagaagtaaccggcactgtactgataaatgaaactaatttgcagatgtgttattcgccgggtggaatttgaggaaggtgaatcattggttgcacttccttgcaagcattcataccattctgaatgcataaaccaatggctgcaattaaataaggtatataattaacagcatctccagacttcatatccaccaaccccttgatgaatgaaagcaacggcttatgaaccctacatcccta

SEQ ID NO: 49166 - DNA, 394 bp, Oryza sativa
agtgcatatgcttcatatcatatgatctcatgcgtaccctttccctcggctaatccttgtgaattatacacgcgcttgattcattaattcatatgtgtcggggactactaatcaccattcaccaagcaagcatatttatatgctaacaagattttttttagagacgtacccaacatccacaaagctagctagctagatcctcctcttctctgcactctgctagagcaagctcgatcgatcgatcagtgatatttccccttatccaaatccagcacaaaccaacaatatccatggaggccgtagcagtgcacgccagcttctcgtcctactcccctccggtggtcgccggcggccgcgacgacgccggcagcagcagcaacagcaggagcatgtt

SEQ ID NO: 49167 - DNA, 664 bp, Oryza sativa
agcttttaatagcagaacacccctcatcgaactcattcagttcggtgaacagctggggtgctggcatggaagacaagattgctgactccctccacaaagggaataaggtctgcccgggtctcgaaatcgccatgggcgaaatgaggcgccacaagggaatactccgaagcagatgtttcgacggccgcacccttccccttcgccttgactagcggcgaaacaaccggctgacgcagagggctaccgaagaccctcgccccagctgtcaggacccgttccgcggaggctgaagccccggcggcggcgctacctcctgctccatcagcaccaagtaaaagaacgggggcagtcgaaaggtccaggctgcggccagcgggtgaagtcagagtctcctcagaagactcgtcgtcgctgaagacgcgagcgacatcgaccagtcctttcttcttggatatctttttgaccggacctccctttcgccgccttgcctggcgaaaacgcaattagcgccttcgccccatccaacttcctttcacgaaggggggagctggttgaatccaccccgggctcattgtgaaccgggccatggaagggaccaccatcgccaatttccggttatcaaggccacccttatctttttggcgttcccatttctccacccaat

SEQ ID NO: 49168 - DNA, 467 bp, Oryza sativa
  unsure (1)..(467): unsure at all n locations
agcttggcgatgctctggctcaccaacttctccggcacaacacttgttatatgntcctggcgagcgacacctcagccaaggcatggaacgcgccgaggttgccgagaaaaacctgcaacgtgccgttgatgttggcattgctggcattgaacacccttagctccgtgagagagaggagatccgaccacagaccccactcctcgagtcttgggttgtcgctgatggagaagtagtgcaactcaggcatgccgcggaagaaggaatgcggcaaaccgctgaaggcgttgccgtcgaggcgcagagttagcagccggtcgaggaagagcgtgggtaccgggccggtgaggttgttgtcgccgaggtcgatcatccggaggtgggagagggagcccgcctgccggtcaagctccgagagagtgccgtcggcactgagtatgtctcacacgtcgatctgagtgatcctgttg

SEQ ID NO: 49169 - DNA, 551 bp, Oryza sativa
agcttatcggccatgtctccctcttcgccggccaccagccggtcatgccgctttacgcctcttgcgccggcaagaggcagcgatcgtcctcggcgtccgtcgccgggaacattgacgacaccaccggcattggcatgggcgccgcctgacgaccttactaactaactgtgattgtattgttgccatcacctgctgcatatatatgtccatgaaagattcaatccagtactgcatggctagttaaattagcatgacaatgctaattggaacacacatgttaatttggaaatcgatcagggcagcaatttcaggcagtttatcagttagttctatacattagcttatgagatgtgtgatgaatatatactgtattagctaactagctaggggctttagctttacaatataatactaaggtttattacaaactgtcttggtaataatgaatgcatgatatactactccaataatcaggagggttatgcatggtaaataatggaaaactcctggttgtcttgtcttgcaattaacttctagggtccatgccaaga

SEQ ID NO: 49170 - DNA, 457 bp, Oryza sativa
agttgggcctttatttggtggaggcccattgattctctacgtgggctgggccgaacacagtccaggtagttggtccacattccaggttgaacgattccagcggcggcagcgagtggtggctctcaatcatctcccactcccaccgttgtttcttctcaacacgcgccactcctcacattcatatccaacagcacgtctatatctatctatcatcaagctgatcatccatacttgttgatcgaccaccggagaagaaggatctatctatagcagcaagcaagcagagaagaatatcatcagaaatcggagattaatcgatcgggcggagatcagagagatatattagattgttttgtttgatcgatcgatcgatcgggatggctgctgcttcatctgctgacatggagaggatcttcaagcgggtcgacaccaacggggactgcaagatatcgctgtc

SEQ ID NO: 49171 - DNA, 237 bp, Oryza sativa
  unsure (1)..(237): unsure at all n locations
gacctgaggcacccaacccccaagaaccgataccaaaacccaacgaaggagcacacaagcaacccntttttttgtgttttagcanccggcaccgaaaggagaggccatcatggcgaaacacgggccacatcacccccaaaaacgtaacgagcacaagaaaacccagacggcaacaaggaacaggagcgccagaacccccccccaccggaagaaggaacccgccccgcaccgaaaaac

SEQ ID NO: 49172 - DNA, 679 bp, Oryza sativa
agctttgttgagcctaaaacccaaagaagctattaaaaactttcagttcttgtatactaagtagaaaaaaccaaacaaggcaatgataaaccgagcaagcaaattgaattgataaaaaatcacactccattattatgatgatagcccccgactgacaacttcaagaaaaaaacttgatgttgacagtcaagatagggaagtacaatgataagcctaagcgtagaaacgacgaagatgttcaatgttccaagagttgtcgacgagagtaccggcttcgcgcttgagtcgataggaacctggtcgggtgacttcagagataataaatggcccttcccatagaggagataacttgtgccgatctcgtgtagtttgaattttcctcaaaaccaggtcgccgactaaaaaggcacggggatcaacatttgcgattatgatatcggcgcaacccttggaagtattgacccgactgaattaaaagtggttcgcggacttttttcaatcggtgcaaataatacaattgggtctttttaataacgttttttacgggaaattccaaaagccgtaaaaattgaaatcaaactcaccttggaaaaattggttcttcccccctagcaagggaaaaaaggtacttggcttgtggcccgaacgggggggattttccaaaaaacaaaattctgga

SEQ ID NO: 49173 - DNA, 580 bp, Oryza sativa
agcttgctatcaacatggccatatgaaatatcaactaaaaatccaggctttttatcttgtgagagtcaaaagtgcatcgcaactcgcaaaccacctttaaataaaaaattgccacgttaaagacaagattagatcagacagattaacagatccaaattgtgttgtcagattcagaataagattagcacctttattgtgtttgtagaagcgaaacttctatctcttgcaaagtctttccctttgtttcaaccacatggcgccgcacaaatattgctgctaccacacaagctgaggaaaacattgtgtacagaacttggggaccaagttgctccagaagccgcaagaacaacaaactgacaaaaaaaattaccacctgcaacatttaagcatagcatgtcaagaccgtcatacgaatcatggtagaactacaatgaaccatggcaaggtaataatgcgccctaccaaattaatgttgcaaccctacacttaatatttacccctacataatccaccctatccgaaaggcctaaggtttttaattatcttaattaaaaaaccgggccccatttttcatttatta

SEQ ID NO: 49174 - DNA, 419 bp, Oryza sativa
  unsure (1)..(419): unsure at all n locations
aaagcttccactttttcaccaacttacgaggagaaggcttntgcatgcgctctccactgagatgtcngttatgcacaactatcaaagggagctttcttgattgaaatctttgccgtataacatcagcaacaatattaatctgtccagttaaaaaaagatagaggcctagtattttagatatatgttatacaagaagaagaaaatatttatcacaatatacatgccttactcaaggaaatatgcttatggctaaaaaggccaacgttggcaccatccacaactgcatcaaaagggccatgcttttccaaccatttctgaatatagaaaaatacacgcgaaaagtcaagctaaatggttaattaagagaaaggatatggactacacacaccactggaaagctctattgatcatgattcaca

SEQ ID NO: 49175 - DNA, 333 bp, Oryza sativa
agctttatggattgcacataggcgtggatccgcgagaaataacagccctgtctgctttttcgagggacgcaccactggggagaaccacctagttgccaacagctatctattgaccatccctagatagccgctggccgccaccaacgtacgcactccaccgatgggagagaagggcgatctacaggactcgcaacctaacaaaaactcccgagcgtgagcagtaatgccacgaattcgtatcacagaggaggctcaaactgacctctttaggctcaaaatgccgggacttcacaatctataggtgcgaggctgctcttgaagatatcaaggcat

SEQ ID NO: 49176 - DNA, 443 bp, Oryza sativa
aactaaccttacctcttgctccttactaccagcattctatacttttattcatcttttcaatgttgagcttagttgactcatgcattttcaaaataaattcagcgtgtgccttaacatcattatgaaccctctcactagtaggtaaaggcaaaatatcaattggagcacgagggttgaaaccatacactacctgaataggacttaccttggtagtagaatgtgttgcccgattgtatgcaaactccacatgagacaaacattcttcccacatctttaattgtttcttcaaaatagccctcaacatggtacccaaagtgatgagggatgttagatcccaatcttccgataggtattgataaacagacgatttgggcggaatcgcgacacaactctatcctgcttctaaacgaacaagctattgagccccgcaatcacagcaccac

SEQ ID NO: 49177 - DNA, 666 bp, Oryza sativa
gagcttctcttttctgatctttctgatccacaaacgcatgggcatgggaagaaaatggcaaaaccatacgcggcgatctgtcactcataatatgatgcctgcatatacacctcttcttctctgcttcctgaatttttatgtacatgccatgccaatgtagaacaattgccatatattaaaagaaatgggcaatggtctattggcaccatgattggttactctttggcaaaggcaccaatgattacacctttctatttttttgcacaacatattgtcctccattgcattttccagtttaacttctctcctatgatggaacaactacacgattccagtatcaatagcacatcactgatcagtggccactagtgcatgtatgccaaggttgcacattgtcacatggagagcccacctgcttgtcttcttccacctattaagccaaaacttgtcagcatccaacacggcatgctttataagcctggtttaaattccaactttttttttttcaaaattttaaattttcctatcacatttgaattttttttacaacacaaattttaaatttttcctaacaatgatttaatttttccaaatttcaattttgacggggaactaaataccaccttggggtggttgcaaccactttttagggtggttttttttaca

SEQ ID NO: 49178 - DNA, 412 bp, Oryza sativa
acgatgtcggagagatacaccacaagccgtcttgttttaacggaggtgttttggacctgcaattatgtattgatatgcttctgtgaatcgactggaaaaaagatatgcctgagaaactttgacaaaaggttaaggtgagtaccctcaggatatctttcagtttcgctccaactgttctgagatcatgtgatctgtcgcagtgcatcattgacatgtatggagtcctggagatgaaagccttaatctgtttagttaaagataatctttctggggaggacaatgatgatggagactgcatgcattctttggttcaacttcttcaaagaatggagtgaacaacacaatacccaggctctagattgtaaaatgaatgaaattcatatatataatattaaaatttgagttcgtctac

SEQ ID NO: 49179 - DNA, 417 bp, Oryza sativa
agcttacccaaggaagaaacttctcctgatccagttcgaatatctcctgagttttatgaaaataagcatgataaaatccagggacaactggaaacaaaggatgatatgtctctcagtaacgcaaatatagagaagtctagtgatagtccagatgcaactcaacatgatagggaagtatctgcactcagtcaagagcatgttcaatctgcacagccacaacagctgccagactgtgcaagaccatccagctcagaaatggcaactacaccagctaccacatcttcccaattttcacctagcaccgcagtgacatctcaagctcaacttcagcaccagattgttagttctcaaatgcaccaatccgacaagctttctttggctgaacaaaatacgcagcaacaagggcttgcttattaa

SEQ ID NO: 49180 - DNA, 388 bp, Oryza sativa
tgatgctcgtatggatacataccaaccagaatcttttgcgaatgaccgtgccacttcttggatcatacatttttatgtgaccattgttacatgaatgaatttgccaccttatctagaaattagtatagtgagtatatatctcatagcaaggaaagcatgaaagattaatcttggatgatatgcatatagcactttgccttttcaaaaaaatgtgcgtaccactttgccttttaaaaaaatgtatataccactttgccttatcgaaaaatgtatatgccacttttaacctcgacacatatttgtgtaatgtcgtatataataacttgagctgaggaggagaattaatatctttagtatcacctttctgcaacaaattctcggtattcat

SEQ ID NO: 49181 - DNA, 697 bp, Oryza sativa
tgcagcatgcaactctgctctacttcctcgcatcctgagctcgctgcagaatgccactgtctgtattatcacggaagtactcccgaggggaggtcatcttccctggagccgcaccatcaccgcatcgcagcttcttggaggagggttctgtgctcaacagctactttgggggccctcaagtcaggcggcaatgcttatgacattggggaggcatacaagcccaaaaagaagaggcatgtctactaagccacagaagagcccgaacagcccatggtcacactcgagatgcgcctgactgggctggatgctaagaaagctgaggggttctccaaggattccactgatggcccccgctcatcaactaaggagacgactatgttctctgggatctccgaaatcacccccggaagggaaacctgcgactaggacatgacccccgcgggcacccaaggaagggcatttaagggcccgccggctaccccaaaccaggcacgcccgaaggaacgaccacactaccccacgccaaaagcaacgaacctccaagcctagccccccggacgacgatgacatggcccaacaaagtccgacgcacgcctccgcccctaggaacatcgccgcgcacaccaacacaactcccgagaggccgcgagcccacatataacgagcgaacggggcccgacggcgaatccaccccacg

SEQ ID NO: 49182 - DNA, 530 bp, Oryza sativa
agcttgggttaggttgtgttctgatgcaagatgggaaggtggttgcctatgcttctttttttgttacgtccgcatgagaagaactatcctactcatgatcttgagttagccgcagtggttcatgcgttgaagatttggcgtcactacctctttggtactcgtacggaagtgtacactgatcacaaaagtttgaagtatatctttccccagccggatctgaacatgagacatcggagatggttggaattgattaaggattatggcatgggaatccattatcacccaagaagggctaatgttgtagtagatgctctcagcaggaaaggctattgcaatgctacagaaggacgatagttgcccgagggaattatgtaaggaatttgaaagaaagaatttgggaattggcactagaggtttcggtgcagctttagaagcgaagcccactctcattgaccaggttagagaagctcaaatcaatgatcccgatattcaagagattaagaacaacaggaaagaagaaaagctattgg

SEQ ID NO: 49183 - DNA, 468 bp, Oryza sativa
ctcagctttgtccctgctcaccaagtcagcgcacaagctcttacatattctctaatatttattaactcgctcggtctggccatcagtttgtggatggtaggctgtgctgaagttcaaatgggttcccaattcatcttgcaatttctgccagaactttgaggtgaattggcttcctcgatcagacacaatcttcataggtacaccatgtagactcatgattcttgccaaataaagctctgctaactttttccctgagtaggtagtatgcaccggaatgaagtgagccactttagtgagtcgatcaacgactacccaaatagaatcatgccccgatgacgtcctgtgcaaaccggtgataaagtccattccgatttcttcccacttccattctggaatctgaagtggctgtagcaatccttgctgcctttggtgctctgcctttactcgctggcaaacatcacaaagtgc

SEQ ID NO: 49184 - DNA, 395 bp, Oryza sativa
agcttatcattaacgctccaggaatggatccgccagaacatcaccaccggttttccgtcttctccgccgactggagtctgcggctatacagctgggtggacacaccaccgaagttgcgcgtctacttgttcaccgaccggctcgccttcgaccccgccgactggtgtctgcccctgcacggctggcctttatgccgacgatgatgggcgtctacgtcttcaccgaccggccgccttgtccgccgccgactggagtttacgcctgcacagctggcctttatgccgccgttgccgggcatctacgtcttcaccgaccggacgccttgtccgccgcccactggggtatccgcctgcacggcaggactttatggagccgctggcgggcgaatacgtccc

SEQ ID NO: 49185 - DNA, 327 bp, Oryza sativa
ctaccctgatactacggcgtaccaaagtaactgtgacaatgacccagctatttctggatatgcttaccatcgtagctatccgcaattatagcttatcataaaatagttatttagtagcatatactacacaattaatatctggttccacctttcatacacacatgcctcttagagtcagtgctatacctatgctcaaatctgtaacccgatgctcttctctctcctttcttatctacgcgagacgtgtttatagctggcttatacactgccattgtaccttgccttttgatttgctcctctcttatctcccaatgcacatgaatgtgc

SEQ ID NO: 49186 - DNA, 521 bp, Oryza sativa
agctttcacagcttatgagctctgtgcatctgatacgaaaatatatgtcaacttattttgatcacgaaatgatctaataatcatgagcgcgttggaggatgttcttcaggctatgacagatccagacgtgccagggcctagtgatccctacctgagggagcacccccactggtaaatatatatcattattttacaagtaattaatccccgctgaggccatagatggctcctattgttaaaacatgaataaacctcatgagtatcaaatatccatgaaaaaatataaaccagaagtgatctgcagatacatggctaaattaactaggtcattgatgctactccttccgggaaaaaaacattatgttttggacatttacacagccttgttaatttgtattacaaaacattgaaaaacaatatgaactcataattctatagaagtacctttttaggacaatctacaccccaataatataattttcatgcatgccatataaatatttttaaaattattatatgga

SEQ ID NO: 49187 - DNA, 407 bp, Oryza sativa
tggtgcgatggtgcttatcatattgtccgctagttcaatacgatcatccaattttctcttcccattcattgatttgggatgggaatcacctgatgatgatcttttgaaaacaagattgttccccatcgttgtgctgcaagccagcaatgacaatgaaaaatgtgttcaggttctctgttctgttcaataaacatggaatagaactggtcactatatcaaataagcagtatagcaccattggtgccattttgagcaacatgtccatcttatcagaataacgtcccatgttctaatggacatgaaaaaggatgtggattataatagtggtttcctaatttaactggaaactgtcgaataaaggtactcattttatcactaacaaagtattaggctacgattggatcatc

SEQ ID NO: 49188 - DNA, 597 bp, Oryza sativa
agctttggagaagatgtcttacgtggagtcctggcttataccccagtttttctcctgtggagaaggagctgaaagcccgctagtccgctgctgtttatttttgattgtcaggcctgaagcgcctttgtaataatgtaaatattatcgatataataaagatgtgccttttgtatcatgtttgtttggggcaccccggcttttcctgggacggggattaatgcactagcgttcgggaaaaggcaattttctcggtcgcgacaactgctccatgatcccaacttagttcccaaacagtagatttatcaagaaccgaacttcctataccgatctaatacgatattataggcaaaattacccatctaacctttcaaccaatcaataagctaatacctgacccactttttttaagtacctttttataggtaccttgtattgtagaaagttggaattggatcaaccggcatcttcatttccaagcacaccggaaaaacacttggacaaccaatggatcttaatttgcttgcgatgcagaaaatgcatcacacacattggaggttataaattcctgatcagcagtgagaaggttcactgaattaa

SEQ ID NO: 49189 - DNA, 472 bp, Oryza sativa
tatctggagtgagatctatgagacagtgtgtgagccatatagatgttgcatctatgctccttatataatgaagacgattgaggcaaagactgggatttgctatttcaaggacaaccagcacaagccttttccatcctcatgttccctcttcttcagctcctccttctaccagggcgactcgtgcttcttcctctgctgctccacagcgctctgagtcttcctcccccataaacaaggctcttcgggctatcttttacatgtgtgctaagacagctaagaaggtgaagaagatagagaggcgtcagaaggaagattggattgcagcacgcaaggaggtctctgatatttttgatgatgaggagtttgttgatccttttgctgcttatgaggctgctcaagacattgctagtggtgagagtccctctggctctactcatttcttcaatgaggagtcctcccactccgaggagag

SEQ ID NO: 49190 - DNA, 353 bp, Oryza sativa
tcatgatcaagagtgagccgcccggaccatgcgcggaagatttggcgccactacctctagggcgcccggacggaagcgcacaccgaccacaagagggggcagcagaacgtcacccagccggaccggaacaagaaacatcggagagggccggaaagggagaaggatcatggcatgggaacccatgatcacccaggaagggctaatgtggaagcagatgctctcaccacgaaaggccatcgcaaagcaacaaaaggacgacaggtcgccgagggaataaggcagggaagctgaacgaacgaacttgggaactggcacgacagggtgcggcggcagctttagaagcgaagcccacc

SEQ ID NO: 49191 - DNA, 402 bp, Oryza sativa
tggcgccgtcgatagatggccatgtgggccgtccgacactgtacggcccgaccgacgcaccgggccgtgccgtgccagcccacgtgccgcgctcacggcccaggcacagtccaacacacctcgggccgtgccgggccggcccgaaagaatgacggcccatcgtgctttttctcagagtaagtctaattattctccctcttactgggctgtgatatatgtatagctcaaaaaagtctattttacctccctcttctttgggctgtgatataaatagctaaaattaactatatttaagggtcctattctttggacagcgacatttatatgtctatttttagtccctaaactttgtgtgacgggactagcctgccagcccattgtgccgggccagtccgaccgtgc

SEQ ID NO: 49192 - DNA, 535 bp, Oryza sativa
agcttcaccttggtgatatctcttcatccctctcctctaactttgcttgcttgtgccgctattggtctagttgctgtatgtgcctttgattacatgtggtagacttctaaatctagatacttctttttatgtgcgctgctctgtgcatttttggaagttctgaaaatcctttcggaagttccgaaaattcccagcctagttccgaaaattactgcttccgctttacttaagtttttaaattagcctattcaccccccctctaggcctaattgaccttttcaattggtatcagagcctaatatcctaattaggcttaaccgcttggagagatcatgtcgggccaagcaggggatgggatcgatggtgataaaggagctaagatcccttatgactatccccctacatctacatcttatgtgagtacctatagcggcaaagctccatatttcagtggtacggactatgccgcttggaagcataagatgaagatgcatttgaagtctattaacccatctatttggagaatagtccaaaa

SEQ ID NO: 49193 - DNA, 466 bp, Oryza sativa
  unsure (1)..(466): unsure at all n locations
cagtggaagtacacgtattgagctcttgttcttaacagtctgaagattccagtccaagaccagcagaatcttgatggcctacgcagaaggcgggtgtttccctgccactataacaaggttcattttcacaaggtaggttatgggacgaactagtcagatctctctctgggggggattcagagatcacatgcttttcacgactttgttggagtggaaactctatttcagcacagggatcacaagatcttctagtgcctgtattttctacttcacaaacagatgcagttgaaccctttggaacatccatccagaagtgttgattctcatctccagaagcctcagtctgaggcctgctgtcaaatgaaagcataacttctccgagcaaatcatgagccaatntcttcacaccaattctattttcagatatctcaccaactaaaccatcctctctgtataaaagaacatc

SEQ ID NO: 49194 - DNA, 365 bp, Oryza sativa
agaacccggatcatgacgcaaagagaccccaccccagaaatgagcaaagaaagcaggaaagcacccgcagagagaaacagaaacaggtggccccgacaatggggtagacaaccaacgccataactactcacgcaagaaccaaaaaaaccgaaatgacaacccggcaaaactcaagggaaacggcccccgaccacaataagcacaacaggaaccagaagaaaagctctaacaaaaacgagcccacaagagaaaaactgcaacaaggggaaaaggacaaaccgaaaagcagagcaacccccacacatgcaggccaagaccatcagaagaagcgcagaaccactaggaaaccagcacaacaagaaaaa

SEQ ID NO: 49195 - DNA, 358 bp, Oryza sativa
  unsure (1)..(358): unsure at all n locations
aactggtgttccagcaatatgctgcgatgcgagtgtaacttctgcaatggacataatggtggcagcatctgacactggaattaccaaaagaaattgccatctatatcttctaacgttatttgctcttttaattatttttacttattgatggcaatggcaattaaactgggacaatgcaaacttgagagtcattnttcacatacttagattaggttgcagtagagaacaggaacaggaaaagcctcacttttctatgtctaacacttcaacaacatactttcatggtttacaattagtgactggtgcacataattatcatcaacaaacaggtttgatgccgaaatcatcgagcttgcta

SEQ ID NO: 49196 - DNA, 424 bp, Oryza sativa
agcttatagccggttatctactattaaacatgctctaaccagctcaataatacttatttttatgacatggacagtcaaataagttagtcatttgcggactacggagtattacaccgtaaatgtttcatatcagcacatctactacttccaagtaaagcaacagctctcgacacaacaaataagcaaaaaaggcacagaccgctcaaatcaacaaacaataagccccaatatggcgcctatgatgcccagtgatgatagtaacgaagaacaagaatccagaggaaggctggctggaagggcccataaccagcaaataactgaaactatgaacaaaatcaagagttcgacaaaagctattaatgcttttggaaaaagatgcaaaaacaaaaatcccacgacttttgcaaattccaaagtgcctgca

SEQ ID NO: 49197 - DNA, 335 bp, Oryza sativa
aaaatcttttttttggaaacccacacttgtgggctccctttgattacttcttacttacttttgtcgttgatttgatgcccccgataggagacatcagtagcgtattctgtatataaatgcagcgtcgactgctaatttttgactcagcccacggaataaacttgttccttattgcgctgagaaatgtcccttggcaacaatcttaacagctaagagtctgaaactttgtcaccagcttatacctaacttatgagtcacaccatgacacttgtggcttgactgatcatatacacgattggcatttcacactactaactttatatcttgcatgcctt

SEQ ID NO: 49198 - DNA, 471 bp, Oryza sativa
agcttaaatagctgtcatatgtagtatcatgtaaacaatcatctgaacaccttctaacttttttgtctaccaacatctccattgggacttagaaatatactactgagagctacaacacggatcttagatcattacttcgtctcgaacaagctaacgaagatgctgtgaggagtatcaccagatgctaatgacctgagtaggacatggaacattgttggaactctgaccccgaactcgactcgaagatagaatgaggaagggcgaagtcagtttccgagaactctgcaccattacctcgttgcctctttgctgccctctcatgctttggactagcggtaggagaaccaggctgacaagtggaatcatgggttagtggttcatggcgggacagaaaatcatcgcgctgggggctcttgggtgcttccttttgtccttcattggcccctattcgaaagtacaccttgaggtgga

SEQ ID NO: 49199 - DNA, 443 bp, Oryza sativa
tgtcgttcttccactgtaccctcaatactccatatcgacaagtggatcaagcatccgtgttctccaaaacattgtcaagtaggctgctttctcatttgaattctcatctagtcatcttccatattactagatctttaaattctaatctttcagacgctgtagatcattaaattataatatttcagatgctgtagatcattaaatattaatatgatggcatcatgcagggaggattcatattttgctggattgccaatttccattatcgaatcatggtaccaacgtgacggttatgtgaaatcaatggctgacttaattgaaaaggaactgtcaattttttccaatcctgaagaggtttgaccattcccttttccttctatttttctccctacagattcccacctttggattgcagactgtgaacacaatcatagtataccttt

SEQ ID NO: 49200 - DNA, 519 bp, Oryza sativa
agcttgttcctcgtgactgcatgcgatccatggcaaaagttctagaagctcctattggttgatccaattttgttgtgctgctcctgtgcacaccggcaccgcctccaatgaccggaggcggcccgcgccgaataccggcggcccctacacaaagaacacacccagccgggtttatgccgcaccaagttcgtcgcaaacaaatccgcttcgacctccgattgatcagccgaagccgacaaatcgtcatgccgtcttcccaaccgccgaacgacccgagcgctacgtctagccgtctccctgtcaaacgcagcttatcaaaaggcccgggccaccccgcccagagtgttcgatccaccgaccgagaacgccgatcgcctccagcttcaatcaacccgagcgtgtgggcacacgtctccctgttgagagtagctcaccaaaaagttcgagccacctgcctgaagtgtccaacccaccgaatggatcgccaatcgcttccgccgccattaacccgagcaccac

SEQ ID NO: 49201 - DNA, 448 bp, Oryza sativa
  unsure (1)..(448): unsure at all n locations
tattgaggcaaacccactgtttcgggacaagctgtattttccaccatttaaagtttcaagactccgcacattaatcaatcaaaggtgtttggttgatttaagttttggcatgtttttaaattctgtcttttttgttttctcacggatgtgatctgcatgaacaacaatgttaatattcaaataagaaatgctccgtgagccgcattaaattcgcataatgccagcttaaggtttcagtggcacatatattcgtgtatatatgctcttgtgtttggaaaagaatttgtcaccgaaatgatatangtggtttatgtttctgtctggtcacaataccatctttgcttggaacgatgaatacgtaaggaagaggcgtgtgttgtttatatatggaaactacaccgctttttaagcatctaacagcttttatgtgacatttatagttcttgat

SEQ ID NO: 49202 - DNA, 547 bp, Oryza sativa
gaaacaaccaccccggtatcactataaacatgctcgaaccactcaatatttttttttatgacatggacgacaaaaaggagggattgcggactacggagagacaccgaatgaccatatcacacatctactacttcaagaaagcacagctctcgacacaacaaataaccaaaaaaggccagacgctcaaacaacaaacaaaagccccaatatggcgcctatgatgcccaggatcaacaacgaagaacaagaatccaagaagctgactggaaggcccaaaccacaaatactgaacataaaccaaaccagagtcgacaaaactacatgcaccggaagagaggacagacaagccggaaccgtcaaaaacacaggagacaaaagacgaacggaacacgcagaagcccaaatgccaagatctcacactaaaacaacacaaatgaggtcatgagaaaacggggccaaaaaaaaaggacaaaaacacgacgacatctgaacaaggacaccactagcgccccaaccagcagtagtgcaaccggaaggaataggaagg

SEQ ID NO: 49203 - DNA, 621 bp, Oryza sativa
agcttaacagttcacgcagcggtagcctgaaatgatgacgtctgatggggttatctagctacttactcccaattaaaagtcttaagcgcatcgtcgcttagtggccaaggaagacctgaagaagtaaacgagggccttcaagtcgccaagtcttggcgtgtgccccatggcattccttgtacggcacatccatcgtcagacacgcgcttgcacgcgccaatcacaaatgtttacttcttttttcgctgttacatgaacgattaaacgataaaaatatatgtaggacacacatgtacacactactacattaattagcacacattcgcgaatcatattttttaattaagtatacactcaacatagaagctaacgataaataagtagtcctagctactaaattcctacccgatgcgctaagagcaaggctaataatacagccgacctattggctataagggtatttctagtcttctcttagcctacccatataatagttagctctttacaaataatatagagtccacttgtctcttttacagagtttcttgggccctgggttcaaaccgactgttaggtttatagcttaacttctcctctcttcttctctctttctctccctct

SEQ ID NO: 49204 - DNA, 377 bp, Oryza sativa
ctcatgaacctcttcgcaccaccatattcatctttatccaaactactactactacaatcaaacgccaccttatacgcaaacccccacacagccacagtgatgaatcacactcatcatgcactcctctcacagcatctcaagatcggagctaaactgagctaagagagtcaacaagtatagatgcctcagttgttttcttctttttttattttttttttgggggggggggagcgttgcatccctctaattagtcctacgaagatatctctccttggagtaagaaacattatcaatcgtagcgttcttggtataccctattccacttttcattactaaccataagctcagtactctcctactcgcacacaactggtgtg

SEQ ID NO: 49205 - DNA, 618 bp, Oryza sativa
  unsure (1)..(618): unsure at all n locations
agcttcagcaggacatcaaaacaacaaaagcaacaaaaagtaactgctttatgtacagaatttcagatgcagaaaaacagtgaggctgttgatttttgcagaggaggagggtattcttattcttcaagggtcagaatagcagcagcacaatgcacaagcatcttttctctgtatacattgcacttcaatcccattgtgctctgtgactctgtcctcaactccacactgcaaaaagggctttggtgcactggcacatccatgcaagaattattaggcttcttgtttattttttatttggacagacagctgaattctgtttgtgaggagcctcataaaaaaaataccacttcaatttggaaagctttatgaggagattaattaattaactaaaattgctatggatgacaaaggagataactgaatcagcagtggcatgaaaaaaattgctggtcagagccaagctgcagctgctgcanggtttgtatagagttcttgtattgtacagggttgaaggttccaactccctttactagcactagttattattacatgatggaacatgtcatcatctcatctctggctctttatacctaattaaataactctcttcattaatta

SEQ ID NO: 49206 - DNA, 475 bp, Oryza sativa
  unsure (1)..(475): unsure at all n locations
tctttcctttgaagatgtttataggtcatctcccttccttctcttgatgttacatatttgcacgtggtgcaccttgataattatagaacttaagagtaccacaacacttctatttgtagtcaaagttcatttcaatttctgctgcaagttcgctcttttttggtgaagatctccatttgggcaattagatgtgaataaaaatattagtagcaattaaaacgtcttcattccattataattcagttatgtcaggtaaactctaataaggttattgttcagtaagcatttgactggcctgcaatgcatgaacacctgaagttattatttgcttttcatgctccttntacttggttcttttcctgaggaaacacagtagaagtaatgctcatcattctgagaacattaaactattttgttattaccacatgcttgttgaaatgtcttacttgactaataaaatactgaccattggcag

SEQ ID NO: 49207 - DNA, 569 bp, Oryza sativa
  unsure (1)..(569): unsure at all n locations
tgcaagcttaaatagctgtcatatgtannatcatgtggacaatcatctgaacaccgacaatttttttgtttaccaacancgccattgggactaagaaatatactactgagagctacaacacggatcttagatcattacttcgtctcgaacaagctagcgaaaatgctgtgaggagtatcaccagatgctaatgacctgagtaggacatggaacattgttggaactctgaccccgaactctactcgaagatagaatgaggaagggcgaattcagtttccgagaactctgcacccattacctcgttgcctctttgctgccctctcatgctttggactagcggtaggagaaccaggctgacagttggaatcaagggttagtggttcatggccggacagaaaatcatcgcgctgggggctcttggttgctacgatttgccctccattgtccctattcgaaagaacaccctgaattggaaattcacatgcaggcgcaggaatccaaggggacaatcctttccgaaacagggaaacgaacccttggcaaatgggacggaaacaccaacagcaggt

SEQ ID NO: 49208 - DNA, 595 bp, Oryza sativa
agcttatctgccatgcttccgtattggatcgagcgagagcaggacctgccgttctacgccctctttgccggctggaggcaccgatcgtccgcggggtccgtcgccggaaacatggacgacaccaccggcattggcatgggcgccgcctgacgaccttactaactaactgtgattgtattgttgccatcacctgctgcatatatatgtgcatgaaagattcaatccaccactgcatggttagagaaaccaacatgacaatgctaatgggaacacacatgtcaatccggaaatggatcagggcagcaatttcatagcagtttatcacgtagttgtatccatcagcttatgagaggtgagcagaatacctactggagtacctaaccagctaggggctctagctttacagcacaaggctaaagcttattacaaacagtcttggtaataagggaagcgtgatatactacctcaaaatcaagaaggtgatgccggggaaacaaggaacatatcctgtacgacccggttggcaataaactcgaagggccacgcaaagatcgaaagagatggaacaaaatatcatcagtcgtaaggtacccag

SEQ ID NO: 49209 - DNA, 242 bp, Oryza sativa
agcttgtggaaaggaaacctaacttggcttggcttcgctacaaacaccgaatttataatcttttatcttcggaattggcctccgttaatggggcttcgaagcccaacttcgaagctggcttcgcgaacctggcatcaagtaaatcttaagtaaggtctaaaaaaaatccagccacattttaccatataaaatggggaataaagggatatttttctttaacctggcctccaccacccttaaat

SEQ ID NO: 49210 - DNA, 213 bp, Oryza sativa
gatctactacaaaaggacagctgagccatgccaacaactcttacttgaagatttgtcctagaccgcactggatcaaccttccggatgggatcaaaccatgagcgtcttctaaaaactacctaagaagcggggagatattacgcactagcgactcatatccgaaaaaaaccctttacactgaggggaaatggacaactccccaccccctctcta

SEQ ID NO: 49211 - DNA, 199 bp, Oryza sativa
tcctcttcgcgccttgtcatacatactccaacctgtgcatatgttattctccaaccatactgacattcggagctgacagcaacattctgtctttcctacgacatctgtgaaacagaccaagtggaaatccaattacaagcacataaaataattatagtgggatcaatgggaagtttttggttcaaacatacaatagttc

SEQ ID NO: 49212 - DNA, 583 bp, Oryza sativa
agcttgaaactgaattctaaacgggtataacttcatatcttgccttcttggaatatacttttggaaaggattgcttttgtccccaatcaacttatatgatcatccatggattccttgcacatcaatctctttccctttacccaagcaagtacctctgccaatgataacacaccaaattcatagtgcaataatgtgtattcaaatatataacacgtaaatctcacatataagacatgcacttttgcatgatggatacataaaatagacatggtcatatccgagctagtgaagtccttatcaaaaagcctcaacataaacttccagaaatagaaaacgaagagagaaattgattggtggcaagtgtactgcggctagtattctcatcaccatctttgctattgatagtgctcttgctggattgcgcttgctcgctgctattggtacaaattcatattctcaaagaatttattgtgttgaatatgaaggaccatcaactgagtacgttgtctctcagaacatcaatggccacttcataacaataaacatcaaccatacctttgcaactgatttttgaatgcaatgg

SEQ ID NO: 49213 - DNA, 652 bp, Oryza sativa
  unsure (1)..(652): unsure at all n locations
agctttttatccacctatgttcgtgtgtaacttttagtactagtatatttatgttaccgctattcattccaccacagatctaatggttgaaaatggttacaccacatgtcaagtcacaagtagggagataaaacattttgggtagtaaaataggatcccatctcgctcatgacgattaatccttttacttaatcatatagcccattgccccacatgtccttggttttgctctcgcggggatgaaaagacattgaattaagttaggcggggaaaaaaatctatggaaggagactcctaccaagaaatctccttgctggtagtctcaaaaggtgaacacggagcttaaaaaaaacattgctaaaggcattataagagagatgatggttcttaaagttgaagaatccagggaagaaacgagatataggaaaaggctaaccaatggagaaagatgatatagagttagcgatagagaaggctatgaaagggaggcaccgatacaccagccactagaaacgaacaaggaaagggaagagtattggagaatgtgttatcacaaaagtagaattgagaaccctctaccttctgtcttanacgcactgtgttttaatcactgacatatgggtcagtggattattaggcttacccgtcagtg

SEQ ID NO: 49214 - DNA, 302 bp, Oryza sativa
  unsure (1)..(302): unsure at all n locations
acccaatctcctacaacatattctctgaagcttctcttcttatcagcatacactntcatttgttggtgagccctgatgaggtgctgtttcaagagctgagtcatcactttcctttcagataaccaagcatgaagatcatgaatggagcaagaattctctcgaataccaaaatgaccaggaggatatccatatagcactttaaagggagacttanataatgtggaatgataagaagtattgaaccaaaattctgctatatataaccaagaactccacttggatggcatggcatgaacaaaaca

SEQ ID NO: 49215 - DNA, 678 bp, Oryza sativa
agcttgtcatgatggcttgcgttcttgggattagtgcttccatcgtcatgatactctaatcttgtctatgtaaatcatcaagttatcatatatgcgttataatctgtattagtttcataatctaacctataatcagctcgtatctatcaatgcagagtagccgataaagttagatttcgttattaatctagattatatagcatatctaccatctttaagaggttttcatcatcttgattagatcttgtatttattcttatgcttaatgttgcatcggttcagttcgatctattaagtaatatttataattatgatatctagcatgtcttatgattatcagtagagatagcatcggagtttcagccgatcttacctgatttagccatattttctctaagtacttgttttacatgctaaatctgccctttatattaagatcttattacattaaagtatattaggcttgttgtttgatatattttgtttggtttaatatcttaatatagagggggaatcggagtattagccgatacatgttagatctatttaatcggctatgccataaaccgatatataatcttcatttcaaagtccttttgaacatgagtgaattatacctgcctcgacttgctggtccatctatcccaattccttaacttaaaaattatttggaaaaaa

SEQ ID NO: 49216 - DNA, 501 bp, Oryza sativa
  unsure (1)..(501): unsure at all n locations
agctttcgcgtctgccgaccaagacgaacccaatttgactgccgctgacctgttggccccacaaccaccccataaataaagcaacacaacaacgacgccgtaacgaaggagcagcagttgcagcagcagcagtgtcttcttgcagagaaagaaggaaggaacacgaaggaaggaaggcggcgacgtcnaaaaggtggtgctggtggtcgccacgacgtccgacgccgcgtcggccactccggccgccgcgttcctcgccatgcccggctggacccccggcccctccatcccggtacgaatgcctcgccctcgccctcgccaccgccttcttccctggctaactcttcgcgcggccggcgcaagacggcgtggagagcttcgcgaacggcgcgggggtgcggctgctgcngcacgcgcgccggatcttggaagaggaccatcttgacctgcggtgggaagccttcatctggggagcgcgcttttcatgtgggtctttttatt

SEQ ID NO: 49217 - DNA, 516 bp, Oryza sativa
  unsure (1)..(516): unsure at all n locations
agcttgttattaacctctcattgtcttgggtagggccganctgctggagttttatctcgntttatttaaacaggcacaacttgatattcttatgtaaagctgtatcggattctacccgatacgttatctgtaataacttaagtcacttcatcggctatgatatgaatccatataattattaattcactttttcttgattataaacatttgatattgtctcgggttgggccgatctattctgattgcttgttttttaaggtgaagatcaaattagtaattgcgtgacatttacctctatgaccgaatgcaagtaatttacggctaatgcatcaaagactgttcataagctaattatttaagttgtataattgtacaatgactgactttaacttcatcaatcttatactgcatcattggaagtccacatgtaagattgggtttgttaacgaaaagttgtttataattatatttcagatcttagttatgaaccaagttctttcacaattacagccaatt

SEQ ID NO: 49218 - DNA, 276 bp, Oryza sativa
  unsure (1)..(276): unsure at all n locations
tctcgcctggtcaggtctccatgcatgcattgccttacnttntatttatcaccatgtgtactatcctggtgatgtgtatgtcgtattcatacgcatgtgttcatttcagtatatatatccagaactagctagctagttgtgtgtatatatatacgatctgcttccaacaaaggcctacatgatgataccaagcctcttccggtcataaattcaagtgtgttacagcaagatataatcatatactccctctcgcgcctaatatttaacgcccttgac

SEQ ID NO: 49219 - DNA, 318 bp, Oryza sativa
  unsure (1)..(318): unsure at all n locations
agcttgagtgtgttctttcatttcttctgtgagtgtgnccacgataaagaaataattagtgtctgtgactaacacctatagagtgaggagagattcctaacagtgagctcgcacaaatagttctaatcaaatccaagctatccaaacggcacatttcaaagcttaacccgcgtaattccattaactttccgagcgcgcgcgccctcgtttatcggattcaactgcacgctcccatggatcctatcgccaccgccttttgggcgtcgacagtggcgtcgtcgtggtcgcggtctgagaggcgccctgtgccggaggcgg

SEQ ID NO: 49220 - DNA, 395 bp, Oryza sativa
  unsure (1)..(395): unsure at all n locations
cagcaatctgngtggttggtgctgtacttatatctctatccacatgggaaaaccatgttatgtggacagcttacggtactagtatttggagtttgcgtgtcaacatcagtaaggatgggctaattattctctcaagttcactctgcttcgctatttgcgttaatgtgatcgagactaggtagggaaagcatatgatttctgccgctcgaaaacgagagactgtatattaaanaaacgaaattgggatngctacttntacctgccatgctaacatacattccagttaattcgcattaacaccaagtgttaccacttactaccagaccgtaatctaatttgcatgacacaagttgttatcacacgttattctaatttggagcgatgcatagtgtgga

SEQ ID NO: 49221 - DNA, 627 bp, Oryza sativa
agctttgcaaaagtagtctttcctaagccacccattccaactattggaagcaccattatatcatcattttcaagcaatgctttcacaatcttttgcttctctgccgctctggatctttccacaatatctttctcagagtaatcaatgatggaatctgtttgcctccattgcttggaagccaatgcttgccgctgatatttgaagccaaaagcattcatttcagccacaaggacctcaatgaactgaactatcctgcgaagtttgttgcccatcctataacgaaacacgatacggttatgggtaggaaagagttttaccgcattcatgccaagttctctatagtgcccattcttcttggcttcacggcggagtgcctcgtacttgaactcatcgaagatgtcgttagcctcataggccaccttcttgagtgcctcaagccaagcttttgctccttctcggagggatgcctgctcctcagcatcggtgataacatcaaggatagctggcagcttgcgcttgaggatctcatgctgctcctccatgccttccatcaccttgtaccttgtcccgaaggaactggaagcctttttctttaccattgacaccaacgggcccgatcaccatgct

SEQ ID NO: 49222 - DNA, 417 bp, Oryza sativa
  unsure (1)..(417): unsure at all n locations
taatgtcttanaacattattatatgatgggatatgagatgtgatantatatagactgatcatccaataatttcagtaaatgtttgactgaaacatccaatattttcagccaattatcttatacattaagatagggttggagaggagatacattgctgttntgatattcccttactgctaggctagcatagtaatgctttgtcatttattcactgaattttggcttatatgtagttttattttcaacagtaattctctacaaaattagcattttacaggaaaacaaatgagaaagtagtccccgtgaatagatctaatgtatttcataaccatattgtagctcgcacaagcattatcaaacaataaccaaaaggcctacatcacaagaagcattcaacaaaaaagcatacgcagacta

SEQ ID NO: 49223 - DNA, 404 bp, Oryza sativa
agctttaagctgcttagcagaagatattttcattaaagtggatgcgtcaagaattagagaactaaaacaagtaggagtaccagcttaacaccactgtggcgacacttgttctggaaacaaaaaaatggaaagccgtaacttccataaagctgcgtgagttcgaaaaagaaatggtaaataccttcaatcttctgaagcagctttttcaccttgtgcttacagccatcacagtgtatgttcaccctccatacatgggtctgcaaacaaacaaaagccccaagaacagttgagtcctcaactcaagcaccctccacaaagcatatagaggcaagacaaacggagagagaaagagagagatacctggatcttgaccagcttgaaatcctcatctttggtcattctgc

SEQ ID NO: 49224 - DNA, 271 bp, Oryza sativa
  unsure (1)..(271): unsure at all n locations
ttacggaccttagatactcagctaccagcaagtccgtgcaatcttgtgataaagcgtttgtatgccagattgctatggggtcttgatgcttcaatgtaagtaaaatcgcttatgtatgtacataaaccacaantttgaaaccgcaggatgtaactgcataatctacattttctcagatcatgtagtaactagggttgataacgccgtgggtcaaggtcgtgttggggtggaacggccatgtcccacgacttctattcccaccccgcttttt

SEQ ID NO: 49225 - DNA, 647 bp, Oryza sativa
agcttcaatcgaaatcaaacacaagtactattcaaattaccaaaatattggtagggcatgtttttggtagcaatccaaataggcccttagtcttacgcatacaaaaaatcaccaccataattaaacattgtaatgataagatagataagaagtgccatcgatacacggtacaaatttgtcgatcccgacgaatcaagcatgcggtaacctatcggcatcttctaggtcggtcagaatgcattgcattctcgtggtccttcaatcgttgatactctacttgtgtttctgactctgttatcttctggccatgatatgatagagtgacattgtcgatccatcgagtaaatccacccatccttggattgccctgtaaaaataagaatgttattcagtttgggtagtaattttgtgcaaatcatagcggattttgtaaatggttagacatacaacgaaatcgttgtctacattggggcagacaaaatatctccttcgaaatgtttgttcagcaaaggatgtagccacctgccagcgatctctgcacccacactttggacgctcggaccatttaggtaaccctaatggattgttcctccagtctaagcctgcaattttcacccgatcgtactccatccaagcatgaatgaact

SEQ ID NO: 49226 - DNA, 685 bp, Oryza sativa
agcttccccttgctaccttggaattgtatgtgtctgaagtctaatatgatcactcctgcttgaactcattcagcaaatggcaaatgtgcaatacactgagaacatgactgaggagcaggttgatgctatggcagggagtgaaacattgcggcttcaagcttcatcactatttggatcaacaagaaattctaaggtcatgaggcaacatttcttcattcgcaatgccatgttgaagtccattcactaaagaaatatattttattttgtaggttctgaccaagtctacaaacaaattgagggattctttgcttccaaaagaagaacctaaacttgccattccccttttactgcttattgctcagcatcgatccaagtaaggttttatttaacatcttggaacatcgtctgcaattctttgttgtcctgcccatacgctgctcattagttattacctgttttttgaaccctggtgggcacaaattgactccatttcccttttgccctcgactaaggtggacttaagtctgtcataattatgcaatacaatgattgtaatatagatggcatgacatactaacaagatatgaaccacaatcttttggaatattttgttcagatgctgataatatgccaagagagcatcaaatgactaatccttattattttaaatgtgggattgctgtat

SEQ ID NO: 49227 - DNA, 67 bp, Oryza sativa
  unsure (1)..(67): unsure at all n locations
tataattattaatgctcgtgctaatgaggtgtaaatctgttcnctaagggactgcctatacatttgt

SEQ ID NO: 49228 - DNA, 597 bp, Oryza sativa
  unsure (1)..(597): unsure at all n locations
agcttcttgatcttaccaaccaggacatcaaactgagcttgagatttgattttacggtctgcaaaacacatttataataagaatctgctgcattaaagagaggacagttcaaattgtcagctggcaataccttcaacctccttcaaggctgagtccctttccgcagccagttctaccttgtctcttttcaaggcttcaatttgtttctccatctgagccatcctggtggcttgcgctgtttgaaatccaaatgtttgaagatacagttatgacagcataaatccatggagcagatctggaagattaccttttgatgaaccactcagctcgaagtttgaatcctggagctgagcaattcgctcccttaattccttctccgttttcttggcatgctccttggcctcgtgtagctgttccctaacggcttcaagaagttccaaatggggaaccagcttttctaaggttgcagtcttggcttcattaccaagatggattctctgcaccgtgggtcatggattantcttgctaacgagaaaacaaagtcatcaaaagcagtcacctagaagacttacattcccaatgcgagtggctttttcc

SEQ ID NO: 49229 - DNA, 428 bp, Oryza sativa
agcttataactaaaagtccttttcttatatagtgagtactaagggcatgccctattcttgatgcaccccttcattcacacgagcaaaagtgaccaagcacctagctagagatatgcctcacacagtgcaagctatactcctatggaaattttatgtttcagcacctgtcaggctgtcacattttgcatttaaacccttggattattattatttgcatatacatccaatatttgcagtataccccctaaaaatcacaaagatatatatacatcaaccccttctcaatcctcttattaccatcttcccttccaatctctccccgcgtctcctccctcttcgaatctctctttgccggcgccgcctttccccttcctgggcatatctccccggggctccccttcccgggggcggcggcttttttccggcgc

SEQ ID NO: 49230 - DNA, 351 bp, Oryza sativa
  unsure (1)..(351): unsure at all n locations
cttggtgatggcaatgctgtcaacatgtattactcaccattatgttctgtgtntaaacaaattgagtctagtccagacgtaagattgcgaccccgtttctcacatgatatagggattcgcttgagccctgtgagtaccgggcctatgtctcttggtgccagtccatcacaatttaccccacctaactaccaaatgcagatcccatcttattccactgggatgcatgggtctggttcacctgcaagtggaggcattcatggattctcattatgaaaaactccatccagttacagcaagaggaagggtttgccaatgccacctcatgaatattcatctnagcattgacaaaga

SEQ ID NO: 49231 - DNA, 581 bp, Oryza sativa
  unsure (1)..(581): unsure at all n locations
ttancatggagagtaatggaaagggtggctctattgaaggctttctattgttctttgagactggcgaaagagaatgtggcgaacctggaaccaatgggcaacacaccttctatcaatttatccatcagggaatgatcaatacttctagaatgttaatccccctggaacttatttgactaccataatatgcaaagcttgaccatggataccaacttaaagaacttatttgaccaccctagaatgcaaagcttgacaatgcataccacttagagtacatgacattttgatggcctgcaacatttctttttctcttgctgaatggggatatgcttcatttattaagctattggccctttgcatcaatattggtatattattatggatggattctgcaaattgcaaccatgtcaccttgcacatatggcttaatcttgccttgattcttttggagttttttgccaatgagcatcccgtttctcaatcaggggtggcattcgttcaaacaaaatatcttaacttatacgacgaacaatgatcccacttcttgcctttccagcatcttaatttacccaaggaattgg

SEQ ID NO: 49232 - DNA, 273 bp, Oryza sativa
gtccaaaccatactgtgccatgaagtccacgggttctccccgacaccacccccgcgaattcacatgtttcttggcattaacgctcccctgataagctagttactcaaccaagggtgtccccattcacccatgttgtcgacttgtcttatgttccgatgaaattccaaggaaacagtccttaaacgcgagaacagataaccgtacacccggtacgttctccgtccgcggttttgaaatcatttattcgctacaccacccaggtgtcggtttcca

SEQ ID NO: 49233 - DNA, 531 bp, Oryza sativa
agcttaatttgtttacatgaccattatttcatgtgaattggtttacctttatatataccattagagtttagtaatatcccattaattactcctagtgaaactatgttatagatagagttccattataaatgggcatcatttcatgtgtatttagacgtcatagcacgcaacacatgggtcacgtatttagtatttaatccctaatttaaattagtaattaaccttccgtttgtctggctttattttcttgggcgtaattatttgtagggttaacaatattatattctcataaatcatatctattgcttaaatgtagctcttttctttaccttcttggtgatcatttacggtttggcaagcaataggaatcataacaaccagcatgatgcaaaagttttaaaaattttgaaattttagtgatttttattgttgggaattttcaggatgttacaaacctaccccccttaaaaaaatctcgtccccgaaatttagagggactacggggtcattaaactagtcggactaaaatat

SEQ ID NO: 49234 - DNA, 286 bp, Oryza sativa
acttgaccggccgaaaattcgctcttctttttaaaattcgtaaacttagtgccataattctggattgcatttctctactcgggtttacatcagactcgttagacttaagctgtcgaatatatcatctcacacctttgtcctcatacctgtctacccttcgtcaatgatcagagtgcgcaactcccttcgtttgacaatatttgtcggcatcattttctcgaaagctttattggcagcaactgttgctccattccagccttgatatgcagatggcgaacatcgtctc

SEQ ID NO: 49235 - DNA, 638 bp, Oryza sativa
  unsure (1)..(638): unsure at all n locations
agcttctanaaaaagagctatctaagttttcaactattactgacttctttgttttttaagattaccatataaagtatggataattcagccttttgatgtatttttcggattcattagaaaaggacaggaaatttgccataagattgtatgtctatcaatctatggcttaatttgattggaaaataagcaagttgtctaacttcttgcaaattattttccttttactatttgagaaccactacttttctatcctgcgtttcaaagaaggcctaaaggttaactgcacctctctctttcttttttatacatagcgaagtcgattttcactgtaaacttttcaaacaggacgaacaacaattgccttttaaaaatagataacttcgtacatcacactaacggggaagttggatgggactaaaaaaatttagtctctgtcatatcggatgtttgagcactaattagaagtattaaacgtaaactaatgacaaaactcattccataaccctggactaattcgcaagaccaattattggacctaattattaatccatgatagactatgtgaagctccagaaacttttttaatatgaataattaggctaacaaaatgtcctgcgaataacttttattataaaatc

SEQ ID NO: 49236 - DNA, 479 bp, Oryza sativa
ctaagagccatgatagatcctgtagatgttagataactcctggtcacccttcttatattaagagaaattaataatagttcagaaattacacaagcctggccggagctagtctccacagtgttccgtcaacatgatgcgcttggccacgcatgctgcactctgaatgtccatatcaaaaggtaaagttcatcgccttatatatttatgtctactatacaaaggcactcttaaaagcccccacatcaatcagaaaaagaactgaacgatgggcaccgtacaaacctagttaattaatttttgaagctacaattattattttggaaagtacctcatcactgatgagtcataaacaaacaacgtctcagatgacctcagctatgatggcattggtatattagaccgtcataggtgagtcacctgtgataggtgtcgaagtagattcatcaaagataggggtacctcttattggatcgtatgct

SEQ ID NO: 49237 - DNA, 459 bp, Oryza sativa
agctttttccccatgtttgtggaagccagctcccgaatggacttttttcttttctgcctttcggaaaaacgagccttgggctccttctttgcatggatgtgcgagggcgaaagaaagatatagagtctctccccgagtttcacatgggtgtgacccgggggtttcttctcacgaatccacggagggggggagattacagcttcctcagcattaaaaaaatggataaatggtgcatggggatctttttatggcaatgagatcctgtttttgacttggctttcatttctccaaagcgaccccccgataaccaggctttggctttctatacttcaaaggcggcccttgagctactagcatgctttttggaatagatatttggagggggggaattgaaatggaggttatcaagattgagatcattattcacactgctcaggggtaatgcgtgagataaatgag

SEQ ID NO: 49238 - DNA, 295 bp, Oryza sativa
ccatacagggacgagttgatcggagaactacacacgggctggtgcaataagaaatactccatattcctgcatgtgggaaatttgataaaaactcctatatggcagagggaccatttataaaacgggcaatgctaaatgagtctgcacctatacataaaaaatgaaatgcatccatgatccatgaccgatcacactaaataactatgggtgaaatcaaaatgtcgacattctattcgccatctgatcgaagagaatatagtaacttccatcaaatatgattcagatcaacactgga

SEQ ID NO: 49239 - DNA, 482 bp, Oryza sativa
  unsure (1)..(482): unsure at all n locations
ctgaacgcgtaatgcaaccattacgtaatcgtgcttcttatgcgtacttttaaaagaaataaagtgaatttcacaaaatagcacgtaaatctcaaaactaggaaaaacccgagcgttgctgtgagattttagtatgataacgactaataaaaataatgtgtgagatagttaaacaatataaacttacgtaagttgatatggtttatgatgatttaaatttaaatagtatatagatgattcaaatgtaaaagtaagatgatgcaattttatgagagaaaaaagggagtgaaatagtttggaccatagattaattatctaacgctaaaaataattgatgtgatatgatttaatgggagaaaagagaaataacacttaataagtgaacatgaaccatatatgtatatatcatattaccatanatgatgaagatatatattgaactattgtgtgaattatgtggattgatgatctgcatgcttaca

SEQ ID NO: 49240 - DNA, 636 bp, Oryza sativa
  unsure (1)..(636): unsure at all n locations
agcttgtacagtttgggaaggggttttttgagaaaaaaaaataatctacttttaccgatatgcccttaggcacggccatacataacatanaaatcacacgtggaaggggtgggcaattagctaaagcaacaggtgctgtatcgaaactgattgcaaaagaaagtaaatcggccactttaaaattaccatctggggaggtccgtttggtatcccaaaactgcttatcaacagtcggacaagtgggtaatgttggggtgaaccaaaaaagtttgggtaaagccggatctaagtgttggctaaggaaacgccccgtactaagaggggtagttatgaaccctgtggaccacccccatgggggcggtgaagggaaagcccccattggtaaaaaaaaacccacaaccccttggggttatcctgcgcctggaagaagaactacgaaaagggaacaaatattgtgaatagtttattcttcttccccggcaagtaaatacgtaactaaggaatatgggaaaattgccttttttggaatttgcaataatgcgaatgggcgaacgaacggaattgaacccccgccatggtggattacaaatcactggcttgaacaacttggctacattcgccccttaatcaggtaaa

SEQ ID NO: 49241 - DNA, 616 bp, Oryza sativa
agcttctatattatgaaatcctcatgtgttcctaatctaggcagaaggcaccaattacctattattatttgcttgtcgtgtatgcttcctgctattatgtccatattatttgtctattaagagaaattttaagggggggattccttaacaatgatgtatgagttatttttttatgtgtatgccaagtaccctgcatatgaaaaattagcttctcttgaacaatgcaagaagtaattgactttattagcttctccaggaacttagacttttcccatcggtaatatagctcatgttgtgtttgctaaaagtgtttgtggggtagttgggctgggctatggtagaaagctctgagaaatgtttgtaagtagtaactagtaaagacttgggggtccaggcaagctaaaactaacatgcgacattgcaggaaatccaacgctgtaatttggtctcgatgaaaaagttgaaatggtgcactactcaaagaatgtccatcccttttctttggaagaacattatttcagatttcagaaaaaccaacttttcagaaggttgtaatgcaattggttatcttttcttatatgaaaaagattgaattgctttgtgtatactgattatt

SEQ ID NO: 49242 - DNA, 367 bp, Oryza sativa
  unsure (1)..(367): unsure at all n locations
agttcccttcctatatcattctaccgctttcaattcattactcacatgagacatgcagtactgagtaaatntgcaggaatcatggtaatacatctcgcatgctttattagtgtcttttcttcatacagtttcatgacttgttgtcaatcgctatgcactaatgcttttcgttgaaccatgcacttagtgcattactgcattgcagatattaacaacagctgctcttcacattactatcgatatttgattagatatatatcctcacgttaatttatgccttacaaaccaatcagacaagacagttggccctcttgaagtattctcagcaccaagcgtacttgatgaatagatatatgttcttgtcaat

SEQ ID NO: 49243 - DNA, 441 bp, Oryza sativa
agctttgctcttgcctcaaaatagtcaaagactcacgtgttcaactggtgcggtgagtatttatggctctggcggttatgtgggaatgtgaagtatggtcagggcctcttgctcctgagagatctgaaggcctggcccaaaattgtaagggcccattgacttcgtataccaaactgaaagctcttgtgggcctcaaaaaggtccgtcaaggcccacaaaaatcagcatctgctcctgcacgcgggcgagcagcttaaaattatcccgaactgattcagaacagtataaaaaactgttgtgatcgcaagggatttcccggagcgcaggtgaggcgactgctcaccgcgcgcgtctgtcatgtcaaaatccgtgtcttcccgaccgccccacggctcacatacccgaccacacgcgtttttggtcgtcaagggaatggaatgc

SEQ ID NO: 49244 - DNA, 382 bp, Oryza sativa
  unsure (1)..(382): unsure at all n locations
tgtgacgaaactcctgagcattacatacaacttggcaaatgatctgtctccagganactcttataaggcaaatagaattnttttataaaaaaattntcaacgataaaattatacttatagtaacaggttataaacttaatgcaaatgtccatgagctcatctgtgtcagacgccttaactgaagatttctctcaagagatattttaccttttcttcagcagtaagcctacgagcagtcttcttttcagtggaagagggtagatcagtgaactcaacggtgactgtctctccaagctcatgggaataacactcatcgtgttcctgcgctaagacaatcccttcattccagtccatatcagctgcatctggatcttctttctcc

SEQ ID NO: 49245 - DNA, 499 bp, Oryza sativa
agcttgtgaggatcatatctctgaatgattagatatcgcttttgaacaacgttttttttttctgtaaggtcttcccgctcccggaggaggtcggatccgcaccaccgccttgcaagtcaccgactgcacccgagcgcaattcagcttgagcccaaaaacccacctccttccgcagattcttgagcaccttccgcagttgccgcaacgcccgtatctccaactccagccccagttgctgtttcagcgtcagctgccacgtacgctttttcctgcgctcccgagtcagccggcaggggtccaagccgaggcaacggaggtagtgcggttaagtctgttcccttgtgggtcaggccacagttgacatcatgtgcccatgatgtgggtgtcctaataaggatttattcggatttacaagcgcttttattcacaccctagcatttgccgttcacattccattatcctacaccttaggtcctgaacatgggttttttttcttttc

SEQ ID NO: 49246 - DNA, 435 bp, Oryza sativa
  unsure (1)..(435): unsure at all n locations
tgcgtcagtgtaaccatntacaacgagctcttcctgtccttcgtatactatgaacatatccttagttcttctcaagtacttcaagatattatttacagctatccagtgactctcacctggatctgattggtatcggcttgttgcattaagtgcatatgaaacatctacacgtgtatatagcatagcatacataatggatcagattgccgaggcatatggaatcacactcattttgtttcgctcatcattcgtttgaagacactgattcttgccaagattaatggcatgtgacatcggtaagaaacctttcctagaatcttgcatgtntaacctacttaacaccttgtcaatgtatgtactcttgcttaatccattaacctcttgatcatctccatagatgctttgcccaaacataatcggttgccctaaatctct

SEQ ID NO: 49247 - DNA, 493 bp, Oryza sativa
agcttgtggacctcttggtttcaatgtgcggaaacaaaattataagggttgtttcattttatacggctatgtattgactagtttgctttatgtgggtttctgttagtttccttgagaatttgcatcagtatgttcgccattcaaaagtaacttggatttgttcttttttgttgggctccagaagaagttaaaaggtgataagactggaagaaaaggctatttatctgtagcaacggaggtattggaaattaaattgacatgtatcctgttaagtctgtgcaatgcttcagtaaattttgctttaataaaagaacttattcacatgctatctcacaggttttcgagggtgctccatcactccacatggttgagcttcttaaaactggaggggacacgctggagtttcacaatgtatgttaacaaactttgcatattctatcatttcatacgggggcattgaaaaaaaaaaacatttcgtagtacccagcatcta

SEQ ID NO: 49248 - DNA, 405 bp, Oryza sativa
  unsure (1)..(405): unsure at all n locations
tactcagctatgttgatgatgtagtcgtaagaccaagcagaaggatattctgatcacggatttataagaaacttttgcaagcatttgtgctttcatgatgaaactaaaccctgaaaagtgcatcttctgagtaccgccagggaagttgctcggatttatgatatctcaaagaggcatacaagccaacccggagaaaatcaacgctatcctcaacatgaaaccgccaagctcccataaagatgttcaaaagctgactggttgcatggcggcgctcaaccggatcgtctcacgacttggggagcggtggatgccctttntcaagctgctgaagaagactgacaatatctagtgtggacccgttgctacatagcctttgagacctaagaaacttatcaccactcacct

SEQ ID NO: 49249 - DNA, 486 bp, Oryza sativa
agcttattccccgtataggttgttttgaccggtatgaagtgagcgacttttgtcaacccttcaaccactacccaaatagaatcatgtcctgccgacgttctaggtataccggttataaaatccattcctatttcttcccacttccactctggaatcttcaacggttgtaacagaccagctgggttctgatgttctggcttgacccgctgacatacatcacataatgccacatattctgctatcttacgtcgcatactggcccaccaaaattgttgctttaagtcttgggacatcttattgcttctaaggtgaatggaatacaaagtttcatgaacttctttcatgatagtatccttcaactccttattttctgggacccaaattctttctcctaaccacacagttccttgctcatcttctaccaaaccggagggttttcctcttctcatggtccttttaaatttcttggataatcagatcattcac

SEQ ID NO: 49250 - DNA, 473 bp, Oryza sativa
ctgttcgacgttctaatcttggcaactgcatgcattgaagttaatcaatatattagtatcataaatatgtgaagctgtctagtacatagtatagagacttacatcctccgcgttaatcttgtacctcccattaaccctaagaaattcacacacataatacccgcaaaggaccattcctcgcgggtacttgtgactcttcaggacatatcatataaaagaatagttaaaatttgcaattagtaaaacaattggaaaacattaagtgagtggagtattaccggccaaaaggtacgtgctagcagcttctcccttgttcgggtctattctccaccctcgaacttgtagtattggtacgcattgtatggatgtcgtaccgtttcacactaaagatgatagttattataatacattcataataaaatgcaagagtcataatcacttactaccgcaagattgctacaaattcttcgtat

SEQ ID NO: 49251 - DNA, 530 bp, Oryza sativa
atcttcaaaacacaaacatcggctactaaaacgtgagggttggttactgatctcttttctgtcaatccaacgagaggaactttgtactttatagccgcaagtccatatgaacatggatccttctcgaatctttgattgaatcgagcccatgatactctctttgctacaaaaatacgcaatggaaatgtacatgtgtacaacattgaaaaaggccactttgactcccttaattattggcagaatctaattcgtaaccctcaaccgcaaaaccggataagatgactccccgaactattgaaaccggagcaattcgactctctcagcggttttggagggcgggttcgctgatgaggcgctgacgcgttgatggtgacctaatctccgtctcacgtggcattcaaattaagaaaatatatgtgggacccatttgcccttccacaaagaaatatattatgggaccccctgagatatggagcccacatggcatcctctctttctctctatttcacccgtctgctataacaaaaact

SEQ ID NO: 49252 - DNA, 671 bp, Oryza sativa
agcttcaaaccttacgaatatcttccagtgatgtcacttagtttgacaaaattcagaagatattgagactttcacattgtgttcacatattattcggtgcagctgctttatcttcaaattctagaaagtggtgtcatagtcatacattataaaatattcaaggatgattccattgtgccacttgcatatctacttattctatataaatggtgcatctatttattccaaagattgtttgacagattataaagaagaatatagagatgcagtcatgttctgggaatgccaatgcaggttaccacttcttaacttctgggtaattatgtttcatcattatgtgaatcactgaaatataaatcttccagatatcaaatagaactgatacttttgttgcagtgttgacagcagagaagctagagtggggaaactatgttcatataagcaatatcattgagaaacatccttctggatttgatctcatccttggagctgatatttatatccttctttcttactttgctggggattcttctttcttactttcccgcgatttaatttcaggtctgagccttgccctttctattccttctgacatataaatcgatatccattggtgcatcttgtggattttgtgaaccttgacttccaaaaagtttcagcaatctagcatt

SEQ ID NO: 49253 - DNA, 566 bp, Oryza sativa
agctttgagagaaccactctatgttagaatccgtgagcaccggtgttctacttacatcgcaaatgtcactccagtggaggaaagggcaacagaagccctccctgacaatcccactttgcagaatgttctcgcggttactaatatcacctcgaacagtgagatagtcgaagaggagagtgaacagaaggcattattcaagctggatcatcatgcaataggcccttcaaaccctccggctgagcaagagcaacatgttgaaaataagccttacattagtcctgaggtagagcaggctttgaacatattggacaaagctattgcaattatccgaggcaacaatgctggaagtgccagtgtggtccaaaagtttatcggttacgatgtaactttagatggcagtaccactgactctagaaattcacacaatattccaaatgaacatcctgctacattgccaccctcgagattcaaggtcagcactaaatgatattaatttcttctggtggaccatttgcactaaagttgatgccacagtattacattggtatggttcttaatggagagag

SEQ ID NO: 49254 - DNA, 380 bp, Oryza sativa
  unsure (1)..(380): unsure at all n locations
ttgagactaagctgtagaaatagctcttatacataagatattgtattccttgatggatacctacataagatagcctgtgaacaatggcaattgagtgaagaggatatacgtattgttagcattatatggctgattacgtaatctcggcgtacttaatttatgctccgaagcaaggtagctatacaatatatttgttgagaagatggcttgaagttcataactcctaatataaattattacaaactaaatgatgccttcgtacataagtatatcataccatcccatgcgtgttcttgctacggagggtgaagctatgcacacatgcaaaatataatggtatatatgtggtttcctatatactgccantatattggactcta

SEQ ID NO: 49255 - DNA, 475 bp, Oryza sativa
agcttctacttacccaatcatggcaggagagcatgaagtggtcttttcctttttatcgattccagaaggggtggcgggcggcgactacgcggacgtattctgcgacgatggcgcggagcggggcgcggtccttggagggcgggcggtaaaccaacttgaccattttggagaccctgaacggcatgaaaaaagcgtgggcgcccgttgggtcccaccttccgacgccgccgccggtgttcgacggcgacatgagctcgagctgcttgatgaaactgccctctatggtgtagatgtttttgcaccggccctcttgcaggatgggcggctcgcctttctcgtacacgttcaccttgaaccccctcttcattttcacgtagcttctgcattcaccatggtgcactgcactctcctgatcgaccgagaccaccccgcgtactgatccatgggtaacttaataatcataccggttgaaccc

SEQ ID NO: 49256 - DNA, 501 bp, Oryza sativa
actcagcttaataattagtctcgcagttacctagcagaatctgtaattttgtttgttattagactacatttaatacatcaaatgtgtgtctgtatatccgatgtgacacgtgggggcaaaatatttgccaactaaacatggcctaaacggatgtggcacttggtaaaaaagatgaatgtggcaaacagtgacaaaaatttaaaagtcccttcacctaacaggaattgcagtaggaaaaaaaacatttataatggttatctatcattataataaaacacttactagatctgtagttctccctccattggtttatattagaagtcatttaactctgtttaagtcaaattaaagttatttagatttgatcaaaattttagaaaaaaatagcactataacaccagattagtttcataatatttaacacttacaatatttagatataatgtttctgtcatgttgaagatattactctatttccctacacactcgctcaaacttaag

SEQ ID NO: 49257 - DNA, 480 bp, Oryza sativa
  unsure (1)..(480): unsure at all n locations
agcttatgggactatatgttgggtaatgtgaatataagngagcataataactttatacaaaattttggattcatcatgggacacaaattaattttttcatcttaatgttcatgggctaaacaatttatacatcaaatcctctatactattattgtaatatatacaactggattgtgatccactgatgattccttacagaacaacgcacactacagattacaaagcaatttctcgcaaagaaaaactttgccattaaaaactgattgaaagaaacataataaacagataagtgaagaaacatagtgcttgcttacaccagatgaaagtaagataagtgtgagaagatacaacacgcagacatggcaatatttctgggataatacaccatatcttgttggcattgccacttttgatgctcttcacagtagttgtctttcaaattaaaccatgcagtagtaatgaacataaaaatctaaaaaa

SEQ ID NO: 49258 - DNA, 438 bp, Oryza sativa
  unsure (1)..(438): unsure at all n locations
tgttctggttatttggggcgaccatggcaatatgatacataagttgtttntgatggtcggactaatacatataaatttatattcgatggtgaaagagttgttttgcattctatgactccagccgctgctttgaaagatgatcttgcaagtcttgaatgtgaaaagaaagcgaaaagtgaaaatcagattattactaagaatcttgcttcacctagtacaacagaaccaagtgccacaaagaatgaaattaagttgacgggtgctgtgttagcttctaaatataatatttgtgcactagaagagctagattcttgttgctatcctctattctgcagagatcatatacccacattggctactgcttccagtactttatattctatgctactcgctgttactaaccttttgcaggaatatgagggtgctcttcatgatgag

SEQ ID NO: 49259 - DNA, 468 bp, Oryza sativa
  unsure (1)..(468): unsure at all n locations
agcttgcattctttgtggggagaaccttgcccataaagattgcagcatgtactatgtatggaaagacaccgcaagtgctgatgttcgtcgcgttccaaatgggaagtcgaagaaaaaaaataatccttagttcgctattaaccttggggggcttgtactttgaaaatggtatctttgaatttatgtttaatgcgtctgtaattttaatttcaactatcctgcacttttaatattcgaatctatttgtaatggcccttgaattttaatttcaaactgcacttgactttttaatatccgaatatatgtggcctgggcttgtaattttaatattcgaatatattgggaatgggattgtaatttaaatttcgaactacactgcacttttaatatcccaatctatgtgtccggggcttgtaattttaatattcgaatctatttgtaatgggaatgtaatttanattttgaact

SEQ ID NO: 49260 - DNA, 431 bp, Oryza sativa
  unsure (1)..(431): unsure at all n locations
ctagacaatntanaaacatgggtgggaaaatcaagattttcaaacctggtgggtgtttgacataaacttcctcctatacaaaaccatttagaaaagcatttttcacatccatttgatacaatttaaaaccttttgaagcagcaaaagccaacaaaagtctaattgcctcaattctagcaacaagagcaaaagtttcatcaaaatccaaaccctcaacttgtgtaaaaccttgagcaacaagtctagctttatttctcacaatcaaaccatcctcattntgtttatttttgaaaacccacttggttccaataacattatgtccagaatgtggttcaactaaagtccaaactttgtttctctcaaaattttcaaggtcttcatgcatggcgttaatccacgattcatcagttaatgcatgtgacacatctttg

SEQ ID NO: 49261 - DNA, 531 bp, Oryza sativa
agcttggaggtctcccgacgtggctgatccccacgggctgggtgatcccggtttttaatgtcttgggggttaagtgtaccccctctgcagaagttaacaaactgttcgaacagccgtgcccacggtcatgggcggatgtgaagggattcctaacgtagttttggttgtctactggttgggaaattgctgttgtgaaaagggggtcgatgtttgaaaaatcagtagctgacgggatcagctaagcccgggtgggcgtttgaagagttgttggccccggaagccctttaaaaagctgttggcccgatggcaaccctgtttttagaatctaggactgatgcattgcacatactcccactggacgagacgccctgtctcatccgtgtctgttgacaaccacttccttatttggctttcaaaaaaagcgcacactggtgtcttttagaaaacaacctgtttttctttgaagactggaattaaacaattattatcccctgggttgctgaatatctccggtattgtacccttgttttt

SEQ ID NO: 49262 - DNA, 116 bp, Oryza sativa
tacacaagagaagagaagagctactagagccaaaccctctgatttctactctattcccattccactagcttgggaacactaaactaaactcgagagaatatgagagagctttgctt

SEQ ID NO: 49263 - DNA, 633 bp, Oryza sativa
agctttgtaacactgctttatgcaaaatctgtgtgaagcagaagcaacatcgtttttttttgaacttttgcgattgattcatagcaataggtcagattttgttttctttttgcaaaagaagaggtgaaaatttttcatccgtcctaataaaaaataataggtcagcaacggtttgcacgttgctacgtgataactaaaatggactttcaactcctcaatcatatggctggggagattgataatcttccaactaacctgcatgaacgtattataactacaacgatgaaatgcatattaatagaggagaattaaaggtcttttaacttcaatttcacatcagctgagacttccgttttgcccttcaacgatcaaaattcatagaatgatgtggctagataaatgttgattgtgagagcacttcagccagttgcacttccattcactacaacaaaaaccttatatagaggctcttttgtagagacaattttcaaaatgcctttaatcaaaatgcttctaagttttgaagctctatagtttagagacactttttagaggcactttgaaaattggcctaaatatttttactctaaagacactctagagacatttttaggatactttgttaaaattatc

SEQ ID NO: 49264 - DNA, 344 bp, Oryza sativa
ctacggaccgataatgcaacaagagatggaatcctctgtttaacataaaattgaggtgtcagttctcccttgaggagataaattgaataccaaattggattaatctaataatagatgtgaacaaacctttgctttaatattcagcaggaaaagagtaatctcttgatcaggtaaaattagcttgatacccaccagatatcctgaaagaactccatagaacccatatagaggcgtgtaactgccgaatcaaatattctttcattgtcaagattcattcctgaaaaacaagttacaaagttatatattcactgtatattctatattggataaaatcactaaattta

SEQ ID NO: 49265 - DNA, 686 bp, Oryza sativa
catgcaagcttatatgccgctaactgagggcaaaattagcggctatcttccgctaatttttgcttttaatgtcatacattatgtagcggcaaaagtggtatttcttagctgcttccctttctagcagctatctccagctatagcggcagctatagctggttatttaaatccttgcctaaaatacaagcacttttagctatgaatctaagttgttatattttgggatggagctagtacttattctctcccagaactttcgagagaatgccatctcgtttctggcaaatctatatatcttttaaatttgttgacaagattgattaatatgtgatatcaattcttttataacttagagggtaaatttaaacttgcacgtttggagggtaatatatcatatattaatctatcttttgttcatacttttactatcacaaacccaaaataatttcattttcacccattgcgcgcatattaaccacacgagagcataagatgaaaatgccctgtactttatctaatcctaaagtaattggccctactctatttagggcaatgcaaggtctctcgctttacctgggcctaatgtatttatctccattgttcataattccatgcaacgatgtttaaaaaaatgaggtattttgaataaaaaaaaggtgaaaagggaactactttgagaggggaaa

SEQ ID NO: 49266 - DNA, 125 bp, Oryza sativa
ctaggtgctgcgatcgtgcttgtcaactcgtcgacaaaatgtagtttacactgatgttggaggcggtccgctggggaagtctgttcagcgacatctctacttcgatgcttctatggtcgattcaa

SEQ ID NO: 49267 - DNA, 358 bp, Oryza sativa
agcttttaatagcagaacacccctcatcgaactcattcagttcggtgaacatgctctgggtgctggcatgtaagacaagattgcttactccctccacaaagggaataaggtctgcccgggtctcgaaatcgccatgggcgaaatgaggcgccacaagggaatactccgaagcagatgtttcgacggccgcacccttccccttcgccttgactagcggcgaaacaaccggctgacgcaaaaggctaccgaagaccctcgccccagctgtcaagacccgttccgcggaggctgaagccccggcggcggcgctaccttctgctccatcaacaccaaggaaaagaacgggggcagtcgaaag

SEQ ID NO: 49268 - DNA, 247 bp, Oryza sativa
  unsure (1)..(247): unsure at all n locations
nggcgatgctctggctcaccaacttctccggcacaacacttgtgatacggttcctggcgagcgacacctcagccaaggcagggaacgcgccgaggttgccgagaaaaacctgcaacgtgccgttgatgttggcattgctggcattgaacacccttagctccgtgagagagaggagatcctaccacagaccccactcctcgagtcttgggttgtcgctgatggagaagtagtgcaactcaagcatgcc

SEQ ID NO: 49269 - DNA, 476 bp, Oryza sativa
  unsure (1)..(476): unsure at all n locations
agcttatttgattangaaaaactttttagtttggttctattctatgttctatatatatccaaatgatctgcttatcttgaggaaatggttcagattttatttgattagaaaaaaaatgttttattttaggggttctttcattcttttgttggtcctcttgccccgcacaagaataatacgtgtattttttctgaagcacataagcaatctaaaattatcccaggtaggaaggggganaaaagcgtaaatagcgatatgctaaacgaacacaacctgatacccaagcttgtcacagggagttggtaagaaagaaacaggatcaaaagattcctcccaactgccaccgggctactgctaaccaacaaacacctgcttttgccaccactaatttaattccaaatccactcaccaaagagatcaaaatcgagttctaacagttcatatgatttttgtgaccgtttcatttggataattat

SEQ ID NO: 49270 - DNA, 375 bp, Oryza sativa
  unsure (1)..(375): unsure at all n locations
tacgtgacacttgatactcagcttgaagccaaacattaccttgngccgcaagtttgcgatgttgtgaacacgctgagaaagctgctgaagaaatgccttgttggaagattaacataagctccactgctgtgctttcatgttgaagaccctgtctgatggtgttccaaatctctgaggacaattcttgcgaagactatggcttcgatagaagcggtcgtggctgctgctgctgcgcgcaagactcgagctgcccctgctttctgcacgagacccgcatggtgcactgcgtgccgacctccagggattgtgaactgcattatgttgggagtattctcattagatctataagtatgttttgcttgataggaaaaacat

SEQ ID NO: 49271 - DNA, 621 bp, Oryza sativa
agcttgactacccaatcacaagcacaccgactaggggtttacccctttaagttctcatcctagaagaagcaatcgaaacccgcatcactcaaagactaagtctaaacctgcaaacaaaaggttatatcaacagcaagagtcagtacattagttaatgtactggcaacaagtcaatcctaccatactacatgtaaggcatatattcaaaggaaggcaatatgtagttcaatttcagcataaagcaagttttgtttcgtaattcttttgtaaaggagttgatgcttcaattaacaaagacaagttttaaggttcactattaacttcttcataattccgtcataatcaatctcttattgccatacttaacaataagtcataatgtatcaccacacacacaactcaacacatttatcaatttcaaaccaatgtcacatgatcacattcttaaaacatagtctatactcatgacacatcaacaaagcgctcatgaccgtgatcacgggtaatcaattaatttaaagaactgtgcaaagtttgtacagctttacccacattgaatgaactctctaccctggttagagtatggaatacttcaccaaactcttcgtgtacaccggcaac

SEQ ID NO: 49272 - DNA, 390 bp, Oryza sativa
  unsure (1)..(390): unsure at all n locations
ttattctacttctatcttttacnatttcaatacggcaattgtttcgatgctaattattgcctaccattatagaaattttactctaaaaaatttagtgcaaaacttgcaccatggtaaagaaaaattacttcaaatcaaactagccttgttctttacagccagacctggccatggcacccccaaaaaaaaaattcttcgtaaatttcggccacccgttattcttcggaaattataatcgacggcttttacttgttagactgatgtaagcacaagcttttttttttaaaaaaaaactgttttgtggtttttttgcgtgttccataattagtttatgggttagaatggcccctgacatttcattttcactgctgacgatgactcaacaaatgg

SEQ ID NO: 49273 - DNA, 632 bp, Oryza sativa
agcttgcagtactgcgtagtgctataagcttattttcttttcattcaaatttttcttttctaatttttttccttgctaacataagatcccatatcttcgggtttttttttcatattgatagtcttatatacgctatgttcatttgattaatttcctcattggacgtttttcttacattgcaagtgttataaacttgagctatatatgtgaaagcttgtacaagaagatgtctgcctataacatggactgactttattagtctcataagatcggtatatgtcagataacatgacttgaatctcaaataatccaaaagatatagataaaaactaatccgtttcaccataataaccggatactctagaggcctacacataggctctaacatccctgtattccaagtgtgagtatcggggatattaagaccagagaaggaacaaacgagagtactcaacaatgatagctatgtcctccattgtcaaggtaaccaaagcgaaaagattgataagctctgatatacatagctgtgtgtatagtagtagtgggacgaagcagtcaaagccggatgccgatgataaagtatttgcccagccataaaatacataatgagtgccatggagtgggcacgaatg

SEQ ID NO: 49274 - DNA, 665 bp, Oryza sativa
agcttaacttagtgggtgttgattgaaaaattaagtccccctcattttttatcttattgaggctcttatttatgcatgtactggccacaacatatcttaatcaatcttaactttatgagcctttaaagtatggatccatgagccaaagcttaacttaataataattcgatcctgggacatatctttcacaactatatcaatgtgttatgcagaaaagacacaacatgttgctactaaaataaaaaactgtgttcaattagtgcacaacttataacacagtataattgagtggtttacaccttttgagtggtttgtgagcgctatttaccactcttagttctgggaaatatgattaatcctaacatgctttaaaaactaactgcatcattgactatgcagtaagagattattttggagcctttccatgggtattgctcccctatgtgtggatatagcttaataccaataatctttaataataatcccccatcttataaaataaatgtccaaatgtctctaaacttctgagaccattggaccttaaaaatatgaccctgttacctaaaattggcttgggaataatacaaaacatttttaatatcaaggggttactcgggatttataaaaaaactgccaattttccccgtaaaaagtatgccaatttg

SEQ ID NO: 49275 - DNA, 377 bp, Oryza sativa
  unsure (1)..(377): unsure at all n locations
tggaagaacaatcctatntggtctgatgaacctctctatataaggtgtttgtagttctttcagtgttagaaatgattgtaggtcatatacaaatcgattgaagttgggctctttcagaaaatgaaatggtggttaactgattgtctgagaacaacagttatataatatatttaccagaaccgctaactttcttctcattgtaaacccccgaatattttcttcaacctcaatttgatgtattcagtaattttggaaaaaaaaacacttatagttgttcatcattttgtgggagatttcaggaatgagcaatgtaggcgactactgtcttgttgaaatgctaatgctaaccttatatgatcaaatctttacaggtgact

SEQ ID NO: 49276 - DNA, 638 bp, Oryza sativa
agcttgagtgtgtgcgatttttgagctgccactacctagtagtttatatgatcgcgcatattttttgtgtatgtttcttgttttctactaacaatggcagggatacgccagataattggggatagctgtgctcaacatcgacatctttgtcgagacatgaggagggatcaacatgaccattatgaggtaagtgatgatgttctaagtaagatcaaatctgcactgccttatttcgagggaaactatgatcctcgtgcttacattaattggcaactagcgggtgatagtgaatttcaaaagcatgtcttgtcggagaaacaaaaggttatgtgtgcctgtagtgttttaattaaacatgcttctaatgattggaaacatctttgtaggtataacaaaataccacaatcttggaaagacctgaaacgatatttcagagatgttcatgttcccatgtattatgctgacattttgttcaacaaacttgccatgtttaaaacaagataccagaactgttacttcatactatcatgatatgcaagcttggttattacgttgtgggttaaatgaatgccaagacgctaaagaattgaggttcttatgtgggctttacaaaagaaattcaggacatgtcttgattg

SEQ ID NO: 49277 - DNA, 463 bp, Oryza sativa
tatctagaagagttcgagttcaagaaggatgcgacatgacttttatctattaattaggcatagtttgttagttgccttttatctttaggaaagcgcgtttagtgtccgataaggactatatcttttcctttttagttactttcttgtccgacaaggactagtatctccctatgggtataaatatgtacacccggggtcattgtaatctatcaatctcgatcaataatactctcggcgcaacgccaccctcttccttgaggtttttacttatcttccggcgaaacttgtgcacctgacgcagggctgcatcggctttcgatctccagcgaacgggtaagatctacattctgtcgagctctggtgaatctgtccgctacattggtgatgttcaaggctgcatcacttccaactcttggatcgctctgcgttggttgtatatttgctacctgagatctcatctatc

SEQ ID NO: 49278 - DNA, 394 bp, Oryza sativa
agctttgctgttgagttagtagggtatccgaaagtgaccctgaattacagataagtaagaccatgcaaattcttaacatgctgagttgctgactcagtagtttgctagccgtcagtctgtcacatatgcatgttatgttaaacatttagttgatgttttgatcttgattggtgtttacttgttttaacataatcctgagtactaaaatattaccgagttgcgtaaagttatgttggaagtctttcacatcttcactgacataacgataaacatttactagttgatgtcccaatcgttgattaatgctgcaatatctaactctttaagtgctatgctcaaaatctaactattcccttttcgaatgctatcttcacatgcagctttcaagcgcgtc

SEQ ID NO: 49279 - DNA, 257 bp, Oryza sativa
  unsure (1)..(257): unsure at all n locations
ggaacaatttacctcagacgacatatgaagcgaagcaagtattatgtccgttgggcctggaggtcaaaataattcatgcctgtccaaacgactgcattttgtattacaaggaatacgctgacttggatgtctgccctatctgtggnggatcaagatacaaacgagctaagagtgaaggtgaaggaagtaagtctaagaggggaggcccagcaaacgtggtgtgtgtatctccaattgcggagtgcatgaagagaatg

SEQ ID NO: 49280 - DNA, 454 bp, Oryza sativa
  unsure (1)..(454): unsure at all n locations
agcttgatgacgagcacctcgtccaaactcactcattccactaatggnctcaagtagtgtcacaccaaaaccgtagacatcattcttcaaagagacagaaccttctataatatattctggtggcatatagcccctaaatatcacaaaatacaaattcagatcctatcaagggtatgtagagaaaatagaaagaaaataatttcagaggccacgaatgaaatgccatatatcttacagtgttccactaacgcttgcattaatgtagtcatcttgtaattcttcagataatccaaaatcaccaatcttagggttcatgttaaaatccaaaagtatgttgtctggtttcaagtccaaatggactatatgtttctcggagtgggtgtgaaggtaaacaactccctgggttatcccttcaattatttttaaatcggaagaccaatcaagcaacccccct

SEQ ID NO: 49281 - DNA, 577 bp, Oryza sativa
agcttcacaaaaccccacccttatgcaatttgagcatgaaattacttaaattttttaatattgtaattgttaaatcactaagattgatagtgtaatccattactaccttaaaaattttgtttgagatatgctgaaatttatcaagatttcaattaacgtggggttttatgaaacactgagaccataaaatatgtggttatgtgccacacgttataatattaattttttcctcaactttgaccaaaaacccggtgttttttgaaatttacttaaatctgaaagcaatataacatcattgaaaaaaatgccaaaactcatttggtatgaagacagaattgagaaatggaattgaggatgaaattgctaaacttcatgaatcaaatcatgttccaaaagtgcattgcatacaaatgcaccgtatctctcactggcttgttcccctcaaaccctaaaaagaacgatctttttgctcttttcttttccattgtttatatctcctatctttctgccttttatacaatagagtacatttctacccaatacttaagatatgatcccagaaaaaagggacttggat

SEQ ID NO: 49282 - DNA, 375 bp, Oryza sativa
  unsure (1)..(375): unsure at all n locations
ctgaagaagacaactaggcagcctccctggactcttttgattatctcagctttaaatggatagcagctatatctcttatcttttggntgtatgtttgtggaaccttgatcacctcggtgtgatgtgtggctgtcacactatttatgttactacttcaagcactgagtatgatatgcttgacatgtattcacggtattatgttcaatcaaggctgtttgttataaccttgagtttctcctgctatatatatgtactcgatgaatagacaagctagaagtatgaacattctctgttggaatattcgggggatgaactccacagaaaaatccttagccttatatcagcagatngatatcagtgcctgccacatcttat

SEQ ID NO: 49283 - DNA, 450 bp, Oryza sativa
  unsure (1)..(450): unsure at all n locations
agcttggacagaancccnaactgccgttctgtgccctgtgctacccccgcttttttttttttttcgccgcatcccgagctgcgcttgcaaaattagttgaggggaaatattcccggtatccttctctatcctttcccccaagaattcgaccttatcccgaaaaaatccacgcggaatcgaattcggttttgagtttatctttccatctaaccctctgtttttccggctcaaatcctctcggttggagtccgatctcttcaattcaagcctataaataacatcccctaggcgccctatttattttgcccctctccccagctctcttgagcgctagagtgccgccgtcgtgccacccaaacctgccggcgttgaccagctgcgaacagctcttcttgcaaccgttgcttgcatttgtcgccgccggctcccgttatcctccgctaggtggtc

SEQ ID NO: 49284 - DNA, 696 bp, Oryza sativa
  unsure (1)..(696): unsure at all n locations
agcttccttctgattgctggttgaagcggatgacggtcttctgcttggnattttcctctttatgttgattgctcttggctcggcctggagtangttggggagagacacaacttcttccatctacgacaattctttgctgaggctgtcggtgcacagaatggttgctatgatttattgcacagtcaggtgcagcacgaggagcactggtgcattgtttctgctatgggttctgattaacacgaggcctcacgggtacggcgtttgctccagtgaccacaatacgattggaatgtctgcttcatgtaaattggcggtaatgtggaggtcgattttgccttggttggggacagtttttggagtaatgcccttcttcactgcagttgtaacaaacaataactttcttacactcgggttcttcatcttgtacttgatttctcagctgctgtattggaacttccaaaggtacaacgcagatactggcctctgtcttgtcagctggtggctggggctgaaattgaacattgaccccttgtggtagtgccctcattggagttggagcttgtgcaacgccggctataagactgctttcggatgcatggatgacaattccgtgagggaccagcttcttaattgcaggaagttgcgggactgacctgccgccacttacctttcttcgttttgggcactcgtccgcga

SEQ ID NO: 49285 - DNA, 308 bp, Oryza sativa
ctcgaagtcggtcctcctcgtagcgttcttcgcttatattactaaagcgcaaagactcgaatgcgacttcactcggcaacattgcttctgccccatagacaaggaaaaatagtgactggcctgtggcccgactgggtgtagtacgcaaagaccaaagtactgatggtagctgttccacccatttccagcataagagtttatccgggcaaaactcgcgcttaatctcttgaagatattacattggctcctccacctgtcattgctatgggatgtcctctgaggcatttcaatcttaattacaagtcttg

SEQ ID NO: 49286 - DNA, 229 bp, Oryza sativa
agcttgctcgggcagctggaggaggaagaagacatatatataggggtgggactttagtcccggttggtagcaccaaccggggctaaagatcaccgggatctttagtcccggttggtattaccaaccgggactaaagttactactttattcccgggtggtaagatcccggggggggctgacatgacctgacagcattcgaaccgggactaaagatgatctcttcccctgg

SEQ ID NO: 49287 - DNA, 314 bp, Oryza sativa
  unsure (1)..(314): unsure at all n locations
ctcgtntcaatttcccgagaaaacacctaagtatatatcctcaatggaatntagcatgaagccccatattcgtaatatttttctattgattttagtgggttcaaacaaaatgggcaaataaaaaacgaaactgttggggatgtgcgagacttaccacatatgtgccgactgttgattgacaactgtagattcgatggagaccgcatctgcatctctacgaacacgatctcttccggtgcggcatttcgccgaacacctctgcgtcactccctgtcatgggcctgggcctgtcnagtgagctatgttgattgggc

SEQ ID NO: 49288 - DNA, 623 bp, Oryza sativa
agcttgtttattacgttgtggtttaaatgaatgcgaagaagctaaagaattgttgtttttatgtgggcttaacaaagaaattcacgacatgcttgattgtcaaagatatacatctctttctcatttgtacaacttgcttgcaatgctgaaagtaaaatagaggaggacatgaagaagcaacatgctatgtttttgtcttctattactaaccatttgcaggaagtgcataatcatgaaaaggaggagagagacatgaaagagccgccagtcccattgatcacactcaaagtcgaagcacctccattatctgaagagggcatcaaaggtaaacttaatggtgctgaaattaataaaggtgagtgtggtgttaatgaattgaattcgtccactttttatgctatagcagagcaaccattagtggaaccaactgctggaattcctttgtcacaagttgatttactcgctgttctttgtgataaagaagaagtgtgtgataatgcttcacttattatatccattccacaactagtgaatgaacatgctatttctagtgtttctttatgtgctgattttaagcatgttgttcatattgctaatgaagaacaggaacgtgaattgctatc

SEQ ID NO: 49289 - DNA, 341 bp, Oryza sativa
  unsure (1)..(341): unsure at all n locations
tagccgtggatatccatatccacgaccgtgcgtcttatttatttaaaatataattcnttttaaaaagatagtcacacatagagtattattcatgttttattatctaataacaataaaaatactaatcataaattttgttaaataaaacgaacgaccaaacattagacattaacagtgttaaaccacatttatgttgggacaaagggagtacttacccgtagcctcggcggccgacgccccatgaaggacgagagaggacatgaggcacaaaggcagcgggattgccggccgagggcagtgcgcggcggtggcgccagttcataagttgtagctagcgactg

SEQ ID NO: 49290 - DNA, 528 bp, Oryza sativa
  unsure (1)..(528): unsure at all n locations
agcttgcctcttgatatgtcaaaactactggtgttttaaaacatagannngatttaatcctttttacgggtagggcagtgacactatacttaaagagaattagttaattacaggctcaaagtttcaacgcacatacacttaacgtgactcatgatgtacaaggagaccactatggaattttttttcctaacaatttgagctacaaccagctattctttattaaaaacaaattagaggctagtctttattaaaaagaaaaaaaatctttcaatacgacaagcaacaaatattattttcctcatgaaaatatcatcatttattttccttgtcttgttatctatcgatgatctatgaggtacacaacaatgaaaggaaaatagttgcgtgttccatcttagatttttttttttcaggaagagttcaaacaagttcatccactagttctataattttgggtgtgacgagatatatggaccgggaagcaatactgaataacatgaattataaatatccttttgagcacttaca

SEQ ID NO: 49291 - DNA, 200 bp, Oryza sativa
atgccctgactgtatatctgagaggcgaggtgtatactgcatgcatcactacaatgcaacacattggctgcaatttgccacaatggaagtacttgtgcatacaaacaaatggtcaaacggctgtctgctatgtatatggttatatgaatcacatccaagtgtgtacatctatccagcaacaatacctgttccatcacact

SEQ ID NO: 49292 - DNA, 473 bp, Oryza sativa
aactttccaaattcacaaaatcatcttagaggataatatggggttttttctatttttcgggggtgcatggccgggtttagagttcacggtggtagacgaaattcaaccaaaagtttggggggtatatttggactttaaaatgagaagaggattcatcgcgtctcgatctcggcggtgcctttcatccgtccgcccgctggtgtagtaatgttccccaacaaagcctaaaggagatcatggatccaaatcaacggcgtccatgttaattaatttgatcagttggacgcatatttgcgttcgtaatgtgggccgaaaactgagctggcccaatccactatacaacgtttgcatttcaatcagttatgtcaataccgtacagcaatgcttgttgcatgttgtaagaaattccccaatatgaacgaaatacacctaattaataaagacactaagacagtgatattaattaatttttt

SEQ ID NO: 49293 - DNA, 692 bp, Oryza sativa
agcttatcaggtggtacagagcttatcattacaattgcatggtcttttgtttttttatgaaaaaaaataagaataccacaggaggctcatttcccttaaaattgcaacattggagggtatatctgcaaaatatattactcaactactccttccgttccaaaaaaaaaggcaaactctgggtttccgtgccaacgtttgactgtccgttttatatgaaatttttttataattagtatttttattattgttagatgataaaatatgattaatactttatgcgtgacttatatttttaatttttttttataatttttttaaataagatgaatggttaaacgttgggtacggaaattatgtttgccttttttttttttttacggagagttagaaaactactacccccgcgtggccgcgtgtggccgccggaccaattcgcgtcctgtgccttttcctgcccatttcccaccaccaccacgtcacgtcgtcacccccacatcccaagctaccccaccgtgagccccacccacttccccaccggtttgtaggaccaacatccactggcccccaccgtgttatcaccataagaccgccaagcgcggtaaaagattcacgccccttttgtccaccatttttattcccttattttatttaaaggaagaaggcaccaacaactcgggaagtctcctccttcc

SEQ ID NO: 49294 - DNA, 348 bp, Oryza sativa
  unsure (1)..(348): unsure at all n locations
atactcaagcttacggtgtgcattgatctttgagatctaaataaagctactctcctaatgatgggtacccaatgccgattgccgatcaattggttgatgctgcttcacgacataaaattattagttttatggatggcaatgcaggttacaatcaaatttttatggcagaagaagatattcataagactactttcangtgtcctggtgcaatcggtttatttgaatgggttgtgatgacttttggcttgaagagtgctggtgctacatatcagagggccatgaattatatattccatgatttgatcggcttgttggttgaagtttacattgatgatgtggttgttaagt

SEQ ID NO: 49295 - DNA, 696 bp, Oryza sativa
agcttatagtatgaaaataggagctcttcttaccagctttgctttctctttatagacaggcttactgaaactagcattagcagcgcgtcttgtcctcagtcaaattgtggattcaatcgcgcggtttcatttttcttctccaccacaccaaataaaatagtttaataataagacacaaactagatacggaatcagttcaaaaggttgaaaaaggctgtagctcaagtatgcatggaatagcatagatagcagataaagaatagtttagagaaggaaagccagtagagtatgccttggtttaagagaggaggcatctggtataaaaggcagagcaaggaggtttgaactggtaagctgataaacgagcgtcggtattggctttttgatagaggaaaagtgagtagtatttctccctgaagggaacaagataagtgccatcaaacaacgaggggtttcacggtcgtgagctccattccaattcaacagattggtgaaacaacctagaaaaccattgtcccctcaaaccggtaataacttgtccccgctatgcttcctacttgtcggcctaatacgctatcttatccgcttttattcccgtttctaattcggtatatactaaatgtgccaaagcataaaacttatggaaaaacgcagctaagatgccccggcgcacaaccacatccaatccgcctgggg

SEQ ID NO: 49296 - DNA, 349 bp, Oryza sativa
  unsure (1)..(349): unsure at all n locations
cgagtactattattggtttcttcttcctagggcttattgtaccatntctaagacgacaatgaagttgtcatggatacatatgtttcttatgaagcctgattgcatggggtcaattaactcgattatttccatctgtaacctgttggttaaggtcttgctgagaagtattggtacactgtgtaacacggatataagtctggaatccttgatttgaactgcttttgctgtatttggtaaaagggtaatataagactgattaactctatacaggtcgatgttattgtcaaacatgtcttgaaagaatacttgtagatcaggcgataacttattgaggaaacgcttgtaaatt

SEQ ID NO: 49297 - DNA, 690 bp, Oryza sativa
  unsure (1)..(690): unsure at all n locations
agcttgtaantttcaaagtatcagctcgcttaagagaactcttttttatatttttcagctgttgcttaatggacagcggtgtgcctaatccgatgttatttccaagtgaataaagagaaccaattgttccaactgtgcttgacatgcctatctttgataacaaattggaaatagctcctaatatataggccaagcatgaatcattattgttctggaaaaaaatgaagcatgtgttaaaacagccaattgaagagaagcattcagctcatactaatatttaaataacacccttgaacatagtagtataatgcaccccgaaatttgtttaatatgtacaagaacatgtaccaaaaatattaactgacttatacacaatctcttactcctatccaataatatgactttggcgatttgattctgataagccgtggaattggcacatcagttttatcccctaaataactaccactttggatatacccgttcagacccttatccaccttggcagtaaccaaaactacggaagagaacacattaagtggaatatatttttattggtgacaactttctttgaagaaattgtttcttgctgacaattgataaaaccccgtgataactgggtacattttccccggttccgaaaaactgggggcctgcgagtgccaaattccaaaaaaaattttccttttt

SEQ ID NO: 49298 - DNA, 97 bp, Oryza sativa
cggtcaacccgtagaggcacatcgccaagaacactatctttattatatggtgatcgtctcgtacgggaagccgtcgtcttcattcccgtcgtctaat

SEQ ID NO: 49299 - DNA, 510 bp, Oryza sativa
  unsure (1)..(510): unsure at all n locations
agcttaaacacaaccaaatcatctcgtgaaacattttgctacaacgtataaaacaacggtttccaaaaaaatcgggcgatgtttcaccctatataaaaataatgtttcagcaaatagcgaaatgatatttcaattcattgcaacatttgattcatacatagtgaaacatcacgagtacacttgctgaggcattgttggtggaaaaaaataaagcggattcccttaatatagtggtttcataatatgcgggtgatttgttacaaccgcgcctgtgaatggggggataacgcggagcccgggaggcggcaagcacccgatttttctgctactgatcgggcgccggatcactggcatttccataaaatattcgtggttaaacttacttcctccggtttatattataagactttgtagcatttgccttattcatatataatctgaaacagaggtagtagtatatagttaaaaatgatagcanactanatatttgagatctcaaaagaaactgat

SEQ ID NO: 49300 - DNA, 461 bp, Oryza sativa
  unsure (1)..(461): unsure at all n locations
tagctccactagtttatcaaccaatccaaaanacttaaccatctcgcccttatcggcataacgagccagcaatggtgaaacagtctcggagcttggtattatatcctcctgaacgacaatctgaaacatcttgtgtgctttatcctcccgctctatctcacatagcccgccaatcagtgtgttatagatccccaggtctgcacggtaaccagcatccaccatctctttcaacactctacaaccatcgctgacccttcctgtggagacatacccatcaatgagagacgcatacaccatcctgtccaccagcaaaccctttctcctcatctccccaaacaattcttctgccttctccaccattcccgcattgcatagcccagctatcattgtggtgtaagccatcgtatctggatccacatgatcccttcttatcttctccacaccctgatgcaaccctcata

SEQ ID NO: 49301 - DNA, 388 bp, Oryza sativa
agcttgctcgactttaatataaatatccttcaactttagatttgaagggccatatgcctttctacctacataccttaccaatgactatacatatctaaaaaaagacttcccactacttgtgacctctatttgctgggctggttgctccacaagaaactgggatccccatctgttgaaatgttggtcattcaaactgctcaagacaactaccagcatggactctttgcgcaaacggttttttaaaaacatagcgaggcccaaaaataatatgaaacggacaaattttttaaccctgaatataccacatcacaaaacagcgtgcaagcttattctttaaccactttctaaaaaaagggccggatgtctacatggccgaatgtctcgcctt

SEQ ID NO: 49302 - DNA, 275 bp, Oryza sativa
tgcttgtccggacgtaattatgagcaacatttctcttctcttggataggtagggccggctattgcatacccacggcggtacagcaccttaaatatcttatgggtaccaacttgagatcttctacgcgcctgccccggaagaactaattgatgttcgtaacgaaccgccattgcttgaactataaatgaagattagacgatgttagagatagagatactagaattgccagttttatgagcacccgttgtgaacaggagaaatcgtctttattaaca

SEQ ID NO: 49303 - DNA, 556 bp, Oryza sativa
agcttactaagatctttatcgtaggcaaagacttgcgatcgatgtggatctgtctgtctgtctccctttgggcacttgtgatcagcttttcaagttcagacactgcaaatactatgtagcacacagaacaatggtcatgcactcttttgtctctactactatcttttgatccttctaatcgatcttacgtgcactctcaacattgccttttatgccgttccgcatgagacgattgctacactgagagcttagctaagtttaaagtgtgttcactgcgcttttgtgccaaaaaagcagctggaaaagcagcaacaactttgtcgtatgaattggatggaagtgggaaatataataaactacagggccacaaggttattcctcaatttcatcgtataatcagataggggtatatatactgcatcgacattgctattccctccgttttacaatgtaaaactttctagcattgtccacatacatatagatattaatgaatcaaacccatacatatgtctagattcattaacatctaaatgaatatggggagtgctacaaa

SEQ ID NO: 49304 - DNA, 645 bp, Oryza sativa
  unsure (1)..(645): unsure at all n locations
agcttctgggaccggngtatatatataatttgtatggatagagataaanaatttctttctctatatggattagttatatcctaatgtttctctaaacaccaggcgtagtggcactgtactgcaacctcacccaagaacatgtttttggggttcagacttgagagtatccattgctgaatttgcctcaccgcaagtttagtcttgcatttcacaaaattgcaaggatagctaacaattttatcacaaaaccataaactttgtggccgtgcaattggatatgctctctttgctcagaagcttttgaagatactgatcacctgttcagaaactgtgcctttggacttgatttgtaccgggaaacttgacaacccggccgacacagtattctcgattagatgttgggaaaacaagatagccaaaacaaatacggcacaaaaggcaaaggagacctctgggaatactaatcaggagagagaaacttaggtggtgtttgaatcttcctttaagatgaagaataaatgtttcacgtaaaacgaggtgataatattatgtgattaattaagttctaatcattacaaactttgaaaatatattaatttgatattttagaacaacttttatatagaaagtgttcacatgaaacta

SEQ ID NO: 49305 - DNA, 555 bp, Oryza sativa
agcttgagcagttccacagcaagggagacatcgagagcggcgacgacagtgactcaaattttgttcttgagtccttccacccccctgagcttgatcctgaggagatttgcaacttggatgtggacaatctgattggctgtggaggcactggcaaagtttataggcttgaattgagcaaagggaggggtgttgtggccgtgaagcaactatggaagcgtgatgatgcaaaggtcatgaaaactgagatcaacacacttgggaaaatacgccaccggaacatcctgaaactccatgcattcttgaccggtggggaatcaaactttctggtgtatgagtatgtggtaaatggcaatctctacgatgcaatccgccgtgagttcaaagctgggcagccggagctggactgggagaaacggtaccggattgcggttggaaccgccaagggcatcatgtatcttcaccatgattgctccccggccataatccaccgtgacataaaatccaccaatatactgctggatgaggagtatgaagcgaagcttgcggatttcggca

SEQ ID NO: 49306 - DNA, 216 bp, Oryza sativa
  unsure (1)..(216): unsure at all n locations
tctcgttagtaggtactgattggacaaaaggaactatncnttttggctttgtctgctctagagatttaactctatcgattgagttgtggcatggctggatgcctggattactcgttgtagcatgagatcagttggcatgtatgtcaacatctaaacggcagcctgaataacctcccagaaacttcataacgacattcttactcattgcaatttgca

SEQ ID NO: 49307 - DNA, 580 bp, Oryza sativa
  unsure (1)..(580): unsure at all n locations
agcttgacgcgacaacgtgccggtggtcatcgccggcggcggtggcacccgttttctttttctgaggatgctacctgtgggaagccggaggcagcaacggcatagcgggtcgtaaaaccaccctttcctccctcctaaagtacggcggcggcgcgacggccctcgacgacaactcctccgcgccgccgagcaacctcgacgccggcgaggggctcccgctccgtcggtcattctgaaatcgaaaacagcgacccgtttcaataaaaatcaaaacttccataaaaaaaacagtgtaaatcatacagggataggaatcaaaaacagaatatattaaatatggaaatgaatgattcatccacctcggaatcggcgtcgctgccgcggctgtccacccagagctgggcggngctcattcatttagtattgtcgccgtacttcgccctcgcctccgcgtcttcgccgtacttcctcctcatttcggggctccttcttgctcagcctgatcactggaaacccgacaccccacccagctgtcgaaaaaaaaaacacccaccgaattcgaaaggaaaccgggaacatt

SEQ ID NO: 49308 - DNA, 168 bp, Oryza sativa
ctaagcttgtcgatcacggaggatgtcaagcccatccgcaccaatgtgctctgtgtgggtgagtgcatcatatggagatcagcatggaagaagctcatctgggtgtgggcaggataatacattgtaaaggacgtggcttgagtgtatttaggtggaccgtgagcacct

SEQ ID NO: 49309 - DNA, 652 bp, Oryza sativa
agctttccaataatatataattcactatttaacaaaatatatttataattatttattattttatatcaaatgattagataatagttaacctaaatagtgtgccaataaataaaaatagatattgtacagtagaataattatctttaatatattctgtcactatagcaaccacataaattaagtataatcaatgtttgaaattaatggatatatatgaaaatattagtgccatttattaatctatgtccaaatataattaaacccacgacttattagttatttaaatggagttagccttataattattaggtaagtaaaatatagatacacatagatctgtcctaagcttgtttatggcaaataataacagagctagtgtgattaaatcacctatatgaaattaatcaatgacatatcccatataatagcatatagtaggtaaggtgagcaacccttagttaaccaagcagtaagtagaaactatttcaataaaggattcaatatattaagatattatgcacgcatatattgtacatcccattatagatatatgggatcggattaaattgcttatattaatttagaaggagtatataacaaacatgaatagtagataagtactaattataaatcttgaccttatatgttcata

SEQ ID NO: 49310 - DNA, 326 bp, Oryza sativa
tactcagcttatcattgctcttgcttgcaagtcattgaatcggccattttatctggtgtcaatgaactcaacaatccacgattgtccatccccacctgacttcaaactttccgcgagtgtcctaattatcctcccgaggaccatttccacctcttcatcctcatttgtttcaagatccgaaacacgagctcccttgagtaattctagaagcactactccgaagctgtacacatcaacctttgctgttatcgggagacttgaacccactcaggtgctaaatagcctctatttccttggatccgtgacacaatttatttggatcctcc

SEQ ID NO: 49311 - DNA, 271 bp, Oryza sativa
gtgaagcaccacaaattttctcacacatgctggcttgatttatgttaatatacacacacacccactctttctctcatataaaccaggctcaagggccaacaaaaataacactcactgggtcttccttcttggttaattgggatgttcaataattccttgctttgccagaaaaaaaactttccggtatgttggcgattaaacgcttaccgttaaccaaaatggtgaagtggtctgctttgaatgtgtgtttttggtgttttggcttttcccc

SEQ ID NO: 49312 - DNA, 331 bp, Oryza sativa
ttcctgcactcttactactctagtgtcacggaccatattttttcttcgttgatattatgcagtacttttgaagaccttctgtttcatacagcacgccacaaggcaattcatgacatgcccttcgagcacctttatgactgtatctgcaccactctgggttgatgcatgcctatgtgtaatctatcttcaccagcaccactgatctaaatatgcacatcatgggaatgaagatgaatatatcatcatactattcctaccgattcgacccttagcccttgaattcatatgtattcccagaactgctgacatgtgtgagatgacgtctatgctc

SEQ ID NO: 49313 - DNA, 472 bp, Oryza sativa
agcttgatgaaatcctacattttttttagatactatatccacatattaatattcacttgcccaagccataaacgagagtagttagacttcacgtctcttatcaaaggaacacactagaataacatcaataccactgctggctagaaaaaaaaaccctattagattaagcttcaaaacttatcctatgtacttgcttcgaacttgctctgaacttgtgcaacgacaactcatcacatcaatcgtcttggaaactctaacaaccttagaaactttgatgtcagactcatccgagacccgtcctctccaaatccatctatggacatatagcccgcccagaagccatgccactgccaagcaccaccgtgtcgtcctcaactccaggtctgaaaattttacaagttggtcctttttgaaaacttattttacaaatacaccccttagaaaacttaaaccggacatagtcctttttggg

SEQ ID NO: 49314 - DNA, 416 bp, Oryza sativa
  unsure (1)..(416): unsure at all n locations
acacatannaaactcaagcgttataggagttaatgctatagatgatagatagatttcnttattgttagaccattaagcctcctagtgagcatgcgacaacaggctaaaaccaccgatgcaccgaccaaataatcattaacgcgatactacgtaggatcgttttttatatgtattataatatcagtatattaccgtaggatagggatctattagatgctagaaaatatatttttctatataaatatataatatggcgtgtgaagtacaacatattatattgattttgataaatttaatatgtgtttaatgtaaacttgaggatactttttcataatatgttagatccacctgattttaaataatatttattatgattatagtattgagatatcttcccaatatgaactataaactat

SEQ ID NO: 49315 - DNA, 462 bp, Oryza sativa
agcttgaactacaagctaaactgtgaaaggatgacacaaggctattaactttttttacttggtaaacttgaccgccactgccattatggcatcaaacttgccccatttaggaagaccttctataaaatccaatctgacgccttgaccagccttcaatggcacgggtaaagactgcaaaagcctgattacttacaatgctcaaagttggcgttttgaaaaagctgacaaccctgcacatatgtcttaacctaatcaattaccctaaagcaaaataaaagagtcttaaatctgttataagtggctgggattactgaatgtcctcccacaccgctggtttgcagagccaagtaaaccgcccgtttatcctgcatatgttgctcaaaacacatttttgcattgtgtcagattattccttgcataagctgaaaaagcacttgcttatcagaatgaacactctccttg

SEQ ID NO: 49316 - DNA, 211 bp, Oryza sativa
atatagacgttgtcagtgcactgcgatagttttgcagaaattacaatctgacaagggtaccgcgttgcatatctgacctgcctatcatcatccaacataatgtcataccgagagagtaaaccaaattttagaagatatgttgagagcctgcgctctcgatcttggtggaagttgggataacaatttatcgtctgctgaattctcacatgac

SEQ ID NO: 49317 - DNA, 632 bp, Oryza sativa
  unsure (1)..(632): unsure at all n locations
agcttacancccttgcttttgtttatcttaagctactggctggtttctttttttttgaaatgcttaattttacgggagattgagggaattcagaattagtgatttcctatcatgacataaaaaattatttgaaatgattaattctacattaaatcggtatagtacaccactcaatatccatgtgcctatcaatcaagcaggcgacctagccatttttctggacttccatggggaaaatgctaggtagtctcttgctaatattaataccatcatattgaacttacggtctgtttcggaaaaagtgatcatgttgcacacactgatgtacagctcctgataaattccattacagtaacaaattgaaaatatcacacagccaaagatgtgccactcgtaccacatcaaaaaatgataacgcaaaagcaaatacaaaaccatgagactcccaaacccaaagtaccattggcaacatggccacaccacacgtcaataacgtttacagtaacacattatgttcatttgctgtaaccctaggaattttgatgttacaagtcaagccaaagatgaaatttactagacaggggagcccacactaccccccattatggaaatcatctcatacaaactacacg

SEQ ID NO: 49318 - DNA, 398 bp, Oryza sativa
aaccccccgcagcttcaactttaatcccctcctgcccaaagggcggtccccattgtacatttttctcctttttctccggcggagggcccctgcggagaatgatctgatcagctgaatggcataacccaaacgaactgtttttgcttcgagatgactgaagcacactgccgaataggaagtaccgcagctctttgcagtggggcacagtactggtggggctaatgccttgtttggtcggaatccaacttcgactctcagccgtccagggctactttaatgggagctggccttaatagaagtgggacatgctaaaagcggaaagcacgtttgagccccctatctcaaactaaaaaaaaaatccccaaatgctactgctgtgcgtgttgtcccccagtgcg

SEQ ID NO: 49319 - DNA, 241 bp, Oryza sativa
  unsure (1)..(241): unsure at all n locations
tataactntgctgcttgaggaataaagatcatcatgtgctgtatttcanctcaacgttatggtcaagctcgaccatgccaagacgctatggtaccatttcatggcgaacgttatcacccggatggggctcttcacagacacctacgacctcttttgcattacgctggtcaccacgctgttgggttatctatactacaccgacatctccaatccctacccacggacactcccggccaacgtg

SEQ ID NO: 49320 - DNA, 503 bp, Oryza sativa
agcttgaggcattgctttgatctatttcgttccccgcgtttttgtcttggtgtttttgctctgagcaagttgaatttgggttgtttggaaatttggagtctaagtactcttttatttgaaccgctggtttttctctcgccgtgtgtaaggagatgaatgttgagtctaagaactcttgtaagtttggttggctgtgtacatccgtttggatgtagagcccggtttaatccattatctaaaaaaaattataaatttcaaaattgtgtttatttgattttttttaaaaaaatcatctaatatattttttctacgtaatgtttagtagtttttgaagcctatcgatattctagatcgataataataataaaaaataacatacgagatataaaagtgaatgagtaaagggataagaagttagataggttcacgccttctcgatgatatgtaattctctacttatttgagggatcgtatccgccggatgttgtattgatataacaatc

SEQ ID NO: 49321 - DNA, 520 bp, Oryza sativa
  unsure (1)..(520): unsure at all n locations
ctattacgtgacactatgaaactcagcttcgcagtatcgcactgggatttttgatgagggatacttcaactactttggatctgggaagtctaacctgaccagagtacgtgcctcgacaagatcggaaccatcatcgtcaacaattcgatctctcgagatcgaccaagcctcaagatacatggcgtaccaaaagatgtcagaccgtatgatgtcgaacgagtacgcaataaggtgattagtatattggttttttaaattgatctactaatttcgtagatacatccggcatgtatctacaaaggtacgcaatattttatatgcaatttatcgtacttattcagatcatacagcattgtcagatcaataatntattatgtttacctacagcatgtgtcttatacaatatctattgtgcgaatgttcccgatgttaggccaactacggtctaatgctatggctcacactgttctcttctgtacgaatcatgcttggttacnggttacataatctctgatattta

SEQ ID NO: 49322 - DNA, 375 bp, Oryza sativa
cagcttacaccaatgatagactctaccaaaatgaattatattctatacttgagtttggttctttcatttcggaactttcattttataggcactcaacgagtaggctctgtaaccagaccacaacaaacttttggcggacatcccctgaaaaatgcttggactagagaaaagaatcactctcttctttatttctggctgaaaatgcccaatggagcaagaggacaaaagaactttcggtggacaaaacaacttttcatgcggtcccgcaaaatggaggggcggagtaataatgcgatcccgcccgctaagaatgtggcatcgatgccccacgggaccgggtcggtgctaccgtttggggctgcgttctgtgtgaac

SEQ ID NO: 49323 - DNA, 444 bp, Oryza sativa
  unsure (1)..(444): unsure at all n locations
ntgcagggagttgcccaaacttcaatcaaattgtcatgtcttgttcaaatacatagtattaggttatgtcaaatttggtaatatgttgtaatattctggaaaatatagagttgtgactttgtatcgtatctaagccattatctgttaatcactaatgttatctccccgaaatgaacaatttaatatcaaaattcatgagaggaagagcttctaaacagacaataaaaagtctagtttaatgacactgaccaacccattatataccccctcaatacaaggccatatcaattacaacaacatggcaggacagagataaattaatggacattcaccaccatcatgccttgtccctgcacaacagaagaagcatgcatccaagtgcgcctctagactcattaaaacataggcttctcctataccatacttgtctgtcacatacatgcc

SEQ ID NO: 49324 - DNA, 689 bp, Oryza sativa
agcttcccatgtttaggatatgggcccagatcaacagcaatgagtgtccacttatttcatctcttattattattcattaccaagcaactagttaatctaaaagctttcagacagtcattaaaacccattttaccaatctgtcaaagtattccattaaaaaaaattacttgacaactgaatcagtgtctaaattctgacacagaacagtaattacaaattacacaaaaacaacattggcacgacaaactggccacagaataatctgacaatatgtaatacatgttacatgactgttctaaactggcaaatagctaactaccaaactaccatttattttgtaagtaccgtcagcttggtgatatttcacttgcaaagatttggttgctgtatttatactagacattaagaaaaaggttcatattggcttaagtcatacctgttcctgctggacaaagattatacgggtaattgaaaggccatttttctctggtagttaacaatacttggtgtttcctccactcaacatttgtctctgtagattatggagacggcaactacaatcggatgagcacaactgcacaagaacacaatctttcttgttaacaaaaataaagtgatctgcagaacgaattcggccattgtaagaatgccaagctccatggcataattttgagtaacatggaaaaaac

SEQ ID NO: 49325 - DNA, 287 bp, Oryza sativa
cacataaaactaagctgacaaaaatgctatgatgtcctctaaatggtttctttaactagatacatatgtatacgtgactctatatgtgtccaactttgagatcttttatatcatgagatgcatattgatgtatcttgcacccatattctaaagcatgcattcatccttgttatgttcaattggtctagaaatcataagcactataccattctaaacttagtgtaactactctgactgtgttatttattgcatagacggaagtgccatctcagatatattaacatgac

SEQ ID NO: 49326 - DNA, 68 bp, Oryza sativa
agcttcccgttcgcgtccgtgacatctgcagagtttcattccgtagttatgctgcgtttagctacctc

SEQ ID NO: 49327 - DNA, 234 bp, Oryza sativa
  unsure (1)..(234): unsure at all n locations
ntaacggtagcatccaatcccaaaaataaaactgtgctgattctaaggaagaanacagaacttcagtgtcagttgcgtaggtgaccaattgaccacactcaanatacacatctgactatgtgagcaagcatcaatatagcatggttccttccaaccttctctcatgtggatcaaatagagcacgatggatttgggcctcttatgctaagcacatcctacagtggtttaaagatt

SEQ ID NO: 49328 - DNA, 288 bp, Oryza sativa
agcttacaggtggaagcttgtcgctggggatgtgttccaagcatagccacccaacgctcctctcgtgtgatggttggcgatgggggtaggccccattggtgtcctggccaccccccaccacctccaaccctagaggctgtgctgggggaatctcgtcgatttttactccgttgccactatgttgcgacttgcgagggagagggatgaagaggtattaccccctctcttccctgtgtcctcaaaccatacgcctgggctttggtatttcccgtctgtgtcggaaaacgg

SEQ ID NO: 49329 - DNA, 340 bp, Oryza sativa
  unsure (1)..(340): unsure at all n locations
tctagctcctgaactataatcagaagctcaagtccacagatcatgctatggaactccaattacaatggattcctttacctttnttttttcccattcacaaagaacattacagaggttgcacgatctctggttcctctatacggacactcttcatgtatcaaaaatagcaatcatatgaacgactcctaacgcgatctttatatacagagcacaataccatgctcataaaccagacgaattacctctcttatcaacgcacaagggcgaacaattctgttggtgtgccatctggaaagatgaaccatgtagtctctcagatccgccatgttgcctattgtca

SEQ ID NO: 49330 - DNA, 567 bp, Oryza sativa
  unsure (1)..(567): unsure at all n locations
agcttatcaattttgttggagaaaagaanngggttagtcttccaaggttcttttattctgcagagctcccgctgtcggttctttaaagaaaaactcgtagattaggccacccatcaaatataaatgtaatactccattacacaaatttaattttacataagggttcaaaattacattatagtttatttacactacgaattacatctgggtaaatttttagaaatttggaagcaaaaccgtgaacacgtcatcaaaaactggatgtgggctccacgagttcagaggatgttccgaacccgttttgatcgcccacgggccgccgccccgccgtggagccgatccccgccaccgccggcgagcagctgttccggacggcgtcctgctgctccctgcgccgcccccatcccctcgggctccgccgagctcgttcctgcgcggtgagcatccttgccgacgcaccagaaccctcttttttttctctctctctctcggtggacccacacacctctactcgaatttgctctatcttctcttgtagatctgaaagctaaggtttcttttttactt

SEQ ID NO: 49331 - DNA, 380 bp, Oryza sativa
  unsure (1)..(380): unsure at all n locations
tcgcagaaccctcattgatggtggcagtgcactcaatatcctcttcgtcaagactntggatgatatgcagatccctcgctccgagttaaaaccaagcaatgcgccttttcatggagtaattccaggattatccgcaactccactcggccagatcactctcccggtcacttttggcactcgggaaaacttccgcacagagaatatcagctttgaagttgccgatttcgagacagcataccatgccatactcggacgcgcggcgttagccaagttcatggccgtcccgcactacacatacatgatgatgaagatgcctggtgcccgaggagtcctaaccctacggagcgacatcaagcaagctgtcacatgtgacaaggaga

SEQ ID NO: 49332 - DNA, 567 bp, Oryza sativa
  unsure (1)..(567): unsure at all n locations
agctttgtggcctggttcatctgttgcaaattcgcttcaacatgctgantaacttattcatgcttcaggcttatagcttgaatactctgaccgatgtccaaagaaatgctattagggatctggcggagtgggactggtcaaacttcaacaggtaaaactttgatttaatcttttccctagccaacttgatgaatacaaatgtcaagaattaagccatggcagggtcgaaaggacagctggttcatacctacaaaactggctacaaatctctcagcaagcttgtcagattcatcgtctaacaaagagggttcagaacattttatatccttgctattacagntattcatgacgtccaaatctttcataacctcaatctactcgtcacctaagcaacaacaaatgaagatgaaaatactttctgttaataattacattgtatgatgttggtgctgtaaggttttgtacntgtggagacaaatttccggatgtatgcgtactcaacttccagattacattgtgaaattctgcgccctttttcaagggacgtgtggtgcctaatgaatggca

SEQ ID NO: 49333 - DNA, 88 bp, Oryza sativa
tgcggagagtcgggacagcgttgaatgtatgagcggaggtgtgctgtctgctgcccgcgtgggaagcggcacggcggactgtgatcat

SEQ ID NO: 49334 - DNA, 495 bp, Oryza sativa
agcttactaaagacctaggagtatgacttatacgctccacccgaggggtagtctacagactgtctattactagataagactttgagtgaaacttgcttgcacaagacttgcaattcaaggcgtagtccattgttcaagttgtgagtaagtgtagcttggagttctaggtggatgttcaaccttaattggtctccatcgaaccgctggtatataaacagtacattggaaaaggcaaatctcagtgggattttgagatttggtgggggattgttggaattaatgaatgggccttagcccactcgaagattaattctttggaaaatcacaaaagcccacctcatgggatggcatgcatgtggagtttagtaccaccttgcttattctaggagagggggacctccttaaaagggaggatgccctcctagtcgcttgaagcatgtgtggtggagagaagaggggaaacacacgcgcgcgctcgctctgcgggccgggccg

SEQ ID NO: 49335 - DNA, 370 bp, Oryza sativa
gacctatcatactaagcttgggacatgcttcatttaagggggagggaatgtcacgacacctgacatgcctggaggtgcagaacaggaagtcgagccacagatgcatatgaatgctaatccaccgatgctgcgcaagtctactcaggagagtaggcctaatagtatgtattattcaagtgaatggacccactacaaatgggctgggccatgtgtgagggagtgatgtccatggcacgatgctataagagaccgacagggagttgagacagaatcgaacactgtagaaacatattctgaataccgaattcaaatctcttcctggtctatgctgtgttgcccacatcccaaatctcttgctacttctaccctc

SEQ ID NO: 49336 - DNA, 628 bp, Oryza sativa
cagcttcagaaaatacattttatcaaagaactcttctattatttcttatacttttttttttaattatttgggaagcttatttatcaaagtatttaatttatctacataatctatagaaacaattcgctcaataatctgtttcaaaccgagattaaggtgaacttgcatttcttatttatatatgacagggtaaatcaagagggtgacttgtttatcagtacatgagtaacatgaaacgaaacttgacaacttgacataacagctagtacaagacaattggatagctcacaacttgcctatggtatctgatcttttcttatcactggttctgcatatatatgactttcagagccccaaagatgggatgttgcccacatgactgttcttgttcaactgccatgaggcgatcctcctctttctgagccgctcggcgatgatgaacgcccactccagagactgcgatgcgttgagccccgggtcccaatgggtgtgggtatctgagcccacatcgtcgaatgttcccgtgcgtgaccccgcgatgcattttgtcacatttgtccattaatctccgaagcccctctccccgggggctgcctctttttccggcccttcacaaatgccccccccc

SEQ ID NO: 49337 - DNA, 345 bp, Oryza sativa
tctagaaggattgagcggcttcgtctgcggcggtgtttttatcactcgccggccgcgggggcttttcgcgtggtgcggtgggagatgggaaaaaaagcacgggcgggttttgaacggtagcggccgtacctatggattgggttggcctttctggcttcttgatgagtcgagatggtgcgtgcgcgcgtggcgcatgtgtcaagtgtgtcaactgttaagtgcgacactgcaggtgatttctcttcactagcgtgctccctatttttttactctcgttataatacctctatcaatgataaatctgaatgagtatacaatgatgaaaagttacgctgtctgaatgac

SEQ ID NO: 49338 - DNA, 636 bp, Oryza sativa
agcttcaactgcatgctgtattgttcatttgtcccacaatcaaggactaattctttcagtcctttttttgaaggaaaaacttctttactcatcttgctaataccttgcaggaagcacatgtactgaactatatccagtccttgctcatccttaactagctcattgtttatggaacaattcactcatttttcaacattgtaaggatggaagccataaaaaagcttcatgcctattacatcgtttctgggctgtacaattgccattatgcaatgtctaagggtctcagatcctatgccattctccaaccagatttggtttttgctcataaagtgtttgatcagattgaagcaccaaccacttttctttggaatatcctaattagagggcttgctcaaagtgatgcaccggcagatgccattgctttctacaagaaggcacaaagaggaggaatggtgccacacaacctgacatttccattcatactaaaggcctgtgctagaatcaatgctcttcatgaaggggaacagatgcacaaccatataacaaaacttggtcttttcttagatatctttgttagcattcggtgattcatctatatgctgcctgtggtaatccttggtatgcacgatctgtttt

SEQ ID NO: 49339 - DNA, 415 bp, Oryza sativa
  unsure (1)..(415): unsure at all n locations
ggtagcattctctgcgccagaggcactggtnaagaactctatatgaacaattcanaagttatttaccttctaattgcttggtcagagttatgcagctctgctattctgcanattatcacggtttacatattggacatgctgaaaacaacacaactagatctgtgtgcgagagtatagtgcattttntaatgggttaattggatccatgcccttacaacttcttcgattgtgaagaacaccattactattcgtctatttggagacatgtatgtgacacactctagatgtttctgatggtttatatagacttgtggttggggttgaatgttacacatgctatttgcatctgcattatggttgacacatctattgtgacacctggtaccttctgaaaattatgaaatatgcatcatgt

SEQ ID NO: 49340 - DNA, 248 bp, Oryza sativa
  unsure (1)..(248): unsure at all n locations
agcttggcgaaacaagcattatcgtaatcttaattaattnnnnaataaaatatataatttattttgagatggnaatttncgaaaggccnnaaataaagatgctcccntcttattgaactcaaaccataaccgggtataannnntgtcacaaaagagtttctctaatattttaaaattttaaaattgaaaaggttgaataggaagggaaagaaatacaaatgattaaaatagatgggggaaaaacaaat

SEQ ID NO: 49341 - DNA, 411 bp, Oryza sativa
  unsure (1)..(411): unsure at all n locations
tcanatcattgcacaatgtcacaggcgtcttttaatgctgttggttagaaaaacccttgtctaaaggctgtgccgaccaaggtacgtccgctggcgtgtgatccgcanatgccttcgtggatgtcaaggaagagagtntttccaccatcggatgagacgcacttgaggaggatgcagttcggggcctttttgtatagatctctgccgatcatgcagtatatcttggcctgacgggataatttctctgcctccgtgtcgtcatccgacagctcgtctgattccaggaattttattaacggagtacacaagtcgtttgttgtcttgatgtttgcaacaacgtatgcgacttttgtagcccnccgccggatgtcagtgttagttgtggtacttcctcccgcgtattcttgactg

SEQ ID NO: 49342 - DNA, 491 bp, Oryza sativa
agcttggctaaacatctcctaaaccaatatctagtgcattcaatacccaattttttaatggcgtaagggaaacaacatatagctgagtaaaaggacccatcccacatgatattgtaaaacaatgcaatatttaatagaaatgcgggacatttgtaaattgggtacaatatgatcaattgcaatgtatgacttgccttgctctcgcactgatggaaccacagtaacgtctttgagaaaccaccaatcgacaaaacgggcgaaatctacgcaacaaacaaaacacacaagcaaaacatgctataagactactgaaacaggaaacaaaaccatttttaatggattctatacattcttatgaatttactgagacttgaatggactttatcggagctcggatgaattagttatgatttttaaaagactatctgtgtttttactaataaaaaaaaagccctaatggatttattgcgcaataatttatcccaagactg

SEQ ID NO: 49343 - DNA, 273 bp, Oryza sativa
cacattaatccaaaaacttgtgctattaattggataaaggtcttaactctctcctttcacttgtctttagatgccgcgctacatgcctgagtacttgtttggtgttgagggttctgtccacgagttgcgtacgatgtcctttggcttggatttggactggccctttttatgccagatttccatgatcgcatgaagtaagtgctaatcaaagtcccttgacaccaagtgaaatatacctcatgatgtcgaactggtgaaaacttcttctgctgt

SEQ ID NO: 49344 - DNA, 564 bp, Oryza sativa
agcttatgtagtatactttaagaaggttttagttccaagtcaaaattcccattcttctatcaggaatctgcaaaacaaggcacgcacatcatccaatcccaatctgatttgggttttgggccttgtaattgtgtcgtgggcttaacccaaaggggggtgtgccctaaggcaaacctaagacgtcccaaatcatatttactcagtagccatcatagtttactggtgggttttacttaaattatttctgccattgcagtttcgccgctatatcggtttgtggaaccccaaattcaagtacttaatcatttatatgcaattgtgttacaatctatcttattcttgcttgtgttcttcgattcacatgccaggaatagccttcctggggaagtcaaccgtgcaatgcacggttgataaccagaggagacgtgctgctactattacaagggttcgaatcgggttgaacgaaaaccggattgggtgtgtcaagtttcccccaaatcaaagttttcattacctatccgaatatctggacctacccttctttttacaaggaactcctttttt

SEQ ID NO: 49345 - DNA, 347 bp, Oryza sativa
  unsure (1)..(347): unsure at all n locations
tctncgtcaaaatttccctgctgcaaatgactntggaagcgaggttattcctggagcaacagagattggaatgagggtacgctatgctcttgaaacttgtagcatgtanggaatttttatccttctctcagttcatgctgtaggttntgtgaagtttggtatgtaaactgcagttacatcatttattgtgaaatgttacttctttacttaatatttactttgcatgtttgcttatgctgctaatgtatttgataggtgcaagcttacttatatgatggctactgcgaagatattggtactatagaggcattctacaatgccaacttggcgataaccaagaaacctgt

SEQ ID NO: 49346 - DNA, 515 bp, Oryza sativa
agcttcaacggcatgctgtgttggtcatttgtcccacaatttatgactaattttttcagtcctttttttgatggaaaaacttctttactcatcttgctaataccttgcaggaagcaaatgtactgaactatattcagtccttgctcatccttaactagctcattgtttatggaacaattcactcatttttcaacattgtaaggatggaagccataaaaaggcttcatgcctattacatcgtttctgggctgtacaattgccattatgcaatgtctaaaggtctcagattctatgccattctcccaccagatttggtttttgctcataaagggtttgatcacattgaagcaccaaccacttttctttggaaaattctaattaaaaggcttgctcaaagtgatgcaccggcagatgccattgctttctacaagaaagcccaaggaggaggaatggtgcccaacaacctgacattttcatttatactaaaagcccttgctaaaatcaaatgctcttca

SEQ ID NO: 49347 - DNA, 436 bp, Oryza sativa
  unsure (1)..(436): unsure at all n locations
cctggttgcattctctgcgccagaggcactggtaaggaactccatatgaacaattcanaagttatttaccttctaattgcttggtcagagttatgcagctctgctattctgcaaattatcagggtttacatattggacatgctgaaaacaacacaactagatctgtttgcaagagtatagtgcattttttaatgggttaattggatccatgccattacaacttcttcgattttgaaaaacaccattactattcgtctatttggagacatgtatgtgacacactctagatgtttttgatggtttatttagtcttgtggttggggttgaatgttacaaatgctatntgcatctgcattatgggttacacatctattgtgacactcgttaccttttgaaattatgaaatatgcatcatgtcattaaaatatttgttcct

SEQ ID NO: 49348 - DNA, 468 bp, Oryza sativa
agctttccagcccgtagttagcaatgaccggaccgacacctgcatcgacaaacagacccgcagccgcagaaagcacaaaatacccatgcaccacccgctcaccgaaaatagattcggcagcagcaatcttatccatatgtgcataaaaatgatcgccgctgaggcaagcaaagttaacaatatcggcctctgtcattgtgcggcggggagtcaacaagctgtcgcctggttgtagctcctcaaaatatttgcggaacggatgaatacgatcttcttcgactttcgcaccgcgcacccactgtttactgatagcggcaagcatcgtcggactaccctgaacagcggttcgctgcatgtaatgtttcaccgctcgtaaaccgcctaattcttcaccgcctcctgcgcgaccaggcccaccatgtaccaattgtggcagtggggagccatgcccggtggattcttttgccg

SEQ ID NO: 49349 - DNA, 334 bp, Oryza sativa
  unsure (1)..(334): unsure at all n locations
acacaaaaactcaagcttgattggtatcatgtaggagctcctgttgattgctcaaacacgctccagaatcatggcgatgccctgaccgacaccgatgcacatggtgcacaatgcgtaacgaccgttacgccgatgcagctcatggctggcagccagtgccaggcgggcaccactcattcccaacggatggcctaaggcgatagcgcctccgctggggttaacatgtggggcatcatcatgcagccccaatttgcgttatacatccaacgcctgtgccgcgaacgcttcgttcaatttaatcacgtacatatatngaatacttcaccctgcgcgt

SEQ ID NO: 49350 - DNA, 536 bp, Oryza sativa
agctttgcacagaataatctctttggacatataccagagttcgttggcaatcttgtcaaactaaccaatctttttctacatggcaacagcttcagtggaagcataccttaagtttgagtctattctctaatagcatacactcttttataatttaaaaaataccgcaaaaacaatatctttctttaataactttgctaccatgctattctgggagaagacactcaactccaatgctctctccaattcacattcccaacatagagacaaaagcaggcctactattgagacaaggtgcactactgattcaagaaatactggagacaatctgttgtaacaacaaaaatgctttaagagtttgcaagtcgcgtggctgatagttttaaggtcatacatttggtccatctgtcaatatgggagttgtaccaatggtgtcataagttgtgatgtattgcatatagaatatagaagaaagtctacttggtcttgtgaactttggtgatccatgacatgtgggaccatgacaagcatgtattggg

SEQ ID NO: 49351 - DNA, 657 bp, Oryza sativa
  unsure (1)..(657): unsure at all n locations
agcttgaaccccgatcgagcgtangtatatcaggtatgtttgcaagtgtgtttgctactagaatattcttgtagcgctttgccaatttcaaaatatacccatatagtctttcgaatatgtgcgtgtgcaggtttataagaacatggtcagccgttttccctaaacatctcttttccaatattaaaaagaaggggttttgggtgaaaaaatctctttccaacgaatctctaataatctatttaaaaattggagttccttctgggatggagctaacgtaatttgcctcccacctggatgcatggctaatagcatttcatggcaatcgctcaatttttgtacatattgatggtagtcgggaatggaagcccaatgacagagcccagatagtcggccaacctgcttaagagctacctccggtactaaattcatttccccatgaaaggctcactttccacaagtcaaagcgccgtgctcgttcccaatcaactctctaccaaatcaatcgcccgaatgcaagatgagggggaaaaaagtttattggtagttggggggagctcatatttttatcctaaaagcaacctgatttcaggtatttggttgaaaagtattctaacatttgggattggaaatttgaaaaaacggttatctccgctttta

SEQ ID NO: 49352 - DNA, 164 bp, Oryza sativa
ttttcctacgaattacagctgacggacgaatgctgcggatattcacttacccccgctgcgtcagatttcgcgctctttctatagacattgcgaaccggtcttcgagggggagccactttaaccattacagacgcacttcagcctggatacctagacactaatgt

SEQ ID NO: 49353 - DNA, 524 bp, Oryza sativa
agcttgtgcttatgattttattcagagcatcgtatctctgtgagatctttctataaaagtattgacagaaactttatgcctgacgaaccaaatgagtatatatatgctggtcgataaaaaagctagctgtttgattccctttaattgctgtttaattttataggggcaaggagaaaggaacagcatatttccagaagaccctggccaggtattaagtaactaatgaattattcgatcaattaggcatttttcctttatgggatctatacccagctgatcagttaagtaaagcacaaaagatgatccttttggtcccaaaggggcttttagtttgtctaaagctttgctttaattggtccataaaagcatcctggaaagttaatcatggggccagtactttgtctctagctttacacctttaataactatcactggcaacttagctttgaataatcacttaataactaatacaacaccctctttatgtgtggttccattgtacgagcagcttctacatgacaatg

SEQ ID NO: 49354 - DNA, 252 bp, Oryza sativa
  unsure (1)..(252): unsure at all n locations
actaagcttgctccagcaaaaaggaaccacagaagcaaggtggtattctgttcttcgcacgagagcaccacaggctcacgacacgagctcatcccccgccatctccgctccgctcctctcctgtcctctgcgtgctacgccaccgaacccactcaccgcgagatagagagagagagagagagagatccacancctcatctcatctaaggacggtggctttcgtgcagaatcacaccggcgacccaccccctc

SEQ ID NO: 49355 - DNA, 605 bp, Oryza sativa
  unsure (1)..(605): unsure at all n locations
agcttgattgctcatcatcattttgtgcactgctagctccttgatttatacctaagatcagttggcacaagttctaaaacctcccgcatcatgcttctatcatgtgctgcaacacagcaatagcataaaccagtgggattaccttgggatanntttctaattgaaaattgggcttcttggattaagtaggatggaatcttcaaaccctttaaagttcgaaaatggggttctcttccatttgatnatgccattgatttgggatgaaaagcatctaggggtctcaggtctcaacagtcctaacccacaaaagagtaagtgttgattttgttaagcccctctaatcgtattccatcaacaagatctactttttttcttctacatttgctatgtttgcttgctgctgccatcaacaattctactaatctccttaggcctattgatatactatgttgtcatatttcctttacaatccttttgagtccatccaaatatttcctttacaatccttttgagtccatccaaatccaatacacaacaattccgttgaagcgtgctaatctatcttcatcactaattccccactggagctggtttatcacaccaca

SEQ ID NO: 49356 - DNA, 302 bp, Oryza sativa
tcagaaacaaatagatggttatcagaggtgtgaatcacgctcatgattaaacacggatgatgctggagatataactgtaacaggagttccacaacaagtgcacgttgggcaaaacatggtaaatgctctttctgctaagccctaccatcctgtgttttctgtctcacatgggacaagtgccatttcatcttcacaacacccatatatggcgagacagttgctagagcaccctgtatacaatccaaggatgcatcttacccatccttcattgcacttaacaatgaagcttgattcacctttat

SEQ ID NO: 49357 - DNA, 448 bp, Oryza sativa
  unsure (1)..(448): unsure at all n locations
tgtgccatgcgccatctcaataatatgttgttaggctctccacgcctttgcataacttatggcgtacttgaataagtactccatgcgcctaataattgattttgtgtcaaagcccatgttaccaacaacactgctgtacatctcacttgccacaaaaactgaagtgatgtttctgtgatacttcttcaccccttgtaagtagcacttgtgctcggncacaatgctaactttccaataatcattccatttacccttatatgcatggacacgccacggacaatcttccttcatgcgcctcactctatacacataatattgtgacttgaccactctaaactctctcttgtaggaaactgccccaagcgtcaccagctacctcatctcatgcttatgagcatacctttgaccctcactaccttcgtcttcttatatttcacggtacatgatc

SEQ ID NO: 49358 - DNA, 637 bp, Oryza sativa
agcttggcaattcaattgattaagaccaattaccaccatagaaaatgtttgttccaacttggctttgattaagagttcagaactatcaattgatgccatcgttccctgattttttttttataaaactgaagccctgccagagtgtcacttttcagggaatatatagttaattgcatgatctacagaattcagaatggtatagccgttgttattacagatttcatatgctctccacactagaaagaagttcactatgtaatgatggtacaatagttacagtatagatttactaactccactgtgtgctatgagctttggaaacagaacgtgcaatagatatgcatttttatcaccacaatcaaaagtgcatacaaattaataattacacaccactctttataattaaatacgggttctcatattaggccccatacaaacattacattgtttacacacaacaaagcacacattaaagtagtagtggtctacagaacacagatactcccatcatatctggagcaaacttaattttacacatggacaactggtttagctataactagatggctggccaacagactggtctccataattcaggaagctaaccttttattaaacaatctatgtgtgtgtgtgt

SEQ ID NO: 49359 - DNA, 407 bp, Oryza sativa
  unsure (1)..(407): unsure at all n locations
ntgaagacgtcaccgacgcggagaacggcattntgatgttatccatcatgaagcctcggccagatcgactacctcgagtggatattcgccgacgacagcatcgagtccgatatcanggtctttgttgactcatatcagactcggttatcctgtgtagaagcagcagatcgcaaccgaccatgacgacagacgagataacatgaagctatggccaaatttcctgcccactcgtgcgttgccacgtcaccaaccggtcgacgtcctgacgtcatgaggcgtatcagatgtccctgtacagagcctaacacctatgcatacaatacacatacatgtctacccggacatgcatgtacgcgtgtgcatatatattggtacgtacagtgcttgtgcataatgctttgatcaca

SEQ ID NO: 49360 - DNA, 455 bp, Oryza sativa
agcttcagtcttcgtcgtgaagttgtcgtgtctccgtttataaacttgagaggagtttcttctaaattaagcaatagttttatcattttgcctataactaattataaaccataacacttaattagtagcgattaaaatataatttataaataacaatttatatatctccttaatgatttaaaagaaaattctagaaaaattaactctaaatttaagttttaaaatataaattctgacatcagcttataagctgaaaaataaagtacggtcgtcacatttttccgatccattgaatcggtagaaggtccttgtacaatctgtaccggttgttcattgcgtgatcggtactttgctgatgaaatctccgcatagaaatggataacagacagatgatccataatttcctcatgacacaagcaggttaacacatgtgtcacaacgggatcagctcgcat

SEQ ID NO: 49361 - DNA, 480 bp, Oryza sativa
  unsure (1)..(480): unsure at all n locations
taatttcctcttgttaaagattttagattgccaaatgctgtgctgatgacttcacattctttgaaggaattgagttgcttggtgcacttatgttctgctgaatcaaatttccctcttcttcctctagagctttcctaatcattcttagactagttgctacttcaaccatttcaggacgcacttcaacctccctcctcaagcatttaactgctaacttgccaatatcttcgaggaagttcatgttttttgtattgttgatgtcctcgtcaaacaaatgcatcaccttcttcccttgttcaacagcctcagtgaaacgctgagcaagggtgatggtcccatccactgctttttttctggtgatgatttccagcaaaaccactccaaagctgtaaacatcactctttggggttagaantccattcatgcagaatgcaggatcaacataacctatagatccaatgatattggtagtatgttgag

SEQ ID NO: 49362 - DNA, 577 bp, Oryza sativa
  unsure (1)..(577): unsure at all n locations
agcttcnatgactcanaaaattcatgccacctcggattanagcttatcgcctgtcgctaagacgttatagctcagcactaaggtccacagcgccgagtctacggtctatttttggttgaagttttttatagggactaatttcgaaataagtttttaaaaatgaccaatttattaaaaaaaacacggcggctacctcgtccccggtgcatgcatcagacactggatatataacttgtccatttttatttgtattaggctacgttaattgtagtgttattcaagtacttactagcttattagtatatatgtactaggcacccttatttttttctaagttcaccgctgttggcatgtgacacattgtaatacgaggttggtttattttgaaacgaataaagtattgccttcttcatcttgatgtacaaaggatttcttaacactgattttaaaatgcacggaaatctatatattcttagccaatgagatgcttagaaaaaaatctaagtaatttgaaattcgaaattcgactaccgaagtgaaaaaaaaatatatttcctcgtcaccttagttttttttc

SEQ ID NO: 49363 - DNA, 409 bp, Oryza sativa
  unsure (1)..(409): unsure at all n locations
ntatgtatttcatcatttcatgaatcattcaccacaatttggtctgcgtacatactgacaaatgtctcatcattgtactactctgatcagtttatgcgctttggcattgcagcgtgcattgtttgccactatcttgttctcttgaaatgtttgcttctgacttataggttttgattatcgaaactagatttatacgaaggagggaggcattggtgtacaatacacctgtggaccatgtcacccgtgacattcgtgaaggagttgccaagcttggtgatctccgtttccgtgtgcttgactcggctggacttgagacagcagcaacatctggtagcatccttgctctaacagctgacatgactgggaatgtgtagctagatctcaatttgctattttcttgattgatgtc

SEQ ID NO: 49364 - DNA, 699 bp, Oryza sativa
  unsure (1)..(699): unsure at all n locations
agcttgagatcgagactacgcgatccttgtgtgtatgtancacatgatctatattgaggcagctttgtcttacactatggtacatggtgttttccaggaaaaaaaaggaatttcacgccttgatgctttattgcgtactttaaagtcaagattaagcactagctacgatgtgttcttatgactgaggacagtttctggtatagtaaggtcaatagtgttgtttggtttcaagaaatgtgctaacagctagccttgcgttacctataaattcttccatggcttctcttgcatgttggcatgcatcttggttagaagtagtagacaaaaatataacgagtgagaatttgcagcagaatatcttaagtgctgtttcctttcctaaaataaattcattattatgtttaccataattccatggtagaactttgtgagctcaacagttctcatctgccttttatgcttcttatatgcagtacaaagttgaagaaccagttaagctctgggtgaacaaaagtcgcccttaccataatccacaagaaacttacaactatcacaggcttccattgtgtcaaccatctgagaaccctggcaataatggggtgggtttggagaggctctgggtggaaatgacctgattgtactcaaaatgacataagctctaacatggtcaacctttttttcattccaacccttttggtc

SEQ ID NO: 49365 - DNA, 498 bp, Oryza sativa
  unsure (1)..(498): unsure at all n locations
nggctggctaatcctttccatgcattatataccgttntctttttcatgcttcttatacacttcgtgtgcaactaattaatagagagtaaatttcataaaactgcaactttagtgacaaaactatcagtttgctgcaacattaacgacatgtttcagtttgctgcgacaataatgtgggaaattatcacagaactgcaacttttacgttatatgctgctacagtactagttttgtcactaaagttatagttnttggaaatttactcattaataaatccgctggttatgagtaagcatgcaaaagttgttctttcacctgttgcaacatgctaacatattctgtgttttttagcaagagagagcaacgactttcagcctcaaaatagcttgctcatagtcattgcatcaccaaactctaagcatctacggtttaaataaatactataatggaaaaataataagacagacaaattaattattcacacgatcttgacaacta

SEQ ID NO: 49366 - DNA, 413 bp, Oryza sativa
agcttattagtggcttttttggaggagtaagagagggttggatcattagcttcatctatgctttaggggcacacaaagaggatggaatcaaaatggggacctcggaaccttttcagtagaaaactaattagcggcatgaccgtcctaaatacatcaaggagggttgatttttatattttgtgccacttaaaagaactgctacaaagaagtgatatctcagggtttgatgcaacgatcctgcatattttatcgccgattaaaatctgctaaaggcaaatgcttctgtgggagaacatgaagtgttgggctgccactagcgcaataaaaaaattaggggcagcgggatgagggtgtcatgcatacgatgttgtggaactttcttggcatcattggctcattgccatgcgtgcaat

SEQ ID NO: 49367 - DNA, 428 bp, Oryza sativa
  unsure (1)..(428): unsure at all n locations
gtttatcgcaaaaaagaaatctgaagaagaagatatcaactgtatcaacgcatccctctcgcaaccatccacgactgacctaccaagttgcatcaaatttaaacactcatcaagattcacgcactaaccccacaaattttaatcactcacgatacggtcgcgtcaacttattatttccgctcctctcttgcggngagttcacgccatccccctccattttccccatagcaaacgagattagagaaaaaaaagagaggatgaatcggtgacaagaggttttcaaaccacaaaaatcggtgacaagaaaaacgaagaatctgctgctgcgccgcctggaataaaaggcgcacacggctttgggagtttgggaatatctgagccaaggaatctnctcctcttctctctccttcgtgcttctccagtctcca

SEQ ID NO: 49368 - DNA, 422 bp, Oryza sativa
agcttttctgatggaatgacaggcccagaagataacctgtttggtgggcatctttcatcttgcaagagaaagaatattgatgggagtcttgcagagtcttctgccaatggtagttcacgtaataatcagcgaaataatattatactggaaccttctccatccagtcatgaaagcacttctggtttaactgcacctgcccctacaaaccatgttttttcatactctcctgtggaacagctaaaccaaaataccaatatgtctgcaaatgctatgttgtctgatcattattcactatatggtgatcatgagcgtgagagatttctgaggaatacccggatgagaacaagccctaatgagtatgatcaatcattcgccaatctcttgcctgaaagaaagctcaggtgttctgtttatcaccctac

SEQ ID NO: 49369 - DNA, 290 bp, Oryza sativa
ttccgaatgctttaacattcactctaattgcggaccatctctgtgctcctgacatctccttgctagactcctgctgtctggatgcaactgcgtatatattcaactaacatgcactgagatcatttcaatgagaaacaactgggttctcttatatatgaagactaataacacgtgtctgatcagagcgctgctagctgaaacatatgacgcatacaaaagcaaccacaactggttctatgtccttgagaacaaacatcaaacgatatgtttagctctcaggtaaacttatg

SEQ ID NO: 49370 - DNA, 451 bp, Oryza sativa
agcttgaatcagctctatctaaatatatcaaagttcacaccgatgccaaccgtttcacaaatgaaacgaattccacaatggattaaaccaccgggcacttttttttttttaccggaatgaccaaaggggggcatcccaaagaacattagaatgaggggaaaaagttacaaaacaacaaattatgcatactaagtgcccagctaatagaataaacaataacaaaatagaacgattaaacctctacaaaaacaaacaacgagatttaccaactctaatagcacaaatgaactgattggttccagtaagggctaagagtagtttcagtcaatctaaatgtaaacaatcacataatcacaaagtcacaacatacgtagaaacaggataaaatcagatgcagagttgcgcttggcaacttatcatatctctaatttttttttgggagggggggggg

SEQ ID NO: 49371 - DNA, 190 bp, Oryza sativa
ggacactaacaaactcaagcgtggtgaactgtccatcatgctgatagctgatctccttgttgaacccgacgagccgctcgaactccggcggcgactagccggcatctgcgacatactgcctcacctcgcgcgccagcgcctgcgccgacgccctgatctcgacggactccatctgctccctcaccattct

SEQ ID NO: 49372 - DNA, 506 bp, Oryza sativa
agcttatttggggctaatggcacctttacttttcctctccccgttccagcattttttctgcgtgtgtcaagcttgggtggagaagatttcgccctcttgcttggagttatattgatctcaatgttgggcttgggccattgaataaaggtcccacgtgcagccccaagggtcaaaatctcatcattaggtgggtgtgggatagtgtaaccaacccaattgggcttcactaagtccacctgaacttcggcattgctggctagcagctgcgccccatgcactcaggtctccggggtaggcttgaatgcttgaccctctgcggcaggaattggaaatcctggtgtcatccctaatgactagggtacacgatgtgggttcctgcgacacattcattagggcccttagtatatgtttcaattgtattgtggggctaatacaggatatgcgttattaaattgtttttaccattatggggaccaccgcggcagggccttcaagctgttttgcac

SEQ ID NO: 49373 - DNA, 488 bp, Oryza sativa
  unsure (1)..(488): unsure at all n locations
cgtggatatctcaagaagagactactacaacgatcagaanatgatgatttagttgaacaaaatcatttgataccttcttttgttcggcagattcctattttgatcaaattattgcaatacccagaattatgtttcagctaggttgcttccttgcttgttcttgagctgggaactggtatcacaaagtcctacttcattcgtataataatctaagaattttctagcattgctaatattcgtatagatgttaatgaattagacacattatgaaacggagggagtagcattgatttcttacctcacctacctgcctctcactttcttcagattgtctggcttttcactcgcgatttgtataagatcagtttgggatgtacacattaaaatcgagtagccttgaacgcttgtactaacttaatgcacaattgtacagactagagagataaaacaattctctcttacgtccatgatatgctctatctccttcg

SEQ ID NO: 49374 - DNA, 673 bp, Oryza sativa
agcttgggagaggcaaggaagatgatggtagagtcaaagaggatgacgtgaatttttttaataacatgaaggagaaggagaagaagaagcattgtatggagtggttcattcaagaactcataaaaatttttgatggatctgaagatgaagatgagggcaaaggtaagcaagttgttgatctagcttttattgctcataatgctagttctgatggtgatgaatctgatgatgataatgaagaaaagcttagttatgatcaattagaacatactgcttacaaatttactaaaaaacttaaaacatgttctattgtgcttgatgagaagaatcacactattgagattctaaatgctgaaattgatagattaaaatcttcgattcctgatgatgataattgtgaatcttgtgaagttttattttctaaaattaatgctttgcgagatgtcaattctgttaattgcaaaaaattggaatttgagattgaaaaatctaaaagattggaatcttcttttgctctcggatttgctttacatgctcgtattgttgatgagttgattttgacaaagaatgttttgaaaaaatacaaagttgctttttgtgcaaattctttggtcaatgctttatgtgcaaatagagcaaaacaaaacaatggggttttgatttctcaagattg

SEQ ID NO: 49375 - DNA, 460 bp, Oryza sativa
  unsure (1)..(460): unsure at all n locations
tcaacaagcatttgttctaaatgtgttgntatattcttaatttgtcaaaactcaaccagcatcattaaagaaattgagtgctcacgaattgtgagtatagtcctagacgggtttgctgtactttcactcaaagacaaaaaggaatttaaattgagcacagcacaatttgaaattctatttctattggttgccaatcatacagcttagacaatgaaacaagccgtattagtaccccttgtgttcacattgccgtaatcaaatctgagatccagactgcaatatgttcctaactggtggaactagtgaggtatcataaggcccttcttctaaactaaacagcgactaatacaatgatggctagcaagtagtgcatttatacatatatcagacgtatataccagcacatagaagttacctgtagtgactctcttcagatatgtggacatctcactggcgatgt

SEQ ID NO: 49376 - DNA, 610 bp, Oryza sativa
agcttgctattgtgggcacaacaggacacggtttgacctccctaacccaaatgttttttgttgttctaaaatgacaagggcgatctctccatcctgcatgggcttgtgttaaccatgagaattctagggattctcttctgaaacaagttcttctgaatcagggaattcgctatgatccagaggatatttttccagagctgactatacagattacctcgcacattgcaaatcttcgtttttttctggtgttggatgatgtgtggaactctgcatcgtggacagatatactatccactgccctccatgctcccgacgaatgagtaattcaaataactactggggatgacactaatactctagcaactggagtgcaccaaactcatagggttcattagatgtcatctgatgttagataagagctgcttttgaagagcatgaacatattccctagagaaacaagtgccaattctctacgccatatgtattgagattgtgcgcaaatgtggacgtctccccctaggaatcaaaacatttgctaccggtttactgatccaactaccagcaacaggatgcatggatactgctattggggaaaaatgcctgggccctg

SEQ ID NO: 49377 - DNA, 653 bp, Oryza sativa
agcttgccacagttgcggcaagcgtcgtctcgtgccggcttgtggttgccttttttgtcttcctgggcgcctctgcgagcaccaccctcggcgcgtcttcgcgcccaccgcagttggacgcctccgcgcgccttgcacggcttgcggccgcctgtcgagggagaggactccccctttctcccgtcaccctggctggcctcccactgctcccgagtgagatggagcttcccgccaatggtgataggccccgagagaggctgtggctcattgccgtccacgaccttgaggcgacctaacgcctcctggatcgacatcgtggagaggtccagcatagactcaatcgagcgagcgatctgcctgtacttctctgggacgcaacgaaagagcttctcgacaggtctctccttgtcgtaggtgtcgtcgccgtactgcaccattttcttgaaaagagtgttgagacggaaggcaaaatcatcaacatcctcacctggcttgaaggccagggtctcccactccttgcggagtgcctgcagtgtggcactgcgggcgcggtctctgccgattcgtgcccaaagatggcatccaaggcctccttggcagtccacttatgggaaagcgagaactgcatttcgagcgggactggatcgattgaa

SEQ ID NO: 49378 - DNA, 461 bp, Oryza sativa
  unsure (1)..(461): unsure at all n locations
tactaaagacctagcagtatgacttatacgctccacccgaggggtagtctacagactgtctagtaccagataagactctgagtgaaacttgcttgcacaagacttacaattcaaggcgtaatccattgttaaagttgtgagtaagtgtagcttggagttctagatagaagttcaaccttaatcggtctccatcgaaccgctggtatatagacagtacattggaaaaggcaaatctcagtgggatcttgagatttggtgggggattgttggaattaatggatgggccttagcccactcgaagattaattctctggactntccaaaatcccacctcatggaatggcatgcatgtggagtttagtaccaccttgcttattctaggagagagggacctctctaanagggaggatgccctcctagccacttgaagcatgtgtggtggagagaagaaggggaacaca

SEQ ID NO: 49379 - DNA, 668 bp, Oryza sativa
  unsure (1)..(668): unsure at all n locations
atacagtagagctgaacggatggcatgctggcttatgcataactccattccaccaaatgagtgatcaaaccnaattttttttttctaaaaaactcttactaatgaaactcatattttcagtccttaaaacaggtaaattatcaaatgttgtaccataacagaaacaaccattttcaagctacataataccaaatgccaaatgagtaaacatgtcctcattcctcagtactaattaacacatcttaacattctagttaaaacccccccaaaatctacatatctcgaaattaaattcgcaccacacaaggtttaacaacagaatgcgcagtcagtcgaaatcagcacgaacttaatgggataagtacggatccaacgcaatggaaacgagaatatgaacaaagctacgggaacagaccgcggcaaggcaaatcttgatccagatcatctcgcccaccgaaccaggcattcccttattaactaaccggcactcgctaatgaactaacacgcccaatccagaaaagagatgaaaaaaaaagaaaagaacattctttcgctgcgccaaatcgcactagcaccaaccaagactacgccccggtcttggacgacatagatggaagagaagaggaggacctcctacagttgcgggagaagctgacgtggaacatcg

SEQ ID NO: 49380 - DNA, 388 bp, Oryza sativa
  unsure (1)..(388): unsure at all n locations
tcaatattttcctcataagtcactagtagtcaccttccacattnggcaaaattcttcctgattttcctcatcgatcctactgcttaacttgtgttcacgatttctgatgctgtggattgttttgagagcattctgtttatatttctgtatttgtgacagtgaaagcccaaattttaagccgtttgcttggttagagctatgatgatacggtagcattggaaactgtaatcctaaaaattcgagagaacaaggtgttcatctttttgccctttgctgcagtgcagattcacctcaattacagtagttctatgaatgtcctaagattaataatatgtgcctgattgctgctccaggggaatctgcagaatgaggtaggcattacttccac

SEQ ID NO: 49381 - DNA, 605 bp, Oryza sativa
agcttcatgaactcgtctcaccaaaccaaagcgcgttcattcggaaaatatttattcatgacaacttcttgtatgtgcagaacatgatcaaaaacttcaacagaaagaaaaaaccgatgctttttataaaggttgatatttccaaagcctttgacatcgtaaactggccgtatttgctggaaggtctgcaaaattttgggtttggacagagatggagaaattggatttcaaatattttaagaaattcaagctcgaaaattatcctcaatggaatccctggtaaagcaatttggcacatgcgaggtctaaaacaaggggatccactctcaccgatgcttttcatactcgcaatggaaccgctacatcagattttcaaagcagctgaagaagcttctcccttggcaaagatagacccaaagcgtagtagattccgatgttctctttacgcggatgatgtggctttattcatcactccatctgaaaacgaactgataacgggtaaacgcattttttgagacctttgcacaaatcaaggggctacatacaaacccgggcaaaactgagaattacccctattggttggcacaacttagacctcgacaatc

SEQ ID NO: 49382 - DNA, 216 bp, Oryza sativa
  unsure (1)..(216): unsure at all n locations
tgtcgccatcatgccctggctgacgtcgaggacggtgactatgtctattgtggcgcgcgtgganggcgaggaacgcatggcgggctccttcacccttactgccaccacgtacttgccgtgccttcgcccagcggacacaatggcggcgttctgggcgagggtgacagctcaccctctcctgtggcgtcccctgaagaagcccctgaactatgtggc

SEQ ID NO: 49383 - DNA, 495 bp, Oryza sativa
  unsure (1)..(495): unsure at all n locations
agcttgtagattacaataagcagatgaggatgatatataatggggtatttgctttttgttagctgaaatgcctgatgagtgcctggacaattcgccgaaagtgagggtgggtgctgacagctaccttccaacgacttcatgggtattccggcgcggcaaaatgctggatgctgntgtgatggtgaacaccgaagggagccaggtgagtacctggtgatgacatcacatggaagttcgacatgatcaaatccgtgttgtcgtccaacagaagggaaaacagtctcgggttcttttttcgccgcttcgggccggcccccggcgaacaaatttggcgcccaatttttttttagaacacccaattttttgttaagaagagggaaaacggtacaaatttggaggaaccacaacacgggttgtttgacattcataaccttccaaagaagccaacaaactgactaaccaagacattgtgacacacggcttgaaataacgacc

SEQ ID NO: 49384 - DNA, 470 bp, Oryza sativa
  unsure (1)..(470): unsure at all n locations
gccagtgccttttttagataacatgcttgtttgattgatagatagttctctntagttttcgactgttttccgagtctgatggatagcactcttactgtattcngtttcgtttccgagaaaaaaaatccgaatttgattccgtatccaagaatttccggatagttccgaccaaaactatccgaatctgaaaaatagttcggacggacggaaactatccgaaccagtttcaaccctagttctagtggtaaatntgcaaaatttcagatgaaataaacaatatcgtattggagggtccgaaacgaaatttccaaacctaggcctgtatgctactggcgttccttcctccggccgccgcgaccaacacacacgcggagcggcgggtcgcggcggcggcacgaggccatccgccttccgccgtggcaccgcatcgtcaagcatcgcaccacgccatcccttcctgggatccctct

SEQ ID NO: 49385 - DNA, 670 bp, Oryza sativa
  unsure (1)..(670): unsure at all n locations
agcttcctatatcttggctttcagttagttgacagcaacnggaggttgaatagtattttaagaacgcactggacttagagtattcttttacataccagatattttgaagaacaccattcagtcattacgtgatagcaacagacacgactttgatgcttgggtgtcattaattaaagctgctgaaaaaacttcaatggttagagaaatggttccttttcactttagtttgtttatgtaatttaatatcacatctcctttacatctgcatacataaattggaaatatgatttgtttttctttaattcccttgtcattctatgttaagccagcctctggtttttgatgtttgcattctttcaaaatgacatcgagggtattgacttggtggaccacagcttcttattggaatttcctttgtgctatggctactggatcaagtatgcagcccacaaaggacgactatgcacaaacaaacagggggaggaggtgtatgaacaagcagtccaagcagggcctcactctattgatctttgggtaactattgtggatttgctatgtgcacatatgaagagcctgctcatattagaaggtgagatcgaaaaaaaaagaacatgtggaatctgtgctttgaagccaaacatttttctttttagaaggcgaagtaaaaaaa

SEQ ID NO: 49386 - DNA, 299 bp, Oryza sativa
gctctatggactagtggtttagttctgcacctcaattgttggtttattatttttggctagcttattcaatgaggtgttaaaactctcatcatgagggaagaagaacgacagggggaggagaactggagaagtcatggtgttggttgtgcagttgtgtaactaattaagttcaccatacgcaaccaaaaatatatgagatgatggtgctactctggtaaatatggataatatgttagtagataacacttatagttctaggtgttttttctgggcggcggaggttggctaacaacatatct

SEQ ID NO: 49387 - DNA, 660 bp, Oryza sativa
agcttccaaaggcagtgaggcaccacaaattttcagacacatgctggtttttttttgtaaatatacacacacacacactctctctttcatagtaacagggctcaagggccaacaagattagcactcactggttcttcttccttgtttatttggtatgttcattagttctttgctttgcatgaaaaaaagctagctgttatgttgctatttctgcacttaccttgagcaaaactgttgaggtgttttgctgtgaatgtgtgttctgggtgttttggtttgttccaagataatttaacaaggctgctagatctgtttcaagttcagttcttgagctcagagatggtttcgttgcgcttcttgaatctttagcaatcctagagctgtggtctgtggtatgcacgaacatgaagcttctcttctccatttcttccacagtttatgggaatcgttgtggttcacatgttcttggtgttagaacatgcaagtgcatgtgcattgacttcttaatttgttgttcctggcagtgcatgtgttttctgatatttgctcaacacagtgtgttggatcatgttgactcgaattatttataaaagagattgttttggagagcatagatctctggaaaaaaatgcccatggattatgcctcgcatctttctgc

SEQ ID NO: 49388 - DNA, 666 bp, Oryza sativa
  unsure (1)..(666): unsure at all n locations
agcttncccaaacaggtcctaagtttatgtagaatcanctggtgttttatttatcctcactaaaatattggaaacgggtttatttggagctttcccttggataatataccaaatgatttctcctctatgctgttgaataacattttcttatatggggtctcatttggtaaaaatgccctgtggtgcgtcaggggcagggctggctgggcggttccaaaggtagccagacaaaaatttgaatttcatagatgaaattgactaaattctaacaataaatcgggccgttttggctaagaacaaccagatagcaaggaatcccaccacgaaaatcgatcaatttggaaggaaaaccgacggatgaaaaggaaatttttcactggggggaataggtggacaatttgaccatgtaaaacatggtttcaaagaaactttgtgtcccaaaagcggccaatatgaacataccgattggcaggaattttgaaatattaaataaaggaaaaatggacttcacgaaacacatgaagataaggaggggctccaaaaacacccccattggactttcaagccaaatttagtcggttcaaccaaaaatatccattaaaagcctctccaatagggggaaaaaccctcgggtgggcaaaaaccttccttcactaaccaaaattg

SEQ ID NO: 49389 - DNA, 454 bp, Oryza sativa
  unsure (1)..(454): unsure at all n locations
ctagagctaattggttctaactaataactgctagtgatgatatggtatgtttgcacattaaacttagagttagtgggttacctatacaaaaggtatagataacaccccttcgacaaataaccctgatttaccttagccagaattatttttagcgctagagatatggactataacttttttttcaatgaacaaaatggccttctgaaccgtctgaaccggatcatcattgtctattcattntaaatcgacaccaatgtatcacagttggtttttgatatcaacaaaacaggggtaggaatgaagtatcatgattgattcataacacgaccaacattgatattcaatattggatagtctacaccatagtttgtgtattgagtgtcgattcggtagtgatacttaaatgacagnttgtnttaaaagaaataataaattttatatgaacatggataag

SEQ ID NO: 49390 - DNA, 585 bp, Oryza sativa
acaaaacatgtttgacgatctcacagatagacccgttacagatcatctcttgtatgtacaggtgttgagtttacacccgtcacggatgaggtactcatctgtgatgagagtattttttaacacgttagtaatgacctaaaaaatcaaataaaacaactcccctcccttaatgagtctctctctccctccccgtctcgtccttatcccttcttcctccatcccctcctctctctctctttcttcttcctctgcccctaaaggcttgaatcctctttcccatccaccatgatgcaagtgtcgcctcctttgtcccccgaccatcggatccatcctctacgaggtcagggtcgggggacatagatttaaccgctagacaccgccttctccatccccatgtgtcgcctaccggtgtcgactcctttatccccaagagcctcgccagtgtcatctccaccaccgttgttgaacaccaatggcgttgcattctggctctactcctaagcatggtccgctgccctaagaatcgcagatccagcctttccgagggtagagggacacctgttctttggcctttgactcttggtg

SEQ ID NO: 49391 - DNA, 483 bp, Oryza sativa
  unsure (1)..(483): unsure at all n locations
cctatgaaactcaacttacattattggcacctttggtcaaggcgtatcactacangagcatgaaaggatgaaaagacaaagataacggaattatgtgtaaaggttgcatggatatttattttgcaaaaggaattcaattagttagtgtggtggtctcaatattntgctgtccaaataataatattntcacaacccggtatcagattctaacacccaccttagataatactcccttcgctccataatggatgttctagttttgttctaagtcaaacttatctaattttaattaactctataataaaacataacaacattntcagtactaaatatagtttattaaatcaacattttaatatatatttttaaaagacatatgtttcgtgttggaaatgttgctatnntttttctataaactttgtcatacttgaagtttgactttggacaaaccaaaacatgttacattatggaacagtgggagta

SEQ ID NO: 49392 - DNA, 647 bp, Oryza sativa
agcttatgctttgtttcctatggaattgaatcatatgaagcaaatccagaggtttttttctaatgatattcatttggaccaaagatgcttataagaagattttcctaaggactgaattcctccaagttttttttaaaaaagaaatccttcaatccaaaagggccttaaattcaattctgctattccaagaaaggcctgaaattgcaagctaccagtatgtaaagaaattcctatgaaaattcatttggtagttgcattcatcaagacatggctgggtaaaaataaaaagacgaaaatgaataacgcacctaaaaagtctggatttacgtttggtgtttttctcagtacacagccaattaatgatgtttccaagatgtaacagatggtcaacctgacaaaagagcatacaacaagttaacaacctatgcagctatgctcatcctgagcatcaaggggccaaaacacgttcttcacctttatttatacagcatatatatttccagttccatcatcatctcatctcactatctcagcagcagcagccacaacaaagaagaaagaaccctagctacgaaacattgtgttcccagtagtgcaccacagaacaaactcggaaacatgaacaaaggaattgtgttatacagcct

SEQ ID NO: 49393 - DNA, 269 bp, Oryza sativa
acctgccagatttagccatgtcaaaggaaaagaaaaggactcccacccataagcatacatatatatgagattcattgtaggccaacgcaaacaaaatattccaatattctttggcccctgttgaaaagacgattcgatgcatgatccgaattgatctcatgcatgccaacccttctagcaatctatccaatgggcacaacttttgtgtccaaaaccatctgcacaaatatattgtacatatacgtaccctttactttattttaatatgt

SEQ ID NO: 49394 - DNA, 676 bp, Oryza sativa
agcttttgttctctgaatgggatcttgcctttcagtttgattggcaagaacttttttattatttggagcaactggtggcgccacatgacctgaactctggggggaatgacaatcatcaactggaagcgcatttgcatcaacaacagcttcccagtcattcaaaaccccattcttctttttaagggcaccaatatcatcattcctggccttgctcacacttttcgaactggaccatacactggtgctggtggtgaaaatgaaggcacccccattgttggaatgcttcctgggcatgcccgccacgcctccagaattgacccaactagggcttgtcacaggagagtccaaatagctggtgcctaactccctgctggcagcacccctctcctccctgtcctcctctggattccctcccttccaccttacatctaaaccacagcgacggagcggagggtgtggcgaatgaacgggcatggacccaacattttggctctgacccctgcggcgaagtccaagccttagcctccttttcatccttgactattcccactcaaaaagcatgacgatcagagtttgaccactcttcataaaacaccaattcccccccctagaatcatccccaaactccattcacaaatagattattcggattccttcgctgaacgtaagaaattaa

SEQ ID NO: 49395 - DNA, 419 bp, Oryza sativa
  unsure (1)..(419): unsure at all n locations
taaatactaagcttaaggtgcaacanaatgcacgggcctagctcacaacaaagtaatttgttttctataaatagggagacccaactctacaactcatatatcagagcagaattaaaacgtctatgcacaatagagacgaacggtntgaaaacaagcaaatatttcttttcacaaactagtaagctaggtttgaagaanattaggaaattaacattttaaaacaaaactaaagctttaaagtcccgagagaagatcttgtaacagaagaaatcaatctataagtaccaangttgaaattcaaggatgaaaaaacaaccatcactcaagaaaccacaaataatgttttaaaggccanatagcatgtcaaaatcattaatacaatagaacttttcaaaataaaggaatccacctcaaagcat

SEQ ID NO: 49396 - DNA, 347 bp, Oryza sativa
  unsure (1)..(347): unsure at all n locations
caggcacgcaagcgncacaaacaacgaagggcnncaacctaaaananangaaannggaganaaatcanttctccaangaanangnggnnggaggaaaatgtgaaacccagacagaacccgccccagaaaagtggggtttgcagaaaaaagcatactaccagaaaacataggagtatgtaatacttgccttggtccttgctgtggaaagacgacacagttaaacatgtggggcaaaacaggaacatcaacagcatggagaatccgatatcacccgggtggaggcaagggtttttggcaatcacaacttttcctgcacggtgaacccgtcaatgtcatttacacccgaa

SEQ ID NO: 49397 - DNA, 464 bp, Oryza sativa
  unsure (1)..(464): unsure at all n locations
tgagatctctggcttcatcaagatcatgatccatanaaagaatagtatcatcagcgtattgtaaaatagaaagaccattatcaactaaatgaggtaccactactttgaatctgccttgatctttcgctctttgtattaaaatggctaacatatctgcaacaagattgaacagaataagtgacaaaggatcaccttgcctcaaacctttccttgtttgaaaataactcccaatctcatcatttactttgactgccacactcccacccctaacaatcgagtcaatccaatcgcaccacttagaagagaaacctttcattcacaatgactggtgtagaaacttccaatcaactttgtcatatgctttctcaaagtcttgctatagaatcacccattcttctttttcttgtgcaattcatgaagtgtttcatgcaaaattaccactccttccataatggtccttcctg

SEQ ID NO: 49398 - DNA, 670 bp, Oryza sativa
  unsure (1)..(670): unsure at all n locations
agcttcgaatgcaatattgaggaaatgtggtggtttgccattggcaatcattactcatttagcctggnggctaacaagaacaaaacagatcaatgggatcggatacaaagatccattggttatgcacttgcagagaattcagattttaaggcataagatattatctctcagctatttcgacctacctcaacatctcaaaacttgcttgttgtttctgactatattcccagaagattttaggattcctcgaatgcatttgatagatagatggatagctgaaggattcattcaaggagatagtcgacaaaacctatataaattgggaaattcttatttctattaacttattaacagaagcttagtccagccattggaaatacgcattgatggccaagcgcggagttgtcgagtccatgacaccatccacgatttcctcttgtccaagtctattgaagagaactttgctgctacaatcaactatccacagcttacatgtttgtcaactccagatatgaaggttcgtcgactatctctgatacagggacacgagcaatcagacataattatttctccaagctggaatttatcgcagcttagatccctactattttttggggtgcaaagcaactacccactttctccaacttcaacaccttgcgtgtgctggact

SEQ ID NO: 49399 - DNA, 481 bp, Oryza sativa
  unsure (1)..(481): unsure at all n locations
atctaccaagtccatatcagctccaccgggagaatgatgttctgacaatgccggtccacggggagcctcaattgatagcttagacttgggaggtgtaagctccgtcggtcgacttggacgaggagtcatcttcacaactatgtcttctttgggccattatatgaacgtcttgcgcgcatcgcccaaagtcatgatttcatcatttgggggcacgggcagcggatagcctgaccaggtgttctntactgtatcgatggacaccttggcatacccagctagcaggtctgcgccgtggaccttgtctgtaaccgagggcttganagccatgccctcagcgacttcaggagcgaaagttgggtggactctcgctagtaggacacactgtgctgcgccctgcataaggtgaaaagttgaatntaatatcggaatgtgtacatgtcttctattaaatatcgatcggataacaacaattacctctatg

SEQ ID NO: 49400 - DNA, 428 bp, Oryza sativa
  unsure (1)..(428): unsure at all n locations
ccaagcttttcaaaagcttttgggcgcagagaggacggtggatcgaacatgacttttagatggtctctcagctaccggngcctaactttaccgtacccccccccccccttccctttttagtcttcggctaggcccccacctgcttaccactgcactcccaagtatctattactactaccaccaccaggggagcgagtcgcccagtaatacgtgtagcatatgcacaccacatctgcatggcccacccacgaaatactccacctttctcggctatggatggatggacccgtgccagcacgtcagttacttatccccaaaaggccgggcttggccacgggccgacggatatagagccacatagctcctcatacccgcatgcttcatcccccccccccctctttccttctgccccggccggctttgccgtg

SEQ ID NO: 49401 - DNA, 404 bp, Oryza sativa
  unsure (1)..(404): unsure at all n locations
tcttacactgttgggtgcttggacgacagggaaggaaaacttgngcccattggattntgggttgcataattntcctaatttaatttcctgatgcaagggacgaatgagagggctgcacttggatccatgcacgattttcgcatcaatgtctgtagaagttctgttgatgggcccaatgcaacaccatatgcacgaatgggcaggcctgaaattntcgtttaattaaaagtgtgatggcaagtggctatggtggtaacttgatgactatgactgttatgaatatacttgtatcttggtatttccatacaagaacttaatgtgtaaaatattgatctggtttcaactaactgtagcagcctagcacgctatctaaatcagacgtgttacagtataaccaaaacaca

SEQ ID NO: 49402 - DNA, 666 bp, Oryza sativa
agctttggtacagtatcaactgacctcttcggaggaagataagctctttatgtttttttgctcaaacctaacatggactttagtcaaaatcaaccgaagcctccggtgggacaatacgaagtagacaacatagccctccacttaattttttttagataattggacttcatatcttaacatttttataattttataatatagaatttacacacataggaaataggcctctcaacatgtgtttttctttgttagtactagttgttatttgcatagttgatagttgctagaaaaattttgagcaccgttgagggaaatctaacgtatgtaacattatttatgtacttgtagttatctcgctcctatttttttttgtttttgttcacactaaatgcctagtcggattggagaaattttagcaagaattaattttggaggaaccgaacatttcctttaaaaatcctgtaaaattcctgtgttctgataaagccatgaacagctcagctgcgagttccttcttccatcttcaagccgtcgttcgtccccatctgccactattcatgggggtgaaccgattctaacgtgaaggcgatcgatggcctctggtcagtctatccatatgtcctcagtctcacggaggtgaacaggcagtctgttttgactgtggag

SEQ ID NO: 49403 - DNA, 490 bp, Oryza sativa
  unsure (1)..(490): unsure at all n locations
acacaaaaactcacttattgaacgcagaatttttaatctcataagaactaaaatgtttcatgtgtgaaaattatgtagaataaactaattattgctgcctcctaatgttctttttcccgatacggcgctcctactattggttntttttataatggaaatcaatccagcctctacatcgaaagtcatggattctaatggtggtcgtgtgtttgacagtggtcgcagcaattcgagaagttagtcgaggaaatgagcaagcttcctgagtgtgaggcattggagatatgcccagcattcaatcattctcatggatttctaccaattgcgatgcatcttcttaggagatatgctggtatcagaaaactttccgtcaatttgtggtgggtggtaagttcttattttcttcttgtcaaagaaaaatggttatctcttttcaaatagactactctctccgatttcaaatgattgtcaacagatactattcacattg

SEQ ID NO: 49404 - DNA, 649 bp, Oryza sativa
cagcttctcgtaacctcgatcttgagctccacctctagctctatcaagcttttttttcccctttggcgagctccgcctccacctgcgtcgaacaactacaccgtactgccatcatcttgggctttagctcaagctcggatgctggcttatcccaagttcaatctccttcttctggtgccttgtcccggtgaagccgactatgaaaagttgaggtggtgctaataaagacatgccaacgtcaaagacatactaaggagctcaaaattctcatcaacatatgcgatctggcttgggaggaagggttgagagaaagagaaagggagaatgaagaaggaacgtggctatctaatagatggccctagcaaaattttaatttatttttgttgactagatgcaacaaaagcaacatgcatggtggtaaaagaaacacacttgagtggttagggttaaattaaacgattttaactgttggggtggaggaggcgatagaaaacatggccggttgtaggtgccggttgttcttaaaaacagcacctatagctttgagccaagccgacgagtttagaccattcctgcacgcacgcgcactttaccccacacgcgtgcttatctactcccttcccttttctatctctcacatatctgtccc

SEQ ID NO: 49405 - DNA, 350 bp, Oryza sativa
  unsure (1)..(350): unsure at all n locations
cggacagagccgagccgccggtgctgtgccctgtgcagccgtcgttttcttcgtaaatccgccacatcccgagctccgtgtgcaaaatttgttgaggggaaatattcctcttatcctcctctatgctctcccccaagaatcggagcaaaccgttgagtattttatccgaatcgaactcgttnttgagtttatctccaaaaccgagtttttgatttcccggatcgatttcttgcgggaggagtccgatctcttcaatccaaggctataaataggaccccctagtcctcctctttcgttttccccctctcccgtcctctcccgtgcaccgtagcccgccgtcgacgccgtat

SEQ ID NO: 49406 - DNA, 632 bp, Oryza sativa
  unsure (1)..(632): unsure at all n locations
gaccagcacgcacgcaagcnnacacancnnaggggccaaaagagagggcgccnancgaggaagatacaaatgaacaaccaaagaagaagaggggatgggtatgcccgcaacacagtggcacacccgcccacaatgccagacggcctatgaaacaaaggcactctttcccatgaggcccgaaagcttagtcataggtagctatatgatccacctttggtaatgcagtacaaggcaacacacaagttctatagggggcaggtaacactacaacgccgcagattcaaggcttgcacaacacattgacaaagggaacgaagatggcctgtttatcagtcgcataacaccccgctcaaatccgtgggctctaatcatggatgcccggcacggggacacaccccaggtttatgaactttcaccacactttccgcacaaggtgagtagcttgctcccggtttaactgggggaaaatcctagcaaactaatcacacaactggccaaggcaaagttacacacaaggaagctcctgcacacactgtcaaatgggaacccaaggtttcccggccacccgaaggaaaggaacacggaccaatgggaaaggaactactatataaccgcacttgccggagccaaaa

SEQ ID NO: 49407 - DNA, 476 bp, Oryza sativa
  unsure (1)..(476): unsure at all n locations
actttctcccgtgtcatagagaatgcaaatgttattatgtttacatacgaagatgcactccttggtgatgttcaagtctatccagaanaagggactgttgctttctctgctggcttgcatggatgggctntcaccttgtctaactttgcaaagatgtatgcatccaagtttggagttgatgaatctaaaatgatggagaggctntggggtgagaactactntgaccctaccacaaagaagtggaccatcaaacacaccggttctgatacttgcaagagagggtttattcagttctgctatgagcccatcangcaaattatcaacacctgcatgaatgatcaganagataagttgttgcctatgctgcaaaagcttggtgttaccatgaaggacctaactggcaatgctctcatgaagcgtgttatgcacacttggcttcctgcaagtaatgcacttcttgagatgatgatctatca

SEQ ID NO: 49408 - DNA, 418 bp, Oryza sativa
agcttaactatcaatatgaccttatttttttatgtttgcttatcgaccctcattttaaaattgaagagcaatattgaccttattctgtgaagattggataacggtgttaactaaagggcaaattatccatctttccgctttctacatacaaattaaaagaagagaaattaaaggaaaaaaagaaatgggtgcaaagaaatccaagcatgcccaaactaacatatgatgatttctccttgccatgtacagcacttccttccatcattcaacgattatttctcccaaccacatgcaaagcactaacaatcaaggggaaaaagttgggctgggatatggcgcctggatttttcaaattttggtacttatgaaaaacttattttgcaaatagacccctagaaaaacttatcctagaaatggg

SEQ ID NO: 49409 - DNA, 449 bp, Oryza sativa
  unsure (1)..(449): unsure at all n locations
ccaatggttttagaatatatgacttgcatgcaaatgtcttggattctccttatttctcgnatgataccttgtgcttgtgaaatatatcattaggaagacatgtcatctaagcaattggtaaatgaatgattgcctgacaatatgacccttgcttttttctatttaattcttggaaattatattaaaaaaagtataactttgcctactcatcattaatgttttattcctaccaaaaccatatgttgatcttcatgataaaccttatacatatgctgctngtatcattctatgttttgtcaaatggtttagacccttattagaattttttttctttcatgttctcatcatcaagatcttgtgcacatccaccatatattgctctccctgtacactgaatgtgtagctaaacattattatccaccatcatatgctatacttctactcccgaa

SEQ ID NO: 49410 - DNA, 665 bp, Oryza sativa
agcttgaacgaacaattttcaataactaatataacatatttgcatattttttttttcaagtaatcaatttattcgtatacagtgatattataatattattatgttggcatttatttgaaaatgagagctaataaggagaaaaagaaagacttaaatcaaaattttaatatatgtgcctaaagtgtatgacatgtgatcaaactcatctaacttatatacaaattagataaaatcactatgcaaaaccatcttaggggttatataaacggtattgtacgtaaagtttagggggttgaacatctgatttcaaaattcagggtgctagatagacttccatataaagtttaggggttatttggactttttcctttttcaaataaaaccgaccgaaagggagctaggcggccgcaccaaatgctggaagttcaggtctggtcggggttacaaacggcgtccacacctggacgctacaatagccagcatccatcctataattaaaattttcatatatgatttactacatatttgtaattaatgggttattaattatctctaataatataaaaagtacccgttcatcaaacacaatctcttcttccattcgcccagctgaaagttcgttctcctgcgcctgaattgcattcaagagacttcattaacctgtc

SEQ ID NO: 49411 - DNA, 481 bp, Oryza sativa
  unsure (1)..(481): unsure at all n locations
cggcttanctcggtcgaactcntactcataatttaactcgtgacttatctatngagccagctcgcgaactactagtttattagctcgttagttaaaaggaacaccatttntacgtatagtacttgttacgttttaactagtgttaaccatttagctatatcaaaactatttgtattttgtaagttctctattgtttaggttgtgttactatattaatatatgataaaaaaataaattataaaaatgttatacatgcattaacgagtccaactatcttaacaagttaggtcgtgaccaagctgagttattatattagcttgttaaggttaacgagtagagctgtgctagctcgttatactgagctaacttgttaagataacaagctcaaacgagccgagctaggttgttacccacctctagttctaattgtcagtcacttcttttttaatctataagcttctatatgaggaataattacata

SEQ ID NO: 49412 - DNA, 670 bp, Oryza sativa
agcttgctgcacatatatgcttatgctgtccccagttcattacattcttttgttcctacaattaacaactcacaggcttttgccaagcacaaacatgttctcttgttctctactctggccaagacatgcagatcgttcccttacgtaccagttaagctaattaagctagctagctagcttgctgacagtatatctaggagacatctgaatcagggcaaatgcatataaatatgtatctgtcttacaagggcactactgaatatacttcaaattggcactccgagatactgattcatgcattttagcccgtcaatgctaattaatttcgtcatatatttgaccatggcaggataatatatatatgtatgtatcgagatccgtcaaaacctgatatgtcacaatcatgacagagacaaaagttaattatcatcatgcctgatgtgtaagtatttgcatgtgtaagtataggctgaaaatgcatgcatgttcctaattactagtttggttatcacttatcaccattattagcctaatcagtttcaatatgtctacagtaacaattaagtgttagtcaaacagtttagcacgtacttcctccaggaccatgtactatatgagaggagacggcattaattaagctagccagctggattaattaatgtataactag

SEQ ID NO: 49413 - DNA, 482 bp, Oryza sativa
tgcgacgagcctcatcctccatttcttttgacgtgattgagcgctctaatttagcctcactaaatgaaggtaaccaacactgttagctattgtgataggcattacattagttagtctttagaggctctgtatcttctccgtacaaaatttaatggcaaactctgttaataggactcataattgggacgcctcatattgtgattcccagctctaatgatgttgaggttgctcttgatgatgagtgctcagatcagaacacccaacgtatgtctaacggtatatctgcaatatgtctttggcttcttaaatggtcgtgacatttcaacatctatagtgtgtattctcatattctgtgcagctttctatggtctatgtgagacacttttcaagcttgatcagggacgttgtgtgctcctcaaatgccatactgaaacgatgaagataggatcccttgagtgttattatctctctcaaccatctga

SEQ ID NO: 49414 - DNA, 583 bp, Oryza sativa
  unsure (1)..(583): unsure at all n locations
agcttgggcaagcaaggctgcaattgcatgcgtggccgcctcgttttgttttttatctgtgngactggcaaagtgggacccacatgagacgtgccccacatgtcagaggggggtgctttgagataaggtgttctttttagtaagcatcattaccggcacattcaagcatgtgtcaaggccgggtccgggctttttttgggtttgggaagagacaactaaaagcgatttgtttagtcgccggtaacgccaaacgcggaatcattacggcacaaaccaatcggagattagattcgacatggactttttttgtccacgataatcttttgtttttttagcactgttcgttaggaggactgaactcgtcatgtactgctaatctcatcatgctactgtggttgctaattaatttaccgggaattaaacagagggcgccttagagctagccggaaatgacaacttgggataagacgaaaggagagtgcgaacgcggtgtatccaagttgcaggccgggaaccgccccacgacatgactacgacgacgactacgacgatgatggaggaacaatttagcgtgcggagtgga

SEQ ID NO: 49415 - DNA, 389 bp, Oryza sativa
tggtcgaatttgagccgtgtatttgtgtagccccccgactctctgtgttagttgggaaacaactgaacatagaatcgaaaactatagtttcttgtcgtcaagtaaccattgcttgagtgaagatgcatgttgaagatgtccgagtagaattctcttgtagtcgtcgtggttggtgaagtagcaaggcttgcgaagtagaggcaatatagtttgccggtgccgaagataataaagatgaaatcgctctaccatggtgacaaagcaatcaacgacggaagaagtagaatgatgacgaaaacgcgcagccgtggaggtgaacaagccagtcggcagcagacgtagacagcttgcgttgaatgtgatgacgcttatttgctgtggcggcgacg

SEQ ID NO: 49416 - DNA, 676 bp, Oryza sativa
agctttgctgatgcacacaagttgtcaccaaaatatttttcggccgtccgatttctttgtgacggctagctggggccttgatgctgcaaaaaggcatgtcgccactgagcactaatagtttgggggtagctgtccatgctggccacaagggaagccacccggcagggcatggcccacaccatctcaaggttaatgcagccattttcccctaactgtcagtgtcttaatctccttttttgcttgcccaattgccgtgctccaaccacatttttttaagtcttctctgaacctaacagtacactcttaagttgcatgcacacagggtcagcattaggggctctgccagtactgcttgattggggtgccaccatggtttgctcatgtggtggttggtttttatcaacactgatcactgatctgtactaatactagctctctgctctgaagtcttgatcatgtgtttggtgctgaggttaagctgagttgcgggtttgcaaccatatcagaagaaggaacaacttgcatgtaattccacatgagagcaaagtggctttttttaaggtgacagtaggttcatattcatactaaaaaaattttatggtttttgacaaagcattttgaggtatctataatttacactaaaaaatttttgataccttaaatacttactacctcc

SEQ ID NO: 49417 - DNA, 493 bp, Oryza sativa
  unsure (1)..(493): unsure at all n locations
tcaagctngaatgctgtgaataaagaaatttccaaagtattgggcatacgccatgcgcacactgctttaacagatgtgcttaagtccctaaaagacacatggtttcaccacacctggaaatatatggcatatgtggtataacatccgagtaagtaaactcataaaggatttaccaaccgcctgaaaaatgaccataatatataatcagcctaagccataatattggtcaataaaaatgcacacttacgtggcgaaaagcaatgatattgtatctaatcaattgcttaaaaatccaaacagcaccttgacttatatataaaaaagtcagcgggccagctatataaagctntactgtttgacaccttttaagatgcattgtaccaactcctacaaagttgagtaactgcggtataaaaggatttaaggtattgggcacttgatcacgcgcactttggcctagcaaaaagtgcctaagtccctataagaacgtgac

SEQ ID NO: 49418 - DNA, 668 bp, Oryza sativa
  unsure (1)..(668): unsure at all n locations
actgaangcatgcaagctttgccgtgacacatctcatgtgttgggacgaggctcatgtgccgggcatttgctgtttgcgggtaaagngaacatccactgcagtgtgagtaaaccaaatctattcgaatagccgtgctcgcggttattgagcaccgggacatgtattacacttggctagactctaaattcttaacttgtgggggatgggatattgcatgatgaattttatgctgatggagccacttcccgagaggagggaaggtggacatcctcagaaaaccatgacgattcaatggcgggaagctatccttgggatcacagtggatggtggacagaaccgtcgttgtttaaagtgaacactggtactaaaatttgatcagtctatgctaggttttaagcttgtgaaaagaattgtaaaattagctttatacaaaagaacctgaaaccattccttagataccctctatcatatgcagcggggttggggtggctttgctgagaacaggttggacccacccttgctatttatatatactttaggagaggggtgaaaaaaagcccttggcggtacgcttgcgtatcccacaagatgatcggagtgctgtcttgttctaggtctcgtttcccaatcgactggctggggcatggtaaaccggccctttatatta

SEQ ID NO: 49419 - DNA, 433 bp, Oryza sativa
ctcacgttgacgaagctgtgacgcaacgcgcagtattttgtctttctgactgatctgaagaactgcctgaagaaattgctctgcatttgacgatcatcagagaggaaattcatgtctaacgaactgaatttctcgtcttcttgtggcagttgggttttcttgtcagaaatggtgaaccgagctgacagatcgatcttacaatgtagaacgacgccggcgtcttgttcagcacgttcatgtgctgcctgacgaacgacgtctcgtgagtaaatctgaacttcgtcggatctgcaatgcaatgcatagagttaattatgcggaaagtagtattttctggtatattccgcacctactgtatgcatgtggtataaatagtttaataaaaatatgattaagtctgaccagatatattatgataatataagttaatata

SEQ ID NO: 49420 - DNA, 651 bp, Oryza sativa
  unsure (1)..(651): unsure at all n locations
agcttttggacctgtactggagttaagcagatcttccaggcctcgngtttttttattattctttttcatatgtgattggtggtgttgaccaacgaattattttttgttgatttgtgattggattgcacatgaccaatggagctggctcggcttgaagctggcatctctatttttttttaatcgggaagagtacaaatatgtctgttctaggttattggtgctgaccaattaatgctggctgagaaaccgacaactattgccggttctcaaccggcacctatgaaagtttttgtattagtgttcataccgtattttttggagtaaggacaaaaatcctatagcctttggctgataagtacacccagatatatgtcagatcttctttccgaactcttcctctagcttggcaatgccagcagtagaaggcgacggcggctgcagggacatattatcaaatctcccgtgtagtttataacttgagaggtgtcgaaacatgatttcggcaataattaaaaggggtagcacacgagacctaaaattggatggatgcagagacaaaggatttatacaggttcaggccctctcgatggagaaggaataccctacttctgtttggagattgaatccaccgggtgtaatatagatctgacg

SEQ ID NO: 49421 - DNA, 457 bp, Oryza sativa
  unsure (1)..(457): unsure at all n locations
cggactatgccaatntctgcccagtgagttagcttgctagctgatatctcttatataccaagctggctagcttttttcggctgagggccaagatttgaaggtattcttccagagacttaaatcggggttggcaaatctaaaggggattcggttggtctcaccattgatgaactcggtggggtttgggttgccgattggaccaagaaagaattaatgctcatcggttatgctaggaaccgcaacttgatgagaaagatgctacatggaaagaaaatcgaagattgagcgaaagaagaaccaatcttgtacgtaaaagaggggatttagccgatggtacctacctcgacgtactcggcagttggcgcgctcgaaggatcggcggaggtcgacattgtcggtgatggaggtcggcgctgctgggagtcgcttgctggatcgccgganagctcanagatgt

SEQ ID NO: 49422 - DNA, 252 bp, Oryza sativa
ctatatacctctcggacggatacccaccattgtttgtggtgatctcgcacagatatagccagttcgcctttgaggatcccgacttgctatcatgagagcctcattcactgccctatatctattggaacgtgtcacagacttgtcgatgaatataactatgatactacttgactctaacctatagcaaatgctttctgatgacctgcgtgattatagtgactgggttacatctataggagatggctctatacc

SEQ ID NO: 49423 - DNA, 272 bp, Oryza sativa
tcactctctctatagtatttgaaacaatcatcaattattgtcggccattgaaaccccactctcctaagcaaccaatttatcttacgggccgattgatgaattccacaaatcccttcatgaacttctctcctagcaactttagattgatcattatctaagcatttcaacaatactccatctatttttcggcgatataatatttgaacatttgccgccgaatcttccgatcaatcttaagtgtaggatctttcaaatatctaatcaaaggaatt

SEQ ID NO: 49424 - DNA, 664 bp, Oryza sativa
agcttttaactaaactcttacaagatcttaccaaggcaagcggaattgttattttctaccgactcaatcaagcaccccaatagaggttggatgtatcgatgccttggcaaacacttgctgtacggctgcaatcaaatctgtggagctctaggtaggcttaaatatgtagcaaaggaatagcaaatgctcaaatcagataatgcaaagttgaataattgttcaaagtcaagtaccgtgctggtcctaggctagaacgtactagagacgcgagcctagacacaaacgataccacaagatagcactaggaacaactcatgcacaactctgatatatgaagttcagctcaaacataacagtatttttgtgaaagcaaactcaaagatacaactgatttttctcttttctttctttctttttctatctttttctttctttcttttctttttttctttttttttggtgcggcttttgttttctttatttttagcacctttctgcattttttttctttttttttaatttttttttcagcaaaaaccaactcaaggaccttaatgcaagattacaaggactcaactataaatatacaaattacagggactcaaatgcaaaagtgcaaacccaaaaatttggactatacaaaaatggaatgcgctcatcccat

SEQ ID NO: 49425 - DNA, 485 bp, Oryza sativa
  unsure (1)..(485): unsure at all n locations
tcatcttatacttaatataaaantgaattaaagaagtagatttattttatgcaggagtggcacaataattattgcatcacagtacaaagtcctccagcatcactgcttatttaccggattattccaatagatcatttgctctacaatccgacttattttaagctacctgttaagtttatttctcaaaatatttgtttaggcctataatcatatcgataatccacgacgatagtttgttttgtaatttcgaatcaaatgacgcttaaataggtgcccgtttctaaaaggggaaagtagaaccgagatgcaatacgtgaatgaattcttgggaagaatattttctacggtactcactacttctctaccgatagtagaaccaatctagactttatatcttttcttattggatgggtcacttatatttgtgctgtcacgtgaactatcgataaataaaacatctctttctactagtagtagaacttttg

SEQ ID NO: 49426 - DNA, 569 bp, Oryza sativa
  unsure (1)..(569): unsure at all n locations
agcttgataataaccaaacttgtttgcaaagaacattgacctacaccaaagtttttttttaattagntaaagctgggaaagccacagaagagcagaaatacttgaaagccgctgggaattctttcgctggtcattctggtggtaagacccctgatgttccttgtggcgggtggttcaagatagaaaaattggattggataacaccaagtcccttgttattatttgaagaacaaacatcacatcttacttgtagctggcgggtgaactttgttcagagcactatgatgaaaggaatgattgaaagtggtgcaaaacaaggaatggcggaaggctttgcgcatttttctgaaatactctcccagaagattaaagtaactgaggctgatgatgctaattccaacaaagaaaagattttatcttcactgcatgctcagaaagaatcaggctggagactgattgtccgctttcttttcaacttcacgttcattttttcagttatcatagcatcgtatggcatagcacaccttcacttgtcaaaacccaatgcaatgcatgggctggaatatttt

SEQ ID NO: 49427 - DNA, 480 bp, Oryza sativa
cggttcattgagtacttcaatttgaccaagatgttaataacattttttagctgaattggctaaagtttggctagtaaaattgaacatgcaattcacctagaatgacgcaattttatcaaacgtcttacgtcaacgacacacggagtctatacacagtaatgaataaatatttgttacaagtatgacaataaataggtgcctaattaactcgatcgaacctgtctaaccttcagaacattaaggttctatatggacaagtaaaatatattcataagaactcgttgctcaaagttttctaggagaatttttaaaatcaaaacaagccatgtaaataaagtgtttttagcaaagttgggcaagccacaatttgtgtggccaacaatttgttagacacacttctggtaagtggaaagaaaacgagactatgataagtggatccatctctttaaatgaacctctctatcataaattgtcaacttt

SEQ ID NO: 49428 - DNA, 649 bp, Oryza sativa
agcttctgttgcagtcaaaattaagggggttgtatccaagtttttcacttttttattgactgcttggactactggagatgatcagaacaaaatcatcctgtatgacagtgaagtggaaggcaggaacagagttcttggagctgatggatcagtcgatctgactcgctgtttcgtagccgtcaatttggatgatgaactggtgctcaatgtctgtgtttctgaaggagctggctcaatctttgagctcgttcttggacacaatgatgaagaatgtgtccttgagcaaggtccctatgaactgcaggtgaatgttgtttggacagctgccttgaagcatcgacagcgcagaaaattgtttgagcgtatcggtgacttccgcgtgttaaggtgatatgtagtatgaagatttatatgggggaagctgttacatctcaagcagttctttcttgttatatagattataatttttttgttcagctgagttgaactcgtgcttaactgaaaatctgcctgcaagacttatttagttatatgtactggtagactggtaatctataagattactgatgtctagtagggagtatggatctgtctggtagtctgtataaccttttctgaacctaccaaagtttatttgcgttcttggaga

SEQ ID NO: 49429 - DNA, 463 bp, Oryza sativa
  unsure (1)..(463): unsure at all n locations
tggtgatttctagcttgcgcaaaatttacaagatagtttaatctattgtggattccccgcaaagaanaaaaaccccaatcatttggggattgtgattttgtgatgattaaacatgctgtatctatatttgtaatgctataaattgtatcttgcatctctaaatttcctgttctattgaacctatgttgtgcgctcatcatgtgcttcagcttgcgtattggttgatgaagatggagatcacagtttcatctcatacagtaaccaccatacggtcataattgatgtatggctttctgtttctgttgtgtataaatattgaagcttatctttgttcgctgtaggcctcaatccatgcgggatgataatcagaatattctttcgcagatttgataattcatttgctttgaagatggttaatttgaatctggtcagtgcttaagcactaatgcgtcatgtataatgc

SEQ ID NO: 49430 - DNA, 662 bp, Oryza sativa
agctttccccagccccttttcatcaatggactcctgacgtctacgaatgtttttgttctttcgacaaattcctacctctatatctatctctgaggtgtttgggttttgcaaaactccatagatatgcagaagagaaatgctatccccactccgaccaagacagaacttttaccaaaagtttattgtgatctttttgttcaaataacaattaaggtgaagcagggtcaggaacaacgaatctctttatgataaacagatccattttgcaagctcgttattacgggtagttcctacaaagaatcggactaatgacgtatacaatgcttgaattatcgacgtagatgctacatagtgggttctcatccttcagagactacgagtgtaataggagcatccgttgacaaaaggatcaccctaagatgatcatctcatggctattgggaacgaatcaaatcagatggttctatttctcaacctttctgacttgctcctacggaaccaaggtcgaaaggattgaaaaagtcagtcattcacaaccactgatgaatgattcctcgaaaagttaaggattagtagttctttttcgaaatcgatttcgaaaaagaatggattcggtcttatacatacccgaggaacgtattcaaaaaagaaagaaaacaagt

SEQ ID NO: 49431 - DNA, 489 bp, Oryza sativa
tgaacccaagtcctacagtgatggatataagcgcaattgaaattcctgtggagttatacatttgtgtattgataagaccgttcacaatttcttgaagctcgatctcccccccagatgaaccatatagcctagagaaaccatgaaccagaatagaagagcttgccccacccatgagtaaatatttcatagtagcctcattagaccgtagatctctcttggtatatccagaccataggtaggaacataaactgaaacattctggagctacaaagatagttattaaatcgttagcaccacataaaaacattccccctagagtagctgttaatacgaataacagaaactctgttatagccatttctggacattcaatgtactctacggatagaggaatacattaagttgaacatactaaaataagagactcgaagatgtcgttgaaaatgttcggttggacatttcccgaaaagctaatatacgtgcttctct

SEQ ID NO: 49432 - DNA, 410 bp, Oryza sativa
agcttgacaccatcttcgaatctcgaaagcgctcactctagaccgcacactgttatgcaatccaccaattttcaccaagtttacacgcatcccgcggtgtcagaacatccatgacgccaatactgagacaacaattaacactaatctaaaccctcctgaccatccatgaaaagctagaggggaacaaaaatccggaatcctacccatttcgcacaccgtacaacaccagaaacaaaaacgagccgccacagaaaaccccccgcccgccgcgccgtacagccgggcacgccggcggcggatcacgcgcacgcgcaagcagaatccgccggagaagcccgggggtagagaagaggggaggtgatggtgtcggttgataaagggggtgctttggtggcttgccttgttgaaaa

SEQ ID NO: 49433 - DNA, 622 bp, Oryza sativa
  unsure (1)..(622): unsure at all n locations
agcttgtgaggatcatagctctgaaggatgagatagcgcgccngaaaatttttaatgctcaactgaagggtctccccgctcccggaggagtccggatccgcaccacgcctcgcaagtcaacgactgcacccgtgcgcattcagcttgcgcccaggaacccacctcctcccgcagctcctccagcacctcccgcagttcccgcagcgcccgtagctccagctccagccccagctcctgttccagcgtcagctcccacgtccgctctctcctgcgctcccgcgtcagccgccaggggtccagccagtggcaacggagtttgtgtgtttaggtttgttcgcttgtgggtcagtcgacggttgacatcatgtgcctatgatgtggctgtcttaataaggatttctttgctattttaagtgttttaattcagatcagaacaattgcagtttaaattcatatataataaagcttagttcctgagcatctgtttttcttcttttccatccctttcgtctgctctcccttcagatggtcaacaccaggaatggcagtcgtgcagcatgtgatggcagcaacgaccaaaaacgcaccgacggtggatatcccaacagcgcctctggcaacg

SEQ ID NO: 49434 - DNA, 480 bp, Oryza sativa
  unsure (1)..(480): unsure at all n locations
tgcgtcagtgtaaccatttacaacgagctcttcctgttcttcgtatactangaacatatccttagttcttctcaagtacttcaggatattatttacagctatccagtgactctcacctggatctgattggtatcggcttgttgcattaagtgcatatgaaacatctagacgtgtatatagcatagcatacataatggatcagattgccgaagcatatggaatcacactcattttgtttcgctcatcagtcgtttgaggacactgattcttgccaagattaatggcatgtgacatcggtaagaaacctttcttagaatcttgcatgttgaacctcttcaacaccttgtcaatgtatgtactctggcttaatccaattagcctctttgatctatctctatagatccttatgcccagaatatatgctgctttccctaaagtccttcattgagaaactattcttcaacgatgtcttatcggatt

SEQ ID NO: 49435 - DNA, 667 bp, Oryza sativa
agcttaactttcggtcactgactccccagttacgtttgggtggatctatattagtttacttaatatgaaaataaaggtctttcgctagctcttctttttggatagagataatacacgtgatctcctaaatagaaagcaatgtgttcctgataatgcaactatctattgtacctgctgctctcaaaatataagggaaacaagggaacatcttttctttacttgcagctttaatatgcaatgttggagtgtgctgggttggaattggagcacttcccaggggtttcatcgtatgattcaatcatagagtgcttctatctctagtccctgttttatagagcttttgcttttggctacttggaatatttggaaggagagaaataacctaattttcaatggaattcagcttggggttctttcctggaaaaggagtttaaagctagatttgagtttacatttacctaggctcaaggaaactcatcatcctctagttcaatcatggattgaccttctgtaattttggccttttgttcttttctccttcttttgtctcttggaaataactcttctttttaataataatctatactgtggaggcctccttcattgtgattccctcaaaaaaaatcctatttgaaaaatggatcttctcaccattcggcatttattt

SEQ ID NO: 49436 - DNA, 466 bp, Oryza sativa
  unsure (1)..(466): unsure at all n locations
tattacacatattgcaaactttagttgggagaatctatgtatcgtcttctgtgtctctggtactgatatgagtgagatgtaccataatgcacgtgctgctatgctanggctagtgaagagctctattggtacaaaattcacgggtcagtttggtgaccttattgctgtaagtatttcttttattcaagatttgagtgccacacaacttctcggttaagtgtgttcagtttatagtttatctgacgtcttgtngtactatgctcaagaccttgctattgatgctactacaacagcacgtgttgacctangtcaaggtatgcgtgaagttgatatcaagaaatatatcaaagcggagaaggtttctggtggtcagttagaggattcacgggttcctaaacgagttatgttcaataaagatgttgtacttcctggaacaattagaaggaagatatttacccccgcatta

SEQ ID NO: 49437 - DNA, 355 bp, Oryza sativa
gaggcatgcaagcttttcgatagagctttcgaaaatatgtcacatatttcgtccatttgagtttattcttttttatggttagctcttgtgtgctcttaagagtgaaaaaaatcaaaaaaataaaagaaaaatttaaaaatccggggggagggcgctagccacattggcgcgctccccctgccacctcaacgccgccccaccacggtggcagtaggacggtgccagagtgactggcgccggcgcccaaaaagaaccattttcaagataagttttttcagaagtctatttgcgaaataaatttttcaaaagaaccaaattgtgaaaaatccagaacatgcaatcctcatgggaggga

SEQ ID NO: 49438 - DNA, 474 bp, Oryza sativa
  unsure (1)..(474): unsure at all n locations
tcatgttccgctttacatttaagctgtgaaanagttctagccaaattatcttgttaatatcggctgtgagttatgatgtgtgtaggcagccagaacctagaatacagggattgtgatactgaacacccacacaatctcgatttgattgagaatctatgaggatactgattggcgctcaagaatggcgtagttaatgttatgatttgccagcattctcagctgctgattctcaggctgattctacttggttggtagaaaatctacttatccaggaacaagcgtatggtaacttttcctttttttctcagctatgtgaaaagggagaaaactcgctacactctataggaaatgaactactcttctaccgacggatattctaaaggctatcctctggtacctcggccttacgctaactcanaaccaaactaaaatgggttgatcggagctattctctagaatttttgacccanattg

SEQ ID NO: 49439 - DNA, 667 bp, Oryza sativa
tgcaagcttttcaggaatatttggcaatgtcagctgctgatgccttggagcatcttattgttgttattgatcgctggacatatgtttggggcaacggtattttttcttcacagaaaatttatgccatgaatttttctcatgtctatgtgcctggttatattaaatggatttggaaaagcagttgtactatgaaaggcaaggtgtttggttggctcctcttgattgatcggttaaatacttatgacatgttagacagaaggcgttgctccccttaaaatgcttccttgctctgtgtactttgttcaacaggatcaaaggaaacaactttccacttatttttccggtgtccttttagcactcaatggtgggtgcaatttggcgtgggtttggaatctttctttaagctttggtgaaatgttgatcacggccagaaattcatataactctacccattttggtgagaaggtgctttatgctgcttggaacatttggaagcagaggaatagtttaatttttgaaaacatttgttccctctgttccctcttggagagttctctttaagaatgatctctcccttttgttcatagaggcaaaaattctgagagagatacattattacagtgggtaaaattttgtgcaattgttttccctgtattaatataaaatc

SEQ ID NO: 49440 - DNA, 432 bp, Oryza sativa
  unsure (1)..(432): unsure at all n locations
ctggttggtgttacagtatagtcctagagactatttggcgcgcggtgtatttacctatatgaggtatattttggtgattgatgtttttatgctacaagaggaaattcgtctcaaggtggagattgttaaatatgtgatccgtattttggacccacaatatattcggattagtttcctagtaggagtcctatgaggtgtctttctattatcccctatatatataccctggntagtcgtacaggaaggggtgacgtttccattgtgattcccctaagtatgtaatcatctcctctacagtgatcattgccggtcggcgcccgtggttttttcccgcatatgttttccacgtaaaaattcgtgtctctgttgtgcatctatattcataacacatggctagcatctgactccggttgatttctttcttattcgata

SEQ ID NO: 49441 - DNA, 665 bp, Oryza sativa
cagcttgctcgattttattataaatatctttcaagttcagagatgatgccgcttttttcttttaatctacataccttaccaatgatgatacataaagataaaagggtttcaaactacttgaaacatctctataatgaactgcttgttacacatgaaattgtatttttcttcaattgatatataattcattcaaactactcaagacatctcccaaaatgaactatttgtgctactgtttttttaaaagcatgttgatgcctattttttatttgtatggcacagtttttttaacgctgaatatccaacagcaaaatcctgcgtgatatcttatctcgtcagccctgacagagatggggccggatgtctccatggccgtgtgttgcgcctttccagtacttgtgtctttgcttcttgtccgcttcgcatatgtgatgtatcacagcgggcacatgccttcgaaactctcaacttcaactgctggaatgcggactctcatcgtccttgggtctggtgagttcatcttggagattgaataacctatggcctatggcctatttgtgcagtagaatttcttcctcctgaaatatgtggtgtagccatgaggacttatttgcaattacatttgttattttcacatattctggatgctttaaaacagatccaat

SEQ ID NO: 49442 - DNA, 491 bp, Oryza sativa
tgccatatgcggaattctcgtacaacaacagctaccaggccagtcttttttggctccgtttgaagctttatacggccggaagtgccgcacacctctcttctgggatcagacaggcgaacgtcaactgttcggaacagaagtattagcggatgcagaagagaaagtcagaatcatcagggaaagattgaggattgctcagtctcgacagaagagctacgcggataaccgtcgaagggagctcacttttgaggcaggagattacgtgtatcttcgtgtcactccgctccggggagtacaccggtttcagacgaaaggcaagttggcaccacgcttcgtgggaccatacaaaatcttggaacgaacgggagaagttgttatcagttagaacttccatccaatatgatcggcattcatgacgtgttccatgtgtcccaattaaagaagtgcttaaaggtacctgaagaacaggctgattccgagcacattgatat

SEQ ID NO: 49443 - DNA, 600 bp, Oryza sativa
  unsure (1)..(600): unsure at all n locations
agcttattaataagtgctaatctttcgccgtgttaaaccaaacaaaaancgttctgttcgcgcatcgggcttactccctccggtgtaaaatatttgacaccgttgactttttacacatgcctgtacgacaaccccgtagaaacagccggtgcaagccgtggagcacaactgaaactactcttgcgtaaggaaaaactgccaacgcctggagagcaacacgagagaactattccttgccgacaagcactgttgtggattcattgacctaccagttcttttgcaggagatgcccagtcacaagcgcgatattattgatttaaggtggttaggcggacactgaccacgcagggagaggaagagaaaacctaagctagtaataatgtacattctgagggggtgacttgcttgcaactcggtatgggcactaaaaccctggggaatatacaacttaattaatgctgaacggtcaatctgaaaggcctgcctctaatggagtgatccaagtgacagcccttatttcatgtcgcggtgttagtgcatatccaggtagcgaaccattaacataggtgcgaaaaaagttctggattggccttgggtcta

SEQ ID NO: 49444 - DNA, 449 bp, Oryza sativa
  unsure (1)..(449): unsure at all n locations
tgtccgcggctagccggctcatgctgcgcgcgtgcagcttctggattattctatacagcgcctcaaacgccgcggcggccacagcgtcggtggagttcatcgcgagctcctccaggcgtcctcaccacgtggtggcgtgcgccatgagcgacaggttggatgaacacatgaacgcgaggtcgttccgcaggaagagcgaggagagcgaggtcaccgccgctaggctgagctactctgccggggaagagagcgcggcggccatgtcagtgtgtcgcttcgataagaacaacgggactgatgtggcaacagtaatgacatttacggacccatgaatactgcagaatgcatgccatatattaaggtcatattaagctactgntcttaagatattaatctggtacattttggtaccttgggtatttatccttttcatgtcgtagggcaaattt

SEQ ID NO: 49445 - DNA, 276 bp, Oryza sativa
atgcccaacaatatgtcagtttggtctatgcatgagaactcttatctgacaagcaaactatatatgtgatatatactcatctttctattcagtctgatatcgtcaatatgctcaggattccaaccttaaagagtgttgattttttttcacgctttggcggcatacattatataactaacgatgtattcgatgcatggttgctatctcttacctgtaaacgtgacgggtgtctgacaaataaatctgttcaatgtgagctgggtcagtttgcatttt

SEQ ID NO: 49446 - DNA, 331 bp, Oryza sativa
agcttacatcaatcagtatctagtcttctactgcattaggtaactaattttttttttttcaggcttaagtaactttaatcttctactgcacaaatgttttgttattctcaaacgggtttcttttggaagcattggtcaaagaaaaaatcactgagtgatcttaagtggtggagtagatagcatcagcccgttcccccctaaccgtacaatctgcgcatccccatcctgtctgctactcatgtaatgcgcgaaaaaactcccatgcgcatttttaagtttttatttttttaatatttacagaaatattataccatccctgccaaccaaatgg

SEQ ID NO: 49447 - DNA, 479 bp, Oryza sativa
  unsure (1)..(479): unsure at all n locations
tcttctttgatgacacagagtcatccttcatgtgggggcattatgcaacttcatgacccttctcattgtatccatagcacttcctattgcttcttcttgttctcctctttggaagtgtggcttggtcatcaatcttgttgaaacacatcaaggcatagtgtcccactttcttagacatgaagcaagtaatgggagttttgatccaactttgaatttgtcccttaatcttgttgatggacttattgttttcttgatagaacttggtgcaagctactgttgatcccctctcaagctttttcaccatgttcccacgggtatcttgagaaggttgagcattgcccacaagtacatgatccatgtgcttctctctttttcctacacaatccaagtcacatgtagtgctcggngaaatgtttgtgttggagcaacaagtgttagcacaagtaaaatcaacttgaacatgtggctcataagattta

SEQ ID NO: 49448 - DNA, 686 bp, Oryza sativa
cgacctgcggcatgccagcttccgaaaatgatctaccactactacgcctctggagctcgagattaattttttcttaaggagaacagggaggcattctccaagatcttggaagccataattcttaattacttgattgcttgacatggtacaaattaattgcaccactactcctccctatgccatattgggcatcaaaatatttcatctggggtaatgcctccctatgagtctaccatgtacaagttcaatcttgatagctcataattaagtaagatggatcgaccaaacattactagttgtccaatcctgaccactcggtctttttactaggtagactagtttagcatgagcacatcgtattcttttcaaaatagagttaagggcatttcattagttcagtaaaattggcaatcagtgaaactctcagctaatcataatcttattcccagacccagaatatctatcatacaacatctaacgttatcactttctcctacgaaagctttagcaaatgacttaaaattttcaatcacattccttaggttgaacatttgttaatttttcagcccacaatctgactgtaaccttttctggctaagtttcgtccccccatcctgatcgatgtctcaaagatcgacatggccgcaactgttcttgggttcaagatatcaatgcccataatgatt

SEQ ID NO: 49449 - DNA, 484 bp, Oryza sativa
  unsure (1)..(484): unsure at all n locations
tgtacatcttctatagcttcccaccaggagatagacggttgtttcgttttctttacgtcagagaggacaatgtatattgttntgccaccctctcgtcgtcaggcagtccgaggttcaagaccctattctagatgattagtcatgtataggacttacattctcccggcgctcaagctttccaaatcaattggatgaagcatgtgtttgttgtacgaaggcatttgtgtctggtaggcataacatcgtaaaaatgagttcgcactttatagtgatttcagcttccgtcgacaaatacgcactacatttaaccttttgtgattagaggcactaaccacaatntatgactattgtctgtactttatataagcgttgatgcaaagtagatgtatcacataattgtactaactgtactcagtctttgaagtagtagatacgctactccgtacaaataaaacacaaataattgtctcgtaatacatacact

SEQ ID NO: 49450 - DNA, 664 bp, Oryza sativa
agcttaaagccatgaatccctattatgcatatctggatctggatcctttatataattatatagaatgagtagcatctgatgtaaatataatactcgagaaaaattcaagtattttaaaatatttataaatatgtatttctcttcttgtcaattttgatttccccgagcagatgactccgtacgtttaaacactctgtccgactagtcatagcctccaagcatcgggagtcggcctaagcacttcctaaacatgcatatgagtgacatgagtttgtcattaatggaacaaggtttcacgaatcagaattttctactcgggtacttttgcaattgtaaagagcagaaaataaacttatcttatctttatgcttttgatttattccgaataatacttagtaccttgtgttactcggttcatccaacgagcccctaggtgctaggaatcggcccaaaagcaactatccatcgacaaaccaaacggaaagcataggaagatagaactccataattcgataggcatttttgtactcagattatgtcgcaagccatcaagataaatattatgaaaattatttaaaaaatatgatataacatctgtagcccctgactcactagtcaacggcgaacccattgatgtattgaggccgaagaaaaaaaaatatct

SEQ ID NO: 49451 - DNA, 470 bp, Oryza sativa
  unsure (1)..(470): unsure at all n locations
tggatccttngatgatggaggtggctatagtataagttcattgtgttgcaatgggaatcgcccaataaccaccatgtgccctctagataatttcactagcaatgaggtgagcaggggagatagtatgggcacaacatggatgtttgtacacattgcccaataaccaccatgtgccctctagataatttcactagcagcaatgaggtgagcagggaagatagtatgggcacaacatggatgtttgtacacctccatacgttcttgtcttctccatgccatttcaccgaacaccttgtggaaatcaatgtgattaacttgttgtcgtcattcatccttgacgagaagttatccataggttgagcatatgttggaacgaccttggatgcacccgtcatggcttgaaacgtgtcatcggcttggttggcgccacacttgatcacanagcccactgtcgaacacttgtcatgcgt

SEQ ID NO: 49452 - DNA, 572 bp, Oryza sativa
  unsure (1)..(572): unsure at all n locations
aggcatgcaagcttcaaaagnngctacccacaaaatatcaaacaggaaanatcccattggtgtttcacagaaagatagaacgacaagcacatgtaactctcctcttggcagcagcagcaaagatggttggcgagatgtggctacaggtagtttaccaagggccaaatctcttccaacacccttcaatcggggagttcagaagtcaaacaacagaaaacgaactggcagacataatgaggtctctatgctgaaagatggtctcaaagaaagaccctatgattctgaacatgcatgcaacagcaggaatagaaaatctctgtttcaagatgcaacattacatagcgatggagctgatcgtgtctcctcagataacgaggaaagagcgataattgaacgcgaaatacatgtaaattcagaagaaccaaaaaatgggatcgccttggccaattcatctaaagggacacttctaccagcttcaaaacctgacaatgagttagatacagggaattacctggataccaggcctgtggatcccggacagaagaaagaaactatgttctctgataggcaga

SEQ ID NO: 49453 - DNA, 447 bp, Oryza sativa
cgtccaagtagccaccgttgacaagctgaccaaagacattcttctgttctgtcggttccaatgccgggtcaaaaatctcaaaccccgggatgccgtcagcggcatgtcgcttgaccatgagcgcgaacctgacggccgcgccatcttgcctgatgtgtgggatggtgtgctcgtcgagatcatcgtactcctccggctggtagagccggtggcagcggccgggccccgagaatccggcgatcgccgcccgcgcggccgccgccttctttgagatcctcaccggcggctgttccgacaccaggccggtgtcgacgacgtacgtgatcccgtggaccagcacggccgtctcggtcacgtcggtggtcagcacgactcttctccggccgtcggcaccggcgagttatcagcatgatgtgatgatctccccgggagttgtcgtggcgtatc

SEQ ID NO: 49454 - DNA, 472 bp, Oryza sativa
  unsure (1)..(472): unsure at all n locations
tatcataaagggcttcgacaaggagttntattcgttctttgagcaataagataaagatcggatagattcgaaccgcaattgcaaaggtaatcactactatgccagcccaaatcatgatcttcaccaacttggatttggttctctcgcgaaaatcgcgagctgcagagatgagaaccatgaaaagcaagatcccgaataagaaaacagaaaccgacgaaaccacaagagtgaagactagtagagtctcgtgttttggtgatctttgctcctttttcactcaatgattcattcgaattttccgaccaacaattctatatgtctattcatagggcctcgttgcttagtgctacaagatctagtgcactggaactacgggttatggacccgaatcctttagtatggaacattgtcttttccaagatataacccccagtatatgaaagaatgacaaggtgctttctgtcttttcttg

SEQ ID NO: 49455 - DNA, 638 bp, Oryza sativa
  unsure (1)..(638): unsure at all n locations
agctttacctatcangggttcactatagaagcaaaattaatccatttttttttttatcagagaaaaataaaatgagatttcggttgtgtataacaattccttcattaattgttttattccttccctaaaaagaatataggtcttactgcagaatatctattgtttttctaatgaaggtgattacttttagtcaacgtccctcttaaaacattcatattgatcaatgtgaaaaaaaaagcatattccatatcgcagatgtacccacctaaaatcctaaggctggagaacaacattctattttctaatatattaaaaattaagacagaattctgaagttgaatcaatcatcatatcaagttactttttttagaaaggcataccacatgtggaggcaatacaggcaactaggaaaccggaattgaaatttaaagatggacagtgaaccataaaagttgtcgtgactgaataatacaagaatgataatttgggacattgacatgcaatgggcacattttcataaaaataacgctagggctgtaatataacatacccctttgacagagaatgcagatgcaaaggaatctcgaacaatggattatattttctgttccaactcttccctaaataaaactgagggc

SEQ ID NO: 49456 - DNA, 427 bp, Oryza sativa
  unsure (1)..(427): unsure at all n locations
gctcaaaatctaaaaatgtgcactggagtgttatatatatatatgcccncctagctatacaatgtcaagagcattgattaaaatacgaaacaactaagggcgatataacaatattggccattgtatatcagcaaaccaccactgattacaataaaaccacttagggcgatataacaatatcggccattgtacattggccaaccacaaccgattacaataaaacaactaaaggcgatattacaatatcggccatctcaaggcgatgcaaatacatcggctatcatgtatcggcaatactatccgatcatgcgttaacccaaacacttggataatatatcttcaaatatatgccattaagcgctcgcccataaacttctccatcgagtacttgcaacatgtatgcctcttgagacacaaccttatgtat

SEQ ID NO: 49457 - DNA, 660 bp, Oryza sativa
agcttgatggatgtgtggaatgggataaacttcctccatttggatatttattgacactaaagcatctgtttttgaagaacctaccgaaattggaatatattgctagttcatcctacagcactgttgtgtatggatacagagacaccagtcctgatgttctgcctcctcatctgatcacttttgttgtgaagaattgcctgggcctgtcagagctacccagtttaccttttaatctgaggtatttggacataaatagagttggaatgtcaagtctgccaaccatgtgtactcatatggggcgaagacgtgtttctttggtggagtcacagctctctattttgaatgttgagtcttgcaatcttctggtttctctaaatgggttcttacaagaggaacattgcaaagttctcactgtcttaagcctggtctgttgccacatgttgatctcccttcctgatgcatcagatttcaaaaggatgtctaaattggagagcattagaatcattgaatgtaacaggttgtcttccttgggtggactaaaagccctttcttatcttaaaatactgaggatagaacattgtgccaacttggttactaacgtatcaaggcttcctccagcatcaaatgaaaatacttatcttaaacttgaaacactttaaa

SEQ ID NO: 49458 - DNA, 406 bp, Oryza sativa
  unsure (1)..(406): unsure at all n locations
ntaatcactntgtggtcattatataatcataatcatttatatcctatacaatagcaacctttaaatgcagggagnttttgagcataagagaacttagttcatgtgtagttcttgaagaatgtatggtaatggtcaaatcagaattctatttcatttgtcagtcgggtcaacacacatatttatataagatctctactgcaagaggaaagttgacatgccatgaaaccattctagaagcagaacactctntagagacaattaggaatggngatgtcggaatagatgatccgcctgcatggcattntgtgaactatggagtgaagctntatgtgatcccctctgttccacagtacaatcactattatgaggtggatgtctacagaaactcctctctcatcttggaaag

SEQ ID NO: 49459 - DNA, 669 bp, Oryza sativa
agcttgacggtaggactccggttatgcgattgtttgatacatgtagatgtttttgttatatgtgtcttttcatctcttgtatacattatatgtggtccttgaccctaagtcaatagtacatagtaaattccccaaatttatctatcactgtaagatggtatcagagctcatgggctgaaccctaaccctcgatccccgttgtccgccggcgctccggcttgccggcggcggctccctatcgggcaaatcttcttcacgtcctcctcgtccggatcaacagcgggattcacagcaagtcagtgtgattcgtccgtcaagcgtgagtgcatcgctcattgcagccgctcgtcacgcggttgctccgctcagccgttggtgctgctcttccactactgctgccgctgtgtgctgctggtgctaattcaggagacaatacatcaagtcctgtaagcaagtcttctgtccagtcaatttgtcaaattttcttctgctggtcttgatggcaacatccgacccctttcttggaggtggagctctgctctccacggacattaagctaaatggtcaaaattatcaagaatgagaactttcacctcgtatgcttttgaggtcgattggtcaaacatctcacctcacagatgatcctcctgatgagaaaaccgatgcaac

SEQ ID NO: 49460 - DNA, 225 bp, Oryza sativa
agtgtttgctgtgatagtatctaaatattgcaaggcacgctatttttgtttttaatgctatattgtgagagggatctacgaagcaacaccaatattcaatcagtcgatatcttgattgtcattgaatttgagatgttcatatagtttctatgtagtcagaaagagcctaatctattgggttgcgagcgatgcatgaagtaaatgttagtggctggcttggacaag

SEQ ID NO: 49461 - DNA, 649 bp, Oryza sativa
agcttgacctaatggtaattcagccatgtcagagctgatgtcagaatacatctttttttattaattaatacctaaccaaatttctcatttcggaatgaaattaaataaattccataatctatgatgtttgtgcaagtaacaggtatttctacagtcacctgatatgtgaacttgtacatataaatcgatatagataagctgcttaaatacttttttcaatgtatgtatgctttcgtaatacgtatgccattattttcttgtccagcaatcaaacaaaataattgggagccgaagaaatggaaatccaactcgtattatttctctactactatggttatgtttagtttcttgaccaattttttttaagtatatggacacacatttaaagtattaaacgtagactaataacaaaacaaattacatattccaaatgtaaattgcgagatgaatctattaagcctaattaatctatcattagtaaatatttactgtaatttcacattgtcaaatcatgacgtaattaggctcaaaagatttgtctcgtaatttacatgcaaactgtgtaactgattttttttcatccacatttaatactccatgcatgtgtccaaatattcgatgtgatattttttggtaaaaaaataaatct

SEQ ID NO: 49462 - DNA, 485 bp, Oryza sativa
  unsure (1)..(485): unsure at all n locations
acactatannaatactaagcttacccttatcattatgtgattgaggcaagggtcttggcttcccatattttttgaacctcttcctgnttggcttcagacaactggtatgagaagatgaaacttgactagttgctgcactaaggcctgcagntgntgattaagggctgtcaactacttgcaactataactgtctgcctctaatttgtccgagtcttccccttgtggatattttgtttcagcctaggttgcgatatnattgaaagtatcaagtctatgagctctatnatcaaaagnaccaacacttgaaggatcttncataaacgctccatcagccgaggaaccactaaacaactcttgcagcttatcgaagaactgaatangctntgaaagaattcacggtcattaatctgccaagaaaaagtcatcaataatagaaaatctattaacaaatatatcatgtattcaaacaacaagagattaccgat

SEQ ID NO: 49463 - DNA, 657 bp, Oryza sativa
agcttattactcagaaatgatgttatctttgctacctccgaatacttgtattttttttgagctagggatccgtacgatactattaatttctgaatgttactttcatttctgctgcgagtcttgttgcataggagatagcacaatatttgcccctttctatgccatatcagcacataagcacatggaaagagcaggcttacagctactggtatcaaaactgagaaaaaaaagagaagttatattctttttcaagatcataagtcgtattattgatatcaatattttgatttttttttagtaaagaactaattaaaaagcataagggcggcaaaagtaggactacactaggccataaattttgctccatatctgacacaattttgagggttgcttgtttttaatattcatcaattgaaataaagcataaatgattatagcagggtagattttgaaaagaatttttgttatataaaataactactctatttgttctactttagttgtcactttggacatcaacatagtcttcaattcacacatatggccactacatttgtagttatatgctagtacgaaatactgaaactacactgatatgaaaaaaaaaaaggccagtccactggtgtcatttttatgtgagaaattgtatatattagt

SEQ ID NO: 49464 - DNA, 484 bp, Oryza sativa
  unsure (1)..(484): unsure at all n locations
cgtagtacatcacaccagactagccctaatagcacttggttgggtgtatgatctcttaatattattaacgtattggtgttataattaaagacactaaagataaatatttaatcgagttacataggaaggaataccaatcaagagaaactaaaaaaaattaaatgtcatattggagggggaagaagaaaagtgtagtagacacatatcacttgtagtactagttattaaacagagcaagagaattccctcaaaaaataaacagaggaagagaagaatctacagctaatatatattgcttccttggtacagttcctaagtcccacanatgaggaaattaattaatcaatcgatgcgaacttttgcatctacaagctacgttaattntaagtagagatagatcaaagcggtgagttgcatgactcatgttcgacacagatcaaatcgccacgaacaacatgaacaagcctatggcttgcactcactc

SEQ ID NO: 49465 - DNA, 671 bp, Oryza sativa
agctttcttcaaactgtgtatacacacacacttttgttttgtacaattgtgttttctttaatcattgaacatcagtttcttgtcatgagtgactataatatatgtctatatcacgcagatgtcccacctgagaatgaaacctctggatatatttttattcatgctgagggtggactgaaccaacagcgtatagctgtatgtatgctcttctatttctcccaggcttcctctccttattttgtctcagaggttgagtgctaaatgttcgtttagatcctgcaacggtttgctgcctaagcatatatttatcacaatataataatgtataccagatctcgttatttgagaactatttatcttatgagattagttgttgcaaaaggacaattacagtagcctttcagtataatctataattcctcttgatagcatggttgcatgagtttattatgatctactaaaagctggattaagaaaaatatatgttatcttgctggttaatactatttaatttcccctagcccacagaatgatcatacagacttcttgagcagcagtcattcgtgtcctaggatggcattgagttccagttaaagcagatggtctgcatgttaatttcactcatctcttgttttttaagatatgtaacgctgttgcaattgctaagataa

SEQ ID NO: 49466 - DNA, 475 bp, Oryza sativa
cgcacatacatcaaaagacagccatgatgtatgctactttatttggaactttctggcttacatgctactttcatctcaaacacaaccatgtaggaaattggtctcatcaccaaaacatgttctttttttctgaccaaggatgctacccgacttacactaaaagctagtaacaagagttcatcatcacaagaacaacaagccaaatctggcaacagaaaattacatctcatcgatggctgaaataaagggataatacctactgaaccttagatcttggtgcagtgctgacataatgtgacactaatacacacgctcaggtggactcaatgagaacttgagaagcagagcatattactcagatgagttatgtttgcattaagttctgctgcatggcatcgatgagactgaagaaagcaagccttcatgcattacagaaaaacagtgctccaaaccacagccaaacaccaaagacagc

SEQ ID NO: 49467 - DNA, 603 bp, Oryza sativa
agcttgcattaaacacctaaattcccgtgacttgctgagtacgaaagtactttctcttgttctatataaatatatatagttcctccgccctgaagttgaagatgaggtgaagtgaagattagggtttcgtcctggttcccagccgtcgcctgtggtgttgggtgttagaccgttggttccgctgctgctgttgttgttggtgttcgcctcgtccgtgtcgccggttgtattcttgggctggctgagctgcaacctaagttaaggtaaataagtcctctatttattttaaggatttgcaatgattcatatttgtcaccgggggtaccagcactatgtcctgggactggtaccgagatcgcggtttcgtaagaagcggtttgcgccgtttttcctacgacatgccccctatcaagtgccgttgtgcggcggtgccggattggggtgtgacactatttgcatatctttttaattgcaggatcaaactgactggcacgcccgcatctcattaatctttagacctgcacaggagttaagcagatctcccaggccggtggattcgattttgttcgcaacactgttcattcaaaagagaaagagagctta

SEQ ID NO: 49468 - DNA, 420 bp, Oryza sativa
  unsure (1)..(420): unsure at all n locations
tgaaaaaatngcactgttcaaataaagctatggtcaacaatataatttgttctgataatgctcagagggataatacgaagtgcatatgctacgatcaatgcagaggttttttccactgctttgcttcgctttcagttaaaaacatgttttgcctcagcgctgaggcttgtgaaataatggatctaatctaaggatgctaatgtccatccagaattacagatgcatgcaactacaaccgtggaggcatcctataaccaaatgtcggtacgcctttagcactgattagccacacccagacatcaaacagcactgaaatatacaattcattgtcagcattggcgataagcagcacacatattcatcattcatcaaaaccaaaccccaccaacatccacagaaacgcctacgagacagcatgcc

SEQ ID NO: 49469 - DNA, 667 bp, Oryza sativa
  unsure (1)..(667): unsure at all n locations
agcttgagagtatatcaattattatctggtactatgcttacaagngttttttttataaaatccttcgcaatccagtgatttagtagcatgcttctctttttgccttattaatttgttcataaattgcccatcaactaggggttattatttggttcagaaatttctcgtacattttagaatcagaaaagttttatggtgtttgtgttccaaaatagtaacccctcctgttgctaccaccaagcagtgccacagtgtattcattaaattggtggaacacttttttgctccatacaaatgagataaatgaacataagctgagaaacgaaagaagagtcgatggagatcacttcctaggaaattagtgtttgctgatgaattctaattgacatgatggtcgtgctaatgcaagtttaggtagctagcaaagcctatgctctcgttgcttatctctaagacaaattttacagtttctgagagatatcaaaatttttagtggaaaccttattgtagtaccgagaggtacaaaattttacgctataaaatgtgtaggatctgttagtatcttctcaagtcactctatctcgaaactttactacagccacggctaggagtaaggagttatcttgttacaaaatgctcccagtagagagatcaagttaaacaaatt

SEQ ID NO: 49470 - DNA, 447 bp, Oryza sativa
  unsure (1)..(447): unsure at all n locations
tatgttgatgatgtagtcgtcaagaccaagcagaaggatgatctgtttgcggatttagaagaaacttttacaagcattcatgctttcaagatgaaactaaacccggaaaagtgcatcttcggagtaccgtcagggagattgctcggatttatggtttctcaaagaggcatacaggccaacccggagaaaatcaacgccctcctcaacatgaaaccgcctagctctcgaaaagacgtccaaaagctgactggttgcatctgcggcgctcactcggttcgtctcacgactcggtgagcaggggatgcccttcttcaagttgctgaagaagactaacaatntccagtggggacccgaagcacagaaagcctttgaagacttcaagaaacttctcaccactcncaccagtttggcctcgccacatccgcaagagccgctactggtatatgt

SEQ ID NO: 49471 - DNA, 611 bp, Oryza sativa
  unsure (1)..(611): unsure at all n locations
gaactgccgcatgcaagcttgngatataaaagaatgggaagctaccgaatcaaccacaactattgtgtgnttttgtttttgaccagagaacattcccatctctatgtctgaagcattctgagcggcctcagcttgaatgtgattcacacgggcctcgaccaaagtggttggcagcacgtgaaccttggtcacttgcctgagagctaagacgacactgagctgcccctgggtaggagctctggcaatgctgccattcgcatgccctgagctggtgttgggagggttatgagggcactggctagcatagagacccatctggttgcaccggaaacactgaactactgtcggtccctgtggtgacttgaacgaagtaacactggttggcgccatactgccactaagggcacgctgctgtggctgaagtgcccgactggctcatctcaagacgaagggcgtaacctgactggcgtgtagcctgaagaccgactgggggaatggataggttgtccgtaacgagggccgaggggcccttgggaagacatttcctgatggttagacttgccttcttagattcttccggagcctcttttctagcaaccttttattgcaag

SEQ ID NO: 49472 - DNA, 318 bp, Oryza sativa
  unsure (1)..(318): unsure at all n locations
agcttccgggaaatatattcaatctcgtgcggggaaataatcttcttttctgngttcgtacggagagttccgcgattgggctgaatacatatcgctgacttgagcacaaaatgcactatttatacatatatggcccaacatgggatcgcgcctacttgtccatttagaacctttgagtcacgacaagacgaaatatgaaaccacgcctattggactaaatgacttgctccagatatactttagagaacgacttacgtacatttatatgagaacccaatttggctactgtgatggcagagaatcttctgcgagcctctt

SEQ ID NO: 49473 - DNA, 255 bp, Oryza sativa
gacacaaaaactccgctacatggggggacatgctcaccggagacctaatgttatttttcttatactccaacataccgcgactctgctatgacatccggcttgcagctcctggccgaacattcggggtctaaacagggtgtatcctcactcagagagaatccaacatgctgtgccataacacctgactccgtggcatctctctaatgaaccacaactgaaccatacatatatggcacaatccgaatctgcgtccac

SEQ ID NO: 49474 - DNA, 657 bp, Oryza sativa
agctttattattcttgggacccggatctgttatttattcaatggaacctctttttttattttcaccacataaaagtcggaatatggttcttatgggtgggttaagaaaatacattccaattacaagaacttgttttctatggggtaccctttctctttgtggcattccacctcttgcttgcttctggtccaaagatgaaatccttagcaatagctggttatattcacccttttttggaataatagcttcttttactgcaggattaactgcgcttgatatgtttcggatatatttacttacttttgatgggtatttgcgtgttcatcttcaaaattacagtagtactaaagaggattcgatgtattcaatatcggtatggggaaaaaggatatctaacggagtcaattgaaatttcgttttatcaacagcgaagagtggagtttctttattttcacaaaatctatccaaaaatcatgttaatacaggaaataggatacggtcctttagtacttcattggggactaataacactgttgtctatcctcatgaaccgggaaatactatgctattgcctcttcttatattactgattcgcactgtggttattggatctttcggaatccattttgataatgaaataggggaatttaccatatt

SEQ ID NO: 49475 - DNA, 646 bp, Oryza sativa
agcttaaaaaatcaacacgtgacgtgcaaaaaaaatcacaacctggtgcagttttttgggcccaaaaactaacaaaaagcccaaagcccaaagttgtttaaaacacacttttgggtccaaaaaactaacaaaaagcccaatgtttgggccccagttttttgggctgtggtatgggccaacgaaagtgtgggcccaagtcttttttgggctgtagttcagtgagtctggattttcagttttttagctgtgatttgggcttttttcaacaaaacaaatgggctctcacatgatacccgttttgggctttttagctccgatttgggttctgtcacaaaaatggtccactccctgggtctcttaaaaaaatgtcttgtgctacaagatagaaactcagatccaaaagaaaaacgagaggagaggatataaacttagatcaaaactcagattggaaaagcaaaaaggagagaggagagaaagaacacgaaaaaggagaagaacgtgtgctggggtggacaggaagaacctaagacaattttacttaatgaaggtttttctctttgctctttgttcccacctccctccttttcacctcttccttccattttttgatttttttttttgcttttcttcccttttcaccaccccc

SEQ ID NO: 49476 - DNA, 487 bp, Oryza sativa
  unsure (1)..(487): unsure at all n locations
tccgacatctaaagcatactgaataaaccaaacctattgcccttgtctattggagtaggcgtggtagagcacttactcacattattggcaatcacttccttagctgacgtggggtgcggtggcaagtaattagtcactttgagtattggcacgacaaaatttagcgaacggtaacaacagacaaggtcaaatggggattgagttgggggcttgaggtgtgaaaatatcatcactggttaatatgaacaatggtgaatacaagatgtngcttggaaaataaagagaatgtgagaaaggagtcatgatggtgggatgaaaatagacagaaatgatatcattactatagaagtaattttagatccgctgaaaattttctatcacattgactatttatccgcagttgcagtatggcgatgataaattagaaaaaatcatacttttacagaagcgatatactgngttaattggtcnggaatatccatcacca

SEQ ID NO: 49477 - DNA, 569 bp, Oryza sativa
  unsure (1)..(569): unsure at all n locations
gcagagcaccaaacaattttttttttttattcataaagntgctaggatacactatattcatggaaaattcggtgaaagggggaaaaattgtacttaagctgagtttatttctaagcttttttttttaaaattttaactttttcataaaattaaaacttttgtacacacaaactttcaacttttccattaaattgattcatttacaaccaaatttttaattttgacatgagctaaatatagccttaatactactattgcacccttcgttccaaaatataaaagattttttggtggatgtatttatattctaagagtataaatatttgtcttttttaacacaaactaatgattacaaccttattgttctttgttatgtttaagaggcttgagtattaaaatttactttaaagtatttaatattttgaaaaatgttgtattaaattagaatatattactctaaattaactgtttaaaaaattttgagcttatgaatgggatgctaatgttgtcaattaaaaattgatttgatatttttttttatggtataaagtattttttattgtttagat

SEQ ID NO: 49478 - DNA, 474 bp, Oryza sativa
  unsure (1)..(474): unsure at all n locations
ggaatnnttgagttgattaaaatttagagaanagaatgtacttcccttgtcccccaaataagtgcacctgatttaaagtttaacaagactttccaattcttgggaaattagtaaaccaaaaaatcaatttctcggataatttaagtctaaagattaacctcaaagacacggtccacggaccacagtccagatatacgggatggaaaaagaattggcagataaatgaatcttattgttgattctctgctcactatttctaggaagttaactgttacgacccgagatctctgcaagaagaattatagatagaacctggaatttaaaaggaacagagaagaacagagcagatacagacttggagagggggaaaggattggtattcagaatatgtttgttcaatacagttcacctctttcagtacaagggtaatctatttatagacctttgccgaagctactggacccaattctttcc

SEQ ID NO: 49479 - DNA, 487 bp, Oryza sativa
  unsure (1)..(487): unsure at all n locations
agcttgaaaaacaggggaggctgttatgactgactgtgaaaanattactttttgttttctctcagcggcccacattgttctaaggatgcgccggaaagagacccgcccctggacacaactgttaaacatgtgtgccaacagctgaatggggggagtacccacctcccaggcctgaccagccactatcggcttcacagccgttccactcgattaaacggataccaaacccttttgcgttctctctgactcccatagtcccgctgtcataaaacacaacaataccattccaccatggaagcctactctatgatgccctgatgctttccggaatcacacagaaccgtgaccgaccatttggggtgtatgtttgacaaataggccgacattgggtacaattgccacacccccacaaccctgtcacaccatccgagcgcacgcatataccctgcgggagccaccttacatccgccgctcaccgtgggcaaag

SEQ ID NO: 49480 - DNA, 364 bp, Oryza sativa
acacttgaaactcagcttcagggatgtactcggctcactcgaacacattattttgatctcgctttcggctcggtatagtaccagagagggctcgcgagatcaaaccacatcgaggagcttttcatcggcggcggcgatcgattcatgggtatgaagcgtgaccgtcttcatcatattaacgtctacgagtggcattcgctccgacgacacttcgaaggcgggctcgaatctcgaggcgttgagtcccgccaagttcgaccctggttacttctttatgaacatggtggtgttcaactacgctcttagcgatgtgaaggcgctatcgtcatgctctgatgatgtagatgcgagggttttttggcgt

SEQ ID NO: 49481 - DNA, 672 bp, Oryza sativa
agcttacctcaccccgccccccgccccccatcttggtagccccggggccggtttattttttgctactctacttggccgcgacccccctgtagtgagtgccgccctagtagtcgagcgcgaagaaagcggaccggaggcccctttaactcgcgatggccctgtgcccgaagcccccagtcccaggaggaccccgaggcccccgtgggaggaggggaggctttggcgagtggtcccgaagcctatgatcccaacatgactcgagacccccccccgaggcccctgagcaagggcgccccagatcatttgcccctaacaacacggaccggccccgccgaaaggtgcagcggcccgtctactttgtcagcgaggcactccgagatgcgaagacccgatacccacaggcccagaaaatgctttatgcagttttaatggcctcaaggaaattacgccactatttccaagcgcatcgggtttccgtagtgacatcctaccctctcgggcaaattctgcacaaccaagagggcactggtcgggttgtaaagtgggccatcgagctggctgagttcgacctgcactttataccacgacacgcgatcaaaagccaggtcctaactaactttatcgcggagtggacccccatggacgaacctgtttcacccaacgtcttctttc

SEQ ID NO: 49482 - DNA, 411 bp, Oryza sativa
  unsure (1)..(411): unsure at all n locations
cgagatagagggatcgtcngtttgngttgatgtaagtggctccacttgtgttgaggaagaggctccttgttgtggctccctaggacgtacgtccccaagagccaatcttttgattgcttcgctcggatcctcctcttcacctaacacatgtgagtcaacttgctctacttgagaaccattagtttcgtcaaatgtcacatcacgcgcgatctcaacaataccggaggatttgttgaaaacgcggtatgcgcattcatttgacccatacccaagcaagaatccctcatccactttaggagcgaacttagaggatctagccttcctattaagaatgtaacacttactaccgaaaacatgaaagtaagagacatttgtgttttaccagtaaaaagctcatagggaatcttctta

SEQ ID NO: 49483 - DNA, 669 bp, Oryza sativa
agcttgggagaggcaaaagagaagacaaagatggtgagaagacaagccacaatttgtttttggttcatctcaagcgaggaagttcaaggagaatcttaggagggcttttgatcaagtctatgctgcatttgagccatcaagtgatgtagatggtgagaatggtgatgatgaataaggaaaaaacatctccggtgtttgcttcatggcgcctggggaatccgatattgaatatgaaaatcatgaagtaagtgcttttgaggaagctattaatattttgagtgcaaaaaatatgaaatgtgagaagatgtatagaaaacaggaatttatcattgaatctcttaaatctgaaattgctagattaaaatctcttatttctaatgatgatgattgctcaaaatgggaggttttaatgaatgagatttcaaaaattatagatgttaatgctgcacatgatttgaaaaatagaacttctctggcttgtagtttgctttgcacacccgcacttttggatagttggtttttaactaaaacagttgttgcaaaaaaatccaaattgcttttcatgctaagtttgaagggtaaccatgatttctgcttaaaaaggtaaaacaaccttctgatggtcttggattgctcaaccatgtaaccttggataagaatgaaacttaa

SEQ ID NO: 49484 - DNA, 493 bp, Oryza sativa
tcagaacatctacaccagtcctatgagtctataactataagcagttatctatggacagattacccctggtagactacagaatatgggtagttaagcaatatatagtataccatctattttatgaaggcatcaccaattcaccatggcaaccaggcagtctcctaagttcctcaaaccagccagtcaccacaggacccctgcagcctcgttcgtcgaccaccgtaccctccctgctccagatctggagggaaaagcactgaacctcccagttatctccttatctcctccacctctgctcttctcttctttgccccctgcgccgatctgcctctctttaactctttgtcctcttcccctgctctgctcttcttactactctgcttgttcttcctccacgatctactcttctcccttctttgctctgcactgtgggcaactggctgtgggagaatcagagaacggaattatattacaagaggattcaatgggctct

SEQ ID NO: 49485 - DNA, 671 bp, Oryza sativa
agcttagtaaattatttatggtttagccttacattctggtaggcccgtgtgtttttttttttattatttagaggagcttcctatttaccccgacgtggtagtttaggtgactaagcgtgtccaatacaatgttattgtgccacgtggcgggttcccgttgtgtccgccaccacagtgttaagtttaaggcgtgggcccgcgacttaacggttctaggtcatatatcgagtatggcttaggatggagtaacacatatcatgctggtgtaaggctaaatcatgaattttggaaaagttttgttgtgggtaataaatcaggtacttatgtatcgcgtgccatgctcttgcatgattattatttcgcatcatgtgggtaaagtgtacaaactctgcagagtaaaaactaatcgattaaccgtgctcgcggtcatgagcggtgtgtggatatctattgggtatagacttgggtttattcttctaaatgctgaaatttacctttaaattgtgatgagatttgagaatgatctccttgctgccatggatggcaatgaggtgcatatttacacatgattaatatctactttgatgcccatatgctaaaatactagcttggctgaaatttatttgaaagcaaatctgatttgaaaattgtttatgcaaataaaacttgct

SEQ ID NO: 49486 - DNA, 464 bp, Oryza sativa
  unsure (1)..(464): unsure at all n locations
cacttcaaactaagcttaacaaacccagggactgctgctcaagatgcaccaaacaaaaatattatacagtctagagtctcggcgcaattatagtggtcgccatggtttgctaacaggaataataatgccaaactgtccttgtgaagctatcgttttggagcacataattagtatattacatcatatttcatttgatccgaggtctgtttacataacttaaaaagattccaactttacttccttgcattcaaatggaagtatcttaaacttactgtgcgctgaattaaacttacaaaacatagctaaagcagcaaaaagatgtattgatatttcttcccataaagacaccatcctgaataattagaaatccatgcgctatcagaatagtntctaaacaaatagagagcactgggagtaataaatgaattatgagcattcagtacgaccatgcttattatgattat

SEQ ID NO: 49487 - DNA, 500 bp, Oryza sativa
ctgaaggatggcatcctcggcttcatacaactgcatgtacattcaccattactcttcaggacatatttattctttgtctggctcgccacagagaccacgcctgttgctatcaacacacattattccgtccccgtgaacttgtgtgccaggcgccacaaaattatgcttccgcgcctgttagattctatctcgcatgaactatgccagtccgctgataaacatctcatgtcgttagccggaatggatggacctctgtgcgcgaatgaatttctatggcctgcctagtctgccccgaacgacgtatccaacaatagcttcctacggaacgacccctactctttgtattactccgtaggtgcacccggccacagtgtgcccctttatgccgcaggaagatccatccgccttcatcattagagccggccgctccttccgctaatgaaaactccatcgacagaaattttcgctggccgatgcggacccccttgtcatcggtgtgg

SEQ ID NO: 49488 - DNA, 477 bp, Oryza sativa
  unsure (1)..(477): unsure at all n locations
tcttaactgaatagttgctntagttggactctgccacgtgggactaaataacaatattcatggactaacagacaataacctcatcgggattggactttgagttcaaagtaaagatggccgactttnttttttttttttagaattacacatggccgactttgagtccatccactcgcgaaagctagagtccagagtatctcagctatgatcggagccttaggaggcatggctcgaagtgaaaattaacttgtgttnttattattttgaactagcatggtggcccgcgcagattgcgtggctagcatcattatattttctctcatataatagcatatgttttctcattatattattcaaatatattaaaactactaatactaatgtgtaatatccatattatattttatatacgtattagttattaaatagttttaatatcaaattntagttatctgtaaattatatatattcctatat

SEQ ID NO: 49489 - DNA, 596 bp, Oryza sativa
agcttgttgtacgaaaccaaacatacttatatgcgctccttcacattcttcctgctcttatagcctatggctaccttttcccattatttttttcacatagtgtttgttctcctacagtctcatcaccgattgctactcctattatggagatcgcacgctttttcagtgtataatataattaggtgttatttttaattatgattgatgttttagattctactagttcaaacttttgtaatttttgaaaacaccaatggatctcgtagcatcagaattcagaaaccctctaaaaagaaaataaagaacttaaaggaaaaaaactcataaaacatcacgacaacaaattttggacggagccgtcagagcgacagatttatggtcacattataagggagcttttaattattcgccactgttagtaatttggtcgcgcggaacaactcacgatggcctcaactcaaagctccccaaaaacccggaagccgcgccgcgagctcgcctatggttttaaaacccatcttcccttccttccccgttccggcgaacacctgctccgacaccttttctcctagggttccggtgagcgaccttcaccc

SEQ ID NO: 49490 - DNA, 447 bp, Oryza sativa
tgcatcagtgaaatccgggcagtccttgatggtcaagaatagaagcgatcttcacagaggaagctgcgcacgcgtagagcagatgtccttgatacccatgcacttcaccaaagagagggacctgaacttcggaccgcagttgacgaggaaatcaagaataccaacaagagtaaccccattgcactcttcaagctgcaagctctccaacaacctcgccgattccgtgaaagccttgagaccggcattcgtcatgtgtccacactttctgaaggaaagctgcctcaagctcgggcagaacttggcgatagcagcaagcgcgagattggtgaccccagggcaagaggtgacactcatgcacctcatattctgcaagccggcagcattggtcatcacccaaaaccctctcttcgcgaccaccgggaggcggacaatggtgagatccgtgac

SEQ ID NO: 49491 - DNA, 463 bp, Oryza sativa
catgctagcttttcttactgaaagggggataaatatatagcaacaatgcaaacttttattatttctcaacaagccacaccggagatgcattattaatgcaagggaggacaaggggataataatatacgggttgagttctgtaaaaacatcctttaaaaagcacttagttgccctaagccattttataaagaccatcctagagctacacagtattattaaacaaggccgtgaacccttacgaacctgccttaacccaatgcctacgatgattcaaaccgaactggcaacccgaccctgggtcccagctccgcccaaaccaacccagaccaaccattccacattttaattggtgagcaaattttaagaatttgaaaaactgactttggtacattgctcgtctttcccatagccgaaggcgctggtatttctatagattatactttgatcagaggtgcacatcttt

SEQ ID NO: 49492 - DNA, 494 bp, Oryza sativa
  unsure (1)..(494): unsure at all n locations
ctcagctctattagcctcgcgtcagctgatctcgtcataagcccaccctcaagtccaactcataattgaaattgtgcaagtacagttgctgcgtacatactccctccgtccttaaaaaaatcaaatactggatttccgtgccaacgtttgactatccgtcttataaatttttttataaatagtattttcattggtgttaaatgataaaatatgattaatactttatgcgtgacttatctttntaattnttttcataattttttcaaataaaacggccggtcaaacgttggacacggaaaccagtgtttgtntttttagacggagagagtatactgcaggtacatgccttagtcacgttaggtgacatatataatctctcccaacaaccgtactgctacgcgtggctatcgaatgtgcagtagaactcctataacatctttcggtactactagtacactctagaaatattgctttcttacatgaacacatgtata

SEQ ID NO: 49493 - DNA, 492 bp, Oryza sativa
agcttacaaaagaggaaaggaaagctactagagccatacacgaactcttttgtatactttcggactccagaatcctatgctaattctattccaccagctagatactactaaactaaacttgagaggaatgagagagttcttgcttgaggtgagagttgaagtgaagagagagagctccttatatagaggtaggtatgacgggtgtagaaggggaattgcccgaagtgccctccaaccgtcattaggatgcaatcttggacgtccacgccaaaaccaggatccaacggcgccaggattggtacggccgaacctggggctggcccaatccaacccaattacagctagaggcctcctatatagctccactctgcagactagggaattttggtccaattcatcgggacaaacctgagagcttggcccaatcatacataagactggtccaccacatcgactgaaagaataatcgttgacagatgcccggagtagacg

SEQ ID NO: 49494 - DNA, 486 bp, Oryza sativa
  unsure (1)..(486): unsure at all n locations
tcgccacaagattacacggcgtgataataataataataattattattattcatgcgcaatcataattctcgagattattcgagacgcaaacgatgggtgtgtccagtagatccatataattgaccttcgcattaataatgccactcaaagcagccaacgacttggcctgacaagaacactcaagagttcgtgtccatattcccatccatcgctaatgaaaacagtgccaagtttcagaagaatatggacaggaaccatcaataaattctgaacaaatgaacatctcgatcgccggcaaggcgccgtcggcctccgggcaccgcatctcgccggcgtcgctgtctgagctcgatcatgtctccatcatctgtaacatgcatgattgatcgaaggatgtggctacaagaagcaacacttagcttaattgcattcgaacaagcaaattgcttgacctnnttttgctgcgtgcaaacaaggtgagtactt

SEQ ID NO: 49495 - DNA, 666 bp, Oryza sativa
  unsure (1)..(666): unsure at all n locations
agcttccccgcaacgccatctctcgtttccctcactcgcaggccgctcttgttttctccaccgctcccgcaccgngcacccatccatcgccgccatctccacttctccggccaccgctcgtcgccgctagagccgccgcagaatcaagctgccgccgcggttagcttcgccgccgccaaagctaccccggccgccgcatccccatccaatcccgccgccggaacgcctctctctccgtgcgccaatgagtttcgctgcccttcctatctctggccggccacgctagccgccgtgggcttcctcccaaccactaactcctctctattttcctccgtaggtgcaaccgccgcccgtctgcccctccgctcgtcgggtcgtcgccgccgccttcatccttcgcgccggccgccgtgcccgccggtgaaaactccttctcctccctctttccctctctcctgtgtgcgccgctgtcctccgcatgcgtggcgtcgccttcggccgccaccgctgcttttcgcaccacccaccgccgcttttcgcgccggttgccggcgtcggcaaccacccgccaccaccgcattgncatcatcgggcggccgacttgaagccgagccgagcctggcccgggcccacttcctcccccatgaaccgacgcccgggggggcc

SEQ ID NO: 49496 - DNA, 259 bp, Oryza sativa
ttctccacttgactcattagtagcaaacaacagtattacattctgtatagtatccatctagaagtcataatcatgaaataatactgatatccaaacaaacaacctgaaaccgaaactgacacatagttagccggtcagaccgcgggctgcgtcggtcctacatgttgattaccgctggtttgtctcgaattcacattcttgtatgtccggcctaataaatagatagtatcctgtgatcacctgtgggttctatcatttt

SEQ ID NO: 49497 - DNA, 661 bp, Oryza sativa
agcttgtattcaatcttgaccagatttaaatatttagaattaatgcttgttttttatatttgctttagattgatattttgtataaggttgtatcggagctatagccaatacattatcttttcttacctaaacggtcttatcggctatgatacaaatacttgtagtttgcaatttattcaatcttggatacaagcagtttataaaatctcggtttaattcaatctatcccaattgcttgaaaatcttgaattatagattacatattgttagtttctgttgctgatggaacatgtgtaaggatctttcatatttatcttttcattccatactttatagccgattcagctcagttgcatcggctcggctaggtcatgacgatacgtcattggcttattggccaattgactatcgtttactagttcaaacatattgttattcttgttggttgcaggattgaaccaactgacatgttctgaatccgaagcgatatttggacctacactggagctaagcagaacttctaggccgctatgttttcgcataaaccgactaacacactaccgtgcacaatctagtcacatcctgttttcttcaaaacaggtagtctcttctcttcctaaatatattctggctaccattcaaaggttgacgctaatattat

SEQ ID NO: 49498 - DNA, 468 bp, Oryza sativa
  unsure (1)..(468): unsure at all n locations
tcatgaactcgtctcaccaaaccaaagcgcgttcattcggataagagcaatacatgacaacttcttgtatgtgcagaacatgatcaaaaacttcaacagaaagaaaataccgatgcttcttataaaggttgatatttccaaagcctctgacatcgtaaactggccgtatttgctggaggttctgcaaaattttgggtttggacagagatggagaaattggatttcaaatattttaggaaattcaagctcgagaattatcctcaatggaatccctggtaaagcaatttggcacatgcgaggtctaagacaaggggatccactctcaccgatgctcttcatactcgcaatggaaccgctacatcagattntcaaagcagctgaagaagcttctccctttggcaagatagaccccaagcgtattagattccgatgttctctctacgcggatgatgtggcgttattcatcac

SEQ ID NO: 49499 - DNA, 489 bp, Oryza sativa
agcttgcatacttctctctcccttatgtatatataattttgggtaagacttgttattacaatcttgtacttaacccggtgtctgcaatttcaagagaggattccggttatgagttatgcttcttgtgtggtaattgcttaaacgagggcggcgagggcaatgagtgatctcttgcagcttggctcttgcccggttggtttgcattagtggggttgtggcaccaccggttttatcttttgcttatgaactctatttgagacttccgctgctatatttatgtggttgatgttgggacctcggaccctattatgtgccatgtacctcgctgcactttaaccctattatggtacttgctatgtttttaattgcttccgatgaaagtgtgaggctaatcacattcctggggactagctaaacatgagtaacgagttttgatcgcttgagataattggggatagcgctttggattgagtcactggggtatacttt

SEQ ID NO: 49500 - DNA, 452 bp, Oryza sativa
  unsure (1)..(452): unsure at all n locations
ctntgtgctgcggcctgcgagtggcgctcatgtctccacccgtcttctttggcaatcactctcgacaagtgaccacccccaacacattcatatccaactagtatggagtgtacaatcgtctataaataagcagtactaagcaatatcaatatttgaccacgtataacaaatagactcgggcaacaaagatatatataaaggtaacaatatcaaggaaattagcatgcaactttatttataaacaaagcatttgtaacatgggttcaacatgccttgcttttagaaatcgatatcttcgagaaatccacatctgttgaatatccgcaatatccgatacgcagttaatacgcaaaatcctccaaataaagtaccaaacatttcataccagaagtgccgttggatatatctcgattttataagaattccggaagttgacggagtcatcggagcac

SEQ ID NO: 49501 - DNA, 440 bp, Oryza sativa
  unsure (1)..(440): unsure at all n locations
agcttaacatgcaaaggtgtncttttatttttcactnacaacatgttttttctactttcactaacaatcatccaggtttggacatcatgcaaacatgcggtatctatatagtctgcataattgaagagctttccaaataccgacgtgttgaattatcatccaacataattcatttaatggttcaatggatatccttattatgctctatgatatcctatttccttatatgggtcatactcacttaaatagcgcttaaatgatcaatctatggggcagatcagctttctccttttttcctctaattaagtcatatcgcatcgattgcatctaccctttagaccaataatcaacgggccaaactatatccctacttttcttgttccaaaaagtcatactcaccgtgctgttctagatctgaatcgcgcatctacatgcttcct

SEQ ID NO: 49502 - DNA, 463 bp, Oryza sativa
cgtaggtcacggcggagtgcacagttttgcgtctaggcctggtgtttatgttattcaacagaatctttcattggaggaaaaatagcaacattagtagagcttggttggttcatgtattccttaacaatcacaagttcagttttgagttccctctctttgttcaattgtaagaagctctaaatgatgagcttctgaacgtaagatatctaagatggtggcaatacagaagatttgtttttcagcaatggaaaaacacacagataccagctgctcagaaatcaaaatgtcatggttatgtcactatatcctcttagtatccaatatccgaattacaatattgtcaattacgagaagagagaaatacgatgaatagacttgatgtattgagttacgtccaaagggcatatgttgactacaagaggcaatcctttttctttgcgatgtcaagagcaatcttacatgg

SEQ ID NO: 49503 - DNA, 539 bp, Oryza sativa
  unsure (1)..(539): unsure at all n locations
agcttanagtacgatcgacaggtaaattctgtcacgaaatcccgttgttttttttgttttacgcctaccagacgagagggtactcgtgacggcttgctatttgctattgctctagctagtaaatgctgcgatcttgtgaatatcgaggtactccttgaacggtcctttttacaccaaattcttctagtgaatgaggtttgttaccccactccacagcctgtatgaaacgtattttacgtctatgggtataaggtgaataacaatagaataatcttcaaagcaagatctttatatatatagttctactacgtattaacaatacaaaaaattaaggctgagtggctgacaatagaaagcgtaaaaaataaattaattaacatcaagattgagaaccgggtacaggttcttaattaaaatgggccaatcttggtttataagtatgtaaaaatcatattaacttctgtgaaaaatgggcacattttttagagaaatgggcaacataatggaatcacactgaatttcataaaactaaacatatt

SEQ ID NO: 49504 - DNA, 448 bp, Oryza sativa
cgctgtcttctcacactaatgtgctaaggaccggaatcatatattgtctcgaacaatatgtgtctataacatatatatggtgatttgtgcacaaccatatcagttctgctaataccggcaagcactcgaaactcaattcatcttgaaaatgcgtctgcttcattgttaatatgctcgccggccttgtaatgtctggtgcccacctgccaagctctcacagttgattcccaagactgcctacctttcactgctctacagggcttcatgtatactctcgcatatgcattcttaccaagagcctatattgtctttccaaaactacattctaccccagctggtaatctcacgggatgactcacacctagatggatagcagcctagcacacctacggtgcttctagccagtagatgccagacccaggagccatgagtctcctctctggtttgt

SEQ ID NO: 49505 - DNA, 670 bp, Oryza sativa
agcttcccttacaaagatgggaagatgagcttgtagcttaattttttctagtttgttatgtctggattcatcactgttcaagataaaatgactagaacaatgttggcagaatattaaatgagttatcacatagaataattctccacaacatcaagacataatgagaaaggagtagcattaaatttgaatatgaatcaatagtgtttgcattagaaaaaaatagtatccagtactgattcataatgtggatatggaaatcatggctactttcttttattgcggtggcccttagctacttcctccatgcccatttaattgtcacatttgcaaataactccaagatctatgcaagaaacccttcttctttccaaaactaattctcatcgatcaacatgctgtgttaggcatacatgatacatgtacatgtggatatgcaaaagtgcaattgcatacatgggagacatgcaacgatgtcatttactcatgcacagataaacgaacatatgtataacgatgtcattcacttctacgcagataaacaaattaacattataatagatgatgattaattttgaaagaccttaaaaaatttatatgataattaaatgggtatcatagagtgggcagtgtgcatgcatgcatccatcattcactagtaaaaaacaatatt

SEQ ID NO: 49506 - DNA, 485 bp, Oryza sativa
  unsure (1)..(485): unsure at all n locations
tccanacctcaacaccatacttcagcataagctccagattctctatcctgcaatattaactntatttcaaaactaataatagcatagaagtatgctgactccatagatgataagaaaccatggtcagaaaaaagcagtatatcctacacagtgcgtacagcagtcgaattctgaagtaacatgatcgaagctttacatgttcaatcataactaacctaggagctcccattgtcaagtaaactgttgaagctgatattaggcaatacatgatcaaatatcttaatttacccaagatacatttagtaaagtacaaggaaaagtcttctgctatgagcattatacaatcctccaatntacaaattgtcagtgtatccaaaaaacatgctcttttatcaaaataatactgcttgttattntaaacagactgcagaaacctttgtcaagcagcccatcctatctactctgatactattctcgaagtctat

SEQ ID NO: 49507 - DNA, 485 bp, Oryza sativa
  unsure (1)..(485): unsure at all n locations
ccttaaaactcaagctgataccctgcaatattctaacagatattcatggtaatagattatttattctgttactaataaataattgcatacgtacattatttgcactatacttttttcccaagatgctgcttgcactatactgacaacacaattctgtatgattagttgttcgcatttaggaatggtaatatatactcttgaaattgttactggcaatagtatatcaagggctggcccangcctaggctttcactgctctgttccaaatgccccgtagggggagaattcatggatgctgattgccataaactagctaaaggtttttccaagctcgcatatagcctttgatgcaaccatgtagatttactcttttggacatataagtctctttctttggttgaattttagaactttgaatttttaaccctagaaaaagaaagacaacctaacccttgaatcttggtatcttcaaatcttggatcctt

SEQ ID NO: 49508 - DNA, 495 bp, Oryza sativa
agcttcctatttacaggacatttgcaatttttaaagcttcaaatcatcctcttttttttttttcttgctaccctacaaccatgaaaatgagtcagtaacactggcactgcaaaaagcactatgaacagacagcaaatcacttgaaacctcgctgcaatgattcacctcacgcgacgttatcatctagcttctccaacgcggacaccttagcactaatgcattggagaagaaccaccttgctttttttcccatgaggaagctcgacggtctcggtgatggatacatacttgatgttggcggacgaaattaagcaatcgatgggaaaagccagggacattgaacgcgaactcgttgatgctccatgccttctacatgcgagtcttggtgtggatcatgggtacctctcccaaacggaagacggtcacagcggaactaacagcttgcgcaaccattataccctccatcgggtggaaaaccttatgaacgaattggatg

SEQ ID NO: 49509 - DNA, 555 bp, Oryza sativa
  unsure (1)..(555): unsure at all n locations
agcttcaacggcatgctgtattgttcatttgtcccacaatcaaggactaattctttttttcctttttttgatggaaaaacttctngagnnatcttgctaataccttgcaggaagcagatgtactgaactatattccagtaccttgctcatcgcttaactatgctcattaggttatcggaaacaattcacgtcgatttttcaagcattggtaaggatggaaagccataaaaaggactgtcatgcctattacatctgtttctgggctggacacattgccattatgcaatggctaagggtctcagatcctatgccattctccaaccagatttgggttttgctcataaagtgtttgatcanattgaagcaccaaccacttttctttggaatatcctaattagagggcttgctcaaagtgatgcacccgcagatgccattgctttctacaagaaggccccaggaggaggaatggtgccagacaacctgacatttccattcatacttaaggcctgtgctagaatcaatgctcttaatgaaggggaacagatgcaccaccat

SEQ ID NO: 49510 - DNA, 474 bp, Oryza sativa
  unsure (1)..(474): unsure at all n locations
gggttgcattcnctgcgccagaggcactggtaaggaactccatattaactattcanaagttatttaccttctaattgcttggtcagagttatgcagctctgctattctgcaaattatcagggtttacatattggacatgctgaaaacaacacaactagatctgtttgcaagagtatagtgcattntttaatgggttaattggatccatgccattacaacttcttcgattttgaanaacaccattactattcgtctatttggagacatgtatgtgacacactctagatgttnttgatggtttaattagtcttgtggttggggttgaatgttacaaatgctatttgcatctgcattatggtttacacatctattgtgacactggttaccttttgaaatttatgaaatatgcatcatgtcattaanatatntgtttcctggtgtcgcaggtacattcagagcacttgtgctacatct

SEQ ID NO: 49511 - DNA, 622 bp, Oryza sativa
agctttgctaggccaaagtctgaaatcttggccacaaggttgtcatcaagaatgattttttgccgctttatgtcacaacggatgatttgcttgctacattcatgatgtaagtagagcaaacctcttgccaccccaagcgcgatatgaactcgggtgttccaatgcgggcgactattgtcgaacaaaaaacagttgagagggccattggtcatgaactcataaactagcagcctttctgctccttcattacaaaaaccaagcaatctaaccaaattcttgtggaatgtctgcccaatggtctcgacttctaccatgaactccttctcggtttctggttggagcttgtcaatctttttcactgcaatggtggtcttgagttcattctccaactggcccttgtacacaacaccagaggcaccggcacctagaatctcatggaagccagccgttgcctttttcaactttttgtaagtgaaagtcttcaagggttagtgggatttacttgatgcttgtgacaatgggatattcttttttgtggctattctacagtaagtaccaaaaaggaaaatggagatgagtgccaaagtcacccatatggaggttccaagaatcaagaacttcc

SEQ ID NO: 49512 - DNA, 429 bp, Oryza sativa
  unsure (1)..(429): unsure at all n locations
agctnttagttgcaaccgtaagtgtgatttggattctgacaaacatttcatttcttgtctaactcaaaattcaaaatgaacgaagttgtttcttcaattgtttccatattattctactcaggacttagtaattcttcatggactcttatgcgaatatctgatccaagtgttggtatttgttacgcacacagataaatccgcaagcccatagataccactatagcactttcctttagagtattataatggtatccaacacaatgaacgtgtgtgtatatcttaaaacaagattccaccaatgacaaacaactatatggtaatattatgatagagaggattcctatgaattcactagctaacttaagtaaaggtgaaacttatcgaatgcttcggccactttccagaaaacttattatgccggttgaaact

SEQ ID NO: 49513 - DNA, 667 bp, Oryza sativa
agcttcagcacttgggaagcaacgatgtgtttctcaaagtcgataatgtacttttttattttcaggatgtcatactcgaatttcaacgatctaatctctgattgcagcttctcgatcatctcctccttttcattctttgaactttttaaagggattatctcctctaaatatgtctgcacttggaccttgattgaagcaagttctttgttgagcaaagctatctcagcatctctatcctgcaagaacatatccttttgacaatttgcagctaattccttgaccctctgctcattctcttcgaagagattgactcgttcatttgacagattctcaatcttagctttgagttgatctatttcttctgagagaacacttaactgtgcttcgctgcatctcttctgattctggaactcatcactcttgcttttaagctccattaccagcctgtctgtctcctttgacttgagatccactaaagtcactaactgttgaaccttcactcggcgttgttcttggattgatccaagatcttcttgtggcctctgtattaattcttccaactggcccttctgtaactgtagctctgcagcctcttttctaacttgcataaacaactgttcatttgcgctgaaagccgaagaaacttgtgaagacaacattttgaatt

SEQ ID NO: 49514 - DNA, 486 bp, Oryza sativa
tccaagccatagagccaagatatccgaaataatattatcatctacctcacaaatatacgtgcaccaccagcaactgcatcttgcatagcagaggatcaagagaactcatatattatcttgtagcattattgaacttctatattaaaaaaaactaagatcagcaaacaactttatctaattctttcagactttcagtccagagtacctattacccagcataaagaacaggacattgcttttaactccccatgagacggatcatcaacatattaacagcaatgactaattattaagcatttgtcaataagaagtcatgaggtaacactatgaaacattatgcaactgatgtcaggagtatatgttatgttcaatgacctagcacaagaagtcatcacttgctactcgcgccggaatcttggtgagcccaaaattcaaacctaactcgattgctgtcattatatgcacgatttttattcgcttatctct

SEQ ID NO: 49515 - DNA, 605 bp, Oryza sativa
agcttacatcattattagcacaaaaacatagcgggagatcgaaggctctttttttgtagagacgatgccgctgcgtcggctagcattacctcgtcgtcggcgccgtcgtcctcgtgctccggctctgactccgttgggctctttgtacagtgggagcggagctgtatcctcctcgccggcgccggcgaggggaggcggcggcgttggctaatcagagggaggaaggccagggcgctcgtcagcgcggcggtcaccgcgagatgaggcggccaccaggtggggcggatcgccgccatgtgttccggagtttctcggaggaggaaaagggattaccgatggatttatctgttttgtcgttgcaaccccgcatcgtgtcgcgcacaaattagttaccataatactatcgggccacatttctttcggagagtttcaaattcttgttcagagagccattggtcaaatactttgcttaaatccttcaatttcgtttcggaatgtacaccttttacggctacgtttggcgagcaaaaacttcgtgggcttcataatcacccgtgctggccggtaactgagatatcttattaccccggagaaaaggattggta

SEQ ID NO: 49516 - DNA, 491 bp, Oryza sativa
  unsure (1)..(491): unsure at all n locations
tataaataacttttatagtttaagcagtgcttgttctatcaaatatcttggcccanaatatcaactacaccaaaaacttgaattcaggtcctaccaaaaacgatcgtgcgcattcaattggacaggagtctagagagccgcatgctgaagatcagatgtgatcacggcaattggtggccacggcagtcggcggcgctccccttgagcgcacggtggcgtgtcgcctgtcaggccttgtctcggcatcccagactcccagctattcggatggagtcatgcgttgagacggtgtgcgggagccgtggcgagttggcgaccatggcgatgggatcgctactcgacgcactcgcgaggaatcgggaacggcatgactccattctcatggcatgtttgagggagttttagatcagaagcagctgtttggtagccagcttctgagaatctggataagctctganactcagcttcttcagctcctggcttcttagttc

SEQ ID NO: 49517 - DNA, 668 bp, Oryza sativa
agcttgtctactcaatccacaagcacaccgactaggggtttaccccattattttcaagtcctagaagaagcagtcgattacccgcatcactcaaagactaaatctaagacctgcaagcaaaaggttaattcaatagcaagagtcagtacattattagaaataatgtactggcaagcaccaagacaagcctaagaccctacttgcaaggcatataatcaaggaaggcataatatggttctttttagcataaagcaagttttatttgcataaaacatttctaaatcaggtttactttcaaataaaatttcagcaagctagtatttgacatattgggcatcaaggtaggcattaatcatgtataaatatgcacctcattgccttccatggcagcaaggagatcattctcaaatctcatcacaatttgaaggtaaatttcagcatttagaagaataaacacaagtctatactcaatacatatccacacgccgctcatgaccgcgagcacggctaatcgattagttctaactctgcagagtttgtacactttacccacatgatgcgaaataataattatgcaagagcatgtcacgcgatacataagtacccgaattattacccgcaacaaagctttttcaaattcatgatttagccctacaccagcacgatac

SEQ ID NO: 49518 - DNA, 408 bp, Oryza sativa
  unsure (1)..(408): unsure at all n locations
tcagcgaaactcgaagatactttgaccttaagcgcgtccatatcataatcatcagatcgaaccttccataattcctcatgcacagaaataaaataattccagtcgaataagccgaactgggctaatcgggagacagttcaccaactccaaccgagagagatcacggagagagagagagagagagaatgacgttgagcaccttgatggacgcggcaacgatggctgtcggcaccggtttcccgtgcgggaaccaccactgcgccggcggtggcaggccgtggtgcaatgcggcggcggcaggaacaagagatgagggcgcatagcgaggaggcgcgccgcgaggagttgcgcggtgggcggagcgaatagcgcgtggggacgggaggagggagcnattggcggatcgag

SEQ ID NO: 49519 - DNA, 622 bp, Oryza sativa
agcttgcaagataagttgaaacagttgaaaacgaggttacaagttttgtacttttgaataacaggtttcaaaagaaataaaagaaagttataaaatcaacttgctaaatttattttattgcagcaagattaaatgaaacaacattgtaaagcttttgctggaaaatgagccattagtacagtaatagatgtacagtactaataacaggagctaatcaaattattaccaattccaaaccaggagctaatcaaattattaccaattatagcatcatttactacggtgatgtcacgcccggaatttctatccaaaattccaaacgcttacatgtgtgtgaaccctcgtccaggaatcagccgaggcacacaataacaaattgataatagagtacaattattactctaattattgagcgtataaaatgtcattacagaggtagatagttcctctcaatcaataaagatctaagcagcggaaaaagaaaataaacggcgcagacgactccactccacaggcagcttgaccaaggctacacctaatcctccacaccatcagcttcactgtaaaactcttcctctgatgaatgattgcaaggtgagtatatgacatactcagcaagcca

SEQ ID NO: 49520 - DNA, 474 bp, Oryza sativa
  unsure (1)..(474): unsure at all n locations
tgggtgtcggcggcggcgtttctcctttaagttcagctaatttctattgtttacggtacaccttgctctccaacttgcaaatcttgcctcgattccagttttccctgtcatgagctgctntgtctcgctccacacttactgcatccatagcactaagcatatgcaccgcatgcatcagagtggcactctcttcaccatcaggacaggtataggttccttagtcttgaccatgaggcttgtgaggatgatactcggaagctgatgaatccaactcttcttcaaagcgttgacgcaactctctaatggccaccatagctgcttcttgacaagcatggttgtacgatcttcctccagcttcgaacttaatggacggaaggtcttcacgatcactatccaacgtcacacgaacacgacacttctactcgttgtggtcatgggacatatggcgatactcgggagcaacttcttaaccta

SEQ ID NO: 49521 - DNA, 648 bp, Oryza sativa
agctttgcccatttgttatggatcctagacattatttttgacttttttattttcatgaacctttatattctttactcttaaataggatgagcatgttctacccatttatctgtgctaatcatatatgattaatatgaccaattttgatttttcgatcaagttgtaaacatataactttagaagtatatgaatttaataactttatggcccttcatgaacttcaggtttgtggtgcaattagagtgtatttgtgagcagattacattctgtactggtatctatttctgctttggcagattatacatgaagcgttattccacaaataatttcaggtgttaatttccttgaaagctcagttctaaagaaggttgctactactgtacgttagaagtaactgatccgacacatgaacaaatctggaccatttctatttttctgagttaactgtcagtaaatgagtccaaccactctagtacatggaagttttgcaggttgcatacgattgagaattctcatcccacgcgtgtgtgatgtgatgaagctggactctgcacttttcagtccccttttgatttgttgcccggtgtgtttaatttcacgcccaaattgaaaagttgattaaaattggaaggttgaaaaaaaaaagtt

SEQ ID NO: 49522 - DNA, 256 bp, Oryza sativa
tgtgcctcagctgatcacccggacatgtccacttcgccactctgacctcgtcggacgcatcttcggtgaagacgacgccgcgcgaactgatggatatcgtcttgaactcgtcgtagcagagaatatcccctctcttcttcagcgacgggagatcgtggacaccgacaacgccgtcgccgcgagagaaaagaagcacgggcttctcgtcggcgtcgtacgttccgtccatggaaacgacccgttcgtctcgttcgtc

SEQ ID NO: 49523 - DNA, 645 bp, Oryza sativa
agctttgtacatggctactcgtgcacaaggcgcaccaccccgaactgtttctgtttctagaccaaaaatgctagcattgggaacgatgttgccacccgctgtcgaagccatgtgcatgccatggccatgcacattcctaggagaaaaaatttcattcttgctcatgctatctaaattatcgtcatcgatgtaccaccgtgcaccgataagttttcggttgcaacttttgccctcaaacgaggggccgacttggcaaattcctttccatttggatggaggagggccatatccatcatcagcgaagctgggtgactcgggcgtaatacctgcgagataatagaagatatgactatatacccttgagaatttggtcaatctcttgtgtgcccctgaattttacctcatcccttacatatccctaagatttcattttgattgctcattctgttagttgaccatgagttgactcaaaaatgtttttgaaattcactatattacccctctcttatacttacgtgctagtttagagataaaaagacaattcttatatgaaacaagatctatttgtaaaaaaacaaaggaatataattatttgacaacaaatttaaaaaataaatctaattttttaaataaatattatcaaat

SEQ ID NO: 49524 - DNA, 479 bp, Oryza sativa
  unsure (1)..(479): unsure at all n locations
tganaccagtatctactcaaaggagcgcccggaaattcactagttatttccgaacttatttgtaaataaaatcctcgtccaggaatcagccgagatacacaaactgacaatttaatatacaaatccatcataataataacgttacatacttacaaaagaaaagaaaaaacagcagcggaattaacggtctagcgatggcttctgctccactcccacaggcagctcaactggggtataagccaaacgtcttctccttctggatcctttatcttcaactgagggttgatgattattgcaagaatgagcatatgacatactcaacaagccacacagcaagtatgcaagtgcacaaggataccaaagaatggcataatataggctcatttgcaaaagcagcatttatcaaagatntaagagaagtaaaacagtagaggtattaatcagagattntaatcaacactggacagcacacccatgct

SEQ ID NO: 49525 - DNA, 546 bp, Oryza sativa
agcttgtggggatcgtcctgcgtggcggagacagtgcggggcaccttatacttttttttttccaaaaaaacttaatttttgggttttcatgtctaacgtttgaccattcgtcttatttgaaaaaattatgaaaaaatttaaaaagataagtcatgcataaagtattgtttatgttttatcatctaacaataatgaaaatactaatctaaaaaaattccatataagacggacggttaaacgttgtacacgaaaatctaagaattgagttcttttggaaaggggagtatgccgcaaggcggtggtgacatggcaaaatgacctgagacagcaggggtcagtgatgcaagaaaacagcagcatggctcacggccttgctgtgcctccagcaatcgacgtgtggggagatggtgggagtttgggagcaagttgggcaccggtgggaggttggtggtggggcgctagaacggtggttccgtgcagtgaaattctttggatggtggcagccgaaggttataaccaagatgcaacgatattaaggctggatcc

SEQ ID NO: 49526 - DNA, 400 bp, Oryza sativa
  unsure (1)..(400): unsure at all n locations
tcctgaatcttaagagaatattgcgcatgtattgaacttccaggtaatttgaatatctccactgtgccaaaaatgcagcacctaccttggttcatcttcatttctctcaccaatgttgcagttcaacatgcatagacacaatgcaagtccctattcagctcaaattgacattctggacattggacctccttgcctcgcgctgcaacatcaccacacgtatcgctacgtacagactgctgcattctcctttctgttggattggagctggagggggaacattgatttgttctttcaaaattcagtaaataggcatttgtacgtgtggcatctgatggttatatgctatgggcattnntcattaaacgttgactcaactntgtggtatgttntcagtttcatt

SEQ ID NO: 49527 - DNA, 476 bp, Oryza sativa
  unsure (1)..(476): unsure at all n locations
tatatggggtaagttctcctcgtgtttacctggaataaacttagtatcatgtttttttaagggaaactttagtatcatgttcatatctccttccattttcaattcaaattaggccacattatatcctttgcttattcatgaaggactactattttcaatgctatcattggggcaattcacacctcaagcatttctgatgtttacttcatgcagtacagntgctgcataggtaatttgagcaagtcccagccacttccagattataaaccaaaaacatctgtaagatagaagcctcgccatttatctattggaaaaagaacgcaatgctcatcacgcctagaagccatggagaacaatgttagtgtatccgagtcccttgaggggaatatatcatcactttccaactctatcatcaatgattctaatgggaaagatacctcattcatcaaccatagtatgcatgattctaacttctt

SEQ ID NO: 49528 - DNA, 669 bp, Oryza sativa
agcttctgcaaccgagtgcatccttcaaacacatatctgagtgacatgtcattatttttttataaggcaacagacagagttttgatcgatttcccatattgcccaatgtacgcgaaggccttgtccgtgaccagaccagaggtcgaaagcctggaaagcttcttgcaattcatcacaattgctccaaaaccttcatccattggctccccggtgatccgatcagggagataagttttcaaaatgctgaggcgaaagacctcaagattagggcagttgctggacataatgaccattgctgcatttgtcatgcttccacaatagtatgttagggttttaagcttttggcagcctttcgagatagtttcaagcccaacatctgatactgagagatgatgctcactcccacgaagcaaacgatacactcgtaaatcctggagatctaagcacgtctcagcgatggcagaaaggccatcatcacctatggagtcgcgcacacagaatgtccggagattgccacaggagcgaatgatgggagcaagctgttgccctgttaaggtggcagagctgatgttgagggatgtgagattggcacaaaccgggtagatcgcagggaggtaatctggattggcgtcctggagacctgagagagagtggagtgacctgcatgct

SEQ ID NO: 49529 - DNA, 420 bp, Oryza sativa
  unsure (1)..(420): unsure at all n locations
aaaaatatggcaaatgatgaaacaccnaggtatattcttgttgtgcaaaaagtatttgtactatggaactacctatatttgcacaacgcctaagagaaatggtgaaatctgcattaactccatgatagttgtgcacatatgatcatcgtaatttcagaaaagaactgctatgcaatacagggaacagctggagagcggaaactatgcactctcgacatagattacaatatcgacgtccgtattacagcagaaaattctttgacgcttatgacaaacggatacctagcaatcatatacacgtaatatcatctttccgtactgatttgatggactgatatcttttaatcaaataatataatatcaggagtacatacatggaggtcactaccacactagaaatctaaattcttatacaacatg

SEQ ID NO: 49530 - DNA, 227 bp, Oryza sativa
agcttgcttttgagcaaatcgtaattcatgcatgctgaagcaatcctatcgttttagtcgtaatagcgcccactacaacgagagcgctagctcaaggcgtcgatgctcaatttaagccccattctccaggtggcaagacgacatgccagagataattgttagcccctttggatgtggacaggatccacagacaagaaatcaactacaacatgacgaaccttacaggt

SEQ ID NO: 49531 - DNA, 343 bp, Oryza sativa
  unsure (1)..(343): unsure at all n locations
tctaaagttggttccatcaaagaagttctccatccagagtggctatcttaaccagtcatggtgcgtatggccaacgggaagtggaggatgtgtgtctacttcaccgatctcaacaaggcgtgttccaaggatcacttccctctccctctaatagaccaacanggggacctaaaaccggntccgagttgttaagatttgtcgacgcttactccggcttacaccatatcagcatgtgaaaagatgacgaggagaagacatcattcattacgcttttcggtgtattctgctatgtaaagatgccgtttggactgataatcgcatgaaacacatttcagcacatggt

SEQ ID NO: 49532 - DNA, 652 bp, Oryza sativa
agcttaataaattcgacttttatgaaatatattaaacgaggtgctttttttttataaagatgagaacgcacgttagggcagcttggccagtagcggaggcaggagatatcgatcgatccgctcatgaaaatgaaaccgcatcggtcgtctgttcctactgacgacacgacagttaagttggccgtgtccagaaagcatgcagtgcacgtgctactacatgtctataggcagtacccgtatcaggtatgtgtaaccagtagaagaatgcaatctattatataattaaaggaataaaaaaaaggagccttcacgttcgctctcatggtctagaaattctcacattaatcggagaaaaagaaaaaacatagtccctatagaaatacaatttagaaatagctgaaattcggaattaaaaaataaggaatattagaagaggagactagagttcatatagaaatacactttataaatagttgaaattcggaattaaaaaattaggaatattataagaggagtttagagtccctatagaaatacaatttggaaatattataaattttgaactttcaataaggaatatttcaagtcgagtattgaagccatattgaaatccctttcgaaataataaaattttgaattaaaataaggattt

SEQ ID NO: 49533 - DNA, 445 bp, Oryza sativa
tgtgaaggtttgtatttaacatacaacaattggcaagatggttggttaaataatgcccaagaatttgtcagttgtgtttaagcatgtgaacttttatttgacaagcaaactatatttgtgaaatatactcatctttctattcagattgatattcgaaatatgcccaggattccaaccttaaagagtgttgattctttatcaggttttggcggcatacatcataatactaatgatgtattgtatgcatggtgttacctcttacatgtgaatgtaagggttgatagacacaaaaatctgtcgcaatgtgagctgggtcactattgcatgttgccaagtggtgtttggaggcttgaaactctatggatatgtcgactggaagtgagtcctgggtttatgatttatatcaacctttcatggtgaatggataattttatgactcgattgg

SEQ ID NO: 49534 - DNA, 671 bp, Oryza sativa
agcttgggctacggcgggaagccaaacgctcagcagagatgttgccttatttttttgtcgcctttgtaaatattacttttctccttacatgtaaatattgctcccttctttattcagtgaaatggcaagctctgccgttgctttaaaaaaaaatgggcgtcttttgtatttagctaagacatggatttgcagtccgtaactccaccacaaagaaaaatagcttttaaccctctatctatctatctatctatctatctatctatatctatacctatactaacctaacattttctatgagctctcacattaatcagaaaaatctagtcattgatctaataaatcataatatcacaactgtagatcgtaataatgtgttaggtattaattacatatagttttttaataaatgtagcaactgcaaaattcaatattaaataaatatgatcgttattattttaattacgatttttttttaaaaaaaaactgaaaacagttagtaatctaaatcgctatagtatagaaaatagcctatgtattcaacatatattaaactttaaaatatggagtagtatacaatatcaataataatgatccgcgcgttggcgaccagcaataataatttgggaaaagtagttaaagaagacaccaatatcagaaactatatttcatac

SEQ ID NO: 49535 - DNA, 493 bp, Oryza sativa
  unsure (1)..(493): unsure at all n locations
cgcaattgaggcctcaactaaccctataattaagacaaaaaagatataatgctaaatccgaagtctggtgaaccatcgttctcacgtatcccaatagaaagaattgggtcgactttaagcatcatccaagtcgtgagaatgacaccctactaggtcagagtagcagacaaagggtagatatatattttttctctctctcttgaactgagtacattacaaactgctcacggaactgcagctggttcaccaggaataactgtaacaccaagaagaataacagggtacaacagtgtgaagttcttacatatatatcctcagggcttcaatntgcacctcttggtaacacataatttaactntccaggaagaatttctagcagcatgtggcaaatctctctacataagctacctatgctcaaggctggctggctcttaatgtgacaattccttccgtgtaaagaagcgcaagtcaacggtggtaaacaggatattgg

SEQ ID NO: 49536 - DNA, 667 bp, Oryza sativa
agctttgctatacgagcttaaacgatctcgttcaatactatgagatgaactttctcttctagatggagtaggcgatagtgattggcgtctgcctctggaacccatgtcccttccactgataggaggagaaggggatccaccccttgaatgggataatggatgatctggcagagaagttcgaagatttgcaggtgcatcatgagaaaatccaggaacatttgaatgccatccttgaagttttggtgaagaagatatgcggttagttttaactggagaaggaccccttgtcctatttaacgctggggttgaaccagtactcatcctccttgaggcaagactaggagaccttcgtggaggtgttaatgttgaggcaggacttggagatctccgtggaggtgttaatgtttttgcagatggaggagttgaaggtctccatgatggtgttggtggttgcaatgcaaatggtggactacagcgagaagctgcactagagggtcttgtccttgacatggagcgtggtgatggactaagcctaatagggcttgcactgcttctactagacctttgagtattgtccacctgtgtataagttacccaaaaataataataaaatgatagttaggatgccacagggaacagtttaaaacccttgcagagagtatgctgt

SEQ ID NO: 49537 - DNA, 487 bp, Oryza sativa
  unsure (1)..(487): unsure at all n locations
tctcttactgaagggggggaagattgagctagaatgagtacaaccacagtactcagcgagtcacaccgtgagatgcatgattaatgcaaggtggtacaaggcgataataatatatgggttaagttttgcagtaaacagcatttaaaagtcacttagttgcccaaagctattttgcaaacacgatcctagagctatacagtattattaatcaaggccgtgaacccacacgaacctgccttaacccaaggcctacgatgattcataccgaactggcaacccgaccctgggtcccagctcgtcccaagccaacccaggccaaccattccacattttagttattaagcaggttttaagaattaaaacactaacttgngtacattgctaggcttgcccataaccgagggcgcggctattcgaataggttttactctgatcagaggtgtacatctntacncacaagacacgtcttcctcacgtgcaaccacgt

SEQ ID NO: 49538 - DNA, 592 bp, Oryza sativa
cagcttggcgcacaccaaacagtgcgagagctcaaaaaatccctcgcagatcttttttcctggcgctccagatgacggagcgtggggctcctcacccggagaccgcgcaggcccccctttggcggttcggccggggaactcaggggagaaaatctaagcctctctgtatgtggaaagctcgcgagacaggaaacacccaagacccgggcgatgtatacagggtccggccgctgaaaagccgaataccctactcctgtgttttgggagatctgtgtatgaaggagctacaaagtatcagccagcctctcccttgttctgggtttctaatctggaaaaagccagtcccccgtctcagtgggcaaggtcctccttttatatcttaaagggaaaccacatgcaccatttctctcttttttgtggggacttaccccaccttttcataaacagaccgagacttgtatggttgccgcccgaatgaccttttgaagggacggcccatacctacctccactttccccggaagcaagcgcgacatggaatcctggctgtctgctgacgacatgaccggtatcagaccagtcacgtcggtcat

SEQ ID NO: 49539 - DNA, 452 bp, Oryza sativa
  unsure (1)..(452): unsure at all n locations
ntacctcttgttgaagatcgaaatcgatgcagctcaacccgaaagcaagaacttgtcgaatcaatgaaagtagaagaaaggatggcaatgcgccgaaagtattattgaactgttgttctaaatcacatgggatcgggttatatttatacccgagatacatcatcagtccttgtcggataccactctctatctctaacaaacttctaagatacgaacaagtctttacggtagactcttgcccacacatatctctaaagaaactatttaaagtatcctaattaatagatacaattgtctatcgtggcaatccttgtgtagcactcctagagatggttacgcaatcatctcagcgaaatcggctatatcggctatcttctgtccgatccatctcagccgatgcgatcttcagccgataccttcgcagccgatgcgcactctgttcttggaatatg

SEQ ID NO: 49540 - DNA, 605 bp, Oryza sativa
agcttgccgttcgccttgggaacgacgaccgggttcgccagccacttcggatgtatgacctcacggatgaatccggcctccagaagtcgcgccacctcctcacggatgaaggcttgacgtttcggggcctgccgccgcactttctgccggaccggccttgcgcccggccgcacggcgagacggtgctcaatcacctccctggggaccccgggcatgtccgccggtctccaggcgaagacatcggcgtttgcccgcaggaaggagacgagcgcgtcttcctatttgtcgtctagaagaccaccgattcgtgtggtcttggacgggccgtcgcccagggcaacctccttgaccgggacctcgtcacacgtgatcatccgctgcctcggggcggcagggacggaggtgctgagcctctcgtcgccaccctcgggcttggacgccgcggcgaggtggtccgcgcgctgctccatacaagcgagcgcgactttgtgggcgccatggacggagatggggccaccgggacccggcatcttcatctggagataggcgtaatggaccgccgccatgaacttcaccaacgcggggcctccccaagaccgcgttgt

SEQ ID NO: 49541 - DNA, 401 bp, Oryza sativa
  unsure (1)..(401): unsure at all n locations
atcatgacttcaattacttcctcaacaggnatttgatcnctttttcactacagggccttgaccgaagcaagtaccagagcagtttgacatggcgaacttgactggctgaaagccgctgccggaactggttgttctgggtacaagaaggaagactgcctccatactctctcttctttttatttttgcggaggatgtttgcactaattggatcctaatcacttgagacatcgtaattgggactgaataattgcttgttttaaaccaatacctttatcttgacattgaggtctactttcacatgaaaaactgccgggtgtgtgctctaaagtatgccaccttcaataaaaaggaggtatctaaaagtcctcccccgccaatgttgggttattttggtggagcgc

SEQ ID NO: 49542 - DNA, 469 bp, Oryza sativa
cgcaatattgtggttggtgcgtgggcaggcgcttcttatggtggtgtgcttgtaagactggctgcctgtggtgtcatgatgaacattgtgggaacagcttctgatcttatgcaagacttcaagactggatatatgactttagcctcgccaagatccatgtatgtcagccaggtgataggtactgccatggggtgtgttattgcaccctgcgtcttctggctgttctacaaatcccttaatatcagtgcaagtgatggtgcttacccaacaccttacaccattatgtaccgtaacatggcgattctgggtgtcaatggattatcctcattgccaaagtactggcttacactatgctacatagccgttgttgctgccttcatcatcaatctgataaaagacctgtacccgagagagtggcgaagtacttccgatccccatgcagcagcaattcttttatcttggccatact

SEQ ID NO: 49543 - DNA, 637 bp, Oryza sativa
agcttctcgtggtcggtttggttggctcatctgatgatctacgcatgcttttttttttgaggaaacagaggaagtgggattaattagagtggcttgagatagtgatagtgtgctggtttggttggctttcttcggggtgtctcctacggtttgtttggctagggcttaaggtgagaattaacggtaagattaccatgagatttaaaaggttatttttctttttttttaaaaaaatgtgatgggaattgcttagaggttcatatagagactagatttgaattttgacttgaggttatgtatagtggaattatttatcacttccctttgtcaggggttctttcctcaattcccactcgtctcacaaaactcacgtataaagaatagcattccatactttggttcgagggaatccttttttctttataaaataacataatgcattaacggatgaagataatgtgcggcatgctttccaagctcccaaacagagtcgatttttggaaatcatttatatatgtaagtttcttgtagtacgttttaaaaccggtttttcacttttctataggcaattcatttgtttgttctctcagaccttatcacatattcgtatagcacatcatttttttcgattaaaaaa

SEQ ID NO: 49544 - DNA, 472 bp, Oryza sativa
  unsure (1)..(472): unsure at all n locations
tgtgaatatcagatttgatagccacaatctcccgacgatattgaactgtggggcgaggggtgagtgcctatggccgttgaggcaagtggcgagggcatggtgtcgtatcaccgaagttagtgacgatatggaggcaacaacacggagaggatgtgcggcccaagtgggtatcatgcaatggacgttccataggatcccgcactactgaaaaaacattnttgcatagtgaggggctttttttccaggcgggtatgacttttggagtcaaatggctgcctacgaaaatataaattgaggtgaagctcaccgtccatctacgaaaaatcatattttccagacggagctcttaagcggtccgcctgcaaaaatacctttattttcacaggcggacttcttaagtagtccacctgaaaaaatttgatttttgcaggcggaaccttatgtgatccacctgtaaaagtcatgcctacct

SEQ ID NO: 49545 - DNA, 663 bp, Oryza sativa
actgcggctgccgcttaacggagaacaatccttaggttacctactggttttttttttttagtgtgggagcaaagatcgctgccaagtggctaccacatttgccgaacagacatttggaaggagatattttgtctgccccaatgtagacaacaatttcgttgtatgtctaaccgtttccaaaatctgctatgatttgcacaaaatttctacccaaactgaataacattactattttttcatggcaatccaaggatgtgtggatttactcgggggatcgacaatgtcactccatcatatcatggccaaaagatagcagagtcagaaacacaagtacagtatcaacgattgaaggaccacgagaatgcaatgcatattgaccaacctataaggggctgataggttaccacaggctatattcgtcgggaccgacaaatttgtatcgtgtatcgatggcacttcttacctatcttatcattacaaagtttaattatgaaggggtatttttgtatgcgtaagactaaaaaaataatggaatttggattttacccaatctttgagagtttacatcttggattgaggtttcaatataaaagaattggataactattggtaaattataaaaaatatctaatttcttaaaaataaggggtgccccatgggaaa

SEQ ID NO: 49546 - DNA, 434 bp, Oryza sativa
  unsure (1)..(434): unsure at all n locations
ngagactgtgccatcagcgggcgcggagctggattactgttgttctgatttccaccattgttgctcccactactgttctagccgaaatttcctggttggtanggcctgtgctgacaaacgatcatagtagtaggaccactatgctgtccggaactgaaactgggcttttgttgtccaccttgctgagttctaaactgtagattaaatacgtggatgaatggtaatggcaacaaccataacacggagagggattactgattaccagtgatgcaacggcgacggcaggaggcggnggaaccagcttgcctcggtgcgatactacgcggcggcgcacggnggtggctaaggtttgtgtaatatgaaaaatangagggtggaaggatttatataggagaaaacaattaatagataggtgggtcctacaaggactcgga

SEQ ID NO: 49547 - DNA, 417 bp, Oryza sativa
ctgcagcttggcagcttcgctgcaatgtgctttttctcccacctctgttgcagatgggttgaagcagagacaggtctgctcggatagatggagaggctgaacgggacatgggccaaataccgtcgatcagaaggatggacaggaaacaagaaagtaagttcattctagctccctcaatttgtcgcccaagctgattcttacccttactctcaaaaccagacacaacccattcttcaacttacaagaccagtgcaaatgagatctctcgacagtattattctaggttttagctgacatggtgcttacatagcttcttcgactatgtctttctaccacgttccatcaatgtagcgcctacatgacactttgatccagacaaaaaatataggagcaaaatggaaaactaaagaaataaac

SEQ ID NO: 49548 - DNA, 461 bp, Oryza sativa
  unsure (1)..(461): unsure at all n locations
agaggaaaggagagctactatagccatacccgttctcttccgaagacttccggactcctgattcctattctaattctattccactcgctagatactactaaactaaatttgagaggaatgagagagctcttgcttgaggtgtgtgttgaagtgaagagagtgaactccttaaataggtaggtaatgacggttatggcgataggaaaggtcagtaataccctccaactgccattgggagtgaatttccaccgttccctcaaaaccctgcatccatcggtttcatgggaggatcggctgaacctagggcctgcccaaccagcccacatnttggctggtggccccctctactgcttcacttcgtagacttgtgaattatggcctgattcatcgagtcaagtctgcgttcttggaccattcatacacaagtcttgatctcgatatcgtccgattgatctatcgtc

SEQ ID NO: 49549 - DNA, 486 bp, Oryza sativa
  unsure (1)..(486): unsure at all n locations
tccttaagtcacctgcggcatgcaagcttcagcgtggcaacggcagccaatgtcactgccaactccggtggtttcctcatctggctggcactctaccttgtaccctctccccgctccattcccaaaggcggccggtggggagaaaggagcagcgtggctacattcactatgaaaggctttgagcaataaacaggattaaccgaattcggtcttgccttttcctaataacaattcattccttgagtgttgactaaccaaattttgattgaatgcgcacccgtagacaggaatcaattatatagccaatttatttactatggcactggaactaaacactntctctgaaagtttcctgcatgcttggaaccaagaatatatatatatatatatatatatgtgtatgagaaacatagacccacatgttggagtagataacatacatgaaccatgttcacagaacaatttcaagacagctcattcgtgaat

SEQ ID NO: 49550 - DNA, 478 bp, Oryza sativa
  unsure (1)..(478): unsure at all n locations
tctttaactggagtggganagattaaacaagaaagagtatttctactatactcagcaagccacaccggaatatgcacataatacaagggggtactacgagtaatctattangggttaagttttttgtaaaaccatctttcaaatagttaaagtataatgcacatttcanagcacgatactaatctagtcaaaatattaatcaagccgcacacctgtaggaacttgccttaacccagcccatcaggtcatagttccaagcaatccagtttaacagagtaaaatatctaacctggatatattgctaagcttgctagtaatgggcacacggagagagggcagagaggataaggatgacggaagagaggagatcggcttggcgtatangtggctcggtggtttttccacatatgtgttggtttaattaaaaaccgagaacgaatggtaatttataggattcaacatgcttagattatgatat

SEQ ID NO: 49551 - DNA, 437 bp, Oryza sativa
  unsure (1)..(437): unsure at all n locations
agctntaccggtcaaataaatgattcatatatataaatttatgacgatnganaccagcgacacatcctgaaccttattaattgtttattggatacatgtcatcataaattttacggcttaaaaatatgacattactattcatatatttagaattatgccattacaattttacataaattcaagatatgccactacatacctgttcatcgtattttctaatattttaggaccaaattgcccctatcctccttccactaatttcttgttccttccttcctactctctccagtggggcttggcgttcgtctcgctggcgattgagctcaacgtccccctcttcagtgctacttgtcgctttgtccacattcgccttccactctccggcactaagagaacgacgaaatctaccgccacgaggaggcacaagggcagtgagc

SEQ ID NO: 49552 - DNA, 428 bp, Oryza sativa
  unsure (1)..(428): unsure at all n locations
ntagtcatttaaacaatntaatctctagtcccacgccactattctgcagctattcagtatgctctcataattgttgatgatgttgccttcatagctatatatattatatgtttttttaccgtccaacactgtacagtggtaccaactctcaaccgttggtataaccggatccaacgactagcggaggtatcacgataccacttgatctttgagatggtaccgcttaactgaagaaaagtggaagggtaagaatatattttcgtgttggatggatggattggctgtatgaatggatgatgtgttcttactttctcattggttcacatacattattccccaacacgggtatccggctagggcagatatatgctgagcgcaatagcttgcatggtgacaccgtacaaccgccatgacacatcactggacct

SEQ ID NO: 49553 - DNA, 423 bp, Oryza sativa
  unsure (1)..(423): unsure at all n locations
agctntgaataagtgaanaactgatggttatatatgacaaatgcattgttcatgagtgtgaaaactttatacctacaaactttctacttgaaaactttatagctacaaactttctacttacaaacaacatatttacgaaagtttctagctgtaaaaactttaaatgcatcactttcatgagggtgaaaaaactttcgtgctctgtgtttgttgttaccgaatccatccaccagtaaaaaaaaaagcctaattataaatgaaggtgaaaaaaaaaccttgtcatatcccaatcctttccccctaatttaaattagggaaaataatgctatgcaatgagaaatgttccaacaactataaatttttttaaaaaaaatattagctcctagctcatctagcatgggtgattataaaatttatgatcat

SEQ ID NO: 49554 - DNA, 425 bp, Oryza sativa
  unsure (1)..(425): unsure at all n locations
ngaggctcgaattgacttgacttccgaacagacatgaagctgtcagctggtcctctatgtttgacaactaaaagaattggagagattgggaggagaaatttgaaaaaccgtttcacaaagaaatgccgaagggcgagaggagacaatttgcaagtagggttttcagaaaacttgtccttatggtttgaccatttggctcaacctatagtcaagttggctctgataccactttgtcacgcccagaaatttagcccaaatttccagactattttgtgtattaaatccctgtccaggaccagccagggtacacaaaacgacaagtaatatacagttccaaacataaataaagcgtataatacttaccaaagaggcacttagttctcgcaccgaaacgaaaacagcagcagcggaataagcgatcctag

SEQ ID NO: 49555 - DNA, 413 bp, Oryza sativa
gcttaggcgctttagatcataatctcttatattgttttgccctgtcatctgcgtcccaacgcctgggattgcaagacttgaacttgaataatctacactctcgaaattcgatttcaatgagagaatccgggatgcaatacaaaatccctccaatcatgagtgcttcaactcgccgatgcagaaatcttcaatgatctcaaagactctgaagccatgttgagggctgcaggttcagaggtaagaatgtctataaacagattgaaaagggcagaaagtagcagaaaaatgaagatattagtagaacaagtacatgtttatgctatttgcattaaaaaaaatggcatagtatatgaagggcgagatatatggtccaccaatatcattatttcagtttgtgtcacaacttgctgttt

SEQ ID NO: 49556 - DNA, 398 bp, Oryza sativa
tgtagctctgctctgctcagtaggcaaacagatctcatttagatggccgaggtgctggcgagtggtgctaccgggttgatcacatcactcctgtgcaagctcgccagcctgctcgatgacgagtacaccctgctccgcgaggtgcgcggcgacgtggagttccttcatgccgagctgagcggcatggacgacttgctggtacggcttgtggagatggagaagaatggacacggcaccaacaagtggagggtgaagctgcgcgagctcgcctacgaagtcgaggacggcatcgattccttcacacaccgccttggctctgcccgtgacaaggcagggttcgtgcggtgtttcatgaagcagctgaatctgatggtgcgcctccccgtcgccaggcatat

SEQ ID NO: 49557 - DNA, 461 bp, Oryza sativa
agcttcacatcttatcaacagttgttgatattaccattggcgtcaccatcgacaccttcgacatcggcattatcttcatcttcggtcaactaccgtcaactaggatctttactttcggaggctaggcttcgtcaacactaaaatctgactggatcaccgacatcgtcatgttcatcaacatcatgtcatgcctcttctgcctatcctactctactgccgttgatgggcaacttcgtctgcacagacgaccatctctgctgccgccagtcgtcattatcattggtcgtctaccgtcaccaattggtttcttcttctgcatagttggtggagttcgccatcgctgctgatgggctacttcgtctccacaaccgacatcttcgtcacctctgatgggcgataacgtcttcatggtggtcatctatgcctcatgctgaccgcatctactaccgtcaatgaacaat

SEQ ID NO: 49558 - DNA, 401 bp, Oryza sativa
gctgcacatgtgtgctcgctttatttctcaacaaatgctaactgctgcttgtgctagtgttgtgtggaggatctactacttttgctagagttttgtgctatctaatggaaatatattggcaagtagccaagtgctgattgttatattcatttatcctgtatggcttttagtgctttgtcatttgtgccatgcagccatgcttgtgctgtggttctgtgactttgtcaataaaaagaacttgccaacatgtactgtccagtctacatacaggctcttgctccaactaccattgctgatgttgttgtcaccgctacgtcgtcatgcgtaaagccgaaagcaaatatatcactatcgtgtcttattaaaagattctacataattataatttatcattgagtgaa

SEQ ID NO: 49559 - DNA, 471 bp, Oryza sativa
  unsure (1)..(471): unsure at all n locations
agcttgattgcttgaatgtatatgcagtctaagctagtgatagtcaaccaaatatggatcttctctataaatacaattaagaaatataaaaatatgatgttaagataatatgatcaacccctggcacatttaggttntgatctgaggctatcctggtctgcgggacccaacacaagtattcatcctttccaatgaaaaatagagaacaacaaatacagctaagacaatgtcaaaatacttgtgtaataattagaaccatagtttcaatcaagcctgtgtatattngtgtccaaaaaggataatatctaaagagttcaaaaaactacatatgttttgacaaaactattgaaaacaacgtatttaagcccaccatatcacaagaatacatatttaaacactactataacataacagcagatttaacaatgaatgtatcacanaactatagatttgtgaattacgtttctgcac

SEQ ID NO: 49560 - DNA, 463 bp, Oryza sativa
actaagcttcgtttatgttgtagtctttgatatataagtctcttttttataaattcagatttatagtatatttaatctatattgatatattcaaagatggagggactagttctgaaaaatacaccagtactgaaatgtgaactgaaaacacagactgtgaatgcagcctctttggacttatcatttgcacggttgcgtgcctttctgacgctgccagagatagtatgtctgactgatgtcacattgtgtacgttaaagcaatgctacgaggacagacaaggactgcgccatcatgttgccactttcttgacacaacagaatgggaagctcattcaccgttcaatctctcataaaaagtcttattactaactgaactcatggcgtgacattaccactacagaagacctggtggaatctggcaactgaacatgaatcaagccaactatcatatatactgatgaat

SEQ ID NO: 49561 - DNA, 346 bp, Oryza sativa
  unsure (1)..(346): unsure at all n locations
agcttggactataaacgaggcgagctcttgttaatggcgtgcggggggagggaggggtgtgttggtgattatgtagtntttcggagggggcgcacgtgaagaaatttccctcgggactctgacgggtgggccccgcgctcacgggtatggattacgctcgggattgggggtgtgggccctcacctgacgggagcaactgggctttcatgcttggggattgggccgcggcgttctgaataaaactcagttggtgggctaagtcattcatgtcttgcggatttgagaaaaatatgccttttgcttctttctaaggtcgaattattcgtccctgaccactacagatttt

SEQ ID NO: 49562 - DNA, 97 bp, Oryza sativa
tccaagcacagacttggctcgtccaattcctcatagtatacatacagggtaactttgtggacatagccgatgaaaacgagccacgtgtagctaacta

SEQ ID NO: 49563 - DNA, 331 bp, Oryza sativa
agcttcttccaaagcatacggctttctttatgtatatgacgatctctagacagatggatcttatatgaatcgtatgatgaagtaccacatgagtggatatataggaaaggaatccaaatctgccgaatcgctcatgttatgatcttctacatcctatgtctccgcgttccgtcatctggctatatgttcttcatgtagcattcagatcgaaagactctatgaaattacgtcgacacttctacatattatgggtaacgtaagagacatccctattttcccccgggggtctataataccactgtttagcttaattccccctaccaccatataa

SEQ ID NO: 49564 - DNA, 457 bp, Oryza sativa
  unsure (1)..(457): unsure at all n locations
tgattctagtgcanaatgatcaatatgtagaatcctaactatttattgcggagattcgtgccggaacgtccgctttgcattttaaagaaaaggtacaaaaacatatttattccgaatcagatggggaaatgcactggagtaccgatgtttatcatgcgcccgaatatcaatatggtaatcttcgtcgattaccaaaaacaagccatttatggatattgtcagtaagtatgtgcagatctagtatagcttctttttcgctccacaaggatcaagatcaaatgaatacttatttcttttctgttgacggaaggtatatctttggcctctcgatggctgatgatgaagtaagacatagactgttggatacttttggtaaaaaagatagggaaattcttgattattcaacgccagatcgaatcatgttcaatggtcattggaatattgtctatacttctat

SEQ ID NO: 49565 - DNA, 449 bp, Oryza sativa
  unsure (1)..(449): unsure at all n locations
agcttatgtggtctagctatcttacatattttgtctacttactgttatcatagtaaactcttgcagcagcgcgtggcggagagggggtaacctagtttttaagattcaaatgaccttttttttaaggtactaatgcctttatcagagaataattaatattggctttggttataatttttactcatgatgtgttaatgggatcgctcttaccattttgtaccttgctatgaattgaaatggtagcttcactatgatctgccttggaaaattcttttacgacatgatgttgctcaatttattttcagaaagatgacaatttcaaatgcatgcaaaccagaacgtactntggccattaacctaccgctatctcaaaanaaaacatttatagtgtatatatactacattctggttgcatgttgtattggtgtctgtggtgcacacaaataaac

SEQ ID NO: 49566 - DNA, 345 bp, Oryza sativa
ggttccatcttgaatataggtcaattatcaaaaaatatatgtttctttaaaaaaatctcgctcagtattttccacagcaatatattttttccctaaatatactccttgttctcccacctagttccttacaagctagcactagacaatgcatgcaatgcaagttgcaacatattcccttcgttctaaaatagaccaacttctaatgtttgaaatttgtcgcaaaataaaccaaagcctatcttcttatctaccatcgatccataaattgagatattttatttcttcaataccccttacccaccctacaaccaatacaactttcttattataagaattgtataggca

SEQ ID NO: 49567 - DNA, 459 bp, Oryza sativa
  unsure (1)..(459): unsure at all n locations
agcttattactgtctcggctatgttcatattcatgtatagaagtgaacttatttcgagacggagagagtaacgcggtgttgttactagtccatgtgaggagaaagaaaacaaaaggaggcaccacttgtagctatcagctgcttctatggccaaggaaaagaaggtgatgactgaagagagggcaagcaggactaccatgcacatttgctttagaatctgtcatgtctcatatttttcctattccctcagcagtgtatcaaccatgagtgtaatcatttgcaaagagttttcatcccatccttccattgagagaccactagagcaaataaaaaggtgacaagcagatactgttcttttgtcctctcacactgaccactttgtcccaggccccactttcagtcaccaagatagctgcangtgcttgcatccatcaccacgcaatcgtcacatttccttgg

SEQ ID NO: 49568 - DNA, 425 bp, Oryza sativa
  unsure (1)..(425): unsure at all n locations
tgtggagcaggaactctggcaacgggaggagaatggtctgatcggngtgctccctgtgcatgactccgaagctgctggctcattgctgtctcctggtgagataaaggctgctgctgctgctgttttttttttaatttggttctgtgagccatttgtgggcattgttgtatggtggtttcttactgttattgctgttgctcgcatatangtgtangcagcgattcaggtgagggtgggagcaaggcgcctggtggttctgcaggagaatcaacgaagcaggatactaagaatgggaaggagaccattcactggcacagccggtgtgtaacattgccatctttgctaatatgtgcttttccatatggtcatatctctgaacaagattaaagaagacattcttnaatatgtnggaatagtggaaaaca

SEQ ID NO: 49569 - DNA, 157 bp, Oryza sativa
agcttctcttactgaagagtttatttttttcaacaatgagcacaaccacagtacttagcaagccacacctgagatgcacaattaatgcaagggagtaccaggggataataacatagatggtaagctctgcagttaacggcatttaaaaatcacttag

SEQ ID NO: 49570 - DNA, 395 bp, Oryza sativa
taacattgtagtggattggtgttcagtagttaatcggaaatgcaaaaagcacttctagacctatgataatgtttatatggcaagtttgtcggctagcactacattgatttctatggtcacatggtattatttctcagcaatgttcttataataaagttacttggtaggttctcattcgaatcctactctttagatcccaaaatctgaaactggtggactctttgtatcccgacacttgtctgttgtgggggtaacattgattgcttttctaactgtatgctcttagattacttctggtgtgttctaatcagctaggaaaaatggcagctggccaacattggaccctactacacactttcgaccaatgtatggtctgtgctggtgccaataactct

SEQ ID NO: 49571 - DNA, 472 bp, Oryza sativa
  unsure (1)..(472): unsure at all n locations
agcttggtcaccctggccggagaacgagatattttctctacttgcgtgcgcaactccgccatcttgtcccgtaattccgccaccgtccgctccactgttggcttccatccagccaactccaccaccatcggcttgatttcttccagcgacccaaccgaagtttgaatcgccgtgttttgcttctggatcgccgccatggccgccgcgagatcagcgagttgctgctccatctcctgagccttgagctgcgctcgcgaatggtagcgtggcttgttgaggtactccaggattcgagcgctctgataccaatttgttacgatctatccagcgaattctagaggaagtggaagaacagagtaagaacgggaggaacagaggaggaaatgtcaaaatagagaagaaggtttgatttgcggaatagatntgtgttttgtgtttacactttcgacaccctcttctctcttagccctct

SEQ ID NO: 49572 - DNA, 441 bp, Oryza sativa
  unsure (1)..(441): unsure at all n locations
catgtcaagtaanaggttcatttgtatctaggcatttctgtttgtataggtgcatcagattagactattgcactttttgctatatttgttacctttctatttaagcaattcagttggtattaggaatttatagccatatatgtatagattatattgctatgcattccttgttgacgccggtgttcgtcaacccgtacatgactgttgctatcaagactcatgttccgatctctctagaactccgcagccccaacttcaacaagtggaaagctttcttccgttcgatatgcgggaaatttggtctccttgaccatctcgacgccgctcgacccgctgaccctaacaatgcctangagcaagctgatggctacctccacagttggctcttcagctcagtctccgacgacatcctcgacggctcatgaattgtggatcgccatc

SEQ ID NO: 49573 - DNA, 380 bp, Oryza sativa
  unsure (1)..(380): unsure at all n locations
tgacggtcgttatcgatcagtttcgttcgtctttattatcaaaataaaggagaacttgtaatgcttgcaatgcatatatatgttagaataataatattccactagtattaggtatactaacatttttgtagagaatgaccataaagtggaggagaatcgatatcaacacagacggttaatcagtcggacgatgtcgagaatcatacttatgcatgaatgggccaagaactcagaattgacacgatgaattgggccaaaattcacaagtctatgaagtgaagcaacggaggaggccaacttgccgaattgggccangttgggccggcccctggttcggacgaaccatgcgtcgcgtcccaaaacgactcttaaatacatcc

SEQ ID NO: 49574 - DNA, 471 bp, Oryza sativa
  unsure (1)..(471): unsure at all n locations
agcttaccgacagggtttctnttggcctattttagcgtccgacgccgacaaaattgtgcgcacgtgcgaaggttgccaatttttcgccagacaaattcatctaccagctcaagagttgcagaccatcccactgtcttggccgtttgcggtttgggggctcgacatggttggcccgtttaaaaaggtagtcggcggttacacgcacctctttgtggccattgacaaattctccaagtggattgaagctaaaccggttgtcacaatcacagcagataacgctcgggacttcttcatcaacattgtgcatagatttggagtgcccaatcggatcatcactgataatggcagacaattcactggcggagttnttaaagacntttgtgaagactntggaattaagatctgctatgcctcagtggcgcatcccatgagcaatggacaggtggagcgagccaatggcatgatacttca

SEQ ID NO: 49575 - DNA, 434 bp, Oryza sativa
  unsure (1)..(434): unsure at all n locations
ntggagttgctccatcttcaaaggttatgtttgtctcanatatcttgctgaaaccctcagcaagtaagtactttagatgttggaattcatccttcttgaaggtgagcatgtatttctcaagagtttctcccacttcagataatgaaagaaggaatctgtttctcttcaactcgagctcttccagtcttggaaggtccccgactccatcaagagactctatgttggtgaaggacaatacaatcttctcgagccttggagctgctcctttctgaaatttgatgcctctcatgtttttgccctcgacaagaaagtacttgagatttttgaatttttgctgaatgaaggtgagcttgccatctgtgtatcccttgtttctgaacctaacatagcataagttgggcagatcaccaagaccctcctaatattctgttcaa

SEQ ID NO: 49576 - DNA, 473 bp, Oryza sativa
  unsure (1)..(473): unsure at all n locations
agcttgggaatggattgtttatctgatgcttgatcataggcaatagctcatggaccgactgcagttntgtacgcaaacaggagcatctgtagattgctcatgggtgatggtgaaggtgctctttctgatgcttacagatgccgaatgatgcggcctaactgggcaaaagcttgctaccgtcagggtgcagctcacatgctactcaaggtaagactcactgcagttaacgttttgtgatcctggtattatggtcggtgtcctgaactcctgatttactctaaaaccaggagtacaaacatgcgtgtgatgctctcatggatgcacaaaaattagattctgggaatgtcgagattgagagggaactaaggtaatcttctgtttcgctcgagtatgccttccaaataaaaatgtgggtgcgcagggaacatgaccattagtactgtgcattccgtgtgattatgcccacatttact

SEQ ID NO: 49577 - DNA, 461 bp, Oryza sativa
ggcttgagaggggtatcgaaccggccaccgctaaatggcctgatcgatcgaagttctggtactatgctcacggtggaatgctcaacccagttgatggctccttggtcttcagcgatcagatacgcgaggctgcgaatcgactaacggacgcagtggaagcctcttctcagggcacgttccgacccgacagagagaaagacgagctgtcactcgccctacagactcccgagcatccaggacaaacacgagggaaaggcgtgattccctggaagatgggattcaaggaggacatccacacgtacaggagtcggatgaggagcaagagagataccgaggcgaagattgcagatcttgagtacagggtatcgagctacgagctcagcatacaagaggaggtggcccggaaggtggatgaacgcatggcagcacattggtcacacgatccccagcccgacatacct

SEQ ID NO: 49578 - DNA, 447 bp, Oryza sativa
agcttccagagacctcatcaagggggtattctataatatacctaccgcccagaccgtgggggacatgcaaaaccaccacacggcattcaagcccaattatgtgccctgtgacggagtcatgccacgggtatctacttcaccactcggactgattattgtttctgtggcgtttggcgctcaggacaacttccgcacagagaacatctgattgaaggacgatgattatgagacaatgcaacacgccctactcagacgcccagggttaggcaaagtcatggctgtaccgcattatacctacatgatgatgagagatgcccgcacctctaggagtcataatcctgcggagtgacactaagcaaaccgacacgtgtgacattgaaagctgacacatggcccacatcatgcagatcactctcatcctagacgaactaccactggatgcgtcca

SEQ ID NO: 49579 - DNA, 332 bp, Oryza sativa
  unsure (1)..(332): unsure at all n locations
ctcagcttggggtctttagagcgcagaaaccgtacaccctttcggagtatttcgcgcaggngtgttctatgaaaatcctatgcaaggaggctccaaggaagaacatatcactacgatttagcctactaaacgataccagtgatgcactctcaagaggatgagaatgcctctcaaccatacaatatctcttttggactaaccggcaaatactcttatgactggctggccattatctttttataccattcatattggttgaatatgcataatccccaacactactgtacttatacgcctttccccaaaaaacgcggaacaaattaccaccatcc

SEQ ID NO: 49580 - DNA, 452 bp, Oryza sativa
  unsure (1)..(452): unsure at all n locations
agcttcacctccaaatacggggcatttgttgatgagcggcaccgaggcctcgcgccctcgccgatgattgggaccctgtcagatctgcggccaccggtcgccggctcgccgccgccatctctctctgatctccaattgagcaaggcaagttcaaggcttctagaggctgtgggcccgcggccgaggatgaggacgtgaggtgatacctgngccttcatagatagtacagcccatatgatgtggcctgcacctgtaattccatgactagacaatcctgngcaaaatcttttaaaaagggaataagtccacattgactcccttaaaagtgacccgaatctaatacatgaccctcaaccgcaaaactgaataggacgactcaccgaactatngaaaccaatggcaattaactccctatgaanggtcggtntgaccaatatatacacacttgacac

SEQ ID NO: 49581 - DNA, 497 bp, Oryza sativa
  unsure (1)..(497): unsure at all n locations
cggaccttaaaactcaagctggtgcttgcataggatatgttcacacttatgttttgttcaattaataattcatcatctttctatcacatgattcacataagaataagaagaacaaaaagaaagactagatctaattcagataacataggtgatgtaaggttatatataagcatttgtatcccacttgtgttacctgtttggtcctcttattgtgcatcacatggccaccaattgtaagtgattcgttctagctagctaggatacatcgccccctcactgattcatattcaagtagttataccgatctagtccaaggagcagctaagccactgcaagtatatataggcacattttattgttttccaaatgcctttaggtttcatattcgaggcaagcgtaaattggcccagctattcagaattaggcaagatttaagaggatntcccattccaatagataagcaaagtattattgtatctcngatagggggtgacaca

SEQ ID NO: 49582 - DNA, 399 bp, Oryza sativa
  unsure (1)..(399): unsure at all n locations
agctatctggcagaggtgctgttcttttttatctgaaaaggnagcgctgcggcctatttcttaatgtataagtactctgttactaaatacatttttttgttatgtcaggtgtttttctactgccatgcgctctatcttccaggagcagttctaatttttcattgacttcaaattgcagatcttgaaccctgatagggctgtcgtctttgcgaacacaggttattgattaagtngattagactgtccttttgatttgcctttcaatgctaatcatgtgggcaaatcatgcagatgaagtaccagcttttgaggccaaggaacatagaactgtgaacaatcctacagacgcattaattgtntcatgggtatgccctgatctatgtctggtgtggacaatat

SEQ ID NO: 49583 - DNA, 479 bp, Oryza sativa
  unsure (1)..(479): unsure at all n locations
tgcaacctttcattctnttctgcttctagaacggattatattattggccaaatggtcattccaatgaggttacagccatttttcagaatctgttccccgtttttccaacacacacatgacaacagagagtatacgcaattaattatgcatgtgtatacgatatgtaagtacgtcgtccttgcatatagctaacgttgtcatgagtcaaaacatctctgtcgagcctggatgaaaagtccaaccattggtgtcgtcgtgtctgtatatctaaagttcaaatgcattctaatttctgtatagttttagccggcatatgctgcgaaactatgccgctgggttgtctgggagactacactactaagggcatttcttgtgtcctaatcactagggagagttcgtacgtcctgcaagcatcgttcttaactaaacatgcaagagcttgtgcttttatctacagttagttctagatgggtatgtga

SEQ ID NO: 49584 - DNA, 237 bp, Oryza sativa
  unsure (1)..(237): unsure at all n locations
agctntaagaggcctgccttggattatgtagtagtatcacaggtaggacgccttaagtgctcctcctgtgcaaaatgtatcttctcaggcggcgcattatgtcgtctacctaagaagattggtcttcgcagatggatggccatcttgccctcctcccctcccccggcacattctacaggaggaccgatggtggcaaaaatatactccctccgttttgaaatgtttgacaccgttgac

SEQ ID NO: 49585 - DNA, 458 bp, Oryza sativa
acgcgacactatagatactcagctgaacgttgctcaccgttgttggcaaatcgttcattaatgacctcctgtcttttatttgttcttgttgctgcatatgttactgctgattttgttctcctgaaattaaaaatcatacgcagattgtacctgaacaggttcacataactgacaaagccagttcaaacccaaattggccaagttagtttaaaaagttcaacatatattcaaattttgagaaatcttgttcgatttttactgattttagctagctagcttgatggtaccgggttgtatacatctctagttgcagatattggattgttttatatgcttaaagaatcttagaggaaatgtgtctgggcctcatggaaagttaaatgatgggctggcatgctgacatgagcagtttgcacgcatggcatctcctaactactaacacaaagggctcataaacc

SEQ ID NO: 49586 - DNA, 455 bp, Oryza sativa
cttacaaaccacatggatatagaggatagagacacgcattgctgtttttaacatgtctctttcatggtggtcaatagcccaaagaatctaaaatacgcaagccttcagttacatgccttacttgaaaagctcacaccctttcgaaatgcctgatgattgagatgccagatgatattggacatacccataattatcatatccggctaggggcactactgataacgaacaatatatttgaagagttcaccgacaaaaacgaaaatcaagaggagtctttatgttttctttccccctttatacaatgtacagtgtcagtgctttctctatatgtctataatcaccagcgaagcgaaactgggttcgtttcagataacactatatggactatattatcaattggtacactgcaaatctgcgaccacgatgatcgaatacacgttctttatgtatcagag

SEQ ID NO: 49587 - DNA, 476 bp, Oryza sativa
  unsure (1)..(476): unsure at all n locations
cgctnggctgcaagtatgcaatggccatatttntctagaaacctcttttgttgtttggtatttcaatcgaaggtctatttcccagtcaaatgaattgagaggtcttcgtatcgactgcgaggtcgaatgctggttgcggtgatgcggaatttgatttcggtggaggcagcagcatggaggtcgagtccaacagtggttgcaggtcaagtctgaccgcggcatcggtggctggaggtcgagtacgacagcagccgtggcggctgcaacagggaggttgagaccgacgacgactgtgacggatggcggggatgtcaacttcggtgcctatagcaacttcaaagcatagctccaatgcttcagtgcggacatcgtagcagcaaggaatgaagccattgtgtcatccacattaaccgcgttgatattgaattcattgaacaacaatgaatgacatgttacttgtcacaatgtgacaaatt

SEQ ID NO: 49588 - DNA, 445 bp, Oryza sativa
  unsure (1)..(445): unsure at all n locations
agcttcgccctcgcttgtttctgcgcttcttgtgcaaccgcccatgaacatacgagcaatattttcgctatgaagagcacggngaggatgctggctgcgaggcccgttctggcctggccttctctttgtccagccatgtcgggatggtcgtacgatttcatatgtcctaatgtattgctcgaagttcagtttgtactattggagaagtgattatcccatttagtaccggttataacaaccgcgactaaactttcatctgtcctaatggtattcgaagtgcagctagcggccggacgagacgagttcgatctcgatctctcgctagtagtcttctaggcatgggatgggaggagtcggaaattacttggctgcgtcggatccaacacttggcagctcggcatcgctctgcttactaaccgggcgcctgcgcgtgtgacgccgaatg

SEQ ID NO: 49589 - DNA, 430 bp, Oryza sativa
  unsure (1)..(430): unsure at all n locations
tgtccagatntcatctcanatctaatgtacttcttttttaatatatacgacgaagttctttaatgttattagtaccttcataaaaattattcaaagcaacccaaatctcatgagcagtttgaagatgagcaatacgatcataatccgaacgagaaatcccactcaaaagaatattgcgagctttgcaatttaggtcaaaagtagtttttcagcagcaatattaatagtttcaagaatcacataagaaagagaaacttttctccaaatattataattctcagccataatgtaagattgcatcctactacaccaatgagaaaaatctgttccatcgaaaatatgaggcttaagtggtaacttattataagtagccatgggaaaaacctaagatcgggtaagatcaaaaagagccaatgtggctctgatacca

SEQ ID NO: 49590 - DNA, 398 bp, Oryza sativa
agcctgaggtgccatctgggtgagctcatttacaatcaatagcgtgggctcaatgtcctcttgtcaatgatgcacgcatgacatgcaccctggagggcgcgtgtccacaacaacaacatggtagcgaaggggacatactgtacaacgttgtttagtaagccgaacaaaaacaagatgtgcgacctacgcatctatatgatgattcttcgacgctgatgctgctattgtgtgacagcccaacccaattagaacatggcatgtgtgcgccatgatagctgtgtgcgcatatctagtaccatcttgctagcttagcgacgacggaaccaacttataatggagtatgcctacaaccatatctcctgacttaaaccttctacacgaatcaagaatgatagtgt

SEQ ID NO: 49591 - DNA, 349 bp, Oryza sativa
  unsure (1)..(349): unsure at all n locations
attacaggaacactgatggctgcgaccatactaatactgctacttattattggatcggaatcctaggtctgcgtggctgccaacagtatgtacaaccgccaggagccccctgtagaattgggacaagtcggagacgagacgggttcaggtatgctaactgagtatccgcactattcgcatgagatatcgtgggtgcgatgaaagggcggcgtcgatggaattgggagcacgaacacatgccaccaaagacaagaatagtgncacggactcatacacacgctacacccattctaagtctaacatgcaaggcgagagacaacagaaccttattcagctacccgtcgacacc

SEQ ID NO: 49592 - DNA, 379 bp, Oryza sativa
agcttcacctgagagagccttatgacacttatggacgaatggaacaaatggactgtgttgtttgtgaagagcctattgtagaaggaacctgccacagctgcgacatagtacggaggaggttgtaaccctctgcatgcgcaatgtttgtttgtcaactactcaaactgctctagtgattggaagatatggttgaagtcgttgccaggtaggtcattgaggaggaactggacctccatggtgctctactcgagagcgctattacggtattcacatattgtggtgatcaccttgtaaacaaagaggagtgtattctcaccgaaagagcaacctatatcaacgatgatcattgattgaggatgaagatctatgcacatttcct

SEQ ID NO: 49593 - DNA, 405 bp, Oryza sativa
  unsure (1)..(405): unsure at all n locations
gggccaccttgttatcgaggtttctgtgaaattatttnttattttaccatatttttctctacatttaagaccatattttttaatgagccgagccaaaataaaaacaacagtcattcaacattaaataatatgtattttaaaagaaaaaaactagatgcatcttatactccctctatccataattataggaaattatggtccttgggttttgtccaaacatatggaggattctgtgtatcccgagaggatcagtacaacatccatcagcaatcccactctcaccccttcccatctgaaaagacacacagagaaaatcacgtgtgctattagtactaattcccgatcctatcattaaatcaacttcagaattagtgtgaaaattaaatttaccttggctttgctttt

SEQ ID NO: 49594 - DNA, 222 bp, Oryza sativa
agctgggaggtctcccgacgtggctgatcttcactttctgtgtgatccgggctagtaatgccgtgtgggtaaagtgtaccccctctgcagaggttaacaaactgctcgaacagccgtgcccacggtcatgggcggatgtgaggtgattcctagcgtagatttgttcgactactgcttgtgaaattgctgctgtgaaaaggagttcgcatgtagaaaaatctg

SEQ ID NO: 49595 - DNA, 378 bp, Oryza sativa
actggggattctatcgctactgattacaagaattctatttcttggttatactgctagactacgatggggcgcttgtaccacaaactacaatcaacaggactccaaatgaaagtgctgttaaaatcatgaatgctctttgtgacgataagaagaatgttgtttttattgttagtggacgaggaagggatagccttgagaaatggttttccccttgccaggatcttggcattgctgtcgaacatggctactttatgaggtatgtcccaacttgtttttttttttttacatatttcaatcggtacattaccattctttactgggtcttgattggttccgtgccctctggcatagttgttatataatgctgcgcaatatgcc

SEQ ID NO: 49596 - DNA, 439 bp, Oryza sativa
  unsure (1)..(439): unsure at all n locations
agctntgcgagtctaggactatcggtttgtctattaagtcaacttcctcaattctaaggttaacttccgggcatatttgagttgcccttatattccttccaggggaatgtactatcattggtacacgcaaattttgggttttccaaccatttcttttcacaaaagcttgcgatatgaaagaatgggaagctcccgaatcaaacagaactattgcgggtacggagttgacagagaacatacccatcacaacgtctggagcatcctgggcggtttcagcttggatgtgattcacgcggcctcgaccaatggtgttggaagcacgtgaaccttgtccacttgcctgagagcttggacgagactgagctgccgctggagtaggagttttggcagtgcttgcattagcatgtcctgagttggcgttgtaggactctgaggacac

SEQ ID NO: 49597 - DNA, 475 bp, Oryza sativa
  unsure (1)..(475): unsure at all n locations
tactaagcttggccttgcatactagctcccttttttgngttnttcttgatctaatccccaatcctgtctgcaacccaaccttgagttgccatcttggtttcttgcaatttggtagatgcacatgtgtgctcaaagggaagaactttgatctgcattaaacatgtataattaacaaaattgcattacacaaacataatcaaaagcctaatcataataaataaatgaagcaaaccatagcacctgtatgactttggtcccaggtagctttgatgcatgaacacgccaaggacacccttcagcagcacaatgggctagaaaacgtgttggatctgtcttcaaaccagcaaacacaaaaccttttttaactgcatagtgccttattgcttttctgacagcaattatatcacgaaataatgcatctttctctacttttggattctcagggtcacgtatgacattaaagacctatggatct

SEQ ID NO: 49598 - DNA, 398 bp, Oryza sativa
  unsure (1)..(398): unsure at all n locations
agcttgactccttcaacattccaaagtattatttatctatccatgaagtcaaaacagtggtgataagcagcaagcttttcaccatcaacaaatattacgtctttgagtcgaactgtgatccttatgacgactcatcagatcaaggacaagcaactaatattaatcctatcaagagtggcttgaacgtcgccaagtgcattaaagctgtgcttgagccgttgatcgctagccattttggagaatctatactagacgtgctcttctctaggntcgcacgtaatgtcacccagcaccttgagaaaaggaagggaaagcacagcgtcattgtgctgtcgctcagcaaaagaaagaattaatcacaagagcggatggagcatgagaatctagcccgtaatttc

SEQ ID NO: 49599 - DNA, 330 bp, Oryza sativa
tgtcaacggttcggcaatgttcaattggcgcctgccgccttgttgaatcctatcatcaaaccatggccgcgccgaggttgggctttggatttcaatggccaaatttatccttcgtcatcaaaggggcataggttcgtgctagttgcaacgcattacttcaccaagtgggccgaagccgcgccgctcaagaatatgactcatacggaggtaatttacattattttgaaacatattgtccatagattcggcattccgcaaacattgactacggatcaaggaacttcttttatgtctaaggaagggaacaattctgccgaaccttatggtatt

SEQ ID NO: 49600 - DNA, 415 bp, Oryza sativa
agctcgacaatattcatgtcaactacaatcaaactcatgctgcagattcacttcagtcttaagtactttgcgtgggtggcggggagtcttatacactcataccctctctcacttcacactcccttcccttccctctactaccttaccctcttcacacatcaatcctcttaaccttatttcatcaaccccatcaaaactctccccactctctccccttaccatcctcgtcaacatataactccctatcttcctatccttctctcctctttacctcctctttctctccctacttttccattattctcccccccttcatttccctttcttcttcacctactctaccttacctcctcctttatcttactcacttcacctttcatctttctccccattccccacccttcccccattatcc

SEQ ID NO: 49601 - DNA, 436 bp, Oryza sativa
  unsure (1)..(436): unsure at all n locations
agcgcgctgtcgtgccgaagaacggacagacgatactatgctgtggcacccagcagattcaggacagtggaggacaatcgataggatttaccaggaattctcagatgacccaagaaacatgcgtttcgcaatgtgtacggacggcattaatccttttggtgatttgagcagtcgtcacagtacatggccagntctgcttgttaactataaccttccttccttggtgtgcttcaaaagaaagtacattatgcttgccatgctcattcaaggaccgagacaacctggcaacgatatcgatgtgttccttgaaccgacaatcgatgacttcgaaaggctatggaatgagggcacaccaacatgggacgcatatgcacaagagtatttcaacctccatgcgatgctggtttgtaccataacgagtattccggccttggaa

SEQ ID NO: 49602 - DNA, 274 bp, Oryza sativa
  unsure (1)..(274): unsure at all n locations
agctntggttgtaactcctaattggatgagttgtatctgtcctagctagngnactatagttagtaccactagcttaattagtacgtaacaaacaatcaaacagccgggtcagttgcatggatatgttttgttctgaagagcatcattggagcggttgcgcagaaacctcaaattttaggcaaacataattattgacaaatatacctattaaaatagnccacacgtacgggaggtaccagcctgagacgaacgttgttccaaaagtatctatcgc

SEQ ID NO: 49603 - DNA, 197 bp, Oryza sativa
agcttcggcttatacaactgcaggtacatccaccatccgccttcattatatcattcctgcacggcttgcttgcgatagataccacgcctgctcctatcaacacacattatttcataccgatgcacttgtgtgccttgagcaacaactcgatgtctccgcgcctttttgattttatctctcatgcactttgtccctac

SEQ ID NO: 49604 - DNA, 374 bp, Oryza sativa
agcttgtatgttgcgaataaatatttattcttagtattgggcatacgccatgcgcacactgctttaacagacgtgctttagtccctaaaagacacatggtttcaccacacctggaaatatatggcatatgtggtgtaaaatccgagtgaataaactcataaaggatttaccaaccgcctagaaaatgaccacaatatataatcagcctaagccataatattggtcaataaaaatacacacttacgtggcgaaaagcaatgatattgtatccaatcaattgcttaaaaacccaaacagcaccttgacttatatataaaaaagtcagcgtgacagctatataaagctttactggttgacaccttttaagatgcatt

SEQ ID NO: 49605 - DNA, 443 bp, Oryza sativa
  unsure (1)..(443): unsure at all n locations
tgcaacacaaccaaatacaagaaggtcagtttatttttctccttttcattnttccccctttgtggtgagcgagaatgttagcatttaccttcatatatgcatctatgtcaggatcaggggtaatcccagcctccttctcccttttaatcactgccttcatgatttctagtttatacaacaaagctatagcatttagttaagagcagctaaattttcatgaaactaagggctctattacattgcgtattaacttagtcacctgctctgctgccaacgccttgaaatcttgctgagaagacgagcgtctccctcacagtcatatcagcaacgtgaaggtcatactgacttacataagctgatgtctttgctggaacgaactcatctagctgcacaccattggactcaatntctcctgtntctgcataccgacatgcatagatact

SEQ ID NO: 49606 - DNA, 141 bp, Oryza sativa
tagctctatatataagcccatacaccatgacataggtgctgtttatttcgcgaaaaaaaaaaatttggacgtcatatcagatgtttatcgcatgtcagaacgagctctcggacacgaatgaaaaaactaattacgcaactc

SEQ ID NO: 49607 - DNA, 402 bp, Oryza sativa
agcttgatgacgagcatctcttccataatcgctcattccactaatggtctgaagcagtgttacgccaaaaccgtagacatcattctttactgagataacaccttcaacaatatattctggtggcatatagcccctaaatataacccaatacaaatttaaatactcagaaaattcagtagagaaaacagaaagaaaataaattcacatggaattattggaatgccctgtatcttacaatgttccacgaacgcttgcattgacctcatcatcttttaatactctagctagtccaaaatcaccaattctagggttcatgtctaaatccagcaggatgttgtctgtttaagctccacatggactatactatgcatctcacagtgagtcagaatgcatctcactttc

SEQ ID NO: 49608 - DNA, 424 bp, Oryza sativa
actcaagcgtgcagtgtaggatcgaacaacagaactaagccaactcactggtgacgggtttgaatggttgtagtaccaaaaaaccaaaacttttagtggaaatgaaagtcaccctcaaattcgatggcacgccggctaaccgaagtagatgcgccggtctgaccgagattattgctctggtcttaccgtcgacatcagttgttgtcccttgtaccttatcctcctgaccttgtccccccatcactggccttatggtcgtcatggtcttgcaatgacccttagctccttcctcttctttccataatattttcgatctcgtattcacttgtttctcttcgctctggtttgacgctccccactcctgctcgtacctctcctcattcttcctattcatccacttctgtcgttttcctcttctttctct

SEQ ID NO: 49609 - DNA, 327 bp, Oryza sativa
agcttacatacgccaagacaagctgtcttatatctacatcagagatatgcctggatcgaccctatctggtaccgccggccgttgggatctaacgctgtctctgatctcgccggacacggattctatgaggaagactaccctgttgtcgactacgagtcggaccttcagaccgtcatgtcaacaacagttagataggctaccccaaatattgtgctcgtgtgattatggtgaataagagcaacgaccggcttttgccaacaggatgtagggttattacctgacaattcaggggcccgaacctgtataaaatactcgcctccggctctt

SEQ ID NO: 49610 - DNA, 472 bp, Oryza sativa
  unsure (1)..(472): unsure at all n locations
cttgctcctaatgattccgataccatctggcacacatctattatgctacagatcagaggacagtgagtacttgggtcatcggagtgcaagttcttagtttggataaagtggggacatggagccattctagttcatttcggtttttaattacatataccacatgaactagcaattgcagaaagttgtatttttagtttggataaagtggctcaatcctgaggcataccttcaatagcaggcaaatttgtgatgaaagacatcatctgtggagaaagtcttttcaatatttcatcaatctcctttgtatacccactggctgtggttgagaagtctgggcctgacaaaaataaacaatgatagtttatgtgtgagaaaagttgacaattgtgtctgaatggaatggctggaagcatttgcagcccaaactatgataaanacaagttgtcaattccatcaagtaacattatgcaat

SEQ ID NO: 49611 - DNA, 244 bp, Oryza sativa
  unsure (1)..(244): unsure at all n locations
agcttagaaacataaaacacactgnattcattatgaaaaaaatcaattctaagtgtagagatattaaaagtgaagtttgagcaagcttacatctttgatcttttcattttggtaggtgataactctatcaactcctaaggaagacagaagtgcagctttacatttgccaccacatgtggcaacaaccttgntgcctgctagttttgccagctaccgtagccatggattaaatagccagcataca

SEQ ID NO: 49612 - DNA, 138 bp, Oryza sativa
tatacccacatgtcaataggcgcgttgattttgataatagatcatcgtagtcctcagtgaagtgtcaatgtgccattggcatcgcacgatgtgtttgtgggagtcctgttggtgcttggctcaacttcgcttggggga

SEQ ID NO: 49613 - DNA, 74 bp, Oryza sativa
agcctggcggcctaaagatttactatttactttagatgcgcagcagctgatgggcgccttacacgcgaaagacg

SEQ ID NO: 49614 - DNA, 446 bp, Oryza sativa
  unsure (1)..(446): unsure at all n locations
ntcaacttttccatcacattattcgaatgtctttcttatctccaattgtaacgcgaactaaacacatcctatgattgaatggtatacgccttttctcttggccatgcttaactgtgcccaaaaaaaaggaacaacaaacctagctctgagcagtaccacatttaaatttggctctaaataaggtggagtatatgcctaaggttttacccggagaattggtacaccattttacacatcaaaacttgaaccttcccacactgttacttctctgtatgcctttcggaggcatcaggtagtacctctatcaaactctaaccattaattntatattaggataatagaagagagaaacattgtgcactgactctgttccgtctatatatgtacagagttgctagtttataaatgcatcgattggctagcttcatataaaaatatatcgcatc

SEQ ID NO: 49615 - DNA, 213 bp, Oryza sativa
  unsure (1)..(213): unsure at all n locations
agctntagctcagggatccttcgttcgatcccccctcctcgctaggcatggtcctccttttatactctaaggggataccacatgtgctgcgagtgctacctaggtagacgacaggcctgacaggtgggccccacctgtcagcggcagcgagcgcgcgcgcgggctcggctagacttgggccgacttgggccgaggaggagagagagagggttt

SEQ ID NO: 49616 - DNA, 325 bp, Oryza sativa
  unsure (1)..(325): unsure at all n locations
tccctggatctgngaagtatctctttcacggtattgngatcgtttgatcgatttccttgatcgctacttatgggcgtgcgctcaaaggatacaaacagggattcgcaaacaaaaaggggaattcgtagtcactttctcctgtcgcgtaaaaaaaaagctttacgcgagagcaatagaggttgggatacatctatcttttctgagcaacctcttttggattcttaagaccaccccttgcataagataccggctgcgttgggctctttattatattatctccttcgagggagttttatgatccgtcaagctcatattagactatttt

SEQ ID NO: 49617 - DNA, 112 bp, Oryza sativa
agcttaaagagaaaggtagctcttcttaaattttagtgattaaccatgattacacaggccttgatggtaacattctttacaccacactgccaacaaaatggccgaccaatca

SEQ ID NO: 49618 - DNA, 88 bp, Oryza sativa
cctcctacgctttcctttttgagtaaacatggcttcgggtaattgatgggacagaattcgcgctttatgtagatatatatatatatat

SEQ ID NO: 49619 - DNA, 431 bp, Oryza sativa
  unsure (1)..(431): unsure at all n locations
agctttagcaccggttggtgacaacaacttatactaaagtgttaatctttaataccaataccgtgtggtaaaaccaaccggtactaaaaataatatttagtgccggctggtagtggatctgagaaatacggagtatgtgtttttaggtaccatgacgaaagatcagttctacagttattggtgaaacgggaattgtggtaccctttcccgggaacttaacacatattccttgttaactaaaataacaaaccatatttaaaccaccattaagttaagtgcacgttaacgatagcgggcatgggacccactttcgagacaggccccgacgcccccgcctcatgaaggaagcccgagagctcaaagtgacttgngacagggggctcccatcttaagattacaagcatgaagggaccaggagcccaacttggtct

SEQ ID NO: 49620 - DNA, 266 bp, Oryza sativa
cgtaacacccgccacattaatgtacgatgacgcagcttttcttggagcgagatcagagcgctcctgcctgctgccatggaaggagtgaagcttcatctgcaatcctccgctgatctctccctgtccggcgcctgatgcccccgcggcaaccgacgcgtgattcgtacggcgccgtgcccgggtgatcagctgcccggcttgagttgacgcaacactgctaatctgcagaccgctgctatattgctatatatgcgagcttgctgatc

SEQ ID NO: 49621 - DNA, 383 bp, Oryza sativa
  unsure (1)..(383): unsure at all n locations
agcttcttctagaaatagctctgcacactatttcactaattcacttgaaagctntttgcttgctggcgatactaacttgatattcatgacttgtttcatacttcttatgcacatgcttagctaggcttgagcacatgcttgtatctgtgtgatccatgtctaccttttgatgcctttagataactctcaaagctctcaaaacctaaaatttgcaagtttcatctcatttttatcttgcatttttgtctcttttgatcttgatggcatcattgacaaaggnggagagaaatttgcacttattgaaaactaaaacttgctctaaatcttggtgaaagggggagtttggcacataggaggagcattcttgcatttgcattcgcatc

SEQ ID NO: 49622 - DNA, 429 bp, Oryza sativa
  unsure (1)..(429): unsure at all n locations
tgactgtcgtggtggattgaaattcagaggccagcgaaattattgatgtaaagaggaagaagaagaagagagtgtgtacccaatgacatgtctgccaccgtcgtagacggtctgggagacgaggcccatgaggccaatgctgccgccgccgtacacaaggtcaatgcccctcgcgacctgcacggaaacaacaactcctcatcatcatcgtgcagtgcagcagcaaattcgttgcagaggcaacaatggggcagcgttctcctgttcccataaaacttggggatacacatgcagacaggagatgcagaggaacgcatgggcgttgccattttctgacatgacaaaatctctgtacatgctgctgtacttgncttgatacgtactactacttctttgcagaacagaacgtagacctcgccctctggttct

SEQ ID NO: 49623 - DNA, 149 bp, Oryza sativa
agcttcaagatgtcgttgtcgcggagaatatcttttcgatgatattgaccataaggtctcagcccagagaaaatacttccagattaatatcaccggcaaaattcgactagatcagactagataactacggtgctatttacaggtgacct

SEQ ID NO: 49624 - DNA, 197 bp, Oryza sativa
  unsure (1)..(197): unsure at all n locations
atactaagcttgccacggttcggcaatgttcaattggcgcccgccaccttgtttgattcctataatcaaaccatggccggtccgaggttgtgctntggactttactgcccacanctatccttcgtcatcaaaggggcataggtctcatgctagttgctaccgactacttcatcaagtgggccgaagccccgcctcct

SEQ ID NO: 49625 - DNA, 106 bp, Oryza sativa
  unsure (1)..(106): unsure at all n locations
agctttcagcatttactgtggatgatcgtggaaaggtgtacttttgccacaggcggngattnggaccgagttaagaaggtatactcgcccgcccctccctcctttg

SEQ ID NO: 49626 - DNA, 176 bp, Oryza sativa
  unsure (1)..(176): unsure at all n locations
gatctagatccggcttcaattctcatttgnngcggtgcatctctttaatttatatagcttcatagagagtatactccgaagtacatgccgctttatctatttttatgccttcatattctgattgcctaatggctctaaaacaacagacgtaaactacgatgtctgacgctttccat

SEQ ID NO: 49627 - DNA, 424 bp, Oryza sativa
agcttcagtctatgcgaatcagcttattgtttgttctgctgtgctgatctggatgctgttcttttaacaggtgaatgagaaattaagaattctgtgttagcacataatgcagtttgaaacaactgaaattttatttgcatatgtccttcctccgtcccataatattttcttcgtcccagaatataagggatcctccgtcccaaaatatgacagagggaagatatcaaatatcatagagaatttgagatggctggtatgtattagccaaccgatgcaaaatttccagcatgttgctgcttcatgtgaaatgattcactacagatcttgttgtgatttcaaatgaatgtatctgttaggcaatattgtcggacatatccatcagtttaccacccaaccactgaactgatcttgggaaaacaccata

SEQ ID NO: 49628 - DNA, 382 bp, Oryza sativa
gtcttcctccccatcctgcacatctgcaaagctctcttctcatcaaacagacatgtagtacgaacgccattgttcatcttgtactactttctgtgtgtgtgtgtagttgtgtactgtctcttcttcttcttcttcttcttcttgtttctccagctgccatctccatcacaatgtcatgccagctgagctcttggctttggtggagtagtagtagttgtgttgatgtacatatataggagttgttggtgtcttctcttctcttctccaagtgttctgggctttgagtctagcattgtggtgtgtgtgtgagatgagcactgcagtgttgaaagaagggaatacatggcatatcggcaaggatgcacaatgtctgcaagctgat

SEQ ID NO: 49629 - DNA, 154 bp, Oryza sativa
agcttgttgttgtcgacggtaatgttactattttcgagcccatcactttgtacgagtggacacccgaacagatgatggatcctgtggcaatgacgcagtagacacagtagcaacttttgtactcatacatggacacttgcctcggcacaattgt

SEQ ID NO: 49630 - DNA, 310 bp, Oryza sativa
agctctgcatggggcgaagataatatatttcgttatggaaaagcttacctgcgccctagtgatggcttcgcgcaaactcaaacactactttcaagcctacacagtcactttgcctctggagtatcctttgggcgaagtgctccggcgcaaagaaaatgctggcccgctgagtaagtgggcggtggagttatctccctttgacctgcattttgtcgcccgcactgccatcaagacctaagtactagctgacttcgtgcccgaatgcacggctgtcattcgctctcgcatcaacctctgttgtacaacctct

SEQ ID NO: 49631 - DNA, 383 bp, Oryza sativa
  unsure (1)..(383): unsure at all n locations
tgaactaaaatcgactgacggttaagaagattgtttttcaacatcataaatatatgatggtacactcttttaaatatatacacanctaaattagctatgcaatattttaaaataaagtttacacccattatatatatagccatctattatctatctattatatactaaaagtggcgctctaataaattagagaagatcctacaaattctaagaaaaaagcaaaacatcaactccttgatttttacttaattaaattggtaagtctaatatcatacaccgttagatgaaattgattttaaaacaaaccaaatactatgcagtcccacctctccttcttcccgcacatatgtaggcatacgntcttaccatgtacgtacacttcc

SEQ ID NO: 49632 - DNA, 371 bp, Oryza sativa
  unsure (1)..(371): unsure at all n locations
agcttgtttctttggctcatacacantattatatatagaatgctgtccaaaagtattgaaaaggtaaagcataggtatatgcttggatgtttcatttttcatggnttctgttacacatcgtgacttcaaaacatagagaataatgcaaaagcaatttccaaagcagtgtagattttacgtatgtcagcaatgaactgctagccagtaaacttttggtggattccttctacacagactagttcatgctgtactttctcgttaaacctcgttctagcgctcattcctgacaatatgtgaactgctggtgcccagcacactctatagattaccacctttcattcacttctatcatccccggcatcgttaactcc

SEQ ID NO: 49633 - DNA, 185 bp, Oryza sativa
tcctcacaccttatcaatacttggatatctcatatgactcgccctcttccaatggcagcgtaacctcaagtgacctgtctaccttgaggatagttacaccatcactgttcattggcacgaacgagcaaacgccatcctgataacttgaggacagtacccctacaccactaaggaacaactggcct

SEQ ID NO: 49634 - DNA, 200 bp, Oryza sativa
agcttgcgcaacaccatggcacaattaatatatgcttaaagaataaaaacatatagataaatattaaatagaattatactgaaacagacaacaattacttagtaaacaaacacatgttttatagtttaaagaacaaaagtaatatgagcaaaacataaaacgacttaaatctagtcgcgcaaatgcgcgcgccaacccgc

SEQ ID NO: 49635 - DNA, 359 bp, Oryza sativa
  unsure (1)..(359): unsure at all n locations
tatctagactctcggtgtaaccaatcattntgatcacatgtgggctcactggattaccttctgcaagcctgcacgcaaacaaggactttgaggtattaaacctctcagctcttgcttggtcctcaaacatgctacgtagtcccgtgattattgtatgagcatccaatgcctcatattgcctttgaagctcaggggacatagtagcaagcatgagacagcttatatcaaggtattccttgcatcggctttcatgctccctacgttgagcagcaggagcattgttgggcaagtcagctggaaaaggctgtgtaagcacaaactctctgtgctcttgcctgagaacaattctcaggctgcga

SEQ ID NO: 49636 - DNA, 312 bp, Oryza sativa
agcttgtatttcatattaaccaatgtatgtattaattatccaagctgactgatggtatttactggttaccttgtttctgaatcaggaatcagtttcagaggttgataaaaaacaacgccctttttccatttttcttggggcggatcaaaataatgacggaccaaggtgaatgccagggaaacataacagagtttcgccatgatgagtgaatgaactaccatcacacacacaggttgctccctctaggcacatcacctactcttacggcgaatgaactaccatcaccaccacgcactcgcctcccacgaccac

SEQ ID NO: 49637 - DNA, 408 bp, Oryza sativa
  unsure (1)..(408): unsure at all n locations
ctaagctntaaatttctatatacaggttaagacaacgttttctctttttacttccctacaaccgaagagccgtgggcaagacgagctttatttgaagcacaactattttgactatttcacatctggtcgttacatatacaacacagttcttgaatgtaatgatacttctttcattcttcaagtgttacagcgcagtttaatgaggaatgatgttgctaaaaacgtcaacatgaataatgcctcacatgctgttctctttgaagctcttgctcttgtgagctcaaacgaaaagctctactactatatatcctaatttctagcaatntggttctcaaccagttcctcaccttcgctactattatattcataccattatcttcatggtctctagtgtgtcaccactggagt

SEQ ID NO: 49638 - DNA, 462 bp, Oryza sativa
  unsure (1)..(462): unsure at all n locations
agcttccactctcatacgggcaagaagagctccttctctttntgccaaagccctttcttcttttccttgtgcaagtcaactgttccctggcacaccgcacagttcagctgtgacatcttgcacttgtaagatcacttgcttgcctttatgcttgagtttcagcattcctttactccattcaactgtgatttgagcaaaacttgacaaccagtcaatgcctaaaataagatcataacgttgtacatgaagcacgctaacttctctttcaaattcatggttttgtaacttgaattgaaggttgtcacatttggtactggtcaataacttacggcgagacgagcatccctataccacgtgtatccacactcgtctgtccttttctacttagttgtacagatcacttcagaaaatcgtataaaaatcaagcaagagaacgtatgcgctntatcaacaaagcgctca

SEQ ID NO: 49639 - DNA, 382 bp, Oryza sativa
gctggacaggcccgatagtctttgtgcacgtgttttgcttgggagatacagcataggaggagatattctatctgctaattgccctctaagtgcctcgtctacttggatcatcaaaggaagagaggtactgagaatgggactgatccgtatgatcggagatggtcttaccactgatatattgcatgatcagtggatagatggacttctgaacaatgaatcctttatggagaatgactgatgatccagttcagcttgtatcccatcttatgtttcccaatactacccacttggatgtggataatgtgccgcatgatcttctttccgttgattctgctgctattctgaacattctaggccgagaacaagcaagatgatttttggc

SEQ ID NO: 49640 - DNA, 433 bp, Oryza sativa
  unsure (1)..(433): unsure at all n locations
agcttgtcgtgtgcccacagagcctacatttgtatacanaanagccaacctctggccgtttactccatcagaaggtacaaaaggcccatacttttttcagaccgcgaaaaagcccattctctcacacagcaattaccgcaaaatcgtcacaaagtacacacaccgttctttctctctgtcgtacacagagcgagatctgagcgtatctccttccccagctggcgagctcgacctcccggggttcgcagtggcttcctccccaccgtctccacctaacagcctcacccgcagatagatatctttatcacaagtcaaatgggggccctggcccatcattcgcaagaggaatctgggattacgtggccatcgccctaagctaagctaagctaagcttatctgccggccttgatcttgaccaactggccttcacact

SEQ ID NO: 49641 - DNA, 422 bp, Oryza sativa
  unsure (1)..(422): unsure at all n locations
atgttgaaagggcattagaggttctacaatctttctttgcaatngttcgtggggcggctcgtatgtgggatgaagacacgctccatgatataatgatggcttgcatcattatgcataacatgattgttgaagatgagcgagatgactacgaatacaacttcaacaataaaggccaatatgtttgcaactacgacgacatgggagaaagggtgtcagtgtcccatgatgatgcaccttgtagcgtccgttccgtcgtggcgcctagtgggaaaactatctcttaaaaatcctaaatgcgaaaattgtctccttgtttgttgtctagtgtccgcgccattccagatctcaattcttcaatccatcgtcgaaatccaaaccctaatctcatatccatcccaaatcaaatcctctcgaaagtctat

SEQ ID NO: 49642 - DNA, 105 bp, Oryza sativa
tactcttaataaatacaatagtgtgcttatacatgaaaattatgcacaaagaaggtttatcaacacgtgttctagtacacgggttttggttatgagaacaaaact

SEQ ID NO: 49643 - DNA, 461 bp, Oryza sativa
  unsure (1)..(461): unsure at all n locations
atgctcttagaagttncacctcttntactgtttcactctgattctctgaatatctatgatcatctagtagttgttcattagcatttactatccggctaccttttcatgtctttgtttttgtcgtattttttgcaccttgtttcttaggtagtactactactcttagcaaattaagaaattgaagttagtaaacgaattttcagagaacttatccagggttggcaaggacatgatggttgaaatggatcagtgtttggtggttggtgcatgcagtggtttgtctcgtgctagtatgtagaacagtagaaggttgtatctagcaagttggactagattattntctttatagactatcaactaccaataccattggtccattccttgttcgttgttngtgtgcgagatcatggtctacccatgtcggatgtagggctctacattagcatgcgtatcactttatc

SEQ ID NO: 49644 - DNA, 414 bp, Oryza sativa
  unsure (1)..(414): unsure at all n locations
tgttgactaggaatgattctggaaacacacatagtcgtgtatagattcaaagnttggatttaaagtttagtccttttncatcgcatcaacatgtcatacatacaacttttcagtcacatcatctctaattttaaccaaaagccaaactttacgctaaactaaacacagcctgngagtagtatgctgaagcaaaagccggtcttttggaggatggctnttaatttctctctgtcaccatcaaatcaaatctcgtagccaattctcttctcagcagtactagaacaacaacgcaggggcgccggccactcctttgcattgataaagacaggctgtgccccggaaaagtggtggtactactctagcacgcacanaaagccagggggacaaagaaacatcttggtgatgtaatacact

SEQ ID NO: 49645 - DNA, 468 bp, Oryza sativa
agcttaattaagataaatacacatgacacacccttttcatttaataatatggaacggagggggcatgtatgaactaccggaaaagaaaaatagaaaacttattcttatagaaatatctgtttatgttaggttctattggttgagtatgaatgacatgatgtttgacaaatcaccatctattttatatatgcaggtattttttagacaacatattggcttagaaccgcacagctacaaaagggtgatgaagagggcgagtttttaaaagttgcatgtcgtaatctcgagacaacggttatacaactgtttaccaattttggatggagattcacaaataaaattcaataattgtatactccttatcttggattggtagtctttagtttgcttttttttcatgattggtgtctttttttatttttatgagtttcacttgtttgtacattgtataattgactgtgctcgctg

SEQ ID NO: 49646 - DNA, 445 bp, Oryza sativa
  unsure (1)..(445): unsure at all n locations
tatggtacctagctactgccaattgccaaaacattaatcatcatttacatgctgtactgttgatgtgctaaattggcaattctgctgattgtgtcaagtacgaaaagttacagattctctttctttatagagttggtcattaacaagaacatatctgatatctcacatataccactcctactaaggaagcaaatttcaaatttatgttcatctatgcatttgaaattctattatgtaaatgatcctactatttttctactttgttggattcaggcaatttcagtgaagcagaacatgttaattgaacatgcattgcatccagtgatgtctaatggcaaagaatccaatgacaacataagagttttctctagtaaagttggtgatgaggctgatgagactactagctctcctgcgaaatcatctgaaaggcatntgatctgaacat

SEQ ID NO: 49647 - DNA, 448 bp, Oryza sativa
  unsure (1)..(448): unsure at all n locations
agctttgttcatcatcgtggatgtttttgttcccacgttagntcatacgatctccattattctagggaggcgtttgtggcacaaaaatatacttgaggcccttatagttggaggattttgtgcaagcaaatgcaaaggtataacctaaccactggctactgcatctccaatgtttcactgcgctgtgcttttgagatacttatctggttcttttgccccctatacaggtaagaccatccgttgcttttgacgccacgagcatgaacgagttacgaaaatggaacgagcagtacggggaaggtggaagcaggagtaaatcaccatctgggttcggcagctaacattgtcctgtcagtatttctagttctcacattgatcatctgcacattagcgagctccaacttatccataagaagccacataggccttcttttctgatggccgcctc

SEQ ID NO: 49648 - DNA, 434 bp, Oryza sativa
tctaagtcacctgacgctgcagcttgcgtgggcatccatgtttgttcctatctttgctagagattgcacgagtgatttggttgttcctttggttgagcctgcgatttaattcctctctgaatttatgatggatttgaaggaattgcactattgcagtgtttgattcaactcaattctctgatgattgtggaaagggaatttctacttttattttctctccctcattctctctctctctgctatatcttcaagcaagcctgaggaagagggagagcgccgtctccggcactgctatgctcgggccggtgcgacaccttggttgggagcacattcgtgagcaggggcctaggcatgcacaacgagtcaccgctccgctgcccatctgtaaagagagagggagagaggtgcttacatgtgtggctccgcgacgtgga

SEQ ID NO: 49649 - DNA, 477 bp, Oryza sativa
  unsure (1)..(477): unsure at all n locations
agcacaactcanacttagcaacaggaataggctttgttttttatcatcaggattatcatgagtgctgaatttgcataccttcagcttaccttcttcaatcacatcacgcacaaaatgatacttgatatctatgtgcttagttctctcatggaacatctgatctttagtgaggtaaattgcactttgactatcacaatgcaaacttatgcaagagtcaactccactgagctcagcgtacaaaccttttagccaaatcaactctttgcatgcttcacaaatagccatatattctgcctcagtagtagacaaagcaacaacagactgttaagtagccctccaactcacagcacaactgccattagtaaacacataaccagtaagtgatcttcgcctgtccagatcagcagcttaattataatccacatatccaataatgcccttatcagttctttcaaacttcatacattaatatgttgt

SEQ ID NO: 49650 - DNA, 433 bp, Oryza sativa
agcttaacatattatgaggcgtattatgattgcttgtgcttgagtgcaagcggagccggcgttcctctgtgaagatccatttccccgcctgtgaaatgctttttcttgtagagatattattgacgctctacataataatctccattttcgaaaggatggacgtagtccgatcctggacaacctttcaggctttccggacgtggcgcttctcggtgagcgtgctgccgacggcgcacctgatcatgtacacgccgccgacattggcggagctcatgtacggttcctagctggacgcgttcacctactctaggagccgcctgttgagctcgttctgcgtcttcttgtatggtgatcggagccggatgacactagcgcgaaccagctctgtgtcactacctaaacctcgcgtcggctctgacatgctctctaacgc

SEQ ID NO: 49651 - DNA, 294 bp, Oryza sativa
aagcaggcggaatatcacttcgatcatgttatctggaggatgcacaccatatatgctatatattgatatcaaggcacttggttgactataattatcgagaaccactcaagaaggtgcgatattataccttgaatatatgctcggttgatgaactaaccacatagacggaggctacacctataaggtgcattttttcaagcacctaagtgacattgcattattttagcctctcagattcaaatgtataaagtactggagactatgggaaaaaatagaagcaccggcttagagtat

SEQ ID NO: 49652 - DNA, 346 bp, Oryza sativa
catgtcactgaggcacatagagtgggtatggttaaatcagatatccctgctgacactctgatactaccctaatcggcaaccataagacatgctagagattgatattctaagcacaacttaatagatctgactcaactgatgcatcattaagtattgaaaagatgaacagatatctatacaatcaagccgctggatgattcataaagtggtaaatatcttatataatctaagacaacgtcgatatataacctaatggggcgcctttatttatagatgtgagccgattgtatggtagatgacgatattgccgaagtatatgtaagatatatgataactcggcggaata

SEQ ID NO: 49653 - DNA, 454 bp, Oryza sativa
  unsure (1)..(454): unsure at all n locations
agctngtagaaattaatagtaaaaaattggtatggttgattangacaaatataaaatgattgtaattcgaaagcagtgggagtaaccgacgacagataacatgattttgtacgcagttctgaatatcaatctgcgtggtcattgctgctggtgcagcttacagagttgacccaatataattaaatttgggtttgcaattgtatattaatttgttttttttgaacttcatactagctgacaatcacatgcaaagctaaaaaaaggattgtggagtttatatcctcgttaggtaacacaatgttggagatctggagccttttgtatccggtcagcagctaactacatgtaagccctctttttgtagctcattggcattgagccattgactaatccaactaacaagattggatttgagtcttatctatatactacgtaatacacatggatcgataat

SEQ ID NO: 49654 - DNA, 410 bp, Oryza sativa
tgcgagtctaagactatcggcttggctaggaagtcaacttcctcaattctaaagttaacttccgggcatatttgaattgcccttatattcctcccacgggaatgtactatcattggtacacgcaaattatgggttttccaaccgtttcttttcacaaagcttgtgatatgaaagaatgggaagctcctgaatcaaatagaactattgcgggtacggagttgacagagaacatacccatcacaacgtctggagcatcctgagcggtttcagcttgaatgtgattcacacgtcctcgaccaaagtgggtggaagcacgagaaccttgtccacttgcctgagagctatgacgagactgagctgtcgctggagtaagagttctggcggtgctgccattaacatgccctgagttg

SEQ ID NO: 49655 - DNA, 378 bp, Oryza sativa
  unsure (1)..(378): unsure at all n locations
agcttctcaagctcaagcatttatctttctagttagagatcagcgtcttggagctaatgtgggatctgcccaaggacccacaggtttaggtaaatatctaatgcgttccccaacgggagaggttatttttggaggggaaactatgcgtttttgggaccttcgtgctccatggttagaacctctaaggggccccaacggtttggacttgagtatgttgataaaagacatacaaccttggcaagaacgacgttcggcagaatatatgacccatgctccttangctctttaaattctgtgggtggcgagctaccgaatcaatgaggtaatatgtttctctaaaagtggttacgacatccctttttgtttaggatttttttt

SEQ ID NO: 49656 - DNA, 449 bp, Oryza sativa
  unsure (1)..(449): unsure at all n locations
agcttcagcgacgaacaagaggggtanctgatctacttgnctccctcaanaaactatcatttgatggtttatgnggtctgcagtccctccctgaagggttacataagtttccttctctcactgagctaagtatcagccattgtcctcaaatccaatcgcttccaaagaatggcctcccaacttccctagaaacgttttcagtatttatctgcagcagcgcactcgaagaggaaagcaaaagattcacagaagagaaagaaagatactactcagaatcagacgactagatacatacattctccaccatggtaaatcctgtttggtaatctgcattaccagatgagtactattctgtaactggtatttgacggcttaataactctntccacccttgccccttggttattagggctctatacggcatcagcattgcttttgtccaccacaat

SEQ ID NO: 49657 - DNA, 316 bp, Oryza sativa
  unsure (1)..(316): unsure at all n locations
agcttgcanaagaggaagggaaagctactatatttatacccgaactcttccaaaggctggcggactccgatatctactctattcctactccactagcttaagaacactaaactaaacttgagagaatttgagagagctttgcttgaggtgtgtgaagaatgacggcgaggggtttatatagcttgagaatgacggctatgagaatgacggtgaggggtttatatagcttgagaatgaccgtgaggagagagtgaggggtttatatatcttgagaatgacggctatgacggatgtgaaggttgttaaaacccaccca

SEQ ID NO: 49658 - DNA, 444 bp, Oryza sativa
  unsure (1)..(444): unsure at all n locations
ctgtattattgaaccagacacaacagcaagcgatgaaaccaaagacagataaagcgcctaaactataagacaagtaagcttctccagaccatacaaatgcacggcgagcccatgcgaagggtttggttaagatatgccaaattccgccaaatacacaaatgaaacccaaccatacatgtcccccaattatatcttctaaatcatccacactaacaatccaaccctctcccccaaaaggggattttagtaaataaccaaatataacaccggggctaagggtcaaattggtaatatttcttacatctcctcccccaggagcccangtatcatatataccgccaaaatatagagctttgagtactagatgaaaagcacctataccttactaaattaggtgaatacccaaaattgagtcattttatttctatttttcacacataccaa

SEQ ID NO: 49659 - DNA, 444 bp, Oryza sativa
  unsure (1)..(444): unsure at all n locations
gaacatgtgcttctatcagtgtgaaacattatctaaaatgttgaatcattcaactgatatattacaggtggtaaagcttacttactttgatgagcatctgtcatcatcccttttagctcggtcgaacagcaatatggtcagaaagatcacatagaagtacggcaggaactacacgaaagcacggaccacagntattaccatcctggctaaagtcgagataaattgtaatcatggtgtgcttacatgatcaaaaagagctggaactgtccaaaaaaaagcagataaaatctctggaacatagtgaaaatgacgagacaagccccacctgtccaaatggaaaatgagggtgcatgctcaaaagccatgtattgcctctattgaaacatacatggtacanatcacttttgatgaactattgtaagaagaaatgacgaatatattaac

SEQ ID NO: 49660 - DNA, 464 bp, Oryza sativa
  unsure (1)..(464): unsure at all n locations
agcttctcatctgcttcaagcgaatnnntttgataatttatattatntntatggaaaatagcaaaagtagtggtcaaccggggaaaatcgcgaaagtaggtccctgtcgaacgggtgcagttcgatagggcgcctatcgaacggccagagcgcgactggcgaggagatcggaaggctgccgttcgacaggacctgtcgaacagcccccgttcgacaggcagggctgtcgaactgcccctgttcgacaggagggctgtcgaaccgtcgaactggcgcagttcgcagttcgacagggtcgcgttctccatttatttgtaataagttattttttttaataatatgtaatttattttagtgtgtaagacaggaaaatatttctgtaatgttatatgtatatgatttacggcttgataatgttggtcagacattgtagatttatttgtggttaaatattgaatattagt

SEQ ID NO: 49661 - DNA, 424 bp, Oryza sativa
  unsure (1)..(424): unsure at all n locations
gagctgatnggaggaatgttcggtacatcatgagtggttttgaccaagaatcagctaggaggagcactgatcattctaaatataaatatgaagccttttatgttgccagagaagacaaccttgtggggatcaagacgaataacgagttgctgttgaattggctcggagatgatttggaacatagtagtatgattacaacagtttgcgggatgggtggagtgggtaagaccactttagtttcccatgtgtaccacactattaaagtggactttgatgctactgcatggttaactgtctcaaacagctaccaagttgaggatttgctgaagcatattactagtgaatntggcataccttccaatgctaccaagttgatggagaatattcttaaccatttacaaggtanaagataccttctaattct

SEQ ID NO: 49662 - DNA, 458 bp, Oryza sativa
  unsure (1)..(458): unsure at all n locations
cttaagtcacctgcggcatgcaagcttattcctcagagtatcttaaatggttcatttatcaatatagntataataattaacaaacaaatgagagtatgggtcacaccagttgaagctaaattaatcatctatccttattcttcagagtatcttaaatggcagtgtggcacaactagcagtatatttataacaattaacaacaaatcattaaagcatggatcacagcagttgaagctaaataaatcatcatctcatcgacagactgcagaagcttatagcggtagaattacctgacctcatcatctcatcgacagactgcagaaacttatagcggtagaattacctgacaaagatgtcactacggtaatgacgacctcctcctctttggtgcaattgggcgtccctgtgtcttggctggaacagactcatcagcaatatggcgaagagacagattctga

SEQ ID NO: 49663 - DNA, 440 bp, Oryza sativa
tctctgcgtggctctccattacattagtaaagtagaagatagcatgcatggtaactcagatcagatgacatggtaaattgatcgacttcagtagttcagttccccaagccctaactctagataaagctagatagaaatagacatcttagcatcaatctacattctacttgctgcgctcacctcgtctatatttagaagatcaaattgccatactactatgacattaccttcaacactaattttgttatcatgccatcacaggatgcaacttttagtaatgaaaacctaatcatattcactttgctaggtccatgcacagcgattttctccagagaattaatttgggaattcttggaactgatcttattcatcatgttgagcataaagcagtatgcttctaggtagcactagagttgacacacaagagtaattaacaacgt

SEQ ID NO: 49664 - DNA, 470 bp, Oryza sativa
gtcacctgccgcatgcacagcttgcgttgctgctgcgtcacccctctcgttccacagtgcctacgcaccaagtacacctacactggttgttggcacgctgagaggcgccctcctcatcatgggctccctactggtggagttctcgccgctgcatcgacatcgagctgcatctgtgtcgccccttctggtcacagagttgcccaactcgtcgtcttcatcggcgatcgagcgttaacacactggtcatcgttagccactagggtcttcttcgtctacttcgagcatagtggccgcatattcaagctgccactgtcgccagtctaggccggtggtccacctacctttacatggctaccaacagtcgacgtcaagccgttggtaccgctactttgccttctacttcgtacagcatgactcatcgtcagcgtcggcgtatattcctcgactacacttcgatactctccagcaac

SEQ ID NO: 49665 - DNA, 354 bp, Oryza sativa
gctgcagatctagccaatacatatgtcgacatgtctctctttaaagaaacatctggtctctcgcgctgtgcctgagcaacgtcttccttcgatcgacgctgacggcaggattctctctacaccattggcacggctctatcgccgccttatacctagaaacgatgaaccagaggtgcagtggacaatatattgggctaacctactcgaatcagctgcaacctgtgaggatgactgcgctactaccggagcattcccttctttcactccatgaggacatggatcttaaggggggagaattgtgagacctgacgaagaccatactcactttcagagataagagataactcggatata

SEQ ID NO: 49666 - DNA, 337 bp, Oryza sativa
taacatcagcgcagttcatcttatgcatttcatcaaacacctggagggctgttcccaaatcgcctttcttgacgtaatgcttgatgaggatgttgtaaatgcacgtgttgggctgcggaaggtacttgctccggtggtcgcgcaggtcggccaggagctcggtgagaacatcggggcagcggcgggaggagacaaggctgtctaggcagactgcgagggccttgcgggagacgcagccccagcggaagatcgcggtgaggaggcggaggagcgcgagggagtggtcgggcgggaggaggcggatgagcgggaggaactgctgctctaggaatcggca

SEQ ID NO: 49667 - DNA, 264 bp, Oryza sativa
cttgaccgatggttcgccttgctgtgatgacccaattctgttatagacgatatgcatgcgccgacatgtcggctagggtgatcacaattaggattacctctggtgaggattcactgatgactttctcattcccattgggtgggttcttgaatcataggatccatcattcccatagcctttgttaccagtgttatccatctgtcacaatgtacatgttgagagaggaagcattccacgaaagaatataccactactatggactag

SEQ ID NO: 49668 - DNA, 469 bp, Oryza sativa
  unsure (1)..(469): unsure at all n locations
agcntttgccctcctttaaaaaaaactctcctttgtctaagtataagcacttttggatacattatcaaagagacttaattagggtctattttgtttgtaactaaatntgtcacatctgacattagtcgttaggggtaaaaacggtatgaaaactcttcagatcataaagctattttcgaaaacggaatatatcggtcggattttttcagaaacggaattgaatttgaaaatattttctccgaaacagaatcgaatgataagagcggcttcgtcggaactcgaaatcgattggaaacttctggaaatnttctcggaatttccagacccatagcatagcccatacaacacaataatagcctgacctaaatntctgtattaggatntatcaatatgattcctatcttatacatagatcatttatttcatagattaatgtttgtcatatactgctgagactgatatgattgtg

SEQ ID NO: 49669 - DNA, 356 bp, Oryza sativa
cttgccacatggcgatgtccttggtatggtgaccattaacccatggtgtcatccattagcctcatcatagagggacctattgcttttcacatctcaaaggagaacattagtctcaacaaatcggttgtcatccttcacttgatgaccaaccggttgcatatgaaagatatgtatatgtttgctgagtattcattaacatcacaagtgtcatatactcgtatgcaagctcaagtgctaagatccgatataaataatatgtgaacaacatggatctaacacatgtacaataaatgtctaggatttgctccccctgagtatatgcatacaaagaaatatactaccgagaccagtgtatg

SEQ ID NO: 49670 - DNA, 352 bp, Oryza sativa
gcaggagaagagacaatggcggagcagaaagatgggatggcgagctctcgctccgccccagacgatctgtctcccggcgcctccctcccatttcccttttagggatatgagtcgccagatgtccattcctgcccttcgcgcctcttcactcgccctggcctctgatatgctgctacaacccatgctctgcagcaccacgaggcttcgacccgggaccctcgactctactgcgtcccatctccgctgctatgccatgcgcatcacagttacgtgctgaagaaaagtacaagaagggaggggggactgaaaagagggggagattaaaatgattattgtcatgtcctgagtgctg

SEQ ID NO: 49671 - DNA, 276 bp, Oryza sativa
  unsure (1)..(276): unsure at all n locations
tgtctaataattccttttagacaactatttattattaaccatggagaatataataaaaatttaatccatccatgctatatataaaggaaactgtatttcccacatttaacttcacttgtaaattaatgaacatttaatataaattctgataataatttattaaataatttataaatcctgaaacgaaaattanggtgtgacatatagaatgagagggagagaaagagaggtatgattggacgactctgtgctgagctcagcctcaaggacgaagga

SEQ ID NO: 49672 - DNA, 320 bp, Oryza sativa
agccttagagtgatagcactatgatgtattcttttgtcctacgtaaatggagacggcggccatcctttggccgtgagagaatgaagacgcggatccgtcttctactttagaacctccggacgtgcccaacgcatgttgactgtgaagacagcgtctgggataccttgttatctccggtgcatgaccgataggatcgcctataagggtgctactcggcccaggcgagtagatgctgctgtcgccaccaaaccaaatcttagaatgcgcggccattgcacaagtgataaccgatcggctaatggccgtgacctatattctat

SEQ ID NO: 49673 - DNA, 324 bp, Oryza sativa
  unsure (1)..(324): unsure at all n locations
ntagcgtgcatcgccgacatactgagcaaggagagttcgcatatatcgctaatgtacaacagagcgtaggagatactctgcatgcgcagagacnaaccgtgcgattcccgcttatatgagacacagaaactcatgcctgctcctggtgactctgcatgcacagtaactgcctaatcaaccgctcataagtggtcgctcgcgccggagcgaatctatgactgcacgcatggcagtccgttgagttaccgggcatgctcgaacacgacgttggtatctgtacctcttggactcctgtcatgtgaccggggagagactgtgtagctg

SEQ ID NO: 49674 - DNA, 420 bp, Oryza sativa
  unsure (1)..(420): unsure at all n locations
agctacaactntacaatgctactggcacttcaattagcttgagaaaccattgataatggttctctttgctcgacagagttatccttctttatccatatccattggaatattcgatgctgtgcaatggtaaactggtaatatttatgatagtactggacaccattctgtggctactcgtggccacacagagtggggcattcaaaacaattcaattaatcatcatgttgcctggtagctacatatgctcgctcaagctgattcataattttgtaagcttttttctgtagctggattgtaatattatacctcacaatatgctcttccaatatatgatgactacaactattcagtattcacatagactgcaaatatgtgttggctaagtgatgtcatagttgtgataaaatactttagcacaaa

SEQ ID NO: 49675 - DNA, 462 bp, Oryza sativa
  unsure (1)..(462): unsure at all n locations
agcttaaccctacaactgtttggcagatattacgtgntttgtccggangaggaagacatattgttcaatctatacaagaaaggcggaggaaacaacaacgggatgaacccgactatgggatagaccctaccactctctggacccccactcccggccccttgtggacagctgtcggccaccgaccgaagacagaagggaaaggggtctcgcgagaggaaaagccggtctcctttggggtagcctctcagtctctcagagcatcatgatggcttgagacagaggagagcttactgacgtcgtgtttagttccaagctatttctttaaacttccaactttgttcatcacatcgagacttttctacatacaaactttcaactgttccgtcacaactgttcaatttcaactaaacttctaattttggcgtgaactaacacacaccctgagaaaacgggtcgagaaga

SEQ ID NO: 49676 - DNA, 138 bp, Oryza sativa
  unsure (1)..(138): unsure at all n locations
acaatgataaattcatcgcccccgtagcggataacataatcactactgcggacgttgtcaganaaggcctgagagactttacgcagaatttcatcaccagcgttatggccccacgtatcgctgatctctttgaatcta

SEQ ID NO: 49677 - DNA, 134 bp, Oryza sativa
agcttatcacatcacctcaattggttttatcatttggatcattgatctattatttctcttctcttatatacacgatcttaatacttctagcattggaggatctaagataaatgtaattatctgtacagcacatg

SEQ ID NO: 49678 - DNA, 318 bp, Oryza sativa
  unsure (1)..(318): unsure at all n locations
taagatgccacttaagattaagattaagatctttatgtgttacttgcttaaagatgttgngntaactaaggacaatttggcaagacggaattggaatagtagcttaagatgtttgtatgaaaaatgagactattcaacatctttttatggactgtcattatgcacagtttatatgaagagcagctcagttctcattttgttttaaccttcttactaacatatctcatatgtttgatgcttggctaatgggcgttgacaagaaaatgagtaaactgatacttgtacgagcatatgtcatatgttgagctctcgggccga

SEQ ID NO: 49679 - DNA, 205 bp, Oryza sativa
ttcatccactcgtctaacgtctccctttttgcctcttataaactctctcccgcctttcactcattccattcttacgtcccctctattcttttttcgcttctatttcactctatctcttctctttcattcgtcttccttcctttctccccgcactctctttcttccgatccctttatttctcttccttttgcttgctttctctctc

SEQ ID NO: 49680 - DNA, 368 bp, Oryza sativa
  unsure (1)..(368): unsure at all n locations
agcttgtcgaggataggctgcagctcagctttctgtgggtttcctggnaccaaggggtagaccgagataggtaatcgggaagttctccactcgacatgagagcgtctcttcaatcaagctcagctgatcggcagagcagtggatcggtgtgttcgcactcttggagaaattggtcttgaggcctgttgcatcaccgaataggcccaagattgccttgatcactagagcctctctggccgtaggccgaaaaaacaaccacggatcgtcagcatagactgagatagaaggtaaattctgtcttgctgagagggggaaagaagatgcatggttcttgctctgaccaccacagcttgaagtggaaccattac

SEQ ID NO: 49681 - DNA, 392 bp, Oryza sativa
ctgatggtctgatggaacaatagccatgtgcatctcatattttagatcatgcgtaagttgcaagatattatctgtattgcaggtatgaacctaacacgattgatctccacctgaatgagtacaagtattatttctgcttcccctatttctagatatcttgcaggaattgaactatttgacgatatctgagatgtacaatgcgaggtactggttcaagatattgtcagaccatatgcctgaccttgtggacaaggtatggtgtacttcttgccaaaaccttggataactttctacataagacaacacagttttctctgacaatatggcctaacgataattaattctttcatgctcgcctcccttcatatgacagtgcaggagtgctgctacct

SEQ ID NO: 49682 - DNA, 418 bp, Oryza sativa
  unsure (1)..(418): unsure at all n locations
agcttgtccacaaccaccattatatcgacttctctcgacactctcgntaaaagtcttgtgtaggttgtcttcaaacatatatgctctcaagaaagtggtgaggaagaagggtggcaaaagatgtaagcttgaaaagataatgcatggcttttaatagcaggacggtaaagatgagaacaaagatgattctttatagtaagatggcaaaagtgaactaaaattcctgctatatgtttaaaaacgtaatatatttactggatgtcaattctgtctatctaaaagtataatgtggaaacaaatacctcttgcaacctattattatctgtaccaatctatattatctatgattatggagaagattaaccaatgaccacatgaatatatatgatgtgcaatttgttctgtgccttaattcaag

SEQ ID NO: 49683 - DNA, 279 bp, Oryza sativa
tcatggagcatgggatccaggtgtttctcctatcggttgttgatcgcacccgaagcctgcgaagaaagagtcatatcagcaggtgtcacggaggaagaaattctgctgcaggccgaacccctatcaaggctatcatttctgccaggaggaggggttttgtatggggactggacctgcacaatctccttctccttaaccgcgggggaagactctcttgattgcctacgcaatcttgtttttcccgcatctacagagcgcgaaagatggcagattccgcta

SEQ ID NO: 49684 - DNA, 183 bp, Oryza sativa
  unsure (1)..(183): unsure at all n locations
ttccatccatcccaacataatgtgcacggagagttgagatatatcgagaaggaataaaagagtggtggtttcagcctgcagggcagcagcaccattttgttttcctccatttggngagctccagatcctctaccctggtcaaaaagactctgcatgcaacgctctcactcattcaaccgctat

SEQ ID NO: 49685 - DNA, 478 bp, Oryza sativa
  unsure (1)..(478): unsure at all n locations
agcttttccttatctttacgtgataaanatatcttttctctgtttcagaatataaaactttctagcattgcccacatttatatagatgctagaaagncttacaatcttacaaaggattatatgtgccggttcaataggaaaaaccggcattaatattataggtgtctccatctcaaacataaccactttttctccatgtattatcgtaatattagacgtacatgcatgcatacattatctatcaccattttctcctctaaattcgtgttgttataaatcctctatcatcaaacccccaatcacattacttgcaggtataaggtgattaaattctttggtggctttttcgttagtgatgctttgtgcatgccttatattntaaaataagggagtaaaaaacgaattatttgttgtacactttaaaaactatatnttcttaagagaaattcttttacttattacttttggatcactttgt

SEQ ID NO: 49686 - DNA, 298 bp, Oryza sativa
accttcggataagaatggagaaggttctgatagtgaaagaggtttattctatctataatttcggagataagggggatttggcatttgaacatatcacacgggtaaatattgtttcttcaatcatcattgtattaaattgtcaactctctttggcaactgcagtgtttctccaagctcgagtatttcgtagatacagacctcatcaatttgaccagatattctgggtgataacagaatgtgctcttgttagtaacttcgcgctttgtgcacacctttatgaacatctttatgtcagcct

SEQ ID NO: 49687 - DNA, 275 bp, Oryza sativa
  unsure (1)..(275): unsure at all n locations
agctagataaaagtccgatccaccctagattttataaatgaataacttggagcgattactagacgactcgatgcacaaaccggaaggagagtagaacatgaatcgtcagaccgnaaatttgaaagtgaaaaaaaagtctctcagttgaaagacatatggaagctagatttatttattaataacaacaccagactaattgcattttaagaaagcataccaaaacaccacaattctgttccggctttcaagaaacattactaacaattatatcgaac

SEQ ID NO: 49688 - DNA, 84 bp, Oryza sativa
ctcatgactctaactgtgtgcgtaactttattctctcttatatatgataagcgctagctcaaggatagagtagtacctactcat

SEQ ID NO: 49689 - DNA, 388 bp, Oryza sativa
  unsure (1)..(388): unsure at all n locations
agcttaagtttgctctgtatatttgctgatgttaacgntgatcctgaaaagaacaagagagtattnttttctgctgccacatgcttcaattgattagctcgtatggaggacagatgcctgatggtccgtgccttcaaattttctgaaataataataattgatagttttgactagatccaccctgctgcaaacagaaaagcaacatattttggctgcaaatatttatactttttacttagcaacattttttgaccaccaaatgaacctattgatttgatcggttacttgaaattaagtatactatttgaggcaccaagacttgaaatatatgctctcttccatgttctgtgcgcattgagcctaaccgacagtcaatttgatccctgtg

SEQ ID NO: 49690 - DNA, 352 bp, Oryza sativa
  unsure (1)..(352): unsure at all n locations
aagctacgngcaatcatttagaggtcttgaattaacggatattcaagcttacagaagcctgtatggccttactataaagaataattgcacaactattaaaatccacctcaccttctttaagcatagacggccctgctcaagacctacaccatcaccaacccataggaagacaaaagatggagtatttgctatagcctgtatgatctgaaaatgcactgaagcacattaattgtatgcataaattgaacaccaatagaagactttagtatccatacctgcagaatgtaacaactaaactatgagagctacctccatcttttaattcattatctttctcagcatttccatactc

SEQ ID NO: 49691 - DNA, 261 bp, Oryza sativa
  unsure (1)..(261): unsure at all n locations
agcttaacctgtgcatacaatatttttagtttttagtgntctatgcctatgaaagtgcgaaaggccaataactgatggatgaaacttgcgaatcatgcgatgttattttgcgcaccaaattgcattgcatcgcattgcctttnttccccatatctttagctcaagtagtgtgggccaggaggttgatttgaaaactcaatgcatcgaatcttgcttgcagctgcttatttcctattttggtggttgcctacatccctccct

SEQ ID NO: 49692 - DNA, 458 bp, Oryza sativa
  unsure (1)..(458): unsure at all n locations
agcttccatctagcgggcgttttgtaactgctcgttattcgagnncaaaaagcacatgatgcgataaaatatgccaataaaaaaacagtcaaccaataacgaccatacacggagtatggagatgggaaaacgtcttgtatagtcagtaatgacttaaggcttcttttggaactctcagaaatttaattattctgatttgttttgaaatacgggcgatgccccgcaaaaaaaaacagggcgaggaaatttaatagctcaattgtgtgctcttcagtttataagtcgcaagcaaaatctaaaatttaaacttaattttagaggtgattttgatgtttttcattgtaggttattttccaatattgtcttttaagttacaaagaacacatgtattgaaagttaaacaatctagtttgtaataagcgtacgacatataattagctgtatatgaaatgatggaa

SEQ ID NO: 49693 - DNA, 299 bp, Oryza sativa
  unsure (1)..(299): unsure at all n locations
acactataccatacctaagcttagcccagagtatacattactctgtgagtttatatacaatttggtgcagggtctgcgccggaatacaacacctttggacttaatactaacgccctatttaattccagaggtaaaaaagtttgacgtgtgacattggatataatgacacacatttaaagttttaaatattgactaatagcaaaacactgtatatattgcgcctgttactgcgaggacaacttnataagcctaattaattcttcattagcaaatgcttattgtagcacattattaaatca

SEQ ID NO: 49694 - DNA, 211 bp, Oryza sativa
  unsure (1)..(211): unsure at all n locations
ttacatatctagctagttntctcattcagaacactnttctaatatctgcgcagaccatatatacaatatgcaaattttgtttgctgcgtaactccactgcactaacaaaagaactctatcatgtaggtggcttatgccaactaacatatggatcacatctcatggctgcgggcactctacgctgcactagccgtctcatcttgaaaccacc

SEQ ID NO: 49695 - DNA, 667 bp, Oryza sativa
agcttgtgaagaatggtttatgtgcgggtcatgaccaaatttcaataaatctgttggccaatgcaagtctttagttatgtggaggcacctttttattcattggtctttattaaaactgaccgcacttgcagtcaaaacaaggctgcattatctgcactataaaaccaagattaggtagtggaaaccggcaaggctggtcatcaccaattagaaatcaacgttaaatatacatggtcattgtcttacgttagaaatacagccgttcagtaagacaaaaccacccttagcaaacaaacacaaaatcaccctattaaacaaacacaaatttagaaagaagaacacggttaattaatgcatgtgcggcttgatctacaccaagagacgatcgggtacttgccattgcacatgaccgacgacattgccgggaccttgtgagtgcgtgcgatggtgtgagtggtgtttaaatgcgcttcaaatataaacacagcattcgttcataatccaacaatctaaaatttatcaatagttaaagtttaaacacaccgttgagttgagttgataatttctaaagagtaaaatacacaaagagtccttagatttaatacctgtatatatgtgtcatatagatttataaatttaaaaaatatatgtttatacttctaaactt

SEQ ID NO: 49696 - DNA, 632 bp, Oryza sativa
agcttctcattttgcttttgcaaagcactcaaagaaatagagttagtagcactatcttcaatatcaatatctttgcatctcacacatgattcattgcttgggagaattttggaacaagacggctcgctagggagagagacactattctttaaagtttcgaacttctcttcaagagagatgtatgctttgtccaagccatccactctctcttgaaattgagcgttcgccaccccaagattagcatgagactctttggtttgcttgtaaagccgtgccaaagcctcatttttctctctctccttagcaagctcactcttgagttcatgagatcgctctttctcacgaatgagcaaagcctcttgcctctcaagagttgcatattggtcctcaattctcccaagcaactcactcaagtgtggtagagattccttagttatggacttgaacaattcgtcatccataacctcatcctcaacctcatcctcctcatcactaacaagatcatcattaaatgatttgagaggagaaggtaccttaggctcctttgccatgaggcaaatgggagcatcctcatcacttgagtagtcgaagagtcctcgcggggatggaggcttgacaacgaacgtggcaac

SEQ ID NO: 49697 - DNA, 534 bp, Oryza sativa
cacgcaagctctaagtcaagaatccagaggagcatgataataattgatgtgaagaattctttttgttatgggagatctaatctctaataggttccttgggaactactattaaaacgctaatgtttaatgggttccttttaaaatactgggttttgaactggtggtaggatggtgccatgcctcaaataaaactctgtttggcctattgatattggcaagttcttatgtgccagcgcttggagggggattgcactggatgtggtgggatgacccggaagcataaatggagttatggttctaggtaaatggcctttaagaatttgtcttcacaaataatggaccctatgttttaagcttaatttatgaacttatcataactattgaccaaccgtgcattggcagcatgtgaaaaatactccctccgattcgattctaaaagctttgaccccgttgactctttaatacacgtctgaccggttgacttattcgaaaacttttgggaaatgtgctaaaccaggtggacataagtaacaa

SEQ ID NO: 49698 - DNA, 626 bp, Oryza sativa
agcttccttaaaatcattgtaatttgacatttcattctcctggccgcctaaatatcataattaaccatgtgaacatcccctgcaatgaaaccatgcaaatttagcatttaccttcagcagcagttttggaagctatttatgtgttatagtccacaattgtcgtgcaattgaattttgtagtgtgatctaaccaaatattccatttccaaattattgtgttttccatcccttgcactacaaaagatggtgataatgttctcctttaaaatactcccagcaacaagaatgcttcaaaatctttcagcaagtgaaacaaattattcgtgagattattgtcacggttatatattttattataaagatatattaaatatttttagaaatgcacttagcaaactccataaaaaaacctagtattggacaagacataatctaataaaatggtatatcacatctaatactatattatttttttaatggaagtgagtagcttagggggtgtttagatcaaagggtgaaaatattttgccgtgtcacattggatatacggacacacatttgaagtaacaaaacaaattacatgatcccgttggaaactggagacgaaattattaaaccctaattat

SEQ ID NO: 49699 - DNA, 631 bp, Oryza sativa
agcttcagtcggccgaaccgagcctgtgccgcctgccctccccctccaaattctgtcgtctcgttgttccgtttccgaaattgattgaggggatttgttgccgttattcttaatcttgccttcccctcgagaaatcgaagaaatcccgtggtttatctccccgaatcggagcggttttgatctcctatcttgccggcgaaccctaactcttccgcggccaatccccgccgtgtccgagccgatctcctccctctttgcctaactcttcgttggctccgcaaggacgagggctacctcggccgccggttcccttgcgccgaagaccaccggaagctgctcgccgacgcgaacccgagcgccgctgcctcccatcgacctccagccgccactcaccgttgtttccaccatcgccgagcttcgccgtcgctctcctccgcatcgcagcgccgaggagaagcccgactacccttccgttgcccgctgccgtcgccggaaaaccgccgccaccgtcgacccgacctcgctgcccttcggagctcccccgccgtgtcctccgtcgtcgttcattcgtccggtagtagggaacagttcgcctcgggccccttttcctccccgtgctctgacttttccc

SEQ ID NO: 49700 - DNA, 662 bp, Oryza sativa
agcttctcgtccttgccttaccaggaacccggtttgtccgaccccgcctcttttttcccaactattggcatgcgaggtttccctgaaccgactagttacttagccagggtgtcccattccaccttgtggttgcactttgattatgttcgatgagtttcctacaggaatcggtccttatatgcgaatacgggacagtgccacataggcacaacccccgcatcgcgagttttcacaattcattttattttcaaacacaccgacaccacatgtcgggttttgaaggcttcacaaacccatttcccaagttttcgacaaacaacggtgtatgtgggatatttggtatacgcgctcagagaacacgaataccgaggtaccacaagggtggagcgacaaggaaacagggtagtacgacctacggaaattagtgcgactactgggtaagtccgtcggtttggcacgcaaaccgaggccaagcaagttaagtgtgattctaataatgcaagttgcaaaaaaaataataatgacttcttaattataggagcaattgatcaaaaggtgacttgccttgctcaaagtcttcacgaagctcacgaatcttcgagaaacccgcgatcgataaaattcgataaccggaactttacgcaacaatcgaaaacctaaac

SEQ ID NO: 49701 - DNA, 540 bp, Oryza sativa
agcttgcttccaaggaacagttgcttgctcaggaatcagaaaacaggaaggtatgttccactctcctaatcatgacttctcgatgttctgtgaaaaaacaattgcactgaattgatgaaatattagaagtttgctgagtcgagggcgaaaagcatggaggaggaggtgaagaagctgcataaatgtttacaggacaaggatgagcagctgcgaacatcaatatgtagcactgaacaggggatcatcacccccttatactacacttactgtcaatcttccagtgtgatgtgttcaggtaactgttatgttttggtgtaatatttttttttgacctagtagtttcatcaactgcaaatcaaatgggaaattttcatgtcagcagtatttgtcttcctacaaattggatattcttagatcacagatttcagtggcacaagccactgcagaaaccagtgcagaattcaccatgttggcacggttgcagtgcttgtccctgtcaggaggggatgagaagatcaattctttgggtgaatgcgagct

SEQ ID NO: 49702 - DNA, 618 bp, Oryza sativa
agcttcaattgctgcccggatcatttcctcttcgatatcattgtcatagtctttaacatgaaccaatggaggtgcagttggaatagaagggttcggctgcaatgagctatcaatattagcatgaagagaaggggcagatggctgctcatcatcatcatcatcaattacaatagccccacgaacttcaggaccatatgaagattcatgcccagtgacatcctcgataataggggcctgaccagaagggcctgtttgcgggttgctatccttaacttcgataggtatctctcgcacctctctagggtgtgaaacctgtgggccatgaccgaaagtatctgtggaaccaactctgtcaaaataattttgctgaaagtttgtgtccatcagtgcaaaagggtcacgcaaagtttcagggaacaaagatcttctaaatgcattatcaagtggtccatccaggtccatcatatcatcatgactctcaggtatattgttttgactggctctgttcctgtagaacaccagcatctcattcatcagttctagcagtacagtgtgggcatatggaaagcaatcttatatgttaattaaagttggatggaacatagtaaaagtgtacac

SEQ ID NO: 49703 - DNA, 622 bp, Oryza sativa
agcttctggtcctaacattacgtttacgattagtgctttgtgcacttgctttttttttcattttgaatgggaacagtaggaaaggatcctactatagtttcctgcacaatctcactcgggtaatcgggttgaccaattgtcaagggcttgggtgtagaacgcaccatttgcttgcatgcacgatggaatgggtagataaaacattaaggcctatatatgcagccccgagaagtaacactgtcttgttgccaatgcatcatacacactgagatatggcgcttggatttccagaatgcatatccgctgttgggttgatctctttgtccactatgattgctgcttcttcgggtctgagtatgagcaacagcagccacactgacctcactgcactgatggctttcaaagcgcagctttccgacccttttggcatccttggaaaaaactggactgttggcacccccttttgccattgggttggggtcttctggccgcgccacccggagcgtgttactgttgtggagctggcaaaatgttccctgtgaggagagctcattccttacatcccgaaccctcttttttctatcttgtgctcagcctcaacaacacctgcgttatgggttca

SEQ ID NO: 49704 - DNA, 612 bp, Oryza sativa
  unsure (1)..(612): unsure at all n locations
agcttgacgctacccctacctggcgcgccaactgtcgaaactagatttctgtaataataaaagggggtggctatcaagctggaaaagtgtatgggtttggagacaaaggatttatacaggttcaagccttcttataaaagaagtaataccctactcctgtccggggatgaatccgccgagtgtgttattgattgtatgatttagagaaaatcaacatatgcccctaaaggcgcccggaccccccttatatatgggaaggagtccggattacaaaagataatctatattcctaacggaatatgaagatacaggtaaaatacagtcgtaaccgactaagtctcagggtgtttccttgatatacaagttaagaaacaaacccgagatacagataagatattctatctacattaagtatccggtacccaatccaaataccgtcgccgtgtagatatgggatacccataatctccacaataacgaaatccattgaggataanattataagagctaatggatcttgcaccatttcatttgaacaagtggcctttacagttcttatttttgttttacgatacacgaaacacacacattaccgacacgcttaagagatga

SEQ ID NO: 49705 - DNA, 664 bp, Oryza sativa
agcttcacagacatggacgaaatttgcaatatggactatggagttcggattcaaatgatgtaagctgattccatagaaatttagtatcccacggaagaacttcgaggttggaagagcaaatccaccataaaagaaatgagagaagaccacgaccttgtgtgtatcaggggtcggaaaagcctcaccgcacgctggccgccacccgatgatctccttggcagggagaacgccgtgcgccaccatctccttcaggttctcctccgtcacgtcggacggcgcccattggccttcgaagctttctttctcttccgccatcgattttccccgaatgtactgatttgattcgagggatggcttgggagaggtgaggaattgaggcggtggatcacgggaaggattttgatcactttttgaaggtggatttgagtggaatggtgaaccctaatttgccggcgcagctctgtactgtagcaaggagtggggaaaatggcgagagttccggcggggaagacgaagtgacgcttggatctcggaatttattgttaagggtatcgaaggtgcaaatgggcctatgcctgaacagtacctcaacccaataattttaacagcgtggccccattgtgttccttagggacttaagcatttttttgtttggcaaattatg

SEQ ID NO: 49706 - DNA, 635 bp, Oryza sativa
agctttaggcaaagtgttgcaaaaaattgtgtctttgaaataggccgatgaaaaatatagctacccataacaatggcatcaactaaacaactgcaaaacaaccacctaaagttgggatttggcaagttgaaggcattatccaaccataacatagttctccctccgaaaagaaataatactaacatcatactaactccatcccaaaatataataacttttagtacgaatctagacatgcacttgtccaaattcatagctaaaagttattactcccttcatcccaatatatagaaatatagtatcagatttgatattttaaaatactacgaatctaatcatgtttcatatttatattcgtagtactataaaatgtataatgcacttttagtaacttttagctacgaatctatacatgcactttgtctaaattgatagctaaaatttattactccattcattccaatatatagaaactagcatcagacgaatatgatcagaggtttcctgttcatattcatattactataaaatatctaatctggtatatggctttcacatttaggacaaaaagagagtactaatctattttaagaaagaaacaatattacagataacccttaggactgaaacgcaca

SEQ ID NO: 49707 - DNA, 642 bp, Oryza sativa
agcttatgcaaacagccaaacagtcttttgcttccctgaccagtgaaagtcttttttgactgacaatcatgttccatttgatcatttgatgcattcttctcataactctgattaagttaattggtgtggtttctcatggtactggagttgcacaaggtaagcacttgagtaggcgtaatgatgggcggaaaactgatcgtactaaaaattgtgcgctctcccgggctaaatactacaaataccctcatcttttcgtttatatttatacttataagtcaaaatttaaatatttcacattaaatttgaagctaattttgagggtttttttatcaaagtttatttttcagcctttacttttattactaagaacacataaattattatcgatgggcgcgtaagttgattaattgaagtagaaatctctagcctgtctccgaggtagcagtcacccagtagctccgtcacgctgcctgttagcttgcggttcaatatgcgttgtgattacaacaggcaaaacattgagcaatccatttgtatacatcttacaaagacggtgagattagcacggcattaccctgcggatgaagattgaatattgagtaccgacgtagcatggaaatggcatggctgttgtgcgttgtg

SEQ ID NO: 49708 - DNA, 578 bp, Oryza sativa
  unsure (1)..(578): unsure at all n locations
agcttgtggaaatatgagcactatggaggaagcaaagatactaagttgcagttgaaaattttctttataaggaagagcaataatgataaggatgacttgagcattttgatctgccaagagctacaagtgccatgggacctaggcggttggcactttcagaattttacttgccatcgtcttgcaaacaagtcgaattttaagaagaggagattgttaggaacccaattgtgctgccaatgggctgtcaccactctcaaagccatgcccaagcaagcaaagggagagcactatataagcagcaggagtagcatcgaaaaagggaggtttgatcaattggcgagctgaggctcgcggcggtggcggcgatgacttggatgccggtggcaacccttctcattctccttctcttcctccttctcgtcccacctgtttgctagcaacttgtatccccttttccttctttgttccaccaaaatactggagtgttgaaacatatatggttgttgtttgaatangagcgaanggttgttaacaagatttaaaatgataacttttgtgggatataatttgaacatgaa

SEQ ID NO: 49709 - DNA, 660 bp, Oryza sativa
agcttgacatcttggtaaaaatacagctgtttccttctctttactacaaagtcttaccaatctgtttctacaagaacgaacatatactgaagatcgcgtgagaaatgcaggtgaacaatgcaggtgttggaggggttgcagtagaccaggatggcctgagagctctcaacattgatcccagggtttgggtatgtagatttatgttagctttttactttctctggattgataatacttattgttttggacaaagctattttcaaactttaaaaactttaactataaataacatctaaaatatttattgtagaaatatggtgaccatatgtatagattggtcttaaaaggtgctccaataaaatcatatatttattgatattatatatatatatatatattataataaaaaatagtggttaaagttgttttttgcataccgtgtctttgttcaaaacaacaagtattatcagccagtaggaagtagcatatttgcatagcttcaaatgcctcccctattttggtctctaatttttcccttggatgatatggccccttacagttgtcagtagttttagtgtcagatatccttgcgttattttggtgcgtagtgttcatttgcaactttgaacactggtgtctatcaatttaaaattctttttt

SEQ ID NO: 49710 - DNA, 646 bp, Oryza sativa
agcttgatcgattccccctctgaaacaagaagttctggaccgggaggtataatatcaatcacttggcgtccatccgatgcatcgactatggatatttcatatccccccttttctttacgcagtatttttcttactacacctgttgacgttgcattatagaccgtattgttactcttgctaccatcaggatagatctgtccccttcctcggtttccccccacatatatgggatattttaagaaatgaacgtctttcttcatagcagggtcgggggaaagaatgggaaagacgatttcactatatttcttaccgggaacaggaagaatttgtatctttttacctcggtttattatagtaaaaatttagcaacacttttcccacaggatctcttgcaggaagagggtaatctccaacttcgacttgtcaattttatttctcatgaaaatagcaagttaactcaaagaatttatcatacgaatagtcaattcgttcgaacttgcttagtattgaattgggaacaagaagaaaaagaggaggctcgtgcttcccttgttgagataagagcaaatggtctgattcgcgatttcctaagaattgggttaatcaaatccactatttcgtatacacgaaaaaggtatgatagcag

SEQ ID NO: 49711 - DNA, 664 bp, Oryza sativa
  unsure (1)..(664): unsure at all n locations
agctttatgggcgcgtgcaatccgtattatttttgctatttcgagctcttttccactctttttctctgtctcgtttcttttgtcttttcgctttttggacaggagaaaagcataatataatcgtgagaagagaattttaacgattgggcagcacaattgattggttggtgcgattcgcccgtcgtactgggcggtgtgggacccactgtgtgatccagaacatccggtgggcccggctaagtcagtctgtgtatatcttctaggagtataagtgaaaggggtgtgaatcctattaatcaactaaataatgattgtctttagattcacataaaaacaaaatagctagaagaaatatgaataattagatagagaaagtagtaattctttgtctagaaacttcttcagcctactaagaaaaggataataaagttgtggatataatatattacaaatgcatgccttcaattaaaaaactattttacaaatagacccccttactcacgtaagttttctttggaaaaaaatatttacaaatagatcattgacttatatttaaaaagatccaacaataaattaaaaaataaacatagacaaatgtantaatgtcgtacatattatttataattcgcactataaataaagatggtttacaaataaattaacc

SEQ ID NO: 49712 - DNA, 577 bp, Oryza sativa
agctttgtgactttgtgtatcccaaaataaaatgctgcctggtttgtatgatacttaacatggtgatgtctgttgtaacttgtaagtgtggttgaggcagctggtgtggttgggtttgtggtcagttactcagttcacgtgtgttttgagcatgtgaagtatgtagatctgcttatctgaaattctaagcagtagctgcctgattgcctgtatagcctgacagagcagctatctgctgtaattgtactactactactgtactgctttgtgaaatacagtacatacatagctgatatatgtaaattggttttctcattttctacagcagtaaatgtgatgtaagatgccaatcatttcatcatgttattctcatctccagctttgtgctgacacaacgaaatctacataacttcctcaattctctgtttaatcgacagtaattttgtggtttgcatcttccatagccttctacccattataaataaacataactttctgggctaatgaagctggtgaaatccagctataattttggccgttaaaaatttgggttagtttcatcgtgttcctgaaatga

SEQ ID NO: 49713 - DNA, 663 bp, Oryza sativa
agcttgtgaaacaccagctgggtacaccattatgttagtttttaaccatttttttgcttgaaagtttgtaaggaagatttcatctatgggtttgtctgtactggtgaagaaaagttactgtcaagtacgaattgtccaatgggggtccggcccctacataggagctgcaggaattaaaccatctctacagactccaaacttttcaacatttgtacatgtcggacagtactgcattgaaaatgattacgcccctctgacttgtaagaaaaatgtataaattttagaagatttcaatcctatggaaaaaaaattctaggaaggcatttgaaacaaaggattgaattctatcccatcctttaaaattcatatggaatgagtaatcctatgcacattttggaggaaagttagcaagaggtctaacttcttggaacatttcctctgagtctatctctctcatctgattcctgcgtttttcctgtggtccaatcaaacagccattcctgtgttttttctattcctctgttttacaattatattcagttagaaacatggcgtttgtcctatttcccctgttttttattcctacgattcaaaaggggcttttattcctgcacttggacagcttacttgcattgtttaattttaccttggaactttatttac

SEQ ID NO: 49714 - DNA, 647 bp, Oryza sativa
agctttacagaaggcagctaaggatgttttgtacaatgagtcaaagtgatttgacagtgagtttacaacactacaaccagttcttgaacttatgaggttaaaggcgagacatggatggtctgatagtagtttcgacagtctgcatgaacttctgaaggatatgcttccaaggcctaactcactaccatccaacacgtgtcaagcgaagaaactcatatgtccccttttcacttggtgtggaaaagattcatgcgtgcgttaatcactacataatgtacaggaaagagtacgcttctttggaagaatatccaacatgcggtactagccggtacaaattgaatagcaatactggcctataaccatctgacacaaccgagggaactaagaaaaaaatcccgcagcttatgatgtggtaccttcctgtcaaagactgcattaaacggatatactcaaatccgcgagatgcggaactaatgcgatggcatcaagaagggcgcaagaaaaatgggatgattcgacacccggcagatgctcgtcagtggataaactttgatgctcagtacagagagtttgctaaagatccctcgaatattaggtttgccctgagtactgatggagttaatccttttggagacatgagcagctca

SEQ ID NO: 49715 - DNA, 529 bp, Oryza sativa
agcttgcaatttccacctgacgttcgtactccattcaagcatgaatgaactgtatggtccgttcaaggtgcgttatcggcccgccacttgaagtaactctgactgcgtcaatccattggaccaattgacatttccttacatcctcctatgtacattcattttgggataagtaagttaatgatagtactgaggagtgatgaaaagaatagttgtaattaccacgaaatcatcgtcgacaatggttggacacaccaaacacctttgtcctcgagttcggtgccttaccgaccttatgacctgacaacggtcaccacaacgacacttcggacgctcacgccatgtggggagtcctaggggaattacctgccattctaaagcctcagcaacaattcgacgttcatgctcatcctttcgccttaagtaatccgatcttggttcactacgtgtgtccgggatatgggaccgggagtatcatgaccagaagcttgaggcagacccaatcgcccacgtggccttgcaccttcgggga

SEQ ID NO: 49716 - DNA, 286 bp, Oryza sativa
attgtccttggaaaaccgatctgcgcatgctccaaacttcaagtaaccatgccccagcccaaagaaaaaatctgggagacccaccagaggggatgctgagacagttgcttattgagaaaaggtgctcctagcattggcccgagctgcctttcatcaccagaatacgagctacccacccctatcaccattggtacacccgagcctgcatttgtcttcaaatttattcggcatcaactcgaatttactccctaacacaaagtgtggccggcatttttcccttgaatcc

SEQ ID NO: 49717 - DNA, 640 bp, Oryza sativa
agctttattaatctcaataaattctatcaagtgatacaattattctgagagcacctccagcttctgcacccaaagagtgcacacagccaacaagaaagaaacaaaaaataaactcattatccaaaatagcagggacaaaaagaacttcaagagccctctaaccgtagcctagaacgccacctatgcgccgggatagaaaactccatggccactagctagcaattggaataatgacccgatctggacttctggagcaataacattgtcttcttgtcatcttttcgatttggtaaattgagtcatccaatggggaaaattgtgaagggtgattctgaatctctgatgcctaattatgagactctcctagtagttcagacaaagattagagaggcatgagccatctgccatcccaatgtgaagtgtcgaagtgtgcaactctttacaatgattaatagccctggacacaaattggcatatacgtgcaaccgaagcatcgcagaatcactgggatggttcagaacctggccctactccaatctggcaatttatgaatgggaaaataacttgagatcttaatcgtactaagtcagcagtgcggtgagcgagcatgttaggttcagagttcagacatcacatgccc

SEQ ID NO: 49718 - DNA, 599 bp, Oryza sativa
agctttatatttaggaaattttatttcccaaatttaacttcacttgtttatttatgaataattaatataaattctaataacaatttataaatcctaaaacgaaaatcaggatgtgacactgttactctggattctcttcaaatggccaagttatgactataactggacttcgactaacggtgtagcgattctcccactacttatgcaatttgttaagtacaaccatacacctggtcttcgcctagtgtgcttgttgtgtcatcatctacgtcaatttctgtaagtgtttatatgtacaatatttgtccgctgatcctcttttcttacatcgcctcgtcttgaagtcagccctattgttcctttacgctgttctgacagagcctccgagaaacctaaagggatttcggctagggacgcccagagttgataaggctttgttagatgctgcagagccaaacgaccatgtcagagtgctcactggatgtgtattaactaagccgggtaatcgagaattggttttcccaaccttacggctgggggctaagatttgccattcttagcttggttcgttataaagattaaagtgccctttgggaaaa

SEQ ID NO: 49719 - DNA, 604 bp, Oryza sativa
agctttttatgtatttttttttatatgttttgcatgcatgattagttccctttttctattgctcaagcacatcggcggaggagctaaagcaaagttctgcgctgtttgttgtcctatgtctattgcactccctggtatttccgtgattaattgcctaacaggtgtattatgtgctgcaggtgaagtggttggagcaatctttaccaagcaccaatgttgttgatcttttccagtttgagttcataaggtctgccatgaggcccatgaccatcatgtaatttgcaaccagggagacatgaatcatgtacttttatatcaatgttctgtgcttataatccagcatttggaaattggaagtgacacttataattctgaagttatgtgaattcttccatgcccttgtttgaattatgacctgcactacctgatcagtgcaaccaagataactttcagataaaaactaccaaatccgcgatgcgcttgattgaacagccttggtggcttggcctgttttatattgaagtcaacaaggcgatgatttctgcgttgcgtcgtattatctgacacaaaacaaggggggtgagctgtacactgctattgaaca

SEQ ID NO: 49720 - DNA, 667 bp, Oryza sativa
agcttgttgtgagtgagcaagatcagaatcagaagcagaccccacgaaatctgttcttccatcaacaactgcctgatagctgaaaaggaagtgttctctctgtacttttttttttaaaaaaaaaatcttacctgcattttgggcaatgtcaactttacactggagtttatatgatactgttattatctgaaaagaaacatagtgaggtataattgactgtttacattctatttttttaccgaacaacacatcagagtatcagaccacacattgcttaagcatcagttctttgctcgctacctgcctccagcttcctctcaccactgcatctttgactccatccacaagtaaagcaaagaatctgagtttatatgtacatcctcagttacaaattgtttgtttctttgtgaccaaaattgaagctgcagcctgcatggtctcagtctaagagagcaaaataagggtgttaggaaagtctactggtgacaacctactcatggatcgatacaggtaatttaacaaggtcaagctgttagattttgagtaattattttcttcattctttttgtatcaacactggaagttttggaaccaacatatgcgaatgtgctactactttatatgtacaatttctggtttggaccattatacgcaacatacactgagt

SEQ ID NO: 49721 - DNA, 608 bp, Oryza sativa
agcttagcctgaggagaagcttggcttggctggatgcagagctcaaggatgcctatatcaagcttgcttccaaggaacagttgcttgctcaggaatcagaaaacaggaaggtatgttccactctcctaatcatgacttctcgatgttctgtgaaaaaacaattgcactgaattgatgaaatattagaagtttgctgagtcgagggcgagaagcatggaggaggaggtgaagaagctgcataaatgtttacaggacaaggatgagcagctgcgaacatcaatatgtagcactgaacaggtgatcatcacccccttatactacacttactgtcaatcttccagtgtgatgtgttcaggtaactgttatgttttggtgtaatatttttttttgacctagtagtttcatcaactgcaaatcaaatgggaaattttcatgtcagcagtatttgtcttcctacaaattggatattcttagatcacagatttcagtggcacaagccactgcagaagccagtgcagaatcagccatgttggcacggttgcagtgcttgtccctgtcaggagggcatgagaagatcaattctttgggtgaatgccagcttcgagtga

SEQ ID NO: 49722 - DNA, 378 bp, Oryza sativa
agctttctcaagacttgcttcaatggtgtcaatgccctctcaggttttatttctttcatcctgcctctcgtgatcttaatcaagctaagacatcaagtactacctgatgttttatgttgttaagaaagatgccatatattttctttatttaacattataacatactaaggtaattttaccatatttgaaaatgaaccggaagataccatatgttctaatataaaacttgttacctttatatactagataccaaattttatttttatctttttacaagtgctgtctcgaaaaccgtaaaattcaccacgtactaaaactaacttaaaatgttgggaaagtgatttcatctgtcgaggggatattctcttgtttcgtaca

SEQ ID NO: 49723 - DNA, 628 bp, Oryza sativa
agcttttgtaccaaggctgtttggcacttactctccaggcgtatctgctccacattatgatcatccctgatgtcacaactcaggccatcagaacatggtgccatgattctttcctatctagcttggagaacatggtcaatgtgtggatcatttcgtaatcctgtaattatccaagagctgaattaacccacaaattaagtacaacagcctgaactctgaagataggaagaaagaaagaacatgctattgctatcagatataggtttgattcagatggaagaagtggcaacgtagaaagagtagttgcatgggattaaagggtaaggaggattatattccagctatatgtacagagcaaaaggcccatcgaataaattcttcttgtacgatttggcctgaggaaagggatcgatgtgatcgaaagttaactcaatgcaggagcttgccggctccatcctagctaacaactgacagaaacaatagccaggacaggtccatcacctagtcatttcccccccttaattcaggtcaactctttaactgtacatgtatactcccctatgcctgaacagaacagctaaataatcctcgcaaattttgttctgtgagataatatcgacaagtgaaa

SEQ ID NO: 49724 - DNA, 639 bp, Oryza sativa
  unsure (1)..(639): unsure at all n locations
agcttgccaaggagagctcttctattctgtaagttgggaaaacgataaatttttgcatcaacaattgcatggacaaaaggcacaccatataattaaggcagacataatttcatcaggacttagtgttttacatcagaaagctccctgaatttgtcgtctagaaagctagttttgagcacatcaactccatcttctccatagcaaaactgtatgattgatccatcaacatcacgtactgtgtgatcatatgagacttttaatgattcgagacttttgataagacaacgctgaagataaccactacgagaagttttgactgctgtgtcaaccaacctgcagtaaatattcataagctaaataccaacctacagtaaatatgaataatcaaccaacatctaaagccaataagattgtaacgatgtattacactaaatagcatattacctcacaaacacgactacacatccagttatatgtaacagaattccatgtctcagttaacagataaggttagccatccaaatccaggaggtaaagacttatcatcaacagttatattacatgatttttttttcaagaggagaaacataaaacttcctgtntatgaacatcaaaaaggcatactaaaatacagatgca

SEQ ID NO: 49725 - DNA, 648 bp, Oryza sativa
agcttaatcgatatcgtgaggcaaatgggttcatacaagtatacactatatgttcagccgatatgatctttatgtatgcccgatgggtcaatacattctgctaggggccgctgttgatgcatggaccgaaaaggagttttcagattacaaccgagtgtacatgaacctacagggtcgcacgcttaatgggtcagaataaggggattggatggagatccaatatgagcttaattcggatagggatccgaataggagtcctacgggccttggaggctcgagtgatggatcctatatattcgtgaggggtgtgaccggcggaggcatcgcatcacgtgagaaaccctagccgccactcccttcccgagcaaaaccctagccgcgtacgggtgctagcacatctacccgtggcgttccgtccctgtacgtgtggataccggtagaggcgccgctggtttgcggtgctgatcggcgtaggagtaccgcgagaagaacgcatgaggaggagaaggtccagcccgtgtgatcgaatactttctctacatcgacgcgcgctacttcgcgagagttccttcgacttctcagcgtcttttttcgctgcgcagcgcatcgagtggtaacgatctatgacctaatacttgcctggttcct

SEQ ID NO: 49726 - DNA, 539 bp, Oryza sativa
cagcttgacttggtgcgaggaggcttgtttagctatgtctgcccggctttttttttatgaaggggcttctttggcatatacccatggacaattcacggcatagtgtccttgctctctacaatcatgacaaaaggggacatgctcttttggcattgaaagcttattgacctgggtggcaaatgctcgatcaaacacatactgattttggtcttgacttccaaccaatggtagctgtgaactaagcagcatgcttggaatggaccaagggtgtgcccttgttaactctcttgacgccactggtggattgagttgaaaacttgacttacttgaggcatacccgctgacattcttttctttctctctgttaaacatctttgacacggaatgaggtgagagaagaaacacgcccggaaagaatagaccaaaactagggaccccaccttaaaggaactaactctttttgctgactgggtgattcgtctgcttatcctgccgtcgattaaacataccacctgacatgggcccattcacaaacctac

SEQ ID NO: 49727 - DNA, 604 bp, Oryza sativa
agcttgcatggcacccctatggagatattgccccctagcgtgcactttttttttagcacatcttccttcaaaaccgcatgaaactaattaactggctatcgctaatctcgcacgcagaaagatgccgccggtcgtgtgcacggaaggatgccggcgatcgcgagccgcgacccacgcatgcaggtggagacgaacacatcacatgaaatagagacggcggcagatcgacgtaacgtattactagaacgcacgcactaacacggcaaagaagcggcattgcacagcagcacggccgacggcggtggcggcagcagcaaagtgcacacaaattgaaacacggcggcgacatcgactcaatcgatcgataaatttaatagtttggaattaacacatgagagcagaactaacataaatattatttttgatatagtttgtacataaagcagagcattaatgaaatattgtgataaaaggaattgttgaatcataaactgaatcattttcttcattcatgcaatcttcaaagtacatcaatcaaaattacttcaccgtcgaaacatgaattcggcaataataaaagggggtaacgcacgagactaaaagt

SEQ ID NO: 49728 - DNA, 547 bp, Oryza sativa
agcttgtagaatccgcagttttactcctggcagcccgaaaacatatccgtgagggcaaacctgatgggttcgacattatcgcgcaacgtatatatgaggactatgattccctagtgtgtgataaaggtgatactgcagaggggcagaagctgctggaggaaagaagagcacttttgaaatgtaaatgtctgattgtcactataatttcgcaagctggtgaggttttggataactacattcaagcacattcagaggtactattgtttttttaatggtgtaaaatcacagcaccatatgatctcttactcactgtatattttttcatattggtattaatattttaataggtaattccatggctccatgccctgatcctaacaagaatgctagtgatttgttgatttccgtggccactttccgttacttgtactatagggtagcatatccagcataaagtgaacggtcagtccagttttatctatcttcaacattgtgttaaaaccatcacaagagtaagctgtctaatgaagcttatgagttatgacgt

SEQ ID NO: 49729 - DNA, 571 bp, Oryza sativa
  unsure (1)..(571): unsure at all n locations
atgaatttatatgaatttacgttcaagtttcgctcaaatcccagtttatattttataagtatgccagcgtaaagagtcgaatttgaattaatccgagaaattgcgaaaagctactgctctaaacgatttatttttaatccaagacatatcccttgacaagggggaccccgggtttatcctttttcctaccgaattattttctaaagggaaatangaagagctaatgacaagtggggcccacatgtcataaactcgagaccaaaaaaacttctataattagatttttaaccacccggacccacatgtaatagattcaactaataaagattaagaaggggtttactattcactaaacacgtggggcccactctaatctctcctctcctttctctctctctttgcttttcttttcctttttctctctgtttttgtttgcttttcttctgctttctctctctctctagttctttcctttctgtctctctccttgccgggtgctctcctccttcctcttctttctcttcctcggcttctccctttctctctttttgtgggtccctctctaccccgg

SEQ ID NO: 49730 - DNA, 664 bp, Oryza sativa
agctttgcaaactcttgctccgtcctctgttttcctaccttgaagaggacaaacatgatcatatccatggtgaatgaatcccgtgcagctggactagtatttggggtctccggcaggagaccatccacaatgatcactttcccgcctttcgggagagcttggtggcaattcttcagtatcttgatgcagtcttcgtcactaaacataaggagcatccactgcataagcatgtatgaattaattttgaattatctccatctttatagcatgagtttagttctttctactagccaaatcctagtttcacagctatatcggagacatcgttcaaccttagcatcaattgttttattgtatttgtactctcaaaaatttcatgcgtcacaaactgtatatgattaaacattttctttctatatgactataacaacccaaatgattctgctactacgctatcatacctgcaaaagaattgcatctccattaggcacgctctcatacatatttccagctatatgttccacccctgtaatataagatcaacattcaggtcacgcttagctacgattttggattcttttattccactagcaaatgtgcccgtgtgttgcaaccggtagaaactaattaatatttatgaataatataaaactgaatgggatta

SEQ ID NO: 49731 - DNA, 653 bp, Oryza sativa
agcttgccaagacacttgtggaatatgcttcagctgtatgttcattcacctttttctttatctaagttattcctgaatgttagatcatccttcaatatggatcaaccgtttgcaacacgttttctaatattttggagtttaacatagaggatgtcctgcagatctatactgctgacctgacacaattgtttacatggacatgtgctagatgtggtgacctgattgaggtaatcctttatcactggtatactttctgtttgccatgacatgattttgtttgacttttgggcaacttcctgcaattcttggcacggatgattgaagtaaatttgttggatgcccaggggtttgaaatgatggatatcatcgtagatgtggagaactgcttgcaagttcgtttctgcctgtgtacatcataacacttatcttcatgtctctagtagcatcttgtatgttgataatattttaacaaatgtgcaggcatatgtaggttttgcaagtgatatcaatgctatagtagttgtatttagaggaactcaagagaacaggtaattatcggctgtttcgttttgcttgcttactgaaatttctttttgaatttgatcgttctattacttataacggtattctcgtgtgtattttaggttcatgtg

SEQ ID NO: 49732 - DNA, 640 bp, Oryza sativa
agcttatccatgaattgtttgttgatcaaatcggaattaaactattggtattcttatgatctgaataatgggccaagcaagaaaagatatggtttatttatgtatgccttcactcattctgctcttttgtaacagtttccttcacctggcttatctgcacaatcttcatctgatgactctttaatagaggacattaacacctttgttgttgaaatactaaatgctgagggtagcggccaacttacaaggtaatacatctcatgactgaactcttctgaatatttaaaggtgctagaattgcctatacttctagtaaaggtctatacacccaccccaccacacctaagaccttcttgattttatggacatagacatttgtgtgttgtctgctaaattttcttttaaggacaatggcattgtcttcacatgtgcatacttacgtgggtaattgatcttatgtgaccatgtgtaccatttttagattttaagaacctactaattttattttaggtaacgtttgttggcacccattatgatgcatatgtactatgctaaatgggggtgaaaattaatcacgataccaacaatgtcttatctggtggcatagcttctttattttggaaattgagatgggtaatat

SEQ ID NO: 49733 - DNA, 540 bp, Oryza sativa
agcttagagcttaggttagctgatttaaccattcagggaacacctgaacaaactagtttctaaattgtgaaacatctgaaaaactttatattttgccagtaatgatggttgaaatgtaaaggagcaaattaaacgttataaggcaaggtcatcgttatttcaagcattaaatgtgcttctaccttgacaagtctctccttgacattacataagctgtattgatcacttcagatgaatatttgcataaacctgatcaagataaaaggtgaattacggaaatgaacttgttgatgggataaaaggtatgatgacagggactgactgcagatgaactatattacatgcagcaagaccgtataactaatgcactttagaatgacctgttttgcgttatagaaattagcagagcaactaggtattgccgactagaagtctagcactaacgggaaatttctatacctgcttgcagtaccagaaaagattcatcatgcgaccatgccaatctccgaaagaaagatgggtaacgtttcgcatgaaaca

SEQ ID NO: 49734 - DNA, 645 bp, Oryza sativa
  unsure (1)..(645): unsure at all n locations
agcttagcatatttgctaaatgaaatagaaatgttatttagcgtattttctttaaaaaatagtagaaatgttacttagaatcattatacttgtgtatacagtttcagatccaccatacctgcactatttatgcacaaagagccaaaactgaaagtctcacatgattcatttcattcatgattcagacattgagttggaggcaggaatctgcctttttcgacgatgcattcctagttcagttttaggataatgtcttggtttgtacaggtgttttttgccgggccggccaagataggccaaccaaatttactaagattgatgaatatgtactggtttgtacaggtgttacctgactatttcatttcaaagaccagcttaacctgtttgttatcaccaggttgtggctttaacatattccgtatatttggaaggacggaagtgaaccaagaagctcatgtacaggaagctgctgcatcaggtcagatgtctggctccgacaattgtgcaagttggcttttttctttgttcgagcctggagacggtccanagaaaactgatgcacgtatgtaattttgaaggcatgctgtacttactagaaggcagttactctacatttcttgaaatttctttgaacaatttgtacac

SEQ ID NO: 49735 - DNA, 650 bp, Oryza sativa
agctttctccgggcacgatttgattaataaccatataatttggatcattttttattagcagcgcacagttggcagttaatgctactgcaacagccagctaccccgccatccatgtgattaagacatttcgtcacaacaaacactattaaaaatgtttgtacgagaccctccgtagattataaatggacctgaaaaatcgagaggatattttcgtatacggttttttaagaggctggctcgcatgaaaaaatcgattttcacatgcaaaaatgaggtcatctggcgtggctggtggccagctagggtttcggcttttttttttgaatttttattttttttcgccgaaaatattttcgcatgcggctggctaaggtgaccgcatgcgaaaatcccgtttttacatgtggttgcgctacctgtatgagaaaatgatgattttcacggatcttttcacacatgctggtcgaccaaccacatgcgaaaattgattttttaccgtttgggaaaatcgattttgcagcagtgaaagaagggcagaacataatagatacatcagccggtggttctcattgtgccttttcttttctcgtttccattctttcgcctgcgttaatgtaagccaaattatactcataactagggggcagaaa

SEQ ID NO: 49736 - DNA, 633 bp, Oryza sativa
agcttaaaaaaaattcaatttcttcgcattttcatctactctttttgaaaatcttcaactcttcagacatgacctttcgtggtcctggatgtacggccgcgctgacgccgtacactccaattagctaggcattcgtcaatcccgatgataaacttgatctaatcaccttaaggtactactacgacttccagcccatcttgacatcttcagatataagctgatctcaactctgaaacttgtttagatcggcaaggaattcttcagacagccaacctaccagctgctatctagcttaattggtccttcaattacaacgttaattaattatcggtacctctctaaattatatctgaaaaccagatcaatgtaccacggcagaatctccaaaagctgataacgaagaagtgatcgatcatcgagatcgtgcgccctcccctcacacgttgtctatgattctgaacatctgatcggacgctgacatgttgttgatctattgattagctatatagttatcattagtatcacaaatatctgtgttactttgtgagataaaaggaaaagagaaagagagctggaggaagatatatatactagtacatcgagtctcatgggtttcatgatattgaagatttg

SEQ ID NO: 49737 - DNA, 489 bp, Oryza sativa
agcttggactgctactgcttaggcaccgtaattagtcgaccgtgcggtttttttttttcaattcaattcacttgaatcacggtggctgtgggttatggctggcttacctatctattcacacagtgttagtattaccgatgagaaaatgattatcagcggcctaactgagctatgtcgcttgcatcaactaacatgcatgttgttcattcggaacatgccagtatattgagcgcattcatgatatatggatccaagtgttcatcatatgagcagtggcatccaacgaaccttccattattcttctttcaaccacaaggacaacttatgcacacgcctacgctccacctggttacactatagcccattaatgcgctttgttcttgctgataaatataagaatcttacaagctaaaaagactaactaagattgctcagctgctacaaaataaactatgaatgcccacccaccaccactatttgatgagtatt

SEQ ID NO: 49738 - DNA, 529 bp, Oryza sativa
agctttacctgtttgcagccaccttgagccagaaaaagaggggactttttcttctctgcccggtccttcaaagacagatgggcgctagctatgaatccacgatcctcgattgatcattcttttactatatcaaaaccactaattttcgctactgcccacccgaagccagtaccgttttttcccacattgcggaggcctccgtttttggttttaccatagactctttaaatccacagccaagatctgtccacatgaataatgccagggaatccctcaaatgagagcacaagtcctctcaacaagtgtagattggtaatgaacttatttatggaggctaaacacgccctatgagggtgccgttcacatctaggggcccaaccggcagcccaaggcccgatcatcctatacgctccaacgacctatgcatggtccacccgtactagcctctgcttttctttcgggacccctgagagtggcaacccttctgggcttcttatggtgcactttccgatcacgagggacaaaatgc

SEQ ID NO: 49739 - DNA, 645 bp, Oryza sativa
agcttcttatattttgggacggatggagtaagtgatatgttaagtaagctttctccgtcacatattacttggcgctttgactttttgtttgcaacatttgactattcgttttatttaaaaaattagtgtaaatataaaaaatgataagttatacttaaagtacttttgataataaaacaagtcacaaacaaaataaatagtaattcatattttttctgaataagacgaatgatcaaacattacaaataaaaactcaaagcgacaaataatatgggacggatgtagtatacatgaagtaggcgatcttgggactagaaagtggataatcatatttacatacggatctcttaaaaaacggccatgaaaattgatttttcacatacggttatgggatcgcctacaaaattgacaatataaattttagagatattgacctaaaataacaagcgatatcttttgcttgattaacgaagctcaatttgagaggcttttatatcccggcaaatatacgttactgtattcattctgtttcatattccctctgtatctatatttcgtaatattcgattctattttcgtatccaagcttttcgattttgaaaaaaaaaagaatacgatagaacagtttccgtccattttgtatct

SEQ ID NO: 49740 - DNA, 608 bp, Oryza sativa
agcttgtagaatccgcagttttactcctggcagcccgaaaacatatccgtgatggctaacctgatgggttcgacattatcgcgcaacgtatatatgaggactatgattccctagtgtgtgataaaggtgatactgcagaggggcagaagctgctggaagaaagaagagcacttttgaaatgtaaatgtctgattgtcactataatttcgcaagctggtgaggttttggataactacattcaagcacattcagaggtactattgtttttttaatggtgtaaaatcacagcaccatatgatctcttactcactgtatattttttcatattggtattaatattttaataggtaattccatggctccatgccctgatcctaacaagaatgctagtgatttgttgatttccgtggccactttccgttacttgtactatagggtagcatatccagcataaagtgaacggtcagtccagttttatctatcttcaacattgtgttaaaaccatcacaagagtaagctgtctaatgaagcttatgagttatgacgtaagaccctccgctgctttgagaagctggagccctctattggtagggatgtgaccttaacat

SEQ ID NO: 49741 - DNA, 343 bp, Oryza sativa
agctttctcttatatggagggtcaaaatgcttctaatcgttgctgaaacatgtctgtttgatccaatactgacaaaaaattgccatacttcggttaacggtctggctttctaataggctgtgctgtaaaagccaacattcatatttctaggcaacataatttaaagatgttagcttaacaactagtgcttattctgagataatacgagcatatgggcctttatgatttaggcgagaaagcaacactgttttactacattctgtactattggacagttatatatggagatatattgaactgactacacatgtctttacctacttgatatgactacacaatgatt

SEQ ID NO: 49742 - DNA, 663 bp, Oryza sativa
  unsure (1)..(663): unsure at all n locations
agcttacattgcccattgcaagtagccccttgtcaaagaagaaaatgatcctcatttatgagaagaatactccaaagcctgtcagccctatcccaatctctgcaagatgagattcacaaattaccaattgaagtgggtatgggtataacgatgatgtggcatagcaagaaagcataaaagaaaatccaaccaatggaataataccttgtggggatgggaaatgtgatcccatccaggataaacagtgctctatgccctgaagagcatagttccaagcatgagatgaaaaaaattgaaaaaatgtagcagggtgcataatgcatttgttatcgcaaaaatagaaaaatgctccagaatagctacagggggatgagcaacgaagtgccaattgccaatggcatgaggtaggcaatcaattaaattcaactcaagatcgtgccaggaaagtatagattttcagggaaaaaaaatactgacgaaaatatttgacagaaaaaatgtattccttcatgaaaaattgattgccacaagtaatacattgtaacatactagcatcctagcttccanaatctgctctatgcctaactctattggagtggtatatgatgcataattgcatataacacactgcttaaacgttgagaaaattcctagtgtactcct

SEQ ID NO: 49743 - DNA, 649 bp, Oryza sativa
  unsure (1)..(649): unsure at all n locations
agcttattcaaagggctatccaacccatgaacaatccatgcaagaaacactacttttctcagggagaaagggctcacactccaaaggatactccaccggacataactacatgaggctacccaaacctataggattcgcccacatctctctttgtttaggacttaagaatactcaccacacttggctagacaagcccaccaaatgcacctacatgcatatgaactaatatggcgcaagatcatccacatgctcacttcatagacccctcttgatagtacggcgtctatctagcaaatccggtctacagcaaacaccaagaccgggaaaggactaagaaaacactcttagctccattatacctttgccttgcgccatccaacttggggtcaatgcttgagccaagatcaacacttgttaccatccggctgaaccatgtttatgccgaggtctttaccatgctttgtcaagactttattctcatcacaagcttgacttcattcatgccaacatgaccatgtccttggcttggtgaccattaacccatggtgtcattcattaacctcatcggagagggacctattcctttttacatcttaaacgagaacattagtctcaacaaatcggntctcattcttcacttgatgaccaa

SEQ ID NO: 49744 - DNA, 563 bp, Oryza sativa
cagcttatttgattggtgggatgacgattgattggatgaaagcaccaaacttctttgttatatcttcctccaaaaaatgcccgcgtgttgccacgggaaaacaagatgagaaaattggcgagaatttgagaaagatttacattatgtaattaaattaaatacacctttcctggaatacttgattttttaagtaagtaggtgttcaacttaatttagaagtgaagtaagtgtggaaataaaatgatatagctgaatttaattgttaatgaagttctccatgattaattacactctctggaattttcttgatattttcagatctcaattgctaactttaattatacaaacatcatctaagaatttatttctaaaaaatctgaataaagactctgcattctctctacgccaatttcatcccgtttccttcctcagcctgcagcctagacggaccacttttcttccttctcctcccctcttcctcggcccgcaagtacgcatccggcccagcagagcactacaagtctaatcaggcctcctcgctccttcttttactggcatgtggg

SEQ ID NO: 49745 - DNA, 642 bp, Oryza sativa
agcttatcagggagtttttctgtgtgttatttgaggtaggacattatgtatcttggttcgctctacttcttaccaagtgatctggcaacatatctgacaattgagagggttcttcgagttgcttctcatttgattggtttgaagtggagacatcctcctcgccatttccatcagcttcatgcactccctttttccctttgcctgccccctttgtctgcattttagaaaaataacaccaaaactggaagatgagactgtacttacacgtcaaattaaaagcagcccatgatgcacacatgcaattcctgtttgcactgtaacaggtatcatataaatttcgagaaatttggctaatatgtataacagataacaagtacataaaaaaggagggcttgtcacagttgatgactgcattaaaagggcatatagtgacaaaggtcccctgaacaaacacgccagtaactgtagagctaaaaagttctatttatatcaatcagcccacatatgatacatttctggaagaaacaacaaaataccatatccaaaagccgacgttaaggttcaacgggcagaaatttgcatttcaccgataaacatattcatgcatgggcaactcgtaccagtgctttattaacccgaaaa

SEQ ID NO: 49746 - DNA, 653 bp, Oryza sativa
agctttttgtgtgaactagctaaatgcccctgcaacgggattttttttattaagaaatacaatcaaagacagtagaaaagtaaaattattttcatcctccgatttatggtttggtaatattttttatatttgctggctcataaattgtttcatgttttattttttagctattctaattcgcataaaaatatggttttaaatatgttagtatggatttttaccatttgaactattattaaacatgaaaaaggtaaaaaggaaaagaaacgaaacgaagtactccctccgtattttaatgtatgacgccgttgacttttcgatcaacgtttgaccattcgttttattcaactagggtggaagctagcctgctagcaggttgtgggaggcagaacgctgtgggagggaatcagggcattgttgaaagactcccttcggtgactcccttcggtggccccacgtttcagtggttgtgggtggaagaaccaccaccattgcttttcgctactgtgttttaattttgtatagatagccgaattactccttcaaattttacttaacgcttggtttggcccttaacgtcaaatttatccatctttgatccaagttttttgttttagtttcaaactcggtcttgaacctactaaggaagccac

SEQ ID NO: 49747 - DNA, 641 bp, Oryza sativa
agctttggactttcttgagtaagattaacatgaataatctacaggaatgttacagtagtaatactcagtttcttgaagggcctgcgaaggaataaatgcaagttcatgaaacccaaacctgattgccattgtatctgatgacgatgttcttgtgagtgaaaaggaaatatttgttatcgctatttctgtctgcctctccaacaaaacctgttaagttataagttattagactatatataagatctttgagagaaaatagtaatgataaaagaggatacataccccatagaagcaaatcatctttgatagtggcatagaatttcccagaagtgtgcagaaaaggataataagtaaatcaataagtcacagtgcgtaaaaatgtttatgcgtactgaaaaatggcaagtaaacacaccagcggagtcaagaaggaaaccagaacagcttaccaatgaagaattcaaaccaatatgaactctcaatcgcatcagataactgtttggccttgtcaggatcaagttcaattgaacaaatggtacccttggcaacatcctctgagacaaaccatgatcagtcttaaacactgcattttacctttccgtttcaatgttcaaaactgaagcagcataaaaagaacaatg

SEQ ID NO: 49748 - DNA, 593 bp, Oryza sativa
agcttagtcttagggctttgcttcttccgctgttgtttacagaggactggttcaccgatagaggagttgggtttgtttttgttaggttgtgggctggctctatttcctgctgggccgtactgatatactagttgctgggacttggagaatccattcaaatcacgactcgatcttactcaagtgaagtcattttcgtttcagcaatgattcccggggtatcaaaagcctatccaaactccaaaggcttgaaaacaaaacttagatctgacaaaagctgaagactcgatcaaactgtataccccacattcagttccgtttacactaatatatattacagtatttagtttagttggaatcagtatggtaatgtacatatgggatagtttaagagcaggtacgatgagtacaacatctacttctggagataagagcaagtatagtaagacctagtcagtaggctgaaccatttcccacgtcatcaaaatcctatatggcggagtgagaagagaagagagagaacggagcgtgcggtcccgctatcgctcggctgaagcgtattatacgagagaaaaacgcccgctttccgcccgatg

SEQ ID NO: 49749 - DNA, 479 bp, Oryza sativa
agcttgcaatgatggaagccaccttcatgccaaataacagtaaacattaaatcgagaacttgtgccttctaaagcaactctgcatctgccatatattcggtatcatctaatgagcagttcagcaatcaatcaaccctactttagttttctacacccctgggttgaaaatagcatttttgatgacatggtgatgtgctactaatttcattatactagaatctattttctcaccagcctaatttctctcagcatatatatgtataattattcctgaatagtgaacactaaacttctcaacaactgcagagtaatcactagctcatttttgcagtttaagtacaacaaatcaagttgcccaacagctaaagttgatataccaacttcagaagttgagatcatctcatattcagcatgaacaaatcatttaaaaatacgtactagcatttaaatttttttctgaacaactgaaagtctgaaac

SEQ ID NO: 49750 - DNA, 545 bp, Oryza sativa
cagcctgccagcttgcccgtaggccaacaacaaaggagcgacaaactgaagcagaattgaaagggaaaaacacggggaaaagactaagggacaaagggggaaacaatttttgcaaacaatcataagaagaaacaagtgggaagggagaccaacatcgtgaagatgcaaaggaaaggcctgggcagcggataaaagtgctgcgcctgaacaaacggagggaaaccactaagataaaaaggataccaatgagattggacaaaaaaaccggctaccaaaaaaagggatggatcacaaaaacggcacaaaaaaattacaccggccaaaaaataccaatctgacgaaaaaaacgacgacgaaaaaaaagaagacggacaaaaatcaaaacaaaccggaagcgaccaagacaaaaattagaaaacaaactcggatgacctaccacaagtttgacaaaaaacatccccaagattatttttaacaccagagaaaaggccctccatcccaaaaaataaggcgcctcctttttcagaaaaatcaaacctgaaaac

SEQ ID NO: 49751 - DNA, 675 bp, Oryza sativa
tgccagcttcgaccttggcccaatggggttcccccggttcttcctttggctcttcttaaataaacccaccctggattaaaattttagaaacccatccttgttttaaatggtgatttttttaattttaccaattttaaaataatttttttattaacttccagtccaaggccgcttttttaaaggccaaaaaaagttggccacaaggcagtaatttctttcacttaacaagtcttttcgtgggcaaacatatcccactttataccccgaaaaaaactgatgaaatgatatatttgttaaaatgagcatgggtaaaaaaaatctactagtactattctgtagtactccatccaacaaagagtactaacgttcaacaaagaatgacatttcatcatgtactccatccaacaaacaaccgaacacggagtcacaaacgtcgaaaggaccattacaggattatcttcacaaaatccacaatttcatgtgcggcgatatgcccaggaacttcacaatatttgttattcttttctggcgacatgctttccgaactcagcacatttttctccttggaagattacacttacaccagatcagcagaataaatgataaaattgcctgagaagatagggaatggatacagcacaattttttttttgaaaaccatgacagcacttttga

SEQ ID NO: 49752 - DNA, 617 bp, Oryza sativa
agcttcaagttgcttctttagggcagcaactttagattcagcttggtccctttcttaaatatggatatcaatgaccagattagtaatatgcaacaaagaccaataaaattacctaaatcaatttgatctcttacaacaatttttacaaacgcaatttagtactcagaaataactttgcagattaatgaatggaagtgtggatcaattaagtgcacaggttctaaagtttacctacaaaataactaacatggaggaatcatttagttaatatgcgtaaattatagaaaggattttgtgtaacacagccacacaggaagtgatgctttcaagttgcttttctagaaactattatagctttatcttttctttctagtcattatcagatcttaaagcagcagactattcagccatcggtgtgcacccaacaggacggcatcaagctaaaaagcatgctgaagctcctatctatgttttattttgtttgctgtaaaaactacatgtcattttagccctttctggtaataaaaatgggggaagggctaccttccttttttcaaaaaaaaaaaagatgttattagaaaggattatttaccccaaaacagcctctttctgtgact

SEQ ID NO: 49753 - DNA, 419 bp, Oryza sativa
agctttagatctttcatgatttaaaataataaatcatgagtcggtttcggcttgttgtctgaattacatatatattttttttattttagaattatatatagctggtcttaagatttaataattcacacttggaaaataatagatatatgattctatttggttattgagtactccatccatttcacaatgtaagactttctaacattgcccacatacctatgtatctattaatgaatctcagcacatacatatgtgtagattaattgacatctaaataaaggtatgtgggcaatactcgaaaggcctactttgcgacacggagggagtacgaatcatactagctgaattgaaaccccggccctcgcccggagatacatggatgaatggatgttatacattatggaagtgataggtgtaca

SEQ ID NO: 49754 - DNA, 620 bp, Oryza sativa
agctttggaaacaacacctttagagaagactgaccacaccaaacatctgtctttattatacaccatccctttatgaacttctttcattactaatctctccaacaccactctacactcatgcagtcttttccagaattgagatccccctttgaagaactatgaaaaaaaagcccttgacagcttttactacttttgctgtatgttttgggatagaggaagtaaattatacgatgagttcgtaatttctatgggtgaacatgtctacatgaagccatcaacaatctagctacttgtaccatccaagcccaatcaaatactctgataaattatgagaggcaaaacaaggaaattatcactattggtgttatagttgtggcacctgcatgacttcatttattgggatttaaattttgatatctaaatttagttgtgtgcagttggtgcagagctggggagttatatttcctcttactatgaaaaagaattcaacgacaatatatacttgggcccctgaattaattatctaccacgaattcctagctgcaggtggtacattatgagtacttgaaatttgttgatatggcgagcattgcctcttcgattaagatgatttttaaatc

SEQ ID NO: 49755 - DNA, 524 bp, Oryza sativa
  unsure (1)..(524): unsure at all n locations
gacccgcaggccgccagcctcaaacatcaaccttaggggntaccacttgagatacacntggggccttttttaaaaaacgacccccggcgacaaaaggaggaaaacgcaccagaaacaaacggacggacctaaaccaaaaagaaaccttacaacaatatatgcaaacgcccccacagcaaggcacaagatgacttagcgcactagagaatggaaccgaggatcaattaattgcacagctactaagagctacccacgaacgaactgacccggacgaatcacccaatacaaacgcgtaaaataaagaaacgattaaaggagcacagccaaacaagaagtgaggctcccaagcggcgctactccaacacaagcaagagcacaaacgcccaacaaagagcgaaacgtagcacggcacccccatacaacaagcaccggaccagcgagccctaaaggtcggagggagcatacaaggaagtcacgccacccaaaaccaacaatctcaagtaggggagaatatgccaacgaac

SEQ ID NO: 49756 - DNA, 596 bp, Oryza sativa
cctgcacgcatgccagctttatgccttaccagatgaagtgccaatagcccaatatatacttttttttctctgctgtcttgactgacacatgtatatgcaaaatggcatgttcctaacttcctttcattggtctaatctaatgacaaaatggaacatgccatgagcttccaaggcatgccatgtacactatgacttgggaatctagggaagatcagaagttgcatcaaccaacaagttttcacagtgtttgcgttgatttcacatagcgaaattctactgtagctaatctgattagatgaatgttattacagggatgagtgtatgaaaccatcttttgcacaacagtacatgtaaaatctttcatgttcgaagatgggcgaccatgccttcgtgagaaaaagcaaagcacaagtcattctaccaagcacccccatacgattgcattgccaactttcacctttactctgctggtagctcgagtagttcgcggataccttcacatacctgcacgggtaattgcatataggttagctataatccaaagtactgcccagtttcacctatatagtgagccactagtttagtttttttacata

SEQ ID NO: 49757 - DNA, 600 bp, Oryza sativa
agcttcaaaaaaaacctcatctctgctgtaactgcacagccatctatttttaatactctgaaagctacagagaactaaacagtgaccagcattgaatcagtccaagaacaataatgttcaaaacatgaactgctcaactgcccattggacctggattgtgtgccactaaagaaggatgtgtgcatgcttcctgccctctctaactagaatcattaagagatgcacataagtgtcagcaactgatcacctctctatgactatattctttttccgcgcttgatttcttcaggggaccatatcatttctggtgtgaaagacatggatggaatgatctctcttaacgaactgcgtttacattaaatatgtcgtgtccgaactttggtactgaaacactcaaatcacaggaaaactgataactgaacttccatcatcaaaaacactcaaatcacaggaaaactgataactgaaactccatcgtcaaaatggactttgcaagggaattccatgtatccgatacccgaaattgaaggattgatacataacctgaattttgcgaaagccatttcgaaggtacaaaatgaatgaattaactactataaa

SEQ ID NO: 49758 - DNA, 621 bp, Oryza sativa
gttgaccagcaggcccgcaagctttataacgcaatttccgagaagccaattgagatggattctgcaatttttgattctgatcatacctccaatcatcggctgttatcatggaaacttatactttaatatccttcatcatcggcttgtaccccgatgccccttgagccaaatcattagctccaacattttgttcttgagacacatgctttaaagttactagccgaaatccatccatcaactctcggcacttctcattgtagatcatcaatgtatcattcctgcattcatattctcctgccaattgattgatcaccaacaacaaatcacccataatctcgatagcatcggcttcaacttccttaagcaattgaaaccccttgagaaccgcttcatattcagcctgattgttagttgcataaggtttaataatacgggcaaactcaaaacttgccactcgagggggaattataaccaagctgataccacaaccatgagtgcacacggatccatcaaaaaataaagtccaaagcacatgatgtcaactaaccccattgagtcatcacgatggtccacaataaaatcggctataatttcgcacttaattgccttcggtgactcata

SEQ ID NO: 49759 - DNA, 399 bp, Oryza sativa
taccttacacagcgggggaacacaactccttgcttcaatatactatgcaaggtaggctaaagtcacaactactaagaacgggggaatggagggtgagagcgcgcctggaagctttgctctgaatggggtcttcggtgatggcaattgtgtgaactatttcaggacatcttatgaaatatttgtcatgaataatattctttgtacacccggaggctactagtgctaatattttataagatactctggatgtcaattttattttaacaaggattcttatacctaatatttctttgaaaggcaaacttactatatatttatttccaaaattagttatggcctctcttagttgaattattttagcaggattactgtcttttaatgttatcaattgctctttaa

SEQ ID NO: 49760 - DNA, 651 bp, Oryza sativa
  unsure (1)..(651): unsure at all n locations
agctttatcgaagcaaaataagtcagacgataatttatcgataatactggtcggttttacataaatcgaccagagaataagatattactgttgatgcttctgctaattcattatttatatttataatttcaattttatctataaaactaactatataaataaacataaacatgccgttgtgttcgccctttgattagcaactctggttttctttcttagctgaacaatctggttatagcgtgcggactgaccgttaaatttctccatcttactggataacacaccatgagctgctacctttaaaacacctgaatgtcaacaggttaactcgtgccatatcgttataatccctttgatattagatgcaaattaaggtcatatatagccttatcgataacatggttaattttaaggataagaatatgcctgctgtaatagataaagccctggatttcattggtgccatggatgtatcagcgccaacaccaagttcgatgaatgaaagcacggcgaagggaatctttaaatatttaaaagaactgggagtacccgcgagtgccgctgatattacggcgcgagctgaccaagaaggctggaacccctgngtcaccganaaaatggttggatgggcaaaaaaaatggagacaggtg

SEQ ID NO: 49761 - DNA, 433 bp, Oryza sativa
  unsure (1)..(433): unsure at all n locations
attttttttttttttttcaagcacaagcagggttctgaacttggttgtaattaaaagaccaactcgcaatatagcttttctgaaattgcggagccagtcatccagcgattgggtaatatgcaagcccttattcctcggtgcctccggggtggcaactggcataatggacttttttttaaaaaaagataatgattcagatagtcaaattgcaatttggtcttacaatatcctccttagaccttccattattctcttttacatgttgntaatggcattgtgacagtctccaagtgtatatttgatactacctctggttttttaataaatgacatcgctgatttttttaatgcaattgttttttttgtgagatgttttatcacacaaagtactttaagcatgaattacaagtaattgcaccgacggtgcatcaact

SEQ ID NO: 49762 - DNA, 595 bp, Oryza sativa
  unsure (1)..(595): unsure at all n locations
aaaacanaccggggtattaataaatgattcctcaatcatacgcacattatatgttgaagtccgtacgttctgcagctgtctataaatatgtagctcgctacttttttctttcctattttatcttctcgatatatgcttatatatagttagcttatagtctgctattgtacttgcttttgctcttagttcaccgtctttcctttttttaattaagcctcatattaattaattacatctgcatgcagattggctaaggagaagcgtgcgtcttctgtagcgccaacctttagagggattgcatcgtcatggccgtttgcttcttgtgcaattatgttaattatggatggatatcagaagcgctttaagaaggattgtaagaatgcagcaacagctaagaatccttaattaggaacagttctaaattaaattagtttgcttcaatcccctggccaaagttcataccaacaacaacttaattaattgatgtgtctttctggatataacttgttattaatgatatatacgcgtccatctcgtctggctaaagcctaatactaaaaaatgtaatacctgttaaatttctccctttttctct

SEQ ID NO: 49763 - DNA, 610 bp, Oryza sativa
agcttcatttcctcaagatccaatatgagacattctccatgttgcctcatgatagtgtgaatgacatgtatgggaggcttaatgtcattgtgaatgatctcaagggacttggggcaaactacaccgatcttgaggtttcccaaaagatgcttagggctctaagaagtatgagacccttgtcaccatgctcatcaactccgacatgtcaaggatgacacccgcaagcctcttggggaagatcaacaccaatgacatgtacaagttgaagaaggaggagatggaggaagcctcaccttccaagaagtgcattgctctccaagccgaagttgaagataaggacaagggcaaggtgaatgaagccaatgaggacttggaggaagagattgtccttcttgctagaaggttcaatgatctcttgggaaggagaaaggagagaggaaggggctctaactccaataggagaagaaatagaagacccaacaagaccctctccaacttgaggtgctttgagtatggtgagaagggacactttgcttccaagtgccctttccaggatgatgattgagacaagtcatccaagaagaagagtggaagctacaagctcatgaag

SEQ ID NO: 49764 - DNA, 659 bp, Oryza sativa
agcttttcatgatatctactctgcatgctcataaacaatctatctatctattatattataaaaacagctttgaaaggaggcaccacattcgctgtgggggctagaaattcccacattaaacggagaaaaaaaagaaaaagaaaaggagagtccaagtagaagtacaatataaaaatagctgaaattcggaattaaaaataagcaatattgaaagaagtctccatataagaacccaatacgagattaatcaaaattcaaaataaaaataaaataaaatccaaaattagaaaaggaaaggagagtccaagtagaaatacaatttaaaaatagctgaaattatgtcacatcctgatttttgtttcaggatttataaattatttaataaattataaatagaatttatattaaatgatctttaattttcaagtgaagttaaatgtgggaaataaaatttcctaaatctaaagcatggatggatttaatttttattaaattctccatgattaagtcaactctctgaaattttctcggatttttcggagctcaattcctaaatgatacaaagaacagttcagtaattatttgatcattaatgatctaattatatttgttaagaatttttcttgcttaaaaatccttaaattataattgttgttaaa

SEQ ID NO: 49765 - DNA, 650 bp, Oryza sativa
  unsure (1)..(650): unsure at all n locations
agcttgccacaaatctccggtcgccaatctagcgtattgattcttccaccattgttccttgtacctcgtgaaattgaagataatgccacgaaatcatccatgacgcctctcttcgatcggcctgctcttgcatcgccaggcaacaaactaggccagtaatcttgagtgccacgttggccacggtgatggtaattgctgcttcgtctcgtctggctgtcagcaatcatcttattcagtgacggatcagtaatcgtattagagcatgcaagcacgcttaatttagaagtggtcagtgaagccagtaagtgtttgatagaatcagtcaaggcgatcagtaagactttattcagaactcggaaaaggttaaaattaaatgtttggaatcagggacttgaagcattgctcagattaccaacaattatgcagtgtacattcactgccggagggacatactgtttgagttcttccatgtaaacataactcaatatcttcgggtcatgtaaaatctatctacttatgaaatctgtggaagaagtgtgcattcggcttggggaatcgccataggtgaatgctanaaaaaggcattcagaaattggacccacagtggggattgtatcaacccattcaatgccattttctggaccaacgta

SEQ ID NO: 49766 - DNA, 167 bp, Oryza sativa
  unsure (1)..(167): unsure at all n locations
aagcacaagcaggggggggaaccngaggggaannaaaagaccaacccgcaanacagcggcncggaaagcgcggagccaggcanccagcgaaagggnaacacgcaagcccccatcccncggagcccccgggggggcaaccggcacagcggacnggnacctaaaaaaag

SEQ ID NO: 49767 - DNA, 594 bp, Oryza sativa
tgcagccctgcaagcttcgtgaagaccttgagcaaggcaagtcacactttgatcaattgtttttattattagaaaatcattattattgtgtttgcaactttcattattagaatcacacacttaacttgcttggcctccgtttgcgtgccaaaccgacggacctacccagtagttgcactaattcctgtaggctgtactaccctgattccttatcgctccacccttgtggtacttcggtatccgtgctctttgagcgcgcataccaaatatcccacatacaccgttgattgtcgaaaacttggaaaatgggtttgtgaagccttgaaaacccgacatgtggggtcggtgtgtttgaaaataaaatgaattgcgaaaactcgcgatgcgggagccgtgcctacatggcgttgtcccgtattcgcatataaggaccgattcctgtgggaaactcatcgagcataatcaaagtgcaaccacaaggtggaatgggacaccctggctaagtaactagtcggttcagggaaacctcgcatgccaatagttgggaacaccggggccggggtcggacaaaccaggttcctgtaaggcaaagac

SEQ ID NO: 49768 - DNA, 464 bp, Oryza sativa
agcttgcaactacgcgttatatattttattttcaactgcgctaataatgttttatccgctttctctgtatgcagattaaaaaaatacataccatattttttcccttgctttgctatttgaatgcttacctcagtgcaagaacagggaagaggtttgattgctaataaaatgagtggaacaaggccgtcatggaagaatttggggtccaaagccacaccttctttctcccataggaacaaaggtcaagagctgccggcagggcgctgcttttaatcctgactgatggctcaaaaaaagttggagacgtacttgaaataaataatttatgtatttcgctatttcgaatacctaaacttaagcggtgctaatttgctaatccaagccttatcaataataccaacacgccgtctgatccaagattagcaacctctctttctctcatagagggaacctcactgacgcat

SEQ ID NO: 49769 - DNA, 475 bp, Oryza sativa
cagcttgtgacttgaactaagctcgctggttgaaagatatttccccagatttttttttttatgcccacttcgcaaatcgggcgtttgcttcgcgattatgaaatatatcccccagaggaaacgatttgaccaccgggaccgaaggaacttttaaaattgtgcagataatttcctgacggtaagtaagacaccatataataacttttgaacctgaggaaaccctgtcttgaagtcgggtaaaactctccctgacaaaataaattggctcgtggactttctgaatatgggctttctcttgacgctcgaccaccagtaccgtcctcacaacctgggagggcggctacacatataacagtagcggtctttgcagatgtggtgaggccctaccctggtggagtgggtgaagattaatctcaaatcttcaaaggctttctgtgcttctggtccccactgcaaaaaggttgaacttcttcag

SEQ ID NO: 49770 - DNA, 444 bp, Oryza sativa
agctttaaccagctaaatactatgacagggaatacacctacgagttcttatttttattacgcaacactgacaaagggaagcaattttcatcagctggacaaaccaatgaaatataacgccccttgtcttacccaaccatacatgcaagaccaacacacgtgaaaaatattccttcactggaacaaccaatgaactcgttcaaccgcaccctggcagcacgcccaacacgaggatgaaaaaaaaaaattgcgccaagacgcaacaaaaagcgggtggcctaaactacatcaaaacaggtactttcaaataaacgacacctatcaacgcccaaaaaaaccctaaaacccactgaaagggggatgaataaacttcatgataacaaaaaatgaacagcaacccgaccaacccaccagccttgaactatagagatgcgaccgaaactcg

SEQ ID NO: 49771 - DNA, 522 bp, Oryza sativa
gcgcatataatatggactcacaaaggaagagaccatacgactctttttatattagggccaagcgtcggagggcacaaaatcggcatttggattctttgccctccagcctctttcacaaattgtgcagcattaagacgatggttctcaataaaagccaaaaaaaaaccttcaccaagtgtagtgcaaaatgaaagcctgctaaaacgattcaatagtgaaaacaccctcctttggcagtcgccaaacaggctgatctgcaacatcagacaatgcaactgagggccataggttctgtaacctagggccagtcctgtagggtccgggcataaagggacccctcggaactagagccaccaaagccttctaccactacttgggcaaccaaacaccccgctttgataaaactagatcatacagcccacggaattggtcagccagaagaggggacgcctccccagccacctattcgtccaaaacaagggaaacctcccacactctaacgtgagcctaccaacccgaaaa

SEQ ID NO: 49772 - DNA, 568 bp, Oryza sativa
agcttgtcgctcacttgcttgaattctatgcaagatattgagctactctgtggtggaaatttgatttggcaaattaaccacatgaaatatatttatgcctataatagtacagaaaggaaacatgacaacaccttgaagtgttttcagaaagtactaacatgtcaaagaatggccgaagaccattgtcaaacccctgatcagtcaattgctcatagaaatctttgagctcgtccttaatgagcacctgcttcactatccctctctttctcgccagaaaatcgaacatttgcaccgcaaactcgtcggacccatccattcctgcacaatcaatccaaataatggaataaacaccatttctcctaacagatgtatgaacaattcaaattcagctcaacttctgaaaaaaaaaatttaccaatgcatttcccaaatcttgaacggagcagcacaccatccacctgcagctgattgaaccgcttctccaccgcggcccagccgtcattgccaacctttgcagtcacaaactgcaatcctttgagcgccacggcggcgctgctcttggtcctgt

SEQ ID NO: 49773 - DNA, 596 bp, Oryza sativa
agcttttgtttaatacattatacctgttttaatatcttcgattacagcactttttattattagccgatagacgctagatctatctgatcggctatgctataaacatatataatcctgttattaatatatatgtcgaaataactgaattatactatctcgggctggtgaccgatctatcccaatcacttgatttaagtatatattaatataagaattatatattgttaatatctacagccgatcgaatagatttagttccttactatctatttataaccgccgattgattcatatattacatcggctcaaaaataaatgatatgtcatcggcacctagccgattggctatcatttatagatttaaccacgaattcttgggttctatttcttgctgattacaggatcaaatcaactggcacgctcataccattccaaggagagctttggacctgcactggaattaagcagatctctctggcctcgtgttttctatcaacacgcttttggcacccccagtgggacccattagaagtcagacgcaatctcttctgtcgcgtccccaaacgacccctaaaaacatcctctagaataagccc

SEQ ID NO: 49774 - DNA, 400 bp, Oryza sativa
ctttgttcagatcaatagacacacaccacaccagaccacgttcagtttttctctctacgagctggagggccctatgctcctattccgccctgccttccatgtcccgaccgcaccggaagtgtatcttggcaaccgcaagcgatgcactggtacgcccaaccgagcccctgctcgtcgcactcgcagcagatgtacggtcctcctcccgacttgtcagacacgatgcttagctcgtggcggtggccggtgtggcgcagcgacggggggtaccccttggcatcctcttcctacatctcctgcagcagcctgatctgctcgtcggtgaacgggaacgccatgtctaagtagaggttcaccaagttcctcacctacctggtcaccgtcttggcgttgggcccaa

SEQ ID NO: 49775 - DNA, 596 bp, Oryza sativa
agcttcatgccttttgaactttatgctatgcaaatgcatgcataatgtactcattactcaacagtaaaattttactctgataaagtcagctctgatttcccaaatccatttgttatgttccttatttccagggaaataatctatatgctacgcaagaagctgattcacattcactgtttctggaactgtctagacttttctttgatggatcccctgatctgcactttgcgaactttctgcacatggtcaaaaccatggcagattctggcaccacagctgaacaaatagagtcttttatcgttaataatcagaatgtgcctgatttgcctgagcatgaagctgtttggtccttttcttccttgatcatagcagaccaagatgttgattgccaaagaactgaattccaatctatatgtgacaatcagaaaactgaaatccgatctacatgtgaactcaatatttccaagcatcagagaacgtctggagttgcttcaagttgggcaccaaacgactggaaaacagccccagatttcataacatctcacaataagccagttacacccaatcaagagacaaacttgaacaatgttgtacct

SEQ ID NO: 49776 - DNA, 398 bp, Oryza sativa
agtactagcatgacagataatgatcgaatacgagcctttaaccccctaataatcacttgttcatggcaagcatccaggtcgttcatggcgaccaacctccggcccaaaaactatactccccgccctgcaacctaacagcaggcctgcgtacttactggacccatccatcccacgcggaacccatccacagccgggtgaaaaccctgtatctgctaccgcatttccgaacttgtggacttgcgttcagcttcggacaagaaagaaagcccgggtccagtaacctagccttggacggagcgcctagccaaccactggcagactaccgaaccggatcggtctccaagcgacagccggttttcgccaagccttgttagggaaaacctgccatgctttcgagc

SEQ ID NO: 49777 - DNA, 644 bp, Oryza sativa
gtcgagctgcagcctgccagcttctacactttatcttggaattttattgaggagggtcttctccagctttttgtttttttctgccccaattcagggcaactgggaagaattagccgagctcacattggtctagttcccaaacctggccaggagaattccgtttatggcttttcacccatctcccttccaaactgcccatttaaaattctttcaaagggttttgccaataggcttccaaaagttctgacataaatgattcctctggaccagacaggctttcttaaaggtaaatgcatctcttgagatttaatttatgccactgaactgatacaagcgtgccatgcatggaaattgcagacccttcttatcaaccttgattttgcttaagctttcgattcagttctctggacgagcctgtcccaaattttggctgggccggtggttacaaacaattggattttttggatcacaaccctacttctaacatcacagtcggtcctgcttgtttatgggatttccgggaaaattggataactgcaaaagatggcttttcccaggacaccccatcctgccctaggtatttattctagcggcagatgcgctgctaccgacatgggggacaaaaccttcagaatccgctccct

SEQ ID NO: 49778 - DNA, 285 bp, Oryza sativa
agtggacccgcacgcacgcaagcttctaagagtattgcgcactacgccggaggggaccgccacattctttttataattgcaaggaagaaggatgggaaactactattacccccattccataaacacatagaccttccacgcccccaaccgaaaagaaaaaggaaaccgaactccgactctataaaataacggaccctaagtcgcttttacaacgtcggaccactcgccctagataaaaccgcccgaaaccaccaaacaatctattgacggcccactttactatcc

SEQ ID NO: 49779 - DNA, 665 bp, Oryza sativa
agcttccaagaattacaattagtctgcgtgagttaagaaatatttgtttttttttaaaaacatattttacacctctggcaggctggcctatgtaaagaatgatataaatagttagcttaatttgtggctgcgcattaaattatggaacgttgaaatccatccctagtaaatgataaataaaatgaaactaataattatttagctacatatatatctgaatatgatgctatttaagagggaaacatatcccgtgtgcataagcttccgatacacatttcatgcacaccaactaataaatatcatcaaaaattctaaaaaatggtatatgcagttgatgtagtttcaattgtacaacgtgttggtaggaaaaaaagaacataatggtcataacaggagacataaagttgtccaaaacacaccaaactttaaatgcttgcaatctcttggcatatatagaattaaaataatgttttatcaaatgactgaagcgaaaatgaggtgtttttcacctcaaaaaaaatccagcgcgaatatttgccacctcttataattttaattaacttaaaaaaatacctgtgctctgcatttcttatacgaactctttctgattttccagaatccaaccagctttaaaaatcaacgtccaataaggatttgtggtttcc

SEQ ID NO: 49780 - DNA, 585 bp, Oryza sativa
ccagcttgtcgagtgatatgaggaactgctagtatcaaaagtcgtttttttttttttctcgggaggccacacaaaggaatttagcaaacatcaatttgtcgacattaagaacaatttacagcatagggtcatacagaagagaagattccagcgttttttaacttggaacagaatagtgatttgcatctcctaggaaggatatagacaagaatgagatgcattacatcagcttgggtatgtattctgctattactttattttggtattccattatgacaatgtcctgagttggcataaatagttctgagcacaagattaataagacgaaacaagggattccaaaagaaagcatctcattatcagaaattctgagcgatcatttactggaaaatacatgttcctagcagtttagcgtataagctcagtaaaaagaggattctccgacaattaacggtaagtcagaacatttaatatgcttacctgaaaagaaagcaacactactgcataattttctgggcttcaccagaagatccagaatgcctgctatacctttgccccagcttaacccttttttttttttcccaa

SEQ ID NO: 49781 - DNA, 426 bp, Oryza sativa
agctttcacgagccgagccgagccggctctgctctgctcgtttccacccctatacaggatgtggttagtgagggaggttacgttttacgacttttttatggtctgcacctttcatggaaagctggggaccccagtgtcgcgaagccttttgttaccctgtttattgctgtctacttttgtaagattctgtaagaacctattaattttcttctgggctttttacaaagccgggtagtaatatattagcttaattagatctgtgccattaaaattttgctggtttcaaaatataccattacaatttacgcatttgtaacgatgccactgctacttgttgtaatctcagttgtgcctctaagatacgtatttcgcatgtattggacgaaaataccctcatcttctacctctctcttctcttatcttcta

SEQ ID NO: 49782 - DNA, 428 bp, Oryza sativa
agcttggcatgctaagcaagttgctatgtatgttatttggggagactgggacgaggcatatgttcccttgcctacactgctacgtgccatcaaagcaaagaaccctaccatgcatttcagtgttgaggctcaccccgagaagtcaatgatggtggagggagtgcacaggcgagtatttggacgtgcatattggatatatggacagtccatagaggcattcaagcacttgaggctggtgctagcaattgatgggactttcttaaccggtaaatactaaggtacattgctcacgacaataggggtcgacgcacggttacatcttgatccttcggcgcttgctctggtagagaatgataatacatccaactgggagtgggtcatcaacatgttgagaaacaactgatcggtcctaatagagaagtgtgcat

SEQ ID NO: 49783 - DNA, 317 bp, Oryza sativa
tttgaatcatacacttgagtttggaatattagtattctactacatcttctttatgcttaaatggatattcccatgcttattttggtggctgtaaaatgatatgaaaaatactagaggacatgttattttcttggtacattcattgattgcatggggctctatgaaacaatctaatgttgctcaatcaactactggaactgaatattctgcttgttgctagtaggtgttcacagattctttggcttttattcaattgaaaggtatggttttacttttagaaagtactctctttctgataatacatgagctatcatatt

SEQ ID NO: 49784 - DNA, 419 bp, Oryza sativa
  unsure (1)..(419): unsure at all n locations
acaacgacaggagcgtatttgtatacagcattggctgaagcttcgcgcccagatgttgctacaacgacgggatcctaagaattgacagccgccgcgaaagacgactggataaatctggtgtcagcgcgtcacacgccggcgacagcagcaggggctatcgcgcatacgacggcgacgggggcatggacttcactcggcggctatagctactgcggcggaggcatgccagcaagggcttcacgaagtggcggcatcagagcttcacgggagggcagcttcgttctgctggctgccgaaacagattatgatggtaatcttccgtcctcgctgcgcctgaggctcangccaccgactttggtggcctgactcaagctaatcacgcgtctccgtggttaaagccaggcgggagtaaaagagtg

SEQ ID NO: 49785 - DNA, 439 bp, Oryza sativa
tgccagcttaacagcctcaacagaagctcaatagattctattaagggtattttgctacgccattgggggccatcctccaatctacacggcaagaatacaccgagaacacccgtctcgggctactggttcaatgactaaaattttgactataggaggccccttttgctcgcccatcttcgtttttaggtcagataccccagcaattgtaaccacagtcacctaaatcctcactgagaaggcataattcaccttgataagatcaaattacgccatccaggctgagatcccgacctacaccactcccatctgagagctccacaaaattctcccgaaggagcgcctagaaccagccagaatacactcagatcagcaccggaaccctccaaattgccccataccaagaagaattcctcccatccgcacccaaatcacagagata

SEQ ID NO: 49786 - DNA, 413 bp, Oryza sativa
tgcatgcaagcttaactatggagagtgggctgttctttattctggtgcagctagctgcagggtgatccttacgctaaggagttctgggatgtatgtgccctgtatatgtggggtgtgtgtgagagttgttttatgaaatcttctctcttaatgcaatgatatgcaactcccctgcgtattcgagaaaaaactatctacacttgacaattgctcattcagatttacaggagaatgtaagatatcaggttccttcagtacatctaaaaatcctggactcctggtgcctataaacacttcattaatttgatgagtatcatcaccacaaattatattgtgggatgtccagctcaataagaatatataaactcaaactgtcgaaaacatgatagagttgctatgtgccataatcacac

SEQ ID NO: 49787 - DNA, 427 bp, Oryza sativa
  unsure (1)..(427): unsure at all n locations
agctgnggggtttttgttgacggtctgttatctatcagtntcgaccgtcaatattactaaaatagaggagaactagtgatgcttgcaatgcatatatctgttagaataataatattccaatagtattaggtatactaaccttttgcagagaatgacactaaagtggagaagaatcgacatcaagacagatgataaatcaatcggacgatgtcgagaaccagacttatgtatgaatgggccaagaactcagaaataacacgacacattgagccaaaattcacaagtctacggaggaggacaacaaaggaggccgcaagccgaagatgggctgggttgggcaagcccatggttcaacagaaccttccgtggcgccgatgcatgcanggtttggatggacggctaggattgatcctcaatgacggttgga

SEQ ID NO: 49788 - DNA, 412 bp, Oryza sativa
aacttctcctcgtgcttcacatcgttattctgtcaagcgaataatgaggtatatgaatcatacacttgagtttggattttggtattctacttcatcttctatatgcttaagtggatattccgatgctgattttggcggttgtagaattgatatgaaaaatactagtggaacatgtcattttcttggtacatcattgattgcatggtcttctaggaaacaatctagtgttgctcaatcaactactgaatctgaatatcttgctgctgctagttgttgttcacagattctttggctgttatctactctgaaaagttatggttatacttttgaaaaagtacctctcttttctgataatactagtgctaataatattgcctagaattcttgtcaacactcacgcacaaagcacatt

SEQ ID NO: 49789 - DNA, 415 bp, Oryza sativa
  unsure (1)..(415): unsure at all n locations
agcttctcataagttgggtttgctatattaattgcccaagtaaaatttcttccagacatctgcaactccataaggcacaacccatcaataatagcattaaaaagaaagggccatcggtcatcaaaattgctattacttttttcattagggctgcgtaaaatattaaaatcaccaccaataagaattggtaaggtttcacgagagcacatattgactaattcagcaagaaacttatccttattctcgttntgagccagcccataaaccaaaactaaggcccatttaaacttgtcagctctattacataaatgaaatttaacataaaaatcaccctcatcaattaaaccaacatcaaaattaagtaaattgatgcctaacaacaaaccaccagacctaccactaggagccttacaat

SEQ ID NO: 49790 - DNA, 418 bp, Oryza sativa
agcttaattttgctactatcattcatacatatagaactttaaacaactgagatccattcaagggcgatgtttcagaagattgaactaaaataatattctaaccaagaagatcgaatatctacagtccatgtacttagcttcatctggatgggctcaaaagtcagaacgatgtaagttccctcccatttcatggacttaacctcagcagggtttcatttggtgggttcagaatgatgtcatttgaacccatccaaatgaagcctcagtaagacttgaaacaaatccgagatggtgaaaattcacacaactgaaaccaaacaacattatgacataacaaattatctttgctgtatgtccttacaattgcagaggcaactcttgcacacagatcaacaacatattggctggtaccttcagt

SEQ ID NO: 49791 - DNA, 417 bp, Oryza sativa
  unsure (1)..(417): unsure at all n locations
agcttgaatgtcttcgatgatntatattgctctttcactactttnttattcagcgactcgtttctcttgtaaattctacagtgtgcctgccgctcgtgtgattctcaaataattacggttggaaatattttcaaacagcaagtttcgaatttgctgaaatcttttgtttcagatctgctcaaatttcattgttttcaattaacatgtgtactactccctccgtcacttaatataaggtattttgatatttttgcttgcactgtttgacaattcgtctaattcaaaaagttttggaattttatttgtgacttactttattatctaaagcacaactttntgttttttatatttgcacaatatttttaaataagacgtgtgcataaacaggacaacanaatatcaaaatcccttgtatta

SEQ ID NO: 49792 - DNA, 386 bp, Oryza sativa
  unsure (1)..(386): unsure at all n locations
tggttctagcgcgctcctggctgtgaaaaaaatatcanaaaaaaagctgtgcctctctcctcagcactagagagagcaagcaaagaaaataaagaggatccagcgagcacaccacatgtacaggaggttctaaattcgagcagatgtaaactctatgcacaaaatatattccaagatcattatattcaccagagatgtgaaatataacattggttggatatggcaaatcagacttagcaaataatttctccttgagaatatcgagctcacaaaaatcatcaaactgaacatagcccagagtatttaaagaagattctcattcacgcttctctacttcattagcaatgtgaacaacatgcttaaaatcagtgcagtatgaattaaca

SEQ ID NO: 49793 - DNA, 399 bp, Oryza sativa
ttcattatgccatgccaacattattcagacagatagtggctgttctcaagtatattctacacatagataaaaaaacagatctggcacatcaaaactaaagtatatccatgttccatgagtagcttttgcaagcacactgtacaaccttgagtttctatatatctgccagatagtcatgggggacttgtagttaacctgtctcggatttcagttgagagggttgtcatgagccaaacaactgaacaaggtgaaagcactttactctaatataatagtctggactataactgtaagaggcatgaactcaacgggaacaaaatgctcttgttgaaaactgaaaaaacaggttcaactgaataaaatcatacagggtggtacatgcgacttaatctccaaaac

SEQ ID NO: 49794 - DNA, 330 bp, Oryza sativa
tgtcacaatgatgtgaaagtatgaaacatagattggctgaaattttaggtatttaggcctagttatttcaattcaataagcatgctctcttcttgatacattaggtgcctggtcatgaacttcataaatagcacatctggggtaatgacaagccgtcaatggtagatactgtaattgaaaattgagctgtttgctgagcttaagagcatggacttatcttatgttcttccactataccaaccaccgagacaattatatgatgatgggatgactgtgcattgactatatatttcctgatgcgtgtctctccagtgggagaatctatattac

SEQ ID NO: 49795 - DNA, 397 bp, Oryza sativa
  unsure (1)..(397): unsure at all n locations
cttttcgngacataataatttaatatgccttggtaagtagtataccattggatattatttgaaatattaaatgattcacgattcatgattagaaaatatcgaattgtactcaatttgggggtcttgatgtttttcttaaaaaaaaagctttggggtcttaatgttagctttttcatgatttaataattctaaaataatatttaataactattgaattgtaatatttaataacttaatgttagctttttcatgatttaataattctaaaataatatctaataactattgaattgtaattggtttggagtctcatttatggatttacattattttgtaattctaaaatttgtaattagtaagtatcgatttatactgttattgcagtaacaattataaa

SEQ ID NO: 49796 - DNA, 422 bp, Oryza sativa
  unsure (1)..(422): unsure at all n locations
agcttgtcgaaccaaccatcgatttctttctataccgctgcagttcgttcgggtaagcgactttaatgtctcgagtgtgtgttcatgctttgtggtgtaataagaacatatttcgctgtcaatcgtatgcatccgagtactactcttttacgcataatctgattgtggatttgacgcacaaacatgatctattacgggaactcaactcatccggttggagtcttggagatggcgcgacggtttggtcactttggtgcatgcagtgcagcagccgaggttttgagcgcccgcctgtcgaggcgggattaaggtggccgtgccatgccagtgccggcgcctacngcggctgtcgcggttggagaggtggtctaactcgcggcggcgcccgcgatgtcgctcggcggccggcggcggattcactg

SEQ ID NO: 49797 - DNA, 429 bp, Oryza sativa
  unsure (1)..(429): unsure at all n locations
agctntactatggggttgtagcaactccttttttaataataataaagctcactttcctcgcaaggggatataaaattgcctctatgtcctatctatgctactcttgaaattttcttgtgtaagttctttgcaagaaatagggacatacttaatgtcctgattcaataaagtagaagattaagggcattatttttgggttgaatcattatgaggcgttgtcgaaattatggcctttttttactgccacatttataggggagaatatacgtctcattaaggtcgagacacttcacccttagaaatttctgacatctatcattaattagatgataattcgctaagtaaagctaagtgattcaagttcataaggtattatgcttccattacataaataataaaatcagtgggagctcatcaagagctctaata

SEQ ID NO: 49798 - DNA, 414 bp, Oryza sativa
  unsure (1)..(414): unsure at all n locations
agctttgaagaaatgtcaatgtcttctttattaaaggaatgtacctgatagaaagtccaatgacaggaaatggttagtactataatcaatcgtcagcagaaagaccaaaccggtgtccttgttcataacatagtttaattgatagctctctacatttaagacgagctcttgttctttctgataaacatacggaaagctactaagacaccagagtagagtaataacacaatggatgttgtatttagaagatagtanagtgtgagtagatgcccaggccccaagccacttcactatccttacagggttatagcggtcatgtagaaaaaacctacttggaaactctatatcagataaccaaacactgttcacaaaagtctcaaagtatggatttaatcactcgggaataccttggat

SEQ ID NO: 49799 - DNA, 422 bp, Oryza sativa
agcttatcaaccaagttgcccgtgccagacaaatcaaattctgttgctaaagaaattcatttgatgtgatttggctagcagccaaaaaaaactggaaccgtgtacccggtaaaatctagactccagacagaaccagtacctttccatcatctcaaccattaggagcaatagaactataggagtataccatgcatgacatgttttggactcactatgcatcactctttcataggatcttcaagcaattgaatgtgtataaggaagctaagactgctagtggttccgagatgaaggaacacttcacaaagatgcagctagccacattggcatcccacatgccaacgacagccggcctgcaaatctacaaagcccaacaagttgggccatacaatgggtctttctcctctacaaacccacagcat

SEQ ID NO: 49800 - DNA, 430 bp, Oryza sativa
agcttaattgttcctgaaataaaacatatataagggtaaattaaaaggctctatatatgacaaaaaagggggaaattatatgctaattaccctaccatggttatgtacgctgcgtattcctgaaccggttccaaatgtgctaaattaaatcagttttaagctgggtatgcattgaacgagcacaaatagtagctttcctacttagcacatcacgaaaacattggttaccaccactggttacttctggaggcagtactattgatgtcctaggaattctattgaggtctaggtcacatattgcatcctcgccctcgtcttcaacaatcatattgtggagaatcacgcaagttagcatgatatttccaacactctttctcttccatttctttgccggacgacgtacgatgttgaaacgagcttacaatacccc

SEQ ID NO: 49801 - DNA, 425 bp, Oryza sativa
  unsure (1)..(425): unsure at all n locations
agcttgacaaggaggacatggttaagatctgtctcagctatactgaggtagccacaatgtggatgcagctgagtggtcctcgccgcctaccacatttggctcaggggagatggggaagagtaagaagagggaagaatgaaggaagaagatggaacacatatgggtctcacatctaggggtattttggtctatatgatggcggaaaacatgatggcgatggcatggttccaattttgtgtgtattcgaatggcatggatacaaatagatgaattgtagtgccatttatctgaatcgacatatttgcaatggtatggatccaattaactctaaaattttttggatcattntgcccttcttccttctccttccnctcccttcgctcgtccatttccaatgaacccatccaccatctctaccttcgcat

SEQ ID NO: 49802 - DNA, 411 bp, Oryza sativa
agcttgttgcatgatcctgcatgcatattttctacataaacgtgcacattagcgaagacaaaatgacaggttgctcacgccagatcaaacttcagttcagaagaaactactgatgaaaagaacattctggggaccaatatgtaagctaatgatgatcctgagcacgagaagcacatacacctaaactgttccatcccagagacagcttggagttttgcagctgactcatatggagtgtttccatatggtgtgccatactgcaaaaggttcctgttttcccttaaatgcattgctgagcttaacacgtgcatgcttaagaggcatcgaaggtagtttcttcttcagtttctcaattcatccgagccgttcatctcagtgaagtaaatgttactgaccgccggccaccctttc

SEQ ID NO: 49803 - DNA, 282 bp, Oryza sativa
catctgagaacattgaatctgatgcaccctaacgcgcttgggtttctgttccaacgacaaggcctgaacgactaactgatcatgcaaagcctcttacacccacaaagaggtggcgtttaccaccgggttgagcgtgggcccgcacctttctccgacgatgatgttaacaatccaactggtggggaaaagagcagttacccgaaatacaggctttatcagatgcatttcggatggagataacccatatggggaccggctctcgtggttttttcgaaataaacc

SEQ ID NO: 49804 - DNA, 420 bp, Oryza sativa
  unsure (1)..(420): unsure at all n locations
actcagccgaccaacaaagatactagctccctaatccagagaaccagcaggagaaacagcgatttatgtcaaacccaaaagacaaaccactatgggtctgatcttaccttacaaatgcaataaatgaagaaaaagaaaagaaggaaataagatgatctgaacatgaaatgttcctccccttctgatagcctgtgccaagccagagaaagagtggatggggcagaacaagagaatagaaggaaaacatcggtggagcacgaaagggctatctatatgagggaagcattatccatactccctatggcttactttgcattcctgtagcgngccaatacttcatgtcgttgcaaaggcgagacagacagcaaccacttactaaactcaaagtcgttcatacccatgaaagatgcaattccgctg

SEQ ID NO: 49805 - DNA, 416 bp, Oryza sativa
  unsure (1)..(416): unsure at all n locations
gctgaagtaatgttattgggtgcatatatctttattttatctccaaaagtttattgtctggtagcatagttttggtaacggatccaattggaccaagtggatcctccctactttttaaagaaatagtttctaacctcgcgatcggcttgtaaagagacctacttgtgttaccttatgttagttagggtgggtgaagttccaatatgatttttttatgataagggccacacctccctttcccatctccctaattttcttgccccttgtttgtttctctaaagggacaaggaagcctgaatggtgaatctactccacacgtcatttcttcttttaaacgccccggcgcgctcatcanaaccattagtctcgggttagaccttacttgattaattcaacgataaagctcaccatgagag

SEQ ID NO: 49806 - DNA, 397 bp, Oryza sativa
  unsure (1)..(397): unsure at all n locations
agcttatcgagttcttctcgtattgttttttntcgnattggagcaaatctccacagttttttgcaacgggtcgcaccatgagtttgtgctcaatcacctccctgggtacccccggcatgtcggacggttaccaggcgaacacgtcagcattgtcgcagaggaaggtgatgagcgcgagttcctatttctcgcctagtgatgccccgatcttgacggtcttgtcggtgttggcactagagagtggaactatcttgattgcaccgtctggtttcagcgtcttgtttgttttgctcactttcttgggtggctcagctgtggcaagtgggctgggcgtgtgctcnaccatgtcgaggctccgcttgtcgcattgcactgccaacttaatatttccttgaat

SEQ ID NO: 49807 - DNA, 353 bp, Oryza sativa
agcttcaatacagtgtattgtcacatattttgtttccctggggttccccatacgtgttacaatcgtagaaacgcaacgcttccttttgcactgaaacagtagcaatggtatcacattttttaaaatatatttccagatgatgtaatgagcaaactgaggtggccattaatgttggcatgttggtgattggcatgacgtttatactgatacacgtgaaaatcaactgatattattggtaacactgtacaggactatgcttgattcactactgcattattgcactctatgtagacatcaaaatatggcagtatgttggagttgtccagggacaataaaatcagctgatgatcacc

SEQ ID NO: 49808 - DNA, 394 bp, Oryza sativa
  unsure (1)..(394): unsure at all n locations
agcttcactccctctatagcactttatttattcattaatcattancagccaatgaaaccccgctctgctaagcaaccaattcgtcttatgggccgatagatgagttccacaaattcattcatgtacttatcccaaagcaaccttggattgatcattcctgatctgtagctctaatatatgtgcttaagtttcaaaaaaaaatgatcattttctaagcactttaacaacaccccatctatattgcggagatacaactcccatcaagcaaagtgtctttaacgctcaccggcgaactttccgatcaaacctataaataggatctttcacaatgctatcaaaggaattcttcagtcctcttctgattccagtgcacaaatgttccattatacaaata

SEQ ID NO: 49809 - DNA, 421 bp, Oryza sativa
  unsure (1)..(421): unsure at all n locations
agctntatgtacataaaccataccaactactctctccatcccaatttaatcatcagtcatcacataagcttttttaggtttttccaaaataatcattatctaacaaagtgtctctttgttatttgtgcaaaaaataaatgtgcatacacacatgcaaccaatcaatttctattggtttaatccatgcaacatttaaaatgtgaattaatttttattggacacgaagtgatggaggaccttgataggtgagaattaatttcaaaatgatgtaagtatatcttggtgttattggtcacgatgttatttacttagaggagatcaaattaggatggaaagagtattatttctataatcacctactatggtacagtataacggtaatttcttatgtaaaattactatagtgcactcaagtatataa

SEQ ID NO: 49810 - DNA, 428 bp, Oryza sativa
agcttattttctcgggattagcttctatgcctcgagacaagaccataaaaccgaggagattgcccgccggcacaccgaacacacacttttcggggttcagtttcaagcacgtggacctaaggctgtcgaaagcctcagccagatcctgtaacaacgtatcttggtggcgcgtctttaccaccaagttatcgacatatgcctctacattacgccctatttgattactcaaagtaatgtgagtaatgcgctgaaaagtatggcctgcattctttaaaccaaaaggcatagttgtataaccaaaggtgcctacaggagtaatgaaagcagttttttctttatcttccctagccatgcgaatctgatggtatcgcgaataagcgtctatgaaacacaaaaggtcgcacccggtagtggagtcgactatctga

SEQ ID NO: 49811 - DNA, 426 bp, Oryza sativa
  unsure (1)..(426): unsure at all n locations
agcttgtcagatagatntataggatcccacactagcaggtagcaaaaatcaaaaattgaataaaaattaagaactcaccatgagaataaagtctcgcaaatctttcagcattccttccctctaaaacataatcaatctcatcaaacatgtgcctgacctgttgaacagaaggttcaaaagctataagcaaactatattgcaatatatattaacggccaaaatatgggaaacgtggtctagaatggaaaaacatagtatatggcagttgcaactaaattgtctgaaacaaattatattacagttgtcttaatgagaccatctattattagtcctacaatacaaaacttaaattttggattgagatattgacatgggttctatgacattattttgaccacaaaaatacattttcatgcatcaacaaaa

SEQ ID NO: 49812 - DNA, 376 bp, Oryza sativa
  unsure (1)..(376): unsure at all n locations
agctttaatgcaatgcatgccttattctattatattncacaaaaagtacaataatatgatattatatatgcacaatatatctggaccagaattgattacataatcacttagtatacaatatagagggcaatatacgcttaaaagtatgtctaaaaagtaaatgagttatttcaataatttgatgcgggtgtaaacaagtacaaaaacaaagcatctgatgcctatgcataataaggaataattaagaatttgccactcttacgagtggtgataaagtatttgtcactggacccgcatgtcattgacatatgagggcccacatgtcaaagaacacgagtggaaataattaattgccacatttaaaagggaaaaagtt

SEQ ID NO: 49813 - DNA, 431 bp, Oryza sativa
  unsure (1)..(431): unsure at all n locations
agcttaaaagaatacagcttctttctttgttagcacaatttgttagctgtgttatgctactgtcaatccactactaatgctgcaattagacatatttgatctattaaccaactatttattttagctatgtgctgtgtatataggcctgtagttttgctaattaactactagatgttagttgtgttttttaagctactcactccgtctcgaaacatgttacttctaagatttaaatttgctttaaagtatagctattttcaatgaaccatcccatctcaacgaatcacaatattccccgatttaattgtttcacctactctttttttaaccaatcataattatttcacaccctaacattaatctcttaaagagacgtangtagttgtattttgagacagagggagtaatagaacatacttttatgtctgaaa

SEQ ID NO: 49814 - DNA, 432 bp, Oryza sativa
  unsure (1)..(432): unsure at all n locations
agcttctagattttgtgtcgtaatgatctgaatttatgagtcctccattagatattgactttgttggctctgactgtttaagttaatcttgcatagccattttaattagctatgctttacctattgttaggtactcaggttttcaaccttcttgatgttcagtttatggcaatgctcaagtctagttcacatcatggaacctcattcgtccttgtgtacttcgtttcagtttaggctatatctatctattacaggtttagagatcataatcgcgtaactaaaactgtcaaacacaatgcacaagctcctcacaaaatttaggggcaatctaagttttgcataatttagtttgaatctccagttaaatacttacactanttttttgcattagttgttattagttaacactctnttattcatatcaaatcgtgc

SEQ ID NO: 49815 - DNA, 432 bp, Oryza sativa
  unsure (1)..(432): unsure at all n locations
agctntggatgcgaatactgctggtcactccggtcttctcagtttgatcataacgtattatatntcctgatgacttgtctttttgtaccacattatctgtacttcattattggaacatcagatgctntaaatcacagaaacatagttttaaaagcacacattacatccctgttggtccataagatctgacactcttaacaaatctgatcttgggttttcttattcatcttggtacattttcaaaacaatatgtctacttgtcttgttttaaatgttattggataaattataaagttatatctgatatatgttgtgtacctcatgggaaactgataagtttatgaacaactcttgtagagatctgtacctgtaaattagtaagattatttttgaccatacctctgtcttgtcagtactgcactgtactgaaat

SEQ ID NO: 49816 - DNA, 422 bp, Oryza sativa
  unsure (1)..(422): unsure at all n locations
agctngagtggagactaagcctagaanaacttatcattgaagtaggcctcgctaccttctggaacttcttcgtaatacggttcttctatatgttagattaaacaagagtgagtacttatgtacccagcaagacacttataaatatgatatgaatattattacagaagtttaaatatcatcatcttaagcataaggtattgaattaaagagaaagtaagcacaacaacaaaatctcattatcttcattaatattttatgtttaaaattacttatacgtcaggagtaggaatcacccttatgacacaactccagaaccgggagtacagcacatttgaatgatttaatttacctctgcagagactgttcagctttacccacacgatatcaatagtttgcaaggctgaggacaccagagccgttcg

SEQ ID NO: 49817 - DNA, 424 bp, Oryza sativa
  unsure (1)..(424): unsure at all n locations
agcttgattgtttgatcattgatgtctgtttgtttctccgatcgttggggggcttgcgagctgctacttccctttcgcatttaaggttgaactcttgccctgctntagagttggcacacggtgcagaattcatgccagcgtcccttaagagactcgcaataagttgttgtgtgcttgcacccgacttgttctgtggccactggccgcatctgaaagatattttcatacacgactgcagaagctctgtgtcgttgcttgttggtgatcttagctccctgaaagaattcacactttatcatttgccagatttatgtgtgcttgaaggcctgtcttcccttcaacttcacagcgtgtgtttggtagatatcccgaagcttactgctgagtgtgtgtcaaagatgcgtgtccaggatttactgcatgt

SEQ ID NO: 49818 - DNA, 422 bp, Oryza sativa
agcttctcaaacgctccggaccgtttatctgtactgaggaagctgataatgccctcacccagttgaaggcgtatctaagctctcccccagttctggtcgccccggagccaaacgagcccttgctactctacttagcggcgaccccgcaagtagttagtgtggcattggttgtggagcgcgatgaggacaattctcatttcgcgcttccccaccctgtgccgacttggcccgggagagagcagggaggagaggcccccgagccgaacggtggcccaaggcccccgacgattggagttggccctctgcccgcttgttagaccgtgctaggagcccccgacccccaggaaggcccttgggtcactgtgggaaggccgcacctattcccctttgaccctcgaggtaactctgtggtgactccaacc

SEQ ID NO: 49819 - DNA, 427 bp, Oryza sativa
agcttgccgaattaagatttctttatttgtttgtgtgactagctaatccactgggttggagctaagagtaagtgtttttaaattgcagtgacgaatggttagatgaatgcccacgatatactaatttcatattgtcagtattgaacagtggatgcacatgagtaaaaaatactgataaatttgtcagagttaacacaactatttgaaaagattatataattatattgatgggtgtcagtttatctgagtcatgatccttataaaaacgaatatccaggctactaactcactaactgaattgtcttaaattgctcattttctggagttgattgatctttatttgccttttctagttacagtgtacagatgaacatgattggacaccttactactaaccgatctaatatattttcttgtttatactcag

SEQ ID NO: 49820 - DNA, 431 bp, Oryza sativa
agcttgtaggaaaatgtagaaacattctttatacttaacaaacatattattaaaatatattcaatgttaaatctaattaaactaatatagtattgcagatgttatcaaacgtaaagaattttaattaaaaaagtcaaaatacttataatatgaaacagagagagtaacagtaacactaactactgacgcaggcatctatttgttaaattgcattcaaactaatcagacaaacatctctcatctgtctatcagtttcgtccaggcacaacataagtagaaatgaataagcttcagcgaataacaacagaaatatgagaaatatctgccttctataaggtgcgaaagagggcctttttgaaaacaaaatgcaggggtatttgtaaaaaaaatatggaccggtagcaatggtagcggtaataagggtttctttt

SEQ ID NO: 49821 - DNA, 431 bp, Oryza sativa
agcttgctaattagcgtcttcgagctgattatatctgcagattatgtgcgtgacataactccgagggaaggcttttgaaaggacaagctcctgaaattatcatgtgccgccgatgcttcactttgccaatactcttcagtagctgctttgtgtgggcacacaaaaccacgcgcatatgctgaagtttactacaccaatggtccataacagaagctagactatgcttctgtaaagacctgtaccacagtagagtgcgcaactttgtgtgcttacatacgctcaaccactgagtacatatcacaggctatgctagggagtacgaacagatgactaacactcggaggaaccttctcaaaatcatccttgtcttttaaaatgaagcagccatactttgacactagatgtggcatgtcatgcaacagatcattaca

SEQ ID NO: 49822 - DNA, 402 bp, Oryza sativa
  unsure (1)..(402): unsure at all n locations
agcttatagataaatataatactatctataatattaaattagtttcattgaatcaataattgaatatattntcataataaatttatcttaggttgaaaatgctactacttttttctacaaacttgatcaaacttaaagcagattgactttgaccaaagttaaaacgtcttatatcctgaaacggatggagtatatctcaagtacctatgtactccctccgtttcaaaatgtttgacaccgttgnnnntttnntttattatttggtttgggataaattaaggacctatatgtgtaattttgatgtactcaatcagtgcttgtttatatttaggtctataatgctccaatacaatgctgcatgttataataagtatcgctttttcaaatatttgattaatttga

SEQ ID NO: 49823 - DNA, 369 bp, Oryza sativa
agcctatagggcgagccctatcatatttcttactttgatcgcgcaaaaccagcggccgcaatgtctgacattaatatttgtcatgacaaaatgattataaagtgggcgagcgatctactgcatgtgctgatgtgctctgtggtataatagcctaaatatctgccaacgccttatctccttgaagtgtggtaaaataatagtctaaaaagcctatatgcaacagactctggtcttgaagtgcttcaacgtaagagaatgctgcatatcactagtataacactaaaacaaggggaaagatccttcactgcataaaatgcaaagttcatgcacattgaacaaagtctcactttctttctagagccttctatc

SEQ ID NO: 49824 - DNA, 428 bp, Oryza sativa
gcttatataaaaacataggaatatttttaactcagaataaaaatactataataatatatttaatgttcgatttaataaaattgatttagtgttgtaaatgttactacttttttatccatgtttaaagaagtttgatcagagaaaaaaacaattgagtgtgaaattccattaacaaagttcatttttagctctaaccaaactcttttgaggctagtattttatttgtcatgtgatttatattttcctatctatgatcatctttttcaaaaccagtaatacattttctaacaaacaatacttcaacttaaaattgagaaaaaaaaactcctactttagtacggatccttaccagtatgaagaaaaataatatattaaagctgcagttatttttaatattgggcacgtctaatgtatacaatggtgaaatg

SEQ ID NO: 49825 - DNA, 429 bp, Oryza sativa
  unsure (1)..(429): unsure at all n locations
gcttaacgtncacttcaatcccagcatcatgatgcaaaggtgaaattagatgggtgcaccatcaggctgttgagggttggcggccgcagcttgacgcctctgacgctctcgcaaatataggacagttacaaggcaagcgaagagagtaaatattgttgcgttcccctcatccataagaacatcctccacccattcctcaactacaggatatacctccggcagtgaatcaataaaatgaacctgaaagtaaataaggatttagttgcccatggcaaactagtaaaacagtgatgttgattatacagcaagatggcaataccaaatgtgacaagcagaacattatggaaatatgaaatatagcatgcatagcaaatactgttagcactaatcattacgtgactgagactacacagcctctcaaattcaata

SEQ ID NO: 49826 - DNA, 399 bp, Oryza sativa
agcttatgcatcccggtccggagcattggtattttctggatttaaaatttgacacgttcatatagcagtcgataagcggcctataagaatgtcatttcattaagatgctaatattcacttggttatgtatggatcgttatggaccctaacttacatacattcttccatcacagtggccggcacagcgatgcttacggacctactcaagatgagatgataatgatggagaaacgctaacttcataacatattaactggtcttatttgagcaatatatcttatgttctgtaccttcttcgtgacgcccatggagcggaagccttgtaaacagcagattgcttcaccaccgccgaactatgaagatgtcacgagagatacacaggataatgatcatgatgga

SEQ ID NO: 49827 - DNA, 415 bp, Oryza sativa
ttgctcctagctataaccttgtgtggtgcgcaatgaacaatcgaaaccacaatatcgactgaaccgaaaaacagtcctagaggctagagtcgcttcatttctcaattaacttccggttttgatcgaccccttctctctacgtacagaggagtgcccaaaatgaactaaaacaatccatacccatgaagcgcccataacactccaattacatatcaacccccacacagatctgtaactagaaagtggaaactgcagggttgtgcaaaatgttcaccgaccaataatctcacacggaaattctacagcttgaaactagagaatactaccaattactaccaatcaaccagagccatcatccccaaacgtaatactatgagtgtagagtcgtagagatgatccatgaacaacacgaaac

SEQ ID NO: 49828 - DNA, 422 bp, Oryza sativa
tccttagagtcacctgccgcatgcaagcttgagccgagatcaacacttgagaccatattgatgaaccatgatcatgccgaggtcttgtccctcctttggcgagactttatgctcatcacgggctttacttcattcttgcccacatgacgatgtccttggcttggtgaccaatctaccctggtggcatacatttacctccatctaatgggacctactccgttgcacaccttaaaagagaacattaatctccacacatccgttgaaatccttcacttgcacaccaaccggttgcatatgaaagatgtgtacatgtttgttgagtattctttaacatcacaagcgtgatatactcgtatgcaagctcaagtgcaaagatccgatataaataattcgtgaacatcatggatctagaacgatgccca

SEQ ID NO: 49829 - DNA, 398 bp, Oryza sativa
  unsure (1)..(398): unsure at all n locations
agctngctgaaatgagaaataatttctactctcttattcacgggttgtgcgctgaaatcaagcgcgcaatcgtacaaatgggaaaggaaaataagtattatgctaactagatgcttcctttcccatgagtaaaatagtagtatgtgcttggtttttgttttaccaatcatataaacacttgctatgaataatgtaactcattggtgttaaccccaatgtgtgtcaaaagttgtcttgcttcatgcttaataagtatgggggagatatcacagcttctgacgtgcacataatctgaaaattactgaatgtctaaacacctgaaacgcactgaactctgcaaaagattgcagaggtattgggcaccagagtagttcggcctaaccaatggtggcccaata

SEQ ID NO: 49830 - DNA, 331 bp, Oryza sativa
agcttgatgacatataagggctactaatttttctaccacatccacaaccatggatagagcattgatgctatcgacaggaaagcacttccttagagcgtgaatctgcacaagccttatgcatgtctctaaagctagggctgtcatagtaaattgcttctttagaaagtgccaaatgcacatcgggtgacttgttccatcatcctcaagaagcataatagacctgagaaccactatcttcaaaagacgatatcatggaagctatgtgggctctccagccactcaatgatgaatagcacatcacatgctcatctgtacgacaatctaagaaaac

SEQ ID NO: 49831 - DNA, 326 bp, Oryza sativa
  unsure (1)..(326): unsure at all n locations
agcttcacaancgatataatatgtgcagctttcatgaaccatcgccggacaatcttagctcgctgtccttaggcgacaaaacatcttgagggccaactgaggagtcccacgcattcctgcgtgacctctctctaaacatntagaagatcttgtctaatcctctgccatacaccatccatattgcagcgatgtaaatcttcatcgagcgatgtgtacttgaatgcctgccgtcgaattttgccatcaaccttaatcgtgggatcttccaaatatcgaataataggaaccgtccaaatctatgctgatacatgagcacaaatgtccca

SEQ ID NO: 49832 - DNA, 428 bp, Oryza sativa
agcttcagcatataatgcatgtacttacgttggacacattgcaagctgtagctatagtttgagccgtttcggcagcacgcttcagatcagaggagtacactgcaactggcttagcttctttagccaaccgacgagcaaccttagacgctagcaccaattccaagttcaggtttttcgataatggaattccaagttcagacaaaaccccaaattacaatcctgtttcattatttgaaatgttttggtaaagctcaccataacagcttgctgtctgccagcctcattcaactctatatccgtttgtccctgttaaaattgttctgatgatctgtcaactcgagaaaattgatggaatgacgacgaggggactgaagagctattgactgaagaaggccatcaaccaagtataattctcaagaaacattgaa

SEQ ID NO: 49833 - DNA, 414 bp, Oryza sativa
agcttcaaagtggagagagactgtagcacatcgcatgaacacgtcgggttctgcatgacgcaacattaactgtagaacgatatagacgtcaacagaaccatcgtcgtgcaccaggtcttcaacttgtgtcggaactacatttttaggcccgtccacttgttcttcgccatgacgtgtccatatttcgtacttgtccataaatccacgagttactaagtgctccttcactttagaagcatcttcctaggctatttcattcttacagtcagcacatggacaaattatcttcctcatattgttcttctcagcgcgtgccttcgcaataccaataaatttagacacttcatttctacatggagacaaaaaccttcggcaatgatacatccattcccgacttttcatatctctaaaaaa

SEQ ID NO: 49834 - DNA, 423 bp, Oryza sativa
  unsure (1)..(423): unsure at all n locations
agctttatcaattacagaggaacatgtgtatattactcccacttttatacttgtacaccttctatcccaaaaaggataacttatagatataaatttgaaccaatgcttgtccaagtttatctttagaagttagttttttatcatacggatggctcctttagcaattgcatagtaacactgtttctttggttcatttcaggtagttctatttgactgtttcttgtcagtaataccattaattctcacagcctagtgaccatttataaacgctaatcctgccaaaatgattaatgtcaacagttaaatcatataccattccccaccgtgagtcttcacactctaaatacagagcaaatctgcgagagagaacaaaccaaattgaacccattntctctatttcttctccaactcaaccacaaaaaa

SEQ ID NO: 49835 - DNA, 328 bp, Oryza sativa
ctgctcaaaacgatattctgttccatgtgagagactgctaaattatgtgatctctaatcagtgggacccactaatactattcgcgatttattttctatagaaggacacctctatgaatgtgactctctaatactttcctatatatactcttatagactcgtacgggaggagcgtgacaatcccattgagatgcccccacattcgctatcaacttcttaataccgatcattacctggccacccccttggatttgatccacactggttttcctattcttaccattatctctccgatgagcatctatattcttaacaagacgactacatta

SEQ ID NO: 49836 - DNA, 350 bp, Oryza sativa
ttctcttctctgtgtcccccgccgtgtattttttctaatatccctagactcctgccttgcataggcgaaacccaccttgtgtaagatccgtggaagtaaatattcaagtgggtaattccccctccggagaccagtctaaaaaaaacttatatactgatcaatatataaacccaaacagaaggtacggaccttagctagatgacctgaaaccataattgtacgagctctaattgccaatacccatgtattacactagtattaattgaaccgggaaaatctagcaatatattgtgatgaaaaaatatatgcaactagacacacggagaataaaatcacatcccaatacagtc

SEQ ID NO: 49837 - DNA, 430 bp, Oryza sativa
agcttggaaagttcattatttttcagggatttgttcctattttgacagaagcaaacgttttcaggaagcacttctcatctctctccaatacttccaagaccccattaggcgagctggatagcaaatgtgggaacagttgcaaacttaacaattatatgcaaaacgaaaggtgtgctagtgtggttcaattccctcggtggaatatgctcatggtcattatgttccagtgaaaaggcacttcatcttcagtgatctcaacacttattttcgaacacctgtgtttatctcactgaaagagagctttatgcggtcgtttacccatttcaactattgaaatctttttgctgggcaaaccttgggcaggtagattgtttcgtgcctaagagcagctatggacagttgtcaaacgcttattgcgtagccatgattt

SEQ ID NO: 49838 - DNA, 376 bp, Oryza sativa
acactgctatacaatgtcttctacatacccatcaacttgatgttctatgccaccatgttcttggtcgattcgtcgaatacacgacatatttaatataagcgtgtcatgctgtacactaatgttaaaaaagccgtcatatacacactgaggagtagcaacggtcaatagacgaacggaggcaaatctttaaaagctaatgggatagaggtattccagaagctctcatggttatgctccactgttcgaacaacaacacacaccataatatcttaggacatcgccactactctgtgtgaggcggaagactaagagcgacgcctaatggcagctctactacttaattttaagacttaacttgttctttgcaaggtactga

SEQ ID NO: 49839 - DNA, 257 bp, Oryza sativa
agcttggcctgtctgatcaatggttttatattatgctaccctccgatgccaacgtggccgttacttaggctgaaaggcacacgtgctaaatgttttttttctcttcaccaacacttattcactgcgtacccttcttcgctcaatttcaactaccttattagacaaatacatattaaggagctcaatctttttcttctcacaatgatttaacgctaacaaagagaccatttttgataacgttgaggctaaccaaacta

SEQ ID NO: 49840 - DNA, 406 bp, Oryza sativa
agcttgtctctgtccttgccgctctatatatatctgatcgatatcgcttcttcattatgattgcgctaggcttttatcgcactactctacccaatctattaggagtaatgattcttcttctttttactaaatattctattcccatgctgcgctcgtgccgccttaatctatacgtactgacttccacttgctaatgatcgttgcatttatagcatagtggctcttgtagaataaaaattgaatatatacctttgttatcaacgttttgcatttatacacatgcatgaaaaagaattgcgaaaatatacctctaccgcagaatggaggtatattcaacgttgaaaatactgaaacaactgtgactggtcagcaaattaaataccgtcaatgcaactccgcacaggcc

SEQ ID NO: 49841 - DNA, 286 bp, Oryza sativa
  unsure (1)..(286): unsure at all n locations
agcttgcccatgctgcaccacccgtttttatctcggtgtntggcggatcgagagcgggagcctgggctagagctcctccaccaaatgctcggcggcaacgacatggccggtcttggtgagggactcgatgagggagaggaagagcgagagaggtctctaaggggaggaagcgcgggggcaggaggcggctgatgactggggagaagagggaccgggagaggagctgggctggagtgacgccaggagggaatgggatggtgctgcaaaagtgcgtgaaaaaagactt

SEQ ID NO: 49842 - DNA, 223 bp, Oryza sativa
agctgccggccgaatggctggcctttttatgttcctcccgatggcgcactagagagctttgcctttcgtcaacaacctcctgtgtacgggaaagaatggttggacacctctatgccgaggaggatttgatgagctgaacctattcttggctttccaccctattctaacacgtccaccgccttgcagcgaactggtcttgactgagaaactctctctgacgcag

SEQ ID NO: 49843 - DNA, 334 bp, Oryza sativa
agcttggaggatgcgtgcatgcgttcctatattcctgagcacccacgccgaccgacaaggctgctggcgtgcactcaccgcgcgaggcacctgtccataaatactccgatcgcccatttgtttaggtaaatcgatagacacccggctaccaaactctaacttagcttcattctaaacccctgttaagatacgcgctgatcctgtctggcacactcgaagttttcaaaagacagaacgctcacaaacatgtggctaccttcttatatttcacttctcaaagaaagggataaaccggactatgaaaccctatcggcatctgcaatcttcgacaaac

SEQ ID NO: 49844 - DNA, 410 bp, Oryza sativa
  unsure (1)..(410): unsure at all n locations
agcttgatactaagnccgtttgtgataataattgctgaggttggttccagagtcctcgtacccgtgaaaaaagctcacacaatcaaagagaaatacacaaggtcatgtctctctccttagcactagagagagaaagccaaaccaagagaccgaccgaaagacaagtgatgaagagctgacttgcgtgagtatcccccaccattccctgttgacaccaccaccttactgtcattgctcatgtatggtttgcgtattggggcgtactttgtggttaagcttgtgacatacattggctagcctaagaccaacattggaccaaccctgagcgattattcaacttgctttgactaacgtggtttgtggctactaacacagcccacccatagctccacccggtcgacttacacttg

SEQ ID NO: 49845 - DNA, 402 bp, Oryza sativa
agcttataaacaagctctctttgttcagttctagaaccaagtgctggtgctggagcccaggagattgctgtcacaccaacagggtgagctcgctcaatccttgcagtgtcccatcccccatcagctcgcatagtcatgacagaaatggttccatcagaagacccacaggcgagacaaagaccaacctcatatggggcccaagcaatggagttgacagaggacttgtggtcagtaaatacatgggcttgagaccagtggcctccagcaccctccttccaaatgatcacacgcccatcatagctgcaggatgcgaggatagtaccatacttaggatgggcccatgcgacacgccacacagggccatagtgcccgctgagtgttgcaaggagctgggatggggca

SEQ ID NO: 49846 - DNA, 319 bp, Oryza sativa
tttgccgatattgatgttctgttccttggatgaaccggaagaagaaataatcacacacgttcccttggattcgatacccctggaatactccgtagaggaagtgctactttcggatatccgtgcgcttgcggattctatctgtgatcgtaagaaataccaacacgcggtctgacagacccccggggttcctgccttgttcgccctcgagcgtggtgcaattattagcagtcggataatcatcatgttgggcacttgaaccgagtgtggcaatgatggctattcggagtccccacaggacccaccatcacaagacgggagt

SEQ ID NO: 49847 - DNA, 173 bp, Oryza sativa
agttataccaagccttggtcttccttctttagcatggttgcgattttgaacagcatcttcaccactattaactttattaccactaaatcttctagaagatggaggagctcttctcccctcttgttcttttcaccatattagaaataagcttaatctctgagatacatgagcca

SEQ ID NO: 49848 - DNA, 432 bp, Oryza sativa
tgcaagccacataaacaaataagagagaatggatatgttttatctacgccacaactgaacaaagatgctattggagtgttattaagtgaaaggagtctattatcctaaatatgaaagcacgttgagcaatgtatggtgaatgatctttctgctcatccttacaaccctatgggtcctttgtctcaaggtgttaattcttacaggtcatcttcccaacaaattgggagattatcacgagaagtcaaatatattcaaaattcaggtcaagaaatgcaaattgcttgtgagatcgtagaagaacaatcacatatagctttggatggaggcaagaacccttatgaattgactgggctcggagatcctcgtgataaatacattgccccatctttatttgaaggaagtaatatcagtagcatctttagcacttcgtcc

SEQ ID NO: 49849 - DNA, 410 bp, Oryza sativa
gcttaataacttctattgtgtgactttgttcaatctctttcctgtatgcccttgctgctgggtatatgtgtgagtgcacatcaccaccaaatactttcacaaagttcttcatcaaatgccagaagcattccctctgctcagcatgctcaaacacagtatgtacaaccttttctaagcctttacatgcatcagtacaaatagctaatggattcacatctcctatagccttatgaagttgtctcatgaaccactcccaattatcctaagtttcagcattaatggacccaaaagctaaaggatacatccagtgatgcccatcaacagaagtggcagcagccaaatgaccattccatcttccattcaaagcaacggaatctatactaatatatggcctacattcctataggaaa

SEQ ID NO: 49850 - DNA, 414 bp, Oryza sativa
agctgggacgtgtagaattttactttaattttgttcatcaaagatagggtcgatatggtaaaaattcatacagattaatccgggtaatgaaaaaaaaagaaaaattaatagttatactaaatttattctagagtacagctatttgaatattgcaagtttattcaattgattattatgacacacgtgtttttttctttcttttaaccactgcctttagcgcgcctttatcaactgcgctctgttgaaacgtcgtaaaagtccaatttaccgctacagtatctttcactgcaacttaggactgcacgtatcttcaaccgttcattttgatgatcaacggtctagatttaccgctacagtgatcaaactagaatcatatagtactaatattttattctacagtacctttgctatagt

SEQ ID NO: 49851 - DNA, 205 bp, Oryza sativa
aaaaacgcggggacgcccacgagaaacggattttggccaggaacacgcacccgagttggcaccccccatgtgcaaaccaaggtcgggaccactcccaaaccaagtcttggacaatttgatcaaagggatcaaaagaagcacttagcaagcgatgagactcaagctctgacaacacttgggagaacacagtgcaaaaaatgaacca

SEQ ID NO: 49852 - DNA, 381 bp, Oryza sativa
  unsure (1)..(381): unsure at all n locations
agcttcatagacaaataattgattatggatatgttgaatctacgccagaactgaacaaagatgctattggagttntattaagtgaaaagagtttattatctcaatcacgaaagcaggttgagcaatgtatggtgaatgatctttctgctcatccttacaaccctatgtgtcctctgtctcaaggtgttaattcttacagttcatcttcccaaccaattgggagttcatcaggagaagtcaaatatattcaaaattcaggtcaagaaatgcaaattgcttgtgagattgtatgaaaaccatcacatatagctttgtttggaagcaagaacacttatgaattgactgtgctcgggatactcgtgataaatcattgccccatct

SEQ ID NO: 49853 - DNA, 421 bp, Oryza sativa
agcttcgtgaagaccttgagcaagcttgtaccctttgaccaattgctcctatgatgggaaaatcattattattttgtttgcaacttgcattattagaatcacacacttaacttgcttggcctcggtttgcatgccaaaccgacggacctacccagtagtcgcactaatttccgtaggtcgtactactctgattccttgtcgctccacccttgtggtacctcgatattcgtgctctctgagcgcgtataccaaatatcccacatacaccgttgtttgtcgaagacttgggaaatgggtttgtgaagccttcaaaacccgacatgtggtgtcggtgtgtttgaaaaccaaatgaattgtgaaaactcgcgatgcgggggttgtgcctatgtggcactgtcccgtatttccatataatgaccga

SEQ ID NO: 49854 - DNA, 212 bp, Oryza sativa
gccctagtctttattggacccttgtttttgaggataattgatgaagatcttttatatgttgctttggcgttgtccaatgttttgtatgtgagtcacctgcattgctcaattgcttgactattttattagtgttaagagtacttagacctactagagttatatcctatcgtgccgtttattagtgtcattttatcggacacaacctttttttt

SEQ ID NO: 49855 - DNA, 400 bp, Oryza sativa
tttgggaaaagagccttatatttattgttgcaccgaaagtgggtatccaaaataccaatcatgaacagatggccacaaatcttaaggtgtgtattgttctcatgaaatatattagagtcattaggatttctttgatatccatatgttcaatcttcatctgtgacactgaatcttctcagtgcagcgtcttacacgaggaactgtcatattgaggaacaacgattatattattatatatagaggcaaagattttcttcccggtggcgttgctgaatcagttattgaacgggagtctcatgtacatgaccagcaggcgaaagaaaaggaggctcgattaaagatggctgactcacttccaatgattgctggactatcatcggagagaagttatgtgggaact

SEQ ID NO: 49856 - DNA, 425 bp, Oryza sativa
  unsure (1)..(425): unsure at all n locations
agcttgtctctgactcaagaaaagatcatctatatatagatgaaaatgattctactaatgcttataacattagaagcgacaaagaggatgagaagaaaaactgaccccatatcggtacttccgcatcgcccaccattcaggctctgactcggaacaaaatatcagccctttgttcctacatattaatcaaaagctaagcaaatatagaagaaaagatttaacaaaggatcaagaaccatgtaaaaccaacatgctgataataattagtaaattttttagggaacaattagtaaaatgtaaattgatacatcactaggtacaaaacagcaatacaatgaaagagcatgtgaggttcaaagactaaccgaaaatgaacttagaagtgcagatntcgtatttcatagtaccctgaatgaaaatcacat

SEQ ID NO: 49857 - DNA, 405 bp, Oryza sativa
agcttcaaaacttcttttgtgtgacttttccaaatctctttcctgtatgcccttgctgctgggtatatgtgtgagtgcacatcaccaccaaatatctttccaaagttcttcatcaaatgccagaagcattccctctgctcagcatgctcaaacacagtatgtacaaccttttctaagcctttacatgcatcagtacaaatagctaatggattcacatctcctatagccttatgaagttgtctcatgaaccactcccaattatcctaagtttcagcattaatggacccaaaagctaaaggatacatccagtgatgcccatcaacagaagtggcagcagccaaatgaccattccatcttccattcaaagcaacggaatctatactaatatatggcctacattcctat

SEQ ID NO: 49858 - DNA, 416 bp, Oryza sativa
agcttagacaaagaacagtggttatttattggtcaaactcatatgggttacaaaacttagaaagcgcataattaattcaacacaaatctttattttgcaaatatgccaaaggatatattaaaaagagatcaacatcatgatcaggtggaagtcatcacaaagaagagatcagaagctcgggatagcatgcagactcttataaagaatttaaacaaagggttggggctgggcggatgtatgatggtagatctgtactcgttggcttgacaagctcgtatgctgccatcacgcttgtggcgggatcgggattacgtgcccctcccccttactcatacttcagaactcgtgctgctattgacaccaatctacacctttctaaatctctatgtgactcctcgaggacctactctgtctga

SEQ ID NO: 49859 - DNA, 400 bp, Oryza sativa
  unsure (1)..(400): unsure at all n locations
agctnntttatagctattttgctatgttatttttcaatgatgtagccaactttaagttacactcatcatattttacaaagcagtccgtatatcacttggatcatgttatttgagggattcacaccgcatatgctatatattgatatcaagtcacttggttgattacaattatcgaaaccactcggatggttagattatttattccttgactatatgtttggtttgttcaattaaccacatagtcggaggctacacctattaggtgcatctagtcgatgcacctgactttatttttttcagcccttcacagtcttctgatttggaaaaagtactcgggagaacatggcgaagatgatagaaacactcgcctctggagtaactctattcgagagaagattat

SEQ ID NO: 49860 - DNA, 252 bp, Oryza sativa
tacactgctctcttaactagtgactgacaatactcaatatatcgattattgaagttcgtagaccaatacctgaatttccaacccttcatgcaaagtctgcgggcccttagcaacgcccaaggcttgctaagccttgttttcatggaaggttgggatgctttattgaacaagagatatttagggtcttgttagcaaaactcatacacaagaagtcttgaagccttgttcccgctttagcccgcattcccatga

SEQ ID NO: 49861 - DNA, 234 bp, Oryza sativa
  unsure (1)..(234): unsure at all n locations
cagcttgaaaaaaattaaatctaactttttatatattgttaatcgngttgtgctcgaactgcattctgttgcgtgcgtgcaattcagattaatattgggtttgcttggttggatctccgtccccgctccgtgacgcgggggcactcgcaccgggttccgatcgcagacgcaccacgcaaacgcaacgacgccgcacaacttcctcgaaatcgaaacccaaaaactaagcacagc

SEQ ID NO: 49862 - DNA, 445 bp, Oryza sativa
taagcttcgaataaaccgctacacaattatctgccgtactgtccttggacatgaagctaaggccgcaatatgaaacggctagaaatcaacgacattgcatactttgccaactcattagaccaaaattcatggctccagcaaatcctccttgtgagctgctgctttcactttctccttttctgcttccatctgggccctttacatctccagctccatctgtctgatgttctcggcatgggcacgctcgaacgttttcacgaagcttaaccaagttgagacaactgtccacatagaaaggtcacgatatcatatagctgctgcagacatccaaaagctaactggtattaatctgaagatttggtggatgcaacaattctagtatctatcatggccatacaagtccactaatgaacaaagccacaataaacagcaacaatttgatgat

SEQ ID NO: 49863 - DNA, 455 bp, Oryza sativa
  unsure (1)..(455): unsure at all n locations
gaagcgagtccaggtagggcagcgttggtccaccaaggttgatagtaagatgaatgtgcaaaaaagtaaggcgaacaaacacactgcaaggtgtttcgataagcagaaaaagacatacgaggtcacagagaggggtggtataacgcgtggtggtgttagattcggcgcaagagccttcaaagttgaatgtgaggggaactcatgttcttgccaaaggccattgctctaccatatgccttgctcacatcttatacacgtttatctgattcatgcaattgatgaggaatctcccaaccgaatgccgtatcagttctcttcaagagccgttgtgaacacatgggcaagtcgctttgagccatacctcgaccccacacagtggccaccgtacgatggtgaagaaattgttgctgacccanatttgaagattataacaagaaggaagaggagatcgaaac

SEQ ID NO: 49864 - DNA, 226 bp, Oryza sativa
tgaactaaaatctctctgcgcaaagattttgagagccaaatactaccctgatgggaaaatgcttcaggccaagatgagaagtgggagctcatttacatggcacagtgtgttagccggcttaaattgcttcacaaagggatttatatggcgagtgggagatggcacacagattaatatatgggacgattactggatcccaaacagccccacatgaaagtattgactc

SEQ ID NO: 49865 - DNA, 292 bp, Oryza sativa
  unsure (1)..(292): unsure at all n locations
agcttgagtgcttgcctccttattattctttgatgcaacggtacgagcctatagaacagatcctgttcaagtaaggtcgtgcttagcggacaaaggttttgcattttaagctagattcatttcttgaagacttccgaggtggtactatgtttggcaaatgacgccctcccatgtnttgttttgtattgtctcaaactctangtctgtgcacatggttgtcatgtactgggctgctgggccttccttcctaaaatgaacccaggccttctgctacaccatggagccgtagaaa

SEQ ID NO: 49866 - DNA, 217 bp, Oryza sativa
tccgctcgagccgtcacttccactatcactttgggacgggaccggtggcccttctattgcaataaactggggatgaaccagaatgggtgatgcgcctggaccaacacatgaacattcggtagggggggaaacccttatcaatgcatacgaaagttcttgctgtatcatgatgtgtccaacctctggagctctaaagctcttaaagatggctctgacg

SEQ ID NO: 49867 - DNA, 438 bp, Oryza sativa
  unsure (1)..(438): unsure at all n locations
agcttgaagaaatgtcggcaagtattgacactctgttattcgnngnctactttgccatcacgttgctgttgagtacaattaataatactaagttaagtttctatcgaaatattaatcttgggacctaataagatagtctcttatgagttaaaaataaacgcaaacctttcgcactacggtgagcttaagatcgagcgaagctaggccaccaagtgggagctgaggagctccagtcgtaaaatgcaagaacgcccgctggtcctctcttccaaactcccgcaagatctccaggaactgaaaagaaaacgatttttccaatggacttcctcattacaagttaagatataaaatatgtgggaggcataggcttatatgttgtacttacactaattactgatgcactgttcgcatcatatccataatcaaaaatgatgtgat

SEQ ID NO: 49868 - DNA, 378 bp, Oryza sativa
  unsure (1)..(378): unsure at all n locations
tacctgtgaatttatattccatggtaaaagagtttgtttgcattctatgacttcagccgctgctttgaaagatgatcttgccagtcttgaatgtgaatagacagcgaaaagtgaaaatcagattattactaagaatcttgcttcacctagtacaacagaaccaagtgccacaaagaatgacattaagttgacgggtgctttgctagcttctaaatataatatttgtgcactagaagagctagattcttgttgctatcctctattctgcaaagatcatatacccacataggctactgcttccagtactatatattctgtgctactcgctgttactaaccttatgcaggaatatgagggtgctnttcatgatgagatacc

SEQ ID NO: 49869 - DNA, 297 bp, Oryza sativa
  unsure (1)..(297): unsure at all n locations
caccccngctgcagctggcttttgcatagccttattttgcgctccangagaagggaaccaagaccagagcccgtttcaccttcaacaacgttgaacacaaggaaaccttggagaccagtgcagttgtcaacaagctttctgatgcggtcaaggcacagatcaacaatcttcttgccaactgtaaagatttagcaccccaagttagtcatgttattagccacataacaaaaaaaatagcaccgtggtagtaagaatggaactcactggtgtagtgaccaccggcaaaagatgtagctg

SEQ ID NO: 49870 - DNA, 359 bp, Oryza sativa
  unsure (1)..(359): unsure at all n locations
tccattagctcaatccactactaggagaacggnttntctatgtggttaaatttaattttcacgtgcggtgggctacccgcacacacccatgggtctgagaaaatcgtgatttttgcgtgtgggtggcacaccgcacggaaaaataaaaatcctaaaaaattaaaaaattaaaaaattgaaaacctagaattgggcggcgccgccgtctcctactcgtgcttcttctcgtatgctgcggtcgatgacgccgctcccgcactgaaaatatcaaaaatgagcttatttttccatacgcgaccagttataatccgtgtgtaaactaaatgccttcctatccaagaaaatagtttctttagagc

SEQ ID NO: 49871 - DNA, 349 bp, Oryza sativa
  unsure (1)..(349): unsure at all n locations
agcttgtcgagcatccaatgtttgtttttatttagcctcttcagatgcttcttcaaaccccttgcctggnattacgggcagggaaaaagaaatgatcagcacaaataacaacataactgcagagtagcacgacatgaatacaatgacacaatgaaatcacaaggttatgaacagccctaacatcgctcatggcaatggtgcggcatggtttctaagaaatctttgttgattcttaacaaaaaaggaatctagacaccagaacctataatccttgaaaccaggcagatatacaagatgaacctttgcacgtaacagaaatgttgaggaacaataacccagcaaacaacac

SEQ ID NO: 49872 - DNA, 276 bp, Oryza sativa
tgttgggttcataatgggacactaactaaatttttcatcttaatgttcatggtcgtgacaatatatgacatccattctcgagtctattattgtccctatcctactggcttgtgagacactgaggattacctacagtacgacgcacactgcgaactgcagagctctctctcgcaaagaagaactctgccattggaaactgtttgcaagaaacatcataaactgatgagagcagaaacataacgcttgcttcaccagatgaaagtatgaaagtgtgag

SEQ ID NO: 49873 - DNA, 374 bp, Oryza sativa
ccctcccgcattgcactcgtgccaacgcgctcatgcacacacattcacactgtgcttatatgaacatcttcctttatgtaagctcacattaagagaaagcttacgaaagaggagaagatataaatgggtgatgctggaagagaggatagatgataatactcaaccagaacagctggaaacagaaaatgattcgtctcatgatcctctttttggtgctattttacctatgttggcttatggcacaccttgtatatctgatcatgaatgtctttcaaattgctttattcctctctattatatgttctatcgcgtttagaccgtggcttagccattgctgaaacactacagaataaatgccctcgctgaacataacg

SEQ ID NO: 49874 - DNA, 169 bp, Oryza sativa
  unsure (1)..(169): unsure at all n locations
ggtgctggggcagaacaacgcaatcctttggaattngtcatacattccaatcaaaactcaagatatatttatgtggcccagtagccacccccacatcagcctcgcttgttttttgatcggaattcaggtgaaccaaagcttgcgctggagacaaaaacgaaatgagttc

SEQ ID NO: 49875 - DNA, 417 bp, Oryza sativa
gcctctcgcccacttatcacataatcatcgcacctgtttcactctcctttgggagaaagaaacagtcttggctgctacagccctgcagctcactgtttcagctagaattcagcaccctgagaaagtatgcacacggaatacagcaatggacaaacagacaggaacattgcatactatcattaactggagatcagattagatgtacaactgatgaatctgcctgtcaacattattgctagctatcgatcgatgaacccttgtaacatcctatactactgcagcttcagcacgtgcacatattattcaagaacagcttcagaggtaagctgggctacaaggattgaccatagacaaaagtcatgtctatctatcaccttattaacctaatatgggcaagttatcaatcttcgttgtcat

SEQ ID NO: 49876 - DNA, 257 bp, Oryza sativa
actgaacatatcgccggcattcttattatggaatcggcgcgtcacaattcacaaacagaagtatacatgtagagttctactccgaatcaaatctaaacttctaaaccgctacaaattgacgcatcgctagctgcaacgccacctattataccggattatgttaacatctcgtgcatccagcaagccaagaaagcctctatttgtcatggtggcggcgaatgaagacgacacggtccgctgcggggaatcctgccggt

SEQ ID NO: 49877 - DNA, 445 bp, Oryza sativa
acactatagcctactacagcttgacactgtacaagttagtgctataaattagtggcacccctttgataccttcgggctgtgaaaaacatgattcgcaaaatcgatcaccagttctcgtgaaatggctagatctttatttgttttaaaaagggataagtctattgtacacccccaaacttttatatatgtttatataaaatacacccttgaactacaaaaccgggtataatacacgccctaactattaatactgaacattttatcccctgtagcggtttaaagactggtttgatttatatggacaccacttagcatggtctcaccaagtaaagcacgtctgatgcacccaccagtcccggtggagagggcaactgacaaggatgagtggcgactgcaactaggacactaggacggaagcctgagtagccgcgtgctcctccttgcc

SEQ ID NO: 49878 - DNA, 292 bp, Oryza sativa
taagggtcacaatttccaccaaaatctggtgaattctgcgaaatttcaagggtttgatgaaggttggaaggagaaaccctattaaaattcgatgaattttatctaaattcaaatttgaattggataaaaagaaaacaatccaataaaatcttggtaatagtatgatattcatagaatttattgggatataaatttttgaaaaaaatgatgtatttcacgtatttactggaatttatagtaggaaagaaaataattacgaattaaaaaagggggaaaataaagttacctcttt

SEQ ID NO: 49879 - DNA, 432 bp, Oryza sativa
cctaatagtgtatcaggttatatgtaacattgagtcaatactcaatagcaggtgctatgcttgttaaaatatctttgtgacataaactttttgcataagtacaagaagtttgattaacataactatcttccaaaaggacagcatgatatttataagaaagcatatgttttgagctactaaagtagccttaatctagtagtgaataagatgtacatccacaatagaaaaaaaaatgtcaaccagcaatgtgctatcattgatgacgtcactgctggagaatatgtggagatcctgctgccagaggagctgaccacctatgctgctactaagttcgagaactgttaaattgtgtaaatcgtggtagcgtccgtgcttaatctagtctctatgactgaaattagccatgaccatttttcgataaattttcgcctt

SEQ ID NO: 49880 - DNA, 385 bp, Oryza sativa
  unsure (1)..(385): unsure at all n locations
tgcagtttggttctccatcgcatcctcattctcatcttaatncncctgggggaatgggacagactttcatgcggcaaaaggtcactctgtcccccactctttcctcctttaatccaatgaaagaaagaagtaatgccggcgacattaatattggcccccaagctgagtctgtctcatgtggagaagttacagaacgggaaagttcacaatgtaatggtgctgataacccgatacgactagtagctcagtccacactacttatctcgagtcaactgatagaatattttgtctttgcaggctcatctgatggatcagaggagaaagacgccaatgctaaacgttgttcgttggacagtaacatgatggaatcacataaacataactc

SEQ ID NO: 49881 - DNA, 257 bp, Oryza sativa
tcctttttacggacctataaatctcagcttactaacttggctgactcccctgaaaggtgcagctctcttggaaacatcaaaaactccaaatcagcaacatcaacacaatttgggtgagaattatccttaggatccacaaagtgctcaatctcggcttatgtgaattcacgcacacgttgaagaacttgtccgggagaaaattggattggcttggtttgaaaccgtgggtttacaccaaagaaagaacccttttaaaa

SEQ ID NO: 49882 - DNA, 375 bp, Oryza sativa
  unsure (1)..(375): unsure at all n locations
tcttgcacttgttatttattagtataatgcatcttcgagcattctgccttggctttacaatatatgtttacttttcgacaggttttacctaaaggctctccattggtaccagacctttcaaaggccatcttgagcttaacggaagaacctgaaaggttgaagattgaaaagacatggttcatggattcgtccttggattattatggcagtcacagcaaaggctcatcacgtatcagttntcagagcttccaaggtcttttcatcattgtcgggtgccttttaggtgctgtgctgttgataaactttagcaagtttctatatgacaaatgcaaagagatgagaggcttcngttcagaccgtgttcatagtggcgag

SEQ ID NO: 49883 - DNA, 322 bp, Oryza sativa
  unsure (1)..(322): unsure at all n locations
ctattgttttttattatccaaacctacggtttgttcgctttattaccaaattcagcctgattttattagattttagtagcgttgatgcattttcaaaatttggtagcgtttttataagataatggttttgaaactactagaatttgattatatggtgttggtgaggtagccgttagtttattaccataccaaatttgaaaaagtggcgataaagtgaaacggccaatagaattcgttccgatcgtatggcctgcagctgataattgctganaaattgcacgtccgatatattttggctgaaagcaagtacacgaaatatttt

SEQ ID NO: 49884 - DNA, 452 bp, Oryza sativa
  unsure (1)..(452): unsure at all n locations
tactcagcctctganagaaagctttgttaatggctgatagtgacctgaaccctctggtgctggcgaaggtgccaagggtacgggtgtacaactcacttcatctccgggtgtgatccacatgtggattgttggacgtccatcttactaacagtcctaattaattacccagaaaaaagacgcttttttcatctataatttggggtgtcctggtaatggggatcagacagctgcctattactggttgtgatttgtgtgaacagcagagccaattcaattaaaaatttgccaactttacgtacaaatggtcttgtcacgaagtgagattacggatgccgcttatgggtaggatggatttggcgaatggctatcacgtanggagtgggctgctntgggaaaaaaaaacaaacttgctnttntgctgaaaagataaacatgtgaagagagagaaataa

SEQ ID NO: 49885 - DNA, 445 bp, Oryza sativa
  unsure (1)..(445): unsure at all n locations
tcttttggaaaacaaatntgaccacatttttctcccaacacctatgaatgttgattgattcctcaaaatccagacggctctgatgctgtgcagcatcagcaaacatatcctgccagatcagccttagtgctccatttgtccgcaccctttatgtcactcacacttacagtcatctgcagtagaattggtgagtcaccttcttcttgttctttcctgtgtttgtcacactccctgtagagagataacggcttcgcagagtacacaagaatgtcctattccattccttgcatccactgtgaatgtgatgcgactagggctagcttttctcgtgaattctcagcagagagaaaaaaaaataatcttagcagagatagatgagaaaagatcgatggccattggccactgcagaggcatccgaggaacaaatgcatcttcattttccctg

SEQ ID NO: 49886 - DNA, 255 bp, Oryza sativa
tgcagcttcttgatggggggatcttttttgtttctgctggatcccctccggagtgatgctcttgctcgccggagagttgggaagaccaacttttctctacacatttttctgagctgtcgtgcaaaatggtgcttaatattgcgagtcgggcagcagagagcacgggcttgttctgtatggtctgataacacaggctcacggtccgcgttgctcaggacacaatacatggatgctgttctgtaatggcggtatggg

SEQ ID NO: 49887 - DNA, 437 bp, Oryza sativa
  unsure (1)..(437): unsure at all n locations
taaagactcgaagtcggtcctcctcgtagcgttcttcgcggaaattacgaaagcgcaaagactcgaattcgacttcactcggcaacattgcttctgccccatagacaatgaaaaaaggtgactggcctgtggcccgactgggtgtagtacgcaaagaccaaagtactgatggtagctgttccacccatttgccggcataaggttttagccggtcaaaaactcgcgctttaatcccttgaagtatcatgacattggctcgctccacctgtccattgctcatgggatgtgccactgaggcatagcaaatcttaattccaaagtcttcacaaaagtctttaaaaactccgccagtgaattgtctgccattatcagtgatgatccgattgggcactccaaatctatgcacaatgntgatgaagaagtctcgagcgttatct

SEQ ID NO: 49888 - DNA, 357 bp, Oryza sativa
  unsure (1)..(357): unsure at all n locations
acaacccgacttctttgtacgctctgtattaacaagggagtacaccaaacgatatagtttgatacccaacataaccaatattgtgacagagctggtcgagatcaaaccctgtagggcggagcctcaatgtggatagcatggatgacanaatagccgtgtaactcttcactagtgtcaccactgcgaagcaccatattaccacaacaatatttgacatacggcttctaataatatgacctgtgcataatgtaaccaagaaaatacgttatttcagaagtgatattatagaataataaataaatctgcatgcttgagatgtgagttataatcatgagaaaatgtcgttgtggagaaagc

SEQ ID NO: 49889 - DNA, 445 bp, Oryza sativa
gcttacactgcacacagcacgcagcacaaccatccgctcggcgctccatcgatcagcggcggcgggcgacgccgcgacgagccctaccatgcggcggcggcggcagctgaaaccggagagcgagtcttccggcgactgaggtgaggcgagtgtgtcttctcggttgttctctttgttccgtgatgggctttttggacgtctcacctttctctgctcttgcgcagcaagggcgctcgccacctgttcgacggaatggctacgaggcgcgactgcggcaggagacgcgagggactcacggccgatgagaacagcggcgaagactgtgctatcaccctcccggacgagatcctccacaatgttctctcctttctaccagcgcacgaggccgtgtggacgtgtctgctctcctcgcgctggcgcatcctttggagggtcgcccccgtgc

SEQ ID NO: 49890 - DNA, 348 bp, Oryza sativa
  unsure (1)..(348): unsure at all n locations
cagttatgatcagttaattcatgaatacattngtagatgcttacccggcatgaactgtcttgtgcacgtgctcaggcggtagtcgattatctgttggcgtttgatactctaatgtaagatataaaaggaaatggtctgcttcggcactcgcagatccgaccacgttttatcctgtcggtgccattatgatctaacttcgggatcatcacatctaaagcttgttatatacacagtgatctgactctcatatttaactgtgggaaaatcttgtctctgaatatctggatttccaataggtcaatgaattcagggtgatggcaccctgtatgttgaaaaagtagatcttga

SEQ ID NO: 49891 - DNA, 448 bp, Oryza sativa
  unsure (1)..(448): unsure at all n locations
ttaccgccgctgcagctntcactccagaagcctaaaaattttttttttcagctctgccacaaactaaagaacgttctgcttgccaacttgtaaccggcgtccactgatccaagacgattgcgcagtcgaaaccgaagtcaagagattaaataactccacgctcattaataatcaatcaataaaacccatgttagccttctaacaaagctctcggaatccaatgtttggaggaccgcatctcatcgaattcgcgccgatttgggatcgaatcggcgaatcgcggaagcgatatgaagttcaagcgagagattgggaagggcgaattcgatcaaaacccccctcaccgagagacggaatcttgttcgaattccagcgattagatgtcgagacaaacgccagggaagaaggtgaaactaccaacctaccaaccaaccaaagaggagagagg

SEQ ID NO: 49892 - DNA, 389 bp, Oryza sativa
  unsure (1)..(389): unsure at all n locations
atcttcaccttatggagatttagtatgttatttaagnntattttcataaaaacacagccgatatttagaaaggttgcgaagcaaacacgttcaacgttatcaaaaattggtaataataaaatgtgccaaaattcacaaagtgaacaaattgaagattgaacatgctcatactgtcatccaaaaaataaatttctgcgaagttgaaaatattattgtctacaagtcatatatcaaaaatcaagattaaaaacctgacaaccggagattaattatttccagttggcatttaacgtatgtgtagtattattgaaatcttcaaatctgccatattttgggtaaacctggtaacaaagatatatccatatatggtatttgtggagtgtggggat

SEQ ID NO: 49893 - DNA, 405 bp, Oryza sativa
ccgtggcttttgagcttggacccaagcgagctcggcggcgacttgaccaggaatttgtgcggagtctgcctggcgatgatcggtgaacgagtcttgtagaatcacttttgcttcttggacggcgacggcgagtcgtacgcggcggacgaggttgaagcgaggaacgccgggttggggaacatcactgtcttcttggcccatggcctgttcctgggggaaacccggtttgcggacaccgactgccgcccgagcggcgaggcgggcttgaactggatgcaggaccgcacgcggtcgcgcgactgcagcgtgcttgcctcagcgcgcgcggtgccccgctggctctgcttctacctggcgcggtgtgcgcacttcgtgatcgcctctgcgtttactttacttgttcta

SEQ ID NO: 49894 - DNA, 455 bp, Oryza sativa
  unsure (1)..(455): unsure at all n locations
ttccatacaatactatgcatactacatccatattctattcaaaatttcagaaccaccaaatcaaccttgtatatcatggacatctttcaaaacatccatgttagcataacatttttcctataggaatatcagatatagaacttataggaatgctttccctttcatgagagcaaagcatcttacaagggaaagtggagcatcactggttccaataataataggataagcagacaaaagaaacctttagaacagagaaactcttactctntcatattataagctacaacccccatctcgttatatataagcggatcagatgggcagatagaatttgcttgcgtgaagaactgcatcacagcagaaagaaaagggggtttaatanaatgatgacaaaactattatgccttgccaaataanaccttgcaaataacatactctccatgataggctctcat

SEQ ID NO: 49895 - DNA, 336 bp, Oryza sativa
ttcacctctttttttggaggccgacttccaaaaacttttgaggtaagcgtgcttgggcttgaaccaaccaaaaaatttttccgggggaccccaatggaaaccaaagttgtaaaaagaattggtggttgtgaggcaattatgtccaaaaaaactgcagagtagggggccggctagaaagcaaaaaactgccaatgtaagtggccctgtcttggagaggccgatggtacaaatggtatcataacccacttctcgcgggttcatgggcgcgtttggctcactggcctaaacattgtgtgcattgctagtgtggaccccgagtggtacatatcattgcac

SEQ ID NO: 49896 - DNA, 418 bp, Oryza sativa
tactcagctcgaatatattagactattgatttacattttgacaaaaattaagtaagacgaatagttaaatgtttgtaaaaaaaaattaacggcgtcatatatttacaaacggaggtagtatgcaattatactaagtggggatgatttgtatggggatgatttgtatagatatatatagaattaccacgtagttcagtaataacgtatcccatgggttggcttcatggcccatatatattatttattaattaagccctatatatacgggcccatctgaataaccacacacaaacaaagatttcacataattttcctagaagagaaacatacaaataaaaacaatgttgtactacacgggcttaatgcgatctgccttcaggcccagccaatctaccctgaaaataaggaaaagtacacc

SEQ ID NO: 49897 - DNA, 417 bp, Oryza sativa
atataaaaataaaaaatatatagattatgctttacaatatactaccttggtgcccccattaacgatagtactagagattgccaccactaagctaattccggtctatgagtctatccaagtgcttttacataaaagagcattgtgagctttgctgataatgacataaatttcggcaaaatatggtaccaaatgctaatgcctttcctgcaaagattctgattctaggagttgatagatacctacataatttttaggcttacttttttttcaaaattactttccaaattgttgaaatgaatattgtgctctacgctcctaaaatatattttctcaaaaaaatattctattgtattgcacacttgttttaagttcatttattaaatgtttaatttataactacaatcaagtagataatct

SEQ ID NO: 49898 - DNA, 418 bp, Oryza sativa
  unsure (1)..(418): unsure at all n locations
ataattaattttagagtttctttgccactttcaataaggatgagaagatgtctttttcctttttcatggagggagtactccatactgtacactacagtgctacccatttcattgaatatattgacccggattctgatcctgatgtataaaaccagaggcgagaagtccccgcaagctattggtcattgttactttgtttctagtgttctccaattgactaggacaccaggctttagctacgtactcctactgaagtcgaatgcagatacttctgctaaactgaaaaaccacgttgtaacctcggttntggcactgcgcacttgtatccatatatnggcacagatatcaaccgccctagaatgacacacgaaattgtaaaatgcttatatatactactangtatatttgctttataccc

SEQ ID NO: 49899 - DNA, 397 bp, Oryza sativa
agcttctcccgctcagcccaatggttaatgttcagtggcgcacaacctctctccgagcgctagcggtgacgacggggagtaaaacccgcgccgtcgagctcgtactccaccgtccccctctcgccgaggtcttgggcggggggaggcgctcgaggaggtcgaaagatccgcgactttgccgcccgcgggcgatggagaatgacggcgagacggggagcgtcgtctcctcgtctacggcgatggcggcacgccccaaggcgcgctccaggctgcgggcgcgctcctgcgtcacccgcccgtcgtccccgatctagagactccagcccggcgttggctagatgacgtggccgacttggtcatgacagcgcagcagcgcctaggcgctggcgggcgggtc

SEQ ID NO: 49900 - DNA, 432 bp, Oryza sativa
taggacaatgcgagcgaagatgatcaagtgcaccacactcaaagcaacgattaggacctcctcttttcctgttgctgacattattcatagctcgagaaactttgttagataacaaaaccaaggcctcctcctcgaactgttcgagttgatcatcggacatggcattaaataaaacaagaacagaagacttcgatgaagaagcaccaacatccaaagaagttgaagatgaaaccaaagcactagacttagaatcacttttacgagaaagaatattcatctcatgagttttcagttttgtggtaagcgaatccaaagtcaaagtagacatggtaacagactcctgaatagatgtaactttcatcacaccaatagacatgtcaagaccatcaaaaagtgacgagaaatctcagattgtggattattagcatcatg

SEQ ID NO: 49901 - DNA, 431 bp, Oryza sativa
  unsure (1)..(431): unsure at all n locations
agctngggctaatgtgcacagagacattttcttattatcgaccgacaatggatgatgtttactatgatatcatttccatcaaagaaaaatattatgcactgatcaactgaggaaatggatggatactactgaagttcacctcctgaaactagtaaaattgtgctggtactcatctttccagttgttgtagtgaagattctctttatgaatccaaataaactatgattacgattttgtagttacacttgtacacactacaattttaacatgggggcaatgcagctgttaaggttctcccatgctgttatgcagtctattccaaaggcattgatcacaaaattttgatggcccatgcaacaattgcataggagtgattttctatggaacggcacacgaatataatatncaataatttgtgtactgtgaactat

SEQ ID NO: 49902 - DNA, 90 bp, Oryza sativa
ccccccacaagcctacacttttttttccctatcagtgtcgcctaaggaactgatgagtgctatcgaaaaaaaaccccttaaaaaaccact

SEQ ID NO: 49903 - DNA, 429 bp, Oryza sativa
  unsure (1)..(429): unsure at all n locations
ntatttatatgttcaacagatgaagtggggaacacagcagcattcttagcatcgccgttggcatctgcaatcactggatcaactatctatgttgacaatgggctcaatacaatgggacttgcacttgacagccctacactatccacatagacgtgtaaactattctcctggatggttccgtttggtagcagatggtcattaggccccaactgaagctcaaaaccagatgctgatatgaaaatgaggaaagatggtagtttgaagatgcagactttctagacagttgagttactgggttttcttcattatggtctatgctagcaatgagaattagcattgtaggagtacagtttgctgattgttcttatgctagtcctagcctcctatgatctgatctgaagaaagagaataatggaagttaaaagaaca

SEQ ID NO: 49904 - DNA, 279 bp, Oryza sativa
aaagtatgattaggtattcagtgaggaggagcaatgggaagtaaatgagagattattactagagagttatgaatgaaataacaacctgatagagaatatagagaatatacaagaagaagataatgcagaacaatataatgattttatagactcattggatgaggtatgtttgcataatctagataatgcactggaagccatggaagtagattcgggaacatgaaaatggaatagatacggtgagggttctgtaagaaatgaatgagaaagagaacgacc

SEQ ID NO: 49905 - DNA, 394 bp, Oryza sativa
tgcaagctttcgcctcaccatcttcgctttcttgttcttctgacggggtccctgtccgacgaagcacgcgtacttcccgagccatggctttcgcccttatggtatccctcttcgaccttcgccgcttgcttccggtttgaacatgtcgcccaagttttcggtttctgcaggccccgccgaaggcctttcgcagtatacctccaacaagcccctcacgagcaaaggtgagtaaggagcttctgccgagaccgtgcaaatcgtatggtataccgcgaggcgccccctttctgtcgatgttcctgccgaaacctatgtttgtgtggctgcaaattaaacaatttgctctcatgtgacaaaaaaatatgaagaaaatttcttcctgtgctcgcaaaag

SEQ ID NO: 49906 - DNA, 443 bp, Oryza sativa
  unsure (1)..(443): unsure at all n locations
tgcggcgcctatggatatcttggatgaaaacttggaagaatctgatccagcaagatgaaagatgtggcctgttcattcaaaatatgttcagaggctgtgtaaatcaaatggatgaattgtgtcttagtgcacctgatctacaaatgccatgggatcctggtggtttatgtttactcaagtttctagctatctcttctcttggacaaatcacatttcaggcagtcaaattctcattgcaagacagttctctctttcacatgcgaagtgccaggatttgcttgagctgttcttttgagatgcacgttttctgttggcacgctgaaaacaaattggacattaatgaagctnttggaacgatgcaagaatactagagaaatcaaagtggaggtttgccatttctgaagttacttgtcataacttatggacaagtcagttcaaggaga

SEQ ID NO: 49907 - DNA, 393 bp, Oryza sativa
accgcagctgcagctgtcctaagactctttttttttgttctaccgacagcccttcgtggtatacctccaacaatctggattcacacatctatactaactagcaaaatgcccgtgcttcgctacggtgtattaaaactgaaaatatttgtttttaaccgaattttttttacactgctttggtacttttgctcgctagaaaaagtctcaaatgatagagggaaatatagctcataataaattattattcaatagtgcgttgctacggagtaatttcaattaaaatcacaagaaataattctaggatttaatttgtgatatgagtccttttagagtaaggcattcttgatataaatatgccaataaacaacatgtggaatacaatatatttcacat

SEQ ID NO: 49908 - DNA, 425 bp, Oryza sativa
  unsure (1)..(425): unsure at all n locations
ttaaaggcgctctgaggcgacagctgatgcccacngctaccggcgacgatgtttgtattctcgagaggaatgaatccgagaggaactctaatccgacgctttccaccgcgcacttgactgatatttcaaagaggaaaaggttcatgagatcccagagaacatttcctctcaaccaattctgccggaaaaggatggaggcggccggattgtaatgaaacagcagcggccgctcggcagcagcgcgctatggtttcggcccgacgaggacgacgatcctgacaggtgggacccacctgtccctgttgcaagggcgcgcgcacgcggctgcagcttccgactgtgccgacctttgacatgatgagagatataggagtttggttcngctaaatgacatgattcctagatgtgtagacacatgcttgtgg

SEQ ID NO: 49909 - DNA, 286 bp, Oryza sativa
agcttgcgatgaggactatgtatgtttatttctcttccgcctcacggtagcgaactctttagcgtgatgaaactctacgtttgtccgtcgcacagatttcgatgcgggctgggctggtgattcatcaaacggtcctgcccgtgttaaacatcccggtagacttgtattaaatgggctgggccactcacgaccaggttgcgggcggcggttgccttggctgcacaagacgacgaatctgagggagagccagctgtccacatcacaccctactcgtgcgcatcacagg

SEQ ID NO: 49910 - DNA, 341 bp, Oryza sativa
ctcaagcttactggtatatgccaatggaactaagtaagattccatgaatcctgttgttatacaaatatatggccaccagtttggtagagattatttttgatgacaaggatgtccagtctacagattcaaatatgttggcaccaaggtccaactgggtcaagtttgcaaagcccagatagaaggaacatactccagtgaatgtgttttcacggacctctatcacttgaacgttccaggcatatactaaagatgtcggcaatgtgtcgtgacatgggaccgcgagtatcactattaatggcttggaagtagaattactccgaagcctttccctttggtgttct

SEQ ID NO: 49911 - DNA, 416 bp, Oryza sativa
  unsure (1)..(416): unsure at all n locations
ccgcatgcaagcttatctcgctaccctttcaaaagcatcttgttctatgtccaaantcatctcgagtcagcgggaatcaccaaaacaagacagtggtgttgctgaaaccgaacttgggccttggggctttgaatagactaggcccatctcggaagtgtcaccctccacctccacgaattagcactgaaccctagctttattttcctctataaatagctttgtacatcctccaaaacatttgggttttgtttagttgaattntgccaagtgccattcaccttgtctctagtcctcgctcgattagtcggcgactatagattcagagcccccaatagttggtgtggtgatttgccgggtcgattagatctaccacttcaatcgcaactattcatttgtgcttaattccctattcgcaa

SEQ ID NO: 49912 - DNA, 338 bp, Oryza sativa
  unsure (1)..(338): unsure at all n locations
tttgagtgcaggntcaaggtggcggttttataaagaagggagcaatccgccagccatgttggatacaggaaagnaccgtgcagtctgtgtaactgctactgttattaagatggttagcagtaaaaactatgttgttaggcttaaaaataaggaaggctcagttaacatcgtagattactgctatattcgaccacaacctaactttgacagaaagaagtttgagtatgaactggagccctcttgagaggttgaagtgaatctgggtggtgcctggtcgctaggcgtcatctcagatgttggaagctgtggatatggngtaaggctaaaaggacatgata

SEQ ID NO: 49913 - DNA, 202 bp, Oryza sativa
  unsure (1)..(202): unsure at all n locations
aaaaaaaaaaaaaaaaagaaaaaaaaaaaaaaaaaanaaaaaaaaaaaggaaaaaaaaaaaaaaaaaaaaaaaaaaaaaaaaaaaaaaaaaaaaaaaaaaaaaaaaaaaaaaaaaaaaaataaaaaaaaaaaaaaaaaaaaaaaaaaaaaaaaaaaaaaaaaaaaaaaaaaaaataaatataaaaaaaaaaataaaaaaaaa

SEQ ID NO: 49914 - DNA, 326 bp, Oryza sativa
  unsure (1)..(326): unsure at all n locations
agcttgcagattattaggtcatgaatgctatctatgtattataaacgcataagcctaagatacttatgggtgttgctaccacctagcactaccagctataactacaataaataaggacagggcactacggtcatcaccccaatagctcgataactcttcaggcacttcacccgttgtgccaagctaaataacaacgcttatctttttagcctaagtatgacaacattactgccagtaatanagaatatgcgcacggcccacctagtatgctgaagcaacgccacccgattataattccaggctggccccacgaaactctcccacct

SEQ ID NO: 49915 - DNA, 103 bp, Oryza sativa
  unsure (1)..(103): unsure at all n locations
tgtatgattatgaagctnttctcggattacacctcattctctttcatattatctggttgcttattacgtaggcagagtcaccacaagaggaagaacttttttc

SEQ ID NO: 49916 - DNA, 393 bp, Oryza sativa
  unsure (1)..(393): unsure at all n locations
tcctatcaaccaccttgccaaggatgttggtatgaaccaagactgccattgcccaaaaaaaaggcttgactacgattggcgtagaaccaaacggatcaaagactccagtttatagttcaattgcgatgaaaattccataacaggtcatgttctacaaagattggcacataaaaatatgtgggatcttttttgaaaataagacgctgctatatatatgagttactcacccgcccacagagtctattatgggaaatctatgagggagagccctctaaagaggnctttatttgtagcagacaatatgaacatgctttatattattcacatgctgagagttgaaattaaatgctacagtatgagaacttactgccttcccctgtagttgatatatga

SEQ ID NO: 49917 - DNA, 410 bp, Oryza sativa
tcttctgttgctgtttatctgtatccctgatataaaccagtgtgattgattgtgctggatactctcttcttttaatatgttgacgtgtgattattttacgcggtcagaaaagaaaagaagaatgattgataatgttcatatgggaacacacaaaatacgtaagggaactaatatggaacatgtattgcatcaagcaaatagtatgattttgctactagctttcttgtcttacatcgagaaagcatttcacaccaaaggtgattaaaccaaaagtacagcaagcaccttactcgcaagcactttgaacttatcatcgacgacaacgtatacatacggatcgctggattgactgactgtctgtgtgtgtgcgtgtgtgctcatcgcatcactacgggctggctttattgcct

SEQ ID NO: 49918 - DNA, 401 bp, Oryza sativa
  unsure (1)..(401): unsure at all n locations
catgcaagcttgccaacagctatcgggntcgcctangttaaggagangcagcgaagcaaggggtggagcaccccggagcaatatagctggctcttcgcttctgcttcatcctccgggagccaaccgatcttgaggtattttacgaacggngttcaccagtcctttaggtcttcacacagctctgcctggtcgattgccatgatgtccaggatctctatgggcacacttggtgcgtacaggacctcaaaaaagatgtctggcgaatgcgggcctccacaagcagcagatttcgccagggcgtctgcttcttcattctggcctctaggtaagagntcgaccggtatgccggcgaaacacttttccatagatcgaacagcctcaagatacctcttcatcccttc

SEQ ID NO: 49919 - DNA, 435 bp, Oryza sativa
  unsure (1)..(435): unsure at all n locations
agcttatatcttacggctatagtttctttttatatctccaagactccaactctctaaacagtttatatttttaaagaaactacgtagctgtctaataaataaaaaaataaaccggaggaaaaactgacataacacaattttctaaagattttcattggttagcctatttatcaggatcacaagttccccaaatataaacaggtaacctggtgtttctattctaacaaaagtatatagttatatatactacctgtcctaaaatattgttgatgagacatcacctagtattaattacgaatctgaacagagaatactcaaatctagatactaagttatgtctcattctatacataacaacattntggaacagatctactaattaataaaaggaagagtaaaaactcacaaacacaattttcttttaagagtttcact

SEQ ID NO: 49920 - DNA, 442 bp, Oryza sativa
  unsure (1)..(442): unsure at all n locations
tgaccatntgtcaaatcgggccgggcccaactcgggccagattggaggagaagcccaactcattcgcatataaggttatcaactttgcgctccaaacctagtggcaaggctcctattcactattcctcggtggacaggtgccttgtgcggttccttggtgaaaagccctaagagttgctttgttcttagtagagtagcgatcctgttcctatttgtgttgtgcttgatcgattaagtacttagtgtagtgtgtagtgctttgcatcgtagtgtgccatgtgctaatctatttagcatacacgtttgatatatatattaggatttttacataaattagtttgatttcataaaatntctataaaatattctacatttgcatgtgcgccttattttttttaatatgattttagttctgtgtttggaaagatagatagataattga

SEQ ID NO: 49921 - DNA, 405 bp, Oryza sativa
agctttctctagacactgtttctcactagtatatcctctctatcctggcctatcttttgcttggtggcctttgatgaaccggaggaagatctgaccacacacgttcccttggatttgatacccttggaatactccgtaggggaagcgctacatcggtatatccgtgcgcttgcggattttatctgtgatcataagaaataccaacaatcggctgacattggatcggatggagagcagcctatgtagccgatcctggtaaggtggttctagaatcatctcagggatcgaatgacgtgctgcacacgtattgccacgtatggattaagtcctaagaaggcaattgttctattaattacgatatcttggcagctctcttacagatattctcggtcagggcccacctga

SEQ ID NO: 49922 - DNA, 263 bp, Oryza sativa
  unsure (1)..(263): unsure at all n locations
tgactgccaaccanattcattataattaacaataacaattatatttggttttgccttaagaagatactagaaagtaccaagacaaatactagcatgatacccataagtatttctatgaaaaccaattcatgccaaccattccaaccatgtcagccacccaataaatatttcgtatggcactctgttgacacaatgacactgacctcggttgccggcattgtctccacagcacaccagacccaatcctaagttcatccaagacc

SEQ ID NO: 49923 - DNA, 429 bp, Oryza sativa
  unsure (1)..(429): unsure at all n locations
agcttagagtagtattatagctcactgttatatttgctctaaggagcgccatccacgacgcactcgcgcttcgggagaatccgcgaggaggcgctataccgatatgtttcttggcctatattctaataggaatcgaggagttcgtgtgtttgcactagtagaattcaattgctagtcggcaacctgaccacgttccagggatgcacgtcacaagtaaacagaacaattaaacagctaaaagtatagagcacatggaggtatatatgtacatgtggccctatataaatctaacactacacctgtccatcaggntgctgcacacaaattaaggtatttagtaagattgatttcttaggctgcgttcgtttggagaacaaagcgagtttgtttgtttcgttttccacgccgcacgcttccaaactactaaat

SEQ ID NO: 49924 - DNA, 296 bp, Oryza sativa
tccccacggtagaggctgaggagcgtgcacatcggcgaacgccgaggaggacctacgagccttctctctggcgcgcgctggcggctgtgagccttctgttggaggcctaagaagagttgcgtgcgctggtagaagacgatgaggagccacacatcggcgaaggacaaggaggagccacatgccggcggaggtcgaggaggagtcgtgcgccgatggagaccgcggaggagccgtgcacgccgatggagactaaggaggagttgcagtgactacaagcctcctcgctccagcaccga

SEQ ID NO: 49925 - DNA, 393 bp, Oryza sativa
tgtggaatcttcagtgtggcattagtgtagccctagactctatgtgtacgtgagcaacgactgaacatacagtcgcgaaatgtagcttcttggcatcgagtaaccatcacttgagagaagatacgagttgcacatgttcgagtagaaatcttgaatattggaacaccacttgatgtagtaaaacaacacagcatcatatttgatgacgcataccaagatgtctaggctcttgaagacgtagtagttgctgaagcatctaagcttacacagtatagacaatacagtctgccggtgccgaacataatacagacgaaggagctctacactggcgacatactggatcacgtgttacttagatgatacgagtatgtgcatacccacctttactagcat

SEQ ID NO: 49926 - DNA, 328 bp, Oryza sativa
  unsure (1)..(328): unsure at all n locations
agcttccacttgctttctcgagatcactgtccgtcatctcattctcagtattggctgggtgcatggncacacatacacctgtcagctttttatatcagggagnttttagatcatacgccctccttgtgcttcaccccacgcctctcggttccgccgccctagcccccctcgcctcacttcccgccatcccctttcggtaccttgcgctcctccctgccccatctcgccctacggacccccccctctccctccccctccccctctccccctccccctcccctccgtttttccccttcttgcctcttcctcccgcccccccttctccccc

SEQ ID NO: 49927 - DNA, 170 bp, Oryza sativa
gtatatagtgtactttcagatggttctagtcccacatcaaaattccatctaagctttctggaatctgcaaaacagaggcactcacctcattcatgccgagtctcatttgagccttgggtcgtgacagtgcgtcgtggtctcaccaactatggtacatgctcttaggcacc

SEQ ID NO: 49928 - DNA, 415 bp, Oryza sativa
  unsure (1)..(415): unsure at all n locations
gcttaagaaggactgtgaagacatggaattgtttattctcagctaatggtgaacaccaatcccctctttactcgtattttgccatgtgatcatatcagaagaattctaccctatgttccaaagttatccttgtaatagctagcatctcacttctcagtttctcactatgaacctttggggctttggcaagatgaaatggtgcagtccgagggctctagtgttatagccactttgagcgtcaagattgacacgtcaaaagaccgccatggtagcagtagccagcttaataagcacacaaatgatgacagccaagggtagtntgattgattgagaacatgaactggaggttaactctactctactgagaccatgagacgatgtgctttagccgcttatntgtacccccatcaccatc

SEQ ID NO: 49929 - DNA, 392 bp, Oryza sativa
  unsure (1)..(392): unsure at all n locations
gagcctgttcgtgatcgcaactatggcaccagatatcgaccagacatctatctatctatctgcgagggatgatgatacgcgactatcgatgatganggtatggtggccatgagagattacatttgtccaggatgccttcttatgtcctatgcatcatgagatagacacttagacacagatagtctcttatgacatataacgcgggagagtctcttggtggtacggcccacgacatgactttcatgagtatggctacacagccaaagactctttgtttgggaatgtgttacaattgatagtgatgcatactttactgcaagaggcatgtaacagactgatgctgttgacatatgtaaagttgatgtaatgttaccacttcataactgaatcat

SEQ ID NO: 49930 - DNA, 435 bp, Oryza sativa
agcttggcttgactacacgtacacatccttaccttatcatattcagtggttaaacgattccggaagagcaaaggtaacacaggtttgtacggttttgttttccattggctcatatgcagattctgttgattgcgatgtggttcctatgcaagcttgttcacttttgctgggctgtccttgggaacatgataatgatgctacacaccatggtaggagtaataaatacacttttgtgcataatgggaagaaatttattttgctacctttgacccctgctgaaattgtagaagctgaatctgaaaatcagcaagtggctaaatctgtttttccacctaaaaaggataagctttcacctagttctaaggttgagggaattaaattgaaggatggtgttatgcttgcaacaaaatgtgacattgctgaaatttcagatgt

SEQ ID NO: 49931 - DNA, 437 bp, Oryza sativa
  unsure (1)..(437): unsure at all n locations
ccgctactgggttcgccttcttccttaggacgagatgaccaggcatcagctccgtgggtcgaactttgtgttgtaagttgccgaagtgcttgtggtgtacttgtgcatgtgctcgagtgcttcgactcttactccttccaagagttcgagcgatacttcgcatccctcttcgcccccagagaacatcacccttggtgagttagcccctagctttactggggtcattgcctcatcgccataaaaaagcataaacgggctaaacttggttggtcttgtgggggtcgatcgaagggcccagagaactgatagcaattcctctggccatttgcctttcgctgccccctcgagtcttttctttagtgcttctaggatcttgccatntgtacgttcggccgccccatttgactgcgggtgtgcgaccgacgagaacctgattt

SEQ ID NO: 49932 - DNA, 318 bp, Oryza sativa
  unsure (1)..(318): unsure at all n locations
gcttgaanttggctctgaaattatgacttttttcttttcaggctataagtttgatgaacatgaccatgagtcttccaacctgcgcacacaattctctctcactcctcgcaggagggcaattggtgggccttgtgttaaaaactaagtttcttgggtggagttgaattaataatgcagagcaaaatttgtggagaatctctatggagacttgtatacaatgctagaccaaacttgactctatggaaacagcctcttccacgaagcaatgagcccccattatgtccatcgctcgaacaatcaggtattatatcaattata

SEQ ID NO: 49933 - DNA, 433 bp, Oryza sativa
  unsure (1)..(433): unsure at all n locations
tctccttccaatccctcggtgtggcaccgggcgtagcgctgtgaaacgagcttgaggctgaccttgcccatcaccggatatgagagaagcanggggaactgttgcgccagcctccgaagagggctaggtgagggtgcagagtgctgctagagctagaggaaagcctgctggccactggttagaagctgatcgagctagaggcggcggccatgggatataggggagaggagcgcagcacgagcacaatgagaggcgaagcggcgagcctgacttctgtcattttatttgtgtggcctgaggaggtgttactgttcttccgggtgtaatgggcattctccggcggattttaatccgataacagcccatctcagcagtcctttccagcccgtccagtataaactcatggaccggtattttacacccggttttgaac

SEQ ID NO: 49934 - DNA, 409 bp, Oryza sativa
ctactaatatagaaggagagctgcattcttcttatactactactgtataacacattaacatcctacgcaaagcaactatgtgcaaaagaaagatatgtctccagtgtcctgccagcgcatccaaattttccttactttcaagggtcaacagccatcaaatctgactgatatagaaggagagctgcgttcatataccgtacaacatcctcagcaagtgacgtctacaatgtcctaacaatgtatccaaaatgtaaagccaaaatgcgaaatgtaaaatgaaacacggaaacaattttaatggaacagtctctatctgactactctgcaaccccaagatccctctattagaaacgggagcagcacatgcctctcgctctctacaactcaatcagactactaccaataagag

SEQ ID NO: 49935 - DNA, 285 bp, Oryza sativa
agcttggaggtctcccgacgtggctgatccccacgggctgggtgatccgggttagtaatgtcgtgtgggtaaagtgtaccccctctgcagaggttaacaaactgttcgaacagccgtgcccactgtcatgggcggatgtgaggcgattcctatcgtagttttgtttaactactgcttgtgaaattgctgttgtggaaaggggttcgatgtttgaaaaatctgtagctgatggaatcatctaggcccgggtggccgtttgaaagattgtggccctggtggccattt

SEQ ID NO: 49936 - DNA, 434 bp, Oryza sativa
agcttgtcaacgtcttgaatgtgagccctctttctccaaaatttgttggggtcatgtgaatttgatgcttaaaccaatttagtttgccatttatagatctgataagcttccggccctcagtaagattctttgacagcgattggtgtcagcagagtgaagataccaatgttgaatattgttctataaagagcggaatttctacagtatcaactctgtttatattttataacgtgccttgctcttgagcatcttttgtagctagaaataccaagggcagaaaccttttatcctaatctggtcaaaacattagccctctttattgaaaatcttctaagagtaagaataaataactcttttccgtgagtatctcgctaactatattgaatgtcaaacttgcattttatcacgtacagacatattctggtcaatgtaat

SEQ ID NO: 49937 - DNA, 316 bp, Oryza sativa
  unsure (1)..(316): unsure at all n locations
tcgacatatccgagcacaagcaccgcgtcctcgccggcttctccaagaacacctgcgccgacacttgggccaagctcccgcttccaccttgaattaatggaggacgccgccgcgctgctctagacccggccgctgccgtccaacctgacggccaatggtatctccgcgccggtgaggcgaagagccttcaagtccggcgcagcgtcatggacggcgggaagcgaggcggaatccgtgtcgcatctctcctcgcgcacagtaagctnccgctccgccggcgcaccgccgtggtggtggctctggacgcggacctcct

SEQ ID NO: 49938 - DNA, 387 bp, Oryza sativa
  unsure (1)..(387): unsure at all n locations
aaaatcagaggtgagtgatgtatanaaactgctaattgtcttggaaaatcactacccatccgtgcttaacaaaaaccaagaaaagtagcatacctcaacatagttcaatctttgatcctccacacttgataagcattcgagcatacagctgacaagttctgacagatgtggcttaagtgcagggccagccccctgtgaacatcgggcaggtagttcgtgtaattcaattcatgacagcagcatacataaagaaaattacagtggagcaaaatattgccactaatatgttaatgcagataactctttttgaatttgacaatgaggataccttatcaagcttcataaccaaacttatagatgccgtttgaacacttgaaactatactga

SEQ ID NO: 49939 - DNA, 368 bp, Oryza sativa
tcgtgaagaccatgagcaacggcagtcaccctttgaccaattgtccgtatgattgcagagacgttattaatttgcttgcaacatgcattaatcaaatcacacacttaacttgcttggcctcggtttgcgtgccataccgaccgacctacccaggaggcgcactaattttcataggtcggaataccctgattccttgtcgctccacccttagggtaccttggaagttctgctctttgaacgcgtataccaaatatcccacgaacaccattgtgtgtcaaacacatgagaaatgggtttgtgaaaccttcaaaacccgacatgtggtgtccgtgtgtttaaagtacaatgaattgcgaaactcgcgatgc

SEQ ID NO: 49940 - DNA, 384 bp, Oryza sativa
attttaaatggagatctcgactgccaatcaaatacttcccgtcattcgtccgaatgctaaggccaatatgtgcccaacgtgcgtgctcatcatcccctacgagtaataagtctcatttgcgtctctcgtcttttgcccttggtcaaatcgtttcctcaaccccaaaatcaggtataacacctcctcaacataaaaagccggtgcaaaatcgaatcattattcagtgatttgggaaagtaattttgttgatgtggcgggttgacttggtccatgatgagggaatgtaggtcccgatctctcgataccgagcttctaaacgaacacgctactgagccccgcaatcgtagcaccacgtctcctctagttatcaaccgtgtcgaaacc

SEQ ID NO: 49941 - DNA, 220 bp, Oryza sativa
tacacgcgcgcacgcgtcgctgcttttttttcgcacgcgggaaacaaggaacttgcaaaatacccaaggaacatgcttaaggcctgaaaccggaatactgaccggcatacttaaaatgagaaatctctgcccccatcgaactgctctaattgggcgtgctgtacgcggcagactcacgatttcttccgatctatcgcgggcccatacttacgcttcttct

SEQ ID NO: 49942 - DNA, 401 bp, Oryza sativa
tgacgactataatggcttcgctattctctttgtcatttcgaacatccacacaatgcacatgtctcattattgtgtttatatatttataaaacttatctaaaatataatcagaacgaagactttttcatcacaaatatattattaatgatttaacgaatcaaggcttgaatgcatacattctagaattacgcttactttagaacaattaatggtattatttctaacaaatgatgctctctccgcttcacaatgtacgtgattcgtactttgattacatcgatattgatactcatgaatctgatcatatagatacactcaatataattttcctgaaggatgtgcctttttgacttacttcttcgaaacccatcagcaacgtgccatgtcatacgatctgcctc

SEQ ID NO: 49943 - DNA, 431 bp, Oryza sativa
agctgtcgatcatctcgagtaattcttcttctcttgccttcgaattgctccgagcattaatgccgacaatgagtagattaggacagcacggtccgattcttaaaacatccgtagctgccaaaaacttttttaactagacccggctatgtggcattatattggttttttatgtctcttccttaaactgaagagataaatccctaaagtcacgaaatttcttaaagaaacatccttgtaaatgcatacagttccaaaatttcatgccatgggtcatcacaaccgcaaacatctctcctattagggattattgaagactcccaaagatcgggtttcaaaccttcacagaatttcgaaatgaacaacggttatgttattgcagaaaccgtatagctttttttttcttgagaacaaacgtatggatatcaaacaat

SEQ ID NO: 49944 - DNA, 447 bp, Oryza sativa
  unsure (1)..(447): unsure at all n locations
cgagagcgcgcacacaaacacatagncaaatgtatgtctggtttataagcagttagatacaataaagatccgatcatacttctatactccttttgatcaacagtntcaccatcttcatcaggatccaacacagctgtagaaccaattggtgttgaaattggcttgcaattctccatcttgaaccgtctcaaaagatccttcgtatacttcgtttgatgcacaaaagtaccttgaggttcaaaagaagcaacaaatgcagaatttgcacaaacatcatgagtcgttaccttagaccttgtagtccgctcacctatattaccaataatttgttcaagcggatgtcgtcgttgaatgtgcaaaggagccgtgacttctgaagttgatccacgttctgtattagtactggtcaaagtagtaatctccggaggaccatctcgacagcatcag

SEQ ID NO: 49945 - DNA, 440 bp, Oryza sativa
  unsure (1)..(440): unsure at all n locations
nagcttacaaggtaccttcgatggttttgttattttacaaaacacttcaatgttggaaaggtgcgcaatagcttaagctgtttctttatatgattgctcatattcatggtattagccactaatcatgttttcttacgtttcaattgtagtaccgccgactcaagcatggcattaatcaggtaaccacaatctttatgttgtatgctttaattttaattcttcaagacttctctaagtgcatctaattctgttgagcagactgctgatttcttccgtggagacaacaaagaaggtgtggaggcacgcaatgaggtcagtgcactcatacttctgctacctgaaagtaataaacaaataacataccagcagttttttttttatgaattgctttttaagcgtatagtatgtttcatcatgaatatagtaatacaacttcaagt

SEQ ID NO: 49946 - DNA, 454 bp, Oryza sativa
  unsure (1)..(454): unsure at all n locations
tcagctttaattgcgtcagtgagaactgaaatgccttggtcctgttcaagataaaagataaaagtcaggtactatttcctggagggttgaaacatgataacccctaaatcgtactggtgaatatcgaatttaaaactttcaaagaacagctcttgaccttacatattaagaaaataaggagatgtttacagctaggtaattacatgatcttacaggtgcactatgcccaaaaacaaaaagacaagcttccatggtaataaccggtgtaacctatcctaaatgacggttctatatacatccagaatgtgaatgtacaactattagntaagtatcaagtcacaataaacagtaccacccatcaatgaaggctgctaatccaaactagcctaagaacattnaaaaaaatctcacacaaaattcatggaatgcaattatacactatggagtagatagc

SEQ ID NO: 49947 - DNA, 374 bp, Oryza sativa
  unsure (1)..(374): unsure at all n locations
catgcaagcttatgacccttaccgatctctgtggttgtttctcccaaagatgccacacaatgagtgtttcatgtgctcagacaacgagtcacttgcagagggcaccgaactcctggtttttggcaaggagattctttcccacattgttctgagttacagtattctgacaaactcgaggtcgcctggtggtgatatgaatgcccctagatgcttgtttggatcagctagctntggagagaaagcaatcgtagctggtggcatggatgcatcaagtccggtgctactctctgctgagctgtacaactctgaaactaagagatggataacactcccatgcatgaacaaagctaagcgaatgtgttctggagtcttta

SEQ ID NO: 49948 - DNA, 418 bp, Oryza sativa
gtatttgcgatgccagtatgcgacttttggcttgcgatgtggagatggagtcttccagcccaggctgtagtcagtgattgcatcatacggctatgacttgtcgtttgggaggaagactggggaacgtggtggggcaacgatgtagtggcaacttgttcaaagctggagtttacttttatgcgctgggatgcggcttcttttaattaagttacttatattgcatcacttgctctgcgggatatgattctatataattgcggaaaattctatctcatcttgagtggttatcatcgagtggtctactttggtacatcatacacacatatactactatattatttgcacaatgaacctgtcagtgctccctgcttgtgatctacagagaattctggtttactccataaaagagcctctactt

SEQ ID NO: 49949 - DNA, 448 bp, Oryza sativa
agtcacctgccgcatgcaagcttgtcatgtttggaggcgggaatccataattcattgctagtacccacgctctcctgaacaaggactgtgagcttggtcgtggtgggtttggcactgtctataagactactctgcgagatggccaacctgttgccatcaagaaactgactgtgtctagcttggttaaatctcaagatgagtttgagagagaagtgaagatgctaggcaagctacgccaccgcaaccttgttgcgctcaagggatattattggacaccatcacttcagcttcttatatatgagtttgtttctgggggtaacttacataaacaactgcatgaatcatccactgcaaattgtctctcatggaaagagaggtttgatatagttcttggcattgcaagaagcctggcccatctccaccgccatgacattatccactacaatct

SEQ ID NO: 49950 - DNA, 441 bp, Oryza sativa
  unsure (1)..(441): unsure at all n locations
ttgcataagtcacttgattcaaaggtatttttttttgtctcttgtttcccaacattaaaatccattcttgtcttgtgccttttatatttatgggtgcgtgtttcacctattggcttaattccaatttgcagcaatcttcttaagttacctctgctattaactgtgcatttgaatctatttctaagatactcaaatcaagtgcatcacaagttgatattatatctatttttttccttgtgctacattggatcacattacttgggcacatgtctttggctgctagacagacaactgcagcccaataatgcatggatatcacatcatcctatttcttattgatgtatatnttgggtttctatccatttcaaggccttctattattaatatnttgtccattctccatgaagtctctcaattgaacctcatnattgttacgacgta

SEQ ID NO: 49951 - DNA, 437 bp, Oryza sativa
  unsure (1)..(437): unsure at all n locations
ccgctgcagcttcattngcatgtctcagaactatttctctgtagtccaggntggaacaagtgttaagtatctttatcaagttgcgatgcctagccgttcgaagcacctgacactcagtatcaaagcttctaatggcatgttccatatgttggtgtataacttttatggcaaccaccaaaccgctgctcagctgacccttaaaaacttctccaaagcttccagaacccaacatattatcatcactgaaatcattagtagcacgagcaagctcatggtaggagagtagttgatgactggccatgtcaaccataccaacagacatcttttggtgcttaactttctttttaagaattacatgtaagcagcaagctacagctccaactgtgataattataggagggactaagtattttatgatccgatggttttttttggga

SEQ ID NO: 49952 - DNA, 438 bp, Oryza sativa
  unsure (1)..(438): unsure at all n locations
gttctattagtgtatgaaatatcttatgggcttaactaagtatattaattaattagttggtgtgtgatttggatcgatctcttgtacatatatgcatgtgcatttgggtagtctttgattcaaaggatatagtaattaatgtaaacgtagattacaattgatttgagggtgcaacgggatgcatggttaattaattagttagttaattactgtaattaatccaatctgggagagaggttggtcgacacagttgctgcagtgtcttgaccattagctgtggatgtgaatgggctgtacatgtgactgttaatctgttaaatatacnggccaattggaacaaactgtgtcggtctgtacatatataatcaattaatggaataatttagttggtgatgcatattttaagttttgtacacccacaaaaatggccaattttag

SEQ ID NO: 49953 - DNA, 398 bp, Oryza sativa
  unsure (1)..(398): unsure at all n locations
attgctcgagctgggcgacaggtttgttgtttcttgacatagcactgantacttgttataaggagcttcattatgcaaggattgatctttagtcggttttcacatcccactgaacagataacaaaggtacatactgtataaccaaaatatcaaacaagtcttcaaaatggttacaccggaggttattacaacaagctttgtgaaagattgtaatggatgtctgaagagcctgccggtagaataaaagtatgacatgtgtgacatattgtaagtgaacaattataattctttaaactggcgggtccaacaactatatttgacaaccagcctacaccattatggcatacataatgcgcacaaacagcactatgaccagattcttgagtttggagaacagc

SEQ ID NO: 49954 - DNA, 410 bp, Oryza sativa
  unsure (1)..(410): unsure at all n locations
cccaccacttgtctatttttattagcgtgaacgcnggcaagtgaaggtctgtgagttggcgccggagccaaaacagggcaaggctgcgacttctatgccggtgagcatatcggggaaagtcgtgagggcgccatcccaatttgagctaagcatgccattggtggaggacaatgtgttaactgtgatgggtattgcttgccgagagctacataatcaatacatggagcttagcaatgccaagcggaaaatgatggagtcatccatagttggacatcactaccaccagtcattcctatcatcgcctgcctatataactataggttttgatgacctctttgacactttcatgatccggaagttagacactggttctcttatatgctactccttgtaagtgataccttctatac

SEQ ID NO: 49955 - DNA, 61 bp, Oryza sativa
  unsure (1)..(61): unsure at all n locations
agcttgctcgggcagctggaggaggaagaagatacanatataggggtgggactttagtccc

SEQ ID NO: 49956 - DNA, 456 bp, Oryza sativa
  unsure (1)..(456): unsure at all n locations
tcccttctccatcgagactcaactgagattgttgtggcagccggctggccactcccgttgccgataccaacttgttgcgtggttcgtggccgacagcgtacacatggcctgacgtgttggtcgcgttgtgcacagctagctctgctccacctttttctttgcggtcactgatgtatgtcagtgaggaacaacctcttgcctggtgcatcgctccagctgagctgacgatctctgctcagcctgtgacctggcctgaaacgcatgatgccatagcagcatccatggacacgaatgtggcaaacaagaggtctgtcatagctatttggagtgatcacgaagaaactntcgtaagtggcacatgactgtgtttcacgatgcctcctagccttagctgtacgtagtgtctagagaactctcagtgtggtacattggtgggcgcacatggttatggtcttg

SEQ ID NO: 49957 - DNA, 428 bp, Oryza sativa
agcttatgcgcatacgacactgcattacatttcttctcccttacaatcaccctagcagcaacagtaagatcacggtcgaaccatgtgtaccacaagccacctccataagtttggaccccaacctcaagataacctccctttgttacctgcgtggcaagaagcaggatttaatcgccaattcatcgaattgtaccacgccaattaacataaacagaaatcaactacgaagagttcaaactctaaaccttggagacaggcttgagcttcagggatggactgtcagtatgcgcaccgattatgtgaaacccattgccggcagcatacctacaacacatcaacataatccaataataaataatgcactaatcaggacattcatgatccacaaaaccgcatagaattactacagataaggttcttcacaaaaa

SEQ ID NO: 49958 - DNA, 395 bp, Oryza sativa
tactcaagcttcgcaagcgtggataatattggcgatgtggactatggaaatgtggtttacgtgatgcaaactgatcccataaaactccaaaatccctcataaaactcctaaatcccccggaagaagattgaggtctgaagaaaaaacccgccattaaataaatgggagaataccaccacctcgtgtgtgtccgggatcagaaacatttcaccgtacgctggacgccacctgatgatctcttttgccagaagaatgccgcgcgccaccatctcttttaggttctcctccgttacatcggagggcgcccactgactatcaaagctatctctctcttccgccatgggttcgaactggatggtgtgatttgatcgatagtggctgggaatggatgccat

SEQ ID NO: 49959 - DNA, 380 bp, Oryza sativa
gcttatgactgtatgagaagttcattttttacccagaaggaacagaagatctaaactatttagaaagtctacatcgacattgttcaatcaaacattcagaggcatgcatcatggtaaacagtgtccaaagttacactaaagcattcagacacaagaaagaagaagtaacctatttggtccataaagtaagaaaaattgtgaaacggctttcattttccttatggaaaagtagatgattacctgccagaaagagaagaagacaatccctttgatgcataagaattttgcaagaggtttgtgaggtgccagctcttttgcaaacaagtggtagaaaataaccagtgcgtataatgccatggagactgaaaagttcaatatga

SEQ ID NO: 49960 - DNA, 432 bp, Oryza sativa
tgcaactttgcaattttctgtgtcgacctatcaacagcaacaaggtatgtggtgctactggaattctggaaaacatagaagatgaaacagtagctgaccaagatacagattacagacaacttcagcatggaggaactcttgggataaattataatttataagtgctcacaggtttgcactgtaattacagaacaagcaattcctcatcacagagctcaagcaattcatcaattcatcaaacgacataagaaaatttgagattaccatggtaagattcatgagcattagtgctctgaaactctgaaacattcagaaattcagaatcatggcctgcataacaacttcaatttattcataattcaagaagaaaggggagcacagattgcgatagataaaactacaccatatcttctacatgtcttgacagatcac

SEQ ID NO: 49961 - DNA, 397 bp, Oryza sativa
  unsure (1)..(397): unsure at all n locations
atgtaactagtatcattcattaacaccaaagaattcaaacaaaaaatacaagattagtaacatcaatagcatccaagtattagtcaaccacgagagacttatccacatggtagaattggactgaacagactatgagcgagttgtttcttaaaagtaacctattgaatgactgcaactaatatatgagagatccggaaggactgatgaaatatgacaagtagtggatataacaagggtacacaagcacatgagttaggaagagaaaaataccaaaagatgaattatcaagtacgcttcattnttaacagcctctatctacacgaaccagcatgtcttccaaactcttactttcagcattggtcttcttgctcgaaaggggttcctgcatcatgtatac

SEQ ID NO: 49962 - DNA, 449 bp, Oryza sativa
  unsure (1)..(449): unsure at all n locations
tggcactgtcatcaacattgttctgctttccctgtgaagaacccagattggcaggtcattttgtatgatttgtaaaacactaaacagtggatataatttataatataacatcttgtcatcttctaactcaaggatggagagtatcagacagaacattatctaccgaattgaaagcccatttaactaagccaaaattggtgcggccacatacaggatgcctcgtgtgtcagtaatgtatctattaggtcagaagaataaccttgttcttatcgcgccaactcagtgaaaatggtgagagcaagtttatttttttgggctggaactcctgtgatgaatcatggtttgctcgaccagnggatgcgtctatcatggatgttctggaggggaaacagagtcaagcaaatgtcaatgttggaacactaaataacatgaataacttggaacataat

SEQ ID NO: 49963 - DNA, 397 bp, Oryza sativa
gcttatggacttgtcgatattgtattgttattttatgcttgacgagcactgcgatactgattcattgtggtttccagaaatgtttaaagattggtagtggccacatttcttgtaaatttatttcaaccctaaattcgggttttatgcaatttaatggaaatacttcataatgatcaatcattcaggttaagatcgatctaaaccaatccattttttctatatacatacgacatgccaacggttaaacaacttattataaacccaagacagccaatacgaaatgctagaaaatccgccgcgcttaatggatgttctcagcgtcgaggaacatgtgctagggtgtatgtgcgactcgttcggatcatgggttcaaacaaataagacaatttttgaagta

SEQ ID NO: 49964 - DNA, 379 bp, Oryza sativa
  unsure (1)..(379): unsure at all n locations
agaatcatngaatcccgggaattgcttttctcctagcccttcgtaccacgtggggtcacgtactaagcaagccaaaggcaagaagagtaagaatcagaagagaaaagcgccgatgcgaactgaagaagaagtacgtaagatggctattagcagcaccgaatggcctcccgcagggataactattcctagacgtcaaagaggaaataccttccgaggtgcacgacagttgacccagcaccttctaagccatggtggcagagtatctgatagtgaagggtcagatcaagtctcctcggatgatgaagatgagtctccccgacatctcggtgaggaagagatggaatcaanagcatgtatncgttgtggagaaattggcaca

SEQ ID NO: 49965 - DNA, 432 bp, Oryza sativa
  unsure (1)..(432): unsure at all n locations
gcttgctagagtattctgcgatctgaacctttccatttgtcaaagcaagtgagagctcatcttgcaccctggacttcaaactatgcacgctctaaagataaaataaacccttctgatgaatttgggccccttcacgttcacgtcgtccttgacagggtataagatgtcgactcagatggcttctccccccgaacttattcgcactgaggcgcttctggcagtgaatgcaatctgcagcctggagtttcccctcaatatagacaggtgtaaactccttccacacctttgacgtgaatctgttaccgctgggtggtaccgagtttatatcactaagcgtctctgtataacatcattgaccggatcgtggggtgaaactggatcngtctcattcaccanaactgtgcatataanatattgaaaccgtatttatat

SEQ ID NO: 49966 - DNA, 319 bp, Oryza sativa
ttctagtttacaccgaccgttttcagtctgtatcggtgaccaacagtggcggaaatggaaacgggtatatctactggaaaatggagcagaaatgaatatggggcttttcctaccgatatgtctgaaccgtatttgtatgattattgcgacaaaatgccaactagatctggaagatctttagcggcttatcctggcttacccattataagtgcatgaatgaaggaagtctattatgcttgccgcccattaaaaaggaaagtgacctgataaaaacgttgctaattaacacctatgatgtggcatgtggagttctgctgaa

SEQ ID NO: 49967 - DNA, 372 bp, Oryza sativa
  unsure (1)..(372): unsure at all n locations
tgcaagcttgccccaaccgagtcagcgccttcttatcggggccccacctgtcagcgacccgtatacgatgggttagcgaagtttgacgcgataaaccgacagcgacgacgccgcgcggaagcaagacggattggttttatgccgtaatcaaaccggattagtttctcgccggagagagcgagcgagagcgagagagagagagagagagagagagagagaggagaagaggagaggagagcggccgcgtggggggaatctgctcgtcgtcctcatctgcggcggcgggcgttaagcngttgcngtggttgggtggtggtgggggatggggaaatatgtgggagggatttttccacctttcttaatattggttca

SEQ ID NO: 49968 - DNA, 444 bp, Oryza sativa
  unsure (1)..(444): unsure at all n locations
tcttccgtggggactatcanggtaagctcccttcacttaacctggttgctaatatcagtatgtaaattcttcttcttattagtctcctaaaaattaaaattcttggcattactgaaagtttaatcaaatcttgcagagtcagagcagtaagccactgaccttgacagcgccaaaaccaccccaacttgagacagcattacgagctagaccaccaaggtttccctttgccacttgcatcattcagaaaacaagccattttatgttattgattattttcgattactctaacatcatctttctgcagggtgaaaagttctcaggaattggaactagaagaattagaaaaggctcccaagttcaaggcaaagccactgaacaaaaaggtctccttatcttcttgaagcttgtacatttgatacattgattgcattgtgcttcataaca

SEQ ID NO: 49969 - DNA, 432 bp, Oryza sativa
  unsure (1)..(432): unsure at all n locations
gctttangggacagttattacagcgagtttgttatttaataactgcataaatgggcattgattcatttacttcgttgggctcttcatttgggacaagtgtagtgcaagagcagtttgctcttctgcctggcctccataaactgagggaaaatttcatgaccactgtcatctgtgactgtgatgtagttaaaattagataatcctgctctgaatctaacaggactagaggcttatccattcacaccatttcattccaggtgatatgtgaatctattttatgggaaaaatgtgaattccacctggctaaatntaattgtatgaatagattccctggttggaccattacattgacaaagtcatccaacattgacctgcacaaatcaaaattgttctttcattcatattgcgaagagcatattggcacggcttgat

SEQ ID NO: 49970 - DNA, 381 bp, Oryza sativa
tggaggaggaagaagacatatatatatataggggtgggactttagtcccggttggtgttaccaaccgttgctatagatcccccatatctatagtaccatttttagatccccgagtgtgtctcttctaatttcattataacaacttttaatatatattcaaaccgccttctaacgcatcctcttttctccctttttttacatccatgcaaatatcttcccctacttacccttctgattatcttttttcattccacttattacatcactttctgtttcttatttttttccaactctctcctatttgtcatttatttctaatatctagcaattttattcttcatcaatattctaattctcattcctcttctctcttaaatttct

SEQ ID NO: 49971 - DNA, 411 bp, Oryza sativa
  unsure (1)..(411): unsure at all n locations
tgcaagcttcctttgcttcattcactcgaatctatattctatcttgtgagattgagagattagatgagagtgtatgagtgttttggagatggcttgaacattatgtttgattgagcactttggataccttgtgggctgtcacttgggcttattactcttggagatcttctcctagacggttaggtgttgcctgtgagcttccaaagatcttgtggatgtcctgngaaagtttgtgaaagttttcctcacctccgcaaggaaacgaggtaagtgagtaaagattcttgtgctgagttttcagaggttgtcctatgtagagcaacttgcacttgtggtcttttctagaagaaattttgagttggatcttggtggtcactcaattctaaaaaatgaccctataagtgtgagttg

SEQ ID NO: 49972 - DNA, 451 bp, Oryza sativa
  unsure (1)..(451): unsure at all n locations
tggatcagntcagtggcatatattaagttttcagagatgcatctacctntaagaaaacctgtctgatccatgtgaatcatccttgtaagaattttttgtagcctaagagccagcactttggataggaattttacctaacaattatggagagagattggtcggtagccatctactgtgttntctttgcccggttttggaattagaacaatatgagctctgttaatcctttcgagctggactgaatttgaacagaaccctgtagtgagcttgaggacatcttctttaataacattccaggtcgcagagtagaaacttgggccataaccatcatgtccaggtgcactggtagagttcatacctttgattgctgtcaaaatctcctgtangaaattgcattccttgagaagccaataaatccgaatctctttcttcttccgagtatagcgctagt

SEQ ID NO: 49973 - DNA, 233 bp, Oryza sativa
  unsure (1)..(233): unsure at all n locations
acaatcatactcagncagaatcaggtgtttcattatcagaggtattaactactcggcgtgaaagttaatattggggaattgatctacaacggtccttgcaaatttgtcaagccgcattttgagcactggtgataagaacaagagcaagcctctttacttgtgccgtctgaaagccataatggtgcaacttaattttgggacaggattgggcattgtaatgcatgctactccat

SEQ ID NO: 49974 - DNA, 340 bp, Oryza sativa
gcctacccggtcattaagatcgacgagcattcagcccttgaattcatcaaaagaatcacatcccgattccgggtgccgaaccgtatcattactgacaacggcacctagtttaccagtgagcttttcggggactactgcgacaacatgggcatcaagctttgctttgccttacccgcccaccttaagagcaaccgccaagtcgagtgtgccaacgctgaaatcctctaaggcctgaaaaccaagacctacaacgtcctcaaaaagcacggggactcttggcttgatgaactgtccgccgtgctgtgggccaatcggaccaccacgagctgcgcaactggag

SEQ ID NO: 49975 - DNA, 450 bp, Oryza sativa
  unsure (1)..(450): unsure at all n locations
tgtttcacctcgagatcattattcattagtgccttcagcgttccaaagaanaaggaaagttgccaccagccgaccagcgtcgtccactcctgtccctctcgtcattaatcacgcattaggtagattcgtggttcttgatttgaataagtcgagctcaccatcatgttcctatccagccacatggaaaaagacgagcagaagaaacgacaagaatcctactccctccgcccataataagcgttgttgtaggtttaattgtctaactttaattatccgtcttatttaaaatatttttattgttattagatgataaaatataaatagtactttatgagtgactctaacttttcaattttttcattaattttttaaataatatggacggttacacgttgggcatggaaacttgcttcacttataatgagacggagggagtaattagcacagaca

SEQ ID NO: 49976 - DNA, 227 bp, Oryza sativa
acaagtccaggacgggatcttttcgcctagcgacactaaaaggcgaagagttcgaccattcctggaacgccgcctctctcaagcgcttctatgtctaaaatgggtggcacccaaatcgccaaactttgtaaaatgtacataccgtcatgtaaacccttcggcactatgtaagcctttcgacaaaaaaaataaaaaaaataactggatgtaaggctattatccaccat

SEQ ID NO: 49977 - DNA, 418 bp, Oryza sativa
tggtggctcttacccgatcttcattaaattagcgattggaggttcatatgtggttggattggttcctcactttgagcacttcaatctagttagtttatgtgaggattggttgagaagagcaccagatttgaatagtagtttatcaggtcgagttactgcagttacagtttgtacaacatttagtagaatgtcagttcgaggggtcaaacggtgtccaaatgggctgttttggacagcttggatggactcataaacatcgttctgcctcatacatttcatacatggttgggatatctctctgagaccaagaggaaaaaattactattctctaatgttattgaatacctcttgtagtttgatggtgatgtgtgatccaatgtgaacttgtgtatactgatgtggatggccttaatgtcta

SEQ ID NO: 49978 - DNA, 381 bp, Oryza sativa
  unsure (1)..(381): unsure at all n locations
tgcaaccaatcccagatcgtgtaatctacgaatgccagntaaatccccagcttcgccgtggactgagaagaataaacaaattaaagtgtacaatgaacttaactataatgaaggtggatgagaaggtcanaactgcacatcccactactatgtagcagtgcatcctcatgcataaaaacatatattgatgaacaaagtctaaatgctaaaagtctaaacacaacacatgatacaccaaaccgtatatcaaatgtgcttaatagaacggcataaatataattcaatagattgacattatacgtaaccaatgtcattagggaccaacgagaagctaaaatggaacatgtcatcttttgaaataaaataacaaacagctaacat

SEQ ID NO: 49979 - DNA, 410 bp, Oryza sativa
  unsure (1)..(410): unsure at all n locations
tcaaatcattgcacaatgtcacaggcgtcttttaaggctgttggttagaaaaacccttgtctaaaggctttgccgaccaaggtacgtccgctggcgtgtgatccgcaaatgccttcgtggatgtcaaggaagagagtttttccaccatcggatgagacgcacttgatgaggatgcagttcggggcctttttgtatagatctctgccgatcatgcagtatatcttggcctgacgggataatttctctgcctccgtgtcgtcatccgacagctcgtctgattccaggaattntattagcggagtacgcaagtcgnttgttgtcttgatgtttgcaacaacgtatgcgactnttgtagcccccggcgggatgtcngtgttggttgtggtactttcatcgtgcgtattcttgac

SEQ ID NO: 49980 - DNA, 270 bp, Oryza sativa
catcaacaatatctagtagcacatgtgaagaatctggaacatatcctgcaactttcaattgctgacacatttcacttaacatctcgtatatgtcctccttgcttgaatggcttttatccccagatatgaactcctgaattacaccatcaatttctattgagctgctttcaggtaccttttgcacaccacgatcaagcatcagccttcttaccttatgcactcctgtccaggttccatctaatgcatatatgttggatagcaacacatacc

SEQ ID NO: 49981 - DNA, 396 bp, Oryza sativa
tagaatctcaactttacatgggcaccctgcggtgaatcaagaacgtcaacaagttccaaaagaaagttcaagggtacgccaaaaatcaactaggctgaatctgtcttgacggacaaccgggaaagacaaaaataatcagaagaagggtcaaagctagggtctattttgcaatagtgacaggtaaactcttgaccagttgacatgaaatgcttctgtaaaagatgaaacttatcattgttgggtgtttcaaggctgaaaaaactgggatttgaattatacactacaacattaacctttgtcaataatgactgttatctccaattttgcaaaagattgttgtgtgatccatactatcgtcaacttcgtatacaaaatgacaatgatgcacactgagtg

SEQ ID NO: 49982 - DNA, 450 bp, Oryza sativa
  unsure (1)..(450): unsure at all n locations
tgaacaaacctgccttataatcacattaatcacgctagttgaagccagttttctccgaggactgatagtgtcacaagcacatcattatgttccccatcaccaaccaacaatttttacatatggcgttgtggagaaggcatgagagctgcattggccatctcaccgcatgtccatcaaccgagttgacaaccagcccataccaagatcacacattagattcctcatgccactcattccaaaaagagtgtaaaatgctcaagtgcatgtacatcgatcttgcacttgttaaaatcgatcgaatgataactagaagtatatatgtgtaaatgtttttgacagtgtgtggttatgaattaaatgatcgatggcatgtataaataatgccttatttcaatntgcaagcaagctggtaaactgatgaccgctgacatgactcacttgaagcatact

SEQ ID NO: 49983 - DNA, 246 bp, Oryza sativa
gcagcttcttaactgaagggggtggtatttttctagaatgagtacaaccacagtgctcattaatccacaccgaccgatgcctgattaattgcaaggggtacaaggggtaataatatatgggttaagttttgcaagaaacagcttttaaaagtcacttaagtgcccaaaacccttttataaagacgatcctaaagctacacagcgttattaatcaaagctgtggacccttcacaaacttgcttaacc

SEQ ID NO: 49984 - DNA, 249 bp, Oryza sativa
  unsure (1)..(249): unsure at all n locations
tgacaaactcagcccagatgctttatggtgtttataaaaaatgtgccatatagccaaggtaactaaatggttatgatttagcctattctactctttatctnacttgttactgaaaaatgacgaccgacttctttccttattatgatatactattaatattgttttaaatctcacttatgtatctatccatggagctgatatattatagagatccactcagagatatatattctggcttggtaacgtgtg

SEQ ID NO: 49985 - DNA, 274 bp, Oryza sativa
aaaaaacccaagattttatttttagagttaattttgaaaagcttaaaattaaaatgcttccatcttatagaactcaaaccagaacacggttttaaacttggcacaaaaaaatttctctatattttaaaatttttaaactcgaaaggttgaattgggatgggaagaaataccaattgattaacatagatgggggaaaaacaaattggactttagcccccaaatatttagcatggatttttgatgggtcgatgataggctaaaagaaaattggatt

SEQ ID NO: 49986 - DNA, 439 bp, Oryza sativa
  unsure (1)..(439): unsure at all n locations
tctnctacatcgccttcgctctcgtactcctncagaagctttgctatcttggcctttgtgtcctccacaacccatcctgtcccaccgccccagcatctcagaagcctctctcctgcatggcgggcagtggcaagggagcgcgccatgttcaatgtttcagccccgctgcagtttggtggaagcttgccgcttatctcatctaagttcagaggcgcaagcacatcatcaatcactgctctggctaggaacagtcccagctcatctgaggcatccaatatatcaagtgcggtatcttctgcagattcaagaagcattatgaaacccttgacaatgtcttctgttgagaacaattccatgcttaatgaggatagaagaattgaagccatctctttctccctcgttttgcggtccatagcaattgttataagcttcttaataa

SEQ ID NO: 49987 - DNA, 444 bp, Oryza sativa
  unsure (1)..(444): unsure at all n locations
tgtactaagtatgagatcttgttaacttttctttgaaatgttgtgcatggaaaggtgtgagttgtacgtgttgagttaatttgcttctttatttgtaaattatgtgttctattgtctttgtgatatggtttttcttttgatttatatgctgagtttttgtggtgagaagaaggatgaatagatgaagctntatgctccttttgaatccatctccctcttgagcgcaaaagatgttcttgttgatttgccagtttttcttttcttcatggaaatatttggagggccttggtcagtgacttctacaaagtatgggattttgcttatggagaaacaacacagcattaacggaaggaatccaatataccatcattaatttggaagctgacgggcactggatcaatagcacagtgcgcagttagctttttttttttttgagaatagcag

SEQ ID NO: 49988 - DNA, 275 bp, Oryza sativa
  unsure (1)..(275): unsure at all n locations
tggcagccgctaaaactccncaaacaagatccaaaggtctcctgctgagaaatgcagctattagcatgatctgaactcattacgggcaaaacaatggcttatgatctttgtgagcgtgtgtatgacagattggcagtatgacacacacatctccatgtcacaccatcacgtcagtgggaaaatttttttaggggcgggccttgagctttagacacagattgacccctgctcgcccactctctcctgcgggacttacggatacatcattacccctt

SEQ ID NO: 49989 - DNA, 436 bp, Oryza sativa
tgccatctgcagatgaagcagataagaggcaaaatcaggcatattcattcaaaagacaaaaaggatagtgtaaaggttagaactatcattgaacgtcaaatctttcagcatatgtataactctgactatccattatgacacatgtataactaaagcattattgccaaaattacaagtgattacatgcataaacacaaggttatgtaccttcatgtgccctgctctcctcccaaatttctgggtaagcagaggcaaagtgtcgatcatcccctttggttccggaggtggccgtccaatttcagcgaatgcttcccttattctggccaagtcaaaccttacgatgttgtgaccagcccagacacgccctactgagaactctcaaggttagaacattatcaaaccaactaaaatatggcagctatctatgctagctata

SEQ ID NO: 49990 - DNA, 418 bp, Oryza sativa
  unsure (1)..(418): unsure at all n locations
gaaactcagcttgaaaaagctttaagaaatcaaagaacttngctatgaactaatcaagcaccagcatatnatacanccagtattggtacaaaantggagcctccatttgttacattcatactcagtcagagtcagtcctttcgtcatcagagntattattactcggctgaagatcgntgntgcggaattgctctacaacatcacttgcaatcttgtcagccgcactttgagcattactgataagatcaagagcagcttcttcacttgtcccgtctgcaaagccatcaatggtatcaatttcaatcctcgggtacaaggatttggtcatcgccaatgccatactagctcccatacttccagctttcttgatatttttgaagtatacatccggtgcaactctcagcttgtcacagatttc

SEQ ID NO: 49991 - DNA, 458 bp, Oryza sativa
  unsure (1)..(458): unsure at all n locations
agcttnccctacccgctttctttcattagctgcttaatcattcgaggaggaaaagaatgaaggtggtgtgtccaacggccatggtggtgcgacaatcaacttcatcgccacatcttgtagcttggagagatgaaccgcgagggatgccgccatcactgctttcttgacccgaatttatcccaaatcttcgcctcatagacttggctaagaccagtgggttgaaccgcggttcataattgctctcactctcacatttccacatctgactcttaatttttttttggtacgcttgcttgagctgtggcttcgaaatgctcttactttcacactatcatatttggttcatatttccacattagtcgactctccatctctttaatttaccctcttcagtttccttcctcatnatgaaccctacacaacatttgcaccataatgtgactgccccctgcagctac

SEQ ID NO: 49992 - DNA, 113 bp, Oryza sativa
ctgctgtaggcttttttctttccagcacgaatgacctgtgtcttgtcggaccaagctcacctcacggcatgggcagacaccaacgggggacgttgaggtgccagtcagcgggg

SEQ ID NO: 49993 - DNA, 425 bp, Oryza sativa
  unsure (1)..(425): unsure at all n locations
agcctgagctcngctcggagaagctcgcatgcttttgcttatgcttggggtcagctcgtttggtgctcgggccgagctcaaatcgagcctatgacgagccaagctcgagctaaaaaagattcaaaacgtccgctgatcatgtggattcttctgcttcaagagtttgacatagagattaaggataaaaagagagtagagaattctattgcagatcatttgtcgcgtatgcaaatcactaacatgcacgagctaccgataaatgactatctgcgagacgacatgctgttgaaagtcatagactctgactcgtggtatgcaaccatcgtcaacttcatggtcgcggggcatttatccccgggagagaataagaagaggttgatctacaagagccgcgtgcacttgtgggatgcaccttacctgtacag

SEQ ID NO: 49994 - DNA, 440 bp, Oryza sativa
  unsure (1)..(440): unsure at all n locations
agcttgcatattaacacatgcctggtataggaaaactatatcaattatcggcctatcactgttgggaaggatgacagtggagttaaaagaatgaattttcttgctcgtgctgctgaatctatagcggacgctgatattgntaatgtacaaataagaagatatcgacagtggcaattgtcccaagctgcttgtttgtcttcatctatagttccgtaagtatatggtggttattatctgctgtaatcgatttaattcaaatgtctcactgatccactaatctatttcacatcttacagtgctgctttgatgcatgggaatagagagattcttgaagcagtaaagctcaaaccttatcatcaattactttttgtggttagcttatntctgggaattctggctcattgaattggataataaatcctgagggtgagcgaaacttc

SEQ ID NO: 49995 - DNA, 349 bp, Oryza sativa
  unsure (1)..(349): unsure at all n locations
agctttccgtttatctacaaaaaagttagaagaaaatgacagacaatgttttgcttccctcttgactcttgatataataattatacaacaattcatcgtgtgtttctgtggttttcttatctgcctgaagaaagtggaaactgtattactcaactgcaacatttcaactctgaacataaattttcagttggtgccgaaaatcagatacttgtagtaactgttggtcactaaacccctatcaccccttacgagcaagcatttgataatcatattagctcctgctccttgacactaggcaatcttctaacattntctcgatcgcgcttgaacacaaagtacagtgggctgt

SEQ ID NO: 49996 - DNA, 463 bp, Oryza sativa
  unsure (1)..(463): unsure at all n locations
agcttggctttcgctcanggtccttgtttatgattgaacccctgaaagcggaagtacgcttaaagatcgtcgccctgttgatgcatcatgttgttgatgttggcgaactgagcatcactagcctgttgccattcttgcatctgggctatgtgttccgtgaggttgtactggatctcccccgtctgcatatcaagggtgttcattctcctggtgatttcacccaactcccaacgagaggaactcgagcgccattcacttggagatggaggcacaccacttgatctgggaggttagttgtccccccattgtatgtcatgaggcgcacgccatcggtcctcactagcacttgcctggcttgagaccccgatgctgtggcgcggagcttgggtccatccgggtgcatccgcagttggctctcaaccagcctcatacatctgcacgggtgttgaggatgatgaacttt

SEQ ID NO: 49997 - DNA, 257 bp, Oryza sativa
  unsure (1)..(257): unsure at all n locations
ctttcttttttgttncccaactantctgcnaatggcaccgnttgaagcactgtatggaccaaggtgtcctactccactcttctgggatcaaacangggaacgccagttggttggtacacaaatcttaaatgacgcccaacagaaagtctcacctgcttggaaagaattgagaatcctgccatctccgcaaaaaactattcgaccaccgtcaagggagctcgtttcaaacagggatatgttatctccttgcactcact

SEQ ID NO: 49998 - DNA, 416 bp, Oryza sativa
agctatattaagaagaatgagttgttcaacactactccctccgatttgataatacttcgttttgggcgaaagctatttataaagggcgtgactgatccttttttcctctcaaaattttaaatgtacaaataggcctaccgagggtcatttataaagggtgtgactctggtctatttttcctctcaaaatttaaatgtacaaataggccctcggtttgtagtatttataaatggccctaagataaaacttattaataagtaggcttttgtttataagttggacaagtaattttgctatgtaattcatgtgcatatatcaaactaaaatttgctatgtggtgtgcatatgaaactcggctgggtaaattaagatgtttttacacataccccctccagagagacactaaacattatgct

SEQ ID NO: 49999 - DNA, 388 bp, Oryza sativa
  unsure (1)..(388): unsure at all n locations
agcctngctataagatgtatttcgttctagcattctattagaccttttggctatcagatccattaggcaatcggcactgaaaacgcataaattatcagcgactgcctaattatgttattagctgctacaaaatgctctatgctatgattagagaacaaattaaattaatttacatattgcacaataaaggtggaactgtttgcacacaatcaaactttataggccggattagtacgatcaatgatttgtgcagacagtagaagtcaaagagccttgttaatcatccgagcgttgaagcacgcaattattattatttcaaccatgagcaacttgaacagattattagcatattcaggatacatgtatcaaactacatgttacagaggta

SEQ ID NO: 50000 - DNA, 344 bp, Oryza sativa
  unsure (1)..(344): unsure at all n locations
agcttccatttcccgctgaaaccagctcgtctgtcccatctactacaccaatattgctcaaagcaagacgctctacctcaacaccgatcaccttgggggcaacctctcgaggaagcaagaaaccgcccaaaagcaacagcgatgtgccaactaccatcaccttacaggcaagacggagtccaagcaaggaagccgcgcttgcacaacaaggagtggtcaagaagagagttgcagagatagagaaggtaaaagcgggtgctcagtgcatgcagcccccagccctctacactntagtttctaccccgttagaggtatgggcaattccagatccatcttcttctaca

SEQ ID NO: 50001 - DNA, 311 bp, Oryza sativa
  unsure (1)..(311): unsure at all n locations
tctagaaaccgnagtgttgaacagatagtctattacaccgagcgcacttgaattaatattgttgccgactgactctattagctaaggactattagcagccacaataaagaatggagcttggccgaccgtcacataatccaaccccattgctttgtctttggcctctctaaaatattcttccgattaaaacttacagcgccgtttgttttattagtataagattttaaccaactgctactttactatattaatatattggctcttactcaacaatatgatcatttttaaacacatataattatatcaatttt

SEQ ID NO: 50002 - DNA, 323 bp, Oryza sativa
agcttctttctggcatcagttggttccttgttatgattcttcttaatcccaacagagagtgtatctgcacaccacccctgagtagccatcttccctatatgtaactttggagaaaaacaaatgtgctcaaatggaaggaccataatctgcatgagtaatgccacacataatgtaacttatttgaacaacaaacaaaagaaatttgcgaagagcttacctttacagtcttcttatcctcaatccgagatgcatttatacaccaagggccaccatcagctgcacctctttgcaataaacacttggatgaatctgtcttcatacct

SEQ ID NO: 50003 - DNA, 413 bp, Oryza sativa
  unsure (1)..(413): unsure at all n locations
gctttagcacaattttatcagacttctgttgctcgattctagccatgtggatggagtcgttttgctcagagttctgtaggggaaatcagtaagacaaacagtcagataagatattctaacaaagatcatcgtaaccagactgtaaatgcggagctaacaggaagtgtaatatagatacatgacaagtatacagaaatcctgtcacccctagaaagattgtcatagctgttcctgaagatagaactctgaagaggaaatgcaaatgctaaacagtaacataaagcaaagagagcaaagctgtgggtacattcatacctttttcatctcactctccaatnttcttctttctatgtcagtttgagcaacaaacntgcttagttgcttggatctcctctcgatagcattctctttat

SEQ ID NO: 50004 - DNA, 397 bp, Oryza sativa
taggagaatagcaccaccacctgcagagaatggagcaaaaaattccaatccaggagctgtctatggatgtacgggtgccggatgaggaaggagtacgcaccgcactccacgagggcaccagtgaagcggcgagtgcggtggcgtccatctccagcggcgaaggcaaagggatctcaacggcgctccctacttcactctgcgcgagcagagccaaatagtttaaggcccaccggcctaacagcgtgatttggatttattctattctactagtaagtgcccgtgctaacgctacagtaaaatttgatattgctaataatacacctaaaagatatagcatagaaccactgaactgacgtgcaatgcacgtttcacaccttatatattatatgaattatat

SEQ ID NO: 50005 - DNA, 399 bp, Oryza sativa
  unsure (1)..(399): unsure at all n locations
agctntatacggccggaagtgccgcacactctctcttttgggatcagacaggcgaacgtcaactgttcggaacagaagtattatcggaagcacaatagaaagtcagaatcatcagggaaaggttgaggattgctcagtctcgacagaagagctacgcggataaccgtcgaagggagctcacttttgaggccggagactacgtgtatcttcgtgtcactccgctccggggagtacaccgttatcagacgaaaggcaagttggcaccacgcttcgtgggaccatacaaaatcttggaacgaaggggagaagttgcctatcagctagaacttccatccaatatgatcggcatccatgacgtgttccacgtgtcccaattaaagaagtgtttaacggtacctg

SEQ ID NO: 50006 - DNA, 324 bp, Oryza sativa
agcttgtaccagcacgctaattcttgtggtggtgaatgtcatattaaatactacttggcttagccaactgctgtaattattgtttaagcaatttgttccttgtttgtggcaataatgatctcttctattctgaataaatattcaattgtatacagccaaggtgatcagatttcagaagcaaagttacctgaaaacaaaaatgcttcgatctgctccccttagcctgcagccacgatgctctgatcttgtaagataatgaagacgaataactaattctggggatcatgaaatgatgccattctgaatagaacgaataaataaata

SEQ ID NO: 50007 - DNA, 422 bp, Oryza sativa
  unsure (1)..(422): unsure at all n locations
agcttanacatggggtctcttgacactattttctccacaacttanggctcttcacaacaaatcgtaatgcctcgggtcttgtgttatatgcgccccaaaacctgnggtttctgaaattcactctacagtttctttaaaatattacataattatatttttcaagcttaaaataattaaaactcaattaatcatgtgctaatagttttctcgttttgcatgcgctacttaattttcatcttcaacaagttgaaatggggcctgtggtatatatgatactagatgatactccccacaagtcgcggcgaactattcatatgtgcaacgcaactataaactccactaatagaaatataagttgtcgccacgaaacacatcgtggcatgaatactaaaattatggcaatagatacatgctgccaccat

SEQ ID NO: 50008 - DNA, 74 bp, Oryza sativa
ggatcttaagtcacctgcagcatgcaagcttggcatcgggcctgaacaccgattgaaacgcactagatttaggg

SEQ ID NO: 50009 - DNA, 455 bp, Oryza sativa
  unsure (1)..(455): unsure at all n locations
gcttagcaaaactcttagacatcttttcttcgcagantcatcaagcacagcatatatacaccagtattgtacaaattgagcctccatgtattacattcaaactaagtcagaatcagtcctttcatcatcagagtcttcattactcggctggaggtcgttgttgcgaaattgttctacaacatcactcgcaattttgtcagctgcattntgcgcactgctgataagatcaagagcagcttcttcacttgtcccgtttgcaaatccatcaatggtgtcgacttcaattctcgggtacaaggattttgtcatacgcaaggccatgccagctcccatactttcagctttcttgatattcttgaaatatacatccggagcaacactcagcttgtcgaatatatcggctgcgtcgagtgcactcggaccactgttattgangaacatgtgctggatgagtg

SEQ ID NO: 50010 - DNA, 447 bp, Oryza sativa
agcttatgcaagcaacaagcagaaacttctatcggttagaatagattagcttatactattatgttctcacaggatctgttcctttctcagcctattttatgcacacttgctttttttgaacaaggaaattgaactgcttatggagaacccacagcgcaacttccctctaaccaacttctgtcttgacccctcaaaggtatgcttgctttttacaatatgtaattataaactcaatacttttttttttgaaaccgaagctatgctaagctggagttatattaaggagaatagaaaagtatttacaatatcaccaaagaaggtgaatgagaaagaaacaacggaaactagggaagaacacatataagatacacacactaaatgaaacctaagccgatattctcgcgatgttttctgctccacacatgccccatatattgatttcgtctt

SEQ ID NO: 50011 - DNA, 93 bp, Oryza sativa
aacaaaacacgagcagcaaccccactgaccgggactgtgtccacgacacgagggagacacaccccccccgaaccccacaaaactcacagcccg

SEQ ID NO: 50012 - DNA, 427 bp, Oryza sativa
agcttgagacaacgctgcatgggtgaactctctctgtacccgtatatgcaaataaagcactacacaggctagcgaaatggatcacactgcagtgctcaaaatatatcataagcagtaaacaacttttttttttttgagaggaagcaataaacatattgcaatcctaaaacagcataaaacgatcatggcactgcaggccgccacaactgttggtccgactcataacctcgaaccattgtcggcttttgcctcttaccctgtgcgataacatggccatgagagtaagtgaaccaagggtgcagggatgaaacaacacactcaacgaccgtgattgcgggttctcggtgtgtcaaagtggagctccttctaccagcggcgaaccaaacccgtcctggaccggtcatctgctacctcaaagacgtcattc

SEQ ID NO: 50013 - DNA, 454 bp, Oryza sativa
  unsure (1)..(454): unsure at all n locations
agcttaattcggatagggatccgaataggatttctacgggccttggaggcccgagtgatgaatcctatatattcgtgaggggtgtgaccggcagaggcattgaatcacgtgagaaaccctagccgtcacttccctccncgagcaaaaccctagccgcgcgcgagtgctagcacatctgcgcgtggcgttccgtccctgtacatgtggataccggtagaggcgccgctagtttgcggcgctgatcggcgtgggagtaccgcgaggagaacgcacgaggaggagaangtctagccggtgcgatcgactacttcctctacatcgacgcgcgctactttgcgagagttccttcgacttctcagcgtcttcttccgctgcgcagcgcgttgagtggtaacgatctatgaactaatacttgcatggtctctggttacgccataaaaattttgattatgct

SEQ ID NO: 50014 - DNA, 300 bp, Oryza sativa
agcttgcaccaaccgctgcactccctctatctcggtgcatcttcattgaggaccataatgattgaggcgtgtgcatggaactatgaggtgcaaaaattaagttcgccgcactattatttcagttgaccagatgaaccgcgaaggatgctgccatctctgattgcatatacctacgatatgccaaaacatggctctctatacggaagatacagcatatgctgtgacacaggttatagaagtgactattcttacatacagaagtttcctctatgtggaatatgtgcaagcgcgcatgaacaa

SEQ ID NO: 50015 - DNA, 320 bp, Oryza sativa
gaggtgttcgtcctcgtcttcttcgctacgtgcaggtccagtgcagcgcgctgcatgctcaggtggacaggctgagcacggagaggaggcggcgcggctgatgcggcatcggtggcggcggctggttcttcaagtggagcacgttctggttcggcggcatgagcgccgacgtcgcgcgggtggaggactccgagagcggcatctagcggcggacgccggcgagcgggaagaagggcaggggcggcgccgtcggcgccttcgccgcgactccgacgccgaaatggcgcaagttgatgtcatgagaggatcttgaattttga

SEQ ID NO: 50016 - DNA, 350 bp, Oryza sativa
tgcccatctttttaggcaattgtaaaggcagattgatgattgttcactggaaaaatctaatcaaaaaaactattagcagccaattgatgattggtcacaggaaaatctaaccagaaacaattattagcagccaagaatagcccgcgaccaaacctacgagacgctgaaaattcaaacggaaacaactaccgctcacttcttcccgccatttcctctcaacccatcaaactcacacacccatttcttccttctaccaaaaattctctctccgatccgtgcctctccgtcgccggagcaggcacgcgcgaatcccaccgacgccatgggccagtgctgcacgggtggcggga

SEQ ID NO: 50017 - DNA, 249 bp, Oryza sativa
ttatactggactgatcccggtcgatcatggtctctgtgtgacatagtgcttcgatgacccttatactcaatgtacgcaccggacacatgcagtgataacactgtggtgccaagagagtgaactcattcatattaattgatgcgcgataaatgcccgcttgcctctcagagaactgctatgacccatgatgaatgcattagacagctctaactctttgcatacgtccgaaacaacccacattatttggtc

SEQ ID NO: 50018 - DNA, 426 bp, Oryza sativa
agcttgcacttatcacaaaaccgcacccacattcatactacatccaatggctgaacaacagtggtaaggcgaatgtaacaaaactggtgcacattaattctgcaattggaaattaccatgatgttgttgaatgtgatgttgtgcccatgcaagcatgtaatattctgctaagtagaccatggcaatttgatagggattctatgcatcatggtaggtccaaccagtactcttttctgtaccatgataagaaaattgcgttgcattccatgtctcctgaagatatattgcgtgatgatgttgctaaagctgccaaattcaaatgtgagagtgataaaaaagcccaatctgatggcaagaaacctgagacaatcaaattgaaacccaaatgcctacttgctactaaatctgatattaatgaattgattg

SEQ ID NO: 50019 - DNA, 335 bp, Oryza sativa
ctatcttctcgcaaaactacctcatcatgttgattgatagctggcttttgatgctatacaaaattgcttgcgatccacatttcactggacccacgtgtttggtgatatttttatgttaaaccagtagctaaacaacatatatggcagttacagaactgctttaacaccatgatatgttaagttagtcctagatgttcccttctgatattattaatagtgtggtgaatattgaaaacagacaatattttctaaaacagcagcaagtctttagtaacattactaataatgtaaatatggaccatcaatttttaaaacattgccagttgtatatttta

SEQ ID NO: 50020 - DNA, 369 bp, Oryza sativa
  unsure (1)..(369): unsure at all n locations
agccccagagaaacatnactttattctcttagttcacaacacaacatacatgccaaccagtacaaacatgacccataaagccctagcaaaagctagactccaccacaggaaatgcttgggcatagaatgacctacaaaccataaatgtcccactctaacgggtcaacaggagatcaacaatcatcgtcctcctcatgatctgaagccacatatgaggacaacagggactcagcaagacatgcctatgatagcaaatacaacaatcgcaatataaaacatgcattattaagagcccgaaggttgaaactccaaccctaacatttatatcatagagcccatcttaaaaacatttgatataaacacactatc

SEQ ID NO: 50021 - DNA, 328 bp, Oryza sativa
  unsure (1)..(328): unsure at all n locations
cgcatgcaagctctnaaaatcatttctatttatttctctttaagaacaanttattattcaaggatgctaaaccagaaaagcactctacaattatcattagatcattactgatcaaatcatcactgaactgttctttgcatcatttacgaattgagctccgaaaaatccgacaaaattcccaagagtataattaaccatggagaatttaataaaaattaaatccatccatgctttatatttaggaaattttatttcccacatttaacttcacttgtcaattaataaaccattaatataaactctaaaataatnaataaataattataaa

SEQ ID NO: 50022 - DNA, 440 bp, Oryza sativa
ctcgcaaatcttctattgtttgtgataaacgaaacctgttagaaacttccgtttgaaagaacatgttattgaccctaaggaaagaatgtggtattgaagcattccaatcaacacaataagttattaaacagttgctatgatcacaaaaatgttcgttcttttagaaatcaaggtacaaaggaaaatatctggtttcatgttggagacatggcagcatctgattcatattcatgcggataaatcagttatcacatcttctgattatgtagagcttgtttttatacactcaacaagctgcaaccaaatgtcagttcgaccaaagtgttctgctcacatttcctaattaagtatgtccctgttctgctcacatttccttagctcacaaataacagaggatttttattcgaaatactgctaggcctgggatcacggctcgccta

SEQ ID NO: 50023 - DNA, 442 bp, Oryza sativa
agcttatactatacataaacaaaaataatatttttatctaatagaatacgtaatctacagtcaaatttattgtttttttataattgtatagatcggatatgaacttacatacttgtgaaatggtatattatatattaatctatcttactaaacttttaaacatattttgatatctaatttagattatatactccactataaaacgcgaaagaccttgaaagacgaaaatcaatctccacgcacatgtaatactcgtttgcggtcactcactgatccaatcctactatgcctacgaaagtcacgaacaaattcagtcttccaagtcttccaaccatagctcgacacgtctgcccgctgcttagcacgctttcgggcacaacacagcgacccgagtagtacttaataggagtacactgtaagcctaaccagcgacgagacactg

SEQ ID NO: 50024 - DNA, 364 bp, Oryza sativa
ttggtcaaggcatctacgataagtccttgcaatattctctgctatctagcctaccacttattctttgtcatgagttttatgttctgcaggtgataaaatctatacaagaggaagaggaaaggatccataattattttaagccatggactgacgcaagactgtcaaaggtttgtgatagggttatttattctcccatttcttctgtgcatttgttagcttgttttcttcacaagcctgttctatcatgtacgcattcattgcctgctcagttggaatttaacttccaacccgttacattgaatacttacagacagtactcctggaattagcatccaggcaagctgaatggctacttgatgatgat

SEQ ID NO: 50025 - DNA, 454 bp, Oryza sativa
cagctcaagaaggaagggaagaagattgttgctctcttcggggaatgggactcacatgaggagtgctccgcctcattcgggtccgaagagaaaagtggtgatgatgccagctccaacaagaagaagatgatcgttgttgccatcaaggaggctccatcactctttgctccactttatctcatggcaaacggttcctctaagggaacatctcttactgatagtgagagtgatgatgattgtgatgatgcttcctatgatgagcttgtgagtatgtttgaagagctccatgcttatagagagaaggagattgtcaagttcaatgccctaaagaatgatcatgcttctttggaggtcttgatgaggaccttaagacctctcatgaaagacttaccatttcttatgagaagctcaacgaagctcatgacaacctccttctactactaacatggaccca

SEQ ID NO: 50026 - DNA, 280 bp, Oryza sativa
atccttagagtcacctgggctgcagcttaatcggggaggatttttgcttggactagtggctaatccgcggaccgtcgcgtgtcataggacgccgggagggaggacgcccctccgctgaagaagccgtggtgctgcacatactaggacagtcgactcctgacactcgatccacctctcttcatggtccaggcagagaatggcgctgggaggactgcaccccgctgtgctacaatgacacacttgccgtcaggcacggtcatctcactacggggctggtacc

SEQ ID NO: 50027 - DNA, 321 bp, Oryza sativa
  unsure (1)..(321): unsure at all n locations
ctcgtcccgcgacctctaagtcacctgcggcatgcaagctntctttcggagcgtcaggccactatttgttgttccgtataaaactctaccgatagagaaaccagtcgtaccagcgccaccgaccttcaagacaatggccagcaagactcttcgcgagtttgctgctccctctgctgacaatgtggccattgggctgcaggtcaacatatgagacgtggatttcgacttgaagtccaacctcatcacgatggcgcaggctagccccttatgtggcaagcctaatgaggatgccaatgctcatctgcaacacgtcctggagat

SEQ ID NO: 50028 - DNA, 369 bp, Oryza sativa
agcttcagcccttcgttcattagtcggtggttaccacggctaatcgtaaactttcgtttcgattctatggaccatttcaggtgcttgacaaggttggagcggtggcatatcgcttggatctgccaacttccagtttgatccacccaattgttcatgtttcccaactaaaaaaggccttggctccaacggaacaagttcattctccacttcctgtgctggatccgacaaatgttactcacgtttgtccagcgcagatattggatcatcgcttcatccgcaagggttccaagatggtggagcaagtacagattcgttggaccggcgatgcaccagcagcaaccacctgggagaatccgcgcgagctccgtc

SEQ ID NO: 50029 - DNA, 416 bp, Oryza sativa
agcttgttgtgataactgggcttgttattgctgaatccgccgacaactgcataaaaactgtgagatacctatattcttgtatgtaactgtggcacaacctctcaatactcatttttctttttgacaattattgtctttcaaatcctgcggaactgcaaggtttcacgtattcttccacttatagctgacaccgcaaagaatgatcgcagcgctatccttcgtgctaagtacttgtgtttagcattgtcttttttctcagtacctgtgatccttgtttattaaagccactcatgcctatttcctgctatgtcagatgtagtgagtatgccatcctaatattggaatattgggcagatgctcctgaaatacaccgtcgatctgatatataccaagaactaatcaaatgctgcgcggct

SEQ ID NO: 50030 - DNA, 466 bp, Oryza sativa
ctgcagctattatagctttttaaccggttatttattcgtcttatttataattatttttataattattattattattattattattagatgattaatttatttcttttaatattttgtatttttttaaataagacatacggtttaacgttgaataaagaaatccatatataaacttataacttattttatgacgaaaggtgtagtccaagaagatcaacttgagaagtaaggtcaagtattatgaaatgttttttttttcttccatgtgagcatttgtaatggactattggactgtgtcccttcctctcacaattactcatttttgtggtacaaaaattgcattgaagacattcttccttcccaacttaatggtcatcattttggctcgtgtgttcgaggctttgagcaatgttctctaccttggtcccaagatttaacactttctctaatatatttttctgaacca

SEQ ID NO: 50031 - DNA, 436 bp, Oryza sativa
tatctgattggctgataatatatctgcacaatatttacaggttacaagcgggcactgcatggcacatgtggtggcacatattgttacacacagttgggatcatgagaaggttaagttttccttgcctcctctaatgtcccttgtcaattaaaaagaacttatgattgatgactaggtttcctaaatggtcaataaactatttaacgggctgtcaccaatcattaaaaaaattatgggtatgatgattgccttataagatttacagcttgattagaggctacttgcacttctattgtgcctttttaaccatcagttcatggctgttctttattatcaccagtttgtgagaaaatactgttataagcaccaatgctacaaatcatgctttgtttttctcataacatatgaacatgctagtttttggatcactatgcat

SEQ ID NO: 50032 - DNA, 448 bp, Oryza sativa
gcaagcttattgctatctctagaggtaacccacattgatgtaatgaaagtgaaggacccacaacaatgacagaacgccccgagtaatcgacccgtttcccaagcagagtttcgcgaaacctcccctctttaccttcaattacatctgaaagtgatttgtatactttattgtgaccatccctcgttggttgcccgcgggacccactatcaagaagtgtatccacggcttcttgtaccaatttttcctggcacattactaaatctgctggcgctaattcacttctttttaatagataggcaagattgttgttccgacggataactctcttataaagttcattaatatccgaagtcactactttatccccagacctataaacaatgggtcttaattcgggaggaagaactggtaataagcacaaaaccatccattctggttctacatttgg

SEQ ID NO: 50033 - DNA, 416 bp, Oryza sativa
  unsure (1)..(416): unsure at all n locations
agcttggagatnttccatctctccagtattgtctatagatcatgcacaatgtaattctgctccattcctctcgcccaagtgccaaagttcttaggtgaagggctctccttcatcagttcaaaagcatcaacttcttcaaaataagccttttctttcttcaagtcaagaggccccccaaaagttcttttctgcaatagaatagcaaatttaaaggcaaaccactttaatgctgttagcaaacatgaaggcaaaatatatcagccctaccactcnggtacccggctttggtggccttttctgtgctctgcaaggattctgctgaagttgaatttttgtntcaggagcaaaagggaacctttccgtcctctgccagtttaccagaacatttttttaagaaacaatgtggaggctaaaat

SEQ ID NO: 50034 - DNA, 443 bp, Oryza sativa
agcttcatgtcaagatgaaacaattatcttattatttcctcgagtcaactccgggagtcattatcttcgttcttcgcttcagaacaagcattttactttaacaactccaattatttcactggcaattgtggcttccagaggctgccataatctacttcaaatttctcaaatatcatattcaagatttaatctacatgtgctggtcagactcagctttgcacctggatatggctttgtgcttcccaagctccggcgtaacgagtttggagttatcaaacaatcaatacagattcgactattagttatgaatttcagaattatgaaatcatgaaaaggctatgttaagactccaacctagtacaactcaatacttattaattaccaaaactgagaatatgacttacaagctattgcaagaatccatactacttcaaaatatgttt

SEQ ID NO: 50035 - DNA, 368 bp, Oryza sativa
agcttcatgcaaaaatatcacctaataaattatattctcttaggtggccaaacttggaaggtcacaactatggttgtcaggatacttctactgagaagataacaaaaaatatatgtgatatgttttccccacttgttcatatgagccaatcaacagcagaataattttacctgtcaaaccaatcaagctggggaatatacatttatgcctgctcacataaggcactcttgatgccttctctgaaaatatctcatctacctctgccaccaatcagcttctattctactcctacttgttaattaaacaacatggacaaatgcagtgatcaatgctctggccaaagcatgggtcttaatgtctgaaacaac

SEQ ID NO: 50036 - DNA, 423 bp, Oryza sativa
ccggatccttaagtcacctgcggcatgcaagcttcgctagtacaggagttctggagcgatgttggttttccgacgccggcgaaccgctggtgggaaaaacaacccgagcctccctctcgctttcgctctctttcaccgaagcttgctgagaaagacaacgctggcggatggaatttggtgtcttacagtcgatcaggaaaagaattcggtcctgctatacagcgtccacgtggatggctgattccgccatggaaaggtcctcttccccgtccacgttcggcgacggtagtggtactgggggatttcctgccggcggcgacatcaaaccaagcgacaatggtttcctcagattgcgcattacaaggatcgtcctcagatcacgcgctttcactaggattgtttcaaaattcgaaacaatctttt

SEQ ID NO: 50037 - DNA, 306 bp, Oryza sativa
tatactttcccagcagatctcatgttatgaccattggtcaaaaataaagattgtgttcaagacaaacgatttcatggtttgcccgatgatcaagagaaaagataattggtttgtcacaaaacaaaagccatcatatcacaaaaagtaaattcctcactaaatgcatataaccaacctaaactaatcaaaagtatccatacataccctttaagatagtagagtaaaaaattctccagcatatgcatcaagcaatgcatacggccctaataactagatatattcttttagataatattgtaagtacat

SEQ ID NO: 50038 - DNA, 405 bp, Oryza sativa
  unsure (1)..(405): unsure at all n locations
agcttaacaattgtgcctcttgttntcagtcttccaagaatagttggcatagcaacatgacatagcaaataagtgctaatatttggcttgtaaatgcagaattgcttgtcaccttccaagactgatctgatggttggaataaaaacattcttccatgctgaaattatattcttgcttgcacttggcttgatcccttgcattctccatttgctggtaccatcttctagtataactagaattcccttgcagtcccaagtatcctgaacattgttgccatccaagtggcttatatcactaataagcctgctttcaataacctcaaaatattgtgccatcatatangacgtgaatggacttttggatgccggtagcaagtcatctcttttatcatcacttgggttctga

SEQ ID NO: 50039 - DNA, 353 bp, Oryza sativa
agcttcacaaagcgagggtgagttcgcgcctaagaggcgcgaagatgacatcctcacaaaggcgctcggaaccaaagaacattctggccgaactcggggaattggtagcgatgtgccctggaagcatggactccctcagtacagctcccaatacaggaaacggaaagtctccaaggaagagagggacgctcgtttgaaggccgaacttaaggttgaggtcattcaagaactagaagctagcatgaatgcaagggtggaaaaaagggttaacaaagtgctcgccgacatgaatataccccgagtcacaacacctgctgtgcaaccaacttctcgtataccacacgacgcgagtc

SEQ ID NO: 50040 - DNA, 308 bp, Oryza sativa
aaaaccccgctcagctattgtgaaagtggccttttttttttcaaacccgtggagatgtctaaccttgcataatcggataactaaacgcctccctccgtgcattctgagcttatacctctcactcctgcttccggcccgattgccaacccaaattcattcttggaaatgttccacgcaatcacgtattttggccatatcccttgtccacacaacagctgacacttctcctcctacttccgcccctggggaaacgggtttgctcctcccaaatttaaaatagtcatgggatctccgcgttcccccttcaa

SEQ ID NO: 50041 - DNA, 390 bp, Oryza sativa
  unsure (1)..(390): unsure at all n locations
taaatgatgtgacctcaaatgtttagcgaatcaccaagagcctactactggtactgtattaataattaatcagtttaaagactatccaaataatccaacattcaatgcaccaaaacattttttttttactatctttctttcctttctctccatcctcttgtagcaaatgagttaacatatacggaagataataagctatagttgtattctatttaatcctaccaacaaatgaattaacgtatacaatagttttttctccatcctcctatagcagatgagttaacatatacgatcgataataagctatagcctgatcctatttaatcctaccagcaaatgagcttacgtatacaatagataagatatggntatactttacttaattctacc

SEQ ID NO: 50042 - DNA, 289 bp, Oryza sativa
ttacgcgtgctggcgccggcagtctttgttatcgagccaccgccaccgccgggcgtgggtctcgttgacgagcgaacgtctccccttcgcaactaccgccaagccgccaccggaggtcctcctcggaccgagccaacgccgcccgtcgttgccagcggcagccctcctagacggcgagcaggtgcgcctccaccgccgctcctccgcatacaccggcagcggcgaccctgcgcgtcgcgccgtcaagccggcgcttctccgcaggcgcaggtaccgccgagcctcctcg

SEQ ID NO: 50043 - DNA, 449 bp, Oryza sativa
agctctgtgtctctaagagcaagtatagttagttcttgtcagcaggcggaaccgttttccacgtcatcaaaatcctaggtggcggagtgagaagagaagagagagaacggagcgggcttccaggcgctaagccgccgcttcgttcctccccttgatcccgtgcgtttctgccgccgcccccaaactctctttctccacgcgccaaatccccctccctcccgctaaaatcgagtcctcccgctccaatccgtcatgtaaccctcccaaatccactcccatgccaccaaattcgtccccaaatcggcttctctcaaaccctagacctcatattcgtcctcgaatcacatcaagatgaggcggcagtccacaaggatgtttgcgccggcatcattggaggtcccgccgcccgcactaacaccacattccatggtgacctcctcctcaccatg

SEQ ID NO: 50044 - DNA, 310 bp, Oryza sativa
  unsure (1)..(310): unsure at all n locations
agctntggagaagatgtcctatgtggagttctgttttataccccacntgagcgcctgtgaagattgagccgtaggcccgctagtccgctgctgtttatttttgattgtcaggcctgaagcgcctttgtaataatgtaaatattatcgatgtaataaagatgtgtcttttatatcatgtttggatggcgtaccccggcttttcctgggaccgggattaatacactagcgttcgggaaaaggcaatcttcccggtcgcgacagatgactacactaccggggaaagaatccataaaatactactgtgttcatt

SEQ ID NO: 50045 - DNA, 362 bp, Oryza sativa
  unsure (1)..(362): unsure at all n locations
ttattntgtaaagaaaaggataatttctagtaccttccacagtactgaggtaccataagattaaaattatgctgcttgacagtcgatatattcttaatagccgtagaatcactcaattagacgctaggacaaaataggccctaataaaaatcattaagctaatataccacatgtaactacggcggtagacgaagattgcctaccgtacgtagagaataagaaggcacctgtcttgtgataaatcncaaccgttggattggactgcgaaaagaatggcctagatcttctgctacagtgattatggcctactagtacggaatactgcggtacagactacagttaaatgcatttcttttttaaaa

SEQ ID NO: 50046 - DNA, 457 bp, Oryza sativa
agcttgtggctggtagaaaacatctatttttcttttgagatagagttcgatcctcaactatttctcgcgatatcttcttacgaagttttgttagggcatctataacagcctctggtttaggtgggcaacccggcaagtagacgtccacaggaattaacttatcaactccccgaacagtactataggaatccgtactgaacattccaccagtaatagtacaagctcccatagcaatgacgtattttggttcaggcatttgctcatataatctcactaaagagggagccattttcattgttactgtaccggctgttaaaattaggtccgcttgcctaggacttgatcttggtaccaatccataacgatcaaagtcgaatcgtgagcctattaatgaagcaaattcaatgaaacaacaactggtaccatatagaaggtgccataaactagagagtcttga

SEQ ID NO: 50047 - DNA, 428 bp, Oryza sativa
agctcgatatccacctgaaggaccttaatgagatggtttcctccagaatttctgtgcgttctcaagctgtcatcgcaacgaggcctgccattggtgcaagcctaagcaacaagaggttctacatcaatgatctcttcttgagggtgaggattggggatttggctcaaagaaaacaagccctggtcaccattggagagctcctatctgaagatatcgagtatgtcaagattgtagctcttgacattgataatagcatcactctcctgatcagctttcttgaatcacgggatgcatgcattcaagaacacgctgcaagaattgtctcccttattgcaggctatgattcttacagaggaatgcttgtgaaagcacgtgtgggtgctccacttgtctcagtactggatagtccaagctgcaccaacactact

SEQ ID NO: 50048 - DNA, 388 bp, Oryza sativa
  unsure (1)..(388): unsure at all n locations
agcttgcacatagcaccaaacctcacccttattcatagtacatccnangggtgaacaacagtgtgtatgccaaggtgacaaaactggtgcgcgctaattttgcaattggaaattaccatgatgttgttgaatgtgatgttgtgcctatgcaaacatgtaggggtgaaatctggtcaagttgggtcggatctcaccacttccgtatcctaacccacattttgcaatcggaatctggtcaaatacgaatagtggtcaatacggatacaaactccgataatatctggcacaaatatgaaatggatttgtaccaaaacatatatacgctatcgggtacgaatgtttattttgatatctagtcaaaaaaacatccctatatatgcctatatat

SEQ ID NO: 50049 - DNA, 386 bp, Oryza sativa
  unsure (1)..(386): unsure at all n locations
agcttgtgaatccaatgattttggggatctcgtcagttactctgtcgatttccacagagttattttgatcacaaccagcaaggctataaacaattgacatgcctagtgcacgaagaagatcatcgtctgtcagtggttgctccttgggaattgactagcactctgatatcccctcccaacatttgtatgtggatcttgggttgttcaagtgcgttgatcgggttggtgttttcagcatgatatcaatgtccccagctgacccttgtttntgcccttgatcaccagctgcatcctggcttttctcctgactttctactgtatcaacaaataaaggatcttgatcatcatcttcttccacaagcgggtgtcttctttttggtttctgt

SEQ ID NO: 50050 - DNA, 408 bp, Oryza sativa
gatactactcctgcgtttatacaaaccacacgtaacacgttgagcgagacattggtgaattcaatcatcccgaaggcacggtacaaggacatcgatgaatcgacaagcacgccggcgcggtacatcacagaatcgagaaatttatgcgctctgctaagcaccaactggcattgacaaagctttagctggaagcctcgaaaagtacttttgcccctgatgctcactaatttttgaagaaaattgataatatggtctatgcgtaatatatgtcatacgccaatatataggtctaaatctagagaatctttaccgtccatcgtaccttccgtaccgtccgtacatatgaactggcccgccgtttagtacatccaaggctcaaatgcaatgacctaccggacttcctcagca

SEQ ID NO: 50051 - DNA, 377 bp, Oryza sativa
  unsure (1)..(377): unsure at all n locations
tccttaaccttcngtggaataaaatcctgaattgtatgtctaacattgaatgtaaatatctgtcttgcctattatttgaagcatttctggcgaatgtattcttattatccactaagcctcaatcaaccatgtaggttgatagctctaagtgcattgacgtcatattggcatacatgtaaagttgtttacttatgcacatgaacaattataatatttatgtttaagcattgaagcttaaatatattcacctgcaaccacattatctcttttagaacagttgtaccatgaagttacaacaaatatgtgggtttcacgacaactattcttgtagttctcttatgattggcgtgaaaaggggggaggaatatgtgtatttt

SEQ ID NO: 50052 - DNA, 411 bp, Oryza sativa
  unsure (1)..(411): unsure at all n locations
acctgcagctgcaacttaccgcttgcccacaagttatttttaatgcgaaagttgacgccgccaagaacaatgacctgaggtatgatngcatgcaagaggagcttgacgcttatgtggcatcagaagtcaggagacaattgaagcctctaagtccagaaaagaagattcctatagacccaagtgttaggaacttcttcaggggtatgtctgcacctgccaaggaggccataaagctatcggactatgagcgaacactcaagaaagcatcttctggaaagtccaaaccagtccctcagcttggagagcaaccaaaccaggagatcgagccgttggtgaccggtgaagatattggaatagaagaacttattactgacatccggctaactacggatcaattgctacgacgcacac

SEQ ID NO: 50053 - DNA, 390 bp, Oryza sativa
  unsure (1)..(390): unsure at all n locations
gcagcttaagataacagaactactattttttattagctgaaggggtacatggatcataaactgtcatgtgcaagcatattcagatttatcaacacaaattattgaacatgtgctccttgtcaacttcatagacaacagagagcaccgaaataagaattaattagcatcacgcaaatgtttacaaaagtttatcattgctctagcaagattgcccaagacattagggcagaccaaagtttagcatgccaagagttaaactctatattaatacatggaaatagctcacaaaagttgccacacataacatcttccagtttttactctgcatagaagctncactattccttcggcgccggacgcttgccgacagcttttcaagtgactttcaca

SEQ ID NO: 50054 - DNA, 412 bp, Oryza sativa
  unsure (1)..(412): unsure at all n locations
cagctttgactnctactacagttctttctcttgtacatatatcatatgaaacatgggcatgatactctattttcctgtaagtctttcatatgccgatttaattacagcgctgaacagtaccaactttttagataattggctattagcaacccactagagaggccttgtgtgattgctaacgatacaccggggcacatcaattatgcgtcatttacagggcatattcacctttgcttntacatctttattccacctttttgagaacgacgcgcttaaaaatctatgcgtgtctatggtgggttggttgaaatttcactatcttttgtctctcttctcatgctcttttcttattaaccttgacttcctataaaaatacatttcgaaacagagcgcgataagagtggttaatact

SEQ ID NO: 50055 - DNA, 244 bp, Oryza sativa
tagaggagacatgtgttgaagcactttcttggttggaagacaatcatccatacatttggagtacaagcagagtttctaactagtgcaacgtagattacatctataataatctttgtgaatgtttcaataatcggggtctaacaaccaaagatcgacggatcgtggacatgtttgatgcattaagatagatgatcataaccaagtttgttgcaagaaacaacttctctggtaagatagagggaag

SEQ ID NO: 50056 - DNA, 457 bp, Oryza sativa
gcatgcaagcttgttgcacgggattgctgtttcttatctttcagcagcccaacgccatgactatgatggtgacaaaattgccacatacaacaatgcccatattttatcatcattcgatccattgcataacaaaagatattacaccctctgactcaaaatataaggtcgtttagccttctcagctcttctcaaaatataagctaccctagaacttcatcacgcttatggctctctactaacttctttggcgttgttaagcaagtgctacagccctcatgcataaatgacatgctttttacaatgcacgtatacattgaagggcagcaagggcttttatctactctcttaattccttgtcgcaagtccaaacgacttaaattttgtgtgagaagaagaactcaacataccaaaacatcgtgccactactagtgagaaccataaatggaacaacatctag

SEQ ID NO: 50057 - DNA, 309 bp, Oryza sativa
  unsure (1)..(309): unsure at all n locations
catgcnagcttgttccagcggtgatatattttcagtgttctatgcagccagagccagagctggtgatgaacctttgaatggccaagacacggattctgagagtagcaacgtacctcaaatttctttgctggtgaccatgatagggatgaaattctgaaagatgagccatccagctctaatgatgataaccaaaccactcaagattcagaagccgcatcttctgataacagtccacaccgaaatgggacctctgagagggctgtcgtttctaatgaaagacagccattcattattaaattccaggggctc

SEQ ID NO: 50058 - DNA, 358 bp, Oryza sativa
  unsure (1)..(358): unsure at all n locations
agcttcagatgtgaaggaattcagagcatgttatcttaacactgaacaaatcaggattggacttaccgaaattgctcatgtggaggaattcttcgtcacctacagtccatactctggaggaactgccgatagaagcttcgtgtgagaggggatccagtggctcgctagatgtcagcttcttcatggcctcggatgcctaaaaaccgnantaccgttgtggagggcgcgcatggccggcgggcggcggtggggggcgcgcatggccgccgggccagaactcgccgtactgcggaaacggcatacctccggccgtcatcgggacaccncaccccttgccttgcaaagggaaaaggagctg

SEQ ID NO: 50059 - DNA, 345 bp, Oryza sativa
  unsure (1)..(345): unsure at all n locations
agctntagataatcatccatggtctatntctagcaatagcttcagcaaaatcatcaacataatcaacttatggtggcgcatgcacaaaccaaatatcacaaagctgcaaaaagaaaaaaaaatggacagatcatcaaatccggagcggatcacggacgaacccatcgagatcactagcacggaggaaaccctctggtcggatcagaggccaggaaatctggaatcaagcatcccccagagagaacccaaaccaacccaagctcaaattaatcttggaacacctctgacccccacgatctcgatgaggaggtgggagatgaatcctccacaacacaccacggagca

SEQ ID NO: 50060 - DNA, 422 bp, Oryza sativa
cgcgagctgcttgagctctgttcttcctaggctcgatacgagctcggctggagctccagacgagccgagcccgagcctttctctaagctcgcgagccttgttcgagccgagctcgagcttctaacgagcctagtaatatataactcttgttgccatctcacaaaccaggagaacaaatatgaaattcgcgcgtctcataccgacatcatatactgatcttgcgacatcatatacctatcgcactctttggcccgcttccagcaatagcgatgaactataacttaatgatcccgtctacagatgatctcagagatatatattgtgctgctaacaaatcaagctccgccgctgaactcgacctgatcgagctcgggccgagccctcaaaatctctctgctcgagctggcatcgagcccgagcct

SEQ ID NO: 50061 - DNA, 344 bp, Oryza sativa
  unsure (1)..(344): unsure at all n locations
ctgcagcttgtcaatttgagagtcttgttttttgtattctccgactctttgngtagttgggaaacacctgaacatagagtcgagaactgtagcttgtcctccagtagccattgttgaatgaagataaatattgaagaatggaacaccaactggtgtaataaaataacaccggatcatatttggtgacctatgccaaggtgtggaaacatcttgtagtcgtcgtgggtggggaagtagcacagtttgcgaagtagaggcaatatagtttgccgatgccgaacataataaaaaagaagttgctcaccctggggaccaagttgccaagccgtgatgaacggaacacc

SEQ ID NO: 50062 - DNA, 368 bp, Oryza sativa
agcttcagctccggcggcagcgcgctatttgtggtggcagagcccgtgaccccggcagcagcatgcgagcaggagcagttctagcggcagtgcgtgagctcgcggcgtcggcggccctggcagcagcacgagagcaagcgatcatttgggcggcgagcacctcgtcgacgagacatctcgttcacgggcagctagcaacttgtcttggttctccttttccttttccctatttggttatctttatctttttccccatctttgcaaggaatttatttgttgatcattttcctggtgaatgtgatgaatatttttggaatatatatttgcacccgttgcatgtttgtgaaaatcctgtcaaaaatctatga

SEQ ID NO: 50063 - DNA, 357 bp, Oryza sativa
  unsure (1)..(357): unsure at all n locations
agcttctgtataaagagatttgtacctgttttattagccagcccgaccccccctctcttgtcttctgtggatgagatgagagagctgttcttagtcttcagtatccaccctgtaaatgtgtaatcgattatgttgcttcggatcgtgtcggtatctttcaggattgctatgggtcgtggataaagtgttcattggttctttttaactcgggcttgcccttgtgcaaaattagaattcaagtcaaattgtttacaactttcttcaatgctgaggtatattgacttcgatttggtcacctgatctctaatccnggagcatgaaatttcagcgcacccgcgagcaagaacaagtcccatt

SEQ ID NO: 50064 - DNA, 93 bp, Oryza sativa
gaccaacacgcgcgccagaaaaacgcttaatctgcgaggggacgcgcgcgggaacgaccccacaccccaaacaccgacaaacgaaaccggggc

SEQ ID NO: 50065 - DNA, 252 bp, Oryza sativa
gcttgagagattgaggatttctctttagatacgtatgggtggagaggataattgcctttattgcgctagaagattatttattccttaatagtggttagctaagagaactgtttgtgaattttttttttacaaactgccccgttaccccaaccgtaaggaaaaatagtgttattttcacctgcggtccttttaggacgagcacttatataagttgattgtcgcaagtcgttactccctccgtctcataatata

SEQ ID NO: 50066 - DNA, 183 bp, Oryza sativa
tcaaccccattacctttcctaatatagcaataacaatgcgttataacattattatggccacttcatcaacactctctaattttctgaatgcatgattgaccgacttttcttattttactttaaaatgtaagtgctatacctgtatgactcttagaaccatactagccgcgttttgattctttt

SEQ ID NO: 50067 - DNA, 237 bp, Oryza sativa
tatacccccccccttcccggcgtcgacattgtgccctgtgctcaggctccgagattcggcggaaccctaaaagaaaaggattagcttcgcgtgcgattagggattgagaagctaccgtgatggcaatggcgacgatggcaaggtgatgtggtgggcttttccctccttctcgagctcttcgtgccgggccaccatgggcctttcctcgctggccaccccgctccacgcttgagaata

SEQ ID NO: 50068 - DNA, 444 bp, Oryza sativa
agcttgtgtttcccttgctcttgtcctaagccttgtgcacaactatggcagtggactgtccaccatctcccttagacgcgggatctttctcctgagctctctcctcaacattaagagatgctatcaacccctcaaaggagtattcctgtctcttgtgtttgagtgcagtaccgaaatctctctcagatggaggtagtttcgcaataatacacccggccacaaatttgtcgggtaagacacacttaacgaggtcgatttccttagccatggtttgtatctcatgagcctgtttgactacagaatggttgtcagacatcttgtagtcatgaaactgctccatgatatacagatcattgctatcattcatagcaccgaatttagtattcagcgcattccacaactccttaacgtcggcatatacatatacacctcgaccagacaatt

SEQ ID NO: 50069 - DNA, 427 bp, Oryza sativa
acttattatactaatagatatattctcttaaaaaaaagggtattttaggaatatattttgttcacagcaccaacgtcattggcacggtactcacagcgctaataatgttaaggccatcctcctcacctcttaatgaaagatgtcactcatgtccgctgattttttttaaaaagacctacttgtaataaaaaaaattatttggaataaaatatatttacagataggtccttggcgacaatgacactgtcaccgaagatctatctataaatatttttctattacgaataggtacttttaaaaaaaatacaaataattcttaacatcaaccgcattggtgtcgtatcttacattgggacttacttctgcggggttaagagaacgggccatgtatgacgtgttggttgacacttgcaaagtgtggcgataa

SEQ ID NO: 50070 - DNA, 363 bp, Oryza sativa
aaaaacccccgcgccctgtttcctggtcaagaaactcttgaaattattcgccaaatattaacggtgggggcatcatttttctcctcttctgccgcttatgcatcacaattgcctttaagacgtagctttctttaccaatattaaataataccaagagctttatatctaaaatctttcacttggagctcacgctaaataaaacatagacacgcgttcttaacttgacacgcttttccatccaagccctttcatattaaaaacctatacttgtaataacctgactgcatctagacacacgccttgttgaagtggtttattaaaacctgggcatcattcattgttaatacgcttccattcagaatt

SEQ ID NO: 50071 - DNA, 279 bp, Oryza sativa
cagtgactaaaaccaatttgcgacaagaggggacaccataaaaaaaggctcaggcgatccacagtgcatcaacacagcttggccccgcccatggaccacaatacttctaacggccggaactcggaatacgagcatggtcgtaacacacagtcgcaagttagagcggcttcaactcccgccaaaaattcacctagaaatacccaaacaactaccctataacaaacgccctatgaatgcgatcttatacccccataacaaggtatcttgtggaactttgta

SEQ ID NO: 50072 - DNA, 368 bp, Oryza sativa
  unsure (1)..(368): unsure at all n locations
cgccttgtgaacgaccatcgggttcgccaaccactctcgatggatgacctctcggatgaatgcggtctccataagacacgccaccttctctcggatgaaggcttgacgttcctgggcctggcgccgcactttctgccggaccggacttgcgcccggccgcacggcgagacggtgctcaatcacctccctgnggaccccgggcatatccgccggtcttcatgcgaagacatcagcagttgcccgcaggaaagagacgagcgcgtttttctatttgccgttcagaagaccaccgatccgtgtggtcttggaccggccgtcgcccagtgcaacctccttgaccgggacctcgtcgcatgtgactattcact

SEQ ID NO: 50073 - DNA, 333 bp, Oryza sativa
taccaatgtacacaagttagtggttgttctcttaaaacttggttgggtttgcttgggatgagctggggcccggtgttgccacattggtctaactcgctgtaggccttgggtttatgcacgttcgtgtgggttcacgaccttgattaataatcttgtgtagatctaggttcggagtttcctaaatagtctcgagcaaataagtggtttaaaatgctactttaatgcaaaacctaacgccctattattattcccttgtacttccttgcatttactgtgcgtttgccggtatgacttgttgagtatggtgggtgtactcagtctcgctcaattttc

SEQ ID NO: 50074 - DNA, 330 bp, Oryza sativa
aagcttaccgaattgatctaacctgattgagagaccaatcaatctggattgttggtgctgggggtggcgctacccgaaaaagggcaccgtttgaattgctgtagtggaggacagcagtagtggtgagcacaggattggtgaaacgggtcgagacaataatgctgtagtccttgggtggctgatcagccgtcacgaggaatgagtaggactggcctatatggacatcaatcgatgtgtatgtgctctgcacggtgtgtgatccctccacctcaaccagcagcaaggaatgaccttgaatccttatgttcactgatgttgctatgcccacat

SEQ ID NO: 50075 - DNA, 363 bp, Oryza sativa
  unsure (1)..(363): unsure at all n locations
acagctctgtcatttattcactgagttntgccttatatatgggttttttaaataagaattctctgcgaaaattgcattatatctgaattactatacttaacaaattaaattctttgtggattatgctgattataagtgggatgctagaggagtaagtctatatcattggcagatacacgagcattttcggacaaagttctgaaagacactcaccagagtagttcttttaaagccaacaacatggtgaatttattcacgctgcaagactatgacagtaaagggttgacttaaacatccaatatttatgtctcaatatttttgtctgaagatgtgaataccaagcttccaaatgactagcaacaa

SEQ ID NO: 50076 - DNA, 393 bp, Oryza sativa
ttctacacacaacaaacatattattaaaatacattcagtattacatttggtgtaaccaatttggtgttatagatattgccaatttttctataaagttggtgaaacataaataagttcgactaagaaaaaatagaacgactttataatacttataatatgaaatggagggattaacagcaagggtgataatttaccaagaaagtacataagaaacttattgtggattttcatcgagctgtaaactttgtaactcctggttcatatgctctgtgtcgtgatgatatatataatctgagttcaatatgaggtgactgtgccacggcactcttggtgaaagaatgagaaatattgggaagaaatggggaagataatttgtgtacaacatatcatgag

SEQ ID NO: 50077 - DNA, 474 bp, Oryza sativa
  unsure (1)..(474): unsure at all n locations
cgtttgatgggcaaacccatcaaaaaatcttttgcaagcagtgactatgctggcccagagtcttatgtcaccaatttgatctttgtattggtgatagagtactgtagcaattaactgagctcacccacacaattgtttgtttccttgcatgcatgggtttctgacaatgcagtaactgctagaaggcacatttgtatctgccacagaagaagtcagcaaactgcaaagtgtagctgatgatcaagaggataatagtttcttcctcattttagaatgtagctatttttagccacaattntagataatctaaattcctagctataaataattgcattttaagatagaatgagtaattataaatttataaccagaaatagatatatttttggacggaggagtaagagaagatattaacttattaatgcctgcagtgataaggagaagttatgcttttatatcattccattgcattct

SEQ ID NO: 50078 - DNA, 421 bp, Oryza sativa
  unsure (1)..(421): unsure at all n locations
aagaaagcatactgtactttatgttataacaaacattaagagacttgaactggtcgattcggagctcgtatgaccaagatatgatcatccgaagnttaatgctgntatatggagatttgcggattattataattaagctntgcaactataaaacatgtgtaagcgctagcctggaaaagacaggaaggctgcgctgttgacatgcggacctcacatgtcaacaaaaaggaccgcggtagaccgagtacacagagacggtccacgggtcgacggaagcggatcccgtgtgttaaccgaggcgagtggtcgacanacggactccactatacaccacacgggctggacacgtggaaaccacgtggctaccgagcgggcacactaacacggtcaccacacgcacaagcgaacgactaccgacacc

SEQ ID NO: 50079 - DNA, 346 bp, Oryza sativa
  unsure (1)..(346): unsure at all n locations
tttgagatagaccaacatcctcaaatatgaacattttgcgtggattttatcaacatctggtgagcatttgttcctcaaaatattccttctttccttacaagaattcttgctcggactaatttgagaaacaaattattcattgttgacacggactttntatttgattagaatatttagtccaagcaactgtagtaggacaaagttctatgagaaatcatatttttagaaacacggagtatataacccgcagcaataatctattgaataagctgagaaaaaactgtctgaaaatagttcccaatatttttcagtcttccgaaattaaagccatacggtacctctcatg

SEQ ID NO: 50080 - DNA, 469 bp, Oryza sativa
  unsure (1)..(469): unsure at all n locations
tgtatttgctggctaccaaattcagtaattcagtcaaaaaattcactgatacaaacataacaaaaagccatgtcatgattctgaaaaattgcttcacgcctagaatatgccactaaatcacacatcaacaagcacaataacagaaactggatttgctaagcaaaaagcacccctaatatcaaaagcctcccctaaaacccccgaatccgcgggctaaacaaccattccccaactcaaaagcaacgctttgcagcaacaaaaacaacaaaatctcagatccattccgtgaacgcttcccacagcccaggaagaacaaatctccaaacctggaagcgcaacttggcgaagcagcagcagcatcacgaattcaccgaccaagagacattggatgccacacaaaaatgatgagacanactanacaaaactacggcaaccaacgtcttcggcgaggctctcaatcgattacatc

SEQ ID NO: 50081 - DNA, 243 bp, Oryza sativa
gggggagctgaagaaactggttgtaaaaaggaaagaataagtacattggactgtctgaagcgtccgcctccacaatcagaagagcacacgccgtgcatcccatctcaactgtgcaactcgaggggtctctgtggtcaagagatgctgaataagacataattccaacttgcaggtcaacataacaaaccatatatatttatctgcccagagtgaatattcataatactttcaattggacatatg

SEQ ID NO: 50082 - DNA, 237 bp, Oryza sativa
ggattgtacatgtaggatctgtacagcatctaccctggaatctcccgcggcggcggtgggggaatccaatttatcatacacttttcaattatttttttcctacatagtatttcgctatctataactctctctttaactctatttactatttacctcataattataattctttcatctttatatatctctctaactatatattataataaaatcattcctccttctatactactattt

SEQ ID NO: 50083 - DNA, 408 bp, Oryza sativa
taatccatccaattaattagcactcatttgttggatggatttagtgctctagctcgattgcttggcggaacttggagttgaaatgggatggcattttatttctccagatcttcgcgactatgaaatcttttatctctgtactctataaagcttgctgtaattgcatcagtttctccaatagaaatgcgagggggcagcctctctagttaaaagagatataagatctctcaatatcctctgctagtgagaagatgtcatgtcttcccttgggtgaggacaacattagcttggatatatctatggctaccttatatatgcattaatcaaatgtgcattctctttgtgtgagagttgcgttttatctatttgaacaacgttactacatcaagagatgtgtgttctcatttg

SEQ ID NO: 50084 - DNA, 420 bp, Oryza sativa
tcacccttcaggggtccgaggctgccctggtgcgtgaagccaatattctcagcaatgtcgacaaaggccttcgcctcatcggaagtgaacaagtttggcacctatttcagtttcaagtaaggcaattgtccataaataatatggaaacaattatcaactctgtaatgaaccctgttatgctttcttagtaaagctgggcgcactgcccctgatctaaaaacaattatcaactcagccaaaatattgctatgccaactgaacggtctcttagcattttctccttgtgcatcaaatagcatttcatcctagcatacgcttcatcactttgtattcacgaaatctatttgactactgcatttagaatcaaccgcacaacacaagtagagccaacccagatgaatccctaacacttcaatcaaa

SEQ ID NO: 50085 - DNA, 453 bp, Oryza sativa
  unsure (1)..(453): unsure at all n locations
agcttgcgcctagtgtgcaagtanagagcccaatggagagaattctttgaatcccgggaattgcttttctactagcctttcgtaccacgtggggtcacgtactaagcacgccataggcaagaagagttagaatcagaagagaaaagcgccgatgctaactgtagaagaagtacgttagatgactattaccagcaccgaatggccttcagcanggataactattcctagacgtcaaagaggaaatacctttcgaggtgcacgacagttgacccagcacctccttaaccatggtggcagagtatctgatagtgaatggtcagatcaagtcttctcggattatgaagatgagtctctccgacgtctccgcgaggaagagatggactcacaagcatgcncccgttgtggagaaattggacacattgctagcacgtgcttacactttgtcctcttgtg

SEQ ID NO: 50086 - DNA, 398 bp, Oryza sativa
  unsure (1)..(398): unsure at all n locations
atcttattccctgtcccataatatcagggatccaaggattcaaattttgtccccaaatatataagggattctagagtacctacttcccccaatcaaccacccctcatttaattttcatccaatcttaccccccaccacctttccacaatggatcccttcatggttcaagaaggcgctagtcaggcctangcggcggctaatgggtgcctaagtcggatagtcagatccaagaaattagcaagcataacatgaaaattagttatataacaccaaaatagcaactaaataccacccaagcaagttcagctacctaatgcaccatatatggggtgcctagcgccaactcttagaagacagtctccgtatattacggatgaaggggctagatggctatgttg

SEQ ID NO: 50087 - DNA, 428 bp, Oryza sativa
  unsure (1)..(428): unsure at all n locations
ttgtgatgagcctattgntcagtacgtacgtcagaaattcagaagatggcatccaaatgttgttcagagttctttcaatttgtttccccaaccttgaattacataacaagtagaccttcattcatgacaaanatccgcatttttttgtatgttcttaacctgatggagcaatgggggttctctatcttttgtgctaaatatataagagggaaatactctgcatgtcaccctgtggttctctatgttttgggcaaaatacacaagagagaaatgctctgtctgaaatgactgtaaatgcggcaaaagaggattgcgtttgttgatatagacttttttgtatcttgaattgtcagtttgtaagattatgctgaagctgtatctgacttttttggcaattgcacgtataatgtgcatgtattcttaatctg

SEQ ID NO: 50088 - DNA, 454 bp, Oryza sativa
  unsure (1)..(454): unsure at all n locations
tggatatggaatacataactattggggagcaagaagagcatgccgatgttgggcattgacatcgtccaacttcagcatcggtggcgtccacgctgtcacggaggcgatgacctgtggatttcaatgggtatctgcgtcaatggtggccgtccggatccgcgtctcggaatctatccatagcggggcttttgatttcaccgagcacgtgaacgatataggcagctaccggtagggcatcagcaccaaatgcagtgacaagctagtattaggccagatttgaggcgtcctaactaattctcgatttacagcggtgtcgatgtgtgcctaatctccccacggataaaccgatagaagccagagtgtatatgtgaaagtgtagttttaccctacaacttacacacgaaggcacgagacattngcgtagctctcgtacagttatacatgaagtcctatc

SEQ ID NO: 50089 - DNA, 310 bp, Oryza sativa
ccgagtcagcgccttcttaccgtgggccccacctgtcagcgacccgtatacgaggggttagcgaagtttgacgcgataaaccgacagcgacgacgccgcgcggaagcaagacggattggttttatgccgtaatcaaaccggattagtttctcgccggagagagcgagcgagagcgagagagagagagagagagagagagagagaggagaagaggagaggagagcggccgcgtggggggaatctgctcgtcgtcctcatcggcggcggcggcgttgaggcgggtgcggtggatgggtggtggtgggaggat

SEQ ID NO: 50090 - DNA, 366 bp, Oryza sativa
acgtgtctctttgctccccacaagttcgctgcgatggaccaacgaagcttgagtatttctcgcaaaagcacttgacccctactccacccatccctcctcccgatgcacgcctcgcctgccaccggatcctccgccacccgcgcgccgcagcggaccacccgctcatgtcctccctcaaggcgcgggctcgtcttcttcaccaccgcccggccacctcgccctcccttgcgctccccaccgccatgctgctgtccttccttgacgcgcggggctgtcgtcatgctgcaggagtcaccacaagcacgcgatagtcgtcgccgatacaaacttcggcaagatccgttgagcccaatgaagagaagagcg

SEQ ID NO: 50091 - DNA, 366 bp, Oryza sativa
  unsure (1)..(366): unsure at all n locations
gagagaaaagaagaatctacttcaaccgatatgcccttaggcacggccatacataacatagaaatcacacgtggaaggggtgggcaattagctagagcagcaggtgctgtagcgaaactgattgcaaaagaaggtaaatcggccactttaagattaccatctggggaggtccgtttggtatcccaaaactgcttatcaacagtcggacaagtgggtaatgttggggtgaaccaaanaagtttgggtagagccgggtctaagtgttggctaggtaaacgccccgtagtaagaggggtagttatgaaccctgtggaccaccctcatgggggcggtgaagggaaagcctccattgtatgaaaaaaccca

SEQ ID NO: 50092 - DNA, 457 bp, Oryza sativa
  unsure (1)..(457): unsure at all n locations
tcttgaccatctcttcacttgctaaattgttgcaactcccgctatcaataatcattntgacggtatggtctttcacaagaactttgctttggaacaaattgtgacattggttttgctcttcacacttctctttagcactaagtgctagcttgacaattatgctaggatactgatctagcgactctggatgcaaatggacttcctcgatgtcatcattatcttgtcctcctgcgtggtcagtggcagctaaagcatattcatcatcacaatcactagtagaagtatactcaccatcatcattcacaaatagagctcgccgatttggacagtcacgtgcaatgtgtncaatgccatggcacttatgacatgtaatatcacgggtacgtccagtggaagctactgaagttgactcttgggtggagctgaactgagcgttttgctttttctttacattgat

SEQ ID NO: 50093 - DNA, 441 bp, Oryza sativa
  unsure (1)..(441): unsure at all n locations
gcagcagtacggtataattagcttagatagcatcgtcgcttttcaagtgatttcaggaagataatatctagacgtttctgcttaatgcacgtatggtcaactagatgtttccccataatcagttaattcctgagaaggtttgtcctctgttgaaattctgtntaagaaattctactccctccattccaaaatataaggcacaaccacccttaacctaaagatcaagaaataattattatcatcttgtagtttggatcatcctcataaatataatgtatgcctccaatagaattagataatataagagtggaggatttataaaagttataatttaatgaagaagatgctataattaattgcatgctcgcatgcatgtcttatattatggaacatctattgaaagtggttggcctcatattatggaatggatggagttcaatt

SEQ ID NO: 50094 - DNA, 292 bp, Oryza sativa
acatcatctcttgtgcccacaataagaataaccatattcatatgaagcctcacaaatatgtctgctccatccaatgggttctcaacagtaacatcactatagccatcataagctacaccatcagtgtacttgttttcagagaacttggcacaataaccaccacaagtccatcatctttcactgtagctatccgaatagcatttcagctacaataaatgtaaatatcacaaaaactgttgacaacatctagcatcagatacaaaagagtcattctggactgaggttctgacta

SEQ ID NO: 50095 - DNA, 493 bp, Oryza sativa
  unsure (1)..(493): unsure at all n locations
taagtggggagcaatgctataccgtactaaattttcttactaaactnttactaacaatcatctcaatcgtttgatttaagtagatggaagttacaaaaaaatctagatgcactcatagcataacagtggtagtaaaaatttagtaaaaaaaagttactaagtatatccttttccttaagtaggtgcacagcaaggctccaagaaagtacaagttgcttacggctggcacggcagcatgggcgcacgcgtactaagtcaaaaaggaggaagcggagggttgcacaagtccgactttgcttggaagttgcaacctcatacttggagatcctgtgactccaagttaacaacttgcactatngtttagctttaattaacctcctccggtaaaacaaaatactatgagttttctcctaaacgtaatgaatatttntnttnctaatggtannataatattactacctatngtgacctcgagcgctcaactgagtggatg

SEQ ID NO: 50096 - DNA, 447 bp, Oryza sativa
  unsure (1)..(447): unsure at all n locations
tccacgaggcatanattcatacactagcaacctttggtcatcttcgatgcagtaaccaaccaatttcactaggtgtggatgttgaaggttttcaagaaaatcaacttctgcctgaaaatgaaataacgctagtttaattgatgatgcattataagacagttgaataatattttgtggtctgtatgctgaagcaattcaaaacataccacccactctttatggccctgcagcccatcatggttaagtgtcttgacagcaaccgttaatcctgtgccaggttttacgggagcagttccgttctcctcaatccaacctttaaagacacagccaaaacctccttcaccaaggagactctcatgccggaagtttcttgtggcacacttaagttcattaaatgtgaacctacggagttggaaagctagtttaagttcctcttcgactatggac

SEQ ID NO: 50097 - DNA, 306 bp, Oryza sativa
tgagctagctagctagctgaggtggggcatatatataagtcgccgcattgtgcagtactacatatcacaatatcacatggctagctagctgagtatcgatcagtcatctggactggtctgtacgttcgaagctagctagctagctcgtctgagaagaagaagaagatctgagctactccttctaattcgatcgccatgggcgagcaagttaagcttaacgacgacaaggtagctaggctagcgatcgaagcatgtgtacatttattatatatatgcagccagtagtctgcagataattatattgag

SEQ ID NO: 50098 - DNA, 397 bp, Oryza sativa
ctgtgctcaagcctgcaatactgaacatatattctatgatttagacttgtacatcaaatggcatcagttatcagctcatgactaattgaatattgtatttctgttatccatatcacttagggctgaatctcttggtaattaaaatgaagataaagataaagattaagtgttttatgtaaaacgatgtggtaaataacgtataattaattgagtgttaattattataaacttgaaaaatgttataacgaaagtttttatacgaaacacactcgttagcagtttgaaaaacgtgccatttttatccagtttatctagttgtctacactctgatattttgattgtatactcactcatatgccatgactatttgcatgacacgctaatttgacattatctg

SEQ ID NO: 50099 - DNA, 442 bp, Oryza sativa
  unsure (1)..(442): unsure at all n locations
tatactcttcaatgcattntattacagccctcaatgcaagtagttcccgagtctttgggtcatcctgaagaaggataccaacattaatgtgaaaccagaaaagaagattgggaaacagatatgaaatcattcaagtacgaagtaatatacaataatctacaatgttcaatagtactatcaagtagaaaagcacgtgacagtcaaccaaacaagtccgcactgcattacagtcataagcactaaacagtggatgttgaaagtaaatttccatctgcgaagcaagatgaattcaatccaataatcctcgcagcaataaccaaccttgcaacaatgagttctgacttcaattggtntgtttgtatgactactcacaaattgctggtgcatatgcactacgcttaatagtatacttncttggtgaaacaggacagtggatgaactg

SEQ ID NO: 50100 - DNA, 417 bp, Oryza sativa
  unsure (1)..(417): unsure at all n locations
tggttccctatgacggtnatggatgaaatggacttaaccacgttcgttagtaactggtattaggcatcaataaaagaaggaatgagcttcaatctcaacacacaactcaagtggagatctctaactttcattcaaggctactctctagcagagtgttagaaaatatggagagagtgagggcaaattccaacagcagtctctcaactcttgtacctcggcagatgtatgttttataaaaatgagtactcgatatttgttctgggtttttaaattttcttgtttaagtaaaatatattctcatcattgcagcttcatcgcttaatattntatataaagtgctccaatactcaggctgtataaagaaggaaattcttgcaccacgctagctatattagtaatagataatgtagatgtagt

SEQ ID NO: 50101 - DNA, 330 bp, Oryza sativa
  unsure (1)..(330): unsure at all n locations
gaggttcccgnccatcacagtactgctgagacatcacagcgaacgcagcgactactgcagggttacatgtaatgctactcacctaactatctgtactgatgatggatgagtggactgctcctngaaccatgagaccatgatatctgccgaacacctgatactgagccaaatatctaagccagaagaatgttgataacgacaaataattacttagcctctattgcattttctgtgaaagtgcaccatgcaactcaatatgtctactaattcttttttccaaaaagacctggatgcatattacgcgaatgtgtttgttcaccaagactcacc

SEQ ID NO: 50102 - DNA, 343 bp, Oryza sativa
tctgagaacaataggtcatttgcaaattgcttgctcatgtttgggatatattctggcctgatgatatctttcaagtgcatccttgggttccaccattccatgcacttcatagcgtagattccgcaatcatgccttgatgagacaaagacaaaaatagatcagtaagaaaaacaaaatctttggaaaaaaagggaggagttttggtaaacaagaaaatgatatgtaatctgcggatgattgttggggtagataggtagttacccattgttttggcgagtaataggtgggtattggatatcaaaattactaaagtctttctccacatcttgagaattttcccata

SEQ ID NO: 50103 - DNA, 368 bp, Oryza sativa
atcctaatgatttctcaagcacagagatgaaccatcttccatcagcattgaaactcttcctcactgagatgcgtatagatgaaaggtttagaacagtaaaaaatcttgctaatctttccattatgattgttgaaacaaaattgcacaatagacatgagaatgtttacaagcttctcaaattggttctggtacttccagtagcaacagctagtgttgaaagaatattttctgccatgaattatgtgaagaataaattgagaaacaggatgggggatcaatacttgaatgattgcttggtcacatttattgagcgtgagatgtctttgaaagtcaaggagtgtgatattataaaccgctttcaagccatg

SEQ ID NO: 50104 - DNA, 431 bp, Oryza sativa
ttgataaggattgaacccctaataatgaaagtacgcctgaaggtcatcatgctgttgctgcatcatgttgttgatgttggcgaactgagcattagcagattgttgccattcttgcatttgagctatgtgttccgtgaggttgtactggatctcccccgtctgcacatcaagggtgtccattctcctagtgatttcacccaagttccaacgagaggaactcgagcgccattcacttggagatggaggcacaccacttggtctggagggttgattgtccccctagtggatgtcatgaggcgcatgccaccggtcctcactggcgcttgcccaagttgagacttcgatgcttaggcttggagcttgggttcatcctggtgcattcccagttggtgcccaatctacctcatacatctgcacgggtgtcgaggatg

SEQ ID NO: 50105 - DNA, 409 bp, Oryza sativa
  unsure (1)..(409): unsure at all n locations
tcttttnctacatggtaggctcaggatatgcctccgtgatcatctctatgcccacgatcttcttttgtccaccaccagaatgatgtttttctttgtggagaaatagaatgatgttcctccgttaccctgagatgagaataatatgacgaaatatagtccccagtgatacaaaaaggtgagaataggagatttaagctgaaaatatagctgaatggatcagttgaactttgggatctttgtatttttctcagaagaaatatttctggcataatatactattttgacactttcttactgacattttttaaaatatgtgctacatattaaattacgagcggaaatggcaatgcggcaagcttttatgcttttatacaaaagcggcaacgctgtctcgacatctaactatata

SEQ ID NO: 50106 - DNA, 445 bp, Oryza sativa
  unsure (1)..(445): unsure at all n locations
tgatacacctagttgaatatgtanttctatctatagccgatcaaagtgtgtgtttgttatataaaattgtctctaaacaatatgacgcatagtgggtagtttaccgcgtaaattcactacttggcacaagtttatagtggtgtcctgaacataaatggacgcctttgttaactgaatgttaagatcaagaattttctttgctaccatcgtcgtggagttgtgctaaccaatgcaatccaacttaacataatcggcgaggcaaccaaaattgatattttggtcacgataagaagataatngaagtacacatgtttcttgaatgtcatattgctaacttactttggtatcatatatgttgtatcaagagagactctatcacatagtcattattctgtaacttgttgcttttgagagttcaaacctattttccaccataagttctatt

SEQ ID NO: 50107 - DNA, 444 bp, Oryza sativa
atattacctcgtaaaaactttggatgagaaaaccttattggttaaactcatacaaaggagagaggagtgtgatatgactgaatatacgctattttcctaaggaagatactccccctgaatcctgcaaagatttaagacagcacataccaattccttcgacacatttaaagaatgccgagtatggttgaaattttgtgaataaatcagccagattatcacatgactcactttgcaagacgtttatctctccatgctgctaaagctcatgaggataaaaataattgggagcaatatgcttagtgaagttgctcttaatataaccagttttcatatgaacaacacaagccggattaatttcatatataatgcgtggtgttccaatgaaccaataccatcacgagttatatgtgggtaacccattctcgtaaccatacacatccacgt

SEQ ID NO: 50108 - DNA, 133 bp, Oryza sativa
ggtccgtatccagtggtctgcgttcaccgaccgggctccataccgctggccacgggcgactgcactgaactgcttatacccgtggaacatctaacaccttcatcgcttctacccctggggggggggtctggtg

SEQ ID NO: 50109 - DNA, 374 bp, Oryza sativa
gagagctggttgatattggcgatgttcgcctgcgaccggcggaaagatgtcccatcattgtgaccaagatcaggaaacatcgatggtgctgtacgttgccagtatttgctacagtttgcaaggtccggaaattggtaatcattgccaattgtgctgaagtggtttgtagaagattgattcatctgaaccaaaggctgattattcacttcagggtactgcactggaaactgatttgttggcgccaaaaactcaccatttgactgcactggaaactggtttgcaggcaccgaaaacccaccatttgactgcacttgatactgatttgcaggcgccgaaaacccacaatttgactgcactggaaactgatttgcaag

SEQ ID NO: 50110 - DNA, 258 bp, Oryza sativa
gatgactctgctgagaatctctcatgtcttatatattagtgggagaggacagaaaacttaacaccaattatgcttcttgtgcggtggatccaacgctaagggcaaatctctgcccttctaggctacttcgaatctaataccgagcgatgcgcgcagctatgttgtgattcacacgaatatggccattgaaggcatgcctcgtgttgaccgacattgtggctaccttatggtccttatcaaaagaaaaggcgtttttat

SEQ ID NO: 50111 - DNA, 422 bp, Oryza sativa
  unsure (1)..(422): unsure at all n locations
tctttatagctattntgctatatcactcatcatattttacaaagcagntggtatatcactcggatcatgttatttggaggattcacaccgcatatgctatatattgatatcaagtcacttggttgattacgataatcaaaaccactcggctggttggattatttattccttgactatatgcttggtttgttcaattaaccacattgtcgggggctacacctattaggtgcatctagtcggtgcacctgactttattttccagccctccacagtcttcagatttggtaaaagtactcgggagaccatgacaaagatgattgaagcactctgctttggagtaatctggntcgagagaagattatcttttcgactgcgaaggtctcacgggctactgttgagattatgggtaccccatacccaca

SEQ ID NO: 50112 - DNA, 413 bp, Oryza sativa
  unsure (1)..(413): unsure at all n locations
tcgcaacaatagctaatcaaaataatacacaggcttcaattacgaggataggccttcaatgtgatctgaacaaacatacgccacgtcttctttattgtcatcgtctaggtctatgtgtgaatcaacatggaggtttatgctgtaatcgtccttatcgccgatattgtccaccccaacaatcattcttttgtcatttctaaagatgcgcagcttctttgttgcacaaactattttgcaagtacaaatgggtcatccacgtaactaatactgcttagatccaaatttgtcaaaccttcctaatngactcttactccagtgcataaatggacccaccggcaacaaaacaatgagactttgaacttcgtgtagttcagctcacagatcagctgtatgctgctgtaagttgggttgga

SEQ ID NO: 50113 - DNA, 459 bp, Oryza sativa
  unsure (1)..(459): unsure at all n locations
tttatctgaataagcaacaattcatattataacagggtcgaaatttatgcctgaatgcttcatgtcaaaacatgtgcgacatcattaagtctttgaaaagtatgagtaaatatgtaaggacatatatgaaaagtaggagtaagtctttggaacgaatacaaactttagataaaaaaaggggaaaaaatcctaaatttataaaagtttggggtgtggggtaaaaattacaatcgagtatgaaaactangataagaacacattcgtctctaataactntgtttggtgcaactatnttagacatggttcagggcaaccacaatgtataanaaagataaccttataacaataattattcttataaagtgagatatatacattatggaaagtatctttttggataaaggggagtagtatgttcacattaaactatgatgcaaccccaaaatggacaatcgtcat

SEQ ID NO: 50114 - DNA, 166 bp, Oryza sativa
cctgaacgagcttcacgcatacacacagatgcttgcatgactcggcaacatcatgggccaggcagcatatataattgaacgggctatccaggcccatgtgggatgaaagaaaacagagtagtgagaatagactataaatgggaccacctatacattcgtcgacaaa

SEQ ID NO: 50115 - DNA, 402 bp, Oryza sativa
  unsure (1)..(402): unsure at all n locations
ctcatctgtaacagctgaagtggacaaccatgccaagaaaggagaaaatggttagtatcaacatgacaatttgcgaataaactggttgtagttaactaacttaataggggtatatgttgttctttacattccatagctatcaaacattccatgcaatntgaagttaagtactcctacttggcatttgctatatctggagttcactaatagattaggaagttccagcctgttgagttttgtctagtgtaattatgcgctacatagtctttgagttccaacattttggagttcggtacaactatatcgatagaagcttgatatttctgagtgcatgttctgaaatacagaacggcttgattgcatgtgtggtatagtgcacacacatgatggttccttagtaca

SEQ ID NO: 50116 - DNA, 256 bp, Oryza sativa
catgtactccctccattctttaaggaagcgacaccgattactcttatagacatcggtctcaacacatcttattgaagagggcatctggagatggtgccactcatagcgactcgctatatcatgctacgtttgatacgcatgcattaactatgctctcattgcacaatatgtatgcataacatgaagtggcgaacattgattataacagtcgccgtcgacatacattcataaagcggctgtactatctatgtctgga

SEQ ID NO: 50117 - DNA, 436 bp, Oryza sativa
  unsure (1)..(436): unsure at all n locations
tttgagagacaagaagaatctacttcaaccgatatgcccttaggcacggccatacataacatagaaatcacacgtggaaggggtgggcaattatctagagcagcaagtgctgtaacgaaactgattgcaaaagaaggtaaatcggccactttaagattaccatctggggaggtccgtttggtatcccaaaactgcttatcaacagtcggacaagtgggtaatgttggggtgaaccaaaaaagtttgggtagagccgggtctaagtgttggctatgtaaacgccccgtagtaagaggggtagttatgaaccctgtggaccaccctcatggtggcggtgaanggaaagcctccattggtagaacaatactcacaaccccttggcgtatcctgcgcttggaagaagactatganaaggaaaaatatagtgatcgtttta

SEQ ID NO: 50118 - DNA, 489 bp, Oryza sativa
  unsure (1)..(489): unsure at all n locations
cgaacttagacccatgtgtttctttttatagtttcacaggagttgagtctctaaataatagacgtaactagttccattttacttcaacatgtcaacggaccaccagtgcattttgttctttgtgatatgtgtttctaaaatgttcatttttggtatcgcgatgactttagaatatgctttacatatattgctctgcagattacaataagttaacatctagtcagttgcacttgcttgcaagtgaacattccataatctatagtgtaatctagtgtagtttataatacatatcacaatgactttacaaaatgatttacatattntgttctttgtaactaggctttctcacttcanggagtcataactcttgacctcctttgagaagtgggaattgaatcgtgcatcgtagtgtagtttatacccaaagagactgaggaattgcgaatttaagagatcattgtgaagactaagtgatatcaatgagtcatg

SEQ ID NO: 50119 - DNA, 308 bp, Oryza sativa
caagagtgaaaaggtgtctctccatcaatttgtgagaccaattgaaaatagatgggccatctaccttgaatgattgttggtcacatttattgaaaagaattctcttgatattataatgatgctgtatggagcgctctatgctatgaaaaaccgcgagtgtaaacggcattaattgcattgttctgctatgtagactattttgactattgcattggcttaatattaagattaattaattgactaatgtctcattcgaaattaaatgaaatgactttgtctgaggtttgtttggttggcgcacatgctcc

SEQ ID NO: 50120 - DNA, 382 bp, Oryza sativa
  unsure (1)..(382): unsure at all n locations
tactgtggattcacctgtcaagaatcttcagctggcaaacaaactttntgcacaagccgaactctatcacttttgtgctagtattcaagaactcatcattcctgtgtataaaagcagaagggcatatgggcatctggctaagtgtcatacatcactcaaggatatctatgagtcaattcttgaacaggaggctagtcctataccattcattgatgctacctactaccgggtacggttttatggggagcggtttggcaaactcaacaaaaaggagtatgtgttcatagagccaagagatgttcgtcttggtgacataatggagaagcttagtcatatctatgaggctaaaatggatggcaatcacaccttacacatcattccg

SEQ ID NO: 50121 - DNA, 347 bp, Oryza sativa
tgtctggctggctatgtattgtcgttaaggaccggatcctttgtgaattccatccaagtatcttacagtgccaccacacgggtattatgggataccccttggaaagtacttaattagtccatgattattatatatgccagtagtagtgggacactgggatgaggagacgaagttgtgtgtgtaatgagatatttggccatgtgtggcccctcctctattgtggcgatgcagtaccgataggtgtaggagcatccctagtgtacctgagtagacgatggctatggctaccagatgcttgtcgtgcgactcgaccgactatgtggtatgggagtttcatggactagctt

SEQ ID NO: 50122 - DNA, 225 bp, Oryza sativa
cttggaatgatggtgggacaatagccagctcttttgggttgtgggggtgattggtgtcatgatatatgggaatgactacattttaacgtccatctttgaccaaataagctatggtagcttcgcgagtgtggtgctcttgtgcgatgattgcatggtgccgacatacttgttcgcgttgtgatgatgtacggtgtgcaggcgacacttgactagagcttggtgacc

SEQ ID NO: 50123 - DNA, 392 bp, Oryza sativa
  unsure (1)..(392): unsure at all n locations
cttcttgattctcttattccacttgtgcaaagtgagcaagggtcagcataaataggagcacaattttgtcgatccatcatatccctggtgtttagcctgttattaaacagcaaccaaaccaacacctttattttcattacacactttgttntccatatccaacgtgatggtcttggtgggtgcacttcaacaaaacaaaagttatacaatctttgggaggagtatgatgcctgaatccatatatatgtgtccattgatcatgcagaaaataacctgagcactacatctaaccttctcactattgaatgcaactcaccgaaaggcccagacaaccttgcgcgaagtgtcgactcactgatcgagaacaccggtgctaagcttaatcctagcgt

SEQ ID NO: 50124 - DNA, 266 bp, Oryza sativa
cgccaattctcttcccggttgattctttccattatttctgtagtaaacaagagtgcacgtgtcttccggggattaataagaatcattctaatttaagaatgaacgtgcctgatagttgagctgatgtgcaccaaccgccggtaatacgaccatgaaagtgtacttgtggaggcgtggatgtatcgttggtgttgatgatctcatcaaatataattgtgaaagtaacctttcgattggacttaccatgatactgcgaagtttgatct

SEQ ID NO: 50125 - DNA, 461 bp, Oryza sativa
acaacgagctcttcctgtcctccatagactatgaacatatcctcagttcttctcaagtacttcaagatattctttacagctatccagtgactctcacctggatctgattggtatcggtttgttgcactaagtgcatatgaaacatctggacatgtacatagcatagcatacatgatggatccgattgccgaggcatatggaatcacactcatcttgtttcgctcatcagtcgtttgaggacactgattcttgccaagattaatgtcatgtgacatcggtaagaaacctttcttataatcttgcatgttgaacctcttcaacaccttgtcaatgtatgtactctggcttaatccaattagcctctttgatctatctctatagatccttatgcccagaatatatgctgcttcccctaagtctctcattgaaaaactcattttcaacaatgtcttaacggattc

SEQ ID NO: 50126 - DNA, 469 bp, Oryza sativa
  unsure (1)..(469): unsure at all n locations
gacttcgcctgtgacaggtatcaaaaggctacaaaatcgtccgaagagggacaactctttctttttctatgatttctagtgatgtagaaacgacaagacgatgtctcaaggaataaaaaaaaatatatcttccaaagttcaaatcatctgtactgaattataggttcatctttataaatttgtagcaactagcaactttttaatagaatttcactgaattcagtaggataatacagcaaaaggaactagatctgccccgcatgtacataagttaaattccttgggcaaaaatgattcgatgatccgattgaaatcgatcgaacattgtggcgacaattttttttagcactatcgaacagagtatctagctagttactaacttactactactagtttagagaaagtcaagttaattagcttaaaatatgaacctgtgcatgcatgtgtgatgtattatggntgacaatgt

SEQ ID NO: 50127 - DNA, 403 bp, Oryza sativa
  unsure (1)..(403): unsure at all n locations
agcagagcccgcgcttgaattctctgggaagctgtggagggatactggggctaaggagtttaatgctttgatcaggatttgtttgggcaaagcaaaggaatgcatggatattgactcaacagtggagcatatttatagggcatatcgcctctttgagctgatgagagaaaggggttatcatattgtggaagattgttatggaccattccttctgtatctggtggatgtanggatgtcagaggagtttgatatgttcagtgtgttctttaaggatgcaaatccacggtccagctcgagaatagcttaatacgagatgttgttatggattagagctcaagatgaagaaaagattcaagaactttgccgctctgttgagacttcaatgaaaaggtgactatgatat

SEQ ID NO: 50128 - DNA, 466 bp, Oryza sativa
  unsure (1)..(466): unsure at all n locations
acataatatttcaagtcgaaaaaagaaacaaaatgcatatacaagtctaagtcttttagggaagaaaagtaaaaatatatggttcacatgccatccccggccctctctcatttctccctcctctcactccttgttctgcatctctttttatgccggagttgtttgaccgtctcatgttccacgccaataccgtcagcgtacgcatacaccaccccttcggaccttcctccctagccccttgctcttggacctcctcttcttgaaccaactaagacagctgattnttntagatgatcatatatttctaattttctaagatcaaaaagggcttcttcagaatctagatagagcgttaacactctatataataaatatatatatctaacggcctacatgaatcatgtaatttcttgttgtggattagacattaaattgtaataagattatgacttttacccatatattt

SEQ ID NO: 50129 - DNA, 285 bp, Oryza sativa
  unsure (1)..(285): unsure at all n locations
gctattaggacctataaaactcagcttcatcgtgtnttggagaacggcacgaggctgagccactccttgaatagacatcatgaagggtggtcatcactatgtaacaggaaaggactatacactcatcgagcacagtgactaagtcactatcgagttggaaccacctgcttgggaatcacctcgggaaaactctctgcgctcttaacgaacgtatactcctaaggacaagatccgatatcactatacagctaacgtcggtgctggttagcaggtacacacggcaga

SEQ ID NO: 50130 - DNA, 377 bp, Oryza sativa
  unsure (1)..(377): unsure at all n locations
atgcatatctggatctggatcctgcacaacaaacatataggatgagttctatctgatataaatataatcctcgagaaaaaatcaagtattttaaaatatttataaatatgtatttctcctcttgtcaattttgatttccccgagcagatgactctgtaccgttaaacactctgtccgacttgtcattgtccccaaacaatcggagtcggcctaggcacttcccaaacatgcatatgagtgacatgagttcgtccttaatggaacaacagttcacgaatcacaatttactactcgggtacttttgtaattggtaagaacagacaaacaatttattntatctctatgcctttgaattattcccaataatacttagcacc

SEQ ID NO: 50131 - DNA, 461 bp, Oryza sativa
  unsure (1)..(461): unsure at all n locations
atatagaaagagaagtaactttagcactgatgttcactctgtgagcatgctcaagcacctttatagcacttgtatttcgcacaatattgagattaaaaaattagctatgcacaagtagtggtacttgaatagtacagatactaacgtatgttctcttttactgcaatttcgtcatgatgttactgcaaaagtgcagtaacgacctataaaatttacagtaacgatctataaatttcacagtaacgtatcatgttactgcacttctgcgataatgttactaccgaatcatagtaacaaggtatgatttatacagcaacatgatggatttgtgttctcacaatntgaatagatgtacatagagaacacacattgatctcatatcatcaagcgtcatatggttaattggtacgagagtatgtataaaccataagacatgtgtctatcttgaattcacacattat

SEQ ID NO: 50132 - DNA, 358 bp, Oryza sativa
  unsure (1)..(358): unsure at all n locations
cttacgaacctaatatgtatcccatgggtgaggattgagaaggagacctcgttgtcatcatgcacaaaattgctcggaccagctttgccttgatgtgtagcttgttggctgcctgtatgatgcangggattcatggcgtgctccttgctggcccatgacttgtgctactgcttggataactgatttacgcacagcagccacatgatggagatgctgtcggtcgagacaatgttcttgatgctcgcatgggaggaatcaacaagcacgaactgcttcaacaactcagctaactctgcacctccaaacccaccanatacgactacgatctgggtgtgtgtgagcccaccctcaccggaca

SEQ ID NO: 50133 - DNA, 252 bp, Oryza sativa
  unsure (1)..(252): unsure at all n locations
tgtcttctgaatgtctgaggacctcccaagctccaaccctgcctcaccgagaagtacgacgatggcgctgacccctccgagtccctccagatctgcacggcgatcatagaggcggcgggaagtggttaccgggtcatggcgaacgtctttcccatggtcctcatgggccaagcgcggggttagcccatgaacctgctgccacctcggttcactcttgggaggactcttngcagtntgagctccgggtgccgt

SEQ ID NO: 50134 - DNA, 466 bp, Oryza sativa
  unsure (1)..(466): unsure at all n locations
cctagtacaccggcaacaatcccagccaacaagtgaggggctccagatagcttaccgttaccaaatactcacgtctggtgcaacagtcacatcccacttcagaacacaaccagccaaattgccaatcaaattgttctttaccacttgtcaaaggtagctacaggcgtatcaaaattgcaacttatggcatatatgcataatcaataattctgttcagtgcatcttatcatctcaatggccctcttgatagcaagcatgatgcaaagatgaaaatgaccaaaagtgctcaagtcccagaaaaaaaatcagctaaaagagattaagatctaaccagttatttgagctatcttncacaatgtatatgcgtaaagcacgcacaagagttaacaatggagactaatcaaaatcagagcctcttatgttctaataacattagaattaaatgggaatgatggaacagtccctt

SEQ ID NO: 50135 - DNA, 439 bp, Oryza sativa
  unsure (1)..(439): unsure at all n locations
taattaaacatgtacgcatgcatntacagagctcagcagataagaggagtagccatcgtgggcgtggccacggcgaacgcacgcgcgccngccggcgccgtcccgtgcgccgcccgatcgagctagctagcagaagcggcgcctcgccgcggcaggccgccctaagacgcctgcgcctggtcgatgcggtgctgcgccgcctccttgatgtcgcgggccttggacgcgagcctcgccttggcgtggtccaactggtcggcgcccggcgggtgcttcccggtgaggtacttgttcattcactagaacacagagagcgcggncacgccgagcccgcccgaggtgactaacccggccgccatgagcgctcacgcgattgtcgccggcaccatcactgagctgaagatgaccagcacctgggttgtcactccgagctcgatga

SEQ ID NO: 50136 - DNA, 444 bp, Oryza sativa
  unsure (1)..(444): unsure at all n locations
cttcatctaaaccgctggagttcgccactgcttcccaacccaatgtcctgctgtgagctgctcggcctaccatagaagggccagctcccacttgctcctctttgcagctcgttaggagcatgggggcagcggtgagccgctgggcaaacaatgaatgggagaacgttcgtgaggcgtgagggtgaagatgaggattgagttgctttaacattggtgcccacacatgtcgcgcttggaaacgaagtctttcttgttagcgtatgacctccgtctcaccanattttcttccggcagcctctcgcccggcaaagctaccgtacaaccgtcacgatccagcggcaccaagcttccagatccagatcagtacggcataaaatgatccgcggcgctggtggtcatcgcagatccgtccaatttttttttttggtgggtggaaacgagtgc

SEQ ID NO: 50137 - DNA, 337 bp, Oryza sativa
gcctgtataggtaggagtgacagggcccaatgccctgcccaccacccaccgtgctgctctgactgtgaactacctatcctattgctgcgcacatcagatgtgcatattcaacagttagctactacctctaccatgttctagcgatcgatagctagagcaccatcatgaactgaaagagaagtgatacctctaaaagccgaaaacggccagcaagcgtaggtcgataaccctctcttatataaatgagttacacaagatttactatgcgcgccctatatatctatatgcgatattcctattacgcgccgatgccttggtcagcgaacatgcgcatgtt

SEQ ID NO: 50138 - DNA, 316 bp, Oryza sativa
accactgtagaacgctaacactcttagcatcccatagacgctctgattacaaaggctggagtcctaattttccaaaacgccctactccgaataaatttaacataatagataataaaactatgcccctctatgaaaccgaacaatcttgacctagtaccagataccaaaagcatatacacagcctatactataagtagctataatcgctccggtccaggtcaaaaaattttatccgtcaaacccctcgactcatcaactcattatgaccccaattcttttggctacaggcaatatccccatacacgctttttactcc

SEQ ID NO: 50139 - DNA, 407 bp, Oryza sativa
gtgtgagtgtgcgcgtgaagtgacggagcgacgtctttatatccgggtatggctgacgcctggtgacagggagatgtctgtaatgccccacacccgccattatgagatgactatgaccgtccatgccaaacccccgcctgcatggctgagactgtggttcggtccaacctgtgctacgcccatctaacctggcatttggcccatcttctcccctggacctccactatccattattcggagatccgggctgatctactggtattaggatgagagtcaccacccctccttgtatggatacatgattctcctcactgatgtctgattcttctcccaacatcggcgtatatcgtctggctacaaatatataccaacacttgtggaattcgcggatttatacatatctctat

SEQ ID NO: 50140 - DNA, 495 bp, Oryza sativa
  unsure (1)..(495): unsure at all n locations
atagaatactcaaccttggaagtgtgtgtgtgaagtgatggagtgatgtctctatatatgggtatgtatgaccgctggcgaaggggaaatggcttaaatgccccacaaccgccattacgagatgattangaccgttcatgccaaaccccagcctggatggctgagaatgtggttcggacgaacctgtgctaagcccatctagcctggctcttggcccatcttctcccctggacctccactatccatttctcggagtcttgggttgatttactggtatttggatgaagttcacaacccctccttgtatggatacatgattctcctcactgtagtctgatgtttctcccaacatcggggtttattgtctgcatacaaatatataccaacacttgtggaattcgtgagaataatcacataactctatgtcggatggtttattatctgatctatatacagaaggtcgcggtatgaaatcaacatttaaaacttgctaca

SEQ ID NO: 50141 - DNA, 305 bp, Oryza sativa
  unsure (1)..(305): unsure at all n locations
tattcctaagtgaccgagtntaaagaggatgtatcatggcagtttatctattaattangaatagtgcgtgagtgtgcttttatccttatgaaagtgtgattagtgtccgataaagactatatattattcttctatctttacgttaggttctttcttgtacgacaaggacttgtatcaacccatgtgtataaatatgtacaccctgngtctatataatttatcactacgatcaatacaattcggcgcatcaccaccttctaccttttctactttatattatctgccagcgggacttggcacctgac

SEQ ID NO: 50142 - DNA, 370 bp, Oryza sativa
  unsure (1)..(370): unsure at all n locations
ggctccttttcctgtcctacattttctagtcagaaattgtagatacaaaccagtctctctcgactgtcggtgatcatcggaatggcttaaataaagcagaacagaagactttgatgaaaaacaccaacatcccaagaagatgaagacgaaacccaagcactagacttagaatcacctttacgagaaagaatattcatctcatgagttttcaattttgtggtaagcgaatcccaagtcaaagtagtcatgttcacagactccctgatagatgtaactttcatctcccanatagacatgtcaagaccattcaaaaagtggcgagaaatctcagattgtggatattagcatcatangaagaatcaacagatct

SEQ ID NO: 50143 - DNA, 302 bp, Oryza sativa
  unsure (1)..(302): unsure at all n locations
cttcttaactcgatctaaatggcttctttggatcacattaacttangcgtaggtaaagcacgggcatggaaaaggatttatggcgtgcttggcttgattgaaaaagcaactacgcctacaatgagaatagcgggactcccactagctgacagagaactcccagccaaaatgaaactggacttccagcaatagcagcaatgtcactagaacctttcctactggagaataactagaagtttctggggcccttaaggtggaaaaaaatgattaaaatcaaccatgcttacttaacaactcaatca

SEQ ID NO: 50144 - DNA, 448 bp, Oryza sativa
  unsure (1)..(448): unsure at all n locations
ttccaactgtgctagataattttcatgtctgctgtttaataagnngncgatgcagtccaagctgtgaagaccacaaacgctaatggagaagtgaagtatcctatcaaggtgagttacatgcttgtgattcttgttatacatcaaagcaaaactttgttgtgtgcaattgcaatacactgaatgagatatattgaattgtgcacttgtgcttcactgattgttctctttctgtagcctctattattgtttggaaattgtagagtattacactngtttgtgagctttgctacatgtgacctttgttcttttctcctggttatgtataacatattggacacctcgagagctaataaagnttaacttctaccttaattatatgctgttatgtcattgactttctttgtaaccaataaccattcatgtatggacatggcatttcaagtatttc

SEQ ID NO: 50145 - DNA, 383 bp, Oryza sativa
tgcgagcatacaacaccatttataatctataatctatttaattctacacatcaacatacaagtatatctaatcatcaccctcacatcatttccataatagggtaacaattatatctatctttttggaatagttaacatatacttatcaatatattccacattaaatcacgggtatcatttggttggtttataataagtactaataaaccctcgcatttcttcttttttttgactcctagcttgattggcgaaaaaatatattgaagattgcttagtattcccgcagcagagcgcagagaatcactcaggatatatttaattctaatgccatacataagccacatcaatgctacattgtgcgaagaccatatcaacatctctac

SEQ ID NO: 50146 - DNA, 337 bp, Oryza sativa
  unsure (1)..(337): unsure at all n locations
gacgagagtgattcgagagcgaacaggacgccgccgacgggggcgcggaaagccgcggtgacacctgcgccggcgcctatggtgacgagatcacggcggtcgcggtcgttcttgatgtagcgcagccagcggcaggtgagggccgacttgcgcgacccgccctggccgaagatggcggcgatgcacgcgcncgtgtgtaccattggtgccagcttgccgacgtgcagcgaggatgacacggccgcgatgtaccgattatctgcacagtggaaacagaatagatatggggagtcagctaaaatgtccaggttggagtacacacgccgacatggaacat

SEQ ID NO: 50147 - DNA, 398 bp, Oryza sativa
agcttgaatgctgtgaataaagatatttccttattattgggcatacgccatgcgcacactgctttaacagatgtgcttaagtccctaaaagacacatggtttcaccacacctggaaatatatggcatatgtggtgtaaatccgagtaagtaaactcataaaggatttaccaaccgcctgaaaaatgaccataatatataatcagcctaagccataatattggtcaataaaaatgcacacttacgtggcaaaaagcaatgatattgtatccaatcaattgcttgataaacccaaacagcaccttgactatataaaatagtcagcggggcagctatataaagctttacttgttgacaccttttaagatgcattgtaccaactcctaaaaagtgagtaact

SEQ ID NO: 50148 - DNA, 349 bp, Oryza sativa
  unsure (1)..(349): unsure at all n locations
cagatgctaccacagngaaatctgacaaaagctgcaaaccaaaacaaaatagaagggtgaaaagttgggcacttgggctctcgagcctgtccactaccacaaacctctctgtctctctcgtacacctctaacacacgcttgtcgagtcgaaacggccgggcttatctccaagtgcaagccctgccaccaccacccgttcatgactttcaggtggaaaaaaaaatcatgaaacataagcagccttttgaacccacaatgccacaacggcacaaccaattgccccaagccccactcaatcagagatgcccttccctaaccatttcgttatatttttcttaaaaaaaactca

SEQ ID NO: 50149 - DNA, 345 bp, Oryza sativa
cattgttatagaatttcaagattacaatggatctacgaaaagatcgtgtatttacaactacaacggaatagtatacaaagtcaacacaaatcattaaatggaatttatggctacacaaaccgttgaagatagttctagacctggaccaagacaaactcgcgtaggtaatttattgaaaccctcgaattcggaatatgggaaagtagctccgggttgtgggactactccttctatggtggtcgcaatggctttatccgcggtattcctatctattattttagaaaattataaattcttcgtttactggaccgaatttaatgatttaggttctactaacgaaaacta

SEQ ID NO: 50150 - DNA, 217 bp, Oryza sativa
cccatcctcgtctatatccttcattaatagcctcttagaaatcatcaaactccccctattaggttgccccccttgccatcaaagaaacatcagacttaagatacaaatcaagtctggcatctaactcgtgagatggaagagataggtttgaatacatctccatgctccgggatctttccttttgtctattgagcactatctcatattttttttaaaa

SEQ ID NO: 50151 - DNA, 199 bp, Oryza sativa
  unsure (1)..(199): unsure at all n locations
ctatcaacacaagggaacaaaangcangactgcttatctaagagctattctatcgtcgcatgggataaaaggtgggcataccaatataatcggcccaccggaagtacaagttctcagcaatggtgttcctgatgtccctccacgcgtcngcaagctcccctgtgcaaagcaaacaccttggctggttggacatggtgcc

SEQ ID NO: 50152 - DNA, 297 bp, Oryza sativa
ccgacaccgacgcgtggggctctatgggcaaaccccgaccccgaagccgatgctgactctaagccgatgactacttccggcttaccaaatttgactattaacacacgcgcaccctcgcctgggtacggcgactatatgagagctacactacaagccccgccggtgcccatgctggcttggggtgagaacgataagttcttccacggcatcccatgaaccgggccttaatcgccatgggcacgactagcaaaccgtgcacaccagcccaccctcagtcgatttaattgatcatacgac

SEQ ID NO: 50153 - DNA, 429 bp, Oryza sativa
  unsure (1)..(429): unsure at all n locations
ccaactccatatcagaacatattgtctaattagctcatcctcagtatatgtgcttagagacaacaagcaagtcttcaaatgaaaaggtagatcgctgtaactgaggcttaatatcttccgcatgttgtccacatcaaggttgttctcaagccccaaactgatagacttattgaccttgtcccattcctctgaattccttggtttgctagcaagtangcatgctgtagtgatgattgctagcggtacaccaccacatttcttcaaaattntctcagtgacaccacacaaatcagcaggacagtcatncgtagagtcaaatattcgtttgcagaacaattgtctggaatcatcatcagataangggttcatttcataaacaccaccggctgcatgttctgcaatgaccttgttcgcgtggttacaatattt

SEQ ID NO: 50154 - DNA, 474 bp, Oryza sativa
  unsure (1)..(474): unsure at all n locations
tgcaagctgagcacatcttcatatgacttgtttttgtagtttatctcagatgcaatgaaatgatagatgtcgnatctatcattcatcctctccatttccttaagaagctccaagcaatcttgcacagcagcttcaatttggaagtacagcatcttctgataagattgtgttgcaatggtgatggctttggctagaactgtatcttctgtgttaccacactccacggtatccatcagcttgtgaaagaataggatatattgtaggtccccttcaaacgtagaaggacgcagccaatcagacgttatacgctacaatagtagggaacacatgttattgttaagaggatgaaaacagttggaataacatttttttccttcaaaacgaaatcaaaagagttgagacagaaacanaaacgatgtctgtgttaccggtacatcagaatatagcagaacagaactatcggaattatgtttt

SEQ ID NO: 50155 - DNA, 362 bp, Oryza sativa
  unsure (1)..(362): unsure at all n locations
gcatggccccgngaccgtctggacgtccaaatcatctagagagcagcgagatatggggtacggtttgacaaacatgccattctcaactggtcaaagaattaaaaaaaacagaagaaaaaaataagattggagcgaggatacatttttagagagacgttaaacttaacgccaatcctacatcccacagcggaggtcatatgaagagtactcttctaatctaacaactctaattaaacagagaccttttatagttcgagtagagtggggtgtgaggtnttaaacctaatatttcgttttcagtctccaaaaagtcacnaatttttttcttaaaattattgtttagagaaacatctcttcctcta

SEQ ID NO: 50156 - DNA, 439 bp, Oryza sativa
  unsure (1)..(439): unsure at all n locations
cacctcaggcatgcaagcttgttgggtccgaagnnaatgttagcttatcgttctcatcactttggacaagttgacacccgaacagaagaatgatcttgaggcaatgatgcagcatacacagagccaatttttgaactcatacatggagactcgccaaggaacaattgttctgaggtacaagatgaaactagttgctgatgttcctgggacaagctcttccaatgatggagaagtgcaacaagtgtcagatggtatatctcatccaggtgataaaggtgctgctgatggctcgggtgacataggtgatggttctcatagggctcaatgtgatggttctcagggatctcaaggtgagaatcttaaccaagatggtaacacgcacaactgctattttacaaccttcaagatcggatcgactatgccgtgccacatgctttga

SEQ ID NO: 50157 - DNA, 482 bp, Oryza sativa
  unsure (1)..(482): unsure at all n locations
ttagagtcacccaggctgcaagcttanatcttaaaaatatgttcttgtcnttaccaccgctgacaccaccactcgcgacaccggcacaactganacttatgcgtggcttgtaggctcgagaataccaatgcccacctaggccgcacctgccaacggcaccactgcacggctcccaatgcccatgtgccaccttggccactgataggcattatgtggttgccatccatcattgccattcggccaaatctagcccatgggattcactatccctattatgagccgaccgttgcactacatccaacacatgggttcctttagcactcctgcgtgtggccacgacagcatcatcagctcatcacccttcatgccgctcaagccatgctcatttgccctcaactctggtgtngctcactntcagtcaannaaaaaaaactctggtgttgctcactgtccctcatctctggctcagaaccgcaaaagag

SEQ ID NO: 50158 - DNA, 368 bp, Oryza sativa
  unsure (1)..(368): unsure at all n locations
ctgcggctgcaagcnagagcacaacatctttgtttaattantctaagaacagaaacagctggtgcatctatgaccttggaggcaatccttattgtggtcaggcgatgtgttatacatgggagaacaatgagcgcactggaggacgatatgcatcaagtcgcttctgacccaaccgcaagtccacagccttgggactaagacaaactaggttgctgattgatggggaggaaacggaagcaatgggcatcaatttaaacccaagtctggacatctgatcatcaggcgatgtgtaccaaagaatgccatgtggagtcacgacatggtttatattatgcgacatctgtactagtcagtatattatcaagcca

SEQ ID NO: 50159 - DNA, 354 bp, Oryza sativa
gagtggggccgtccggccactgacatcactcaccttatcttcagcacctactcaggctgtcgtgcacctagtgccgacctccaattggcttcgttgctcggactacgcccttccgtttctcgcaccattctcagtctccacggttgctcatgtggtggcagggcactccaactcgcaaaggagatcgccgagaataaccgcggtgctcgtgtcctcatagcttgctccgagctgacactgatatgcttctctaccccagacgaaagcaaaatcattggccatggactgttctgggatggtgctggcgcaatcatcgtctgtgccgacacatcattcgatggtgagtgcccgcta

SEQ ID NO: 50160 - DNA, 336 bp, Oryza sativa
  unsure (1)..(336): unsure at all n locations
atgctctggtactgatntcttcgnagcatttccgaagcaatgaggaaactactttaatagcatgatgcgtggttttagactattctgtataattctcccatgccataatttaggtgatgaatgaactactcatgctgttctgctgtctaaacttgtgtctaatccattattttgattttctagataatatatagcccgctgttaaaattatatggcatcacgcttgtaatgtttaattgtgaatgtactcatggctctatcttacaggaaattctaaatggacacgctctgctaacggaatacctacggaataaaaataatgtatatgtatttgtc

SEQ ID NO: 50161 - DNA, 373 bp, Oryza sativa
  unsure (1)..(373): unsure at all n locations
agccaagcatccacatgcatcgccaccgacagcaattagtagggctcggagaaaagggaaacaggcggccgaattaaatcattaattatttaaccaaaaacctcccaattaatccgcatggcttcacgacattctggggaacccaaatggagattatgctagatcgatcgatcatctcactgcatgtgcacgcacttagaatatcgttgcgagcccaaagaagtcacagataatcagggttaaagatcaagtgataaattcagtttcatttgggcgactntgtccgtcgatccatctcattattnnttttgcaaggcgaattcattgatctcacatataccactcatctctcatatgtgcgcgtatatataaa

SEQ ID NO: 50162 - DNA, 287 bp, Oryza sativa
ccaaaaacttgtgctattaattggataaatgtcttaactccctcctttcacttgtctttagatgccgcgctacaagcctgagtacttgtttggtgttgagggatttgtccaggagttgcgtacgatgtcctttgtcataggatttatgactacccctttttatgcccagattcctcatgatcgtcacgaagagaagtgccgagtcaaagtcaccttgaacagtaatagtgaagatatcccctcagtgatgttcgaagctggaggaggaaactacatccatgcgtgtc

SEQ ID NO: 50163 - DNA, 199 bp, Oryza sativa
  unsure (1)..(199): unsure at all n locations
aaagtcggcgtttatcatctaaacgatttgcgcttcatcgaaggccttgcacatgttgagtcaaccacatgtgacaatgactatgctgtaccatagncattgggtaaaattctagcatttctttgtagccaatcctcatgtcgtgagatgaaaagccatcaaaatcttctatgctctttgatcattctccgcaagcttc

SEQ ID NO: 50164 - DNA, 250 bp, Oryza sativa
ctgaccatcgaaaatattgtggcgtgtcgggctgaacagcattgatctcccgctcagtcaacttcttctttcgtttagactcataagccagggggccgccgaagatatgggtgagctccttgcggagatctcgaaagcctggcggggtgtcgccgacgaccttcttccttgacgtgctttgctcttcgacagaattcttccgcgcagccttggggtattgatccgcgaattgcttgtagacgaaacaatc

SEQ ID NO: 50165 - DNA, 395 bp, Oryza sativa
ctctgattctcttgggccctctacaggaacattatcaaccaacagataatcatgagctacaatagatgttcttgcagcaagattaacaaaatgtcatcttctttatgcgatacgtgctatttctcacttaactattttatatacctatgtctcacttaactattttatatacctatacagaggtggtgtttgaagctcgtgcagataaagatgaagattaagtggttcacgcataacgaggtagtgttaacatatgattaatttaagtgtgaatattatgaacttgaagaatatatttatctgatatttgagagcaacttccatatataaccggataggagtttgaaaaacggaccacgaatatccaatttccattcgacttggggagatagata

SEQ ID NO: 50166 - DNA, 306 bp, Oryza sativa
  unsure (1)..(306): unsure at all n locations
gcttgtgtacatgcggcaccggctgnttctactcacttatcacaagnacccgaagaagaaggcggagnncganggnacngaagagacnganccngcaccanaaccnacatcgggagaaaaggggngngcaanganagagaaaanngnnggcgagnnncggaaaangacnaagaaaccatcaaaggggacaaagcgcaagaaacccgagaagaaaacgaagggaggggannagaagaagcaagaagacagnncgaagccagaagataaactccctcccccattcaagaagcattccatattttttaa

SEQ ID NO: 50167 - DNA, 330 bp, Oryza sativa
  unsure (1)..(330): unsure at all n locations
acatcacgtgtaggggagataaccagctttccactcccaaggaaaccggaggctntccagaccgctgccgaactaacccacggctccacctcccaatgctttatatacacccaacctgtccgtccacacacccaccaccatttgctcctccttcttctacctctagctcggcattgctagctcgatctcaccggtcgtcgtctccggcgagccgcgcgggttagtttgcgaagatcatgccgatgagctgcaacaggtgccgcgtgctgcgcatagggtgcagcgactactgcgccatacgcccctgcctgcagtggattcgcaccccga

SEQ ID NO: 50168 - DNA, 227 bp, Oryza sativa
  unsure (1)..(227): unsure at all n locations
gaatgaaccagatggtcggtgcatgttgcgttatcggcccgccactcgaagtaactctgactgtgtcaatccattgtacgaattgacattttcttacattctcctatgtacatccattttgngattagtaagttaatgatagcactgaggagtgatgaaaagaataagtgtaattaccacgaaaacatcggcgacaatatgtggacacacgatacaccttttgcctc

SEQ ID NO: 50169 - DNA, 159 bp, Oryza sativa
tacattacgatagttcgcttgatgtgggagcaaatgctaacgacattcacaatgtttatctcacaacgtttgtaatagtgtaagcccatcaatcaagtgcagtagttgttaccatattccacaatgtatataaacctgtggtgagaaaacaattggggc

SEQ ID NO: 50170 - DNA, 390 bp, Oryza sativa
  unsure (1)..(390): unsure at all n locations
acctctgtcactcatgacgctcgatcggtaagaatggagaatgagtaatttattgatccctccaatcaatcataaataagtgttggtttaaactctgcaaagtcatcaggagataacttaatttgatcacttaattcatttgtataaatccaaaacgaattgtgtgtaaactaatattatattatgaaagttattgttttaaaagtttggctatgccaatacacaagtgatgtattcaaaactaagattgtcaaagttaactcttgttgactacactgattctaaagtgacacttattatttgtgaccggagagagtattcattaaagctatattatgtactgacatctcttgtgacatantacatgacagtaaatgttgcttcaacaat

SEQ ID NO: 50171 - DNA, 467 bp, Oryza sativa
  unsure (1)..(467): unsure at all n locations
tgcaagcttgctgcagtccgatgcgtcgcgagttttctttttattgttttcatctcgagcggtgattgcttcgcaatatcgcatgcgtcagtcgaagcgtcgcgattcaccgactccaactcatgagcgttcaacgtttggatggccgtggagaggcggactgagcgaccgaggctgcggagacgcgatgcatcgcaggcgcangcaggcagcaatcgccaatctagcgggcgagcgggagcggtggcgtggcgcgctcactggcggcaaccaacgagggggagggcgcgccggcgaggccacaagtggccaatgcaaaggctcgagcgtgaccggcaaccacgccagacgagtgccgagcaagtggctggatcattgatttatgcatctccgcacttgactctgtctctgaatggttgaacgtcaagtatattgacgaactactctctcatctcatctctgattct

SEQ ID NO: 50172 - DNA, 260 bp, Oryza sativa
ctttcctctctcccctcgggagaaattattcaactgccttctcctttgacgaccgacaaccaaaagaaagaggggaggagatgaaaaaacgatcatcctgccctgtgtgagcgatggattgcataggggtttttttttcttggcgacaggctgtaaaccgcgcccgggggcggcaacggcacagttgtggcttgccactcctgctgtgccttgaagacggtctttccgttgctgagaggaaccctgctgctgctgtctgt

SEQ ID NO: 50173 - DNA, 222 bp, Oryza sativa
aaaaaaagacaccatccaacaatttaaaaaacgtgctaatggaaaacgaggaaattcaagtttggggttgaagaatagaactaggcctaagaattgatgcaatgttattgggcctgcttcaatttagtttccattgtattctacaaatattcatgtgtaacttcaggagaaaatgaatactctatgggacaccaagtatctttccattaaattacacatgac

SEQ ID NO: 50174 - DNA, 365 bp, Oryza sativa
  unsure (1)..(365): unsure at all n locations
acaattgccttgggcacccacacacaagctcgatactcttcattntaatcaccattaaaacaagcgaccactttgccctcaagattcttttttttttttgagaattacacagtacaacgcagacactcataatgcacgcgcactcacccctatgaacacacgcacgcaaaccctacccctatgagcatcttcgaagactgggccggcgaattctggagagattgacgaagtcaccacaggcgcctcgatgtcgacgggtacgtcgcctaccactgaaagcacaacgccgcttaattctggagaattcgctcccatggggagtcgaacccaggacatcatgtgctactgaggctcttgtaaccact

SEQ ID NO: 50175 - DNA, 442 bp, Oryza sativa
  unsure (1)..(442): unsure at all n locations
agcttcaatttctggagctctccaatatngttatattctgagacattacccacaacataatatgtaagtgtctgcagtgcagttagttttctcagttctggaggcatgcactccaattgttcacatccatgagtgtagaggtgtcggaggctagtcatatacttcatattctttggaagacaacgaagcggccagcaagcagaaagatccaacgtttgtagattatataatatacttatttcctcaggaagtcttaccatattctggctataagtaagattgagataccttagatgatgtagatgctntggttggattagatttgttcccataaaacaacggcagtataatgctcgtagagaagtgtatttcaataaatgtggtggcaagctatctaatcgaatagtatcgagcagcactgtctgcagaggaagtcttttct

SEQ ID NO: 50176 - DNA, 382 bp, Oryza sativa
gacagtaggattactcaccgtgagtggcacaagcgccacggagtatattggcaagcttgccgccctccagagcagcgtccctcgggagagctcaacgtcgtctcctgcgccttcaccggacgcggcagtagcggtagcggagcactgaaccgcgcgcggcctccttctcgcggcggcggcggcggcggaagcaacgctgctgcggcgatgatgtggaggcgcgaggtgggagactataagaggcgcgagggcgatgccggcgagcggcatcgggcaccgggcgcaggaaagcgagggggctcatgtcagacgctgcgttccatggagcgtgccgccgtgtctcggccatgcgccgacaccttcggtttggtctgcatggata

SEQ ID NO: 50177 - DNA, 432 bp, Oryza sativa
  unsure (1)..(432): unsure at all n locations
agcttcctcttctgaattcatggctggaatatcctgatgcaaaacgcagaacctaacagtcaaaatctagagacaagagtttccaatctatgccatcgtttcaagaggctcaagtgtccttaaacataattgtgcttacctgataaaggcaataggcaagcacaagcgagaatgatacgataagtgccagcaagacagctatgcgctgtccgtggtgggtcttcaacattntggggaattgagcaatgataaagggaataacagaaatccccatgatccgagctgcatagctggtttggacatcagttgaaataccagtgcctgcaaaagataatttgtgcatcttacattcaatatatacagaaccagtaggtcaaagcagtgtaaaggtaaggttaacatagtggtggcttggtggttttaacatgttaa

SEQ ID NO: 50178 - DNA, 352 bp, Oryza sativa
cctctttgaacttttatcacatcgcttctgacattatagtggtagagtgatggacaaatgaagcaaagatacatggcatatttgtgtagccaagactcttttttttcttcttttttgactgggggtagtttgttcgttggtcatcagtcagatgagctaccttttcaagcagataacacaaagcgcgctaccttttttttatgcagccattactaagcaaaacaaagaggtttagtgtagtaacaatgggaacatccttggtgaatgctatatggtaactagactgtcttgtacttttccattgcctcgtcagttgcattgtggctttggtcctgatgataagcaagatgtc

SEQ ID NO: 50179 - DNA, 355 bp, Oryza sativa
atccgatatctgtatttcatctgtaaagaggccatcaaatatttggaaatgaacatatctatacaccttcatgtatttgtacaataaacaaatgtctgtttgagggactcgtccagtttcccctagtttgctcccttctgtgttacactcccttatatccttgtgacacatcggactgttacttatttgaatttacctgtcattcattttccccattgctgtatgcttttcctgttggaaacaggtttctatgttacctgtccacaattcttattttgaactgaacccattttaccccctgtaggctttccgcggagtcaaaatctaactactcaactcttaaaactttgtttat

SEQ ID NO: 50180 - DNA, 360 bp, Oryza sativa
  unsure (1)..(360): unsure at all n locations
cgacagtgatggtttcttgcaggatccatccttcattactttgaattgacaaaataaaacaagataaatgctacatgcagaagcagaacaccctagtttactggagaacacactgatcattaatgtaaaggttctttgttggagaaaaggaacaaaagtaataggcaaaagtcactgacctgcagctgatgagcatgnatcttcgctgtaaagaatagtttgggaaggtcagaacaacaaatcccgctaactctttcataacattagaacacacattgatcccactaagttaaatagtgtaagttaattctcttaatacctccgtggacttctccttttctctgaatcgctaccatatcg

SEQ ID NO: 50181 - DNA, 85 bp, Oryza sativa
tcgtccgtcctagcaccaccttatgttgaccctaccaaggactcgcgcatcattcgctcgcagtactgatctgctacgcaccgaa

SEQ ID NO: 50182 - DNA, 414 bp, Oryza sativa
  unsure (1)..(414): unsure at all n locations
cccaaagccattgtataaagacgatcctagagttacacagtattattaatcaaggccgtgaaccctcacgaacctgccttaacctaatgcctacgatgattcagaccgaactggcaacccgaccctgggtcccagctcgtccatgccaacccaggccaaccattccacattttagttgttgagcaaattttaagaattaaaacactgacttgggtacattgctcggcttgcccataaccgatggcgcggctattcgaatagattatactctgatcagaggcgtacatctctacccacaagacacatctttctcacgtgtagccacgngccacataccaccacggtattcagacggaagacgtgacatatgtttcaacccatcctatcctatacaagagaccgacccatccccta

SEQ ID NO: 50183 - DNA, 321 bp, Oryza sativa
gaacaactagcccagctttttctggacctgctggctgtccaaacaaaaatattttggagatacttaagatgtacgcagacaattctaaaaacatgaataagcaagcaaagcaattgacgagctcaaattaattatgctggatatcaaaaaacacaagacgagtagtcgagtacaacagctatcatgacacacgatgaaacatgctatccaagtcgctaactctttacatctacgtacagtcccctcgcattaaaacaagagtgctccactgatataaaaagataatatctcttcttgagctgaaccgcagaaacacttgta

SEQ ID NO: 50184 - DNA, 383 bp, Oryza sativa
atgaataccataatattctactccctccattttataatccgtctgactattcttacaaacttcttcaacttcgaccaaattcatataaaaataaagtaacattttttttacataacacacatattatcaaaatatactcattttttagtataataaaactaatttagtgttgtaaatgttgctaacttttataaatttaatcaaattaaaaaactttgactaagaaataaattaaacgacttatagtataaaacggaagagtagtattctatatcttttcgccttaaaaaatgataaacgccctgatattttatgattctatcctcttttgtgtgctactgttacagtgctcttatcttgcatttgttgttcttgctctttca

SEQ ID NO: 50185 - DNA, 368 bp, Oryza sativa
  unsure (1)..(368): unsure at all n locations
aacagangcaaaagcatgtctctttttagctttagatggcactgcatggtactatggtttgcttacatatctaacactaactaaaaactcgcttttgcacattttgggattggatctcacgctgcaagaatcatgctaatctgttgatctgatcaggcaaatcatgagcagaggagtagcaatgaagggatatgtctctccatgttctgttataactgaaagcctctttttatcttttctttttgcagcattggtagctagatcttgcatcacttgaagagttctgatggtatgtgtgtgagttgtgatgagtctttgaatcattcttgaaccaacttttattattattatcgagttaagtcctatca

SEQ ID NO: 50186 - DNA, 274 bp, Oryza sativa
gggaaagaggaagggagaagaggaagagacgaggggagaaagaaaagggaaaaagagagagaaaaagaaggagaagagagaaaaacagaggagaggaagaaagagaggggggggagaggaaggaagagaaaaagaaagagaaggaaggagggaacagaaagaaggagggaaggaagaagaggaggaaggaggaggggggaggaagagacaaaagagaacgaagagaaaggaggaagaaaggagagaaaaaggagggaagggagggagagaggga

SEQ ID NO: 50187 - DNA, 426 bp, Oryza sativa
  unsure (1)..(426): unsure at all n locations
gaaaacacactatgagaattcgcttgaatatatatactcctagaaaatcatgatatgagtccaatcatctcaaatcagcatgcgagtttttttaaatagattttttatacggctccttctgtatgtttaaaagcgaacgaacttatagcatgactcanatacatgcaggttgtttaaagagatttcttatatgatttcatatgtattttcaaaagcgaacaaacttaaaacccgactcaaatacggatctttatttctaaaaacgaacaaacttaaaactcgactcaaatacggatctttatttccaaaagcgaatgaacataaaaaccgactcattcacgaatgacgtaccaaagtgctagtaaatacatcttgaatggttataatagtagagatatatatcccgtatgtgtataatatacaatg

SEQ ID NO: 50188 - DNA, 441 bp, Oryza sativa
  unsure (1)..(441): unsure at all n locations
agcttatgatattataattaatattacttttctatacaaagccacacaaactatatatggtattcgtgtttacctaagcatttcaaaagttacttacagtctaagtatcaatacaaagtatcaacagtgctatcaaatcttgttataaatgccacatatttatgaccagagggagtaggttttttaacttggctgagtgaactaggtcaaatttcgggtctatagaccaatattgctgcagcgttgatgctgaaacccattggattggaatgtttggaaaatgggttacgagaggtgggattaaaaaatacaaatgaatggagggatatgatgaaatgggtgagaagaatggatggctaagattaaagcttaccctctgaacgtgtggaaaatcatnatccaaacccattttgcatacacagccaaaaaggtactatactg

SEQ ID NO: 50189 - DNA, 424 bp, Oryza sativa
  unsure (1)..(424): unsure at all n locations
gcactgcaccaagcttatattgngttcttgttntngcgggatctttggaggcaagaattgccgctgctgtcgccgggctttctggcttgataaccccaaccaacaatgttcttaattgcactttgccagaatctacccacgggcgcgcctgctgccagaactgtttacaatatgggcagaacggatcggcgaagacgtatacaatgaccggcgcatctttnttaccgtcgaggagccagtgggattgttccatccgttgccacatttcgcgtccggctggtgcgtaaatttctttttcgataagtgtgttactcaaggtttcacctttctcgttgtacatgtaaccagagatagcgtgcttaccatctggagtcaggtagatggtgacgcccatatcctgatactttccgagataacctttcat

SEQ ID NO: 50190 - DNA, 378 bp, Oryza sativa
accaccacattcgggatggattggtgtggttcctctacgcctacgacaccataatatcctaccatgatcgaggaaaggcatgtgaaaaatattggcttcttattgggaagccccaattcttgactggatagtacaccaaatgcctctgccctccctccctatctatccaagagatggtagggcacaacttttttttggttttttatcttttcatcaagagttgaaaatgaaaaagattggtatgcctgatcgattgatcatgtcggtacgaacataggtaaattttctatcgaatgatgcctcactgcatacattactgcactgcactaacacctataaaacagtggtctcgcccctcctattctattacatgcttct

SEQ ID NO: 50191 - DNA, 441 bp, Oryza sativa
  unsure (1)..(441): unsure at all n locations
ggatctctaacacctgcagctgcagcttgttaggggtttttttanttatcttaactatgaagaatggtaaacttattaaagcataatatctttgaactgctggttcaatgatccaaccattattcaaacctattagacgttgaattggtcatgtaaccagtttttagaatctgtggtatggattctggaggggcctttactgtttccatcaacaaatatagcatgaaaaaaaatctaaatggtagggcttaactagtgggataaatgttgagaaattttaagaaaaaaaactattattcatcatggcctgacgttgtcatctgtagttctctggtacaaattngagaaacaaggctaactcagtatcaggaagtatggaatgtaataaccgcaactctgttacaatgccttaacagcgccctcactgaactgtgttatatt

SEQ ID NO: 50192 - DNA, 362 bp, Oryza sativa
  unsure (1)..(362): unsure at all n locations
caaacaacattccatgttagattatttgcacttatctttaaactttatgcttttctttgctaaatttcataatattcttctacttttcatggngaattcaacagatccgaggaatgcatactctgattcgtgacagggacatcactacacctgactttgtcttttattcagatcaggtgatccgtttggtactacttttgtatatatagcttntataacttctctttaacttcataatttttttttaaaagatccagatcttgaattgattcaactcatttgctattggtatggaaatgccatgtcaagtagttgagcacagacttgggcatttgccatctaccgaaaagcagattattact

SEQ ID NO: 50193 - DNA, 414 bp, Oryza sativa
tgcaagcttctcgggtacttggtctctgcccgtttatttattccaaccccgagaatatacgagctatagagcggatgcgccccccagcaagcttatggatgtgcaatgcgtcaccggttgcatggccgccctaagtcggttcatatcgaggctgggaaggaaggcgctacccttatttaagctcctcaaacgctccgggccgtttacttggacggaggaagctgaacgtgccctcactcagttgaaggcgtatctcagctctcccccagttctggtcgccccggagccaaatgaacccttgctactctacttagcggcgaccccgcaagtggttagtgcggcgttggttgtggagcgcgatgaggacaattctcattccgcgcacccccaccctgtgctggcttggcccgggag

SEQ ID NO: 50194 - DNA, 488 bp, Oryza sativa
  unsure (1)..(488): unsure at all n locations
ttaagtcacctgcngtgcaagctttgataacctgcccttctagcctttgtcacctgccatattaaagatctaatccatctcctaaccctgtatcatacgcagctgggcaccctaacaaattgtcattggtttgtggactttaattctgnggggattggcctgcttnctgtgatggttctagttccatngttcataatgtcgcattcatacgatgaattcactatctngtcctttataactgtgttgctgcttgtgaggaattggactttgaacgatatatgggtactttagcagaacacatntttagagtaaattgcattctgcgctagatagaacacatcatgtttcactttgcaccaagtttagcacatactttcactttacacccnggtgtattgaaataagtttcacttaaaaagatacactcatcaaccctgtaaaaaaatcatgaaatttcatataatcttgatgaaacctcatgaaacatg

SEQ ID NO: 50195 - DNA, 370 bp, Oryza sativa
  unsure (1)..(370): unsure at all n locations
cgagagcactctncagcggcgaatcaagactgagaagacatcgggtggcaatgggaagattgggaccgcttcngggccatcatctccaaagttctccggtacgcccgattccaatctctttccccatgcccactattcccttgatcttggccataaacaattggatgttgatcttggagctgtggggttcagtggtgctgtgccgccaatgttgtgccctcaatttaatggtgatagtcctcaaatgtggcgagctaactgtgagcaatactttgatctgtatgggattttgcctgccaatcgngtaaaaattgctactctcaattttgtgggccacgcttgcttttggtacaatcttgcagaacacaac

SEQ ID NO: 50196 - DNA, 359 bp, Oryza sativa
  unsure (1)..(359): unsure at all n locations
gccgaccaccgacgacgggctcatggccagaagacgacgggaatcatcggcgctggggccgtcaacgaatctccacaccacttctctctgccgataccttgctccgtatcgacacacgcgtgtgaccgtacggacactgacaggtggggccacctctgttttcttttttctctttttggtggccggtgaagcagcatcagtgtttcctgcgtcgcattatgaaacttcagcaatattttctgcatggttngcttgctattatacactatagtataaattactccccaaacaaactgcatgcttttaataaacgtgtgaaatagaaaattggaatggttatgggtgactgctttaatttt

SEQ ID NO: 50197 - DNA, 375 bp, Oryza sativa
agagaagaagagttggcaaccaccgcgggaactgattaagattgagaagatcacgccttcgccacctgttgattcatcaagcgtcgacgctagtgccaataaacctgatgtctcctcaagtgatgttaatggactggatgatgatggtggagcagagaaagaagaaaaggtccgcgttgatcgtaagaatgatataggcgcagaggttgttgatactgacgttgaagtccaatcaacagagataagtgctgatgatgcaaccattgttgtggatggtgctgcagattctggaaattcagagggtgctgctgaaagctctgcttcttccgttccacatgaaagatgtgaccaagcataattaccaagatgctgaat

SEQ ID NO: 50198 - DNA, 348 bp, Oryza sativa
  unsure (1)..(348): unsure at all n locations
agcttaactntaatcctttcgttattctttatgcatnggcaacccgctgttcccagatgtcgctctactacgtacccggacagggaggacttaagtgctcttgagggctgtcaccacctctacacccacctcaaacgtaccgtgggatacgcagcaaccactggagattaattacccagacaccgcgtctacgcaattaataactactctagtgccgatcaaacactaaagcaatcactataaataaatggactataatgaacaatgatcctgtatgcttattaggaactaaccaagaagtaattctcactaagcaaatcttaattactcagaatgatatctctatta

SEQ ID NO: 50199 - DNA, 414 bp, Oryza sativa
  unsure (1)..(414): unsure at all n locations
agcttcggacgacaatgtctattcgagtgttcatccgccgactggaaaccagtctgcagcaactgaaactgctacaacccgagagcccccgactggaaaccagtcggatgtagatctaaatcaagagattcctgaagctgaagcgcagacaacttctcaaggaccagaagttggtaatgactcagtgattgggtctccagataaagagcaaggatcacctcacgctcagccaggcacatcctcaggtaactcatcttctcaagtgatgccgntctgaataactccagcttgttcgtctaatgtcttgggaatacatcaggtccactatgcggcgacgaagaagaaatcctccgcataatggcagctgatgactctcgtcctcctatcttactcaaatgatgggacgagaactct

SEQ ID NO: 50200 - DNA, 483 bp, Oryza sativa
  unsure (1)..(483): unsure at all n locations
atccttaagtcacctaggcatgcaagcttgattctagtgcanaatgatcaatatttatattccgaacaagtaattgcggagattcgtgccggaacgtccgcttttgcatttatagaaaaggtacanaaacatatttattccgaatcagatggggaaatgcactggagtaccgatgtttatcatgcgcccgaatatcaatatggtaatcttcgtcgattaccaaaaacaagccatttatggatattgtcagtaagtatgtgcagatctagtatagcttctttttcgctccacaaggatcaagatcaaatgaatacttattccttttctgttgacggaaggtatatctttggcctctcgatggctgatgatgaggtaagacatagactgttggatacttttggtaaaaaagataaggaaattcttgattattcaacgccggatcgaatcatgtncaatggtcattggatatttgtctatccttct

SEQ ID NO: 50201 - DNA, 377 bp, Oryza sativa
  unsure (1)..(377): unsure at all n locations
tgcaagcttctcggttcttggctctgttcatgtttctttccaaccccganaagatacgagctatatagcggatgcgcccccccaccaagcttatggatgtgcaatgcgtcaccggttgcatggccgccctaagtcggttcatatcgaggctgggagagaaggcgctacccttatttaagctcctcatacgctccggaccgtttacctggacggaggaagctgaacatgcctcgcccagttgaaggcgtatctcagctctcccncagttctggtcgacccggagccaaatgaacccttgctactctacttatcagcgaccccgcaagtggttattgcggcgttggttgtggagcgcgatgatgacaatcctcattccg

SEQ ID NO: 50202 - DNA, 429 bp, Oryza sativa
  unsure (1)..(429): unsure at all n locations
agcttgagggtcggcacatcatttcttgtttggtagaagatggacgtcctagtgccccggccgaagccgccaagaactatgtacgtcacagcggttgggttgtgcgggataacgtgcctgtcagtacggtgtactggcgaagaacaatggcacgcggagatcatgagagctttgtcccagattcggagaaagagatgctgtggaccacaatgctcgagacattcacccttcctgcgggtacagaggacaaagtgaaaaggtggactctaaagaaaatggcagaacagtttcagagcttcatgggagatctgtaccagaagtatatactgaaggggcagacaccgaacttcgacacattcccaaagctaagggatcactgngacgagttcgttgcatataagacaggtgaacaagggaaggcgatgatgg

SEQ ID NO: 50203 - DNA, 371 bp, Oryza sativa
  unsure (1)..(371): unsure at all n locations
ctcgtgctccacatctttagtttattctgagagagtggtccacccaactccgctcctattttatgtggagctgaaactgtttatctgggctccaggtgcttctcttctatagaagcaaataagttagatattgatgaatcttagaaaatgtcatgtctacttctacaaacaacatgaaaagattacaaacattgttgttgcagatgaatcgaaatgacattttaatctgataataatcaaattataagaattagctctaagtttacaggcattgaanatgaagaatcaacacacacatgcctttgagctcctatgtgatgccattgcttctatcttgtcattgaacatcacttctttgtgacaagcttgat

SEQ ID NO: 50204 - DNA, 431 bp, Oryza sativa
agcttcaaggtcgatgagatacaggtgtactcttcttctatgagaaagaatctctgctgtgtccagtacagtatgtccatctatcatcactagagcttgttgtgaatgaggataaactggcagcctccaagttggttatttatgagaacgaggaggatccgacaagcagggcaatgctgtcatatagtgatgcttggaggttgtcaaggggatgaaagtatgtgcctgaaataagaacttggcagaagtcgttctcaaggtgtcccattgcagactgtagaaaatataattgtcagtgcaatactttctacaaagtactagcagagaaaaaacaatggtcagttcaatacttcctacatagtactagtactggacttaaagtgtgatactaaactgcattagtgtagtcttctatggtggtgtagtatttc

SEQ ID NO: 50205 - DNA, 363 bp, Oryza sativa
  unsure (1)..(363): unsure at all n locations
tgccagcttatnttgattccttctttatatacacgcattgtatcgcgtgcctattgctagttaggctgatagcagcaagccctgcagcataaatctattatcatattctgtggggggcttatgctatcgcgcgtacgctgaatgtggtatttaatagtacgctatatgttttgttgggactctgaaatccttaaaagtttttagtattagctccatttctgtgagaattcacaaaatttctgatgaaaatataagtatatgtgatataatttattttatacattaataatgatatcaaacatgtaaactagcataaccaaatcatgtatactagactacacatgaatgtacagaacattatgg

SEQ ID NO: 50206 - DNA, 340 bp, Oryza sativa
ggaccagcgacgactctgtgtgttgtggcggcagccccgtgtggcagcgggtgagcttggggacgacatgagagaacttgccatatgtcaccctcatgctgctacttcgcgtctgccacgcacatctagccgggagactatgaagggatgacgagcggtggtgaatgactcggagcatgaagcagcaccgcttcaagggctaggatactactatgggacgacccgcccttcggatatggccttcagctggactggatcctcccgtgtgctcgtcactgcctgtccctatactcccctcgcttatatccgcttccaactttgagcctcctatacatccttg

SEQ ID NO: 50207 - DNA, 446 bp, Oryza sativa
agctagggcaaggcctgtttggcacaacatacttgtgcgtggacaaggcaaccagaaaggagtatgcgtgcaagtcgatcgcaaagcagaagctcgtcattgatgacgacgtggagttcatccgccgcgagatcaggatcatgcaccaccttgctggccatccaaacatcatctccatccggggcagctacgaagatgccatggcggtgcacattgttatggagctctgcactggcggtgagctattcgaccgcatcatcagcaagggatattacacagagaggcaggctgctgaggttgcccgcatcatcgtctctgtcatcgagtcttgccactctctcggtgtcatgcatcgggacctcaagcccgagaacttcctcttcgttagcaacgaagaggatgcgccactcacactcatttgacttggcctctccatattcttccgc

SEQ ID NO: 50208 - DNA, 399 bp, Oryza sativa
cagatgccgcctagtcatattatactgagacatacactgagcttgatctctatcaatatcctatctcctgcttttattccaccatccttactttccacttactatagtttcctattatatctattcataagatgtgaaatgtgtttgatgcatagtgaactggggtacttcaagtgaggtgctatatatataaaggggagaggaaatatataatgcctcgatgcattaagttcatctaggcatagaccacgctatgttcatagatggtggaggtaattacatgttaattatgctttctacatatagacttcttgtagcattcctttatcacccatgtgaagaggtaaaacagtgaccataagttttgaacttttatgtgacttgaaacgttgtacatat

SEQ ID NO: 50209 - DNA, 354 bp, Oryza sativa
tataattgaaagattcgtaacgagaaaagctcttgacaaatatcattacatcattaatgatcaaattattactgaactgtgctttggtttatttaagaattgagctctgaaaaatccggaaaaatttcagagagtagacttaaccctggagaatataataaaaattaaattcatccatgctttatattcacgaaatgttatttcccacatttaacttcacttgctacttaaagaacatctaatatgaattctattaatcatttattaaataatttattaatcctgaaacagagaatcaagatgtgactaggagagcagctatgttccaccaagctacattgtccactatcgaag

SEQ ID NO: 50210 - DNA, 445 bp, Oryza sativa
agcttgccaaaataagtaatttaatcacgctatgtagattattatcataaatacatggagagataggtgaggcacataacacgtaatttatcactactgtatatacctatttattaagatgcatgtgaaaatacattttggaattgcacaaataactccaatagttgttaatctctctagatagaataatatatgtaattccactacaatagaaacatagattgctgccgatctataagtgtatatagctaccggtttttacagctgacaccacacaagtggcaccgattatccaccctttggtgcaagtttcagaactgaaaccatcacccatgagttctcttgcaagaaacaaaagggacaccgcttctggctcaagcaccacatccctcaagatccacatccaaagaaaataagaacacccactacatttcatggaatacat

SEQ ID NO: 50211 - DNA, 343 bp, Oryza sativa
tactgctggttctttacacacacttggcatgttgtatttattcttggtgccgtctactactttccgaaagtttctatgacataacggggtccacaattaagtcctttactatcttataatatataagagaaacccacacgtggcctggtatctgactgccaatattgtctcctgttatctcattggataatatggaagacatgcaatggggcttatagccttgtacatgttaaagaaaaatatctagaaacacaagtaggtcctgtagtatgttacctactgacattgcaacttcaagttggcccccacctgtgtgtactgagaaacaaaaagaaagtctata

SEQ ID NO: 50212 - DNA, 413 bp, Oryza sativa
agcttgaccagaccaccagatctgatagtttcgttgccaattgagatagacaagtaggtgaaggaaattcactgccaggcatgacaagaggcagggcaccccagataaggtgtgcaacgagacattcgagtctctgagctcatatatgcccaaagtcctgaacaactcgatacaattttgctacaagatcaaatcataacggctagatcaaggtaagttctatttttatgtctgtttggccgatctagctaatgaattgacaaaatataagtacagttacatacccactaatcaataaagacattcccatgctaaaacaagtatgaaagaaatgtgcatatccctcagtatctaaaagaaaatatgtttaagttttagcctataagttatttcacaaagattatttttacagt

SEQ ID NO: 50213 - DNA, 317 bp, Oryza sativa
  unsure (1)..(317): unsure at all n locations
ccttatgntcaaacatcaggggctagaagagccaaccatcaactatctttcaagtattttggtccttttgagattcaacataaagtgggtcaagtggcatacaaactggttcttcccaatacctgtttaattcatcctgtggtccatgtatcttaacttaaagctgccaagggtttccaacctgctctacagcataacttgccatcttcttttggggccttcgaaaatcctgtgcaggtcttggatcagcgagtggctaaaaaaagtaacagctgtgtaactcaattgctcacacactgcgcatgtactgcaactgc

SEQ ID NO: 50214 - DNA, 417 bp, Oryza sativa
  unsure (1)..(417): unsure at all n locations
agctnttattgagcttgcactgccagctttctgtgcactagagtaggcactaatcacaaaagagcgacacctcacagcctatttctatcacaccgcaatctgaatctctctggatgtggatggagaattagaaatacggactatggagctcgtaaacggtaaggtctattcattcagaagcgaagataaaaaaaaaaactctatataaaatcggcggtagtaagaaaacaactaccactgggtgttcccggctatttctacccatgatttgaatttgatgaacccctaaacaaaccatatgttgctgccaaagtgccaattatttaagcgaccgcacacgctaaacgctattgctcgcgttttattatctggngtgagaggttgacgccagaagcaaaaaggctcaagcaaagcatg

SEQ ID NO: 50215 - DNA, 330 bp, Oryza sativa
  unsure (1)..(330): unsure at all n locations
ttatggctaccctcccagttgaaagcacttntgctcagataaactgtaccataattaaatctgctgtgccaaaatttaacaactaaaacctctaattcagtactataggagagaaaacatgtccatgtttttctattgtacatccaatgcatttcattggggcactgcgggtaggccactttactgtgcttcaatgtccttactaggacagccatgtgactatgcacgacgatattatgtggtgatagtgaaacatcctctcaccctaccctatccccattccaccatggagagcctcatgcagtggttcagacttcagagactgccatg

SEQ ID NO: 50216 - DNA, 429 bp, Oryza sativa
accggtcttaacaccgcgctcacttatatttaagattttttattgtgaagttgctactgttggaaaagaaatattgcttgttttaaaccttgtgtctttgtgctttgacgtttttatcataaacttatatctagttcctatatctaatttctaaagttgcattttcctgtttatcaaaaaaaatatttgttgcaggctacacatctagatttggttgcatcttattggtttctagagttgcgtttcccttttttttgctctggcatttacacttataacaacggtctagagttacatctccctgtttatcgaaaaaatatcttggttgccggcaagtaatctacattgggttgcattcttttgacttcatgaaaaccgtagtctgtttgttcagaacgatttattggattctccgttgatggcttattc

SEQ ID NO: 50217 - DNA, 477 bp, Oryza sativa
  unsure (1)..(477): unsure at all n locations
ctgacaattatcatgccctcgaatagctcacagattatgtctctactgtggntgaatattcgatcagataaacagccaatgtgtaacgtattctatgcaggtatcccgcaccataacgattgaagatcaggcgtccatcgatcgtctatttatgtgctaatcaccttttggtattaattatcgcattgtcactttcacacggaaaaaagagtagtatcgatcaattgaagaacggataattaagctccattctattgtgagacgactgaccattgttaaaaaaaatatctgctaatttgttctactacaaaattcactatgaacaataactgggacgatcatatctatcttgcctgataacacatacagtgggaatctacgtggggctaccggtaattttattacttttgaaccttgtattttggaattaaaattaatatctcaacgattctggaatgaaacttttctactaccatc

SEQ ID NO: 50218 - DNA, 427 bp, Oryza sativa
tgcaagcttcgatggttacttaaagagcatctattctttattttaacaatactttggctctctcgttcctccgtattgtatgggttaagaagataagctgagttcttttttgaaagttcccaacttatctctcttattatccacttacatgctttctaaactaataaatagtgtattatatatatatatatatatatattactttaaaagatcttattaatttatctttttttaaaaaataaaagttaattaattatacgctaatgagttgctccatctatgtgcacgagagattagctccaaccctaagtaacaacacagccttatgcagtttaagatagttggtatttccttcgttttatattataagatgatttgattttttctcacactcatttaagtatgattaaagttataggaaaaatat

SEQ ID NO: 50219 - DNA, 362 bp, Oryza sativa
  unsure (1)..(362): unsure at all n locations
tcatatctcattngcgtgccatctcacgaagagtatcttgcantcctnctttgnnctcactccgttaggccccgtgtcagaagactgacttctcttccatgntgttgtgctaaacacaaacatgccattctaaatatcagtgcgcatgcttaatgtaatgttttgcaagtgaattgatctttagttagatggggctccattcaaccttatttttttgcaggcagattagtggctcatgtaccgtcattatcagatattgggaacagtggcttactctaaatgtccttgtgacctgtcaaatagcgcgacattcttttttccactctcatcgaacgagttttgtttgcactatgatattcata

SEQ ID NO: 50220 - DNA, 433 bp, Oryza sativa
agcttcctcgtaattgcatgcatgatgatcttgtgccaaaattacaagcgaaaagaggacacctgaatgtggaaactagataaaaatgagccagcagctcatgtcagataaacaattcagtacatccattaaaaaaattaagcactatggcagttatgaaagatttttgcttctcaaggtacaacaaaaccaagtacagaccagggacacatacatttaaagtagttcaaattgtgcacgccttccctgatttcaatctatacatcctagtattatatattattactatattgcaggtgtactatagttattcatgtatacggctaggctttcatttctatagaagacaaaaattatgaaactagcaagtacatatatactggtgaatcgttgaggcgactcatctctttgttgatccttgtgggctctacat

SEQ ID NO: 50221 - DNA, 406 bp, Oryza sativa
ctcacgctgtccatgaaaccactactttctcggcccagtctgttattctgaccccactgagttcatcatcggtgaaaccaatatgattcctttcagactatccaatccagatctatgtcattggaagaacaccttctaatcttggccgtctctagaaaaaacttttcccgacaaaagttggattacatgggtcaagcgtatgtcagctagcaaacgagttcactggaacgaaatcggaatctggcaagcacttgacctaaccatagcatactcagcctaataagaacctctaatggctgctgcttttacttttggccaacactatcaatgccttcttattaaccaaaggccgatgaccctactctcatttcatcattatgatcacggggttagatgtacttcatcg

SEQ ID NO: 50222 - DNA, 324 bp, Oryza sativa
agcttaccatagcggggagggatgaagtttggtagcgggagccttccagaggagttagccgggcgtcagttccgcaccggcgccggatccgccgcgcattgccctggctagcgccggcgtcgccatcgccatcgccgccgccccttctgttcatcagagtggctcccgcgattagggtaaagtgtgggagaaggcgagaagacccgagatagcaaaaacccaaaacgggaaggtacctcacacgaatgctcaccctattcgccgccgccgccgccgccgcccaagtcgtcgagaaaagcgctggcgccgtccacgttgcgcctc

SEQ ID NO: 50223 - DNA, 212 bp, Oryza sativa
  unsure (1)..(212): unsure at all n locations
actcaagctntctctctctttcgccatcgggtgcactcatatttgctgtattgantccacggatggcgtgggatatgtgaaggattgacgcggcggatcacaggaaggattttgatgcacttttccgacgtggatttggccggagctgtgaaccctacttcgccggcgcacctttacactgtatcacggagcggggaaaattgccagagttc

SEQ ID NO: 50224 - DNA, 372 bp, Oryza sativa
gattttcccgaagcgagtgtatatattgaatcatctgaagacaaagaggtcaaattaatcagatactatacatgtagttatatgcaacttaaaactatagcttcaataccataataccgcataacttaatgtgaattaacacaaaggttatagggatattgacatgtagcagcaaagcaacaattgattgtaaacgtgttactcagcaaatatgataatgcacacgcattaagtttttttttttggcaattcacacaaatctagggttttatttttatgagatcaagatcaatgcataagatttgccactgttcactgtaaagcactccgattattgggttgttttataaaaaactggcctaatattgtttc

SEQ ID NO: 50225 - DNA, 441 bp, Oryza sativa
agcttgtcgatatactgtagtgaattgggtattatatgttttgttaatatttaaagtagtgaatgaagcctcgactatatattattcactgtattggaacattataacgtattcatgtaactatagtgcatctatgtgatactttaaaggatctagaaatctcttcagaatgtaccatgttacattcttgatgtatgtgttgcttgttatactggtacaatcagtgtcagtcaacctcgacaatttttgacaaaacttagtactgaactacttaaacgataaaataacactataaatttaagcataatcaccttattatgacaccgacattgaatccaccactacaggaagagaacacgaaatagaagagagtgccgagttctgtactaaaaataaatgataatgtattcttatcctacaagtcggatgggtcccaaagca

SEQ ID NO: 50226 - DNA, 435 bp, Oryza sativa
  unsure (1)..(435): unsure at all n locations
atattcagaggatggaacccatcaacatctntctctatatctgatctcgttcaatatcttttggtcattaatatgcgttggcaatggaagctggacaagtatgcctgttatgacagcacaagttcattgtcaaatacttgtgattgcatcagaattcagatccatatagatgtagtcatatacctccaatcaatacctcaacattatgcagaggcaaaatctgaagttacagtgctgtttcagactaactctagctcgtacattattaaatggacattaaatctagagttaattgtgttacctgacatccacgtggttaggaagatataaatcacactctctgtagacaagctaatagattatatctaagccacttctaagccccaatttgtttactacaacatccatctttcatatgaaacagataaaggtagt

SEQ ID NO: 50227 - DNA, 350 bp, Oryza sativa
  unsure (1)..(350): unsure at all n locations
agctagccattgatgaactcccatgctttatgtgttaccagaccttcctgtggcagaagctcggcctacgaccaaagacctccgccgagctttccgcttcccccaacggccaaggagtccaccgcctccgtagctgatctgctgatggttgcaccgccgccgccgccttantcgatgggctcgtcgccgcagatggagtcgccaccgctttagccgatggggccactgctgccggtcgctctgcacatgaaccggccagctccgacggaagcggtgggcgccgtctgagcaaagcgcggctgcgccgacagtggggcagccggccggaaggggaaggtcgtcttcttttt

SEQ ID NO: 50228 - DNA, 337 bp, Oryza sativa
  unsure (1)..(337): unsure at all n locations
aaagaataaataaagactaacagggtcttttgcagatcccncacttcccgatctagaagacaatctcttgcatcatcgattcagaaaatagatgaataaattccacgaatcagatcggtggatggcagaccatggaaacagatcanattgctgggtgggaaagcaaacgggagatggccgaagggtgggggccgactcactttttgaacatggtcgccggcggccggcggtgcgattaaagcggatgagagtcgggagaggaggtaaaacctatagctaccgcagatgaggatgcggcggaacggaatgacccaaagcgaaccaagaatcacgtgcg

SEQ ID NO: 50229 - DNA, 442 bp, Oryza sativa
agctttcaatattaaaaatatatattaattatttaatattagcattaatgtttcaacaaaatcaccaaaaacaagcaataactttaaacattcatatgattagtttaaattgttataaaataaaatataaaagaacaagtgaatattttacatagcaggctataagattaagtcgaaagttaaattccaacattggaaaggtaaaaacaaattttcaagttcataagtttaaagcataaggcaacaaatttgaactcaaacaagcaccaattaagctattaatgtctaaataagcaccacataaatgtccaaatcatttttttaggtttagatagctgaaaaagacatcctaatacgtaggaattcaaacttgaaaataggtataaaactccattcttcttcatgtgaacccccacccaaccccacctcctctcaacaaaaa

SEQ ID NO: 50230 - DNA, 456 bp, Oryza sativa
  unsure (1)..(456): unsure at all n locations
atatcccaaccacatgtacaagctctataatgtactctgttggttaagcaagcccctagagcttggtatgagtgttttcncaatttacttatgaaaaacggctttgagatcgggaaagccgattcaactctctctactaaaagacatgataatgatatttctatgtgccaaatatatgtcgatgacattatatttggttctactaacaagccttcttatgaagagcttagtacgatgatgaccaagcgctttgagatgtcgatgatgagtgaattgaagttctttcttggtcttcatatcaagcaactcatggtaggaagattcatttgccatacaaaagttttgaaggacatgctctagaagttggaatgggaatgcgaagccatccaccttccatgccatcaatggccagtaaagacgtgaccaaaaagataccgttcatattgggtactcttt

SEQ ID NO: 50231 - DNA, 352 bp, Oryza sativa
agcttccctggatctgggaagtatctcttttactgtattgtgatcgcttgatcgatatccttgatcgctacttatgggcgtgcgctcaaaagatacaaacagggattcgcaaacaaaaaggggaattcgtagtcactttttcctgtcgcgtaaaaaaaaagctttacgcgagagcaatataggttgggatacatctatctcttctgagcaacctcttttggattcttaagaccacccttgcagtatgataccgtctgctttgggttctttattatattatctccttcgagggatttttaagatcgttcacgctatatttagtctatcttggcttttactgactccttttctc

SEQ ID NO: 50232 - DNA, 463 bp, Oryza sativa
  unsure (1)..(463): unsure at all n locations
tagactaagcaataaagtaccgcgtattttaccttctgtttctggctgtctcgcaataccttctacagcttgtcctgcagcagtaccttgaccaactccaggcccaatagaagcaagacctacggcctatccagcagcaataacggaagcagcagcaattagtggattcatgatgagttcctcgtgtcaaaaaaagacatggttaggatacaatccaccaagaaattcatatttctaaactctattggacagaagttactaaaaagttcaaattgaaacgataatctgaattctccgaactgcttcgagatctcacttttagtttctaatcattagagggttgtgtactcattattctatatcttctttctttccaaccaactgatctttcaatccatcccttcttctttcctctctgatatccttgaggttctatttntgtccctatcatctaattcataat

SEQ ID NO: 50233 - DNA, 294 bp, Oryza sativa
tgatgcattgatactatgtccgggctttttattttttatggtatggctgatggttgtctcagaatagcgagattcctgtccgggtggaccctgtctgaattttgactttgtacaattaggtcctttctgacagagctcattgaggctttttgtgcttgtggagacaagttggtgagttgctgaggcatcaaacctttctcctgtttcctttttcgtctggacgccggtgtatgaattatgtcatgatgccctacattgatgctggactgaagagcctgaacctctactgcccct

SEQ ID NO: 50234 - DNA, 432 bp, Oryza sativa
  unsure (1)..(432): unsure at all n locations
agcttgacaggaacaccaagaaattatattctaatcatacgctctgcacaacactagtgagactagtaacaacaatgttacgaccaacctaaaaagtgcagaaacctgaccaaattcagccaaagtagatagcaaacagtctgtacctatagccctacagaacaatttccctgtaacactacaacacagcagcccactgatttctgtaataataaattgtctctgttgtatttcatcaagaaagtatccaatagaaatccaatccatgcgttattctgtatcaatacacagactatgtacgatacgacatgagaaatcaccactttgctatatagccatattaccatgttttntttaaaaaaaaatgattcagcgtgtcatctttctctaactataacagaacacggtataaaccttaaattagaatgccct

SEQ ID NO: 50235 - DNA, 338 bp, Oryza sativa
  unsure (1)..(338): unsure at all n locations
ccgtaacaacccanagagctgctcgacccatcttcggtgcacaacatcatcccaaaacctaaacgcaatttcactagaaaccctatgtgaagaatccacctaccgacccagacgatcgcccaagaaaccctatgaacaactaacgctagcggatcgaaacccccaagaggcgaatcgagcagccagcatgaaagaacaatcccccgaaaaaaggaaccaccaaagatcccgcggggagcccgaccaagtcgaggcgctgaatcggtggtctcccgagccgatgccgaccaatagggcggacgccggcgccgaatccccgctggacacatgggattcta

SEQ ID NO: 50236 - DNA, 391 bp, Oryza sativa
tagcttctgactcttagtggatctaattggtttatctagttgggtgttacgcctgaaaatatgctgctgctcttcatatctctcttgtcccagagaacccatacagaagtgcaaccaaccaccattatattcttcatactacctgcgaagatctccattcatggacgttccctacgaattaaatgcacacgagcaaaccatgcagccacagcgaatctgtccccatgtcatactgtaccttctcgtggaaagctattcgccttttcggcgccgtcaaataccaaggccccaccgatcagttaaaaaaaaatactcacacgatcacacgatgagttcatggaggaggtaaaggtaaagatcgtgatcgatcacgcacctggtccgtcgaggc

SEQ ID NO: 50237 - DNA, 140 bp, Oryza sativa
ccatgggaaccttcttgggctatcctcctcatgggataagctcggcttcaccttgtttaagcttctgctatgaacatcgtcgtgctctttaccctcccccgcaaaaaaataatgacgatgatactttagctttatataaa

SEQ ID NO: 50238 - DNA, 435 bp, Oryza sativa
  unsure (1)..(435): unsure at all n locations
agcttgatataaattggtttcacctggatgtgggaaaatttggtagttctattgacaaactattgctaagccggccatgaaagtgtcttgatgctcctatggatacataccaaccagattcttttgcgattgaccgtgccacttcttggatcatacatttttatgtgaccattgttacatgaatgaatntgccaccttatttagaaattagtatagtgagtatatatctcatagcaaggaaagcatgaaagattaattttggatgatatgcatatagcactttgccttttcaaaaaaatgtgcgtaccactttgccttttaaaaaaatgtatataccactttgccttttcgaaaaatgtatatgccacttttaacctcgacacatatttgtgtaatgtcgtatataataacttgagctgaggaggagaattaata

SEQ ID NO: 50239 - DNA, 363 bp, Oryza sativa
  unsure (1)..(363): unsure at all n locations
aaaagatggatggaagtacatagaaactatgcatgaaaacaacagcattgtgtatatccagttgggctgtcctacgttattgtaccattcaccaatatacagtttagactttgggttggctcataagttttgggactatctaagtacatgaaccagtgcctttaaaatgtaaatgaaaccaaaggtgatcgagattgttctaaagaaaacatctgttatactcttgagatttttgctgttgactacacaaagggaagtagaataatattgatgcctgtagttagtnttgcttattcaataaacaagggcaaaatgacagcttaaagcttgcccacattaagaaaaggctagtatttatatgct

SEQ ID NO: 50240 - DNA, 433 bp, Oryza sativa
agcttgtctccttaatcccttgtaaacactttaaaaattcctgagaagtttgaagattcaacgaattgtattggctaattaagccctagtttttattggttgagctctagtcttaatttgtaaattcttggcaacgcaacgcaagctggcctaccaatgaaatataaaagatcacaagcagtttgtcccataacaattgtacttttaggatttgaatttgtaaagatgcacttgatagtgcactggctagggatgcatggtttcaatcccaaggtcctatgttcaatccccaacacgctcacaatttcttcttactcacaatagagtattaatggtcgcattaatcacttttcattcaaatttctttctattttaccatcaactactctttcactcttacctatacatcatctaatcaggggcatgatagttt

SEQ ID NO: 50241 - DNA, 345 bp, Oryza sativa
tacctgtcacgaacaatgcttgcagtacatgatggtgctttagatgatgacgaactcgatcttgctcgcttcgatcggatcatgaggtgctgtgaccctcttgacgcgttgatggcgcatccaaactccagcttcgcgagattctgtcgaacaaagtatttagcggccgtgccgtcagagatggaggcagcgatgttcagaaacaatctggacgtgagggcgttcgtgtcgcgaggcgggcacctgaggacgtggttctacagggcgttcgcgaccatggcgaggtcggcgtgggcgctgcatgtggcggtgaccgcgcaccggccatgatgtggccgtggaagt

SEQ ID NO: 50242 - DNA, 423 bp, Oryza sativa
  unsure (1)..(423): unsure at all n locations
agctntcattttcgtgcttatcctagttgttggtttagtttatgcatggcgaaaaggagccttggaatggtcttaactgaatattcagaccaaaaaaaaaaagaaggaaaagattccattaagacagttatgagtttgattgagtttcccctacttgaccaaacaagttccaattccgttatttcaactacactaaaagatctttcgaattggtcaagactctctagtttatggccccttctatatggtaccagttgttgtttcattgaatttgcttcattaataggctcacgattcgactttgatcgttatggattggtaccaagatcaagtcctaggcaagcggacctaattttaacagccggtacagtaacaatgaaaatggctccctctttatgagatatatgacaaatgcctgaccaa

SEQ ID NO: 50243 - DNA, 327 bp, Oryza sativa
agcttcgcatattaagtcatttattcccatttttcatctatcatttgactcatctttgttcgcttggtgatttttcaagcgtatcggcgtcgggcagtgagaatcgtttcttccaccacaccgaggaaatgatcaacgcgcaccctgaattcctcgaccgcgcgactccgtcgctggacgcgcgcctggagatcgccgccgcggtcgtcccatagctcgtcgcgactgtcgcggcgagggccatcttccagtggggccgccccgtcaccgacatcacccacctcgtcgtgaccactaacgcgggcgcctacgccccgggcgtcgatg

SEQ ID NO: 50244 - DNA, 478 bp, Oryza sativa
  unsure (1)..(478): unsure at all n locations
acagtagatgcttcctganatcaaaattagatgtatctctaatctttaactccatctgaaggggcaacaccctgctcaacatgattttggtattgtagcactaacttatacaagtcttctttcacagcattaactcttcttagtgccacctcttcttcatagatttgtataaacatagcgttcaacatatgaagtctatatctaggatccacaacactagcaatagccaaaataccatgcacatccttccaatacttctcatatttggctgacatctatttatgcattgctataatgtttggatcatcactaantgaccattttctcatagcctaataaataccacaagccttaggaaagaaaagatctgcatacaatacttactatcagagaaagcctctgttgatcataacaaatcttcatctatccaaagctcctagcaacttccatcacatttgatggcaatacgagatacatt

SEQ ID NO: 50245 - DNA, 438 bp, Oryza sativa
agctttcagcaccattagtttggcgtttttgtcttcttttccctgaaaaactattccgtcttcgttttcttgaggcgccatcaaaactggcatcaaggtcaaaatttgcattatagaggtcattggatgaatcttccttttctctcctagcggaagtgctacgaacagtccaacagcttttggcattgacaagttcttccaatgttagagagtgtttccctttaagatccaaccaatacaacttgaagagatattcccaattatttttatcatcgaagtccaccttagcctagaaggcacatatcaatagcaagtcatacaaaatgtctgagtatcttatcaacaaaatggagatttctaatatttgtgcaactaaagtagaagagaagtttagctcgtatgtttgtttcagcaagtcctctctatttatttttacca

SEQ ID NO: 50246 - DNA, 398 bp, Oryza sativa
  unsure (1)..(398): unsure at all n locations
gcttgcctagtagtcttaagaacattncgataatctttactctttttattttctttttgatctgtcaatatgtgttttttcgattttatgcatgcaaaatcagaacgccaaacttctgttcttcggtcttgtatgttctagattctttttacaaaatcataacgccaactntttcttcgagctgtggattggtggacggtttttatgtgatctggatctgtaatttcgctgattaagatctcaacatgacaaacatctcggacaacatgatttgataaccagactaccaaagtataaaattaccaagtttctcatgagagacaaaagttgagttgcatagtaaacgaaagatcaccgattcatggtagctctgaggcgctggttgaaccgacttctcc

SEQ ID NO: 50247 - DNA, 420 bp, Oryza sativa
agcttcatcaccttccttgctcacacgttcttgctgctgtctgtgattgtggcatatctcccaatgtgtacgtctcaaattatttcacgaaagaagcaatctttcatacatggagtgaggagatatatgggttcgggatctcatgatcttacacaacgctgagtgcccaagttttttatattccagatccatctaagtctaaggtgaaaaagggtcgacgccaaactagacgcatcataaatgatatggatgagtcacaagcatgtgggaggactttacgctgcaacaagtgtgatctgcgcggccatacttacaagacatgcccgaagaatgcagaagttccaagcggcgcagatgctagtccatctggacaggcaagtgatggtatgcgaccacctggtgaaagaacaacaagcatgc

SEQ ID NO: 50248 - DNA, 442 bp, Oryza sativa
taagcatagaaacgacgaatatgttcaatgttccaagagttgtttactagatgtccgtcttcgcgcttgagtcggtaggaacctggtcgggtgacttcacagatgataaatggcccctcccataaaggagataactagtgccgatcccgtgtagattgaattttcctcaaaaccaggtcgcccgcttgaaaggcacgggatcgaacattgcgattatgataacgccgcaacccttgttaatatcgagccgaccgaatcaaagctgcttcgcggacttcttgcaatctgtgcaagacatccactcggtcctcttcgtagcgtgcttcacggacatttctaaagcgcaaagattcgaattcgacttcactcggctacattgcttctgtccatatacaacgaataaagtgacttggctgagccctactggtgtattcgcaagacc

SEQ ID NO: 50249 - DNA, 437 bp, Oryza sativa
  unsure (1)..(437): unsure at all n locations
agcttctatcctctcccaacaattaatctttagttatttttgggtgaaagtgcttctgaactaccaaattaattggctacttgagtacttgagtggtgaatatcttctcaatgcataagccattaagccttgatggacagaaacagaattgcgctaaaacagtgaaaatctgaccaaacaagcaacaagaagtaaaatatctgaacacagaacaccaattaagcatttgttgtctgatgtattgtcaagaaaaatgtaatcatatcttttattggaatacctatnttactcttagcaatcaatttagcatatttatctattctgaactgctactatgttcataacctagttcaagaaactgggtgttcatatattctactagaggtcataccatacaaagctatataaatggctattgaatgaacaaaatataatct

SEQ ID NO: 50250 - DNA, 427 bp, Oryza sativa
  unsure (1)..(427): unsure at all n locations
cttgtactnttattagaatactcttctaaatgcatntatggtattgaaatactttccgagtatatgagtacctatgttacattatgttcttgttatactgaatatacggccagcttatctgggagatgctttggtgcgggtataatgtttgtttatgcaattactctatgtcatcacgatgatattagagtagtatctagtagtttagacgtggtgtctagattacgggatatcattatctggggttatatattaccgatgagaggtgggccactgttggtgatagctcagtacgggtattcctccgtgcctatatataatcctaagttaattccctgtggagggtattcctccgtatttagccccggtcatatggtcatgactggctgtcgtaatgaactttgcagtcatgggtggcttctcaata

SEQ ID NO: 50251 - DNA, 439 bp, Oryza sativa
agcttcatcttggagccatcggtgaacttttattgtccttcatctatggccgattgaacctgtcatcgaaacacattgcaatcattagtatagtgagaatgagaatcatgccatttacaatatgctcgtcgtttcaactcttcttgagaaggtttgacatggcctttaagtaatctaatttgtttctcttgcaaaagataatcaaaaatcatatcacacttggccacataaaactatacttaacctcaatttgccgatctttgcgaggaatcggcattaagttagagcaaacaacaagcttatttttgttagtccatgaccattcagcaacataaatatcatgatcaccctctgtctcactatcactagcctcacggtaatcaaccacattaacattaggctttttgtcaaatggtctagcaagttttctattatcctt

SEQ ID NO: 50252 - DNA, 423 bp, Oryza sativa
gtctcttaccctcttgctattgatcgatagaatatattttaatgcgtcctgcacgaatggagaagcgacattagccgttgatgactgatcacgagctatcgctctacatctattatattatcaaaacagccttaagagaaagcaccatgttcattgtgggggctaaaaatttcctcattggtagagaaaaagaaaatggagtccccgtcgaaatacaacctaaaattagctaacactcggagttaatagaaagcaattctgtatgaagagtccatatatgaacttcatttgacaataacacaattcagaatacacataaacttatattcgaaattatgccaagtatatataactaaaattggtgatagaagattaagactttcgaagataaaccatctaaacgctgacaagatgtataaataa

SEQ ID NO: 50253 - DNA, 427 bp, Oryza sativa
  unsure (1)..(427): unsure at all n locations
agcttcngaagatccctatgcctactaccatgaggagatgaagatgatggcgctcagtaagtcttagtacggtcgttgcctgtggcaatggcatgccgctgcctgaattccgctgccttatctattactacttttggatgtattccggaccgctcggtccgatgatttaagacaatgcctgcgggcttatgatgtaataattagcactagactcttgtgtatgtgcttttggtatttcagctatgaactcgtgtgtagcagaccacttgatccacggaaatggtactgtttacaccaatgattcatgttataaaaacgggggtccacagagctggtttcagagccatacgactgtaggaaaagaccaaaaggcgccccaccccttttctaaggtggccaagggaaaagattccatttagttatactt

SEQ ID NO: 50254 - DNA, 318 bp, Oryza sativa
  unsure (1)..(318): unsure at all n locations
cacaaacacttnctaaccttcctcaacgaaatctctctttctcttgaacgtcagaanactagagcggatagacaaaatcaacaaaactctacaaaaacaagcataaacagtatatgtggatattcttaacatgtaaatcttgattttagaaaaatttaacaacttgaaccactcgaatcggagttacgatgatatagttattaatctccgaagcttaattgatgtgcatttaataacaaaaacttaacgaaaaggaaatatgacgtcatgatgacgtcatcaccgccggcatgacgcgggcgacgacctctccggcgc

SEQ ID NO: 50255 - DNA, 420 bp, Oryza sativa
agctttaagacttctgtggaagtgagtcttattatctgaagcaagaagagctatgcgaccgtagcgaactgaagtaagaagagctctactggctactgatctttgaaacacctgacaagttttgatcctgctatgctgtagagaaacagagaaactagctggctgcaacgaacttagttgccacgcgttgttcatttgtcttcataagcaaatttaccatttgttagcaatttggaatgcctttaccgtatgtttgtcagagctgaagtaatgtgtttggcgcacccgctcactgtagcttttacggctttaccggtaatccaccacggatgcactgggtgtacatggcatttctgatatgcgtcaggcgttctgcaggtgcatatgtaactggatctttcaagcgttggaagtattttt

SEQ ID NO: 50256 - DNA, 446 bp, Oryza sativa
  unsure (1)..(446): unsure at all n locations
tgatccctgtgaacccatnntaattaggattctttaaattttctactcactcttatctggagtcaaactctctgcgagatccaattgctaattaagtactcaacgcaactcgcaagttgatcaaaccaaccaagtttcagcaattntgtctttatacgtagtatcatctacggagtattacccccaaaaaaaggaaaaatatccaaaagaaagaagctgcacgagaggattaagttgatgaggtaaaaatgtcaaaaaagtcaaaactgcgtagcatatgcacgcacggacgaccttgactcggagccacgtcacccgtggcccacctggaagcgacacgtacgcgccacggcgtccggcgacgctggagaagcgcgccgaaagacacgtgtcgagatcctattcgttccgatccctcgaccaccgaaatcaacgtcaaaaaaact

SEQ ID NO: 50257 - DNA, 426 bp, Oryza sativa
agcttctaagaagaagcacacccgcttcctatttactacccctctactgctaatgggaaggaatactattcatcccatctcagttattaacatctgaccaatgtgcctaatcatgtttatccaagggaagcaatgcatatgcatgtcctaactcctaagatcagattaattacctctcattgcaacaatgcatctactctcctaagtaactgatgatgctgctgcatgagttaaacttaacaacagggagggttgttactggagtcttggaagaattacacaggagaagaaaaggctaaaggagagctaattaatagctaatgctaatgcatcatcctctctctgcattggtctactgatcactcactctcatgcataatgctgctgctgctgctgatggtgtctgtgttggcagttggtaatgtg

SEQ ID NO: 50258 - DNA, 484 bp, Oryza sativa
  unsure (1)..(484): unsure at all n locations
ctgctatgctatatagcacttggcgaacacggttcaatttttctccctgccattagttcacacttcacacaccagtagttttagctattcttggtgagattctgcagaacggtttcagtcttccctcttactgtaaccagacgatggagatacactttgtaaattcaagcaaccaaatgttaaggaaatatattgtgattgtgcttantaaattatcccaaatagtatgttacgcacaaagataaaactaggcagctggctcttgaaacaacaatggcagatatgtgtatgataacatcggggcatttgcaaatttaccactttttttttccaattctgcaaggaatgcaactcanattacagctttagtagtattcttacaatgttctagttgcagtcttataataacgatctgaaccactagcaaatttgcgattgtccctaacatgaatagcaggatcgtggttctacaaacatatcaaat

SEQ ID NO: 50259 - DNA, 376 bp, Oryza sativa
agcttgcaatacctggcgtacataaatttcctaatattaagaaatgacctaatatccaataattataaaaaagagtttgaacccacgtcgtctaactccataaactagctcgaaaaattgtggttaacattatacatcatacaccccgctaccaaaactgttcgtggctaaagaacttccacatgtattaacctgcgcatcatgaattcatgatcttatccatgctctttttattttcactattcacaaaattggtaacaacaaatctgtcatcccagatctcacaacaattccctcgcctttaaacttcagcaacaaacgtatagtcgaaacacaaacattacgacatatttttagactgaccacttgatgatca

SEQ ID NO: 50260 - DNA, 417 bp, Oryza sativa
gcttgtttgggttagcttatttctgtttggacttctgctagatagtggactgaaactgacttgttttagaggtgacacgaagctttatgtatcctttcgtttgtccttcgttgttcctgttgtgaacatactagtaacaattagcaagttattctgggtgttggttgccgtatgtctttatgtataacccctgatttgaactctgatgcttttgaaaataagagtttcgacatggctgcccgatatatcatactcggtgtgaactttgcatgggtgcctgtggaaaaagatttggcaagtttatacgcctgacgataactggatcagcagccttggtaaaataactcctagatctttgaagtaaacccgaacaccattttgctgctatctgccaaccttatgcttaattattttcct

SEQ ID NO: 50261 - DNA, 447 bp, Oryza sativa
cgccctaacacaacaaaaagtgtctgtatatttataacttatatactctaaaaaaaaagacaacataagacatttccttgcaatatcttatgtcgattgttttttttcttatatagggatatggaacagtaaaatatctgtcataaactgttcctcctatcctaagcatatagtatttctttcgaatgtgcagctgaattttgaatactatagccagacaatttaattaattacctgtggacacatgggttagaagatattggttgcgtatttttgtgggcatgtatgctaattttgttaccgcatctttagttagttgcacgagtccatttaagctcatcttttgagccgtctatgatattccgtgtagcaacctttcctaacttcaaactgccaatctcatcttatttgacgttcattcattcactttattttttctaaattgta

SEQ ID NO: 50262 - DNA, 406 bp, Oryza sativa
  unsure (1)..(406): unsure at all n locations
agctngcaatacctggcgtcacataaaatttcacgaatattaagaaatgacctaatatcaaataattagaagagaagaggtttgaacccaggtcgtctagctccataaactagctcgaaaaattgtggttaacatcatacatcatacaccccgctaccaaaactgttcgtggctaaggaacttcaacatgtattaacctgcgcatcatgaattcatgatcttatccatgctctttttattttcactattcacaaaattggtaacaacaaatctgtcatcccagatctcacaacaattccctcgcctttaaacttcagcaacaaacgtatagtcgaaacacaaacattacaacatatttttagactgaccactggatgatcatccatccctgtgttttgtggctttg

SEQ ID NO: 50263 - DNA, 298 bp, Oryza sativa
cacgggtggcatgaacatatacatacatgaaggagcaatcttctctccagtgaccagagacaaacagatcagtataggctgcagatatagcaagcaccaacccacacacatcttcactaacatcaacttagaaacagaggatggcaaccgaatcacctcgagcgtatcgcctttctctacgatatcgatcttgagcatccagtctgcctcctgctgcttcatgatgcacacattctccgcgatctccatgatctcgatcttcggcacctacgcacactcccacctaaacccatctaca

SEQ ID NO: 50264 - DNA, 435 bp, Oryza sativa
agcttggtcctctgtaacacctggtgtgttataatgtcttattcccgagttttttcatgttgttctgttttatagctgaagcagtataaataactttagactccctatatagatgataactgatgcctgcttcgatcaattgtctcataatgctgtatatacaaccaaagagccttactgttaaaggatagcaaatgttttggccctatcataatgtttatcacgaaggaccaatgattcatgtttgttatatccttagtgatgatgcctgtttactgtcaggtgggttgtcgaccacatgatcaacttgggattttcaaagtctctttcagaatggattgggagcaacttaaaaaaggacaatgaacatgtgacatgggcgtttgatcttcaagctgccatagatatgtctaattcttataggtaatgttcacc

SEQ ID NO: 50265 - DNA, 278 bp, Oryza sativa
  unsure (1)..(278): unsure at all n locations
cttaataaaaaagagctcgagaagtgttctaccttcttctcctcctcttcctatactctntgttggtcaaaagcacaaaggacggaggagctgggctcatttgtcaactatttgcactttctctcactccatgatactcatctgcttaattataaagaaacaattaattaatgtgctcattggccactcctaacaagagcactcacacatatatgacatactactaatccaaatcgaaaatccacttgcatggaaaaaaaactggttttttggggtgc

SEQ ID NO: 50266 - DNA, 374 bp, Oryza sativa
  unsure (1)..(374): unsure at all n locations
agcttcacaccgttgtaccatgtcgcngttgtttttattgctgttaggcanaaaaatccttgtcgaaaagcttttccaaccaatgtacgactggcggcatgtgatccacagaccccttcgtgtatgtcgaggaggaggtgtttgccgtctgtcgactatactcatttgagaagtaccccgtttggcgcctttttgtatagatcgttgccgatcatacagtatatttttgcttgacgggttattttctcggcttctgcgtcgtcctctggcaactcgtcgctgcttatgaatttaatgagtggggtccaccagtctttcgtggtctcgatgtctgcaacggcgtgctctgcctctgtagccccctgatctgatgt

SEQ ID NO: 50267 - DNA, 322 bp, Oryza sativa
  unsure (1)..(322): unsure at all n locations
cctcaacttcatcaacaaccatgacgancttcttcctctttcatcgagaccaaagatgtgggggctggcatggacaatgaggtgttgaaatcaaagaataccactcacgacttgaacactaagatgatggccatgatcaataaaatgtaggagacatgccgtaacaccaatgaggattataccgtgagtgtggattgccttggagatgccacccgactaagcgttaacattgatccactacccatcttatcagacgtcagttatgacgctaatctatctcatcttgtcaacactaacaagcttagtatggtgacagtgaaac

SEQ ID NO: 50268 - DNA, 438 bp, Oryza sativa
agcttggcatttcatttcatgatattctttatgtatattttggcatttcctttccttattttgttaccttctatctctacctcattaattattatgccaattatttctggggccttgaaacatactctatccgttttaaaatatagcaacttaataatgaattagatgtagcctactacgaatctggacatattatgtctaatcgagtactagctagctatattgtgtctatattcattgtactagaacacaacgtagtactttgaatctggacatatatcatagtattatggcgtgtctaatatggtacgttgctatattatgtccagattcgtagtgctacgttgtttctaatacaatactaaactgctatattgtattctgatttataatattaggtccgttcgttttagaacagagaaaatgcttatgtactga

SEQ ID NO: 50269 - DNA, 337 bp, Oryza sativa
  unsure (1)..(337): unsure at all n locations
tcttgtgatacttcgccagcttcggtcaatggtttctgagtctttactccctttagagttttcttcttccctagtcgtgtccttgtgttcccttaacaattgtctctggctgatgcattgtgtaactgaatttcngctttattctaatatattgacgtgtattttcttcgcgtttgcgaaagaaacgacttgaaattttgtggatgttattctaataggaactttttcaaattttagagagcttttatacatggtccacggagttttctattattcgatactccgtattatttttacccgattttttcccggaggagaccctccgggcttttgcatg

SEQ ID NO: 50270 - DNA, 219 bp, Oryza sativa
gatagatagagctactctctccgcttcatattatttatcgtttaactttgatcaagtgtacaggtcatacttctactcttgaaaggaaagacgagttatgatgctctctcgacatgttatgcgactaaacgcacccgcgccggcggtctcttcagttcctgcggccaccttcagtgagctccctctctctcttcttctgcccttgtatccccacgtcct

SEQ ID NO: 50271 - DNA, 299 bp, Oryza sativa
gcttgtactagatgtactgtccatcagttgttgtgtcaaagagagcactaaaagctggattgcagccctcgcaaattaaagtctatggcctcccagtacgttcatcttgagtcaaacctattcgaccagaggtaaacaatttattcaactatcagcaccttactgccttttggatctcttgtcatctgcacaagtccctgagttttctacatgttcttatcttctctgataggatgaactgcgaagggagttaggtatggatgaatattcgcctgctggtctactaatgggtggggggg

SEQ ID NO: 50272 - DNA, 402 bp, Oryza sativa
  unsure (1)..(402): unsure at all n locations
ttgatactaagcttcatgtttcaaaatgcatgacgaacataaattacaatattctttcttaatagcaacagaacatatgcagtcaattttgcaaatgtttatgtcaaagcttanaaccagcagcctaataagggcacaacaagtttcaactggggtttgcaattccaagcaaccatagaaaggaaagttaaattaaattactagacaagtaggtccatgctgaagcttggaaacagactcttgntatagacgttcataatacacatatgcggagattgtttggtgaaaagcatcaaggaccaattccaggtcttcccttcttcctctcacgctgtgacagaaagattatgttctcgttgaagattgaagctgtcttctagtaacctttcttttttaggtctt

SEQ ID NO: 50273 - DNA, 393 bp, Oryza sativa
cttcacccacaaactggttgtgccaaatgtatccaaataaagataaggcaatatacacagatcctgaataactgagagatacaaacttgcacggttgtaaccaatcaatagaagttgcaaccagtgtgatgaccatattggaacaggtacaagactaaaagcactctaaagttgaaagacaatggctaaacaaatagcataagatgatataaaaaatattggcatctgatcacatgccaagttctgagtaagaaactcatttacacctttgctaaaaatgcagagcaagcaaaccaaaatatattccagaattggttgtcaagaaagaatttacatgttaatagaactaataattatttcaaaactttggcactgccacaaacaaatattcct

SEQ ID NO: 50274 - DNA, 343 bp, Oryza sativa
  unsure (1)..(343): unsure at all n locations
agtcctgtctgttcagagttatcttcttgtgctgatcttccactctgtgcttcacttgtccctgtcagcataacttggtcctagaatcatcacaaagcaactttgttagggtcataaattatttaaaactggaaatttggaatgagggaaatatctccttttattggtatcatattcccccaatagcaatatcagcatatacttttggacaaaaaaaaacacatccactggaccagagtgaacaatcaaaagcaagagctctcaattagaaacatgttgagcttcttatgaaatctttccactcaagggaaagntataagatgagagaagaatttacacatgc

SEQ ID NO: 50275 - DNA, 441 bp, Oryza sativa
  unsure (1)..(441): unsure at all n locations
agcttatttcccacagtatgccactcttattatgcagaaccggtacacttattactagcagccttaatcatttgagcattagaaaaatcatactcatcaaattgtttttctactgctagctcccaattaacataagcggcggaatcatacttaccatcaaaaccaggcaatttagattctacccttgcaagatcactatcatgtacctcatatgtgatgcgtgaagaagtcgctatatctcgttgatggtgaagatgttgacgttgagcatgaccatctcgtttccccatgcgcaatcctgccatggttagtagcaaataagaaacatacacaaaaatatgcgcgttcctattaactactaggtagtggcagctcanaaatcacacacactcaagcttttaaccaagctcttacaagatcttaccaatgcaagcggaatgg

SEQ ID NO: 50276 - DNA, 348 bp, Oryza sativa
atcagatcatataatgggtgcctacgtcttcctttctgactttgcaccacagatttggacatgggccatgaaccatgtggggcaatttggagagtacaaattaaaaaggacatgagagaaaatatcgctagaggaagcatcatttatataagttctgaagagttaacctgtcgcggggctccggatgggactgcgagttcgtcgacgacgtccagtagttgcgtgacagagatgccgacgaagcagcagtgcgacaccccttctccctccgtgcagcagacaatggatgaggcgggagaacacgtggtggagaccgccgtggattttgtggcggctctttgaatctct

SEQ ID NO: 50277 - DNA, 437 bp, Oryza sativa
  unsure (1)..(437): unsure at all n locations
agcttgacttcattcttgccaacatgacttatgttttggctnggagaccattaacccatggtgtcattcattagcctcatcgcaattagatctattcctttgcacggctcaaaggaaaacattagtcccaacaaatcggttggcatcctccacttggtgaccaaccagttacatatgaaagatatggatatgtttgttgagtattcattaacatcataagtgtcatatactcgtatgcaagctcaagtgcaaagatccgatatatataataggtgaacaacatggatctaaaacatgcacaataaatgtataggatctgctccccctaagtatatgcatacaaagaaatatactagagagacaagtgtctgcataactaaagaagaaccaatgggggtttattctatacacatagagaatgcatatgtatctatgat

SEQ ID NO: 50278 - DNA, 124 bp, Oryza sativa
agaaactaagcttcacatgacaggttatatcttaagcattgctctgtttgcagaatattccttagagcttactattgaactagacattaaagatcataaacacgtactccctccgtttcacaat

SEQ ID NO: 50279 - DNA, 400 bp, Oryza sativa
ggatatgaatacctcttatgccttaattacccgttaattaaaccttccgacactacaactaaactacctacgggataacagtcacattaaataaaattgtttgctattccctccgttttatattataaagttgttgactttttcgtaatcaaacttagttatgtttaattaagtttatagaaagttaccaagatacaaaatatcaaattagttttattaaatctaatattaaagatattttaattatatatttgttttgggctagaatactacttcgtattatttttttataaacttggtaaaatttgaaaagacagtgattaaaaaaagctaaaagacttattatataatacagaagcactatacgtgaagatgtcgtaacgaaatatacatgtcctga

SEQ ID NO: 50280 - DNA, 470 bp, Oryza sativa
taatgtatgtaaatgcaataatatcttgacatgttatgcttatttaacatatcagtgcgacatataaagcgaatatagttaaatcagataagatcggctgaaaccccgatactatcctaattaacaaccacaaagcaggctagagattgctattctaagcatgacttaatggatcaaactcaactgatgcagcattaagtatgaaaagaagaacaatatctagacaatcaagccactggaagattcatagaatggtagatatcttatataatccaaatcaacatcgagatctaacctaatcggctgtcttttgcatgcaaatgttagccgataatagattagatagagatattgttgaagattatgctagatatgtgataactcggcgaattatattaatgagattagagtatcatgaagatgtaacactaatccctaagaacataattcgtcatatcgagccttacctc

SEQ ID NO: 50281 - DNA, 440 bp, Oryza sativa
taagcttaattctttgaatcaaagggtctattatgatatattcctatacgatttaaatcctataaaattcctacataaatcctttgattcaaagatgcccttatactattttatcctcccacacactaaattgttgagtactttattctttcatataccaccatttataccatcacatgtctttgtgggatttccttattttttaaaataaaaatgacataattggggagtagtactaatgtaccactaccatcctctgctctctctctttttctcccattgttttacatgggcgtcctctcatctactcttgttgaactgtaccggtaaaccgattgatagatttcatagattggaacggatatactccaacactacttacggtgtgcttagtttattccacaactgaaaggttggttcgatattaaacgatgtgatga

SEQ ID NO: 50282 - DNA, 350 bp, Oryza sativa
ctcacgcttctcatgcatgtacagcatatatcacatgtcttgttgatttcttttaagcacgtcccacagattacccacattatgtatctatgcccccatggctccacctatgacttattagtcttccaaaatgatggcatttgtgtccacagggcacagatctgcttgttccaagccaattgcacaagttctagctcattgactgacaaatcaaagtttggataactgagatgggatatgggaatattccgaatgaattgtatttctagtcaatgctttttttcttccctctactgttggatatccaacactccaaggatggcctggatttggtgtagttacccagctgc

SEQ ID NO: 50283 - DNA, 433 bp, Oryza sativa
agcttgcatatcatgatagtatgaagtaacatttcttgtatcttgttttaaacattgcaggttgttgaacacaatatcagcataatacatgggaacataaacatctctgaaatatcgtttcaagtctttccaaaaatgtggtattttgttatgcctacaaagatgtttcccatcattataagcatgtttaattaaaacactagaggcacacataaccttttgtttctccgacaagacatgcttttgaaatttactatctaccgctagctcccaattaatgtaagcacgaggatcatattttccctccaaataaagcagtgcagatttgatcttacctagaacaatattacttacctcataatgggcatgttgatccctcctcatgtcttctaccaacatgtcgatgttgagcacacctatccccaactatctt

SEQ ID NO: 50284 - DNA, 408 bp, Oryza sativa
  unsure (1)..(408): unsure at all n locations
cttctcgacgcctactctagctaccaccaaattagcatgtgtgaatgatgacgaggagaagacaacattcatcatgccattcggtgtattctgctatgtcaagatgccatttggactcataaccgcaggaaatactttccaacgcacggtccaaggggcacttaacgatcaacttgggaacaatgtcgaggcctatgtcgacgacattgttgtcaagaccaagacaagcgactcattgattgacgatttccgagaaacgttcgacaacctctgatgatatcgcctcatgctcaatccagagaagtgcacgttcggagtaccatctggcaagtngctcgggttcctcgtttctggaagagggatctacgcaaatcccgagaagatcaaggcaatcgagaacatgaagtc

SEQ ID NO: 50285 - DNA, 423 bp, Oryza sativa
  unsure (1)..(423): unsure at all n locations
agcaagctggtcgatatactggagtgaattgggtattatatgtncngccaacatttaaagtagtgaatgaagcctcgactatatattattcactgtattggaacattataacgtattcatgtaactatagtgcatctatgtgatactttaaaggatctagaaatctcttcagaatgtaccatgttacattcttgatgtatgtgttgcttgttatactggtacaatcagtgtcagtcaacctcgacaatttttgacaaaacttagtactgaactacttaaacgataaaataacactataaatttaagcataatcaccttattatgacaccgacattgaatccaccactacaggaagagaacaggaaatataagagagtgccgagttctgtactaaaaataaatgataatgtattcttatcctac

SEQ ID NO: 50286 - DNA, 412 bp, Oryza sativa
ctgatctcgctcagtatctgttcctcattaatatgctttggcaatggaagctggacaagtatgcctgttatgacagcacaagttcattgtcaaatacttgtggatgcatcagaattcagatccatatagatgtagtcatatacctccaatcaatacctcaacattaggcagaggcaaaatctgaagttacagtgctgtttcagactaactctagcgtgtacattatcaaatggacattaaatctagagttaattgtgtgtacctgacatccacgtgggtaggaaaatataaatcacactctttgtagacaagcctatagatatatctaagcccttctaacccacatttttactacaacatcatttgatataaacaataaggctgcctaatctgagcagaaaatggaactctt

SEQ ID NO: 50287 - DNA, 426 bp, Oryza sativa
  unsure (1)..(426): unsure at all n locations
agcttatctctctacctttctaacgcatctagtctcatgngcaaattcatctcgagtcaacgggaatcgccaaaacaagacagcgttgttggtgaaaccgaactcgggccttgggccttgtaataaactaggcccatctcggaagtgtctccctccacctctacgaattagcacttaaccctagctttattttcttctataaatagctttgtacatcctcaaaaacattgggttttatttagttgaattttgccaagtgccattcaccttgtctctagtcctcgttcgattagtcggcgactatagattcagagcccccaatagttggtgtgttgatttgccgggttgattatatctaccacttcaatcgtaactattccttcgtgcttaatcacctattcgcaatattaaattgcatcttatctt

SEQ ID NO: 50288 - DNA, 291 bp, Oryza sativa
ggtgacttgatcgaagtccatggccttgttattattctcttgacatcaaccctaaggcccacttcgcaatccatacgcttgctcctccgttatgaagtatatcccccagtggaaacgatgtgaccaccgtgacccatagactctgacagtagtgagataattgtgtgacggatatctaaacaccttattataacctttgaacctgggaggatcttgctaggagcaggtcaaacctcgctacaaaatatattggccgccggacgtttgtaatggcctactatgtcactcgac

SEQ ID NO: 50289 - DNA, 443 bp, Oryza sativa
ctgcagcttggccttaggcttgtcatgttacttattcttgttatctgaattaatgctagtaggatagctggataaggacatgctttttcaaaagcttcagtgaaatgctgtcaatatcttacccagaagtctgttcgaaattccttgagtcttgaatatttgtacccttaaagggtcacactcatgatgtttacagttacatctagatgttcctgttgcaggttgcttgagtacacagaggatgctctgatgtctttaaccagggcagcagatatacttcgcataacgcatgggactaaatccgagttcatgaaggaacttttgggcaagctagaataagtaagggctgaagcttcttttaagctctcggctggagatgaacaataattgagtaaccattttattgtgaagctccatggcatcttgatggctaatagaatgta

SEQ ID NO: 50290 - DNA, 316 bp, Oryza sativa
  unsure (1)..(316): unsure at all n locations
gcgcttgtgcacaggggagtgttctttgtatttgatgctgccangctggggcaacattagcccttctaagggcctgtttggcacaactacagctccagctccacctctcctggagctggagctcatccaaacaatgtcagctccaccaaaattggaagtggacttgggtggagctctctcacaaaatgtactacagttgtagagctgtgtctaggcagctccacaacttcactccagactcaacttctggagtgatatttaggagatggagctgtaccaaatatgccctaatgtttctatgcctaaacgtgagtat

SEQ ID NO: 50291 - DNA, 421 bp, Oryza sativa
  unsure (1)..(421): unsure at all n locations
cttaacacctcttatttgactntntcactattttgaaataccaaaaacatccaaatccaaaatgccaaggtcgtcttattcaaaacctccatcatcacatcccctctctcccacttcacacctcggaacgcactgttcttatagagagaaaggggctttcccatcttcttaacccgaaatgaaatggctgaagagagggaggttccttttggggtacccccaggaagagatccagtggagacggngtgggcctgtagctcagaagattagagcacgtggctacaaaccacggtgtcgggggttcaaatccctcctcgcccacagccttccaaacgggaagggcctttactttcctcctgagggtaggaaaaccatgatcgggatagcggacgtaaagctatcgaacttgggtatgctcttt

SEQ ID NO: 50292 - DNA, 466 bp, Oryza sativa
  unsure (1)..(466): unsure at all n locations
tcagagagctntgcattatagttctttcatataacaccatcagcatttgaactcaataatgagaaggttgcaggcacattaaatagcagaaagcttacagcatctagaagaatgttggaagccttaaagtcacggtagatgacttgtttttctgaggcatgcaggaacgcaagtcctcgagctgcaccaatggctatcttcagcctcagttcccatgatagtggaggacatccttctgaaaagagatgcggccagtttcatcatcagtatacctctcaatcaagtcaagtaactgccccgagatattctcacatcatgcacttatatgttngcagatntagaattttctactccagaagacaaagtattgcaggaggaaagaaatacagtgtgcatgagcaatgttatcactccacatttcagtgaaatgcctaagtaacttcattcatgatatatataagatgat

SEQ ID NO: 50293 - DNA, 411 bp, Oryza sativa
  unsure (1)..(411): unsure at all n locations
agcttctagctagtatttnagcttcttcttgtgaattgtattctgagaacaataagtcatttgcaatttgcttcctcatgtttgggatatattctggtctgatcatatctttcaagtgcatccttgggttccaccattccatacacttcatagcgtagattccgcaatcatgccttgatgagacaaaaacaaaaataaatcatttaagataaacaaaatcatgggaaaaaaagggaggagttttggacaaaaaagaaaatgatatgtaatttggggatgtctgctggggttgataggttagtacccattgctttggcgagtaatttgtgggtattggatatcaaatgtactaaagtctttctccacatctgagaattctttccacattgcaatgaatcctagtatctgcgt

SEQ ID NO: 50294 - DNA, 353 bp, Oryza sativa
  unsure (1)..(353): unsure at all n locations
cttttgaaccagagtntggagctgtatattgttatctcttgatgtatgaaccaaacatttacatgatattccaatgttataaaaccttgcagataacaaattgtgctatacaggcctaaatgttcaaggtcaaatttgataatgtatgactgcaagcattggaagagggtgaatatgcgatccttttgtctccgatgttgagtcttgtggaaggaccaacgagatattgtgacagcattcatccgtcggccgtctcgtgcgagcgtgtggcgtgcgcgggctatcacaaactcatcgcgggattggcacaagcacggctcgaccttgcaaggaggggagagagcggaaacata

SEQ ID NO: 50295 - DNA, 442 bp, Oryza sativa
  unsure (1)..(442): unsure at all n locations
agcttttaacgttcttacggaattcgattgtnatttccactatggaaattaagttacactttacataacaattatctaggcaaaatatttgagaactcgtttaagtgagaaagggttcaagccataatgaattaatgagtgcacctatacttgagtttgtaaaatcatagtcaacagcatatataatctataacaaacaaagtttacttactacatcacaggcagtaaagcacaacaaactcatatggtcatacagatagtatagcaagccataatgccaagtgctagaaacaaaattacagccctaaaccttaacttcattgtcttttaatgttttgaagagttctcatttttgtctgttggtggctgaacctaagaaactccttttcgcataaaatatgaccttgtttaataacaaatgcacgacgtctctgtctaattc

SEQ ID NO: 50296 - DNA, 363 bp, Oryza sativa
gatctccatgtagttcagtagctttcatcccactgtctcttcatcttaaatacaacatccttcaatggcttggtgttgttcataaatgcaattactgtctgagccttcagagcatggatacatctccttaaagtgtccactttgtgttgagccttggatgtacaatagtcatgttccaaagatggtggtaagctgtcaactgcagcttgattcactgaatttgatggagagttggagtttgcatctggctgggacagcacaagtcttggaacagtcattgactcaagtggaacaacactcatagctctaacaaggactggatcgtgaccccaactcctgtctgctcgtataactgattatgga

SEQ ID NO: 50297 - DNA, 345 bp, Oryza sativa
agctcttagtataatcttgagatcttatatttctattgtctatagaagtatttgagatctgggatatgaatatgacattgcttgatttatcatgaaaaaatacattaacataggtatatgttcattaattttatcaatatatgatcagaagaaaaaaagccatgatcacaaacctatgcactggagactgtgtttaatgtcttaaatgacaggtgaaacaagagattatcaatacctgtggggcatattattcttgatttgataaacacaataagaactttgatgtatgtagaagaagccatcaagccattaaggtcaacaatggagtgaacatggatgggcggg

SEQ ID NO: 50298 - DNA, 366 bp, Oryza sativa
  unsure (1)..(366): unsure at all n locations
tcaagcctgcacacgcannaaagctgctggaactgcgagaggaattatattcgtgccattagccncaaagaagctagatcttggcaaggcaccagtagctcctccaaagcctccagcaaaattcacattgggcatgccataggtcggagacgatgccctattcaaaataggccctgcatgcaaggagttgcacaaggtactacactggagaagtccaatgcacggaggaagaatagagagacctccatgttgggccagcacgatggtcagccgttcctcgggcctactgccttcatcgccgtagacttcaaagatctatgggacctctatatggtgcgagcgatcgacaccaaccttcttaaatgc

SEQ ID NO: 50299 - DNA, 401 bp, Oryza sativa
attcaagtaaatcacacatcctgttttacctttaatttgacctgaaactaaaaacattgctggataatcattgatggtcaccaaaatgatggccttcactgtgaagtattctcttaagtactcgtcccacactttcaatccctctttccataaatcagccatatcttccaacaatggttccagaaatacgtcaatatcaataccaagctgacggggtccctgtatgaggatacagagtaataagcattttcacttttgacaaaggtaggtatgaagattatacatggtgagaagcactggccaagtactatgtgagctgcttatgtctccaaaaggattaactccatcagtatttatggcaaacctaatatttcgtgggtcttaacaaactctctatactg

SEQ ID NO: 50300 - DNA, 384 bp, Oryza sativa
ttaattatactcttcgagacggattctgtctgcatgcccagttgccaattttgtgtattttcatatcccaaatgggatgaatttgaattatgcagtcttggtttcttaacttccaaatcagcaacccatttcagaaagagtctagcgcataattatttggtaactactactccttccgtttcgcaatgtaagactttctagcattttccacattcatatagatgtgaatgaagactcatgcatgtgtctagattcattaatatctactcccttcatgtacttttgatagtcatattttatcttggctcacagaccaagcataagtaattctacttatcatgcatttaaacatgctactagttattcctcgtaaacaatcaattc

SEQ ID NO: 50301 - DNA, 427 bp, Oryza sativa
  unsure (1)..(427): unsure at all n locations
tcttcatgttaaaataatgccctattctctttaatatttaaaatggaagcctaactcctcactcttataacgatgtccctcttcccctcccttctntcnntccnccctctttccctcccnctctctcttctctcattctctcctctctctccctttccctttcttcacccttcnncctcccttctcctcttcttttcctccctcttctctctcctctcctccccccttcttcttccctctcttactcctttccttcctcttctcttcttcttctctccttttctctctttcctccttccctcttcccttctctctccttcccttcttctctctttctccccctttccctctcttcatccttccttctcccttcctcccctcttcttactttctcccttcctctttccctctccttttctttctccct

SEQ ID NO: 50302 - DNA, 306 bp, Oryza sativa
tgaggtcaatcgagatcacagtcatgatttactgactaccactgttctggataccacacatttattgtatctatggcgaatgcataatgacccatttattcctcatgtttcacttgactgtaacattgtggtgccattgtaccggtaatctcttttctctgcccataacacctatggcaccgggaacgcacatgtcagcactcacttctgggtgaggcaagctttgggttttttttcctttttttcacaagagatcgaactcctccttactttataaatgacttacagacatgggcctccaaagaa

SEQ ID NO: 50303 - DNA, 368 bp, Oryza sativa
agctttaagctctgctgtcggagtattctctgataaaactgaatcatgatcaatccatcccaagagtggagaaagctgaaaaacacgaatggaagagaggagcttgtggttgcacccgccatatgagggttaaaaaatggatcttttgagcaatgataactgcgaataggctaggtggtgttagagggctggtctagaaccatcacttttgcatgctctaactagtctgactcactgcttagattaatgcggatctacttgaagctcaatatatgttgctgtcacctatttgtacactgatttgtatctgctatatcacaagaccagccttggtgtcagataatgcactagtctcctttgatgacagg

SEQ ID NO: 50304 - DNA, 227 bp, Oryza sativa
cttttactctcgcaacgaaggacgattctcgatgctctgccgagccgttatgcgactagacgacctccttcaccggaggctcttctgttcccgatgccagctcccgtgatctgctgctctctctccttctagcctgccttcatcttctgcgctcgtgactttagcgccgagccggtcttcggtggcatcagttgcgcttttctgagccaagccggtcttcgaccctt

SEQ ID NO: 50305 - DNA, 403 bp, Oryza sativa
gagcttacattataggctctgtagaactggttgttattgaccgtggggctcctcaccgggagagcgcgcatagcccctctttccgggtcggcccggggccctgggtgagattctaacctctcggtgtgtggaaagtccgcgagaatggaaacacacaatacactggcgatgtatacccgttccggccgctgagaaacgtaataccccactcctgttttttgggaatctatgtccgaataacttcccaatagcttgagaaccccagagctcttactctctccccccttcatccttcctatctccccaacaattaatccccctccttactgggagagcgcttctttatttctctaagggatactccaagcccatttctctcttttagggggagattccatctttc

SEQ ID NO: 50306 - DNA, 500 bp, Oryza sativa
ggacactatgaaactcacctgcttctataccaagctttttgtggcatactttcattatattggcagaagaaaaccatgcaccattacaatatgcatatggaacacattattactcaacagtcaacaaatgccgcagttaggaaagttaaaaaccacatatttgtacaagagctacagtttcagatctaagttcaatagaattgccatagcatataatctagccacacggagtgagcttcttgttgtctgcaccacgaggggtatcgtcctttcagtcatcccatgctcttgctttctcctcttcagcgtcctcatcctcttgggctgaccgactgccatccttgtgccatgcggagtttgattcttgaatcatcttatcagttctttcttggcatttctccatcatattcatctcacgtaagccacgctcttttatgctcatcggatgcacctaatattccaatacacgagaaatggaaacacaaaattggattaaagat

SEQ ID NO: 50307 - DNA, 433 bp, Oryza sativa
  unsure (1)..(433): unsure at all n locations
agcttctagctagnattattgcttcttcttgtgaattgnattctgagaacaataggtcatttgcaatttgcttcctcatgtttgggatatattctggtctgatcatatctttcaagtgcatccttgggttccaccattccatacacttcatagcgtaaattccgcaatcatgccttgatgagacaaaaacaaaaataaatcatttaagaaaaacaaaatcatgggaaaaaaagggaggagttttggacaaaaaagaaaatgatatgtaatttggggatgtttgttggggttgataggtagttacccattgttttggcgagtaatttgtgggtattggatatcaaatctactaaagtctttctccacatctgagaattcttcccacattgcaatgaatcctggtatctgtgtataaacaagaggagcatgaaaa

SEQ ID NO: 50308 - DNA, 320 bp, Oryza sativa
tatgagaggagacatttacatgatatttcaatgttataaaaccttgcacataacaaattgtgctatacaggcctaaatgttcaaggtcacaattgaaaatgtatgactgcaagcattggaagaggttgaatatgcgatccttttgtcttccatgttgagtcttgtggaaggaccaatgagatattgtgacagcattcatccgtctgccgtctcgtgcgagcgtgtggcgtgcgccggctaacacacactcaacgcgggattggcacaagcacagctctacctgtcatggaggggagagagcgtaaacatactggaaggat

SEQ ID NO: 50309 - DNA, 428 bp, Oryza sativa
  unsure (1)..(428): unsure at all n locations
agcttgccgaggagagtagtattgtttatatatgttngggtaggaggtgacggcagaggtatcatggacattatggaggtgacactccgaaaactcaactagacaccgctagatccagatgccaaagagggtggagcttgagtaagtggtcgtcgctaaaactccgctccatcccgagttcctcatctacttctccaagctcgccgctgccctcgtctttaggggtgggcataaaaataccgacaaccaaagatcggactgaaccgagccgaagtagcggtttgtttggtctttggttttctcttctttttatttcttcttttgttcggactctggttttttgtgctgttttctgttcgcaacaaccgatgaagccgaacaaccgatctagatacgtgcactgctagcccanagtcattctctggtgt

SEQ ID NO: 50310 - DNA, 376 bp, Oryza sativa
  unsure (1)..(376): unsure at all n locations
nctnctcgtgcttcacatcgtcaagcgtttattctaattatgaggtgtctgaatcatacacttgagtttggaatgtggcattccacttcattctctatatgctcaagcggatattcacatgctgattttcgacgtcgtagaactgataggaaaagtactagaggaacatgtcattaccttggcacatcacttgattgcatggagctcctaagaaacaaatctttgcgctggtcaaccaacctgccgaatctgaatatgtcgctgctgctaattggtgtcacagaatctttggcttttatctactttgaaagaatatgcgcttactcctgagatagcaactctcttctgcgataatactatagctatcaacattgct

SEQ ID NO: 50311 - DNA, 442 bp, Oryza sativa
  unsure (1)..(442): unsure at all n locations
agcttggtgaaagaaagaaagaattcttttgttgtgttttgcgaagagcactgctatacatactaaaatnttcttacaaaagtcttactaacaaatttctcaaccgtttgatttaactagatgaaagtgaggtgggattggaaaagcgaaatggatgaatggctagtattaaataaggtacaggtgtatttacaccttaagctattagatacttctattggtatccatgcttctacaaagaaagatataatattatttagagcactgctacacgtattaattctttcttattaaatttttactaacaattatctcaactgtttgatttaggtagataaaagttataaaaaaaattagatccacctatagcatgacactgatacatcaatgtaagtaaaaaattagtaaaaatataagtactccatccgtnttttaatataag

SEQ ID NO: 50312 - DNA, 461 bp, Oryza sativa
  unsure (1)..(461): unsure at all n locations
actcaagaaactgaccatgaagcgacctgcaagctttctgtaacatcaaagatcaccttttggcgctggtttttgtgtttntttcctgcattttttaatgttctcttttgccccctttttttattgatgttggacatgcatgctgcacaaaaatattttcgactaacaagtttttctgttttcttggtatcggaggttcaatacaaaaattatttctttttcatcaagcaaatattttttctctatttccatttatactcagaaaatataacaatataaaaaattatctgtttattagtgttaagcacacagattttctttgctttggagtgaactagaataataacaatagtttaacatggtttaaatttggaataagttcactntgactcccttataagtgacccgaatctaatccatgaccctaaaccgttataccggatatcctcactcccaaacta

SEQ ID NO: 50313 - DNA, 435 bp, Oryza sativa
  unsure (1)..(435): unsure at all n locations
agcttgacgagaagtgagtagatctcgctttcttatcctttcctgtncgatatgaagtgtaggttctaggggttcatagaaatcgtggagttgacgcatctaataccgtgactagatcgctactttcatactcgtatctctagtctgcaattgtccattgttcaatgttagtgcgcttaatttgctttagcacatctgaccatcaattggttagtcctgttttctgtaacagaattatcaattgagatttgtctttctgtattaaaggcatgccgagttctgctcatctgaattagagtaatctaatctagccatccagattagaacaaaatgtgtagtgatgatcaatataaatntgatgatcgcctggacaaaataaatgctgttgaggaagcactttagtttatgccatcataaattctatcaacacttgct

SEQ ID NO: 50314 - DNA, 297 bp, Oryza sativa
atcatcatttgtccaaatggaacacaagcagcaagatgatctccgcagaacacaataaccatttaaatcctaaagaactagagaccatccagaggtatttgcttcataagtatggaaagcattgcacgtacatcatccatatacagatgggtctgttgcccaactaagaattcacaagtgcttccattcaccgtaatcacactggatcctggttccttctgatgcctttctcattcatgaaccctttcgccttcctacatctggccatctattactcactggatacatgttggagag

SEQ ID NO: 50315 - DNA, 376 bp, Oryza sativa
  unsure (1)..(376): unsure at all n locations
agcttgctagtgccaacacgccatgacgctttgtatgctttcgtatcgtggaggaggccggccggtcggtgaggtccatctcngtggcagcggcaacgcaagttggccggccggccgggctctccgccgatgttggggccggccgtgcccgccaagccggggttcagcttgcttggcgtcttgcccgtcaaaggctcaaagctttagctagctttgaataggtccatgtactatgtagtaatacgacgcagcagagatgactttgttgtccttagctagtgaccgagatgctcgagctcgaccggccattggtgcatgaccaaccaacggtgtggcggtatcgtagctatccaagctcattcgtaggaaaggagca

SEQ ID NO: 50316 - DNA, 376 bp, Oryza sativa
  unsure (1)..(376): unsure at all n locations
ttgggcacgccttctgntatttatgtgcttattggtgggccgctattgatggattctttgggccgacattgaagtttcctttgggctttcaaatgggccgcaatttatggtttctttgggccgacatgacgttctctttgggctgtataatggcctcacgtgatggtttaattgcgccaaagttgacgtttattctggctttcaaatgggccgctcttgaccgatttctttgggcttcgtgataggccgcgtttctcaccggaagcccgaaagatggcttcaggcccagttcgtcatacacacaggccccagatgtactggccatcatggcctttcactgcacaagccatatagcccatttaagtacattgtacag

SEQ ID NO: 50317 - DNA, 429 bp, Oryza sativa
  unsure (1)..(429): unsure at all n locations
agctagaaacgaagtgcattaaagttaatgttatttatgccatcgatgtctccctatggcgatggaccattcgataacaatgtactgtgccgagatggctttgatcgcctaaactcgctagagataaacaatcctttgtttgagaagcgcccccatgacatgaattattccgcaaagcatcaatatgagaaagagacttcaagtactttcaggaagtaccctgctggcttaagtaatacttcacttaaagatattagaaattcatcaagaggaaagcttgaagatttcaatagcattgttgttttggagccaggcttaaggaaagtccaagagtcggggaaagccttttgtacgccagacccctctcacatcaataagaatttcacgagagagatgcagcaagctgattnttctttgcagaatagaggg

SEQ ID NO: 50318 - DNA, 439 bp, Oryza sativa
  unsure (1)..(439): unsure at all n locations
tcactccttggccctacaatgagccagacatggagaagttatgttgtctacctttntgagagtactgccactgcacatgctcactgggatgtggcatacaagcattatgtcaatgagatggactgcttacagcctcaacatgtaagtacttccaatatcacttctagttagacatttacttctttaattgagatactaactaacgacatctcttcaacttttgcagattgaatggttaccataccacacaaatgaggcttcaagcctgaccctgaactcgatgtgcaatcgagactctgactatntcatgtaccagtgcccattgattngtttctgggcagttgagtaccaccttccgcaccgtgtcatgcgacagatcgggaagaaacaagactggccggttgaagacatcctaactggagtngaattacacaagtaa

SEQ ID NO: 50319 - DNA, 434 bp, Oryza sativa
agcttaagatacctctgacatgtatgtaatgattctctttggttgccaaaggaaagttcttcttgggctgattcagttcatattatgtacacaagaaacataatagtgcagatccaactcaaagcctttcaaaccatactataaatgccctaaatgccctactgttctttatttatcagtgcttataaacttctctagatgcaggtatccctcccagtgcatatgaagtggaacatatctatgtaagttttgttttgcctcaatacgaatcaattactttttttgaacatcatacgaagtcatttgtacctatttagaactggaatttttacaaagaatgttctatgctgtagccctgggacgttttttattatacaccaacttgcacgaagagcattatgtcttgtcggctaaattgggtcctcttcttaact

SEQ ID NO: 50320 - DNA, 461 bp, Oryza sativa
ttcgttctagctgatgatttgttgatattagcaatgtagtttaattctagaaagaaaatgagtgatgcatacggaaggaaaaccttttgttcaaaacaaaattatatcattagatttctcaagaccttgctgttttgtgttttgctattcattgagcattttacctaatgcctagttgaactaaattttgcttgaactcttgaacccagcctcatcccgtcaggacctcatcttcgatgcaattcctatgcatccaacagcaagaaagtggcgtcgattaatccctaagagcgagggatcggagtggattgagaaaaaataattctacaccacaataaaaatgaaataaattatctctaaatctgctgtctaatgacaattgcgtctcatcaaagaacatgaaacttggtttggatgtttgacttatttaaactttatggaccctcatacatggatctagt

SEQ ID NO: 50321 - DNA, 437 bp, Oryza sativa
  unsure (1)..(437): unsure at all n locations
agcttaccgttgggttcacaagtgctatgttctttcttatgatagacaacatatatatgttttgaaagtgtctttttacaatcatagttcgagagtgaggactgggagagagtacctactgggtcttatgatgcaaacaaaaggccattgtcagcgatgatggaagaagggtaattaggaaggggacaatcgatggctgcgagggcacctaataatcaatcaatagatagaagagctagctccacaatcatgcagtgccaatgtagtagtacgagactggtgcaaaaatctcaagatagacgcatgacggcctgctcagcaattaacgactaaaggcattcacaatggttatctatacgttctctataagagatgcatgtcagcatatgttcctacttagaagagaatnactgaagagagagagcagagctatttac

SEQ ID NO: 50322 - DNA, 464 bp, Oryza sativa
  unsure (1)..(464): unsure at all n locations
ctagcgatccactattattatcttgacagtccancctgtgggcaggtggtctgactaacaggcaccacacanaagcctcctcatgtgttcccatctagagtatgtggatcttcttttctgctccatagccatcaaacagctcgtggagtagctcttcatccaccggatacaccagatggctcaccatgatacaaagaactcactcagtatcggaagccatggtgagtggctctgataccaagttgtcacgacctgaggccacgatgggataatcactgccaggatgatagccaggcagcgtatgctgctaatgaatgtatgtacacttacgttggtgagaagaacatntgcggagagattagactaatcctgattcattgctcaatgataatatacacaactccatccttgttagatggataacttggctctatgcatgactccatcttatctatgtctactca

SEQ ID NO: 50323 - DNA, 331 bp, Oryza sativa
agcttgctagtgccaacacgccatgacgctctgtatgcaaccgtatcgtggtggtggccggccggtcagtgaggtccatctcggtggcagcggcagcgcaggttggccggccggccgggctctccgccgatgttggggccggccgtgccagccatgccggggttcagcttgcttggcgtcttgcccgtcaaatgctcaaagctttagctagctttgaatatgtccatgtactatgtagtaatacgatgcagcagagatgactttgttgtcctttactaacgacacaaaagctctaacttcacctgccattggtgcaagaccatacaacagt

SEQ ID NO: 50324 - DNA, 454 bp, Oryza sativa
  unsure (1)..(454): unsure at all n locations
ctgttccatttttgggcacgccttctgttttcttgcaanatggtgggccgctattgatggtttctttgggccgacattgaagtttcctttgggctttcaaatgggccgcaatttatggtttctttgggccgacatgacgttctctttgggctttagaatggcctcagttgatggtttaattgggccaaagttgacgtttattcnggctttcaaatgggccgctcttgaccgttttctttgggcttcgtgataggccgcgttttttcaccggaagcccgtaaagatggcttcaggcccagntcgtctaacacacaggccccagctgtactggccatcatggcctttcactgcacagcacatatagcccattaaagtacagtagtacagtgcattagcatgcggatcatcttattgtgattcgcaaaaagtccattcacctgcccctgcgtacttt

SEQ ID NO: 50325 - DNA, 440 bp, Oryza sativa
  unsure (1)..(440): unsure at all n locations
agcttcagaaagatcctttcatttcttaaattttttcacctccaactgcaaactgatgaacactgccattcagctccatccaactgcaacctttcttcttccacgtcccctggacttccattactccccttacctccttaacatcattccagtttccatattctgcatatatatttgataagagcacttgtgctccaccatgattagggtccaactccaaaattttctttgcagcaaacgtgccgagctcaagatcaccatgcatccggcatgctgctaacaaagatccccaaatgaccacatttggtcttaagtgcatggactgtatcaggtcagcagcttgtccaagaagttttgctcttcccaaaagatccaccatacaaccgtagtgctcatgcatgggctcaatcctgtattgctggaccataantttgaacaat

SEQ ID NO: 50326 - DNA, 409 bp, Oryza sativa
gttggaggcggcgttctcctttaattttcttatttcttctgtagacgatacaccttgctctccaacttgcaaatcttgcctcgattccaattttccctgtcatgagctgctttgtctcgctccacacttactgcatccatagcactaagcatatgcaccgcatgcatcagagtggcactctcttcaccatcaggacaggtataggttccatagtcttgaccatgaggctcgtgaggatgatactggaaagctgatgaatccaactcttcttcaaagcgttgacgcaactctccaatggccaccagagctgcttcttgacaagcctggctgtacgatcttccttcagcttcgaacttaatggacggaagggcttcacgatcactaaccaacgttacacgaacacgacact

SEQ ID NO: 50327 - DNA, 441 bp, Oryza sativa
  unsure (1)..(441): unsure at all n locations
agctntntcaaagtccaactttaactaatttatctctctcttagactgcttacgctaatgcaaatactcaaaggcccaccctaaacaatcttgaattgtcttggattttttttttgaccgggaaatagtgggggaagccctcatggttaaatttcatatatattaaaaggaatgaaagctgtacatcatgaaaaattacaagacgtctattcatgtttgcaaaataggtctgtcagctatcctaagtctaagtaaatgtagacttagctcctccttgagattagatttccatctccgaacagaaagttgtatatgtttaaagattaaatcattcctttgctttcataacagccaacaagccacaagaaagatcttcataaagcacgaaagatgaagtctggcactcctgtgagactgcagcattngatgaaattcctgtgt

SEQ ID NO: 50328 - DNA, 343 bp, Oryza sativa
gatcgaagttcgtagcttgaaggatatatctaatgttatctattctaaagcccactttgcgattctgccatttgcttcatgattatcaagtatgtctccgagtggaaacgatgtgaccaccatgacctagtgatccttggagtagtgatgatagtttcctgacggtgattaaaacaccgtataatagcttttgaacctgaggatatcttgtcttggagtcagccaatacctctctaacgaactagattggtgcgtggactttttgaacatggccttcttcttcacgctcaacaaccaggactgtgcttactacctgtgaagtcgccgattcatataacaacag

SEQ ID NO: 50329 - DNA, 355 bp, Oryza sativa
atgaattttatattaagtatgtatatatttaagacttgaaacccagtaagcaaattctaccgcaaaaacaattgacttttcgtcgagacagctaaaacaggaaacacctctcaattgtttgggaggaatgctacacaggatttatggagatgtgaatgatagaaaaggatgagatgatctgtagatcaatatactttatggattgtacgtaaaatcaaatcattgattgattatatgaacacattaagtagatggcatttataccgaacgagttatttgaacattgttaacatatgacttcgagagtttaggtatcaatcgtctaaagcattgtacatgctctaaatgattgaaa

SEQ ID NO: 50330 - DNA, 427 bp, Oryza sativa
cgctggcagggtgccttgacatcaggggagtattcaagcattcccgtgcaacatccacagaaaattgttctttgactagagcatccaccacttcttgctttgaagaaacctgcgtttaaagttcagaaaacagaaagcatatggtgaaacatatagcatccacttctgcagactcaattttgcagtcatataggtgtacatataacgctaaaaggccaacctgcataggcattcttctgagggactcaataagttcagcaaggtgatcttcgccatcttccccagcacgaaccttgccaggagtagcatttagaacccatacctttatgggacacaatattcagaataaacttatacaaaagattataaatatcacccatcattgtcacactaaaaccattcagaagagaactcatgattaccctga

SEQ ID NO: 50331 - DNA, 429 bp, Oryza sativa
agctttgttgcggagaataatatcgtgtacttatgtatcgcgtgccatgcttttgcatgattattatttcgcatcagggtaaagtgtacaaactctgcagagtaaaaactaatcgattagccgtgctcgcggtcatgagcggcgtgtggatatctattgagtatagacttatgtttattcttctaagtgctgaaatttaccttcaaattgtgttgagatttgagaatgatctccttgctgccacggaaggcaatgaggtgcatatttatacatgattaatgcctaccttgatgcccaatatgtcaagtactagcttgctgaaatttatttgaaagtaaacctgatttataaatgttttatgcaaataaaacttgctgtatgctaaaaagaaccatattatgcctttcttgattatatgccttgccagta

SEQ ID NO: 50332 - DNA, 447 bp, Oryza sativa
tctacactggaagatagcatccatgtcatccaccttatttatgtcatcattatccacaaataagctctgcattcatgcttcctttccaaagaaaaatcctttgcacagcaaaagaaaaaggagggaaaggtatggctaagagaaaaaaaaatacaaaataaactcttgctcttcagaaattggagcatgatgaaaaaaaaaagtagccataccctctccataaaaactaatggatattttggagaaaaagcatatgcacaaaggagaaacattttctttatccatattttgttgtctaccatacattccacacactatctgctttagtctagatatttcatttagtgatatatgtgaatccaagtatgcctcatttgatccttaccaagctccacatattcaaacttagtataggactaatatggcaatatctttggtgaggaatat

SEQ ID NO: 50333 - DNA, 435 bp, Oryza sativa
agcttcaatagttgaacaacactttcttgctcacttttataaagagtattttgatttcgagaaagtcaaatgaactttgaatattttggctaacgacggttagtaataatacaactatatttggtgcataaaagttgtgcctatatatttgtatttcaaatcaagagctttcacataatactgctctactaattaatcatgtggattagtctttgtttgtgggaaatgaggagtagtaggtgttgagcgaacaaaaaaacaagctgacttttcaaaaaataaaatcaacacaagcttcaagagttgaatagtattgctacttgcgtagttgcatatgtaagcatgatgaacggcatagtccatggggggcacgcctgttttaacaaaaggaactcacatttctgatgtggattcgtgattgcttagtttgacagc

SEQ ID NO: 50334 - DNA, 462 bp, Oryza sativa
  unsure (1)..(462): unsure at all n locations
tctgagtcacctgcggcatgcaagcttgatatgatagtntttaatgaaatatactctaattattggtaaatatacccacgtacacttacctttagttgcagctagaaaaggttatgttttactagcatattatattatacctcagttattgtcccatgcatcttacaccatagtttacttactaattagtaattattacttcatacttttttctaaatagatcactccattgacattcggactttctttttaccattactcctatttctttcaaatatgaaaaatacaagtcgtgcttaaaacaactttgactgacaaagcaagttacaataaaataataatatataatttttaattaagatgatgattaaggctatgttcaaaattagaaaacaccatctattgaaaagggcaaattaaagcggtaatttctactagttgttcgctgatatccctgctact

SEQ ID NO: 50335 - DNA, 323 bp, Oryza sativa
cgaaaaagtctttgcctcgttttgtttgttgtatcttgaatattcgatgcggtagtatttatatgggtattagttctcacgctttgttcaggagaagatcaagtgaccacatcagtgagcggtcgagctgacgaccttgcttggcgctgctcatctgatacttttgatctcaatggccgggcatttgagaactccgagaattgggcagtgctgtctaattaagggactagccgattcctcgatttgatggaacaactttcttaaactctgaattgtgctccggagaaaaacaatacagtgatgttctatctatatcagttcta

SEQ ID NO: 50336 - DNA, 442 bp, Oryza sativa
agcttggatcatattttcttcctttgacagttcattaatcatgcatgtgtagaatatatcatctggcttgacaccttgttctttcatctccctaaatagcacacatgatttttccttatcatgctgtttcagagcagcatacacgattatggtaaaactgacaagatcaagcttgactcctcgcactgccatctcatcccaaagatggtatgtttcagtgaaccttccttctctaaagaatccatacagaagcgctgtcaggctaaagttgtttagcacagcatagctattttctagatcagcaacaaattcatttgcttttgacactccactggtcaagcaaagtccacttattaatgatctataagtgtaattatcaagtttgagccccatttccaccatgagatcatataactggaatgcctttcttatattttcaaca

SEQ ID NO: 50337 - DNA, 384 bp, Oryza sativa
  unsure (1)..(384): unsure at all n locations
tctgatggngatgggttgacggggtttagaaaaaagctgtatttatagcgatgcacatttgcaaatgctgattaagtagttacttaacccgtgatttactgagtgtgggtagcagcttggccttgtggagttgctcacttgctcgagcgagtgaattaatttaaccaagagagtggtttatttgcggtcgcacgcgcgcggcagtgtccgttcgttttggcgcgagttggcactatgccgaaactgttcatttcagctttctgctgcccagttccctgtcgtgctggaggcccaacggatcatacaggccggccttgcgcatatgaancatatcggataaaatcaagatatttaactttttattattataattataaagatatt

SEQ ID NO: 50338 - DNA, 424 bp, Oryza sativa
gtgtgtgacatttgagctgcctttttcttattcttgataagagcgtgtatattcttgagtatgtttcttgttggctgctaaccatggcacgattgcgcaaggggaaacaagatggtcatgctcaacgtcaacatctacaccttcgacgagatatgacaacttcttcacgtgatgcatatgaggtacatgactataattttgcacaagttgcatgtaagttaccagtctatgatggaaagtatgattccgctgcatacattaattgagagctagcattagacaaacaatcttgatgagtatgacttttctaatgctcaaatgattaaggctgctagtaataagtgtaccggttctgcattcttttggtggcatactgtggggaataagcttgaaacttgggatgaatgcataatactgatgacaa

SEQ ID NO: 50339 - DNA, 322 bp, Oryza sativa
ataggtacacttttgtgcattatgggaagaaaattaccttgctacctttgacccctgctgaaattgtagaagctgataaagagcgagctgctagtttgaaacttgatgaatctgaatatcagcaagtggctaaatctctttttccaactaaaaaggataagctttcacctagttctaatgttgaggtgaataagttgaagggtggtgttatgcttgcaacgaattgcgacattgctggaattttaaatgatgatatgtgctatttcttgatatgcagacaagccttgggttctttagatgattatggtagttcaaacctcct

SEQ ID NO: 50340 - DNA, 402 bp, Oryza sativa
aatttctaatgaatttattgtggtgattttatacaaatcggaggtgcctaaaaaggtagcaacttcatcctccaatgggtttttttggtcatattacatttggagctatgttttacacacttttttgtcttcaaaattcttgttgttagttgatgagaaaaaaaatttgtgtggggaagaaagaatatatagaaatttactttatttgctaaagaaggttttataaaatagttgagaaggaaaatatagtgaaagttaatcttgaataatagaaaacaaactaaaatgaaaaattaacataagtacaacacattaatattagtttataacttataaatagtaaataagaactatttcgtgtaatatttcataatctttgtatgaataatgatatgtcattat

SEQ ID NO: 50341 - DNA, 393 bp, Oryza sativa
tgtttgagacgttccacacatacagttgactgactgcaaatgtgtacacctttacttactgctagctagttgtagactcatggttactgaaagacatatattatgccaatattggaggagataacaaactgtaccaaagttgtagcctttagaatctagacatgtttgattgccatacttgattggatataaaaggttgtttgactattcacacctaactcacttatgttgcagtctcctctttttctttgtaaagatatatttctgaagtacacctctctgatcttataatggaaacaaagtatcttctcctttcatggtggaaaattcttaaccttgtatctaaaggattaaaaagtgcttgcgatatcatattgtaagcctcttaaaatt

SEQ ID NO: 50342 - DNA, 447 bp, Oryza sativa
cctgcagctgcaagcttctggaaggttcttggatagcggatatctttcttcatctgataaatctgtcataatcagtgagattctggatcctatgacaaaaaatttattgtcagtgtcaaaaatcagtgactatgttctatcaaatgaactatcgagcatggcattggcaatggttgctgaagatagaccaataaatgatgtcttggaggagctatttgcggagcaggtatgattctcaaagctgatggctccatcgtctattgtatgaactagaggtgctcctaaaaaggctataacaatctgatcacatgttttctcacaaacatatatgccaatgatgttgaagctgtcatcatttaataatattttatccgagcctctgattttaaaataaatactatgggtctgaacctggcactacgataaggaattccattgactttacct

SEQ ID NO: 50343 - DNA, 161 bp, Oryza sativa
taagcttctgacctgttaaagcgtggagcccacctcatgggattgtttattgtggagattagtaccaccttgctgattctatgagagggggacctccttaatatggaggatgcccttctagccacttgaagcatgtgtagtggagagaacatgggaaacac

SEQ ID NO: 50344 - DNA, 400 bp, Oryza sativa
acaatcaaaaaatccacgaggaaaaatctgttcaagtctacacacaatgactggcacttccttttgtaagtgcttcatttgttctatatccacctctcttgcacatagatgcctaaaaaagtagctcagctctgctaaacacttccagatgtgcttggggaggaaatcacgaaatgccacaggtagcaacctttccatgaaaacatggcaatcatgactcttcattcctatgaacttgcctcgaataaaatcaacaccctgtgctaaaattgatgcataaccatcacggaatttaagagtcttaacccattgcaggaccaatttcttctgcgccttatctacactataaccaaactttcgtatcacccatccacccatagatttctcgtgatatgaaatc

SEQ ID NO: 50345 - DNA, 435 bp, Oryza sativa
agctttcgttttgtcgatccatccgtccatttgtgtcgacctagctagaaaggctgacctgtcgcgtcgtccatccaagatcgatccaaccagcaaccaggcatcagacaggctctttcttgtccagctgctgctgctgctagtacacatactacactgtctctgctgcatgcatgcatgctgctcacctcatctgattgagagttcagaattgttgagagcaagcaagaaattgagaaacggccaggacagattggattgatcttaattggcatatatgctgctcgatcgatactgtctgtcagttctcagttcgtcgatcgatcaagtctatatttggatatctgaatctctgcaaatgccaactcgaccactaagtcattcatcaatggacatgatcatagtaatgtcgatcgacgtgcagtgtcactcatt

SEQ ID NO: 50346 - DNA, 459 bp, Oryza sativa
  unsure (1)..(459): unsure at all n locations
tgcacacataccccgaccttgttgttactgagttttgatttctatatgatggatgactccaatgttcgaactagaatttatacgtccatccatctctattgtctntagaaagtaatccatacaaagagatggagggacatcgatcaatttttcatttagaagtctttacaatcactcgcaaatctcatgtatatatatggaaagacgcgcgaatcaattacctagttctaatcatcaattatgtggtcttcaattagcatgtagttatacgatctgcaaacactaatcaagtactcctatgcatgtgcattggcaccaaccgactgaagacgttattgtctcttcgcgctccggccggaccatatacatatctaactttatgaaatatataaccaatacatatctacctttcctagaataactggccacacttttagtatcttttataagtacctctac

SEQ ID NO: 50347 - DNA, 433 bp, Oryza sativa
gaccttgagtcacctgcggcatgcaagctctgaaacttaatttgaaaatttcaattctgttttgaaaattttaaaatatgggtcgaaagttttaaacttgagttgaaagtttttaaatttgaattgatttttttataattctgaggtaaaagttctaaaaattttaaattgaaagtctcaaattcttagttgaaagtttgctctttttttaaaaaaaattactttttttgaaaaaaataatatataaattaaattaaatggatgtagctttcttaaatggagattaattaatggatcacgctggattaaatttcatgcatgagccacctactgatcggaatatcggatgataaatttctcttggtctcttgtgtccacaagtcttttttttgctgattacattgtgattgggatggagggagtactatattgc

SEQ ID NO: 50348 - DNA, 458 bp, Oryza sativa
catgccatttagccatagtgcttggcctttatttctttatccagagttgatctgctagagagtgagcgattattaattgagcaagaaacagcctgccgagaatctactacagagttcatcaagtgtatgcaaagacattaacttctcataaaactactgatagtggtgaaaggattacaatcagatttgttaacgaccatattcggtaatatcaccttcgcaaacgaggattatattgaagtggagtctaagacagagatcgattctagaacatagcaagaatctgctggagtctggatccgctacgattggatcgtctattctgatgcagattggttaagtgatcactccaatccaccatatgactggggtcaacatctcgccgagtggtatgattcagatgatcgcgcactcgatttattctgaacaggcaatgtacatataatacgaagtatatg

SEQ ID NO: 50349 - DNA, 299 bp, Oryza sativa
  unsure (1)..(299): unsure at all n locations
cccacctangtccaccaggctgaantccccantatatggtggagtcccaaaaaagcgcatttgttctaactgtcatctgaaggggcactatataactggatgccccacaaattcggagaacacatctaaaaacaaagtgatcaatgtgtgcaccaaatgcaagttagctggccactatgcatcaacgcgtggtgtcggtgtaagaaccaagttcatcttgtttaaataccaacctggaaaatctcccatatttgtcgggtgtctggacaagcttcacacaacaagatccttttctcact

SEQ ID NO: 50350 - DNA, 421 bp, Oryza sativa
  unsure (1)..(421): unsure at all n locations
agcttgagtgtgtgtgatatttgagctgccactacctagtagttgataggagcatgcatatttttgtgtgtttcttgtttgctactaaccatggcaggattgcgtaagggaatacgaaaacatcgacttctacaccttcgacgagatatgacgacttctcccaatgatacatatgaggtacatgactataattttgaacaagttgcatctaagttacccttctatgatgggaagtatgattctgttgcatacattgattgggagctagcagtagacaatgaatttgatatatatgatttttctgatgctcaaatgattaaagctgctagtaataaatttacctcttctgcattattttggtggacttatgttagtaataaacctgaaacttgggatgaattganaaccctgatgagaaaac

SEQ ID NO: 50351 - DNA, 457 bp, Oryza sativa
aaattattaaatatgtctggatcgtttttctaacgaaaatggaaaaacatatactgattactacatgattattttctatggtttgctgaagtcatcagagagtccatggcatattgaaaattattatcagatatcacatgtcaatgagctttgcacagaattaaatgtcttatcctctacaaagtgaacatgacatctgaaatggccgagaataatgtaaatgatagcctgtcaattataatatgagaacttgaaatatcaaacataaataaaatccatagacaaaaacaacaaaattgactcatttgcatgtaaaagggacttgtacgtcacatacctggcaaaagacgaaagagttgaatatgagagtattgatgggtttatcagatcgaggaccgtcaatactaaggagtgtctttccataacccatagagtatccagcccaaagagctgattc

SEQ ID NO: 50352 - DNA, 420 bp, Oryza sativa
agcttagaaaactacggtggctaatcacattctccaagcagcgagaaagggccgagccatgctacactcccaacagatcccaaaagcggcaacaacgccagctaaagaccacagatggcattccgagtggatggactccagaaccactgagactgtagagaaagcagagtcgaaaaccctataattccattccttccacagctgccaagaaaccaggagcaccagagagtcaaagccggcgcggagatgctcacgtaagcaggccctggaggacagccaccggtcctagaaccagctgcacacggagctagacctgccgagcaaacacgcagtcgaagaggatgtggtttgtcgtctcaagatcctgagcacaaaaggggtaggccgagtgactacgatgccatgcttctggaagagatc

SEQ ID NO: 50353 - DNA, 440 bp, Oryza sativa
  unsure (1)..(440): unsure at all n locations
atgttnggattgggcggcacattgagcaanaactaacacgctgatgcacgcccaaatgattttgtaaagaatacagaaatgtaacattaaaaataccatatccatattgtcagatgttgtccacgagaatgatgataaaggatgactctcatacaagggtcttctgttgactcccttttcaatatctgattcatagagatggagataagtaccgaaaggaaaataactaaaggagcttgcagttaaatatatcaaaactgtgcatacagctacagtgagagaaaaaactgaattgaaacagtgtccttgttggagggtgtgactgctaaaagatctaccttgtgttcacgcgacacacatttcaataacagcatattatgtctcaactggaagcacagttcacataaatcagactgcacattgattaagccccctaaata

SEQ ID NO: 50354 - DNA, 429 bp, Oryza sativa
agcttgcacacatgagccctacacattctttgtctggcctatctagaaagcaagttctgtatcacacttgaaattactagctcttggaataagttttttttacctgtttgttgcaaaataagagtatgtttggaaggactccaacccctaaatttaactgcagagttagatctgaaataaagttgtaaagcgacctaaactcagctccatctccctaatttattttgtgaaagtattccaacgaactccaattccattttggatgaagctaaaactgtttggctaggagaggtgaagttggagctgaagctgctaaacagaccgtaagttaatttttgagtaatcattgtattgaagttgataaaagtggaaaataaatatattcggaatagataaaaagaaaaatagttgtattgagatcttataaat

SEQ ID NO: 50355 - DNA, 105 bp, Oryza sativa
gggtacgtatgacggttagcgaaggggaattatcccaagagccctccatccatcatcagggatgcatcttggacgttcactccatacccctcatccatcggtgga

SEQ ID NO: 50356 - DNA, 313 bp, Oryza sativa
aaaaaccgggaaagtgatttttttttttaaaaccgcacagggaaatatgctcctccgcgcccaccaacagcaaaaaagcaaaaaccatcatgacaaaatacatagaagggaagccctgccatcaaaactgcaagcgaaaacatgctcctctgcgcgtgtaaatccgcaacgaatggaaaaaacatcatattagaaagaattatccaataaaacaaatctcaggaaaagacaccccaaacttaaaacgcactacaacgcaaaaccgacaaatgtgagagaaacatcccaccaaactgaagacatgctcatacaa

SEQ ID NO: 50357 - DNA, 299 bp, Oryza sativa
  unsure (1)..(299): unsure at all n locations
ttcaacccccccacccacatgcaaaatcgncccttgaaagttcagaagtatgattcctcaacattccataaaccggaagatcccccacaagtgacccctaccgaatcttaatccgagttaaggaaaatcgtcttcaaatagtctcaacttcaatgatttgcttcactctctattatggttggcttcttcgctattctcttacttcaaagcttaatatttatggcacatataaatttatccttatatataactcctgacataaatatatgttgagatctaagagctgatacctcacagaa

SEQ ID NO: 50358 - DNA, 462 bp, Oryza sativa
ttaagtcacctgcgctgcagctttatcctttgactaaaacctaatatttttttaaggcgccaaatatcttgcgccaaatctccggttatggcgccaaatctcgacctcaccagacactatgcgccaaatcctccccacaaatacccaaatctttttccttaccaacaaccccccaagctcctagcgcggcagctccaaatccttctccttcctgggctcttggctcccgagaatgctaattggcgtgtacgcggcgccaaaaggccacggaagcccatgtacactaccaaaagcccacatgtgtttctttctttttttttcctttcttttacagccacggtttttttccttttttcaactcaacttttcaaaactttgaaatgaaatttgaaacattcaactcatatttgaaaatcttcaactcaaaatttgaaaactttcaactcagaatttgaaatttcc

SEQ ID NO: 50359 - DNA, 468 bp, Oryza sativa
  unsure (1)..(468): unsure at all n locations
gccggcaaccaatgtcatatttgcgagctcattactgttaatatgggggaaatcagccgtgtgaagagaagatagaaggaacaaagctgactccaatcagaaatgagatgctggcattaaaactagaagcaaaaaggaagaaatagcactaaactgaaatcaagagactaaagcaatatataaatatattttttaaaatactattttcagccaaatttttctaaataccaaaactctttttttaaaaaaataccaaaacctctcttttttttccgctgaagaatccccctttttttaaccgaaacatcttttgtgccgaaatggtttttctaaaaaatagccgaanacacattttctttgataatcaaaaaggcacaaagaacaaatatatatcgtttgacgaaactcataaactcataagagaacagactcatatatttagactcactggaccacttcaaaatgggg

SEQ ID NO: 50360 - DNA, 412 bp, Oryza sativa
  unsure (1)..(412): unsure at all n locations
agcttgngagaggctaaagagaagacaatatattgttttattaccaacaacaacaagcccaacgacaataagccaaagggttcttaccaagggaggaagatggagaatcttatgaaagcttttcaacaagtttgcgccgccttcgagccactaagtgatgtagatggtgaaagtggagatgatgataagggaaataacgtctccgatgtttgctttacggcgcgtggtgaagtgtgagatgatgatacagagtatgaagataatgaggtgagtgcttttcaagaagctattaatattttgagtgcaaaaaataagaagtgtgagaagatgtatagaaaacaggaatttatcattgaatctcttaaatctgaaattgatacgttaaaatctcttattcctaatgatgatgatt

SEQ ID NO: 50361 - DNA, 282 bp, Oryza sativa
tcaacttagtcgactcatttgcgaactgcttatttccatacccgaggaacccatgggatttttttccggttttaggaatggtttcaccgtttctttttcgttttatctttcttttttcttttattcgaaccgatgatatcatcagatatctggcgacggtggatctgcgagaatgttggactccaagttgcgaactccctcttcgctccgccaaccactcctctcatccttccaaccggccgcttcccgttctctctgccccaatgcagcgaacgtataact

SEQ ID NO: 50362 - DNA, 440 bp, Oryza sativa
  unsure (1)..(440): unsure at all n locations
agcttctcngcgttggactccatcctcagttgctgtgtttgggcaaaaatgcgtgcgtgttcggcgactcgcacttgagagtcgagacggggaaatggtttgggcgaaaaaccctagctagccttctctcgggaatctcaaccgtccgatgcggggctacaaaacgaaaccgaccgacagacaccgaccgagcaaaacctttcgccgcgcagccacctaaacccctctcctcccccttcctttcccgccgccgccgcgcgcgcgagccggcggtcatggcgcccgctgccgccaccattcgcgacctgctcacctccttcagccccgccgcggacttcctcgccctctcctctggcgacggccgcatcaatgcatggagctcgaagctttccgctcgcccatccttccaaccgcctggagcttgacagttactgatgatg

SEQ ID NO: 50363 - DNA, 346 bp, Oryza sativa
  unsure (1)..(346): unsure at all n locations
tgcagcttgtggatgcatcatttcttcctttgcactggatcccatcaaaactccgaagggaagcgngcttgggcgaaagtantactaggatgggtgacctcctgagaagtcctcgtgttgcatccctcctttttgtctctctctccccccttttgactcgcgccgctgcgttcatcgtgttgtgtcgccccttgggcggcgaaactggggagaatcggatgtaacattttctgtagatgtccgtggatatatcatttgcctgattcccagtccgtatgagaaagttacgcctattttaaaatatgacaccccaatgacgctcaagcatgtcggatgctatcattcc

SEQ ID NO: 50364 - DNA, 415 bp, Oryza sativa
  unsure (1)..(415): unsure at all n locations
ttgaacacctacttgcatccacttgtttactctcatatggncgcnccgacacctcccaagggctgtgttcgataatagaatctatttcactaccgacagcctccttccagtagtctgcatcaagagatgcatatgcttttgaaatcgacttatgagtggcatccacataggtcacagtggaatcattacccaaagacttagcccgcctttgtctcttactccttctaggagcgtcactgtcattctcctcagagacatgttcatgtgtatgtcaattcgtcctcggggcgggatgaaccggaaatatttcaatggctggtccactctatgggttctttttgggaaaagcttcacgaatgggcgtcacagattcattatggtccacatgctgttcgggctcgcattcactttaaaa

SEQ ID NO: 50365 - DNA, 423 bp, Oryza sativa
  unsure (1)..(423): unsure at all n locations
caagcttactcgctcacaagaagttttctctttctcacaactganaaaatgttgagaacgaatagcacgtgtgtaatttttttttttttggaacacaatatgaatagtccctactctgcgtcgtgggatgaactatagggccaccatgttatctgacaccaacaaatttaagtacaatctgaaccaagaagaaacaagaacagtagaacacatgcgttgcaattgcatttagacataagatgagctctgcgatgagggtttggacatcgagctggaacctgcccatgagggcaagcagatccgcaagacgactctctgatcgcccttgccggtcttgaaaagaacaacactttactgaaaattagtagtactacagtgccaaccagttgattaactttagagcatggatcattatggtcatgc

SEQ ID NO: 50366 - DNA, 419 bp, Oryza sativa
tacccggcacctctaagtcacctgcaggctgcaagcttgaagatgaacagtatacgggacgctattatactttcgtcttgggctggctgaagaacagaggaaagaaagaaagagaaggggagctcggctgggccgacttgggctgcacagcacgcgcgcgaaggagagagatgttgggctgaaatcagcccaacggcttatgagaggatttaacaacttttcaattaaaataatcactgaaatgatctttgaattgttaaaaatactttcaatgctcaaatagtttcaagaaaaatcctgaacatacttggacactcaaagtacttaaaaaaattataagcagaccatttaatgattaatttaatatgtgaataatcactgaaatgttctctgtatggttaaaattaagagttgagctc

SEQ ID NO: 50367 - DNA, 254 bp, Oryza sativa
gtacaccttcttctgggacttgccggtgctcttcttcttccacagcttaagctgagcaatgaactgcaacaagcacagaattgattcaatcatgttacttacagctatactcatcatgtttagtgagacaatagatactggccatcatattttacctggctagtgaatgagcacgacatgacaaaactggagtggccagtagcgcacccaaggttcatgatacgaccctcatcaaggacaatgatgccagagtt

SEQ ID NO: 50368 - DNA, 432 bp, Oryza sativa
  unsure (1)..(432): unsure at all n locations
agcttatgcatagctattcgaggtatatattcttaaactcataatctttgcgaacaagtccaaacttgaaccttgatactcaatttatttaaaaagcattttggaacactgggcacatgtgccacttaccgttggaacgacataatcattagtcggacacctcaaccctaatgcgatggcgggcgcgcatcaagttgcgtgcatgtgctantgctggtcgtgattactgtatacttcttttggggaagcaattcacaaacactagctaattactactactctgtgcatctgccatgcatgacatgacaagtgcttctcactcatgcacccatagattatgaatgcctatccttttggtcacacataactacaaactcctctataattgcgtgcttagctatacgacatgnatgtgttatngtagctatactc

SEQ ID NO: 50369 - DNA, 398 bp, Oryza sativa
  unsure (1)..(398): unsure at all n locations
tactattgctatactatgaaatacttctttatataataagcngctnttagtattcgncctcttatctggctgcaattttcttttaaattgaagctggaggacaactctgttgatgacaatgccatattttctttttttgtaattttctctattatttggtttccatacattcacacatattttttcttgtgatccattccttccagaaaaacgagggatataataatatagcaccttccaaacagtataaataatctcatccatctttatttctcttcatattagctgaaatagggtgtactcaattcttagtgtaaaaccatgaatgtttaacgtgccttgcacgtgcacacttactattattcagaatatgtgttcaactttatattaaagattgg

SEQ ID NO: 50370 - DNA, 121 bp, Oryza sativa
  unsure (1)..(121): unsure at all n locations
agcttcctcagttgtgctttaacttgctattagttctgcttactaattactccctccggccctaaatattcgacgctgttgactttcttaaacatgtntaacccgtccggcgtattcaggc

SEQ ID NO: 50371 - DNA, 424 bp, Oryza sativa
  unsure (1)..(424): unsure at all n locations
tgcgtcagtgtaaccatatacagcgagctctttctgttcttcatatactangaacatatccttagttcttctggagtacttcaagatattctttacagctatctagtgactcgcctggatctgattgtgatcggcttgttgcactaagtgcatatgaaacatctggacgtgtacatagcatagcatacataatggatccgactgccgaggcatatggaatcacactcatcttgtttcgctcatcagtcgtttgaggacactgattcttgccaagattaatgccatgtgacatccgttagaaacctttcttagaatcttgcatgttgaacctcttcaacatccttgccatgtatgtaccttggcttaatccaattagcctctttgatctatctctatagatccttatggcccaaatatatgctgc

SEQ ID NO: 50372 - DNA, 425 bp, Oryza sativa
  unsure (1)..(425): unsure at all n locations
agcttcccggtttagctcgcttttattnttttccgctgcatttgtaatcttttctatttttgtaagacgtggatctgtatgtcaacaattgtcgtttgtgtaccctggctggtcctggacagggatttaatgcacattcagcttaaaaattctggtttgagaatttctgggcgtgacacctgctgactcgggtagctagctagtcgtagtatgcagtacttataaaggcatctgtagttgagttcggcgagaaccatccacggaaacaaagttaattttggttcgggtgctacttcctncgttcaaaaaaaagtcaacctagtactaagctgtgacatatcctggtacaataaatttagacacagagtatgttcaaattcattatactagtatgtgtcatgtcgtagtacgaggttaagtttttt

SEQ ID NO: 50373 - DNA, 128 bp, Oryza sativa
atttatacattattcaactaaggtgttattgtaatgtgaaaagtcaatgccttcctatacaaaggcatatcttgtaattggaacgcctggtcaccataattagaacttctttctttacttggcgcatc

SEQ ID NO: 50374 - DNA, 419 bp, Oryza sativa
  unsure (1)..(419): unsure at all n locations
agcttgccacgtacctnctcgaactgaatctccttctccacttgaaactcatacacctcctccttttttcttctacagactcctctggttgctaaagttgagttggtgatttctcctcatcattttttctctatctatctctaaacttttccgattactcagacatggttgctatggctatgtcatcatgttgttgaggtgttgggctaatgctccactagttctagcatggaactaatcttccagccgagcgcctgctacttctggggtattctactgctacctctactattgttggcatggtgtgctaatattgctgctgcggctgctcttgtgagcagggtttgcaactactactgctgctgctaccatggcttcctactgctgctactgtctccaaaattgagacagcttatgct

SEQ ID NO: 50375 - DNA, 291 bp, Oryza sativa
gtggctctgggtagctgtatcgctccggtgtgctccaactctttgcttcgctacatctcgcttcgccgaaggtgaggatatggcaaaagaaatacaccacgggctgtgcggtgcgcatcatgcagcaataacggtcgcttccaaagcgcttcgtcatggtgtgtattggcccaccgtgccgaaagattgtgttgaacaagtcatgaagtgcgaaagctgttaccagcctggctgaagccaaacagcatcccagtacgaacaacaatatatcgcaccatactggcgcttctc

SEQ ID NO: 50376 - DNA, 431 bp, Oryza sativa
  unsure (1)..(431): unsure at all n locations
agcttgtatatgatagttntttaatgaaatatactctaattattggtaaatatacccacgtacacttacctttagttgcagctagaaaaggttatgttttactagcatattatattatacctcagttattgtcccatgcatcttacaccatagtttacttactaattagtaattattacttcatactttnttctaaatagatcactccattgacattcggactttctttttaccattactcctatttctttcaaatatgaaaaatacaagtcgtgcttaaaacaactttgactgacaaagcaagttacaataaaataataatatataatttttaattaagatgatgattaaggctatgttcaaaattaaaaaacaccatctattgaaaagggcaaattaaagcgggaatttctactagtttgtcgctgata

SEQ ID NO: 50377 - DNA, 360 bp, Oryza sativa
  unsure (1)..(360): unsure at all n locations
agaaatgtacatcttgccttgtctctgtgttctgcgnataangaatttttgatggaggagtatataaatggttattanttttcacgctttgtccacggagaagaccaagtgaccacatcagtgagcggtcgagctgacgaacttgcttggcgctgctcatctgatacttttgatctcaatgggcgcgcgattgagaactcccagaattgggcagtgttgcaacagaaggggacaagccgattcctcgttgtgatgttaacaactgttctataactctgatttgtgcatcacgagataaacaaatacagtgatgttcttatctataatcaggttctattctgaatccttcgtttcactctc

SEQ ID NO: 50378 - DNA, 284 bp, Oryza sativa
  unsure (1)..(284): unsure at all n locations
agcttgatcaccatgccgtgcgccgcgcggccctcgtttatactctgatgcgcgcgcagcacttgacgacgactgtgaatgtgaagcggtcggagcgcgcgctctcctcnagcatgccgcggtaagccagaagagcgcctgtggtgaggcccgcgtccgcgaagccgcggatcatgacgtcgtggaggaacgcgtctgtgcctctgacggctgagagggcctcgactgccgtcttcatgcggacatccgcggcgagggagactaccatggacttgtagcttctc

SEQ ID NO: 50379 - DNA, 245 bp, Oryza sativa
ccttacctgcccacaccttgttctattcctcataaaccctactcttgctaccggatcaccatcctcggagctgcaattacagtgagcctctccggtactcaagatgggcatgtcataatggctcgggctcggagacctcgacctcctcggagacgagtgggcagacgatatcttgatgtgcctccaccggcaaggcccgaaagatcggacggtcttctctactgattggccagaaagaccggacg

SEQ ID NO: 50380 - DNA, 468 bp, Oryza sativa
  unsure (1)..(468): unsure at all n locations
agcttaanacactcttattgtgctgcgacatacgtatttatgtttatattagttaatacaaggcaagtgcattatgcttgtgcaaacatagaacataatgaatatgtgcagtccaatgtgcattactactaaaatgctggcagtaaatgtgcacattggtaccaagttatcaaatataatcaggagtacatgttacaatgggccacacatctgacagaatgaaagaaagatagtttgaacattgtaaacataagataaactgcatatgttatatacgttgtagatgagcacantttttgtcattctctctatatacatcacaaagaatgtgtgtacagctagttgaatatgtatcaacatgttcctaaatgacttgtacaagatctattctaatttactgatacactacatatcgattctgtttatgcagagaacacaacctataagcatgaccatgttacattgact

SEQ ID NO: 50381 - DNA, 418 bp, Oryza sativa
gcgggctgaccatggaggaggtcatcttgaagcccgcctgcctgagcgcgccgaggatcaccggagctgccgccgactgccaagacttctatcactcttcatgccggaggtcaagcatcacgcatggcgtctaaaccaccggatgacgatggaggcaagtatggctgccgttcatatgaaggacgaccggaggatggcgagccactgctgttggatggcaacaagctagctaatgcctcgtgtatatatccagtattgtggatcaggggctacaatctgacactacatgtcatcttgctacagtgcatgcatcaatccatagcgtggccttagaaatctgtttgtcttttataattcccgattaaataacaactttgattaatgccgatgcgtcgacataacatcttaataactctcc

SEQ ID NO: 50382 - DNA, 370 bp, Oryza sativa
atgtgatggtatctatgaacacctccaatcccctgaccgcatgccttacatacaacatgtgcgcctggtattcgagagcctacacccgacaacgctatatattaaacataagacatcatggcaccctgtggtgctcaatgagctatccggtgcgaccgattattgctttttgtgatatcaggagtgatgtgcagatgtgtgattacctcgaacaacatgttgccggcgatgtcgaggctaaaggaactaatttctcataagaaggctatataattaatctgtgaaacctcgttactacatataataaaaagagccccaatatctcattggatgttattgacccaactcaaatattatatcgatattatga

SEQ ID NO: 50383 - DNA, 437 bp, Oryza sativa
  unsure (1)..(437): unsure at all n locations
tgacattantacacaacagcctaattctggtgatgaatatatggtttcattaccggcgattgagccgacgatgatgatgcccttggaagggtattctgacgatgtgaagtccgctatgtacctcctggcgatgaagaagtgcccgacgtggttgacgcccacgctcatctcgaagccgtccgcggtgaagctcggctgcttggccgtgggcttgtacacggttgcgttgcacaccaccacgtcgactggcatcttcagctcccggacgttgtcgacgaactgccttacgtctgcgagcgacgccaggttaatgtggactatggtgtctctgcctttcttatgccagcggcttggagtcctcgacgcttgtgaattctggccttctttctacatgtcactctcgtcttcccatctctcttcctcctcagtctattcgt

SEQ ID NO: 50384 - DNA, 168 bp, Oryza sativa
gcaacccaattcagtcgatgccacttggacagggaatgcctgaacgtgcacgtgaacctcatggaggtggcggaatggttttcctgcatagtggtttctgagtcatgcctgatggcgttatgaatttatgcataccatgtaaggatctttctggccaatgtgacctgg

SEQ ID NO: 50385 - DNA, 419 bp, Oryza sativa
  unsure (1)..(419): unsure at all n locations
atgaatnggagacgagagatattctttatgcatgcacacagcactgctgtgtgtggatgataaccctgccaaccggcccaccatgcaagaagttgttctgatgttaaactgccacactgctctcgctgctaaacctcgttgtccagcttacctaaaggcggaaattgtgtcttccatacatagcagtatagcacatcttttaccgcaatgacaacttatggagcttaggattcatgtgcatgttttattgttcttgcagcacttacctcttttatgaagatgttaaattcttgagctgttgccttcaaactcaaatggatgaaacatggacgagccatattctgggaaccttctcaagatcttgttgccttccctatgggatagaagccctgtctatactctgaattgatgaacaatct

SEQ ID NO: 50386 - DNA, 332 bp, Oryza sativa
  unsure (1)..(332): unsure at all n locations
tagctatcattattacttccgatgaatcccngaagacgctactagctaactgttaacccttgcagaattatatgctttatgccaccacctgttcctcatttgttagctttcatcaaatgtgtgtttaataaattagcaacccaatatctggtggctttttggaccttgcaagcctagctttcgtctgcttatgggaatttataaatctgaacacgcatctagcttaaacatggcgaacaattgcgaatggaagtgccttatgctagctggagactaatgtcatgaacacctgttgctacagctatgggtttatcctctgatagattatttgg

SEQ ID NO: 50387 - DNA, 305 bp, Oryza sativa
tatcacgatcaacaagattcgaagcatgtgccaaggaagaagggagattccctttgaagaatttgccgccaatgaagagccagcatatattatgcagcgaggtaccaatgcccgatggcatcttgccgctgaagcggttgtgttcgaggctgagccgaatgagcacccacatgctcatgatcggctctggaaacccacctgacaaccggttgccgccgattgtcagtatctccatctcgcgcagcgccgcgagctcgcctgggatgccaccctcgatgccgttgaacgcgaaacgaagcatcctc

SEQ ID NO: 50388 - DNA, 296 bp, Oryza sativa
aggagattcccttggaagaaggtgccgcccaagaagagccgccataaattatgcagcgaggtaccaatgccggatggcatcttgccgctgaagccgttggtttcgaggctgagccgaatgagcaccgacatgttcatgatcggctctggaaacccacctgacaaccggttgccgccgatggtcagtatcttcatctcgcgcaccgccgcgagctctcctgggatgccaccctcgatggcgttgaacgcgaatcgaagcatcctcaccgtcgtgacgttgccgagcgagggagggat

SEQ ID NO: 50389 - DNA, 243 bp, Oryza sativa
tgaaagcacgcaccaccccaacttagttttttgagaaatatcaagatcaacaagattcgaagcatctgccaaggaagaaaggagattcccttggaagaagtcgccgcccatgaaaagccgccataaattaggcagcgaggtaccaatgcccgatggcatcttgccgcttaagcggttgggttctaggctgagcccaatgagcaccgacatgtgcatgatccgctctggaaacccacctgacaa

SEQ ID NO: 50390 - DNA, 223 bp, Oryza sativa
  unsure (1)..(223): unsure at all n locations
cgtcctgtggggatngtttatatggtcaattcaatttctaatcacagtcgaaccgngtgagcacattgataagctnttgaccaaacaatgtagtggttgtcattagcactactagtactcattttgaattcatgtcgacaatctacaatttacccacatgtggcaatctagcaatgatggaaaaagggtgatctacataatgttttgtttacctactctcctt

SEQ ID NO: 50391 - DNA, 205 bp, Oryza sativa
cttcgtcttggaaccaccaccatgttctcttcttctcctgtggatgacctcacggaggaactctgtcttcaatactctatccaccctcctcccgatgaaggcctgacgctcccgagcctgccgccgcactttctgtctgaccggtcttgcgcccagtcgcacggcgagaccgtgctcaatcacctccctggggactccgggctta

SEQ ID NO: 50392 - DNA, 285 bp, Oryza sativa
cccgccgcacttaggacgcgagggttttttattttctaaccaaccggccttttacggaaggccgcccgtaaactccgtaccactcctgggcctgacacggatacggaattcgtgcgactcttcggcgctacacggactttcctccctacgcacccgactgcgatataacgccctccgctggggccccccccggataccctggtctcaccccccctggtaaccggcatactggccacaccgtttcgcatatcagcctcttgggaaagggcaaccatggactgcctt

SEQ ID NO: 50393 - DNA, 454 bp, Oryza sativa
  unsure (1)..(454): unsure at all n locations
agctcgtaactgaaacagagagcatggtggaacaatatttgttacttttgacattcagcaatcaggcacgcatacctctttagttccctgtacaatttccggtttcaactcatccccactatctgctggttgtcctatagttttacccatcatggtcgaagatttaggagacactacttccttcttaataatgaaatagtcagtgccagtgaccaataagatgatcatagcatggacaaaactttcaatacaactgttagaactctatgaactctctctgtgacagattaccattgccaatcataaagctgtagaactttgttcaaatgaagatgataaacctttcaacaacacaatgatcatcanacaatggtgatataagctatacatttgaaaacgatgagctatggttctactaactgtanacagtagtttccaccagccacttcaaata

SEQ ID NO: 50394 - DNA, 252 bp, Oryza sativa
  unsure (1)..(252): unsure at all n locations
cgtcctcaacgccactgtcacacttgacgctaacgcatgtgaatncgcccctcctatggccagggccacccatcattgtcatagccagatctacaagagaggccagtggcggtggatccaccgctcctgaggccgccgccaccacatctgcgatggaaaacgctggctgtgctggtatgcatggaagaatgccgttgccatccggtctttgatggagaaggcgcacatcacccgatctgcgaggtggttggc

SEQ ID NO: 50395 - DNA, 463 bp, Oryza sativa
  unsure (1)..(463): unsure at all n locations
agcttaagctgcagctgtttatcttcatgaatttatgtacagagcagccggcggtaacacggcggcagctgctgctgctgcttctcctcctcctcctcctcctcacctcctctcctctctgcagccgcgtgtccgcgagtgcgggtgcgagagcgagaagcaatggcggctgcagcagcatgagagtggtgaggcatctcccggggttcgacgggccgctcccgttcgagctggagaccgggtacgtggaggtggaccacatcgccggcgtccgcctcttctactacttcatccgctcggagcgccgccccgccgtcgacgacgaccctctcctgctctggctcaccggcggccccggctgctccagcttctccggcctcgtctacgaggtcngacccctcaccttcgacctccaccatggccgccatggcggactgccgagactgctgtacaagccggagtc

SEQ ID NO: 50396 - DNA, 326 bp, Oryza sativa
acactaactaatgtaaattaaccatacaaatgcaagctagccaatcacgtatattttacatgtggatcatccctgttgggattatcatctccctccattccttcgatatatactaacagagcatataatatgtgtatataacatatcactcgatggttcatcacaatcaattaacctgcgtgataatgtcgcgcttattattacatgaaaccacatctggtggtccaatctaatacacacacactacatctaatcctctatgaatatagcaccaccatctgctcaaagctaggacactcactgatcaactcaatgatgcccacaca

SEQ ID NO: 50397 - DNA, 472 bp, Oryza sativa
  unsure (1)..(472): unsure at all n locations
cacctgcttgatgcnagcttccctctctacctttcaaacgcatctaggctcttgttctattcatctctagtcaacgggaatcgccaaaacaagacatcgttgttggtgaaaccgaactcgggccttgggccttgtaataaactaagcccatctcggaagtgtctccctccacctctacgaattagcacttatccctatctttattatcttctataaatagctntgtacatccttacaaacattgggtgttatctagttgaagtttgccaagtgccattcaccttgtctctagtcctcgttcgattagtcggcgactatagattcagagcccccaatatttggtgtgttatttgccgggttgatatatctaccacttcaatcgcactatttcttgngctcatcacctattccaatatttaaatgcatttatcttgtcttgcagtgtctctcggtgcattgagggacatcaccg

SEQ ID NO: 50398 - DNA, 419 bp, Oryza sativa
  unsure (1)..(419): unsure at all n locations
ttatgtggtaaggctggcttctaatggatcgaatactgcaaaagttgtgcctctttctgttgtttgcttttgctatggcgtccattttggttcagatattgagtcctattgctctgattagattgatcaaaatggatatgttgattgggattattattggaaaggtacgaagagatgaagtctcgcctatgattggtccttctagatcaagccaatcctgaaaattccacgaggtgtgatttatgtcttcacaaatttcagacaaattgacgctcctcgatatattgttcctgtgcaggtcatgaaacattgcataactcgcgtgatgaagccctctcgctataggtactgcataatcaaatcaaaggcgacactggagtctgcttgtnttcctccatcactcctatgtctaaccatct

SEQ ID NO: 50399 - DNA, 504 bp, Oryza sativa
tattaagactctgactgtactgagccacactctgcattctaagttatagatattatggccgtgaaatattcgccgagataaaggcgtttgtccattactacaaataatatactgctcaaccttaaaatgttctccttacaattacagggaagaacgtctatatcaatctgtaagccatataagaccttgttgtggcaaatgatatcaatcaccgacagggtttaataaagctacggttgcaacatattgactgacatgtggacgaatcatggaagcaagatttgtttctattccaatttgattagatgtaatagattgcagcatatggactgacatgtttctatttcacttatgcaatatatagtttgaatcatgacattgcatccaacactttccagatggaatagaaagaatcctaccctgttgtagtctatacacctgtctcatataggctgtcgactctcctgctaattattttcttccttaatatatacgcatatgaat

SEQ ID NO: 50400 - DNA, 279 bp, Oryza sativa
agcttgcaatattccgataatactttctccatttcagaatataagactttctagcattattcacattcatatatcatatagatattgtcgagattcattaacatttatatgaatatagacaatgctagaaagtcttacaatatgaaacgatatgaaacggagggattatcagttgcagttctctataataataactttaatctatagaagtaattattttatcttaaaatatgagggattgtgattggatatgacacattgctggacaggattgtacag

SEQ ID NO: 50401 - DNA, 467 bp, Oryza sativa
  unsure (1)..(467): unsure at all n locations
tcagctgaaccataagcaagcatatagtngatctccatgagtattcttccctgtagcagatagacatttagaggcgaacaagataaagatccacaacattctaaaaaaagacagtgtgcatgtcaagccttgaccttatcaagtcttgccacaaagcaagcaagagttcgcacataataagcagtttcttttggaaagttgaaccctaaacgaactgcgattttgatcgacgtataatacgagctggtaattacatgatagcattaataccaaaagttcacatgataaacaatgcagaaaaatctagaaaaagcatagttgaatttcagatactgaccacagtcctcctggaatgatgtgccagctggaatcaccgtacgaacctattgaaaaggcataaagaagatacacgatgagttgttcatgaaccggagattgatattggaattgtacaattacatataaat

SEQ ID NO: 50402 - DNA, 329 bp, Oryza sativa
cgatcaaagttgttgtactatgctcacggtggaacgcttaacctatttgatggctccctggtgttcagcgatcagatacgcgaggctgccacttgactaacggacgtagtggaagcctcttttcaaggcacgttctgacccgatagagagaaggacaagctgttactcgccctgcagactcccgagcatccaggacgaacacgagggaaaggcgttattccttggaagattggattcaaggaggacatccacatgtacaggattctgctgaagagcaagagagataccgaggcgaagattgcagatcttgagtacagggtatcgagcta

SEQ ID NO: 50403 - DNA, 427 bp, Oryza sativa
  unsure (1)..(427): unsure at all n locations
gtggaattcatcgaacctctccaactcatgatgtccattgtcctatccataagacaaagaatcacgacctttctagctgcaagggtcttctcatcgccatgaagacatcaccacctaaagtccagcaatcacaaatcccccctacggatacagacaatgaacaaggtgaggcgactacatcagatcgattcatcggagtaatcgatatcgatccccacgaaccatctgtcctacatctgctcgaggatcagggcctcttcatctacaaatacgcgacgcgacgtgtacgctatcgatggaaccaacacattcagaggcactaacgcngagatggcggatgaaacgactaccctgacgctggcccaacatatcagaacccttcatgcgatattgagagatagccctttctatcccgtcctgaacactg

SEQ ID NO: 50404 - DNA, 343 bp, Oryza sativa
  unsure (1)..(343): unsure at all n locations
agcttaggcctgacggtactattgaaaagtacaaggctcggcttgttgctaagggctatactcagaaagaaggcgaatatttctttgacacttagtcagaaaggtactgtggaattggggcttcactatattgggtatcctgcggtactggagggttatagtgattctaactggatctctgatgtggatgagatcaaagccactagtgaatatgtcttcacattgngtggaggtgttgcttcatggaggtcttgcaaacagaccattttgacgaggtcaaccatggaaacagagctgacagcattggatactgctactgttgaggcagaatggctgcgtgatc

SEQ ID NO: 50405 - DNA, 408 bp, Oryza sativa
tcgagaaatccttctcacaggaacgatgtagtccctgacttcctccggtcgcgtgccctacagttgcagtaggcccgccctttttccttctcacagctgtgcggttgctgcagcttctgcttttctcgcgcgggtgtgtgaggacggcagcgactcggactctacggtgtactgcaccgaacagattgattcagcgacgacgaaagcaaaaccggcgacggcggcgacgtggtgtagatcgatctctaatcctatatgcacaacggatacacgaattttacgtggaaaacccttgcgggaaaaaccacgggcaccgacccgcaatgatcactatagaggagctcggtataatcgtaagggaataaccatgtgaacgtcacgccttctcgtacggcttacaatactaca

SEQ ID NO: 50406 - DNA, 410 bp, Oryza sativa
taaagtggtaaggcctcacattcataaagcacagcttaagatgctctatataagttggtgctggagcagcaacattataggatggaaagctgtatttgacatcacgaggatgagcataccatcgtggacttatgtcaatagtcagctcatttgcaccagatcggactgcaaagtatatccaacggtcaatatattgtgcgtacttgtgattgttgaggttgcgcttcaaagtgaatgagataatccctgttccagcgcggtgccttatgatggtgttaacacacctgacagaattatccctcctcccttgtttgtgcacccgtttattcaaaccctacgccttcgaggtgaactctaaattatgatagagcctccaagagtgtagccactcttgcgacaccatgctgaca

SEQ ID NO: 50407 - DNA, 418 bp, Oryza sativa
gcagctttgtgagcctaaacccaaaaagctattaaatattttagtcctcgcagactaagtagaataaaccgaacaaggcaatgatagaccaagtaagcaaattaaattgataaaaaatcacactccattattatgatgatagcccccgactgacaacatcaagaagaaaacttgatgttgacagtcaagagagggaagtacaatgattagcttaagcgtagaaacgacgaagatgttcaatgttccaagagttgtcgacgatagtaccgtcttcgcgcttgagtcgataggaacctggccgggtgacttcagagatgataaatggcccctcccatagaggagataacttgtgccgatccgtgtagtttgaattttcctcaaaaccaggtcaccgactaaaaaggcacgggatcgaaca

SEQ ID NO: 50408 - DNA, 435 bp, Oryza sativa
atatagctgccccgctgactctataatatagtcatggtgctcgttgtggttttaagcaattgattggatacaatatcattgctctttgccacgtaagtgtgcattcttattgaccaatatcatggcttaagctgattatatatcttggtcattcttcaagcgggtggctaatcttgtatgagtgtatttactcggattctacaccacatatgccgtatattatcgggtgcgacgaaaccatgtgtcgtttatagacttaagcacatcttgtataacagtgtgcgcatggcgtatgcccaatactcttgaaagttctctattcacaacatacaagctcttttatagctgtgttgctctgtgaattccaatgatgtagccaacttttagttacactcatcatattgtactaagcagtctcgatattactcggatcat

SEQ ID NO: 50409 - DNA, 455 bp, Oryza sativa
  unsure (1)..(455): unsure at all n locations
agcttgcatgggcacaacatcacattcaacaacatcattgttatttccaattgcaaaattaatgtgcaccagttttgttaccttcgccttaccactgttgttcaaccattggatgcagtatggatgtgggtgccgtttggtgctaagtgcaagcttctccaccatctcgctgctagccaagttgttgcagctaccttcatcaatgatcatgcggcaacaacgctctttgacgacacactntgtttggaacaacgtgtgtcgctgattttgctccgccttctccatttgtgcgctaaagacacgctgcacaatgaggctctcatagtgatccgcaaatgcagccncaatgtgctcttccggtggctcattatctgcatggtcagccgcaagcaaagcaagtgtatcatcatcgatatcactagcagaggagtactcaccatcgttttgtactacca

SEQ ID NO: 50410 - DNA, 465 bp, Oryza sativa
  unsure (1)..(465): unsure at all n locations
gatgaccgtcgattccatacatatctacattgatcggctgaagtctcgtagagcagaactcttagctgagctatgaaagaagccgagatcaaagtttatgaattccatcaagcatctgtcagatctgagcaaatccttaaaagtgatccctggaaccgatgctaccgatgcccaagccatagacgatatataacaaattacgcaatgggccatatcggctattaacaagcttgtatcaaggtagataccaactgtgcaatacttgtaatgcagacaaaaacatagtttgttctgatattttgctttacaaacccatcattgatattttgcttttgaaatccgtcattttacatatatgtatgcncccttaattttgccatgctgaggacacatctgataaattataattgtgcttatggcgatatgacaaatatcgggtatcacatatcgtgacgacaccaccga

SEQ ID NO: 50411 - DNA, 392 bp, Oryza sativa
  unsure (1)..(392): unsure at all n locations
agcttgtcctgtgcatcnggaaagctgtctagtcaatgatatgaagccttgtcaaatcctctggatcaagctctaaggcagcagccaactgacccatggtaactctgtaagatttcccccacgtcatccacttgatgaaatggttgcccttcttggtggtgccaaaataagctgtatcatataactgcccaattatctactcattccaatcatactcaagagcaaggatctcttcaagattctttgccttacacaccctgattacttcattgaatactgcattggtcttgtgcctcatgaaaatacantccacatacttcatctttaccactgaatggggtctttccatgaaaacagagttgtaccaatcaacttgcacaagagtgcgaaag

SEQ ID NO: 50412 - DNA, 446 bp, Oryza sativa
  unsure (1)..(446): unsure at all n locations
agctttctgttccggagttcggcgaggctttttctagactgacgggcgagacgaatgtacagcgccttccatacttccacggatgagtgatggcacacgtgggctactaggctgggccgtattgaattctttggttttcatttggattacgtctattttacctccctcaactcttgctcttgattgaatcgcctccctcaaccgcaataccatatataaccgccaaattgagcccctcggcggtttagctggtgctttggtcatatgtggcatccacgtggcatgttgactacgggccaacgttatagagcacgttgttgcctgccagagtagcttatcccgcggtggtggcgagcgagtganaggtgaagatgacgtgaggctatggttgtggctctgagcggattatgggaaagcggacgctgcatgatggacggacacaccta

SEQ ID NO: 50413 - DNA, 474 bp, Oryza sativa
  unsure (1)..(474): unsure at all n locations
agcttccactacaattttggcacatgcacctaaaaatttatgtccaaatattgcatgaatcactgcacattagttaaagaagtaaaaaaaaaataaaatcttgtttcaccccctccaaatttcaacattctctctntggtgtaacaaaaatttcaatcttcaacaaacgaataaaatcatacaaatggatgcctctccacacaaggaatatctccttacctaatgcaaatcttttaccttgtttcttgctacaaggaaaaacaaaaacaagagagattacaacaggttaaaaatgtgacgtcaatgtcaggaaattttaaatttttttttggagcaatgcgtccacctccccgtgcagagtgcaccgacgacggaaaatagctgtggactatgatgtntcgatgtatgcacgcgtggacaacttggcagtgctgacatcnngctcgttgatctcttctctcagcttgcaataaa

SEQ ID NO: 50414 - DNA, 456 bp, Oryza sativa
ctgatggcataaaataagctaaagtagtcatgtagcgcagaaagtaattatctcgctttccgctgtcatattctaaattctggcatatctctatgaatcctggaatctgtgaaatacgtttccttttaccattagtacattagtttctactatgtgtttttgtaatcacaaggtaaacaagtttgtgatttgattaaaatttgatgacaacacacacatgttattcctttacttatgaatagcaaaatgaataactagaagcaagctgttgaggatctcctcgcagaatagctatcttagtggtgcttattttactttctctaaaaagaagatcatgcttattctgtgtgaaattatgttctaatctaaattcggtacagttgaagccagggatgttctaaaactagatgttataccaacagtgatgatctatgtttacatatcctagagattcat

SEQ ID NO: 50415 - DNA, 447 bp, Oryza sativa
  unsure (1)..(447): unsure at all n locations
agctntgaaactatctgaatattccagagaaggtcaatctaattttatcattgaattagagcatttgccagtcatcagtgttactaagaattatatgttatatcagtacctgcagtactgaattcatgcagcaacatttgctctataataatggccaccttcgacctttgctatcaaaactcaaagagtaaatgaactaggtgtttcaaatataaaggtaccacatgtgcctgcctactattattaaaagagagagagagagaatgccataccgccaatcatatggttccttcatntcaccagtgtctagcaatattggttttggagaatgacattcaaactggccttccctggtgtcttaacaagttccttataacttcagaaagggttcctggaagagaattaaaccatgagtgcatgtaccanattntgagctctatgtatgca

SEQ ID NO: 50416 - DNA, 388 bp, Oryza sativa
  unsure (1)..(388): unsure at all n locations
cgtgcgtattcaatcaacagtgccagtgtgcctccatcgacagcgtggtcttctccttgaccttcggtgccacctcattgtcgcatcatgcctgcgcaaccttcaacaccacagtatcccaaggctntacatgtgaaatgagctgcacgaggaggctaatctccgtcacgattgagctcccccttcaccatccactttgctccaccattgttgccgtcaaggtcaaactccaccatccccataccgttctgctccaccaccaatgtgtgaaagagaagttgctgccggaattccatgacagtggtgatctccgtctaattgcaatgtcagtgtttgctacacgttgatctctcccgcacctttatgaaagaatttgataacataaagg

SEQ ID NO: 50417 - DNA, 332 bp, Oryza sativa
  unsure (1)..(332): unsure at all n locations
cttgtgctggcgtatcactaccctgagtggaagaaactacaccatcgaactggataacccaacggtcttcgttcatatactcttanggaacaagagaccattggttgttaagaactctgccaccttcttcaaaagatacctattgattgatatccaacctgttttggaatcaggctccatgcattcgtcatgtgttgcccagatcacgactatgatgctataaaattcccgtccataggaaaatgcacttctgcgtggaagcgctatcgtgcaatagacttttttaaaaaaaactaatcacaaaatgcggtggctgcaaacaatatttaaaa

SEQ ID NO: 50418 - DNA, 460 bp, Oryza sativa
  unsure (1)..(460): unsure at all n locations
ctcagctggtngccatctagctggtggttccatccagagaatatgctcagaagcactatcatgatttgaaagacacacctttcttcaatggatagtgtgacctccttaactctggtcctgtgcttgccattgttaactgatgccttatccctgtcagattatactgtctataaacttataacccacttactctaaaccctaacatgcaaccatgccacatcatcacccacgtagaataattacatatttcacctcatgcaagtatgcagcattatttacaatctatttaatgcagcaaatcgacatgcgaacatattcaatcatcactcctcacatcatgtgtgcaataattttactaatctatctatcatttttatcatagtttacacgacctatcaatatgtcccacatttaatcactgcgtttagtcgatcgttcatgaaaaatatatgataacgct

SEQ ID NO: 50419 - DNA, 311 bp, Oryza sativa
catgcaagctgtctaaatatagctgtagatatctttattacctatctgcaaaaacattgtccatgtggcgttttcttacaatcctctaaatacctagataaccaaacaaatgatttactgccgatgaagcatatttgggtcttgcttaatttatatttaatccatgccgactggtcaacttcctaggtgggatcctacgaatatcattggctatggtcattgtctcgttgagcactcattatagttttcttgtggttcaaaccaaccacccggcgccttaacatctcatgctactttgtactgtctggatt

SEQ ID NO: 50420 - DNA, 451 bp, Oryza sativa
  unsure (1)..(451): unsure at all n locations
tgtagtaatcagttagttaacccattgtctcacgatcagttgatctgcatgctccattcaaatgtnttcaaatgctaagggcgcgcgcggctgcttgaaaatggcagggatcctcctctattaatagagggagtggggcaagcacggagaagagttcgctggggagaggttacacgggagattagcgtagaggctatgtgctgtgcgtatgctttgcagaagcgctgcttggtgctaggcaatatacgctgccgtgccgctctgctcctacgccatcttgtcagcctctgcttgctcgctctgctgtgccagaagaatcagaggtgtttcaaggtgtgaatcatgctctcncttcatttttatgctcggacattgtgtaaagtctaaaaatcttcaaatcgtcttttctactcatgtatagatattttgcgtggcttcggtcggcaatgag

SEQ ID NO: 50421 - DNA, 496 bp, Oryza sativa
  unsure (1)..(496): unsure at all n locations
atccttaagtcacctgcggcatgcaagcttctcctgagcggcacaagaaactcatgatatgttctttacccttaccgnactgatgatgattgctcaaaaaatcagacatacagggtgtgtttagttcgcgtcaaaattgaaaatttgattgaaattggaatgatgtgatggaaaagttgaaagtttgtgtgtgtaggaaagttttgatgtgataaaaaagttgaaagtttgaagaaaaagttaagaactaaaccaggcctgtatatggttctcccttgtgtcagttagtagttcttgccaacacaagtgcacattngcgtgtggcagtttcatggcagagcgtatatgncgaatgcgatccacggtttgggtaatattatctaggctttaataagaggatggatgtgctgcttcattacatattctatttttattcatctatcaacaaggctgtgatcacacactttctattttgataccattgtacaaaatgaaa

SEQ ID NO: 50422 - DNA, 361 bp, Oryza sativa
  unsure (1)..(361): unsure at all n locations
catgtccaccatcgcgagaatctaaaatgcaacagtaatcatgatattggggctggagtcagtggtttctgcgtgcctctgtggtatagtgtcaagctggttataccggcccggtcgttgtttccacctgggggcagaatcatgcttacttggaccctgatatgacttctctcctcttcgatgagcctgatcacagctgctcagctgcagcttacttcccgcgaaatgatgatctccagtactcatgccttcagcatgtgtttctcttgtggctggctggagacaagtagcatctttttcgtntactctaacctctacaacgactgtactacgccattgccgtaacaacggatgcatatgc

SEQ ID NO: 50423 - DNA, 499 bp, Oryza sativa
  unsure (1)..(499): unsure at all n locations
attattattatatagagcgtcngtttgatgtgtatggagtgtttggacaataattaanaaactaattacagaatccgccagtaaacagcgggatgaattattaaacctaattaatccgttattagaaaatgtgtactgtggcatcacattgtcaaatcatagagcaattaagcttataagattcgtctagcaaattaatcgtaatctgtgtaattaattattntttaatctatatttaatatttcacgaagttattcaaacgttcgatgtggcagggtgaaaaattttgggttgggaccgcataatgagagcagtaagcgagcttgccaaaagagcaatgttaagcaaaagctgtgcaagctgtgcatgactctgtacttgagtacccctgttcgcattgctggcatcagttgccagcttgtatgatggtatgcccttgcatggcgccacacgcagtaaaatccaatcgcataattgcatatcatatgacaatgatatg

SEQ ID NO: 50424 - DNA, 444 bp, Oryza sativa
  unsure (1)..(444): unsure at all n locations
agcttgcagcctagtgtgcaaagtagagagcccaatggatagaatccattgaatcccgggaaatgctttccttctagcctttcgtaccacgtggggtcacatactaagcaagcccaaggccagaagagtaagaatcagaagagaaaagcaccgatgcgaactgaagaagaagtacgtaagatgactattaccaacaccgaatggccttcagtatggataactattcctagacgtcaaagaggaaatacctttcgaggtgcacgacagttgacccagcaccttctaagccatggtggcagagtatctgatagtgaagggtcagatcaagtcttctcggatgatgaagatgagtcntcccgacatctcggcgaggaagagatggaatcaaaggcatgcacctgttgtggagaaattggacacgtgctagcatgtgtctcacactct

SEQ ID NO: 50425 - DNA, 364 bp, Oryza sativa
  unsure (1)..(364): unsure at all n locations
tactaagcttatgtcctaatcagtagtaacccattgtctcacgatcatgtgatctgcatgctccattcaaatgttntcaaatgctaatggcgcgcgcggctgcttgataatggcatggatcctcctctataaatagagggagtggggcaagcagggagaagagtttgctggggagaggttacaggggagattaacgttgaagctatgtgctgtgcgtatgctgtgcagaagcgctgcttgatgtaaagctatatacgctgccgtgccgtgctgttcatactccatcacgtcagcctctgcttgctcgctctgctgtgctataagaatccgaggtggtgtcaggtgggaaacatgctctgccttc

SEQ ID NO: 50426 - DNA, 372 bp, Oryza sativa
  unsure (1)..(372): unsure at all n locations
gtggttattcttgacatgtgaccaattattttaatttngggaatcgattaccatctgagggtatagtaagctacacacaagacaaaaatgatgttaggggattattacattccaaattaccacagactgtttacaacctaccccaatagactcttgtgaccaagaagaaagtttttccgcggcaagaaatttaccaacaatgtccaatcattaaaaacatgctcaacaagtgtaattcttttacccttcatgcaagagacaataatattctcacatgattgtgcaaaaaattgttatttgggtacctccagtcacaattgtttaaagggcctttgaccacggaacaacgaatttctggaaaaaaatatggac

SEQ ID NO: 50427 - DNA, 483 bp, Oryza sativa
  unsure (1)..(483): unsure at all n locations
cacctgtatgcatgcaagctcgagcatagttntnttttaaaaaaaagcgcatgtttttttatacatatcagntntggtcgtactggtactagctacttcctccgtttcacaatgtgaatgtgggaaatgctagaatgacttacactatctagattcattagcatcaatatgaatgtgggaaatggtaaaatgacttacattatgaaacggagggagtagcagctagctaactacagtaatactatacactgtcggtaaatacgcagatggatcagtatgtgccaaagcgaacacagngctctagctaggggccggtacctgacgttgccttggcttacgcgcctgctgaaataaaaatagaataaaaaaacccgtacatccattcactgtcgtacaatgagcaaatagtacggagaaaaatattctgcgaaaaaataatatcaatgaacataactgttcttgcgtgctcgtcctcgggagatc

SEQ ID NO: 50428 - DNA, 365 bp, Oryza sativa
  unsure (1)..(365): unsure at all n locations
ggtcggatagagatcgcnaccaattcctaaattaaagatgtcatcgtcatgcactacatctctttctgattctcttcgagataccgcgctaacctatatttataaagttgaatgatagttatatgaaaccctaatctattccttcttaagaaaaggaagaagagagagtcacgtctggttaatcttgctgtattattcccggaaaagcggtcacatctcattttacttgcacacttttgattgctgaacggttgacgcagcatgatcttcgtcagactaatctgtttagaaaaacagcctattgtttaacatgttaaacatggatttggacttaaagtttccgacgatcttctatacacttacaa

SEQ ID NO: 50429 - DNA, 434 bp, Oryza sativa
cgtataaatagataatgtgcacttttatgaccgatagcattgcatctacttccaaggggtatctgttgtacgcatgttcttgattcctgaatgcgtcgtcgctttcttgtttattctaagatagactagagggttatttttatgcaatgtaacaaaatgatttatgagttgtctggttgctgttgctcgctagctccccatttataattatccaagactgtctaaatctccaatgtggaagctcgacaccgtgcgggaagttgaatgtttcattacaatgaaggtaatcgatcgattatgcactgaatgcatgattggtggagattcttcggaacatagatagtttatgagaaaccatggatacagatacctacctatggtatcacaaggaatgtcacatagtcaatgcaccaaagaggagtataggaaatggt

SEQ ID NO: 50430 - DNA, 413 bp, Oryza sativa
  unsure (1)..(413): unsure at all n locations
tactcaagcttgtcnacacattttgtattatgtgcttgtccattagataatctttgctcccatctcttctctngatatgactttcatactgtgcttgttaatgctgaagtaacaacgcttaatttaacacttcttatttcaatcctgctgagcatttctgtgtactttcaattgtttcctattgtacttgtcttgtgtctgttggttcttacagtgggacatctcaatttttgcacccgcaccttccatagatttgctgtgaggaccaacaagtctcttgagaatctatcgtccaaaggtagtttgcttaacctctgcagtgattataatatatactggtcatgatatgggtcatctatgtgtttgacctcctgaattctggtgaatagctgctgacattacataatgttacc

SEQ ID NO: 50431 - DNA, 454 bp, Oryza sativa
  unsure (1)..(454): unsure at all n locations
tttagcttaagatntaccatgttctatagntatatcattgattgttctagcactgntctggaatcgagttcgtgattcccatgattatttcttgtcctttcacttgcataaagaaatgcaatacgtagctacttatacatttttccgtttgctctaattgactgacagttctctgattgccaggaggggacaaatggagaaaagcacagctacaaggggattgccgattgcaaaagttgtgtactcttttctgaatgatacactatcatcatccttccattatccaaaatggaacaagggacgaatcatatgtttgaagtcccagttgaaaaagctccaggcagccatagattcttccaatggtgctgcaatntctgggtttgttcccatgacanactctcatttgccatcccctggttccaaattgtacactaaggagtcccaagctgataat

SEQ ID NO: 50432 - DNA, 489 bp, Oryza sativa
  unsure (1)..(489): unsure at all n locations
ctgttgagaccaacgagtgcatgcaagcaagtgggaaataatctacaattccacttgcagacatggccagaaatgtcaattattggtgaggagcaatcagccacctgatctttgagccaatcacaagaggaggtgctgaatccaagacacataattaatttcacaagggcacattgattgtatgtcataaatatatcatatgtcaacttaagttcattcatggcaaggataacccaaggatcatcatgttaactgataaagcaagcaacctgtcagtgcctgctgaattgttcaagatggtgtgccttaaaaaaaagtctaattgaggtagctctcgtgctatcatcagttaaaaagtcaacacagcaaacggttcctgaccaaaaggaaccctttctctataatcatctcattcaacttagaaataantctccatgctcttgcaaattctcagctcccacatgctgaacaaaaacacatgcgaaatgt

SEQ ID NO: 50433 - DNA, 298 bp, Oryza sativa
  unsure (1)..(298): unsure at all n locations
gcctctaaaacatcaaggaagtcgggtttagaaattggaggatgctctatatctgattatggggttaaaggatgcaaatcaaactcgggctatacctgacggacgtaaattatactttgttccaggagtatttcggctctctacatagaaatctggcccggcccaaaagcacaagcgatccaatcgagcggactcgtggggctacagcccgagaaacacgccgcccggcaagtcgactctcttgcttctcaaccttaaaccctaacgccgcttgaaaccnctccttctcccttttacc

SEQ ID NO: 50434 - DNA, 159 bp, Oryza sativa
taactgcttaatcatataaccaagtgagaacctgcagatgtagcatatgcatatctagctcagctgagtgacacagtgagtagtctaattaaccaacctcttcctcaccatggatcatcatctggtatctcgaggtctcttcaagcctctgctcctctt

SEQ ID NO: 50435 - DNA, 458 bp, Oryza sativa
  unsure (1)..(458): unsure at all n locations
agcttacctccgggcttagggcaaccttcacttgctatattgtgagtatagctntctggtccataacatgcaatctcgtgattcaaattagaaaatatcttcttctttttttttaaaaaaaagaaaaataggcctgggtggccctgctttttatagaaagcaaaattagaaaatttcttgtgttcagatcacagntcaaatgcttgtcatatatacatgatgctgacagaaacaatgatggccactttaagaaataatcttgtgaaatcaaccttctttatacatgtatcatttcaaagagaacttatgaaactaggatgatagagcatgagctcttatttattatcatggattgatgactcctgagacagcgtctctcatttgaggaataaattttggaaaaggacatgatatgatatgccatattggaaaatcttaactcaagttcaaccccaaca

SEQ ID NO: 50436 - DNA, 468 bp, Oryza sativa
  unsure (1)..(468): unsure at all n locations
tctacaatcttgctattttccttattcctagtgtctaccaagcctattataccttcaacacgaacattaagagtagattcattcatgactntgatacctacaaataaatatcagaatgagtcatatcatactagctagaaactaagtgcaccacgtatatctcaaggtgaatggattntatatgctcagctagctagcaggactagcagctaataagtccatgccaaatgtatatgaagcacagcaaaacatgcatgtgaagctgaagatcctcattgattggtaaggctaccaatatattcacatcacaagtgagagaatagcaagaattaatccgtactacaattagagtaaaagaactctttatgttcttgaaagctagctagctacctatgtatggcttgaagcagtctgcacggtataatacattattaacgctcgagtgagctttcgagtttgctttatcaa

SEQ ID NO: 50437 - DNA, 463 bp, Oryza sativa
  unsure (1)..(463): unsure at all n locations
agcttgtagtgaactggtgttgcttaattacagcttaatgtaagtctcactgcatgaaactaatgctcgaatcagccgttcacaacataatttatgttctctgtgttttaaattacttatcgttttaattttatcctaaattaaacactcatatctttgaccctgtttggcatatctttaaatcactacctatatatcacctaacaattntttcattaaaatcacacgaatgtaactacaatataaatatactgtaattactgtaatataactagcacgcaagtctcatctaaatataagaaacgcttgtacctgagtaggaaaggtatgtgtgtgcgacgtgaaggtcgtgggattcccgcagtgacacnaattttatttgtaatttctttaatctcttcacctagccgcatcgacacatgatgtgtgtactcatcaattntgggccaagctagattatatg

SEQ ID NO: 50438 - DNA, 350 bp, Oryza sativa
  unsure (1)..(350): unsure at all n locations
actcagctgtggtgnacaactcccaatgaatggaattgcccgcagactggtacctacgggagtcgagccggaccacttggcgggatgaacgttgatctatgttaacgaaggccatgcccatctacttttatttgtctatgtataagtgagcagatgacctttcgtaatataatgatgttaactgtgtaaaatacatgcgtcctcttaatgggctctatactaactctttagagttttaatataatattggatcttgcgatcgttaactataaaatttgtattaattttggaattaatgtgagtatataggtgagtataatggttaaattgtgtgaattatcggttaaatt

SEQ ID NO: 50439 - DNA, 410 bp, Oryza sativa
  unsure (1)..(410): unsure at all n locations
tcgacgatatcactagtgctacccccggatgggggcttgaaaggcgctggaccacatgaagttccagcacgttcccatggtgtgggtggtggattacttcctgcacacacattccctattgaattaatgaattggcccacagcctaccagtagaacaattactcttcttgttaatctcataaagcagaacagatggacacttatctatactaaaacactgatatttcaacttgacgtaaaataatccatatatctcgctacaataaaggtgcactcagacaaaacaacgtctcggngtcattacacagaattatagtggattatttgtatactatgggagaaactcataagctatctttgcaagatataactactgctataacctgattcactatgctatttcatggtga

SEQ ID NO: 50440 - DNA, 468 bp, Oryza sativa
agcttagtatggtgacagtgaaaccaaccttatgtttgattaatagcaaaaaagaaaaggttgatggtgatgccggtgatatgatcactgatgattgtgtcgagtttaccaaggtgaataccaagctcatttcagtgatcagaccatttacagatgtggagttgactttgtgcccgagcaattacattggtgtcaccaaccttcctattgtctcttctgaatgtgaggcctactatgatgattctgtctcaggggcagatttcacagctagaccgcaagtagtacctccctggagactggcagtttcactggatcttcgattcttgccatggccagatatatttaatcaacgcagcggaggcatggtggtgaagctctcacagccctgtgcaccacctattcaagcagaagttaaagctatagtggaaatactgaatttacatggtcagaaactagagaatcagatta

SEQ ID NO: 50441 - DNA, 454 bp, Oryza sativa
  unsure (1)..(454): unsure at all n locations
gcttacataccacagggatatatatgatagagacacncattgtctttcttagcatgtctctttcatgttggtcaatagcccaaagaatctgaaattcgcaagccttcagttacatgccttacttgaaaagctcacaccctttcgaaatgcatgatgattgagatgccagatgaaatggaacataccaataattatcatatccggctatgagcactactgaanacgaacaatatatttgaagagttcaccgacaaaaacgagaatcaagaggagtctttagttttctttcccctttatcaatgacagtgtagtgcttctctatatgtcataatcccagcgaacgaactggttcgttcaaaacacttaggacatttataatgtacctgaatcgcacagatgacgatcactcttaattcaaaaaattgttttcattaaatgcctggtgtgacagaag

SEQ ID NO: 50442 - DNA, 456 bp, Oryza sativa
  unsure (1)..(456): unsure at all n locations
agcttatccaaagtagtctatcctaacaaagtggggttcttctttttattgtacagaggcctcataagctagttgctctgaggaggagagagattgcacatcaatttatttatttggaagtgatacatcaaagttgcttaatctgcttaggaagccacagtaacgcaagacgtagtgcaacaagaaccaaacagaacttcctattattggccactagtagaatccaatctgcatttccaatgtaacctaacctcaagactgaaagggaaggggtttcactatctatggaatcagggtatgatttgttgttagtaatgcattatttgttcagatccctaactaaccccnctttcttcagatcaacacagaccagagccacataagcaactccaaatctntgaaatgcattcatgaacttgcattggattatgtcaacaactaagagcatattcatga

SEQ ID NO: 50443 - DNA, 486 bp, Oryza sativa
  unsure (1)..(486): unsure at all n locations
tanatgagatgacgtaattagagcaagttcaatagtgtagccaactactatctccaattcatctataaccaatctaatagcttattcatacaatagttacatactacactattaatatctggtcccacctgtcatgcatacattgtgtcttggagtccgtgctacagctggctataaatctgtagctcgctgcccttctctctcctcatttatctccttagtatatgtttgcagctggcttatagcctggctattacctgctcttagctctatctagattaagctattactactagtgatgagtcaattgatgaatcgaatcaatatggtcaattggccatgcattagcacgatttagcataccgtacgttcactggagctcacgttgagcggctatctataacagaccaatgaaaccagcagcttaattgacatcccaaatccaactggctattttaatcaccaccaactactgctcctataatt

SEQ ID NO: 50444 - DNA, 458 bp, Oryza sativa
  unsure (1)..(458): unsure at all n locations
agcttgggcantttggctttgctacagtgggcaaaaatgctgaggtcagaaaaaggtattcaaacaaaaggccatccgatggcaaggttacatcatgtatatntgtgtgtgcaaacgagactcatagattaccggacaaaagggatcatttaacaaaattccctcgagctgaaactagaattggttgtcaagttcacatgactattaaaatggacagaaatgagggcaattatagtctctgatttggtactggaacacaatcacaaacaggagtctgaagattacagtgctattgatagcttcactcaactgttgacggtaatcttgatcaaatagttagtttacaaatctatagatgataatcaagcaaaaaaaatattaattgttatttaattntcanggaccaatcacaaatgatctttntactggagaatttgtgtcctggtgaagtaattcta

SEQ ID NO: 50445 - DNA, 384 bp, Oryza sativa
  unsure (1)..(384): unsure at all n locations
gaaaatataagcggctacgaataagcaaattgtaatggctttgatctgaatagtcatatttgcaatggcatgcatcaaattaactctttcatcaaattgactgcagtccaatttcttttcttcttttttgtccagctcatgttggcccatatgcaagtttttccttattggtcatatcatgttggcccagcacatgttcgttctcctctctttttcctgggctgggccaaaatcaaacaaatacaaacgtttgtacacacatataaactttgtacgtacacatatagagnttatatgtataatctttgtatagatacaccacaataaaaaatatacatatataaactaatgatacatanatattagttttatacctatacatat

SEQ ID NO: 50446 - DNA, 415 bp, Oryza sativa
  unsure (1)..(415): unsure at all n locations
agcttaaggccttattaagatatgttgtntaattaggtgtgctgttatgcttggaatcatcaattgcagtctgcactctgcagcacgtacctgagtgtgtgtaagtttgatggctagcgtttatgttaaaaatgactctatctgctgccacgtcaaagtggttgttgctttgcggtttgcgatgccatggacccatggtcaaaatgtgtactggcactactagtgtgcccgtcaaattggtgagctgattggctcggcatgcaaaagaagaacgtcatgacgatatggaagattctctgtcgaactcacgatggcagctttacttcctcgggtccgaaataaaataagtttgtttttcactaattacatactactccgtatgtacataccacatcaaaaatcaatcaattatatc

SEQ ID NO: 50447 - DNA, 423 bp, Oryza sativa
  unsure (1)..(423): unsure at all n locations
tctcagctcgtggtgtagatgcatgctctatgatgatcngntgtannaattgttgtagccggacgcttgaactggtgatcaagccgaagatgcgcgatgctgaactatgaattctatatcacattctatgccaatgtttgagacgtgcctatgttactagcggaggctaccaacccttactgtcggataaaaataaattacaccgattctagcagcagcactcgatgcgagtgcaattaatagatagtccaactatgcatcacatgggccatgtccattaatgctccacagttcacactggcttagtaaccagcctaccaatcatcttccatttcccatttccacaaccagagagacaaaggggacatgagtcctagaactgtatgactccgtattttccgggtcgcttacaacctattgtcc

SEQ ID NO: 50448 - DNA, 451 bp, Oryza sativa
acactatataatactatagctctctcagtatgtacttggctacatactgtgtgcatgctgtcttctgactaagaactatatagtactacgttaatatcttctattctgattgggttatgtacttatgttgttgcttatatctttacaatatagctgatactgctgtgcccattgatatacactcttgtataatttcctctcgcatggagactagtatggcggtagtcgacttttcgtgtctgtgtttgcatgcatgcaaacactttgcctttgacactctactagaaaatatgttggtcgttcaatgaccattttgttctacagatgttacagattctttgacctcattacaccaacttgagagttgatagtaatatcatagaccacatctctttatacatatattgtatcagtatgcgcacctttctcatttcatttctgataaacttgt

SEQ ID NO: 50449 - DNA, 464 bp, Oryza sativa
  unsure (1)..(464): unsure at all n locations
agcttggcgcacacganagaagatgagagcttagaatattctttctcgcnctctacctggcgcgccagatgacggagcgtggggctcctcaccgggagaccgcgcgggcccccctttgccggttcggccgggggcgctaagtgagcttctaaactcttgatctgtggaatggttcgcgagagagcaaacgctcaaaacactggcgatgtaaacaggttcgggccgctgagaagcgtaataccctactcctgtgttctggcggatctgactcttgaggagttacanagagctggaaagcaacagccttctaactctagagaccctctccctactctatttccccgtccantctacgagctcccctgtcttcttctttcttttgtatccactatctcttcggtatgcatgagacatcctgttatatctcaaggggatactacatataccatgtctacctacccttc

SEQ ID NO: 50450 - DNA, 254 bp, Oryza sativa
gatttggacctttccgttatgccctgcttattctgaatatacttatctgcttacactgctcccttgtgaagaacagaacgtacattatatttctgctcaactgttccttgtgagaaaacaatgccatttcccatttactttgttgcgtgtcaactaagcatattataagatctaaactcataaaccaacgctattttctacaaatatgagaaatgcatacatatatgcgttggcgtcactatgccatctacgat

SEQ ID NO: 50451 - DNA, 462 bp, Oryza sativa
atccttagagccacctgccgcatgcaagcctggtctatctcaccggatcgaatagatggggacttatgattcaatctcgtcgggagacctactctggccgggttgaatcttcctggtcagaagtcgtcaagtatcttgttgttggagaatccatctcttaaacccatctcgtcgaaatcctgaagtaccaaaatccccctacctggcgcgccactgtcgacgtatgatgtttcgactacagtatttggacagtatggggatcgtcggtgctatgatatacgcgagactgatgtacaagagacagaaacggggactttatacaggttcatgcccctgagctgtcacgaataactctacattctgttggtcggaatcagagttgctcttattcaccatagtcacaccactacaatatgtgggcagcataattaactggtgcccacctgtgatctgaagtctgac

SEQ ID NO: 50452 - DNA, 461 bp, Oryza sativa
  unsure (1)..(461): unsure at all n locations
aactgttgcagcactaagtatgaatagaaacataatatctagagaatcaagccgntgattgagttcttggagtggtagatgtctaagctaatctaatctagcaacgcgatttatccgatgccaacagaaacccttaaacgagaagcagccgatagagctaaattgatgtgctaagactagattaacagagacatgtgataaatagtcaagcaaatatatcattcgaaccagagcaattcaagaggtcgaatgtactgatgcagccttaccccctagccggagatctaacaccgatgcaagcccacgtcaagtgcatagtccgtcggacgattaaataaagtggaaaatgtaaaacgtggcgatgcgcccgattgtattgatcgtgaagatagnttacaatgaccccgggtgacatatttatacgcatgggtagaactaagccttgatgacaaaaagatctt

SEQ ID NO: 50453 - DNA, 339 bp, Oryza sativa
gtattgggcataaacaatggaagattttttttttttgttaaaataacagggggaggtagtagaccttaataaataatgcatatggggattattgagatggctaaaaggaaatggatggaagatatatggagtaattgaaacgatacgaaattgcggtaacctttccttagccctgtgcaccaatcgacttaaacctttaatctttttaagatgatatacggtaaaggatagtcataaccatacatcaataaagtgatttatgattggtaacttgtgaagtgactgcgtatgtgaagtttatatgttatgtcgacaatggattgatccttattttgataa

SEQ ID NO: 50454 - DNA, 341 bp, Oryza sativa
agcttgcgctgaccctagatcgttcctcatatgaagtggtattattgtgggtaagatacgcattgctgccaacttaacacatgcattgccaacttaaaaaaaaaaaagctgtcattaagagtgtaccctttgaaaatcacgaatgataggatgcacctcagtccgaatatgctacttacatacatgtacttgtgagattgttagaattatcctactcaatactgtcatatgttttttaaaaaatgcgatcctgtacagtttccacaaaatcttcccacgtcttagtcatccctgtcttttccccatgaatcccacccaagctcaatgacccattcggtcga

SEQ ID NO: 50455 - DNA, 172 bp, Oryza sativa
actctaatacttgcttgagatgacatattgggcctgtttgcacaactctagctcccaactccaacttacctatagccagagctgtgccaaatggtccatatccttcgtatgtttggagtagagctagcatagttgctcctataaaaatgaactacgggggtggtgatggatt

SEQ ID NO: 50456 - DNA, 457 bp, Oryza sativa
  unsure (1)..(457): unsure at all n locations
ancttggcatgaaatatctcatctagaagtattttgtttggcttaatatctcttcgacagaagtatggcttgcaatccatatgtaagtagaataaagccgagccaatatccttggctattttgtacctaatcatagtatcgatcggatataatcaattagctagatgtatcgatagacatatgcataagcattatgtcctaactgtcgcaatataactagcatttaattactctgcactaatttattcactttaacataaatatcctacacaatgcttattatcttctttaaccattggtaaaagtaaggtatccacacagcgtataatacacaatgcctacctgttcgaccatatattcagaaaaaaatacaatataagtcctttcatatatgatgaatctattggtatcgtnttcatacatcaaattctatatcttttcatgtataaagataaag

SEQ ID NO: 50457 - DNA, 245 bp, Oryza sativa
cactattaatactcaaactctgcatacatatgatgttaccgcagctatatctaccaccagacttgagatagctgctgatacgtctcctctgattgcgagtatatcagaatgtcttcaatgagaaccacaacacacatatcctagtattccatgaacactctgttcattaagttcatgacaaacgcaggtgcagtgtgttaaccgaacgacatcaccgtgaattcatacactacctatcgcatgga

SEQ ID NO: 50458 - DNA, 293 bp, Oryza sativa
gtcgtcagctcggggctatcatcataattatggagtgcgatcctttatcaatctaatttgcttacctggtctatcattgccttgtttgattttactacatactcagccaggactgaaaagttttaatcgctcctttgggtcttaggctcaacaaagcttgagtaaagctgttaagaactccaagacttgtgtatgactatcaagcacaacataactacaccacgattgtacaacttgaacctacatttgctacatttatactcactacaagatcaacctttcatcatcacagc

SEQ ID NO: 50459 - DNA, 306 bp, Oryza sativa
  unsure (1)..(306): unsure at all n locations
cagcttgatcgactgcacaagattcgttacggagctgcaaatgatggcatttgaaatangctacaacattgtccacgagtatcgccgaattccccatgacccccatgaggagaatattcttgttcgcatgacgttgactaatgatcgtgaagaccttccatcaatgatgtttgaagctggatgaagagattatattcatgcttgttaagaggcatctattgtggccattggatagcttcatcatcgctttgatgatgagttagagtcatctgattcccagtattgtccacacatgcttcatgatca

SEQ ID NO: 50460 - DNA, 381 bp, Oryza sativa
  unsure (1)..(381): unsure at all n locations
atgcaagcttgagggtcggcacatcataacggaagttgttttttatggacgtnctantgccccgggcgaagccgccaagaactatgtacgtcacatcggttgggttgtgcggtataacgtgcctgtcattacgatgtacttgcgaagaactacggcacgcggagatcatgagatctttgtcccatattctgagaaagagatgctgtggaccactatgctcgagacattcaccctttctgctggtacagaggacaaagtgtataggtggactctaaagaaaatggcagatcagtttcatagcttgaagggagatctgtaccagaagtatatactgaatgagcagacaccgaacttcgacacatttccaaagcttagggatca

SEQ ID NO: 50461 - DNA, 370 bp, Oryza sativa
  unsure (1)..(370): unsure at all n locations
ccctatcanatccatattatgctgtctgggtagaatgattattgcagcacagactgatgtcaagtcatgttgcttctgtcacaatatataattcaggtcatgttctgccacaacaaacaaagaaagaagaaaagccccaactccctaggatgccgaccgatatataatcacagaggcatataggggaagagagaggacccaaaattatccatggcctttatatacttagacctttgtctacttaatgtagcttcagacatgttcttggacaaagcccatttgactctctcctattcaccatactttcccttgtcttatccttgaaactctcacaactagccatggcgatgttctctaccatggcttttct

SEQ ID NO: 50462 - DNA, 457 bp, Oryza sativa
gcttggccaactgcaagaaagtacggagttttctgcacaaaaccgagtaaacaagaacctaaaccaacctaaaatttctaacgtaatgaacccccattgggttcatatttgtgataatgtctaatcaaaagcacaatgcaagataaactcaccggacaaaatcaatgctgggtcggattaagagggggaaaaacctgggtgcatatgttgcaggaggatactacctgagaaatggaagaaacggtgagctgggatgcttgaacggggagagtcgtggagtccgataaaagagggggtcggtggtttatttatagcagaggaacagccatatagatccatgagatgcagaatgcacttgtggcctgcttgtttcagctctattccgtaattactcctgaaaccgttggatattaatgatgaaccatatggatcatacataaaaaattgtgagtcaaat

SEQ ID NO: 50463 - DNA, 421 bp, Oryza sativa
  unsure (1)..(421): unsure at all n locations
taagatacctatgcgagttcatactcctggaggtggcatgaccacaactcactattgcccattcgtgacagttgaaattcaagggttganttttccagccaacctcattcttctcgaatccaatgatctagatgttattcttgaaatggattggctgacaaggcacaaaggagtgattgattgcgttagccgcaccatcaaattgactattgcgaaaggagaagtggttaccttccattctccagtacagcagaagccagtggtcagtctaaactatgccactggtgaagaacaagaggcatcagtggagaaaacctctatgaagttggaggatattctcatagtcagatagtatccatagggtnttcctgacgatctgacaacaatgcctccataaagggatatcgagttctggattgac

SEQ ID NO: 50464 - DNA, 436 bp, Oryza sativa
  unsure (1)..(436): unsure at all n locations
agcttcactggcgacacccctccaataccgttgacaacctataatgaggagcccacactagtcaatgtccttctcgatggcctatcttttttctagttacccccttccgccctgtgagctaaattagcataagacagagaaagaggccacaaaaaccggtgtttatgagtttatcaatcgttctttgttgccgacatgcacttggatcaaatccaataatggatatggcctatgtctgtagatccaacttcggtggcccactcctctccagtcatgcttgcgtagagaaagctctccacgggaaggaggaaaggnggagcacacgggaggagaacaacaagagcgaaatatgacatttattaatacgtattccatccgtcccactttaagtgtagtcatgggtttccacacccaactntgattggtcgtcttaatt

SEQ ID NO: 50465 - DNA, 492 bp, Oryza sativa
  unsure (1)..(492): unsure at all n locations
gcttataatngaacccacgaaatccatntataaatctctgtgttggtatgccaccaaaacaatggcattaagtattaacattaacacgtatcaacatataagagtactaactgtagctggtcaatcatttgcaggatctgctctaattaatttagcccttggctttaagcttcagaataagaaccagtgcatcgttcaagctttggcattcctctttcgatatctgcgtctttgtgacaacagccaggttttggccttataatccatatggataatgctctagtattttcagcatctaagctgctagtaaagctcaactgtttccttatgggtttagtggccgagctcttttccttctttaccaaatttaatggctggggttagcctgcagtgctgagcacttgcatcattngggcctgagctgttagcgctctgtgatgcatgtctgcccataatgcacgtcaggtccacatgattaaactaatcacaggg

SEQ ID NO: 50466 - DNA, 342 bp, Oryza sativa
  unsure (1)..(342): unsure at all n locations
atcctcttagtcacctcccgcatgcaagcctgcatattccgataatactttctccatttcataatataagactctctagcattattcacattcatatatcatatagatattgtcgagattcattaacatttatatgaatatagacaatgctagaaagtcttacaatatgaaacgatatgaaacggagggattatcagttgcagctctctataataataactttaatttatagaagtaattattttatcttaaaatatgagggattgtgatcggatatgacacattgctggacagggattgtacagtttgttgaaagggaataagtcaccnactgtccctcaa

SEQ ID NO: 50467 - DNA, 420 bp, Oryza sativa
  unsure (1)..(420): unsure at all n locations
agcttaaagacaacccacataaagaatctcaattcactttttgttttttggactacccacatgctaagccttctctcctgtaataattaattaatggcagctttccggctaagggtaacaccaatgtatataacaaaagtaatccatatagatgggacccacatatatagactataactaatgttatcttcacaatgtatatggatagcaactagtattacgaggagagagaaaatatagacaaataatatattttattctatatgggcagcccatatgcttatgggtggcttntgctattttcttgctatggactagttacacaatgtggttaggtggctgaatggaatattttattgcttattgactatgtttatgcagcgttcgagagggtgagagagagagttcgttggtttcgtt

SEQ ID NO: 50468 - DNA, 386 bp, Oryza sativa
atgactcatatgtctcaatgatagcccatgaacataatggcgtaatatacatgatcgccgcgtaaaatatctactctcgtggaattccacgttgcaccctctcttcatttggttgataataatgcacaataacagcttgattgaagattgaaaaatgtcttacaccaagcagattgcgatattgcatttttttatattgcctccttagcaacattgggatatcctttttccttggtttaccttttccgagactattcatcgtaactaaaagttcaacacgcaccatatctatttatttgcttaattatgcctaaaggctaaactatcttttcatggaattatgcaatattgctggcaaagggacaaccttgtaatttttgctctgg

SEQ ID NO: 50469 - DNA, 405 bp, Oryza sativa
  unsure (1)..(405): unsure at all n locations
gcttanatgatgggggattgtatggtctaatatgcatagtctgtatattgtttctttgatgggatttgggggatgagaagtgattttggagctcatctcgaggaagaaaataaatatcaagcattggaagtgaaaggggaggaagaagaatgggttttctgcttaccttatgtgctgatgaggtgagaacgccctaaggtgtgatttgggcttaaaaagcacccaatgttaacgtacaatgggctcaacttgtggtggtatattaggacatggctggtatattagttaacaataatttggcacattttggaatttcagctattctccatcttcaatttgctctctttgtctaaaattatagtaattatgtattcttagtgggaatgtcctgtactctattcattt

SEQ ID NO: 50470 - DNA, 435 bp, Oryza sativa
  unsure (1)..(435): unsure at all n locations
gcttttagtatactttgtttgatgatgagttatatctccgtattatagatggggtgttattgaagcgcttagatagtgatcaatgcaaggttgctatgagagaagttgatgaagggatttgtggaactcttcaatcagcccacaaaatgaattggctacttacgagggttgggttctattggccgaagatgttgatgatagtttcaagtactatagagggtttgaaccttatcaatggttcgacaatgttcaattggcgcccaccgccttgttgaaccaattataaaccatagtcgtctgaggtggcgtcggatttattgtcaaattacccttatagtgaaaaacatcgttatgctagtgcacngattattcccactaactgaattgaccgctcatatatactcaacaagctagttcttatttcagcatatatta

SEQ ID NO: 50471 - DNA, 496 bp, Oryza sativa
ctaagcttaatcctctctaatattccttaatttgttctgttattgtgcaacaactatccctcacatcattcatcaatccctgtcacctagaaactgcactgagtcggtctaataaaaacaaagccacgagcaaatactaggcacaaaccacagaataaggcactctttttggagagtgccacgcattggatctccgataaatagagaagaatcagatgctcgcgctcttagcctgtgctagctttgctctcactgctaacttctcggccaaaagttgctcgattgctctgcatgcattttgacgctccttaacaaccaaatttgaccatcaattccaacattaaacttactaatgtctatcaccaaatctagcgatgtggtttttgtatacccccgattctggaaatcggaaatcttctgtgtttatccgtaccaatcccctggatcagtagttggtacacacattcatagtttggatcacaacatatcacgaatg

SEQ ID NO: 50472 - DNA, 451 bp, Oryza sativa
  unsure (1)..(451): unsure at all n locations
agcttatcttggcgcgactggatcacgggcttgtactctggtaccattacttgtatggctattgaaacatgaagcatcgttagtacctcggaggctgcaaaacacacgcggttctgtctttttatgtcgtcagataatatagttcttgtagctgttttgattgtccagtctctacaattggccgatgcatcaagcagtagcaacgcttcgtttctttttggtaagagttgtcaaatcaaaatggaaatgcaacagcatttgccgcttggtgataacaaaaaaggagctgatctatatattatctgacgctaagctcttgcttgaagtcatcggatgttagtgcttacaagcttgctggtgtaagactgtatggcaatntcattggctacttgcggatcacacgattagcaccccataattagtgatacgtgtaccgtaacaaattctcaac

SEQ ID NO: 50473 - DNA, 477 bp, Oryza sativa
  unsure (1)..(477): unsure at all n locations
cgaatcttcgctcgtctcgagtaaaggatgaaaggaaacaaagacttggttattgatcaagagctgttgcaatgctgtatatctagaatgtacaaaatgcatagtatgggtacccttaccagaatcaagtcagccagcacggtggcttaaccatacgcctaaactgtgaggcatcatgcttcaccttgtcttgggtgtttgagagacagaacggttagtaaagcactactcacccattccttgtctaacttttattcaggagattttctcaaatgattcgtgcaaataaaaaaaacaagttgctcaaatgattctctcagtccctcagcggtatataattgtattcctcaccaaggtattgcattggtccctattctaaagtcatatatgttggagttggtanggatcaagtgagtcatacttctattcacatntattacttctgatcagaacatgcaagatgtgtgtgtggatata

SEQ ID NO: 50474 - DNA, 345 bp, Oryza sativa
  unsure (1)..(345): unsure at all n locations
atcaatcgcaagtgaagagaacgacaaatataatgacgggaacataggacattgttgtagccgctggtatgcttgtgttattttcgcgctattttgagtggctatgcttgtgactaagctctcgtctctaaaggagtttgcctaggaccatcactataccatcgtggaacgattattcaacttgctttgattaatgtggttctagctgtaccttgatattacttgcagccacctataacttcacaaatttttatctgctatatcacaggatcgtgcttgttgtccgctccggcactactaaccatcgttgctggtcttgctgtttgccaacgcctnttacataac

SEQ ID NO: 50475 - DNA, 390 bp, Oryza sativa
  unsure (1)..(390): unsure at all n locations
gatagatagagctactctctccgtttcagtttataaatcgtttaaactctgatcaagtttacaggtcatacttctactcttgaaaggaaagacgagttaggatgctctcgcgacaggttatgcgactagacgcacccgcgccggcggcctcttctgttccggcggccacctccggtgagctccctctctctctccttctcccttttctncnncaatttcaggtcatgtacagatgctttgatgtcatgacctctctcgncgcatcgttgttttcgatcattcctgtccctgttgccctcccatgttttttccatatcctctaattcaccagcggccttaccttcgcatacctagatcttgttccctgttaagactcaattttagtgctcc

SEQ ID NO: 50476 - DNA, 468 bp, Oryza sativa
  unsure (1)..(468): unsure at all n locations
agcttaacttgttaagatgtcacatcatcatccacttactattattatatttaaacatcatgcaaagcatgttatattatctactccgtatacttttataatttattaaatattggagctttaaatgcaagcatgttaaatcatcattcgatataattcacataatatttcaataaatatcttcatcatttttataatatcttatgtacctatatagttcatcctaacttaggtaatgtaatttctttcttctctcaataagccataacacatcaattgttttaatttcttagatgattatctatggttcaaattatctcctncgttacaagctataggacgttttgacctttcaaatctgactaagtttatagataaatataataatatttataatactaaattagtttcatcagatcaataattgaatatattctcataataaatttgtcctgggttgataatgtt

SEQ ID NO: 50477 - DNA, 482 bp, Oryza sativa
  unsure (1)..(482): unsure at all n locations
ctttaatctcagctcgcatatgttggtcatattgaatggaataattaaagttcttctatttctgacctgtggccctgctactctttatttgagagggtttatctattattttgcacaacttttgcgatcaattcaactatctgttccgccatgtggacaaataatgctcctttggaattcctacgtttggttccaatcccaactcgtgaaagttatacacatccgagtaaggtttaaagagtatattgcacataatgttgcctatgcagcactataatgttgtagtaaagaacaatatttttccttctgtcgaacagcatgttaatatactcataaggtccgaagctttttgtgtgaactagctaaatgcgcctgcaaccggattntctttattaagagatacaatcaaagacagtacataagtagattatttcatcctccgtttatggttggcatatatttatattgctgctcataatcgt

SEQ ID NO: 50478 - DNA, 448 bp, Oryza sativa
  unsure (1)..(448): unsure at all n locations
agcttcanaaagtagtaaaatttgatcagaaagcattcgagttcacaggaggaaggaagtgaaaagcaatgcaaaatcagcagaaacaaaaggtgttttgagtggaatgtactagcagcaacaaacatacctcatcaaaaagtactctataagcattcaagtcatgatagatttttcggttctcggcattgcagtgatcgagtgcctgcgcaatgtaatacgcaacccttaaccgcatttcccatggcaagggctgcttatcccctgcagaaaaaggtagatcgcccttgagtcaaacaagaaagaaaacaaaagggggaagtaatgtggcgagccaagttgtccgggcatgcaacatccatccacataagtagcaagtgctagtagcatttggcatgaagagcacacacaagtcaaatgtagtaatggtgagaggtgttcattaatg

SEQ ID NO: 50479 - DNA, 402 bp, Oryza sativa
  unsure (1)..(402): unsure at all n locations
gtagcgacagctattgttgaaagaatattttctgccatgaattatgtgaagaataaattgagaaacaggatgggggatcaatacttgaatgattgcttggtcacatttattgagcgtgagatgtttttgaaagtcaaggagtgtgatattataaaccgcttttcagccatgaaggaacgcagaattaaagctactcttccaagccacgaaggaacctgaatagaaaattagaggtaccatgttataatttgaattttattcttaaatatccgtattacatactgtaaccattgatgnttttctatgaattttttgttgacaggaaacccactttaaatctggctcgcactgcttattcaacccactcagtgcttgcttcagaagcacatgaccatcatctca

SEQ ID NO: 50480 - DNA, 469 bp, Oryza sativa
  unsure (1)..(469): unsure at all n locations
agcttnctaattaaggaacgaggatcatatttgacaccattgctaataatacaaactggtgctcaacatatgttcagtatgtactagtaactatataatcagaatctttctgctgacaaactcaacgaatcttatctcgtgaaagaggacaaactgctggaatcttaatcaagttctatcgaaccgaatctttctttatgatgtgattaacagcatgctgaggaacttagcttctatcgtgcattctcacagaatcgcatgctaccttgtgattatagataaactgcggatcacctactgctacttgtagaagggagcttaaaagagccttgaactgctgatcgatctgagacatattaaataacaataatatattccaaagagaagagatgtgtcactaatccagatcaaccctcatcacatcacaagcacaagaaataatctgtgcaacaacagtaagtgcatccat

SEQ ID NO: 50481 - DNA, 228 bp, Oryza sativa
agcaccctaagctagcaaagccatggatgatgttaaaatgggattatctttggctgcccctagatgatccatccataaagcactttgatgattccttgacactgactgcttgcaagctggtcaggccagttacatttctttctctgactctccaaagacgacttattattattgcttccatccactctgtcagacaccataccgatactggatttctctgtgccgtct

SEQ ID NO: 50482 - DNA, 430 bp, Oryza sativa
cttgtgcagcagaagcaagtaagtagtacacggctaccattttattctccgcaagggatcaagatggatcgggggatatggtagtaagcttttgcacccgctgggtcttaccgtaaggcggcgccgcagggaccgcagctctatcagctttacaccgtggcgccgagcggagcgagcaatccatcacgtcgtccacgctgctgacacggatcagcccagcttcttcttattctacaccatgcagtgcctggccccatgtctgtctgaaacctctgatcatgcacagcacagggaagtcctctctgctagagtagagaaaatatactgtactgttgatgagtacgagtaaaatattgccgcctgctggatgatcatcgatggcgcggacactgaacaatagtgtacgcaataattgcttgaatacacagac

SEQ ID NO: 50483 - DNA, 496 bp, Oryza sativa
  unsure (1)..(496): unsure at all n locations
ctggacagcctntctgcgatctatatatatacgtgtgatgctaacattatatcatcaactcttggcattcagaaattatagatgccttctatcatcaacaaagagaatatgcacttaaatcttgtgtgtggaatacgagacaaaggctaactataaagggataggatgaaatattcatgtcatccaatgtctgatgaaagatgacatatctgtataattcggtcctctcaactgaattgaatacctcgagcctagctgctgtttcactgttgggaacaactgctccgaatgtccaggcattacgatggttccctatgatcacatatctgtgcacaaactggcatatatatccttattagcttagccttggctttacaagatttctagatatccaatcatctcctgtgagaatgaaaatgaggactctgatctaaactcaaacagtatgcatcgcacggcactaagtcatagcctgtataacatgtgatccacgtgt

SEQ ID NO: 50484 - DNA, 182 bp, Oryza sativa
  unsure (1)..(182): unsure at all n locations
gcagcttgacatgatgttganaaaaaatgtatcctgccctcttgtctctaccggaaataacccaacaggcgttccttacgtgcgttcattatttcttgtcccacgaagcgagggacacccaaagttgatacattttagaatttatcaagcggaagccgtaataattaatttattacatgggc

SEQ ID NO: 50485 - DNA, 190 bp, Oryza sativa
  unsure (1)..(190): unsure at all n locations
ccatcttncgcttctgattaatnttatattcgcaagggtgagtaccaaccgtactcagcaagccaccacagcaacaatgcatatgataggngtatntcaaaagatggctatagttcttttgcgcaaagcaaatattgttattcttttcacacacctaagacctaacattgactgaacaaattttagtacc

SEQ ID NO: 50486 - DNA, 441 bp, Oryza sativa
aatctcaatgccaccaagtgtggtttctctattaccctgcgttgcaaaggtctttgtgctccataatttcacctacttgcattattattacatatgcttactctttctcgtctccttttgttatgctgctgattgatgaagggatgggtctactctcagaaccaaattccttgcttaatcttgtgaaccaaatatcatcatgaacagttcgaccgaaaagtctaaatgaccggtattcatggaaagatcagatgctcgctgtttcagtgagaaaggatcacaaccaagctgacagaaccgttcaaattttattcaaattgaaaagtcaagtgttgatctctaatatatatctgaactgcaacactggcctgttaaatatttatgcgtgtaaaagagaaatctgaatttgcacatgtttatcaacactgaatccttgctaca

SEQ ID NO: 50487 - DNA, 472 bp, Oryza sativa
atctggttatatgaagtaatattccttaagtattcctgcacgtttgttctagacaagtagttatgctaaggaccctataagagaaacctcttcagtttgatctcgattttagcctgcatcttgcataggcgcctggagaatcggtatccatagagaagtgttcccttcgggcggaactgcctggggagacgataaactcttatctagaacaagtgtgacttggaatatcttcttaagttgcttctacaaagacagataggttaggcctaccgtgaataccgagtatgactctacatcatctgatacaaacttctgaggctgtctaagtaggattcggcaccctgcagagatcctacaagttaaatatctctcgaagtgaacagtattgaacagctattttaacagtaaactgaatagtatcagccgaataataatgttcttgacagtacagcatctgaatattgatgtctga

SEQ ID NO: 50488 - DNA, 458 bp, Oryza sativa
  unsure (1)..(458): unsure at all n locations
gctgcaagcttcagtccgnnagcctggntccttttaatagtgttttattattgggagatnttcatcaacattttacattaaacgtgatgtaatgaacctctgttaattggtaattgtcagagctctaagtttttgtggtataaaatttgttgcaagggggcaatgcactcaacttttgaatcatttgattggtatggaaatcattgcatttgtgcagagttcaagcagagttcagttcttgcatttgcacatcgtattactattacctggccttgtttggcacatctncagttccagctccacctctcctagagctggagctcagccaaacagtttcagctccaccgaaaatgggagcggagctgggtggagcactctaacaaaatgaactagagaggtggagctagggtaagctgttccacaactncacttcagatctaacttctannaagtaaatt

SEQ ID NO: 50489 - DNA, 259 bp, Oryza sativa
  unsure (1)..(259): unsure at all n locations
acctaatatactaagccatacatcatatatcaagtggtaccttgcttcacgtatctctaaggtcgctaattngacttttaaagctgcgcgtatctatttcagcgagtattacacatcataccatcaagttcgcatcattctgcatgtgtaaataatatatgtctatttataagcttcgatgaaagcgttgatgatctgatgattttcacatcttgctagactattgagcaatgactagaaaaaaaagagttattacata

SEQ ID NO: 50490 - DNA, 327 bp, Oryza sativa
  unsure (1)..(327): unsure at all n locations
ccacaagagtgtcgtacagccaggtaatttttttccctctacgcctcaagtggatactatagcgctgtctctacctcatcaatttatctcatgaaaatgcagtgtttttgctggtctgcttcngtgcaacataggcaacacgccttttacttatttgagtttgacaatgggaacaaccacgccaaaggtagtggactttgcacccgtggttcacaaggtcataacgaagattaacagcatgctcactatttctgccacaatgtgtgaaaactacattgattaactctgtgctttgctcactcccatcatactatatgtgttctttgc

SEQ ID NO: 50491 - DNA, 488 bp, Oryza sativa
tgtaatccgagcatgtagcattacagggaagcagttatctcacttgatcttacagttgcccttccttcattacttgacaattggaaagtgcccaaagataacatccttgttgcttggtgatgtgattaatgggagtgacaactcttcaacatctgattacctccaattgacaactgatggcatgttgcaaataccatctcatctcttaattcaacttcaggtaattgagcataagatgacgtttccagatctggttctactctggaaagaatgcttccatggattcacctcacttcggaccctacacattacaggatgcacacaacttctctccccatgatatcagaaacataaattcaacaaaactcttcctcctccaccattactacatgaccttatggttctcatgtgcataatgagtgctacctttcttgctctcgaaccttacctcgttatccatatttgaatatctaacagccagagtaaca

SEQ ID NO: 50492 - DNA, 329 bp, Oryza sativa
agctgctgcaattatgaggaagaagccagatcgtggtgccaacgagctaaataccatattagaggagcggtactaggtacagaatccttactgcactgataggaatggtatatagagggccatacaatagatttgggagttcatgggatgataactatgactccttgtataactgtaacgctgatatagagttgaggtgtcctggcaggcgaattgaaattggtaccaacgaagtgaatggtcaagtacactttgagaagttcttctgttgctatgagccttgcgtcacatgtttcttcgttaggatgcccaaaataccataacattga

SEQ ID NO: 50493 - DNA, 426 bp, Oryza sativa
  unsure (1)..(426): unsure at all n locations
gctgcagcttgatcgctgccgtagcttccttgtatagttttgnttaccaaagnacttgatgacttcatcacgaataataagatatttaattgatatgcatcttcttatgcattctctgtaatttgatattgcaaacaaatgcatggctcgcatgtcagtattcaattaatagagggtgttaggaatataagaatgtcatatgataaaccttcgaaagaacataccttactctggatgaacttatttgatctggaacaatctcttcttgcgtcaaatataaatcttttccacatgatatgtcctgaaacgatccataagcaatatgtaactatcaagagagatactaattactgtaactcctaattagtcattctactctgattctgcagattactgtggaatagttctcacattttcctctgtctg

SEQ ID NO: 50494 - DNA, 486 bp, Oryza sativa
ctatagcacgatcacattcttggactaacaaatggtcaatttgataaagatagggtgtgtagcgcgtgtcaagtctggaatacaaatggagcgcatcacccgggctagaatgtgatgaccactacgagaccattggagcttcttcacatggacctctttgggccaattgcttatctaagcattagaggtaacaaatatggtcttgttattgttgatgacatttcacgcttcacgtgggtgttcttcttgcatgacaagagtgagacacaagccatcttctagaagtttgcagaagagcaacaaacgagttcaaccttcagatcaagaacattcgatacgacaacagccaggaggtcaagaacacgtgcatatagaggtgccttgatgaagaaagcatcaagcatgaagtctcggccccatactcacctcaacaatatgagtatccgagaggaagaatatgactctcatctagatggcgaggacaat

SEQ ID NO: 50495 - DNA, 472 bp, Oryza sativa
  unsure (1)..(472): unsure at all n locations
agcttattatgaacagtatctcaaagaatttgatattatatggagttaccatggtaaccgtataaaaccgtgtaaaatccgtcttcaaatatttgaattcaaaaatcaacggtttcagcgtggtttctcgcggtaaccgcaatatttgcgcagttatcgtcaagtgtctagcaaaaaattgaaaaatcacttaaatgtgtctagaaattgggtataaataaaagaatatatagggatattgtaaacctaacttttaggtgtaaaatacaaaaattcagcataacattttctatattatggatttcgaagcaattcaacaacaatctaatgtactttcggtttcgctctcaaatttgaacttatcttactccttttcaaaacatttcttcaccatctaccactacaaatcaagaactatatnccataattttttcggaatnttgaatttgggtataatctatcacaccctact

SEQ ID NO: 50496 - DNA, 436 bp, Oryza sativa
  unsure (1)..(436): unsure at all n locations
attaaacctctagccgaccccatcagcacctctggttctgcatgacataacatttcctctatgtcgatnntatcctcaacagaaccatcgtcatgcaccatgtcttcaacttgtgtcggtactacattttcaggcccgtcgacttgttctttgccatgatgtgtccatatttcgtatttgtccataaatccacgagttactaagtgctccttcactttaaaagcatcatcgaagtcccaggctatttcattcttacagtcagcacatggacaaattatcttcctcatattggtcttgtcaacgtgtgccttggcaataccaataaatttagacacttcgtttctatatggggacaaaaacctcggcaaatgatacatccattcccgactttccatatctcanaaaaatgaacataaattattngcacaattaatac

SEQ ID NO: 50497 - DNA, 195 bp, Oryza sativa
tatcctatacatgtcaccatcaaactcgtgtacacgatcgatcaaatcgaacatgcatggcgatcgatcgatcatcgatggatttgcagatcgagcagattgttgttgactcgttgcaaaaaaagttgtttcaactcgagaaattaaaggcatgcaagcacgcatggactggatttttacattttggtccttttg

SEQ ID NO: 50498 - DNA, 419 bp, Oryza sativa
tgtctccgaataagagctctaatcttgaagtctggcgacttgagcctctaactaaattcaacctccaattctatgtaccggctatcattgaccaatttcttaagatgcttcaagaacgaaataatatctacatcagatttcaaataatcccgaacgtccgaatgtagacgttcatttaattgtgtgttcctcatgccaactgaaaatattcactttgtgtatgggctatcccacttctcttttctttcaataccttctgcaaccacacgttgttgtgagggtatattactgatcatagcttcccagcagaaatactccacctctctcatatattgatcatgccttgattctttatgaaccacatccctctataagggatgaggtacttatgcaactgcttaggtccatgtcatattgat

SEQ ID NO: 50499 - DNA, 301 bp, Oryza sativa
agcttacaaaagaggaaaggaaagctattatagctcttcccgaactcttccgaaggcttccggactccgatttctattctattcctactccactagcttaagaacactaaactaaatttgagagtatgagagagctttgcttggagtgtgtgagtgaagtgagaagaggagctccttttatacgcaggtaatgaccgttatgacggctggaaagggacgtaatacccttcaaccgtgttgcgaatcaatcctagccggcataagaaccctgcattcattggcgccacggcatgttccgccg

SEQ ID NO: 50500 - DNA, 213 bp, Oryza sativa
  unsure (1)..(213): unsure at all n locations
tctctatagctgttatgctatgtgtattcaacgatgtanncgccttatggtgcacacatcatattgtacaaagcagtcngtgtatcactcgatcatgttgatcatggattcacactgcatatgctatatattaatattaaggcactcggttgactacaattatcaaaaccattcagttggtgcatctattatgtacatctattcgatgcacct

SEQ ID NO: 50501 - DNA, 419 bp, Oryza sativa
  unsure (1)..(419): unsure at all n locations
ttttcttcatcagctcaatagtggtgactgctccaatcttaatgttggagcccccaatgcacaccaatttctgaatcaattgtaaaaactaactttatttattaccgatgtagtagaaaaaactaccattatgacaagcatattgaaaggttcttaatcacatgtcagaaccaattaatactatatatntctttatagataacgtcattgactcttggtgtcacatttgaccattcgtgggtaaatatattaaaatgtaagtcatacttaaagttcatttaatagttaaacatgtgtcaaccaaattaataatattttatttaccttttaaatatgatgaactgtcaaacatcctgcgaaaagttaacacgtcatctattaaatatgaacggagtattcactgtacaatcaacacatat

SEQ ID NO: 50502 - DNA, 429 bp, Oryza sativa
ccctctttaggacactttatctcactgtctagcttaataaccttaggcctgtatggggatccccaaaaattttacgaatcaatacaattgcttttacattccaactactgttgagagaaccacgcctttcgatgtggatagttgtccattcgacaacagctggcgccgaccatggggaacccagaccgaaagggcgaaatgggaccccttttgccacacccacacccttcgccacagtacctgcgaggtacatcgacaagggctatgggcgaaagtgagttaagtccaagctggggggctacgaagccgcccaagcctctatacaccttttgccacacgccacgcccttcgccatagtaccaatgaggtacagcatcaaaggttgcggggaacaagtttcgcccactcacgccctttgcatagtacaat

SEQ ID NO: 50503 - DNA, 442 bp, Oryza sativa
  unsure (1)..(442): unsure at all n locations
gcttgaagatgaacagtatacgggacgcaattagtctttcgtcttgggctggctgaaaaacaaaggaaagaaagaaagagaaggggagctccgctgggccgacttgggctgcacagcacgcgcgcgaaggagagagatgttgggctgaaatcagcccaacggcttatgagaggatttaacaactttccaattaaaataatcactgaaatgatctttgaattgtaaaaatacttccaatgctcaaatagtttcaagaaaaatcctgaaaatacttggacactcaaagtacnttaaaaaattataagcagaccatttaatgatgtaattaatatgtgaataattactgaaatgttctctgtatggctaaaattaatagttgagctccgaacaatccgaaaaaattccagagaatantaataaccatggagaattaatagaaatt

SEQ ID NO: 50504 - DNA, 338 bp, Oryza sativa
  unsure (1)..(338): unsure at all n locations
accttctcgtcgaggtgcttgngaagaacgtacaccttcttctcgtacttgccagtgctcttctccttccacagctcaagctgagcaatgacctgcaacaagcacagaattgattcaatcatgtaacttacagctatactcagcatgtttagtgagacaatagatactggtcatcatattttaccttggtagtgaatgagcatgacatgacaaaactggggtggccagtagcgcacccaaagttcatgagacgaccctcatgcatgacaatgatgccagtgttggtctcagggaagacccagcggtcggtctgaggcttgatggtgatgcgcttgaca

SEQ ID NO: 50505 - DNA, 351 bp, Oryza sativa
  unsure (1)..(351): unsure at all n locations
aggcggattcccttctttttgtncagaatcccgggagtggatttcgactaagttangaggcgtcttggagacaagcctacttgtgggtttcttgggtcaagtttgaatctatggcatttaaaccaagaaatacctagggtgtggcttgaaacaagacctcttctggccttgcttgtaggcaggggttatcaaaccgctctttgaactctcacggaacgacgatttccgggaaatccgatttggaaacaatctttgttctccactctttatcttggattgtatgctatcctattgctagcgtcttctgttccccttgttacatgtctatcttcgtattcattgattactctg

SEQ ID NO: 50506 - DNA, 479 bp, Oryza sativa
  unsure (1)..(479): unsure at all n locations
ntacatacgcatgcacctaatctattatgaatgacagaacatacatacaagagatgaatgcaatccgtgaacaggaccacactcacataaagatacaactggctaaatatgttaactgtgattgaacatcgaactgacaaaacgtaaacctcaacctacacttacttctattgattaacatgtgagcatataanaagcatcgcgtttaacacgcgaacatataaaaagtatgggctttatagctaaaattgtttaatgtaatgctgctcttaggtatgaatttctacctctcctatggtatattctcgaacccaaaagcanataccacatgcattggtgttcacaagcttctctgcgttttagtggagatgtaaatatcaatgcgtatagccatgtgaagcacactattatcaaatgcaaatctaactggatcagtccatgctaactaagtaatatacagtgctaccttaatcttggag

SEQ ID NO: 50507 - DNA, 438 bp, Oryza sativa
  unsure (1)..(438): unsure at all n locations
ttatanctatnttgctatgtgaatnttcaatgatgtatttctactntaagntacactcatcatattttacaaagcagtcggtatatcacttggatcatattattcagggattcacaccgcatatgctacatattaatattaagtcgcttggttgactacaattatcgaaaccactcggtgcatctagtcgatgcacctgactatatttttcagccctccacagtcttcatatttggtaaaagtactcgggagaccatggcgaagatgattgaagcactcggctttggagtaatctagttcgagagaatggtatctttccgactgtgaaggtctcaggggctactgtggagattatgggtactccatacccacacggcattgttatccgactagttatatgggataactnatatctatgtaatatgtaacagatcatga

SEQ ID NO: 50508 - DNA, 391 bp, Oryza sativa
  unsure (1)..(391): unsure at all n locations
taccggcacggttttttctggcctactgcagtgtccgacgccgacanaattgtgcgcacatgtgaatgttgccaattatttgccagacaaattcacttaccagctcaagagttgcaaactatcccgctgtcttggccgtttgcggtttgggggctcgacatggctggcccgtttaaaaaggcagtcggcggttatacgcacctcttcgtggcctttgacaaattttccatgtggattcaatctaaacctgttgtcacgattacagcagataatgctcgagaattcttcatcgacatcgtgcatagatttggagtgcccaatcggataatcactgataatggcacacaatttaccggcggagttttcaagactgttgtgaagatattggata

SEQ ID NO: 50509 - DNA, 387 bp, Oryza sativa
  unsure (1)..(387): unsure at all n locations
ttttttatgttatgaaagtgtttcctttctccgattatgaagatgccaagaacgcgatcggatttaaggacgacgggtgcgatgggcgcaacggacgaaaacaccgaacgaacgtgtactgactacggatggatgaagttaaacgaactcttcaactacgcacgggacgcggacgaaccagaagtattnaatttttattaggtgttattatattaagttattattatgagatttagcatagcagcaacaacatcataaatcagttatacccgtaaagctacgaattttctctttttttgaattttttcggctctcggaaggtttacacgtggtggaactttgcaaaattatattactccgttgagntgtgtgtcctacactgtagtg

SEQ ID NO: 50510 - DNA, 490 bp, Oryza sativa
  unsure (1)..(490): unsure at all n locations
accttcattacggacctttaaactcaactagttccacaaccattgtgagtagtatgaaattacacattttagcatgtntntatttctttgtgcgtagtttttttttgccgcttatatgttaacatattttgctcatataagttataagagaacatatctggtgaaaacacactttgaatatttggaaactgctatcttcatcattgcatcttgtacatacggctatgatagctcctcacttctttgactcgggctatactttttgcagaatgatcccttccaatatcctctatcgagattatgccatcttgcaatcctaaatgaggttcttatcacctcgttaacatttggtttgattacccgatctctctcaagtatacaatgatgaaaatttttttatacaagttgagtttgagctactcactgcaaatgtacaacactcaatctccttttcttctctccatatgtttatggcattaacgctttattc

SEQ ID NO: 50511 - DNA, 446 bp, Oryza sativa
  unsure (1)..(446): unsure at all n locations
tgcaagctttcagaaacttccaacataacttggtgtcaactgtttaatcatatatgccataaccaaggagattatcagtcttaaaaaaaacaaaggacattatttgagttatatgatatactatcgacccttgtgtggcacctcatagttagtgaaattttgtaagtcaaaagccaatggagaagataaggtactacctgaagcatagtctgaaactttgtgcgcagatcatagaagtcgtttctcacaacagccaatgccataaggcacctgaaattatgcaagcataccacattatctaaagttgcgaagaataaataacagaaatgaaactgaacagatattgcaagcttcaacttatttttagttggaaaaatcaagccatcttaganaattgtgctgtatagtagcatatagacaggagtctggagccagcacaattacat

SEQ ID NO: 50512 - DNA, 447 bp, Oryza sativa
  unsure (1)..(447): unsure at all n locations
gccatatgggatgaagaaatggataattccagaactatctatctttcctgggttcctggagcttatcangaagttgaactgaaggcagctggaggttgattgttgtgatgtcttaatactcttaagtcttaacccaccttttgattgtaaattgagttgactggtattatcttgtgttcaactgaaggttgtggcaagatgccggaggactacaagctatcttcctctgatgaaagtgttgcttctgtgtccgactcactgattgtgcgcacaaaaaggcctggtcgagctgtcatcannagtagttctcgttttgatgccttacattttgatgaggtatgccacaatctaacttcttgatatccttttgtggtcttctcttcctgaactcttatctgaatctattgatttgaaatgtagctgaattgataatacatgcaccacact

SEQ ID NO: 50513 - DNA, 458 bp, Oryza sativa
acactaacatgcaacaccctaaggggcgaagattgtcgcttccttagcactaaattgtggcagtcttaaagaaattcgacatcacaaaatctgaatgttccattttcttgtcagttagtacatactataaagaacgtgctaaacctggtccatagaaaccatgacgaaatatatcaatgcatcctcgataacctgtgtgaacaaagaataaatagaccaagtatagcggctagtacgcatgacaggtgagcatgcttggttaggatctataagaagtcttcatatttggcttgcaatacccatagtcccatatagattagataaagcaataagaaatgcagattaggtgcagatcacgtaacaactagtgtacacgaaaacctggtcccaaattagtttgacaacttcatcaccatgtgagattctatagcagttatctgcatccagttttcgtgtga

SEQ ID NO: 50514 - DNA, 452 bp, Oryza sativa
  unsure (1)..(452): unsure at all n locations
cttctgatcaagattccaatctctaatggcatcctatatgttctttatgatccgctctcagactctgggacacaggcttccatacaatgtatcatcctttccaaatcagcaggcgcggaccaaaacattccaaattttattattatcctatgaactttccagtcttcatcaatataatgtgctgtcaaacagaggtaatttactgttgtctcaggtccatcacgagtccagatgcttgctgacagagagacacgtcgggaaaaatgtgcaattttaccctttatattttccttttccttctgaaatagtgtcaagcaatgttcttccatagcattgcgagagactaaatngaccacanggttgagtttctttacaaatctcatcatttcttcgtgctccacaattgacaaaggataaccatgccaagctatcatcccgactangtctggatc

SEQ ID NO: 50515 - DNA, 380 bp, Oryza sativa
  unsure (1)..(380): unsure at all n locations
cgattctggtgattatgtantaaccgatattatgcgattcanatgatntatngatctcacatcttggcttccagtccgcatccaatattccaaatataccggcgtcaggcatggagatgctattaccagtcaaaagattcctaagtatatcttgttctggccaatccaaacaaaaagcttgaaaataacatctattgtaacatgcgctgatatacaatggatgaaatttctgcgagacacaatctgcatccggcctattgcctcgtganttatatcagatcagccgaactagactgctatcttttcatctagcaccgtgagataacgtaatcaattcactgacctgatcaattatattgacagacgttaacaacagtgac

SEQ ID NO: 50516 - DNA, 273 bp, Oryza sativa
caacaaacttatcttgctgacaactttatatatgaagagcccctattaattattgctatacctggacatgaccttatgtatgaatcgaattgatattaattgattgcaagatttattctcttctacacagatcccataaatggagtaggatttatgtattcttgttctctactgtaggggtgtggacacctttgataccttatatagagcgagaaaaatcccagttgtatctgagatcgcgttaacaccattccttttctcaacccactcctt

SEQ ID NO: 50517 - DNA, 350 bp, Oryza sativa
  unsure (1)..(350): unsure at all n locations
atgagataattngacaatatagtgctacggtaaatatatgctaatgacagattaattatgcttaataaattcatctcactgtgtattgagggattatgtgattagataccgacgtgacacgctaaaactttacatccctatacctaaccacccccttaattccttaatcttcatgtttagaagattcgaacggtggatccagtcttcaacttggcacgcacacgtctcaatctgcctctccattaatagccaaacaagctgtgtggcttttctcttgcaacttgcagctgtgctgatgttgctgcattctggtgaactacgctaaaaggcgatttgtggtcaagccctgt

SEQ ID NO: 50518 - DNA, 349 bp, Oryza sativa
  unsure (1)..(349): unsure at all n locations
ggcggcacaacaactatatggaccgagttacctcagcagcagcagccagtacgtaatcccgggggtcgaggcatgaagcatcaatagtcccacgtcaaggcatgtcacgacgcggacatgatggacgttgactgtccaacatcctggacgacgacgatgaccacgatcacgccggggtcaagcactactacatatccgggcttcagtgacgggtcatctgtgacgggctaacgcaactcgtcaaagatgagtcatctctaaccggncgaaaaaatatcctcttcaatatatggctaccacggaggacctgtcacagatgtgaagtcatctgngtctgtttgcacttgta

SEQ ID NO: 50519 - DNA, 331 bp, Oryza sativa
gccgacatactgtacaaactggatatatatcatctcggctattgcacagcgaaagtgtacatgttgtctcccctcactcgatgtcataataccatcttgaggctcaactatattggagttatcagtgaggttatctgatttattacatccaccatatacatttagctctcttgtggccttagcttctcattactgtgtcaacatttatcactttccttataccaaggtcttacttaggaatagatagtctttttcctcggtattatgcaccgcatacttgctataccgaagatacccttctgaaatggacacacctcatgcctagcatatg

SEQ ID NO: 50520 - DNA, 231 bp, Oryza sativa
aaaaacgcgagcacaaaaaacgaaggatttttactcgaaatactggggggacaatagggaaccccccgagcgagaaaatgagaggcgagatacttgggagaaaaacaaagggatacacttgagtacgaaaagggcagcaagagaaagagggagagagccaatttgaaagatgaacagaaaaagggggaaagcacaacgacgagaagacaacacaaaacagtaaggaaaaga

SEQ ID NO: 50521 - DNA, 350 bp, Oryza sativa
aatgaaacccccccttagcgtatgcatacggaagatataaataaactcatatgcacatgaataacggaacaactgcggagaagttccttcatcactactccttcgtgggatgcaataagcaggaacaatacatatgatatgccaatgacatgacatggtgagcactcaaaagaatatatcaacatcacatcacaaacaagaaataagacactcatatcataaatgaagcgccataattataaggagcagctaagagcatctacagcattacctccacccactgagaaatttacatgtccacagtccaaagatagaggcaaggactgcacgccggacttcgataaataccg

SEQ ID NO: 50522 - DNA, 367 bp, Oryza sativa
tcagcttatcatcttcgattaactagctgattacatcttacactatatatattactgctatctgtcaatgtcatgtttaacttttcagcagctcggatgggcgaagttgacagtacatagagagctatgtagaaatgttactgtactagctagcttggcaagtatagctgctccatcttgaccaatttgtggagttggtttggttaattacataatgagttgatcaccggctggtatggatatgatgaatgatatgacaattacgcggttgctgataagctgattgctaattgcgagcacccctaaacaatctaactaagcccgggattactcatgaattatcataacctgggtactatatattaat

SEQ ID NO: 50523 - DNA, 367 bp, Oryza sativa
gactgcagcatgcaacttcatacgttgataccgacaattcaattttctccatataaaaactctttacgagtctcaataacttgccgaatgccttgtcagtaacgccactatttcgccttccattgcagcaattacagcgtggtacccaaccttttgtgcgccctgatcgtaacctgagtacaatatcggtttgtggtccactaacatacgcttcaatttttggacctccctttaactatccagccttactttacgtccacaatatctgacctagatcatccgcaccagagtttacttcaacagcttcacccccatcgactgttgtatatgcatatccaccgaattgagcccattccggaacgttgtc

SEQ ID NO: 50524 - DNA, 351 bp, Oryza sativa
  unsure (1)..(351): unsure at all n locations
ttatcttttctattttagtaacacctggatctgtatgtgaccattgctctntgtgcaccccggttggtccttgacagggaatttatggccaatcaacttagaaaatttggttccaaatatcttggcgtgacatggtggattctaaccgactctgacgtaggaaagccaactggaaccctagagctcgggaaccccatttctctgcatatgcgctttgcacccggaatgattggggatatggaatttggctattggttgcgggaaaatttggccgtcatcgacggatattttacaaaaaagactcatctaggctagtaaattttacgggttattcacatccccggattatgg

SEQ ID NO: 50525 - DNA, 395 bp, Oryza sativa
aattccggtggagctcacgcgcatgttcaacctgagctacctcaacctcggcgagaacaacctctccggccgcatcccgccggccatcttctgcaacttctcctccttgcagtacattgatctcttctccaactcgctcgacggcgagatccccatagattgcccgctctccaacctgatgtttctcgtcttgtgggcgaacaacctcgtcggcgagatccctcgctcgctgtcgaactcgaccaatctcaaacggcttctgctggagtcgaattaccttttcggcgagcttcccgccgacatgttcggcggcatgaggaagttagagctcttgtcctatccgtcaactacctcggagcccagagaacacaccaaccttgacctttcttgcctcc

SEQ ID NO: 50526 - DNA, 455 bp, Oryza sativa
  unsure (1)..(455): unsure at all n locations
agcttcagcttaaccttctaggtccactctatttcctgttagtccagngggatctgcagcgcgatctatcgtacgcacatgaagaaactaccaattaagcctataataaaaatactacaaataaacgataaaataaatattatgaatcggagcctgagcaaaagaaaatgataaatcgagagttaagttgattcgaatggaaaaagattcatcctatggttatgattcatggtctgtgtagtagtgattgcaatttgatattaacgctatagataacagaggtgacaactgagattgatttggtgttttagagctcgaacaggagcaaaacatcttaatataactgtttggacaggttttattgtggttaggcactacttaggtggaattgatggggatgggtgggtcaaccactaagaaacagtgttggccgagactggtcatcttctcccgtg

SEQ ID NO: 50527 - DNA, 477 bp, Oryza sativa
  unsure (1)..(477): unsure at all n locations
ntagaccggcttcttgagaagattgagttgatggaggccatccttatgtcttaggagaagctcaatcaaatactacgtaagttgtaagagatagaggcttgcatgagcaaggctgctgttggtatttgatatggttacagatatgaatccacaagcgcatggatataccgatgcactttccctacggagtatttcaagggtatcgaatccaacggaatgtgtgtgatcagagcttccttcggttcattcaaagacaccaagaaaacgataggccaagatatagaggatttactagtgagaaatagtgtgcagggaatcctaacgcaatacttcaggcactagcaacccgctgtttccagatgttgctctactacgtacccagacagggatgacttcagtgatctctatggcttgcacccccctctacacacacctgaaacgtactgtgngatacaccgcatttactggataatatta

SEQ ID NO: 50528 - DNA, 375 bp, Oryza sativa
agcttgctcgggcagctggaggaggaagattatctttatacatgccctgacagcattcgaaccgggactaaagatgatctttagtcccggttggtgttaccaaccatgactaaagatcaaatatgttcgctacccttttaaaccgggactaaagatcatctttagccccgcgttatattgcatgcgggactattgtggaaatcggccggccgacgaaagatagtttctccaccagtgagaggaggtaattaatactatacctttgccatggctgcctgcacctcctcgctcgtctctctcctgctgctgctgctgctgctgcttctcttgctcgtcgcctgcgaggcgactgcggacgcagctctcaacttcacg

SEQ ID NO: 50529 - DNA, 431 bp, Oryza sativa
caacctcatggacaatggagccactctacaaacaagtacatgtgtaaaaagatccttatgtgagatctttggtggacatgtactctaactgtggcaaggtcaaggatgcaaggatgatcttttaagcaatgccatctaagaatgtggtttcatggaatgcaatgaatggtggctatgctatgcatggagaggctgataatgctgtgctgaagttccgaagagaagcctgacctagtcaccttcacttgtgtccttggtgcctgcagccaaactggctggacagaagaggggtgtatctactttaatgaaatgcagcacaagcatggaatttctcccaagatggagcactactcatgtatggttactctgcttggtcgggctggtcagctctgatatgccgtatgatatcataaatcagatgccgttgagcc

SEQ ID NO: 50530 - DNA, 416 bp, Oryza sativa
  unsure (1)..(416): unsure at all n locations
ggatgtttctttcatcacaataccatcatccacacagaaacatttaacctgtgctagctactaactgccgagtactgaaggcatgctcaaccaacttagagaccctcatctagtatcacgcatattcattgtgaaaaagcaatcagcatttgtgtcagccaatctgccttctacatggcagttaaattntctagctgcatatacaccaaggaattaatactacttcacatcttgaatgaatcagcacgcgtgcatacaaatatggggcacgttatgaacacatcgaatcgatgcttcaaagaatatgcagatgatgcatgtcaggtgtcacatacaattccactcaagttgcaatccataaatgcaaatgcgaggaccagaagagggcaccgtatgtattgctacccaaacacaaa

SEQ ID NO: 50531 - DNA, 332 bp, Oryza sativa
gcagcagctgagcctaggaggagattttttttgatgatgggcaacactcctgcggcgataatataaaaatttaaatttcgcctgcaaatttgaccctccattattaatttcttctaaaagaatatataatttaatcgcgaggtcactcactatctacacgtctctaaccaaacgtttcatttcccaatatttaaaacacataactcaaaagagtgggccaacgtggaatcaaaactcagaatccttatgctcgtagacggaaggagaataaccggatcgcaccatggccacgccccctccaagagacgcactaagataatcttcatgcggca

SEQ ID NO: 50532 - DNA, 475 bp, Oryza sativa
  unsure (1)..(475): unsure at all n locations
actcagctngtacaaagtgtttgccatacaaatccctgtgaggcgtttgctacaatgtgacaaaaatataacctgtgagtttgttgtccactaacaatacgactaaattaacggtatacctgcatgggaaaagtatgtgaaaagagaggtagtggccacattatgacaataacaagcaaggagctaaacttatcataccaagcaacaacaacatccacagagtagtgtttgcgagaagcaattataagaagactctgaactatggtcatgaaccaagcaagaagcttaacaaaccttgaacaaaaggtccaccagttaaattttagtgttcaggaatacactcacgcaaagttaatattcaggggtctcagaacttggtcatgttcanaccataaaacatcggtaagaacatacctttntgaaccatatttgtggtatgttcgaacanaaacaagagtaaaaatcatgtgagatg

SEQ ID NO: 50533 - DNA, 447 bp, Oryza sativa
  unsure (1)..(447): unsure at all n locations
agcatggcttcaactaacctatctatcacttatcttatattacntgaagtggaatcttggtcgttaagccagctcaagctatcgactaaagtcgagtaatctttgttaaatattccgatcgcgattgggacgtacacacagatcagctgagatcaagacgatgattagtccgcgggctctgctgcagcttgctgttggttactccattactgggattcaatgcgacttaggtcaagtgataaatatatatatacacatctgcattctgctatatctatgttcagagaattcaggcacttgatttctgcgtccaatgccgttcgagcacgatataaatctgaatcaatcaaattaaatgcacgatctgggagagacctaaccntctactaagtactaactaactagagattgatgaacggttgagtactacatgcgatgtgaattcag

SEQ ID NO: 50534 - DNA, 391 bp, Oryza sativa
tatgcctgtaccaactaatgatgataagaccaccttctattcattctgcaaaccccatgatcctagagcgacagctggtgcagcacatattgcagcataaaagttgcccttatctgcgtgacttttaaccatgttctccagaagattgtagtctctaagattggaagaccctggcataccttcctaaaaaaaacacaacccaaatggatcaaaatgtcggatattatcatgggggataatagaccaaaccaattcttttgtttctggacaagcttttggaccctcttagacacttgtagcgcaaaacagaactgcatgagtacaaaagagtagcatgactgacaataacatacatgtacattgttcaccaaaaagaaatattgatggaaag

SEQ ID NO: 50535 - DNA, 427 bp, Oryza sativa
  unsure (1)..(427): unsure at all n locations
agctttggtaacgcaagaacttcatatgtctctcaacccttcgatatcaacccacctggagtggtccttgtaactattcacttttctacatcatctcttatggcactcgttcttaataaatatgactaaaggtccttcatcgacacggggaatattcatggagaacttggcctctctcatcttatctcncatggagaaaaaggtgagacatctaattttggaccaatgggacacgtactattaagaagtgttccatccatttaaaatctcttatattttgggacgaacggagtatataacttggagggactcaagtttgcagtggagtttacgcccacccctacaactgatacttgattactctgatctctcatgagtgaatccatacttttgaccaaatatccgaattgttgatacataaactgat

SEQ ID NO: 50536 - DNA, 418 bp, Oryza sativa
  unsure (1)..(418): unsure at all n locations
taattggtaagttggttgactgcacaactgtaacacactgtatgcagattgctagaattggcaggaccatgcgtgttgttggtgatttggttgttaatagtactactacttagattgttaggatcactggatcatcaatgtgatatatatgatgcctggtgagacattatccacttaattccttggtggcagccctgcctgaatgctggttgcttgagctaacgcatcacagtacatggcaggcacgatgcatgtagaattggtatgactggatggaatatacagtgcttaattatgattcgattagatcatgaggtgacaaatcatgcatgatgccaatggtcttgtcaagaaagggaaanatcttatcgacgttattatttatgctccttatatatagttcctagcttatgtacat

SEQ ID NO: 50537 - DNA, 398 bp, Oryza sativa
  unsure (1)..(398): unsure at all n locations
catgcaagcacggctaccaagatcagcatgcctgattttatattataatactccaaaangacacgaatgtgtgctgctagatacatcgcaccacgagtcaaaggacgaaacaaattatatatactctaacgtgccgaaatcaaccatacttcctccccttccctctaatacacgtgaacagaagcaaacaggtcatcttcagactgagtaaatatgtgaacactaatacacgaatttaggtccagttagaggtatatataggacgacgtgatcaaatcatcttgaaacacctcatgtgccaaaatccatcctcttcaagcatatatattcatgcctgacgctcacgtgccaagagaccctcctcgacacaagcaagacccaccgccgcaccaatatta

SEQ ID NO: 50538 - DNA, 283 bp, Oryza sativa
tcagctttgttctggtctgacagatgttggaatagctgagtcttgtacatgcacagacactacagactctgggtgttgaatgctgctctaatatatctgaacatgctgtgcacggctcagctcgatcagaccagtactttcccatctcggacagatcaggtgctacccatattaatagactcgttgattgaggctcgtaattcggcgcttttgctgataagcctattgtctctgtgatcggacttttcaggaatcaccgccattttggaacctgatgttactt

SEQ ID NO: 50539 - DNA, 444 bp, Oryza sativa
cttcatcatcttcacctattgttgttgagcccacagccgaagccaatatgttactctgataattacctgcttataggaaacatatggtgatttatcaaaaaccctatcatttctacacaatgactgagcccaacataaagctcgggcaccaactagcaatcaatttactctctttccttgtccacctcctgaagccaaccatacaaaatattagatatgctcatatgaaggtatattccacaagaaaattgaactgctctcccaatcgacctttcataatgacaattcatgaactaatgcttgaatagcctattatccataaaaagccatcgtatacacccattccaatatcatttttgtaagattattcttggttaacacgactctcttaattatgtatcacattaagatcttaatcttaagcgacatcttaagctcccaatg

SEQ ID NO: 50540 - DNA, 417 bp, Oryza sativa
caaggacgagcagcactgacaaggaccgacatctcgctttttgtataacaacgacaaggaaatcaggtagtaatcgctctaggaactacgcactccattcaaaaccaaaacaggaagatgtcaaatctgtgaatacctctcgattgacaaaacgtgaatacatcaaccaaacacatgggtccatgatctaaaacccctgcaaagagcaagcaaacaaccttaatacaacaggagatcctcattattcccccttcggtagcatgcctatggaaaagaaataggtctaacgctcacttatcctacacaactttcgaaagagccatgacggagaacgacaatgagacaaggttggacgcaatcctggcattgatgacatttgcagcattcctggatgaaaacaaagcaaatcaaacctca

SEQ ID NO: 50541 - DNA, 243 bp, Oryza sativa
  unsure (1)..(243): unsure at all n locations
agcagcaacngggggcaccgcggcaagcagtcttttctttacaccgacanaattccggacgaccagtgtcatataaaatactcccctcgcctcatattataaaactctctagcatctgccacattgatataggtgacaatgaatccacaccccacatatgtctagaaacactaccctatgttagaataccgacaacgctagaaagcttataatatgaaactgaggatgcacctattagttttc

SEQ ID NO: 50542 - DNA, 375 bp, Oryza sativa
atctcatccgcaacgatatggatgagtctgaggctggcacggtgaagccactcaacaaatgcgacgaacgtgggcacacctacaagcatggtcctacagacaaggagaaaccaagtgcggaggaggcaggactatcaggatcatcagcagatggagctcgccctacgggtgaaagcactacctccactcgaccacattctatgcgtcgtcgtgccacgtatagctatgaggagcagttctctctgttctatagtggcatgtggcctcgcattgaattcgttaccaacatatcgacgagttgatgattcgtctggtaaagtcagacatcggcatgtcatgcctctaagtctctgtatggaacgttagacatatgca

SEQ ID NO: 50543 - DNA, 467 bp, Oryza sativa
ctatctgacttcctcgccgagcggaccgagtgtctataatatatgccacaggagaagatgggatattggactatgcattttgatgggtcgaagaggcttacaagcactggagctggggttgttctaattttcctgactggagaaagattgagctacgtattgtggatacattcttctgcgtcccataacgcggtggaatacgaggcgttgctccatggattaatgagtgccgcctctttaggcattctccgactaatcgtccgaggagatcttagttggtctttaatcaagtcatgaaagaatggtcctgtctagatgacaatatgaccgcttatcgacaagacgtacgcaagttggaagataaattctacggactctagctcactcatgtcctccgacataataatgatgcagcagacctgctggcctaatttggttctaaacaagaagcggcttctccagatgtg

SEQ ID NO: 50544 - DNA, 389 bp, Oryza sativa
acctgcagctgctgctgaggacaaagacgatgatcttttctgcacttggaaacattgcggtactcttgcctaaaccgaattgaggtgatcctctcactgtaaatctattaatagtggcaaaagaaagggaaaagtgtattattgggcgtcctccgcccaaaaaagaaaaaaaatggaaggccgaatatcataagtcgaaaggatgggcatctatttcactggccaaaagccaacccactttgagagctatgggcaaatcaaaaaagatatcccgcacgattgataacaaccaagattcgaagaccaaatatatcgagaaaaatttggcaacatctaacaatcgagccatacccacaatattaaaaccccgtgaagcctgggtcaatcac

SEQ ID NO: 50545 - DNA, 366 bp, Oryza sativa
tgcatctttgagataatcatgaaactcatgctccatttattatcatgtcgaaatagaattatgagcaagcgaactataccatgtatatgctcagattgacaaacaatagggaaactactttaacttaagcaaattatagcttccggccttaccacattgatcaaaaaatccgccgatatgctccattgttgttctagcatcctcacctgtgaatatcgtgaagttgggcacctcatattcttgcgggtatgggacccaatctatgtgtttaagatactggctttgatatatatgcataactattttagaatctatctcactactatcccgcaagacaatatcattatcttttccaacattcatatg

SEQ ID NO: 50546 - DNA, 147 bp, Oryza sativa
acgacattgaattactaaaactgacacgagctgacacgaaaaaccaccctaacaccttccccacccccgaatagacaaaaaagcctgccccctacagtgaaagaaagaagacccgctcaaacaaaatcagtataccaataaaaaaaa

SEQ ID NO: 50547 - DNA, 448 bp, Oryza sativa
  unsure (1)..(448): unsure at all n locations
tcttccccttgctggttccaaccaatctactgcttatttttctttgcctacctcagctaaccttgtacaatctatcatatagcacttgtgctgaaattttagtactacgctatctaggagaaacgaaaacctgtgtagcatatgaaaattacatatggattctaaaggagaaaaccctctttatactcctagaatctctattaaggcactattactgctgcagtagcttgttgttcttctatggttaacactaccaccactatgcaataaatatatatatgtcgcttgaggcatcacttgtccactatgatgcatggatacgcgatactggtacggcgatacgagattntttaaaaaacatcaatacgtcgatactgcaagtatatataaacatatgtttaataattaaatataaggaactactaacaggtggagcaataagaatatc

SEQ ID NO: 50548 - DNA, 317 bp, Oryza sativa
  unsure (1)..(317): unsure at all n locations
agcctctcatctatagcaataatagtcttatgagtatacaggggcataccatcgcggggataggcctaaaattgggggtgttccacctatggattngctagcttgctttctgcagcatgggtgggcagcatctctatcgacgccctctgcaccagactggctgcaaccacctgtcttagatgccatgggcggagcttgacctacacacttccctcctcctaacgctgtagacgccctttgcaactggctgtactgtattccccatgcttgacgccatgggcaaacatgaactacaccttctcctcctccgaggcctt

SEQ ID NO: 50549 - DNA, 424 bp, Oryza sativa
  unsure (1)..(424): unsure at all n locations
gatgatggtctaggtcctctgccttcttagtggaatggtaaatgtctaaccggccaagcatttggttctaaccaatgtcaccgaaagataattggggctcgatggtatgacaaacatttgaatccagacaatcttaaaggtcagaacaagtcagctaaggatgctgatggacatgggacacacgtcgcgtccacagcggctggtgttctggtgccaaacgttaacttccatgggctaactggtgggtatgccagaggtgctgcaccacgtgcacgtcttgcagtntacaatgcgtgctgtggatcgccgcccagctgtgatactgccggcgtcttgcaagcgtttgacgatgccatacatgatggtgtcgatgtgctgccccttactattggtgcaccgggccttgagtatcctgctagcctcc

SEQ ID NO: 50550 - DNA, 468 bp, Oryza sativa
  unsure (1)..(468): unsure at all n locations
tcttgtatgccctctcaatcactatctcctcgatggtatactgaaaataagntatcgtcatcctatcttagatatcaatacaaaagattgttacctaatattctaaagaaaagattgacaaacctcattgcataatccgaaaacttgaacttctttcttttgacctatcctatgtgcaccgtctagagctcgcagatcagcttgtggattcctgaagacatcaacacattaacactaaatattcaacatacatattcatgggttcagaagataacaatttgcacataacagcataccaatcactatcataaagaaccacatcatcagcagtagcaatgttgatgccaaggccaccagccctgattgaagcaaaaaaacaaactcttcactgcctgcgttgttgaacgcttcaatggatgcatcacgatcttcttcatcagtatgttcatctatccggcaatactgata

SEQ ID NO: 50551 - DNA, 343 bp, Oryza sativa
  unsure (1)..(343): unsure at all n locations
agctagcattcgcagcagagctatcaccactcgtattatctgggaagaccagcgggctacagaatggaaagttcatcatctatgagcaacacctcagagaggaatcgccgagattatgcaagaagtgtggccatggattctgcacgtcattctataagtgctaagtctgcctcaaacctcagtacgagaagcaacatgcagggttcaaggggatccatcatcctctcccgtgagatgggggactcgatactgagctcgatgaggcattcgcattaatcagcacaccagantgctacgtgatgaagatggcacaattcctgctcagggacttgacagtggtgac

SEQ ID NO: 50552 - DNA, 312 bp, Oryza sativa
ccttaaatctcagctctagagaagagataaggatgagatgggcgtgctccagtatcatcccatctccgacgccgccgccgcaggagagagctcataagcggagcttggtgaacaaccacctgttcttgccggacttgaagcggccctcgaagcgcgccttggcggacttgcacgcggcgaccttcttgtccctggtggagagcgcgtctggccccgccgcgacctccttgaggtcgacgtccacggtgcatcgggtgggcatgaggtgggtgaagttgacgagcttgacgaagcacttgacgcgcgacttct

SEQ ID NO: 50553 - DNA, 421 bp, Oryza sativa
  unsure (1)..(421): unsure at all n locations
gcatgcaactnttctngaaacacataacatacttgttgttgcacacatatggatgctcaacgactttccaagtaccattagacataatcgagaccatttcactgcgtactgcttccttccataaggcagcgtcaggagatgaatatgcctcttctatggatcttggggtgtcatccacgagggatacaatgtagtcatcttcaaaggattttgcaaccctttttctcttactcttgcgagtatctacaatgttgacctcctcaagattatactcaagcgattgatcattgtgttcaatcggtgcacagtgctcatggggcatgacagtttcattactagaagcgctacgtgaatgtctcatgggaaaaacattatcaaaaaatgtagcatctctggacacaagaattggaccaacatgcaa

SEQ ID NO: 50554 - DNA, 247 bp, Oryza sativa
catgtgtgtgggaacgttttttttttattgccagcttacatgtggagcacaagaatgacccacgtgacctgtctgactccgtcatgtatcgcagcggcacattcacgccattgctccgcgaagtggagagtgtgccccccatcaaaggactagacgcaccaacgaattccgacatttataaaacggggggagctccaccaaaacagggaactgggcatgtggatcccctagataacaacgaggaccc

SEQ ID NO: 50555 - DNA, 376 bp, Oryza sativa
ctgcagcatgcaactgggcgagaccccaagaaaatgtttttcttcctctgaatataggaggatgatggactctgtcaatgtcaatcgccatcacacgagaccgagtcagaagtgagttaccctatcagcatattaggcactgggtcggccaatgatgtgtcctactacaggcgtatcatattagttcaggcgtggcatggacgatgcccaaatcatcacctcaccggcctgtagcaaaccaatccctccttactcctcgcaggataataatactaccattcctccggcaaataagaaagacagggcttacccttaaaaccacttctatattctacaagaaatcacgcatcgccatatgcaccaactgtagatccct

SEQ ID NO: 50556 - DNA, 430 bp, Oryza sativa
  unsure (1)..(430): unsure at all n locations
agcttntggcagagatgttggcgtttcgctctcttatttcatcaccaacgaagtcatgctgaatcgctgattgctgaatacagttactagaaaaatttgtacagcaggaggagaacagaaagatgcaataaggtttgtctagctgcatgaagaccaggtttaatataacgctctgtcaacctttcatatctcacataaccaatgtaagcaatttacagatggtcaacaacagtgcaagggttatctgcaatgcacatggacatttgaacacttgcatttgctgtaccatatggaaaggaaagtctcaaagtcgccttgcggaaagaaaattcgcagacaatccaatgataatcagcttacgctgtgtttagttcacgcttaaattgatagtttggttgaaattgaaacgatgttgacgaaaaagttggaa

SEQ ID NO: 50557 - DNA, 436 bp, Oryza sativa
  unsure (1)..(436): unsure at all n locations
cgaattctttctcaacttgaggccattgcttcttgtctgtaatgttatggatggctgatgcatatgctggctgaaatctgagcacaaagaaagccttatcaacatatttctccatatttggttgcctcacggttgtgatgactgccaatgcatgttggcaaggtttcccagtaacttgccattccctgcaggtgcacatgcacttgtcaaggtacaccacatgccttgttagctcctcatcattatgtatctctgtaacctcagcttggtaatgatcacccttagtgacctttagatggcctaaccccttctaggctgcattcnactggtgaatcaccacacgaagaatcactccattgatggctgtagagatcctcctactcttctcaaaaagaataaagggtatcttcctagtagcatcagcaagagcatcaat

SEQ ID NO: 50558 - DNA, 258 bp, Oryza sativa
ttatggcaactggtggacctatgctgccaattattattatttgctataatccggagaccccatgctgggaaaaattctcattcttcgatcctggctaatgtaatatgctgtctaaaaaatgtatcatgaagcacgtcccaatctgtatgcccattcaggtattcactcttcaggaaagtcgcgttgatgtatgcctttaatgagaagtggtgcctttgacggtgagcaaaggctggcagctaacaacctatatcattt

SEQ ID NO: 50559 - DNA, 400 bp, Oryza sativa
  unsure (1)..(400): unsure at all n locations
aacttccgggcgtaattgagttgcccttatattgctctcatcggaatgtactatcatcggtacacgcaaattttgggttttccaaccatttcttttcacaaaagcttgctgatatgaaagaatgggaagctcccgaatcgaacagaactattgcgggtacggagttgacagagaacatacccatcacaacgtctggagcattctgagcggtttctgcttgaatgtgattcacaccgtctcgaccaaagctgttggaagcacgtgaaccttgttcacttgnctgagagctatgaccagactgagctcgcgctggagtaagagttctggaagtgctaccattagcatgcccttatatggtgttcgtaggattctgaagactctgttcagcataatgacccat

SEQ ID NO: 50560 - DNA, 309 bp, Oryza sativa
ttccttctatggatttgactaaaccaaacaaaacaccttttggtttaattgccggtcatataaaaatttctctcaccataacacagcccatgtagtaatgcaacgctgcctaacttaactcgaactcatccatcatcccatctggaaacagtgacagcgaaacctgtatagtagtaataatactagttaaacaacaagaagccaactggttatccgccattgctgcgagaaagagaaatgaccagcttaataaagttcttgcaacagaaatctgcacctccatcttctataactgaccgatctctgtcg

SEQ ID NO: 50561 - DNA, 324 bp, Oryza sativa
tcactcgcactctcagattctttctttcacgcgaagcaaaagcgcatatcaagcgggtggcgtatgcggcaggacaggagtccggacctacccgtatcatgggcttgccgaggatgggggcgagcggctttccctcaaagcgggaggaggcgaagcgcgccggtatgatgcccaccgcgcggccgcggaaaccgcccggccgtctgtacaaataagccaggggcgccgaagacgccgccgccgcaccgagggccaacccgtggaagatcaacgcgcgcccccccaaccaccgcgccggcgaagatatccacgacagcgggcaga

SEQ ID NO: 50562 - DNA, 364 bp, Oryza sativa
  unsure (1)..(364): unsure at all n locations
gactgatgatcgaggaatatgatgccgatgcttcccaagatgctatttgacgacggcgcctctttcctgttccctgctctgctcgcgagatggggatcatgccacgctaggcgataccttcgggagacacttcatgcacaatgattgtggacgccgagntttcctctctcttatttaacttcctccccccccaaaatgatatatttctgaggttgtggcatattcagacatatgtacccgatcctatattaccctacttcctacgtagacaagaaatattgctatcatatgatgaaaccgggcggattagagttgatcgttgacttacctccccttgttcaatttcttacatgtcttaaaaata

SEQ ID NO: 50563 - DNA, 340 bp, Oryza sativa
  unsure (1)..(340): unsure at all n locations
agcctgacttcattcttgccaatatgacgatgtccttggcttggtgaccattaacccatggtgtcattcattagccgcatcgtagtgggacctattccttntcacatctcaaagttgaacattagtctcaacaaatcggatggcattcttcacttgatgaccaactggatgcatatgacagatatggatatgtttgtcgagaattcaataacatcacaagtgtcatatactcgtatgcaagctcaagtgcaaagatccgatataaataataggtgaatgttggtatttaatacacgcccagagaaaattcgcaagcgcacggatataccgatatggtact

SEQ ID NO: 50564 - DNA, 453 bp, Oryza sativa
tgttattggttgcgcacagtcgagaagaagcttgtgttgattcaatgcacagaccagaagcgggttgtcttcgcaactcatcagttggttggaccagctttagaatggtgggatagctacgaagcattactgccagaaggacataccatcacctgcgatgagttttcagccgtgttcaagacatcacatgttcccgtaggaatgatcacactgagaaaacgagagttccgctacctgaagcaagaagatttgaccgtcacagagtacctgcacgagttccatcgtttggctcactatgcaccagaagatgtggaaacggatgaagaccaacaagagaagtttctccaggggttaaaagatgagatcgcagtgcaactactactagaggaatatgaagaatttgagaaacttgtggacaaagccatacaactcgaaagtgagcattatcggatg

SEQ ID NO: 50565 - DNA, 394 bp, Oryza sativa
  unsure (1)..(394): unsure at all n locations
gcagcattcaactcagccattgtgctgcaagaaaaanatttcattattctttcgataactctaatagtgaaatgtattgacaacttttactgatatataacacatgtaaaaatntatattgtacaagtatgaaaaacaagggttgtacaatgaaaggcttatagtaaaatctatgctagcttgacgcttcacccctgcagaagtctaagttattgctttttccttgattttcaacggaggttattatggatattttccttccatagttcctaagttcgttaggagggtgagggagcaaactcctttcttgggttccccaatgcaagttgcgagcgccttccaccactcatgtatgttngtacatgttattcaatgaataagcttcacttgttcg

SEQ ID NO: 50566 - DNA, 475 bp, Oryza sativa
  unsure (1)..(475): unsure at all n locations
tcttaagcaccgcggctgcagcttagagtttaaaatgccttgaacattttattcatctttctaccaattntaggatggttcttttgagtttcccactcaaggtgctgttagcaaccgtaacctgtagaattattttcactctttttccacaaacaggcaatgttaattccttttgttttgcaggagagtattcctgagtacatcaacctgctgtctttcctcaaccctgaaggaagtgtcatttcgagtagttcaaatggtgattntactgatacaggtgatatcttagcaacgctgaaagaaaaatttgctcgtcatgttgcatttgagcggaaagcagattcttcaaaatttttggagtactgggttcctgctcgtctttcacgagtgcagctagaaatgtactgttataccttactntcaaactccccagcactccgatcacactcaagaactgatagtgttggtgctcttc

SEQ ID NO: 50567 - DNA, 339 bp, Oryza sativa
ctaagcttgcactataaacggtgtagcgctagcctggaaagttatgttgctgcgcctctgacatgcggaccccacatgtctacctaaaggaccgctgtagacctggtacacagagacagttcacgggtcgacggaagcggaccgcatgtgtttaccgaggcgagtggccaacatacggagttcactagacaccacacgggctgcacacgttgaaaccacgctgctaccgagcgggcacactaacacggtcaccacacgcacaagcgaacgactaccgacaccgggacacgggtaccggggtcgacaaccgcacaacgagcacgggcgacaacgaaatga

SEQ ID NO: 50568 - DNA, 457 bp, Oryza sativa
agctttactgtttgacaccttttaagatgcttttgtccaactcctcaaaagtcgagtaactgcggtataaaaggattttaaggtattgggcacttgatcacgcgcactttggcctaagcaaaaagtgcctaagtccctaaaagaacgtgacaggccacacctgaaaatatgggctgcagacatattatgcctaggccaaaaaatatgccttcgacaccctttaaaggatgacgcatataacatgctcccgagtaataaatcttccgggtaatatagaccaagcgtaactcatatgaatagcttctgatctgagtgattatcccttatgggatactccacaatggatgtaacaattgaatcccgactggcgcaagtattcagttgataacccttacggcgagtaatatatagtccagtctttgagcatataaaatagacccatgatcatgacatcatg

SEQ ID NO: 50569 - DNA, 454 bp, Oryza sativa
  unsure (1)..(454): unsure at all n locations
ctcgctnttatcttttccgctgcatttgtttttcttttctattttgcaagacgtggatctgtatgtcaacaattgtcgtttgtgtaccctggctggtcctggacagggatttaatgcacattcagcttagaaattctggttcgagaatatctgggcgtgacaaggtggtatcagagccgaccttgaccgtatgacaagccaactggaaaccctaagagccctctgaaccccttttttttcatctgcatatgcctttttgcacctggaattggtttgggaaaatttggagttttgcctctttggtttgctggaagaatcttggtcgttctttcagatcggattttttttaaaaaaaaattagctcagtctatggctttagaaacaatttagttggagttattcgaccagtcagccggaatatattgggagttatgcattaagtcgtgtctatatt

SEQ ID NO: 50570 - DNA, 397 bp, Oryza sativa
  unsure (1)..(397): unsure at all n locations
agctngctagtgtcctagctaacgctagactgctatatcataattatcgaggaaacgatagcatttcctcttccatggattgactacttgcttctgtggcaactccttcaattgacatgtatagtgctgaaatttgattnttactgggtctacttgattccctatttcccttatggaaggggcccttttttgataatatgtattccagtgccatctctacttctctcattgaaggccgttctcctcctttcaatttagtacacagtgcagctacttcatggacttctccatcttcctcctccttgacttgaggatctattatgttaataaggtttccttctgagagcagcataataaaatgtgaaacaaggccatcaccatcgaacgtgtcaacaac

SEQ ID NO: 50571 - DNA, 476 bp, Oryza sativa
  unsure (1)..(476): unsure at all n locations
tctcagctatctggtaatatgaagtaatnttccttaagtattcctactcgtttgttctagacaagtgtttatgctaaggaccctatatgagaaacctcttctgtttgttctcgtttatagcctgcatcttgcataggcgtctggagaatcggtatccgtagagaagtgttccctttcggtggaactgcctgnggagacgataaactcttagctagaacaagtgtgacttggaatatctttttaagttgcttctaaaaagatagataggtgaggcatacggtgagtaccgagtaggactatacatcatctgaaacaagcttctgaggctgtctaaataggattcgccaccctgcaaagatcctaaagttaaaatatctctcgaagtgaacagtattgaacagtaatttaaacagtaaactaaatagtggttttgaacagtgcttttgtccgaacatatatattattatatatatata

SEQ ID NO: 50572 - DNA, 460 bp, Oryza sativa
  unsure (1)..(460): unsure at all n locations
agcttataaggaggaacttgaattgatccatggcaagccatccgataaaaccacaatgcttcggccaaccgggtatgccattaccgaggataatcagaaatcttccgcttaattaatttgatcaagctcttgttagatgcctcggcctgcccattagcttgtgcataatatggtgaagaattcaacaatttgatacccacgctatcggcaaactgaacaaactcatcggacacgaagattgaaccttgatcagatgtaatagtttgaggaataccaaatcggtagattatatgttcttgaacaaattgaattgcatccctagaatcaactttcttcanaggaatggcctccgcccacttggtgaaataatcagtcgccaccaatataaacttatgccttttactgatggtgggttatcatacgatatataattcccaactctgatggcacggttaataat

SEQ ID NO: 50573 - DNA, 467 bp, Oryza sativa
tatgcttatgtacatcctgcggatgaagtacaattgtaagggaccataatgactttcgtttctctttttggttcaatcagtacaaaggccacacatcaaatgctggcgccaaataaagtactcatactattacttatcagacggttgtgcgaacattatgttacttgctagagcctgtgactgtggctatatgtggcacatggagatgaagtgattggatcaaaagtttccatgattgctcaatataaatagtcattactcacgagatcgtaattaagctataaaaatcacagcaacttaatcagtcgtaattatgatgctgaatgtgcatcttgaagaaacaaatcagcagaatatcttggcgaattaattgaggtaattctttctcggcgcgacagatcaactaaccgatccaaagcaagaaaatgtgttgaacagaagagcataagagaggcatacactgatgc

SEQ ID NO: 50574 - DNA, 386 bp, Oryza sativa
  unsure (1)..(386): unsure at all n locations
cataatcactactgcggacgttgtcataaaaggcctgagagactttacgcagaatatcatcaccagtgttatggccccacgtatcgttgatctctttgaatttatcaacgtcaataatcaacactgacagcggtgtaccggtccgcgtggcatgggcaatttcccgtttgaagatagtcggtaggaaacggcggttaagtaatttcgtcagtacatccataccgacttcgtggcgcgatacttcttcaaacaattcacgcagcaaggtaataatttgcgatacggtatttcttatctgtaataaaaatttcacccgcagacttctgttattcaaatatctggtggtacgcatggttngattgaaaataccgtcgaaatcctgaatc

SEQ ID NO: 50575 - DNA, 436 bp, Oryza sativa
agcttccatgtttatcttccttgttttattatactttgccattctctttttcatgtggagactttatcttctgtacttgcagatggcatgatgctggcacatatgatgcaaaaacaaaaactaggggtgcaaatggttcaattaggcatgaggaagagtacactcatggttcaaatgctggactaaaaattgccattgatctccttggtgtgtactttgcaatatcattgaccttgtagctacataattatctacttgtttgtccttgtgtaagcaatcctcacttgttgccgatcattttaagaagattaattgatgtgttactgatcttgctccttctcttgtaagagcctagtagctttgacacttgattacggtgggctcttccctcttcacttttatcaccggaagcttctgcttctgatactacttgacc

SEQ ID NO: 50576 - DNA, 344 bp, Oryza sativa
tttggtgacaacaacatatcttctatgagttgatatcaacaaagcaacgggcaagaagggacccggtatggatgaattggtagtactcctcgggcatatggtttgataaatatgttgatagcttatatataattcattcatatggataaatcactttattttaagacatggatgtcacaacatagaacatccgtgcttctgccgacaggaatattttctgcttggccagacaaataatgatgacctgagttaatcaattgctgacacatcggtttctggcctttctttctcacacatttcaccttgatgtacatgaggatgtgcggaccaatgccgatgcacca

SEQ ID NO: 50577 - DNA, 281 bp, Oryza sativa
tatcttctatctccggtgctatcagatgaactctcttttatttctgtcctaaccaattagaatacaatggctactggcacaaggagcggccgtgccgggataatgagctatttcccaaatttacatagaggatgagcttattttcaaaagtgaacgaacttaaaaccgactcatacacatatgacgttccaaagtaccgataaaaacatattcaatatttataataatagagatatggtaacagaatggaaaaagttccaatttctcccctccccgaacta

SEQ ID NO: 50578 - DNA, 409 bp, Oryza sativa
tgcctgatagcgtgcacaccaacacatcttttattgtatgtctggcctacaagcagttagatacaacaaagctccaatcatacttctatactctttatgatcaacagcttcaccatctttaccaggatccaacacagctgtaaaaccaattggtgttgaaaatggcttgcaattctccatcttgaaccgtctcaaaagatccttcgtatacttcgattgatgcacaaaagtaccttgaggtgtttgcttaattttgaatcccataaagtacgattactcacccatcatgctcatctcaaattccctgcgcatagtctcagcaaactctacaatccaagcgtgagtcgaacaaccaaagatgatatcatctacataaatctgaacaaaaaggtaattatccgcatgctta

SEQ ID NO: 50579 - DNA, 437 bp, Oryza sativa
agcttgcatcctagatgctttgtctatttgttgcgcattatacttagtactagattactagtacgacgtgagattaacttgagataatccagcatatgcacgtgaagaaattaaatgaatcagatgcattgagtacctcttccagtcaagaagcttgtacgattgtaccaactattttatactcctaaaatataggagtaataagttctagttctaattctagaaaaaaaaacttattttattttgagacataggtagtactagattatattatctttggaattgaccaatccattttatctcataatatagttctttcttgttttcaacgaaattaaagacaagataataagttaaatactctgttggaagtcactgaggttgtggagatatggagttttatgatatttatgactattatagacccccttgatcta

SEQ ID NO: 50580 - DNA, 409 bp, Oryza sativa
ataaaactcagctgctttattggtttgaaaaaaaagttatgtcatttgtatgacattcatatagtgtgttttcaaccatgaacttgcgccattttaagtgatttaggattaaaattgtggtgttctggtcgctgggcttttctttggttcattcatatacgtggagcccaactctttttcatgccaaccgggccaaaatctctactttaattcatgattcacaatgaagttgcccaactcaaatagtttagagcggttcgaattttcgattacataaacagggtttgaattggaccagatcgagcgaagcactcggtcaattttctttttccggttaaagcaatggtccaatttggctttctttatcaactataatcgatggtagtggattaaattagtttgatgatca

SEQ ID NO: 50581 - DNA, 233 bp, Oryza sativa
cacgcagccacgaaggcccacagaccaagcccaccacgccatgaaccaaatatactaattcataataaacaaggaaccagacaacagccaaatccccatttctcacaaccctaacctaccacaacccttccctttgctacactattgtgcatgcctagagccatcacaaaaagggggttaaaatataaaaaatatgtgctacacgagtggaaatgtataaatttaaccactct

SEQ ID NO: 50582 - DNA, 466 bp, Oryza sativa
  unsure (1)..(466): unsure at all n locations
ntatgttcggcgcagtactaatactggaacttatgagcaataattgctctatcaatcaccatctactttagacatatcttctgaaacttttttcaaatccaaaagttcagtatcttcctacaaattagtgaattatgaggagctctttgtgccgaaaaagaaagagcagggcaatatttcaaacttgcattcgaactgcgaaatatttattcaaaggaggagagatcaagataatgcagcacggttggttatctaattggctagtcaaacatgaggtggttcatagatctttgggcttcgatcatcgaggaatagggactttgcaaataatagcagaggattgggattccatagctgtcattttatatgtatatggttacaattatntacgtttccaatgtgcttatgacgttgcactccgtggatctctagctagcgtgtatcatcttacgagaatacagtatgg

SEQ ID NO: 50583 - DNA, 423 bp, Oryza sativa
agcttatgttgatgacgtacgtgtcaagattctttataatgctgacttgatcgcggatctagaagagacctttgcaagcatccgcgccttcaggatgaagtttaatcctgaaaagtgcatcttctgagtaccgtcagggaagttgcttggctatatgatatcccataggggcatacaggccaacccgtagaagatcaacgccattctcaacatgaaaccgccgagttcccagaaagacgttcaaaagctaactggatgcatggcggtgctcagccggtttgtctcacgactcggcgagcggaggatgcctattttcaagttgctaaagaaaaccgacaatttccagtggggacccgaagtgcaaaaagcctttgaagacctcaagaaacttctcaacactccaccggtcttatacttaccaca

SEQ ID NO: 50584 - DNA, 452 bp, Oryza sativa
  unsure (1)..(452): unsure at all n locations
taagctggctccataagacccaagatagccgatgctccttctttttttagggccacancccgaacgatgcaaggtgaacgtccgggagtttgtcccgacccttaacagtggcaagctgcgactttgattcctgtgagctaatacgtgaatgtagttatggcgcccgcccaatttgagctaagtctgccattggtggaagacaatgtgttagcatgtatgggtattgcttgccgatagctacataagcattacatggagctaaacaatgccatccgaaaatgatggagtcattcatagttggacatcacaaccaccatccctgttctattgtagcctgcctatattactataggctttgatgacctcatcgatcttctcagatccggagatggacactggtcttttaaatgctacttcttgaagtgcatacctttatactctgatatgacgga

SEQ ID NO: 50585 - DNA, 464 bp, Oryza sativa
  unsure (1)..(464): unsure at all n locations
ctgctctaacgtgctagcatgtaaaaaccatctattgattgctcattatgtggnaatcaccatgaataaaggcgtgttcctggtaccgcaaagctagtgttcgttggaagtttaaatgcctacactaaagtgcttaaccatattatagataataattggcaaggtcttactggaaatcatcattatttgatagaactcctccctgtctttgtacacacaatatttttagcttcgtaaaaatgatactccctttatttcatattataaaaggtagacactatcaatggagagaacacatgtcagcaaattcactccgctttctataagaggcggaaagaagtatgttatcttatctgaatgtagaaatgtttatagaggttcaaatgatgggcatcatatctctgatcaatttaatatgaaaaaataacctggagagataaagtgcattgctaacatgatcaaat

SEQ ID NO: 50586 - DNA, 459 bp, Oryza sativa
  unsure (1)..(459): unsure at all n locations
agcttanattacaaggatgataatatcattctgattagtgcaatttaccatcattattgtgttggtgtgcctcttcaagcgttctaattactatacttaaaataaaaaggagcaatggagcattccttggcgtcattggtttacagtcgtgtactcgtgtactaccagcaatctgagatctgaacttcatttatcactgtcactgtggtttgttgtcatgtatgtactaaaccagcaatctgaaggtctgaacctcatctttcgctgccactgttaaggtggatgattaactaacactaatgggtaatctccggaggcaaatcatcgattacttcgcttcgatggatctctgacggatagccgatggattaatgacttgaatattttgtaaccaagtgataatacaaatggatatactagaacaacttcacataggtgtgtgttttgcgtaaaattgaa

SEQ ID NO: 50587 - DNA, 369 bp, Oryza sativa
ccgcttgagaatcttgggttggccacgtggataaagggggtcacctccattatagcaagcacgtcattcaaggtgatcctaaatggcagggcagggaccggcttttaacatgacccgggtttacgtcaacgcgaccctctttctcccatgttactcatccttgcgatagacccgctgcaaaagcttttatccgcagcccaacatacatgtattctacagcccttgcacggaagaacaacatggttcaacataaccttatgcgcagatgatggggtggtgttcacaagactggacaaatatgaactctcagcggtacatgccattctacaaaatttctgacgtgctactacgatgaccactaatctggaa

SEQ ID NO: 50588 - DNA, 401 bp, Oryza sativa
  unsure (1)..(401): unsure at all n locations
agcttgcattaaacacctcagttcttgtttcttgctgagtacgagagtactcacccttgctctatataaatatatatatatagttcctccgctctgaagagaagataaagtgaagtgaagattagggtttcgtcctggttcccagccgtcgcctgtggtgttgggtgttagttcgttggttccgctgctgctgttgttgntggtgtttcctcgtccgtgtcgccggttgcattctcgggttgttctgagctgcaacctaagttaatgtaaataagtcctctatctattctaaggatttgcaatgattcatatttgtcaccgtgggtaccagcactatgtcctgtgactggtaccgagatcgcggtttcgtaggaagcgtgtcgcgccattatttctacgac

SEQ ID NO: 50589 - DNA, 267 bp, Oryza sativa
ggcagtctaaaagctttgtgtatggtaatttctatacaatagcctgaaaccctatcaaacatctctttttcaaaaatagaagaaggtctgccctctttttttcctgcccggcaggttgaccaagaaagccggagaaggggtctgcacgtttcacattgatgagcaacaaatgggctgcaatgatatacaagatgcccagaggtacaatatgccaactctactttatgatatgccgggatatgactaccgatcatcttggctaactcc

SEQ ID NO: 50590 - DNA, 425 bp, Oryza sativa
catgcagctcttccaaactgaaagggataattctttttaagagaatcgaagcatggaatgtattctaactctcaagatttggctttggagaggggcatgtgaaaatttatgatccacatgcggaaccatgacctagaaaattgtgtgttctttaactagtaccatgcacctatttttatcagtagtaaagacttttgtctcttgtggctcaacatgggttttatatctatcctacaccaacttgcttggggctaaagtcttttgctgttaaagatgaactgggaaacaatatacttaatttattttgctacaatgagttgactctattgttgagtggtacaatacatgctagcccataatctcatattgatctgccctgtgctgtgagtccaatcacactgttgacctcatcccctctactctta

SEQ ID NO: 50591 - DNA, 450 bp, Oryza sativa
  unsure (1)..(450): unsure at all n locations
agtgaagtaagccgccaattcttgttggctgtttatatcatctctcagctccttcctcttaagttccatcctcaggccaagaacatacttcctcacaatctctatcaactctttcacttcatccactttcctcctcgagtctaccacgataagagggatggtatgcaagatgctaaggaactgtctcanggcttctgggaacttaccatctgtggtggccttataagcagccttgagtctgtcttccatttgtgggaaggtgaaaacaagtgcaggagggcctctcacgttatgacttgcagactctctccaacctttctcaacagcgattggtattatgggggcagttgcaagtgcaccaagatatgagtggctgtccatgtgcagatcaacaaacacgggcttgaggggagcaaagtattttatgcccaactgcggctaactacctca

SEQ ID NO: 50592 - DNA, 435 bp, Oryza sativa
agctttcatgagcaaatgcctcatttttctctgttccgccgaaatttcttactcaagccccaaccaaacaagagcaaaccatgcgtaggtggaggggccggatctcaaccgagaggaaccttgagccaaaagtatttttctatgcccttcaagacctcaaacaaaggatggcacgccaactggttctatgtccaaaatcctgagcctgcgctacccgagaactccagccttcccccagtgtacccagacacttggaactcactgcctatgggagatgaagccgccccagctctagaactacaggaacgcatgctgaaactcaaggagcaaggtttgcaaggagagcatatcactccggacttcatcaagagccgactaactccaacaacgaaagatccctacagcctttgagatgatggaaacatgatccaaccg

SEQ ID NO: 50593 - DNA, 457 bp, Oryza sativa
  unsure (1)..(457): unsure at all n locations
tttagtagtttatataaaatcgacatgcacatttttgcattcttttcaaaaaccttcaaatcatatgttctatgtgttcaaaggtgggaggtgggggcttgccttgctccccttcttcttgctcaactgtcgtgtagtaaacctcctcgtaattcggcggcggtttgtctaatcatacatatgcaaaagtcaaaataaaaaacatacataaaaatccaacatgctctaaaatgaatgcttttntagactactagtaattgtgcacgtgcaacgcacggtgtaaaaagaaagaacatgcatatacattttactggagaaaattgtcaatacttatattatattgcgcgtacagaatgaacataatccacaatattctattaaattcacgtttattcacatagcgagtcatttttacctatacaaccattagaaaattctacactacaatgagaataat

SEQ ID NO: 50594 - DNA, 309 bp, Oryza sativa
gccgtgcgccgccgctcaccggagtgctccggacgccgcttctcaccgcttcttgccgccctaaccaccgccccgccaattcgctgccaccataaaatacgccataccgcgccgcccgttgggcacccctacattcccgcaatccaccggcgtagcaccactccccccacctaaccgagccggcactgcaatccgccgtgttccggccggcgcttctcgacgctctagccaccgccgtgctgtgccgccacgacctccggacttcgcgcaccgagggctacctcggctcgtcctcgctcgccgtgaaac

SEQ ID NO: 50595 - DNA, 403 bp, Oryza sativa
  unsure (1)..(403): unsure at all n locations
agcttgagagataatagcacaatgtatttttattaaagtgcttgtagcaatgtaaataccaaaattgaaatttataatgtataattgcgaatatagataatttataatgtaaacataatttaactattttttcgtgaaaaatgtggcgccgtaaaaatagctaccaaaagaagtacttaaaaacgttgttgatttttttcacacgtttgaccattcgtgtaatttaaaacaattaataatttattntattgtgagttgttttatcactcaaagtactttaagcatgatttatatcttatacatttatataagagttttgaataacgaactaaatatatgttcgaaaatcaacgatgtcatttattaagggagttgtagaatataacccacaaaataaatactg

SEQ ID NO: 50596 - DNA, 449 bp, Oryza sativa
  unsure (1)..(449): unsure at all n locations
tcgaagntcagatgttcaagtgaatacttcctatacagacatactcccgccttcaagaatttttgctggagagtttactcctcagaacaaaacttaatcatgctttgcaagtgcaaatgcctcccaagttgcaagagccctccaacgagtgaactcaatgtattgcaggataagaactcgtgaaagcaaaggcataatacgttgtattccattgccactcattccaattttctatgaactggtcatgatgcaaagaatgaagatatgcgtttcaaggaaatgtctgaaagacaaagcattgattctaatgcaatgttggatgcaaactagtagttatatagatgcagcatgaagtccaagctgaaaataatgtgtgaaagcatgctgggaggataaaaaaaatcctgaatttaatatttggactcctatatttacatataagatattta

SEQ ID NO: 50597 - DNA, 450 bp, Oryza sativa
catgcaacttgttcacactgctttagaactctattatttataagcaaaaaagctagggtgtgttagtacctcttttgggtttatatggattggagtatgacactaccctcaattttgcatttttatcataaactgcaaaagccaaaaggccagcttaaacacagaaggtaatatacgactaagatgatacaaacaggtcaagtttaccacagaaaagttctttgtgcaacttgtttgtctagcttgtatgaaataaggttcacaagagaaccaaccaatattgctaaaagtgaccactctttattgaactgatctgaatactggagactagagcttatggctgaaactgaggactaacaccagcaacatattcgattgcccaatcggatggttcattttgcaagatctgaatcgaccaattcattatgaatgaaagcactgagtatttct

SEQ ID NO: 50598 - DNA, 376 bp, Oryza sativa
agcttgagctatggctcttattcttcttctatggtacaaatgcagcggcacttgcttacctgttggcattgatcacctgcccgcatgcctaatagaaattcacatataccgggattatggtgctgactgacatgacatataaactgcactatctgcgctgagtatcttatttgccacacatcatcctggtgctggcttgagttttggaggtgcaccttggaattatccttctaatgaccctgaccagtggtgactacttgtgaaatacatatgcggtttggaatgcttgaacagtgaacctcttgctttacttgataaaagtgtccgagctattctctaaccggaaacaagtgctaagaatttggtgacgagaatg

SEQ ID NO: 50599 - DNA, 66 bp, Oryza sativa
ggggggcttttttttttttgtggcacccagggggtgtaggggcaaccctccaccccaaacaccaaa

SEQ ID NO: 50600 - DNA, 461 bp, Oryza sativa
  unsure (1)..(461): unsure at all n locations
agctntattagctgccccgctgactcttttatatttcatggtgctgtttgggtttttaagcaattgattggatacaatatcgttgctttttgccacgtaagtgtgcatttttattgaccaatattatggcttaagctgattatatattgtggtcatttttcaggcggttggtaaatcctttatgagtttatttactcggattttataccacatatgccatatatttccaggtgtggtggaaccatgtgtcttctagggacttaagcacatctgttaaagcagtgtgcgcatggcgtatgcccaatactttggaaatttctttattcacaacatacaagcttctttatagctgttttgctatgtgaattttcaatgatgtaaccaactttaggttacactcatcatattttacaaagcagtcggtatatcactcggatcatgttattcatggattcacaccg

SEQ ID NO: 50601 - DNA, 433 bp, Oryza sativa
atgcagtaacaacctagaattacaattagtttgggaatgaagtagtattaatttttaacctttcgaagcaccaacaagatgcatttgtttaatcggtggtcgtacacgagctatgccttttcttttcttttttcctcacaaaatatccacaatccaagtattagctggtttgaccttggttacatattgctttacttcctttacaggtgcaagagaagaaaagtaaacaagtttcagttatgaatttggattcacggagtgtagggactggtacctcttctagtgcaagtactagtagttctaggggtcttcttcccaatggtggatgttcagacaagtccagtttcttgaacagtgacattttgtttccacctggaggctacccgtcaataccagttggctgtggtagttggacctaacctctatatatctt

SEQ ID NO: 50602 - DNA, 448 bp, Oryza sativa
  unsure (1)..(448): unsure at all n locations
agctttgcaactgtcgatgccttcatttgttctccaaaaaaaanaaggggcattgcactcttattcttgttctccactgcaattgtgattaccttacttctcttaagttgtgatttatttaaaccgaagtatatgtacttgtcctcattcctttaagatggctagatttgaactgtcaatgcccacacttgcagattagggaaccctatgtgtttcttaggatgcttctttccctattttggcatcaaacatgcttatgtgaatttacgcccctgttctgacatgaattntcacttacacaattttctctttaaaaaatgagggaatgaacaaacttgacatatgcccatgttattaagtgaatttaacaatggtaaggttgtgttcgtttccccaattgggaactatacctacgcacggaaaaaatcagtccattaaccattgtaat

SEQ ID NO: 50603 - DNA, 416 bp, Oryza sativa
cacccctgtgacgggcgattattttctatttcactggccactatcataatgaatataaggataactaaaatttcttacacttataacaactagaaaggtagcccacacatatacaccggcatatatccgatgctaaagttgagacacttataaaagcgaaatatttaccggagaacaatttgccacaattcttcattaagatttttcatcgacattaaatgtgtttataactttctaacctattagctgtatattatatcatatataagtaatgtctgtaagcaattatctataatcttcttcttcatatgaaaagaaggtagacttagtttttgtggaaaacatgttaacagaagtaaaaagtacggtgtttttaattgcatatatttatgatagttaatatgggatgaatggtg

SEQ ID NO: 50604 - DNA, 370 bp, Oryza sativa
  unsure (1)..(370): unsure at all n locations
agctctgctactgtcgatgccttcattgttctttataaaaaanaagggcatttgcactcttattcttgtttaccactgcaattgtgattaccttacttctctaagtttgtgatttattttaaccgaagaatatgtacttgtcctcatttctttaagatggctagattcgaactgtcaatgcccacacttgcagattaaggaaccctatgtttttcttaggatgcttctttccctattttggcatctaacatgcttatgtgaatttacgcccctgttctgacatgaattttcacttacacaatattttttttaaaaaatgagggaatgaacaatcttgacatttgcccatgtttataaggaatttaacaat

SEQ ID NO: 50605 - DNA, 431 bp, Oryza sativa
cccctgttgaccgtcgatttatttctatttctactgtccactattataatagagtataggatgactaatatttcttacacttataacaactagaaaggtagcccacacatttacaccggcatatattcgatgctaagtttgagacacttataaaagcgaaatattaacccggagaacaatctgccacaatttctccataaagttttttcatcgacattacatggttttataatcttctaacctattagctttatattatatcatatttaagtaatggctgtaagccattatctataatcttcttctttatatgaaaagaaggtagagcttatttctttggaaaacatgtcaacagaagtaaaaagtaaggtggtttttaatcgcatatatattatgataatttattattggatgaattggaggggactata

SEQ ID NO: 50606 - DNA, 396 bp, Oryza sativa
gcatttgcactcttattcttgttttccactgcaattgtgattaccttacttctctaagtttgcgaattatttaaaccgaagtatatgtacttgtcctcattcctttaagatggctagatttgaactgtcaatgcccacacttgcagattagggaaccctatgttattcttaagatgctactttccctattttggcatcaaacatgcttatgtgaatttacgcccctgttctgacatgaattttcacttacacaatttttcttttaaaaaatgagggaatgaacaaacttgacatatgcccatgtattaaagtgaatattaacaatggtaaagttgtgttcgtttctcccatttgggaactaataccttacgcacggaataaaaacagtccatttac

SEQ ID NO: 50607 - DNA, 372 bp, Oryza sativa
accacgttgagggttcacccctgttgacggtcgattattatttatttcgactgtcaactatcatagatgataataggagtaactaatattcttacacttataacaactagaaaggtagcccacacatttacacgggcatatatcgtatgctaagtttgagacacttataaaagcgaaatattaaccggagaacatctgccacaatatctccattaaagtttttcatcgacattaaatggttttataattttctaacctattagctttatattatatcatatttaagtaatgtctggtagcaattatttataaatctcttcttcatatgaaaagaacgtagacttaattttttttgaaaacatgtcaacagaa

SEQ ID NO: 50608 - DNA, 482 bp, Oryza sativa
  unsure (1)..(482): unsure at all n locations
acctctnagtcacctgcggcatgcaagctntgcaactgtcgatgccttcattatttattcttaaaaaaaaagggcatttgcactcttattcttgttttccactgcaattgtgattaccttacttctctaagtgtgngaattatttaaaccgaagtatatgtacttgtcctcattcctttaagatggctatatttgaactgtcaatgcccacacttgcagattaaggaaccctatgtttttcttaagatgcttctttccctattttggcatcaaacatgcttatgtgaatttacgcccctgttctgacatgaatattcacttacacaattttttttttaaaaaatgagggaatgaacaaacttgacatatgcccatgttttaaagtgaatattaacaatggtaaggttgtgttcgtttcccccagttgggaactaataccttacgcaccggaaaagaacagtccattaacgcataggtaatta

SEQ ID NO: 50609 - DNA, 472 bp, Oryza sativa
  unsure (1)..(472): unsure at all n locations
taccacgttgaggtttcacccctgttgacggtcgataagtatctatttctactgtcaactatcatgatagataaaaggataactaatatttcttacacttataacaactagaaaggtagcccacacatttacacgggcatatatcgtatgctaagtttgagacacttataaaagcgaaatattaaccggagaacatctgccacaatttctccataaagttttttcatcgacattaaatgtttntataattttctaacctattagctttatattatatcatatntaagtaatgtctgtaagcaattatttataatcttcttcttcatatgaaaagaaggtagacttattttctttggaaaacatgtcaacagaagtaaaaaagtaaggcgtttttaatcgcatatatattatgatagcttattatgggatgaaattgtggcgactataatggaggacaatgagaagattcacc

SEQ ID NO: 50610 - DNA, 376 bp, Oryza sativa
attcatacccctcccccaactgcggaatttccatcgccgtctccgacaccgtgggccttcaccgccggctccttgcacctaattaaggacccctgagctcttctctacccgtggacaccctcgccttcgactattgtcgtcggaagagcactagcgccgtgtgcactagctcgtcgtcgcagcgacgctacaaccgagcgccgccgtctgttcagccgtcgccgtcgctcgggaagaccgccgtcgggtacgcaaggtcgtcgcctatctcgtacgctcaataactgcgactgagaccctcgagcacatatccgcatcacccaaatgggacatcctaactctgacaacaggcagacttaaattagcgacacttatg

SEQ ID NO: 50611 - DNA, 349 bp, Oryza sativa
tagaaccgctgtagcgccatatattgagggtctgtccactttaatgtaaaaaaaaaaccataccaaatattgggaatatccaaaattcggtaacttgcttaaaattggcataagttttgatatacataccaaaaattagcggcaaactaaatataaccatatttttagcaactttatcaaaaattagcaatgttaaaaatgacatcaaagtgaacaggccctgaattatataagatatatcgtcgactctctcaaactataactaaagaccgcacacatgcctgggcggcaaaattagctcatgaagacatatcaaggtagccatgttatccacatataaaacattgct

SEQ ID NO: 50612 - DNA, 452 bp, Oryza sativa
  unsure (1)..(452): unsure at all n locations
ntgagtatggttaatacccatacaattgcatcctattgtttgcatgagaatagtgagatctcactaatgccttgtggtcctcacgacaagattttgagcttgtactttgacataatattatctcttcaaactagaaaaagtgctagtggtggtcctttggtctatctatgcatctttggaggatgtaacattgttatcactagtcaataaagtaccaagtggtttcctgagaggtcctattctaattgaacatatgtatattaattggagagatgacatgacacaaagcagctctattggtcaccgaaacgaccacttttttttatataattcgcctaatatttgatccactcgagtcgtctgtgacggggcaaatgatgatgtactgcttactatgtaattatgtgtttggcgaggtagcttctaatgctcaagatacacaatttatatat

SEQ ID NO: 50613 - DNA, 477 bp, Oryza sativa
  unsure (1)..(477): unsure at all n locations
cctgaggcatgcaagcttcaagaaagagatataaactgagtctttgtcttttttcacagctcacctgttgaatacttnctgtgtccaaaagaaccttactgtaattatcccaaacctcccaactattcctcctaaaaacaattgacttatttttaatcagaaactttacagaattaaagtaataaattttgtacaatatgatgttatacgcacttgaactatacagcttctttgaatgcttggactgctgcttggctccttcctctaatcatgtgcctggatagtaaactacattagagatatattccaagagtgaacctataacactagaaaacccaagcttcgtgataacataatgtccaaatacttcctcagaccaacaaggctagcttttccatctccagaacatgttaactccacctaacaactaaagcttgcatagtagttacttaattgcatacttactacaccaatacc

SEQ ID NO: 50614 - DNA, 419 bp, Oryza sativa
  unsure (1)..(419): unsure at all n locations
agcgccttatgaagtgatcacatgactataaaaatgttatcatggccattttggaaaaaagatgacggtgaactaacggtatgggtataaacgggatcaagacganatctcataggtatacacgggatgtgacaaaattcaagggcatgcaatggatggagcaaactgttaggggtatgtaaggaatagccccatttttcttttgcagactttgctcttgctccctttaagctatgtacttgttcgagctatccaattgcttttgacatattcgctgcgatttctgtgatatcctgcccattgccaatgatggcacctacttatccatatgaatctaagaatgggaggcgttgataattcatcattctctagttaactgtgatgaacatatcatgtgcactttctacagggatagatac

SEQ ID NO: 50615 - DNA, 389 bp, Oryza sativa
agcttcccgggttagctcgcttttatctttctctttgttttgtaatcttttatatatgtggaagacgtgggtctgtatgtcaacaaatgtcgtttgtgtaccctggctggtcctggacagggatttaatgcacaatcagcttagaaattctggttcgagaatttctgggtgtgacaagttggtatcaaagccgaccttgaccgtatgacaagccaactggaaacctaagagccctctgaaccctttttttcatatgcatatgctcttttgcacttggatttgttcaggagaatttggcgtttgcctctatggttgtgggaaaatcttggtcgtcattcggatcggattttaaaattagctcagtgttaggttttagaacaaaaaatcta

SEQ ID NO: 50616 - DNA, 468 bp, Oryza sativa
  unsure (1)..(468): unsure at all n locations
taagcttctatagctgccccgctgactnttctatatagtcaaggcgctgtttgggtttataaagtaattgattggatacaatattattgctttttgccacgtaattgtgcatttttattgatcaatattatggcttaagctgattatatatcgtggtcattttccaagcgggtggtaaatcatttttgagtttatttactcggatttcataccacatatgccatatattttcaggtgtggtgaaaccatgtgtcttttagggacttaagcacatctgttaaagtagtgtgcgcatggtgtgtgcccaatactttggaaatattttattcacagcatataagcttctttgtagctgctntattttcaatgatgtagtcaactctatgntgcgctcatcatattttacaaagcagttggtatatcacttggatcatgttatttgggggattcacaccgcatatgctatat

SEQ ID NO: 50617 - DNA, 427 bp, Oryza sativa
acctgcggcatggcaactattcctgatagttccaagatccatttttttcttgatgatctgaaaataatctggaatagtcagcttaacagcatcaaccggggagtctaatatcgtactacatttctgagtcatcagctttttcagaatagcatcgcattgctctaaaatcgcattcttcagcaacaccgtggaagcctcacgtcggggctttgtatgcaagaaacgccccttggcaccacggaccacatggataccacggctgcccttcttacctcgaggggctatcgacgacaagagcgccggagctctattgacaggacagggacagcaaactccggcttcttgaggagattccggaccgtattaagctctgtgcggaacctttttcggagatgcctcctctctgaggaggacatcttggctggga

SEQ ID NO: 50618 - DNA, 453 bp, Oryza sativa
  unsure (1)..(453): unsure at all n locations
tcagacgcttatgacaaactangactgattaagttacggttaattcgtanaaatacgaacaagaaaaaaaatagtttatgataaaaaaatatcttactgtgttattattagagcaggtataataataggctgttagccagctataaacatattttaatgagataaacgataagagagaagagcagcaggctacagatntgtaaccagctgtagcacagactccaatacacaatatgtgtatgacaggtgataccatatgttaatattatagtaaacaactattgtatgaattgactattagaatggctattagataaatggagctagtagcggactatattattaaacttgctcttagcgacttagagaacaaaatatgataaaaagaaaactgctcaacgctaatctttaatagataaaatttggctatgacgggcctgtcgacgagagttg

SEQ ID NO: 50619 - DNA, 199 bp, Oryza sativa
attgtactaaatgaattctcgtcccggaattcttaccataagttggaaaaagcccggattattggcgatgtagaatctctatatccattttggaatcttttttcgctaactatatttgttgcagattctggctccatttctattcatcatctatgcaaacaggaaatcacgcatggcaaccaataaagacaatctttag

SEQ ID NO: 50620 - DNA, 422 bp, Oryza sativa
  unsure (1)..(422): unsure at all n locations
tgcaacttaccattactaagagttttttgttttgaagcaccgagtagcgaatatgttgcctgaacatctacaactctgagaacatagaagccaatactacatagtgaaaaaccttggagcttgaaaggatgagaagtgtccgtatcatgaatgtgctggagtcccacacactgatctatggacctcaatcagcacgatgacatctctgaattcattgtctgttctcgcaaaagatcgtgatcgatacccccttgatttcagcaacttagaacctntatctcacctggagaagctgatgataagtggcaggctacacaaaggagcaattcctcccgtttttgccagcttcaccaaactgagaagcttgagcctctgcctctctggacttcatgaagatccgctcgcttcttatgctgacatgt

SEQ ID NO: 50621 - DNA, 302 bp, Oryza sativa
ttgcaactctcatctcttcaatatatatttatatgtcaatactacatcttgcactctaatgtttatgcacaactctattttattgtcatccaaaatttcaatctgtaaagttgatgattagagaataatgtgtgttggggagagaaagactatatagaaatttagttcatttgctaaacaatggtttaataaatatttgaaaacgaacactctattgaaagttatcttatataatagaaacaaactaacatgaaaattaaaagaagtaaaacacatttaaattaatctaaaactttacaaat

SEQ ID NO: 50622 - DNA, 400 bp, Oryza sativa
  unsure (1)..(400): unsure at all n locations
tctaactgcatcaaaccaatggcattcgatttactcaccgtgttctgattaccacccgattcgatagcgataatcgccgtgatcaattgtggatcgacgccccaggctgcaccggctttctggcttattggcatccactgcatcgcacgttgcaccggaactttcgcgttccacggcgggttcgtatagtcatgctttgatgaacaacccgctaataacacaatcaaaaaggcaaaccatctcaatttcacttcttctatccttatagcctggaatcgccgttgaggtgacaacggcacacctaagcggcatgatatacattntcgttctggtgtcagcaaggaattgccatgtctctgtttcacttaattgccccatcgggttactgcattaaacagca

SEQ ID NO: 50623 - DNA, 442 bp, Oryza sativa
  unsure (1)..(442): unsure at all n locations
ggacactatagaaactcagcttgcnggtatgttccagataagatatgggccatggctaatgatcatgctgccggaggggagacaaggctaatgcacaatatcaagaagcttgcactagcatttggtttgattaatacagtagaaggagaacctatacttgtgatgaaaaatctaaggacacgtggagactgtcataatgccatcataatcatctctgccataactttcagacagattactgttagagatgcacatcggtttcattggttcagcgatggaagctgtttctgtggagattattggtgagacagaatagttgactcaaattcataataaagatgagattctgttttggttcaatgattacatcggatgaccatcatagttcttcaccacactagactggaatataatcaatttggtcaaagtagcagcacgtatg

SEQ ID NO: 50624 - DNA, 407 bp, Oryza sativa
agccactataaatgatatattaattgtatatttgaataatccaacacagctgcatgtgcttgagcaaagaataaattctattaatatagccagaaagatctctattcattatacatgtcgaaatattttagagggtgcaataatatgttatgccactatgcatgttatctgtaaccaaataagatgactggtgactgcatatgttctgctatttactgcagtcccaaatttatgtgtgttgaatctgtgcacgaagaactggacaacatggccaatacctaccctgatcgcattaagatctactatgtcttgaatcatgtgaaccctatgcttctattatttacaagaattgcgatcaactccgttccttagatacttatcaatacccttgtggacacagtgggatc

SEQ ID NO: 50625 - DNA, 446 bp, Oryza sativa
caagcacctgggctgcagctggaaaaaaaggaagtgaaatttttttatctctggaagtgacaaaacaggccatgttattatattcaatactgaccaagcctagacctatgttcaagaatacacaactatgtgcagaaatatgcgtctgtctggcactttgtaatctcacaaaaaaaggagagaaataggtacctacagatgcacttccaaggaaagcctttcatcagacacccacaccagaataataggaacattttgcgttattatggaaagcatgttttacttgtaaatcttcaattgcttctatggatatctgcagtatgcataaccatgagcaatagaacttgtctgaaaagtgtgtttatcaatgtagaagaacaagagagccatatattattaatagatgagaatctgtggtctgcccagcaatcttttgcacaaccgct

SEQ ID NO: 50626 - DNA, 387 bp, Oryza sativa
ataaccggcctaactggtcgaatttgtatatatttaatgacatgaagataagacatgactatgaaaagaagtcaatagtttattaaaaatttacaaacatcattatttttatgaggtggacaaccacaaaaatgcatgcatgcagcagatcagcatgtacaggtgatatgtgtgatccttatccaattaagcaatggtgaatcagttaatgtggataactgttctcagaggtataccttatttatttttgcaggatcaaaacctcttcttgcatcttcatggcggctctcatagttccttttcaaatccttagcctcaagggtacataaaaatgatgaagtcttaagctcccatgttgcataactatagcccagatcttttcatttc

SEQ ID NO: 50627 - DNA, 398 bp, Oryza sativa
  unsure (1)..(398): unsure at all n locations
ctgcaaactttgttaactgacgtttaccttcaatttctttgagatcatttatagntcaatgcacatcaaaagtatgacttatcaccaagttcacaaatcaattcacatgcgagataatatgaaacataaattaagtaatgcatacctcaacaatgcttggtataagtttaaatctggcatctcggaacgcatcggttccatcaatgaatctttccaacagagaatctttattcacgggcctttctgctgcgtaatacatgaccaagttatagtttggcttcgctggaacctacatgtttaaaagttaatatactatccatcctgatcatccatataacaaagatgatatccttctncaatcagataaaatgtgatagtgnggaacacaataatatact

SEQ ID NO: 50628 - DNA, 260 bp, Oryza sativa
  unsure (1)..(260): unsure at all n locations
gctaaatagagatatacgagattgagactatgatttttattctagtgtgagctccttatctgacaagtaatgccctacatcctggtcatatgggattgatatagtagatccacttantctacaattgggataacctatttagtctgtgtcaactttggggcatgtacactaactcttagtcgaacacggtgtagactttctcctcttatatgaactctgtgagatctgagaatgtgctaaaaccctattactggtcttca

SEQ ID NO: 50629 - DNA, 455 bp, Oryza sativa
atgcaagcttcacagaagagggttatgggaatctttcatgtgatttgctcattacaaactgtattgatctaactgaatatgcaattggcgattagccacttaaatggacctgcaagaaaatagaaacagcttgtgcgttgcagcagaactgaagtatcaggtttttggtcttatggatttggcatcaaatatactagcatgttattatttcagtgtctttgaagtacaaatacagagttacctgcgtattagtcacattgattcgttttatgtgactctgtgcagatgcaaagtaatccacaagaaagttcaatggcgaaattttccttctgtcagggtagcctagtgtcctcagaagcaacgtctcttgcttgtttacagctagaaccattgtttttcagcaaatcctgactttatgcaatatatcataacctatttttatgagcatatttaca

SEQ ID NO: 50630 - DNA, 283 bp, Oryza sativa
tggcatatgttggaccggcgacaactcatagtgtggtggcggcagcccggtgcggcagcggcttatctcggggacgacacgagtgagctcgccagaggtcactctcgtgctgctacttcgtgtcgtccacacacaactagccgggagacaacgaggggatgacgagcggtggtgaacgacacaaagcaagaagtagtagcacatcaagggccaggagacgacgaggggacaaccaaccgcagggatatgaccgcagctgggacggaatccgccggtgtgcgtg

SEQ ID NO: 50631 - DNA, 183 bp, Oryza sativa
cccggggtgtggctgccccgacaaacaccggcgcgcccccagcagctttgctgcccaacccccagcgcgggaagacaaacccccaccgatcacacccccgcgacaggcgagagccagagcaaaaccacaccccggcagaaagacgaacgacgacccccaacgaggaacccaggcccccagggc

SEQ ID NO: 50632 - DNA, 481 bp, Oryza sativa
atcctctgagtcacctgcggcagcaagcttaattcacttgtcaattattaatttatatagcaatttgactgtgaattacgtgttttattcaaagtcgaatatgttgtatgagttgaatttaaacatgcatgtttgtagagtggcatatcacatattgatctagcttgctttttttcaatatttttagtgattttttgagtgatattaaaacaagaagacatcctgtcaaggtataaatagtttcctaaaaggtgtatattttgtaagactacaatctatggatagagagagagagagaagataagagaacatctatgaacaaaagttcaatccacatccagaaatgaaccagtggttatggttttgcactcactataaaccagactagctacaccgtaatacactttgaacagctacataatacagagtagcagcagcgctattatacacagtttggggacaactgcacaaataaacccaa

SEQ ID NO: 50633 - DNA, 375 bp, Oryza sativa
agatgcctggttcggccggtgtaatagttgtcaatgtgtttctacctttggccaccacagtggcccgctttgatatggaagttcatatcgtggatgccgaagggcaagaaagagcaagacccaccccgaaacctgctccgcatggcaaggtgatgcaactgcagatagacgataccgaccccacgaaagtcgtattgctcggcgtagatctgggcgatcaagaggtaaacagcatcttggccgtgctcagaaagaacattgatattttcgcttggggaccaaatgaagtgggagacgttttcccagatctcatcatgcaccacctggcggtcaagcctgatgcaaagccgaagaaaccaaagttaaggaagatgt

SEQ ID NO: 50634 - DNA, 307 bp, Oryza sativa
gtgcatttcaattttcactattgtgtctgacatattgggttggaaccgaaattctgaaaccgtgccattattgaattaactataaagcgtcgcaactaatcttttaacgaaacaagctcaatcgttgcgcgttggaacctgataacctgctgagaaatacctatcaacgaacttaagccctctttgcttatgcttataagccaacttattagcctaaaagttataatctaaacaaataagccgtcttcttctttggcttattggaagccatataccactttatattttggttggagaagacttcttg

SEQ ID NO: 50635 - DNA, 419 bp, Oryza sativa
tcaatgaaattccctgtgctctgagatttgacacagatggtagttgcatatgtacgagacaattaatagagagcgtacatgatatatactatcagaaatctatactcctaccttctatcaaattatactaacccactaagcacataaatatctcaacatgcaaaaatagtaattattagtacattctaattagaggctaataattagtacatcaactcactaaacacctaaacctcaacatgcatgtgcagcaattacatcgtacaattcattacattcttaaaccttaatatacaaacatgctaaatacattatatatcctatatatttataaaggtcatactttgcaagtgcaattaaagttattttcctcttctttcggtgtgcccatcacctcaatatatttcatctgttagatc

SEQ ID NO: 50636 - DNA, 395 bp, Oryza sativa
agcttagataagagaatactctctctcttcatattcaatagaagaactcacagccaaaacaagcgaaagaggaagggcggaacatggattgcctttttttcctaactatcagaaggtcgttgctgtctttttcgcattggatttctttcacgagactcggaaatcaagaggatgggaacgactactgctcatacgcatcggactgaaaaggagggagactctcaaccagagccgttatcacatattccacacatcaaacaatgccaaaattttaccttaaacattgcggagtgtgttctccgtgttctcaccacccctcggagcttggagggcctgccccatttcattcacactcctgatgagctctcttcactgaaagcgtgagaagatatatg

SEQ ID NO: 50637 - DNA, 391 bp, Oryza sativa
  unsure (1)..(391): unsure at all n locations
ctatctcttctcatgaggcataatgaccactgctacttgtaataacaacggtggagtgcaatggttgaaagaaacagtagcagaatcaaggttactggctgattggacagagaccggaagttcctggccaagaacaccgaaactttcagccagcaaaactgaagaacggaggatttaaccaggccagtgcatgtgacaaaaaaacctatcgatcagcaatctacaaggtagcaggaacaattctatccaaaaggttttctccctaggttcacatatttagagatcggngcagaaacatgatgaaccaaaagagaagatcaaaagtgctaccttgagagggaaaatcgcaaatcgatcactggatgaaccttctagccaccaatgtggttga

SEQ ID NO: 50638 - DNA, 445 bp, Oryza sativa
  unsure (1)..(445): unsure at all n locations
acccggaccttaagcaccgcggctgcagcttgccttaaaatcgatggtcttcttggttcgagtgaaaggagtgatgttcctccatcaaagtataaaagtgtttctaagtataattcttcagaaaaatctaagagatctaaggatggggatgtttttcttcctgaagacaagaacaaggaacattcttacccctctgatgcacaaaaaccagatttgtctatttagaagaggatagtgaaggaatgggaggagagtcagcacaattcaacacctccggtgagtaaaatgtctattgtaaaccaaagctcttctttcaaagaaacctgcaatgatcagaacttaaaggaaacaaagtctaagttaacaaagtctgaagaaccgttngccatgacagattctaaatcataaaagttgtcattctaataaacttcaccaatctaataat

SEQ ID NO: 50639 - DNA, 330 bp, Oryza sativa
tttcagctcttaaggtctagtgggtgtttctagattctaccactatagaatcttaagataaaatttatgtgaccatctgaacagtgtatgaaattctaacagtttaggaaatttttaccatttatgaagtttgagattatttatgaagatgcaactgcttaaagctttcccaacaacccctgagggtctattttagggattctgcgcaatcgccagaagctgcgacaatacatatttttattcagatattaaggagaactaatcaaaaattatactataagctactagctaagaaacctaacttaactggagtcttaactggaatcttat

SEQ ID NO: 50640 - DNA, 327 bp, Oryza sativa
  unsure (1)..(327): unsure at all n locations
gcgcaaaaacatacgctgntattcgcaccattataatacacgtatatgtggaaagatcgctcgatcatatcgtgtcccgggaacaaaatttaattagctttcaaaatctcatataaaataggatagcaactctatttactttaatttatttatcgatcacacctattactattatcatgtcttattaaattcacttttagccaatcagaaatatttctcaattagctttaccctctttatttatgttccgattttgggacagagagggtacatgtttcacatcgattacttaatgaccatcaagcttcatgacgtaacttactgatt

SEQ ID NO: 50641 - DNA, 389 bp, Oryza sativa
actgaaattcatcatgtctggtgcacgaatcgagtgcgttcttgagtagttatcaatatggtattaaagctacatcgcttcaaataaacctcttgaatttgggtggaaaattaagtaccaaagattggaagttgtgttcatagagacatgaaccttcgcgaaacgcccacgggtcttctgtggggctagatgacttggtacgaagtctaccccttctaatgttgatatttttccttccacatatttgcgtcttttatgactttcacgaaaaggtgacttgcctcgatcagatatgtcatgagctcggggagaagcttgagaatagaggagatactatagaaaccaggctatatatggcaccaagcaagtatgttaaatcacggagaacg

SEQ ID NO: 50642 - DNA, 465 bp, Oryza sativa
  unsure (1)..(465): unsure at all n locations
agcttagaggtggngggtacgattgtggaagatctctttgtggcttttgttggaaatgtgatgcaaggatgcatggaattgggtggaaagttattaatataaacattattttattctaattattataactatttgtattcaaaactttaaaaattaccaaagcggtgtagaatattttaaaaaataagcatttatatattaaaaatatcatcttcaccaataagttaaaatttaaaacaaacgaacttatcttttcgcttatgcttatacttatcagcctaaatttcaatttttaactctaaatttagagttgattntaggggttntcattgtagattatttctcagcaattgctgttagatcattaagaacatatataacagttttattcataaattaatgtttatttgcaaatattattgctctaaagattgagctgaaagttattccacaccatgatattct

SEQ ID NO: 50643 - DNA, 443 bp, Oryza sativa
atctgagcacaaccttgtagttacagaaagccagaaattctctttaatgtggaagaaatgtggcgaaactatatgatatttcagaaaagaatactattatgccgggaaaattccctatataccccggaaaatttactcaatccccttcatacccctgaatttgacattatcccttatatacccctggagtttcattttgatctcctctatacccatcctccgttagttgaccatgaagttgaccggtagatatgttaaaatgactatattacccatcctattcatatgtgtggacctacccaataaatgttcatatgataaattaacttatacaacatacaagcaatataatcatttaatgcccaacttataaaatacaacttattattgtttattgtttgaaaatatgattaaatccatacattagcttcaccagaaaatta

SEQ ID NO: 50644 - DNA, 439 bp, Oryza sativa
  unsure (1)..(439): unsure at all n locations
acaagaagacttgaaatcgaaggacatattaccttggtccgcacttcatttttcctatatgcctctcattttcaactattacctcccgtccaaaataatagcatttctaggaattaaaattccgcccaaaataattataattctagagtactaattgccccatcaatcatatctcattcaaatttcttcctattataccctcaaccgtcttctcactctcacataaacaccatttaatgagtggcaccatagtctttcttctcaaaccttaatatatgctaaacaacatagaatngcaattattttgtgacggaggtagtactagctcgttaactagtaaatccaacttaaacctggatgctcataagcatctaagcactattacttcatgatatagcaaaattttagcangtcacttgcataattcgctaccctattc

SEQ ID NO: 50645 - DNA, 385 bp, Oryza sativa
tgcatcaacggttctaatgttgccatgacgtggcacatctatgtgatgaacaacttttagtttttcattactatagatatctcttcaatttcgcgatatatatgaattctattcgaaccatatttctatgtgaatgacaacaaaacgagtccaatattgattatattcggacatcgtgtgatattctgattcttctgggcccacacgtcatatacacatctctaacgtatttagtaaaactgcgctgcaaataatattcacgtataaaattaaatgcccaacaatgtattattctttctatgaatattttagcacaacaattcatcatacaaaaacgaacaatgtatcatcatgcacaacgtcaataatatcaacacttatacac

SEQ ID NO: 50646 - DNA, 389 bp, Oryza sativa
  unsure (1)..(389): unsure at all n locations
agctttatgtaattctaagaatcttcatgtgtacatttcacttctcttcttccctaaataagacatttgcaccaggggagggcagctgcctgtattatttttcccagtctgtttatcttggtgaaagcaaaaaaccatttggaaccaccttaccctggtgcttaagattgtcttgccaatccaagtttctagaaccaagtattttctaacttctccaaacattatataagtaaccagccttttgttatgctaagatgctccataatagcacgctttgcttagttactgtcgaattttggagatgttcaaagtcaaatcaattgtgacccagaacttgctgatcctcactgactattngagcattactccagcaaccgtgtattaggact

SEQ ID NO: 50647 - DNA, 473 bp, Oryza sativa
  unsure (1)..(473): unsure at all n locations
actaagctttggaatgatctgatattactaaaccatcttgtgaattcactattcttatttgagtagaatatcacggtaaccgtatgattaccgtacagttaccgtaaattttactatggtttcaaaaactgtaaaagttatcgcacatgctgaataagttatcgcacatgctaattggctatgctgtgaacactgttgttatatggggttaaattgcgcaagcgcaactgggtttgccgatactgatttcttcaatgatgcacgcctggtttatagactacatcttcatacaaacacgttaatatgatgcgctgcaatacggtgcangcaccgtgagcatcatcccgtgctgacaatcaactcataagtcaaaacacacagcatctgatcacatataggagaaagtatttacatggacccttcgggttccggaaaaccacaatagagcaaacgtagcttacaataccggttta

SEQ ID NO: 50648 - DNA, 306 bp, Oryza sativa
aaaaaataaatgtaaaataaaaaagggatgatgtcctgataccacctaaatactggggcggacaagaaccgaaggttttttgatacaaagacctcgagcccaacataaggatcagccctatctatagccacagagccaaaactgagaccgcccgagacagtaaatcccgaaacaaacaaccacaacctcacaaagacctattcaaccaagagaactcgagctaaaaaaacaacaggaccaggaatccgcttgaaatggcaggggaaaaacggccctacggtcaaaagggtcgaaaagcaggaagat

SEQ ID NO: 50649 - DNA, 299 bp, Oryza sativa
tatgccttcatggatgtcgagagggagttgtctgccgtcgtctgcagacactcatttagagaaataccccagttggcgcttatttgtataaaacgataccgaccatacagtagatctttgctttgcaggatattttctcggcctctgtatcgtcctcgggcaactcctcgctactgatgaattataataatgagatgcgccagtcatctatggattcgatgtcatcaacagcgcgttctgcctaggtgacctccgagctgatgtcaagggtggttgggccaacttcccacctaacttct

SEQ ID NO: 50650 - DNA, 406 bp, Oryza sativa
  unsure (1)..(406): unsure at all n locations
tggcggntcttggtctctgaccgacgcatagatgccaaccccgtgtatattcgagctatcgagcggatgcgcgggccccatcatacttatggatgtgcaatgcgtcaccggttgcatggccgccctaagtcgtttcatatcaaggctgggagaaaaggcgctacccttgtgtaagctcctcaagcgttctgagccgttcacttggacggaggaagctgaacatgcccttactcagttaaaggcgtatcttatctctcacacagttctattcgccccggatgccaatgagtccctgttactntacttaacagcgaccacccatgtatgtagtgcaacgtcgggtgtggagcgcgatgatgacaatccttattctgcgcacacaaactctgtgccgacttggaccggg

SEQ ID NO: 50651 - DNA, 398 bp, Oryza sativa
  unsure (1)..(398): unsure at all n locations
agcttatctctaactgtaataatggtatctcttttcttgttttattgaagaatacagatatctttctttgttggagtggaatttcagagtttttattagatctaagctgcttacttacttaagatataagcaagtttacttggcaaagagatgtaccattagatgggcaaaatttgggggagaaaacacgaaattttttcatgccatggcaactgagtcctacaggaaaaattctattgcttccttgatagatgttgatggtactataatcnttgatcatgagggtaaagctcatgtggcttgggatacttttaaaggtagaatgggagtttncaaatttgtgtctatgccttttgatctctattctttaattacccctcanaatggtctggaagttc

SEQ ID NO: 50652 - DNA, 353 bp, Oryza sativa
cataaaggacttactcttccatggccaatgaaaatttgaacaattcagatttattcatatgttttgcatactgggcagatatttctgcgcgggtttgctgatcggttagtcaaacaatgattgatcaaaactgctgcaaattaacaacacaaaaaggggattaattaaaaaaagatgatatttacttcagaaacccatacaaaggataatatcatatgcttctctgggaaatgaattctttgcagggaacatgtacaaactctccatgttgaaatttaacatggacttgtaatatgaacataaagagaatgacaatatataacaaaaacatgcacacatctgaaaattaactg

SEQ ID NO: 50653 - DNA, 281 bp, Oryza sativa
  unsure (1)..(281): unsure at all n locations
tgcaagcttttcccgttatgtggctttgctcctattagttatatttatattagtgctatgcacctatgtcattcaccaagaattaaaagcacataaaagtatggcactccagagggtgactatctggntcaagagcttgactgacataatgccgctagttgaaatggttatgtcttgtatcaaagtgtcacgctcgaaggcctgcttcaaagatttcttctttctccttctgggcgcgtacacagttggtgccagatactccctccgtttcaaatgtttga

SEQ ID NO: 50654 - DNA, 232 bp, Oryza sativa
gatgttgttatggtgaaaaaatttcatcaaaaagatgcatgttatttcatatttgatcgcaaaacctattgtgaattataaaaaagaaaaaagattaaatggaatgggccaagtatgcactcttcacgatgcccaatattgcccacaatgggaagaaaatatctttggaagcctctgcttcgtttctctggcgaatcccaccgtttttcccctctctcgcgtagctgcgctc

SEQ ID NO: 50655 - DNA, 462 bp, Oryza sativa
  unsure (1)..(462): unsure at all n locations
tgcttgcaatctaagcttgcatccatgtttcttgttatgcttcntcctgcctctcagaatcccctacatacgcagagatctggatcccctaaccaatgatggccataaaatggatcaatatgtgagtgtgtgttttcacattgaagaatgtgtagtcaagttaatcaaaatagaatcatctttgctagctgctacgacactggagagagtaaaccaattaaaccccaatgcctttgatcattcatgcacagttcaacctccgtcttaattaanaattaacaaagaattaaacatttctacaattattggcttatatgcccaatgcacctagctaataaagtcatcaacctgaataaagagctggtcgatgaacggtagacacacatctcgagctagcttccattgtatctgtatgccacattggactatctataacttatacatacaacatcgcattgagat

SEQ ID NO: 50656 - DNA, 460 bp, Oryza sativa
  unsure (1)..(460): unsure at all n locations
ctcagcttatttgtataatcnagctttttatgttgttgtgatgggactaatgttcattacgcacgtctgatattcaaaagatggcatctaaatgttgttcagaagtttttcaattgtttgccaaaccttgaattacataataagtttaccttcatccatgacacaaaatcctcattctcttgttagttcttaacctgattgagaaatgggggatctctatcttttgtgaaaaatatagaagaaggaatactctgcatgtcaccctgtggttctctatgtgttgggaaaaatacagaagagagaaatgctctgtctgaaaggactgtatatgcggcataagacgaatcgtatgctgtgattatagactgttttgaatctgtaattggagagttgcaggattatgctgcagctgtatctgcctttttgtcaattgcaagataatggcatgattcttaaacga

SEQ ID NO: 50657 - DNA, 477 bp, Oryza sativa
  unsure (1)..(477): unsure at all n locations
nnctgttatggacatgatgccgtctaccatgggaagtagtatcttctcttgagaacggaatcgcacatagattaacagttgatgagtattataatctcacggccgatgaaatggaagactcgggtcagtctagattaagaacccctgcatgaggtaccaacgataaagaacgagttgctcgacactataacaagatagttggacccaagactctttctgaaagtgagcttgtatggaagtgatcgtgccgactgtgactcgagataacaaatatcggcaagtggtcgccaaattgtgaatgaccattccaaatccacaaagttgtgtctaatggagcttacatgttgcatggactcgatggagaaatttatggacgagcactaaatggcaagattcgaagaaatattacccacgcgtttgggctaatgcatgaacagctgatgtagccgatacatgacaaccgatgtagctacatcg

SEQ ID NO: 50658 - DNA, 478 bp, Oryza sativa
  unsure (1)..(478): unsure at all n locations
ancttgagacatcnactctggaagacgagatatatcttttctcatatgagcatgacagtntctatttcaaaatcccccacgattcatgctcacataatgaatccccagagtcctgttcgattattaccactgccctgtgcaagggccacaaccacctttcaatcctcatttcttacatgtttagaagtgtggttgtggatgcttatatttatcatanatactgcaaatctcgtaattttttgtggcactaatcctgcagagcaatgtccccaaggtcgagcttgtgaccataaacaaagaactgccgggagataccccggattatcatggtaagctctctttctaataaaagcaagaaccagtttccaggataatatgcacctttgggtattctcggtcgctaaccatttcatgttgagattaagaacaatggtcatgtgatgcctaagaacatggtaactacatcaactatacactt

SEQ ID NO: 50659 - DNA, 489 bp, Oryza sativa
  unsure (1)..(489): unsure at all n locations
tctgctgttctatatatntatttggccggtcagccaatgttacttatgtttatgttgattataatcgctctcatcttatttgtgtttgctatgtataatcatgcttgagatgaaagcgtgaatctagtgcacatcctgggaactagattcacatgagtatgagttaagaatgtttgagatgttgtatatctttatccatttttgtcaagccttctcaatgtgtaacacatcttggtcgccgtcatctagtggtttgacgggcacatctcatgctgaagttgactggcaggctataagcctatcaatgtctccaatattcttctctcgatgcgtcggatgtttcattatgtttgtttgatgacttgaattattcacttcatccctcaaatataatggaatgtccggaaagcctacgacacgcgcgcggctagggttttgctcanggagggatgtgacagctatagtttctcacgtgatgcaatatctccg

SEQ ID NO: 50660 - DNA, 185 bp, Oryza sativa
  unsure (1)..(185): unsure at all n locations
atgaaaaaaaaaaaagggtgatggtctcaacagaanaaaacgagacagaacacagcacaaactgtttcatgaacgcccgggaaagaccgtccacccaccaacaccgagcaagagaccggggcaagagacaacacagatgcgtcccacgccgtacaacgaacgcggcacgctaaaacagcaccaac

SEQ ID NO: 50661 - DNA, 177 bp, Oryza sativa
  unsure (1)..(177): unsure at all n locations
tatatgtcccaatacaagccacgcccctattgctntgctaaccacggcgaccccaagaaaaccacgcagaccttataatctgaatgttcatagcacgatcaagattttggacccggctgtcttcttttgtaaacaatgatggccgaggcctttaatttgaacagtattactggatca

SEQ ID NO: 50662 - DNA, 484 bp, Oryza sativa
  unsure (1)..(484): unsure at all n locations
actaagcttacttgctaaagatgaaaaaatctttttactatacgaagcttgagtttattacagagtcctcatggcttgaagatgtacaaagatgtgcacatgcttttcagactacactacagtcgataagctcaacccatgaaaattatctatttgttcatcaagatctaaagtagcggtctcaataataacatacccacatgatggtattttggtggtcctatgtttttcgtaataccttttcttctgntactaaatggttttctgttgaatacatgtgtctcctgctacagatacctgaatagacacattgatctcttctgaattgacactgtatttctttcaatttgtcacatgttttggtatctataatttggattggtgatatgattgtaaaatgggatagtgagatgcgttgtcgctcaaataggatagcaaggaatgttgctgcttaaatgttcaatctactctaaagtgaataaat

SEQ ID NO: 50663 - DNA, 422 bp, Oryza sativa
  unsure (1)..(422): unsure at all n locations
agcttgctcggctggaggaggaagaagacatatattaagatggagataattagtcccggttgatgttatcaaccaggctaaagatcggcgagatctttattccctgggggtctgacaaggcctaacatctttagaacccggacttaagatgatcttaccaacccggacttaagatcatatatgcccgctgtatccaccaacccgggttttagtggaaccgggactattgtggatttccgaactatgataagatctcttgtagtgacagcttggttggctattaaagaaggcagttgagacatacngcacacagtttcataccgtgtgcgtgccaatgttggaattggatcctagtaacagcatattttgaaacactcaacccaacccaatccttcttctcttaatcttctcttcctactctt

SEQ ID NO: 50664 - DNA, 472 bp, Oryza sativa
tgactacccaatcacaagcacaccgactatgggtgtaccccattaagttctcatcctagaagaagcaatcggaacccgcatcacttaaagactaagactaaacctgcatacaaaatgttatatcaatagcatgagtcagtacattaaacaagtttatgtactggcatgcacaagtcaatcctaccatactacatggaaggcatttatcataggaaggcaatatgtagttcattttcagcatatagcaagtttcgttcgcaattcttttgtaaaggaggtgatgcttcaattaacaaagacaaagttaagtttcattattaacattctcataatttcatcataatcaatctcttattgcatatttaacaataagtcataatgtatcaccacacacacaactcaacacatttatcaatgtcataccaatgtcacatgatcacattgttaaaacatagtctatactcatgacaca

SEQ ID NO: 50665 - DNA, 460 bp, Oryza sativa
  unsure (1)..(460): unsure at all n locations
ttgcattaacacccaatatcccgtgtcttgctgttttttatagnactcacccttgctctatataaatatatatatagctcctccgccctgtatagaagataaagtgaagtgaagattanggtttcgtcctggttcccatccgtcgcctgtggtgtcaggtgttaaaccgttggttccgctgctgctgctgttgatggtgttcgcctcggccgtgtcgtcggttgcattctcgggctgtctgagctgcaacctcaagtaaggtaaataagtcctctatttattttaaggattcgcaatgattcatatttgtcaccgtgggtaccagcactatgtcctgtgactgtgactgatatcgcggtttcgtaagaagcggttcgtgccgtttatcctacgacacgctcctatcaagtgccgttgtgcggctgtgccggattgttgtgtgacaagatgggtgagggtg

SEQ ID NO: 50666 - DNA, 431 bp, Oryza sativa
  unsure (1)..(431): unsure at all n locations
anctntcatcctgtgaaccgcattacatggtgtttttctgtataacacaanaatgttcagaatactcagattgcagactagtggagggcaaagctatgagacaaaagctaaacattggcaatctataagataaaaaaaagaaatctttgatgttgggcaaggatatccaatcaaatgcctaaacgagagcgagttaaaagcacaagaatgctttcatcactagcattccttacaaaaatcatgaaccaccagccactatggtttagcagcttaagcaacccagtgacaacatttaactgcaacgaactgagacacatgtcacaccacaataagagctatagatcaacaaagttccaacgaatgattgcacgggtactttctcccaaattagaagctcctttcccggttctacatcactcacgcctatagat

SEQ ID NO: 50667 - DNA, 170 bp, Oryza sativa
ccatggatgtatgctcatctcaccgcactttcatgaccatcaatgatgtgtggaacatgcgtcaatacctccagcacatattcttacaaatagcgagtgatgatacagtggctaaaaccctgcgctacaatcatgatcgatcaagtgctcacactatgactaactgatgg

SEQ ID NO: 50668 - DNA, 234 bp, Oryza sativa
gatcttaagtcacctgaagctgcacacttatgagtggcgtacgcacgaccgtttcctttgagattggcgatcgccctggcataacaccaggggctactgtcggtgatatgggaccgggagtatcgcgaccagtagcttgaggcaaactctatcagccacgtggactggcaccttctgggacgtctggccccaaggtgatgtgtccgccctcctcctaatttccccgaggggggg

SEQ ID NO: 50669 - DNA, 394 bp, Oryza sativa
  unsure (1)..(394): unsure at all n locations
tttcctaatnactatcacanacttcatgagcatattgatagtgatgtaagaacttttgattcatatcggaacttccggtataggattggaagctccgatctcaaccgaaaggttcggcagataacgggatataacactagctatgaacttgtagcttgaataaacaaaatgtatatgaatcaaaatgtgacaaataatgtatctaagcaagatatattgtcaccaactaaatcaattaagcatgcaagtagatcgggtaaaaacaagctctagcacaatatgatagaatgcaagattgagcataccaagatatgagacacgttgaattgtttcccgaatttcggatccacggatcctacgtctcctgtgatgggccacaatgccgggtctattt

SEQ ID NO: 50670 - DNA, 375 bp, Oryza sativa
  unsure (1)..(375): unsure at all n locations
ctgcctcgagcacatccgactttatagacatgacttgcagcgtcacacaccgccacgcgggtactgtatgtgcttcccacacccgcggctgcatataatcttaacatttgttgtttttatatacccaatcaattttatactgcactatagtaattttaactgtcttaatcaaattctttttgttgatgacaggattttcactttcgatatctccgaaagccattttggtataaccacaatttcgggattntcggcactatttggactgatatttttttcagatatttgaaaataatttaactgaattcgactatatttgaccaaatcacaaaatttaaaaataaatcggcgagaaataagtcaatcagatataca

SEQ ID NO: 50671 - DNA, 415 bp, Oryza sativa
  unsure (1)..(415): unsure at all n locations
ataagtaccgantcacttataactaatacctatgaaatgttttcttttcaacaagtcttttaactggatcatatttaaaaccggcgcctataatagcctattggagtgactttatagaaaaaaaaaatcagcaccaatagtcataggtatcaattcttattataaaatacctacacttatatatgagtcattattgcctttgtttttaaaaaaaatgcctttcaatcgagcccacccatcatagaaacaccatgaaaatttctcaagcgggatgcatggatttgggtttaaggtatgtatgttatcttccaccgcaacttctatgtttcccacatacttctctttcttcatttctcattctctgtccatcccncgcgagggtgcatccttcgctccgtataacggacggtgggtg

SEQ ID NO: 50672 - DNA, 405 bp, Oryza sativa
agctttcatcagaagctcaaagaaccattcttgcttatctgccatactaactatataaccccaaacaagccagtttcctattgctttgcaaaccacgatgaccagaataaaaccacgatgaccatataagctgaatgttcaaagatggatcaggatattggactccgctgtcatctttgtcgatgcaatgaggcctgtggcctttaaatttgtacgggtattactggatcagcaaagaagtaaatccagtgtcaagaggaattgccaatgttggcataatatacaaagctacaatggcaccgtcacataccccaactccaatcggatgtctcattgcacgatgtctacgaacaacagattttgcaatacgaatcttcgaactggaggacgtacacgagaacacaa

SEQ ID NO: 50673 - DNA, 373 bp, Oryza sativa
tccccactatagtcttgcgaagctcacctgtaacgactagttacttactctgagtgtgccattccaccttgtggatgccatatgattatgttcgatgagttttccgcacgaatcggtccttatattctaatactggacatagccacatatgcacaacctccgcatcgcgagttttcacatgcattttattttcaaacacaccgacaccacatgtcgggttttgaaatggttcacaaacccatttgccaagtattcgactacacacggcgtatgtggtatatatggctacacgctcagagaaacgaatgccgatgtacccaatgtggacgacgatgatcatggtatacgacctcagaaattacgcgattctgtg

SEQ ID NO: 50674 - DNA, 455 bp, Oryza sativa
  unsure (1)..(455): unsure at all n locations
tggctgtatggatggcggcggcggtatatccataggcgtgggacttgtctgcggctgatctgtcgcatgcgatcttcggatccgacgtgcgggctctggctgtggcgacaatgacaganggcaagggtgagtgctccggcggtatgggcggcgacgaccatggtcgttggcggcggcgtgcggccatcttcgtgctcctccacccgcccggctgccgtcgagccggagctcctccgctcttatgccgtcgtcacgcatttccgtctgccgtcgttcatcttgtgagcccgccctcactgctcttcctcttgctcgccgccggcttgcttgcccgccggccggtccatctcgtgcacaacgcctgcttgcgaacaccaccggacttgttgctcgcacgcccgctcgttgacggtggttgcatacagcgtccattccatcttgtaagtgtcaattat

SEQ ID NO: 50675 - DNA, 332 bp, Oryza sativa
  unsure (1)..(332): unsure at all n locations
ttacagattgaagcctcatttgctacattcatactcaggcagaatacagcctttcatcatcagagttatagttgctcggctgaaagtcggtgttgcggaattgaactacaacgtcacttgcaatcttgtcagccagcgtttgagcattgctgattaggtcaagagcagcttcttcgcttgtccacgctgcaaaaccatcaatggcgtcaatttcaattcttgggtacaaggaattaggcatcgacaatgccatgctagctcacatacnttcagctttcttgatattcttgaaatatacatccggagcaactctcagcttgacaaagatttcg

SEQ ID NO: 50676 - DNA, 227 bp, Oryza sativa
tcagcttaatatattctgtaatgaacacgcaacatccaaatttcatgaattctcttttgtctctacacaaagtctaacaagattgtaagatgctgggagattgatggtacacaacgcggtgtttatctggctacatgaatagtaactattaatttctaatgacatggatattgctactttcgaaatgcatatcactgaagaccgatcatctatgggtcctgtttgac

SEQ ID NO: 50677 - DNA, 429 bp, Oryza sativa
ctgcacttggctttttaaaagaaataaaattttttatgggcctctatgatgtgacacacaagttttgaacacttgaaaaatgattgtggctctttattagccagctgttgcatcgttgacgatcaatacaagagcacttaatctctctgtgtgatgcgaaaggtcatggccaccattagccaacacagataaagctgggtgagagttgagttccgactactttagttgagttccgagagatgcatttcagttatgtaatctgccacgcaaatatactctgataaaaacaatttcgacacctccaatttgttaattaaagggatcaagagtatcagactgggatcttgttgctgacattgcctgtcggtgttgtgcagcacttgagataatccatgcttggagagcatcacaatttgcacggagcgcatg

SEQ ID NO: 50678 - DNA, 376 bp, Oryza sativa
tataccttgtatatttaacaactaatgcttacttcaaatggatcaaatttgataataaccaaaatacgatgtctgctactctttttatgataaaaaaaccctacaagcatggcgagtcccacataacattttgtgagtcgtgatatcatgacatgattatcagctagaggaacacaggcaaacgattcaacatttacagtcctgactcccacaatgtcaaatatcactctacagacatgcctacagcatacatcatgattagatctacagtcggtaaatatgctaattgagcattgtacatacacggtaggcttgcgcatcggggcacatacaaattacatctcatttccattctctaataaaatatacctggaac

SEQ ID NO: 50679 - DNA, 387 bp, Oryza sativa
  unsure (1)..(387): unsure at all n locations
agctttccttgccatgccggcaagagctcctgtagtcggcctcactaagcttcggcggcgatgtgccatcaaccaccaaagtgtctggacactactttcaccagctccggcatgattactccttcgttgacattgcggactctgccatagaacgacgcccgcttccacgggcttttccttccgtatcaacacacgggtatttttctagtctttaattatatataagtagtggtggtggcaaataatagaatgagatgcgcctcaacatttgtagaaatgagttgacaattaaggggagctatgatngatacgagagagagagagagagagacgcgatgcatactatcatatgctctccgcgcaaaatctaaaactcatggtaactct

SEQ ID NO: 50680 - DNA, 435 bp, Oryza sativa
  unsure (1)..(435): unsure at all n locations
agcttatgcaaacggcggcgtctgtctggtcgcatggtctctagtntgctctcccaaagagtatggtggttctgggattcctgatctagagaggttgggaatcgccttgatgtcgcgatggctctggcagcatataacttcaccggaaaagccgtggcaagggcttattattctggtctcgcagaaagagcgcaatctagtatcgatttctatggtatgcttggtaggggatgggaattcggtgctgttctgggaggattgctggctgcaaggttcctccattcaggtgctatcgccggcttgctattctgctatccctgcccatctccggaatcgacgcacggtggccgatgcattgactaacagaagatggatccaggacatcagttcggcgttgggtattcaagcgatcctggagtattcaagctttgggat

SEQ ID NO: 50681 - DNA, 412 bp, Oryza sativa
  unsure (1)..(412): unsure at all n locations
agacatgggactcgtaagattttcttcatactngtgcacattcctgtgacaatgttcacatttctattgaaatgcgtgctgatctgtttccatatgttgtaaacttgtaatatgctttaaattttaaatttaaagtgtacactaagatttctgttaaaattaatctgagatccctcatacgttgggatgattgccgcatgcacctttttttttgcaacgcgcaatgattgccgtcaatatattaaagaatatagctttgttcatgaccactcagctaccggtcttgccaggaggaagaaatatgatataaaacaggaagataacattgttcattcttgtgacacgctactagaattttgctttcctgaaccataaaacattgcactaatcattcttgtgtcaacttaattaa

SEQ ID NO: 50682 - DNA, 467 bp, Oryza sativa
  unsure (1)..(467): unsure at all n locations
tcgacccggatccttaagtcacctgcggcatgcaatctntgagcttcattttcataacagtggctatactcttctttgtttctaggcattatcttataacgctacacaatacacattaccttttcccctatgatcatattcatatatcatctcaatttctcaagatcctgtgaactagtatccatctttctttgctgtaagaatacaccatcctctattcatagagatttgacatggcattagcaccacaaagaagtgatgtaaaacagaggtagataggtccccccaagttatcatccagtatcatcaataacacgaaccaacattcattccattagagcacaaatctaagcgcatgttcccaacagaatccatcatgcattacatacatacataggatntgacatatgaacatcacctcgagcacaggataaccctcgggaaatagctcagatgcagcagtcgca

SEQ ID NO: 50683 - DNA, 488 bp, Oryza sativa
  unsure (1)..(488): unsure at all n locations
tcagtganatgctgtcaatatcttacccagaagtctgttctttatttcttgagtcttgaatatttgtacccttaatgggtcacactcatgatgtttacagttacatctatatgttcctgttgcacgttgcttgagtacacagatgatgctctgatgtctgtaaccagggcagcagatatacttcgcataacgcatgggactaaatccgagttcatgaaggaacttttgggcaagctataagatgaagggctgaagcttcttttatgctctcggctggagatgaacaataattgagtaaccattttattgtgaagctccacgtcatcgtgatggcaaatagaatgtaacaatgttgcaacaatgtgcatataggatagtactaagtagacaatctctatatttagaatagctttgttaattcaacattgggatataagcatgcactgaagggctcgcatcgtgacaagaactgtgaactggtgatatgg

SEQ ID NO: 50684 - DNA, 365 bp, Oryza sativa
  unsure (1)..(365): unsure at all n locations
ancttctgcaatntctgaatcaccctgtattatggtcttttctccccggncggaatatgtagttccttcccctataaccagacttgatagtttcctacctcattcggctcagaaattgctatcttaatttcccttgtcttaactgaattcgatttctcaaaaatcgattcaatttcttcttgggttacgcagaagatagtaattacctaagtttcacaccctaaattgtgatcaataatcaatntgatcttttcctccacctgcagaaaaatgaagcatatattgacctattaccttcgtgcgaatattctgaataggaactattctccgttcctatttgaagtattataaatccttgaaaagac

SEQ ID NO: 50685 - DNA, 375 bp, Oryza sativa
ctcactggttgtcaacgctgatttgtaacaactatttcttcttctgttataatgagcacaactggttgaaatactaacgcttaatttaatataccctctcttttcagaaatggggtttggcgtgatccattatcaataattagtcgaagatcaatatgaattcattatattcttcctctgcttcatttatatatatctataaggataacgatgggtctaaattaagtactaagcgaataaaggggcatattaaattgctaataatcagaccattattaaaatctaatgagtatctggaatcgaatcaataaaaactatttatctaaggaagaaataatggactatctctataaatgctacttttaataaaagttt

SEQ ID NO: 50686 - DNA, 483 bp, Oryza sativa
  unsure (1)..(483): unsure at all n locations
agctngccgggtaggattactttatggaggattcattttatcatatcatgcacttcgatgtttccttcggagatttcagaaaaaggaaacaccatttaatgcgtaagtaactctatgcttatgctgttttgtgtctatttatcttggctgattcactacaacacatctgcaacgcatgtgtacctctaaccagttcttgaatctgagatggtccctaataagtagataggtccaaagcatgttaattttttattataagattacctcgaataatgttcatggactcaactgaaggcgtgatggagcagaatattatcatgttcggtggcaggcttggcgatagtagcgctagatgattcaagtatgatgcgcaccctgtctctatatctttctggcaaggcttgcccaggtcaccaacttgtaaactggtgcattttatatggtgaagatgcatgtatggcccttntctcatgtattgatgct

SEQ ID NO: 50687 - DNA, 411 bp, Oryza sativa
  unsure (1)..(411): unsure at all n locations
ctcacagactacttttgcttagtcttccntttttaaaagtcatagcccagagttgctttattataaaccatatcctaaccaaacacaactgttactccctccttccaaaagtaccattcgtattacgtttgcactgagaccaatgaacccctccgatgcatttaaccatcgctgcatctgcatggatttatggggaagcgacgcttcgcttgattcgcgatacgtgcgtgcgcaaccgttcatgcccgcgcgcgagcgcatccgttcgcgttctccctcgcccgtcgcgcgcgtccgtgcgtgctctgcctctgcagcatccaaaattgcgtggagccgtacctccctctgccactcgaacgatattgcatgcatgcaaattggatccgctatttgcatcatgctcatcgt

SEQ ID NO: 50688 - DNA, 461 bp, Oryza sativa
  unsure (1)..(461): unsure at all n locations
agcttctttatcatacaactaatttctgatccatgttattctttacattatttataactaaatttacaggtgaacaccatatttcactacaatttagccttgaaaaaaaatgtcatcttgggttatatttctgacttttgcgtgccattcaagccattattaaaacatataaaataatgataataatatgtattttatcatcacgcataactttataataattaaattatgtctacaaccattgaaagtaaatgaaaatactatgagtaatgtttacaaaatatgttagttagaaagcaaaacttatgcaacaaaataagcaactataacatctaactcatactactaatatttgatgagcttacgtctttagaatattntacatttaaagacccatatccactgtaatatcgattttgagaagaaatatgtcacttttggggctatattttctgactttt

SEQ ID NO: 50689 - DNA, 445 bp, Oryza sativa
ttggaaatataaaaggagtcgtataagatatctctttatatataactcatgctaacttgagatgaaatatggacttctaattgtagctcatgattttctaaaaaaatatttaagcgaatgtccacggtgaattttatcctctaaaccatataacaataataatattaaaatagcatttacccgttataatgcacggatattttttctagttaaacataaattcaaaagaccgaattggcctattgatgcgctgcaaccatcgttccacatgtgaaagaagaaaccacttgatgcttcctaatattatccgccgccaccgtcgtcgtcggggagcccttccatctgacctctcttcatctcccatctgccaatgtcttgccggcaatattctttctcatctagacggcagtcgtcgacgatgtatgcgcatctgggcttcaacgct

SEQ ID NO: 50690 - DNA, 480 bp, Oryza sativa
  unsure (1)..(480): unsure at all n locations
agctntgagaataattatagtgtcatcagcatactgtatttctgtgatacccttctcatcaagttcattaattggcttggtcaatagactgttgacgtaaaacacgaagcctgtgagatccgcttaactccagtgcaggtccaaagctcgcctttgggttagttagcgtgccaagtgatttgatcctgcaatcaacaagaaatagaaacaaagagatcgcggttaaatctataaatgatagccaatcagctaagtgccgatgacatatcatttatctttgagccgatgtcatatgtaaatcgatcggtgactataaatagataataaagaactaaacctactcgatcggctgtagatattaccaatatatagttcttatatcgatatatatttaaatcacgtgattgtgatagatcggtcaccatgccgagacagtatatatcacttggatcgaaatatatattaattacaggactatat

SEQ ID NO: 50691 - DNA, 353 bp, Oryza sativa
aagtcttaactctcgtgcattatctttttctatcaatgttccaaaaaatatgcattaaattcatagtgtgagatagaataatgagggaaaaacatatcttacctattcagaaaaactaccttacggcatcccgtggtgacgggataagtggataaccatccattcttatcaggtctctttctgtctctctctctctctctcgccgatcctcacttcgtcgtcatccttcgccccaactctcctctgtaacttctcttttctgtcctagcataggttgggacatgattccatggctatgccctttacaagatcggtatagtacagcgcttgctgtgctaatgtcgcatcaccga

SEQ ID NO: 50692 - DNA, 475 bp, Oryza sativa
gcttcatcaccttccttgctcacacgttcttgctgttccttttattgtggcatatctcccaatgtgtacgtctcaaattatttcaagaaagaagcaatctttcatacatggagtgaggagatatatgggttcgggatctcaagatcttacacaacgctgagtggcaaagttttttatattctagatccatctaagttaagggtgaaaaagggtcgacgccaaactagacgcatcagaaatgatatggataaatcagaagcaggtgggaggactttacgctgcagcaagtgtgatctgcgtggccatacttacaagatatgcccgaagaatgcagaagttccaagtggcgcggatgctattccatctggacaggcaagtgatggaaggcgaccacttggtgaatgaacaacaagcatgcgcgcatagccaaggcgtcgtcttgcagcaagcgattccatggtgtaacaatgctatc

SEQ ID NO: 50693 - DNA, 417 bp, Oryza sativa
  unsure (1)..(417): unsure at all n locations
atgacgaatgtgttaagaaatataaatacatggtggcttaaaatacgctgacataaaaaatctggctcttcaagtatacagtatatgcactattagtcagttctgtttgaaacatattatccatcagattattatcgcagactatgtactcattatatgatgaataatttatatggttggaaatgaatttaacaaataatctgaaacaattagtcggcataggaattcttttgggaagaatgtattgttaagaagcgtgcagctaacaatcttgtttcctcgttcgtttgttcaaattggagagatacattttccgtacgcgacacataaaatctcgtttatcacgataaactanatattaactattataaatttaaatagattgattcaatcttttaaaatatatataacatttga

SEQ ID NO: 50694 - DNA, 366 bp, Oryza sativa
atcctgcgacgtcattaatcgatgagtacgccctgctgtgctgtctctccatgctgactgaagtcaatctgtctccgaaaccaggcctcgtggatcgcattaactgcggtgcgcacaaagatatggcgctggaagatttccaccgcagcgcgctggcgattcatggctggctaccccgtttcattgaatttggtgcctgtagtgcggaaatggcaccagaagcggtactccaccgattacgcccaattggtatggcttgcgaatgtgatatgttccgcgccactgcgggcgtaaacacgcataaatgcagcattttttctttatggctgctatgtgcggcaattggccgttggcttcaactcaacc

SEQ ID NO: 50695 - DNA, 282 bp, Oryza sativa
aaatctagcgaataatcttattaattaaataaaaaaagggatgactgaactgaacaaaatgccaagctaatgtgcgtttgcggacttgagcaatattgcagacgcacgggctatggctgataccccaccacaatgttctaattgcacttgcagaatctaccacggcgcgcctgctgacagaactgttacaagatgggcagaacggatcggcgaatacgtatacaatgaccagggcatcttttttaccgtgagggagccaggggattggtccatccgatggca

SEQ ID NO: 50696 - DNA, 456 bp, Oryza sativa
  unsure (1)..(456): unsure at all n locations
agcttatacttctattcatgcacaagttgtcgattgtcttggatagtggcctcaatgtccttgcgttctctccgttcggccagtcttaacttggctttctctagtttgaattggtgttgctcaaggtaaacggctggagtaaagatattggctagttcatatgggattagagcctgaatctcatgtatccgagccctgattgaaccacaatcaaccaccaagctctctagtgatgatgcttctagccgatcagagatactttccagagttttcttcacatcatcagataaaggggctaaggctttgcttgtggtatcttcttctccttcatcaagatagtctctgatgtcaaaagagaagagatcggctaatacctgcagcaacaatttagaagcagttagaggacatacaagcatagccgatctgaatgcttgttgagacaaagatnaacttact

SEQ ID NO: 50697 - DNA, 456 bp, Oryza sativa
  unsure (1)..(456): unsure at all n locations
tacacaaacttagaaattccatatatctgaacttctgaagagattgctttgattntatcgataatgttttcaaaattattccctacctacggtctcgttcataaacagatacacctaacgttagtatcttcgaatataccgaagaagctgaaaaacgtgagaagaatgatggnggaagttcagccctatttgcattatcttcttttggtgctgtgcttattcgattctcagataactcaatgcatcttgtcaccatttccatgttactattatcaagagattgatccattacctgtgccacttgaatagcctgaatgcagtatagatagttaatacaatcgcgaagaggcaatgtatatnttttggggtgggaaacaaagtaggatgataattaacctcttcatactgtagtagatcacttatttcctgataacgcggtggaaatggtgcagcata

SEQ ID NO: 50698 - DNA, 343 bp, Oryza sativa
gagaagcacccaaactaagatcatgtactaattattggcttaagcgcgggtgaagtaacatggccacatgaatatataaacaactacgcaattgtggaccacgcgcaaaattgtttgctctacaaaatattcatgtctagaagaaaaaagtgtgagggcatatggcatatcaggatatcagcgatcatcttggcggatgaaaattataaaataaaggaaaacattattacttggcacatatatgtcataagtcatgtgttggggtgcgcatattatattcatcacaaacgccataataccggcatcgtgttgcataaacacatcatatatctcaataatatgt

SEQ ID NO: 50699 - DNA, 478 bp, Oryza sativa
  unsure (1)..(478): unsure at all n locations
taagcttctanatcttatctatctgttggttcggctgctctatggacagtttctctctctttcctatataaaaacaatctaagaatgtgacatattctgatactacgaatttaaatatatgtatgtttaaattcatcgtgctaaaatatgtcattttcattttctatgggacggagagagagtactttctactacgtacgtgacatattattaacttaactaatcaaccaccatgtgtactatcatgcatgcaccatcctaactaacactagctagctagaatcaatgatattgatcgatctctgttccaatgtgtgtgcaacaatataattaatactgcatgatatacctaaaacctaatcctaattctaatccaagatggctagctagctattagctaggtagtgtatgaaagtttttgtattctccttatttccttaggtcgaattggacataattatatgctggaatatatagt

SEQ ID NO: 50700 - DNA, 307 bp, Oryza sativa
ccaaaggcaatgcggctgaagcatcgatcatgcatacttgccttcattaacacagcaattgtcgcaatattgaaatccgatccatcggcaagacacattacatgataatacctataaatatagtccctcggtagcgaaaattacatcaaactgttttgttggtcggactgattttttaacactagctcaatgataccatatcatgatgtatcctgaagggccgagatacagctctttatcttggtcattggggcctatttgctaatgaaataacaagcgcttaacatgtctttaacatatatcgaat

SEQ ID NO: 50701 - DNA, 450 bp, Oryza sativa
  unsure (1)..(450): unsure at all n locations
acactatanatactcatgcttatctgcatcggagattactgtgagactttatctcatgcgaatctttgttaccactggtgaacagtcacaggtcgattatcgatatcacttcgcactgcgctatgcgatcggagtactcctttatgtgaacagtgactcgaactcctctttaggggacatggtttttgaatactcatctacgtataccggacgatatgtttgaattaggaattaatccttgccgggaacagacaatatcgcgctaggactcatcgcatgatcacgtggttgcgcttcaagccaatgaacagatgttagctagtaaaacggattaggtgcaactaagctctcacagattgagtgagagcttatcatcttaagatgtgcaatcatgccgtatgggccatatcgcgaggcccagcgagaacatgagcagattgtgccctatga

SEQ ID NO: 50702 - DNA, 312 bp, Oryza sativa
  unsure (1)..(312): unsure at all n locations
actgcagctgcaaccttgctaaaatatatacagcatatttcattcttctcctacaaacattctaatttaagatagtacaacattatgcaagtggcatatattagaagtcaagaagagacgccagttggacatggtgaagtaatacgctatagcatctattcaggaaatactgacggggaggctgattttggaaatggcaaaacacgcatatgggtggatgtgctagatggtggaagggatgttctaaaggagcntgctcctttcctagaggacccatctatcaaaaaggttcacttcgattgctcattttat

SEQ ID NO: 50703 - DNA, 441 bp, Oryza sativa
cttctaataccgtatctcacaagctggctcgcaccatggttattcttatcttaccttaggccaaactatgtccttgaattggccaaggtggagacacctcttgtcctgcgcctatcttttccgtcgaaagcaatattcttcacagtatttttaacagtcaaatgtcattcactgtccttgcattttggattgattttatgcttcacacaaataaacactgttcaaaacactatttattcggctgaatactattcagataactgttattcggctaattactattcaaaaacactattcagtgtattgtttaaattactgttcaatactgttcacttcaagagatattttaactctatgatcgttgcatggtggcgaatcctaattatacagcctcataagcttgcttcggatgatggatagtccgagtgactatcccaatat

SEQ ID NO: 50704 - DNA, 454 bp, Oryza sativa
  unsure (1)..(454): unsure at all n locations
agcttgctntcttcagatntcgctgcagtatatactataagccgntaagntcgatcaaaatcaatcttacatttaagatccaaaccgatgtgatgttttgttaatcatccaaatcgaaatcgagacttatcgtcagctagattagaagctaagcgtggggctatacgctggcgttttcatcagttggttctgaaggttctttcagtatcaagtgtactgtctgcatcctgcagtgcagcagggaatagagttaacctctctctaattattcgtcctcctttntgcaaggatttttttctgtcttacagatgaactcgggtgaatccaaaagaaaccaaattgatcgatcgatcaagatcaagtacagtaattcagtccaactccaaccactgtgtattgccactccatttctacaattctacagatgcacaaatctctanttttctntcatttc

SEQ ID NO: 50705 - DNA, 422 bp, Oryza sativa
tgcggatgccgccgccggtggcctcctcctcctcctcactgtcatgttcgttgtatgaccaaccacatcagatgccacgtccttgcgcaccttgttctgatcttggataggtgtgactaccattatcagcagcatcagcacatgatcatttagagaatcccatccgtttgctggcagctttggcagtgtgggtgacattgatgaagatgttgcgggcgcaaccgccggcgtgctcatcggcggcgtggtatgtgccgtcgagctcgtcctggatgcggaagtagtcgagctcgtccagcacgtcgtcagcgtcgaacgccaggtctcgcagcttctggaggagctccttgagcgcatggctgcgtatgtctttgacctgcgcgttgtcgagcaccccctgcgcgtagagcagctccatcttg

SEQ ID NO: 50706 - DNA, 475 bp, Oryza sativa
gatccttaagtcacctgcggatgcagctttgtactagtgcaactgattgcaactttgtttcatcttctatgtcacttgggaaagggatgggcttgatatttatgctgtgttctttcccatgggttcccaacccatcttcctcggtttgcgcgtgcccgcttttcaaactgctaaacggtacacgttttgcaaaaaaattatattggaaaggtgctttaaaacatcatattaatccatttttccaagttttttgagctaatacttatttaatcatgtgctaatctatcgctccgttttgcgtgcggaacactgtcgtggacttatgtctgtgttccatctatcatattggaactctatttccctgcacggaaactgagcggccattagcgcgtgataaataagtatagcttattctcttgcaataatggttgatgggatatttcatgaaaccctctatgtatacttttataaatgc

SEQ ID NO: 50707 - DNA, 144 bp, Oryza sativa
  unsure (1)..(144): unsure at all n locations
taaagttaattaaataataaaaaaaaagaggatgaacgtgaacntgaaacccttactaagcacgttaccaaccaacaccaataatggcatgtgttcgaagaaaaatgataaaaaaactgataagtccccaatttccaaagacaa

SEQ ID NO: 50708 - DNA, 350 bp, Oryza sativa
  unsure (1)..(350): unsure at all n locations
gatccctaagncacctgcggcatgcaagcttgtgtgaagtgtcngctcggcatcccgcacaccttcgtctgtctcctctccggcaccggggccgcttctatcaccgttgtagtcctcaccgtccgattctccgtacgttgtggaagtaaatggcaccgagctcacctatacacagagagatcattcaagatgtgggccagttatcttatttacaggatttgctttttttttgctatatatagttggcacactcttaaattaattttataaatccctttttcaggtataanaacccattttacaaaaaaaaaagacctagacttcaagatggatgatgatgttgtatgata

SEQ ID NO: 50709 - DNA, 268 bp, Oryza sativa
ctcttgtgcttattgcttattgtaacattccggtctatggcttaataggattaatagaatactcatatcaacaagttgcaacttcttttacatgaaccaatcttctaagaactccatggttaagcgtgcttgggctgtgacaatttgggatgggtgaccgaccgggaaattctttcccggtgcacatgagtgaaggttaagtgtgcagaacagatatgtgttggtctgtgatgacagtctatgacctatgaaagctatcagatgttag

SEQ ID NO: 50710 - DNA, 365 bp, Oryza sativa
  unsure (1)..(365): unsure at all n locations
atccttaagtcaccgcagctgcagcttgctccancctttttgctgttactagtgtcatttttcttgcgccatcattgttaccactactgtctatgacacgagtagactatccactaaaggcaagtgacttgggattttattcagcattactatctgtcattggattgcgtaccactcacatatatttggccttcctacctcaacatattacttctaaacagcacaagttcttgatccctgcaatcgctgattacatcttccaagtatcccttgcttttgctggaagaaccttataatggcttggtaaagagctccatattgctgagagttgttgagaggcaccatattactgttgtagaaaatgc

SEQ ID NO: 50711 - DNA, 409 bp, Oryza sativa
  unsure (1)..(409): unsure at all n locations
tcttatgaattctatcatccaatgagctcacggagacaacttggtttgtgccaactcccaatcagatnatacttcgccgacaagatccaatgccgatgaggaatttcatcgaccctgatgatggatcggctgcttaaccttcaaggaccccctctgggtagtattgacaacatataactggcaacgctcagaagcaaaagctttgacaggtggtggagtgaatggaaactgcatttattccaccaaccagtttcaatgtatatgacagacactcttccagatgttgtccctcaagaagtcttcaactttgctcaatgtcatttaaataactggttggccaattaatctcaactaatacttcttttgacttgcagacaacagaatcctcccctcctcatcaaagcaacaa

SEQ ID NO: 50712 - DNA, 498 bp, Oryza sativa
  unsure (1)..(498): unsure at all n locations
gaccttaagtcacctgcggcatgcaatcttctatggaatcagctagcatcacctatacccttatttcttattccacatcgccaatttcgtacatgttagcgaagccctcttgggaattaagccccacttcgctctgtttcgccgaatcttctttctcaagccccaaccaaacaagagtaagccatgtgtagtcggaggggccggatttcacctgatggggactctgagccagaagtatttctctatgcccttcaagacctcaaacaaagggtggcatgcaaactggttttatattcagaatcctgagcctgctcttcccgagtactcttgtcttcctccggtgtaccaagatacctggaactcgcttccgattggggatgaagcagtccaagccttggagctgatggatcgcatgctataactcanagaacaanggctacaatgagagcagattactcggcacttcataaatgccgactggcccaattaaagaaagat

SEQ ID NO: 50713 - DNA, 374 bp, Oryza sativa
taaggaagctcatgacaacctacttgtcactactcaacatgaagctcttatcgatgctggcatatcaagtgattcgctcgatgatagtgctacttgccataatgctcatgttgcatcatctagcacttctacctcttgtgatgatcttgcggatatgtctagctctagctctaacatctgcggtactatttgcgatgcctcacttgttgttaaaaacaatgagcttaatgagcaagtggctaaactcaatacgagctcggagaggtgcttcaagggtaagaacactcttgacaagattctgagtgagcaacggtgcatccttaacatggagggactcggattcttccaaagaatggtagaaaccttctcaccgg

SEQ ID NO: 50714 - DNA, 488 bp, Oryza sativa
  unsure (1)..(488): unsure at all n locations
gacactatnatatactcatgactattgccacctatatctatgtaagtcaagccagacaaagatcctatatatgggataacaccggtgcaagagtttctgcgataatatattacttggagattctaagcattggctttcgaataacgaattggtccttcataccttcacatattatacttgtgagtccatgaatggtgcaaccaatgctcgtctgaagtatcccaacaagacgactggcgccagagttatatatgtaacactcgatattgtgtaaagtcctcgtggtacgatgcccgatatgtcgttatcgactacatnatcatttgcaacttagaaagattactcatgctctctgaatcggcccatctaatttgtgtcggaaacatcaatggagacaagaatgaatgttccaatgtgaatgaatttaccgacatgaggttttatttaacttacgttcagatgaacaagacttggagaatggagatggt

SEQ ID NO: 50715 - DNA, 367 bp, Oryza sativa
ccctgagatgagaaacataggtcatgatttaccacgggatgatcatcgggttaagctattagcaacctgtggcttttctattcaaaagcgttgctcgcgattcctgatcgaaatataaaaccatgtaaacatgacctacccgaatttgctgttttgattaataccgccttgattattttcatccatcttgcacaaacataggatgggtggccgaaatgagttacactgccttatgaagacagctaagattagcagtctacacaacaaagtacggaacaatatctggtatctattcatgtgttctggtctcgtactgtaagcctatactactatgtacttgctatgagatttgcctggaatatatagt

SEQ ID NO: 50716 - DNA, 492 bp, Oryza sativa
  unsure (1)..(492): unsure at all n locations
agtcacctgcngcatgctanccttatcaagttcattccacatctaaaaattatgttccttttcatgtcaagagaaccggtaataatggctacttgtacgactagaatttgactcatcatatcatagacaataaatcccactgtgtatcttcaaactaacctgttattctgagcttaataatggagcatcagcctaattcttcatcagccggacagctgactgtagaaaaaaaatatatatgataaggtagctagtctatcaccacgattatctaattaatcgtatcaccaagataattaacatatcttgcttaatcgtgcaagttaattatattggttcctgcaagatagactcctctgtcaaatcgatcgatattgtatgattactgaatgccttctggacgttggtgggtgtgttgatggtatatatgtttgcttctcacttggtgaaaggatcggagatagcgtcgctttatatatttggcactatctc

SEQ ID NO: 50717 - DNA, 464 bp, Oryza sativa
agcttggatctctgtgtcaaagttcaaatatttttctgcttcagactgcatatcccaagaaaatggcatgcctgcaacctcattaggcgccttttatctggagcggacatgtgttcacctgtgatatcctgagcaggaaatggataatggtttagtaaaacaaaaggaggtgggttacttatttgcatagattgcatgcaaaatatttatattaaataaagtaatcccagaattcatatagttatttaatagattacccattatatgtattctatagctttacattgtggtagagatattgcaatggttgccatatgatgaaatggtgcgttgaataaatatcattgaacaagacagtcaaacatatcatgaagcatatttactctcggataggtaagaaaatagccatcaagaatcagaaaataatcatgaagcatcctattgctgaacttcacataatatct

SEQ ID NO: 50718 - DNA, 387 bp, Oryza sativa
  unsure (1)..(387): unsure at all n locations
cttatatttgttatgtactctggatgatgcaaatgaccagtatctaactggcaggtaactcattaagttatttcacatgaagagcaacagtgtatggcatggaaaagacttttggcatttgaaaagtgagtaaacatatgcatgatctaattcattaagagtcacggtatctctttgctgtagctatataagctaacctttgtattcatgttctttttccaaaaccctgtcccaaccaagtacaaatgtgtatgcttcgtgaatttattcaataacttgagcctcactggacactaactggtgcaattaatcatatgagtatttcaccatcccttaggccctaagaattcttcgatcctgcttaatatctaactngcctatagctca

SEQ ID NO: 50719 - DNA, 441 bp, Oryza sativa
tgttggtatctcacactggagggagttgatgcattatctgtgtttcttgtttttgctgcacaaagacagttcatctggaatgtggccttcaagagagttgatgctcacgttgaggtaactgatttgtcccaagtgcccgatctcatctggtattttcccaagaaaggcgtttgttgataagtcgaggcttgcaatggagctcatattgccgatgcaatgtggtattgagccactgagtcctttggagctgatgtttagtcccatgactcggatttgggtctgtgtattgttgcatgaaacaccctgccagttgcataagtccatggatgtattgctccaagaccttaatgctccattaggatcagagatttgagacttgaagcatagcatggctcctctatcagtatcagtgtcatcactgatcgctattgcatggaacac

SEQ ID NO: 50720 - DNA, 468 bp, Oryza sativa
  unsure (1)..(468): unsure at all n locations
gcttatatgcattctcattaattttggctaacactttatatggaccttcagctctgggcatcaatttcgattttcgcaagtcaagaaaccggtcttttcgcaaatgcaaccaaaccaaatctgcaggttcaaaattcaattcccttctacctttgtcactagcaaacttatacttagcattcatgtgctcgatgtttccttagttggctcatgcaggtntaacatcaactcaacatgttgcttagcatcaaaatttaagttttcagaagatggcgaatgcatcaaatcaataagagcacgatgcaacaacccatacacaatctgaaatgggcacatcnttgtagtagaatgcaatgaacgattatatggcaaattcatatgaggcaagcagttctttacatcttgatattttcttcaaacaaccctagcatagtagacaagttctattaccacttcagttgccatcag

SEQ ID NO: 50721 - DNA, 447 bp, Oryza sativa
atgcaagcggaatggtgatgttctctgtctcaactaatcaccccaatggatggtggatgtatcgatgcccttacaatacacactgtcgtatatctgcaaacaaatatgtggtctgatgtggagatccgggtaagcttaaatatgtagcaaaggaatagaaaatgctgaaatcagagagtgcaatgttcaataatagtgctgggtctatgctataacgtaatatagacacgatcctagacacaaactatcagtataaaaaactcaacacactatgatatatcaaattcagctaaaagaacaacctattttccctcttcttttttaactcactttatacttcatctatgactgtactgtttttcacgagcgcctttttttatgtttttaagcaccatctgcttctctctcttttatgactttctttcaaaaacgactcagcacatcatg

SEQ ID NO: 50722 - DNA, 467 bp, Oryza sativa
  unsure (1)..(467): unsure at all n locations
tgcatgctgcaacncatggctnctcctaaagaaactggctatgtctctttctttcctattagnggacaaatgggctgcctggcccgggttggaccaaacaccaacaacctgtgccgaagttagtcgggccgacactgcccgacctatatgcctaatcgggccatgcctacccacgagctgcacccatggcctaagcacggctgaataagactcgggctatgccaggccggcctgaatgcacgacagctcatcatgtttttctataaaataagtctatatttttcctcgtctagagatatgtgtcttttatggctgtaatagatctattttgtatctctcttctcatttgtcatgcctcacatggctgaatgaagtctatgggattcatcaactatctttctttgacagagtctagccaggctggcccaccgtgccgaagaagcagcctatgcatggcccggctatcg

SEQ ID NO: 50723 - DNA, 385 bp, Oryza sativa
  unsure (1)..(385): unsure at all n locations
agcaatggagaataggggaagaatatggaagtggtggtggttgctgtggagaatacgatcttggtggaagatttctcgtgtgagctcgattggttactctagtactctactactacatcttcgcacaatgatgtgaggtttcttatcttttccagcttgtttgggtaaactagtctcttatgaagtaaatcgtactacgatttactgtatttctttctcggttggtgtttgtagaatgtgatgcttggcttttagatcagatgagatcccatgaagtcatgtttcactgccgatggtcgtgaatgtggctgttccgctgttccaccttcatgatatttgtgtcaataggtatatgtcaaatccatcaatgacccgtnaattattt

SEQ ID NO: 50724 - DNA, 386 bp, Oryza sativa
gtctgatgctcacatttaaaccaccactttacattaaatgtgaagtgaactcatacccaacttgggagacgtggatcacatgcaaccccttgcatgcccacgttaccccggagaacacaaagcgtgcgacatggcgcgtccacagcaaccatccccaagtttcacccctgttggctacggtcgcttatgggtaacccgtggacaatttgaacgaagacttttgattcatctctccacttgttagttggtaagcatggctttcacatctggtcagctggcttgagggactactacaagactaagcatattaagtttagaggagtatgccccactccgacatgcatgcaatggcattgtggaactcccttcatgtgtaatatgaggat

SEQ ID NO: 50725 - DNA, 382 bp, Oryza sativa
  unsure (1)..(382): unsure at all n locations
aaacagaattgcttgtgatgatcatgatcatgtgttataccttacgtttgagtgggagtagcatccatactccaaaagagaagaaatcatctccgatcagctcgaaaggcactacacgcatcacatatttggcttgtttataactgaacatatgtaggacggcgagggccggatagatatgaaaataataaacatggaaactcacggtacccgctttattgattacacttgacactgtcctctcatgagcctagtgacaaagcacacacacatgctttggtatgttgattgaattacctcaactaaagatcatatgcaattatgtattgcacaattttcttntttgccacaattngacgagcataagcaataatcataccca

SEQ ID NO: 50726 - DNA, 479 bp, Oryza sativa
aagtcacctgcggctgcaactggcatcattcgccaaactgtttaacttgttttttttatcttctgcagaagaacgtgagtactatgaccagatggaattggaagggaaaaacaaactgcgggagtttggtgacagggattccattttgcgtaattactcaactgtgctttatttcattctgatgcttccgcagctctgcaatgacataacactatgcccattagacctgatatcatggcttccctggcagtgcagcttccttgagaggatggccatttttcctgtttggaattctggaattattttgtgatgatataatatggccataatacactcactcaaaataaactgtgctgtttagattgaaccatcttgttgccaaagagatttcgcacactaagcattgcatgaatagagtatttcttttgattttcttaaaactgtccatcttactgagagtgtcaactagcaagtgagtg

SEQ ID NO: 50727 - DNA, 231 bp, Oryza sativa
  unsure (1)..(231): unsure at all n locations
aggtaaaaaaaaaaaaaggggtgatgtacctgcaaccacnaaggacgcactcacatggaaacaaaactcttcttttcgacccccctcatcggggggcgaaaaaaaagtacacccccgccaataaaaagtactgacaccgcggtctaacgcacggaaaccatcgccaggaaactgctccaacagagcccgtgaaccctgagagagactacagtttcaaggcaccgtggccaa

SEQ ID NO: 50728 - DNA, 478 bp, Oryza sativa
  unsure (1)..(478): unsure at all n locations
cacatatatactcagctctacggaaaaatcacgaagttaagacattagtcaacaagcgatttcttctggntatgtttaccccataaggctgatgttactcataagatacctacgacttcctttaagaaactgaagatacttatgctaaaatcaaatgaagttatgagatcgaattatggtggtaaacactaaataaagctcgtgcaccttataagacattaaatataagcgtacatccaaatggtttgtgaaccatgtaagaataaattgagattgatgaacaaaacatagaatcgagtagaagtcgctaaatgagtcaaaatagtaggccatgtaagtggggtataaaactttggctgactctaatggaaatttaaacaatcaagtgggtgaacaactcatgaaataatgggggaattcattaccggactcatacaaagacatttatgcaacaatgatattgctgataaaacaaaga

SEQ ID NO: 50729 - DNA, 464 bp, Oryza sativa
  unsure (1)..(464): unsure at all n locations
agctnnttgtaggtcgacaagaactacagctagttctgtactatactgccatttctgcgtaggaaacgaccgataaatacggatcattttgcagcaaataattaataaccccccacacgcttttcacctacctncgtgttcctgctcgcttgtaattntgcagggcgacgtgatgcccagcttctctgcatacacacacacacacacaacacttcgtcacgaccctgtctttttcgcaaagtctctgacgatgtgctgtgcgttgaatgaacaggatagcactgcaaaagatgaactcctcacatggcagagccggcctttgcgtatgcgatgcatcatggaagcagcagcacactcgtctaaaccgaccatttggatagcattacactcgtaaacttataaaccaagctgatcctttntaaaagatcagaagcttttatatacctgacgagcctgagactcct

SEQ ID NO: 50730 - DNA, 483 bp, Oryza sativa
tatctctaatcatataccttaaacttcactaaagtggcaatgtttggactatattatcacataacaacatatttacgccataataaactgtagattagcatagaatatatcccgattctacagattgaagccatttcgttgcaaaaatataagatttaaccccaattttatcacacaactatatatgtttaagatgtacacacatcaatcatgctaatctgaagggtattcagataaataaattccataatttcagaaaattaaattccataattttcattgacaaatttcatcacctgctacacattcatgagtatatttatgtggtaacccatgattatggattaaacgaatctgaagttgtcgaggttgatagtcgtaatatgaatgtagcatactacttatgggaaccgtgattacttgagtttatcagtagattgtttatggattagtttaggtaatcatcctaacaaagatcattat

SEQ ID NO: 50731 - DNA, 429 bp, Oryza sativa
agttggtaacatatatcatgtgatgggaatctacttattgtatgtaatactgcacgtagaaaaactgtgatgtagttctcgtatgtagtctgagcttgtaactgtactcatgctgcaaataggctggtttctaagaacttggaaagaaatccttgtgaacaatgagaaagttcattaaggtactttgttttgatcagacacattgttcatttttaatcaaagaaaatagtgaaattgtactgtacatcagtggaacttaatcatgcaaacagcaaactttgacccaatcctatagaacaagttctttctacaccttattcaatagagctagaaaatataacatacaatgggcttgttttggtcaatgctcatttgggctgattacctatatgagtgagaccatacaacctctgagatctgaaggctgaa

SEQ ID NO: 50732 - DNA, 331 bp, Oryza sativa
tataatctcagcatgtcgtacctcaagtgcatgattcgctctcataatctgtgtgtttcttctataaaataaatctcgcagctatattcattattaagctgggcatcacacactgcttcataagtctgtacaaattgtctgcaataccaccaccactgaatcatatagttcaagctatcaatgcaggaaccgttcttgatcggcatattttactgaacgacttcatattgcattcatagcgcacaagacagactctatttcttccatgtatttattgtataaaaacacggcgaatgtggaaaataaacataatcgagtccttacatcatta

SEQ ID NO: 50733 - DNA, 440 bp, Oryza sativa
  unsure (1)..(440): unsure at all n locations
gatcttaagtcacctgctgctgcaactttatatacaattattctttttgttttatgaataagcgatcaactataattttgaaaaacaaccttatcctagagcagtagtaacaattttgttaaggattatgtttcatggtaagtattttctcattttgtaggtcaagacaatatgcgaaaacatatttgataaacttccattgcatgggcggggaaaagactatccaccaaactggtggaaagctcttggcggcctgcttttagcacatggtaccatcgtatgcctctctctacatatttatagtcattntcttgtgcaagctaagatacatgttctgtatgctgacttgaagttgtgtacatatgtacagtgtcgatttcttgagaaaataaatggttgcatttttctaaaataatagtatcaataaacattgtgatgct

SEQ ID NO: 50734 - DNA, 463 bp, Oryza sativa
  unsure (1)..(463): unsure at all n locations
tgcagcatgcaancttgaaacttgggatgaatgcaaaacaatgacgatgaaatatcttttgtttctatattataaacgtactcttcttgataaattacaacatttaaaacaaggtgactaaaccgcgcgggagtactttcacaactttaaaattaatatcacttatagtggtttaaaagaaagcaatgagaacacaatgactagaatttttatagggcttaattccgatgttcaggctgggcttattaatgtgacatataatcatataggccacttgttatgcttgcttgcatgttgagagcatatttaaagaacccaaggagatacaagctatgctgtgcccctattactgacatttgagggagctcaacattacgagagagacaatagatcatgtgcatctcatcactataatgaaaaaaaaactgtgcactactcatcgacagagaaccaagtatcttat

SEQ ID NO: 50735 - DNA, 450 bp, Oryza sativa
atagatagccaatagacagtcgcatgtttatatggttgcgaaggaatattctagatcttatatgtatgtaaagatatctgataccctccaaagtggccatcattttagatctagatgttctttagatggcccacactggtgttacaagatagatattctaatgcaatttgaacacctatatacaaaatactccaatgacccttaattgcaccaaattggttggttaaagacatctcatgtgttcctggaaaatagtgcttaaactgttatagattgaatcattgatcacaataaatatccatcaactctactagaagtagataacacacgatgatatactgtcagttgtataacattaaatatatttgatcctttaaactacaaaccagaatgtgcaatctgatgcatcaaccaaaactctcaatcaaacaatgttacactgtgtacaac

SEQ ID NO: 50736 - DNA, 473 bp, Oryza sativa
  unsure (1)..(473): unsure at all n locations
tactggattactgtctatcattgatcacttctgatatcatttcctttntttctaaatcatttctatgggtgacgtatagacatgagctnggaatgaactacaatttcatacgcccagacttgatcgtgggctcctgcttacaggttctcaaatatcatctatctcaaccaatttacagaaggaaaaaaaaacacttcttaactctgtctgattagctgcattcatgtgcagagcccacttgatgttgataaacttaaggaacattgggtaaaaacagtattctgcctgcagcaagatccagaccttgagtatccctattattgattnttttttctcatcatggcttataaaagataggagcatgccaattatgttgcctggtttagagatattgagcctcttgattcttgaaatgtatgctgtcacttactgtgaatcacaccaactatatcgaagagaanntataaattctg

SEQ ID NO: 50737 - DNA, 174 bp, Oryza sativa
acctcatcttcgtcaccatgatcggcatcaactgcttgcttcgctttccacggcaactcaactccggacctcgcatgctcgccgtctacctcatacccttcccatcccttcaattattcatggtcagagttaacccgctcacctcccgcaggtcgcagaagtaccgcgccctca

SEQ ID NO: 50738 - DNA, 217 bp, Oryza sativa
actcagctgccgtcgcctttgaacgaccacctggttcgctagccactccgggtggttgttctcacgaatgaacccggcctccaaaagtctatccacctcctcgcggatgaatgcttgacgttccagggcttgccgccgcactttcttgcggaccggtcttgcacccggccgcacggtgagacggtgctcaatcacctcccttgggaccccaggcatg

SEQ ID NO: 50739 - DNA, 344 bp, Oryza sativa
  unsure (1)..(344): unsure at all n locations
caagcttacctgaccgcgcatccgttttctttattgttccgtntcatcatacgtcttgtgtggatgcgcacaaggaggcagatcgtcattgtaaacaccgatcgcctgaccaactgactgctgtgtcagctactggctgtactcgacgacagacacatcgccgatcatctngcaggcttcggcttcagcttggtcaatgtgtatcactgcaaaggcaaggagggggaatcaccgttttcgagctcacggttgcgaataatatggcgctgaatagctcggcgtcaggcccaaacccggaagtcccgcatgcccatgtgaagatatcgatcccaacaaacgcccat

SEQ ID NO: 50740 - DNA, 367 bp, Oryza sativa
ttcctgtatcaagttataaaccatctgcgctatacttgctatgctgactataacatacattggtctgatattctgccggagaaacccatcatagatattttgctcttgacacacctcgttttacatatatgtatgcccccttaatatagccatgctgaggacacattgagtaaactataattgtgctaatggcgatatgacaaatttcggctatcacatatcggcacgacaccaccgatttaactgatatcaggcatcatacattggtaaacacacccaactatgataaatacaatgctaacggggatataacttataccggcatctataggcgatgttaacacaacggctaacatgtatcgacaaa

SEQ ID NO: 50741 - DNA, 455 bp, Oryza sativa
accttcacacaaaattctgcaccggcaagtgtgtgatttctttctgcgctgattggctgcgctatagcttaacaattattattcattgtgattatccatgagagtatggatgtgtatattttcgtctgtagtcagtgtcgctgatgtaacaatcatcacgtataagataatctattgattgatattacctatgtaacccttttatctgaggagatattctgaagatcgaatgtgtaatatgcatagtaaaaaaactactatccacggtctatgatgagtgagttttttactatcataatttattccaatgtcgaagaaaaatattagatctaaaataaacttattagtaaataaattaccgtgaatataactatggtacctgcagacaagtatagtgtacgggcctcattgagattaccattgcggacaataaaatttatactatctgcatagtg

SEQ ID NO: 50742 - DNA, 485 bp, Oryza sativa
  unsure (1)..(485): unsure at all n locations
taacttcaatcctaatgatgtacttctggcactggccatctcactgctcccanatatcgctgtactgcacacccagacatggatgacttattgatattgatggctatcaccacctctacacccacctcacacctactgtgggatggggagcaaacatcggatatcaactacctagacaaccgatctacgcaattaataactactctagtgtttataactcactaaagccatcactatagcttaactgattatagtgaacgatgatcccacactctgaatatgaactaaccaataattaattcttacagagcaatactaaattattcacaagatatttcattattatcagagaattaacagatcagaagaatatgatgaggataccgacaactccggagctcctccgaatacttctactcatctctctccctaatctcgtataatataaagtactatagatcctctgataattcatctcatgcttc

SEQ ID NO: 50743 - DNA, 439 bp, Oryza sativa
  unsure (1)..(439): unsure at all n locations
agcttcatcgtatcgatcgccagcacctactaattgtttctctccgatgtacttgctgtaattattcactcttgtatgcaccccacttaatttggaggtgataatatacctagatgccacagtgtataatgtaatattcacttcattcattntttatataaactacaggtatgttaaccagttgtgccctcttgtattatatatgctcttgattctaccgtacgtaccacaccatgcacgcattgcggtcagttcagagagaataaaaaaatcagaattgctaacctactgccgacataaatggcacccctaaatcttgcagattttgagccactggatgagcttcgagaatcatgctccangccttctactccaactccagtgaccgtctcttactttccagcgccgacgacacctataactcggcagaagactctac

SEQ ID NO: 50744 - DNA, 436 bp, Oryza sativa
  unsure (1)..(436): unsure at all n locations
gctgctgctgcacatatattattgtcaatgatggtctttattattcaatctagaataagaaagagagtgcactgaaacaatgtgttaagtatggcccaatggatgaaagggatcgaatgagattcgaatacctagacacaaaaatttggatgaatgatacaacttgtatcgacatgcttagacttagaaaagattctttctttcgattttgtaagctgtttatagatcggagtttgcttgangataccatccacatgcgtgttgatgagcacgtcgctatgtttctaaatacagtgggacacaaccttagaaataggttagttcgcactaatgctgataggtcctgagaaacagttagtcgttatttcaacatagtacttcatgctattggtgagctacgatatgaactaatcatgcccctctcattgtacactcc

SEQ ID NO: 50745 - DNA, 366 bp, Oryza sativa
  unsure (1)..(366): unsure at all n locations
aacctattgccccggctgaagccgtcaataactatgtacgtcacaacggttgggttgtgcgggattacgtgcctatcagtacggtgtactggcaaagaacaagggcacgcggagatcatgagagctttgtcccagattctgagaaagagatgctgtggaccacaatgcttaagacattcacccttgccgcggtgtcagaggacaatatgtaaatgtggactcttgagaaaatggccgaacagtttcagagcttcaagggagagctgtacacgaaatatattcttaatgtgcagacactgtacttttacacattcccanagcgtatggatcactgagacgagctcgttgcttattacacaagtgaac

SEQ ID NO: 50746 - DNA, 316 bp, Oryza sativa
gatcattctataatctaatgaatagatcaatataagattcaaaacaatctttctatacatttgtttaaaaaaatatcattgaacagctcgacaaatgtgcacgtgaatacaaaagattctttgcctctttgcccctctatcaacacagtctaaatcatcactgaacatgtgaaaagagtcacaatcattgtattctgtgggtaaaaccgactgcgataaacctcaatagtcagatctacgtgagaccgtacgtgattgatgacgtggaaagacatctgatgctgagttgggattgactccatgggccggttcgcat

SEQ ID NO: 50747 - DNA, 378 bp, Oryza sativa
  unsure (1)..(378): unsure at all n locations
agctgctttagttggttgggaggttntgacaatgtgttgtctatacgagtctccaaggagagaagcgacggagcactgccgccgtcgtccgctagaggggaagtgacgctcgctcgagtggccattcatcaccacctaattttagccgagaaaaaagagttagccaaaattagtttaatttgtattaattcttgaagaaaaaccggtggcacggaaaagagagtagggttgaaaaaatactaatttttacactaataaaagagatgttttcctcgatctgaagtgctccgtacaaccacgttcagttccgtgagttgggatggaagagaaagacttattntcccttgctccctggcacctatgacttgtttcatcaat

SEQ ID NO: 50748 - DNA, 312 bp, Oryza sativa
atgcagatctctaactatcgatcgcgcgatgtctttctatgaatatatggttactgatttagatcgatctattttaaattatcaagattgatatataaaactacactgcagtataattattagtatatgtatcttaatgcaagaatatataattaatagaagcagtcggccactgaagacatgtcccgtatatatatggtccaagagaagttattagccagaaattaataaaagaggtagcgtgagattatcaaatcaccctctaaagtgaagataactggaattttccatcatgtattactatagctctgg

SEQ ID NO: 50749 - DNA, 461 bp, Oryza sativa
  unsure (1)..(461): unsure at all n locations
agcttgctcgtcgatcctcacatcgttcgatctctttatttctcacagattaaccactgatatcgagatcgatcatcccttgctgattaaattcagcatttggcttaattcgtttgctctatatatctctcgccaatttaatttccatggctttgagttggagcatgaagacaagtgccatcttgttgatgcttctgctggcgtcttctgcatccacactgcaagctaggatgataagaagcttgagtagtgatgaacaagatcatttgatggcagccatggcgccgccgccgccgccgccatcggcggcggcgacgacgacgacggcaactgcgccggcggtgtcatgcgagccangggttgtggtggtcaagcgttggtgaaagatccaagtgcatgggtctgtaccatgtcccggcattggccactaattatttgattttcaacaacatctttgtatc

SEQ ID NO: 50750 - DNA, 496 bp, Oryza sativa
acacttataatactcaatctgttatggcggcttgcgttatcggagttaatgctttcatctttatgtttctttaaccctgtttatgtaatccgtcgagttatcatatacatgtttcaatctatgttagttgcactacataacttgttatctgctggttcttatcattaagaaacaatcggtaaatctacatgttgttattaatctagattgtatcgtgtatctaccatctctcggtggttgtcatcatcctgtttagatatcacacttgtctttatgcttaatgctgcattcgttgagatcgatccattaagtaatatttataattgagatatctggcttgttttatgatcattaacagagatagtatctgggtttcagccgatctttcctggttagtcttatgtcttatatgcttaaacgatatgctaaatctgcccttttattaatatctaccgcaataaatatattacgcgtctcgttgtataactatctggtt

SEQ ID NO: 50751 - DNA, 222 bp, Oryza sativa
  unsure (1)..(222): unsure at all n locations
cccccccccagaggctgtgattctgacaccccccaannacncgcgcaccacaacacaacagctgtttttttactgcacccgcaccctagcgaccaccgaaaggaaccacaacaggctgccctaggaaatcgacaccggagaacgccccgcacccatctcgcgcgccaggaacccgcaaccggcgggcaaacgcgcaacgcttacggccccagcccacgacgc

SEQ ID NO: 50752 - DNA, 500 bp, Oryza sativa
  unsure (1)..(500): unsure at all n locations
ggacacttaaaactcaagcttatctttnnttaattaatggcagtacttccatacttcagttatatagtttaccacacttcagttgtcattattagtcggctggaagactcgtgtgtatatagttacaacttacaaaacacgtccatttggcttttaattaccaatgaagtattttaaattccattgcgcttcctacatcaatttgaagtgttctgcatcgatctgttggcgaaataaacatcaaaacattgatgtgtgtgtgctagcttaatatttaattacctttcagcaaacaaatgctatattgatgtgtgtccatcaatgcgtggaatagcatatatgcataatggataatgtactttatggaatatgcatctaatgagttgtacatatatgagaaccatgacctttactttcanacatatctacttactttcaaacattcttacttacttacttacagatgtgaagaaaattccatgtaattttaccaccactca

SEQ ID NO: 50753 - DNA, 183 bp, Oryza sativa
  unsure (1)..(183): unsure at all n locations
ctgcnggcatgcaagcatgacagatatctaatgctctaacccatcccaatatctcctctggttctgcatgacctaacattccctcgagggcgagttagccccaacataaccatcgccatgcaccaagtctttaactcgggtcagaaccacattatcaagcacagccactagtgcgttgccatg

SEQ ID NO: 50754 - DNA, 457 bp, Oryza sativa
agtatactgcgcgctgtccatgtacaaagctgaataaaatacttttatgtatttattatgatacaacactacatattcgacatatacttcatatacggataacagattcgcatcttcattgactcttcgtttacctcaaccactgaaagagtcttgaagaaagcatctttcacgtcacagataaagaacattgagctttgactgcttttggtacccatacctatctgcacttataaaaaatatacgttcaccagtcatgaaaattattggaactgaagcagttaccgatactacagtactagtgcccagttcataaaccataatgtccatctgtaaccttctgagacagcaatagaatgcaattccatcattgatctgctcaatctctgtagctgaaagtaagctacctatgcccatgttcacagtcaaaaactcacaaagtaactgcttatataac

SEQ ID NO: 50755 - DNA, 308 bp, Oryza sativa
aaaaccagcggaccaggaaacgccccccaaacacacactttcacttcccctccagagacgaggacgacagccggggaacaaatattacagcccaacgcaataactacctgagccttttactgactacgcgactgcgcgtaggaacacaatcgacaaccaagatcgaactggggccttccttccacggacccattctggatggaccaaaaaaccgggcccgtgaataagatagacaccgccggcagacatcaatgtatatttcatcaccacatttcactaaataatccaagaaccacatataactaact

SEQ ID NO: 50756 - DNA, 87 bp, Oryza sativa
cagctacacacgcgcgggagagcacggcggctctttcactaagacaggggccaactcgctctgagggcagccaccaagacacacgca

SEQ ID NO: 50757 - DNA, 496 bp, Oryza sativa
  unsure (1)..(496): unsure at all n locations
ntgacaagaatccttggaactgaaaggcttcttgaccancttttatgatgatgatgatattgnggtatcatgtatcagcttcagaaggcacataatgctcaacaagtgtgatgctggggtttgggtcaaggtgcaatatctccgcagctcgctcaaattcctctcggagtgcccagatcgatctattgtcaacaacacgaccaagatcatgggacgtctcaaaaggatcttcaatgcatatgagatgcctgtcatttccaattcttcttgtccaatccttcatattcttactgaatgacgaccaaaatgacaacgacaatcaatccgtatgctacttcatattccagtatacgataacaatatatatttacagctacttagccacaagttcaattgatcataacgcactattcgggaatgaacgacaaacttccattcaacttctatactggacgtcgctgcattctaaagccgctgcttgccgtctacacattat

SEQ ID NO: 50758 - DNA, 328 bp, Oryza sativa
  unsure (1)..(328): unsure at all n locations
acacataaaactcaactcgcaaactntgatgaatttgagagcaaggtttgagatggattgaatatgatttacagtggtgtgactctcctctcccagccgagctgcatttatagagcatggataacggctatgaatggcatgtgtgccccactggacagtacccatctaataattgtatccaaccgagttcatgttggtggggttcggccgaacctctattggaccaaaccagcctcatatttagcacttgagatccaacgaccagtgcgaatgtgggtcgtcaaaatatctacaacacttcattttattatgcttacaataattcatt

SEQ ID NO: 50759 - DNA, 322 bp, Oryza sativa
  unsure (1)..(322): unsure at all n locations
tactaagctatccgcttctttcccggtatgtaatctttcgaagccacatcttttcatcaggtaccaggcctatgacgatcctcagagaagtaggcctattatccagaagaaaaccangtaaccatattctacttgaccaatggattaagtatagaactcatggctggctactattcaaccctggcaattgggatcaagaacggtgtcaagtaccgacttttgctaacgatggggatccgagtgtgccctgcctgccccgggaatcggcgaactacgctacacagtcagattcctaagcgaacggataacggaagccccctta

SEQ ID NO: 50760 - DNA, 357 bp, Oryza sativa
  unsure (1)..(357): unsure at all n locations
atacagcctacgaggtagtctgggcaccgacaggctcgccagttgccgtcctacatacaataaagcttagcatggtgcacacctaagccaagagcgacctactgctcttcgaatcttcggacaaatcatcattcactgtctcttcaacgccttatagtcctggccaactatcggaagcatcaactgcgccttgtagatcactgcataaccactgtccacatctcgtgattttaacatgatgaccagttccaccaccgacccatactggatttgctgtgatggcaccaaccaggcatcttctcagaacgggtgnactagatgcactactctacacatgtcttcttcatcctcatcagt

SEQ ID NO: 50761 - DNA, 391 bp, Oryza sativa
  unsure (1)..(391): unsure at all n locations
tttagcttactgcatgccatcaagcaattatttgttttcttgagagtaacatcatagattgtgacatcaatgtgaaatatgattgtaaatattaaccagtgtgaagattctaataagtacccttgctatgggaagtgcatcaacaaacttggaggattccaatgtttttgccctgcgggtactcgatgagatgcttctagtggaccatgcctaanagagttttcactatcatttcgtaaacacatatcctcataatactgctagattttgtatagccaatatttgctttaaaggtcacatgaaatgcatctgtgctccttaaaatcattaaaaacgaagtagctcaatgtattttgcattctacaaatatgtcaaaaaaactaaaataact

SEQ ID NO: 50762 - DNA, 163 bp, Oryza sativa
  unsure (1)..(163): unsure at all n locations
ctgcagcatgcaagctcganaactgaatgtctcaatgcacnatgaatctgtgttctaagatgtgtgcatgaagaggatggggcttccattcggcaattttattgaatgtgtcggtttgtgggaatgagcactgaattctcaaccaaaactgacactcctttct

SEQ ID NO: 50763 - DNA, 498 bp, Oryza sativa
  unsure (1)..(498): unsure at all n locations
tcttantatcccgataatgcganaccctcggntttgtgattatttgtgttgcaactgcttanctctctgggaagatgtaactcactgaatttgtgctttgttctcattcacatgccattgcctaaattatgtaattgttcttggatgccattgtgttttgagacagaatgctgaattntcaatcttgaattttgtccagaacacaacagagatggatttcttcagtgaatatggtgactccagccgatacaaaattcaagaaatcgttggtaaaggaagttatggagttgtttgttcagctattgaccaacataccggtgacaaagtagcaatctagataattcacaatatctctgagcatctatctgatgctgctangatcctccgtgagatcaaacttctccggctcttacggcatcctgatattgtcgagatcaaacatataatgttacctccatctagaagggacttcanagatatttatgttgctttcaactg

SEQ ID NO: 50764 - DNA, 421 bp, Oryza sativa
tatactctgccatagaacctcttccgaaccaggaactcatatatttaacacctcatatttcaatatattccccaacatccactgcttgtattagaaagctatctatctatctatctataccgtaaccaactgggcactttcttattacttccacagtaaccacaaagaatctaccgatgattagttagattattctattccgaccgctaataataaaaatccgaattatggttaataaagtatacttcgcgggccacccttaagttaaccacatctcgaaaactaatactgagagggacgaggacgaaatactaattagatcgatctactcctaacgccttcggcatcgcacagatgataaatcaactctctacatcgatctgaatcataacaacgtcacgacgccggaagatcatgataa

SEQ ID NO: 50765 - DNA, 539 bp, Oryza sativa
  unsure (1)..(539): unsure at all n locations
ctctctcactaagagatcttactgtgtcttgatttgaatataatcttccttctcnnccagctggttgatgcgtctatgccattagngacctatacatactcnagctcaatacaccaagatgatatatntcaatcgagtctatccccggtctctgtatataatgtacacagccacaaaactagatctaagaagacttctctatcacacaagacagatactagtggctactaatccgtaaactatacctccacccatgcttctgggtgaaatccagccaaaaaaaaagagcaagaaacctcacgtacgtgagaactaggcaactagcagatcgaatcactgtgatcacggcgggcgccgaccaggccagctatcggcggcggcggcgacgacgacgacgtggttaatttgatatctgttcgatcggagtcgcagcctgttagtagatcgctaattgtatgtcgacagcacgctatctcctgactcctgccatgggaacccacgtcgaatgattgcttgtcagataaaagagagcttatatt

SEQ ID NO: 50766 - DNA, 323 bp, Oryza sativa
  unsure (1)..(323): unsure at all n locations
tgttcggttttcctcaacgttcgagctgatatccgcgcctgcttatagcttggaattcaacggacttctccaacttgtgatgtctatngtcccatccacaatgcagagactcacgaactctcaagctgcaaggtccttctcaccgccatgaagacgtcaccctctaaggtctagcagtcacgaatctcacctggagatgcggacaatgaacaaagagctgcgactacatcagatcgattcgtcggcgttatcgatatcgatcctcatgagccgtctgtcctacatttgctcgaagaccaggcctcatcatcgacaagtacacc

SEQ ID NO: 50767 - DNA, 154 bp, Oryza sativa
tgcacgcatgcaagctctgcagaaacttgtacgggtgaaagtcgatatcatctcctccatggattgctcgcgcgaactgggtggtctgaatgacctgagacggctgtatataatatggcgtgttagtgatgcataccctgacaagaaaacatac

SEQ ID NO: 50768 - DNA, 485 bp, Oryza sativa
  unsure (1)..(485): unsure at all n locations
nggctcggctggaggaggaagaagacatatataaagggggggagatctncttgtctaaagatcgtatatgcccgctgtagccaccaaccaggactaaagatgatctttagtcccgggtgataacaccaaccgggacaaaagatcgtatatacctgttgtagccattatctttagtcccgggtttaagtggaaccgggactattgtgaaaatcaaccgaccgaccaaatatggtttctctaccagtgatacgaaaaagcacaacggaaagttgggacctattttgaatcaaatagttaaagccatagcaatctaatcttgaatccacttaacacacacttatccagaaaatagggagattatttaactatgtgctaatattagcgttgattattatccaaatgctcctcttaaatatgctcgtatttctctctacaattaagaagtagtttcttactatttgtcactttgccacatggatgcagca

SEQ ID NO: 50769 - DNA, 295 bp, Oryza sativa
caataactgtacttttactccttacttgatttcactttttttttatcaaactggctttaatggtaaagctaaccctccttactgtcttagagcggctcaagctgagactgttggtgagaggtttgccataattcgtcaatgtcttttcatggattggaaggcctgttatccaattctatgaggctgaaagaggcaaacaaggcccctacagatttgaaaattctcgtgggtcaagtggagagaactctcctcctggagaggggagaacgctagagactccatcctcaagacagtg

SEQ ID NO: 50770 - DNA, 153 bp, Oryza sativa
  unsure (1)..(153): unsure at all n locations
ttctgctatgtattctccccccccccacagcctgatctgaacccccacccncacnacgctccactgaaaaatgaattcgcgggccatgttgctttataaccagagacaatatttgcaaaacttgcataaattgacacaaaatgtactataaaa

SEQ ID NO: 50771 - DNA, 518 bp, Oryza sativa
  unsure (1)..(518): unsure at all n locations
tgacacaacaaactcaagctgagcangccgcctgtgctgagcgagtacgggaatatgagtggcaccaccattgcgttcgttctggatgacatgcgtcgccgtcaggagaatgagggagatgagcatgaacaacctgagtggggagtaatgctagcctttggaccgggtatcacaatagaggcaatggtgctgcattacccgctctcttgaagtcttgtggaaaattaattggcactatcttatgcttctctggtatcttaatacgggatatggcaataaattaatgcatgacactatatcaattgtccatgcttaagtgggattatgacctaccagcgatgtattgatgttgtggaattcctaccgaatgtctgngaagatattagagttgtcaactactcaactctagtatatgttgtaattaaactctctattgtttaatatgctctttgaatgataagattcttgatttgataaaaatgtataccatgtgatatttacaaaccatattgttatat

SEQ ID NO: 50772 - DNA, 218 bp, Oryza sativa
tgcaagcttgcctctgccgacaagaactactagtgctaaccttgtctttggcatccccatggctgtgcctagctttgctagtgattacaccaatgatttgtttggtcctctggttgagtttgtgaattaattcctctctgaatttgtggtggaattgaaggaattgcactattggtgtgtttgaaacaacacaggtttcttgatgattgttgaaaggg

SEQ ID NO: 50773 - DNA, 485 bp, Oryza sativa
gacctataaaactcagcttttcgcttatatgtgcttgttggcaaggagttgggttgcggaatatatttcttcaacagaaccaacaagtcattaaaactactgtcggaccaaccatttctggccttcaatctcataagctcaagcaccgtccgcaacaatgtgaaatccttctcacagccctttgtctcatcgtacaaaagatcattcgctgcctttttcaatgcatcaaagttatccaacccacgagcggacccagcaacaacctcaggttcaacatgacgtaacatctcttccaaatctgcaaaattaccatcatctacgctgacattaccatcatcggcatcatcaactgtattgtgctgacgcattgcaccaaccagttcatcataatcatcaacgggttctactgcatgcacttcttcttcttcttcttcttagctactacaatgacatcctcgttccagcttaacacttcgtcccgtact

SEQ ID NO: 50774 - DNA, 390 bp, Oryza sativa
  unsure (1)..(390): unsure at all n locations
tcttcgcncatatgtgcttgntggcagggagttgggttgcggaataagtttttttacagaaccaacaagtcattaaaactactgtcggaccaaccatntctggccttcaatctcataagctcaagcaccgtccgcaacaatgtgaaatccttctcacagccctttgtctcatcgtacaaaagatcattcgctgcctctttcaatgcatcatagttatgcaacccacgagcggacccagcaacaacctcatgttcaacatgacgtaacatctcttccaaatctggcaaattaccatcatctacgctgacattaccatcatcggcatcatcaactgtattgtgctgaccattgccaccaacgagttcatcataatcatcaacggggtctact

SEQ ID NO: 50775 - DNA, 279 bp, Oryza sativa
  unsure (1)..(279): unsure at all n locations
taacattctctaatgagatcaacatagatatagcctccttatgttatgaaaaagttganggagtgtccagctttcaatagttgagataaagttgaattgtccatccttatctgtaagtgatcacagccacatggacggaggtagcgaaaccctaaaactaaactccatatattgcatgtgggggactggagaataataatgccaacatcctggacaaaatattggcgtcacaacgagtgaaccaaatcatcttccacaaacgaaaataaaagtcatagg

SEQ ID NO: 50776 - DNA, 447 bp, Oryza sativa
gccatgttgaaatatatgcttatgtaccacagcatgataatcacctcttttgtgcctcaagcgactgtaaccacatatagctggtttgagagttcttgacttacatgaatggagtgatgaatcagccacttctaaaagagattattctactgcctaaatacgttggaagaatgcatttcccatgaagaagcagcttttgtttaaaaattataaattggaacgaatgttaaacaagttttacctgctttagtacaccagcctccatatcttttatcaaaacaaacctcgacaatgcttatagccacagaggcatgatttgagtttgccagctttgaatgggtttccctcaaagcccaggggagcacctcttgtaccataatcataagtcagttcagtcatgggagggatatgtccatcgcaaacacatgatatgggggtagctgtcat

SEQ ID NO: 50777 - DNA, 312 bp, Oryza sativa
  unsure (1)..(312): unsure at all n locations
taaactaatgaagcatattacatnttaactaatcgtgtattgtgctttctagagatgctaacgacctgagtggacttaataacatctgaccgtcagaaattctactataatcagccatcaaatatggcgacatcatttcagcaaatccgttgagatgggattttacttcgcactcacacccagtactggtgagcctgtgtgtgctgtgttgggtggaagatgtgtgtgttgtgttggggggaagaaatgtaggagacacaagagatacaaccatttatatgggcctgttactctgatacacaaaaaaacctt

SEQ ID NO: 50778 - DNA, 465 bp, Oryza sativa
  unsure (1)..(465): unsure at all n locations
nnttttaatataccaacactcttaaaaagtaaaatgattatatgtgttcgctcttacgaggggcttgggaaggaccttaacaatagaactatgggaatagagccaagccgaccaccaagcaagctagctagcctcagctttttatgaaaaaattctatctatagtacaaacattttcctagtaccataaataccacaaaattcttccaccttgtagaaatagcacagcagaacactattagtataaaaaaataccacaaatctcaacgaaattgacgcgggtggggaggcgacgctacttttcaatgaccaagttgccactctcgccgctttactctaaccagccggattttctgcctttcttctcgttcttcaccagttttctggtcaagacttgagacctcgcccatagcacctcctgctctcatcatttgccgccacctcatgctcttcctgatcccctttt

SEQ ID NO: 50779 - DNA, 55 bp, Oryza sativa
  unsure (1)..(55): unsure at all n locations
ctctccccccccagagcctgtgctgatacccccccncncaccccggccaccccaa

SEQ ID NO: 50780 - DNA, 413 bp, Oryza sativa
  unsure (1)..(413): unsure at all n locations
tctgactgcactatttccaatcttacattatcaacagccactcgaaattcaattcccttaatcatttgttttagatctctacaaaggatttaaggtatgaagattgctgtatctccaagagattccacacatataatnctccaaacataaaaagtgggccacatcgacaactaccaacagaatggtagtcctctgctcactcagctcgccacatagatctttctccggctcctttcagacattcaggatcatctttttacatcttctgcagtgagccttgacattgtttattggactcactacattgaatattgtccaaatgaaattacttattattacacatctctgttttacttgaaaaaatggtctgcatttcacagggcgggtaacccataaaaatcacctttaatgta

SEQ ID NO: 50781 - DNA, 427 bp, Oryza sativa
  unsure (1)..(427): unsure at all n locations
tattcaagagctgcatttgccctcatgcccgagcaagtctaatctttagatacttccaattatccgaaaagcacggattctgagtgctagaggtcatttggtgtgcttcatattgggacttctggtcttctatttgaagaagagattgatgcctctgtcatcgaaagtagaaatagttgcttcttctttcatgaatcaaatgtatcctcgagtttcttattctgacttgggccaagcaacaaacggcttcacatccaatcaattggttggcacagggcggtatggatctgtttacaatggtactatgcggntcaagatttagtatctgacgtagctgtgaagggttcgatcttgacaatctgttcttctaaattttgtacagagtgtaggactaacaaattcacaccggactntggtgtgtcatact

SEQ ID NO: 50782 - DNA, 339 bp, Oryza sativa
  unsure (1)..(339): unsure at all n locations
gctataatgattattctactatatccttcttaagttactctgtaccagccgtacacggcagttgccacgatctttatagggaatggcatttttatgttacttgtcctctccattgcatctttgagtgatccataccggctataactatcttaaatacattcaggaagataaatagagagaaaaagcaccggctattgattatagnccaagattatatgtgatgataagtgagaccagctatgattcggtactatacattataggtaactatttaattaatcggctattaattgatcataaagatttggagcgattgtcggctgtactataacttgtctt

SEQ ID NO: 50783 - DNA, 446 bp, Oryza sativa
  unsure (1)..(446): unsure at all n locations
atcgtatataacatttagtcccagatggatagtctgcttattaactctatatcatgtngcccgcgtcttgcaacggatttaagtacatactctgtaaataactaataaaatgctaaagtgaacatactatactatatcagaaggaaaaacaagttatgcgctttataattcgcattatgtcaactgaaaacctatgcaaatctgagaagttctatagaagatcctacaataaacacatacatgccaacataaatctatcatccattgaatgccaacattgaatccaaataaaccgcctatgggatntgggtactgagcctttctatagtatactttaactgatcaatccaagccttggattgtgctgtgagctcctcgtgatgaaatgtgcaacagcacaagactattctcagaacatgcacagactctctctcttggaaatggac

SEQ ID NO: 50784 - DNA, 154 bp, Oryza sativa
  unsure (1)..(154): unsure at all n locations
cggtgattccntcctccccccccccagcctgtgatgctcgtgacccnnnnannacgcagagcacntcaccgacaatggccaaaaattttcgggacaaccacgacgccgccaagaacccaggccatggcacgagcaactcaacaagggccgtgct

SEQ ID NO: 50785 - DNA, 321 bp, Oryza sativa
  unsure (1)..(321): unsure at all n locations
ttgtcgacaaatgtatcacccctcttggtttaagaggagtgtcgaaacatattaaatgtactatgactcaaaactctgggcagaagtgtcatgggtacggattatgcatacctcctatcctacgacttatgaaatatacgaatattgcataccttcatgtacaccgattgttcccatgtacgccgctgaaaactgttgccaactatacaaaatatctctactagtcaagtgattttccaagtcctacttggacgggatagagtntcttgtatattgtacaacattcaacgtctccgggtcttacaagtaattgtactgatc

SEQ ID NO: 50786 - DNA, 102 bp, Oryza sativa
tatcaacaactcacacaatatcttattaatagcccactcatgaaatttatacctaatagatcaatatcatctgctcaattgagaacccctgcatagcatgtg

SEQ ID NO: 50787 - DNA, 355 bp, Oryza sativa
gacatctattatccaagaatgtcacttccgctggaacatcacaaataatcctatattcaaatcaatagttgctatgtgcttttcttatgtagcaagtttttgaatatgggttacaattgatgcggccaactgactaatagcattggtttccaagttgcgttcttgtcagccacttgtgtgtcacatgttgctgtagctgcaaggcaaacaactatttctgacaatcccacgttgatataagagccagcgagactgattcttctatcaacatcaacaaggaagaaagtaccaactctgctctctatacatgtgctggcacttacttagactgcttctgtgattcatcacattgatt

SEQ ID NO: 50788 - DNA, 397 bp, Oryza sativa
ctcaacttacgtctgcaataacaagacagagaacacagtgagatattatgttcttgttccaagtctctgtatgatcctggcgcctcatatgggctttccacaattcctctgacctaagcacatggagggaaaacagataggactactggtaaagaaaactatggaaacttggtcactagagcttgcaactctaaccgcgaacatatgttcaagatcgaaatcgaaaagccagccaacatggaatttatttgccccaatacatgaaagaattcgcatctccgtggtccaattgcaacgagatatatagagagaggactgctcacaaattctccatttcctccggcttctccttgcgagagcccgtcgggatcccctccatactgaccaacacagcagc

SEQ ID NO: 50789 - DNA, 286 bp, Oryza sativa
  unsure (1)..(286): unsure at all n locations
tancgncatcnaatcggagaattgatagatagcctatagattatatatttcgaagctcgtctctaaagacatgcagcgtacattcttattataaagacagttagttaatactcattagagaagagagtccattagcacatgattaaataagtgttaactattattcatatttacatagatttttttatgaatgtttcacaaactcgtatatgaaaagttcaccgaaaatcacaccatctaatgactcaccaagcgagccctcaacaatcctacgaccatactctgg

SEQ ID NO: 50790 - DNA, 465 bp, Oryza sativa
  unsure (1)..(465): unsure at all n locations
actcaagcttccaccaccggccgtagcaacaacaaatgaatgagtgaggcatctaatatatgaanggagaaaaggagatgatgcaacgatgaccagacaatgatgacgcactctttcacccgccgccttgacctggtacctgatacacagatgtcaaccctggtacctgatacaatgcatcgatgctttaaccatttttagagaaatacaccaatatttacaataccaaattaatttcatcaaaatccgttattggattggcaaaagttaaagaactctgatctaggaaaaatctatctgtctccaatacggaacacgaggagtatgaactacggtattttgctgcttagtcgaattcagagataatcagacaagacaagtaccactgcttacacttccatgtatntcggagttcagaacgttgttcccaccacatacacaccatctactatcacaagtgatagt

SEQ ID NO: 50791 - DNA, 407 bp, Oryza sativa
  unsure (1)..(407): unsure at all n locations
aaaaactaagctgctttgagtgtgttncttattttcttatttatcggtattttcttcttcatgtnattctccaagcacaagtggaactatattatttgaaaacaaatatgcattgtaagcatagctaattctctattatgttagttatattgacaggcaaaatttgtctgtaacgatcgttaacaacgctcgcatctcatcaagattaagatctgcactagagctaagtagaacttacaggttgttgtgttcgtcaacttaagtctcactaacacagatctgggaccatcggtcgaacgcggacttttctgtaacatttagctccgttcctttgtgatatacaaactttaacttgattattgcgagttctacattaattcgtttaccgatatgtctccctcatgaga

SEQ ID NO: 50792 - DNA, 154 bp, Oryza sativa
ctgacgcctgcacgcctttctctcgacaaatcatatgccttctatatcatatatacgttcgtatgtcattcgtctaagtctgttgaaccactgtactcactgtataaattgactctacgcgcactgaagtgtcgatcgcgacaaataccacatt

SEQ ID NO: 50793 - DNA, 482 bp, Oryza sativa
  unsure (1)..(482): unsure at all n locations
ctagcaggcacatgcttcttgaacttgtccagagcaataacacatgttttgacctttgaataataacacaccagcaggactggtggctatgaccaattaataaatgaatatgtgatgccagccatttggactcctcaccgtgcagcagttatataaaagttagagcaaggttaatagtataaccaactactagctccaattcatttagtcaaagttaaactactctcagtttaacttcagtgacgtttcgactttagtcaaagttaaatcactctcagtttgactaattatatagaaaaaattactattatntataacaccagcataggttcattaaatttataattgataaatcttcataatatatttttcttaagttaaaaatactttctctattaaattagtcaaacttagagtaattttactttaaccaaagtcaaaacgtcttatcacttataacggacggagcagctactgatgat

SEQ ID NO: 50794 - DNA, 132 bp, Oryza sativa
  unsure (1)..(132): unsure at all n locations
catgtggtagcttatgcttcacgccagctacgaccccatgaaagcaactatcctacccatgaatttgaattggccgccgnggtccatgctctgaaaatctagcggcattatctcatcggaaatcgctgcgaa

SEQ ID NO: 50795 - DNA, 344 bp, Oryza sativa
  unsure (1)..(344): unsure at all n locations
actnaccactggctgtccctatcttgaccgtcaacaccaagcgtttcttcttgtccttgacaaaccgagggctatcatcataataatggagagtgaatcnttatctatttaaattgcttacttggtctatcaatgcctcggtagacttatttctacgtacgactgcgaagactgaaagatttaaatagcttctttggggtttaagctcatcaaagcttgataaaatccttttatgaaatcaaagacttgcgttgaactatcaagcacagcataaatacaccaataatggtcatatcgagcctacatttcctacaattacactcagtcagaatcaggcctttcat

SEQ ID NO: 50796 - DNA, 163 bp, Oryza sativa
  unsure (1)..(163): unsure at all n locations
aacgcagcatcacttaaattctctaaagagagagtctttttttatttcttgtgaaacttttttggtgattatatataaataggaggtgtatacaaggttantaacttcatcctccaatgagttctttgacgccataatactccgggagcaatggtctccatat

SEQ ID NO: 50797 - DNA, 478 bp, Oryza sativa
  unsure (1)..(478): unsure at all n locations
tctcgcctcaaaacataatattgcaagtggaatttcgcgaattttattttgtcgagtgtggaatttggcgatgtaattnttttacgtagatgtccgtggatatattatgccaaatttcgagtccatatgaaaaagatacgactattttaagggagatcactcgaatcatggttctatttcctttaaggtagatcactcgaatcagggttctgtttcctttctggtggcagcaggctcaacgacaattaaactcaataaaaggaacatatcaaacacaaacagaaaggaatttggtggatggctgtgatggtgctgatgacgacaaaagtggtgatggcggcggtgatgaagatggcgatgtgcgtggtaagaacaagatactctaatagactaagtgctaagaccaacaagttgacacaaccgatgcaatcgataactcaacaagccctaactaatctaannttttttggcttttcta

SEQ ID NO: 50798 - DNA, 404 bp, Oryza sativa
  unsure (1)..(404): unsure at all n locations
actaaaaaccagccacttctgcnnaaaaaaaggaaaccagtgatatttttttcttgtcaaagctctgtggatcctggcgcctcaatgggctttcacattacctgacctaacacacgagggtaacagatagatactgtaaagaaaatggaaactggaactaagcttgaactctaaccgcaaatatgtcaagatgaaatcaaagtcagcagaaaggaattaattgccccatcatgaagaatccatctcgggagaatgcacgagaatatagagagagacggctaccattctcattcctcggtctctcctccgagagccgtcgggatccttcatctgacaacacacacagctaatgcaatcgtcacaaagcgagaagaaggaaaaagacttacnacgccgccagggga

SEQ ID NO: 50799 - DNA, 114 bp, Oryza sativa
  unsure (1)..(114): unsure at all n locations
gacaacacgcccggcttttgggaggccggccaaccgggagncacaccggggcacccaaacaaaggccctgccccacgcgccagcagccccaagcgaccagcccaaggaccaacg

SEQ ID NO: 50800 - DNA, 236 bp, Oryza sativa
  unsure (1)..(236): unsure at all n locations
aaccccactctgctaagcaaccaatttatcttactggccgattgatgaattccacgaattccctcttgtactactctcctagcaactntatattgatcattatctaagaaatactccatctatttttcggcgatataatatttgagcgcatgccgccgaatctttcgatcaaccttaaactgtgggatctttcatatatctaatcaaaggaattcttcacgctatttctaactcat

SEQ ID NO: 50801 - DNA, 312 bp, Oryza sativa
  unsure (1)..(312): unsure at all n locations
gcttaatatatacacacaagcaacaccatctcctncttcttattcttttattttgctttcgccttcggcagtgcagcctgcctggaagaaggcctttctcttttgcaccctccacacagattgtgaaagaagggaagcctgtggctcttgcaaaagacttgaagagaagagagattaaataccactttgtcacatgtcaataaataccaggagatgttcaacatcttagagactcagactgtacacccaagtctctgcacttccgtattttcttcttaatcgtctcgcaacgctctctatgtcatccttgta

SEQ ID NO: 50802 - DNA, 234 bp, Oryza sativa
  unsure (1)..(234): unsure at all n locations
ccattccaccttgtggttgcactttgattattttcgatgagtatctcacaggaatccggccttatatgcgaatacgggacaataccacatatgcacaacccccgcatcgcgaagttttcacaaatattttattttcaacacaccgacaccacatggctgtgtttgaatgctgcactactcattntccatattttcgacaaacaacggtgtatgtgggatatttaatatacgcgc

SEQ ID NO: 50803 - DNA, 224 bp, Oryza sativa
  unsure (1)..(224): unsure at all n locations
cccccccccagagggttgtgactctctccaccnccaccgccacagcccccccagcaaaaccgacaagagccccttgttctggatccaccaccggcgaggggccaacgcccacaaaccagggggcccagagaaaaaatcaacaaaacccaatggggcacacacctaaagggagcggcgaacccaagcgaacccaacgacttccaccccccaacggctcgatgggc

SEQ ID NO: 50804 - DNA, 299 bp, Oryza sativa
  unsure (1)..(299): unsure at all n locations
tggtatgttntcctattaatctgcacaaatataacaattaaactagggagtaggaccaacttaaacaccctctagagtaattatttcttttgagggaacactaggagtaaaatctgatgtgacactaccatgacatttgaatgtggattgtagccaataaactctcacaagatatcatcacccattcgctgttgttattgcaatccacatctttttctctgatggaccatgtgggtgctaacaatcttgtctagtataaatcaacgccacaccacttgcctagtcattaacacatcaaa

SEQ ID NO: 50805 - DNA, 318 bp, Oryza sativa
  unsure (1)..(318): unsure at all n locations
atgttatatttactcgatagtgctggctnttctgagagaaataacgagagaatacactctggtgattatctgaaagatgtactttcattgacttttcggctcatgcgtggtcaacgtcttccttcatggactaatacttactcaggtaccattcaagatgtcatacaggtatcatccattttacaggagctcttgcggaaggtatgtgggtgatttctgttaacatggcgtgccacaacatcttttagatatgatctgttcaggacacaaatgttgcataagaacaacattcttagccttgctatcattaccaacata

SEQ ID NO: 50806 - DNA, 439 bp, Oryza sativa
atctactactagcactctgatcttcctggatgtttgtattggacttactctgaactccaccaagtagatgagatcaaatgagactttgcatacgtcatctattatgatgaatacaaaacatcacgatgtaattatagtttgaatcaacgccaccaaatagaccgtgtgcagtctttttctctcgtagaatcatacctccatgttccattcactaacgcgcgattaagtttgattaattttataactcatctcaccacaaaatcataatttaaatgaccatctaatattttcttcttcaacaaatcacatttagtataatgaacatttattattaaatattaagagtgaaattaaatattgtaccttgtctacaacatcgagttgattttatgctacgttgccgccgcttattacaattcatacaaatttattatatata

SEQ ID NO: 50807 - DNA, 180 bp, Oryza sativa
gcctccagagcgctaaaggcatgccatcctgtttttttctgctaccacccaggaaacaacaagcaaagttgccgatagctgatcggctgataagcccatgacatattgttagtgatcctacctgatatagttggaccacaacggctatcgatcgatgtatgaattaaccataaacctcaa

SEQ ID NO: 50808 - DNA, 358 bp, Oryza sativa
  unsure (1)..(358): unsure at all n locations
tcatattgttactatttgcagacttctttggttaaaatctgaattttctcatgcccgagaattgggcaggtgggtcctattgatgtctggatattcttcttcttcgactattctaactaatttcattcaaataaagatttaaaatcccacaaccccagatgcaatgtccgcccaatcttgaagtgtcgtgacttgtagattgtgcaaactgtgtggttcacaactatttttanaatgctggttcatcagcaacttgttacctagcatataaaatctgcctcatgaagagaaaatactttcaaatatgctattccaccagttagaattttggtattgtcactattatgcatgactagtg

SEQ ID NO: 50809 - DNA, 194 bp, Oryza sativa
  unsure (1)..(194): unsure at all n locations
caatggcagcgccggacgccacagttctgcggctgaatcgncngcaacggatgcctactcagccggtatactgtagacgtccgaacacaccaactccatacatcgagcgaaacgtacgtgctagcgccacctaccacgcagcacgcggcgcacaaccgaacgaaccgagcggtgacagcgaacggcgagacctg

SEQ ID NO: 50810 - DNA, 406 bp, Oryza sativa
actcaagctatagaatagggaacctctctcgtccaccgtttgaatattatactccctccggtccataatagaagagcttgtagcattgcccacattcatatagatactaatgaatatacacacacacatagataaatagataaatagagtcattgacatctatatgaatatgagcaatgcctaaaaggcttacattatataaccgaggaagtatttgtatgcccgcggcaacgcgcggagtcccggctagtattaataaattcagaggtgtaacaaatatctgtggggtgtcatattattaataatttattaaaaccatataggcagaaaacaagttcacggtaagtcggtaatatgatcatttctgcttaaaggaaacctgcctattcaaagagaagagctcaca

SEQ ID NO: 50811 - DNA, 120 bp, Oryza sativa
tcatttcccagatctgttcccaatcatctcatctgtatgcaaataacattgcgagcaaaggtatttcgatacacacagagcttggtgaatagccagtgcctatgcaagatgaatacacag

SEQ ID NO: 50812 - DNA, 458 bp, Oryza sativa
tgggttaggttatgttctgatgcaagatgggaaagaggttgcctatgcatctcttttgttacgtccgcatgagaagaactaccctactcatgatcttgagttagctgcaatggttcctgcgttgaacatttggcgtcattatcttttcggtactcgtacagaggtatttaccgatcacaaaagcttaatgtacatctttactcaaccagatctgaacatgagataatggagatggttggaattaattaaggattatgacatgggaattcattatcacccgggaaaggcttatgttgtagcagatgctcttagcaggaaacgctattgcaatgctactgaagggcaacagttgccgttggagtctatgaatgaagttgaaagattgaatttgggaattgtcagtagaggtttcgttgccaccttaaacgccaagcccactgtaatcgatcatagtatag

SEQ ID NO: 50813 - DNA, 148 bp, Oryza sativa
  unsure (1)..(148): unsure at all n locations
tactcagctagaccctgaacactgtcttttcctgtacttatcgtatagatttctatttttttcaatcctcgctngacattataacctgacttgaaatacttgcaggcacttggcttacattttggacccaaatagaggacgaaccggc

SEQ ID NO: 50814 - DNA, 497 bp, Oryza sativa
tactcagctagcagctgttcataatgatgtatactgctgctgccactgtaccatgtttattatgcaattgaggcttatgggtttccatgcttatgccctctcaattagtagctcttaaccaccaaaatgtttaaacatctttaggtgagataattgcattgacaggacacgaacttgacaggtaatgcaatctaaagcatacactgttaaatactccttatggtgacggacttgactaatggttgcgatccaaaccaaataacgtaccatggcttattttaccaggttggatgagattacgaaccgatatcgccatatgagatgggcctgacatattcctatattatatactcggttcttacattaaccttctttttgtatccaccccgcatcaatactcaggtgttatatgtccttctgtgacaacaatcatgccttagtttaacctttatcgacatatattatcacatgcttgttacatcccatctaatagcact

SEQ ID NO: 50815 - DNA, 350 bp, Oryza sativa
  unsure (1)..(350): unsure at all n locations
tccgaagatcaagtggctgcgtncactctcacccaaccaatacatctactatatgttcgtttacgaaaaaacactatgagttctttcgacggagtacgacacgtctctgccctccctgacaatggcagctcggtctcaatacttgccagcatttgggagcaatgcaaatggacgacatacctacgtacttggaaaacgggaggtagtagcattacattattggctttacctggttatggaccctgcatttgctatcaaaatacggcaacggatgcctgcctggcgatggtgcatcgcagctcactggcagctgcacagcagcaagctgtagcagcagcatcaaggggtga

SEQ ID NO: 50816 - DNA, 193 bp, Oryza sativa
aaccacgatgcctcagataggatatctttatatagctgccataattcatccaggatgctgtgtcccaacgagcaaccgtgcaagtgccacagcgatctgcttacttgcttggggttgcaccatcgtgtcctcaagcaaagcaaggagctatcagctatatacacctcgacgcgtaacgccaagaggcccacgc

SEQ ID NO: 50817 - DNA, 342 bp, Oryza sativa
  unsure (1)..(342): unsure at all n locations
cacatanatactcaagctctctactgaagagaggacagatatnctacaatgatttctttctcttttctcagcaagccacaccgagagatgcacgattaatgcaacgtggtacaacgagtaataatataaggctaggttttgcaagaaacagcatttaaaagacacttattcgctgaaaactattttgtaaagacgatcataaagctacacacgattattaatcaaagccgggaacccacacgaacctgccttaacaccaggcctactatgattcagaccgaactggcaaccagacccaagtcccagctcgttccaagccaacccaagctaaccattccatat

SEQ ID NO: 50818 - DNA, 347 bp, Oryza sativa
aagaactaactaccttgactaaacaccagaaaaataagttgccttctcttgccacgtgaacatctggcagatcaagcatatctaagcctcttggtagcaccggaagcaaataaaggtagctaagctaatatgaattcaagctgagctgagctgagctatacgtgtctggagtggttactttagaatcactcgcgtactgcttaattaaccaattcaatcatcaacaacctcattatcgaccgcaatgagatggcctcaaggcagcatgaggtgtaagtactaaccttaacgttagattttcttcgtagtcgtgcctatactgtttggttactttgatgacatgctgc

SEQ ID NO: 50819 - DNA, 184 bp, Oryza sativa
cagcaaccaaataagaatgctgaacacccacagtagagcaaggaacggaagcaaagcatcgaaggcctcgtcaaacagctagacttggagggctttggagacattgcaggaggccatcgatggctaccattgagcgcgaaagggtcttgatgctaagagaagacaacaccacaaccacgccccc

SEQ ID NO: 50820 - DNA, 443 bp, Oryza sativa
  unsure (1)..(443): unsure at all n locations
tagcgtaatcaaattgtagatttgatagatagggttaagggaaaataatatttgaagctctcctttaaagacatgcagcgtacattcttattataaagacagttagttagtactcagtagagaagagagtcctttagcacatgattaattaagtgttaactattattaatttttacatagatttttttttgaatttttcaaaaactcgtatataaaaagttaaccaaaaatcacaccatttaatgactcacaaagcgtgcctccaacaatctagtaaccatactctgganagaacaggccaagcctgtagtggcgtccatttttgtactttntatctagtgggtaactagcaaccatcatttttcgtagaataaataccaagataattaagtagcggnaactaatatatcatgatatagacaataccatgttctttgtacaga

SEQ ID NO: 50821 - DNA, 200 bp, Oryza sativa
gcgttcctctccgcgcgtagccgcgtaggcgcgcgacggccgtacacgcggatgcagcaactcacccggcaccctccgccgatcacccgatcgatccccggcccggagcacctacgtgctcgcaaatgcgcgcgggcactcctccaacttccttcttctaggcccaaaccgcgcgtgcgcgcacagcccgtgcgcgcgcg

SEQ ID NO: 50822 - DNA, 202 bp, Oryza sativa
  unsure (1)..(202): unsure at all n locations
ctatgcgaatatgtctctatacttctcgccacaaaaacagaattttgcaagagggaattggcgattntaaatttgatgaacccggcaaagcgggggagaatcggatgtaactttttttgtagatgtccgtggatatattataagcctaatttcgagtccgtatgaaaaaagatatgactgttttaaggaatgtcactccaat

SEQ ID NO: 50823 - DNA, 419 bp, Oryza sativa
aatgcgtcaccgaccgtcctcatcatgggatggactattgtctcatcctgcagaatgtcgtcaacggattaacaacggattaacactctcgtcctgagatcaactggacgctgctgctggaggagcacccttctcaaagatggtcaaagataccactgatctgattgagaataggctctcatatatgggttggagcgagaaacaacataaacccgtcaatgcggtatgcacaccgtcaatgagactgcaatgcttgccgtccagttggatctccttatgaagagactggacaactatgagaaggacgcgcagcatggtaccattaatgctctgagctctcacatggcatgtgacgtctgcggcaatgacagccacttttggacgaattgtccaaaacctcgtagaatgtcataactcac

SEQ ID NO: 50824 - DNA, 140 bp, Oryza sativa
aaaacgcaagccgaataccatgacgataaaaaagaatcacaatagacagaagacaccttccaaagattacacttagcccacggcaatcacctcaccttgagagcacaaggcccacgaacaacccacaggcagagcgtttc

SEQ ID NO: 50825 - DNA, 509 bp, Oryza sativa
  unsure (1)..(509): unsure at all n locations
ttaaaactcaagctgtaatagtgttatatacaactctnttttagcttactgcatgccttctatctttatttgntttcttgggagtaacatcatatattntgacatcaatgtgaaatatgattgtagatattaacgagtgtgaggattctaatatgtacccttgctatgggaagtgcatcaacaaacttggaggattcgattggttttgccctgcgggtactcgaggagatgcttctgttggaccatgccgaatagagtttccactagcattctgtaaacacatatcctcagaatactgcgagaatttttatagccaatatttgctgtaaagttcacatganatgcatatgggccccttaaaatcatctataaaggaagtagcacaatgtatttngcattctacaaatatttcacaaaattaaataacttgggttttgtaatgccgtctcttcacagcttaaacaagagacaaaatatattcactgatattaaactaatcttagatgatg

SEQ ID NO: 50826 - DNA, 424 bp, Oryza sativa
  unsure (1)..(424): unsure at all n locations
gcagctgtgccaaatagttgttgagcgcgcctatcttttctgaaatcgacattncattggcggtgagaatcaccagcatatcaggacggatatcgcccgcgtgattcatcgcttcaaacgccatgcctgcggtaatcgcgccatcgccaatgacacagacggtgcggcgaattttgccttctttttcggcagcaaccgcaataccaattccggcactgatggaggttgatgaatgcccgacgcttaatacgtcatattcgctttcgccgcgccacgggaacgggtgcagaccgcctttctgacggatggtgccgattctgtcgcggcgtcctggcaataatttatgcggataagcctgatgccccacatcccatatcaattggtcacacggggtgttgtagacatagtgcagcgccactgtcag

SEQ ID NO: 50827 - DNA, 226 bp, Oryza sativa
atgcaagccatacatgtcaatatattacaagtaacatttgttttcttctgcgacacaagtagtggtcacgggggttttgcacaatactaatatcacatcgcgattcgcaatcaaaactaaccgaacagacctttgaaactcttgaacaagatgatcgtggcgaggtgttctacaattgactctatccgcagaataattagctcggaccataaacaattctaccatc

SEQ ID NO: 50828 - DNA, 457 bp, Oryza sativa
  unsure (1)..(457): unsure at all n locations
cttaactgccgtttgtgccacctgttaagcttctgcttctatgtgctgcttctggccatcgntagcctgcattatgacatcatgactaattgcactctgagaaaattacgaaaataatcattntcagaaacaaaaactgtgacaaattatttacgttagggatcagaaattagtgcttacatgaatccagagcatcagaaaaaatatgcaaaatgtcgggttcttcgttcatgccgggatgagctatggtctgttttttccccatgccatgcctggatgagtattggtcagcctcacgggtcgtctgcacatacatgatcttgtcgctagtcatttggaatcttgatattcacatcttcagacaattggctgaaaatatcggaggttcagtcatactttactgacacattggatgatcagtctatatctatcacatggagaatgtagatatggagga

SEQ ID NO: 50829 - DNA, 131 bp, Oryza sativa
tacgagtgactcttgctcactgactttcttttcccgagccctcagaactcgatagaactgtctcacaggcacagcctgtatgatcaattcccagagcctccctgactgacactaaccactaaatctacaac

SEQ ID NO: 50830 - DNA, 319 bp, Oryza sativa
cgaggggctcactgaactaatatccaaactgaccgcactatttcttatctgacatcaccaacagccactcaaaattcaataccctaaatcactttgtctacatctctcataaggatttaaccgatgagtatagctgtaactccaagagattccaaaaatgtaatccccacaacaaaagaagtgggccacatccacaactaccaacagaaaggtcattcctttcctgcactcacgctcgcacacattgcatcatcctcccagctcctctcaagacattcagagatcaatctctctgacatcattactgacaagtgaagca

SEQ ID NO: 50831 - DNA, 153 bp, Oryza sativa
cttctgatgaaagaacatcgcaagaatgagcatatgacatactcaacaagccacacagcaaatatgcaagcgcacatgataacaaaggatggcataatacatctcatttgcataaacagcacttaatattctagagaatatgccaacagctca

SEQ ID NO: 50832 - DNA, 405 bp, Oryza sativa
  unsure (1)..(405): unsure at all n locations
cgattataattatccgcaaatctccatataacacccttaatcttcttatgatcatatactggncatacgagctgcgaatcgacccgttcaagtctcttaatgtttgttataacctaaagaaccctgtgctctctttctatgtattgatattgcttctttatacgcttgtagctttgcttgcgtgcttcacgtagctttcgtcgatctggaggttcccgaagcgtggttcgtggtcgtctccgaacgttccgaaggccgttctctctgagcaaggcaagtcacatcatccttgaacatattgaatcctcacttatacaaatcatcntgatataaactaatgcactatcgctctatttatattcccgcgtcatcactgttgtattcagccatgcctatttaccctct

SEQ ID NO: 50833 - DNA, 341 bp, Oryza sativa
  unsure (1)..(341): unsure at all n locations
tgagagagtgaacatttacancaattactgatatcacctttattatgtangatagagatacatctgtcatgttggagataatgggagcagaacctacaccccacatttgtcatcacagcacatgtgtgcgctagtgcagatttgattaatccaaaacaatgaaatgattgcaccactaagcctactagctaaataatgtggcctcaatgcaagcagccatcacctgttcagaataagactactgatcctttgggctattgatctattaatactttctctcttcttgcattagaatcatgccacgcctagacctcgtatgtaatttggccatttatctggta

SEQ ID NO: 50834 - DNA, 354 bp, Oryza sativa
  unsure (1)..(354): unsure at all n locations
tactcagcttgcttaagtacttggcctttcagattcttcataaggttggttatgtagcttatcagttgcaactccctgccaatagtgcagtccatcctgtattccatgtttcccaactcaagcatgctgatggttntaagcaccaggttcatcctcgattacccaccttgtccacctttcaagtacctgtgtctgtgttggactctcgacaaatcaggaaaggtaacacttctctgactcaagtcttggttcgttggtccgatgatgggtatggtgaagagaccttggaagacctggtggagttgcagcaaaggtttccaatgcattggcttggtgacaagccaaatctcaaga

SEQ ID NO: 50835 - DNA, 278 bp, Oryza sativa
tgtgctctatatcgtccacctacacattgtgtgaaacaacactaagagtacataatatgctttaaatttgaatgaaatcacatgtgcttcatcacttctactcttcttctggtgtatctctcacactaatatctatgatattctcaaactctcatttactgggatcacataatcttactctttgtagcactctcactcaattaagcattggtgctctctttgtcacgtgggttatctcgaatcctatcatgcaatgacccatggccaacaacggcgca

SEQ ID NO: 50836 - DNA, 327 bp, Oryza sativa
gtcttaatcttgtttaccaagacgttgaactgagcctgttatttgtatttgcgatctgcacaaataaatgcacattaatgacctggcatgaaaatgagagtggttcttgaagcttcgactaccagtaccttcgacatctttcagagctgagtccctctgttctgccaattaggccttgtctttctccggagctcggattcgcttctccaactcggatatcttggaagcttgcactgtattgcttttcattggtctgttgcacatagacagctacactggacaagtcagacagagacgatatttaccttctgacgaaccgctcagctc

SEQ ID NO: 50837 - DNA, 183 bp, Oryza sativa
  unsure (1)..(183): unsure at all n locations
gacactatcgatacgtcagctnntcccatttcttgttcatctacattgacacataataatatatgcttcgagtacaaattatttcctgaaggcaagactgctggagaacatcttgagacggtagtcgaatacaaaaatggcgatgatgtccgcgagatagccctatatatcattactcttcca

SEQ ID NO: 50838 - DNA, 449 bp, Oryza sativa
  unsure (1)..(449): unsure at all n locations
tataaaactcagcttgctanattgcaatcaagaaacgttgacttcttgattctcttattacacttgtgcaaagagagcataggtcagcataaatatgagcacaattttgttgatccatcatattcctgtggtntagcctggtattaaacagcaaccaagcaaacacctttatttgcattacacactttgttttccatatccatagtgatggtcttggtggtagcacttcagcaaaacatagtttatcaatctttgggacgagtatgatgcctgattccatatatatgttgccattgaacatgcacatnataacctgagcactacatctaaccttctcactattgaatgcaactcaccgggaggcccagacaatcttgcgcgaagggttcgactccactgatcgagaacaccggttgtctatgcttcgatcctagcgtgtggcgcacatc

SEQ ID NO: 50839 - DNA, 280 bp, Oryza sativa
taatggatgattccaaggggtgaaagacctgatgggtccgcttgaattgggaccacaattaatccgacctcttgattgcctgacaataatatatttgtatggcgaaaagataattgattttgaaataaaacaaagtacctacgattgaatgagaatgaaaatgcaatatggactgacgaacgatggtgaggaccttctcttgcggaggcgattgtgacgcgggataatggcgatactgcctccatgtgggagctctccttcgcggacaagaggagattct

SEQ ID NO: 50840 - DNA, 469 bp, Oryza sativa
  unsure (1)..(469): unsure at all n locations
ccctctatgttntcatctctcatacccatgcacccagcccccatctctgttatgtaagtattcttgtttatattatcttctagtacaaatatcatattctatttatcataatatttcggtgtttatattttctcgtggtacatatatggcatcttcaatttctcacctcctatattttacctgttatggttcgatgacgagattcttcacgagacgttgaagacggattaagatgatgctaacctataacttgacttagtccaacttctagagacataaaacccttggaaaccacttaatggtggcctgcatgagaggcagtacaccggcatgcacgttccatgggtcacctttaccaacggccttgttgaagccactacttaacagggagcagacactcattacgttaattaatcaactacatattgtacactttaatantacaccacattgcgctctatcacatgat

SEQ ID NO: 50841 - DNA, 395 bp, Oryza sativa
  unsure (1)..(395): unsure at all n locations
ctagtgatgcattattgctagantgacatgactnctaacctacaaactatatgccattnttgtgtgtccagntcaacaaggaagttgataaggtgattgacgaaataaagcttaaagttgtttatacagngcctagtggaagttccgacgactctggtattacatctttaggaagcatgagcttcatatcgttgtctgacgatttcactgtgagagtactatgttggaaacttgtatgacgctgaccaaacttatgtgcaaaggactcatgtnttgcactgtactacatgcagatgctgaagaatgcaagcattgaagaggtaatgcaactgatcctataggcatctctcattgtatcanggaactacacctaaatatattacaactaatatctc

SEQ ID NO: 50842 - DNA, 335 bp, Oryza sativa
tgatagttctaagctctagcatatatacctttctaaaggacactcttatcttgataagaataaactctgctgctacaattgttggggttacagctatcttagccatttgatacaatcctacactgaagacacagaatattgagcacatccctatagcgcatatatgcctattcattctgtaaatggagaaatctcatcatcaatctcacctattatgcttcacactgatgttaactatgccagtggaaaaagacatgacagcacccatagcaaataatgatgaaaaaggagttgattttgaacgaggagctatggtcatcaagtataatgccttg

SEQ ID NO: 50843 - DNA, 453 bp, Oryza sativa
  unsure (1)..(453): unsure at all n locations
tactcagctatgatcctgcactttggatacggacctgaaccagcaggtggcttctcatgtaataacgaaagaacaaaaaaagtaatcaaacaagtaatcttaatttaattctagaaatttgagaccagattaagtttcatgtatttaacgatgtttcagtgctatctgtctggctcccttattagcattcgctagagaaaatatacaaatttacagaagaattacttatttaacaggagactgtaatattcccggcaacaccacactcctatacgacatcttcctggttggattntacaagtgagcatatgatgaaaaggaatatgcatgactngaacagactatgtgcaaacaaggtatggtggtggtatctgaacctgctgattttttttcatctgaaacaggatcccttgcctaaagggttgttgtttgtacataagcatgtacattctc

SEQ ID NO: 50844 - DNA, 355 bp, Oryza sativa
ctaagctctatctcctaaaccgatatatgagcacgcactatatattgctatatgccacctgcatacatattttatggagataaatgatatgagagaataacaacatgctacacatttatatgtatctggtacacggacttcaagacacattgtgtgtatgacagattataccaggtattaataatgtattatagaatctatggataaataagctattatattatctataaataaattaacgtagtagctggctatactattaaaacaacgtcctaccgtgctgtgcctatatcagctatagccgttaacctctcaagtgaataccacacacccgcattcgtgatactatccgtac

SEQ ID NO: 50845 - DNA, 334 bp, Oryza sativa
cgcattatatgtgaggtacctggctctctttctgcacattatgatagctcttatgaaccgcgcgtatctcaaccgattcgattatattcttaccaaggtaaacgaagcctcatatctcaccattttacagtaatcaacagtattctttatttactttcttgccggctttgtgggtgtcaaggttgcgacgcgtcggtgctgctgacgttccccaacaacacggcggagcgcgacgcggcgccgaacaacctcagcctccgtggcttccaagtgatcgacgctcgcaatgccgccgtcgagcatagctgcgcgcgcacggtgttctgcgccgaca

SEQ ID NO: 50846 - DNA, 344 bp, Oryza sativa
  unsure (1)..(344): unsure at all n locations
tgttgaacaatctcttanagtagtgtatacaatgcactctttattctcacattttctcttganaacactatgcgtttgataatattatggacagctttacgtccacgaaacactctgctttgatatgatatattgcttaaataatccattatgcatgctgtgtataaatcatgaacacaaacttatgctttttgtcttcaaatgttgctattatgatcccacacttggttttggtgtaggtgtggcacatggaaaagggaatatgcttgtattcgctgtaggaaatccagttactcgttaaagaatcatcaggtatcaactaaccaggcaattatattgtattt

SEQ ID NO: 50847 - DNA, 384 bp, Oryza sativa
  unsure (1)..(384): unsure at all n locations
ctctatttgagtatgaatataataatcagaatcaatntagtacatgcacgctgtatccaattcagtttaaaactgtacaggtctttacattatagagttagtttttgtttcactcttgccaatccagtttaaatacacttctttnttatgtttatcacatcgactggtgactgatatgattctagtatgtaaaacggtgttcctttttcctatntgtctaatgcaacaatgttgagattgcttttgtctcttcccagtcatttgtaaagcatatgcagtcattcccaatcaatcttggtgctagttgtgtggccatatcctatcaaagttgatcaacggactcttctgctgttatttgatgttgagagcttcaccgaaggacct

SEQ ID NO: 50848 - DNA, 191 bp, Oryza sativa
tcagctatgaaagtcaaataatgcccgtttctgcttgtcatttttcctgctgtgagaaattcagagggtgatgctgcatatatggcgagccacctgacagatgccactgttgacaacttgattgagtctatcattatttaagaatgggtgaaagcccaggttgtctttaacattatggcttttgcttactc

SEQ ID NO: 50849 - DNA, 487 bp, Oryza sativa
gtactcatggccctgagattccttctatatcaccagttatgtccgtttgaaggtgatgctcttatgaggctcgaatctgaatccagaacgtgtatacctttatctcttgtcttttatggaccaaaagtaacgttgtgaggttggagtggacatggagtaagtctttggttgggccccaagccaatattttggtcatccatgtattatatatactcggtctcttttccttcaaccaaactattatttctgcaaacgagaaacatgacacttattatgtagcaacatttgttcaatatataatagagaattcttataacatatgcactatgattgaagatacataatgttatcatgatcatatacgagcaagtttatcctcatttacagatctaatctatatgcaactggaatatgatattacctcttatcgagagctgaaccatataatatgatgtcatcatctattacttcgatatatcatctataa

SEQ ID NO: 50850 - DNA, 452 bp, Oryza sativa
  unsure (1)..(452): unsure at all n locations
gctgaataatgtgcatgagcaactaacttcgtggctctacttcaggctgattaaggaggaaattagcatacttcggaaagagaggaaaatggctgcatgctgagaggatactgggccgagagtgataggacttttcctaatttggccccaaaaggaaaatgtgaactttaattacttttccaattaaacttatcactgtaatgatctttgaattgttaacaatacttccaatgctcaaataattctaagaaaaatcttgaaaatacttggacactcaaagtacttatcgaacatataatcaaaccagtttatgattaatctaatatttaaacaattgctgaactgctctctgtatgattaaaattaacaatntgagctccgatatatccgagacaatttcagagagtataataaccatggagaattaataaaattaattcatcatgcttata

SEQ ID NO: 50851 - DNA, 413 bp, Oryza sativa
  unsure (1)..(413): unsure at all n locations
aagctataagctttatgcaattaagtncatactagnggncatacttttatatttcatcacctgtaatctacttcaatattatgaaagtgcaaagtaatatgacttctaagatgaaaaatacaccctatgtaaagtgggagcacatgattgaaaaaagggttagttttataggtatcgtgattgcacattactccctccggttccataattactgacgttttggataatggtgaggtcatacttttgtaactttgataatgaataactntaatagtattgatgttaaggaactatacaacatatataatttgtcttaaagtacttgacacaccaccccgcacccccacatgttttttatgtgtaaataagttaaaagatatttgagaggggattgtggaaagtaaaatattgag

SEQ ID NO: 50852 - DNA, 373 bp, Oryza sativa
  unsure (1)..(373): unsure at all n locations
tctagggctggtctgggaatgtgtcctctacagcatgaatgtacctgagcacatcatatgcttttatctctggctcaagcagtgtagtggcttgcccgacattcanaagaaacaatcaactgaacaccattagaatgtaagaataagataaagtgatttacaccagtcaatcttttaactaagaataatggtcaaacaaggccccaatcaacaagatacgaagcataagtacgtaccaaaagaaaaaaaaatgataacctcattcagttagaaaataatgaaaataaacaagaatatgcatcgtaacttgctgcaagcggcaagccactacagccacctcctattgatgaagaaagggattggctcacctcct

SEQ ID NO: 50853 - DNA, 427 bp, Oryza sativa
  unsure (1)..(427): unsure at all n locations
tgccgtatgctgagttntcttacaacaacagttaccaatctattctacatatggcaccgtttgtagcactgtatggacagaggtgtcatactccgctcttctgggatcagacaggggaacgccagttgtttggtatagaagtcttaaatgaggcataagagaatgtctgagctgttatggaaagattgagaatctcgcaatctctgcagataagctatgcagacaaccgccgaatggagctcgttnttcaagtatgggattatgtgtatctccgtgtcactccgctcatgtgagtacacctgctttcagaccaaaggatagttggcactccgctttgtgggaccatatctgattttggaacgcatgggtgaagttgttaccagcttgaacttccctccaacatgcttatcattcataatgtgatcac

SEQ ID NO: 50854 - DNA, 358 bp, Oryza sativa
ctggagaagaagtcttaggtggagtcctggcttataccccagttgttcgcctgtgaagatggagccgtatgcccgctagtccgctgctgtttattattattgtcaggcctgaagcgcctttgtaataatgtaaatattatcgatataataaagatgtgtcttttatatcatagttgtgtggtgtaccccggcttttcctgggacggtgattaatacactagcgttcgggaaaaggcaattttctcggtcgcgacacgctgtcgttcctggtgactaatgtgcgcattcaatggtaaattatgcggattgaagagaaggaaagggtcattcccctatcaatttgaagaatggattgatt

SEQ ID NO: 50855 - DNA, 464 bp, Oryza sativa
ctccgctggccaactagagacggacccaacatatgtttgtgatcggcattccctttaatctgacaaatctagttgcaatcgacagagagcaagataattttcgcgctagttaagctcatatagcacaattcctacagtgatgagccaaaattatctaccatcaccacccatattaacttgatatatatgcttaaagaacaaataattaaatctgcacatatataaagtaaaaatgatgttgcattatgatacagacacaacacacgtcacacattgctagctagctatggtgaattgtccatgcaccttatgagctagcccggcagttaatacatggcatatcttggctctgatatatgtctaatgccacttggccatgcgcaatgggaatattgtagggcagtaatcgctggggtcaaggtcatatcatcgacacctgcgtgactactgaatgacataattat

SEQ ID NO: 50856 - DNA, 278 bp, Oryza sativa
  unsure (1)..(278): unsure at all n locations
gcccatctaanaagcccatccgaattcttgaaacataaacacaggatatcgagccatcatcttctaaaacaacttttcccgaacttatgcaacaaatcgaatcctgtctatatatcttatataatcggaactaagagctgaacatgcatagaattacatcacactcacaaaataggagtcattgcagcatttcatagttcatccaaccatacaatgtatagtaagtatttgcgtcactatttctcattactgactagataactcgatattcattatac

SEQ ID NO: 50857 - DNA, 432 bp, Oryza sativa
  unsure (1)..(432): unsure at all n locations
cacggattaggcatgcctnctatcctacgactcatcgaatatacatataccgtataccttcgcgcattcgggtcggtcacgtatacattaagaaaggttatctctaattatggaaaatattctccacgagtcaagtgatttccaaagttctacttggagaggataagggttatggtatatcgtaccatatgcgaagtctcgaggtttgacttatagattaagatgattcacgctataaaatgaacacctaagcgtgggtggaagagatcgaccaataccgtctacacactcatcatagattacgataccggagcactcggagccatatggccgtgagattctcgtgatccccatctaataacaatctcgtccgaatcggcagtctctgctacttctctggaatatgtgggatatcatgtaatcccatactaa

SEQ ID NO: 50858 - DNA, 346 bp, Oryza sativa
  unsure (1)..(346): unsure at all n locations
taaagagttagcggtggattactntgtacgaagatattatttgctggatatattcagaatatggatccactaaatgcgatctgatcagctagtggattcttcgcttatattttattggaaactatatttatacgttggattgaagttcatatgtaaatttgtttcattaatacaatagtttatttctatgctcaattttgtcaatcaggctacaccacttactatattctagacggtctaanctgggtctacatgtgaactcacccatatgctatatgctaaatgagtggattaccggcttatagcatgatcactataccgcccgttgctggctataataattgca

SEQ ID NO: 50859 - DNA, 503 bp, Oryza sativa
tcgagccaattggacgagccattgcacacgaacgcactgtacatgaacaagatctactgctgtagccgggtttgctggcactgtgctgcaaacagccaaacactgaaacactgaagttttgctggcaaaggcatactggcatcccgtctcaaaccctcccatgtgctaccagcgggtcctgcagctcttccaaagatttcaaccgatgaaactgatgtatatgaattaaattcatgcatgtaaaacgagacaattattaatatttaattaatataaacttgatagatgaatatttgatatattaaagtaattcttatataataaagtttcacatgtaatacactggctagctaattataaatcgtgtcactgaacacatacgtgaaatctgtatgttaatcatatagcgtcatcaaaagctcaacaccaccaccagcggtaaaatctgcatgttaacagatagcgtcatcaaaagctcaacaccatcaccagcggatactatc

SEQ ID NO: 50860 - DNA, 475 bp, Oryza sativa
  unsure (1)..(475): unsure at all n locations
ctcagctcgcatgatctctcgccctttccttcaaggaggcattcaccgtaattccgtcagttcgacggtacaggagatgcgagggaacatctagcctactttgaggcagctagtggtgacaccgccagtaacccgtcactgctattacatcaattctcaagatctcttaccggcccggctatccattggtatagtcagttgcctattgagtccataagcaattgggctggcatgaaagatgtttcaaaaaacatttatcgcatgaaaaaagatatcttatagtagaactcgcacacgtcatacagcgccgggatgagaacatcgatgactatattgtccgctctcgtaatagttatgtgtgactctctacagagatgcatatagaggatgcgatcganatgtgcgtccatgtgatgctacagcatctgtcactgtagtgtcatgtcgtgagccgatgacacttattgctctcagc

SEQ ID NO: 50861 - DNA, 434 bp, Oryza sativa
  unsure (1)..(434): unsure at all n locations
ctcagctcaggattcgcatgntggaccggataagaagaaaatattataatgcaagtgagtacgaatccatatatgactacaatgaacaagcagctacagagaattcgatccaccacaaatagcaggcaggacattcgatcggattctattgataggatgacaactgcagcgggatacattcatgaataatgttctcagggtctttgacagaaatctcgaacaaactaagtcaagtgctaggatggctaggcataagccgaccgcagtagaaagacaggagggagaggaacatacaggacaagcactctgcgcgatcatcagcatcaatgcccgtagcaccatcggcggtgtacaccagcttagcatgcttggtgagcacatgcactgacagggtgtacgcgtggccccctctccagagtgctcgccgagctcat

SEQ ID NO: 50862 - DNA, 324 bp, Oryza sativa
tcaagctgttatggacactgaagctatttgccatgggaagttagaatcggttctataaagatagaattgcaagacgatttgacggccgatgagtattataaccttatggctgatgaaagggatgactctggtcaatcgcatttacgagcccttgctaaggttaccaaagataatgaacgagttgctaggcattataacaagaaagtggtgcccaaaactttttcgaaaggtgaacttgtatggaagttgattttgccgattggaactcgggattacaagttctgcaagtggtcaccatatcgagaaggaccatttcaaatctat

SEQ ID NO: 50863 - DNA, 401 bp, Oryza sativa
  unsure (1)..(401): unsure at all n locations
gctgggcaccnatagatgcgagactcataagacactcgcagagtcctctacctggcgctcttgaagacggagcgtagggctcctcaactggagaccgttcttgcccccctttgccgattctgccggggaccctgagtgagactctataccctccatctgcatgtggaatggtcgcgagacaagatgcacataaaacacccgcgatgtatacaggatcaggccgctgagaagcgtataccctacttctgtgttggggagatctcggctgaaagatcttcagagatgagccttccctccctgttctgggtcctatctggaaggtccgccaagataagctctctcctctcagtggcaggtcttctctatttttaagggatcccatgcaccatcacccttttggg

SEQ ID NO: 50864 - DNA, 338 bp, Oryza sativa
  unsure (1)..(338): unsure at all n locations
gcttattttagtntgaatatanattaccanaatcttgtgtgaactatgcgttcttgntagtgaaaagaanatagttgcttgtagttaaacgttgcgggttctttgtgctctgaccgttagaattataactaagtcaagagttatgtttccctggttatcgaaaaaatgtctcggtttgcagcctactgatattatgaaaaccgcggtttgcttgtttcgaacgatttattggttctccgacgatgctttattggaaattcataagtttataatttgtacttatagttggattccttcattatgtaacatccttcttgcattgatgctgtacatatcct

SEQ ID NO: 50865 - DNA, 426 bp, Oryza sativa
  unsure (1)..(426): unsure at all n locations
gacttgtcnatatcgcacgggatgaaatgcttgacgagcactgcgacactgatccagtgtggtttccacagacgtttaatgataggtagtggccacacttcctgtaatttatttcaactctacattcgggttttatgcaatctaatggaaactcttcataatgatcaatcattcaagttaagatcgatctacaccaatccattgtttctatttacatacgacatgccaacggttagacaacttattagagacgcaagacagtcagtacgaaatgctatagaatcgggcgcctcaatggatgctcttatcgtctaggaacatgtgctacggtgtatgtgcgactcggtcggatcatgtggtcagaacaataagacaattctgaagtatacatgatgcggaccaactgatatgatagagcctctctat

SEQ ID NO: 50866 - DNA, 296 bp, Oryza sativa
  unsure (1)..(296): unsure at all n locations
gcttgagtagttcaagctatctcattaagctcacgagctanacggagctcggatctacttcttaagactatgagttcgtactgatgcaagtcacaagcttcgagtgtgtttattcacctctattcgaatgaatggtggtgcacacctggtcggatttctagcttaatatatatagagaggttttatggtgttcgcattcacaaaaaggtcaaggatcaacgctccttgatcacaagatccatgttaaagatatctaacgttttgattaagtactcatgtactaacgatacaaacat

SEQ ID NO: 50867 - DNA, 440 bp, Oryza sativa
tactcaagcttgctggcccttcgtggctaatctctctgcttacatgcgtccatcattctctgtatcaagctcttagattggatactgcattcctatttcctccattttgatattccttataattctcatgtgtattcgagaactaatgcttggttcattttatttatggccccgcttgattatttcaaacaagaaatatactcttgtgttcttatggggatctataatacaataatgcactactacctccgtcccattaaaaatgaatctctatggaattaatgacatattataatgatagacatatgactacaatatcccttttaatgaacacaagtcatgtacacattgcatatattaacttgatttacatgtatgtcataacaatgcgttagaggatatggatggaagaagattacatagaaatgtaatcatttact

SEQ ID NO: 50868 - DNA, 489 bp, Oryza sativa
  unsure (1)..(489): unsure at all n locations
tctcttactgaagatgggatagatngagcaagaatgagttcaacctctgtactcatcangccacaccggagatgcataattaatgcaagggagtacaaagtgataataatatatgggttaagtgttgcaagaaacagcatttaaaagtcacttagttgcccatagccattttataaagacgatcctagagctacacagtattattaatcaatgccgtgaacccacacgatacctgcttaacccaatgcctacgatgattcataccgaactggcaacccgaccctgggtcccaactcgttccatgccaacccatgccaaccattccacattatagttgtttagcatgttttatgaattaatacactaacttgtgtacatttgtctgcttgccataaccgaggcgcggtattcaatatatatctctgatcaaggtgacatcttacctcagacacatttctacggtaccactgccaatccacaccgttacaa

SEQ ID NO: 50869 - DNA, 422 bp, Oryza sativa
  unsure (1)..(422): unsure at all n locations
ctcagctaatggggttgtgtgctgcctcatatgtgtatagctcctctatcttttgtggcatattgcttctttgtacatatatgtatgtaaaaactaccatactgaattgtagggagacgagaccatatacctgatgactctagaggtatgcatctgagaccccatatgaggaattcccctgaaagagatgccatggatcanttgttccgtgatcacagaccgcgctctcgagatagaggtaatatgctaccaataaaatgcttcgttggaactagtctattctatttataaacttctatataatctctgaacctttgatgttgaaatcttcgtgcaggttctagcttcaagatctccatcaggagaggtatgggctcggttacatcatcttggatcgagtctacatgcgtatgccgtttaac

SEQ ID NO: 50870 - DNA, 442 bp, Oryza sativa
  unsure (1)..(442): unsure at all n locations
tcttatcgaagcgacaatggcgagaggctctctctcatatagagtatttagtggaagaaaggtgaagcactcacacttgatatggcggagagagaggcttgtccacgttttatagtactagccaaaatgcctctgctctttccttttctttntctgttcatatttgtgtggctattaagtcacagctcaccttgatctcgtcggatgtgcatttttctttaactcttctgggggaaacaagttgactatttggagtagtggagttacgtatgctttggcacacctgcttatatacgtgtgggtgtgttagttgcctgcacagctatgcgaaactagtcctcagcgttctgatttgttggcatttgtaccaaggaacataaactcatactgtactcctgactatgtaccagtgctgtacggggtgtcattttatgttctacaa

SEQ ID NO: 50871 - DNA, 331 bp, Oryza sativa
cgaagctgatatgtgattctgtctatgatgaagtatgctacctactttgtacattttctcctatcggttgttatgtggttttctgatacacctttggacttgtcagcaggtgtcaaacgtattaatgcgtgatcttccaacgtgtaaggcatttgacaacctgaaaaagttgaagcttggtgagtggcttctgagaaatggatgctatgcgatactcttcttgcttcggtactcacctcacatataataacttcgtctgcaacttaccaatgcaagatataacacctctcccctctcacattgctgtttctggtcacggcttgaatttaat

SEQ ID NO: 50872 - DNA, 408 bp, Oryza sativa
tgaatcatggtgtcttatcagttccggtttggttgaactaaatctgtgacatgtgatactcttggagcattggtctcacttctgctcaccttgaatttgctgtactctttgtcctcgtaatgaaacctgataacgtatatgacatgttggttagctgatattccagctgcacttgtttcatgttttgttagcaatatgtctccggcatatgaccattgctgggttggagctggctctttcttgatggctaatgtctttggagttggatttacacacctccagaaaacttcaataacctttgaggaataggtttttactacattttgctggtaagtcttgcttgtatattctttgaatgtttcaacggagcacatatggttaataaattacattataattaccagctac

SEQ ID NO: 50873 - DNA, 454 bp, Oryza sativa
tactcagctggtgctattcgatccaatatatcggttgcaagtggatttataatcacatccgctgatgccaaacgctgtggtagacactcttgtgtcatggtcatacaagatacaaaactccgtatccctctctaccgtcgatgctgaatatggttcagcatgtaattattgtgctccattgcgtttgatgaaacaaaccgagctggactatggcatatccttcacgagtacaccacatccttatgtgacatatgatatacgccgtaagagatagccagtaacccgagtctactatctttaaccaaagttattgacatttaccatcacttcctaagataccagtgtgtcaagtgtacattgtcattgtccatatatccgagataacttgcgacattctaccagcctttgataaaccgttttgaatgagatgagcaatggtgtctgttatggggga

SEQ ID NO: 50874 - DNA, 470 bp, Oryza sativa
cttccgactaatgtccgaccggcggcatgttacccacagatcccttcatctatgtcgaggaagaggtgtctgccgtcgtcggacgagacagcatttatgagtaccccattcgttgccttcttgtatagatcgttgccgatcatacaatagactcttgatttatgggatatattctcggcttctgcgtcatcctctggcagctctttgctgcatatgaatttaatgagtggggtgcgccagtcgtctgtggtatcgatatcagctacggcgccctctgcctctgtagcccacgagctgatgttgggggcgtccgggctatcttctccggttgccttttaactgatggctctgtatgacgtccaaaaggtgccagtcaagtggtctcgctggcgcacatctgctaatatcccgttattgtcgcttgcggatcatgtcgacccgaccctcaaccttttttagctactgactct

SEQ ID NO: 50875 - DNA, 415 bp, Oryza sativa
  unsure (1)..(415): unsure at all n locations
ctcagcttcatatcaatatctntgcatcttgcacaaagttcattggcttgggcaatnntggagcatgatgccttgctagggagagagacactattctttaaggtttcaaacttctcttcaagagagaggtaagctttatccaagccatccactctctcttgaagttgagcgtttgccacctcaagattagcatgagactctntggtttgcttgtaaagccgtaccaaagcctcatttttctctctccttagcaagttcgcacttgagttcatgagatcgctctntctcatgaatgagcaattcctcttgcctctcaagtgttgcatattgatcctcaattctcccaagcaactcactcaagtgtggtatggattctgtcacgcncggaattcactagtaatttccgaacttattt

SEQ ID NO: 50876 - DNA, 305 bp, Oryza sativa
gaaactcagcttatctccacagtatgccacctatgagatgctgataacggtgcacttattactatcatcctatatcgattgagcattagataaatcatactcatcaaattgttctctcactgctaactcccaattagcttaagcggcggaatcatacttaccatgaaaaccatgcaatttatattctaccgctgcatgaacactatctagctcctcatatgtgatgcgtgaacaagtctctatatctcgctgatggtgaagattttgacgtatgatcatgatcatctaatattccagtgcgcaat

SEQ ID NO: 50877 - DNA, 469 bp, Oryza sativa
tgataccatcttatattctatcgattactggaaaagagagacgttactgaatgtgatctcctctctttaatttgttgttcgtttctttcctactataaattaataaatacatggaatatatctgtttgtttcaaaaacttatattctaatacgatttacgaatattatattatgtatttattatctcttgtttttatcatatcaaatttatatctggatgaaactcatcgaaattttatacggcttcttactttgagcatcgctcaaacctcaaaattccacggaaccttaccgagtcttatctgaattctgaaccctgaactcacatctctttaacattgacttactgcactcaattaccttcattacatctatagtgctaatacggaagtatagctcttacaaaagataacttttaattcacagtaacaccgtgtaaatgattcagtgaattacctaaactgataac

SEQ ID NO: 50878 - DNA, 476 bp, Oryza sativa
  unsure (1)..(476): unsure at all n locations
taaagctagtaatggctggtcggacaatagttgtacagaactccttgagtattaaaggatctgttgccaaacgggaacaatttacctcatactacatatgaagcgaagcatgtattatgtccgtcgggcctgtaggtcagaagaattcatgcatgtccgaacgactgcantttgtattacaaggaatacactgactttgatgtctgccctatctgtggtgcatcaagatacaaacgagcaaagagtgaatgtgaaggaagtaattcctagaggggaggcccatcaaatgtggtgtggtatttcccaattgcggagcgcatgaagagaatgttgcgaacaatgacatactaaacttgtgcgctggcatgccgaagaacngaaagtcgatactatgctgatgcactcatcagattcattccagtggaagacaatcgatatgatataccatgaattctcaatgacccaagatacatgcg

SEQ ID NO: 50879 - DNA, 171 bp, Oryza sativa
tgcactacgagagtactcaacacaaagggacatgatccacgcatgctaattgtcgatatgtacaagccatagtcaaaatacttatacaatcaaaaataaaactagtttgatcgagactacaagtcgaaacgtctgtacgttactactctgactatcacgtatatcaatgtg

SEQ ID NO: 50880 - DNA, 336 bp, Oryza sativa
acagctcctcaactgaatatagtataatctcaataggcaacgcctgacaagtctaatacattaatgcgcttagattctgagaatatgaatgataaccatgaatataatgccatggtggtgtctaatgctatgaaggtgtgaatcctgtatggatctatgcttgatctaatatcattgtatcatcgaagcaccgagacacgactagagtcttatcccacttgtgccactccatgagtgtcatcatgaatagtacagaaacgtttctgtcttcaattgtgaaaatggctaaatcacgcacaatgtcatacattccgatacactgaactctatcaaaac

SEQ ID NO: 50881 - DNA, 387 bp, Oryza sativa
gttatgagtgacattggacggatcagtggataacacagtcccaatatccttgtaagatgaccttacgactggagagaactaccttgtttccgaatgctatctattaactatccctagtatggtagatggcctcgatgatcttatgcaatacaccgtatggagagaggtgcgatcgatgcggtctcttcacatgacaaacactcccgagcgtatgctgatatgtcaggaagtggtatcacagctgtagctagaccgttcctctattggatcaaaataccggagctaaacattctatcggcgtgaggctgctgtgctgttcattcaatcatttcacttataattggagtgaacatgcatcattgagatctggatcgtcacaaactttat

SEQ ID NO: 50882 - DNA, 265 bp, Oryza sativa
  unsure (1)..(265): unsure at all n locations
ggaagtcatccattttcagcatcacaccgttccgtttgatgcgatgctaggaactatgatcctctgcatncctctacagaatttgaagataatataattacactctactctcaagtctcaagactcgttactaaatatattgcacccgacgtatatggatcatgcgtaaactgtgtttgttgttatataacatactatcgtgataatataccatatgttacctttggcatcacaagtcttccaattataccaacgtcactatttg

SEQ ID NO: 50883 - DNA, 463 bp, Oryza sativa
tacaaccgaccgttcagtcccatcaacatcggctggtctcaatgaccatatgcattcagtgctaagtactatcattggatccttcaactgattctacaccaaaccatcatttatccgctatcggctgacacacactattggcccacttgagattatcatgatccaggcccgggtctcctattcttcaactaccgatcgttcaatctatcagctaatagctgctacttgacatctcttgtcagttgcagaaataaactgactggcatgcctcgacctcattgcacatcccgattttcgtttatgattaaaacgtattaatagatattatacaaattaattaaaggtcattaattaaagtgagtaaatggacaataaattcctaatataaagatggtggattagtctattaatcttcaggaatatactcttgatttctcaaattcgaactaaattagttgaaata

SEQ ID NO: 50884 - DNA, 498 bp, Oryza sativa
ggatctctaagcgactgcagcatgcaatcttgccatatgaagatttaaagatataacctctattattaaatattcgttatctctgcgaaaaaaaatacaagtaatctatccgcgcactgcgacctcaaagcacaagttttgcttcttgcctgttctcgcttttacaaattaaactgagatctaaataaacacccagagatttggaacatggaaaatatactcatgtatgatggagtttatttgatggctacgagagtgggagaatgccatggttccttgcaagacatattttcccttttgaaacaaaatatatctatattatatagcgcaagatatttattcagcgagttgacagaaattcacattgctgcgaaggcttccaaatggactaattttgcaccttattaggcatttgttatatataaaactctttaacattttttctgtgtgcttggaggactattaattctgacttcacatgcaatatgctgtatgtat

SEQ ID NO: 50885 - DNA, 110 bp, Oryza sativa
agtaggacctggcgtcttgctatatatctgccatgtgaaacagcgctatgagtttactattgtcacgttaaacatatctgtgaaatcccagggatgctgtactaaaaata

SEQ ID NO: 50886 - DNA, 451 bp, Oryza sativa
agcttatgtttcgctcatggtcctcgatattgatttttctctgaaagcgaaagtacgcttgaaggtcatcatgctgttgctgcatcatgtatgtgatgttggcgaactgggcatcaacagattgtgccattctagtgtctgagctatgtgttccgcgaggttgtactggatctcccctgtttgcatatcaagggtgtctattctcctagtgatttcacccaagtcccaacgagaggaacttgagcgccattcacttggagatggaggcacatctcttgatctggaaggttgattgtcctcccattggatgtcatgaggcgcatgccaccggtcctcactatcgcttgtctatgtcgagactccggtgctatggcgtgtagcttgtgtccacccgggagcattcccagttggtgcccaacctgcctcatacatctgcacgggtgttgaggat

SEQ ID NO: 50887 - DNA, 224 bp, Oryza sativa
  unsure (1)..(224): unsure at all n locations
acctataaaactcngcctcttcattgagcactgcccggcacagtacaggatttattgctctaaacttcggaagcacgcgtgcctgaagaatcaaaatctcagtgcgacttaacacttgcaagtcgcttgcacacttctatctcaaaaagaagtcatntagctcaacatccgatgatgtattatgtgaaaatgtctctacaaaattagtgcaacactgccataga

SEQ ID NO: 50888 - DNA, 474 bp, Oryza sativa
  unsure (1)..(474): unsure at all n locations
agcttatcatgtgactgcntntctttctatatatgttttctaatgcannctccggctatgtgtgttcatgtgtagtcaatccagtttatgtgtgtaatgtcgcacggctgaagaggtgtggcaagatctgcaggctaaggtggctgaattacctgaggccccacataaagcatggggacttcaccccacaggaggacagcatcatctgcagcctctacattagcatagggagcaggtacataaatacaccactaaccactctcccttctcactaactatgaatcaatcatcataatcacactaaacttgacataattaaccacatgtggtcaatcatagcagcacagctgccagggaggacggacaacgatgtcaagaactactgtaacacaaagctgaagaagagactccttggccggcgcaaggaccgcggctggtgcaccaccaccgnagtcagagcaccgccgacgatct

SEQ ID NO: 50889 - DNA, 242 bp, Oryza sativa
tgagctgtatatctggattgcacactggctgcagcttagcaatgatcaaaatataggatgagtatctcccctgtcgaaatcttgggtgaacatcaagctctcttctaccggaatctccattaatatatggaggtctttgcgtctttattacaagcactcgagcaagagctgatacttaagaggagccaagatgagcttgaaggaaatggcgcgagacgtgtgccctaatccacatccgctgt

SEQ ID NO: 50890 - DNA, 368 bp, Oryza sativa
agcttggtcttgaagacccacttgcctgtgatgattttagcaccgggaggccggtgaaccatagtccacgtcctgttcgcgagcatggcgttcaactcatcctgcatcgccgcgcgccagttgggatccctgagcgccacgcgaacagacgaaggtgtctgcgacagggtcgacgtggcactcatggcgtaccgcgggttgggtttgctgatcccagcccgcgcacgcgttgtcatggcgtgtcgaagtggagaggcggacgctggctactacttctctggtgatggaggcggcgcgacgtcgtgggccggagcatcactgctgggcgtggactacgcgggcgacggaggcgatgcggcgtcttgagc

SEQ ID NO: 50891 - DNA, 492 bp, Oryza sativa
  unsure (1)..(492): unsure at all n locations
tcttacttanagccattgagccattatataccttattctattatggatcttctacggtgttatttctttcattcttgctcgagccggatgatgaaaaattctcatgtccggttcctttgggggctggatcttaaagaattcacctatcccaataacaaagaaacctgacttatacgatcctgtattaagagcaaaattagctaaagggatgggacataattattacggggaacccgcgtggcccaacgatcttttatatatttttccagtagtaattctatgtactattgcatgtaatgtaagtttagcgggtctcgagccgtcaatgattggtgaaccggcggatccgtttgcaactcctctggaaatattacccgagtggtacttctttcccgtgttcanatactccgtacagtacctaataagttattgtgccgtctcttaatggtttctgtgccgacgggcttattgacagtaccttttctagagaat

SEQ ID NO: 50892 - DNA, 432 bp, Oryza sativa
  unsure (1)..(432): unsure at all n locations
ntatcagattctantttccgaagttgcacctacaactattcattgaatagaatcctactcttatggggaaaagctcaatatccaagtgggcttacaaaattgatcatgatcaattgctttgtggattgtctcgcgtctcttgattagttggtatatatcccccccaatattgcaaggttcttacgtccaaacaaagtatttacttgttactaataaacaatcaaaaaagttagcctacgttcttccttagaatccttcttttactccgatagtaatgcagatcgcaatcgatgcaaagaaaatgaatgcatttcatactatataaaaagtaagtgaataaatagagaattgatcatgtacatgactattccattctactctatggatttacggagctctcatggatacatggtgacgatatcatagaaatat

SEQ ID NO: 50893 - DNA, 467 bp, Oryza sativa
  unsure (1)..(467): unsure at all n locations
agctngcanagactattcaaagttttcttaaatgagaaaaatatattctggccttctggggttcatgagatcgaacggtaggcacggcacatgtgtgtatcatcatgcgaagatgatttgattatttgattgttaatcacgcttaccaagtgttcctgccattcagattctgttggaaaaagcagaactacttctcacaactttctgttctgaacatcagaacatggacaactcatgctagagaacatttgatggagttgcangggctggagctttcagttgaacttgtctctataaaatggcagttgaatggggctgaaatattgcaactgaaacagatgattttgctgtgaagggtaaggaatntaggaaactgaatttcatcttgtcagtgacagtttaaggagttcagtttgctccaacatcttacgctttggagcctcaaccgatagtggctgcaaatatgt

SEQ ID NO: 50894 - DNA, 353 bp, Oryza sativa
  unsure (1)..(353): unsure at all n locations
tcacaagtgtgcagcgcgatctatgccactttntcctcatgaggggggncatgtcaaacgagatttcttcgacccagagggtgccctagcggcaagtgactaattcaaggatcttccggagtggaacactgctangccataatgtaactatatgacgttatttgaagtgacaatggaaaacaatattgtaatatatatattttggcaacacttctgatttatgccatataagtagaattctcagtaccaaatgcttgatactccttcaatatatgtaccggaataatttctattaataatctaaagtaattaccgcccattataataaatctcatatttctaccatcttcgca

SEQ ID NO: 50895 - DNA, 489 bp, Oryza sativa
  unsure (1)..(489): unsure at all n locations
agctcgcatgtgctgccaacttaattaatttataagagaatagataagagcagntctatttttctcaaaatattttgaaggctacttacggtttaccatttggcttatcctaacgacaaggtggctctgataccaacttgtcacgcccggaatttctatccaaaattcccaacgcttacatgtgtgttgaaccctcgtccaggaatcaaccgaggcacaccattactaattgataatagagtacaaaaacatgtctattttatattctcaantaagtaattactacagacgtagatagttcctctcaaagaataacattctacgcagcggacaaatagaactatgacatactacggaacagctattgcgactccactccacaggcatcttaaccagaacatgctcaatgcctcagatcatcacccttcgatgaaatactcctactttgatgaatgactattgcaagaatgagcatatgacatacttaac

SEQ ID NO: 50896 - DNA, 213 bp, Oryza sativa
  unsure (1)..(213): unsure at all n locations
gggatcggagagatcggactccaaccgagaggaatcgagccgggtataactatggttagtntggagagataaactcgaanacgagtttgattcatataaaatacaacgtacttagctccgattattgagggaaaagatagaggacaacaactggataaaaacccctcaaccaatcggactcggggaccagatggtgtggattccaaaggggac

SEQ ID NO: 50897 - DNA, 210 bp, Oryza sativa
acgcagactcaactttattactacatcctatagcattctttcttacccacttaccacagggacggcgaatgtaagccctacttcctctataggcatataccggctgactccagcacactacagaagatgtgatcacaaaggagaacacctatagataaccgacccttcgcagcatgacaaaaccgggcataccagaagccgagagacatt

SEQ ID NO: 50898 - DNA, 463 bp, Oryza sativa
  unsure (1)..(463): unsure at all n locations
agctntgcacatgaaaagttgcaatgtttcgttattattatgtaatcattatttgaatgggctgtaagagtgaatgattgttttattcctaaaatatttcaatatacatgtgttgcaccaatttttgttgtggaatatttctgttgcagtaaccaaataaatcctttaagcgtgtagagacgacttctatttcgttgccgtatggtttaagcctatagcgatgggttacatgtcgatgctataacctacaagcatatagcgttgacgggttacatgttgcgatacacgttcaacgtatagcgacgcctcatactttgttgcgataccctttaagcgtatagcaacgacttaattcgttgtgatatccttaaagcgtatagcgatgactcttacttcgttgtgatatcctttgagcgtatagtgatgactcatacttcgttgcgatatcctttaagcgtatagc

SEQ ID NO: 50899 - DNA, 531 bp, Oryza sativa
  unsure (1)..(531): unsure at all n locations
tcgaccggatcttaagtcacctgcggcatgcaagcttctgaatctcagaacctgagaggagactgaggcgcatgtgaaaatttaaaaatcatcaaactactaccgccatttttaatatatgaggttcgaaataaccaatatgacatatagaataacagagagaaattcacatccagacaccataacacatacggatatatggctctatcaaatctcacaagaaagtgtcatataactcataaattacattgctactcttatcaattgcatcataataatcgttctcaaaacaggtacttcctctgtttcatattatgttaatgaatataaatatatatgtgcgtctagatttattaacatctatataaatgtggancaatgttaaaaatcttataacctgaaacctgaaatggaggtagtagtacaattccttcaaaggaatagtactcaatgaagaaaggaaagaacgtctctaaaatatgttgaatatcacaatgaagtatttaataataattctaatttttatatgct

SEQ ID NO: 50900 - DNA, 428 bp, Oryza sativa
  unsure (1)..(428): unsure at all n locations
tggcgagtattacttgaagattggccaacaaactgtgtttcactagcgcggctatcatggattcttggcaatatgtgcctcttaggaaaaaatgtgatcctttgtaaaaaaagttgttaaaaattgagtgaataatacatctttgatgaaaattctngngcacacaacacataggggacgcatgcatgctaatttacctagaaactttaaacgacatccattatattttagaacaaaaccaattggtatatacttatatttttttaataagaaacgcacagatggcatattattagaacagtgttttgcttctttgaaccgtctactagctaacatgctatcatgaatactagctggctacttgacagcactgctccttttatagactgttatatattatggcttaccgcgcttggctttgccctcat

SEQ ID NO: 50901 - DNA, 484 bp, Oryza sativa
  unsure (1)..(484): unsure at all n locations
agcttacttaggtggtgtgtttttcttctaaagatgaagataaagattaagttttttacgcaaaacgatatggtattaacgtatgattgattgagttttaattattacaaacttaaaaaatatattaatatgatattttagagtaactttcatatagaaagttttcgcacgaaacacaccgtttgaaaatttaaaaacgtgccacaaaaatcttaatcttcatccaacttttgttggagaaaagaacaggaacttattactcctaccatatgtggcaacttaattactggccggcagatagcttaaggttagctggttaataaaaaaccgcctgtagcttggttctcggtgcatgacggtactgcatgtaagtatatagtaaagtactccccctatnttaaaatggttgatatcgttgacttttagtacgtatttaccatttgtctaatttaaatttaagtaatattactctttcatatattga

SEQ ID NO: 50902 - DNA, 468 bp, Oryza sativa
  unsure (1)..(468): unsure at all n locations
taaggtaatgctngcattagcatatgatactgctaatattgatgatgatgatcaacctgctgatgaaaggacgcaaaggctatatttataggaagcactgtactcaagatcaacatccgtagttcatgtcctttcgtcttttgcacatacaagccttaacggtaggttataaggtaccagaatactccctttctattcaaatcctacatgcagcctcactttatcgtttcattttcagattctcaggcagaacaagttctgaaactgactgccaagttgtacaagctattggctcgcatggccaagtctcagattgcacctaagggatacatacaagtcatgccaggtctcaagtttcagaaatnggcagaagtaacttgcangatgctgactgctccactctacgtcttcgtcgctttagttcaagaggtctgcatcaccgcagagacgcacctgtgatgcttatat

SEQ ID NO: 50903 - DNA, 492 bp, Oryza sativa
  unsure (1)..(492): unsure at all n locations
tgcttgaagacagccggagcttccctatgccgtcttattaatattctcctcattgctaccgtgatattaagatagtcctttgtcaatggactgacatgaagctcantattgtcacgagaagagtataagaggtaagccgacccatcatcatctttgaagattgtcatgtctctactttcaaatccatgtgggcgaaagctatataggtaggtgaaatgaccagtgggagagttgctgactgctacaccaacagatgctttggtgtagtttgcatcatcaatatgcatccacatgacatatngtccagtatgatcattatatatcaccttaggtctctcaagcaccttaaatttatgaacgtcatgggtgaaattagtaggttctccacgaagcacaattccttcattagtccatgaccatatgttctttgatgagtagcagcttacccctataattgcaaccttgaaaattataaagacaaccacttatcag

SEQ ID NO: 50904 - DNA, 411 bp, Oryza sativa
  unsure (1)..(411): unsure at all n locations
cttcacaagctagccttcgattgcttgtgcctggaagagatatctcattttcatggccctttgaatcgtatgaatgaataaacagaggaataggaataacacacgattctgatatgaatacaattgtaaaacagaggattgcanaacacaggataaacacatgaatggcagtttgattggaccacaggaaaaacgcatgaatcagatgagagagatagactcataggaaatgttccaagaggttagacctcttgctaactttcctccaaaatgtgcataggattacccattccatacgaattttaaaggattggataggattcaatcctttgtctcataggccttcataggatgtattttcataggattgaaatccttcacaaatcctacatttttcctacaaatcaaagt

SEQ ID NO: 50905 - DNA, 354 bp, Oryza sativa
  unsure (1)..(354): unsure at all n locations
ctgcttcatctcgaacctatgacctcctcacaagaatttaggtaatgtatggtcttttctgcaaaagctcaagacacacagaacagtcataggactgcggnttgatttcctgaaaccctaagggcttctttgcatattgtcctgagactgacaggtggaccccatgagtataaaatctgaaaatgtaaaagataatactagaagcctttactctgtaacagcataacacctaaacttgtataattcatataaaatcaaatataacttattgtgacatgagtcatgattctataagatcacaaaactgtgaacttcaatgtgngaacatataagctgtgaccctcagcacagacc

SEQ ID NO: 50906 - DNA, 425 bp, Oryza sativa
  unsure (1)..(425): unsure at all n locations
tctaagcacctgngctgcagcttanaagagtatagtgtaagacaaaagtaccattgttcgaacctanaatggngtttgacccgattacgtcgacctaacggattcctctgccgacatggcatgatgctacaacgtactgctccgtcccataaaaaactaactcctaactacaaatctggacacatgtatgtctagattcatagctaagattaaactctctttggaacggagggggtatgtgctaatgtgctatgctaacaagtcgtctgggctctatgtgtcactagcttatggtgctcttggacttggagcaaactataaaatatattactaatgttgtagcaagctgaattctagtcattaaatttaccggtatctaacattgattcttaatataataataataatatctctaccgcctggta

SEQ ID NO: 50907 - DNA, 363 bp, Oryza sativa
  unsure (1)..(363): unsure at all n locations
taattatcaanacagaattgcagctaagtagttagatcacagcacttgactaatcataactttcaaaatattatactcgtgcaagtacaagccagntagtaccaatatgaatatatacttgcatcatgcccaactccagagtttaaggtcgttttgagagttgagacagcttacttgtttgtagtcggcgatcgaggcatatatacacccaacccagttcattgagtgatcagtagagagagtcttccnctcttcttcttgcagctctttcaggatctgagttctgaccatggcggctggagcgattccaatggcgtaccagaccactccgtcatcgccagactggctgaacaagggcgacaa

SEQ ID NO: 50908 - DNA, 453 bp, Oryza sativa
gtcctacagtgatggatataagcgcatttgtaattcctggggagttatacatatgtgtattgataagaccggtcacaatttcttgaagctcgatctcccccccagatgaaccatatagcctagagaaaccatgaaccagaatagaagagcttgccccacccatgagtaaatatttcatagtagcctcattagaccggagatctctcttggtatatccagacaataggtaggaacataaactgaaacattctggagctacaaagatagttattaaatcgttagcaccacataaaaacattccccctagagtagctgtaatacgaatacagaaactctggttagccatttctgacattcaatgactctacggaagaggaaacatatagtgaacttattaataagaattgaagattcgtgaaatgtcgttggaatttccgaaagctatataggtct

SEQ ID NO: 50909 - DNA, 419 bp, Oryza sativa
  unsure (1)..(419): unsure at all n locations
tcatcaatggactcctgacgtctacgaaggagtgtggttctttcgacaaattcctacctctatatctatctctgaggtgtttgggttttgcaaaactccatagatatgcanaagagatatgctatcctcactccgaccaagacagaacttttaccaaaagtttattgtgatctttntgttcatataacaattaaggtgaaacacggtcaggaacagcgaatctctttatgatatacagatccatgttgcaagctcgttattacgggtagttcctacaaagaatcggacttatgacgtatacaatgcttgaattatcgacgtacatgctacatagtgggctctcatccctcatagactacgagttgtataggagccatcgttgacaaaaggatcaccctaagatgatcatctcatggcta

SEQ ID NO: 50910 - DNA, 248 bp, Oryza sativa
  unsure (1)..(248): unsure at all n locations
tagcttgattcatgtgcttagcggacaactgacccctatctctttcttggagacgaatacaatgctcacaaatatcatgcagcgttatgcccaaccnagttgtagtatgctataaacagaacgcaagccgaaccacatgaaccatagggaatataggacgaactataacgttgaatggcctatttaaataaaagtgattcctatctcatggttctagaacatgcgctgctcaagaatgatcctaagtc

SEQ ID NO: 50911 - DNA, 379 bp, Oryza sativa
  unsure (1)..(379): unsure at all n locations
agctngccgttcgccttgngaacgaccaccgggttcgccattcactccggatggatgacctcacggatgaacccggcctccaaaagtctagccacctcctcgcggatgaaggcttgacgttccggggcttgccgccgcactttctgccggaccggccttgcgcccggccgcacggcgagacggtgctcaatcacctccctggggaccccgggcatatccgctggtctccatgcgaagacgtcagcgtttgcccgcaggaaggagacgagcgcgtcttcctatttgccatccagaagaccaccgatccgtgtggtcttggatgggccgtcgcccaaggcaacctccttgaccgggacctcgtcgcatgtggccatccgct

SEQ ID NO: 50912 - DNA, 251 bp, Oryza sativa
  unsure (1)..(251): unsure at all n locations
atgtcggtgccgttgncaaccggagaacgaagttccctgtgtctagcagcacggcggatgctccggtgacgctgatcttggttgtccaaagaatgtggccttgggagtccgacagcaccatgcctgagctngtggtgatggcaagggtcgctgacgaaggggtggtgattgggttgtcgcggttggcaacccacacaacggtgcgctgggggatgttgtggaaccagactccaacatagaggcttttgctg

SEQ ID NO: 50913 - DNA, 504 bp, Oryza sativa
  unsure (1)..(504): unsure at all n locations
catcaagcttagcacaggaatcttgtcaggctacttggttgctgcattgacggttcatagaggatgctaatctacgagtacatgcacaatcgtagcctcaacactttcctgttcagtgagttgttgccatttcaacttctgatcttaatgcctattgtattcctttactgacatgacatgtaatcttgacgtcagcttgttgaatgattgttcagatgaagagaaacaatcaattttaaactggtcaaagcgattcaatatcatcaacgggatcgcgcggngaatactatacctgcatcaagattccgcgctacggataattcatagagatcttaaagcaagcaacattttgcttgacagagacatgaaccccaagatctcagacttcggtgttgcgagaatatttggaactgaccagactagtgcatataccaagaaagtagttgggacatagtaagttgatgcattaattaatttcagcagcaatgtgtagcatagcactat

SEQ ID NO: 50914 - DNA, 497 bp, Oryza sativa
  unsure (1)..(497): unsure at all n locations
ctattgatgtggactanggttcctgattttccaaaaggttctgattaacaacgatttgggcggagacgcgacacaaatcgatcggacttcttgaacgcgcacgctcttgagccccgcaatagccgcaccacgtgtcctctggttatcacccgtgccgaaacacggatgaccttgccgagaaggctaatccatgattgccaatcgaagaacacaaattagaacaaggtagaatacaaccaatattgcagatgaatgattaagctcacaagttggggtcttacaaaccaatttagcagcgaaactggtcttgacagaataatctaagtgaaaccccaaaccctatatatgacggcgggtactggatatatatagaattagggtcgtgcaaccaacccttgacataacctaatgggcttcaacgcagcgccgggacagattctagatgtcaacttattctgtcgattcccgttacttggaaagaatntggatgtgggacc

SEQ ID NO: 50915 - DNA, 155 bp, Oryza sativa
  unsure (1)..(155): unsure at all n locations
agcttggtaccggatccactaggcggatccgctnttatcgatatatagtttcgcattggaatgggaaaacaggaatactaatgatctcgcgtataaatacttcgaattaaatgtaaaaatatactgtctatttaattttttcttataaatattcg

SEQ ID NO: 50916 - DNA, 313 bp, Oryza sativa
cttggctctaatcctgaagagactcgtagtcttcattcatcgctatgtcgtatataaggtcgaagacaagtccttctcatgacaggactcgtagtggatgaagtggcacaagtctccctgcatgttcgttatgccctctatcgccaagcttgctcgatgtgcaattattggcaactacatgtatgagagcacgagaatatatgataatatcaattgatgtgcattccatcattgatactatattctgagatcacatcctctgggatgatcctgtcactttgtttgtatggatcacttcaatgcgctccttctc

SEQ ID NO: 50917 - DNA, 414 bp, Oryza sativa
agcttggctgaacctaaattatttttcatttgattataaatacttcttcttattttctgatttacagaataattgagtattatttgctctaatatggagctttacgattttccatgtattaatgtttctttacaagtttgtacccccatctccaaaatcctgcatcagccactgtggtatgtacaatttaacaatggcaatccctaaacagctttgccattatatacttcttacattatcctatggttttccctattctcatttttctacatttccagtatttgtttccaaacggacagaatgttggcatgagggaagtggcataatggaagagagcttggtcagaacagtggcccaaaaataagatgaacagacatatcaagaaatgtatccatggatatgctaatatagtaa

SEQ ID NO: 50918 - DNA, 252 bp, Oryza sativa
  unsure (1)..(252): unsure at all n locations
acacaagatactcaagctgganatatctatctggtaagaatcttcaacaccttgngcatctcttatataatgatttcattctgccatgatacccaccatatccatcgttcccataaaaaaagagacaaaatanaacaaaataaatgtggttccttggtcttccaaccaagtgagtcatatttgctttactcgtgtctatgttattctttttgtgtccaataaagagtcccaagtacaaaaacaagtgtgggg

SEQ ID NO: 50919 - DNA, 464 bp, Oryza sativa
  unsure (1)..(464): unsure at all n locations
agcttgccaccagaggctccatattgttgccaggtttttgcgggatctttggaggcaagaattgccgctgctgtcgccgggctttctggcttgataaccccaaccaacaatgttcttaattgcactttgccagaatctacccacgggcgcgcctgctgccataactgtttacaatatgggcagaacggatcggcgaagacgtagacaatgaccggcgcatcttatttaccgtcgaggagccagtgggattgttccatccgttgccacatatcgcgtccggctggtgcgtaaatttctctttcgataagtgtgttactcaggttttcacctttctcgttgtacatgtaaccagagatagcgtgcttaccatctggagtcaggtagatggtgacgcccatatcctgatactntccgagataacctttcattcctccggaggcatcgaatggtttgatgattgtaat

SEQ ID NO: 50920 - DNA, 302 bp, Oryza sativa
tgcgacgtcattaatcgatgagtacgccctgctgggctggcgcgctatgctgactgaagtcaatctgtcaccgaaaccaggcctcgtggatcgcattaactgcggtgcgcacaaagatatggcgctggaagatattcaccgcagcgcgctggcgattcagggctggctaccccgatacattgaatatggagcctgtagtgcggaaatggcaccacaagcggtactccacggattacgcccaattggtatggcttgcgaaggtgatatgttccgcgccactgcggtcgaaacacgcatataag

SEQ ID NO: 50921 - DNA, 473 bp, Oryza sativa
  unsure (1)..(473): unsure at all n locations
agcttgtttttactaatattatttatgcatcaattattattaaataattgaaaaataatttatgagcaaattattattgtatcaaatttcaaattgtttacctatcctcgcagacggcatttcattgtttttgcagtcagcaattctctactttcgcagatggcccatctatctccactccgtctgggaaaatgatcttcccaggcggaccaccaacccgtctgcgaacatcaacgatcttcacaggcgttgggctgccggccgtccgcctgaaaagacgcgttctccctgngcgaanatgctttttctaagtagtggcagctgccggcgagggaagctcgctccggcgagacagccagacgccacgccccttcttttccccacaactccaatcgcctccaaacctcagatccgacggcaccagctctatcaacgcgtgacgcgacagcggagccgcgactcgaagctaactg

SEQ ID NO: 50922 - DNA, 407 bp, Oryza sativa
  unsure (1)..(407): unsure at all n locations
tctattgccatttggtttgatgatgcattgtacttgacgatctttttgcatgcatatctctaaagacccacgagctatatgcactngtgtttgctgctcgttacttggacctgttcattcattttatatctctgtataacactgtcatgaagttggtctttctggcaagatctttctcaatagtttggtacatgaggcggcataagattgtccgaagaacctatgacaaggatcatgacancctttcgcatcacttcttagtggtgccatgttaggctctggccctccttcataatgagagggttacntttagagaggtctagttgatttcttctgcattaccgcatagtggtgttacaactgtgatgcttgtgatatgtaaagcaattcaatggaccatttacctt

SEQ ID NO: 50923 - DNA, 440 bp, Oryza sativa
  unsure (1)..(440): unsure at all n locations
agctntctctttcttccgccatgaatgtgaactggatagtttaatttggtcctagatacggctggaaggggatggggaatcgaagcggtggacgcggggagaaatttcgtaaagtttttgaggatggattggagcggatggatgaaccctatcttcgtcggcgcggttctgtactgtagcagggagtggggaaatggcgaaagtctcggcggggaagacgaagtgacgcttggtcttcggtgtttttagggtatcgggagtactaatgggcctatgcctgtacagtacttcagcccagtattataatcagcgtggcccgttgtgatccctagggacttaggcgctttntgctttggcaatttgtgctcacaatgatgtggcccaatggttgtaaaatcctttttaatgcgggttgataattctttggaattaacacgatg

SEQ ID NO: 50924 - DNA, 210 bp, Oryza sativa
ctcagcttcggaattgattggaatctagaaatccttccatgaatggcgttagtgtttcccatcgggaagaatttataccagaatgctgtgtagcctctgtcccaagtgttgatcgtagcaccggtaacatattaccactgctttgctttccccacgacggagaagggaaacaaccttgatctaaccgcatctgggatgacgccttttact

SEQ ID NO: 50925 - DNA, 483 bp, Oryza sativa
  unsure (1)..(483): unsure at all n locations
agctngagaagctatgttggaccttcaggcccatggatgataccctcttggatagctttgaaatctacattggtttggagattctgacctgagcgtcctactggcacaaccttatgaagattctgtaatcagtgataaacaatcagctggagatattactttcgttaatggaagtacatgaattgagactcaaacgttcaccacaaatggttcaatgctttaaaacctctatgatgcaaaaccggtaaataatggaatatcagaattgattgtttcacataatatcataattgaacgctcgtagatgaaggacgtactgtcacttgagatctgctactggnttccgtctcttaaaacgtgtgttatgggacacattcatagaggtgtgagtgtgatagtacgtgtgtattgtgtgtgtgcgtgcatcttcgtttatataaaagaacaaaattatagccatgactcgctaatcacaatcttttt

SEQ ID NO: 50926 - DNA, 460 bp, Oryza sativa
  unsure (1)..(460): unsure at all n locations
ctcagctgatcaatatctgaggcccgatcaaatccaatattgaccggctttaatctcgctagatcgaactcttagcacaacttctagaatccaatgctgaaccggatttatagaacaagaaattatccgatctcccatggtctatcgaagaacaaaaagcgaagttaaaatcggctatcaagaatgttgctgatatgaccaaatctctgaaggtcattcctagaaccgatgctcaagatgcccaagccatagaagaagtagaacaaattatgcagagagctaatcagctatcctgcgtacttatctcgaaatngttgaatcggctaaatattccgttaatatgcaatatcacttgctcaaaatttgactgattgtgtcaagctcaaaatttgcctgtttggatgattatatgcccctagttacaatgcaaacttgtaaatataaccactagcattacata

SEQ ID NO: 50927 - DNA, 281 bp, Oryza sativa
  unsure (1)..(281): unsure at all n locations
gtaaatgttactacatcctccgtttctattaaaaacaaatctacataaaaatgtgacatcacctataatgaaccggataatctcaggtggtatcacacttccatctagattggtgtgtttctttttgacagaggtagtactatgttgttacacaggcgagttgaacaacatactanttgtatttttttacaaaggtttcccggtgaggaccaatgggttgatcgggaaaatatatattacaaaccacatatatagtggtaacttacaaacttccattggat

SEQ ID NO: 50928 - DNA, 291 bp, Oryza sativa
agtagttgccggatgcttggcagattccttgcgtcatgggcatgcaagaaacaaaacttcttagccctctctatgcgccacgctgaatatggttttgctagttattattgggcccaattgctctggatgaaacgaacctctgtggactattgcatatacttcaccagaaccacactcctatgtgacagtgatagtgccatacagatgacagataacccgctccatcattctataaccaagcatattgacatatgctcatcacgttctaagacaccatgttgccaagtgtga

SEQ ID NO: 50929 - DNA, 497 bp, Oryza sativa
  unsure (1)..(497): unsure at all n locations
agctgatggctaactntgtagaaaggaagagtctctagtggtcacactatctgagctatttctcactcacctcgggaatcacgcagaagaacacttcatcggagtctctatgcttgtacccatgaaagttgcctactatagggcatgaagcatgttcagatgaatgccatactttcggcatttaccaggaatagagccatccttgaacaatgtaaaacatagaaaattgccagcttaattgatagagaggcctgaatgcccaaaacatactaatgcagaaatgctattgaacagacacggcatccaaaattctcttgtctgatcgtgaaaggatcaagatcacttcactaaattgaagatcgatgagacaaacggagaggattctacggaataggagagaccttggtgcanagtactgtggacgatgaccgaacgctggtgatgcatgcctggatgcatgagaaagcgaccagnggtaatggtgtattcatcgctcg

SEQ ID NO: 50930 - DNA, 423 bp, Oryza sativa
  unsure (1)..(423): unsure at all n locations
ctcagctttcgtaatattcatcttttatattccttttgattntaccgagcacactctctttgctacggtaaatgccacattttctgtagtaatcttgccaagggtcaggatcctcctcctcccattcaccttgatctgtgggctgcttctgcgatccggccgcttcttcccgctcgagctcccgcaagatgtagtagaggacctccttgggtcgaagcggtaaaacatcaatgtgcaccgccgggaccgtgaccatgatactgcgacggtagtattagtttggagcaaccaaagtttcatgtgcaatagcaaggacttccttataatctgcatctggtgctacaatggcgatggacaacgtcacgatggcgtttccangaactttcccaatccactccaataacttcgccttcacgtagtcgt

SEQ ID NO: 50931 - DNA, 490 bp, Oryza sativa
  unsure (1)..(490): unsure at all n locations
agcttancataccaccaacttcaagaagcttatattaactcaacaatcctaatcaggatgagaggacttgctttgtgtgttgccaagttggtcatctggctatgaagtgtccacagcgcaaggggatgaaggcacctgcagggcagacttctaagtctgctaatgtgaccattggcaacactggagatggaagcgggtatggtaatttacctactantttttcagttaatcaatctactaattggtgggttgatactgcggccaatgtacatgtttgtgctgacatctcattgttntcttcttatcangtcgcacggtgttccaccgtcctaatggggaatgggtcacatgcttctgctcatggtgttggcacggtagatctgaagtttacttcgggatagatcgtgcagctgaagaacgtgcagcatgtcccttctatcgacaggaatcttgtagtggctcccgctgactgagacgaattaagatggtt

SEQ ID NO: 50932 - DNA, 355 bp, Oryza sativa
tccgccccgatccgatctagatcctaggaggttggcgttattctcctttctctcgggacagtctcaacagaagagttggatggttacctcagctccgccggcctcagttctcgatcaaccgagattctcgtctactatcgatttggcgtccactacgaccacggcgaccttgacaacttcgacgacgactatgaggataactacacgcccctctacttcggcgtattcatggctgacaactaaacggaggaacagcgccaagccggataaacggacctagatctctcacggcaagaagctgaacgtcttcgactggaggatgagcgacatctactatatcgagaacgactactgc

SEQ ID NO: 50933 - DNA, 451 bp, Oryza sativa
  unsure (1)..(451): unsure at all n locations
agcttgatgtatagagcatgagacggatgactatatatatatctgagaaatcacttngaggagtcgtatcagtacgaggagacttggctgctgccacccacgtcgagcttcaccttttggttaccgcgtgcttgtgggtgctcgatgcggtacagatcttgcaaaaccaatgtcgcgtgggatggggaaggagatgaaatggcggcagcagtggacatcgaactctcaagaaggcggcggctgtcgccgcttgcttgatgggaagacgacgatggtaaccactggctccgcacggcggtggcggcagcggctggtccagcgagcttgagaggaaagcagcggctacagcttggcgagcccgaagggaaggcggcggctagctacaggctccatgagcangcggcgtatgggtggcaagagggacatctatacgagaggatgatgggaagaa

SEQ ID NO: 50934 - DNA, 371 bp, Oryza sativa
gaagatgttgaccaggctgtatccgtatatgagtgacacagaaagaacaccatcggcttcacccaagcaaacgcctgcaactccttgtgcccccgttcattgtacaagagtaagtatctctctttgactacttctgaaattacttacctcttcggctaattactcatagactctgtgggtgcagaaaaagaacactgctgtgaagaataagccagcagcaacgattgtcaagtcagccccaccagcaagatgtctttaattcttttacttaatcaaactcgacctgctctatataacactctgctattctacagcctcctcctacttctacttctgtacagcaattggcaagtgaccagactgcatcagct

SEQ ID NO: 50935 - DNA, 392 bp, Oryza sativa
  unsure (1)..(392): unsure at all n locations
atgaacactatatatcatactattgaaagngcagctcggcgataattgatgaaatggcggctttgcctcgtcgtcagtggtgccacctaactgtatgcgtgcatgtgtgtcagcgagaatcatctgtaagctgcagcacgggcagcaagctaagctggattcttgggcttcacacgtgcgagcaggcgaagcaatcttggaagcgatccttccatgatagttagagacagatccgtggtacgacgacaccacagctgatcatgcatgcagagccgcaagcatactacctgcagtagtcaatgtcgttggagaattatatctctctggaatggaaatcgagaggatattcactgacgcacggctggtttctacccttcgcatgtgggattaat

SEQ ID NO: 50936 - DNA, 476 bp, Oryza sativa
  unsure (1)..(476): unsure at all n locations
agcttcagtgactgaactgtggaaatggattntaatctgtctagtcatattcgggttcttacttgtagaggttaaattcaaacttgtatgttcgtgaagtgatattagtatgacatatcaatcttatcaattttttttctattttttctataattgtttaaatgacatgtaagaaatgaaggggcatcccctcaaatgtgaactctgtaactgaaaactggtttgtttgtgcaggtgtcagcggatggataagtgggatgaagtttgtttctatccatttccttatgccaaatttgatgtgcctccaagtagcaaatgtgaattgcgtgatcgaaatgatgaaagaaactctgtaccgaactgtgtttgttcatgtgcatgttccctgcattattctctgtcgctgctgtttgttgtntgcctacagttttaacattgactacaggggccgagtggtcaacttatcataattggac

SEQ ID NO: 50937 - DNA, 423 bp, Oryza sativa
  unsure (1)..(423): unsure at all n locations
tgtataagtggtacacggaatctagtgatggaaccacgcattgtatatatggtgctgatataattatatatgaagtgacagatgcagattatagccgccgtctactgtttgggtaaggcactttatattttctattttgaactggtcttgctcacatttaaaatgacttggttacattgtgttactgcataaccgatcaggcttgcatttgtggaatatgatattttgtaattcttgataggtacattcccgatcgttctgatgggatcattggagaaaaaggctctctgagccatctgatataattctccctggtaatattaatatctgaacctattacatactgttctatgttcacnatttccatgcaactacattgtattagatctcttttctttccagacgacttagaattaagcactc

SEQ ID NO: 50938 - DNA, 386 bp, Oryza sativa
  unsure (1)..(386): unsure at all n locations
agcttatgccattntcaatccaatcgtggattntatgcctgtcatacctgtactctnntttctattagcctttgtttggcaagctgctgtaagttttcgatgaaatctttactactctgtctgccaaattgaatcatgtattcattctaaaaaaattcgaaaaatggataagagccgagaagtcttatattatgaaccttcgattctaaaattcaaattcttctacattgaatgtatagctgcagcaantaaattggatcagcctttctactccctgcatctacgttgagcaggtatctttaggtaaccgcacaatacctaacctaatttattgataagagtgcttattataaatcaattcttggcaattttttcanaaattgatt

SEQ ID NO: 50939 - DNA, 367 bp, Oryza sativa
tctttacggacacttgaaactcagcttcggcatttggcgaaaaaaactagtcggataaataacagaattaaaacaaatacacgttaaactaagtatattatgcataacaagcgtttcgttcttgtagagtagataattggattttgattgagttatttttctaagggaaaaaggaaaaggaggattcaaaatccttttttcttctgactttcccaaacacaaaatacctccttgtattcgcactctcaaatgagagtggaagaaattcgactttcatataatatcttaatagaattccatgtaatgatcaatgcattttttggattctatattattcgcatgtctagaatcctaccaagagaatacc

SEQ ID NO: 50940 - DNA, 380 bp, Oryza sativa
  unsure (1)..(380): unsure at all n locations
agcttgaggctcgacctgacttgacttcctaacatttatgacgctgngcggttgtcctccangtttgacaactaaaggaattggaggggcaaggaggagaattttgaataaccgtttcgcaaagaatagccgaagggcgaggggagacatttntcatatagggttttcagaaagcttgtccttagggtttgaccatttggctcaacctacagtcaagttggctctgataccactttgtcacgcccagaaatttagcccanatttccagactattntgtgtattaaatccctgtccaggaccagccagggtacacaaaacgacaagtaatatacagttccaaacgtaaataaagcgtaaaatacttacaaatgaggcactt

SEQ ID NO: 50941 - DNA, 278 bp, Oryza sativa
  unsure (1)..(278): unsure at all n locations
gcttctttggcatatacccatggacaatttanggcatagcgtccttgctctctacaatcgtgacaaaaggggacatcctcttctggcattggcagctcatctaactgggtggcatatgctcgatcaaacacatactgattctggacttgacttccaactaatggtagctgtgaactaagcaacatgctttaactggaccaacggtgtgccctgagtaactctcttgaagccagaggtggattgagttgaacacttgagttacttgaggtatacccgct

SEQ ID NO: 50942 - DNA, 164 bp, Oryza sativa
  unsure (1)..(164): unsure at all n locations
gaaatggctgtatgngatctttctctgataaactggaataccatatcctgtgaactgtggccaccttcaaactcatttcttttgacattattgtcttagatccgcgaacgcagggtcacgttttttccttaagctgacacggaataagatcgcagcactattcc

SEQ ID NO: 50943 - DNA, 363 bp, Oryza sativa
  unsure (1)..(363): unsure at all n locations
tagcttaagctcatcttaattagccacggntctttctctgttcataaatggcggagtagaaacacaacgtcaccatgcaattacaagtggtagcactgcggcttgtaggagtaacattattttctgtgatggcgtcgtccgctccggcggccgtatctgcagcacctccgcccgcggagtgcccgagcaagtgcggcgacgtcgacattcccttcctctttagcgtcggcgacgactgcgcatggacgggtccagatgacttcaacgtcacatgcaaccatagctttactcctcccagaccttactacagcaacatggatatgaatgacatctctctgtcgataggngagatgcgcgtctaca

SEQ ID NO: 50944 - DNA, 386 bp, Oryza sativa
  unsure (1)..(386): unsure at all n locations
acactatnaaactcagcttctcggttctggtctcttccgagcattgacgccactctcctataatccagctatatagcggatgcgctccctcgcaagcttatggatgtgctatgcgtctccggtagcatggcacgcctaagtcggttcatatcgaagctggcggagaaggcgctacccctatttaagctccttcgacgctccgggccgattactaggactgaggaagctgaacgtgccctcattcaatgaacgcgtatctagctctctcccatattggacgccccggagcctaatgaacccttgtactctacttagcggcaccccgctagtggtaatgcggcgatgtcttggacgtcatatgacatcctcattcgccaccacacctt

SEQ ID NO: 50945 - DNA, 438 bp, Oryza sativa
agcccttggacaccactctgctgtcgacacgttgtttccttctcctgatgctatctttatctgaagagtatagtgatcaacatcacctatctgtttcctggaaggtttttgtctatgggagatgaactggaggattcctttggatagataatccagacaacatgaacatgcttcatatgacgctacatgtatggtaatggcctgcacccgcaatatgtgaagaatatagtggttgtgtggacatagcatgagtcggtatctgcataagccgcctaataactcaaccgtgacagcttcactttcttttactgatgtactgcttatgatgctgagggactgctctggtagttttacttaacaatacggaccaatgacggtttgttgcatgtcgattctcactgataacataccatcgttctcagttgacatgtctaagca

SEQ ID NO: 50946 - DNA, 279 bp, Oryza sativa
  unsure (1)..(279): unsure at all n locations
cttctgcttgcactggttatatagcttcttattcatacaatatatattatcctannatttacgatgatagtacttgaggataccatatacggatatatagcatgttcggtgcctatagaacatgtccatgtgaacatgctccctgagtgctccatcgattatgctcctatgggccactacactcttcttatgtgttcggctattcgctgcattggacactataactgggatcaatgcatcatctagcatatgagtaaccgtctcctacattagagttaa

SEQ ID NO: 50947 - DNA, 196 bp, Oryza sativa
aattatcacatgtaggccccgatcagactttgatatcactcatacacctgcgcggaccgccgtggagggcattgctgaaaaactgagaaacggaaaattgcagcatatcgcttgtgcatctctaacatcccacaagaaaatgaacgttctattgaataaatccccaattgtataatttggtaccatgtatgaaccg

SEQ ID NO: 50948 - DNA, 460 bp, Oryza sativa
  unsure (1)..(460): unsure at all n locations
agcttgaccttccgcggttgccttggttgttcgctttattcttgcacaagtngagtctgggcggccataacttcatcaagagtggttaagtcgggtgtctgagtttcgccattgctggttgttgccccacgtccgcttgccatctgcgtaagttgatggagtaaatatcctaatnttctaactagctcctatggctttatcccattaagggagttgtgttgatatgaaccttgttttgcacgcatggtggaataaactcatttataacacaacaacaatagatatcataaatatcatagcagagtttcacaaatggtacataaatcatgatgcactcgaccgcatacattcgcagtccatataaggttcatccacaagatacatcaaactaatcatcaatctactcgtcaatctacgtaatggaggggggtgtctcgcatactatccaaataccttctga

SEQ ID NO: 50949 - DNA, 347 bp, Oryza sativa
  unsure (1)..(347): unsure at all n locations
cacaaaatactcaactttaccgtgtgtgacgtgacaacagcactatcatggtttatatgcatgtagggcantccacacgtgacataccttactatatggaataatttcctttcctgattggctctaatagtagaatattctgaatggtcatttgaataccaaacctttctcctattgctgaattaacagaaatctctacgcgctacagcatgatctggatatatatcaaatatcatcagctatggatgtataattattgctatcggaagtagacgcttagtctttatcattataacttaactttgtcagtcatagttatcatcatttgtcaaatgaaaatgttcttt

SEQ ID NO: 50950 - DNA, 485 bp, Oryza sativa
  unsure (1)..(485): unsure at all n locations
agctngaattctgccttcaggaatcacggtcccagataataaaacttcagagagtatgttcatatttatccttgtcccttgacacatcaaacatgatgatctcttctagcattgctgtgcatgctcatatatggttatctcaactggggacgaggcacttgagattgaatatgacgccttatccctgagcatctaacaagatctctgacagttaaaaataacaaatctagaccatgtgaatgaagcatccctgctacggcagttgtgcaataattatctgtggaagatgtacaggtcaaactgatactaacagatacacgcgctcagcatagccccaattttttagtatcacccattttcactgccagccataataaccatgcccatttattnttatgaaaatacaaaccaactgcaatgccntagccgtgtatttgctcaattatttgttaaactttagaaagtggcatttggttctgaactat

SEQ ID NO: 50951 - DNA, 209 bp, Oryza sativa
tcacatagatgattggggagcatgcacaaaggaaattaacaaggataaagttatgaacaatatgctttggaaaagcctgagctacaaaatatatgaacgattgtaacgatcagttctgacaaatatttgtcacatagggggtgtttattcatgttacagtataccttaatttacttattataccggaatctaccctgcttatagatttt

SEQ ID NO: 50952 - DNA, 125 bp, Oryza sativa
tcaagacacgccgctgcatctagccattcctgcatgcccattccatatcagatcatatcgccgcacaaccatgtgccccctttggaccttcatatctgctatattccagagatcatactatccta

SEQ ID NO: 50953 - DNA, 426 bp, Oryza sativa
agcttaagtagtattaaaactcttgataatcatacgcttcttcgttttacaatataaggatttctagcatttgccatattcatttagatgttaatgaatctagacacatccctccatttcacaatgtgaagctttctagcattgtccacattcaattatgatgttaatgaatctgtatctaaatgaatgtggacaacatctaaatgaatgtgaataatgctagaaagccttacattgataaacggatggagtacctaaaagtttatataattatgacaaaattactagatatgggtggagatatgaaatacattttcactaaatctcaaatccatcttaactttatctgagaaataacaatgattaaccttaagcgatagcggtctattactcattacatattctttttaggtacctccaaataaa

SEQ ID NO: 50954 - DNA, 499 bp, Oryza sativa
  unsure (1)..(499): unsure at all n locations
ctcaagctggaaaatggttatgtgccggcatgacacaatttcaataatctgttgttctatgcaagtctttaataatgtggaggcaccttcttattcattggtctttattaaaactgaccgcacttgcagtcaaaacaaggctgcattatctgcactataaaaccacagattaggtagaggaaaccggcaacgctggtcatcaccaattagaaatcaacgttaaatatacatgggctttgtcttacgttagaaatacagccgctcagatagacgaaaccacccctagctaacaaacacaanaacaccctattaaacaaacgcaaatttagaaagaagacacggttcataatgcatgtgcggctgatcacaccaaagacgatcgggactttgcattcacatgaccacgacattgcggaccttggaggcctccatggtgtaacgagtaaatgccttcaaataaccacattcgtctaccacgactaattatatagtaagtcaa

SEQ ID NO: 50955 - DNA, 467 bp, Oryza sativa
ttaagtcacctgcggcatgcaagcttgtcgagttcttctcgtatggctcgttttcaatctgttgcaaatctccgcagtttttgctctactggcctggcatcaggtcgcaccatgagtttgtgctcaatcacctccctgggtaccctcggcatgtcggacggctgccaagcgaacacgtcatcattgtcgcgaacgaacgtaatgagcgcgagttcctatttctcgcctagtgatgccccgatcttgacggtcttgtctgggttggcactggagagtggaacgatcttgattgcgctcgccggcttcagcgtgtcgttgttctgctcactttctagggtggctcaactgaggcgggtggcgtgggcgtgtgctccaccatgtctaggctttgcttgtctcatagcactaccaagctagcatttccttgaatagtgattgtctccttctgtcctgctatttgacacttg

SEQ ID NO: 50956 - DNA, 420 bp, Oryza sativa
  unsure (1)..(420): unsure at all n locations
tcaggcagtagatccaatgatctcatttcctttactaccgcggtatatcatatatttcgacttctatcacatagagttgtttctgagtgtgataattggccacatgccatataatctgtttgagtatgatttggttcttgcgcttttgatatctattgaaaaccaaatcatatatgtgcttatggataccatattgaatatccagtttcttaatattgcaccctagagggttctcgtcttagtaatttgcttaattcaatgacacggtttgtaatatttctctatattaactttgaggtgcgtttcttttattggaacattggtcccataaaatattttacttctatgcctgaactgataagcttatgtntgtattaaacataatccacccatgtgaacatatcattctggatttatatt

SEQ ID NO: 50957 - DNA, 261 bp, Oryza sativa
  unsure (1)..(261): unsure at all n locations
tctaaataaccgtgattatagacagcgtatggatgaggcaaaaacatttctaacccggactaatattgctcgctcttgttttaatatctactgtcatcggtttgagatngactaatatacatgttcatgcatgaacacttgatgacattactaatttaagtgcaatcgaacctggaagaaagcgtgataaatagatgtacgcttcacttcctgccgagacataagaggctaatcttctaaagaaccgtgattatagacagc

SEQ ID NO: 50958 - DNA, 469 bp, Oryza sativa
aacttctacgttatgatcaccaagatacgcttccttgtcttgaagctatggttagtctaccccgacagataatatttgttacatcccaagaagatactgattttgcatgactggatatttcctatttatgtaacagtattgactgttcactgagattgttagtttatcgctgaatattctagtatatatcctccttcttagtcataagaattacatcaatgatgtcataatagtactttcatcttcctattctatcacacctctgttcaattattattttaggcatattctgtttcacttattgctctgtattatgacaatatcataaaacattttcctgaccctcaaccaataatagttggcatgttatgcacttgtataagtacacttcaactatggatgcaagtggagcgcgccatcgtgtattatctgcctgttatctcaattctactctattgctgaggtatta

SEQ ID NO: 50959 - DNA, 486 bp, Oryza sativa
atgctttaagttaggatgaaactggttcggatagttttctttcgtccggaccattattcggattaggatatttccagtcggaattatccggaaattctccgattcggaaacgaattctgatattttttcttggaaacgaaaacgaatacagtatgggtaatatccgtcggaatcagaaaaccgtcggaaactatccagaatttttttcagatatccgcatacattaagcaaattatataaaaaacacgtatatatacatatcttgttcatactgaatcagatgaagacaaactttatatcaacattgtagagctcgatgagatctacaaccttattattgactcatttattatttgaggtcatttatgggtctaaatatctcatataatataccatattaatttttacaaattcttagatctacaattcaacgacatctgatgagatgagtccatatcacaattgagagctcaatggatctccact

SEQ ID NO: 50960 - DNA, 412 bp, Oryza sativa
gtcgcctagatgtcgaatgacaccataaacctcttattctgcccagaggcacaagagcaccacgggaacgctcactacgctcctcctctcctcatggagacaccggatgaacacaatgaactcctcagactaaactcaggaccgtgagcttctccttaatccgatttcttcgtgcaagcagaatacaagcgaaatgagaaaaacaagtagaagcctggatatcatgtagacaaagcaccatgtagctgggtagagggagacttcaccactctatgagtgcactctgatgctgaatgtctggctctagcggaccaaaccctggctaggcaacgtatgactactttactaataagtcaatgtacggataaagtaatccaccagatgctaattttttcccaaaattgcaacaaca

SEQ ID NO: 50961 - DNA, 444 bp, Oryza sativa
gcttataggagggacttatatcgacccatgacattccatccgattagaccacaatgcttcggcaaatcgagtatgccactgccgaggataatcagaaatctttctcttaatcaacttgatcagactcttgttagatgcctcggcctgcccattagcttgtgcataatatggtgaagaattcaacaatttgatacccatctatcgacaaactgaacaaactcatcggacacgaagattgaaccttgattggttgtaatggtttgaggaatatcaaaacgaaagatatatgctcttgaacaaactgtatagcattcccggaatcaactttcttcaaaggaatcgcctctacccacttagtaaaataatcagtcgctaccaatataaacttatgccctctactcgatggtggataataataccgatcatatcaaatccccaacctct

SEQ ID NO: 50962 - DNA, 460 bp, Oryza sativa
  unsure (1)..(460): unsure at all n locations
tgggacttgatcgaagttcgcggcttgaaagatatattcaatgacatcatttctaacgcccactttgcgatccgcccatttgcttcgcgattatgaagtatatccccgagtggaaacgatgtgaccactgtggccgagtgaccttggaagtagtgagatagtttcctgacgataattaaaacatcatataatagcttgtgaacctgaggatatcttgtcttggagtcagccaaaacctcgcaaacgaagtagattggtcgttggactttttgaacatgtccttcttcttcacgctcaacaatcaggactgtgcttacaagcctgtanagtagccgacacgtataacaacagcggctcttgtggatgtggtgaagctaggactggtggagtagtgagaaagttttcgaggctttaaggcttttgtgctttggtcccactggaattgctgtttcttacagct

SEQ ID NO: 50963 - DNA, 441 bp, Oryza sativa
  unsure (1)..(441): unsure at all n locations
agcttctgtcagctgagtctaactntanaatttattctcatctngactaactttaactgaattctctcaaattatttctttaattcatgtcaatgtatgacttactgatataagcccagtactccttcagaccaaaataattcatggaaaaattccttagtttctaacatcaatatggattgcttgacaataaaatgtcgttagtatagagtaccggtgaatgaaatttcccacctttaatnttcatgcagctgtccacctcacttgaattgttcgaaaatttccattagagtcaggcttaattttattaacccacttaaatggcctatntctgactcatttagaaactcgtactaaattctttattacatggttcgaaacacacttagatgaaacacttaatgttctatntttgtcatcaatctcaatttattcttacat

SEQ ID NO: 50964 - DNA, 286 bp, Oryza sativa
  unsure (1)..(286): unsure at all n locations
taagcaccgcagctgcaactggctcattgatattccacaacttccttatattatacngagatgctgctgatggtctttctatgattgtgagtacaccaggatgtacttcatataaaccactactaacttacccacgtattccatgaacacattgttcattaatttcatgaagatggcacgagcattggtcagaccacaccacatcaccgtgaattcatacagtccataacacgtggcgaatgcggtcttctagatatcttcttcactgatacgcaattggagatat

SEQ ID NO: 50965 - DNA, 372 bp, Oryza sativa
agaatgtataatgtgtggctgataattaatcaatgtggcggagcgcgctgatctggcggtcgctcttcactacagcggtggtggcggtggtgctgctgatgttcattgagctgtgcgcgtccgggaagtgtcggcttgtcggcaatggtgggctgatcatgtacgacgtcagcaccaaggttgatgaccctatgacctaccacttaaggacatccccatcgtctgtctcatcggcgtgatcggtgccattttggcgccctttcaaccttctcatgatgaggtcctgcgcgtgtctacttgatcaacagtttggtagctagctacatcatccatattttgcaattcacatggctacttggcgtcaattataat

SEQ ID NO: 50966 - DNA, 480 bp, Oryza sativa
atatgcatatcaccttacttatgctgtcacccttgtcctcggctcacactatcctcaggtacatactattgatggatgaaggtaataacgggtactaagatagctcaaagttagtggaacgaacctaagtcctatcggcttgaactcaaactctaatgagttatgattctaaccatgctttattgttaagctcatgaattaatcagtcacttcacgatcgcttgtttaactcgttactaaaagagatcgtcatatttttatatactcagcgcatccttaccagtggttaaacctctgagtatatcccaactattcgaacattcggatgtatagtaagttattcataacgctagactaattaatatgttaacatataatataataaaatatgacatctaaaatgacgaagctaaacttgacttaacaaagtaaccagtcactcacgacaaactaactacatttcactcatttgctcaagac

SEQ ID NO: 50967 - DNA, 198 bp, Oryza sativa
  unsure (1)..(198): unsure at all n locations
tgcaagcttctgatcaacatgttagatggagacaacatatcatctttctatcatgctacccaanatacaaaccccggacacctatgtcttttcatgcgtgggtcttttgccctaatgcccagttgcggaatattcatcatcaagatgtctactggtactctgtagaaatgtcattacaacatgtacatctactacttt

SEQ ID NO: 50968 - DNA, 405 bp, Oryza sativa
  unsure (1)..(405): unsure at all n locations
agcttggtatttgtggctctgagctgtaagcgcttctcttctgcttcctcctctgggagccagccgttcttgaggtacttgacgaacggtgttcgccagtcatctgggtcttcgcccagttctgcctggttgattgccatgatgtccaggctttctgtgtgcacacttggtacgtacaagacttcaaaaaagatgcctggcgaatgcgggcctccacaggcggcagatttcgccagggtgtctgcttccacattatggcctctaggtaagtgttcgaccgttatgccggcgaagcacttttccatagaccgaacagcctccagatatctcttcatgccttcttctcttgcctcanaggatttgtcaacatgacttgccaccagtttggagtctggtcggatgagc

SEQ ID NO: 50969 - DNA, 468 bp, Oryza sativa
  unsure (1)..(468): unsure at all n locations
tctattaggacacatgatactcagcctttcacactntcgtggtttggtgcttcgagaggatcttgaatatcctggttctttgaaaagaattcgaagtgataatgtgggtgagtttaaaaatgcttcatttgaacaatttttcaacgacagaggtcttgaacatgaatcttcttctccttgtgttcctcgacaaaacgatgttgttgcaatgaaaaaacatgtcttggttgagatggctagaacgatgttggatgaatatataacacctagaatattttgggctgaagcgattaacactacatgttatatttcacattgggatttcttgcgacaaaacttggaaaacttctatgaactttattggactatacctaaagttccattcgtgtgttttggttgaagcgcttgcttgacactgaaaatcggataattcgaggatgtataccatggttggtcttggtacccgac

SEQ ID NO: 50970 - DNA, 420 bp, Oryza sativa
  unsure (1)..(420): unsure at all n locations
agcctttaactgcatcaaaccaatggcattctatttactcaccgcgttcggattaccacccgattcgatagcgataatcgccgtgatcaattgtggatcgacgccccaggctgcaccggctttctggcttattggcatccactgcatcgcacgttgcaccggaactttcgcgttccacggcgggttcgtatagtcatgctttgatgaacaacccgctaataacacaatcaaaaaggcaaaccatctcaatttcacttcttctatccttatagcctggaatcgccgttgaggtgacaacggcacacctaagcggcatgatatacatttcgtttctgtgtcagcaaggaattgccatgtctctgtttcacttaattgccccatcngtgtactgcattatacagcacgccgcgctgcgtggta

SEQ ID NO: 50971 - DNA, 385 bp, Oryza sativa
agtcttgatagtctaggtgatatagatgcggacaatgaagcctagatcctctttcttctttttgctgcttagcgattacccttgttgatgagtcaacttgtttgctgtgtatggaatctcactatggcattatgcgcaagccggcggtttccggaaagacatattgaagttctggataccgttccttccggactatttgccgctacgtgacttcaaataattgcgacgcgtctcttacggagtgtacacgtctggccaatggtggtgacattactgcagccacaggtaatatttggaactccgttaattctgaacctgcgcctgatcgaaggtcccactttgatttgtgcggcgacaaattcctatttatccaccccttctcact

SEQ ID NO: 50972 - DNA, 431 bp, Oryza sativa
  unsure (1)..(431): unsure at all n locations
agcttgtcgcatganaattactacttcctcggcccattctgcaaccctgatcccactgagttcattattggcgaaaccaatatgattccttttatattggccaacccagattaagtcactggaaaaacaccttcaaatcctggccatccctcgagaaaacttcacccgaaaaaagttggatcacatggttcaagtgcatgtcggctagcaaaagagttcattgggatgaaattggaatcggccaagcacttgatcttaccatagccaactcagctaaagatgagcccttaatggcagctgcttccttattttggtccaacaccatcaatganncttttgtcaaccagtggccgatgaccccaactctagtagatatcatcatgatcacgggtctggatgtcacctcatcagctaatcctatgagcttgaca

SEQ ID NO: 50973 - DNA, 454 bp, Oryza sativa
  unsure (1)..(454): unsure at all n locations
cgagctgcaatcaatcattctattgtgtggatattctanggtttcttttatcttttgnggcattgattgggatccaaaaggtaggtgctggggttgagagatcttgcgacgtatattccatttttttattgggatacatattttatcttgattgtttagcataattaattgtcactattttgtacgagaagtttatattattctatttattaagcttgaaataattaaaggctatttaatcatgtataaatggctttctcgttttacgtgtctgtattaatctttatttttttctgcaagattattgatacacgttgacgatatcaagatttataacattggtgtcatttatcttcgtgaaaatcatttatttgtcacggtacatcagcatatacaatagcttgacttcatatcatgactaatattcatagaattctgaaatatctcatcaata

SEQ ID NO: 50974 - DNA, 282 bp, Oryza sativa
  unsure (1)..(282): unsure at all n locations
tagctggccgttctccttgagaacaatnaccgggttctttatccactccggatggatgaccacacggatgaatccggcctccagaagtctcgccacctcctctcggatgaatgcttgacgttccggtgcctgccgccgaactatctgctggaccgggcttgcgcccagtcgtacggggagatggtgctcaatcacctacctgtggaccccaggcatgtcctgcggtcttcaggcgaagacgtctgcgtttgcccgcaagaaggagacgagcgcgtcattcta

SEQ ID NO: 50975 - DNA, 388 bp, Oryza sativa
gacgtatctgatccccactgtctgtgtgatccacgttagtaatgtcctgtgggtaaagtgtaccccctctgcataggttaacaaaactattcgaacagtcgtgcccacggtcatgggcggatgtgaggtgaatcctaacgtagtttagattgactactgctagtgaaattgctgttgtggaaaggggatcgatgtgtaaaaaatctgcagctgatgggataagctaggcccgggtggcccgttgaaagttgatgcccgggtggccagttgaaagtctgtggccgggtgtcaatcttgatttattgtatagactgatacattgtacatgctccgaccggatgagacgcactgtctaatctctgttgtttgagaagcactcacttagttg

SEQ ID NO: 50976 - DNA, 204 bp, Oryza sativa
tgagcttgatgcagccgcagctgctgaatctttacttcttcagcttctgatgacttgatgttggcccttcaacagttgtcttccgagtcaaaaaatgctcctgcacgaagcttaagttatgcctaagaatgctgcagatctaatggatgaagctgaatctgcactagtagcattatcatacgctgaacaaaagttgcaatctgc

SEQ ID NO: 50977 - DNA, 397 bp, Oryza sativa
  unsure (1)..(397): unsure at all n locations
caagcttacaattctctcttctaacctttcctaatacatatataatcatatggggagatggaccttgaggggtntaacacacatgttggtgatcatgatcatcactagttgattcattaagaataataattaaacaactcaattttgtcatctccacatgaaatgggacggtatccctagaagcaccatccatactgacaaatgttcattattctgaacaaatggccagacgaatatgcctgaagtgcactctacagtctcaggatctcagattccaacacaggatatattatctctaactaactaagtaccactaaacacgtttggtagaatgataaatctattcttctcaaataaaatatggtgcatcatcccaatgattcttgaatgtgtgtga

SEQ ID NO: 50978 - DNA, 381 bp, Oryza sativa
  unsure (1)..(381): unsure at all n locations
ccttttataccagcatcataactgctgctaattttacaataattttttggcaatttgatttttttaagataatggaataaacatcttggcctctgctcatcagagctataactaattattacaaagtatcactcttacacaaagtgtagttcatacgaaattaaacacacctaacaaaataaaaagacctaacccagataaggagaatgttttattcaagttgtntggaatctcctccatagctgcaagagttcataacgtcgctaagccacacatcaaccttatagctttcatatctcacacttgcactgtgctaaaccggactataagtacctgaaataccgcttatgaaatatggattgtaaagtatacatcctacta

SEQ ID NO: 50979 - DNA, 443 bp, Oryza sativa
ctatgtggttatgtatctaggagctactctcacgagctgatgagctgcaccgctctatctaaaaggacgcaaagcattacataggtacagctacagcattttgggcttaactaatgatgtaggttgctacaagaggccattcttggaaaaaaaaaaagattctaattgttgcttttttgttgaatcttggatgcagagtgttggaagaatgttcctctgaatgaaccataccgggtgatactgagtgatgtgagagataagctttaccatacacgtgaactatcacgggagttcgtgtccagcggatattgcgacatccctgaggaagcaactctgacaaatgttgagcaggtatagaaattcgcagcaaacatcaataatttccatgtataacatatgttcaacgatctttaacacatatttatcttctgtatcagctattg

SEQ ID NO: 50980 - DNA, 389 bp, Oryza sativa
  unsure (1)..(389): unsure at all n locations
tgagcattgcgatggatgagttgctcttgctccaaagtgagctccatgtcttcatgagttacgtcaatacctgtacaaacaactttccaaatacttggatgcaaagagattagatacaactntatcttgtgcttccaagcggcgtaatgtgtcccatcanattgaggagcacgcccggaaggcacggagacgatattgtgagagggaatggtaagtttgctgtaatcaaaaggtgtagtggctcccttgggtgatggtgttcccttgctgctcgctccatcttcattaccaatntccccgtacttttcacctaagtncgacatcgtggatcacttcaagcggtgaagcttgaatcaagagcaccaggctctgataccaattgaacgtgc

SEQ ID NO: 50981 - DNA, 487 bp, Oryza sativa
caccattacaagataataattcagttgaactgttatgtatctttccttacctcacgagcaatatagttggtgctaccacaggttgtatgcagctatccatcattctgagaaacaccaaactttatcaattagtgaaaataatatttaagataaacattgtgtacagctgaagtcgaccaaacataccccgaggtgttgacgtaaagcactaagaccaaaatcagagatcttgatgttgcctttttggtccacaagaacgttctcatgctgtaccaatggaataatttttacaagaattatgttacttattcatgaagccacaccgaccgatattgctaactaagtgcatcacatatgataattcataatattcttagcactcttgctctaaaacacatcttacattaacttgaggtctctgttgtagactcctctatcatggcattactaacaccataaataactgctgaaaagcctcctccttctt

SEQ ID NO: 50982 - DNA, 436 bp, Oryza sativa
  unsure (1)..(436): unsure at all n locations
agctngccgttcgccttgtgaacgacgaccgggttctccatctcctccggatggatgacctcacggatgaatccggcctccagaagtcgcgccacctcctcgcggatgaaggcttgacgttccggggcctgccgccgcactttctgtcggaccggccttgcgcccggccgcacggcgagacggtgctcaatcacctccctggggaccccgggcatgtcagaggtcacatcgaagtccacccgctccgtgcggaagttggcggaaccaccgaaggtgaacgggaggtcgatatgacccaacggccaggtgtgccccgganaacccaaaatttgcgagtaccaatgatagtacattccccttgtcggtgacatggggccggtggtatcgtgactagaggcttgggtagccgggtcaccccgtgcctgaccccttgtgc

SEQ ID NO: 50983 - DNA, 339 bp, Oryza sativa
  unsure (1)..(339): unsure at all n locations
tacgaagtcagcacttcagcgctatcaacttatcatatgaaacttgtgctgcnttttcttctgctatatgtaagggagaatagctaatatggttcctaaaaattcgctcctgggaccatttagtctttaatctatcatactgtctanacaaatcctataatcttgtcacgtgggttgacatagtccttgatcttaccaaaatcgccacatagatatgccatgtcacatttccatgcaaaatctatatgatttgtccaatttacccttacatatatcatttaaaaataaaatacaaaatgtacaatggtagagcaaaaatatacctcaagagggtgataa

SEQ ID NO: 50984 - DNA, 382 bp, Oryza sativa
cttaactgcatcataccaatggcattcgatgtactcaccgcgttctgattaccacccgattccatagcgataatcgccgcgatcaattgtggatctacgccccacgctgcaccggctttctggcttattggcattcactgcatcgcacgatgcaccggaactatctcgatccacagagggttcgtatagtcatgctttgatgaacaacccgctaataacacaatccaaaaggcagaccatctcaatttcacttcttctatccttatatcctggaatcgccggtgaggtgacaactgcacacctaagcggatgatataccattcgttcttgtgtcgccaagactgccatgtatctgtttacttaatagcccatcgggtactga

SEQ ID NO: 50985 - DNA, 373 bp, Oryza sativa
  unsure (1)..(373): unsure at all n locations
ttaagtcactgcagcntgcnagcttagccgtgacgagactcatgtgttgggacaatgctcatgtgtngcgcactcgtggagtgtgcgtaaagagaacatccacagcacgtgaatatccactaccagtaccggtaaaccgagctagtgtgaccatcgcttctcaaggatcatgaataaagatccaaaatgcactcccatggctacgcatggttcttgaataacgttaacataacatccggaataacgaaacatgaatcacgccatgagcctgaatatgggttgaaacacgaataagcatcactactctatagccatacaatcagtagaacaagctattgataataaatatgcaagtcaagccaaacagaacaac

SEQ ID NO: 50986 - DNA, 188 bp, Oryza sativa
agctgaccaccccacctgggcccactgcaaactaattttgtctattaatgtgtggtacaatctgaaaagttggtttgacacaaggattatacagtcggccttttactaaacttaaaccctactctgtccggatggatccccagtgattattgatgtatgattgggaaaataaatatgccctatagcac

SEQ ID NO: 50987 - DNA, 477 bp, Oryza sativa
  unsure (1)..(477): unsure at all n locations
agcttaagcggtcaccatcgcatcacgcgcgcgggcgtgcgggcgtgcagtgatcaaccgaaataacggccaatctcctgtgcactnttgactttccattttgccaatagtagtaggcaggattcgcaaacgtaagcgtcgtcgtccagcaagttattgacaatgttatgcacaaattataatcatgtacagttaccctctgttgcagattaacacaagctatgcacattaattgtattagcacctttctctcatgcatgccgccctggaggttcagggtgcaatgacacatagcatgtatgctacattcacgagtntgttaaccaaagatgggctccagccaaatggtatggcttcattcactagcttgccagatctagccaggcaggcagaaactgaaagctagtaataataccgggtaaactgccatggtcccgataccgatcgaattgaggattggacaagtgaactacacac

SEQ ID NO: 50988 - DNA, 445 bp, Oryza sativa
  unsure (1)..(445): unsure at all n locations
ctatactttccttntacaaacatacatattntagggatcgtattaatgaatgtcaagggcaagttgcaattgtggaccgatgtgtggtgtattagttataacacttctcagttactatggtggaagttggatttagccactacaacttgcgttatatttcagtgtgcacatgttaattattattaatggggtgctgcagtagatcgaacagaatgttctgatggttccaaattaactaaaaacatttcttttagctgataatgcaaaataagtcaagtacgtactcggatatatgcagtcgttagtttttttntgtataatatgctatctgtactgcagcattngtatatatttgcttatatcctgaaaggtttgatctaaactattgcaatgaagtaccttatgtncatcaaaatctaggggatgctatgattagcactataat

SEQ ID NO: 50989 - DNA, 435 bp, Oryza sativa
  unsure (1)..(435): unsure at all n locations
agcttcccggtttagctcngctttatctntcccgctgtctttgtaatcttttatanttttgtaagacgtgggtctgtatgtcaacaattgtcgtttgtgtaccctggctggtcctggacagggatttaatgcacattcagcttagaaattctggttcgagaatttctgggtgtgacaaagagcctaccagcacattgctcacaagtaacaatacaagcctcaaatctcacattgcaaggcataaaataacaaatttgagcaaaaagtgattcctagggctatcttccaaactccaatttcaaccgattaaaatggaaaaaaataaggggaatttaggagtataccttgctcttcaatttccgcaagaaataccgcgganaacaacactaaatcgaccggatttgangaagagaggtgacagggagagagagggga

SEQ ID NO: 50990 - DNA, 369 bp, Oryza sativa
  unsure (1)..(369): unsure at all n locations
taacccgaaaaagtgtggtttcggggtaagagcangaaagttgcttggtttcttagtatctaagagaggcatagaagcaaattctgacaagatcgcagcgattcaccaaatggagccaccaaaaaacacaatggaaatgcaaaggctgacaggaagaatggcttctttgagcagattcctttctaaatctgaagagcagggtttgccatttttcaaaaccctaagaggagcaaacacatttgagtggacggccgagtaccagaagggctttgatgatttgaagatgtagttacagaatatgccaactttagcaagtccacagaaaggtcaacctttactaacgtatgtagcagcgacaccagggacagt

SEQ ID NO: 50991 - DNA, 492 bp, Oryza sativa
  unsure (1)..(492): unsure at all n locations
agcttgatcacaacattatatttattcaaaagaattaaatagtcaaagtcctgtcccattgattttaaatggtacaaaattacttccttttgtgactagagggagtagtagtacaactcaatacaacaatctgatcaacaatggcgcattatcgatccgcggagtaagtacaacttaaaaaaagaacttcttttaaaaccaagttatcaactttctaatatttaattaatttacttatatttactctcgaataatggttaatcacanaaactcattttcattcatcatccataactctgttgagaatgcatataggtgtgccatcctacaagcgcttcataagcaatattatttgcccagagctcagtgggtctatatcaatgcctgaactacctttcagaatcacggggggtaaattaataaaccagtacactataaaagatcaagaaaatatatatggatcaatccaggcaataccatttaatctggggg

SEQ ID NO: 50992 - DNA, 348 bp, Oryza sativa
cgacctgctattgcggaccatggaggagaatgagaacaatacggatgatgttgatgggcgcactcgcactgactacgccgatctcaagatatctctcgaagttccgctctcagcagtggagataaaggtagagatcctcacctctgatctcgccactctgaatcataaaggccagcagttggagagtagcatccagcgacagccgagtggtgatgagtatgcacgaaaggtgactacagcggttttgcccaacgaagagctgaactaccataacactccgttcatcaaagggcaacgcgatcctgagtttgcatcctctgaccaacagaatcacgatgtggtgacctt

SEQ ID NO: 50993 - DNA, 288 bp, Oryza sativa
  unsure (1)..(288): unsure at all n locations
gcctattattcattagagacttgttggaaagagaagcgctatcatgttctatctgaaacccgccagattgttataaagacaaaagccaagaatcaatgccctacaagtaagcattatcatgtgcaagattacaagcacctaccacatcaccccaatacctgagaccacaaggatctattaaacacaaataaaccaaatcagaactactctgctgtgaactcaagttccaagtctaagaaaaaaaaaatagaaccttcatattagtctatagatcagncctatacttct

SEQ ID NO: 50994 - DNA, 372 bp, Oryza sativa
  unsure (1)..(372): unsure at all n locations
aacacagtgatcaagattgatagaaatatgtaccaactgagtattcctgctctctgaatacgctattcttcaatgtaacttgttaccatgttttcataacagatagtagctgaagaatcatagcttctccatatcttacangggaaaatacaatacagaaaactaattgttttaaaagaacatggaaatgctatattaatatgatagaaagttaaacacaattaaatatattcttctcttaatctagttagttccacatacctgactgaaacacgattcaataaacaaacagaatcctctaatgtgtgagacactgagtcatcccacacaatagttgacgataacagtgaatagccatcaaattactcagct

SEQ ID NO: 50995 - DNA, 330 bp, Oryza sativa
ttgacaaagctttcgtcattccacaatccaattcttatacacaaccaccctatgtgccagacataaccaccaattcaagaacaccacaaagctgaacccgctttcccatggcctcaagccttaccaacacaccaaaggcaagctagctagatccatgacacacgtgacaatgctgcgcagtcgatatcatggctctaccgagctgtcacgacaccaggcataacttgatgatggtaggcttgaagtagctctaaaaaaagatgctcgaagtccaactacaagtgataagatatcattaaatcgctcttgttcctttcaactacgagtgat

SEQ ID NO: 50996 - DNA, 412 bp, Oryza sativa
  unsure (1)..(412): unsure at all n locations
atctaagtgttggcactagcagggtatacaaactagctcgtcatttgtcaacatatacaatctatcatataaaatcttagtgccctataaaaaataatcttatggagaagaatatggagaatttaaaacatctagtatatacgcctaactgcaagtccaaatatactntctctagtcaacattactcgtcgtttccgagaagcaatttgcactgagtgtagtttaattgagttgtctganacgacgtatatttctgtccagagggagtatatatttattggccaaattngctaccggactctttaaaatctgtgtatcagctgtgggacccattaaaacgtgaattggctattaacactctaaaaagtgtaattacttctatacaccgaggttattgtatttttctcaatat

SEQ ID NO: 50997 - DNA, 328 bp, Oryza sativa
atataacatcggatcataattctaatattttgaccgcttgtttctttaaatatttaacatttaaaaaatcatatccactttaattcaacactgaagagaaatatgtcacattaattgggtcaacattttctgacttttatgtgtcatttaagaaattatagaattataaaaataatgatatatatctaatcaatcgtatataacttgaaaatgtaagtctaatctacctatgcatattagtatgtcttatatatcaaaacacatggctcaatattgatatatacaatatgttgttacacatattattacgtatctaatatttttacat

SEQ ID NO: 50998 - DNA, 494 bp, Oryza sativa
  unsure (1)..(494): unsure at all n locations
ctcagcttccctgaaacaccctaaagactaccgagagatcatntcttcttatttccgtcacatcaacatcggtgaatagacaattgaatcccatggaacattatcgagaaacggacaatacattgtaatctaaagattttaccaagaggacgttggaaatggaaaggtcatttgatattgcaatcttacccaatccaattatctttctctttccatcatccccgaagatgatgttctcttgagaagtgccatttggatcatgagatgaaaacattgattcttctctggtcatatgattagtgcatccactatcaatcacacaacttcttccaccggagagatatttctacaagagttcaatgtctagttttaggtacccatactcgcttgggcctctcatgttagtgacagtgccatagcacccaagtactctctgatgaacattttgcccttggcaacatttaacactaccgaccattacattttctaaacat

SEQ ID NO: 50999 - DNA, 461 bp, Oryza sativa
gcttgagctcaatataagaggctctattgtactatattgttggtaaccaccaagattggtaatctaagcattggagatggagttgagaccgacgtggaaatttagatggaatcgctcgatgaatagagcacaatcggctgatgtccgaatctgctgcgactaggatcggcgcaagtcgagttggacacggttagccgattgagccgaatccgataatatgacacggcatacgttgtcaggttatgttgacgtgcttcatgatgatttccacgcatggatggagtcctgagaacgcaattgatagtgccttatgatgactgccacgcatggatggagtcctgagaaggcaattgatctattaaataggatatttatgtaattctctaagaatgttggcaaatgctgcgcaagactatatatctatagttgtagaatagcagctgccgaatgactatttgatc

SEQ ID NO: 51000 - DNA, 432 bp, Oryza sativa
tgtctggagaatcgtgatgagaagacttgaggtttgctctgttcatcgggagcgcaccctataacatgacccacagtatggaccgtgtagtccatagtgttgtactctttctcctagccttattcccactgggttttggtacgagttttgacgaggcatgagttggtcgccgataggcccaaggaggagtgttgtgaaacaactctatgagatatgtttcttgtgggctaatctgaaccggagtagagataagatctatctcttgctacgacccctatatatataggggcagggtctgacatctaatgttggcttgtactcagatgaaaactataataaagagagagctccaccctatatatgtgtctattgtctacttctgcaatattctcgagggccaaaggatgggcgcgggtgttctacatcatctca

SEQ ID NO: 51001 - DNA, 146 bp, Oryza sativa
cacattgtccttgtaggattacagcgggctggagattaggaaactatttctctttctacatggccttctatagaactttgtaagctgcgttacagcttttgaacgctcccacagcgatcttctgtgtatgataacctattgtggag

SEQ ID NO: 51002 - DNA, 265 bp, Oryza sativa
gagcttatctcttacgctccaggaatggatcagtcataacatctccaccggctcgcctcgaccggcgacgagtggtgtgttcgcctctgccgcctcgttcgtcgttgactggtgcttccgcctgcacggctggcctattatgccgccggtgttgggcgtttacgttttcaccgaccggccgccatgttcgccgccgactggtgcttccgcctgcacggctggcctattatgccgccgatgttgggcgtctacgtgttcaccgacc

SEQ ID NO: 51003 - DNA, 368 bp, Oryza sativa
cttgtattgccatgtgttattataaagtccatgcattattgttaaagctctctttatgtcgctaatatgtagtaatgctagttgcttccctgttacctaatttcaagtgtagttaccgaagtgatctcagcacgtatttggaaacaaccgttgccttctaatgtgatatcaagtacaaaattacctatataaccctcctcccaatttgtacttaataccttggcctacattagtaatacacctctatatctaagctttggtacagatcgtcagaaatcaagctatacaccggtataatgcctctctagcacgttaaataaactctcacgaatctatattgttttctactacaatgagagcacactgta

SEQ ID NO: 51004 - DNA, 481 bp, Oryza sativa
  unsure (1)..(481): unsure at all n locations
agcttccagaaaatatatggatgtagggaggctagattngccaaccactacagcttccagtagggagtctgatcatcaagcacacctcataattgatcaatccatgcaaaacccaaaggagaaccgtgctccttcaattatgaaagaagttaaagtgacacagtccctccatgacagagaaagcaagggaagaattctgggtaatcaaaatgaaattcacaaaagtgaagtaaatcttgacaaaggatggaaacctagtaatattgtcactagcatgacatcatttataccacttgtaaaacaaaagcaacggcctacaacagtatgtggtaagtcttatgtgtgtgaaatcattcttagctaaaatgtatgttgaatcattatgctaatgcaatcttgcgataagctaggatcataagcacaatggcattcaacatcactacatttcctctgttcacatattatgaatgtcgcatatatc

SEQ ID NO: 51005 - DNA, 415 bp, Oryza sativa
  unsure (1)..(415): unsure at all n locations
tctagcctgaccactgctgaacccaaattaccgagnnttggggcatctgtctgctccacagattcagagtctatccgatgatagtttccatgattntgcagccttctaaaatttggccaggatatgatacgattaagttcagattaatcaaactctaatgcagctttgtgcctttggagatttgggaagctccatggcgtgacaaagcaggagatcatgttgggccacacaggatttgtgtgaaagccaaagttntaggatcaaatggcatcctaacgaatccttgcaactcctttgagtttctccacgtgttatgtcatcgagtagccgcanagaggattaggaggccatcatactcacttcattaccctaattaattagttctcttgtgcaatctcataatgcannaatctct

SEQ ID NO: 51006 - DNA, 415 bp, Oryza sativa
  unsure (1)..(415): unsure at all n locations
agcttatggaatgagntttgtaattagtatatgtttaatactccaaattagtgtccaaacatccgatgtgacagggacttgaaataagtccctgaaaaccaaacagccccttaacattctaaatggatctaaacaagccctcattnttatcgtgtcagaacatgtcgtccatgcatgcatagtttaaattaatgggcatggataatgcatggtggaagtgaacagtggtcgtcgactcgctagcttccgagtctggactctggagaggatgacatcaccacggcagtccagtccagaactagggactcaatgttcgcaaatgctntgatagtcgtgccgtccttgcattgngatgtggactgtggtttgtgtaactgggccctactcacttgctttcctacgagaggagagagta

SEQ ID NO: 51007 - DNA, 447 bp, Oryza sativa
  unsure (1)..(447): unsure at all n locations
cgtctcggcctcttgcttgttcactatagttcgctctgctttgacgagtgcgagttgttgccttgttgccgctgcgctgggtggagggtttatatagcgggaatgagttggggttggatggtggggatgcgggtgtctgacaaggcgattagctttgttcaagtatccgttggaagataagctccacgcgagagagtgcgggaccaagagggatggacgagatacccgccctctattgcgtgcagagatggcagcattttctgtganataatagcagaaatcttggatagcctaacattagtggctgatcacatttgagtgatgatatacaattcaaactgatgatcaaattcgatgaattctagaagaactgaactgaaagattacctctactactgattgacatcaatgaatcttataatgtttattactacattgaacgtgagc

SEQ ID NO: 51008 - DNA, 394 bp, Oryza sativa
  unsure (1)..(394): unsure at all n locations
agcttcanggtgttggtgatctttcacgaaaggtttcttctttttagaaaanaacgcgaatattagggaagtagctaatatcanatactaattattagaaggggtggcttcgaacccaggtcccactaccttgtcgagctaatatcaaatgctaattattaaaaggggtggggcttcgaaccaaggtcgtctagcccagtaccttctcgagctaccggaagacctcaatttcgtctttttagcatttggcacttgaagtgacataaatggcgccgcttttgtgcacttcttgctgagaagagcttcttgtctacaagtagatcatgcatattgtagttngcatcgatatagattctttctttntagattggcacctttgggggttagtactcaa

SEQ ID NO: 51009 - DNA, 407 bp, Oryza sativa
  unsure (1)..(407): unsure at all n locations
ntcacataanatataagcaacattagttgcttgatcctcccttcattttagcctcaaaccctntagaaatcatataactaatataagcccgataacctatataccttataaaggagatatttataccctataccctagcccttctagccgtttattgttcttttgacatttcatggcttttattgaatttagttctttctcttcttcaagtagagtctattgtattttggatgacaacctgtggtatttcgaggatcggataatcaagttgtctatcttggagttatntgcgttggagcaaggcaagttattattcctcccctttgagcataataatcctatattctatatctctagtatcctatgcattagccatatatgattntgaatgcataacctgaatatat

SEQ ID NO: 51010 - DNA, 296 bp, Oryza sativa
ttaatttatgaacccgttatctgtggaatcggatgtacctttttggaatgtccgggtatattataacctatttcagtcgtattaaaaaaattactgtttatgaaagtactctaatacggtttatttctttctagtggcggaggatacaagcactcacaaactttcggcttagacatacacaaattaaaggattagggggtactgcacggtgtgactgggtgagaccgcaaataatgaagggggatggcggtggggcaaactcgaacttatcgctacactagacagaaatatacacc

SEQ ID NO: 51011 - DNA, 171 bp, Oryza sativa
tctattccactatgcgcttggaagactaatcatgcatgacaatctatcaatatggacgagaatcgacagcacaacaatccacctatcaaatagacactgtgagaatgagacttatgggtggatgggcctagaactcagaaatgatcaatctttatgagccacaacatggtg

SEQ ID NO: 51012 - DNA, 352 bp, Oryza sativa
  unsure (1)..(352): unsure at all n locations
ttgacttggagtggcttgaagctgatttccatgtctgcccggtctttctgcanactcaccagcttgctgtcaggctgagacacaatatagaacaccacaaatttgctcatgttgcatataaaaaactgaccatttggagaaaattcgcattgcaaggtggtaaaaataggatctntggggacctggccaaggtcctgcaagaacttattgataggatggccatggactctttccaatttgtgctcggtgtttggatgcagttaacaggctaggaaaatgcatcaatgaatgaccctgcatttattaatatgatagacagttgtaatgccactgtaataattaatatctgcaa

SEQ ID NO: 51013 - DNA, 433 bp, Oryza sativa
ctcggcttcatacaactacaggtacatccaccatccgccttcaagatactttcctgcacggcttgcttgcgatagataccacgcctgctcctatcaacacacattatttcataccgatgcacttgtgtgccttgagcaacaactctatgtctccgtgcctctttgattttatcttccatgtactttgtcactacgttgccaaacactatgttgttatcggccatggacggaccaattttcttgtatcgatccctaaagtatgcttgcgtgccgtgaatgatgaattcaacaatagcaaccaatggaagttcccgaactcctcgcattacccagttgtacacctctgccatattggttgtcattatgccataccgagatccatctgagtcgaacaatagagctcacttcttcttaagctcattctcaatccact

SEQ ID NO: 51014 - DNA, 415 bp, Oryza sativa
  unsure (1)..(415): unsure at all n locations
ggcacatgaggcactcaccaagaaatgtgaatagtcaattntgtaatcatggtagctagaagattcaccggcaaacagaaatccttgatagctcaatcaacttcaaccaccagagcagtgcagtgcaccatacagactaaaagctaaggaaagaanaatctactgactgaacaatttcactgaggcaaactntntgcggttcatggagatggattcgatctaatcgataacccagcttattccataccaaagattnttctcgcggcaagtcggcaggcaaatttgactctaattttcggctgtcctcatgagctngatgccacanggcacgagcgcgttgcgcttggtgctcgggcttgagtgcttgaccttgacgcctcgncgacgataggaagatagataaatgggaactgga

SEQ ID NO: 51015 - DNA, 418 bp, Oryza sativa
acctaagaaactcagcctttccacaaaccatgtttaacactccattccatttctatattctgtaagatatgcatcactttctctgtttgcaatcaatatgtacatgtatggaaacaactaacgctatattgctaatcaactaacatcttcacatggtgcatataggacatatggaagattcgccttcaactactaagccagtgacatggcctccgcttgtatggggagtgctttgtggagcaacctgcctctggtatgcctatggcacctttcggtgattatatctgctcggagagagtattcttctacttcctaataatcatctgagcacctgtagaattggaaactactcttttacattataacatgtgtgcctgcactacattgctagcatcatatacctaatatcggttaaaag

SEQ ID NO: 51016 - DNA, 441 bp, Oryza sativa
  unsure (1)..(441): unsure at all n locations
ctcactacttaatatatcatatttacaattattaaataattaatatcaaatgattagattatggtcaacaaatatgctaataaataaaattggtattattcagtagagtggatgtaataatatttgtttctagcatgttttgtcacagtagcaaccatgtaaattaagtacagtaatgtctcaaatgaacggatgtatatgaagaaactagcactcattaatgttcaataaaatccatgacttantaattacttacataaagtttagcctcatatttngtaactaaaatataaacacacatagatgaatctttaacttgtttaggagaataagaacagagctagatgtggatgaatcaccaaataatttaatcaatgcaatgcatatagaaactagctaatgtataattaactacaatatattcaggagtcacttggagca

SEQ ID NO: 51017 - DNA, 383 bp, Oryza sativa
  unsure (1)..(383): unsure at all n locations
gtcaccagagcaagcgggttttgagatactcataaggacaaataatcggcatcttaaaccattgtatataaacggctatgtcaatgagaagccgatgtccaagatgatggttgatggtggggctgctgtgaatntgatgccatatgctacatctaggaagctgggcaganatactgaagatctcatcaagacaagtatggttctcaaggactttggtggcaatccgtcagagacaaaatgagttttgaagttggagctgacagtcggcagcataaccatccctacaacatttnttgtcatcgatgggaagggttcctacagcttcgtgcttggagggattggattatgccaattgttgattccttcaaccatgcatcaatgtt

SEQ ID NO: 51018 - DNA, 367 bp, Oryza sativa
  unsure (1)..(367): unsure at all n locations
gcttgtttctatccttcaagaatcggaagaaacaatagatgttcagagagcggagatttctaacctttctcatacacgggatttgatagatcatgaggtctncccaaataatctgttaattcagaagatgtggaatgggctataaaagtgccactataagaagatgaagttctgatgttgagggaaaaaatagatcgcatgcctcatgtagaacatccaaacggtgaaggttctggtgctagttatcttgaattggacaaggaaaatgattttttgaacgcaaaatacatgaactcgggatggactgttctgaattaactgatgataatctggagctatatacaagttgaaaaagaagtgaagtatc

SEQ ID NO: 51019 - DNA, 403 bp, Oryza sativa
  unsure (1)..(403): unsure at all n locations
ataagctacaagctaaaagttgagaaacccagatctttcaacctctcataattgtaagctcacagaacaaacctttaatcgtctgcgtgagcctaccagtgccgatatcactctctgctgccaacgatgggctcttgtatgtacatcacgaacatcatattgatctgtgaagnttgcttaaaccactcttgtcgcttatactgcccttaattgcaggtagttgaactatctacactcggtagtccgtatcgatattgcttacatcacattggctgcccatttgctaacaacattccgccccatatacaagctctgctgagcgcaccattttttctactaagtacgccaatgcagcggacacgtgtctgacactctatcagaagctcatattgccttactaaaa

SEQ ID NO: 51020 - DNA, 352 bp, Oryza sativa
  unsure (1)..(352): unsure at all n locations
agctttgttgagcctaatacccaaagaagctatttattacttttagtcctcgcagactaagtagaanaaatcaaactcggcattgattgaccaagtaatcatattaaattgataaaaaatcacactccattattatgatgatagccccccgactgacaacggctagaagaaaacttggtgttgacagtcaaaatagggaaatacaatgataagcttaagcatagagacggcgaagatgttcaatattccaagagttgtcgacgagagtaccgtcttctctcttgagtcgataggaacctggccgggtgacttcagagataataaatggcccctcccatataggagataactt

SEQ ID NO: 51021 - DNA, 495 bp, Oryza sativa
  unsure (1)..(495): unsure at all n locations
tctcttactgaaggtgggaganagatatagcgagaatgagtactattactttactcatctatcctcaccggctgatgcatgattaatgtaatggggtacaaggggtgataataatatgggttaagtattgcactaaacaacatttaacagtcacttatgtgcccagagccattttataaagacaatcctagagttccacagtgctattaatcaatgccgtgaaccctcacgaacctgccttaacccaaggcctacgatgattcataccgaactggctacccgaccctgtgttccagcttgtgccaagccaacccaggctcaccatttcacattttagttgttgagctacatttagcgaattatacactatcttgtgtacattgctccgcttgtccattaccgaaggcgcagctattccaatatgctatgctctgatcagaggtgtcatctttacccatcagacacatctttctcangtgtatcctcttgcacata

SEQ ID NO: 51022 - DNA, 474 bp, Oryza sativa
  unsure (1)..(474): unsure at all n locations
agcttgttatacgaacgaaagattaccgcggaatctacggacganaacgcggtgacgatcggaaagttacccattttcttttccctttgtttttatttctttttcctgataataggagagcatgcatatttatatttgaccattaggatgggtcaattatttgactgggccaaaaatagaaagatgcacacacgcgcgcaggccatctncatctgaccttcccaggcgcattgtgcacctctctcatcgctacgttgccaagcccatctcttgattgctggatcgcggaanaaaaggagaactgaatcggaggaggcgatgtgatgcgctacgggctgagaaaaaaanaaggaaacacatgcgagcgccgagatataaaaaacgatgacgagggaagtgattatgattcgaaggcaacggaccatactatccggcanannatattnntaatttataatagtagagattaataac

SEQ ID NO: 51023 - DNA, 433 bp, Oryza sativa
  unsure (1)..(433): unsure at all n locations
ctcagcttccatgtagcagctnggtttcacaaattatgcgtactatgtgattttcttctggatctagtacagntcacatctttcaccctcaaatttatttttttctcaaaaaataggaagtactgtgcttcgatgtttacttgattttgcttatgaacaagcatatgttagcgtcatttgctgctcaccatttaattgatagaagcaggagcatttggaatgacattagttatgcagttttcttttcatatgctacaattgcttagtaatcagcatatcaggcattaaaacataaactctcatagtctcggtattatggcagcacttccaaactcctaatgctactgtcagtctatctgtcattnttgcatatcttnnctgccataacaatttttgctgcatgattggaacgctctatggcttgacaatgttt

SEQ ID NO: 51024 - DNA, 472 bp, Oryza sativa
  unsure (1)..(472): unsure at all n locations
gacccggatccttaagtcacctgcggcatgcaactngttctaaactaaaataagaggttcgaattctaaaatctgtataaatctcgttctagaacttaaatatttattatagctcgaggaattaacctgctgatgaaaaggaggacgggtcgtccaaaagagatactccacctgtgaagtatttttccagtacgtagaacaattagtacattttgttaaaaataccaaaccgacatatacattacagctgtgaacattacactgaaataagcacaagattagtggggtactagttaattaatggcttattgtcaagttgaagtgcttattgtcaagttgcagaaaaaatcttgaggctgtgttcggattccagtaatgggaactaatccctcccgcatggaaaacggagcggtccattagcacgtgattaattaagtattagctatttatgttacacatagatatatttgat

SEQ ID NO: 51025 - DNA, 393 bp, Oryza sativa
  unsure (1)..(393): unsure at all n locations
taaccaanacaacttataatctgaaacggtggagtacgttanatgtacacgaaaagtactcttaaaatcaaacttcaaaatntaaaatcagttggattatactcaaatctgcgatagagtaaggtcttgtcgccaaacagagggtgcagccccttgaacactccggcccatgaagcagagcccaccttcctatcgtgccgtgcgtccactcatctgggccaccaatcagtatcgggcctaccacggcctgatactgatcatatctataactcccctagaaaagatattgctttgttgcccaaataatcgtagtcaacacgcgacaaatatcagngtttcacaccacaattataagttcgggttgaaataatacgatgtgacgataaagttaga

SEQ ID NO: 51026 - DNA, 366 bp, Oryza sativa
  unsure (1)..(366): unsure at all n locations
agcttgataggtgttttttttaagaaatgtcacacatatactaatttgttggattacaggaaccctgttattgaatcactggaggaagaaactgtatgagatggcaagaggaagatctcataccangttaagtgtttggtaccacctgttataattttaaattttctgatatgtatggctgaagaaatctaaactgttgtagatggagaagaaccggtggttgactcgctcgagaaataagaagcttaagaatccacggaagaaatacagggtaagtagcatagtatatcataagacagtggagctaatcattgagaatgcactgacttgttgcttgtgagtgttcaggttaagcatcaaacaaaa

SEQ ID NO: 51027 - DNA, 247 bp, Oryza sativa
  unsure (1)..(247): unsure at all n locations
tatcgcgcgaaagaaagaaaganaganaggaagaggagatganaggtttcaagcagcagcagcagcatggcggcggcaatggcggtgggcacgggaagaggctggagaggcggctgtcgctgtgggagtacaagaaggcggtgtcgtggtccaagtacctggtggctccgccgggagccaagatccggggtggtggtnatgatgcttgtatctcccatctgtcctatctggctatctngttcatttt

SEQ ID NO: 51028 - DNA, 327 bp, Oryza sativa
  unsure (1)..(327): unsure at all n locations
ctacattttggtttgttgatatgagcctctcaactgtctgatattgttcatcgaggtccttcattacttacacatttcccatgagagttntgcaagtaatttatctattactacaccttaaatttaaggtaatcagntgttattggtgttggagtcttattaatgtccttcagagaaagatacctctggtgtatgatttactaaaacaattatcatttgctagtccacagttgctcatatttgttgatgcgccccattgttaatcatataaccatgaaccctcaattagttgagatcttatagtgcaattntgtttaattgatctct

SEQ ID NO: 51029 - DNA, 436 bp, Oryza sativa
  unsure (1)..(436): unsure at all n locations
gctttttttttatcgatgctcccatgattgatgcatgtcagcagaactcattcacctttggagcggacattggaattgtgcttgtcaccagtgtcgagtacttaggagagatctggtnagattgttctcttctatcatttgtacaaggatgctagctagatatgctagcccatttgtgttgcaagcccatcgagcagtggccaccatgtgaatgtgcgccttctagccaaccaaacacacagctaccatcggcattacaactaatggtcaccaataatgaggagaagagatccaccatatctcttgggttaattggatccatgccattatannattcatgccttcgaaatatgccattactattcgtctatttagaaccataccattacaatattacaagtattcgagatataccaccacatactctgttgatatt

SEQ ID NO: 51030 - DNA, 392 bp, Oryza sativa
  unsure (1)..(392): unsure at all n locations
agcttgacgcntaccctacctggcgcgccaactgtctaaactagatttctgctataatanaagggggtggctatcaagctggaaaagtgtatgggtttggagacaaaatatttatacatgttcacgccttcttataaaagaagtaataccctactcctgtccggggatgaatccgccgagtgtattattaattgtatgattcgggaaaaatcaacatctgcccctataagcgctccggaccccccttatataccggaaggagtccggattacaaaagataatctatattcctaacggaatatgaagatagaggtataatacagtcgtaaccgactaagtctcngggtgtttcttgataacaagttaagaaaaaacccgagatcagataaata

SEQ ID NO: 51031 - DNA, 196 bp, Oryza sativa
tgaagtatatgcccgagtggaaacgatgtgactaccgtgaacgggtgactctgaaagtagcgagataatttcctgatggtaattaacacaccatattgtaactttgtgaactctaggatatcttgtcttggaattggcgtaaacctcgctcacgaaatatattggacgttggactttttgaattggccatcctctc

SEQ ID NO: 51032 - DNA, 407 bp, Oryza sativa
  unsure (1)..(407): unsure at all n locations
agcttcgatgctgttataatggttgaacttccataattatatgacagttttataagcgagaagtactttgccatgaagcacagggtggatccaaggctgtgcgaggctcaccaccggtggatagctccactgtagattgctttcgcatgcttctgcacaagctctagaaaattcctaggtccgtcattgtgaagcaatggccatccatatgtaaagccccatctggacacttggactgagaatgttccgcacagttgctcttggattggtagtgccagattgccgatntggtaagcttactactgtccaaaattgagtaagtgcctatnaaagataagaatgtgttaataaggtcagaactactattataaggtngtcaacctaccagatctataataaacagtata

SEQ ID NO: 51033 - DNA, 511 bp, Oryza sativa
  unsure (1)..(511): unsure at all n locations
tatgtgaaananaagagataaacgaaagtnagaagtgttggctnttatacatatagctagttatacacatgctccaatatatttacattaaatttatagtgagataaagagagaagagagaanaaaatagagccaacattatagtgttaacctattatacatgttaattggaatatgggccaatagccaatactccctccatctacttttgatagtcgtatttcatcttggcacacagaccaaggataagtaattctacttatcatccatttaaacatgctactagttattactcataaacaagcgattcattatcgatgccaatgtagccaatcttgtgtgttagagagttatgcattanatccgagaaagcattaaagaataggctgtatatgaaatatcctatcaaaatattttttatattggaaaatactatanaagtgatggaggagtagtactatactatcaactttgtatacatactcctatctaaatatagaacactattttt

SEQ ID NO: 51034 - DNA, 466 bp, Oryza sativa
  unsure (1)..(466): unsure at all n locations
agctttgacatgaatgtaatactctggaagcatctttaatagtatctgcagcacgtattacatcaaaccaatctgcagtaggcatatcttatcacttaacaaggatatacactgtttttatcacaaatctttgttgttcttgtaaagctcaggtttagtcatttttaattaacaaataacactattgttattgcaagaaaaaaattgaaggtgggtcataccttcagctcagttttcctcaatgtttttataacaaaacgttcatctcgagaaagatagagaatgctgccacttttcccaggtgaagaaagctcctttagactatcaccaccacatatagacatcatgtaatctgcagcatcgatatgaaacatttctcgaagattcctggtagagtaaattatgagctaataagatatggagaanattacaagaacaatngacagaattgatcgaactttcaagt

SEQ ID NO: 51035 - DNA, 375 bp, Oryza sativa
aagataccaatgcgagttctactcctggaggtggatgacccatcttttattgcccatctgtgacagttgaaattcaagggttgatatttccagccaacctcattcttctcgaatccaaggacctagatgtcatacttggaatggattggttggccaggcacagaggagtgattgattgctccagccgcaccatcaagttgaccaatgcataaggagaggttggaatcattcagtctccattgccgcagaagccattgattagtttaaaccatgctgctggtgaataacaagaggttgcaatggagaaaaccactaagaatctggaggcatattccatagtcagagagtatccagaggtttttccggatgatctga

SEQ ID NO: 51036 - DNA, 403 bp, Oryza sativa
  unsure (1)..(403): unsure at all n locations
catgcttanatatcctgaactcatcaggtgatagtgccatgcaagaatggtgagaactacctatctaatttacgagaatgatctcaagtatattatatgccagatatgatatgcatactggtaaaatctggcctctagctgcactgaaacacaaataacttataccctgtaacaattcttattgctagccataactttttacatcgcaatctagttcataactactgtgggaaccattgtgatcctggtactgtactagcaagtatcattccttccaataacactaccttcttttacatgtgcagggaaatctggggacattcaagcttagatgaggctcaaggaaagcggatcgacccatttttggatgcagtaataaccacgctgcttatgactcagatat

SEQ ID NO: 51037 - DNA, 386 bp, Oryza sativa
  unsure (1)..(386): unsure at all n locations
actcagctcgcttacatatctgntgtcgataaattaattacgtgacactaggtttaaagactggattacacgacgtaattcccatgtccggacattcttgtcatgtcttcaatcttttcccctttagcagccaaacagagaatccttgtcaaggagaaacattgctcctctgcatggtatcgcacgactaagcgcaagggaattctctggattttccacagcctatccttctcctcacaatacctccaggtataccattctaccttctgcccatcctttgtttccaagatcatcatggtacctacttctcaacatggccgtgcacgtgcagcagcccaactgcagtgagagctaacatgtctataccggtgtcgccatgctcaagc

SEQ ID NO: 51038 - DNA, 359 bp, Oryza sativa
  unsure (1)..(359): unsure at all n locations
agcttgtcaatttcacagcaaacacatgttctttgtatgatttaaattangaattaagctccgaanaatccgagaaaattccagagagtataattaaccatggataatttaataaaaattaaatccatccatgctttatatttaggaaattntatttcccacatttaacttcactttgtaattaatgaatataaattctaataataatttattaaataatntataaatcctaaaacgaaaatcaggatgtgacagcgacattctccgactacgttaatcaatgaccagggaagcttaccgatggagtgggcatcttccggtggttgccgagcacggaggaaaatttccttcccgtcttc

SEQ ID NO: 51039 - DNA, 474 bp, Oryza sativa
  unsure (1)..(474): unsure at all n locations
agctttatatnagtagatagattcaagattcaacccatatttccctttttcttgatcgattaccacttctagcaaaccctgtattattcaatggcaaatgaaaaaaaatgaaaaagtccaaatacccctctaaactatggataaaagtccatctaccaccctaaactttaaaaccgggtatctaactccctgaactctgtaaaatcgttcatattacccctaaggtggttttgcatantttgtaatcttaaacgaacaacttttaataaataatataacttaattgtataccatcaattgtaagtcatcaatttatacttatacagtgatgttgtgctattattatgttggaacttggttctaagtgagagctaacaagtgattaanaagaaagacttgagtggagaatttaatatatatgtccaatgtgtatgtcacgtgatcaaactcattcaagttatatacaaatcagat

SEQ ID NO: 51040 - DNA, 455 bp, Oryza sativa
  unsure (1)..(455): unsure at all n locations
tcctactgttaggcggaagaaaagaaataacatctacgtacgattaataatgataaagccaaaaaaatgtgtagttagtaccggtggaataaaccacggtctaatgtacgattttgtataatataaaatataatattacataatatacagaagtacatgcatgtaaactagatctataatataaatatcaaatatcaaatcaacggtctctaaatattatcttttaatttatttttaattgtatatccaatttatgatccattgtattcatttaattatataaagtaatgatgtataaaagtaatattatggtcttaaatacatcatgacacattgngtcgacatacaatatgtaactttagacactaaaaatctattanacttcctacaaacgcttctaaatagccatttggcgcttctatgaacgggtctacgccaccacgtggtgctctaat

SEQ ID NO: 51041 - DNA, 426 bp, Oryza sativa
  unsure (1)..(426): unsure at all n locations
cagcttctcataacatataactgcatggtctcctcatacatttataatgttactagagttggcagtaaggacaacttcagcccacgcgctctaaccgaacacctgtctaaatgtctgaagggtgtcaacctttcaaaagccgagcaggtcatgattcagtacaccaattggtaatatatatactgccattgcttatatattatctaattttacttctgtttcatctgttcagctnttactgccaatcatcaacaatgaccactggacactccacatcgtatacctgaaccaagggagtattgatatattggactccaatgactacgaccaaataggaggaaaggagagccatcatcactacccattggcctatagggtcctcaagcgtctcagcaatgggttccaatcctttatacctcaagtatt

SEQ ID NO: 51042 - DNA, 345 bp, Oryza sativa
  unsure (1)..(345): unsure at all n locations
tgatgtanagagcatganaccgatgactataaagagaactgatatatcttttgaggatttgtatcagtatgaggagacctggctgctgccacccacgtcgagcttcaccttttggttaccgcgtgcttgcgggtgctcgatgcggtacatatcttgcagaaccatatccgcgtgggatggtgaatgatattaaatggcggcagcagtggacatcgaactctcacgaaggcggcggtagtcgccgcttgcttgatgggaagactacgatggttaccactggctccgcacggctgtggcggcatctgcatggtcatcgagcttgacatgatagcagctggtacagct

SEQ ID NO: 51043 - DNA, 390 bp, Oryza sativa
agcttagctgatcaatgatgccaagctggtggtgactgacaatttgtagtttattctctagctgattaccggaatctattctaaactatggagaagacgttcccttattctttgcatatcacttaaatagttattaaaaattctttctctgtgcgcatgatccaatcacaaattatacctgctctttattgctgctattctatatcggatgtttgattctgctgtcggttataaatcttgcatacttatagtttgccaaaattattcaaccataagctcatcatacagtcctagacatgttaagagggacaaattggttgtcatcgatcaatgcatgcgttctgttatacttgatcctagccacacatgccatacataccgatgcacaaa

SEQ ID NO: 51044 - DNA, 398 bp, Oryza sativa
  unsure (1)..(398): unsure at all n locations
tgcagctgtcaagtacgtcggtctctacggctngaccagtacctgtgtgcaatgctcacagttcagctccgcttggcatacatttaattgcagtgagttttctggatgttcangttggagctcgaggtcaataagcttggttcttggctcacccatattcaaaattgaaactcgggtagaaagaaaagaaaacaaaattgcaatgccttctttttcatttttttttctactctataactatggttaaccaaacacatcggtgatgtgtgactgtacctgcctacccttcactatgtttatccatattatatatttatagagattgtctactgtgcttgggatntatctggacccttgatcgcttataatctaatgcactacgatagaaagtactgata

SEQ ID NO: 51045 - DNA, 475 bp, Oryza sativa
  unsure (1)..(475): unsure at all n locations
agcntttntggcttatatgagatagatgtatgacttctccactaaacttaggacattaaatccactggcttataaatcatataagccaataagctgacttaaaagtctaggccaataagcctaagcctaaataaagagggccttgacatttcactaaatttggtggatcatgcatataatgtttaatggtcattagtaatccccctattatgtgctactactaataatttattagttgatcaactagcaccacacaatttctaatctattgtgaaaggcaaacgttcagtgtggtttcatcatgtatgcgagattaggaattgagtggtttggcattgctattggtgcattctgatctgttgattactaatgcttgcactaatataagcacggagatctgaatgtgcttttttgtcttcgatgaagcgtacatacttgtaagccgccgtgcggcgttgtaacctcatcccgatat

SEQ ID NO: 51046 - DNA, 395 bp, Oryza sativa
  unsure (1)..(395): unsure at all n locations
ctgattgattntttctgaattggagtacatgtaaatcttgattctatttcctgaattgaagtactcagaaaccttggagtaattggactggagtattgactatagagagaccttgattgatgtttgaaaggagtccaaaagtacatggtattctcagtttagcttcagtatattcaaaagcacatgatgctcatgaagcatcagatatttgaatataacttcattattttcagatttctcatatatataaccagtagtttcagtatatctttacctattataaaaccttaagatgtttntgccaactttnttcgtacattgtcctgtgagctggccaatttccttcccgtacgcgaaacggacaactctagggtttgctatatggcttaattccg

SEQ ID NO: 51047 - DNA, 404 bp, Oryza sativa
agcttaagtgggctggctagctgctacactcgacatttatcgggctgagcaagaaggggaggcaggccgtggctaacgcttgatctctttttttgttctcttgcctcatgggtggctcttatgtgtgagaatatgaacaactgcgtacgtaagtcagtacttttgttgccctctttagccgatccttccatcgatttcaactgtcaatagtgtcattcgctacagatctcgacgccaaaccaaaaaaaaatatagtttctagccaatgttggaacctctggaaggtagactcttcgaaatggaggacgatcagatgcgtaatggaaggtgaaaacatagtataagatcgcaccactgagcagtgagcatgagggttcggcattccctgacaggtactattggtg

SEQ ID NO: 51048 - DNA, 337 bp, Oryza sativa
  unsure (1)..(337): unsure at all n locations
tgacatcacgcttacatctgcaggctntgttgtgaacgaagctgtcttatgtgtatactatcgctatggtggnggagaacgngtgatcttgtgcttgtatgtcgatgacatactgatctttgtgaccagccttaatgtgattgaggaggtcaaagactatctgtcttagaattttgaaatgatagatatgggagaggctgatgttattcttaacatctaactacaaagaggagatgatggtgggattacacttgtgcaatcccactatgtggacaaagatctgagtcgctttggatatggtgactgcaggccagctccttactcttatgatcccagc

SEQ ID NO: 51049 - DNA, 460 bp, Oryza sativa
  unsure (1)..(460): unsure at all n locations
gctngccctcaacccatggactaggctatgcgagatattgcgacacctcatccatatgcatcttgaaggttcttgctagatcaagtctattgacctagaaaccatggcattctattacgtcgaacttttagatgattgcttgctaacaaatccatgcgcaatcgccaaagcatataataagactcaattcatttatgagtaggctgaagatccaactagtattgtttgcatgtccggtgcatgcgcaatcactaaggagaagaccgtggccatctcttggtaggttgaagatacatctagtaggagtaagatgttccttgattacaatggagctttcaacaaactacgggtaaggaccgagcataatagtcggtggcttcctagaagattgcaccatcgagcgatgaatgtggacatggtggactatcatcctcttactacgataatngcgacactcatt

SEQ ID NO: 51050 - DNA, 394 bp, Oryza sativa
  unsure (1)..(394): unsure at all n locations
agatcacccaaacccaaacgtgggggcccacacccctgtgggttgggccacatcaatgggcccaacaccgcccacgcgcgacccaaagtagccttagctagctgctagcatatgcatgcacgcacgcagcgctttacaccttttctttcccacttgagacttgagacagagagagatcgattgggtttcaattggcccangcagctagcagcataaagcttggctaagctacatggagaaagctgcanggaactaacaaatttanagggaggtgatgaaatacactccatatatctgctaattgcagcatctttgcagctcttttggtcncttcgaatgaggatattgctccacaaccgaatcggaaccaagtaaatattactcagtccctact

SEQ ID NO: 51051 - DNA, 479 bp, Oryza sativa
  unsure (1)..(479): unsure at all n locations
gctttcttactctagatgtggcgtgtacgagtgtcttatcactttattacttcaattagtcggttgagttatacactctccctagcccccagccttatcatcggagaattcttctcggaagataaggctcttggacctttgacctacctccgttgaacaagcactgatcctagcccccaaccgtgaagatgggaaatttatttccgattacacggctgggttaatacgcacggcgagaactcttacacgaccagatcttacatggtctttcgtctctacaggatccaacaaggccttatcggctctgggcatccccagccgaagttcccttatgttcctcggaggcttgtcaagacngcgtaangggcatgaggataggttcaacgtatgtgcatctgggtagggatcatcagaaggacactttgatgtggctggacctgaaataggcttatgaactgtagatgcttacaagatggatc

SEQ ID NO: 51052 - DNA, 386 bp, Oryza sativa
actgcgcaatattgatctcattctatttggagaatgagcttgggccaccttatttgagaacttttagggtataatatattaccagtatatactggcagtatatataaaggcatattagaaatctgatagaaaataaaacaacaaatatttggttcaaattgaatctaatcgagagtacccggtcctggatcttattgtgcactaagggaggagcattctgagcgctatttgatgaacaaacacgtgacgatagcacaatttgatgattaattacctaaaaaagacaaattaccctttcaaacttatactgcaatctaattatatacaaattaaatcatctacaccgttagatcatatatactttgcagatatactatgagtatatt

SEQ ID NO: 51053 - DNA, 374 bp, Oryza sativa
tatgacattgtatgataggcttaatattcttttgcttgcgaaaggcttgactatgggacaagttgacaaaacgctttttgttcttatatcatggtgataatcaacttttcgctcagatttatgtggatgatatcatctttggttgcttgactcatgctttggttgtagattttgctgagactatgcgcacggaattatagatgagcattatgggtgagttatcgtactttttgcgattgcaaattaagcaaacacctcaaggtacttttgtgcatcacacgaagtatactaaggatctcttgagactgttcaagatggataattgcaagccaatttcaacacctattgtgtctacagctgtgttggatcctgat

SEQ ID NO: 51054 - DNA, 405 bp, Oryza sativa
taactaaagaatgcacagttaatcatccctgaacagatctctgtgcatcttattcagcagatgcgcacgtatcatctagctaagatcctgcatatgtcaaaattaaccaaaatccacaccgtctagttttgaactaagcaatatggaagattttgtagactgatgcaagcaaattccaattcacaagtatacaaccagtaactttcattttttgatcatgcactcaacattagctacaggtggctacatcgatcttaaagctacatcatgaagaattcattattgcgctaacacgtagcatcttatatttgatgtaatgcacccctgctgaatcaagcacgatgccagccatatatccttgcaaagcctaacaagcatgcatcaggtggaatctataggcgacca

SEQ ID NO: 51055 - DNA, 394 bp, Oryza sativa
  unsure (1)..(394): unsure at all n locations
ttaagtcacctgcggcatgcaagcttgtaatgcagcaacttcatttgtgtaaattgtgttcctcctatntactatgagtactttctccgtcgcattttgagtacaggcatggttttttcgcgcccaaatttaaccgtccgttntatttaatttttttttaaaaaataaaaaacataagtcttgagtaaagtactattcatattttatcatctcataacaaccaaaatactaattataaaaagttttaaaataagacggacaatcaaaattaaacgttaaatttatggtcgcacttataataacggtgggagtactaatcagtgggattcgcaaagtcaaaagtcaatgatggcattgtctcttctctatccgataatgacacgcncattttcat

SEQ ID NO: 51056 - DNA, 512 bp, Oryza sativa
  unsure (1)..(512): unsure at all n locations
taggacctatgatactcagctaattaattatatcctaatagctttttatntagcgtgcccttgcttaatcttaatcttcattacctttaaacaacaccaacatgtcgtgataattacttcattgacagctagaatttggtcggcaacctgtgactgtgatcagttgtgaggactcttgaataacttanattccaagtagtacatatatacctatcataagtatgtcacaatcaaaatttcattatctttattagatagaatatgtcacattcaatcttacattatcttataaaaaaatcttacatttctatatgtttatgtgttagaacagaggaaataatnttaattgtatntagttatccagatctatagttctagttggtgtcaaatcgtcatctaggtttggcttttttaacagagagagtatagctaagtagctagccacctatgtgtntaggcccatattantcccttcgaatgtatactcgctcatcccaattgatcgcatatat

SEQ ID NO: 51057 - DNA, 126 bp, Oryza sativa
tatatatatatctcctctataccatgtgagaacattttctgtgaactttagattatcctattatttttcccagtcatatctactctattctctagcgaaaggtggcctatgcataaaaggaggaag

SEQ ID NO: 51058 - DNA, 233 bp, Oryza sativa
ggaaaacctcatgatgtgagatcggcagcctcgtgttccctcgatattcgtcaaataaaatgcgatgatatgcgagttccacactcgagcggcagagggttgcatatgcgcggaagatgcatactgatacggggtagaatcccccgagccgattaacgactcgacatatcaccacttatgtgtaccgtacattcacatgtgcttcaccggacgacctaagctgattaatctat

SEQ ID NO: 51059 - DNA, 385 bp, Oryza sativa
tcataacgctctatgtgccacttggtaaattatagtttaaaaaaatgttccttctggtgaccactcactagagccattctattctacgaaagatctgataagtggatgcttgtcgtcaattatgttgagatctgcagctatcaatatgtatggcatttcgtactcaacaacagcctatgcatttgattgatgaaagtgcatgctcgccagctgtcttttattcaaactacagccctgtttgcatttttgttagatattactgatatttcttctctgaggctagttcatagctcaatcttgttataaactatatatacctttgttaatattgcattttatcaataggccggacctgcccactgtgcagtcacattgacctgaactg

SEQ ID NO: 51060 - DNA, 488 bp, Oryza sativa
  unsure (1)..(488): unsure at all n locations
ntataatntctntgcatggccttaccctgcttggattcactgattctacagataaagcaagtggcaggcaaatggtcgtggagaatatatatgccaccagcttagcagccgctgctttacatcaagcaaacagcagccgccagttttgtgggcaaggtgacatcgantttatggtttgatttgcgcattaagaaaccaaccactgtttgctacactggaagctacactggaagaagcattctctaacaataaacatagttgtttaggctgataaatatatgctactagcctattaaggtattgctgttagaaactggatgttgtcatggtgtgttcatgtgatcgagcacgagaaatcggtgccnggtaagagtacgtngccgataatgacacggtatgtatactactaccangtcatgaagtcgatcccagttcaaactgcatgtcattcacatttgccatgtngatatgcctaatgtaactactat

SEQ ID NO: 51061 - DNA, 383 bp, Oryza sativa
gcaagctgcatgtgtgtttgttgatgacaatattttttttgctctgaactgattctgatctgcacgaaaatgtgcaagcaaaagaacacggatgtttacttacttgaggactaactgacggacgctaatgatctttttcttctgtgatgttgactaattataagctgggttgtctctgtcgaaccagccattggtgtcaagttacaggcatatagcgactacgcatctgcaacgaattgactgcaaagtacaacgtgaagccaatacgattatgatgctgcttctaggttactactacaagcagcttctttctctttaattgagataataatttttatgctactatccaatgagctactgctgctactactactactgtgatc

SEQ ID NO: 51062 - DNA, 485 bp, Oryza sativa
  unsure (1)..(485): unsure at all n locations
agatgtgtaccanatgcagacagtaccggtcttntttaagggaacaaacaacttacctcataagaatattcatctggatcaacatcttcccatgcatcctaaagtcagaagtaaataaaaaagtcagacaatagctttattattggaagacttcaggaaaacaagaccacggcattaagaaaagtgcaaattgctcctagttgggtacattttaagccattaccttccccccccccccacacacacacacaccccatcccaattctcacatacaggaattggcattaaatttccattttcaaatgaacaatagtatacttatttgcaagcatcagaatctgatcagcaaaagcagcanggaaaagcagttcccaaattataattngagtatctataaatggaaatggacgggacaaggtgataccgtgccattgagttcaacaacctgtatcgttntaacataagtagacagcttctaacttcta

SEQ ID NO: 51063 - DNA, 369 bp, Oryza sativa
  unsure (1)..(369): unsure at all n locations
agcttcagcctgtgggaaacattatctttcagcatgtatgcccctgaatattgatcttagatttataccatacatcctagtgtaataaaanataaagcagtgcaacattagctggaaaacatagctattgagaaaccactcaatgattaaaaaaagcaagatataagtgaaggcaagtatttaactacaaactgaacaatggcatatagttcctgttcagaaactatataaccccagatttcagaaacttaaacatgcaaaagaagatgttctgattttagtcgagatgaacatttgagcacattcatccatccaggaggtcacacgcatagcaatgttcctagttgagcttcgactatcatctataat

SEQ ID NO: 51064 - DNA, 374 bp, Oryza sativa
  unsure (1)..(374): unsure at all n locations
taaccttcagaaactcttgagccatggagccaaccattcccatgagaccaccctgttcgcctgaatggccttgctggaatttcccaagcatgactttcatgaatttcttgacctttgggctagcatcatctccaaagatgttgaacaatgtcatacgaattgagcccacatcaatgtcatccttcccagttttctccttaagcatctcaataagagttgaaagtggcagtgaccgatttttagtgtggccatcagttggttgagcgtatgtctcatactggtcctcacctccatagtggctctggctatggcgactacgagggaggtggattccctcagactcanacacgtcccgaacagtttctttgaaaatg

SEQ ID NO: 51065 - DNA, 373 bp, Oryza sativa
  unsure (1)..(373): unsure at all n locations
agctngctcatcttctcagtcgcatgcgctacaatcatccttccttcagtgtgatgaaattgatttggcatgagatngccaacaccattcttgagccttagctgggttgcatctatgctcctttcattatgaagatgattgagacagtcactggggtgttctacatcaaagatgggcgccacaatccttttcgtcctcgtgttccaccttcctcttctccagtggtacatacatccattccttctacctcagctggtccttcttctagtgccccaccgagatcctcgagttcttctcccatcaagaatgcacttcaagcaatcttctgtatgtgtgctaaaactgctatganagtgaagaagattgaaaggca

SEQ ID NO: 51066 - DNA, 514 bp, Oryza sativa
  unsure (1)..(514): unsure at all n locations
ctttgagtaaaatgcacagttaatttaatggttntgtaccgcgtgatgtttatgtaagcttctctctgcaaccggagagtgaaattttgatcagcgctagtctagttcctcgggagttgatatatgcatatgatctggaaatgtaccagattctgtcattctagtcgtacgtcgagaatattgatggaaaacatggtgttactatattatgtacttaccgttgagggtattgtaatttccatttattatatacacaaatggtttgctctttgaacccatcccatattcaatctccaaagtcccgttctttcacaaaggagaacatatttatcttttttggttattaggcttacacgatgttgttcttntgcgaacatttatatagaaaagttactgaagactcatattagagtgattaaaagataagtaattatacggtaatatctcaactcgttctacaattttcaatcttctcttctttctaaacacatattctctaaataacactgttcgt

SEQ ID NO: 51067 - DNA, 467 bp, Oryza sativa
  unsure (1)..(467): unsure at all n locations
ncagcttgtttgattgctaaatcctccatgggttggctatggcatcgtagattancccaagttggaatgcggaatttggcaactcttctaaagggggaacacatcctcgggctcactaatgtcacatttgagaaagatcgtgtgtgtagtgcttgccaagccggaaaacaagttgggaatccacatcctatcaagaacatcatgactacaacacgccctcttgagcttctacatatggatttatntgggcccgtggcttacataagtattggaggtaacaagtatggttttgtcattgttgatgaattttcccgcttcacttgngtgtattntctctatgacaagagtgaggctcaagatgtcttcaagcgcttcgccaagcaagcccaaaacctctatgatctcaccatcaagagggtacgaagtgacaatggaggagaattcaagaacacacaagtggaggtatt

SEQ ID NO: 51068 - DNA, 423 bp, Oryza sativa
  unsure (1)..(423): unsure at all n locations
ntagaagctattggttcatcttgctctgcattatgaaatctgtcacttgacaaccttaataagtgctcagacaggtaataggtccaattattaaatctactgttgcatttntacagggatggaagtatcggtgtctcatttctcttagaaatttgatatagcttatactgatactgcattgtgatgcttatagacttgaagagtagaaatgctgaaccatntgttaacaattggtttatattttttntatattgatttgaacacatgctcttttcttaatttcagtagtgagccacctgagtataagttctaaataatatggttctggtaattgacatcgatggtgtatcttaaatattctgcaccgatagtgacaagtattgaatttagcaacatttctcatatcttcagtaatcaacagta

SEQ ID NO: 51069 - DNA, 379 bp, Oryza sativa
atcttaagtcacctgcagcatgcatcttacttcttcaaattccatccttatttttatttgcaatatcgcacatacagtattacttttgccaataagttttacctgatgttttgtcacacatggctggagtcaataaggtgtgttttttcttaagatatgcggatatgacacatttgggcccatgatttttaattaagagtgtttacaggatagtaactccctccagcccaataatataagcaattatggatcctgacactgtcttcaagatgctactttgaccaacattatctattagaataatatgtcttaaataagaaattggcatttatatcatgatatttcgcttataataaagttagtacatcatgttatatga

SEQ ID NO: 51070 - DNA, 301 bp, Oryza sativa
  unsure (1)..(301): unsure at all n locations
actcagctattcctcctttctttcgcataagtaatttcctcttttatagaaaaatgtttatcctttatttaagacttgataatgaacttagtaacttctcctgcacgtttgcttggctggaacatcatactcccttttgcagcgcgtangagctattatggtatctntctgggccatattgtggccctcacagttgaaattgcattattttagcaggttgttcctattatctaacaaatttgcttctttcagaggaatggtgtcagaacttttgcagtgggaactagtgcatccctggtaa

SEQ ID NO: 51071 - DNA, 394 bp, Oryza sativa
  unsure (1)..(394): unsure at all n locations
tcttcantttcagatgctgactttctgagacagtgtgtcaatgtctctcctacttctggtcaaactaattcagctatctgattccatgttttcgcatttgttattcaagataagatcacatccgccaagtcggcgcccaaaatctaataattgacctgtaaaaggaatacttgaaagttgttaaattaatgtaattgattgataagagatcatgtcatacattgctgctcttggtcagaatcttgggctttctttgaagattgaagcacgcagtgattaccgctgatatatggatgattggttaattaatctgctggttaatcactttcttcacgagatgattgcgtgtcaatgggtggcaattgctctgacgtccgagtgaagacatatcatg

SEQ ID NO: 51072 - DNA, 438 bp, Oryza sativa
tgcaccatgtgttgaaccttgccattgaatatgctactactattcaccattcagcaacagtctcgtcgtttacatgccccatcatggcctgtgctcatttcattctaaaataaacaaacttacggcctgtttagattgtagccaaaataaaccaaatatttggtaagatgataatattgtcaaaattttggcaggatatcttatgcattgaccaaatttgacaacaaactaaatgttaatatcgtttttgacaactctactaaaaaatgatatatttgaaaatggcatataagtgaacatacacttaatatacgacataacatatcctatctcctgttcaacatcgtatctaggatgattatatatcgtattaaatatgtctatttgaagaaagtgattttaacatgaacagttcattgacagatgtgcagcgatctt

SEQ ID NO: 51073 - DNA, 412 bp, Oryza sativa
  unsure (1)..(412): unsure at all n locations
tatggtattcccaacaagagtaacttgtatcgacagtntttgacaagcatagttacacaagtaaattattntggtttccggctttaccgcgctctgtccttcttgtatgagctgcggtgtgtgcttgattggtcatgtacaactacatcattaacaatgtatgattggcttaaggtacatctatacttgatcttccccaaactatcatggttggttcaaaatattttgccatattaccatatatgtctgcacgttgaaaattaagctgaaggcctgaatccattgtatactgtgagtctgtgagtgaatcacagctagtgaaatttgatttggtgctagtagaagattgaatacgtcgagtggcagattcatcaccaccattagcttcttttatatacgtacctcattccat

SEQ ID NO: 51074 - DNA, 422 bp, Oryza sativa
  unsure (1)..(422): unsure at all n locations
cgtgggtgggtccaggatcacctagaaatacgtagccaaagatacatgtgttaaaaagaaagaaaaactattcttaggaagagaaaaaatacatttgtgtgcaagggtaacaattatcatatcatatccttatgtcatgatgaactaactgtatattatctcactttaacaaaaataaaaaattatgtaagctagaccatctaaatgcttaatgctagatatgccactgcccaatggagaaaaagaactatctagagagagagagaggcaccagtacgttcttgataatnttagctattccatcggaacagaggagccaactcattcactactgtgtatggggcaaatggaaaaaattaacttattgacactcttcaattaattnaccacgtcggatctatatgtcattcacacatagatga

SEQ ID NO: 51075 - DNA, 446 bp, Oryza sativa
  unsure (1)..(446): unsure at all n locations
atcttgtgaccctagtacaaaccaccttgataaagcacattaatatgataatacttattcctcatggataaaagaattgaactcttggaataggactttacataaccaaaaagtactaactatttttagcctcatgtttgtcaaatgcaagccatgaataattaataccatcatcaatatttgcatgtataacaccgctttctttgaggatataatgcaacatttgggggaaaaataaagataaaccttatgatgctcaagcatgttttctcaatcaaatatttcaaaataccttttgactccattgatttcactcatgtctctggtatgctgatgcagaggtgcacatctcagtattagtgcttatacacaacttcaaaaagaaaatctaggacaagataagtgatgtgaccatgactactacangatacaccattgctcacata

SEQ ID NO: 51076 - DNA, 438 bp, Oryza sativa
agaggtgtcatccatgtgaaacagaaagtactaatatattatacggaaaatttcatgaaaaaaaccatgtgaaagttggagctcacgagctggaaacaaattataacaagaggtatattaaacatgcatgtcaccagaggtatttcactgcaacctcaaacttggtgcctggctctctcaactttgagccattccagaatctcgatctcagcatttatgctatgggtgagcacattcagcttcttgaagcttgtcaattctcaatgccggcaaagaatcggtctccagtcccatcattgcatacataaacactctgaaagtctcgatatttccatggttgactctaaatcggatagcctcggataatgtaaggtcacataacactttgattcatgaattgaggcggacgtcaacaactatatactgcactgtatacca

SEQ ID NO: 51077 - DNA, 224 bp, Oryza sativa
  unsure (1)..(224): unsure at all n locations
accgcgcancacttcaaatttcaaaagaggagcatccaattctttgatcaacagggaaactacaagcggaggcctaaaagtgcaactctacccatggcgtctgcctacacattgcacctagactgccactctttgctccaaatattgcaattgagaaaaaaaagggctggggaaaaaaattataaaactacttattgctaacgggttataattttaaaagaaac

SEQ ID NO: 51078 - DNA, 411 bp, Oryza sativa
  unsure (1)..(411): unsure at all n locations
gatatgttatgtggattatatgatcaacaccctactgatcttttgttaatatggattcacangcccgcttgtccgctgctgattatctttcattcgtacgcttaatgtgcgtttaatatatcgaacatactaatatgataattaattaaagatgtgtcttatctatcatgtttcttgcggtatacccccgctttttctgggacaatgagttatacactagcactccggaaatgtatttttcggcgtgacacgtattgacgaaaaaatcatggcatctctcagacctgcaacatacatagttgtgactttactattaacagcttggccaggcacaaacaatacattatattctcaatcatggaccattggcctatgcaccactgaaattcaatatataatgtgttaaacaat

SEQ ID NO: 51079 - DNA, 438 bp, Oryza sativa
  unsure (1)..(438): unsure at all n locations
tcagagtcacctgctgcatgcanccttcacagacttcagtcattggcttggtgacatttcgaattcaaaggaaagagaatgttaggagccttgtgggctgtcatatgggctggatcaactacttttcaagaaggccaagccagcccaagaagcaaccatatttaagtagcagcagcacttccaggaggggacgaacaaaatgataggccaaagcggcgaaccgcggcggcggcgacctggatgctggctggcctctttgtcgaactcttctctatctcccttcttctctactagtctagaagctactataaccttctagcccgggtatccttccatcttcgccctcagaaccactccactattgaacagactcggctgaccctgtggtggattggcactgctattctgaattacatagttagtgggctcaacacctct

SEQ ID NO: 51080 - DNA, 300 bp, Oryza sativa
aaacatatctgcgtcttgcacaggaaaacaaaatgggcgaagcttgtgccataactcttccattgaatagatcattccaaaagcctactgatgccgcattattgatgatcgggtgggcattcctctaatagagtttctagttgaatattattttcaccagaaagagcccacaaaatatcatgctgagtaggtattcggatatgagagacccatctattgcccaggaatatgcacaccaattgatttcctccttcaataaaaacctatcttccccgtttacaatgtagcatctacatccat

SEQ ID NO: 51081 - DNA, 416 bp, Oryza sativa
  unsure (1)..(416): unsure at all n locations
tgcaagctttaacaaaattaatgctatatgcctttaacatatagtgcaaatccaatccttgtactggctggctaaacattaaatcatgaggacaatcatttatcattgacagtntccaccactgtacatactgtttcacattaaatatgatgatccctgaagaagaaagcacgacattgaagtggacattgttgtgtccgcatctagtattaatttttttttcgcgaacacgccaaaggattgcacgttaatatattagaagggaaaagaggttttttacacaacgcaatcaagtgtccgcatctagtagacgatttcaaaacgtgggaaccaaagctctcattgccagtgcgtgccttactgtttatggcgttatttctgcgggaattcatcanaactaatctaacaattccact

SEQ ID NO: 51082 - DNA, 443 bp, Oryza sativa
  unsure (1)..(443): unsure at all n locations
acactatgatactcagcttggacaggcactctgttgtggccaaatggcgagcttgagcacgtatgccctnttaaaagataataatgacacttagcataagtgcaaaaccctgcatgaatttactttattccattatggtcaatgtatgcatttacttaacacctttatgatagaaatgtgtattttggctcctttcaggtttcatttgtcttcttcatgtacatctggtgtgctgcaacagacccatctgacccacgtgtcttgaatatcaaagaagtacctaagattgtatggaagcggcaaacacaagcattcgaaggaattcatacatggcatttcagattcanggtngctagtagagggaactggagaaaagcaagaacatgagtttgcagctgctagtgaaaagtcaacaactcgctacaaagacaataacccatctt

SEQ ID NO: 51083 - DNA, 394 bp, Oryza sativa
tgtgaatgccgttgctctgatgggtatcgatcgagtataccgtgtttgggataagaattgtttgtgccatctgtggttttgtagtttccttctccaatccagatctatgaagcctttggtgcaatggtattctgtggctagaaatttacggtggctgttggctattgcccattgtgtcaatctaattcagaataatgtggttgactgatcatgccttgacattgcaagaactaacttctgttctctatgcaacttatgaagtagcttcattctgcttaggggaaaacaacttctcccggagaacaattagtctgtacttgccatcgaattgcttgcctgttcagtcatattagtaagtgagcatatgcgttttgataagtaattactcatctgt

SEQ ID NO: 51084 - DNA, 412 bp, Oryza sativa
  unsure (1)..(412): unsure at all n locations
cagctnggaagagaggcataggttgtttttgcaaatcttttgttttgacatcattttgaaatcacaaagtgatttatttctttctaagtttgggtcgaaaagagacttgcgtctcgattcgaccttaagagatgtntttcaacagctcatttggtaatgtaccgacctcccgggtcagatcattacttctcggctcctagagccattccacttgattaatcggctcccagagccttttacattttctcggactcacagagtctagctgcccagcagcacaacaatccgcttccactcgggaagcctattctatgatgccggtagacatcccgaatcacacagattcatttcttgaccactcatgtcatgcatctgccacataggctgattctggtagcaattcccacaccac

SEQ ID NO: 51085 - DNA, 490 bp, Oryza sativa
  unsure (1)..(490): unsure at all n locations
nttggcacaatatactgatgttatattgtatcacatgacactttattacggatgcangatgctgcttctataanaaanaactagtaatttagcttctatagatcgagtgaactcaatgttatcatctacaaggtggaaaaggagttcgagttgtagactgtgttctttctctgacgtcattcagtgaaagtaagcaagtatgaagatcagctccattaaaatatggtggcattctaaagccttcaatgtctggaaagcacttcatccgcaagaactctgagcctcttgtgaagacgatggtgagaagctactcagcatagctactcagagatggcgtatcactagagcaaagcttaggtcttgacttctcactacagcatgtggaaagagatgcctctgctatacatctctttctttgaagtaacttcttacttcgaagatcttacctctgatgtaactactcgactcatctatgttgtccacatgctta

SEQ ID NO: 51086 - DNA, 436 bp, Oryza sativa
  unsure (1)..(436): unsure at all n locations
agcttcatgatggagctgaatatagaattgcagactatgtatgctgccatgcaagatgctttcccattggtacctgaaaaatcagtaggtgtgagtaacagttctcattatttgaagaaaccttagggtgttattacaaatgcactatctcatagctgaaatatagagaactgtaatgaaccccatttataccctaaatggtttttcaaccttttctgccagcattaatcattcaggaagttcaatgcagttagatatatgtggtttgctcaaaggtagaatatggtactgaccacaaagctttattgcaaattcacatggtgggatgaacttgttgatcctgtcgtaatctgattttntaataagggtcatgtgcaatgcataatcggtgtaagctctgtactggattgctggatccgtgatgccattaccgatc

SEQ ID NO: 51087 - DNA, 486 bp, Oryza sativa
  unsure (1)..(486): unsure at all n locations
ttggccaccacatgcttaattaggtgcagactagctatgctgctattcatccattggcagatcaaaatgtgttcggtcttcctggagagtaaaatagtccgcgatgctgtccattacgtggtaaactgttcttttattggagttctgtgtttaactcgtcctattgaggggcgatgcctgtaattaatctggatcgtaaccctcttgcctggtgaatgctccacaaactctcatgtccctcgcatgagtttgttcaagtgtggaagttgtgactgtgctattattntagcattggcttgcagtacttgttctgtttctagcaagagtttcgcatgtgagcacatgcatagcaatatantatgttctaaattagttcattacattatcctcacattcagagctgatatatggtagtatttgctcgtgatgttgaaaattatccatccttctgtatcgccagtttgtattatgacagcgtgccaccta

SEQ ID NO: 51088 - DNA, 458 bp, Oryza sativa
agctagcttaattactggtctcatcatactcatcataagtttacgctttgcgtgagcagcaaccaccacatcaccgatgacgaaaatactaaaagttgattggcgatcatcaatgttaccggtgacttctgaaaataagaccccagttgaatggtcaaagaccaacacatttactgcaggttcaggctttcacggcagtatattcgggtccaagtgcgataaattcgcacggcactttacctctcaatgtacttatcatacccaggcagtagagttttacctcacgtatctctctctagtttttaccattggacggacagaagaagtatactgttcctgtcagttcaacaaggcgaagttcactgttattactgcaatctcatggtacgggctctgactagagtgtcactctggccggcttgcagtataaaagacaatacaaatatactgcaagtatt

SEQ ID NO: 51089 - DNA, 342 bp, Oryza sativa
atgtatccggccaatgaagcacgactgttttcttctatgatatctagttgatggaagactacgttgtataagttataatcatggcattaggactcaacagcatcattcccgcttttgtcacctcttgctgtcagaatgactgtcacaccttcgatggcaagctggtggcacacttctaggtctatccctctgtttccaccagtgactactgcaagccttaatccgacaggccaaaatcttgtttcctgttcatagatgactataagtgcctattctctgatgtatagctatacctttcaggtcttgttcatggtctagatatactgccttagcctgtggaac

SEQ ID NO: 51090 - DNA, 434 bp, Oryza sativa
ctgactggctcttttcgcttggcgacgctggaaggcgaatagttcgaccactcctggaacactgcttcttttaagcgtctctatgcctataagggggggcaccccattctccaacttggtaaaatggcatactattatgtaggcccttctgcccaatatacatataagaggaaaatctaaaagggaaataactggatgacggctattatccattctggaggcccaaaccactatataatgcatgtgtctttcacctctttacttgtgtgaatgtatattcctggagaaaccctacggcattcacctgattagcgacagctccaggggggcgaaatgaatcgaccgaatcatcgctcgctgaacatcgaaaccgcgacattttgtttcgggaaatatatataccgacacagtcatattccatctatgtaaataca

SEQ ID NO: 51091 - DNA, 202 bp, Oryza sativa
accaaccaaagtataacaattctaaagactatacaaaaatttcttacaatctttacattgaacaaattcatggtggaatatattcagctactctaaatagattaaatacttctgccattcttaagctatgaggcgatacctttatactgacttaattattcccaatttgtccgaaaagtaattccagataacatgtgttatc

SEQ ID NO: 51092 - DNA, 420 bp, Oryza sativa
ccacattcacagctgaatcaattgcacacaaccactcatgttggatgatggtgcctgacgacaacaggcctcacagagcttgctatatgtccacgccaacactgctaagccccaacttgaactgcccatatcagttatgttggtgaccaaaggaatctatatggccgaagcaatgtcacccccaacatcaagaaacagaacccctcccaacaagtgcatgatgtatgcacgggcatatcactcaacacgccatggctcagcgtcgtcgtcaagatgtgagaagttctcgctcagcctagacaggggtattccattccggttcttcttgcctcatgcccctgtcaatggtgagtggaatgccaacagctgtccacttggcacgccatcagatttttgtctaccgcaccgatgctctgtatg

SEQ ID NO: 51093 - DNA, 420 bp, Oryza sativa
aaaactcagctgtcactattgaagcccatcagttcacattgatcggctttatgctcgcaagaatgaactcttatcacaacttgaagaatgcaacgctgagctggatatggagcactaaaaactagcctgatctcctaatactattgaagaacagaaagcaagactccaatcggctatcaagcatgttgctgatctgaccaagtctctgaatagtatccctggaaccgacgctcaagatgcccaagcctttagaagaaggtcaatacatttcgcagacggctatattggctatacagcgatacttgtctcaataacctgtgtgtaatatgactcagaatattttgtaatcggcttagacattctaatactgtaccgtcttaacaatccttagtgcccattaatatgactttgaaaacctgt

SEQ ID NO: 51094 - DNA, 439 bp, Oryza sativa
  unsure (1)..(439): unsure at all n locations
acatnctctnatttcatagccctagtttatncttgtttgccgcataggaggggcttctgtgggagagcggatctattctgtctctctcaccactactctttctctaaaattctctcaagattgtacgatatgagtaggacatcttatgtctgcgtgtaagggattagggattggtgggcaaaatcccatattataagctctcctttatttggtctatgcgtgtggtgtggtcactgtcttaagcggcgcctacgagacgtgtgcatagcgcttcttcattagtttgaatctggcgcttgccttgttggggtggtggtaattcttttaccttatcccggttataagcctcacaaggagtggaatcttataactgtttattctgctctatcccgcaacaaaaaattgtcatcgcgcaatgacacctaatgcatcccctaga

SEQ ID NO: 51095 - DNA, 298 bp, Oryza sativa
tctggggcaacatgcaaggccaccatgctgaagagatgcgttaatattcatcacgctttcatcggccagcaacaagcagaacttgaaacccccttctcctagtgattctcaaaatggctgcagttcactacataatcacagtatgacttcaggatttcactgatgaaactttaccatggaaccattcagtctactgcatcttgaccatcagatcggacatgttccttgtaccattccaaattatgcagaactggtgacaaattgattgagactgtcatgtactgactggaccaaactt

SEQ ID NO: 51096 - DNA, 429 bp, Oryza sativa
  unsure (1)..(429): unsure at all n locations
acctatanaactcagcctcataatgccgccctctggcatgtaattgggtcactatgatatgttgcttcagggcatcccagctcttgtttcgttcatttcttagagcttcgaatcaattaaaatatgaaagacttgttgagagaacaatatgatgattcctagtcatagtcatggttatagaaagaatatataaacttccactcaaacatatattattaacaagggcagcatatccaatatcacgtctccactccaatggcgctatagacaaaccaccatcacccttaacactatcatctattcatctctacccctttgcaggttaccttgacataatctaagcgctattctctttattagcctcatgatctcccacataacaactacgcaccttcttgctcatcttacccattatgtagcgctctactt

SEQ ID NO: 51097 - DNA, 291 bp, Oryza sativa
ctctaatcctagtttaatgagagagttatgctaccttaaagtctcaaatttgaatatatccgacaaatcgtaacatgtactgttcctaatacattatttttattcctaaactttatccaaaactccaagtgactgacatgtgggcgctaagactgtatttgctttcctaccgaattatttttctaaagctaattctatgaacctttgacaggtgggcccactctaacctctcttctctatactattatctctatcactctttctctagtatcctattctctcactctcacg

SEQ ID NO: 51098 - DNA, 436 bp, Oryza sativa
  unsure (1)..(436): unsure at all n locations
atgtcttataactgagatagagggagtatataacttgatatagagggagtatataataatatttatatgaaactttcacatatataggtaggcctcttttattttcttaccggtaaatattagcatatgtacattatttattattctttagtaataagacaaatagtcaaacataatttcagaagtcatatatatcatctaataaaaaatgaaggtagtatattgttggatctaagaataaatatctaagatttggtcatgacaccaaaatagaaatttgtacttccagaattaatcatgaataacaagtttacttatgataatatggataaatctcaagcgtatatatttttcttaatttaatggtagtatacatgtcttcactatatacgttggtctggatattagatatatantttcccgtaatacaacgtac

SEQ ID NO: 51099 - DNA, 494 bp, Oryza sativa
  unsure (1)..(494): unsure at all n locations
tagctcgtggtggtgattaattatatctagtgcctaattacacttcttgctttcctagttgatcttgcaaagcagtagtatatactatatgtgggaaaattaaagttgttcccatggtttcgaccttcttttgaaccaagatagcgtgtaactctttgtttctcgttgcttgattgagaaattataatttgacgacgcatgatagagagcgtgaattacgttgtcacacggatcatcagtccactgacagcccagttaattaattacgtaccggtacgtgccctgttttcaaccggccgtcgatcgctcgttcctgccctgttccaagtcaagtggccacaatcgtagacgacttgagttaatttgataatgtgcattanattatgtagatcatgngcttaattatgcacggcttttgcttccattctttgacatgtacaggccagttactgctggtntagagcacgtctaactctggtattttatctgatgaa

SEQ ID NO: 51100 - DNA, 314 bp, Oryza sativa
tgaatttgatcgctgtctgagtctgattatgggactcggatgtgcatccgactcggatgaagtgggacgaaattaatccgatgccggaaatctatagtgagtcgtcatatctaatcgaagttgtcgagcgactgacgagctcaacaaggaaataacctgaaagtgctagtggttatggttacctttcactagaaaagaaatcgctgtcactgttatggagaccataaaacttctcctcaattccatattacaatcttacgagaaggacactgtgatacttctatgatctggctaatgtggtgtaatgatcttga

SEQ ID NO: 51101 - DNA, 377 bp, Oryza sativa
taaaactcagcttctcaattacattccaggtggagtacaaagccaatccgtttaattaatgtcactgatgccttgtactgctgcgatgccgatactgagccgcaggctataacactatcaaccccataattagagctgttcgacctactctgagcggagaatggtgttccaggagcaactacatgctggttcaatggacgggccctcgggggagatagatacctcctaacatttggtgggaagatatacttgccgctagattatgtacacctgcacactgtcgttgcagtagcccacaataccggtcatgataggatacacaatacactgcctcacgtaaggcacatatcatacaccttcgttgccgcgatggtcca

SEQ ID NO: 51102 - DNA, 451 bp, Oryza sativa
  unsure (1)..(451): unsure at all n locations
agctngaagaagtggttgatatacctcacgattctacttctccaacacattccatgtttattcttaatggtgggctgggggcatcatcggagatcaatatatgtgttcggcgagtgattcttgaccagcctaatagtngagtcagtaatgcatggcgttttgatggttgttctataaaagggtggcaacggctcctccctaatcgattggggctattaaagattgatcggtcagtttgtgaggataaaggatatgatcacgaactattgttgatggaatcgttggcctatggttgatgaacctataaaggagaaataatttatgagtaaaactcttatatctatatggggttgttcanactgtagccaaaataaatctaattgccaaaattnttgtgagttggtattattaacaaaattttggcatgatntcttatgtactgatcaaagtt

SEQ ID NO: 51103 - DNA, 430 bp, Oryza sativa
  unsure (1)..(430): unsure at all n locations
tctcttttacattaatgagagtgggctatgtatgtatgatagttttgtttttttgtggtgacacaaatttaaacctcttagaagttaacattttttttttgtgacggagggggagagtatatcnttaaagcccaaaacgaatttgaagcctttccaggaaagtacattgagcacgaagcctcttcagaactcaggccgcgactatagttcatatccattgagctannatgatgaagctagtgttaatttcttggtttggtagaatgaaccaccggaagtgctattttcgtccattggttcattaactagtatcattttgtttggaattggccattttcatatgtntaagaaaacgaatggtgtgggcttctatgacgaaccaataccgaccaaccaacatgtactatatctctcgtactactgaatctaa

SEQ ID NO: 51104 - DNA, 458 bp, Oryza sativa
  unsure (1)..(458): unsure at all n locations
agcttagcaaaaacttttaagaaatcaaatacttcgctagaatcatcaagcacagcataaatacaccagtattgtacaaattgagcctccatgtattacattcaaactcagtcagaatcagtcctttcatcatcagagttatcatcgctcggctgaagatcattgttgcggaattgttctacaacatcacttgcaatcttgtcagccgcactctgagcattgctgataagatcaagggcagcctcttcacttgtcccgtctgcaaatccatcaatggtatcgacttcaattctcgggtacaaggattttgtcatcgccaaggccatgccagctcccatacttccagctttcttgatattcttgaaatatacttccggagcaacactcagcttgtcaaatatttcggttgcgtcgagtgcactcggaccaccattatngaggaacatggcttggataat

SEQ ID NO: 51105 - DNA, 484 bp, Oryza sativa
  unsure (1)..(484): unsure at all n locations
tgtgcaacanaataagcaagcacacgcgacaacaaaatgatccaatccaattacttagaatcaactcaactcaatagtgcagtagtagcaaatcagaaaacaacttcaactcggactggcagctgctgacgcatgacgaggcgcgcggccacgtccgcgagtacgccgacaacgccgccctctgggaccacgacttcgccgcctcgctgctcaagctcagcaagctgcccatgccggtggtgagcaagggggagatcatgaacaagtgcggcgccatcaaccacagcaagagctaattcggccacttatgcagggggttacgtacatgcatgcagacgatgtggtcgtagccataatgtttctctgtatatctcatcgttctaaaatacaaagaccttgtactcgagaaaacatcatatatactatcaaatagtctagaatatactactagatgctagtgtctatcgagtctangagtatattt

SEQ ID NO: 51106 - DNA, 437 bp, Oryza sativa
  unsure (1)..(437): unsure at all n locations
agcttaacatcttcattagttcaaggtnttacacgcatgcatactatactttatacaaatntacactccacttacatctcacttatacactacttaaacatgtaattactatgtaantttgggacttacatatgtaattntaaaacttacattataaatatactaaatttacatatgtgaattagggacttacaatgtaaatacatgctgactattttgtggtgaaaaatatagtgccgtaaatatagctactcccttccctctttacattcctataatttgtttcgttcttttggataaaatgtgagatcgaggtagaacacattctctcagattaaatgataggtgcgggagctcaacagtcaacaccaataatagttgacgtcgaacctcatagcatatgatattggtgtcaccccatcgataccatcggtcac

SEQ ID NO: 51107 - DNA, 427 bp, Oryza sativa
  unsure (1)..(427): unsure at all n locations
tggattggagtttgagggcctgtgcttatgaatcagcttgatggtttgcccggttgcttcacttctatcttccaccgttccatgtgcagaaggccagctcaacgccggtcgccggacgacgagctcggctccggtgacccgttcgctctatccctagttacacgggcagcgtgagcctgcacgatgagttgtttctatattctgatggagaaaatagaataacatctttctgtagaaaaatcagatagcttaagcgaagtagtagcatacgtatgtgtatatattggtctgtaccgattcctttcatgtagatgagcaaatgtannnnnnnnnacggatgtctatatagccatagatttgttcatacttttggccatgggtgagcttggatgcctagttcctgagaagcaatctccggcgagaacag

SEQ ID NO: 51108 - DNA, 423 bp, Oryza sativa
  unsure (1)..(423): unsure at all n locations
gcagcttccccacccttttatcatggactctgcgtgtacaagagtgggttctgtcacaacatcctacctctatatctatctctgaggtgtttgggtgttgctaaactccatacatatgcacaagagaaatgctatccccactccgaccaagacagaactgttaccaaaagcttattgtgatcttcttgtgcaaataacaaataatgtgaaacacggtccagaacaacgaatctctttatgattaacagatccattgtgcaagctcgttattacggatagttcctactaagaatcggactaatgacgtatcaatgcttgaattatcgacgtatatgctacatagtcgggtctcattctttagagactaccagtgtgatacgagcgatctcntgacaaaaggatcaccctaagatgatcatctca

SEQ ID NO: 51109 - DNA, 395 bp, Oryza sativa
ctgaaccatctcatgatggatttacgcacgcaattctgttgagtatacattttgtattgatagacacgtcacaatttcttgatgctccatctcccctccacatgaaccatactaccaatagaaaccatgaaccagattagtagagcgtgccccatccatgagtaaatatttcatagtgagcctcattagaccgttgaatcttctaggcctatccagacaatacgtatgaacatacactgtaacattcttgaacctcaaatatagatttaaattctttgcatctcataaaaacattcaccctaaagagcctgctataccgaatacagatacatggtaagccatatctgtacatacatgactctacgtagagaatcataaattgtactatatatata

SEQ ID NO: 51110 - DNA, 473 bp, Oryza sativa
  unsure (1)..(473): unsure at all n locations
catgcaagcatatttccatacaatgcagagtgcatntctctattatcttggggtacacactatgccaaaaactcaccattgcctgaacactgatattgaccggacaatatttctaatcaacgtctattcataccggccagtcaaactaactgaaacttgaaaacccccacttccatcactatgtgatattctccaagaaagtgcttgcagtttcgactacaatctaatcaacagttatgaacatccaagtatttcccacctgattgaaacaatatgaccaatgagaatccatcttcgatctagcttgagtctcttgaccaattcacgatacgggacattgtttacatgtgttaccgattcacaaagttttatgcatgaagcatggtttacagaaatatgatttggatacactgacatgttctgacatgagataccagaacttctaagatgtgatctcatagatgaactgtaca

SEQ ID NO: 51111 - DNA, 415 bp, Oryza sativa
  unsure (1)..(415): unsure at all n locations
ttgaaactcagctaagcttaatgaaaagattccctttcagtcatctcagtcatcaaatattgtaatttgaattgcttaaattcccctcccacgcacccacattgcttaagatgtatgaatattgcattagtatcaattctcataactcgataaagtttgaatcctagaaatatttatattttattaagaagcgagtatatggctatgctatagttgggacctgtctgttcgtagatgagtttatgtagtgatcatttgcaattcagtattggtggagcatcaacctaaaacgcacaattcacacttgtgtgccatctggttcggatcatcctctatttggtgctgctntgatgatcctatcatctatcctctcttccaatttcttgcaatctcaaagaagatactatgtgagcac

SEQ ID NO: 51112 - DNA, 434 bp, Oryza sativa
  unsure (1)..(434): unsure at all n locations
ctgaacagctggtctgcatctgtgttcttaatngcgattatgtttctattatctgtgaaattgacaaaactaaagtgaacatacatatgcatttattaagtttaattatctgtggcaccacaggcaactcaaagagcggaagaggtcagaagcttcaagatgatgcttctctttcgtgaagatcgaataaaaagactggagcaagttacatcacggaagttatctgctgaatcacatctgttgcaagacaatgaagaccttgtgaacgaagtagatgctcttcgtggcctactggaccgcaatccagaagtcacaagggttgctattggaaacttacaattgaaggaagatattcgaatggtagcattcctatacatccactttcttctctanaactccaatgctacttatgtgttctttggtntatctatttg

SEQ ID NO: 51113 - DNA, 405 bp, Oryza sativa
  unsure (1)..(405): unsure at all n locations
agcttcaacttgggcacacatatattagcaccaatatcttttaactcttccatgcctgtggcgtcaactgagacttcaacaatcatcacatcagtatcttccatggcaccgatcttggatatagcctgtccagcagtgacacaaaaatttaaacttcctaaattaattagaagtgtttaactaatatcagaactactcgagtatctattntgttactgaatgagaggaaatacattattcttttggagtaactataattatacctccgaccatcatgattgcataatattgtagtccaaaaatatcaatgttctcctcaagaatagtcaacagcttttttcatttaaccacagtgtttcacttgaattgcccacattgcacagatcatcgttaattgattctcac

SEQ ID NO: 51114 - DNA, 388 bp, Oryza sativa
  unsure (1)..(388): unsure at all n locations
aaaaccactcctacctcactccaaacgcgaagtactttgtgcttgggacctaccgtctgcgcactcacagtagctgagaacacttccgtcccactaaacccacacaaacctcctatccctctaaccgttatgctgtctgttgacaccggctagagaagataccaattctattcgctatacatgccaactctagcatcgactatcaaacaccacaattccagccgatattcatcctacctccatatccgcttaatcaaatgaaaccccaggcagcctgccatacaaagtccataccaaccatntacgctgctactacccatagtcatgcatgaaatcgagccgaataatatcaatttagcatcgaacgagacaccaaatctatcattct

SEQ ID NO: 51115 - DNA, 453 bp, Oryza sativa
  unsure (1)..(453): unsure at all n locations
tggttctnggcattatatatttggtcctgcacctactgttagtgctcggttgccatatgatgtgctgggattgaactgtgtttcggattggtatccatatccaatttctgggattgatctgtgtattggattggtatacttgtgctgcgattgatctgtgaagtgatttggtaacttgttctgtgattgacatgtgcattggaaagagatacatgtgctgggattgatctgtgcagtcatttgtctggtctcccattcngcacttatgtcaacttgatttgacaatgtactactcttgtcaccttgtctctgtaccattggctgtcatatgtcttatgcacattgaaagaatgatatgtgtagcgtttctattcatgaagcaattgtgccagcccttatttcattacttatgtatttgtgtgagaacccggcaacttatattcacttatctta

SEQ ID NO: 51116 - DNA, 484 bp, Oryza sativa
actctgtcaggcatatgcttgaggagttgacgtttggaatgatacatacaactatatatatgagatcttttatgtccctgagaagatagtaaaacctgatggatctaacattctcccacaaagaaaaggacaacagtggttcggcatgttactagctagtacttccgtccgaggataaattcatttctaagctcctttcatttatcccaaaataagttcaatattagagtaatcattatatcggagtctataataatagacaaaaaatatttcgagaagaacgtagtagtagctattattagtgtgattatacagtggtacctcttactccattcattctagaataagttcatgtatgcggtatcatgtccaacgcttgacccgctgtttattctaaaattaagaaacatttaaaatagtccgcataagtctattatgattatcatcactacaataaaaactaatatagaaaattaagaaataa

SEQ ID NO: 51117 - DNA, 284 bp, Oryza sativa
ttaaaactcatcttgctgatagtgtatccaacctgtcaccgcttaatggcctgttctatctataatctggtactatgctcatggtgtaacgctcaacccatatgatggctcctaggtcttcatcgaacatatacacgaggctgctagtcaactaatggacgcagtggaagctcttctcgggccgtttcacccacagagaaaagacaactgtactctcctacaactccgacatacatgataacacgagtgaaggcttattccctgaagatggattaaggtgacat

SEQ ID NO: 51118 - DNA, 471 bp, Oryza sativa
  unsure (1)..(471): unsure at all n locations
agcttgctacacagganagatcgatcagctagctatctagatcaactcgaccgtcgtgttcgcgaatagaaaagataaggaggaacactaaataaataacaactctgccgttcgccggatttgatttatatggcctccatgctatgttattatcctctccttctcctcttgttgttttgctaagttagatgagcttgcggcatcgcacatgcaagttgccatgcaagtttgagcgcgccgtgctatgcttgctatgcacagggggagagaagcttcgccggcgtgctaatccttttctgggggtctttctttgtttccctctccaactgcttcattctatctatctcttcctcgtataatgagatgcagtntanggcccctttgaatcgttggaatgaanaaacgtatgaattaaaaaaacgtataattttgatatgaatgagcgtttgattgaccgcacgaatacacatg

SEQ ID NO: 51119 - DNA, 275 bp, Oryza sativa
  unsure (1)..(275): unsure at all n locations
tggcgcatctactccattgcttcagctcgtacatgtacacagacagacacagtctcaacacacgccatgggaaaattaaaataaaaaatcaatgtcctgaatcacacacactaccatcatatcacttccttccattntagcacaccaatttcttccattttagcaatgttttgtgctgcagttcaagctagagtagtatttgtcagtttccatggcgggaagtactgaagatgaggccatcaagactatgaagtagtcatgcagatcggctagct

SEQ ID NO: 51120 - DNA, 463 bp, Oryza sativa
agcattttgtcgtcactggccttagtcaatggcagactcataaattttccgatgggggtacaaagtttaaaaatataccgagacataactatatatgatacaactattagcatatatattcagtagtagtatatagatagtagatttcacaaaagtaatgtatacttaataattcaaggcaagaataatttcttgcttttatgccaaagtgctcttttggttcaagtatatgtatccataatatgcatgctatacgatgggttctttctaaaaaattattgggggtataagcgtacccctatgtcccatggtgtgtccgcccatggccttagctcaattaacctatagtagtttcatgattctaacatgtagtcatgtatgatctctttgaaacagataatatatatagctcgtgttgtgcactataaattgattggtggaggcgaatatcgcccatataaca

SEQ ID NO: 51121 - DNA, 417 bp, Oryza sativa
  unsure (1)..(417): unsure at all n locations
ctttaattcacgaatgaaggcaggcaaagggatgcacccacagccatctatcatcggtgtcatatatatatagagtgttctgaanaaataaagtcaaaaattaagtctgacattgttgacagggtatatgcggacggatgcatggtgtggacagctcttaattagctagagtcttcttttgtaggcgtacgcacgatgtccggacgattatattaattaccctcaattatttctttntgtagtccacattattttctataaataatgggaattacagcaagaacgttgcattaattattgagaggaataagtccatatactccatacatnntggatgaaaatctacctagtacactgaacgtacgttagaactggacatccaatctctaaactntatagtattggttatattacacc

SEQ ID NO: 51122 - DNA, 376 bp, Oryza sativa
  unsure (1)..(376): unsure at all n locations
agcttggacaagttcacaagagctctgagattgcgatggttgtggaacgaatggagagatccaagcaagccttgggtgggtttggaaacgccttgtgatggtgtggatagggacctcttctccgcctcaacaaagtatactgtgggcgatgggaatacaacacgcttctgggactccgcatggattaacggccaaagaccaaaagacctaatgccgttggtctatgagatctccaaaaataggaagaaatccctactgctagggaaagaagacgactcctatgtgcatgacctgaccctcgatgcnggttcatctatcacaatcaaccttctcgatcagctagtccgcctgtgggaggcggtacggaatgtgcact

SEQ ID NO: 51123 - DNA, 282 bp, Oryza sativa
  unsure (1)..(282): unsure at all n locations
tcttatgctcgtggtaagaaccaacagtattgtcctcgtccatgtacaccgtgcgaacaaatgtgctgctacagagcaccgatgaatattatcgcctatatcttgcttattataaatcaccaattcactgaagctgcctgtcttgacaggatcgaacccaaccactgttaagttatcacagtctactaatcgcagacgattgacagatgtgaggctngagagcacattcatcgactgcacgcttgactcgctagtaatagtgagatccttaatgggagccag

SEQ ID NO: 51124 - DNA, 478 bp, Oryza sativa
  unsure (1)..(478): unsure at all n locations
tataaaactcagcttacattcagattggaacgaaggggagaagtgaggatanattatataggctagccaccgaaggacaagacagggcgtggtgcggcacaagaatgggatggaggtcgcgcatgtgcacgtatatagcgctcgactgcacaaaggcggtagtggcacggtggtgacgcgcacagtggaggtgtgacacagaggtcatatgtggcgggcgtgaacgggtggagcgcgagtgggcgtantggcgccctggcgtctcgcggcgcaggtgctatatagacgtggaggggacgggctggngagcaaggtgatgatggcgccatggcagcacgagacatagctaccagatagaagcggatgtgtgacatcctaacccagcgcttaataggattaatagaatactcatatcaacaagtttgcaacttctttctggaagccgatctcntaagaactctgaggtaagcgtacttgc

SEQ ID NO: 51125 - DNA, 283 bp, Oryza sativa
tcagcagcaacttggatacatataggcgtatctcagatctttgacaatgcttggctagactcgcacagcggatttcaacccggacatgcctaaccactttttacatggaagtgctgacaagcatacaatcatcccaaacaaatgtgccaccacaaagtatcttcggtactttaataataagctgatgcatcattgaactcttgtgaaaattatggagacaaatccgtccctcatgcaatttatgttatgataagccttatatgctaccaagccctttataaaa

SEQ ID NO: 51126 - DNA, 326 bp, Oryza sativa
accacgctcatggccctgaataatttcttcaagaagaagcccacccactgtcaggcccatttgtcaaatgataccaactactgctaatctcctcaatctacctcattccagcataaaactgaaaccatccagattgatttcacatgaaacattcactttctgacaaatacataggtcaatgtcatatcttcacagggcggataaccaactttttgctgatacacatgctcatccatatcataagtagaaagtggctaaagtacatgccagcatacgcttcacatcctaacaaggcacatcttacatctcataaaaggatctatttt

SEQ ID NO: 51127 - DNA, 436 bp, Oryza sativa
  unsure (1)..(436): unsure at all n locations
agcatcacctgccaccagtatgggagaccttgctttcattccacaaatgaagacctcgaaaacgagatccgcaaccgacaaanaaagcactattattttgtagagtaaggaatgatctgctctgaagaacaaagatcacacataatgcaacagagaagactgctctaaccagatgtacagtntgcatctggtgtgctccttgcctcgcgagcactaccaccaataccgggacgatggttgagacgagaaggcgatgctgaacaaacctgtctccatcaatgccgctcggccgtgggctccttggatcacaccagcaccggcacagtgggacgtcntccaacgatgaacccactccagatccacccatccacatcagcaaggacgagcaccttggcgagcggcggcgacactgtggacatcgccagactgaaacatg

SEQ ID NO: 51128 - DNA, 232 bp, Oryza sativa
tactcaataagttagaagcagaattagagtcctatgaataattgtgatattgaagcattaccagacaataacgacctacacaacaccgaattaaagagcattgaaacactcaagacgtagactgtaaataatgcactagagagcctactatgtggaaaatattatagatgcttcaagaatttggttagaatctgtaagaaatgccccaaggttataaaatacctgtaactgg

SEQ ID NO: 51129 - DNA, 461 bp, Oryza sativa
  unsure (1)..(461): unsure at all n locations
agcttcacgccacctcgtggctcctctnaagcatattttacaaaaaaaaataatgttgtaacacgagcatcacagaattgtctgggttccaaaatatcgaggtaaaaagaaaggaaggtagttcagaacacagctactacattatgatcnatatcttttcagtatagttgatacccactaaaatacatttactcttataaagcaagacatgtaaaaatccacatcatcgatatatagttttaagccattagatcatatttgtataaagataacaaccgttagttcaagcagctacctatccatctaaattaatcatatattagtcgtacattcacattcctatnttacacagagcgtcatgtttttctcttcanaataatgcttaactttttctaataaactcanatattgttaaaatggtagtttggttatatacgtgataatagcatgaacaatatgtt

SEQ ID NO: 51130 - DNA, 492 bp, Oryza sativa
  unsure (1)..(492): unsure at all n locations
tatttctattatgtngacttaatactcgcaggcagatgttgtttttgtgtgctaagtgatattgacaggtgctaagctctgagaaattgntagaaactagaaatatttttataggattaaactagaaatattaagcttaatactcaactgaattcagtttttctgcagaaaatatttttctggtgaatgacctaaattaattatatgcctttttttgcttaattgttgattacatattcatgctaaactaattactgctctttctgttacatttgaagcatcctctgacaagtattaagtagtgcctgcgttcatttgctgatttattggattattcagaattgatctttaattatgcatctntagttattgagatccatnaaatttgttgcttcattcttttaggtggcnaccatctacagttgacttccanataggtgaatactcgacatgaatgtgttatgtacaaaaagtattgggcatgtgttctct

SEQ ID NO: 51131 - DNA, 479 bp, Oryza sativa
  unsure (1)..(479): unsure at all n locations
agctttatgaccatcttaagcctgtctaatcngaatatatgatggaattaacatctattgtggtggctctatactaaatatgctatttgaatnttacaaaacttgatattgctgggtaaaagctgtgatgcatggggggaaacaaatgcattttagtggctcttattgcaatgtgcaacgatctatcagcttttctttaactgagtacatcagtacatgttagtgttcttcatatgaaactgacaattgtatttacatggatgtagctggcagaagtcagaaaaagagaanaacacaggtactttacttagcaacaatgatcagggaatttaatttgaatgtcgcccattgtttactntgctgatngcctttgccctcatttttctgtcacaggtagaagatgacgaaattgaagtgctctcaagttcctcccaggtgattggtttctgatactacagtgtntagattggacattatgg

SEQ ID NO: 51132 - DNA, 434 bp, Oryza sativa
  unsure (1)..(434): unsure at all n locations
tcgcataaccctcattgatggcggcagtgcactcaatatcctctttgtcagactatggatgatatgcagatccctcgctccgagttaaaatcaagcaatgcgccttttcatggagtaattccaggattatccgcaacttcactcggccagatcactcttccggtcacttttggcactcgggaaaacttccgcacagagaatatcaactttgaagttgccgatttctgagacagcataccatgccatactcggacgcccggcgttagccaagttcatggccgtcccgcactacacgtacatgatgatgaagatgcctggtccccgaggagtcctaaccctacggagcgacatcaagcaagctgtcacatgcgacaaggagagtngcgacatggcgcagacccgcgagatggcgtntgcccgagaggaaatctgac

SEQ ID NO: 51133 - DNA, 285 bp, Oryza sativa
  unsure (1)..(285): unsure at all n locations
tgtctgctatgtgaatctacaatgatgaantcaactttatcttgcacgcatcataatntacaaagcagtcagtatatcaaattgtatcatgttattccgggattcacactacatatgccatatattaatatcaagtcacttggtggactataattatcgaaaaccactctagtggttggattatttacttcttaaatatatgttcaatttgttcaactaaccacatagtcgggggctacacctaattggcgcatcttatctatgcacctaatattacatttaaat

SEQ ID NO: 51134 - DNA, 454 bp, Oryza sativa
  unsure (1)..(454): unsure at all n locations
agcttgngatttagtgttttagcgggaatttttcatgtctatngactgatntttgtgcggatttgggaaagaaaggtcgctgcctttgttctgaatgcataaaanaaaaagaaggaaggggagcccggtgctggaaatcgcactattcaaatttgacagagcttcaaatccgattccttgtctctaatttggtgggcttttcccgttggagttgtaaggttcatggagatgaaggaggaaattttttgcttgaagtcttactttntctctctagtttcagtttcgattaattngaattagaaaccagcgtcacagtttggtgaatattaactctgttgaaaaaaaaaatcttaggcacatctgtatgtggaaactcggaatcaggcatatttgggatgatanattgtcagggaacattccccaaaatgaagcatctgctattctgggtctgact

SEQ ID NO: 51135 - DNA, 374 bp, Oryza sativa
  unsure (1)..(374): unsure at all n locations
tgcccgcangcacgccgaacacgcacttatctgtgttcagctntatgctggcggagcggagactttcgaaagtttccgctagatccgagagtaaggtctcttggttgcgcgtcttcacaaccaagtcatcaacataggcctcaacattgcgtcctatctggctacccaaagaaattcgagtagtgcgttgaaaagtatgacctgcattctttaacccgaaaggcattgtcgtataaaaataagttcctatggnggtaatgaatgcagttttttcctcatcctccctagccatgcgaatctgatgataaccagagtatgcatctagagaacacacaaggtcgcaccccgcggtggagtcgacaatctgatctatg

SEQ ID NO: 51136 - DNA, 427 bp, Oryza sativa
  unsure (1)..(427): unsure at all n locations
agcttatatgcaactgtgcccaattagtcaataacttggaaaggaccataatatntgaaggccaacttgtgattagctcttggggctactgaactntgaacatatggctgcaatntcaggtatacccaatctccaattgtgaattgcctaaaacttcttttcttgtcaacaaaatgattcatctgctgttgtgcccgatggaggtgttgctgcactaattgctgcatgaacttcctgtctcgtagccatacagacaattctggaatagcacagtctctactgctgataccaaaatggtttggaggataaccatacagcacttcanaaggagttgtgcccaaagaagaatggtaggtactggtgtaccaatactcagctaaatgaagccaggaataccatntggaacgagtagaatgaacaaaacatc

SEQ ID NO: 51137 - DNA, 490 bp, Oryza sativa
  unsure (1)..(490): unsure at all n locations
ngagacgaactgctacagtacttccgctgatcaacgcgcaatgtgtactgctggtttgctgccgagcatgctgccacttctgctacagtgaccatgtactgtttacaccatgctgtgctcatattactgtagctacggagataagtgcagataatccagatcctaagttgccgggtgcccctcgtgacaaaagcaaagattactacatgctcgtcttcaaatatgttactcggataagttnttctgaaaatattcagctttaagggtagatggaatggttttgtcctctactattaaatgttggtagtatcaaaatataagtttgttttgtactaccaaaatttgtgaaatttggtaagtagtgttccaaaatatgaaacttttatgtacatactgctagtatatgtgcagttaaatatgaacgtcggaatttgcacaaataaaatgacttagctatcgggtaatctcatgcatagaaattattgcttgg

SEQ ID NO: 51138 - DNA, 404 bp, Oryza sativa
  unsure (1)..(404): unsure at all n locations
agcttctacaccatctcgctgctagccaagttgttgatctacctccatcaatgatcatgcggcaacaacgctctttgacgacacactntgtttgtaactacgtgtgtcgctgattatgctccgccttctccatttgtgcgctaaagacacgctgcacaatgaggctctcatagtgatccgcaaatgcagccccaatgtgctcttccagtggctcattatctgcatggtcagcccgcagcaaagcaagtgtatcatcatcgaaatcactagcagaggaggactcaccatcgtttgtgactaccaaaactcgcttgctgggcagtacgctgacatgacaaagccctgcacggtggactgacattctattcggctgtgatgccatgaaaacactcggtgctgacggc

SEQ ID NO: 51139 - DNA, 424 bp, Oryza sativa
gcttcttgaccaaatcagaactcaccaagatgttgcagctacctccattaatgatcacacgtgcacgacagttgttgatgacctaaaatatcttaaacaaattatggcgttgcaacctgtcatgctgctgtacctgcgtgctgagcacccgctgcacaatgatggtcctgtagtccgatgtgtcatcacgaccatagacttcgccatcctcatcctcaacttcttcttgctgctcttcctcttacacgtcggaggtggtgatgtatccatcttctgtaacaacatagtcccgttgactatggcaatctttctgcacatgctcatactctaggcaacagtggcactgattgccgtccgtcgaggcaatagatgacgcactcttggcgggtacctgcgtggaacctctacctgactatgctggtcg

SEQ ID NO: 51140 - DNA, 363 bp, Oryza sativa
acgcccgaagaaaagatggagtattatactatgcactttgacgggtcgaagagactatcaggcactggagccggagttattttaatttccccaactggagaaagactgagttatgtgcttgggataccattttccgcatcacacaatgtggcagaatacaaggcgctccttcacggactacgaatcgcaatctctttggcatcctgggactgatcggtcgtggagattcccagttggttgttaaccaagtcatgaaagagtggtcctgccttgacgaaacatgactgcttatcgacaggaagtatgctagttgaaagacagaatcaatggacttgaactcactcattgtcttcgacacaacaa

SEQ ID NO: 51141 - DNA, 481 bp, Oryza sativa
  unsure (1)..(481): unsure at all n locations
tatactagcacatgtgggtagtcttgtatacgaaatgaactgacattgactgaagaccttanggtcggttgggcgcacactccctctatcggtacacatataatcaccatatgtgcaccaggtgaggcccaaacctaaaatccatggttttcaccattttatttatcaaaatcacaagtattaaagttctgtccagattatntaaaaatcaattttcatgtttgtaatgagcccataatgacaaggaagaccattctaagcatggctaagcattatagtaacctagtgtcacgaaaactcatatataaagtggtatagtcatattggtcctaagggtaagaatgagagataaggatatatgtggagttaagtgataatgcaagtagtatgagttcgtctatcaagtntaacacaaattttaatttattagtgtacaatcgacatgcaagatttgcaacatttcaataaccttcaaacatat

SEQ ID NO: 51142 - DNA, 98 bp, Oryza sativa
tactcagctttgattgcacgtgttgtgtggactgacgtgctggcagctgtatttgtcgcttctggcactatgctgtgaagtgacccatctctcgacaa

SEQ ID NO: 51143 - DNA, 89 bp, Oryza sativa
ccacaacttttgagattacttagtctggtgccaccatataattaactaagatccatatatattccctccatattttaatagatgacacc

SEQ ID NO: 51144 - DNA, 455 bp, Oryza sativa
  unsure (1)..(455): unsure at all n locations
gatgaacaaccaccaagcgctgaggtcgccgccaattatttgtgtgaaaatgcgtncgattattngaatacaaacatcgagacagaggcatcggcaaaattggattccagatgcctctcatgatcaattgccccacagcacatgattaaccctcgcttggtttaaactttctgtagatagtgtatgaaccaaccatcctcatgtgtatctctgctaataactagtactagcagtaaacaaccatgttaatttgtgatatctaatgtctccaaataaactgccaaagcacaatgcctgaatatgttgttgtgtgatggntacttcacgtctcatggcttctcttatatatgactctatgtatgcagagcacatggatggacgtattgctcttcatgaaccaaattatcaccgtacagagtggtagttagtacattcagtgcatgttatgatctgaa

SEQ ID NO: 51145 - DNA, 351 bp, Oryza sativa
  unsure (1)..(351): unsure at all n locations
agatataaaatagatttatattcttatggctagatctaaggtgagcgttcgggttcctcggatgttgcggttcagtttcttcgggtatttagaaattcggttctagacaaatctaagccgaagagtntgtaacaaaacaataaaccgcgcccaaaaaaccaaacttattcggtttgggttggttcggttcgtcggtttaccgagttagcccgaaaaaagggacgtacctgttctgccatgccgcaggctgaagtcctgcaagcagcgtaacaacatattgggccacggtggtagtcggatgggctggattggctatgggccgtacgggttttaatgagaaatggatgctat

SEQ ID NO: 51146 - DNA, 472 bp, Oryza sativa
ttgcgtgaagaagagattgaagaagatgttgatcaagccgcagccgtaataagtgacacagataaaactccatcggcttcatccaaacaaactcctccaactccttctgccccagctcatttctcaagggtaaacatctctctctgaattccttttaaaactatttcattcacagccgatcacttataaatctcatctttgtagaaaaagaaaactgctgaaagaaatggcagcaacaacacttaaaccagctccaccagaaagactattgtgtataattattttcattaatccaatcatagctgatatttacttaacatttgtctttttacagcctcctcccccatcttcacctcctgtacaacaaacatcaagtgagtgaactccattggctataggaagtcaccatgttgaggaagaagaacaaccagccgctcctgccattccagtaagtcttgtctatgaaaatctt

SEQ ID NO: 51147 - DNA, 382 bp, Oryza sativa
  unsure (1)..(382): unsure at all n locations
ctactaanacctangagtatgacttatacgctccacccgacgggtattcttcatacggattatttccttatnacactctgagtgaaacttgcttgcacaagactngtcattcaacgcgtattccaatgttcaagttgcgagtaagtgtagcttggagttctacgtggatgttctaccataattggtctccatcgaaccgctggtatatcaacaatacattgcgaaagacagatctcaaggggatcttgatatctggtgggcgatagtcggaataatgaatgtgcgctagtccacttcaatattaattctttggaaatcacaaagctcacctcatgggatggcatgcatgtggagtttagtaccaccttgcttattctatgag

SEQ ID NO: 51148 - DNA, 453 bp, Oryza sativa
  unsure (1)..(453): unsure at all n locations
agccgcatagtcacctgcagctgcagcttgatactggaaactagtgtcgacactctacagctgcttatcgtgaacagcatgaatgcaagctggggaaaagccagctaagattagcagaacgccgagaacgcgtagagatggaagctaccatccaggccaatcggtaacttgtgtatgaagagaagtccaagcttgatcaattatctgaaggcccaatcaagtctaatattgatcgacttggagctcanaagaatgagctctgggcacaacttcaagaatgcaatgccgaactggatttggaatgcaagaagctagacgatctcccacagtctatcgaagaacaaaagacaaggctgagatcggcaatcaagaatgtcgctgatatgaccaagttcctaaaagtcatctctagaaccgatgctgaagatacccaagccatcgaagaagtagaac

SEQ ID NO: 51149 - DNA, 462 bp, Oryza sativa
  unsure (1)..(462): unsure at all n locations
cagcatcctaaaatgaaatgatgcgaccatgcctcgtcaaggagtccgagtgaatagttgcacatatgcatgaacctaagatgccttgcataacttttgattgcgttgagccagttcgattaatcgattgagggggatcggaatangatttgtttttaatcaaaattaaatcccaacctaatcctcctcatacatccaacgggcaaccataaacacattaccatctcttcatcacattacgctatggtcccgatcgcaaccaaaacatcccaccagccaatcccacttaggtaccagagaccatcatgaataatacgcattaaacacccgccaatttaaactaaaccttcatttagaatatcaataaaacaagctttgtaataataggtgcacnccacccccacaattcttttcctcgatcagagacaagtgcanaccatctagtcatctactactagtcac

SEQ ID NO: 51150 - DNA, 344 bp, Oryza sativa
  unsure (1)..(344): unsure at all n locations
tttttgtgagccaaccgacaggaattcccgacagaaatgatatttctgtcatgaaaacgacagaaaaatttattttctccgtggtctcttttctgtcggcaaactctgactgtgcacccacagaanagtatcttctgacggtaattcatattattctgacggttntcggtctacagggtagacctcttgatcttctttttcttctatcatcctccttcttgtcttccgacgactgtggctgctcagcacggttcttcttgctgtccattggagcttaatttgctagctaactaataactatagctaatagctaggcgctggctaactcgatcgaaaagagctgc

SEQ ID NO: 51151 - DNA, 470 bp, Oryza sativa
  unsure (1)..(470): unsure at all n locations
tccttcactggacatggtctagatgtattactggatcanagnanatttgatttaatagaccacattgnttcattcatggtgatattgtgtgtatatatgccacacactacccttttactagaatggtaatgttaactgttatattttttatctttgtgttcagaggtattgtcatatcattggaagatggcgcattatagttcgttagcttgttaaaatcgcaaatgatgttcttgttactggaaggccaattgttggaacgataactcagggtgtctctacctatcaattgcctgaatatttgatctggagtgttcatgcctcagaaattacatgtgcatttcacctcatgtccaaccataatatatgtcaagtatcggaatattggttatagccttatatcaatatttatgttcccacatttgagcatagtacatatgtcaaatatatactcctgacacttcatgaat

SEQ ID NO: 51152 - DNA, 450 bp, Oryza sativa
  unsure (1)..(450): unsure at all n locations
agcttcatcaccaaattcttagtcacttccctaatttcatcaacaggaatgatggngactgcaattggttgcactttcacaggttgaggacctcttggagatggatcagctgtgcgatatgcatcgctccctgcagacaaattgcagttcagtaaaacttgagcaccatcttgtaaccacagtatgtaatgggacaatgcagatgattataacaaaaggcccagtgccattacttgctggatgggtccctgggtatggattcctgttgtctggtactccttgagtatcttcatcaccacagcatgcaaagcacgacatattctactagaaacaaaccctggaacagaatcatgcagaattttattagaaaccagcaacatgcatttaggtacagataagagcatcaacagacggccaagagagagaatgatgagccaaatgaaaacacag

SEQ ID NO: 51153 - DNA, 385 bp, Oryza sativa
tggtattacctcatagattagaagggagtcaactgccactgtgctataagcgatatcagctttattcatggctggtctgaattaggtccgccactgtcataataattgaattacgagtcaaggcattagtgacaatacaacagcatacaattctggtagactatgcatggaagacagacaccggtctgatagagcacatcattcacacctgcgtcacagccaaggtgaaagcaatataagtagcaacagaaactgtagtaatccaagcaaaggtggaaccaaatttgtatgcaagtatacttgacaccataccaatcttgtaatggaaagaaacaaaacagaatgcacacatcatactaaaatgtagaatgtgacttgcatacat

SEQ ID NO: 51154 - DNA, 368 bp, Oryza sativa
  unsure (1)..(368): unsure at all n locations
tctgtctttcaagcaagtgtgaagcatagcgattcgaatttnttttgtacccaattcggctcacaaattaaatatgaatcacagcaatcaaggaacagcacggatctcgatgcgcacactggacgccgagtgagatacgctacgccctgcggatggacggacgcctgtactgtatgtagtagtagaatggaacccgacaagagctgctctctcacaacatcggatacccacgcgcggtttccgaagcacacgccanagtacggttttgccccncgcgaataactgcacgggcctctgngtttttcttacggagcgaaaggtagaatcgggaacagaaaaatatttgttgcgctcctgggcgaaacgag

SEQ ID NO: 51155 - DNA, 373 bp, Oryza sativa
  unsure (1)..(373): unsure at all n locations
tgtgaatggatttcttctcttattccaagtggacttgttcacattaaagtgaatgatcatgtgggatcaagatttcaaacatatacnggtttaaggcaaggggacccattatctccaattctttttaatatagctgctaatatgttagctatattaataaagagagcaaaaggtaatggtcaaatttctggagtggtccctcatctggttgatgatggttcatctatcttacaatatgctgatgatactatcatttttaagcatgatttgcaanaagctaacaatatgaaattgattntaactgctcnttgaaaattttctagtctgaagataaattttctagtctgaacaattagggaaggaatgtcatgag

SEQ ID NO: 51156 - DNA, 264 bp, Oryza sativa
  unsure (1)..(264): unsure at all n locations
aaatctcagctaacctcagaactgcctgagcacctgcagctactgtttaacaagataccttttggcctttttttgtgttttttctgcattcttaatgtctctttgccccctttttttattgatgttgacatgcatgccgcacaaaaatattttcgactaacaagcttttctgtnttcttggtatcggagggtcaatacaaaaattattcctttttcatcaagcacaaaatttttctctatttccacttatactccggaaaatat

SEQ ID NO: 51157 - DNA, 295 bp, Oryza sativa
  unsure (1)..(295): unsure at all n locations
gcttaacgtatntccaatagaacgtaccgtatgcctgactaatgantcctgtgaaatgaagaagcaaattaactgcaagggaaaggtagtgttatactcggcttcaaattttcaatttcggtagttctatcgggatgcaccaatacaaccgaaatttcctacggttattttgatccgaaataatttaattttttcaataaaatttggtcaaattcgaatatttnnttgtcaaattcacaaaagnttgagaaaatccaaaaatttcgagttaaattatttgtattggtgagggggg

SEQ ID NO: 51158 - DNA, 416 bp, Oryza sativa
  unsure (1)..(416): unsure at all n locations
gtgccttctacttgatggagcctaatgcttataaagacgccatctctatataaattatatgttccatgagagaaacaaacaagcaaaaaccaaaataagcctcatggtacgaaaaactagcattgtattgcttattcataagcttattcgaatcacttattaacacataaaaaatcatttgtgagtaaaacatttatatattgtgtccttagcgacttcaaagcaaatgatgtaagataaactatgatgtaaaaaccaaaaaatcaagttctaagattcaaattttggattataagcataagcataagccaaacaatgagggccataaaaaatgtataggcaaattgngagccagtgacctcgctnttgatactctgcttggctatcacaactacaactaaatatcaactgaacat

SEQ ID NO: 51159 - DNA, 194 bp, Oryza sativa
  unsure (1)..(194): unsure at all n locations
gccgtccatgtctggcatatggacgtcgctgataactagatctaacatgtccctgttttcccgcagcattntcagcgcgatagcagactgatttgttgtcgtcactggataaacacaacananattactctttcaagtgaatatctgttgaagatacaagaaggcatctgcgacaacaacaattcacccttaac

SEQ ID NO: 51160 - DNA, 277 bp, Oryza sativa
aaatgtaaatattgtcatgcaccgaatctcctctggaaaggtctcttgctgaaattctgtcatgcacgaattctactagtactgtatacagtactacttgggagcaatgggcatgcgaactgaccactgaacttgtttccaaatcagaggttcagacatggaatggcttccggtgccgccagtttgattgtttggtccgattctttgtttaatcccatagtacttgcccttataatgataaatatgattaatactctatgcgtgacttatctcttta

SEQ ID NO: 51161 - DNA, 308 bp, Oryza sativa
  unsure (1)..(308): unsure at all n locations
agctntactagacacgagtactcaatanaagggttgtcgtggagttttctgtcanatatgtagagcattgactacaatgatcagacaaaccgatggcatgtgctctacccaaacagagaattcaatatgggtattgcttgcaaagaagcctctataatccaaccaatcttaaccaagagaggattangataagggcgataggattgttggcatgtcaaccttgaccatatatataacacggtggaggggatagatatggtagtgatttgtgttcgccttaattagttntttttttttggggggggggg

SEQ ID NO: 51162 - DNA, 477 bp, Oryza sativa
  unsure (1)..(477): unsure at all n locations
ctaatttgatatgttcaaacaagcagaaacctgaatgagtagctcagtcttcaagcgtcgactagcttcatgctcactgcgagcttcaccacgttggctgataatagcatcaatttcatcaagaaatattgtcgatggtgcatgatgtctagcaagctcaaacagaactttaactagcttctctgaatcccctgcattagcgcgcacacagaanaataccaacattaaaattaaatatttatatacttctattgatcaaaaggtttaagttccatgattgaattagattgatcaaaataattgtgtgggagcacaggaggaaaanactttcaacaacgaccaggatgtctgtgtctttgatgaataagaggatgacaacaagaactcactaattaactactggctcttgccctcttatcactatcagcgaacatagaaactaaatggtcatagagagaacaactangacaactctac

SEQ ID NO: 51163 - DNA, 392 bp, Oryza sativa
  unsure (1)..(392): unsure at all n locations
gctatcttctggtacacgcgggacagggtctccatttatttttttcctatcgagtccagcttcctgcttccctacctaggaggtccaactccaacccaacgccttcatgtgccttgcccctcctccccccttggccgagatgatgataagctgctacgccttgctcagatgctcccatgccttttgaacgcttttgagaccgtgaccaagctggcgcggcgctgcatgcggcgtgagaacgagcgtcgcagcacgacgcgcgggcaccacgacgactccacgagtccacgagcgttntcacgctcgtttcgcacaggctcacgcgttgccgcagcccgttttgcagaggcctacgcgtggactggctatgctcgtggtgcgcggagcgggcc

SEQ ID NO: 51164 - DNA, 455 bp, Oryza sativa
  unsure (1)..(455): unsure at all n locations
tgcttacgagaacttcgaacgagtggccgctttctttggtctttcacttttgcgaggagggtggctgctgctgctgtggcctgtggggtagatcaaaaggggcgctgggtgtttcttcggctccgcaaactctcgcactcgtacagcgcacaggttcattcttcggacgcaccacggcccacgagtggtgagaaacgccgcgggaatctgattcgtatttctaaaccataatactaaatatattgtctttctaactattaaaaccaatgcaatntcactctcttggtgcttctagggaacgatttcgctgacgtagtgtctacatgacgatattgatccgatcttcatccagcgtggcattgacgtggcgcttatatagcatttgaatnttaaatatatacatatgagactcatntgtcattcacaacatatatattgtgagacccacttacacg

SEQ ID NO: 51165 - DNA, 420 bp, Oryza sativa
  unsure (1)..(420): unsure at all n locations
actcttttttttgcgcaatcaacatcctttgattctataaattttaaagaaagaaagtttctgttgtaaatgaatgtagtactctgtatagaaaatatgtaagaattcaacatttcgaattggacctcaatttcaaatttaggattacaaataaaaactatgcatttcaactggggtgttactgtgtcaaggtctttactccttaggatttgtttgggtgggcctccgtcctanctcatccacatggatgggtggattggaccaggactaaacccatccaatcgaggcctcgtggagaccaaattaacggttattgtctatntcatatttccctcgtccagagaaagtagtacctcgcctacttaaatntacaagaagaaaaaaagggtggaaataatgcaatatgggtcagattcttta

SEQ ID NO: 51166 - DNA, 474 bp, Oryza sativa
  unsure (1)..(474): unsure at all n locations
agcttaagttttnttcttgaatgctcacttacaatctatangtttacacccacaaggacgataagtgatatctcaagtttcattaaaaataatggaatccatttcactctgtatttattagtcttaccatatttatttccgcatggataatatgggtcaaaggtatgtacatagtttttgatatgttttactgtatttagtcttactgtacatagntnttgatatgtcttactataaggccctctttgtttaggcttaggcttatttgcctaaacttttaagtcagcttattggcttatatgatttataagccggtggatttaatatcctaagtttagtggtggagtcatacatctacctcacataagccaaanaagtttctcaaaccttagctttggctaatagtatagagtggctatggcttcaaaaaccaatgaataactgttgctgttgttangctaactttcgctatag

SEQ ID NO: 51167 - DNA, 371 bp, Oryza sativa
  unsure (1)..(371): unsure at all n locations
ctatattcatcctcatccctgcttttagaaattccatctcaccttctgttcatatatccctttgaaatgctcgttacttgtattattgcatcattctatcatgtcgcgtacgagtcctatggtacgactaaagatgccttcgctaggccgaaaggctctnttaatcactctttctcatgactctgtgagttatgcaagcatgcgactgttgaatgttgactgttccagtttgctccttttcatgattgccacaatagcgcatttgcatcacttgcgacttgctttacttctgcttgtgcagagaccaacagtttctatatttgttacttgtaacgcgcttttaatattaatcttcattggttattgtaata

SEQ ID NO: 51168 - DNA, 391 bp, Oryza sativa
  unsure (1)..(391): unsure at all n locations
tacatcaagtatgatgatacnnataaaaacatcaactctgtggacttctgtatcagagcatggtcaagtcaaaccaaaggaagaaagaagcatactgagaaatataagcactgtattcatgatctctgacaacaaagattcagtatagcatatgagcacctgcaagtatttaacctcatctatacggttgcactctacgactctactttgtgcggtaattggagtgtgaagagtatcaatatagggtatgatacactcattgagtgaaagcttgatactggcttgtacaaatcatatatgaaacaatcctctgaacaatgttgcactaaattgctcgagatattcgtatactactctctgtatatggatacaaatcaatgtactgaagctt

SEQ ID NO: 51169 - DNA, 416 bp, Oryza sativa
  unsure (1)..(416): unsure at all n locations
agcttgcaccccagagatctggcagaagcatctccattcattaccgnttctgatatagatctcgaaccctcagtccctaactagatcactcagatctagctactgttcctcacaacggacggagcttgacctcaccgaccggcacaagtcaatgccacaaaccccccaatagacaagcaagccgaacaaaaatgaaacggatcgtactacaggatctcatccgtacctcgtgcttctcgttctccatgagcttgtcgacgaggtgcgagccgatgaagccagctccgccggtgacgaggatcctcaggttcgcctgcacacacacacaaacacccacgaacaatcagaccaggtcgagcgatcgggccacgtatacggcgagatccagcgatcggatcccggcaaaatcacctgga

SEQ ID NO: 51170 - DNA, 477 bp, Oryza sativa
  unsure (1)..(477): unsure at all n locations
tcccaatanatctctaaccncaaattatgtcttacgcagccttatatctcaatggtgtgaagcanatggtatggagccaccanaacgtgctgctcaacatcataatgcaccagcatcatgtaccgctgctgaacatagcaacgtcgttgagcttcttcagaaattattgtcacaaaacctagaagaccagcgtgaggctgcaggtatgcttcgtcagcttgccaagcgcagtcctgaaaatcgtgcttgtataggagatgctggtgctattcctattcttgttagcctgctatctataactgatgttagcactcaagagcatgtagttactgctctcttgaatctttcgatatatgaagagaacaaggcaagaataatcacctctggagctgttcctggagtagttcatgtgttgaagaggggaagcatggaggctcgggagaattcagctgccacactgttcagtctntcactagt

SEQ ID NO: 51171 - DNA, 477 bp, Oryza sativa
  unsure (1)..(477): unsure at all n locations
agcttatcggtcgaacgctagctatcagaagtactcttctcatgcatcttgcttaagcgagataattcgatgttgcatcattaactatnnttttttttggtattatctgcttgttgggtcgacgggccgggtgagtaaactacgtgcataaaccgggggaaatgttactgttgcagcgagaccgacatgttttgatggctctattttccgtcaagtatacggtactgattaatttgacaattttgttaatgatgctcgcgtatgccagcgatcaacatgcaaaaattattgacgagtacgcgaatcgatcaattttgcaacatccagcttanattgtacacgtacantttactgtgatcgaacattgacgatcaacatccaaactaaagttattgacgattaagcgatcgatcaacatccaaagccgcacacgtacagtttaaccatgtgaatattgacgacggactacttctatac

SEQ ID NO: 51172 - DNA, 413 bp, Oryza sativa
  unsure (1)..(413): unsure at all n locations
ctttctttacaggacagaggtatactcagatacacactataatgtctttctttctttgtttaagaagnttcacctgttaagagcattagtatgatatgtactatatgatgattgcatgcatgcttagttgaatcagatggtacaatccgntcatctgcgaggctctggacacaagatgatgactctctctgtttattactgcagaaacatctaaatctagtgcccagaagcattcctgtctgtatcctaaggcaacccatgggccatggcagcatgagagagttgctgggagcatgcacatgtgaggtgtgtaagagnttgggaaagaagggtggtaaactcacattcttacacctnncttattatgagaacagactttnnatcagtttccttaatgatctgaacctgagtcc

SEQ ID NO: 51173 - DNA, 375 bp, Oryza sativa
  unsure (1)..(375): unsure at all n locations
acctgcggctgcagctgtgagatttccttttttttgaatttccacaacatacagncctttacgacggcatagttagctaatatgaatcccattctgaaacaggctactctgtctaaagtgaaaaaacgtccggttgccttacccttgcccgcgccaatggagcttttgtcaggatgctgaaacggcacgacatccgtctgcgcggtgatatttgcccctatgctctcgcgagacctgggtgcatcatgcgggctatcgagtgaatccaagcccccttatactaacgctgggcttgcaagaaattctccccgtttgtattgaggatatcaacgaatgatgcggctgttaaatagtaaacttaatcaacttcaattg

SEQ ID NO: 51174 - DNA, 152 bp, Oryza sativa
tccgtggttctctaatatatctatttggccagtcggcctatgtaattattaagatggtgtatagtcttaagatcctttcatcttagctggagctgctatgtataatcatgcttataatgaaagtgtggatctagtgcacatactgggaacta

SEQ ID NO: 51175 - DNA, 395 bp, Oryza sativa
  unsure (1)..(395): unsure at all n locations
gcttgtcagcaccaagcacaactagaaaagaagattgtctgttatacgtacttgtactttatacgaacggaaattagttagggtaagtagtgaactcaccagttcctgatagacgacggcatcacttttgttctcaaatgtgacagagccgtccgggttgaccttaccccttgcccgcgcccaattgcgagctctttgttcacggatgtctgaaaaccgggcagggacatccgctgctgcagcggctgcatcttcttgggcccatattgcctccttgccgatgtaccctgcggtgcccagccgatgcgggtgctcattctcgtgttgcagtacgcgatgtgcctcgcttgatccctaaactgtgngtggtcttagagagcaaattcctccacacc

SEQ ID NO: 51176 - DNA, 267 bp, Oryza sativa
  unsure (1)..(267): unsure at all n locations
gaaaccaagcttctatgaanatggtgacctctcatgacagtcttatctccttattaagaccttcctgacgcatgatccatcattanggcctcgancctgaccatcttcttctcactatcaacatggagcttctctaacattcttacaagctcatcattcgaatctttcctctcttcttattatctaaactgttgtatcagaacttttattacgtcgcgctctcttataaggacatttttttctaatagatctcgctctctttttatt

SEQ ID NO: 51177 - DNA, 426 bp, Oryza sativa
  unsure (1)..(426): unsure at all n locations
attgcgcgctanatgtgaagaagaaaggggaatcaaagaagagctaagagatggctatacatctgcgcatataaagatcgagaccgctttccgcgtacctcctaaggatgcatacttttcttactctcttctcttggctttatctttggttgttcttgcgaagtgccttttgtcagctataaatcaccttcaattgccgcctcggttccttaacagccataacaaatctataatgtttcagatcagataaagtagggaagagcaccatattggacttgatgtgtcctaaggtaagacagaccaatattttatacagttcataagtacctacactatgagagtactccatctataataaggtattttatcattggagcactcagtttggtagtacttgtcatctcacataattcaaaacttgtttac

SEQ ID NO: 51178 - DNA, 454 bp, Oryza sativa
  unsure (1)..(454): unsure at all n locations
tgcatcgactacaccgaccttaacaaggcatgtcctaatgattcttacccnctgcctcgcatatatcagattgtcgactccactgcggtgtgcgaccttatgtgttttctagatgcatactctggttaccatcagattcgcatggctagggaggatgaggaaaaaactacgttcattacccccatatgaacctattgttatacgacaatgcccttcgggttaaagaatgcaggttctactttncaacgtactactcgaanttctttgggtagccaattaggacgtaatggtgaggcttatgtcgatgacttggttgtaaagacgcgcaaccaggaaacgttactctcagatctagcggagtactttgagagtcttcgctccgcccgcataaaactaaactccgataagtgtgtgttcggtgtacctgctggcangcttctcgggttcttggctc

SEQ ID NO: 51179 - DNA, 341 bp, Oryza sativa
  unsure (1)..(341): unsure at all n locations
cacctaaattcccgtgacttgctgagtacgaaagtacttatccttgatctatataaatatatatagttcctccgccctgaagttgaagatgaagtaaagtgaagattanggtttcgtcctagttcccagccgtcgcctgtggtgttgggtgttagttcgttggttccgctgctgctgctgctggtgtttccttgtccgtgtcggctgttgcatttntgggctcttctgagctgcaacctaagttaaggtaaataagtcctctatttattttaaggattgcaatgattcatatttgtcaccgtgggtaccagcactatgtcctgngactggtactgagatcg

SEQ ID NO: 51180 - DNA, 453 bp, Oryza sativa
  unsure (1)..(453): unsure at all n locations
gtgtgattntatcttcagttntgcatggtctaaaaattcgagccacccactgaaccctggaataacagaactgcaccctttagctttaaaatttcttgtaggtcttaaaacttgcttaaaaattcctaaaattttgaggggggtagataacctatacagaaacttatttgtgcanaaatttcctttntagcagccacctaaataggctttttacccctgttgttgctgtggtttgctcctgtccagaacctgaanactaagtcttcttgttcttccttgatcctccctttcacttaagggttctaatctangtaatcttgtcctaatctcgtagatggctcccttggaaccctcttactattccggangcttcgtggctggcaccatgcagcatacactctgggaaatgatgcagcacgccggctatactcggcaaccccagtacactgtctt

SEQ ID NO: 51181 - DNA, 382 bp, Oryza sativa
ctgcagctgatgctggaataagaaattcaagattgggctacccatgccacatttacaaaagaatcagattcggcgggccacggaacataatttctcgctgtcgatctctcatcgatcgatggaagtcgtcgtagcttcgcatccagacaccgactagaccagccatcgttcgattacaactcggttgatttttatagtaaattattcctcgttataagacgctttaaattatatagccacgtaatgtcgttattaaaatttaaaagtatacatagaaacatcatattttttattataacataaatctatctaaaatcttaaaaacaatagctcttacattaaacgaaaaagattgaggcaagagataattataatctaaaaa

SEQ ID NO: 51182 - DNA, 459 bp, Oryza sativa
  unsure (1)..(459): unsure at all n locations
ttgtgtcggtgatcagtgtgtgtgggagattcanggtgcgaagctggtgtttatatatgggttctggaagatggttggatggatggtgccgcgaagtgagtgatcttttctctgccatgccatgccgtgccattgccagccgtgtaatgggtgtgagttggcaccacaggggcgatagacagctgcctctgtagcgagcagcagagggggctcggctcggttcggctcgacgacgccatagatgggcacgtaatagtatagtacagatattaaaatcgaccgagacgttcagcgaattctggacgcaacggctcgtttgctcatcgctggatctgccatctatggttgtgctctcctcagaattcagatggccgtatatatctcttgggagtcttggtactccgtctacggagtatataatatagaaatantaaggtacggatatttctagaactccaa

SEQ ID NO: 51183 - DNA, 496 bp, Oryza sativa
  unsure (1)..(496): unsure at all n locations
agcttcgagacagnggtacttgtaagttgatgggacaataaaaaaaattgggtttcaagagaatgtcgaggacaactgtatttattcaaagtttaagaatgggaaatttattttcctaattctgtatgtggatgacattctactggctagtagtgatgtcagtctactgcaggaaacaaagaaattcttgtccttcaactttgacatgaaagacctcggtgaggcttcatatgttttgggcatagagattcaccgagatagaacaaagtatgcattgtgactttctcaaaagacatatatagaaaaggtgttgaagaaattcaacatgtacagatgcagtgctacacctgctcctataatgaaaggcgaaaagtatggggcatcgcaatgtcccaganatcagtatgagctcaatgaaatgaaaacaaagccatatgcgtcagctgtaggaagcctacagtacgcgcaagtatgcacacgacctgacttggcattt

SEQ ID NO: 51184 - DNA, 142 bp, Oryza sativa
gctatagctaatcatgcgtacgacgaacgcgcggatctagtgcacatactgagaactacattcacatgagtctgagttatgaatattcgagaggatgtagatctttacccattgttcgcaagtctactgaatgtgtgacaca

SEQ ID NO: 51185 - DNA, 391 bp, Oryza sativa
  unsure (1)..(391): unsure at all n locations
tgtcttcgatgatttatattgcactntcactacttntttattcagcgactcgtttctcttgtaaattctacagtgtgcctgccgctcgtgtgattctcaaataattacggttggaaatattttcaaacagcaagtttcgaatttgctgaaatcttttgtttcagatctgctcaaatttcattgttttcaattaacatgtgtactactccctccgtcacttaatataanggtatttgatatttntgcttgcactgtttgacaattcgtctaattcaaaaagttttggaattttatttgtgacttactttattatctaaagcacnaacttttgttttttatatttngcacaattttntaaataagacgtgtgcataaacaggacaacaaaata

SEQ ID NO: 51186 - DNA, 234 bp, Oryza sativa
cttaaccgctctgtatcattagctagtggtcgaatccgtggactgaacattgacaaaacgacggcctacactgctaataaatactactctaaaggatattgatgtaacaattattaattttacaaaactactctcaccctaaaagacattgcgcacagtacatctctattgaacattaaatatatattgacacaaatatgctaagactaaccacatgtattttatttgacactt

SEQ ID NO: 51187 - DNA, 464 bp, Oryza sativa
  unsure (1)..(464): unsure at all n locations
agcttagcaacgtgatacctacatgganattatttctctgaagatgttttgataangcaattaaaagcgaggagtggcgtcaagaggtataggaaaaatacatgacaggtgtattcaactaatgaaagatggaacataatggagacacctttnctctatgataatgaatcacctgaactgtatgcatatttatatttttgggtttcaggaattttgttatgtctttcaggtaagaaacaatccatattgctataaaggaaggcctatgttaaagactggttatgatacttttatggcaagcttggatattgaaagcactcttgacaaggtacggtgtggttctacactatattgtgctcatgttgattatcagaatacctangataccatccattaactaaattcaattatattcctacatgtacacgtcctggatgagttacaatttggtctggatcgcgtat

SEQ ID NO: 51188 - DNA, 386 bp, Oryza sativa
  unsure (1)..(386): unsure at all n locations
ntgtgacatggttgatgaggtagntagtaaagtactttgatataattcagtaccttaatggttaactgcattatttaacatttcagaaattaagaaccaagtgtcatagaacagatcatgcactgttcatgattntccttacacttgacaactgatagattntcgtctttcatatatatcttctgtcgatgacaactaatcatgatcaatgctgggctgcaaaatantttcctcattgctcatatgctatgactcaattctttntattcacttttagtcctcatttacaatatgtgtaatttgttgctgtataatactatatatcttcatctgaanacattacaacttctgggacaaaggagagggagttgactctataattgttt

SEQ ID NO: 51189 - DNA, 433 bp, Oryza sativa
  unsure (1)..(433): unsure at all n locations
gagtggtcattagtccttatgagttgctattgtggtgctgttaatgctgattgtgacaaaaagtgctctctcttcggcctaacaaaccagattaaggcaagtatcatcttttgcatcggatcctactcagcaaaggattgcttactcattagtttgtttggtcaatatgaaaagtatcaaaatctatggccacatattttntnttatatgggaaaaaaattaaagaagcattagggctttaattttgctggtatttttacttntttccttactatgacatgcatttcttctgagttcagtctggtatttatccaacactagcatgagctgactattgctagtgggaagctcatttgtttctaggggtccttgatgtaattcccgtttctttggcagaaaaatgtccggtggagcattcatttaattaacacat

SEQ ID NO: 51190 - DNA, 368 bp, Oryza sativa
  unsure (1)..(368): unsure at all n locations
ggtgctgcatactcgtacatattgtntcgtggcagctcagaaaccattgaaaaaattcttaggaaacaagagattaaattgctttgagactgttgctgcctacgtttcataagtccagcaatgggcctcacgacatgtggtgcaggtatatggccccatcccttccacagaactagcatggtggctcgtgcagattgcgcggctagcactattataaaattctcatatagtagcatatatgatgagggatgtacgtcctgatcttctgataggtattgataaacaatcgaattgggcggagtcgtgacacaactcgatccggcttctgaacgaacatgctactgagccccgcaatcgcagcaccatgt

SEQ ID NO: 51191 - DNA, 432 bp, Oryza sativa
  unsure (1)..(432): unsure at all n locations
agcttctgtacgtgttaaccctttgctggtntctgattaaataacataacttggtataatctctgatattcagaataggattccatcagttgcttatagtgcctttgaatcaaattagaatatagtaaaggaaatatatgtacagttttctacttagaaaggaaacatgatttattattcaggtacaacatactaacctttacaatgaactgcagatccctttttttcctttgtctggcaacagaggtagcatattgacgacatatgtaaacatgggtttcttgaatgaataagtgccttggtggctntatgttacatataagatctattantttttttagtactggtatatattatcagngatgcaagaaatggattaccctgcgagagcaagaatgggcatggatctgtgtatatagtgcactatatagt

SEQ ID NO: 51192 - DNA, 505 bp, Oryza sativa
  unsure (1)..(505): unsure at all n locations
cttggctntacccggattgggcttcagtgaggtgttcgtcatgctctctccactntgatcctgttcaaatatggagaatgtcgactntcttagctcctctgaggactacgacgatcacaccactaanagcatgggaagttcggagttcaatgacgactatacccccacttctttttggtgtattcatggcagatacagtcgacgaggaagctcaagcatggctagccagcgaagcagaggaagaacgcataatgcttgaagaggagcgcatacacagggaagaagaaaacgcaggaggcgaaatctagctcatgtctgatgagccgctcacaatgcaattatctagacccgagtcgacaacaccaacgtcttcgtcacgcctcaacagaacgcggtcacggcaattaccctggtcgacaccatcatncgacaggctccaaccaatgtgacaccaatcatgaataaagtcaaggccatgatcgccaccactgtgcccatggatgct

SEQ ID NO: 51193 - DNA, 467 bp, Oryza sativa
  unsure (1)..(467): unsure at all n locations
agcttgatcatcaagaagctggaccgttcgtcttctatccatttggcaccggagatttcgtctgcatcaattctngcatgggtcgtcgaactatgttctggagttgtttgtgttaaagtcccaaacttatgttgggtttcatttattctcggttgttaaaaattattgaaacaaaattacttttagcaggaatataaaagagaccaaatgctccaaatagagcatatgaaaagatcagttgttgaacaccctgaaatagaaattcctgaactaaagaattaaacattaaacagttaaatccctgatgtaataaggggaaaatatgcactgtgagagtgcctcctcactgtaganntttttcatttactctagaaaaatgtactgtttactattcctactctcgaattttttctagtggtcttgaggcctggcctaaggtgatatacctgaatatacgatgcctactg

SEQ ID NO: 51194 - DNA, 425 bp, Oryza sativa
  unsure (1)..(425): unsure at all n locations
agcttaatagaattaatagaatactcataccaacaattttcaacttcttttctggaagccgatctccaaagaactctgaggttaagcgtgcttggcctggaccgaccgagaaattctttcgtgtgcacacaagtgagaacaaagtttgtagaaaagatttgtgttggtctgtgagggcagtctatgtcccaaaaaaagctgcaagatgtaagtgggcccggcctatgagaggcagaanagctgccagatgtaagtgggcctggtctgggagaggcaggatgttacagaatggtatcagagccgattctcgcgggttcatgggcgcgtctgtcgcacttgcgtagacatnggtgtgcattggctgtgtgtggacccggagtggtcacatagcatggcacatgcgctggcactggacacacgcacgt

SEQ ID NO: 51195 - DNA, 370 bp, Oryza sativa
  unsure (1)..(370): unsure at all n locations
tcgtaatcatattaagacttattgtattntacantttgacanantatttaagtaagacgaatagttaaatgtttgaaaanaaaattagcggcgtcatatatttacaaacggaggtagtatgcaattatactaagtggggatgatttgtatggggatgatttgtatagatatatatagaattaccacgtagttcagtaataacgtatcccatgggttggcttcatggcccatatattttatttattaattaagccctatatatacgggcccatctgaataaccacacacaaacaaagatttcacataattntcctagaagagaaacaaacaaataanaacaaggttntactacacgggcttaatgcgatct

SEQ ID NO: 51196 - DNA, 443 bp, Oryza sativa
  unsure (1)..(443): unsure at all n locations
tgaagcgcttagacgaccacgacatacggtctcaagacactgtcaaggctctggactcacacgttacatgtgaggtctgcggcaacacgggtcactctatgaacgactgccgggaaacccgtgaggaggcgatgtatatgggcaacaacaacaacaacgggtatcgtccacaaggaggccaggggtggaaccaaccacgcctatatattcagggggtaaaacaatggtaactnttctaaccaaccctccttgaaggatctcgtcattgcacaagctaaaaccactgatgcgctaaacataaagctcgctgccaatgacaagatccttgtaaatataaatagttaagctagatgggtcgccttccgctcttcacaaccaactgagctttattatatgatagaaacccacctactcagtggcttcttagtccctgcaaaaaaact

SEQ ID NO: 51197 - DNA, 452 bp, Oryza sativa
agctgagctgctgtcggttcatataacactgaatggataatcgtacgtatctcagatctgaatatagatgtaactaaaattatgattctgagaaggcacttaatttcccatttcatcattggttgagtcaaaaaaatttatgtattaagtcatctattaaacccgcagcgacgcagcggggtacgtactaggtacctaatggtcattccagaggttctcacgaatcaacctgttcagcaaggccaaagcatactgtttatggtgttttgggagctctgtagcagctatgagatcaacgcggggaatcctcatgactcctccttgatgaaccacgtgatcagcacataggaaacggtgaggattacggttggtgttcgccatttgcactagcgatggcagcgaagctagattggattgtggtttatcttgaacaggaggcgaagatactggag

SEQ ID NO: 51198 - DNA, 322 bp, Oryza sativa
acccctctcccacatgtcacacaaaccacgaacatcccaatattgggctggcctaatgaaagtaaaagatcaattttttcagtatggatcttttaaacctgtgaatggaatggaaataagattttgggaagacacatggttgggcttgcaaccacttcaatatcaatatccttctgtgtacaatgtggttcgaaagagacattctactttggtagaggttatgagcacaacaccgttgaatgtttcattccgacgatcaatcgtatgaccaaaggttgatgagtggaatgatttgatttctctactagctaacataaccctg

SEQ ID NO: 51199 - DNA, 362 bp, Oryza sativa
  unsure (1)..(362): unsure at all n locations
tatttactganatggntatagctatatggcangaatattccgcattatctgtactctgaattaggtagctgctatatatttactcctatctcacacttggtataaattcatcttctctgtcctgttctctgtatgatacattttatgcatcttgacaggaaggtaaatattggtgattaaccttataaaaattgcatttttaacacgagattcaaagtccctttctggagacgatggatacgcattgctggaggagtgtgaaccaccacacaatcttcatcttgtcaggtcaacttatatgggtccaagacttgtggacaattgaacttactaggattccttggtttcttgcagcgcatgat

SEQ ID NO: 51200 - DNA, 460 bp, Oryza sativa
  unsure (1)..(460): unsure at all n locations
gctnttcatgcgccgaaccatatggttcatggagttnacgtacaaccaaacaatcgcanattttcttcgccgtgtgggccaagctccgtgcgaacaaccaaagatgctctttntgaatcttgattagttagttggttgtttgtacagtacaacccaggatagatntagctgtgttcgaaccccttcttccggcacgcaaaacaaaactcgtattggtgcatgattaattaagtattatttntaaaaaaaaaatgaatcaatatgattntttaagataactttcatatagaaagtttttcataaagcacaccatttagcaatgtgaaaagtggatgccgcgaaaacgaaagaggtgggttgggaaaatgggaggaagaacacagcctatagttgaaggcagtaaagttcttttctgctttaaggcccgttgattatacaaatatattaaattggaggattt

SEQ ID NO: 51201 - DNA, 489 bp, Oryza sativa
  unsure (1)..(489): unsure at all n locations
tcatgttgcacataatgctctacatgcatatcatcagcaaattatgctctggctgctaactatcaacatgcaaaaaaaggaagcctctttcttcctttgtattttatatcagcatccctacttcacctgccatgcaatttcaataaacactttgctaatcaagggcatgcttaacaatcttttggatgaaggcacaacaaagctcctaatgcngtaagctataatatgtaataatctgacgggtgctatctctccaccatcttgagaataccaactcataagctaaaagaatataatcttgttgagggcagctgggttcatctccaaagctacttaaaattaagttaaacatagccctctttttgataatagtttgcatagctggcgggaaataactatcatagatgagacctcattgaacaaaaacaagctatttcangaatangtgaatcangatgatattctgcatgtctgaagttattctgacat

SEQ ID NO: 51202 - DNA, 404 bp, Oryza sativa
  unsure (1)..(404): unsure at all n locations
agcttgttcagcaactaagctcaactagaanaaaattagtcctttatacaaacttctactttatacgaacggtaattagttatgttaagtagtgaactcaccagttcctgatagacgaatgcatcacttttgttctcaaatgtgacagagccatccgggttgaccttaccccttgcccgtgcccagttgcgagctctttgttcagggatgtctgaaaacggngcaaggacattcactgctgcagcggctgcatcttcttgggcccatattgcctccttgtcgatgtaccctgcggtgcccagccgatgcgggtgctcattccgctgttgcagtaggcgatgtacctcgcttgatttcctaaactcttgggtgttcttgagagagcagaattcctcccacaccgc

SEQ ID NO: 51203 - DNA, 175 bp, Oryza sativa
  unsure (1)..(175): unsure at all n locations
ctagaaagatcatgattnggctcgtacactgtgtcatcatgctaatatggtttctacttcacatgctcctattgattatgagatgacagatgcaccgggacacctattacacatagacactttcggtccagctagagagcactctgttagaggaaagtggcatgtgttggtatta

SEQ ID NO: 51204 - DNA, 357 bp, Oryza sativa
  unsure (1)..(357): unsure at all n locations
gctnggagganggatataatacagactgttctgtgtgattgattctctggcttaaccaaggaggtgcggaaattctttcatttttcaatctaattgtttgaatatttacagaaatattatatctgcggaaagatttacaaaaatagaccctgccgccctctatttgggcggaaagctgatgtggtacacgacgttatcacgacgccgtgtgcatcttgccgttaggcccttacagccctctgtaatggcggcaagacgtaaatgcaattttgtcctaccaaaaacaattggctagtcttttagatatgagccctttcccgctttggaatttgggcggaaccccttgaacccaacata

SEQ ID NO: 51205 - DNA, 459 bp, Oryza sativa
  unsure (1)..(459): unsure at all n locations
ngcttgcagcaagtcgtcaagttctacgtgagtactgaaacatgagtgtgtcgacgattgcgtttgttcttgatgaactacgccagtgtcgggagaaggaaaaacaagagccagaacagcctgaatggggagtgatgctggcctttggaccagggatcactattgagacaatgatcctgcgtaacccattgcctcatggtcttatggaaaattaattaccactatcatgaaaagaatgcaaagggaatcaacacgtgatgcaccagtatttcactacgctatgataattaattaatggatgacactgattgttcacgcttaagtanttccaactctacttgttgcaaatataactcttattacttccatatgtcctctggttctttagctctcttgatttgtacaaaatttgaatacccttttaccgtgtcatttgtcagatagtcgaatattacctct

SEQ ID NO: 51206 - DNA, 445 bp, Oryza sativa
  unsure (1)..(445): unsure at all n locations
tgcanagctctccaagaagtcagagtatgcatcaatttgcaaccgtatagctgaacttgtgcattccttatttgcgcactcctttaattcatcctgactgcttgtttccactggacatgtagacctcangacagaggaccaatttgcctgagctntngaatacagatctgcaacatggttcaggtcttctgctcgaaatccaataacagaagtggcagaatatcgatcactgtacctctntacctatgannnggtaactgaaatcagcgtagagcttcagcaatccacccaaccaaacaaatacaaatgaactttcatattacctgccaacaatttatacagagagcttcagcatatctccgcatccatgcttctagatcattctgctgtgtacaatcatttgcaccgatctgttgattatccatgttccagcactcagagcata

SEQ ID NO: 51207 - DNA, 383 bp, Oryza sativa
  unsure (1)..(383): unsure at all n locations
agcttaataatatgcaaggcagatgttgcctcctgtatctggacccgcacatctaaattcaactatgctctggaagaaacactgaaagagttaggaagcttacaggtattagtgctccgccatcctgctggtgttctgccaaacaacatccaacatatggtccaccttaagtatctggacatcaaagaaagcagagaatttacctttctgcctacatcgntatttggactctaccacttgcaagcattgagtctgcagtctcggtatgtgaatagactataaataggactcgaaaatggcatcaacaggttgacccagttaagatacttagatgctccaccaggaataatttcatgcataagattgattggcaagctcacatt

SEQ ID NO: 51208 - DNA, 491 bp, Oryza sativa
  unsure (1)..(491): unsure at all n locations
ttacactagccggacagtcataataacttacctgttggaccattaagtggccaataatgtaaccgaggtaggattgtctggccttaatttgtatgcgtcgaacagtttgttcacgccctggactgttcagtccatacaaactttaggtccattgtgtgatttcacttgactgtctagtccatgcattcagcgctgtccccgaaggtggtgcaacctgcacgctcgcgcaaggctcgctatttccagcggcctcctatacccatatacgttggcctatacgttcttgcgcatcngcctattagacaatgaccagaagcangaatgctggcctggtgtgctgatgggagcgtctgctcaagcaatgagagacgaccctgcacgcgccgtccacacgcgttgtgaaagcgganatactgatagaaggctaactaattcctaagtataatgatacgcgngagataattgaatcatttattatagtatgctagcat

SEQ ID NO: 51209 - DNA, 444 bp, Oryza sativa
  unsure (1)..(444): unsure at all n locations
agctngatcttaccctcttactccttctgtacctctttcctctctggcttttgaattctttcttttttctttcaaaaagattttaattggaccatgggcaacgttaaaattgctctctctgcatgtgtttagtattttgcattctggcatcttgtcagaatcgaagttgccggagaatttcccagtgtgtgtagtggagggagaatatgatgagcatgtgcatgcatggatgaacctgatactgcccttttcagattcctccaaactgagattaatgtgaatgtgtgaatgaaatgtaatcaccttttaatatcagtaccacttcttcatggcgagagatatgacaggttgtacacgcatttggcgtacgtaaatattgcatanatgacactgattaatttctttatgtttaagtcgaacaatactcagtgcnacagtaaatgt

SEQ ID NO: 51210 - DNA, 472 bp, Oryza sativa
  unsure (1)..(472): unsure at all n locations
agcttcactgatgaagtcatggattataaaggggagaaaatcctcagtgctgttgtgcggaaatatgccaatgataccttctttagcagaanaaaaatatgctgttgtacagaaaaattgccggtgataccttctttaagcagaaaatgataatgatatcttgtttaccagccgttctaacttttagagcatgtaaacctgctatcagttttgggaagttctcgcctacactgaactttataacatcactagcgtgagggcaaaccgtgtatcattgacgctgctcccttcaatcaatctcaggctcagcatgccgcgatcgtgacgaccccaatgcgaattacattagccacagttcattattcagtgcagtacttgagaaggcaatcatgagaaaatgcaattgtctatcaactcctcccaagaagtacnaacacattcacaagtatttacaaccaaggcgcatagctat

SEQ ID NO: 51211 - DNA, 292 bp, Oryza sativa
  unsure (1)..(292): unsure at all n locations
tgtnaacccanatagtctctcactgctagtgccagtactaagtatttgaggggtacatgcatctttcgccaaccttcttattttggatgaacagtgtccagtcccatataatgtgtgtcggtgatatgggcccggtggtatcagatttagagcgaggaggctgccccacgatgccacgtggtcctccccggaggggagtcaggcccgaggtatggtggcggccactcctttccagagactggatggaggatgctgtcccccgatgccacgtggccctcctccgaggggagtc

SEQ ID NO: 51212 - DNA, 412 bp, Oryza sativa
agcttaggctgagcttctagatataggacgagtactattgaactatatcctttcagaaatggattgtggagaagaccagcaatagtagtgcttgctaccctgataatactagaatcaaacacctgtgtaacaggagcattatatccatatcataggctagtgcaccaaatattatgaaagcctagatgctctgagactgtagaatcccatcatagagtaacaggaagctctcctttgtcaacttttcctcttcccatcagcaaataaccgtagcagccgacctgattacgtgatgacttcagtgatcatatccatcaccctatatatacatgcagcatgttcattcaacagcatgtacattcatatctacatagcagacaacatgtaatgttctagcaccaatccaaacatt

SEQ ID NO: 51213 - DNA, 493 bp, Oryza sativa
  unsure (1)..(493): unsure at all n locations
aagataagttgaaacagttggaaacaatgtcacaaattntgtacttttgaacaacatggttcgaaagaaattaaataaaagaaagttatataatcaacatgctcaatttatttcattgcagcaagattaaataaaacaatgttgtaaaacttttgctggtaaatgagccattagtacagtaatagatgtacagtactaataacactggaataaattttgaatgagaaccactaaaagagattatgaagtgcatgtgctattagtttggtttaattaaaagggaaagggaggagaacagttctacttttccaatanttttagaggtcttctgngggtaaccatttggcataacctatggtcaaggaggctctgataccaacttgtcacgcccggaatttctatccaaaattccaaacgcttacatgtgtgtgaaccctcgtcaggaatcagccgaggacacaataacaaattgataatagagtacaattattac

SEQ ID NO: 51214 - DNA, 432 bp, Oryza sativa
  unsure (1)..(432): unsure at all n locations
atgtgggatatgagagagaatttgcttatacaagacataatatagcacaaaaatatcttatgtagtgtatgaaagatgatttatattaaaaacaacaataaataagtattttatatatcatataacagataagttatattttttaaaaaaatagaaatgtaaaagacttaaaacttctatacaaatntccatgttgtgtaaggaggcgatataaaagtnttcatattttttctgaaagttcaaattagataaatcaattgttaaccgtatatgtccataagtggtatttgggtatttttgagaagaacgtctagcccgatggcgtattgtagaacaaatgatgaagttgctggtatattatagaaagcgacaatgtctatggcanatcgtcgaacttgaacaaactcggtagtatatatagagtatattatc

SEQ ID NO: 51215 - DNA, 473 bp, Oryza sativa
  unsure (1)..(473): unsure at all n locations
ccttgaatgttgttcactaaagaaaagacatgcctacagcatgtgctngtatgtactgttgtattatctattgcgtgctctggttatgaatgtaactgctacattgagagaggctggtcttccatcatcaaatctgaaaggcctctntagatcccatcctgtggggcagagcagcagaaagctntggataatattaaggcatatatgagttcccctccggttttaattcctccacagaacggagtgtctttcaagtngtatttattcaccgatgagaagtcaattagctcagctttgattcacgagttataaagcaaggagagggctattntctatttaagcccgatgctcttggatgcagaaacaaggtattctccagtggaaagaatatgcttgtgtttgatttctcttgacaaagtgaggcatacttactatcaatgatgcactgtgtatgcaaaccgatgtatcaaata

SEQ ID NO: 51216 - DNA, 338 bp, Oryza sativa
  unsure (1)..(338): unsure at all n locations
aatcatgttctaagggcactgtcaaatataattcaagggccttcnactgatctgatggatcatgcccctttcattagcttggtgctcccaagaagaaatgttgcttttgaatctttgccgctagtttatcactcttcacagntgccccctggtggtcgttcaacctttgggccatgatgaggatatggaccatgacatgggctctcccctgcgccatgatgagatacttgatgttcaacccttggtaatttcagagccactagaccatgcccagcccaagaactcaccaagaatcggaccagtgcctcttctgttataacccccatgagcattattta

SEQ ID NO: 51217 - DNA, 314 bp, Oryza sativa
  unsure (1)..(314): unsure at all n locations
ctcaagctntatgtcaagacaattccccttgggcaacattctccttagctatctgtaccataatttgatctttgcatcagctaagatagccgtctgttcgatggttggagcatgtgggccatggtggtttctacagacttggctgaacttagtagccatgaaagctgtcaatcggccatcagtgatagaagtagagttcccaagactagagccgattacagatgatgatggagaataacgaacccattgcaggtgcatgtcttatggagaatatgcatccacaccaaccgattctggagcaaagctatcggctg

SEQ ID NO: 51218 - DNA, 300 bp, Oryza sativa
cacaggtgacggcacatagttgtctatacccgtggaacatcgaacaccttcgtcgcttctacccctaaaggggggatcgggtgtcatgtttcgggctcgggccaaccccgcacccccctcgagcgtgcagggttggccgggggctaccacatatgcatattcttatttctcttatatctgaatttctataatagcagtttcaatttcctaaaggctgtatctgtgctgttttttccttttgaagaatcttgacttgaaataagtcactcgtgctcaatcctgccctcgggggctccggtc

SEQ ID NO: 51219 - DNA, 73 bp, Oryza sativa
  unsure (1)..(73): unsure at all n locations
gaaatgacaganaagatgctgcnatggtacgatggtctcttttgctaatccgacgcatccggcagcacagcgc

SEQ ID NO: 51220 - DNA, 475 bp, Oryza sativa
  unsure (1)..(475): unsure at all n locations
ctcgacccgngaccttagagcacctgcggctgcagcttattacatcaatcggtgttggaagtcggtgaactatgtgaaacagaagattacatggcaaccacatctacaactcgcaagtggngaagttcgtgtctactgcactgtagcagtgtacggtctgtcgatctccgcagctcaggaagccgacgtatatatgagaaggacggacggtagactcactcacggttacaggcactggagggagttggaaggtcacctgtaacgttagatggttaaataacccgccagcactaccgatcaggctcataataagatatagtgattgtaagaaagatatgaaaaccgagctatgatgcaagggatagagagatatgaaattcatcatttcaatgacaaaagagagtagagaccanattttataatatagcatgtcttatgcatactcattgtgtacgtcacaatctaatcacaacta

SEQ ID NO: 51221 - DNA, 114 bp, Oryza sativa
gagtgcgttaccacaacgtgtcaatgccctattttagccccaggcatcgtttgacaaaaccgatgtccgtatcggcattgtacctctggatgctcgagcacagcatcctagata

SEQ ID NO: 51222 - DNA, 500 bp, Oryza sativa
  unsure (1)..(500): unsure at all n locations
agctntctaacagcaggactacagatgtttccctccttcaaactcccaaaagtagacatctaactgaaacccaagcacataaccatcccgacaggatataacaatcatctcttgttacaagaagaaaggcaccacaaacacatcctttaatagaacatcaggcaggacatccataggcaccaaaacaatctagaattgcaaggctaaataggaacagtatacaactgcaatacttcttcaacttcacaagtattggtaggtcagaattacttcagaaataacagcatgccatcacattaaaatcctaaagctaaaaagactgctagaggacacaagcattntagtctacgatctanagcaaaacatgagattactggaagcataatcaagagactatatntcttatntgataaatccagagaacaaagggattaatttcttctttcttatttcttcatcanacatcaagagactatacangctagccaacattcgacaat

SEQ ID NO: 51223 - DNA, 463 bp, Oryza sativa
  unsure (1)..(463): unsure at all n locations
agcttccagtgcggttgaatgagtgaagtgaattctatttatagggtaggtatgatgatgcgaaatgtctaatctgccctccaaccgccatcatgagcaaatcaggaacgtacataccaaaacatgaatcaaacggttgtcaccacctaggctgggctagatggccttgtgcctcagcctgngccttccccttgctctgtcttatccaattcgaggagcgatgggcctaatttctaataattctacaaagtttaaggcccactcttagatggattaaagaaatccttcattgaagtctggttttcatcccaactttgacnggttattacctgcatccaaatatacaccaacactcatggaatatgttagaattaaaccctaccactatgtcgaatgtgttattcatgatgatttatgcacgcatcggcagcatagaaatggcattaacagccgccacacttga

SEQ ID NO: 51224 - DNA, 484 bp, Oryza sativa
  unsure (1)..(484): unsure at all n locations
ngaaccttagctcatcccgagtgaaggacgatagggaacataaacttgtattgtgatcaagagttgctactatgctgtatatcttaaaggtacaagtgcaaggtatatgtactctctctcagattaaaaaatctttggcacagtggcttatccttatctctgattcccacgagacaccggttctccttgccttgggcggntgaaagacaacatcaattatagcaccaatcacccaatctctattcgactcttatttcggaggttttcaaatgaatttgcaaaagaaagccaagatcctcanatgattcacttagtctctctaagtgtatcaatatgaaattcttaccatgtttgcctctttgattcctactctaaggantngatattgttagctcggagggatcaaacatggcatacttgcattcagatttattactaagttaagaacgtagactaagattnaatatctaagcatactcaatat

SEQ ID NO: 51225 - DNA, 433 bp, Oryza sativa
agccttgtctcgtatattggtatagaaggagtatattaatacacagtcagccgttcacatagcacagtggcacataatctgagatgcttaattaggaggatcaatgcagatactctcttcagctgtcaacaatcatgcctggtgttgctcctatctcctcgccttcaccagcttcgcaaacatgcttccatcataagcagtctgcattctatacattgcacgcttaatcgccttctttcagaatcataagctcctaaatcacttccatgaatcgccttatggatgttctctatgtagatagataaagtcacgtaatgatgttacatggtcatctttgtcttcgcctggccttctttattgataacctatgcaacataggtattaatactggtagctctagtgctgaaatttaagttcattaatagcttgaaaa

SEQ ID NO: 51226 - DNA, 449 bp, Oryza sativa
  unsure (1)..(449): unsure at all n locations
tgcacgccgtcgctcgtgcgctaccttaccanagcgccagcgntagcgtggacggacgcatgccgtcgccggccgccgacacatgcctgacgttacaagttcccggaggagctcacgatgtcacttctctggctactagtccaaggtatccgttacatggccacttcttggttggccaagaatgattcttatgctttctctctgataacaaaacaagaaccaaatttcgtctgctactctgctagcttttgacggatgggatgcatctgatgatctgaagcacgaccatgtgcgtgcctggaacgactgaacagctgacgattttctactcccggtctatggtgaaagtcgacaacgtctcaagggagaaggtgtgccttgctttaatctcatctctctcttcttgattctccagacaatgcttgattatgactcggccatacaacact

SEQ ID NO: 51227 - DNA, 336 bp, Oryza sativa
  unsure (1)..(336): unsure at all n locations
atatcattgcctttcgccacgtaagtgtgtaattttattgaccaatattatggcttaggccgattatatattgtggtcattttacaggcggttggtaaatcctttatgagtttatttacttggatttataccacatatgccatatatattctggtgtggagaaaccatgtgtctattaaggacttaagcacatttgtaaagcagtgtgcgcatggcgtatgctcaatactatggaaatttctttattcacaatatataagctcttttatagctgctatgctatgtgaaatttcaatgatgtaatcaactttangttacactcattatattttacca

SEQ ID NO: 51228 - DNA, 417 bp, Oryza sativa
  unsure (1)..(417): unsure at all n locations
agctngcanatatnntttgacttctaggtataacgtgaataattccaaatattccagtccctcttaacttatgcccagataatatgactctacttgctggactgagtagatgaaaaatgagtctttctcatttacattggattgtcactcacaggtgagacccatacttaaggccttgttcggtttggaggtgattattttggttacatatttgatataccctttatccgaattgatgttatttttgcttaactcgagttaactagaacacctactcgcctgagcatgttgtaacaaatcatagaacattggacagcgtccgtgcagttctatttgacatgtatcaaaatataaacactatgttctggatccttgttcgtcacagtgtagtacagtacaaaatacctactgagttgt

SEQ ID NO: 51229 - DNA, 497 bp, Oryza sativa
  unsure (1)..(497): unsure at all n locations
tgctgaatcaatactcgcagatgagagtatctagaccaaatgcatattatctctaacaggccagctatatgactagccataccaagatatacctacagggcataacagaatgtgaaactataaccggctggttatctagctagccaaacttagtatgtgcgtcgtatctaaaatcgagcaaccatgcgctcatcccttgtccttagggctgtacatagagcctgctgtgacttggcttattatagataacaagttaccttggcttgttatcctatcgagctacaaactaactcggatcggatggtctgcctgcttatgctggcttgttagctcacgaaccaacacattcagagcaacatcaacttaagtgtacaaatattngcatacagtctaagancatactaatatacgaattaataacagatcattatttcatactttagtcatcaaccaacacttcatatatcaattaaattacagtcttgatcgacaagaac

SEQ ID NO: 51230 - DNA, 380 bp, Oryza sativa
  unsure (1)..(380): unsure at all n locations
tcatcgacggcggcagtgcactcaatatccctcttttcaagaccttggaagatatgcagattcctcgctccgagctaaaaccaagcaatgcgccttttcacggagtaattccaggattatccgcaactccactcggccagaacacccctcccgtcacttttggcactcgggaaaacttccgcacagagaatatcaactntgaggtcgccgatttcgagacagcataccatgccatactcggacgcccggcgttagccaagtttatggccgtcccgcactacacttacatgatgatgaagatgcctggtccccgaggagtcctatccctacggagcgacatcaagcaagccgtcacatgcgacaaggagagtngcgacatg

SEQ ID NO: 51231 - DNA, 407 bp, Oryza sativa
  unsure (1)..(407): unsure at all n locations
gcaagcttgtatagatntgattcatctcatcaatanattcttggcatttaacaaacgatagcaaacccatagcaatggatggttagaattgattcctactacactactaccaaaaacccagtggggtttatggtaaattggtcctatgtctatacgagaattccatggatcgatcccctagagttttaaactgttccctagagctgctaaagcaacccaagggaagtaaaatattcctgngtgtacgacatattatagacaggtgttctgctgccaagaaatggcaacaacgacgtcttctagcgaagggaaggattgagaagacggcaaggagcacgagctctcgtagatggtggtggcgcaagacatgcaatggcgatcatgctgtgaaactcgccacccaatga

SEQ ID NO: 51232 - DNA, 412 bp, Oryza sativa
  unsure (1)..(412): unsure at all n locations
gaacgcgagagaaggaaaatattgaacacgatcacaaattttggtgccgtgttacgccggcagcgttttggtcttcattcttccttttattgtcgcaaaacaaataaacctgngaatgatggctgcatgtttagtcatggatccttaactgcgaatgccatcctaagctccaaataattggccgcacgtcgcgcttccgtgtgaacaaaatgccacacgaccagaaattggtaccgtgtgcctggacgaaacagaactaaagcccataacaggtgactacgggcggcaatacagaggagacccaaaacagagcatactgaatgtgcaaccttatctcatgctatgaacgaagaatgtntacttcttttcgcagtgagccacgtatacacctttagcatgagactatggattc

SEQ ID NO: 51233 - DNA, 437 bp, Oryza sativa
ggacttaagcactgagcatcacttggagctaccctcgatcagagccattttactgaacccccctttcttttcttataataaccaacggaaccaactatcctacagacggatgatacctgggattcaataccaacctgaaagtgagcatttaagtcgcaaactaaactatcatgttacaaaaaggatgtacacgctccacatagcaaacaagatggcagataagtgtcagctaaggataaaagataaaatataatgaacaattccaccctgtatgtctacggatggctggatgctactctcttctattaacaaatccaatttactaatggaaaatctaacctcctacattgtttgagaagcgaagtaggtaggaattctctcattgtactggagtacattagaatggagaaacactctgagaataacacagcttgtaa

SEQ ID NO: 51234 - DNA, 452 bp, Oryza sativa
  unsure (1)..(452): unsure at all n locations
aacagtctctcacgcataccaacctcccanagtgtaatttcaccattggtagatccaactgataaagtaataagcgtgataagaaaatgatatatcgnttggctaagttgtattcaatcattcatgcttaaagaatcagacttctgtacttactattgcacataatttttaaatagaatttaataacataaagagcttgagggtacctagtaatagtgtatgccgagttggatgaaaatccatgctggttacactagatccctgtgacaatgtacaagctactggcctgggaagatccttcactgaccataaaggttggggaattggtgcatgatatgtggcctgaacataagcgtagatgactttgaataattgatagaaaatgcaccagccatatatcttctatgcanatgcaacattacctcatcaacaccatgttcacttgggctcaa

SEQ ID NO: 51235 - DNA, 339 bp, Oryza sativa
tatttttactactcccaagacgctagttatttgatagctggctactgatgagctgtgaattatgctctttttttatatataacgtcaatccttttatgtcatgaaaaaaagttatattgttgaaaaaatttccagatattcactggatgtgtactatgaaatgaaaaaatgaccccccggcgccacacacaacacaacccaactgtagctacaagactacgtagatgccaaatacttacaccgcccaacccttaccccttttgattaggaaagagggaaaaaatgaccgttccctaccctcacggcattgatactagaccaccagagacacttaaccgc

SEQ ID NO: 51236 - DNA, 465 bp, Oryza sativa
  unsure (1)..(465): unsure at all n locations
ctaacatgcaaccataccacatcatcacccactaacaataactacatatttaatctcatgcattcatacaacatgatgtacaatntatntaattctataaatcanaacgcacgcatatccaatcatcatctctcatatcatttccacaataatttaacaaatctatctatcacttttacaatatttaacatatacttatcgatatgtttcatagcaaagcgcggggaatcacctagttctataaatgaaccatgacacaaactataatctaaaagtaggtctctactcattaccactacactacacaagctatcacgtgtattttagcctatgtattgtatataatggatttcacggctcagtgccaatgggcctagtgaccacatgttgggccccaacgccaaaggctatggcattgaaggaaatatctatntctggatataagtgtgggcgagcactaactat

SEQ ID NO: 51237 - DNA, 485 bp, Oryza sativa
  unsure (1)..(485): unsure at all n locations
agacttggtccttgagtgttgacgattttctcaatttatatattaatcctgcatcttatagagcaataaaacacactatcaaggatctatttattntttaattttaagaagagagtacaattatatacgcacacagtcacagaaccatgccacaccaccacataaacatacacactgtcacatgcacccctagaacatggcacagacatataacactggaactttattgttaaacgactgaaccttttatcattcagcattaataagtaactccatatgctaataacaaagaaatatttatttctatagtatgttggggtttgatgagattcacttgatcattgtgctcgtattaattcagatatgctacataaataaacaaatcccaatttaactaagcctataaaattcttatggttttaatgtattttggatatactgacattttaatgtggatatacaacatcgatgcacatatataacat

SEQ ID NO: 51238 - DNA, 63 bp, Oryza sativa
aaacacataacatgtgtttcagatatatatatatatatatatatatatacataggtatataga

SEQ ID NO: 51239 - DNA, 443 bp, Oryza sativa
  unsure (1)..(443): unsure at all n locations
ttagagtcacctgcngcagcaagcttcttgagtaagtattttactctaagagcttgtgttgttccaaacctcgcaatcttatcagatcggcttgcgactataatcttactgccttttgcaacacaccttttggaagctgagtacaatctactccatgcagcctcatcgatgtccctgctcaattcgataataatcagtagtctttcttcaccagtaccacggttttgatgcttgattacaccacaatctctcagagtcaccatatttgcatcctcaagatcatcgtcactgaaatgcacaatctgaaaaaagcggttacgcaccctttcatcggcacaggcatgctcaatcagggtgctcttaccaaccctccacgggccaatgataggcagaactcctgtattttcatcaccaggaatatcttctttggcaggaagtcatga

SEQ ID NO: 51240 - DNA, 195 bp, Oryza sativa
acctatgagatcgaagacggagcaggtcccgtagagactatgttcgggtgttcctgagcggtgatatcatcattataagtgcacaggcaacctgtctcgcaatcggacccagccacgttccctccgacataatgaatgtccacccctttgatccacttctgcacattctgcagattctccttgatgcgcttgcca

SEQ ID NO: 51241 - DNA, 445 bp, Oryza sativa
  unsure (1)..(445): unsure at all n locations
gatcttaagcactgagctgcaactattttcttgcctcctctgaatctatatttctctcttctctgaatatcttgcagaaaggaaagtatctgcacttttttctatcagaactacactggagacaaggatactcttggaaagtgtgagcaggtaaaccttcatgcatgtttggactcttctcttgtatatattgatttggtttcacttatatttgatcagaactattgaggttataactgacacataatatttgtacattcctattcatctcctccgtctgcagtattttctagagcttatgaacgtgccgagggttgaatctaagtttaggatattcgctgtcaagatcaatttcaatcacaggtcatacactgttgaaatattgagttattatctccgtatttgaatgtccatagaatntcaatatcccccttttcatttcctc

SEQ ID NO: 51242 - DNA, 406 bp, Oryza sativa
  unsure (1)..(406): unsure at all n locations
actcaagctntaattaactggntctaaatccacatgatatattcttgctgatgaaagtcngccttgatctatctcctggacctatatcaacttcttctaaatcatcggccgacataaaaccctgtcctaatttgccatcgagatcatctacagtatccttggtgtagaaatttgaaccctccacgacgccctccctcaaagcaacatatgaggctctccgtcttcaattggatgtatatcacaataggacactcttagataaccttctttccaaattttgtcggactggcaatcaattccatccatctcccatacagtngaatcggcactagcaacgttaactgaccagtcggctggtacaacctctatcttgttaccttgccattgaatcaaactctggtgcatg

SEQ ID NO: 51243 - DNA, 354 bp, Oryza sativa
  unsure (1)..(354): unsure at all n locations
agcttgctgtntaacgtgatgttgagtatgccgatatgtggtttcggcttggaatgctcatcagtatcaacttcttcgatctcctgtttaagtcatcaaacaagcaaaaagtctcattaaaatgaacatactcagaanatactaattcgaccagttgaagcacatgcgtctgatacattngtagataatgacattgaagtagctcatatnctcttccattacacacctattaaactcatgtctaactctttcaatttcctattggcattagcactactgtaactcanaataatgtacaaatatgtaacaatactaatcatgaggtaggacatgaacatctcagcatgaaatata

SEQ ID NO: 51244 - DNA, 497 bp, Oryza sativa
  unsure (1)..(497): unsure at all n locations
tccaacatcacaccagctgttggatatatatgcgacgttcgtangaagaggttctaaaatcgtaattgtcgtggcacaccacagtatgttccaacaaaacaaatagcaccatctcatttaaataacaaatgtacgtgcgtcaaaaaccgctatagcctacatatttgaaaaaaatggagaagaaatttggacagattgaccacaagggaatctttttttgcaacggaagaaatttgatgaacttcaattaggatcagcgagagtactatatgcgattaanaggtttcacaagatctgatctttacgtggttntttcaaagaanataataataatgaaggatagcctggctaaacgaaataggtgaggacaaacattaattggtgcttctactattcacaagagacatatctgatacantttaattgagtgttntccatgtcgctgcacattgctgggagaatatgtgtntatctttcaatatcctcttacttctaat

SEQ ID NO: 51245 - DNA, 462 bp, Oryza sativa
  unsure (1)..(462): unsure at all n locations
gcttgtagagcttgaactatcatatggtaaaatattatgataatcaatggtttggccctttactcaatatgacattatgactacattatagcagcttcatacctactaaccacctgnatctgggtttgcataaagaacatatgaaaatttatatgcctcactgtacatttggaaattaaagaaatgaaacacatgacaccagatttaccgatatagcatgctgcttgcaagcaaaaacaatgccaattccagtcttctttaaattctcatactctacttaacctaatcctttgatgaagacatcatctgaattatgtccctttntctctactaaaattattttgatggtgctaattangacaactcacctctgaaaaaggggcgttcgcaatacgtaaaatgagatgacctatcagtcagctcatgcaccacaatacctcccagagagagcgattttccaca

SEQ ID NO: 51246 - DNA, 410 bp, Oryza sativa
  unsure (1)..(410): unsure at all n locations
agcttgctggggggcgcatccgctctatagctcgtatcnttctcgggttggcctcgatgcctcgggcagagaccaaaaacccgagaagcttgcccgcaggtacaccgaacacgcacttatcggggttcagttttatgcgggcggagcggagactttcaaaagtttccgctagattcgagagtaaggtctcttgtgtgcgcgtctttacaaccaagtcatcgacataagcctcaacattacgtcctatttggctacccaaagaaattcgagtagtacgttgaaaagtaggacctgcattctntaacccgaagggcattgtcgtataacaataagttcctatgggggtaatgaatgcacgtttttcctcatccctcctagccatgcgaatctgatggaaccagagtatcatc

SEQ ID NO: 51247 - DNA, 480 bp, Oryza sativa
  unsure (1)..(480): unsure at all n locations
tactcaagcttttatacaccgtacacactaacaaacanattntattggaaaatgttatanaaaatgtacatgtatttctaatattggtgcacttatgtgtaaagtcttaaccttaaatttattatattttagcagcaacaaaaaatataaaaattctggatagtttaaaattataaatctatcagatttttttattccctatatataatgtatttgaagatgactgtttatacatagatgtaatattactaanagttaaatgtatgtgtacattattctctaaaatttttattatatctctagttggtgtgataggatatgtttcataattggactgtaacatagaaaactttaatgttgaaaatttagtaactnaagtgtaatgaactcaagtggttacagactcttaacattgttctacttaatgagctatagataaccgtctatagtctattttaatataataagattaaactacaa

SEQ ID NO: 51248 - DNA, 219 bp, Oryza sativa
gtgtcactacttggattaacatttaatgctaatgcactggatgagctataactatgctatggtgtgtcagctgctgttgttgtggcctctcatagttacggtagttcattgagaagctggacaccatgacttggcccgacatcggagtgaagtcagctacttgcaatcaatagtggaaaagataatctgcgtctattgaatggaaggttaatatatcta

SEQ ID NO: 51249 - DNA, 375 bp, Oryza sativa
  unsure (1)..(375): unsure at all n locations
gtcacctgcngctgcagcttgggctggtantaaacatcgatcttncttttgagatanaagtcgatcctcaactatttctcgcgatatcttcttacgaagttctgttagggcatctataacagcctctaggttaagtgggcaacccggcaagtatacgtccacaggaattaacttatcaactccccgaacagtactataggaatccgtactgaacattccatcaataataatacaagctcccatagcaatgacgtattttgtgtcacgcatttgctcatataatctcactaaagagggagccattttcattggtactgtaccggctgttaaaattaagtccgcttggctaggacttgatcttggtaccaatccata

SEQ ID NO: 51250 - DNA, 377 bp, Oryza sativa
  unsure (1)..(377): unsure at all n locations
tctccagaccatacatatgcacggcgagcccatgctaanggtntggttaaaatatgccanattccgcctaatacacaaatgagacccaaccatacatgttcgccaattatatcttctaaatcatccacactaacaattcaaccctctctcccaaaaagggattttagtaaataaccaaatataacacctgggctaagggtcaaattggtaaattttcttacatctcctcccncaggagcccatgtatcatatataccggcaaaatatagaactgtgagtactagaagaagagcacctatacctaacaaaattaggtgaatacccaaaattgtagtcattttacttctatctttccacacataaccaaagaatggaaa

SEQ ID NO: 51251 - DNA, 363 bp, Oryza sativa
ttgtatctacttcaacactcatatacgcgtctacaatgacatatgccacggattagctactcccgattgccggaatcaactaaagactggttccattgtaaactacctcgcatctccaatattctaatactcaaactgagacgacagtttagctggttattttacaacaatgatataagtataatgttgaccttgtatctcacagtttcttatatgcaggggtgtgaccatgtctgtacatgtatagagatcccagagctctctgtttacatatatgcgcaatctacatttgctgactctatgcgagcagctaattgcactgaatgagtattacaccgtggcactgacacattgttaatgact

SEQ ID NO: 51252 - DNA, 244 bp, Oryza sativa
tactaagctacatagtgaggaaagagcatgcaccacgagagagctagtgacgacttgcactttatgtaatgtgataggagcaataatactacgcatgtacattcatggcaaggcaggtccaactaattatctgagtctaggtgtgtgaccgatctactattcgtcctgttcgaagacgatgataaaactacattcttcgtgtacattgaggccaccgggaaaagaacatatatgcccagtttat

SEQ ID NO: 51253 - DNA, 319 bp, Oryza sativa
agcttagtatgcatgtcagagcatcgtactgcaacttgtcttactggtgctcttggcatatgcattatgaatcattcgtggctctgcttttatcatggcatggctatataggtgatgacccctacgagattactatcatcatatgatcacactgtgatgcactcctaattcatcacttacagacaagatgctggctgatatgccggaggatcttgtcgagaatggcaagattcatgtggatcaaactgacattagatgcagcttgcagtgcacacatagtgtgacatagaggtggcgacactacaacaatgatatgacc

SEQ ID NO: 51254 - DNA, 243 bp, Oryza sativa
  unsure (1)..(243): unsure at all n locations
tatagccacattcgtatatttgcacgatggacgcataatatttcatatntgataatacaccaccaattaagtcagtcaggcttcaaatgacagaacacaaatcacgcgactgttccgatcaacacatgatgatgcgattctgtcattaaccgagattcacctgngggtcatgctacgatcgcatattaagcactaacagagcttctgcagacgtaagncataatgcatgcatgcatgcatgac

SEQ ID NO: 51255 - DNA, 456 bp, Oryza sativa
  unsure (1)..(456): unsure at all n locations
agctcttgtatactatatctaaaatcatagtggatctatcattctaacagtatatgagagtgatcgacatgcaatgaatttatcaagaggttgaagctctctgttaactctcctctacaatcccagtagaataacacaaatattacggaatgacataatatcaaatatgttagaaggggtgagtatttgaacccaggtcgcctaacccactactttgtgaagctagccggaagacccttggacgtctctcctagaatcttagtatgactaagagtataatgagagtgatagactgcaatggaatatttggatactcgtggcacgctattttaactgctaaacggtgtgtctcgtgcgaaaactttatatataaaagatggtctagaatatcatattaatctattnttcaagnttggagataattaaaccaaattagccacacgttattatcacctc

SEQ ID NO: 51256 - DNA, 346 bp, Oryza sativa
  unsure (1)..(346): unsure at all n locations
ggaccttaagcaccgcngctgcagcttgctggatctgacaaaacagggtctttattgtgaaatccttctacaatgcactatctgttcaacaaatagacattcctcttaagaaaatttggagtttccaaattcctttgaaaattaaaaatttcatttggattcttttgagaggcaagaatctgactaaggacaattngtttacgagaggttggagaaagggtgataccaaattgtcagttttgtgacaaacaggaatcaattcaacaccttttctttgattgctctcttgtcagactaatttggaatataatacaatgtgcttttgatctcaaaacagctaaagact

SEQ ID NO: 51257 - DNA, 370 bp, Oryza sativa
  unsure (1)..(370): unsure at all n locations
ggaatctagagccacctgctctaataccaantgaacgtgctgatgttttctagaggggggtgaataggctgtccctganaacttannaacaaatcgcagcggtaaaattcatacagacccggaacttcctggtaaggaactccagaacttctggcctgccangcccggaactaccggtgttcttaggacaggaacttccgggttacagaacaaggatgaaattcatnattcgaatcatgagactaagccaatcttcacagatgatgcacaggtattctaagtaggagatagatcacagaaacatccacagaaacatcacagaaagagacangagcattntnttcctgatgttcggatcttgcgatcctac

SEQ ID NO: 51258 - DNA, 362 bp, Oryza sativa
atctgtaactaagaatcaatcttgttgggcctatcttttacaaattgatggacgcttacgttacataggatccatctatttttttcatctcttacacagctattgttcctcatttattctcctatattggtggtcctgtatgtctctgtatgcgattaccatactactatagctactattctttataacatattatatgaaaattaatattaaaaatattatttccatcgccagcgccggaatttcttgggaagcatcagtataattcaatatccatcagaattcatagaccagataggagaccattttcttttatcatctgtcaactatcaactacggaagagcatctcaacacatcgatc

SEQ ID NO: 51259 - DNA, 278 bp, Oryza sativa
  unsure (1)..(278): unsure at all n locations
cgtctggaaactctgaaaatcagagtgttgccgctgacactactccgatgtatatgcattttacaccatccttgatggagacttgtcggtgtctctgaaatctgaggtgaacgtggacgggagttttcttgaanactctggtttcgccagtgctggagtggtcattcgagatagtgttgggtcagtctaactgtcatctttgtacaggtttactgttcattggcagaggaagcagagcttaactgtcatgctagcggaccgagcccacgaatcactta

SEQ ID NO: 51260 - DNA, 316 bp, Oryza sativa
gcttagtatctcctactctgcaagcggcctggatcagctctggagtgatcagtgagaaggttacctctggtgtcccgttgaggtttgctgccaaagactatatggctggctcctacatgcacatttattgttatgttgcaattctaaaagatgctaccgactatatctgtgttgaagttttaaatgaaaaaaaatggatcttgactaaagcacttaatttattagcttactctgcatttcccgtaatcgttgctaatgaccatctcatgggtattggcatcaatactatctaactcacatgccatctttttgccta

SEQ ID NO: 51261 - DNA, 321 bp, Oryza sativa
  unsure (1)..(321): unsure at all n locations
agctntctatagaanacccttaattatgagctctaattgtgtacctatatntatactatctgtataggaatatacccatcaacttctanaactcaacatgtaggtgtgccacattatcatgatatattatttacaaacgcgttatatgtttagaactcaatatgcacgcaatgtctaatcattatctccacatcatttgtacatcatttaaacataataacatctaccatctctataatctataatgtataatacgcattcatctacatattctgcagcaaaacggaagtatggagtagttattacgagaaatacagtcct

SEQ ID NO: 51262 - DNA, 460 bp, Oryza sativa
  unsure (1)..(460): unsure at all n locations
aagcttgatccttctgagaatcacacatatatatctatctatctatctacacccacaacgacacagcatgcagcatgcagcagcacatcaactctgaacgcccataatgaaatctgtctaagcttcgcagctagtagcacaaagcatgcactgtcagcaccatattcgctgcattccatgccatgccatattgccatcaccagagggcctttgaataagtggcagggaataacaatgttatccagggaaaggccctctcctagagcataccacaatacacttgtacagttgtactactattactccattgcagcagcagcagcagcagcagcaggatgcagcagtcactgcagtacgatcaatgcaatgcatggcccgggccagggctgcatatcggactcgatctgccgcggaatctttgctntattgacatcgctgctcgagtttgttctgcactctc

SEQ ID NO: 51263 - DNA, 448 bp, Oryza sativa
  unsure (1)..(448): unsure at all n locations
ctcaagcttcttaatatgaactgtccgtcactcttagcttatctaaccctgtgttataccatntgntttggtctcttctaatgtgcttgcactacaatattaatagtcgtgattcagtttgacagacttgcacaatcagatgacctgtgtgctgctaaagaatcgccccactgttgctattaaagagacagatcctcagaagccagagactaattgtagttatgcacgaaagggctgctactgctagcccatcacccctacaatgtgacgatgattattgcacgaacagcnatccaacgagctctgacatgaatttggccgagagacaagaaccctataatgaacacctgcaggagtataggaagctcacatgttgtcctcccttggggaagattatatctgtgtctattgatcaactgaaactctacgctatggccaccatttctgg

SEQ ID NO: 51264 - DNA, 312 bp, Oryza sativa
cgcgtctacaatgacatatgccagtgattagttactcccgattccccgagtcaactaatgactggttcgcatatgttagttactccaaatcttcaatattccaatactcaaactgagactacagttcactggtaaatattaatacaaggataaaagtagaagttgagctgtttactcacagtatcttatatgcaggggtgtgatcatgtctgtacatgtatagagattccaaagctctctgtctacatatatgcacaatttacaattgctgacacaatgcgagcagcgaattagactgaatgagtatttaca

SEQ ID NO: 51265 - DNA, 429 bp, Oryza sativa
  unsure (1)..(429): unsure at all n locations
tacatagtgaggaaagagcatgcaccaagagatagctagtgaagactantcgcctatgtaatgtgtatagtagcagtaatactacgcaagtacattcatggaaaggcaggtcgaactaataatctcactcgaggtttgtgaccgatctatcattcgttctgttcgtagatgatgttaaaactacattcttgatgtacattgttgccaccaggaaatgaaattatatgctgagtttcatgagtcactacttactcccatgttaccacactattttaccgtgatataaatcacggtctcacttggaatgcggaaatatactagtgctcctgtaaactttatgttacacggaaacacgatcatggtacaccaatgggattagtctcacactttgtttacactgcactgtatcgctacttgatgcccaaatgc

SEQ ID NO: 51266 - DNA, 455 bp, Oryza sativa
agcttgtctggtatctgacataaacaggggtcttctatgtgaaatccttctacaatgcactatctgttcaacaaatagacattcctcttaagaaaatttggagttcaaaattcctttgaaaattcaaatattcattgggattctcttgagaggcaagaatctgactaaggacaactctgtttatgagaggttggagaaagggtgatacaatatgtcatgttctgtgacaaacatgaatcaattcaacaccttttctttgattgctctcttgtcagactaatttggaatataatacaatgtgcttttgatctcaaaacagctaaagactgccaacacctttttggggcttggctttcttgtttcttaacacaaccaaaaacttgattgtaactggtattgctgctgtaatctgggctgtctagaacactagaaataaagcttgttttgataaaaaa

SEQ ID NO: 51267 - DNA, 502 bp, Oryza sativa
  unsure (1)..(502): unsure at all n locations
ggaatcaagagcancctgctctaataccaattgaacgtgctgatgatacctagangggggtgaataggctgtccctganaacttaataacaaatcgcagcggtaaaattcaaacagacccggaacttccttggtaagaactccagaacttctggcctggcaggcccggaactaccggtgttcttatgacaggagacttccggttacagaacaaggatgaaattcaaatttcgaatcaggagactaagccaatccttacaagatgatgcacaggtattctaagtaggagatagatcacagaaacatccacagaaacatcacagaaagagacaagagcatttntttcctgatgttcggatcttgcgatcctactctccgttgaggaagctcaaagagctgggtctcgattaacccctttgctgactttgcgaaaactcnaagaaatctacagcttcactacaacaccctaggcagttctagaatgatgaccacaaatcaactaa

SEQ ID NO: 51268 - DNA, 455 bp, Oryza sativa
  unsure (1)..(455): unsure at all n locations
gcagctgcagcttactggagacaaagaacaatnagcgctgtttgtttatcactaaaacgttatacaattatccgaacttcatacctggatgatctaacgctgaaatatcctaaatctgaaaacagagcctctgtacctgacataatggccaaacacggcttttttcagccaacaggaacatcttggtgaaattaattttctggtgcaggaggcccaaaattaacaaaaaattcctttttcatattctaccacggtaattaattttagggaatgcaattggcaactccatattttacctgtgaagcagaggagtatgccactaagagagattcatccatccttcttggtccttcggaagtagaccataatgtaattcaggttgaacgccctcaacacgcccgtgtcaaacctaatggtgttgtatatccctacaccaccaatgaggagccaccaca

SEQ ID NO: 51269 - DNA, 171 bp, Oryza sativa
aaaatatgaagacactgactgtctcgatcagacactatctttttatggacgccatgcaaacacacaatacttgccatatacaattccgctaagcgactatcggaataaggtgtctctaccgcgacgaaaagcgccacttttggaagattgtcgtctaatactcaaatacag

SEQ ID NO: 51270 - DNA, 186 bp, Oryza sativa
ggggttggctttttataagtcatcaatgacaagttagcgttggtcatcagccgatgtctcgatgaagacaccgaagctcgtgacacttctgacgacaccgcctcgacctgtagtgatcggaagacaacctactactgtgagccaccggaggatgctcacatgcagaatactcccgagctgttaaaa

SEQ ID NO: 51271 - DNA, 258 bp, Oryza sativa
caaaactagctaatgacatgtgtaaataaagcttagagtcacttccatagacaacagctagtattatggaatgcaggggacaacttacagttttaactcggaaccgattgagttgatacgggacagaacacagcgacaggatgcacaccactattcacccaaattggacctagataaaaagaagatgccaaattggagttaccggttcttgaggggccgctaccctcttaatgctaacactcaatatacatctcttac

SEQ ID NO: 51272 - DNA, 419 bp, Oryza sativa
  unsure (1)..(419): unsure at all n locations
agcttgttgatattgtcaactaagacatcttattgttcttgtgacttgatcttgccggccgcgttcgcagattcacattaatgaatccacatatagaacataacggctttcgaggcattgattattgttaccttcaacctcctttatagccaatgcctctgacttgccagctctgactggccatttttcagagcatggatcctgcttctctagctgagatatcttggcagctcgcactacatctacttcggttaatcaagattacagaganaacagcacacatccagttgggcagaacttgcgcgacacctttgatgagacactcatctctaaattggacttctggagctcagcaagccgatccctcacatagtgttcactcttcttggcaagatctcttggcccggcagctgactcct

SEQ ID NO: 51273 - DNA, 111 bp, Oryza sativa
cctagaaccagcttgcagtgaattttaagtcctaacagatatatatagtacggcataggcccttccccttatgtttcgttgaacaccccatagcacacggctgaaatgtca

SEQ ID NO: 51274 - DNA, 189 bp, Oryza sativa
  unsure (1)..(189): unsure at all n locations
agctnttagatatgattgaccacaggatggatgatattgcttttcattcttaagatgtaatgcacatgatgcttctcgcaatggggtgccttcagcttcatagcaacagaaggccttcgatgtcaactgtacgttctgaaggttctggaggatgaaaccagccaagccactgtgcaggaagatctcgat

SEQ ID NO: 51275 - DNA, 146 bp, Oryza sativa
  unsure (1)..(146): unsure at all n locations
ttttttccggcaagaaaaaacttcatttgaaagacaatttctgaggccttgagtggttatattgggcagacccnctgagaaatatggagctcggagcttgcgagttctgcttgaggtgtacatacagacaggtatgaacgtgagca

SEQ ID NO: 51276 - DNA, 358 bp, Oryza sativa
  unsure (1)..(358): unsure at all n locations
cgtgtagaagtcgctgagccgagccgggccttttctgtgcgctcacgcgctgatcgtgctgtctgacgcctgaatgcaaatgtcataggtaggggggaacgaattgaacgaaaagccttnttctacgcctcgtggtctcgaatatttctgtctagcaataatacaaccagcagactgattccggccagaaattggagaatttaaagtacacatatctgagtgaactagtaattaagcaaacggtttgttttggagataactttactcaccgtcgaaacagtttcatacatagacaatatgtcacttatggaaacgtcngtgagtacttcttcccgctgccgaacatcacaatgaacct

SEQ ID NO: 51277 - DNA, 255 bp, Oryza sativa
ctaagctaccggtagagctgtgcatatggtgttggcgcgccacattttcttatttacattcaatgtcgcgagaacaccagcatataggacggatatcgccgcgcgattcatcgattaaacgccatgcctgcggtaatcgcgccatcgtcaatgacacaaaccgtgcggcgaattttgccttctttttcggcagcaacacgaataccaaattcggcactgatggagggtgatgaatgcacgacgcttaatacgtca

SEQ ID NO: 51278 - DNA, 240 bp, Oryza sativa
ctcaagcttagctagctcttcatgctccgagccaagtattcggctacaatttgtctttattctttgaacaccccactcgtatggatcgatcaacaccgctcactgtttcataagaaccattccaactccctatgctagctttttctctagcaatcattgtgtcccatactaggttcggagctgcatatctgtttgccgtactaccaacattggctgtcattatgacactatgaagatatt

SEQ ID NO: 51279 - DNA, 341 bp, Oryza sativa
  unsure (1)..(341): unsure at all n locations
tgcaagcttgntcatcatttgatatcatttctgctgaaaccatagagtgcatgcaagcaagtgggaaataatctacaattccacttgcagacatggccagaaatgtcaattattggtgaggagcaatcagccacctgatctttgagccaatcaaaagaggaggtgctgaatccaagacacaaaaataatttcacaagggcacattgattggatgtagtaaatagatcagaggcaacttaggttcattcatggcaaggataacccagggatcatcgctgtaactgataaagcaggcaacctggcagtgcctgctgaatngntcaagatggtgtgccttaaaa

SEQ ID NO: 51280 - DNA, 191 bp, Oryza sativa
  unsure (1)..(191): unsure at all n locations
agcttgcctgaattcacatcacgttgtggggactgtttgagatatctattatagagntctagctcagcagcagaatgagagcctggagtgcgcactctaaggttgagaactgtaatggttatgacaccaacagtaatgagaacagcagcaccaattgcgacaagggctgagatgctcagtatagatttctt

SEQ ID NO: 51281 - DNA, 135 bp, Oryza sativa
agagcagacttacatctggcagtatgtcctctcttattttcctctctctaaccccatgtaccaatttgcgaacatgttatgcatataatgctctaattcagaggtacctttgacgcttcaagatctgtaacctct

SEQ ID NO: 51282 - DNA, 331 bp, Oryza sativa
  unsure (1)..(331): unsure at all n locations
acacgaaggagtgcgagagcttataatatcacttgcagaggcccctacctggcgcgccaaatgacggagcgtggggctccttaccgggagaccgggcatgcccccctttgccgggttggncggggaccctaggtgagactctaagcttccaatctggatgtggaagggtcgcgagaccggaagcacaaaagacgccggcgatgtatacagggtcgggccgcttagaagcgtaataccctactcctgtgttatggggactccggggggaaggagctaccaaggatgagccagccttctccttgctctgggtcctaatctggaaaaggcagtc

SEQ ID NO: 51283 - DNA, 360 bp, Oryza sativa
acaagaactcgctagggtggggagtacgacagaaaaaaagtttgtgtgagagggcatcatgacatggcagcaggccttgaagttgtggagggtcaacaatctgtaaaggcgcgtgccaagaagcctctattattaaacgcaacagacggacggatttctcacgtgcgcgcttatgcgatcaaccggatatcccacggaagacgacgatccatgctgaggatgggcagcggcgccgccacttacgttctactcaagaagctgacagtaaaatttgacgcggtaggcgggctagtgtcacatactgggaccccgcggcaagtttatgcctagtattaagttcatatttatcctctagtcttt

SEQ ID NO: 51284 - DNA, 136 bp, Oryza sativa
ctcagcttatacacatatcaatttatatgcatataagttgatgtacttacacttatatatccactagaaattattagcgaccttagaatctgggaagtaacaagctccatatgtccatggaatggatgttccttca

SEQ ID NO: 51285 - DNA, 345 bp, Oryza sativa
ccaactgctaaattttgagtaactgtggtctaaaaggggtctaaggtatggggcacttgattactcgcactctgtcttatgctacaagggtcctagtcgctaatagaacgtgacaggccacacattgaagaatgggctaccgacatattaggcatatgccaacaagtatgcctttgacaccctttaaaggatgacgcatgttacatgctttcgagtaacagatcatccgtgtgatatagaacaagtgttgctcatatgaataggttctgactgaaagttatccctatctggtactacaagtcgaatagaagtgaagcaactgggtcaagatcgtcttagccttaa

SEQ ID NO: 51286 - DNA, 471 bp, Oryza sativa
  unsure (1)..(471): unsure at all n locations
agcctnctgctcatacatatgatgacaaccggtttttggtttatctatgctattcngcacagaaagttgatcactcctctagactagaactgctgcaacacaaaataaacatcaaagtggacttcatcgctgtggctcggtggttgcaaagaatctatctcgctctccacctcatcgattgcaataaaatcagaggcgcctttgaatggctgaagtaccttggcagtgatggatcactggaagaacttatggtgaagaactgtgtatgaatcaaccaatacagtcttctaatgtttggtccaggatggatgaagctccagaggtttgtgtttgagttcagaaatatttacagcatatttgaatctaaagatccctcgtatgtggcgaattgccagtatagatatgatttctcctgtgagaatctgaagcaactgagcttgagacggatcgtgaccatggaagaaataggac

SEQ ID NO: 51287 - DNA, 345 bp, Oryza sativa
  unsure (1)..(345): unsure at all n locations
agctttgnctctcttctcatccctaatacctacgtggtgtgcggctcggtggtggttaggtattactgcattcttaanagcgctcatttagggtgaaattctaacatcttctacatgttaatatccgcttgggacattttttctggttttgtggtctcctgttactctcnttggatggacaatctagctcctgctgattacggcggcttggctgtactgtggactgctgccgattgcttgctctcagttgtggagtggatgctgtcggattgagggcattggtgaatggtgatgagccattcaagttcaaattcccggcccacccatggngaattgactggaacc

SEQ ID NO: 51288 - DNA, 273 bp, Oryza sativa
tcggatgtgcatcgactacaccgaccttaacaaggtatgttctaatgattcttaccccctgtctcgcatagatcagatcgtcgattacactgcggggtgcgacctcttgtgttttctagatgcatactctggttaccattagattcgcatggctagggaggatgaggagaaaactgcggtcattacccccgtaggaaccttctgtatacctcaatgccctttcgtgtaaagagatgcaggtctactttctaacgtactacttcgatatttttg

SEQ ID NO: 51289 - DNA, 104 bp, Oryza sativa
  unsure (1)..(104): unsure at all n locations
gaaactaagctgactactgcctaacnatatgcgctctacgccgngaatgatcattgtaattgtctccttctgctatacacccacgcggttaatccggccacgcg

SEQ ID NO: 51290 - DNA, 275 bp, Oryza sativa
atgaatgtgtcagatcattacatactgtgaagcaaatcttttttttacctttatgagataacaccatatcagtctatactagcttatcattatgaaggcttagtaacaataaatatgcagttattgggccattagatccaatgcatggaaaccactaacttccagtgtaaacaaacatggctacagattatcaagtctgtgatgaaaaattgaataatgaaataccttgaaaaccttaactctgtaacagatccagccacgaactgttgtgtatt

SEQ ID NO: 51291 - DNA, 193 bp, Oryza sativa
ctaagctagccatgtggtgtaactttctttagatgcatttgcgatttgacagtttatcttagtacggacataattgaaagaagtgtataacctttttttatgtcattctgaaattatcggttatacacacttgaacatagagaaggatcataatagtcgcagtcttctactttatatttcctcatgtatatct

SEQ ID NO: 51292 - DNA, 416 bp, Oryza sativa
  unsure (1)..(416): unsure at all n locations
agcttctcctttacaacccatgtggatgccgctttatttgtttcttgaacatataacacctagccagntaatatccccctattcagagcctattatttcacttatacttattcgtatggcttattaataaataaaaaataatttataaataaaaattttatatttgtatccttagcaattcaaaaataagtactacaaaataaactatgataaaaaaaaccacaccatcaactctaaaattagatttcaaaaaataatttttggttataagcataagcccaacaatagggcacgcggttttcattaccacctatcctcttactacttctcacatttccatataggtattagttgaccctttcttacggtaaacttgcgctcactctcgtcatcacttctctacaccactcattctt

SEQ ID NO: 51293 - DNA, 316 bp, Oryza sativa
gaggatgcagctggtttgaataacctcatgagaagcggatattttattcttatattaaggtccaattggagatggcaatctcttgcatcatgagagacacaatgtcgaactgacggccctaaatgatggcatcgatgacgtgccaagccgccctcctaatatgatcattgttaccaaggcgagagaggatggtagctctcacaattctgttaaccacactgtggatagtcgtcaggccagcaaccttcccatgtgtgtactgcactccatcttcataaaactgagagaaatagtctatagagagccggttatgggt

SEQ ID NO: 51294 - DNA, 202 bp, Oryza sativa
  unsure (1)..(202): unsure at all n locations
actaagcttatgagtcaacacgcatgacacttgctggctacgacagcatttatatacagggcatctgacaatctttcaccaacttactaaattntancaactctgtcgttgtataaccatcatacaagggcatttgtatattaatggatgtagtcattatttatgcctatacaggtatatactacaatataattatattatg

SEQ ID NO: 51295 - DNA, 277 bp, Oryza sativa
  unsure (1)..(277): unsure at all n locations
agcttcaccaaattttagtggaannttcatagcactttatttaattataaaacaataaacaaattatttgtaattatttaaaaaggaaaaacctaaatatctcccacctctctctgggccgaaagtcggcacaacacatacactctctctttctctcttcttttcccctggccatgtccgccacccccagccttnccagcatgagttggtaggtcggcccgcttcgcagtgtccttcgcctgtaaccattgactgacggggcatcttgtatccctcc

SEQ ID NO: 51296 - DNA, 456 bp, Oryza sativa
  unsure (1)..(456): unsure at all n locations
gcttaaatactaaatataccatatttttcattgttcctttcaggaaatttaacattagcagacagaaaaaacaaacttgtgaacacaagcatgctcaacactggcacatggaaaaagaataaactaatagcgaacggtcaactttccaaaactgttaggtttgtgaaacaactctctatcttctctgctggttgatcttcagatccaactcacacccttgcattcctctagaagagagttcatatcctccttgaatattcaagtctagtagaagcaactcttcagtttttggagtgcacttaacatccttactctcctgacttcctaaatgggagagctgagagcccanaatattaacttttagggtgtcatcagatataagcttcatcaattcattgtttccttctgaacttgggtgattgccatgaacctgaaaagctaggtgatgctgaatct

SEQ ID NO: 51297 - DNA, 507 bp, Oryza sativa
  unsure (1)..(507): unsure at all n locations
acttaattaattacttgagatctanggttatctcctatatttctgttagattctgacaagataccgtgaatattttgaagtacaaaatgtataagcaagttcactatagtattgaacagcccattgtttcgttaatttggggaataagcgaaacggcttatttgtaaataaaaaataatctataaataaaatttttatatcgtgttcttagcgatttaaaaataaaggttgaataataaacttcgatgaaaaaaatctcataattaactctaaatttaaatcttagccgataagtataagcataatctgctcctgctcgggaggatcatgatgtactacttngattgcgtcaattttactccatccgcttgagcaaacggcgatgataaatnttattcacagtcctcgcagccatgcatcaacacgtaattaagtactagtngacagtgaaagagaacgttagtaattgcgtcgacatactgtagaactgcaagctctatataagta

SEQ ID NO: 51298 - DNA, 466 bp, Oryza sativa
  unsure (1)..(466): unsure at all n locations
agctngaataaacttgagagcaaacttttgagagtgtttgataaatgtgntgaaatggcgtggaattccctctctcgggcgggtggctcttatagggtatccacaacggtcagaaatgacatatgggacccactagctggtgcccttgcaaaagtggcaggtagcccgtgcttggccggttcggctggactagtgggtttggcctaaccccttggtgggcccaaaccggccgccactttccggctgttgggattcaattggttattgttgtcatggcatagtgtaattcacaccatcaattcctccttgctcggccttaatatcttcatcttctctcacttctgtaatcctcgntccttaatgcaattatccctcctatcctcttgcgtcctcctcttttctgtctcccattctatattttgtacttcactaattccctatatgctctcatttacattctattcac

SEQ ID NO: 51299 - DNA, 441 bp, Oryza sativa
  unsure (1)..(441): unsure at all n locations
actatatanactcaagctataccattcgctgtgcgtgtgaagtgttgttctaattatcttcatttactgaggttcttcaataccaagcctcctgctcattgcaatcttcaaaagagacatgcataaagcccacaatatcattcagcttctggcaagtgtcatagcaactggcatgtgtagcaagttgcaaggtagacacccgattatgtggaataagcacaatgtgcactaaaatagatctgaagttcttggatgatactagcaatctactatacttttattttaagacaactgatggaagatagaataattcataatttggttaacatgatctaaagcactggaaccatcaatcttacatgacataatcgtaattgcatatcgcccaatgaaccagttctccattaaatgtatcacagattaactctatttcctataagt

SEQ ID NO: 51300 - DNA, 279 bp, Oryza sativa
  unsure (1)..(279): unsure at all n locations
agcttcttcaaattcggcgggtctgatgcgaacatataccaccattgtgctgcanaagccaagtaacatgtcatttcataattctgaatacatcaagatcaattaaatatatcatagttccatgattagaaacataccaggtgaagttttcccatctatggccatccttcttgctagtgccctcccaaattcacccgtcttacgtcggtacatctcaacctccagcacagcggcggcagccggtatcgatattcgtcatccacttcaatgcctgtcgga

SEQ ID NO: 51301 - DNA, 398 bp, Oryza sativa
  unsure (1)..(398): unsure at all n locations
tgacatactaagaagcataagcatcacaatcaaatgttggatgcatctccactctcacttcgtcatcacttaaatgctaaattcccaaatatgttcaactgggacttgagaacttgaccacaacagaattcacctgatccgtgtaccaaaggataatatggcggaaatttgcagcactactcactaaactactttctcaccattcttccatgagcttggccttctcagggagcgggatgtcggggcagatctcgatggggttggagtgctcgaacagctccttcctcttggcgtcgtactcctcgttcccctgactcagcnacccatggcttgctaccaccacataaacacacatacacctctcatactcccttcaaacaaaaatgtcaatagccact

SEQ ID NO: 51302 - DNA, 377 bp, Oryza sativa
  unsure (1)..(377): unsure at all n locations
acccaacactgagctgcactgaaccttgtctaccagtaggagaatggattttatacttgggtgccaaacaggagatgctacaaaggtgtatatctaaaaagaacaaacgcacacttcgagtactcactctccaagtaaataaatatgcacggaggcttacccttacgactaacatttgtggaatacacgcttgacaccaccttatgcaattgagagacagaacagatcatagagnaccactctctattcccctgcttagttattagtggcaaacgaaaactgcgtcacgtcgaacgacctggctctctcaacaggttggaaataaagacgactgtattggttgatcatagattttatggggatccgcccattacatg

SEQ ID NO: 51303 - DNA, 403 bp, Oryza sativa
  unsure (1)..(403): unsure at all n locations
tctattgttggaatggactactttcttagacatatcatcatactcatatcctctatcggcttactcgtgtatgactaatgatcttcatccccgtccctagaaatttgcggcgccccattctcagttacccatgggtgagaacccccaccactgccccgtatgggcggtccccactggatccctgtgcccaatgtgaagattgtgaccccaagtattaattccgttctggtccatgggccgcacgcgactgtaatcactagtccacaatggcccatcangcctttttatgagctcaccgcgagtactaacctcgaacgccgaaaaacaaatctgaataataactaaaaatatcatattattgatcggtaatgaccaagttatattggtggaccgatacttttaa

SEQ ID NO: 51304 - DNA, 464 bp, Oryza sativa
  unsure (1)..(464): unsure at all n locations
agctntntatgtgttctcattcattcttgtcttctattttttgttgatttttctgaaaatccatctcactatcctatccttctttagatggctgatttaaacaacgacaacgtcttccctgccccgcatcttctcactcatccagcaaagcatcatcttgtttctaagactattcactctgttttcaacatcgaggtgaatgtgaggcatcaagaggaagataacaagtctgctttccgtcacttctgtagaatcttaaaaaggctccccattaataagaatctggatagagccgaaatagaggaaactactattccgactgagctctgcactgngtttgttattgagcagaggggaaatatactttatcttctaaccacagcccatgctttggatgtatactatgatgcaaagaaccatgaccttaccccanaagatcttaatanatcatttattttcaaagt

SEQ ID NO: 51305 - DNA, 467 bp, Oryza sativa
  unsure (1)..(467): unsure at all n locations
ntaacttccatgggtgaccccaagtacagacatagaagatatcacatatatgcatatgtatgattgagatgtgcacatggtatggacacatgagcaatatctttggatgaggcccatattactcttagcagcccttggttataaggaacctttcgttatgtttgggccaagatttaattacctagctgtccagaagcctgacaacataacattaacatatttacataagttccaaatattactggtagaccacaaaatgataaatgtagtgaccatgtttagataaatatagtgactagtaaggtgtggtagcanatgtgaagcttaacacaatatggcgatcttgaagtggtatacaatatctagaatactgtactgctgctgtgctgctgtgcacagaaattaatgtccattaaactacccggcgtgatgngatgtttcactgagagcttaatcacgtgactgac

SEQ ID NO: 51306 - DNA, 465 bp, Oryza sativa
agcttagctacttctacaagtagcagccgtattttcttatcttctttcttcccagccttcaaggaggatgtgatccctgtggttccggtcctgccaactccctagattttaaagaaagcaagctgagatgacaatataggtccaaataaactattcagaggaccgagtactccatccgcctcaaaatataagtatttttagaataatgccaagtcaaactttttgaatcttgactattaatatgtaaatttgatgttactaagtttatcattaaacaaataatcataatatgcaacttttttaaaaaaacatatattgttggtcaatgtagtatctcaaagaccgtgtcgagatctataaatgcttatattctgggacggagagtagttactagagcacgtacaatagcaggctataagccagcataaacatatttaaagagataacgaagagagagaagagcac

SEQ ID NO: 51307 - DNA, 355 bp, Oryza sativa
  unsure (1)..(355): unsure at all n locations
ngaggtagagggatcgtcngctngngttgatgtaggtggctccacttgtgttgatgaagacaccccttgttgtggctccctaggacgtacgtccccaagagccaaccttttgattgcttcgctcgggtcctcctcttcacctaacacatgtgagtcaacttactctacttgagagccattagtttcgtcaaatgtcacatcacgcgcgatctcaacaatatcggaggttttgttgaaaacgcagtatgcgcattcattngatccatacccaagcaagaatccctcatccactgtaggagcgaacttagatgatctagccttctttattagaatgtaacacttactactcgaaaca

SEQ ID NO: 51308 - DNA, 396 bp, Oryza sativa
  unsure (1)..(396): unsure at all n locations
agctnggcatgcatgtgtgtggcgaatcgctgtaatcttcatatcttactacgcgacgcaagcgtacgcggtgtccaagctcgccaacgtgctgcacaccaaggaactcgccgtgcgcctcaaggtccgttcgtttcggcaccggatggagtttttcgtggcaggtttctcacctttccttccgttatttgggggctgtgtggctcggttaatcccaacaggagatgggcgccaatgtgacggtgaactgcgtgcacccgggcatcgtcaggacgcggctcaaccgtgaccgcgacggcctcgtcacaggtgaatactactactattactactactctgtttgatccactgtaattctagcccgatcaaacgacttaagaacagattaattatttt

SEQ ID NO: 51309 - DNA, 466 bp, Oryza sativa
  unsure (1)..(466): unsure at all n locations
acattcatgaatctttanggcgtatgtagatgtactgaaatgttgttgtggataatgcaggtttatcgcaatgctctacgtctggttcgatcaatggtatgttagcatgctctattgcttcagtatttcttttggttgaagtttgtctttaagcaattcatctcctgtattggacttcgtttttaaatgaaatggttttttattgagacaatgatgattacaacgaacaaaatcgtatattgaatgcaccggaacaattatatgatcgagaaaatagggtaaaaatgtgaacttggtgtctcactgttaagtgaatgatatatgtctagattacactagcttgggtttatcattntatttatctcgtttgaatctcagcactattcattattataaccaggtatctgatgtttacatatctgtggtggatactattgtatgtatgcttgcctaccttacatattaa

SEQ ID NO: 51310 - DNA, 421 bp, Oryza sativa
caccatctctctctctctctatctcatggcgatcttgtgtgtcatgcacttgctctttcacagggtaaggtgcaagtgcgacatccactgctgctccttttttctacgaggagagagaaaagatggagagagagaggggaagcttctttgcttatgtcttctggtttttgtttgaatatatatctttctgtctgtctcttggtagagtggagaggaggaaagagattcgctgatgtgtcaactatcaagcaagtatgcatgatggttcggtgaaggatatccttgaccttcgggatgatcaaggcagtaaattcaacgttgtggtttagacttatcgcttgttcgatggctaataagtctctgaaaaacaagaatcaatataatatatatatatacctatatatatatatatatatatata

SEQ ID NO: 51311 - DNA, 261 bp, Oryza sativa
ctgcatcagctgtgagcaaggatctaatagcggtaaacggtgtggtgccgtcactacaactgtgtatgcttaagcggaaagcgaccttgtaagtggttctaacggtttttctaatctaaaatgtggagcatatacacacacatatattgtacatacatatgcatttttatacactaatacaatacaatattaccatctaactcatctttctgtgtgaacaatggacatatgtttataggatgaaatcttacaaaagtacat

SEQ ID NO: 51312 - DNA, 401 bp, Oryza sativa
aagagagacagctcatatcagcttttctcatgggaacaatcataagcctcgtcttatgacgggacagctaggtgggccttccaccctgatcgtctgtcagcaccattcctatcacccgagtaacttcgacaacgactactactgtggcagtcacaacaacagtaagcagcacaaccacaacttgactccacccgcactaatggcaccagctcagtcagatccgtcatctgtgtcagctcagtcagaacaacccaagaatggggctgtaggaaagccaggacactgcttcaactgtggcaagcacggccactttgctggcaagtgtccgaactgaattccactggacccaggctcatacaggcccgcgccaatcatgtgtctgcagaagaagcacatgcatc

SEQ ID NO: 51313 - DNA, 341 bp, Oryza sativa
catgaatctcagctgttaagctagctgcggagctgaccactctgccttaccgttgttcctttccttcggcctaaccgcgcgcgccgtgcttaaccgtacgcatcgctgtcgtgttaaaccagctgcgccatcgtgttgtcccatcaccacccgtcgtcgtcctcacaccagtgctgaaaaagattggggaagaaaggtggatcggatgtggggagctcacatgcaaatatgtgccactctggatggccacataagctagtcacccggtcgagatccttagacctcatgagtacttaaacaaaccgggatcctaatgtgatttttaagacatggacctagtg

SEQ ID NO: 51314 - DNA, 281 bp, Oryza sativa
caaaacactatgccctatgaacacacatattcctggctaagtaggctgctaactgcataataatatcaaatgctaaaaagcaatcgaacgagaataaattgtgtgttgggcttgggatgcatcacgagtgttaaaagctcaggaaactggccccacaagtaagtcactgtcattctcttctaagattcctccttttaactttcgtgctagtgatttacatgcttcatttatatgagatatatatttccttggtagatatataccggcaactgatgggaatc

SEQ ID NO: 51315 - DNA, 386 bp, Oryza sativa
agcttaatgctatcagacgatcatcttccagatattgtttggtcggatatatcccgaatacagagtctggattgatttctattatcagaaaaaaaaaatctgccagtttttttatttctagtacgcgtcagagcagaaagagatgttttgaaggttttagaaaacaaatatttctctttaaagaaaaacagcttgtcttgaaagaaaaagaaaaacaactttctgctcatgccaacgctacttgacagccgacatataggttccatctttaaaatggttcacaataggattattcggtggtgtccacgtgctttcagcagaattttccttcaaataacacaaggctggtggtgtagggtcgccacattcacctcgttattaactca

SEQ ID NO: 51316 - DNA, 370 bp, Oryza sativa
  unsure (1)..(370): unsure at all n locations
ttgatttttgaatgactctgagatccattccctcttcaacgggaacgtcatggtaaaaccgaccactgttagtgttgcaaatctttgtaacgccaccagtggccgaccttttggctgatcatcgcatacaattatcgatctttaacacacgtggatacacatacccctacatgttaacaaggtaattaaaagctaacctaaagagcttcatcgtggcctgatttataagcctcaatccacagcagaagataagatccagtggtgctgtggcgcatgcatgcacgcagtatattctcccaccatgcaatcatcnctccactccagccgtccagttaattatgcacaccatatttaattgaccatatactgt

SEQ ID NO: 51317 - DNA, 383 bp, Oryza sativa
agcttgtggagcagctgacaattaatatatcatactttgctttgttcaagcttgtgacgaccaaggtgctattatagttatctgcacagtgaggactgaatccgattttattaaccattcttgtgcttgcattgcttcaccataactcaccttcttttgcatgatcataatgctactcatgtctctgtatgccgcgagattaatttgtgtttaactaagtcaatattggtattagcattagagcggtattattttattttttactatgatggtctattcaattattgtgttgttcttggtatttaataacgagcactataaagatgtgatgtaattattgtgtattaagggtttcgatacaacaaacaaacactcgatgccta

SEQ ID NO: 51318 - DNA, 231 bp, Oryza sativa
aagaccctataagacacatgggtttaccacacatggaataatatggcatatgtagtgtaacattcgagtaaataaactcattaaggaattaccaacccgcctggaaaatgacccaaatatataatcagtctaagtcacaatattggtgaataaaaatgcacacttacctgacacacagcaatgatattgtatccaatcaaatgcttgataaacccaacaacaccttgtcta

SEQ ID NO: 51319 - DNA, 166 bp, Oryza sativa
  unsure (1)..(166): unsure at all n locations
tagtaatgtatgagatactaagttcaacataatatagtgtttntatctggacattggtgagttagtaactgtcattttgaatgctactaaaagctccgacgctctttgagtcataagagaataattgggttgattgaccctctattttctttactcggcaataatt

SEQ ID NO: 51320 - DNA, 421 bp, Oryza sativa
  unsure (1)..(421): unsure at all n locations
gtgcaagctttagccatttctgtcgaggcccggtctgattgtttgcacaaagcacaagcatgcatccaaaggatcaagaaagtacaaagcgattggacaaaaaccaaataaataaactcccaaaggagcgatcggaagatacgtatcaccgccctcggaaaaaaagttcagaacaggcatctatcacctgcgtccaactcgatcgatctaccaatcgaggattnnttttttgaattctttaattgataaaattagaataccgtacccttaacattattttttaaagaaaataggcattttggccttggcagtgcaaagtttttttttatgtacatataatgttacatagacgacgtggaaaaatgaattagatatactacctccattttaaattgacgacggtcgtgattttacatataat

SEQ ID NO: 51321 - DNA, 417 bp, Oryza sativa
  unsure (1)..(417): unsure at all n locations
tttgtacagctagctgctcagagcaatatttcttgtgtgctcagttattcataagataactcttgtgccatcttttgtgttatgaacatggggagttcttctgtatgctttacagtataaaaaagttcttttttttaggaatcagcttgtgtattagaatgtggaactaggatcttggcattctttatttgtatataccagtgtgaaagtcttggctgatatttgctgtacttgagtgaagaaatcttggttgaaatgttgtgacatcttataatagaatcaaaatcgactgggcacataggggggcaatttggcctctgcattgcgaatacttctactacttgangtcttttttatcttctatgatttgacctggacgttggattgtgaactaatgctctgtccgtaaccgattct

SEQ ID NO: 51322 - DNA, 165 bp, Oryza sativa
  unsure (1)..(165): unsure at all n locations
agcttaagccttttagcactnttccccctgggnttatataattcttgtttgggatcaggagacatgtaaccccctgtgagcttattgattctggagcttctcctacgaacagtgtccacaattgccacagacttaggtttagtctttttggatatcctaaaagat

SEQ ID NO: 51323 - DNA, 151 bp, Oryza sativa
ctgaggcatgaagcttgagctatatctgcaagttcatatagctttactctgtatattgagcactgacatgccggtccagggagccttaatgatagctacacttggaggtgtagctccgccggcgacttgacatgagcactttcacaaccat

SEQ ID NO: 51324 - DNA, 343 bp, Oryza sativa
  unsure (1)..(343): unsure at all n locations
ccactcttgacatgctaacatcgctacccgtaaatgctattgccagcgcagtttctgcacaggccctaactaaaggttctagcacgagacacacatcatatagtgaggctggggacacagctgaacagaccattggatctataataacagtgaggttcacatatatatatgaactgtttaatgctataacacacttctttttttggacgagcaaacagcgaagttcgaaaaaattcctgtgtaacaagttgtgtccctcaatggagagaagaaagcgatagcaatgcaccggtcttttataaagaagtcatacaacgctactatngaggaaggcattatcact

SEQ ID NO: 51325 - DNA, 248 bp, Oryza sativa
  unsure (1)..(248): unsure at all n locations
cagcatgcaagcttngaagatatggatgctgaggattactccaagttttttataactgagctaagagattggtctgacgaagatcttatcaagagcattcgcgaccgtttcgtgactggaaattggtcaaaagcagctctaagaggacaggaaataaatgaaaacgatgcggatgacgaataagccgacggagattctgcagatctggagactggtgaggggcatacaagctaggcactcagaaacta

SEQ ID NO: 51326 - DNA, 153 bp, Oryza sativa
ttgatgaagtggagagagagaggagagtcccggcacgtatttctgtgtaatttgtgaaacacggtaaaaacacacgctaagacatgtcgttataacgtacccccttcggccagaaaataggccaatcctagctacgaatctggacacatgcgt

SEQ ID NO: 51327 - DNA, 334 bp, Oryza sativa
atatcttggcatacgaactctgaatcgacccgttcaaggctcctaatgtttggtataacctaaagaacccggggcttttttttatgattgtatcgccttttaaagcttgagcttgcttggtgtttgcgagtctttgcgatcggaggttccgaagcgtggtccgtggctgttgccgaagttcggaaggccgctctctctgagcaaggcaagtcacatcattctttgacatattgaatcccagtttataaaaatattgtgcttataaatattgcattatcgctttattaaatgtccgcgtatcactggtttactagccatgctatttactttgtat

SEQ ID NO: 51328 - DNA, 310 bp, Oryza sativa
acatagatactcagcttgtggacccggagatacctatagacgtccattcagcatatacacatactgttttacctctaaattgacctgaaactgtaaacattgttagataatcgttaatggtcacgaagatgatggccttcactgtgaagaattcccttaggtactctgtccacactttcaatccctctttccataaatcagccatatctttcaacaatggttcaagaaatattgcaatatcaataccaggctgacggggtccctgtatgaggatacagagtagtacgtattttcgcttctgacaaagcca

SEQ ID NO: 51329 - DNA, 160 bp, Oryza sativa
  unsure (1)..(160): unsure at all n locations
agcttgcattaaacacctaagttctcgtttgtgttttttctaaagnactcacccttgctctatataaatatatatatatatagctcctccgccctgaagagaaggcaaagcgaagtgaatattatgggttcgtcctggttcccagccgacgcctgtgttg

SEQ ID NO: 51330 - DNA, 150 bp, Oryza sativa
ctgcagcttcggttatacaactgcggacattcctttttcttcttaagacacattcctgcacggctggcttgcgatagataccacgcctgctcctatcaacacacattatttcataccgatgcacttgtgtgccttgagcaacaactctat

SEQ ID NO: 51331 - DNA, 318 bp, Oryza sativa
agagtgtcttttccatacccttctttttattcttagcactttggatagacggaggaagttgaagatggtcttcatcaagcacacattttggaccctgcatacaaaaacaaaagaactgtggagccctatgacagatctcaataagtaccgtatgatgaccatttaacctacgcgctgtgcatgctgaatcatgacaaacacaagcaatcaaataggtgatgaaaatgttcactggcattatcagagaagccaacttgcggagtgtgaaggagccccacaggggtcatgagaacttggtagagattacatacattcata

SEQ ID NO: 51332 - DNA, 498 bp, Oryza sativa
  unsure (1)..(498): unsure at all n locations
ctcagcttatggcccttctattatgctctctacaggctactctgctgcagccaacctcttcaatgctccatagcaacaatcctgaacactgccgactatctcagatgcttgggcatcacgtcaagctccagaagcttttctcctcttttaacagcatcctanaatgaaatgatgcgaccatgcctgttcagggagtccgagtgaatagttgcacatatgcatgaacctaagatgccttgcataactattgattgcgttgagccagttcgattaatcgattgagggggatcggaataggatttgttttaatcaaaattaaatcccaacctaatccttctcatacatcncaacggcaaccataaacacattaccatctcttcatcacattacgctatggtcccgatcgcaaccaanacatcccaccagccaatcccacttaggtaccagagaccatcatgaataatacgcattaaacacccngcaattaaactaaacctc

SEQ ID NO: 51333 - DNA, 175 bp, Oryza sativa
  unsure (1)..(175): unsure at all n locations
agcctgtctggcttccaaggctgcttaattaggattatttactatctgctgcattatttctctgcttatgatntcctgcataagccataccctagatcgatcttgctattgaaagtctattatacccggcccttatggcattatctcggtgctccattccggccgctgcttctcc

SEQ ID NO: 51334 - DNA, 81 bp, Oryza sativa
ctaagctgctgattaccgatcgaggtggatggagtatgattggtgaacgcctaatatggcctatgtttatgtgaggacatg

SEQ ID NO: 51335 - DNA, 349 bp, Oryza sativa
agcttatccagaagagaccgagttcaaagagaatgttgtatggtaagttatctattaattaggaataatttgttagctacctttatatctttaggaaagtttctttcttgtccggcaaggacttgtatcaacacatgggtataaatatgtacacccggggtctatgtaatgtatcttcacgatcaatacaattcgggccatcgccaccctcttttacttctacttttgtttttacagtccggcggaacatggcacccgacgcggtgctgcattgtctttgatctccggcgaatggataagaccaatgttccggcggtccaggcaattgtatcatatacatcggacgtcg

SEQ ID NO: 51336 - DNA, 206 bp, Oryza sativa
ctggcgaggctcgtcgaccatggcgccaagtcacggacaaccaaggtcgtgctcgggaccgccgggtacatcgacccagagctcgttaacacgcgcaggccaagcactgagttcgacgtctacagctttggcatcgttctcctcgagatcgtctccggccgtcgccccgtggaggaaccggacgacagcgacgagctctatgtgct

SEQ ID NO: 51337 - DNA, 163 bp, Oryza sativa
  unsure (1)..(163): unsure at all n locations
agagcgacctgaggcatgcaagcttctccaanagtttcgcatcctacaacttcttttttatcggctgcagaaggtacacaatgtaagaaaggcagcccatgtataacgacaaaccgatgcacaaaatatttaatgcgagagaccgtaagtgagtcaaggggct

SEQ ID NO: 51338 - DNA, 212 bp, Oryza sativa
  unsure (1)..(212): unsure at all n locations
ttgcgagtctaggactatcggnttggctaggaagtcaactttctcaattctattgttaacttccgggcatattcgagttgcccttatattccttctaggcgaacgtactatcattggtacacgtaaattttgggtttttcgaccatttttttcacaatagcttgtctacgacataatgctcagccttcgcctccaccaaactttcgcttgtc

SEQ ID NO: 51339 - DNA, 197 bp, Oryza sativa
  unsure (1)..(197): unsure at all n locations
agctgactcaacacgncgctccactccaggcaacctttacttagtgactagacaactatgcacaacagttcaactagaagacctcagcttctggggggggaaagacagcagactggtctaccaccgtctcgcaaggcaaccggagaggggtatgatgcacgtaaaccaaggagctagagtctgatcaaaagtagcat

SEQ ID NO: 51340 - DNA, 515 bp, Oryza sativa
  unsure (1)..(515): unsure at all n locations
tcacggtcttctacacagacatgtggttaaaataaaacggcacactgactgtaagtggagtcaacgcatgatctgtaagaatgacaaactggcaagtgaaaaatactggcattctgcgccaaattccagaagatggaatgaagaaatgctgatccatgaataagatgcagagatgtatgtagcttatgtcagagattgtagaaacacatgaaaagaattgataaattgatgcgatcactcaccagatgcttggtgtaatttcagtggtatagttttctttttacttgaattcagtagtataatttgtccagcaattaatcaaagccccaacaacttcagtgattaattccatactttattagtatcattaccatcctggagaacaaaaatgtatatgagtaagtatattattcagaanatacagattaaaatcagacaacttaaacatgagtggtacggcaggatgcagtaagcgcaaaagatatgtttcaatttgtgaaaatacaaagcaacat

SEQ ID NO: 51341 - DNA, 353 bp, Oryza sativa
tagcttgaagatgaacagtatacggggaggtttattatattttgtcttgggctggctgaaaaatataggatagaaagaaagagaagggggaactctgctgtgccgacttgagctgcacagccgtgcacacaaaagagggagatgggctggaaagggcccaagattaggaagaggattattattacttttccaattaaactaatcactgaaatgatctttgaattgttaaaaatactctcaatgctcgaataatgtcaagaaaaatcttgaaaatactcgaacactataagtatttaaataaattataagcagaccatttaatgagtaatttaataggggaatatattctgaaa

SEQ ID NO: 51342 - DNA, 399 bp, Oryza sativa
  unsure (1)..(399): unsure at all n locations
tactaagcttctgagatcttaaactctgcttagcaaattaatatcaggtaaactttagnttccattataccttcatagtaagccttgccctggtaaaattaaaatattcaacgaaacaagaactaatgaagtaaatttaataggcaaacttacatgctaaagtttcaatatgaaaaacttacaagctataggcctaacatatattcagagtcagttattttccacaatgggagaagcaatcatgcagatagcttcaaagaaggcgatagacggactatggtcacagccctattatcatattatgacataataatgctgcacattttggcacagacatttgcaagttgctaatgccactacacacatgcactaacacatgaaaatctagatcacaaccaa

SEQ ID NO: 51343 - DNA, 327 bp, Oryza sativa
  unsure (1)..(327): unsure at all n locations
aacatatctctaagaaaattacacgaaatatcctaattaacagatacaattggctatctgagagcttatcttcatcgtggcaatccctgtgaagcactttgatcgaatctagaaacaaccttgaaaccatcttcatcagaaatggctgcatacttctatcggctgattagctgtctctatccgaccatctcagncgtgccttcgaagcgatgctactttgtttttaaaacatcttttatcgaatcgctcgacctaatgtcaacctggntacaactaacaaattggtcgcaaaccgcacatgaactctacaacgctctagacgcacat

SEQ ID NO: 51344 - DNA, 386 bp, Oryza sativa
  unsure (1)..(386): unsure at all n locations
agcttcttgaccatctcttcacttgctaaattgttgcaactcccgcaatcaataatcattttgacggtatggcctttcacaagaaccttgctttggaacaaattgtgacggtgcttntgctcttcacacttctctttagcactaagtgctagcttgacaattaggctaggatattgatctagcgactctggatgcaaatggacttcctcgatgtcatcattaatttggccttctgcatcggcaggggcagctaaagcatattcatcatcacaatcactagcagaagtatactcaccatcagcattcacaaatagagctcgccgatttggacagtcacgtgcaatgtccaatgccatgcacctatgacatgtatatcacgggtacgt

SEQ ID NO: 51345 - DNA, 335 bp, Oryza sativa
  unsure (1)..(335): unsure at all n locations
atagggtaattacacacacctatactacagggcgtatcacanatagcttaggttatacatgtccaagctaccaaanattggtaacttagagactgtaccaactctagtaaattaaccggcggcaacacagtttgacatttacttattaaccatcattaacccaataatactagtgacttaatcctttagagaggagaatgaaagcatgttcaacactgctgtcgaaacgacaattgcatatgtcgaacgacgtggttactcaacagtggttggaanacagatatagtgtattgaattgagattattttcttgagaacccctaatacatggcccta

SEQ ID NO: 51346 - DNA, 314 bp, Oryza sativa
  unsure (1)..(314): unsure at all n locations
agctntcgtcatgttgagcttgagcttctcatgagcctatatgtatgtttgattttatgtcatgtgaacaagagatagtgtaaggataaatgagtacagactcatgtaaaataattagtctcgttttggatcatatattaatcgtatgttctccgagcctctcctttaatattgttatctcgaaaatattggtttacactaaaattatcatgcaaatatacattatcatatacttggtcgagctcgtcaacctaaccgaatttgagtcgagcctgtttaacgactctgaggtggattaggctcggctcgagctt

SEQ ID NO: 51347 - DNA, 170 bp, Oryza sativa
ggggcgtccttctcccttagacaaatatttttttttacgcacaaccaggggctatacgcgcatagctcaacatcctttacatgatacatggcacaacagtgcccccgtattctatctatgcagacttaatatcaccaccattctacgtttacgaactgtgcatagtaaat

SEQ ID NO: 51348 - DNA, 317 bp, Oryza sativa
  unsure (1)..(317): unsure at all n locations
agcttntgccttgcactgattgtgttgagcaactnatttatcccgacaactgagaggngatcaggttgagtgtacttggcctcattggtcctcaggataagtgatgtaataattgcgacattacatatgcaattaggctcatagcaaagatcgattagagaaagacacatgcattacttttctttttctggcttttcacaagatcacacccacattccgtgcttctctgtatctctcttgcaagtttttgtgttgcctactccgctctgatctatctccctcctcatttctgtagctccctgcactatttcctacag

SEQ ID NO: 51349 - DNA, 271 bp, Oryza sativa
  unsure (1)..(271): unsure at all n locations
cacgagagaanactcaagcttcagctagatactcaccaattgctttctaggatctgtagctttcttaaatatggtatttcctaactttaatactccatatgtgccaaaatataaccgactttagcctttagaaattggtcaaaatattacaacttcctcaccaacaatctcttctcaaccaatcacaacccttcaccagtcaatttctccacctacagtcagttctcaagcaatcacaagtctccaccatttaattctacttatcttttta

SEQ ID NO: 51350 - DNA, 68 bp, Oryza sativa
gccagcttagagtatcctaaacttaaatagaaggaatgttcgacgtaccctgggaattattcaaaaat

SEQ ID NO: 51351 - DNA, 439 bp, Oryza sativa
agctttaactgcatcaaaccaatggcattcgatttactcaccgcgttcggattaccacccgattcgatagcgataatcgccgtgatcaattgtggatcgacgccccacgctgcaccggctttctggcttattggcatccactgcatcgcacgttgcaccggaactatcgcgttccacggcgggttcgtatagtcatgctttgatgaacaacccgctaataacacaatcaaaaaggcaaaccatctcaatttcacttcttctatccttatagcctggaatcgccgttgaggtgacaacggcacacctaagcggcatgatatacatttcgtttcttgtgtcagcaaggaattggcatgtctctggttcacttaattgccccatcgggttactgcattaaacagcacgccgcgctgcgtggtatacagcgccttaccgacgc

SEQ ID NO: 51352 - DNA, 165 bp, Oryza sativa
gaaagacctgacctttttctttgctgctatacgagtagcttggatgatgagtcacttgtttgtggtaggaactactatgattaggcaagccggggtttcggaaaacatattgagatttgaaacgttctctcgaattgtcgaaacggactttaaaatgggaccgtc

SEQ ID NO: 51353 - DNA, 271 bp, Oryza sativa
agcttacaacaaaaggataggaaagctactattgctatacccgaactcttccgaaggcgttcggacgtctgagctctattctatttctatgtcaccagctagatactactaaacttaacttgaaagaaatgagggagctattacttaaggtgtgtgagtgaagtgaggatgagagcttcatttatagcctcccaacgacagctgtgatggttggaatagcaagaataccctccatacgtattggggagccatctcacgcgctcacgaaacc

SEQ ID NO: 51354 - DNA, 112 bp, Oryza sativa
cactatgatactaagctgatgacataatagtagaacgttgagcaccacataccctctacctggtgcaccactgtcgacgttagatacccgtagaccggatatagaggctatt

SEQ ID NO: 51355 - DNA, 175 bp, Oryza sativa
  unsure (1)..(175): unsure at all n locations
tcacatcgtcttctattctattataatataacaaaaaaaaggggttgatctgaaacacacaaaacnaactccaccccaaaancacaaaaaacaaactatttcattaacaaaaaccgtcacatatacttgaaacctatataacatttctccccacctatacatgaatcttactata

SEQ ID NO: 51356 - DNA, 477 bp, Oryza sativa
  unsure (1)..(477): unsure at all n locations
agcttggtggtggatgcctggatccagggtggaccatcgatgataaaggggttgccccatccgcaccaccctagttcgagaagattttggaggtgtcagcggagctgttggcggccggcagtccgatgacgtcggagctggtcagcgctcagctgcttcctggtggcgccgagcaggccttgtccgtgcagcttggtgacctcagccaccttgcctactcccatgccaaccaagccctcttcagcccaatggcccaacatactaaatcatgctttcactctgaataaagctttaattggggctgaaattactcgagctgtgctgttctttggcatcgatttngcatgatcttaccaagagcagaacatagtagctntaaatgctattggctttttttttcgaacgttgctttgctgtattcttcctgagacgagtcatttactctacttntactttataagtagacgtgaatagctc

SEQ ID NO: 51357 - DNA, 385 bp, Oryza sativa
  unsure (1)..(385): unsure at all n locations
acctatgatactcagcttaacatatgggatacaattttctcggtgcaacagcaatctgtctattacagaagctgtagccttaanagagaatgttcaacatgcctacaccttttgagcggcagaaattgcgtgctctgttggccaagagtgacagccatggcggtcagccgtgaagctacacagaaacagggccaaggaaacagaggaagaagataggaattggaaggacgattttggatcgtctgatgataacgaacggcggatagagcagaactgtacgtctgtgactctacaacccacagtcagaggatctagatcagtgtagtaaaaagttgccacataagtgagacattgtgataagaatacgaaagaacattcatttgag

SEQ ID NO: 51358 - DNA, 346 bp, Oryza sativa
gtcagaccctgacttcaaatttcaatacagctcgatgatgtttatatgatataatcattgatgtggtgcacaggccgaagtctgatgatgtatagccatttttgtgatgcacttacgcttgacactacacaccaaacaaacttctatgacatgacttttggtatttgctggagttttgctgacaaccaatacaaagaaagctttgagtgggcatttcagagatattaacctaatgggtggccctccgcccatgaccatactgactgtgacgatgatctggcattggctataattaaatatgaatatatattttgggacacctttgctgcacttctatggttatgtg

SEQ ID NO: 51359 - DNA, 273 bp, Oryza sativa
  unsure (1)..(273): unsure at all n locations
tggtgcaagggaagctcggctcggctcgtttatgggctgagctggctcgcgagcctggcatcgagtaaatctcatgcaaatctaagagaaatcgaacaacattttaccacatagaatgtgtaataatgtgataattcttctttaatatgtcatcacaacacataaatatataatatgaccattaaagntatcatttttaacacataaatagttagaaaaggtgcaaaatttttgcatatgaccctattgcagtgagccaagcgagctcacgag

SEQ ID NO: 51360 - DNA, 319 bp, Oryza sativa
catgctatgagagaataaacgacactctacgccatggaatgtgtgatgacgcgacgagttttttataatacgctgtcccgacacacccattgatcttatgtcacctataggaggagcgcttactagatctctacttcgaactagtgctatacccatgcatcggactgtgtcgcagtcagcgctgctagagcagcagatgctcatgtgccttgagtcaccgtgcaagtgtgtgggaaaaaagaatgaagatagaataattgaagagaataaagaaagggaaggaagaaataaatgtgacactaatacgtggggtcatttc

SEQ ID NO: 51361 - DNA, 319 bp, Oryza sativa
  unsure (1)..(319): unsure at all n locations
agctttgcaaaatattatgaatctattctttttttattcgacccctatgatcgaagttatatactctataacatatgccttatacacacaagcaatggagagcctacaaaggctctggaatattatttccgggcactataacgaaaccccttcttaccacaagcttttaataatatggccgngatctgtcattacgtgcgactatctccactattgaaagaaaaataagaaaggatcaaattttctagtatttactagaaaagggggctttctacatagggatcgtcataacaacgattntgccctatcagctgtagga

SEQ ID NO: 51362 - DNA, 440 bp, Oryza sativa
  unsure (1)..(440): unsure at all n locations
tatgaattctatcatccaatgagctcagctggacaacttggaatgggccaactcccaatcggtttattctttgccgacaaaatccaatgccgaggagaaatttcatcaaccctgatgatggatcggctgctcaacttgcaaggaccccctctgggcagtattgacaacatagaactggcaacattcagaagcaaaaactttgacaggtggtggggcgaatggaagctgcatctattccaccaaccagcttcaatgtatatgacagacctctttccagatgttgtccctcaagtaaatcttcaactttgcttgatttcatttacatagctgtttagccgattaatctcaactaatcctccttcagacaacagaatcttcccctcctcatcannagcatagtggcaaggacatccaatatgccccaggtttaattcctaacg

SEQ ID NO: 51363 - DNA, 451 bp, Oryza sativa
ctcagcctttcatactttctgcgttggttcttcgaatggagcttgtatttctggttctttgacaagaattagaagagataatggtggtgagtttaaaaatgcttcatttgaacaattttgcaacgaaagaggtcttgaacatgaattttcttctcctcgtgttcctcaacaaaacggtgttgttgaaaggaaaaatcgtgttttggttgagatggctataacgatgttggatgagaatgtatatattgtgctgaagcaattaacactgcatgttatatatcaaatcgggttttcttgagatctcaacttggaaaaacttcttatgaacttcgatttggacatcaacccaaagtttcacacttgtgtgattctgtgtgcagtgctttgtctcgaatcttgaaatctgataagtttgacgacgctctactgagtgattgttcttggtacccgc

SEQ ID NO: 51364 - DNA, 458 bp, Oryza sativa
  unsure (1)..(458): unsure at all n locations
agcttggaactttgaaagacgtatacgtatgtgatttcttgttggcggcaaatacaaatagtaccttggaaatttatgatctagacgggtaattatgcatgcgttgaaattggaaaggtatgcctggaacttaaagttagttntatccacagagatgctttcctcactatgtctcatatgatattacttattccattgatctagaatcttttatccgtggaagaaatatcaaccgttattcgcttgaaagctgaaacacctggaatctcctcctttgtgttttgttacgaaaggaaccaagctagaagccttttcactnttcagtatataaataactacgcccggatagttattcgcgatgaataaaataaataaatgataggcaactaaactccatntccattcttataccattatgatgagttcgtttcttataggctcaacctccactccatcat

SEQ ID NO: 51365 - DNA, 188 bp, Oryza sativa
tcagctttacattcttaatagacaatctggtggtagacagattatatatatattaatctactagtccttatttaattatgcaaatgcaacttcttaaatttcaaataaaaagctgaatttgtttcaaaggttttgttttatgagaaagtttaactaccacaaactctctctaatatgcccataatcca

SEQ ID NO: 51366 - DNA, 384 bp, Oryza sativa
  unsure (1)..(384): unsure at all n locations
gatgagtcccatcacgtaacatcgactgtcgcaatcaatgcttctgagcttaaccagaggattggcctaaccgacagggtcaacggtctaacccacagggtcatcgcctgtgttggtgccatcatatcggtggatgagacataccacttattcgatacaaccaacaccgtcccaccgccacatgaagaacagcatttatgttgtgaaggcatatgaccacaactatttctctgaggagctatattgctgctgatgctctccatanggcacacaggcacgatctgatttgcttgtcatggttacacaattaattgatataacacccggacatatattgcagttattcaacattggataacacccaaatggagtcttgaatgatgc

SEQ ID NO: 51367 - DNA, 315 bp, Oryza sativa
  unsure (1)..(315): unsure at all n locations
aactctaccgacagatgaactagccggaccagcgccaccgattttcaagactatggctgacaagacccttcgcgagtgtgctaccccctctgctgacaatgtggctattgggccgcaaatcaacatgggagacgtggatttcgacttgaagtccaacctcatcacaatggtgcaagctagcccggtctgtggcaagcttaaagaggatgccaacgctcatctgcagcagttcctggagatatgtagcacgtacaccataaagggtgttagtccagacanccgcaggctatggctcttcccgcttcccttcttggg

SEQ ID NO: 51368 - DNA, 324 bp, Oryza sativa
  unsure (1)..(324): unsure at all n locations
aatatttctattactaatagaacattttgataataatataattctttagaattggccaatacattatgttacaaatataacattaaaattcgaacacgagagtaaaaccaatagtntttacctgatggagtattatatatatccgagaaagacaaagggtgtgttaactgacagggaacaacgtactggcctgtaaaaaataacccaagacaaatgctcgaaacactaaacaattagagttcttgttactggctgtacacgggccgggtgaaacccacacagcggaatatacagacaataatgtgcatgtatgtttgtttcaca

SEQ ID NO: 51369 - DNA, 463 bp, Oryza sativa
  unsure (1)..(463): unsure at all n locations
agcttatatgatgaggtcgaggagagaatataagttttagaggacccgtttgtagtggatgaagaataactatgggcacacaaaacgagaaagccatacacatgattaatcgagttntaattattccaaacttgaaaaatgcatatatagaaaggtttcacatgaaatatagtgtttagcagtttgaacagtgtgctaataaaaactaagggaaaatatgtatcttaataagaaaagaatggcgccaaagtaaaagctatcccttatacaagaggtaaccttcacacaaactaaaaaaaatatgagagaaaaaagtgaattggacaaattaaataaagtaatngaaattagcgtgctccagatagtttagagatgatgtatgacatactggtctttacttatacgggataaattaatggtgtcacctatctcttttaaaaacttgctctagagtcgcaccccg

SEQ ID NO: 51370 - DNA, 418 bp, Oryza sativa
  unsure (1)..(418): unsure at all n locations
gcgacggatacacaaccaccgtcgtccgtcaaggtcttaaataaagtcgaggctgagttttcacccggcagccccactggaggtgaaggggtggcacgacattgccctcaagaggggtagagacattcgaaaacaccgtcgttgccggcacggccaaggccgggctatggtttcgcccgctgcctacgagtctataggatgacaaccccgatgctccaccaccatcaagcctccgccgacgcatgggcactgctgcatcagcgccccctgttggtcagcctacgnatgccacactagcctncgccgacctccgaccgcgcctcatcgcgccgcgccggcctccgttcctattggtcgtgcctcaacgagctgtgccggcctctgacacgcttcgtcgccgcacccacaccttataccg

SEQ ID NO: 51371 - DNA, 453 bp, Oryza sativa
  unsure (1)..(453): unsure at all n locations
agctntaaccaacaacagatgggtcagagatctgcaatgtgcttctcttcaatgaagccatggcacaattcttccagctctgggatgaagtacacactgtcgagctaaatctagaggaagacaccatccgctggaagctttcctccgaccgacttttcactgtatcttcagcctataaccttttcttcatggcaagagagatctgccctttcagcgaacttatttggcacatcaaagcttcatcccgagtacgcttcttcctatggttggctgccaaaggtcgctgcctaacagctgacaacctgggcaagagaggatggcagcatgaagattgctgctccctctgtcagagtgaagcagaggactgcctacatctgttcgtaacgtgcgctttcaccangagagtatggangatgatgcacggatggattggaatcaattcctcttgcctac

SEQ ID NO: 51372 - DNA, 438 bp, Oryza sativa
  unsure (1)..(438): unsure at all n locations
gtcgtggcattctatgctatggtgagagggttgggtaagattctgggtaaacttgagttttagatcatcttcttcggaattattttctcctctaactttgtaactacataattcaatgtgtagaccagaagaattagtgtagattctactggtggtagatgattacacctatattccattttctttggttgcactcaaaaataatgggtggactgctcacagaaattaaacaaagatgggctattagaaagctagattgaatctttaggacgcttatacagaggaggaaaaatctagaanaattacatttattcatgataactaatctagtatttgaataattatttccatgtcacttatgtgcagtaaatgactttggatgaaatatggttagccgataaattaattgattctttagttgctgctcgaccataattt

SEQ ID NO: 51373 - DNA, 462 bp, Oryza sativa
  unsure (1)..(462): unsure at all n locations
gtacttattatgcatcctgtgctgcctttgtagagctgaatgtaatatggcaagtgtgagtcaataatatgcttgataataagggggtatgcgatattggagtgtcgtgcacaaaatagaatcatcatactggcacgagatattccctatgaaaaaaaaccactgtcgcagatatgtaggaagtaggataagtccatatttgccacctcaactagttattttttacgagctggctcggctcgtttgagctcgttatcttaacgagcctgttaacgatccagaagcttagctcggcttggctagtctcataagttgacttattaagcntagtagttaggcttgttaacgtatttattctaccttcataatttcacatttaccattntatcatatattaacatganaataaacacttaactaataataattcactanatanntaatagtcgggtgtatttaaat

SEQ ID NO: 51374 - DNA, 479 bp, Oryza sativa
  unsure (1)..(479): unsure at all n locations
agcttccagaacttctattactttccccatccaaaccatatgacatatgaccagccgtctgattgcaaattaaaacagcattgtcagaattagtagcatccccattntgtcttgagtcggtgtggacaattacattccgagtttctctttctttgttagtacagtgattagtatcaccacgacaccctggtttagaagtactgtctgtagccaagtgcatttcctcattacccacatccttatacaaggtaccatgtccattaatactgccatttgtagcagaagcagaatttctggtcactgaactaccattctcgtcacaagtactatntggcaagtaagagcacctccggaagggaacaccatcagcattgttgcccgagaacttgtttacagtgttaacaatgtttcccatganagcagctccaagtagttgccttccacaaactattctgaggacacttgagtcgtgcacactc

SEQ ID NO: 51375 - DNA, 418 bp, Oryza sativa
agcttcattcttcaaaagagaaatttggggaatgtcttctatattattctccttagctagtagtaaaaggaaataagatcagatactgcttgtgcttggaatacacggagtagtacgatcgaaaacattgtacgaagaaaccagttaccttggagatcaagaaatgattgaacactagcactgttcgaaggctaaaattttactgctccgatgataacacatcatcatcatcttcatcgaagagctccaggcatccagggtagcttccaagtttctccagcacctcggcgagcagcgagggacatgaagccttgagctctctgaacccgtcggtcgccaccacagttgccagcatgccatgcgacgcgacgtacttcatgcacaccgccttcagctgcgggccatctctctgacgtct

SEQ ID NO: 51376 - DNA, 500 bp, Oryza sativa
  unsure (1)..(500): unsure at all n locations
ggaccttaagcgactgggctgcagcttaaaacctatactgtatacatactccatctatatctagctagccagccagtgcttctggggtagtattataaaatgttcttcaggtatcaaagccacatgtcggtgtgaaggaatttcatcagttgttccggcaggggaatatgctccccaatacatganaaggtatgcagatagctatccactagtccaaaaaatatcatttgaaaagaaaatatggagcaacaaattcatttggaaactttctcgttcttttggatatatatatccttcctgcgataaggaattctttttttttctcaactcatatatcanatatacattaattcacaaaactttgtgaagtgatgactaccattatatttacacttgtctttcanatntgtcatggccaatacaatatttttctactttggtgggagtactcgaagcatgacgctactgtcagcgcaataaatatgtgcaccttaacatat

SEQ ID NO: 51377 - DNA, 463 bp, Oryza sativa
  unsure (1)..(463): unsure at all n locations
taagcttgagccttaanatgtntctcaactccatatctattcctcttcttcaatgagccggatggtcttaaacttttcttgaaggctgaataatagtgccgaccacggttaaactgatacttttcacgtcctgaagggatatcactgactgtacctgagtttgtatgagcaacttgatggtggtggccaagatctggcaaaagatcaaacatcatcccacataatctgcaggtgaacttctgtaaaccatcatccttaccaaggttatggttattataaaggagctcatcacttgccctttctgttcttttgatagattgacccctacgtcgtcgagggacatgatccacaatgctgaaatctcgagaatgatctgaaacaatgtgctgccatataagatctgtgttcaaaaagttgctgttgcacgatatacaacgtacgagtgtcgaatattggagatact

SEQ ID NO: 51378 - DNA, 446 bp, Oryza sativa
  unsure (1)..(446): unsure at all n locations
agctngccgtatgctgagttctcttacaacaacatttttctttctagtctgcagatggcaccgtttgaagcactgtatggacggaggtgtcgtactccgctcttctgggatcagacaggggaacgccagttgtttggtatagaagttttaaatgaggcagaagagaaagtcagagctgttatggaaagattgagaatcgcgcaatctcggcagaaaagctatgcagacaaccgccgaagggagctcgttttccaagtaggggattatgtgtatctccgtgtcactccgctcatgggagtacaccgcttccaaaccaaaggaatagtggcaccacgctttgtgggaccatatctggatttggaacgcaggggtgaagtcgcttaccagcttgagctttcctccacatgcttggcatcataatgtgtccacgtctccagttaagaatg

SEQ ID NO: 51379 - DNA, 424 bp, Oryza sativa
  unsure (1)..(424): unsure at all n locations
agcttagctggaactgttccttgaacctggataatgttcttttagtgtacacccgagaagcatgtttctcaatgggcgagctagttaatgtggaaaccttctcctacagttcacgagaaatgacaagcatattataacatgttcagcagaaagtaccatacaccgatatatcatacggaaataattaaaaaaaaacatacattgtatgtatcatgctcctcagcgtcttccgcttcaatcctatcattgtagaaattctcatacctctttgcaaatccatgtagcgaagaggatggttttacatacttcttcagaacatgattcatgctctcacttctttgtgtggttgacatcctagcaaanaagaattccctgaagtaagctggagcccattttttctcatgtccacatnctgcgcaataca

SEQ ID NO: 51380 - DNA, 488 bp, Oryza sativa
  unsure (1)..(488): unsure at all n locations
acctgcggcatgcaagctttgtggtgaccacgatgtcnagctgttctcacttctctacgatctccttgcgcttcttcgtagagacgttgtgggcaatctcggcacagtatgtcctgtttacaggagaattagctcattagcagaaagtttgtaactgcagctggtgctgacaacagaaaacagcaatgctgaacaccaccccgctgaaagtaagcttggtgaacaaagtgattacctgttgtgcatcatgagcaactccagctcagagacattgtgcaccacaaacttcttgaacttgttggggaggtagtgcctggtcttcttgtctgagccgtaaccaatgttgggcatcaaggtgcatcccttgaactntctcctgacacgggagtcaatacccttgggcctgcgccagcttggctggacaagtatgaacaagttgaagttagtctcagcanatatgccaaatagccatagttacaaacgaggat

SEQ ID NO: 51381 - DNA, 481 bp, Oryza sativa
  unsure (1)..(481): unsure at all n locations
agctngtgtatataccaatgttacacaatcatcatatatgagtgcacaagtcccacggtagaattgctccattgccgagtataggactagtagtgcccaccacctcctccggatccatacccgtagccagagccagaaccatagccagatcctccgccttggccgccgccgcctccaccaccaccaccgctttcatatcctccaccataagcaccgccaccttgaccatatccgctgccagatccatagcctgagccgctaccatacccaccaccttgaccgccgccgccaccaccaccatgttcacctccaccaccactagcaccacctgcacctgatccatatccagagccataaccctcacctgagccatacccagatcctgcaccaccaccttccgcacctccaccgctttcataaccaccagctccaaaagcaccagagccatatcctgatccagaaccttgtccagaaccatacc

SEQ ID NO: 51382 - DNA, 460 bp, Oryza sativa
  unsure (1)..(460): unsure at all n locations
agctntcattagcaatggcttcatgcgccttgaacagatgtggactgcctgtaagtattcttatcacatgaatgattcttgcttgggtaaagggtgccctgttgacatctcaatgttatatattctattttgtattggtctaaatcttgtttctttctcactgattaacttgaagcacttgaatacctatgttgtaacttcggcataaagggaaaggacaacacctcactggatggcggagacaaaaagattgtttatggaatattgaaccctttccatgcttcgtccaactggctctcagcatctgtagtcagtgatgttgaatcaaacctgaaaataactatggcttcaaaatatctgtcgcgcgtgctgagaaatcagtcactctgttcacggtgcagcctatcactaactaaagataaggtcctgcaagaattcaacagtaatcacgtgaatgaac

SEQ ID NO: 51383 - DNA, 262 bp, Oryza sativa
  unsure (1)..(262): unsure at all n locations
agctntgatgattcgttgttatcccgcaattgttcagaaagctttgatgattcgntgntatccttgtttcaagaaagataaggatccactacaactcattactaggtcatataccagcagagataaaatagaattctgatcagctgaccatttattttagtggtgggcttttatcattgcacacgtaccggctctgtatgctaaagatgctctacatcaactgatcatttagagggtattatgcgtggcgactaagcatcat

SEQ ID NO: 51384 - DNA, 433 bp, Oryza sativa
  unsure (1)..(433): unsure at all n locations
agcttaaagccatggaatccctttatgcatatctggatctggattctgcataacaaacatataggatgagtagtatctgatataaatataatacttgagaaaaaatcaagtattttaaaatatttataaatatgtatttcttctcttgtcaattttgatttccccgagcagatgactctgtacgtttaaacactctgtccgactagtcatagcccccaagcatcgggagtcggcctaggcactttccagacatgcatatgagtgacatgagttcgtcattaatggaacaaagtttcacggattatgaattactactcaggtacttttgcaattattaagagcagaanataaatntatctcatctctatgctttngatttattccgaataatacttagcaccttgcgttactcgggtcatccaacgagcccccg

SEQ ID NO: 51385 - DNA, 483 bp, Oryza sativa
  unsure (1)..(483): unsure at all n locations
agcttcttgattntgttaaccaagatgtcgaatttattctgtgatttgantttgcgatctgtacaaataaattcacatcaatgactgggcatgaagatgagagtggtttttgaagtttcagctacaagtaccttcgacatctttcagagccgagtccctctgttttgccagttcgaccttgtctttctccagagcctggattcgcctttctagcttggatatcttggcagctntcactatattgctttccactggttaatcgcacatgaatagcagcatgaaacacatcagataaggatgagagttaccttttgatgaaccacttagctcanagttggagtcttggagctcggcgatccggtctctaaggtcatgctcagtcttcctagcaagctccttggcttcacgcagttgatctctggttgcttccagggttccaaggtggtggaaccaattctcgaggattgcagttnttgcctcatt

SEQ ID NO: 51386 - DNA, 481 bp, Oryza sativa
  unsure (1)..(481): unsure at all n locations
agcttcttaattagcatcagctagcagtgaggctttgtcaataatatcaatctttgatcccgttcttgaagccgacgctgcatacaaggtactcttcaagagtgcaggggcgtgcaaagggcacaatccttcctaggtggaagaggctgatatcaacaaggagtggcgccttgcgcccactttcgaggacatgctcgagccgcggctcaacagtccggtccttgaggtggcacaagccaaagcccacagcgcagcagctgttcatcccaagatacaccgtgttgccaaggatggaagggaacctgtcgatagagagcgagacgcacgccacatcgccgacgaacaccgcccggtcgtcggcgatgccgtccacgcgtaccagcttcttcctgacgatgtccacctcgaacacctgcagtattcgccaattgtaccggcatggatttttgctgggcagctngatcaagtcgttcttctttct

SEQ ID NO: 51387 - DNA, 476 bp, Oryza sativa
  unsure (1)..(476): unsure at all n locations
agctnggaggtctcccgacgtggctgatccccactgtctatgtgacccgggttagtaatgtcgtgtgggtaaagtgtaccccctctgcagaggttaacaaactgttcgaacagccgtgtccacggtcatgggcggatgtgaggtgattcctagcgtagtttggtttgactactgcttgtgaaattgctgtgtgaaaaggggttcgtgcgttgaaaaatctgcagctgatgggatcagctgggcccgggtggccgtttgaaaagttgttggcccgggtggccgttgaaaaagctgttggccgggtgccaaccttgtttaaattctaaagactgatacattgcacatactccgaccggacgagatgcactgtctcatccgtgtcgtntgagaagcactcacttattcgtttcagaaaatagttcatataaaatatattgcacaacatcagccttttcttgaacccgcattaacactta

SEQ ID NO: 51388 - DNA, 464 bp, Oryza sativa
  unsure (1)..(464): unsure at all n locations
agctngatcagttggcagtctcaanaacaaaaaggtagtggctttctcaaaaacaaaaggtactgctggctgaactgcttggaggagaacctaaccaaactgtgatgaagattgataataagtctgcaatcaatctctgcaagaacccggtactgcacgatcagagcaaacacattgacacccgatatcattttagtagggagtgtgtggagaagaaacaaattgctgtggagtatgtacgttctgaggatcaacttgcagacatgttgactaaacctgttggacgagtttgctttctggagcttcggaagaagatgggtttggagtagacacatcaagaatggggggtggngaagagttgattggataatctttgtgcaaggaattatcttngtgagtgcgtgtttcattattagtgcctatttgaacacatcgtacttggattctttgtgctgtttcattat

SEQ ID NO: 51389 - DNA, 478 bp, Oryza sativa
  unsure (1)..(478): unsure at all n locations
agcttcaggagatnttgaatgggtatatggacatcctgtctgataaagttttgcttgttttagatgacgtatgggacagcatggatgattacagatggaatattttgttggatccattgaaatcaaatcatccaaaaggtaatatgatccttgtgacaactagacttttgtctctcgcacagaggataggcacagtcaaaccaatcgagttaggtgctttgtcaaaagaggatttttggttgtattttaaaacatgtacatttggtgatgagaattacaaagcacatccaagtttgaacatcattgggcagaagatagctgacaagttaaagggcaatccattagcagcaaaagcaacagcgctgctattaagagaaaaacttactgttgatcattggagcaacattctgatgaacgaagaatggaaatccctgcatttcagtagaggcatcatgcctgctttgaagcttactatgat

SEQ ID NO: 51390 - DNA, 480 bp, Oryza sativa
  unsure (1)..(480): unsure at all n locations
agctngtgttntactgttccattatccatgcagaaatttatgcangaaaaaggtgagcaaggaataaagaaaggcaggcagtgtggctccctctgcttttgttggtgagccaacaagagacaaaaacatggccacactttggagagtntgggagggtggtctctcacggcataaagtcctaaaaaaggagggaataggaggtgatacggttgggtttgacaccggctgggcagccaagaagcagccactagtcctcccagacctggccaggagggtcttcatcaagaggttgaccctgccacttggatgatgacacaatcagttccaacatttcgttcatagttgattataaactaaaatgcttattagacatataaattaattataggtaaaactnttatatatgtgggttcttcacgatctanaagcaaacgcctgaaaaaattatgataacaaaatataaaaagacaactttaaata

SEQ ID NO: 51391 - DNA, 409 bp, Oryza sativa
  unsure (1)..(409): unsure at all n locations
agcttcagtatctgcgtatccgatcagaatgcagtctatgatgctctctcggnttcttgttgaattcttggtcctgtcctcctcatctccttcagaagttngatatgtacacagaatactattttccaagaattccagactggatagcctcgctttctaaggtcacattcctagatattaaggttaatcctgtggacgaggaggctcttaggattcttgggaacttgccttctctcattactctctggctgtggacaaaaacagtagtctccaagagaagatttatcatacataatgttggattcaaacatttgaaagaattctactttggtttttggaggattgagatggggccaataaaatttgagggtggggccatgcctaagcttcagaagtttctttttgacat

SEQ ID NO: 51392 - DNA, 480 bp, Oryza sativa
  unsure (1)..(480): unsure at all n locations
agcttttgtattgcaccaatatcagggagcaatgctgattatctctcgatcctgcttcaacattaagaaaaacaaatatatataaattgatgcttgctgaagataatgattagaggattgacaattaagacatcatgtgctgagatttcctctattagatcaaagcagaagtaattgcaaatatctgacatgtagctagcgtatgaattgagttatcaatgctcaatgatcaccaatgcaataccgacacacactgttcatgagatttgggtctagcagaagtgtatgaatataaccaacacatgtatagtagatattgcaggagagtagctgcaggctagatgaactntccattcatgcataatatagacaaaactgtagaanaatatctatagggatagaactgaaatgtaatacctgaaaaatgtctttgtggctaanactganatgaatcgagatgagaagtaagagcaagcatga

SEQ ID NO: 51393 - DNA, 406 bp, Oryza sativa
  unsure (1)..(406): unsure at all n locations
atctattaattaggaagaatatgttagtttccttttatctttaggatagtgtgtttgctgtccaataaggattttatgttttccttatatctttaggtaagtttctttcttgtccaataaggactaatatctacccatgggtataaatatgtacaccaggggtcattgtaaactatctctcgatncaataaaattcggcacatggccaccttttacctttctactntttcggcgagttcttgcttcgagttanggcatcagcttcgatcttatgataagaagtatgacttgtctcagcttgttgcgttagcatattanggcgtcgctatagatattctaatctatcttttacagcagttggtatatatnctagttaatctagcttagcattntaatttgatcatat

SEQ ID NO: 51394 - DNA, 109 bp, Oryza sativa
atgagctgctcttgctccgaagttatcttcatgtcatcatggggtacatcaacacctatacaaacaacttttcaaatacttggatgcaaagagattagatgcaacttca

SEQ ID NO: 51395 - DNA, 488 bp, Oryza sativa
  unsure (1)..(488): unsure at all n locations
agctntagaataatcaagacccattgcatcactattggtatgtaatctttctccacaacctccaactttttatgaggatcaagtaccaaagcaaaacaataaaggtgtggaatagcagtgaagtatttgagaaatttttcttccatgggttgaacaacataagctaaaactctgtcatgtcggttttcttgaaacacaaaggacaatttccaaatacattcaagcaccttacaaagaagtaggatagtaaattctagatagtaggactgtagttttataaaaaggctttagaaatatatgcagacgtgttgctatgtcccattctcccttagtaagaaacaaaatctcaccatcaccatcctcatcagtatcattacttctaaagtgcaatgaatcgatgaaaacagaaattattttctcataccctntcagttgatgtagcatgaggtatgttgtgttccacctatgtttcacatcaatgccaaaca

SEQ ID NO: 51396 - DNA, 477 bp, Oryza sativa
  unsure (1)..(477): unsure at all n locations
agctntcatgacaaggcatttcgaaagccgatacatgtttttcatatgccgacgagaggggtcccagaccaacaacaggttaggtcccagaccatactgtgccaggaagcccaggggtcctccccgacaccaccccggcgaatccacatgtctctcggcatcaaggctcccctgataagctagttactcagccaggggtgtcccattccacccatgtggttgtacttgtcttatgtttggatgaaattccaagggaatcggtccttaagtgcgagagcgggaaaccgtacacctggtacgttccccggtccgcggttttggaaattcatttagttcgcaagcaccgacccangtgtcgggttttccaagtcttttgtaaaactccagttctacccgagttgttactcagatattaagtgtgaatgcgacngtcgatactcgcacagagtgcacgaatatcgaggcgcaactgggtag

SEQ ID NO: 51397 - DNA, 484 bp, Oryza sativa
  unsure (1)..(484): unsure at all n locations
agcttaccaagatacgagcctagaacagaacctgatctattattnggaataccatgttcatccgtctctacaattacctttccttgcttcagttggtccaagttttttacattaaaatttcctagaacctgtcgtacctccccatttggccctacatttaggaacagttcagctatgggtgataggaaaaatcatatatttagacatatataggaagaaaatatgaaacttacagattatattaattggtcttttggctgcaagaggcaactccgtgattatgtcatcattctctgaaaggtcttgctcactatcttctgtgggttgtacattccctgcatcttgagcttcgagatgcaaattatcgtcattgaattgtgcatctgcttcatctagagcttcanagttgtacagcaaatnttcttcttcagcttgcacatgtcctgcgctctgtgcatctaggttcaacttccgtagacgtctt

SEQ ID NO: 51398 - DNA, 478 bp, Oryza sativa
  unsure (1)..(478): unsure at all n locations
agcttgaaagaaagcaagactaacacaacaccagcgccatatggattcccagcgggtttctataaaaatntgtggccgcggattaaaggattgatcaaagagatgttggatgaatttttttcaaggggttatctttggactggttaatatatggagtaatgactttagtacccaagtacaaggaagctaatgtcatcgaacagtatagaccaatatgtttgctgaatgtggtgtacaagattatcacaaaagtaattaccctaagactgacaaaagtggccaagaaagtgataagcaagttccaaaatgcctttataccagggagaaacatcttggatgggtgtgtagtgttacatgaggtgttgcatgagctgaaactttagaaagagaagggaatcatcttcaagatagatggtgagaaaatgtatgacanggcacaatggccctttctaatagaggtgctagagagggacaaatt

SEQ ID NO: 51399 - DNA, 485 bp, Oryza sativa
  unsure (1)..(485): unsure at all n locations
agcttntgctgctctgctccccaagtgaattgttgatctttctttaacctcaataagggtgtaaaaggttccaaccttccagacaaattagaaatgaaccttctaacaaaatttatcttgccgatcatctcttgtagctccgtcttattttctgggggcttaattttcttgatcgcattaacgctcctttggttcacctcaatccccctttcatgaacaagaaatcccaaaaactggccagccgacacaccaaaagcacattntgttggattcatcttcaagccatacttcctggttctctcgaaaactttccttaaatcggctatgtggtcctccacttctttagacttaacaaccacatcgtcaatatagacttcaaccaaccagccgattaaatcatgatatatatagttcatggccctttgataagttgctccagcactctntaagccgaaagtcatgacaacccattcaaataagccgat

SEQ ID NO: 51400 - DNA, 454 bp, Oryza sativa
  unsure (1)..(454): unsure at all n locations
agcttttgtcccaagctccaccaaaatcaagagcgctttctctcaacatatcttccaagattngattgacccgctcggtctggccatcactttgcgggtgataggccgcgctgaaatttaaacgggtccccaattcttcctgcagcttctgccagaattgtgaggtgaactgactccctcggtcagatacaatctttttgagtactccatgtaggcacatgattctcgaaaggtaaagctccgccaaccttttgcccgtatatgtggtatgtactggtatgaagtgagcaaccttagtgagtcgatccacgactactcagatcgaatcgtgacccgacgatgtccggggcagtcccgttataaagtccattccaatttctttccatttccattccgggatttgaaagagtggagtaacctgtgggtcttgggctctgcttcactcgtggcaaca

SEQ ID NO: 51401 - DNA, 357 bp, Oryza sativa
  unsure (1)..(357): unsure at all n locations
agcttctgcaaagccgtcacaacacattcttgttcttttctgtgtctgaactncgccacgagtgtgctgagttgctagttgtacggacatgtcaaccattatgcctctcaaattatatattgctatggtttgtgcggttctactattctagtgatctctttgcatctgccgttttcgttaataccactgaatatggcttgcaaaaccgaaccactcttactgcaggggtaccgtgaaaggaaaaccatggtatctacttaaattcaaataaagtttaaaaataatgtgaaattttgataaaatttacggttacctccttaaagtcaaattaatatgtaaaatactttgaaattttga

SEQ ID NO: 51402 - DNA, 469 bp, Oryza sativa
  unsure (1)..(469): unsure at all n locations
agctttatgtggtatataataacaattatgccttactagctgtttatgtntaataataaagatgatgggcacttctaatcttatctatattatctactccttccgtcccaaaataagcgcagccatgagttttcgtgtccaactttgaccgtccgtcttattttaaatttttttaaaaaaactaaaaaacataagttacgcataaagtactactaatgttntataatctgataacaataagaatactaattataaaagggaatcaaataagacagacgattaantatgaacatggaaacttatgtctgcacttattttgggacggagggagtagtcgtagtgtagtgctcacaaaataggacacacacacaacacatttcatgtagtacatctgcccaaatacctcatttatttactcctagnttggtggccttttcttcatctctcttgatcttggagagggtctata

SEQ ID NO: 51403 - DNA, 416 bp, Oryza sativa
  unsure (1)..(416): unsure at all n locations
tgcagctataaaaaataaatttatttcaacccaatatattatattatcaaaatatattcaatagtagatttaaagaaagtaatttgatattttagatggtattaattctttcctaatagaaagttgactaggagaaaaattagaccacttataattatagattggccaatgggccgtactggccgagcatgatccggcccgggcggagatcaatcgtgccggcacgacctgacctacacatcgggccgtgccccgccacaggctacaccaacagcctaggcacaataagactcaggccatgccggcccngcctgaagacacgatgacctattgtgcttgtccatagaataagtctatttttcctccctcatcactttgngtaagatcacatatggctagagtaagtatatttagca

SEQ ID NO: 51404 - DNA, 472 bp, Oryza sativa
  unsure (1)..(472): unsure at all n locations
ctgcaagctgatggacttanggaagaggattgttattcatctggtgagccttaagtgggtcagccatgaacccacttataggtcaaaataagcaggtctgcggcttattttggcctataagtgggtttcgcgggttagccacttacactcttaagcctcccgctattcataagtcataagtcataaccaaatttagaaaaaaaaaatgttgtgcgtgaccacgcttttatatttcttgctagatgtactcgcctncggaggactacgaaagcaagctctcgtttttccctggggtggcggacgccatctcccggtcgagcaatcgaagcgcgaaagaacagcaggcggcggtgcggcatgaggtgcggaaaatctctagggcaatccaaagagcagctgatgttcttagaggcgaattcagtaataggaacgaatctttatactctagcctttctgtggcttcataaaaact

SEQ ID NO: 51405 - DNA, 311 bp, Oryza sativa
  unsure (1)..(311): unsure at all n locations
agcttctacagaacagcattggctgggtttgatgagagttttntaactggctntaatttgctccttgaatggtcgtggctgcagcagggtgatccggcgaggaggcatagtgaacggagaaagacgatgtgagtagcagatgcttccaggaagtgacggagccaggataaaattatagtggaggctcctcagcattttaggcattccaacaatcttagataaagtctattttagcctcattgcaatagatatatggatttaaatnttagagggggtcttaataagagctctaatgatttattaggggtagg

SEQ ID NO: 51406 - DNA, 501 bp, Oryza sativa
  unsure (1)..(501): unsure at all n locations
cctgcggcatgcaagcttgacgctacccctacctggcgcgccaactgtcttaatctagatttcggcaataataaaagggggtggctatcaagctacgaaagtgtatgggtttggagacaaaggatttatacaggttcaggccttcttataaaagaagtaataccctactcctgtccggggatgaatccgccgagtgtgttattgattgtatgatttagagaaaatcaacatctgcccctagaggcgcccggaccccccttatatatgggaaggagtccgggttacaaaagataatcaatatccctaacggaatacacagatatagattaaatacagccgtgaccgactaagtctcaaggtgtttccttgttgtacaagttaagaaacccacccgagatacaaataagatattctatacatattcggtatcctatatccagcccaaatagtatcgccatgtagacatgggatatncataatctccacactgttattatgagg

SEQ ID NO: 51407 - DNA, 438 bp, Oryza sativa
  unsure (1)..(438): unsure at all n locations
agcttattttcagctttaattaactaaccacattattgttctgctgctaataacaacaaaggtgagtggtttatgattattcactttaatacaccaggtgaattccttctgccatgcaggcagggttggacagaaaacacgcgaaggaattaaaatgcctggaacgggaaaaatgaaacatgtcagtttgactctgcaggttgagaacgacctgaaacatcagcttagtattggcgcattaaaacctggcgcacgcctgattactaaaaatctggcggagcaattaggtatgagtattacacctgtgcgtgaagcattattacgtctggtttcggtgaatgcgctttctgtcgcacctgcacaagcatntacagttccggaagtggggaaacgtcaattagacgaaatcaatcggatccgctacgaactggaattaat

SEQ ID NO: 51408 - DNA, 373 bp, Oryza sativa
  unsure (1)..(373): unsure at all n locations
acaccattgtcatgcacggcacctgcactaatactaacccagcttctggcttctagctcattttttgcattctacaattacaacttctcagaatttaaattaaaagctgaactatttgggggaagtttctgattctgcgaaaagctaccgcagctagaaactcccccaaacagggcctaagtctgatacaccggcttggcagttggcacagtgccgtcaactgtcatcttgattcttgacaatgacgtggaacattgctccaatagtccaacgttccagggagaacatatggtaattccgcaatgagaatttcattaattctttaatcaaggactcancgtggtgcaaaggaacctgaatatattccncactt

SEQ ID NO: 51409 - DNA, 456 bp, Oryza sativa
  unsure (1)..(456): unsure at all n locations
agcttaagtcggcaattatgcctaccaaaagttgtagttttattttctccacagngtatntggctctaaatagagtttttttactgacaataaattntatgattcaactcatgcttttattcatttctgccccaatgctgagaacaattaataatcgcacccccatccccacctatcaacaactcattcgtactttccccatctccaccactccaccgagccaactgatcttctcttctcccactacaactatgccgcatagtcacccaaccgatgagaaacacgactcgtctacctcatcgatggtcgtggccagtgtcgtgcatccttccctttgcagctccttctcttcctcaacagccaattgcctttccccatccacacacgcaaacctgtgggtggcgcgaccggcgagctccgacatgcacaaatcanagccatctctccctctatgat

SEQ ID NO: 51410 - DNA, 463 bp, Oryza sativa
  unsure (1)..(463): unsure at all n locations
agcttcaatatcaatatctttgcacctcacacatggtttatttctngggacaattntggagcacgatgcctcgctagggagagagacactattctttaaggtttcgaacttcgcttcaagagagaggtaagctttatccaagccatccactctctcttgaagttgagcgtttgtcacctcaagattagcatgagactctntggtttgcttgtaaagccgtaccaaagcctcatttctctctctctccttagaaagttcactcttgagttcatgagaccactctctctcacgaatgagcaattcctcttgcctctcaagggttgcatattgattctcaattctcccaagcaactcactcaagtgtggtatggattcctttgctatggattngaacaactcgtcatccataacctcatcctcaacatctntctcctcatcactaataagatcaacattaaatgac

SEQ ID NO: 51411 - DNA, 429 bp, Oryza sativa
  unsure (1)..(429): unsure at all n locations
tcccatatggcaannatctctgcttgtgattcctgctacaacggcgaatcatcggatgccgcaacaacggcgatccacatcatctaatcggactccgcaacaacggcgaccctcatcgctagcccacgctcacgggattcgcggaagtccttaagcccgcaggataaagccattaagaaagaactactaagccagcctgtccaattccagatcatatggtcgacacgatcgctacggcgcttgaatgccatataacagttgttatttaaccttatgatgataaatatatacaactgaacccccaccaccatggcaagttcagaatacatctatagtatgactaactgcgtcaccagccaatccaatccatcagcatatgtatttcaactatagaatatatcatttaatgcanggtgatacatatagatt

SEQ ID NO: 51412 - DNA, 460 bp, Oryza sativa
  unsure (1)..(460): unsure at all n locations
tcttctttcaataatttcaacagatatatttatgttttaatatgatgggaaactgngtttatgcggaaggacacangcagccacgtctgcatgtttggtgtttgcaattggtgcatacatgcagatgtataatatttcctagcatggacactatatcgagtagcacactgtagagcctcttagaagggtctatcagacaaggaatgcagctactgcacaatatctgtgacagcatagccatctaatgatagtttgcagcttcagcatagaccagcaagaatgcatcagcactttggaaaataaaanaaaatgcaattcaagtttcttaggaattattcatggcataactttcagtcacatcctgtttcaaatntgttctccaaggcgtgagaggagcacaccaatagttcctccaattggcagctgtgtngaataccagaagtntttgttgtcatctcat

SEQ ID NO: 51413 - DNA, 449 bp, Oryza sativa
  unsure (1)..(449): unsure at all n locations
gcttatgttgatgatgtantcgtcaagaccaagcagtatgatattctgatgcggatttagaagaaacttttgaaagcattcgtgctttcaggatgaaactaaaccctgaaaagtgcatcttcggagtaccgtcagggaagctgctcggatctatggtatctcaaagaggcatacaggccaacccggagaaaatcaacgccatcctcaacatgaaacccgcgagttcccagaaagatgtccaaaagctgactggntgcatggcggcgctcanccggttcgtttcgcgactcggcgaacgggggatgccctttttcaagttgctgaagaaaactgcaatttccagtggggacccgaagcacaaaaagcctttcaagacttcaagaaacttctcactaccccaccagttttggcctcgccacgtccgcaagagccgctattattatatgtgt

SEQ ID NO: 51414 - DNA, 372 bp, Oryza sativa
  unsure (1)..(372): unsure at all n locations
gctctcnggatgctgatgggatagataaagagaanttggtgcaagcaatntcattacgacagtaacttataacctttgaaggaataataaaagagcaaagtgcattgctcaactttacagaagactccctccatttcgttatatcaagaaaataaattgggccagaaatcgaatctaatgcaagtgaaggcccggtgttatccctttgccgatggaactccagaatcataaatgcaggccaacaaatgccagttgcaaatttgtgtacacgtccatttttcgcacaaaattgcagattggttgacatttcaaatctgaatagcagtcaagaatccaactcgggggaaaaaacgatagcagtatatgatacat

SEQ ID NO: 51415 - DNA, 327 bp, Oryza sativa
gcttagcccactgatcgagccttgcattggagtaggaattttttgtcttgggagaagaactaactactagcaactaactgcactcgtgtgttggctggctttagctactggagtattagaacaaggtcaataatataatcaactactaactccaatttatctatagcccatctaatagttcattcataccatagtttcatactacactattaataattggtcccacctgtcatacacacactgtgtcttggagtccgtgctacagctggctacaaatctgtagcccgtacccttctctctcttatttatcacccttaaatatgttta

SEQ ID NO: 51416 - DNA, 373 bp, Oryza sativa
taagtcacctgcggcatgcaagctcggagctgcgcctgtatagccgaaaccccttctactttgtttgtggcacatggccacgcgggtgaagatgtacttgggctgcgaccggatgagcttgcaattgcacatgaggggctggatcgctgctccgcgatgctgccacgaatacatggccttgcccattgtgcaaagggtggccgcctgtgtaactgggtgggcaacaattgacgctgcgctgacctgtgtgtctgcttggagcagctgagctgtatgtcatcatgttctgcggttggtggctcggcaatgctggctgctacgaccattggcgtgcgtgacgacgttggacacatgctgcaagattcgctgttga

SEQ ID NO: 51417 - DNA, 458 bp, Oryza sativa
  unsure (1)..(458): unsure at all n locations
agcttatggtcacaactacntttgctatctcttagatttgttcatttacataattatttctacaattgatggatatcggttataatgtttgtgctactgttatcatggaggactatgataatcttctttggtatatctgtcattggagatcttgatatgtgtcagattgggaaggatccccgtctaaaactcagctaatatgaccaaaaatttcagctggctgtcctatagaaagtccttaaaaatatttaaacactagtgaatttaataaacttaatttgcaccagtgaatttgaataaaattaatttgatgttatagatgttgtcacattttttctataaatgtgatcaaactctaaaaaaaattaacttatgatatcctaaaatgtctcgcgatatgtatttgagctaatacatatgacaaggaagaatataagcatacagctctacgagaataa

SEQ ID NO: 51418 - DNA, 321 bp, Oryza sativa
  unsure (1)..(321): unsure at all n locations
ttgagtcacctgcagctgcagcttctacagaacagcattgctggggggatgagatattcttctggctttattngctccttgaaggtcgtggctgcacanggtgatccggcgaggacgcataatgaacggagaaagacgatgtgagtagcagatgcttccatgaagtgacggagccaggataaaattatagtggaggctcctcaacattgtaggcattccaacaatcttagataaagtctattttagcctcattgcaatagatatatnggatttaaatttagagggggtcttaataagagctctaatgatttattacgggta

SEQ ID NO: 51419 - DNA, 449 bp, Oryza sativa
  unsure (1)..(449): unsure at all n locations
agcttgcatgttgtcctgtgcatgttaggtggtgtttttatcttctgaagatgaagatgaagattaagtgttttacgctaaacgagatggtaataatgtgtgattaattaagttttaattattacaaacttgaanaatggattaatataatattttagaataactttcatatagaatcacacgaaacacaccatttagcagtttgaaaagtgtaccacttcaatccaaaatttaatccacccttttgaggacattcaaacggggccttagtagtacaagctcgtatgatgcggctatgtacatactcgaagctcgagaaaaagctcgaagcttgaatgagctgagcatgagcctgactaanaactcgagacttgacgaggctcngctcgagctcgactcgagtctataccgagctcgagctcagacaagcaatctcgctcaagctcagc

SEQ ID NO: 51420 - DNA, 492 bp, Oryza sativa
  unsure (1)..(492): unsure at all n locations
agtcacctgcggcatgcaagcttactgatgggtgttcttggattgggntctgcangatanntatcttcnaatagtctcagnggcgaactcccagattcgatggcgaagctgaactcgctttcgacactgtgagtattatcctccttaattgtgtgcagtaatgttctttgtttatctctgaatttgcaatgtgtccgcaactcgtaagcatgttcagaacaatcagctcactggcacacttgatgttctaggagatcttcccctgaaagacttgtaatcactacatcaattcacacatgctctgtccaggaaaaaaaatcacacatatntaccttgatgcatttctcacctgatcctctcatgatttactaatatntgcagggatatagagaacaatcttttctcaggaccaatcccagagaaactgatcaacatcccaaaatttctgtaaatctctcagccttcctcaagaacagtagaagttaatctagt

SEQ ID NO: 51421 - DNA, 501 bp, Oryza sativa
  unsure (1)..(501): unsure at all n locations
agtcacctgcggcatgcaagctnggcagagcggacaaggaagtgggaggatgtagattattgttgatcgccnggaaggcaagtccccggcggttccttccggccgtcggcgaagtgaggccaggcagaaggcccccgccgaggacatcgatgatggcgatgatgacctgngtttccaagagcctgnggccaccattgccaccgtcgatggaggagcgtgtgctcacgtttctcgccggagcctcaaggctatgaagcgagagcttctggccgcggcccctactcatgaggcgacgcgccgggcgcggtggtcggaagttgccctcacttttgaccagaccgaccacccgccgtgcgttgccaggggagggcagattgcgatggtggtttctcccaccgtttgcaacgtgaagttggggcgtgtcctcattgatggaggagcagccctcaacatcctttcccccgcacnctttgatgccatcaaggccccggtgatgatgct

SEQ ID NO: 51422 - DNA, 501 bp, Oryza sativa
  unsure (1)..(501): unsure at all n locations
acctcagagtcacctgcggcatgcaagcttaacaccacttggcagagacatgctctattgttttatgttcatatccatatgagaggccatgatgcgaattaaggattagttacaatcgggtggcagcagattacaatccacatgattcactggtaggttggtggaacaaaagtgcaaggcaacataacaacacacaaatcaaaggggatgagatcggaaaatgcttacggtcgaacgtccgatccagcgaanaagatcggactggacacaccgtatagcccttaacccaaatttctagccagcatgcatattgtttctttntaacacccaacacatntttctctntcttcagtcagctgacatanctactcgacctttttcatgttcatgcatantagcttttaacaagcttcaaatattcttttccaaataaccatatattaaaattctgattcgattacactggtatatntattggtagtaaatctttataacaagata

SEQ ID NO: 51423 - DNA, 418 bp, Oryza sativa
  unsure (1)..(418): unsure at all n locations
agcttgngcgaggaaagaaggaagatgatggatttgtctattattatgtcttgaacaaaaagaggaacatgaatgagaaggagaagagaagcattgcatgcagtggttaatccaagaaatcataaaagcttttgatgaatcagaaaatgaagatgagggcaaaggtaagcaaattgttgatctagcttttattgttcgtaaagcaagttctgatgttgatgaatctatgatgataatgaagaacagcttagttatgatcaattagaatatgctgcttacaaatntgctaagaaacttcaaacatgttctattgagcttgatgagaaggatcatactattgagaatcttaatgctgaaattgctagattagaatctctgattcctaatgatgataattgtcaatcttgtgaaagtttat

SEQ ID NO: 51424 - DNA, 52 bp, Oryza sativa
tacataaaaaaaaagagcaacaccattgactccctctttaactccctccgtt

SEQ ID NO: 51425 - DNA, 474 bp, Oryza sativa
  unsure (1)..(474): unsure at all n locations
cacccctaatttggatcaggtgcaaatgctacatattaactggtagatgttccaaaggagaagtgcctgctgtgtctcaactctccactgccaaatactggcaatattaaagctatggctacctaactgcaaagttcatttccatttcacccctttcttctttntggtactggttgaaaagttgtgacagccacccgctatctgaaactgcaagttctttctctgaacaaagctctagagctcactgataactagtgatcgagatctcagagaaaacatatcagggtagcaactganaatctgctagcttattgctcaggattcagatttcctcaagatacattgcgatgaaatgcaatacagcaatcatatgtttccgtatattttccagaggaaagcaccatatgtatacatcaatctctttatgtagatcaaaaggaatngtgtgaaaaagcaacgtgatgctgatgtaaa

SEQ ID NO: 51426 - DNA, 326 bp, Oryza sativa
  unsure (1)..(326): unsure at all n locations
gacccaagcaccgcagctgcagcttctagttgacgctgaaatgaagatgananangatgtgagtatgtcttcgtgtgttnnnncactcacttttgcctgctaataatcacaaactctttacctccttctttatcaatcaaaaggggtagttctcccgccatctattcgaaagaagatgaaatataatgtatactacccatatatttggggtagtggcagattgaaaattgcataatgtcaaaattttcacttccatgctcagttagaagcttggggccctagggaagctcgtggccctaggggcattcttggattttccaagaatc

SEQ ID NO: 51427 - DNA, 437 bp, Oryza sativa
  unsure (1)..(437): unsure at all n locations
tttaccgtgaagcaaatggcgatcgatctgcaggttggtgcgttgcgttgcacctaatcagattagcccacgccaaatagtaatacgtggtacggttgatgaggatggcctctaattaatagtgtgtgttgacctcttgactatattatgtatcgttggaacttgggaaccgctgatgtgatctgtttttgcagtacaggcaccggctttggtgacctaatatttgtggtcgacgattcttaattatgtatggtagtacatacagatatctgcattaatactctttattagtactgtatcacaaaatttttagattatattcagcacattcaagtaccagcgaatatcanatatagttagaacaagganatttggaaaaggagaacgataatctatcttcaccttgtgtatagcagaattattcttttttggggggt

SEQ ID NO: 51428 - DNA, 397 bp, Oryza sativa
  unsure (1)..(397): unsure at all n locations
gctgagccgggccgggcactgtattctttcggcangaccaaagctagccgctgtggaagagccagcacagggggtcccgggcttcgacggcacccggagctcaactgcaagagttctcccaggagtataccgacgcaggtggcaagttcatgagcgatccccgcgcttggccctggagagccttggggaagaaattcgccttgacccgatcgtcaccccacgccgnctctatgatcgtcgcgtggatctgganggactcggangggttacactaccgtggtaccttcggtgaggctgggccgaaactntgggggtcatcggtcattccgaagactcgccataaagacctagccgctagccttatccgatgaagatgcngngggcctagccccctacc

SEQ ID NO: 51429 - DNA, 466 bp, Oryza sativa
agcttcacaatcaagcggaagggcgaccacacattcttatttcatttcaaggactagagaggactatgggatgctaatacttggtgaaaaatgactgcttcacatatactacgcgtccccatcttaatgaaatttggtcgccgttcctttcgggcgacccggcagaaaacatatactacgcgactagtggagtacttgcaaacgaaacgggcgaccgtacaaaactttgccgtattggtgagagtatccggtgaagttactagtactccatcaaattgcctagactatgtcagcagggaatcgagaattcgagatctgtaaataactctctctctgcttaaaacatcagcaaagtctggctcggtttcaaatatgataaaaatcgagatctggagaacgcggctcgaacttgccgtgttagatggtaccgagagagggaagagcaactacgggttttagttacctc

SEQ ID NO: 51430 - DNA, 454 bp, Oryza sativa
  unsure (1)..(454): unsure at all n locations
agcttgggctggacagaatgncaactgtgctgtcatgagttatagtggatacgatattgaagatgcaattgtaatgaacaaatcatcccttgaccgaggttttggtcgttgcattgcaatgaaaaagtaatgttatactccaaataataatgttcttttactttcattgaggtgcttgagggaacatgcctgtagtattgctgtattcatttatgtagttcgtattggttatcatctcgcaggtacactgtgacaaaggagaagtatgaaggtggttattcagacaggatcgttaagccccagagggataaagatggtgctctgttaaaacagaacatgcgggtataaatattatttattctagtcactgttctgagattntcttatgcctagttttccatagtaagaaggtagaagtccatacgaaataacccatccatccatttagatttgt

SEQ ID NO: 51431 - DNA, 473 bp, Oryza sativa
  unsure (1)..(473): unsure at all n locations
agcttgaaaggatacatgagatgaatcatgaatatgcatgatatcaaaagagttgtcacagtagacgtgagtcctctcatgcaacattgtataaaatggttcattgggacttgttctcgaatgttcaatggaatcaaatacatgaactgcggtaaagaaagaatgagccagagtttttttttttggaagtacagtttgcaacaaaactcaatggcctctgcatatggcttttaccaattggttatctgtacgggtttggtgtttccattcagaaggaagtaaaccacaagataaattctaacaagtctagaagagaatccaaaataaagggaataacagcaagtgagcatatgaatnttgaaaanaaatgcatctgaaaaacgtattccaggtgtacatgtgtaaatgaacaatgtanatatggaagcaagcatgcatcttttgtttgagtcgtctagtaactacaatgaaca

SEQ ID NO: 51432 - DNA, 478 bp, Oryza sativa
agcttcatcaccttccttgctcacacgttcttgctgctgtctgtgattgtggcatatcttccaatgtgtacgtctcaaattatttcaggaaagaagcaatctttcatacatggagtgaggagatatatgggttctggatctcaggatcttacacaacgctgagtgcccaagttttttatattccagatccatctaagttaagggtgaaaaagggtcgacgccaaactagactcatcataaatgatatggatgagtcagaagcatgtgggaggactttacgctgcagcaagtgtaatctgcgcggccatacttacaagaaatgcccgaagaatgcagaagttccaagcggcgcagatgctactccatctggacaggcaagtgatggtaggcgaccacatggtgaaggaacaacaagcaggcgcgcaaggccaatgcgtcgtcgcgcagcaggcgattccatggtgtaacaatactatcg

SEQ ID NO: 51433 - DNA, 473 bp, Oryza sativa
  unsure (1)..(473): unsure at all n locations
agcttcctccagtaattcaaaatgtattggtcctatgttttattatgaccaacagtcaatggttggctgatcatgctcatactcatactagcagaccagctgctgttgcggagtaaaaatttatcctttctgacaaaagcctggactgctgtatatttatgctttgataggttattagagttaagtgcagagagtgtcatggagtgtgaaaagaagcaatcagttttattttacgaatgatacattaggtagtagctaattccaacactagtacatagacggatagaccgtgtttagttcccaactttttcttcgaacttccaacttttccatcacatcaaaactttcctacacacataaatntctaactttntcgtcatatcgtttcaatttcaatcaaacttccaattttagcgtaaactaaacacacctatagaacattcaaggactgcaactactaaatggacaacact

SEQ ID NO: 51434 - DNA, 468 bp, Oryza sativa
  unsure (1)..(468): unsure at all n locations
agcttgttgatgctacatatttgcatgtagatcattatttaaatntcctttctggattgcaggtcagcagggttccatatctccatttgcgttctcttcctacttggcattctcgaacttcctcctggtctctatgcttgaaagttcctcagcctatccttgctgcagatcggattgcaaagccttctgataaccatgaacttaagtacaaatccaggtcacagttcaatactaaggtgatcgtgaaagatagccaaattagtctaatgggtgaaggctccccaagcattgctggatcattgactgggaagccctccgatggatatttggtaaatagctacaattgtgacttggaggaacctccaacaatgcttctgcagcanggtaacttctgatgatactatntaaattatttcttggtagaatcatgttatgaaaatanntaagtattaccatnggaaattcata

SEQ ID NO: 51435 - DNA, 370 bp, Oryza sativa
agcttggagccatgcctttccaagatcttgatcacatcatggttctggtaatgcaatgcgtctgccaaaggctgccagatggtagacaaatgatacaacactcgcatattaaaatagcaacctagaaataaacatatatattagaagtattatctcgaatccatctccctcggtgactaagaccatgttcgcgtcaatcaatcattgtacttactgactaaaacttgcatctaataccattccatgggagttcccaattcaactcagattatccccgagtaatcatgaggtttttcagctagagcaataaaatcaccaatagcagcaaaacaaaacaaagttcagggaggctcaccgtgctgccccactg

SEQ ID NO: 51436 - DNA, 422 bp, Oryza sativa
  unsure (1)..(422): unsure at all n locations
caatctagatagntagcataatcatattctggaaattggtagtagctgcattcatcttttcatgtagcccaaaccataattgattaaatatgcatctttttacagtagttttcatacataacctgtaggctccacgaattttggttgaaatttttttgagtcattgcatcatggcatanaaattcatataatactgtatagttctgtccggaaatctgtaggttgtcagtttcacaaatttgtgtagcctaaactacaaatgataaagtcatgattccttcagggtagctcctaatctaacccatctatctctctgatntttgcaaaattttggatcttagagctaacctaaaaattgataagacagtaagtgatgaatccacacctagcctcatgtcagataaccctatccttgaagatat

SEQ ID NO: 51437 - DNA, 258 bp, Oryza sativa
  unsure (1)..(258): unsure at all n locations
gggaganaccacaccacctttgctgggccctccctctttgacttactatcttcaccttcactctttgctcgtttgtatcttgatgccccacagatagggcagacatccaaggcagcgtattccttgtaaacataatgcagccgttccgacatgcatgaattcttctgacctccaggcccaacggacataatacatgcttcgcttcatatgtcgtctgaaggaaatttgtcccctcttgcgacagagtcttaacagctc

SEQ ID NO: 51438 - DNA, 318 bp, Oryza sativa
  unsure (1)..(318): unsure at all n locations
gcttcgctatcacttactccctcgntccaaaatataagcatttctcttcatggtaataatcagaaatgcttatattttggaacagatggaatagatagttggtttgctcacaaagttgaactttgctcaaactattgtgtaaacaatggagctttatacatacctttttgcagagatattggataggatgaaacataactctggtagtttccttaaaaaacaaacgttaaaacatagctttggtagttcatgtgaacacgcagcctatcacaaataaaaaaattcgacagaacataataacacttaatttgggtatat

SEQ ID NO: 51439 - DNA, 470 bp, Oryza sativa
  unsure (1)..(470): unsure at all n locations
ttctttgtggatttgcagccggaacatttttcttagctgcttgtcacccacttgatgttgtaaagaaaagatttcangttaatgccatttgttttgcttgaaaaaggcttattatgacagttctcagacatgaatcatgttaaatttttgtgaagaatactcttgattgagttgcattatgataattgaagattcattacatttacaatttacaagtntgtaaaatcacatccaacaggaaatctgatactgggttgcaatgagatatagttagtgtggtgtagtaaggtgtcagcagctgcagtgtatgatctccacaggtctggagtatcatacatcatgcttgaccaggtcaactaagagtaccattctggtaactatgcaccagaataggtcattggtctggtagctatgaatcacctnctttccattgtcctgaagcttcatacatttgggctgcttcacctact

SEQ ID NO: 51440 - DNA, 441 bp, Oryza sativa
  unsure (1)..(441): unsure at all n locations
caaatgcttnttttaggtgttaaaagagagaatgatggctatggtctagacgcggagtactctattatgcaatccactccttaaaatataatataaaaaagcacgtaccaattntacgcgggaaaatttattactatctgttatctaatcatcatactctatattaaaaatgtaacctattcaaataataacggtggatttagattgtaaccgtcgagatatcgactgatatagttatatacaaaatatggactacgtatatttcgaaacaaaagctattattgtatattcaatcaattcatacatttaaaaccttgtgtcccgctcaaaattgcgcgggaaaatccatacgttagcaaaacatcgtacatatactatgtgtttgtgcgtaagaaaaaaaaacgctcaccacctcacggagttagtcgaaagatccctgat

SEQ ID NO: 51441 - DNA, 467 bp, Oryza sativa
  unsure (1)..(467): unsure at all n locations
agctntagcacccatttcaggacagtattcctctgatctatttgatatntgtgatcgngtttttcatatgaagctaagaatctttatggatgacatagtaaaaaaccagttttttggtccaatatctggaggtaatttccatagctccttaattttgcgcactatgttctattacataatgtatttcccgttgatatttcccatctacatccaaatttttcggctattttttttggcctgattttccccttcgatacttctcaattagttttccattccctttnttgtagttgtctacacaattgagttccaaaaacgtggattgccccatgtccatataatcgtgtggctcaaaagggacggacctctngatgctgattggatagatgcttttgtatctgcatagctaccagatccatctnngtgatcgtgtggtatgaagccgttcanggtcatgtacatggcct

SEQ ID NO: 51442 - DNA, 472 bp, Oryza sativa
  unsure (1)..(472): unsure at all n locations
taagcaccgcggctgcagcttcggtttgtttttaatctgcgcacttattattcatttgatgcaatctggngatagcaatgttggcaaatcattggaggagttaagtaagttcgatcgttatattttcgcaagtctgcatttcaatcttgtagatttgtttttctgtgccacctttattatcagattagtgaatatatctatgaattgatgtatataaatgtatggacataagatgtgtttgtcattaaagatcatcgtaactttggtggcaggggaaggattattctagttgtgaagcaaagggtgatcagcaaaagtaggcagagccggngaaatggaatgttttgttcgctcctcttgcgcaaagatctgggagtaatttttgttagtttgagcagtagtaagaatacatgaaggtccacatgcacttctgtatccaaataatgtgcttcatgttcttntatgtcatttt

SEQ ID NO: 51443 - DNA, 471 bp, Oryza sativa
  unsure (1)..(471): unsure at all n locations
agctttagaagctcataacctttctgccaatgcttcttcttatggtgaaaactgaccaagttctttgattattatgacaagcgaaatgcagctgttgtttttcgtaacttactagttgatctgtaattggcatgatcttctgctcttgtacaaatttgtccatccaaaacacagaaatcttgatattttaaatattcgccaataagtatattgagcagtggctaatccttgattttttttgtgaattgattaagttgccccaagtccaagaaataaatcacaaaacctggcattttgcgttactgggttcccaaaactctagctaggggttntggtgaaattactcatgttgtaattatgcttgccgtggcccatgtagaccatactcgttgtggtctgtgtggcgatcaaccgttcatagatcaccanacaccgatttcaagaatggtatctcgtgtgttctttacatat

SEQ ID NO: 51444 - DNA, 482 bp, Oryza sativa
  unsure (1)..(482): unsure at all n locations
agcttctcctcgtgcttcacgtcgtcaagcggtcatgtctttaatgaggtatttgaatcatacacttgagtttggaatttggtattctacttcatcttctatatgcttaagtggatattccgatgctgatttcggtggttgtagaattgatagaaaaagtactagtggaacatgtcattntcttggtacgtcattgattgcatggtcttctaggaaacaatctagtgttgctcaatcaactgctgaatctgaatatgttgctgctgctagttgttgttcacagattctttgacttttatctactttgaaagattatggtcttacttacctctcttttatgataatactagtgctattaacattgctaagaatcctgttcaacactcacacacaaagcacattgatatttgttttcactctntgagggatcatgttgaacagggagatgttgaattgtagtttttggacaccaagttgcaaat

SEQ ID NO: 51445 - DNA, 477 bp, Oryza sativa
  unsure (1)..(477): unsure at all n locations
agcttacaccaaggatatcagnntttcatcttcactgttatctacccatgtaaaatgactactcagttggtcttcatagaatcttgttttgatgcttcatttggtatcgtcttgtaactgcagaatatctcactaggactaaccattcaaactgacaactttttgcagatccctgaaacaagaaacaacacctataacttcagataagacatcatagttcttatgatctaaaatatgtagacttttttttctgaaagatatgcaaggaagtttgcgtaatatattaatttcctatgagctaaagcatccacactgaactttatcatagcagccagttttaccttcatatccaagtaccacaaaagttatcctctttcttcaaatntatcctagcgtgtggtgataacctctcaaccttctcaagcttctggtttgcttgagagagtatgtcatccgcattacttgttgagacataat

SEQ ID NO: 51446 - DNA, 424 bp, Oryza sativa
  unsure (1)..(424): unsure at all n locations
agnctctggccaaatcaagagactcactatctgtctcttatctctcttcagcgacaccatactcaatccgccatcctaaccagtaaccagtaaccaccgccaccatcgcggcttgtggcggaagctggctttgttcaccgactccctccggtcctacgggcgagcggcgtttactgctgccgctcacgaggcgagacggcaggactgcagcagccgcaatcctagcgacacgccgcgccgccgtggtgaccaagggcactaggcatcacggctcggtccanatctccagacaatagggtgcgaccccatcatagaaattgaggtccataatatagagtgggccataatgtacgccttgacataagagaccgacaagataacgaatacgctcactttgtgaccctcagaactgatcacatattaa

SEQ ID NO: 51447 - DNA, 322 bp, Oryza sativa
  unsure (1)..(322): unsure at all n locations
aacttggcctgctgacaagtagtacactgagcaacatattgctgcacattctttgcaaccctgtccatgcaaacagatatttgattctctgataggtaactggaacaccagaatgcccaccaaccccactgttgtgtaatgcaagcaaaactgccctgtgcgcttcttatgatgcccaagccatattcttccttngtatcgaattaccccattaaccaactggaagtggtcacatcctttacgctgaangggcagaattatcaagagctggttagtttttggatcatgctcattgacggagcgtggggctcctcaccgggag

SEQ ID NO: 51448 - DNA, 412 bp, Oryza sativa
gtacaagtgctttgtttaccatcaatacttaattggcgacacactgggtggtatgggatgacaagtagtttaatccataggtgcccattggccaactctatttcacctacaaattaagaaataaagaaaaagtgtgtttttagtaaaactagcggactaatgggtacccatatgtataatggattactcccatctaatcaaggattcggggtgtactcgaatagcaataacattttcatacatgttaatgttctcactagattatgtacaataaatgtgcaaagatattaactatacacaacctttgattcataccatcttttgaatgaaattgtctgttgacacccaatggttaaactgaaatgattgtaacttagtgttacagggctgctcatgcattgacaacactctt

SEQ ID NO: 51449 - DNA, 401 bp, Oryza sativa
  unsure (1)..(401): unsure at all n locations
agcttacacacaaagttataatgtaagagaaaaggattattgtattctggattagatgtaagtgaataaaataaattcctcgccctccgctgctggctgccgcgggtcgccaggaccacctgtccctcacgatgcctccacccccgtcgctgcagtcgtcaccggcagaaagaagagcctggtgtcaacgtccctcccggctcttgnttttgctgttgctggatgctggtatgttcctctcgctgacttggtatggatttggttctgctccacgatgacctggaaatgtgcagtgcatatttatcttgattgtttctaaaagccaattttttcagcattggtgttcattaatggtggcgatgtgcaacatatcgattggggttgctcatattcctaatgct

SEQ ID NO: 51450 - DNA, 448 bp, Oryza sativa
  unsure (1)..(448): unsure at all n locations
cacacacggaagagtgcgagagctcagaatattctttctgagccccctacctggcgcgccagatgacggagcgcgaggctcctcaccgggagaccgcgcacgcccccctttgccggttcggccgggggctcggggtgaaatcccaaactctctctctgtatgtggaaagatcgcgacctatcgaacgagcaagagacacaggcgatgtatacaggttcgggccgctcggaagcgtaataccctactcctgtgttttggtggatntgtgtatgagccagctacaaagtatgaagcagcccctccaaaagaaagtcccaaagtctccaatctccaaaagtccccctcccttcgtctgggatcatgatccaggcccctctctaagtgggcanggtccttcttttatatctcaaggggataccacatgcacccctctctttcaaactggact

SEQ ID NO: 51451 - DNA, 446 bp, Oryza sativa
  unsure (1)..(446): unsure at all n locations
agcttgntaaagtacctataggaatgtcttgttatatgcttcacatgagaatgacatagaacttgaaggtcatttgaaatgccgagtcttaatgtttgctcattttgatttaaatcaatttttaagtacatttatgcttgtgcatgtttcatgttgtgttggacaaaatctatcgttctgttatacctatcattctgagccttggcattgtcaccgtgccaccttaactattctgttatgttgatctgtcttattgaagtacaaaaatgattttcctagctccatttctggtaccactaaaataactgtattttttctaatatatcatctgaattgccccctgttgtcatgataacaggggcatgtgagggctctcttgcatgttcgacatgccatgtgatngtaacggtatgatgttattcttaaacgttcaattggattggatg

SEQ ID NO: 51452 - DNA, 352 bp, Oryza sativa
  unsure (1)..(352): unsure at all n locations
atacatgcccgactaagatataataaaatgatccaattttactaacatcagcaagatcacggtatgtgaatcttatcatgaagctcacggacactaagataaacgttgtgcaattactaagaaaaaacctgataatatgacccattcatgaacaatgactacatggaggacggncggacatcattacctagtaggctaaatggacaatcctacttttgagtcatggcatcgacatactatatctgaatcaataatcctattgagtatttgactaatctgtattcgcatcgcgaatactactaaatcaaaatcacatacttatcacttctatgtacgcccctgaatatctaat

SEQ ID NO: 51453 - DNA, 480 bp, Oryza sativa
  unsure (1)..(480): unsure at all n locations
agcttcggcgcactctatatnttgcgggacaagatagttatagtcttagccatggatatcgctgcaagactatcagcgattcctcaagaaatcgctgatatagaaaacactaagctcgaactagagcaaatgctgggtgtcctcggggagcctttatttctggctttcgtcgatccagcagtgatcatacaagatgatatagttcttgttcagaaccaaatccgcattcttgaaaacaggaagaaggcgctgctggaagaacagcaatcgctcatcgtgatggctgcccaccacggggactaacatagaaaaaggtagttactcgtctatctcaacgtaaatgaacgaagtcacttaaggcttcctactactactgctccttcttacttattttcgtttttcaggatctaaagaagaagaggttntcttagcgggcgtgaatcccgtagcttctacttctgttctgttgtctcacttatg

SEQ ID NO: 51454 - DNA, 418 bp, Oryza sativa
  unsure (1)..(418): unsure at all n locations
tgcttcgcagaaccctcatcgacggcggcagtgtacttatatnttctcttcgccaagaccttggatgatatgcagattcctcgctccgagctaaaaccaagcaatgcgccttttcacggagtgattccaggattatccgcaactccactcggccagatcaccctcccggtcactttcggcactcgggaaaactttcgcacagagaatatcagcttcgaagtcgctgatttcgagacagcctaccatgccatactcggacgcccggcgttagccaagttcatggtcgtcccgcactacacttacatgatgatgaagatgcctggtccccgaggagtgctatcgctacggagtgacgtcaagcaagccgtcacatgcgacaaggagagtngcgacatggctcatacccgcgagatggcgt

SEQ ID NO: 51455 - DNA, 416 bp, Oryza sativa
  unsure (1)..(416): unsure at all n locations
acagcagtgaaatttattcctgcctgtagcanagttaggattaatattatatgttacaaaggaccataatggcacgatttaaaatgtgagttcaattgcagatcccaagacatgtattcaatattcttttcttaatatgagcacatgaagcttcatcatgatattactgacaggttgttcatctgacaaagagatacatatccttaattccctatacctgggcatctttcacaaggtcatcgagatttctcgcaaccgtgcgcattctaattntactccagtgagtgtctcttatacctggattatgaacaacctgtgtcacaatctttacttgattcatgtgttagcaacaatacaactcttctacgagaaaaaacagacgcaacattttatgaataaccatcctaaaaatgtac

SEQ ID NO: 51456 - DNA, 404 bp, Oryza sativa
  unsure (1)..(404): unsure at all n locations
cttttgtagatctctccttaccactggactggagtcgtcaggtcacagcccaacagcttgttacaggcatatgctgagctacatgttctgaaatgacctctgcaaacgggtgaacctcgcagctgcactgcagtgcactcaactgcatctgaattctcttgcaaccactcaaattcagagtaaagaaaattctcatctgcagtgactgctctgactctatatgtgagattagtaattntgcaggccatgccgacatacacattggttgcttatctgatacctgtagaagctaagcagaacatgttcttgctgatgagttgcaggtgaagaggatcttatcctgtcaaatttgctgctggctcttatagaattggatggccatgatatcatcagctaatctttat

SEQ ID NO: 51457 - DNA, 441 bp, Oryza sativa
  unsure (1)..(441): unsure at all n locations
agctntgctgcttatntcactaatttctttctatcttcaaccttganattagcaatcaactggtgctaatcaatttctgatgtattattcaattgaactacatgaatactttgctgcttaaccttttttntctttctcttctttgagcaatatacaccttttttattctttctcttcttggagcaatatacatttcaggattaataaaaagaacaaacatagtaactaggtagagagagcaagcacaagcatatgcacatgcaattgcagtgcagcatcacccgtgaccatctcttgatgcaaatgcagacaaaggatcccagaaatattcntgttgtgtgagaaaacttccaatggtgttgggacttgtgagatgggcaccaaccacgcacataggaacaaaatgtgcccactccttagctgcaccttgtacgtactcat

SEQ ID NO: 51458 - DNA, 358 bp, Oryza sativa
  unsure (1)..(358): unsure at all n locations
agcttattgcctaattgaagcccacagaatctattatgtgngttctgtcgtatcncaccgagcttgttctttcttccatcccatctttcacatgaatacaatttcgatcgttacaaatgatgattaactgcctacataagattggccaacgattcagattcctaaaccaaatccaagctaagcttctgcaagggagattgctcatatggagattcaatgtcgcttacactcatcgtccgatcccaaagaggataactgacacggcggaggggagggactgaaaaggatagctcaccttgcccctcctggggagcctcttctcgtccctgttggtggagagctccgacagcctaccctc

SEQ ID NO: 51459 - DNA, 411 bp, Oryza sativa
  unsure (1)..(411): unsure at all n locations
tcccttntgattatgttatgtttcacggagcatggatgttgattcaagagtgctatagatgtgcatggtatgatcaagttcctaatttcttctaaacaacaaaaaatgtctggttcaaatcaaaaggtaaaacaaaatcacgatttccttgcccctgacaanctgttcaaaatcacgatttccagcagtactgacaaccatgaaatcctaatctacatcatgctcatctccaagcatcccaataattcaatagattnttaaatgcaatgttcccctagaaaacaatgaanacctanagtgaagaatnttcanatgttcacaggaaaaaggggtgcaaacctgttaagatcaacccactcccatgaatcattagctgtatttatgtcataagccaatgcatacagatcctgc

SEQ ID NO: 51460 - DNA, 337 bp, Oryza sativa
ttaatcctggggtgcctgatgaaattcgccaaccttccaatttctttgcggttgaaaatagaacacatcatatcccaacaagaaactgctcatagaatatgccagcttacaatttgtcaaacccgttaaaaactctagatcgttaaatcaaaataaaacaagctttgtattcttgttgatctaacccagactatcctctaagggcggtggggttacgttctgtatccgtatatctgctctcttttttacttctgccttctcgcattttatacccctcttaaaagacatacttgccactttctgtgatgttatcgttttgaaaatcaaacatactttt

SEQ ID NO: 51461 - DNA, 221 bp, Oryza sativa
  unsure (1)..(221): unsure at all n locations
attaatctncgatgacggtgaaacattatccattatctcctccctttgtggagattcgcaacaaanaaaaatacaaattgcaatcttatcccaacaaaccgcaatcacacgaggaaattacggtgaacgtcctgcctaaacaaaatgtgaagctcctctggattntctcgtgaccagngtttaagaagggttctagttatttgctctcatgtacaatttag

SEQ ID NO: 51462 - DNA, 451 bp, Oryza sativa
  unsure (1)..(451): unsure at all n locations
agatgaacggtcaaatatgttntaaaaagtcaactgcgtctaatatgtaggtacggatgaagtatgatttgctaatatacgtagattcacgtatactactaactcatagttcacacaatcactcgcccaatcggcaatgcaagaattcttgagaaggcgacatcactgttgaagtagagtactccctccatgagaaaaacaagagacaaacttaaacatgaatgtgacattataatgaatctagataggtttattgtaccagaaaatattatatatcgtgtctaggggtgttttttacgaagtagataatcactttagcactgttgaacaatatttttacttgcagcatgcgtagccgtacagacgaccagctaaaactcaattaccagagtcaatgataagcgacaccacgtcgcagtgctgtccattgtcacactgntccagagcatat

SEQ ID NO: 51463 - DNA, 270 bp, Oryza sativa
  unsure (1)..(270): unsure at all n locations
taccatcattngtcaagactttcttcttatcacaagcttgatttcattcttgccaacatggcgatgtccttggcttggtgaccattaacccatcgtgtcatccattagccctatcatagtacgacctattccttttcacatttcanaggagaacattagtctcaacagatcggntgtcatccctcacttgatgaccaaccaggtgcatatgaaagatatggatatgtctgtngagttntcataacatcacaagtgtcatatactcgtatg

SEQ ID NO: 51464 - DNA, 275 bp, Oryza sativa
  unsure (1)..(275): unsure at all n locations
gggcgcacacganagagtgcgagagcttctaagaacacacgcttcgctctctacctggcgcgccagatgacggagcgtgggggctcctcaccgggagaccgcgcaggcctccctttgccggttcggccgggggccctgagtgaggttctaagctcctagcctgtggaaagttcgcgagagtggaaacacacaagacacgggcgatgtatacaggttcgggccgctgagaagcgtaataccctactcctgtgttttgttggatctgtgtatgaaga

SEQ ID NO: 51465 - DNA, 418 bp, Oryza sativa
acagatcttacatatttaagctacctggacctatcgacaacaatcttactggaaaagttccattcggacgccaacttgacaccttgtacttagagaatccatccatgtacaatggaaacattggtctttgtggccctcctcttcaaaggaattgttcaagcaatggttatgcacaaaggcatggtgatcacaaaggacaagagaacgattccaattcaatgttcttttactatggtcttgcatcagggtttgtagttggtattgcgttgtgtttgtgctctgctattcacaagtcatggagagcacttattctgccttgggacaggatatgaaagtatatgtgatgtggtatacttgacctatggtgaacctacaataattaacacagtaggaaattgttactacataagcagttcta

SEQ ID NO: 51466 - DNA, 378 bp, Oryza sativa
tactaagctgctatcttcatcggaatatgaagctgctcgagggcggttatttccggaacatgcgccagccctccgattacagacaggatctgcttgtccaaattgaactcaaggatgcaaatagggcgatgaatcaaccagcaaagaacattcccaaccatggtgctagtacccactgaagaagtccatagtgtaaccaatgttgttgaggcgatatcgccccatgtaccggactccgaatcgtagagacagacagaaatttgtgttcgtacattgtcaatgaacaccaatgccagcttgaaggggcaattgccgtgcacatggacatggccatcatcggccgtcgcggacgaaatcaccttggttgatggcgaattc

SEQ ID NO: 51467 - DNA, 182 bp, Oryza sativa
tattaaatttttttttttatctttgtgaattattaaaaaaaaagcccatgcactggccaccagtaaccaacttaattaaataagcagcaattgttaaagttagtctaccacccaccttttcattatatctaatttgtgtgcaacaacaacaaaaaagaacatactgtactgagaatagcttt

SEQ ID NO: 51468 - DNA, 411 bp, Oryza sativa
  unsure (1)..(411): unsure at all n locations
tattgttactataataggaagagagtagagtaggagaagtcggatgaattccggagttgtcagtaatcttctcctatntcttttattctgtgtattactctgaattcaatataatattattcctaagtaatttagatttatcttgtgagaattatctctcgggtagttcctaaatagcatacgggattattggtcactataatcaactaaaatatagtgattgctttagtgagttataaacactaaagtagatattaattgcttagacgtagtggttaggtaattgttatacagtaattggtgcaacatctttatgagctgtctgctcctcggggcgaattctatgagccacctccttcatgagagagcaaagcaatggtacacctctactgttggatgtgtaagcggtag

SEQ ID NO: 51469 - DNA, 429 bp, Oryza sativa
  unsure (1)..(429): unsure at all n locations
agcttgtaaataaacattagggttaataatatagtaatgttaaaccaagggtcagaanaacagggtttttatatcatactgatatttgtcaaaacaggatatgatgaaggttcaaagggtacacagccaaagaactatacagaataggacattagtttgttcgatcagttataggggacctaaatatttctccactcagacattggtaaaccgtaaaccttagtattttctcatcattccctgtattaagcatcgccaaacaggctcagacagtagtgaaaatcaaaacttatatccaccctctggagtggaatgtgagcactcaacaattgcattcctataaagcagcatggaagcaatggttccatcatgtgtcacatactatgaagtatgcttcactaaagccatatgtctgtgtcttcttctgat

SEQ ID NO: 51470 - DNA, 469 bp, Oryza sativa
actcagctgagcggaggaaagcctctgagaagcaagtacgtgattcagaataggatgagactgctgacaagtcttctgaatatgagctcccagattccctttctttggacgactatggtgaaagcctaggaaagctcaacatttctgcagaatcttcatcaaaaggagctgctagtaccgcgcttgatccatcgcactacgaggaaaatggtgttgataatcatcttgctgtggtagaatctctctcgaagatgttcccagatgtgtctgctgacttcattgttgaagcactgagggcccatgattttgatacagaactaactattgatatgcttgctgatctggtatgtaaattcctatttcgatcctctggttatggcacttctagttattatcaccaagtgttacatcactaatgttgtccgcacaccttacaaataccatgaaactgcatgctgactgccacttt

SEQ ID NO: 51471 - DNA, 287 bp, Oryza sativa
  unsure (1)..(287): unsure at all n locations
atagactaaataaactagaagtagaattagagaacctaacaaatcatggtgatattaaggcattaccagagaataaggacatacaaaacacccgatttaaagagcaattgactacactaaaagacagtactactgctaaaataattcaactaagagaggccataactaattntggaaataaatatatagtacgactgcctttcanagaaatattacgtataagaatccgtcgtagaatacaattgacacccagagtatcttagtaaatattagcactagtagacacc

SEQ ID NO: 51472 - DNA, 475 bp, Oryza sativa
  unsure (1)..(475): unsure at all n locations
nntgtcaatgatttagtttgtagtatacaacgtatgatattttgagccgaaagtttaatttacagtataagtatatccagacaaacacataactttgttatgtcaaagggtatcactttntgttttggattttgacatgggcaatggtggatcctaatgttctttttcttaaactcgagaaaccttaataatggataaccagttccactggctgtgttcgaccgtttgggtttccaactcatctctctcgtattccacaaacatattttttaaattgctaaataatttttttttacaaaaagtttcttgttttaaaaaataatattaatccatttttttaaaaaaagtaattacttaattaatcataagaaaatgtgccgctttgttcttaacctcacctcccgaacacagcctaagagcaagtactctaatgcttaatatngtgcccctaaaaatactatatatgattagatat

SEQ ID NO: 51473 - DNA, 475 bp, Oryza sativa
  unsure (1)..(475): unsure at all n locations
taggatcaaaagttgcctggagggtggtggcaagtctaaagtccaaactactccaactgataatgactcagggaagagggtgctggtaaggggcaagagaagatgcaagggatgtggggaatttggtcatgttcaaacaagctacaagtgttcccttaatggaatcaaaaaaaggctagtgtactaataccaattntttttgtctggagtacagtttcataactgtaatgcattattntgtattgtaatttgctggaagaggaagccaaggaggaacactacaaaatatgggaacacttctgacattcctagtcccaaaagaccaacagtgcagacaatacttgaagaaagtctaggaagaattacaagaaggtaatcatctaaaatacattcacattactttagattttgcctatttcggtctattactcatttgttcaataccatggcttacagncggctagcatcattgatg

SEQ ID NO: 51474 - DNA, 480 bp, Oryza sativa
  unsure (1)..(480): unsure at all n locations
agcttataacctaatgctagggtgaagttggaatattatctctttagcgatatactntaagtgatggcgaaattagagctgcataattttcaaatttttactccaatcctatgttagaagcctatggcccaaggggcattctcatctatttgatgaatctctcttttcaattaagccaaaagtgtccactagcaaattatcaattntctaagatgtctttcaggtgtgaaacatctttgccaacaaattaacataaatttaaaagttttgtagcaaaatttgctctatctttttcgttttcttatcccaaatactactacttcagtacaaaaccttatcattnttataataacatattntaatggcaatttaaatagggttatgttcagcagaatccannactcccagaaacgaaatctggagtagaatngtacagcagcctanaccctgctcacctctctagttatctttcagacactt

SEQ ID NO: 51475 - DNA, 497 bp, Oryza sativa
  unsure (1)..(497): unsure at all n locations
gacctatgaaactcaagcttcnatatactgcacgaaaaggagatgtgtgaaaaataaatctatttatattagcggggcatgtcaatttgatttgttccagtcacgtttcatctcatattatgcttttaacttagagagaaaagatcgatatggtactacccaaatatgttcatttgcaacatggtaaggaaaagatcgatatgctactacccaagtatgtacctgatctgaagtaggagtagtactctagctagctagcagcttgtaccataaatatcttccttatttaggccatgtttagttcgttggccaaaattttttttaagtatacggacacatttgaagtattaaatgtagagtaataacaaaacaaattacagattaagcctaattaatctgtcattagtaaatgtttactctagcatcacattgtcaaatcatggcgcaattaggctcanaagatttgtctcgtaatttatatgcaaattgcgcaattg

SEQ ID NO: 51476 - DNA, 274 bp, Oryza sativa
atcttttctcacctttgttcagagggggaatattcttgacatccaagaataggccacataacgtccctattttttccatatgtaacaattatcactgaagctcctgctgtgctactcaacggatcacatatggtaatccaaactatggttgattttacaatgcaatgctaatctcgacactgctagatggaataagctgacaattatttcatctatttaatcctcataaagggaatcaattaataaataatcagataaagccatgtgtttttgg

SEQ ID NO: 51477 - DNA, 452 bp, Oryza sativa
cgggcaggcaagaggatgcaatgcacctaaccattactgttatttgcatgccgtataaaacgacagctcgtgctcttctcccgacatgcttgtgtgcaaacagttgtcagagaaagcgacgcacactctaaaaaaaatgggaaagttaatttctgaagaaaaagatggcctgtttagtcactaatcagaaaggacatacagctaggtaactgctgtgtctcgtcgtatcagtcagaggaatcagtggtgtacgacacgacagtcacgtaccgccgaccggaacgacgacgacgtctgcggcgccggcgccggcggccggaggaacagctcctcgaactgcctctgcaggtcttcgaagctctcgttcttgccattcttctgcgcacgcgttcaccacaccaacatgcatgaacagggtgtgaatttacatcgaattttttaaagtcacgtcg

SEQ ID NO: 51478 - DNA, 281 bp, Oryza sativa
  unsure (1)..(281): unsure at all n locations
gtcacctgcggcatgcagcttttgcttggtgtggatgaantatctaagtgttgtttttatagccagctatgacagtggaaagtccgaacgccctcaactatcattgggagtgatcctgtgagggtcggctgaacctggctggcccaaccagcagttttggcggctctcctgtgctgctacttcaaactgaaatctggctttgagtattgttggttgagaccattaccataattgttccgaagcgtcgatgatgtcgtagtttatatgatctttcattatga

SEQ ID NO: 51479 - DNA, 451 bp, Oryza sativa
  unsure (1)..(451): unsure at all n locations
tagcatatgtgtgcatatgtgggtgtatgatcttgatcatagagcgtgaaaggtatctacacaagtcacaaagatttgacaaagttcaatggaattacaagtaaccaaaatgtatatggcttaatcaatatgaatatttttggctctggtaggaaattgtatcaaatgaggaactttcaaatttatcattttgaaaaataaaacatccggaattcaagtcaaacatagagcaggttcatagcaactcttattcgcaacaacctagactcagatcagcagtgcagctcacttacctcaggttctcggataattgttggctacttttatttaattcttgagagagcacttaaccatgacccatatatgagagatataaaacagagcaactattcatcatttcaacatgaagaactaagcatgtnttacctagcatattaaatctaacctatct

SEQ ID NO: 51480 - DNA, 444 bp, Oryza sativa
  unsure (1)..(444): unsure at all n locations
ttgacaatgtgatgctacagtaaacttttgataattatggattaattaggcttaaaaaaatcgtctcgcgaattagctctcatttatgaaaattagttttttattagtctattgttaatactctaaattagtgtccaaacatccgatgtgacatgggctataaaagtttagccccatctaaacacccctaatgcaaaaggagagaagttctgtccaccagcacagagaanactattcctgaagaaccaggacagaaaacccagaacacccatgtcttgtgtcttctctaccgctgcttncttgctgaaccgatagatgctgcccgtccatgccaaaacatctcccttccacaantctccattaaagtccaattagaaattatgtattnggaagatgccatcctatttaattagaagtcattgaatgatacannaatatatacta

SEQ ID NO: 51481 - DNA, 453 bp, Oryza sativa
  unsure (1)..(453): unsure at all n locations
gtagtgtgtgatgagagatntcatatgacaagtttcttctcatcaatgggtgagcaattgtcaacaaataaagggcagaaaaaggaggagagaaggtggagtatggaatccatggatttgttgtttctctcacaatctgtgtctgaaatcctgcagctcctatctctctttcatctttcttctttctgcctttntatcttcagcataagagacccatcaacctttgcatcgtgcgatccattactgcattacacatcagtcagcaccgagcaaagcaaaggattccagcatctgctgaatttttctctcgtgcaaatactttgtagaataagtttatttntgtttctctttggtaacttaaaataagttataaaagtaattattgtatctgagtntatgaaaaatcaaagataaatgtgtttttataatgagaataattacatggaattgata

SEQ ID NO: 51482 - DNA, 366 bp, Oryza sativa
  unsure (1)..(366): unsure at all n locations
cactggcacaagatatgttatctttcancctcatagcctcatctgtatcgggatagcgtaccggcacgaataccaaaagtcactggtacgaanaatcatatgtatcgagtcccttgccatcacggatgacagtcacggatgatataccatgaagatcatcataggcttatcgtcagatagttgtttgtgacaggaagcgatccagagaattaccgattatatatggagatgagattgtgaatcttcttgatatgtgcttatatatattctaactgcaacgactgatacttttgggtttggttttgtgctaatagcgggaatggaacgttaattagatggccaaccgctagtgttataattcgaatg

SEQ ID NO: 51483 - DNA, 453 bp, Oryza sativa
  unsure (1)..(453): unsure at all n locations
tctcanagctggcttcatcagagaggtactccatccagagtggctaccaacccagtcatggtgtggaaagccaacgggaagtggaggatgtgcgtcgacttcaccgacctcaacaaggcgtgtcccaagtatcatttccctcgtcctcgaatagaccaactggtggactcaacagctggttgtgagttgttaagttntcttgacgcttactccagctaccaccaaatcagcatggcgaaagatgacgaggagaagacagcattcatcacgccgttcggtgtattctgctacgttaagatgacgtttggactgataaccacaggaaacactttccaacgaacggtccaaggggcacttaacgatcagcttgggaacaatgtcgaggcctacgttgataacattgttgtcaagaccaagaacagcgactcattgattgacgatctacgggaaacg

SEQ ID NO: 51484 - DNA, 200 bp, Oryza sativa
  unsure (1)..(200): unsure at all n locations
attgctctctctctccaaatcaccataccacccgaactcgattattctcctttttattatcgatatctgcacctgtgcaatgccaaanaanaaagagcatggattctctaaagaacaagcatggactaaatattatacataagcaatccacactcacacagttatatgaaccatcacatttactatctgatcggctctac

SEQ ID NO: 51485 - DNA, 461 bp, Oryza sativa
tcctttagtagatggatatccttaaccgaatatagcaggaatctgactactaacgactagacaattctcatcggctaatctcatgacttcgaagccgatgctgactctcaaccgatgactactccgggcttaccaaatttcactgttaacacgcgcgtgccgtcgccgtctcatgctgagcgccccctccgacgtgaaatcgacgtcgacgcctcttttccgagagagagagagttggggaaaagatttttttttagtgttacagccggcggctatatgttttccgattcgggataaatccaaaccgtctattacatcaaacggctgagatcgatctcgccacggaccgcgctgtgcattatgggctcgatgcgttaaggtcccaagctggccgggctgatgctataatgtgtacatggccatattctctattcgaatacctataagacttttattacaga

SEQ ID NO: 51486 - DNA, 492 bp, Oryza sativa
  unsure (1)..(492): unsure at all n locations
ggcggatcaactcanaatggaagaattcccaccaaggaggtccctttgcttcaacagattgacgacctagttgccggtccctctccaaaacatatacagcctgaactaagcatgcagccacagatctccgattatgctcacagttccttttgagagttcataaacgagggaaaaagttacttccaccaatttaatgcactacggaaactgttcatcacatctgtactcctagcaaaataatcatatatgtgcactctgtggcaatagctccaacaggcagctggttntgctgatcatcgatgaagatcaaggtgattactagtccctaaattcatgcttcattgtcaacactacatacataaatatgaagctcaatccacaatgaatgaaactccaaacagattgtctgcacactttcatgcatcatattgtaagacatggccattttttctttaactatggacataccaattatgactaatgccctcttct

SEQ ID NO: 51487 - DNA, 368 bp, Oryza sativa
  unsure (1)..(368): unsure at all n locations
tggaccactcggtcaggatgatccgagcggtcaaacttgattgcaatttctgaccatcgaagatactggggcgtgtcgggctgaacagcattgatctcccgttcagtcaacttctgcttncgtttagactcataagccagggggccgccgaagatatggttgagctccttgcggtgatcttgaanacctgccggngtgtcgccgacgtccttcttcctcgacgtgctctgtacttcgtcggtgttcttccgtgcagtcttggtgtattgatccgcanattgctagtagacgaaacaatctttggccacgtggttggagttaagatggtgtgggcattgtgagttcatgatcttgtctaacgtgttgac

SEQ ID NO: 51488 - DNA, 411 bp, Oryza sativa
  unsure (1)..(411): unsure at all n locations
ctcagcttctttaggatcgaggtggctctccttgcctgttgatggttgacgatggcgtattgtgggaggggagatggcggcggctcgcgggcaggcaatattgactatattatttctatcctttatttctttacaatccgcaccacattttcggatttttcgctatgcattaattgcagatttatcttcaattggaacaaacactcaaagattgcaatgtgggaagactttttacctgaattttaatcaaatggtatgcgtagcgacataactatggaatatgcangggacgggctaactgctcgttgatnttttattacattcttttttttcctatcgattttttaatggcttctggcggtctagaggacaagtttaaaaccccccttaaactggatttcatttagccct

SEQ ID NO: 51489 - DNA, 282 bp, Oryza sativa
gaacactcaagtatgaactatattacttattttaacacagaaaatatgtggatatggatagtattaagaagctatcgttttatcctataccaagtgatgagtaacatgctggaatagatggatgtcttctgtttgcatatagggacaagagtcttgtagataagatccgatgtccaagtgaggagagtgtcaacaagagggtattaacgctggatgaagtgtatgatcatttagtatgtcacggaatgttactatcgtctagtacatggagttgtcatggtg

SEQ ID NO: 51490 - DNA, 366 bp, Oryza sativa
  unsure (1)..(366): unsure at all n locations
agagaagacaaagatggtgatatgaccnacaacaacaagccgaagggttcatcccaagggaggaagctggagaatctcangaaggcttttcaacaagtttgcgccgccttcgagccactaagtgatagagatggtgaaagtggagatgatgataagggaaagaacatctccgatgtttgcttcatggcgcgtggtgaatctgacacagagtatgaagataatgaggtaagtgcttttgaggaagctattaatattttgagtgaaaaaaaggaagtgtgagaagatgtatagaaaacaggaatntatcattgaatctcttanatatgaaattactagattaaaatctcttattcctaatgatgatga

SEQ ID NO: 51491 - DNA, 417 bp, Oryza sativa
  unsure (1)..(417): unsure at all n locations
tctgaggggtggtaacaatgacagctgcagtcaatggggctacctgatgtttcagacatgttaaatttcacagtgcctacaagcatggttgatgttaccacgtgtgatttgtacaatactcangctagaggtaccacctgacagagtgttaagtgtatatctcctgttcctggaggcatgtcaatgacaaggtattcgagttcgcccctttatgaaaagaagaaaaaaagtcaagttttttcaacggaacccaataatattattgggaatctacgaaaggctaagctggtaaaaatgggctgctttattatgttcatcagatgccttcataaagatgtcaagtatctctttcgcataccaatcagtagtggtcagcaactgattaatcactcccgaaaccattggaccacgcattat

SEQ ID NO: 51492 - DNA, 423 bp, Oryza sativa
  unsure (1)..(423): unsure at all n locations
tcatgcagacattctagtactgtcattcctgagacaaagtatatgttcatgtccagaccattcgtcaaggttacctctctaaaagatcttcaaacttgagagctgattggaaaagaagttttttgtccttgatagtcgaagaatgctgtactactatcgcaagcaaattaataggacacctgtaggtcccccttgcactagtgaaatactcatgcagctgcaggattctgtccaagatgtacaatatacttaagttcctgtcctttattctttgtttcacttttggtcttccagggtggttgttccagtcacccaagaagcattggcaaccccactgaacatggttctgggttgctgagcagactattctcatctcattaccatggcattatacatgatgagaaatctgtngcacggcatact

SEQ ID NO: 51493 - DNA, 489 bp, Oryza sativa
  unsure (1)..(489): unsure at all n locations
ngcttaaggtagtccaatatgtagtttaagtaagtttctttatctaataactatactgcaatatgaaacaagcataaggtttaatttctttaaagaacatatcaaacaaaactaagctgataataccttcgttttgaattacttcttgctctagttttatactaaatcaaacatttgtatatttcaccatcaatttcgaaatattcatatagtttacaataataagatgtacattnttagattcaccttgagaaatactttcttaatatatactccctctatgccaaaataactcaacctagtattagatgtgacatattccctatgtccagattcgttggcctacgatgggtcacatcccatcctagggttgagttatttgcgacggaggggaatagttcatatgttgtaaactatacgaattactagaaattaattgtgaatgattacatgtntgattaccacanagataaatgataataaattgaa

SEQ ID NO: 51494 - DNA, 382 bp, Oryza sativa
ctcagctttcttcccatcatatgataataactaatccaactttctcaagcatcaagatagaggacatggaagagagtttatggttaccactatgagaatggttctttaaattccttatgatcggcatgtaatatctcctcaaaaacactcaagggccgtataactgccggttgacttcagctgtgacttgagcaagctataatagaatatgaactggcatctgtacatgaaaatagaagcacaacggagacatgaattttacgtggaaaacccttgcgaggaaaaaaaccacgggcgtcgaccggcaatgatcactatagaggagttgattacaaatgtaggggaataataatgggaacgtcatcccttcccgtacggttac

SEQ ID NO: 51495 - DNA, 210 bp, Oryza sativa
  unsure (1)..(210): unsure at all n locations
agcttggttcgcgggatatggtagttgtggcatgtcatacattcggagaaagtggtcaaggagttttttacccatacatactcgtggtgatctacccttagaattggcggtccttacaactctgtgctnttggaggagatgaccaacgagttgttcatgactggcaacctactccttagattgatggtcctcactactccatgtcattct

SEQ ID NO: 51496 - DNA, 362 bp, Oryza sativa
gacacataaatctcagcttcggaactgtgatgcctgcttcaactggctgtcacagagagcagagtcccaacccccttctcgctgatgatcttgcctccagaggctgtgtaacggagagtcgggtacacaacacgacgacacagcacatgatcaaggaacatgatccctttagtgatatgctcgatcgggaggctctcgttgtcaagcttgatcctgaaccgctggtcgcagaattcaacaagctgttttcggagcactgctgcatctgccctcggacccctcaccccgattaagaaatggccaccgaatcgaatgtagtccaccttcctcgttttgtcagggccgctcgtggggacaaactc

SEQ ID NO: 51497 - DNA, 290 bp, Oryza sativa
  unsure (1)..(290): unsure at all n locations
gcattctatcgaacacctngaggtgcgtccacaactgacacaacttctcaatataattttagatacatggaaacagtaagcttacccctttatgcgccatgggtgacgcgattcggcgaccagcatccgcgacgacgcagaccttccaagttccgaacccctactaagagagaccaccaggcgttggattgaaccgccgaagaagaccagaagatctgcaggattggggagaagctaactagcttagccagtgggcttgcctgggccgcgggtccatggaattgatggga

SEQ ID NO: 51498 - DNA, 477 bp, Oryza sativa
  unsure (1)..(477): unsure at all n locations
cggtcaggcatcatggtgggtgacccatgattgcaggccttgcttgcaagtgagggtgcactgggacggcggtgtcaggagacagccaaccaaccatgcatccaatgcaaactaatcctgcacattgaatggagaatactacttactcctaccttgattctttgggaccaggagtatctgtaggatgtacgctcctggcttgtactgcagttcagttctagcactaaccatcattgcaatgttaattgggttgccaactcttccttgccttcaaatggaggattctgcacatagtatgtgttgattcacctattaattgaaaagagatgcgttattgtggcagaatttgtgcagatatcttcaatgctcaaatgtggtatgtgcttaagggtagtgatggagttggaaaacaaatatgagccttacatatattnnttgagatgggcttctatngttcttcaagaaaaactacacata

SEQ ID NO: 51499 - DNA, 466 bp, Oryza sativa
  unsure (1)..(466): unsure at all n locations
gcttacagcgagggcaatgacgccagtgatgatccttgtcttatggccagcatcatgtacggcgacgagaagttcaggcttgtggcagacggtgggttcaggcccttcttcaggtaaccaatctagaaaatcgtaaaaacactcgtgtaaattagtactgttccatgttatactgcatgtttgtgtntatgttttgcagtttgttgaanggttttgatcagttgttgtgcttaccacttgaatgccatnggtttcagcatgtgtgaggtacaccaggaggctcccgatgatgacagacgccaatggcgcagctgcagatacccagaagaaccttggcctcctcttgctctgaagaaaaggaagattgatcagttagcttagaaattcagaaataaaattggaatcttggatcataacttanattccacaaggactgtattcattcttgcacatgtcanatcagtac

SEQ ID NO: 51500 - DNA, 366 bp, Oryza sativa
  unsure (1)..(366): unsure at all n locations
aatccgattntaacatacgggtgcttaagctaactctatgttatatattaccacgaaaaataatgccaacaatataaaacccaagcaccgaaacccccccacctacccgctccttcagcggcagcggtcccacacccgtcggccgattgaggctgatcctgtccccgccgctgttccagcttcttcgtcgacggcagttccacgcccagccaaccgtctgagactgagccaccgctgctgaggtcatcgcaaccatcgttgccactcccgtcatcaaccgtccaccgctgaggttgccgcaaccacctccatacctcccgccataacccgctctatatctgccttgacatatcaagatacgcgcac

SEQ ID NO: 51501 - DNA, 433 bp, Oryza sativa
  unsure (1)..(433): unsure at all n locations
cttcatcggagccactatgacgttatctggctttttttttttcaaagntgatccggncattacatgtgaaaaaaaaaacatcattatatatatcctcttaggtatgtcgctattaatntgaacacgatgaacaaatcaaatcacagtgctcaccgtacagcgtgaacctggtttattaactagtactggagtcccttttgttacgtgtgacttgacaaaacaatcaacgcgtcaacatggtgatgctctgtttgaaaaaaaactgttcttgcacacccatggttaatgttggatgctagctgctatntatacctgaacggctgagcagaagatcaacaccaaaccacaagaatacactcctcgaaatcaaacatggattcgagatcgccttttccttctactctgctctttgttcttctactgggtgctcctg

SEQ ID NO: 51502 - DNA, 436 bp, Oryza sativa
gaaacaatcatcaattattttctgttaatgaaaccccactctcttaagcaaccaatttatcttacgggccgattgatgaattccacgaatcccctcatgtactactctcctagcaactttagattgatcattatctaagtaatactccatctagttttcggcgatataatatttgagcgcatgccgccgaatcttccgatcaaccttaagtgtaggatctttcaaatatctaatcaaaggaattctccaagctatttctaactcatgggcacaaatgtctgaataattaattcggccttttaatcaattgtaacgtgccccccagcctcctgtctgggatcggtcagaccggccacgcaatgccggtcagaccaccctgtctgtccggtcagaccggccatacagagctggtcagacgcgcggtcatcaccggtca

SEQ ID NO: 51503 - DNA, 427 bp, Oryza sativa
  unsure (1)..(427): unsure at all n locations
gcgtggtgcaagtcttctttttcttctccgcaccttaaggagcttcaggctcctttttttcttttccaccaaaactcgattgtgggggacttgagaaacaaaggcggaggcaagctagaggcaccgggtgatagggagctggttggaggcagcgcacagctgtgcaatggaggcggaggcacaaagcggtgcataccaatgtggtgtgcaattgatgcagtcacgcagaggatggatgcgcgagcacaataatggaggcggtggcggagtgaaccgatgaatgatggangcggangtgcaactctctaccctgtctctagggtttagttcgctaaattaatgggcttattcggtgtactaggtctatagngtcacggctcggtcatatcngtcaattcgattaaccgacgccactgatcgaattaac

SEQ ID NO: 51504 - DNA, 468 bp, Oryza sativa
  unsure (1)..(468): unsure at all n locations
ataacanaactatacaagtgattatatttttatagcgatgaagtagctttttgcgtgtggggcgcgatcgaaacacgtgatatatggtttctccagcgaagtttgatggcggcggcaacgggataaaatagaggactcgactctgtcaccgtgaaaatgggcgacctacaaaactgagagactggcctacatatgtgtgtgggcttgtggagggatcggactaactgttcggtgtgattgcaccataccttctcttaatttcaaaatatgggaattctacaactaagagtttgttttaacaataatacgtactagaccgatatatcttttcaaggcgattgcactgtaccttcttctaacttcaaaatatgggacaatctacaactaacgattnttttttgaaaactatgtccttgaccgatatatctggagattgatgaagtcatcacatgcatacagctgtccaca

SEQ ID NO: 51505 - DNA, 406 bp, Oryza sativa
  unsure (1)..(406): unsure at all n locations
ctatactatgatagccaccactacattggtaagtcatatcgtctggattacttattactcccaccgtttcatattataagtcatttgacttttctccgcatcagactatattaagtttcaccgagctaatagaataatttaacaacatttaacatatgaaatgagtttcattacatatagcatcgaatataatttgacaatatgtttggtatgtgttgaaaatagtactactattttctatgaatntagtcaaacttgaataagagtcagacgacttataatatgagacggatggagtactctagtactctctcgtcacancanatatggttgtttgaacactacaatgtaaccactatattctataacaatatatgtatttacacacacaagtatcataatatta

SEQ ID NO: 51506 - DNA, 445 bp, Oryza sativa
  unsure (1)..(445): unsure at all n locations
tcggatgtgcatcgactacaccgaccttaacaaggcatgttctatggtacccttacccnctgccacgcataaaccagattgtcgactccaccgcggggtgcgaccttttgtgttttctagatgcatactctggttatcatcagattcgcatggctagggaggatgaggaaaaaactgcattcattacccccataggaacttattgttatacgacaatgcctttcgggttaaagaatgcaggtcctacttttcaacgtactactcgaatttctttgggtagccagataggacgcaatgttgaggcctatgttgatgacttggttgtgaagacgcgcaaccaagagaccttactctcggatctagcggaaagcttctaaagtcttcgctccgcctgcataaagctgaaccccgataagtgcgtgttcggcgtgcctgcgggcaagct

SEQ ID NO: 51507 - DNA, 405 bp, Oryza sativa
  unsure (1)..(405): unsure at all n locations
taagcacctgcggctgcagctatggagcatttcagctgatgccgatagggttatattctatttactatatntccaatgtatattatgatacttgagtaaataatgatatatagacaatcggctgataataatggtattaagcaacaatataatctagtagaaatcaatcggctaataacgatatgatagaataagcaacgatccgaatggtaaagcatacatcggctgaaggtccgatgtcattaaatccaaacgattagataagtaatgaaacctttgtggcaatcggctaaacccaacttgtatataatctctataagccgatacaacgtccatataactcatcggctaaaaccccgatgaaacccttattggcaatcaatggcatgttagttgttatgggta

SEQ ID NO: 51508 - DNA, 319 bp, Oryza sativa
  unsure (1)..(319): unsure at all n locations
tgctcctatattggaaaatcattattattttgtttgcaacttgcattattagaatcacacactcaacttgcttggtctcggtatgcgtgccaaaccgacggacctacccagtagtcgcacactcgcactaattcctgtaggttgtactaccctgatttccttgtcacttccacctttgtggaaacctcggtatcccgtgcctctctgagcgcgtataccanatatcccacatacaccattgtttgtcgaaaacatgggaaatgggtttgagaagccttgaaaaccacacatgtggcgtcagtgtgttngaaaataaaat

SEQ ID NO: 51509 - DNA, 422 bp, Oryza sativa
  unsure (1)..(422): unsure at all n locations
tggaggatctngatttgtcagataatgatctgacatgatgtattccacctgagttgggtcatctcagccatttgacattcctgaagctgagccataactccatttcaggaccgattccgggaaatatgggaaacaatttcaagatgcanggagttgatcattcgtcagggaattcctctaacagcagatctggnttcggattctgtcaactgctctccctaaagatcctgtacctgtcaaacaacaagctcactggtaagctgcccgactgctggtggaacctgcaaaatctgcagttcatcgacttgtccaacaatgcattctcangtgaaatccctacagtccagacgaactacaactgttctcttgaatcggntcatcttgccgacaacggcttcaccggtggtttttcatcattcgta

SEQ ID NO: 51510 - DNA, 481 bp, Oryza sativa
  unsure (1)..(481): unsure at all n locations
gcttcactagtttgctggagaagtatataccagttcgaactctactaacaggaggaagatgcgataagagcttgttatgatggtactccggtataaaagaacagtttgattgcaacttatgtacggaagtaacctcgattgaattgatctcaaacactaccgccgatagtgtttgagacaaattaacgtaaaatgaaattagcacacgtaaaacaagagaaatattagcgtattactaagtgagttttgattattataatttgaaaatttagatttatttaatattttaaagcaacttatataaaaatgtttctgcaaaaaatacaccatttaacagtttaaaagacgtaataataaanattaagaaaaaatatactccatccgtcccaaaatataagcattgttagtatagtgctaagtcaaccatttttaaatttgactggtaatagaatttttnttataaaaagatcaataatataaa

SEQ ID NO: 51511 - DNA, 349 bp, Oryza sativa
  unsure (1)..(349): unsure at all n locations
gtttggtangagtatgtataagcaagttgattttatgatgtgctagaatttggtttgatagcatataatgtttggagtagatggtttcgacctttggtacctggccttaggagttaggaggttgtcctggtactaggagcttatagtacaagtcaatccctaccttttgtgtggagaaatcttgcaactatggctcgtattatgttggaatgagggttttatacttgtagtatttgcatattctctttcactctcttgaggagaccatntntcaggctcatggatgttatacttgatcttcataatggagcgtagcattccaagatagtngctggatcagttacattat

SEQ ID NO: 51512 - DNA, 483 bp, Oryza sativa
  unsure (1)..(483): unsure at all n locations
ctcagcttagaaatttccaagcanaatggggtgacattgccgagcatgttgctacaaaaagcaaagcacaatgcatgctacacttccttaaaatgccaattatggacccatttctgcatgatggagatgttaatgaaatatctcaggaaactgcagagcaggtctcagcagaacaaggtacttctcgtgtaactgagaaaatggaagtagaagacaaaacataagaaataaaaactaatgatagaaaaactgctgcaaaaccaaaattgaacttgacagaaacagaagtaaacctagacgacaatgttgttgcaaataatgataccaagagttcaggtgatatcaatgtggatgtatgtagcaatactggtgtatcaaatagatcttcagataccgaacctacaaagaaggaaacttcttgggaaaacacatcaaacatttgtaatgatgtcctgaaatatgcttttgaagctgttgtcacat

SEQ ID NO: 51513 - DNA, 444 bp, Oryza sativa
gctttatgacatcaactacgtacttattaagtcttgttttattctggtgatgtcgtctctcttgaaaacttaattatgacaaacaaaaatctctgcaaagctcctgccttttgactttagaaaataagtccgcaaaaaagttcatggtattctcaatcgaattcctggaacgcctggtaataaggtttgactagtgactagtactatatgggcttcaagtgctgtactatactactatacattttacacggtcgaacaggtcctcgcaatgcaagtgccaaaattttaccaaatcttataatggcattgcgagccagcaagtcgtatagtgttggagcaataagtctatgatcgcaatgcatggtcggcgcatttggctgctgaaaagagcatgtctatatattctctgaaacagactaactggagaatagcacgccatatata

SEQ ID NO: 51514 - DNA, 368 bp, Oryza sativa
  unsure (1)..(368): unsure at all n locations
tagtgcctntcccttagatcaacatgcttgttagattgtttattctactggagtgttctgtgcgaggtgttaagtgtaacccgtcgtttctgcagctgggttaattgccgccctagtgagggaatgtgcaccctaaagattaagatctgtttgatggatcagttcttgtcatacatgtgtctctgtggggatctgggtttgtggttttagcaagtgatcggggggttatgcatataggctacttatctgaattggtgtttcttcctacagntgttgacccatctactgattgaacacctttacctatgaattgcagcaaatgctggagcaatgatgctggacagctggatgcctggagcaaatggatg

SEQ ID NO: 51515 - DNA, 382 bp, Oryza sativa
  unsure (1)..(382): unsure at all n locations
ataccatatctgtgagatataaaaataccatcaagagagcacaagaattcaatcgaaaatttacctcctaattttcaagagaagcatgacacaagttgtctttggtgtatactgataaaagctataatcgtgtcacactaatcgatatgtccattacctcgcccaattcccatatctcatcatgcagaanaacaggggctgagcaaaaataaaataaaatccattgacgattatagtctagaatacactacaccaccgtagataacaacaactaccgctaactgcaaacacaccanacatcccatggcactagcagccttgctgagcttaaggcatatactataaattcagagagccacccaggacaagcacaatacactat

SEQ ID NO: 51516 - DNA, 474 bp, Oryza sativa
  unsure (1)..(474): unsure at all n locations
gtagtggatgactgttaggtgctggcaatattgtgaataggttcattggtatgctcggatgcacaaatgaagattgccctgcagcactccaataatttggaacttgacattggcccaaaggatgctgctgtaatgacgcataactttcatagtgtgacgcatcaatgatcttcttggctgcagaaaaataatattcagatcagccagaccagtattaagtatcaatgcatcaaaaattactatcttaaagttgtggcaagacttacagtttggactaaagatctccaaattacagtgtgtttgctccttgggagagaagacaaccgaattggtattcatctccagctgtacaaatagcatcaagatgatcaagcatggatgggaaatacacatacatttaaacagaagataaaacaggggggaaaacgtagatggtcttacagcatcangggccttcttatgtctcactggcac

SEQ ID NO: 51517 - DNA, 332 bp, Oryza sativa
  unsure (1)..(332): unsure at all n locations
gtttatcctanaatatcgaacattcacgattgtcccgtcgtaattntacacaatccattttttctaaaagaacaacttcgtactgctcttctacgaaaattgaattagggtgtgtttntcacgttaaaattagaagtttggttaaaattggaatgatgtattggaaaagttagaaatttatgtgtgtagaanagttttgatgtgatgaacaagttggaagtttgaagaanaaaaaatttggtattaaactcggccttaattttcgtganaatcacgtgttttccccatctatccgagagatttcgtaacgagtcanaccgagagacccaccc

SEQ ID NO: 51518 - DNA, 504 bp, Oryza sativa
  unsure (1)..(504): unsure at all n locations
gacactataaaactcagcttgttggtagcttagcacgcatggtgcaaaacctcgacgttccaagtgaagcctctctgctgaaagaaatatataaaagtgacccagaacgtgtcatacaaatatttgaaagccagccatggttgcactccaatcgtttagcactttcagagtatgttaaagctcttgtcaaggttgataggctggatgatagcaccttgcttaaaacactacggagaggtaccgatatccacaaacaccttatctatttcacggctatgaagcattacatctgctgcttttgttgggctatattagttttccttaattaaacagtgaagggtttaatcagtttggaaagcacttgtatttaatggtgctaactaacaaattctntgtggatgtgacttattacaagtataatctttcagtttgtcattaagtagtacaagggaatgacaggatattataacagtaaacaattctctatatgatagcatatagatg

SEQ ID NO: 51519 - DNA, 296 bp, Oryza sativa
  unsure (1)..(296): unsure at all n locations
ctttgtcttgatgcacgcagatattgtattttgctgtttccacaatgttcttcgtgggaaaatttgtctnttgtggtagtcgatttttgaagagaaagccatgcaaaagttattgcacccagagaggggttgaattcttctatacaaattcccacattggaaaaggggcagaagtagaggtatntttctgatcatatagggcctttaatgtgagagcttgagttcaaccagcagccggactgtactattgtctatcttgtcatcgaggtgcactacattggtgacatcangtcatg

SEQ ID NO: 51520 - DNA, 475 bp, Oryza sativa
  unsure (1)..(475): unsure at all n locations
ntccctagacactgtttctcactagtgaatcctctctattctggcctatcatttgcttggtgtccttggatgaaccggaggaagctctgagcacacatgttcccttggattcgatacccttataatactccgtaggggaagtgctacatcggtatatccgtccacttgcggattctatctgtgatcataagaaataccaacagttgtctgttcctcgggacgaattctatgagccaccttcttcatcggagcccatttataccactggctatgaaattcgtcccgaactaattagtatggtgagggaaaatccattttccggctttgatctagaaaatccctaccatcatctacgagactntgagcangtcagctcgtgccttaagaatcgtggcatgagacaagaaaatgtgcggtggaaaatttttcattctcccttcaagagagagncaaagcaatgtacacctctaccgtg

SEQ ID NO: 51521 - DNA, 270 bp, Oryza sativa
  unsure (1)..(270): unsure at all n locations
cacagctatatatactcagaaccttgagcccctcgtgaggcgtgagaccttccagcacctctntatgattatctctgtgcctccttgtactcctgatcagcccatcctaagctcaattcgngtcagtttttcttctttccgagatttgctgcttttgcatcagctnttgtcacattntccagttgtgttagctctagtcgaccaccaaggtccgactgccgcagctctcccanatcactgcagccagagcaagcaccagctacaaagcat

SEQ ID NO: 51522 - DNA, 435 bp, Oryza sativa
  unsure (1)..(435): unsure at all n locations
nggagatctgacgcctgctccatccatgacgattccaatggcacattcctcaaggccaactctgggttttcccctagggacggcgctcctgatctttgttatcttctccctcagtggcatcttctcatgttgctaccactgggacaagctccgtgccttcctctggtctcggcatcctgatgtgatactccaagaaggccagcacaccgtcatctccattgcgtctccgagcaagacaacatctgatcacaaggtactacagtactaacgatccctattcatatcttactttgatcttaacctgaaatgatcgtttcttgtagacttacagaaatctaagaatgatccccatgtattgttgtttgcagaacgagaaagcagagaaagagtgtggtttgcccgttattatgctctgggacaggatccccaaattct

SEQ ID NO: 51523 - DNA, 145 bp, Oryza sativa
  unsure (1)..(145): unsure at all n locations
caacttcgagcttcctctatcacttgtgtcatctgtgagcccgttaggtgccatattcgctacaagtactacactcgctatgctacacgtttctcttatccttcgtgctntgcataggctaaataagtcgctcatcatccttcat

SEQ ID NO: 51524 - DNA, 487 bp, Oryza sativa
  unsure (1)..(487): unsure at all n locations
tgcatggggtctttgttgcactatcttgtcttaacaatcatacatctcatttatctcttccttggacagaataatcatgtgaagattgctgttgttgccgatccacaagttagtttttccctgcattatttcatgagattgtgccattctttagagagcacacaggagagctgcacgacttttgaaaacacccgttatgttacattggaacatacaaaaaatagcttaatacatatgttactctctcctgaatcctctgcagcttatggacagcacctcccttggccttccaccgagctcaattgcgctgcaagctgctgagttctacacggatttgaacatgagaaggtcctttcagtctgttgtacttccattcaagccagacatgctattatttcttggtgatcactttgatgggggcccatatatgtccaatgaagagtaatgcacgggactgaattctattttcaccttntagtagattcta

SEQ ID NO: 51525 - DNA, 517 bp, Oryza sativa
  unsure (1)..(517): unsure at all n locations
ccggaccttaagcacctgaggctgcagctttggaaacccaanaaaaattgtaaattccattttgatcaaccaaagagcacttgattcacaatattttcatatatcctgngagaggtgttntacttgagcaacagaataaattgttttctggttatattcaagtgatgtcaacaaactgaattgcttaagcaaaagcagctgaaccagtaagcagctgcacggcagatacataacaaccagaagcataacagacatctatcagcttgatttattaccatccaactacaataggactaatcatactgagttcgttcattctaacatcttaactaggtcatgatcaaatatcataacaaaccattgcacaccanatatctatcgcaagaccacacacacacagaaagggaggcagatcatatctaaacacaatacttanagcagaacattctatctcattggagaagaatcattatcttcagaaatgtgacagtactataatctagaaatgacgcactgt

SEQ ID NO: 51526 - DNA, 391 bp, Oryza sativa
taagctgcggtggcggggcgttctcttaagtcagtaatttctttgtgacggacacctgtctgcacttgctaatctgcctaactccagtatcctgtcatgactagttgtctcctccacactactgatgatagcactaacatatgcaccgcatgcatcagattggactttttcatataagacggataggtccatatctgaccatagttggacgatatctgaaagctataatcaactttttaaaacgtgacgcactctcaatggcacgagctgttttgacacatggtgtacacttcctcactctacttatggaggaagtttccgacactaccacgtgcacacacacaatttctgggggtatggaatcggtaactaggacaactctagctactct

SEQ ID NO: 51527 - DNA, 354 bp, Oryza sativa
  unsure (1)..(354): unsure at all n locations
gcttatcaactcaactcgatgtcgtacacaagtcattttttcggaatcggctgtatcacttaacccagtctgactcggacttagccgatccaatcatagccgatccggactccagccgattcctactctgtttctgcaacgatcttcatctttggttccacttcgatcttatcctcatctccgatactgatataaccaaatttggttgttaacacatgccccccaagtccggaaatattggtaatgtttcggaattgccatataccactccgagcaagattcgcaatctgtcgtttcccaaccgttatcctcagcgctttaaatactanaccgtcccctaaaaaatcttcaccc

SEQ ID NO: 51528 - DNA, 466 bp, Oryza sativa
  unsure (1)..(466): unsure at all n locations
ntaacacagtattgtccaagataaaataatttcctgctactgcatctctgaaagcacacaaccatcctctactctgtttcattagattgttgttccacacccatatcaaaaatatctctgggcttaaatctcgttacgacgtgccatcctttagcttttgcatcttcagcataaaaaacctgttccacttgtgatgaaaagacaaatggatcatgatctaatttatctccactatgtatctttcgggagaagttcacaagggtgaaatcaaattcatcctttttgatgccggctntatgatggacgtcataccaatcacatctgaagagcactaccttgtattttctatatgacaattctacgatgtccgataatctgccatagtaattaacaccatcatcagcaatggtaactacgccgctgttttgagtggagcggccagcctcacgcatcatagtgtggaacc

SEQ ID NO: 51529 - DNA, 490 bp, Oryza sativa
  unsure (1)..(490): unsure at all n locations
tgagcaaatctcanacttagtagcaggaactgactntgtcatcatatatcacttgttatgaaaatagatgcacaacggagacatgaattttacgtggaaaatccttgcgggaaaaaaccacgagcgtcgaccggcaatgattactatataggagttgattacaaacgtaggggaataacaatgggaatgtcaccccttcccgtatggcttacaagagtatatataggagataatagggagacacctaatatgaaaagatatggacttctactatgaaactaatccgaatatattgtgggctcaaaanttgtatcacatatttaacaattatctctatnttttataatatttaacaggtacttcttccgtattttaatgtatgacgccgttgagttttcgactaacatatgaccattcgctttattcaaagtgttgtgcatatataaaatatttatatcatgcttanataacagttgatgataaatcaagt

SEQ ID NO: 51530 - DNA, 429 bp, Oryza sativa
  unsure (1)..(429): unsure at all n locations
ggctcangcagctggaggaggaagaagacatatatatatgggtgggactttagtcccggctggtaagatacgatctttagtcccggttggtaaccgggactaaagatcccggnggggcctgacatgccctgacagcattcgaaccgggactaaagatcatctgtagccccggcttttattgcatccgggactattgtggaaatcggccgaccgacgaaagatggtttctccaccagtgctaacatctctttatggccctcatttgccgtatttggagcatctacaaacttgtggaattcttgaaggaattcttcttcaagatatataaaagctnggtccttatctttttgtttctgctgctccttagcttgcttgccccctataggtcgttcatctctagcatcatctagagagagattatgccccaca

SEQ ID NO: 51531 - DNA, 324 bp, Oryza sativa
  unsure (1)..(324): unsure at all n locations
acataacaatgaaaagaaggaaaatgtaacagcaggggcatggaagagatcaagctaaaatttcaggggcatagaatggatcgggtaaatttcaagggtatgaaagggattaagtgagttttcatgggtacatagggaatttactctatctgatacatattgattatccatgtatcgtagaatttctccatcagaaatgttatttttgacaatttctcacttgatatctataaacaatacattgccttaatcttgttntgattcacacaatgaanatgattgattgccatttatattagttcagtggccaatttaaagaatcta

SEQ ID NO: 51532 - DNA, 474 bp, Oryza sativa
  unsure (1)..(474): unsure at all n locations
accttgaaactcagctgacttcgcagcgggcgactccactccacaggcataccttgttgtagcatcgaaaccaacctctctgagacggctccaactgagaagaacttcaactctggtgtgggggaaaagagagcaagactgagtactacccactgtactcagcaagtcataccggaagaggaggtatgatgcangatataaccaaaggaagctaggggttcttttgcataaagcatgcatgtcaaagcagtagttgaaagcagttaaacagctgtagtaattaatcaatattaaccaatcactgtccaacgctacaccacgttgcaacaggcccaaccaaccacctagactacaccagttcattaagctatactaggggtgagactaatcacggagaatctggttgatcgcccataaccgctggcacggctattctaatagttttactctggccagaggtgtcaactgtcccac

SEQ ID NO: 51533 - DNA, 263 bp, Oryza sativa
gacatgcggaccccacatgtcaacctaaaggaccacagtatacagagtacacagagactgtccacgggtcgacggaagcggaccccgtgtgtcaaccgaggcaagtggccgacaaacggactccactatacaccacgagggctgcacaagtggaaaccacgcggctaccgagagcgcacacaaacacggtcaccacacgcacaagcgaacgagtaccgacaccggtacacgggtaccggggtcgacaaccgcacaacgggcat

SEQ ID NO: 51534 - DNA, 419 bp, Oryza sativa
  unsure (1)..(419): unsure at all n locations
acacataaatactcaagcttgacattcggaccactgtgtctagtactanggggtatcttctccggtggaccactcggtcatgatgatccgagcggtcaaacttgattgcaatttctgaccatcgaagatattggggcgtgtcgggctgaacaacattgatctcccgttcagtcaacttttgttttcttttagactcataagccagtgggccgccgaagatatggttgagctccttgcggtggtcttgaaatcctgccggggtgtcaccgtcgtccttcttcctcgacgtgctttgttcttcgtcagagttcttccgtgtagtctcggagtattgctccgcagactgctcgtagacgaaacaatctttggccacgcggttggagataggatggtgcgggcattgcgagttcatgatcttg

SEQ ID NO: 51535 - DNA, 345 bp, Oryza sativa
agcttcatattcctttcgactgctgtgaccaccttttttctttatcattggagggattgatcacaaccagagtggcaccttgcaatgtcatgccaccaggtagctcaatgtatggggcatatttcagcttcatgttgcaagctgggacctgagttctattggaacatgctgatgctgacagattgttttctctaaactctctaagctgctccatccccatgtacaatgtgccttgcccatcggcatctgctaaaaccaagctcctcaacgtcggatggtccttgataattgacccgagaagatagtgtcttggtgatgcagcaatcaaagagctgatagtccaca

SEQ ID NO: 51536 - DNA, 437 bp, Oryza sativa
tcctttgcttttttcttacgctagagtgtccatcgtatcctattttgagtcgctcagaacacgtatatgaagagatttgcatataaataatttctattcggtaataagtgatttgaataagcatatgaataaacaaaacaatgggagttaattatttatctaccgacacatatgtgcgaattaaattagctcaaccgattacaacgcacagacatatttgatagtaacatttaattctataagaataatataaatacataatttacacatgtagatgggctggattaagatgcctttcgattgctttaatgttcgtgctatagtacgaaacgccaggcaagtcttctcgttcttctcgtcggcgctctcccgctggctttgctcttcaacttcaactacttcgccgactcgcagaatccctgtgacgcgaacgctat

SEQ ID NO: 51537 - DNA, 184 bp, Oryza sativa
ctatccagtagagcatctaatttcattaggcgtgtgggatgcgtttagattgaatatagcactacttgcgtttatgtctcccacatccactcctcgcctatatcacaacggagcttagtaaaacagataaataattattaactgcttattggtggccatattcttaccatgtgtgaccactctg

SEQ ID NO: 51538 - DNA, 432 bp, Oryza sativa
  unsure (1)..(432): unsure at all n locations
tgcagctaatatcttattgcatacaatcttgcatatantgcatatttaacgtgtcaataaagcatataacacaaatatagttaaatcagataagatcagctgaaactccgatactaccctaatcggcaactagaagacaggctagagattggtattctaagcatgacttaatagatcaaactcaactgatgcagcattaagtatgagaagaagaacaatatctagacaatcaagccgctggaggtttcatagagtggtagatatcttatataatctaaatcaacgtcgatatataacctaatcggctgccctataccgacagatgttagccgatggtaggttagatagcgatatcgccagagattatgtaagatatatgataactcgacgaattacataaaccagattagagtatcatanagatggaaccac

SEQ ID NO: 51539 - DNA, 428 bp, Oryza sativa
  unsure (1)..(428): unsure at all n locations
atagaacactcaagctngctctaccagattactcgtcggttactagcaagcttgctctaccagattactccagtttgtgcgagaagaaaaaaaaagagccccaaattatatgtgattntataaaaataacctgaccattttattgtgcccccgaatcaaaaattgatggcaaattttgctacaggacatcgcgactttgtggaattagctccaggacaccgcacgaagtgagttttgggggaagacactcccaaaacatggctatttgacagaggacaccgcgccatttgtttagtatatttgtgctgactaggcttgagcgggcgacgcgaccggaccaaattaccctgcacatctaaagtctaatttccctccctcgcgctactgtacatcttcaacctncagctctcgtgcccatgggccacacc

SEQ ID NO: 51540 - DNA, 97 bp, Oryza sativa
  unsure (1)..(97): unsure at all n locations
cttatcttatctgcatctcttctccaatcgtatcactggccatattccaaactctatgtgtgattncatcaccttgttacttagattagcggcaatc

SEQ ID NO: 51541 - DNA, 372 bp, Oryza sativa
  unsure (1)..(372): unsure at all n locations
cgacattntgcttcactggccagcaggaccaacaagaacattctgagcagacccttccttcttgctgccttcttcctcatcagcgttgctgtccgccttccggatcctgatcttgtacttcagctcaaactcggcgatctccttctttttcttctccagtgcttcatgcatgcgagcgattacctcttcaaggccctcctttgtgcgatgcaccgcangcaagactttcctgatggtcccttcaaccaggacgccaccaaccattctgtagcagcgccttgagtgatccaatggctcgaatgcgccaatcacaagagagggttcactgactttcatctctaattcttgaatccttggggaaagttgaatcat

SEQ ID NO: 51542 - DNA, 410 bp, Oryza sativa
  unsure (1)..(410): unsure at all n locations
ataaataaatgattttgctcatactctgtgtagtttaagtcgttcatccaaagatgcgtcctgtgatatcagcgtttggtaccagcttttatcaccattatgtactaactcaacattcttcagtcctggagcacttgcaccatggattgtgaaccctttcagggagtggcaacctcccagcttgagacttactagtgatttccaggagaatctcatgatttcacctccgaccttgtagaagtactccattccaggtaaatccacaagagagagatgagttagactaggaaatgcttctggatccaacgagtcaccgacatctgcaggatgtgccggatatctggtatcagcactgacaatttcgtttccgacagtttcttccatttaacattgtccgaacaatctnctca

SEQ ID NO: 51543 - DNA, 464 bp, Oryza sativa
  unsure (1)..(464): unsure at all n locations
gcttcatcgacaacagcgtcaacaccggcatcaactatttatgtttctacttcaacaatgctagtgtagactcaagtcggcgaaattgtcttccgggtacaccacgatgccgatcttgactgatccatcaatgaccggaagcgagaacgccgtggatacaaccctgcgcgactgcatgtcgaaggatccttccgcataagtggagaacggaacgtcgacgacatccgagcccgatgaggatcctatggcggccaaatctgaacgatgacctcgcacggaggacagaacgactacnggaatcagtggctaatctcagtaacgcgttcgaggaggccattgccggagcacagncagaacaaccgatatctggcggcgccgatggtgaacgacctgagcagcggacatcacctcaacgagccactccttcacctcgcggcaccagcggtctgcatgaccatttgaat

SEQ ID NO: 51544 - DNA, 493 bp, Oryza sativa
  unsure (1)..(493): unsure at all n locations
cgagatcgagctctgccatggcctgccctgtctctgcccgtctggagaggaaggcatggacttttctgaaaagtggaacaatcatagggataaatatgaaaacatacaaaccaatgacatgtagacccatggacctaagtgaagttcacataaagtatagggacttctttgcaagactgtcagagactgacagtggaccccctggagataatatctgagaatatacaagagagatacctacaacttgtaaaatccatataaaatcaaatatagcttattttgagatgagtcacatttctgtgatcaccaaattataagatttagagttatgaaataaaaacttgcactcacagtacaaatatagcctctataattcatctaagattaatcatgctttatacaaactcataaaatgcatacagaattcatttcaactcattntagagcaaacttagtttctacagatccaccaacatgttctctagaaacaaag

SEQ ID NO: 51545 - DNA, 271 bp, Oryza sativa
  unsure (1)..(271): unsure at all n locations
aaacatttattatcccaatcgatgtcgagatgtttccgtgtgtattcaattttcgatattggttttcgcttaacatntatatccaatttctagaanatatatggttactaaaatggttgaagttgtttctcgactcttcttttatcgcatagaggaaccagttcctgtaacttaccgctctctatgtccatgtcaactatccatcgtagatagcagcgtatgtatgagaagtcctttatgcatatgccgcgttagtcacccaaagttggat

SEQ ID NO: 51546 - DNA, 295 bp, Oryza sativa
ggactcaatctcaatgctcttgtatgcgtgataagaggccatgatcgtcgtggcaaatatcaactggctctttgtacctgatctgggagcatccttcatggtctcaccctaggcttgcacgcgatctacctaatacttaatcttagggccacttgtatcgatgcccaaaacgggcgagctccgtgaatgcactctttctactacttctccaaagccatatgttgctgtccttctttgacactcatgacttatatgcttgcaacacccactagtgtaactgcactatatgtgaact

SEQ ID NO: 51547 - DNA, 469 bp, Oryza sativa
  unsure (1)..(469): unsure at all n locations
gcttgacaatgtntactgtgtctcataaccttctattctatatcattgntcgaatgtgatagactgaaactgatgtgcttacaaataagccattggtgaaatcaaatggcttcctgagcttgcttgggttgcgctcgaccttcttcaagcacgggaatgaccgtgagatcaagattacaaggcatatgtgcaagtgccccacttaccggtgagttggaacttatctgcttaatgcatcaacgatgcatgatgttttcacttcaatatccatattaaataattcattcaatatctattagtatagaacgctctnttcactaagactgcatgggttcaatggctgctcctttgagctacaccaatactacctcatcccgaataagttatttttttcacagtccaatatccatacnaactagaaactactatccctacttataaatccaagcactatttaacttatttcttc

SEQ ID NO: 51548 - DNA, 363 bp, Oryza sativa
  unsure (1)..(363): unsure at all n locations
tccagaatctggatatagcctggaactgagagaagaacaactgctttccaccttattgggtgccaaaagtaattctgaggaacaatatttagggagatacaaatagccaggtagcaagctcaatcaatcgaactagcaactcacgcgccttgactctactcattcattaaaaagaatgtcattcctgtctctagagggaaaacaataccttgcatagcttcttaattcttgtgacagacactgatatggatctctgattctaatcctctatatatcagaaatacgtggttggccaatctgctggcctgcagtttattggaagtaattccatacagaanacaaaatgtcagacagatctaccat

SEQ ID NO: 51549 - DNA, 450 bp, Oryza sativa
  unsure (1)..(450): unsure at all n locations
cgcgccagcatcanatctgtgaagtacctatataaatatgtgtatataggccatgagtcggtatactttggcttggatgtcctattatataacgaattccgtcgtcatatgttgtataaatcttaatttcacaaaccaatatatagcgtataaaataaaaaaacccaaacacattggtccagcctacctgtgtcggtcattttaaatagggcatagcatgtattcactgacatctatatcgctacatgtcttacgctccttatatatgtatttgctataggcatctgacatacatgaccgattctgattatgtgctcaattttagaatctctttataaagcgggtgagctcactttacaaatccggatggatgtgatgcattagcttaccacaaattggcacgattagattaatggcaacgtgaagtggataacttacgtgctctcattg

SEQ ID NO: 51550 - DNA, 326 bp, Oryza sativa
tattatggcggcgctcaacgaacaaacaggataccaaacaaaggggaatctatccttttcctgtccgtaaaaaatgcttaccgagagcaataaagtggatacattatctttctgagcaacctctttggattcttaaaccacccttgcatcagataccgactgtctgggtacttatatattattccttcacggattatagatcgtcagctatattagcattgggtttactgctcttctcagaagggtaggactatagataagaacgcagccaattgcgatattctacggatgcctgatccttctcgatatcctgcagactaactccc

SEQ ID NO: 51551 - DNA, 477 bp, Oryza sativa
  unsure (1)..(477): unsure at all n locations
taggatcanaagttgcctggagggtggtggcaagtcttatctctaactactccaactgataatgactcatggaagatggtgctggtaaggggcaaagataagatgcaagggatgtggggaatttggtcatgttcaaacaagctacaagtgttcccttaatggaatcaaaaaaaggctagtgtactaataccaattatttttgtctggagtacagtttcataactgtaatgcattattttgtattgtaatttgctggaagaggaagccaaggaggaacactacaaaatatgggaacacttctgacattcctagtcccaaaagaccaacagtgcagacaatacttgaagaaagtctaggaagaattacaagaaggtaatcatctacaatacattcacattactttagatnttgtcctatttcngtctattcacttcattgttcaaataccatggcttacagcccgctagcatcattgat

SEQ ID NO: 51552 - DNA, 472 bp, Oryza sativa
  unsure (1)..(472): unsure at all n locations
atccttaagtcacctgcggcatgcaagcttctgctgccactcgatctccagntggcagcaattattttcttatccagtacctaacctctcacccaggttcatgtgaggtgtgaccctatctcctctcaagactcacatgagctttggagcaaaagaacatggcctataatctatggcactcttaaaaatctaacctattagtttcaaaagaaaaaaaaatctaaccttggccatgttagaggctcatcatggtgtggcatggaattctttctttgctcggataaataaaactgacagattcagaagcctgatcttggggacacgttgctcgtcactacatgaggagagcttcatcngtgctgctgttgtgttccccacaaaactactccgcatgtcaactgtctcatgtaaatcatattaaaatcttggtgttgaacttgccattgtgacttggactgactcatctgtcaat

SEQ ID NO: 51553 - DNA, 378 bp, Oryza sativa
  unsure (1)..(378): unsure at all n locations
agcttgcccgcaggtacaccgaacacgcacttattgtggtttatttntatgcgggcggagcggagactctcaaaagtgtttgctagatccgagagtaaggtctcttggttgcgcgtctttacaaccaagtcatcgacataagcctcaacattacgtcctatttggctacccaaagaaattctagtattacgttgaaaagtatgacctgcattctttaacccgaagggcattgtcgtataacaataagttcctatgggggtaatgaatgcagntntttcctcatcctncctagccatgtgaatctgatggtaaccagagtatgcatgtagaaaacacaaaaggtcgcaccctcgtgtggagtcgacgatctgatctatg

SEQ ID NO: 51554 - DNA, 473 bp, Oryza sativa
  unsure (1)..(473): unsure at all n locations
ggggccaggtttcgaccaggccaccctatttggcccatattactattaccttgagggaaaattaatttcagcccattaatccttgggccctggtgtcccaatccatgcagcaattgaagcaaaaagtacaccgaaggtccctcaacttgtcatcgagttacaaaatcgtcccccaaccgcaaaaccagataaccggcgtcccttaactaatcaaaaccggttacaatagatccttcggtggttttgaccccggttttgtcctacgtggtggctgaatcagtgtgggacccacgtgggccccacatgtcaggatgccacgtcatctctctcctccctcttctcttcctcagntccacctatctctctccgatgccgataccagccgatagcaatagagnttaagcaatcggctatatatccaatgtagatgatgatataaaggcaatctgttgatgatgatgtaatanaataac

SEQ ID NO: 51555 - DNA, 475 bp, Oryza sativa
  unsure (1)..(475): unsure at all n locations
ctctaagcacctgcggctgcaagctgggcttccaggcggtcgcttcccgtttttataccaccgaccgtgcccatgcgtcgcggcggacaacatcctcccctcgactcactctcgaccggcggccgcctatgacgacgagaaaagtggagagaaagaggggcagagacgatggtatgtggcacactgacgtgtccgcccatgtgggcccacactgactcagccgccacgtatgacaaaaccgggttcaaaaccaccaaagcacctaaagtgaatgggttttgtaagttgagggatgtcctatatctggttntttggttgggggacgaatttgtaattcgatgacaagttgagggaccatcggtgtactttnttcctttcagaattttatccaatcgagaaaggaataagtctagccgttcctcaactntacgtcaagtctatatgacatccctaatctctaataccagaaatctct

SEQ ID NO: 51556 - DNA, 472 bp, Oryza sativa
tcagagttcaggagatggatgccacaacaaaggggaaattattgtgtgctatggatgctaggtttaacattgatgaggaggccagattaagatgcatcaagtagagcccaaattttgttgtacccatgggcctttatgtacagaatgttatgtagtggagcttgtgtacatctaatggttggtagggaatctagagttgacattcatatgtacttggttaatgtttacgtaatatggaggtgatgatgatgagacgcaatttcgatttataatatttcttaagttcttttaaaagaattaataaatagcctttagtaaagttgtctgtctatgctacttggaagatgcttccttactctgccaaaaggagaactacactatgcttcacttatttatagatgacaacttgatatcccgtaataatactgtaccgaataatgaagaattctgctagtcatgtcagcagtctcat

SEQ ID NO: 51557 - DNA, 372 bp, Oryza sativa
gatccttaagtcacctgaggctgcagctataaagcctcgttccgcgtgcctgtttgcttggctgtgtgccatgcagagctgaaatggggcgcgctttggtattcagccggcgagaggccggcggcgggttctgccccgcgcaccgcgacgccgctagtcgtgctccgagagccgcgcttccaactctacccgcctgcacgggtcgcgcgccagcttctgacacggggactgcacgcctcacgacgcaagagtcgcggcctggccactcaggcccgcttcgaccgggccgggaccgaaagattacttgctgacttacgggggctgactatgcggcgcgcttcggggttggttggctctaccttgatcgtatgc

SEQ ID NO: 51558 - DNA, 465 bp, Oryza sativa
  unsure (1)..(465): unsure at all n locations
ctttccgagacgaaataccactacacagtacacgtcttggactgcatacaatgcgtgtgctagacaccgatccaacaacatccagagctactgcaccacaaagtccacgacgaatcctctttcggcaccgatctcccatatgctgtgctccaaagttgcccagaacaagttctctcctgaagcagtggctttgggaagtactatacgcgccatgcagatctttttgttaccatgcgaaatctgcgagacatttgcaagatccacaacgccgctggggcccccggggttctacgcccttgtgtcgtgtgttctaactaatgcagcatactaagctgcttgcctgcagttntgctggttaaattgacccgctcttttcttattcacttacctatgttatttcatatttttgttagcacatttntaaacttgctaatgatttatttcgtatgtaagaattctatatcg

SEQ ID NO: 51559 - DNA, 347 bp, Oryza sativa
  unsure (1)..(347): unsure at all n locations
tttttccccttcgaatntaattgttgttgttgccgtatgttttcaacttctgaatatgcaccatggacgttgttttttaaaagtgagattaattagtctttgttttcttttgtcatataggatattaacagttgtacctcaatgcactattgactctattttgntttaatgtataactatgacccgtttttcttattaaaaatatgcttccatagtctgtatttaacttcttaaaatagaaaggaaggtgatgtctgtatttaactctctaaaatgaagagatgatcacccttcacctaggcattatcagatcatgccacccatttagctagcagggtcattctcct

SEQ ID NO: 51560 - DNA, 360 bp, Oryza sativa
ctaagctgtcaatttgcatttgctaagccactccagctgtgaactgttgaccatggcaataaagtgcgcatagcgagaaaacttatccacaaccaccaatatgcagttgaatcccaatgagagaggtaatccttctataaaatccaaagacaccacttgccaggcatgttctggtacatgttatggctgaagaaatcccgggtatcatacccgttctgccttagcttgtttacacatagaacaggaatccacaaagagctgcaccgacttcttgagaccatgccaagcaaacagtctgcgcaatctggtatatgttacctgcactacagaatggtcaccaacagcagcattgtgcaatgc

SEQ ID NO: 51561 - DNA, 382 bp, Oryza sativa
  unsure (1)..(382): unsure at all n locations
acttcttggagaggattcngtggtggttgttggtgaaatgggataagaggcaaagaatangtaagaaatttgaaggctgcattctacctcatattgtcaaggaattgaatgaaaaaagtagagatttaaacatggtggtcacaaggaatggagactttgaggcagaaattgaggtcaagggaggtagtgggtttagacatgttgtgaatntggagcacaaaacatgtacatgtagggaattccaaatctcagggaagccttgtatccatgctatagcattcatcacatcaattagaggaaggcttgcagattatgtggatgattgctntagtgtgcattgattcanggcagcatatgagaaatngatcccttattacctgac

SEQ ID NO: 51562 - DNA, 458 bp, Oryza sativa
catacacacgcctttcctgttcagcccaatggccgagccagcataggcgcacgatctctttccgagtatgagcggtgacgacggggagccaaacccacgccgtcgagctcgtactccaccgacccctccacgccaaagtcctaagcgggagaaggcgctcgagagggctgaaggatccgcgacttcgacatccacaggatgtggagaatggcggcgagatggagagcgtcgccttctcgtctacggcgacggcagcacgccccatggcgcgctccaagctgcaggcgcgctcctacgtcacccgcctgtcgcccatgacccggagtctccagcccaacgttggctggacgatgtggccaaattgagcatgactgcaatgcagcgcctatatgctggtgggcggtcctacgccaccaatgcctctggtgctgctaccaccggctccgcgtttcaagacg

SEQ ID NO: 51563 - DNA, 167 bp, Oryza sativa
  unsure (1)..(167): unsure at all n locations
taagcaccgcngctgcagcttgtacagttgggaaggggttgttagacacaatatttgtatcttctcttgccgatgttcccttaggcgctgccatacatatcatataaatcgcacgtagtaggggtgggcaattatctatagcatctagctctgaatcgaaactgatt

SEQ ID NO: 51564 - DNA, 412 bp, Oryza sativa
  unsure (1)..(412): unsure at all n locations
aatgtgtttgaaattaccaaccctaatagttttgtattggcaactttttcaaaaactcaatagattttgatttggggtaaaatctcacttttaacaaaaacaaagatcactaaagatcctgtttagacaaaaaagagttgttttcttttgaaaataagaaattttactccaaaagctttggaaaacatttcaaacacatgttgaaatactttngaaaagattntcacanattgtggccttttacatacgatttttgacttttgactaaatatgctcttttgaaaacaatgaatgcaacttttgagatttttcaagttttgagagcaagagatacatgaatgtggttggcacaatttcactctaaagtatctctcacttgaaatcaaagagtngaacatttaggttaactcat

SEQ ID NO: 51565 - DNA, 447 bp, Oryza sativa
  unsure (1)..(447): unsure at all n locations
ntgtgtaggtntgtgacacgtttctgatctgatcagaaacggtgacaacagcaacggcgggatggatagatgaatcaccggccgaccggccgcctatctacttgacggcccagcactgggtgccggcgtcgaagacggccggcgcagtggcgttcgccggcggcgggaaccatagacaccttgtacatgagcgtcagcgccacgctcaccttcacgtgcaccgtcccctccgcggcctcgcgctccagctccgccgccgtgccgccatccaccgccaccacgccgcggaacgccgggtgcagcacctgcatatccgaaaaaaagtcaaattaagaacatcatcagaacgtggagctagttaaattgtaaagaaaaaacgtgtaggaaattaattaatgtacggaacggttgtgttcttgggggtctggcggaagaagcggagcgcgt

SEQ ID NO: 51566 - DNA, 442 bp, Oryza sativa
tgaggtatcactccaccaagagtggtgatgagttgaccagcctcaaagactacgtaacccggatgaaggagggccagagtgagatctattacatcactggtgagagcaagaaggctgttgagaactcccccttcctcgagaagctgaagaagaagggttatgaggtcctgtacatggttgatgccattgatgagtacgctgttggtcagcttaaggagtttgaaggcaagaagctcgtctctgccaccaaggaaggtctgaagcttgatgagagtgaggacgagaagaagcggcaggaggaactcaaggagaagttcgagggtctgtgcaaggtgatcaaggaggtgctcggtgacaaggtggagaatgtttgtgtctctgaccgtgtggtggactcttcctgctgtctagtcactggggagtatggctgtgactgctacat

SEQ ID NO: 51567 - DNA, 309 bp, Oryza sativa
ctgctagagctagaagaatagcactcaagaagatatatggcgatgtatattctcaatacaatcaattatgggactacgctgctgagttgagaacgtctaacccacggagctgttttttcttgtacttgtcaaatggacgattcaatacactatatgtatcattagatccttgcaagagacgattcaaaatcggttgtacgccactaattggcttaaatggttgccacataataacaaagttggggggacatttgctcccagttgttggaatggatccaagtaattgcatgttccctattgccatggctg

SEQ ID NO: 51568 - DNA, 99 bp, Oryza sativa
ttaggacactggaggcatagggcatcccgcagaacattatcgaacgaatctagtaccccattgcgagacgctacaagtgcataccatctcgactgaggg

SEQ ID NO: 51569 - DNA, 476 bp, Oryza sativa
taacacgcaagtgtgtcacatcatcatccactgataattattatttagaatactttaaatcacatgcgagtgtgccacatcatcaccaactagtaattattatctagagtattctaaatatcatgcaaacatgacatataatttataattttgttgtatttttagaactcaatatcaagcaatgtcaaatcattatctccacatcattttcacattatttaaacatatacatatatcatttgtataatatataacatgcattcatccacatatcttacaacaaagcacggggtatcaactagttatataggaagataggattggaaacacaattcaggaaacatgtccacttgttaggaatttaaaggtgtggggtaaaaagttaagcacataccaacaaatccattgcctataatttcaaggagtacatgaatattaaggacatatttctttacctgagaatgggttccatactt

SEQ ID NO: 51570 - DNA, 175 bp, Oryza sativa
tttgatagagttttcactacttgaccagacaaagacgcatgtcgtgatttccactacactacaagatctttttaactggtcaagactgatcagttgatggccacttctatatgcgaccagatgctgatcatggaattggttcataataggctactattcgacttgatcggatgga

SEQ ID NO: 51571 - DNA, 452 bp, Oryza sativa
  unsure (1)..(452): unsure at all n locations
ntatcgactggatctgtaagctctacttgttagagaataattatttatatttctgttctgaattactatggattactgtcatatggatatttcagtcaccacgatatattgatattcagttacgagctatattggttagaattgtatcttatctggattacctcggctctatctaattctgactaggagtaactggaagtctattctgagcatgcctgaacccatcatttgatagatttgaaatcttccctgtagatccgcttgcggaagccaatgctgacgactccagcgttggcgctggatcaaacgactatgtacacgtgcgcattcagcagcgcatcggaagacagagtctgactactgttcatggcttgaagaaagagtacagttacaacaaaatactcaaggatctgaanaaggagatctcgtagtatggtactgtagtccaagat

SEQ ID NO: 51572 - DNA, 361 bp, Oryza sativa
  unsure (1)..(361): unsure at all n locations
gactccctccgtcccataaaaaacgaatctatgaccagatgtatcatattctagtacgatgaatctggacatatgtatgtctagaattgtagtactataacatgtcacatgcggtactanggttggtttttgtgggacaaagagaatatgtgtattgcatgtaagcattgtgaaaccagaactgaaactatctgtagtcattgacatgctgcgttaggtgggaggggcaggtacatgatatttcacaagttggcaaacatagacctgaacatttttgtattctggtaataaagaaatacacaagaccgatacttctgtatttctgtggaaatcggatctcctgtagctctattgttctatg

SEQ ID NO: 51573 - DNA, 434 bp, Oryza sativa
  unsure (1)..(434): unsure at all n locations
tgatcaaccattaacaagtaatcctaatgtgggagggttttgtcatggggatgcagaaatagtgcttcaggatccattacgcgttcaaggccttttgttcttcttcgcatccgttattttggcacaagtttttttggttctcaaaaagaaacagtttgaaaaggttcaattgtacgaaatgaatttctaggtcccgggatttcttaccatcaagttggtaaaaagccgcgatttattggcgattgctagaattctctatgatccattttggaaatcttttttttgtttagactattttttgtttgcgagatgtcttgtctgcaattccttatttctatcatctcatgcaaaacgaggagaatgcaaggcaagggcgagaacaataaaaggaacaaatccttttaggagggatngctggtcttcttaatcctcta

SEQ ID NO: 51574 - DNA, 174 bp, Oryza sativa
cttgccgtgctgacttggctgacaggatgctgtttattgacaccgtcagacgtaaatacccttgcgccttatctcctcttatccactcgcaagcagtacgggtggtagaaccctagctctaccgattccatccaaacagtgcccattcccaccgagtccgtcaccctcgatact

SEQ ID NO: 51575 - DNA, 467 bp, Oryza sativa
  unsure (1)..(467): unsure at all n locations
tactcagctagcttcgctanggtccttgtaaggattgacccctttatctgaagtacgcttgaaggtcatcgtgctgttgctgcattatgttgttgaagtttgcgaactgagcatcagcaaattgttgccattattgtgtttatttcacaggagcaattttgatctttctaaccatggctaacatcataatcaattcatcccccctaatgggtctaagatcacctctagaaaacaaagtcatagcaatccatttatgcatgagcctaagtgtagcattatggatatcattcgtcctaggtttcttgcaaattagagcaccagaaatatctttccaaaacctatttttctcgaacccagaaattcctttctgaagatcgattttacaggaatcgtgaaaaccaatatgtgtgcttaagcctgtccatgtcagtgtatactccttactgaaaaagcgaaagggaaataca

SEQ ID NO: 51576 - DNA, 392 bp, Oryza sativa
ttagcacgcgctgcacttggtaagttacccttcgatgttttatccacgatcgcgggagaaggcccaaatggaacctttttattggctgtggatgatttcggtaatggatatcaatggagagataatcaatctcctaacaacttaaattattaaaggcatattttataaagtaagacataaggcttaccattacttaaaatatactttatattgctctatgcaacatgttcatatataatactaagtatgtgactgcttactatacatgacgctttctactgtaacaaattctataatacaacgctaaatcagatacaccatatcatgtctactgactagatgattttgaacatagttaatagtaatgtctcatgattctattactttagact

SEQ ID NO: 51577 - DNA, 484 bp, Oryza sativa
ccataaaactcagcttgtttgataaaaagattgcctaatgatcccactgatgttattcttctggtttgccactggatggaatcctgtgctcttttgcagaagcgggaggcagatcaaagaaagctgctcttgggggccaagctcataacgcaaattgcaagtgatgtgtacaactctagatttatatggaggccgactgggagactgcagtgctgatcttttggcgggggtagagtatgctttgttgattgtttggatgctgggttcatggctcctgttagtcctggaagtcttgttatgcagttgctgattctatgccttctggatagtccctgtatggacaaaaacaactggtgtgctagcttctgtcctttcttttctgatcagtttggaagactgtgatcttgtaatctctttcatttctagtaatggaaatggggtgtaatgcccttggtcagaaaaaaaaatctctaatctgccgatg

SEQ ID NO: 51578 - DNA, 427 bp, Oryza sativa
cgcgacactatacacaacgtctagctgcgagcggtcgcagactagcagtgaccaggatgcagctctttgtctgcaggatgacagcttggggcgcgtatacatggtggggccgtcttggcttgacattaagtatgagaatggtgaaccatatgttgttgatccgactgacgctgttgataccacgagcgcgactggcccgggtgtgagacctctttcatgctgaccatgggaactgatgatgtgtacgtgactcgattctatggactgaacatctgaattgaggtagatgggtgcctagccaactcccaacttgcatgtactcctataaacgatgcatcaggagctcttacatatacctgtgaatgataactaactcctctagatgagcgtatcatggagcgacacttgcgtcgcttgatataaagga

SEQ ID NO: 51579 - DNA, 398 bp, Oryza sativa
  unsure (1)..(398): unsure at all n locations
ggaccctaagcgactgagctgcagctgatatgttctactatgctgtttgtcatttttttatctaattgggatatacttagtgcatgtcatgtctattntttttatctaattgggattttgcatctcatttagattatttttaaactcaaactttatggctgtgcgtgcatcctaaatacagaggatagggatgcaagcatgttccttatcttaaaaaactgtaaagtaaatgatccatggcgttcgcgaataagaaaatgatccatgaaaaataatgtactaaaatntaatcgaagtaagcacgctagctaggtttgcttttgcttagatcaggccggtggcgggcgctggcgcaagctacctagtgtgccgggatgcgtgatcacccgcatgaatct

SEQ ID NO: 51580 - DNA, 478 bp, Oryza sativa
  unsure (1)..(478): unsure at all n locations
ntaaggtaatgtgcaattatgcaaccaacacaccatggtttatcatcccaaagtttaagatcaggtcatctctcaaatatactctagtttaatggctaggctaattntgaagatgattttccttcagtttcatgattgattctgcatgcaagactcaagtttcatgaccgattctgtgatctggatggaagcttttggatgttattcgtgtgaggcactaatctgccatgcaaacacctggctggctaacatattcaataaaagatttttgtgtcgggtactttacataaacataaacaacaagtagtgtcgttgtctaagctttaatgcaactatccaagcagcaaccaggatagaacatccctttagcagaattgaattaaaaatcaaggaacatatcaataagtaaacacgaagtatactctgngaacaaagagagcagctagacagactgcanatatgatgcgtaatttggata

SEQ ID NO: 51581 - DNA, 312 bp, Oryza sativa
  unsure (1)..(312): unsure at all n locations
taaagaagagtttccccagagatgacctaaacccaatctgtcccataagagtagtttcgctagcttctagatcgtgtgttgtttgcttgtgtgtacgggtatggtttgcctcattggtggggatgcgaccatactangttgtttgcttaagcaacttgaatcaataaaaatctactcacaacagatcattagtcaagtgggttaaggtcttatctttagcaaccgctctcttccatctctcttcctgccttgcagaagatggacagtgtagatagaaaacaacgatggtgattaaagcacagataatggtca

SEQ ID NO: 51582 - DNA, 356 bp, Oryza sativa
  unsure (1)..(356): unsure at all n locations
gcatgagcaagtggaatgtatggcgaatcattactctgacatagtcctcggttagcaagtagcagagtactttgactttgcttgaagtgtttttacttatatttttaatgggcaattgcatccatgccctcattttgaatgtcaactgctattttacccctactttntaaggtttgcatttttgccacctctttttgaaaacgaaacacgccgttgccctcactcttgacacccgttagatgacacccatggctttgggttaaaaaaatacaaattgaaacagaanaaggatttaatttactattgtacccttgagtgaatggataaggacccaagcccattccttcgctgagctc

SEQ ID NO: 51583 - DNA, 292 bp, Oryza sativa
  unsure (1)..(292): unsure at all n locations
tcggatttattaaccattcttgtgcttgcattgcttcaccataactcaccttcttttgcatgatcataatgttactcatgtctctgtatgccgtgagttaattttgtgtttaactaagtcaaatattggtattagcattagagcggtattattgtatttgttactatgatgttctattcaactattttgttcggtcgtgctatctaataaggagcactataaagatgtgatgtaattattgtgtattaaggttttcgatacaacaaacaaacactcgatgcctatntaaaat

SEQ ID NO: 51584 - DNA, 457 bp, Oryza sativa
tgttctctggttttgtggatacgacaccattaccttgtctcctctgaagttatcctcgacggctcatgattcttgtcgaatagacaaggatgggccgcactaagatccttctcaggctcggatgtcgtcgacgttgcgttctccgcttcagcgggaggatccttccacatggagtcgtcttgggttgtagccaccgtgttctcgcttccgggcattgatggaccatctgagatcggcaccgtggtgtataccgggaagacgatttctctgacttgagtccacaccagccttgtccaagtaggaactccttggttgaggttggtgttagcgctgctgtcgacgaaactggatgacatattagtagatccttgagcaccaagtcaccctacctggcgcgccactgttgcacgaggatacctctagacccgatattaacggcattgcggtccgctggtac

SEQ ID NO: 51585 - DNA, 274 bp, Oryza sativa
acttctcgttcagaacactgaatatatacacacggtcgtcgacagcaacatgccgtacgtacactggcctgaaaaatatcatcaaattgactcagagaagaggtaactacacgggttgactgattagactgaatatagatcgtgcaccactttacccgcttactgttctgacagagctatacagtaagagtggcatatggacagtagttatgcatatatcgactcatacaatgtattcaatttgtttacagaatcactgacaagacatgacttg

SEQ ID NO: 51586 - DNA, 414 bp, Oryza sativa
tactaagcttacagtgaaccatatatggagatggcgactaaaggtgctgtttgtactgttatagaatttcaagattacaatggatctacgaaaagatcgtgtatttacaactacaacggaatagtatacaaagtcaacacaaatcattaaatggaatttatggctacacaaaccgttgaagatagttctagacctggaccaagacaaactcgcgtaggtaatttattgaaaccctcgaattcacaatatgggaaagtagctccgggttgagggactactccttttatggcggtcgcaatggctttattcgcgggattcctatctatttatttagaaattattaatcttccgttttactggacggaatttaatgaattagtttctactaacgaagactacgaatcatagttttcc

SEQ ID NO: 51587 - DNA, 266 bp, Oryza sativa
ctttttctgtccaggggaatttttcttttttggtggaggggggagtgcaccttataagtaggagggactgttgggaaagatggtgagtatcatattaagtagggtgcattatgatggatggctttggtttcttacttgatgactcggctgatacagtatttgacctttgcattgactgatatatgtacttatatgagatgagaatgcttatgcggagattatttgactcatcatatacattgagtaatttggatgtacattaagct

SEQ ID NO: 51588 - DNA, 469 bp, Oryza sativa
  unsure (1)..(469): unsure at all n locations
ntgttgttccgcttcttggcaacattatggaatatatctaatattctcaagccggccggntgtgcctcatcgccctctagatcaatccagctaacgcgcgttatacgctttaaggggaaaaaaaaagaagaaaaaaccaacaggctgctgggctgttcggccccaagtaacgcaagcctgggcctgcctgggggcctggtgctcgtgcttaacgtcagagctgcgcgctgtctggactaataacggaccgaagccgagcaggcagaaatagaacaaacataaacggcccgtttggtcgggggagttttagaggggattgggagtttaaagagatgaggctattaactgttttgtttggttggaagatatgagaatcttggtggcataaggatgaggaattgagaaagaaactacctccttttcaattcctgggtaggggtggtaattgggagggaattcctccttactc

SEQ ID NO: 51589 - DNA, 438 bp, Oryza sativa
  unsure (1)..(438): unsure at all n locations
cttatatttatatatatttctatacaaatagttcccttctgacgtcgattgttcaaggaaatgctcttctactgatgtatatttcctccctgtaattctgctactttttatactataagtctattcatagcatggattaatgcctaatgcagagcactgacgaataactcattttcactcgcagcatgtaatggagctactgatagccttgcagtaatgccttctgctcttgcacttacggagaaattggattnttgggactcttactttctgtttgtatgaaatgaatgtaattagttttcagtggcttatcctaagctgatgtggtgatgaatatgatgtttaaatgagtaaatcatgtattgtgaatgggtgactgattgtggtgactgaatggatatgatgcangcaattttntagacattctatgcggtattc

SEQ ID NO: 51590 - DNA, 426 bp, Oryza sativa
  unsure (1)..(426): unsure at all n locations
tgacattacggaccactggatctagtaccagggggtaccttcctcggtggaccactcggtcangatgatccgagcggtcaaacttgattgcaatctctgaccatcgaagatattggggcgtgtcgggctgaacagcattgatctcccgttcggtcaacttttgcttccttttagactcataagccacggggccaccgaagatatggttaagctccttgcggtggtcttgatatcctgccggggtgtcgccgtcgtccttcttcctcgacgtgctttgttcttcgtcggggttcttccgcgtagtcttagtgtattgatccgcgaattgcttgtagacgaaacaatctttggccacgtggttggagttaggatggtgcgggcgttgtgaagtcatgatcttgtcgaacgtgttgacgcgcgaacgct

SEQ ID NO: 51591 - DNA, 433 bp, Oryza sativa
  unsure (1)..(433): unsure at all n locations
atccttaagtcacctgcggctgcagcttactggtatgcagcggaaagttacctgttatatgatattcatgttaccaagtaataaatantaagcatgtattaaaccacgttgtataaaaatacaagtgcgtttaaggatacaataatacacaaataatacacagctccaccattgtacatggtataaaataaatgcaaaaaaaaataacccctcaaagatgaaggagcagaanatggacacaaaagtcactctgatcatncaatgctactgggccatacaaaattatgcgtaaaattcgtcatttaaatttaacctaatattattctgagaatgataatacgcatgctacaatctgattcaagtgnccgtanaaaaagatcttcagcacattggtagcagaattcagtanattgataatggtcgcttacttatg

SEQ ID NO: 51592 - DNA, 475 bp, Oryza sativa
tgagctatggcttgatgcaacgggatggtagaaatgcagcggcacttgcttacctgttggcattgatcacctgccagcatgcctaagagaaattcacataaaccgggattatggtgctgacagacgtgacatagaaactgcaaaatctgcgctgagtagcttatttgccacacatcatcctggtgctggcttgatttttggaggtgcaccttggaattatccttctaatgaccctgaccagtggtgactacttgtgaaagaaagatgcggtttggaaggcttgaacagttgaacccattgacttcacttgataaaagtgtccgagctattctctaaccggaaacaagttgctaagaattttgtgacgagaatggcacagagagaggatcaatgagaggagagagtgaacagagagcaagcatttgaatgatgaacagcgatgaccgacaagttaagttgaacgccagttcaagtg

SEQ ID NO: 51593 - DNA, 419 bp, Oryza sativa
  unsure (1)..(419): unsure at all n locations
tgaattatgctggatcgaggaggtgggcatgaaaaaatcgctattttcttagacattntcaggcatgcgggctgtccaaccacatgaaaaaaaaggttntggccgcatgaaaaaatggttttttagtagtgaccatgccacggtgtcatcattgtgtgaggatcttcttaggtgtttctttngcatttggtttccgatgtgctatcggagctggctatatatctcttgtggtgattacttatagtagcanagttaaataatggacgttgctacgcagtgtgtagtagcaccatgggctaatccggtgacctcttccttgcacanatagtgtatgcgccgtcctctctntatanaatagaccgcgtgctatttctgctaccgttcttttttcgaacacaccatcctacatgatagtgttg

SEQ ID NO: 51594 - DNA, 478 bp, Oryza sativa
  unsure (1)..(478): unsure at all n locations
nggaggtctcccgacgtggctgatccccacgggctgggtgatcctggttagtaatgtcgtgtgggtaaagtgtaccccctctgcagaggttatcaaactgttcgaacagctgtgcccatggtcatgggcggatgtgaggtgattcctatcgtagttttgtttgactactgcttgtgaaattgctgttgtggaaaggggttcgatgtttgtaaaatctgcagctgatgggatcagctaggcccgggtggccgtttgaaagttgttggcccgggtggccgtttgaaaagctgttggccgggtgccaaccttgttttcaaattttaaagactgatacattgcacatactccgaccggacgagacgcactgtctcaaccgtgtcgtttgagaagcactcacttagttgtttttagaaaagagctcacataaaatcaacttgcaaaacaacagcctttccttgaagccctgcataaacactta

SEQ ID NO: 51595 - DNA, 392 bp, Oryza sativa
  unsure (1)..(392): unsure at all n locations
atccttanagtcacctgcggctgcagcttattagagaaantaatagggacatgtttgttctgtatgctctttctccacctggccacggcgcagcggcacgctgcacagggaggccggtgcacgtgcgagcacgcaccgagatggggaggcagtggcagcgagtatagataaggaggaaagggtgggcggctcgggatgggggcggagatggagcaaagctcaccatgcacaacggaggcgcggacgggatgcggacaggttcngcaaagtcagtggtggcttcgctggtactttgagaggtcctggcttacgcctagcgatggcggtcaagaggagaggngggtcccgagcgctgttataagccatcgtgggagaggagccgtggaggagct

SEQ ID NO: 51596 - DNA, 485 bp, Oryza sativa
  unsure (1)..(485): unsure at all n locations
tagcggcagatcagtgtggctcatcattgatcgcaccatgttctacaatgtatgattccttcgttcagacgccccattccactgaggcgttcctggcggagtgagttgtggaacaattccacactcctttagatgattgccaaattcaaggctcaagtactctccaccacgatcagatcgtatatacttgattgtcttacccaaatgattgtgtacctcattctgaaattccttgaacttttcaaaggactcaggcttatacctcattaagtagacataactatatctactaaagtcatcggtaaaggtaatgaagtacccaaaaccacctctggcagttgagctcattggtccacatacatcagtatgtactagtttcaatagttcacttgccctttcactttgacccgcgaaaggtgcctttagtcatttgccaagtaaacaagattcgcatgtctcanatgactcagaatcaaacgagtgtc

SEQ ID NO: 51597 - DNA, 305 bp, Oryza sativa
  unsure (1)..(305): unsure at all n locations
agctntntatatatcaagaagaaaatgcgttatcttttcgtataattaacttcaagatntaagtttaaatttanaatttggctcttgttcatttgttttgtagggcaaactatgaggcttgattgtttccttactccctgttggcggtatggtatgaggcccttcgaccaaaatctgccaaaggctatgtgaggagtgggaatccaagcccgagacgctaaagttagtcggggcgaagccccctcccncatggcgaacactatggaacaagtacagcgagaggcgaaggatcgtgtgggtactct

SEQ ID NO: 51598 - DNA, 366 bp, Oryza sativa
  unsure (1)..(366): unsure at all n locations
nttcaagaaaaaactatgtagcgtatatgcttgcttttgaactaaactaagagctttttaataaaactttttgtacgtatagacttgccgtcgaactaaactgacgagtaattaataaaagaccacaaggacatagagttgggtgtgttagatacgggtaaagctccatttgcttttgtgtttgatgcagggcgtccgtgagccgtgtggtgtaccgccgaaccggtgatgccatgcatccatacacgtctacactctacacccattaaccatacatggcgtacaacgtcccaccagctcgtggccgctgccacgttgaacccatagcaacctctcgcgtgaaatatcacgttggaaacaaaaaaa

SEQ ID NO: 51599 - DNA, 308 bp, Oryza sativa
  unsure (1)..(308): unsure at all n locations
ctcctaacaaccaaaatctatagagttcattttttcgattgccagggttctgaaattttaatctctactcctgtaagtcggtaccagtaacaccaagttgaaatcatgattatctgcaacaaggccggaaaacaaccaaaagtttgtattgatgcttcagtaatttttctgctctatatgaaaaaataaatatggttcagactatttatcattntttcaccagtacatgacatagcggatacacaatcttatagtggccttccatgtggggtctacgtaaagatagtangagtgtgtgtgtgtgtgtg

SEQ ID NO: 51600 - DNA, 448 bp, Oryza sativa
  unsure (1)..(448): unsure at all n locations
tggagcanatattaatntaaggactccttgatggtgacagcatatctgaaattcttcagtagtgttccgactctataattgtcagtttaaaagtatggtatgatactatgattatatacagatgttgacatgaacaaaattatggtgctaattaacaggagatgctttctttggtttgtggaaagaaaaaaaaaacaggggatggttatcctgcagagtgtgatatacccctattatatctttttatgtcaggtggtcagatcagcaaacctgtcaatatatatgtctgtctcaagcatttgatacaatgtttcgaccagctcgaccaaagctagcctgtccaactcanagttcttgaaagaaaagaanaaggaaaagaatgcatggtagtagaagcaaataaaggagattggaactgaaagaaagggggtgcanatcatacaacatt

SEQ ID NO: 51601 - DNA, 309 bp, Oryza sativa
  unsure (1)..(309): unsure at all n locations
caatacactaatttaatggtctaaaatattgggtccaccaatttaagtgaaaatcaatggtgagattagacattatcatatgacaacttancagtgtttgtacgagtgtcacgtggtgggttaagagcatcatagaaagttaatgaatttcagaatttttcatctttatcgtacanganctgttgcatgctctgtattacattccgctgcgcgttgatctcacatctacagtggctcatgctttgctgccctgatatactgtgcggtataggacgttatgctgngaccaaaccatggctatctctccta

SEQ ID NO: 51602 - DNA, 453 bp, Oryza sativa
ctagatagaagtataatgctggtagctctcggaggttcctataatcttgagattatcgacagcaatttcttatgttcctgattattctgtgcaccgaaataccggaaaagatggaggagttaactgaagagaaagcaccatagtaggatgtcctgttgtgggctctacatgccatttttttataatttcactttgccccgagtgaatagacccacgtttcactttgcactgggttatggtgaatcctttcaccatatcccattacaccttacaaccatcatcctccctgctggcttctacttgatctagatcaaccaccagtcaaccatctgacatcattgacttatcatgcacacatttccaccattcgtccaaactgcagcgtcaaagctggtgttttctgccacataatcttctctacaaccggtgcataatgagagtattgcaaaccct

SEQ ID NO: 51603 - DNA, 409 bp, Oryza sativa
  unsure (1)..(409): unsure at all n locations
agcttctcaagctcaagcatttacttttctagttagagatcatcgtcttggagctaatgtgggatctgcccaaggacccacaggtttaggtaaatatctaatgcgttccccaacgggagaggttatctttggaggggaaactatgcgtttttgggaccttcgtgctccatggttagaacctctaaggggccccaacggtttggacttgagtaggttgaaaaaagacatacaaccttggcaagaacgacgttcggcagaatatatgacccatgctcctttaggctctttanattctgtgggtggcgtagctaccgagatcaatgcagttaattatgtttctcctagaagttggttagcgacttcccattttgttctangattcttctttnttgtgggccatttgtggcat

SEQ ID NO: 51604 - DNA, 300 bp, Oryza sativa
actcactcggataagctgtattattgaaccatacaaaacaacaagcgataaaaccaaagacagataatgcgcctaaactataagacaagtaagcttcttcagaccatacaaatgcacggcgagcccatgcgaagggtttggttaagatatgccaaattccgccaaatacacaaatgaaacccaaccatacatgtcccccaattatatcttctaaatcatccacactaacaatccaaccctctcccccaaaaggggattttagtatataaccaaatataacaccggggctaagggtaaatt

SEQ ID NO: 51605 - DNA, 473 bp, Oryza sativa
  unsure (1)..(473): unsure at all n locations
agcttgtcttagcgtgtagccgttaaccgtacaagtcatctgttcatgccaactgttcttgttcgtaaattcaagagatcctatggctcagctttggagttactgagtagattggctacttcagattatctacttaattatacaaataaatcacatatctcgataaataaacaaataacttataacaagtggtacaagtattacattagaagatttttttcttagaagaatgtcttttttaaagcgtggagtaaataatcccgttaaataataatacaataaatagtatgacaagaaataagcctanacgtcttactaagtagatatgcatataccagtttagcaacctgaacatctgttgnggtggtgctaatctnntgtctgtccgaacagaaaccaaggtatatgcacgagatagatatctntntttgtaaggcaaagcttctaatatatctgtccatgggccgactatg

SEQ ID NO: 51606 - DNA, 373 bp, Oryza sativa
  unsure (1)..(373): unsure at all n locations
gcttctctctctctctctctatnttacttcctccgtcccaaaatatatttatttttaangttgtcaccggtattaagaaattatgtgagaatgattgaacaatgcgtgtgattgcgtgaaaagagaaagtacgtgaacaagaatgcgtgcgattggtcgacacgagaacgtccgtagaaacatactttcattataagataaagccttctgctacaactatctatatctcggaacggagttagtcacaaattccctcgcgtttcttctgttgatgctatgggcaggtatggctctgatgacaagtcccatcaaatagcgcttatcccaagctacccattccacgccctgacgtggacatgaatttatctccttg

SEQ ID NO: 51607 - DNA, 317 bp, Oryza sativa
  unsure (1)..(317): unsure at all n locations
ttatcttcatagtacaagcgttcctcttctttggtggcgccctccgtcgccgaactagtaacaatgtcctcatgatcctagtatggatggcttatatgggagcagacttggtagctgcttatgccctgttagcgttccaagtgtgctacatcctgcagatgagcctagggaggtagcttagacttgtcggacanagtctataatagcgcttaagagtaattccgttgtatctgggcctgactgggccatatgagcactagctccagctgtcaacatctgtatcacgtgagagagagagatagaactctatctgtata

SEQ ID NO: 51608 - DNA, 317 bp, Oryza sativa
cgagccggacaataagcttgtatattgttcatatgacacattgaaaacccttcctggttttgaggaggtccatacatcatattactatgctcatttggttgccaaccctcacactgctagagctctcgatggacttgcatttgataacaagatgcattggtttgcaatgatcattaatgaaaagttccctggatcgacataagcttcctggatgagctggatagctgttatgggattatgcgttgacgattggcttatatacctattatgtaagactttaaactgccgatatgttggatgcaaagaacttactagta

SEQ ID NO: 51609 - DNA, 454 bp, Oryza sativa
  unsure (1)..(454): unsure at all n locations
atcctctgagtcacctgcggctgcagcttattgattcatcttagntgagggtagtgtttctctatcgagtctgtattggctttctcttttctgcatgtctatgtactgtagtccttcatgtatcctccatcttgtatctcagtatgctcttcatacgatctgcatgagcgagggagtaataattaataagcttgaataaagtatatgcgtatgccctgtaatgatattctaaggtccatctacgtttctttgagaaacctgaagtcgaatttaatttgacaatgaggtggatgtgctgatgtgcagaagattcaattaagctgaaccctgtccctgaaaagagaaaacgttcaggctatgcctataccatgtcagcacacacaatgaattgactaatgattgctgacttctccgtacatgtagtatttacatttancattattttatctttctt

SEQ ID NO: 51610 - DNA, 470 bp, Oryza sativa
  unsure (1)..(470): unsure at all n locations
nggacatcatcctanggatggattggttggctaagcacatttgacttatagattgtgccgaaaagtccatcaccttgcaaggacctggaggaaagcaagtccgctttacccctaacacccctaccgcaagtcggtctatcctaacctgtttgcaagtcaccttcttggagtcggagcccatagtctgtgaatatcccgacgtatttcctgaagaattaacaagtatgccaccagaccgagagattgagttcgccatagaattggcaccaggcactgcaccaattgcaaaaagaccctaccgaatggcagctaatgagttagcagaagttaaaagacaaatcgaagaactggaaagtataggttatgtgcgacctagctcatccccttggggagccccagtgcttctggtaagaaaaaagatggctctgagagaacggtaatcgactatagagcccctgatgaagtaacta

SEQ ID NO: 51611 - DNA, 326 bp, Oryza sativa
tttttttttcccacccgcgcgccgcacgccgaacccgagacctaatctaggggaccggcagaccagcacgcgcgggcagatttagccgagctcacgctgctctctacactccttcagttagctacacctccccccgtacagaacgactctccgcgcctgctcgacgcgcgggggcgacgttgcgactcctaccgtctcagtgggcccactgcccgggtcagtcaccgattttgcttggtctgagagaactctcgactgacgcgaccacgcaagcgtgtagtcggtaagacgacaaaccgtctctgcgcgactctcactgcgtacta

SEQ ID NO: 51612 - DNA, 419 bp, Oryza sativa
acacataatactcagctctaacaattaacagcaacattttcaagtggagcactatcttctatatttaacaggcacatgcgactgtgtgaaagttgcactcactcttcaccagccaacacaccaatttggttttggaccactggatattataattacaatgaccatgcaggaccacggatccatcaatctacttccataagggacctcaacagaaacatttcgtttattgttcttgacacacggtctatgaatatttgactgtaacagctaacaacacttgaaatgaaatgctaaaataagcaaatccatgtaaataatcattatcctagcgcttagcgaagacaatagatttatagataatattaaactaagctaacgatagaaaactcacagcagtgcagcgtatactttgtgaatat

SEQ ID NO: 51613 - DNA, 489 bp, Oryza sativa
  unsure (1)..(489): unsure at all n locations
tagtgtacaaacctctaagccaaatagcttctttacaagcttcataaatagccatatactctgcttcagtagtaaataaggcaacagttgcttgcaaacttgccttccaactaacagcacatcctccaatagtgaaaacataacctgtgaacgatcttctcctatccaaatctccagcaaaatctgaatccacataaccaacaagtccatctctagatctcccaaacagcaaacaagcactagatgtaccacgtaggtatctgaaaatccattgaacagctttccaatgctctttgccaggattagccatgtatctactgacaacactcaatgcatgtgataagtcaggacgagaacataccatggcatacataagtgaaccaactgcacttgaataaggaactctagacatgtattcaacatcataatatgactgtggacatanatctaaagataatctgaaatgtgcagctaacggagtactcactg

SEQ ID NO: 51614 - DNA, 269 bp, Oryza sativa
ctcttttttttcaagttaatttttgaaccatcatcttactgggtaagtaacattcagaacgcaattaaatacgatactattacaacgtattcgcagatacgaatcgaacatcgataacaaacatgcgttattcatatttacttcatttgtcggcaacattcatggtagcgagaagcaacacccgtcgcgatacgtcgttacctatgacctatgtctcaccaagagatgatgcatagatctgatgcatgcgtactgtatgctgcacctat

SEQ ID NO: 51615 - DNA, 473 bp, Oryza sativa
ttcatgacaaggcatttccacagccgacacaggcgtaccatattctgacgagaggggtctcagaccaacgacaggttatgtcccagaccatactgtgccaggaagcccagtggtcctccccgacaccaccccggcgaatccacatgtctctcggcatcaaggctcccctgataagctagttactcatccaggggtgtcccattccacccatgttgtcgtacttgtcttatgttcggatgaaattccaaggaaacagttcttaagcgcgagaacggaaaaccgtacacccggtacgttctccggtccgcggttttggaaatccatttagttccaagcaccgacccacgtgtcgggttttccaagtcttttgcaaaaaccaaggtttatccaagaagttactcatattttaagttcgaaagcgaccgtcggtactcgcaccaagtgcactgattccacgctcatctggatggtta

SEQ ID NO: 51616 - DNA, 480 bp, Oryza sativa
tcgcagcgcagtggcttggcttgagatggatggattcattctggcgacgatgatgacaaaacaacggcgctccataacgtcctccgagctcccatggacgaggtcgtgttcccgctgctgtagtggatgaaatgacgtgatgtaaacagagaaaatgattggcatagagagaagataatggttcaggaaaaagatggggatgaccgtggcttattgtcaaggatgacggtcgtctctcccgcggccggcgacgaaagaaaggtaagagggagagctggagctctctccctgggtttctccggcgctagagtggagaggaaggagaggcgatacaactgggagaggagtagaggaggatctcggcgttttgaggtatggacacgtcgtgcacacgcatccaacccagccggcgccgatctctctctctcttggctgtctctggtcagctggagcggaggaggaaagggttcacagagctgg

SEQ ID NO: 51617 - DNA, 394 bp, Oryza sativa
gcagtggagagccggagaggtcatccattaccatgcataccaacgaacctgaggaacttcaggtaactaactatatatgtctctggtcttatgcaagatatgccagaatcgcgaaataggtatcaagcgcttccaactgattctgaaaccttggcgattgtcatgatccctaggagatatgcaattctatgatgctgagctccaaccttaacacaccggtggctcaatatgctgccttcgatgccacatattactcgtaggaaagcacttggtctacctagtcttgccgccatagattagtacatagaacgctgaacatcgctgtagataatcgaagtagtatctacattggtactaacaatagactagtctgaccttgtctatgatgtactac

SEQ ID NO: 51618 - DNA, 480 bp, Oryza sativa
  unsure (1)..(480): unsure at all n locations
tcaatattgggtatgacttaacacattacaacatttttgtattactatagaangaaatgcttgatcgctatcttgatgtggttctgaagggaaacaaagatggactgaaggtaatatttttttgtggttattttgtaactgacaacagttgaaaatttcataagcttattgaaatcaaacacaaggaaattcctcaagtttttttccagtgcaacacattttcttattcaataatggatgttgtcttttcagtaaggaatgtgaccattttcacttctgtctatgtgcagaaattgcgtttgcggatagaggatccgccacggagaaaacacatggtttacctgngtggtgcagtactcgctggaatcatgaaggtaatatacttttcccacaagcgtatatatctatcggttattataagcaaagccttgtgacacagtagagaggtgaacagaatacgagcacaaaagatgaaatcat

SEQ ID NO: 51619 - DNA, 456 bp, Oryza sativa
  unsure (1)..(456): unsure at all n locations
gtcacctgcggcatgcaagctctggatagctctcttgatctttctcccttttgttatctttgcggcngcgnggaacacctgaatcaatggctatgatgtgaaagctggaaatctcacgctgactatgattgtccggcaacatgagatcagatgtatctgagccaatactgccacttattgaaactgctcttctcggcttccgattctgagggcttctgatgatctctggcttgtaacgaatgattgcagaatcataaacatcatctaatgaatcgaggtttgcataagcattcctgtcggcaacaagtaaatttgcgtaatttccccgccaaccaagggggcggcatcgcaacctgtcttcatttctcagtacaaggtccagtatcaagacccttcctaaagcttcagcagntntttcagcacaatcatgtgaatcaaatggcattggttctctac

SEQ ID NO: 51620 - DNA, 474 bp, Oryza sativa
  unsure (1)..(474): unsure at all n locations
tcatgagttccaacacgcatgacaacttggtgtgcttcgacttgcatccatcatacaacggcatctggcaatcttccaccaacttactaaacttctcataatctctgtcagtgtcctctgcgtcttcaatgtcatgcaacattgtagatagacattgagtgtccaaatctatggtctctccacctaaaggagaaggtacgaacatgccttctcgagctgcggcggtgttctctacatcctgatccaacacttcttcagctgcgacatcaggcgcctcttgctctccatgcttggtccagcaggtatatttcttcatgaatccattcattatcaaatgagcatgcacttcatccttgtcttcgatcatctgttcattcttacagtccctacatgggcacaacatgtgcatgctcatcctactgtttctgtcattatccgcanatgtgacaagatcagtgaccccctctctatact

SEQ ID NO: 51621 - DNA, 355 bp, Oryza sativa
  unsure (1)..(355): unsure at all n locations
atctctctaattggcgaccctaaggtacaattcatatatgtcaaattcacggaaagtttgaacattcttgcatgtataaatcatgcattttttaacattctgcaagtagtttatatggatgaaccaagctcatggttggacccaacatcaaggacagacttgtggaatgctgtcaagtctgccaagcacgacagggccataattctcacaagtactgcactctgctttcaactctgatacaacagtataaccttagtccagttaatcaccatggacatctttngcaccacatcatattatcacatcatactgtcacctatttccagngcattcgatggaagacngctgatttcta

SEQ ID NO: 51622 - DNA, 479 bp, Oryza sativa
  unsure (1)..(479): unsure at all n locations
tactcagcttacaaggaagctaatctcatgttggaactccaaatcttgttaatccattcgattacgagaacaaggtagctcataacatcttttaacagctacctcaagcccatcgtgcagctgaccctgactgcaaacaaaaagtgcagctgacctaaagaagagaccaattatattaataagtgatagtttctaaagttacaacacattccattgtagtttgagagctatgatatttgcaatatcctcaaagattaattaggatgaatcggaatcacagtaaacacatgaataaccgtaggaagagccaatgatctgtttcttatgatatcaaagaatggaaactgtatcttgtgaagcaagcatattcattacttctacggacaagataaagtggttcctttttaatatagtcagngaataagaagttactttatccaattaatttatcttggcgtgccttatagaagatgtatatg

SEQ ID NO: 51623 - DNA, 221 bp, Oryza sativa
  unsure (1)..(221): unsure at all n locations
ctacgacgccacgtggcgtaatctccggccacggatagagccctgagattggtattagagattngaaacttaacttgaagtaagtttacaaattgttaccacaaaaatgtcattttttctctctaatcttatgattcgagtatccatgggtgtttgatatttcctgtgaccttaagaagagatgctgttctcatgttcgtgtgcatgatattattctcact

SEQ ID NO: 51624 - DNA, 312 bp, Oryza sativa
atactttttttttcctcgagctggctctggcgtactcaccatccgtcttaaaaaaatagatgtgatccctcgtaatataacgaatccacgaatctggatattggctaaaatcattggattagaagagatcccatcctatttagatataagttttttagggagagaagtagtctcaaatctcaacaggggaataggttagcccaatcatttcgcttataccgatctttttgatagttcaaagcaaccaacatatttattattatattgatgatcacagtgttgacaaaaaaaaccaattcaaatatgtatatt

SEQ ID NO: 51625 - DNA, 355 bp, Oryza sativa
  unsure (1)..(355): unsure at all n locations
atctcggaagtgtctgcctccacctccacgaattatcacttaaccctagctttattgtcctctataaatagctntgtacattctcaaaaacattagggttatggttaattgaattttccaagtgccattcaccttgtctctagtcctcgctcgattagtcggcgactattgattcttagcccccattagttggcgtgttgtattgccgggtcgatagatctaccactacaatcgcaactatgtctttgtgcttaatcacctattcgcaatatttagattgcatcttatcgtgttcttgcagggtctctcgtttgaattgaagaatatcaaccgcgcgtcacggtggtacacatcg

SEQ ID NO: 51626 - DNA, 410 bp, Oryza sativa
  unsure (1)..(410): unsure at all n locations
tattcgttctttgagcatttttgttattatcggatagattcnaaccgcgaatgctaatgtaatcactactatgccagcccatatcatgatcttaccaacttggatttggttctctcgcgaaaatcgcgagttgcagagatgagaaccatgataagcattatcccgaataagataacagataccgaggaaaccacaagagtgaagactagtagagtctcgtcttttgtcattctttgctcctgtttcactcaatgattcattcgaatttcccgaccaaatattctatatgtctattcatanggcctcgttgctaagtgctacaagatctagtgcactggaactcgtggttatggacccgaatcctttattatggaacattgtcttttccaagttaaaacccccagtatatg

SEQ ID NO: 51627 - DNA, 156 bp, Oryza sativa
  unsure (1)..(156): unsure at all n locations
ttcttctttgaatgagcctncagcgctgaagcagtgaaattatcctgtatacaacctggcaaggagacttgagcaatttattctcaaaaacccagtcattcctagttagccaaataccccaaatccaacttgcgaacactactacgggtgtgtttg

SEQ ID NO: 51628 - DNA, 298 bp, Oryza sativa
tgcatggatcggaacaaccgcacagcattctcagactctccatgcatagcattagcaccaatcattggattccatgaaaccacattcctatatggcattgcttcaaagatcatccttgcatacatgaccctgccacactttgggtacatgtccaccaaagcactccgcacataaatgtcatgatgaaagccctgctaaaagaaaaacattggcagaagaccatgcatagaactgcatatttgaaaactggctctcgcaccgattgtactgaattggctcgatctctgatgctctactg

SEQ ID NO: 51629 - DNA, 429 bp, Oryza sativa
gatgaatattataatctcatggccgatgaaagagaatacctggttcaatcaagaatgagagcacttgcaaaagttactaaggattaagaacgtgttgctcgacattataacaagaaagtagtgcccaaatctttttcggaaaggtgagactgttagaaatttgatttgctgatagggactcgagataacatattcagcaagtggtcaccaatatggaaagggccatttcaaatctataaggttgtatccaaaggggcttacatgttgcaaggacttgacagcgaatttatggacgagcactcaatggcaaatacttgaagaaatattatccaagtgtttgggttaatgcatgatcggctagtgttgacgatgcatgatagccgatgtgttacatcgccttaagatggctgatatggtatatcaccctta

SEQ ID NO: 51630 - DNA, 449 bp, Oryza sativa
  unsure (1)..(449): unsure at all n locations
tgcaagcttgggacaaacattcatgcaaattcgttgatattatctttggatactnggnctactggaaaattggagctccttattcatgtcatcaatggagagcctatcacagtttgagctgttatgtgaaaagctttacaattctagagactccgctgagcgagcacatgcagaaagcaccctcaagtgcttctcggagaacagtgactacatttcacagtgccaatatatattggacaatgcctcaacaccatatgccctgatgctggccagttcaagcttgttgaaccaagtcaacgaccgcagtctttcattgcaattgcgtcttgatatctgtaatgttccttaccaaaaatttatcatgaaatcagtggttcacctgtttttgcttttctattgcatctgcatggcatgttttcatttacgtctctacncaattattcagttat

SEQ ID NO: 51631 - DNA, 465 bp, Oryza sativa
acacactgctgtctattgtccacctcttatgctgttcttctgaaataggatatgggaacgatagacaaattggagataggaagaacaccctcaacatgccttgcctgcatgataagtgacttgatagtgcacattcctgcaaatgctcctacgacttgagtatttattttccagtttgaagacaggtttttcaatgcacaagttaaccattctgggacaagtcatatcatgctaactgggtgatttttgctaagaaccatcaatattaaaagtaaaaaaaactggatggcttatgcagtaattcaatggtggcaagcgctgccatatataaacttgcaaggccactatatagctaacaagaatatacgagtgacttgtgcattcaatcaccaagtaaacaaactgtcactgacttaccaaagtcgtgttgaacatatctgtcagagtgatatcctacactgaatc

SEQ ID NO: 51632 - DNA, 414 bp, Oryza sativa
ctgagaaagatctaactcaacaatgcctcttaaaattatgaaagaatcacgaattcgtccatcaagaatgttcccttccatacggagagagcttaagtggacacagtcgccaagagcagacgtgaattgtcctgacagtcggttattggaaatatttagaatatcatgattgatcgagccaccaatctctgatggtatttctccatcgagttggttgtgagacaagtccaaccattcagaaagagaggaaagagtaacgagttcctctggtatgctactatcaaagctgttacaagacaggtttaaagcttctagattcttgcaactccctaatgagctatgaatcggtccactcaaattattgttctgtaagtagagctcacttagatgacttagattaccacatgaagttgg

SEQ ID NO: 51633 - DNA, 187 bp, Oryza sativa
ttttttgtcacgcacgcccgtgctggcgatgccccggaatttctcgggggacgacgacccggtgaccctctagctcgtgatcatgacggtcgttttggcagctccttctttgctttgcccctgccactggcctctgtaagactgtaaagcgtcggttgctgtcaaaaaaatatactgcatagtggag

SEQ ID NO: 51634 - DNA, 333 bp, Oryza sativa
  unsure (1)..(333): unsure at all n locations
atatggtaattctgctgctgcaatctatgttggtatatggtgactttatattgaaacacttggataaatacttgaattaactggaaatagaatttagcacacttgcatgtgaaaataggatgctggagcctttagtgctagattgctttcttttctttattctagtcaaagatgnaagttgcttataccagttctggctaatttctataacacatgtttagtgttcgactgctgcttctaactgattcatggggaggatgagacanggattactgagcggattgtgcgcactgaggacactttcggatcatctttatggtgccaattctgtct

SEQ ID NO: 51635 - DNA, 362 bp, Oryza sativa
  unsure (1)..(362): unsure at all n locations
atgacctcacggatgaatccggcctccaaaagtcgcgccacctcctcgcggatgaaggcttgacgttccggggcctgccgccgcactttctgccggaccggccttgcgcccggccgcacggcgagacggtgctcaatcacctccctgtggaccccgggcatatccgccggtctccatgcgaagacgtcagcgtttgcccgcaggaaggagacgagcgcgtcttcctatttgccgtctagaagaccaccgatccgtgtggtcttggacgggccgtcgcccatggcaacctccttgaccgggacctcgtcgcctgtgatcatccgctgcctcggggtggangagacgcacacaacttatatgta

SEQ ID NO: 51636 - DNA, 349 bp, Oryza sativa
aacaggttatgtcccataccatactgtgccatgaagcccaatggtcctccccgacaccaccccggcgaatccacttgtctctcggaatcaaagctcccctgattagctaattactcatacaggggtgtcccattccaccagtgtggtcgcactattgtatgctcggatgtaattccaatgaaacggtccttatgtgcaagagcgggaaaccgtactcccggtacgtctccacgtccgcgatttggaaattcatgttacttcgcaagcaccgacccatgtgtcgggttttccaagtcttttgtaaaccccaagtttacccattgttggatgttataatctgatgggaggt

SEQ ID NO: 51637 - DNA, 407 bp, Oryza sativa
  unsure (1)..(407): unsure at all n locations
gacctgtacagcgatgcttttttatttggatcattctcttgggcatcgaaagtagtaatcaagtttgtagttttgcatggagccacgaccagatttggggctgcgcanaaataggtatatggagaggcaaaaaaaaaagaagtggaaatgttggcaatcgttgatgttataagcaaatgcttgaggaaatgatagcgtacttaactgtggttaatatatatagccatcagctctccaaagataagttaaggctccagttgaaatgaggaatggtaaaatacatgaataggagaagcacaggaaatagatgacaaagatagactcaaaggatattttccaagaggttgtatctcttgctagctttcctctanaatctacatgtattgagccattcctaaggaatttca

SEQ ID NO: 51638 - DNA, 499 bp, Oryza sativa
  unsure (1)..(499): unsure at all n locations
taagctatggccctctgtggccaccgcgatgcgtgcaatctctgttgattatgatccanagcgtccgtacgtgcatgcatgggcgtcgcgcccgccgctcctatggtacccggcgctctctgccggacggtctgtgcacccggtcgccggcggcctcgagatcagcgctcctcctctgggtacagtgtgctatctcgtaccgttcatcgatgacctcagtggcggatccaccgctcggcgacccgttgacagtggcccaagctcgtcgcagcgaacacgttgtaaactttaatactccatccagttcataatggaaaactttctagcattttctatatacatatagatgctaataaatctaaacgcatacatatgtctagatttattaacatctaaatgaatgtgggcaatgctagaaagtcttacattgtgatacggaggaagtataacatacccgctccgtcccataatataagagatgttaagttcttgcttgcac

SEQ ID NO: 51639 - DNA, 390 bp, Oryza sativa
  unsure (1)..(390): unsure at all n locations
taagcgacgcagctgcagctttaaacctacctaagtaagctatctctcagtcctcgtgttttcgcatcaacacgattttggcacgcccgatgggaccgagttgcaacaacgttctctcatggcggagaaaccaccaccatcaccgtcgtcggctggcagccggaggtccctcccaggactaatattccaaagcctaatgggtctgaagttcatgatggaaacattgttccaatcactgtagataaactaacaacagagcaaaaggagtttgagctaacgatgcagcaagcacaacactagttcttgaacttgttcatggagacccgcaatggaacagntgttcagaagtataaaggaaaaatagttgctgatgttcctggaacatgttct

SEQ ID NO: 51640 - DNA, 502 bp, Oryza sativa
  unsure (1)..(502): unsure at all n locations
tatgtactgacatctctgttgacataatccatgactgtttatgttgtcttaacaatntgaactgtatattaagcaccgcacacacatataaataaggccatattataaaaagcctcatacttacgatatgttgttacatatatattgcatcgtcctttacctatttatctcgtataagtattgtccgttattgacacatttctttcaattcaaagtttatttatttgtgtgtgggccctacatcttgagagaccggtcagaggtagctctagataaatctatccaacctatcgtcaccggctacgtaccttaaccgtgtcaaaattttcatagtatacactttggttacataactcaattgcgcgatcaattcaagaagtcagatgatgtgccaattaatctagtgaagctgatgtacaagatgatagagatggatcatgctgttgaatagtatataaagagatgaatactgcngaacatgaatatttgtattgagcctcgt

SEQ ID NO: 51641 - DNA, 223 bp, Oryza sativa
tattgcttatgtcagcaaagctttgggtattaaaaccagaggattgttttcatatgaaaaggagtatttagctattctgttagcagttgatcagtggagatcctactccccccatggggaatttatcattatcattgaccaccacagtttaatgctcatgaatgagcagaggctgcatatcccttggcagcataaagctttcacttaaagtggtgggtcttca

SEQ ID NO: 51642 - DNA, 385 bp, Oryza sativa
caacatacgaagtcgttgaagaatccatctcttgaacccatatcatcgaaatcctgaagcaccatactccacctaactagcgcgccactgtcggcgtttgatgtcacgattccggtatttacatactatgggatcgttggtactaagatatatgcgagactgtagtaaaagagatgggaacgagggattttatacatgttcaggcccatgaattgtcacataataaccctactcctgttggccgaagccggtacgtgctcttattcaccataatcacaccagtacaatattgtgggtagtctatctaactgttgtcgacatagcggactgaagtatcatcacatagtcgacaacatggtagtcttcctcctcaaatccgtgcccg

SEQ ID NO: 51643 - DNA, 401 bp, Oryza sativa
  unsure (1)..(401): unsure at all n locations
agagcaccagacaaaagatgcggatggaacgatatatggcctggtttagttcccaaattttttttcctaaaaacatcacatcgaattttgaacacatatatagagtattaaatatagattaagaagaagcttattacacagttagggggaaaatcacgagacaaatcttttgagcctaattagtccatgattagctataaatgctacagtaacccacatgtgctaatgacggattaattaggctcaaaagattcgtctcgcgatttccagacgagttatacaattatgtttttcattcatgtccgaaaatgtctttcgacatccgatcaaatatccgatatgacacttataaantttctttctacgaaataaacatggctataatcacatgaatgcaagat

SEQ ID NO: 51644 - DNA, 416 bp, Oryza sativa
  unsure (1)..(416): unsure at all n locations
cgatagcgtgcacacatacacacagcanantatgtgtctggtctattatcatntanatacaacaaagatccaatcatacttctatactcactttgatcaacagcttcaccatcttcatcatgatccaacacagctgtagaaccaataggtgttgatattggcttgtaattctccattgtgaaccgtctcaaaagatccttcgtgtacttcgtttgatgcacaaatataccttgatgtgttggcttaatttgcgatcccaaatagtacgattactcacccatcatgctcatctcaaatttcctgcgcatagtctcagcaaactctacaaccaaagtgtgatgtgaacaaccaaagatgatatcatgcacataaatctgaatgaatagttgattatcaccatgcttaagaacaaaaag

SEQ ID NO: 51645 - DNA, 366 bp, Oryza sativa
  unsure (1)..(366): unsure at all n locations
ttatcattgaccctttcttctattattaatcacaatggttgtattgacaactacacttatgttatatttttcctatggtgacacacacacatatatgtgtttggtgctccatgaattatattgagtatatactcaattcaaatgagtatgacattttttaaatattacggataacgtgtactactttactaactatttcatatcatgtttgaactgatttatacatgtttttgttagactctgattctaaataanatgtgaaaagaaattggcaaacgtctatatgcggactagatatattcgactgtggcccgagaatttttgttaattctcttggtctaaatgagccctcaatatacttgattt

SEQ ID NO: 51646 - DNA, 171 bp, Oryza sativa
atctcttccccaatctcactcataaagatctaccactaaggtaggaagtttgggaggggctatttcgctttggataagactattcttgcctatactcagcagccaacacatgagagggtggaggggcttatcaacccaagccctgcaaaaactagaccgtactcacataac

SEQ ID NO: 51647 - DNA, 415 bp, Oryza sativa
  unsure (1)..(415): unsure at all n locations
taagctagacggtactatattatcctgaaagccatccaaagtttctttgtttgctaacagtatgccttgccgggatatcagaattttcctcttatcaacttgttaagctcttgtaaatgccttgcctgccatttcttgtgctaatatgggaaaattcccaatttgtatgcatgcttcggatactgacatactcatggacanaaaaatgaaccttgatcggtcgtaatggttgagcaataccaaatctataaataatatattcttcaacacattgaatagcatccccagaatcaaccttcttcatagggatcgcctctacccacttggnataataatcggctgccaccaatataaacttatgtcttttgctcgatggtgaattaatcataccgatcatatcaattccccaacctct

SEQ ID NO: 51648 - DNA, 364 bp, Oryza sativa
tatgctaacgtgcgccactattgaaacattcggacatgcttgttatttctctgcgtctcaatccaaagcatgggatgttcacatcccccaaggcgtataatgaatctttaacatcggttccttattcaatctgagtttctggtacaatccaaatctgatatctgtaccaccgttgtcaactcctgtcatgcaggtacccatgggtcttggacagactgtgacgcagtgaatcaccactgcccttgccctctttttgacaagactggtggcaccatcggataagattctgatgaactgcgtacagctatcattatcctgtactctctatctggaaacgccatcgtgctgatgtttacgcttctta

SEQ ID NO: 51649 - DNA, 298 bp, Oryza sativa
attttttacttcttttttaccgataatgccggaagactccaccttcggtttagagcccatatcaagaacatgtgtttcattaactgatatagttcagtttctagctagaggaattctcaaaagtttgtgattccacatgtaccaaaatcttctttgacacacaaaaaaatttagagaaattagacaatatactgtcaacaaagacttcgttctaaaaacgccatcgacaacttccttcttacataatatcaggcactataatatgccatcgttccccgtttttttcatttttgctatc

SEQ ID NO: 51650 - DNA, 257 bp, Oryza sativa
cccgcccggcaatcatacgccgtgcgatgaataccatccaacaaccgaagcggtgagggatgaatactgctctcccaagaccacccaagagcttaaggaagccagcgaggcacatcgcgtattgcaacagcggaatgagcacccgcatccgctgggcaccgcacggaacatcgagcaagaggcaatatgggcccaacaagatgcagccgctgcagcagcgaatgtccctgccccgttttcagacatccctgaacaaa

SEQ ID NO: 51651 - DNA, 278 bp, Oryza sativa
ttggtcacacgggttttttttttaaaaacggggagaaggcacaactcatcggatttgcactcttgacaaagcctaacctacagtggtatttctttgggaaggtgaactttactaaaatgccaagccttcaatctaagattcggcgcagaaatagaggggtggtccaccaagtgcagcataaaatacaagttaatggcggctggtgaaaagacctatgagctttttcagcaaacattgttgggtacggcattatggacgttatttttcagggtcctacc

SEQ ID NO: 51652 - DNA, 251 bp, Oryza sativa
  unsure (1)..(251): unsure at all n locations
ataaaaaaaatcccattgtccctaattaaaatttcaaaaataaaaattttaaattntttacactttattttaattttcaanaatttatgtcaaaaattttctgcactaattatttagtctcattagttttataaaatgcacacgatgtgcactcaaacaaaaatttcaattanttttgaagcttatatttaaacctaaagcatcaagggcaaataagacatttgcnaccaaacgtaacagtataatgatgg

SEQ ID NO: 51653 - DNA, 424 bp, Oryza sativa
  unsure (1)..(424): unsure at all n locations
cgacgttcgtactccatccaagcatgaattatcttgttggtcggttcaggttgcgttatcggcccgccacttgaagtaactctgactgtgtcaatccattgtacgaattgacatttccttacatcctcctatgtacatccattttgggatagttaagttaatgatagtactgaggagtgatgaaaagaatagttgtaattaccacgaaatcatcgtcgacaatgtttggacacacgatacacttttgtcctcgagttcggtgccttacggaccttatgacctgacaacggtcaccacatcgacactccggacgctcacgccacgtggggagtcctatgggatntacgtgccattctaaagcctcagcagcaattcgacgttcatgctcatccttccgccttatgtagtccgatcttgtttacta

SEQ ID NO: 51654 - DNA, 279 bp, Oryza sativa
cgactattaaacatgagctgaaatgaaccagtcacaactttgagttttttttccacccttactcgaatgaatggtggtgcacactggtacagatttctagctgaatatatatagagaggttctatggggtttgcattccaaaagaggaaaaatccaacgctcctcaatcacaggtaccatgttaaagatatttaagcattgatataggtacttaggtactaaggataaaaacataattttactagtagagagaaaagggtagaatcggctctcaaatta

SEQ ID NO: 51655 - DNA, 483 bp, Oryza sativa
  unsure (1)..(483): unsure at all n locations
ccgctgacttttaatatagnatggtgctgttttggtttttaagcaatngattggatacaatatcgttgcttttcgccacgtaagtgtgcatctttattgaccaatattatggcttaggctgattatatattgtggtcattttctanggcggtggtaaatactttatgagtttatttactcggattttacaccacatatgccatatatttccaggtgtggtgaaaccatgtgtcttctatggacttaagcacatctgttaaagcagtgtgcgcatggcgtatgcccaatactttggaaatttctntattcacaatatacaagcttctttatagctattttgctatatcactcatcatatgttacaaagcagttggtatatcactcggatcatngctattggaggattcacaccgcatatgctatatattgatatcaagtcacttggtgattacgatatcaaaccactcggtggtggatattatt

SEQ ID NO: 51656 - DNA, 502 bp, Oryza sativa
catcttggtctccactaatgcgacacatacttctagattttctccttctttctggaccaagataaaacattcttttggtgaagaagatgtatggttatgatgtcaaacacatgttacactttgaccttagtttgcttttgttttttcgataatgtagtttgctcttgttactgagatacttttggcaatatatcggcagactctgttttagtgtgcttgcagaaaatttgagttactactctattttattcctcattatagttagtatgggtaacttcctgtatgataaagtctgcttgttcatattgcagctagcgtacctaccttacaatagacgtgatatcgtgttggattatgaaagcaatgaattactttctcctgttgaatgactcggcatgacacttgatgattcaaggatgagaaaaagaatcgcgaaggaattcttaattggtttaaacttcgggtataggtaaattgggcaattcctaatattccatttatt

SEQ ID NO: 51657 - DNA, 287 bp, Oryza sativa
aactccctgcttccattgccttcatctttacaccggaaccaccaattggttctgctctcttggaaaccacactgtacgtgtgtatgtctgcacaagtcgtgccttcacacatgacattcgtgcccctaacacaccgcagtcgcatccctcttgttcaccgcgccacactcgccggtttcgcccttccgccacagcctccctaccaccatagatccacaatcactgcatgcatcggccgcgctgtccatagcgtcaccctccgatctctctggtcgcctttggccaca

SEQ ID NO: 51658 - DNA, 391 bp, Oryza sativa
actggaggacacctgaatttatgataatatttttaaatgggaagagaaacatggtatctggatgtgatattgtataccaatgcagctggtcgcggtgcttggtcacttctaaacaatacctagtacttgttaatttgttacaatccatagagctggttcctatataatatccgctgcatatactaacttatttgtaatgcagcaacatacaaaaggtgggcagcatggacttgctgctgcttggcatcacacacacaggatgcaacaatgaataaatgagcagctatgcaaccagatggcataagaagcttggtaagctctgtaatttacttctaaagactgctgttaattatgagaaccacaacctcagttatggtgatactctcatgaa

SEQ ID NO: 51659 - DNA, 263 bp, Oryza sativa
gatacaaagacaagcaacaccatcattatgcaggggacaggaggcgccatacaacaagaaaacacaccacccaaaatcctaggaaaagaacataccccttcgcgaccaagatgtagcaacacacaataggagcagaactaccgcaacagatgaatgcgagctcatatcccagcgagctacatatcaggacggagggaccagattataaaggagccaaacagctaagcgaaaaaactaaaccaacacaccaccagcacagggcc

SEQ ID NO: 51660 - DNA, 390 bp, Oryza sativa
  unsure (1)..(390): unsure at all n locations
gggagaaatctcaggttctagcagggggaagaatgatgccactcatggattgcagattattgggatgagtgctactatgcccaatgttgcagctgtagctgattggcttcaagtaaaagaacttctgtaatttttgttcatactattatctggtnttttaagaaatgctgttatctaccataaacatgcttgcagtgtaatatcttacggtcattcaccatcattttgacaagaataatgtattatttaaccaaactgtctaatgaaatacagtagtaagtagtaacaagttatgtatgctgatttgctgaacttcaaaagttcacatgtatattntntgtgaattgattctcttttaatgataacaccaccatacttntgattattatg

SEQ ID NO: 51661 - DNA, 416 bp, Oryza sativa
gcttgtggagccgatctatatggaacggtagataattacccgtctcgtgggcaaaacagaatgttttcatgacaaacctacaaagatgtgtcgcactctcgtatcagtggcggacaatttacagcacaaatcgacaaagatggacatactaaactagaactagaagcaatatgaaaaaacgatcctattgattgattgtatgattgtctttacaattgaaccggacttgtaccttatatatgggttggtcttgccctctacaggccctcctccacgtccaactcgggataataaccaaatgaaacccgaaacatgccttcccaagcaaggaaatctcgagacccgacaaaacatactctggctagaactttgccggtcagaccggacacacaccgtcggtctgaccggcaacacac

SEQ ID NO: 51662 - DNA, 239 bp, Oryza sativa
ggaaaaaccactgatctctaaaatgcccgaccgaatgctgatctcatctgatgcaatatttcatttggcgcgcatagcgataaaaagaaaatggagaggtcaaaagatcaccacgaagctctcgacgagactttgagtcgacacagtcagaacaggatcggagaacatcatcagagcacaaaccacatggtggcactcctaaagcggctacatattcattttccaagagaacagcaact

SEQ ID NO: 51663 - DNA, 324 bp, Oryza sativa
gcgagatgacaacaattataacagatggtgagaacggtgcttcgatcgagcggactgcaggtatcgatcgtcggcgatacgcggtcttgccgaagggacatgcggtgtcaacgaaggggagaagccgcccggaagatctcgcagatcgtgacgacataccggatcaaactgcacatcgtctgtaatataccgacatcttgacctccacggccatgggcctggcgaagaacagtctagggacagataggatcaggaaaattccgagagaaaacaaaacacagcctgggcagcgggagagaaataagctatgcccgcttttttttt

SEQ ID NO: 51664 - DNA, 308 bp, Oryza sativa
  unsure (1)..(308): unsure at all n locations
gcgtgcacgaagtgcgacgtcgccgccggacatcttcngtcgcgtcacgccggcgtctccggcgtctgctttggtcgccgccaccgccattatgtgcgcacgggtgtggataatctcggccgccccttcgttatcgccgtcgaccaccggagcaccctcgacgtcgttgacccgagccgccgacagcttcttcttcgacgccggccgccgtcgggcatctttcggtgtagtggtgagtaccaacgggttcagcatcgtgacctctacgcgttgatgccctgcaacccacgcgccgatgtacatgcgcc

SEQ ID NO: 51665 - DNA, 293 bp, Oryza sativa
gatggagtggatctttcaagctcttaacccttggacctctcaatctctcatatctcttcccaaatctcactcataaagatctaccactaaagtaggaagtttgggaggggctatttcgctttggataggtctattcttgcctaaactcagcagccaacacatgagagggtggaggggcttaaaaacccaagccctccaaaaactagccgttactcacataacagggcccggaactttctgtccagaccaggaactttctggcaccctcctctaccaaacagatagatcgagtc

SEQ ID NO: 51666 - DNA, 397 bp, Oryza sativa
  unsure (1)..(397): unsure at all n locations
atttactttgcaaaaatacttcgcataatcactagaaataacaccttntgattgggngacattataaaccacgccagcatcaaacatgtttcttctgtctgagctctccaggatttctatattgcaaagcatgagacataccatgcttccattntacagcaatggtgccagctgttgttctttatctttggtgaaaatttattctactcaatcgactgttgttctatagaaagttcaaataatgctcaaaacattattctactagtaccaagggtggtaagagtcctgatgcatatcttggcagctaccactgttgctaatgccgtggcatctctggcgcaagtatcaccaagcagactatgccctttggcacttcactacaacatgccaaccgatc

SEQ ID NO: 51667 - DNA, 509 bp, Oryza sativa
  unsure (1)..(509): unsure at all n locations
aagctgttgttcggtatgttcacttttcagatgatgacgatggttttttcttgtactgaatgaatctatcttatttgagggaacagatgaatgaattaaataaatttgaaagattgatttgaatagacatgtcggtgaagaaaatatttgtaaaaattccacttgtttgcgaatataaagaatattggaacgaatttatcagtggaaacttcttggattttttaccatatattaatgtgcatcccatgtttaataaatacccttcgggtgttaaaaaatggacaacatctattttcaaaatctataatagaaaggtttcttttctgataaaacctgngagtgtagttttactgagatgtatactaaaatcatgaacttccattganaaataccatattgtgtggtgattcctctattacaaaaatgggttggtaaatcattttcaaattaaattcagtaatattgcattcattcctccataatgtacccctgaggcatctttcattcct

SEQ ID NO: 51668 - DNA, 391 bp, Oryza sativa
acggaggcaacaatgctgtcatccctggattcactgtgcacggggaggacgtggacgatgttccttgcagagccagcgaagatcagaacaatactgatgagcctaagaagcaggaggaaaagagcaagctggcggacatgattagagctgttgagagagcgtctgcaagtgggggatcagtgaaatctgtttctagtttgaacgagtacccaagcaagctgcatgagatactagccgccttggaagggagagtccataagatagcgacagatatcaagaagaccacagagatgctggatgagaataacccggatgagccttatcagatattatctaatatccagaatgagatacttgaattgagaaagcaattcccatgtcaggatgaaat

SEQ ID NO: 51669 - DNA, 306 bp, Oryza sativa
taaaatatacccatgattaatagtgagaatctattctcaaatatttacatcccacgctctttttatcctgaattatgaagccctgtatatacacgtgcaagacattttcctatccaagacgatgttgctgaaactataaatgttcataaatgttcagaaaggaaaaaaccttttagcgcacgtatagagcactatcttgagagaaaaaaatacaagaaatattcagaatctctttttacatagcatttgtgtggcttctatgggtcagctttattgtaggttggtttccttaaagtcaatttatat

SEQ ID NO: 51670 - DNA, 445 bp, Oryza sativa
  unsure (1)..(445): unsure at all n locations
aattcatatcgtagaanagatntaagatctatttattgtctatatccagtaacaccgttactgaactgaatttccgaatatgcttaagttagtttgtttggtgtgacgctggcagctgttggaagggcagaaaaaatgcttgatttatagatactgtgttgacaatggcagaaacaagttcagattataagggaggcagaatgggtttagaagtgatggtactaatgtacatgggtgaggtagagcacatttgtggaaggcagggagagtggaaatngaaatttggttggtgcatatgcatagctgtgtcgccaagactaatggaaatgtggaagcccagttagggaaggagcaaggcagatctagtagtagaaaggaaaaagggtaatgcagatccacagaaatgtggctatgcctgagtagaggaagcagaaataaatgtgaa

SEQ ID NO: 51671 - DNA, 335 bp, Oryza sativa
  unsure (1)..(335): unsure at all n locations
ctttttgccacataagtgtgcatttttattgaccaatattatggctaaggctgattatatattatggtcattttctaggcggntggtaaatcctttatgagtttatttactcggattttacaccacatatgccatatatttccaggtgtggtgaaaccatgtgtcttttagggacttaagcacatctgttaaagcagtgtgcgcatggtgtgtgcccaatacttnggataattctttattcacaacatacaaacttctttatgtgctatttgctatgtgaattttcaataatgtaggcaactttatgttgcacgcatcatattttacaaagcatt

SEQ ID NO: 51672 - DNA, 487 bp, Oryza sativa
  unsure (1)..(487): unsure at all n locations
cctatacttctgcataaggcagataagttcgtgaactgtttgtttctgtccaagtccccggcaattccaagccaaagcattcattgctcctggtggggctcgccatgagctcccaccagatcttccttcgccttgcaagaattctctaccttatcacggcaactagcctcatagtatgaggtgctcaaacttgggtgttcctgttgatgattaaaatccacaacggtagacttgagcgctatcatggctcttggtgaaagtttgatggagcccttctttgatttcccaatatcacgcccacaattggccacctttggccttgatatcttccctccttctttaatggctaatcctttcttcttcttctgaagccaatctggagaacttntgctggctacattgagattagtctcagcagtactgatcttgattgagttttcttcactaagctcataattagagcttatagacacatattctctactac

SEQ ID NO: 51673 - DNA, 363 bp, Oryza sativa
  unsure (1)..(363): unsure at all n locations
gcatcatatcgctcactcttgcatggcttcngcttcttctgtcagcttaatgctgctcgtggctgcagctatggcctcagccgcctcggcgcagctgtcggcgacgttctacgacacgtcgtgcccaaacgcattgtccaccatcaagagcgcagtgactgccgccgtgaacagcgagccccgaatgggagcctcgctggtcatgctgcacttccacgactgcttcgtccaagcaagttttgatcacctaatctaatcagctgtacaagtagttctccttagactgtactntgagacaaggaaattaataacagaggatgtatctatggacttcactgatgatgcanggctgtgacgcgtctg

SEQ ID NO: 51674 - DNA, 424 bp, Oryza sativa
  unsure (1)..(424): unsure at all n locations
attctccacatagcatattgtattagacctggtgcctccaccaatatggtggacgattcatcaggtctaatttgagtagatactgggtgcttccaagaaagcatcatgcatgatgctcttcatgatcaacttgatgcaacggtgacggcgggagtgataatatacattttgcagtcatgcacgtcaacttgcgccccataagttccaacaacgttctctgatagagtttcatgctgcaaaaatgcagattcagaatgcagttaacatataataaacataatgctgacaagataatggtttgacaatggaatcttgataaactntgatctgtctttgctgcgtcagtagatactacactatgctcatgcttattctatgatgttaatttgctacacgctcttgggggtggatgaaaaagatatat

SEQ ID NO: 51675 - DNA, 321 bp, Oryza sativa
  unsure (1)..(321): unsure at all n locations
tctgatcagagccgacgatccggggtgtgacaacgcagctcgtcgacaggtgcaagaaacctttttgtatgcatcatctgtcttggtacagccactggaatctccattttgagcaagaggtggcatcttgctgccatgatcacggtcacggctcccatcaattttcatttttgattcttttattaaatattttctgcagntgtatagagcacaaaaaaacttgccagatcatacacccatagcttttttttttctttcagtggcaagtgaactcaagctgcatgctaatgtcgttacaagcagtatgtgttaaccacaaat

SEQ ID NO: 51676 - DNA, 451 bp, Oryza sativa
  unsure (1)..(451): unsure at all n locations
cacgaaacttcattttttttttctatactatcacagaactacatgtttgaactacatgtttataaaacacaataatgtttatagctctaatgtaacaatgtactaaatactctcttcgtcctaacatataacaattgttagtttctagaatttacctcaaaatataataacttccccaccaaaattgtattcttatccattctatttctccacctgtcctcactttctatccaatcacaacctttgtccatgtaattctacctaccttgtaattaccgtgttcacccctaaactttattatacactggaacggatgtagtaacttctacgaatggtacatgccacgtagtgagtatgatacacatgtacgcactgcttgccaatgaattttntgggttggctctcgatcgtaacgttcaccatgaaagcgaattcctggtggtgtataact

SEQ ID NO: 51677 - DNA, 367 bp, Oryza sativa
  unsure (1)..(367): unsure at all n locations
ggctttttgcgccgactatacattgttcttgggctttcactgtccgggccactctaacaggaaattaccgctccgtatacccccctagcgacacgtggcaagctctaattgggtggtaggcgaaccgtcgcgcgggtgggttatatatacttccccccggtgtcgcttttacttttaccccgagtcactntcaccatctcctctaccgggagtattgccctgtctgccttttgtgttcaccggctcttgttgtccactttgactagcgtgatctcaactccttcactagcctttctgtacttttcaggcatggctcctcggaaacctgctcctgcttcgaccactgtgctagacccgggaaagatcg

SEQ ID NO: 51678 - DNA, 433 bp, Oryza sativa
  unsure (1)..(433): unsure at all n locations
attcaaagggaggaagatcaatgagactctcaagaaggctcttgatcaagtctacgccgcgtttgatccacttatcgatgtagatggtgagagtagagatgaagataatggaaagaacatctccggtgtttgcttcatggcgcgtggcgaatctgattcagagtgtgtagacaatgacgtatgtgctcttgatgaagctattaatattttgagtgcaaaanatatgatgtgtgagaagatgtatagaaaacaagagtttattatcgaatctcttaattctgaatttgctagattaaaatatcttattcccaatgatgatgattgcacaagttgtgaggtcctaatgaatgagatttcaaaatttagagatgttaatgctgcacatgggttggaaaatagatcttctctaactcttggatttgctttgcacaca

SEQ ID NO: 51679 - DNA, 334 bp, Oryza sativa
  unsure (1)..(334): unsure at all n locations
caccctcaccataaccaactacatcgagtgggttgcggtcatgatggtgaggcttcacgtgcggcacatgtgggatgtagttctgtacgcgcgacgtcgactatgacgaggatcgacgggcgctggatgccctcatcgctgcagtcccgcccgagatgcagntctcgttntcccagaagtgaactgccaatgaggcctgtgacggcattgctgcggcacgcatctgcagcgaccgcgctcgcaagtccacactgcaggcactccacgaggagtgggagaacctggncttcaagccacggaaggatgctgatgactctttctttcatctcaacac

SEQ ID NO: 51680 - DNA, 501 bp, Oryza sativa
  unsure (1)..(501): unsure at all n locations
tctnntatagtggttttctatgtgaatantcaaatatgtttgttctttctatgtgcacacatcatatgtcgcatagcagtcggtatattacttggattatgttattcggcgattcacaccgcatatgctatatattaagtcacttgtgtgactacaattatcaaaatcacttagttggttggattatttactccttgactatatgttcagtttgttcaactaaccacatatgtctgggctacacttattatgtgcatctagtcgaggcacctaagtttatatgtaattattcgtcatccctccacagtcttcatagttggtaaaagtactcgggagaccatgggaagatgagtgaaacactcagctgtgaagtaatctacgttgagagaagaattatttttcgactgtgaaggtctcatgggcaacttgtgagattatgggtaccccatactctcatggcatagttatncgaactagtatagaggataactcatatctatg

SEQ ID NO: 51681 - DNA, 303 bp, Oryza sativa
agaaaacctataacctattagtcgagacctttgtgagcactaaagtttgttatttcggttccaccgctgcatgaaaatatatttggcaatcaatatgtggttagcacacatacattacttagaaacttgaacgcaaaattctttttactacaagaaatcatagtggtgtagcagcgagcaagcaatctttgtgtttgcatgcaggcctggaaactgtgggacgagcacatgatcatggacctcgttgatccgtcaatggtgagacgctgctctggagcggatgggctccaatcgcacgtgcgt

SEQ ID NO: 51682 - DNA, 332 bp, Oryza sativa
  unsure (1)..(332): unsure at all n locations
gtaacgtggcgttcaacagtaccnatactagtctaatacctccttacggggtgaaatatccggtattgatagttaagaggtgtattataaacggctttgtactatggggtgtattttggacaatcatcagaattcatgggggtaaaatggactgttccctctttatgcataaccaccttagaaggttatataaatggtatcgaaaagtttatggggggttgaacgtctgcttctcaagttcaacgtgctagacggatttacatattctaagtctagtgtgggtatttggaccttttttcctataaataacaatatctaaacttacattgttg

SEQ ID NO: 51683 - DNA, 317 bp, Oryza sativa
  unsure (1)..(317): unsure at all n locations
tgattagctgctaggatctgttgataccactgatgatcatngatttcttttcagaaataaatgtgctaactattcttgaatttgaattcacacagttgttacagaggtctaatacagacacaagacttcctttaggctgttataacccgtattggccaaaccactgtatttgggccgattttttactgtcaacaaagctgtggatggcgaagactaattatgggttgcgcattcgtgaaaaatgggctccaggacctttttcacgatttggttagctcggccgcctaactaatacttattattaacactcaacgtgt

SEQ ID NO: 51684 - DNA, 477 bp, Oryza sativa
taagcttactggtgaacctttaaatgcattgtccaactcctaaatgtttttttttgcggataaaaagaatttagatattggcacttgatacgacgcacttgtgcttatcatatagtgcctaattccctaatagaacgtgacatgccacacctgataatatgggctgctgacatattatgcctatgtcaaaaaatatgcctttgacaccctctaaaggatgacgcatgtgacatgctcccgagtaacaaatcttctgggtaatatagaccaagtgtagctcatatgaatagcttctgatctgaatgaatatcacttatgggatactccacaataaatataataattgaatcccgactggcgcaagtattcaattgataacccttacagtgaataataaatagccaatctttgacatagtaattaacccatgacatgaatcatgttgatgattcggagcatgtctattgaaatatatac

SEQ ID NO: 51685 - DNA, 264 bp, Oryza sativa
tatataataaattggcctttgcgtacatctatcaggaatgaccatgatgctcagacgatcacagtcatgtgtgaatctctgcaccttgtaacgaatcaaagatacaaagactatgccattaactaatcatacgaagcatcgcactaagtcctacgatctcgtatgggcttaacatacatgggaaggtaactacttgacagtacaggctatacaacgcataagatggtaatcaggttctacatacaaaatcccaccttcacttaa

SEQ ID NO: 51686 - DNA, 307 bp, Oryza sativa
cgaagaaaacccttcagaaaagaacaaacaagccacaccgggcaatccgggaagaccagcgccaccaacggcccaaccggataaatgcaaacacggtgggagcgaccaatactccgacgccacagaaacaacacgcggacagcgccagaaggcacgcgacgacacagagaaaaagaacggcggagcggaaacacagccgtacctcgccgataccgagtcggaacagcgaaggagccactaggcctgccttccaggaaaaaaaaacgcccagccaaacgggaagagaaaagaccaaagatgaggaaca

SEQ ID NO: 51687 - DNA, 278 bp, Oryza sativa
  unsure (1)..(278): unsure at all n locations
ccgatatgcccttatgcacggccatacataacataaaaatcacacgtggaaggggtgggcaattatctttagcagcaggtgctgtatcgaaactgatngcaaaagaaggtaaatcggccactttaagattaccatctggggaggtccgtttggtatcccaaaactgcttancaacagtcggacaagtgggtaatgttggggtgaaccaaaaaagtttgggtagagccgggtctaagtgttggctatgtaaacgccccgcagtaagatgggtagttatg

SEQ ID NO: 51688 - DNA, 467 bp, Oryza sativa
atgatggtataagccaattgaatttctgggagtattctcttggtatgaaaaccgccacacttcttgaactcgtctccccccagatgaaccatattgcctaaatataccatgaaccataatagtatagcttgtcccacccatgagtatatatctcatagttacctcattataccgttgatctctcttggtgtattcagacaataggtttgaacataaactgaaacattctggagctacaaagatagttatgaaatcgttagcaccacataataacattccccctatagtagctgtttatacgaataacagaaactctgttatagacatttctgtacattcaatgtactctacggatagacgaatacattaagttgaacataataatataagaaattgaaagatttcgttgatattgttcgggtggatattcccgataagctaatatatgttttctcttcatcgaacat

SEQ ID NO: 51689 - DNA, 368 bp, Oryza sativa
  unsure (1)..(368): unsure at all n locations
tccacagcaagcacacaaagctacctgcacaagcgctccagaccatccctcttacttggccgttctcgtgctgggggctagatatactcgagccattcccacgaggacaaggcggctacaggttcctattcgtggcgatcgacaaattcactaaatggatcgaagcggtacccacgggagaaatcaatgccgacaacgccatcatgttcatcaaggggatattttgcagatacggactactgcatcgcatcatcaccgacaatggctcccagttcatcagcacccgattccaggattactacatcgggctgggagtcaaaatatgctntgcttcggtttctcatcctcaaagcaacggacaagtcgag

SEQ ID NO: 51690 - DNA, 413 bp, Oryza sativa
ttctcacaaactgttatttttccaggtcgaccatgaagcgccaagcagattagagcttgctagagaagttcattgatcagtcaactggcgagcccctatatttacttgaccagaatacagtgcggttggctctcaaatcgacgaataagagggctatgcctgatgaagatgatgatgatgtggagatggaccctgaatggcgtatcattgtgcgggaagagcgggagaggcgcataaagaatcatcctatctcccgagacgacgatgccgacgacaggagcatggtccgaagccagtccgtcaagatgatgaatacgaccagctccggctgggcctacactgtgcatgactacaccagcaagaaggccagtggcgatctcaagaagaaagacaagatggatccgtatgcctac

SEQ ID NO: 51691 - DNA, 373 bp, Oryza sativa
  unsure (1)..(373): unsure at all n locations
tggatacaatatcggtgctttctgccacataagtgtgcatttttattgaccaatattatggctaaagctgattatatattatggtcattctctaagcgggtggtaaatcctttatgaggttatttactcggattttacaccacatatgccatatatctccaggtgtggtgaaaccatgtgtcttttaaggacttaagcacatctgttaaagcagtgtgcgcatggtgtgagcccaatactttggaaatttctttattcacaacatacaaacttctgtatggctattgtgctatgtgaatgttcaataatgtagtcaactttaggttgcacgcatcatactttacaaagcattcngtatatcactcggatcata

SEQ ID NO: 51692 - DNA, 509 bp, Oryza sativa
  unsure (1)..(509): unsure at all n locations
ctatgcctatacttctgcataaggcatataagttcgtgaactgttttttttctttccaagtccccggcaattccaagccaaagcattcattgctcctggtgtggctcgccatgagctcccaccatatcttccttcgccttgcaagaattctctaccttatcacggcaactagcctcatattatgaggtgttcaaacttgggtggtcctgttgatgattaaaatccacaacggtagacttgagcgctatcatggctcttggtgaaagtttgatggagcccttctttgatttcccaatatcacgcccccaattggccacctttggccttgatatcttccctacttctntaatggctaatactttcttcttcttctgaagccaatctggagacttnttgctggctacattgagattagtctcagcagtactgatcttgattgagttttcttcactaagctcataattagagcttaaagaacatattctctactacaatgtcctctggactac

SEQ ID NO: 51693 - DNA, 415 bp, Oryza sativa
  unsure (1)..(415): unsure at all n locations
ccggggaggagattaacccatcctaaccaacatagtctctgaatttggttttgggatttgtactgcctgagacaaaatccccaaattatgctgcctaagcagcatctaaaattgggggtgtcaggcatagctccggattcagctcacggccatcgaaaacgccaagaaaagcaaaaaagcaagaaagaaagcaccccaaagctagcaagaaccctccaatctctctcaatctctctctcctatttctgtttgagcttgcttcctttctgtcttggcctgttcttgttcagaatgcangacaactccaaggaatctggctttgttctctagccaagatagtgctctctactcgtgcagcttgtgctgctgcttttcttaacttgatggacaattgaagtgttgacatggacttctc

SEQ ID NO: 51694 - DNA, 330 bp, Oryza sativa
ttcaagcacatctttgaactacgtttctatagaaagatggaagcgcctgcacgaatgattaaatattatgatgaaagaaatttagaaaaatacactatcatacgtctcaattaggatatgtcacagtactcaacccatggcatcaactcctaaaattttaagatggctgacctttaaaacatcaacatgatttgtttccctattatcctgcacacgatcaggtcgatgaagtttatgatgatcaagtccgcacgattccagcatatttggaacctcttagcactgcatataggattatttccgtgaatatgtccttaaaggtcatagata

SEQ ID NO: 51695 - DNA, 207 bp, Oryza sativa
  unsure (1)..(207): unsure at all n locations
cgaaaaaaaaaagagatgtgtctgcacacaaaaaaccgcaaccngaaagaacccaaaaattctgggggaaaccaacggacgaagcggggacgacaacaccaagggagggcccagacgcaccacccccacgcaagcgaggacgcgatggccagcacccagggcgcaggacacccagccgcggggcccggacgacccaaaccgaagcag

SEQ ID NO: 51696 - DNA, 375 bp, Oryza sativa
ccaaccgtactcagcaagccaccactacaatgatgcacatgacagaggatttcaaaggatggctatggttcatttgcgcaaagcaagatttgtaattcttttcacaagcctaagacctagcaaagactaatcaagttttaataccattgttcatattaaacaatgaccgttctgtccaccatccattatgatcccaaggatagctttccgccattgagtcgttatgattttctgaagacgtccacgttttcgcctctcatgaagtggctccatcatcatataaattatcatgcaattattcatcccactcaagttaaagaatgtagagtctagccaagtgtaatacattgtcccggggctcattaaccgcgagca

SEQ ID NO: 51697 - DNA, 396 bp, Oryza sativa
  unsure (1)..(396): unsure at all n locations
taagcttgctgcttgctttgcctgggtgcgatacattatgtctgtctttttgccggctcanatgttgatcctcctcaagcacgaaactgctgctgctgtgcctgtctgcgaagcaacacaaggaagttccttctgcgcaccgcaactgtggttatcctgttactagcggtccgttttggctttgctcgtcatatcgccggggcaaagtttgctgatgtatcaatgggctacgtcaccactgctttgcgtatacttctgctccttctcaagctggaatgagaagacggtttgcggaacattccttgctgtaattactgtagtggtcgtgagtgtggaagcaaccactggaaatgaccatggcgtcgncattttgatcggcacgatcgtggctctcgt

SEQ ID NO: 51698 - DNA, 212 bp, Oryza sativa
taccgaactataaagaagactttcggacctcctgatacctaatattactctattccactagctagatctactaatctattgcgagaggaatgacatatctcttggctgaagagagtgctgaacagaagaaatgaactccttaaaaagtaggtatgacggtatggcgatgaaaaggccaataaacccttcaagtgacattgggatgagactca

SEQ ID NO: 51699 - DNA, 420 bp, Oryza sativa
  unsure (1)..(420): unsure at all n locations
ttatatggatgacaaacaacctaccggcttgaggtgagtttattggccaaggattccccctcgtcaccaaagtgtccctgggtgagtttctccatcttctccatcttccccaatcatgggttgcaacaaaagaacactactgcacccaatgcaagtgggcaagcttgtgcagaggaacacaacaaatcaaatgcataaggaacaaatcatgtcaagaacaaatgggagcacacctcgattatgactgaagaccagccccatctgccaccgccaccccaaaccctaaccctagatgaacacttgttgagcttttgtccatacctctggagcatgaatggaggaagaagattggatgcgaagaggaagctcgagggagtcanggaagcacataatcgtggggatttctcatcagttcgaatc

SEQ ID NO: 51700 - DNA, 344 bp, Oryza sativa
  unsure (1)..(344): unsure at all n locations
taaaaataaaaaaagaagaatgatgctgaagcaccantaatnaaacgaanaaataggggtagaaaaaaaaatcttttttaaaacaaaaggagaatgggaaaaagcaaagacaagaaagaaaagggaaaagagaaaggaaaggtgaaagaagggggaggaaaaagaagagggaaggaaaaaaaaaaaggaaggaaaaaaaggaaaaaagaagaaggaaaaaaggaggagaaaaaatgaaagagaaaagagaaagagaggaaagaagaagaaaagaaaaaaagagaacaaagaaggaaagaggaaaaagaaaggaaaagaaaaaaaaggaaaaaaggaacaagaag

SEQ ID NO: 51701 - DNA, 334 bp, Oryza sativa
cacatatatactaagcttgtactacctgaactacctgtgctgattcggcctgctcatgttcttcctagcttaattatcaagaatactgtgctgcctcattaggtaactttacactgatggtgccatttcagaatttgaaagcctatataagtatatatacatgtatatatatatctatgacatatgagtttaagtacgcacatgccagacaaatatgtggtacttaatattgtagacaaatggtgaaattgcccaagtattgtttgaggatatgtagaaattggctaatggtaattcatatattcttcctgcgtcgttcttgcacagatgcccg

SEQ ID NO: 51702 - DNA, 386 bp, Oryza sativa
  unsure (1)..(386): unsure at all n locations
tatcaaactcttggaaatgcctgcagagcatagaagagaacaactggacagacagataaataattcagtgatatttgcagtgtgatgtcagttaacaaatagttntattagtcctataatctggtcaaaagcttggaatttgtccaaattgacaatgcgtgctatgatggatctatacattgttgttacagagaacaatgcatgctatccttctcttaatgcaatgatgcgcaagccttttgcgtattccccccaaaaagaacaatgtatgctatcaagagttcaagacgggcattgcaggaatgctgcgaaaaagaaagatgctaagtgaagcaaagtaggtgagaatgcgcatcatacttagaacttacctagcagcatccatc

SEQ ID NO: 51703 - DNA, 489 bp, Oryza sativa
  unsure (1)..(489): unsure at all n locations
tactaagctgctgttgcctctgttaacggaggttaccatgatcacttgccctgttgttcctatgacgatgatgtcatgaaggtaaatgtcttcttgtcgtcatggaattgatgtgcttgcttgtaatgacccttgtcactggctctgctgcaagatttatcgctacggaattgttgtgcctgctcacactgaccattgtcacttgcttngttgcatgatgtatntaccataagttgttgaaggcctctgagaagttggatgatatggaaagcccctcctatgcaatgagggttgcgatgcttgaaaccgttgcgaatgtccggagctgtgtcttgatgctagatcttgactgcgacgatctgatacgggacatgtttcaccacttcttcagaaccatatcgtgtgtaacttactttgctggttcatttcgtattntcttcaccttgagaatgccgattctttcgggttcttaaatngactanggatatg

SEQ ID NO: 51704 - DNA, 451 bp, Oryza sativa
  unsure (1)..(451): unsure at all n locations
agcttaaggtgtaacttgacattgtctctccttgtctgtgtgcattctacctaatgctgtgattcatgagtgatcatatcgctgctattggaacaaatatctagaataaatatggcattcccttcagtaactattgatagacgactattgatttaccgcgtggaagtgtggttaaggtaacatgggaaatgcttgcatccaaagaaatgtttttaagagacatgcgcatgtctaaaatcttgaagaagtggaatagaaattcaaataggatggataattggttgggataatattgttggatagctagctctacttcactatgtgaacagggtattacaaaagtgatgaacattggtatgtgtagtaaatgcatanggtattttgtttcataagtctaccttcaccggacttcttttatgttcttcaaaataagtgtatgatctatgccttt

SEQ ID NO: 51705 - DNA, 400 bp, Oryza sativa
ctgatcagacactcgtctgtcctttttcgcgcgagattagcctagagggggtgaatatgctctcctgaaattttctcgacaatcgcagtggttataataacagggcccggaacctcctggtgaagaacaccggaacttctggcagtgatgagcagcccggaacttccggagttcttgagccagatacttccgggcaacagagaaaatcgaaatttgtggaagcaaaacatgtcctagccagagatgatcagccacagagttgcacaagatgtaaatcacaagataccagcagattcaaacacagaacatgcacaagagagacaaagggcgatttttcccgaagttctgatcacacggatcctactctccgttgaggtgctcaaagagcacggtctcgatt

SEQ ID NO: 51706 - DNA, 364 bp, Oryza sativa
  unsure (1)..(364): unsure at all n locations
aatagattaagagtcggactctgtcctatgctctctcttaaatagaggagcnaacctgttgtaacagcaagggtgacagcagtcctagtttctctcataaatggaggagcatacttgttgtaacagcaagggtgacggtagtgtatgactatggacgactgtacatcgtgcaatccaatggatcgatgatcgtggatacccggatacactataatatgctggatcggtgagaggtacccatagccactgccctatggatgtatgcttcggacgaacctcgttaacaaatatcgtgcatcggtgtcggctttaatactggatgttctatggtttgtcttctgtgtttcgtcttcgatgggaattt

SEQ ID NO: 51707 - DNA, 364 bp, Oryza sativa
  unsure (1)..(364): unsure at all n locations
tcgccacgagcacataacaaaatataggaggagaggcgggggcagtcactgagtgcctgggcccccgagtccggcgcccgtgaccacatctgtccaatcctcgacgccggcactggcaccaccgtactcgctcccgctcttctcgtacgaggcaagcgcgaggttgaaccgaggggccgaccccatgaagctggagacgaccgcgtcggacgcctcccgaacctgccctcaagctctcgtctcagtccccggggggatatcctcgagcacgcgccacggaaagaagtcagggtcgcaagcttgatgacttgcgaagacnagctccaccgcagcccgtgccaaggaaaccgacgacgacttcaca

SEQ ID NO: 51708 - DNA, 450 bp, Oryza sativa
  unsure (1)..(450): unsure at all n locations
tctcacattactctgttgactcaaacttgtttcagccgattctttctatttctggatccacgtgcccaaagacgacatccgcttgttgatcccatggatgtgtcatagatccggcgatgcttgaatgaaggaattgagttccaacgtgagctattgaattntcggaaggacggtgctccactgtacaacaagctaatgctcattccaatgcatggtgatgatgtgtttgtgactcacgtcattgtgatccaattgttctctgaagctaacattgatcttatcaatgtatcatatccagtgtataaacaacagtccatccacagacccaacattcaagagatcaaccctgcttctcatgaacatattcctaagattcaaagttccgagtactgctgcatcctacagctctcagatgaagttctggcgcacaacatattgtctcgcttatcg

SEQ ID NO: 51709 - DNA, 317 bp, Oryza sativa
  unsure (1)..(317): unsure at all n locations
actttctgagtatatgaatacctactctacattatattcatgttatactgaatatactgctagcttatctgggagatgctntggtgcgggtataatttttgcttatgcaattactctatgtcatgacgatggtattagagtagtatctggtagtttagacgtggtgtctagattacgggatatcataatttggggttatatgctgcggatgagaggtgggccgctgatggtggtgacagctcaatatgggtattcctccgcacatgtatggtcatgaccggctgttgtaagaactcggcagcaggggtggcttctcg

SEQ ID NO: 51710 - DNA, 483 bp, Oryza sativa
  unsure (1)..(483): unsure at all n locations
cgatcatgtgccaccctctcctttttttctctctcatccaagaatccaccaaagtattctacgtgatcaccccaccgactacatcttatgagacatcaacaagggagtatccactcgttctcgtattgcaaatatttgtgagcattactcgtttgtgtcttcgcaattatcttgtgataaacagctgtgagatcgggaaagctgattcaactctctgtactaaaagacattataatgatatttttgtgtgccaaatatatgtcgatgacattatatatggttctactgacaagtcttttagtgaagagtctagtaggatgatgaccaagcgttttgagatgtccatgatgggcgaatngaagttcttcctcggccttcanatcaagcaactcaatgaatgaactttcattngccatacaaagtatttgaaggacatgctcaagatgtttgaaatggagaatgcgaagccaatccacactctca

SEQ ID NO: 51711 - DNA, 265 bp, Oryza sativa
tcggacatcaactgaccaactttttgaaacatcgacataacttgaccttttgacagggtgcttctgtgacccctcttcctgcagttgatgagcataatacaagtacttctccattacatcctcaacaatgaaggccagcctcctcactgtggcaatccaactctcatctaatgggtcaccaacggtggctgtgcctatgtgatattggatgaaaacattggtgatatccaattgctcctgtattttgttgatcttttccagcaat

SEQ ID NO: 51712 - DNA, 291 bp, Oryza sativa
atcgatcgaaggtcttgtactatgctcacgggggaacgcttaacccaattgattgctccctggtcttcaacgatcaaatacacgatgctgccagtcgacttacgaacgcaggggaagcctcttctcatggcacgttccgacccgacagaaagaaggacgagctgtcactcaacctgcagactcccgagcatccaggacgaacacgagggaaaggggtgattccttggaagattggattcaatgagaacatccacacgtacaggagtcggatgaggagcaagcgagataccg

SEQ ID NO: 51713 - DNA, 412 bp, Oryza sativa
  unsure (1)..(412): unsure at all n locations
gtgttctctcctatggaggaaggtgcccttgtcatgcactttgtgttttgttccatcnaacgggatgtcaggccagttggtggagaccgatatacgacatggccgacacaacctctgacgtttgaagcgatgaccatcatggaggccggcttatggagacgcgtggtgataatctggatgcggcgctgacgttggcggagtataagtctgcggggacacaaatctatgcaatcggacggggacgctgccaaatgactgcggtggtgctggaagctgcggagtcagcgccaacagcctgatagtgacccaccccatgcacggaggttggggatgagcatatggcaccaacaatttgatgcttggaggtgatgcattcgtgccaccatgtcgacctgctctggttgcgatctgg

SEQ ID NO: 51714 - DNA, 334 bp, Oryza sativa
  unsure (1)..(334): unsure at all n locations
caactctcaggacaacagatggaaaaagtggaagggtgggatgtacaaattccaatcgatccacgacgatcgatcgacgagctgacagactctgattggtttgtgcctgtcgcgtggctggaaatttgttgccgagttcgttgcgtccgcgggatctcctgcatgtttgtggaatggaaacgaaagggattgtggaattgtcgccttgtctgcttttgctggctagtgtagttatcatctccgttttctcaccgtgatggatctgatagtgcactganggtacgaggcagcgctgatagaatctgatgcattcgtgatangatatcaatggcac

SEQ ID NO: 51715 - DNA, 279 bp, Oryza sativa
gcgtaatccaaggggtaaacagtcgtttcctctctgaaataacaccctgggaacatttacggactgaataggagtcagtcaactcgagatcgaacacgctacgccatgcccacacgcactaaattccgagcaaaaattcgaggaaatgcttaaaccaataacgatgcggtgaggccataacaaaccaattatacggaaatcccgccattagagggggacaaaggtcaaccatgcacggcaaactccaatagagaggccaccgtgaaagatgacccaaca

SEQ ID NO: 51716 - DNA, 270 bp, Oryza sativa
gagatgctagctagctactgcttgagctgagaatgagcacgagccaggagtgggaggacgccttatatatcgcgcgaccggcgagatgatctggtatgcaatgcaagcgaacaacacagcgtagcacccatgttaatttactacgaactcgcgacattgctgtgctggtgctacgaaacgaaacggagattgagtcgtcaaccccacaagatcgatcttgatcgagatctcgcaaacattgagcccacgcagcccatcacagtcacatat

SEQ ID NO: 51717 - DNA, 296 bp, Oryza sativa
gagcaagtggcaatgtttctgaacaaaggctggactacaccattctgtttcatgtgttggactctcattttggcgatccggtgtgactgtgagtaggctttttcgtattgtgctgccagccatgtgcgagatagctcgagaactcattacatcatgtctaccaatacacatagtagatcaccatcttgaaaacaaagttatccatattcacgttatgtaacaccgaccatacaacgcatactcaattcattagttaatttaactctatgttcacttgatatgacatacgactgtta

SEQ ID NO: 51718 - DNA, 224 bp, Oryza sativa
ctgggagctcggtagctaaatatgacaagaatacaatgctcaaatcaaaaccaagtaataatgtcaagcagaccggctggcctagctaacgactaaacgcagcctaaccaacgaccacaaaatacccaaacactaaccactctgagataatcactaacaaacaatttctttcttcttcttttttttcttttttctttttttgattttgggcgtttttttttttt

SEQ ID NO: 51719 - DNA, 381 bp, Oryza sativa
cccctttgtctgttcgtcggttgcttaaggtgacatctcaaactctctctgtgtgcggaaagatcgcgtgctatgaagaaacgcgatacacatgctatgtctacatgttcgggccgctgagtatcgtaataccctactcatgtgttctggtggatctgtgtatgaaagggctacaaagagtgagacaacctctctctcgttctacgctctgaatctggcaagaatcaattcccccctctatgggcaaggtacctcctttattcttctaagggataccacatgcacccttctctttcatactggactgttcttgttctcttgaatgggcggatatcagcaccgttgctgtccgtacgacgctccgatgggacagaccacacc

SEQ ID NO: 51720 - DNA, 380 bp, Oryza sativa
catgatccgggggcatgcacaatatggggactcaaatgatgccctcaagcttttcgtggagatgatttcagaaccatatggagtagccccaaatgcttatacaatttcgtgcattttgatggcctgtgcacatttggcagccatacgtataggtaagcagattcatgcttatgtgcttcgtcatcaccgatatgaatcatctgcatactttgtggcgaactgcctcattgatatgtactcgaagtgtggggatgttgatacagctaggcatgtattcgatagcatgtctcaaaagagtgctatttcttggacatcaatgatgacagggtatggaatgcacggtcgtggtattgaggccctggacatatttgacaagatgc

SEQ ID NO: 51721 - DNA, 350 bp, Oryza sativa
ctcatatgcataatttgttgatggcgatgtgtgttactatgaaaagcttgttcatttttgctggggcgtacttgggaacatgataatgatgctacacaccatggtatgtagtattaatacaactttgtgcataatgggaagaaaattactgtgctacctgttgacccttctgaaattgtagaagctgataaagaacgagctgctagtttgaaacttgatgaatctgacaatcagcaagtggctaaatctgttttccacctaataagataagcttcactacttctaatgtgaggaattaattgacggtgggtatgctgcacgaatgtacattgctattttcaatgatatat

SEQ ID NO: 51722 - DNA, 338 bp, Oryza sativa
cagctcttcttaggcaatgggaactcatcttaatttcagcacagcttatcatccacagacggatggtcagaccataaaaggtgatcacaatttggaggatatgcttcgagcttgtgctctagcgtatacttcttattgtgacaagaattgaccctatgtcgagttctcctacaacaatagttaccaagcaagtttgcagatgtcgccgttcgaatctttgttggacgaccttctataacaccgctgaattggaatgatactgctgaaagaatggtttttggaccacattgaattcgtgaagccgaataaagaggtgctctaatcaaggatagattaaa

SEQ ID NO: 51723 - DNA, 387 bp, Oryza sativa
  unsure (1)..(387): unsure at all n locations
cagcaaagaaatccaagcatggcttgttttttctggtgaaccagntggtaccatgcttgatagttcaaacttcagtctgaagaatttgaatattagtccggatatcctaagtagttcatatgtcatgcaacagtggcagaaaaatgccccagtgtggaatggcctatcaaatgtagtccatggcgatcatgtgccaatgattcctccaggaattaatcttcctcaagttccatttgtggacaattccggttttggtcatatgaagttccctggtgatgttcaactgatgtcccagatcgggatggcaacacctttttgtacaccaaattcttttgggataccatgttatcctaatttgcagtcgcctagtgtttgggttccttcatt

SEQ ID NO: 51724 - DNA, 329 bp, Oryza sativa
ctttgtgggctcctgaagcttctttttctcttgcggagaggcctcacactaaatgcttctttagtcttcctgcgttcatgaactattgccctgccaaatatcagaaaatcaatttatgactaaattacaaattattctatatcaacgacatatattcaatctgattggggtattcaaccaaaactatgaatatacaatgttacctgtgcagctgttctgggattaattaatggcttgttctgaccattcacttaatggaaccccagttatacttttttcagctcttgcagctgcttgatatacataccatatctcacttaacccatcct

SEQ ID NO: 51725 - DNA, 337 bp, Oryza sativa
gatacctccatggctgatccgagatctgcaccgataatgatttaaaccgatggaacttgggcttaccaaatcactgtaacaattgcgtacagtgagctatctatgactggtgattattcactcgtagtgataggttttaaaaaaattaaaattggtagcctcggaattataccatgccttataaaaaaacagatgcacagatatcatagtttttttccaattcatcgcaatgcatcacaaattacataataacattatttaaaatccacacaagtacattacatacatatttcaagccatggtacctacattcattgacctataacccaactaccaa

SEQ ID NO: 51726 - DNA, 487 bp, Oryza sativa
  unsure (1)..(487): unsure at all n locations
tgcccgacagtacttcgaacgtgcactgtctcggattgatctttttgcatatcnaccgangctgtcaaacgtttcccgcatatcgtcaatcaagagtcacttgtcttggtcttgagaacgatgtcgtcgacgtatgcctcgacattgatgtcgagctggtcgctaactgcgccctggaccgtgcgctggaaggtattccctgcggttatcaatcccgacggtatcttacattgcatattaccccgaacggcgtgatgaatgctgtcttctcttcattctcttttgccatgctgtattggtggtagccatagtaagcgtcgatgaagctcaatagctccatacggctgttgagtcaccatttgatctattctaggattatggaagtgatcctgggggcatgccttattgatgacggtgaagtcgacgcacattctccatgttccgttgccttccggacatgactggttgctagccctctaatgaacac

SEQ ID NO: 51727 - DNA, 370 bp, Oryza sativa
  unsure (1)..(370): unsure at all n locations
gcatgctgnnatattacacatgacatgatatgctatatgtgttaaggtcatggatatcacatacctaatagtagttgactaaatctcggcaggatccaccacatatcatgtcttatacggaaactgacttcagatatggagggagttctggataaggaaagacaaccagagttctacatggaaacgacaaggactactcagattgtatccatattggtttccctagttctactggacaagcggacacctgtgggtataaataaaagcccccctatgaagacacgatgacacccatgatatgagacgatcaacacgatcaacaaccaccatggtggaccacgagacaatcaacttccaacacaatcaacat

SEQ ID NO: 51728 - DNA, 465 bp, Oryza sativa
tttacacgatactttttcttttttctttgatgagctctcatgggagaattatcgttcgtcaacggatcaaagcgatgtatgtacgtcatgcgtaattgtcgtcaagtgaacaagcgtatggttttcttagaaagatttcaacttgtaatgaacagaaaccgggttcatcacggcgcttcaatttgcataactctgcatcgattcttgttaacgatacgtgggatgcatagaccaagtgccgccagttgccatgaatcatgaattaatgaagcacatacagagataacgctggcatagattagtgatatattatgccaggttatatctgaagttgttcgagcggatgacggaatattttggttcatttcaacaatgtctaatttctctaagtcaagaaactgaaatatttactcactcttgtttaattcatgcgcagtaatatatttcagcaatgatctagctttc

SEQ ID NO: 51729 - DNA, 319 bp, Oryza sativa
  unsure (1)..(319): unsure at all n locations
gatgaaacagatcctgctgatgaggagttcttccatgagcaagccggctacgatgagttttagggtttcggtctactttccaagtcgcgcctgtgattgtttggtccaagtcctggcttccgctttccttttgaatgcaggtgtgagctcgggatctgtccgcagcccaacatgactgtacttctactctataataaagagacattctgttgctgagatattctggctccctgtgataccagcactgtttcctgagactggtatcnattaacaggttagtttggagcgtcacgggtttattgcgggcgggactatctct

SEQ ID NO: 51730 - DNA, 259 bp, Oryza sativa
ctcatggagatgtataccagcatgctaattctaactcgaccaagatgttttgttgctgctgcacgcattgggcaataataaaggcagtttcaagtcacaaccatgctctgcagctgagggcattgatggtgttttctcttcctttaagtatctctaaaagggatacaagtagtaaccaccagttaatgaaatcccagcaattatgtcaataaatatggaaatcccagccaaacaacgctcctttggctctagttcctac

SEQ ID NO: 51731 - DNA, 409 bp, Oryza sativa
  unsure (1)..(409): unsure at all n locations
gcttcactggtatgctcctagaaccttcttctctnatcctattaancnatctatggcgcgttccgaaacaatgtcctggaaatgtatgattattgattactctgatagtgcagggtttaagtggattcactattattgattttgcctatgtaaggatgcaagattatataagtggatacacttgaacccttgcacttatacatcccagaccttgcgtattgatctatctatgattcactatttgactatttgttggaatgctctttttatggagagaaaggtggaggtggtgaactggtgatgataaagatgtagaaatgtttgttctaagaatgcttgcattttatctgtagtaagatagtgtatgtggtanggatcacagtgaaatctcgatgcacacaacggattg

SEQ ID NO: 51732 - DNA, 259 bp, Oryza sativa
  unsure (1)..(259): unsure at all n locations
cattgatgatcngaacgctgttgatgagatggcactgtgcggcgggtgggtgctcaacctgagctcctancatttaagttctttttggtgggaaagtctacatgaataaagggatgtcctcatttattatgtccccgataaatattataagaaataagaaataaagatttccaatattgatttgccctccttaacatacttgttaaatatactggccaatggaaaaatataccaattttactccattaaacatgaatcc

SEQ ID NO: 51733 - DNA, 401 bp, Oryza sativa
  unsure (1)..(401): unsure at all n locations
ctcatcggcttatctcaagacctcgaaaccgatgtttactctaagccgatgactactctgagcttatgttgttcgttatacaaaattcaaattctggaagttgatttttttttgtttgccgaagggagtgcataccacatacgaactcatcctatcattactacgattcacttgacaccgtgtcttgctcttgtatcttcaccatttccacacgggaaaaaaactactactccagccgcttcaagttataaagctntgtatcttggttaaagctaaactttttcaagttcaactatgtttataaaacaatattgcaatacttatattactcaattattttcatcaaatcaaaaattgatataatttctaataaattcgcttgactgaaatgtgactacttt

SEQ ID NO: 51734 - DNA, 403 bp, Oryza sativa
  unsure (1)..(403): unsure at all n locations
agcttattacccacagtatgcttttttaattttctgaaccggnacacttattactagcagccttaatcattngagcattaaaaaaatcatactcatcaaattagttttctactgctatctcccaaataatgtatgcagcggaatcatactttccatcatagactggtaacttacatgcaacttgtgcaataatatagtcatgtgcctcatatgcatcacgtgaagaagatgcataatctcgcgaaagagagatgttgacgttgaacatgaccatctttgttccccttgcgcaatcctgccatggttagcagcatacaagaaacatacacaagaatatacacgcttctattaacattaagtctcgcgactcaatgtacacacactaaacttttaccaactttac

SEQ ID NO: 51735 - DNA, 445 bp, Oryza sativa
  unsure (1)..(445): unsure at all n locations
atttatctactttaaatgactacctgttgattgtttttttttctatgaaacatgantactnggcaaaatgacaaatgcacctttcacgggtcaaagtggtatggcaagtgaactattgtgactattgcattctgatgtttgtggaccaatgatctcaactgccatacgtggttttgggtaccttattacctttaccgaagaacttagtagatatggntatgtctacttaatgaagtcatatgtctgagtactttgaatagttcaaggaaattcagaatgatgtacacaatcatttgggacagacaatcaagtatctacgatctgatcgtggtggagaatacttgagccattgaattcgcaatcatctaaaggagtgtggaattgttccacaactcactccaccaagaacgcctcagtggaatggggtgtctgaacagaggaatcg

SEQ ID NO: 51736 - DNA, 345 bp, Oryza sativa
gagaaaagcaaacccatatgttagtcttttagaaaaatagaaatgacagtgaaatacccttgttgagggctcactgtcagtccctttctcttcttcctccttggcctctctcatctcatcttcctttacttttggtgtttggccaatcattgaaaaatatagcttcttcctcttggttgaacaaccattataaaaatattgtttttcaataacttcagtaaataaatcttatattaactgaaacaatatatatactttatttttcaataaccactatataaatttattattattctgataattgaaatgtaattcagtatattatgttggtataatacataatta

SEQ ID NO: 51737 - DNA, 199 bp, Oryza sativa
ttaggagaagcaccacattcttattgacctcaaaaaagtgccctaaatctcgtattcatgatgccgtcatttggagtttatccacggacagaattgcactctccttctccctaagacaatcggacgagaggatttccaatatcaggaggccatactactagttgtttttacaagctgtaatcgaaatagagttccgcca

SEQ ID NO: 51738 - DNA, 430 bp, Oryza sativa
  unsure (1)..(430): unsure at all n locations
gcaagcctgagctaaattataaagaggctctattgttcttttttgtcactanaattagggagagagtaatttagaagaagtcagaggaattccggagtcgtcgataatcctctcttatttctggtattttgntagctactctggtttaataaaattatcatttaattaagatttacttagcgagaattattcttgtttaattcctaattagcgtgcgggatcaatgttcactatagtctattaatttatggtgattggcttagtgtttagctagcgtaaagtagttattaattgcgtagatgcggtgtctgggtaattaatttctggtgattgctatttatcccatggtacgttcgaggtgggtgtagaggtggagacagccctaaaaacacttagtcctcccccgtcgggtattcagtatagcgtcttc

SEQ ID NO: 51739 - DNA, 398 bp, Oryza sativa
  unsure (1)..(398): unsure at all n locations
acactaagcttgccgtgctaacttgacattccctacatggctgccacggncgttttttttctttttatacctacaataattattcatgtttacactctcgattcaatacattttacagatgattgtgtaaatgatgcagtggctaagaggcttgtaatttcttacaccactggccttgtcacttatgggtgtgactcgcccttggttctccattccacgttgctgaaacgtgtcaatgcttacattctcttacctgaatgtggtatgaaccctaaccgtgctacgaatgaatcccttgttggtcttcgtctgccggaactcatatttggtgatgtcagcgaactggttatcgccgatccataacttgtggttgcctgcattgaacgactcgatgaatg

SEQ ID NO: 51740 - DNA, 398 bp, Oryza sativa
atatacattcaaacaaaataatagggagtagctatatttatggcgccatatttttcaccataaaatagtcggtatgtttttacattgtaagtacattgtaagtccttaaattacatatgttaatttagtgtatttacaatgtaagtctcaaaaatacatatgtaagtcctaaaattacatactaattacatatctaagtggtgtgtaactaccgcgtaaaattttataaaatatgaaaagtgacatattcgttgcaagaaaactgtcgattaagatatagcaattcagtatataaaaccaaccggaagatcgggtggatacgggttgctttgcatgcgaacgaatccaacagacatgtaaaccgactgagattagttgaaaaaactggtctcttctta

SEQ ID NO: 51741 - DNA, 149 bp, Oryza sativa
caaatggaataaaaaaaaaaaagaagatgtgtgactcacaaaataatggaggcgaaacccggtggaaagcgacttttggagcggaaaagggggacgtaaatgaaggcttacgaaaaccaaagacagcccagaggaagacaaaaagccga

SEQ ID NO: 51742 - DNA, 460 bp, Oryza sativa
  unsure (1)..(460): unsure at all n locations
atttgcacatctatangcctcagtcctatagcttgttatatttctgttttctgctagcatatatgctatgattatttttcttccttggctttctttcttttcttgttgcattttggtccacaagctatgtaaactgtatctgttgcatatatgcacacacctatggacaataccagcattgtgtactgcactatgccacatatatagctgcccacctgcattgatgcatatgcaaatgttgcttgcatgttgaggcatcttcttgggtactacctccgtcccatattacttgtctttttgagtctttgttcgtcaatgtttgatcattcgtcttattcaaaaaaaattggaattattatttattatgttgtcatctgctttattatcaaaagtactttacatatgacttatctgtgtttatatgtgcactaatttgtcaaataatacgaatggtcaaacg

SEQ ID NO: 51743 - DNA, 389 bp, Oryza sativa
  unsure (1)..(389): unsure at all n locations
ataacatcctctattgggacattgcctttnttatataacatattggcagctactttcttctgttcgaacagcacctgtggcacttccttcttgataatatacctttttaaatttcagattgcattgcatcatgcttacaaagaggaaaatattaataaaatatggcaacattntgaactaagatgtttgtgctgctgaatttttttttgcacaattttaatactattgaataatgttctcttcattttgaagtatatgcatgccatttcataaacttatccggtcaaagttataaactcttttaatgcaaacatacatgagcataggtttatcatgtgaaaaatactcccacaccattacatttataaagaaatgagataataattaat

SEQ ID NO: 51744 - DNA, 325 bp, Oryza sativa
ctaagcttattaaatgacatcaatatcactacgatttcttttttattatttatactgcttagactgcactcaaatttggcgacaactcttgcctactgatgccaggctactcagtttcagttaagtcagattaatcacagttgaagtcaagtataaccatcaatcaatttgagaatgacatacgtctctttctcaagcaaatcgtgtccgactaccactgttgccgcgtgtctcgcgagcactgcattgtgtaaggggtggcgggtgattgtgcggcgcgccacgtgcacctgaaataatatgggaagaaaggggagcccatgat

SEQ ID NO: 51745 - DNA, 428 bp, Oryza sativa
atggttataatcaactacatttttgtctctgttttgacttgcagaatgctgcattcttatgatagattcgatctcttcagatgacatgtacttaaacctgaattctaggccaccactatcaccattttgactaccagtatcagtcaatggttgagaaaaacgtgtgctgtgttttccccttcctgaccttgacctcttagctctcaatgaaggaacattgctgatagaatcaaaccttcctgttaactctggggagtgatgttggtaaaatatgtgaggagtgaaatttaggtaattctgatgggatggctggacttgaacttgtgccaatctctgttgctgctgagaatatagcagtgatgacattgtgctattcggaagtgatatgtgtctctgtaacatgttctgaagtagattaaaatgatcca

SEQ ID NO: 51746 - DNA, 271 bp, Oryza sativa
  unsure (1)..(271): unsure at all n locations
actcatcatgcaagacgctgaacttctttcaacgccacaagtatattccctgctcttcaacataatcttgctttatggctaacactcttaatgtaactacgtgattatcactgtgaactgcgtgacaaatgcaatgctntacctacacattaagcctcattaacacttgtgtttttaacaaaccgtctatgcatatatattaccaaatggtatatcctgctgccagttacaaactatgataagtacgtgtgaaggagaatgaactatgtat

SEQ ID NO: 51747 - DNA, 299 bp, Oryza sativa
tacttggacatcgagttcgatgtcaacatcaacagatatgtcggtcgatcatgcatgtcactttgtactactgttctgctactgatgcatatcctcattaaatatgcatggttcaaatctagcaccaccacatttgcatgactaaacccatatattgctagcctaattgtgtgttaaaacaaagtctagatcttataatacattatggccttctatacttggacagaatgataattgatgtttgcctactatacgagagctgttacaaaacattagattgacagagctatccatcatac

SEQ ID NO: 51748 - DNA, 372 bp, Oryza sativa
aaacgagaggctgactcccatgtggtggcatcatgtggtgtggatgatctgtgctgaatatgggcctgggtccatgtgttgttaactatgctggcttgcgtagtgggtggaggggcttctgcgaaagccttggtttctccggccctgaaattggcacacacggcgtgaggctggcttcacagatcagcgatcactgcccgcttccaacggtggaaggataacatgccgctgcaccatgggcccgcttctggccccactattacagaccaccattattttcgacatctggtgcatggtagataccattttacctttcgcatgtgtcgcatttacaatatatatttaacagcatactgtgagaacgaaccataa

SEQ ID NO: 51749 - DNA, 385 bp, Oryza sativa
  unsure (1)..(385): unsure at all n locations
cctttaatctcagcttgcattactactcgcgtccttctgaagaggctctgtctatttttgtcngccatgaaagacacctactgaagttgcatagaaccatctcaactaatctggaaagatggttcgtttggataaccattatttaatggttttcatcaacgggattggtatggatattgtaatctgtgctatcttcttggttagtacaatggatggaagatgggaacttgcgaggcagattgaagctgcccattgcgatgttaagatttctcaatcatgactaccttgacaatggggtccctttattgaatgtgtttgcactaacattatatgtggtttgttctacagcccttaccaatcatatttatagtaggatgggtgctaa

SEQ ID NO: 51750 - DNA, 195 bp, Oryza sativa
agctttcaactgaagagctgagagccatgagctagatatctcgacatccactcttacatttcgaaaccctctactcatattagaatctgctcactggaataacagagctattcacctgacaaggtaattctaatcacgagaccatagcgctgcgtactcctgttcatcacgtttatattggcgctaatgacacac

SEQ ID NO: 51751 - DNA, 292 bp, Oryza sativa
ttttttaccccaacccagagaccgggcaaggaacacacccgacacaatgaacaagcaggatatgcccgacggcccggagggcagaagaattcatgcatgtccgaacgactgcatacggactacaaggaaaacactgactagggaggctgccctatccgtgggggatcaagataccaacgaccaaagagggaaagtgaaggaagtaactcaaagacgggaggccccacaaaggcggtgtggtatcccccaacagcggaccgcatgaagagaatggttgcgaacaacgaacaag

SEQ ID NO: 51752 - DNA, 356 bp, Oryza sativa
  unsure (1)..(356): unsure at all n locations
cattggaattatatctcagagaattacatcttacatcctctgcgttgcttgtgtacctgtcattaaccctaaagaactcatatgtgtaatatccacaaaggacactgctnttattgtctcttgtgacatttcatgacatacacatacaaggaattagttatacattgcaggtaaaattattaaataaataagtgtgtagagtattactagccagtatatatgcactagcaacttctgtatcatttgcagctgttccctgccctttactttgtagtagttgtacgcactgtacacataataggatttatgattcgtattaatgaacaccatttaatagtcatgaatacctcatgaat

SEQ ID NO: 51753 - DNA, 352 bp, Oryza sativa
caggacctcgccggcctttcaaactcgtcgcgggcatcttccgtcgccgttcatcgctgcgtaagtgctggggagcatcgtcgatgcctcctcttcctcccggtgccctccgtttgcattattgtgccgtggttcgccggcaaccaccgctcctatgctgttcacctgtcaggttttccttaatccaatctaatctaatccggggttccgctagcggtgtcgtctccgtgtggtgctgaacattgtcatcatccctccctcttcgaacgtttttgatcggtgagacatctgtctgtgtctcaagttgccctagtgccaccgtgtcgcagctgtgtgccgctttaacctaccc

SEQ ID NO: 51754 - DNA, 337 bp, Oryza sativa
cgggctacaaatttatatccagctgccgcaccaactctaaaacactgtgtgtgcatgacatgtgggaccaattattaatgatgtagatatatttgatttaactattgatgaattgactattaaattgactatagataatttgaagccacgagatatcaatactattaaacttgctcacagtattatccactcggaggaagtataatagtaaatgcttttttttcatggaactctcttaatatggaatcgcgtttcaaccgccgattacatgcatgtggttaccatgattactgtacttaattatcttcagggcacagtaaccattaagatccattag

SEQ ID NO: 51755 - DNA, 328 bp, Oryza sativa
tctttgagacagaaagataaatatctcatccagacatgaccataaatgacatcttcagaatatgacactatattaataccatataacagatatcagagatgttgataaacaaaagactctatttctttctggaggaatttaaaataatgtacctcagagagtgaatatgaacaacattagcaaacatgtatattgtgctctgcgatgtttgtatacacacatgtgctagtgtttaacaattcccagttaacttcaattatataggtaagagacaacaatgaaaggaatggagaaagggatttctggatcattagaagatgatatggat

SEQ ID NO: 51756 - DNA, 354 bp, Oryza sativa
  unsure (1)..(354): unsure at all n locations
ttttacaaaaacatcacattgaattttagactcatccccgaggattaaaatagatcaattaaaactaattgtgcagatagggaagaaatcatgagacaaatttctttagcctaattattccatgattagccgcaagtgtcacagtaatctacatatgctaatgacggattaattagtctcaaaagattcgtctcgcggcttccaggctagttatgaaaatagctntatcattcgtatacaaaaactcctttcgacttccggtcgtctgatgtgatacccataatattcctttttgcgaactaaacaggccctaaacatctaatgtgacatgtaagatcaaatttatatcgtgat

SEQ ID NO: 51757 - DNA, 333 bp, Oryza sativa
cccaccccagaacaacagccgacatgaaaaaaaaaaaagaaggtgtgactgcaacccaaaaccgcacacagacaagccgccgcaaacggtccacaagaaacaccgggggggcgagagggaagggcaccggccccaaagacagccggacacagggccagcgagagggaccccccggacaagacaaacaacccgaccgcaaacaaacacaggaaacgaacaagcgcaggcaaaaacaggcgagcacggcccagaacgcgcacgggaaacgcgagaacggcaacagcgggcccaaacaaagcgaacacaagagggcacagcacaggccaccggggc

SEQ ID NO: 51758 - DNA, 449 bp, Oryza sativa
  unsure (1)..(449): unsure at all n locations
gcagctgcaagatactactatatgcgttgncttcttattanggngagnngatatatacaggacggtatattcatgnggaacgacaacgtttggtggttggtacacatacctctcagcaaaggaatgtttangttgaactgctatattcgacagctagctatctaaaccgtatgcgagataaagttttggccttctccgttgggcgccttgcggncaaggcaatntgctcgctcagttgctcatcacgctcagctctcacttttaattattgattcgagccgaagctctccgtacttctgcagctagcgtcggctagccatcgacggcgacgacaaagacagtcgccgagtaataaaataagctcaatgtcgcccacaaaagtggccgcgattcccagtgattctccggtgagatagggatcgagctgacgatgtatctcgagggatatg

SEQ ID NO: 51759 - DNA, 424 bp, Oryza sativa
gatccaaacagtagtgattccatccttttctagcttaacttgttattgttggtaacttctatgggatgtgtagaggtcatataaagttatagtactagtagttgcaaaaggggttgttgagcgcatgtaatttaatttgtatagtactcctactatcttatttgtatatttacagccaaactataatgcacatctttatgctccttgtttctgtactttttatataagctagtctttctgtctgtcatctctctgtgcgttcctttttcttgtagcaagctagctctgagatgtcatgtctcaccatcgtcccataaccggaatcttccatccatgataagcactatcgagagagggagagaggagatgagctatatataccatggatgaagggaatatgtatgtatgacaaacaccccactct

SEQ ID NO: 51760 - DNA, 459 bp, Oryza sativa
  unsure (1)..(459): unsure at all n locations
agctncacaatcgagtccatgaagaggtcccttttttgtttncttagagctgnncccgtggacgatgcccttcttaaagagcagggcacaatctttcttatccgagatgagctctgccatgaacatgacatagctgcataagagccgctcctcgcgcggccaccacccacacatctgcaggaacacgatgttggcgagcagccgggcgtcgtaaagccggcacgtaaaagccggaatctctagcttcccgtccttgaactntacttctgtaaaccggtatgtctccgcctgctttatcctcacgccaactcggacgagttctttcaacggcgggatctccttccaggatagccagttcacaggtttggtagaggaacgcgagaacgtccgcttacaaaatgcgtagagatctatacgcttcttcttcaacatgttcatgggccttgctaccaacgatag

SEQ ID NO: 51761 - DNA, 375 bp, Oryza sativa
  unsure (1)..(375): unsure at all n locations
tactatagcttgatagaaccttgtccgatccacaactccagctatttccacatcctctcgttgctgtatgccctccttgctacacacacccgaggatgangccgacctcatcgcgtacgcctactgctctacacattcatatgccccaacaacctgtgctccatctgtgctattctctctctcgtttgattcacagcagtgggaagcgccactgccgtgatcagcaggggcttccaggccctctacacgaatgtggacgtcccttgtccctgccgatcgctgacctctgatccatccttctcgccggcagttacccatctattcgccgactgttgcaccgtacaccccgctagccgctgctcgtctcgtcagcct

SEQ ID NO: 51762 - DNA, 286 bp, Oryza sativa
  unsure (1)..(286): unsure at all n locations
cgcgccaccttctcgcggatgaatgcttgacgttccggggcctgccaccgtactttctgccggaccggtcttgcgcncgaccgcacggcgagacggtgctcaatcacctccctggggaccccgggcatatccgccggtctccatgcgaagacgtcagcgtttgcccgcaggaaagagacgagcgcgtcttcctatttgccgtccagaagaccaccgatccgtgtggtcttggacgggccgtcgcccatggcaacctccttgaccgggacctcgtcgcatgtgacta

SEQ ID NO: 51763 - DNA, 409 bp, Oryza sativa
tctgaaattcatcgtgaactacgagatcgactgtcctctcttgctctttatgtagctgcctgcgtcatcaactgtagggtctgggacatgcacgaacgtctgtatgtatccgatctcgaacaaacttgatctactacatgagcatcgctttcctgggacttagaggcgatccatgatgcgttaacggtgagatattcatctcaagatcaggagagatcatccgcgacattgattgacaatgggatcagatcgtgtctgcgaacgatgcgaataccgtgaatgtgtctgttctgacgatgctgaatccgccattgctgacctcataacacctgtggtcagaaaccaagaggatacttctttctgacattttgtgctcacagaaacctgatctttgtgcattgtttcatgc

SEQ ID NO: 51764 - DNA, 264 bp, Oryza sativa
tgacaaaggttcggctgcccttttgtggcggggacatgaacattgagagtccgactagaataatgatatgcccaatggctcccaaatattcacaaattttcttgagtccaatagtcgccagcgatccgacattctgcccctggaaatagcacactttctcctcggatgaggcacgagaaaggatactcaaaaataaccgacactagtatatgaaagcgagaagatgagtagagtaaccactagcgagcggtggcgtaccatacc

SEQ ID NO: 51765 - DNA, 415 bp, Oryza sativa
ggcatctccttgacaagatagtattcatagagagctgtgacataactactatccatgataatcaaagcattcaaaaaccacatcgtatccctctgcataaaacctacatcaaatcagcatgacagcgtatgaattgaagcccgtcatcaataatgctgtttactgtggcagagtggtattctttcctccttcgaaaggatgtagtcattcataggaagttgcatgtacttttcatgactactgatcacctaagcacttcatcaacatgcgcgaagagcagcattatttgagggtaatgtcatatatgactccttcaagatttgagatggatggtcttgtcccatacacctctttgaatgcattccatgtttgtcatgcttcttgagcactataacatccatgctggttatcaatg

SEQ ID NO: 51766 - DNA, 382 bp, Oryza sativa
  unsure (1)..(382): unsure at all n locations
tcttcgttcgttcgtcgncatttgtgattcctcctccctccggccgccaaaggtcagtgacgatnttcctcccttctctcctctctttgcatcgccccgcgacatcggcacccatggccaacaatacggcaaacctagtgcgatcctctcccctccttcttggagctatgcacccactcgatctaactttactcttntaattgtcactccgaaaggaagtttttttaaaaatgtttttttctccctcaacaagtttccacatcccctatccaggagaattttgaaatttgtgatgtttactagtatttaccacatccacactctctgttactaatccgaaaggcggtggcctatattattctacatgctctgggtttatctg

SEQ ID NO: 51767 - DNA, 464 bp, Oryza sativa
  unsure (1)..(464): unsure at all n locations
tcaattccattgttcaacacaatggccctgcgttgtgccaactacatgaacagctctgggttcttccccatccagcaagcagcatcagatattgtcactganggtgttcttccactccatcttgcagttgagcatgcctgtatgcataagtacatgttgaggatagtttagctgatgaccacaagaatctagagcatgactaaagtgtaccatatcaacaagctcatncatctgctgtgcctccttgagatggtttgttgcctgaaatatgaccctacattttcatcagctattggtatactttggtcagcacatgacacaatagtaatgaaggttattctgtttattatgcctcanaccggttctggaacaaatattaattagttgctgagtgtaacttgtgagaatatatagttttccttagctctgcatttgtgaaaatctcattcgggtgatacatgtgt

SEQ ID NO: 51768 - DNA, 473 bp, Oryza sativa
  unsure (1)..(473): unsure at all n locations
ctcaagcttgcgagcttctctgaccatagctgtttccagcaagagataatcacatgttttgtgctaccatgacaaccaactttgacagccacaatgtggcactgaatntgtaaggaatcattgatcatggtcctatgtagcattatatgaagtgtgactntactatcatacttcanatcacattgatagccaatatacaagccactgcttattgtagccatgcggaaaaacaaagggcatgattgcatgaaagtctcaactcgaaatgaaagataataacaactcaccattgatgccatacaggctcctcaacatgagctaatgagcagcactttcatcttcaaattagcagagattgcaatccaagcttgtgaaagcagattaccacattntcacagcaccaacaaaattacagaatacaccgactataataaggatggatactctcggctgtatctcaacatgagctaatg

SEQ ID NO: 51769 - DNA, 425 bp, Oryza sativa
acaacgatggcaacatggcgggacacaagtctctcttgttacctgcaaaattaagtaaggtcggccagtcaggggagcattatcttttacgcacaccaccgaacctccacagatgatcatggccacaaaaactactcccaagatcatcacattgtagagtacatagcttgacagacaaatcagcactgaaagcctaggtggtaatcatacaagcaatcatgtttcatggctgcaggcaatttttcctatggctttaccttgcaaacgagtcactgtgaaattagttctttgaacttttgggctgaccaatgctttgtttctatagatgcttcttaacagaaaacaatagtttaaaaaaataggtacaacttcttaaaaagtacaagaattgtgtagacactaacaaaatatgctaagcgtctcgc

SEQ ID NO: 51770 - DNA, 436 bp, Oryza sativa
  unsure (1)..(436): unsure at all n locations
gcttgccttgactcantccatcacttcctccactgttctcttctagagaggaagagattgagcgagccgacgcgtggccgcaacgtgtcgtcgatctcggcttcccttttctcgctctctactcctcccagacgcgtcgccattctccattcatcactctggagctgaagaagccgagggaggaggttctctgcctctccatcggcccaaaccttgccggcgggcgtagtgacgacgaccttcgccatctgcggttgagtcaaggtcacctccatctttttcgcgttcccatctctccacacaatgccgagcatttcctcttttgacctaaacccctctcgtgcagtgcatcgtcgggaacgcgaccacgccgacaacgttctggagcacgcaccggagcgccgccgcttcaaccatcgtcgtcgtcggccattct

SEQ ID NO: 51771 - DNA, 427 bp, Oryza sativa
  unsure (1)..(427): unsure at all n locations
gaactgccattgtcacatantttttcctaagaacctgaatacacatatctggagccctattttccaactttatcatccacttacttgacagacaaatggtcatcaccctagtattcagcaagtccaacccaccataatcttttggcctacacagaaatgtacgaaataaaatcatatgatcgttctctatatgcatcattggcttcatagaaatagatctacaaaatccataaggattataggcttattacctctattcataggattcttagtatggggtaagatctcttagactaatttataatgattggatacatgtgacgcctaatccnagcattaccttctattctatgattagaatcctttgactgataagccatgggaaatagaacccatctttgactatatggagggggaaacacaatat

SEQ ID NO: 51772 - DNA, 473 bp, Oryza sativa
  unsure (1)..(473): unsure at all n locations
agctntgcaaaatctttattctataaagattctncataatttaagttgggtctttaatataccactgaaggtatcgagggcactaatattggaggttaataacaaagagaagccataaaacataataatgcacatggaaaaatattacaaccatgaacggatccatgaatacatgatcttttctgcatcatgcacgaacagctgcattgttcattcataaagtgagcattcatgacaaaattgtaacgagcaaccggcacatgaatccgtgttgttttattggtgtacagtcaaaagctcaaaactatatatgccataccaccttgtatctagcagaggaactattgtctctatctttctaaagcatgacacacttgacttntctatttggattattcttcttctcttaaaatatttgtacaaacgacaaacatactatacatgcttaaagtacttctgatgacaaatctagt

SEQ ID NO: 51773 - DNA, 478 bp, Oryza sativa
  unsure (1)..(478): unsure at all n locations
ctcaagcttcgccaacctcatccaatactactgtgagcaccctggagcttctatagttgcatgcatgcatnttatccacctagatccggcctctaacgtgacatgcatcactaccccgagacccaaagccactcgtgctgccgtcgccattgattccggtaaccacagatcacgattagaccaccattggcttcgaaaagaacccctattccttttattatttggtttcatgccgagatctgccaccgttcgccgccagatagctcgagaacgagctcagccatggctatgctctgttcagctcgaaccagggacctctgtggagaagaaacaaaactgtagatactactntgtaaaaactaccacacacatggaacagtcataggactgcggattggatttcctgaaagccagggaccttttgcatattggtctctcactgacatgtggaccccatgagcttataatctgaaaatct

SEQ ID NO: 51774 - DNA, 468 bp, Oryza sativa
  unsure (1)..(468): unsure at all n locations
accttattacataattntctcaaacggttatgtgtatcatatataaagatagagtcctgtgattgttagcaaaactaaaaagaaccgctagtgtgcataagtgttgtctgtgcgcgtcacaccaaatcaatcttcttttgaaagaaatcagcacgagattgtgctatttcattgaacatagagggtaaaaaatggaactccttggggtgaggaaacacaagactatacagtgctatgcacagcctttgattggtctagtanaaattccctaagccgcctttgcttctgccatagcccaagttcttgccttctttgtatttntgtcaagacgctaagagccacggtctcctagtgctcgaaaacccgttggtttctttccttctagatttctcagtcgacgaatagtaatatggtccgtaggcctcatttgggtacttccttttttgtggctagtatttcctatcagtc

SEQ ID NO: 51775 - DNA, 382 bp, Oryza sativa
  unsure (1)..(382): unsure at all n locations
ctcacaaagcgaggttgagtccgcgccgaataggcgcgaagattatattctatcaangcgctcggaaccaaagaacatactggccgaactcggggaattggtagcgatgtgccctggaagcatggactccctcagtacagctcccaatacaggaaacggatagtctccaaggaagagaaagacgctcgtttgaaggccgaacttaacgttgaggccattcaagaactanaagctagcatgaatgcaagggtggaagaaagggttaacaacgtcctcgccgacatgaatataccctgagtcacaacacctgctgtgcaaccaactcctcgtgtacaacacgacgcgagtccgtcacagcataggagtatgtgtgcatccacag

SEQ ID NO: 51776 - DNA, 321 bp, Oryza sativa
gcccatggatcaagccattttcacgaatcacgacgcctactagctaactgtggcccttagataccaacaaagaatgtcttgaagcgcttcaattctcatatgagacattcaacatcattttcttccatcatcccatggtccagggccaacctcccttgataagagagccccttctggcacctgtgagcctttgaagcgccttttctatgagactctagtgatcttcaagccttctagacacctttgaggatttccgcatggcttctaagaacgaagatttcgttttgtatgtctaggggttaccttttgcctttaactcga

SEQ ID NO: 51777 - DNA, 510 bp, Oryza sativa
  unsure (1)..(510): unsure at all n locations
cttagaatctcagctttggaacaacacctttagagaagactgaccacaccaaacatctgttctaatatatacaccatccctttatgaacttctttcattactaatctctccaacaccactctacactcatgcagtcttttccagaattgagatccccctttgaagaactatgaaaaaaaagcccttgacatcttttactagttntgttgtatgttttgggatagaggaagtaaattatacgaatgagtcgtaatttctatgggtgaacatgtctacatgaagccatcaacaatctagctacttgtaccatccaagcccactcaaatactctgataaattatgaaaggcanaacaaggaaattatcactattggtgttatagttgtggtacctgcatgacttcatttattgggatttacatttgatatctaacattagttgtgtgccagtggtgcagagctggggagttatatttcctcttactatgaaataaaatcaacgacaatatata

SEQ ID NO: 51778 - DNA, 70 bp, Oryza sativa
gctgcagctggggggcccgaagtgcctcctttttttttgcgacgagataaggctgatctatttcccgtaa

SEQ ID NO: 51779 - DNA, 410 bp, Oryza sativa
  unsure (1)..(410): unsure at all n locations
aggatcggcctactgatgacgtttttttattaagacnnttaccgggatatgatcctactttttttcttagaaagctatgacctttttaacataaaaaagtaaaggttagagggtagcctacctacatggaattggaagagaaaatatgtttgaaccccacttcataaaagggccgtctacacccccaacttctttggggatccctacttacccgagctttcggctttggcgaatcgtgatggtaaccacaagagtccaacttgctaaagacctcctaaggcagctgcaaaagcagagggaggctcatctgcccccacaacagggatggaaaggtatcgatcgaccatgaacttgtcgaatttctttgaccacttgcttggagcccatacaagctcttcttaacaaccata

SEQ ID NO: 51780 - DNA, 376 bp, Oryza sativa
  unsure (1)..(376): unsure at all n locations
actcagcttcgcagggggactaacagtgggtccttatggcgggtttgacagttatgttttttccggaccggtacacctaacatgtgggcccttcttatccatttgctttcttatgaatgagggtttctccactttcactctattttatctgataaattcccgcaacatattattctcgaagtacaagtggaactatattattctgaaataaatatgcattgcaagcatagctaattctccattantttagttatatggacggtcgaaatttgtctggaacgacccgcaatagtgagtccgccccttgttatcaacttcccagcgcctctcgctttaccactccaacccaaacactccattcncatccctatgacat

SEQ ID NO: 51781 - DNA, 427 bp, Oryza sativa
  unsure (1)..(427): unsure at all n locations
agctagacgttccggagcttgccgccgcactttctttttaccggccttgcgcccggccgcacggagagacggtgctcaatcacctccctgaggaccccgggcatgtccgctggtctccatgcgaagacgtcagcgtttgcccgcaagaaagagacgagcgcgtcttcctatttgccatccagaaaaccaccgatccgtgtggtcttggatgggccgtcgcccaaggcaacctccttgaccgggacctcgtcgcaagtggccatccgctgcctcggggcggtgggggcagaaaggccaagcctctcgtcaccaccctcgggcttggacgcagcagcgaggcggtccgcgcgctgctcaatgcaagcaagcgcgactntaatgtcgtcacggacagagatggtgccaccagggcccgacatcttcatct

SEQ ID NO: 51782 - DNA, 453 bp, Oryza sativa
  unsure (1)..(453): unsure at all n locations
ctgccgacaatggtgcgtgcggcagcatggtttccgcatattccattatgttgtctttcagcaattgtctcccttcctctaaagatacgcagcgttgcagaatccctgaagggcttttcttgtacaactcagcttcatgcataacgtaaagtttgctccgccttgaaatccgctcggcctcatctttgtcttgtgggagttcttgagaagtcaaaaatcgtatgaggggctctcgccagtcggcttcaaccatagctatgtcatgagtgcccgcagcttgagtagtatctttgtgaggtactgtcggcgtataaaggtggtcgacgaaaacatcagagggcgccacctcgcgcttggatccaaagttggcgagtctatcagcagcttcattnattgtgtcgaagaacgtgactgagctcgagtccatcgaacttgtcttcaatttgcgacctc

SEQ ID NO: 51783 - DNA, 432 bp, Oryza sativa
  unsure (1)..(432): unsure at all n locations
agcttcaacattgcgaccgatctgagttgaataacatcttttaatcatgcgtngataggttgctcctgcgttcttcaatccaaatggcatggtgatgtagcagtaggccccaaagggcgtaataaacgaggtcttcaagcagtcggattcttttaatcggatctgatgatatcctgagtaacagtccaagaagctgagtaactcacagccggccgttgagtcaaccacctggtcaatgcgaggtaacccaaaagggtctttgggacaagatttgttgaggtcggtataatcgacacacatgcgccattgccccgtctttttccgaaccaggactgggttagccagccagtcgggatgaaagacttccttaatgaagcctgctgctaacaagctggttaactcctccttgatcgcatccttcctgtcctgtgc

SEQ ID NO: 51784 - DNA, 428 bp, Oryza sativa
  unsure (1)..(428): unsure at all n locations
ctcagctcgcttaagaacataatgcattttattggagagcttgtttatattcatattaataatatagttctcttgtacaaaattaacagaacataatataatccagaagcacgaaggcataacataaaaccgcataataaagctccttagtacaaagaagataaaattaaatatgcacctgtttgcaaccatccgaagctgccgataaggccatatgtacacgccttctaaccttatctgagcaactccacgatcatgagcattgtctacaacatcatggaatgtaacagatccctgcatcccaaggtaaaagagtgaacacaggagccacgaatgaagaacaaaatgatcatgatgaccacataaattgtatcggacatgcaaaggactgtgtgactactttgttattattattntatgactccacg

SEQ ID NO: 51785 - DNA, 322 bp, Oryza sativa
  unsure (1)..(322): unsure at all n locations
agcagcagcagcagattccggcagttaaaacccttgcctgtccggatgcaaatgctataactttcggcggttcgcgttgaatgcatttgtgtacctctcatcttttctccgatttgacaagagcgcattatgcctgatagtcactggcctcacacacatgcttgcaataaatagcttcttcaaggcttttgtgtgtttctgcttgtgatgaagcttcatcatcatcttgtcctgggacgagtatgtgtcgacgtgcacgttccattagctgacagagttctacgactcctaaaagagctggcggcggtngcttgtccggcac

SEQ ID NO: 51786 - DNA, 502 bp, Oryza sativa
  unsure (1)..(502): unsure at all n locations
actcagctctatatagctgccccctgactctttatagaagctttgttgtttgttgttttagcaattgagtggatacaatatcggtggtttcttgccacaagtgtgcacttttattgaccaatattatggcttaagctgattatatattatggtcattttccacgcgggtggtgaatcctttttgaagttatttactcngatgttacaccacatatgccgtatattttctggtgtggtgaaaccatgtgtcttttatggacttaagcacatctgttcaagcagcgtgcgcatggcgtatgcccaatacttnggaaaattctttattcacatcatatcaagctttttatagctggtttgctatgtgtattttcaatgatggagcaagtttaagttgctccatcaatattacaagcagttggatatcactgatcatgtaattgtgatcacattcatatgcttgtattgaatcaagtcactggtgatacaatatcaaaccactctt

SEQ ID NO: 51787 - DNA, 254 bp, Oryza sativa
gctgcacttcagtatggcaaaattttccacattttttcttttatgtgatacttctaagatctactatcgttttaactttataatatgtaatacttaatcatcatggcataattaccccgctaatgactttgaacagctgagttaacacgcctaaatatgtcatggcttacatatatatatatatatatagatagatatatgtatgtatatatatatctgtatatggatatctatatatgcgttggtatctgcta

SEQ ID NO: 51788 - DNA, 388 bp, Oryza sativa
  unsure (1)..(388): unsure at all n locations
tactggtgcacaggtaantgcattnngtctcttctgttaagaatgtatttttattcccangntgacccattggcatttaatttggtacttggntgatgcttgacatgaatattccgtatctaacatgctgatcattataatatangactatctgttgaatcaccaactttggatataatatgtgaggtggtttagttgcaagagctatcttgtgtggagtcaactngttatgtggtatatcaagacctgaaatgtagagcattagtaacaattatagagaaagaggtacacaacttgtatgatatattaaggtttggaacaccgtcagtgttgtcctgtctcccttttttgttctttggaaattcctaaaaatgtgacccatgataac

SEQ ID NO: 51789 - DNA, 397 bp, Oryza sativa
  unsure (1)..(397): unsure at all n locations
atgggaagaatatgttatgaacgacgtatagaaataccaaggtaacgaaaaaccatcacagcggagacacacgatttaacgtggaaaacccctttaatgcgaaaggggaaaaaaccacgggcacccaccagcaacaatctcactatctcaagagttttgggttacacgcctatggcggcttacaagagaatcaaatctccggcccaagccttcggcttgggcctncgctccgcttcgtcagaagcccggccaatatcttgaagtgaatttggaacaactccaacagaatataggagagaaaatgagatatccgatactatccgagatcgaatctgaatccataaaaaaatatgggttaggtaccggaagacttgtatgatngtatncacctatatgt

SEQ ID NO: 51790 - DNA, 393 bp, Oryza sativa
  unsure (1)..(393): unsure at all n locations
gaccttgatactcagcttggctgtgacactcttganaanatgtaatggacacatatttctcatttcttttgtatgggattattagccctaagaccccattcttataggttataaatgcatgtactggagtagaatacattaattatgggtatttaatgaaataaacaaggtttcttggtataaaaaccttgaaactatataccttacatttcttttatacatacggaatatgatcttagagcatctttgtaacaatcccccaacaatcttgtggcaataatgtggtattggagtaccgcaatatcactttttggatatatgngaacgtgttgttgagttcactgatacccatgctcaatatatacctagagaacgtngaatgggaatatgtgt

SEQ ID NO: 51791 - DNA, 343 bp, Oryza sativa
  unsure (1)..(343): unsure at all n locations
aataaagttattgaatttcttggcaagttgctttggcgctatatgccaattcttttataaattctgtacaagctcagttctgaatattactgtaccagttctgaacaagtcatacttcatgatttctgaggaagagaattgcactgaacgtgtgattgcttaacataaatgatgacacaggtaataaataaccttcttttgttaaatttaaacatatgatataattattctgtccatcaagggactacttaccgccacccttngctggtttattccaccatttgcactaatcatgatgtatccattggtgccctcttcaatttacacacaggaggcaagtcag

SEQ ID NO: 51792 - DNA, 449 bp, Oryza sativa
  unsure (1)..(449): unsure at all n locations
aaactaagcttttgctgaaaaacagaccctcatgccaaattgcgacccgtctagtgatgtttgttttaagcgtacaatatgcaacacagatctgaaggctcaaaacttggtttcagcattttctttcaaatattataacttaagtacacatagactctagttacctggcatggtaacatttttcagagtcctgatttccttatagaacttaattaaattcttccctgattccttttcagcattaaagcttgcagatgttgacataattgaaccagcggcaaatgaccacatgatcccagaaggggtagattctncagaactctggcccttggtcttcctggagcaaattctgaccaccctccatatgactggctctgaacagagaggaagtattgattcacacaccgcagaaagaatacatgctctgaacatacgngataaaatatgaa

SEQ ID NO: 51793 - DNA, 470 bp, Oryza sativa
  unsure (1)..(470): unsure at all n locations
gcttttctaaattattcttttaagctaagnttaagtattgtgtttttaatacgtcaaacgagatgaggccattatcccataattaattgaatagaaattattttaaactttaaaaatggattaataagattttctttaagcaaatttcatatatacttttcttttttgcaaaaaatacaccgtgtaattgggaagcgtgcgcgcagaaaacgaaacaaactctctttcttcctccagctgctgaacgtagccttagatntgattaagtttataaaaaaaatatagtaatattttaacacaaaacaaaaaaaactaggttagatgtaatgaaactaatttagtgctataataattgttatatttttctataaatgtaatcaaagtttaaaaattctggaaaataaaaatcaaaacgacttataatatgatgaaatagaggtgcaaccatattttctgatatctctcgatat

SEQ ID NO: 51794 - DNA, 452 bp, Oryza sativa
  unsure (1)..(452): unsure at all n locations
ctcagcttcatatcatatctttgatctacacatggtcattacttgggactattttgttacaagatggctcactangaaaagagacactcatttttaagggttcgaacttctcttcaagagagaggtaggctttgtccaagccatccactctatcttgaagttgagcgttcgccacctcaagattagcatgagactctttggtttacttggtaagcccgaccaaagccctcattttttctctcttcttagcaagctcactcttgagttcatgagaccgctctttctcacgaatgagcaaagccttttgcctctcaagaaggtgcatatggtcctcaattcttccaagcaactcactcaagtgtggtanggattccttagttatggactngaacanatcgtcatccataacttcatcctcaacctcatcctcctcatcactaacaagatcaaca

SEQ ID NO: 51795 - DNA, 468 bp, Oryza sativa
  unsure (1)..(468): unsure at all n locations
agcttgatcctganattaacacannatttaagaagcttattgttatacctttcattgttaaaccaagaacaactggcaagtactcctcaagggcatgctgtaactctgaaacatccgaaacatccgcgcaatcttcatatgtagtcagcaaccgaacacaacaaaatcaaagaacaattgtcagtatcctagcattacaaaatgttcagaatccagtagccagagaggcagtgacatacagatatcttcagagagcgcgacaacgcggtctctgaactttgagaggcggtcgacgagctccttggatactagtcctctgagtggatgggcaacatcactgtccaccggaatgcgaatggtcggcacgaatatggcaacctcctgtatgacgctccggcgcttcttccccttcccttctaccttgcatttcttaaggatagatgcaccacaccccatctctgtaagtga

SEQ ID NO: 51796 - DNA, 474 bp, Oryza sativa
  unsure (1)..(474): unsure at all n locations
tgtactgagaaaaatggatcctcttggaattgagagctgcatggtatatcttggctatagtgctggcaaggaaaagagtcttctacattcaattaaatttctgagaaaaagggtagtggctcaccaagatacgacctacctgaattacaaaggggataaggtaattntcaagctctatgcaggaggctttaccaaagtttcattaaaagctaagaataactgaagtttcttttctccagaacgatgttggcgaatgcaaaagaatggtggaattacttgtgcacaaatcgaaggcagactacatgatcgagctggtatcgcatatacgccaacttggctgggtgatggagtccccaatcctgagaagtaaagtcttcaaagcagcttcaattagttgagtgccttaacttctccttaacgtttcacctgccatcaatattacatacnaggtaaactctgtatatggaaagcgtc

SEQ ID NO: 51797 - DNA, 390 bp, Oryza sativa
  unsure (1)..(390): unsure at all n locations
cctgcatgcatgctagctntactctgccacaagtgacagagctccctttattcttatactcgactagcatcatcttcagacttcagtgagtgtgtgagggactctatgacagatcaatatgtccatttccacgtcacagttaatggagatgttcatttctgcagctattggggatcttatcataagtccatgtgcttcttaattgggaagtactgccactgccatcatgcctctgctgaagagaacctacagacgctactgcagctgcttatgaagatcaataccatcgtccaagacgctgaatggcggctcctcataaaccaagggatgctccagccgctcaagatccttatagatgagatgtttgaaggctgctacattctcgataac

SEQ ID NO: 51798 - DNA, 262 bp, Oryza sativa
  unsure (1)..(262): unsure at all n locations
gtttgggtcgaaaagagacttgcgtcttgattcgactttaagagatgcttttcaacaactcgaatggtaatgtaccgaccctccgggtcagatcattacttatcggcttccagagccatttcacttgattaggcggctcccagagcccttttcattttctcggactcccagagtccagctgcccagcagcanagcaatcccgcttcccctcggaagcctagtctatgatgcccgcagatatcccgaatcacacagattcgtt

SEQ ID NO: 51799 - DNA, 484 bp, Oryza sativa
  unsure (1)..(484): unsure at all n locations
acctgcagctgcagcttaaaatttcttcanaaaagaggggaggttatttcttttttctagcgaaactattttggtgattatatacaaatcggaggagcctaaaaggttagcaacttcatcctccaatgttttttttgtcatattacatttggagctatgttttgcacacttttttgtgtccaaaatttaattgtaagttgatgagagagaaaatttgtgtggcgaagaaagaatatatagaaatttagtttatttgctaaagaaggttttataaaatagttgagaatgaaaatatagtgaaagttaatcttaaataatagaaaacaaactaaaatgaaaattaaaagaagtacaacacattaatattacgttaaaactttagaaatagtaaataagaattatttggcgtaatatttataatttttcgatgaataatgatatgtcattattgtatgactggtgaaagagtttgtaattattttat

SEQ ID NO: 51800 - DNA, 385 bp, Oryza sativa
  unsure (1)..(385): unsure at all n locations
tcactgttcttgtgtcagctagctcgcttcaatcttgatcctttgttatattcatcaataaccaacatacaacgtttatatagaaaaattgatgccagatttgtcttgttaaaaaccgatcttttgctgcccaacgaaccctaccacgcaaaaccatattgtgacgatctcaataagtagcccaaactcaagcaaatcctcatccgcattctatccgtctggaaaaccaatcaatcaacacttgtcggccctctcgagctcccttccgtaggtggccaaccctaattaagaagaagggcgaccacctaccgccgccatgccatccctctaccatngcagccatctggtcactccgtcgtgcccactccaatctatngccacttca

SEQ ID NO: 51801 - DNA, 470 bp, Oryza sativa
tagcttacggagcacggaggaggagtctcatgttttattgatatctgggcccatgagggagggctccatttgtcagtgacttatgtccccctaactttgtccctcgagctccttccacagagaacaaaagctatgtgcgtgggcctacgctcctccgcgtcttctcgagaacttcgcgcgttgtcacgcgcgacccgccctcgggcccacatgtcagtcaacgcaacgcagatagtactaggaagcatacgagaactgcagcaatttgacatttgtaaatgggaatcaaatgttccaagccttttagaactcatgagacaatgattcgtacttatctgagatgagatgaaaatatgcagcaattatgggccataggcaaaaacagttatgcacccatagacatatggagaatgttgttcatgtacaacaaatgccgatctggtgccgtctcagcaacagcattacagatt

SEQ ID NO: 51802 - DNA, 211 bp, Oryza sativa
  unsure (1)..(211): unsure at all n locations
tagtgactaagagatananagggaaaggggagaaagagagagtggngtgggatagcttggccgtgccaagtggttggagtggngcacgcacgccacacatgggagaggagggagagagagaatgatggaactatccgtgaacgcttgtgggttggtcatcctatggtggcagtgcgccgtcctgtcatcgcatgggggagaggagagagac

SEQ ID NO: 51803 - DNA, 371 bp, Oryza sativa
  unsure (1)..(371): unsure at all n locations
acgagacctccattggtttattgtattacagcttaagccaangacacattctcacaccattgatgtttctagtgtctgccattccaaaagaaacctgtcatccgaagcgattgacactttctgtggttgacagcctctctcctattatcggcttcttgtgaagagaaaacaaaatcgatctacagcatgcctgtgtgtgcgtgtgcgccattgttggtgaatctggctaactcgaagcgacatctgctatttatggtccaagcttctttaatgcatgcaaacacaaccaaatacacccttggttataactgtcatacatgaatatatatctcaatcaacacaggtttaaaaccctctttatttcttgttgt

SEQ ID NO: 51804 - DNA, 202 bp, Oryza sativa
tgcatgtgtagaaacattattctttgtgctcattgcaatcttgacactacccattcacaagtgacatgagccctatttgtagccataaactattatggagatagatttaaccgcgtggatttcgctagccatgcaatggcatctttttattaaaaaaatctcacaaccatgtgttttcttgtagaactttagtattgacaat

SEQ ID NO: 51805 - DNA, 458 bp, Oryza sativa
  unsure (1)..(458): unsure at all n locations
ctcagcttctgatgaattcaatgccaaanaagaaagntctattatgctatttcttatatttctacacactttcagctacagctaaatgaacatgcacaacctatctggacagaggtaatattcaactttgaacaacaattcatagtccttggagaaaaaacacaaagtcaagctatgcacataagaaatgggatagtgtcctatgatggaaggtgagactgctttctacacctgatgcttcctttctagtgcagtttgtgcatataaaaagataatttaggaaattattggtcctcccaaacaggaaacttttcctatctattacaaatggatccctagtggaggcacagaacttcagccccctaggtatgaagcagtattactgaagttatattaattgacggctgcatatcttggtcatattcaatgaatactacatatgatacatgtctttactg

SEQ ID NO: 51806 - DNA, 461 bp, Oryza sativa
  unsure (1)..(461): unsure at all n locations
agcttgcatatcatgatagtatgaagtatctgttcttttatcttgttttaaacattgcagtttgttgaacaaaatgtcagcataatacatgggaacataaacatctctgaaatatcgtttcaggtctttccaagattgtggtattttgttatgcctacaaagatgtttccaatcattagaagcatgtttaattaaaacactagaggcacacataaccttttgtttctccgacaagacatgctttngaaattcactatcaaccgctagctcccaattaatgtaagcacgaggatcatagtctccctcgaaataaggcagtgcagatttgatcttacctagaacatcatcacttacctcataatggtcatgttgatccctcctcatgtctcgacgaagatgtcgatgttgagcgcagctatcccanattatcttgcgtatccctgccatagttagtagaaaac

SEQ ID NO: 51807 - DNA, 352 bp, Oryza sativa
  unsure (1)..(352): unsure at all n locations
atatgtatggatctcagngtctatctctcgcatagattacattcacatgcacgccccgttatgcatggatgatttgccattatgtttcgtggtatctactaactgagcacatgatgaatcacctggaatctaaattctacattttttgttgacatgtngcttaatctagattgttctaggtatataacatttccttttgaatatattgattgcatatatccagagaacacaatgtagcgttagtagtgaaactgcagtggtgtcccttttatgtggtcatttcaattctaatgcttggatatatagaattaattaatttcaaatcgaagtatatgacccgaagaaaatcata

SEQ ID NO: 51808 - DNA, 170 bp, Oryza sativa
accgttgttttttcttggcaccccagccaatgaccggattatggacccccttgaccccgactgagaacgcgcccgatcttacctataacccaaatcggacgtgctcctttcaccaccatcgacagccaccggcgaaggtggatgccggcgccgtacactacaaacaccac

SEQ ID NO: 51809 - DNA, 381 bp, Oryza sativa
atgtagcctgtactattacgacaaaaaaaaatttgtttgttttttcagaaatggtactggtactaccgtactagctagcatgcatgcaagaactgtcagtttaacctcatgcatgcatgtccgtcattacaggcctgtgatcgatcataacttctactacgccggcctcaagttcaccgggccaaccttcgcatgcgccatgagcaacatgctccccgccatgaccttcgtgatggccagaatcttcacgtagattatatatatcttctgaaaaatgaaactgagatgaacattaagcagactagcatatcaagtcagtttggagcaagcatttgacattgctgtgtataattcgacaggatggagaacgttgacctgaat

SEQ ID NO: 51810 - DNA, 449 bp, Oryza sativa
  unsure (1)..(449): unsure at all n locations
gcttgtcgatcagatctagtagtacgtatataacgtgacatacgacacttgtcttattttattcttgatgatgtccaccatgtctgaagatttccttaaaatgggtggtgagtccaaggaaagacagcggcgatagcaaaattaattgggacatttcgacaacgacgtgctaatcagatcgttagttgctacacggtgcagcaatgcctgtgctatataagcctcacatgaatgatcattcgtgatgcaatcctatttgtcaagagcgtcangggcggcggacctagttgtcatgggtctacatctgtacacctaaatactttaacacaaaaatccagtatgtatcatggtattatactatcggtagatctaaataattgtgtggttctcctcaccagaaacaccacgttcaacccaaccaaatcacatgtggaactggctctgtttag

SEQ ID NO: 51811 - DNA, 461 bp, Oryza sativa
  unsure (1)..(461): unsure at all n locations
ctaagcgactgggctgcagcttgtccctatacctctaacaaaattatttttttattttatgttgagagaatccatatggatgttgataacaggagagtttcttcatttcatgtactttatcaatggttagccaacaatgcaaattcaggagtgcttatcagtattccaggcacacagtttattagtaaaacatgataactgttcagctgcaaatctggtaccatttctttctcattgtacttttggaatgctctcttttagctatccatcttgccttaagatgcattgatttcgggtatgcactcattttcactggtgtcgttccctttttggcagtatgggagctnttctgcttagtgctgggacaaaaagtaattgagtgattggtaatgcaagtactacatttattctacaactagactgatctgaatccttgaatactgtacttgtgaatgtaacac

SEQ ID NO: 51812 - DNA, 156 bp, Oryza sativa
  unsure (1)..(156): unsure at all n locations
tctcgnctcgncggcgacgatgtcagaactcagatttcttattttatcatcttttccgcgctacgcgctcctcgatggtgataaagctcggcttacaccctctgctcgacagcttcctgcttaagaactccggccggtgcttctctaacccgtccg

SEQ ID NO: 51813 - DNA, 463 bp, Oryza sativa
  unsure (1)..(463): unsure at all n locations
agctntctgcgtggcttcccattacattagtaaattgtttaaatcatgcatgtaaactcagatcagatgacatggtaaattgatcgacttcagtagttcagttccccaagccctaactcttgataaagctagatagaaatagacatcttagcatcaatctacattctacttgctgcgctcacctcgtctatatttagaagatcaaattccaatactactatgacattaccttcaacactaattntgttatcatgccatcacaggatgcaacttttagtaatgaaaacctaatcatattcactttgttaggtccatgcacagtgattntctccagaannattaattgggaattcttggaactgtttttattcatcatgttgagcataaagcagtatgcttttagttagcactagagttgaacacacaagaagttaataacaacgtggtcatgtatcggatatac

SEQ ID NO: 51814 - DNA, 151 bp, Oryza sativa
tctctctctctcttctcgcgggttttgggttgggttggtgaagaagtgttatgtatatctgactagtctgctggtttttgtgccgtgaaagttgctaaccttttctctctctttctctcctcgggcggttgcgccggcccacccggtcccc

SEQ ID NO: 51815 - DNA, 453 bp, Oryza sativa
  unsure (1)..(453): unsure at all n locations
agcttctgatgcatgcatggatccactagctcttctctgttttatggatgaacactgaaatatatatatatgctcgtggaaaaatttggtggattgcaacgagcatatgaaatcactcacgcatgcttgctgctcgcgtctctgtctgaaaatggcgcacattgcgcgtgcagaaatgtgcaacgacggcatgaaattgtgagtggtcaggaagagagaagagaagcgaatgatcaccaatttcatcctcctttctcctgaaaagagaagagtgatggatggattcagacaaaaatcgaagttctttttcttcttcagactttnttcagaatgttgcaaactaatgacaattattcagtgatatgattgacactgtgttcaatgtgcaccaacagttgctagatcctgtcgtggcggaaacactgtgttcgatcctgtttctgagaaatgatg

SEQ ID NO: 51816 - DNA, 399 bp, Oryza sativa
  unsure (1)..(399): unsure at all n locations
tattataaaagttcatatgcccaataagtatggtacataactntacatattctaaaataatattctcttacaaatgaagtgagtgtttcccctcacatagactcgctaatatataatgcatggtatacacatatgcaggctctgcaataatacttccaccttttctgttatttccaactgcatgctggctcttaattaattaattcattgatgaaagcaaaatttccaataaaacagaaacggacaacagtacatatatagctagaggggttatcactaacacatagaaggtcaattatatgttcatatataatcgtgtggtatgtctaanacatgcatgtacgaaaatgcatatggcagcagtcgtatacttcatgtacatacgtacatagatcgatg

SEQ ID NO: 51817 - DNA, 357 bp, Oryza sativa
  unsure (1)..(357): unsure at all n locations
gcgacctgcggcatgcaagctntnntaaaaaccacctgtgtgtaaccaaaagatcttttggttttctcacaactactnntctaaagctacttttcaaaaagttatagcccacatcttctttttcaaaagccaccctttattttcggccacaaagccacatgtgttattaattaattagccaattaaaacctgattaatggtgggctgtgagcacatgagtttgatggtcgtgctcatgacaattaaagaccgattcgcgagctactgttgcgaaatattaaccgtaccatccacaagctagcgtgggcaacggctttaccttttgtatagcataactcattaattaataatcaatca

SEQ ID NO: 51818 - DNA, 428 bp, Oryza sativa
  unsure (1)..(428): unsure at all n locations
cattagctggtccttctagttgaagggttgtttatgttaccttctcttgggcacttgttctgaccaaagttaatttcttttcaatagctcttatccagtcttcagcatccataggttcttcaaatttagaaaagaccggtggcttaattctcataaattatgcatgtgcgcttgaacctttacttccttgattttgtgctatggcttggaataattgagtatgtcttgccattatttctgctaaagtggtaggaattggtgaagggatttctcctggttctccttcacccgtactgccattgcccgtactcatctagaanatggggtaattgatatcttctcaaaggggagtcaacatccataattaaacatagcttntatttattgacacagtgtacatgatgtatgctacaaagaaacaaaaccaa

SEQ ID NO: 51819 - DNA, 472 bp, Oryza sativa
  unsure (1)..(472): unsure at all n locations
atccttgagtcacctgcggcatgcaagcttctaggctagagcacgtgaagatctatttcttgttatgatctgctcccatcgncgacggcgaggaggcggtgcancaagagcacgatgctcggtttggtcgacactaaacccggagttcaccgccgacggtgacgacgcacgatggctcggccatggcggagctcagcggcggcgcaatgagaaagagatggacagacaaagaaaggaagaagaanaacagagagaaagattgacaagtgaacccatgggcaaacttgtctttaaccatagtttatttctctattttgaccggaaataataaaataatgggagaagtgtccagcagctaattaccactnttttcagtatccatgagcaaatacacgattttcaagtgtctcacggcaaatgccacaatctttcggtatcctatatgcaaatttgccttatgaataatatattt

SEQ ID NO: 51820 - DNA, 470 bp, Oryza sativa
  unsure (1)..(470): unsure at all n locations
tatggtactatgatagtaccattttagacnaacatacaatttatactattttcttaaaagtaagcattcgaggaagtggtgatagtcagaatttttgaaagtttgatcaaataatgcgctaaaaaatatttatgacccgagggagtaaatttaatagtcgtgcgcatcagtcaacttctacattntgcgaacaagtatgataattaatgatttattcttcatggatgctactccagtacacgtaaatatataggggcatatatantttttcagtataggtagcattaattcttcaatagaacaactgatgaagcagtttaattaattagtgatcattnttctccatttttctgacaccctattaatgtaactntctggcacttatatatatcccaggtaaatgaaatgnggagaataccaagagctgaagactaaactggtggaatactattaatatcctaaagaccctt

SEQ ID NO: 51821 - DNA, 462 bp, Oryza sativa
  unsure (1)..(462): unsure at all n locations
agcttaatgaagaaaaagtcccctcgtacttatatatctttattttcaactatatnagctggagaaactacttctgaaacgttcttaataacatgtcccgcttctctttctcaaaaactatatatttgggcaaccttagttgaagtttttctgaatttgtcggttcaccaaagaaaacatagatgaaatttaatcttacacaagcatttcttattagaataaagggttaattggtccatactattgcaaatatgcctgattggaaatctactattactattcatgataccgactgagtgccgttccgtctagttntttatcggcacccattcaagtcacccttcttcatagatacttatcatttaagcgtctaaaatctgaatactataacatgcacttcagtttcatatatagcatatgaanaaaagaataacgaatgtcatgcttaacacaatgcgatga

SEQ ID NO: 51822 - DNA, 465 bp, Oryza sativa
  unsure (1)..(465): unsure at all n locations
ctttcagttgggctgccagtntgngcaagcgcagngatctcgtacgttctctttgaacattntgcctgccactcaaatggtggtactagtaaggcaaggccaatgtatgatgcacatacacatcttaagatggaacccataaataggtagtcttttttatggtatgatgcataatgttatggtctttaacatgggtcccactataaaataaaaaattaagatggctgccagcttctttgagatagtanggagagagaggatgtataggagaanaaaaatacttggttattcactatggctagttgtaagcttaaggtgcatcataagaaaattttttctattgctaacttgcacaatatataaggtgtgtcttaagaatatatntannttcttaagggtaccttttagcacatttgtggtgctaatactagtagttaagtagttntctggatatctacacgtatt

SEQ ID NO: 51823 - DNA, 424 bp, Oryza sativa
  unsure (1)..(424): unsure at all n locations
agcttctgcggcggcggtggcggcggcgaggtgagtanattatgccagccgcggcggcttcgtgctgtggccataagatgttgagaggtggagctgcgggagatagcgggcgacaccgatgaaatgctcgcttggatgtgtcctgaaaacggcacacatcgcgcgagcagacaacgcgcaaccaccgcatgaaattgtgagtggcccggaatacagcatagaagcgaatgatcaccaatttcatcctcctttctcctgacaagagaacactgtttgctggactcacactaataacgaaattcttgttcttctccagactcttctcacaatgctgcaaactaatgaccagtatctagcgatctgattgacacttggtccaagcgcccaacagttgcttatcctgtcgtggcagtacactgccctc

SEQ ID NO: 51824 - DNA, 450 bp, Oryza sativa
  unsure (1)..(450): unsure at all n locations
atgaagatgccgagctgtccagactgaaggccgagaataacaatgctgaagaagcacaccgtgatgctaaacgacaagttgacagcattcgggctgaactgcngcaacacttaacaattgatagtcagtaaccatcctgatgaatcccaacttaagcactgtatgctgggtgcttatctaagactatgaacccttgctgttgaatgtggcagtcctgacctattatttctagaccatctatctgtgctaatctgatctacctatctcttgacctaatntctcctaaaatttcgcagctatcttgctgtattaagttctaaaaatcgcctatcggcatgcggggtgttttgattgacaatttagtggtggtggtgttctatgctatctgctgatgcctagttagaaatctaagatatgctgactaagatatactctatttggttctgatgg

SEQ ID NO: 51825 - DNA, 383 bp, Oryza sativa
cacttgctggatcaagactttttttgtttgtatacaacaaggtgaactgatctgggtgggctaccgagaccatatctaaattctcaaccaggtcttatgttcctaattggctatcatcctcgcacttttgtgtccagcgacacagaaatggccataatgctgctctccttccacgcacagctctcaagatgccgcgtgacattacatgcaaagagcgtgaagagatcattccttatagactccccaaaatggcttgccaatagggtctccgtcaccgctcttaaagttgtggtgtgggtgctatcgatagcctcatgaacactatatggtctcccttgtgtagcggaggcgctctcttccaactccaatttgtctatgggatc

SEQ ID NO: 51826 - DNA, 408 bp, Oryza sativa
  unsure (1)..(408): unsure at all n locations
taatgcaagttaagtgtagggagattttaatctgttatgtcaatctttggctctctgcttctggtggtcagtcaattatgcatttacaataattaaaaatctaaactataaggctttctaaatgggtggtagatcttcattttaatccaaataaagccttgtgtttcttttttattttttaacatggtaagcaggtatcgaaactctaaactccatttcttttttcttttggatattatctcacaactcagatgtattcaatatgtaagtgaacaggtngcattaattcttcagcgatggcattaccttgctgcacttgtttgttgccactgatgttaataaacccatttcaataacataactcangttntgacacctatactagttagtaattttgcaccatggata

SEQ ID NO: 51827 - DNA, 489 bp, Oryza sativa
ccggaccttaagcaccgcggctgcagcttacatgatttgaaacatatgatgatttttgtctctgaatgtctagctagcaccaaactgaactggggtgttagtaagtgtcatgtgccatgaatactctagtcttgttaattaagcacttacttatcaagattctaatccaaaatgagactacaacaattttaaccattctctacttagattagtaaagaaatggcagacccaacgtgtatgtctgtgcctaataacgaaagggaatgatatagccagtgcaagatgcctatgtccattccaaaatcttccctgaaatttgtggctgttacgctggtggtattctttgtatgctctgaatttgtcagagacaatattgcctttcctgcaagctccaccccagtgttcttgacaatctgaatttattgaagaaactttgatttaatatattcaacaatagtggttccatcacatttgtatctagatcttccc

SEQ ID NO: 51828 - DNA, 428 bp, Oryza sativa
agtgctgcacatagactatatattatgtcttttcttattatttgggctagcttattaaattaggtgttaaaactcttacggaagaggaagaacaggggaagaactggagaagtcatggtgttgattgtgcacatgtgtaactgagtccaccttacacaaccaaaaatatatgagatgatgcagctactccaaaaaatagggaagatctgttagtagataatacttgtacggttagggtgctttttctgttggatgtaggtggaaaactcatgaagaagatggtcccatgttcacacattcttcttgttttggttggacgatttataatatctcccgtgtattggttatccatgatctcctccaaactattagcacgcatgatgacacaacttttgctaaagatgacacttctcggtggacaaatgata

SEQ ID NO: 51829 - DNA, 420 bp, Oryza sativa
agcttaaataaaggtaacgccctctcttcctcctttatattaatcgacttaaggcggccatgcaaccggtgacgcattgcacatccctaagtttgctgggggggcgcatccgctctataacccgtatcttctcagggttggcctcaatgcctcgggcagagaccaagaaccctaaaagcttgcccgcaggtacaccgaacacacacttatcggggtttagttttatgcgggcggagcggagactctcaaaagtttccgctagatctgagagtaacatttcctggttgcgcgtctttacaaccaagtcatcgacataagcctcaacattacgtcctaattggctacccaaagaaattcgagtagtacgttgaaaagtaagacatgtattctttaacccgaaaggcattgtcgtataacaat

SEQ ID NO: 51830 - DNA, 435 bp, Oryza sativa
  unsure (1)..(435): unsure at all n locations
cggtctctttgctggtgtgcattctatgtgcggagccccgatcgggctcccaggacccgctatggtgagggtgggggcgggagatttcgccctatactcccgaactcctggacatggccggcggtggggccgaaaatgcggngacagggccggnggcattctacctccaccaggccccgactcatcccggtgccatactattcacgtgtcgctatcgttctcaccgctcaccccattgccatcctattcacgcgtcgctgatccgtctcaccgctcagtctcttacatgcgaatgaggtggatgctgcaatcgggaacttattccagtcgctagatgtggagaaggaagatcgtgagattaggaattcgcggattgcggcatgggaatatgttgtaatggttctttttgaaccccaaatccaaattggatcgatg

SEQ ID NO: 51831 - DNA, 425 bp, Oryza sativa
ctctactatgaaaagctttttttattttttctcaaaagaaataatcagttgaaccagtaagtagagctcaattttatataatattggataaaaaaagatacaatacccagatgtttgaattatgagaaaattcaaggtgaaaacaatgtggctagtgcattgacaaccgctcaaaattatgcgaccgtttcgctaaccggtcctggaaaagcaatggttaccttgttaacaaccaaaatatatgtcgtggccatgccatttcacctcaccaactaccacagaaatgtttgtagttgaaaggatcttgaggtcgcctataagggggggagctgaataaggtttcctataaaattatcacaacttcatagcatattagagagatgagaactttcagttcaaatcggaacatctggtatgggattgga

SEQ ID NO: 51832 - DNA, 289 bp, Oryza sativa
tcgagaggcagggggtgcccttcgatgtgacggaagacaatcttaatgatatggtgggcacggcgtctttgggaaagagacatccggtggcgaccggcattcggcgaggcattcccgacccccgatacacacgaaatcgtgggatttgctcatttcttctatggcggattttctctttcaacctcaagattcttgcggggaattctaaaattctacgggattagcttgcatcatctgaatcccaactccatagtgcatatcgccaattttattcatgcctgcgaagctt

SEQ ID NO: 51833 - DNA, 407 bp, Oryza sativa
  unsure (1)..(407): unsure at all n locations
agcaaagcataacaacaaaagatcatttacttgattgtcttaacaaaacattccatatgtaatcacttgtaaccaacaacatgcacgtttctattgttctccccaaaagaaggtgtgttgctgctaacagcaaggttttgacatgccaacgcaatgataatactttgaagtctgtattaatctcattgatttattcaagaaattcaaagcagattatcaaagaaaaaagacaaactgttggccgtaaatttcaccagttaacagctggtaactggccttgaaactggaaacatctatgtggatgtttttgctaccattagaactcctcangttcacccctctaataacactttgttcanatttaagttctatacaaaaatactccaatgtgcttccactgatacagt

SEQ ID NO: 51834 - DNA, 505 bp, Oryza sativa
  unsure (1)..(505): unsure at all n locations
catagttcacaaccctgattaacttanagcatattctatcttccaaattggtttagatgttaccgacaggctagcagtggccctgactgagctgtcacagataaatagctaatagcatgaatctagattctagagctggaatcttcaaaactacaccttgtgagtggaatcataacaaagatactccccagcagagtgcttgcgacgacacagttgtataccgactccaacactggttctgtcaaatcatcaattggaagccaatgcttaaatgcaacctacagcaaattacaagaccgaattaaccataggaaagcaaagcaacaatataaaacatgaaactagttcggtcacacttctccatggngctcatatagaaagaanagggtcgggtcatgatgaatganaaccaaatggtcagggaatataacgggatcatgagagataacaaggcacatctcctagatcaattatgggctgntncatctaagtaatnggatactca

SEQ ID NO: 51835 - DNA, 405 bp, Oryza sativa
  unsure (1)..(405): unsure at all n locations
agaaaagttgacaccacccttttcacaaaaatcattggagatgatttctttgtgtgtcaaatttatgttgatgacatcatattcggctctactaatgaggtattttgcaaggaacttggtgatatgatgtctacgaaatttgagatgtccatgaatggagagttggacttcttccttggacttcaaatcaagcaactcaaggatgggacgttcgtgagccaaaccaagtacatcaaggatctactcaagaagtttggcttggaggatgccgaacccattaagacacctatggcaaccaacgggcatctcgaccttgatgagggaggtaaaccagtagaattaaagctttatcgttctatgattggtagcttgctntaccttaccgcatctaagtcggatatcatg

SEQ ID NO: 51836 - DNA, 160 bp, Oryza sativa
tactaagcttcctggcctaatagttactcagcctgtggtgtcccacttcacctattctgtctcacttggtatatgcttagatggaatcccaaaagaatcgggccttaaaagcgtgatcacttacccctacttggactatgggtttaataatcatattatg

SEQ ID NO: 51837 - DNA, 434 bp, Oryza sativa
  unsure (1)..(434): unsure at all n locations
agcttatgaaatatgtgggtggtntatcttggtcagtattatacttattgtgnatatatatgtaattaacttattgtcatatgcacaagaatacgtaacagttagacaggataagatttcttcttcccactgccttaatattattagttttggttcactaataaaagtttttttttctagtcttcctttggtttctttccaattntaatgttttatgttgggtgtaggtatgcattcctcattgtatcctacaagccacacctgaaagcaataggtgcaaaatctgaaaacgttacaggagtacatcatatgacaacgcaatctaactaccattgtgaaaaagataatgcaatgcaatgggattagcaataaatgaatactatgcaaaacacatgagtatgtcaacatatcaagaatgataagtaccagtcagt

SEQ ID NO: 51838 - DNA, 369 bp, Oryza sativa
  unsure (1)..(369): unsure at all n locations
ctcagctggcaggggaagagccagggattctgctgaacaggcctttcttcgtcttcaacgctgtcgntcacgcgctctgtggagaggtcacgatgtgtggaagtgtctcggttgtcaacgagatggtgcagaggggattgccacccaatgtcgtcacttacaccactatagtcgacgcattttgcaaggccagggagctgaggatggcttgtgccattttggctacgatggaagcatgggatgcactccanatgttctcacanttactggcgtggtgaaagggttttgaggatggaaaggacatgatgcacntctatgtgcattggatggtgatgaggatgggctcatcacaatctctacaatgtctca

SEQ ID NO: 51839 - DNA, 426 bp, Oryza sativa
  unsure (1)..(426): unsure at all n locations
ccactggagcatcgagaatatatggtagatacttttacgctgacactacacactatccatatgccttttcttggactcatgcttccgcttcccgaatctattgcaaaacctacgtcaacattaatctacagcgtcatacatgcattttgaaatggagggtgtacaaggcttattgcacggtaaactctaagtcttaaactatggatgtaaacggtcggaaaatgtcttaccattttcataaccatatattntttcctagaaatataatcgaaaacaacacagccatacatgaaaacagtattgaaaatatcgaaaatagggaatggaaaccatactggtggaaacatgttagtatggttgaaaccatatactacctctattccataatataattacttatagggtcgggcatggttattaagaaag

SEQ ID NO: 51840 - DNA, 310 bp, Oryza sativa
tgagaaaaatatattctggtcttctgggttcatgagatcgaacggtaggcacggcacaggtgtgtatcatcatgcgaagatgatttgattatttgattgttaatcacgcttaccaagtgttcctgccattcagattctgttggaaaaagcagaactacttctcacaactttctgttctgaacatcagaacatggacaactcatgctagagaacatttgatggaagtgcaggggctggagctttcagttgaacttgtctctataaaatggcaagtgaatggggctgaaatattgcaactgaaacagatgat

SEQ ID NO: 51841 - DNA, 464 bp, Oryza sativa
  unsure (1)..(464): unsure at all n locations
agctagtccatggtaaggtcactcagaggagcactctttgtgatggaagtaactttcatttcccaaacaccataatcaagacaattcanaagatggcgagcattatcattatcagaaaattcttttccaacagatctcaacttcgaaataatttctccaaaacgtttgaaataagaatcaatggactctcctgggtgcatctcaaatctttgatattctttatgaaaatgattctgacgaaccaattgaatatcattgtttccctcatggaaattgcacagagcagtccacatgtcatgagcggacttgtggtgttgaacacgattaaattcaccagaagaaattccaccaatgattgcatttcttgcacgataattaaaatcaacctgagccatattggcaggcgtgatgtcagcatcatcgggcacagtataaggagaattaaccttattccacacattatg

SEQ ID NO: 51842 - DNA, 223 bp, Oryza sativa
  unsure (1)..(223): unsure at all n locations
gaatcgatgttattngaatgttttgtaccataccaaaatttccacacttncaatggagctctgtggcctttgctatctgagtatcagaccaaaccaccttgtctggcgaatttggcaatatttatacggagcaaccaaaatcctacttttttaagagaaaagttatatcccgaagagggactctaatcacctcgatggatggtcacttgtgtatcacatatcg

SEQ ID NO: 51843 - DNA, 399 bp, Oryza sativa
  unsure (1)..(399): unsure at all n locations
cttaccattanatggtatatcaccaccgcgcatcaacctaaatgaagtacccgaggttccaattgagaacgagatgggtagcattgacgtattctcatccctggtcgacctaaagattgtgaagagcgattacttatcaaacctcgacaaatttatacaaccagcttgtataccggctatcaagcgaatcacattacaaagattaacatacacagagacgaacgtattgcctctaccaattggtcaatttgattgctctcaagaattggacgtggctggataccaaatattcaatgcttcataaagtctgtccatgctcactctcaaggagctcaagctatgcaattctggagacctcccatgctcttttgagttcccctcccttaccaacatgttcct

SEQ ID NO: 51844 - DNA, 474 bp, Oryza sativa
  unsure (1)..(474): unsure at all n locations
tgagattnntgctagactgtcacgaattgatccattgaaattttatttcttactatcctggcaggggacaaaaaggacagacagcatganaaatgatgaatcattctgattgtatgcaccaaaagaagagaatgatgaaatgcagatatacttacaacaactggagcttataaagctggccaagagaagctggtatttctcccaccaaaaggttgtcttctaaatctaagcttgtcaaactagaaagattaccaaattgctctggtatgccaccggaaatcctattaccagccaaggacctgcaagatcatacacaacagcatttcataatagttggagagaatcgacaggagaatcatattgcacttaacctaaccatcagttcatgcaagacacataaacatactcacaccaccttccaaatgaagaatagcatgtgaacattgcacatgcattctctattaaaatggttat

SEQ ID NO: 51845 - DNA, 480 bp, Oryza sativa
  unsure (1)..(480): unsure at all n locations
ntatctagtgtntaccaccataatccgatctcataactncatttgatttcattatcagnatcttaaatntctttaaggaaatcggaggttgcttatgagtaaacatagccttatgggtaaacatagccaaaagtaatttattggctaaaatcttaacttagtgaatcttcccttaaagcttaaataacatcactaaaatcaatccaagggaaagaatatnctcaacttatgagacgttctaacctcctctagaaatgtgacatcaattacaatgtcacaatttcaatgacgtctcatcttttatccttacaggcaattattataatagtcacatgatcatccanaagaacaaatatgactgtcgtgcacaaggacaagaccaatcactntattatcacacttaatatatcatgttctatttggaagaataacggacatgacccgttctcacatgactntaataattaactagtaaagttc

SEQ ID NO: 51846 - DNA, 468 bp, Oryza sativa
  unsure (1)..(468): unsure at all n locations
agcttcagagcagaacccataagaggtaagcattatttattctgttntgctatttaaattgatcaatattttgttcctgcttttttttatcctctgagagtacaattttcatcaatgttgttggccatgttactgcggattatcaagtacaatacatgacactattaagcatgccaccttagtgagcatttgtatgcatacatgtgtaatcttgagtaggcttcttttcatgtcatacaatcaaaactgtcaagaatcttgcctcacggaactgctggatcaattgttgactaatgtatgggcatcatctcagtaatgtggtggtgaataatcttgttagaaaaaaaagttaagagttattcaattgctatgagataagggtgattccgtatatgtcggaaatataatgttatttcgttatatcaacatagttaactgctacgtgctctggtgttcataatctcagtc

SEQ ID NO: 51847 - DNA, 402 bp, Oryza sativa
  unsure (1)..(402): unsure at all n locations
actattagcgacctgattattctggtcgggcgatttcaggaccattaagcccatactggctctaagtcgatgataacttccggacttacccaaattccctggtaacaggaaagtggtggtggaacaacaactggcgttggttgccatggagctgggtgtngacaatcgttaaataccactttcgacttgccactaacacaattaataaagggaagatataatttcctacctgtatactaataaaaaataatgttgttgtattgcaattggagaattaacctggatgcaagaattctatattcaagtgaaagagaaatgccgctagcaatgctggtatttnttacgaatcacagataatccgcaagcgtacagaataccattgtagcactttacccatgagta

SEQ ID NO: 51848 - DNA, 478 bp, Oryza sativa
  unsure (1)..(478): unsure at all n locations
actcagcttaagccacactgtgcnggacgcgaatagacttgactgggcttttttttccagcccgattgaaggagggacaagaaatggacttcagaggaggaataaagccagctgaaaggaagggagaatgggccgaggactgaaggtgaacttttccagtttcagccggaaaaggaaaaggggatttgaattacttttccaattaaattaatcactgaaatgatctttgaattgtaaaaatacttcaatgctccataattccaagaaaattcttgaacatacttgacactcaaagtattatgaatattaaaacagaccattaattataattaatatgtggatatactgaatgtctttgatgataanatatgaattgactccgaaaatccgagaaatccaggagttaataacttggaaattaataaaataatcatcatcttatttagaatttattccgcatactcttataataagaatt

SEQ ID NO: 51849 - DNA, 244 bp, Oryza sativa
ttattaattgtgatactttgtcggctcaacttaagatagtctataccgggctctgtctttgaacatgctctaatgggtagaaaagaagccagttgtcgacgtttgatgtcgcaattctggtatttgcataatatggggatcgtcggtgctagaatatatgcgagactgacggaaaagagatggagacagtgatttttatacagggtcgggcccctgaatcgcaggtaataaccctacatcctgg

SEQ ID NO: 51850 - DNA, 378 bp, Oryza sativa
aacaatggccgtatcattgacccctttaggcatcagtccagtttggaagaaacggcgaactgcaccgattatatcaactttaattgtgccccaactacgctgatagaacctggctggaaagccatctggaccaggtgatttcaggggcccaatttggaaaatggcctgagaaatttcatccttcgtaaaatcctcacaaagcttctcattcatgatatctgtaaccttttcctggataagacgagtaacggtttcaggattaagatttgtatcaacagtgtacacatcctgaaaatatttcagtgccatgctctccaacttcattgtcgaactgtgaacagttccatttgcatcccgtagttaggagatttattcttt

SEQ ID NO: 51851 - DNA, 468 bp, Oryza sativa
  unsure (1)..(468): unsure at all n locations
cgcanacttcaattccacagtaaacactcaaattctgctataatttttctaacggcgagcttggatgcgcgagggagcggagatcgagagcaagaaattctcacctttgaggtcgcggagggcgacggagtgggacgagatggaagcggtagcggaagccatcaccacctccgaatccttcctcttcccttcaaaattccgacaaaatttggaagcaggaaatgttnntttttcttggttttccctcacttctgcgagntntctgtggcgtacggaggctaaagaggagggcgggttacatatagctcgcgcgggaggctgggttcaatgcacctggacggaatcgggagcggcggacgggagggacacgtgtcacggcttcattggctggccgcacggngagggggcgatcgaagcagtggcgtcacgcggagccacaggaagggccgcccagccaagccaggccag

SEQ ID NO: 51852 - DNA, 258 bp, Oryza sativa
atcctcaagggcctcaaaaacacaaacttcaacatccgctagaagcacggcgactcgtggagcaaggagccgcctcccgtgctctggggaaaccaaaccacgcccagccgagcgaccggggaagacaccttcttgctagtctacagcgcggaagcagggctcccatctgaactcaacccgagggcccctcgggccaccacgtactgcgaggcggatcaagatcagcttcgcagagatgaccttgactacttggaagaa

SEQ ID NO: 51853 - DNA, 494 bp, Oryza sativa
  unsure (1)..(494): unsure at all n locations
gactgcttgtagaatgatccaagtagagatgtaaagagcctactgttctatcacatcaattcatcagccttgtacgcttggattgtttggtgcaccacctactcctgctgctgttgatcctaaaaccagcttattgatatgctggcagtgcaccattgaaggctcctatagccatatttggcgaagcagtggctatccgaggacagtggtaccatgtgatcagtgatcattctacatgggaaagctaccagtgatgagagcgccacgtttcgccctagcagcgacctctggcacggtgggccccacacgtcagcggtggatgcaaggcaaccacgaatgcaatcgccatctgctgccctttcattgtccaaccaacgctcgcctgcatagaagaagactcttcgcttcttttgctgtgctcttgtgcctctcgctcgctgctgcngctactcattgatcctggntagtttgctctcttctttctatcactctca

SEQ ID NO: 51854 - DNA, 395 bp, Oryza sativa
cttatttattatccaaattgattgtgccatcttttatgataattgcttgtgcacaggaccaccataattcatggttgtactctcactttgagacttttgacatgcatcccttatcctatatatctataaagattatccccactaagtgtagataatgctatttctctcctctcattaagccacatcacctcaattctttctagctcttagatgattgatctatggtccaaattatgttcctccttttcttctcttacgaagtcttatcaccctagttttatctttgaatgattaatctatattatctcccttacctcattgagccacatcaccttagttttgctgttggatgattaatctatatataatttaaattgtataaaccatgtcatctt

SEQ ID NO: 51855 - DNA, 323 bp, Oryza sativa
  unsure (1)..(323): unsure at all n locations
tatcaaatgattagatnatagttaacctaaatagtgtgcccataaataaaaaaatggatattggacagtagcctaattatctttaatatatcttgtcactgtagcaacccaataaattaattataatccatcctttcaattaatggatgtacagggaaatattagtgccatttactagcctatgtccaaatataactatattcatgacttatacaatatttacatanacgttacctcatattttgaactaaactataacacatatagatgaatctttacttgttaggagagtatcacaaagctagtgtatttggaccactaaa

SEQ ID NO: 51856 - DNA, 413 bp, Oryza sativa
tactgatttattgtctatctctcatcaaaagaaaggatacatggcaatcaccgctcacttcatcgatgatgaatggaaattgaagagtcctcttttgaggtatattgaatatgtgctgcacattatgctatatcatgcttcttacatttgtttaactctatactaatgttctcttgtggtgttttatgccttgtaggattatttatgtaccaacacctcataccgctgatcttataagtgaaattatttatgaagttcttgctgattggaacttggagagtatgctgtctactatacacttgacactgcactccgacgaaagttaatggaaacctattggggcaatgctccataagttgctgctgatctcttatgtaaaaggtcattgctgatatgcgtgttgtcacatattt

SEQ ID NO: 51857 - DNA, 375 bp, Oryza sativa
aagccaccgatattatgcacatgttagtgagctctcaatataaaattaatgggattagatatatgccactggtttcctatatctttgagcgtgtgttaaggatgtattcattagtgtatgaatgtggtggtgtgggcacgggtagtgcgtaacatattcgtatgccgttcaattgtctacaaaagtaccggagtccaaaaaacggttagaatgcaacaagaaggtattttttctggatggacgcaacttaacatggtgctaaatgactactctgttttacagatacgtcgtgatttgaacactggacatattaaacttatgtacttctttactatgcgagttttatcctgaaacttaacatattatgttatgctt

SEQ ID NO: 51858 - DNA, 448 bp, Oryza sativa
gtcacctgaagcatgcaagcttatgccattttcaatccaatcgtggatcttatttctgtcatatcctgtactctctttctattaacccttgtttggcaagctgctgtaagttatcgatgaaatctttactactctgtctgccaaattgaatcatgtattcattctaaaaaaattctaaaaatggataacagccgagaagtcctatattatgaaccgtctattctaaaattcaaattcttctacattgaatgtataactgcagcaataaatgtggatcagcctttctactccctgcatctacgttgagcatgtatctctaagtaaccgcacaatacctaacctaatttattgattagagtgcttattataaatcaattcttgcaatttttttcacaaatagatttttgctattttaggtgtcaaaataaacaaaacccatcctagtgga

SEQ ID NO: 51859 - DNA, 260 bp, Oryza sativa
taacatcaacgcagtgcatcgtacgcatttctattaacacctggaacgctgttcccagatcgcctttcctgacgtaaagcctgaagaagatgttgtacacgcacatggagggctgaagaaaggacctgcttcgggggacgcacacggcggccaagagcatcgggagaacatcgaggcagcggcgggaggagaccatgcggcccacgcctaaagagaagagccctgcaggagacgcggccccggcggacgagcgcggagag

SEQ ID NO: 51860 - DNA, 377 bp, Oryza sativa
  unsure (1)..(377): unsure at all n locations
tactaagacctangagtatgacttatacgttccacccgacgggttgtcttcatactgtctagtaccaaataagactctgagtgaaacttgcttgtacaagagttgcaattcaaggcgtagtctattgttcaagttgtgagtaagtgtagcttggagttctatgtggatgttcaaccttaatcggtctccatcgaaccgctggtatataaatagtacattgaaaaaggcaaatctcaatgggatcttgagatttggtggcggaattgttgaattaataaatgggctaaggcccattcaaagattagttcttttgaaaaatcacaaagcgcacctcatgggatggcatgcatgtggagttagtaccaccttgcttattc

SEQ ID NO: 51861 - DNA, 436 bp, Oryza sativa
  unsure (1)..(436): unsure at all n locations
atctctnagtcacctgcagcatgctagctagagctgaattataagaggctctattgttctatattgtgtactagaataagaagagagtggaattgacaaagtccgaagaattccggagttggcggcaatcttctcctatttctcttattctgcttattactctgagatcaatataatattcttcttgagtaatttagatttatctcatgagaattatctcttggttaggtcctaaatagcatacaggattatggttcactataaccaactaaaatatagtgattgctttagtgagttataaaaactaaagtagatattaattgcttagacgtggtgtttatgtagttgttatccagtaattactgcgtatcccacagtacgtttgaggtgggtgtagaggtggtgacagccctcgagatcacttaagtcctcccta

SEQ ID NO: 51862 - DNA, 464 bp, Oryza sativa
  unsure (1)..(464): unsure at all n locations
tagcttatgaatattataatcacacaaganatatctatgcttcctacaatatagattacaaatttctacatattcctcacgtattgaagggcaaaactaacttttctatacctattaaatggtcaactagcgatcaattgaccgctagggtatggaagagatccaaatcaaaattcagaggtatacaagcgagtgaagaaaattcatagacatagaaaggatcggctaaaattttaagggcattaaagaaattctctctttcgtttagtacatgctctgaatgtatctctgaagtctgataattttatggggttcagaagacttgcaagcttcattactgtggtcgtatgtctatcggcgagatcaaagatgtcattaaaccatttaatttccgttatataagaaagatcgatcataacagtaatgctactgtgacatctatatgatacgctaatgcatgatgc

SEQ ID NO: 51863 - DNA, 348 bp, Oryza sativa
  unsure (1)..(348): unsure at all n locations
tactcagctcgcaataccctnccttaatcaaatattgctcataatattcctccctataccaaaaatcacatccaataccatcccgctacacacaattgaacaaaatgaaacctaattggcagagtaaacaaaaacatattgaatcaatctggactgacctggtgacttgggcaggtgtaaaagatgtgtccgtagttctcggacgtctttgccttacgccaaacgatcgtcttcaactcgcattgctggcattgaatcagaaggagcgcangcttccccatccgccgagacgacgccgatgcagtatatcccncatccatggcggcaacaaaaggacctactggggct

SEQ ID NO: 51864 - DNA, 488 bp, Oryza sativa
ttaagtcacctgcagcatgcaagcttggttctactactgttcttgtgcgccactgctattgcttatagacacactagctatagctctagctaaaggatgagttgaagtgtttatgtgagagttcactgtgtgtgttgtgtgcagtgcacaatctatctagtgaatttataacacgggattgagctgagctgagtgagtgagctatgcatgcatttgcttgagtcagcccggcatttgttgttccggcgattacataacaacataatactagatgctgatacattttagtatcacgaatctggatagaaattaagttgttactctctccgcttcaagttacaagatgttgttgactttggttaaagtcaaactgctttaaggttaaccaaatttatagacgaaaataataatattgtcaatccaagataaaattattataaaatatatctaattattaatataataaaactgaattgataatataatat

SEQ ID NO: 51865 - DNA, 429 bp, Oryza sativa
tcttttaactagacatcacgactatatatgaccacctcgctgctattaattatgaacagaacacaaccgcccgtgggctaaatatggttgcccatccatgggctaaaaactccatttctctctcaaaagacttctttttggaaaaataataaatctacaatattactattacgacgtttgctaatttcgactaactaaaacatcattcggtctactgttgaatgcagaaacgaccggacaggatcaaccaaaagatgaacacattgcagaagctcgtgcccaattcaagcaaggtgagacgacgacagcatacaaacctacaatcacgtacattggtaaaacaaaatcaacgggagaacatatatatgaatacatcaagaagacttagaagctttataaacactgacgtgtcataccttgattggattc

SEQ ID NO: 51866 - DNA, 340 bp, Oryza sativa
  unsure (1)..(340): unsure at all n locations
agcttcactcttcttgtgtgttatggccacagctctttgtcttatgctaatccgnttcgccactcgcagtgcacgtggcacggcgatacatacatttggcgtccagcgtattgatccggaagcaacactgctcttgttgttaagcgaaccgtttcaatactgaaacttgcgagcaatgattgagttatcgatcaccacctactatagtcctgcttatgatgagattgctaataaaaaccggcaagtactccctctgtgagaaagacctatgagaaacgctagtaatcctgctcgtgcgatccacgtgtgatagagtatatgacacacactatgcatctat

SEQ ID NO: 51867 - DNA, 157 bp, Oryza sativa
ctaatatcaatttccattactcaactaccgagcccgacaagaaaagggaacatgatctggaatattgagccagggtagattagcaagagatccaatatttctgatttgatcagaactaacaacagatatattcttcccaatgccgcacaacggatgc

SEQ ID NO: 51868 - DNA, 443 bp, Oryza sativa
  unsure (1)..(443): unsure at all n locations
taagtcaccgcagctgcagcttgatccagtttatacccaaaatctccttttttatatatatatnggactggatggaccctcgtatcatggcctacgtaacctaaagacttactcccttcatccaaaaaaaaaaatcgaatctagtattagatgtgacatatttcagtacgtacaacgaatctggacaaaggcatgtccagattcgttgtactaagatgtgtcacattcggtactagattggtttttacgacggagggagtatctgatgggcaccaatcaagccaggactcgggaacattgtaaaaattaagtagtgtgagacaatacactggatattagctattcttatagcgaatgttaatagacgaccatggcaaactcctatgcgaagctgccaacctagcatgcaaggcggaagctccgcaactgctgatgggtgatac

SEQ ID NO: 51869 - DNA, 225 bp, Oryza sativa
caaagctagaccgtcatctgcttatactccaaatactttgcagttacgagtaatttggatgaagcctatatattgctggtcatgcctgtgcattgattatgcaatacggcgcctcaggtgtttaactccatcacaggtatatatccattgtcgattctttatccgtcggaattaggacgcttcttgatcatcctgtactttttcatcaggcaaccatcttgagat

SEQ ID NO: 51870 - DNA, 399 bp, Oryza sativa
ttaaatatatcttgaaacatcatggaagaccagacataatttcaatgcttaaatcttgccagatttgtgatcattgaacaagattgcagtatgtaccattgcgagcttagaactttacccattttctacagacttttcctcaattcatctgtacttactaatcgaaccagcgttctcgaaaaaggtgagcaagtatcatactatctctgcaccggcagacagcgccgatgctgtctccggcgctcttaaaattgagccatctccatggattagcatacgcgcagcaaggtggtcgtaaacatacgcaatgtattcatgtgcactgcgatactttattaacagataatggtgcaccgtccaacgtcactctagttcatgcatgagagtgggacaaggatg

SEQ ID NO: 51871 - DNA, 354 bp, Oryza sativa
  unsure (1)..(354): unsure at all n locations
gattcagcttctcttgatgtttcagtgaagagaaatcatgtttgttataatgccatatgccaaatatgattcagatttcagaatagtaatattgtttactgaaatcttctaaaaggaatctagttctctggtaaattcctgcatcagcctattcaagaagctntcaacattccaataatattattgtgatgttaaattaccagttttatacaagctcatgacctcnactgtcggtaaatcaacaaacatccgatggcatgactgcccagtaaaccagcttgacagacaaaagttgctgaaccacaagggctgtgtttgttggatcactggcctaagtggttcatgtatgcatct

SEQ ID NO: 51872 - DNA, 341 bp, Oryza sativa
agcttccacctgcaaaagccgctgatgctccacgactgtctgactggctctccacgatctcgcctgcttggaacacggtgatcgtgactgcgagtcgagacagtgtgatcaagtctttccacaactaccgcttgcctgtgagattgtgatgatctgcaaatgccaggcaatcagctttggtatagtctgactctgatttgcgtgcgtgcgtgagtgtgttcgctgaagaagaagctacagaaaactgtagctttggtgatagcctttactaacacagtaaagtttttttgttggtagtagatggtaggaaggtgaggagaggatcttattttttttgtact

SEQ ID NO: 51873 - DNA, 338 bp, Oryza sativa
  unsure (1)..(338): unsure at all n locations
ccaaaaactcagcttatatgacagtcgtgcaaaagtttccattngaccattctgntacttttcgttttatggaggtgtaagcaagtgggttacctctcgatcgggatgagccgcagcaacaagaagagctctatgggcatcgacctgaagctgaacctctcgctgccggcgagaggggactcgtcgtccacgagggcgatggccgccgacgaggagtcgtcgccgagctcgtgcctgtcgtcggagaacgagcacggcctgcagtggtccaacagcccggaggcgacgtccatggtgctcgccgcctgccctcgctgcttcatctacgtcatgctccc

SEQ ID NO: 51874 - DNA, 422 bp, Oryza sativa
  unsure (1)..(422): unsure at all n locations
ggacgttgcgaaccactgggtctagtaccagggggaccgcccctggtggactcactctgtctggatgatccgagcggtcaaacttgattgctgtctccgaccaccgaagatattggggcgtatcgggctgaacagcgttaatctcccgttcggtcagcttttgttttcttctagactcataagccagaggtccgccaaagatgtggttgagctccttgcaatggtcttgaaaacctggtcgggcatcatcgtcgtcatccttctttnttgacgtgctttgatctctgtcggaagccttccgtgcatttttggcgtattggtctgcanactgtttgtatacgaagcaatcttnggctgaatgattggagttgggatgatgcggacattgngacttcatgatcttgtcaaaagtattgacgcgt

SEQ ID NO: 51875 - DNA, 218 bp, Oryza sativa
aatacgcttgcttagtgcctcaacatcccttctaaatattcacttctcgtcaatctgacatattcttaggagctcttttgtctgatgcttgtccgcaccggccttgtggaaattagcactggagtgcctcatgtaccaccggtggtgaaccgatggcaatcctggaacaggagtcatcatggcattcattataccagcatgtcgatctgagataatac

SEQ ID NO: 51876 - DNA, 473 bp, Oryza sativa
  unsure (1)..(473): unsure at all n locations
agctntaatcgactggtactcctacagcgcacagtattatctatctctgttttataaaaagggagaatagttctatagtataggacagctccaaccaaattgcatgattgatactatttttcagtaaatgagtaaatttcacaaaaactacagatactttgatcaaactattgcaaaactactgatttaaggtgttatatcataaaaactacagatttagtgttaagtttatcacaaaactacagatttaatttgaaatatatggtcacaaagctatagattaagtaacaaaattatcataaaactacaagtttagtgccaatttaatcacaaaactacaacatttatagctcanacataatggtggtgctatagatttgacctcaaaatnttgtagttntgtgataacttcaatgttaaatatataattaattacgtgatacttgaccttaaatatgtaagtttctgataaa

SEQ ID NO: 51877 - DNA, 498 bp, Oryza sativa
  unsure (1)..(498): unsure at all n locations
actagctgagctgatttagagctctttgacttattgatactagatatttagttatttagtanaagaagtcagaggagttccggaattgtcggtaatcctcctcttatttctttcgctttgnttaactactctgattataatagaaatatctttcgagtaatttagttttgcttggtgagaattatctcttggttagttcctaatcagcgtacgagatcatcgttcactataatccagcaaaatatagtggatgctntagtgtgtacctaacattaaagtaagctattaattgcttagacgctgtgtctaggtagttattaatcgctccgtatcccacagtaggtgtggggtgggtgtagaggtggtgacagccctcaagtcactgaagccttcctactatgacctagtaaagcgattcttggagtaatagctggcagtgccgagttcctataagttaaagttactctcttaacactgtctaccgtgatcactcttctt

SEQ ID NO: 51878 - DNA, 419 bp, Oryza sativa
gcttaattggattatactatatgcgatatttattttttccttgagatcatacttcctcagctcctggctcgtgtgccctcctgtgctatcttcttgtctctttggcaatgatgctaccactctctagaacgcttatttttagttcagacgcgctgagattagggacatctccatgagcatcggcacaaaatatctgaggttcacacatacgcatatataaatataataaattgtcactttatacttgagctatttgaatggaccttctgcctggagaggcatggtatactcgctgggtgtactgtaagacatatcacaactgttagtaaatggtacacgcacaggcgttacaatagaacccacattgtcagtgcctgcatcattaacagtcaacgcgccctctactgattgatcctcag

SEQ ID NO: 51879 - DNA, 267 bp, Oryza sativa
  unsure (1)..(267): unsure at all n locations
gttcaaaaagtccaacgaccaatttactttcgtagcgaaggtttgggcgacttccaaacaagatatcccaggtacaaaagctgttatatggagttctaattaccgtcaagaaattattccattattttcacagtcactcggttaccgtggtcacatcatcttcactcggagatatacnttataatcgcgaggcatatggccggattgcaaatgggccctagaattgatgtattggatctctccttcaagcactcacttaatcaagtc

SEQ ID NO: 51880 - DNA, 423 bp, Oryza sativa
  unsure (1)..(423): unsure at all n locations
gctctttggctatgtgagttagaagtatgactcttcttctttacttatgacattaaatccaccggcttataaatcatataagctgacttaacagtctaagctaataaacctaagcctaaataaagaaggcctaagctcggctccagattataataagctacttcaataagttgtttgtttctttcagtttactcctaataatttggattataataatcctaagctgaaagaagcagcgcctaaatgtacatacatcaaggaagtttcaacttatcctgtggatttctaatgatagcatatatatatcgtggtatttatttcttatcaagattttcttaagagggtgaaacgtacatgcagcaagataagttcagtataccactatnaccctgtgatttgtaccctgtgctgattagtttcaat

SEQ ID NO: 51881 - DNA, 427 bp, Oryza sativa
  unsure (1)..(427): unsure at all n locations
gcttacatctttgatcttttcaatttggtagttgataactctatcaacttcttttgttacataagtgcagctttacatttgccaccacatgtggcaacaacctcgttgcctgctagttttgcgagctattgaagcaataaataaaatagtcagcatacagtgatatgattcagggttaataacagccgacagaaaacagaataacatgcagacagaaatataaaatcaaagatgataacattgtctgtgtcactatgtgtcctagaaacatcatatatactgcagcanaaggtacagggaaggagccaaattcatggtcccaagtggtaataactatgacaaaagaacattatatatgcatgtcctaacttagaatgaaacagtatctcgtggaaattcaaaatgaaattcgagacataataacacc

SEQ ID NO: 51882 - DNA, 433 bp, Oryza sativa
  unsure (1)..(433): unsure at all n locations
agctntctttcttttccacagctatcccttcattgtttgctctcaagagatcaatatcaatatttcttctaagaagattaacatagctaagtctccacccaacattcaaaagctatggcacacagaaccaccatctccacaaagattacaccctaaatttcccccaaaacaaaatcatctttttctccggacataatttcctcattattagatcaaaatgctcctaaattcaaccaaaccaactccatattgtcaaatcaaaatggatataccacacccttccacatagtctcatctaatcaaccctcaatcccgaaacgatcgcgaaacgcgagaaatttatccaggaacatcgcgcgaatatcattcgttgcattccgatctgcccccaaacgcaacaaccaacaacatcagatagctacgccattgaccg

SEQ ID NO: 51883 - DNA, 239 bp, Oryza sativa
  unsure (1)..(239): unsure at all n locations
ctcaagctctgctatcagctggctcaagcagctctagagggacacttcatngtcagattcctgtgccgccactcaaactgtactacactagtaggtgagagcttgggtcgtaccgngagtgtgcctgtgagcttgtaagatcttatttctgtgcctgtgataatggctgacagaaaaggatggatggagtcctctgtgccaatgattatggctgaccaataagctagtgcctttcatat

SEQ ID NO: 51884 - DNA, 454 bp, Oryza sativa
  unsure (1)..(454): unsure at all n locations
agctnttcttacttagagccattgagccattatatactttattctattatggatcttctacggctttatttctttcattcttgctcgagccggatgatgaaaaattctcatgtgcggttcctttgggggctggatcttaaagaattcacctatcccaataacaaagaaacctgacttaaacgatcctgtattaagagcaaaattagctaaagggatgggacataattattacggggaacccgcgtggcccaacgatcttttatatatttttccagtagtaattctaggtactattgcatgtaatgtacgtttagccgttctctagccgtcaatgattggtgaaccggcggatccgctcgcaactgctctggaaatattacccgagtgagacttcttttccgtagtgtaaatactccgtacagtacctaataagttattgggcgttctcttaatg

SEQ ID NO: 51885 - DNA, 359 bp, Oryza sativa
aattttgacgtttataacctagccttcttattatgcacatggttatgtagccatataagtattattatacttaaattaacccgaataaccttggttggtcttttggccctggttcaacatgcaccaaacaaaatcgtggattaaaatgaatggtttgcgaagttatggacctattgcgaattgtataccacaataccagttaactcataaacaatcttaagggtcaaatcatcatttccattttcctattttgatattttcctgcacaactctttttttattgactaggacacaatatacttattttgtatatgaagtcagttttcagttgacatcgtcgtatctgacgctgtatataa

SEQ ID NO: 51886 - DNA, 459 bp, Oryza sativa
agcttgttctacatatcctatgctactgcaggtttattggtctcttcttcatcatacgcgatcatgtctgttgccgcttatcatcattattggcggaagcgtgtgacctcaccgactatatatttcatccacatgagcggtggatctcttcattccactatgatctgcctcgtctgtcaccgactgcatatttcgctgccacggctacacaactatatctctgagcgccttcaacatcattattggctgacctgactgttgacgacaggcttcctcatctacacggctgggcaactgcatcactcttgagtgggatcactatcttcactaccaccaatatatttgccacctctggtgggcaatattatctctatattggtcgacctggctctatgccaactgcgtcatctaccatcaatggacaattatgattactaccaacggacaagctatatactc

SEQ ID NO: 51887 - DNA, 458 bp, Oryza sativa
  unsure (1)..(458): unsure at all n locations
atccttaagcacgcagctgcagcttctctcggcttacatcagcaagggtaattcttttattangtatttgaatcatacacttgagtttggaatatgatattctactttatcttctatatgcttaagtggatattccgatgctgattttggtgggtgtagaattgataggaaaagtactagtggaacatgtcattttcttggtacatcattgattgcatggtcttctaagaaacaatctagtgttgctcaatcaactgctgaatctgaatatgttgctgctgctagttgttgttcacagattctttggcttttgtctactctgaaagattatggtcttacttttgagaaagtacctctcatttgtgataatactagtgctgttaacattgctaagaatcctgttcaacactcacgcacaaaacatattgatatccgttttcactttttgagggatcatg

SEQ ID NO: 51888 - DNA, 508 bp, Oryza sativa
  unsure (1)..(508): unsure at all n locations
cggtgaatgtngctcaattgatattccacccttataaatatttcatttactttctagatgcatacccgcgcgaatgcgctattaaatttcctaaaatgttctcatgccactaagtggcaccctataaacactctcgagtcgccaagcggcactataataaataataaatcagagaaatcctaccaacgattttgttggacccattgttttagaacattagatctattntattaaagaaacagattcggcacaaacgtaaaaaaacaaaaattaaaagtgttggcatgttatacgaaataatgaacgtatgtacggtacgtacttccctcccgttccttagtatattaatttctctcttcacgagaaactaaaataaaaacatttntacaggcaaaaaaatcccacaaatagacttctaccaactagctaagtctagaaagctctcctctcttcctcgatctacatatgaacgcaataattctaagtcgctacgtggtctataaaaata

SEQ ID NO: 51889 - DNA, 372 bp, Oryza sativa
  unsure (1)..(372): unsure at all n locations
gctttaactcacttctacaagaaaatgagctcttgtttttcacaagngncacgcccttcattgctatcaaacttgaacaacttccattcacaatcaccttccagtggcctcgtcatattccacaatgttccattcacttgagctatcaagcagctatttgctaatccacttgatatcttcttagcaatatccataagggttgagatccatttctttccgttcttgactgcaccatctggcgaagttatcctgaagaaagttgcacggaaaaaaatcacatgagaagaattaattgccattgccattgtgctgcacattgcaggtcacagtgtgccacatttgtattgtaactagcaaaggtacattgagaaa

SEQ ID NO: 51890 - DNA, 477 bp, Oryza sativa
acacaagatactcagcttatgtgcattaaacctctgtccaggaccagccagtgttctttacgatctattgttgacatatagatccacgtcttacaaaaatataaaagattacaaatgcagcggacaaaggtaaaacgagctagacttggaatcttgacttctgcagcgggtgattccactccacaggcaatccttgacggcagcgacgaaaccaacctctctgagatagctccaactgggaagaactccagctctagtgtggcggataagggagcaagactgagtactacccactgtactcagcaagtcataccggaagaggaggtatgatgcatgatataaccaaaggatgctaatggttcattcgcaataaagcagcaaaaccaccctcgccgacccaactccatcatgcccaccctcgccaacggtgcctaagaaagggtcgagctatacttcagatcaaacagtaacccactc

SEQ ID NO: 51891 - DNA, 344 bp, Oryza sativa
  unsure (1)..(344): unsure at all n locations
tcaaatcctatgaaattccaatatattgttatatttgttgtggacncgggaggaaatttatcaagagctcccacctcttggaaaatttcctttgaggctatctctctcacatgaatcttacgtgtttcctacgctccaatcaaacgaccattcctatggttttctatggtctgaaatatctgttttacacttcaatctccattatttcaaccctgcgattcaaaggggcccttaaaattcattcgaaaaatagaggaagcaacctaaaataacattttactccgtactacacttaacaagcgtggtcaacgtctcagtcggcggggctcgttccttcatgcttt

SEQ ID NO: 51892 - DNA, 366 bp, Oryza sativa
actcagcttagcaggtcctggccaatggccaaccaaattttttttcccatactctctccatccaaaaaaaagataaaccttggatttccgtgtccaactttgactgtccgtcttatatgaaatatttttataattcgtattttcattggtgctagatgataaaacacgattaatattttatgcgtgacttatctttttaattcttttcataattttttcaaataagatggacggtcaaatgttatgcacggaaaccaccgttttgtctttttttttggacagagcgattatttgatcacttgatgcttgtagcatcgcacgagcagcaccctcccttccccggcataaaaataagaagaaagcact

SEQ ID NO: 51893 - DNA, 461 bp, Oryza sativa
  unsure (1)..(461): unsure at all n locations
tctcaacgcacaagctgagatccgttctttttaagagcgtggaattcagcgcacttcgccgagtcgtgatgtctattgtcctattcataagacaaaaaatcacgacctctgaagctgcaagattcttctcaacgccatgaagacgtcgcctcctaaggtccagcagtcacgaatctctcctagagatgtgaacaaggaatgaggaacgatggtcatctcagaccgattcgttggggtgatcgacattgatccccacgagccatcagtcctacactcgctcgaagaccanggttcatcgttgacaagtacaccacgcgatgtgtttgctatcgaaaggaccagcgcgtntgcgcgcgccgacgcggaagcagagaatcaagtgggtacaccggcccagcatattgtggccatcaacgcaatactgaaggaaaccccttatgatcccgttctgaacgatgatc

SEQ ID NO: 51894 - DNA, 434 bp, Oryza sativa
  unsure (1)..(434): unsure at all n locations
acacaaccaaagaaaaagatatgctgttcttatcagaaatactgtagcattcctgattaaaaaaaaaggtagactatcatttgtaagggaataatggtgtatgaaaaagcaaagctagcgagggaactggaggcaggaaatggaagatacatgccaagcatacataagtgagtgtagaaaggaacgggttgtggcttaactcaccaaaagtgaccatgagaagcatactacaaatggaccctgngcaaggcgacaacacatggttccaatatcaccagatctggaatcgttaaacagtggtggtgccgcacgggcgacagagcatcaagctaaccagcacccacagtattgacaaacttgagcaccttctatggcagcaaccaatcctttttatacagataagacaanaatcaatatcatatntgatattcata

SEQ ID NO: 51895 - DNA, 323 bp, Oryza sativa
atggatgacttcacggatgaatccggcctccagaagtcttgccacctcctcgcggatgaaggcttgacgttccggggcctgccgccgcactttctgccggaccggccttgcgcccggccgcacggcgagacggtgctcaatcacctcccttgggaccccgggcatatccgccggtctccatgcgaagacgtcagcgtttgcccgcaagaaggagacgagcgcgtcttcctatttgccatccagaagaccaccgatccgtgtggtcttggatgggccgtcgcccaaggcaacctccttggccgggacctcggcgcatgtgacaa

SEQ ID NO: 51896 - DNA, 337 bp, Oryza sativa
  unsure (1)..(337): unsure at all n locations
agaagaatagtcgttatactatcttgtactttatacgaacggaaattaggtaggttaagtagtgaactcaccagttcctgatagacgacggcatcacttttgttctcaaatgtgacagagccgtccgggttgaccttaccccttgcccgcgcccagttgcgagctctttgttcanggatgtctgaatacggggcagggacattcgctgctgcagcggctgcatcttcttgggccccatatgccttcttgccgatgtaccctgcggtgcccagccgatgcnggtgctcattccgctgttgcagtacgcgatgtgcctctgctgattccctaaactctt

SEQ ID NO: 51897 - DNA, 445 bp, Oryza sativa
  unsure (1)..(445): unsure at all n locations
agcttatgacgtgtgtaaagtaaactataannctaatatattatctttatctcaagttaaagagagtccaaatgtaatttttataaatttactagatgcatttatgaggaggaaacacatatataaagataagtcttgctaattatctaaaataattcgcgcaagataaaatcctgggaaaatccatgtatgcaccactcaatatatataactcactgtaattntggtacagtttaataactatattggtaccttaaataaataagtcaaaccagttaaataatagactaaatatatttcttaatcagctaaaacaatacttaaccaaaatgtgcattaaactgtatagaagtgcatgagtgaaataatttattcaaatactaggttaattatcatgaataaatataacttttccagaatatatcttctctggttatgtctccta

SEQ ID NO: 51898 - DNA, 192 bp, Oryza sativa
tatgagaaccaccgacgcgcgcaaagcatatatatgttagaatcatcatactctactagtattagggatactaaccttttgctgataacaactatatagtacatgagaatctacatcaccatatacgattaatctatcggaccgtgtcgagaaccctacctatggaccaatgggctaagaactcataattga

SEQ ID NO: 51899 - DNA, 472 bp, Oryza sativa
  unsure (1)..(472): unsure at all n locations
aagtgactgcggctgcaagcttatataatgctggtgttgcttattaagcatgtacnagttcatatcacaagacagggatcgtcaactgaggatattttctggaaatgagcacccattccatgatcgccctcttgaaccttttatgatgccacgacgccaagtgcgcgagatgcgtccccgggcaagacgcgcactgttaagggcgcagaagaaagagcaggacagagcagcagcggcatctaccaaagatgaagaanatgctaagaatgccaaatccgagatcactgcatagatgcgcattcagattgtgttgtgtgggtggagaatgctacaaatctacctgttgatgtttttttaaaggatccatgtatcttttatttctttgacatgtagcctgctggattcagtagacggtagaatcatataacctggganatgagcagctcaatctgaatgtctttttgtgtcttac

SEQ ID NO: 51900 - DNA, 366 bp, Oryza sativa
atggttagaggacttatgaaaaggtcagaacattggtaagctgtgtattactcttcacaacccgtgaagatgtaagaatatcactatgcaaaacctgaaataccttatatatatatataatctttgtcgtgtaacaagcattcttagctgctaaattcacaatcaagagatatgtataagcttatgtggattagagaatatcatccagagcttattgtggtaagagattatcattcagagggtacatggtatcaaaatacaagcctacgcctgagatagacaacaatagtgtctattactcttacatgccacatctttgatttgatctctagttcagtgacctacttctccatggttccttttcct

SEQ ID NO: 51901 - DNA, 450 bp, Oryza sativa
  unsure (1)..(450): unsure at all n locations
agcttaagtgtgatgtgtacgatcctaatgggattttattgtttgttgagcacacaattacgccacacggcctaactgttttggagatgctgtgaaaaattatttttggtccaaattgagtagtaactcgttttctgttcatggccttttgccttgaaatcatggcatggtatgttcttgcttaaattcagattgaaattatgagatttgcctagtgttcattggcatgtgttaatacaaaccccggtatgatcatctgtaagtgcaaagggagttataattagtatgttggtgaactcattcggctcaacgtagcaacttgtgttcatggtggccaatttaatcaacataacattagaactttcttctgaattattcgcctttttcctaatcgatctgagcaacccctcggatnttgcgttaattgttggcatcaagatctgtcacaaa

SEQ ID NO: 51902 - DNA, 450 bp, Oryza sativa
  unsure (1)..(450): unsure at all n locations
agctctcttgttgcatcaccagtgcagctaccttcttttcatttgtccaagcagaacaagtggtcatgcatgaatgatcaaatcacaacatttcgaaagtaataatttattatcagaattaactattgatgtgatcttgaggttcaagttatcatccaccagccagcgaagtggcgaacctatttgtctagctcttcaacgtacacctacattgcacgtgtttctcaacacacctcccacagggatatataatcactttcaaaatttatctaaattatgcataggtagaaactaacaactgtattagtgagaaataaatggtccaacgcanaatnaaaatccaaatattgacgcacanaagccaatggagctaanattattcctatctcaaccaatacaaattccacanaaatgataccagcataaatcttgaaatatcacttgaatcat

SEQ ID NO: 51903 - DNA, 270 bp, Oryza sativa
  unsure (1)..(270): unsure at all n locations
gatccttaagcaccgcagctgcagcttcccgggttctctacacgccgcactcctctttcgcctctcgncgccggaagagctctagcgccgtgtgccctagcgccgccgtcgccgccgtcgctccagtcgtgcgccgccgccgttccagtcatcgtcgtcgctcgggaagaccgccgtcgtggtcgccaagacgtcgccgtccatttccgccgttgggacaccatgggagaccgacggagcacttgccacgacgtcaagccgaggagcgcc

SEQ ID NO: 51904 - DNA, 353 bp, Oryza sativa
  unsure (1)..(353): unsure at all n locations
ctctctctcctaaagcaaacaccaattagggcggggaggntntctattctatatatnttacttgaactctatacgaaaggtgaagaactctctatcctgcttcatttggctccatttntgttatatntcgttggtggaaagtggagttttcttaatattttgacaacgtttgttctaactattttttgctaaatctagcttcaaaatatatgtcttgatgggacaattttgcattgaatcaattgtacatactagttacatgtatcgctgtatttttttgcgagacaatgcattaaactttgtatgaaaacctgcngccattctctaattcgaactttatgcttatatattag

SEQ ID NO: 51905 - DNA, 464 bp, Oryza sativa
  unsure (1)..(464): unsure at all n locations
agcttagccaacgaaatgttgtagntaacagatattgatcnttatgtaaaggaatngnatatataacatcattaaaggaagattaattacacgcaaatcatgcaagaaagtaaagcgaagagagttcagattggtcatcaatgagttgggtcgagtaagtaacagccatattctagctactagtatataaattgttaaatatcttctaccaagcttgaagtggtcgagagagctcatgttcattttaatttggtggtccagaaataattaccaaggccatgagttgaagaaagagtgaaagatttacaccattaaattatgataggttcaaatctctatattattacagaaactctactggctccgtccaataaaaagtgtgtgttcggtttctagaaacaatgtttgactcttcgcttattctaaaaaattatgataatatcttattgttatagataataaga

SEQ ID NO: 51906 - DNA, 199 bp, Oryza sativa
  unsure (1)..(199): unsure at all n locations
caccatggatgcccacaaaaaaccacacaaaagctnttcttggattcttggtggacaagggaagagaatgacgatgatatatattaaaccctaaatttaacccctaaaaaaactactacttcataatcaatccatcatcccatccttccatattatcccacaagtataattgagagtttaagtaatttacccagaaaaa

SEQ ID NO: 51907 - DNA, 393 bp, Oryza sativa
  unsure (1)..(393): unsure at all n locations
agcttcagccatttccttctacccctccgttcatatatattactttatagagncaacattcatatagatgctaataattntatgcatatatatgaatgtggacaatgctataaagtcttataatataaaacggagaaattgacgtgcaattcttttgcgcgtcaaagcttcagctatggcagatgatcaagacttctagaacttggacttgaggaggctgatgatcttgacgtccacctggtagttctcggcgaggacagcgtccggtatctcctggtcggagccgaacagcgacggcgcggcggccaccacgccgggcagctggctgtagaacgccgtgatgacctgagcggcgacgtcgccgacgttgtactggaagtggatcattccgcg

SEQ ID NO: 51908 - DNA, 357 bp, Oryza sativa
  unsure (1)..(357): unsure at all n locations
ntggggcatccagtcagcctaatgttattcacccggaacatgttattattctatattacttggcccgggatcgtcgtctccgtcccaagaacaattgcttaaacctttcatagtagcatacaatattccttgatctcattcctcaacccatcgatctgggaactttagtgaatttatatttcgtaactatgttaacatcatcatctcaatagctacttcctcctatgtctgcctttccaatcttacataagacactgaatatccctcctgagtcctgcccgcccgtttcacctatgatgtaggcccttcctaccgctagcacctgagcgccttgaatgtcgattgcgctgacaatca

SEQ ID NO: 51909 - DNA, 408 bp, Oryza sativa
  unsure (1)..(408): unsure at all n locations
agcttatgagctctctgctcatcaccctttgttattttctatgacagccaagnattatagcccggccatacctatagagatccacggaatctcttttccctccgatctgatccttcttgacaccaaagacttggatgtgatcctcgggaagacatggttaactaaattctaacgagtagcggattgcgcaagacgtactgtcactatgtaccggaggcctgatcaaccggttgtcttttttgcgcacccaactcccaccggcaactcagtacttcatcagctgggactgtcagagatactccgtgccagcaagttcagtgatgttgtttcggaagagctacccggtatgccaccaaagcgggagattgagttcaagatagatcttgctccangaaccactcccatgta

SEQ ID NO: 51910 - DNA, 450 bp, Oryza sativa
gtaaaccacaagcaattctttatttctatacaagctcaatcctcgaaaaactcaccatctgaaccaacctttacttctggggggcggggataaagcaagactgagtaccaatcaccgtattcaacaagtcataccaacgggaaggtacgatgcaaggatattcacaaagaaatggctcataggataacttgcagtaaagcaacatttataaatcatattttgaaatagtaaaaacaatatatatggttaaacagtattaaatcatcactgtccaacgctaaatccacgttgcaacaggcccaaccaaaaccacctgaactacaccaattctataagtcaaattattatagtgggactaatcacgttgagctggttcaccacccaataaccgcaggcacaactatgtgaatagttttaactctgattagaggtgacaactttacccacaag

SEQ ID NO: 51911 - DNA, 439 bp, Oryza sativa
  unsure (1)..(439): unsure at all n locations
tgcatacaattgatgtgtccgcaactttcccaacaccatactgatttggtgctgatggacttcctctgagtgtgagtatatcagaatgtcatcgatgataaccacaacgaacttatccaagtattccatgaacactttgttcatcaagttcatgaagaaggcaggagcattggttaagccgaacgacatcaccgtgaattcatacagtccatatcgcgtagtgaatgcggtcttcggaatatcttcttcacgaatacgtaattggtgatatccggaacgaagatcaatcttggagaatacagtggcacctntaagctgatcgaacagatcatcgatccggtgaagagggtacttgttnttgatggagacttcattgagagctctgtagtcaacgcacatcctcttccgtttgtctttctttctcacacaaatcacagga

SEQ ID NO: 51912 - DNA, 395 bp, Oryza sativa
  unsure (1)..(395): unsure at all n locations
agcttcctggctcaactgaaagttgagtgattcttgtcgttcgtccaacgatcgatcgcaggcgcagccaagttgacaacaatggatttgctctttgctctcaaatcttatcctctacagctctactgcgaccattgctagtgtcattgaagaagttgcgacgactccacctccagtgtaatctttatttgtagttagaacagatcttgtaatgcttgtggatcatctaataacgacgccggttacaaagcaattcggtaactgaaaacagctttggagtggttttgtcgatgcatagacatgattacatctccgttatcgacgaanacgagtgaaacccgaaaaaattttctaccaaaaaaaaattgaatttcagttcaatttatttttaagct

SEQ ID NO: 51913 - DNA, 405 bp, Oryza sativa
  unsure (1)..(405): unsure at all n locations
agctnntcttcagcaactcaaccaaccncactgcattttatgttctaccccatcggcccacccggaggggaatacaagtcaaggtgcgcctaattggttgccaccgattcagccgggcctgggagtttcgctgtggaatcaaggaccgcagttcgacttcgtcaacgctgctcaggcgccaaccgttcagcagcaagctccaacttcaagctttggaacaaaccaagcaccaatccaagctaccatgacgtggtcacagccaatttttgacccatccatggcggctcagcaagtacctccagttggagccgggcagccgaatgctatggcccaaccttgcgcacaagctgcgatttcgcccttcgccacaccgtacccgcagcanggtgcggtaaacagggcggg

SEQ ID NO: 51914 - DNA, 321 bp, Oryza sativa
  unsure (1)..(321): unsure at all n locations
ctaagcttatacattctctcaagttagtatagggcacgtttggatcctatgttattaactttctctccttgctaggctaggctggtcattcggtaactactttaaaaactaactttgcttagcaaactagcctggcttggctagaanatctttgaccgtcaaggagagccaaaatggctctccttcattggcaagctcctgaacaagcaaccttgctttggtgggctatagtctgggtgagctaggctagttgagcaaaaactatctatagatccaaatgtgcccatagtctctagagtatacttgaatagaaatagaaat

SEQ ID NO: 51915 - DNA, 472 bp, Oryza sativa
  unsure (1)..(472): unsure at all n locations
agctntttttatttntagtcttgcgttggagtacttttatttttgtaaatagatgttttttcacaggtggccagcgtactggggccacctatgataaatcttttacataagcgacccgtgcctcccaccatagatcaaacttattgcaagcgggcattctcatggatcgcttatgatcctgtacttgggtgatcggagttctctgtgaaaaatattcttttatgcactatgactaaaaaaccatataccgttctaatggaatatatagctaggtcaacatgattttcagaattgatacctccagtaacatatttccagaccgtcagtatgatacttgtggtatcagatctggtacgttcagtatcagacatgatgccccgtaggtatcagatctgatacctaagtatcatgctaacatcattgtgatacctacggtatcagacatgataccctgcatgtcaatgtcatcatg

SEQ ID NO: 51916 - DNA, 289 bp, Oryza sativa
  unsure (1)..(289): unsure at all n locations
cgagaagatcagttcagagtcgtcgntctgcgaatatatttgtagttttctcggagatggcctaaacccaatctttcccagaagagtagntccgttagctttctagatcgtgtcgtggttgcttgtgtgtaagggtatggtttgcatcattggtggggatgcgaccatactaagttgtttgcttatacaacttgaagaataaaagtctactcacaacatatcagttagcaagtggttagtaccttatctttagcaaccccttctcttccacctctcttctgtctggcag

SEQ ID NO: 51917 - DNA, 468 bp, Oryza sativa
  unsure (1)..(468): unsure at all n locations
agcttaaagatcatctccaggcaactntcaagtgtctgttatatgatatgtcaatgcatacttactaagagaaatgctacaagaatatattcaaggaaaagtacctgtcatagctgcttttttcaagaacactggaggcaagaggtaagacacaagtacaaatatctagtgtgatagaattatcattctccatcagaacactaattatatcggcggtaacctgtaaaagtggtagaactcatcagacattataatggatggaacttcaacagaacaggatggtaattaagaagtacacacatcaagatcctgaatcctgcgtgtagcatcaatagatccctttacatcgttattgtgccaacacctgtaaaccacctacacataacacattgagattaccgctactcgaggtatctcaaaatagcagatgctatagatgaccatactcgttataacctctagttttgt

SEQ ID NO: 51918 - DNA, 464 bp, Oryza sativa
tgcttagtatcatgattcttcaaaagagcaatcaacttcttatgtctggtccaaaatatcccctcctgatattcataatacatagaacttgtgttcatcaaaggataaacctagtgaattactgttgaaacacaggaaacatattatctccagagcataaagccaatctcacagatagaggtacaaaaccttgattaaggctaacattctacagtgcggactcgatatgcacacatgacagtccatttctattttagagagaaatcaaacttcatgtaaattctcattgatgttgaaaatgaaaaataagcaccagtttacaataatgcacatagaatctatgctggcaagagataaatcatcgcaacggagaagaaaccaagcatcattattaattccatacaaacaaagagttagagaaacatcagaaattcattgagtaagaccacatcaatatctctata

SEQ ID NO: 51919 - DNA, 260 bp, Oryza sativa
  unsure (1)..(260): unsure at all n locations
ctaagctgcggcggagatgggaagaaaaaggatggtaacggcggagtgttatatttgctgtggtggcagtggacggcggtggtgcaaaagtatacaatgagtggagggtggcgaacggcaatggcgcggagcggtangaatgagcatgttgtgtggacgtaagctcgctggtaggatatagaggagccagagattgagctaggacgcataagggactcgctagtccatcatccctctcgtcgacaagggcctccatgggt

SEQ ID NO: 51920 - DNA, 454 bp, Oryza sativa
  unsure (1)..(454): unsure at all n locations
agcttaaccccgaagcgaancaggagtttgtttgtttatatcatgcctcactgngcgctctgatatatcttgaagctcgcttctaattcaactgtcacaattcttgttttctcgataacttccaatcctaaacgctcctccatagtgaaatcatggattttccttcccaatgtgctcaggttcatggttctgttttaaccatgaaagcacgaggagtgatgatatatcatgaaattcatggccagactttaagattgtcttcagaggatgtggatgccgagaaaaaccctttggttttggatgctcgctgacgccaaaaaatgatcttgattntgctaaagaataagattgtactatggaaaaataagtctttttcttccaaagattnttacgaatacgctnttttgacatcgaagtacgtttttttggaactgcccattcaaaaaggaaatac

SEQ ID NO: 51921 - DNA, 374 bp, Oryza sativa
  unsure (1)..(374): unsure at all n locations
ntaagaacggatgacctcncggtgcctctcaagcctactaatgtattctctttgtccttacagccctccatctctgatcttttcaagctcgtagcaaagtgcctttacaactcatcttttatatggaaaaaatggtggtacaatcttttatagggaaaaaaattgtgcacctgaactgcataattaatcaagttttcagcaattcagctcttgaatagaatgcaattacttgaaccggaggcttgattgttgaagtaatattgatggaatgaattgntattcatctctccttttggcangtgaatgaacagaataaaagaaaattagtttgacaagcacgtgccaagctaccacttttggtgagttagtccatt

SEQ ID NO: 51922 - DNA, 425 bp, Oryza sativa
  unsure (1)..(425): unsure at all n locations
agcttaaggttgaatacaatttttggatgaagttgttatctcaaacatgtttaggatgggataacacaaaggaaactgttacagctactgtggaacgttggaagcaattgaaagcagtaagtattttgaaataatgtgttaaattgataactattgtgccaaattaattgttctaacccattgtataatgccatgttatgtangatacaccatgatgcaccaagtttatgaaggttggcttgcaaaatgaagagctactgcagaaaatgtttgaagacattcgcaataccagtgtcaaccattggtctttatggtaaggcactataccaacacccaccaatgagtcaattcatattgctgatgataatgagatcgatgaagagacagaggatgatgaaccaagtacaaaacgaaagagaggtagt

SEQ ID NO: 51923 - DNA, 397 bp, Oryza sativa
  unsure (1)..(397): unsure at all n locations
ctcagcttactgagaaggctatanggtgatcattctgcatcaacacagtttcttttcctttatctgatgcatcggnttcaactacaaatggtaaggagaaatccgacatcgcaagaacaggtgctgatattagtgctcgcttgagggtttgaaaagctgcatctgtcacagtattccaaatgaaaggctgatccttgcgcaaaagatttgtcaatggtttactgaatataccaaagttgcgcacaaacttttggaataacctgctagaccaaggaaacttcttaagtcctttactgactgaggtgtgggccaatctttaacagccttttatttatcttcttcagtagcaaccccatttggtctgatgctgtgacccanataagacagtttctgttga

SEQ ID NO: 51924 - DNA, 394 bp, Oryza sativa
agcttggtgggggcacggcatgtgcgctccgctctctttataggcggacagcggacagacggatggagacatggagtcacggagagatgggggcagctataaaaaagagatatacagatagggttgagctagtctacggatcatatttgggctagttgatgagggctttcctctctaaattgtgatatttgggccaacttgcctctaccaagagggtctcctgcgcttgcagtgtactatattttaagcgctaacaaataccccggggcctcgcgggtaagtttcatcctccgtcccctcaaatgaccgggaccctgcccagacttccccatgggttagaaaattccccagtcccggtccctacgaggaaatagccacccctaagctgtcaaca

SEQ ID NO: 51925 - DNA, 394 bp, Oryza sativa
  unsure (1)..(394): unsure at all n locations
gatactgtagaataacacaacataaagcaacagctatatggcacagtaaggtaaagcacggcaggagtagcacgatgtgcgttgtgttggtttcaacatggcgaggcgtgctcctttattcagagagaagcttnccaagtacacaaagaagagaaagccacagcttgcgttggctgatctaccatccaacaaaagagacgggttataatccacagaaagagacagtagagaggtaacccagtgacagtcttgcattggtcctaaattcctccaagtgacactgtagtgtagctagcctattcccagcatctttatttccacctggcagattcttctataatagaaatcagcaccgcagaatgcaactgcatgctgtgctntcttttcccaatgg

SEQ ID NO: 51926 - DNA, 463 bp, Oryza sativa
  unsure (1)..(463): unsure at all n locations
agcttgtttcagtactggtcttccatctcattcttttttgntattgaaattggcaagttcaaagttgcagaaaatagctgccctggatcgataactttgttgcgactttggtttgacctgaaaatacaattccaaataaatctcatggaggaactcaatcagatttccgttcatattttaagaatttctagctacaaaatccaaaaaacctgaactagcagcttggaatcggaatttcttagcttttggcgttcaccagcggaatgctcatcaacgacttctcaccatctccggacttttctcccaaacaaacaggttcacagtgcttccctgcggcccgcccacggcagcggagtacactccgaagtccgaatgggccaaacgatgagaattaagtggcccacaaagtaattatggcctcctaagcccattatgtttcaagatcggcccaattcccatcttc

SEQ ID NO: 51927 - DNA, 333 bp, Oryza sativa
agcttcttctcccgccacctgcctctccaccaccgttgacctttctcctcctagcgacctagtcttccccccaggcgtcccgtcatcgtggctcttcatgccgcggagccttcctcaactccccctcgccacggactccttcttctacttgacgatgcgcggtcagcgctgtcaacccccccccccctccaatttggccacgagagggctagatccatctccagcggtgtcggatccactttgaccggcctcggcggcgctgaacccagtcgtctcggttgtctgccacccctccgctcaatgaccggttgatgccctaaccgcccaaccttg

SEQ ID NO: 51928 - DNA, 384 bp, Oryza sativa
  unsure (1)..(384): unsure at all n locations
ttccactgctgcgcttatgttccacgttggtcgngtgttttctttttattcaccgaattaatcaaactgagtatgtgctccatacttaacaaattacgctctcttttaaagaaaaatttcttctaccgcattaaccacttgttgtaagttatttattaaatattcaatttatctcttaatcagatagataattcgcgatcaacaataatctaaatcaaacatgaccaaacatagttacatgtntttaccggtcaacaagacaacaactcaaaacaaagggtgtggtctccctttttttatatgcccacgctccttccaacctgcactggcttatgagtccaccatgggtcacacaacaagtcacaactcacacggctcagtcga

SEQ ID NO: 51929 - DNA, 380 bp, Oryza sativa
  unsure (1)..(380): unsure at all n locations
cctgcggcatgcaagctngggattattattaacaagctctttttttatgttgtttttcatggaggctgagaagaccaaagctccgatcgggtatatggatccaacgaggatctatcaaaccccgcatatcgtgactctataagaaaactctgagcagcttaagaacaagaacttgaagagatagcgggatacaagaaaggcttgcacaagaccaagttgcttactggggcacaatatattagacgagctctccttgaatttcaaaacaagagtcataatgggctatacaattntaagtatgtctaataaaattctctgcatatatctggattaattgatccgcggctaactgcaccgtcattactatatagcgatcatta

SEQ ID NO: 51930 - DNA, 467 bp, Oryza sativa
  unsure (1)..(467): unsure at all n locations
agctttctagtacatagtatagatacttacattctctgcgttaaccctgtacctctcattaaccctaaagaattcgcacgcataatacccgcaaaggacagttcctctaagttgcttgtggacacatcatagaaaaaatagttaaattttgcaattagtgaaacaattggaatacattaagtgagtggagtattactggccaataggtatgtactagcagcttctcccttgtttgggtctgttctccacccttgaacttgtagtattggtacgcactgtatggatgtcgtaccgtttcacattaaggaggatatttaattataatattcatataaaaatgtaagagtcacaatcacttactactgtaagattgttagaaattctttgtatgactggtgtctgtaatcgagtgggtctaagactaccacggntccgtctttatggtggatgagtaaacagatataatg

SEQ ID NO: 51931 - DNA, 491 bp, Oryza sativa
  unsure (1)..(491): unsure at all n locations
tctctaaagaaactctnttcagattattgagtggctatagacccactttctctacatacttgagaaaaattacccacctatgccatcaaccgaacagatagctgagggcattatagactttagcctttcaaacccaataatccatgcctccaataatccagacaaacaaacaactcacagcttattntatatcagcttattataatccagcttatagcaatctgggttaataatctagattataataatcataaactgaaacanacagggccttattctatatcagcgtattataatccagcttagagtgatccgatttaataatctagattacaataatcttaagctgatacaaacagggccttagtacaaccaagagtccaaatttatatatgtaaggggaaagctcaatgatgcacattatcacatacttagatacacattaacatgtagagagagcacttggtacactaagactcccaattacatat

SEQ ID NO: 51932 - DNA, 466 bp, Oryza sativa
  unsure (1)..(466): unsure at all n locations
agcttataaagtatcttgcttaaagntgaaatggtatttctctgataaaacctgaagtattccgttttccagaccagatcaagtatttaggtctctaaacatgacggcacttcttttttcttctacaaaggacgagcacaacataccctagatcactttgagttgcgaacatttaagtttaaattaccaaacatgtttcatcgatgacataattggcatgtaatttaaatatgtagaagcacaaagattactactggtaacgtacataggtgctctgatattaagtcacaaatcaggaactgacattgcctatattgtcacagcttgaagattttccaatccaattctgcaagaactttattcccgatgcttaagaatgttgataaatatccaagtgtgtagcataacacacagcatgaagtgtcacaggtacattctgcgtggctacgttatacaatacaacact

SEQ ID NO: 51933 - DNA, 449 bp, Oryza sativa
  unsure (1)..(449): unsure at all n locations
tcatgatgctgaaatcacgcttgttgtagcgcatgctacttatgattagcgcatgcctacctggaagagctatatcatctcccactttggggagcaaggaccacctgaatatagaatataacactctatagtatggacgcaacccatgtgtagttcccaaacaatccttgggagcatccttctcatacatgaaagtggtgctggtcactgataaagcatcctcctcaaagatatgtggacgacttangtcatcatcatctagctccaaagctgcagcaaactgtgccatataagtcttgtactgctgcccctgaatggtccacttcacaaaatgaagtcccttcctggtagtgccgaagaaagcgatggagtagaatngaccaattactttcttcattcaggaatactgcanagccaacagatctgccacatgcttgtgacacacacct

SEQ ID NO: 51934 - DNA, 200 bp, Oryza sativa
ccgtctggcccgcgacaaatttatgttgaagctatcgtcgagatggccattcatcggtattatactatcaggcgaaaaccacgctttatggccattactggctaaaaattaccccgcctgcatcatgcgtacgttgattattaactctgcgatggacccgcaacgctggaaccgatcgcatggatacccttgtcctcgaa

SEQ ID NO: 51935 - DNA, 302 bp, Oryza sativa
tgaaaaaattctgctccgatacgccaggcgggctaactgccggcggaaggctgcagaaagtgcagattcgtcaaggcggagacgttcatgcactccgagcgagaattgcagcccgccgtaaataatctatagtgaatttcgtcggaataatcacgttaacaataccctaaactattatgtgacatcaatacccctaactcaaatagattttacaccttaatatcaccggtaaaaccccgtcatccggtgttagctactgcaccacacattttttaaacaggggccctgtaattcgtttttac

SEQ ID NO: 51936 - DNA, 353 bp, Oryza sativa
  unsure (1)..(353): unsure at all n locations
ctactttccctagcaactttacatggtcttctcggtcatcaaatggacgttaagacagcttttcttttatggagagcctgggatgaagaaaactatattgatccacctggtgggtttgctaatgaaagtcaaaaggcaaagtgtgcaaatgttgaagtctttgatggtctgaaaaagcctcctaacaatggcatgacaatttgacaaaccttgacatctgcagctttgcggcatgacgcagatnatgtgtgactatcgccatgtggggtgaggagtattcgtgcttgatgtgacacatacgtattggacaaacctgagggaaaatgaagtaatcatcttgctaaatttgatat

SEQ ID NO: 51937 - DNA, 517 bp, Oryza sativa
  unsure (1)..(517): unsure at all n locations
atgccttggcagaaaaacagggtgttggctatttatggaatgaaagaatagacagatgaaggtgtcattgcacattacaaataaacaaatcaggccagagtgcgccacaaatctgctctccatgacctagttgtttctagtcattatcacttagcccatcagatggcacatgactacattactcaaaagagggggaaaatgatacagtgaaacagcaccgatcagtcctcgatgatatttaacatanaggaataacaagcactggaaatggtcctatataaggggcattcatggttaccagtttaagcaaattaatatgtaagagaaactacaaactaaaagagggtttccagctgcataaaacaaaagaagcatgaaatacctttagacatgcagcagaccaacaacggtcttaagaatcaagcanagctgagtgccccactcaactcacatctcagataacaaatttgcgagaacctgatcatanaatatagaacatctttgactaccacgtttt

SEQ ID NO: 51938 - DNA, 288 bp, Oryza sativa
tctactaattgtcaatctcacttttgtaacgacctaaatcttgagtaaagcaaagtatcaaccttggacatactcgttcgactgttggccatgccctttagtgattatcgtcacaaacgcgccttactcatctgcctcagttctatcacaccttatggtcctatgtgctgataaattgtctacttctctactcacctctctataatatttatcgctgaccatagcagcataactatgagtaactgcaagtgacaacgtctgaattccaataattacgttctaaaacac

SEQ ID NO: 51939 - DNA, 371 bp, Oryza sativa
  unsure (1)..(371): unsure at all n locations
tatggtgatgccatcttgggacttaaaaaagaacatgcttgataccgggtccgggtacatgcatatgcagttggcacacttgtttattgctggccctttgtttgagatgattattggtgagctgtcacatgtctcatgacttcaacctaatacccgagttgggtctttttctttatcccatgacaagctgtcccttgactaagagcatgtacagcttactctaatctttattataataaatataataggtggtcctcacatttatttgcgcacacatatcaataattatttaattacttctctctcactccttcccagctnttctcttccctccagccaatcanggaagatatttcatgctatttcttgtc

SEQ ID NO: 51940 - DNA, 372 bp, Oryza sativa
  unsure (1)..(372): unsure at all n locations
tcatctgttcgaggtgtcctgcgtgtgcatgtgaaacctcctccttctgatcaactctggtacggatttacatcaatgcctgatttagagtgggacatcgaatcttctattggtgataggaaaattaccaacagtcacattggctcgcttatcggtaacagattcaggtagtgaacacatcccatcctcttctgagcttgttacttctcttccaacctacatgtgttaatcacacctttctgctgctcaggcttcactccgtgacagtttggtgctcccaaactgtgaaagtatntccataccacttatgttggcnagaaaagatgactgngtaccctcaaggatgcaccttttatgtggctcaatcgtgag

SEQ ID NO: 51941 - DNA, 441 bp, Oryza sativa
  unsure (1)..(441): unsure at all n locations
caccttcactctttgctcgtttggatcttgatcccccacagatagggcagacatccaactcaacgtattccttgtaatacaaaatgcagtcgttcggacatgcatgaattcttctgacctccaggcccaacggacataatacttgcttcgcttcatatgtcgtctgaggtaaattgttcccctctggcaacagatcctttaacagctcaaggagttctgtaaaactcttgtccgaccagccattactagccttaagcttcatcagttccaacacgcatgacaacttgctgtgcttcgacttgcatccatcatacaacggcatctggcaatcttcacaacttactaaacttctcataatctctgtcgntgtcctctgcgtcttcaatgtcatgcaacattgtagatagacattgagtgtccaaatctatggtctctccacct

SEQ ID NO: 51942 - DNA, 501 bp, Oryza sativa
  unsure (1)..(501): unsure at all n locations
atactaagctttgatcacagactgatgctcatactagctctgcactgattggatttgtttataccatgacgccacgattcgtgcaaaatgagagagctttcgtgattgtacttatatcaaggctctgacttagtattacttggtctgtcacatgggttgattcactccatatngatggatggttgatttatttgccaacagtagattgcggaaaggttgaatgtgctgcctgaatgttaagcgcccaatatttctaggtccacggcatgcactgtaaaggtggaatattctttgtacttattggcatgaaccgattcaaaatggccgtagtcttccatctgtatgcgtgctgctggcagagtggccaggttaacatggactgtaatcttgtttatgtccataaagctacatatctgatgaacgccaatgctaactttgcattgtcagattatgaactacatttatgctgaagacatgtaacatatnttgctgactgacatt

SEQ ID NO: 51943 - DNA, 432 bp, Oryza sativa
gaaacggaagctcttcttcactggcattcatcggtaacatgacatcgttgagcatcctgtatgcataacttttaatccacttaattactcatacggccgtactactgctcagaatattaatgtaattcaaaccaagttgattgatcttataatgcataacatatttctttgcaggattttgaggaactgtaagatatctgataatcttgcatcaatagacttttcgaagtttgcaagtttaaacttactgtaagggatttatttctacaataaattgtaatcatgcgccttttgtgaaatatatttctatgaaccgtacaatgtctgatccctctctgccacgcctttttttactcttacagggatttgagtttaacaatatcactgggtcagtaccaacatgccctgtgggtctgaattgctgaactcctt

SEQ ID NO: 51944 - DNA, 351 bp, Oryza sativa
  unsure (1)..(351): unsure at all n locations
aaggagggggagaaaagaggggaaangagtttttaaaaagagggagaggagggggaggaaaaggaggacaaaaaggaaaggagaaagggggaaaaaaggaaggaaaggagaaataaaaggggggaaaaagaggaggaagggaggggaaaaaagggagaggaagcgaagaaaaatgaggaagaagaaagggaaaaagagaggaggagaaaggagaaaaagaggcggaaaaaaggggggaaaagggggggaaaaaaaaggggaaaatgggaggagaaaaggggagaagaaaaaggggagaaagaggggaaaaaaatcgaaggaagaagagggggagaaagaagagaagggaaa

SEQ ID NO: 51945 - DNA, 458 bp, Oryza sativa
tttgctggatgaacgatgtgtttattatgttggaaaacgattgcaataacggttattggatattctatggtggaaagacaatccatgctcgaataccttggcattcttatctgttgccatagattgttcaactctcatgtgaagttcatcttggccatcacgggatttctcctcgcgataatctaataacgctcttctcatgatgagcgatatcttggacgttacctctttattatgtatctttgatctgaagtataaagtttgaaatatatgcacgccattaagcataagcttttatttttgtctttgctgcccagacgttaaaacccttgtgtactctgcacttgaaatggattaatctcttctggctttgcagtgggcagctcatgactctatcggaacatcaaccttggacgctttctgctaatatcaaatttagtctttataaatcatctcct

SEQ ID NO: 51946 - DNA, 79 bp, Oryza sativa
aattaactggttccttttaacgtaatcatggcacgcaagcctatcaacgctggatgcgaaaatttaatatttgatctac

SEQ ID NO: 51947 - DNA, 397 bp, Oryza sativa
ccaactgacgatgaagaaagtgatcgttcataatctgaccgcgcagctaaactacttacagaaagggaaatgttctctgctttgtacaacatcacctggcgagagcacatatattgtatgaaacatttagctgatgccaaacgttctcttcgcacttttcaagtggtagatctggtgtcattgaagttgcatcaacatgcacaatgttcagaggattctcatacatttccaaagttggcttcaaatatttggttcttttgaactactgatctgtggctcgtggccatcgttgaagtacctcctgaagatgatcatccgtgtcatgtcttagtaatcaatgtcctgaccacctgcttcttatacaacactgtcatttatatgccccgtcctctgaatt

SEQ ID NO: 51948 - DNA, 337 bp, Oryza sativa
tccccataggaacccattcaggtgaacgcgtgcccgtttatcctaaatttagcaaggccacacatgatatcttctacttccgatagactagaacaatttaggttgaattggttaatatacatatgatacatgatgaaagatattagttggggtcaaagatagaggtatggataaaatattggctttaacattgattgtcagtcatatcaagatctgtctttgcatctacacaatcttctttacatccaattaggattaagaaaatattatgactcgagaaatcttcagtctttaagttacacaacatcacaatagatgaatcgcctacgactcaaaa

SEQ ID NO: 51949 - DNA, 426 bp, Oryza sativa
  unsure (1)..(426): unsure at all n locations
tttttttgaatagatatttttggggaaagccaacttctaatgtagaagcttaacttaattttatatgtggaaatgggaagtagatatgataatgacctcttaatcatgagagtataaagatatctaacatgagtcacacaaatttgacaaagctcaatataatgtccagcagtcatatgcatgataaggttgatcattgatgtacttgcatatggccttggtaggcataaggtgaagtcaattggaggattacagctttaaaacaatttcattntgaaaaccaattcccaagagtcataacaagagntacaagaagttcttcatctttaatcatctctcatataagcattacttagatgcatagggttccctaaacatggatgattggtcacaagcacaagntcagctgagaataatgaatataca

SEQ ID NO: 51950 - DNA, 373 bp, Oryza sativa
gtgcaagacacataaaaagataccattgggacaagcgtctttgtgaaatctcattggctatggtgtcggtgaacaatatttaaaccaccaaagtataaacatttgcggattctgtgcataacaataaatcaatatgtacaagcatagaacaccggtcagaatatattagtaacacagatattaacaagtgttctccatgtgaaataaacataccttactagagcccataacgtcatgcttgcgtatcaatagcgaccgatatttacgaataccgaaaggtgtatgcacctctcttccactccttgagtcttgatgtaagcgatctatagtaagtcaatacatcctcttgatactatagcgatggtcgcatatg

SEQ ID NO: 51951 - DNA, 361 bp, Oryza sativa
ctctactttccgcagattggaaaatcgggaacagagtgttaacaagggctcttctagcaggccaaaggccacgaacaacacggatagtactcctgtgctccgcatcaatggtgctaagccgcttcgacacaagagaaagagaacttagatcacttgtccttggaatcctcttcatgaactctgcaagtgctgcacccggaagatccttcattgttgaatacgggtggacaagattggtaatcctcaagttccacaggcatctgagtgctggggtagagtaaatatgattccaacgacttatacgatgggtaccaaatagccgtggcgagaatcatcaggagcatatatatatatatataat

SEQ ID NO: 51952 - DNA, 369 bp, Oryza sativa
agacttgcaattcaaggcgtagtccattgttcaagttgtgagtaagtgtagcttggagttctaggtggatgttcaaccttaattggtctccatcgaaccgctggtatataaacagtacattggaaaaggcaaatctcagtgggattttgagatttggtgggggattgttggaattaatgaatgggccttagcccactcgaagattaattctttggaaaatcacaaaagcccacctcatgggatggcatacatgtggagtttagtaccaccttgcttattctaggagagggggacctccttaaaagggaggatgccctcctagccacttgaagcatggtggtggagagaagaggggaaacacacgcgcgc

SEQ ID NO: 51953 - DNA, 437 bp, Oryza sativa
taaagggaaggctgttattctgcaaacagttgtatgtttcaagtttttatttatctaagagtgcgctttccacaaccagagcgagacaagtctcagctcgtgcgggaggtgagatattacaaatttatttatcaagagttgcacaacttccagagatggcttcaaatctggttttcccaaaccagaccaagtttccaaacttcttgataatagtggtccccatacgaccaatcacttctatggacacccgtgcccgctgtccctcggaaaactaaatgcttcccaagcattatgtttcccataccttaacacattgtcataatacagggtaaaacaaaaactacgttaaggaatcaccttacatacgcccatgaccagtggcacggctattctaacagtttaatactctcatcagagggggtacactttacccacac

SEQ ID NO: 51954 - DNA, 434 bp, Oryza sativa
  unsure (1)..(434): unsure at all n locations
atctattgcttgccgtgccaccgggaatgagaggagggcacccacgggaggagaccgccagagatccgcccacaataaccacagtctcccatgccaccggaggactactggatagcgccatcgcagtccgcagccactgtcgtggattcgtgcgagccgctgccacagcctcctcgcgcaggtcgacgccgccgtcgccttctcccgcgaggggagttctgcccatgagccattggtgtgggcgccgctgccgctgcctcctcccgcggtcgctaccttcgcctncaccgtggggcgccgcgcgaaccttctcttnctcccactggcgtcgctgctgttgccggatccaccatgcccgtgagtgccgagttccgccgccggatccagccacgcccacgagcgccgtcaccaccggagccgacctcgcccgtgag

SEQ ID NO: 51955 - DNA, 342 bp, Oryza sativa
  unsure (1)..(342): unsure at all n locations
ggtatcattacatattcagcttctcgttgggtagagactatatgatttatccaagtnagtcgataaaaagntgtaatcacagccgctatgccaataatgaatattgtagatcatgcaagtagctatatatattacctcaaagttggcaaagctttagtgttaaaataattcatggggtgatgacatgaagtgaattctgacatattaatcaaagccaggatagtagaaacgttttccatactagttatgtgtcttaatgaattgaatagccctcttttttcatgttttatgctgagctcttggttaaattgtattttgtccctttgttcagtccacatcgat

SEQ ID NO: 51956 - DNA, 336 bp, Oryza sativa
gcccagctaaccaagcaacaagcacccggtaatttccaggcgaaattttcgcaatgtattcttgatctgtagacatgtgaatgcattatttagcaagcctagataattttgaattaaagttccacataaaaactgcaatatatacaatgtggtgtgctcgaactttgtatttaatactaattgcacaggtgacacatgtgtcatagcttatacatagacaaaagataagttatgaatttgcgcctaatccactcaattctctctctgaaattcgatggcgacacaaggattcttgtcatcaattcatggtgaagaatactacatcgtgcacgcaca

SEQ ID NO: 51957 - DNA, 225 bp, Oryza sativa
tgccgggatgctccaaggtgccttgaagttggcgatgaagtggtcgcgtaaatcagcccaagaatccattgtaccacggtgcaatccattgagcccagatcgggcggaatccgcttaagccactgtgtaaatagttcggcatggccttgctgtctcctcctgctgcgcggattgcgagaccgtaaatggtaagccacgattctgggttagtggtaccgtcatact

SEQ ID NO: 51958 - DNA, 438 bp, Oryza sativa
  unsure (1)..(438): unsure at all n locations
gtgtcaatgacaatgtaagaacatcacaacaggtgttcactttcttcctcatgcttcctcttcctaaaactccttcatattctttcttcacctcccttcctttttgctgtatgtatcacctcttagttgctatgacttcttacaatgattcattgtggtggagtaaacagttgcatatatactcaaggaagtatagaagagttacaaaagtgtcatactttattgtcgcactttacgtgaacaggtggttggtggatgcatatttcttctaatgtattaaccttgaggtactttagttaatgcatttagcaaaaagagttgatggtgtggccaatgctcttggtggtggaatttatatttcgtgcctagatatagcccgatacgtacacanatgaacatttctctagacaacaattcttgacagnttgttctactatc

SEQ ID NO: 51959 - DNA, 518 bp, Oryza sativa
cgggcaatggaacaccgaggccccttttggtgctgaattaccagccactatgttgatgtgaaggtaaccacctctaagtttttgatctggtaagggtgaaggatcccacaaagtttatcaaaaatggctgcctaatgcacaatctctttttcactgcactcgcctttactgcgataaatcggcacatcctttctcttgaagcctctcattgcattcccatcctcagatagcataagccggagaacataaacttgatgcccctgatcactttaatcctctattacgatgtcagaaatgctgacacagatagatggtcgaagatgtctcgccgtgctgatgatttgatcttaccagaacactattcaccagtgccatatggttgaacttccaacctgatccagtagctcctagccatctgaaccataatttcacaccgctctataccttcagaaattacctgctttcttcgccacggagctgactgtcacctacttttgaaaccttaattctgctagctc

SEQ ID NO: 51960 - DNA, 73 bp, Oryza sativa
ttcccccgcctgcactcatgagactgtgtattattagcttctgccgactgaccttcaaacgatgagaactgat

SEQ ID NO: 51961 - DNA, 251 bp, Oryza sativa
  unsure (1)..(251): unsure at all n locations
ggtggtggatgcacaccgcatggagatgagaagaatgcaccgggagtagcgccgtgaagagtggcaccgcgcggacaacaccactgtgagagggggcgcaagtgcagcacgagacctacgcaatagccacgagagacttggtggtgggaatcgatgacgtggagaacggcacttacttatctcgcgcaatacttgcccacttttncgcatcataagcaaggcgggcctatccgttgatgcacccgccatgt

SEQ ID NO: 51962 - DNA, 198 bp, Oryza sativa
gcatcctgcgtatgtccgagaagacatgatgattagagtaaatcattgcattgagagttgcaaacgccatgaatggctggattgagagttgaatacgcggggaataggcgataaagtcaggatgtcctatactttaggcattgccttagaatgagccggatgcgagaacatatgacttatattgcgacggatgcatgg

SEQ ID NO: 51963 - DNA, 404 bp, Oryza sativa
ctgacagcataggcggataaacctgtcatagtcgtcaagacgctccttcctgagttatgaaaagctgggatggcctatctgctctttcaaagaacaccgggttgcggcacacgcttgcacacagctctcctgtgggctcacacgaactcgtgagataattcgattcactgaccagagcaggaggaaggccatcacatttgcctaaaacggaactgaaccattctcaactcaggtgatctatcccagttggcaggctaatccttgcgagctcttaccaacgagtcattgggcacaaaaccctgcatggtgagctatatctatgaggatattgggcacattatttgtgttgaccgtgtcttaagtggacaagatgtcatgacctccgatgtcttctacatatacct

SEQ ID NO: 51964 - DNA, 139 bp, Oryza sativa
  unsure (1)..(139): unsure at all n locations
cgtctcatgtaaaaccaatcaggatcagacgtgacacattatagtaccacgaatctgaacatacatatgctcagattcatcgcacatgtcactttcggctctagattctgtctntatgggaccgagggagtatgcacta

SEQ ID NO: 51965 - DNA, 387 bp, Oryza sativa
atcacgcttaaaaaaggagaatttggatacatgcttgaacaaagctattttttttagcttgatttggcgcccgaaaattctgactttctttttgtgtgtgtgtgtgtgcgcggcgcaacggttacaatttgctgagggatcctcgctacaacaaggggctcgccttcaacgaaagggagcgcgaaacgcactacctccgtgggcttctgccaccagcaatcgtatccaagagctccaggtcaatgacctatatttgttcttaatgagcctttcatattcgacaactatctgatcctatgctctatctattaagaaggaaatctccataaatcgtatattccattcctctgagaaatcatggtataaggactccaggacttcctatgt

SEQ ID NO: 51966 - DNA, 431 bp, Oryza sativa
  unsure (1)..(431): unsure at all n locations
ntgggcaaagctaatgggaacgaatagacaacagatcgattattatatttgtgcctcagaattcagagcgtcgtacatccagtccagcaagagggctctctcattccagggcgtgaatcaaccgaatgtcaaaccacggggacacaaatgcgtgcgagccatatctgagctgagcttgagcttctgacgaataaatgcagacgatttatacngttgttgcgcgagggctctcgcaccggccggccgtatagccgtattgaattgccaccgcaacccaactacgacgcctgtaagctgaatggtgactacgtatagtctccaatcgaaccattggctggtgcaacgttgaaactttcactactgacggatgcatcttgatatggtaaacactaaactacgtgctagttttccccttaagtcgcacgcatgca

SEQ ID NO: 51967 - DNA, 324 bp, Oryza sativa
tgaaaagatgatgaatatataatgaatgtgtttatggatagacaatggattcacctgcggataatactagatccacctttattatctagggttatattctctccgtcctaaaatataacaaactttagccattaggatttatcttaaaatataacaacttcttcatcaacattttcttttcaaccaatcacaaccctctatcatgtcattttaccacctacctcactactcatccaatcgtaaccctcgaacactcatttctacctactttcttaataaccgcgtccaactcttaaacttcttactccctccgttcctatttaa

SEQ ID NO: 51968 - DNA, 169 bp, Oryza sativa
attaacatgaagtgctcatactaataatacaagtcaacagctctgtaaacataactctggattgtgtacactatctgtgtactgtcttaccatctacaatactcaactaaccaagaaatgttatatagagctattaatatggattgaacttcgatggtggtgaacactg

SEQ ID NO: 51969 - DNA, 383 bp, Oryza sativa
  unsure (1)..(383): unsure at all n locations
atgggaaaatgagagcacattgatagaaaatattatgattaatatataatatattgtgcgaaacatttctagttttattttctgaatatatgtacaaaataattaaatattttttacatgaattaaatattgtttttactccgctagatagtatcatagtattagctactccagaaactttctaattcttgagaaggtatctagatgtgccatattgtgtattgcaaattttgacatctcccaagttccgatcaatccttgctactggtagtggtagctctaaaattaagccctcatttaaaacaacgaatttaattcatgcganattctggtgttgcaaacaggcctaagcatacaatgcacaagacatatataaagttcat

SEQ ID NO: 51970 - DNA, 445 bp, Oryza sativa
acctttaaactcagcttgttgggaaaggaatcaccatgattgaaaaaagtatttgtttatgttgatggtgatgccggtggtatggtcacggatgattgtgtcgcgtttacaaatgttgataccaagctcatttctgtgttcagaccatttagagatgtgaggttgattttgtgccgaagcaattacattgctgtcgccaaccttccggctgtctcttctgaatgtgaggtctgctacgatgattttgtcttaagggcagatttcacagctagactgctagtagtaccttgctggagaccggcatgtccactggatgttcgattcttgccatagctggatataattaatcaaggcagcgaaggcgtggtggagaagctcttacaaccctggccaccacctactcaagctgaagtttaagcttacaagaaagtactgaatttatatg

SEQ ID NO: 51971 - DNA, 483 bp, Oryza sativa
  unsure (1)..(483): unsure at all n locations
tcgtcctggttcccaaccgtcgcctgtggtgttgggtgttagtcccgtggttccgctgctgccgcttgtggtggtgtttcctcgtccgcgtcgtcggttgaaatctcgggctgttctgagctgcaacctaagttaaggtaaataagtcctctatttattntaaggattgcaatgattcatatttgtcaccgtgggtaccagcgctatgtcctgggactggtactgaaatcgcggtttcttaggaagcggttcgcgccgtttttcctacaacacgctcctgtcaagtgccgttgtacggcgatgccggattgggtgtgacatttacanaatttgcacgtggtgtccttgcatgnttatcatgtactagccancagcgactctgattgcggcatatcttgctggatgaatggacattatcatgatatgacagctcgtttgtaagtaaagtacttctcattctaaantatactcgtcagtctatat

SEQ ID NO: 51972 - DNA, 370 bp, Oryza sativa
ctaagcttggtggcatactgtattgaatcatatgtagaacaagcgctattttctctcttgcaactgttgagccttctctgcagcatgatgctctgagaccagcgcttcctcatatgttaaatatgaatttccagacaccttacatgtcccaactctttcacgatagaggattaccctattcaggtattccctaataaatagtcaaagacataaccatattacttcaacataatctaatacaagtacataatatcagattagaatggaaattattcttcatataaaggacaactcaataagcagccattaaggcatgaaagaggatactggtaatctcggaatatcttcttggtataccgaacttggaaca

SEQ ID NO: 51973 - DNA, 251 bp, Oryza sativa
atataagagattttgagtttttgcttggcacgtttgaccactcgtcttattcaaaaatttttaaattattatttattgtattgttgacctactttattatctacagtacttaaaacacaacctttcgtttttatattgcaaaaaaaatttgaaggcacagtggacaacgtatattcaaaactgcaatctctatattataggacgggggagactccttactctagcctagcacctaactagctgggaaccaa

SEQ ID NO: 51974 - DNA, 354 bp, Oryza sativa
  unsure (1)..(354): unsure at all n locations
aaaccagcnggaggcacacacccgccgacaagcagtcatgaccaaccccgccgcaaacacacgcacacacgcgggcgaccgtggcaccaaagcaaccggtccacagatccaggcaaggagagaggaaaaccgggcagaccccgagaaccaaggaacacaaaccaacgaacaaaaggccggcacaacaacgacaaagaagcacggaaacaacagcgaagggagcgagcacacaggcgcaaacccagcagaacctacccaaacaccgacctgaaacccggcgcgaaaacgaaccaaaggcggcgggacgcgcaacaacggtggccgccagaagggcacccaaaacacaaagaggcc

SEQ ID NO: 51975 - DNA, 404 bp, Oryza sativa
  unsure (1)..(404): unsure at all n locations
cgcactttggcctaagcgaaaagtgcctaagtccctaaaagaacgtgacaggccacacctgaaaatatgggctgcagacatattatgcctaggccaaaaaatatgccttcgacaccctttaaaggatgacgcatgtaacatgctcccgagtaataaatcttccgggtaatatagaccaagtgtagctcatatgaatagcttctgatctgaatgattatcccttatgggatactccaaaatanatataataattgaatcccgactggcgcaagtattcggttgatagcccttacggagaataataattggtccagtctttgagcatagaanatagactctgactatgaatccatgtggaatgtatccggaacaagtccaacatggagatataatcctcacgcttg

SEQ ID NO: 51976 - DNA, 363 bp, Oryza sativa
  unsure (1)..(363): unsure at all n locations
atggttatctgtatattatctttggatagcaaagatgtggcctactagtcactgcccattaattcttttcaagtttgttgaatatataagcacataatgatttaatttattccctaaataaatcatgacattgcatatgtaaactagcataatcgcatcatacgatctacacatgtaaactagacagtaaagcatgaacaggtcaaatctgcgaaacatgttaaatgcgtaccgagggttttggaaaacccggtgctcagtaggaataactcatggtacagtgcgttgacaacggcgcgcagcacatgagagaagaggatacgacccgttgtggacgaacagggagtagtcgcgcanagcact

SEQ ID NO: 51977 - DNA, 410 bp, Oryza sativa
  unsure (1)..(410): unsure at all n locations
cgggattacgaaaaataacgacatgttggctgaaatactggaaaatccgtccttagctacctttacagtgtaaatggactattattccacttgttacacgctacggctagggagtagctaaggactccacttgttgcatgcgtacaaagaattaataactgattttctacaaaattaaaaggtaccccttcgtatatagtagtagaaattatatacaacaccaacgttggtttctattcgaagcaatcgcatatgatatgtatgtgcaacatatgttgtatattttgaacggaggagtactgcgtagaaaagctacctagtctgaagtggatatttcaaagaaanggaatggtggatatccatactgacgctcgtgtctatgaaatagtcaacttatcactgaagaatta

SEQ ID NO: 51978 - DNA, 409 bp, Oryza sativa
  unsure (1)..(409): unsure at all n locations
agggactgaacgttgcttgacaagggcccctgatagctcgctccctaccaccgggctataatgccattcttaaccttacccgcacattgtgttggaagagaattatactacttcctccgttccaaaatgtatgcgtnttttaggttggcacgggtattaagaaagtaggtgataatgattggagaatgtgtgtgattggttgaaaagaaaaagtaggtgaaggagaatagttgtgattggttgagaggaggaggtacgtgaaaaaaatagcttcattttagaacaaggtactgtattataaatagctacatttnttaacggaagaagtactaccaaattatttttctatacgtggggtgcattagggttactattacacatatctaaacatgaaaaatctaaatgaatc

SEQ ID NO: 51979 - DNA, 489 bp, Oryza sativa
  unsure (1)..(489): unsure at all n locations
aactgtatgtttcanatatctcaatatcctcttagccgcccgcctatgtcttattggtggtgcatgcaaatactggcacaccttatatactgaaaatgataaatctggtctagtcagagtcaaatactgcaatgtctcaaccagacttctgtacctcggactgtcttctggtccaaaaggattaccttcatgagcacttaattcttctgatatagacaaaggagtattgactgctttacaggcactcatattcactctctttaacacatccatagcatatgtctctcgttcaaaactatgccaatatttacttctttcacttcaatgcctaagaaagaatgcagtctttctagatccttgagtgcgaatctggattaagattctcaagcagacactagtggcacaatagatagctggctctataatgtcatcacatatacaacataacatactacatctcccttactgaaagacaaaatgatctactta

SEQ ID NO: 51980 - DNA, 328 bp, Oryza sativa
aaatcccttcatgtactactctcctagcaactttagattgatcattatctaagtaatactccatctatttttcggcgatataatatttgagcgcttgccgccgaatctttcgatcaaccttaagtgtaagatctttcaaatatctaatcaaaggaattctccaagctatttctaactcatgggcacaaatgtccgaattcacaattaattcagccttttaatcaattgtaacgtgccccctggctctctccccgagatcgatcagaccggcgacgcaatgcctacccggtcagaccgctggtaccaccggtcagaccggtcgtgcaat

SEQ ID NO: 51981 - DNA, 152 bp, Oryza sativa
  unsure (1)..(152): unsure at all n locations
acctgctcgatgacatctcttcngtgattagcgacgaggagcgatgacaccgatgagcggcaagaccagggtgagaacgaaaacagggattacactgagtagcgccaccaagagaaaggcgaccacccgataatgggacaaagaagaaaaac

SEQ ID NO: 51982 - DNA, 450 bp, Oryza sativa
  unsure (1)..(450): unsure at all n locations
aatatattctggaggcatatagcccctatatataacccaatacaaattaaacactcagaaatttcagtagagaaaacagaaaggaaataacttcatatggaattaataggatgccagatatcttacaatgttccacgaacgcttgcattaatctcatcatcttctagcactttagctagtccaaaatcaccaatcttagggttcatgtctgaatccaggaggatgttgtctggtttcaggtccagatggactatagtaggtttcccagagtgtgtgtgaaggtaaataattcccagagttatcccttgaattatttggaaccgggaggaccagtcagctgctccnctgcaaaaacgatacaattngaacaggacataccattatagacaggatatgtatgaagagagtttggctagaatngacgtataatcagcatttatatataagtga

SEQ ID NO: 51983 - DNA, 456 bp, Oryza sativa
  unsure (1)..(456): unsure at all n locations
ctttttactggggtctaaggccccaattggtttgtacgttaaatccgcccctgaataatagtgtcattttctcaagacaaaaaaataaaatggctagtgccggcttgagcaatagtactcataaaatggaccaccctttgtacaacttaaacctagagtacatgtatatgtatatactactccctccatcccaaaatataacaatatttagccctcaagaattgtctcaaaatataacatcttctccaccaacattttcttcccaatcaatacaactcttcaccattcactttgtcaacctaccttcactactcaaccaacacaatcctgcaccattcacttctacctactgtcttaataaccgcgtctaactctananatggttatattctatgaaggagggagtagtatatgtagattatgcgatctattgacatgagtgctaagctaacatga

SEQ ID NO: 51984 - DNA, 294 bp, Oryza sativa
ttgaatatccgttcccactcgtatgggcggatgtgtagagattcctatcctatctcctgtctgactactgccttgtgaacttgctgctgtgtaaagtggcccgatgtttagaaacattcgcacctgataggattaactatgctcccgtggtcagtagaaagatgttggaccacatgtgcctctgataaatgttgcgctggtgccaatcttgaacggttggaagactgtacatctgctttacttcgaccggactatacgcactgtcctatttttattgtttgagtaaactaatta

SEQ ID NO: 51985 - DNA, 417 bp, Oryza sativa
  unsure (1)..(417): unsure at all n locations
acctangcatgccatctccgtctgtccgatcatgagccacctttctctattatctcctctctaggatgccgtgctcctatcttcttatcgttgaggatggccaatatacgggttaagagacgcaccgatgtgtgcctgtgtagctcacttcctgcgtcagaagctatgacattcggaagcgggaggttgaggattatattcatcaaagacgtccggactacattacatgctttaatcgtcccatgatctataaaaaatgttctagctctcctattcattcaatcacaccatgatgtgtagaacaaactatcatgattataatttggtgttncacaacagcacattaccacattatgagagtgtattactgggcgaattcgctcatataccaagacgaatgtcatatctgatactatg

SEQ ID NO: 51986 - DNA, 415 bp, Oryza sativa
  unsure (1)..(415): unsure at all n locations
cttggaaacacttgcggtacggctgtaatcaaatatgtggagctctgggtgggcttaaatatgtagcacaggaatagcaaatgctcaaatcagataatgcaaagttgaataattgttcaaagtcaagtaccgtgctggtcctaggctagaacgtactatagacgcgagcctatacacatacgataccacgagatagcactatgaacaactcatgcacaactctgatatatgaagttcagctcacacataacagnactcgctctcttctttcgttcttncttcttcttttctctatatatctttcctgttctttgctgatgtatattggacggcttattgttctctatttntattgcacctttatgcctgtntctttctcactttttttcttgattnntcttaacaaaaactgact

SEQ ID NO: 51987 - DNA, 418 bp, Oryza sativa
  unsure (1)..(418): unsure at all n locations
tatgtacgctttgtgcttgcggcgggtgatggctaattggtcttgacctcagctcgagtgctcttattttggtgctcaagaagggcctagatggactccgctagtttttgttgatgagatagtgtgccctttgctacttctagatccactaaaagaatcataggaagtagttcccatgatcgtcagactttatttttacaggaaacacattgaatattaaaatatgactgttatgaaccatgcacctgatgtttggttgcaagagcactattcttaggggcaaagattatgtccctgaatcttgtaaccggaacaaatgaggttggagtctataagttgaagcttagancaccattgatatatgaggcaatgttggtctcacgttccaaaggctgactgtatatatgaccctgggtta

SEQ ID NO: 51988 - DNA, 332 bp, Oryza sativa
tctgtttcatatttctgtacaaatttcctccaaatcactaacacggaatcatatagttcatatagttattaatgtacttgtctgagtggtatatattcctgaacgacttcatattgcattcatagtgcacaaagacagactctattgtcttccatgtatttgttgtaaaaaaacgatgtgtaaatcgtagaaataatgcatattgatgtgctttacattcatttattgaatgggttgcagatacggaatgagaaagctcgacgatacctgagcaacctgaggaaaaagcctccggtttcttatactaaaagatatccacgtgtggatcctat

SEQ ID NO: 51989 - DNA, 354 bp, Oryza sativa
  unsure (1)..(354): unsure at all n locations
acctctttttccctttagtgagtcttctttgaagtttctcacatttangtttctaatgaaacaacagggcaatataaagtagcgtgtactatgtactctttctcctattncattttctcccactggatttttggaaagaagtttgatgaggcatatgtatagcgcggtattcgcccaagggggagtgttatgaaaccgatctcccgaaagagtccgatttgtaggaccgtgatcgtgaggatcaccgtacctnctccttctattcttctgtttccttattaatgaagtgggctatactacatatatatgtatgtatccatatangacatnctatcgtgggtatacatacaatag

SEQ ID NO: 51990 - DNA, 485 bp, Oryza sativa
  unsure (1)..(485): unsure at all n locations
taacctgacagcactntattntagcactgatggtgtgtcaaacagagagtaatatggcaacttagatcacttggcttcttgatatgttgtgcaaagttaactacgacatatcggatcattcttaacatttcttacatatctaagtgtgcttgttattactacttgcttgaatgttgtaggcttctcttacacacactgctggttgacatggaaaataatatttatgagatttggcatctgggtgtcatagacttaattcggtttgatgcatgtagatgagatgctgcgagtaaattatgaggaacacatagccatggtatgaactgccctgccatgacagcgtgaacttgcagctgggtaactacaccaaatccatgccatcctcggagggctggatattcaacagtagacgtgagataacaagcctggactagaaatacaattcattccgtattctcccatctccaatctcagttattcaaaca

SEQ ID NO: 51991 - DNA, 161 bp, Oryza sativa
accccgtctgtctatccagtgccgagtggctgtcaaactaactccactatacaccaattctagctgctcacgtggaaaccacgccgctaccgaacgggcactctatcacggtctccacacgcacaggtgaacgactaccgactcccgtgcacgggtaccgg

SEQ ID NO: 51992 - DNA, 211 bp, Oryza sativa
agcttgacgttccggggcctgccgccgcactttctgccggaccggccttgcgcccgggcgcacggcaagacagggctcaatcaacccccctggggaccccggcaatatccgccggtcttcatgccaagacgtcagcgtttgcccgcatgaaggagacaagcgcgtctttctatttgccgtccagaagaccaccgatccgtgtggtcttgga

SEQ ID NO: 51993 - DNA, 482 bp, Oryza sativa
  unsure (1)..(482): unsure at all n locations
ntatattgtctgcatacagagacaataatcggaggtgttaggtnttatcatgtatctcttagttctgggaacaggaagacaaaataatatgtattggctcctccatatgctcacctgtgtcaaaagagaggctgtacatctntgctntaactcttctttctcctaatggtcaagtgtaatctgcgaatatgcattcgagataccgtattttgatgagaaacagagatactgacacagaagctgacctctactgttccatctcttgacgtagactctctctgagttcaccagtcaccacactgatgattctgtcatgtgtttcattcataaacttcctcttcacatggtacaatcagtactggctgtctgcctgtctgtatttctgactcctggcaataccgatactgacatatgattcttactgaactggtgacattcaagatctgctcgtgactcagaacaggatgatttgttcatggtct

SEQ ID NO: 51994 - DNA, 239 bp, Oryza sativa
  unsure (1)..(239): unsure at all n locations
gagcacgccccatggcgcgctccaagctgcgggcgtgctcttacgtcacccgcctgtcgtccctgacccggagtctccagcccaacgatggctggacgacgtggccaaactagtcatgacggcaccgcagcacctagatgctggtgggcggacctccgccacctatgcctctggtgctgctaccaccggcttcgcgtctcaagacagatggcacgacgagcggcagncgctgttcgcca

SEQ ID NO: 51995 - DNA, 190 bp, Oryza sativa
gaaactgactatagggtcatcatctattcactaccaatctcaaattcgttttcttatgggctatgtgtgttagagcatgcatgcactcatacacaatggacgatagctctatatctgtcgctatgagatatatgatataattgcgtcggagtaagagacaatgattgattctgtacccacagctgtccat

SEQ ID NO: 51996 - DNA, 375 bp, Oryza sativa
  unsure (1)..(375): unsure at all n locations
ttcacagttgatcatcggatgtggcattaaaaacagcaagaaaagatgacttatatgaagaagcatcaacatctgttaacaaccagatttggtaacatcagcatcaggaaagaagattagatcgaagcaaagttggaggcggagatcgagttcggaaatagagcaggaatcggctggagtccggatcggctacgattaggatcagctgggtctgagtcggactaggaaagtcgatacagccgattccgataatacaacttgacgtgtgatgtcgggttggattgaggtgcttcaaggagatgccgcacatggatagagtcctgaggaggcaattgtatctattaattacgatgctntatgtacattctctagaga

SEQ ID NO: 51997 - DNA, 408 bp, Oryza sativa
ccatcaccttccttgctcacacgttcttgctgctgccggtgattgttgcatatctctcaatgtgtacgtctcagattatttcacgaaagaagcaatctttcatacatggagtgaggagatatatgggctcgggatctcacgatcttacacaacgctgagtgcccaagtttgttatattccacatccatctaagctaagggtgaaaaagggtcgacgcccaactagacgcatcagaaatgatatggatgagtcagaagcaggtgggaggactctacgctgcatcaagtgtgatctgctcggccatacttactacagatgcccgaataatgcagaagttccaagcggcgcacatgctattacatctggacaggcaagtgatggtatgcaaccacctcgtgaatgaacaac

SEQ ID NO: 51998 - DNA, 294 bp, Oryza sativa
tattctagccatggtgacactttcaagttgctcaatgcactgcttaaagactgtttcctgcccttgaaggtcagaaatcaacgatgatccttgctgaatacctatgaaataaaaaaggagtaaggtgcgcatgttttgatcaagaatcgaagtgaaaggctgaaagcattatagtgtcaaagcatcatttcttcatatctggtctccaactttgtaaatacagaaagtcagggtacaggtttccgattagagtgaaatgcatggtcggtccttataattgagcagtggtgtcac

SEQ ID NO: 51999 - DNA, 497 bp, Oryza sativa
cacctaaaaaccagcttcagaaattcgagaatattggtaacatgtggttcataatagatacacaaactcacattgccttaatcaacatatacctggagagactcataatatcctatgccatcatcggtccaataattctagacatctccaaagagcccaggtctctgttcccatggaccaataagttctctccacctgaaatcatttattaaccaatcaccttcaacaaagcaccccccctgtcataatggtgatacacaattttgactcaatatatgtgtagaattgttcataacatatttgctgaaatcatggaaccatatataatgcatatatatactaatctacaatcatgctgggttcgtactaattgaccacaacattttgatgctttactctagaagattatatcttaataatctaagccttggcagatcccagaattgtgtatatgtcctcttgcaagcatcataaccacaaatagatccactgaaata

SEQ ID NO: 52000 - DNA, 239 bp, Oryza sativa
aaaagattagctacctataaaaccatagaacatgtgtactcagcctagtatcacacaacttatttaacaggtatcattaatcacatcacctgaattacatttgcagtagccaatcaaatcatattcacacacagcagaataacaaaaaaacaccaaggtatcacactctgaacaaagaacaaataaccacacaaatgcgaaagccaggaattaagagaagcgcacgcaaaaacatctac

SEQ ID NO: 52001 - DNA, 421 bp, Oryza sativa
acaaatattactgacgccccgtcttctagcaaattacatgatttattgttgtttcgtctatgtaccggcagtcacaacatttgaccagatttatttaaacaaattggtggtggatcacacatgttaatattcgacaactgaaaaactctgattcatatattcatctgatactacctataccgtgattggccataagcccatatatgttgatggtaataatagcgcgactttgtcttgatattaacaagattcagaaggccactgataaattccgaatcgcaatttctgtggaagaatatgttgcactaatatcctccgttgacaagttgtggatatcctatattggggtgatagacgaaaactgttggactattaatggcaacgactttttatttgtcgcgttaacacactgcggaacttg

SEQ ID NO: 52002 - DNA, 287 bp, Oryza sativa
  unsure (1)..(287): unsure at all n locations
gaatagctaatgctgaaggcaaatgtcttacttgaccaccagctgtggcatgtgacaaaattttgaacaaatgtgatggtatgccattagctataatcacaataactaatttgttggcgaacaaaccagagtagaattggtctgaggtgtacaattccattggttntgggcatggaggtaataacgaagtagagaatattagaaggatagtcttttaactactatgatctgacttcacatcttaaggctctcctattatatctcttggtgtaaatatgtaatgtata

SEQ ID NO: 52003 - DNA, 517 bp, Oryza sativa
  unsure (1)..(517): unsure at all n locations
cgacttcattcttgccacatgacgatgtcnttggctagcttctcttttttccatggtgtcattcattagccttatcgtaatgggacctattccttttcacacctcataggagaacattagtctcaacaaatcggttgtcatccttcacttgatgaccaaccagttgcatatgaaagatatggatatgtctgctgagtattcgttaacatcacaagtgtcatatactcgtatgcaagctcaagtgcaaagatccgatataaataataggtgaacaacatggatctagaacatgcacaataaatgtataggatttgctccccctaaatatatgcatacatataaatatacaagagatgcacgtgtatgcataattagagaatgaccaatggtggtttatcctatacatatagagaaggcatatgtagtaatgatgtagaccaacatataacatataccttcatgatctccatgttctcaatgtgaatgagactaataagataagactcgagtaaacatt

SEQ ID NO: 52004 - DNA, 469 bp, Oryza sativa
  unsure (1)..(469): unsure at all n locations
atttattttattgcagcaaagattaaataaagcaatattgtaaaacttttgctggtaaatgagccattagtacagtaatagatgtacagtactaataacactggaataaatttttaatgagaaccattaaaagagattatgaagtgcatgtgccattagtttggtttaaaagagaaagggaggagaacagttctacttttccaatatttttagagggcttctatgggtaaccgtttggcataacctaaggtcaaggggctctgataccaacttgtcacgcccggaatttctatccaaaattccanacgcttacatgtgtgtgaactctctgccagaatctcgcgatgcacacaataacaaattgtatatagaggtcacatattactctaattaataagcgaataaaatgtcattacagacgtagatagttcctctcattaataaagatctagcagcggaagaagataac

SEQ ID NO: 52005 - DNA, 420 bp, Oryza sativa
  unsure (1)..(420): unsure at all n locations
ntgntgatacttatgcgaatcgcttatcaacagattttatatatcttatgagtagaaatcttatactgtatactactccctccatttcaaatagatctacatatatatttttaaggttattcctaaacgatatacatatatgtggtcattcattaagtctattcaatatctgtgcttggagaaaatggacattgatgcatgcatccatgcacacaagtatttataacccatatgcaatatctgtatttgctattggctatgaaataatggggatggagcatacactacagctattcgttatctgtgcattggagtaaatagacattgatgcatgtatctatgcacacaagtatttatcacccacatgcactatatatatttgctatctgctaagaaataacgagtatggngcatacatcc

SEQ ID NO: 52006 - DNA, 250 bp, Oryza sativa
acggtctgcgtatgaacatggaatgttgcaggaagacttccacctgatgacttggatattcaagattggttggatatggacgagccagctgatatttatgttcttgggtaaattgttgcatcccatcttgttacttattcatatacactatgactgatatttctcctttctattctgttcacctattaaacaaattgaacttattatcctctataattcaagacattgctccattaaatgctgggaatat

SEQ ID NO: 52007 - DNA, 312 bp, Oryza sativa
  unsure (1)..(312): unsure at all n locations
tcctcttgcgaagccactcgccactgcanagagctctctctctctctctctctctcgcatcgcgcgcagacttcctcatgctcgtcctgatccactccacctctctaatccacagcgcgcgccataggaaatccggcgccggtcgaggctggcgtgccgcgccgccagtacgcccagcccactcgaatcgggcgcgtgtgcgctaggaagttcgtcatacgccgcgcgggtttcacttcgagcggtattctttgagagattacctgagctgcgagtaaagcctctcttgatcttagggatagcttagctcga

SEQ ID NO: 52008 - DNA, 250 bp, Oryza sativa
  unsure (1)..(250): unsure at all n locations
aataatcatttcatgtacccgtatatgcatggacacgccacggacaatctttcttcatgcacctcaactcatacacataatttgttgacttgaccaccctatactctctctgcaaggaaactgtccaatgcttcaccggcttcttcatctcatacttatgagcatacctngcaccctcaattatatcgttcttcttatactctaaggtacatgaccaccttctgattaacaagtccaaaaaagcctcatt

SEQ ID NO: 52009 - DNA, 380 bp, Oryza sativa
  unsure (1)..(380): unsure at all n locations
tggagctggggtcctcttgattttcccgactgtaaaaagattgagctacctgttgtggatacatttttctgcatctcataacgtagcagaatacgaagcgctactccatggaataaggattgcaatattctctaggtattcgccgattaatcgtccatggagactctcagttgattgtcaatcaggtcatgaaagagtggtcatgtctagatgataatatgactgcttatcgacaagaggtacgcaagntggaagattaattcgatggactcgagctcacccatgtccttcgacataacaacgaggcagctgacagactggccaatttttggtcanacgggaagcagccccttctgatgtgttcgttgagcatctttatg

SEQ ID NO: 52010 - DNA, 457 bp, Oryza sativa
  unsure (1)..(457): unsure at all n locations
gctataccacgcaacatgtagttatagatccgtttgattgttatattanattggatgggagatgaccatcccattggtgtgtgcttcgttattggcaagggtggatggaactatagagcacgtaccgctgntatatttcttatggacagagagtacgctgttggtctatataaacaactgctagctctagagctatgtgttactatctttaaggataagattgatgtagccagactcaaagaagtcatcggtactcatattgacatagctcttatatgcctaggtcccaaacgacctaggatgacatactttgcctaaccttaatttaatcctaaaacggacaatggcttattatgcacatattactgaagtccacaaacacgaatgagcatgcctatgcctactgttatgatcactgttatctaattcagactcatttctagtgcttacaagagat

SEQ ID NO: 52011 - DNA, 436 bp, Oryza sativa
  unsure (1)..(436): unsure at all n locations
aaaaagacaccacgattgtttgggtgctgctgttaattccttgttggcatattttgtcaatttgaccaaatttctttggtgactaaaccatactaagtgcattgactctacagggatggcatggagactcacttctttaattcattccttgttactggagtaaaatttagcaatgttcaagaaatttgtttagatttcaaatttgttgctgacatgttagtacagtgtacccactcactttcatacatgattntagaatggcgtttgaatgattggtaatacataattacacagcaatattctcatttcacagttaacatatntagcttcttaagtttaacttgtagaatcttgaggtggcccagggaatgacatcatattcaaagtttatacctatcggccagccagctactgagcttggaatatgttactatgt

SEQ ID NO: 52012 - DNA, 351 bp, Oryza sativa
  unsure (1)..(351): unsure at all n locations
ccctggtggccccatctttgtccgtggcgaccttaaagtcgcgctcgcttgcatggagcaacgcgcggaccacctcgctgccgcgaccaagcccgaaggtggtgacgagaggcttggcacctttgcccccaccgccccgaggcagcggatcgccacatgcgacgaggccncggtcaaggaggttgccttgggcgacggcccatccaagaccacacggatcggtggtcttctggatggcaaataggaagacccgctcgtcttctttctgcgggcaaacgcttacgtcttcgcatggataccagccgacatgcccggagtccncagtgaggtattgagcaccgtctcgccgtg

SEQ ID NO: 52013 - DNA, 373 bp, Oryza sativa
tggtcgtcgaggagcttagcgatccccaagcagtgatcctcgagttgttcatgtcatcaaagtgtatgttgtctggctcgatatcacagtgggtgatcagtgaagagtacccttcgtgtaagtactcgatccccttggcgatgccgagtgcggcctctctacgctagctccatgatggcctgaagaggacgccgcggagcgagccgcctatcatgaacttgaacactatcatccgctcagtgcgcttggtgcatgtatccgatcatgtggagtaagttccagtgggggacctccgtggtgaacttccactcgttgcacacatttgaaccaatcaactctaattcaccggatgagccgtggcttcgacgatctc

SEQ ID NO: 52014 - DNA, 422 bp, Oryza sativa
taatctggtaaaaacacacacacagattgcacataccatcattcttcgtttgttccatggactccttgatgtaggtcggcgagcccatcctccactcctcatacccgccattggcaagccttatgcagccactcaagctcactccagaaagcagcagcagaagcaagaacagcagcactgaactcattacacacacacacgccctggctctactctctgatgatcaatgcctctcttggagggaagaaaaatgtctgtgatggattggaggagagttcttggtgctgttccttttggtattcttgtgttcttggtctgaactcactgtgaactgtgaagtctgaaatggtgcagtgttttggcctgtggtgggagactggaatcgtgggtagtcaaagatgagaggagcacacgcacaacac

SEQ ID NO: 52015 - DNA, 183 bp, Oryza sativa
aggcgaaagaaaaagcgtttcaaagcgaacacaaacgaatttcagcacagagagggttagagagactcacgtggatgaatcttgagcaaggcatcgacgtcgtctgggggagacatggagcttatacccgacgtccctcagctatccctcgagctatccgagctctgtcattcccgcgcgcgc

SEQ ID NO: 52016 - DNA, 277 bp, Oryza sativa
ccacctgaagccatctccaacctctcgatctcggcgaaatcgtcgagcaagctcatctcagatgctgctgctccctgcagcttcgcggccctgaactgctccagctcggagatcagcgcggaggcccacgactccgactggccatgggcgtcgctcagcaggttggtctcctcggccagctcgctgagctgccgctgcagcacggagagcatgcacgcctcggcggcgtacttcatctgcacgaactgcagctcggcgtacctcttcgccagcggct

SEQ ID NO: 52017 - DNA, 377 bp, Oryza sativa
gaggacttggttcaatcaagattgcgagcccttgccaaggttaccaatgattatgaacgtgttgctccacattataacaagtaagtggtgcacaagtcttcttcggtatgacaacttgtatggaatttaattttgccgattgggactcgggattacaaatgtggcaagtggccgccgaatcgggaaggaccgtatcaaatctacaatgctgtgtctaatggagcttacatgttgcaatgacttcctggaaaatatatggacgagcactctatggataatatttgaatagtattcccaagtgttcggttatgcatgatccgtagtgttcgcatcatgattccgatgattacatcccttgaatgccgatgcgtattccc

SEQ ID NO: 52018 - DNA, 400 bp, Oryza sativa
actcacattctgttgtttgccgccaaatattaccttactaatttgaaaaaaaaattaatgattcgatcatataaatttatgaaaatatgtggatcttattttttccacttttatgaccgatataattttattcacgaccaatacttgcggtcaatttttttctacttgcttcgtcaaaaatatacttgcctccggctcagaatattagcattttaagctatgaatcatagctaaaaggtgctatattttacgacggatggaataactattatctcacatgtctgctggctactctttaatttactagttttggatcatgtgtcaggataatctgtactacgcggtctgtgcagttccatatcatgtactaactaacaatatgagggtaattcattgtaca

SEQ ID NO: 52019 - DNA, 351 bp, Oryza sativa
ctttgactggtccaagagatttttgggcactcggtgtggggttgttttaattttccccattggagaaagactaaattacctgttggggataacattttctgcatctcacaatgtggcaaaaatacgaggcgcttatttccggactacggattgcaatctctttgggaattaagcgtttgatagctcgtggagattcacaggtggtttgtaatcaagttatgaaagagtggtcccaccttgatgataacatgaccgcctatcggctagaggtacgccagttggaagataagttcgatggactctaacttacttacgtctttcgcacataaccagcgccgacaactacacatt

SEQ ID NO: 52020 - DNA, 421 bp, Oryza sativa
  unsure (1)..(421): unsure at all n locations
gggacatgtacaacagaggntccgtttattatgatgactttttttttatttatcttactggacatgacatcggttggttcactgaccaacttattgccaccatgacgaaaccctatacctagcatgcgagtatgtcctctggatatctttaaagactaagtagagcacactccccactagttgtgcatgatatcatttccctctgacatctcatcttgactagtatctgcgcacaccagaaatcataataatatatgagtatgtatacatactcatcatgatagacatttagcagaatagttatggttttaagacagaagagttactctagcccagatgtaacagccataatataaggaacttacatagcatggtaaaaacactggaggataaaaaatcggatatccgtcctcatcatttt

SEQ ID NO: 52021 - DNA, 316 bp, Oryza sativa
  unsure (1)..(316): unsure at all n locations
tctatgaattttcttttatgataagtcattttcagcgttaagccaagcgatgtgtttgcaactctctctctctctcttttggtacagacgcgttgagctcaagttgccgcatttgattctgtaccaacagagaacttccaaggaaagcaagttgaagccttcagagttcagacaaaatgaagcaaattgtttaagttttttcctcgtgtattatgcagntaagcacgcgctatgttgcgcgtaaagaacctggtataaacaatgatttactcccacattgtccgaagagtagcacgagcacagttgaaccatgaag

SEQ ID NO: 52022 - DNA, 435 bp, Oryza sativa
  unsure (1)..(435): unsure at all n locations
ttgtagagtagataattggattttgattgagttattcttctaacggaaaaaggaaaaggatgattcaaaatccttttttcttcngactctcccaaacacaaaatacctccttgtattcgcactcttaaatgagagtggaagaaattcgactttcatataatatcttaatagaattccatgtaatgatcaatgcattttttggatactatattattcgcatgtctagaatcctaccaagagaataccccccattttatgtaattgaagtngattgacgaatagaaataacatatactgttattagtgtccataaacccaaatggcgggcctatggaatgcacggtttggcccttctcgaagtcaatctcctgcaattttctataacgaagataacgatgatttgccaactaattattaaaaatttttctatactct

SEQ ID NO: 52023 - DNA, 356 bp, Oryza sativa
  unsure (1)..(356): unsure at all n locations
aatcctacaaaagaagacgagtcctttagaatagatactttcttctttctttagtaaaatggcatttgcttctgcaattccaattatatcaatactctactcctaatttattactcctagagctttctatttatggggacagacaataccccaccccacgaatagctgatttgaggatgatcaatttataggatatgttcgccgtcttgcttcccgccctttngttatggcagtggaaagtatctttccttttatcttatgaattttgcgaacatttcaacaaaggaggtctttcacatgtcaaacgagatctaagacttaatctaatagaaattactaaattgaatctatttcta

SEQ ID NO: 52024 - DNA, 482 bp, Oryza sativa
  unsure (1)..(482): unsure at all n locations
tgagagtgccnacctgctgcaaagggtggcctggatagctatttgatctattttatatcattctatatgcagttctaatgagaaattcagtaaacgggatttaagtacctctctgtgtcctcatatctgagatgaatattgctaattgacaacttaatatttccaattacagtgctgatgaaagacccaagccatgacgaattcttcaagaacaaaagtgccagtaagaaataaatgaagtgttccacaaattatgaatgttaaacacacaacatcaatcgaaacaaatgtagtcagattgactatctgtgcaactatgtgatccattatcatcagtacataaacacatcagcgagaaactataagggctaaataccagatcagatgtcagctgttgttggctctccaataactatattttcatgtgctgagtgaataacacagacatcaatgctatggactgcattgttccataactacta

SEQ ID NO: 52025 - DNA, 353 bp, Oryza sativa
  unsure (1)..(353): unsure at all n locations
catcaatgaccggaaacagaacgccgcggctataatccccgatgaacccatgtcgaaagatcctcccgccgtggcggaaaacgggacatcgacgtcatacgaaccccaagaaggttctagtgcggccaaaccttgttcttccgacaagaactgcgagccgacaaggacaacttccgaggtaacaaagtcctggtgttttatccacaagtccaggaagcacaactttgcaagcttgctggtgttttctcaaccgtacaagctgtaattcgtgcttgcaaagagcgtggaattcaccgtacttnctcaactcgtgatgttattgttctattcacaagacgaagaatcacgacttc

SEQ ID NO: 52026 - DNA, 411 bp, Oryza sativa
  unsure (1)..(411): unsure at all n locations
caaacctgagcaaaaaccaaactaaaaatcagctcattggacccatttgatcccaaccaagcaggcctaaacatgagggagccctcgctcatctgaccttatttgcactaccagataagcactaagcataattacaatatgaaaaatgtatttaatgtggactacgaaataaaacttaaggcatttatacagctgacgttatgatttgggtacaataatttagttgaggagccaaaatgtgaattagacagttatgcactctcggttaactacaatgtattagtaaaagaaatctatttccttatgcatgagacgtgattgcttaatgcaaagaatgcgtatatatacaggtatacacataccagagtcagaagacttcaaatgttccagtgctgtattntgaccacagtg

SEQ ID NO: 52027 - DNA, 346 bp, Oryza sativa
  unsure (1)..(346): unsure at all n locations
cgcgcttgtggccgtcgccggcgtgccgcttggcttgggtgcttccccttcccggcgagtagtccttcgtattccgctgtgttttcggtcgcccttgaagtgaggtggattgcgtgcttgaattgatctccggagggagacgtcaagataaatcctgcccctgctccttggcttgtgagtgcgccatcgaacgccattgtccatgtttcgttgtcgacttgngtgtctgatttgtatctggcatagtccaatcggcaacaaaatcggcgagtacctgngacttgatggctgntcgtggcacanagtggacatcaactggctcagctcgactacccatttcgcaatg

SEQ ID NO: 52028 - DNA, 433 bp, Oryza sativa
  unsure (1)..(433): unsure at all n locations
accgggtataatacaacagacagaagaaacaatacaactgatacgggaacgacttcaaacagttcaaaatagacaaaaaagttatgccgataataggagaagcgatcttcactttgatataggcgactgggtatatttaaaagtatcgcctatgaaagaaaataagcgantcggactngganacaaaattaagtcccagatatgttggaccatttataattgtcaagcaaataggaggagtggcttacaagctaaagctaccagatgctntcactggngtacatgatgattccacatctccatgcttcgtatatgccttcggaggccaagtgatcaaatngaaattcctatggctgagttgataanggattgcatatcaggaatatcctgtttgtatcttgatataaagatcgaaaacaagaaacaacattta

SEQ ID NO: 52029 - DNA, 518 bp, Oryza sativa
  unsure (1)..(518): unsure at all n locations
catcatcttgatcatattgaatcccagtttataaaatcatgtcgatttaaattattgcattatcgctttatttaaattcccgcgttatcactggtttacttaaccatgcctatttacctttgttatgaccatattattattgctattgttattattactaccttgttcaccctagacaaacaaaacctcaactagtggacactctactcatggtatccctagtataattntaggtagatgcttcgcttttaaatacgtaacattaggtggttttacaactatataacttgggaaatattcatatcacctggatactctggaattgttggttattggaattggcttacaccgcccctctattcaaatcccctaaatggtttaggctggctcgagtcatgtgttgatggtacacctcgtgcgataagaccgtcttcggcctttgtgaacgcatacgtactctcacatgttatggtaatgctatttgtgctcatctatctaaacaaaacacgattgaatgg

SEQ ID NO: 52030 - DNA, 393 bp, Oryza sativa
  unsure (1)..(393): unsure at all n locations
ntacaaaaggcagcaaaggaagttntgtacgatgagtcgaatgttttgattgtgagttcacaacactccggtcagttcttgaacttatgaggttaaaagtgagacatggatggtctgataccagtttcgacagtctgttagaacttctgcagaaaatgctcccgaggcctaactcactaccatcgagcacatatcaagcaaagaaactcatatgccccctttcacttggtgtggaaaagaatcatgcgtgcgtaaatcactgcatactgtacaggaaagagtacgcttctttagatgaatgtccaacatgcagtgcaagccggtacaagtcgaatagcaatactggcctataaccctctgaagcaactgatgtgacgacagagaaaatcccgc

SEQ ID NO: 52031 - DNA, 256 bp, Oryza sativa
ccactcattttacgagtgaagaggatatattataatgatcattgagtcgacaatacatatgtgcgcctatgatgataactcatactaataataataatcatcataatattatgtatagtatacacaaaaacaacttcatcacccaaacccatgtgaagagaagcaccgaagagagagctttttcattcccaaatccgctctccttctataacagtagctatgcttcgatcgcacaggcatggattccaacaataat

SEQ ID NO: 52032 - DNA, 498 bp, Oryza sativa
  unsure (1)..(498): unsure at all n locations
acggttaatgacagttggggggtacgtgcttatctaacgattggaacatgcttgcacgttcttcgcaataactagctatatcatgcatgatctgaacttaattaagctgcaactctctccccttaaaaaattgcaagtggacacctggtcagcctatgctaattaattatatgctagttaaaatataatatgcaatattatccaccatatgtgtgcagcaatagtacacaatagtatcatgtaattaaaggactatagtcgcaccatgcatgtgatgtaatgagattatattactcattgctggcctgtcgaaagacacccaagtatattaagatgatcaactcagttctaaannaaaanaaagaagatgatcaactcaatggaccctacctgacactaatttatttatttattggagganactggcactaaatttatcatggcgtgtgactagtacatgtggagtggtacgtaagatgcaagatagactatagagtg

SEQ ID NO: 52033 - DNA, 408 bp, Oryza sativa
  unsure (1)..(408): unsure at all n locations
acacaagaaactcaagctggtagntactttcgactaacactatgtacacattgatggacgcttattgtagccgcgcttatttatctatgtccacaacagacgcaaaacaatatacatctctgaaaactagaaaatctaaatgctgaattgacatcacaaaatcagaaaagttcacacaattggtcatgccaaatcacccttgctcagatctgaaaacacagcgacatatcactttgttcattccacagaatcaccctcgctcagatctganagcacgatgtctaagacatataactttgttcattccacaaatcacccttgctcagatatgaaagcacatcgtctgaggaataaagatagcacaccatcactccccattctaatcaacacacaaatatcagaaaccat

SEQ ID NO: 52034 - DNA, 230 bp, Oryza sativa
atctgaacggattctgctataccgtttttctgatgacaaatccttgcttggtgaaattgccagacttcccatggtgtctttgtcttgagcagatccaatctctgttgtctagatatctcagcgatctccatggttggagagagagaacgagccatactagcacttgccacgtggtttgctctgatctcttctaaagcgcttatattggcgttgcttttgacttacatgtc

SEQ ID NO: 52035 - DNA, 383 bp, Oryza sativa
ctcctatactattactcggtgcgcgagcgctgcaatagtactactatgcttacgcttttcttctgctatgttggacggctgctgctgcttagaatgcttgcgcagcttttcttctctgcgcgaggacaggaaacactgagtctgacctggaaaccacgagacgacgagatccgctcgcgcagccgataagatcgatttcttctatcgggaaacaattcccggtggccaggaatagtcgatcgaactccaatgctttgataccactctgtatgaaaatagatgcacaacggagacactaacgtctacgtggaatacccttgcggagaaaaccactgcggcgaccggaatgacactataaggagatgattcaacatatggaatac

SEQ ID NO: 52036 - DNA, 348 bp, Oryza sativa
  unsure (1)..(348): unsure at all n locations
caatggtcgaagaaggccagacttgttcatgcatggtagcaaggacaatcatgctacagcaaagtgattacatgaacctggaaataacacttgcagcaacctgagataatgctgtggtagtgcatttataatttttattaacacattgcacacacatgatngcagaaatatatatctagaacagattcttttatgcaggcatgtgtgcttattaagacaatgtgtgcttgtccggcaaaagagacaacagagagggtgttgtgcatatatatgtgcatggctaggatatgttaatgagataacaaagtctgattataaacatcttgctcgtcaagggtgactaacatg

SEQ ID NO: 52037 - DNA, 435 bp, Oryza sativa
  unsure (1)..(435): unsure at all n locations
tccatgcaattctctccgccttgagtccggaggagatcatctttgtttgtgggctngaagaggccacggagatatgagatactctgcaattgactcatgagggatcacccgccgttcgtgaggccaagattgaattattggaagaaaggcttggatgatttgtgatggatgacaaggagacacctgaagagatgtatgataggatgatgttccttgtcacaagattaaggacttgggagtgggacatgacaaatcactttgtggcaagaacttctctggcttttggccatgaaatcccactcttgtatcaatgatcggaaaggaagattctagagctaccccaagacattttgagaattggttatgaatcaaaaatgactcgaagtgagaatgggaattgtgctgacaaatagatactttaagaaacaaaaaata

SEQ ID NO: 52038 - DNA, 396 bp, Oryza sativa
atctgaagaacatgtacatgcgggagaagctagtttaaccaaggatctgattctttgtataaatttccagagtaactggtacagagaataagttggctcattggctgagttctgctacaaaatactttcagtatgcagtttgacttgcagcagtagtttcaacctcaggtgagatattgtgtgagagaggatactgaatggctggactgtttctcctgtgcaaaatcttggctcttagttgaggttcctctgtacaatggcatcaggacgccaagaagaaaatagaatattaagttacatataaaggcaagaggagtatacatgcggcgaactactcttcggaggtccttcaatctgtagggtaccaatatacagtcttgtcatttgacagatgtt

SEQ ID NO: 52039 - DNA, 466 bp, Oryza sativa
gctgaattatcaccattgcaacttggcaatggcataaacaagaggagattgacgtattggttgtggtgaaatgggggaggacggggtttctcgcaaaatgctagtttattgaacgaaatttctccacagactttacatgctaactgtagcactgcttatacttctaaccgagtaagcattcgttatttttctcatttatcaggccttagcaattattatactttcaaaataaattaaatgtcattgcgtaatgtggtattcaattttcccaacctcgcatgtataaacctacatatttatgaacctcacatatatataatccgactgttcataccttcaggcatgaaatttgacacagtaaaatgatgccatataaataatctcattgggtcttatttacatacccaacatagagaagactaacctccttacaagacaatctgctattcttttgggacttaatttg

SEQ ID NO: 52040 - DNA, 279 bp, Oryza sativa
  unsure (1)..(279): unsure at all n locations
tcatgtggtcaaacccatctaacttacataccaaattttcaaaactaccttaggggtataaacggcattgcaaagtttaggggttgaatatccggtttcaaagttcaaggtgctagacggatttctatccaaagtttatggggttattcagattnttctccttcgttttaatgtaaatcaaccactttatgtcatgcaaagagactacacnaaaatgtccataatcttntggaactnttagcccgtcaatcaattattcataatacatattaacatatg

SEQ ID NO: 52041 - DNA, 171 bp, Oryza sativa
ccatgtgtaaattagactcactctcacaatgcttagcgagacaccatttcttcatccatctaagagcaaaatccatattgcttcgtcttaggtgatgtgtacatgcgacatacgtctcgcagagaggatacgataccaatatacttcattaatgacacatctgtgcaacaa

SEQ ID NO: 52042 - DNA, 261 bp, Oryza sativa
ctcataacacaacgatcttgcgcggatggggagggtggtttattttctttgtcctcttctctctctttatctcttttttctctttttctcctttctctttctttcacctctcttctttcttattttttttttcttctctttttctcttcttctttactttacctattctcttttctctcttctctcttctcttcttgcttctttttactttttccttttcttttacttctttttttctctagtctctttcctctctttctt

SEQ ID NO: 52043 - DNA, 381 bp, Oryza sativa
cacattcctaacacatatattgtatgattaaaataccaaatacccggcagtaatatcctaagcatgacaagttgggaagtatagaatagattcttctctatgtacaaacaagaacccttcaagttttttgactgaacgagtgacttgtttcgctaatactatagcaacttattcttgaaaaatttcaagttagcacctgggattaactgtcatcttgagaccgtctgcagataaaccagatgcagtgccagctggattcttatcttctctgctcggcgctggatgtgagtgccatggatacaatattgaaatcgttgggcattctttataagttctgtagctgcacttcttggtatcacagtaacgtggcttattactatc

SEQ ID NO: 52044 - DNA, 430 bp, Oryza sativa
  unsure (1)..(430): unsure at all n locations
atccatgggtgctgtgtaattctgatcgactgtctccctggatggggaagaagaagagtcctggtcaaggcatataaaagaacagttgtctgttgaagcaaatcaatcggggctaaatcatgtttccattccaacattttttcccccacgctaggtagctacttgagttggaatctttcttgatttttattaactttttcatatggaacgcaacagtggcaccttataaaagaattgcgtttcacatatgaaaagggtatacataccaactntctcttgcgtaactcttatattttcacattctttttgtctaaatttacaccaggttttgacagttgtacataaactgagttccacattttttaataagtaccagtggtctaagaaaaatggtggaacagaatgtttcggacaactcaatatttatctg

SEQ ID NO: 52045 - DNA, 350 bp, Oryza sativa
  unsure (1)..(350): unsure at all n locations
ctgagatatagtatgaatctatgcaatatatgggcgagtggtgtctatgctatcttcgagctagaggcggcagaccnctcacgaaaaacatgcagagcccacacatgctacatcctatggcgttgattgtggcgcttcggaatctgacaaccacatgatggcggaaattcggagaagctggacaaactagctcttgacctctaaaaacaactaagactgagaattgaaacacacatgattgattgaaatggaaaaatatgtgagaaaaaacaacactgaggtagaagtgaatgggcgagtcgaggaagtacaactctatattctcattctgatgaaattaaactccctat

SEQ ID NO: 52046 - DNA, 358 bp, Oryza sativa
gctcctcccttctgtacatagtactaagcgaaaaaatctagagaataaaaatagaattagctccatctcattatggaccgaaaggggctggtatttttccaagaaatctctatccaacctttccacaagaggtttttcttaacaccaatgaattctattaatgctagaggaaaacgatagctccaagaatttctttgttctcaacgcctcctatttagaggaattagccacttcaacgatctttgatggttataggggtatccaaagtacaaacttgatggttgtttgttatcccaaccattcttctcagccctgataccaatcaggagagggtaatctctaacaaagactttctctt

SEQ ID NO: 52047 - DNA, 382 bp, Oryza sativa
  unsure (1)..(382): unsure at all n locations
gtgcaaaattattatgaagctacgcgactagatattgatccctattatctaagntatatactctatatcatagggcgtatacacacaancaatggagagcatacaaaggctttggaatattatgttcgggcactataacagaaacccctcttaccacaagcttttaataatatggccgtgatctgtgaatacgtgcgactatttccactatagagagaagtataagataggatcatattttctacatttactataaatggggctttctacatatggatcgtcagaacaacgattctgccctatcatctgtacgaagataagacacttctcgagaagtcaaatatgaagagagaaaggatggcctatactactctatggaaga

SEQ ID NO: 52048 - DNA, 476 bp, Oryza sativa
  unsure (1)..(476): unsure at all n locations
aagaaacgcgaatcgaagtccaagaaagatagatcgagcaaaaaagtcctgcatgcgcatatgcaaagctcgattntgatggatcttggatctgccaattaaccactccggcgtgtgacctgtggtcctgtctttagatcaaaacacttgcgtatacgtaagaaaccagctaaagcagctagaaaaatgaataatacagtactaagaaacagagaggcacaactgcttatacttgcaataatccacttccaaatatataaatataaagtttacccgcatgctacgcaacacgtgtaatgtattccctccattcaaaataagctatttctaaaactcaaagttggtttcataattagactatttcttcatctaccctctcatctcactaatcatgcattctctatcgtatgtcttcacatatatcttttctcaccaatcataaactcttcctaagtatgtcatctaatttctaatac

SEQ ID NO: 52049 - DNA, 74 bp, Oryza sativa
tcagctgtcaaaaccagcacgtatgaggtcccttagcggtttggatggtgggtttcactgacatcgtgtcctac

SEQ ID NO: 52050 - DNA, 431 bp, Oryza sativa
cgagactgaagactatcataggctactgacttggattgacattgtttttcatattggcagctcagccctgtcaaggttatggataccacatacctaatagtagttgactaaatctcggcaggacccaccacataccatgttctatacggaaacaacctacggatatatgagggagttccggataaggaaagacaaccagagttctacattgaaacgactaagactacttgaattgtatccatattggtttccctagttctacttggacaaggagacacctatgggtataaatacaagccgccctaggatgacagggggacacacacccaccatggaggatcaacacgatcgaccaccaccatgagatgatcaacaccgatcatgagatagtaacacccaccacgagacaattaactgcaacacaatcacat

SEQ ID NO: 52051 - DNA, 219 bp, Oryza sativa
atttcatgtaatgatcaatgcattttttggattctatattattcgcatgtctagaatcctaccaagagaataccccccacttttatgtaattgaagtacgattgacgaataagaaataaacataatactgtttattagtgtcgcatataaacccaaatggggcgtgccaactggtaaggcagcgggttttggtcccgttactcggaagttcgaatcctt

SEQ ID NO: 52052 - DNA, 313 bp, Oryza sativa
gggcctgccgccgcactttctgccggaccggccttgtgcccggccgcacggtgagacggagctcaatcacctccctgtggaccccgggcatattccgcggtctccatgcgaagacatcagcgtttgcccgcaggaaagagacgagcgcgtcttcctatttgcatccagaagaccaccgatccgtgtggtcttggatgggccgtctcctaaggcaaccttcttgatcgggacctcggcgcatgtgacaatcccgctgcctcgtggcggtgtgggcggaggtgccacgcctctcgttaccaccctttggcttgga

SEQ ID NO: 52053 - DNA, 354 bp, Oryza sativa
cgagtgatatgaccccatacggaggcagcccacgagttatcatttattattaaagacctggcaatatcagatgcatatgagatacacttgctcagccaacacagtaacattcatgagaaatatacaaatccgaaaagcgacaaaacgaggaagcacagctcacaggaagagatgatatggaaaagatggtcaaatgttgaccctcactataaacgttggggtcactatagagtccaaaccgctatgcaataaggacatgactacgcatagcctgacgggatatgcaacagaagccacatgggccagctaaagtggccaaattggcttattatcaaaaaccacatccccaataac

SEQ ID NO: 52054 - DNA, 476 bp, Oryza sativa
tgtctcattactgacaggacagtttgcacatgaagctcttgtttgttattagggattcaaccagatgaatatgtgtcagaaaaaattttatatcataaagaagctccagtatgttatacaaaaacatacatatgctataagccatgctgctagagacaaaatttatgtatgtacgctactaaaaacgaaccatttacaacccacatgaagccgtacatatatgccattaagacaactattcatatgtctgtataccaaaagaatagtttgcaggtttgtagaatatgtcattcgacaccacagatgtataatctatactctgataaagttacaacaagacctaacaagggttatatccttttggccttgagcgtagatatatcgatatacagtctctatggagctcctgattgatagttgctgccttcttgccagttgagttgaggtgtactttggctgtatcattgatcaatttt

SEQ ID NO: 52055 - DNA, 497 bp, Oryza sativa
ctccttctttgccttggcagaagcacgcttgcgttgcttcttagactgggcctcctggaattgggtcacatcttgagcttgttgcatgtagaccttggagccatactcgaagaatgtcacccggtggtagtgatccaaactgaatcacaaagggcggcggtgtgttcttgatgatggaaggtcctcctgcaagaaggagccttggtcacgtacactccacgttgaagatcatcatgcaccatgctggtgttggttggatgaacggcgaagacgagcttgacgaccacagcatagcgaagatgggaggagaaccaggtcccactgtgcgtgccaattgtttagggtggaaaataacatctgagatctctatatttagagatacatatgtgcgggcgtgccagtgtacctaaatacacaatgtatacaaaacattaggaacatgctctttattatatctaaagatcataaatacaaattccaatgtatatatatgtatt

SEQ ID NO: 52056 - DNA, 396 bp, Oryza sativa
  unsure (1)..(396): unsure at all n locations
tactcaagctgaaatgatcccttgtagatcctatatggagacccttatcttgtcttataattggntcgatctcagtacaagaactcgaagcttgggaagattccccacccaccaagggaacagatcgaggatgtgattgttactaacatcgatgagttccagactttcgcagattgatagtggtctgggcagcctcccttcaatttggttgctgttcaaatctatagtctcaagcttacatccttctttaatgcccttaggcaacatcccgttgaatttattccccctcaaattcaggacccttaagcttctgccttctaccagacaagatggaacgaaaccactatagttgttatcatataagctcaggaatttgagtttcttcatactacaaat

SEQ ID NO: 52057 - DNA, 401 bp, Oryza sativa
  unsure (1)..(401): unsure at all n locations
ttccacgactgacgccattatgcttggtacgatttttattcttttctcgagagntaatctatcanaatattataacagggtgattttggcatcctcattggacttgaagctctataatatcgtaattgcagtaatgttgaaatattttgcagactccatcttatgaactgatggatataccccgtggtggtgcaacatctggtcagtcatagcttctttctcctcttgctgaagctttgtccagaaaggatctgacagcaatacatgaaatcctagaaaagaccggctacaaggatgatgagggaacagcaaatgaggctatagatttttttcccctcatacttactttctttagggcttgacatcattgccagattgacttgtgtggtcttttcgtgaga

SEQ ID NO: 52058 - DNA, 172 bp, Oryza sativa
tggagacgagggaaaacctctatatgcttacttaattccgagctgacaaatcggatctataatccctacgcagctctatcagtcgagcagaataaagcactcaccatctggggctaaatgaacatgacgagtttgccgaaattcagaccacctcagctggactggggaatgg

SEQ ID NO: 52059 - DNA, 274 bp, Oryza sativa
ttttgcctaactcacggtgttttattttttaaacacgtaactctgctgcgcatgactaaaacttttgatgcatgacaaatggggatacttgttcttttttacaaagtactttaacccaaaaatttggaaagaatcttgcacaaggacttttctctcaaacataaatttgcaccttgctgagggtgagaatctacgacttaaatctgtgggtgattcctattacaagtatatttatcagcatattgcatactggccctgtaatcatggttaaaca

SEQ ID NO: 52060 - DNA, 432 bp, Oryza sativa
cgccgcaactaatacatgggagcgcccatttttttttttcacgagagctgcggttttatatcttggagaacaccccatgttgtccataccatatccatcaggtctcgtcgatgttcttagctactcacttgcgtcgattccatgctttcaacacctgctttgcttaagcaattgagtacgatcaaagaatttacaccttgtatgcatggtgcttctcccgagaagcttcctgggatgcttcactgcttctgggtattcttagtgcttgaagaattcactacctgcacatgagtggacctgaatctaagttccatcctcttacccctcgcacctgaacactgtggtaatacagatatgcactacaaccttgttcttgctcctcatcccatatttttgatcataatctcttggtgctctactctccttggtatt

SEQ ID NO: 52061 - DNA, 176 bp, Oryza sativa
caccaaaagaactttttttttccacagcgcgagagacaacaagaaaaaacgaaacaccgcaaacaacggaagggacacaactaacaccaacctcactaagcgacagaacaagaaggcaagagccaccgaccgagagacacagaaaaacatgaagaaccccagaccaaaaacaggaa

SEQ ID NO: 52062 - DNA, 460 bp, Oryza sativa
  unsure (1)..(460): unsure at all n locations
tagaaagaaaaatgttaattgcatccgctaaattaanttttttaacctacaagcggcaagtaggactccctcgtgctatcttatgtgcacccatatgtttccacgctcaacttcgatcatccatcttattggaaatctttttataactaatattttgattgctatgagatgataaaatatgaatagtactttactcgtgacttatgtatttaaattgctttaacaaactctcaaatatagggatgatttgcgacaagccatggttatacttataatgcgacggagggactaagtactgaacaattgccgctctgcgagccattgatttatgtgacttgtcctagtagcaggtgattacgttgaatcacattctggcagataagttgtgggccgctcgtcctgtaacagtacgataatagaaagctacttttactattagcatcttaagctacacatatat

SEQ ID NO: 52063 - DNA, 219 bp, Oryza sativa
tctggtacagcaagagttgacctgaccgtgcatgcatgcatcatgcacacacacacactctactgaggtgcggcctcgaacgtctgtatgtttaggtggtggatacaagtatatatacgtagtctctattcgaattaattacggcattcaataaatgcagccggtagaatcagctgtttgagtgcgtcagctggactcgatcaggagagtatgaagaat

SEQ ID NO: 52064 - DNA, 369 bp, Oryza sativa
aaaaccagctcgcacttgcctatcatcatcaggctgagtacatttctgtttttggtcaacaaaggcagatccgtgttaactgaaccacaacttcatttgtcgagtacctaagaatttttttacttattcaagaattgaatgctgccggtgctatcgttaaaaagagtttgatggttccgcaaataaaagttggtgaaatgaaacatatgacgaacgtgaagatcggtggtagaaaatcttgatggaagaaagctcaagttaataaaaaattgactaacttgctaactaagccgaacgtgcagcactcatctgaggtacagtgaacccacgccgaactggtagtagaatcctagtgctacatctacatga

SEQ ID NO: 52065 - DNA, 481 bp, Oryza sativa
  unsure (1)..(481): unsure at all n locations
aagctcncctccagcaactcaaccaaccacacaacatgcgatgtactttttgttctgtccaaccggngaggaacaaacgtcagggtgcacccgagtggctcgtgtcaaaccagcttggttcgggggcttccccaaggagtcaaggaccacagctcgactncagcaatgccactcaagcaccaaccattcgaccacaggcaccgacactaggcttcagaacaaatcaggcaccgaaccaggacggcatggcatggacccagccttcgttcgacccatccatgactgcacaccaagcgtcaccgttcggggccaggcagtcgaacactgtggcccacacacacgcgcaagccatgactatgctctttgccacgccatatccacagacaaacgggcctttgcagaaggtgctcaccgtagttcaagttccctcccgttccgcgatactcagggcgaaactgaccacaaagagtttcttgccatc

SEQ ID NO: 52066 - DNA, 404 bp, Oryza sativa
  unsure (1)..(404): unsure at all n locations
ttcctactaacagcacatcctccaatagtgaaaacataacctgcgagcgatcttccnctatccaaatctgcagcaaaatctgaatccacataaccaacaagtccatttttagatctcccaaactgcaaacaagcactagatgtaccacgtatgtatctgaaaatccattgaacagctntccaatgctctttgccaggaatagccatgtatctactaacaacactcaatgcatgtgataagtcatgacgagaacataccatggcatacataagtgaacctactgctcttgaatatggaactctagacatgtactcaatatcataatctgactgtggacataaatctgaagatatctaaaatggcagtaaaggagactcactggtttgcatatgcatatgaacgac

SEQ ID NO: 52067 - DNA, 319 bp, Oryza sativa
ttataacttatagaagagggattagggaagattacaaaaccgcctacctggtcaggatggactgatattacaccttgcagagcttctttcacactattgatgagcggatgcaccaagggatgaccgatatgggttaaagccttaggggttacacattactaagttcactttcccttgtgagaaattgatcgatagtgtagatagttcctcagacagacggctgctgtgtatatagttagacaaacgacggaacatactttattcaggttcagaacaccatactatttatacagttcacgtgatagcgcatgcctgttgt

SEQ ID NO: 52068 - DNA, 457 bp, Oryza sativa
  unsure (1)..(457): unsure at all n locations
catagcgccacanaagccatggcaataanagacatcttttatttcnttctgttcatattngagtaagtcgaccatcactaaccatcgacgggccaccgctaagccaacaacggagctacaaccgggatcacccaaaaccctatcctaacaaccaacacttactacactctatccacatctttgagatttagggagagagagtgagggagaaggatggaaccgctctcctgtaggctccccgacatggccaacttttataagttagggcgccgacacaagatgaccgagatctagagcgagcttgcaccgctggtcagggaggtttcaataaggcggttgctagacgacattctcagagagaggagcgacgaaagcactgtcgtcgccgtttgcgagggctcaaggagatcgagactgggtttcacccggcacaccactagaggagatgagatcacat

SEQ ID NO: 52069 - DNA, 457 bp, Oryza sativa
  unsure (1)..(457): unsure at all n locations
ctcaagcttaggtccatgacanatataaggtgattccagagaagagcaattcttattattctctatgngttntcaaaactttcatgatcaatatatttttaaatatttagatacatgaaaaccataagtcgagattaatgattgatcaaaaggtacttacataatattatacatttattgagttntacaaatatattacgatagaaatcaacagatgtccatgagtgaatgaagaaattttgttggacatgagtggcaaaagctttttttttttgtcttctatgggacagaaaatatttgtcaaactcatatgaatattcaagagatgttactgcacatgcctaagtcaactgtcagaacataacacctgagcaaatgatcagttggttaatttgctaccagaaaggcaaactgacatgatagccctatactcttctgtatctaaacaaggaacaac

SEQ ID NO: 52070 - DNA, 381 bp, Oryza sativa
  unsure (1)..(381): unsure at all n locations
tccgctggtctctaataagtctatttggccggtcggcctatttttttttaactagtgaagacttacagttctttcatcttagatgcgtttgctatgcgtaatcatgcttataatgaatatgtgaatctagtgcaccatctgngaactagaatcacatgagtatgagttangaatatttgagaggttgatgatctttagccattattgtcaagtctcttgaatgtgtaacacatctgggcgccgccttttagtggtttgacgggcacatctcaggctgaaattgactggcaggctaaaggcccatacatgtctccaatatttctctctcgaggtgtcngatgtttatttatgcttgcttgatgactcgaattattcacttca

SEQ ID NO: 52071 - DNA, 149 bp, Oryza sativa
aagccactatatactattttttattatcaactaagcctaaaataggtatttatggcaacacaatagcaaaaaaaacaaagtaattatacagtacgcagtcataaggacccggagagtgccgacccatgcgcgtttgctaggcctataag

SEQ ID NO: 52072 - DNA, 306 bp, Oryza sativa
  unsure (1)..(306): unsure at all n locations
ccgcacaaccagaggcagcaactttgttagacgcatggtngaacacagaactggcaaacaaagatacaggtagcatgcacagacgcagagccacccaaggatctccatgggccgcggtcgtctcacacacgaaacgcaatgccccaggctcacaaacgatactgtgccaactcatctagatggaccacacccaccgagatatctccatggtcgcaggttggcccataagccaaacgcaaacacaggacccgaaaacattatcgggcctaactcatctacttggaccacacctacactcaacgcact

SEQ ID NO: 52073 - DNA, 213 bp, Oryza sativa
atatacccaactaattattacatgttgatgcttgtaatagttgctttaaaacatttatagccaggaagggatttatggtccttttgcctcgtatgcatctgacaaaattcattttcattggcttatggatatttactgctaattattaatataacattagatatgactaaggcttccgggaaatcctcctcaatgctcgttttggaattactg

SEQ ID NO: 52074 - DNA, 479 bp, Oryza sativa
  unsure (1)..(479): unsure at all n locations
gagagtcaatgggctccctccgatgtaacggaggtanataatatttatatggcggcgcacggcgttcttctgacaaaggagatcatctgctggcgtccagcgtatggcgaaacattcccgacctcggacacgcacgaggtcgttgtattctcccatttctattatggagggttttctcattcaacttcgaaattctttacggagattctggagttttatggaatcagcttgcatcatccgaaccccaattccatagttcatattgccaacattatccatgcctgcaaagcttttctggggattaggccacattctgctctattccgccgcatattcttcctgaagccccagccaaacaaaagtaagccgcgcgtcgttgggggagccggtctttaactaatgggcaccttgagccattaattatttcatcatgcccttcaaaccatacaacaatgcgtcggacccatactggttttatg

SEQ ID NO: 52075 - DNA, 479 bp, Oryza sativa
  unsure (1)..(479): unsure at all n locations
ngggtggtgnngtttacttagccatgatggaatgtatttatgtgtttttatataagcagctggctatataataagatacagcagcaatntcgtttattctcagtccgggtatgagttggatcggtagccttttagggcccattcgaatcgcgggaatgaaaaccaatgaatatgagaaacacacgaatgatcgtttgttggaccgtatgaaaaacacatgaagaattggatgagagagatagcctccaaaaaaatttttcacgagctctgactcttgctaagtcttcgtcaaaacctctataggagtggccatcccataggaatttcacaggaatggatatgattcaatcctttgattcgaaagcattcctatgaatatttcctataggatagataaccgtcaagacttctatgttgtntcttcaatcaaaggagcctttagtcacagatggcgaatactctaggtattcaactactga

SEQ ID NO: 52076 - DNA, 104 bp, Oryza sativa
  unsure (1)..(104): unsure at all n locations
cacctaaatncaagntagcacgtgctctacccactatatttagttcataattcattgctcattttgcatgtgcacggttatctggctcttattctcacattggt

SEQ ID NO: 52077 - DNA, 254 bp, Oryza sativa
  unsure (1)..(254): unsure at all n locations
taagggctggtgcgcttgcaacaactccatggtcaataatttgatgaataaggactgtaaaacttaaatacagtactctaggtatcattactggtgacttttcaacccatccaattaaattctaaatttatacctgttgattgtcctgatcatatgattgggaaaaataagattgcatatacacngagatttatacttcatttgtggtactattttgcaaccagtggatatgctcttgactgttttggtacatc

SEQ ID NO: 52078 - DNA, 249 bp, Oryza sativa
aggaacaacccagctaacaagaactttttatcgaccaagccaaagagaagagctaccagaagaagcacagacccctcacagacccaaaaccaagcccgtacatgaaaatcatcaagaatatgtccgctaaagaaagcacgagcccatagcgcgagggaataagctccaataaattactgacacacggaccgacacctgtacagcgaaacttacaggcaaggcaatctagaaaattggccaaaagcgaaa

SEQ ID NO: 52079 - DNA, 326 bp, Oryza sativa
acttggtcttttaacaggcttttttttttatttcaaaatattgcaaagggctccaacgtataaatttcctatattcgcgacttatctgaatccttaatgctggaccataattggcttggtagggggcacatactctctccgtaaagaaaacaaactcttgctatgcactcctgtctagatacatagataggggtggtttctttttcttgggcgggaggagtactaagtttcatcggacaaattttcataatctaacctttgaaatcaaaaacctggtatcggcccaaaagaaatggatggctaagtgcattttacagacccataaa

SEQ ID NO: 52080 - DNA, 326 bp, Oryza sativa
ttcaatacttgcttgtatctttttttggctctttgggtgactactcacggatggggcttccagccccggggaaagtgatgttaatttgggcattcgaagatagtcctcattcttatcctggctaatgtggtttctctcgggagcgggggggaggcatcacggtgattctgtttcaatttgtgttggagcagtgttcttcttgtcgttcatctggcgttgcttgtggtttcttcctcctcttcacgtcaaaaaaaaaatggactgttgatgcagggaattaacttaaattgggaactgcgattcgattatagatgcattgaattgtg

SEQ ID NO: 52081 - DNA, 342 bp, Oryza sativa
tttgtttgcctttttttttttttaagagaaagtgattggaaatgttgtaaccaaatgtggcgttgacaccatgactaacattgttgcacaatattggctccatcttgaaatacagtgacatggtcttcaatttgacacttgatcatagctcacaaatatggtcacgtgtgaatatctaacaccgtggatttgcaaataaccaagtggctattaaaagtatacaaacatgtggaaacgagtgggaatcatttataatatctatattttggaataacatctatcttataactcacttatgagaagaaaaagagcttaacgctcgctttacggcctaaaattctc

SEQ ID NO: 52082 - DNA, 371 bp, Oryza sativa
tggccaagccttgtatatgtgtgcagcacaactagcaactgttattctaggaataagaagattacgcggtgtttgtatccaccgacttaaccttagtctctgacttaaacactaatttacagcattaaatatacactacttacaaaactaactatataaatgaaaagcaatttgcgagacaaattttctaagcctcaataatccatgattagcctagcatcacataggctaatcatggattaattagactcaataattcgtctcgcgaattatccaagattatggaagggtataataacagtctacgtttaatatttataattagcggccaaacatccgatgtgacagggacttacaagtttagtcccatt

SEQ ID NO: 52083 - DNA, 309 bp, Oryza sativa
ccccaaaaattttatgagccaaagcaacggaaggctaacacacctgcaggacgacgtgggctgcagaaccggccggccccgcaagaccggaaccgggcaatgaccggtcaacccaggagggacacctaatcacccaaacagaagggcccaatgcccgccagaagaaacaccctcgccaagtcccacacaagcaccaatataaccaattccatgcattggaagaaacacccgaacacaaaagagcgggaggcccacagccgacggaggaaggaagacccacccaaagaccgtaaaaaggcccaaacaaaa

SEQ ID NO: 52084 - DNA, 315 bp, Oryza sativa
atatctctcagcggcgagaggcatgatcgttagacagcctagtgggtgattgtggctcaattaggactcagctacacgaggttcaagctctaatctcagatgagctagccgatggtcgtactccagccgtctatcttgagcagcatcaatttaagctggagaaagccaagctgagaatagcttaaccgtcggagcgcaaggatatcgatgccacaatccaggctcaatgatagcttgttcatgaagagaaggccaaacttgatcaactatctgacggccccgattaatctaacattgatcggctcgaagctcgta

SEQ ID NO: 52085 - DNA, 344 bp, Oryza sativa
ttttctttatttctccaaacaagaacctttattactttaaaacagtctacaatggtacccccacaacaacatctatgactcgttcctgcccccactatccaattttatcctacgagagaatgaccccatctcaggaccctttttaactatcgatctcgaccctatcataaaggagtctccaatctatcagccaccatctaatcgacataaataatgctaaactggtatgaatcttttctttttatttaatgaaaatcttcgttttggcctacactgatggcagttgagcctattataaagttttatttttcttctaaaacttggggtggggtatcccccccccc

SEQ ID NO: 52086 - DNA, 209 bp, Oryza sativa
  unsure (1)..(209): unsure at all n locations
ttttttttttnaacntagaccggctatctttcttcgcaattccttttcagaaaccgaaagctggaacctctgttgcattggtctaagtcaattgtccgagcaccacttagtgtaattgatgggtatccgcattccaagttgaattcatgcacgcacaatcaatatatgttggatcaaacaccttatactgctgcacatatacacgtata

SEQ ID NO: 52087 - DNA, 216 bp, Oryza sativa
agaaaaaagaggggattttttatgggagaagggggggagagaaaaagggggaaggaataagggataaagaaagaaaaggaggagaaagaaagaaaaaggaagaagagatagagaaggaggaaggaaagaaaaagaaaatggtgaatgaggatagagggaatgaaattggaagataaggatagaaagagggaaaggagaaagatgaaaggagaagga

SEQ ID NO: 52088 - DNA, 378 bp, Oryza sativa
  unsure (1)..(378): unsure at all n locations
caacttggatgtgaaaactctgngttatttttttttttgctcttgacgagaagaacttctgtaatacataactttaaacctacattgaatgaaacgaactctggaaccgataagcttaaaccagacattgatgccacatacatggaaatggagaatctaaaatatgagatagcatcaaggagaatcttgccttaaccgatcttaatagaagcaagttgagcatctgttctctcacgtcacacactctcaaaagttggagctggacattatttctcttattgacgacaaaggaaaagtggaaagcatgttggcagaaaccaaaaattcttcgggtgctctaattgaagtgatatcaagcatttctcttcctttcgatag

SEQ ID NO: 52089 - DNA, 326 bp, Oryza sativa
  unsure (1)..(326): unsure at all n locations
acacaaaaaccaagcaaaaanaaacactgaagagacaagagagcttatctattttgaatcggaccacaaaaagaaactacccggaaccgaatatcccgcacaaacagcccatcatatactaggacccaactgccggagaaacctcagaaaaaaaggcttcagagccaggacccgcagcagcaacaaaggaaaacgaaagcaacatggcaccaccaaacgagcacaataatgaagatgcaggaaaggacaacaaacaacaaaggctcgaaacagcgcaagaaaacaagaggacacacaacaacatacttgacaaaagttcccccaca

SEQ ID NO: 52090 - DNA, 406 bp, Oryza sativa
gaatgtatatccctcaacaattcttccttccttcaaagatacacagcgctgcagtattccggatgaacttttcttgtacaggtcagcttcgtgaataattgaaagtctgctacgcctggaaatcccctcggcttcatttttgtcttgagggaggtcttggttggtcaaaaattttatgagaagttctctccagtccgcttcaaacatgcttgtgccttgaatattcatggcttcaactgcttcttttcttggcacggctggttcataaagatgctccacgaacacatcagaaggggctgctttccgttttgacccaaattgccagttatcggctgctcgttgtatgtcaaggacatggggagctcgagtcattaactatcttcagctgcatcctcttgcggtagcg

SEQ ID NO: 52091 - DNA, 433 bp, Oryza sativa
  unsure (1)..(433): unsure at all n locations
tcagctgccctttgtgccacctgtgtagcttctgcttctagttttcttttctggtcatcattagcgttcattatggcatcatgattgatcgcactctgaggaagtccaaaaaagagtgtatcatnttttagaaacaaaaattgaggcagctaatttgccttanagagataaaaaaaatattgcttacatgaatgccttgagcatcaaaaaggctcttcaaaatgttgcattcttcatctgcttggtcagggcaatggtcttctttaccctgtccatgcctggatgagctcggntcagtcccagaggttgtcggtgtagcagaggctgcatatagctggtcttgttgcttgtcactcggaactccgatattcacatcctcagacaattggcttgaaatatttgatgtttcagttgagccattattgtcatcatc

SEQ ID NO: 52092 - DNA, 456 bp, Oryza sativa
  unsure (1)..(456): unsure at all n locations
tatctagaagagttcgagttcaagaaggatgcgacatgactgttatctattaattaggcatacgttgttagttgccttttatctttaggaaagtgtgtttagtgtccgataaggactttatcttttcctttttagattcatttttgcccgacaagaactagtatcttcctatgggtataaatatgtacacccggggtcattgtaatctatcaatctatcgatcaataatactctcggcgcatcgccaccctccttcctgagggttntacttatcttctggcggaacatgggcacctgacgcagggctgcatcggctatcgatctccagcgaagaggtaagtcctggtgaatctgtcgtctacgttggtgttgttcaaggctgcatcgattcgatctcttggatcgctctggtttggtgatatatttgcctacctgatatctcaattctatctctaa

SEQ ID NO: 52093 - DNA, 281 bp, Oryza sativa
cacacgccaagaaacacgggcccaacacgaaccaagcaattaatcggagaccacaggcggcaggtgcgccgcaagcccaaagaccaacaccaagcacccagcagcggaaacagacaccggacccccggacccaaagaagagcaaagacgccgcaaagagggcaagaaccaagagaaaccacggcggaaacaaaagcccgaaaacacccacagcacgccagaccacggccacgcacacagaacaccccaaggggcccccagggcgagcccaacaaaacagag

SEQ ID NO: 52094 - DNA, 323 bp, Oryza sativa
  unsure (1)..(323): unsure at all n locations
tttgcttggnacgctgagcataagcattttagtacgcctttgtgaactcgtggatttctattattcagattcatcttatcccatccaaggtaattgatcagagctgtacaacttgttgcatactatgcaggagagctcgtatcacctggacatgggtaagcagggcgcccaccgcacattagtgactttctggatttttctctgccacaatatgctctgcatcgtgagactagtacagctatgggtggcctgcatagtgacagcaatatacaaagcttggctgaagttcagaacaatgattcatcacacataatatgcctctc

SEQ ID NO: 52095 - DNA, 264 bp, Oryza sativa
  unsure (1)..(264): unsure at all n locations
cacttaaaccttgcgtctctattttgataatgacggntcaaatatgctcttattaatgaggtggtagagatgggcctccctgtatatcgaaaacataatactttgttgtgagctgagcccatgtgttttgttgcaccttgaagcttttatgaaaatcaaagattcttgatcacacatttaagggttctcccttgataatcaatttctgccctatgttaaaccctatgcattacgtgaatacattatttccacgtctcctgtata

SEQ ID NO: 52096 - DNA, 184 bp, Oryza sativa
aaaaaaaaagaaaaaaaaaaaagaaaagaaaaagagagaaaaaagaggaaaggagaaagagaagaaaaagaagaggaaaagaaaaaaagagaagaagaagaaggaagaaagaaaagagaaagaaggaaaaaagaaaagaggagaaagaggaaaaagaggaaaaaaaaggaagagaaaggagaaa

SEQ ID NO: 52097 - DNA, 235 bp, Oryza sativa
ttggtactcgggaaaactttcgcacagagaacatcagcctctaagtcgccgatttcgaacagcataccatgccatactcggacgcccggcgttagccaagttcatgggcggtccgcactacacttacatgatgatgaagatgtctgggtcccgaggagttctatctctaccgagtgacatcaagcaagccgtcacatgcaacaaggagagttgcgacatggctcaaacccgcgag

SEQ ID NO: 52098 - DNA, 75 bp, Oryza sativa
  unsure (1)..(75): unsure at all n locations
ctcaagctcggccctagganacgaagggcgtctgcttcgtcggactccgatgccttctttgttgacgacgccgaa

SEQ ID NO: 52099 - DNA, 263 bp, Oryza sativa
cgcatgctctgtgggaacggggattttttttttatgtcgcaccatgaacattggcatgtacccactcccagtgatgccgaacaagcggcatgctctcatggtgggaccgaagaagagcggtggtgccttcacaaagctgctgaaccgactagcggccgtatgtcatgatctctctacccggctacctcatgacactggctaacatggacaaccgccatcacatccgatctgttgtaaccggaggattagctggaaatgggaaa

SEQ ID NO: 52100 - DNA, 133 bp, Oryza sativa
cgctcgacgacttcccaagtaccattagacataattgaggccatctcactgcgtatcgctttctttcaatagtcagcggcagaagaagaatatgcctcttccatggttcttggagtatcatccacaagatata

SEQ ID NO: 52101 - DNA, 387 bp, Oryza sativa
  unsure (1)..(387): unsure at all n locations
aagcaaatttatgtaaaacgtttagctaggcaactatagcatttaaatcataaaagtattctaatatgcttatgctgttagattaaaatttatgtagacacatttatgcaactatagcatttaaatcataaaagtattctaatatgtttatggtgttcgattatttatatgggaactaaattatacatatatgttttaatcagaatagtaaaaaaggcacatagagatcggtgttataggtgccgaaagtgataaaatcggcacctatagaccattttccacctctacaggtcgaanacacagaaaaacccgcacctctaatagactacaggtatcgtgtaattaaanaactgatacctttaatctattatataccagatgtctatt

SEQ ID NO: 52102 - DNA, 401 bp, Oryza sativa
gtcagcgaatttcatttgaacttaagcttatcataaacaagcatttgaccaactgtggtgcttgcagatgggtttggacaattttctatggatcctaattgatggaagacaaatgcaaaggtcaagagccatgctcaagaagaaattcaagtttcaacctgattggaatgcgccatggcaacattcccctccttcatgtccctgagaaattcagcgaatgcagtgcacgatgatccccctttctttcatgctgtcgctgcgctcttcttcatcgccatgacccgctccaggacttcctgctgcgcattcgattccatgatcccgctcaagatggcatcgacgatgtcggcctggacaagtgccccgggtttataccctctgacctcgatgcccatcttcat

SEQ ID NO: 52103 - DNA, 261 bp, Oryza sativa
  unsure (1)..(261): unsure at all n locations
tctgattggttgagaatacaaaataattgaacaaaataaattaagaatggtttagaatgggtgagatgagtcggtaagtgatgaaaaagcctcattttgagaccaactattattctttactctanggtggaggagggatagatgttcaaaaagttttccatttgcttcagatagataagctcgtgcttggcaatgcgaacgctaatggatggactaattttatccccttactttgttcatgaaagagcggaggggctttta

SEQ ID NO: 52104 - DNA, 459 bp, Oryza sativa
  unsure (1)..(459): unsure at all n locations
tgcaaacttaacgagcaatgtatggagtgggagaatgttttatcttgttatccacacagggttcaccgggtctcttacaacgatgatgaagaagaccaagtttaactggatgcagaatatgatattccttccaagattctaccagtggcctgagaccgtccacgttgaccttgttgctcgcgatggcgaattggcatttgtaccaaagttaccgttctgcgcagatacgtaccttgatacatgtgggacacacatctggtcttatgaattatcacacggagcagcaacaaaagaattttgggggacagagagggcagaatacagcatatgggtcgactntggtgataattgattatacatcgttttctatagtatatgtaaatttgctatatacttcctctcgttctaaanatttaacaccgatcaccctttaatatgctggattgttcgtctatttaa

SEQ ID NO: 52105 - DNA, 243 bp, Oryza sativa
  unsure (1)..(243): unsure at all n locations
gtgaacgtagatcatgctacctttcttattctctatctgccttcatngnncaanncacagtataactatgaattgattcatgtatcgatcaagagatcaccgtgccctatatcaacactaaatctagactttcagtgcttctgatttgatattgttaacataccttatgatactccgatgactcatcctcatccttgagtgccatgaggcacgtattggtgaagtcgccatcattggtgtgat

SEQ ID NO: 52106 - DNA, 307 bp, Oryza sativa
  unsure (1)..(307): unsure at all n locations
cgaccaactggatatatgaaagttggaagcatcccagcgacccaaacaatattgcatgaattccacatttncncgctctattgggatgatgagtgatgactaaccagttggacacttgttttatgtaccaagtcgctagaaccaatgcagatagagccggactataacaaccctacatggtacctgtatagaaaaaaaagaaagacatgatgtctgtgtcctacgacaanataggaaagagcatcaactggatagtgaaatatggggaacaagagagagtactacagagaatgaagtgcttgttacc

SEQ ID NO: 52107 - DNA, 346 bp, Oryza sativa
tataaatatgtgtctttacatttttatatatccttctctgggatacaggtgttatcagtaaaattcccagtgatgcaatactgaagtggaggaatcttgctcaataggtacaattgggaattccattaatacgaaagcattactacaatccctcaatgcctgtatgtgtgtattatcatactgataaccctgatgagtctaatggacacttaaattaaagtgcatgtactctcaacttcagaagatgttaaatgtagaggcgatgtccatcattggactacttagaagacatcttaactaaactttctgacgtatgaatgtattaaaccagtagcactgtatcttt

SEQ ID NO: 52108 - DNA, 492 bp, Oryza sativa
  unsure (1)..(492): unsure at all n locations
aaactcaagctntatttcccggcatacaggtaattaaacttaacttgttgcatttgtttaactaacatgctcctctgcctatagcaatatactagtactgcacgcacacaacaattgattgtttaatactaantaattagtgtagcgctctcattgtcacttatgatcgatttataaactagtaaacactgaatttgcatgccacacattgtgggaaaggttataggtcaccaagtaagcagggtctgggagcttggggagaggcttggataagatgactgccgctgcttatcgtgccacaagagagttaaagggttcaatgtgaccaaactccagaatcacctgcaaggatcggttaaaggcaaggaatacaatgccctggaatcaacaactacattctgagcatgcttcgacggaatttgaaagaaatgaacgatgatcaatatgaacatattcagatgaactttcatatgcgtatgcctaaattaactc

SEQ ID NO: 52109 - DNA, 461 bp, Oryza sativa
acacataacactcagcttcagcttaattcctggatcatcacaccggcattttgacatcttttgaaacagctctcaggctgaaagaaaaaagataatgtccacgtgcgatgaacctgtcatgctgtcactatatatggagaaaattggttataagctccccattatcttgctctgtcccatcccatgtgttcttcatcaaggacgcatgaattgcatataaaacaatttgatcccctttcttttgtagaattaggaaaccatcctttcaataacgctttactgctcatgtcgctgtcaaagaatcaatatatttgttggttggggaagaagcgaatatatacagtgcatacaataatgatactacaggcaaatgaacattgttgtagttacaatatcatagaagtaagccattgaaatttacatgttcatatccgggatattacgtatccgaaaaatctgtt

SEQ ID NO: 52110 - DNA, 326 bp, Oryza sativa
atcccaacgaaatctcttttatatcatggaacggaggaagtctgactactgtgaagtcccgatgtctcaaagctactacatgagatgatcgaccttgaagaaatacctatgtaatagtcctcatttatctattgcctaatagtgtttaagtaatgccttctctatgttttcgttactagccaacatatccgcacgttgcaccgggcgaaaattctaatcataatatatggtgtttatggataatcatatcaatgtaatagcccaacctcgacgatgacaaacctactgatgcttgcttaccctaaaaattggatattcatgtgaca

SEQ ID NO: 52111 - DNA, 327 bp, Oryza sativa
  unsure (1)..(327): unsure at all n locations
ttttaccataancaggtgcttggtatttatatacctcgtttcattatggcaatgaatacagctaattacctatgctatgactatttaccctaatttttatcatatttgtggggtgaatcctttaagtatttatactcggatgcctcggcagctgcgttcattcatgaaccttttagagtgtcaaccactcggattcctcttattatggctaaaaagcggccggctggaatgcctctttaagcgccgcgtatcgctttgccatatgatgcacaaatatgctattactttgtcctcaacaatatgcttagttggtcaactaatcacata

SEQ ID NO: 52112 - DNA, 397 bp, Oryza sativa
cccacttacgctgtctaatgtatcaagatcaaagcttcaaatataataccctcaagtgcaatattttttcattcaagttcaacatggtttagttcaaccatatttgtgttgtcagcaatatacaagcataagcaacctttattatgaatgtaaaccatgcttaacactggttctttgtttttttatgggtaatctgctgattgcttaacctttgatcaactgtgtgtaagaaggttgctctggacttgaatataaggaacaaaataatgatggcctacagtgggtctgtgattcattgcttaagcaagtggtgaggaattgactactaagccatggaaagtgtatgctgtacaatagagttgaacatgccattatccaatacatttgaaaagactga

SEQ ID NO: 52113 - DNA, 319 bp, Oryza sativa
  unsure (1)..(319): unsure at all n locations
ttaaagaaaaggtactcaaagaagtggatgtttgtgaatgggccttggtggagaatgtggcatctccaacccaggaggaaaaaatatgtagctctcttaaactttgagtaaacaaacggattatggcattcaccatgctaccctagtcggtggcttcgtagaggacttgtcaatcgacagctagcaagttcagttacgcaggagattcanaactcgtgatcgcaaatgctacgcgccatctactttctgatgtcaacctaaaggacaaagtagggttcacagttccgtcatggtgtcaaaatgcaaacatagtgagatg

SEQ ID NO: 52114 - DNA, 302 bp, Oryza sativa
atgtggcaacaccggatgagagtctgttatgtggggaatgcactacgtcccatgcgccaggattatcgacaacagcaaaacggcaaacagtagatatgcaggtatttgtctttgtttgtcttagagtctgctaaagcttgttagcttgaatcttatctctaagagtttgttagatggcatagtaatctctacttaaagggccaggctggcgcatgtaataaacaagcaatcacaaaaccaaactattgctcctttcctgccttgctagagtggcgccgatcaccgtccctccacgccggcga

SEQ ID NO: 52115 - DNA, 422 bp, Oryza sativa
ttttttttttttgtttccaacatacatagtgtgtatatcatatcactagggtccaatatacacacaactaaattagctatgcaattattttaaaataaagggtacacccattatatatatagccatctcatatctatctattatatgctaaaagcggcgctcctataaattaaagaaaatcccacaaacgctcttaagccaccaccgtacgctctaatgaattttagaatattctagacatcttagaaacaaagcaaacatccaccccttgattttacttaataaattgggcagccaatatatacattggttatgaaatggatcttagaaaaccaatactatgtgtgccaactctcttctccgacatactatgcatcgaactaccatgtacgacgcttcttccttttctattcctttttctt

SEQ ID NO: 52116 - DNA, 252 bp, Oryza sativa
aaccactgacaaaacgacgggggaaaatatgttctaccagaaccagggagggcattaaaaacgcacccaggacttgaaattgaaagaaggcccatgaacaagcccacagaagaaagcaacaaaggggcataaaatcagaaatcaaacgcccagcccccgtcgacaaaaacgaaaaacggaaacaagaaaagcaacgaccccgaactatactaatggaaccgacaatcaagagagaagaccacacaacaaaca

SEQ ID NO: 52117 - DNA, 212 bp, Oryza sativa
ctgcagctgtcttttagcctatgcaatgttattatattttttatctggcgcacttcatgtctcatgtctacgcattacttgtcgccatttacaaatatgcgtgttgctttttgctggaagattccaggctgaggatactacgataaagctattgttggtccgagggaaaagagtctacagattctaacctgatcactgataatattttcttt

SEQ ID NO: 52118 - DNA, 480 bp, Oryza sativa
  unsure (1)..(480): unsure at all n locations
agcttggtcaactcgaatacgtactganggatgaaatatgattgatcaacacaacatanatgatgcgttaggaaggacaactactgtgctctcgcacaatattgcgattgaaattgtgatcattattattattaggattctcatcctgctaagccctgcacgagaagaactatgactacttcttgttcgctattcttgcgcatgaattttgtcttatgaatatgctcaataacatacggtttaaaaagaacaaaaccagtgatacatttttgatcttactaaaggcatattaaaagcttatacatgtgtgtgcataatattcgtaggaagtaggatttcaaccttgataggtgaatatatattcgtaggatacaagcttcaatcaaattatatctcgttaataagacatgctacatatctcagaatattatctcatgtaacgagacgattaagtacaacatagatttctcacagattgat

SEQ ID NO: 52119 - DNA, 460 bp, Oryza sativa
  unsure (1)..(460): unsure at all n locations
tcaactacgtctttggtgggcttcattcacatgaatgggcttctgttagagagtgaccctacgaacacgttaccccagcttgcttggatcgtgtccatgtccatgtcgttggccatgcttacccacgccatcttgttcatctatgatgatcaccttcctatctactacgaggatatccatctagctacctctttctttcataatagtaacatgttcgtactntacaacggaccatactcgtataattagagattggccgggtgaatagattgaggataaagcacccganacatggaccacaaatttgcggtggttaattaccatacaagaagagaaaaggtggacgacctcgcttttatagtagtagagatatatatacacatttgcnttatcaaaactttcattggctatctgcatgttcatttggtcctttctctccatgcatcctcacatgcctatg

SEQ ID NO: 52120 - DNA, 308 bp, Oryza sativa
  unsure (1)..(308): unsure at all n locations
gcagcattcaancatatatgtgcaacacagcacactggattgtctaatatcgcctgatgcaaaacagaagtcttaacttcatacataggatgggaacatacctggccaggcctgcaacgttttgctagggaaaaagctatgaccattgtaaaaaagattcgcgcccacactaaacaatgcttcatcatatgataaatgtgctgtacaaggcgagatatagcctaacaacactgttaacatcatgaagggccctccattgatgtgagatggtgcctgctttcatgtgagatgatcatgtcacatattaa

SEQ ID NO: 52121 - DNA, 311 bp, Oryza sativa
tctcagcaagcctcacctgtgatgcataattatgcaacggactacacagggataataacatacggggcatattcttctcataacacaacactttatacatcacttatatgcccacagcctttttataagaccatccttaagcccacagtttattaatctaggtcggaaccccacaaacctgcttacccaagcctaccatgattataccaactggtacccaccctgtgcccacttgtccacccacccaatcaccatcccattttagtgtaaccatattaaaataaacactactggtgcatgatcgttgcata

SEQ ID NO: 52122 - DNA, 372 bp, Oryza sativa
atcttttactaccaactgatgccatatatgcagctcttacatacagatgttgtcaaagaggtcagatctcaataaggtctatcaaaacaaacacctatgtattacatctataaactaagcctacaacccgatccatgaggtggtaattactttccattgtgttggtatattcacaggacaccatatgctcgatccaggacacctgcagctctataagattcaacactgtccctgagtgtttactcaaatggcttgatttccattctaacttctctagctatccacagctgaatagctgctcatcgctactatcacagacctgaattgaaatgatgggattcatagaatcatatggaactttactattcaatg

SEQ ID NO: 52123 - DNA, 223 bp, Oryza sativa
  unsure (1)..(223): unsure at all n locations
agcgactgcagcatcaccttacataccacaagccnactttttattccttgaaaaggggaacgcgtcctggaacacgtcactagacgcggcgtacagacaattatcggaatgctcgtagaggataacaacggcaagccgaaagtggagcactatcaccaacagggacctccaatagggccacctaaacacagccacatgaatgccttagctgaagctcacaaca

SEQ ID NO: 52124 - DNA, 410 bp, Oryza sativa
  unsure (1)..(410): unsure at all n locations
nagcttgtatgaataatagaactagagaacttatgacttttatcagttcatgataaaattgtctgaagcatccgagaaactaggagtattctatagcgtgctttatatttatgaggtctattaccagtagtaggatagatatggcccattattattattatataacaaaagatgaaaggtctagattgattttactaccaatagagaccactgtagagtgaatgttaatcaacatagttgaacattcaactgacttgcccatcagctttcagctatggcttctgctgctggctggcattcactaattgacatatattttctgggatatgagtagggaatgactttggaaacatcaatttaggccttgactgaaacactgatgggacttgcatacatgcttatactactac

SEQ ID NO: 52125 - DNA, 126 bp, Oryza sativa
taccgattctgtagctgaaaccagcgctaaacagtgttgttgcttcctaaaaaaaataaataccacccacagcagttcaggtcgctaaattaaagtgcatatcacttaacacacaatttgacaatt

SEQ ID NO: 52126 - DNA, 405 bp, Oryza sativa
taaaactcaagcttgttcagcatctgggtggaccgaaggaggaaaattgattcttgtatactccagacttgtgactttaccggcagatgctcgctaacgatgtagctacaagtccactggagatgggaacaacagtttggccgtcatcccagatgcagcttcacaacctatcaattatgctgatgcaattccagatcttaagctggcagaggcatcttaagaagttgcaaatgagaagactgagcctgaggttatttcttcaccaagggctccaactcattctttcaagaagccaattgttgcgaagaagcctggacataagaccggtggacttggtgcacggatacttacgtcagacgtatgctctctgcatatccgattggagtagagcttattcttttaaca

SEQ ID NO: 52127 - DNA, 424 bp, Oryza sativa
  unsure (1)..(424): unsure at all n locations
cgagcatcagcttttctatcaaccaaccacgattaccactgttcttgtttcctcatgcgtttngngtactatttggttaccttttcataatgcacatcacggtgttctttgtatcattaacatcagctgcctagcccacatcctgccgcagatgccgatgatcataacaacatatatcctgcaagtctagagacacttgtgccggacaagatatacgagctagtcctactgctaattcatatggatcttccaattgctcgtgtgaaaaaagtccgacgaaacaaaccatctgaggctgctcgcaatccggctgaacgcagaaatggacctgaagtggcttacaacattactttgctgactaattatctattaaatcattgggctgcagcgtgtgacaaaactggcaacatcgtcacctggctat

SEQ ID NO: 52128 - DNA, 377 bp, Oryza sativa
ctagaaaagaagatagacggttatactaacttgtactttatacgaacgggaattagttatgttaagtagtgaactcaccagttcctgatagacgacggcatcacttttgttctcaaatgtgacagagccgtccgggttgaccttaccccttgcccgcgcccagttgcgagctctttgttcagggatgtctgataacggggcagggacattcgctgctgcagcggctgcatcttcttgggcccatattgcctccttgccgatgtaccctgcggtgcccagccgatgcgggtgctcatatccgctgtgcagtacgcgatgtgcctcgcttgattccctaaactcttgggtggtcttgagagagcagaatttctcccaca

SEQ ID NO: 52129 - DNA, 473 bp, Oryza sativa
  unsure (1)..(473): unsure at all n locations
agcttcatctngtatattgcagtaatcagcataagactgtgacttatatactccatgtttcaaatcctatgcattactactatctaattgtcctcgggcaatgagcctgaactatgcatgagactctacagaagatatcggatacgaccatacgaatggactacgatgaggatgctactactggccgccaatattgcttggcattatggtggaatactctaatattggcttgtgaaatagtttctactacctccgtttcagattataagactttctagcattacccatatttatatagatgctaatgaagttaggcacacatatatgtctagaatcattaacataaatatgaatgtgggcaatgctaaaaagtcttgaatatgaaacggaggacgcatattttttattatcaaaatattctttaattatgtacaatgatactcctcgaaatttgacaccattttctaacatga

SEQ ID NO: 52130 - DNA, 411 bp, Oryza sativa
acaggtgacccggtaatactaaccattacattaaagacaccgatccgctcaccctttattcttggagctacaggtgcgtataaaacgtacgaaccaccacatctgctcctcccactcaaaaatctctttcttttttattttttatgaaggttatgcaccatgaatgtggtactataaagattattagatctagtgttacgtggaactttaatttacatatgaatgatcttggtgacataaataaataattactgtcttaagccaatctacacattcgatatatgacacgcttaagcgacgccatccatgacatataaattatgatagctctcatactaacgaacggagtataactaataatggttgagatatgtcttgagggatattccatcaatatgtagatcatctatg

SEQ ID NO: 52131 - DNA, 228 bp, Oryza sativa
cccaccaaaagacataccctactaacggaaactaattttctaccacgacaggcggccccccaagccacaaagaggaaagacagcccggaacgaggggcgaaaaaagaaagagcaggcatctagggcgcccacccgagacgagacaacggaccaggaagaagaaaggcaccccacgaccaggagaaaaacagcaaaagccaccgaagggaaaaagcaccccatgggggg

SEQ ID NO: 52132 - DNA, 388 bp, Oryza sativa
gaactgaactctcctacagattgagggactgtttgctatattctatatacgaactgaaggcttggtataactggatcatggaagtaagccttcttaacaaaacttgaagtgctcaatcatgcaatcacaagtggagcagcccttgaataatgttactgaaaccaggatacatctcgacatgcgatgctggcatacagggggaacatctgacaatcgcctcatctgcacggcataccaccatcagctggcacctttgatctgatgcacgctccatgactccctgcctatcacatgatcgatcatacatcagacacattcaatcataaactctggtcagtaattcagcacgaacatcctgatctttgctagttctacagtctgaaaaaat

SEQ ID NO: 52133 - DNA, 371 bp, Oryza sativa
gcttcttttcagttgccatccagcgagcgttactcatgtgatgcaatcacgcgatcccgccttccccatgacgcgcggcggacgatgcaacgtgtcccggcagtaacatgcgcgtacggtcaatcgacccccgacccaacccaacccaatcatgggcgcacgttcgcgtcggagacggaatcaatcaatcaatcaacccatgcccatgcattaacgacgccgacgacgcccgcgcgcgcgagcgcacgcacgcggggcacacagggccgtgacgaagctgtctgtacgccgctgggcagagcggacgcagcccgcagtcgccgccgcataaaaatatgcgagacctcgaacaagtttggcgcgatcggggc

SEQ ID NO: 52134 - DNA, 414 bp, Oryza sativa
atcggaaatggcatttctacatttaaaaattgacccattgacccaacaccatataatttcttttacaatatctatccagatgatctgggtagaccgctaaaatttccaatccaaattggatgtataaatctgtcaaggaattattttcatctcacaatgaatctctcccacgtcccccaccccataaaagaatttaacaagcggcttctttgatgctggctcttgagtatataatctacctctccgaaggatttcttaaacaaagtgcccaaaagcaactccatgttagaaaccgaagcgcctaacttcaatggcatgacacattcatggtgaacagtgattgcagactttctaatgcgacacacactctctaacatatgggtgtgtgaaattgacataccgctccatatatac

SEQ ID NO: 52135 - DNA, 415 bp, Oryza sativa
  unsure (1)..(415): unsure at all n locations
atcctgaatcctaatacgccatcagttttactctttgtttaattgacctgaactgataacttgctggataatattaatggttacgaagatgatgacctttactatgaagattcccataagtactcggcccacacttttaattcctctttccataaatcagccatatcttccaataatggttcaagaaatacgtctatatcaataccaggctgacggtgtcccctgtatgacgatacagagtagtacgtattttcgtttttgacaaagccaggtttgaagattatacattgtgagaagcactggnccagtactatgtgagctgctcatgtttcaaaagataactcatcagtcttcagcaaatgaatgtccgcggtcttacaactcttatctgacatagagttacactgacacattg

SEQ ID NO: 52136 - DNA, 182 bp, Oryza sativa
catttttttaacacggctgagtgcagaaccacagggggctgctgcaaaaaaataccgcaacacaatgccaagggggcggccctaccatgagctcaagaattaaccacctatacaactcaaactttcacattcgtcacgacggacacactgcatgaaactactagcccccctgctggaggaaa

SEQ ID NO: 52137 - DNA, 392 bp, Oryza sativa
tatcctaaatggctagaccacaacatacgttacaagttggtttaccgaaatacgaattagaacaattctgcactacaagtagagtaaagtggcgatttctcttaaatctctcgaatggtgatttaagaattcaattgcaaacctaattacttgctataatcaaatgttcggtaccgcatcaagggaacaataaaaagcgcctggcgtaccataatttagtcattcttgttgaaatttgtaatttatgatgcatgatgccacacgaccttaatgttcaacgtgtcatgcagtagtgaaataatagctcacaaaacgcagcaaatatagctagataacggttgcaatcgctaccacactaacgtatatagtgagcgatgagtcatatcattatc

SEQ ID NO: 52138 - DNA, 415 bp, Oryza sativa
agcttgcctctgaccatgactctggtgacacctaattttctggtttacaaagctcatttcaagtgggagcagattgtggagttgggatggtttacagattgtgcacaggaaaagagagctgtagaggtggcacaccaaaatgaacctagcatcatagatcacatgcagaggaataagataccaaggaaagaagaagctgcgtcaagcatggggagtttggacaaggcaagggacaagacgacaaccatagttgtggaagaggattcagacaatgaaagtgctcaagcagaatcggtaagctcaaacagatggagatagatacggagctggctctgagagtacaactataagaacagttaaagtcaagcatattcacttgatataatgtaacaagatggatgatagagggtggagt

SEQ ID NO: 52139 - DNA, 313 bp, Oryza sativa
atattcaaaggaaaaaggcctaagacgccctgaacactcctggtaataccaaataccaccctgaattcaatattcgacatctaacacccctaactattccaacctaacgaaaacacccccacttaattggaaaggttttgcctaatggcgacatgtggcagccaaaaaatagtaaaggggggggcacaataattatcactctcgtcttctgagctacagccacccaattcgggtgccacgtgggcacaatgggcaaagttgcacggcaggaggggtggcgcaaggacaattatatgtgggatgacgggaggca

SEQ ID NO: 52140 - DNA, 410 bp, Oryza sativa
  unsure (1)..(410): unsure at all n locations
aactaagcttgctgccgaatcgcggtgctcagtcgattgctcttaaaggttttctgttttatgttgcccttctttaagacaatgcgggacgcgagaaagtttaatatgacaccacagtgccnatcatcattcgaacagctgaagcatcacttgcttagcccgtcagtttctgataatgccaccccgaggaagcgaactgctttatacttggctacatctccgagggcagtgagtgctgcgctcgtccaacaaacacagtccagacagaaatctgtctactttgtatacgaagcactgctaggagcgcacactcagtacattgaaagggataagcntgctgacgctctgtcgcgctcggaattgctatctcaaattcccaacgcttacatgtgtgtgaaccctcgtacaag

SEQ ID NO: 52141 - DNA, 345 bp, Oryza sativa
  unsure (1)..(345): unsure at all n locations
aagcaagagtttcagcagctgatgctgatatgcgaataaatgatgctgcgagtagactcgattctgcgacaaaagaataggaagaactcgtagctcttgtggacgcgctacagttgcaaatacgaaggttctgcatgtatattctactatttaatttcctgttccttcaatcattgaaaagcatcataagattcttctaaaanaacttgattggagagttaagaaggttttggaatatcttctctttgcagccaagacactagcacaaaacatgtctgcgaggagaggtcggagctgcgctccacgtcttcatagcatgtagacatggaagatgataatgtggat

SEQ ID NO: 52142 - DNA, 412 bp, Oryza sativa
  unsure (1)..(412): unsure at all n locations
acctctaaacaccgcagcatgcaatcttcatcnaatctaacaattgcttagagcaaggattgtatgtctctaacgaacagaaccctacacaggcattaacttagctccaacaaaactaaactctgaaaacacaaccaaatgtggtgttctatagaaaaatgacactgggagatgcacaatgttttcaaggatgaagacgacagcttatcgacctatataccagcaagtatccatattcatattcaccatccatgggcagcccgacagatcaataaaattatcatcgccactaataccttgaagctctaacctcatgaggagctgaaagatgagagttatgttacgcagctcgacccaatcgatcaaactgattcttagcacccgagcatggcagcgcatagctcgctggatc

SEQ ID NO: 52143 - DNA, 293 bp, Oryza sativa
tttcaacggaaagagttaacttatcagtatcaaactcaaggctaaaggtgtgtttagaatccagggtgttaagttttggcgcgtctcatccgatatacggatatatatcttcagtaataagcgtggtcttctaacataacaaattaccttattctcatgtttactcccagacgaattttttaatcctaattaatttgttcttatcaaatgtttactatagcaccacattatcaaatcatggtgcgattatactttaaagattcgtctcgcaatttacacgccatctgtgtaat

SEQ ID NO: 52144 - DNA, 316 bp, Oryza sativa
atctattcgacggagaagacattgatccttgtggcacgcctcgtagaggtctgtgaatacgacacacattctccattttccgttgggcttcctcaccataaatggggtgggaaccactctggtgaaaacttctctatgaagccagctttcaaaagttgcgagctcctcttgaatgggttgtattacggctggggcaaatctccgcaggcattgctttactagcttggcatcggtgcacaccataagttagtgctcaatcacctccctgaggacccccagcatagttcacagatgccaagcgaacacgtcgtcatta

SEQ ID NO: 52145 - DNA, 354 bp, Oryza sativa
ctggaaaaatcatctaaaaatttctggagacttttctcccaaagctcaaattcggctatacacgatgtcttaatcatgactgcggcttgaaaaagggccatatgtactgaaaaacgcatttaatttattttgaacttatcttaattataatcttgaaaaatccattaatctaatttttatatacaaatcctaattatagttataaaattgataaagatcatagtcataaattactcttaatagataactgatgcttacctttctcgccataaataaaatagacggcggaccatctatattgaattggagaatatttatatattctagataaatggcaatgagactctcgattaa

SEQ ID NO: 52146 - DNA, 374 bp, Oryza sativa
  unsure (1)..(374): unsure at all n locations
cgcccggctgagaagaactaccctactcatgatcttgagttagctgcagtggttcatgcgttgaaaaattggcgccattatctgttcggtactcgtacagaggtgtacacctgatcacaacagtttatagtacatctttactctgccagatctatacatgagacaacggagatggatggaattaattaaggattatgacatgggaattcattatctcccgggaaaggctaatgttgtatcagatgctcttatcacgataggctatngcaatgctacngaacgacgaccgttgccattggagttatgtaatgaacttgaaagattaaatttgcgaattgtcagtagagtgttcntatgtatacttataagcaaag

SEQ ID NO: 52147 - DNA, 173 bp, Oryza sativa
attgagatattcgatgccatgcctcaactaaacaacggccggtgagaggtcgagtaaccctgaccggttgccaaaccttgacaactgcctgggagggggtggccgatccagacatggcacagcccaaactttgctgcgtgtctcctcctcacacatcaatctaccagggaggc

SEQ ID NO: 52148 - DNA, 266 bp, Oryza sativa
aactcagcccgatcctttcgagtcttgggttcaccatttcttcttttttcttcaccatagaaatgaacctggtgcctccgtcagctgagatgacaccagtgtttgccgggtgtgctgccgcctgggggtataagacagtggagttcaacatcaccgttcgccgggcctccttttcttgcgacgagacaccagcggctaattctagtcaggctctaaggcttcgcgcgcgctctacaatacagccgcttgtgcgtgcacatggatgg

SEQ ID NO: 52149 - DNA, 276 bp, Oryza sativa
agaagatttccttcatcatgccgttcggagtattctgctacctctagatgacgtttggacttataaccgcaggaaacacctttcagcgtacggtccaaggggcactcaacgaccagctcggttacaatgttgaagactacgtcgacgacattgttgtcaagacatagacaagcgactccctgatcgatgatctccgggaaacgttcgacaacctccgatggtatcggctcatgctcaacccagagaaatgcacattcggagtaccgtcaggcaagc

SEQ ID NO: 52150 - DNA, 325 bp, Oryza sativa
  unsure (1)..(325): unsure at all n locations
tacttcactatcntcacatcatcaaaatagtctctattgtcttaagagataatatcgactaagacctgcaataatgatttatagagagttagaggccaaatagacatagctgatctaaggatctatgtcaaagaatagctactgngatagcaggagcagttgtttgaacttcttcttcaacatggcgactccctatagccgatggagttcggcactcgatgactgttgtacacgataagaatgatgacgaggatgctgtgaaagagacaaatgttacacaaaattggctgagatcaattaatgaaagaattgagaatatcctact

SEQ ID NO: 52151 - DNA, 374 bp, Oryza sativa
  unsure (1)..(374): unsure at all n locations
caacttntcttcaaacgagggttgattgattattgcaaggtgagtacatggaatactctacaagccacacaacaaatatgcaagtgcacaacgataccaaaaaatggcataatatatggctcatttgccaaatcaacatttaacaaacatttgataatttgaaaacactaaaataataaaccatttatattaattaacactgaacagcacacccatgctgcatatgcctaaccaaaactgaacaaccatacccggctgtacagatctatctccaaaccagaaatgtccatttcataccatgagctaagcaaaatattaacaattatatcaatatttattatggtgagaagcgtgagcctaatcacgaaagacat

SEQ ID NO: 52152 - DNA, 274 bp, Oryza sativa
  unsure (1)..(274): unsure at all n locations
gcatgcaacttataanatacacgtattatagttaacattcttttttatatatatcattcaaacgaataagtcattcgataatacatattaatacagaatccatgaggtaaattgcagatttggaggtgaaccttatcaaggcaaattccagttcttgtagaagctactgctaaacactgaatgaaaaagtaaagcccccactatttattcctccaacacaattcatccagtcatccatacaaccgccactatataaagctcggcgcacaggagg

SEQ ID NO: 52153 - DNA, 463 bp, Oryza sativa
  unsure (1)..(463): unsure at all n locations
ttaagcaccgcngctgctacttggctgagctatatacagccttgtattatgcttatctttngnctcattctcagagttcgtagaagatattcaatttcagtttagtgacagtgaaagctttgctgatcgaaagaccacagatgatgctgcatctactaaagaggcaggtgcagcagaacatgatgaatctgattgtgacacagaacaacagggagggaataatacaggtcttggaaataacctggaaaactgttctgattcatcaaggcctgagactatccctcgtcctattccaggaagtgagtgtcactcagatgacaataatctggaggctaaatctctaccaaatctccgctctcacatacatgatcttgataggtctgacagtnttcagctaagccgctcactacagtcgaacggtgaaaataatggggtngagccagtccagagtacaacttctgac

SEQ ID NO: 52154 - DNA, 426 bp, Oryza sativa
  unsure (1)..(426): unsure at all n locations
actatncaatactcagcttcttatgataatntgcctcgtatgttagccaccattgcccatatgaattataatacttactatgacctacatacatttacattggttgatgatcgaacaaagagtgtgctgccaagagcctttntctcattgggtgcttgcatcaatgcttttgtgcattgacgacctgttctatgcatagatggaacttttatgacaggttaataccgaggtcagatattgacagcaattgggtgtgatgggaacaaccaggttgtacctatggcttttgcatttgtatagagtgagaacactgaaagctggtactgattcctagagagagtgcacattgcagtggtgcgtatgatgcccaaccgtttgcctatacatgatcgtcatgcgggtatgttgcggctattgactacttgc

SEQ ID NO: 52155 - DNA, 242 bp, Oryza sativa
acaccacgcaccagtcgtggacatcgcttgctatgagagccatggaatggccgagggaaaaaagtcacaaaagatcgcgcctggaatctttacctcacacctcacgaaatggccggcctcgccgggcgcaaaaaaaaaaccttccacccgtccacgcaataggaacccccggccagccaccgacgaacgacaacggaggcgcccacacccgcccccacggaaaaaaatgcctcaaacaaacg

SEQ ID NO: 52156 - DNA, 237 bp, Oryza sativa
  unsure (1)..(237): unsure at all n locations
acccacttaanacccgctcacaaaaaacagatactataactttttacccacaaacagcgaatgacctcacatcaaagccgttaaccaatgagggacaaggaggaagcacaccaaagtccaattcaaccttatccctcaagagtatcatagcctgagatgccaacaatacataaccaaggtgagcggtaagaaaaatacgcaaaatctcactacaagcgcattcctaaaaagcaacag

SEQ ID NO: 52157 - DNA, 254 bp, Oryza sativa
  unsure (1)..(254): unsure at all n locations
taccattatgtatatccttcacaatagggctccttcctccaaagatacacagcactgtagtattcctgatggacttttcttgtacagctcagtctcatgaataatggagagtctgctgcgcctggaaatccgctctgcttcatttttgtcttgagggagttcttgttngctcaagaatattataaacggttctctccagtcggcttcgatcatgcttacaccttgagtgtccatggcttcaattgtctcttttc

SEQ ID NO: 52158 - DNA, 164 bp, Oryza sativa
  unsure (1)..(164): unsure at all n locations
tcagtttattcaaaagttctgctctagaattgggggatccatcccaaccacatgcatctntgaaacaacaccacgtaaactgagatagcgcacatatgaaacatccaagtgatcttgtatccctcgatttctccacagagtttacagttgggactccccttcca

SEQ ID NO: 52159 - DNA, 96 bp, Oryza sativa
tcacttttggttttaaaatacacacatcaagtaatattattcacactttccactattaaaacacctaatatttatatgaaaaagcatcttacaatc

SEQ ID NO: 52160 - DNA, 272 bp, Oryza sativa
ccaatattggaagcatataatgtgatgaacaaccccaaaattaacactaataattaagtttgtaccgtctgagcttgatgcatcacggcatgcttccatgtggatgacatccgaatagtttttaacaggcatatgtctctgatgcgtggagaatcgtaatgtggagacgcgctgtcaatgataccaaagcatgcttaactaatattgaggtatagatgaacaattcggagatcttctgcaccagtcatgataatggttcgtatacttactcc

SEQ ID NO: 52161 - DNA, 316 bp, Oryza sativa
  unsure (1)..(316): unsure at all n locations
acacnannagaaactcaagctggacatgctatccttctggataatacggaacgcatttattatacattgcggtctggacttctttatctagcatcactctgcgagcaacagccacaaggtcagttatcactgtcctaatgatcccttttatctgcgtcatcaagaacaacgaatactacatcccaatctgtntctgttcaagcgagattggtatagcaatgaacgatttgcactgtgcangggaaatgggcacggcaatattgcatcataagacagggctcatggacttgtcggcagcgtcagtgccaacaaaaac

SEQ ID NO: 52162 - DNA, 136 bp, Oryza sativa
  unsure (1)..(136): unsure at all n locations
acttgccacgccagacgatccatcacagccgcagagtgctgcacgcatcaacacgacgngcttgtgaaagaaacctgtctctggcacctacttcatgacacactccggccagagtgaccgtcctcgcgccagcgcg

SEQ ID NO: 52163 - DNA, 200 bp, Oryza sativa
ccagcttttgggctgacattttgcatactggatttttttgttttcccactcaaacctttggcatctgttagaaaaatgagcggtagagaatcgcttttgattcgaatttagcatgccgaaccattcaggacttacaatgtaaagtaatgaagatgtaaatgtaaggggtccaactttttcatccttatccaagacatttg

SEQ ID NO: 52164 - DNA, 312 bp, Oryza sativa
acttgacaacatgtttatatgttttttccaggggatcaagaatctagcgatgtgtgaaaaatatagaccactgcatggacatttgatactttattacctaaaagtaactcattttgtttttatgttttgacacgaattcctttgggtgccataggacatcatacgattccatgttgggggggtgtctttgctatcaatgacatgctactactgcagactgatataaagcgatttgtactatttgaaaccattggaggaggatgagtggcaccaagactacttcttttgaacgactttaaacgctgtgtgatt

SEQ ID NO: 52165 - DNA, 294 bp, Oryza sativa
  unsure (1)..(294): unsure at all n locations
cccccccccctcctcccctcccttatccccccccccgaagggttatttctccacaaaaaaacnggcttagcagacaaagttacgaattgtttttttaattcaaacatatctggagtcaaaatagatctaaccgatatcaggctaataaaacattatcctagcaactcaattcttaagattgatctcccagatattgggttaattaaaacctaattttaccaactcgaatcttattacccaatattgattcaacacaatctataaaaacttacctactaatgccaacacgaatac

SEQ ID NO: 52166 - DNA, 156 bp, Oryza sativa
ccccagctgcaacttaatacaaattttatccttatttgataatggctttctacccccacacctagtaagggagaatcacttggaccttttttgatatgccgaacagtactgctaaagacttggttgccaatttgctgcttgctcattagtggggtt

SEQ ID NO: 52167 - DNA, 346 bp, Oryza sativa
  unsure (1)..(346): unsure at all n locations
tacccccccccgcgacggggtttgattgatacattgcaacacggacacatanaaacncaacttgcccacccattacatctttaatggaggatggtatatctatgtttaaccacaccggcttaaaaaatgcatatgccgctacctactggatatatttataatggcttataaggtgcatgaataatttgggagggtctagacctatattattcttaaataatctttaagaagggtctagagagcatgtctagaacactgaaggagatatcttaactgtgttatggattaatagaatacactaacagatatgggtaaaagtacatataggtctctaatgaagtttgga

SEQ ID NO: 52168 - DNA, 109 bp, Oryza sativa
attaaaagactcgcatttgcttacctcgagtagttaatataacatcccgggaacaggtagtctacatgaaggtggatctccgtgcaacttgactataccaaatggcaac

SEQ ID NO: 52169 - DNA, 323 bp, Oryza sativa
  unsure (1)..(323): unsure at all n locations
tatctgctgatgtcctggaattaatggcacaatcacataggcaaaagagctggtgttggcacatgattaatattattttatacacacnaaaatataatatttttccatgtaattatttcaaagcctagttntgcataaaatggcacataaaatcggacattttccatanatttagcaaatggtnttctctanaaagttatatattcctatgcgcatggcacagaataacaccacacgacatatgtccggttgatcccagtcactgtggcagtctgccagcaggaaataacttattacaatgtggttntactctgcccaatcat

SEQ ID NO: 52170 - DNA, 390 bp, Oryza sativa
ctaacgaccagacatataatagatatgagtatttgaagaataatttactatggcacatattcgctattacggtctaaggcgtgagagatactttgcccttggttagttcttaactgtttctttaaacctttaactctttcatcacatatatactactcttaattaccttgatttgaaaaacatttaattccatttgtatccaatcatatattctactcttaattactttgtattcgagacaatttgcaatctgttcctatatttgagggtttcgtctacggataaatatgaatataaacagatacgacgatagagacattatcacgccagattcactctgtgtttcattatttattaatctgatggctactaactcgaataagcaacgca

SEQ ID NO: 52171 - DNA, 382 bp, Oryza sativa
  unsure (1)..(382): unsure at all n locations
gaacaacaggttccaaaagaaataaaagagagttatttaattaacatgcttaatttatttccttgcagcaagagtaaataanacaatattgtaaaactcttgctggtaaatgagccattagtgcagtaatagatgtacagtactaataacactggaataaatcttgatgagaaccactaaagaagatatgaagtgcatgtgctatagtttggttaataaaagagaggggggaaacagtctactttcaatatttaagggtttatggaacatttgatacctaggtaagagtctgtacacttgtacgccgatttatcaaattcaacctacatggtgacctctcagatagcgagcccatacaatgtataatcatttacttatatac

SEQ ID NO: 52172 - DNA, 419 bp, Oryza sativa
  unsure (1)..(419): unsure at all n locations
ctggagtgtgtgtgaatgaatgagaatgggaactcttttattgtctgtaatggcggntataactatgtgaaatgtcngaattgcccggcaaccgccatcaagagagcatctggagcgtccataccaaaacctggatccaatggtgatcaccagggctgaacctggattgggccacatggcttctagatttggtctgggcctctttctcactctgccctatccatttcctctgtagttgggccaatttctgatgttatgatggagtttaagagcccaactcttgtatggatcagaatcttattcactttagtctaaatgtctccaactctagtggtttaatacctgcattcanatatgcaccaacactcgtggaatatgtcagacttaagccctaccactatgttggatgtatcattatc

SEQ ID NO: 52173 - DNA, 334 bp, Oryza sativa
  unsure (1)..(334): unsure at all n locations
aagcaacatcagcatcacttcgatctgcaggggcaaatcgcaccaccggctgtggcctgtcacaccaccaacttcccaatcccggccggtggaggccgatcgatcgacaaacgtggcagatcgatccccgcaagtgggcatcgcattcccaatccgtaaagccgggaggtcaagggttgcaagctgagggagtgaggggactgtgactgngtaattaatgcgcgcacggtcgccttccttgctcgcgtnctncctatataggtatncacctacgtgtagacaaaaaaatgtgcatatactnttaatagtattatacctacatgtaaataacctc

SEQ ID NO: 52174 - DNA, 427 bp, Oryza sativa
  unsure (1)..(427): unsure at all n locations
cttcttatgatgatataatttgacctttacgcaacctaattcgctcgtcttgcacaagataatcaaagatcttatcatatttggccacattacaactatacttaatcctactttgccgatctttacgaggagtcggtcttaaattataacacacaaaaggcttgtttgtgttagctccatgaccacttggtgtctcgccccgagactcactagctatntcccgacgtatttgngcataaaccctcgtccggaatcagccaggcacacaactgacaattatatacaatcatcatataacatcgtcgtcttcagaaaaagaaacacacaaattatggctacgaactcgctcctccatagactactgggataacaacgtctctttggacattttactgagtgatattatgcaggaccatgcactcacagc

SEQ ID NO: 52175 - DNA, 326 bp, Oryza sativa
  unsure (1)..(326): unsure at all n locations
tctctggcctgancttnctattttatttcataacttgatgtttttgctgatgagacgataccaagagaaccatctggtgcttcatgccactgatgaacatgacccaactgatttttctttttcatttttctcgctctaaggttgctgcaactatccttttatatttatctcgctctaaggttgctgtaacaatgatgcatttggaagcagggtgactaaattcattgtgcaaaactttcaatccatatgtgaaactgacagacccaatgaagtactttgtgcaacacgctgcacgcctgtcgtatactgctgcatggagctcggac

SEQ ID NO: 52176 - DNA, 159 bp, Oryza sativa
  unsure (1)..(159): unsure at all n locations
tgtgggatgggagtattttagatagggatgtactttcttatgggttattatattctgcattgcgggcaaaagttaagatttgggctcgacatgcatgtgtaggaccaaattactatccactaaantatttttttgttgttctgcatgaaggggttcgga

SEQ ID NO: 52177 - DNA, 359 bp, Oryza sativa
  unsure (1)..(359): unsure at all n locations
tgtctgattaccttagatcgccagtgcagagcatactatgtgtggaacagatgaacactatctttggggaagagccttctatagtatgagcttgccaatccagcaacatagtattgaggcagtgtagttgcttgtctgttttgatctttagcaacaaaattatcaatctgttctaaagaattaaacaggtgattaaaatcattgctaggtagatcattcacgaaaaactgaacatccacggngcactgaccgatcctgttataatattcagcgatctctctaatcatggtagagagagacaaacattagggtatttggccccgaggagcatcctatgtcagctacaagtatcatcattg

SEQ ID NO: 52178 - DNA, 350 bp, Oryza sativa
  unsure (1)..(350): unsure at all n locations
aactgagcttatagtcttacagcacactgcatggctgcagaacacgtaaacatggatgtcgcttccacacatgcatatgaatattctcaatatgtaggagtaaatgctggctcagcatgactaatatgtttacatcataatcctgagtaatacttcttatatggtttagcatgatgctctagtattagccgcacttatattcttcatctatcattgtcactaactagcacttcagcaagagaccagtccatatcagctgcatatgtctgtcagatcttgtagaatatgagtatgtgcattggatgattgangatgcacaatggagttacacctaccctgcagccattttt

SEQ ID NO: 52179 - DNA, 180 bp, Oryza sativa
tttcgtctactgaactcaacacatggccaactggaaaagaggctatgatctccactgcaaaaagctatgacccgtgaccctaacaccttatactatgcaatgatatgactcacgacacacataatcaccttatactatcttcaatacaatgatgccaagaaaaatccagtgggcatcaca

SEQ ID NO: 52180 - DNA, 189 bp, Oryza sativa
  unsure (1)..(189): unsure at all n locations
atatacttccaatagtactacacctatgtatgaagtcttattttcanattcattatattttagccataagaacagaagacaacattcggacagacttttacttcttaaattggccaatattggtttctacggcganaatataatgaatctgaatatgagactctacatatacgtgtagtactattagga

SEQ ID NO: 52181 - DNA, 200 bp, Oryza sativa
gaaaaggagtcttttataactaatataactcaggtgtagaattttggattgtgcactacgcctaaaacatgatcattactgctacttgcactcacgcataaacatgacatactgctacttgttgaagcaatgtaaaggatgacatcttcatacaataagatgaaagaaataaatattatgatggctatgacattctatac

SEQ ID NO: 52182 - DNA, 392 bp, Oryza sativa
  unsure (1)..(392): unsure at all n locations
gcaccgcngctgcagcttaaccatccttaagtggtttagaccttgtttttggttgagttgtggtagtctttgagtgagccttccatagagtccaagttcatcaaaaaaggactcccgagcgaacaggtatagttggtttactctgtgctcttcngaaattctgaaaaattatcggagactccaaatattttctggaagactctgaacatctccgacattcgaaaatggctgcgaatctgagattaaactttctgacatatccaaanatacttttctgaactctcgaagaatttagtcttggcctccaacggctagtttntgaggagctcaggtatantaaactctccacccctcctttgagtggccgctgttcttgggaagtattatacaca

SEQ ID NO: 52183 - DNA, 245 bp, Oryza sativa
aatcccttgtctctcactcccttgtgaatgacctcgcctagtttatcctaggaggagattctgctttgatcatctcgccttattctctccgtctgactctcatacgggggtctcacgtcctcctcgtagagaggactactacacaatatgacgcgtacaatctccttgatcgttctataccacaataattattcattctgtgacttattccaccattgacaactaccacatgcatacacatgtgc

SEQ ID NO: 52184 - DNA, 261 bp, Oryza sativa
ttctcactgcactaccaattattgatcttcttattcaagttactataatctccccttgtgaagcagctctgactttcttagatactacttttgcttatgttggcagtggagaatatattagggcaacattgacaatcatgaatcatctgagcaaaatatctgggaggggtaacataatctatcttaattaaggatctatgctagaagtgccctactgaatatatgtgtcacagttacgaaacgtcactgtcattaattata

SEQ ID NO: 52185 - DNA, 342 bp, Oryza sativa
  unsure (1)..(342): unsure at all n locations
atgatcttcaacagaacaacaccaaaactattaacatctgacttgagagtcagctggccagtcctagcatactcatgagcacagtatccatatggtcccatcactcctattgaaacatgggaattattcccaaatgggccgagctttggccattcaaagtcaaacaattttgggtgatattcctcnccaagccagatatttgaacacttcaaatcttcggatatgactggaggattgggtttttcatgcaaatattcaaaccctctgtgcaccagcagctatcttcatccttgatttcaatcaaccgtgactgcctggtgaggatctggtaaacaaattagg

SEQ ID NO: 52186 - DNA, 325 bp, Oryza sativa
tgcaaccacagtataggacgcaacaacactgacactatctttatagatgtcaagaacagcaagggccgagaagatgtaccttggtgaggaacaaaactgaccagcagcggatgtcttcatgacgacgacctcgcatcaagggatttccccgtggtcaccagcgagcgacctttcacgcggctgctgcgcctgaaggggggaacaccatggggatggacgcgacagtgaacccaaaatgctgtcccgcgcacgagcgccccccgattgcaacctgtgattcctaccgcgaacgtgaggtgagatgcattcttccagatcgcgaaat

SEQ ID NO: 52187 - DNA, 300 bp, Oryza sativa
  unsure (1)..(300): unsure at all n locations
acacnacacatatcactgggagcggcataccactcagagcattatgtattatttccgcctcaggcattgggtctggatacaatatcttcttatatgccaaccgatagctgctcttaaattctgcctgctaactgcatttgagttaagctattatcatttaggattaactgcagtccagacatgcgtacatgcacacctcataacacataatgataaatatgatgtgtcacacgcgggcccgtcgtatatgtgacaagagctcacgacgtttaatggcacgtgacttcaagtatactaaac

SEQ ID NO: 52188 - DNA, 96 bp, Oryza sativa
tctttctactcgactttgattcacagaatatgatcatagtgatatacagctaacaatgcgcattactgtgatgttatgttgctcagtacagaagac

SEQ ID NO: 52189 - DNA, 337 bp, Oryza sativa
tatttagacccaggtagttatatcaagatgatacaaacattctgttgttatcccggcctctgccttaaatgcacacagcccgaaaagaagaaagaaacaactagaacatctcccaagcataaaaggttgacagaaacatatatcttagtggctatcaatccgtaagctaggtcgccacccatgctcctgggtaaaaaaactcctgtgccacctggtccaactgtcgaaataccaccgtatatcttagtggctatcaatccgtacactataccgctacccatgctcttgggtaaaaatctcctgtgccacctggtccaaacatcgagataccactata

SEQ ID NO: 52190 - DNA, 93 bp, Oryza sativa
ctgaaaaattgtctcaaaaaacaatactcctataagcgccgcatcaaaaccatcatccgccttttaacgacgccgctatctaaaaaacgagat

SEQ ID NO: 52191 - DNA, 197 bp, Oryza sativa
gcacgcgctcactcacttttggtaaccacttttttttactagatactcgcccgcctgtactgcctggactgtgtgatggccactgcctatgaaggaacgagtgaccatcctgctgaatggctggggaagagtatatatactaagtacccctgtatataagttgctgatatgccaccaggctagacactaagatactg

SEQ ID NO: 52192 - DNA, 238 bp, Oryza sativa
caaaacacaaaccgaacttcttatattcttcaggacgcgtcggagctcaagcactgtggaatcaactcttcttttttctcttttattttattgataattttttcttttttcagaacacgaaaataggcacacctgcaagttacagctcaatcggagtagaaatgtggcctatggatttttctgaaccactataacaacgtgcaggaacttgtgagctcgaacagacaatttcgcaagc

SEQ ID NO: 52193 - DNA, 158 bp, Oryza sativa
ttttcatttttttgtcccctttactcaggattgaaagccccggcccggggaatcaggggatcttttaaaacggacggtgtatacaccttttgaaataaatccctcttgacatttcaaatccgggcaaaatgcctattatgatacctgtataaattaag

SEQ ID NO: 52194 - DNA, 262 bp, Oryza sativa
aactttcgttcattataaagagaaagccccactgttcgcctcctgtgtgcgggcctgcggcgcctcaactgaaatgctttactaggggaaggtgttccgattatcacagaccactggtgcaacagcatcttttactggtttttttttacccatattttatttaaagattatcctataagttatcacctcagtttacactttaagtgatagagcaaacttatatgtcaaagttttttttccattcaaattgaattgagtcaat

SEQ ID NO: 52195 - DNA, 270 bp, Oryza sativa
  unsure (1)..(270): unsure at all n locations
tgactagtggttaagtaaagcacataatgtttacctttcgctcgtatacaaaattcaaaatacccatagtacaccccgcacataaaataaacaagctattaccagagttcacaatttcataacactattaatgaatacgattatgagttctcgatctctgaagatatatcatgatttcaaaataattagggttctcgttctctattaatgctatccgagaaacaggaaccagggtcccataagcaacaacttggngcatacttgccacct

SEQ ID NO: 52196 - DNA, 274 bp, Oryza sativa
  unsure (1)..(274): unsure at all n locations
caagatgttgctagtgctgcgattgacagaagagaagtgatggttggtatgctctgtaccgntattngaggatgatttcggtctgacaggcgtggttttctgtttccaagacattcagaggactaaacaacccaccaaatgatggttgctaataagaattgtttccaatcatacatcctggttctcattggtctattctccttttggatgagatatgtaaaacacacatgattcgtattccgtgtacagtaaaatctccccaaatatgggtaat

SEQ ID NO: 52197 - DNA, 470 bp, Oryza sativa
  unsure (1)..(470): unsure at all n locations
ctcaagcttttcacactatctctccttgtgggtgcacccgttccaatcctatattaacatatgaggagatcctcgttccatctcttattcaggaatatatgaactacataaatagctaatcaactgcgtaaatatgccctagatatccttaccgatacacttgcatctaaccgtccaccgaccgatctcattttctcttcaaacccttaaccatatcggtgcttctacctttgtctcctttggtgaaccagttcaaatcctataacaataatgaagtgaaagtagagaagaaaggagacatgatctttgattttgttccctcataacagaccgaatcaatcgcttaatcaaccgattatccatgactcacgcctntttatctgcatcaataccaatacgtacaacaataccaatcaatggagcctcagattcaattcatatgaaatggccatatgttactacgtaattac

SEQ ID NO: 52198 - DNA, 101 bp, Oryza sativa
ctggctcactggaacaagtctcctggtttcctataagttctcagggccgattaaactaccctgggtattcccttatgatgtgaaataacatggcaaagtaa

SEQ ID NO: 52199 - DNA, 282 bp, Oryza sativa
cggtgaaacccaggccgggcttgggtggaccgacaacaatggatataccccctcctgagggcgttgttgtgctgtctcacccctcaagggaggttgcccggcgaaagcccaatcttggctcctttgagtcctgaccgacgacggcggcggttctcccgcgcttctcttcttgaagacgtcgtttatggcattccctagggggcagtctcgtctgagccctttgtggtctaggggcggcggcacgcttaacggggccggccggtgtagccttctctgggcttg

SEQ ID NO: 52200 - DNA, 197 bp, Oryza sativa
aactggtttctcattacgtcagcaattacattggaccaccgtcgctgctgagctgccccttgtgactgttgatgcatgggctcgaactgaccgtagtgagatgtgaactgaggttgagccaatccctctggctgatattgtgcttgcggggaaggaggctgatattgataactcacagtacccccctaggtactatt

SEQ ID NO: 52201 - DNA, 306 bp, Oryza sativa
actcagcttcgcgagttacaaacacaaaccgcttttttttctaatgacgcgctgagctcaacctatggaatcactttctttttttctttatttttttgagaatttttttcttttttcagaacaccaaaataggcacaccctccagtttcagctcaatcggagtagatatgtggcctattggatttttctgaaaccactataaacaacgtgcatgaacttgtgagctcgaacagacaattttgcagccaaatttggaattttgattcccaacccctaaaggggagaacagagtaaattttttctcta

SEQ ID NO: 52202 - DNA, 263 bp, Oryza sativa
atgttgtcatcaatcaccaacagggggagattgtaattgcattaatcctccctaatgggtgttggtgactaatgacaaatgtgggtaacggactaatgagtttattgatctaccttcatgtgcattagtcccaagcgcggaagatggatgcttggagaccccccccctcaaaagtatttaatcaaagcggaccggaactcgagaagtgcattggatacgttatttaatttgccattgagtttctaagaaaaacccgtacttat

SEQ ID NO: 52203 - DNA, 285 bp, Oryza sativa
  unsure (1)..(285): unsure at all n locations
aattcccagttgaatggaacagtatgccatcttattttctctcactctttaatcaattattggtcatagaagagaagtacaaagtcaaattttcagccggcaagtaggaggtcggtcagttctgcttggcggccggaactttccttgaacaaaatttgaattttcaactttaaatttaaaggttaatttgaggtttttatcatcgaanattattcttcatcccttttttttatactaagtaagaacacgcacgtatantaaaagtntattcatanattatattcc

SEQ ID NO: 52204 - DNA, 262 bp, Oryza sativa
  unsure (1)..(262): unsure at all n locations
aatctccatgtcggatttcacatcctccgcggatgaagcgaaagctccatcgaacaatttggtcatgatatacttctcaagcccctaatcgcgcataacaagagagacgcaagatgttcaattgaatcagaaagcaaatcaagcgcaagggttagggcggngtcacctcgagcgcgttgtcgatttcctgattggtggcattggcccaaagcgggtggtccctgatggcggtctccatctccgcgaagaaggtctggaccct

SEQ ID NO: 52205 - DNA, 261 bp, Oryza sativa
atcatttagtcgtttagaacacatgcttatagaagacaaagagttgtaattgctaaacgaaaaaataaacgaggccgaagtgaagctaaacaagctattgaaataaatataagaaccaacatgtctaagaaagctaacaatcttttttgtttgcatgaaagctaacatctaaacatgtactgcaagtaaacaattagcaagcaataaaaaagtaagctaacacgctaaacatgactacaagtcaaagctaacatgcctagt

SEQ ID NO: 52206 - DNA, 291 bp, Oryza sativa
  unsure (1)..(291): unsure at all n locations
attctctntcatattatctggttgcgtattaggtangcagagtcaccacaagaggaagaacttttctcaatgggataaacacatggcatgatttctcatattttttccaatccgtgataagtagtgtgatggcnattcacangtattgaaaatataatggttttgtttgaagccaatggtaatgcacatgtggcaaaattcttcacaatggaacgaaatttgacattantttntntagaataataaaataatcttacctttctcacagaatacagctaatattaaaaaaag

SEQ ID NO: 52207 - DNA, 412 bp, Oryza sativa
  unsure (1)..(412): unsure at all n locations
gacctatagaaactcaagcttctcgagttntcaatataagaacaaggacatggttatttcattataatataattgtactatatgcatatttaacatacttntaaaggaattctttaatgttatgaagcagtccctactgatacacatctctaccccgtattactgtggattatgatagtcttgtttcttaacgctacaaatggaatattggcgtattgtgtgttttaaaaaactgaactagtgtgagagaatcagagaattacccaagcacatgaggtncattattgttgggcccgaacgtgactctctctcccgtgcagcccatatagttgagtccgaatgctttcatttcatgtatctcatcttgatggcaatttgaatcgtgtcttaaatcatatatcaatataacacg

SEQ ID NO: 52208 - DNA, 185 bp, Oryza sativa
  unsure (1)..(185): unsure at all n locations
gatgtgccctggaagcatggactctctcagtacagcttccaatacatgacacggaaagtctccaacgaagagaaggacgctcgttngaaggccgaacttaaagttgaggtcattcaagaactataagctancatgaatgcaatggtggaagaaagggttaacaaagtgctctgcgacatgaatat

SEQ ID NO: 52209 - DNA, 204 bp, Oryza sativa
  unsure (1)..(204): unsure at all n locations
ttttctgtggaagtcaagtggaacctggcccacccattaatntgatcattccaactatgagagatgatgtgatattggacaagggtatcttcattgcggaacacttgtttcattctctttgagagacgcattngatcctgaattccttctagcctacatttgcaaagtgtagcagagatgctgccatccacaataaatatagtg

SEQ ID NO: 52210 - DNA, 95 bp, Oryza sativa
tgaaaaaacttttttctactattcgttgttgggccattagaacctttatcaacctctggctgctggcatgacacatgattctaatcagactgtca

SEQ ID NO: 52211 - DNA, 241 bp, Oryza sativa
  unsure (1)..(241): unsure at all n locations
cctgggatgagaatggtgtgtttatttacactactctgaaccatatcaagtattggcttcccaatggagatagtgggatcattaaaacccttgacgttcctatttacataacaagggctattgggaataatattttctgcctagatcgtgatggaaagaacaagctgatcacagntgatgcttctgaatacatattcaagctgtgccttctactgaaacgatacgatcatgtgatgagtat

SEQ ID NO: 52212 - DNA, 101 bp, Oryza sativa
ccaggctggtggcctgagggcagggggagcaacatggcgcagagaggagcgaacggatcacgggatgcggcgcctggatcgaggggggaggggggcgcccc

SEQ ID NO: 52213 - DNA, 250 bp, Oryza sativa
atattctaatgtgatgtttgcaaagttaaacacaacatcccatcgtgtgtgaaagcctgacatcttctccttttctgtagctcgaatgtctgtaagatctttagctctcacaggattgatctgaaccacataagaggtatttagtttgtgtattagaagagaaacctaattcatctgataacatatatcaacttacatcaagatcactgtcacgtgagtgctcttcaacaatcatgccttcgtacgcctt

SEQ ID NO: 52214 - DNA, 289 bp, Oryza sativa
tattcttatcatcgccgagcatcgattttataatcttatgtgcgaagaactccttttccgcagcctcttcaccgtcaatcttaccggcctcttgaaagcaaccacgcaccatgacagcatcaccatccccggtgatcaactgctcctcaattcccacctcacacactgccttcacatgcatcttgaacacactatcacccctcaatcgccatggcgtagagccaatcacctccacctcgcaacccttgcagaccagaggcttgccctccacatcggcgatctcgagcac

SEQ ID NO: 52215 - DNA, 249 bp, Oryza sativa
  unsure (1)..(249): unsure at all n locations
aattaatgcatctgttcaagatacttgcacaaacaagacattatttatttgacccacaaagaaattaatagagaaggagcaacataactatnttttccttttttactaaatttcaattttctttttgaccgaacataatttcagaaaccaatcgcttttcagattttttttgaaatttattaaactgggcttcacttggagtaaacaaagaatatttttgacagacttgcggaacaaactaacaaagtt

SEQ ID NO: 52216 - DNA, 413 bp, Oryza sativa
ctaggctctcataagcgttatggctgagaactttttttaactctgaagcaaccttgtcctggatacaattatgcgaattgttagcttcgcactctccataatttcagtgagaggttgtaacaagatctaaggcgcaacctggattgctacacagaagtctggtgcatatatcaatagaattaggacgtaccttggaaatacgacatctgagaatggaatagactcggatcggttatgcactgaagcatctgtatagacaaatctgtgatgagaacttattgaaggttatataatatcaacaatgattgaaatgaaactagttgccaccctgacattgctccaccacggaaaggtggatagcctatcacgagctcgatgagaatcgctgcgattctccacatatctacctgctc

SEQ ID NO: 52217 - DNA, 289 bp, Oryza sativa
tgtatatacagctctactggatggtcacttaaatgagacccttcagcaatgttgggaggggattgcaacgatagaaggagctttcttcttatagcgaatcataacaagtgattaagatccatgaaagacatgcaaattgaacctgatgttcccagttacaccgtgtcgaatgatggagagtgcaaagctgaatatcctaatggaagccccggtaccttttgatgacatgtggctaaaggacctactgctgatgctgatgcttacactagccttattgatggtacttgta

SEQ ID NO: 52218 - DNA, 209 bp, Oryza sativa
cgagaatgggtcttgtttgctgctaaccctggctagatcgcccaacgggaaacacaatggtaatgctcaacgtccacatcttcatcatccacgagatatacggactactgtacgcctctcatatgagggacatgaatatgatcttaccatggtagaactctaaattgtctagattcgatcgtaagtctgacactgccccttatgttaat

SEQ ID NO: 52219 - DNA, 58 bp, Oryza sativa
tattctcactttcacatcacagcacgggcgtgatgctgcttgcaaccataaaataacc

SEQ ID NO: 52220 - DNA, 187 bp, Oryza sativa
cacagatgtccggcactttgtatagctctgcatgcttgaccaaagctctacatatgtcagctaaatctatagtgtatgattggcgatcacagtatttataatatacatacagtcgagcagataatgacacttgagctgctgatgacatttgattgagggagaattatcaaatggtgacatatgatta

SEQ ID NO: 52221 - DNA, 406 bp, Oryza sativa
acatgataaaccggttttgtatccatccctgaattaggtattctcttgccttctgacagagtgatccaaacatgattatacggtctgtatccatccccgaataggtactgtcaatacagtgaatacactattgtcatgtgtatgcattctgaatataaaatagcccacaatgtcatgtgtgaccaagatttttatgaagaacacatgagcaaatcatcgtgcattatacagtggagtacacttaatcctgcatttattttgtgtgctaaggagacaaggagacgatggagttggaaggcatgagatttgcgctgcaccaacccacatggatgaatgattcaatgtggacaaagactgctgctgagcctcttgagtgagtaccatcatgggcactcatggcagtaat

SEQ ID NO: 52222 - DNA, 314 bp, Oryza sativa
aaattgatctcatagcgcaacttctagagtgcaacgccgagctggatttggtaaaacaataaatagtcaatctcccaaatgctgtcgaagaacagaagtctatactgagatctgctattaagaatgtggctgatatgaccaagtccatcaaggtcatttctggaaccgatgccctagacatccaagctattgaagaagtagatcaaattagagaatgggctgtgtcgctatttagcgttacttatctgaatgattatattcgtaataggacttagaaaattttgtgattggctagagacgttgtactccttttg

SEQ ID NO: 52223 - DNA, 226 bp, Oryza sativa
  unsure (1)..(226): unsure at all n locations
acgaantttcgagaaaacccgcgaacgacgaagaaccggttttctatctatacgcaatcaatcgaaagagtagatgatagaccgagaaaacgaccccatccagactaacatatagagccattcaatagatctcaactctacggaacaactgaagtggaacggggtcaatcggacgaacggttgatgagatatggaatctctaacaatattaggaatttctggctaa

SEQ ID NO: 52224 - DNA, 318 bp, Oryza sativa
  unsure (1)..(318): unsure at all n locations
atgtcgtctttcacgaacattatgcattgaaactgatataaactgactacattctttgtttacatcagacgacatctttctaaaagattattcgtttatgttgtcattgcactagtcatacatgctagactacaatcaggcctcacattttgacatccaactattcgaaatcaattgtnttgcttgtatatcaatgaagcctattctctccaaaataaaataggcataaatatgctgacaatgagcttctgctaactctgacataataaggagttgcaacgatgatggggatatggtccttgagctcatgcatattgc

SEQ ID NO: 52225 - DNA, 407 bp, Oryza sativa
cgctgacctcacttatatatgtacaaaagagatagcgctctcctatcaataattagagcttaacgcggtggcgcgaagtttgtgcatatatgtggactacgcatgtttgacactacagcaatatttatgatgttgcttctatatggtgacatttctttttttacactttactagccagtgtttattttttaattcttggtaatcatatataggacagcattatactacacccccttccagctaaacagctgattctttgaatgagatctcacaaatatctaagttgtaattatacaaccattataagttccaataataaactcaattccgtatatgagatataaaattgagacacattggagaaaaagatgatagtggcttctctctatgatacgtctatttatatc

SEQ ID NO: 52226 - DNA, 121 bp, Oryza sativa
acagcagctagataagcaaggcggaaggcacggaatggaatgaggccacaacaaaaggcataggggtgggttcggtgaaagcatggccaggaaaatagggagaaaaactattcacagaaag

SEQ ID NO: 52227 - DNA, 61 bp, Oryza sativa
  unsure (1)..(61): unsure at all n locations
ccccccccccgcncccgccaacaggaccgagcggaatttaattttcgatccaccaccgcgg

SEQ ID NO: 52228 - DNA, 171 bp, Oryza sativa
tggaagcacgccaaggtgcactatgtgtcaagcatgagctcatggaatacgttgcagcgcgctagggagattaggcctttcacatttcaggagatgagatctacactctgtgccgtttaaaaacgaagaggttcttatttgaccggccttacctcttttaaaaaggccact

SEQ ID NO: 52229 - DNA, 477 bp, Oryza sativa
  unsure (1)..(477): unsure at all n locations
tcttcccagaacgaccgagttcaataaagatgcggcatggcatgttatctatttattatgaatagtttgttagcttccttttccctttatgaagatgtgattagtgtcctactacgactagtatctctccatgggtataaatatgtacacacggtgtcattgtaaaatatctccacgatcaatacaactactctcggcatatcgccacattttaccttttatactttattttattgtttggcgggacttggcacctgacgcggngctgcatcggttctcgatcttcaacgaacgggtaagtccaatgttccgtcggcccaagcaattgtattatctacgtcggcgttgttcaacgctgcatttgtacttttgatcttcttggattgcttccgtatgaatgatatatgagtctcgctatctatcatatatctcagttaatctagcctacgatctcaattagcttatcgggtgtctctc

SEQ ID NO: 52230 - DNA, 241 bp, Oryza sativa
aaacaatgcattaaaataaataccttagtagcatatatctgaattatatcgcataatataaaagcaccacctgcatttttcatgccaaattattcatgagggccaatcgatacctctatgcaagtacattagcatgaactggccacacgatttgtatcaaatgtggcccatagcatatgattgggatctgtccggcatatacctgacactattcaaagcttacgaaagctctcgggaatgc

SEQ ID NO: 52231 - DNA, 328 bp, Oryza sativa
ccaaaatcgtgaacgcgggaaggagaacgtcagcgaatggcgccagagaccaaaaagggcaatgctgctacgattatgctcgtgagcaaagctgggaaggtcctatgggcgccaaccacatttgactaagcatgccattggcggaggacaatgagttaaccgtgatgggaattggttgccgagagctacataagcaatacatggagctaagcaacgccaacgggatatgatggagtaatcatattggacatcacgacaccagccgatctatcactactgctaataacataggcttgagaccacttcgacctttcaggacccgaagttg

SEQ ID NO: 52232 - DNA, 267 bp, Oryza sativa
tccttctgaatgctggttgaagcggataactgtcttctgctttgtatcgccctcctgaggatgaatgcccttccctctgcctggagtaggtcggggagagacacaacttcttccatctatgacaactctttgctgaggctgtcagtgcagagaatggatggtgctgaacgtattattgctatgatttatcgcagaatcaggtgcagcatgaggagcatcagtgcttgggaggatattgactatgttgaggttggagctgactatctg

SEQ ID NO: 52233 - DNA, 129 bp, Oryza sativa
aaacgagagaagaccaacaagacaaacagaagcgagactgcaccgaaatacccgaagggacaaacgaggaaaaacgcagaaaaaaagcccgagagcgggggggaggaggaaccacgaagacccccacgc

SEQ ID NO: 52234 - DNA, 349 bp, Oryza sativa
tataccgaacacacacttatcggtgttagtttttatgtcggcggagcggagactctcaacagtttccgctagatcttggagtaacattttctggttgcgcgtctttactaccaagtcatcgacataagcctcaacattacgtcctaattggttacccaaagaaagtttagtagtacgttgaatagtatggacctgctattctttaacccgaaaggcatcgtcgtatacaataggttctatgggggtatgaacgcagtttttccttatcttccttccatcgaatctgatgtaccaagtatgatctaaaacacaatgtcgaccccgagggagcgaaatctgattagcaaga

SEQ ID NO: 52235 - DNA, 227 bp, Oryza sativa
tccatcaaattgcggcactgtgtcataaacctctatttatgtcttttcatgtgtgagactaacatatcgccgaatcaatagtcaacggctcgcgctcattaaatggatctgattggtgaaactgcgtgacaggtgcatcctctatcaaaatgttcagcaaccaatctttcatgcacaaatcgtacatataaaaatccaccacgacttatataaacacccctataacg

SEQ ID NO: 52236 - DNA, 306 bp, Oryza sativa
gaaaccaacaaaaaccaccaattcctctccaccttacaacctgcttctttcttccaaaacttcttttgcagatttcacgaaaaaacatacctaataagatttatcaatggaattctggggaagcactcccatgaaagctaactaaaaaaatgggaaagaagtgaaatgcccctgaacaaagaatatacgaatctgtaaatcaacgcgctctaaaataatctggaaaacataggcacgaaaaatgttgcgggagaccggagacgctgtgaaaacaacacgcggggccagacagccgatactagcaag

SEQ ID NO: 52237 - DNA, 262 bp, Oryza sativa
gccactatatcgggcagtttttttttttctcctcctgcggctttattgtaccgtttttggcaaagactactcgtggatgtttatcactcttaatcagacctctccaactgctataccagattattggattgctgctgaactgaatacctagtgctacccccaaagcctatggataaatgatttctgggaaatctataatactagggtgcccccgtggtgcacaatgattggtattcaaatattcagatatgttataattctc

SEQ ID NO: 52238 - DNA, 197 bp, Oryza sativa
ctactacaagcgcatacgtagaacaatactaaccctcctttcttctcgaaattatcaccctacttgtggttctgagctttccataaggacatggcaaagatttatttcataaaacgatgtctccttatatttctaccgatataatatgtgctctctattatatatgctgaagaacatattcttggcctcttcaacat

SEQ ID NO: 52239 - DNA, 392 bp, Oryza sativa
cacttgtctcttcactcggttggcggaccacctacgtagctagaacctctgcggagacactaatatgaaatcatacatctatgacgctttgcttatgaccgtgcataatctcgccattgaatacaccataatctatgacgaaacttcactgtttcgtcatggatcactcatggcggagggtagacgtctgaactcctgtgcagaattataagcgctcattaaccgaagatagtttgtccacaatgggcgcccattcatgtaacactttgacgctctttattatacaatgctgaatatatttgctgttgaaggaatctatattcgctgtggcccccttgatatgggtaattagtgcaatggacctcttgatactgcaatcaaatgtatggccc

SEQ ID NO: 52240 - DNA, 150 bp, Oryza sativa
aactcagcttcttccaagcataccggttgtcagatgtatatgacgatctctatacagaggaccttatatgaatcgtatgatgaagtaccacatgagtggacatatacgaaaggaaaccaaatctgccgaatcctcatgttatgaacttct

SEQ ID NO: 52241 - DNA, 403 bp, Oryza sativa
  unsure (1)..(403): unsure at all n locations
ngctggtaatacgataggggcggctggaaattttttccaaatgacnnagcgngaatatgggttcaatcattacatgttgggagtgtatacatgaaacaagctaggtttacatcctacgccagcaagataggaaaaacaccacaganaaaacacagaacataaagtttcagtttttccaatcctgcatgacttgaaaatgcatgaaataagaagagactcccgttgattgcacanaaagaaattaagccaaaagtaagttttacaagaggtctaatctctaatctcttactcgtattcctatagatcatagaaatgcaattatgtagaaaattctctatcttcttcctatgaatcaaagggctcataggacaaacaagatccttagaagacattgaatcctcta

SEQ ID NO: 52242 - DNA, 156 bp, Oryza sativa
gaacccgaaaaatagcgattccaccaaaagaacctacggccttccctaaaaaaaccacagccatgaagcgattcttagcaagaatgagccaaaacctcataaaaacaaagaaaagagaaccaccaaaacggcggcggaaaacaaaccaaaggaaca

SEQ ID NO: 52243 - DNA, 332 bp, Oryza sativa
gagaaacaactgaatatatagtcgagaactgtagcttcttgtcgtcgagtagtcattgcttgagtgaatatacgcattgaagatgtccgagtagaaatcttgaatattggaacaccactagtaaaataacatggcattatacttggtgacgcatgccgagatgtcaaggctcctgtagatgtcgtgtcggcgaagtacacagcggtagcgaagatgaaagttgcgagataaaaacccagtcgacggggcatactagtcgcaacgaagaagtaaagagacaaaacgccagcctgaaggaacagctgtcgcgtcgacagcggcacaagaaatat

SEQ ID NO: 52244 - DNA, 443 bp, Oryza sativa
  unsure (1)..(443): unsure at all n locations
gcttcttcacaatggcgtcaacacttttcctttctattagtccctanttcaacaatgctggtgtggactcaggtcgcgaaatcgtcctcccggtttacaccacggtaccaatctcggctgggtcatcaatgaccggaaacgagaacgccgtggctataatcccggatgatcccatgtcgaaggatccctccgccgtggcggagaacggaacatcgacgtcatacgagcccgagaaggttcctagtgcggccaaaccttgttcttccgacaagaactgcgagccgacaaggacaacttccgaggtaacaaagtcctggtgtttatccacaagtccaggaagcacaacttgcaagcttgctgggttttctacccgacaacttgaaattcggcttgaaagagcgtggaacaccgacttctccactcgtgcagctattgcctattct

SEQ ID NO: 52245 - DNA, 398 bp, Oryza sativa
  unsure (1)..(398): unsure at all n locations
gctgcagctgaccccattccctcctatttttttatttttcaacccnnacccaataccctgacactaacctggagattgncgctatgcgcccagaacgtgttcatgcattcaatgggcgtgtgtgctcgcgaattacgcttcttgatgaagatggctaaccccaccacaccggtcgatgctacgccattgtgcagcacgtcccagtgagcgagatgtgacacccagcacacggtagggctgagtgatcctctctcggacactctatgatgtgtcgctcaggctatgcgtgaagtgtagcctggttggctggttgactggttgactaacacgctgaagaccccttacgtcggtctcgattttggaaagcctattttgccttcctcagctatgggccgagc

SEQ ID NO: 52246 - DNA, 152 bp, Oryza sativa
  unsure (1)..(152): unsure at all n locations
ccagcaccggccaccggagaagaaagaacctcggaagacccgccacgactcgaacaaaaaccaggtcgcaagccccactctgcgngaagcgaccgagggcacacagaagaacacccgacccagagctccccccaaccgaaaaccagcccccc

SEQ ID NO: 52247 - DNA, 469 bp, Oryza sativa
  unsure (1)..(469): unsure at all n locations
agctatcatcactgcagatatttccctctcgatccatctgannaacanaagatcaaacattagtttcacgatgaatggtaatcaatcccatagtaaaacagatgaaccaaataaattcagattaactgaatatcatgtttttggacgcaataactgaatatcaataatatgtacaaacacatctaatacaaacaaacgcagattaaccaaaagatgactcattatttaataatagtacaaaattattcaaggcatattcaacaagcaaacatttatttggctcgaaacctgtacaacaaacgttgagggattaagaactaagcctaacaacaagggaaaggtatgactgcaccattgggccgtatgaatgcattgtgccaaagcaagcagtgtccaggactagcaaaaagacatgggcacaggcagcacatataaacatcagaaaagcaaagctcagtgaatttaaatc

SEQ ID NO: 52248 - DNA, 204 bp, Oryza sativa
  unsure (1)..(204): unsure at all n locations
ccggaccaccagccgcaggcggggcggcccaccggtngacagaccangtcacgccgccgcagggaccccctccaacacacaaagaacaacccgcacaccgaccgccgacacgatcccacatacagccgataatatgttttctaaccaacgtgcaaagagacagaattcacagcaaaaccccgaccttagcaacagagggaaaaa

SEQ ID NO: 52249 - DNA, 320 bp, Oryza sativa
  unsure (1)..(320): unsure at all n locations
cactcaaacagcaagcaaaaagcctcatcgggacagccacatcacaggcacacgacatcgaccgccgactggacccaaacaagcaacccaaacacggaaactaacaagcagaaactagacaagcgacaaaccaacgggaaaacgagcccaatgcccggaacggcctccgcggacggtggagccgaaggcgacctccggcctcgcaccaaggccctctgagcgactcctgcaacctggcagacaagtccctangctgccggaccgtgagccaccggacctgccgccactgggagtagcacacaaccaacctccagtaccac

SEQ ID NO: 52250 - DNA, 261 bp, Oryza sativa
gcgcgcacagccggcgacacttccagaacacaacaacggcgcccgggagcacaaaaagcccgaaaccgagaacagaaacccaaggaaaacggaccctagaacaacccccaaaaaaacaacgcaaacccgtccaccgaccaagcaacacagcaccccccgccaaaaacagcccacaaaacacacgaaagcaggcaggaacctaacacaaccccagcgcagcacccacaacggaccccccccgcacaagccccccccacaaac

SEQ ID NO: 52251 - DNA, 398 bp, Oryza sativa
  unsure (1)..(398): unsure at all n locations
ctgcacagaaagacgctacagtcctaatgctaccaatagcttcacntacaacttgactcgcatattcatacatcacctgtagaaatcgctagcagctagcaaaacaatatttactaatattgcaagaaaaaaattcattatgcgacgccaatcatgaaatatgtcagttgtaataccaaattaggtgtcatctaacaaaacacacatcttcatcaaatgtggaaagtgtcaagattgtctgtgaattctttatataaaaaacagaaatggcagaaattgctttgctcatactagggactntgctttcaccttagcatcttcactgaaccctttcaagaacttcaattgtacataactttgcaaacccaccaaagggatcgacacatgatgcgcaatgc

SEQ ID NO: 52252 - DNA, 402 bp, Oryza sativa
  unsure (1)..(402): unsure at all n locations
tctagccaccaacctctgatttttcacaagcatgtgaacgtgcgttacaaatatgctaaaaatcaaacagcattacagcgcacaagctaacgctacatagctcgatcggaagacaatttcttatttcccatcacacgtatttgacatatccgatctgaaaaatcaagtttcaaatattttgttccagatgcaacacatagctaaacataaaggtcttttagagacagaatgaggtagcaggcgacaaccaagctagttagctagaagatgcagtacacagtataaagaagctgaanattaagcaggatacaacaacagcgaagtagcgaacagaggacaagagctagtacagttgggcgtccgtgcagtgacaccccgagcgcacgaggtaacacccgcgcg

SEQ ID NO: 52253 - DNA, 435 bp, Oryza sativa
  unsure (1)..(435): unsure at all n locations
agcttgagggtcggcacatcataactgttggtaatattatggacgtcctanngccccggccgaagcctgcaagaactatgtacgtcacagcggctgggttgtgcgggataacgtgcctgtcagtacggtgtactggcgaagaacaagggcacgcggagatcatgagagctttgtcccatattccgagaaagagatgctgtggaccacaatgctcgagacattcacccttcctgcgggtacagaggacaaagtgaaaaggtggactctgaagaaaatggcagaacagctttagagcttcaagggagatctgtaccagaagtatatactgaaggggcagacaccgaacttcgacacattccctaagctaagggatcactgggacgagctcgttgcatataagacaggtgaacaatggcatgcatgattgaaagaaac

SEQ ID NO: 52254 - DNA, 458 bp, Oryza sativa
  unsure (1)..(458): unsure at all n locations
agcttctcaaatgcgatcactacaatgctcattttatatatgcaatntcaccaggcaggtaagtgtataaacattctctgcaacctaatgtaattcacagaataccatcaacgagacaacgataaccaggcaacatggataagatgaaattcacacatcatgctgaatattcaccctgctttgagtagtgaacatgtctggttcacacaagatgattgcaaacccattccatatcacaactcacaacacttgattaccaaacttattcacggttcacacatcaagtagccaaccccggatctagatcatgaccagcgtacattgctatgaaggggacatgctgaaagaaacacagaaaaaaaaaacccagaattcttcaggaccgctaaaactaggagaagggaagatacacacaacaataacatgcacgaataaataaatgagcaccaccagagcta

SEQ ID NO: 52255 - DNA, 417 bp, Oryza sativa
catcactgtgccattcaccatcactgaagatgttgtacctgagaaacaattcatttcatggacagatcgatctcaatggctcggcaatgtcacaattgagctcacttgatcttggcacaaataagttcatcggcacaatagatgctttgtcagattgccatcatctgagaagcctgaatcttgccacaaacaacctcactggtgaaatccctaatggtttcaggaatcttcagtttctaacctatatctcactttcaaacaatagcttcacaaatgtgtcctcagcattatctgtccttcaaggctgcccaagcctaacaagcctcgtgctgacaaagaatttcaatgatgggaaggccttgccgatgatggaatagatggttttcataacatccaaagtgttgcattgctaatagc

SEQ ID NO: 52256 - DNA, 334 bp, Oryza sativa
  unsure (1)..(334): unsure at all n locations
atgtggtcacgtgtagtatcatcctgccgtctctctcttactcngttaggactactactacgtactccaactccaaattaatttgtaaaggcgtgttttccaactgtagctgtcattcatcactgaaaatttgtatcaccagcctcttattagaattaccttatactggtctttttatatttatctttatttagttggcatggcatgtgcgtgatctctttgaatggtcaatgtcaatttgtgatgttttctgatacaatactatttcttcgtgtggtgttcattgatngcctttattgctgtgttcacacctttttgttagtagcagttctga

SEQ ID NO: 52257 - DNA, 454 bp, Oryza sativa
agctttgcaatggtccgaaggactaaatggcgactgcttctcttaataaacctccaaaacagaggccaagaagtcgtcgcacagtagtccgagacccgcgtcaaaaaagcggcgaaaacacagtacgctcatcgcttgtctctggactccgcatcaacggccaagaagctgacctaatagtaccccggcaggacccatcccggccaagtcggcatcttcgaccaatgacttgcccaagtagcaagttcagttgtcggtgatgctcctagggtcttcgcctgttgccctagcacgagcaggtttgcgaggcgccacgacagccgtggcgaaaggcgagaggctgagaagaacggaaagaggcgaaagctcagtgtggcgaaagagactgctacgagagcgaaaagcacaacggcgtatagcttatgatatctaatgaaacagtcacagtgaaaac

SEQ ID NO: 52258 - DNA, 291 bp, Oryza sativa
  unsure (1)..(291): unsure at all n locations
cccgagaagatacgagctatagagcggatgcgctcccccaagcaagcttagggatgtgcaatgcggcatcggctgcatgggcgccctaagtcggttcatatcgaggctgggagagaaggcgctacccctatntaagcctctcacacgctccgggccgtttacctggacggaggaggctgagcgggccttcactcagttgaaggcgtacctcagttctcccccagtcctggtcacctcggagccagatgaaccgctgctactttacctggcggcaaccccgcaggtggttat

SEQ ID NO: 52259 - DNA, 384 bp, Oryza sativa
  unsure (1)..(384): unsure at all n locations
aaaacctaattaatcctacgctagcgactaatccaattcgaacgggacaagtgcacactccaaccatcccctgcctctgtagaaacaaagcacctccggcttatttggcacttgagggaaggggattgagagtctacacgacggaattgatggcgagattaagacgggaattcgatttttcatccctagctcttgttcggcagaggtggtacaaattgatagggagcctagttgaagactagatcattaatgaacacggatggctgagattcgttcaggcgacagaaaggaggaattccctcccaattccctgcccctactcaggtatggaaaagagggagtntattcctcaactacccatccccatcccaccataattcacat

SEQ ID NO: 52260 - DNA, 342 bp, Oryza sativa
  unsure (1)..(342): unsure at all n locations
gacccaaagncacctgccgcatgcagctaggctcaaaaagacacagatatgttttgctcccaccctcgcaagggccagaagcgtgaacgcggcaaggggaacgcccgcgagccggtgccggagccaacaaggggcaaggctgcgacgtcgacgccggtgagcaaatcggggaagggcgcgagggcgccagcccaatttgagctaggcaagccatcggtggaggacaatgtgctaacctgcgatgggtattgcttgccgagagctacataagcaatacatggagctaagcaatgccaagcggaaaacgacggagtcatccatagttggacatcacgaccacca

SEQ ID NO: 52261 - DNA, 493 bp, Oryza sativa
  unsure (1)..(493): unsure at all n locations
accttagagncacctgcggcatgcaagcttgacatagcggaagttgtcatgatgagttcggtctttgatgaaagcgctctggttagacgccacaagctcgtccaggcgaggggagagacgagaggccaagatcttggagaacagcttcccaaagctgtggataaggctaatcagcctanaatccttaatgtcaacagcctcgtccttcttcggcaagagggagatcagggcgttcttaaattactgtatgactataggtgtaatgtcttcaaataaattctcattgtaattcacataagtaatgaatctgcaaatagttcacgtaaatggaacataatgcttgatctcaaatgacaaagaaacatatatagtatgggcatcttatccctgatcaacatcacaaagaaggattcatcattttacagtgttaaatgaaaacatgcagatcaaatctattgcagccggattatgagccacccctgcgacatgaaaa

SEQ ID NO: 52262 - DNA, 334 bp, Oryza sativa
  unsure (1)..(334): unsure at all n locations
gacacacggatcggcttggccggtcttcgagatggacgcgccgacgctcgcagcatatcctctgagctgtcactgacatatgggcctgtgccccacgccaatggggcgattctttttaaacaaaaacctcacttttcttaaaaaaacaatgcgcgngactcctctctctctctttcttataaaaaacaatatgctgtgagtcaaaacctacatgcaatgagtcataccctatcatacgagatggataagatntgaaccaactctatcataatcaaaagatcacatacgaaaattccttataggatctcaatccaataaaacttctctaaactct

SEQ ID NO: 52263 - DNA, 455 bp, Oryza sativa
  unsure (1)..(455): unsure at all n locations
actgagctgcacttctgacgctactcggctccacctttcattctggcataagaggacgaggagaagacaacattcatcacgccattcggtgtattctgctatgataagatgccgttnggactgataaccgccggaaacaatttccagctcacggttcaaggggcacttaatgaccagctcggacacaatgtcgaggcctacgtcgacgacattgttgtcaaaacaaagacaagcgactcattgatcgatgacctttgggaaacgttcgacaacctccgacgatatcgcctcatgctcaacccagagaagtgcacgctcggagtaccatcgggaaagcttctcggattcctcgtctccgaaagagggatcgaagcaaatcatgagaagatcaacgccctcgagaacatgaagtcgcccacaagactcacgaacgtcacaagctaactgggtgcata

SEQ ID NO: 52264 - DNA, 239 bp, Oryza sativa
cttgaacctcgctcttcttcttttcctctagcaatctgctatgaagtgcttcctttttctgacctcaccaatttcggcgggcccatgatctcatcggcctccacagtctaactgatgccctccgatctggtgtgagaaggggaaagacaatggaaaacaccgttagcattgcggacgacgtcgattggttctccggcgacctgagatgaaatcataggaagggaaggaggcggaggatc

SEQ ID NO: 52265 - DNA, 265 bp, Oryza sativa
gatcgagcatgtaagcttgatgtgtgtaaccaagaatcaatctttttgctaaccataaattaatattatcatttccgcttacacatggcgatcaaagttggctccgagtcagatccacccgggatctgtctgcacctcaacattttggttcgggacctaattcagagttcgttcagtgtcatatgcctggtttctgaaggaattcaccgaggatcgcactttgacagcagcttccatggcacgagaaagaatctccattagcttt

SEQ ID NO: 52266 - DNA, 407 bp, Oryza sativa
  unsure (1)..(407): unsure at all n locations
ctgcagcttaaagtgctacagagatctttttttcttttctatnggcaacncgcatatgtattttatttattagtnctgcactcttatgcttttagagaagcccataatacacagggatgtgaagtcatcaaacattctactaaatgaaggcttcacggccaaagtggccgactttggatttgcaaggactggtcctacagagccagaccagtcacagattcagactgatgtgagaggaacagctggctatgtacatccagagtatctcatgacaaaccatctgacagtcaagagtgatgtattctcttatggagttttgctcctgaaaattctatctggtccgccgcctattgaggtcaagagagctgcacgagaaaggatcaccgtgagatgggtatgtcttcact

SEQ ID NO: 52267 - DNA, 300 bp, Oryza sativa
ttcggcctgcgagcttttgtacttcgtgtacgctcgatgggggcctcatttgctgaatggcattgattctctcatggttcgcctcgatacctctttcaaaaacaaggaaacccaacaacttgcccgcgcgaacaccaaacacacacttctcaggatttagtttcataacccccgcgcgtaagttgtctaaggtctcttgcaagtcggacgcatggtcgaaagccttgcggctatttacgacaatatcgttgacataagcctccacattttgccccaactgcttgtaaaggaccttgtaca

SEQ ID NO: 52268 - DNA, 411 bp, Oryza sativa
  unsure (1)..(411): unsure at all n locations
tgcggcatgcaagctntttctacatccatatgagctactntagttgattgtttttgcccatataaggaaagcagatcttggtccatggagtcccaagaaggttggaactccaacctgtccgatgctatttcggccaaataaatagaaaagtgggaccagcacaatgagcaagctgcgcgaaaaaccgcttttttttccggttccgcaacaactttgggcgaaatggtgttctaccgggaaaccatggtcgagttttcgaccttggttactggtcgagccactggataagaatctctggagatctttcctctccacttactcgcaacaggctttccctctgtataagacttcttccgaatggcataattgcctgtcctattgacacctcgatctttaaagaaaactgactcc

SEQ ID NO: 52269 - DNA, 434 bp, Oryza sativa
  unsure (1)..(434): unsure at all n locations
agcttcaagctctctcatactaaattcaccactctcttttaattctacttcctcgaaaatacacataatgtcaaggaattgcatntaatcttaacatgatgataaatgggcagtacatattgctttcaatatcttaataaaggatacatatgaactgacagaatattgagatcccacaagtggttcaaatatcaagacacacagatcatcttcattgtcatctccattgctcgttgtcttcttgtgagggttcaacgttatctgacgtgcagctacactggaacagacgcacttgattaaaacataataaatattacgaacttggcagacattggatctatgacgtggataaagatcattatgctatctgcacggagattgtatcacaaacacttgatgatatgaataactacgacagtgtgaccgcggctgca

SEQ ID NO: 52270 - DNA, 340 bp, Oryza sativa
  unsure (1)..(340): unsure at all n locations
cgctcgctataaaactcctaaaccgccacgtgacattctacatatactaccaagccaccacgtgagacactaataaatcaaagaaaaccctcaaagaaagcaaacatctaaccattgatcntcattaaatatggcgaacacaccatatgcaaccatattagacttatctataaaaaaaccgccttcccatatctgggcccacctgcgcctgaaggcatgtacgtacgtatatacgtacgttccacacggctattccctcctcacaattatctccccccctttgtacctacaactttccctatattcacgctcgtagaagaacaaaaattctatgcgaaac

SEQ ID NO: 52271 - DNA, 431 bp, Oryza sativa
agcttgtcatttatttgctgagctgtatcttattagatgccattaacttctcatacaacgttgtatgagatcatagatgccttggcgaaaagaaatactctatggacacggtgcatgagtaccattatttcttttctcacagtggaccattattatccaagtctgaacagtgccacacatttcatgcagaaaccattggagttctgttcaatgaaagcacacatttctccaggaaaatagtgataattaaaggcatcaataaataaaaactttctttgatatataagttaaattggagactagaaatcgcaagccacttgttgttctcttttgtaacataatggtgtgtgcttcttcagaacaaatggctgaggcagtgctcctttctgcaaaaacgtggcaacgtgttagcaatgaagctgcaacgctgt

SEQ ID NO: 52272 - DNA, 263 bp, Oryza sativa
  unsure (1)..(263): unsure at all n locations
cacaaacttctcccggccaaccacaagcagaccggtggctcgggagtgacacttagccgcctacgaggcctcaacctccaagagcaaaagatgatgcaaagaactcccggagatgatgcaagtgctcacaaatcttcacaaagaccacaaggagcatccacacaaactcgaatccacactctcacacacacaccaaatccgaatcanacacaggtggagagatgaatcgaggaagcacggctcanatgaacacagagagagag

SEQ ID NO: 52273 - DNA, 282 bp, Oryza sativa
  unsure (1)..(282): unsure at all n locations
catcaccggagntgggacggcaacacaacagcggaaaactcgaattgtgtgacagcgcgagcgacctgtctctctgcgaagccatggaccaccaacccaacataaagcaatgactgttcacctttactcttgccccttcttcctccctctgccaacagtcaaaagccacaagtacacacaactgctgcattctggagaaggcttctcaccgggagcaatatactcgcagtgcagctcacggctccatgctagaccgcccgctaataagccggaccaacgtgc

SEQ ID NO: 52274 - DNA, 410 bp, Oryza sativa
agctcggtcgatctcgagagatcgaattgctgtctactatggttccgatattgtcggaagacatactccgcgcgcgttagatctccacagccgaagacggcgagtagcttgttgtcggacaatccatctcttaaacccatctcgtcgaaaccttgaagcaccaaaatgcccctacgtggcgcgttactgtcgacgtttgatgtctcgactaccgtatctgcatggcatggcgatcgctggcactacggtatacgcgagactgaggtaaaagagatggagacagggatttttatacaggctcgggcctctgaattatcacgtaataaccctacattctgctggccgaagccggtattgctcttattcatgaccatcacatcacgataatattcggcggagcctatctaact

SEQ ID NO: 52275 - DNA, 290 bp, Oryza sativa
cagcgctttcaagtgagggcaattggataagactgttaaatccacatccaggctatgcagaagatattgccccgtcagtattgatcactatacaaatgatccactctgttagaaagcatcctgctaaagatgagagaactctttcgaaacacctctgcgaagtttcaggtatctttgccatatccttttgtttggccttttcttatctcacctggctatcaggtcataagtttgacattctgattgttttatataagaaattttttactaaaccacctgaggttgatgac

SEQ ID NO: 52276 - DNA, 309 bp, Oryza sativa
acacgatgcaaataaataatttattctgtccatccagcggctgtgaaaatgagatggtacataaactaaaaaaaaatgttttttaaacttagtttcaataaataaacaaataacatatcttgttcacctcactcgtactggctatgacaatagatagtgtacaaaatgttcggaaacttacgccctgatattttccatgcaaacaaaaaaactttcacattgtcatatcaaatgttaaacacatcatgaagtattaatatagcaaaaaaaacctaattcacacattgtgtgtaattggagacaaatatt

SEQ ID NO: 52277 - DNA, 405 bp, Oryza sativa
  unsure (1)..(405): unsure at all n locations
acggatccttaagcgaccgcagctgcagctttttttttaatggggaaggcgaccaggttgttttttaagctaataaanattatgcttgcatgctgagctntagatgcttagggtgtattagctttataagagaaagaatggatacaagctgctcttgaagccggccgggcggcgcgcatgcatgcatcatcatcttcgcgcaaggcgatcggaacagaccagtagccgtctcttggaattcctttcaacttaattatacagcttacttagaattatatcaaatattaatgcttaaagagtaaagatagtactcaagcaataaggtggtcatattgtgttgaaaaccattatactttcggaatttgttagaactaaatccttagttatatactgattatatactga

SEQ ID NO: 52278 - DNA, 242 bp, Oryza sativa
  unsure (1)..(242): unsure at all n locations
acacgacacagccangaagnagccgagacaccaaaaagggcgccgcccgaccgaaaggatacggtaacaaactcaacaggccaaaaagcagccagacgcattcccaactaccgcgcgcccgtccccgcacccgcagcgtccccatccggccgagacgccagcagcacaaagancaccacacgcgagcccccagctgtagcacacgaaaaaagacagaggaccacgcacgaaacagcacaaac

SEQ ID NO: 52279 - DNA, 277 bp, Oryza sativa
  unsure (1)..(277): unsure at all n locations
aagaccaagctgatcatcaagcactcnctagccaatcacattntggcgcaacgactccaatgtttgaaaagcatcttgataaattccgggtgctagttaaatattgagtagtatataattgtgcagaatcagctagatcagtcatcatcatgggttgctgctgggcattgtggaagggaaaaggtcttgcagcagggcgtagtcagtgaagtgatgctgctgaagaggaggatgatcgttgtgcggcattgcaccgctcgcagccacagcaggaggc

SEQ ID NO: 52280 - DNA, 407 bp, Oryza sativa
  unsure (1)..(407): unsure at all n locations
gctactttgaaagacatctgtacataaaaatggggccttttttaggcttttgataatcatagtactggcatgtttagagagctccatttcctttgtttcatcatcatcatcatcgtactactagcatactgctagtattcacatgggagccaaagcattagcttcaggataaagaatcaaagatcgttcagatactaacaaagagtggatctttttggtatactgctcaatcaccggtgattttcatactgttctacctgcgaaggatacggctgccgntatagtcgtcgctggctagctgttgcgcggttgaagcggctggctcccgatctgtggttgggttgggtcacgtcacgtggagtcgtgtacagccgtagaggtggagggatcgtggatttcgtggtgga

SEQ ID NO: 52281 - DNA, 306 bp, Oryza sativa
  unsure (1)..(306): unsure at all n locations
tatgctgccgatgagaagcgggccgntgatggtgacagctcagctgtcacgtcctggataattccatcccgaataaaaattattcttttaaaggaataatagaattaattaaaattcgaaaagaaattggcacacacctaaatacataccagaataatttgaatgtggcccggagaattttcgctaattctccttggtctaaaggagctctcaaactttacttaaattttcagaacgcctgacataattattaagcaccaacaacaattaaccacagttattaaaaagaaaaaccaaaaataatcc

SEQ ID NO: 52282 - DNA, 405 bp, Oryza sativa
  unsure (1)..(405): unsure at all n locations
gcttgcccgcatgtacaccgaacactttctatcttgtttagnnnatgcgggcggagcggagactctcacaattctccgctagatctgagagtaacatttcctggttgcgcgtctctacaaccaagtcatcgacataagcctcaacattacgtcctaattggctacccaaagaaattcgagtagtacgttgaaaagtaggacctgcattctttaacccgaagggcattgtcgtataacaataggttcctatggaggtaatgaacgcagntttttcctcatcctccctagccatgcgaatctgatggtaaccagagtatgcatctaaaaaacacaaaaggtcgcaccctgcagtggagtcgacaatctgatctatgcgaggcagggggtaaggattcttaggacatg

SEQ ID NO: 52283 - DNA, 380 bp, Oryza sativa
agcttgcattcagtccctagattcgttatattgtgaccaattacgcaaaagtcataaagaataaagattgatcaatctctctattacttactgggttgctgcaacagcagctccgtcagttcctgaagccaagacatgttcgctgaggtttcgccatagccagcggtgtgtatgcatccgccgcgggctgcttcagctcccatcgtggtgtttagcaaaaggtgatgtaacagatggaaagttaattagcgtgaaaaagaatgagcgatttactcagcatacaaatagctattgccgtcgattcgtatgccgtgttagatggcagccgttcctctaatacggagatgacccatcagacgattggaagggtctcgcatgac

SEQ ID NO: 52284 - DNA, 472 bp, Oryza sativa
  unsure (1)..(472): unsure at all n locations
tctaagcgcccgcagcatgcaactcattcaccggctgtgtgttctncatttctgaatccaagcctgccgagcacaagccttattaactgacgggcccgggagatagctaaccacatgtttccctcttgccaaattagccattgggtgtcggccgatctctaatagtgaaaagatatagggatctcttgaaaccctctagatgcctcagctggtggagctggtttcccatgaaggatcttatntcagcagtaccagttctccacaagaccattaagaacatggcatgttcttcttccgggcgtagctctagttgataaaaaaatcttggatgaagctgaacgcctaacaacacaccactctgacacactcccggtactctacatagtctcccacaaagctttggcacgaggacaccgacacagcgcatgaagacatcctctgtntccattccacatacagtatatggatctga

SEQ ID NO: 52285 - DNA, 342 bp, Oryza sativa
  unsure (1)..(342): unsure at all n locations
gagaccccttgctggggctccctacgacgcacgtctccaagagccactcttttgattgcttcgctagggtcctcctcttcacctaacacatcggagtcaacttgctctactcgagagccgctagcttcgacaaatgtcacatcacgcgcgatctcaacaataccggaggttctggagaaaacgcgggatgcgcattcactggacacatacccaagcaagaaccnctcatcaactataggagcaaacttcgaggatctatgcctcttaataagaacgtaccactaactaccgaaaacacgagagcaagacacattctctntaccaagaggaccgcacaaatgg

SEQ ID NO: 52286 - DNA, 386 bp, Oryza sativa
  unsure (1)..(386): unsure at all n locations
agcttgccatgatattggaatcgntgagtggcctcatgtgtgatactntaagatagacatggtcaccaacatcaaaacttagctctcgtcgacgacgatcagagtagctcttttgacgagcttgagcctcttttaaatcggtcccgaataagaggtgacattctttcagcttcattaatgatagcacgtccaaagaattgtctttctcctacttcggaccaataaagaggagtcctacaatttctcccataaagagcttcaaatggtgacattcggatacttgattgacagctattggtggaggagaattcagcanaagatagacatttctcccagttagtgttatgttcaagcacacaagctcggagcatgttctcaagtatttg

SEQ ID NO: 52287 - DNA, 191 bp, Oryza sativa
ccccccagtacacagccgaaccaacacgaggcacgaaaacacgcatgtgccgaccggacagcgaagaaccggaacaggcagccaaagacaagcagaaacaacaagggaaacaccacagggaacgaggagcagagcaaagccagaaccacgaagaacaccgccgacaaggaccgcaacgcggaagaaccaaa

SEQ ID NO: 52288 - DNA, 373 bp, Oryza sativa
  unsure (1)..(373): unsure at all n locations
ctgggccgacaaaagacccgcggcaccgattcgaacaaagagatgctcctcaacaactcagatgcgaatgaaccgaccacccgggtcagaacattacatatcggctcccagagccatnttacttgattagagcggcttccagagcctcaatcactatctcggactcccagagtccagctgcccagcagcaaaacaaaccgcttccactcgagaagcctagactatgacgcccgcagacatcccgaatcacacagattcgtatctgaccactcacggcattcatctgccacacaagctgatcctggctacgatacccacaccacaacaacttttcacaaagcacaggtagacaatctacgcaacgggaaccacc

SEQ ID NO: 52289 - DNA, 71 bp, Oryza sativa
aggagagggaggtgctacagaaagacgcgcaagataaagagagcaagttgcccccatatgttgaagaacca

SEQ ID NO: 52290 - DNA, 190 bp, Oryza sativa
aaaaatatacttgggggctgtgcatttaattagcccataccagattaaaatcatttaactatggaagtcctaagatcactgatccattaaaaaggttactcccccagtgaaataataaactcggtgatgtgatgctccgaaagacatacctctatgattccacacacagccaaccaatgataagtaggat

SEQ ID NO: 52291 - DNA, 486 bp, Oryza sativa
actcaagcttctaagttggaatcgaactgaaaacattaaatattctctgcctttgtgtggtgtctctcctctggcggcgatagaggaagtgggagaaaaataattagggaaataaaaagaaaaccacataaaacaaagaacgtagcttatgcactacttaaaaaaacatttatgctggcggtcaaaagaggtttgtgctggcggctgagcagccccgccagtaagtaaaggccagagaatcattggctttcacaagcggtcataataccgcttgcgaaaatcaatttttgcatgcgcgatcttaagagggccacctgcgaaaaccaatcttttaagggcgttattaaaagagccgtctacgaaaatcaattcttcgcaagcgcgttcttaagaaagccgcctgcgaataccaattatcacaggcgcattcttaagatgatcgcctcgaaaatattcttcagtgtcaaaatacaaacactcaaattc

SEQ ID NO: 52292 - DNA, 282 bp, Oryza sativa
gatactcagctcggccaataatgtactataaatcaaacatatagcattttttagacccaagataaccctcatgcgcccctcctaacaaagatgagccaccttatccttcaggtaagacatcttctgttggaagtaccactctggagcacgtggctcaatactgtactttttgcacaaaggaacccatttctatgcaaattcagaagtttcggatgatgcttcaaatgtcagcattgcagcaccatcatcagagacatagcatgaaacctcatcaactggata

SEQ ID NO: 52293 - DNA, 314 bp, Oryza sativa
acacactcggtttattacccaatattcttcaagtaaagaaattaaaaaaatgtccaccatctgggacttatatgatccttatgactgctcatgctacctaaaaacaagatatttttgttaccagtgtttatggatggtgaagtaatgttcaaaaggtgttgccaaaggctcatcttcccgtcatttttcatttattcatccgaaacacatttgtaacgtttaggtacaaattaatgtattaatgttactaaacagttgcttttgtagctgtgggttcacaatatagaaaagagaaaaattgcctgcgaccctac

SEQ ID NO: 52294 - DNA, 464 bp, Oryza sativa
  unsure (1)..(464): unsure at all n locations
taagagcacgtacaatagtatactataagccagttattaactctgtttcttgaagataaananagagagagaaaagccgcgggttacagatttatagtcagctacagcacggactacaagatgcatgtgtgtatgacagatgggagcagatattaattgtatagtatatgtttataaatattgtatgaattaactattaagttaactatagatgatttggagctagcaattggctatactattaatcttgctctaattagtcagggatcatttacgtcgcccgctatagctactactgtgtatacgtttgatatattgtatttccagctcgcgcttgcacatgctgattaggaaactntctcacgtcattttagtttcacatcgctgaaatattaatccttgcactttgntgtaaatttggagtaaataccctctcctcggtgaaacacacccaattcactttt

SEQ ID NO: 52295 - DNA, 240 bp, Oryza sativa
gacacccgccacaatataatatgattgactgatccgacgtatgcaatataacaaggattctgcatgtgctttgacgtatagcgtcgagtaaacaacccccttaattatcctacctgaactgtgtcaccgttgggaaataaaacagtggtgctgaaagccatgtagcacgtgttgctataccatggtgcaatggcatgatattcaaaaatatatccgcttacgttttacgaaaataccaca

SEQ ID NO: 52296 - DNA, 372 bp, Oryza sativa
  unsure (1)..(372): unsure at all n locations
tgcgttctgggctagcaccaaagaccataatctanagttgtgtatatttggattcaagaagaatatgcttctgtntgacgacttgatgcacttaccattccttgatcctttgacattacacagagagcaaagaccaatagacgtggcgactgtccaagatatgcgtttcattcttacctctgcaaatgtggctccatgtaagatattttctgacatttaaagatatttatcaactgaaatcacaaaaataattgtagtaatgcatacaattagcagtggtcgattcaatgataaagaattcaagattggtgtcctgttggttttactgcataacgatcaatacgcggcaaataccctttcaactgaaatata

SEQ ID NO: 52297 - DNA, 467 bp, Oryza sativa
cactatcgtcaacaaaagaaccaaaccatatcgtataacatgttttagtgatatagcgacggactggatgatcggcatgaattaaaccgttgaatacaacctacaagcaacttaaatggccgagcatcctaaatttctatgcactaccattaagggaaaactataatcatgcactacaaaatcatatagtcagtagctacaagctcgtgcgtacactagtacagatccttctatctgtgaccgcctctaacaagcttgaatatagcgggccgtcacaaggaagtcatctcaatcgggctgaaacagtgcccgattgatatatggtcgcacaaacataatatatgggcataagacttaaagccgtcacggatgacacctatcagtgacgggccgtagattaggcccgaatgagaaacattctatatcttaacgggctgaagtatggcccgcacagataacatcatcat

SEQ ID NO: 52298 - DNA, 366 bp, Oryza sativa
ctatgacactcagctgatcaactcgcattttcaactgtattctcttttgtctttacgaatcggcccatcttcatgaactgacttctgggttctggccgatttctatgtgatttaagactgttaccctgggaagactgattgtgagaattcgattcaccacacccagcgccattggttgattgatgggaaccttattccatcgttccaaccaatacctcgaagagctcacaacttcaatgatgagtaaactcatcaccttgattatattcttcatcttggtcatcttgatgatatatatcattcttggtgatgactacaattcttgaaaatcctctgaacttgatgtcatgcctcttctggtacttg

SEQ ID NO: 52299 - DNA, 318 bp, Oryza sativa
  unsure (1)..(318): unsure at all n locations
gaaccanggacccatactatagaaaagggtttttttattgccctttgttggaagaggaacaggcataggggcctaatgtaaaacccaatatatgacccaatcacgtagtgacccactatgatctatgagagaaatcgacatgcgcgattgtctacatttctaaacctcaaaactatgtctaagtgattaaagaaagggaaggggacctgtcttgatcacgaaaatgcagcacctaaatactttttaccgtttagcagggttatacaagtcacgtatgcgataacaccgaaatgcaaaaccaaaagtctaaatgagatt

SEQ ID NO: 52300 - DNA, 347 bp, Oryza sativa
  unsure (1)..(347): unsure at all n locations
acgcttactacctatttngttatgaatacgatggcgctcagtaggtcttagttactgtcgttgcctgtggcaatggcgtgccgctgccttaactccgctgtcttatctacttttgcttttgggatgtattccggaccgttcgggcctatgttctaagactatgcctgcgggcctatgatgtaataattcgcactagactctcgtgtatgtgcacttggtatttcagctccgaactcgtgtgtaccacactaattgatccacggaaatagtacccgttacatgcctgaatcctgtataaaaacgggggtccatangccgcgaagccaacctacctttgacaccttcgc

SEQ ID NO: 52301 - DNA, 388 bp, Oryza sativa
gctgattctcaaagtgatatcaacttatggtaaaaagatgtatactgaagccatgtcagtatgtacacgttagtactaccgcaaaacaagctgaacagagacctaaaatttggaatagcatgtcatatgcaagacagttcatctaggcatcaagcagttaaaaggaacaatgatttttaccgagcaaatagaaggcgttcacaaataaccagctatagaaaacaacatgattttgctatcgtacagtgtaaaatggcatgggaagaaatacctttatataaaagctgagaaaggatatacaggcctctttacgatatgggatattcttgattgattgactgctaatgacatgaaaaaccacatgcgtgctcaaaatccacatatgttc

SEQ ID NO: 52302 - DNA, 309 bp, Oryza sativa
accttggcaaaagaagaatcaatgtgtttatacaggtacaatcacagaatgggctattctctttctacaaaatcttatgtcttaataggcatcctaataatgaattctctaatttcagggaagaatggttctaaacgactttgacattgaacagccagctggaggagctgcgaaggcagttatcaagacttttacggcaaacagcacaaattatacactggaaattcatttctattgggcacggaaggggacaacatgcacttccaaaagaagatattatggtcctttgatatctgcatattagtagac

SEQ ID NO: 52303 - DNA, 474 bp, Oryza sativa
  unsure (1)..(474): unsure at all n locations
actcacgctntctaccgtcagaaccttccgaatgtgacaacattactagcatctgtattgtgtcttcctcatagtcatctacttccaaggcttccgtgttgtgcttccagtgagatcaaagaatgctagggggcagcaaggctcatatccaattaagttgttctacacttcaaacatgcccatcattctgcactctgcactgattaccaacctctacttcatatcacangtgcgtgcggtattgtagtgccgcagtaatatttacattactgatcaagttcttaacatggttttattttgttgcagcttctctacaggaggtacagcggaaattatctggttaaccttcttgggaaatggaaggaatctgagtactctggccattcggntcctggtggtggtctcgcttactatgtaaactgctcatcaaggtgaataatcgcatgttggatggcaccattctatccttatggg

SEQ ID NO: 52304 - DNA, 448 bp, Oryza sativa
cttgaaactagctttttgtagcctgaggccgagcagcaatgttctcatcactctccgagcgtgagaggcgacaacggggagcctaacccacgccgtcgagctcgtactccaccgccccctccacgccaaagatctaagcggtgggaggcgctcgagagggtcgaaagatccgcgacttcaccgatcgcgggtgatggaaaagagcggcaagatggggagcgtcgccttctcgtctacggcgacggcagcacgccccaaggtgcgctccaagctgcgggcgcgctcttacgccacccgcctgtcgttcctgacccggagtctccagcccaacgatggctggacgacgtggccaaattggtcatgactgcgcggcagcgcctagatgctggtgggcggtccttcgccaccaagacctctggtgctgttaccaccggtccgcgtcgtcaag

SEQ ID NO: 52305 - DNA, 302 bp, Oryza sativa
gacgtgctgctgtgcgcggagcccatctgggcggccgtcatgatcgggctcgtcatcggctgggcgtggcggccgcaatggacagagctgctctacctggggtttcgaagccgcctacgcctcctctacgttcccccgggcctcagcgcgcgccgcctctggctcgcctgcaccgcgctctacgccttctccgttgcgccgcggctactctacaccgcctttggcagccgcggaagcaccagcgcaaggacgccgccttgtgcgacgacgacgacgctcgcgacgccttctgggacacctgc

SEQ ID NO: 52306 - DNA, 248 bp, Oryza sativa
tccatttggatcataagctgcacataagcaaacgtgagtaataataatttcacgtgccttatttacaattactggttataatcaagaagagtacctggatggaaatcattctggaagaacttgccagtatttttagcaaataataatttgttaggagccctaccaccaatctgcaacatgttcgacatgaaacaagacagacccacttggattgccaaccggttcttgaacgtccacaagtgattccc

SEQ ID NO: 52307 - DNA, 421 bp, Oryza sativa
  unsure (1)..(421): unsure at all n locations
taacgctgngaactgatgcctgatggtgtgacaagtagtggtacttgtcttaagctcattaaacgaatcctacagacactttgatattatatcctgtgagcttggtcctcaaattctgaacatttgccatgtttttatgggaaccaaatcactagacttgttggtatgtttaccatgctttngttcctggacttggagtatgctgtcatctgagaaaattggtagtgcaaattacatgcttcaggcttctagcaataccttcagaatatgctggttgcttcttctcatggacaatggttaccttgaacttcagcattcattcatatcctacatacggaaaagttgggagatatcattgtacatattcatgagtngggacgtgaaatgacatgtgagacctagactcaacgtcaatggcaca

SEQ ID NO: 52308 - DNA, 398 bp, Oryza sativa
  unsure (1)..(398): unsure at all n locations
tagaaactcaagcttgtacctacngacagcgccggccttggagagcatttggctgttgtcgtcgccgccctcctgctcgcctccgtcggtcgacgccgcctgcttgctcctgccacggtactccctggagaacggctcctcgatcccttccgacgatggcccctatttcccggcgacgacggcggcgtcgttgaggcaccagtcgcacacgccggcgcccgcctccaccggtgccccgtcgccgtagtagttggtgcagtagctgcatgcatgcatccgatgccacgacgcgtcagttctgatcactatgtacctacctagacgccaggaatcactacggagagaggtagaaattaacgaggcacatacggatgagtgcgtccaatgctggaagcggc

SEQ ID NO: 52309 - DNA, 283 bp, Oryza sativa
cgctgcactgcgtggtgtacatgcttttctacgcgttgcgtccaacaccttgcgcatctcacacgggcgtgggtgttgttgcccacccagaggctcggagatcttctgacaagcacaaaactaaaccactatgacataattttctatttggcctctccctttcctttggcatcgcataccatagtttgtgtatcgtgtagtgtgattcaacaagcgcacttttgggaagcacacttgactttgagatctagacaattccgttgtactcatgatacactaatta

SEQ ID NO: 52310 - DNA, 429 bp, Oryza sativa
acattaacagactcatgtctgtacatagcgagccctccactcattccatcagtatcaactccagcaaaacctctaagacccaacctattccgtaaacgcctgactctatccgccttctgtctagactcacttaggaaaacaatttgtgaatcggcctctctaactaggccacacagatcgcgaactgtcgcagcgtttcccaaaccacgacgagtccatgataagcaactcattgctcctgacgggccctgagagcgggtcccgtcagtttaccagtagccgcaggactgggtgcttccaaaacttacatactttccacctcccgcttccgaaacacgttgagagctctcgctggcttctatgggtccacctgcttagcctgttctctaccagacacttgaccatacaatactacgcctggtgaactct

SEQ ID NO: 52311 - DNA, 406 bp, Oryza sativa
cttaagaacactaccatgagtgaaattttttgtttttataccaaagcgcagcatctcattaaaatgaagtatagtatcatccgaatgcccattttgctcaagagccgcaataattgcattccaagagactgaatctttttgcttcataccttggaagataagggatgcttccatcaatgctttgcacttcccatacagatccacaactgcattgttgacacagatgtccacatcaaaacctgatttaattgctaaacagagaacttgctgcccttggaagtaacccttagtctcagcacaagcactgaaaacccctgataagctgactacatcaaaacgaatgctttacctaatctaaactgaaagagtcccatggcctcaattcctaactctgctcgtacaagcc

SEQ ID NO: 52312 - DNA, 253 bp, Oryza sativa
  unsure (1)..(253): unsure at all n locations
acttatcanattttttttgnngccgcggcccctctgctatatttcagggacaatagctaatatgagtcctaaaacttcgctcctgcgacattttaacctttaatctttcatactgtgtaaacaaatcctttaattttgtcacgtgggttgacatacgccttgatcttaccaaacatcccacatagatatgccatgtcgcattttcattgcaaacccatatgatttcgccaatttacccttacctatatcatag

SEQ ID NO: 52313 - DNA, 383 bp, Oryza sativa
  unsure (1)..(383): unsure at all n locations
ctatcaccttgcaaggacctggaggaaagcaagattgctttacccctaacacccttatcgcaagtcggtctatcctaaccagcttgcaagccactctcttggaatcggtgcccatagtctgtgaatatcacgacatatttccagaagagttattgagtatgctcaccagaccgagagatcaagttctccatagaattaacaccaggtaccgcaccgattgctaaagaccctaccgaatggcactaacgagtagtcgaagtcaaaggcagacnaagaacggagagtaaggtatggcgactacctatcccttgggagcccagtgatctggttataaaatgaggctctgaaaatggtatgctatacagcctgaatgaagactatta

SEQ ID NO: 52314 - DNA, 420 bp, Oryza sativa
  unsure (1)..(420): unsure at all n locations
tttcggcgagctgctctggataagaaaacgcattgcntatcgtggcactgntacgactcggtctgtggttctgacttccgatcatatccacaaatccacaattactccagtttgttttgtcaacagacaacagcataaagcatagatttctatttgaaggaaaacacgttgaggcaaaatatctagattacgaagtagttttatttcccagagaaaagcatccctcctaatagaccacaaacgatgtttttcttcaactaaaatgtactgtaataacaccaaaggagcattctgaaaattgtcccgcccaaattgacagttgacaccagtgaagcattagtggtactcagatttacaggctggctaatcaactctaacatcatttcgcgaattatcagaatcacaactcgtcatttactg

SEQ ID NO: 52315 - DNA, 61 bp, Oryza sativa
  unsure (1)..(61): unsure at all n locations
ggttttttttttttttcaacnacagcccctgttcgtattcatacgtcgagagagtctcttt

SEQ ID NO: 52316 - DNA, 340 bp, Oryza sativa
acactaacatactcagcttaattggaagacaatgacaaggtgcgcacgatgttatctatctactattattgacgcgatgaatgcattgaatgttcctcttgcggtcgaacacgatattcaagtcaacgaacttgtacatgactaagccagtgacatggtacctcctacgtatggttagtattcgcgcctcaggacgtagacaatccgtcactcttattcacttttattggtatcgggatcttcatttttccctttttctctcatacgtaaatttgcgaactatgtgaggcagcgtttgtagcgatacgtgcatggagaatcttctttctctccctaatct

SEQ ID NO: 52317 - DNA, 125 bp, Oryza sativa
cacaaaaaccagcaggcacacgaacacggaagccgcagctacattaaaccaggccaaacgaaaccggcaagggacgtgatgaaaagccagaccagaagacaagcaagaagcaagccggcgaacga

SEQ ID NO: 52318 - DNA, 293 bp, Oryza sativa
  unsure (1)..(293): unsure at all n locations
caaacacatccgggttattacccaatattcttcagtcaaagaaataaagaatatgtccaccatctgggacttatatgatccttangactgctcatgctacctaaaaacaagatatttttgttaccagtgcttacggatggcgaagtaatgttcaaaaggtggtgccaagggctcatcatcccgtcatttttcatttattcatccgaaacacatttgtaacgtttacgtacaaattaatgtataaatgtaactcaacagttgcttttgagctgtggtttcacaatatagaaaag

SEQ ID NO: 52319 - DNA, 450 bp, Oryza sativa
  unsure (1)..(450): unsure at all n locations
atgcagcttgccgccaagcgacatagcaactctgacttcaagatgcatcatcgatatctagcacgctgccaatgatcaagaggcctctacatcccacaatggactgccagaatggtcaagcgaccttgataccaaagagccaactagagcttgagcttaacctgctctgctttgctcagactttgnttggtctgagaggagagcangaagagacctaaaagatatggataacaggttgaaatagaaacacttttgttaacttaactggctgaaagtgaaaagtgttgttaaacactagtccaagttaaaacattagtaaaaaaaagttgtccaatatgcaattcaccatattcatatatgtttgagttcgttacagtaaatcttttttttttcttgtcatgcatatgctcacacaccactacatataaacatctgagagtatgtctttta

SEQ ID NO: 52320 - DNA, 397 bp, Oryza sativa
cacttagagatgacagcagggaaattccggggtttatttcttttcatcctcagtgaggacaaaggagaagcacaacacacagtgagagccagagacagatcgccaagatcagttgttgatgccatcccttcgaatgcatatcctgcagaaggcccgtctgactaccatattaagtccagattcagacataccaatggtgagcaagctgatatgagaaatttggagggcctaaacagagtcaatggtcttgaaaaagaccgtgctgatctgttacggatgcttgatgagctgagggatcatgtgcaaaagatcctgtgagatcaccaacaagccaagtggaagtacttctacagataaagcggtggatgcctcacggttatataatcctcgtgagcgg

SEQ ID NO: 52321 - DNA, 438 bp, Oryza sativa
  unsure (1)..(438): unsure at all n locations
aatgcgtcatcttctcttctcatcatgggatggacgagtggctcatcctgcagaatttcttcaacggattaacaacggattaacactctcgtcctgggatcaactggacgctgctgctggaggagcacccttctcaaagatggtcagagataccactgatctgattgagaagaggctctcaaatatgggttggagcgagaaacaacatatacccgtcaatgcggtatgcacaccgtcaatgagacggaaatgcttgccgcccaggtggatctccttatgaagagactggacaacaatgagaagggacgccagcagggtaccattaaggccctgngcttcacatggcatgtgaggtctgtggcaatgaccgccacttctggacgaattgtccaaaacctgtgagaatgtcaagctcacatcaacaacaccggtatcatc

SEQ ID NO: 52322 - DNA, 318 bp, Oryza sativa
gagatgtcgagagcttcatgcaacacgcgttgttttatgatctcatgatggaacaatgacggtagcgctgcgaggatgtgaaatgtcccaccacaccatgcgaccgtacgccgaatctgatctgcgatgttaatactacaaaaagttagcgcctgacagttgacagatggaaagcttcagagatagtgcatcaaaatatatatttggactttacgaatgctccaacgaaagaatagggccaatgagcaactactgtgaagatgttaaacctccgttcgacctatgcaaagactcatatgtacatatcatctcgataat

SEQ ID NO: 52323 - DNA, 250 bp, Oryza sativa
atgtcgctactctacttccgctactgctgggctacaatactgtatactctctgatctctagatcgctactctgcagcagctgacactcaagagagtctcagtgtgactcacatgcgcacacacacatacacatacgcggttgcatgggcacacacccagtatggccggccggataaccttgaaatattctactctcgagagaggtgtgtggccaccggcttagctgtcttggacacctgaacgacatgca

SEQ ID NO: 52324 - DNA, 416 bp, Oryza sativa
  unsure (1)..(416): unsure at all n locations
tccatttgcttcngcctgggcgcgagatattattcttcccctatatttgtgttctcaccaacgacgtgtccgtacagtagtgctgaggttnttgttggcatttggcggaggataatgcgactgccaaggcggatgctacagcgcggcggcggcggtggagccagctgggggatcgaacggctcgctcgggtgcacggctccccacgtcgcgtcgcgtccgctagcgtgagcagcgtctcgtctcgttctcgtggggctcgtggcgggttcttgtcgcgcttctaatgacaaggatgggtttacaaacccgatggaaaccgtctggttactgtgtataccgttgggaacgagaaagtttaaacccgctggactcccattaatttaaacacaatttgaattttccacagcatttatat

SEQ ID NO: 52325 - DNA, 374 bp, Oryza sativa
gctttccaagtttaacaaagctagacaagactgaaatggtgtaataaattaacataatatctctcgtagtcgccacggccttcgttcttgtgcatgtatacatagacacacactacacactagccttctagtagtcaccaacacagcaaagaactgcatgctcgtactgacaaacaatccagagcaaacatgacaaggtaggtagcaggtgggcgtgtggccattattaaattattatgtctcacgaaagaacaaaacaaacgcagttcccatcgtttgtccagatcaggatcggcctttcgttgttgtgatacgctatagattatgcttagttctagactctttgcacattcgcccagtgagttgcgccccta

SEQ ID NO: 52326 - DNA, 372 bp, Oryza sativa
  unsure (1)..(372): unsure at all n locations
ctgtcagcggttcggcaatggtcaatgggggcccgtctncctgttgaactctataatcaaaccatggccgtccgaggtgggctttggatcttattggtcaaacttatccttcggcatcaaaggggcatangttcttggtagttgctacggattacttcaccaagtaagccgaagctgtgccgctgaagaatatgacttatacggaggtaattgcctttaatttgaagcatattattcatagattcggtatcccgcaaacattaactacggatcaaggtgtttcttttatgtctaaggaagtaaagagttctaccgaatcttatggtattaaattgttgagttcttcttcttactacgctcacgcttatggac

SEQ ID NO: 52327 - DNA, 465 bp, Oryza sativa
  unsure (1)..(465): unsure at all n locations
nntagttgcaccaaagattggattaaagcagctaataatggtacactntgtgtctgtgntcattgcttatttggccattccttcttgtatatatcaatatatctatagctgatccatgatctgatctggcatcattcttaggttataagactcacgctatcatcaatgagttggacattgaaagccgagagaggcatctggcaaacttattgatagtggtgagctattttcttattttacctctatgaatatttttcttaatataaaaacaatattattcgactcctgtaggagaaagaggagaataatgatgacatggaacatgatgatgttctgatggatgaaatggatgaataatgattgtgcagttctcatgcatcggactgcaagtgtacttgaaatngctatgggctaaatactantttgatcttattgtgttacctatataactctaactccatatgt

SEQ ID NO: 52328 - DNA, 301 bp, Oryza sativa
  unsure (1)..(301): unsure at all n locations
gaaactctactgtgtagattaagaagttgaatctatttgcttctgaaaaaaactgacttgactaaaccacgaaatctaaacttaggtcgagtttagtttcaaactttgtnttttctaaactttcaactnttccatcacatacaaactttctatacacacaaacttttaacttttgcgttacatcgttccaatttcaaccaaacttttaattatagcgtgaactaaacacacccttatctagagaggcctttagttacttgcaaacgtagaaatttaacgacacatctccgatctccggcaa

SEQ ID NO: 52329 - DNA, 380 bp, Oryza sativa
tgaccttgaaactcagcttgtgttctacgcggcaccagctacctatcttgtcggttcttgtaattctgatgatcttctattcttcttcttcttcttcttcttcttcttcttctttctttcttactttctttctttcgccttcttctttctttctttccttttcttctttgaccttttaccgtggcgccacaattcaatttgttcttttttgaataaaattcattcattcttttatgcctggactatgtcgggtttcgctttctgtctatcttctgtccaaaagttgatgtatgggttattatgagcttttgcaaagtggggagttatcaatatataccaatctaatacgtgtactacccaaatattttcctggttaacat

SEQ ID NO: 52330 - DNA, 346 bp, Oryza sativa
gcttagtcaaacttaaacaatgtgtcttttttcttagtcaaaacgtcttataacgtgaaacggagggagtagtagctagttgatgagaatatggaaaacttgtgtttcttatattctaacttctattcactcagtttcaaattacttatctcgttctagatttttcataagtcaaccatttgaatatttgaccatcaatttctacaaactcatttagcttagcattattagatttatattatattttccgattgaccatgagaaatacttttatgaattataattcacgtgttgttgaactacacggatttttataaactaatggtcaaagatatgcatatttgac

SEQ ID NO: 52331 - DNA, 447 bp, Oryza sativa
tcttaaaacactgaaaagggtggagtatgaatgagtagctttataattttaatccatacaaataattgagatatacaatcatacacacacatacaagattaaatatcgatgtaattgattatccatgtgtgtacttctaattagatgatcggagttttaaagttttggccaatttttatctcaaaagccagacctttcttttaacacgaaggagcaaggttataaatgggcttggtactctgggctgtgccgaatctcttacgaagatgacggcccataacacggatgccatgacgggccaatcgcggttcgccggatcgctcgacgcggctcgcagtcgagggcaagatcgccggccgctcctaaagattctaaaaatcgccacagaagctctcactgctctcgcccgcgctgtcaatctacgtgtctgcttcttcgttgtgccgc

SEQ ID NO: 52332 - DNA, 274 bp, Oryza sativa
gggctttactgatgatgtactcaggtgacacaactgtaccattgttcataaaacgcctaagctatgatgttagacagttccttataagataacggaatttggtaggagtacaatttactctgcgacaaacagagaatatatgcttgttaatccctgtagatcattgagccatcactctcttttacagcattatgcttcctcaaaaaaatgattgccttttactgaaaatttttttgtcctcgcagtgcgaccatcatcactgtcgacatgccct

SEQ ID NO: 52333 - DNA, 425 bp, Oryza sativa
ctcaagcttgatcagatatctgtaggcccgattattatcatttgatctatttgaagcacgcatgactgaactcttggcacaacttcaagaatgcaacaccgagctggacatggaacatataaagctatccgatcttccaacatctgtcgaagaacagaatgcaagaataaaatccgctatcaagaatgtcgcggatatgaccaagtccctataagtattcctggaaccgatgctcaagatgcccacgccatcgaagaagtataacaatatatgcaaagagctatatcggctatccaacgatacttgtctcagtgacattctgtaataagggctatcacatattgtaatctgctaagatgattctgttactagtcttgacaaccctgtgccgattaaataactccatgctttttgcttaaaaattt

SEQ ID NO: 52334 - DNA, 404 bp, Oryza sativa
gtgctgtcacctcaataactgcctatcactcttggccaaaggattgcaagaatttgatatgcgcgtctgccttggagcctcccaagagtgtggatctgtggagttcttggctgatgcgtcattcttaaatttgagtgttttgggatgcctggtttggtcccttgtaccactagcagtagttgtacattgttgaacttgaactgaacaattacaggagtaaacaagctactgctagaacagcaaaaagggaatgtgtatttgcaaatagagccactgaatccttgatcaatctattttgcattacaccgagtgatgtgttgagtttattgtgtctttttgttcattaatctccggaattttacacatacatcttgttaaataagaaaaaaacaagtattcacata

SEQ ID NO: 52335 - DNA, 264 bp, Oryza sativa
  unsure (1)..(264): unsure at all n locations
aatgcgccgacacccggaactatccgtattccaacataagcacggcacagaccaggngagaactgggtgatgcttcatgctcacattcagaaagcacacgaatgaggaatgtctcacagtgtcacattccgaacctgcatgtagccatgtccaatgaaacgggctctcaagggggggcctgaacgagtagataagccgtcggactggccatgactgcatcagctgaatccgatggagtgaccacaaggagaatacccattcgtg

SEQ ID NO: 52336 - DNA, 435 bp, Oryza sativa
cagcttatgtcaatctaatgagacaacggattatgatgtttataccgcttcaacaacggaggagttatgatggtcgatcagatctaaatatttcacaagagatggcatttaaagatgaaaagttgaaagagcttgtttacaacaattgcttagaacgtaccataagacacaccattgaaaaaagatagtgcgcacaaagagtttcacacataattttattcattgctattcgctagacttctagtactttttatgtgatacatcattatgaacaacattattaagacaaccgtcgcatgatgactaaatatagctaaaaagtttggatgggcgaatgcctatgtgttcacaaagcaatggggagatgctggcatatgaacaagactcacggctcccaatgttatcatccgtccatcagccacaacaagcacatgg

SEQ ID NO: 52337 - DNA, 318 bp, Oryza sativa
acaccctaattgtacaccgccacaaagcgccattaggcacctacaactatccgatgaactggatgatccttcacacatgacaccactttgctcaccacagaagatacgatgttgccaaagaactatacctgcatcacgttcacgagattgtgcagacctgagatgccatccttgggttctctcaggaatgacaatgtcagcctctcaagattatgcatcgatccctcattgaaatgcaaccttttaaggttcaccaggttattatcgatcaaaagcttgaccctggaaaacctccctgtggaaaaacgaggcgatcat

SEQ ID NO: 52338 - DNA, 277 bp, Oryza sativa
  unsure (1)..(277): unsure at all n locations
tctacnacagcaggcgaccccatgacaccggcaacatccattgtgcaccttactggatctggacgtaccggaacctgggatcctccaacagaacttcacatagcacctcaccataggcagcatcgattcaacagacctcgtcatcgagaggcatcgcacggaggctgaggctgtgaccgagccaacccctcggaggctgctgcgaattgcaggacagcaactactcactccagactcggacggggagctacgagacgatccagccctggacatgggt

SEQ ID NO: 52339 - DNA, 258 bp, Oryza sativa
gagcccactgtaatgcatgtgcacatgtcttggctgtaagctgaatactgaattcgctgcaaaagccgatggatcaaaaaagcacaggcgaatggatctctcattggtcctgcctaaaatggtggaaactgatgagtgctgaattcctgaatgtggtccaacaccggtgaaatttcattcaaaaacccatgtaacttaatgagaatgatcatggagcggtgcatcttgagctaaaacatatgttatcataagcctcaa

SEQ ID NO: 52340 - DNA, 432 bp, Oryza sativa
acaccaaactaagcttgaatggtcagattcttctaagtctatcaggctccggcgctgtgtgctttttacatagctgttaatgttggtggactcctgcagtactcattcttttatcgatgctaaacttggggcacaattgtgtggattgcagaagttgaatcaagctatcaaggttcatgtagctgatggcagccagttgatctgtgactctttccttcccaattgcaactggcggagtcaggggcacagctttactagtgatttcaggatgttgccattgcgcatctatgatgctatattgggcatggaatggctggagcagttcagaccaatgcaagtggataggtgtcataagtggattgcattccaacaccatgggcaagcatgtcaattgcaaggcatccatcccaacttttacatgtttcctatttt

SEQ ID NO: 52341 - DNA, 52 bp, Oryza sativa
ccaccccgcaccggaaacgagcccgcgccacccccaggggtgaccagaaccg

SEQ ID NO: 52342 - DNA, 272 bp, Oryza sativa
cggctgacccccatccgcgagaagaaaattttaaattttctcgcaacagcccagcagggacagttgggagagacagtggatcactcacgactccgctgcacgaagaaaaatcgcccgattccggacaaaagacccgaggatcacactccagcagctgaacttgagcaacaataatgcaaactggagaaaggcgaacaaagacaggacgaacgccgagagcgcaaagagattgaagctaccatccaagccaaacggcaactagtgcatgaaga

SEQ ID NO: 52343 - DNA, 224 bp, Oryza sativa
gtctctcctgattcttttacgtacccttgtctaattgtcccactaaaatggaggctgacacaaaccaatgggtggattactgcatcttatggggttcaggtataaattgactcttcataccggtaaggattgaatacctcatatttgcaccattctggcattggtgctcatctctaactgggctctcaccgtgtgatatcatgcaaagttgagcatgttttcct

SEQ ID NO: 52344 - DNA, 218 bp, Oryza sativa
  unsure (1)..(218): unsure at all n locations
cgcaaacaacagctggccacggagaataaagaatgttttatattatatcgtctactagccaccaaataggatgagttatggaattgtgatacctctcanaatgtgctcaatcaatntgggccaggataccatgtttttttcttgccacaccttaaattcctgccgtgcaaaacccacgaaatgaaatctacccacaaataataaaagaacgggggggg

SEQ ID NO: 52345 - DNA, 322 bp, Oryza sativa
gaatcttacaatggatagcctgtgtctcggtgaactagtgagtctgctgcagctccatatgtggatcatctgaatgccgctcaatgattattcctttgtcttttcacaagaactgggagaaggtgtgccatgcttagatattctcatttatgtgatcaatgcaccggagcagtgaaaatctcgatagaccacgtagagagctgcttgcttgatgcgacacttagtggcgagattaaatataaccgctggatatggctgtgttggttatacatgagcttcattatgacaatgtttaatatggttgttgtgtgatcatgtgagg

SEQ ID NO: 52346 - DNA, 425 bp, Oryza sativa
  unsure (1)..(425): unsure at all n locations
tgaatcagttctgtcgcanagatgagatcttcataaatgcacttatcttntagaaagccagtttgatccatgtgaatcatctttgtcaaagcaatatgttacctataagccagcacctttgatagaattttgacagagcaattctgtaaagagatcggcctgtacccatccactgtgttatctttacctggcttttggataagaacaatgaaggctctgttaattctttccagatgaatagcgccctgtgagaagcctgatgctagatttaagatagcctccctgatgtcgtccaagccgcctgatatattaagctaggaccagaaccgtctggtccatgggcacttgtagaattcatgcccttgatagctatcagcacctcctcttgtgtatcggcagactttgatgccaacatgtataatctc

SEQ ID NO: 52347 - DNA, 300 bp, Oryza sativa
aagcgaatcacgaacagcacacgttgtcgttggggcaacctggatggacggtcgacagcgaggtggtggtgccttggacgggcggccggcgacgctgcccctggatggacggctggcatgccggtattcccacgacgggcggccggcggaaccctggacggacggcccgcgaagccctggacggccggccggcggtgacctggataggcagccgacggcgctcgggaccgagctagcgcgaggagctcccaaaaccctagcctggcggcgtgagcgctgtttctcgcgagaaaggaaacg

SEQ ID NO: 52348 - DNA, 270 bp, Oryza sativa
  unsure (1)..(270): unsure at all n locations
agcttggatggcatcgactacaccgcccataactattatgttttttgacccttancccccgccacgcatagatcagattggcgactccacctgggggtgcgactctttgagtatctagatgcatactctggttatcatcagattcacatgtgctgggaggatgaggaactaactgcattcattacccccataggaacttattgttatacgacaatgcctttcaggttaaagaatgcaggtcctacttttcaacgtactacttgaatttct

SEQ ID NO: 52349 - DNA, 356 bp, Oryza sativa
  unsure (1)..(356): unsure at all n locations
gaccatggtgcgcgcttattatggtttccgcatatcccagaatgtatgtgtttcagcaattgtctcccttcctctaaagatacgcagcgttgcagaattcctgaaaggcttttcttgtataactcagcttcatgcataacataaagattgctccgccttgaaatccgctcggcttcatctttgtcttgagggagttcttgagaagtcaaaaatcgtatgaggggctctcgccagtcggcttcaatcatagctacgtcatgagtgcccgcaacttgagtagtatctttgtgaggtatcgtccgcgtataaaggtgttctacgaanacatcagacggcccatctcgcgcttggatcta

SEQ ID NO: 52350 - DNA, 307 bp, Oryza sativa
acagcggggactgaaaatctaaatcctacaacccctagcgccttaggatatgaaacgcacaaatcatatccctgaatgcttaacattatctcatgaatcgccacgacacatattcacaagaagttgggatacaaagtaacccgaaaagataaaaagatattttgtctaatgcctctaacaggagcaacacaagcatcacagaagtaataggaccaaggcatcataatacatgtcattctgaaactgacactctgaatctataaatgagctcaccgatacacagaggtcaacattcagattgaaaaat

SEQ ID NO: 52351 - DNA, 395 bp, Oryza sativa
  unsure (1)..(395): unsure at all n locations
cagaaacacaggaggggccaacggcaacaaggcaatttttaatatcaaaacancaggccacatggatgactagatgcaagcacttttgagaatgcacaaaacagacggccacacgatcccgcaacccacaagtgcgataaagaacgcgatacaagtgagcactccaagggccgaaaaacagatctcacttcctcaatcagagcacggcatggagagatcgccaaggaacgggaggcaatgaagatagcgttgggcatcataccatctcaagctcctgtagaggagggaaatgagcgctggccatcatagaacatggccaccctataagcgcccggcaatctcttactatgaacacttacaaccgaagaacacacgggaagcatcacatccggacc

SEQ ID NO: 52352 - DNA, 367 bp, Oryza sativa
  unsure (1)..(367): unsure at all n locations
agaataagagaatatccagctatcctcacgaatgaaaaagacatgaatgaatctcacatgaatggtggcttttatttgcagccgcaacccaaatttaaattttaaaacttaagcttatatagcttattctattttttggtattggactctattttactgctttcngttttaagccggtaagaacaaattgatataaaagtttcaccaaaaaatatttttggttgtgttgttattttttctatgacttattagctataactctgaccatagccgatactatttctcaacattcctttttagagagcaactggcattacataatccataaagttatctttatgtcgatttatgaaagctatgagtaatg

SEQ ID NO: 52353 - DNA, 248 bp, Oryza sativa
gcaagtactttggcgacatctatgcatatagcagaacttatgctccaagtaaatttggaggttcgctattagaacctcacacaacacacagataaaagggttaaagcaaccaaacataatcaatgcacttatatagaaaaatagtcattgtgacatattaatattcatactcaacaatgcacggtcaaggctgctggtttctaaatacctcgataccaaaattcgattgtttccttcaacacaacagc

SEQ ID NO: 52354 - DNA, 314 bp, Oryza sativa
  unsure (1)..(314): unsure at all n locations
gtatagagatatgaactatatcaaatttgtatagctcgacaagagttgttgttgatcctctctgtaaaaatcatttagcgttaaatatgctttacaagttttagtgaggtgaacttaaaatagctacgtcccatgttcattcaagtacgtagggtgtcatacgtgagacggtaagcacgttaaacgaggcaaatgaggttcaaatcgtatataccgcacacacgctcattttcatgaaaagaaaaagtgtaacgcctctgttagttggtgaaatgaacaattttagatgtcacatcngatgtttgaccggtgtc

SEQ ID NO: 52355 - DNA, 418 bp, Oryza sativa
  unsure (1)..(418): unsure at all n locations
actagctccaacctcatgaggggagcgcctcaaaaccttttttctttactttggatgatatgcagatccctcgctccgagttaaaaccaagcaatgcgccttttcatggagtaattccaggattatccgcaactccactcggccagatcactctcccgggcacttttggcactcgggaaaacttccgcacagagaatatcagctttgaagttgccgatttcgagacagcataccatgccatactcggacgcccggcgttagccaagttcatggccgtcccgcactacacatacatgatgatgaagatgcctggtccccgaggagtcctaaccctacggagcgacatcaagcaagctgtcacatgcgacaaggagagttgcgacatggcccanacccgcgagatggcgtctgcccgaga

SEQ ID NO: 52356 - DNA, 407 bp, Oryza sativa
  unsure (1)..(407): unsure at all n locations
agattcttcgcatttatctaaaccacagtgtaataaacaagaatgcatgatgaggaccaaaccagctctgatataaccatgactaccttatttattaatcaaccaaagtgcttctatattagatctacttgttatatatttgaacaaacgttgctacacaatgagtttcgtgtgttttcgtttgtagagatacttgcttgggcgaacgaaaagagactgagcataaataatgcatggatgatcaaagaagttgattggggaccaaaccaagaccttctccaagtctacttctacctcactagtcacttttggtccatagaagacaagagatgaagttctacatgtcttggattcggattcnggccttctgacaacaccaaacttcaaacggacctagccgctgatct

SEQ ID NO: 52357 - DNA, 419 bp, Oryza sativa
  unsure (1)..(419): unsure at all n locations
aataaaggagaactagttatgcttgcaatgcatatttcatgtcaaactaaaatatattccactagcactaggtgtctaactctctgcagagaatgatcataaatgaaggagaagtgacagcaaaacatacgatcaatcattcagacgctgtcaagaaacaaacttatggataaatgggctgagaacaccaaattcacaagatccaacaagcccaaaattcacaagtctgcggagaggagcaaacggngaggccacctgccaagaactgagccagcctcaggttcggtcgaaccagccgtatcaccgatggatgtatggtttggctggacggctgggattgatccacaatgatggatggagggcattaccgaccttttcaccgtcattaccagcctatataaacacctcactccctccat

SEQ ID NO: 52358 - DNA, 345 bp, Oryza sativa
tcgtcaactcgttcaatggcgcagaaaaggtactgaaatctttgacgaaacggcgatagaattctgcaagaccaagaaagctcctcacctgtgtgatggtttggggaaccggccaactctctatggcttcaatttttgactcatccacctcaattccctgtggagtaacaacatatccaagaaaagagactcgttccgtgcaaaagatgcacttttcaaggttagcaaacaaacgtgcatcgcgtagagcattaaaaatagcacgtaaatgatccatgtgttcaccaaagactcgctataaatcaatatgtcatcaaagtacactaccacacatcattcgataaa

SEQ ID NO: 52359 - DNA, 314 bp, Oryza sativa
tggtcatgaagacccacttgccggtgatgatccttgcacctgtaggccggtgaaccagagtccacgtcctgttcgcgagcagggcgtctaactcagtctgcatcgccgcgcgcctagtgggatcccggagcgccactctaacagacgaaggtgtccgcgacagggtcgacgtggcagtcatggcgtaccgcgggttgggtatgctgatcccaacccgcgcacgctgtttcatggcgttgttaggcggagaggcggactctggcgactacgtctctggtgatggaggcggtgcgacgtacttgtgccggatcagc

SEQ ID NO: 52360 - DNA, 300 bp, Oryza sativa
  unsure (1)..(300): unsure at all n locations
atgaatatatggggacgccaaatattatcatacataatattgatacagaggaatacatttggacgaaaaccttaccaaattgatgaagttttcagaataaccatggaaaggagtactcctctccgttccataatataaggcacatgatccataatactccctccatctactttngatagtcatatttcatcttggcacacagaccaatgataagtaattctacttatcatccatttaaacatgctactaagcattctccgaaacgagcgagtcattgatatttacgtttctcatgaacat

SEQ ID NO: 52361 - DNA, 386 bp, Oryza sativa
catcttcttaattttcttaacaaccatgccggccagcccaatcttctcatcctgtttaaatgccatggagcaccatgttagtaagaagataattacggagaaacagtaccattttaccgaatatagactgatattacagagagaaaaattctaattgcatactaccaaacacattagatgctaacgaaaatgagtataacatatgttgacatgtatagaaataagcaccacggaaacaaacaaccacattttaagaaatggcaattcagtaacactacatgtgttcaaattgagaaaatactaccataatgtaacctgtaaagtctgaattaacaaacgggtccacatcatatcttacatactcgaatgctggcataccaaacatg

SEQ ID NO: 52362 - DNA, 142 bp, Oryza sativa
gggattatttgtgcacttgctatttctttccagaaccctggttgataaaaacgagattgcatcattggattgctcttgtgctaacattctatcaatattatgataagcatagaaaaatcattctgcgcacactaagatttct

SEQ ID NO: 52363 - DNA, 277 bp, Oryza sativa
gcatgcaaacttgcccgcaggcacgcctaatgtctcttccttgaaatccatccacattccaaacgcttacatgtgtgttaaacccccttccacgaaataaccgacgcacacaataacaaattgatacctacagacgactaaataactatttcatgttcgccaataataaattactacagaggtagatagtttctctctaagaataaccttctacgcagcggaaatatataactattacaaactacggggcaactatggccactccactccataggca

SEQ ID NO: 52364 - DNA, 423 bp, Oryza sativa
tctggagaaaaacaatcacctagctcttggtatctgagggttatcgcgtcgaggctaaaccctagctagcggcgcgccggttgtggtgctgcaccttggagcaacggagtggtggcgttgacagcggagacggtgacagctgctacagaggatctcgacgcacccggcgtgaatgagggagcatggtgtgcgctctctggttgagccgcgctaagggaagacgcacggcgggtgaaggcgcactgtacgagctgcgtctagacttggctgtggtagtgttcccgaccattatgggtctagacttggctatggatacaaaagcacaagctaccgtcatctcggaaatgcatgccaactgtttagagatgagccatgaagcactggggtcatactagcaatcctgatgtcttgcatacccatatc

SEQ ID NO: 52365 - DNA, 469 bp, Oryza sativa
tgtacaacagatcaaagggtagcaagagctcgtatcgttggtgttaaacaattaaaacatgcacagaccgctggcaatgtggtcaatatggctgattctgctgccaacttagcaagcatgcaaggggtgggcacgaaagatttagaaacttggaatagcctccctacattcctgttccgtgccatatgtgcgccatttgtgcgggctgttttggctacacgacacgccagagtgagtagtaatcagactctgggtcaacctaattaatgctacaatttccattggattaagtatataggtaggctatgctgtcattactgcgttgatctactgatattgcaaattcatctcatgtgcaacatgagaaatgggatctagctatctcacgttcatgctagtttacatgtgattaattggtgctaatgatacagaaaacagcagacttacacccaatatgtatagccatagc

SEQ ID NO: 52366 - DNA, 320 bp, Oryza sativa
tgcagctttaatgacaagggacacatctttttatttcttacacaccggaagcttcgtcactcatggcgcatgggcggatgaccaccccttcctgttctcagtgtggacactcacagtaaccaattgttctcatgttagcactgatcaagaaagcaccttcagcatctcacctctggattggctgaaccgcctgttcaacgtgtgcaatcatcaacctggagaacacatttcttctgaaactgtcatgtcaacacgcttggtctctgtgacctaacatcgacggagtcgtcttctttatgatcggacaagaattgatggtg

SEQ ID NO: 52367 - DNA, 107 bp, Oryza sativa
aacccactagaaactgtttcaccaccaagaacgcagttcacaactccgagaaaaggcaacaacggtcgtacaaacggctcctaaaaagaacgaacaaacctaaagaa

SEQ ID NO: 52368 - DNA, 313 bp, Oryza sativa
  unsure (1)..(313): unsure at all n locations
aaaaaaaaaaggagggcaggaaataaatgaaaatatagatgaaggagaataaaaaaaaaaggggagaaagaaagatgtaagataaaagaagaaataaagatgaagaaaaaaggaaaaagaagggaaagaagagggaaagagaaaaagaagaaagagaanngaagggaggaggaaaagagaaggaaaaaaagaaaanaagaggagagggggagagatagggggaagagaaaagataaggagaaagaggggaaaagaaagaagggacgaaagaaagaaagagagaagagaagaaggaggaaagaaagaggaagaa

SEQ ID NO: 52369 - DNA, 468 bp, Oryza sativa
ctgcagctgcagcttaggcacggttatagaaaattttgtcttgttcttatggaacgtaataatgtgtcgacatactttcagtatcatcgtcaacaggtccagtgagcctgcagcaagaacgctctgctggatcttgggctttgatattagccatacattacattcgcataacactggtaaatgaatgaaagaaggtaataataatgtgaaactggaattaagtgtcttaccttttctaaaatggacccaattgttggcagaatccgtgatacaagtggttctaaacatccaggagcattcttgatggcctaaaaactagaatcctgtttagtgggttgtaacttttatggaatcaagaacattaacaaataagttccaaatccaaacttcggctgtcagaaagtaaaatatgtaattacccctaaaatcaagtaaataatccgcagaacaatccactcaataatctgt

SEQ ID NO: 52370 - DNA, 206 bp, Oryza sativa
  unsure (1)..(206): unsure at all n locations
cgtatagagctngacactttgtctgattgatttaacaccaaagcatatagtgctaaaaatatactccatcattttatattataagatgttttgtaattgtaagtcaaacgtctttgactaaattcatagaaagtatatatagcaatatctataacactaaattagtttattaaatccaccattttaaatattgtataggatatttg

SEQ ID NO: 52371 - DNA, 267 bp, Oryza sativa
gaattttctggaatgctgggattatatattggccattcgagtcatagaaaagtaccctgtttagaaagacctgatgaccaaaaaactataccccaacttttttgagagtaaagatgtaaaataagccagaagtcaaatctacagttaatgtatttaacacatatttgggtgataaccaaatatgtgattaaacttataatacttatttatcacaatatggttatttataaattacttagggactacggtccataaacccaaaatctc

SEQ ID NO: 52372 - DNA, 161 bp, Oryza sativa
cacgagctcacttattactgcggatttttttttgcggtggtatagcatgagaacatatgtttgccgagaggtttatgacaatatgtagtgaattttggatttcaacgggaactatatattactggagacaccctacctattcaggggaaacatggcttagg

SEQ ID NO: 52373 - DNA, 426 bp, Oryza sativa
  unsure (1)..(426): unsure at all n locations
aaccaaaccaccacatttactattcttactttttaatnntganggcatatttgacattgatccaaacgtttgtgcatagctcttctttctttatattggtcgatcagtactgcttccaaattggagtaatcaaagacttatcttgagtagagagaattgagacaaatatttgacgcagaataagggaaaccgagccattttccatgcattgtgggtatatatatatatggatctccaccacatatttaccccttccgttgacataatagaccaaatggctagtttgtaacaagaccatggctccactttcttttatattataattgattgatacaattttgaatttagtttgggtatcctttttgaataattntaggcagctcattttacatgtcttacagtactactcccttccgcccaatataa

SEQ ID NO: 52374 - DNA, 182 bp, Oryza sativa
  unsure (1)..(182): unsure at all n locations
attcttggtcgctaaacattgcatggtgatattaataaacgatggtaatgcgatggctataaacactagcttcattaattgtacactgttgtgatccctggtattggacacactctatttgagaatccgacatcacacacttggttntgttgtcttgcgacccaaaaatccaagtgtggggg

SEQ ID NO: 52375 - DNA, 267 bp, Oryza sativa
  unsure (1)..(267): unsure at all n locations
gttcggaggaaagaagccgatccgtatcgaactcgattccacgaacttccaaaacgaattactcgatgtttccccataataaaaagtagaggagatcccgaggatcatttcccctctatcaattcagccggatacggaaagtggcggccggatctggaaaggaacgtcngtggcgcgaaactaaggtttcgggcggcggcggccggatgtatacgacgagcctgacaagtgggacccacctgtcagcgacagcgcgctcgcgcgggc

SEQ ID NO: 52376 - DNA, 363 bp, Oryza sativa
gccaattctaaccttttcatgatacttgacattactgtcaacgtgatgtccattgaaatgcatatgcaccaccccaccccacacagtgccagaagcttaaccaatggctgcagtctggcccgttttcatgacaacttcatcaaagtcacgaatttctcaaattggacaactccatggtccctatcaacccgaaagtgaccacataaaatccatagaggtgcaagaggcagaaatcattaaattagaaatatcaggttgacagactttcacatattacacccaaatgcttaaaagggtggaagcataatcttcaaacttcacgacaccaaagcctatgacttgcgacatgaatcatatactttt

SEQ ID NO: 52377 - DNA, 396 bp, Oryza sativa
  unsure (1)..(396): unsure at all n locations
tatatcgaggctgggagagagggcgctgcccctattcaagctcctcaagcgctccatgccatttgtgtggacggaggaagctgagcaagctctcaatcagctgaaagcttacctcatctcctccccccatcttggttgccccggggccggagaaaccgttgctgctctacttagttgcgatcccccatgcggtgagtgccgtcctagtagtcgagcgcgaagagagcggaccggaggcccccttgactcacgatggcccttcgtcccccgaagacccggtgcccgaagcccncaacccccaggaggaccccgaggcccccgtgggaggaggggaggctntggcgagtgttcccgatgcctatggtcctgacatgactcgagatcccccccgggccc

SEQ ID NO: 52378 - DNA, 362 bp, Oryza sativa
  unsure (1)..(362): unsure at all n locations
agcttgccgttcgcttggaactccatcgtgttcccagccactccggatggatgacttcacggatgaatccggcctccanaagtctcgccacctcctcgcggatgaaggcttgacgttccggggcctgccgccgtactttctgccggaccggccttgcgcccggccgcacggcgagacggtgctcaatcacctccctggggaccccgggcatatccgccggtctccatgcgaagacatcagcgtttgcccgcaggaaggagacgagcgcgtcttcctatttgccatccagaagaccaccgatccgtgtggtcttggatgggccgtcgcccaaggcaacctccttgaccgggacctcgtcgcat

SEQ ID NO: 52379 - DNA, 236 bp, Oryza sativa
gcacatcttcacttgatcactatcagacctgatctgccattcttccgaacagcctggtatgcgtggactccggcatggcaacttccgtttctccctcgagctcttctgacgacttgggcatctcgtccggcgcagggaaacaaagtttgggtatggtggagtgatcatcacccggagacgacgacgactcggcgggcgtcttacgcgcctgcgcacggcggtggatggcactgatc

SEQ ID NO: 52380 - DNA, 354 bp, Oryza sativa
  unsure (1)..(354): unsure at all n locations
gctcgagggctccaaattgaaaccattatcaaataccatnttcaggtgtgtctcttagagagcaatcaacaaaactagtctaaacaacagactctaactgtgttggttcctgaacaagaaaatggatcaatgctgaacagggtgaaaccatactagaggttaaaatcaaagcatagtacgaaaattggcaaatcatagtcaacccacagtacattattgtattgataaataaaaggtaagtaaaatcccccacactaactaagctggatcgatgccaacaacactgatgattattcatgtcactaagttggatcgatgcccacactgatatttattcatcatatctttctaatg

SEQ ID NO: 52381 - DNA, 367 bp, Oryza sativa
  unsure (1)..(367): unsure at all n locations
gaacgcgcatatagnngtgtgtggttcttgataacaactaacaatggcagggatacgcaagataattgtggatagctgcgctcaacatctacatcttcatcgagacatgaggagggatcaatatgaccattatgaggtaagtgatgatgttctatgtaagatcaaatctgcactgccttatttcgaggagactatgatcctcgtgcttacattaattgggagctagcggttgatagtgaatttcaaaaacatgtcttgtcggagaaacacaaaggtatgtgtgcctctagtgttttaatttaacatgcttctaatgattggaaacatacttgtatgcataacaaataccacaaacttggaagacctg

SEQ ID NO: 52382 - DNA, 430 bp, Oryza sativa
  unsure (1)..(430): unsure at all n locations
ggattcttaagtcacctgcagctgcaactttaacataaaatttttttttttttaatgaaagggagaagataatgattcttaaccacaaaacaattgctcatattttcatactttgctttttttaaacacattacaaacataagtgctcacaaacacatctacactcaccctataaacgtacattcgacccctacaagcataacccctataagcatagagatcagaccaacgcattttgagattgacaaaatcatcacaaacgcctcattatcaacatgtacatcgtctagcattgaaagaataattagttataaatgcaagcaccgtgtcaaatctaaaccttaaacccaaacaaacatatntcaatgtgtcaccccaactccacaaggacaaacaatatctatgctcaatgcatcatgttttgtgactg

SEQ ID NO: 52383 - DNA, 320 bp, Oryza sativa
  unsure (1)..(320): unsure at all n locations
cttcattgctcgccattgtccatacaagaggtggagggtttttcattcttcttcttatntnttcttttcttggaaataattttgtaaaacttatttgaaagttgaaaccatgtaaaatgtgccgaacatntttgtttttggtgtttggtttccttctctttctcgagcttgaccgtattatcatacacatgtactttatgtgaattttttttagatatagnttatatggctatacataatagaagaaatataaaatgacaaatggttaattatttgctaatgtgcgcttgatcattgtcgcagtccagcatatcggacgt

SEQ ID NO: 52384 - DNA, 395 bp, Oryza sativa
  unsure (1)..(395): unsure at all n locations
atccttcaacaattgtctaccttcttccaaagacacacagagctgaagtattcctgatggacttttattagacagctcagtcccatgaataaatgaaaagttgttgcgcctggaaatccgctcggcttcatttttgtcttgagggagttcttgtttggtcaaaaatcttatgaaaggttctctccagtcggcttcgatcatgcttacgccttgagtatccatggcttcaattgtttcttttctgggtacagntggttcataaagatgctcaacgaacacatcagaaggggctgcttcccgttttgaaccaaaatttggccagtctgtcggttgcctcatcgttatgtcggaggacatgggtgagctcgagtccatcgaattatcttccaacttgc

SEQ ID NO: 52385 - DNA, 280 bp, Oryza sativa
gcttcttaaatagcctcccaatgacggttgtgacgattggaatggtcggaaatgctctccaaccgtcattgggatgtaatcctagacgtccacgctaagccctgcatccaacgacgctggtgggggttcggccgaaccatgggctggcccaatcctatccattatctgctggcagcctatttgacttcttctctccgcagacttttgaatattggtccaagttgggtgtgtcatttctgagttactggcccatctttcgataagtcttattctcgacaat

SEQ ID NO: 52386 - DNA, 374 bp, Oryza sativa
caacgatcccaaattaaaagccgacaagttctgtgattaatgacatgcgtgtttttggaatagctgacatgaagattcatgagatggttaaaattaattttgaagtactcccttcgtttcatattataagttgttttgagagaaatacccaagaatcttccaactagccggcttgggttcgaagcctcaccccttctatttatttgatattagggacttccctaatattcgtgtttttttataagtcatttcgactttcttctggtcaaacttttttaagttggaccaagtttataaaaatttatagcaacatttccaacacaaaacatacatattaccaaaatatattcaatgcatatttattgaaactaatt

SEQ ID NO: 52387 - DNA, 442 bp, Oryza sativa
gctgcggagtatattgtggataccattttattctatgcaccacagaatcctcttcctatccatcaattaggcatgggagccatactggattcatctgcctctccgatgacaacgcccaggtttatagtttgttcctcattgtgagtagcaactgcagcccatagtggtccattgtgatgtggacgatggttaccgatcttccgaaaggttctaataggcagtcaatttgagcggagtcgcgacacagcccgatccggcttctgaacgaacacgctcttgagccccgcaatcgtagcaccacgtctcctctggttatcacccgtatcgaaacgcggaagacctcgccgaataggctaatccctgtttgcgaatcgaagaacactaacaagaacatggaagaatacaactaatattgtagatgaatgataaagctcacaagttg

SEQ ID NO: 52388 - DNA, 276 bp, Oryza sativa
ttcatgtctttacgagttacgatcaatcaatctatcgatcattgaggtggcgccagccgcgccgccgtgccatttcatttccagctgcaggtccacctcgtcggactcgacgccggcgagcctcaacaccaagccctgcgccgtctttcccttcgacgccgaccacacaacggagctcccgctccttgggaccacggcggtgccgtcctctttactgtcaacgccggatggggtacggcggcggatgtattccgcggtcatcttaacaatggacgt

SEQ ID NO: 52389 - DNA, 262 bp, Oryza sativa
tcgtcgcccgtagcgctctatcgccgtgtgctctaacgccgccgtcgccgccgtcgctccagccgtgcgccgccgccgttccagacgtcgtcgtcgctcgagaagaccgccgtcgtggtcgccaagccgtcgccgtcctcgtccaccgcttcgccaccgtcggagaccgccgaagcatcatcgccgtcgtcaagccgaagaccgccgccgtttcaacctcgtcgccgtcgccgtccgttggtcttccgccgtcgctttggtc

SEQ ID NO: 52390 - DNA, 291 bp, Oryza sativa
ggcgacattagaagagtgtcgaaccaacgcggtaagagagaaatccgcatggtgaacatctgagacagaccatacggtcgttcgtcatgctagcaacacccccccactccgaccgaccgcaggcaagaaagaataatcaaagtcgaggcctagcatttccagaatagtacgagaggggattacatccataatagtctcctgaagatagagaagagagacatgctcatcacggactacatcacgcacagcattctggctggcgcgcgagttcagaccttgcacgttccacac

SEQ ID NO: 52391 - DNA, 337 bp, Oryza sativa
  unsure (1)..(337): unsure at all n locations
gctgtaaaaaaagaaagaaatgaaaaaaaagaaagaaaaaaatcagaagtgaagagaaggaaaaaaaaggaaggaaagagaggaagtttgtgttgctgctggttttgttgtgttattttcgtgctattttgcgtggctacgcttgtgactaagctcgcgtctctaaagggttttgcctatgaccagcacaataccatcgttgagcgattattcaacttgcattgattaatgtnggtctaaagtgaccttgatattacttgcagccacctatagctncacaanttttatctactatatcacangatcgngcttgttgtcagctcgggactactaacca

SEQ ID NO: 52392 - DNA, 369 bp, Oryza sativa
  unsure (1)..(369): unsure at all n locations
tgcaagcttggacgatgtggttggcgtgttctcgtattcgcgcgcgcgcatcgntctcggtcccgggagggaactcctccagcgccatccatggggagaagccggggtccctggcctggtaactcgctaacacgagttccaccgctccttgggcgaggtccctcgaggatgacttgatggtcttctcgagctcctcggggagttgttggacagcccaggccatcctcctaaggtgcggngcgaggccttccagattggtggagcgcgaaattgtctggcctttccagaggcccgcttcccgaccggcgcgatccagccgggagactgcatcccaaagcatgccgggccctatctcacccgacaagcgga

SEQ ID NO: 52393 - DNA, 440 bp, Oryza sativa
  unsure (1)..(440): unsure at all n locations
agcttaagtaacctcgcgntnactttggttagtttctagatcacttgnggccgccggtcgccatatgcaccggcgtccgccgtgtatcacgaccgtggtggcggggcccggcggccaatgcgtgcacgtcgccggccggggaagctcgagaagctcgggaatccgggagtggggttgccgggatccccgctgtccgccggccggacatgcgtgggccgacgtcgccatccatctctggccgccccactctggccttgcagtttctctgcagaagctactactgatctttcttgtccggngacgacgccgacgtatagtggtgtctagctagctagctgcagatattctccagatttacgttgatgaactggtatcatctatcgtatcctcattataaacagctcgctccagtatgaatcttgatcgattagatagtcttg

SEQ ID NO: 52394 - DNA, 177 bp, Oryza sativa
  unsure (1)..(177): unsure at all n locations
atgcatgcgcgangtcaccgnaactattggatattaatcctgggctgcagtagcgggattaattatgagaggagaatatggattagcggcggcagaagatgtcccgggcaaaagagaggatggagattaacgaccagaattttatccactgggaccgagtaatatctcattagcatt

SEQ ID NO: 52395 - DNA, 409 bp, Oryza sativa
  unsure (1)..(409): unsure at all n locations
taataagatggtatgccagctacgctaatcgaatagtaatactcatgtagttccagataatatatatgcaagctacaagctaagccaagcagtttaagcaatctgcagcctgcagggccggccgggcatgctcaatttgggaggttagacctgatgatctatgcaagaactttgccaaatgtatttaaatcgtgatgcttccatgtagcatgccttacaagacactccacctctttttcatgaaaggaacaagcctctgcatgcatgccgcgcgcgctatgtctaatatccgtatatacaaacggccggacaccactatgagtatatcacagctaggaggagtatctgttaatttccccttaaanttggntcgtcttattacccaagccagctaagaatcaatcagcac

SEQ ID NO: 52396 - DNA, 327 bp, Oryza sativa
  unsure (1)..(327): unsure at all n locations
gaaaaagcntcttaattgttggtaccaaaaaaagagcagcggatttattagcatcagctgcaataagggctcgttgtcattatgttaataaaaaagggttcagtggtatgttaacgaattggtcgattactaaaactagactttctcaatttatagacttaagagcagaagaaaagatggaaaaattccaccatctcccacaaagagatgtggcaatcttgaagagaaaattatctaccttgcaaagatatctcggcgggatcaaatatatgacgagggtgcctgacattgtgatcgtcctcgatcagcanaaagagtatatagctc

SEQ ID NO: 52397 - DNA, 396 bp, Oryza sativa
tctgatatatatctgttggttctagcgagatatgttatatgagtacctttacgctctgccgagatgtaatgggccattctatgattccatttcttaataccatgaccaaaatgaactcccgcttctatcatttctttcacattgatgttccaaaatcttcttgtcattttttccacacttccttttgattttttctttgttttcatcctacctttccattacaaaattctttctttttcaaaattaagaagagccgaaatacctgaaaaaataatattgtgcgatggacactctactgggtaagcaaaccttttgaataactaacttgttaattaaaaaaaaaaaaattaaccctagcgtctgggaaaattcttaaaaaaaaaccgctttgttcct

SEQ ID NO: 52398 - DNA, 398 bp, Oryza sativa
  unsure (1)..(398): unsure at all n locations
agcttactagaagatgcatcttttgtctttatataccgcgaccaacagncaaagcttacaaaggtgaggtctttcgagaaagctctgcaagacaccatcttcgctaatttttgcctacagaactcattaaggcgtagccaacctgccttgcagctcacgagagtatatgcatgttcacttagagagggtatatattggcactctcctctagactactaatggtcgtcttgcatgttctaancacgggatctgcgacacatacctaggtaccaccatagataactcacatggtgtctaaaccatctccttcctgcattgctatacatttttgatgtacctttggaagggactgcaggttccagctgttggatgtatccacgtataactccgagttctaa

SEQ ID NO: 52399 - DNA, 399 bp, Oryza sativa
agcttggaagtctcccgattcttttttttttacggctgggtgatccgggttagttatgtcgtgtgggaaaagtgtaccccctctgcaaaggttaacaaaactgtcgaacagccgtgcccacggtcatgggcggatgtgaagtgttttctatcgtagtttggtttgactactgcttgtgaaattgctgtgtgaaaagaggctccgcgttagaaaaatctacagctgatgggtcagctaggcccgggtggccgtatgaaaagttgttggcccgggtggccagtgaaaaagctgttggccgggtgccaaccttgtttatattctaaagactgatacattgcacatacttcgaccggacgagacgcactgtctcatccgtgtcgtttgacaagcactcactta

SEQ ID NO: 52400 - DNA, 458 bp, Oryza sativa
  unsure (1)..(458): unsure at all n locations
gccgctgcaactgccatgagacttgatgagcttttttttttttatgatgaataaaccgnntgaaatgatgaatagacccatggttccggactcattatcctgcataaaaaataatcatagcttctatgaatctacacatttgtttgagtgactgagcgaccacatgctcacttgcagtagcggatctaataaattttattgaccccgggcaagccactgacagatgactagtactacaaatgataatgaacttgtacaactctacggaccatcttaccattgacacaagtaatattaacagcacgagctaattggtgtaagatgtaaaatcgatatgacgattattgtgtattatcaaagctgtacgctttgatatgagctgtgatggcatatatagaatgcanacatgtgatggcatgagccttatattatatgctttgctaatttctcaactaatc

SEQ ID NO: 52401 - DNA, 223 bp, Oryza sativa
gccccggcgtcacaccgatgatcggttgagacggctggagcaccatacccggggccttgatggcatcaaaagccccgggggaaaggatggtgagagccgctcctccatctattaagacgcgttccaacttcacattgcagatggtgggggaaaccaacatcagaaacatgcctccacgggcaatgcacagtgggtgggcggtctggtcgaaaggagaacaaac

SEQ ID NO: 52402 - DNA, 281 bp, Oryza sativa
tgtgctgaatgtattatagctaataaacaaaaatggtgtttagaaatagaattagaatcagatgtatagacattatctagtagagtacgagtgttagaaaatagactaaattaactagaagttgaattagagaacctaaaaaataattgcgatattaaggcattaccagagaataaggacatacaaaacaccgaattttaagagcaattgataacattaaaagacagaatactgcttaaataattaactaagagatgcataactaatttggaaaaaatata

SEQ ID NO: 52403 - DNA, 171 bp, Oryza sativa
aaaaccggtacgcgagacgggccaccggctgtggaataccagagttcatagccaccatcgtggcggagacgggacctctttttttctttttttgtacgattagtggcttttctcgtggcaatgtgccactggtgcaaccgctgtgcatgtggcctcaccgcacggaaacga

SEQ ID NO: 52404 - DNA, 444 bp, Oryza sativa
  unsure (1)..(444): unsure at all n locations
tgtgtgtgtgtgcgcggtggggtcttctctctctcgccaatatggattgtggctttatggtcttctgacttgttgcctctttcttcgatgcaagtaattgcgctacaatggtcgggagcaatgtcaatgtccaaatgggctatgatgctcaattagaagggtaaggctacatactgccaaaccaatcatttggattaattttccatgcttatttgtttgcctagttctatgaattttaagctatatgaaagtataacttggtttcaaaaataaaagaaaggatgatgcatacaagatatgtttgcttaaagaaagggtttcttgtgtaaaagggttctctgtttgagtgaaattgccttgtactattgctgcagtgcacgttatttgtttgcttctgcgattaactcanattgtcctgaaaaagaaatataaacaacatatttt

SEQ ID NO: 52405 - DNA, 446 bp, Oryza sativa
  unsure (1)..(446): unsure at all n locations
cgctgcagctggcaaaatttaccctacttattttttttangttgatccaacttaaaaacaattttcaacccttacactgtcattcccttgcagcgctcgacatcatccatcacacatgagttctttttttctaaaccaaaccaatgtaagcctgcgagtaagcgcacaccagcaattttctgttgtcatcgagcgtacattaaaaatgtaaaatgaaggcctgagttgccaataattttaattaatccacacttctatagtagttccatacatcagatcagttttaaatcatgagcttattcacaattggaaccgtcttctatagtagttcccatacatcaggtcggttttaaatcatgaacttattcataattggaacatctctcaggctaagtctcaaaaacctagtaaaaggaaaacaaaaggattgatacataactctacat

SEQ ID NO: 52406 - DNA, 447 bp, Oryza sativa
  unsure (1)..(447): unsure at all n locations
tcttacgtcaacttccacatgtcactcttaacaaaaagcctctttttatccacaacaacatcttgcttcttcaataattaaaaaaaaacagctagtatatatctcttgactttgtttgtttaattaaaaccttggattgcatgcaagtatatcaatcactcgaatcaatcagacaataacctctgattaacttttctcgagagtagtttaattgggtcatgcacgtaatgtatgctcttgagtgttctttcttttcattttttccaccttttttcctcggcaagttgccacgcctctgaaacgcactcatgagctgttcatgtataaactggccaatgctgcgaggattcangaaagctaactaatgcgctacaggctaattgacactcaaatactaacctttaatttcgtgttaattctgatcatcgaatagagccttcaccgatc

SEQ ID NO: 52407 - DNA, 310 bp, Oryza sativa
  unsure (1)..(310): unsure at all n locations
acaaaagtacagataaataaggatgcacgaaactaagtatatcatgaactaaaagtcatctaacaataacattttcaagatcaaaacactaatgccacaagacaattatcgagaactggagtccccagtttgctatccatttgagtctgtaaatgaacacctgtttttgtaagctttcttaccaagctggattgaattatctttgatctaaaaaaaatgccataagacagagagactntgccacatttgaaagctgacattattatgatgagatgcacatgcnggaagatgaataagaaacttaagcatt

SEQ ID NO: 52408 - DNA, 230 bp, Oryza sativa
tttcggatcgtgcgttgcttttggtttgaaatattccccgagtggaacgatgtgactccgtgaccgggacttgaaagtaggagatatctcctgacgttattaagaaccatatagtaactttgaactgagattcttgtcttggagtcggctaaacctcgtaacaaataattgtacggtgactttttgacatggccttctctcacgctgaaacttgaccgactccaacctgg

SEQ ID NO: 52409 - DNA, 391 bp, Oryza sativa
  unsure (1)..(391): unsure at all n locations
tataacaagacgnagaacttgcgcccatctaagatttatgcctcttgtgcatgcgctctacatttctatattattagcccaaaggtttaatgcatgtcacagtggatgccagcgtgatcaaaccttttcaatcatccgccttattctaagttacaaggagcgcactgcatgcatgtgcttttgtagccatgtaatagaaacaaactatgggaattaagtaaaggtaacgtacactcatctataattgttttgtacaactatatctgagcaccacatgagcatcactaccattccagggacatgcactctacatttctatattattagcccaaaggtttaatgcatgtcacagtgatcaaaccttttcaatcatccgccttattctaattac

SEQ ID NO: 52410 - DNA, 462 bp, Oryza sativa
  unsure (1)..(462): unsure at all n locations
ctgcaagctgcctttcatgatcaccatcncttcattaaccacccactgattgacattcatggtctcgagcaagcctgttagagctgcacgcattcggtgcatggccatgacattctcaaatagaatctaaaaaggcatcagatggagagacctggtatatattagataaaatctgtaatcttggaaaattgatgggcagattgagagacattctctgcaggaagaattcattcttacccaggatttctgatggcgttcatgatggtaatggcagtgggaatgcagaccatcccccagacaggaatgctgatttcagggaccatgacagacagcggaatcacaacacggtagaacaggaaggtcaggatgggagcgacgaccctncttacgaagaanaagctgtagagtagatgaagntntttccatacagatacgcnctgaatcacatataatcgggtaaag

SEQ ID NO: 52411 - DNA, 434 bp, Oryza sativa
  unsure (1)..(434): unsure at all n locations
ttacatgatcaccattcttcnattaaccacccactgattgacattcatggtctcgagcaagcctgttaaagctgcacgcattcggtgcatggccatgacattctcaaatagaatctaaaaaggcatcagatggagagacctggtatatattagataaaatctgtaatcttggaaaattgatgggcagattgagagacattctctgcaggaagaattcattcttacccaggatttctgatggcgttcatgatggtaatggcagtgggaatgcagaccatcccccagacaggaatgctgatttcagggaccatgacagacagcggaatcacaacacggtagaacaggaaggtcatgatgggagcgacgaccctccttacgaagaanaagctgtagagtagatgaagtttttccatacagatacgccctgaatcaca

SEQ ID NO: 52412 - DNA, 273 bp, Oryza sativa
aagcaaataaacaaaaatggtgtttagaaatagaattagaatcagatgaaaagacattatctagtagagtacgagtgttagaaaatagactatatatactagaagtagaatttgagaacctaaaaaataattgcgatattaaggcattaccagagaataatgacatacaaaacaccgtatttaaagagcattgataacattaaaagacaggaatactgctaaaaaattcaactaagagatggcattactaattgtggaataaatatatagtaa

SEQ ID NO: 52413 - DNA, 442 bp, Oryza sativa
  unsure (1)..(442): unsure at all n locations
ctgcagcttagctntttatttagattttctttcttccgctagcataagacgggctggctgattgcattgtgtaactaaaactcttttcttctaatatattgacgtgcaatccttttacgcgttcacgaaaacaacctcattgtttcgcttctatatatgctgataagctaaaaatttaattttagagttcattttatgggttttttcatcgtagtttattttatagcanttgctttcgaatctctaagaacatgtatataaaaattttaccgataaattatttgttagttgctaataagccgtaggaataagcataaacataagcgaaacaatatggctgtaagcatggccgtgtctttagtactggacggtgcatacctcanaactcactgtaacccagtgatagatgtaattntaaaatatagatggggtggcatctagt

SEQ ID NO: 52414 - DNA, 431 bp, Oryza sativa
gcttttcccagccccttttcatctttggtcttctgacgtctacgaaggagtgtggttcgttcgacaaattcctacctctatatctatctctgaggtgtttgggttttgcaaaactccatagatatgcagaagagaaatgctatccccactccgaccaagacagaacttttaccaaaagtttattgtgatctttttgttcaaataacaattaaggtgaagcagggtcaggaacaacgaatctctttatgataaacagatccattttgcaagctcgttattacgggtagttcctacaaagaatcggactaatgacgtatacaatgcttgaattatcgacgtagatgctacatagtgggttctcatccttcagagactacgagtggtataggatgcatccgtgacaaaaggatcaccctaagatgatcatctca

SEQ ID NO: 52415 - DNA, 144 bp, Oryza sativa
  unsure (1)..(144): unsure at all n locations
ngaacccaagtcctacagtgatggatataagcgcatttttaattcctgcggagttatacatttgtgtattgataagaccgtcacaatttcttgaagctcgatctcccccccagatgaaccatatttccattagaaaccatgaac

SEQ ID NO: 52416 - DNA, 354 bp, Oryza sativa
tgtgtgggagctgcctcctcaagccgatgtgctggcgcggttgtgcatgaccggctgaaaaatgttccgtctcggcgaccgcgccatgggcgtccagggccaccccggagtacatgcaggacatactcatgaacatcgccgaccgtctcctccggaacgatctcatactggatagctacggaattgactgaactctctgtggtttcttctgtctactactgtagctggtctgaaaaccgaagatttgtgtgatacaagatcaccagtggataagcgaagcgagcttcaattgcggaaccagaacaggactgtgaaataggggcaggggtttctaagggaggctcatctttcatc

SEQ ID NO: 52417 - DNA, 375 bp, Oryza sativa
  unsure (1)..(375): unsure at all n locations
tttttatctgccaagcccagcttgccctatgggaataagataaccttgccttatcagtctctcgagccacaagagaaagctgtccttccctggaaaatcgagttcttttttgtttcgtatgattacaattgctataaaatataagatttctgtgtagaatcctaaaataaaggaagtactttttttaagtacataccaatctaggtctggacctctacatatcatagtcaatcttatgttttttttcaagatatttaatgcaatgaaaaattaaagaacgattctccacatagatatgtacctaagggggatccatagataataatgctcgtcggaccttgagnttacctatatacggatcgtgcgtaatgcatt

SEQ ID NO: 52418 - DNA, 396 bp, Oryza sativa
  unsure (1)..(396): unsure at all n locations
tatttgaagattaaaccacagtgaagactgttgagattaaagattacctgcatcattgatttcatatttgcagtgtatgtggtatctatcattttctccacctgaaaaccacaaatcatagtaatccattcacatatttttgcagtgaggtgatgcactttctgtctaatcataacccttcactcttttttttttacaacaatgcatatatataataaacatgtattgcacttttttttgcaagatacaagtgtacaaatccaacgtattggtgcactatgcatatgcatatgcatagtttggagtttcctcaattatagcccanaacttttttttttttgcaaaacactcacctccatcacatatccataatggtaagcaactcttttcacatct

SEQ ID NO: 52419 - DNA, 308 bp, Oryza sativa
acccgctgatctgatctttctgttcttagtccatatacttttgtttcttggatgatctgccccttatctgcttgtttatctgtcactgaacttggggaggtttggcttctacatgatttcaaggctgttaactggggaatctggttgtagatgatatgttagagaggttttctctaagattttcagtagcgttttaatctcgtgataggtgataagggtttcatgaactctggcggatcggcaatggctggaagcaatggcagaatccattcactgataagttttccttattgaaatggtgtcacaat

SEQ ID NO: 52420 - DNA, 350 bp, Oryza sativa
  unsure (1)..(350): unsure at all n locations
aggagctactattcactttgattacatcaaacttaatgttcctcctcataactttgtctccgtgccttccgggcgtgcacctcattttgatgggacacattatgccgcttggaagcacaagatgaagttgcatctaatctctttgcatccaagtatttggaaagttgtttgtacaggtattgatgtacccaatgatgacatggagctcacttcngagcaagagcaactcatccaccgcaatgctcaagcttccaatacaattctctccgccttgagtccgaaagagttcaataagtttgatggtcttgaggaggccaaagagatatgggatactttgcaattggctcatg

SEQ ID NO: 52421 - DNA, 396 bp, Oryza sativa
cctttgaactttttgagcctatatttgaacattaatatattgctggacaaatattatgcattgtatggattgcacttaatctgcttgccccgtctgcgatgcagattgtcaagtctacctaacttgttgcatttgatccttccattgtaattgatatatcatgttcccttgtaaccatctatttgcgcctcgatattcgtgcactctgtgcgattatcgtacgtcgccttcaaacttaatatatgagtaacttcttgggtaaaacttggtttacataatgattggaaaacccacccctgagtcatgccttgtgaaaaaaatgagtttaaaaataaactcggacacatgccattcttggcgaatgctggtggtacattaagaccgattcttgaattc

SEQ ID NO: 52422 - DNA, 403 bp, Oryza sativa
  unsure (1)..(403): unsure at all n locations
ataaatagatttggttgatcacaatagatcgaagtatgaactgtgaatgaaggcttgacaaatatgccattttctttgtgcctttgtttcaccatagaaattacatatatatttttgtttgatcacaataaattaagtcattgagtagctatccttggagctggctatgacctatgtaccgntcctgataatattntagaatatgaaatgctttaagtaagtagatgtgttgttaatttatttcatataatgcgcaaatttatagataacctagtatttgagattcctagttaccctattgttcgtgtactattcacaaagntgtgttataggattgacattccatactcattatgtgcttatataacaagaaagaaagtccatatgttccatttgattatat

SEQ ID NO: 52423 - DNA, 236 bp, Oryza sativa
tttcgtttgaaacgattcatttcctccaaagttcctctaaactctaaaggccttgccatttacgtgaactgttgcgtcgaaattcaaagtgcaagtgttgcttgactgcctgtataactgcacagcaaccatctgatggaactattacataacaaaagcatatttgtgcgctattttaaccttctgacaaaccgagcggaagaccttacatttattatgtgccaaatatttttgca

SEQ ID NO: 52424 - DNA, 388 bp, Oryza sativa
  unsure (1)..(388): unsure at all n locations
actgtttgacaccttttaagattcattgtaccttctcctaaaaagnngagtaactgggatataaaaggattttaaggtattgggcacttgatcacacgcactttggcctaagcaaaaagtgcttaagtccctaaaagaacgtgacaagccacacctgaaaatatgagctgtagacatattaggcctatgccaaaaaatatgccttcgacaccctttaaaggattatgcatataacatgcttccgagtaataaatcttccgggtgatatagactaagtgtagctcatatgaatagcttctaatctgagtgattatcccttataggatactccaaaaaatatatataaattgaatcccgactggcgcaagtattcgattgatagccctta

SEQ ID NO: 52425 - DNA, 385 bp, Oryza sativa
  unsure (1)..(385): unsure at all n locations
ccgcttagtctatgggctggtatnacattccaattcgctctctttgtggtatacagcctgaaacaagtgtgcacctattcatggagtgcttctatgcgagacatgtatggaacaacatctggctgaagctaggccttcagattccatcactgtctccctttaatggtgacatgcttgagtgggggaaagcttctatgaagcaaatgatcaaagaacaaaggaggtatttcaacggtttaatcatctacacaacatggggaatttggctccaaagaaaggatcaagtctcttatgatgcatatggctcggggcaacaagaggggaattngngtgtggccatgttgcaagcctaccatgtaacgatcagttgtctttgcaaacattg

SEQ ID NO: 52426 - DNA, 396 bp, Oryza sativa
  unsure (1)..(396): unsure at all n locations
cccccggaagaagaagttcgcttgattgtcatcgtgctgttgctgcatcatttagttgaagttggcgaactgagcattatcagattgttgcaattctagcgtttgagatatgtgttccgtgagggtgtactggatctcccccgtctgcacatcaagggtatccattctcctagtgatttcacctaagtcccaacaagaggaactcgagcaccattcacaaggagatggaggcacaccacttgatctgggaggttggttatcccccaatgtatgtcatgagacgcatgccatcggtcctcactggcactcgcccagttttagactccgatgctgtggcgtggagcttgggtccctcttggtgcatccctangtggtgcccatcctttctcatacatc

SEQ ID NO: 52427 - DNA, 294 bp, Oryza sativa
gcatctcgcctggctgagcgataaacgtcttctcctgctcgctggtgaccccagcggcctgcaggctatactggatcgcgctgaccgacagcgtacccgccgtcgcgggcccttcacgtgctacctggtgtgacgtcttgcgcctacaccttgacccccacattcggactcgttacccgacatgcgcagctccccggggcggaacagtactagatcatgatagctcgttagttcgtggttattcgtggtttaattctgtatcttcaatgattgaaggtgtcaattcaaatttct

SEQ ID NO: 52428 - DNA, 441 bp, Oryza sativa
  unsure (1)..(441): unsure at all n locations
gcctggtcgatctcgagagatctaatttttatgacgagngntccgatctcgtctgaagatgtacttggatagggtggatctccccacagccgaagtcgtcgagtagcttgttgtcggagagtccatctcttaaacccaactcgtcgaaatcctgaagcaccaaaatccccctacctggcgcgccactgtcgacgtttgatgtctcgactacagtatttggacagtatggggatcattggtgctaggatatacgcgagactgaggtaaaagagatggagacgaggattnttatacaggttcgggccgctgagctgtcaggtaatagccctacatcctattggccgaagccggtattgctcttattcatgataatcacaccagtacaatatgtggggtagcctatataactggtgtcgacatggcggtctgacgatctgactc

SEQ ID NO: 52429 - DNA, 307 bp, Oryza sativa
  unsure (1)..(307): unsure at all n locations
catntgatgttatatttcatgtagctaagagtcagttatgtggaataaaattttcctccacaatttgggttcctcgagattatgtggaatctgctttcttgtccaatacaaaggacatgtttcattgcgattttttttttcaatgttattgcgaaattgaattattgatggtcttggaactgatggtggcatggtggttggctgctccggttgcttgtgcccttgggtcccagtatgtaccactatcattactaaactattttttgcccaattgattgaactcaaatacaattttctcttttaattc

SEQ ID NO: 52430 - DNA, 415 bp, Oryza sativa
agcttcttgatcaaagtttaaggatttttcttatctatgaacaacatgcttcagaataaagtcaattacctccgtgcaagtaatattctcgagcagcatggcttcggccaacttagtgaagtaatccattgcaactagcacgaaccaatgaccttttgatgatgaaggataaatttgaccaatgaaatccaaagcccaacctcggaacggctatggtttgatgataggattcaatacagcggcatgcgccaattgaacattgccgatccgttgacaagcttcactccctctgtagcactagaaacaatcatcaattattttcggccaatgaaaccccgctctcctaagcaatcaattcatcttatgggccgattgatgatattcacaaatcccttcatgcacatctcatctagca

SEQ ID NO: 52431 - DNA, 420 bp, Oryza sativa
  unsure (1)..(420): unsure at all n locations
agcttgcattaaacacctttattttcgtttcttgctgagnacgaaaggactcacccttgctctatataaatatatatagctcctccgctctgaagtgaagatgaagtgaagtgaagaatatggtttcgtcctggttcccagccgtcgcctgtggtgttgggtgttagtccgctggttccgctgctgctgctgttgttggtgtttcctcgtccgcgttgtcggttttattctcaggctgttctgagctgcaacctaagttaacataaataaggcctctatttattttaaggattgcaatgatccatattngtcactgtgggtaccagcgctatgtcctgggactggtactgagatcgcgggttcgtagaaagcggttcacgcccgttttcctatgacacgctcctgtcaggtgccgttgta

SEQ ID NO: 52432 - DNA, 442 bp, Oryza sativa
  unsure (1)..(442): unsure at all n locations
agcttctccatgtcatcaacattattgttatctctataaagatacatcagaagagtatcaaccccttccatctctgaaaaagataaatccttctctcgggatgcacacaggtacctagtttcatataacattcagacatcagctggatggagcagcttatttgcaattcgtaatgaataaaaaatgtcgtgaatgagcaaacctgataatatttctgattgctacttccagcagatcagctctgcttggtggatttgaaaggaaatcatcatccacaactgtgtccacacctgcctttttgagaaacaatgcctgttgaagtgttactagcccatcatcaataacttcttcaagaggctntgggggagcatgcaagccccaataacgctttcttggcacctaaatattatcaaagtcacaatcagataaaaaactgctgaat

SEQ ID NO: 52433 - DNA, 368 bp, Oryza sativa
tatagcttgatatattctctcctttctgcgaccttttctttgttaattcaattcaatagttgaaaatgtgagggaccaagcagtttagaaattcgtacgtacgtcgaacctataatgatcaaacaccgttgggttgtcgaaaacatccctgtcgtattggagagaactggcgttaatatttacaatacagtccttctgtatgtgaaaccctgtatatacatacatggaatggaaaaatactaagcatgtcaagtgtactaccttctccgttaacaatataagtattcttagatttcccctttaatataaattaaattaatggaactaaaaaaaatttgtctgaaaaataattgcattggatggggaaa

SEQ ID NO: 52434 - DNA, 360 bp, Oryza sativa
cgagctatcgagcggatgcgcccccccatcaaacttatggatgtgcaatgcgtcaccggttgcatggccgccctaagtcgtttcatatcaaggctgggagagaaggcgctacccttgtttaagctcctcaagcgctcggggccgtttacttggacggaggaagctgaacatgccctcactcagttaaaggcatatctcagctctcccccggttctagtcgccccggagccaaatgagcccctgctactttacttagcggcgacccctcaagtagttagtgcagcgttggttgtggagcgcgatgaaaataatcctcatttcgtgcacccccattctgtgctaacttggcccgggagcgag

SEQ ID NO: 52435 - DNA, 299 bp, Oryza sativa
  unsure (1)..(299): unsure at all n locations
ttttttatagcagcctttctccctttttctttttcatctcttttgccccaaccttttcagccgaaaaagcataggctcatataggaggttattttaatgggaatttttgtatggaaagccgacttccactgtataagcttaccttaattatatatgtggaaaaagatggatatggcaatgacccccngatcatgagagtatgaaagatatctatcacaagtcacataaattggacataacttaatacaatgtcaagcaactatatgcattaataagttgatcaggaatggacttgcata

SEQ ID NO: 52436 - DNA, 361 bp, Oryza sativa
  unsure (1)..(361): unsure at all n locations
tttttaaaaaaaaaatcagctatatcactatatcaggatagctgcaaggatttgctgcatgttccatgcgccacgttagtcttcatcatataattntaaattttgttagattggcctatacggcttaattatcatatgtggcagcaggtaggacaggggaacttgcagcaggtaggacacctctcatgattcagatgcagagaatgcatgcatgtaatcacataaaaaatgtgattcagattaagaggattacattatctaaaaaacagattatacactgtcatatacgcacctcagtgtgtttttgtggctgatatgatgtacatcttgatacagagctcagattcaatttcattatctt

SEQ ID NO: 52437 - DNA, 301 bp, Oryza sativa
atcaaggttgtgcgtttagatacaatatacagcgagtcgttttctattgtcgaaacaacttcattatcatgtacacaaaaatatccatccgtggactcatatactaaaaacgggtattaacaacagaactatgcaacggcacagatttaatgtttcttttactatctgacaaactatgctggacgacatggactcaatacatttaacaactgaagcagcaacaaattaaagcttttcttgtggtaatatgcatcaacaaaagcctcgcttgtgctaaccaacaagtgcgaaaattcatcgc

SEQ ID NO: 52438 - DNA, 306 bp, Oryza sativa
tctgtgcaggttgattgattgagtaagtatcctaattctctagctatcttttacggctttatcccattatgggagattgttttgatgtgaactttgttttgcaagcatggtggaataaactcatttataacacagcaacaatagatatcataaataacatcacagagtttcacaaatggcacataaatcatgatgcaatcgactgcatacatacgcagtccaaataaggttcatccaaaagatacatcaaactaatcatcaatctactcgtcaatctaggtaagggaggggggtgtctcgcatact

SEQ ID NO: 52439 - DNA, 357 bp, Oryza sativa
acaccctcttcatgctctttctaattgggagataccacaccttctttgctgggcctcccctctatgacttacttccttcaccttcactctttgctcgtttgtatcttgatgccccacagatagggcagacatccaagtcagcgtattccttgttatacaaaatgcagtcgttcggacatgcatgaattcttctgacctccatgcccaacggacataatacttgcttcgcttcatatgtcgtctgaggtaaattgttcccctctggcaacagatcctttaacagctcaaggagttctgtaaaactcttgtccgaccagccattactatgcctaaagcttatgaattccaacacgcatg

SEQ ID NO: 52440 - DNA, 314 bp, Oryza sativa
tcttgacatgtattaacaaaactagtaactatcccaggtccaaggccggcatcctgcagaacaagctatgcctgcactgcatatcatgcatgaatgcatgtgctcgatcggaaatggggtggcagccttggcgtacgcctgccaatttaaccaagccactacatggccggcagactggccactttactttgtcctctccctgttccgcgtacaccgcccggatacatattgccacacttgttgatcgatcgatcgtcgatcgatctgctttgatttctctttttttttttactctcttctcgatcaccggctac

SEQ ID NO: 52441 - DNA, 384 bp, Oryza sativa
  unsure (1)..(384): unsure at all n locations
tggtggagctatttctcattctatagtagtcgatcttctgcactagttttgattagatatgatatacaccttcttcctaaaacgatataattgtagcattgatttaatacataaggttccatcgatcgacagtattgttgggtacagaggccactatcataaattaatttcttaatttggtttgctaattaagggccgcaaaatatacaagggtcgactagtcagctagtaccgtctatctgttgcagtcacacgctcaatcggatcacattttcaatggaaacaataagtaaatattatcaaagtaaggtagtaaataaattgttaatattattgcacggcgcataattaacctacatataaattttgntggtgatcacttat

SEQ ID NO: 52442 - DNA, 406 bp, Oryza sativa
  unsure (1)..(406): unsure at all n locations
acttggtcagaagcactattaccattacccatcctaatatcttcaccacttggtgtggccagtcccaaaaatggcgtgggtgttcgcattttctcactttgaacaaagcaacgaacaacacaaatgtatcatttgccatctaaaataattttctatcacataatgtatggaaaggaaattttggtgtaaaaatctgcacaacagcatgttgtcagaagcatgcaaaaatgctacttattcagtgtttcgttcagtatatcctgaatattgagaaaatccaggttatatagagacaaagtaaaagaccatctattttacacaaggcagtaggaaactttaaattatcagtaactgaaactttcttctgaatggcatgaaagcaanatgaaactttttttctgcatac

SEQ ID NO: 52443 - DNA, 373 bp, Oryza sativa
cacttctgtacacatctgtgctcttcccactcttatatgtaagttgtcacttttagtactggatacatcacaataacaagagctgcattataaaatccatttcaagatgttgtatttttttaatcctgcaccctggatgggaataattgatacatatagaaatgtatcgttcataaaaacaaacaaacttttagatttacctttcatgcaaagtgatgccttgtttctcaagttccttgaacagtgatatgagccagttatctggctcggtatcctttgtgccatcagcaacatcccttaaacaagaaataaaacactagatgaaaatttagccctctttccgtaagtttatttcattattgtgatgtgatat

SEQ ID NO: 52444 - DNA, 359 bp, Oryza sativa
tgcatctcgtcagttacgtccccatgagaagaattaccctactcatgatcttgagttagtcacagtggttcatgcgttgaagatttggcgtcactacctctttggtactcgtacggaggtgtacacggatcacaagagtttgaagtatatcttcacccagccggatctgaacatgaggcagcggagatggttggaactgattaaggattacgacatgggacttcattatcacccagggaaggctaatgttgtagcagatgctctcagcaagaaaggctattgcagtgctacggaaggacgacagttgccgtgggagttatgcaaggaatttgaaagactaaacttgggaattgtcagta

SEQ ID NO: 52445 - DNA, 307 bp, Oryza sativa
  unsure (1)..(307): unsure at all n locations
cgtgattgtcgatccgtgacgatggggacagcggcgctgctgacggtgcgcctggccggccggcggcgttggatgcgcggcgggcggatgctttctgtggtgctggtgatgacgccaccaggatgtccgttattgggtacagagaatattatcactgcattacggattctaactgacggctcgtgacggccatggcatagagtacaagttgaagaanacatgacggtatattatggaatcagtggtggattgtagaaatacaataaactcggtggtgtaagggattcctatctatatttatattttt

SEQ ID NO: 52446 - DNA, 357 bp, Oryza sativa
  unsure (1)..(357): unsure at all n locations
atagagagatcgaagcatcgtacaagtggtatggagtgggcttgagtaaaacattacaagtggtatggtgtgggcatgagtattttcgtttgttcttgccttatgggacatctctgatctctcgagtagaagtacagcagctagttcagcaatcagcatacaataatgcaaccatttttgtattattgtatgccagtttcgctcagcaaatgaaacagtagatcacttgtttgtgtcttgtccactggctagaattgcttgcaatgtgattgcaagtgcttttggacttgaaaagatcaatagcattcaacacttgttggaagctggttaaatngaattgacaaaagaaaaacaact

SEQ ID NO: 52447 - DNA, 379 bp, Oryza sativa
  unsure (1)..(379): unsure at all n locations
caccctgcgtcttttgccggggttatgtagttttatcgtcaaacaaaattatagttttaaatggttaggtgcaactctatgtatatacaaaacatatgataatatggatttatatatgccttatgttattacaatacaattcatactttatttttttcaagcgtcattgtatattgttataatatatgaatattattttcatgcgcaatatgtgtatcgttatagttagacaatttgcatgtctctactttgctcaagtttttttttctggaaatagatttaggtaaaggtacctaataattatatgatatcttatcatgtataataatacataacaaatatattaaacaataatcacatattaaaaanataatttgag

SEQ ID NO: 52448 - DNA, 339 bp, Oryza sativa
  unsure (1)..(339): unsure at all n locations
atataaactccgctgccccattttatttcacgtcgttccaaggatactttatatatatgcatgtctatttaaataatactatttcttagggcaaaatgagcatttgttagattaaagcaggatttgcaatatttgctttgtatccgcatgctaccattcacatccaactctatatccatcaaatatctatctatgaactcttatcatatcactggttcaggaagattcgtcagttntgaaccttactaacaataaaaatgggctctgacaaaatctcaaaaaatggtagctacttaacctgatgacacacttcgtgtatagcatatttaaatgtcaatg

SEQ ID NO: 52449 - DNA, 378 bp, Oryza sativa
  unsure (1)..(378): unsure at all n locations
atttcgtggaaggatttggataaggtgagctgttcggtttattataccatggtctttttttaagaaatcggtttttcaggataaatatttttatgggaagagagaagtttttaagataaagtgttggagggaggaagaagggcgactccctctttaagtattagatgacataattactaaagagtaaagtgtacggacaatccttaaacttgtagcagtgtgtcatctatatctccaaactctcaaaatgcatatgtaggacctagaacttatcaaagcgtatcatctatgtcccaaatcgacacatccnctcttgaatcctatgtggcgctgatgtaacctgccacatggacatgacgttgtcttttttttttcttc

SEQ ID NO: 52450 - DNA, 364 bp, Oryza sativa
  unsure (1)..(364): unsure at all n locations
tcgcgaaaaggttattctttattatctaaagcttcattntttcgcttatgcttatacttatcagctaaaatttgaattttcaatcttaaatttagagctgatttagaggttttttcatctatagaaatggagcaatagattaacacatgattaattaagtattagcttaaaaaacttgaaaaatgaattaatataattttttaaagcaactttcttatagaaactttttgcaaaacatgcactatatagtagtttgaaaagtatgcgcgcggaaaaggtgggagatgaattgggaactcangggaaagaactcagccagtccattgtgtctctctccctattggcattcaccccatgggtacac

SEQ ID NO: 52451 - DNA, 200 bp, Oryza sativa
ttttaaagaaaggcccccccccgctccataattaagtttagatcaaccgtccgcaagataccaagacaacaattctacttcaaagatggaaagacacgtcactaccacaaatcgcttattaatattaacacagccttaagtgcgaggacgggcggtgctactggcaaaatatatgaccgggcggcgaccgtcaacccgta

SEQ ID NO: 52452 - DNA, 451 bp, Oryza sativa
  unsure (1)..(451): unsure at all n locations
catgcaagctttcaaaaaagattaactatttctattgttttaacaaaaaaagaannccatggaattgtatttttattgatcaattagaactgccttctagaacgtataattgtctcaaaagggccaatatccatacactattggaccttntgagtaagacggaagaagatctgatgagaattgacagttttcgtatgcaagatggaaaacagatatgggacactctagagaagcatctcccaatggatttacctaagaataagttctagttttaaatccattgcaattttttcctcttcttctttttcgagttagaataaaaagaaaaaataaaacaattntgcatctttgggacaatctatattttcgcgaaatggatcataataaaatagattataggtatctagggaagattcacttggaagtaactatttnctagatacctatgcac

SEQ ID NO: 52453 - DNA, 220 bp, Oryza sativa
  unsure (1)..(220): unsure at all n locations
aactcagctcatcgtctttttggaactgtccggatcaccatcttttgcccctaaatgaccgctcatcgataaaagaggtgggggtgcatagacagccactatgtttgtctaaaatcacccaccctttaaagagtgcgttataactcactgatcgagcgccccttcgctgataaagaacggngctaatcgatctgcccaatcttggggatgtcaaaatgca

SEQ ID NO: 52454 - DNA, 392 bp, Oryza sativa
tggagattttaggcgaaagagttgactagaagttaacgtcacacagacagagagatggagaaaatgattattaagaccacaaagatgctaggctatcactagattctctctgcctgtgcatgtctgatataaaatgggccaatagaaggagaaaccaatatggttaagccaccaaattgagctgaacaataagaaccctatagctactatatactccctctatccttaaatggttgacaccttttgaccattcatcttatttaaaaaaatttaagtaatattaattcttgttctatcatttaattcattggtgaaaaataattgtatgtatatatatagctttaacatttcataaaaaattgtgaatagacaaacggtcaatatgttaaaaa

SEQ ID NO: 52455 - DNA, 346 bp, Oryza sativa
  unsure (1)..(346): unsure at all n locations
gaaacccaattggatgtgtgttaaatttctatacagggtctctancgattatttttttttttttggaacgatacacgggtgttgatactctattgttggattctctcaattctttatgacatggtcaacttagttctctgatcatgtggtaaaaaaaactattgatgtgttaccatgtctagtatactagctaagtcaccttcaacaaaaaagagttgtggatgactagctagttttaaataaacctacaacagcatagctgtcacaatacaacatagtataacttcttgagttntgtcaatntgtatcgaattctattgaatcctaccgaattataccaaattct

SEQ ID NO: 52456 - DNA, 319 bp, Oryza sativa
cacagtagaagaataaatgattcataatgccccttactcaagtcacattttattattgatcagtctaccccaactactataggcaatattgctcactcccatatccctatccagaaggagttggtcatttactgattttttatattctaaagaaaaacaagaataaaacttactttatattatgaaaccctcaaggatattaataaaatggagatgatttttaatggattttctaattgtgattagccaaatgtgaaaaacgatttgaacaattgatatgttatttgaagatcgacggtggggattataaatgtttcat

SEQ ID NO: 52457 - DNA, 286 bp, Oryza sativa
gattgataaataaaagccagattcaataatagaagccagattctatatcataagaaaatagagattgtcgcgtagagtctagctatcccatgtttgcaataacagctttgggatctttcctgtgaatgatgaatagcttgcctcaacagagaatcagaattctttgtattcagttttacaacctttaatacaattcgtctaaatgccccgctcttgccatctttgatggaattgaacataactgattactgaggaaaaaataatatgcaccttgattttgtctatc

SEQ ID NO: 52458 - DNA, 397 bp, Oryza sativa
atggatctccgttatccgcacagaggaactcttcacgtcggaacatcttcgccaatacgtagacctttgggttagactacttcagccaccggccttcaatgagcatgaagacaccatcatatggaaactgacagccaacggagtatacacgacaaaattggcatatcggctgcaattcatcggcgccacaagatctaccttcaatgaaaccatatggaagtgttgggcccctccaaaatgtaaattttttgcatggctggtcatccaaatctgtatatggacggtggatagattgcagatgagaggatggcagaatcagcaactatgtcccctatgtcgagtcacccaggaatctgccgtgcacctattgacttcttgtagagtaacctgcagaatc

SEQ ID NO: 52459 - DNA, 436 bp, Oryza sativa
ccatgttttgcatgtgactagagggatatttgttttactgaaacaagacctccttttgcttataacaattggtgtcttaagacagccacttactagtcaaataactatacaaccaaacatcatattatgttatgacggacctatcattccgacagggaaaaaggcgtccaaggcgtagttaagagagaacatgtcaagatagattctagtactagccatgaagatttgagatattgtatctacaattctacataactccagccacgaaaactgtggagagataatcagaactgcggacatcatataagcagcagaattcccttatgtctgcaatccttataggattcatgtctcaaaatgaagaattgttggttgacagacaaacatatatcaaaggtacattgcaataaattatgatatttgaactatacaaact

SEQ ID NO: 52460 - DNA, 356 bp, Oryza sativa
  unsure (1)..(356): unsure at all n locations
gtggatatctgcaggtgagattggcttctttatttattgtagattgttttggtggaggccatgtgcggaaggaattgagattgagattggagacgcacattatttaaaaagctaaccagctacacctactttccgactgcatggcaatttagtatcagtattaggctccgttctaaactccaatggcataaatgtttctcggtttctgttagcatgtttttcanaacggcttaacggtgtgtttcgtacgagaaatttcttcatagaagttggtataaaaaatcaaataaatctatcttagagctttaagtatgaaaaatcaatcatatgcctataatttgtctcgtcttgcatgt

SEQ ID NO: 52461 - DNA, 275 bp, Oryza sativa
ccactttggcattgcgacgctttattcgtctgaccccaagtggtgattgtacttcttcttggcagcattttctttgtttctgtccatcatcgcttgcccttgttgccctgtcttataatcaacgaactcgtcccagtgatccctctacttcgggaatgtgttgaaattcggtgtctgccccctcaagatgtatttatggtagagatctcccttgaatctctggaactggtctgccattttctttatgagtgcaccctttcattatgttctttgta

SEQ ID NO: 52462 - DNA, 340 bp, Oryza sativa
  unsure (1)..(340): unsure at all n locations
attggagcagtgcaatgcacagatcgtccttgaacagcaaaagcttaccgacttgccaaaagctattgaaaatcaaaagtcaaaattgaaggcatctgtcaagcacttagcctatctgaccaaatctctgaaggtgatcccaagcactgatgcaaccgatgcccaaatcatagatgaggtagatcagattangcaaaaggcaatatcggccatccaaagatatgtgtctggatgagctaaatcttgtaatttaaatctgtaaacttaacttttgagatgaataactttctgttatgaaacttgcttcaattttgttttaaatccagacttttatatagat

SEQ ID NO: 52463 - DNA, 344 bp, Oryza sativa
gcaatgggacgcacaatgagtatgtgctcaatcacctccctggggaccccgggcatgtctgacggctgccaagcgaacacgtctgcattgtctcggaagaatgtaatgagcgcgagttccttttctcgtccagtgatgccccgatcttgacggtcttgtcaaggttggcgctggagagtgaacgaccttgattgcaccatcttggctttgcgtcattgttgttttgctcactttcttggtggctcaactgaagtggggggttgggcgtgtgctcaacatgctagggctccgttgtccaatggaccgcatctttgctttccctgatattgattggtccttggccc

SEQ ID NO: 52464 - DNA, 353 bp, Oryza sativa
  unsure (1)..(353): unsure at all n locations
tacaacgccctcacaggtgacataccaccatttgtgggcagtatcccgtcttttgtatatgttgatcttggaggcaatcagctcacaggaagaatcccggagttcttggcaaatagctcatcccttcaagtgcttangctcatgcaaaatagtcttacaggggagatcccagcagccctcttcaacagctccacattgacaaccatttacctcaaccgtaacaatttagctggttctataccacctgttacagcaattgctgcacctattcaattccttagtctaacacagaataaactcacaggatggataccgncaacactgggcaacctttcttcccttgttcgtctttc

SEQ ID NO: 52465 - DNA, 329 bp, Oryza sativa
atgcgggcggatcggatgttctcaaaagtttccgctagatctgaaagtaaagattcttggttgcgcgtttttacaaccaagtcatcaacataagcctcaacattacgtcctatttggctacccaaagaaattcgagtagtacgttgaaaagtaggacctgcattctttaacccgaagggcattgatgtataacaataggttcctacgggggtaatgaacgcagttttttcctcatcctccctagccatgcgaatctgatggtaaccagagtatgcatctagaatacacaaaaggtcgcaccccgcagtggagtcgacgatctgatctat

SEQ ID NO: 52466 - DNA, 350 bp, Oryza sativa
tgaacaatatattatgtttcccacctctgacaaccattttacacctgtcatgaagaaatattgtgcagagcctttagtaaaataaatcaacattgtttttataaaggacttaaaaagaacaaggtccatacatattttatatatgatatagatgcattttttattgattctttctcatcaaagaaaagcatattaacagttaaatcaacacatcatcccacacaaatgaatattaagaaatttaacaaattatgataaaaaatttgtagcatctgcaataaaaccatatgatatattcaactaactaagtgagatactttctttttttgataaacaaaagtatcgctact

SEQ ID NO: 52467 - DNA, 301 bp, Oryza sativa
tttaatggcagaaattactacttttcatacatttgttgaccttaaagaggggactaatgattgaataacaagctattagagcccatttcattatttgtatatcaagtacatctatatttaaacattgatttattgagataactagcaatccgtggcagggcagggccactattaatgagctattatatggatttaacaagtgtgacctattatctataaaattatatgatatatacatcaaatagtaaaaaaaacttcacttaaaaacagtagtccttttattcaattatacaaatccata

SEQ ID NO: 52468 - DNA, 352 bp, Oryza sativa
  unsure (1)..(352): unsure at all n locations
tctcgggttctagatctctgcccgttgcttttatgccaaccccgaaaagatatgaggtatatatccgatgcgcccccccaccaaacttatggatgtgcaatgcgtcactggctgtatggccgccctaaatcgggtcatatcgaggctgggagagaaggcgctacccctatttaagctcctcaaacgcttcgggccgtttatctggacggaggaggctgaacgggccctcactcaattgaaggcgtacctcagttctcccccagtcctggtcgccccggagccagatgagccgntgctactctacctggcggcaactccgcagatggtcaacgcggcgttggtcgtggagcgc

SEQ ID NO: 52469 - DNA, 355 bp, Oryza sativa
  unsure (1)..(355): unsure at all n locations
tgaatcttcttcgctgcgatctctnttctcagtatcagtatcagttttttctcacatcacatgctggtggctgttgctacaactgctgctggatatatggagtgccaacaattaagtttaattccatcgccattgattgatatctgtctcgaaaggatctctgaatgtgccatataattaatggggttattgggaggtttaaaactggcatattggctgtaaggtgcccaatgaatcatgattaataagcgtgaatgtgtgattgctgctgtcaccacagaaaccttttttggcctaacaacactagctctgtctttaactgcgtcattcaatcatccgaaataccaactcatct

SEQ ID NO: 52470 - DNA, 376 bp, Oryza sativa
gcctcatgaaaaagtgaatgacatgtatgggaggctcaatgtcattgcgaatgatctcaaagggcttggggcatactacaatgttcttgaggttgcccaaaagatgcttaaggctctaccggagaagtatgaaacccttgtcaccatgctcatcaactccgacatgtcaaggatgacactcgcaagcctcttgtggaagatcaacaccaatgacatgtacaagttgaagaagaaggagatggatgaagcctcaccttctaagaagtgcattgttctccaagccgaagttgaagacaagggcactggcaaggtgaatgaagcccatgatgacttggaagaagagattgtccttcttgctagaatgttcaatgatctc

SEQ ID NO: 52471 - DNA, 252 bp, Oryza sativa
aaaagctggagaaggagatgaaaacaaaaaccaaggaatagaaggctaggtattacatgatcatgccgccataatatgaaacattaaaaagagtactaatatcctccgttgattaaaatcgtcgaccttctagcaagatctaacctgaaaagctataaaaatagcaaactcacatcaacatcgatagagtacataaacacttgaaaacagtgttgatgaaatgtacaagcccacaactggcaaccaagaaaa

SEQ ID NO: 52472 - DNA, 451 bp, Oryza sativa
  unsure (1)..(451): unsure at all n locations
gctcatcaaaattaatcatattatcttttgttgagatccatcttctcaaacatgtgctttataccagcaacctcttctactgaaagatgctcagctatgacctgtagtaaaacaaaatgtgagaatccagagcaaacaagactactattgaaaagccatagttaggtttgagggtcaggtcaagctgaggagtataccctaagtgcatgcttcttgaacttgttcatcacagagaattgttgaagtctggccttaacagtttcgcctaaatttacatttggagccttcttaatgttctgtaaccaaggatgatctggaagaaatacaagataaggttgtcagccaaaaacaaccaagttaaatgatataagggataacatcttcagaaaatcattaagctttatcatttctttactcatcctttngcaaggtctgtgatatcttggattaa

SEQ ID NO: 52473 - DNA, 439 bp, Oryza sativa
  unsure (1)..(439): unsure at all n locations
gatattacacgagcaaacgttttcatgggatgaagaacttgctgctttgtctcatattgaagctagcgatctcgagaagtttttgcctcatctgctggggaaaacatttattgagagctactntgctggtttgtttaatactcccttattaaatccatcattcgataatatttttatagcatatttattgtgttggaaatattgctatatttttctataaacttggtcaaacttgttgaggtttgacttatgacaaacccaaagtgacttataatatgaagcggagggagtaactaacatgaatatgtgtcatttcatanaattaccgtgtaatgctgctaatgacatttgtatgcacactactctcttctttagagaatgctctgcattgttgatgtattaattcattatgtaattgataatcgatattacggaacat

SEQ ID NO: 52474 - DNA, 454 bp, Oryza sativa
  unsure (1)..(454): unsure at all n locations
gcacgcatgcaagctngaacaaacctgccttaanatcactttattctctctagttgaagccagntttctccgaggactgatagtgtcacaagcacatcattatgttccccatcaccaaccaacaatttttacatatggcgttgtggaaaaggcatgagagctgcattggccatctcaccgcatgtccatcaaccgagttgacaaccagcccataccaagatcacacattagattcctcatgccactcattccaaaaagagtgtaaaatgctcaagtgcatgtacatcgatcttgcacttgttaaaatcgatcgaatgataactagaagtatatatgtgtaaatgtttttgacagtgtgtggttatgaataaatgatcgatggatgtaaaataatgcttatttcaattgcaagcagctggtaactgatgaccgctgcatgactcacttgaacata

SEQ ID NO: 52475 - DNA, 294 bp, Oryza sativa
  unsure (1)..(294): unsure at all n locations
ccctctttcattgttacatgatctgtccaaatcatatagcaagagaatatgggcactgggcaaatggacggcacacggatattgcaactataataaatctgtcgattttatgaaaagtaagatgtcaatggtcactggatagttttgtgtgtgtctgtgtgagagagagagagagagtgtgtgtgtgtgtgtgtgtgtgtgtnttgcccatatttcagttagagatcacaagaagaagagggaggaagctccatcaagtgttctaacttgaaagctaagctgggtacctctact

SEQ ID NO: 52476 - DNA, 396 bp, Oryza sativa
  unsure (1)..(396): unsure at all n locations
atgttctgaaagcctgaaaccatgaagaatcgagcagtaaagatgtcgagtggcgtgtacacgtataaacatcactgcgagggaggattcgatatccatgaaatctacatcaagaggagcaaattcagggtgctgttctcttatgtcggcgaaattttcctctttgcgaatgtactgcatgccttgctgttaaaggtcggtgttctctcggatgataatcccaagtggtagctgagtcttcactatttcagtgacctactgcattctcccaaaaaatttatttgctgattgctgaatgccaacanttttcatgatgtgaatagatatgtgagggtccttcaaaacaagcttatcatacatgccttgtcagtgatactcacatgatngttgatttgt

SEQ ID NO: 52477 - DNA, 223 bp, Oryza sativa
tttctatcaattaatccaccggggtcggtaattggtaaactgaagaaaactttgacctattacggggtgagcataattcttttacaacgaccacctattaagaagaagaaaatatttatgtccatcataaattaattctggatgcttgcggcggcagccggcaagtggtaactgaaccaactccttgtctcccgtcgtcgtcgtcttcttcgggaagatcgag

SEQ ID NO: 52478 - DNA, 425 bp, Oryza sativa
  unsure (1)..(425): unsure at all n locations
acgcatgcaagctttcacgagccgagccgagccgtgcttttctcttctcgnttccacccctatacaggatgtggttagtgagggaggttacgttttaggacttttttatggtctgcacctttcatggaaagctggggaccccagtgtcgcgaagccttttgttaccctgtttattgctgtctacttttgtaagattctgtaagaacctattaattttcttctgggctttttacaaagccgggtagtaatatattagcttaattagatctgtgccattaaaattttgctggtttcaaaatataccattacaatttacgcatttgtaacgatgccactgctacttggttgtaatctcagntgtgcctctaagatacgtattttgatgtattggacgaaatacccctatttctcctctctcttctcta

SEQ ID NO: 52479 - DNA, 201 bp, Oryza sativa
  unsure (1)..(201): unsure at all n locations
aaatcaagagcgcaagctctttcatatcttccaagatttgattgacccgctcggtctggccatcagtttgcgggtgataagccgtgctgaaatttatacgggtccccaattctttctgcagcttctgccagaattttgaggtgaactgactccctcggtcagatacaatctttntgagtactccatgtatgcacatgattc

SEQ ID NO: 52480 - DNA, 411 bp, Oryza sativa
  unsure (1)..(411): unsure at all n locations
catgcaagcttcagctctacagatttattttnnttctttatgganccannnnnagncgcaaagatcttgttaaacctctaggcaggaaagtattcatgaatgcatctggctttttacgtgttcgccgtagtggtggagctgccgcgagtgctcaaatcattgatttacttgaggatacaaggatacatcctgagtcatatgcattagcaaaaactttggcaaaggatgtatttgctgaggaagcaccacatgaagcaaatgaaatggacgatgatgagcaagagatggcaattgagcatgtcagagaanagccacgttatctgaaatcgctcgacattcgtgagtacatgaagagtatgccagaagaagtccataatatagagcacacactgcaagatataaatgggaact

SEQ ID NO: 52481 - DNA, 378 bp, Oryza sativa
  unsure (1)..(378): unsure at all n locations
cttatgtgttgcaaggtgtcattgnttcttgctctgaacctaagccaattacctctaaagtggtgatgtaggtcttccaatagtcgcgtgctttatgtgcacaccagtaatctagcatgaaattttcagtgcatgaaatgtgtttgaggtactcacgtagaaactggaaaattaagtaatgtaaaaccattggcgtactatttatgggtcatcttttcacattttaaggttctgggttcagacatcagaaagcattactaaactgggaagcagtgggaagggtgtaaaggacgagggtcactggggtttacatggtgaatcggaaatcaactccatcatccaactctgtagttctatgcatctaaatgctcttcatta

SEQ ID NO: 52482 - DNA, 392 bp, Oryza sativa
  unsure (1)..(392): unsure at all n locations
ctcaaagancaaaggtctgtggttnttttaattaaattgcacactccgattcgcatgctgataattgcaaaattcaaagctctggggcttttttaattaaattgtcaagatctaagtttaaaaataatcatgcaacaaatcatatagattcatctctactctccagtcttcctcaaaaagcatatggactcctacgtcataagaaaaaatagataaaaatgatttacgcttgtgattatttttattatcatggtgatgaatcgagatgtttcattgttggcggatttatttgctaaaacatcaagatctgatgtcccagaaaatatgtttcttttttctgaatggctgcacatcttgaactcatgtgctagacgattcanggttctttatat

SEQ ID NO: 52483 - DNA, 354 bp, Oryza sativa
  unsure (1)..(354): unsure at all n locations
agtcgagaattatagcttcttatcgncgaagagtcattgcttgattgaaaataagtgttgaagatgtccaagtagaaatccatgatgacaaagttgcattgccgtgatgaagtgacagaagcaaactggtagtgaagacgcgcaattgtgacgataaaagcgccagtcggcggcagacgtagacagcttgcgttgaagatgatgacgcatattagcggtgacggcgacgtagccaaccgtgaagaagatagcatcagtcggcgtcataacaggccagctatgcaggcggaaacaccagtcggcggtggacgaagcggccggtcggtgaaaatgatgacgcatattagcggtgac

SEQ ID NO: 52484 - DNA, 368 bp, Oryza sativa
  unsure (1)..(368): unsure at all n locations
catggccatgacgagactattntgattcaataacttcaatgggaagcccataaatctgctatggtactataaaatttacattattgcaaaggagaaaaaacaataggctacctataatgctttattcccctaaatttataaacccactgaagatggcagatataccaattgcacttttctaatttttgtcccgttaatcccggctacagattatctcctttcctacacagtcaattaaatgagtgcagatctgccattgttaaacacacatatacgatgcatcgtatcattgtaataaacaagcaaaaaaatcaacttgtgtggattactggaaatgaacatatattcatttaaaaaaatattatata

SEQ ID NO: 52485 - DNA, 335 bp, Oryza sativa
aatgtagcataatacatgggaacataaacatctctgaaatatccgttcagggctttccaagattgtggtattttgttatgcctacaaagatgtttccaatcattagaagcatgtttaattaaaacactagaggcacacataaccttttgtttctccgacaagacatgcttttgaaattcactatcaaccgctagctcccaattaatgtaagcacgaggatcatagtctccctcgaaataaggcagtgcagatttgatcttacctagaacatcatcacttacctcataatggtcatgttgatccctcctcatgtctcgacgaagatgtcgatgttg

SEQ ID NO: 52486 - DNA, 179 bp, Oryza sativa
ctggcataacgcctgttttactgtcggagatatggttccgggagaattgagaccaaatgcttgaggcatacacaatcgtccacgtggtctggcaccttcggtgacgtagtgcccgatggtgaggtgttcgcactcctcctgatttccccgaggggggggaaatttcgacgtgtgccata

SEQ ID NO: 52487 - DNA, 258 bp, Oryza sativa
tggcggcaaacctttgttatttcatcatcgcagcccttgttgacctgtcttatatgcaacgaactcgtcccagtgatccctcagctttgggaatgtgccaagatcggtgctgccccttcatgatatatttctggtccagatctcccttgaagctctgaaactgttctaccattttctttagagagcacctttttactttgtcctctgtacccacgggaagggtgaatgtctcgagcattatggtccacagcatctctt

SEQ ID NO: 52488 - DNA, 323 bp, Oryza sativa
atttaagggattgggcactcgatcacgcgcacttgggctaagcaaaaagtgcctaagtccctaaaagaacatgatatgccacacctgaaaatatgggctgcagacatattaggcctaggccaaaaaatatgccttcgacaccctttaaaggatgacgcatgtaacatgctcccgagtaatagatcttccgggtgatatagaccaagtgtagcttatatgaatagcttctgatctgagtgattatcccttatgggatactccaaaatagatataataattgaatcctgactgatgcaagtattctgttgatacccttacgggga

SEQ ID NO: 52489 - DNA, 203 bp, Oryza sativa
ggaacaatttacctcagacgacatatgaagcgaagcaagtattatgtccgttgggcctggaggtcaaaagaattcatgcatgttcgaacgactgcattttgtattacaaggaatacgctgacttggatgtctgccctatctgtggggcatcaagatacaaacgaacaaagagtgaaggtgaaagaagttagtcaaagagggga

SEQ ID NO: 52490 - DNA, 221 bp, Oryza sativa
catggtgatgatgtgtcaccctccaagtggtcggccacgttgccacaataattagcttaattagcgtgcatttgctagcttgttgccatggcgttcaacagcatcggttcgtcgtcatcctgtcgctgtcgccctcactctcagttgctgcagccatagttgtcgacgccatgcatgatgcttgacctccgacatataagcacgagaaatcatggcaatcg

SEQ ID NO: 52491 - DNA, 288 bp, Oryza sativa
agctgaattataagatgccctattatactatgttgtgttattgaataggaagagagtagagtagaagaagtcggaagaattccggagttgttggtaatcttctctcatttctttttttctggtcattactctgatttcaatataatatttttcttgagtaatttagatttatcttgtgagaattatctcttgggtaggttctaaataacggacgggattattgttcactataatcaactgaaatatagtggatactttggtgaagtataaaacactaagtagatatta

SEQ ID NO: 52492 - DNA, 250 bp, Oryza sativa
cctcttgaaaaatttcctttgagtctatgtctctcatccgattcctgtgctccaatcaaacgactattcctgtgttttgcaattctctgttttacacctcaattcctgtcagaatcctgtgtttttcctattcctccgtttttttaccctacgattcaaaggggccctaaataaattgctgactggactgccacgcgtacgccacgtagaccaaaaccaccacttgatgggtcaagggggggtaattcgt

SEQ ID NO: 52493 - DNA, 257 bp, Oryza sativa
  unsure (1)..(257): unsure at all n locations
gcagcccaacccganaagaagaactcggcgtaataaaaccaaagcaaacagggcggcgacgcgccgagattgtattgaacgtgtggtagctcgattatataaggctcggggtctatttataccccaaaattacaagatacgtccataccggacacgactattatctctaacaaactctaagataccataagtctttgcggcagacttttgcccaaacatacctctaaggaaattacatagaatatcccaaccagtag

SEQ ID NO: 52494 - DNA, 430 bp, Oryza sativa
  unsure (1)..(430): unsure at all n locations
agctctgctgtgttntcacagagaagtttattttttgttagtttaaaatcaaaatatgtgtgattattattttatgataaataattggcatgtaagattattggtttgatatttggaaatttttggcgagtggctttgcagccggtcagagtgtcagaccaggtttgtgtaccagtcagaccagtgttacattgaatcgtgttttcagataatgaacaggtgtgtaggctgagcggagccagtcagatcgggctatggccacggtcagatcggagtgttgcgagcgttacgagcagctggctcgacaatttgaccggccgatatcggttctgggttgcgttgacggtccttgaatcataatatttcaccgtcaatacttacatataatgaaataaaatatgatatccaacttagtggtaaggattattac

SEQ ID NO: 52495 - DNA, 428 bp, Oryza sativa
  unsure (1)..(428): unsure at all n locations
agctagtatcaattcgaatctgaggtccttctttcacagtgttacgccaactttggagccctacaccgttgccaaggtacaaaccatcatgctatcttttaagaaaaagaaaggctgtgcttctgcttgtcaaattcttttctcctttgatttctgtatgaatcagttatgtttccatagaaattacaagaaatgaaaaatcccatttgaatggacacctaggttattggagtagttatatccatggaatacaaaggcatcaagcctatgaggctatttgattagcctgggaagaggctccgagactgcttgtctatgcgatcttctctatctttttgatgaanaggatatgcatctccagctttcctcttttttccccccttcatagaatggtttcttagtgtgctagttaaattctttttctcatg

SEQ ID NO: 52496 - DNA, 238 bp, Oryza sativa
  unsure (1)..(238): unsure at all n locations
cttgctccaacttacaatntccgtgacaccggaacgtataggttccatctgctgcgtatgaataaccgtagntagcattgctgggttaacagaagggtgctctgtaccatgccgagaacaacaattcccaattgttcacggaatgctacacacttataaccattgcctttcctaatcaatcgagcaaagttagcaaagctatggctgcacttgtgcagcagtgctcatcagcgggagc

SEQ ID NO: 52497 - DNA, 426 bp, Oryza sativa
agcttctgctgtaatagttagccacaatcttgtaaattctcctattactttatgtaataatatctccttcaaagctatgtctaaacgtatgcaaagacgatccagattattgaacttgtatcaatctactgatttagggcttgatacagtctaaacatgtcggtttccgaatcattagttttgggatacgacactcctgcacccgtagcattgcatgctccatcaggaaatgctatccatggtgtttcattttcctctttttgttctaccctagctgctacaaaatcagcaagcacttgtgactttatagctgttcttgaggtatacatcaaatcaaaaggtaaaagctccatagcccatttcgctatccttcctgctacttctttgtacattagcacttctcctaaaggatatgctgacggcact

SEQ ID NO: 52498 - DNA, 428 bp, Oryza sativa
  unsure (1)..(428): unsure at all n locations
tagtgataccatcaagaagaatgcacacgcttcatatatttgttaaacaactnttctttacccaatagacctcaactaaattgacaatatagtatatttcagtagtactcttcaagaaatgcaagcatattgatgaggacatcccagccatatgtaatccacggtccttggttacaccggatgcatcaanntaccgcacatattacaagaagtcgaacatcgtttacacattanaaaacaagtgcaggaccagccacaagtaaccaagctgataagcgcacatgcttatgaagtactggntatgcgcagtcgtgctaagaaactncaacatgaggtgaatgcctttctctctaggtcaaatttcaaatattgatgagaaatatatactacctaagtcgtgtactctactcttactcagggttacatat

SEQ ID NO: 52499 - DNA, 424 bp, Oryza sativa
  unsure (1)..(424): unsure at all n locations
agcttgttcgcaatatgagggcgtacagttatcttggtttgcggactacctccttcgagttgggaatggaaccaaggaggtgaacaaggaaggactcatatgccttccttcggatatttgcgtgtcgggcaaagggaatgaaacagacctcaaaaggctcatcgataccgtgttccccaacctaaacgataacctgacggacccaaactacatcacatgtagggccatattgtccactcggaatgagttcgtcgatcgaataaacatgaagatgattgagcggcttataggggatgtgatgacatatcataggtttgattgagtagaggatgaccctcataactattacccgccanaacttttgaactctttaactgcaaaagggctacctccgcatgtgcttaagctgaatataaactgcccc

SEQ ID NO: 52500 - DNA, 224 bp, Oryza sativa
ttagctcaagcaagtatacatttctctatgtcagccttctgcgttctcttggcaccaaccgatagtggtatgaagtcttgcgctgaagttatatctgctaattttcaaaatggaacgtatgaacaggatttcaaaactgagtggtaactcatgctggtacgctcatagatctgttgattgacacacgctgacggaatggatgctcagctgtcactaatttttcc

SEQ ID NO: 52501 - DNA, 416 bp, Oryza sativa
  unsure (1)..(416): unsure at all n locations
agcttgccgctatctcatcggngacggtttattatgttctctatggaactgctggcttgtgtgccgacgtacttgcaatgcttctcattgctagagctcaataaaaatcaaaatcacaacggaaacaatcagcaagaaaatgattaaaatatcacaacaaaaaattaggggcttagaacctcaatcgagcagaaaaactcacattgtagaacacttgaggtttgatgatcaatgagcacaccacgccttgatgtgaaaattgaaaaacaaaatcaccaattgcaaggatgaactgatagtttccaccacaatagagaggggagaggggagaaaagagaatggtatcgcgtggaggaagagaatatgatgttgatgaaaagacgaaagggagtggaggagcatgtatgcttatgtga

SEQ ID NO: 52502 - DNA, 314 bp, Oryza sativa
  unsure (1)..(314): unsure at all n locations
cactatttctaataattcacaaacgttgtgatcatgcgatgtggcaatttacatactggcttatgagagctgtttaacaacatacatttattatacattgcctatcgctcagtaatatatcgagtgattaccattgttctattacattttaacattaatgcgcgcgatgtaatatactatagtgtgtaattaggagttttctacccaatttagataatatcanttcctatgctaagtgtattcttatttttagaattcttattaattctaaatcatatattgctcatgacctctattcccttaatttatcactg

SEQ ID NO: 52503 - DNA, 426 bp, Oryza sativa
agcttcgtcacatctaaaccgtgcatattatggatgacttcacaacttattttttcttatcttgcttgtggcaatactgatataccttcgccctttgtttggcatattatatatatctacggtctacaaattagaatcatcgataaattggtcatctattgctaaatcttcatttgccaatgtggtttagatgctttctttttaaagcatgtttgcaaatggactatagtattgttgaatgttgatttattgggtttaattactatctcataatattatgccatcgagagaatgttgtttctgtgttcagcctgcacttggccttgggtgacacctcatttttttttctatcctcttccaatgaccccagatcggcagcggtcttgcaaatcttatgctgaggtgagctccaagcatggtgccaga

SEQ ID NO: 52504 - DNA, 441 bp, Oryza sativa
tctataaaactactgcatgcaagcaagcgcagtacaagactatcgggtatgttttatttataaccctgacagtatccccccgacttcaatgtaaatgaacgagctaaggttctcgatcgaatactttggaacaactattgctgtgctcgcttgaccattctcggtgtgatcacaaataacgctagactcttcttatcggcctttgtaagcaccatattgggcttgtctaggtcaatcttccatgttgaccgagaagggacggagcatgtgactaagcctcccgtcttgccgcaatcgagaatttggactgaagtcaagaaatctcgcttcggcgggtacactatcgcttcattccatattccctgtcaagccgcatcaagcggttctcgactatatcgagtaagcgtagagtctgccgacaaagccgtgaaatctgactcg

SEQ ID NO: 52505 - DNA, 405 bp, Oryza sativa
agcttgcatgctaaccctttaaaatacttatacaaaaatagctagcatgtatatattttgaaacagtaggcaggtagactcctaaatcctaataaaatttgggaacattatagaacaacagtaacattaaaaatatagttacctctatttagtcagtgctggtgtaaattatggttacttcatattaatttttataaaaataaacatcagctactctcttggtggtcacaacccaagctcttcatacatgatagtaaccaaacaatagattttggattgacaaacaattttttacaaaaaaagtaaaataaaatcggtcaagagttgttcatactaaaaacgaagattgctgcacatgatagtgtgttacaattggaactggaggcaagatggctcctaaatact

SEQ ID NO: 52506 - DNA, 169 bp, Oryza sativa
  unsure (1)..(169): unsure at all n locations
ataganactaagctaggacaatgcgaacgaagatgatcaatngaaccacattcagagncaacgattgttctttctctnnttctgttcctggcattattcatagctcgagcaattctgttagcaaccaaagccaaatccttcttctcgatatggttcgagttgatcatcg

SEQ ID NO: 52507 - DNA, 414 bp, Oryza sativa
agcttatcattggacttccctatcttgactgtcaacatcaagttttcttcttgatgttatcagttgggggctatcatcataataatggagtgtgattttttatcaatttaatttgcttacttggtctatcattgccttgtttggttttttctacttagtctgcgaggactgaaagtttttaataacttctttgggttttaggctcaacaaagcttgataaaaacttttaagcaatcaaagacttggttagaactatcaagcacagcataaatacgccagtattgtacaaattgagcctccatttgttacattcatactcagtcagaatcagtcttttcatcatcaaagttattgttgctcggctgaagatcgttgttgcggaattgctctacaacgtcacttgcaatcttgtca

SEQ ID NO: 52508 - DNA, 254 bp, Oryza sativa
tttctctgtctctcacctgtctagtaatacctcatcttctctagataaccgcaaaagtcctatgaatatcatattccatcgatattaacatccttcacattatctccggcccactgccatacttgcttgtattgaaatccattcccagagacaagatgctggctattgtccaagcgggatcatccggagtatccacgacgtcaatggtgcgcacgaccaacatcgtgctgctctcgcacaccctcgtgacactt

SEQ ID NO: 52509 - DNA, 413 bp, Oryza sativa
agcttttcagcatggatatattatgtgtttaaaaaatagttacaaatcaaccgacaaaatgttacaaacgttttttttacatcataatatttcttttgaagatttgctactactcaagtctgcatttttgtacatatatagatatatacagacccgttacttaaggtgcaatcaaatataatactttgttgcatattacacgtcttttgacttttttcttagtcaaatttttttaagtttgactaagtttttataaaaatatactaacattgtcaataaaaaaacatattatcaaaatatattcaatgttaaatttaatgaaactaacttgatgttctaaatggtgctattttttcctataaaggtgggcacaccccaaagacttgtattaagaaaaaaatccagccgactat

SEQ ID NO: 52510 - DNA, 484 bp, Oryza sativa
  unsure (1)..(484): unsure at all n locations
ctaagctggagatgggaaaattatccttctgggatgatatntggttaggggaaaacaccacttatactctatntccatatatattcagtgtatgtgctgatgataacanaactactcaccagatgtatngtgaaggggagtggaaaatctctttgagaagaactttangtgaaggggagttagaagagtggngtcaattacatgctttattgcagaacatcgaattgaattcagganaagattccatgctgctggaattaaacaaaactgggatgttttctacaaaatccctggatcgagaaataagctttggggggattaaagactacatcttacaagagctgtggaggtgtcatattcccctcaacgtacagtgttttctggctatgctaaaggaaaaatcaacaggtcatcagtaagaaatgaatggacggagtccactgttactctgggaaaacaggatctatacttatgtcatgtccta

SEQ ID NO: 52511 - DNA, 427 bp, Oryza sativa
agcttagggatgtgcaatgtgtcaccgtgttgcttggccgccctaagtcggttcatatcgaggctgggagagaaggcgctacccttatttaagctcctcaaacgctccgggccgtttacttggacggaggaagctgaacgtgccctcactcagttgaaggcgtatctcagctctcccccagttctggtcgccccggagccaaatgaacctttgctactctacttagcggcgaccccgcaagtggttagtgcggcgttggttgtggagcgcgatgaggacaatcctcattccgtgcacccccaccctgtgctggcttggcccgggagagagcagggaggagaggcccccgagccgaacggtggcccaaggcccccgacgaccggagcaggccctctgcccgcttgtcagacggtgccaggtgcccccg

SEQ ID NO: 52512 - DNA, 400 bp, Oryza sativa
  unsure (1)..(400): unsure at all n locations
cactatcagctttatcacctcctcttattaattcattntaaagtccatgtgaatganataatattaaaccagtaatatatgtaattctctactgtgttttttacactttctcaccagctttgcagttttttcattgataaaataaggaatatctttcanatgtcatggtgaaattcatgttaaaccggcaatatatataatgtcatgtatgatcaaattagatttatgattggctacaatgcaatcctgatcgaattagaatacagatctggcggctggtctttctcaatgcctangtgggatccttggtatattcatattagtgctatcattaacaaattngaaatgctatcatggttctcctcatgcgatanatcatattcagcttcagtgacacacc

SEQ ID NO: 52513 - DNA, 446 bp, Oryza sativa
  unsure (1)..(446): unsure at all n locations
gatcttaagcacctgagctgcagctttgggattggcctgggggaattttgagaatgaaagatgtagctcctctagtctatgcagcatccaagaaaaagaacaagacgatccagcaagtcttgcaatccgaccaatggattcatgatttggacctgccgtcaaatgcaggatggacgacagacttaattgaccaacttgtcacaatctggaccgccactcagacactacaactagaagagcaagaggatgacaaaataacatggaagcttaccagccatggtgaatacacggcaacgtcggcctacaatgtgcaactcctcggcaccacagccaccaactttaataacctaatttggaagacctgngcgccacgaaaacacaaaaccttcgcatggctaatcatccaaacagagtatggacctccgacagactagcaaccagaggat

SEQ ID NO: 52514 - DNA, 417 bp, Oryza sativa
  unsure (1)..(417): unsure at all n locations
cactaacacacctagtaactattggatggcctaactgggccacttatgcagtgtaaactggctattatagctgagtacacttcgaaataccaaatagagctaaatgaaatattattaaaatatttgtcacctttgaataacacatcctgttntcataaaggaatatatatcatcaatttctccaagntcatgtngttcctcgggtagttcttctttaacagatgttngtgttatgatgttcatctcatangtgggatggccacgcagacccctaaccaaatagcagcattcttaagaaaccagtaccttggtgctacactacattcagttactaatgccttcaaagcaggtgcttaccctcgtgttcattattaccgctcgttatgatctaagcgtagtcaaccacatcttctatct

SEQ ID NO: 52515 - DNA, 428 bp, Oryza sativa
  unsure (1)..(428): unsure at all n locations
agcttcatgaattntggcataatttttatacttttgcatcatagtgaaacaatctagatagttagcataatcatattctggaaattggtagtagctgcattcatcttttcatgtagcccaaaccataattgattaaatatgcatctttttacagtagttttcatacataacctgtaggctccacgaattttggttgaattttttttgagtcattgcatcatggcataaaaattcatataatactgtatagttctgtccggaaatctgtaggttgtcagtttcacaaatttgtgtagcctaaactacaaatgataaagtcatgattccttcagggtagctcctaatctaacccatctatctctctgatttttgtcaaaatttttgtatctttagagctagacctaaaaatttgattaagacagtaaagt

SEQ ID NO: 52516 - DNA, 551 bp, Oryza sativa
  unsure (1)..(551): unsure at all n locations
ctcagcttgtgaaccagtcaacgaccgcagncttttcattgcaattgcgcctgatatccgttatgtttcttttcatanatctatcatgagatcagntattcagctatnnttgcttttctattgcatctgcatggcatgttttcatttacgtctctaccacattaatcagttatgattagttctgcgttgcaagttactacagaaagcagctagcactcgtttgtagtgccatctagtataagtggccatatntttaatcttggtgtccttccttaacttatttctggtgcctctgatggcttatgcttattgaatatggctcgaagtgaatggacanatattntacattctatttctgacttcatttatgcctttgcagcagattagaatggccaaatatttatttccatttattcattgtcgtctatgcattggtaatgaagctaaatgcacaatacatgtgtataacaatgttaaatctatttgtgactttgtgccttgctactgcaatttaatcatatatgngactgttgacgaatatgtctaactat

SEQ ID NO: 52517 - DNA, 421 bp, Oryza sativa
agcttatgtcccgtataggttggctagtttgtatgatttgagcgacttttgtcaacctatcaaccactacccaaatagaatcatgtcctgccgacgttatgtgtagaccggttataaaatccattcctatttcttcccacttccactctggaatcttcaacggttgtaacagaccagctggcttccgatgttctgccttgacccgctgacatacatcacacagagccacatattctgctatctcacgtcgcatactggcccaccagaattgttgctttaagtcctgatacatcttagtgtttccagggtgaatcgaatacaaagtttcatgagcttctttcatgaaggtatccttcaactccttattatctgggacgcacattctttctcctaaccatacgggtgctggctcatcttctac

SEQ ID NO: 52518 - DNA, 195 bp, Oryza sativa
ctttacatagaaagggttatgcctataagacttatctttctttatctttaattctttctggtcgaaaggactagtactccctatgggtttaatatgtacacccgggtcattgtatttatcatcttttatcaatacactactctggcgcatcgcacccttttacgaggttttactattatccacgaacttgcacct

SEQ ID NO: 52519 - DNA, 422 bp, Oryza sativa
agcttaagggacatagtagcaagtttgttacagcttatatcaagataatcattgcatcgcttttcatgctccctacgttgagcaacaggagtattgttaggcaagttagctggaaaaggctctgtaagcacaaactctttgtgctcttacctgagaacaattctcaggttgcgttaccaatccatgaagtttgttccagtcaacttctctttctcaataatagaccgcaagttaaaattggatgctgcaggagctgccatgatctacaatagaaatatatgtatgcaaaattagcaccatgtttacatttaacctttcattaaacaatttaacaaaagatattcccactatgtattgtgaaacaaaattccctctagtaacatagtgagtcaagatcctcattttattagtgtctagtgagc

SEQ ID NO: 52520 - DNA, 206 bp, Oryza sativa
ctcatgataataactactcttataaatattactcaggagacgtggcggattcatacgtcatttttcgatcaacaattccacggttcactattatgtgggtagactaatatactgctttttgcaatcttcccatcttaactaataaagcatgcctcctactttagaacagaccatgtttttctcaaaaaatgtggtgaaattgtact

SEQ ID NO: 52521 - DNA, 420 bp, Oryza sativa
  unsure (1)..(420): unsure at all n locations
agcttggttgcatgtgaattagcatgagttgttgttggatcatcctgngagccttttgggtgaagaattcttgggccagcatgagatggtacagggttaacaagtaagagctacaccatttagtaactgtgtaactggaactggactgagctgttgacatgctgtgatgacacacaactgggagaaaggggaacgaagaaatgagcgctgttcttgacctgcatatggacagagagatattcaggcacctggcagcctctcccagcagcagctagatgttcagattaattggttgacatgctaatacacattaatgagggatgtggaaggactacaataatcttctactgttccaaaaggttgtcttgccttttttcttgtagtgctactatgcangtggaccttcttgttgtttttcca

SEQ ID NO: 52522 - DNA, 167 bp, Oryza sativa
  unsure (1)..(167): unsure at all n locations
gggtgcctcacatgcgccatgctgcattgnctgntatgtgccatagcgctntgaagctggctnntctgaaggaggcgaggagaggagcangaggaggaagcggcggcagcgtggcgctagggatggagaaaggacgaggaggtgcangcggcgcgacagtaccagtg

SEQ ID NO: 52523 - DNA, 382 bp, Oryza sativa
  unsure (1)..(382): unsure at all n locations
ttactatatataanaanaactaaaattaccactgaaaaatatatgaaacattgttggagtatgtttgtgaggtttgagaaagccagaggcgaattatgcaccttgagaaaaattcaaaattccctgtcggtgacttaatacccacatgaattcgatataattcctgcaagtggtgcagacgtcctcgacaggaaaatcactggccatctgatgatctggttttttcgagtagtcattggacaataacgaggccatatatattgtgcttcttctttttttttagggagggcatattgtgctgtctattatttttttaagaagaatatcttcgtacagattcaaaagggtaaaacctattaattacactcaagttcaatgaatc

SEQ ID NO: 52524 - DNA, 298 bp, Oryza sativa
  unsure (1)..(298): unsure at all n locations
tcacagaaggagatgtatacttgacatgtgggtctatggggctttcagaactctcatgtggcttctctcctattgaatcggaaatatatattatattgngtatgctgtcgagcagtaatattgtcatatttctggagtggcttcccttgaaagtcacttcgtgccatgccttacaactaaaaccgcaaatatgctctgtttagcaacaatttgctatcttaatataccccatattgtcaaaatattaaacatatttattctctgattctctcaaatatataatcatattagtagctct

SEQ ID NO: 52525 - DNA, 425 bp, Oryza sativa
agcttcctaaatgcaactacagtattctgtttaatgtaaagatcactggactgatgtcatcaaagaccctagttgagttgataagtcacattcttgataacacgccttcactcgagttccttacgctggacactagaatatatggtttcaaatacgaaattaggagattcatatcctgggactgtggcattatgatgactacggacgatcggatggaatctgagttagacagagagttgctcatgtctgattcagatctaatagaagcatatagggctccacaagttattagaagatatatcgaagggaaagtcccttcaactgttaatttcgaggttattgagccttgcaagaaacgagttattgtggaaacatcaagaagccctacgctatagtatgcataatgtcacttggtatcatatact

SEQ ID NO: 52526 - DNA, 426 bp, Oryza sativa
  unsure (1)..(426): unsure at all n locations
agcttctttatctgcaaatattatttgatatatancacnnnangcaacagattatgaccaaaatcaccatgcatttaaataatgtaaataacttacctgccatgttctgccatcctgtaatcgtgacgcatgaattctccacttgcacctcttagccttgcaatatgctctgtacctcctcgagtcacaatagggaactgcaagttcgacctcattcaataatgcatattatctaatgcatcttttaaaacattgaccatcttcaaaagttacatcaacatctatgttaggattttccacatcggttatatgagctacagactcacattcctcctcatcgtcgacagctaagtcatcatcgtcttcgtcagaatcaggctcataatctggatcaacctnctcatcatctgacaccaaatctttata

SEQ ID NO: 52527 - DNA, 339 bp, Oryza sativa
gaatagcgtgagaatgtactgcatgtgacacccatttttttttcagaacggtgttcaataacacttattccgggtgggaaaagctcgcttgctattgtggggggctattcaccttctatcttatacactatatctgtgtttttagataaagtacactgtaccttgaaattacaatactgattattgcatctagattcaaatctaacattaactaataaatagtacctcaacaatgattgtaataatgactgctctctataaatagtaatggcatgggacaatttaatttgcctgattgacttacataaggacttaaatggcctctgcatcatgtgtaaa

SEQ ID NO: 52528 - DNA, 210 bp, Oryza sativa
tcaaattgaaaacaatgactcactgtagacgcgcattcgcattcccttttttttatacgcaaggagcgcatcattggattaaagagtgaaactattcatacgcacattcccaaagttaggatagccttacgaaatgactaaaaaaattgcgagattccccatttcactaggaagccgaataccgcccaagcattccttgtaagaaaccta

SEQ ID NO: 52529 - DNA, 433 bp, Oryza sativa
agcttgcattctgaaaatgcagagattctttctccatacatagtcaattggctggctggggacacatcacatagacaaggaataaaggagccatgtaatttagctagctcaagctatagcttttgttggcaagttaattaaaattaacaacaaatgaaagcaagttcctaagcatgcaacaaacgaaaataattaatggtacctcccgttcaaagaaaaagagtaacctcgggccctttcgtggtgcacacttcatcatgcatcgatttttcttttgagcaccaataattcgacatggaaattaaatacccaacagaaaaaaataaatgcaattacaatttatactttactcgtgtgtaaaacttcaagctaaaaaaaatcaaggaaacactacgtacataaatcaaggtactatatatccgtaggacattta

SEQ ID NO: 52530 - DNA, 237 bp, Oryza sativa
  unsure (1)..(237): unsure at all n locations
gcttattcttatnctgaagaatatggtcagngcaactgttagctgacccctggctgttctattgttaagaangaccagctnttccttggctctgatgtgatcccagcaactttctcgntgcccaccagtctgatccaacgctcggctccacactaagagcatcaacattagtgaacttgaatctntagccttacgaagggacaaggagcgccgtgcttctcaggcagatcatggtat

SEQ ID NO: 52531 - DNA, 433 bp, Oryza sativa
agcttcctcaccatcgcgatccgatgccatcttgttaacttgtcaatttgctcttctggaacgccaaatttgagtagcaactatttacaacaatatcagtgtcaaatctcagtgaataaagtgtaaaagaacataaaaacagcatggctgaaatgcaagcatggggtatattcttccatgccaacaaaaaaaaaatacaggtatctaaattatgaccgagtgtgtcaatggcatgtgcagactcgcagtaggtcccacttgtaattctcgcggcagttggtattttgacaaaatgtgtttgttttacatggtatgaaggcaattaatattttgttattacagggatccatgtgattcttcatcataccccagttaataaaataaacatctgagataattatatgttcacactaaagcatgttccatgatgata

SEQ ID NO: 52532 - DNA, 464 bp, Oryza sativa
  unsure (1)..(464): unsure at all n locations
taacaggcanacaatctgtccatggtcactctagaagccaatttctctctgggtgattgtttctatactctagagcgnnncggtgcgttaggaatgatgcagncggnctgcatcggcaccttgtgtgtggacgatatccggacttgtgtactagtagagagcgtgtttctttaataaaggcaaatggngttccatgcctcgaaataattntcagcctttcgatcttangtgctctnnnttaaatgtaagaaattttatagtatgctatatagactacgttatcntctgtatcttatccatgtntnggtctgagtttccttgcattcataagatgcttagagcaaatgcgttaagatcaacaccataacattctctcatttctctgtccatccagatatagtactctacctttgaactatcaagcacgaagataataaagtaggtaagtgatgtgcgaatggttg

SEQ ID NO: 52533 - DNA, 429 bp, Oryza sativa
  unsure (1)..(429): unsure at all n locations
agctntaagaaatatttgagactttgatattcttgtttttttttttttgaaaccaatagtcatggttttcttatgaaaataagaaatttattttcctactgctgggctgtttcgctgaacattcttgttgattccctaggtcacagcccctaaggcctaaacagcatggaaagcagctgggcaaatcaaggtcaggccctctcatggccaagtttcgaggcacaatttggtatgctaatttgcatgttcattcagaaaagcaaattcgaatgaagttgacaattgacaaagatcttatggaagagcatgatacaatcatataataggcatccagggcccagctattttgtgaagagaaatagaagcatctggagatggtaacatggttacccacttgcaagagtcatatatatcaggtatttgcgtagt

SEQ ID NO: 52534 - DNA, 547 bp, Oryza sativa
  unsure (1)..(547): unsure at all n locations
ctaagcttacaattatacctgaccattgcctattgtcagtacagactatagtattttttttttctttaccttntgngatatcaacanaccaacagaagttacacctgtaatggagatagactgatacaagtgtctataaaagatagtaatatgttaatactaaatatnctcatttgtacttatccattgcagcagttaaatggtaatggtaaaaaacccaattcatacttattcaataagttgtagtggntagtacatcaaactcaatacacgtctgacatttgacatgtngattangctangtcagcaacttgaaatgcagagtgatctgctacctncttttatttctactttttctcttttcacctctgaaagctatactgagaagagaaaatatcgnngacaaccttttagtaatctgaatacannaatgcaagtgaaaatattgttcaataaaatgagctcactatctatgtaagtaagtatttctgcttctatgcagtgacactaacacaaagtgctagtgagacagtaaaactgacatgat

SEQ ID NO: 52535 - DNA, 418 bp, Oryza sativa
agctagccgaatccaccgggcacgctccttgtttttactggtaccggaaagcgacacccagaggagattcacacactttgtaacggatcttggaaagcttaaatatgaagtgaagcagcttaacaccaatgtctccaacgcggagccataggagcagagaacactcggtaccacaccggatacgccattcacccacacgacacagatcaacgcatcattcggaagctctgaatggctcaggcgggatcttgccaaccaccagattgaagctgagaacaaaggactccagattggcgcaatcgccaagcgaaagcggcacggagccattgaggtaatcgatcagaaggagcaagctccgcaatgatggcaacgacgaagcacagaaccggcagtatcttctcagtcaacacattggacc

SEQ ID NO: 52536 - DNA, 424 bp, Oryza sativa
  unsure (1)..(424): unsure at all n locations
agcttagaaaggaatactactctccgaaacctatcattgaaaggttgcaggggagtcgagggggaactagtcttgcagaccattatgggcatgttgcaggtcaatccttggattgaagaaattgacctgcatgaaacgcctctgcatgttgctggtaagaccagagaaatttatgagaaacttggtcagaatgggagttcggttgtaccaaatgatttgctcgatttgccactaagtgcacctacttgttgccaagtttttctctgtggtcaagaattatcaggtacccttggcgttgtccactgttcactactctttgtaatctatagatagaaataaggcaactatatctatagttntgtcgtgttcagctcttctttgttttaacttgtcaatttgctgtttaaagtttaaactatttcaa

SEQ ID NO: 52537 - DNA, 422 bp, Oryza sativa
agcttgaatcaaagtgggaaggacttatttcttatcaaacacaagtccaggacgggatcttttctcctagcgacactcgaaggcgaggagttcgaccattcctggaacgccgcctctctcaagcgcttctatgtctagaatgggtgtcacccaaatcgccaaattgtaaaaatgtacatactgtcatgtaagcccttcggcactatgtaagcccttcggcactatgaaagcctttcggcaagaaaaaaaaagaaaaatagaagaagaaagagagaaaaaagaaaaaagaaaactggatgtagggctattatccaacatggaggcccgaaccagtataaaatctctgtgtcctccgccttctttttattcttcgtgtgattgataatttgtggaaaaacctcaaggcaaacgcctgatcagcg

SEQ ID NO: 52538 - DNA, 430 bp, Oryza sativa
  unsure (1)..(430): unsure at all n locations
agctnttttttttccaaaaacatgaccttttgaagttnttttttcctaaaatgattgaatctcatttcagagtgatcgataaagggaagagatgtatcaataaagaagcattggttaggaatacaaaccaattgaacttcgtccccagtagcatatttaaagttggatccttctaaaagcttttcgattgctgaaacaaagaataagggcaagccaagatggaactgtaagtatcactaaaaaggacaaattcaaatagttactgatctcttgtaaatttaaagtaatggacgttgtcaactgatttacattcattttccaacaatgcagaagatactacaacaacaacatgcatgtcttataaattcacacacttccacaacacttttgacaaggatatccagaaatgtaaatgcaatatagaacaaag

SEQ ID NO: 52539 - DNA, 421 bp, Oryza sativa
  unsure (1)..(421): unsure at all n locations
cttagcgcatacacccttgtgatcatatcatgaactttgtgtaactcttccacttctatgtaaaattctggtgttcttgcccgataattagcactatcatgttggtgaagcataatcctcgcgtgcgggaatgctatacgcttgtggggttctcctccaagcacaatgaaggacaccatggacgcggctacttcgatgcatatngtatatatatctggtgtcaccggttgcatcgtatcaaatatctgcattcctgagataaccactcgccggggagttataaacaacaaatatcgctaattccatcttctatactgagatataccatgagacctcgaatatgattcgtgacctcgcaacgaatctctcgacctaaaaaaagttgtctttctcgatacataacattgtataagtcaaccca

SEQ ID NO: 52540 - DNA, 427 bp, Oryza sativa
agcttgcatccacatgacagatcttgtttatacaggtcaacctgaaccttaaattctttgctgccccaactttgcaaggtgtcatcacctatatggactatctgcagaacatgctgatccgaagtttgataaaccataaatgaaaagcttagcttgaactgttaactattccttgaacctaaaaaatgcacccctagtgtacacccgagaagcatgtttctcaatgggcgagctagttaatgtggaaaccttctcctaaagttcaagataaatgacaagcatattataacatgatgaaaccataccgccacaaaaatagcatctataacaaacattccgagtacgcaacgctacactcacagaaaccaattcgaaatctctgctccattcttgtacaatattctgctcgaagaacttcatcttggtg

SEQ ID NO: 52541 - DNA, 421 bp, Oryza sativa
  unsure (1)..(421): unsure at all n locations
agcttanntagagatatacaaccaatattgagttgctgaatttactcnttctgtcactttctagctatttcctattgaattggctaccaaattactctttttcgattgaaacattcaaattggtagctcttgtctgtagctagaaaatttatcgacttaccagaaaccactccaggcccttgttctgaggactaatgtgattataatttatttgcattatattacatatgcacccaaatcaatacccttctatgtaggtcgtacaaaaaaaagttcattcatcaaactctgggaaaaaagggaattcatcttaactagcttgaattagcttcatgatatatgggcacttataaactaaactcaattagtgcaaactaacagatatcacgttgaactgagttatgtatatgaagggaaaaac

SEQ ID NO: 52542 - DNA, 425 bp, Oryza sativa
agcttcaggaaggcacagattcttttgtgtatttggcacacaggaaaagagagttccgtgcattgtaacaaggaaccacgacagttacagagtacttgcacgagttcaaccgccttgcgcgctacgctcctgaagacgtgcgcaccgatgccgagaagcaggaaaagtttttgtttggtcttgatgatgagttgaccaaccagctaatctctggagtctatgaggactttgagaagcttgtggacaaggctatctgtctggaagagcaacgcaacaaaatggactgtaaaagaaaggcagctcagatcaggactcctcaagggaacaatcagaagcctcgcttcatgatgggacaactgggtgggccttccaccctgatcgtccgtcagcaccatccctataatccgggcaacttcaacaacgac

SEQ ID NO: 52543 - DNA, 395 bp, Oryza sativa
  unsure (1)..(395): unsure at all n locations
agcttgtagccactctaatattatgatttatgtgactncncgagagaggtgagtgacaagtcttagaagaaccctcgtggagtaaaaaatatttgtgttaaagaatgggctatgtgaccatcaaagctcaatctatctctactgatgtttatgcggctctgcataatataaatagctaccaatctatcaagcgtgaatgtgggacttcctgcacatcttactgtgccattactaagtagacggagtaaacttgtctggaggacatatgcctctctgcaacacttgcagattgctatgaaattcaacagtagtatatactactcctatacttatccacgaccaacatagaggactttaaactgtatacaatttctagtacccatctgcgagctgcc

SEQ ID NO: 52544 - DNA, 318 bp, Oryza sativa
tttatataactggtagcgattaaaggaagcgtaaaataaaatatgaaacctctgaataactcaaattagtttaaactaattttattcagttatagctgaagcaatgatgagtaggagatgaagaacagtgatcatgcttgttgatctcgactataatgcctcagattgtattagagttaacgagatacgtaaacgattataccctaacatttggaacgaataagagatttatctgatagcgtgatatgacatactgacgatatgatataactattgatattccaaaagctacgtatgatggttgcagatctagtatgt

SEQ ID NO: 52545 - DNA, 302 bp, Oryza sativa
cgctcagttggagatatacaaccacaatttatttgctgaatccactcttctctgacacgtgtctagctacatcctattgaaccggccaccacattaatattttacgattgaaacattcaaactcggagctcctgcctgtagctagaaaatgtatcgacttagcagaaaccactccacgcccttgcgccgacgactaatgtgaatataagtgattcgccatatattacatacgcacccaaatcaaaaccctactatgtaggtcgtacacaaaaaagttcattcatcagactctgggaccaaag

SEQ ID NO: 52546 - DNA, 73 bp, Oryza sativa
ttgaggcctttttttattttcaagttggacgtatcaagccctcttgtgaaataacacaaagtggggaaattat

SEQ ID NO: 52547 - DNA, 419 bp, Oryza sativa
  unsure (1)..(419): unsure at all n locations
agcttctcttactgaagaggggaaggattgatttatattgagtacaaccaccgtactcagtaagccacaccggcagatgcaagattaatgcaaggggggtacaaggagtaataataacatagaggttaagttttgcagtaaacagcatttaaaagtcacttagttgcccaaagccatttataaagacgatcctagagctacacagtattattaaacaaggccgtgaaccctcacgaacctgccttaacccaaggcctacgatgatttggaccgaactggcaacccgacctgagttccagctcgtcccaagccaacccaggccaaccattccatattttagttgttgagcaaattttaagaattataacactgacttgggtacattgctctgcttgcccatatncganggctcggctatt

SEQ ID NO: 52548 - DNA, 247 bp, Oryza sativa
  unsure (1)..(247): unsure at all n locations
cagctggctgatccgactnggcggcgcaacggaggtggcttcgtgatgtgctggggatttttatattatatcaaacatgtcgtcgtcgtgcccggccatggctgaagggctacgagcggcggctagcgtgtggagcggcgtgagctcacgcgcggcggcagtggctgctgcggccgtgggagcttgcgctcggcggcggcgtgagcttgcgccttgcgccggatgtgtggagctgattattcgattg

SEQ ID NO: 52549 - DNA, 430 bp, Oryza sativa
  unsure (1)..(430): unsure at all n locations
agctntacctcccatgttgtgggaatgttactctaattgtacttctttgtgatgttttttgcaacaaattaaataaatgtgtgtgtttaattaccgagtatgtgcaattatcttttcgttgtttccaaattgcattttcaatatataattgatggtatttacaccggtttataggcgaatcatttgtctcccgacccccatgatacgggtatttacttcgacaaccaacctaaacacagttataaaacctccctctatagttcacgagaatctatataaccattgtttcccagtggcttctaagttgtatgttgtacttgtcttcctcaaactaagaactagaatctccgaaacatcgaatgatcattaccgatcgaatgtcgctgacataatggctgataagaactacaatgaaagataatgtcggaaa

SEQ ID NO: 52550 - DNA, 339 bp, Oryza sativa
actagcttgtcgaactatttcgctgttggtgtgctatatgccatttttatgtatttaaagtgctttattgtggatgggcaatttaccacaccgtttagagacaaattgcactaattggagaccaattgctacttgtctaccaatttataggaccaacaatggcttattcttttgtgaaaacaataactccttgacatctcatcataagttctatctcggtcatactctcagtgtctgctctgtatcgtgatagattgagcacttcgagcatcacgatctgtaaccttactgcactattttaccgtcgtcaaaaacatcttgagcattctgcttatcttt

SEQ ID NO: 52551 - DNA, 103 bp, Oryza sativa
aaccagctaccgcgtccttactttccatggccacttcgactcattctcttttgcaacaccgcgcgcgtttgtattggcgcgtagcgcgtaggcgcgcgaccgg

SEQ ID NO: 52552 - DNA, 462 bp, Oryza sativa
  unsure (1)..(462): unsure at all n locations
cacaagcttcaatctttattgtcataactatcaatgacagaaccacattattagctacttgaatgctataaatggagaatggtgcactgantagtcatctacaatgtcccagtgaatttgaataagctcgatcagtaacattacgtggtaaacatcatagttccagaatatctaagccaattcctacaaacattgaagcaatacattatagtccagaatcatagtcattggaaattcaataatcaatgcaacataatatgtacatgacatgacaaaccacaaagtcatcgactcttagtctaagcaacaaccactctaaacacatactatagcatcagctatgngttctagcacactattgctataaccagagctcttctaccatacactataccctcaaacacggtgcaagatgcgatctgtgcatatatctgacaatcagatcaatactgtatacacttg

SEQ ID NO: 52553 - DNA, 428 bp, Oryza sativa
agcttctgctgctgtctttcatgccaattgtatggttctttgtacacgtagatgttctcggcgacagagaacgcccattcgtggaggttgactcgccgaatgatgcacggcgaggcatccttgaatgcgttgatgtgaccggctgcgtcgctagccgagtagctgatgctgctctgctgaccttggagctggccaaaggtgatcttggtggcgaaagagatgctcgtgctcgtggtgaggaagaagacgcaaccttaagcagaattggtggcagaggagatgatgctcgtgctcgaggtgaggaagaagatgcagccttacgcagcactgagctaggatgagaagtcacattgctcctcctctttggtgatgatgatgaagtaattgtcagtgatcgcgagatagctggtgatgacagggatttcttc

SEQ ID NO: 52554 - DNA, 425 bp, Oryza sativa
  unsure (1)..(425): unsure at all n locations
agcttaacatagtttgaaaaaaaataattatattagaaaaaaaatgtaaagtgagggtctcattttgatgatccactgacgagcccacgcatcctatggtggtggatccatggtaacaatagtaacagtaaacaccaatgtggcatttttttctcttataatttaattttttaaaactatgttaagcttattcacatgattataatattcatcataggttgccacattggtgtttccatgagagtgtaaatgcgctctgaatacatatatcattcttcgttatcgaaccccttttctcatttatgccgaaactaaagttatttcacattgcatttgatgtgatcacaattggagcattctctntgtaaagatgttcattcgaatcctcacatctttctcgagtaaattagaccagttagatatag

SEQ ID NO: 52555 - DNA, 440 bp, Oryza sativa
  unsure (1)..(440): unsure at all n locations
tacatgaactngcaacgagagtgcacttaatgcataaccttcaagatgcacactgtaccgaatgaacttactgagtatgtgcgtacatacaaaaggcaaagttgtagattgctactctgtggagttagacgctgactatgatgccatatatacaatatataaaatggatgacacctatggatatatgtgttcactcccactgtataatgatacattagtaccatacaatacaatcaaatacatttgatggaattattgaagatacacatatagacatggtaatcgaaaataccttattcccgacgaattcatataaatgtatatacgcacttgatgtgtgattcccttatcatgccactcatcgaaatggtacgtatgctttctatcttactctacgcctatcagttatataccttagaggatttgaagttggatagata

SEQ ID NO: 52556 - DNA, 265 bp, Oryza sativa
atccttaagtcacctgcagcatgcaactgcctcgcctagcttcgactaggctaagcggacgttgtcctcgttgaagtcgagcgacgcggcgatggcggcggcgcgcctccgcctatttcaacgccatcactctatgtgcccaatactgaggctaattctagtaactgtattgaggtcactgaggctattgccaatacctcttatctcaaccccatttatctccaaatacttcagtaatcaacccaattaaactataaaactttca

SEQ ID NO: 52557 - DNA, 398 bp, Oryza sativa
  unsure (1)..(398): unsure at all n locations
ggtcgaatagagacttgcgtctcacatcgacttaagagatgcctttcaacaactcanatggtaatgtaccgaccctccgggtcagatcattacttatctgcttccagagcccattcactcgattaggcggctcccagagccctttttcattttgcagactcccagagtccagcttgccagcagctaagcaatccgcttccactctggatgcctagtctattgatgccgcagacattccgaatcacacagattctgttctgacactcangtcatccatctgccacataagctgattctggtacgattcccaatcacaacactnttcacaaacacaggcatactatctacgcacgggaccacctacattaccatgacgtggcacggtgtcgacagtagta

SEQ ID NO: 52558 - DNA, 304 bp, Oryza sativa
gcttactattgaatcaacagctattgcaataagtcataatttttttttgtggaaatcaagttttatcctggtctgactttagaaactatttcttctaatccaactctatagtgaataaacatatatgggaccaatacaagataatgctggctcagcttttgttcactttttctcgacacaatgtatatcatattaatttctggatgcattatgatggagctatgttgttgagcttatgttgttaacattacgtgagatgggaatgatgaggatcttatttatattataaaatgcacaccgcctg

SEQ ID NO: 52559 - DNA, 434 bp, Oryza sativa
ttaagtcacctgcagcatgcaacttcgtaggagacatgcatgttttgattcttgacagctagcaggacaccagcgaaggtaatcgcgggatggaaattgccagctgctcaatcttcgtatgaggtgggagaactcgggacgggacagtagtcgaggccgccgacagaaggcgtgtgatgaagagaatgagtgttctccttgttaaaccgtgaattggaagtgatcttgttgaacctaatagctactagtaggaagcaatctcggaataaaaatggaaatgccttgcggctgagctccaggtaaggaagatggtaaggaagatgtgaacgatcagggaaggaagacatgcgagtgatcggtgcgggagttcgaacgccttgcggcggttccctgtagcagaaggggactgatcatggttgatatagtgatagagt

SEQ ID NO: 52560 - DNA, 405 bp, Oryza sativa
agctttccttcagcaaatcaatcagccttactttatttcgaatacaactccctcgactcgtccagaggggaatacaggtcaaggtgcacttagttggttgccgccgaaccagccgaatctgggggcttcgccgtggagtcaggtaccttagtgcgacttcatcaataccgctcaagggcaaaccgttcggccgcaaggaccaacaccaggcttcggaacaagccaagcaccaacccaggtcgccatggcatggtcgcagccagttttcgacccatccatggcggctcagcaagcatcaccaatcggagccgggcagccgaacgccatggctcaaacttatgcgcaagccgtaattgcacccttcgccacaccgtacccacagcaaggcaccgcgaatagggcggg

SEQ ID NO: 52561 - DNA, 415 bp, Oryza sativa
  unsure (1)..(415): unsure at all n locations
catatacccatggacaattcagggcatagtgtccttgctctctgcaatcgtgacacaagggacatnctcttctggcattggaagctcattgacctgtgtggcaaatgctcgatcaaacacatactgattctggtcttgacttccaactaatggtagctgtgaactaagcagcatgcttggaatggaccaagggtgtgccctggttaactctcttgaggccagtggtagattgagttgaaaacttgagttacttgaggcatacccgctgacattcttatctttntctctggtaaacatctgttaccgggattcacgtgagagaggatacatgccaggaaagaatagaccagaactagagataggaccttaaaggaacgtaactctcttgttgatgtgctgttcgnttcacttattc

SEQ ID NO: 52562 - DNA, 425 bp, Oryza sativa
agcttcaatgatttgatggatattttgatagttatgcttcctaagtcgaacctcctgccgacaaacacttatcaagcgaagaaattgatatgtccattatctctaggtgttcagaagatccatgcatgtgaaaatcatggcaaaatttgctacaggacaccgaaagattgcgacctttgctatgagacacccgaagatcgtgtatttgctcgtgggcactgcaaaaagtggtaataagttgctggacagtcctcccattattttattatttccggtcaaaatggagagagaaagagctgtgtaagtaccaaaatgcccctggacacatactgttcttcctctctctcttcttttcttttccccattcttcctcgcgacggcggctggcccgagccgggatggctcggccacggcggagcagcgtc

SEQ ID NO: 52563 - DNA, 341 bp, Oryza sativa
  unsure (1)..(341): unsure at all n locations
ccaccgngttcgccagccactccggatggatgacttttctttttatatncggcctccagaagtctcgccacctactcgcggatgaaggcttgacgttccggtgcctgccgncgcactttctgccggaccggncttgcgcccggtcgcacggcgagacggtgctcaatcacctncctggggacnccgggcatgtccgctggtcttcatgcgaagacgtcagggttggccgcacgaaggagacgagcgcgtcttcctatttgccatccagatgaccaccgatccgtgtggtcttggatgggccgtcgcccaaggcaacctccttgaccgggacctcgtcgcat

SEQ ID NO: 52564 - DNA, 426 bp, Oryza sativa
agcttaagaataaaattgataaacattttaacaaaatgttaattatttagcatgctatcgatttaatatggatattattatcattgcatatgaaaacatgcttatggaactatttatggctatatgctaagaattgttgacaccgcatatgagcgggtggaacacatgatagagttcatgtgtttggtttcatggacctgtttatggtcataatgggtatatcgatatatttatggttatttcttatttaaaattgatataataattaacccccttgtgtcaagaagaatgacatagtttcgcccatccacacaatcgatttgtcgaacctggccgtatattgctccaattgattaaacttctgcatgcctttcggtgtattggccattagctttcaagtgtgtgaagcaaagtgacatgtttcat

SEQ ID NO: 52565 - DNA, 421 bp, Oryza sativa
  unsure (1)..(421): unsure at all n locations
agctagttctatggatggatctaaagcatgataatcatcggttggcttggatttcttcctcttgacctttttcttcggagccagagttgatgggtcaatatccgatgccttggtctttctcttctttccggcatcggctggttcccttaattgcccttgaagcagacttgaggtgttgggagcatggtagccgatgacagggggagataatccacctccatttggaataaggccaggagcatagtctatgtccctgccactgttgctctggcgaggaggagaagattctgtggtctgcaagatggaagatgaaattagttaaaatattaatcggctaatggttatgtttacaaaattgacaaaaagaagaanaaacttacttggtggatgacatctggaaagagatctgtcatatacatag

SEQ ID NO: 52566 - DNA, 124 bp, Oryza sativa
ccgatactactctaattaacaaccagatagcaggcttgagattatagctctaagcacgactcatgagatccaacttaactgatgcagccataagtattaaaagacagacaatatcttgaccatc

SEQ ID NO: 52567 - DNA, 429 bp, Oryza sativa
  unsure (1)..(429): unsure at all n locations
agctntgcgagtctaggactatcggtttttctatgaagtcaacttcctcaattctaaggttaacttccgggcatatttgagttgcccttatattcctattatgggaatgtactatcattggtacacgtaaattttgggttttccaaccatttcttttcacaaaagcttgtgatatgaaagaatgggaagctcctgaatcaaacagaactatcgcgggttcggagttgacagagaacatacccatcacaacgtctggagcatcctgagcggtttcagcttgaatgtgattcacccggcctcgaccaaagttgttggaagcacgtgaaccttgtccacttgcctgagagctangacgagacggagctgccgctggagtangagttctggcagtgctgccattagcatgccctaagttggtgttggtaggat

SEQ ID NO: 52568 - DNA, 207 bp, Oryza sativa
  unsure (1)..(207): unsure at all n locations
acttatacagaacacagtctccatcttttcttatataactngcangtcatacttgcactatgtcacctcactcacnaattttattccttactagttgacatgctnttatcgattagttgctccctccattgcgctcaatccttttggtcaacactaccagcagattcatcactttcctcttgtcaagaggggccaactatacaacta

SEQ ID NO: 52569 - DNA, 421 bp, Oryza sativa
agcttgaaagcgcgcacacaaacacactttatattgtatgtctggtctagaagcagttagatacaacaaagatccaatcatacttctatactctttttgatcaacagctttaccatcttcatcaggatccaacatagccgtagaaccaattggtgttgaaattggcttgcaattctccatcttgaaccttctcaaaagatcctttgtgtacttcgtttgatgcacaaaagtaccttgaggtgtttgcttaatttgcaatcccaaaaagtacgataacttacccatcatgctcatctcaaattccctgcgcatagtctccgcaaactccacaaccaaagcgtgagttgaacaaccaaagatgatatcatccacataaatctgaataaaaagttgattatcaccatgcttaagaacaaaaagc

SEQ ID NO: 52570 - DNA, 392 bp, Oryza sativa
  unsure (1)..(392): unsure at all n locations
agcaagcttgatagctacagcggcttcttattacgttaacaccgtcggatccctctctcgaacacgtggctttgtctcatctcttagatcttcattacccaggatgaaacgttttctccctcctttgcatcttcagttaactgaaactctgaactttctgaaatttcctccattcttcttacgagtctgacaaccgccgtcttcaacttgctggtctacccgctcgctgccatcggagtggccggatctgatggccatgacctcaaggccgccggatccgatgccatctcgtcttcctcctcgaaaacccaggcccccttctcttcgtctactcgctntcccaccgtctccaagtccaatctaatggcttcctctcttctctgcgcctcgcc

SEQ ID NO: 52571 - DNA, 297 bp, Oryza sativa
  unsure (1)..(297): unsure at all n locations
ggactgatacctctcattaaaagttntaagtgtgccacctgcattaagcactactcatantattaagtgcaaagaaattattccacaacaagcataaatggaagtggtggtgctgcgtacagataaacattataatanattataacagaattatgccaatctcgatagcttttcttaaagcacacgaaaggggaaagaccaacgacgaatgcaccaatttatcaaggcatatatttacatggaagactacatgccaggtattcaagttagacataacctctttatgtaccataattt

SEQ ID NO: 52572 - DNA, 405 bp, Oryza sativa
  unsure (1)..(405): unsure at all n locations
atgcaaagctcgactcaagctatacaagtttctttatggtgcacaccatactactaagatgcanacactacatagtagcaccccgatgaaaaacgcagacataaataagcttaatcctgtgacagacgtagtgatatgatatccgcgaccagtagggaaataatgtacactggccccttgaaacctttagcttattgaaccaccagaacaattcagtaccccgcacagtggccacaatttaccacctctgggcaaatctgtcgagggaaattgaaatcattacttgttggctcaagtgaatgataccagaacagaaaggatttatggtaagagtggaaacaacccacaataaacacaaaccatgttgaggattgagagtacctgtattatttgaattgagcaaca

SEQ ID NO: 52573 - DNA, 424 bp, Oryza sativa
agcttccctggatctgggaagattttctttctctgtattgggatcgtttgatcgatttccttgatcgctacttatgggcgtgcgctcaaaggatataaacagggattcgcaaacaaaaaggggaattcgtagtcactttttcctgtcgcgtaaaaaaaaggctttacgcgagagcaatagaggttgggatacatctatctcttctgagcaacctcttttggattcttaagaccacccttgcagtaagataccgtctgctttgggttctttattatattatctccttcgagggatttttaagatcgctcaagctatatttagtctaatttggcttttactgtctccttttctcagggaagtggttaaagacctcataagatagaggagagcgccaggcgcagattttcggaatacttctaccggg

SEQ ID NO: 52574 - DNA, 333 bp, Oryza sativa
  unsure (1)..(333): unsure at all n locations
tccgtaaatgagcgaggattgaatgtacacgggaatccccattcagctactacaatagagtattccatggccccctcttcatggaaaagagttactacttgagctacggaggatgctctctgaccgatagctacatanacacatattacatcttgccctcttttgatgagaatcgtatctgtagctactgctggtttgccggnttgtctgccccaataattaactctcgctgaccgccncaatatgaatcatcgaatcgatagcaataagccccgtttgaaggggtcatatacagaacgcctggaactatacccggagcacgagatcaattaa

SEQ ID NO: 52575 - DNA, 371 bp, Oryza sativa
  unsure (1)..(371): unsure at all n locations
agctntatatagctgccccgctgacttttttatatagtcaaggagctgtttgggtttatcaagcaattgattggatacaatatcattgctttttgccacgtaagtgtgcatttttattgaccaatattatggcttaggctgattatatattatggtcatttttcaggcggttggtaaatcctttatgagtttacttactcggatgttataccacatgtgccatatatttccaggtgtggtgaaacaatgtgtcttttatggacttaagcacatctgttaaagcagtgtgcgcatggcgtatgcccaatactttgaaaatttctttattcacagcattcaagcttctttatagttgttttgctatgtgaact

SEQ ID NO: 52576 - DNA, 412 bp, Oryza sativa
agcttgtatatcaaaggactatattggttcagattttgcacaaagcaagttttgttgagcaagtaataagttaaaactataagaatttgcaaaataacacaatctgaaatttatgtacaacaagtatataaatctgaatgtgaacaacaaatgagcacaacaggctctaaacatcgtccatggaccacccttgctcaagcaaccattagccacttatccaccaagattaaccgtgactaatacccaccatttatcccaggtttgatgctaacataaactgactaatacatcaagtgatcatcctgtaaccatgaacacggctattcgaatagtcttactcgatcaaatgcttcacacgcacataggtgtgaccttcaagtgattcaagctcataacatatcctttctcaagc

SEQ ID NO: 52577 - DNA, 258 bp, Oryza sativa
  unsure (1)..(258): unsure at all n locations
gcagatgatatgcagccttgatggtaaggatcgtggnngtttaagtacacgacatgntgtcagtaaacactattcanaagattgttgtgtcattatgaattgactcgaatattgaccattagatcacttcttctacttttctagtgagccagcggtagtgctacatatgggtcggagatcatgggcttagtangaagcagagggtgtgagtgatcctatcatgggaggcggaggggcagcatggctaggaacaatagt

SEQ ID NO: 52578 - DNA, 376 bp, Oryza sativa
  unsure (1)..(376): unsure at all n locations
agcttaaatttggaaagatgattttctatatcctccntaaacggaagcatagctgatagttatatcagtatatcacacacctatacatattctaatcactgttcgatataccttgaatgatataaagcttaatcggatcatattaatctttattaaaagatgagggttattcgtaaaccatgtgaatcgtaaaactatatgcacaatatttgttggaactttctaaatataggttaatgatcgatatgcacatgttttcctcgcaggaaagttgcatagcttttaaagtaaaagtggacattgtaaacatatatccataaccttactgttttttttagtaggttaagaaagctgctacacaaagcgaatccaaagg

SEQ ID NO: 52579 - DNA, 428 bp, Oryza sativa
  unsure (1)..(428): unsure at all n locations
agcttattgtccggctcggtgaccttttgtatagcaaaggcaagcttgtcaccaacactagtgaatgcactaatcagcccgtcatcttcattctcttgcgttntggatttttttggcttacttgcagatgacgcctccgcacgatcatcagtagttgcaggaccatcattttcttcatcattgtcaacttggacatcctctattcctaggactgaacttgagtcctttgcatacattcctgtagccatggtgctaccaaatattgtaagcatctcaccatagtgtgcaagaggtttgttaaaataatccgcatcggccttgtgatccttcatgaaacaaaagttattgtataagcaaatggaataaaagttataaaaataaaacaaagatcccacaaggtaagacatatacctcaatataaccattat

SEQ ID NO: 52580 - DNA, 405 bp, Oryza sativa
  unsure (1)..(405): unsure at all n locations
ctaagctgtctccgctggaccagccgtctgccgcaacgcctcancagccgacaccgctgttctcttgtctcgtttcaggaacatntcgacaaccacagggctcaccggccagcaacacgtcgacaacctcaccggagaagagagataggagggagagagagaaaggaggagcaatttggtcatgtaaaaaagtgagcctcctcttatgcccgatccaggtggctctctcaacggtggcgtggttatcctggttggcaatggcagtgaggcggcggtccacggtggtggcactgttatgcttgatgtncgcgtggcagcccagatggcgacgtggcggccatggtggcgggctatgcccgtgtagcgcacagtccatggagcacggcgtgaggtacgggcgtggat

SEQ ID NO: 52581 - DNA, 352 bp, Oryza sativa
  unsure (1)..(352): unsure at all n locations
agcttcgatcttgccacagagggccggttttgtgggtggcggccggcaagttcgtctcgtacgcccaacaatttataccaccacatgtgtgagatcgataaaatcgttcgatgcccctttaattagctagctcgctttgattttgggacaatcagctccaacctttgctctttgtcctactccattacattgcatctttttttttttgagttagtagtattatgaaaagatcattgtgtattttattatctcgctaccttacggggactttctgtgtttatattcgttacgctccgaatgtttagaaattaagtacttcctccgtattttaatgtatgacgtcgnnngcttt

SEQ ID NO: 52582 - DNA, 272 bp, Oryza sativa
  unsure (1)..(272): unsure at all n locations
tcggatgtgcatcgactacaccgaccttaacaaggcatgtcctaaggatccttaccttctgtcttcatagatcagaatgncgactccactgcggngtgcgaacctttgtgtttctagatgcatactctggtaccatcagattcgcatggctagggaggatgaggaaaanactgcgttcattacctccataggaacctattgttatacgacaatgcccttcgggttaaagaatgcangtcctacttttcaacgtactactcgaatttctttgg

SEQ ID NO: 52583 - DNA, 424 bp, Oryza sativa
  unsure (1)..(424): unsure at all n locations
agcttgggantaagaacccaaacttgtcttttttgtgtcccttgatgttagtcaccaaagcctttggcacccacacacaagtacggtactcatcattataattcccattgaaataagcaaccactttgccctctgaatttttgaaaattacatatgaatcatagtaaagaccctctagccagaacttcctgccattatacccggaacttccggttagtccgttcggcctatcagaagcccggaacttcctgacaaaatgtccggaacttcctgtcttacagggcaggaacttccggtcattttgctcggaacttccgggtgtctgaccagtgaggggacaagtcacctcacttgcttgtggagctttttcttctctcacaaacatcaagcattctttcccatttaccatcacacgcttagacac

SEQ ID NO: 52584 - DNA, 416 bp, Oryza sativa
agcttgcagaaacgtgtaatggtagcattgttatgctcaattcggatggaggtgccactaggtcagaccaaagagctcgttgtctctcctgattatattatgtaccttgttagaattgccaacagtaaaatggaggctaacaagaagcgaatgggtggattcctggatcttttgcaggctaaggtatcatttgactttgcataccggtaggcattacatacctcatatttgcacctttctggcattgctgctcatctctaactgggcaataaccatgtgatatcatgcaaagttgaagcatgtatttcctggatatcgatttgatggataaagagaattataatatcctttttccaggtagtttagctattggtcatcacacttctttgtgaagaaaattaattttgtctgtagtg

SEQ ID NO: 52585 - DNA, 266 bp, Oryza sativa
  unsure (1)..(266): unsure at all n locations
agcttagagattntnttttaattntttgaaccttttctattttaaattttaaaaataaactcatgcaaaacttattttcaaaatctgaaccatatggtcttgccagcccgcctggcgtggntaaataacactgccactgccanctgtagtgggcgtgatagatttgactctgtcactccaccgagagctttgtggtttaatgactacggacgatcggatggaatcttggctacacagagagtcgctcatgtctgattcacatctaa

SEQ ID NO: 52586 - DNA, 219 bp, Oryza sativa
  unsure (1)..(219): unsure at all n locations
gcccttgatctagctgcacagtgttgtctggcnagtcgtaatactaaatacctcattggtttatttatgcctttcttgnaaatacacatgccatgggactactagtacaagatttgtgtcagccgttattatatttcagaactcacatgagtggaacaaacaaaattactgctgtagtcagaagctacatgcattgtaacaattaaactgaagatgttt

SEQ ID NO: 52587 - DNA, 424 bp, Oryza sativa
agcttgggtacgtacggagttcgtaatttatttgagacgatcgatattttatcgcgagtgacgacgaaacgaagagatcgagctagccagtacgtaccatctcgcatgcagcgtgacacacggcagtcggcaggcggcatggtgtaatgcatgtcagatctaatttggtgccttgtgcaaggtgcatgaagccgcgcgctcactgctgctcaagctggagcttagctagcgtcacttcgatcggccccgtgagcgtaagctcacggcgatggatggcagcagtgtacatgtacgtacatcgcgatatccactgtcatcgtgatgctcgtcatatatgcatgttttggtacgatcacgatggcaatataaatgagcatgttagaattttatattacggtgaataaagctttaagattgtgctatg

SEQ ID NO: 52588 - DNA, 327 bp, Oryza sativa
tttttttaattaaactgacagtcaaaagtatctgactaacacatttccatgtgacatactcaataatactaaattgctgctacccggttattcaaaatttctcaacttcactttcatacataaacttctaacaccaacttcactttcatacatattcattcaccaacttcattagcggagaacacccttaacaatggctgctattgatgcggtgcgttgcagtgggggggaaggggtccacgctgacttgtacgggaagagccgccagggcctcctatccgacagcctgactgtaagcttctgcatcaaactcatcaacatctacat

SEQ ID NO: 52589 - DNA, 307 bp, Oryza sativa
  unsure (1)..(307): unsure at all n locations
agcttgaagtgtcagatctggcggtcatgnctcatgttggagaaaggagggaggagggaaggaaggaagttgttttccttctttttgctcgttttgttatttctggttcgattttgctatatatttgatcgcggaggttctcaccaaattaaaccaaactaaactacttaaaatctacgatcaaacgattctattagtttatacaggccatgacaataaatctgtttttccaagcgaccaaatatcactaccctaccccacgagagtccccgaaatcctctgataagttataagcacctcctctcct

SEQ ID NO: 52590 - DNA, 262 bp, Oryza sativa
  unsure (1)..(262): unsure at all n locations
aggagccggctggttgatgagccgcccgacgaagccgcgcggcccggggaggcnaagcccggacgcggaggcggccacaaaaaagccgaccggggagagagaggcccgggaggaggaggaaggcaccagcggcccacaggtagaggaccaccgcgaccggcggcggccggcgatggacggggtggcggcggccggcgatgcacctggtcgcggcggaagcggcagccggagtcaacgcggcgggcggacggcgcctgccagc

SEQ ID NO: 52591 - DNA, 418 bp, Oryza sativa
  unsure (1)..(418): unsure at all n locations
gatgacacttcgcaccattaattatgcccgcttgcttctgtgaagaatgtcttctgctacaatcctgcacctatgacgacaatatcaccaatcttctacacctctaatggtgngaaatatgccaaagaggctggtgcaaaagggatcatacttgccacatatgcttttatatgctagatgtcttcgatatctgtggcagcatgccatgtgttctattggactttgatgttgcaacgggcctgtattacactctcgttaaaacactgactcgtagtaacgtacccctgacttcatggtatggaaggatgctgctcccaatctcaacatctcctcaaagaccagtcacttttaaagctctaagtcatctgattgatcttgcagaaccatacatatgggcaaatatactttctatatatga

SEQ ID NO: 52592 - DNA, 387 bp, Oryza sativa
agcaagctgtcttcattagagttcacatgataaagttataagttattttttaatataaaggttttagaccgacctgtttatgtaccggggtgacacaattgaacaagttggaggaactaaactagtaatctacaagtttagggaccgggatgatacagtcgaacaagcttgaggacctgaacggtcgatttgcgagtttagggaccgtgatgacacaacggtacaagtttagggaccgatgatggactttactctatagtttaaacaattaaatgtgacgatttattaagcatataatactatgtttagaaaaaagtcaacatcgtcgaactagaaaaactgagtttgcaccctaaaaggaaaaaaaaaactgagttcggttccgtg

SEQ ID NO: 52593 - DNA, 138 bp, Oryza sativa
tcagctgcttaacactaattccctgactgctgagactccctactacccttgtctatattataaacccccccagttcttgaagacgaagaggtggacccggctgatgaagagttctttcaggagcaagcagacttcgag

SEQ ID NO: 52594 - DNA, 410 bp, Oryza sativa
agcttcagaacattattaacagatctactttttctaactagggacgaaccaatcataatatggatcatgctagaaatgtttgtcgtccgaccagatgatcgagtaagagcttataattgatcacgtataacattattccatactcagctggttccgaaaccaactaaattaaccgtggagtaacaatcaagaagcaattaacataatattcgcacttatactggaaaaatataacatgtagacttatttttactggtgtcacacactggaaaatataacatgtacgcactggaaaatataacttgtagattgccctgcttaatttattcgtgttaccgagcgatcgatatcacatgttggcgtatgtatagctagctgttacgtggcactgcacggagcagcatggtctt

SEQ ID NO: 52595 - DNA, 416 bp, Oryza sativa
  unsure (1)..(416): unsure at all n locations
agctagttagctcttaggtcatcgtctctattgaatcctttttcgntgctccccaggtataaatttgagaactcctataaatgtatctatcatacttcaaagcatagttttcctttggcaatgaacagctaggtaggttcttagatatatcaatctagattaatctatttaagagttatgtatttgacgtttactttcagttcatacagtccatgagattaatttctttttcacaggcagacaaagttacagtagtataccctatgaggttccaggattccattgatatagttttagcaacttcctttctgcaggtattttggacacttccttcttgtctcttttatctgcttcaagcaattcattttctagtttttttatgatcatttatagacatcttcaacaaaccgatcttt

SEQ ID NO: 52596 - DNA, 269 bp, Oryza sativa
ggtgagatcgtgtatttatatcgctcaattgcactctcgagagtactcggcgcgcatttgcaacgctgccgcgcgagaggtatactctggaccgcttcgtggtctcaaagaggtgccaaagaaacgcgtcatgatcaaacacacgggttgatgccccagactctacgactggaggatctgctggcgggaaggcactttacactggtgacaacagcggccttctcacaccataagctgcaaggccggcgcttttggagttgaccctacta

SEQ ID NO: 52597 - DNA, 399 bp, Oryza sativa
agctttatcacagcctccttatattctttcttgaaacaaatttcattccaagggcaagtgtaacagtgggcttgttgggattaaatattttgtactttgacttcttcgtgactaactggccatcactattttcttcatatgaatcatcatcagcactactactgtgctcatatgggctagcagtatcctcaccatcaatctgaaccaaagccctttcatttgcctggcttgctgaccccatatagatgacatcatccaaatttcctagctcaccatccttcaacttcttcttaaactcattgcaatccttcctgatttgcttgacctcttcatcttcttctgaagaacacgagtctccaccaatgtaatcactatcagattcagaccaatcagctatct

SEQ ID NO: 52598 - DNA, 210 bp, Oryza sativa
gagatgagtaatcaacttgatgagcccctctaaaacggggaccactttaaggagtgagtgcatgataactgtggttgtgaacaaacccgattaccaaatgacttctgagatgaaaatggtttatggcctctgcagaaaaggaaaatggagcccccttccttcttatttacatatgtattcatatattttaatcataatttagctattttt

SEQ ID NO: 52599 - DNA, 423 bp, Oryza sativa
  unsure (1)..(423): unsure at all n locations
agcttcgtgaagaccttgagcaaggcatgtttttctttgatcaattgcccctataattgaaaagtcattattgttttgtttgcaacttgcattattagaatcacacacttaacttgcttggcctcggtttgcgtgccaaaccgacggacctacccagtagtcgcactaatttccgtaggtcgtactaccctgattccttgtcgctccacccttgtggtacctcggtaatcgtgctctctgagcgcgtataccaaatatcccacatacaccgttgtttgtcgaaaacttgggaaatgggtttgtgaagcctttaaaacccgacatgtggtgtcggtgtgtttgaaaataaaatgaattgtgaaaactcgcgatgcggnggttgtgcctatgtggcactgtcccgtattcgcatataaagaccga

SEQ ID NO: 52600 - DNA, 498 bp, Oryza sativa
  unsure (1)..(498): unsure at all n locations
agctggaatcaataatctanagctggctctttgatagcttntgataggtccatgtggcttctttattattaatcataaattcatagtagagaagtaacacctaacaatcatacgtgaggtaaaatctacagaaaatatcacatatagattctagaggcttccaaaactatcttccctgttccaatcataggaacttctactcctttgccttctataaatatactacgcctactcagtactactgctataactctagaatatatatagtatacccaacattattaagccaaaaacatatctaaaacaacgaatctgcatttaatttccttctgtaaatacactacgcctactctataatatatagtaactcataagtattacgcataaaaaaaattcaagacagacaaatagagaaagcaacccttcttatatcatataaaaaatcgaatantgttatttcgtacacacgatatgttaataaaactctgaatatactaa

SEQ ID NO: 52601 - DNA, 423 bp, Oryza sativa
  unsure (1)..(423): unsure at all n locations
agctagttctccngacagcagaaagtttttatatataggcttttctcatcctctagcccgtcaaaatttaatggtttctttctcgtgagtagctctaggacaacaaccccaaaactgtatacatcactcttatccgttaatttccatgtttgcatgtactctgggtcaaggtacccacgagttccctgcacaaacgtgacgaactgtgcatcatcggttggcgataagatggaggctccaaagtcagagaccttcgctgtgaagtcaccatcaaggagaatgttggatgacttgacgtccccgtggaggattggaggcgatgcccatgagtgaaggtaggccaatgcttcagcagactggtgagcaatctgtaaacgcgtggatatagagatgtgcctgccgtggccatcatgaatgagatgg

SEQ ID NO: 52602 - DNA, 408 bp, Oryza sativa
  unsure (1)..(408): unsure at all n locations
ctaagctntcggacctgggcaccanatgtccagccgcaccgccgcatccggcaccttgccttgttcactacatgcgtgtcgtgcgcgcgagccctgccggtgagggcangtcttccggacaaagccaaggccacctcaacccgtctctcctgcgatctcctgacaccgtagctcgagagagatgaagatcacgtcagtcggctttccccattggcagcgccgatgcttgccttctcttcccttaccggcgccgcttctggtgtcatggaggcggcgagggagcctcttcgtgggccgattnttcttggatgggccgcaagagctagcttgctcgatcgctctcgtccaataccgatcggacggatcagcgtagccggaccgtcctctgacgtagaaaccgcttcgtca

SEQ ID NO: 52603 - DNA, 423 bp, Oryza sativa
  unsure (1)..(423): unsure at all n locations
agcttattacaatgttatctttgggggctgtttacttcttaccagtgaccaaaaactntgtgggagatcaatcatattatcgttttgctcataatgtatattcttcacatatgagaatgcttctttctttccccttctactacgttctgcaactttatgctctttatttttgacctgtatgtgaaaattgttgctgcagaaatgggcacaacctgaccttctgaaagctgctgttatttcaaccatgtcaatacttgctgtgcctcttgaggcatcggcatcggcggagacatgtcagccagctaattctatggccaatatgcccatttttattgcttgggctctaatacgtgctgctagtggtggtaagatatgcaaacctgtgtacttgcaagctcaactggatttatataaacttgatga

SEQ ID NO: 52604 - DNA, 418 bp, Oryza sativa
agcttaagagataggtaggatccatattaatatgttttcagtattctatgatttgcaatccgcctagctcagcgctaacaacagactcaaattgcagtctgtcaactcaaaaggaaccagtcaggtggcttgacttaccccgggctgaagccgtatgatctgctgctgagataaaatcaatcatcgagatcaaagacctaaacccattcgtgcataaggtaaaatgaacaaaccaacattaaataatgtgctcattagctgaaaccatttgtctttatttccaaagctcatggtatctaaactgcagaaactcgagtttgtcgtcacagtcaccataaagaaaatagatgggtcttggtggtacgtagcatgtgacagatgcaggaggactgcaaggccatatggaaaaacatatcgc

SEQ ID NO: 52605 - DNA, 429 bp, Oryza sativa
agctttgtataacagcttatatgctggtttgttttgtttggttccgcacggagagctacaggacggcggtgccgcacgcgttggggaagctaatgtcccgcttagtcaccggctacgtcacagggtacggccttgaggagttctggacgtccatctggctgttgacggcccagatcgacgtccgcttgtccgtcaacaaacgtctgaactttgaacacctgaacggagatttcctacatgaccatcgaaacccccatgtttcctaaacgggagatgcacagtacatataggactgaaaacagggaaaaaaaatcctaattagttctaaaactaattactccctccattccaaaatataagtcacaaccactcttaacccagataccaagaaataattattatcatcttgtagtttggatcattctaata

SEQ ID NO: 52606 - DNA, 425 bp, Oryza sativa
agcttgcctactggttcacaagatctcttattatcagaatctggtaacgtacctcagataaatacatctaaaggagattttatatccagaacttctaaagaagacgcacacatgacaggagaaaaagcaaaacaatcgaaagtcgctgcatcaccaaaacaaaatactgttggaggcttttctgaggacagcacgccaacattggttgacgttgcaaaaaaacattttcctgaacatgaagcttctacttcatccatgatcacgacaaagggttttgctgacaatgacactggtgaaggagtgatcgctggcacctcttcaatgcccatcagcacagagggagttggttggactgctggttcagatgagtggagatacgatccttcaggtgctatgaccccttaccgtcatcctcatacccaggt

SEQ ID NO: 52607 - DNA, 425 bp, Oryza sativa
  unsure (1)..(425): unsure at all n locations
tactccaactaatctggtactatcttctgtatatgcatagngaatagntagtattgcttaaacaatgtctgggacccgtatanttcgtgtagcatatatttcaattggtttcctatgatggtcagtcaaaaccagataatcaaaaaagagaatanaaactactctctattggttattngattttcaggctttcaagagaatagactactangcctgcataattngaaatgctatntaataaactatatatgtatntaaatgttcagaaatttagttccaagttaaaatttcaggtgtatgcaatggtgaaaaccaccaaatctgggcatttcccttcanacaacttctttgagataaatagattctgggcagtgttcttcaccgtcttcattatcttgactctcgcatctaatatctatgtaaat

SEQ ID NO: 52608 - DNA, 425 bp, Oryza sativa
  unsure (1)..(425): unsure at all n locations
agcttacggactactcatctttcaacctatgcttatagcattgnatgtctatgaatgcccatgtctcaaagagatagagttaaactctggcctgacaacactcgagtacattggtccattgatacctttagcacctcctggaatttatgtgcttacaaatttacgcataaagtcattggacatttctgattctcttcagtatattttcaccgaacttcccagcactcttccacgtctcgagatgctgactttgcaatgtcgtgaacttgaggttgcagacacatcacttctttatattcccaatttacttgtagacttccatcttacaggttaactcaagttacactatttttgttcattgttatttgtgtgcatgtttcagaggattactttgccagacaaaccaatcaaatttatttatctaa

SEQ ID NO: 52609 - DNA, 417 bp, Oryza sativa
agcttttcaatatccaattgcttatgcttgtgctgaaatccttcttgatgttttcaaaagtcactctatcatttacatccacatcatctatcacaatagacaagtgccgtatagatggtggaacttgaatagatctcacattagaactacttatagcaagacattcatatgatgaaaccttcaatgctaactcatgcagcaaatcaggcataacgtagtaaggagacccatcattttgttcatcttttttgaaaaatccataactaaccaagtcattcaaatagttcaatcctatgtcttcggttcttgtattttgatcatgtgaatgcaaaatgtctagtcctatccataagtgaatcaattgctcactgtcaaagatgtaatcttcagggaacaaagcacaatatgtaaaacatt

SEQ ID NO: 52610 - DNA, 413 bp, Oryza sativa
agcttggacagagcccgagccagctgttctgtatctgtgcagccgccgcttcctccatcaaatccgccgcatcccgtgctccgtttgcaaaattagttgaggggaaatatttcctttatcttcctctttcgtttcctcaagaatcggactttatcccgaagaaatcaacgcggaatcgaattcgttttcgagtttatctctccaactgaccctcggtttttccggctcaaatcctctcgtttggagtccgatctctctagcccaagcctatataaagcatcccttagtcgtcctcttccgtttgccccaggtcccaagccgagccgtcgcccgtagagccgccgtcgccggcgatcctccggtcgcgtcgcgccgccgttagcgccgtcgccgtttgcatccgtcgccgccgt

SEQ ID NO: 52611 - DNA, 386 bp, Oryza sativa
agcttgcaacaaagaagcattactaacttcctctccgccatcgccacttcccaccatgctagcgaagaagaggagggagattagaagaagcttctgagtcagagaacaagctctcgtacaagaacgcagacgcaccgccgctgccattggcgccggctgtgggtgagctgatggtcgtgtaccgtgagattgattaagtttgcataatgattggattgataacagtatggagtgcatataggcacaaaatagaactgggaaagatattgggaggattagctagaaatagaacatacgatacatgccatatgcacgaaatgtgcttacatccccaaccccgagcagtgttatcgtcggctggtcagacattgagacgggaatggaac

SEQ ID NO: 52612 - DNA, 188 bp, Oryza sativa
actataccatgtagatgcaaagtttgacaaagaaagtgaaacaatttaacttaagaacattcacatgatatgtcacaaactgagcaatactactttgggttctatctcactactatcccgcaagacaatgtcatcatctttttcaacatccccatgaccgatttgaattccgtctaagtgcaatgcta

SEQ ID NO: 52613 - DNA, 414 bp, Oryza sativa
  unsure (1)..(414): unsure at all n locations
catgcaagctntgtgagcacgcctatcttatttttcttaccgaggatcctttgcagcgggtcaaaagccaggatgaagagaagcgtacagagcggatttcctagccggagtcctctgcaatgttggatcctgtgcactaggataccaataaggacaacttgagaggtagaggtggagagaagggcccccaaccagtttctccatcttggagggaaggcacgttgctgcagcaaagccatgaggtagtcccatcagacagagtcaaatgccttcattatgtcaagtttgaaaactagcactggccctttcgtgcggtgatatctctgggcaatgtttctcacgaagagaaagttgccgtgcatgcttctcccctttatgaagggcacttgattgacagagataaaggatttcatg

SEQ ID NO: 52614 - DNA, 267 bp, Oryza sativa
ctagaatcagaagtagatataagctttttagattttatagctgacataatcagtgttatcaaatttaactcgtatgtttatttatacatcgtatgacactaatataccgatcaagcaaaaaataaatttatattaaaggtgagctgctgcaatcattatacttggtcatcactaacgacaagataatttgaccaccaacataattctatttagactacccgccagagagacattgcgcgatatgttaagaagcgagctgttgcaaaa

SEQ ID NO: 52615 - DNA, 417 bp, Oryza sativa
agcttcatgatcctggaattattattttttatacttctagaatgagagcagcaaaaatataggagaggtgtttcttccatgccggaaatggtatttgaagaattttgggaatttggcatggacctgaattgcttggtttctgccacttctcatgcagagacttgtactcctgaagaaaaaaccgcaacagcaaaacctttgcttcatggtttcaacatctcctcctacttttcgtttactgatttgtgttcaacaagcggcagattcgattcacatccatatatattatgctagagaaagtctcttatttttcatacacacgttttccaaactattaaatgatgtgttttttcagaaaattctatcggaaaaatgctcaacaaataatattaatctattgtctaagtctgaaataat

SEQ ID NO: 52616 - DNA, 413 bp, Oryza sativa
agcttaccattgaagccgaagaatgcgcatacagatgagctcacttcctgctccactgtgaagtggtaatccaaggacatctcctgcatccttgtcatcaagcactcatctgcattcactggtagaaacaaaagacagtatcaatatcattgtagttcaaagacaatgtcaacatcatatagttcaaagacaagatcaacatcatagctccatgagaaatacttgacaggtaacaactgtactatatacatcattaaaacaaagagacctggaaacagttctcagctaaccagactagtagcaaacattttactactgctacactgttgtgaagaaattgtgcaactgtggatgcctgcactgcactgtcctctgtagtaattatttatttgcttggttctttatttttggca

SEQ ID NO: 52617 - DNA, 381 bp, Oryza sativa
  unsure (1)..(381): unsure at all n locations
gcttagagttgctgtatgactgcatgcgacggacttgggattctgcattatttattatatcatcncagaatgatcacaaatatagggtgctgaaattcattcgatgaatcataaatattaggaccgcagtaattagacattnttcagctataatccccttcaattcccatttangagcagagtctaagcattaaggagtagtgcatgcgcgtgtttcaattgcagcttggcttctatcctcaaggtagcatagttcaactaagtaatgtgtaccagataaaggtaacggacagttaccttgatgcagagtaagatgatgtngcctaacgtatagatagcttgaggtggcatagatgcatgtattcttggatcatgtattct

SEQ ID NO: 52618 - DNA, 426 bp, Oryza sativa
  unsure (1)..(426): unsure at all n locations
agcttgaagaaagaccaagtggtaaacatttattcacagaatagaatgtaaacataatatgaaggattttaaagaaacgggtggaaaacttcgatgcccaaacaaaatcccttcaatttcaaatataagtccatttggattcagtacaagaattaaggtaggtggtacaaaatgacactactgtccaaaagtaattgtcataattaaggtggttggcaaattaacttaattgattaggcacatttataacaggaaacagaaagtaaaaaaagtcactaaggatgcaaataatatcacaagaattaattgattgaactttacaagtgataaaaacaataaataaaaaggaataaattaagtttttttaagggctgacttctttnttttttcatatagtccttgtccccaccatctgattgtaaagaa

SEQ ID NO: 52619 - DNA, 398 bp, Oryza sativa
  unsure (1)..(398): unsure at all n locations
tagctgctattggtcacatataggctcagggtactctgatagaaaattttgtgtcagatggccactcctttctgcaaactgcgtagtttggataacgtacatccaagttgcaaaattatggtattgtaacattaccattgtacaaagggtctgttaatgactttgtactagagctttgactctagactgttatgaactcatttgcttactatttcacaccttgtgtaaacgagctcgacaagatggactgtctatcaaatatatccatgcttctataacactgactccctaggttgctacttaaagaagttgatctgtacatgacatgcgctattcactgacatngataacgatatcattgcttttataacaaatgcaccttgccaaacttctacttt

SEQ ID NO: 52620 - DNA, 425 bp, Oryza sativa
agcttccaacgattaattttctccgtattaatcgacttgctgatccaggcttaaatcctgaatgtcccatcccatgcatgcacataaattaatcgcaattaaaccaaactcaaaaccattaagcgcgccatctcaaaaccactactaccacgggatcagaaaccctcagatctacgtatttcaccactccctattacgctagctagcacccgatcgaacgaacaaaaaccctaattattcccacagaattccaccaacttccttctcccaaaccctcccaaaactcaccaaaacacgagcacactcgcagatccaccatgtgcagccccagatccccgcaaaatcgccaccaagaagttcacaaaaccatcgtgcgctccagatctggaggcgcaggcgcgcgcaagaaaccctagctagctacg

SEQ ID NO: 52621 - DNA, 426 bp, Oryza sativa
  unsure (1)..(426): unsure at all n locations
agcttcanaataattgttctcttaaattacttatccaatctatgatctgatcgtaccggtgtattcgttgtaattaaatctttagaacaagatatcgtatgattatttttgataaaagaaagcatatgtttcagtcagttaatacatgttgtttcatatgtgactgcgacatgtttcaacgtgtatcttcaccatgtttcataaaatatttaaatgtttcagttgctattttttttttgtttcaccatatataacttaatgtttcacttgttggtcaattgtaacatttgaccgtctgtttttttagggacatcggacgtccgatgggtagattcctcctaaaagtaggacgacgctatatcagtacacaacacatacgctgaatgtggtcaaacctagcatgataaacaattcacgtgcaaaaag

SEQ ID NO: 52622 - DNA, 415 bp, Oryza sativa
  unsure (1)..(415): unsure at all n locations
agcttctgccgtttagcacatgtacgcttactaaccaattatatgtgcactatgtgtttgataaaatgcccaaatgcacttgcatcagttgtatgccagtttttgttgttcggaaagtttctgataaaatacctacattcactttccctgattttaggtctctgttgttggggcttgcatgatgaatcacaaggaaataccaagttaaattttgtattcacttatccacaggcacatggatttatctgttagcagttataggcagctttggccttgaaacgagttgctacaggaccctangacgtcattggatatatatacaatcttggacaaaggtagaacaattatttaattattcactataagatctgcatagaanattattggatncgagtggacacaaagatttttccta

SEQ ID NO: 52623 - DNA, 426 bp, Oryza sativa
  unsure (1)..(426): unsure at all n locations
ncaagcttgctgatacacagaaaatgatgtttttggcaaaatcatgtttgcacacatgtactaattaatgctatgttgacagagaactcacgtacggaaagtacaaataaaaaacaaaatttgagaatgaagagcataaaaggaaaaatccaattttaccatgataaaatgagagaatcgatcaactttagaaacaaataaagaattttttcccaaggatcagtcatatagctatgtgagacaggacatgtcaattttcattaacacgtttctcaaattgctaaacgatatattttgcgcaaaaacttgctttaaaaatatataatgaatctattttttaagtttataataattaaaattcaattaattatacaacatatcatatttagtaaagcctaaaccaattaattatgcaccacatcaatt

SEQ ID NO: 52624 - DNA, 454 bp, Oryza sativa
  unsure (1)..(454): unsure at all n locations
gagaaaaagttgagcagttcatttcaacgaccatagcaagtcatgatcccatataattagcaaaattgtggccccatggaacnagaatactaagcacactatttatgttttgaatttaaacagaggactgacctttntcagtnagtgaaggtaattctctgtgacattatgctcccttcatttctncaaatcaatcacattcaccccagacatncaagcacacgactgcngatcatatgtngctntacccagaaggtttcttatgtgtcccattctcagaccacanaacntgacagcaccattgacctttatctccatatcaatattccacaagaaagagagatcacgtngaacaaccacatcatcatccaacacaatcaccttctttaaatcttntaatatntctgggatgaagaaatgtgagtgactgaacactgataaatattccattctg

SEQ ID NO: 52625 - DNA, 424 bp, Oryza sativa
agcttgtaggcattaatatttcagtttattatttaagtggtcaaaatctatacaatttgtcatttttactgtataatacgcattatcaaatgaaacggttggtcatttagtatctaacatgacctttttgtaagatctaacttgacctaatttgatgagtggatattgaaatgaatatatgtgttttttttatttggacagtcacaaggagatccttcgtcttgcacatatattcatataatattcatttatgttccaattcctaacttgtttttgtcctttcttccaaatgggacctagctaggtacaatcagaacgaaacctaataaaaataatttacaacatgcatgtccaagcatttaattaatttcatgagcttaaattaagtgccccgtaggaaatagaaggtgcaatatatatatat

SEQ ID NO: 52626 - DNA, 248 bp, Oryza sativa
ggaaagcatgagacagacaggaaaaccgcaccggcagaacccgccgggatcggagacaggagcgaaaactcaaatgcaagcggcgaacaagaggacgaacattaaccagaatgcacgacacggcgaacccacccctacagtgagagacccaatgcaaaaccgcgcttcacagttacggcgccaaagcataagcgctggacacccgaaactccccctctcgaccaacgcagaaagagaaccccacagga

SEQ ID NO: 52627 - DNA, 402 bp, Oryza sativa
  unsure (1)..(402): unsure at all n locations
agcttgtcattccacacgggcacaaccttactgttcatgatgacgaagttgccggtgtcgatgtacgagtctccaagagaaaacatcgaggtgaaaaactgcgaggtagagctcacacgagagagacagaagaggaaggcaatggggaatacaagtttgagctccatgatgctctctctgcctgctagaaatgtgaaagaaaaacaaagacacagcacaagtagagaggaccttctagctatttataaccgtaagacatgacagatgaaaaataacccattgtttaatacttaaattagtacttcctccattccataatataaggcacaactactttnttttatgttccataatataaggcatgtatacatgcacacaattaattaggacctcttctccatt

SEQ ID NO: 52628 - DNA, 401 bp, Oryza sativa
  unsure (1)..(401): unsure at all n locations
agcttctcttactgaagggtggtatatttattgaacaagaatgagtacaaccacagtactcagctggccacaccggcagatgcatgattaattcatagggtacaaggggttaataatataggggttaagttttgcagaaaaccgcatttaaaagttacttaattgcccaaagccattttataaagacgatcctagagctacacagtattattaatcaaggccgggaaccctcacgaacctgccttaacccaaggcctacgatgattcagaccgaactggcaacccgaccctgggtcccagctcgttccaagccaacccaggccaaccattccacattntagtttgtaagccaaatttaagaaataaaacactaacttgggtacattgctcggcttgcccat

SEQ ID NO: 52629 - DNA, 418 bp, Oryza sativa
  unsure (1)..(418): unsure at all n locations
agcttcctgttaacatattcaccacttttctcatggagggccggcttgctgggttccactgaacacaccatagcgccacaatggccagctttctcaacttttctttctcttcctgtgtcatatccttggcaaattctgactcttgcgcactgactattgtctcatatatccactctggaacaaaaacctcattttggctgttgatacttggatctgagttcctctttccgctcaacatttccaacactagcatgccaaaactgaaaacatctgacttgtaagataccgcgccaaagttcctagaatatagttccggtgcaatgtaacccatagtgcctcttgctgcagtcaatgtgacaatgctntgatcccttgcgcagagctttgcaaggccaaagtccgaaatctttggctgaac

SEQ ID NO: 52630 - DNA, 152 bp, Oryza sativa
agttctatgtaaatatataaccttaaatatatcaacgaaatgataagtctgcattagcatgatacatgacattgtttgaaagattcttatctataacttatacatttaaaattatattgggtaagattgtgacaactccatctcaaacagat

SEQ ID NO: 52631 - DNA, 408 bp, Oryza sativa
agcttcctgatcctaaacggtgtgattttttttatataaaaaatggcgctttatatttattttttaattctataatagttaatttatttatttgtacactcaaatatgatcaccaaatgattcagccatttattgggagagaacggaggtagcaacataccgcctctgcctccgtgtcttttgctttagagaagagctatgattacaagctgatacgcgacccacctaggatggcaagaatgcgtgtggctgtggcctgtgtgcagtggtgcgcccagcgacctggtgcgtgcatcacgcactcgcgcgacaggagtctcattgacgagtaaagtaatctaatcatgtattacctccgttttcaaaattattatcgttctaggctatttgccaaaattaaaggtttac

SEQ ID NO: 52632 - DNA, 195 bp, Oryza sativa
gataaacctcaaagccactatacaaataagggcccgggtacgagagtataagactcctagaagcacggagccgggagccaacgtacaaaaaacttcacctaaggcgtgctttctagggccattccagctaacctttaaaggaacctccgattctgaaaaaaagtgccagcaacacaaacaggcccaagcttttct

SEQ ID NO: 52633 - DNA, 391 bp, Oryza sativa
  unsure (1)..(391): unsure at all n locations
aaccgacatatattttatttattttattgccccctacaaataaaagaggatatttctaaagtggggcggtgtaacacaacactatgnttaatcacaatattgacagtggacatcaccattgaaatctgcaaggaatgtcatggactttgagaatagtccaaagtcgaaacttgaagtataatattttgatctggaatacataaattttcatggacactgatgattccatagcccctctgtaacacacgaattcaagagatataatcctaatcccggttaaagaaaatacttatactgtagacaaaaacaagagtacgacttcacttcggggccaacaacatacacatagtcattttgtgcagcaattaacacatataggttgccgtcaatt

SEQ ID NO: 52634 - DNA, 307 bp, Oryza sativa
  unsure (1)..(307): unsure at all n locations
ggcatgcactggatagcgggacgattttttttcttgagacaaaatgaaacaaagtcagaccactttcaatagctcccggcgccggttaacgttacccaccacgcgaacccctacgcggggacgcggagactcgtatatcaaggctatttcgtccacctagtatccgtccgatcacccggatctgaactcctctcgagagccgatgcctcgccagcctggaaggagcggcactancgacacgaacaccttgacagagctcgggatagcgggaccacacagctcacggggtacgtagaacagcgccccg

SEQ ID NO: 52635 - DNA, 446 bp, Oryza sativa
agcttgcagtgtgctgcagcagctctcttctgtttaatagccacaccaccatggcgcacgtcaacaccatcattctatcaaggagaacaaaatacaacaacattcatgggtaatacaggtatgaaatcaaaaagaaataagctagaagagtgaagtaccatgtccaagggatacatcttcatacacttcttcttaaatttcttctctctctcccatggttcaaactcatttccagtaacctcctcaaaaagacggacaaattccttgatagcatcattgaaacgactaccaaaatcttcaacccgttcctctgccatctggtcatgtccaataggacccttcttgtagtataggtgcaaatggttctcaggcaccatgatcagctgcataatgcataacctgcaaagagacgtcttaagttgctaaatccagatacacttgactgc

SEQ ID NO: 52636 - DNA, 420 bp, Oryza sativa
acccgcaagcatgcaagcctggaagactccttctcaacaccttgtttttttgttttagagcatccttcccaagcgcctgcttaactctgaccacgcccaccttctctcgaagctctactggcatcattgacggaaagagggacgagaattgatcctcgtcgccagagggaacaccatcgaggcaaaagtcttcatcactagagatttgtacgatgtcctaggtattggcggaaagagggcagggcaacattgtcctatagacacaactaaatatcctaagttcacctatgtcttggtttactacagtgaaggtatgaaacacatatggagaccaatggtcgaatggcgatcaacaaacacatattttaggcacaatatacgtggaaatttaggcatggatggtaaatggagatttggtac

SEQ ID NO: 52637 - DNA, 424 bp, Oryza sativa
gaggcatgcaagcttgtgagcgccgggcctctggcggaggtgtttgtcttcctctcgggaaaagccgtggtgccgaaacccagcgacaactggacggtggtttttgccgtattttttggggcgggccttctgttttcatgcaacgttttgttgctggagatccttcgcctcttccaggtggagcttccctagctgagcctgtcggcacttgtccgagtcgccatcttctactgggcgtgccggaccgccgggttcgaaccgagcactgagctttacgacgacgtggtctatgccaccgtgaactttaagacggttgtcaccccggccaggacgaagaaaacggcgttcggaacgtgaactataatgttcgctctgagcgctccgatctacagccggtgaacgccgccatgtcgaattgggatcg

SEQ ID NO: 52638 - DNA, 280 bp, Oryza sativa
cgcgagatgaactcttatgttgaagatgcccaagagctgtgggcgtattgggcatgtgctcgagcgcttcgactcttactccttccaagagttcgagcgatactccgcgttcctcttcgcccccagagaacatcacccttggagaagtagcccctagctctgctggggtcaatgcctcatcaccataaagaagcataaacgggctaaacttggttggtctgtgggggtcgtccaagggcccagagaaccatagcaattctctggccatttgactttcgct

SEQ ID NO: 52639 - DNA, 419 bp, Oryza sativa
  unsure (1)..(419): unsure at all n locations
tcagattatacgatttgttttcagcctaaggagaaagggaaaaaaacttagaaattttctactagttttctcttgttgtgttcattagatctcaaagattaacctaatttaaggaatacatgttgtaaatcctgctctggaaatgttaagtggttgggtgtaaagaagcatcttgttttgcatcgagtttatggccaaaaacaatcattgatgcttcctctaaggcggtgtatgttttcctctgttctccatttgatgtgttcttgatccattntcgtctcttgttttcttctgttcttttagatggcctccgattccttttgataagcacatgggtacatgttcttgtttccaacagtccatgccggtcgtggtagaccgacaaaataatccataaaaatatatcctttctctgaaat

SEQ ID NO: 52640 - DNA, 300 bp, Oryza sativa
acttaatgacgcgcgcacttgatgctatgcagttttttatctgcaatctgacatgctgaatgacaagtataacgtattgtgaaatgtttgtttttaacatgcaaaatttgggcttgcaattgcacgtttatatttgaagagcctcaagaagtctagggatttaattttggacagctgataacataagagggaatttaatgcctaatttagggtgcaaccaactataattctctaacttttaccgccttggatcgccagataaactttaccatctgtatgggctgtgagtctcttgtcaag

SEQ ID NO: 52641 - DNA, 409 bp, Oryza sativa
tagcttactaagatcatcattatttatacttattaccacatcgaagtaaaatctactgtaaccaagaccaacaacccattaagcaaaggagccaacttgataaaaaaaaacagggaaagaactcacattgctcccttccccggcaaggtattgccgcaaacgcagctctgatgcctccccgttcttgaacagagccggcgccgcgttggccaccaagacctccacgtcctttcttggcatagacctgatgaggtcacgccggtcgcgtgcgaatgcgatgaatgaggacaccgcggcctcatcgtcagacgacatgccgtattcggggtcgaggtcgagctcatcggccgaggaaggtgcgcgcgcgccgtatcccgccgccgagaggcggtcgaccatgcgtgaccac

SEQ ID NO: 52642 - DNA, 445 bp, Oryza sativa
agctttgaggaaggggtccatgaatggaggtgtgtctgctattgtcgatgagatcccatatttaacctcttttctttcggaccgtcgttacgagaaagaattccagatgcttagccgcatatataagacgcctggatttggttttgtaagcctctcactctcactctattgcttccatttttttagataatgaaaatggattacatcttcggcttccatggattatttgcattgagaatgagtttatttgcttctgtcataagacacagccataagtttgataaaaaaaaagtgaagataaaaataaatgagaatgagacataaagtgatggggcaaatccccaactcccatttattatttactagcgttattgactctattgcttccatggattcgctcttcagccttcaagagatatactacattctggacaaaatatgctgg

SEQ ID NO: 52643 - DNA, 447 bp, Oryza sativa
  unsure (1)..(447): unsure at all n locations
agcttcaatgtgttcaatctgttcactatatttttcttattcttcattgacagcttngtgaccatcgattggagctccgttaagatgctgaagccgttggctgccctgttaattgcatcgataagaggaggcaaatcttcagcatccattaagtttcgtgtcatcgtcacaatcagagataaaactgccgccagcatttgtctgtccacagattcggcacaaagtgttctcacaagcacctgcaacattatgtttatcttcagtatgacaagcgtaacgatccaacacatagactaattatcaccctatatatgatgctgataaaaataaagcaagtgtttcttttcttgcctcaaacagactatacctctggactcttaacctttaaggcttccttgaggctctggatatattcatcatcatcagtgtgatgaacacacagctgct

SEQ ID NO: 52644 - DNA, 440 bp, Oryza sativa
gctttgcaagccctgttactcactctcgtatttgtgtatgtttgtttatgatcttgcccatttctaacaaagccaacatttctagcctctgttttcttcttagatgctaactccactctgtttgtttgtttcttcttttttttttttttgcgggaaccctctgtttgtttttgtttcgctgatggagtgatattcaatgtagcactaccgtgtagagacctgttccagtgccatcttcaattatcttgcaatgaatgtgctaccaaatttaacaatcctacccaaacaaaataatctccttatatatgccagcaccatagttccttgtttcttctcacatgaaaagatcaccccagcctgcagcgatggacatcatattctcatttcttatgaaatactgataggaatcggagacatcgaaaattcaattcatggggtac

SEQ ID NO: 52645 - DNA, 445 bp, Oryza sativa
  unsure (1)..(445): unsure at all n locations
catgcagctgaangacacggatgagcatacatttgtcttcttatcagggaaaacgagagcagttccatttttacctcttgtcgacaagtcaattagcggacgagaataaaataatataatgtgttgatagacaccataacagaatgctctgatgatactccctcaacaaaaaaaaagagactttcagacacatgcacgaaaaagattctaaaaaatttaacagaaaatatctcaatgaacaactggacattatacatgcatctataattgccataaaaggtgctgtccaaatatcgcaagtaaccaataataaacatgttgcaataaatagattagaacaggtgagttttggagaccaattcatactattagaaaatggatgtgtctcatgggtttacgatgaatcaaaccataaagattgacaattaccactatgataccgaac

SEQ ID NO: 52646 - DNA, 443 bp, Oryza sativa
acctttagacgaactgcggcatgcaagcttgtccaatgagggctcgaccaatcttttctttctgtcagtccgatatgccgggagaggcatgtgctcaaccgattgcatttcatgtggaagtctcccagcataatgaagacaatattggcattgacatgcatagccttcatattgaacaagctgaacaaacgggggttgcgatgccgagcacggtgcaacaagatggttcgagtgaagccgatgaaggggaagagataaatggtatagtggacgagattgagagggttgataggaatgctcgtgaggatgaagctaacttggctcacgaggaggatgatgaggcagatgacgaagagtacgaactccaacctgttatagcatcatggaaccgtgaagatcttggatatatccgacagaacgagtcgatgactcggttggttcat

SEQ ID NO: 52647 - DNA, 440 bp, Oryza sativa
caagcttgatgggccaacaaagcttcttttgttcttgttggggcgaactggacatggggaagccgctcttcttcgctggatgccacggcgaactggctatggcgaagtcattcttcttcgtcaggtactcacgcgacccttcgcctcgcctcatccttggttcatagccttcgccacggggttcggcaaatttggtcgaagggcctcatgccattcgccaacaagtatagttagcaactattgtatgaattggctattagattgtctataaatgaattggagccaatagtggggctatactattaaacctgctcttagattaaacaagaatctattggtgtcaggtgacaccacacctaacacagttgatccgcccctcaccacaagtatgctttgctcccgtcattaacgatggctcatcatcctcctctattctcatg

SEQ ID NO: 52648 - DNA, 366 bp, Oryza sativa
acttatgacgttaactacacacaatctaaggtttctcattactttctgagtggtcttgacatgtctatttgggagatgaaagttacatcacatcaggagtctgttgatatgtctactttgactctggattcgctttacacaaaactcaaaacatatgagatgaatattctttctcgtaagctgatcctaagtctagtgctttggtttcttcctcgacttctttcgttgctggagcttcatcgtcgaatactaccggtcttgctttaattatgccatgtgcgatgagcatctcgaatagttcgaggacgaggatttggctttggctgctaataagatgtctcgagctatcaacaatgtcatgtacat

SEQ ID NO: 52649 - DNA, 422 bp, Oryza sativa
cgctttcaagtatagctcatttttatcttcttgtgcatatggaatattgtatatgtttgtaagacgtggatatgtatatcaacaattgttgtctgtataccctgactggtcctggataggggttttaatgcacattcagcttagaaattctggttcgtcaatttctgggcatgacatcatgagatatacgaatacagtaggatacatgtaaaataaggaaaccagtgaattcgtgtgggaaatatccttcacgagtaggaccgcatcaatatcctactctgagaagggaaggactgtattgtatcatatggggttcgatgtctccaagttctacttggtgaccaagatgatcctcggtacaaatacataccccctgaggggtacagggcatcggatactgagtgcaaaacacccgtcaccac

SEQ ID NO: 52650 - DNA, 436 bp, Oryza sativa
  unsure (1)..(436): unsure at all n locations
ctgcaagctaattcttgagtattatgtctcttttgtaaaattcctatacgattacaatcatatgaaattcctgcataaaattatttgatccaaagggcccctgaacacgcggagtataaaaaggctacctatgacaatacggtgaatcgcaagcgaagcatggctatgatagaccgtgtggtgatgaagggcaagcaagggacttggcgtcgacaaaccgaatccggtggataatgacaagtgaagacattgtcgtacgggccgtaggagaccatttgaagctatggattatgtgtatcaatcagatcgtcgaaaatggactccggagtaagaaattacaccatttttttcttggttgctgtcaagtggccatgagacttcgagtactcaagaaagctttcctgangctttgggccgggacttgagactccggcct

SEQ ID NO: 52651 - DNA, 420 bp, Oryza sativa
  unsure (1)..(420): unsure at all n locations
agcctgcatcaacgatgaatttaaatttactttattagagagagaataatttggattcattagccatttcatctaaaagtttaagctgaccgagaaagtctggtaaatatccactcgtatntcaacaaattatttaaacaaagtctctatttgaaaaacatcaacattcaaaaaggggaaaaataattattgaagtctctacgcgctaggtcgctgtcttgttaatcgatcgaattgaataacgtatcaacaaatttcttcgactcaggcaagcaccaagcagatatcaacccaaatcgatcgcatgtcgtcacacacaatctcctttcaccatcttcacgtcattcaggacaggataccacaccgtgcgtatcacgcatttgatatgcgagtgcgctaatatacactcccagtccgatc

SEQ ID NO: 52652 - DNA, 442 bp, Oryza sativa
gagcagcagctaatcgtgcccatgcgtaggcgtatgttattatactttgcggagcatgagtggatgacagagcgagctcaagctccaagtgttgaagaatcatacacaacgccatcttggtctcaagcattgcgatattttggccaatacagattcttgggccccaactaaatggtaggaacgcgcctcgtatcctttggatgccatgggaaattctctcactgaacctctctggattaaacttgtgcacatcacttccccatatgtctgggtcactgtggatgatcagcaaggggagcttgatgatcacgccagcggggtaagtgactccttcaatctcaatctgcttatatgtttgccgagtcaaggtcacggtcggtggatacatccgaagaacctcgctgaggatcattgtcacctgccccatatacgtacagatcaa

SEQ ID NO: 52653 - DNA, 211 bp, Oryza sativa
gctagacgcatgcgacaccggcgaactcgtccccaccaaacaaacccatccatgtacccagcccgcgccgtcccgctagcagccctgcgcggccgtcactatgccgcgcacacaaactcgtgacgcggagccgcacacccgtctcatcacccaccgccgcacggaccagcaacactgggctcaccaccttgcgcgccgcaccaacggcgac

SEQ ID NO: 52654 - DNA, 406 bp, Oryza sativa
agcttccagaaagccaagcaagtcggagactattttacgatatggctctttggccactgacagtgtttggtgggccccggaacacgtcaactaaagattatctatctaccagtagctatctgcgtattaacaccctatttaaggaaggcttaagtgagtgatcaaatgcaaaagagcttgcttgctgccagcggcgaacaccgctctcaaccgttcgatcgatcatgatttgcatctgagccagttaaacctttcccgtgcttgctttcaaattctcactctcgaatcctagtgggcttaccatctcgttttggattgaaagttgagtactacggctccatccgttggaataagccattaggcatatttgccaaccaataggaatctatgaatatcctatatatat

SEQ ID NO: 52655 - DNA, 426 bp, Oryza sativa
  unsure (1)..(426): unsure at all n locations
agcntggtgaatcagaagtatacatttttatgttcttatctgcnttaagaactatgcagagtgaatcgccaatatttccatggttaatgaacagaaataactctcgtatgcatatatagtggaggatatattaacaaaaatcctaatgtcctcacaggaaatttatttccatttatctgggtaaagcaaataagtagatatattatatcggcaaaaaaagtttcaaaactgaaacttttctcattatgttaatacaaaatcgcatgttctcccctcacaacaacaaaaaaaaaatcgcatgttccgccatcatgtcattaaaatctagtaagtatgagtgatgtcatggagaaatatatattggtagatttcaaccacctaaaattgcgcaatactaccctatatttgcagctacataatgtattt

SEQ ID NO: 52656 - DNA, 411 bp, Oryza sativa
agcttaacatagaaacgcgaagattttttattccaagaagtgtcgacgagagtaccgtcttcgcgcttgagtcgataagaacctggccgggttacttcagagatgataaacggcccctcccataaaggagataacctgtgccgaactcgtggagtttgaactttccgcaaaaccaagtccgccacctaaaaggcccgggatcgaacattgcgattatgataacgccgcaacccttgtaagtatctagccgaccgtatcaaagtttggtcaggccgtcgttatgacttcacgaagtttttaacatgcattcagcaagtggcctaattgtcaacctatatgatgcgacatctcagcagcaattaagtggcctcattctcccaccacgaaagatatgatctggagcagtctttg

SEQ ID NO: 52657 - DNA, 406 bp, Oryza sativa
  unsure (1)..(406): unsure at all n locations
agcttgatgtcaacgcgttcgagtaccttcttgataagtactcccatgagaagatcagcatccgccatgctgtaagcggtggcggtgaacggcgcgccactcaatggctcggctaaaactacgaggtaaggttgctgtctgctgatgtacactggtgtgaggtcgctcagcggaagaaactgcaagaaactcgatgattattccacaacgacggcattcattttgagatgttgtgtacatcagcatgggttgtgagtatgtgacatatacggatgatgcaattgcttggaattttgatggcaagaatgcgatntatactttgatgatatagctgggcagctggctggctatgtacatgggtacgttgtcattgatggatctccattcttgtgatctcacctatctt

SEQ ID NO: 52658 - DNA, 397 bp, Oryza sativa
  unsure (1)..(397): unsure at all n locations
gcttcattggattagcagctttgggtaagtctggattgacgacaatacgcccgacatatctgctgtgctcctatgatggctctagaatagagcgggataatctcgcatcctcataagtaattctgggctggaaggttgataccctatgcatatgccctttcaacagtttgatattgatcgcttataaggaatatatttactgtctactacagagcatgctggtaaatcatgatgacaaaacatattgcattgctctctatatgctacatgttatcgtggcgttgtacgcatatgtggccttatcttaacaaacactatcttacctggnggtaaccatcataagctacccatatattattgtgtaactacttatcgagtatatatacttgccaccact

SEQ ID NO: 52659 - DNA, 116 bp, Oryza sativa
ataattttaaaaaaaaaatttttttaaaaaggaaaaaaaagaaaaaaagaagaaaaaaaaaaaaaaaacgcaaagaagaaaaaaataaaaagagaaaaaaggagacaagaggaaga

SEQ ID NO: 52660 - DNA, 443 bp, Oryza sativa
  unsure (1)..(443): unsure at all n locations
gaacttaaanaccgcagccgcaactatggatggctgaatagcttatactattttcttttgaaccangtagaatatataaaggggttacctaatttgcatgcatgcggggctggaactttgtgttcctttccaacaaaggttgcagccgacaccactttttcaatataatagcatctgtgtggctgcacctaaacttcccttgcctgcaaacaaagatcttttgttggtttgagccaaccgcagagaaaatcttctgacacaaaaaaagacaaagtaataatgtacacaagacacattttaagagacatgctgtctgcaagcatcttattttacactctatgataaatcttacacaataacaagaaatcaccgaccttcnatttgaaactcttcatttcaagataatcatgagccttcaacttgattcctaaaacctttatctc

SEQ ID NO: 52661 - DNA, 351 bp, Oryza sativa
tcctgctggcctaatgggccgctctaaccggccccacttttacatgctcccttccggctcatcaaacccacgtatgagaaatccgaattggagcatttttttagcgagtactctgataatgctacgcgcctgacgtacagtgcgaaacgaataattggacgtctcgcgcgacagttcgatccatgcacaggagctccagccatccatcatgcatggattaaacaaattttagactattatttctcttacaacatttatccaaaacatgatccgattacaccactaaattcattgctattaatactttaaaacaagcccacacatgaatataatcccgttagaaaaaatagc

SEQ ID NO: 52662 - DNA, 428 bp, Oryza sativa
gcaagcttgatagcgcgcacacaaacacatagttttttgtttgtctggcctataagcagttagatacaacaaagatccattcatacttctatactccttttgatcaacagcttcaccattttcatcaggattcaacacagctgtagaaccaattggtgttgaaattggctagcaattctccatcttgaaccgtcgcataagatcttagtatacttcagttgatgcacaaaagtaccttgaggtgtttgcttaatttgctattccaaaaagtacgataactcacccatcatgctcatctcaaattccctgcgcatagtctcaagcaaatctacaaccacagcgtgagtcgaacaaccaaagataatatcatccacataaatctgaacgaaaagctgattatcaccatgcttaagaacaaaaagcggttt

SEQ ID NO: 52663 - DNA, 413 bp, Oryza sativa
  unsure (1)..(413): unsure at all n locations
tgccagctttangagaatgcaacgcttaagaaggatatgttttgttctcnangacgtggtaccggaagagctcaacttttctacgctgagctcgacgaggaagaggcccgtggtgaaaacacccaaggtcacaaatccaggtggaggctcttgttgatgggacttaaggggacaacgatggcagaagaattcaatgacatggagcacgagtaaaatgcggagtgtcaagatatctacaaaggcaagtttaagtggaggcaccctcgtgaggtggcggctaagacagaactcaagctcaaggtcacttgcactgatctcatggaagagggagattgtcgatcttgaggagacgattgcgatgactaatcatatctagacgtagcttggctttctcagggacactcanggacgcg

SEQ ID NO: 52664 - DNA, 395 bp, Oryza sativa
agcttggagctcaagtgtgcatattctccttataatattattagtgtggaatgaacatcatcggcgtcgttctgagatttggcagatcgtattaccactgcctaccatcgctggtttggaatcaagcttttgccatagatattgatgcatcgtctcacgggtttgctacaagacgagcagaagggcggcagcacccgttcatctcccgcacaccgcgccgtatcgatcgtctccgcactatatagatggccgcgcggcgcctgttcatctcccgcatgggacgaactaacgacgtcgggccacaggatataccggtttacggggaaatgagggagggttgctttgagattattactggacacgtgtcatgtggaggcgcgaagtcctttggaatg

SEQ ID NO: 52665 - DNA, 442 bp, Oryza sativa
  unsure (1)..(442): unsure at all n locations
agcttcntaaaataaaagattgccctaatcttgctttttctttacaaccacttcaacagcagcttcagtaatgtattatcacgaactgtcctcaattacaggaatggattgagtggcaacagtctctaatagacaaggaagataaggtaagagctttttttttttatctgtgctttctttgtgccttttgatttttggtttcttcactgaaattgatgtattttatcctcagcagcaaccacaatttgataatgcaagttatgatcaagaggctcttggtgcactgagcgacaatagtgaggatgatgttgaagttttcaatgaagatgaagatgacgcattctatgatgaaatgctagaagttgggcagtcaagcgggacagtcattaatgacgatgatggaagtaacgatgctcgttgaagtatgagagccatatttttg

SEQ ID NO: 52666 - DNA, 165 bp, Oryza sativa
acatggtatttgctgctgcatggccttgggtaggatgcccctaccttgttctatatgttgcgggcgaagatctctttgctggatactcttgtgttctttgtattcacactaattctgagcatttccatgatatttggttgccctgactttacttggcaccttggt

SEQ ID NO: 52667 - DNA, 384 bp, Oryza sativa
ttctcatctcataagaggcggtgtcgttggatcctatatggcatttgagatgaattctaggcttatccggcgcaaaatggcttcgggtaagtctctgaagaatgctaatgttgtcaaaggccagcggacattggaagaacacaggtaaactaaactaaatttgtccatgcatgttctgtttaattcaacctctgtatgtccacctaaatgagttcatggctagtaggacatatgattgttcatgttctccctagtaattgacaaatgtaaatgaattgattcttgcgaaatttaaacaggaagcttgtgaaattagtcgaacagtttggactacagaagtggtctcacattgctccaattcttcctggaagagttggcatacag

SEQ ID NO: 52668 - DNA, 207 bp, Oryza sativa
gaatctacccccaacgcgatatcacacaaaaccctcaaagcacaacaaggaagcccacacaaagcacaggagaaaggaaccaaaacaattcatccaacacatatgccgcgcaagcataacacaaaaggcccacataacacaccgaagaaagaatcaaaaatcacatatgcctcacaatatcatagaaacaatcaccactgccggagc

SEQ ID NO: 52669 - DNA, 304 bp, Oryza sativa
atcataacggtattttttttttttgagtctaaagcccggccggattgtctatacattgtcgtcccacggtgggtttagctgataacatgtctgtcatacggtgttttgctacaacatggtcacgtggacattaaactttttcttatttgttaagagttcttggactacatgtcacacatccccttctgcgttcagagacatattaaggtggactcttaaaaaggcatacagttagagctcatggagatttactgtatattctgagggcaacctgtcttcaccattcttagtatgatattggact

SEQ ID NO: 52670 - DNA, 262 bp, Oryza sativa
ggggtttttttttactccatatggtggtacgccgtttcgcggaaccgtggcccgcttatgatcgcaccaaccctgggcgccgccgtgacatcttagtgacagtatctgatttgcctctcgcttttccttttagctactccgcttatggcctatttgttaaaatccccgcctgccatgcgttgtgattatactttgcgctgacctccacgctgtaactatgcgcgtagactgcgctggtatttgcctgggacgggaaagtgct

SEQ ID NO: 52671 - DNA, 472 bp, Oryza sativa
  unsure (1)..(472): unsure at all n locations
cttagagngacctgcggcatgctagcttggccatagtgccaaagactattttctgttttcttctcggccaggcccacgtcgcacaggtggaagaggaatagccggctctgctcctggctcacgcaagcatcgagctacctccagcggcaccggccgcagcggctttcctccaccttgatgagccgaaggtactcgtctccctttgcaacagttccagcaacgacaaggctgatgagtggaccttgacaccggcgccacccatcacatgaccagccgacaggagttcttcaccgagttcgactccggcgtccgaggcttcgtcaagttcggggacgcctccggcgtggagatcaaaggtgatggctccgtcaccttcatccgctagtccggtgagcacaggctgctcaccggaatctattacatccacgcattgatgaatgctatcatcagtgcggtacagctggatgagaac

SEQ ID NO: 52672 - DNA, 440 bp, Oryza sativa
ctgagcatgcactagatcctagctcgagctggaatgaacttttgtcagctcgagccgagcctggactaaccttccagcttgcaaacaagctcgggctctgatcggacaaaccttgagcctaaacgagctcggatcaacacaacacaagcatgtgctcctatgtcagaaagtggagaaactgacagaaagccgtagctgggcatgaagaggagagatacggccatacgggagcactagtgtactcgactactagtactaacacaagagtaaactgcttcgctttgggagaagcgtacaagaaatgattgcttctgtactcacatagaccaatgctggagaagtggcacaccaaggaaaagcacaatgaactttattggagaccaacgtaaacatgaacatgacagtactaactagactcgagtcttaccgactattcgagc

SEQ ID NO: 52673 - DNA, 440 bp, Oryza sativa
gagcttattatgccaagttcgcagaacagtgttattttgttacacagatatattactaaacatgatgggcattattgcatatacacactatatctgaaagaaataatcccatttgttcggtttatttccttgccaaaccaagagtagtccaaatttgggaatgccaacttctatggcatttgctaccttcttgtgagcttagagcccacaattttttttgtcttgcaagttcgtctttcctttcaaggatgtatgccgtaactataacagaagcatacaagatactaccaaagtctatataatccatttgcctgaaagagaattatgtttacagatcatatatataattagataaaagaaaacagaacgtgataaatgaaactcacagtgtacaagatttttatcaggaatcctgttgatcttctctctatatgccagat

SEQ ID NO: 52674 - DNA, 440 bp, Oryza sativa
  unsure (1)..(440): unsure at all n locations
gctttttatgtggtggaggatccaatcctttgtacatgacaggaccatgaatatttgataagtcacctaatcaaatccaatttatgtatatttttcatagttagtgcctcaaacttccatatatgcctatataccaatctatactggtagctgactcaaatgtccaattgtcatgcacatatatatgatctcaaaatatttgtccaacaggcacaaacaagtggagggaaaggcaaatatttttgtcatatcatctggaagccttcgaactttacaaaagggtcagacagagaggccaaacctcctgttttgtagtcaattactactgctgcattattcttcatttctctgtacatttgactgtgacactcctcatacgaataatctctctcgctctgatcttacacacactctctctctctctctaatntatttgtcat

SEQ ID NO: 52675 - DNA, 73 bp, Oryza sativa
tcgctacggtatagcaccctgcgcctgcgtttatttgccatgggaaacggggcaagatgtgtcatttgccagt

SEQ ID NO: 52676 - DNA, 434 bp, Oryza sativa
agcttggccttctctatcatgaacaatctttctattgccaggattgtggctaatctctgcttggccttctccagcatgaatcggagttgttcaaggtatacagctggagtgatggcatcggctagctcatctgagagtagagcttggatatctgcaaaccttgcgctgatagaaccacagttagtcaccaagttgtctaatgatgcctctagccgatgggagatatcctcaagagtttttttcacatcatcggacaagggagctagagctttgctagtggtatcagtttctgtttcttcatcaagatagtctttgatatcaaatgagaacagatcggctaatacctgtagaagagacaactgaagacgattatagatcagattgcatggtacagccgattgaacactctttgaaggtgatacttactgtgatgt

SEQ ID NO: 52677 - DNA, 344 bp, Oryza sativa
gcatgcaacttttgttaaaagaaagggaaatctttttatttttaggggctaaactgttatagttgaacaggttaagccatgcctatataattaaaaaaaattattggtgaagtaaatcatgttgaccttgatggactcacaatgctttactaatttggtggtccaacacttgtttgaaaaaatgacacccctttaagctcaacacccctatatttgggataaggagatatataactctacattactatacctctcatcattggacagttaaacaaatccagctttggaagcattatcttgctggataacatatgtttgaactctatgcaagccagcaggccaat

SEQ ID NO: 52678 - DNA, 445 bp, Oryza sativa
agcttttcctgttcagcccaatggctgaacaagcatatgctcacagcctctctccgagtgttagcggtgacgacggggagccgaacccacgccgtcgagctcgtactccaccgccccttccacgccaaagtcctatgcgggaggaggcgctcgagagggtcgaaggatccgcgacttcgacatccacgggtgctggagaagggcggcgagatggggagcgtcgcctcctcgtctacggcgacggcagcacgccccagggcgcgctccaagctgcgggcgcgctcctacgtcacccgcccattgtccctggcccggagtctccagcccaacgttggctggacgacgtggccaacttggtcatgacggcacagcagcgcctatgtgctggtgggcggtcctccgccaccaagacctctggcgctgctaccacccgctccgtgtcgtc

SEQ ID NO: 52679 - DNA, 112 bp, Oryza sativa
acaagggcaacacgaaacacaagaccgaaatacgagaaacagacactgcacggtcagaaaaagctcattaacaacagaaacacgaaccgaacaaaaccggaacgacgaaaac

SEQ ID NO: 52680 - DNA, 249 bp, Oryza sativa
ataagctggattattgaaccagacaaaacaacaagcgataaaaccatagacagataaagcgcctaaactataagacatgtaagcttctccagaccatacaaatgcacggcgagcccatgcgaagggtttggttaagatatgccaaattcctgccaatacacaaatgaaacccatccatacatgtcccccaattatatcttctaaatcatccacactaactatccaaccctctctcctaataggggattt

SEQ ID NO: 52681 - DNA, 431 bp, Oryza sativa
gctttgagaaggagcccatggcctaaagttctctcttgaagctgctgctgccctcactgagggtgtgagatcgacgcgaccgcttccgggtgagctgtatggatgacagcttgtcacgaacacaagcaaaccttgtgtgggccaccaccaaccgtgagatgctgccccggcaaaatgggcaagcccgtgagggcggagtcaaggtcgtttgattgggtttgttgtgacagcacagtgccagcgtgcacggtgcacacattagatgttcacaagtctgcaccttaatggtgcaagcctgttcgaagcagatgcagcaaagctccgtgtctgtcacctgtgccctaatgatctacacagccattcagtcattatgccaatgccgaaaagctaaattcacaatgtgttatgggatcccaattgcagataaactg

SEQ ID NO: 52682 - DNA, 196 bp, Oryza sativa
ggaactatagtttatcgtcatgatcaagcctgtcggcgtgattttttttttttgtgagacctagcgggtgagacaccctcacggattgtaccccacaataaagactggagattaaaatcccgtgggacacatctcgctaatctagagataaaatctatatcggatggcaatgcaaataacttgagttcgttacgga

SEQ ID NO: 52683 - DNA, 439 bp, Oryza sativa
  unsure (1)..(439): unsure at all n locations
gcttggtggaaaagaagctcgtctcgtctctttttgatattagtaacaagttaagaccttaacttggcttggctccgctcacgtaatggcttcttagcatggctacatgtcgacctcaaggatgactaagacggagaaatcagtttaacatataaaatgagctgtaaagcgaatattatctctcgtagttctcatcccaacacgttattagacaatatagcatatccattaaagttacaactttcacaaaataaacaactagaaaatgtacaaaatttaatacagtatatgatcctattgcaccaaggcaaatgagcttgtgtacggcttacaagccatcttgagctctactccatttagaaacaaactntgaagagtattgggctcggctcgttngagccatgcgagcctgaaccaagcccgagctgagcttttcttt

SEQ ID NO: 52684 - DNA, 412 bp, Oryza sativa
  unsure (1)..(412): unsure at all n locations
agcttgcccgaggtacaccgaacacactcttatcggtgtttagntntatgcgggcggagcggagactctcaaaaggttccgctagatctgagagtaacatttcctggttgcgcgtctttacaaccaagtcatcgacataagcctcaacattacgtcctaattgggtacccaaagaaattcgagtagtacgttgaaaagtaggacctgcattctttaacccgaagggcattgtcgtataacaataggttcctatgggggtaatgaacgcagttttttcctcatcctccctagccatgcgaatctgatggtaaccagagtatgcatctagaaaacacanaaggtcgcaccccgcaggggagtcgacaatctgatctatgcgaggcanggggtaaggatccttatgacatgcctt

SEQ ID NO: 52685 - DNA, 167 bp, Oryza sativa
aaaaccacgcggcaagggaagcacccgacacggagaacacgcggggagcaccgcaacacagagagcgacacaagaggaacaaagagccgaagccaaaaacagcccgaaaaaaccacgggacaacgacaaaagcggaaaaaaccagcacacacacacagcacaaaaca

SEQ ID NO: 52686 - DNA, 440 bp, Oryza sativa
  unsure (1)..(440): unsure at all n locations
ctgagcacctgggctgcagcttatggcgttagtaccgttttttctgttttttctntgnctgtggagctggaaattataattgattctggtaaccattttcttcttcgtcttgtttggttcatgcattgtttggtacattcaggcccagcgacaaccaatcaaaccatgtttttttcagcagtgcatcttcattttcaggatcggattatacgtatagccatgcacacatcactgttcactgtattattgttttgtgcatgtgccatgatatgacatgagttcagaactaataaataccgtataaaatttagtatctcaaacaattaagtgcagctagatactaaggacaaagcttacttttgaggggcttggcagtcgtagcacatgctgaccagttcacaattcatatcagaaacgaaacaagctatggtgatagtatc

SEQ ID NO: 52687 - DNA, 410 bp, Oryza sativa
  unsure (1)..(410): unsure at all n locations
agcttcccanaaactctattcatcatcttttgctgtatgacattgaaaccgaatgtgttggagacctgctcttcctatcctcaggtgcataccagaaagcaggatggagtagtcaatgtgcgagaccgcagcacaatggaaatggcaaaaccctagattgcttgtcgcttctggcacgtcaagatggcctctcggtatttatagagatatcaggatacatgaccaagatgcctacatgatatccataacttggaaccaaaccagaaaggtcacgcataactgattcggattttccaccactctttgcagcagaacaaaactaaaaaaaaaagtctatgcatgcaactgaagccacatggccctggcccgagcttttttttttcattttctttcagatctagagctaaaaa

SEQ ID NO: 52688 - DNA, 392 bp, Oryza sativa
  unsure (1)..(392): unsure at all n locations
atagcagaccaacagtatgtgtggcgtggtctttggatgctaaccctggatcattgcacttgtctaagatagtttgcgagaatgcagatgcgttatgcatcaaggaacttctgtataacatatgatggttcaagatggccaatggtgtggatatattgggacaaggcctcatcatattcctgtttccatagagatggtcaccataccttcttagaacctcatcaggtgaagcatgatcggcctgatgactatgtacaagattgattgcnactgtatacagattcttctagacaacataatcagcttactcccatatctttcctccaatgcaagaaccttttatcgctcattatagataaaatatcccactcaaaaccagtgtgaaacatccc

SEQ ID NO: 52689 - DNA, 413 bp, Oryza sativa
agcttgactctcacactccaatactaactgtcccactatattccagagaccacactcgggttaacttccaagactacaccgccacaccgggaggaagcatcagatgaaacatcagcattcacacaatacaatgtgttcgtgcgttagcagcaacatttacaacatcgatcataatgtgcacttgtcagtatgtcaacgccattttaaaccgcgccggcgaccggcgtcggcgtcagtgccacgcgtggtgcctccgatcaccgtgctccacgccgccgcagccgacaccgatccggacgatgatctccctcggcgggagtagcgcaaccgccttgccaccgtggggccggtgcttgtgagcttgacccgtccctgtgttgacccgagcgccgctctgcctggcggccgcagag

SEQ ID NO: 52690 - DNA, 391 bp, Oryza sativa
agcttggcatacaatagatgctaccgcttttttctcttaccagacggagattgtgctgatggtctttctctgactgggagtatatcaaaatggtatatatgaaaaccatcacgaacttgtccaagtattccatgaacactttgatcattaaattcatgaagaaggcacgagcattgggtaaaccgaacgacattaccgtgaattaatacagcccgcataccgtggagaatgcggctttcggaatatcttcttccgaatacgtaatggggatattcggacgaagatcaatttggaaatacaggagacctttaactgatctaacgatcatcatccgagaagaggtattgttttgaggggactacttggagcttgagtcactgcggttcaaact

SEQ ID NO: 52691 - DNA, 332 bp, Oryza sativa
aatcatttctaacatttccttttacacaccaatttattatttaacgactttttttctaaaagagctcttatcacttatgattagatcattaatgatcaaatcattactgaacccgctctattgtatctattatagagtctgagcctctgacacaatccgcagaaacatttcacgacagattgaccttaatcattggagaatctatataaaattaaactcatccatgctttattttatgaaattttatttcccacatcttacttcacttgtaaattaaagaacatttcacacaaatcctattaataatttattaaataatttataaattctga

SEQ ID NO: 52692 - DNA, 351 bp, Oryza sativa
catgatttgccctggaccacccatgatacacttgggttcctgttatccaaaacaatcgatggactacgtgaggatccatgttacactaatcctactttttccatatgttacacaaaatgtatcccgacatggttaaatggctcaagaaagcaccactttcaaagaacaaacaacacgaacacgtataatataacagcatgagcgaaagatgatatcaactatttatgaagtacaattggacaaatgcagtgtatgtacattcggtaactaacgaaaattaacccatgtgctatgaagaatttctttagggtaaaaagaatcatgtaaaaaagtaatagaaaccaccttcct

SEQ ID NO: 52693 - DNA, 297 bp, Oryza sativa
  unsure (1)..(297): unsure at all n locations
tttatcctttagttcaacacacagncaacggaaacttacatggaagccgaatacatcttaactatgaggagaatcctcacactaagaaaaaaacagaggaaggactatgtaatgggtagtcatttggcatgctactccagtgtcccataagaaaaggaacggagtcaacataaaataatagcctcagagaaaaaaacaaataacctaactttgcacttccatgctagaggcaactaactcctatatataatccctctctggaggtcaaaataccgaacaagaaggggctctgtcaac

SEQ ID NO: 52694 - DNA, 380 bp, Oryza sativa
agcttgtaccatgatttgtgtgagaaatgatcgagatgtgctattggtttctgtctttttagtacatgttaggggatgcattctcgggtgtaccagtgtggtgttgcatgtatggtggtgtatgtacgtttattgcacaattgaaaaaaaaaagaaaaatcaaacatggattatatttcattagtgaaattaaattgtagctgggtgtgtttagttcacgctaaaattataagtttaattgaaattgtaatgatgtgactgaaaagctgaaagtttatgtatgtagaaaagttttgatgtgataaaaaagttaaaatcttgaagaaaaaatatgaactaaaccaggcctaggtactgccgcgttgagattgctcggatcc

SEQ ID NO: 52695 - DNA, 364 bp, Oryza sativa
  unsure (1)..(364): unsure at all n locations
tcgccaaagctcgaaagagtgtgacgctagtactgatccttttcatttatgtccggaagagngcgatgctagaactgatctcctatcaaatcgcatcgaatctttatcgatcctctaaaattggttaacggtttgcgatgcacttattctactcttctgtgtttatcaaaatctgagcgaattcataaaactcttaaatagagattacatctggtcaattaaagcggaattgaaaggaaaaattatgggacaaataatgagggagtccggtaaattaaagccgccttgtaaggacaaattatggtgaaaataattatacagtagtgaggaatcgatttttactatcaattgaaggagagaatgc

SEQ ID NO: 52696 - DNA, 402 bp, Oryza sativa
agcttggagtgtgtgtgtgtaaagagattatttaggttcttaaataggctggtatgatggttatagatatgcgaaatgtccaaaattccccgcaaccgccatcaagagagcatctggagcgtccatgccaaaccccaaaaccaatggtggagatcagggttcggggcttggcccaactagcccaggatttggcctgggcctcctcctcagcttcctttatacatttctctggtagttgggctcaatttctggtgtttcgatggagtttacgagcccaactcttatgtggatataattccccttaattttagtctagatttcctcctaactctggcgcgctattacctgcatctaaatatacaccaacactcgtgggatatgatataattaatccctaccact

SEQ ID NO: 52697 - DNA, 445 bp, Oryza sativa
  unsure (1)..(445): unsure at all n locations
agctggtccttcagagtatcaaaggacttcntctgtatttttccccaatggaagaccacccctttcttcgtcaaatcattcaatggtgcagcaaaagtactgaaatctttgacgaaacggcggtagaatccagcaagaccaagaaagctcctcacctgtgtgatggtttcgggaaccggccaactccttatggcttcaattttcgactcatccacctcaattccctgtggagtaacaacatatccaagaaaggagactcgttccgtgcaaaagatgcacttttcaagggtagcaaacaaacgtgcatcgcgtagagcattataaacagcacgtaaatgatccatgtgttcattcaaagacttgctgtaaatcaatatgtcatcaaagtacactaccacaaatcgtccaataaaaggccttaagacctcattcattaagcgcatga

SEQ ID NO: 52698 - DNA, 436 bp, Oryza sativa
  unsure (1)..(436): unsure at all n locations
atcctctttagacgctctgcaagcacgcaagcttattatgataacacccncacgggtaatttctaatgccgaagctgatgaattattgcctgaaaaaggatacactaattatattttccttatcagccaaacatgtataatgtaatactcttttgtgggtttcatgatcaatgattcaattgaacaattgacgcatatgaaaagatcaacaaaggactaaaaggttcgctagcatatggtattataccaatgacattattagcaccaccctttgctgcatttagagcaaaaccactcactatagcattacagatcaagaaccctttggtcctttgagaatgttgatatgaaatgacggttctcacgttgatctgcatataaccctgttttctgcctctctatgagactagatagaaaacatcattcttcatgacct

SEQ ID NO: 52699 - DNA, 270 bp, Oryza sativa
aaaacaagaagggctcctactcacgctgggtaagatgcgcacacaacatataccagcccggggaataaaaatggtcgtaagaaatctcgcagaacctatccctgagtcacgcacccgaggaatcaaccgaacaacggacgttctccaatgggttctacctgtaaagaaaaaccaaccttgtctcaggaccaatagaataccaaggcccaagcttgtacaacaatacatatacgaaaaaaggtggcctaaatagcctattcacaagctcaa

SEQ ID NO: 52700 - DNA, 429 bp, Oryza sativa
agcttgcacttagcaccaaaccgcactttcttccatattatatccaatgactgaacaacagtggtaaggcgaaggtaacaaaactggtgcacattaattttgcaattggaaattaccatgatgttgttgaatgtgatgttgtgcccatgcaagcatgtaatattctgctaggtagaccatggcaatttgatagggattctatgcatcatggtaggtccaaccagtactcttttctgtaccatgataagaaaattgtgttgcatcccatgtcttctgaagatattttgcgtgatgatgttgctaaggctgccaaatccacatgtgagagtgataaaaaagccccatctgatggcaagaaacctgagacaatcaatttgaaacccaaatgcttacttactactaaatctgatattaatgagttgattgcat

SEQ ID NO: 52701 - DNA, 437 bp, Oryza sativa
tttcgggcacagaaaattatgcagtaaatgggaaggacttttcgacgttatcgacacctcttcgcacggggcaatcacactccgtgacaaattagttaacatatttaaggtaaacggtcaacacctaaagaatttccttgagctaaatgaaactttagatgaagtggatgtcattgaattaatcgattatgaaccatgatgatcttatctaatgcatgcttaaaactctgtatagttgtcggatttgtgcttagaataggctttagtgggcctaagaaaaatttggtggcctgccggacccaccagggttcagccgaaccaataccagggcgcgcccggtcagccccattattgaacagaagtctcccccactcgccttgagtctgttagatgccagttcgaggtagatcagcttacctaacaagacccctgtcttc

SEQ ID NO: 52702 - DNA, 430 bp, Oryza sativa
  unsure (1)..(430): unsure at all n locations
agcttcaggatgctactctcagngaaatatattctttgtataatcattaagctgaattcgaccaactcaagtgtcaaacaagtccaatattgttccataattctacaggtaatgaaatgggtgttctcgcttcttgttaacacacagaacagtctggtttcggagtatctctaatagttgttccattttatatctcactactacaatgccatgataagtataaattctctgaccaaagtaaaatgtcacagcctattgacctgaaggttgatgaggaaacactaatgaagattgtgccattttggagaacatcccttgctcctcctggaacgccaagcacacaattttactttaggcattttgaagtacatcccattaaagtgctttaatctttctttatattttggccttgttctgggatatgactttt

SEQ ID NO: 52703 - DNA, 401 bp, Oryza sativa
  unsure (1)..(401): unsure at all n locations
ctgtggcgcttgttngagaattatattccacatggtcattatgatgcacatgtgatagcacataatggtcagtgcaagttctttcccagcggtgtttctctttctagctcttatctccatggactgtggtttaaattacagctttcattttgcggactctctagttgggctggtcaaggctacgatagatgatgaaactaatagcatccagttactgcaactgccataaagatatcatacattgcacaacaaagtgattattgtggaggggcatattcacaacaacaaattaccctagtgccatacatagcacactccataatatatcacaacccaatctatgcaatgcctaaaagaataattaaaaaagcagcggtgtgtttaaccattatcaatgttac

SEQ ID NO: 52704 - DNA, 426 bp, Oryza sativa
  unsure (1)..(426): unsure at all n locations
tagctgaacactangaatttatgttttattttacacaacaatactctatatatgtgttcgcttaaattcgatttccttacggcttctcaaacaaatcgaagcatatctttgtgtatgctcgtttcatagtcacaatagctaaatacgatttctcccccttcatttatttgccaggtccactagtttattttcatcatgtcatgtaaggtacccctactctactttctatgttgataatgaatcgcttgatgacaaatactatatttgttcttgcttcaactattcgtagtagacagcaaagtgtctagaggagatgagctgaaaagcaataggaaaagatgtcatgatattcaagagctgagaagaataggcatctaattttgtttccctagggttctcacaccaagcaattcttatctatgcttt

SEQ ID NO: 52705 - DNA, 433 bp, Oryza sativa
  unsure (1)..(433): unsure at all n locations
agcttcaggacgacgctttgtatgatatctgtncgctattggtgatcacgaagactcacctagtccggccgtcccggaggcaatccaccatcaaagttgatcatagtccaattcttatcgaattctgcttgcctctaaaaaatccaactcctactcgatcacgacaagggagcagtggattatagagcctcgatagaaatcgacaagaaaacaactcggatggatcaatggggtcagctcggtccctgggtacctgtacacccgcacggtaccacgtggccaagtagctgcacgacaatatgtcacacatggacataacgctatatcgtgaccaatggccacaaatacagcactgtacctacatgggtgtattccgacacaggtgcgtactatgtctggataataccaagtggtacatatggaagactgatgt

SEQ ID NO: 52706 - DNA, 147 bp, Oryza sativa
aacaaccggggaagggacaggacagcacagacagggaaagcacagcagggacggggcggccaaccccgacggagaaagaacaccagatgggaacacatcgacccacaacgggagagagaggccctcaggaaaagcagcgacccgggc

SEQ ID NO: 52707 - DNA, 392 bp, Oryza sativa
agctgtatcgacgagagtatacagccttatcaccagctactgcccctaaatgaccgcctcagtgataacaggagtgtgggaggtgcatacgacagctcaggaaggcttgtcctataagacaacccacctcttttatagagtgctgtaatagcctctactgatctgagccgcccttgcccttgaagatgaacggggctaagcgatctgccgaagctgtgggatgtcaaaatgcattggcaggggagcgttccgccttagagggaagcaaccgtcgaagcggcggccgacgaatcggaagcgagaatgtctgcttgagtaacgataacactggtgagaatccaatgccccgaatcgtaactagtcctattaataagatatgatcatgctccttt

SEQ ID NO: 52708 - DNA, 387 bp, Oryza sativa
  unsure (1)..(387): unsure at all n locations
acatctctggctctatcaagattatgatccatttaaagaataaacttatttgtgtattgtaaaattgagagaccattatcaactaaatgatgtaccactcctttgaatcngccttgatctttcggtctttgtattaaataggctaacatatttgcatacatggttgaacaaaataggtgacaaaggatcaccttgactcaaaccctaccttgtttgaaaataactcccaatctcatcatttactttgactgccacactcccaccctctacaattgagtcaatccaatcgcaccacttagaagagaaacctttcattcgcaacgactgttgcagaaacttccaatcacatttgtcatatgctttctcatagtttagtctttagaatca

SEQ ID NO: 52709 - DNA, 438 bp, Oryza sativa
  unsure (1)..(438): unsure at all n locations
agcttgtgcatttttcccacatggatattctagacgattagcagaagtctgatctatctgggtcaacgattccatgaccaaaatgaatactatgatcagatcggatgctaaacttgagcttcctgttttgtgtagctttgcagctgctgcggagctgactgctcagtcagtgtctttggacctcagcaaaagctttttgctggcctgacaacaagaatcgcacttgtgcatctcctggccattnttaatttctactggcgtcttccactagagtattttgctagcttttgcaaacaaacaaacaaacaattgtgaaccttaaaccaaactttcatatataacttcattgcacaagatcgagtatcgagttgtatatatcagtaccttatgcctattgatccgatgaactgacaaacccgtacctccaagtgattaaca

SEQ ID NO: 52710 - DNA, 436 bp, Oryza sativa
  unsure (1)..(436): unsure at all n locations
aagcttnttccaaaattggaagtatactgactacctcgagtatctttattttcttagggacgccacgcaagcacacaatcctggccatatacaattccgccaaccgacttccagaataagttgtctatactggaatgaaatgagccactctggtaagtctgtcgactattacccaaatagagtcatggcctgatgacgttctgggtagaccagtgatgaaatccataccgatttccttccatttccattcaggaatcttcaaaggctgcagcacaccggcgggtttctgatgttctgccttgactcgctgacaaacatcacatactgctacgtatactgcgatttcacgcttcatactatgccaccacaatctgtccttgagatcctcggacatcttggtactaccacggcgaatggaatataaagcatcatgagc

SEQ ID NO: 52711 - DNA, 369 bp, Oryza sativa
  unsure (1)..(369): unsure at all n locations
tgcaaactttatgactggtggcgcttcgggatttttatttcagtttgcatggggatgttctacaaaggaacaccttcttgcacactatctggaacatttatgtaacaaccatctggatattggtgttggaactgggttttaccttactcacgtacctgagagtagnctgatatctttaatggatttgaacgaagctagcctgaacgcggcatctacaagggctggggaatcaaagattaaacataaaattagccatgatgtttttgaaccttatcccgcggcgttacatggtcaatgtgatatcatttccatgtcttaccttcttcactgcctgcctggaaatatatctacaaaaagctgtgtattacg

SEQ ID NO: 52712 - DNA, 425 bp, Oryza sativa
  unsure (1)..(425): unsure at all n locations
agcttggatccaatggccaagaanattctttctcatatttctgtgttaataacaagagatttgctagatttaagggcatatgaaaatttgtaatttttcagtcacctaaaattacacattgctgagcttaaaattgtagtgttatgcaatggcaactttatttatttatagtttaaattattttcattctgagtttgaattctttttacatggaattttataaatgtgcggaattgtaaatctatttcattgtaggttagcgtaatttattgcttaaccttttatatatggaagaatgtatgttgctttgaataattaaaagtggaggtgatgagaaccatccaattgccaacatgggaagagaaacgcctaagaaaaatatttcagacctgtcatttagattatatgatcgcactcttgaaaat

SEQ ID NO: 52713 - DNA, 352 bp, Oryza sativa
  unsure (1)..(352): unsure at all n locations
acctgcagctgcaagcttataaatgaaaatctcaatttgtgaatttttctacggnntgtancaaaagttgaatggaacattttttgttttttggtatctctggtcgtgctattgggctgaaaagtcaagatggccagcaaaagaaaagaacagtcgtccaggccccatgggctatatatattgggccgaaatggaaaggaggtttgttgggctgaaaaatcgtacgagttttgggccaaaaagtggaaagagttttggcccccaaaaagaagatgatggattaccacacaataccattccgatgagatagtttgtgtaagctgacgtcatcctacatatatgnttccttctc

SEQ ID NO: 52714 - DNA, 335 bp, Oryza sativa
  unsure (1)..(335): unsure at all n locations
cgcttagcttcttgtagaaattaaaaagtctatctgaatatttctgctcctgtcatacaaaggcgtcagaagggaatcttttgggggccatactgacctgtacataaaccatgtttctcgggaacaacagcctttctggaagcttgccatatgacaaaagcccttcactgaacaatttgtatgtgtagcaacataacatntaagtgtagcacatggccacatgttactcctatatttttgactatttgtaccttggtttnttgaacttctgatggaaaccttgcagaaatatttcatataaccatctctctggaagccttccttcatgggttact

SEQ ID NO: 52715 - DNA, 274 bp, Oryza sativa
ccgctccacgaacatgagacctcatgccactacgcgccatgttccagaatgagaggagtactggcgctcccgagaaagggaagtctcacacacaaatcaaaatatgggacaagataagctcactctctcacacacccatggcagaaccaccaatggcgacaccgatgaagggcatgccctcggccctacctcaacggctggcccaccgtagcgcactagtctcactcaggggagaaccatcaatgcagggatactgccactgctcggctatcca

SEQ ID NO: 52716 - DNA, 399 bp, Oryza sativa
gctattgtttattacgaagactcacctagtccggccgtcccggaggcaatccaccatcatagttgatcatagtccaattcttatcgaattctgcttgcctctaaaaaatccaactcctactcgatcacgacaagggagcagcggattatagagcctcgatagaaatcgacaagaaaacaactcggatggatcaatggggtcagctcggtccctggttacctgtacacccgcacggtaccacgtggccaagtagctgcacgacaatatgtcacacatgtgcatatcgctatatcgtgaccaatgcgcacaaatacagcactgtacctacatgtgtctattcggacacatgtgctgtactatgattgtataatacaagttcgtacatatggaggaccgatg

SEQ ID NO: 52717 - DNA, 439 bp, Oryza sativa
  unsure (1)..(439): unsure at all n locations
taagtcacctgaggcatgcaagcttaatctgctcctgtttcagccttaagccggngagcctttcatgccagtacgccgtacgcgcacacatgagcggattactgcataattctcgcagatcacacggcgggtacagggttttcctgtacgcgtatgagtacgtgtcacgtgtgacaacttgtcccccttgcgagaattctctctcgagattattggcattttgcgaaggaaaattggatgctcataattatatatttgtttggtgatcagcgagatattagtggtggtcgttcacacgaagcggtcgatctattctaagcatcttgacttctgcataggcgagacgatgtgatgtgaacagcggcgaggggtttggagcatattaagctaagctcttcgttcgtgggccatcaatattgtgatttgtttggtcgcacta

SEQ ID NO: 52718 - DNA, 388 bp, Oryza sativa
  unsure (1)..(388): unsure at all n locations
gacaccacagaannactcaagcttgaccataagttactctcacatagctactcccttcatcttaaaataaaacaacccagaacgcgatgcgatccatcttaatacaatacgctaacccgggctacaaatataataattcaattaaagctatgaccatcgattacatctaaatagatactccctccatcctaaaataacctatcctataatatgctgtaatccatcctacaacaagaaaaccgaataagcccttgctgagatacattgtacactacgatggatctcaccatatattacgcagagatatcttatgatggagagggtagaccggagcgaacaaaagtcttatacttatatctaaagcacaaccaaccctaatacatgacat

SEQ ID NO: 52719 - DNA, 423 bp, Oryza sativa
  unsure (1)..(423): unsure at all n locations
agcttctcgagaaccggtgagtgttttttattgcagcnnaangcatggaagtcaggggccacacaccagtggtcatttagcaataaagtcttcagcttgctaaatgtaaggcaccattgcaagtcccttttgaaaataaactaaacaaaacacaggacaaaagatcaactaatgtcacacagaatgcaatgtacaactcaatcattcgcattctatatgagatcaaaatgctgtttgagatttagctcctttgtaaatgtccagcagtagacacagatagtaccaacagatgaacacaagaattaatggctctataacatatacaggagttaatgttaaaagcaagaatntaagcataccgttntgcattcagctgtcaatgccanattcttaacttctgataaaccattcagaagcacacag

SEQ ID NO: 52720 - DNA, 427 bp, Oryza sativa
aaactcaccttgggatgggcggagcttttggactctttctccgatttgttagcaacagcctatgtctctgtcacagcacccttgagaaggcaggcttcgagcatatctcatgtgctagctctggagatggaaattgtgaagctggaatagatattgggcaaaatgatttggttggcaatgaaactggaatggctattgctgaagagatgcatgtctgccgtgatcatgatgatgatgaagggacagattctggtgacaactttgatgaaaatgatggcttactttctttggaatcagattccacttgtgatgtagtggatattgactatgaattggtcataatcgctacctattctagttgcaatgcatctgaatcattcatcaacacatcagactctggaaatccttccttaatgtaagaattgac

SEQ ID NO: 52721 - DNA, 314 bp, Oryza sativa
  unsure (1)..(314): unsure at all n locations
tagcttgaatttatgtaatcgagcccttatctagccacagttaactactaagctgtctagcgatgatgcctctagccgatctgaaatactttctaaagtcttctttagatcatcaaatagaggggccagtgctttgcttggagaatcttcttctccttcgtacaaataatctctgatatcaaaagagaaaagatcgggtaagacctgcggtgataggatgaaagcagttagaggttaaacaattgtagccgatttggatgcctaataggagaaacttactgggatagcangagcggctggttgttcttcttcct

SEQ ID NO: 52722 - DNA, 424 bp, Oryza sativa
agcttatgcatattttgaaataagacatatcttgtgtatagcctaaataagattattacttgtgcatcagaaatgtgggcaccgtatattcagatagactgtcaaaatccagaacacactttctgagtgtgttactgtataaaaatgttggactgctcacagattagcatcatagtgatttttgtttgtgtgattagcatcatagtgatttttgtttatgtttctctaggccttttagaacaacctttgatgcaagaactggggatgtgcatacggttcatttgcataaaagttatgaattatactgacagctgatccaaaaagaaaagcatgtatcaagaagactcagtttacaagaagaagtacctgaattatattccaattctgattccatcgtccctgaataagcatcaacattttttgt

SEQ ID NO: 52723 - DNA, 349 bp, Oryza sativa
  unsure (1)..(349): unsure at all n locations
atctaaaactctaacatgatgagggttatcagcatgttcctgtacgcgacccggcatgctgatccggagtgtatgaacctggacacgattggggacgaacggtcggtgaaatttgtgaactgcacatcagaaggcttgtgttgctgtcaaccgaattaatcaagacgattgccatgaacaacatccacgatagtgagcttgcactntgcttaatggaggacggtctgggtcttaggggattcgcattttcacaaggatatgctgtgccatgatattcactacgccgcttgcttaggcaccaaaggatgggaaagtgaggaatatgctcggcaagaagcccataaccaat

SEQ ID NO: 52724 - DNA, 333 bp, Oryza sativa
agcttgctgattgctacttagagaagattacatttgattgattacacaggtgttcgatcgatccatcgaggtgttcgtctagctcgccggcggccaaattgtacggcggaggcggcgttcagaagcaccataactgcgagctgggccgcgccctcttggccggcggcggcggcggcgagaactccggcacggcgaacgcgtcgctgtcgctccagtggctgttccgcacgtgtccctgcttcgcctttacaggtgttgccgctggcgccgtcgactcggcgacgacgaccggcaccttttctaggcaccacgcccgcatgtgccggacgtgcg

SEQ ID NO: 52725 - DNA, 439 bp, Oryza sativa
  unsure (1)..(439): unsure at all n locations
agtcatctgcgngctgcaagcttcaggaagagatgggctccaagcttatcttcagttccgcttaaaatccttatacagatcgacaaactgaaagggtaaatcagattttgtaagacatgttgagagctcgtgctttagacttcggtggaagttgggataagaatctgccttacgcaaaattctcatacaacaacaggtatcaagctagccttcaaatggctccttatgaagcgctgtatggtcggaagtgccgcactccgcttttgtgggatcaaacgggagaacgtcaggttttcgggaccgatattttgagagaggcagaagaaaaggtaaagatcattcaggaaagaatgcgtatagcttagtcttgtcataagagttatgctgataatcgccgcaaggatctaagttctgaggaagaggatcatgtgtaccttcg

SEQ ID NO: 52726 - DNA, 360 bp, Oryza sativa
acccactctattagactactctctattagaggaagagtatatgaagagagtaagcggaagcttcgaacagagtgccccaaatgtcggagttctctccgcgagtatttgaggagtgacagaaacgactgcattcttccaggggagtttcagaggagtacccgaaaatgacggcactctcttcaattttgcatcttgatagatacttatcttatgagtaagaattcgtgacctccttcagtattcacttttcgtattaaggcagatatattctcatcgtccgcgagtcatcactctgcttaggcattgaatcttagttcttctatgtgacatcgaattaaggaagcaatcattagcatatac

SEQ ID NO: 52727 - DNA, 404 bp, Oryza sativa
  unsure (1)..(404): unsure at all n locations
agcttcatagaggaaatatcaaaaagttcttgaccattctaaaaaattntagacggtaaccattaacaagacaaccattgagcagcgaagtttgaaaacatgccaaactgactgttgcttttctcaccaatatttcacaagacagtattcaacatgacatatggccactaagccagttcaaattaaaccattcaagtacaagctggaggagacccaaccaccatactcacgtcaatagatggtcattgcaacctcagaatgagatggatagatttcgtggcaaccaatagcattcagattggagcagtttgcatctcccatttctacgttaagaagcgcttggaagcaatcatatatattctctgaagtctggactatctattgactaatactcttatctcgtc

SEQ ID NO: 52728 - DNA, 449 bp, Oryza sativa
actcaagctggacagggtttacatcggccgatccattggaggaagtagacatatgttatggaaccaaaccaagactgacttttgtaaacaaaaatatgagagccgaatataaggttaagataatcgagctacttatagaatatgttgattgctttgcatgggaatatcatgagatgctgggtcttagccgtgagcttgttaagcatcggctctcaattaaaccgggttttaggccttataagcaaccgcctcgtcgttctaatcctttgctatatgaccgagtaaaagaggagattgatcggctgttgaaagcggcgtttattatgccatgtctttatgcggagtgggtttctagcattaatccccggggagaagaatgggagtcttaagattatagttgcatagattttgagatttaataaagccctccaagatgagtatctatgcct

SEQ ID NO: 52729 - DNA, 322 bp, Oryza sativa
  unsure (1)..(322): unsure at all n locations
agcttccattcttgtcgtagtagcctgtatttgtgattccaccgagcggaggccattgatgtcaacaccgatatggctgttgttgatgtcctggaactccacattctgcatggtgtcaatctctgcagcaaaaatgtggttgctcgcgttgccattgttgtcgatgttggtgagtcccatgtactgtgctgtcagtgctgtggatagaatgttgctcggngcaacaacgaaggcgatgccatggtatctcaagttggggtaagatgtgaggatggcaaacacaaaggaggctgataaagatgcaccgtgccgtcgagtgacc

SEQ ID NO: 52730 - DNA, 393 bp, Oryza sativa
  unsure (1)..(393): unsure at all n locations
agcgagggcaagagatatggttagcctataaaatccanaaaggattacgcatgccttctaataaagagtatatgccaaccttaattgtggcttgagccacaccaactaaagtggaacaacggaatagcaaacaagcctcctgtacagcggttgacactagcagatatctagtgggagataacgagatatgatgcactgtactaccatcatggctccttcacatattgctcaactataatcacattaattgctactaatatatgtagtcaccatgacatgtacatatcgtttggtaattaaaataatgcatagaacatatcatgtatatgtaaactcagccctctaactatctatgacgaatatcacaccatcggataaggggaaacaactaca

SEQ ID NO: 52731 - DNA, 387 bp, Oryza sativa
agcgaggattatttataagccccatgaggagcaaggtcataaaggtaatgtacaattggcaactcattcaaattctaggtagaaggatatgttgtagacatagtactgctgcgaaataaaacatgagtagcaatcccttgatcaacaacctaagattaatctctactagggatgagcaaaggtttaccttgggtatatcaataatacataatgttgttgtactagactagcagaattaacatggatgtcgagaagatacgttaaagtgaaggagaaatgaagtcgctatgcttagaaacacacttaccgcgaatcatgtgcgagaacattgattgagtggaccacaagtcagaccaaccaccctcaaccattatatgggcccacaat

SEQ ID NO: 52732 - DNA, 59 bp, Oryza sativa
aggcaaaaggagggaggcggggggccaagagcggcggaagggggcaagaagaagaccag

SEQ ID NO: 52733 - DNA, 419 bp, Oryza sativa
gctaatatacaagcttctcgtaatgtcaaaaagaatttgcatcaaactcaatagtgaaatgaaggaaaatgtatcgacaaatgtatggaaagatcaagatgaaatttcagaggaataaaaaggatcaggcaaattccaagatataaaaggaactgaacaagctttcaagggtatatatagaatttactactataattctaatcccattacggcacatgggcatggcaattctaatcccagttaaatacataggcatggcactagtatacgtcaaaatggtggcttatattgttttatttctcctatcctactaccctagcattatttatcaggacatttaataatgtgccacttctaatatgccgcattctacaatataaagtgaagaaacgggggttcttatataggtatatgtatat

SEQ ID NO: 52734 - DNA, 329 bp, Oryza sativa
agcacgtagcgtagtaattgtagcgactttattagcacatcacgagtgtaagtttaaatcttctttgtttcgaggggactgaggttaaatctttattaggagccaaattcagattatattgcttgagggataatctaaaaagctggatatatatccgattggatgtatagaccggcgaaaaaaaacccccttgaaaaaaacgaggtccctaggcgatgatgccaccatgagaccaacccactgcacttttcaaccgaccaagtagctaacttgaatacaaaatccagctagctacgtgaccgccgatctcattcatcaaacgaaaagta

SEQ ID NO: 52735 - DNA, 415 bp, Oryza sativa
  unsure (1)..(415): unsure at all n locations
ttttagcatntgttccatcangactatttttgaagtaccgtaacgcctgtaacaacagataaaaacaattagctatcatcaagactgatagattgaatatcaataaaatgggcattgtcccgtgccgatttgttccaaaaaaaaaaagacagatagattgcagtccacacacataaatgctattactgaaaaggagtgaggatcattntcttttgcaatatcaacgcattactctctaaaaaacagaacaggtgaacaacaacaaacttcgaacagtaaaagtacttctgacttctgaacttgcactcattttaccaatcgaatcagaacccatcacttcatcacctacacaatccaagcaatccataggaagaagaagaaaaattaacgagtaacaccacaaattaacctgcga

SEQ ID NO: 52736 - DNA, 297 bp, Oryza sativa
ctggttggggcttttattttgtatgcaaatacatggtgacatacactgtccaatcaaaacgaggatactgccatgtgcgtgtccgcccttatttacaacagtataggcaaccctctggaggtctgtctgtagctgtcaatgcatctagctttatgtgggcagacttatgagagctccatgcttccttgtagcaaacctgtgtgctggtagcaattgatgaatacgaaagcatcaaataattttcgctcataatgctgaagattgtaatgttgcattcataatgaatgctattatgct

SEQ ID NO: 52737 - DNA, 397 bp, Oryza sativa
ttcttctccatttaaaagcaagaatgtttctatattcaccagtgcagcctgttcagtacctgctacaataaggaatgataggttgctctgcagcaacatagatgagcccgacttgggtgtctctccttcacactttgtatcgtggcgtgccggaacatgtatggtcgatagtggaaagcagttgtttctcttaacaccattgacataaacaaaaacatgctcattcagatgcccaaaatcatcgacaacgcagttgaagacaactaccggcctgcatcagctaaatcttccaatatacctgttttgaaactgaaccattttgatgacgattgtctcaatctggagcaaagtgcgatagcaaatgaatcggattcttgtgtcatgacacctaatttta

SEQ ID NO: 52738 - DNA, 439 bp, Oryza sativa
  unsure (1)..(439): unsure at all n locations
gatccctgagtcacctgcggctgcagcttatacatagccgattcaacattctttgtcgaccatcttttgtctaaaaaagacaacaaattaaaaccaacgaacaaaaaaatcaattagtcgaccaccttgcgacggccgtctcagattctacgcacgtacggtagaccggtaagtacatccatctttttaacgacgtacgacctggattnttgatcgagatggatcacacggccttttgacgacggactcagtcatatatggcatgctaattaagacaatgcaaccgtgcaacaactgatcatgccgtgcctgtgcttaattaattccgatgaaatatgatccccaatgaaagctaccttgctctctacattccttcccctagtcatatgactaattaatagtagatgaccagactattaactgtnattactggacgcct

SEQ ID NO: 52739 - DNA, 413 bp, Oryza sativa
agcttgtatgttgtgaataaagaaatttttatagtattgggcatacgccatgctcacactgctttaacagatgtgcttaagtccctaaaagacacatggttccaccacacctggaaatatatggcatatgtggtataaaatccgagtaaataaactcataaaggattcaccaaccgcctgaaaaatgaccacaatatataatcagcctaagccataatattggtcaataaaaatgcacacttacgtggcgaaaagcaatgatattgtatccaatcaattgcttaaaaacccaaacagcaccatgactatataaaaaagtcagcgggccagctatataaagctttactgtttgacaccttttaagatgcattgtcccaactctaaaagttgagtaactgcggataaaaggattt

SEQ ID NO: 52740 - DNA, 367 bp, Oryza sativa
aaaaggttgaaagcagatctcacaagtaacttgaacatattaattctgtcttaagatgttaagcatagtagattaaatgttctttcagtatagatattaacatgcatgatcaaagctatgagaaaactgaaaagtatagttaagcacccattgtatagtgaacaggtagaacaaccataaataaattctaggtgttaagaacaatctcaagatttctcctaacgaagagaacaatctccagatactgatgagacataatgattaaaaattgataccaatagtgcacataatgatcgaacactcatgtttttcatataactgactatagattctaataagatcaaataatttgttatgctacagcaaa

SEQ ID NO: 52741 - DNA, 383 bp, Oryza sativa
  unsure (1)..(383): unsure at all n locations
agctttgaggaaggggtccatgaatggttgtgtgtctgttattgncgatgagatcccatatttaacctcttttctttcggaccgtcgttacgagaaagaattccagatgcttagccgcatatataagacgcctgganttggttttgtaagcctctcactctcactctattgcttccatttttttagataatgaaaatggattacatcttcggcttccatggattatatgcattgagaatgagtttatttgcttctgtcataagacacagccataagtttgatataaaaaaacgtgaagagtaaaattaatgagaatgagacataaagtgatggggcanaatcccaacctccatttattatttactaagcgtattgactctatt

SEQ ID NO: 52742 - DNA, 433 bp, Oryza sativa
gcttgtatgtcgcgaataaagaaaatacaaagtattgggctttcgccatgttcacactgctttaacagatgtgcttgagtccctagaagacacatggttccaccacacctggaaatatatggcatatgtggtataaaatccgagtaaataaactcataaaggatttaccaaccgcctagaaaatgaccacaatatataatcagcctacgccataatattggtcaataaaaatgcacacttacgtggcgaaaagcaacgatattgtatccaatcaattgcttaaaaacccaaacagcaccatgactatattaaaaagtcagcggcgcagctatttaaagctctactgtttgacaccttttaagatgcactgtaccaactcctatacagttgagtaactgcggtataaaatgatttaaggtattgggcacttgat

SEQ ID NO: 52743 - DNA, 400 bp, Oryza sativa
  unsure (1)..(400): unsure at all n locations
acctgcngcatgcaagctttaaatgcacaagtactaatacattaattctactttacctgtaacctccacattttttagcttgcttgccatgctcatttatgcgtttttctgtgcagatgccgtcattccgataacatgtgacatattaatgttcctgtttgcactccatcattacggtacccatcgtgtcggatttctctttgcaccaatagtcctagcctgattgatttgcatgaccttgcttggcttgtacaatattatccactggaacccttaagcttatcgcgctctttatccctattaccatgctcaaattcttgaggaagactaagaattctgggtggatgtcccttgggggaattttgctctgcatgacacgtaaagagaaaatgcgtatgct

SEQ ID NO: 52744 - DNA, 230 bp, Oryza sativa
gccttccataagccatgtgtgcatgccgcgaaacaaactggccagcccggctgataatggggcggccaacatgacatgacttgttctacaaattgcagcaaggtggcactctgtcgggctagattcaagaggatcagtttcctacagagaccatctgcccactcgcacgaagaatgatgtggcatgaaagttcaataaccgggcaacaccgcactgaaggttggaatccc

SEQ ID NO: 52745 - DNA, 432 bp, Oryza sativa
  unsure (1)..(432): unsure at all n locations
agctttcagaaaatgcttttcgtcggtctttcgacgcaccaaacaaaatcagacatgatctgctcacgacctacatactatatgtctagctgntgtcttatttttttttctctcagcctactgcagggttgcacatttctctctctcttacttttctccttagtacttcactctaatatatgtgtgtatgtatgtaaaaaaaagctatgcatgcattagtagctttaaactagttttctcctaaaaatatttattaaatctacaatccgattacagaattatatccgttgcaattaaatctttacaataagatcttagttgattatattttggtaaaaaataaataaaaagaataaaacactgttaaatcctaattgaaaccattttattctatatatganacatcgagttataagtggtgcaacactacac

SEQ ID NO: 52746 - DNA, 356 bp, Oryza sativa
  unsure (1)..(356): unsure at all n locations
agctcggatgctcgattattactaaatttgttatgtcggaatgtatagtctacactggcgacgctaatttttccgtcacgtgatggatcgacccacgatctggtagcattattgatcgaataaagtggtgggttcacacaagtagctacaaaagcccattgcttacaacgcgcatcactgccatagacttcaacgatttacctggtctaaagccattaacatcgcatctactgtntagagacggagatggcatacgagacacagttagacgcactcttactataacatagttgcctttcaagcctcctataaatgacgtggagaatactaagcagtaagatacttactatattatt

SEQ ID NO: 52747 - DNA, 442 bp, Oryza sativa
  unsure (1)..(442): unsure at all n locations
acaccacagaaacnnaagcccagaaagatagagnngcaaacgaacagttgcaaagcttttttggtatatgttaactcgggagggcctaccatacggagtatgcatatatatgcatatactatgggggaagagctagcagacaaacttattcacagagccaaaatcatgcagtctctttgctttgcatgcatacataaaacaaacttatttacagaatcaaaatcatgcacgttgataagccctctgcttcgcatgcatatatatacatatataagaggattgatgagcagccatgtcttcataagacctggcacccgttctcattctgaggagagttaccttctactccaatatagatgacattcttggaattgcctaataacacagagtaatgttagaaaaaaaactataggccctctattaaaaaatagagaccgggcgc

SEQ ID NO: 52748 - DNA, 435 bp, Oryza sativa
gatcttaagcacctgcagctgcagcttcgatgtgcttttcttactttttaaacaggcatgccctaaggattccttccctttaccacgcatagatcagatagtcgactccactaccgggtgcgaccttttgtgtttcctagacgcttattcgcgataccatcaaattcgcatggctagggaagataaagaaaaaactgctttcattactcctgtaggcacctttggttatacaactatgccttttggtttaaagaatgcaggccctacttttcagcgcattactcacattactttgagtaatcaaatagggcgtaatgtagaggcatatgtcgataacttggtggtaaagacgcgccaccaagatacgttgttacaggatctggctgaggctttcgacagccttaggtccacgtgcttgaaactgaaccccgaaaa

SEQ ID NO: 52749 - DNA, 437 bp, Oryza sativa
cgcttggtaaacaaaaatcaaggcccaccttgtttctaatgtttcttacaagctcgacaaacaaaaatcaaggcccaccttggcactaatggatctccatccccatcaaggcccacctcggcactaatggatctccatcccctgttatgtgtaggactgtatttctgatttcctaaaagggtcttggtgaaagatgatgattgctctcactagtctcgctgtttctctggttactgaatcatactaagatatgactgacatttaatagctgaaataagcttaggcttttagacctttcttccattatgcgtattgcatgcattattaatgcatcaatattaaattctttttatgataacattcatgtttagtgacacttataacagaatcacggagaaattaaccctactggaatactcctatgatcatacccaata

SEQ ID NO: 52750 - DNA, 357 bp, Oryza sativa
cgagcgatatgcgaattcgcgtcgcgcgcgcggctcacgaagcgggccgtctcgtctcgtctgtacgtgtgggctgcaacctgccacgtggtagcccacgtgtctcctgctaaatggtctcaagcctggtctgtagatgggcttaagccgcttctgcctggcctgaagaaaaaatgaaagcccgcaaaatggattactttctccatttcaccatattaagtttgactttagttttttttaagggtttgacttcgtgtcacccagtatataataaaattatatttattactcgcaatattttattaaactgcattgaaataatttatacgtttatttatgttgaaaaaatgcttattt

SEQ ID NO: 52751 - DNA, 397 bp, Oryza sativa
  unsure (1)..(397): unsure at all n locations
tctcatggtcgagctgctcagcgcgcgccgcgttaatgttgattttctcacgtcatgagcaggtgagtgtaacaaaaccggttgtgaaattcgatctcatccattactgttgtatgggtttatctagaggatggtttcttagcaaaggtatcttttatatatgtcacgcaagtttgatatgtcttaagaaattaatatgaggtatcagtactttacggtaccaaatcaattttgatcgatggatctaataatgtccatccttgttaggtagatctaaccattagaaacgatntagtactgttaggtactaataccttcagatgcctttntgctagaccagagcaaatctcacgtatattactacttcataattaggtggagaaactcttaaacactc

SEQ ID NO: 52752 - DNA, 395 bp, Oryza sativa
  unsure (1)..(395): unsure at all n locations
ttggatactatcaatgcaatnttattttatacaaaacaaccgtgtccttatattaccttcaaacaaccttataactttctaccattctcatttaatatgggacacctaagctggaactatttttctctcccactcctaaaaatgcacttatattgcaattttttatactaacaggtttttttaaaaaggtaataagcttaatactagctagcttacacagagttaagctttactatatcatgaactacctatctatataccatatatatgcccntacaaagagaccattgaaaaggtaacaaaatcgatcaaaaaccgatggccggccggcaagcacgtcagggtatattaagaccatgcctgcntcgtacgtacgtatagtacatgcctacatg

SEQ ID NO: 52753 - DNA, 350 bp, Oryza sativa
tatatggagggaacatcggtccatgaaaacgagggcctttttctatgcacactccatgcatgtaccctactgagatcagtcacaggcttgcaggtgttagcccacttgtccaactatatttctatatttaaataagccctctcatatattaaacaatggaagtaattagaccatcaatgacacatccagtgttgcagtagtcacaggttattaataaatatacgatccaacacaggctgatacacaaatatatatcatatatatgaggcagaaactgggaaatattacactgaagcgccagcaacacaccaatgacgagtgctgccgactgagcattattatcatacatt

SEQ ID NO: 52754 - DNA, 403 bp, Oryza sativa
gaaaaagaaaaaccaaagcacagagtattcgccacgcgcacactgctttaacagaggtgcttgaggccctagaagacacatggccccaccacaccctggaaatatatggcatatgaggtataacacccgagtcaatcaactcattaaggatttacccacgcgcctagaaaaggaccaccatatataatcagcctaagccataataatggtcaagaaaaatgcacacttacacggcgaaaagcaacgatattgtatccaatcaaacgcttaaaaacccaaacagcaccatgactatattaagaagccagcggggcagctatatcaagccttactgggtgacaccttttaagaggcactggaccaacttcaacaaagatgaggaaccgcggataaaacgagttaa

SEQ ID NO: 52755 - DNA, 441 bp, Oryza sativa
agcttggctctcccttatcgagattgctttgggcaatctaatgcccctagcgatcagattctatccccctccctcacatggtttcatttttttggcaccgcattacttttctattttagtaaatttatgcacctaaaatttatatacctcaagtttacacatctaaaatttagaaacctaaagtttataaatcaaaagtttatatatccgattcaaatttgaatttgaattcaaatactttttatatataatatttctatacatctaaagtttatagacccaaaatttataagtcaaaagtttacatacccgatttaaatttgaatttgaattatatccgatacaatttgagattaaattccaaatattctatatataagcattttatacctctacagtttatagacctacagtttatatgtctgacatttacataccccg

SEQ ID NO: 52756 - DNA, 380 bp, Oryza sativa
  unsure (1)..(380): unsure at all n locations
attccttaacgcgggaccccagctgaatatatctgcgtccaccactcaacaggtgaagagagactctgctgcacctgtattttgaatggcgtcaatatgtacgtgctggagaacactaatcctgggtaccataaaatggcgggacttgctaggatttcattatggagaaagggtatcatggaaattgtctttatagtggctggaacagtcgggaacaaataaatgcaccaatctttcagaagaacaagcctagtgctagtgctaggctccattcttattaaatggaaatattctaccgcgtactctgagagagaacgatccatcggctgaacatctacggcagtataaggttnccaacggtctctattaccaaagaatag

SEQ ID NO: 52757 - DNA, 395 bp, Oryza sativa
  unsure (1)..(395): unsure at all n locations
agctttcaaccacagnngagtntgtatgtttctgtaattttaggacaccgatgccggccggtaaggcggtgaccaaaaccacttatatgcggtttcttttacaaatttgtatcttatttgaagagaactccaattttgttatcttggtaccgaggatttacattcacaagttggaaagaatataatatatggacattgtactttagatccgatcgatgtttactgcttgctatctactacttatttattgtagtattttacaaacttggctttacttctattaggccctgtgtagatcctctaaaaaggtaaaaagtttaccattttgtagcactttttgccatattggatctaaacactattagcaaaagttggcaatttggcatttggcattt

SEQ ID NO: 52758 - DNA, 396 bp, Oryza sativa
  unsure (1)..(396): unsure at all n locations
cttggatatctggaagcaccataatgactgggggcattatgtatcatttttacgtcaccgcctatagcanatgagagtagttatggtgtttaattggagcgcatgctttgctggagctccttgtgaggttgataacactatgtgtcttatttgaggcttggtggtgtcgtgtgatgtgttttggagatgatcctttcgacctctcccgagtatttgctcctcttcttcttaatgaaatgaggaagcatagtcctcatgctaggaaaaaaaagataacactataataaaagatctataattgtcaatcctagaggacttacaaaacaatggatggaacatttccttggatattggaaactcaatattgatgtagcctttcatgcggacgaataatca

SEQ ID NO: 52759 - DNA, 337 bp, Oryza sativa
agcttaactccaaccatttgttgcttgttctcgccacccgcctttgctcgaatatcacctatcaccacacaaattccaacaccagttgaggtcaattcaatcgcaaacagagctcacgaagatgcctttttcggcacgacgagatcaaacggacaagaaaaaaaacagaggcaggggtctatccccacgggatctctcgcggaaagcggtacctgacggtgctcccagtcccagacggagacgcggtcgctggcgtccgcggtgacgaaccatgggtgcgtggagtggacatggatcttcaccaccttgtcgctcgtcgggcggaacgctctgaggc

SEQ ID NO: 52760 - DNA, 315 bp, Oryza sativa
ctcaaatatcgtatggagcgagttgtagattgggttgttcgtggggctaaggttcctatattaatggccgtatatattcggttggatatagaggccgggtaaaaaatatccttctctaaaaaaagatcatcatagaagcttgtctactctgaaaaaaaatgaacgccttagaacttttttttggctacaagatatgcccctaaaccctatggatattaatagaacgattgtagaaaagtattcctagttctcaggatagccacctgatgttaaaacttaggacacctcctattctcttctcctggtgatccgata

SEQ ID NO: 52761 - DNA, 384 bp, Oryza sativa
  unsure (1)..(384): unsure at all n locations
agcttggatgtatcttccttgatgaatgtttacaggaaggatcttgggctgattgcagctgagaaaatctccgtggacgattggtatattncgtggttgatgtcttcgaatctgaagtccagtgggtgctcaagttctgcagaatcttcataaaggaacgaaactcgagcatctttttgaaagccttcatagaagctgcagaaccaatctttgagcagttcagccgatagttttgccccggcatcagttggtgtagaagcgtattctccgtatgatgtgcatctccgatgagtacgctcttctccatcattccctacaatcggctctagtcttgggaactcagcttctgatacggatggccgatctacaaccttcatacctatc

SEQ ID NO: 52762 - DNA, 349 bp, Oryza sativa
  unsure (1)..(349): unsure at all n locations
acaccatnagaaactcaagcttctctttatcatagattatacatgttagcanaccctgttgcattttctcaactcggacgcatgcatcacatgtcaccaacttgaaatgacgatcaacaggtcttaccttcacaacagggcatatgaagaggggaatgggatcagtgcggcgtcgtgcgatctggcgcatagaggaccaccgtggagaggcgacacgccacgtcaccgacggaggcaaacggatccagaagccagacgcctcgtctattgcagactgccgctgcgcgcggagaaaggagagtctgcgatggaggccgccgccgcggagtggacctatctgtgaggtggg

SEQ ID NO: 52763 - DNA, 361 bp, Oryza sativa
  unsure (1)..(361): unsure at all n locations
tttctttaacctatactttgagaggctatatgcgttgcttatggntgagtagggtcgtcctctgagtgagcctttcatagagtccaagatcataaaaaacggactcctgagcgaaaagttatagtcgctttactctgtgcttatcggaagttccgaaaattatcggaagttccaaaaatggttgcaaaactgagtttagcttatgtaaattttcgtaaagtttcaaaattccagtcttttgcctccaacggttagttctgaggggctcgggtgtataaactcctcacccctcctatgagtggctgctgttcttggcaacattagatacatccaaccccaatagttatccccatttccatct

SEQ ID NO: 52764 - DNA, 358 bp, Oryza sativa
  unsure (1)..(358): unsure at all n locations
tatgcttccatttgttttctccactcaattttatagcctatcttgtgagattgacagattacattatagtgtacgagtgttttggagatggcttgaacattatgtttgtttgagcactttggatcacttgtgggctgccacttgtgcttattactctcggagatcttcttctagatggttaggtgttgcccgagagcttccaaagatcttgtggattgtcccggaaagtttgtgaaggatntctttacctctgcatggcaacgaggctagtgagtaaagattcttgtgctgagtgttcagaggctgtcctatgcagagcaactaacacttgtggtctcttctataaagaattgtgagt

SEQ ID NO: 52765 - DNA, 386 bp, Oryza sativa
  unsure (1)..(386): unsure at all n locations
gaaaactaagcttgaagataagccgaaacagttggaaatgatgtcacattttttgtgctcccgaacaacaggttctatgagaaataaaaaaaagttattaataccacatgctanatatatttcgttgctggtagtataaataaaacaatgttgcaaaacttttgctagtaaatgagccattagtacagtaatagatgtacagtactaataacactcggataaattttgaatgacaaccactaatagagattatgaacggcttgtgctatcatttcggcttaattaaaagagaatgggaggagaacactctacttttccaatattttagaaggcgtttatgggtaaccatttagcactacctaagggcaaggaagctctgaaccaac

SEQ ID NO: 52766 - DNA, 325 bp, Oryza sativa
agctttatagggcctcgggagaggcggttgtggccattaatgggctctatatggccggcgacgacatggggaaggtggggagagaaagagggagagagaccgaattcaaattgaatcctgcctctatgcgggcacgcgcgcgcgggctggaaagcggtgaaaggggcgggcgacgtgggcggcgacttgggggggcgtgtgggcacggatgccgaggaagtggcaacgtgggcggcggttgctgcccgctggaggaggaagacagcgtcgacaggtgggccccacctgtctgggaccccgacagaggagggagggagactttggc

SEQ ID NO: 52767 - DNA, 414 bp, Oryza sativa
tttcctattcccgttcgagtatatctgccctcttcttctatccggtgtctacgacgacgacgacgacggacaacgacaccctcagatgagacggtcaaaacggggcaacccaaccccaggccgtgccatgccggccgggggccggagacagcttcgctttcgttgatattttcagcccccggtcgcctgcccaaaacaaatcacacacacacaaaaataactctatctaaggcatctagctctagtagctagctacccctatcaacattatcttcttcttactctcgatcgccatcacctcccggttgcgtacgcgatcggcgacccgtctcccggccggtgttgtgagctgaccctctaagcaacctagctaccgacgacatcggacaatcgaacgaaagaacgagcgagcga

SEQ ID NO: 52768 - DNA, 433 bp, Oryza sativa
  unsure (1)..(433): unsure at all n locations
gaccctgagtcacctgcggctgcagcttgacaggagagcctatctttctaagatattgggagntcatttcatcttgtaaaaacttgccagaccagttatctttccagaaaagggccgtgtccccattgccaatagtgatctttgagactgctctgaagatgggaatcaatctaaaaatgtccttacaccaaaaggatcctttttatgtgtgagcatgaggagagtcagacaaagagtattacttgttccatattagttttacctagggcaggtctttnttgttgaagaacttgtccagatgtttggtcagaagggcaatgttttacagttccaggtttataatgcccaaaccacctttcttctttggctggcatactangtcccatgtagccaaggagtggatcttagtggttggatcatttgacttccctca

SEQ ID NO: 52769 - DNA, 411 bp, Oryza sativa
  unsure (1)..(411): unsure at all n locations
gcttatctcttacgctccaagaatggatcagtcagaacattatcatcagcttgttgtcgncgccgccgactggagtcctcgcctatatggttgggtggtcacaactcacaccgctgttgntggacatcgttgtcttcaccgactggccgcttcgtccgccgccgactgatgtcttcgactatacggttggttggtcacaccaccgatgttgggcgtctacgtctttaccgtcggcttgccttcgccaccaccgactggagttttcgcttatacggntggttggtcacaccaccgttgttgggcgtgtacgtcttcatcgctggcttgccttcgtccgcgccgactggtgtctccgcctgcacggctggactattatgccgctgttgttgggctctacatcttcaccgaacg

SEQ ID NO: 52770 - DNA, 431 bp, Oryza sativa
agcttatatcgccaataccagccacaattcatcctgtgtagagttatctgcaagagtggaaatgccaaactcagtgacagctaaagcagcacaatggcagaataatcatctaagaagaactttttgttggaattgactaagcatttctagttcataacacgcttaaatgagcactaacacaaacatatgcaacagttacagcacaggtaacggaagcattcgagagtaacaaaaagcttcgtgctacatttggtaagctgtttcatactaaagcgcgcgcaaacatgcacctatattacatctgggccggaagtgtagcacgcgaagacaagatgaataaggacaatcatgtaagaagaaaatacatgccacatttgtcacgcaatccctaccgcaaaacaacataaacatgctatccgcatgcatgcaca

SEQ ID NO: 52771 - DNA, 449 bp, Oryza sativa
  unsure (1)..(449): unsure at all n locations
acaaactcagctaagtgtttagaatgaggttgttcacatgaaacaagttatgtatttatttccatcaaagcaaacaccgtgtacagctacaaataatcaaagaatagtgaaatattgaaaattggtaacatgcatcggtacaaatgcattcggaaggaaggtggctttgttattatctaagacagctatagctgcatgactaagatctattagatagctacattggtccactaagttaccaataagatattgttttgtacataagagtatagacagttgacacaattttgctagtaatttacaaagaacggtagcattcatttcatcatgacacgatagattgcacataaaaagaaacaagtatggctatgctattntaaacatcatgtataaccaaacatgagtattacaacgaaagatttaaagcccagatggcacatatgtatgtt

SEQ ID NO: 52772 - DNA, 420 bp, Oryza sativa
  unsure (1)..(420): unsure at all n locations
agctggaagagaggcatggttgntnttcatatctttnnattgaaagcattttgaaatcactaagtgatttatttatttttaagtttgggtcgaaaggagacttgcgtctcgattcgacttaagagatgcttttcaataactcaaatggtaatgtaccgacctcccgggtcaacaactcaaatggtaatgtaccgacctcccgggtcagatcattacttctcggctcccagagccatttcacttgattaagcggctcccagagcctttttcattntctcgaactcccagagtccagctgcccagcagcacaacaatcccgcttcactcgggaagcctagtctatgatgcccgtagacatcccgaatcacacaaattcgtttctgaccactcangtcatccatctgcctcataggctgattc

SEQ ID NO: 52773 - DNA, 365 bp, Oryza sativa
aagtatctgtaattggatatagtatgtaactctgtgtagcttatatttccgcataccatcatttttaaaataaatctttatgtaggttgacattctggctatcaaacaccgctgtcctaagagagatcattgcacaaacatttggcattacacgccaaccaagtcttgctatgaaggctttcagcacaaatgttaatgcaaagatgctcggtaagaactcttcaccaacgcggcggaaaaacaactacagtggcaagcatgctagacctgctatctggccattacctgatgattggcgggaaactgggacactcgtggctgcactggagaagttgaatcatggatactttctcggattggtgagt

SEQ ID NO: 52774 - DNA, 307 bp, Oryza sativa
  unsure (1)..(307): unsure at all n locations
agcatgatccatgaactatgagagcgatcttctcgtcnacgctctgttccaacgacgccacacctacaacgctgcgtctgagacgggggggcttgtttctccggcggagccctccacggcagctgatgatgagggtatacacacctcgcggtgggactcgctgatggatagctaatccagcggcgccacgccgccaccgcgtcggcgacgaggttgagcgccgcggtcggcgttccccactttggagaagaatcggctcgagcttggtggggcggacaccgtattcgtgaatttactggctatccct

SEQ ID NO: 52775 - DNA, 305 bp, Oryza sativa
caaggaggtattctaactacaaagggacaaggggctaccacgatctatgtaattgcatcacttacggataatcaaccaccatatttggaaaactctctgaaggcttgagaatctacgatggaaaaagagaagacattgcaggcttactggaatgggcataagaatttgcaataagactggtgatttcttcaatgtaaatgaactggaacatacatgacgcgctgaatcaaatagtcgtgttttataatttgcaagacatgcactgctgctgaagttatttcaacaccacaaattagattgattgg

SEQ ID NO: 52776 - DNA, 314 bp, Oryza sativa
  unsure (1)..(314): unsure at all n locations
agcttgactncaaccattttttgtcttatatgcccccgccttcagcttgtagatcacctaacaccacacaatttccacaccagtcgaggtcaattcaatcgcgaacagagctcacgaagatgccttttccggcacgacgagatcaaacggacgagaaaaaacacagaggcaggggtttattcccacgggatctctcgcggaaagcgggacctggcggtgctcccagtcccacacggatacgccggacgtggcgtcggcggtgactagccatgggtgcgtggggtggagctggatcttaccacctggtcgctcgt

SEQ ID NO: 52777 - DNA, 309 bp, Oryza sativa
gacctaagaaactcagcttttgcttcttctgagacataggcatatttgccatatgattctccacacagcgacggtgagcacatgcttaacagtatcaatgctacctttctcagagaaagaagcgtaatgttaacatgtgcacaactaaatgacctaccaccgacctcaagcgagaagcattacattacagaacaagtcactcgacaatgggtggataatgctgttaagacaatgctaggatttataccaacactgtcatattggggatcgcattatatgccatgaacattgcccgcctgcaatggacag

SEQ ID NO: 52778 - DNA, 321 bp, Oryza sativa
tcatcaccttcctcgctcacacgttcttgctgctgtttgtgatagcggcatatctcccaatgtgtacgtctcacattatttcaggaaagaagcaatctctcatacatggagtgaggagatatatgggttcgggatcttaggatcttacacaacgctgagtgccccaagtttttatataccagatccatctaagtttacggtgaaaaagggttgacgccaaactatacgcatcacaaatgatatggatgagtcagaagcatgtgggaggactatacgctgctacaagtgtgatctgtgcggccatactacaagacatgcccg

SEQ ID NO: 52779 - DNA, 356 bp, Oryza sativa
atgctttacacaagttttaaagcgaccgttcttgatctttctttaggaagctatttaatttttaagatatatttatgtatctttggtcaatatttacagctgtttcgcatgacgtagcatcaagctaaacaaaaattggcctgaatttaaagaaatttggcagacatgaaaacttgtcccaaactacagagataaaatttttttaatatctctttttacggggcaatagaaaggaatcttctgcaaattccacaatgtatagcaccaataaataaatattggttaaatctaacagattttttaaactcagaaattaatacgtcttcgatgatgatacctactagggaaaataccct

SEQ ID NO: 52780 - DNA, 357 bp, Oryza sativa
cgcgcacgcgaggagcgagcccgcccgtgtccacgatgacacccacgagaacacgagagcgatagagaaacatgaggcacgtcacgagggtcacagccacccacaagataggctacaaaactataccgaccaaaataagagcaggacatcgaactcaccacaaccgccaaacacgaaaaccgaagagaatcaaaagcgcctccgggcgagcaccgagcaccaaagcaagggcatatagaaaccaggaatacgggaacaccactgggcaacagaaaaacgatacgcgggccccacctgtcagccagcgggaggcgagaatcagcagctggctgtggctagcaagctcggccccaagga

SEQ ID NO: 52781 - DNA, 394 bp, Oryza sativa
  unsure (1)..(394): unsure at all n locations
cgcaagctttccaacacacataaatngctatcttttttctttatactaccaantntaaacgaacttttaattctggcatggaactaaacacggcctacggcctaagtactattagattatgcacgtgcagagaaaacaatctatgtgatctgaaccgctctgtaatactacattctcgtcctgattcatacaaagagccaataaaaatgcatgttctaccaataccaacttcttgtccttttatacagatcatgacatgaatatggcacgtacagagcggtgtagaacattatctagcaagctcccctatcccataacaagatatatttttaccacgagtaccgcttatggcctatcggattgaaaaccatgcacgcagatgggcgctatacag

SEQ ID NO: 52782 - DNA, 288 bp, Oryza sativa
  unsure (1)..(288): unsure at all n locations
ctcacgcttcctagaagattcacccacaatcttcatagactgcgactctctttcaatctcacaaaggngaganctttcaagaatgctctgcaggacaacatctttgctaattaaagccaacagaactcattaaggcatagccaacctgccttgcagctcacgagagtatatgcatcttcacttggagaagggatatatattgggactctcctctagattattaatgggttggtcttccccagatctaatttacgggatcttcgatcacatagactggggtaccaccct

SEQ ID NO: 52783 - DNA, 408 bp, Oryza sativa
tagctttgaggatggggtccatgaatggttgtgtgtctgctattgtcgatgagatcccatatttaacctctattctttcggaccgtcgctacgagaaagaattccagatgcttagccgcatatataagacgcctggatttggttttgtaagcctctcactctcactctattgcttccatttttttagattatgaaaatggattacatcttcggcttccatggattatttgcattgagaacgagtttatttgcttctgtcataagacacagccataaggttgataaaaaaaaagtgaagataaaaataaatgagaatgagacatatagtgatggggcaaatccccaactcccattattatctactagcggtattgactctattgcttcctggattcgctcttagccttc

SEQ ID NO: 52784 - DNA, 384 bp, Oryza sativa
tgtgtgttgtgaataaagaaattttcaaagtattgggtttttccatgcgcacactggtttaacagatgtgcttgagtccctataagacacatggttccaccacacctggaaatatatggcatatgtggtataaaatccgagtaaataaactcataaaggatttacccaccgccttgaaaatgaccacaatatattattcagctaagccataatattggtcaataaaaatgcacacttacctggggaaaagcaacgatattgtatccaatcaattgcttaaaaacccaaacagcaccatgactatattataaagtcagcggggcaggtatataaagcttactgtttgcaccttttaagatgcactgtaccaactctaaaaagttg

SEQ ID NO: 52785 - DNA, 422 bp, Oryza sativa
  unsure (1)..(422): unsure at all n locations
agctntattggctaaaatttggcatgtttctgtcaaagacaaggagcagctcctttgtcatgttttgagagcatttcagatatctacacctccctactatcccttttgtaagtcaaaacataaaaatcttttacttcacttcacttggatatggggcaggatcagacaagtaccatcaggaatcaataattgtttgaagtaaaagacagcaagctagaatagattggcatacaacagtgacaggggtgttttgattagaggtttcattgtcactcctaataaaaggatggggagatttcaggaagaacaaattctatggacgatatgaataagatcaacatgcacgaatgtgtatagatactacaattatgaactagacataccgtacacccaacggtttgggaagccttcaagaacataat

SEQ ID NO: 52786 - DNA, 327 bp, Oryza sativa
  unsure (1)..(327): unsure at all n locations
ccgaattataatccatcttacttaggttactccctctaccactgatggctgattattttggtgcaccttctaacgtcataattcgctctgaatgtatgcttaattgagcgaatcataccttgttcttcaaccatctatcaatgaacaaacctctgattttggaatctgcatggtgtttgcattacttncttaagataatgagcgcattattaaatcatatggaagtcctatgacgatacatgatactatctctttcacttgccatgacggtctggtggtatgcacttctgctggatggacaacgaaaaacaatgctctatctatctt

SEQ ID NO: 52787 - DNA, 441 bp, Oryza sativa
  unsure (1)..(441): unsure at all n locations
actcaagcctaaggggcctaanggggactcagggactttacttatgattatnttgttagaaagacacatccaatcatttcaaggagtgaacagatagagtgaacctcaaggggaagacaaaagacaagacaaggtgacaacgactgatggacggccggcctgaagacgccaacacctgaacaccagaagaaaggcacgctactactcctactatatgagaaaaaaacactacaagagaagatacctcaagactgctacaggtgacgatcagtcgacacatcatgccttatcgctgctaagccttgtctaaggccattccccagaatatacacatagtgtctataaactccacattactataagaaactaggactagacactactattcctatacagacatcaatattctatacttaaagttaatgcgtacttattcacacg

SEQ ID NO: 52788 - DNA, 342 bp, Oryza sativa
cagcttatcatagtacttttttatctttattgtcaacatcaagttttcttcttgacgttgtcagttgggggctatcatcactataatggagtgtgatcttttatcaatgtaattagcttacttggactatcattgccttgtttggtttctctacttagtctgcgaggactgaaagcttttaatagcttctttgggttttaggctcaacaaagcttgataaaagcttttaagacatcaacgacttggctaggattatcatgcacagcataaatacaccagtattgtacaagttgagcctccatttgctacattcatactcagtcagaatcactcctttcatca

SEQ ID NO: 52789 - DNA, 274 bp, Oryza sativa
acaatggatctacgaaaagatcgtgtatttaccactaccacgggataatgtacaaaggcaacacaaattattaaatggaacttatggcttaacaacccgcgaagatagttctagacctggaccataacaaacttcgcatgggatatatgaacccttgaattctgaaatgggacagctcttccggttcggggactacctctttatggggccgccatgctttattcgcggtttcctattcatatttagaatttatattctcccgtttactggacga

SEQ ID NO: 52790 - DNA, 409 bp, Oryza sativa
  unsure (1)..(409): unsure at all n locations
agcttgtggttggcatgcacttcaaagnctgttccttatatctgttcattctagcaaacaactaaactttattggtacttcagtctaaactgatgttatattttctatgaatatcaggatctggcaactgtagattctattcttttgagggagctcccacctgtagaagatgctcaagctgtgagttccttcaacattatttgttcttttcacaaatcacaagcttatattaacattctattcctttaaaatttttgtgttgaaatctgtaaaatggtacagatgcttgcacttcaaagattagttgacatcagcatgggtgtgttgactcccttatcagagcaactgacaaagccactcccacatgcaattgctcttgcaatgtcgatgaactgtcaagcggtgcaca

SEQ ID NO: 52791 - DNA, 366 bp, Oryza sativa
tatactaatactcctcgagtctgtatctctcgaacatgtccttttatcaatccagacacttctcttaaaagtgagatacaacttattcacacattatgataacaagcactaactacgtactctgttggtcgtcaggggtcaccacttcatattggtgaagatatgtcaatgatgccctttatacctcgctaattattattgattttgaatttcagatgtgaatacatatataaaatactaaatggaaagcgaagataggcgcaactttattattatgtaatccttagattcggaaataaaagaaacgtccatgatgttctccattgtatttttgcgtcttgaagaattcccaacgcatcctatatc

SEQ ID NO: 52792 - DNA, 354 bp, Oryza sativa
aagacgatggaaggagcagtgacccgagccacacggaaaaggctgcaacaagaatcccactcacccccatccaagcagaaacaaggtctgatgaaaatatactgcataaagcaaacacactaacggaaacatagaaaaatataccgcacgaacaatacaaatgaatacggtatacattggaattgaccataggcaacatcatggagcaatcagggagaagaaaaggaacactgcagatgctctatcacagacggctgcacatcatcgtacacatgaatcaagctggggcatgagaaaccacatagataatcggtggactgtagccactctcagggataatcacacaaagatcag

SEQ ID NO: 52793 - DNA, 324 bp, Oryza sativa
  unsure (1)..(324): unsure at all n locations
ccagcncacaccgggcgggccccgcgacagcccaggcgacttgaattttagcgaagaaaaagggcacaggcagggccggccctgatctgatggaacaccgcagaaccttgattctccgctggcaacatggctcgcacggaggaacgcaattcacatagtagaaagacaacagtgggcagatcagacgcatacgcatggctcacaggaggataccgatgcacatacctggctcacaggatgatatgagaaggcactttcacaaatcaacatatcacgagacagcgcacctaattcggtgagctagctattgacttcaaaaatctc

SEQ ID NO: 52794 - DNA, 313 bp, Oryza sativa
  unsure (1)..(313): unsure at all n locations
ctacctcatatgttcttcnagcanagcatctggtcataacgatggctcgctattcgccgacaaaacggactatgcgtcgatttgattagacatcagagatgggcttgacaccaattcggtatgccatggcatccctgtcgtacttgaaagcttgcttttggtactcatgcctaagtagataacggacaatcgggccttttctttcttgcacatacaggtgtcatcggacttgagaaaatgtctgctaaacgggaacacctagtaccagcaacaaaccaatgatttgagatgacctatgaaaatatgaggtctg

SEQ ID NO: 52795 - DNA, 475 bp, Oryza sativa
  unsure (1)..(475): unsure at all n locations
agacactcaagcctttcatataacaccatcactcaactgcagattggcaataattattccatgacataaaatatgggagtaagcacgcaaattgtaagattttcatttcgacatacaccctttgtattctctatatacatccccctaagaaacatttcaggcagactttctatgatatgcacacccaaaaaaagggtcggcaacattaagttctctatatacattctctgcaaacatctcaggtaaatcttgtatgatatatgcacacccaaaaaaacaaactgttcctccgtgagttgtgagatctcatattctgatgctgntcagtgtatgcagctaactatagacaggtttcattgcctagtctctcccgttagaacaattcatgccatctgatgttactgggcaagaaggttggtgtccaaattgacctacagctgtgcctggccaagcttctagtttctttgcagaatac

SEQ ID NO: 52796 - DNA, 428 bp, Oryza sativa
  unsure (1)..(428): unsure at all n locations
agcttgaagaacatagacctgtctttcattatttgaagnctncaatggattcagattggcttccacccttcaggctggagtctgcatggcttgcatcttgtcaaattgggcctctgtttccatcttggcttcagtggcagcacaaaatcatcgaatttgatatttcaagcacaggtctaatgggcaagattcctgagtggctttggccaacattntcccaggccacatatctggacatgtcgcaaaatcaaataagtggtagcttaccagcgcatctaggtgacatggcttttgaacaactttaccttagttcaaaccaattcactggaccaatacctccttttcaagaaaaacaatgtgttagacatcccaacaattattctatgaacactgccgccatcttgaagctcagagcttcaacattactc

SEQ ID NO: 52797 - DNA, 446 bp, Oryza sativa
  unsure (1)..(446): unsure at all n locations
gatgtataatgtaattatgtcgaactgtaatctgaatttgatcatttgttgaaatgctttcacctactgtctgagcggctgcgccatttgtagtccaagctcatgtgtatgtgctattttaagaggttgttgaactcaagtcgtcagaatctattaacattctgtatttgaagtttgatcatgtcaccatgcgtgaggcacaaagacacttgtccagaagtcaatgataattgacagcaactaatatattgatcctgtgtttactgtttctgaacattcattgcttgttgcagcttgcaacatacggaaagcatcctaatacaaacactccatggcattatgatcacactaattacaccagcttcagttagagggtcagtactagcatcagcactaactctcaacatanaaaaagaaagaaaagaagatatttctgactagcttct

SEQ ID NO: 52798 - DNA, 387 bp, Oryza sativa
  unsure (1)..(387): unsure at all n locations
agcttgtgacggcatgtcggcatgcttgtatatttgttctagacggagccgngtagaagttctattgtaatctacaagtacacaatacatccaaatggacatcaatccagactgtacatatcaaagatgtatccagtaaacgtatgaaagatacataaaaacattccgagtattgggtatgaacaagtggattaacccggaccatagatctcgataaaagtacaattgaatttggtatacaagccttaaaaatatgtttgcaactctctatgtttttacttaaaaaataagaggtgcttccatcggtcgtcaaaaaaaccggatgaaaaaaccaaatttatcagatatagaaaccgggcgaagaaagtgcataaataccaaatctgt

SEQ ID NO: 52799 - DNA, 436 bp, Oryza sativa
agcttcgcagatccctcatcgattgtggctgtgttctcaacatccttttcgctaaaactctggatgacatgcagatccctcgcacggaattaaagctgagtaatgcgccctttcacggagtcattctagggctatccgctacaccactcggccaaatcactcttccgggtaccttcggcacccgggagaacttccgcacagaaaacgtttgcttcgaagatgctgatttcgagacagcgtgtcatgccatactcggacgcccggcgttagccaagtttatggctgtcccgcactatacctacatgatgatgaagatgcctggtcctcgaggagtcatatccctgcggagcgacatcaagcaagccatcacatgcgacaaggaaagctgcgagatggcccagacccgcgagatcacgctcgcccaagaagaaattcg

SEQ ID NO: 52800 - DNA, 364 bp, Oryza sativa
  unsure (1)..(364): unsure at all n locations
taagnngaccacaanaggcgggcaacncactatatatttttatacgnacgccaaaagctacttgaatcacgtgccatatgaactttgccaaatgacaatctaaaaaaatatgtcgtattgttaacatctatgtgaatgtgggcaatgctagaaagtcttacattgtgaaacggatgtagtaatatttttttatttaattgcacatattttaaatgtcatgtcttggggatcataaggcgtattattgatcttactaagcagacagtttggtgtttctttataaaaaaaaaagtaggcattctgtgttgatacactacgatgtcaccgtgaaccttttgcttttaaacgtgcatactaattaaag

SEQ ID NO: 52801 - DNA, 212 bp, Oryza sativa
cgccgagcttttcgcttccccaacggccaatgagtccaccgcctccgtagctgaactgctgatgagtgcaccgccgccgccgccttaatcgatgggctcgtcgccgcagatggaggacgcaccgctttagccgatggggccactgctgtcggtcgctctgtacatgaaccggccagctccgacggaagccgggggcgcccgtcaaacaaaac

SEQ ID NO: 52802 - DNA, 384 bp, Oryza sativa
  unsure (1)..(384): unsure at all n locations
nagnncaaaaagagggcatacgagtattcttgcttaattaagctngagacttgagatggatcgagcgatggatcgagccgaggcgtccttttataatgtttcaagaggttggcaggtcaaacttaacgtgcatggcgactcgggcgggggactgcgccgattggctgcggaggggtcccgctaagcgcgtgtggacgaaatgagttgacgaatcgctgtaacggtgcgagggaaaaccgggtgagggcaagcactctagtttgggatgcgttttgtttggggaaggcgacatttgtctgcgttggcgaggtaggaatcaaaattgagctcttgtttctttatcatactcctatttcgggagaacatgctagttaccttggatga

SEQ ID NO: 52803 - DNA, 376 bp, Oryza sativa
  unsure (1)..(376): unsure at all n locations
agcttaaaagaacacttagtgcccgataattttcaccctgngtttgctcaatcatgttcttgggcccactctacataaaagaaatagagaacatgttaatggtacatgaagggaatccatggtagtttatgcttcacatacactattaattgatatcagtcatatatattgaccaaatattgttactgtactcaccattggatatgtcttctctgaaccggtctggccataagcaaagatgcaaacgctgtatccatcaagcactgatcgaataaagggctggtatctaagaacacctaatctgtacgacaaaaaaccattcgatcatctttcatttaagagctctaaaaaaattgagaaatggacaggtatataa

SEQ ID NO: 52804 - DNA, 361 bp, Oryza sativa
  unsure (1)..(361): unsure at all n locations
cataatatnctcaatgtaaactagaggcggtggagatatggaggatgacgacgatctaccatgccccttcatcacgtgttggactgtggccgagtgcgattcctctcctcccctcctttcctcctcttatccctttcgtccgcttattctccctctccttcaatcttctcattccacccgtcaccttctcctctctggtcccttcacctccgcctccctttctttcatctctgtactcctctatcactaccctgtattttctcactccatctaccctttctatcctattctcactcatccatttctattccattcgttcatcttcttcactctatctacatctaaatctctcctcaatatc

SEQ ID NO: 52805 - DNA, 299 bp, Oryza sativa
  unsure (1)..(299): unsure at all n locations
agcttgcaagcatcagatgtgaagatgggcctttattttcggngctactggggccattctctaagtgctctgtcatgtgcacacaagacataaacacagtgtgggtcccaaaacctggttctcttgagaatcggaattgctccaagttgtcattgccacccatgcctcactataccatgctaacacgtgttactgtgaaagaagataatcaaacaaagctgcattttgaagaagagacactgtgaatatatggctttggggggctttggctttccataaccgtggacaaaggtaaagat

SEQ ID NO: 52806 - DNA, 415 bp, Oryza sativa
  unsure (1)..(415): unsure at all n locations
agctnggaagtgtgtgagtgaagtgatggatttatgtcntatataggggtagatatgacgggtggcgatagggaaatgtcctaagtgccctccaaccgccatcagggaatgatctggagcgtccatctggcctggtcttcggcccatctcctcccctgatcctcctttatccatttcttcgtatattgggctgatttactgatgttttgatgaagtacacaactcatccttgtatggatacagaattctccctactttagtctaaatatcctcccaacctctgggtttatcacctgtatataaatatacaccaacacttgtggaatatgtgagattaaagcacctatcactatattggatctcttattatctgaactctatgcagatgttggaggtattgaatcgcatttatcag

SEQ ID NO: 52807 - DNA, 416 bp, Oryza sativa
agctagcctccatactcctcccactcgcggcatctttgacttctatattcgcctgacctcaagtggagatggtacttcttcttggcggcatttactttgattcttttcatcatcgcctgcccttgttgacctgtcttgtaagcaatgtactcatcccagagatcccttagctccgggaatacgtcgaagttcggtgtctgcccctccaggatgtatttctgcgacagatctcccttgaaggactggaactcttctgccattatcttaagagtccactgttacactatgtactccgtacccgcagggagcgtgaacgtcccgagcattgagggccatagcatctcttttcctgattccgagtcaaagccgacataaactccgcgtgcccttgatctgccacagtataccctgctgac

SEQ ID NO: 52808 - DNA, 432 bp, Oryza sativa
cactcagctgacgctccccacctgcgcgccactgcgaacttatttctctatattaaaagggggtggctatcaagctaggaaagtgtatgggtttggagacaaaggatttatacaggttcacgccttcttataaaagaagtaataccctactcctgtccggggatgaatccgccgagtgtattattgattgtgtgattcgggaaaaaccaacatatgcccctataggcgcccagaccccccttatatatgggaaggagtccgagttacaaaagataacctatatcccttacggaatatgaaaatataggtaagatacagtcgtaaccgactaagtttcagggtggttccatgatacacaagttaagaaacatacccacgatacaaataagatattctatctacgttaggtatcctgtacccagtttgaatacc

SEQ ID NO: 52809 - DNA, 451 bp, Oryza sativa
  unsure (1)..(451): unsure at all n locations
agctttattgccatagggaaacttgttttctaatcagtttagctgggtgttttaatattttaagtagtggggagttatatatatacctctccaagaataggatacgccttagaattgtaatagacaaactgtagagaaaccaattgtcttcatctgacatataggccatataagattaaattgttatcctgaagcggtttgatctcttgcggattattaattaatgtgcattgtatgataagacacgctaacaaaacatagaanattaattacttggactttttttttctgtaagagcttgaattagttgtattgatacgatttcaaatataaaaacanatccagcattgctatgaacgaagttctttatgatattgttaaaataatgtacaactcttgtcacttgtcttactcttcgagttcaagtggttgcagagatctcttttgtcat

SEQ ID NO: 52810 - DNA, 453 bp, Oryza sativa
  unsure (1)..(453): unsure at all n locations
tcactgccacctccgttggattcgcagctgctaggagttgtccgtccgccatctgtcatctgccgaagatcgccggaaagtcgtcgccgctgtagatagtacctcgccgcccttcgaagctcgtcgccggccatcttccgtcgttgtccatcatcgcgtaagtgttggtaaggaccgtcgtctcgtgctctttttcccggtgttctcccttttcgccatcgctccgtagttcactggtgatcgtcgttcccgtgtccgctgtccgatgatctcgcgtggctgtcttgtcattgccacgtctacctaaaccctatattggatttatatctaatccgtggatcttggtcaactctcggttaaaattaatctcaatataagtcgtcgtgttatcccttttcattggcatattatntctttntaatacatagcatttaccacatatgatctaatcta

SEQ ID NO: 52811 - DNA, 429 bp, Oryza sativa
acatcgaacaactccaggctcctatttggttttcatttggctaagaaatggagatcatctcatcagctctgacataatttactgtctgaaggctggtcagggtttgtaaccctgcaagaagttgtcctactggcgtgccaggatagggcctatagtagtcagcggcatggcgcttaagcagtatcaagtggcgcaagctcttcaggttcgacaagctgcttggtaacttttggaccatggaccacttggtatccagagtttgcagcttctgtaatttgcctagatcctttggaagctcttcgatgaacgtagatcgtatcccaaggtatcgcacattgcgaagattggcactgtgctgggcagttattgatctcgatgaaccatagattcagcacagtctatagcctgaaacaagacatcagcgaggca

SEQ ID NO: 52812 - DNA, 184 bp, Oryza sativa
caggaggaaagaccaggacaaaagaaaacacaaaaaccgcgagaggggaagcaggaaaaaggagcaagggaagcagagaacggagaaaagaaaaggacggaattaggccaaaaaaaaagaaggcgcctgacaaggacccccgaccaaagaaaaaagcgacccacccaaaaaaaagcaaagcgcc

SEQ ID NO: 52813 - DNA, 417 bp, Oryza sativa
  unsure (1)..(417): unsure at all n locations
ttaagcaccgcggctgcagctgcccttacactgtctattatgatttcgttcatctgctgaagntgccatatccagtatcaacccttnttttgtcagactacctttatgctttagcatcaactaacattcctaaagtgtttgccaatcacattggatgttggtacaaataacgaggcgctgctgaatgatgagttctacattggcttaagacaaaagagggccactgctcaagttggacatttatatttgattctgactattttcctaactcgctctagttatggcctgaattaaattgtcatntttgtgccatcaggagtatgctgaatttcttcatgaattcatgactgccgtgaaacaaaactatggggagaaagtactcattcaggtaacatgcctactcaaatggcttcattt

SEQ ID NO: 52814 - DNA, 453 bp, Oryza sativa
  unsure (1)..(453): unsure at all n locations
tcttcgttggcagtcatgtcttcgtgccgccttatgttanttttgatcaccggagggccaagagagagaaggcgatgatgatgctcgtcgtgccgaaggggagggcgaggaagatggtgatgcgtgagtagtgctgaaaattttgagggaaatgttcgtttcgctctgaacagtttttgagttcgttntgtttgaattgatgaattcacgtgggtgcaaccaagttagtgtaatgtttgttctttccgtgatgcatgtatccattgtcaaatagtgactgaacattgcagaggaagaacgagcgatgaaggtgaaaacgcagttttttccgtgctgtaaaatgcagttcagaatcagctattttcctggtttcttttgcaaatttcttttggactcatcctattanttcacaaagtaaatgaattccaaaagcatcgctctgcttggattatt

SEQ ID NO: 52815 - DNA, 413 bp, Oryza sativa
  unsure (1)..(413): unsure at all n locations
agcttcgcagaaccctcattgatggcggttgtgctctcaatatcctcttcgccaaaacctgggatgatatgcaaatccctcgctccgagctgaaaccaagcaatgcgccttttcacggagtaatcccaggattatctgcaactccactcggccagatcactcttccggtcacttttggcactcgggaaaacttccgcacagaaaatatcagctttgaagttgccgatttcgagacagcataccacgccatactcggacgcccggcgttagccaagttcatggccgtcccgcactacacgtacatgatgatgaagatgcctgggcctcgaggagtcctatccctacggagcgacattaagcaagccgtcacatgcgacaaggagagttgcgacatggcccanactcgcgagatg

SEQ ID NO: 52816 - DNA, 306 bp, Oryza sativa
  unsure (1)..(306): unsure at all n locations
actcacgctgaatcaatttgagntgaaaatttcnagntccattgnggtggcnaaattcaagccttttcagtgaagtgttcactacaccaagtctctagcactttctatcttttactgcccaagaactgtcatatgttcacattatatctttgttcgtcaaaaaaaatgatttggatccttgcgttatagttgttaggattagaatcagtggcgaagccacagggggtgcctgttctctactctcactctcttattcttccattctccattctctccttctcatctcttcttcactacactcaaact

SEQ ID NO: 52817 - DNA, 379 bp, Oryza sativa
  unsure (1)..(379): unsure at all n locations
taagaaacnacgccggaggggcaggggagcacgggggaagagctgttccaagccgacgaggagaggcgccactggctccggggcaacaggacaagaacgggcatccagagcccgaggaaaagcggaggacgggggtgccccgggggcgagaagagacagaccaaaccggaccagccactacggtgtcgggggcggcaaatccagagccccccgaccaccgacctcaagaggctggaacggacccctgaggtcgacgaagaagggcggggcggcggcaaccgagctgcacgggacagcccccccgccccaggggcgccaagccacgaggacgcgagccacgccccacggaagaaaccccccacgccaaccaaccccagaa

SEQ ID NO: 52818 - DNA, 361 bp, Oryza sativa
cctgcggatgcagcttgtagcttacatttccaaactttttgttctacttatcagcctttttaagaaaacttattaatcttctaatattgtttttagaggccgtctaatatttaactccacctactttctacttgtttaatacttaatagtatttaattatatcaagaaattattagaaactcaacatttataattaatcgtccaccggagacgtagagaacacacattcccaaattaacattacaggagattatgctcagaatgatatgcaagagaatacaatatttaatggaacatgaaagttgaactaactgctaacatattttataacatattcatgtttaaacacacactgaacaat

SEQ ID NO: 52819 - DNA, 471 bp, Oryza sativa
  unsure (1)..(471): unsure at all n locations
ntccctacatcacacgcgagatggccgccgnactgcggtgtgattcgngttgttgctgncgaacacaacaattttaacatcaggcagcttgctaatccttaccatgggtatgttggcttctttcctctctctctctctctctctctctcttatatatataactggagtatctcggacgcaacagcacaatcagtttatgcatattgatctaacctgtctcaatttgcattgttcgtacgccggctgatggagatatcctgtatgacagggcatggattaacaatcttgctctgctttttactctctccacgcttattggggcgtttagtactctagccaagctaaagcagacacggacagtggaccaatgtgtccagacccaaactagttaaagcaaccactgaggttgtatggattccagtcccaaactttgttaatcaaccgctgacgttgtatgggatatcatactct

SEQ ID NO: 52820 - DNA, 456 bp, Oryza sativa
agcttatctcgatcgagtcggctccagacgactcggttctatatccatctactccaagaccaccagatcaagacgatggggcctacccgccaatcctgatgaaactccccgacgatctggctgctgtcttcactgcaaggacgtcttctccccgtatgcctatgcggaattcggcttcaacaccgatccagcctagctccagggaaggcggcgtcatactccagccactcgacacggttttgacggatcaagtggaaggctacttcagctcccccggcgtcgactcacgaccaacagagatcgcaaagatgacgaattcggctaccggtacgacaaccgcgacctcgacgacttcaacgaaagctatgaagaaaactacacccctctctatttcgggcgcctcatggcaaataacgagacggaacaacaacgtgcagcccgagaaacagaagcacg

SEQ ID NO: 52821 - DNA, 419 bp, Oryza sativa
cttttcattccggtcaaaaacatcgcacccgtgtgggtttatatttgtctcaatattggcattaattgccaaaggtcgccgtgcgaatccagaagtgtgtttttgccacgaacgcactcaatacactccaatatgtccaaaaatcatgttttggtgcattttgaactttttcattccggtcaagaacatcgcacccgtgtgagccaatatatgccaatattggcattaattgacaaaagctcgccgcgcgaatcaagaagtaagtgtttgccacgaacgcacacaatacactccaatatgtccaaaaatcatgtgttggtgcttattgagctttctcattccgggtaaaaacatcgcacccgtgtgggccaatatatgccaatatcggcattaattgacataagttcgccgcgcgaatc

SEQ ID NO: 52822 - DNA, 385 bp, Oryza sativa
cttgccataaacgtgcggagaacaagagctgcgaaatggcagcacaatatagcccaacaggcagaacgtatacacatgtaatagtttttttttttgcaaatcggaagcacaatgtagccccacagtcatgatgcaatcacatttgggcacaacatatgaaaagatttgcattaacaaacataatggttctggatagccatacagccagcctggttctgatagcaagcatatttatgaagtcatagcttcattacagccagcgtgtactgaaacaagagccccaaatgagaaactaggccaaggcagcttcataacctcataacttaagaaacagcaaaatgacattcatgtgccatacagcactacttgaccggcacctccatct

SEQ ID NO: 52823 - DNA, 390 bp, Oryza sativa
  unsure (1)..(390): unsure at all n locations
ggaatcatggagctggtgacaggggcgatggngagcttttcctctaacttgtgagctgctcaaggacgagtatgacctgcagacaggcatgaaggagaaggtcaagtctctctcacgggaactcgagagcgtgcacgccgtccttcgcaaagtcggtgaggtaacaccagagcagcttgatgagctggtgaagctctgggcacgcgatgtccgggagctgttctatgacatggaggacatcgtcgacaccttcttggtgcgtatcgacagcttcgagaccgatgaccggtctgtgcttaagcacctccggaagaagatgagcagactgttcaagaggaccaatgatcgtcgcaagatcgctggcgcgatcaaagaaattgacatgaaact

SEQ ID NO: 52824 - DNA, 450 bp, Oryza sativa
  unsure (1)..(450): unsure at all n locations
agctngatcaactctctggtgggccgattctttctattatatatcggctttaagctcgcaagattgatcttatagctcaacttgaagaatgcaatgccgagttggatcttgaaaagcaaaagctagccaatcttcgaagtgctattgaagaacataagtctagattgagatcggctatcaaaaatgtggctaacatgatcaagtccctcaaagtcatctcttgaaccgacgcccaagacatccaagccatcgaagaagtagatcaaattagacaatgggctgtgtcggctatccagcgctacttgtctggatgattggtcttgtaataggatagctcattttgtaatcggctaagatactntgatacttcctttggtattgaactactatgccgantaatagatcttcttaatttactaagttgctcaaaaatgtgcaacttttgcatct

SEQ ID NO: 52825 - DNA, 337 bp, Oryza sativa
aaactcacctttgtgcgggtataaaccggtacttatgtatcgcgtgtcatgttcttgcatgatcataattccgcatcatggggtaaagagacaaactctgcagaagtaaaactaatccattagccatgctcgcggtccagagcgacgggcggatatgtattgagtatagacttgagtttattcttctaaacgctgaaatttaccttcaaactgtgatgagatttgaaaatgatctccctgctgccatggaaggcaaagagatgcatatttatacatgattaatgcctacctcgatgcccaatatgtcaagtacaagcttgctgaaacttaattgaag

SEQ ID NO: 52826 - DNA, 468 bp, Oryza sativa
  unsure (1)..(468): unsure at all n locations
catgcaagctcgatgaagagatgagaaaggttagctttatcttatatattcttgcgcgncaaacgatgncttccattttcagataataaaacgacgtcattgatgcaatttttatgttgtaatgaatatgaatatggattgaagtatatgttataaacattatatcgaactgagatgctatggtcttcagttcttcacataagaaacacttgattcttcatattctgtcataaaattctattattaattactaatagccataaatcaagtttgatagttcattgtgtagtggtaggacatcttgagtgtagcaacaagttggatttctttccatgccttttgtgcttggatgctttgttttgaacacgaacgaattttttctttcagaatatatanggtatctctggtgagattcttacattngaagcattccatttaggaataaaactcgtttgtgcttacacctat

SEQ ID NO: 52827 - DNA, 242 bp, Oryza sativa
actagctcaacacatatttacggaggagacagatatttttttttctagacgtaaaaaaaggcttataaaagatatcctctggctatatttactaaatgaggtgttactgacgtaagacatacgtctgcatgagacatacattctaccggtctgaacagactgaaaaggaagtgggggaaagcccagacggttgaccgagggggaccttgacatgggggggggtttgcctctgaaggagggag

SEQ ID NO: 52828 - DNA, 425 bp, Oryza sativa
  unsure (1)..(425): unsure at all n locations
agcttcaatcactcagagggtattataatcattttcttcttggtcaaccaaacctacaaagctccagcatattttggaccatatagcttcatagcaagcacatattttgcaagtatggcgttgcttacgtctgcaatttctttagtttgctttattttcaaacattacataactcattcatttcaggccccacgggtaaaaggtcgtcaatgggcaaaggtgcaataatcggaatagcggatgctggtttctccttcttggtggccttatcctagtagcaatgtatgctctaaggcagaaaaaaatagctaaggaggcagtagaacgaactactaatccttttggtaatgtggtatttcatcattcagaatccatccaatagggaagtgttaancatgaatgctaatctgtgctagtgaatgctc

SEQ ID NO: 52829 - DNA, 399 bp, Oryza sativa
tccatccaagaaaacaacagtgaagcgcgagattctttatccatagtggaacgaagatttcaaatttgttgtgacagatcctgaaactcaagaactggaaattaaagtcttcgactgggaacaggcatggaatagctttgttttactattcttctcttgtgccatgttaccaaagactgcagatttagttctctttgtatatccaggttggaaagcacgacaagatgggcatgaacaagattctgttgaaagaacttcccccagaggaaactaaagttacaacctataacttgcttaagaccatggatccaaatgacatacataatgagaagtctcgtggtcaaattactctggagatgacatatataccctttcaggaagacgatttagagaaagatg

SEQ ID NO: 52830 - DNA, 452 bp, Oryza sativa
agcttcctagaagattcacccaacatcttctatactgtgaccaatagtcaagctcacaaaggtgacttctttcaagaatgctctgcaggagcatcttcgctaattaaagccaacagaactcattaaggcatagccaatctgccttacagctcacaagagtacatgcatcttcacttagagaaggtatagaatggtactcttctgtagttaactaatggcttgttcttcccaggttctaattcacgggatctccgatcacatagactgggttaccaccatagtataactcatatgggtctcaaacccatctccttcgatgcattgtctatcacatttcgtgatagtctcttcgtgaagggaattgccaggtttctagctggttagatgtaatccaatggtataactccggagtttctcaatttcctgacagacttcaatcgtctctttacatg

SEQ ID NO: 52831 - DNA, 308 bp, Oryza sativa
taaatcttatccatccaacttgtatcgcaggtcttcatgcttgagcagcatctcagaaactacaatcagcagcagtagcaaatgacaattaattaacaggctcctgtaccttctgcaaggcgaggtactcgtcgtagagctggaggacgaggtcgaggttggcggcggagttgccgtcgcggatgttggcggcgacagcgttcgtgttctaccggatccacttgaagtctatcgccgcgctccactgcggatttgcggcgccgtcacccgcgccacctgcaaccacccatacacccacagttcataac

SEQ ID NO: 52832 - DNA, 422 bp, Oryza sativa
  unsure (1)..(422): unsure at all n locations
agcttggtcgatagggacgttgttctttgtttttctaagntatnnaaaggggatgtatggttgactttntatatatcctggctagtctggatcggtacactactacaattgtcaattttacatgcgtctaaaactctaaattgacctagcagagacgcggtgctgaccacctctaacaaaatggttgtgcagatgttatatatcaaatgctagctcttggaggtcagcctacgggaaatcacatattcatatgcgattccttaagacgattgccattttcactcgagaacctttacaaaacactataacccagaaaccctagctcacccatactccatctctgctcagccgcaacaacttccatcgtacatgagcccaacccctcacccgccacaaccactccacaaggtcaccatggatct

SEQ ID NO: 52833 - DNA, 401 bp, Oryza sativa
  unsure (1)..(401): unsure at all n locations
agagaacaccagcaccacatgcaatatttgctaggcacgccaagangccaagaaggagaaaatgtaggctccactcagcagcctaagcagaaataaaaaaacaaagagagccaagcacaaacatactgggggaggcacaccagaacaacaagaggcaaaacacaccctagcgggaatcctctcacaaagaagactcttgaaagacgctttgtgcccggggagacaccactaaggaacacaggatggacagggcgccaagagacaaggacacaaactactaaggtggagactggattactgggactatatatagaccctgttatatcggacgtctgacgctaattagaagattacatgagaacaacgacaaagcccatgccataaccccggactaaatcgcg

SEQ ID NO: 52834 - DNA, 301 bp, Oryza sativa
agctgctgaaatgggtggatttcctctctgtgccgactggttttatagggtacccacaacggttaaaaatgacatgtgggaccactagatgttaccctaccaaaaatggcaaatagtcgttgcctggctggttcggccgaacccaccagtgggttcagccaaacccctggtatgcccaaccggccccacttttggccgttggattccaacggtcagcgcgggcctggcatagtgaattttcgctgaaaatattattttggtctgctctgacaaattcattcgaagaatttcctcaaaattc

SEQ ID NO: 52835 - DNA, 452 bp, Oryza sativa
  unsure (1)..(452): unsure at all n locations
tgtgagaggcataagaaaagatatatatggtgagaagtatttcaacaacaagctgaagggttcatctcaagcgatgaagttcaaggagaatcttacgagggcttttgatcaagtctatgccgtatttgagccatctagtgatgtagacggtgagagtggagatgactataatggaaagaacatctccggtgtntgcttcatggcgcgtggtgaatcgaacattgagtatgaagatcatgaggtaagtgcttttgaagaaactataaatattttgagtgcaaaataatgaagtgtgagaagatgtatagacaacacgaatctatcattgaatctcttaaatctgaaattgatagattaaaaactcttattcctaatgatgatgatggctcaaattgtgaggttttaatgactgagatttcaaaattagagacgtaatgttcatatgatttgaa

SEQ ID NO: 52836 - DNA, 327 bp, Oryza sativa
ctcggacccaagtgacgggctgcaactgaaaagcacagaaagcttggatgtgacccatgaggcagagaagaagtcatgccaaatatacagaggaaccacgcagctcaaaaactgcaaccaagcgggccgacaaagccatgcattcttacaactaaaacaaacatgcatgatgattgtaaaaagggagcccaatgattaatgacactttaagcgcatgcacacttacatacacacaacaccaatgcacgataccacaagacactggaagagagcaacagaaaaatggataaaataaaaaacatgaccaattttactgagagcccacga

SEQ ID NO: 52837 - DNA, 464 bp, Oryza sativa
  unsure (1)..(464): unsure at all n locations
agaacctcagctngaagctgagtgccacagcctttggaagatgatttttcatacttctctggctaaaacaactcttatgttgataagagtcaaccacaatctattttgcacatactatagttggctgacaaatcaatagtccttcaaatgcccattttcagctcactgatagttaagggcctgctgttttttcccctgcaggggtggttgtttcaactgaagagattcagtcaatggtcactgatatcctgaaggaaaacatggaagccatagctgaacagcgatatcatataaatgggtcgctctctgcttcattttcattttactttgcaattgatgggtttgtttatctctcgatttgcgatgttcggaaagctgagcatcaattgctcctgactttcattgtttccaactcggcagcttgtgcggacacggtaagaataggcaccccctgcggccatgct

SEQ ID NO: 52838 - DNA, 443 bp, Oryza sativa
  unsure (1)..(443): unsure at all n locations
agctngcatagcaaataagggtgccagttcctttcttttgtctttttgccccaacatcaatgaaagacttaccttccaagtccagatctagcagtgaccatcatgcatatcttcagggtgatgctctaaggagggtttctttctcttccatacgtaggcctcgggctcttcttgaagttgaccttccttcatctggtgatggttctcatgatcagaagtcttctctgaggcccctggagaaagaaccaatgctggcagctagagtcactgttgaagatgccatctgcctacttcttgagggggatgatattgaccgtctattgcagcctaaccaggcacaagataacatgtttcaactgaggcgaagacagcaggtcctccttgaagtctagctactcacttcagcttgtgaccctcttggccgagctatcaaccattcatct

SEQ ID NO: 52839 - DNA, 462 bp, Oryza sativa
  unsure (1)..(462): unsure at all n locations
tatcggcctaaatgagcaccttttattaacaatatacttttttttatattcgtatgcaatagntagtggcacatctacattgcaaaagctataagaaaataatcaatgtcaatgtcaagttgcaatgtgaaagttttctgtcttatgtctcagctcatggctattaacagggataaagtagctgcttgtgctaagcacttttgttggtgatggtggaactcataatggaatcaatgagaacaacacgatcactgatgaacatgggcttctatgcattcacatgcccccatattatgactctattataaagggngttgctactggtatggtttcctattccagcttgaatggtgtcaaaatgcatgccaatcatgatctgtgtactggctacctgatatccaaattgcatcttagagctagtacttaatataagccactttattaaaatctctcttatgtgat

SEQ ID NO: 52840 - DNA, 420 bp, Oryza sativa
  unsure (1)..(420): unsure at all n locations
agctntgtgccagagtctccgacatcatctctctgagagctgcccgcctagcagcggctgcgattgtcgcgatactgcaaaagatcggctgcgatggaaccctttgtggttcaactcaggttcgaacaatgcgaggcgtgcgaagaagaacggtggtcgcgatcgagggcggcctcttcgaaggctactcggtcttcagagagtatctgaatgaagctctagttgagatccttggagaggagattgcagccactgttagtcttagggtgatggaggagggatctgggactggtgctgccctccttgcagctgcatattcatcggctaggcagaagaactccgagtaggcatgagacacagatatactctctccttcctttnttatatgacgttggttagttcaaaaataaactatacaac

SEQ ID NO: 52841 - DNA, 463 bp, Oryza sativa
  unsure (1)..(463): unsure at all n locations
ggtatgttgtgaataaagaaatttccaaagtattgggtatactctatgcgcacactgctttaacagatgtgcttaagtccctagaagacacatggtttcaccacacctggaaatatatggcatatgtggtgtaaaatctgagtaaataaactcataaaggatttaccaaccgcctgaaaaatgaccacaatatataatcagcctaagccataatattggtcaataaaaatgcacacttacgtggcaaaaagcaatgatattgtatccaatcaattgcttaaaaacccaaacagcaccttgacttatatataaaaaagtcagcgggacagctatataaagttttactgtttgacaccttttaagatgcattgtaccaactcctaanaagttaagtaactgcggtataaaaggaatttaaggtattgngcacttgatcacgcgcactntggcctaagcaaaaagt

SEQ ID NO: 52842 - DNA, 259 bp, Oryza sativa
gggcgaaaaggaaaaaaaccaggaactctcaaggagaactcataagccggggcccacttagccagcctccccggctggacccacaaaaaaaaatgcgaccatcgcacaaatacatctaccgatctagaacacgccacagcttgccagcccacccgcctgacaccaaaaaaaatgctaccctataccaactaatctaaactgatcttgaaccgcacaaggaaagctataaccctcgacacttgaggatataaagaaaaac

SEQ ID NO: 52843 - DNA, 307 bp, Oryza sativa
gtcaacggcgtcatacactacaatacgaaggtaccatctagcaagaaatccaaaagatgagtttggcacgctgcggacaagccttctactgggcggatgggaggatcaaacgttttccaaatgtgctaccaggcgatgatgacaggacatcaaagatcgctacaagttctttgccattggctaaagcagaaaagacgcatgtggcggtccatgcgatatgcaccctgagtaagaaaatgcaaaccatgtagcgaccaccaatacatggtcaacttattgtaaaaaaaaaaccggccaggcagaaaga

SEQ ID NO: 52844 - DNA, 439 bp, Oryza sativa
  unsure (1)..(439): unsure at all n locations
agctttctccataattcagaggcatatttcttttcgtctggcacaagcctaatcttcatagcaatcaccatccgacaaattatctgcttctagaggattgggaaaaataaagcaagactgagtacaaccaccgtactcaacaagtcataccatggggaaggtataatgcaagggtaatcaaaggaatggctcataggatatttgtagtaaaagcagcatttataaaccataagttaaaagcagtaaaatattaggtaattaagcagtattaacatcatcactgtccaacgataaaccatgttgcgacaggcccaacccaaaccacctgaactacaccagttcattcagtcaaattattaaggtgagactaatcacgaagagctgtgtgaccgcccaataaccgcggacacngctatttgaatatgtttactctgatcat

SEQ ID NO: 52845 - DNA, 408 bp, Oryza sativa
agctatggcaggtaagaagagcggagagatttgttcctcttgcatccatggagggtctgtcacataccctaagtcagggtgaggaagaagatgctgaaagcaaagcagatggcgatgcatggtgctcagtaccgactgccagatagcaactgaagcctctctactgtcaagagctcaagctcagctgtgaccaaagcattttccaaaccaccctctggtgcccccattagaaaaaaaataaggttggatactgcaagagcagagcattttggttgaaaccgacccacgagaaacgcaagaataagatcgcataatgagacatcctcttcacctgacaattacaagacgatgggctaatggccaaggttggacacgtcttctacagagacaacacaacagataccagct

SEQ ID NO: 52846 - DNA, 440 bp, Oryza sativa
agcttggaagccactcattaacaaatgatgtttattgtttctatttagcaggttgacaggaacatgcgtccatttatggtgttgctaaatgaagtgcggttgtcatgagaaatcattgcagaatggccaggtagatgcaattattcgatcagtgcacagaaaatggaggcaatgctagggcataatttcttctaactgtttttccattctttcccctttcgattgtacactcatggtggacacatatatgtacagttcagatttataagttgcagctatgccttcaatggatgaaagtgggcatatatgtatttttttagttggttttacagtgagtgattaattttcttgtgcttggtaccaactaacaatatgcatgtgaaaaaggtttacgatagggtggatttactccaatgctgcttgcagcacataatttacac

SEQ ID NO: 52847 - DNA, 73 bp, Oryza sativa
aagaaactcagtacgggcggcacctccggtacgccatttatttatttttggcaaacgcacgcggctgttctgg

SEQ ID NO: 52848 - DNA, 434 bp, Oryza sativa
agcttgaataaaggttgtttgtttgatcttctgtctgctcgctaaagtgtggttcaactcgctcttgagtcaagagcttgctctttctaagtagaaatcttagctccttgcttggaactaagacttcagaggaattgggcccaaagcttctaacgctagtgctagaaggttctagaacatagactagaagctccggcctttactagtccattgtgaaaatttgataaaattttcaagtatcacctattcaagctccttccccctcccctgtaggttctaggctacatcacataacatttatgcctgatgtcaccattgaatgtgcttgtgcacgtatcccttgaccttgtcttcttttacagccaaccctccatccccttatctccctctatgtcgctaggtcagatcctctagccatgcctcgccaccctagc

SEQ ID NO: 52849 - DNA, 380 bp, Oryza sativa
  unsure (1)..(380): unsure at all n locations
agcttcatccatgttcatagcatgtcttatcttctcaaggaagaactcctgccatttttcattaagataatgctaaaacaatggaaggaaatttttagcaaaattaactcatgaaaatagtataggatgctaaatatacaatctgtaatagccaatgatggatggtgaccaaatcgaccttgagtggcctattcatccataatcatttttntattcctagagcacctcttgcaaatcatcaggtagtgtgcttgttcattaaaactgcatccctctacgaactattgattgtatggtaaatcttcctcatcaaataaaactttacacacataatgacaaatattttcattatggtatccaaaaaaaaaaaggtggggggg

SEQ ID NO: 52850 - DNA, 267 bp, Oryza sativa
  unsure (1)..(267): unsure at all n locations
agctaaaccatccaccggcatngaaagaatattgtaatatataaattaatcgcagaggagcgagagagcgccgcgctcatcacacagaggcgcgtgagccatcgaacggccgaagggagcagtcaaactggagctacttcatgagctccgcctacgacttccacaccgccgggtgctaccggcgagccatctcggcatccgacgcggcggcggcggcggcggcgacaaggcggagggctatcaaacagaagcgacgcggaggcaaac

SEQ ID NO: 52851 - DNA, 439 bp, Oryza sativa
aagcttgtgcgattggcttctatgttgagcagagtacgacatttatttttttctatttgtcacgcacgtagtgatgggatcaaatcaaatttgcaaacttagctactgtacaattttctgtcaattgtggttcatataaaatataacaaacatgctttttttcttgactctccgttgagaaaaatatgatgtcattatatatccatatgcagaacaacttctatcaagggcgttgcctcgccgttgttccttccttaacgaatcgctggcgattatccattcccgtatcacctgcaaacagctgctactgtcccttactgtatctcattcccctaaatgaaggtacaaccagtttcttcactattcccttaactcctacatatgggatctgaagattatagattcttcataatggtgttcctatttgcgatgtccagct

SEQ ID NO: 52852 - DNA, 410 bp, Oryza sativa
gcttcgaatcttctgtgctgctggatttttatttgcttgtaaaggagacggcgccgagtacttcgatccaaccatggtcgacggagtcccagtccggcaatgtctggccgccggaggatgccattgctatgatccggccggtggggctgttcgacatgtcgtcagcttcctcatcgtctgtcgatgacgacgtctcggactcccacaacgccgccgctgcgtcgagcgcgctcgtcggagacacccatgtcgccttcacgacttctttcttgagaccgcatgactttgagacgaacgggtgctgtagcagctgcgcacgcgtgggccggtcgccggcgcgccgttgcatgcaccggcgcaagaagatcttctcctccggtgacagccattgcggcaggtccggcaccggg

SEQ ID NO: 52853 - DNA, 446 bp, Oryza sativa
  unsure (1)..(446): unsure at all n locations
ntgaacctcaattgaatgcaaactgtgattcatttgttttgcttggttccatgngcancactttccaatggaccaaggagcgtgatataagtgtttgaagttattgtacactgctccttgattgtaattttatttcctgcaaaaggttagtggacaaaaaatactcgaaacactacaaagattttatcgtagcctcaagattaattgttcacatccacggtaaaatgaaattggattcaaaacttaagaagcatggatcccacaaatttgccaacattttatttatttttcaagagactcttttttttattctgaaaacacctttttttttcaaatttttattattcaccaaattttcgtttaagcacaactcatatagggctaaggtaaatttgcatgaacatgctaaaggagctattagtaatatacgcaccgcgcaccttgat

SEQ ID NO: 52854 - DNA, 54 bp, Oryza sativa
  unsure (1)..(54): unsure at all n locations
agctngtatcaacttgaatagaatatcggactaagactacgaggcggctgggag

SEQ ID NO: 52855 - DNA, 465 bp, Oryza sativa
  unsure (1)..(465): unsure at all n locations
nggaagattaacaggaacacatcttagagattaatcttttatcttaatttaaccatcgtgcatgcccatctttgtgagactgacatatatataatcgtagtaaaaacattgtaaatggacattaggaatttgtttcttcacgatggcgtatttcgcctaatcaatgtctagctgcataaatcgctgtggtggataaatgtcaagaggactttcaggatgagttcacgaatctgcgtagagactagaatttggatctacacaataactcaactgtagaagtccctaacactgtcatgacggctttactgatacttctcaatcctaagatccaatatttggtacctatgactgaagcaccaatgcttctatgcaggctggacattctatatngcttctgttcagatgatgattntcaccaacaatattactgaacgactactgangaatatagatgactcgttatat

SEQ ID NO: 52856 - DNA, 422 bp, Oryza sativa
agcttgccgcgcgaatcacgaagtgatatttttcccttttgcacccaacacactccaatatgtccaaaaatcatgttttggtgctttttgaactttttcattccggtctaaaacatcgcacccacctatggcaatattggcattaattcacaaaagttcaccgcgcgaatcacgaagtgattttttgccacgaacgcacccaacacactccaatacgtccaaaaatcatgttttggtgcttttagaactttttcattccggtgaaaaacatcgcacccacgtgtgccaatatatggcaatattggcaataattgacaaaagttcgccgcgcgaatcacgaagtgattttataccacgaatgcacccaacacactccaatatgttcaaaaatcatgttttggtgctttgtgaaatttttcatt

SEQ ID NO: 52857 - DNA, 392 bp, Oryza sativa
  unsure (1)..(392): unsure at all n locations
tgtcaagtctactntaaatggacctagcctcatgtnatatgatttctggagggccataatcttcgttntactatcgagtccttttctgtccacggtgccacgtgacctctttgggccgaataggccgtgtatcaagttgggtccattaaggatgtgtcctatggttggagaacaacctcagcactggcctgtggacatcctcctcctcttcttatagctctctccgccgccaagaataatcgggttttgtttagatcaaagtataacatcgttgctttgctgagttcatcctgtgatcggntagatcgccagattgcttggtactgaaccccacttgttacttctgttgatcaatccatatctttgatcggaaataagttgcttgatcatct

SEQ ID NO: 52858 - DNA, 464 bp, Oryza sativa
  unsure (1)..(464): unsure at all n locations
agctttgaggttgatggcattaagttataacttggttatatcacagnatgtgactcgtaagtatagaaggcgcggcaatggatgtgtcacctttatttcaccaccaatatggcatctaactaaactcaaccattcaatattaaagcattgtgataacaaatcttgaagatccttctgagtagatcgtattaagtgaaggtcaagattccttaggtttagaaaaccactgaaatggggaggtagttccaaagatgcaaagctaagctgaatatgctgtagacgggagatgcttccattgtcgaaacgctcaaagggaaatctgtatcgatcaagaagaccaacaggatcggttggcactaaatcaaaagccattttttttgtctgtgatgatacaacaaaatcaaccaaaccattgaggtgatcaactagcttgctgtcgaattcatactttacctcaaactctt

SEQ ID NO: 52859 - DNA, 203 bp, Oryza sativa
ctattggggctcgggagtggcggacgtggccgggtgcatcctatttcgccggcgacgtgggatgtcgagagagagagagagtgggaggggattcaaaattgaatccgccccttgcgagcgcgcgcgcgagagcgggagaggcggtggagagggcggtgatgtgggtgcgaagtgcgggcgcgcagtggacgcgcgacgtggag

SEQ ID NO: 52860 - DNA, 462 bp, Oryza sativa
  unsure (1)..(462): unsure at all n locations
tggcccaagcttctcaaaaacctgacaaaattatcgttattcattgaagaaaaattatctttgatgtgtttccatatcggcaaacctttatgagcaaagaacgacaactgttttataagcatggaaatcctattcaagcacattaccatatcgtacatagcagcatgtttcactgcctacgagcaaaaaggtgaatattcggagggccagcaaagtaaattgccaacaaacaaaactttgaactaacagggaaaagtggaatatggaatattggaactgtaaatgcgcatatcaacaactgacattnggtatagaattttagaactagcataaatgaatgaaattgagacttacaatgcatatatgattgcgatagtcaaaccatccttgaatctggacacagctggccaagtaggaagactgatcatgagagaaacagaaaagactaagaattttgggatc

SEQ ID NO: 52861 - DNA, 371 bp, Oryza sativa
  unsure (1)..(371): unsure at all n locations
ctccataatcccnccttgcttctgtgtaggccttcatttgagacactacccgctttctcttcttctccaaaacagaacatgggtaccatatatattataccatgatctgctacatgtttcaacatagatgcacataccaaatttttttggaaacgactcaagttagcactgccttggcggtgagatggccatgtcatttcttccttcgcatctatgagcatgtgagctagccctgcattcaggattacaccactttaatcgtatcaactcccgccacgcttttttgtctttaggaaccacatggtttacctatggagaggccagatctttatttctatcttgacgcgggatccaaccaatattattgaaca

SEQ ID NO: 52862 - DNA, 401 bp, Oryza sativa
  unsure (1)..(401): unsure at all n locations
agctnggattcagctaacaactgttctctttctttttgtgacagactccttataatgaaaactacaggcttggagaagattcacaccgccgtgtccaagtccagttgtcccctgatgtggattggttcgctacctttgtgaaatgctcgcaggaaatgaatagcagcaatgtcatgtacaggcctgtggcttgccggagctgcaactcttctttcgtctatgtgctaactggtctgggatcttatttagctgagaaccttgagccttcctgtggatacctggcaatgactcctttagctctgggtggtctagagaattggcgaactgctactgcggctgcgacactggaggatgtaaattatgaagatgttgtcagatccatgagtgaaagattcgctgtt

SEQ ID NO: 52863 - DNA, 438 bp, Oryza sativa
  unsure (1)..(438): unsure at all n locations
agctttcatcttgtaccggaanttgtcgattttatcttaactaaaaggaccttgatgtcgcctagaggggggggtgaataggtgttcctaaaaattatcacaactttatagtatattagagtgatgagaactttcaattcaaatcggaacttccgatatgggattggaagttccggtcttaactgaaaagttcggcggataacggaataaacactagctatgaacttgtaactcgaacaaacaaaatgtatatgaaacaaaagattacaaacaaggtatctaaacaagatataaggtcaccaacaatattaattaagcatgcaagtagatcgggtcaaaacaagctcaagcacaatatgagagatggtaagaacgagcaaaccaagagaggagacacgttgatttgtttcccaaagtcggatccacggatcctacgtc

SEQ ID NO: 52864 - DNA, 407 bp, Oryza sativa
tttacctatcacaacgtctagttatactatggcggattttgaccatatcgactcgctgttaagttttcgagttccgacgatttttgcagtacaatttcatgcctcttggtgacacagtgttagtgtcagaccgttccctgtgctgccagtttatcttgtgtatgacaggcactacaacaatatctgttttttaagacaaaaagagcctcgtgaccaagtacaaaaatgtttatttctaaacttgggccttacagtgatttggtcatagagtttgttatagaggcagccgggctggtccagcatctgcttaaagcctgtttagttccaaagtatttttttccaaactttctaactttccatcacatcaaaccttttatacacacacaacttttatatcatatcgtacc

SEQ ID NO: 52865 - DNA, 406 bp, Oryza sativa
  unsure (1)..(406): unsure at all n locations
agcttgtatttaggacgagatatggcgttttattactcngccccttgccacctatgttcaatgggatcacgagggagaccatgaaacaaccaacacgtcctcggagcattataatctatgatagaaggagcaaggtctacaccgttcggcatgatcccctgggcataatttatgggctgcccgctttggctaacatgagggggcgaagattctgtggtttgcaaaacgaacgaaacttgaaaattggggaacacatattagcatcggctcaccaaagtggaataggataaaggaaaagaaacacttacttgcggaatctgatccgggaagatggcggtcatgtacatcgaagccgaatggtggagagatgcttcttccattcaaccaccagtgggagaagtcacac

SEQ ID NO: 52866 - DNA, 472 bp, Oryza sativa
  unsure (1)..(472): unsure at all n locations
gacactaaaaactcagcttactgtctgaacctttaagattattgtaccaattcctatatagtcgagttactgcggtataaaaggattctaaggtattgggcacttgatcacacgcactttggcgctaagcaaaaagtgcctaagttcctaaaagaacgtgacaggccacacctgaaaatatgggctgcagacatattaagcctagaccaaaaaatatgccttcgacaccctttaaaggatgacgcatgtaacatgctctcgagttataaatcttccgggtgatatagaccaggtgtagctcatatgaatagcttctgatctgagtgattattccttatgagatanctcagaatatactataataattgaatcaccactggcgcaagtattcgggtgatagcccttacggtgaataataattggtccagtctttgagcatagacaatagactcatgactatgaatccatgtgg

SEQ ID NO: 52867 - DNA, 330 bp, Oryza sativa
  unsure (1)..(330): unsure at all n locations
agcttctagcagnaacttcttattagtgaatttctttanctggnaggaagcttctagcagtagcagctaataggagaatttccagcagcagaacctccgcaaacaggcccaaagcctcaaactattcaccatcgtccggaatgacgccttcagtcatacaggctttacagctccactcttcgaatacgtaaagtggcaaatacgccttcgatcggaaaaaggaatcaaacaagctcatcgtctccactctccacacatcatcgccttcgcttctcctctctccgccccacactgtcggaagtcggaagcaaagcggcggtaccgcgcgag

SEQ ID NO: 52868 - DNA, 445 bp, Oryza sativa
  unsure (1)..(445): unsure at all n locations
actataaaactcagctagcagatatactacttggcattttcgtgtngcctcttggtnggncatcgcggtttgcaaacacctgcacatcactacgccgacagcttaaaattagacaggtgtacgactaaaaagggcttaaatctactactgtttacataaggacatctctgctcgatcagctatgtactactggcagcattcagctacctccatctgaatactccatgctctcaaatcgtaacctccaacagattataggactcaaacagctcagtgactacagatgattcgaccgaagtcgcatacaaatgggtgtgagattgtgagagaatggtcaaatttacttggtatacgagtaaaataatctgaactccgaagcatgttttgaggagggaagaagtgagattagcaccgagaagagtgtagctttgcagagcaaggagta

SEQ ID NO: 52869 - DNA, 330 bp, Oryza sativa
cccactctgacttccgtgccctgggtgccctcccctggtagaacaccagcggcttcctcatccccacaagtgcccctcttcgtgccaccaccctgtccttccccgtggcctaccagtaccccgaaaccgaggctcggttcgtacgctgccccgtcgcgtatattcggaccctcaagctgaagaagtaccactcctttccgcccaccgacgccacctcttatcataaaaaaaacatataaaagtatgaatacaccaacaatgaataaccaaaacaattatctctaattgaaagataataataaagatatcacacattcctgtccacagcta

SEQ ID NO: 52870 - DNA, 479 bp, Oryza sativa
  unsure (1)..(479): unsure at all n locations
agaaacncaagctttacatcatatagcattatgtatagccactatcaatattagttatatantctcactggatctaaacacctctctcaggaaacacaaaaactacatccaactagatgacatcatcattttttccttaccacgacatacgcatgtgcaatgtaagaccgagatccggtacgctgctganactgaacattttcacggttcagttggtttttggcacatttgtcctgcatatgacagaattataaccaggagaaatacttactatggcaagtaatcgagctgaaagtcaccgtagagctccagtcttcccgtctctagtgctccttgattccttactctgcatacatcacagtgtgcatgtcttcaggtcagaagagtctacaatgcatattcaatcctacacacatgatcctatgtatccttaattaacaaacattgatatcgagtcttaatgctcccgaagatatgca

SEQ ID NO: 52871 - DNA, 447 bp, Oryza sativa
  unsure (1)..(447): unsure at all n locations
agcttgagctgaattataagaggctcnattgttctatttgtatactagannnangaagaaagtagagtagaagaagtcggaagaattccggagctgtcggtaatcttctcttatttcttttattctatttattactcaatagaattatcttcctgagtaatttagatttatctcttttattctatttatatctgggggcttgcaaattctatctgtaatcgtaagaaatatcaacaatcgtctcatgttacactcacgtagctatatttttatattatggacatcatgtatttatattgtttagcacttaatcatataataattacgatggtcattattgattattgtactattgttccttggattgctaactcgatgttttgttgattgcaaatacacgtaacatccaataatattaatccgtttccgaaccgattccgcaccgac

SEQ ID NO: 52872 - DNA, 424 bp, Oryza sativa
taaagccatgaatcccttttatgcatatctggatctggtttctgcagaacatacatataggatgagtaggtatctgatatgaatataatactcgagaaaaaatcaagtattttaaaatatttataaatatgtatttctcctcttgtcaattctgatttccccgagcagatgactctgtacgtttaaacactctgcccgactagtcatagccaccatgcactgggagtcggcctaagcactttccaaacatgcatatgagtgacatgagttcgtcattaatggaacaaagtttcacggatcggagtttactactcgggtacttttgcaattattaagagcagaaaataaattatcttatctctatgcttttgattattccgaataatacttagcaccttgcgttactcggtccatccaacgagcc

SEQ ID NO: 52873 - DNA, 443 bp, Oryza sativa
  unsure (1)..(443): unsure at all n locations
gtncgccgatcagagcaatgaggtgcgtcaccggcatttactatctcgtcttcccgcacggcagacgtctcggatcggcagcctcaacttcagcacccacaacctcagcaagattcactcctcgacccggaatcagaccagttgggagagaaccggaattcggcgccgtttggattcccgaacgcggctgatagctacttcaagaccgtctcaaccgagtcggcttccaaccactctgacgagatcgcatcttcttcaacgacaccagatcaagatgatggggcatacccaccagacctgaggaagctccccgacgagttagcgggcgtctccaccacgacagccgctctaatcccgaagcctatgcggaagccgcttcacaccgaatcgcctagctcagggaagccggcgcatcctccaccacccgcacggttcgcagacag

SEQ ID NO: 52874 - DNA, 394 bp, Oryza sativa
  unsure (1)..(394): unsure at all n locations
tgagccatagttcttgcgtgtgtatgtcttgctntcatgtgttcttggacaggttggagatttggtatgtgcaaggatattgtgcttttactggcttcctccccgacccagagattgcacttgattcgctctctatctggtatgccgcccacaccctgtttacctcatgatactcattggtcttgcagtatcaaatgtctgcttatacactactgcagtattcatatatatgtaactcacatcgctatgtattttacgcatgtccacatcaattactgtgaatgngacttccagatcatgcttggtttaagctatgcggccaggtgagtgcanatgatagatacacacttctcaatcccacttcattattctaactgttgcatgaacttattat

SEQ ID NO: 52875 - DNA, 471 bp, Oryza sativa
  unsure (1)..(471): unsure at all n locations
tagatctcctcatgatccagtggagattaccggctaattattttcttgattagactaatcaccctggatgatgacgtggactgcagcatgccacctcagttacttcgctctggggagcaagggggcacgtgtcttgctgccgttcgccgatacattctatactccaagtgggtcccacctgccggtacacgtgtcccatgaatatgtagcttgctgagattgctctggaagattagagcttaaaaaaaattagccaatcagtgactgacacaatgctactatatgcaggtgaagattangccatcatgagctaattaatcttacattttcctctgaacagatatgatttagtactatgcatgtctagactgttactcctaatcaatcaagcgtgtaattatcaacatatatgtcacatgtacagtaatcagaagctaattaagcatatcgtcattttactaattattatgg

SEQ ID NO: 52876 - DNA, 410 bp, Oryza sativa
  unsure (1)..(410): unsure at all n locations
agcttcatagagatggactccnacactcgtttgttttttgaacatccgagacatggtaatcgtgtttacttgacaaaacgacaaaggcaccttccacgggtcaaagtgaaagggcaagggaactatcgggactagtacatactgatgtatgtggaccaatgagctcaactgccagaggtggttttgggtactntattacctttaccgatgactttagtagatatggttatgtctacttaatgaagcataagtctgagtacaaaattcattgtgcaagacaatcaagtatctacgatctgatcgtggtggagagtacttgagccttgaatttggcaatcatctaaaggagtgtggaagtggtccacaactcactccaccaagaacgcctcantggaatggggtcgctgaac

SEQ ID NO: 52877 - DNA, 438 bp, Oryza sativa
  unsure (1)..(438): unsure at all n locations
actaagctggatccancgcccaacgagaatactttttgttttttgaaaagagaaaactgcgtctccattctaacaaaaaacatgcatacacctaagagtgcgaagcacataatgccatgcatactcccatatgatatgctttagatgggagaaaaagctattgacttaactaaaaatcgattctgaatatcgttcccttataatcctatgatatgctgacaatagctaagcttgactcatttgggcccttcatcctcttctcctccatcgtcatcaacagagctagacaattcaaggcaggtntgttcacaaattactgcggctatatggattatatacaacccatgtgaacttaacttgatgttagagcataccacatctctatcaactgattcctccgataaatggaaatccaaccgacagaaacgaaatactaac

SEQ ID NO: 52878 - DNA, 473 bp, Oryza sativa
  unsure (1)..(473): unsure at all n locations
ttagagncacctgcggcatgcaagcttatcagactcaatactctatctacccttgctgttccaagatataccaagatttcaaagaaaaattcttgtgggccagcatgagaagagaaataattgaattacgattctgactttctcctatgcttcgggtagttcttctgttccaaacaattggcgttctccagtttgatcccagaagagaggtgtgcggcacttctggccatataatgctttgaatatagccatatgcaaactggcttggtagctgttgttgtaagagaattcagcataaggcagactcttgtcccaagctccgccaaaatcaagcgcacatgctggcaatatatcttccaatatttgattgaccctctcagtctgaccatcagtttgcgggtaataagccgtactgaaattcaagcgagtccccaattcttcttgcaacttctgccagaattatgaggtaaact

SEQ ID NO: 52879 - DNA, 460 bp, Oryza sativa
  unsure (1)..(460): unsure at all n locations
ctcaagctaaataattagcctgagtgagatcttacaatataggatttatttttcgnancaagtaaatgaatgatagacatgatagctaaatatggcaagactggctgaaactccgatactatctctattagcagtcatgaagcacgctaaatattatggttctaaatattatttaataaatcaaacttaactgatgcacattaagcatgaagagaaacataagatctaatcactcaagccaatgaaagccttttcgagatggtggatatactatataatctaaatcgacaacattgtctaactctatcgggtgatttcggtgatagaagctagccgacaagatcagatagtcatatcgacctatattgtatagtatatatgataacacgacgatcacataaacaagattagagtgcctgagatgtagcactatcccagaacgaagctgcctacaagctta

SEQ ID NO: 52880 - DNA, 385 bp, Oryza sativa
agctggcaagggaggctaccttgttttgtgtttatgacaccgggacctcgtcgcttcggaagttgtccttgtcggctcgggattcacgtctgaaggacaagatttggccgcactaggatccttctcgggctcatatggcgttgatgtgccgttctccacttctgcaagaggaaccttcgacatggagtcatccagggttgtaaccatgacgctctctcatctggtcattgatggaccttttagatcggcaccgggtgtaaaccgagaagacaattttcccgactcgagttcacccaacattgtcgagggagaaactccttggttgatgccggggttgacgctgttgtcgactagacttgtgacctagtagtttaccctgtacacc

SEQ ID NO: 52881 - DNA, 467 bp, Oryza sativa
tcatcggaatttcgatcgatcgaggcgtatgtgggtcttggactggtgaggtggccagggacgaattttctttgttttggtttacttatatctatctatcttctatctattatatatatatactaaataaaagtccattaaacttcctataaacgctctcaagccgccacgtggcactcctacaaacgctcctagaccgccacgtggcaatgtctaattacatcgtcgattttcacttaatcggtggacccaataatttagaccattagattagattagatgtattatatatttaaaaagaaagaaataccttactgttcaccagagaaaagaaaacaaagcacatgtactccatatatccatatataggtacgtacgtagtatgtaaagaactaaaaacaatcaataatcttacctactggtcatcgtaaggaaagaaaatacacacacacttactatataaaaaa

SEQ ID NO: 52882 - DNA, 244 bp, Oryza sativa
gcgacaaaacagcagagaatcggactttgtctcacaaacccaacgccacggaacaccggaacatgcctggtacgaagagccacatgtcacgtaccacatgctacctgagtaacaactatcacgacatgagacgccaaagagcggtggagcaacacaactactctcgagcaagaagagcgcgtgagcccaagtgaaggggtgacatcgaaccaaacttgacctcagacaggaacaacaccaaggg

SEQ ID NO: 52883 - DNA, 155 bp, Oryza sativa
aggaaaggaggagacgagttctataaggggaggcagacagcagacgagcgaaggacgaaagcccccaaccgccgcaggagacgaacaggaccggccacgccaaaccccagcctggaaggccgagagaaaggaccggccgaacccgggcgaggccc

SEQ ID NO: 52884 - DNA, 411 bp, Oryza sativa
  unsure (1)..(411): unsure at all n locations
ggacttaatcgaagntcggggcttgaaggatatatctaggttttatttttctaaggcccactttgcgattcgtccatttgcttcgcgattactaactatatccccgagtgggaacgatgtgaccaccgtgaccgagtgaccttggaagtagtgagataatttcctaacggtaattaagataccatataataacttttgaacctgaggatatcttgtcttggagtctgccaaaacctcgttaacgaagtaaattggtcgttggactttttgaacatgggcttcttcttcatgctcaacaaccaggaccgtgctcacaacctgagaagtcgctgacacgtataacaatagtggctcttgcagatatggtgaggccaaaaatggtggagtagtgagaagtttcttgaagtcttc

SEQ ID NO: 52885 - DNA, 413 bp, Oryza sativa
  unsure (1)..(413): unsure at all n locations
agcttacctagctagatcaaaacattgtcttttattttactgctagancatgnctctaactctctattatgtatttgatatcttcaatcttcatattaatacatgacactaatcaagttggtgattttacacatatgtaaactgcctcaaagagcaatggatactatccatgagtactgatggaaattgtgaaagagcacatgatgatatctggacagtgtaacttgaaaaatatcatagtaaactgatatgtttgatagaaatgcgaagtaagaccattgctcactccaggatagatgccggcagttgtaatagctgggataccgcaatcttttgcttggtcatggaaaccctttgctctccacgaatagtctgtatcatcacaaacatcaatatatgccgtctgtaaaaaa

SEQ ID NO: 52886 - DNA, 354 bp, Oryza sativa
  unsure (1)..(354): unsure at all n locations
actcagctatctaataatttaataacgcctttttccttttttaagcagagancatcgaagagtattcaatctatagagctgcgcgcccaagtatagacatgtcctatatatatcgacatatttagaaaacgggcattaccatattataagaaacggtattttccgcgagaatacggtcaatacggaaatgataggtataacagcgaaactatttccattttcatttgcatattatataccatttccatttttgtttcggtcgaataccatttctatatggcttcggcggtcgaaagctgaaaacgaacgccggtcgaccggtaattaccggtaccgttttcaccactagcgact

SEQ ID NO: 52887 - DNA, 397 bp, Oryza sativa
agcttgcggctacatcacgccatgtgcagattgtgctctaatgatcaacttaactgttcgtctattgtgtgcccctgcagtaatcatgcgcttgtatataaaaggtcctgtactgtggagaaaattagtgaatagtgcggacaagtctcccaggaatcttgcatctttgcatttgcagctgcaagcaagggtgtcaacctcgttgcactgacacaattagctgtcataaatgggggagtttctatctgtgagaaggatcgctcatgccctcatggctgtacatcaagggtggaggagcaaacgaacaaggcacgttgacgtctgaactagaatcatttttgaagtcttgggcccgctttagtccctgtctaatttttttaaaagatacggacacaca

SEQ ID NO: 52888 - DNA, 414 bp, Oryza sativa
  unsure (1)..(414): unsure at all n locations
aactagcttaacatatttggatcaaactagntgtttttttattccctttttaagncctagcctgccaacctcttagaaacgaaaacaacatgttcaatattcacccggacaatcaccgggcggtcgcctctgttaccttaccgctggctaaacgccctaacaaacgattcccttctacatttctagtcgtcggacgtgaacttcagctacacggcgcaaaacagggagaagcaaaacagcaatcaacattggataatttggatgctaaagcatacctggtggtagcccctcgggtcaggcattctgtcgaacaggtggcatgcgcgtgaggccactcgtgagtccaagccagccaccaccgtcccggccgtcgaacctggcggtgagcgagcaagtcccctatccaccgcacac

SEQ ID NO: 52889 - DNA, 430 bp, Oryza sativa
agctttatgttcggcgcagtactttttctgtttcttatgagcaagaatggctctatcaatcaccatctactttagacatatcttctgaaactttcttcaaatccaaaagtccagtatcttcctacaaattagtgaattaggaggagctctttgtgccgaaaaagaaagagcagggcaatatttcaaacttgcattcgaactgcgaaatatttatacaaaggaggagagatcaagataatgcagcagggttggttatctaattggctagtcaaacatgaggtggttcataaatctttgggcttcgatcatcgaggaatagagactttgcaaataaaagcagaggattgggattccattgctgtcattttatatgtatatgggtacaattatttacgttcccaatgtgcttatgacgttgcgacccggggat

SEQ ID NO: 52890 - DNA, 415 bp, Oryza sativa
  unsure (1)..(415): unsure at all n locations
ntntcagctatntgtaattcgcgatataattacgaatcttgctacttctaatgttaggattgctaaaaggaaaatttgggaaaaggaacccattgtatgggaaatacttcaagaagttatgaagggacatcctgtactgttgaatagagcacctaccctgcatagattatgcatacaggcttttcaacccactctagtagaggggcgtactatttngttacacccattagtgtgtaaaggtttcaatgcagactntgatggggatcaaatggctgttcatctacctttatccttggaagctcaggcggaagctcgnttacttatgttttctcatatgaatctcctatnctccgctattggggatcctatttgcgtaccaacccaagacatngctatcggactttatgtattaacg

SEQ ID NO: 52891 - DNA, 87 bp, Oryza sativa
  unsure (1)..(87): unsure at all n locations
gaccnagagaaccagagcagcaagcaacgggaggggcggagattgaaaatcgcgcgacgcacgaaaaagagggcagaaaggggaaca

SEQ ID NO: 52892 - DNA, 428 bp, Oryza sativa
  unsure (1)..(428): unsure at all n locations
agctngagtacttgtttggtactgaaggatttgttcattagttgcttacgatgtctttcctcataggatttgggattgcccctttgtatgcccagatccctcatgatcgtgatgaagagaagtgctgggtcaaagtcaccttgaacagtaatcgtgaagatattccatctgtgatgttcgaggctggagggggaagctacattcatgcttgtcaggaggtggcaaggatcgccatatgagagctccgcgaaagttacaatgatcggttggccgacaccgagtaccgttaccatcctcgtcaaccccagggaagtgaccgtggcagctacctataaccggcagggattgagaatgatgctaccacaacgcatttggctgagacgctatgggctatggatgaaactccattgatatcggatatccctcaa

SEQ ID NO: 52893 - DNA, 468 bp, Oryza sativa
  unsure (1)..(468): unsure at all n locations
tatagaccactcaagcgtcagctaggttggttntgtcaccagagcaaacagtttttgagaatccggattgtacagagaatcggcgtcttaagccattgtacattaacggttatgtcaatgggaagccgatgtccaagatgatggttgatggtggggctgctgtgaatttgatgccatatgctacattttggaagctaggcagaaatgctgaagatctcatcaagatgaacatggttctcaaggattctggtagcaatccattagaaataaaaggagttttgaatgtggaactgacagtcagcagcaaaaccgtccctacaacattttttgtcatcgatgggaagggttcctacagcttgctgcttggaagggattggattcatgctaattgttgtattccttcgaccatgcatcaatgcttgattcaatggcaaagcaaacaagatgagattgtgccatccgacaggt

SEQ ID NO: 52894 - DNA, 391 bp, Oryza sativa
  unsure (1)..(391): unsure at all n locations
attctcttatcactatccagctgagataccaataagtcattatctgtgctccaattatacattttattcctcttttcagcatctactgaaggaatggatgggaccagctaataaaatatacaactataactgaagaaccacgggaagtagctactagaaagatttatccatccttttctgcatgaagtggaataaaggtagaatttcctgcccaccatgcatcttcctttntatcatccagttatcattgggtttcagtgcgaaagcatacggatgccactgtttctcttctttctttttagaaagatgccttcttcggccacttgatggatatgtcttatttcccatctttgctggtagctctttttctgacaatctttcaagatatgtg

SEQ ID NO: 52895 - DNA, 347 bp, Oryza sativa
gaaccctctgtgaaacaagataccattatctttaacatatctgaatgcaaaaaggggtatatgataatgcatgtctctccgccaactttagcagaactggcggcatgtttattaaacttctgatctgtaaaaatctgttgatgctcacacacttgtagaaaaatcgttttttcaggcgatcaaaaatcatcttttcaggtggaggaaaggtccacctgtaagcaaaggcctgcaaaaatcgattttcgtatactttccagtcacccacctgcgaagaagctctcgaggaacaaaataaaaatcgcctacacccccacccgcgcccctacccacctccggctgatcta

SEQ ID NO: 52896 - DNA, 449 bp, Oryza sativa
  unsure (1)..(449): unsure at all n locations
agcttcgtgaagacttcgagcaaggcangtctattctttatcaatcgctcctataangggaaaatcattattattttgtntgcaactcgcattattagaatcacatacttaacttgcttggcctcggtttgtgtgccaaaccgacggacctacccagaagtcacactaattcctgtacgctgtactaccctgattccttgtcgctccacccttgaggtacttcggtatccgtgctctctgagcgcgtatacctaatatcccacatacaccgttgattgtcgaaaacttgggaaatgggtttgtgaagccttcaaaacccgacatgtggtgtcggagtgttctaaaataaaataaattgtgacaactcgcgatgctggggttgagcctatgtggcactgacccgtatttgaaatttaagaccgaattctgtggaaactcattaacataat

SEQ ID NO: 52897 - DNA, 482 bp, Oryza sativa
ctatagaccactcaacgcttccaatgatatataactcactatttgataaaatatatttattaatattatataattaatatcaagatgatgcataatagtcaacttaaaaatatgctaataaataaaattagtattgtacagtagagtggatgtaataatatttgtctctaacatgtcttgccactgtaacaaccacacaagactaatttatgtgatgtctcaaatgaatggatgtataggaaaatactagtacttatttaatattcgatggccatggcttataggttatttaaatcaagtgtagccttatgattatgcaactaaaatataaacacacatagatgaatctttaacctgcttaggagaataataatagagctagatgtggaggaatcactaagcataataatcgacgcaataccatatagaatagcttatatatgcctaaattgataccacttattagtacccaatagaccagt

SEQ ID NO: 52898 - DNA, 431 bp, Oryza sativa
  unsure (1)..(431): unsure at all n locations
tgatcaactgtctgagggtccaatccagatgaacatttatcttttgaagctcgccagatcgatctaatagcttaacttgaagaatgcaacgccaaactggatctggagaaacaaaagttagccaaccttccaaatgccatcgaagaacaaaaatgcagacttaaatcgtctatcaagaatgtggctaatatgaccaagtccctcaaagtcatccctggaaccgacgcccaagatatccaagccatcatagaagtagatcatatcagacaacgggctgtgtcgactatacagcgttacttgtctggatgattgggcctggaataggacttatcaagnnncgaaacggctagaaagacttgatactcctttcggtactaaactggtgagctgataacataaccttcaatttgctcacaattctgaattgatca

SEQ ID NO: 52899 - DNA, 241 bp, Oryza sativa
ttttgctggaaaaaactgaaaatataacgtttgtacctataggtaaagaccttttctatattataaataaatatcgggggaagatgtatggcggggaccacaaatctcgatttctccaatggtaaaacaaaattttgctctgaaagattgaggtggatagaattttaaaaaagcagatgtcaacggctatggtggatttaggttgattcatggatctgcctctatcggtgaatagtccccg

SEQ ID NO: 52900 - DNA, 261 bp, Oryza sativa
gggacccaagcaccgcagcagcaacccggagccaagagcactacttatgcacagcccggcgcagggcgaggggaaaaggaaacgaaacggccacggctcgaggaaaagacacgcgaagccaagtacgacacgaagcgggggaaagcgcgttggacgaaaaaacgaagacaggggaacgggcgggggaagacggaggagtcacagtggcacccgggagagcgcccaaagaacggcgaatgacacgccgcgccaggcatcgaa

SEQ ID NO: 52901 - DNA, 401 bp, Oryza sativa
  unsure (1)..(401): unsure at all n locations
agcttctcaaacccaggagaggatttacatattttgctgtttgcaggctctgtgcagcattggtaccggtttttgtaataaggctatctgtttagccactgatctttgtgctaaaacctctaaatattcaggcaggattctctactattttttatactatgtgctccagtcgtatggttttgcttattctgaaactcattggtgggctggtttgggactcatctgtcaaaggaaacagctaagctgttacctgttgcacttgtgatataacctgtttcaatgaatagcaacagatcatgtcacgttctttgttggaatatcagaggaattaactctcctcagaaatggttggccctccgagataaaatngttgaaacctcatgtgccatcatctgtctcca

SEQ ID NO: 52902 - DNA, 475 bp, Oryza sativa
  unsure (1)..(475): unsure at all n locations
ggaccttgaaactcagcttcatcctccaacatcttgccatgcattttagttgatagagatcgagaaggaataaaagagtggtggtttcagcctgcagggctgcagcagcagcattttgttttcctccatttggtgagcttccttttcacccatagcgcctctttggaattccctccatgttgaacatctatagcaacgttctataggttgtccactccattgctgcagctagaaggtggctgcaactcaccccgagttcatctctcttggtttcggttgaaacagccctaggcaacgtctcttgccgtcagcccaagaccttgctccatctcttgccatcagnccgaggccttagtctctcacgaccctacgtccaggttgcttgcatgtgagcgaagaccggtggaagttggagaaaatgggagtggaaatagatatcgacttctgagatagctattgagctgaaagaggtatg

SEQ ID NO: 52903 - DNA, 272 bp, Oryza sativa
  unsure (1)..(272): unsure at all n locations
agactcggacccnaagcgccgcagcagcagcnngcncaccccaaaagaancacccttttctatttcacgccanaccgagcaacaggcggaaccaagcacaccaagataaagctacccttgcaagccaacaagcaaaaatgcaaagcatcatggcactagcacctctaaaacgcgcaagaagacctcaagcgacgcccccccctgtcaaacgctactaaaacaacaattgccaaagttaagccacggaaccacgggagagccaagagctcgcg

SEQ ID NO: 52904 - DNA, 393 bp, Oryza sativa
  unsure (1)..(393): unsure at all n locations
tgcaattntntgtgagcattacagcactaggctatgttttctcgtttagnngnctcttctgatgattgggttgatgaaaacaaataatcttacgtatctcctgtgattaagtttgattatttaaatgacttctgaagtcagtgtcaactggagaaggatgaaatctctaggacagtatgattacaagtgcattgtcaataagaaactatttgctggaatcagattacaggtgcccaggatataattgtacctgataatattaatcaacagcacttcagttgacccaatacattatgatctcgatcccgattggntttgattcttgaatgttactaatttaagcatatctaatgctagtgttttcagataggttcatatttagaatntgggtta

SEQ ID NO: 52905 - DNA, 383 bp, Oryza sativa
  unsure (1)..(383): unsure at all n locations
agcttttctgggcattatgtctcttttcttcttgntccgccgcatcttcttcctcaagccccagccaaacaaaagcaaaccatgcgtctgtgggggagctggtttccaactcagaggaaccttgagccaaaaatatttctccatgcccttcaaaacctcaaacaaaggctggcatgcaaactggntctatgttcaaaatcctgagcccgcactccccgagtactgctgtcttcctccggtttaccaggacacatggaactcattgcctatgggagatgatactgctcatggcatggaattgatggaacgcatgctaaaactgaaagaacaggtttgcatgagaacagncactcagcactcatcaaagtcgatagctccatcaa

SEQ ID NO: 52906 - DNA, 446 bp, Oryza sativa
  unsure (1)..(446): unsure at all n locations
tggttcacgaaggggaagaggcagttggatgtgaggtttgcactgangcacgagacgatgcccacagaaatggagagagaggacaggcaagggaagggaaaaaataaggtaggatgactgacacgtgggtctgctagtaagttaaggttatatatgtagctattgtttttttgttattacagggtttaaaaagtaaaaagaaaatgttgatcttttaataaaaaattatggaagggctagcagacaagaaattaagggtggaacaaaagaagtattagtagtgccctcaattaaaacgcaaatactagagaaggacctaatatcaaatactctctccgtattttaatgtatgacgccgttgatttttntataaatgtttgacctttcatcttattcacaaaatttatgtaattataatctattntattgtgactctgattatcatc

SEQ ID NO: 52907 - DNA, 385 bp, Oryza sativa
  unsure (1)..(385): unsure at all n locations
agcttgcgagnccgacgatgccatctcgaattgtttgtcgagcccagaattccctctcttaaattttcaatgcaacagctagtactactcctactcccaatgaaaagctgtatagaaacacagagcgtgcagggctgcaccgtgcaggcactagcctactagtactactttactctgcagcactagcctattagtactactagcatacatgcagctctatttaatagtactactagttgtcatatcatgtttgaaaaagctactattactaatagtactcgacaagcatgcatgcagcctactttcatctgtattgggtatttgagggcacacgagttaggctcgataaagctcgatgctcgagcgagccgagctctagcccatt

SEQ ID NO: 52908 - DNA, 424 bp, Oryza sativa
  unsure (1)..(424): unsure at all n locations
agcttggtgacatagaaattntatataaattatttagtatgngnagcattttctttaaatcataaacatagttttgaaaagcattcctatataatatataggacaggaaaaaaatattgaactaccataaaaaaatgctacatataatcttttaataagtaaataaatattagtttttatgtcattatgtaaaaataaactntgtcatgaataataccttgtacaataaaatcatgaatataatagtcttatataacaaaattatacacttccaacaatatagctagtctacaatatccagatttccttcatgtgtaagggcaaaatggtcattttcataggaattaaacattcaaataacggtcaactaattgaatgggtatgaaagggatcaaaaccaaaattatgggcatacaagaaaatg

SEQ ID NO: 52909 - DNA, 452 bp, Oryza sativa
  unsure (1)..(452): unsure at all n locations
ttcaacanagttgagggtacatcattatttttcatgtttttgcnancccnaacagagataaggtagtgattaatctctctacttgagttaattgtattcaggaaagaagcaggattggagtacagagtactaaaacttgcgctctgcccaaaggaaggaagaagctaggtcgccattaatctatatctagcaagttgtctctcagtgggtgacaataaattcagccttgaagaggggtttctcccctgtcggagcattgatgaaagggaagcgctggctgcagcagccagccagccagcctgcagaagctgagcgtgctgagcttagctgagctgaagggccgtgacagttaagattctgcattntacagcacagccatgtgggatattcccttcatgcttcgtcatcgtgcatgctgatctgatcactcacagccaggctaatgcatgctt

SEQ ID NO: 52910 - DNA, 330 bp, Oryza sativa
caaggagttatttcttgggtatacactggactttcctggttgggaaaccacaatcacttgtctgagcaggttctttacacaagatctggttgtggggcataacttgcacctgcgtatgcatctcactctggcaagcgttgagtcatgattcttgattcgctcctcgagtctctgttggattaccttgtggacacggtagctgaaatccctacgtgagacaggacactctgcattacgtgtgtaatctggggagctctctctactatccctgccatgggcactcttactgctgaggtcagcacgatcacatgggttgtatcgacttcaatt

SEQ ID NO: 52911 - DNA, 386 bp, Oryza sativa
  unsure (1)..(386): unsure at all n locations
gacctaaaaactaagcttatttgacgaggctatgtcatttctcctatttttttgagggatcgatggtggtggatcgtgttgtaatatgtgaaatttacaggtcctttttgcaaaagttgcctagtccctaccgccctgtccgatgtcgtcccttcctcgtcgncgctggatggggacaaggagctcggtggtggcgacgatctcagacggcggtgcaaatacagcccaccgccctttccgtcgacttcctccggcgattctcaagccacctcttcgtcggccacaacccgtctgcttccgtgcctaccctctccaatacatccaccttcctccatgccgatgcgctcgaaccgatgggctgtccgtcaagcttgggacacagtgga

SEQ ID NO: 52912 - DNA, 445 bp, Oryza sativa
  unsure (1)..(445): unsure at all n locations
agcttcaactagatcatcagattagnacttcaccctgtggatttcaatccgcaaacaggattagagtattacctctcgtcgagagggcctgaacctacctaaacctttgtctcatgacctatttactttagcttccatacacaaccccttttcttattaccgatntctagaatcgaccgatagctatcatggtacgtatagttaaacatgagcaagaaatactatatcagccaacaacatcacaagcaagttgtacatggcaattaatcctggtataacatataaactcgccatacctggcttattcttggtataacatataaactcgtcgtacacctaacaaattagtcttgctataacatataaaatctggccttagtgaaatctctttcattattaaaaataaacataggccacactctcaatctaacatgaatagcatctt

SEQ ID NO: 52913 - DNA, 317 bp, Oryza sativa
tcaagcaagtcagcgccagccagctggtggaggggacagccttttgtttcttaaaggtcgtggtgcccaaacacggcgacaaccggacgatggcatttgccgcgttttttgacgtggggcttcagtttccatgcaacgctattgctgccggagatccttcagcttttccaggcggagctatcccaactgagcccatcggcactagcacgagtcaccatctacgactgggcgtgccagaccgccaggatcgaaccgagcgccgagctatacggcgccgtgatctatggcaccgtgaactcgaagacagtgggcacccc

SEQ ID NO: 52914 - DNA, 446 bp, Oryza sativa
  unsure (1)..(446): unsure at all n locations
agcttgttaatttgatcaatcgntgtctctgtttccctcagtctcatgtgtttatggatggtgccaggatccaaaggcaatggttattgatcacattaattatgctgccactgatgctgaaggtgatcatactttgattgctggtgatgacctcatccagtcagatgtgatactggggtcaaagaatattgaggttggtactaatacttcaaaaaagactcatgtctttcaaccgttctgctctttaatattctatatatttattactttcttggaataaactgtagttggagctgagttgagactaaatcctgatcaccattgatatatttgaataatgagcatgagagtcatggactgagtactgctctggatctattcagtancacgaatatntacagtatttgcagtcactagaaatttggctgtcatgggacaaatttggt

SEQ ID NO: 52915 - DNA, 392 bp, Oryza sativa
tgagacatcaactctgaaggatgagaattccacaaatgatcatttaagtttttctctcaaagttccaaaggattcatgctcacttaaagaatcccctgagtcatgtctggttaatgtcgcttccttgtgcgaggaccacatccaccttacggccctaatttctagcatgtttagaagtgtggttgtggatgcttatattcatcataaatattgcaaatcttgtatttgtttgtggcactaatcttgcataacgatgtccccatggtcgaccttgagaccataaacatagcattacctggagataacccggattatcatggtaatgttcattcctataaaagcctgaaccattttctataatagtatgcatcttcacgtattcttgatctgta

SEQ ID NO: 52916 - DNA, 308 bp, Oryza sativa
  unsure (1)..(308): unsure at all n locations
ccactgaattggtaagatatgatccacagcttcaccagtgtgaagggttattatacttccattataaatattgctttngggccaatacaaaaagatgagtatgtagagagaagatggatcgatcgagacggcatgccaggaaactatggcagcgtcgtcgtccttagcagactggctgcactaatgctgctgctgccgccgctgattgctgctgtggatgatgggatgaggagcggcggcaatggcaccaacagctgcggcaacgtccgctttcagtaccctttcggtgtggaggaccggtgctaccg

SEQ ID NO: 52917 - DNA, 349 bp, Oryza sativa
  unsure (1)..(349): unsure at all n locations
cttaaaactcagcttccctcaaatcacagtcgagttgatgctcctgctttctttctcccattcgacagaactgtagcacctgcgttctgtggtctatccaatatgcacaaacactgtgccttcgccgcctgcggccgatccgtggatggtgtctccggccagtgaccacggtggtgttgatgatctgtcacttgtagacgaccatggatgtgacattgacgacgaccgtgctattagtgtagtcgcgaactcgaccttctcaatctgatcatcgccgnccgatgtaacgctcctgctgattctgttgctcgcgggtattaaggcacgaagacacagacatgcgatgagg

SEQ ID NO: 52918 - DNA, 375 bp, Oryza sativa
  unsure (1)..(375): unsure at all n locations
tggcaagtaacttttcatgggaacttgatccaaggtgtccttctttcacatagatctgtgttgagacccagtaaattgatgggccatagtaaaaatatataagtggaatctcagaaaagaaaatatgccattagcgctaataagggatatattaacatgagatctatcaaatcatttcactgaatacacacataatccctccagtcataaatgtttgacatttaggatgagattcagtcaggcttttaaaattacgaccaccaataatntctaaaatgcttagtttgaaaacggaagaaattgtatatggtagatttgcctcanaaagtactatcattatatcataaaattattctaatataaaattattggctg

SEQ ID NO: 52919 - DNA, 445 bp, Oryza sativa
  unsure (1)..(445): unsure at all n locations
cagaacattatgctttattaaagccatgtgtgcaagcggggtatacgtgcaagagtatgctattatcacantaaatccctcaattttggatggagtcgttcctcttctttcttttactcctgaagatgcatcatctaaggaaaaaaaatgtactgagcagaacactgagcttgttaggaaaaaaacagttcagtaatataaatggtacgaatgttcagtacaattgtgtcccgttaacatacatcgattttgccaaaagaacaaagggaactttgtatagtatgagtgtatttgtatacggtcggaagtcttgccatccgaatgtttgccccaaaaatgttggggtgaaaaaaagagaaggaaaatangaaacctgaaacggactatgaaatttcgttcttctatagttacaactgttatatactcacatgctacataaatctgc

SEQ ID NO: 52920 - DNA, 463 bp, Oryza sativa
  unsure (1)..(463): unsure at all n locations
agctggtagcgcggcatctatatacaagttataggagggagttaagacctttatccaattaatagcacaagtttttggattaatttgaataaaatttataaattcaaagtaaaaggtaagtgaataaagtaaaccaaacttgcaagataatttgaaatagttgaaaacaaggttacaaattttgtactttttaacaacaggtttcaaaagaaagttataaaatcaacatgctaanattattttattgcagcaagattaaataaaacaacattgtaaaacttttgctgataaatgagccattagtacagtaatggatgtacagtactaataacactggaataaattttgaatgagaaccattaaaagagattatgaagtgcatgtgccattagtttggttaattaaaagagaaagggaggagaacagctctacttttccaatattnttagagggcttctatggg

SEQ ID NO: 52921 - DNA, 340 bp, Oryza sativa
actaagcttgcatctttggatgccttcgctgatcttttctttgcttcggctggaaatgtgaaccatttcttcattgccgtccaagctcactctttcttggcttttgtgacctttccgatatctatatggaggatcccgaagttctcacgtgcggctagtccgcagcatttagaccatctttcaatgacaagcctgagcgccgtgggcctaccactagcgtcaacctctcttataacttgcactgtggtccgccatatatattgtgaccgcggatttctactatacctacttgcactcgtcccgcctcacatcgacgtatgttgttctgcggtattctgca

SEQ ID NO: 52922 - DNA, 294 bp, Oryza sativa
taagaatttaccgaattctaaccaggcattcttgccattacatgtctaggcagaagatattatatcctaattcaagaatgaccatgtttatggtaactgaattatggcctataagatcacacgaaaacagaataggagagaatatgcggccatctatttcaatcagaaaaggcactgcagattgcatagcattttttattagcctactaagcttattgttatgtgaattaaacttaagcaagaatgtttggaaactgaatggattaatccccagacacctatgacaattagtag

SEQ ID NO: 52923 - DNA, 348 bp, Oryza sativa
aactcacctttggcatattgccggctttttattataatcatatttttagcaatcggtgatgcaccatctagcgtttccgaaggcctccatccacatccatgttatgtaaggtaatctaactggctccaagctcagctgttgggtcccaacccaagagccaaccaggatagtgcgctcgctggagaagttcaggtaactctccaggcatgaggtctcaataacatgttatggcattcggctgctgggatctttatcatcttccccagccttctctactgtacttggtgttgtccgaggatagaattgtactatctgattaaggccaattattaatgcatcattcttatc

SEQ ID NO: 52924 - DNA, 436 bp, Oryza sativa
  unsure (1)..(436): unsure at all n locations
agcttgagctatggcttgatgcaacgggatggtanaaatgcagcggcacttgcttacctgttggcattgatcacctgccagcatgcctaagagaaattcacataaaccgggattatggtgctgacagacgtgacatagaaactgcaaaatctgcgctgagtagcttatttgccacacatcatcctggtgctggcttgatttttggaggtgcaccttggaattatccttctaatgaccctgaccagtggtgactacttgtgaaagaaagatgcgcgttggaaggctngaacagttgaacccattgacttcacttgataaaagtgttcgagctattctctaaccggaaacaaagtgctatgaatttgtgacgagaatgctccagagagaggatcaatgagaggagagagtgacagagagcacgcatttgaatgatgac

SEQ ID NO: 52925 - DNA, 302 bp, Oryza sativa
ttaagccagaccaactcttcctgtatgcagtgacagactctgggatgaacaaaaagtggggtcgttcaatcaaagaagctgtgcaagctgccattgaaagtggcgctaccattgtacaactgaggtctgcctattgaaacacaatcatgatcttgcatgtaatgcaatccctccattttatatttctgatgcactttgggtgtttttgatttccacagaaaaagattccgaaacaagagagtgtctggaagcagccaaagcatgcatggagatttgcaagtccaatggagtaccactgctga

SEQ ID NO: 52926 - DNA, 347 bp, Oryza sativa
  unsure (1)..(347): unsure at all n locations
agccacctgcggcatgcagcttgagtgttcctaccggaacctttgtggttgaaatagtggncaaccgaaggcaagagagtactcttggaataaaactttatacttttaaatagtaaaaaccgatttgagtggccaatttttaacctaattaagcggttgaaaatatgtgaaaaacctaaattatttttaaaatattttctgaagttaaaattgctcttcaacttatcagcatcaatcacaattggaatttaatcttaatcttgcagtgagtntgaccgttttatcatanntcacaacatatgtatactaggggttgtacagaatgatgttattcttaaccataactt

SEQ ID NO: 52927 - DNA, 437 bp, Oryza sativa
  unsure (1)..(437): unsure at all n locations
tagaaactcaagctntctgttcttgaagattcatcttcctgccaagctaatctgtttcgaaacttgtacttcagtgatgaaaccctagtatcactcagctcatactgagacttccttttcttatgagggctttcgatatggtaaaatttctctgaattgctgaaagaagaacaaaccgtagcaataatatcacaaacatgatcttcatttgtacataaaagtaacaaataaaaaacatcatagcaaacaaaagagattatcagatttttctatatgcccacatgaacaatctttggagtttggtggtgattgtagagtacatctcagacctaataataacataagttataatggggcatcattaaataaacataatccagtgtatcacagtggaacatattctagctaagttcagtccacaagtactgaaattataa

SEQ ID NO: 52928 - DNA, 413 bp, Oryza sativa
  unsure (1)..(413): unsure at all n locations
agcttcaatgtacctgtnaagattcttatttcaacttgagccaactctcccatttactgttcttattttcaatcaagaaaaataccttcatataagggcaggtgttgtgtaatatagtttactagctagggcatgcttgaaagtcattcattttgcaagcttttcatatggaacaatttgatttaatttacgagcatgatcgatgagtgtttgcatgtttacacggatctgacaaattaacttgttctggaaacggtaaacaaattaaactgaacttttctacgaattaacagctgataacgaacgcatgttctgaacctaacttttcttttaaagataactatcttttgaacctaactagagggtccaagttagataaggaagttctgtaagtgcatccatcttgagatact

SEQ ID NO: 52929 - DNA, 473 bp, Oryza sativa
ggcatagcttcaaccctttctggtcttagcatctaatatcctgttcatcaagttgcaaacaagattttgagtatgatctgcagaaaaatgaacaaacctgttgtatcatctggcaatctttcatccacttctagcagtagtgtcagtggttcctctgtaagtacaccagatgattaccaaaggccaacagttcctgcatgggaatttttagaagctgttccttttgttcttgaagctgttcttacagcatgtgctcatggacggttttccagccgagacttgactacaagtgaggaaactccatttctttcatgtcaccgtattgatttgatccccaagtcttaatcttatatatgtgctgcaagtttgagagatcttgtggacttcttgtcagcctctattgcagcaattgttagctacttcttagcacaaatacacgaagaatctggaaattgtcccatgaatggactgat

SEQ ID NO: 52930 - DNA, 334 bp, Oryza sativa
  unsure (1)..(334): unsure at all n locations
agctctgtatggcagcagctggtatgtgttctctacctatccacctgtctagtgtgcttgcttgcttagtgaacagcgttatccactgggcataatataattgcgtaatcacgcagggtgcccctattgggaacaatttaagcacagcggtggcttcatcaggaaagcatgccttttctgcatcattgtgatctccctgcgatgatgatgcttgggtgcagtgaagatcccctgatgatctgcatgccataggaagaacgagcaagtnaggttgtagtttgcaacggatgggctctgcgggtgggttcattgcatacatacttctaacaccatg

SEQ ID NO: 52931 - DNA, 232 bp, Oryza sativa
gacttaagccctgatttaatcatgcttctcctgtccacgcaacattttagcaactggggaattagccctgattgctacacatgtatcatcaaatagaacaaatcatgcccatatgaaaaatacaatttggacataaatgatatgtgaatcataagataaagtacgactggcaaaactgcattacataactcaatgacatatgattaatagatagacctgacatgcggacaat

SEQ ID NO: 52932 - DNA, 360 bp, Oryza sativa
  unsure (1)..(360): unsure at all n locations
agcttgatacagaatgcttgcgtctagcttgttgtaagaagaactaagaaaggtaatccttgatcactcttacatccttccgaccttccgtgctttccttttgcttagatgcttcacctttttttattcttgtgtgattntacagaaaaggatttggcgcataccccctgatatctgacaaaatctgaatgtttttttagcccttttcctgtttgctaaaacttcccccaaattttacttggataacgtcatttttctttatgtatgtgtagttataagatgagaaggcctggtgcgagatgcaaggaaggacatgcacatttcaacgggaaccacatagatgggcaatataagaatttc

SEQ ID NO: 52933 - DNA, 381 bp, Oryza sativa
  unsure (1)..(381): unsure at all n locations
gaacttaaaactcactttaacctttcgggttgttcttctatggagcttgaatatcctggttgcttgaaaagaaatagaagtgataatggcagcgagtataaaaatgcttcattngaacaattttgcaatgaacgaggtcttgaacatgaatattcttctcctcgtgttccacaacaaaacggtgttgttgaaaggagaaatcatgttttgtgtgagatggttagaacgatgttggatgaatataaaactcctataaaactttgggctgaggcaattaacacagcttattatatttcacatcgggctttcttgagggctaaacttggaaaacagtcttatgaacttcgatttggacatcaacccaaaggatcacatttgcgt

SEQ ID NO: 52934 - DNA, 405 bp, Oryza sativa
  unsure (1)..(405): unsure at all n locations
agcttagttggtatattggtttaacccattatgctatttggcgccgaaagagttattgtctttgttgtgttcacggtgaatgattgtttcatgctacaagaaggaatttgtctcaaggtggagnttgttgagttgtgatccaaattcatttgcacttaataaaggccaacttctgccgtattggagcggaggcccgtcgccggtaggctcaccatatatatacctcttgtaagccgccgtgcggcgatgtaatctcacctcagatatagtgaagatattttgctggctggcgcccgtggttttttctctcctgttttgggagggtttccacgttaaatctcgtgtcttctgtgattgatcttttgtgttttatcgnttgttcgcctattcgttcctaacatggtt

SEQ ID NO: 52935 - DNA, 298 bp, Oryza sativa
taaaactcagcttgcaggggtgtttcttggttctgtgaataggacaccataaccttgtcgcctcggaagttgtccttgtcggctcgcgattcttgtcggaaggacaagatttggccgcactatgatccttctcagactcggatgtcgtcgatgttccgttctccacttctgcgggaggatccttcgacatggagtcgcccagtggtggaaccacggtgttctcgtttccggtcatcgatggaccactcgagatcggcactgtggtgtaaaccgggaagacgatctcgccgacttgagt

SEQ ID NO: 52936 - DNA, 419 bp, Oryza sativa
agtcacctgaggcatgcaagcttttctttatagccttagaagtaatattttagttatggattatagaagactgcagtgtacctatgcctgttttctttctagccattccgaatctcgggacgagaatctttgtaagggggtagatttgtcacaaccagattttcgttttaggattcataaactatctaataaattattaatagaatttatattaaatgttcattaatttacaagtgaagttaaatgtgggaaataaaatttcctaaatataaagcatggatggatttaatttttattaaattctccatgattaaatatactctttgaaattgtctcggatgtttcggagctcaattcctaaatgatacaaagaacagttccagaattatctattcattaatgatctaattatatttatg

SEQ ID NO: 52937 - DNA, 483 bp, Oryza sativa
  unsure (1)..(483): unsure at all n locations
tgctggatatgtcacatagttgaatagtctctnttagttatatagattncatgtctaacttgcaggaccagaaggccggttcatctcatggtccacacaaaatcctcaatatgacgtatgtgaaccatatatgatttagctgcaatgaattgttcaatgatgcaacctgttttggtttaagtaccagattagctacagaaattccctagaactttgagcaaacagtacatggngtactccaaccatccctttaaatttcaaactcaatttagaaccaggttaagaagattctgtagcaaacattactctgtatctcaatatattctatgagtaaatttcacaaaaatatacgtactttgttcaaattatcacataactacatatttatggtgttgtatcccaaaactatatgtttaacacaaaactacatatttgagacagagtatcacaaaactatagatttaatattactactggtatatt

SEQ ID NO: 52938 - DNA, 390 bp, Oryza sativa
  unsure (1)..(390): unsure at all n locations
agcttatctgtgagacagtgacggacactattattctgttatacaaatactatgaagcagtaccttcaaaatagttgcatattttactcatatttataaagtgcaatgtcgtnttaagttacagataatacatcacatcaatgctgaccaatatttggtttgcagcagaaactaaatttgccctaccgctcatgtatttacaggtaaacatgctgagggaaagaaacaaatcctatggagctataaaatttgttgacataagctctaaaaatactctccacaagacaatcagaaccttgattatgaaactgtacgtatttcttggtactacagattgacttgtttggttatgacatacattgtactttcatgtcctcgcgtctttttaat

SEQ ID NO: 52939 - DNA, 408 bp, Oryza sativa
ttaccctctcatctcatcgatggatcaccattatgtgttctgttggtgttggtgtttgcgactgcgcgagtggccggtggggcctcgcgggctctctatgagtagtgatcgatcgatctttatgtttttcaatttgttttcttggagacacgggccgactgctgatctgatccagtgtgccgtccaacatttggcgtagcttttatcagatcgtgcttctcccttttgtggctgtgaacctgcccaactatgggctgccaactctcttcgccctatgctcgaagacattatctactggcatatatttgctccgactatcatgcatcgggttggacttgagaaacccgcgatcgattaatcgagaggttactacaagctctcttcataagattaacacactggaattga

SEQ ID NO: 52940 - DNA, 430 bp, Oryza sativa
agcttagcagcgacaagacgagggatattatatgttctccacctccactacacgagacaaccacgagtgtgatttgtaaccaagcggtagggggtaataatagcggtggagactagcgctctgcggtggtgaccggatcttccgggcggtggggcccagtggcagtggcagcgggagaagggtggggccactcgccgctgcgctgctccgccggtgaggataaccagatctacgccctgcgggttgtcgcggagtggcagtacactaccggtggcactgagccactgacagtttaattgtggggatgtgggcccatgtgtcagtaaatgaatggagtatttttttatccttatttcccgaaagaaaaggcataaggagcatcatgggctggagagcagagacctctgtttcagctattaatgcgcattta

SEQ ID NO: 52941 - DNA, 362 bp, Oryza sativa
  unsure (1)..(362): unsure at all n locations
tgcaagcaaaaacagaantatatatgtcggaatagggtgattgttttcatatctcagcggactgaagcagcactatggcatgagaaatgcagcttttacaatctttgctgagttattttaaacgagctgacctgataaaccctctgattgcaattggaccgttgaacacatttcagcttaacacaatcgcgctgtttgggcccacaagagtatcaccagggtggccacattcgttcttggaattttaagggaatgcaataatggggcccagaccacagatgaaaagatgtagaacccagggctccttatctataatttcaagttcagttacaacatggatgaaagcacatatattcatccct

SEQ ID NO: 52942 - DNA, 458 bp, Oryza sativa
  unsure (1)..(458): unsure at all n locations
ggctcnttccacttaaataaatttgggctatgggttattgcttcttcatgtgcatgacagcttagacaactcaccttacttgatatatgatccaataaagcacggataataccaggtaatgatctggaaccaagaagcttaacaactgcaaacatatgagggatcccaaaaaagtcacggtacaaaccagaaatgccctggtatgccatggtcaaatcctacaaagaaaatgggaacgtgacatagaaatcagcgtgccattgtatagcttgttgccaggtaaaaatgtaaaatcatttattggtaaatgagaagtaaaaattgtgatgtatgagatgcaatattggagacatcttacaatttataatgcactgatattcaagcaaaatgtgattctcagatttaatctcccaataatcttgaaaacttttttaccaacaggcattggtcattattca

SEQ ID NO: 52943 - DNA, 299 bp, Oryza sativa
  unsure (1)..(299): unsure at all n locations
agcttaggcctgacggnactattgaaaagtacaatgctcggcttgttgctaagggctatactcagaaagaaggcgaagatttctttgatacttactcacctgttgctagattgaccacaattcgtgtgctactttccctagcagcctcacatggtcttctcgttcatcaaatggacgttaaaacagcttctctttatggagagctggatgaggagatctatatggatcaacctgatggggttgtagttgaaggtcaataaagcaaagagtgcaaattgttgaagtctttgtatggtctg

SEQ ID NO: 52944 - DNA, 309 bp, Oryza sativa
tctctcaggcttacattttcaccagtcactactcactattggtatactcccaccgtttcctgagtgacacaatgaagtcatatctgacttatgctttctttactcccagtttcttattacggcacacaggattccaaaacaacaacacatgggttgctgtactacaattgtactggttcacccacatgaagagaatatcctatgtgtcaaaatggagactcctttatggtctaatcatctattaaacacatgtttgagcaacacacaacaaggttattagtcacatacgttgtagctgttcgtgcctac

SEQ ID NO: 52945 - DNA, 420 bp, Oryza sativa
  unsure (1)..(420): unsure at all n locations
tcccaatccaccccagggattaggatttgttggcggatcagctggcgagggctatctagagagcctttggccagccactaactagtttgagttcagcattttgattgatatatcgatctctagtcgattagtcaagttacgtttttcttccttgtaattctgcttgatttgcctgaatntgcttgaattctggagtatctgttataccaacaaccagctgtctagttggggcatggtgggtgtatcaacgctctatttgagacgccctctggctttgcaatattcgcttatgatgggatcaagctccttaaaccaaatgccatgcacgtacttgcattgcttctttgattatatccttccagcttgattatgtttaagatgccatgcaaaagntgattttgattattaactcatgtgcct

SEQ ID NO: 52946 - DNA, 381 bp, Oryza sativa
caacgaagctcatgacaacctcctttctacttatcatcttggagctctcattgaggatggcatatcttgtgttgtgctcgaagatagtgctacttgccatattgctcatgttgcatcatctagcatttctacctcttgagatgatcttgtggatatgcctagctctagctctagcccttgagtttctatatgcgacgcctcactcgttgagaacaatgagcttaaagagcaagtggctaagctcaacaagagtttggagatgtgcctcaagggtaagaacactcttgactagattctgagtgaacaaccgtgcataccttacaatgacggacgtggattcttccaaagaacggcaagaacccttctcaccgtgccacttcg

SEQ ID NO: 52947 - DNA, 374 bp, Oryza sativa
tgcttgactagaacaaacaatttcttatatcttattatatgaagcagggaaatattatggacgtataatatgaaatggagaaatatgcagatataaatattcagtttaaatatttctccttttcataataaatcttggtcccaggcttgacgaaatcatatatctgttgcctacattgtgctgttccgtgcccatattatgacgcgcgcgatcatcgcgtgcgcatattatgatacgcacgatcattgcactcactgtgtgtttggatggagggtttcgggtggatagaacacatggaggcccattctttatgggtgtttagtttgtgggcaggagtgggatagctagggatgacgactggacctgtatgaagc

SEQ ID NO: 52948 - DNA, 372 bp, Oryza sativa
  unsure (1)..(372): unsure at all n locations
cgtgacatcatccaatgatgtatagccaccataatctactcttgnatacttctcaaaagcctgaaaaatctgccaaccccattccctatacctgtgtaaaagaaaaggagataataaaaggatagtcagtggtggcattattgcctggctatcctcccggcggtgtataccccctatgaaccctaacccataacattattcataattgagtggcaggtgacctaaagataataaagtagtgttatatcttacttcggatcctctgtgattctatataaaacaaatagtgattctacagtctctgcgcgtaaaagattgtgaccaaccacaggtttgattatgatatcatcaacatattgagaacttttgttc

SEQ ID NO: 52949 - DNA, 439 bp, Oryza sativa
  unsure (1)..(439): unsure at all n locations
agcttgagctgctcgcgagtctcttcttttttgacagccctactcggaatgcttgcccatcaatgaaacctcattccactcctagttatgtgacaagagggaaaccttaccgagctcttaacggcgaggtttcaataccattgctactctcgcaacatggactatctggaaggagcgaaataacgaggtgttcaaccaaaagcacanaatctggacagaagtggcaagggcaatggcggaagaggcaacgctgaggcggctcgcccatactgccataccggccacccctttatagcgctcatgtctcaacattgtatcgcgagattacggtttaatgttcttgggtgacttcctataatacacgtctactgcgtgtgtttccctttaacctgtacagacttttactcctcttaatacaaagatgcgcttcttacgtatt

SEQ ID NO: 52950 - DNA, 456 bp, Oryza sativa
tgcaagcttgagctgctcgcgagactttagcttttttgactgccccacacggaatgctcgcccatcaatgaaaccttcatccactcctagctatgtgacaagagggaaaccctaccgtgctctcaactgcgaggttacaataccatagctactctcgcaacatggactatctggacagatcgaaatatcagggtgtccaaccacaagtcctgaatctggacagaattggcaagggcaatggcggaaaaagcaacgctgtggcggctcgccaatactgccataccggccacgcctttatagcgcatatgtcgcaacattgtatcgcgagataatggtataatgttcttgggtgactacctataattccatctcctgctgtttattccttaactctgtcaaactattactactctatatacatagacgcgcttcttacgtatacctgtacgaaaaaat

SEQ ID NO: 52951 - DNA, 344 bp, Oryza sativa
agcttgcgttatcctccataatatgattttgttagatgaaaaggatttggttaaaatcccattggatttgaatgaaaatccaagtgcaaccattagtctaccaccggaagtgcaaacaaatgacaaatctaatccatgctttgtcgacgtgcttaacagaaactcggctatccgggctgtctctacacatcgacagctcaagaatgatttaattgaacacatatggcaacgatatgggccaagaggagggtagagccatgtgtccaatgaaatggtgactttattattatatcacatcatatatttctaagaacatctatatgtaaacattataaatattatat

SEQ ID NO: 52952 - DNA, 390 bp, Oryza sativa
  unsure (1)..(390): unsure at all n locations
agcttccatagacacttttggttcttctgatgatccttttatggagcaaagaagattgcacagtgactccacctacaccttccttttacatgcatgtgaacaaaagtcccatggctatcgatttcaagagtgtagcttcactgcgcaaaatattctactcctcctatgaaagcatcaaggaccaagaatggagtcaactggaaaacatgaagacaacctgcatggggttagacaatatttggttatcaaaaactatatcattgcggcaatgccaaatggaccaacacaaggtgctaagtacaaacaaaatcaatttttttaatggatctaggctcctcttagccaattaccaanaatattagctagggcccgtgccctcccacttatata

SEQ ID NO: 52953 - DNA, 416 bp, Oryza sativa
ttgaacatacatgcttgacgatttgtctgggccatctcttaatcttaagctacttcatcatcattatctgttgaaagatataccctcatgacaataaaagattaattttatggaaattctgcctttagctaatggtcaaacctggttttctttaacaaagaaaatgatatgttgctctgtggctttctcgcaataaatatattgctgttaccatcacttgccaaccgatagatgctaaaacacaaggagtaacattctctaacctttctactccgcattatattaatgagctagccaacacacctgcctactcaaattatgtctccggtttacttattctgtatgagactactattctggcaaacaaattctagctccaacccggccgccgggttgccttttttttattttagaag

SEQ ID NO: 52954 - DNA, 312 bp, Oryza sativa
agcttgatgtgacgataatatttgagccttattccttacaaaatacctctcgcagcagtgatattgactcctacataattgggtttgatttccatgaactaaaaacgcatatacacttctaggcaagtataggcatggtttattttgacttctatatgtcttagcaatggactacccgctgacccatgatttcctcaagcacgcgtgttgactggtgacaacagatagaaaggtgagcaaaccaattgataatatataatgggggttgactttcatatgaaccaaaaaccccactcctgcattctagctagc

SEQ ID NO: 52955 - DNA, 327 bp, Oryza sativa
gacacaaaatacccgctgaaagatacataatcttttttttattgcatttcatgtaactcgtaaattgcgataaaaggagaggacacattaagtaaatatgtcagtttattcctgtgttttgaaacgcatatcaattatatttcaatgctctagaacatatcaaatatctaagtataatgaattacaagaaagtagcatctgggaaatgaaagttgttatgaagatgaccccactgcaatattaactcgagatcgggttgacatgacactaaacggacagcactatatgtttgtttatagactacaaatcatgtgtatgaacaaattt

SEQ ID NO: 52956 - DNA, 471 bp, Oryza sativa
agcttctaattcacataattactgcaggttgttatttagaataagtgtcgaatatgatagtcccaatagatttgaccactgaggccagggagatgtacttgcaggcagctatatatgttgatggaagaggatcctctaacttacttccctcttattttgagtcactgacatgtggggaagtaagttagaggatatcaatccatatgatgatatacggctatgtctcagttcaggtcgacgagggagagctcaccaaagacagtttagataaaacaagttggtgacttatttatgtccaagactaactaataagatgtatttgaagcatgagtttgttagggctaaagatatacgaagagtcagatcctgcagaacatgtgaacaatgcacagatgggtgtgaaagttaataacctaaatcatatgagcatgtggtgactactataacgtatgagaataatccacagtaaag

SEQ ID NO: 52957 - DNA, 381 bp, Oryza sativa
ggaatatgaataaccctttccatgacaatctactgtgcttgtgagccacattggacaggacatgatgatcctgttcaagggatattgccaggacctacatggggttacttttatgcatcttttggaaaaaagtcagatattccagtgcatgcaatctactctggccagcctctaaccagcactgtcagaagtgcctgtcatcagaagtggtattgaggcaattctattttactactgcgtgccatatcaactaattgatataattttccttaagagccacaagagtaatgcattacaaaagttttgcaaaattccatgtaacgctgtatctactatgttgcacagcaaactagagcaactccaaacttgcccaaaatctac

SEQ ID NO: 52958 - DNA, 398 bp, Oryza sativa
ggatccttaagtcacctgaggcatgcaagcttatgtgatcgtgaaaattaaattatattatatattgtagctcgatcaactataaatgagttgtcaaggctcaacaataggctgacatggaaagggatcatctaacttaattattatgctgttaagtcactgccatgtgagccgtacaaaagtgaaacccacatgttaattattgggggagtatctccggatcaaaggaagctagcctccgaagggctgcagcgctccggagaaccatccttcccgggagatgaccgtgagtcatggccatgtcggtctgcagatggcctctcactccggaagcctcggtgatccgattctgatcccacagtgcgagaggagcacgacctaagcacgctccggatgat

SEQ ID NO: 52959 - DNA, 456 bp, Oryza sativa
tctcggcatagtctaatgcattatacgatggttggcttacttttaggctaaaaatggttgagagcatgatgtaagatgttgagcatgtgaacgagaacttgtactgtcaagcgatgatacttcacagtatgcattactttcatgcaagaggggaacattgccaatcaactttgctgaataaaatgagacagctaactgaaatcctatgtagacacatacagaaatactactaatatatattgcaagcaaaatcccagtccatgaatgacttgaagttgtatgtactaactctttagaattccctcatcaagttggtcttttcagttgatcattactgaatgagacaatttgatcataaggaataaatattcatcagctacgatcctgttgtattaccaatacgccacacgaacaagtttgcataatcaatattcaactaaagtaatgctaccctcc

SEQ ID NO: 52960 - DNA, 335 bp, Oryza sativa
  unsure (1)..(335): unsure at all n locations
agctngcaatgttccctttaggcatgaagtttgacatagaacaaatctgcagatagactagctgatgcggacccaacgccaattaattctcttaatggaatgaatgacaccgtctcacgtaatgctcacaagttgagcccaagctcagaatgttgaatcatttcatttatacttatcaaatcaaagtaacctaaagcttaattctacatacaaaagaaaaaacacctcttctgcaccctgaaataacaggaactgaacgtacggatctctaattcagcaagcaagaagactaccgatccaatccagcacaagatagatatatacctggtgtgatg

SEQ ID NO: 52961 - DNA, 305 bp, Oryza sativa
  unsure (1)..(305): unsure at all n locations
tcanatatgttatttgcatgagttgcacttgttatatttctcaatgaatggctcacgtttgatgcacagatgtgaaacaaaatattgacatctattaaaatgatttcaacacagacctagagtgcttctatgatagagcttaatcttgtcattaattagaatatatgcatcggtctattttgtctacatggaatataaggtactgcataattagtttggctcccacctattggcgaaaaacccaccttccatgcgatgccgtggtgccagaatggaacataccaacgtcatgaagaccaaactta

SEQ ID NO: 52962 - DNA, 465 bp, Oryza sativa
  unsure (1)..(465): unsure at all n locations
agcttcgagctaggatgcttctcgtcctttataatgcagcacctgcaagataattctcactgaacttttgaactctgaatatttcttcttcttttacagttatgaattttcgtctgaatttagtgagaaggtaaggagcaaatatgaacagcctggtgcgagatatatagcgagaggaggcagattgaagcgacaaagagaaaggcactggctgcgatgttgacaagaacacgagatactactactactacatgtcaagcatccaaccacacattctgtgagggagttgtcgagtcgcctgcatctgcaggtttataatttcactaagtgtgtgtgaccttggacctcacaaaaaaaaaaaaaccagccgcttctctttatgaaacatgaccaaacaaagccatcgaaccagcttatgtgttactcgatctncctgtcattttctcacatcattacggatntaca

SEQ ID NO: 52963 - DNA, 384 bp, Oryza sativa
  unsure (1)..(384): unsure at all n locations
tcggatgtgcatcgactacaccgaccttaacaaggcatgttctatagatccttaccccctgcctcgcatatatcagatcgtcgattccactgcggggtgcgacctgttgtgttttctagatgcatactctggttaccatcagattctcatggctagggaggatgaagagaaaactgngttcattacccccgtaggaaccttttgttatacctcaatgcccttcgggttaaagaatgcangtcctacttttcaacgtactactcgaatttctttgggtagccaaataggacgtaatgttgatgcgtatgtcgatgacttggttgtatagacgcgcaaccaaagaccttactctcagatctagctgaaactttagaaaatcttcgc

SEQ ID NO: 52964 - DNA, 395 bp, Oryza sativa
agctggcctcgtcaccaccgtgttcatcttctctcgcgacgctgcgtgggaagcattcgccaagcacgatcggcgccttgcggcgcgcacatatactgacacgagacgtgcgctcgcgcacgcggaacgatcaatggtttggctgccgagctacgatcctctatggaagaccctgcgcagcatcgcggtaacgcacgtcttctcgccacgcagtctcggcgtggcgcgcagcgcccgcgagcgtaaggtgcacgacatggtggacagcttccgtcgccgcgctgggcaggaggttgatatcggccaggtcctgtaccatggcatgttcgacctcctggcgaacgtgcttctctccgtcgatgcccaccccaattttagggatcatatggaggata

SEQ ID NO: 52965 - DNA, 451 bp, Oryza sativa
  unsure (1)..(451): unsure at all n locations
agcttcacttgggatatgattaataaatttatatttactttctgcaggatctgaaccatccttcaagattaagtcggtttccttatcatgtaagacatgggtcaaggtttgggtttagtacaaattgatcagtcaactgtagccatcaaagaaaatttctgcaagtttagtgaggttctagagcctgggtgccacttcttaccttggtgcataagacagcaaattgctggttacctctcactgcgtgtgaagcagctggatgtccgctgcgaaacaaagacaaaggtttactcccatctcgttctattntttcttttnttcatgccttgctggagagagaacaatgagtgaagaacatatttctgttataaagtgaaacccataataactcactaactcatgttgagggaagaacagaaatattgtcttaacacttttgagataactcact

SEQ ID NO: 52966 - DNA, 187 bp, Oryza sativa
atgaatccatcgatgaagtaccacatgatcggatatatatgaaaggaatcctaatctgccgaatcgccatgttcagatgatttacattctacgtctccgcggtcgtctctggcttagttcttattgaacattcagatccaatgactctatgaaactacggcgaaacttctacatattaatcggtaac

SEQ ID NO: 52967 - DNA, 436 bp, Oryza sativa
  unsure (1)..(436): unsure at all n locations
agcttactgtgtggtgttattcttgtgatgtgatgcataatngcgacgagcaggtgcttttgctcaaataatggttcatactgccatatccatcgggtgtcctttcaacagatatttcacagctattggttatgattacctgctgttattttgctccgacgtgtacaataaaaacgccgaggctgagagcctttatgaggcacaagcacaangatagcaatcaccttatagtatcacccttatactaagtggaaaaacaaaacttgtacaccgtaataaccccctaattttcttctttaaaccgtctgctctatatcctaataactcaattgtagtatcacgcttactatggcaaatgctcgtactagaaaatgcggagtgacgctgaatttgtatgcagtgcctgttacacagctcatctctttaagttaagtaa

SEQ ID NO: 52968 - DNA, 467 bp, Oryza sativa
  unsure (1)..(467): unsure at all n locations
agcttntcttttctggcacggnnatttttcttttctactaagtatgtacaccaaaaatttatatgttgaaaattgatgtattgaaagtttatgtttctgatttcaattcgaatcaatgtttgttgtgtacaaaatttctatatgtaaggtttcaatgtataaaatttttggtaggctaatgcaccgtgcacgtgggccagactgatgtaattccccattagaactatcttctagttatcggtgcgagtttctcacatgctgataaatgaaaaattatattgtaccaaccccactactataaggacgcttctgaaaatagttcgagtaacacatcattgcttgatcaaacttttaatgtatatgtaggcattntttttccctgnagaggcacaacaggtcccccggttcaaactttatntatttttaagaaagaatacaagcctaaattacaaccctaatacagctat

SEQ ID NO: 52969 - DNA, 442 bp, Oryza sativa
  unsure (1)..(442): unsure at all n locations
agcttgatagccagctagctgaagacactattctattcattggacggttcagggtcgggcaacaatgcaatagggaaatctaaaaaaaagtgctcaaattaaagctgtgtaagatcccctagggcaaatagggccactacaagtcaaaagtggtaaggaaatacaatgcctggaatagacactactaataggtagttgaccagaaaattcagaaccagcacacaaaatatttcagtcacatcaatataaaaaagctaattgatgatcagtaagaaaacaacgtctatttattttcaccttaatggatgaagccacatgagcaacagcatgagtcagcataccaccaccacccgctggataaggctganatgcctgactggtccttcaaggaataaactgccacaagaataatgataatcatttattctggactaaatattgg

SEQ ID NO: 52970 - DNA, 359 bp, Oryza sativa
  unsure (1)..(359): unsure at all n locations
ggaccgcggcaaactcatgcctctcgtatctctggtgtcattcatcgangacgcgaagctgattgggagcgcatgcaacgaatcatgccatgtgtggacgaagattgaaaccggtaagtccatcactctggcggctggatattttgctcgatatggatttatttcttcgttcgccgctcttcaattcttgtatttgggttctaattcgaggaaaatctataaccaacttttgtatgttgtatatgcaagttcttttggtgtaacatgaaatgaaatggtttaaatttaggcacattatatgtcaatctagatcagaaccaatctgacacagactccggatgatttttgtgtgcgggact

SEQ ID NO: 52971 - DNA, 465 bp, Oryza sativa
agcttctgcttgtagtcactgaataaatttatttgtcctgaactcgatatggcagtctgcatgatcataacaaaatattacatatgcacatgtatacatcaattggtatttcacaattaacgaaatgtctttttttatggtgcattatgaggaaatataaatttgtttcgaagtattatctgagagttttgagctaataacaaaactataccgatatagaagtgaggggatcatattcactgtctcctgaggcaaaggccacaccagtaagtaggtcatttatgtcaaggttctgatctttgtaagctggcaatagcttcttaatgcccaacttagaagctgtatgataacaaatattgaagtcatatatacaacatatagcatggttattttctatacggtaataaactcattctgttctgagctaatcttaatcaatgattaatccagtaaaatacatatacc

SEQ ID NO: 52972 - DNA, 274 bp, Oryza sativa
  unsure (1)..(274): unsure at all n locations
agctntgccaacaatggtgcgcgctgcattatggttttcgcatatcccagaatgtatgtccttcaacaattgtctcccttcctctaaagatacgcagcgttgcagaattcctgaagggcctttcttgtataactcggcttcatgcataacataaagtttgctccgccttgaaatccgctcggcttcgtctttatcttgaggcagctcttgagaagtaaaaaatctatgaaaggctcttgccagtcggcttgcaccatagctatgtcatgagtgc

SEQ ID NO: 52973 - DNA, 337 bp, Oryza sativa
  unsure (1)..(337): unsure at all n locations
ctcagcgtagcctactnatcacggaagaagagagcagacacttgtttctttgtttctttacagcgagcaattgtgaatatagagagaacatgtaagcagagtctacttgccaagagcacctatcttatcataacagaagcgatgatgtcagaacatacaaccgtttacacgcttgaacacctatcttatcataagagaaatgtttagagggcaaacagatctgttcttcagaattatgggatattgggtcgaatntcccttgaaacaggtttgatgcgtgaaacagcagtacgctggaacactgagagcctaatgcggtactactcgcattcagaca

SEQ ID NO: 52974 - DNA, 408 bp, Oryza sativa
  unsure (1)..(408): unsure at all n locations
tctgttaaggtaaacttgaactatcttttttctttcttggaattagcttcacaacagatttgctgccaggttgtactttcactttgatgtttgaacagacgcactgcatgcagatggtttataaccttggggtatatctatgcctgtggaacttccattagaatttgtttcatgtattaacaacaacctgtttagtcaaaaccaaaggtcagctgtagctggatccttgcatcattggcattcatttgctgtgacatcttttgttggtgtgattgttgttgtatgctactattccgcgatatagcggtataagatccgtaaaaagggcgttaccgtacacacatgaacctgctagatttctactttgcctatcacaanactacaaaattataactattagatgatata

SEQ ID NO: 52975 - DNA, 353 bp, Oryza sativa
ttcttggaaacccatttgcatcctacgggcttgcacccatatggacgctcaacgacttcccaagtaccattagacataatcgagtccatttcactgcgtactgcttccttccagtagtcagcgtcaggagatgaatatgcctcttctatggttcttggggtgtcatccacgaggtatacaatgtagtcatctccaaaggattttgcaaccctttgtctcttactcttgcgagtatctacaatgttgtcctcctcaggattatcctcaggcgtttgatcattgtgttctatcggtgcaaagtgctcatggggcatgacagtttctttactagaagtgctaggtgtatatttcat

SEQ ID NO: 52976 - DNA, 435 bp, Oryza sativa
tcgcagaaccctcatcgacggtggcagtgcacttattatcctcttcgtcaagaccttggatgatatgcagattcctcgctccgagctaaaaccaagcaatgcgccttttcacggagtaattccaggattatccgcaactccactcggccagatcaccctcccggtcacttatggcactcgggaaaacttccgcacagagaatatcagctctgaagtcgccgatttcgagacagcataccatgccatactcggacgcccggcgttagccaagtttatggccgtcccgcactacacttacatgatgatgaagatgcctggtccccgaggagtcctatccctacggagcgacatcaagcaagcgctcacatgcgacaatgagagttgcgacatggcccatacccgcgagatggcgtctggccgagaggatattcgact

SEQ ID NO: 52977 - DNA, 341 bp, Oryza sativa
  unsure (1)..(341): unsure at all n locations
agctngctgggggggcgcatctcttcttatctcgtatcttctcggggttggcctcgatgcctcgggcagagaccaagaacccgagaagcttgcccgcaggcacgccgaacacgcacttatcggggttcagctttatgcgggcggagcggagactttcgaaagtttccgctagatccgagagtaaggtctcttggttgcgcgtcttcacaaccaagtcatcaacataagcctcaacattgcgtcctatctggctacccaaagaaattcgagtagtgcgttgaaaagtaggaccttgcattcttaacccgaaaggcattgtcgtataaaaataaattcctatg

SEQ ID NO: 52978 - DNA, 297 bp, Oryza sativa
  unsure (1)..(297): unsure at all n locations
tcgagaggaaaaatcacaaaactacacaccttctctatggacagctntcaccctgctcactctgcgttcagactggttcaggggagaacaccggagttctgaagaaaacagcattggctctccttcacctgatattaaagtcgtacaagagaatctctaaaaatttcgtttgcaccagagtcggttgtatttggaaatataaaatgaatcgtacaagaaatctctaaaaaacctgtacgctacttgagattaagtcgactccaaatgcagctcatgaattctaaaataattatcaag

SEQ ID NO: 52979 - DNA, 374 bp, Oryza sativa
  unsure (1)..(374): unsure at all n locations
agcaaatgtggaattacctctgtaaatctttttatgagaaaacctagagggtaaaactcatactaaggaaanagagtataatatgacgaatatcatctattctccagaggaagatactccccctgaatcctgcaaatttttaagtcgactcataccaattccttagacacatttaaagaatgtggagtatggtagagatcttgtgaataaatcaacaagaatatcacatgacttagtttacaagatgtttatctctccatgttgctgaagctcatgaggataaaataatttgggagcaatatgcttagagatgttgctcttaatataaccagnttccatctgaacaacacaagcggcattatcttcatagataa

SEQ ID NO: 52980 - DNA, 257 bp, Oryza sativa
taaactcattgctgcggcgcactgatgtctttgtccttttcaactcgccataggagcgtatacatatactgccgcgttcacactttaactggaatacctgcgtacccactaatcgcctgcacaatcacctttgccctggctttagcaaaggccgaccgacgccttccacagtgccatccgatggtaatgagccgatgcgatttctcttaccactggcgatttacacactatgggcctctagacaatctgtctgatgc

SEQ ID NO: 52981 - DNA, 419 bp, Oryza sativa
  unsure (1)..(419): unsure at all n locations
acctgcggccatgcaagcttctctctttgatttttaaggggttttgtctatccactataactatggactagagntcagtcagtatcgagatatgtctttctttctaaccagcatatatgtataatatgtcagaacacatgtgttgattttgatgtaattaatctcgatcttgtgcaggtaagaaatgttcctgaaagttctgaactctgagatgggatcaaatggctgcaaatatcaactacgttgattgatggcttgattgaaccaacatgtatgaaatggattcaataagaaaaagcctgtgagaacagcaagatcaatgaagtacaccattattttccactgtcttacatttttccatattgtcatgccttcaagtccctgacagctatctttttttctgattaaggaacttatga

SEQ ID NO: 52982 - DNA, 340 bp, Oryza sativa
tggtggcaataatcatccacatatagatcactgctgtgtacttctgtatgttgtcatactaagagagattcgctctctgcagaagacctgaacttagatctgaattatattcctccactatcaccatcttgattaccagtatcacgcaatggttgacaaaaacctatgttgtgttattctcttactgaccttgagctcttgtctcttgatgaaggaacactgctaacagaatcaaatcctcctgataattctgtggagtgatgttggtaaaatatgtgaggtggcaaatttaggttattctgatgggatggttggacttgaacttgtgccatctctgctg

SEQ ID NO: 52983 - DNA, 291 bp, Oryza sativa
tcagctagtggggttatgttgacggtcattatttatttttttctaccaacaatattaccataatagagaagaactattgatgcttgcaatgcataaatatgtcataaaaaaaaattccactagtattaagtctactaaccttttgctgagaatgacaattaagtggaggagaatcgacatcaacatataatataaatcaatcagacgatgtctagaattagacttatgcatgaatgggccaagaactcagaattgacacgtcaaactgggccaaaatttacatgtctacat

SEQ ID NO: 52984 - DNA, 132 bp, Oryza sativa
cacacaatagacgagcgcgccgggagaaacgggagcatctaacacaaggtgacaaaaccgcagggagcaccctcacgacgcgaaaagccgcatcacgatagcggttacaagaaccgaacgagaacacaaaga

SEQ ID NO: 52985 - DNA, 287 bp, Oryza sativa
aactcagctcacaataatgctcctattctttatgaattttttttctgaacactttcttattacatatatatgagagaggaatcactcacacagaagatagtagcactaaagataattatgcagcatgtgaaaaatgatcatataatgaacaacacaagatgcttcatatgttcttgaattttctagtgggtcaatccattgtcaacatttacatgtatttaagggtattctaagtattgtcaaagtatctggttatatggtatattataattgttaaacaactgata

SEQ ID NO: 52986 - DNA, 326 bp, Oryza sativa
agcttgaaacctcctcaagggaaggcctttatcatcttatatccaatcttctggagacaggatatatcacaattagcaggcataacacatgtaagatcactatcatattcacaagatatatcccgatttaaatcaatcgaagataatgaatcggatgggaaaataattccacttacctcagccaactgttgcagctttttaactgccttccctcttggctttccaacacccatgtttggatcctttgcagaatatccttgaaaccatccctaaagccagaaggctccacttctcttaactgagagtcacaaaaagtgtctcttctt

SEQ ID NO: 52987 - DNA, 400 bp, Oryza sativa
  unsure (1)..(400): unsure at all n locations
agctntatccaagccatccactctctcttgaagtttgtcgttngtcacctcaagaatagcatgagactctttggtttgctcgtaaagccgtaccaaagaattatttctctctctctccttagaaagctcactcttgagttcatgagaccactctttctcacgaatgagcaattcctcttgcctctcaagggttgcatattgattctcaattctcccaagcaactcactcaagtgtggtatggaatcctttgctatggatttgaacaactcgtcatccataacctcatcctcaacatctttctcctcatcactaataagatcaacattaaatgacttgaggggagagggtaccttatgctcctttgcctgaggcaaatgggagcctcctcatcacttgagt

SEQ ID NO: 52988 - DNA, 342 bp, Oryza sativa
  unsure (1)..(342): unsure at all n locations
ttagatactcaactncnatagccaaaagataggtatgattactctttatgtgatatgaggcacccattacaataaccagtgaactcaagaagctctgcgagacaacgctatcaactgtatntgatggcaggccggtgcatataatcggagagatcaatactttactaagttcgagtgttaatcaattacctggatgactgtactatccggatgactgtacctgaaataagatgagattgatagctggttgaatacatcaaagatcatactttaacaactngtctggtggtacttgggatattattgctgcctgaatcaaatgatcttttgtgtatgattgct

SEQ ID NO: 52989 - DNA, 433 bp, Oryza sativa
  unsure (1)..(433): unsure at all n locations
agctngcacttagcacaaaattttacccttatccatactacatccaatggctgaacaacagtggtaaggcgaaggtaacaaaactggtgcacattaattatgcaattggaaattaccatgatgttgttgaatgtgatgttgtgcccatgcaagcatgtaatattctgctaggtagaccatggcaatntgatagggattctatgcatcatggtaggtccaaccagnactcttttctgtaccatgataagaaaattgtgtgcattccatgtctcctgaagatattttgcgtgatgatgtngctaacgctgccanatccaaatgtgagagtgataaaaaagcccaatctgatggcaagaaacctgagacaatcaatttgaaacccaaatgcttacttgctacttaatctgatattaatgagttgattgcatcacct

SEQ ID NO: 52990 - DNA, 328 bp, Oryza sativa
  unsure (1)..(328): unsure at all n locations
ntnccgaccaaggggcgaccggcgacaagcgacccttatatcccttcgnngatgacgaggaggagatgnttgccgtcgacgaacgagacgcatttgacaagtaccccgtttggcgccttctagtataggacgttgccgatcatacagtagaacatggcttgacgggttattttctcggcttctgcatcgtcctcgggcaactcgacgctacttatgaatataatgagcgggatctgccagacgtctatggtctcgatgtcagcaacggcgcgctctgcctctatatgaagcgaacccgctaggggtcatggcccgatccttcgatgag

SEQ ID NO: 52991 - DNA, 372 bp, Oryza sativa
agcttaaggctcgaaaggttgtctctgtataggatgttaagacactgcacaagaagaataatgatgcaagcactcggaaagaggaaaataaagaactgttcatgtcactgaatgaacaagatgaaggtcccaaggagtctggctcacagggagttgctttggaggggaaggaagacctattctggcagcaagggctgctaatcattcaaaccatataccatggtgctacaaaagctcttccttcaagcttaaccttgcggaagaaattcttagagatattgagtagtgttgacctagcacattctgactaactgaatgtagaggtcatggatgaccttgaaacagagttctctgacagtgaggactactggg

SEQ ID NO: 52992 - DNA, 360 bp, Oryza sativa
taagaacagatgttatgccgctattcaatttgtttattattggtaaccaacaggaaacaaaaagaatgaacataccaaagaatgggacagatagagcaatgaggagggttgagaccaccatggaggatctaagcatgattatgttcgcatacttctgctgattttgaggcagcaattctttcatactcatagccaatggggttatggtcaatgcatatgtgattatttgttaagggtatcccagatcgaagagccatattcacaatagtttcagtcatgtaaagtatgatatgaataattgtagtttgagaatttctttaagcacgatatatgaccatataggtcaagcacgatgctaac

SEQ ID NO: 52993 - DNA, 392 bp, Oryza sativa
  unsure (1)..(392): unsure at all n locations
agctttacaaagacttaaatattttagttctatagttctaaatttaaaatgtatactttgaaattataaagttttcaattcgttttaaaatacaaagttttagatgtgtcgtgacgccgaaatcggaccaatacggtcgatacggagctttgtcgctcgatatanggctaggcgactcggaagccggccggcgccaatggtttgcccacccccgggccttgtgccttcagcgatgagcgcgatacgcaggacacgtcgccggaggagcctcgccaggagcgtgatgtccggttaagttgtaccgttttttcatatgaattaatatactcatgaacagatgtattctaggtcatggatcgggcatggatgtacacacaaaaagagctctttga

SEQ ID NO: 52994 - DNA, 342 bp, Oryza sativa
  unsure (1)..(342): unsure at all n locations
ntaccgtggcttctagaggcctgacagggtcttggttatggaccgaattggcggcggcggccagaacctccggtgtgaacggtgacggctcgatctacttgaagagtggccatgcatgcctgtccaagaagtttattatatcccacggatggtgcatgcacgaaatatatcactagggaaccggcgaacgagaatttggccattgcgacggtggccggagttgtagacgatggacgccgatcttctttctcgataccgtattcttcgggatttttgacgggatatatagtagacttctcgaagctggtgggaggtgggtctctccaggttggtctaaatcta

SEQ ID NO: 52995 - DNA, 341 bp, Oryza sativa
agcatttcttatctggcacggtttttcttcttatcttcttactatgcacaccaaaaatatatatgttgaaaattgatgtattgcaagtttatatttataattccaattccaatcaatgctcggtgcgtacaaaattcctatatgttaaggtccaatgtataaaaattttggtaagctaatgcaccgtgcacgtgggccagactgatgtcattccccattagaactatcttctataaacggtgcgagactctcacatgctgctaattgaaaatctatattgcccaaccccactactattatgacgcttcctgaaaataattctggtaacacatcattgcttg

SEQ ID NO: 52996 - DNA, 192 bp, Oryza sativa
caactgatgacccatagcacagctcgtacaaaataatagtagaaagctacctgtcaccgggcagaaatgatcacccatccttcacctccatcaacgatattcgagagctttctgagctacccaagaaaccgagaccacgaatcacagtattctttcttcactgatgcccatgcaatggagacatctaattat

SEQ ID NO: 52997 - DNA, 382 bp, Oryza sativa
  unsure (1)..(382): unsure at all n locations
gcctgctgcatcaagctttgggtatgatacgtttgtgattgtgtttctagccacactatacctcgccgtactgttcactgccacactttattatgtatgtaaggattataactgtncggaacgatcgaaaaacagcctcaatcatttccgtaaccatattctcggagacgacaacgatatcggatatatcataaaaccggacacggaataatactgacggaaacatgtcggngcagatcggagaccagttacagatatggaaacattaaactattgaaacatatatttaactttacataagtatggtatatgtatacataaattcccagcttatactatataaattattaattaaccttattttagccatgcctaaaagtta

SEQ ID NO: 52998 - DNA, 214 bp, Oryza sativa
cgttagcgaaaatggaatccatttcactacggacaagacccctttcacgaatgtggcatcacgagatgcatatgcttctgaaattgacttaagagtggcatccacgacgtacacagtgaaatctttaccaaaagacttagccggcctttgactcttactccttcgaggaacgttgactgacatccttccttagagacaagttcatgggtatgtt

SEQ ID NO: 52999 - DNA, 278 bp, Oryza sativa
tcactatactgaaagaaatccttcctatttctggaaaacacttaccgacgactctgacgactggcacgctacactagatatgtctatatgccgacattattattgttcacatgtatctagtacaataacttgcacgtttgtactacgaacaattaactataaattaaaacctatgcaaaacaaggaactaactcttttcttaaaatttaactagattggatgctggatctatgttttttcgatgtgaaacagccaaactttttgaaaaaacagtataa

SEQ ID NO: 53000 - DNA, 292 bp, Oryza sativa
agcttgccgccaacatttcaacgccattgttacacttgacgctcacgcatgtgatacctgccctcctatggccagggccacccatcattgtcatagccagatctacaagagaggccagtggcgggggatccaccgctcctgaggccgccgccaccacatctgcgagggagaacgctggctgtgctggtttgcatggaagaaggccgctgccatctggtctgcgagggagaacgccagcatcgtccgatctgcgaagtggctggcaactcctgaagaggtgatgctgttacca

SEQ ID NO: 53001 - DNA, 436 bp, Oryza sativa
  unsure (1)..(436): unsure at all n locations
agctngctgttgttggctagaagtagattttctgctcatacacctgctcaactgacatgcgttgaccctgctgttgaaatgattgttcagcgacctcctttatattttccttgaactccatcctttctttatttcaaactaattagttcctccttccatataaaaacttaaagacttttaggtttgaatacgattaaaaaataggtgaaattggtatcccgcgctttgccgcgggttttatagctttatcgtcaaaacacaattgaagttttaaatggttagatgaaactctatgtacatgtaaaatatatgataatgtggttttatatatacactacgttattacaatacaataaatgctttacttttcaaagcgctatcgggtggtcttataacataagaatattatattcatgcgcaatattagaataggtgc

SEQ ID NO: 53002 - DNA, 343 bp, Oryza sativa
  unsure (1)..(343): unsure at all n locations
ntactgtntgacaccttttaagatgcattgtaccaactcttattaagttaagtaactgcggtataaaaggattttaaggtattgggcacttgatcacgcgcactatggcctaagcaaaaagtgcctaagtccctaaaagaacgtgacaggccacacctgaaaatatgggttgcagacatattaggcctaggccaaataatatgccttcgacaccctctaaaggatgacgcatgtaacatgctcccgagtaataaatcttctgggtaatatagaccaagtgtagctcatatgaatagcttctgatctgaatgattatcccttatgggatactccaaaataaata

SEQ ID NO: 53003 - DNA, 269 bp, Oryza sativa
agctggacattgatctatgatccagctatttctattctctatctgggtgcataacggtcaactgtgagattatgctgtagggcgcctatgcacttctatattttatccacctggctaaaatgccaacggtgatgagcttgcgagcgaacgtggacacctgtgcttacatgaggtcctgtttacatagctacaagagatttgctctctctgctcgatggccaagtgtttagccgacactcttattgactcttcaatgcgtaaaacatgca

SEQ ID NO: 53004 - DNA, 454 bp, Oryza sativa
  unsure (1)..(454): unsure at all n locations
agcttataaggacacattataacccaatgtttattatgttgaaattatgggacccacaattccctacttaaatgccattggagcactaatgtgtttatattaatagcacaagactngatattgtttttgcggctcatcaattggctaactgatgaagacacaacttgctcggatataaccatgactaccttatatattattccaccaaaggtgcatatgttctacattagatttacttgttatatattcgaataaacgttgctacacaatgaatttcgtgtgtattcgcttgcaagatactaacttgggcgatagacaagataccaattgacttctagtgtaactctgaatccaggaccagtctctattactatcaccacttatacaaagaatttctttaattcttcaataataatgagtccgactcttgcatttttatatgaagtatttaata

SEQ ID NO: 53005 - DNA, 335 bp, Oryza sativa
tcctggctcgatgtgaaggagcccatcccgtgatacccgccccttcactacactcttctgaatttggctctggtagcttttgctgaccagttatccggcgactgagatattcatgattatgatcagaatctttttctctaagaaaagttattgctgaagtattccgatgacaaactcggcatgagatttggatagataggccttctgcctgggcacgggtaggatctcgtgaacctttccaccttacctcaagtcactctggttctttcaaatatgtccttcatccaggcttgacatctgatcattctggtcatcttgtcctgtaatgactatct

SEQ ID NO: 53006 - DNA, 444 bp, Oryza sativa
agctttcaccaatgagggagggtccgtatctagtggtcggcgtcccccggccgggctccatacggctggccacgggcgacggcactgagctgcctaacccgtggaacatcgaacaccttcgtcgcttctacccctgaggggggggtcgggtgtcaggtttcgggctcgggccaaccccgcacctccctcgggcgtgcagggttggccgggggctacaacatatgcatattcttttttctcttacatctgtatttcaataaaagcagtttcaatgtcctaaaggctgtatctgtgctgttttttccttttgaagaatcttgacttgaaataagtcactcatgctcaatcctgccctcgggggctcgggtcggctaaaatcgccgaacggaacccagaaccgagccgtgccccgatgcgtggtgacttcggggggaatcggtaaaa

SEQ ID NO: 53007 - DNA, 105 bp, Oryza sativa
tccagagccaaagacgaccgaatttgaccggggcgaaaaaaccacaaaaaacacaacaaaaaccccaactggattgagatgacgggaagcgagggattcaaccaa

SEQ ID NO: 53008 - DNA, 399 bp, Oryza sativa
aacgatgtcccatcacctactgaattgtagcctaacataaactgatcgccatagaaagatgcctccgttctcaactttttctcactgagatacatctcggccatatctccgtcgtcatccattagctgctctatttcatccctgacctattgaaagacataatgccgattagacagtgcttcaaatgatgatctgaaagtagaaagtagcatataaatcgtaatgcaatatgataccttctggactcttctcgtcagagcaactagcctactttttaatcgccgtacacgttccaaattcagtgtactggatttggatgtcagctcatctaacaagggatatgcttcaattctcattcagctgcctgaacaaccggagaaaaagaatttactcatatgc

SEQ ID NO: 53009 - DNA, 376 bp, Oryza sativa
  unsure (1)..(376): unsure at all n locations
ntgtcggtgcgaacaaactgtgccgatcgtgggattgttaacaatatgtttgaggcccgggaacaaatcaaccgcgtgtgcgagtccgtccgcaaatgggccgacgcccacaattctctcgggaaaaaatcgggaggccgctacactcgcggcacgtctcactctcactgcaacgacggtnttctcgcgcatcgtcacacacatgcagtgatgcagatgaaccattcccaaagtgagcaacaatcacccacagtgtacgaggaatcatccattctttcttgtcatttctgcgggatcttacgtacgacgctagctatcacacacaacacaagcacgcccgatgattaattaagctagccgggcgagcgaacaatgc

SEQ ID NO: 53010 - DNA, 446 bp, Oryza sativa
  unsure (1)..(446): unsure at all n locations
tagcttaccacattgccaaagtgacggttcttannttttaccacaagacgactgaattcaagggtagctaactcattctgccccaacagacacatatattacatattcagccacatcgacgacagcaagaaaatggatgtgatgatggttagaactcttgtgaatagctacaacataatctactcatcacaaaatttgaaatgcaagtgcccatctttcttgttagttagaaaatgataacaatatcggtttggagggagaatcctctttcttagatacataacatgtttgagtagaaacatattatatgagaaatagaacgatcacctaatgcaacaaacatcatagattatccaggtggttaacactaacctatggagccggctaatatagagaattgtaataattatccctacaaatgggccatactatatatattctactgc

SEQ ID NO: 53011 - DNA, 359 bp, Oryza sativa
  unsure (1)..(359): unsure at all n locations
agctttntcttgagtacccatttgcatcttacgggcttgcacccatatggacgctcaacgacttctcaagtaccattagacataattaaagttcatttcactgcggactgcttccttccagtagtcagcgtcaggagatgaatatgcctcttctatggttcttggggtgtcatccacgaggtatacaatgtagtcatctccacaggagtttgcaaccctttggctcttactcttgcgaggatctacaatggtgtgcttctcatgatattcctcaggcgcttgatcattgtgttctatcggtgcacagtgctcatggggcatgacacgttctttactagaagtgctctgtgatatttcat

SEQ ID NO: 53012 - DNA, 455 bp, Oryza sativa
ctgcagcatgcagcttccaaagatctgtaaatttggttctttacatatgaggtgaaagtctcttaagcgggaatacatgaatcataagaaacgtgactgtttgtgtagtataaagggaacctgtactattcttaacttgagtttgtgatgctattgttatgatccagattatggatcagaacatctgtcaacttcatatggatgtacttcaagtactggtgctctatacatgaaatgtttatgaaacattggctccaagtgacagctatgcaagggggaaaaacatggccttgaaatcaaccattgcgaggttactattcagaaacaacagaaatacagaaatctcttgtatatataataatatatagtaccatggttttcatgaatacaggatcctatataataataatgtcaacataacgaatctttgagttatatcattaactgacgaatat

SEQ ID NO: 53013 - DNA, 206 bp, Oryza sativa
cactcctacaccctcttctattctcacaacctcacaagaaagactcttgatttgagtggaggaagccacgggaacatattgagaggctagaacaacctcaggtgtggaaaaactgaagagaaatggccaaaaggtgtgctcggtgtgatacggaaatatataacggctaagtgatgacatctagccgcgactcacaattttgaact

SEQ ID NO: 53014 - DNA, 419 bp, Oryza sativa
tgccagcattgagtgagaagagtgtctctatctctctattgctctaccaccattctcttggcgctgtatctctcatgcacaagaaataaatatcacttgttgttccaacctatgttctcttaatatccgaaagtgccccaagttatcactgccccccatgcctcatactttcactctaacgcatattattgtggaaggagattatcaagaagtgttgcatttggaagaaaagatactgaatgtaaatgcgtatggaggtagtttgggcttcctaacctaaaaaagtataaacatgaaattgatagatgtcacacatttatggacgatctcagaagctgactcctatcaaccttacatattagatgcaaacctgtgtcacgaagataccaaggtatttccttcagtgacagcaactctat

SEQ ID NO: 53015 - DNA, 312 bp, Oryza sativa
  unsure (1)..(312): unsure at all n locations
atccttagagncacctgccgcatgcaagcttgagggtcggcacatcataacagatgttgtattataatggacgttctaatgccccggccgatgccgccataaactatgtacgttacaacggatgggttgtgcgggataacctgcctgtcagtacggtgtactggcgataaacaaaggctcccggagaacatgagagctatgtcctatattcggagacagagatgctgtggaccacaatgctcgagacattcacccttcctgcgggtgcagacgacaaagtgaaaatgtggactctgaagaaaatggcagaac

SEQ ID NO: 53016 - DNA, 397 bp, Oryza sativa
  unsure (1)..(397): unsure at all n locations
ttagaaactcaagctcggaagagaggcaagggtgcttcgcatatctcccgttttgatttcattttgaaatcactaancgggttacttctttctaacgttgggccgaaaacaggcttgcgtctcgattcgactttaagagatgttcttcaacaactcaattggtaatgtactgaccccccagggcagatcattacttctcagctctcagagcaattccactcgattaagcggctcccacagcctttntatattctcggactcctagagcccaactgcccagcaacacaacaatgcgcgttcactcgggatgcctagtctatgatgcccgcagacatcccgaatcacacagatccgtctcttgaccactcacggcatccatcctgcccatatgctgatt

SEQ ID NO: 53017 - DNA, 282 bp, Oryza sativa
  unsure (1)..(282): unsure at all n locations
ataccttaggcccacgcccataacacggtaccaacaaatatgcttgcgtaattctgaggatcatntgttatattccaagtgctatgatatgtaaattaaaaaaacaaaactcgctcggcggaggaaagaccagcccctcatcttttcaagctaagaagaaaccacagactaagctagtcaagataggccacgaaccctgtgccctagacacagaatcaatttaagcagcacctccatagttacagtcgatattcctttcttattcctgtctaccttacaaaa

SEQ ID NO: 53018 - DNA, 361 bp, Oryza sativa
agcttcgagctaggatgcttctcgtccttcataatgctttacctgcaagataattctcactgaacttctgaactctgaattcttcttcttcttatacaaatatgaattttcgtctgaatttagtgagaaggtaatgagctaatatgaacagcctggtgcgagatatatagcgagaggaggcagattgaagcgacaaagagaaaggcactggctgcgatgttgacaagaacacgagatactactactactacatgtcaagcatcccaccacacattctgtgagggagttgtcaagtccctgcatctgagggttataatttcactaagtgtgtgtgaccttggacctcacaaaaaaaaaaaac

SEQ ID NO: 53019 - DNA, 243 bp, Oryza sativa
cagcttggcttaagatccatattttgattcttctttcccgctacgcatggtcctccttgtattttctaaggggataccacatgtgctgtgagtgctacctaaggagaagggaaaatattctctatatcaattacatgtctcgtgccttatcccacaagcattctacacgtcagctgctgtgcggggcccatcaaatcatgcgtcgcacccttgtcattcaccgtttaatggatgaggacttcc

SEQ ID NO: 53020 - DNA, 297 bp, Oryza sativa
gcgcaacctaaatccaacccacccagaggggttgtgatgctgcaacacaacaaaaaccaactgcgctaacacaaacatgcgacattaattaaacaggaaagcgcacgaaaacgaaaaacagacgccagaagcggcggcgcgcaaacgcagagcgccgaggcgcgcaacggctaaggccgccccacagcagacagaccgtgtagacaagacctgcgccccgcaagagccaagacacccccaaagcaagcgaagaaaacaaggaaccaaacgccagcaagcggaggcgcgaggcggcag

SEQ ID NO: 53021 - DNA, 410 bp, Oryza sativa
  unsure (1)..(410): unsure at all n locations
agctttatcgaacaggacatatgttaattgagccatgactaccatttagggaatatatcaggtagaaacaaagagaaantttcacccataattaacaattagatgctgtcatgctgggaagtgtaagtgcgagcttcatttatttgcataacatcaacaatcaagatgacaactgaacttgatctgtatgtacttttgattactttctaaacaaataaatacatctgagattgaatacaacaaactaaattcattgcatgatggcaagtagaattatcttatagtaacatatatgattaacaagagcagaatagagtggattctcataatcaagcaagcacttttgtagttgccagaagcgagcactattaaaattattactggaacaacgaacttgtcgcttttacact

SEQ ID NO: 53022 - DNA, 294 bp, Oryza sativa
  unsure (1)..(294): unsure at all n locations
ctcacgcnntactacgacgagaaccatacttcacttcagctttatccataaggttcttgatcctgcgtgactgtcgacgacccttaggatcaactaataaacttgagtcaagaacccaattggcttgccctgcaggaggacgagtgaaatcacacacggtaccccaaccacgcaattcaccacgccaagttgcctcccacgattcctttctaaagnaacggagaaacaaaaatgtgtccatcaacacccccttttgcgaagcagcagaacatgggaacatggccgatgtaacaa

SEQ ID NO: 53023 - DNA, 292 bp, Oryza sativa
  unsure (1)..(292): unsure at all n locations
agcttctcgtgcctgtcttaccaggaactctgtttggnctgaccccgccccggcgttcccaactattggtatgcgaggtgttccttatatatactattacttagccagggtgtcccattccatcttgtggttgcactttgattatgttcgatgagtttcccacacgaatcggctcttatatgcgaatacaggacagtgtcacataggcgcaacctccgcatcgcgagttttctcaattcattttatgtcaaacacaccgacaccacatgtcagattttgaaagcttcacaaa

SEQ ID NO: 53024 - DNA, 273 bp, Oryza sativa
  unsure (1)..(273): unsure at all n locations
ggaactaagaaactccgctgcataacccaagncccggatttgtgtcctcctggnaccagccgtcgctgtggtgtgggtgtagttcgtggctccctgctggtgctgatgttggcgtttcctcgtccgagtcgtccggtgcattctcgggttgttctgaagctgcaaccctaagttaatggaaataagccctctatctattttaaggatttgcaatgattcatatttgcaccgtgggaccagcactatgtcctgtgactcgtaccgagatcgcgg

SEQ ID NO: 53025 - DNA, 381 bp, Oryza sativa
  unsure (1)..(381): unsure at all n locations
tttttggctattatanttggagctattgtttgcacacttttttgtctncaaaattagttgtaagttgatgagagagaaatttgtgtggggaagagataatatatagaaaattagttgatttgctaaacaagggtttataaaatagttgagaaggaaaatatagtgaaagttaatcttaaataatagacaacaactataatgaaattaaaagaaggtaaacacaataatattagtttaatactctagaaatagtaaataagaatttattggtgtaatattttatgacttttgtatgaataaagatatgtcattattgtatgactgttgaaagagctggtaatattttattgattactgcattattgaagaataatatttgtg

SEQ ID NO: 53026 - DNA, 286 bp, Oryza sativa
attggacacatcatcgccataaaagtgctgcgaatatagatgcatgtttcaataattagtttcatgtttccaatatagaggatcatattaatattacatacctatttgcaaaaaaaagtcgttttccattagtcgtttcattttcaccatttatatattatcaacctacctgcaatacgtagtttcatattacaatttatttcattacgctattaagttctttttaaagtcagcatttgacattcctatcattctttttaatgattcaaattggaaccttactata

SEQ ID NO: 53027 - DNA, 243 bp, Oryza sativa
  unsure (1)..(243): unsure at all n locations
acgagcagcactgncacaccagccaacaaaaaaaagcacaacattttaccaacaaggaaatagggggtaacgaggaactcacagctcgaagacacggacacctcgtctaaaaggacaagccgacggtagacttaccccaccccgccagaggcgaccttggcacggatgcagacaacgggcaggacatcgctgtgcaggctgcacaccaggccaaacgccacaagcgagacccgcgggccaccc

SEQ ID NO: 53028 - DNA, 391 bp, Oryza sativa
cttctcctttcataataatgcgtcgacacagtgtgatatatttgatagatacacccgaactagttcccttctgtactggccatcaaggcagcgaaatggacggtctgctcttctcctcagatattacaatgcagaagcagacatggttatgcacagcaaaatagataatctcatctcctaaataaatagatatatagataaataaagaacatgggagcagttctcagtgtaccaattgatggaaaataaaagagaaactcaagtaaatagatacctgatcacttgaactggagctttgatggtgagaacatcatcaacaacaaagccttcatgtgagttggttagctccatatatttgtttcatcccaatcatgctcttttttcaaaaccg

SEQ ID NO: 53029 - DNA, 267 bp, Oryza sativa
ccgacaagaacccgaaggacgaaaggacaggacacaaccaccggggaccgccacgagcggccagggccaaggacgccacccgcgaccaaccgacaaacacgaacagcccagagcaacagcccacccggagacccacgaccaggctggccgctcgcacccaggcccggccaacggatggcctaaccacccaagaaccaccctcacaaaaaaaaaacaccgaccaaggcacaaagggcacacaccaacagaaagaggccgaaaccacaa

SEQ ID NO: 53030 - DNA, 487 bp, Oryza sativa
  unsure (1)..(487): unsure at all n locations
agcttatgaaacggcgcttcactcatgtaagntttacgcgcanattaaatancacgaaagcatatgacacaacacgctacgcatagatcgacaggtcagctcattccaaatacacgcgatgtagaagaacaggagcaagcaacgcgtctgatgaaacacttctgatgaaatcttgtgcaacgctcttccattttgaacccagctatttgaaccacgaactgtatttgaacagacgaatatgatttactcggatttccaagacgacaagggaggtgtctcagagtcctgccaagtagtgttagccatcatcagaggataccggtcgccatggacattgctagcataagactcgagtcagccatttctgcatgggtgaagttcacagatagtgctgcaacattctggttganattctcgattttcgctgtcccggtatggncacacatcacgcccctgatgatggatcaggccaatgcgagttgtgacg

SEQ ID NO: 53031 - DNA, 113 bp, Oryza sativa
  unsure (1)..(113): unsure at all n locations
gagtcacctgangctgcagcttacttacccagagtgccatatatgccccagaataagtgtatttatcnngatataacagccacaatnattatagacactttggtaaagaaata

SEQ ID NO: 53032 - DNA, 449 bp, Oryza sativa
tgatcgcttcattgatatcatgacgggacctgatccaattcatatctaaaaccatgatgctctggtcatcgaggatccacagattgaagaagtggaagccatggcacatcacccaacgcatacccatgatgttcagcgatggtcgacgtcaagcgttcgccctcgattccttaacattcctattgcctctgctccacttcccaccacattgaaagactatcatgacatggttgaagacctggtgaacaagcggctgaagcaaatcttcatcgagcaaacaccccgaccaatggagagtgagcttgagaagccatatgatgcttggcatgattagtacctttcctggcagggtggcacccacccaagttccgtcaattcaatggaaaccgagatgcaagagaacatcttgcgtactttgagctgtatgcggtgacactgtcaacaacccc

SEQ ID NO: 53033 - DNA, 252 bp, Oryza sativa
  unsure (1)..(252): unsure at all n locations
ctaagctatcgacggtctaagagccttgcttacctggcggagatattgntataggatcacaagngcagtacttcagttcagctccatgttgtgcaggaattattggaagtgttacaatctgatgagttgatctctgaaatttctgaagaagagccttcctagcctgacactattcttatggccatctttcaacaggccttatctggtactgaatctcctatttccttcagactcaagggttgtgtgcagggt

SEQ ID NO: 53034 - DNA, 411 bp, Oryza sativa
tgctccagcactctgtaatccaaagggaatggtgatataccaataagccccaaaaggtgtgataaatgaggtcttcaagcaatcggattcctttaagctgatctgatgataacccgatacaacccaaaaagctgagtaactcgcagccaaccattgagtcaactaccttgtcaatgcgaggtaacccaaagggatctttaagacaagatttgttgaggtcggtataatcaacacacatacgccattgtcctgtcttctttcgaactagaaccgggtttgccagccactcaggatgtagaacttccttgatgaagcctgctactaacagctaggctaaatactccttgatcggatctttcctggcctgcgtgaaatggcggagacgttgtatgatgggcttagcgacctctt

SEQ ID NO: 53035 - DNA, 424 bp, Oryza sativa
  unsure (1)..(424): unsure at all n locations
aacctncagagggtaccatcttcttcatcttctctttggcatgtgaagcatcatacacttctntcaaagttagagtatcacggctataaagaatagtatccctgaagtttgcatatgagctaagcaatgaacacaatagaataaggcctaaattctcttcatcatactttacctccatagactcaaggtcagcaaccaattccttgaaagcgaagagatggtccataacagacccatcatcttgcaacttatgcagaaataactattgcttcaggtgcatcttactggtcagatccttagtcatgcatatctggttcagcgttcaccacagtcctgctgctgtctactncttaagcacctcctgcaaatattgtatatagataacatgatatatgactagcctaccatccctttttctatcttg

SEQ ID NO: 53036 - DNA, 445 bp, Oryza sativa
  unsure (1)..(445): unsure at all n locations
ggctgcaagctggatnaatacactgtactcttggtggngaactatanatgnattaagacaacgancncntatgttgtttccaatctaaatggagattaccttaccaggtctctggtaaagccattaggcatgcctttntccgcattaggagttcataccacctcaagtggcatgccaacagttgaaattcgagtctctgactttgcctgacaaatcttagatgcaattggtttcctatctagctntagagttttattgccacagcattaaattttctaataagtcatgtttacctgtatgattcgaaaactattggatttgactctagatgatgttcctcaatagatgtcattctataatataatgtgcggcagtcaaacgtgaaatctaactctctatcaatttacgaaatcattactggtcattgttcacataacattcttat

SEQ ID NO: 53037 - DNA, 387 bp, Oryza sativa
  unsure (1)..(387): unsure at all n locations
attgccaacagtataccaccaagaagaggcagattcggtatatttattattagcaaccttaatcatttgagcattagagaaatcatactcatcaaattgttggtctaccgctagnctcccaataacataagcggtggaatcatacttaccatcaaaaactggcaaattagattctacccttgcaagatcattatcatgtacctcatatgctatgcgtgaagaagtcgttatatctcgttgatcgtgaagaagtcgatgttgagcatgaccatctcgtttccccttgtgcaatcctgtcatggntagtagcanacacgaaacatacacaagaatatgcacgcttctatcaactacttggtagtggaagcttccatatcacacacactc

SEQ ID NO: 53038 - DNA, 384 bp, Oryza sativa
  unsure (1)..(384): unsure at all n locations
agctngccgttcgccttgggaacaaccaccgngttcgccaaccactccgtangtatgacctcgcggatgaatccggcctccagaagtcgcgccacctcctcgcggatgaaggcttgacgttccggggcctgccgccgtactttctgccggaccggccttgcgcccgaccgcacggcgagacggtgctcaatcatctccctggggaccccgggcatatccgccggtctccatgcgaagacgtcagcgtttgcccgcaggaaagagacgagcgcgtcttcctatctgccatccagaagaccaccgatccgtgtggtcttggactggccgtcgctcaaggcaacctccttgaccgggacctcgtcgcatgtgactatccgctgcctc

SEQ ID NO: 53039 - DNA, 229 bp, Oryza sativa
  unsure (1)..(229): unsure at all n locations
gtgtcctttgtaacaatgtgaaaactacaattgagttattttgtataaaaagggaaaaattatgaanaatgagtacatggacagaaacaactcgacgtttcaaacaccgctaaagctggaatgttcttagatcgatgaagctgacatatttttttttctgatttgtgtgaacgaactctgcacggatgcttggctgaggctgaagaatgggtagtgtgcccgatatttt

SEQ ID NO: 53040 - DNA, 317 bp, Oryza sativa
gagcttctgaaggtgacaacattactagagtaattcatgatattcttgcatttcctttttctcatcttatattcatggatgggtgacagaaagtgaagccagcccaatggaaccttcacaagcctccacttcctaattcatttggaacacatcattcaaaggccatgctgcttgtatatcctcaagggattcgtgttgatgtgcacacacgcaatttgatacatgtcgactggaataacacaactcaggggctatggatgcaagattctctctcgaaagatgcaaaagatgtgaatagaagtgtttccttcgaaaac

SEQ ID NO: 53041 - DNA, 226 bp, Oryza sativa
atactttgttcgaactttttttttttagtcaaagatggttatgtatggctactcgaccaatggaagcctcctaccaaggacttgcctctacaatggcagtcggcactattctacttgtcggagggaagccgagtgcgcactggatcctaacaatgccttcatagccaccggtatcaggtgcgagtctacactacaaatgactcaccctctctaatacttattaagc

SEQ ID NO: 53042 - DNA, 252 bp, Oryza sativa
  unsure (1)..(252): unsure at all n locations
cgaacaaaaaaaatacaagcacaacacacacctgcctggctgaacccaanaaaaccagagaaagggacaaaaaccttataaacaagagcaggggaaagacaaacacaccacggcacaaaaaaaaagagaggagagaacacaaaaagaaaaaaagaagacaaacaccaacacacaaaagaaaagccgacccagaaagaagcaaaccacaacacacagaaccaaaggaccgacaaaacaaccaagcaaagaaaa

SEQ ID NO: 53043 - DNA, 138 bp, Oryza sativa
gcgtcgcgaaaactgcgaccacacgaggaacatgaccctacccatgacctaaaacacgcagctgcggatcatgcgcaaagaattgagacattaactaaatggacaccactgcgaaatcacactgccacaagagtctga

SEQ ID NO: 53044 - DNA, 433 bp, Oryza sativa
atactattggtatttcttaacgtcattactaagaatataatttccaacaatggcgcagaaatacttctggtatattatggctacagagttcatacacaagcgcacatatataccattgtagcatttcacccgagagtattccaagggtatcgtatttatcttattccgtgggaagatcatgtagagagaaattgactaatagtttatatgctactcgtgataatcatattctaagccatgtgtataaataatccaacggtagagtgacaccacaagcaattagctactcattcttataatatattatcttagggaaagttgacagaaaagagaaagataatctattcctatacttctaatatacatagtatacatctattctagttaaccgatatactagctaataccctctattcgatgtctctctgtacta

SEQ ID NO: 53045 - DNA, 198 bp, Oryza sativa
cctcacgaaccgtttctgtgaggtggtactctacgtataggccctttggaaattcggatattgcacggaaggagatgaaaatcgcaaataagaactgcgctctataatgcggaagaggggttcttcccagaactccgcccactaacccacactcccctcaattctaacccgtagccgccgccgcccctcttcctctag

SEQ ID NO: 53046 - DNA, 381 bp, Oryza sativa
  unsure (1)..(381): unsure at all n locations
gacactactagaaactcacgctnctcatggncgagctgctcatcgcgcgccgcgatttngtgttttggtctcacgccacgagcaggngagtgtaacaaaaccggttgtgaaattccatttcatccattactgttgtatggttatatctacaggatggcttcttagtaaagctatctcttatatatgtcacgtaagtctgatatgtattaagaaatttatatgaggtatcagtacttcacggttcccaatcaatattgatcgctggatctaataatgtccatcctgttatgtagatctaacgattaaaaacgatttagtactgttaggtactagtacctcgagatgccttttgtagaccagagcaatctccgtatttactac

SEQ ID NO: 53047 - DNA, 309 bp, Oryza sativa
ggatacatacaaatcggacgcgcctaacaggttgctactccatcctccaatgtttcttttgtcatattatatttggagctaatgtttgcacactattttgccttcaaaacttacttgtaagttgatgagagagaaaatttgtgtggcgaagaactaatatatagagatttagttgatttgctaaacaagcgtttataaaatagctgagaaagacaatatagtgaaacgtaatctctaatattagaacactaactataacgaaaactaatagaagtaaactcaatcatattagtttacaactttagaaat

SEQ ID NO: 53048 - DNA, 156 bp, Oryza sativa
ctcgagggctaaatctatcctacaacaagcctaacggaaaacacctgaatcacttcatatcttgacattcaccaacagctcatttctgcggaataatgatttgtgtaggcctccgctatctataggatgcactaacatgacaatattgaatgtgat

SEQ ID NO: 53049 - DNA, 473 bp, Oryza sativa
  unsure (1)..(473): unsure at all n locations
tgctagttctacataccatgtcttcgataaatataatggntattttgtagtttactctgtacattgacaaagaaatgctagatatcgnagaagagaaagagacaccactatatgagattgatttggatactatcataatgactctgcgtctagaaattgttatgatgttctctgtaagtattgctatcggatgcagattaaatatgtagcggtaaaaaatatttatgcataagtaaaacgttgcgtgctatttagcgctatattgatcattatttagatgtaacttttttcttgccggagtatagatgtaaaattaagggcccatgtttttaatttcgcctaggcaccatatctcaaatcgtcctgttcttaatttgcgctatgttacgaaaagggaagatcttttttatatttgtgcttttctcatcacggaacgagtgtggccatggcttgtatgggatgcattggcctgt

SEQ ID NO: 53050 - DNA, 51 bp, Oryza sativa
  unsure (1)..(51): unsure at all n locations
aaaaaggtgtgatctgancggaaaaacacnaaagacacacaaaccagaggc

SEQ ID NO: 53051 - DNA, 162 bp, Oryza sativa
caaagtaagacaccaaatacgcgaaaagcaaagaaaaaggtacaatccgggagcgcaaaaaaaacgtgaacacgagcagcgcacgaaaaaccgggcaacacgtgaaagaccacacaagagaggggagaacaccaactatacctaatagccggagaacacccc

SEQ ID NO: 53052 - DNA, 192 bp, Oryza sativa
  unsure (1)..(192): unsure at all n locations
tggacccgagaatgaggacgtagagtggngaatcaaattttgttgattatactctgccatgcgtcgncgtcgtcatgcacgttacaatcgtgcncacgatcaacatttttcagtggagtacggcacacgaacatgtagggggaggatacgtttactgctatgttcgccgaacgcgtaccggactagacaagg

SEQ ID NO: 53053 - DNA, 422 bp, Oryza sativa
gggatcggtttgagctactgacaggccctccgcccgcgacatcagatgggcggccatccaggccgaactcggcaccgtgtccaacccgtacacagacagcaagatcctggtgatataataaaccacgtcctaatctaccgcatgcatggaaactctactaacgacgcacggcatgacatacaagggaatcagtagactaattaatccaattgatctactaattacgcagatatatccggcatatatctacaaatgtacgcaataattctatatgaatctatcgtacctattcagatcatacacgcattgcagatctacagtttactatggttacctagagcatgttctcatacaatatctatcgcgtgagtggttccgacgttaaactgactacggtctaacgctgaggcccactttgtctc

SEQ ID NO: 53054 - DNA, 476 bp, Oryza sativa
  unsure (1)..(476): unsure at all n locations
agcttatgganaccganatatatgcaacaacagatggaatcaactgtgttatctttatnatgagaagtcagttatcccttgaggaataaagtgaatatcaaatcggattaatcaaacaatggatctganaaacttcggtaaaaaaaagatgtgaacaaaccttngctntaatattcagcaggaaaagagtaatctctcgatcaggtaaaaatttgcttgatggcccaccagaatcccgaaagaactctatagaacccagagagaggcgtgcatctgcagaatcanatatcttttcattgcaagattcattaatgaagaacatgtcatataagtaattcattcatgaagagcaagatacaaaagcatttaattcatgaagatcatatattgaaacaatcacagaagttatttgttcattctgaacaagctagataacctcataaacccatggttcatcatataggttactgatcata

SEQ ID NO: 53055 - DNA, 487 bp, Oryza sativa
  unsure (1)..(487): unsure at all n locations
agctntcctacagaatgtngagtttacaagtgttacacatcgaatccttgttttttattgacagngngaccaagaattggttccaggggtccagaattcaaagctattatattngagagtatgccgaagcaaagatttttctaactccaacagaaagaacaaaatgagaatgatctgaatccctgcatattggaattctgtctgcaaaagaactggccaaagatggcttacatattcttcatactttggcagagctagggggtataatgcttggaagtcttccctgctctgcgttgaggctccttcacacactcaagatagagatgtatcaaatcaatagagtcttgcgagcccgatttcagcaagactgcaaacttaattggcaattanataatttcccagttaaacaagacagtcacatnttctttacttcactttagtaacccttttgtgtacatgacctttacaatctgataacaactacaat

SEQ ID NO: 53056 - DNA, 215 bp, Oryza sativa
gcaccaccttagtaacctatgtgagcatgtgaggctaaaattctaagtcaataaatctaagcccgatgaagggtcctaaaaggtgacgagatggacctgattttggtaggtttttcccccaaatttaaattatttgagttatctttacaaagaggatttgcgttacttgagtttctctcacctagaaggggtggaaagatctacatagtttatgg

SEQ ID NO: 53057 - DNA, 421 bp, Oryza sativa
cgtagcttttgctcaaatatggtctttacttccatattctttattactgtagctcaagcgacaaatacatcaattgggagtggtctcaatcatattcttatattccatgctttcaaaatataaaatatttcaatatttggatatatacgccatttcaaatagcctgtttggtcaaaagtcaaaaatctcattcaagaggcacaaatctgtggaaatcctctcacaagtacttcaatatgtatttcacatatttttcaaggtattttgaagtaaaagatctaatttctaaaatggtttatcaaagtggccttaacaggatcttatatgatctatgttatgctcaaatgatttatctccctaaatcaaaactaatgtgtctttgaaaagtatctaaataaaaaatcgagggttgtcatctcaa

SEQ ID NO: 53058 - DNA, 421 bp, Oryza sativa
  unsure (1)..(421): unsure at all n locations
gcagcgaccaaccttgtggacgaccggcggcgtaacgacatcgcgacagagctcgcagcatcacagctgctactgatgtacgtatatacctgggcatctaatctgaattctaaaatttagaatacgctccgatggtatatatatacatatattaaacgaaacgtcttaattcatatacacggagcaatcaatccaatgtaagtaacatgcttgattntctgaacgtcattatatgtaatcatattcataattcataattcatttggaaatgcatgcatgctacataaaaaatggaaatgtacaagataccctgatgcatatatacatggaaagcaatcaatccaacgtaattaacaagcttgattntctaaatgtgattatatataatcacattcaaaatccgnattcatttggaatgcat

SEQ ID NO: 53059 - DNA, 77 bp, Oryza sativa
ccccacgcgaaaaacaaataacaaagaaacaaaggaaagatgctgtgcacctaaaaaaccccagaaaacacaaacgg

SEQ ID NO: 53060 - DNA, 331 bp, Oryza sativa
agcttgacgtgtggagacatctctcctccactgaggaacttgtatcttatttatatttccctctccaattgcatatctgctttacaattgcatcttataaactgaacacaacataaaaattcgcaaactagaaaatactagatagatatgacacgctatgagtcatgatacgtaagataagctagttctctttggtgaaatgatgaatagctgctctgtttatatctcttatatatgggctcgtggaagtgctctctcataggttaaatatatagtagcaacaattatctgggagtctgacgtatatgagctgcacttgctgtcagagtct

SEQ ID NO: 53061 - DNA, 383 bp, Oryza sativa
  unsure (1)..(383): unsure at all n locations
ctaagctaacaacaacctcaaatcggtgagcgacaccnnatcctataatatttgcatcacaccgcacaacctggtcatgatacaagtatgattgaataacttctctttctcctagcacatttggtaacagggcttacgggtgctacgacatagtccaatacaaaaaaaaaaaaagttgcacctgactttgcttcgaaatgtatcgaactgtgacagtttttagtccattcatattacgaataaaaataaatttgcacttattgactaagttgtggacaatttaagtacttggttggttggctcggtgaacaatatgttaatggttgtaacttctggaaaatagaatggattcttattcctgcgttcgccgcgggaaataatgt

SEQ ID NO: 53062 - DNA, 356 bp, Oryza sativa
ctttcttattgtataagaataaaagcgagtttatttgtattcaacggatggactgacagaccgttattgagactaaagactgtgcatcttgtctaaatgtatttaagagatattgttactgatcgaataactccttaatttatatcatgtctgagcggattgatatcattgtaaaaaaatgtctccttttattattgtaaaacaataagagcttagctttattggatcaaaaggatgtatcgacataccggtattaaatctaaagtttacacatcttttaccaaatggatatataaaataccggtacttatctaataactcctcaatttatatcacggcggagcggattgatatca

SEQ ID NO: 53063 - DNA, 412 bp, Oryza sativa
  unsure (1)..(412): unsure at all n locations
ctgcagcttccgacatatggtntctgcatacacagcactgactacttgcttctatatatttggagtaaaatggcaaaataagaaccaggaatcatggagacacatgcataataagtaatgtgaacnaagcaaaattcaacatggtaatatggaaatcttgttatccttgtataattcaaaggcgactagtaacgtcaattagtcaaaattgtttatcttatctaatgattgactatgctcacctaactaaaatgttacagattgacactgacatgttactgaacttgatgaaaatattcatctnttctcatatgtaatgngacctatcatacttcatctacttgtgagatcagtgtttggcttgcatctgccttcttgcacttcttcatatatcctttatagaacgatatag

SEQ ID NO: 53064 - DNA, 429 bp, Oryza sativa
  unsure (1)..(429): unsure at all n locations
gtcacctgcggcatgcaagcttattgtgaggcatggacttgtcaaaattcattnngattacanaggttaaatctttgcanaatcaatttagttaatgaatcagaatgtttattaggctctgatttcttgtcatactgctgcagttgcttaacccttgatatgcatcccatcccatgatttgcaaaactagaaattctatgatgtccagataaaatttgcccatggaaatggaaggcccntcctatagtaccgtacctagaatgatgtaaaatgctttcccagggatggagttgtttgttgtctttggcttgcgtgcaataccaagctcgctggtcagnggtcactgaaatatctttgagactgcatatggttattggtgttcatcgganaacgatataagttggtgtaaatgtgctctgaaattgatgc

SEQ ID NO: 53065 - DNA, 400 bp, Oryza sativa
  unsure (1)..(400): unsure at all n locations
ctgagctgcagcttatcgcaatgtccttcattaagagacccccgccgctatctaccttggatgttnttattgcatcacccttttagaagagccgtaaataatcttttagggaggaagatgatgcttaccatgtgaaccatctgagacgttcgctatattctactatgatctcatacaaggacaatattctatcgcaatctatcatgccgattcgcctgtataatggggattccgttcagagaggaccgcggtcaataagcctgaacagtactgcaaataaattgaatactcattccggagtcagccttgacaatcgctctgttcataaacagcaaatattgcagggccgcatacagaatgtaaaattccagcaatctctcaggaaacatgatcttactta

SEQ ID NO: 53066 - DNA, 355 bp, Oryza sativa
  unsure (1)..(355): unsure at all n locations
agcttgtagcttgcnncttgcatctctttaggattgaaatatggncccttgatttgacttcngtccaananntcattctaatggnatgatacgtatgaatccntttgcaggctaaggggcgtcttcatangtgggacttgagacggagaggagtggcccnatacaacgaccagaagaacgatgccgaagctgcattccagttggagtgaagatgcatgatggcaggaagacgatgaagcagaacatggaccagaagctcacgaatgacctacacaagattaacaagatacttgcgaggaagaaaggtgacaaagatggaggtgatgatggtgggcattatgatgatgatctacct

SEQ ID NO: 53067 - DNA, 422 bp, Oryza sativa
  unsure (1)..(422): unsure at all n locations
agctntccagcccgtagttagcaatgaccggaccgacaccggcttgtctttctacccgcagncgcagaaagcacaaaatacccatgcaccacccgctcaccgataatagattcggcagcagcaatcctatccatatgtgcatagaaatgatcgccgctgaggcaagcaaaagtaacaatatcggcctctgtcattgtgcggcggggagtcaacaggctgtcgccttggtgtagctccttcaaatatttgcggaacggatgaatacgatcttcttcgactntcgcaccgcgcacccactgtttactgatagcggcaagcatcgtcggactaccctgaacagctgatcgctgcatgtaatggttcaccgctcgtaaaccgcctaattcttcaccgcctcctgcgcgacaggcccaccatgtacc

SEQ ID NO: 53068 - DNA, 328 bp, Oryza sativa
tcaaacacgcactcaaaacatggcgatgccctgacacgacaccgatgcacaaggtgcacaatgccgaacgaccggtacgccgaagcagctcatggctggcagccaatgccaggcgggcaccactcaatcccaacggatggcctaaagcgatagcgcctccgatggggttaacaagtggcgcatcatcaggcagccccaaatctcgtagaacacccaacgcctgggccgcgaacgcttcgttcagtacagtcacgtccataacgtgaaaactcaggcctgtgcgtacaacacacgcgaagtgaggcacccgaccaaacccaaaagcgcg

SEQ ID NO: 53069 - DNA, 152 bp, Oryza sativa
  unsure (1)..(152): unsure at all n locations
aaaaaagaaaaaaaagggaaggaaaaaaaaagaagagnaaaaagaaaaaaatatagaagaagaaagaaagagggggaagaaaagagaaaagaagaaagaaaggaaaaaaaaagaaaagaggaaaaaagggaagaagaaaagagaaaaaaaaa

SEQ ID NO: 53070 - DNA, 383 bp, Oryza sativa
  unsure (1)..(383): unsure at all n locations
tactgttccctgngaatggctatgggcctttccttgctgcttatgtggaaggcgaagaaggcccccttccggtggggcccgagccatcagtgagatactcactcttgaataatattcattttaaccttcgtcaaattcctattcactaactaacaactctctaccaacatttctatatatcttacatctcttctacttttaacccgatacatccccaatttccaccctcttctttcactactcaataattatattctacatcttcaatctcttatctttaccgctacccaacacacttcttaatacatctatccttcttcacttttatcacatctaattattattattatcactctcatcatctatactctaaccactctttc

SEQ ID NO: 53071 - DNA, 279 bp, Oryza sativa
  unsure (1)..(279): unsure at all n locations
agcttgccgaacanaggaaaggagctattcattatgatattgctgtgcatangatatagattnataatgagcaagtcagggacctccttgtcaatgatggtctgaacanaagatatcctcatcacagcatgtttctatcacaatgtgccactttatttgtgttataaattgcttcacaagtaaataatttcgtactgctgaagtanatagtcttccttaacaagtatatacattagagattcgaaataattctcagaatggacttaatgtgccggatgc

SEQ ID NO: 53072 - DNA, 398 bp, Oryza sativa
  unsure (1)..(398): unsure at all n locations
gagacttgccactaggcaaacctttctacggggagtgccttatcttttcgcttgaagagattcatactggggcagagccatacatcataatacttatattattttgcaacattgcccaagcatcacctcgggtcttctgagactctatagtaaaatgcgataattaagtaatcaaaactcaatgctgaagaccattctgaatgaaatcgtgcgttactacataccaacctatgatgtcgcacgatttcacgtgactttaaccgtcatgttatatgtgtatatgagcatgtaatctaaattttggcatcaataaactacattncattcgcttaagtatgtacttgggagacgtggagctgaacagctatgaactcgaagcatataggtagatgaatgtt

SEQ ID NO: 53073 - DNA, 348 bp, Oryza sativa
aaaaaaagttgaaagtttatatgtgtacaaacaggcttttgatatgatatgatgtgatggaaagttggaaataccaggaaactaaacacgggcaacatttgaacagttggtcattttatcgtgcagctttaactgccaaacagaatactcgcgcgcggccacaaactttttgattaactttttagctagccaaccttcctgcaggctaccagcaggaatgttctttcagcttaattgtcactcgtagatgcttctttggcaagggttaaatgcatgagctacaatttgctggcatcttaattagccaaataattggcaagctagcatactactactccatcacctctt

SEQ ID NO: 53074 - DNA, 403 bp, Oryza sativa
  unsure (1)..(403): unsure at all n locations
cattgcatagcattggtttggaatcgatcatattgctctattgttggaaattacgtggggctgaatcccgctgctctaaatccataaagacaatcactaatgtgtgctggcatgaagaacatatgatgatcaatagcatagctaacacctctatgataaccccgacaccgcggtggtcattgctcagtaaatcacacgaaaaattatgatattnaacacccttacacaagtcctgttttactttcgttttttgttacataaatatactatgacattgacagtacgtgaaataatgaatattataaatactgccaaccactgctataaggactctacatcaccacaatgaagactgctatacagaagtccaagcactaaagcatacaaaacttacaaagaacac

SEQ ID NO: 53075 - DNA, 362 bp, Oryza sativa
  unsure (1)..(362): unsure at all n locations
tatggatgatcatatgggttactttcttgagagattgaaaattagctttaattcaccatctttctcaactagcttgttgctagaagaacacattttctttataaatgaattaaatctgacatctacattcaaaccaaaagaccacatatactcaggaaaggaagacaattataatgtgtcacactggtgataacagtttgttaaggctgctcactacatactgacacaattgtttagatcgcacaggtactggtacagagaaacatcgaanaagtcagaagtgaaattacaagtctaagtggaagacaggagcggttngagaagcaaaacactacaattttcctcataaaaattaatctgaa

SEQ ID NO: 53076 - DNA, 378 bp, Oryza sativa
  unsure (1)..(378): unsure at all n locations
tgccggagagaaatgatctaagagcagagaagacattttgttggcctcttcatctacacgacatgggggatttggctacaaagaaatgctataatttctaacaatgactatggtacagtgtcacatgtggttgacttcatcatcaacatgtgcaaagccttcgatgaagcgcatatcgcttagatgataaaacgccgacttttgctgttagaggctttgcactttctcanagtgctgtaacctcctccagtgtaaaatctgaagacacctcttggaggtgtccatgtacgtgaaactatttctttctcctctaatgaataggtagagcttctggcattatcccctcataaaaaaaaacttcgggactagtagctatat

SEQ ID NO: 53077 - DNA, 307 bp, Oryza sativa
  unsure (1)..(307): unsure at all n locations
gagatcatgcctgtgcccttgttggtggattttgcatggaaagctgattggctattttgacctcctaccaaatntaatgaaagaaaagtagacactgtctcttgattggactctcctatgctgagcttcgacatgccaacaagctcatcaacgttgattgggctctttgaatgaactggaacaggcttgacaatctcatgtgtttcttgcacaggaccatcttcatctttctgattttgccagaaaggaaccgagaattgcaaaaagggcgagaaataagctggaacaatcactggataggtcgact

SEQ ID NO: 53078 - DNA, 275 bp, Oryza sativa
ccaaagactgtcgacagccacgacgctgtcatttccacgtcgcacggatggaggaggaagagtcggctctgctcctaactcacgcaagcatcgagctacctccagcggcaccagccgcagcggctttcctccaccttgatgagccgaagggactcgtctccctctgcgacggctccagcaacgacaaggctgatgggagggacctcgacaccggcgccacccatcacatgaccggccgacaggagttcttcaccgagttcgactccagcgtccga

SEQ ID NO: 53079 - DNA, 367 bp, Oryza sativa
ttatatagagcaccatccgagtattagctgatacatgctagatctatctgatcggctatgctataaacatatataatcctgttattaatatatatttcgatctaagcgagttatactgtctcggcatggtgaccgatctattccaatcacttgatttaagtatatattaatataagaactatatatcgttaatatctacagccgatcgaatagatttagttccttactggctatttataaccgccgatcgattcataaatgacatcggctcaaagataaatgattgtcatcggcacctacccgatcggctatcatttatagacttaaccacgaattctttggctctatttcttgttggtacaggatc

SEQ ID NO: 53080 - DNA, 385 bp, Oryza sativa
  unsure (1)..(385): unsure at all n locations
catgcaagcttctcttactgaagggggttaaagattagttttaatgaanacaaccacagtacttagcaagccacaccggcaaatgcatgaataaatgcagggggtaccaagggtaataaaaaaagggttaagttttgcagtatacagcttttataagtcacttatttgcccacagccattttataaagacgatcctagagctacacagtgttattaaataagggcgtgaacccttacgaacctgccttaacccaaggcctacgatgattcagaccgaactggcaacccgaccctgtgtcccagcttgtcccatgccaacccaggccaaccattccacatattagttgttaaactggctttaagaattaaaacactaacttgggta

SEQ ID NO: 53081 - DNA, 303 bp, Oryza sativa
agaaactcagcttagcccgaccggcgtggtggtggagggacggttgtggtggtggctaaaggagatgcgaaagcgtagaaacggattcacctcgccgaggcaaagccgatggctcgagggtttgggttgtggaactatggtgaacgagatcggccgacggcaatgactgccggacatgggaggagagagagagagagagagagctcgaggagctcggcttgtgtgggggaaaagagagggcctcgccgttataagcggcgaaaggcggtggtcaatggcggttccggaggcagtcgacggatt

SEQ ID NO: 53082 - DNA, 407 bp, Oryza sativa
cacctgccgcatcaagcttattctgtgccatagttttttttttcgcggtgaccgactttgagatgaggccatgtcaagtggcttaccccgcaagaaaggaacccgaggactgtctctagaggatagccacccatgtctctagatccttggtgggtggctactggcttggcatccaaggattcaagcgccgtgcgttctgctttgaggcaccctccagatactgcttgaggctgtcaatcccctgcaggccactctcgaactcctcgttatcttgctctgtttggccagaatggtattggcgctgctttgttaagtggcgtttggatatatggacataacttcaccctctgtttttgacactaattagagattaaattttactacttataaactattatataatcaag

SEQ ID NO: 53083 - DNA, 450 bp, Oryza sativa
  unsure (1)..(450): unsure at all n locations
acacaatatcgttctctattggtaagaagtatctcatcagaacaaccttcacttacggaaactaccatggactcacgtcgncagagaacggtttcttatttctgtttggactccacatcggcgtcatacttctggacaaccggtgaaccttgacaacaacacggagctcatctagacacctattctggaaaagaggtgctcaccggtgctccggacgagttcatatatgtgtgcctggtaaactttggatcaggaacccctttcatttctgcattggagttgcggcaattggatgatccaatgtacccattcctgaatctttttgtgtctgtaagctactttactcgaatgagatttgggcagtcgatgattcatcacaaggtgagatgaagaatctctttttctgtgtctttattataccatattgcaaccgaggtgccctgtatcaat

SEQ ID NO: 53084 - DNA, 210 bp, Oryza sativa
gaggttacagagcgaaccaggagacgctctctctggggacaccgcgaatggtcctgaagggcttcagagctaatgaccctcagcggtgacgaaggcgacctggagcatcgtcgcacgcgacgtccatcgagcaattcccagcgaaaggcgcgcagcagcacagcagaacaggcgatcaaaaagggatccaagacagcaagaggcccacaa

SEQ ID NO: 53085 - DNA, 361 bp, Oryza sativa
  unsure (1)..(361): unsure at all n locations
agctttcttcgatagattaatttccttaaccgaatatagcacgtttctttctatttacgatgagataattctcctaggggcataccaaattttggcgcttacagatggcgagntctctccgaaaaaaatcatagtttcagggcaatcagtagctgcacaacagctataagcaagataatttactttatgacatgggcggtgttatatagtactaggactactaggttattttagagaaaattccatacgtacttctgaaaagtttcgcaatttcttctatacccctgaattttggctcaccctctacatgccctgtagttcttatttcgatctcttctatctctattccgttagttgacca

SEQ ID NO: 53086 - DNA, 383 bp, Oryza sativa
  unsure (1)..(383): unsure at all n locations
atatctaactaacttanaagcggactcaaacatggatctctatattcagaagcgaacgaacattcaaaatgcccaaatacggataacgtacccgaataccgacaaatacattgtaatttttctggaaggctacatcggtgtcgaatgagttttgataacaaaatcattcatgttatatataatcaaactgctgattaaaacgttattgcacactggatatgagaggatctggttgcgcctcaattattacaagattgaacctgtcaatttactgtgaacatgtcgacagggtagatatgaaacccggaatcgcgaaccggcattgcccctacctgaccaccgtcggcagtcactgagagacaaatgtgaatctgaaaacagat

SEQ ID NO: 53087 - DNA, 423 bp, Oryza sativa
  unsure (1)..(423): unsure at all n locations
gctgagaatagtacgaaggcgcttctatattttataattttatagattggcatcacatccggccttttatctcgactttaaagttctgatggatgatggattatggatcaaacagagtttatgaaaattatttgagggcacagacgagagaatttactattataaagttgaaaggttgactttaaaaagttctctaagaaatgccgatgaagaaaggttatgcaaaaatcataccgtttgggagtatgggaagtgcgctcgcaataatcaaaaatccgtgagaggaaaagaatgctntttttaattatttttcatctcatnttatactctgcatatgctggttcattctagcatattggatttaataatgtgctagttattcaattaacttacacatttgctgggctctacacaacctactca

SEQ ID NO: 53088 - DNA, 315 bp, Oryza sativa
  unsure (1)..(315): unsure at all n locations
ctctagcntgatcaagtntatacaataacataacatntttatctatctttctaacttactatcaaaatatagtcggtgttagacttaatgaaactaatctcggatcgtacatgacgctcaatcttactctctccatttacttttgatagtcatattacatctaattctacttatcatccatctaaacatgctactagttattcctccgaaacaagtgactcaataatatatatatttctcgatgctcctgcagctaactctgggcggaagaatgtagagccatgcattaaatccaagaaagcattaagatgatat

SEQ ID NO: 53089 - DNA, 408 bp, Oryza sativa
agcttaaggataccatcacagatctggctgttctcaatttcaaacctgctacgggactccttaattgatgcaacatatgcctcattcccacggctctcctccttctgcttaatagaagagatgatcctccacgatgccctccgagcaccaatcacgttcttgtaagccacagaaagcaggttccgctcctcaacggtgagctcaccaacatcagtggtctttgccaccttctccatgaattcgaccatttcctcgtaacgctcagcctgctcggcaagctttgccatgtacacattctcctcacgcgatgcctcagcaggcgacatttttcctctcctttgttcttcaacgcaaacttagtctgaccttgtgcacctgcaaataatgcatatcagcacttacacagat

SEQ ID NO: 53090 - DNA, 470 bp, Oryza sativa
agaaactcagcttgcgcagatggtccccttcctgctactcatcttttttttttctgaaggctgcaacgcaacttgcaaggcttattggcgatggtcagtcacacaccgaggaaaatgataagctttgcagtgcatagcaggtagttgatgcgcatagaggagtgagttcaggatcggttctcttgaaagttcagttcatgatcgatcgatcgattgtcacatgaagaacgataacaaaagtaataataataatggagactccctctgcaggtggtagacccgacaataatacagggcccatggagcctactgggtacacggatgaataatacaaccacgcatcacatgggtagagatggagagattatacggggagaattcgcattatgaaaagatctaccccaatcgctagcttacgcgtcttgttattagtgccgtctacctatctacggaaatctagcatagtaaat

SEQ ID NO: 53091 - DNA, 354 bp, Oryza sativa
gcttgctttgctagcaacattaccagaatgttattgtgcttaaaagggcgagctttgtatattgatactgaatccaaaatctcttcaccgaagtaactgaagattctgcttactattacggtctctcaagcacaccaattgagaactatctgtaaaatgtgtgcatgatgtatctacgatgatcgagattggtgagaaaagctttcctcaaatatttcgtcaagaaggcttggcccaacaggttcttatgcttcacctcgtacatatacatcgacactttgaaaattcactgcggtgctgtacttttgttctcataagattggacttcatgggctgttatcttgattttttgac

SEQ ID NO: 53092 - DNA, 347 bp, Oryza sativa
tgagacttgatcgaagatcgtggcttgaaagatatgtcctttattttaactataaggcccacttcgcaaggcgttcatttgcttcgcgaatatgaagcatatctccgagtggaaatgatgtgaccaccgtgaccgagtgactttgaaagtagtgagataattccctgacggcacttaagacaccatatatgaacttttgaacctgaggatatctggtcttggagtcggttaaaacctcgctaacaaaataaattggtcattggaccttttgaatatggccttcctcttcacgctcaacaaccaggaccgtgctcacaacctgagaggtcgctgacacatattacagt

SEQ ID NO: 53093 - DNA, 411 bp, Oryza sativa
  unsure (1)..(411): unsure at all n locations
ctgcagctgaataagagaccttgctctaattcttttgaacgngctgacgaagcctagaggaggggtgaataagctgtccctgaaaacttgaaaacaaatcgcagcggtaaaattcaaatagacccggaacttcctggtaaggaacaccggaacttccggtctgccaggcccggaacttccggtgttttaggacaggaacttctgggtaacgtaacaaaggatgaaattcaaatttcgaaacaggagactaagccaatcttcacaagatgatgcacaggtattctaagcagatgatagatcacagaaacatccacagaaacatcacagaaagagacaagagcaattttttcccgaagttcggatcttgcgatcctactttccgttgaggagctccaaagggctgggtctcga

SEQ ID NO: 53094 - DNA, 473 bp, Oryza sativa
  unsure (1)..(473): unsure at all n locations
tcaatgtaagaaagagatgcttattaatatcatatttttatatgcattatgacatggcggaacatatatatgcattatatatgtgcatgaatcggcatatcatattattatactttatgttaaatatatttgatgcacgacataaattgaattaaagctaaaacgtaccgttcatatagtaatattttttgctaacatgaaaattttaaaaattattaaagtaccgttcatatagtaatattctttgctaacatgaaaattgtaaaaattattaaagacaaatagaattacaccgtatcgtttagcacgggcatattactagtagatatatgacacanaaaggataacttaatttatacacatgtacatatacaggtacagggtgagctctgatgacattgctagctagggtgctaggctgaatatctacantaaggaagtgcagccaatagagcattattcacgagaccaca

SEQ ID NO: 53095 - DNA, 407 bp, Oryza sativa
agcttaaggcttccagatctagttatacatattcacacaatatttcatcattcataatgcaagtttgcacgtttgatcatctaattagctgagagaattaggctagagatcgacgggcgagctagctgctgcagatctcgcacggctccgcgtacggctcgcacgtgccatcctcacccagcacacagcacccactgtccatcaccctgaaccctgcaaaaaaaaggaaaaaaacatccataaacaaaaaaaaaggaaaaaaaaacatccataaacgcggtcatgttcagttcagatgtttttcgtttccaaatgtaagcatttctgatgtatccatgtgcgtagctagaaatgtaagtttgagtttctgtgatgtttataccgtatttgtgaggattattgatcat

SEQ ID NO: 53096 - DNA, 442 bp, Oryza sativa
  unsure (1)..(442): unsure at all n locations
ncaatgtnagaaggagatgcttattaatatcatattattatatgctttatgacatggaggaacatatatatgcattatatatgtgcatgaatnggcatatcatattattatactttatgttaaatatatctgatgcacgacataaattgaattaaagctaaaacgtaccgttcatatagtaatattttttgctaacatgaaaattctaaaaattattaaagtaccgctcatatagtaatattttctgctaacatgaaaattttaaatattattaaagacaaatagaattacaccgtagcgtttagcacgggcatattactagtagatatatgacacagaaaggataacttaatttatacacatgtacatatacaggtacagggtgagcttggatgacattgctagctagggtgctaggctgaatattctacattaaggaagt

SEQ ID NO: 53097 - DNA, 320 bp, Oryza sativa
aataggaacgggcatatttttgtgtatgtttcttgttttctactaacaattgcagggatacgcaagataattggggatagctgtgctcaacatcgacatcttcgtcgagacatgaggagggatcaacatgaccattatgaggtaagtgatgatgttctatgtaagatcaaatctgcactgccttatttcgagggagaatatgatcctcgtgcttacattaattgggagctagccggtgatagtgaatttcaaaatatgtcttgtcggagaaaccaaaggtatgtgtgcctctagtgttttattaaacatgcttctaatga

SEQ ID NO: 53098 - DNA, 414 bp, Oryza sativa
tcgcaattaatcaagtcttgctatatagtcctaaagtatctcgaactaattgaagaagctagagctttatctctgaaggaatggaattttagagaaaatgtgaacaaacagccttgaaacttctttcagtttggaagagcattggaagacaagatgcacaaatagatggatccaacttggtgaatagaaactaagttttttcatgccatggctacagagaggtttaaaaataactcgatagctcaaactaatgataatggatccgttgtctcagcacatcatgataaagcctctctctcttctgacactcttcaatctagaatgggtgtttctacttatcggctatgagtttcgaccaaaatgaacttataccacgaaatgaaaccctgatagcatggataacattttccactc

SEQ ID NO: 53099 - DNA, 349 bp, Oryza sativa
  unsure (1)..(349): unsure at all n locations
ntctctagcttatctacctatatctcctcctgtttaatattgccacgtacttttcctggtcgtgggtcaccatatgacccgatcccagcggacaaactcacatgattacccccactaactatttactgcccgtttgtgtatggttcgcctcgccgtgcggcactggtgcgacgacggctgggccaggggcattagtacgttccgattggagcatttgcttctgccgatccgctgcgtcacctgcaaaaacggtcaaagacgacatgcggctgcatctgcatgcacgtacaggaggcagccgcttcagttgcgctactgcgaggtgcgaccgatgagtagcatgttgatg

SEQ ID NO: 53100 - DNA, 318 bp, Oryza sativa
ttaatcggtcaaatatcgacccgtttttcttttattgccatatggaatggtgggtgagacccgacgatcacaagtgagttttgcccgaacgaccctatcactccaatatgtcaatatcatggtacgggcttatgaacttataattctgtcaacacatgcctcgagggatcaagaaggcaatatggcttaattgaaaaagacccgacgatcacgaatgagttgtgcccgacgcactaatcactgcacatgtcaaaatcatgctcggtgctgttgacttattaatcgggaaaatatcgacagtgggttcaaatatccaac

SEQ ID NO: 53101 - DNA, 319 bp, Oryza sativa
ggaagaacaaggtgatggagcaactggcatcggaacgtctacacctaacggagcctctatttctttgataacaacgaactcaccatagcctctcataactttgacatcgagccttacctgcgttctacccaacttgatgggacataataccccgcttggaagcacaagaagaagttgcgtaaatccaatctctttgcaccctagcattaggaaagtcgtgtgcacatgtgctgatgcttcacatgaacacatggagtttaccacggagcacgagaaagcaatacacctcattgcacaggccgtcaatgacaatctctct

SEQ ID NO: 53102 - DNA, 398 bp, Oryza sativa
agctttggtaggcataaaccaaccattctttttggcttgtgtactccaatagttccgagaagggcatacagtatgtgaatttcagccactaaaacaatacagaattaatcgctacttattatttccaaactgggacggtgataatatacagaaaaaactatgcagcaaaccagccatcgatgtaggtaaacaagcaactcatataatggaaaagtgtttacaattcgacaaagaagctagcaactgttaaccagaatgtcactagccatactaacgacagagccacttatacctagagacacacggataaaactgttggggtgatcgaagcccgactgaagtatatacaccaactgaagcaagcctatattacaccacagtagatgtaataatacgag

SEQ ID NO: 53103 - DNA, 367 bp, Oryza sativa
tgagcaccttgaggctatcaatagcagctccaggctgtggaggctctatatgaaattctccaccctgaaacggagaaatcactacaatattcagcttcggtagattctcaaggaatcacatagcaacatcgtgctccaataacctagcgcccactagttttagcttcacgagatgctggagctccctgatccattccggcaacggtttcagactgccgtatatcttgaggctctgcacgtttgtcggaggcgaggatatatcatccaagcatccacacaaacccgacatccgtgctgaactcacagacagtgattccagcttgccgaggttggaaaaggccaacctaaacgctcgtccatccttctt

SEQ ID NO: 53104 - DNA, 382 bp, Oryza sativa
accggaatgaaaaagttcaacaagcaccaaaacatgatttttggacatattggagtgtgttgggtgcattcgtggcaaaaagtcacttcgtgattcgcgcggcgaacttttgtcaattaatgccaatattgccatatattggcacacgtgttggcgatgcttttcaccggaatgagaaagttcaaaaagcaccaaaacatgatttttggacatattggagtgtggttggtgcattcgtggaaaacaatcacttcgtgattcgcgcggcgaactatagtcaatcactgccaatattggcataggtgggtgcgatgttcttcaccggaattgaaaagttcataaagcaccaaaacatgatttctggacatattggagtgtggtg

SEQ ID NO: 53105 - DNA, 222 bp, Oryza sativa
  unsure (1)..(222): unsure at all n locations
cgtcacatctttaggcccaatgggctcgtgatccatgtagggcccacaaagggcgcgtcctaggagtggagcacgaccctatgggcgtcctttccctctctatatacctctagaccacgccaagaacaggcnggtcctgacgatagagatagcttcttgctaccggctcgcagcgcgcgtgatggctaaaccgccacgcagcctagaatcggaaccccacca

SEQ ID NO: 53106 - DNA, 322 bp, Oryza sativa
aagcttctcgggtttggtctttgcctttgtattgaggccaaccccgagaagattcgagctatcgagcggatgcgcccccccagcaaacttatggatgtgcaatgcgtcaccggttgcatggccgccctaagtcgtttcatatcaaagctgggagagaaggcgctacccttgtttaagctcctcaagcgctcggggccgtttacttggacggaggaagctgaacatgccctcactcagttaaaggcatatctcagctctcccccggttctagtcgccccggagccaaatgagcccctgctactttacttagcggcgacccccc

SEQ ID NO: 53107 - DNA, 414 bp, Oryza sativa
  unsure (1)..(414): unsure at all n locations
tctcgggttcttggtctctgcccgaggcatcgaggtcttctctctataagatacgagctatagagcggattcgccctcccagcaaacttatggatgtgcaatgcgtcaccggttgcatggccgccctaagtcggttcatatcgaggctaggagagaaggcgctacccttatttaagctcctcatacgctccgagccgtttacttggacggaggaagctgaacgtgccctcactcagttgaaggcgtatctcagctctccctcagttctggtcgccccggagccaaatgaacccttgctactctacttagcggcgaccccgcaagtggttagtgcggcgttggttgtggagcgcgatgaggacaatcctcattccgcgcatccncaccctgtgctggcttggccagggagagagc

SEQ ID NO: 53108 - DNA, 252 bp, Oryza sativa
accccactggccgtgggaatatattttttagccccccgcgacaaaaactacaggctgtccttaagagcagatgaatgacaggaatcgcattagctactacatgtgattctggccctttctggaagagactcttgactacgggagctttgacgaactcatacacaataactgccttttgatgaaatgactgactactgtgttgcggtgctgcccaaaatactctcctgacgcccaaagaaatcaacaacataa

SEQ ID NO: 53109 - DNA, 412 bp, Oryza sativa
ctatcaagaagacccctctgtcttattcttacccacgggatgcttgttatgagcgttcacgccatttagaaagagccgctcaattaaattcctttgtatgggaaggaagtctgactgctttaccaataggtgagactcaatctggagacgttccgcctatattcctactaatgtaatctccattacagaaggacaaatattcctatccgcagatctattcaatgccggaattcggcctgctattaatgtgggtatctccgtttccagagtaagatccgcggctcaaattaaagccatgagacatgtagctggcaatctaaattggattagctcattcgcggagtacaagccttgcacaattccctctgctctcgataaacaagcagaatcaattggcaggtgccgacattac

SEQ ID NO: 53110 - DNA, 405 bp, Oryza sativa
  unsure (1)..(405): unsure at all n locations
agcttagaagaagtatgggcgtttgattttttttttaataacacactacgaaaattaggcaccctcatgccaaactccattcaacgtattattttttctctcctataggtagaaaaaggaaatggcactattcggctgcactgagcaaccgtgacaacatagtcgttattgtcacaactactgatacaaaacactatggctgtgtttggcaccttgttcccaacacctctccctcgtttttcacacgcatgctttttaaactgctaaacggtatgttttttaaaaaagttttcatataaaagttatttaaaaaaatcaaatcaatacattntttgtaaaaaaatagctaatacttaattaatcacgcgctaatggatcactctgttttccacgtggaggaaatga

SEQ ID NO: 53111 - DNA, 59 bp, Oryza sativa
ggacctcccagtcgacctgaggctgcatgagatactatagcgcacttttattttttgtt

SEQ ID NO: 53112 - DNA, 104 bp, Oryza sativa
  unsure (1)..(104): unsure at all n locations
gaaaccagctgtctgcagcaccttaagacccggaacttattcttttcccctataagagnccagtacagtttagtgcgcgtagatctacaccgcgagaccgcgat

SEQ ID NO: 53113 - DNA, 269 bp, Oryza sativa
ttttttttctttaaaggaggcttattcagagtgtattgcgagtaccttcagtttccagcttagtaaatcacctcttttgggcgttgcattggaaatatttagatgttcaagctggccacttgtcaataacccgtaaattgctagtataatggggatactggtccattcacagacaattcatatctttttactgcatttgcacttcagaacgcaccaatttcgctcgcgttcagctgcctgtcatcgcaggggctaggatattcaatttt

SEQ ID NO: 53114 - DNA, 57 bp, Oryza sativa
ccatacaaacgcatgagaacctgaatccctgcggatagcccttgtccctgcgctaaa

SEQ ID NO: 53115 - DNA, 353 bp, Oryza sativa
  unsure (1)..(353): unsure at all n locations
agctncagctagctaattaattctagctttatcttgtctctgttcttgccgctctttatatttctgatcgatatcgtttcttcattttgattgcgctgtccttttctcgcactactctacccaatcttctaggagtaatgattcttcttctttttcctaaatattctattcccatgctgcgctcgtgccgccttaatttatacgtactgtcttccacttgctaattatcgttgcatttatagcatagtggctcttgtagaataaaaattgaatatataccttttttttcaacgttttgcatttatacacatgcatgaaaaagaattgcgaaaatatacctctaccgcagaatg

SEQ ID NO: 53116 - DNA, 375 bp, Oryza sativa
  unsure (1)..(375): unsure at all n locations
tagcctgtgcagggttgccanaggttgcagctctgacagtttatttatctttgctgtttgaaacaacataccctagcaatgtctgaaggttnttaagatttccgaatctgtgaggcattcgagtaagtgatgcacatccaagaacactaagatactcaaggctattaattntactgatgttctgaggtaattcagaaagatagcggcatccttcaaggtctaacttgtgtagccgagaaagcctgcatatatttcgatgcagnttttggagctttccacagtaggataatttcagagtatgcagaagttgtagtttggatattgagctggngatgactctgatatctgtccctgataggttgagaaatgtcaagt

SEQ ID NO: 53117 - DNA, 410 bp, Oryza sativa
agctttaagttaaacatcttctaaagtattgtacataatggggctaacccaaaaaaaaataaacttacatttcataaacatttatgcagttacatgcaaaaatattcatactttgataaaataaactaaaaatatatacaataacgaaatttcaattacaatgaaactaaaatagcagatttacaacgatgtaatttaggcttagtaatgtgcaattttaggtggatgaaaatttatatttttttaggtgattaaaatttagcaagtgcattttaaaatatgatttactggtataatttttatacagtgaattcattttttaaattgactacctgttacgttaataatacataatttatcttattaaattaaaatgcatcatatacaccaacaagcatacataattgggg

SEQ ID NO: 53118 - DNA, 327 bp, Oryza sativa
aaaatttttgtcagtccttacccccggcgagttagtcccgtcttggtccattgtgccaaaatgaaggaggcgactggcacgtctgttcaggggtctggctcttcatcaggtcgcatgacgagtctagtactcaatcatcaacagatgtctcgatggaagacgccgaagctccgcgatgactcctgaacgacaccgacctcgaccttgtcagtgatcgggagagacaagcctactacatgctgagcgaccggaagtatgctcacacgcgagaatactcaccggagctgctaaaaaaagataggtatggatgctgaatttcgtactatt

SEQ ID NO: 53119 - DNA, 298 bp, Oryza sativa
accccgcgcgaaccctcttacctttggatcctctccagccggcccgagcgaaacacgagtgcacgcgtctccgcggtataaagacgaggaatatgaactccagaaagaactcacctgataacttaattgacgtgcaccagcgcgggtaataagaccatcatgctgcatatggagggacgtggatgcatcgatggtgttgatagccccatcattcctgcatgatagagacctgcaatctcgaccaatgatctgcaatagaattccctactcgcttctattcgtattaccaaaccgattc

SEQ ID NO: 53120 - DNA, 442 bp, Oryza sativa
  unsure (1)..(442): unsure at all n locations
tttttatgcaagctcgaggcctgctgggccggcccaggttctgtggcgcccagtctggttagctctccacgtggacatccaggattgcttctcaatgacggttgtgagggtaaaatggacatttcacatgccattaaccgccataccacccctataaaaggaggagctcattcactctcgcaacacattcaagcaagctcaaattcctcttcatactntagtattagtatcttagtgctaagtggagtagaatagaattttggtatggctctagcagctcttgtgttctcttctgtaatactttctatattaatgaaatactcttctttatatatcttccgtactttgtttagtctgagtattgttcttactttatatttgcgtcgcaccaattctatgggtagtgtaccagagaggtgcaatcatgcgggtttaatgttta

SEQ ID NO: 53121 - DNA, 416 bp, Oryza sativa
  unsure (1)..(416): unsure at all n locations
cattccgacaagcctgtgtgtattattttggataactcagaggaactctctatntacctcgacgtgtgagtttaagtgactaagtatgaccaatacaacggcattgcgccacgcgggtggggttccgaagtgcccgccaccactgcagtaagttcaaggcatgggcccgccacttaacggttctaggccatagctctagcatgactaggatggaggaacacgtatcgcgctggtgtaaggctaaatcatgaattttggacaaacattgttgtgggcaataaatcgggcacttatgtatcgcgagccatgctctagcatgattattagttcgcatcatgcggtggaagtgtacaaaccttgcagagttcaaactaatcgatttaccgcgctcgcggctatgagcagcgcgaggatat

SEQ ID NO: 53122 - DNA, 389 bp, Oryza sativa
  unsure (1)..(389): unsure at all n locations
ctataaaactcaacttaggagtgcaagcgcaccgatgcatggcgttcttttcttttcatatccaggctgngagagaaggcgctacccttatttaagctcctcacacgctccgggccgtttacctggacagaggaagctgaacgtgccctcactcagttgaaggcgtatcttagctcttccccagatctggtcgccccggagctaggtgaacccttgctactctacttagcggcgaccccgcaagtggctagtgcggcgttagttgtggagcgcgatgaggacaaccctcattccgcgcatccncactctgtgttggcttggcccgggagagagcagggaggagaggctcccgagccgaacggtggcccaaagcccccgacgaccggagc

SEQ ID NO: 53123 - DNA, 398 bp, Oryza sativa
agcttctcgagtcatggactctttctgatgttattgaaccaaccccgagaagattctagctattgagcggatgcgcccccccaacaaacttagggatgtgcaatgcgtcaccggttgcatggccgccctaagtcgtttcatatcaaggctgggaaagaaggcgctacccttgtttaagctcctcaagcgctcggggccgttcacttggacggaggaagctgaacatgcccttactcaactaaaggcatatctcagctctcccccggttctagtcgccccggagccaaatgagcccctgctactttacttagcggcgaccccccaagtagttagtgcagcgttggttgtggagcgcgatgaacacaatcctcatttcgcgcacccccaccctgtgccga

SEQ ID NO: 53124 - DNA, 408 bp, Oryza sativa
agcttgccgcctacacggatccttatttattatttgaatgatgtcgtgcaaattacgatgctactatgtactcattttttccgttcttgctgctgatgattcggccaaattatgagttgagacaatgaactgaatatgtccttcagtgagtaggcaacaattcttcagatagcttttgctgcaattttgatttgattggttgagatgctgatggatttaccttcatgcagttggcacatatgtctagtctttgtgtcgaagtgagttcagcatatcagctgatcaatctcttgacaactggagtacttaccaatctaacattcattcgatcaacatgagttttgtacttttgttgcagatacaacatgcgtggtgatgtgagggtaaaaatacttaaattgtacacag

SEQ ID NO: 53125 - DNA, 432 bp, Oryza sativa
ggattcttaatcacctgcagctgcagctggctttcgctcaggttttgatttgattgaacccctgaaagcgagagcacgcgtgaaggtcatcgcgctgttgctgcatcatgttgttgatgttggcgaactgagcatcagcagatcgttaccattcttgcgtttgtgctattagttccatgaggttttactggatctcctctgtctgcatatcaagggtgtccattctcctagtgatttcacccaagtcccaatgagaggaacttgagtgccattcactcggagatgaaggcacaccacttgagctggaggcttggttgtccccccattggatgtcatgaggcgcaagccaccggtcctcactggcacttgcccaggttgagactccgatgttgtgacgtggagcttgggtccattcggatgctatcctaattg

SEQ ID NO: 53126 - DNA, 316 bp, Oryza sativa
tatctcttacgctccaggaatggatcagtcagaacatcacttctctttcgtctcggccgccgccgactggtgtttccgcctgcacggctggcctattatgccgccgttgttaggcgtctacgtcttcaccgaccggcttgccttcgtcgccgccgactggtgtcctcgcctgcacggctggcctattatgccgccgttgttgggcgcctacgtcttcaccgaccggcttgccttcgccgccgacgactggtgtatccgcccgcacggctggcctattatgctgccgttgttgggcgtctacgcctttcaacgaccg

SEQ ID NO: 53127 - DNA, 325 bp, Oryza sativa
tagcttgccggcggccttcctgctctctcttttatctcctgaactactgacatgtgagagtagtacaaagtgaaagcttttggtaaaagaaactaccccaaagtgaaaactttgtctttaaaatggtccatgttaaaacttgggtaaaaataactagaccaacgtgcaatttacttaaaaaaaaaggaaagaaaatcagtccttggcgcgcgccactccgtcgacctcgtcttcctcagaatccgcggtcggcggcgtctgctccactgtcaagcaatgcaagcatctaccgcatcttcctctcccggattcgctaatccggcgg

SEQ ID NO: 53128 - DNA, 388 bp, Oryza sativa
  unsure (1)..(388): unsure at all n locations
cgatgatgtatgctcgcacactntatatgttttttctctttttctggtcaagaacttatgataaaccgaactgatatgcaatagttccttcaacagtgtaatcttcagtacatgctccttctcacatttcttctatataaaatgctgatatcacaaactaagcttattaaatcatttagaatcttgaattacatctgctgctaaactaatcacaaataaatatcaactttattggcggtcaaggcaggtcgagattaactggacaaaaattatagctttgatacacagttaaaaggctgaaggtaaaagcaagaggtcaactgagactcttgtattaatcctgttcgtgaaattaacaagagcttgatcccataactatttgctgctc

SEQ ID NO: 53129 - DNA, 391 bp, Oryza sativa
  unsure (1)..(391): unsure at all n locations
agcttctccaccgtggcgatatgattaatataattgacgntcctcacctcccgcagaatagtaccacctccatttttgaatatatctttttgacatgaaatttgttaagtattatttattttattgcgagttgaattgttaagaatggcttatacatttgcatatctgcagtaaaattagctatgaagtaagtttcatttattttgctttaacttattttatcattcagtttactttaaacattatttttttatctttactaatttgcattattaaagatcctttatatctggcgtgatttttttatgtttacaataaatttaaataaaacgtatagctaaatattatgtttaaaactaagaacgtcgtatatctagagtaatatatagtg

SEQ ID NO: 53130 - DNA, 412 bp, Oryza sativa
tcttggaagactcgcctcgtctggattccagttctcatattcttgcttgttaaaataattgtggatgctttcctttccaataattccagctttgtcaatattttattctgtctcgcacctatcatgcatgttttctgtgtaaggatcattattgattgcgttgccccactcgatgtaacaccactggaatcgtggaatcggtgggattaaagaatcttgcgattacgcatatcactatattcatctgttcgatctattaacgtgtaaagtcccttatacgttcctttcttttttaagtatgtcttcctgctgactccactttataagcactttccaggttaacaatacacacgttatgtagaaatgaacctgccatcatgaatttgttgctgaagcttgagagtttacacta

SEQ ID NO: 53131 - DNA, 199 bp, Oryza sativa
ctcctttccaactgaacagacgcattgtaaagcggtctacaacctgcgtacaatcggcattccccacatctaccgcaatgaatagggaagcccagataccgaaatggaaagtgaccagtggaacaaccaaagaggtccacggattccgggtcaaaagctttcgcttcaccacagcaatataactcaattttatggaaat

SEQ ID NO: 53132 - DNA, 406 bp, Oryza sativa
  unsure (1)..(406): unsure at all n locations
ttccaacacgcatgacaacttgctgagcttcgtcttttattcatcatacaacgacatctgacaatcttgcaccaacttactaaacttctcaaaatctctgtcgttgtcctctgcgtcttcaatgtcatgcaacattgtaatagacattgagtgtccaaatctatggtctctccacctaaaggagaaggtacgaacatgccatctcgagctgcggcggtgttctctacattctgatccaacacttcttcagctgcgacatcaggcacctcttgctctccatgcttggtccagcaggtatatntcttcatgaatccattcattatcaaatgaacatgcacttcatccttgtcttcgatcatctggtcattcttacagtccctacatggacacatcatgtgcatgctca

SEQ ID NO: 53133 - DNA, 219 bp, Oryza sativa
gcactttggttctggctcctttcacagccgacgatgataatacaattaaggttgagatgatctcagaatgtcagatccctgacttgatgtgataaattgggtgccagttttgcttgacgtgacgatagacttttatatctatttttttttcttcagggatgtgtaaagaagttttatcccattcgatcagtctgcaagtggtatcaaatagtgcatcta

SEQ ID NO: 53134 - DNA, 330 bp, Oryza sativa
aaaaatgtttaaaggattggtaatggcccaaatttttggaaaattattttaaccctaaattcgggttttatgccatttaatggaaatacttcataaagatcaatcattcaggttaaaacgatctaaacaatccattttttctatatacatacgacatgccaacgggtaaacaacttattataaacgcaagacagccaatacgaaatgctagaaaatcggccgcgcttataggatgttctcagcgtcgaggaacatgtgctaaggtgtatgtgcgacttcgtcggatcatgggttcaaacaaattagacaatttttgaagtatccatgatc

SEQ ID NO: 53135 - DNA, 429 bp, Oryza sativa
  unsure (1)..(429): unsure at all n locations
accttaatactcaagcttggcttcgctgctgacatataacatccctttcctgttttcttattcaacccaaaggcttgcctgttcttagtgcataaacccttgtgatcatttcgcgaactttgtgtaactcttccacttctagtaaaaattctggtgttcttgcccgataataagcactatcaggttggtgaagcataatcctcgcgtgggggaatgctatacgcttgtggggttctcctccaagcagaatgaaggacgccatggacgcggctattccgaggcatattgtatatatatctggcgtcaccgctngcatcgtatcaaaaatcgccattcctgagattaaccacccgccgggggagtttataaacaanaaaatatcgctaattccatcttctatactgagatataccatgagacctgtgatat

SEQ ID NO: 53136 - DNA, 216 bp, Oryza sativa
  unsure (1)..(216): unsure at all n locations
agcttagngctgcatcagttaaggctaatttactattctttntagaaccataatctctagcctgctttaggattgccaataagggtttcatcggggtttcagccgatgagttatctggacgttgcatcggcttacaaggattacatacatattggatttaggcgaaggcaaccaaacattttactggttaatctaatcttgtggatttaatgacat

SEQ ID NO: 53137 - DNA, 483 bp, Oryza sativa
  unsure (1)..(483): unsure at all n locations
ctaagctcgccagatgcccatgagatggagcagtgcatgggccacatggtttttcaggcatttcactccaaggactaggaggaggacccacaggctntgctcangtcaagatgataaccatagtctctctgaatctgaacccaatctgcatgactgcatcagatgtgatgtcgcttctcctgtgttgaacacaaattattccaccaagcactcatcaagagtagtaggagtagcagataacgaaggcaatgtgacactgatcatgcatgcgctgtctgtgcttcacctttgcattgcaagatggcagcagccacattaacatggtggtgatgcaagntggagagcaaggccagcagcaaggctctcttaccaggtcgagatgagcagccactgcttctttcattagtagtagaacccatgcatattctggtaattgagatacacgcatgattgattagcangaagcatagcttatgttctttg

SEQ ID NO: 53138 - DNA, 390 bp, Oryza sativa
  unsure (1)..(390): unsure at all n locations
ttctttgttttttctttctaactcgagaatttttcctgagcaattataccggccttgaggaggtactatgaagtaccactttttctattgtgaatttaatatctcttaatacctacgtactatgaggtaccaaattttacactaaatttttggtacctcatggtaccttcctaaggacccgacaattgctcttttttctttataccgaccgactttgtntatggatgggtcttgcttgtggccatggatcccacatgtcgtggtttcttggtgccatccgcttggatgtgcgtcgatattcgtgccgcatttcgaatgaggtcattaattgaacctccctcatcccataatacgaaataaatttagagggatatgacacatgacaatact

SEQ ID NO: 53139 - DNA, 364 bp, Oryza sativa
  unsure (1)..(364): unsure at all n locations
atgtatgggatggtgacaacgtccaaaagtatttgctcttcgtgcctattggcccttgtgccgaaagccacccgcagttgtacttggcccaagacttgaactggttcgccgccgaaactttcaagcgaggttggtgcttgggtgaaagctanggttggcaaccccatcctggcatatgcttcggcgattatgacaaccggcgaacttcctccgtcgaccagaattcgccggacttcgaagccagctctctcggccgagatacccaggggtcttcatgtgggaacagcactccttcggcatcggccggcccggaagagatctgctggttcaaataccacggagcccctcgcaaaccgaggtgatg

SEQ ID NO: 53140 - DNA, 333 bp, Oryza sativa
atttcgtacatggttgtgaagccttcttgggaattaagccccacttcgctctgtttcgccgaatcttctttctcaagccccaaccaaacaagagtaagccatgtgtagtcggaggggccggatttcagctgagggggactctgagccagaagtacttctctatgcccttcaagacctcaaacaaagggtggcatgcaaactggttttatattcagaatcctgagcctgctcttcccgagtactcttgtcttcctccggagaccaagatacctggaactctcttccgattggggatgaagcagcccaagccttggagctgatggatcgcatgct

SEQ ID NO: 53141 - DNA, 380 bp, Oryza sativa
gcttggcccatggcgccgccattgtcttatcctcgtacgcctgcgccggccttcttctcggcttcttcggcgccaccgtcgtcgcagccccgccagtgacaccggacgacgggtcacccatctttctcgtgatctttatcttggccgctggcaccgcgctccacttgccgccggcgacgaccttggctaacccgcagctcgcctgcagcttctcggtatcgtatggatcgaactgcgaccgctcgatcatgtcgtcgcggatgctcttgacggtcgggaacggcgtctcaaagatgccagcggatgatccctcaatcatctgatgatttaacagcagaagaattaacatgtcaaacaaacaatttgacaaataacacatg

SEQ ID NO: 53142 - DNA, 386 bp, Oryza sativa
  unsure (1)..(386): unsure at all n locations
gtactaagtgtagtcttggcttataccctatctgagcgcctgtgaatatgaagtcacatgcccgcttcttcaccgctatttnttttatgccaggctagatgtacctttgtgataatctaaatcttatagatacaaaaagatgtgtcttgtacaagattgtttaagcttgccccaacttttcttgcgatacactagtgattggaaaaaggtatttttctggttgtgacatacacctgattgaaagatacatgggaattccgaagtcgcatgttcggaatatagccagacttaaaggaagcattatcgaacgttacaagacagaggaggcaattgagtcctacatggttacatgtatgagagcaacttataggagctccaggtctcat

SEQ ID NO: 53143 - DNA, 405 bp, Oryza sativa
agctcgcccattgcgtatgtaaaattatattttttttatgcatgactaccttgaacaatgggtgttccctttatctggaatgtgttttgcaactcaacatttatattttgctatgttcttaacagcccatagacctaatacatattttatcagttagggatggtgttgctaaaagtagagatgatatagaattgataagtcattaacatttaatcaagaatgaatattcctttggtaatttaacagcttgtcaagagctgcacataattagagcatgcaagtatgctactggttttttaatggagaatactcatttcttcacgggtgtatcagtgaagcacacatatactctcctgtatatgtctccttttcaattctaaacagaacctgcctgattgcttatgt

SEQ ID NO: 53144 - DNA, 404 bp, Oryza sativa
  unsure (1)..(404): unsure at all n locations
cttttcaggaaagcgactggcgatacagactagtatacatacttgtacaagagggtaatcgcaantttgatgccgattgaaacatacatgacagtagatcaagccagatcacctttgtaggcggatgaaagccacatgcatgcgaacactgtagtgaaagacgatcacaagcagaattctcccattacgagtccaacaatcaagcagatatgtacgaaatatatgtgaacagtaaatatcaacggacgcagtgatgtatcagataattcagatcgactcatggctgcacaagatgacctgtacgtgtcgcttgtttgcacgccccctccgatcaccgtgcagtgcagaatgccagaatctctcgatctgagcaaccggaccgccagtccaattcgcgcctgtgc

SEQ ID NO: 53145 - DNA, 337 bp, Oryza sativa
  unsure (1)..(337): unsure at all n locations
attgactcgctcggtctgaccatcactctgcgggtgatatgccgcgctgaaatataaacgggtccccaattcttcctgcaatttctgccaaaacattgaggtgaactgactacctcagtcggatactatctttctgggtaccccatgcaaacacatgatccttgcgaagtacaattctgccagactctttcccgtataggtggtatgtactggtataaagtgagccaccttggtgagtcgatccacgactacccagattgaatcgtgacccgatgatgttcggggcagncctgttataaagtcattccaatctcctccatttcattccgggatttga

SEQ ID NO: 53146 - DNA, 323 bp, Oryza sativa
ctctctgcctacctttgcctacaagtaggtgatcttacgttctattcgtgatgcgtatgctggctggctcttctcttattctgcctgtcgatcttatatacttctgtactagagcccgaccggcggtcggcggagccgttgctgtatgtaaattctgccgggcgactttggcacacgttgtgagcggtgatggtggtggcggccgccatagctatagctcgtgggattaatggcagccgcgcacaatcgacctgcaaagtgttgccgggagaacagacgcattgaatggagaagatggcgagcttgacaactgctgctgatag

SEQ ID NO: 53147 - DNA, 342 bp, Oryza sativa
tttcttgctacctacccgaattggtacacccccttgcgaaggtcaagattgcagtgatgccatgccccttgtgagaccactaaccgtcggaatgcatgacccatggttgttcgacaggtttgggctctacgacggacgtgggtgttcatttggccacaaagtccgtgaggacttgggacatgattgccgtgtgggcgacaaagtgcacgtcgaaaggtgacagctcagcaacccatttgcttatgcgccctgtatatcttttcctcgaagcactttgccaaagggtactgtgaaagtaccatccttggctctgctgccttggcacttcagcattgccttgct

SEQ ID NO: 53148 - DNA, 344 bp, Oryza sativa
taagctgccgtcgccttggaccaccccggttcgccagcctcttttatggatgagctcgcggatgaatccgggcttcagtattctcgcctcctcctcttcgatgaaggcttgacgttacggggcctggcgccgcactttctgccggaccgggcttgctcccggccgcacggcgagacggtgctcaatcacctccctggggaccccgggcatatccgccggtctccatgcgaagacgcatcgtttgcccgcaggaaggagacgagcgcgtcttcctacttgccgttcagaagaccacctgatccgtgtggtcttggactggccgacgcccagggcaacctccttga

SEQ ID NO: 53149 - DNA, 262 bp, Oryza sativa
tgtcagtctctgccaatatgtgaaaaggcccctatatttccacaaaatagatcccgcagtccctaagcacgtgttaattgaagatttgctatgagttctctaagatttatgttattacgattaagtctttggtctcacatgtcattgagagtctttgttactaacaagtctttcatgttttaaactatttgctaagtgaagtcctcatcgcctaatgatgtggggcctgctcgtcagtgggacggtgaccggtggacagagc

SEQ ID NO: 53150 - DNA, 437 bp, Oryza sativa
  unsure (1)..(437): unsure at all n locations
taagctcacgcacacattctagtactgtcattcctganacacagtatatgtttttgtccagaccatncgncaagggtacctctcgaatagatcttcacactagagagccgactgtaaaagaaggctttttggccttgatagcctaagaatgctgtactactatcgcaagctaattaataggacacctgtaagtgccccttgcactatggaaatactcatgcagctgcaggattttgtactagatgtacaatatacttaagtgcctgtcctttattccttgtttcacctatggtcatccagggtggttgtttcagccaccctataagcattggcgacctcactgaacatggatctgaggtgctgagcagactattctcatctcattaccatggcattatacatgagtagagatctgctgcacggcatactgtagtatt

SEQ ID NO: 53151 - DNA, 408 bp, Oryza sativa
agcttgaaccaaaaagattgctgtatgatttattatataaaaagaactagccaactccatcagcttaccagtatattgccattgcctaggctgttcagtggatggttaagatttgttcctcccatggatcccacaagcacgatatgcttcactccagcagctttggctgttaaaacaagcaatgttcacttaacaaacatttacaaactgatacatgaatgatgaagaagaataagcaacaaccttaccagtgtcaatctgattcttttggccaatccaatccacctaacagaccacagcaagtattagcatgagctcagaagtttacaatcacattctatatattaactagaggggtttcaatcagccaacctgctcaggatacattccatcttcatagtaaaactc

SEQ ID NO: 53152 - DNA, 464 bp, Oryza sativa
  unsure (1)..(464): unsure at all n locations
ntacaatctcacatccacgggttgctatttgaatgctattttgtccatttttgtacttatgaatatattggaggtgtcataacagccaacctaggagttgtaaaaccactggaaataccaatacaagttagggaagaccaataaacagccctattggtggcaaagcactggaggacacccaaaatgcaggcgatctacgtacagaagagaggaggcatcacatcatgtttgagggctatacagttcatctctatctagcattcctttcagcttccaaagcggcgccttgcttgagttcttcatgcccttcaagctccattctcatggcgagatatgccatcccttgaaggtagtgtgcagtaggccactcaggagatatgtctgctgctttctttgatccgcaggcctttttcagcttgcgagcaccatgtatacgaacttcgtctgccacatagtcgagacac

SEQ ID NO: 53153 - DNA, 281 bp, Oryza sativa
  unsure (1)..(281): unsure at all n locations
tggacaatgagctttcaccggcgcaccatatgagggagctgccggcgcggccatcacaagccggggccaaccgcgccggccaaccgcgaacaaaagcaaaagaaagccgaggaatgcggcgctggtggcgcttatgggtcaaccctatctaaaatccatgcgcaattacagaatacaaccccctaaaaactgaatttattaaaatgacacatgatgttntttccacaatttacccttctactatactactacacctttatattaagtgtagtagacacctt

SEQ ID NO: 53154 - DNA, 473 bp, Oryza sativa
  unsure (1)..(473): unsure at all n locations
ntatcttcagccaaataagccatggtctttaaaaataatctttctatatggattgttctttatgtaagtctacattatctaaaatgtacttattttaaaaatattaattatcaagctntatctttagctaaataagccatggtctttgaaaataagctntacaaaatggacatttttaaataacgaccgtactcgttttttacataaaaaaagaccaaatcgaatttatgataaaaaaaacaccttttcctcgttcaaaatataagcattcaaagtttatatcagaatatagcaagagtatccgtcccttatctcaaccaatcatagatattcttatgtaagnttttcacttactcacctagtttatatttggtcttcagctaagaactatgtaataatggctatagctcctattgaagtanactgggatttatcccatttctaanaaactcaactagttagtaatacttata

SEQ ID NO: 53155 - DNA, 320 bp, Oryza sativa
  unsure (1)..(320): unsure at all n locations
agcttcgggtggaacacacaaattatgattcttgagttgngaaaccgaatgtgatggtaggctatgttaaacagttccatcttgagtttgtaataagagctttaccttttggtatggtatatgtgccatgagtatggtcgttttgttgagttagtctgtaaaagatctttcatttcgttaatgaaatgggaggactctgtcctctttctaaaaaaaaaaaaaccgggactaccaattcaagactaaagatcgctatctttaacgaatgagagaaaaaagtgaggggataccgaggagatatcggcagtttattttggtcc

SEQ ID NO: 53156 - DNA, 184 bp, Oryza sativa
taatgctttatgattgatttttgatattaattctgggcctctgcagcttgaatgcagattggctcttggttcagactgacatacagttctgtgtggggataaacgggatggcgaaaaaattattattagatacgtcgtagattggtattataccagaaatttcccattcaaatttcagaatatt

SEQ ID NO: 53157 - DNA, 403 bp, Oryza sativa
agcttggaccattcagactgatggttatgttctgctgctgcaaatttctcattcaagacatcttttaagccttatagtgacataaaagttgtactttcatttcaaaataataccgaaatgacgctgaactgattattataaattatagatatactcctagtaaatttagggtttcggctataatccctgttatattttcatattattgaagtggctatactgtaactccctaattgctaatggtaaataataagataaggggacatttatgtagattgtagaagttcctcccattaagcatcaactggaaagatatatagtggcaggtgtctatctcttcttaaagaaagagcattcacaaaggtgccttcatttaattgatttattacggacagtactttat

SEQ ID NO: 53158 - DNA, 333 bp, Oryza sativa
taatcaccataagttattactagtcagggttatctaatgcttgttgataatagccgatctctgatcgcccgttggaaagtaaagatatgaaattaaagagttgaccagcacaatttctgcactagacagcaaactgatgttttggagtcattcatacatcagattataactaatcaagatgcctctaacccaaccaaagccctgcgtgtcacttatctgcattaagccctgcttgacttgttgttctctcaggaagaatgacgaaacttgagccggcaagattccttcctgcatcaggttcagttcaagaataggagtttaagaacaagtttc

SEQ ID NO: 53159 - DNA, 402 bp, Oryza sativa
  unsure (1)..(402): unsure at all n locations
taagcaccgcggctgcagctataaatctgccaagcttttttttcttggtgcaagaataccggcggatcagatgaatcaaaggctcttgctaaactagtttctaccaatagcctggatcgataagagaaatgacatcatatcatcttccgctgcattggtagaaaacttacactgaattctatcgacaaggatcaaactctctgagttttagcattttatcaatagtgtatcacgataatcattatgcagtcatataaacttgacacgtactggatactattcactaccaaatttaaccggccgcgcgcttggtctctnttttctttggaaaaatattactaatatcttaaaaatattttattatttaaagtgtctagcatgctacatataactatactactt

SEQ ID NO: 53160 - DNA, 392 bp, Oryza sativa
  unsure (1)..(392): unsure at all n locations
ctcaagcttggaggtgtanctaagctatatctaggagacagtttaagtttgtttggcagatcttgtcatagtagtttgctacttctactactataaaactttcataaagattgagaccattttctatatctgtagaccaattttttgagttcttgatcactggtgcacaaactgctgatggggagtactagcaaaatgcaacccatcttattgggagtgttgccatccgttgttagtgctgcgtatcaacaactctgcgatcgacaagcttggctcaccggcgacttggcttgtcgaaaacaagtgggaacgttcctctggacgaaaaaggacgatcattagcgctgataataagattactaatttttctcaaatgaacagttgatttttaa

SEQ ID NO: 53161 - DNA, 307 bp, Oryza sativa
  unsure (1)..(307): unsure at all n locations
acgtggatcgattcggagtaagtgtgtgtgcacaccaatgttctgaaacagtgcatcgaagggcgtaatggtactaaattggaacgatgcgaagtgatctagttggattggctagggtaaatacgagtacgtgtgatatttttttatattttaaaccttttaaaaataatattattctattaatagaccctataaaactgccacaccattcttgaaaatgaaccttttagctagtgtgaataaactggcatgcattatgagaaccctaatgnatcctgccataacaatcttggtatcgatgtaacct

SEQ ID NO: 53162 - DNA, 420 bp, Oryza sativa
tgagctgaattataagaggctctatgtcacagcttgattctttttttttacgatttataaattatttaataaattattaatagaatctatattaaacgttcattaatttacaagtgaagttaaatgtgggaaataaaacttcctaaatttaaagcatgaatggatttaaattttaataaattctccatgattaattatactctctgaaattttctcggatttttcagagctcaattcctaaatgatacaaagaacagctcagtaattacttaatcaattaatgagctaactataattatgttaagtgcttttcttgtttaaacatccttaaattataaatcgttgttaacacgaactattataaatgatcttaatagcctaaaagagaagatctaatttaaatttgtcaaatctcaatat

SEQ ID NO: 53163 - DNA, 452 bp, Oryza sativa
tcgcatcctctatagtattcgaaacaaccttcaatcatcctctgttctttttatgtccgctctcctaagcgagcaatttatctcgagggcctattgatgagttccacaaattccttcatgcacctgttccatagccactatagattgatcctcatctaaacacttcaataagactccatctatgcttcggcgatataaactcttcatcaagcaatgtatatttgaacgcttgtcgacgaattttccgatcaaccttaagcgtaggatctttcaaatatcgaaccaaaggaattctccaatcttcttttgctctctgggcacacattgtcgaagtacaatcaattcggcctttatatcatctggggcttggtcgccagcgctctgctcagaaccgcgcagaacattatcataattggcaataatatccaaacatgatgtaagatacctattta

SEQ ID NO: 53164 - DNA, 434 bp, Oryza sativa
actcagcttatactttgtccgtatgagatataatattctgtggatggttctattgtgctcctggttgcgaaaaaaaatatcataagaaaaaataaataaaaaaggtgtgtctctctcctcagcactagagagagcaagcacaaaaaaaaaaaaggatccagcgagcacaccccaccattccctctttgtcaccaccttccaccaccggttcttgttttcgttgctgcatgagattgtggtttgaggcgtactttgtggataggctcgcgtctctacttcaactagcctatgaccagcactgacactatacccttgagcgattatcaatgtgctttgctaacgaggttctagtttctttgagcatgctatcatccaccaacagtcagcccaaacccaaacagttgacggtcttgtgctcagcaccatacacctgt

SEQ ID NO: 53165 - DNA, 355 bp, Oryza sativa
gacgacgtgcaacaacgcaacgtcgacattctagtctatccggagcacgaaaggtaattaatatttatctacgtaatttcacttcacttgcatgtactaatcaagtcatgttcaatctatatctgtatctgccatatatgtctatgttaattaaccaaaaatatatgaccgctcgttaagtacatcaatggtattgctatgattgtgtaaatcatattgaggatttgtcttcaataaaacatgcatcttgttaataccgcgtgaactctatgggttttagggtttaagttttagttaacaagttattccattacaaaagggaaaaaacactgccaaacacaaccaacttaatatt

SEQ ID NO: 53166 - DNA, 395 bp, Oryza sativa
  unsure (1)..(395): unsure at all n locations
taatcccacacttaatcatccagagatagagcncttttgcgtctgctattcttctagtctgaaacagcccgtggaggattgtgctatagataacaatgccaggattaacacccttgcttgccatctgtctgaanagagaacatgcatcctctatcctaccgttcttacagtaaccattaataatggtattataggtaacttcattaggtttcaccccatctaacaccataccttcaagtaactntgttgcttcatccaccttaccatctaagcaatatccatctatgagtgtggtgtatgtaatgacatcacactgcacatctacgcgtaccatcaaatcaaagatgtttttggctcttgtaaccattccttctttgcatnaggtggtcaacaat

SEQ ID NO: 53167 - DNA, 411 bp, Oryza sativa
  unsure (1)..(411): unsure at all n locations
gctttttagagaaaaaatacaatttctattttattaaannagnnntattaaatccatcattaaatatagcatatctgctttgtgtttaaaatgttacatttctctataaactttattaagtacaaactcgaaacgttttataatacgtaatgaagggtgagctcttttttttttccattgaagactgataggggaaaatgatatgaaaagaaagatggaattatagaccctttttgcccaaatcttattttaacattttactcacttcatcccaaaataaattttacacatgacaacctactactcatctcgcatagagtacaagaagatttttagggtgaacaaccgtagtactccctcccgtttgaaataaaacgatctacgatgagatgagatatatcgtaatataac

SEQ ID NO: 53168 - DNA, 451 bp, Oryza sativa
  unsure (1)..(451): unsure at all n locations
tcacctactcatgatgtcctccaaacaaggcagggatttatttttcctcaaccatttatgcattggaatcctattcagctttacctgctgaaattaacaactagcagcatctgcaatcatggttgctaaatgctagtaggaaaatcatccaaatgtaaagggcaactaagctcactgctagacataaacaggaagcagctntcgtcctgtgaattgccttttcaccagaagacagaagaaagtgtttctattatccagatagatactcaaaatatcctaattcctaaatttaccataagtattaatgagctgtctgtttcatagcaagaacactgaacttcagagatagctgncttatttaacatatgttctgcccttttcattcttacgatcagattcagattattanagtaaatcagaggctgcaatgtatttgtacttaaggcttttg

SEQ ID NO: 53169 - DNA, 357 bp, Oryza sativa
ttatcactatgaagatcagacttcctctcagtagacatattataactttaaaaaaaataagcaaggatgtttgaggaaaaaaatcattgccttatgaataggaaaaaccaacttcatattagggtgatcgctattgtttcagcctagtccctgctggagggggatcaatatttatgccttcggtttgctattgctgcctatagtatcacaacacacatgatgtataatgttgaagagagccttagtttagctaaagaagatggaaatctcttatatttctacgagcttttcactgatactaaccagataattgctccagttataaataagacctgcattttttatcttatatgtacc

SEQ ID NO: 53170 - DNA, 296 bp, Oryza sativa
ggagggaaccaaacacagcaacaaagaacaccggaacgacgcggcgaacccaccagaaaaaaggcaccaccaaaaacagaaaaagaccaaagggcagcgatacagaagagagagcagaccagagacagacactgagagtgagcaaacaaaggcccaatgcgaaacaaggaacacgcagaaccgcaggccccaccgcagaaaaaagcgatcaaggaccggagcaagagccacggaccaaccaaaacgcacccaggggaggccggaacgcccaaacacagagccattcgaccgaccaa

SEQ ID NO: 53171 - DNA, 374 bp, Oryza sativa
gcacactgtgagaccatatcgcaagcgtaattgaagtcttatgtctagaaaaatacctgacgaaaggctgttccgaccaatgtacgaccggcggcatgtgacctgcagacccctacgtggatgtcgacgaagaaaagattgccgtcgtcagacgaaacatatatcagaagcactccgcttggcgccttcttgtatagatccgtacccgatcatacagaaaaattattgcttgacagggtaattactcgacttatgcgtacgactcgggcaactcatagctgcttatgatattaatgagacgggtccaccagtcttccctgggctcgatgtcagaacggcacaatctgcctctgtagcccccgagccgacgccag

SEQ ID NO: 53172 - DNA, 424 bp, Oryza sativa
  unsure (1)..(424): unsure at all n locations
gcatgcaagctngcgttgctggtatatggagtacgttcgtctctgggcagcancagcagctagcgcgcaccgtcgcgtccgacgagtgtacgtatagtactactggggcatgcatcagctgcagcgatctgttcctctgccaaccttaacatgtaccacctccttctaaaataagtgcaaccgtgaaaatctgtgtccaacgtttgaccgtccgttntatttaaaataatttataaaaaaatttaaaaaattagtcacacataaagtattattcatgttttatcatctaataacaataaaaataataatcataattttttttaaataagacgaacagtcaaacgttggagatgaatagtgtaaaactacgcttattttgggacggaaggagtactacaagcatatgcatacgacgacaaaccaa

SEQ ID NO: 53173 - DNA, 309 bp, Oryza sativa
cacacggaacatagaaactcagcgtggcccgcaagccggctcatacgccgggcaacattttctgtaagagccgagcaagcgcctcagacgctgtggcagccacagcatccgcatggtccaacgcaagctgcgccagccagccccaccaagaggtagcgtgctccacgagcgagggattagtggagcacatgaacgcgaggtcatcacgcgggaggagagaggataacgaggtgaccgcggcgagacagagtgactccgcggacgacaagagaacggcggcgatagcagcgtgggcggaggagaggacgg

SEQ ID NO: 53174 - DNA, 320 bp, Oryza sativa
  unsure (1)..(320): unsure at all n locations
tctagcgtggaatataagcgggttgtaactcttattttattgcgcgccagacaagattcgaactcgatatctctggctctgataccatattgagttgcatgaaccgaccagttcaactcaaaagcttaagctgatgacggaagatgagcaattcactttatataccaacatcttcaaaagctatttttttactttgattaaacactcaacctgctanacaatgctaggattggccttgctgaggatccaaagcacccttanactctttacatatcttcttttatgtataacatggcggagcaccctatttccactagtca

SEQ ID NO: 53175 - DNA, 394 bp, Oryza sativa
  unsure (1)..(394): unsure at all n locations
gcatgcaagcttcagaggtcagagagaccatattctttgctttcaaancacaagntcacaacatgttgagaaaggcattgatcaatgggataaattgttcaacaatccatccaacatgatgctttgcttgcatccttggactgaatacttaagagatagctaaagtttagcccctctttcccaaacacccccttatgttttttgtgaaagactaaagtttaagtgatgtttggatccagggacttaactttattctctatatttagacactaatttagagtattaaatatagactacttaccaaactaattacataaataaaagctaatttgcgagactaaatttttaagcctaattaatccataattagataatatttactggagcatcacat

SEQ ID NO: 53176 - DNA, 300 bp, Oryza sativa
tcttcctcttccaacttgctaataatgtcagtctccatatagcttagctaggtggtactaattacatgactatcttgattaatacgcctatataaaaacacatgtaatatttcaactttcagatagctacggaccagaagatccagaaatggaatcatgcatagacgtagccctataactctgttggatcaattatccccatattctaatagatgatgccgtttgctttataataatatttaatcattagctttattctataaaacagcgtaatgtatccatggtatctacttataaaac

SEQ ID NO: 53177 - DNA, 255 bp, Oryza sativa
ttctggcagtgtttgcgctatatgccaatctttataaattctgcacacgctagatctgaatattactgtacagtttctgaacaagccatactctcatgacttttgtggaagagaatcgcactcgacgcgtgattgcttacaataaatgatgacacaggcaataaataaccttctttggtaaacattaaacacacgtcataattattcttgtcatcaagggactacttaccgacaccctttgctgtatattccacc

SEQ ID NO: 53178 - DNA, 464 bp, Oryza sativa
  unsure (1)..(464): unsure at all n locations
ctaagctgtaccattanaacagctaactatccataatagcttttgttataaggctgagatgccatatgcgtaaataccctatctattttgggcatggcatangtatggccggtgccatcccttgccacaagagaagatccgccactgatttaaatagaaaacttagcccctcaaataatctaatctaaaattcgctcttataaagatttaaactcagcactcttgaagtgctgcttagttcattacaaatactagactgcatgttctttcgcaatcatgtgattacatgtatacacacatgtgtgccatacccatatacatatatacaaatacgccactgtcacgatcgtcatntatgtcatgttaaagaaaatattctgaggaattatttgacctggcatattaaaggacgtatataanggatttagatgaacgccttgttcatctcaatcgaaaatttctat

SEQ ID NO: 53179 - DNA, 371 bp, Oryza sativa
  unsure (1)..(371): unsure at all n locations
ntgctcagacgagcagctcatatacatgtttgtcgccaatattgtttgattcaaggacattnttcaagaagcgtacgccccaaaggaggcggatacactgttgctgacggatcggaaaccgaggcacatctctgacctgggacgcggtgagaagcccttggtgattgcctcggtgctcaaagccgaggatgctgaatgcaacaccgtcgtcaggctgtcaagtaagcatgttgagcagcagtttggattggaatcgtctctcttcgcggtgttcctgatcaacatgacgacgtacaatcgcatatggagtgaactggatgcggtggttgctagtgtcaggaacacctgacatcattccgatgatagtaaat

SEQ ID NO: 53180 - DNA, 405 bp, Oryza sativa
  unsure (1)..(405): unsure at all n locations
ggcatctaatacaacggcataattagtacgncatgcttccgcgaagnagaatgcggcagagcccagacactggctcaacatggttgtccaactttagctccgccgttgtatctaccaaaaaattaagcatatctccgctgctgtgctctaccaaacaaaattgacaaaattattagtaacaaaacttatctaagatttagtactacaaaaantttggtatggtttcaaattcaaatagagcattgataatatatactttgtgcatgcttgcgcacaagttgtaatgtatcatggcggacgcacggcatagataattcagctactggttaaaacagttctccggtatattatagtgcgggtgcgtataattaaatgtataggaaaaatagcacgagtgatgatgtt

SEQ ID NO: 53181 - DNA, 462 bp, Oryza sativa
  unsure (1)..(462): unsure at all n locations
acactatcagatactnaagcttnctccatagtccacacgcgagacctcgacgttctggcacattgccttatcttcatagaactcaccatccgacaaactctctgccactggaggattgggaaaaataacgccagactgagtacaaccaccgtactcaacaaattataccaagggtaatatttgtaagaaaaagcagcattcatatatcataagttgaaagcagcacaatagtagattattaagcaatattaacctcatcactgtccaacgctaaaaccacgctgcgacaagcccagcccaaaccacctgaactacactaggtcattaagtcaaattattaaggcgagactaatcatgataagctagttgaccgcccaataaccgtgggcaacgctattccaatagtttactttaattagaggtgtacaactctatcgacaagacacgatgtcacacatatta

SEQ ID NO: 53182 - DNA, 481 bp, Oryza sativa
  unsure (1)..(481): unsure at all n locations
taccattagcaatatcttcaagttggcgtccaacaaagcttctggtctctcatgctcgggcgtgacactcactttctgcggcagtgttgttgtcttcccctgctccatcatgctcacctccatgtcagacaaaaccactccacccataccgccagatggctgccactgtacgttgcatagatcagatgcgtagatcgaagtctgactagatcaagaagctacttccttggctctttgttagttttgtttattttggaacgaagagagtagctgcccgagtctaggcttgtgccgttacgtgcttaatttatggaagctagctagctacaggntgatgcaggcgaggcgggcaacatgattgaatatataggaatgtacgattcgaatatgaatctgcttatacgaatcggatccgaattagttttaattacactacgattcggctntaagttgagctcgatagttggtactgctagtactg

SEQ ID NO: 53183 - DNA, 432 bp, Oryza sativa
  unsure (1)..(432): unsure at all n locations
tatggtacacactccattcacaccagctaacatatgtcactatttntnnttttaaaaaaagtaaatataatagttgtgcatatataaagtatcaacttcaaatttattatattctagctataaaacaacaaaaaacctacagttttaagagtatatatgtgtaaggatttttgatttttaaaatataaaatataatgaattttaagatgatatgcatgtaggtataatactattagaagtaacgcatagttgtttgttttgaacttttagtgaaatttgttagttggtgtatacggagtgtgtactgtgaacttgtgcatataggatatgttgtctactcacctgatgtgtagagagaaaagcaaagctaaggtatataaatccctctgtcncaaactagttatcttaaccttactattatccctaaataga

SEQ ID NO: 53184 - DNA, 389 bp, Oryza sativa
  unsure (1)..(389): unsure at all n locations
actcagcatttcataatggaatttgtagtagggncggtgncatggcttaatcgcacgcatgggcttgggggtggagttggactangagaggcaagctggcttccattacacaagaaaattatttttttaagaggttacacaagaaaattattattgtgagatgcagagaaaggggaaattaagctaggggagagggacaaacgagaggcacctgcagcggcgatacgtgtccacgcgactttgaccgttgcacggacttctncgtccgtactactggtcaccgctgaggtgggcccaccggcccagcatcactgaacgaattttcaagctcgctttttattttatatttntataggctatataagctaattactcttttttcattatat

SEQ ID NO: 53185 - DNA, 55 bp, Oryza sativa
  unsure (1)..(55): unsure at all n locations
accccgcagcagctgagattcgaagagttttttttttttttgcgtancagggcag

SEQ ID NO: 53186 - DNA, 344 bp, Oryza sativa
ttgggctgagttgtttttttttacttctagtgtattaattccattcaactcctggttgactgccaatgagttttgttgtcttaaaaaaagacattgcccatgataggtctcattgccaactcctattggttgcatgaggctctattcgagtatccatggatatacgaggagttgcattttcatatgctcttttctcctattattgcttaatacttcttaatgtgggcatgtaccaacgttagtgtgcactctaataacttgtcttcttccttgatgggaaagtgcagcacgcctattttggaggtccgctccacttgccagatctaactgggttcccttttatt

SEQ ID NO: 53187 - DNA, 268 bp, Oryza sativa
ctctatacctttacccactccaataaatcattcctattacagcgttcatatcacactattctatattttactaatattttttaactacccatatatatctaatgaatttttaagaggcatatatttacaatgcgttgaataagtggtggttcgatttaattgcaggtaccactttgagaacactgtgtaccacctttaatcctcttttaaaaccacattcagcccatttaccttattctctcgcttagaacaaaacaataccaaacaa

SEQ ID NO: 53188 - DNA, 325 bp, Oryza sativa
gggggtgaattggctttccttgaattttcttaacaattgcagcgggtaaaataacagggcccggaacctcctggtgatgaacaccagaactttcgggcatgatgagtagccaggaactttcggagttcttgagccaggaactttcgggcagctgagataaattaaaactgagatgaaaaataggtcctagcaagagaagtttaggcacacagaggaataagatgaagatcgcagaatatcagcagattcacacaaagatcatgcacaagagagacaaagacgattttttcccgaagttcggatcagacgaatcctactctccgtg

SEQ ID NO: 53189 - DNA, 463 bp, Oryza sativa
  unsure (1)..(463): unsure at all n locations
tgactntattgcaatttgtctccacaagtagtaatactattctattactattacttgttactactcgtctgttgcacgttaccacaatcgcatcatgatgttactacactgtggtttactatattttttgagtagtgttactgcataaacacgtggtatcgtgtaccttccgtgcagtaacacttttacttttatgcagtaacaagtatatggctatcatatgagacctttaacctatatatttctggttaaaatcatgacttactgtaattcaccacaatattactgtcaaaagtgcaggaacgtcatattcatgcagtaacactatattggagggaggagaccgtttttttgagaagagggaggaagaacggtttcttgacaggggagatatagatgcattntgaagttaaccctcacatgcagtacactatagcatatggtggaacgatttatgaatata

SEQ ID NO: 53190 - DNA, 338 bp, Oryza sativa
  unsure (1)..(338): unsure at all n locations
gcatgccagcttatttggggccattctgcttatatttattatggcncgagagatcctgccaatggtgtttccttctttatcatcctaaaggacatctcagtcattgcttctgaagggacatttatgatattgtctctgtgtaaataatgagagaatttgcaggaatggactctggaatggaaaataacaccggtatttcaattccacttaaaaaatcatggtgacctgccaggaaaacctttcatactctttgagggtgtagaggaacaaacatgtgtatcataataactctttgaaaaaaaaaaaccggctctcattaattcatttacaaaaaatgg

SEQ ID NO: 53191 - DNA, 327 bp, Oryza sativa
  unsure (1)..(327): unsure at all n locations
ggacctatgaaactcagcttactgataatatataatatataanatanttatatatatgttcatacctacatagcgatgatagacttgactcgtcaaagtacggtgaatcagtgagtaaccttgagcttttgaccgtgcatgagcgcctacgggcgggcttgcggcatgtatcagcgcgcatgagagagcacctcacacttgctgctttacaggcgaagagaatactttacgagactccagtgtaatggcgatggttggaagctaagcccttcctgacggagataacacaatttgacctaatattgagctgtcacgtgtttccgtgtt

SEQ ID NO: 53192 - DNA, 415 bp, Oryza sativa
  unsure (1)..(415): unsure at all n locations
agcttgtacttttattaaaatactctcctatatacatttatggtattaaaatactttccaagtatatgagtacctactttacattatgttcatgttatactgaatatacggctagcttatctggcagatgctttggtgtgggtataatatttgcatatgaaattactctatgtcatgacgatgatattagagtagtatctggtagtttagacgtggtgtctagattacgggatatcattattcggggttatatattgcagaggaaaggtgggccgctgatggtgacagctcagtacgggtattcctccgcgccagtatataatcctaagttaattccctggggagggtattcctccgtatttagccccggttgtatggtcatgacnggctgtcgtaaggaactcggcagtcaggg

SEQ ID NO: 53193 - DNA, 372 bp, Oryza sativa
  unsure (1)..(372): unsure at all n locations
caaaagaaatgaaagaaaatgatnaaatccacatgatgaatttattttattgcagcaagattaaataaaacagtatttgtaaacttttgctgtgtaatgagccattagtacagtaatagatgtacagtactaataacactggaantaaattttaatgagaaccattaaaagagattatgaagtgcatgtggcattagtttggtttaattaaaagagaaagggaggagaacagttctacttttctcaatattttcagagggcttctatgggtaaccatttggcataacctatggtcaaagaggctctgatactcaactgtcacgcccggaatttctatcctaaattccaaacgcttacatgtgtgtgaaccct

SEQ ID NO: 53194 - DNA, 270 bp, Oryza sativa
ggccatgttcgccctccttacgagagagagcggctacatcttcactctcaccctctcccattcaatcctaaaaacgtgcataagtccaattggagccggctgtaggcttgatttgagggctcaccgagctccttgctgctattggagccgaccgggctagcttaccttggagctgtagcaccgcgtcgtggagtgtgaagttttttcttctgctcagcttcagggcctatctgtatgtgcacttaaatcatcattatgctactctaaaac

SEQ ID NO: 53195 - DNA, 207 bp, Oryza sativa
  unsure (1)..(207): unsure at all n locations
aagcgctgcaacctatcgaacgccgtcctacccagtcgatctgactatactttaacgtgggtacggcagaaaccggtatacgccgaggtcgtgcgccggacaccgtcgcgccggcgctacccgatgcatggcggaccganagtgccgggctcattgactcggggaactgcgtcactacccnaatggattcgacacttctatcgtctg

SEQ ID NO: 53196 - DNA, 398 bp, Oryza sativa
  unsure (1)..(398): unsure at all n locations
tagcttgttcaccgcatggacccaaatactttttttcttgttgttcaccgggataaatcaagatagcttataaaagggagacccattaaccatgaaagatctgaaacactcagactatgggaattgccataatcaaggtattgcagattctagaggttaccatgctgataaggtatagttcccctaaaatctgcagcggagaggttgagatacctcaagttgctgagtgaacccataaaatcaggtatgcttgtaaaattgaagtgattgtagcttaaatcaagatacctcaagtgatgcaaatcaacaataaaagggctcatcttactggttgacaagatcagnccattgctccaatcgtctttgtctgtgttgcggatgtcgagcctgacgacatg

SEQ ID NO: 53197 - DNA, 159 bp, Oryza sativa
gacgttcacaccagacagaacattcgtccacacatttactaattgctgccgcaactgaatcattcatcatgcagaaaacaacgtcgtgcctgtgagtccataatgcccataatcagataacatacaagacctcgtggagcacctcggtcaggcttccat

SEQ ID NO: 53198 - DNA, 471 bp, Oryza sativa
  unsure (1)..(471): unsure at all n locations
tgacgagaccacaccaacactgtattngatagagctcgatgtgggatatcaatggcaagctctaggtgtatcgtccttgcaaggttcctttgcactaaccacttatcaggtggatgagtagttctatgctaagatcatggcttattttttatatcaatgtctgatgtggntcatcgttgaaactaaatttttccacaaagatcgaaccgtcaaaaatttggatagaagaacaagctatacgccatgcaaagggccttattgtttggctttnttcatagtaagccaaaacggcttattagagaataaaaataatttgtagataaaagttttatatatgtgttctcggtgatttaaaagccaatgccgtaaaagaaactacgttaaaaatatctcanaatcaatgtcaaaattaagtttaaaaattcaaattttgttgttttttctttagttgaataggctatccgatgggag

SEQ ID NO: 53199 - DNA, 319 bp, Oryza sativa
tgggtaaagtgaccccctctgcagaggttattaaactgttctaacaaccgtgcccactgtcatgggtggattgaacgtgattccttaacgtaatactgtttgactacatgcttatgtgagacatgcttgttgtggatatggattcgaatgttggaaaccctgtggctgatgggatcagctatgccccgggtggccactttaaagtggcggccgcgggccaatcttgaatcaatcaaagactgatacaatgcacatactccgaacggacgagatgcactgtctcatccatgtcgtttgagaacactcactagctgttcga

SEQ ID NO: 53200 - DNA, 430 bp, Oryza sativa
  unsure (1)..(430): unsure at all n locations
tcctccgatgttaacaaattctaaagttttgagggtattatttttccttgcatgccacacaaatctcaaggcaatctgacgatgacatatatgtatttaaaagttttacgacagaaactgtcaaacgctttttagcaattccatttatatttcgatcgtacgtgtgtaagtntagcgtagaattatgtatggattgtgtaagtcaatggttttgtatcggaacctgtgaactaaattaagtatcaaacaaattatattcgagatttgttattaaaaaaaatattcactgcatattggtgcacctatatgctaccatgatggacttgcgatttgactgagatatcaataactaatagttgcgcaagcttaattagtcgagtggtatatataagtaaacaattcgccaatctaatttccccttatttatata

SEQ ID NO: 53201 - DNA, 435 bp, Oryza sativa
  unsure (1)..(435): unsure at all n locations
gtgtcctataaacctatacaatctatgctgtgttattcatcgaagggatgaagtactgtattgccactgaaatactctctcgtagaaatctaatgtttccaacgtctgaaatcaaccaattccgatattgttatgttatgcaatctaatgttgtaagcatggagtgctgaattgtcactgaaatgtgctatacatctaaaatctgaagttgtcaagttctagaattgataactctctaaattgtcaagttatgtcatatgaacttgtgaacatgaagtgttgaattgtcaccaaaatactctagtactgaaatcagaagttgtagagttctaaaattgtcatgtcatataattgtgtccagttcttgaattgttagttctaattttttaatttctcaatctggnatctgaaactgaatttaaatgaatatgaatg

SEQ ID NO: 53202 - DNA, 484 bp, Oryza sativa
  unsure (1)..(484): unsure at all n locations
actcagctgagctcgatctnccttgactggctgccctctgctttcttcccaccttctcccaatcaccatcagccaacccatgtcactagagttgctatctagatgaagatggaattgaggagctcatgaagtagcagagagagatggaactgttatcgagatgaagatgggattgaggagttcatgaagcagcagagagagactttctcgctgacatgtagactactggtccaaggtaaaagatntagtaatagtatatgatttaaagtaataaaagatgtgttaacactaatctctttattaggtgactagtttctttcttctccttcaagatgagggggaagtctttgatggtgggtgttgaaattataagcacatagtgatttaatttattccatanataaatcatgacattgcagatgtanactagattaaacgcatcattagatctacacatgtnaactaaagcagtaaacatgaacag

SEQ ID NO: 53203 - DNA, 250 bp, Oryza sativa
  unsure (1)..(250): unsure at all n locations
ctgcagctgaatggatgaacaggtagatgatgttcttgacctgaatnntgttgtattgaaggtgcgtctccccggcaataagtgaaaaacggcgatgatattgccatgacattacagtcgcatgaaattaatgtcttgatgacaaccatgaagggcatatgcggnttctggctttgctatgggattggggaggggggaggggaatcaaagggagacaaaccatctccgggtgaggtggggcatgggatgc

SEQ ID NO: 53204 - DNA, 254 bp, Oryza sativa
  unsure (1)..(254): unsure at all n locations
aaaccagctaaaactactacctctttaataagacctgtgtttttnacccatacggggggtgtatttatggctaccaaaccgggaagattaattgccggatcgacctggtgccagggacggagctccctactttcgtttaaaatggaaggccgatctcctctgcctttggcgccaatagaaaaatgggtttcatttccgttcacgagaagctaatctattgggcccgggaggacaccccaaaagaaacttgaagc

SEQ ID NO: 53205 - DNA, 338 bp, Oryza sativa
  unsure (1)..(338): unsure at all n locations
attgtgacattgcacagtaatctcacacctcaactcgttctccctgttctcctggatatgtatggaaaaagaaggaggggcacacctatctactattccttatctctatgaatatcatggtttcgaaccttctatatttggttaaactaccggattatgccatttacacgaaaccctttgtcatgaatgggagatgggggagcctatgtnctcttaccaataggtttggaaaacataactttgcttgcctggacacacatggcagaatatttncttggtccctgtatatctgacaacgactatcttgatctttatcccaccgaattttttattattct

SEQ ID NO: 53206 - DNA, 478 bp, Oryza sativa
  unsure (1)..(478): unsure at all n locations
tattgccacagtataccaccaaaaagatgtagaacctgttctcttattactagcagccttaatcatttcagcattagagaaatcatactcgtcaaattgtttgtctactgctagctcccaatcaacataagcggcggaatcatacttaccatcaaaaactggcaaaatagattctacccttgtaagatcattatcatgtacctcatcagcatcatgttgatcactcctcatgtcgcgacgaagatgtcgatatggagcacagtcatccccaattgtcttgcgtatccctgccattgttagtagaaaacaagaaacatgcacaaaaatatgtacgctcctatcaactactangtagtggtagctcgaatatcacacacactcaagcttntaaccaagctcttacaagttcttaccaaagcaagcggaatggtgacatacaccgactcaatcaagcattccaatggagggtggatgtatc

SEQ ID NO: 53207 - DNA, 451 bp, Oryza sativa
  unsure (1)..(451): unsure at all n locations
agcttttatctgaaatagaatttctatttcttattctcatggatagnacttgggctgtccactttcacgaatgaacatatgacatgtgaagagaaaacatgagcatcgggtttagactaattccccttcataaatattacatcataaaatacacaaaaagagatatatggtacaggaatcagtcaaagctctgtaacagataatgcagctcaattagcagtgaaagaatcgaatcagctggttggctaaatgtcacattcctacaacaaatctgaaagaanaataatacactcaaagtaggagataaatatatacccacaggcagtgggattcttcagccaacgatgaacaatgaaagagtattatctaagctcgaccatgttcgtgtgacctggcaatccatcgttgacctgcaacgatctcggatcatcgtttcgatacatcacatgta

SEQ ID NO: 53208 - DNA, 478 bp, Oryza sativa
  unsure (1)..(478): unsure at all n locations
ggctttcgaacatggaagaaatgttcaacagcacatgatatgaatcatccaaatcgccttttataagaccagtcctccatagataatcactctaagtagggcgagaaagaaaaaaatatgagaacttttattaaaacataacatcctatattgaaccataactttatgaataccagagaaagcatacaaagatagcaaattaagagggcatgtccacaatctggcaagccaagaataagtgcataatcaatatatgaaagaatttatctagcgatacacgtataagcgaataaatcagaaagtgatgattctatccacaatattaaaaagaagttaatcgaaaggggaacataaatatttggaattgtgtataaacgaacactntaattaaatacaacctcagtcctagtgtcttccgcgctacaatactggaatagtaagtaattttttaattagattgacaaatttgatagacata

SEQ ID NO: 53209 - DNA, 476 bp, Oryza sativa
  unsure (1)..(476): unsure at all n locations
ngatggagcanagaccgattgatacttcatctgtctcttgttatactatttcggntacatctatgcctaagaccggaattggtagtgatcctctccctgttagttttattgatgttggcaaaaagaaagggaaaagtgttattattggggatcctcggcccaagaataggataaaaaatgcgaaggccgaagatcataaagttgcaaagggtgagtcatctagttcccaaaagaccaaaaagccgaagctcacttttgagatgcttatggctaagtacaataaaggattagccggtcaatgatttgataatcaaactagtgattcaaaaagaccaagatcatcttgtagaaaaagatttggtcaaacaccaaagcaatcggagccatcaactataccaacttcatacaaaccttccgtagtgatgccatggtattcatatccaatgtcaccatttgggtatccttttatgtatata

SEQ ID NO: 53210 - DNA, 180 bp, Oryza sativa
aggaaatggcacttcgaagcacaatcgatgttagaaaatcacatatacgtaacgacgattatatgtactttattataaacactcatgggatatgactactaataatagaacaacatcacactatcagggatactatcttgataagcaggggcggatccagcatgggtgctgggacttaag

SEQ ID NO: 53211 - DNA, 393 bp, Oryza sativa
acatgctctgcttggtggatgatgaaaaattcgttacatgcccacaaaaaaataagaaaatatttccttttctttgctcgagtttttcttcttggtgctgcaggagtagatatatattattaggacaggcgctgttgagagcatgtgatctaggagtatttgattagatgattcatgcacgcgatgcctgacagctgcatctgccacacaattggattgggagctgattgttcctctgccctggttatcctctgctttttattgctcatctggctctctggtcagtattaagcctacgtgtatatttatcctatattgcaggttttttttgcagtatttgcggtggtgagagtactctgtatagtgaacatccggctaggctaattgataatt

SEQ ID NO: 53212 - DNA, 392 bp, Oryza sativa
  unsure (1)..(392): unsure at all n locations
ttattctaaacctcaatcatcacatccnctctctgccacttcacacctcggaacgcactgttcttatagagagaaaggggctttcccatcttcttaacccgaaatgaaatggctgaggagagggaggttccttttggggggtacccccgggaagagatccagtggagacggggtgggcctgtagctcataggattagagcacgtggctactaaccacggtgtcgggggttcgaatccctcctcgcccacagccttccaaaggggaagggcctttactttccccctgagggtaggaaaaccatgatcgggatagcggacgtaaagctattgaacttgggtatgctctctccttctgtcgaagtggaatcgtagaacagaatgtgatacgatga

SEQ ID NO: 53213 - DNA, 365 bp, Oryza sativa
aacatatcggcgtaaacctagcagatgatatattattgattagaaagactgatatggtaaccgatatggtttggggattcaaagaagtacttacaaggatggctggaggtggagctacttcttactgcaacatgatggctatctgcagccgatggagtgtgagcacttgattcagaaacacgagttggagaatgacgacgctgatgaaagacaactttgagttagcatcagctacttgaaagatgaaaaggaaattcttaagaagcatacaggcttaaccggtggaattggtgcctgtggttacttgaagccaacttctttgtctgatatgtacaaagtccataatcggcgtatctatgaatatc

SEQ ID NO: 53214 - DNA, 430 bp, Oryza sativa
  unsure (1)..(430): unsure at all n locations
agcttgtggctggtagtaaaacatcgatttttctttntatatttagttcgatcctcaactatttctcgcgatatcttcttacgaagntntgttagggcatctataacagcctctggtttaggtgggcaacccggcaagtagacgttcacaggaattaacttatcaactccccgaacagtactataggaatccgtactgaacattccaccagtaatagtacaagctcccatagcaatgacgtattttggttcaggcatttgctcatataatctcactaaagagggagccattttcattgttactgtaccggctgttaaaattaggtccgcttgcctaggacttgatcttggtaccaatccataacgatcaaagtcgaatcgngagcctattaatgaagcanattcaatgaaacaacaactggtaccatata

SEQ ID NO: 53215 - DNA, 468 bp, Oryza sativa
  unsure (1)..(468): unsure at all n locations
tgagagaaaagaagaatcttcctctaccgatatgcccttaggcacggccatacataacatagaaatcacacgtggaaggggtgggcaattatctagagcagcaggtgctgtagcgaaactgattgcaaaagaaggtaaatcggccactctaagattaccatctggggaggtccgtttggtatcccaaaactgcttagcaacagtcggacaagtgggtaatgttggggtgaaccaaaaaagtttgggtagagccgggtctaagtgttggctatgtaaacgccccgtagtaagaggggtagttatgaaccctgtggaccacccncatgggggcggtgaagggaaagcccncattggtagaaaataacccacaaccccttggggttatcctgcgctcggaagaagaactacgaaaaggaaaaaatatagcgatagntttattcttcgtcgccgtaagaaatacgtaactag

SEQ ID NO: 53216 - DNA, 434 bp, Oryza sativa
  unsure (1)..(434): unsure at all n locations
acatcgataattcttttttttttgatttcgaccctcgactatttctcgcgatatcttcttacaaagagctgttaaggcatctatagcagcctctggtttaagtgggcaacccggccagtagacgtccacaggaattaacttatcaactccccgaacagtactataggaatcccggctgaacattccaccagtaatagaacaagctcccataacaatgacatattttggntcacgcgtgtgcgcatataatctcactaaagagggagccattttcattgttactgtaccggctgctaaaattaggtccgcttgcctaggactagatcttggtaccggtccataacgatcaaagtccaatcgtgagcctatttatgaagcaaactcaatgaaacaacaactggttccatatagaaggggccatatactagagagtc

SEQ ID NO: 53217 - DNA, 359 bp, Oryza sativa
  unsure (1)..(359): unsure at all n locations
cggacctatgaaactaagctgacagctgngaaggggtttttgagaaaaagaagaatcttcttttaccgatatgcccttaggcacggccatacataacatagaaatcacacgtggaaggggtgggcaattaactagagcagcaagtgctgtagcgaaactgattgcaaaagaaggtaaatcggccactctaagattaccatctggngaggtccgtttggtatcccaaaactgcttagcaacagtcggacaagtgggtaatgttggggtgaaccaaaaaagtttgggtagagccgggtctaagtgttggctatgtaaacgccccgtagtaagaggggtagttatgaaccctgtggaccacc

SEQ ID NO: 53218 - DNA, 418 bp, Oryza sativa
  unsure (1)..(418): unsure at all n locations
agcttgtggctggtagtaaaacatctanttttctttngagatagagntcgatcctcaactatttctcgcgatatcttcttacgaagttttgttagggcatctataacagcctctggtttaggtgggcaacccggcaagtagacgtccacaggaattaacttatcaactccccgaacagtactataggaatccgtactgaacattccaccagtaatagtacaagctcccatagcaatgacgtattttggttcaggcatttgctcatataatctcactaaagagggagccattntcattgttactgtaccggctgttaaaattaggtccgcttgcctaggacttgatcttggtaccaatccataacgatcaaagtcgaatcgtgagcctattaatgaagcanattcaatgaaacaacaac

SEQ ID NO: 53219 - DNA, 433 bp, Oryza sativa
  unsure (1)..(433): unsure at all n locations
tttgagagaaaagttttatctacttcaaccgatatgcccttaggcacggccatacataacatagaaatcacacgtggaaggggtgggcaattagctagagcagcaggtgctgtagcgaaactgattgcaaaagaaggtaaatcggccactttaagattaccatctggggaggtccgtttggtatcccaaaactgcttatcaacagtcggacaagtgggtaatgttggggtgaaccaaaaaagtttgggtagagccgggtctaagtgttggctatgtaaacgccccgtagtaagaggggtagttatgaaccctgtggaccacccccatggnggcggtgaagggaaagcccccattggtagaaaaaaacccacaaccccttgtggttatcctgcgcttggaagaagaactangaaaaggaaaaaatatagcgata

SEQ ID NO: 53220 - DNA, 376 bp, Oryza sativa
tgcagcttgtcttaattactcgaattggatttatgtaattagtacattcctatatatttgctctttccaccattcttggttctacagtagaaaaggctaatgtgagttgagtaaagaaagaaagcccctaggtctttttctgaaagttccttcctttttttcccccattttagtgtcaacataatcttggaaacaactgcttcgatacaaaacagtgaaattagagtatgcccatctttttttcttaaagatatcattaccattatttattactaggttttggtttctatggaactttggtactttggacattaactatatgctctttgcttcacagctttcacataaagtgggtaactcctttggtcagtaacag

SEQ ID NO: 53221 - DNA, 332 bp, Oryza sativa
  unsure (1)..(332): unsure at all n locations
tgtgtaacacatnggagtggtttctccgattcacatggtatatatgaatctttattcttctaggtgcttatatttttcattgtccggcaaaagtatgcctcccaaattaagaccaaggagaggttacaaggtatatataaacatacaaggttgctgtgccaccaaaaattagcccaactacctaatgatagaacaaacagcctgccaacttcacgctagtacacagctgctctctatgtgcttatattgaagttagggaatcagatgttgagctctgaattaaattttaattgtcaggcactattgggcagttgctaactctgctccataaa

SEQ ID NO: 53222 - DNA, 331 bp, Oryza sativa
  unsure (1)..(331): unsure at all n locations
ctccttcagaatccttctttaattgaggctgaagattattgccagggaagtatatagaatactcagcaagtcatgcaataagtatgtatgtgaacaagaaaacaaaggatggcaaatctaaaggaagtcgagctgctgtggcgcggatcctgatgcgacagcggcgctcgactaaaggaaactggcgtggaagccggtggaggagctcaaaggtacacatgtgggctgaagttgacgccagcagactccaacaactganggtccgacaatggtggctgtgacaacagtccaacggggtggcgccgcggcaaggaccgcggtgatgtgtgcg

SEQ ID NO: 53223 - DNA, 489 bp, Oryza sativa
  unsure (1)..(489): unsure at all n locations
agaaactcagctgtagcgaagtgtgccaccatgataaaccacaccattattattatttaatattattggagattntacaaaactacacatctaaggttgggtatcttaattaataaaactacagattntaagaatatataatatcttaaaactaaagatttattagcatatgaatatctcaaactacagattttcgatcgaggtttcgtcctaacattatttttccgcatggagcctttaaaatctgtagattaatttgtgacaataccagtgctaaatatctatagtttgagacattgtggatggaatttataacactaaatctatagttntacgggagttatgttaccctagaagtgatatattataataggacataaaggaatatctatttttctccatacatgggctngcaacctttgaaaaatatggagacgcnaagctacgaatatttttgtaagctagtgagatatagcatcctccggatat

SEQ ID NO: 53224 - DNA, 166 bp, Oryza sativa
ctgagctgcagcttggtcgggccggtatggtgttcatccaacaagcattatcgatgcgaccaacacacactggaatattatgtggagtgtattaaagtaatgctgtgggggtactgatatattgatgtcactgccgacacactggaactgtagtaatatacagatg

SEQ ID NO: 53225 - DNA, 454 bp, Oryza sativa
  unsure (1)..(454): unsure at all n locations
gtgctggattggattccttgttagtttatagacagaatcaagagaaatagtactccatatagatcaaggtgaagagaagagtgctccagagaggacagagagaaatctagagagaagctagctagagggatgcatatggagaggaagaagagaaactagtgcatatatacatatatgcaagatgaaagcatatgcatctgaatgtgaggatagtgatcaagtggagacggatgagattagcagctagtgggtgggtcccctccatatatatatgcatgcccacataattaagcatggtgctcgatcagtaaatcagttggtccagatcgacgccattatttgggaatgcataggtgtagagcatgcatccactattctccatatgtcaacaagcacgatgacatgcatgcatgaaaaagtgtgcgtatatctaatgatatgatcgnggttctac

SEQ ID NO: 53226 - DNA, 459 bp, Oryza sativa
  unsure (1)..(459): unsure at all n locations
tctggcccagtaggtccataaaactcactctgttattcttgtttattgaaccagacaaaacaacaagcgataaaaccaaagacagataaagcgcctaaactataagacaagtaagcttctccagaccatacaaatgcacggcgagcccatgcgaagggtttggttaagatatgccaaattccgccaaatacacaaatgaaacccaaccatacatgtcccccaattatatcttctaaatcatccacactaacaatccaaccctctcccccaaaaggggattttagtaaataaccaaatataacaccggngctaagggtcaaattggtaatttttcttacatctcctcccccaggagcccaggtatcatatataccgccaaaataaagagctttgagtactagaagaaaagcacctatacctaacaaaattaggttgaatcccaaaattggagtcatttta

SEQ ID NO: 53227 - DNA, 463 bp, Oryza sativa
  unsure (1)..(463): unsure at all n locations
agcttggctnaaactggtcggaaagagttctcttctcttctatcttatctcgcactngaggatactctgcataatgtcccctcttgtagctgagcatgttaccctngaccttcatttacatgtcatggtataatacataatatgcttgtcaatcttcttggcctcccggcacctgtgcagcaggcgcctcaggacgctttttacatcctcctcatccacagaatcttggtgagagtccaccctctctggaacccctatgattggctagtactacctccgtaggttataagactgtctagcattgcccatattcatatagatgttaatgaatctagacacacatatatatatgaatgtgggtaatactagatagtcttataatatgaaacggaggaagtacatgttaaggtacacatttataagcttgatcatgttactcaactaaatactccatatccagagt

SEQ ID NO: 53228 - DNA, 469 bp, Oryza sativa
  unsure (1)..(469): unsure at all n locations
tcacttagacaacattgttatgttttctttttcganggatgctcctatgaaatgtttcattgtaaggaaccggaccactcatacatattacctgtacattggactgactgatggtatgtttttccttttttacattgggtgtaattatgtaatctggaattctagatgtgctagttgttgattgaagcagctccttattttgcagcattaactgatgatgggaaggtcctacttgctgcacgcaaatgtcgtatgaccacatgcactgagtacctgatttcgcttgatatgaacgatatatcaaagaggactgatagttatgttggcaaactaaggtgatcccttgacattaatgtctgaaagatacttcagtactgagcatgatctcaaaatggacaggccaatctctaacgtnttcttccattatacagatctaacttcttgggaaccaacattactatctatgatg

SEQ ID NO: 53229 - DNA, 361 bp, Oryza sativa
aatatatatttcgtgcctactcttagatagatctcttctatcactagccatataagggtacaccttgtaaaccctcgttttcttgcacgggcttctgaggaaaacatcataagcctgtttaagaaggcgtacaggactgctccatcaattgtatttatagatgagatagatgcgattgcatccaagagggagaatctgcaacgggaaatggaacgacggatagttacacagttaatgacatgcatggatgaataccaccaacaaaatggctctggtagcggagatgtgggttcacagtcagctgagaagaaacctggctatgttatagtcattggagctacacatagacctgacgctggtg

SEQ ID NO: 53230 - DNA, 438 bp, Oryza sativa
  unsure (1)..(438): unsure at all n locations
ttctctcttcaatacgtntccaatctttattattttgtctttctaaaatgcatcggaattccaaggtatttaaaaggaaaggtacctaactaacaaccaaaaatattataatagtgttcataacattcctttgcctgaccaacgcanaataattcactcttgtgaaaatttatttttaggccagataacttttcaaataccgataaaatcagtttcaaattctttgcctgttgcaagtcatgctccaaaaagataatagtatcatctgcgtattgcaagatagacacaccatcatcaacaagatgaggaataaccccattcaagagtcccgcctctntagccctcttaatcaatagagtaagcatgtcagctactatattaaaaagaataggggataaaggatccccttgcctaagttggtagcctgtactaccctct

SEQ ID NO: 53231 - DNA, 424 bp, Oryza sativa
tatagtctactattaaactagctctatttttttatatgctcacacgaaacgagggagggaggattactgtgagctatacacctactatcagcttatgaggaggacagatgtaacccaaaaaaaaacaagggtattggcgttcatgcgcgagcttatcacaagctccaagacatacattaaattgataagtaaggccgtggttaagttcccccctattcccaacttccatcgcattatatcacatccaaaactttcttactcacatagatgcctaactgtttgtttcaaactaccaacgtttctcaacttctctctatttcaggaactgaatacagcctaactgttccatcacattaaaacttgtctacacacaaagacttacaagttttccatcacatcgttcttaattagatcaaacttccaa

SEQ ID NO: 53232 - DNA, 455 bp, Oryza sativa
gtggagtataacataagaaggtcataagatgcgatttttgttctgtccaattactatagatataatctactcctttcatcaaaaaaaaaaaatctagtatagaatatggcacattctaatattatgaatctaaataatcttctgtccaatttataaactagattatgtcacactctatattagatttattttttattgggacaaatggataactaaaatctttcagaaatcacaatatggctgtgtttagatccaaagtttggatccaaactttagtccttttccatcacatcaacctgtcatatacacgtaacttttcagtcacatcatctctaatttcaaccaaaatccaaactttgtgctgaactaaacacagcctatatgcttatgctcgatacctttcgtgtgtacaaaggtgagtctcacggatggaaaaaagataagacttcgtactc

SEQ ID NO: 53233 - DNA, 282 bp, Oryza sativa
taatgacgagagtgatcgttggacatatgttatgagcaaccgcatcttctcctcacacaaaatatatgccacgaacttttctcatgtacatgtgcctgctaatattatatggatttggaagagcacgtgtactatgaaagtcatagagtttggttggctactcttgactaatccggtaaatacttatgatatgctatacagaaagcattggctccctcaaaatgcttccttgctcttggggctttgttaacaggatcaagggaaacaactcttcacttattt

SEQ ID NO: 53234 - DNA, 406 bp, Oryza sativa
  unsure (1)..(406): unsure at all n locations
cgcagaaagctgcatgcattaatgcccaacttcttatgttcttaaagaagagcttaaagaagagctcactgctgagctgttaggtatggaggcttggatggaggcacgcatcanggataagtcgaccgatgccactcccggtcccatagtacaagtgagccccacgcagagacgtatcagctgcacatcaactgaggctccggtagaacagcctgaaggccccgccgcgggtggaccacataacggtaaaaacaacttaataacgcatatattgtattagcaccacaatacattgcaacatatactaaggacactaatgaatctattgcaggaacccacatcgtgtaccctagtcgttagggtgacaccaggatttgcaattcctgccgctgagggtcaagcattc

SEQ ID NO: 53235 - DNA, 459 bp, Oryza sativa
  unsure (1)..(459): unsure at all n locations
ttgatgggcatgttgcacgcatggagctcctccttgttttgtgatggttntagggntatgggtagccgtggaaacgtgaggccacgtgcttggagaccaaagtagtagagtgcgccggctgtgtggccgaggtaatggctggttcggtcgaaaagggcgccagtgatgtggggcttctcagctctagcagaggggaaggagatttgtatattatcgagggggtcctgattgggaccttggacggccatgcgatggcctggagctaaagctaccatggctggtgacggcaacaggtgaaaacggtcgtaaacgatcaaattcggtagcatctctttgaaaaaaatgctcgatcagccggtaattgaccatatttatcatttaaactactcaatatcggtattaataagatgcagaaagaaattagaacaaataatatttataaatagctaaaaacgatat

SEQ ID NO: 53236 - DNA, 279 bp, Oryza sativa
  unsure (1)..(279): unsure at all n locations
acaccaacctgaatgaatccttcttgtggtagcaataattttataaaattaagactcatgtgattcatcttatccataatagaatgaatatcatgtacgctatatatctcattctctcttttgtcaagctctacatngcccattggcaatangatgagaaaggtggtgacggggtttaaactctagacagaaatccattttacatctctcaactcttaattttgtctataatacatcctcaaacttcaaaaccaaggtattaacatcctttaatttact

SEQ ID NO: 53237 - DNA, 354 bp, Oryza sativa
  unsure (1)..(354): unsure at all n locations
catgagnactgncatgtgttaggagatttcttcgacccagacagtgccctaccgacaagtgacgaattcaaggatcttcgggagtggaacaccgctatgccataatataactagatggcgtatttgaagtgataatgtaaaaaaatattgtaatatatattttttggcaacatttttgagttatgcagtatatgtagatttctcagtaccaaatgcttgataatattcctatatatgtacataataatctacctgcaagaatttctattaaataattaaaaagtaatttatgggtaaattattattgtatcaaatttcaaaaatttctatctatcttcgcaggcggatgttttc

SEQ ID NO: 53238 - DNA, 420 bp, Oryza sativa
  unsure (1)..(420): unsure at all n locations
tcaagcttgtacttntattagaatactcttctatatacatttatggtattaaaatactttccaagtatatgagtacctactttacattatgttcatgttatactgaatatacggctagcttatctggcagatgctttggtgtgggtataatatttgcatatgaaattactctatgtcatgacgatgatattagagtagtatctggtagtttagacgtggtgtctagattacgggatatcattattcggggttatatattgcagaggaaaggtgggccgctgatggtgacagctcagtacgggtattcctccgcgccagtatataatcctaagttaattccctggggagggtattcctccgtatttagccccggntgtatggtcatgacgggctgtcgtaaggaactcggcagtcaggggt

SEQ ID NO: 53239 - DNA, 486 bp, Oryza sativa
  unsure (1)..(486): unsure at all n locations
cttgcganatanattaaaacatttggaaacgaggtctctttatttgtaattntgaataactggtttcaaaagaaatgaaagaaaatgataaaatcaacatgataaatttattttattgcagcaagattaaataaaacagtattgtaaaacttttgctggtaaatgagccattagtacagtaatagatgtacagtactaataacactggaataaatttttaatgagaaccattaaaagagattatgaagtgcatgtggcattagtttggtttaattaaaagagaaagggaggagaacagttctacttttccaatatttttcagagggcttctatgggtaaccatttggcataacctanggtcaaagaggctctgataccaacttgtcacgcccggaatttctatccaaaattccaaacgcttacatgtgtgtgaaccctcgttcatgaatcagccgacgcacacaataacatattgatatagagtac

SEQ ID NO: 53240 - DNA, 441 bp, Oryza sativa
agctttgtggcattcagcagtccactcgaatgtgtttgcccccctcaaagtcttgaagaagggaatcccttttctgctgatttagatagaaatctactcaaagatgccattcggcctgtcaacctctgcacttctcttgtgtttcttggcggctccatttgatggattgctgcgattttgtcaggatttgcctctattcctcttttggacaccaagaaaccaagtaactttcctgctcaaacgccaaaaacacacttttctggattaagcttaactgagcattttctcaggttttcaaacatttcttgcagatctttgccatgggtaaattgcttgttactctttaccacaatgtcatctacgtatgcctcgacattccgtcctaactgcttagccaagacttttcctatgagcctgtgcaaagtcgctcctgcattcttc

SEQ ID NO: 53241 - DNA, 483 bp, Oryza sativa
  unsure (1)..(483): unsure at all n locations
tgagtgctagactagtcacttggaacttagaaataaaactagattttggatgccacctagcctaggtgacctagattaacgattactccatcctaatcgtgtcccactcctcttcaaactctaatggttgctgccgaggtgaataactgaacacgcagccaagtcaaacatggcaaacaatctagatagctcagctaagctatagctcatcttagcaaagaaccaagcgtaccctttgttgtattcccatttttggtggttcatacgtgtatcacatggtatggaaatgacagaacagaggacctagacaaaattataagcttcccatacctttccctcaaaaagagatgcatcatatagcctttccgagcaaaggttgtacaccttatactttccctgtaacacaatatgataaggnngtgaanaacacaaatagaatatataacacctcctaataatgcaccaatcaagtgatttactaca

SEQ ID NO: 53242 - DNA, 251 bp, Oryza sativa
  unsure (1)..(251): unsure at all n locations
ttacactggcgatggaatgatatngngggtatggtaattatctgttgtcccgctgctatatgctactgtactccgttaataatgtaaatcattgctagcaattgccacagtaatattgaagctgacgaatcttgataggtatatatcgctagaccaatgactcccgatacgaatgtgggtaatactagaatgatctacattgtgaaacggagggagtagattccttctgctgtgtgcagctgtggcggggg

SEQ ID NO: 53243 - DNA, 322 bp, Oryza sativa
  unsure (1)..(322): unsure at all n locations
ttaatcgaaagccagaactcgtcggaataaacgaaagtaaaatggtggcgatgcgccgagaatgtattgaacgaatgttaattgattacatgggttcgggtcatatttatacccaaaatacaagatatgtccttgccagacatgacgcttatttctaacaaactctaagataccataagtctttgcggcagactcttgcccaaacatttctctaaggaaattacataaaatatcctaattaatagatacaattgcctatctgagagccctatctncatcgcggcaatcttcgggaagcatcttgattgattctagaaacgtc

SEQ ID NO: 53244 - DNA, 408 bp, Oryza sativa
  unsure (1)..(408): unsure at all n locations
tcttattcaaaacctnaatcatcacatcccctctctcccacttcacacctcggaacgcactgttcttatagagagaaaggggctttcccatcttcttaacccgaaatgaaatggctgaggagagggaggttccttttggggggtacccccgggaagagatccagtggagacggngtgggcctgtagctcagaggattagagcacgtggctacgaaccacggtgtcgggggttcgaatccctcctcgcccacagccttccaaaggggaagggcctttactttccccctgagggtaggaaaaccatgatcgggatagcggacgtaaagctattgaacttgggtatgctctttccttttgtcgaagtggaatcgtagaacagaatgtgatacgatgagataaaatgcaata

SEQ ID NO: 53245 - DNA, 326 bp, Oryza sativa
atccaaagcaagaacctgtcgaaataaaccaaaataaaatggtggcgatgcgcccagaatgtattgaacgaatggtaattgattacatgggttcgggtcatatttatacccaaaatacaaaatatgtccttgccaaacatgacgcttatttttaaacaaactctaaataccataagtctttgcggcagactcttgcccaaacatttctctaatgaaattacataaaatatcctaattaatagatacaactgcctatctgagagccctatctccatcgcggcaatcttcgggaagcatcttgattgattctagaaacgtctttgaaa

SEQ ID NO: 53246 - DNA, 463 bp, Oryza sativa
  unsure (1)..(463): unsure at all n locations
taacacctcttattngactntnntcactatttgaattactaataagatccaaatccaaaatgcaaaggtcgtcttattcaaaacctcaatcatcacatcccctctctcccacttcacacctcggaacgcactgttcttatagagagaaaggggctttcccatcttcttaacccgaaatgaaatggctgaggagagggaggttccttttggggggtacccccgggaagagatccagtggagacggngtgggcctgtagctcagaggattagagcacgtggctacgaaccacggtgtcgggggttcgaatccctcctcgcccacagccttccaaaggggaagggcctttactttccccctgagggtaggaaaaccatgatcgggatagcggacgtaaagctattgaactngggtatgctctttccttttgtcgaagtggaatcgtagaacagaatgtgatacgat

SEQ ID NO: 53247 - DNA, 363 bp, Oryza sativa
  unsure (1)..(363): unsure at all n locations
gagcacaaccgcccgcccgactcgncgncggtgttactncgatgaccgcaatccgagaaaagtagaggaatggaatcccgagagcgtgctcttcatttcatcttttgacctcaaccccgaaggagccacctattgccgccggagagctcgagatcgagctcagccatggctctgctcagcctctgtatagaatgaacgatgtagagaaaagcacggactttgttttgagaattcgaacaactgtatgtctcaggatgtaaacatctaaatcactgacaggagggtcaagaactgaaacgtaaatataaaagaaaaatggggagtctttagtaactatgtcatatacacgtttttggagtgagg

SEQ ID NO: 53248 - DNA, 434 bp, Oryza sativa
aatgatagacaatatcttattatctctttttctcgcacatactcacaatgttggtgggaggatactgaaaactgcacttagcttaagatatttcatcttccactatggagttgcctaccatatggatgcaagcgaattaagtaaagcactattggtatgttttcagcatccattcgattcgcttgttggcatgaaattcgttgaccaaatatgtctcagctttgttgttcttactttctgagagcctttttgttagttgaaagagctattaatactctgatattgaacacctagaactgatatcattttgcattagaaatatgtaacatactattgatatgtattccgacttcactattggctaggtaatggagacatgaatggacattcaattgattagagaatattggatatcatggctgtgctggtggctt

SEQ ID NO: 53249 - DNA, 386 bp, Oryza sativa
  unsure (1)..(386): unsure at all n locations
gacatgtccttatgatttaaggttgaaaagacttttgaaattttaaaactagtacatgaaaaaaatgtttaatatatcatttttagtaggttgtgtaaggtaattccataatatgagtaaaatcaccttttatgcttgcaataatatttattttggaataagcatgatttatttgggtttaatatacccaaatgctgattttttaaaatatttttaggtaaattattaatttttaaaatcaaatgtaatttcatccatgggttatgcatttgaattttagaaaatagaaagttgaaatatgaaattttcgcaaataatactatcgacgattggataacttatataaccttcaataattntggtttattcaagttggtctttttctc

SEQ ID NO: 53250 - DNA, 476 bp, Oryza sativa
atggaaacacgatgcggacccgtgcatagatctatttatctccacctacctattggcgggcggattcgacaaagtcaaggatagtggtgtacaatcttcccgcttctcacctgagtatccaacacttgctgctgtgaaaaagtttgtccgcccgccactgttgtgctagtcgccccatgtgcggatctgttcgttgtgagctcatggaggtcggatctaaccgcccccgagcttgtggtagctagatccggcgaattcctcctctccacactccctccatctacccctcccttcttcgctgcctaatgtttgcttagtttaatgtttcattataagttcagtatactccgcatattcacatatatcatcgaaacattggcacacactacaagaatcttgttaatccatgattggataacacggttgttgtagtgacattgcttgatgcatcatgcatgagactcatatatttttct

SEQ ID NO: 53251 - DNA, 273 bp, Oryza sativa
ttcttgagctggacggaaaagaacgaactgtattttatctcagccgtcggctccttggatgcttcacactagggtattcaccctcgtgggagaaggatatgcttcgagtttgtatttttcatgcacaagattgaggcattatctactatccaatgagtgtactgttatatgcaaaggccgatgttgtcaaatacatgctatcggctcccatattgaaaggaagggttggaaagtggatattttccttaaccgagtttgatcttcggtatgagt

SEQ ID NO: 53252 - DNA, 454 bp, Oryza sativa
  unsure (1)..(454): unsure at all n locations
gcttgccactcgaaactttcacatgatgaactgcgttggctcggggggttntggagcagtgtacaatgtgagaaatggactcactttgtgcatcatattntcctggcttcttactttatggccttttattttatcatcactcgctagttttactgtaagaattctctcttgatattttgtaataatacgttttataagtctgcaagtatataatgaataacaactaacaagagtctccttcacttatggaaacctgaaagatggcactcaaattgcaattaaaaagctgtcagctgaatcaaagcaaggggcaaatgagttcttgacagagataaatgtcatatccaatgtcaggcaccccaaccttgtaaagctaattggtngctgtgttgaanggactaacagactactagtgtattgatatgcagagaacaatatgcttgcacatgcttta

SEQ ID NO: 53253 - DNA, 457 bp, Oryza sativa
  unsure (1)..(457): unsure at all n locations
ctcgcttgtcttgttatccacaaaagaggcggacaaagatactaagtacgtgttgatgattaaagaatggcacccaaaaacctatttcacgaccatttccggaataaagaagcttgccacatgtgccaaacaaagcggccggctctgtaaaggatcgaacgatatctaacgtctgttttatgttggagtaaaagaagaaacaaaggaaagcaactcaatctaaagagaaaagggaagcaaaggatcgatgctaagcaagcaggatgacacaagttaatctactacgttttgttttccggtgtacgtgttgtgttttttcatcacgtttagtcacgtatcaccgataaaagttaaagtcgtccatttggaacgaaagaattccatagtattttcatatatacgaatcctaaaattcattatcaataaatacagntaaaagtatctctctattatctaa

SEQ ID NO: 53254 - DNA, 434 bp, Oryza sativa
  unsure (1)..(434): unsure at all n locations
acttcagcgaatgatatagacacgattgatttctactgtgtcccaacgacggtagcgtgtgttgttggactgtcgtcagccataatgaacaagaaaatcctcagtttttctagtgaacaattcccgcctatatcgacaagtccataagaagttaccaagatgctgtgcaactgtgtatctcgtcagcggtcagcctgaacattgcccgaacattttccaaatattgtccagcatccaactaataccagtctgaattggaatttggttatgtgctctcgcattgctctctaactcactgtccaacaagccgatgatggcatcgtcctcctcgctgctgctatggtctgcaggctgcagcccagccatanggaccggcaccgctactcatcgccgcaatcctttaaataatatagcacccgaatatggataaacgt

SEQ ID NO: 53255 - DNA, 259 bp, Oryza sativa
  unsure (1)..(259): unsure at all n locations
tatatataaacagattaacacatactgaaatttacgtacaaggctattgctagaggcaaaccacagtgataatcactacttgcgaattaatatacacaaacgtacatagaagtcagatgactgctactacntagtctcaaatctgcagagactgtcgtcggcgagccggcccttgcagacgctgtccttgtactccttncaggtgaactccctgtaccggctccggccgccgtcccctaataacgccggcagcggcgcc

SEQ ID NO: 53256 - DNA, 447 bp, Oryza sativa
tactcttattctgattctctcattctggcaggtgaatatattgttttgcatactgcactggcctatggctgtgttacagtctgcacattgcacacaaacaacttttaaaggtatgatcgtcccactagttgttacataactagaaggagtccattaaccacctgcccatgcacattgtgaagaattacatcttacaagatattaccatagaacaaaatcatgcagccagccaataaacacgtgggagtgaatcttaagcgttaacacgacatcagcttcaactcaatgagacgtaagacgctggaattctagacagtaaactgcataatagtaatgctgctatgaaagacttattacgtgagctacctctggtgaggcattgcgctgtgacaacaaacaaccataatttatgagtctagtggagcctgtatatttgtattactcatg

SEQ ID NO: 53257 - DNA, 356 bp, Oryza sativa
gcttggaaatgtccagcttgaagagaagattttgtcgtcttggcctatgatatttcctgaccatgttccttacatacatgaagttgtcatgtatacttctcccacagatgaaggcgctctgattcgttgggatcagtgattgcattatcggccgtagtcggattgctagcactttggagaagatttcccaaagccatggaccaaacttatcagtctatagtctccgattccctctgccccttcttttttggggattagcaccacgttggcagaatttaggaggttgaagtgcgtgtttcttgaatcgtgtaaggtgttgaaggccgccactacattaattttgatgatgtcccaca

SEQ ID NO: 53258 - DNA, 438 bp, Oryza sativa
  unsure (1)..(438): unsure at all n locations
tatccaaattcccataacctctatattcactggttgatattctttttaataagcttcaacggcatgctgtattgttcattcgtcccacaatcaatgactacttctttcagtcctnttttgatggaaaaacttctttactcatcttgctaatcccttgcaggaagcagatgtactgaactatatccagtcagtccttactcatccttaattggctcattgtttatggaacattttagttatttttcatcctgcaggcggaggcggtggagataaagaagggcggcaggggggcggcggctgtagggatcatcattaccagcgctccgctccgctggccgcgcgctctgctgccgccgtcgtccgtccgtcttacgcaccgactccttccgcggagcctccatgctcaacatgcatcgcatctccgcgggcgtcaccatc

SEQ ID NO: 53259 - DNA, 356 bp, Oryza sativa
agcttatctctgctgattgaactctgcattctttatctatcacccatggaaacttgagaattgcacaccagcgcggaataaatcccctccaatccctccctcacagggattaaccgaacaagccctgaggccttgttcgtttaatccccaaaagagagggaatggaggggattgaaggggaataattacacaccaggtgtggaacaaattcgctccaaatctctcccaatcccctcgtggaagggattaaccgtatatccaacctataatgaagggagccaaggtcgactttttccaaggcaaagtatgcagaaacgagacaacttcgtttcagactttcaggcccataaaacaaa

SEQ ID NO: 53260 - DNA, 460 bp, Oryza sativa
  unsure (1)..(460): unsure at all n locations
cttgattcttcctcctcatacgggcgaagatctaaatatgttcttcctctgtcccagtaaatgtgtcgttctaccgatctatccatgtcccagtaaacgtgtcgtgtcgttctgctacttctgcactactactactacttcaaccaatctacagaggtgggacccagaaaaaatgcatgtggcgatttttttctgctcgatttttttctccgatctaccgctcgattttttttttcccgcaccttatcctctcgcatgacgcaccacttgattcctccgtcgcccgcaaccccctccctgcgccgatccccaatttctcctctccttggctcctctatggcccccctgcccctgtaggatcgagatgtcgactagaggggggtgaataggcgatttanaactaaatgtcacctaatcaaaacttacctaagttgctaggcttggtgagggtcaactctaa

SEQ ID NO: 53261 - DNA, 418 bp, Oryza sativa
  unsure (1)..(418): unsure at all n locations
ctacataccatgtcgtctataaatttaatggttaaacgggttggcaactntgtacattgacaaagaaatgctagatttcgtaaaaaaaaaagagacaccactagatgagattgatatggatactatcataatgactttgcgtctagaaatgtttatgatgttttctgtaagtattgcttttggatgcagattaaatatgtagcggtaaaaaaatatttatgcataagtaaaacgttgtgtgctatttagcgctatattgattattatttagatgtaatttttttcttgcgggagtttagatgtaaaattaagggcccatggttttaatttcgtcctaggccaccaaaatctcagaatcggccctgtttttaattttgnctaatgttacgaagagaggaaatgatcttttttataattt

SEQ ID NO: 53262 - DNA, 475 bp, Oryza sativa
  unsure (1)..(475): unsure at all n locations
ttaatttggtcactactaatattcactaatgtctttatttttcccctctgccatagctagctttatgatgcatatgcacactcgattattctaacaagaagaaacatagctttggtcgctgatgtaaaaataataaacgaagtgcattattttatcacatagagattatgatattctatagggtaatcatgaaaatactaaacaatttagtgtgttcatagctttaagagaccattggcatataggtggaaatagtactatggcatataggtggaaatagtactaattaaaaggagcacatataagggtgaatcagatcaaagttgtaacaaaaccgcggctgcatcangcaacgatcaaaaacacctacctggaggccttgggagcacatagaaattaatgggtggttttgcccaaaaacaatgcacaaccgtatgctgattaattatgcccactattaattaggcactaactg

SEQ ID NO: 53263 - DNA, 310 bp, Oryza sativa
ctacataccatgacgtctattaattatatggctaaaccgtttggcgactatgttcattgactaagaaatgctagatttcgtaaaaaaaaaagagacaccactcgatgagattgatatggatactatcataatgactctgcgtctagaaatgtttatgaagttttctggaagtattgcttttggatgcagattaaatatgtagcggtaaaaaaatatttatgcataagtaaaacgttgtgtgctatatagcgctatattgattattatttaaagtgtgattttttcttgcgggagattagatgtgaaatta

SEQ ID NO: 53264 - DNA, 407 bp, Oryza sativa
  unsure (1)..(407): unsure at all n locations
ntaattgggtctactactaatattatactagtgcctatctcttattcccctctggcatagctaggtttatgatgcatatgcacactcgattattctaacaagaagaaacaaagctttggtcgctgatgtaaaaataaaaaaagaagtgcattattttatcacatagagattatgatattctataggttaatcatgaaaatactaaacaatttagtgtgttcatagctgtaagagaccattggcatatagttggaaatagtactatggcatataggtggaaatagtactaattaaaaggagcacatagaagggtgaatcagatcaaagttgtaacaaaaccgcggctgcatcaggcaacgatcaaaaacacctacctggaggccttgggagcacatagaaattaatgg

SEQ ID NO: 53265 - DNA, 411 bp, Oryza sativa
  unsure (1)..(411): unsure at all n locations
agcttatacctttctaccgaatagcaaggatctaaatattcagccatgttagggttcctatatgatattatgagagctaaagcatgtgggcatggtttaccagaaacttgccactctctacaggtgcatgtatggtttactagattgacagcatgtctaataatctgatgttcagcagtgatctcagtcacctcagcttggtctctatcaccttgaactaccttcaagtggcccagttctctagtcattgcattgagttgancaaccacaatagatagcatcacaccatccaatttctcacctatcttccctctnctagccaatagattcatggctttgacctaaaccatctgcagctcaacaatgggagatgttcatatcttaaatcatttgttcctgactctgctaaat

SEQ ID NO: 53266 - DNA, 353 bp, Oryza sativa
caccatccctaaacgcccggcagggcgactcgaggacctctaaccgaacatcacatcaacatcatcatgcggagcgaacggaaacgcacttcacagacaagagtagctagacaactttgagaccttgacaccaatgacacaacagtgccctctcatgaggggaaatctgatatcccaaacatccaatccaacaaatccagatattgtttcaagcagaaacttccttaccacctgcgcacgaaggcacaataactagtgggccatcattctcgaaagaagaagaaaccgatgccaactacagaggaccactccactgacactctaaggaggaagtgacacacaagagctagcag

SEQ ID NO: 53267 - DNA, 412 bp, Oryza sativa
  unsure (1)..(412): unsure at all n locations
atcaatttatgcttatatagtgagattatactattattatgttggtacttatttgtaatcagttataacttatcaatttatccttatatagtgagattatactattattatattggtacttatttgtaagtgaaagctaatagagtaaaagatagatttaagtcgaaattttaatatatatgtctaacgtgtgggtcatgtggtcaaacccatctaacttacatacaaattttcaaaactaccttatgggtataaacggcattgcaaagtttatgggttgaatatccggcttcaaagttcaaggtgctagacggatttctatccaaagtttatgggggtatctggattttntccttgttttaatgtaatcaacacttattgtatgcaagagatacacaaaatgtcatatctt

SEQ ID NO: 53268 - DNA, 313 bp, Oryza sativa
  unsure (1)..(313): unsure at all n locations
acggggtgacattatatttatattacaaaatgatcaacttaatatcgngtactagaacactatttcaacaatggatttttgggaacattataagcctgtgaatatatcttcagaatatgaataatttgaagaaagtcttagcatttaaccttgcacatgggggcgaccaaaatagcctcatcccaagttgaaggttccttcctatgtagcatcatcacaatagcgccctccattgactcaccaagaacgaacttcgtttttactctgcactctcctccttctagaataaagtgtgcacatagaaatatttaca

SEQ ID NO: 53269 - DNA, 438 bp, Oryza sativa
  unsure (1)..(438): unsure at all n locations
ctggctgaaaacaaagcaaagaanaaaaagaggaggagctcggctgggccgacttgggctgcacaacacgcgcgccagggagagagatgttgggctgaaatcagcccaacggcttatgagaggatttaaaaactttttccaattaaaataatcactgaaatgatctttgaattgttaaaaatacttctaatgctcaaataatttcaagaaaagtcctgaaaatactggaacacccaaagtacttaaaaaaattataatcagaccatttaatgattaatttaatatgttgataattactgaaatgttctttgtatgattaaaattaggaattgagctccgaaaaatctgagaaaattctagagagtataattaaccatggagaattaataaaaaataaattcatccatgctntatatntatgaaaatttattttccaca

SEQ ID NO: 53270 - DNA, 280 bp, Oryza sativa
catctttggttgttcaactcatgcttcggttgaggagaaagtaacactctgcgcaggaagttaaaggacatcatgggcgagcatcgtactctttgggattgcaaactagtcacacgcctcaaggtacatttgtgcactcaaacgaactacacaaaggatcttttaagatggaacaacaccaagtggttctacacctgcgctggatcttgatcaacatggcgaagctgtcgatctgacacgagatacacgtatgactgcagctttggtgatactacttctt

SEQ ID NO: 53271 - DNA, 449 bp, Oryza sativa
  unsure (1)..(449): unsure at all n locations
aatctttgggtcatggttaatgcatgcttgttatattatagatgggntcatcttctctttattgcaacacatgacttgatatgctatatgtatgctaagctcttaaacattaatgaacataattcctatgcttgatgaaatcattgtcaaaagggggagaagcaaggtgaaaatttttggagaagcaaatgagttgagaagagcatgttgtttntggttcgattagaaatttctttcttttcaaaagtgagggaagttttcttttggatttttgagcacgatgtgtacgtttgtatgaagtgtgctctttaccacttttgtttttattnttccaaacaccacaacatttttgantaagttgccaatgtgtttatcaagggggagattgtaaaatcaaaagtgcttttgattattattctgtgatgaacaatcggtattggagattattg

SEQ ID NO: 53272 - DNA, 458 bp, Oryza sativa
  unsure (1)..(458): unsure at all n locations
aaaacatctagcttggttgatataatatatatttctactactaccatctatatcacactatttttaaattatatgtagatgtgattacaactgatttaaccgtatgaattattttgaagcgaaagataagacaaatacataataaaaacttatgtttttttttcagaanaacagtataaatgcatgcgctcatgaaagcgcgcatactcaccctatgatcgtacccatgcacaacgagcacccgggaaaccggaccgacacattttgagattaacgaagtcaccacggacatgttgctgttgatgagtacgccgtctaccactagaaatactcttgttgattataactcacactcacactatattttcaaatctccgaaccattttttttttaaaaaaaagagaagaaaagagaagaaaataaaaggaaaggaaaggaaaaggatgttntacctatat

SEQ ID NO: 53273 - DNA, 388 bp, Oryza sativa
tatatttgccaacccttcatggaacttggcacacatgaaggctacagtgcaagaggagatgtttgctgatgcttcaatagggaagctaaaaagagcaaagcaattagtgatgaaggcagctctatatgcaactaaagggcagcaccacaaagttgtatagttatcagctagagcttcttagaagtaatccaggcagcacaattgttgtgaacagagaggtgggaatggatccacctgtattcaagagaatatacatatgcttatgtgcactgaagagaggattcctatcaggttgcacgagagttatagggcttgatggttgttcttcagggtgcactaatggagagttgatctggcttaggagggatgcaataacaaatgatctcat

SEQ ID NO: 53274 - DNA, 404 bp, Oryza sativa
tagctggttccaataagatcaagtgaagcagcaatcattaattgcagggaaggaattaggaacacagtggaagaaggaagggatatgcatgctttggtagatatataacccaaccaaccaaccaaccccaggagagctgatcgaggctgaaaaatgaaggaatataaggagtatattacagatgcagtacaacaagctagctaggagatgaaacgtgtggcgtgccgccactgaacgttgaggcccgcgcatcctctagcttggagttcctcctccggcctcctctgtactgcagcagtgtatctgtatgtatgcatgtatcttcttcaactcctcgatccatacatatatgatctgcatctatcaacaacaagcatcaagtgtacgtactacgtcaataatta

SEQ ID NO: 53275 - DNA, 332 bp, Oryza sativa
caacaaatactagcgcacacatgtcatagcgtattctgaattgaaccaagccccccccatgggttctatacccgattcataactagaaagcttctctggtccttcacgaaccggagctaaaagtgctgaaatccaaaatgctaaaataggaataaggcttgctattattagaaatgcccaaaaaatatcatattcgtgaagcagaaacataaatgtactcccattaatgtggaatacgcggaactgaattagtcaagtcaagtcagcattgtcaatttatacagaatgtctctcttttcctcggtgaaacaaagatcggtttttctcaacca

SEQ ID NO: 53276 - DNA, 242 bp, Oryza sativa
ctcaacgacttaacaccgctcactataatacaggccatatccgaaaagaggggccaacaacatacgcggcaatacggaagccaaaaccggcgacgcctccgcagcaaaacacggcgacaactggcgccctgctcgccttcaccgggcgtgtcatgacaagcggttctcacttgctgctgcacgcgaacaagacgaactagaaccaagtgaggcgtactgggacgccagggtcgtaacaccgg

SEQ ID NO: 53277 - DNA, 474 bp, Oryza sativa
  unsure (1)..(474): unsure at all n locations
gtgtgagttctgggtgtccgaagtcacattcttattttacgtgatatctgctaaaggagtggctgtggatcccgaaacagtgaccgccgtcaccgattggaagctacccaagacagttactcaagtccgcagtttcttaggtttggcaagatactatcggagattcatcgagaacttctccaaaatcgctcgacccatgacacagctgttgaagatagaagagaaatatgtgtggagcccgcaatgcgagaaggcggttcacactctcaaggaaaagctggtttcctcgccggtgttaatcttgccggatactcgcaaggacttcatggtgtattgtgatgcttcgcgccaaggattgtngtgcgtgctcatgcaggacggtcatgtagtatcctatgcctcacgccagctactgtctcatgaaagcaactactctacacatgatctgggagtagccgcagcagttcatgctct

SEQ ID NO: 53278 - DNA, 367 bp, Oryza sativa
  unsure (1)..(367): unsure at all n locations
cccctataattgaaaagtcattattattntgtttgcaacttgcattattaaaatcacacacttaacttgcttggcctcggtttgcgtgccaaaccgacggacctacccagtagtcgcactaatttccgtaggtcgtactaccctgattccttgtcgctccatccttgtggtacctcggtattcgtgctctctgagcgcatataccaaatatcccacatacaccgttgttngtcgaaaacttgggaaatgggtttgtgaagcctttcaaacccgatatgtggtgtcggtgtgtttaaaaataaaattaattgtgaaaactcgcgatgcggnggttgtgcctatgtggcactgtcccgtattcgcatat

SEQ ID NO: 53279 - DNA, 482 bp, Oryza sativa
  unsure (1)..(482): unsure at all n locations
atcgatgtttgatgccaatgaaagatagaacgggctttatctttaagataatattntgngagtattggtccttcctttgtcttttttattgcaaggaacttacctttttgaacatatgagaggttaatccatgactcattgttctgcaattgtctatacaggattttaaggggttgattatattgatgccatcttataccatagcatactttggtaaacttatcaaatatatatgtgcatccatttagtttttttttatcaaactttggtgaatatataagaaatcataccacaacttagcaatattgtcaaattgccaatgccaaaatttgataacgattattttgggcataatttgaacaacccctaaaacatggagaaagccaaatatggccaatgcatgtgcccgcagttcctatccgccaaaagccttacagataattatgatatatattctctaaaaatgacattcgtaccatgtg

SEQ ID NO: 53280 - DNA, 268 bp, Oryza sativa
ccttttcttatggaagaagcaattgaggctggccatcaaactatgtgaaataggccagcgatggaagcacatacgtgtgtaatacaactacaaggccatgaatgttctttaagaatatgtgtgccaatatgtaatcaatgtttacagcatgggtttggcgattatttggtagcatatctatgcactagtttcatactcaggagtgttgttttttttcaatacaaaaataacttgatgcctagtttggtacctcaagttgggatggaat

SEQ ID NO: 53281 - DNA, 428 bp, Oryza sativa
tcgcagaaccctcatcgacagtggcagtgcactctatattctcttcgccaagaccttggatgatatgcagattcctcgctccgagctaaaaccaagcaatgcgcctttttacggcgtaattccaggattatccgcaactccactcggccagatcactctcccggtcacctttggcacccgggaaaacttccgcacagagaatatcagctttgaagtcgccgatttcgagacagcataccatgccatactcggacgcccggcgttagccaagtttatggccgttccgcactacacttacatgatgatgaagatgcctggtccccgaggagtcctatccctacggagcgacatcaaacaagccgtcacatgcgacaaggagagttgcgacatggcccatacccgcgagatggcgtctgcccgagaggata

SEQ ID NO: 53282 - DNA, 282 bp, Oryza sativa
ctacccaacctatacgaggggtttgcgccagtctcctatacagaatgatttttggacgtgatattggattgcaaccccgaagggcggtctgaaatcgctctttggcggcgttttaataccgccgaaaaacatttatgcaactgtaaacccactgaatattactacttttatcacgcgcgcatccatatcattctccatctccgttctttctatcactgttaatcttgtctcattccttccttcttgcttacttatcggggttcattccttcttctttttttt

SEQ ID NO: 53283 - DNA, 347 bp, Oryza sativa
  unsure (1)..(347): unsure at all n locations
tgagacaaatgggaactggccaccaatatgttacaaaacacccgcaaaacgcatagacaactggttgaatcttgacaagcacagtgagagatcctactcattctcatgagagagacagatccacaaccgcacttgattcccacattcaactctagaaaccacgcgatctgcggcacgtgagaatgccgcagagcgaagagctgtagaagcagcaccaatgcctgagaccagggcccactacacagctcccccaaaaagaagcaagctagccatgccaaagctatactggccccacaaggcacgctctaccacaccacagttntgtcaacacctgaccaccggcaagc

SEQ ID NO: 53284 - DNA, 460 bp, Oryza sativa
  unsure (1)..(460): unsure at all n locations
gagtgggctccgcattcttttttatggatatcggcaagaagcacaacgccttgttcccgaggaatgcacttcangaggattccattagccgcgcgccgatagagggtcccttctaccagcacgtagcgtttggagatgcgatggacgcgttcactcccttcgcggtcctcgggtagagtcttatctgtgaggtatgcttggatctcggcgatccaagcaatcaatctaagggagttgggagcactcccctcgggtcccgaggcctggactccgacaggcctcgggggccggtcaggcgcatccgtctcccctaaagggtcgggtcgcgccgacagctgggcaagcctttcttaaaggcgcccggtgggatctgggctcgcgaggacgcgagccgtgagagttcgtcngcaatcatgttatcccgtctaggcacatgccgaagctcaatccccgtcaaatg

SEQ ID NO: 53285 - DNA, 328 bp, Oryza sativa
cacgtaaaagaggagcttatattgcttatgcccttatacacactggtgatgcccgaactgagcagggatcgtccttctgcctagcactccctacatcttataaatgtcataatgtaacaatatagtattagacgtgatacattctagaactacaaatctgaatagaaagcatgtctaaattcatcgttacatgatgtgtgctatatacaactctctcggatctaaaatataagaacttagaattagatgagatattttctaatacaacatatttgaatagggtattatattttggaatggaggagaactagatttttatattttagtc

SEQ ID NO: 53286 - DNA, 461 bp, Oryza sativa
  unsure (1)..(461): unsure at all n locations
taagcttctgcctgcatggtgtttatactctcatggntacactcatttctagctagcttctgactaattttgctctagcttgcttttggagtagtcaatagtttaactgttctgttatgataatatatgttgtcttgtgagcactgaggtgcgtgtactttcatctgatagctgaattgcttttcttcagggcaaactttatctgcttcttcttggaaccactgcactcagtctggtatgcacctatacgcttcatttctttttaagctatattctgttctcactgtaaatgatactcagcaaacatttgaaggagcggctcatatgagagcatgatcaccaaacctttgtgacattgttgtggtcatgatgcgtntaccttatgtcgtgcgtgtgtaccattgcaggtaacaacaccccttctattcaaatgatacccgcggtggccacctcggtgttct

SEQ ID NO: 53287 - DNA, 383 bp, Oryza sativa
  unsure (1)..(383): unsure at all n locations
gctgtagtaacaccatgatgtccatgattgttttttttcnacnttgcaatcccataagacatgtcttaatctcttctgcttaagagcatgacagtattaattatgtgcatgccatctaatatggctttgtcatgcgactaaaatcggtgtgtgctacatgtatttatcattacagcattctgggtttgaggaccttactcatataacacctttgtatcctgttagaatcaaaagggatgacagcgtgctgggaaacggaggaatttgaatgttaagtgggttgagtacttagccanatgtggtgctcagcacataagataatagctattgacgatagaacacaacaaaaaacattaagtaagtagctgctttctgaattatat

SEQ ID NO: 53288 - DNA, 465 bp, Oryza sativa
  unsure (1)..(465): unsure at all n locations
gctgccaggaatggccggagttctgaagctgctgctcgtgcttgttcttctggtctcgncatcggacggctcggatgcgtcgaggcatctgaaaggagatgcgatcgaacggtcatgagcagccgcaggcgaagctgtcatgatgagagccgtgatggtgagcaaggcaaatgctgggcactctggctgcacctacgaccccaacaccaccattggacggcgctgccggccatgagaaagctagcccagacacagctcagagcaattaagcaatgattattactttgtctcgtaactattggtttgatttaatttgattctttcggtgctcatcactaaaagatgcaataaactgtgtacatactgcagatacatggtatggcaatagtgtgtgtgtgtgtgtgcaaaanacacagtactagtaggagtagtattntatatcaacagatcaactgtatgtgtaca

SEQ ID NO: 53289 - DNA, 389 bp, Oryza sativa
  unsure (1)..(389): unsure at all n locations
ctcgagcgaatcatagctttgtttctaccaagctcgagtagctaacgagcctcaaacgtcttttttccaactttgcagccaagattcgttctgggtggaccaatgattttcaagtagagtgaggatcagcccaactgatgtatagttggcactccaaatttgaccacagaaagcacgcaaaataagggaaaaaaaagctaaacgatatttgagaatttcgcaaaacttattttgttcgtaaacgctccaaaattctgattatttgccatcgattatggcacacgttgntatattatttcctggctatttggacacagaaacattatcaaatgacctcagtaccactcggttcatctatagctcagagtatggatggcgtcatgaccctg

SEQ ID NO: 53290 - DNA, 448 bp, Oryza sativa
  unsure (1)..(448): unsure at all n locations
cgatcaagaganataacgggatgtgtttcttcgtcgccacgccgntaaggtttgtggccgctggtttactcgtgggttttcagaatggggattttacggtgataggatgcagaagaacagggatactgttttcagagccctttggcccgtgggctatggacgcaatgagaacatcgcgtccgtgagaaggccggacgctctagatcggtggcgtccaattgttttaatgggacgctgcggaattacgttgtcctgcttacgaataaaaatccaatacctcagtgtttacataaaaaaatatattttttgttttgctcagattaccaaaaattgggaatnttcacatcagtatccatctgttgtgatgtagtacgtagaagaanaacagcatgttgtgattattccgagcatattgcaagcatgaaaccaactttttagtacctgaaat

SEQ ID NO: 53291 - DNA, 482 bp, Oryza sativa
  unsure (1)..(482): unsure at all n locations
tactcacgctacgggctgacttaccatcaccatgagttggccctgtttattcttactttttcttcaaacatttaacggtttcgtcacattgaactgtcttacacaaacaaacttccaactttttcgtcacatcgttccaatttctttaaactttcaatttttacgtggaactaaacacagccttggattattattacccctatggctgatgagaaattattaatcacgcctctccagatatgcagtattatggtgtctcacatttgggataacgtttgtattttatgggatggaaggagtagaccagtgtgatcgatctatgagaacctaagagaatagatgtagggagcttgtacaattattgccgatanttggctatatatcgatatgactgtcagttaactaattgtgtgaaatcaaagtgtggctttattattaatttgtgatgaataattggcatgatagataataaattagtattt

SEQ ID NO: 53292 - DNA, 362 bp, Oryza sativa
  unsure (1)..(362): unsure at all n locations
gctccttcttggagcaaacgttcgcatttggatccaagctattgttcttctttacctccaaaacttatttcctccgtgccgcttgtcaccgtcgccgtgcgtgccagctttgcctgtgagaggaagaagaagataaggagaagtggggctgacaagtgagccaccattttttatttttatctctgtcatttacacgtgggatccatatctggtntcactttctttgatggctgggttgccacgtcagtatacttggaccaaatcattctgtcacgtcattcaaaaaccgtttttaaaccattgaagaagcaattacaccgattttaagtagaagagtatataccgatttgcgtacagggagc

SEQ ID NO: 53293 - DNA, 469 bp, Oryza sativa
  unsure (1)..(469): unsure at all n locations
ctcggcaaaactggaaagaactcatgggcttgctatttctatggtgcagagaaatcatcgcacaattctatgccacagtttactttgagcccaacaaagaaaagactattcattggatgacagatggcatcatatactcagtgacatatgccaagtttgctgccattttggggtttccggctcgctctcgcaccaatcgtgtcaagattcatgatgagaagcccatggacacaaattctcttcacttcttgtaccaagatgtggactatgagttaggcaccatcaaaggtcttcttcccttctatgcctatctcaacaagctcttgcgcaaaactctcaatcccaaggaaggtgatgctagcaacgtccttgcctatacaagtaatttgctttacaagataaaggctcacccacagctctttgactcctttgacttcatctttgaagaaatccggcttatctncatgat

SEQ ID NO: 53294 - DNA, 424 bp, Oryza sativa
  unsure (1)..(424): unsure at all n locations
gtactatgagtttgttacggtaagtacaatagtcgagtctgatatatacttatagccaatacacatctggaggccatcttttatattaagccattaagacaatcaaaactataatcattaaatccaccgaaagaaatttgttttgggtaaaattattctttgtccatgaaagataatagaattcctcatttgtacatcattccctcaataatatggatccacatgtcagtgactcattgcgggcaaataatggatcgtgtgattttttaatagcaaataaggaatcatcttgtctttattaccctttcttttgccatccttatgcatcaaaaaaatatgttaaactaagagtcaatgtatccatttcacatcgggttgagggcaagtcccgaagtaccattctcngagctgactagtatgtatg

SEQ ID NO: 53295 - DNA, 398 bp, Oryza sativa
  unsure (1)..(398): unsure at all n locations
ctatgcgcacagggaagcggcgagcaggcacgtttggactggccaccgttggttggcttctgtgctcccaaccatttcaatttagtgcaagggggaatcaaacaacttagatgtgtataacttggaaattcaccagctgggtgacatattctgcacagattacctctcatcttgttataaacattgacgatagtttcaactagcanaataataacggagtaacattaaacacatgcacacgaatacatagtgatgtacatggaaaaaatctcatccgtgtgaaaaaggaaataaccaccggactgatggtgctcttaaccttccgctatatcacaatgagtacaatgaagtatctctaaacatctaagggcatacatatacaggttatcttaaactca

SEQ ID NO: 53296 - DNA, 476 bp, Oryza sativa
  unsure (1)..(476): unsure at all n locations
tatccatgagatagaaagaaagaaaagaatattttatttttgtaacccttggtaaataaattttcatttcttgaagcaagcattgtgaagaagataagaacaagatttagccacaaatttccaaggaaaaaaatatcttcttcatgctagagaatggatggaatctttttgttattttaacatgctaagtgagagacgacagtgagtagatgtgtggttctaaatcctcctccactgtggtgtggtgttgttgccttgcaaatcaattattggtggggaaaactggaaaaggttggagaaaaaacgaccacttatattgactgtttctcctgtttatgttctgaatatttttctgaagaaaaataaaggaagggtgtgtttttgtgtctagggggtatgcacaatngcgcatgctaattatgtagtagagcattttcttctgttaggcagacatttgttggaaactatgtacttat

SEQ ID NO: 53297 - DNA, 397 bp, Oryza sativa
tcagaagtcgctctactacttatccacacatggacgacttatgtgagtctcgatggcgtataccacctctaacctatcttaactgctgaggatagcggcaatactggtgacaattacctaaacaccacgactaagctattaatatctactttagtgttcataactcaccaaagcaatcactatattttagttcattatagagaacaataagtccgtatgctacttaggaactaaccaagagataattctcacaagatggatctaaattactcatgagaaacattatattggattcagatgtataaccgaattaacaatatacgagaaaataccgacacttcggaattcttccgattcttgtactctactctcttgctattctaggtacaatgtagac

SEQ ID NO: 53298 - DNA, 459 bp, Oryza sativa
  unsure (1)..(459): unsure at all n locations
taagcttccccgacagtacttcttgcccggtaagaacagctcgcaattttttttgtgaattcaacatgtgcaaaaatcagcgattttacaagggttttcattcaaaagagaacagattttaagacatgatttctcacccaaaataaacagttttaactagaatatatngtggttttcgatgtgtgaggtgaggctttgtacagcttaaactgaaattaccagctgacattctgtatcagtctgtgttccataatcggaagagagagacccacccagagtttgcagctggcagcatatttaccctgttttaattaaggggaatcaaacaagaaaaatatagggaattttagtaaacaatttaattggatcattgagtggcatactggcatgatttcgggacaatcacattatgaggtttggtctgcattactgaatttcttctgtccctgcattgctgat

SEQ ID NO: 53299 - DNA, 305 bp, Oryza sativa
aaaaaaatcggaagtgaagagaatgaaaaaaaaacgaatggaagagaggaacgttgttgttggtgctcgcttgtttgtgttattctcgcgctattttgagcggctacgctagtgactagcctcgcgtctctaaaggagtttgcctaggaccagcacaataccatcgttgaatgattattcaacttgctttgattaatgcgggtctagctgtatcttgatattacttgcagccacctatagctccacaaattattatctactatatcacaggatcgcgcttgttgtcggctccggtactactaacc

SEQ ID NO: 53300 - DNA, 421 bp, Oryza sativa
  unsure (1)..(421): unsure at all n locations
aacatagntgtccaatggaacaagaatatctgtggggaagacaacaaaaaaaaagctaagacaaagctgcaaaagtctattaaatttaaatgcaaaatgcacttttctcaaggtagcatttgctaataacagggcctcaaacaatttgcaaaaatggaagatagatggacatcttccactcagataaatggagaaattcattcaagacgacagcccaagtagagcaaattatcagctgcacaaggcacacaaactactagattatattagtgcagcaggaatattcccaggagatgaaaaaagcaaaacctattctggagcaagctactgcaaaacctttgtattcatatgtcaatatatntagattagttgaccagatactgcanaatctttgtatttctgagactngaacatgataagc

SEQ ID NO: 53301 - DNA, 443 bp, Oryza sativa
  unsure (1)..(443): unsure at all n locations
gagctgcagcttgaggctatagtaaaccttgatttctgtcttcttacctggcgcgccactatcgacgggtgatacccgtagaccggatatagagggtattgtggtacgctggtacaaggatctacgtagtacgacatcgagcaatcaaaagacaagaattatactggttcaggccccttgttaggtaatagccctaatccagttgatatggaattatatgttgaaaaacacaggttacaaaggaaaagatggaactcgcggggtttggcgagaatatagtcgagttgattcgactagctctcgtcgacttggctcctcgcaggctccggcttcctaggctgtatgggttgtgttggctctgagattcgatgatctttgccctccctgtggggtgccttttatatcgcnggtttggtcctttccgagtaggactcgaacatgtc

SEQ ID NO: 53302 - DNA, 458 bp, Oryza sativa
  unsure (1)..(458): unsure at all n locations
actaagctaggacatgcgacgaagaggataattgaccacattctttctcgatttggccacctcttttctgttcctggcattattcattgctcaagcaattctgttagcaacgaaagccaaatcctcctcctcgatttgttcgagttgatcatcggatgtggcattaaaaacagcaagaaaagaagatttagatgaagaagcatcaacatccaaagaggaagaagaagaaaccaaagcactcgatttagaatcaacttttcgagaaagaacattcatctcatgtgttttcaattntgtataaagtgaatccaaagtcaaagtagacatgttaacagactcctgaatagatgtaactttcatctcccaaatagacatgtcaagaccattcaaaagtggcgagaaatctcagattgtggataattagcatcataagaagaatcaacagatctaagatcact

SEQ ID NO: 53303 - DNA, 261 bp, Oryza sativa
  unsure (1)..(261): unsure at all n locations
aagcttgggaagataccccagccacaaagggaacagaacgaggatgtgattggtactaacaccgaggagatccagacttttgcacgttgatagtggtctgggcagcctcccttcaaaaagggtgctggtcaaatctataggctcaagcttacatccttctgtaatgcccttaggcaacatnccgctgaagttattccccctcaaaatcacgacccttaagcttctgccttctaccagacaagatggaacgaaaccactaaa

SEQ ID NO: 53304 - DNA, 435 bp, Oryza sativa
  unsure (1)..(435): unsure at all n locations
ttcagctggcgtgtttgcgtagaacgactgacaatgaacaccttntgaatatggattggctggctcattntagaataggaactaccttgtctttagttctgggcttgtttggtttagtaccctaccaatatattggtagtgcncnactccangcaagccctggccctacgactaggttggtccggtacaaatgtgagccagcgtctccctattgatgggagttgagagcccaagtgtacatcacggtgaagcacactgtataagtgtgcccgagtgagtataggcaccaccaaatatctggctgtaaaccaagtcattacatgtactagttaaactaccaatacattcgtatggcaacattttggattaaaccaaaacgtgcctctgctgtcgggcttgtttttctgtccccggttgtactttaaactgggctta

SEQ ID NO: 53305 - DNA, 320 bp, Oryza sativa
  unsure (1)..(320): unsure at all n locations
atacaagagcatatacagtagcatgcacgcatatntgntcttgttttctaatcaaactgatttgcttgttcgcatgtattcacatattcaacgaggacacaactaaagctgggctcaatttgaccgatgtgcagcgccggctgcttgccatctttctttgccgaagatgatcttctactttcattgccggtcgtcttcgtcatcgntaattagtgccctagccttcgtggctgacctattccatcgccaatatattgatgggtgtccacgtcttcaccattggcccgctttcgacgtcgccgactggtgttntgcctata

SEQ ID NO: 53306 - DNA, 490 bp, Oryza sativa
  unsure (1)..(490): unsure at all n locations
ttctaacatattattcatttttcttagnngtccaaatattaacttcgtgtggaatgggtttatcatacatnnntgcatacaaagaagaataagtctttgctttaattatctannaaataatttggtgccaagaataaaanntcatggaaaaattcattgtagggttctaacttcaacaaatacccatatcactgtannattttggtacacatnntaataactaagatntgagtacctcgaatataatcagtcanaaccagtcaaatattagattaattataattctcaattggctaaaaccacaccttgtctaanagtacatttacctgcgtggaagtgtataaggaaaataatttattcaaatactacggtaattatcatgaataaatatattttttttcagaatttatcttctctgttagggtctctaaaaatcaaactagtatccaagggcccaatttctctaattctggagtatctatcatatttt

SEQ ID NO: 53307 - DNA, 437 bp, Oryza sativa
  unsure (1)..(437): unsure at all n locations
aaacagaacaagcttttaatagattgggtgagaattcttatctatattatgtccacctcttcccttcttttggtgttccttgttgggtgtagttacttatgtatttatatcgcatgcgacctatgagcgttcattaaatctggttcagtatacctatagaaacagacactgtaacaaaggaaaatagcttaacatgctagcatgatgtacaaaatttagtatcagtaacaatggataaatcanggccctttaacccagttgatatctttaatcagatataaacatcagtgggtttagatttgacatcttactggacattggatagtactgattcagtaccgatactagcattatactaaaaaaacaagttatatgtggacaaatcctacaattcttgcatanttttcagccgacttcactgatcttatggatgaaag

SEQ ID NO: 53308 - DNA, 449 bp, Oryza sativa
  unsure (1)..(449): unsure at all n locations
gccgacggcatggtgagcttggcagcaacacgacatgtgtggttgatgngaggagttctcggnggcagcgtggagttctcggggacagcactgacgagttctcggcggcggcagggaggaggagctctcgttggatccgtacgctggctcgctggatccgaacgctggcgactcatcggactcctcggaggcattggcggcgcacgacgacgatcttcgaggaggtgatgtctctccggtggcacagaggagctcgccggatgctcaaatctggtaggtccctctctcctcctcctttgagctacttgctgaggccactgattcacccaatccatgacctanaccgtggctctgagttgaggcgcggttcggccattggttactctaccagctcttncgacacactgtganaccactcttcccctncacggtggcatncgagtctacgt

SEQ ID NO: 53309 - DNA, 226 bp, Oryza sativa
acactgccagcgctccactggaggagcctctgatatcgatgcttccccggcagacggagaacggcttctcctactgggaacaaagcaccatcacctctcccaacgacatcgttgagttcggcgagactccatggaaagattctggctaggaatagtacctcatgttgatgaggataactgtctaggaccagatgctcctcctcatggaacacaccatcctatgcat

SEQ ID NO: 53310 - DNA, 337 bp, Oryza sativa
gcttatgagagcgcacaagcaagctatatctcttggagcgcctgctgtcaataaaacttttggtgccacccaacactggtgatgcgctctctagtgctcttcatcttgttaaatggcggcgataccttgcgatagcttctctgatcatccagcctccgcggacctggatggcagcaccgcgggacgtagaccaacccctcgggatggggcggcttttttaccaagatgcccgcttgcctcaacccacttttggcacaggcggcatggagagcgcaaagcaggcttggttggcaccaggaggacatccccgcgctcgcgacgaaagccagcttggcga

SEQ ID NO: 53311 - DNA, 402 bp, Oryza sativa
  unsure (1)..(402): unsure at all n locations
gaccacggcagctgttttcttcgtctcggagagctgccgtgcagcgcacgctacccgccgtctatataaagaggcacctctcgtgtcctctctcctctgaacccttcgttcccatcacaaaccacgcccgcctcgatcgatcgatcgaaagctcgagatggccggcgatgacgccgatcgcaaccgccccggccgtggtcgagagtctcagcccggcggcgccacctcgtcgtcgtccccgccgggctccaacttcgatggcctcgccgcgaccacgaccggcggcgcctccaccggcgacagcagcaggatcgcaagccacctcgtcgagttggaggacaccggccggaggcggagcgccgtcttcgntcccagccgccacgaccccatctacgtccccat

SEQ ID NO: 53312 - DNA, 468 bp, Oryza sativa
  unsure (1)..(468): unsure at all n locations
ntagattagattactactgctactacttgaattatgactttttaaaatttaaaaaagaagaagaagaagaagaagaagaaatcgatcacatagtacccatgaaaaaaaaattatggcatggttagtgacacagacaagttacaccaaaagatgataaaagacaaaccaattagacatgactacatgagtgattgaaaaaagcaggttttgtacatatgcaatgacgagaagccgagtgatactgatggatcagaacctcttgattcccaaattcggcagaggggaacaccgaaacagtgaagtatagaacccaatcaaagattaaaccgaacctgctcagctcaagagctccccaagcacaacagctcaccaaagacgattnttaagtgcaagaaacgagagaaaaggtggtgtcttcccccataattcacagatcaaccaanacaagcagcgcgaacaccactcctg

SEQ ID NO: 53313 - DNA, 351 bp, Oryza sativa
ggtccacacctcaaagctatgatatttgagagtatgccgaagcagagatttttctaacttcagcagacagaacggaatgagaatgatctgtaaccctgcataatggaattctgtctgcaaaagaactggcaaaagatggcttacatattcttcatactttggcagagctagggggtataatgcttggaagtcttccctgctctgcggtgatgctccgtcacacatctcagatagagatgtatcaaatcgaaagagtcttgcgagcccgatttcagtcatactgcagacttatatggcaattcaatagtgtccagttaaacaagaccgcacatttctttacttcatttagta

SEQ ID NO: 53314 - DNA, 413 bp, Oryza sativa
  unsure (1)..(413): unsure at all n locations
tcatattgccttaagaaagataactctgcatcttatttttgcttaaaagtcaccaccttataaacctataagaacatgtgagggtaaaattctaagtcaataaatttaagcccgatgaaaggtcctaaaaagtgacgagatggccctgtatttggtagttttttcccccaaattntagattattgagtttatctttacaaagaggatctggttttacttgagtttcctctcagctaagaagggttggagaagatctacatagctttatgggtgattgcttggtaaatgtactggttgtataaccacacatatgttgaaatgtgtaaacgtgtgcctctacttagaactgtgtcatggtatattcactagtcgtcaaccgtgctctgcatatgtacgttattgttgtattaatt

SEQ ID NO: 53315 - DNA, 270 bp, Oryza sativa
tatgatcactgcttaatggacaccacaataaatatgtatgttggtgtacgacaccggaagcattatttataatatttaagaaaagcgtggagaataaacgcataatttgcctctgccgggtctttcttcacctagccacggcacatgtaggccggtgcaagctcaggtgctcactgacatgtggaggctgcagaggcagtggctattatgaggaacatgttggaggctctagaagtctggagggggctaagattgagcttcgatgctcac

SEQ ID NO: 53316 - DNA, 454 bp, Oryza sativa
  unsure (1)..(454): unsure at all n locations
actaagctcgtgtagtagtaggagtagatagctcttcacttccaaatcttttataagacctgcaagggcagcagcatgcaggagaatgagaagcatgagccaaattattggtgacatgaacactgctgctgatgctgctgctcagagacaaagccatggcagggcagcagattgttccttccttccttccttccacaaaagcatatggtaaagattaaaaaaattgagataagtagagtaaaggtaatctaatccactgtgcactaatcagttcttgcaattatcagttgtgcctgcccatccatatgccaaagccatatactactaggtttatagaatgaaagaaaagatctcctagctactcctatagtaaccacacgacatatactcctacatatgcaaagatatctaaagcatgcagtanaacaggatatatgttngatgaataattact

SEQ ID NO: 53317 - DNA, 475 bp, Oryza sativa
ctaagcctcactagttcttgcacaactgcgtactcactgatgcttgttttcttgttggcaatggcggatgcaaatcccggtggggcgtatccacaggcagctgatagggagggtgtcatctaacagccgcgtgggggcgaccgcggcggtgtacacagcggcgatcctcgagtacctgacagcggaggtcctggagctcgccggctacgccagccaggacctcaaggtgaagcgcatcaccccgcgccacctgcagctcgccatccgcggggacgaggagctcgacaccctcatctagggcaccatatccggcggcggcgtcatcccgcacattcacaagtccctcatcaacaagaccgccaatgagtatgagaggcagcggcggctatgtgttcttggaagttttctatgacctctctgctatgggattagtgagaaataaattcagttatctttcactagtagtcttaatcat

SEQ ID NO: 53318 - DNA, 430 bp, Oryza sativa
  unsure (1)..(430): unsure at all n locations
gcttgcctaatagntatatatttaaaacagttaattattttaacgcaagagtatcacatcaaaataattattgtaaatgttgtaatcagtcaaaaatgactaaattaaggggcttattcatcttgcacatatgcaagagaatttcattgttaaaagaatggaacaaattgtcttcttctggtaacaatttttgaaagattatttcatttcattgcttcaatatatgccagcaagctatgaacattatatccaagaaactcttttgcctaaacctcggtcgtgccaagaccaccatttggaaaaactcaagattagcattccatcttactctaatacggtctcgacacatgatcgaagaaaggatgcattgntgtctccctagaaccagttagcaaagaacacaaggtagatctgcattctagagcacaat

SEQ ID NO: 53319 - DNA, 485 bp, Oryza sativa
tatgtgactctttcacaatggcactacttaagtgccatatggtgttttatgccctaaaggagtacctaggctatcaaagggacaacttcaaccatgagggtcttgggtatgttcctccaccaaaaggaaaggtggacaagagtgtgatgatcaagaggccccaaggtcttagcaattttattaaggccaaaagtatccttcctaatgattatgcttcacattgttcttttgatgcatcttatgttcttaggaagaatgctagtggtcgtgttgttgctaagtatgtaggcccgaggggcaaaaatgtttccattaagagagttctttgggtgcctaaggcacttgtcactaacatgagaggacccaagcaagtgtgggtacctaaaactagaaattgatctctcgtaggaatctctctccggtggaagaagcttggtgattgatagtggatgcacaaatcacatgaccggagaagaatcaatgtt

SEQ ID NO: 53320 - DNA, 368 bp, Oryza sativa
tcacgacgcggccaggcccacgtcgcacaggtggaggaggaagagccggctctgctcctggcacactctagcatcgagctttctccagcggcaccggcctcatgggctttcctccaccttgatgagccgaaggtactcgtctccctcttgaatggctccagcaacgacaaggctgatgggtggtacctcgacaccggcgccacccatcacatgacctgtcgacgggagttctttaccgcagtcgactccaacgtccgaggcttcgtcaagattggggacgccttcggcattgagatcaagggtgtttggtccgtcaccttcaccgccaaatccggtgagcacaggctgctcaccggagtctactacat

SEQ ID NO: 53321 - DNA, 390 bp, Oryza sativa
  unsure (1)..(390): unsure at all n locations
ggaacttagatactcagcttcacctcgcgggaagagggggcgccacgtttcttattgtgtggagcgccacancgggcgccagcggcgggagagcgcggcggtgctcgcggcgtccttgacggtgaggcgggagacgatgttgcggaggatcgcgtcggggagggcgctgatgcggtcgacgccgtcagaggctgctgctgcgcaagcggcgtgggtgcgggcggcggcgatgggtacgggtgggccagggagcaacccgtagatgtgcgtcatcaagtacttggtgcactcctccagcttgcgcgggtcgtcgccgcggcggcgcgcttccgtcaccgtggcggtgtcaaggtagatgatcggcgcaccttccgccatggattccgacga

SEQ ID NO: 53322 - DNA, 362 bp, Oryza sativa
  unsure (1)..(362): unsure at all n locations
atgagtcattcgcaactattattttctccacatatcacacaacctcatattcagcccccgatacatgtgtatatgtgtatacaagtgtgcaaaatgatcaataacagtgtttctttatggggtcaaaacggcaatgtttcccacacatggtatcaagatgtaaatagacacccaaaaaaaaaagaaaaagggtatgcaaagtgtatgttgcctcagtctgtatggtaccgaacaggccanaattatgggaattttttttaggaaaaatagtgtagtacttgctatctacagttggtaacataagcaagatatgctaccaacaaatgcatcgcatggtatcaattgatcaaaattatgctctc

SEQ ID NO: 53323 - DNA, 461 bp, Oryza sativa
  unsure (1)..(461): unsure at all n locations
aactaatgccagatactcaaggcccaactgccctttgttctccataaatagaagatntcactgtgtgtagttttgattatttgattattagtgaaataatttactgtttttcatgtgtcaactcgtcgattcgcaggacacggagaaactctttactgacaatatccataaataattgttttttaatcaacgaagattaccacattaatattcgggggcatgataaacaatggtttttcagcgtatttatcatcctattcagaataaacgtgtttttctaccttttgttttaaatgagaaaatggatgttctggcatgaatattcgtaattacttattcaaattcttcatactgatcattttatactagaatcaagctctctctaggaatagtacgcatttggttttgtttntcatggtttctagctacctggttttcatgtgtttatcctcttcccccta

SEQ ID NO: 53324 - DNA, 451 bp, Oryza sativa
  unsure (1)..(451): unsure at all n locations
ctactactaatattctactagcgcccatatctcttcccctctgccatagctagctttatgatgcatatgcacactcgattattttaacaagaagaaacatagtttnggtcgttgatgtaaaaataaaaaaagaagtgcattattttatcacatagagattatgatattctataggttaatcatgaaaatactaaacaatttagtgtgttcatagctttaagagaccattggcatatagttggaaatagtactatggcatatagttggaaatagtactaattaaaaggagcacatagaagggtgaatcagatcaaagttgtaacaaaaccgcggctgcatcaggcaacgatcaaaaacacctacctggaggccttgggagcacatagaaattaatggttggttntgcccacaaacaatgcacaccggtatgctgataattatgccactatta

SEQ ID NO: 53325 - DNA, 436 bp, Oryza sativa
ttcatcttggaaccatcagtgaactatatttgttcttcatctatggccgattgaacctgtcgtcgaaacacattgcaatcattagtagaatgagaatgagaatcatgacatcttctataagctcgacgcttcaattcttcttgagatggtatgatacgtgtcaacgtttgatgtcacgaattccggatttgcatagtatggggatcgctggtactatgatatacgcgagattgaggtataatagataaacagggattgttatacacgttcgggcgcctgaattgcatgtgataaccctacaatctgttggccgaagccgatcgttgctcttattcaccataatcacaccaggacaattattgtggagcctatctatctgttgtcgattggcaatgtgaagagctaactcgtagtccacaacatggtagtttttctc

SEQ ID NO: 53326 - DNA, 366 bp, Oryza sativa
agtcctctctctctgttatacttattctctccgctctccacccatcacttgctgcacctcctccacttccgctcctcctcctcctgctctcttcttctgtggcggacgggatcaggagcggccgacaacaggcgagagcaggagcgaccggcaaccacttctgccggtggcaggcaggagcgggagtggcgagctcgggagcggccgacgaccactttctctggcggtggaccacagagggagcgagagtggtggggagctctgcggcgggcatgagcgagagcgcgggagggggggtgggagccccgcggcagccggtttgataccgtggagcggatggtggcgatggatctagcagtgatgagc

SEQ ID NO: 53327 - DNA, 381 bp, Oryza sativa
agcttctcggtgtggcgggcgtcgtctatgtattaaactttgtagctgtcaccgctttcagagccccttctgtccctcatccttccggggtcccctcctgtgtatacagtcgtaaatgcgagttaagcaacactgcatacgaatgacaaatctctctacaaaggacgcagaattgcaaaaaggacatcggtgcacataatcgataaatcaccttcttgtgtcacgggaagcgtgtcgagctgggactggtcgaaagccggccgctccagcaacgcgccgccgctgctggctgtgcggacggtcgccaccgccaccgcctttctccgccggtgggtgactctttggtccacagagacgctcccggagaccggagcggcggat

SEQ ID NO: 53328 - DNA, 422 bp, Oryza sativa
  unsure (1)..(422): unsure at all n locations
actaagctgcttcttatccgatacaagctgaaagctctgtttgtgttttgtctcatcgccatcagccttatgaagaccagctcacatgcctacgtggctatctaaattagttattcctgagtttaaaccagtgataaagcaagcgtcttcttgtttttgctaatgagaggagtgtttatttgggtttgcagctgtcattttggctaggtcctgcaactacttttgcaccatcgccatgcatgattcanctgagtattagggtgtggacgccattgctgctttttttgtggcgagttgagtaaggcgaaagagagagcanacaaaaggtgaagccttggggtggtggattcttgcttgcttcacgcctacctttctgcagccttaagcttggaggtcgtagtggagtgtgataatgcgtatct

SEQ ID NO: 53329 - DNA, 392 bp, Oryza sativa
  unsure (1)..(392): unsure at all n locations
atgcaagcttttatggcgggttgcattctcgggatttatgcttacatctttatggcactctaatcatgtctttgtaaattgtcgagttatcatatatactatataatctagaccgatcttgctatctaacatcatcggctagcctctatcatcgaaaacagccaataggattagatactgataattgaattaaattatatagtatatctaccatctcaagaagactctcaatgacttgtttagntcttatgtttctctttatacttaatgctgtatcacgtaagttaatttgatctactaagtaatatctagaaccataatattgttaacgggggaaattggtagcccctataagaatatcacgtcgcaatagtcgattcctgctatatcgt

SEQ ID NO: 53330 - DNA, 404 bp, Oryza sativa
  unsure (1)..(404): unsure at all n locations
ttggcgatcccacattgatggtggcagcgctctatatatttcttntgccaagactttggacgagatgcagatccctcgtactgagctgaagccgagtattgcgccctttcatggagtcattccacggctgtcttctactccactcggccatatcactctgccggtcaccttcggcactcgggagaactttcgcacaaagaatatttgcttcaaagttgctgattntgagatggcgtatgacgctatactcggacgcccggcattagccaaattcatggcagtcccacactacacctacatgatgattaagatgccaggacctcaaggagtcatatctntgcgaagcgacatcaaacaaggcatcacctgcgacaaagaaagctgtgagatgggccaaactcatg

SEQ ID NO: 53331 - DNA, 384 bp, Oryza sativa
  unsure (1)..(384): unsure at all n locations
taacacctcccttggagaatgtcacatcaacataatgaactgctctcaataatgattccttcagaacctccatgtggaatgatcgatctagaatagcaggtaaagcccaacatgacctgcattctttcagtacagaacaacttatattaccctgaaaacaaagtttgcatcnctctagatgccatccaaaaattcattagcttaagatcaaggaaacaaaaatttcatttttttcgttactacaaaattcgctacttgatatatcataataatctaagcctgcctgctccaacatgttaaatgatgtaaaaccttgtcatacaaacggcagaattagacatggaaaacactaatggagcaagctagcaacatggtactcacttt

SEQ ID NO: 53332 - DNA, 422 bp, Oryza sativa
ctttgggttacgctctagagacagctgagtctcatgttttctggttccatcaaaatcaatggataagacaccatatgagatatggacagggaagcgtcccagtttgtctttcctaaagatttggggctgtgaggtttatgtaaaacgtttgcaatcggacaaactcacacctaaatctaaatcagataaatgctcctttgtggggtatcctaatgaaacgaaaggatattattcttataatcgggaagagggcaaagtgtttgtcgcccgacacggtgttttcttggaaaaaaagtttatttcaagaaaggatagtgggagcatggtgcgacttgaagaaatttatgaaacaccggaaaacgcttcaacgtccacacaaccacaacaagctgagcaagatgttgttcaacaaggtgaacaag

SEQ ID NO: 53333 - DNA, 323 bp, Oryza sativa
acactggagatgctagagagtgttggagagacgaacaggaaaatcggcatgctcgagttgggacatgagagaaattaagtggaattgcaagatctgaattggttccgttgtgttccgcacttgtaagatttatgtgatcgtgtcacatggattgatggacgttgagtgctatgaggacagttgcgtgaatgctgatgacaagtgatttacttcaagagaagggagaaatggtttgcaattcgttctgctgttgctgatattctagttatcagctattgtgtcaacttgatatatctggcccaagagcagtatggactgtgtgc

SEQ ID NO: 53334 - DNA, 113 bp, Oryza sativa
ttctcctcctcctcctacacctccgcgaggcagggcccctccggcggcgccgctggttcgctggcgccgaggcggtcgccggaatatttctttccctcctctttctacgacag

SEQ ID NO: 53335 - DNA, 403 bp, Oryza sativa
atttgccacgacgatggagagatggtttatttttaatcttgcgattcaaatggagatggcatataagccagttgttccccagacatctcagcccaagtaatgcttgtacacttttcattcgattcatctcaaacttttctctgtattgtttgattgcttcattttcctgccatgatatgccattggtttttaatagtataccgacgaatggccatgtgtagaagttaatttacatgcacatgttacttatcagtggcttccacatggattctaacaaatctatctatttatctatctataaaaaggaatataaaaaggagcctccacgttcgctctcacggcctagaaattctcatattaatcggagaacaagaaaaacagagtccatatggaaataccattt

SEQ ID NO: 53336 - DNA, 337 bp, Oryza sativa
  unsure (1)..(337): unsure at all n locations
gctgcagctgaccgaggagaggacaggaatttttccgccattttttatcatatcgccttcgntcgcgtcggtggctctcaagatcccacgaactgcatttcaccgtggcctcaaggtaccaatcgattcctcaaataatcaaaaacacctgcatgatcagtgaccaagagatggatgatctctgaaatcaaaattgtttgatccgtctataacgccaggaaccggatgtacgcgatgctggactcggtgatcgccaggaggagggacggcggcgacgtccgcaacgactttctccagacgctgctgcggaagcacgccaaggacggcaccgccgccg

SEQ ID NO: 53337 - DNA, 449 bp, Oryza sativa
tgtacgcaacaattaaacaatcttccttccaagctcgttaccttattgattgagaactactgctactgttccattagctaattaatacgcatgttaagtgcaccctattagctaattaactgtgcattacccactcgcagacaacacattttatttcctttcgggcgagtaaaacatgccgcgtgtttgtgtgtgttaccattaattatgtagctaaatccacaggccaacaattttctgcttgtcttcatctggtctttaatttgaccttttgttcatatttcaatataggttcacaacttcacatatacgactgtcgtctgattcgtacgtttaaggtcaggccgggtcctaaaagtcatcatctctagaaggaatatgtttttctaaaacaattaatttggttgctctgttttatgtaattgtttcgctcgataaaaaaatatgtc

SEQ ID NO: 53338 - DNA, 434 bp, Oryza sativa
actttccctgatatttactaagcatgtcccttttgtgttaataaagggaactgtgaaactgtagttgatggtgcatgtatatatacgtgtatatgttttgcaactgtgatatattttacaattaatttatattttaattttttttaaaataaacattttatattttgcattttgagaactagtaatattgtcgtttgaaacatagtttttcaaataccaaaacggctaaaagcagtaccaccaccaaatcgagattatcaaaatctactgtaattccaaattcatgaactctaactacaaggcaggtaaaatacagcatgaattcaatttcaaccacgacatatattggatatcaaaatagttacaaaactttctgtacacggtcgggttacatctttagccaagaaaaacacaaaacctataagtcctgatat

SEQ ID NO: 53339 - DNA, 263 bp, Oryza sativa
  unsure (1)..(263): unsure at all n locations
gatggttcttatttgctactaaccatggcaggaatgcgcatggagaaaccagatggtcatgctcaacgtcaacatctttaccatcaacgaaatatagcgacttcttcacgcatcacatatgaggtacatgatagtgatcttgccagggtagaatctaaattgcctggttttgatggtaagtatgattccgccgcttatgttaattgggagctagcagtagaaaaacaatttgatgagtatgattnttctaatgctcaaatgat

SEQ ID NO: 53340 - DNA, 249 bp, Oryza sativa
  unsure (1)..(249): unsure at all n locations
gagcacctgtgaagatggagccgtangcccgctattccgctgctggttatttttgattgtcaggccttaagtgcctttgtaataatgtaaatattatcgagataataaagaggtgtcttttatatcatgtttgggtggtgtaccccggcttttcctgggacggggattaatacactatcgttcgggaaaaggcaattttcccggtcgcgacatcgacccncgacttcgtccatcttcatccgtgtactt

SEQ ID NO: 53341 - DNA, 453 bp, Oryza sativa
  unsure (1)..(453): unsure at all n locations
ntnttctcttcaaggattggatagccgctggtgaacaataacaatttcattaacttaaatattagcacagctatgtatcacttcagtccagattaaaacggttatacatcaatccagttcagatcaaaagaaagcaaaaaatatataatacaacttgcactatggagataagccacacctcttttattctttgcttttgagaactccttagccctctccagttctgcggctgcctttttctctaagactttctccttcttctccagcatgtcaagggtctaaatacacataaagtaagatttcagttccaatatatttgcaagtgacttgggacatgtgcattattgagtaacaaagtaataattgaattattcaggcagaccaaataagactcagacaatgcgcatagcacaagagaatcaaggctaagatcatagaatggagaggaataag

SEQ ID NO: 53342 - DNA, 404 bp, Oryza sativa
  unsure (1)..(404): unsure at all n locations
cttttctccagaatattaaaacgtaatattttctacatgtttnggaaaaatatgttttcctaataaagaactattctacttaggccccgttcgatctcttagttttcagcgcacgtaaaatgagaaagatcattagcacataattaattaagtattaattattataaaattaaaaatggatttatttgaatttttttgaacaactttataattatttttatcaaaaatgcgtcatttaatagtttgaaaagcgtgttaatagaaaatgagaaagttgtagtttggagttgagaaaaagaactgggccatattgattaaaccacatggatttcaacaattggctaagtttattttttgagatatatgattttaactgtataaccgagtaggctaaatcaacttta

SEQ ID NO: 53343 - DNA, 390 bp, Oryza sativa
  unsure (1)..(390): unsure at all n locations
ctgcagctgtcataaaaaagacctatgtttcacaggaagcgtcgatgaatntacagaaaatctgatggctgcagcctccttcctcctcatgctcttcctgattctccaactctttattctctaaattccaagtctactttctctaattccttgcctagaattctcatccccaatccctgttcccattctgctacttgtgaccccaagtattggagaaattgagctggagttgttggttttccccttgtgctggttgttgattgagtagaatgttgagggttcataagaagctagctactgagatgaatgtatcatttcttggtgcaactctatatggcgaactattaagaactaatcctaacactcgattctggcagagaatcttattat

SEQ ID NO: 53344 - DNA, 412 bp, Oryza sativa
  unsure (1)..(412): unsure at all n locations
tagaatactcccgcttcaccattgaattttgttacnttatccgatgccatggtgagcccttcttgtctttgccatcagcagcatcctcattcatatcgngctcctcttcatcactcccatggttctttgagtggtgtctgtggtgatggtgatgatgggcaatcttcccatgttgtcctaactgaactccatcagagatgttatcaggctctgtaaccctatccataggaatggtaaaattccctggtatctgaggctggttgaagccctgatttcctgagtttggaggatgcatttgcttggagataccatgcaaatctaaactcccatatgaaggtccctgtgtcatattaccaggtgggttgctgccttccattttccaaagcgatcaccaaacacttaacttcttgtg

SEQ ID NO: 53345 - DNA, 445 bp, Oryza sativa
ccccgaaccgtcataccaacgacacttattcttactgctggagtatccagtgacaatcatccgcgggccgccctctttaaccgtaacttcctcactaaccataaagctcatactcgcctccttttttcgagtgaaacttgttcaccttagatgaagatggcgaatattgcataatagccagtgcgagtattaatgtgcctgaccgcgcattttctctacggctttcactcccagcaccactatgccgccgatgataaatccaagaatcagatttaaaacagtcggtaatatcatcgccactactgcactatgctgcccggcgaaatgttcaatggcgtgatgcagcggcgcaattccatgtaccacaatcccaccgccgacgaggaacatcgccagcgtgccgacaatcgataacgctctcatcagccagggcgcgataatcaat

SEQ ID NO: 53346 - DNA, 430 bp, Oryza sativa
ctgcaagcttcacgagttccaacacgcatgacatctttctgtgcttcgactttttattcttcatacaacggcatctgacaatctgtcaccaacttactaaacttctcaaaatctctgtcggtgtcctttacatcttcaatgtcatgcaacattgtagatagacattgagtgtccaaatatatggtctctccacctaaaggagaaggtacgaacatgccttctcgagctgcggcggtgttctctgcatcctgatccaacaaatcttcagctgcgacatcaggcgcctcttgctctccatgcttggtgcagcaggtatatttcttcataaatccattcattatcaaatgagcatgcacttcatcgctatccacgatcatctgttcattcttacagtccctacatggacacaacatgtgcatgctcatcctac

SEQ ID NO: 53347 - DNA, 349 bp, Oryza sativa
  unsure (1)..(349): unsure at all n locations
acccagtctcgcagagcagcaagagcttgattgctacgcgggtcggtagaatctatggaccgaaggtcctttactgatattntaaaaattggaatccttaatcgaatgcaaaattatgcttcgcgactctgtactcataatccaaatctaatttgttttttggatgcaattttaattagtcttcgggtacaaatcgccagaatgccgccatagcatgcatccatacagcatgtgctagagcgacacgtgggagaatgagaacncaatcgtagctcaatcaagggttctttacatactttgagtngcatcaaccctactcttgtctagactctaaaaactaatctggaat

SEQ ID NO: 53348 - DNA, 459 bp, Oryza sativa
  unsure (1)..(459): unsure at all n locations
actcagctatctcctgaaagacctcaatcaaagcagaaagcttatctattctcccatcagattgcagggatttccaactattctcagcggtagccccatcctcttccccggcctcccctggcccggcctcttccactccctctaccaccacgggataacccttcaaaagctctgttcacaagttgattccgggctgctccctctccccgccccttcttgctcgcaggggtgttcccatttgtagcaggctgggacctcttccctctaaaagatccacaaagcagacttaactataatgaaatgcaaagtctgagggggaaatggaatattaggtaatagaaatctaaccctggtgttgtaggtgctggtttctttggctgctccatccatgagagagtgattntcttgtcaccaataaataaaggggatttcgcacgcaacggctganatgaacattca

SEQ ID NO: 53349 - DNA, 82 bp, Oryza sativa
  unsure (1)..(82): unsure at all n locations
tgattttcaaggaacttatntttttactggctccctttcctccctatgctcccccggcgcaagcccaccacgctttgcgcct

SEQ ID NO: 53350 - DNA, 449 bp, Oryza sativa
  unsure (1)..(449): unsure at all n locations
cttgctaagcaattatatatataacagttagctgaacctactttttttaaggctcaagctaatcaatttattacccaaggtatcaaggaatacgatattcaatgcaaattggccataacaaaggaattggttcacaccacccggtgacattcgaaaataaatgcacagttgaaataaatagagaatttaaatataggatcaacatgctcaaaggattgtgtttaggatctgtgtgacttgccttgcaataatcggtcttcaattaatcttcttgatcactttcgacgcactcacgaaccttcgcaacgacggaaacgacaagctaacacgcataacgaagaaaaagactaatcaaaaccaaataaacagtacatataaagtaaacaaacatgtaaatcataatcttagatgaagtatgagactngaacggcctcattctgacttcacat

SEQ ID NO: 53351 - DNA, 463 bp, Oryza sativa
  unsure (1)..(463): unsure at all n locations
tatcttaacatgtgaatatgtcacattatcatccactaataattattatatctaaacattatgtaagcatgctatattatctataatcttataattttaaaattttagagatttaaaatacaagtatgttaaaacatcccacataattcacataatattttaatatatctattcatcattttctataatatcccatatacctatatagttcatgctgacttagttaatgttatttctcttctctcattaagtcatattacatcaattgcttttagtccttagatgattaatctatggcttaaattatctctcttatttttctctcgctaagccatattatctcatatttttagcctttagatgtatgggctaaattatcgcctttcttttgttctctcgtaaagcaacatcattttacntttacatttaaatcatcattctatataatatctacatttaataa

SEQ ID NO: 53352 - DNA, 341 bp, Oryza sativa
actactaccagggaaaatatgtacactatttctctcctgaataaaaatttcacctcaaattttcatcttctaattctatcaagcttacaaaatggctaattttgattttaccttgcacaatttgatcaatgttttggttttaagccttttgacttataacttgtttacctatagctttgatatgtgaatgttgatcaggatcgcaagaaatataaattgggagaagccaaaacatttcactatcttaatcaatctaattgtattgaacttgatgggttggatgactccaaagaatacacggataccacaagggctatgagtattgtgggtattagttctga

SEQ ID NO: 53353 - DNA, 424 bp, Oryza sativa
  unsure (1)..(424): unsure at all n locations
tgtgcggactcgactcctcttgtttgaaccttacctagatccatcgcagtggccaagttatgatggagagttcttcgtgcccgacttgtcgttaaagaacaacacacgaggaagaagaaggacaagaaggttcaagaacgatatggacaaagcatacaaaggctcagccaaccgacggtcacaaaagccgaacaatacaaattcagagccggtcatgcaaaatagatgctcgctatgccacgaactaggccataagaaaactaggtgcccgaagcgagacaagtctaaggatcgaccgaaaaagcgccgtacgacagggggaggtggtgagggtagcacacangtgggattggatgacattcattngctaagntcatattggtgcttcaatgtttactttctgttgtcctcctttcccgtctca

SEQ ID NO: 53354 - DNA, 375 bp, Oryza sativa
  unsure (1)..(375): unsure at all n locations
gactttataagagccgttcttccagccaccatcatcatctttccttgccataccacattaagattatacatatgtacatattttcatacgaaaaatatacacattttagttagaaattctgtaatcaacaaatgattttcttgtgtgtgtgtgtgtctttgcttgcctgcatggctgcagagagagagagagagagaactgaggagagggggcaactgtaaggtatgaacaacaacaaactggccttgcatgctggcattgctcttannattgggcattggctctagctacagaggatgatncgatgaatccaacagttcagaggatgcatgcgtttgcatatggtggttctctcgatttgatagaatataccgg

SEQ ID NO: 53355 - DNA, 384 bp, Oryza sativa
  unsure (1)..(384): unsure at all n locations
agctnggtcaatcttgaagaagttngacttattacaaacccaaaacatgttataatacggaacgggatggagtagtaacatacatagtggatagcaaagcttgtttccagtataagctgtaacaattcaaccacggatcactgagatgctagcacgtctgactagttaggtaacaggttgagttgttcactacaaatacaatataccccaactaacagtacactgaatctgataaatacagagtacaacagttggacagaaataagtcaattcatataacagaacataacctggataaacaaatattctaccttggttttgacacggcatcagtgccatcagatcatatgctaaaaccctctcttcattctgatctgggctggg

SEQ ID NO: 53356 - DNA, 450 bp, Oryza sativa
  unsure (1)..(450): unsure at all n locations
ntagagttccagtcttagagtctgtttcttgtttattattaatacctatacatgccgatgatgatgatgacggatgaaaatattcccggcatccttacgtattttttagttaggtatataggtatagatatagatataaagatataaatatagacgtacctatcggctaaatttaaataagtattcgctcatggtgcatccacgtcgcccggacggattgtccgtattttagcagaaaagtattgatactttacaataatcagggtaaggtaagctcatttagatcaagcttggtgtttttttttatattggtcccttcagatctttggatatactatacagaggagaagaaatcacaaaaattagactgtgctctaaaattttaaagatgactggtgctnttgcaaaatatatggcctcaccggctggttgacttattcgattatcatg

SEQ ID NO: 53357 - DNA, 237 bp, Oryza sativa
aacccagaagggggcggggccaacccaggcaaaacagcaagcgccagggccccaaaacgggaaaaggagcaacccggcaggcacgaagccaacgcccgggaggcaaagcacaacaacacaaccgaacaggcccacgacaaccaaggaactggaacaagcggacgcagaaaggaccaggggccccgggaaactccccaggcagagaggaccggtagaaaccaagccacagagcaaccc

SEQ ID NO: 53358 - DNA, 402 bp, Oryza sativa
  unsure (1)..(402): unsure at all n locations
tcttaagcaccgcggctgcagctgttttagagaaaaattgattatctattagaggntcttttggtgggaaaggctatttagataatggcctaattagactatctttgctgctgccttgttcaagttttagtgatagtaataaagctttcgctgtctcatctcattctgctcgtagtgataattctttgtggcataatcgtctttgtcatgttaattacaaatatatatctcgtatgatgtcactagatttaattcccaagcatgacacacgaggtataaagtgtgaaatctgtgtgcaagctaaacaacctcgtaaaccttttaaatctatcgatagagacagctctatgcttgaattagtgccctctgatatatgtgagaagaatggaattttgactaaag

SEQ ID NO: 53359 - DNA, 228 bp, Oryza sativa
atggacaagcaacctgaggtctccttaaataatgcccacacgttcgtcgtgctttctaaattgtataatattgcacggcacctcgtggttgcctgcctgtcactgaaagtacttgaacacttgatgtgctaactgcacaaatatctttgagctcgcttaccacaacgggactccagacatagcatcacctgccatttcttgtggagcttatttgtatgcgctattgca

SEQ ID NO: 53360 - DNA, 256 bp, Oryza sativa
  unsure (1)..(256): unsure at all n locations
agcttgattattagatagagggttttanatatattntggtcggcttattctgcaagaacaatttatctatcaatctctatctatatctatctataactaaatctatatcatcccaaaataaatccagcacatgagacaatccaatcggaaaatgcacatcaccaaataaatcacacataagatgagagaagaggtggaaatcacaaaataaaatcacctcacgtatgagatgagaggagaggtcgccggaccttat

SEQ ID NO: 53361 - DNA, 256 bp, Oryza sativa
acgtcgcacgggtggaggaggaagagaccgctctgttcctagctcacgcaagcatcgagctaccttcagcggtaccgggcgcagcggcttttcttcaccctgatgagccgaaaggactctgtcttcctctgtgaagggttcagcaacgacaaggctgatgggggggacctctacaccggcggcacccatcacaagagcggccgacgggaggtttttacccaggtggacttcagcggtcgaagtaccgctaagttct

SEQ ID NO: 53362 - DNA, 412 bp, Oryza sativa
  unsure (1)..(412): unsure at all n locations
cctcgcttctttttttcttgcatagaatttgttttattttgnaagacgtgggtctgtatgtcaataattgacgattgcgtaccctggctggtcctggacagggatttaatgcacattcagcttacaaattctggttcgagaatttctgggtgtgacagtagcctaccagagaagtgtaatggtgcgggcttaatgtctgatttatcagctgctctatgtccggtgcatgggtatagagtagtatttactaatataagcatggtgcttagattattaaatatcattaattgggcatatatgatgtggcacagtataggtgggccgctgatggtgacagctcagcaccgctattccttcacgttagtatatatttctaagacatattcatggggagggtacttcttcgtattta

SEQ ID NO: 53363 - DNA, 415 bp, Oryza sativa
agtaaaacagatggaaacgaggtccattttctgtaatattgaataactgatttctaaagaaatgaaagaaaattataaaatcaacatgctaaatttattttattgcagcaagattaaataaaacagtattgtaaaacttttgctggtaaatgagccattagtacagtaatagatgtacagtactaataacactggaataaatatttaatgagaaccattaaaagagattatgaagtgcatgtgccaatagtttggtttaattaaaagagaaagggaggagaacagttctacttttccaatatttttagagggcttctattgataaccatttggcataacctaaggtcaaagaggctctgataccaacttgttacgcccggaatttctatccaaaattccacacgcttacatgtgt

SEQ ID NO: 53364 - DNA, 372 bp, Oryza sativa
  unsure (1)..(372): unsure at all n locations
atgaaagacagttgtctccttagcttccattgcgtcaggtgcaccttccctttgtctactccactaattatctcatcaataagatccttaaagatggatttttcaatggccaaaacaattccttgccgttcactgtcggagctcttccactctttcatgccttgcattgcatcctctgctagcctgctatcttcctcttcagagcaccttatcattgaggaccgagactggatcatgtcaatctctgcacataagtccttgaaaagttgccacccacttaacttctttgactgaaagaactgcactgatgaattcacagtgtggttggcatccatntgctgggcgaggagttcatttgcaagatcaaatatg

SEQ ID NO: 53365 - DNA, 414 bp, Oryza sativa
agcttacttatccatttatagcctccaaatgtatgccaaaatctacattcattttcctccattggtatttgcgatagcatgggaagcataaaacaaatagaatggaatgagctgtacacaagaatagaactttatatcaacattgtcacattacggaaagatctctacacatgagcacaaaatagaggacaagctaccttgattcatcttgcccttcaacagagaagataaattccagcagatgtctaatcttctccttgcaggcatatggtgcctctgccagataactgcaatagatattttcaaattaaggaaaacgaatattctacaggagtttgttcttgaaatttcactattaaaagatcatttggtgttaacagcatatgtacaagatgtgcatacaagcatatggag

SEQ ID NO: 53366 - DNA, 432 bp, Oryza sativa
  unsure (1)..(432): unsure at all n locations
gacttttgtaaaccttatgaatctatctgttttcttcacactgccttgcttctctaaatactttgcaatggcctccaacagcttcaagtggaggtctccaatggcaagtcttcaacagaaataaacccttctttatggcattgacagcattatacatctgcttactctgaacaaattcctccatcagtatcttccacgtcttgtaattcggatgcgcacctttctctaacatgtggagatgaagcctctcagccttttcgatccatccattcctcacataagcaccaaggagaacatttgaaacccgcacatcgtgcttcttgctttctgcttcccagcttccaaaggttcactcggcccgaccaatgtcgccaacttntatcaagcataccatagcagacatgtagtttgcacagggattctacctggaac

SEQ ID NO: 53367 - DNA, 461 bp, Oryza sativa
actcagcttcaagtaccctgaaacttttcttttggaggctctttattcttctgtttattctggggctttggcaacccctctgattgcctcagaatcctcagttagccgattgaatacgaatgtcctagaatacttcttagctgtgagactcatgtccgaagcccttgtcgtattctatctgtttacagctgttaacatgctttcgataacttgactttttttgttgttgtatggatgtcaggagaattacactgctccccgaattgttctagctgcaacaggtgttgatcatgatgaattggtatctattgctgaaccacttctgtctgacatgcctggtgtaactggaccagcaaagccaaagtctacctatgttggtggggaatatagaagaactgctgattcatccgtaaggcatttataaagttatatatgccatctcatggcatttaggttctctc

SEQ ID NO: 53368 - DNA, 292 bp, Oryza sativa
cctgccattgctgggacggagagaactcatggtgaactcatcaatctccgagctgacctggatgctttgaagcagcatgttgaggagcagtggctgccatgggctaatgatcgtctatcatccgctggagtcatcggagaccagattctactagacatggagcgacacgggctaataatgttcgtctgacatctatgatacattctacaagacatggactgagtcacattctacaagacatggagtgacacgggctaataatgctcgtctcacctctctgatacattctaca

SEQ ID NO: 53369 - DNA, 422 bp, Oryza sativa
  unsure (1)..(422): unsure at all n locations
tactcaagcttatgcaactctaatgcaactttgtgatccttttttttattctttcctcatccgngttgcagaatgtgcctacaggaatgaaggcctcgggactgcaagatccggtggcgctggtgaacatctgcgggtggagccctaaccagggcgtgccgcagccagccatcatcctgaaccctatcttctcgcgccacagacggggcctttgccctgggcggccatattgggcggcggcaatgggattgagcaaccacactttaagtacagaactgaagccaatggaattgaacactactgaacaaggcaaggaacttggattcttggtcttttggccctatatgtgctatgcctcattcagatcaagtgcatgatctctttattgacacttgtaaatggtttatgttacgcaccctcac

SEQ ID NO: 53370 - DNA, 300 bp, Oryza sativa
  unsure (1)..(300): unsure at all n locations
agcttactatattatatataaagaaaattttgttctattagtgagatcctagccagagaagagcaacaggagctataaaaaaggaacttatggacttgaatcagagattgggttgacatccgaaacagagaggaaaagaggaagcaaacatatctagctcacgaaagaaagcttgcaactacgcgttatatattttattttcaactgcgctaataagggcacatccgctttctctgtatgtagattaaaaaaatacataccatatnttttcccttgctttgctatttgaatgcttacctc

SEQ ID NO: 53371 - DNA, 249 bp, Oryza sativa
  unsure (1)..(249): unsure at all n locations
ggattctactctccattgaggagctcactaagagccgggttttagctaaccctttcctcaagaggttgcactaagcactcctcctttcactaagaggtatctctacccttgcggaggcgagatcccacctttacaaacttctcccggccaaccacaagtaaatcggtggctcgggagtgacacctagccgtctaggagtcctcaacctncaagagtaaaagatgatgccaagaactcccggagatgatg

SEQ ID NO: 53372 - DNA, 405 bp, Oryza sativa
tattcaaagggccatccaacccatgaaaattccattttataaacacaacttaagtcaaggataaagggctcacactccaaaggatattcaccggacatacccacaagatgtcactcactcctattggacatgcccacttctctcttggtttaggacttgagaaaactcatcacacttggttagacaagcccacaaaatgcacctacatgcatatgaactaatatggcacaagatcatctacaagctcgcttcatagacccctcttaataatacgacgcctatctagcaaattcggtctacaccaaacaccaagaccggaaaaagactaagaaaacattcttagctacattatacctttgccttgcgccatccatcttgggggcaagcttgagccgagatcaacac

SEQ ID NO: 53373 - DNA, 439 bp, Oryza sativa
  unsure (1)..(439): unsure at all n locations
tatgaaggatccatgttaagagtgcaagcgctgttagttgttctacatttgntgctgattagggagacctaaggtctcatttccgtaaacccataatctgttaggaatcaaatagcctagcgattgatggcgaagaaaatcaagtgatcaaccaaagaggcatttgtttggactaagagtttcagatgtgtctcttcggatcaaaggcaacaatcgtcagtctagcttttgacgaactacttcaaggtttctctgaaagacagcacgcccaagcacctcattgccccagaagcatcctcaacacccggagtgaagagtacctggttgagaaaggtcgaaaggtgattaatggaagagatcggaaaagatgtttggttactgggaaaagaagtatgtcgaaaggtgattgataaacgataacgagaaccatgatttgtgt

SEQ ID NO: 53374 - DNA, 321 bp, Oryza sativa
ttagcgtgctgcccgcaaaaaaagcgtcgaccacgcgttgacggtcaaagcccgacatcaggccgggatccagtcccagcgcccggcaagcgacgaacaaataagccgcctgcatggaactgttgcgaaacgctgattcttccgcaagatgtgggctggaggtaaaccaactgcgggcatcaccgcggggaaacagaagtggtaaccggtcataaaattcactgtcccaagcgacgaaagcggcgaccggcgcggacacgggttattgcacaatgccgctggaaaagagccggcgcaaacaatctttttcttcttgccggc

SEQ ID NO: 53375 - DNA, 456 bp, Oryza sativa
  unsure (1)..(456): unsure at all n locations
agcatgcaagcttaacagcacgtgtgattaagacactttttaccttangacgtcgcctctaaattctgtaacattgtgtaatgttatgagtatggaaaaacaaaacagcaactcattcatgtatctgcatggaataactgagaattcgtgtgtgatctatccatgtttttgtttgttttttaacaaactttaaatgcggtatgttggatctggacttttccttaccaagcttataataagaaatccaccaaaccggacttttcttcttagtcacactcacacatgccactgtcgcgggaaataacacattaagagcagtaaagaaggataaccaccgcgaatctatacacagccaaaatacgcaggtaattggatattcaacgtggcatagtatggtataatattgaaaggatactacatttaaagatacatttcacactaggtataatactactg

SEQ ID NO: 53376 - DNA, 451 bp, Oryza sativa
  unsure (1)..(451): unsure at all n locations
ncttgctgaacttgagcagaatatattcatacacactttatataatagcagaggagaaaagactgaaatctgttctaactctacacacaggggaatatgatagggcctatactgcctcaagtttaaactcagtattatcaggaattatgatcaggaggggataacaatgaaaagaaaagaagctttttacagggcacgtaggactgtacaagtgaaactctgaatttaattggctgataaaaaaaaagggtatcactgcctaactctcttctctggactctggaagtgctttattcataatattcataaaggcaataacctcttgcaacagacaatggttgataggtataatgtgactgtgcaatttattcaactcgtgtcaaatcgctcgtatagttcgtttgatagcgcgaaagcttatgaaaggtgatccattaaaccacttgatgat

SEQ ID NO: 53377 - DNA, 440 bp, Oryza sativa
tcatttagaatatggtgacattttttattcctaaatgatactgtattgtttgctgcgatctttagtattggctaataatacccatgtaaaacgtagtaataccaattttatatttgtttgcattatgtttagaggcactggactactgtacttgatactatcactgttcctaactttgcagtgtaaaggcactttagtttgtatgcatatgcaactgctccaacacatcatgggcacagattagatgtgatacgaatctctgcgtctttttatctaaggttctatagcctctcacatgagaggggccctgccataatattgtgattggcaagttgcctgatttgcactggctactggggacaaaaggctcgcttatgggcggagattctctctgctagtgtcatgattgtgggatgatccaatcatatacctttcttttc

SEQ ID NO: 53378 - DNA, 382 bp, Oryza sativa
  unsure (1)..(382): unsure at all n locations
agcttgcccgcatgtacaccaaacacacatcttattggngttcagctntatgctttcggagcggaggttctcaaaagcttccgctagatctgaaagtaaagtttcttggttgcgcgtttttacaaccaagtcatcgacataagcctcaacattacgtcctatttggctacccaaagaaattcgagtagtacgttgaaaagtaggacctgcattctttaacccgaagggcattgatgtataacaatacgttcctacgggggtaatgaacgcagttttttcctcatcctccctagccatgcgaatctgatggtaaccagagtatgcatctagaaaacacaaaaggtcgctcctcgcagtggagtcgacgatctgatctatgcga

SEQ ID NO: 53379 - DNA, 482 bp, Oryza sativa
  unsure (1)..(482): unsure at all n locations
ctattacgtgacctattaatactcatgcttgtttgtcgctgccgcagcacgtttcgcttagcaccattctaggtacctgatatgtatgtatctcagtttttatctctcgcatagtttacattcacatgcagtccccgttatgcatggatgatttgccattttgtttcgtggtatctactaactgagcacatgatgaatcacctggaatctaaattttacattttttgttgacatgttgcttaatttagattgttctaggtatataacatttccttttgaatatattgattgcatatatccagagaacaaaatgtagcgttagtagtgaaactgcagtggtgtcccttttatgtggtcatttcaattctaatgtttggatatatagatttaattaatttcaaattgaagtatatgacccgaagaaaatcatattgcttgttntaataattccaggtcatttcaattctaatgtttggatatat

SEQ ID NO: 53380 - DNA, 131 bp, Oryza sativa
  unsure (1)..(131): unsure at all n locations
tacccccccccagaaggggacagaacctgaaacctaccccaatacaacgcaacacagaaaaaganacactatttagaggaacacacaacgggcacgaacaacacggggcaaccaagccgagaaaaaaaggc

SEQ ID NO: 53381 - DNA, 382 bp, Oryza sativa
aatgtttatcctttattttaaacttgaaaatgaacttagtaacttctcctgccgggtgccttggctggaacaacatactcccttttgcagcgcgcaagagctattatggtatatttctgggccatattgtggcccctacaggtgaaattgcattattttagcaagggtggtcctattatctaacaatttgctctttttagaggaatggtgcaaaactattttgagtgggaactaatgcattcctggtaagattggtataattgtgaattcagacaaaaaaacgacagtctattttccttattaataattggcattagcagaacaaaatgcttaaattctcacttgtttgggatgtgtgaaaggaatgttccttgttaaatat

SEQ ID NO: 53382 - DNA, 393 bp, Oryza sativa
tcatatcacgggtttgatttatcatccacagattgttattctaaaatacaattcaacaaacttatagaatgtacaagggatatgacaaaaaaatatattactaccagagttttttttttgtttgggaatacgcaaggcacgcatatttgtattaagagaaataaagagtatgtacaagcgaagccaaacaagaaaattaggagggggatgcgaaaacaggagaacaataaaaagcttaagcctattctcgcgacatcagaaggaaacgacctataacaagacctaaatggttagcaccggcagcacctcgtgtgccaaccgccagagagtcgcttccgtcatagctcgggctatctctgaccagggcctttgctgagagttgaagaccctatt

SEQ ID NO: 53383 - DNA, 426 bp, Oryza sativa
  unsure (1)..(426): unsure at all n locations
ntgatatgtggatagtaatgatgcatggngttatatttgttgctgttatttaggagaagacagttctcactgtcaacatacacgaggaaatatacaatatctactcgttccatcagagtagtaccctgtgttctgtggagtttgcactagagtactgctactttctagtggaaaagaagtcgaccaggccaatatatctggatgacttcagcaagctttcctattgtactacgcttgcagaaatggcaataactgaaattagaggtggatattgctatcaaaagtggtacgtgcctttgataactgattcgctcattcgtaactcatttgacgatgttgcatgtattctgcactagataacttgataacctgaagaaagtatatcgtttgtaaacttttcgatacctatcgatatgtgccgtctga

SEQ ID NO: 53384 - DNA, 398 bp, Oryza sativa
  unsure (1)..(398): unsure at all n locations
gcttttttttaatccaatatgttgtcactggcggaacgagaaaatcgattattgatgtcataatatgtctattggcgttatagaatgctaactatatgcacatcatgatgtatattatatggataagcagctttcctataggttataccgaaacttgtcggtggcgcctgacactagatccgttcctaatgtangtctcaaagcattctccgcttttcgtttttctccctaaaaagaacttattttgtactcgacgtggtttctatgcacttaatattaattttttgttcatgttctatttccaataatcgccccctaaagtcattttctcttgattcgtgatgactaaaatgcgtactacgactctactctgttttaccatagcagacacaagggac

SEQ ID NO: 53385 - DNA, 382 bp, Oryza sativa
  unsure (1)..(382): unsure at all n locations
tattgagaattgagagatcaccacattcacatgcaatattgctaggcacgccaagatgccaagattattaaaatgtagtctttacttagagttctaagcagctttaaaacaacatagagttctaagcacaatttttttggtggatgcacactatatcaacaagatgtaaaacacactctagtggtaatnctctcacaaagtagactcttgaatgactctatgtgctcttggatactccactaaggttctcangttgtatanggttccaagagacaaggacataagctatttangtggtgtttggattactgggactatatttagtccctgtatatcggatgtttgacgctaattagaagattaaatgtgactaatgacaaag

SEQ ID NO: 53386 - DNA, 427 bp, Oryza sativa
  unsure (1)..(427): unsure at all n locations
gcagatgcagctttttttaccacaatatatttgtgctggaatgtccatgacccgagcatgatggagcttcgaggtgctcgactgcatttgatcggcaacgcaacgcgtgcttgcttggggtgctggttttttcggctctacacgagtatagctagctagcgcacgcgtttctcaggaacggcgggtctggcaaccgcacctgatttcaccgtgaatctgggatgaagtcacctcgctgcttctgtaacagtgcttcatatggatcggacagacagggagacaatattactactaggtgcggtttcagttaaacgaagactttggattactctgngatgcactgttctgctcaattgagattaaaagagttattatcttctgatgacgacacatgacaccattctatcgtcaaactggggcccatgtt

SEQ ID NO: 53387 - DNA, 365 bp, Oryza sativa
  unsure (1)..(365): unsure at all n locations
tgtcaggcacttttgttgtacgacttgacggatgaatccgggctccataaatctcgccacctcctcgcggatgaaggctngacgttccggggcctgccgccgcactttctgccggaccaggcttgcgcccggccgcacgggaagacggtgcttaatcacctccctgcggaccccgggcatatccgctggtctccatgcgaagacgtcagcgtatgcccgcaggaaggagaccagcgcgtattcctatttgccatccagaagaccaccgatccgtgtggtcttggatgggccgtcgcacaaagcaccctacttgaccgggaccttgtcccatgtggacaatcgctgccttcgggcggtgtgggcgg

SEQ ID NO: 53388 - DNA, 390 bp, Oryza sativa
tgaacgcactcataatccatcccaaatattatatatctgaatgtgggcagcacaacgtagttgtgtgaacgaacagttcacgaaatgctaaattggttcaactagaattggattcactgctccttcatatgctaaagtacaagacactgattactctgcatggcatccctctaaaatgggctaaggtcaattaatagcgtctggcaccattacatagctaaagatcgagcaccttctccaaccacaatagaactaaccggtgaataacaaatagctcaactatactacattttggaacaatttagcatatgcgacataacatggctcaattattttcttaagtcccattaattgcagcatgtctctctacccgatgtcaagcagtaactg

SEQ ID NO: 53389 - DNA, 362 bp, Oryza sativa
gtcctttaactatagagcataatcaagccacatggaagttgtgcttctggtgaagccgggcatattctgctctaaccgacaacgcgaaagaatacctctttggatggcaatatcaaaagttgctcgttgtaggacctcgtgtgtaaggaagataaacgcatgcacgcgtcgcgcagattttggtgttttattggtcaggtgatgctcgcgcttgcgccacatgtttggcaggcaagttcagcgaactgtcgaattctgaaacaatcagggcagctgcccgacggcatccatgatccatccatctgaactaataaatcaggcacacaccaccattggccggagacccggagtcccgtcctcat

SEQ ID NO: 53390 - DNA, 450 bp, Oryza sativa
cgaaacttccggctcgtccagccacttcgcggcgacctttaattatgtggcacggcgactcggatataaacgtggtagtaggcaggctatcacaacaggaggcagatgctgcaggctgcaagcatacaagagtcggtcactgtcgtcgtcgtcgtcgttttctgctccggtttctgttctcccgttggggcagacattcaggtaaactcggatgtcaccggcgagttgatagtgcagagaaatctgaggacaatgagacgtggacattaatcataattgttttcttctgaaactgcaaggttcttcacggtgaagatatgagggggtgatgttacctggaaaaatcgaaggccgtccttattgtcgaagataaccaaatcatcaccatagatggcctgtagtgccagcagctgcagattcatatcaagttaattactagatagtatcatc

SEQ ID NO: 53391 - DNA, 171 bp, Oryza sativa
gacagttttttttgagcgggcaatgagaccccgagcactgaccccgggcctcgaatggagcctgccacggctggaccacgacatggaccacggcccaagggacccgggagcgtacccgggaggggctcacctgtacaagcggtgcacggcgcacgtaccatggccaaccgt

SEQ ID NO: 53392 - DNA, 448 bp, Oryza sativa
  unsure (1)..(448): unsure at all n locations
tatacttgcttgctcttcggtggtttcgattgagccatcttattatatgaaaagntcagngtagcacaggcaggaaacaaaatcatgggtcggaatctcagggtcgacttataccgcagcttacacaactttctttgggttatactttattattccacctccatccacagtaacagatgtgtcttctgttagagtcgacttttatacacgaatctaaaattatcgatggtaccctacctagatatcactattataattcaccttctcatctaatgcaagtcattgtgaggctacccgtgctctgactttctcatctctacgagctagtgtgaagctatcagtgctcttgggaaaggaggatagggatctttgattatcgagtgaatagcttgggttttcaattgtgctcctcgtgacgcttttcgatccatctcttttataaaaaaat

SEQ ID NO: 53393 - DNA, 429 bp, Oryza sativa
gcttagcaagcccacaatcagagagctcttctttatagttctgccatatatcaccatcagcatttgaactcaataatgagaaggttgcaggcacattaaatagcagaaagcttacagcatctagaagaatgttggaagccttaaagtcacggtagatgacttgtttttctgaggcatgcaggaacgcaagtcctcgagctgcaccaatggctatcttcagcctcagtttccatgatagtggaggacatccttctgaaaagagatgcggccagtttcatcatcagtatacctcttaatcaagtcaagtaactgcctcgagatattctcacatcatgcacttatatgtttgcagatttagaattttctactccagaagacacagtattgcagggggaaagagatacagtgtgcatgagccaggtaatcacc

SEQ ID NO: 53394 - DNA, 342 bp, Oryza sativa
gggatgccttggtgaatgcatcaatgtgcattcacagtagagacagagagaagcaaaaagctcaccagcctttgcagggacagcactccatcagccaaggccatgcttgacaatgtagttcctcagcctctggtcctcctcaggagaccacagccccttcctgtagttcatcttcggcttgtcgcaggaccggcaccccattgctctcttctttccttctctgaatatctcctcctgttcttcctcctgcaacctgtatgttggtcttgtctcaatatgagctgttgcagtagcagagatgtgccagtccttttagcaccatgtgaccccttgcatttaaag

SEQ ID NO: 53395 - DNA, 316 bp, Oryza sativa
aaagagagatttaggattaaggattgtagtacttgggaccaaattctttaagttctttacttggcacattgagcttacttccatgtaggatacaaatgcactggtcaaaatattgaggttgttcagatttttctcaactttgttcgtgccaaaccaattcactgacacgcgcttctgacttgatgagaaaacatacatttcatctggacacaacaaaatgttatatccggtatcattataaatggtaaaaggtgtatgcatattgcttttaccaagcactgaaaatcttctgcctttgaacacgaaaaaaaaacag

SEQ ID NO: 53396 - DNA, 337 bp, Oryza sativa
  unsure (1)..(337): unsure at all n locations
agctngaagagagctaagagagcagatttcttgatccttgggtggtgtttggtctgccagattttcccgacggtgacgacggcggcggcgaggccgaggtcgagctcgtagccgtgtggtccggccttgagcaccatgttctcttcccccatcacggcgaagttgcaccgctccatcctgctgccgtcggcggcgacatgctcatccacctcgagcagctttggcagctgcgccatgtaggaggagatgaggcgggcgttcttgccatgggcgaaggagcgcttcccgatctcggtgatggcgacgcgctgcaccagcttggccgcgcagagcaccc

SEQ ID NO: 53397 - DNA, 416 bp, Oryza sativa
  unsure (1)..(416): unsure at all n locations
gctagatagcgaccccagaattcttgaacaatttttcatggacaaattatcgctgcactttatggagacatttccatagagtatacatacatctacattattaaagatagctttctctggcaagctaaaagcgtgactgaacggaaaatatcaagacctacaaaaagagtctgaatggatgaacctgagtcttattacgataaggtgtagaaagaatagaatgaaggcttatacaagaaagtagattagtgacttatgtgccatggtaattacaacacataagcatgattattcataatttagagattataagttaaggttaagacaaagaatgccagagataaccaattattaatgcctgaacaataatagagatantttattcaagaccctgaactggtaagatggatctgaac

SEQ ID NO: 53398 - DNA, 248 bp, Oryza sativa
  unsure (1)..(248): unsure at all n locations
attcctggggagttatacatttgtgtattgataagaccgttcacaatttcttgaagctcgatctccccccccagatgaaccatatagccaagagaaaccatgaaccagaatagaagagcttgcctcacccatgagtaaatatttcatagtagcctcattagaccgcagatctctcttggtatatccagacaataggtaggaacataaactggaacattctggagctacaaagatagntattaaatccg

SEQ ID NO: 53399 - DNA, 448 bp, Oryza sativa
  unsure (1)..(448): unsure at all n locations
tatcccttttatcggtgttattgggtgagttgtatatttgtaatgaaactctaaaaaatagttttagcccaaattatgatttgatgattgtggatttgtaatggactgtgttgacacgaaatcgcggcacacgctaaaaaacacggntgccgaggctcccggtaaatttgggattatggtttgatgagaagttctaatcggggcctcacggaagttctagtatatgtgaagctatcggcgaattttggcatgattgaactgttccattgtactccctttttttagagaaattataatgttntataggtttttaatatatttatctatctgcttctatctatgnnttaaattatatgaattgtactagtagaaatgaataacagaacgtggatgctgcttctctgttcttctggtgtgctcctattacgttccctgccaaatgtcagct

SEQ ID NO: 53400 - DNA, 378 bp, Oryza sativa
tcgcctcgacggcgcgtggagcatgaaccattctgattgtgcgcgtgaacgaggtggcggctgcatttgccaagcgagatcacgcgcagccccaggtctttctccttgaatcggggagtcgccatggcgcctccgccgccaacgtggccctcgtactcgcgtttcctctgcacctcgccgccgattccatgccacctgaagcgcactgttatttcagaacactcggaaacactgggtgcggattgcggaaggaacggtgatgtgatgagaaggagccgtacctgtcgctgtgatcgccggcccaaagtgacgacgacgacgacgacgacgacgaccctactacttgaggacgctgcggagggggagaggtgtggaaaa

SEQ ID NO: 53401 - DNA, 287 bp, Oryza sativa
tttcataaaaaatagaccctgcggggtttgttagtagctggtcaaatatccactataaagttgcgtaatgcaaatcgataagctggctatactttattcttatatagtactggtttttaatattatcccaatggttgactttttctagatttttataccagtacgggtctttggaagctatatccttatcatactggaccaataaagcaaaacactatgtattagaccctaatccgctaattccagcatttaagaataaactaaatatgagatataacaaaaaaact

SEQ ID NO: 53402 - DNA, 403 bp, Oryza sativa
  unsure (1)..(403): unsure at all n locations
tatatgatcgaaaagatgataggataagnntcctgcatagtcattatcatacagagatctatcagcaacaagttgttgctaaaaaaaactaagattcaggtttctctaatctaaactatatcagtatataactttaaagtgctaattagatggattttttttctcagacacaagtactaattagatagatggacttgcgttctataattacactatataaatgaatcgaacaagacaaaaaaaaaacaatcatgggacataatccaaattatatatatcccatccacatttttcattcaccgatctatgcaagttctattcagcatgctacatgcaactataattcatatacgttaaacacatctagtttgaaatgtacccatatatccaagcgaccttatga

SEQ ID NO: 53403 - DNA, 436 bp, Oryza sativa
tctgagagtactcttgtttattatcgacgaggcgatattcataaagagtccggtcagaaagaggcacaagcgaaatgatcctgaaaatgaaagccacatattagagaacacttctaaaacacaatattttaaatcatcaatacgacagactgcatgccaaagtcgctcaaaacaatagccactgttactagcataaacgtagtatgcgtggtactttacgcagtacgaatagattattggagaaaaaaagatacaagacgaacaccaactagaaaatttccttcatcgtgattgtgtggcgaccaactatcatgtggggctgttcatttccacgtttgaatgaaactaacatgttgccggaaataccaaagttatatacagccttaacacaaaaattatccgaacttcatagaattattcacgtaactttaacacc

SEQ ID NO: 53404 - DNA, 390 bp, Oryza sativa
gcaagcttgatgtacttgcttcattttataatatattataagcgcggttgatctttttttctaactatttaggctttatgaagtttatagaacaatttagcaacaatataagtttgacgtaaaaaatagcaagtcctgataaatagacaaaaacacccgatgagatgatataagtagattagatcatgcaatgagtagaaatgcataattacatactactatactagcaatatacattcttgttcttattcccccatatatagtacgatgtaaaccatattattgatataacgtacggcatccaactatacctttcatacttttgtgcattcattgaacaaactgcaggcagttgatttcgatgccctatcgaagaagatgtacaacaat

SEQ ID NO: 53405 - DNA, 293 bp, Oryza sativa
gtggtccaggtatgtatatttctatctcaccgggcgcttttacgtgctgtacgcggtttcacagctacgtgtacacctctgtgccgaacgtgcctctcgacaccaatatagagtgcgcgacgcctcaccggcgggcgaggtcggtcgtccatcctaggaaagggtcagtgattacgcagaccctgtcaacttttgcttccgtgtttgtgatcaagtctcggaccaaacctgtgaagctgtcctgttgcgagcgccactgggtgtgctgagataccttgaataagtggaggggc

SEQ ID NO: 53406 - DNA, 347 bp, Oryza sativa
cttgtctggtggcaggagattattacaggagctggccatacaagcgctgttgattggagggctctaggtaattcttccaccaacaatatagttatcttgttagacagtccttgtagtctattcaattactgtgaataaataaagtattgacaattaaaaggtgaaaatagtttaaaacaccattatcatatcatgcatggctacattactgtatcaaacatggttatggctatgaggtggtggtaatgaatctatttgctgattcaaggattcttctatatgaaatgttgtatggttatacaccttttagaggaacaacgaggcaacggtcatttgctaatatcttg

SEQ ID NO: 53407 - DNA, 412 bp, Oryza sativa
tgttgagacgtgtggagaaaagattgatgtgttttattatcttctcacggcgatatctagcatagaggacttctaattctgtgaagatgcccaagtgagcacgcttcagtcctagaccactttccatgatggaaataagttcattgaaacatcctctgttctggtagtattcacttacttgctccaaatcatcaacctatacaaaaaagggtgtttgaaaatatctagataagataagacttgtactgaaatatgttttagttctaacaggtcgcttctgtatatatacctggacaataatattgagaccacatatctgtgctagccggaactcctctgcatcaacacaagcgaagcagacttccttgcattgtttagcactgttagcctcgctagcagtattcactgtacc

SEQ ID NO: 53408 - DNA, 314 bp, Oryza sativa
  unsure (1)..(314): unsure at all n locations
aacagctttattactttaccgtgcgagatggatcaatgcgagttattcgaatacatngaacagtttgggtgcaagtaattccgttgaccgtgcaagaacgtgcatggatctagagccagagcacccacctgcctcagattctttttcaggcaccggaagttgaccgtcccctcgctgtggtaatccatgacgtcgctgcgcagctccccgatggacctctcgagcttgtagcagtagagctctagctgctacaggcggtcgccgattccctcgagcgaatgcagcaatgccttcggtctgctattttatgcact

SEQ ID NO: 53409 - DNA, 413 bp, Oryza sativa
aagcttctgcctatatccattttttttttgtgtcatgacggattatttttgtactgactacgagttatagaaataagcggactagagccctacttgacctttaatgcaaagaaaagagggggcaacgcacaattgcacgatctgaaaggaacaaaatacagacatacaatgcacaggtctgatgaacacattaaactatccagacattgagatatttgggatacttgcgatgaacaattccaaagctgctagatcagttgcctttcttgtccggacgaaggttaatcttatctgctctgccctgactgctctattgatcttggagctgcaaacagatggatgtatttcagatcaaaagcacaactgctagccaaacgtacttcttaatgaagtacacacacatgctgtccaaa

SEQ ID NO: 53410 - DNA, 333 bp, Oryza sativa
actttattcaagcgggaattcgaaaaccttctcatcaaccaacttgctcagtgagtaacaaaaacaactatgttcaggctttttctcgtttgttctacctggacactgtgtctgagggtttcacagtacctaaaactgcacaccgaacatatcttaactggcaattcctccattcattttggtgttttcaaatgtgtgtcatcaaactcagtatctgaaactatattagtagatatttgttaaatgactcatgaattatatcttattacgatatatcaatagggttttctaaaggtgtaacatatctgatctctgagagagtgactcaaataa

SEQ ID NO: 53411 - DNA, 450 bp, Oryza sativa
ggaacaaataacagcatagtaattgccatgtgtttgttctatttttggaagtcaacccataattatgattaatacatctatagtatgatgtgagcactaaagtagccatgttaaagcgactacaaaacattttgacatactatgtaccccctcagttccacactataagatgttttggcctctccattcttcatctagattcactaacatccttatcaatttggacacatatgaatcacatacatggatccatgcatgaatctattcaaaacccaaaacatcttataatgagtactttgtagttcagtttcctagttatgttttttttttctactgcgcgtatccatttgtctggatcataagcattactactgtagaagagagcaatatctctatatgacttctgaagaaacattctccagacttttgcaggtgtgaaacagtcttaca

SEQ ID NO: 53412 - DNA, 132 bp, Oryza sativa
caaaacaggtcaccaccgccaaaggcaaggggaaaccacaaaaccaaaaaagccaccccgaaaagacccaaaaaaacaagcaaaccgcaaaaaagaacctcgggaaaccaagaacgaaaaaagctaaaccaa

SEQ ID NO: 53413 - DNA, 274 bp, Oryza sativa
agctgcacgcggatccacaaccacatgtacgccacggtgccacacattgctatagaccacaatagacgtgccacaaatccacacccgaccgaaaggctgcgtcgtcactctatggacgggccagcgacacgcacacgggctacaggtgctaccgcatgtctatccaaacatgaccacacctgtggacctgaaatgattggacacacaatgggtggtctgacacacctataccaaattgaggggcgacaatgtaatgcaacacccaaacattccc

SEQ ID NO: 53414 - DNA, 351 bp, Oryza sativa
  unsure (1)..(351): unsure at all n locations
agcttctctattgtatgtattagnatngatttgtatttagtgggatttcattaccttgcaaacaactaaaagttataatttgtattttcctcaatatttttcttttgaaatgcccttgaacagaaaaaggatgcccctgctggcgagaagccagagccagtgaggacccacctccgcaacatgatcattgtccctgagatgatcggaagcatcgtcggtgtctacaatggcaagaccttcaaccaggttgagattaagcctgagatgattggtcactaccttgcggagttctccatctcctacaagccggttaagcacggtaggcccggtattggtgccacccactcctct

SEQ ID NO: 53415 - DNA, 440 bp, Oryza sativa
  unsure (1)..(440): unsure at all n locations
ctcaagcttgtgtggtacgtcgcaggtgctcaacgtcgcctgatgtttccacccggggcgcgtcctaccgagcacaccgctgcacgaatggttctcgcggagtcgctcgacggcgaggataaccagctgatggtgaacagctaccactgcaccaccagggagggcgtgcaagcggcggctggcggagcggttcgtgccgatggcgatcgatctgcgctccggatgcgattctgccgccgcggcgccggcctcccgccacctccgcgcccatcgccgcggcggtcgagcggctgctgccgtagtcctcagcggtgcgctaggccgatgcgtggccaggagtgagttcgttgaagccaaccggctaaagctccactggcatgtgggttctatgtagntntaatattatttaatttttggttttagtgccacatcaagttaaa

SEQ ID NO: 53416 - DNA, 260 bp, Oryza sativa
atagctgtacgtataacgggcagctacagtttgaatagaacgtttaacgagctgatttatttgcttctgtttcatgcttgctaactgcaattcaaaaattcaactttggatttgcaacgagaaaatttgttgttggcccccaaccctaagcgtgtgctgctacaataatttgcagtcaatgcgcattggaagttattttcttgctgctcgttgatcgtgctctatgtttaattatcagagaagattagttatacacattc

SEQ ID NO: 53417 - DNA, 363 bp, Oryza sativa
  unsure (1)..(363): unsure at all n locations
accatagaatactcacgcttaagtcaactagttatcattgaaaaacgaacttgttgttgatttctgnatatatgnaccatggtgcatgctactcgattcggagcgatgtcaagcgcccctgttttgccgaccgtgccccgacgacgacgacgacccgccgccgccgccgccgggatgatgaccgaagccgcctcttcctcccattgccatgtggtggtgttgctgctgctgctgctgaggcggcagtggcggctagccgtacatgggctgtcccatcatcatcatcatgccgccggggtcggctcccggagcggagtactcggcgtagccgtcggcggtattgtcggtgttctgctgttgtgg

SEQ ID NO: 53418 - DNA, 323 bp, Oryza sativa
  unsure (1)..(323): unsure at all n locations
agcttgctccttgcttatggtccagaattttcattttattcttgatggccgaaatacgcttgcagaacagcttggtgttgctgcatcatattgctgatatatgaaaactgagcatcaacactttgctgctactcctgcgcctggatcacgtgtccttcgagggactgttgtcccatcgagaggaactcgagcaccaccatctggaggttggaggcacgccacttgagcctgctgagttggtgtgcccccancgcacctcatgaggcatctgccactaagaactgccggcactcggctaggcacatcctccagtgctatgacgt

SEQ ID NO: 53419 - DNA, 410 bp, Oryza sativa
  unsure (1)..(410): unsure at all n locations
tttgagagataatattattctacttcaaccgatattttcttatgcacggccatacataacatagaaatcacacgtggaaggggtgggcaattatctagagcagcaggtgctgtatcgaaactgattgcaaaagaaggtaaatcggccactttaagaataccatctggggagggccggttggtatcccaaaactgcttagcaacagtcggacaagtgggtaatggtggggtgaaccaaaaaagcttgggtagagccgcgtctaaatgttggctaggtaaacgccccgtagtaagaggggtagttatgaaccctgtggaccacccccatgggggcggngaaaggaaagcccccatttgtagaaaaaaactcacaaccccttggcgtattctgcgcttggaagaagaactatg

SEQ ID NO: 53420 - DNA, 285 bp, Oryza sativa
tgaacgggagctatgtctattctcgcggagctcattttttagccgcaacatcattctctccttgtcgagctcctcctacgcaatcttagtctcccgtatcaactttaccggctcgcctcccctggcatacatgccgacggtggaaacgaggccgctccttacaagctcttatgacagttgctgcgaacctactattccgacatgaccgatgaccctctcctcgaggcgtgaggacacttacgaggaagtctctctccctgttcggcgcgcagcatactacgtata

SEQ ID NO: 53421 - DNA, 283 bp, Oryza sativa
  unsure (1)..(283): unsure at all n locations
agcttcttataccagcattatcaatattgttattgtcggcctgccaagngtcacattgagcaaagataaattgaagtaaataacatcaaatcagatgattacaatatttgacagaagctaaccttgacatcacgatggatttgtccttgcctgtgaaggtactccaaagccttaagtgtttcctttagaatagagccaataacaggttcctcgaaaccatcaggatatgcaatcttcattatgtgcagacatgaaccctcagtcataaatggcattactaccc

SEQ ID NO: 53422 - DNA, 375 bp, Oryza sativa
  unsure (1)..(375): unsure at all n locations
gccgctgaagcttgcacggatggcatgtcagtttttttatatcaaccatgttttttcttaggtagggctttggatttcattggtcagatatatccttcgctatcaaaagggcattggctcatgctagatgcaatggattacttcactaagtgggccaaagccgtgccgctcgacaatattacttgtacgaaggtaattgactttattttgaagcatattattcatagattcggtattccttaaactttgatcgaggagcttcttttatgtctaaagaggtgaaaggttttgccgaactttatgatattaagttgntgagttcttttctctactacgctcgggctaatggataagccgagtcaagtaataaaacat

SEQ ID NO: 53423 - DNA, 436 bp, Oryza sativa
  unsure (1)..(436): unsure at all n locations
gtctgtcttcatcacagacctgtttatattcatttgcatgngaactggtactacaatgagcagatggacacatacaagcgtaatattaagaacacatagaatctatcaagatagaaacaacttatgggaattcacgttgaaccgaaatttctaccaatgatgcatcatgtccttccaagcactttcaatgaaactagatcactgccaggtatgaaacattctcaaagcacatctgatttttattctagtccaagtcttcaagacgcaccaaggaagtatcatcatctcttggtttgattaggcaaattatttagtccaaaagaaatcagaaattcctgtcatctgacattcgtatgatcaaaacaattacatgtattgtcccatgactgtttggacatgaaaatatcaatgcagattatactaagatagtgacatt

SEQ ID NO: 53424 - DNA, 415 bp, Oryza sativa
ctaagcttgagatgctcgttaactctctatttgccgagctatttcacttattttcacatccctcccgctctgggttgagctactcacactggcgatgcttggagcattggcgacgaagctattagccacagatctgactgatgggtatccacatgagaaaatctctgcatcggcattgcgagagactgaatcaacagcgaccatcacgccactgaggatagcgagctcattggccttgtagatgatggtattgtggcgctagaaaaagcatgcatctcggaccttcttgtccccgcgcttgatgtcaatctttctcctaaggatgcgtgccctacactacaccatctgctagctggtaactagctctgctagcctatgtatcatctatagagtgggtgcagtgattgacatgatg

SEQ ID NO: 53425 - DNA, 406 bp, Oryza sativa
  unsure (1)..(406): unsure at all n locations
tgcaagcttcttatgataatttgcctcgtttgttatttaccattgcccagttgaataattatacgtactatgacctacatacatttacatcgggtgatgatcgaacaaagagtgtgctgcaaagagcctttttctcattgggtgcttgcatcaatgctnttgtgcattgtcgacctgttctatgcatagatggaacttttatgacaggtaaataccgaggtcagatattgacagcaattgngtgtgatgggaacaaccaggttctacctatgcgctttgcatttgtagagagtgagaacactgaaagctggtactggttcctagagagagtgacatcgcagtggtgcgtatgaggccaacgtctgcctatcatgatcgcatgcggtatgttgcggctattgactac

SEQ ID NO: 53426 - DNA, 468 bp, Oryza sativa
ggacctattgaaactcagctatgacgcattcgtctatgtggttatgaggaacgtttattttttttgacgcattgagagcgctctcaacatctctaccaaaattatgatattcttatctctacaagtatgtcactcgcaaaaaaaaatgttataaccaccaaaccaatcaagaatatccaaatatgataaataggttcaaattggttactaataagataccctaattctatacaaaattgggcttttgctaaatatccaacgagggagtagcatctactttggtatcgaaattttccatttgagtatctatctgaaatgaattatccagttattgattccttaccaacaaagaatttatactagaggtgggcccaccttttgagttggtgagattattgcgcatgtctgaacgtataagagtttatagagtaacctcgaacgggtttggtcattctgtttggcctccca

SEQ ID NO: 53427 - DNA, 422 bp, Oryza sativa
  unsure (1)..(422): unsure at all n locations
gcttcttcttgaacacccacttgcaccctttatgtttacacccatattgtcgctctgtcacctcccaagtcccgttagcgataatggaatccatttcgctacagatagcctccttccagtagtctgcatcaggagatgcatatgcttctgaaattgacttaagagtgtcatccacgaggtacacagtgaaatcatcaccaaaagacttagccgtcctttgtctcttactccttcgaggagcttcactgacatcctcctcagagacaagttcatgtgtatgttcagtttgttctgatggtgtgattgaactgngaattatttcagagggttggttcgaaccactatgtgtatccttcattgggaaaaagctctcaaagaaggagcatcaccagactccataattgtaccaacatgcatgtctg

SEQ ID NO: 53428 - DNA, 454 bp, Oryza sativa
ttatcagattctattttccgaagttgcacctacaactattcattgtttaaatcctactcttatgggtaaatgctcaatatccaagtgggcttacaaatttgatcatgatcaattgctttggggattgtctcgcgtctcttgattagttggtatttatcccccccaatattgcaagtttcttacgtccaaacaaagtatttacttgttactaataaaaaatcaaaaagtttagcctacgttcttccttagatcccttcttttactccgatagtattgcagatcgcaatcgatgcaaagaaaatgaatgcatttccatactataataaaaagtaagtgtaataaatagagaattggatcatgtcacatgacttattccatttctactctatgggatcttacggagcctcttcatggatgacatggttgaggtatgatcatagaaaatattctcctc

SEQ ID NO: 53429 - DNA, 117 bp, Oryza sativa
ccttgaggagcatgacaaccgatggcatgtcttacctcatgaagagaatcagagaggtactaccttcgtcctaaaataaatgtagccgtgggaatccgtgtccaacgtttgaccgtt

SEQ ID NO: 53430 - DNA, 466 bp, Oryza sativa
aactcaagcttagcaatactgcaagtttagatatcatagagtaaatggtttattatttattctgagggatgatggtttactcacgcaccagtaatacaaagtttgtgaattgtgaaggaaatccacgaagaataaggattagggaacttgtctatcccctcaaccagtccctccctgtccctcgtcctattacccaaatgaacatcaccatagttgatacatagttgagaggtgagaacttgtgcgaatggaaatgttggtagttccatactaaagtacagatcaaaatccccattgcatcagttgcatgccaaagatcgatggcggtacttaaaccctaataatcctcctcgagcagactgaatcaccagacaagagagcgataatccacttaaattgccagtttagtagataactgccagctaggaacggagcacggctacaagaagccaaattcatgaagaaa

SEQ ID NO: 53431 - DNA, 277 bp, Oryza sativa
  unsure (1)..(277): unsure at all n locations
tggttcaantgtttggcagattttcaatccatgccatgccaggttcttcttacttgaggggtaaacaatttttgtcagatatactctcatggaataaaagggtaacaaccagtaagaactgatctggtgccttttatgttctaatgatactccttgtgtaagtttttcttttttagttaatgactcctcgtgtaagtgttcactgtgtatagactacggagtactcgtgtatatatatatatagcactgcaagaatatgtgcttaatcatgtttttg

SEQ ID NO: 53432 - DNA, 432 bp, Oryza sativa
actaagcttggcttatcttcttgctgactacagctgttttctgcggatgcaaagtctccagaaaatgcagcgggtgctgaccacccggcaatctgcaagggcgctgctcttagtcagtgactacttctcccggcttcgcgctctgaattctctctggatcgcacgtccacagcaatgagttaaaatcgatttgattttcactgatccgtagtgcgttacgttcttgatagctttgtgtttgctcacaagaatcgaagtaaatgttcatgtgattcctccatagctcgttgtgttgatgtataccaagaggaatttagaagggaaaaatcgatcttgttcatgtcttcttggctataataaagatccaacaatctatcaagtatggaaaaatcttcaccaaattcaaaaccattcaactctgggacaaagtac

SEQ ID NO: 53433 - DNA, 302 bp, Oryza sativa
catggcgcgctcccttgccactgcccgccatgcaggagagaggcttctgagatgctggggcggtgggacaagatgggttgtggaggacacaaaggacaagatagcaaagcttctggaggagtacgagagcggaggcgatgtatgagaagcttgaactgcatccgcgagctgcacatgccgttcttcaatcatgaggtggtcaagaaagcgcttgtcatggcaatggaaaagaagaacgacaggatcctcggtctgctgcacgagtgctttggtgaagggatcatcaccatcaaccacatgac

SEQ ID NO: 53434 - DNA, 403 bp, Oryza sativa
tgccacattgtactctcatgaataacaccctttcacgttgtgttccctttggtgattatcatttatcattatacaaaaacaggtgttatagaaaatgaagagtttaaccatggcgtcatcagtaattggaattagttagtattgtgtttcatctgagtagaatccattgattattgtaggcctgaagaaactgaacgagggggttcacttttataacaatttagagctctgtggagctcactttgattctctgaaaccatgcgcacacggtgatgaagacgattatgaataaagcagtataatggctcgtaaaccttgaataatcaatgtcaagccacttgcagctccacagactataaatggaacagagactgcgacattgttggtggttatgtaatatcgt

SEQ ID NO: 53435 - DNA, 374 bp, Oryza sativa
atcttaagtcacctgcggcatgcagctatgtccaatcggatatgtgtttttttttttcgtattcacatattttttattaccctctccctatttcaaaatagcagtatgtgaatggatatatgccatatgaacgtttcgattttatcgattcaccaaagaaggaagctcataacccgttatttgtaccaaccaaatgtgtctagccattacgcattcatgtgttttagtaactgctctatgtttaaaatagtaggatgtgaatagcttaaaatcatttgaaaacttaaaatgattttcgctcattacgcattacacattcatatgctcattacgcatttccttttctgagcatacgctctcgattcaaaaataaa

SEQ ID NO: 53436 - DNA, 426 bp, Oryza sativa
ctgcagcttttccctgacttgctgcatcaaaaactaaatcacaagcttctgttttataacgggtgggtctagcgagatttgtaatatgaatacctttacgctttgccgagatgtaaggggccattttaggattccatttcttaataccatgaccaaaatgaactcccgcttctatcatctctttcaaattgatgttccaatatcttcttgtcattttttccacacttccttttgattttttcttttttttcatcctacctttccattacgaaatttctttcttttcgaagattaagaaagagccgaaatagcttgaaataaataataattgttccgatggaaccttctacatggtataagcataaccttaatgaattaactaaacttctttttaaagtaaaataaaaatagaagatctaacctctt

SEQ ID NO: 53437 - DNA, 456 bp, Oryza sativa
  unsure (1)..(456): unsure at all n locations
tcttaattgttggtaccaacaaaagagcagcggatnttgtattatcagctgcaataagggctcgttgtcattatgttaataaaaagtggttcagtggtatgttaacgaattggtcgattactaaaactagactttctcaatttagagacttaagagcagaagaaaagatggaaaaattccaccatctcccaaaaagagatgtggcaatcttgaagagaaaattatctaccttgcaaagatatctcggcgggatcaaatatatgacgaggttgcctgacattgtgatcgtcctcgatcagcaaaaagagtatatagctcttcgggaatgtgccatattggggattcctactatttctttagccgatacaaattgtgacccagatctcgcgaatatatcgattccagccaacgatgacactatgacttcaattcgattgattcttaacacattagtat

SEQ ID NO: 53438 - DNA, 417 bp, Oryza sativa
  unsure (1)..(417): unsure at all n locations
gcatgcaagcttttgggatttagtgttgctcactgcttaagtgtaagaaatgtgcttactaagatcaaatgctctgcctacacatctgcataacttgtgaaatgagcttttaccattgacttgtgaaaaagccagttttatcactgcatgcagagatgaaatggaacatacaaacaatataggactcattatcttaggtgtgtttagttcacgccaaaattgaaagtttggttgaaattggaatgatgtgatggaaaagttggaagtttgtgtgtgtaggaaagttttgatgtgatggaaaagctggaagtttgtgtgtgtatgaaagttntgatgtgatgaaaaagttggatagtttaaaaaaaaagttttgaactaaacaagggctaaagcatcatgggattgacttgaacttac

SEQ ID NO: 53439 - DNA, 432 bp, Oryza sativa
attttgtttgcgtgcacagattgttttttctattcaaagacgaatttatattttgtatgatactatataactagtgtaggagcgaaagggcatgtatcctgctactgaggtcttaagttcgactccccatgggagcgaatttttcaagatttaacggcgttgtgctttcagtcgtaggcgacgtacccgtcgacagcgaggcgcctgtggtgacttcgtcaatctctccagaatttgccgacccagtcttcgaagatgctcataagggtagggtttgcgtgcgcgtgcattgtgagtgtcaacgttgtactgtgtaattctaataaaataactattgtaggagaatttgacataaatcttggacataaaacacatgaaataattaagaattttattcgatattctaataggacaatggattttcttatcggg

SEQ ID NO: 53440 - DNA, 411 bp, Oryza sativa
  unsure (1)..(411): unsure at all n locations
ctgcagctgacgctatgcttaccaaagtttcgtgtcgtgacatcttctcaccccacgagtccacaatagattgctctataacttactccctcagtctaaaaaaaccaagacctggtttagtttccaactttttctttaaactttcaacttttctatctcatcaaaactttcctatacacataaattttcaacttttccgtcacatcgtttcaatttcaatcaaacttctaattttgacgtaaactaaacacaccccaacttaaacttagaaggggtccctcctagtacaacgaatctggataacctaggagaggtcacgtgccttcctagggtggctttntttttttggacggagggagtacggagtccctcttagtgtaatatctcagtatctctacttcattaaccttt

SEQ ID NO: 53441 - DNA, 410 bp, Oryza sativa
  unsure (1)..(410): unsure at all n locations
tactcaagcttgacagggttntaatgtctacagagtgggaacagaaatttcctttatcttctgtggnggctcttaatagggatatctctgatcatacccctttaccgttgaatacaaattcttcatctctgagtaatgctcaacatagttttaagtttgaacttggttggcttttacgggatggttttgttgagatggggaaggaaatttggtctagtgttgacgaaggcaatactgctatggagagatggcaagcaaaaattcgactgttacgacagcatcttaagggctgtgcaaaacatagtagtggtttatataaaaaagaaaagagaaaaattctagataagttggatttgctagataaaaaggcagaaaattcccttatgagtcctgaagaattggatattaga

SEQ ID NO: 53442 - DNA, 335 bp, Oryza sativa
  unsure (1)..(335): unsure at all n locations
agcttgtttgttctgngaggcttacgcctcttcttgccgaccaattcttcgtggcgaatccctttggtgaatgcggcgatgataacgtcgtcggtgatgtcggagatcttgttacgttgttcggaaaatcgtcggatgtaatctcgaagggattctccggacttctgaataacgttgtagaggtcgtattgtgtgccgggacgctcgaaggtgccttggaagttggcgatgaagtggtcgcgtaattcagcccaagatccaattgtaccacggngcaatccatggagccaagatcgggcggaatccgctaaagccactggtaaatagttcgccat

SEQ ID NO: 53443 - DNA, 400 bp, Oryza sativa
  unsure (1)..(400): unsure at all n locations
tggggctactgtgcagaatttgaagaagcacaagctgttttatccccgccttcagctnggagctccccatgctcctagggcggcgccctcctctcatactggagctagctcaagctcagcacctcctccttcttctgggtataatacaaatgccttctttcatcctcagtatgcctactttggaatgcaaccaaacgagtacttcaacccggtacttggagctattaataccctaagtgaaagcattcaacgcttgtctaccgggcatgaagctttgcatgagaatgttcgtggcttgcgcaccaccattggagacttgaatgcttccgtggggagaatgcacactagagtgggtacattggattctcgagtgcaaatgttggagagcttccaagcattc

SEQ ID NO: 53444 - DNA, 366 bp, Oryza sativa
  unsure (1)..(366): unsure at all n locations
ctcttcgagacagggaagatgacatgcgnggtcaccttatccttgtcagctcgaggaggggaaaagcaccaaggatggatgacaggggacgtacatacggcctcagcggtgcctgttggcgccttccgatgctggcccattggagcggttacatgctggtaccgtggtggaggaagagctaggtccggggacgatggaggctggaaatagcaacggtgtgaacaacgaagggaaaagaaacggttatgatttttggggttgcatgaatgtcaaaaccacggacaatgtagaatcacacgactttgggtgctcgatgatttgattgcagcaggcctatactttggactaacctttacatgtcgtact

SEQ ID NO: 53445 - DNA, 449 bp, Oryza sativa
  unsure (1)..(449): unsure at all n locations
tatgacagtgcttttcaaggtctaagcgacactatattttttttttacttttaaaagcttgaccaaatcttgttctaaacatcagacgcttatgcccggagggagtgccaggtaaataataaactttaaacataacattgcaaaatcacctgcagcagccatgcctgaagcaacacctagtgcttctagttagccaatcaacatgaagcgtgattttggaagtgctagcatttctatagcgacaatgccagcatgatatcttataaaaagaatacagaaatatactataacatacctgcaaaaacagataagcatatgagcatctgcacaactattgtgaagaaatcatctatctattacttgctgcgcttcatattacaagtgcgtttaactttnttcctagtcagacttctgttagttcaccatagttatagaaacattcagtaaca

SEQ ID NO: 53446 - DNA, 191 bp, Oryza sativa
tggtgctaacggctatactcaaaaagaaggccaatatttctttcacacttactcacctggtgctagattgaccacaattcgtgtgctactttccctagcaacctcacatggtcttctcgttcatcaaatggacgttaagatagctttttttaatggagagctagatgaggagagctatatggatcaacccg

SEQ ID NO: 53447 - DNA, 348 bp, Oryza sativa
  unsure (1)..(348): unsure at all n locations
ctactgattcttgccatgcatatatatgtcattaacaattatcattctctactattaagtttatagagaatgagaattaccatcaactcagaccataataaaatcacaccatgttcaggaacatacttttgtatgaatgggccaagaacttataaatgacacaaccaattgtgccaaaatccaaaagactgcggagaagataagtccgggaggcccccagccacaatgngggctggttgtgcccgccactgattgggcagaacctggctcttcacttatgatgtggcggtacgagtgataccctaaacatctcataatccatttcgcctcctcacacttttcctccat

SEQ ID NO: 53448 - DNA, 450 bp, Oryza sativa
  unsure (1)..(450): unsure at all n locations
tgatcgattctccctctgaaacaagaagttcttgacttttatgtataagatcaatcacttggcgtccatccgatgcatcgactatggatatttcatatgcccccttttctttacgcagnatttttcttactacacctattgacgttgcattatagaccgtattgttactctntctaccatcaggatagatctgtccccttcctcgggttccccccacatatatgggatattttaagaaatgaacatctttcttcatagcagggtcgggggaaagaatgggaaagacgatttcactatatttcttaccgggaacagggcctatcacaagaatattntttttattgggacgataagtctgaacagagagaattcctatcttttctttcaactcaggagaaatacggtcgggcggcgctaattcgaatccctctggctaaataagaatagcac

SEQ ID NO: 53449 - DNA, 387 bp, Oryza sativa
  unsure (1)..(387): unsure at all n locations
agcttgncacctactctctccctccgnctttatatttctaatctagacgtggatatgatattttctaataatacaaatatatatatatatatatatatatatgtccagattcgcagtactaagatgtgtcatatcggtattaagttgtttttttagggacggagggagtagctaccaccgccggctgggacggtagggttgttcgtcctccggcgtcgccgtacacaccaaggggagaaagactgtatgcccggctggtcttgtcgacctccgggctgagttctggagtcaaggtttcgacacgcgaaacccaacaaagaattagtatataattaattattaattaggtattagcttattttcttagaaattcgataatattttttt
